United States Patent Application Publication US 2004/0123343 A1 - sequence listing, part 51

SEQ ID NO: 186510 - protein, 539 aa, Oryza sativa
  Clone ID: PAT_MRT4530_83303C.1.pep
MLEVSTLRSPKADQRAGVGGHHVVGFVPAPPSPADIADEVDAFIVDDSCLLEYIDFSCCDVPFFHADDGDILPDLEVDPTELLAEFASSPDDEPPPTTSAPGPGEPAAAAGAKEDVKEDGAAAAAAAAAADYDGSPPPPRGKKKKDDEERSSSLPEEKDAKNGGGDEVLSAVTTEDSSAGAAKSCSPSAEGHSKRKPSSSSSSAAAGKNSHGKRKVKVDWTPELHRRFVQAVEQLGIDKAVPSRILELMGIECLTRHNIASHLQKYRSHRKHLMAREAEAASWTQKRQMYTAAAAAAAVAAGGGPRKDAAAATAAVAPWVMPTIGFPPPHAAAMVPPPPHPPPFCRPPLHVWGHPTAGVEPTTAAAPPPPSPHAQPPLLPVWPRHLAPPPPPLPAAWAHGHQPAPVDPAAYWQQQYNAARKWGPQAVTPGTPCMPPPLPPAAMLQRFPVPPVPGMVPHPMYRPIPPPSPPQGNKLAALQLQLDAHPSKESIDAAIGDVLVKPWLPLPLGLKPPSLDSVMSELHKQGIPKVPPAASGAAG

SEQ ID NO: 186511 - protein, 136 aa, Oryza sativa
  Clone ID: PAT_MRT4530_83304C.1.pep
MARPQHNDWSSGLFACFNDCEVCCLTTVCPCITFGRSAEIVSRGERTCCAAGVMCVLLGFFAHCHCLYSCCYRGKMRDSFHLPEDPCCDCCVHALCLQCALCQEYRHLKSLGYKPSLGWLGNNQHVPPKHNPPMRR

SEQ ID NO: 186512 - protein, 208 aa, Oryza sativa
  Clone ID: PAT_MRT4530_83305C.1.pep
EIFRSRLPAMASGLVVAATDPLRAFLASAAASHDLPADLRDLASSLAARSAVPYRSLRDIWCAASPGARPPLRRLLHGADFLLSSPKPRDKSDELKARLDKLREMQERKEYAELVRDVAPPAKEDSPELFSSYKDQIGFGLHVVLIMFTGYLVGFVAFRALFNNSPVMNAAGGILGLVGGMLMETVLFIIRSSSKELATSVPRPKKVQ

SEQ ID NO: 186513 - protein, 260 aa, Oryza sativa
  Clone ID: PAT_MRT4530_83306C.1.pep
MSSILRSIQLRNSIWSSFPVRFLKQQAGLSTVELLDPRSCGKRHFTTQVQEHGKEVAAAATILVFDLETTGYFHKDHRIVEFALCDLSGGKNSTFETLVNPERTVPDYVEHLIKIGTDLVCRPGIPRFSDVIPLLLAFVRSRQAPGKPVLWVAHNAKQFDARFLAQEFDRCSAPLPADWLFFDTLLLAKKMVKAEGKKRRTSLEALREHYGIVSHDDAHRAMRDVMILSQVFQKMTFDLKLTNEELINEAMKASEFSKIS

SEQ ID NO: 186514 - protein, 201 aa, Oryza sativa
  Clone ID: PAT_MRT4530_83307C.1.pep
HAHRTSISSPSSAPPLPHLARIAAPPRPHAPASAPHRPHTSIHAPHQSHASATLPPLRSPSPSPPPTPRVASHPPITTPTFRNGTHYAHTRASPFLQSAAFQLTNNQVWQQLALVAQQSHYHDINIRSRPYAARTPTHLPATSPRRLLLTSSNSATLLGPPTPPTPPGCASQPCHPHTRIYPSVLCVHPATTHHPLGRCSR

SEQ ID NO: 186515 - protein, 46 aa, Oryza sativa
  unsure (1)..(46): unsure at all Xaa locations
  Clone ID: PAT_MRT4530_83308C.1.pep
LSFIKGPKVVGDNFSFLFXTWGKIGGAKLPLFFKPTTRLWAPGIPY

SEQ ID NO: 186516 - protein, 141 aa, Oryza sativa
  Clone ID: PAT_MRT4530_83309C.1.pep
MALLGASSKRVEKAKANIIIRKMNSKFKLRMFCRTTGAIALCSSKKQLKLSQPNADELGYADSVSLEDIGGVRNEEGRNSVAIAVLRGSTDSILDDLGRAVDDGVNTYKSMCRDSRIIPGAAATEIELAKRLKEFSLKETG

SEQ ID NO: 186517 - protein, 72 aa, Oryza sativa
  unsure (1)..(72): unsure at all Xaa locations
  Clone ID: PAT_MRT4530_8330C.1.pep
AIKCKLSRKRTYCGCGIMHKCANQNLKCWNNTSIFMLQHETMMLRGLISGLCVEHVSRIHTRESVITSIXCK

SEQ ID NO: 186518 - protein, 65 aa, Oryza sativa
  Clone ID: PAT_MRT4530_83310C.1.pep
VHIKKKNSLVCVKIVLFFKKNVLIFSSTRLSYSSNTRALKKNTNRCQVMRNCSRNSVSRKEPFAK

SEQ ID NO: 186519 - protein, 77 aa, Oryza sativa
  unsure (1)..(77): unsure at all Xaa locations
  Clone ID: PAT_MRT4530_83311C.1.pep
KVQCDIYQDCQVRRIFDDISINIPNIRLSQSISYILCHSLREDNKEFPYGPNRSTTIGKWLCISCFGRVDGRVXGRV

SEQ ID NO: 186520 - protein, 49 aa, Oryza sativa
  Clone ID: PAT_MRT4530_83312C.1.pep
NYRWPCRPPSTTRPRPGRAWAEACRVGSARPTHASPRSNRHHCSPRKPP

SEQ ID NO: 186521 - protein, 188 aa, Oryza sativa
  unsure (1)..(188): unsure at all Xaa locations
  Clone ID: PAT_MRT4530_83313C.1.pep
GCIWLALPPLPAISLASTIEXSSHWYKLAYAEAKGRVRRGHRVWQIGFGLGFRCNITVWRALRDVPPVYAFVTAAWPMALLGGSFAAGVARRYRRPPRCLPIHPMPPGRLQAATVASARVVAAGCWPRRRAPAASRSGAHARVFTSDARQKRPPVRHVSMADGVVSIGKYPRLWDVFPQNFTFVVSLS

SEQ ID NO: 186522 - protein, 108 aa, Oryza sativa
  unsure (1)..(108): unsure at all Xaa locations
  Clone ID: PAT_MRT4530_83314C.1.pep
XXAXXGLYFSQAKRXXXVPXXRXWXQINXXVDXKTKCNSXSPISINRGVVLDEXRPRFIFQHRQSIPVXXXSAAHGIPMASKRILLVFGPCGGSGSDDTVAVTPTSLS

SEQ ID NO: 186523 - protein, 173 aa, Oryza sativa
  unsure (1)..(173): unsure at all Xaa locations
  Clone ID: PAT_MRT4530_83315C.1.pep
ADPASRKLFVHGLGWGAGADDLRSAFSRFGELEDCRVISLPRVLPLRPPSPRTLAPTPTPXSGAANNAGSASSSQPDNMQRKIFVGNVHADVDVDRLYEYFSQFGEIEEGPLGFDKTTGKPKGFALFVYKSVESARXALEEPTRNFDGKMLNAQKAIHGRTKNTPGMNADCNP

SEQ ID NO: 186524 - protein, 515 aa, Oryza sativa
  Clone ID: PAT_MRT4530_83316C.1.pep
MAPKKRKADPAESPVASSEAGAGTNHHQETPSSELKPRGTIYFPITDDPPEPSAEGGAEGEDGAGGDDDEEDIAKLLEPLSREQLVALLRTAAETTPATMAAVRRAAEADPASRKLFVHGLGWGAGADDLRSAFSRFGELEDCRVISDKQSGRSKGYGFVLFRSRRSALRALRRPQLQIGGRLAFCHLAASGPAPPTSQSQNPSSNTNANSGAANNAGSASSSQPDNMQRKIFVGNVHADVDVDRLYEYFSQFGEIEEGPLGFDKTTGKPKGFALFVYKSVESARRALEEPTRNFDGKMLNVQKAIDGRTKNTPGMNANSNPSGTAASAAAAAAAAQMTAPATAAITPYDASAYGATAVPDLGYAQQAAMLGLGAQQQAFAQPNAAMLAMMAAAMQNPAMLATLNPAFAAAALGAGGQQVHAAGIPGFGAQGFGTQGFAAGAAAFPNAAGVQAPPGFQGPPGFQTSAGFQVGQAASQAGTAAAAAAGAAGYQAAAAGQGQVPGTQIGGAGFQGGF

SEQ ID NO: 186525 - protein, 100 aa, Oryza sativa
  Clone ID: PAT_MRT4530_83317C.1.pep
SMQHLLFQYRIEDQCQMCRISVNNITDVVPFNSICSIASIFSQSTNIKLPVPFYEKFMLKQYNCNRNRFNYNLQAARIAIYLTNYGNKLILAYMMYEPLS

SEQ ID NO: 186526 - protein, 155 aa, Oryza sativa
  Clone ID: PAT_MRT4530_83318C.1.pep
MWPPTAALVHDGIEIHLFFCCLCLPPLSSLRVPQQMWRDDEEILAIIGGNNVVLLQDFFMYELVVDVEWAGIAGESFSLPLAKYDDGGGRAEAGHEEAARGGVRAKRKLNQRWLSLSANQSGGGHFPSWRSNFVASSNAFAQAADRLMFVVNLKQ

SEQ ID NO: 186527 - protein, 119 aa, Oryza sativa
  Clone ID: PAT_MRT4530_83319C.1.pep
LVFLFFGVLTLRTFLENFVICFVKKKKQTRRSGLPPFFHSGLKTKLHCQITREKKGKEKRGGGYLTPGPSKPKGRGLGTKNGVIGIRGGRTAPAQYPGAPRGYGPGPCGWTPWGGFPRA

SEQ ID NO: 186528 - protein, 142 aa, Oryza sativa
  unsure (1)..(142): unsure at all Xaa locations
  Clone ID: PAT_MRT4530_8331C.1.pep
MAGNHISLEEIAEHESVITKEFRSEAEGYKFYNDYAWSKGFSIRKDNVTYNGDGKVVWRHSCCSYEGYRLLKYFERTDQIREPRXLTRCGCEAKLQIQLNEETGIWFVKDFNDGHVHPLAKHDQVAFLRSHRNLSDAQKAEV

SEQ ID NO: 186529 - protein, 252 aa, Oryza sativa
  unsure (1)..(252): unsure at all Xaa locations
  Clone ID: PAT_MRT4530_83320C.1.pep
MGGFCCCLCTDDFEEYAHPNNPIYRQGVCLRNFFHNFFGGYTATFQRLESRPSNPAQGAAPLASTNPSTNITDNSLSETYHLVSRPPPYDTDPRYARVQREGLVSRREKSINLTQEESLALRRNGSSSGIEHLAAQKKWSSTEPEGEYKVHRSESTKSLSAKSYNSSFAVVTSEDEDVCPTCLEEYTPDNPKIIAKCSHHYHLSCIYEWMERSDTCPICGKEMEFCETPXEISRWLYQWKAKDLQCDMLESL

SEQ ID NO: 186530 - protein, 76 aa, Oryza sativa
  unsure (1)..(76): unsure at all Xaa locations
  Clone ID: PAT_MRT4530_83321C.1.pep
RSXKLWVDPSKKCQPIQRTGTRHXKSNRIGPLEXAPSQFIXKNWXSHLMWGFLMHEVGFQRPDXRKPPMAKVVFLV

SEQ ID NO: 186531 - protein, 76 aa, Oryza sativa
  unsure (1)..(76): unsure at all Xaa locations
  Clone ID: PAT_MRT4530_83322C.1.pep
XTWSDAIILSNHLEHTFTCITYRLITCIRTHTLYLLTDIHIWITANIDRSEVQSYSLTHICAYGRTYFYITGLIFD

SEQ ID NO: 186532 - protein, 62 aa, Oryza sativa
  Clone ID: PAT_MRT4530_83323C.1.pep
SVVNACAAAVPGSMPPTTEERSTPVPVPPQDRSGSETSTPSRNFLVVLLALTAAAAADLIQL

SEQ ID NO: 186533 - protein, 55 aa, Oryza sativa
  Clone ID: PAT_MRT4530_83324C.1.pep
TSLWRGSFLRGGAAKMPTILTPSEDTTENQLPRLRFHCIIYPECTYPSGSNSLCC

SEQ ID NO: 186534 - protein, 96 aa, Oryza sativa
  Clone ID: PAT_MRT4530_83325C.1.pep
KWGRPQGPGRNSGGEPGGGANPIFRGSPPGGKGSILGGFPKNGLEKANRVSKKKAPGVQHNKGDGVGGFPPIQKKGAQGVYNGGKSFWGGGGEKKN

SEQ ID NO: 186535 - protein, 38 aa, Oryza sativa
  Clone ID: PAT_MRT4530_83326C.1.pep
TTDDRTRRMCIRACLICTTLGTMVHPVPITTLRLLNEF

SEQ ID NO: 186536 - protein, 402 aa, Oryza sativa
  Clone ID: PAT_MRT4530_83327C.1.pep
MAFHLQPHSLTQAKLAIDRSSSMPPSMATARVASPSTDRKRKASSEDDIDAAAAAAALTSPLAPARGRKRFVGVRQRPSGRWVAEIKDTIQKIRVWLGTFDTAEEAARAYDEAACLLRGANTRTNFWPRPSPPPAAVAPPETTTTPALPSKVTNLLLLRLKARNQQVVDAGAAAPQEAALLQLQQQTPASCQEVFVRSHGEEYGFHVDDFLSDACSNEQYSGDSSLGLDDDDGEVEDEEEEELDFQFMDVAPGASSAAAEAGLGGEGALCSPFEMVAAELGGAVDVAAHDAMRQMDYERKISASLYALTGVSECLRIRAAAGATAAARDHLTGLREACRKKQKFAAAAAAPPQQQEPSPPPQQPETPASSGGGMSETASGGGGDGDVLMWSSLDLAPICHMA

SEQ ID NO: 186537 - protein, 108 aa, Oryza sativa
  Clone ID: PAT_MRT4530_83328C.1.pep
MELASGISATYAIAIGPNKVGGEDPYVVTQQPPASICAPRPAAGDAAAVCHQRGASSTRTTRWGNGWERRGREGSPATALLHLCRAAPSAGVTGSPPPASNVALPSPA

SEQ ID NO: 186538 - protein, 104 aa, Oryza sativa
  unsure (1)..(104): unsure at all Xaa locations
  Clone ID: PAT_MRT4530_83329C.1.pep
GQHTDEDGGKGLAYNISHDQQDITRGKGLGDSLFQAPTGDGTHXAVLSSSGTLTRGLEPSNFANTLGGXYIGPCFMDKLFISIXKNLNVPFPTSKVPLHSWVIW

SEQ ID NO: 186539 - protein, 109 aa, Oryza sativa
  Clone ID: PAT_MRT4530_8332C.1.pep
CVWRNLKLKVQRLALATWRNCTAEISREPIELLEMDMVVGFICMMMLKTLFILSQHRASDRVKFESVFVEQRYLLLYCPSTGHLIGFRFESVFVEQRYLLTVSTLFHRN

SEQ ID NO: 186540 - protein, 171 aa, Oryza sativa
  Clone ID: PAT_MRT4530_83330C.1.pep
MARAARNGVRERRVGGTRGAGRGAARWEQEAAAIAVAVARGQCAAAGSAASRRRWNRIGRRFAAGSGGRGASESRAAPVPVTGLGNLPRGKVLVMDTGLNTVVCTAPNGNSCHKNDTRCYRGDTRQASVRHANVTRAPSSPQSGTAAPSSPRPATVTATAELRPELHCRPL

SEQ ID NO: 186541 - protein, 118 aa, Oryza sativa
  Clone ID: PAT_MRT4530_83331C.1.pep
NGSFIYILKQKGKPLLFFQTPPGGGWFIIRGGGEASIYSPSEPGAPPVFICKNQSWPKGRNRQGAGQIPSLPPLDYKKKKKKGGFSIQKEKNLPPSARETPNPLPWGNKKRDALLNSV

SEQ ID NO: 186542 - protein, 240 aa, Oryza sativa
  unsure (1)..(240): unsure at all Xaa locations
  Clone ID: PAT_MRT4530_83332C.1.pep
MGMEELVGASGGEAEAGADERRRPVAEAXVRRGADEWRRSVADEAATGRGGEERRGEARMSDGGWPRKRSRTRQRPVVEARRGEAQTSGGRSRRRRGAXSNGGRLRRRTRTSDGGQSQTRRRPVVEARQGGGSRRRRTDGGAAAELSGRLWELTTSGGGRSXGGGCVRGDGRSRRRRSTRMRRRRCGGAEREATGADAMGSVEVGWIGPADFGGPFHPGSERNIPLQGPSRPTHLSTKHS

SEQ ID NO: 186543 - protein, 41 aa, Oryza sativa
  unsure (1)..(41): unsure at all Xaa locations
  Clone ID: PAT_MRT4530_83333C.1.pep
GQKKVFWICVGLLXMAYXVAILMGATSACLWSKYATVGHAI

SEQ ID NO: 186544 - protein, 228 aa, Oryza sativa
  unsure (1)..(228): unsure at all Xaa locations
  Clone ID: PAT_MRT4530_83334C.1.pep
EWGRRSSSARAEEMRRRARTSSGGQSRRQGEARRGRVAAVGRGRGGDWSWRQGEARRGADERRRSAAEAVADKAATGRGGEAQTSGDWSRRRRGADEQWRPVADKATASRGGERGRATEVSRRRGGGRSWRRGKVEGAGEGGRSGAGGGTGGRGGAAAELSGRLWELTTSGGGRSXEAVADEMTAGRGGGGRRGXAAAEPSGRLRXGDAVGSVEVGWIGPADFGGPFH

SEQ ID NO: 186545 - protein, 139 aa, Oryza sativa
  Clone ID: PAT_MRT4530_83335C.1.pep
SSASTSASATGRHLVRDRLRDRPPPLVVSSHSLPLSSAVAPPRLPVPPPAPFPPPAPLRPPSPAPSTSPRLHDRAPPCLRLTTVARPRSPPRLAVALSATGRPCSSAPRRLRDRPPLVCASPPRPVAALSETSRDDRRR

SEQ ID NO: 186546 - protein, 42 aa, Oryza sativa
  Clone ID: PAT_MRT4530_83336C.1.pep
AFPRDSPLSVDLSTAILELSENGDLQRIHDKWLASDMSSMSQ

SEQ ID NO: 186547 - protein, 184 aa, Oryza sativa
  unsure (1)..(184): unsure at all Xaa locations
  Clone ID: PAT_MRT4530_83337C.1.pep
EWGWRSSSARAEERRRRARMSGGGRSRRRGEARRGRVAAVGRGRGGXGRGGEERRGEARMSDGGWPRKRSRTRQRPVVEARRGEAQTSGGRSRRRRGADEQRRPVAEANADERRRSVADEATTGRGGEARWRKQAEENGAAPGEGXGAGGGTGARGGAAAELSGRLWELTTSGGGRSRRRLRTR

SEQ ID NO: 186548 - protein, 845 aa, Oryza sativa
  unsure (1)..(845): unsure at all Xaa locations
  Clone ID: PAT_MRT4530_83338C.1.pep
IKPKISESVQPIVQEFQELFEEPTXGLPPPRACDHHIPLIEGDKPVNLRPYRHKPALKNEFEKQVAEXRLCIDYRQLNAITIKGKYPVPIIEELLGELAGSQRFSKLDLRERHHQIRMAEGEEPKIAFQTHSGHYEYKVISFGVXPTTFFSALVFFDDILIYSPXLSAHLTHLRIVLQLLANNNRKVRLSKCSFAQQEVAYLGHIIGPKGVSTDPKKIQDVVNWAIPTSVKKLRGFLGLAGYYRKFVRGFGVISXPLTELLRKGIPYKWTKETEXTFQHLKQALVSAPALALPDFCKQFTVETDASELGIGAVLSQETHPMAFLSRALGPKSRGLSTYGKEYMTILLAIEHXRTYLQHGEFLILTDHHSLKHLSEQRLHTPWQQKAYTKLMGLQYRICYRKGVSNSTADTLSRKEHDDKAELVSISKCVTLWLQEVMQSYEKDAHATHLAVDLIIDPSAKLGFTLXQGILKYENKIWLGQDAELQHKXIDALHATPIGGHSGFPTTYRRIKGMFAXSSMKKMIQSRLQTCQICLXAKQDKAKYPVLLQPLPVHEGEWQTISLDFIEGLPKSNHYKYILVVVYKISNYAHFIPLDHPFTASSVAIQFLQHVYKFHGLPKIIIXDRDKIFTSQFWEQLFIRFGTKLHLSSSYHPQTDGQTERVNXCLKIYLRCFVHATPTKWSSXLYLVELWYNNTYHSTLGKTPFKVLYGYSPSHFGINMNDRVVPALNHGLKQRGLMQQLLQHHLNRAQQHMKHLAECHAETWNYSSGHHTILTSIRSTTQASTGTVEMILEVTFFSNFHFIQKKNLPIAQGSGPIVSTCIHSSNHNPVAKEVLPRRFDIDGWAL

SEQ ID NO: 186549 - protein, 167 aa, Oryza sativa
  Clone ID: PAT_MRT4530_83339C.1.pep
SFLRCLAAAKKTACVPTSCEEGGCGAWDPPLRGRGRGRILTSGSVTAVKLIGRAAGSGEVSTTASLQMAARLAVDNDSLSVNNQSSATRWQIRRRWVPYAAAPAGGSLVVRGEDFLGGGDCAPRIGGGLSAGARFSVRGEADTVSDGRGLQQRRRPNRLPKVIGNVA

SEQ ID NO: 186550 - protein, 195 aa, Oryza sativa
  unsure (1)..(195): unsure at all Xaa locations
  Clone ID: PAT_MRT4530_8333C.1.pep
DNNQHTSYGAYGLQFMGSMRSAFSQSIWKAWAPPKCNFFSWLATQNRLWTTDRLEKRGWQNQKICPLCCIINRYAAXINESAIHLLAHCRVTKRVWADXAGWTPAELQMSKXSDCDSVEQWWNLVVDTPNTPRFPLRALVILVSWEVWCEXNARIFRNTASTPASIIAKIKEEARAXVKAGASRLQEFGILGDIT

SEQ ID NO: 186551 - protein, 1862 aa, Oryza sativa
  Clone ID: PAT_MRT4530_83340C.1.pep
MVRRASVAACLTCPLCGRLLRDATTISECLHTSYGIFNCVLFRVDHSMQFVRSRIFPFKRRKVENPEIICPVASPVKRKERSLSSLTIPAPQVSIQKCLTKRRTKASCLRNFPLHSTSRGSKDTSKKLGGWRPLGCQLKLGKDKKSLKSSVKDTNRTKSKSGDTDDGAPASKAKAREPFTRYGRAAKRTGRKKLLMLKNKKKRFKAKQPSKKRRFRALWFYLLAAFDQRGVPTLPQLPAKYLRIKDVDLPASIIQKYLAQKLNLSSETEVEVLCGGKVVNQGMTLHDLADCWLEKGPKSRMRSSFCLCLGCLWGFVADRGVVGRADRGRVMRGAMAKSPRSVVTTGTKRRRAKVHKEDEPVENENLESEFDVSKKESNGATEPGNEPVASKRPKRAAACSNFKEKSLDLSEKDSIITIKESRVEEKEIEAVNLTRTGPEDGQPCRKIIDFILHDGDGNLQPFEMSEVDDIFITALIMPLDDDLEKDRGKGICCSGFGRIENWAISGYDEGAAVIWVSTETSDYKCVKPASSYRSYFEHFSEKARVCVEVYKKLARSVGGNPQVDLEELIAGVVRSINSNRSFNGTVTKDFVISSGEFIYKQLIGLDHTAGNDDEMLATLPVLVALKDECKSRAGFTHLPAMPSNGTLRIKDGQDKGLTEDEDAKLARLLQEEEEWKMMKQRGKRGTSQKNIYIKICETEIANDYPLPAYYKPYNQEMDEYIFDSDIGMYSDDVPVRILDNWALYNSDSRLISLELIPMKAGAENDIVVFGSGFMREDDGSCCSTAELAQLHSSSSKSGREDPGVPIYLSPIKEWVVEFGGSMICITIRTDVAWYKLRQPTKQYAPWCEPVLKTARLAVSIITLLKEQSRASKLSFAEVIKKVAEFDSRHPAFISSKAPTVERYVVVHGQIILQQFADFPDESVKRCAFITGLLAKMEESRHTKLAIKKKSQQMRGENLNPSAKMGPILRKKLMRATTTMLISKIWGEYYATYFPGDTKEEDQNEPKEIDDDQEENEDNDAEEEVNVQDEKATRTPPSTRSRKSSADTRKEIKWEGQTAGKTVSGEVLYKCVIVQDLSISVGATVTTEDDSGETIMCFVEYMYEKLDGKNMIHGIILQEGSQTVLGNAANDREVFLTNDCLEFEASDIKELVTVNIQSLPWGHKYRKENSEAKRIEKAKAEERKRKGLPVEYICKSLYWPEKGGFFSLPYDKIGNGTGICSSCERKPVGNEFKLLSESSFVFENITYNIHDFLYIRPEFFSQGEGHETYKAGRNVGLKPYAVCHLLSVHGPAGSRKANPESTKVKVRRFYRPDDISSTKAYSSDIREVYYSEDIISVPVVMIEGKCEVRLKDDLPNSDLPAVVEHVFCCEYLYDPANGALKQLPPNVRLVTLTRKVPASKKNKGKQICDIELGGSDKPKDGQSENCLATLDIFAGCGGLSEGLQRSGLSLTKWAIEYEEPAGDAFGENHPEAAVFVENCNVILKAIMDKCGDSDDCISTSEAAERAAKLSEDKIKNLPVPGEVEFINGGPPCQGFSGMNRFNQSPWSKVQCEMILAFLSFAEYFRPRFFLLENVRNFVSFNKGQTFRLTLASLLEMGYQVRFGILEAGAYGVAQSRKRAFIWAAAPGETLPEWPEPMHVFASPELKITLPDGKFYAAVKSTAAGAPFRSITVRDTIGDLPAVENGAGKPTIQYGSGPVSWFQKKIRSDMASLNDHISKEMNELNLIRCKHIPKRPGCDWHDLPDEKVKLSTGQMVDLIPWCLPNTAKRHNQWKGLYGRLDWEGNFPTSVTDPQPMGKVGMCFHPEQDRIITVRECARSQGFPDNYQFAGNIQSKHRQIGNAVPPPLAFALGRKLKEAVDAKRQ

SEQ ID NO: 186552 - protein, 84 aa, Oryza sativa
  Clone ID: PAT_MRT4530_83341C.1.pep
QEWPPPLFFQVGFICKGPFLWQGPLAGPVISPSRFWFFISMGSPPQIHDGLVIGPAPIVVYLPFQAPEVSMLVPDCQSTFLNFK

SEQ ID NO: 186553 - protein, 229 aa, Oryza sativa
  Clone ID: PAT_MRT4530_83342C.1.pep
LKRYSARKNETTYCYDFPLAFETALKRSWKSTLSVVAEANEHNKSYAKVTELMFADSTGSWGTPLVPVERSPGINDIGIVAWIMKLSTPEFPSGREIIVVSNDVTFKAGSFGPREDAFFDAVTNLACERKLPLIYLSATAGARLGVAEEIKACFNVGWSDDESPERGFHYIYLTEQDYSRLSSSVIAHELKLESGETRWVGDTIVGKEDGLGCENLHGSGAIASAYSKD

SEQ ID NO: 186554 - protein, 33 aa, Oryza sativa
  Clone ID: PAT_MRT4530_83343C.1.pep
SKPNRVRSRSGSGEETLERYYRTTARKYTRAKA

SEQ ID NO: 186555 - protein, 64 aa, Oryza sativa
  Clone ID: PAT_MRT4530_83344C.1.pep
MEDGEGVAHKVPPALHREQDVRHHPAVHEIGGVGSAATTMIRALIAMTIMTTEAVTLCIDLTDG

SEQ ID NO: 186556 - protein, 58 aa, Oryza sativa
  Clone ID: PAT_MRT4530_83345C.1.pep
ARFRRRAVASAAGSSPGRLDREREREREIELPLELEKQSSFLAHLATAHSTCLAAMSC

SEQ ID NO: 186557 - protein, 40 aa, Oryza sativa
  Clone ID: PAT_MRT4530_83346C.1.pep
MAQSMAKQLRNHETTPPAGAHKAVMGVNQLSYPVAAPDPS

SEQ ID NO: 186558 - protein, 274 aa, Oryza sativa
  Clone ID: PAT_MRT4530_83347C.1.pep
MWLPWVKTRPSSPSSAAASPSPSTALAAAAASPRLSFSSPSLKDLQALLLSDHSPSPTPPQLPPNTAPCSPSVRVFHRVRVAASALRALRTLQAPHAAVAEADRRVVLYFTSLHVVRSTYEDCRAVRAILRGLRASVDERDLAMDPRYLQELGALLPRARGVTLPQVFVGGRHLGGAEEVRRLHESGELRRVVAGAGATALAACSRCGGERYVLCGSCNGSHKRYSLKEATTSTIGREDIRVSEDCNMIGKEILIGCNGGHITITSDNDVAGTI

SEQ ID NO: 186559 - protein, 90 aa, Oryza sativa
  unsure (1)..(90): unsure at all Xaa locations
  Clone ID: PAT_MRT4530_83348C.1.pep
ISLPQRSSNACARMRRNSNVCNSDLAQYTYYSVLAGTLPLYSRRQSICTTCTRHAFCEVRLRLDILPHAXMRTLIQGFMLTEWIRMRLMT

SEQ ID NO: 186560 - protein, 74 aa, Oryza sativa
  Clone ID: PAT_MRT4530_83349C.1.pep
PVRLMDAHPVQCLKPTARSKVSFAHQPWFSMQFARSQQRQIHPMANNLVSVCKVNYSFDASLSSIISSKEYNFV

SEQ ID NO: 186561 - protein, 609 aa, Oryza sativa
  Clone ID: PAT_MRT4530_8334C.1.pep
MTVEKAMEQNLERSTKPPCWMPQIGMTFNSYEEAWDFWVKYGGRIGFDVRKNYTNKSDLDQLVTSSRFVCSNQGSRAEEKKYAVAKRNRTHTRTGCQVRMGITLLRETMTYKVHDLAVEHSHLLQTPQTSRLMPSQRNISKHQAVEIEVAYDSGITPKAAHEFLGRHVGGSANLGYTQRDHKNYLRSRRQRDLLYGEAGSLLKYFQDKIVENPSFHYAVQLDCEEQIANIFWADARMIADYAHFGDVITFDTTFGTNKESRPFGMFVGFNHFRETVVFGAALMYDETFESFKWMFNTFLSAHNQKQPQTIFTDQDIAMGKAVSEVFTGAWHGLCTWHISQNAVKHLSPQQTEGSSILADFSACMYEYEEKEEFEEVFDAMRQKFILEDEHKLTANPFDQTVSCSCRLFERIGLLCRHALKALDLVNIKLLPEKYVLKRWTREAKCGAIQDMHGRQIVEDPKLSTTLRYRYLYQQFLPLASRAADFEECYLLVEEALHAVSKKVEDKIKQTYSDGIAKSNDQSTSQLAQNLAHVSGLKKKESRKRVTKRKTNWIDKLQKTKKRKPEEKAEEENMQTDVEEHQECEAISSYAQLLLGSIDVEDVILSQKFI

SEQ ID NO: 186562 - protein, 73 aa, Oryza sativa
  Clone ID: PAT_MRT4530_83350C.1.pep
MDLHPRRTGHGRVGISRTWHLRHLCFSPSLVRSTLLPFPPPSFAISIAEKGASAPSWTFLFPQAHILPIVLAS

SEQ ID NO: 186563 - protein, 83 aa, Oryza sativa
  Clone ID: PAT_MRT4530_83351C.1.pep
VQGQLSLLSGAILTFGLTRYPYSEFELMAEELLMSDSTIKVFGALRMSVKMLLMWNSKMLIDGGGDSIVATSLLDASNLIVLK

SEQ ID NO: 186564 - protein, 160 aa, Oryza sativa
  Clone ID: PAT_MRT4530_83352C.1.pep
MSSPLSNLSSSSLSLPSLSSFEPRVMQRCVSARPDLLSLFFLPLRRLRGELERRRSRPLHLGMSALPPPTTETDSGQRRTHARFLAIKGAGKTSSPRTSRFTKPNPSSSDHRACQPESKTANSWHQRSDPSTSTAVASASMEMEQLTARFNDVVAVHGNN

SEQ ID NO: 186565 - protein, 418 aa, Oryza sativa
  unsure (1)..(418): unsure at all Xaa locations
  Clone ID: PAT_MRT4530_83353C.1.pep
PSRGGGCVVNELYEAAQLYLGARCLATAPAMHLHKAHGAAAAVASLPGSHATRDAFRGVRVLWTSQLDGNASSSFGWAPPPIDGWQRCLRLEFRRRDRDVVRDAYIPFVLEEAAALRAKLRERKLYTNNGGGAMDDHQMLWKAHKFSHPSTFDSLAIDPALRDDIRADLLRFVRSREHYARAGRAWKRGYLLHGPPGTGKTSLVAAIANLLEFDIYDLELTTVTSNYDLRRLLASTRPKSVIVVEDVDCSLGLRRRRRRRAAQPCDAATRANPSAAGGRGGHXRETISLSGVLNFVDGLWSSCVGERLVVFTTNHTDRLDPALLRPGRMDRKVELGYCKAPALRVLAKNYLGDDDDADDHDEIMGEAGRLLDEVQVTPADVAEVFMGCDGDDGAHVALQKLVDELNARKGILDHWLGP

SEQ ID NO: 186566 - protein, 1207 aa, Oryza sativa
  Clone ID: PAT_MRT4530_83354C.1.pep
MAGGRRSRTSRRLKLKLSALYTFALCSKGSGEDHSSRIGTTGFSRVVYVNEPDRHEEEGFRYQPNEVSTTKYSLVTFIPKSLFEQFRRVANFYFLVSGILALTPLAPYTAVSALLPLCVVIAATMAKEGIEDWRRKHQDHELNNRTVKVHRGDGDFEEKKWKDIKVGDVIKVEKDNFFPADLVLLSSNYPDGICYVETMNLDGETNLKIKQALDVTLHLEEDNSFVNLRQTIKCEDPNANLYSFIGTMEWKDKQYNLSPQQLLLRDSKLRNTDYIYGAVIFAGHDTKVMQNATDPPSKRSKIEKRMDKIIYVLMSSLLVIALLGSVLFGIWTKEDLMNGEMKRWYLRPDDSTIFYDPKRAALASFFHLLTALMLYSYFIPISLYISIEMVKILQALFINQDIEMYHEESDKPTHARTSNLNEELGQVDTVLSDKTGTLTCNMMEFIKCSIAGIAYGQGVTEVEKAMALRKGSVLGDGIENIEHTDQKNDGSPHIKGFNFKDPRIMDGNWIHEPNSDMIRDFFRLLAICHTCIPEEDEETHKVSYEAESPDEAAFVIAARELGFEFYHRAQSSIVVHERDPITNIVKDRKYELLNVLEFSSSRKRMSVIVKEPEGRILLFSKGADSVMFKRLAPTGRKFEEETKRHINEYSDSGLRTLVLAYRFLDENEYMKFSEKFNTARTSVSADRDEKVEAAAESIERDLLLLGATAVEDKLQKGVPECIDKLAQAGIKIWVLTGDKMETAINIGFACSLLRQGMTQIIVTLEAPDIIALEKNGDKESIARESKQRVMDQIEDGIKQIPPPSQSNTESFALIIDGKSLTYALEDDVKFKFLDLALKCASVICCRSSPKQKALVTRLVKHTNRVTLAIGDGANDVGMLQEADIGVGISGVEGMQAVMASDFAIAQFRFLERLLLIHGHWCYRRISVMICYFFYKNVTFGVTIFLYEAFASFSGKPAYNDWFLSLYNVIFTSLPVIALGVFDQDVSQRLCLHYPGLYQEGVQNILFSWRRILGWMANGVINAILIFYFCTTAFGIQAFRQDGQVAGLDALGVLMYTCVVWVVNCQMALSVNYFTIIQHIFIWGSIAVWYLFLLAYGAVDPRFSKSAYMVFIEQVAPALSYWLVTLFAVMATLIPYFCYAAIQIRFFPMFHNKIQWKRHLGKAEDPEVARQLSSRHRTSSHQRMVGISARRDGKAMQVTKETELQVQG

SEQ ID NO: 186567 - protein, 115 aa, Oryza sativa
  Clone ID: PAT_MRT4530_83355C.1.pep
PHKTSPQFRGRSEKQNRLDAGRDGEPPTERGEEIGEEADEQMASNRSGQLGVGRKFYRRRADPIGGGGEATTPQRRQQGGRGSQCPFPCPLHVSTTLLSILFDWKEFFACASHKI

SEQ ID NO: 186568 - protein, 164 aa, Oryza sativa
  Clone ID: PAT_MRT4530_83356C.1.pep
MPPKRKSPAATAAVGSPRKTRSMAVGKQRAEAPAKAAKKEAAAAAAPPEQKGRKRAKKEDAQVAAAAEKDSGAVVSDGKRIVVEACTQCRQFKIRAAKVKEDLESSVPGVSVVINPEKPRRGCLEIREEGGEVFISLLNMPRPFTEMKKLDMDEVIKDIANKIS

SEQ ID NO: 186569 - protein, 435 aa, Oryza sativa
  Clone ID: PAT_MRT4530_83357C.1.pep
MGSAGALLSHSPPGLGGFPPRHHHHHRLSVLRCVPLLPSPAPEPLSCRHGRHLRCAAVDGGAGRETERPSPPAPQREESPSGSLGAALEDPSPQPGVPLILLPLCCRCYAKEICSEYVVRTTDLVNHILNSNAISEGPFSMRKARFLGSASAFSVKQTEWPCATTDSKKCYLQNGSFGGITEDEEQSSLYNFLYPSKELLPDDKEMSIFDHLEELRDRIFVSVLAVGAAILGCFAYSKDLIRILEAPVSVQGVRFLQLSPGEFFFTTLKVSGYCGLLLGSPVILYEIIAFVLPGLTRDERKFLGPIVLGSSVLFYLGIFFSYTVLAPAALNFFVNYADGAVESLWSIDQYFEFVLVLLFSTGLSFQVPVIQLLLGQVGLVSSDQMLSIWRYVVVGAVVAAAVLTPSTDPLTQMLLAGPLLGLYLGGAWMVKLTGR

SEQ ID NO: 186570 - protein, 57 aa, Oryza sativa
  Clone ID: PAT_MRT4530_83358C.1.pep
FFFFIYLSSLIIFTRPRGRRGRVSLGEQTKEGKIETPSRFFSYGCAILIQPTCNTLT

SEQ ID NO: 186571 - protein, 735 aa, Oryza sativa
  Clone ID: PAT_MRT4530_83359C.1.pep
MRLLRVATCNLNQWAMDFDTNLRNVKESIARAKAAGAAVRVGPELELTGYGCEDHFLEQDTAAHAWECLKDILSGGYTDGILCSIGMPVIFKSVRYNCQVFCLNSKIVMIRPKISLANDGNYREFRWFSAWTFKDALVDFQLPLDISEVTSQDTVPFGYGFIQFLDVSLASETCEELFTANAPRIDLALNGVEVFVNASGSHHQLRKLSLRIDSMRNATLACGGVYMYANQQGCDGGRLYYDGCCCIAVNGDVVAQGSQFSLKDVEVLDALVDLDAVSSYRASVSSFREQASHRTKVPFVKVPYKLCKPFQSGMVPTGPVEVMYHRPEEEIAFGPSCWLWDYLRRSRASGFLLPLSGGADSSSVAAIVGCMCQLVVKDIENGDEQVKADAMRIGQYKDGEFPKDSRELAKRLFYTVYMGTENSSEGTRSRAKMLAEEIGSFHLDVPIDSIVSALLSLFERLTGKRPRYKVDGGSNTENLGLQNIQARIRMVLAFMMASLMPWVHNKSGFYLVLGSSNVDEGLRGYLTKYDCSSADINPIGSVSKQDLRAFLRWAAVHLHYSSLAEVEAAPPTAELEPIRADYNQLDEVDMGMTYEELSIYGRLRKIFRCGPVSMFQNLCHRWCGTLSPSEVADKVKHFFKYYAINRHKMTVLTPSYHAESYSPEDNRFDLRQFLYNARWPYQFRKIDELVQDMDKDGKWVNSTEGELRRRKGVRSAEGGGMGVVAVGSANPSAGS

SEQ ID NO: 186572 - protein, 116 aa, Oryza sativa
  Clone ID: PAT_MRT4530_8335C.1.pep
YIRWDWIGRRKLPRGGFSGPISSPRIDVPLNMGNPFLNRTVYGFLKIGAFRGCKAAAEDTFNCLHKGDVSKHKLEHMLKKMCKEGAYWGTVAGRNAAMGYELERIPGPHDWKNAMN

SEQ ID NO: 186573 - protein, 96 aa, Oryza sativa
  Clone ID: PAT_MRT4530_83360C.1.pep
MGAKETPRRETGMLCKVEGIFDLFAYEGDRYNSIGISLLYFDGGVDNPSRAAHRGGGGRGAGGRRLGPGGVARGGSMAECGGAARHGARWWGGGLA

SEQ ID NO: 186574 - protein, 42 aa, Oryza sativa
  Clone ID: PAT_MRT4530_83361C.1.pep
FFFFFFLYMITAPGVQIKQLTVHKDAQTCNLHIINRTNEYWR

SEQ ID NO: 186575 - protein, 45 aa, Oryza sativa
  unsure (1)..(45): unsure at all Xaa locations
  Clone ID: PAT_MRT4530_83362C.1.pep
AVAGHSSPADIAYSFDLKHHTAQRRCIDTPPPPPPDXMIFIAAGH

SEQ ID NO: 186576 - protein, 69 aa, Oryza sativa
  unsure (1)..(69): unsure at all Xaa locations
  Clone ID: PAT_MRT4530_83363C.1.pep
MPHADEQNLCQEHVLLSRGRDESYETTEHMTYMCQVDTVHGXXNHHEVKVKDSKTLIFGTKEVAVFGCK

SEQ ID NO: 186577 - protein, 156 aa, Oryza sativa
  Clone ID: PAT_MRT4530_83364C.1.pep
MDSLHLVHVKLLAADLLSLASRHTSPPSFARCGRTVTRAEIVGVVVSRDRREKFLRFLVDDGTGCVPCVLWLNHHYLNAASSSSRASDSDPTAEMALRMSEVVSLGTLLRVRGRIVLYRGAIQIAVRDVVLEKDPNVEVMHWLQCIRMAKECYDLR

SEQ ID NO: 186578 - protein, 480 aa, Oryza sativa
  unsure (1)..(480): unsure at all Xaa locations
  Clone ID: PAT_MRT4530_83365C.1.pep
MASEKVETIVAGNYVEMEREGAATAGEGVGGAAAASGRRRGKLAVSSLFWHGGSVYDAWFSCASNQVAQVLLTLPYSFSQLGMASGVAFQVFYGLMGSWTAYLISVLYVEYRTRRERDKVDFRNHVIQWFEVLDGLLGRHWRNAGLLFNCTFLLFGSVIQLIACASNIYYINDRLDKRTWTYIFGACCATTVFVPSFHNYRVWSFLGLLMTSYTAWYLTVAAVVHGKVDGAAPRAGPSKTMVLYFTGATNILYTFGGHAVTVEIMHAMWRPRRFKMIYLAATAYVLTLTLPSAAAMYWAFGDALLDHSNAFALLPRTPWRDAAVVLMLIHQFITXGFACTPLYFVWEKAIGVHGGAGVLRRAAARLPVVLPIWFLAVIFPFFGPINSTVGSFLVSFTVYIIPAMAHMATFAPAADRENAVEPPPRALGGWPGTFAVNCFVVSWVLVVGFGFGGWASTVNFVRQVDTFGLFTKCYQCPPRH

SEQ ID NO: 186579 - protein, 344 aa, Oryza sativa
  Clone ID: PAT_MRT4530_83366C.1.pep
MDMQLLQLYTFVIHTLQCAFNKVWQIGKIPRPQPQPQPQHLLCHCRLLIHPRWNFNAPMFLAASLLLSRNMVAVFTPHIPSNNHILHHPQHLLVDGLRSPSPSTSPSATSLALARYGTAPAQIRAPPDPPPDPVAAPPEERCRGHHDLGSLQLSRVGRSPRTHSPKELDSPRPENEGFAQEERLTKERLSIKEKGLTKEGLPIKEKGLTKEGLPIKEKRLTKEGLPIKEKGLTKEGLPIKEKRLTKEGLSIKEKGLTKEGLPIKEKGLTKEGLPIKEKGLTKEGIPIKEKRFTKEGLPIKEKGLTKEVLPIKEKGLTKKGLPIKEEGLPTKEAQVKIKVTFEEN

SEQ ID NO: 186580 - protein, 77 aa, Oryza sativa
  Clone ID: PAT_MRT4530_83367C.1.pep
LVVLLFFGMRPYTPDKKGFRNSKKRPLLDQIQPSARWSGTTPRSLRGGEEELSPSRSRRGGSVQGGGRVWGGGVGGV

SEQ ID NO: 186581 - protein, 224 aa, Oryza sativa
  Clone ID: PAT_MRT4530_83368C.1.pep
MEEVQHPLHDHQQWMGLMQPQSQHNQQHQSQRHIMAAFQSQSNQLQQELGMEQKPSVQQSFQTSAGMFLQQNNIDEQMQYTQAQCGLQEVPFSTTMHITTQTDHPGQCYLQDEIYDMVRNLKDQHFTELYHLYNKISRKQEYVDSQMPSQMPIEQYGKMKKFKEMLERILRFLQIYKGDILPALAEKIPKYKRQIITLVEKPSFVGRAIFTIVPVAIKTGTKDL

SEQ ID NO: 186582 - protein, 138 aa, Oryza sativa
  Clone ID: PAT_MRT4530_83369C.1.pep
SEPRSWWPRQRSSGGAATGSGGGSGGARIWAGAVPAGSGRAGAAAAAGGEEGRAGPAGGGEKEGGWKETLVAHGKGWDGLGGRSRRRKPGGPQNREKRPAQGQATWLRARWKAMGFGGHRRGDAGGGEVCGYWKGCEE

SEQ ID NO: 186583 - protein, 180 aa, Oryza sativa
  Clone ID: PAT_MRT4530_8336C.1.pep
RAAARRPGAPAGVAPGKLSCSSARALCLRHANRVLAGVSQEEETCGFPWQGRRRRPRAGRGGEKARHRRRRGGGGRRPGRLRRRRRRSSRTKPVYSVKKGQIVRVDKEKYLNSINYLSVGHPPFFKGLDYIYEDRGEVLDIRIFETGEYALIAWVGIPTPPAWLPTYMLIKSDKLDYERI

SEQ ID NO: 186584 - protein, 147 aa, Oryza sativa
  unsure (1)..(147): unsure at all Xaa locations
  Clone ID: PAT_MRT4530_83370C.1.pep
PDALLSPCXNINAHSSCILLQARAPGSSVNNKGKTXVFNASFRRGHCLLYPNTYAVVKKPQREGCAYXAFKTNPNSMVTHIAGKSSIFRXLSQNDVLANAYRISREESEVKHNTGDXFGHHPTQYKSYQDVYNRQNPLVGFRIKNTK

SEQ ID NO: 186585 - protein, 68 aa, Oryza sativa
  Clone ID: PAT_MRT4530_83371C.1.pep
MPCCWWLASKDVSRGVDVDHEQMSTAKELDLEAMRRRRLLRPAPFTTARAGARVLTTKFGNIYIGKED

SEQ ID NO: 186586 - protein, 699 aa, Oryza sativa
  unsure (1)..(699): unsure at all Xaa locations
  Clone ID: PAT_MRT4530_83372C.1.pep
MNRRNRRARPRPAARPAPRQGEHGGRWLRRPRRHARAGELVGHRTRPGVVARPPRRVPAGALPPRRRQLRRRSGRARAALRAAAVRVRAADLSGDQPGEEDGGAGRGELAAGVRVAAEDVSMEELVGLSTRRKLVNYILSAQHGKRIAVVLNEFREEIGLERAMINKGQGGALVEEWVELANGYVCCTVKHSLVQALEQLVQTKESSSGNTKNLIQNFDALTCVIDAKAFRLQIDEHKKSSSFPEAFHQIAFSDVVILNKVDLVEDNLEDLERQILEVNALVTVVQSVRCQVDLNKVFDQQAYGAKAINFITKALLVQHEKLVLNSSQLQELLEYSKSVPPNXSISTLCICEQXDPVSLAKTKFVFASTFVTSTLGYSVAIAYSLSGRAAKMSLIRPRPDHVAGTPTNFHGPDRWETGDDPDYASTWLQFTPVIFFHIAIIGHLCLKRPRDVFQLTKGSPKQKDLLHRKKKQREGNEGGDKENKDAEANKEEDDEEEGEEEEEKAKVKKSKTKLVHTPNPPSPLRPPPHLSSPFQRTPSARPTFSLPCTAMTPLPGPLNRIPSNTFMASATRLFLNNVTTISLYAVAAGSSPRLSIPFHTLQACKRQRTSPRGSILRPAARSTSRSATRRTPVPVLGLLDHLLGDIGHLADGADDVGDEGPKSAHDASHINSRAREDYRTEQNRQRRRLASRQLDERRP

SEQ ID NO: 186587 - protein, 32 aa, Oryza sativa
  Clone ID: PAT_MRT4530_83373C.1.pep
HPHTLTFITDVVCSVCKMPDVAEKVIKQAEHR

SEQ ID NO: 186588 - protein, 514 aa, Oryza sativa
  Clone ID: PAT_MRT4530_83374C.1.pep
MQPYLQLASLRLATTIPLAPRLYDANLLAASGAAMASSMAYIALLCAALAAVVALLRWAYRWSHPRSNGRLPPGSLGLPVIGETLQFFAPNPTCDLSPFVKERIKRYGSIFKTSVVGRPVVVSADPEMNYYVFQQEGKLFESWYPDTFTEIFGRDNVGSLHGFMYKYLKTLVLRLYGQENLKSVLLAETDAACRGSLASWASQPSVELKEGISTMIFDLTAKKLIGYDPSKPSQVNLRKNFGAFICGLISFPLNIPGTAYHECMEGRKNAMKVLRGMMKERMAEPERPCEDFFDHVIQELRREKPLLTETIALDLMFVLLFASFETTALALTIGVKLLTENPKVVDALREEHEAIIRNRKDPNSGVTWAEYKSMTFTSQVIMEIVRLANIVPGIFRKALQDVEIKGYTIPAGWGIMVCPPAVHLNPEIYEDPLAFNPWRWQGKPEITGGTKHFMAFGGGLRFCVGTDLSKVLMATFIHSLVTKYSWRTVKGGNIVRTPGLSFPDGFHIQLFPKN

SEQ ID NO: 186589 - protein, 83 aa, Oryza sativa
  Clone ID: PAT_MRT4530_83375C.1.pep
LNCTAVKSGDPFPCISRDPARRTSGLPAKKQRPPILLHRNSTAELTDQCAAPGQNQRPEDTTSSSGAHRVEPPLLLVQRRAPR

SEQ ID NO: 186590 - protein, 51 aa, Oryza sativa
  Clone ID: PAT_MRT4530_83376C.1.pep
MQSMMLALAEGEVSASSFIGSEALVLGVKITGDLLSAAPASTFDLCHNERS

SEQ ID NO: 186591 - protein, 152 aa, Oryza sativa
  Clone ID: PAT_MRT4530_83377C.1.pep
TGRPARETPGDLVHINGLERYNPEAVGALETYLQDQCEQKFTDCNANRTLLKLYQLNPDRIKDEVITNVLVKTMTQFPSAQFSLALHLINPSSVVTGDLGGAITKLRSLNGQLEGAQYSRFWADLDDDMVADLIADIPDFEEVVRHRIVLLV

SEQ ID NO: 186592 - protein, 45 aa, Oryza sativa
  Clone ID: PAT_MRT4530_83378C.1.pep
KKNIAIKKIKKKKIKKKKKKKKKKNKKKKKKKKKKKKKKKKKKKK

SEQ ID NO: 186593 - protein, 118 aa, Oryza sativa
  unsure (1)..(118): unsure at all Xaa locations
  Clone ID: PAT_MRT4530_83379C.1.pep
LSFPPPSRADNSLLGPIDSPSRKSSPTPPTLSSASPAVAAPNSPXPASPCSPYPFPPFFPSPPRPPSLSPRRSPSPPLAGDHLSPPPLPTPTARHPTPSSSPGNPGLHPPRAVVEAPP

SEQ ID NO: 186594 - protein, 609 aa, Oryza sativa
  unsure (1)..(609): unsure at all Xaa locations
  Clone ID: PAT_MRT4530_8337C.1.pep
WRRRRARRCWCTSCCRAACCGDAAGDEDQTINPAVSAAVEARRRRRKEEAGRARRGGARARRWPERAPAGWGEAAAAAARTVRYTYGETLGKWPLGEIAFGLKYYMRQQXIYSAGNLQHEYAGSNSQLLEGPVVKEELISLLGYLKLCMYFSKKPYKVFMEFGGYDESDVLIKKSKARLMKPSFTVVRDRSAKCFLLFIRGAISVKDRLTAATGAEVPFHHVVTQDGHVSKLVLGHAHCGMVVAARWIANQAIPCLNEAVAQFPDYGVKIIGHSMGAGIAAILAYILRENEKLSSSTCLAFGPAACMTWDLAESGKDFITTIVNRNDLVPSFGKVSAAKLRTEVMASSWVHDLREQIQQTRFLGFVNRSVSFIRSHVPFVSDPRSKVVDVDMLVPNSSEADQVKPSSNSDAVVKKRHAIACWSCVAAHKHSIDSAKHGTHDITNQTDVNVKAEKTDIETAQLVSISMEELDLQESDNDDDTDRGENEPALNETDEDQAVELLETLTDNPHEPSSSSQSQDPPQLYPPGRIMHMVGLPSSSEPNSTSEQGEEVVALYETPRHLYSKIRLARSMIREHYMPKYIRTMELLIDKLVAEEEDGIDDDHRLGSL

SEQ ID NO: 186595 - protein, 546 aa, Oryza sativa
  Clone ID: PAT_MRT4530_83380C.1.pep
MWIIKRIDISIPFVYLCKSCVPFVVQLPQQDNSFDCGLFLLHYVELFLMDTPRSFNPLKIDSFANYLSDDWFPPAEASLKRSLIRKLIHKLLKEPSQDFPKLVCCSEQLDKTHGSENAELEQMSENAEREQAKELPAQMCTDGEPDSVGTILETQQPSISTCFNYSDENGPPVSVHNLHKLEVSSANKDAIVCLSNHDEKNESPPADSYNHLDLRSCDSEEAETAKGSAGVVKDPNSHKEPLLDSLDNNQDISIQAGAEMHDSMDSKLCSISNNADLMASEERSLDKNTNENEEHNRTSEDIVESVMMLGGSKSDTELDAEPERTAGEAEVRNCDHSKDIDYIALGDINKDAAKQSLNRNIVEAEDIKCEGTLVDHTVVEDATPYNVNETSASAEGVNDNEHNVSSELKEGNNGNGITTSVSCEMEDRSIDNLMVGDSRNGTDETRADGQEAHDNSATAETVPCEDNATTSITDAEMPHEDSTCSVKGEAISDNTASDAKRPLPDSTYIEDIPDDKCLQKDDGGGDEAKTERHYKRRKFLVSEATS

SEQ ID NO: 186596 - protein, 55 aa, Oryza sativa
  Clone ID: PAT_MRT4530_83381C.1.pep
MSSFGGGSSSVPNELRTSQIDDAPHVTQPTQQEVGEGNDNDPRRSNRELHEPNRL

SEQ ID NO: 186597 - protein, 91 aa, Oryza sativa
  Clone ID: PAT_MRT4530_83382C.1.pep
YNALLVPTKHIEILHTTIKPWNFMNEQKLYCLIREGARTPTAPHIYEGTKHGLFLFNARIRGKPKVLSGNFSECWTLPPFITSGIRYKNGA

SEQ ID NO: 186598 - protein, 647 aa, Oryza sativa
  unsure (1)..(647): unsure at all Xaa locations
  Clone ID: PAT_MRT4530_83383C.1.pep
MGHSDGDHGSDLSADDSPWSEGSWSDDDDEGSLSFEDSGEGSDAESDEPDAPAVEESDSSEDEVAPRNTIGDVPLEWYKNEEHIGYDITGSKIKKRDREGRIEAYLRNADDAKNWRKIYDEYNDEEVQITKEEAKIISRLLKGKTPHTNVDPYPHYVDWSXYDGKGHPLSSAPEPKRRFVPSRWEQKKVVKLVRAIRKGWIKFDKPKEEPNFYLLWGDETDTADNKRQGLSYIPAPKPNLPGHEESYNPSVEYIPTQEEIDSYQLMYEEDRPKFIPRKFDCLRSVPAYEKALREGFDRCLDLYLCPRTRKKRINIDPESLKPKLPSKKDLRPYPRTXYLYPIVILXSVVTVSXATGQWIASGSSDGTIRVWEVETGRCIKVWNVGGVVHRIAWNPSPDRHILAAVVDHDLLLLNAEVGDEDAQMKTKGLLQIEELAQEEDNGDKKPAVKWVKHEKFDGIMLIHHKLSKKHSHHPFRKLPGLPIAAVFHPSQKMFFVATKKFVQVYDLQKAQLVKKLESGVREISSISIHPGGDNVIVGSKDGKLCWFDTDLSTRPYKTLKNHSKDITNVTFHRKYPLFASSSEDCTAYVFHGMVYSDLNQNPLIVPLEILRGHSSSDGRGVLDCKFHPRQPWLFTAGADSVVRLYCD

SEQ ID NO: 186599 - protein, 79 aa, Oryza sativa
  Clone ID: PAT_MRT4530_83384C.1.pep
MARTFPTIVKRAIMLPIGRVTRHAAICLGKFQRIPCAILQPHYYLALIRGRPYVLCLGKGGSYSKSLAVAAGVLQGSRL

SEQ ID NO: 186600 - protein, 148 aa, Oryza sativa
  Clone ID: PAT_MRT4530_83385C.1.pep
MEEREGWYDGGTRYVEQKLVESGDSPGSTLVETGRAAQLFLRCSPPPSNMGGWTVGEIEGRWQAARRAPLPQPRFSLHHAARLEWTVGEIEGRRPASERRRGAPQPLFSTDGATADEAIAQPSSLHRACGIGDLDYRRRRRWLGDRDH

SEQ ID NO: 186601 - protein, 125 aa, Oryza sativa
  unsure (1)..(125): unsure at all Xaa locations
  Clone ID: PAT_MRT4530_83386C.1.pep
MSWRFPLFGSQQQQPDTNFQDNPTQPWYPPSVLGSSSHPSLPSSSSGSPHQRASDNPQSLHGQPSPAEAAGIIARLKDKSVDDLQRLVEDKEAYSAFFNSLDQVXNPNNLRDELXKETVPLGRDN

SEQ ID NO: 186602 - protein, 56 aa, Oryza sativa
  Clone ID: PAT_MRT4530_83387C.1.pep
RSSYAITNSANDSVHRLSSILYFFLKISSPKSESPKAESFSDHSYTTVNVLTSIKC

SEQ ID NO: 186603 - protein, 110 aa, Oryza sativa
  unsure (1)..(110): unsure at all Xaa locations
  Clone ID: PAT_MRT4530_83388C.1.pep
SIRGGFNPLLDTGGGAHGERGLXLRRLLLVVVGLLHVLLLGALRVLDRRHEPRATGRPRATGRRLGRRRLTSRFRPVRPRAPPPTAPGRCRPPPLATSRVRRCHLRRRPH

SEQ ID NO: 186604 - protein, 98 aa, Oryza sativa
  unsure (1)..(98): unsure at all Xaa locations
  Clone ID: PAT_MRT4530_83389C.1.pep
GFHALCIKMEVPYVHCVXKASLGSIVHNKTASVFXLANVNKEDKLEFIHILKAIKSMLNHKSDEVTINCAVAVMGSESQANIKTRENLLLKQNAQRMS

SEQ ID NO: 186605 - protein, 89 aa, Oryza sativa
  Clone ID: PAT_MRT4530_8338C.1.pep
MGLALALLLLLIFTFPSPLLLLIHHLLLLLLIKKTPLLLGLNDGDEGGSSRQLLRPWRLFFFFSSPSCESCPRVCLVVTCMVSATVASW

SEQ ID NO: 186606 - protein, 113 aa, Oryza sativa
  unsure (1)..(113): unsure at all Xaa locations
  Clone ID: PAT_MRT4530_83390C.1.pep
MWTAQHRTAYAPTCLGPSMLGRHGPTYPPGPVVLTGSLYFVCRAWPTGPSXPGQPSVPVERPRHSPAVRPGRNGPDPRSAEPCLGRAKKPCRGPGLKSSGLMALYQGRRFLFF

SEQ ID NO: 186607 - protein, 76 aa, Oryza sativa
  Clone ID: PAT_MRT4530_83391C.1.pep
DGNKAGGPIYHTQHFGYRNTKKLSTGGQGFNFLKKAQGSELCGKKGFWNPKDWAPLDSQTTLKTLKMHTGGGQSDF

SEQ ID NO: 186608 - protein, 86 aa, Oryza sativa
  unsure (1)..(86): unsure at all Xaa locations
  Clone ID: PAT_MRT4530_83392C.1.pep
SPWTATSASXPVPAPAPTGSRSRRHCSSCASQWTSRESPLNRRTRVRTRSHRRPPARAIRAVRSTPSRSSWRTCAATSLSGARRLT

SEQ ID NO: 186609 - protein, 246 aa, Oryza sativa
  Clone ID: PAT_MRT4530_83393C.1.pep
MDRETRPITSFTAGWIMIHLGPSSQPLRKHGPKVEKGWPAYLSIRPHLHAQLAPAALYIYTRVKYVTLERGWMQPNARMCICILQLPPTHSTYEAKPVTMGEIVACLCSPHMHDKKANCKGELAMQCNEAQLRIYRYSEKQLKSNQLKVTAYNNHTITTRYCKRRSLSGGNNIQEWREYYFTEQAKLIIYSHPHGTDPKRESNRVHRTYPDALCVCVRVRIHPSIIAFARVASHTTHPSLLTFFPF

SEQ ID NO: 186610 - protein, 107 aa, Oryza sativa
  Clone ID: PAT_MRT4530_83394C.1.pep
MDYFGNMVLWAFPRMRVRDLLSSSYATVVGVISDAVARVDERWLGFRFHELDFGCGPPCAFLPPDVPVEGILMIFVPSCAAKGGIEMFVALDDSHVKAFSQICYSMD

SEQ ID NO: 186611 - protein, 133 aa, Oryza sativa
  Clone ID: PAT_MRT4530_83395C.1.pep
MDYFGNMVLWAFPRMRVRDLLSSSYATVVGVISDAVARVDERYILSFINFGEVAAARTVLCPDLEVDSWLGFRFHELDFGCGPPCAFLPPDVPVEGILMIFVPSCAAKGGIEMFVALDDSHVKAFSQICYSMD

SEQ ID NO: 186612 - protein, 150 aa, Oryza sativa
  unsure (1)..(150): unsure at all Xaa locations
  Clone ID: PAT_MRT4530_83396C.1.pep
MCLPSSFFAGPLFPRGLFYPADAVSAAAVGGVGVGGGDGGGVVGVDGAQRRLCRPTRLAAVESARGGGGGSGGFGARWRRWSPRAAVDYSARGGGGGVSDGDGKXRECEIRGARFAPXTLREAXALPVALGRVAERGEHDDDDGGGGGGV

SEQ ID NO: 186613 - protein, 41 aa, Oryza sativa
  Clone ID: PAT_MRT4530_83397C.1.pep
MGRHIQVFFPGVSLRSLAYANDHPSRRPTILQIALAALGED

SEQ ID NO: 186614 - protein, 103 aa, Oryza sativa
  Clone ID: PAT_MRT4530_83398C.1.pep
MLWWLGGGDGGGRWCSRAAHLGRAVAGRGGDGGQWLEAVPEAVGGLATATVVAQGEGRFRRMAGGSASRGRRLRLGRHARPWRTVVGGGAHGKEKGDCLSCWA

SEQ ID NO: 186615 - protein, 203 aa, Oryza sativa
  Clone ID: PAT_MRT4530_83399C.1.pep
MSNLYSRLNAQELVLTYDLIVEVLICLPSVTDVGRACAVCASFLGSAASSTILLSSAVCVRSTRRRSSASTTTPHPSGRRVPPAKEPHPSAAAAISRGMFCAANFSFSFVISLTVASSSASSTAFPFSNGGGLRSLCMAGTGGSGDCAAFGDSRSGATKPLRSFIVGERRPKSCTTCETYRGYRPDLNSYENTPTFENPYRNC

SEQ ID NO: 186616 - protein, 221 aa, Oryza sativa
  unsure (1)..(221): unsure at all Xaa locations
  Clone ID: PAT_MRT4530_8339C.1.pep
MAAGAACCYRPAAAGRASLDAFATSSPSLRPSSSGVFFISSSSSRWWMRRRRGEGKVKISSSSRARAKPMSRPALFSPVAMEWQECSTEIEVDVPCSVAYQCYSERETIPQWMPFISSVKILEDKPDQSRWTLKYEILGRDVEFSWLARNMTPTKKSEGLHRGXVRFFCSXLQSLTVAYEVPEILAPVASALKPFLEGLLMQGLERFATFAKERYSKIPQP

SEQ ID NO: 186617 - protein, 130 aa, Oryza sativa
  Clone ID: PAT_MRT4530_833C.1.pep
RICRKEVRHPEARDGAHKRSTGCGRAFPTHQGLGGHAAGPQNRSKAAAAAASEQGSSGAGADGCHGGADSSKHRCRECGMEWKTGFALGGHMRKHQTKETVTVNEKEPNVAEQAHLSWTTTFAGPYSGRR

SEQ ID NO: 186618 - protein, 195 aa, Oryza sativa
  unsure (1)..(195): unsure at all Xaa locations
  Clone ID: PAT_MRT4530_83400C.1.pep
TASGTSPMARRRSHHRPTRRTAPRRTPTRRRGWCSSGRTRSPSPPSPPPPPPRRSSSPYPRTPHAPSPCERWPWRRRDRRWSSPACWSRNGSPPQRRRSSSATPRPRCGALLLPPPPTXAAAAASPVRRKKPAAAASASPRPPRAPARAASPPPPLSPPQRGDLRRRGQRRRRRRPRRRRRRWRSWPIGRRAWSP

SEQ ID NO: 186619 - protein, 61 aa, Oryza sativa
  Clone ID: PAT_MRT4530_83401C.1.pep
HQLSHDTQALWHPIRKGGTPQLRSAFRAARGRTCSSELRPRSRLVMIATALRDPATTRQRR

SEQ ID NO: 186620 - protein, 236 aa, Oryza sativa
  Clone ID: PAT_MRT4530_83402C.1.pep
IDRDMLMSGFIQPIPDLSPVIPSVDEMPSVDPEVSPYETNIISFYKTWDTFGAFSNFSPHPIHMPDENGDYFTWPTVEHYYQAHKFIGVDDPQAREIVQEIKLAKSPEEAARIGRTRQREFQELFVTLVTQVIEGDQDGWNSIGLIHVYQVRPDWDSIKIEVMYRATKRKFSTYSHLTDMLLSTAGSVLVEASPHDLFWGGGREGEGMRYLGRLLMQLRSEILGTIQTAVEVGEPA

SEQ ID NO: 186621 - protein, 260 aa, Oryza sativa
  Clone ID: PAT_MRT4530_83403C.1.pep
MREERRILRGERRSGGGRVEEEQLEQGNRTAVTVGEAIRWRPRVDETIKLEFDNTGVIGEWNDGVGQAAASLLIVRAPSTHHLLCTALQKKISSSHEPINTFARHGWARLWLYACMVRGTSIQNCDQYQSADRQVGLQSQPNPHEETHTGLPAQACTPCSMHTRARTNSPPRFCNQPTQVHDPTRSQEKLDALLRDEACLFPGLLDLLLRSSSYYSYHACMHPHPMRACVNSQCAPLSPSYMHGYDIYSVQQLAIPSPLE

SEQ ID NO: 186622 - protein, 510 aa, Oryza sativa
  Clone ID: PAT_MRT4530_83404C.1.pep
MAEFRQRGQVPEDVESSIGTVLSYIHFAIPDAPVSSHARLSALPPDDDDDGVDRLSLLPDALLRRIVSRLPVKDAARTAALSSRWRDAWRSTPLVLVDADLLPAGVSDADTDAAREEARAVTFAVSRVIAAHPGPFRRLHLTSSFMDQYQGLLASWLQVLAVKGIQELILVNRPFPADLTLPATFFGMATLTRLYLGLWKFPDTAALPRAACFPNLRDLGFSLIGITNHDMDFVLARSPVLETLCLQANTLQRVRVASRSLRCLMMMGFDQDVNVVNAPRLERLIMLYSCGSSMLVKIGRAPSLRAIGYLDLETHVLEIGDTIIKAGTRASPSTMVPSVKILGIIVCFGVRNEAKMLPSFLRCFPNVETLHVESRKTDELTGKLNLKFWQDAGAIECIQSHITVMIFRRFRATRGEINFLKFVLESARMLKKLIIVSPKGTFASTDEANFRLKPLFATKWASKCCSLVVLESDASAGESNWNFERGCDFSLMDPFAIIIRSSRLDISGSC

SEQ ID NO: 186623 - protein, 74 aa, Oryza sativa
  unsure (1)..(74): unsure at all Xaa locations
  Clone ID: PAT_MRT4530_83405C.1.pep
FTTPYFIDXGXNLHRDTQCHYRSHPLSNTLTSIHSFHNEYLTSYTVTTYFTXYWGGVRHTTHFFFYRPPILKKH

SEQ ID NO: 186624 - protein, 65 aa, Oryza sativa
  unsure (1)..(65): unsure at all Xaa locations
  Clone ID: PAT_MRT4530_83406C.1.pep
FFFFWIRHKLSLGKYILHLASKSAYVHLKQYQALSKVLNSRATXRASRRSPRAGESNRVDSQLVQ

SEQ ID NO: 186625 - protein, 69 aa, Oryza sativa
  Clone ID: PAT_MRT4530_83407C.1.pep
MQVISILLGGNMFHDNKPAISTLVKSMEIIRSYCLNDHQVQFQVVSDQAAEQTAEWAAPPWPVHVTAGA

SEQ ID NO: 186626 - protein, 383 aa, Oryza sativa
  Clone ID: PAT_MRT4530_83408C.1.pep
MEIALAPPAAASPDGEALASDNLAQIKTALGGVCIETNHQDDKIRRFSVDKNGTRCCLDSSSESGPWYSKKLNNKKGVTGILSQWHKQTEQKAHEVVIYKRCTASGSAVTLFLIMMSLVCTVRGSNHGTDCDIGEYSTSIAQVCQYGAPPAVCCDLLQSAVHTCGNASVLCEIGRSVPITSRGFNVHDVMDWHRECTGQPESSSVDASSICYVSGERHKEGTKEEGHQVNILIETGNKECNARKSTSTNPMFIGLGIGFGSAMLFAFALVVIWLFVRRRSQGGPLVPQISLLAIAPHFSQGLPALPFQEHPALTLPCGPVPVPTPQEVTTVQPATSAYGQPAPVQPATTAYGQPVQPATNPMAYLASVVSYAIVDRLTSRRRR

SEQ ID NO: 186627 - protein, 117 aa, Oryza sativa
  unsure (1)..(117): unsure at all Xaa locations
  Clone ID: PAT_MRT4530_83409C.1.pep
KAITRRFAVDRVHGGGSQDWTAGIHPSKTDGQDPSVHDRTTADGNNDVGDEEKRRRRSGQRRRRCSGGRQRRRRGGRGRQRDGDHDGGLPEQXRRPKRRRRTAGAAAATTARGSTAL

SEQ ID NO: 186628 - protein, 104 aa, Oryza sativa
  Clone ID: PAT_MRT4530_8340C.1.pep
AISCERECSRGEDYRLIKLSIIDFKNKREKVAVVECRGHDAARLQNIDHLHGWEDDIVGLVEKKHGNRKFSISFECETLKADKAADEHISKYMPNLSGMDAIGK

SEQ ID NO: 186629 - protein, 823 aa, Oryza sativa
  Clone ID: PAT_MRT4530_83410C.1.pep
MSSSASPSGAPTAEYIEHLSHQVAIPSLSHRNHYFLGPIGNLDPTDFISGETNRIPFRLANPNLGHWKNTFKSWPSLEKLSPDRSWSTWYQRVSASKKVHWDEIGIGQALILTIANSAKDEPLMAATTYFWSNTINGFLFNQGPMTPTLIHITMITGLDVTSSANPMSMNTRNQFDFKTKSIGGWSGYVATYMGQGFVTPREHVAFLLMWLEKFLFCRSSCGSTTNWQFVAEALESKKEFPLGKILLGYLYQMLNNASARIAVGSAVGAGGPWWLLQTWLNLMVMKVVNQPPVTEAEFPLPEPIVGDDGEERTHRRCTSYGEYASTPTDAGAKLSAELLKDWFCSFYEGPPLGSIENIELAGFRSKNFDRWWGEWKLHVFHQSATMYMTDLFPDVVPQTTESSPPPHQSNSGKDIEYAAGLIPNGGIISPCHRTSTLLHGLTREPAYAGQKRKTRASTISTSILAPKKKTRVKRAKPDDKPADDLPDLDPSIEQALDEEAIGDEVDQAAAEVSDTERTPSTSPKQTLPTPSAPVHFSRKKKTAVKKKSAATTSKPAPPPSPPPSPSAQQSSSDQTPSAAGSHHVEEEEQPAVPAIPVLADLFSFDIRDYLDEGEEDTTSKALTPLSDDVKKTLKSILDRLEASSLDSLVVDCGPIRARLHEIQISIPDELADILTPAVYLEQHQFKLEKAKLRLAERRERKDIESTIQANRQLVHEEKSKLNQLSEGPIKSNIDRLEARKIDLLAQLEECNVELDMERKKLADLPKSIEEQKARLKSAIKHVSELTKSLKVIPGTDAQDAQAIEEVEQIRQNAISAIQQYLSQ

SEQ ID NO: 186630 - protein, 114 aa, Oryza sativa
  Clone ID: PAT_MRT4530_83411C.1.pep
MRRLRPLEVAKKRCSGFISMALYMQTHGIRKRNLLSLSPHDYARKRGAFSLPPPPLLRRRPRSSPAVNRFAAGPHLSRHRPSTARFVFLSMEGGGFDFFSKDPNPSIWLRFFFV

SEQ ID NO: 186631 - protein, 715 aa, Oryza sativa
  Clone ID: PAT_MRT4530_83412C.1.pep
MTPTLIDITMITGLDVTSSANPMSKNTRNKFDFKTKNIGGWSGYVAAYMGQGSVTPREHVAFLLMWLEKFLFCGSSCGPTTNWQFVAEALESKKEFPLGKILLGYLYQMLNNASARIAVGSTVGAGDDGEERTHRRCTSYGEYASTPTDAGAKLSAELLKDWFCSFYEGFKKDARIWFPYEDSTDLELPSDFRFEDINHEKFQKSREILIAAISPCIHPVGIHQGRNIQVSYEFYHPMSSARQLGLGQLPIGLFFADKIQCRGQITSTLMMDRLLNLPGPPLGSIENIELAGFRSKNFDRWWGEWKLHLFHQLATMYMTDLFPDVIPQTTESSPPHQSNSGKDIEYAAGLIPNGGGLAPPVIGYHAPKTSTLLHGLTREPADAGQKRKTRASTTSISILAPKKKTRVKRAKPDDKPADDLPDLDPSIEQALDEEAIGDEVDQAAAEKKKTAVKKRPAATTSKPVSPLSPPPSSSAQQSSSDQTPSAVGSHHIEEEEQPAAPAIPEKKIPQAKHWPLYPNDVKKTLKSILDRLEASSLDSLVVDCGPIRARLHEIQALIPDELADVLTPAVYLEQHQFKLEKAKLRLAERRERKDIESTIQANRQLVHEEKSKLDQLSEGPIKSNIDRLEARKIDLLAQLEECNAELDMERKKLADLPKSIEEQKARLKSAIKHVAELTKSLKVIPGTDAQDAQAIEEVEQIRQKAMSAIQQYLSQ

SEQ ID NO: 186632 - protein, 867 aa, Oryza sativa
  Clone ID: PAT_MRT4530_83413C.1.pep
MSSSASPSGAPIAEYAEHLSHQVAIPSLSHQNHYFLGPIGNLDPTDFITGETNRIPFRLDNPNLGHWKNTFKSWPSLEKLSPDRSWSTWYQRVSASKKVHWDEIGIGQALALTIANSAKDEPLMAAATYFWSNTINAFLFNQGPMTPTLIDITMITGLDVTSSANPMSMNTRNQFDFKTKSIGGWSGYVAAYMGQGSVTPREHVAFLLMWLEKFLFCGSSCGPTTNWQFVAEALESKKEFPLGKILLGYLYQMLNNASARIAVSSAVGAEAEFPLPEPIVGDDGEERTHRRCTSYGEYASIPTDAGAKLSAEPLKDWFCSFYEGFKKDARIWFPYEDSKDLELPSDFRFEDINHEKFQKSREVLIAAISPCILPVGIHQGRNIQVSYEFYHPMSSARQLGLGQLPIGLFFADKIQCRGQITSALMMDRLLNLLGPPLGSIENIELAGFRSKNFDRWWGLIPNGGGLSPPVIGYHTPKTSTLLHGLTREPADAGQKRKTRASTISTSILAPKKKTRVKRAKPDDKPADDLPDLDPSIEQALDEEAIGDEVDQAAAEVSDAERTPSASPKQTLPTPSAPVHLSRKKKTAVKKKSAATTSKPAPPPSPPPSPSAQQSSSDQTPSAAGSHHVEEEEQPAVPAILVLADLFSFDIRDYLDEGEEDTTSKALTPLSDDVKKTLKSILDRLEASSLDSLVVDCGPIRARLHEIQASIPDELADTLTPAVYLEQHQFKLEKAKLRLAERREHKDIEATIQANRQLVHEEKSKLDQLSEGPIKSNIDRLEARKIDLLAQLEECNAELDMEHKKLADLPKSIEEQKARLKSAIKHVSELTKSLKVIPGTDAQDAQAIEEVEQIRHKAISAIQQYLSQ

SEQ ID NO: 186633 - protein, 900 aa, Oryza sativa
  Clone ID: PAT_MRT4530_83414C.1.pep
MSSSASPSGAPTAEYAEHLSHQVAILSLSHQNHYFLGPIGNLDPTDFITGETNRIPFRLANPNLGHWKNTFKSWPSLEKLSPDRSWSTWYQRVSASKKVHWDEIGIGQALALTIANSAKDEPLMAAATYFWSNTINAFMFNQGPMTPTLIDITMITGLDVTSSANPMSMNTWNQFDFKTKSIGGWSRYVAAYMGQGSVTPREHVAFLLMWLEKFLFCGSSCGPTTNWQFLAEALESKKEFPLGKILLGYLYQMLSNASARIAVGSAVGAEAEFPLPEPIMGDDGEERTHRRCTSYGEYASTPTDAGAKLSAELLKDWFCSFYEGFKKDARIWFPYEDSTDLELPSDFRFEDINHEKFQKSREVLIAAISPCILPVGIHQGRNIQISYEFYHPMSSARQLGLGQLPIGLFFADKIQCRGQITSVLMMDRLLNLPGPPLGSIENIELAGFRSKNFDRWWGEWKLHLFHQSATMYMTDLFPDVIPQTTESSPPHQSNSGKDIEYAAGLIPNGGGLSPPVIGYHAPKTSTLLHGLTREPADVGQKRKTRVSAMSTSILAPKKKTKVRRTKPTDKPADDLPDLDPSIEQALDEEAIGDEVDQAAAEVSDTERTPSASPRQTLPTPSAPVHFSRKKKTAVKKKSAATTSKPAPPPSPTPSPSVQQSSSDQTPSAAGSHHVEEEEQPAAPAIPVLADLFSFDIRDYLDEGEEDTTSKALAPLSDDVKKTLGRILDRLEASSLDSLVVDCGSIRARLHEIQALIPDELADILTPAVYLEQHQFKLEKAKLTLAERRERKDIEATIQANRQLVHEEKSKLDQLSEGPIKSNIDWLEARKIDLLAQLEECNAELDMEHKKLADLPKSIEEQKARLKSAIKHVAELTKSLKVIPGTDAQDAQAKEEVEQIR

SEQ ID NO: 186634 - protein, 73 aa, Oryza sativa
  unsure (1)..(73): unsure at all Xaa locations
  Clone ID: PAT_MRT4530_83415C.1.pep
SPTPLRILDRRFIRKGAKMVEFVQVAWSGPDVQVITXENAQELRHRFPLAEAWGQASSQRGENVTASSPSVPD

SEQ ID NO: 186635 - protein, 177 aa, Oryza sativa
  Clone ID: PAT_MRT4530_83416C.1.pep
MGMGAKERKGGGLDGSSDSGREVERNLPGDKICAEACVAYALAPLAFIWAVGFPADGVGVGARGMGGSKRAVLAIRERGTGSGVGPTAEQMLKLKPTMVITSSPSSPFSPPRAPLDGDQELLLLLHLLIVRTPSGRHHLRSFASSLFSHASLVRRRRLLLSVSSAALRCCHGCPWSL

SEQ ID NO: 186636 - protein, 370 aa, Oryza sativa
  Clone ID: PAT_MRT4530_83417C.1.pep
MAPRSSPAIGGGGGGRVAVDLYPFLRVYEGGHIERLVRSTAAVAASHDDGTATSAAYRLAPEHPLPAAFADGWAALRWAASLADPWVARYADPTRLFLAGESAGATIAHNVAARAAGPDGDDVDIEGVALLQPCFWGARWLPSEEAAAAGWRDDEPPMLAPGRLDALWPYVTGGAAGNDDPRIDPPAEDVSSLPCRRALVAVAEKDVLSERGRRYAAQLRGGGREVTLVESEGEDHCFHLYRPARPSAVELMDRVAQFISPASSCLQAEELHLHGRHRTLCHGNATAAAATRSGAPRRQLVVSGGPTTAKLGRPKTKVCGGPACKAQTALCLGPRGMGKAQRHGFVGMGGPMPSGTNKYSVSSAALRVLC

SEQ ID NO: 186637 - protein, 543 aa, Oryza sativa
  Clone ID: PAT_MRT4530_83418C.1.pep
MARRKGRKGAFYRRRHRDPATYGDAAGRKGAAAALYCLRRRRTPAAAPCDGDRISDLSDDVLLLILRRLDTRAALAAAMLSTRWAPLRRELDALDFVVGDVLPPRYHRSVQLHKTIAYNGDAKALVATIKRQERLAMRNMAASIGCFLDADDSHDRAGRARRRRRRIGRLRVEFFATHYTDLMNRLITKALDAWGVEDLEVFAKSAYWSIPPDVHRFPHHGLCNQKSRLRSLKLGGCIIPPLQGFQALTELTLQDLQNSMPKSSYEAVISSCPQLQVLHLKSCRWVGQGILVIDAPRSGIKQLTVEFCSVIALHSLGMLERIAIRETWVSYKHHSSFSRVMHINLNLRHGYINRLRDLCIGWDLNIERFLGFTKNITNLVLRFTGYGRWFVPSCPSLLLANLTRLLIADVPSSWDVSWPRLLLEAAPCLESLHIHITPWDDEHCDEIIWKPSTLQHEKLKELVVVGFEGTERQVYFVNFVMEVSTALQLVALFRYGRVEEMGRWDWKIVRLQHHWSDEERSQILNQFAHRDSCSTTSVQVVLE

SEQ ID NO: 186638 - protein, 51 aa, Oryza sativa
  Clone ID: PAT_MRT4530_83419C.1.pep
LVRLLVMFGSPLMRPICSANKLHFSMSQFGVLRLTLIHCIVFYYNIVVPWF

SEQ ID NO: 186639 - protein, 51 aa, Oryza sativa
  Clone ID: PAT_MRT4530_8341C.1.pep
ERSNCSSTFLHFKLTFTTQSIYSSQFLMFSRHCNCAKMAFVALASAAVCAN

SEQ ID NO: 186640 - protein, 156 aa, Oryza sativa
  Clone ID: PAT_MRT4530_83420C.1.pep
MGVPAEALRPARQTSLAMWVGEIGTGDRADENEQRRWATIRRQRHQPHSDVIPKLDQGMRLRLAMECFGEAPAHKENIVVAVKEDSDGKQEMESPPGAPAHSHTLKHCRMWKKTWAWAWTMGGGGGATVWVTVDRESSDGCRIVRRSQALQRGGHG

SEQ ID NO: 186641 - protein, 124 aa, Oryza sativa
  Clone ID: PAT_MRT4530_83421C.1.pep
MGSSTILFYCVALSVVAAAAVVSSAAEEAEGPQDEAGRFLSEPCPVEFEQVKGFGELGAKCNDKQTMKECCELFKKIACPYNHLLNDITNVCANEFFYLIHTKGKLQPGTILENCNEGPMGINC

SEQ ID NO: 186642 - protein, 144 aa, Oryza sativa
  Clone ID: PAT_MRT4530_83422C.1.pep
MGRPLPIRRATKTSRIRRRRKLLRVGDMLVQQAAGLLCDRAHEQTIQPVCFTVRAGKPLMSNNARQEESRCARIFQLVELFSALLSYGIAVLIKRGMALLLPICNLLAPGANRDTQSGTKDYRHPQIPTNHPQLPIQKIIRNPQ

SEQ ID NO: 186643 - protein, 135 aa, Oryza sativa
  Clone ID: PAT_MRT4530_83423C.1.pep
MDRASEELERRSRYLSSLVRRTKLADPPEPEPEPEPEPEREREREVAAKESGGGEGKGGKVVEEKEVKAAKEKKEKEKEAKVEFDTTYGPAWHCIVGTSFGSYVTHSLGGFLYFSVDKLYILLFRTAVEPLSYQR

SEQ ID NO: 186644 - protein, 165 aa, Oryza sativa
  unsure (1)..(165): unsure at all Xaa locations
  Clone ID: PAT_MRT4530_83424C.1.pep
QFPTLPQPPPPPGDRAPVAAGICLSPASSRRCRSPPLPRQLPSPTCPPMLDRAPAATGLRQSPHARRRREIERPPLPISASPPAIQRPXCRWRPPPAPDAAGELELVPSKCWRSCVEFIPSTVELLRGLGPRADPLDSSHTTRLPGRAMDLPQQQQHPEINLGMH

SEQ ID NO: 186645 - protein, 131 aa, Oryza sativa
  Clone ID: PAT_MRT4530_83425C.1.pep
MPGNKVRRLSLHSSNPEHAKDAIERMNSSHVRSLTAFESLEQFQSFTFKFGILQVLDLEGCKGLTTSHLDKICKMFHLKFLSLRKAHVKKLPSDIGKLQYLETLDIRETNVQELPPSVADLKQMAHLLGGN

SEQ ID NO: 186646 - protein, 170 aa, Oryza sativa
  Clone ID: PAT_MRT4530_83426C.1.pep
VVLEKMSRVLAQGVPAFTPATTVDADLKDLSLVMDHNMSVASFNAAPAYLPKPAPARWCVLPPHPRRSEVAPPAKTVEEAPKAAPVQQYFPAPPPNVAGAAAISIAMQSAASKLAGPLRAAATTQINRLRGSAGRAGMPMIAPRSPLERSNVTVNRTLVPLWRPRARRRC

SEQ ID NO: 186647 - protein, 52 aa, Oryza sativa
  Clone ID: PAT_MRT4530_83427C.1.pep
MDKIKYWIDAWMEFKMFGAQGIIGAVMHDARESCDQKNNPLFDKFLQELLET

SEQ ID NO: 186648 - protein, 114 aa, Oryza sativa
  unsure (1)..(114): unsure at all Xaa locations
  Clone ID: PAT_MRT4530_83428C.1.pep
AGSLLEXAAILLDRGLHPMWIAEGYELASWVAFDHLEHISRAFEVRAPSVEPLVLTCLTSLSSSIVIRGPRTLAEIAVGAVLAVAALGRMAAFLVLLLVAGLVRGILEAPELVS

SEQ ID NO: 186649 - protein, 97 aa, Oryza sativa
  Clone ID: PAT_MRT4530_83429C.1.pep
MAAAGGGGSVGAAALEAVMAVEGQEATPSAEGGMRGAGVVEARLAARPRARLCHCLRGMSELLVDGVRRCSTTMTCCSLFYGVGASRVKEVAPWWLG

SEQ ID NO: 186650 - protein, 653 aa, Oryza sativa
  Clone ID: PAT_MRT4530_8342C.1.pep
MAGNKGEGPAIGIDLGTTYSCVGVWQHDRVEIIANDQGNRTTPSYVAFTDTERLIGDAAKNQVAMNPTNTVFDAKRLIGRRFSDPSVQADMKMWPFKVVPGPADKPMIVVTYKGEEKKFSAEEISSMVLTKMKEIAEAFLSTTIKNAVITVPAYFNDSQRQATKDAGVISGLNVMRIINEPTAAAIAYGLDKKAASTGEKNVLIFDLGGGTFDVSILTIEEGIFEVKATAGDTHLGGEDFDNRMVNHFVQEFKRKHKKDITGNPRALRRLRTACERAKRTLSSTAQTTIEIDSLYEGIDFYATITRARFEELNMDLFRRCMEPVEKCLRDAKMDKAQIHDVVLVGGSTRIPKVQQLLQDFFNGKELCKSINPDEAVAYGAAVQAAILSGEGNQRVQDLLLLDVTPLSLGLETAGGVMTVLIPRNTTIPTKKEQVFSTYSDNQPGVLIQVYEGERTRTKDNNLLGKFELTGIPPAPRGVPQINVTFDIDANGILNVSAEDKTTGKKNKITITNDKGRLSKEEIERMVQEAEKYKAEDEQVRHKVEARNALENYAYNMRNTVRDEKIASKLPADDKKKIEDAIEDAIKWLDGNQLAEADEFEDKMKELESLCNPIISKMYQGGAGGPAGMDEDAPNGSAGTGGGSGAGPKIEEVD

SEQ ID NO: 186651 - protein, 278 aa, Oryza sativa
  Clone ID: PAT_MRT4530_83430C.1.pep
MDIEAFIHGGSGGGDADADHPLGIFSAADLSGFGFADSSTITGGIPNHIWPQSQNLNARHPAVSTTIESQSSICAAASPTSATNLNMKESQTLGGTSGSDSESESLLDIEGGPCEQSTNPLDVKRVRRMVSNRESARRSRKRKQAHLADLESQVDQLRGENASLFKQLTDANQQFTTSVTDNRILKSDVEALRVKVKMAEDMVARGALSCGLGHLGGLSPALNPRQACRVPDVLAGLDYAGDDPFTAGLSQPEQLQMPGGEVVDAWGWDNHPNGGMSK

SEQ ID NO: 186652 - protein, 130 aa, Oryza sativa
  Clone ID: PAT_MRT4530_83431C.1.pep
PAGALAALSPPASSCLASVRRAPRPRSRSCSDMSRAAAFTSSNGPLTMKTERERARARGDGERKARSEFPSFLRSNWCFHQQAFYNVECRRPRPQPPSSGLDSTGNSSDISSVPVHLLPLRQRLDQASWI

SEQ ID NO: 186653 - protein, 75 aa, Oryza sativa
  unsure (1)..(75): unsure at all Xaa locations
  Clone ID: PAT_MRT4530_83432C.1.pep
LHLWRPDQLCHAVFNAACSALNRPVTGXLTDGTQSARSTTACVRRRASCPVPSAMMMRGLSLSSQPETACLTRLG

SEQ ID NO: 186654 - protein, 1891 aa, Oryza sativa
  Clone ID: PAT_MRT4530_83433C.1.pep
MLLPLSPLAERAVAHNLSPSTSGEDGEQNPRRRARTPLSPSRRSLGREEALEEVERSATSPHAGDGEGRRDGERRLLVYGDGSTPQGALQAAGALLRHPPVIPDPETPTRRWLDDVANLVMTAQQRLGAGWRSSATKATGVATAGSVSSRRRARRAAAATRRSSAIPSSTPPTQEDVRRGPDARFNIERRRNDRRAAHASEGASSSGAPLRSGHGGQPPVSPVGGAGCRAFVASLRNVRWPPRFRPTITEKYDGSVNPAEFLQIYTTRIEAAGGDDRVMANFFPMALKGQARGWLMNLPPASVHSWEDLCQQFTMNFQGTYPRPGEEADLHAGGVRHNRMLEKIASKEPQTTAELFQLADRVARKEEAWTWNSSCSGVAASAAPGSAARSGRRDRRRKKRSAHSDDEGHVLAVEGALRATRKGRPASDKKKEAGAPSRERPTGKWCTVHNTSLHDLADCRAVKSLAERTRKWEEERRQERREGNTPAAPAGNRRGEAKQKAPAEDINDGDDDLGFQEPEATVATVDGGACAHASRRSLKAMKRELLAVAPTHEVTRRARWSEVALTFDQTDHPPCVARGGQIAMVVSPTVCNVKLGRVLVDGGAALNILSPAAFDAIKAPGMVLRPSQPIIGVTPGHTWPLGHINLPVTFGGSANFRTERVNFDVADLSLPYNAVLGRPALVKFMVAVHYAYLQMKMPGPGGPITVHGDLKVALACMEQRADHLAAASKPAGGDERLSTSVPAAPRQRMITCDEVPIKQEDALVSFLRANADVFAWRPADMPGVPREVIEHRLAVRPGARPVRQKVRRQAPERQAFIREEVARLLEAGFIREVIHPEWLANPVVVPKANGKLRMCIDYTDLNKACPKDPYPLPRIDQIVDSTAGCDLLCFLDAYSSYHQIRMAREDEEKTAFITRIGTYCYTTMPFGLKNAGPTFQRTTRISLGSQIGRNVEAYVDDLVVKTRNQETLLSDLAETFESLRTARIKLNPDKCVFGVPAGKLLGFLISARGIEANPEKIRAIERMRPPSKLRDTEEAERALTQLKAYLSSPPVLVAPEPDEPLLLYLAATPQVVSAALVVERDEDDPRSAHPHPVSTRPGREQGGEAPEPNGGPRPPTTGTGPLPACPTVPGAPDPQDGPGATAGRPRLSPSDPEVVGTEAECAPCGLSDEEHPVSTRPGREQGGEAPEPNGGPRPPTTGAGPLPACPTVPGAPDPQDGPGATAGRPRLSPSDPEVVDTEAECAPRGLSDEKRPGDAAPGEEDRPRQKVQRPVYFVSEALRDAKTRYPQAQKMLYAILMASRKLRHYFQAHRVTVVTSYPLGQILHNREGTGRVVKWAIELSEFDLHFEPRHAIKSQALADFVAEWTPAPEPVSIPEASSGPSQLPHTAYWVMQFDGSLSLQGAGAGVTLTSPSGDVLKYLVRLDFRATNNMAEYEGLLAGLRVAAGLGIRRLLVLGDSQLVVNQVSKEYQCSDPQMDAYVRQIAEIQAYLADKTLPEDHEGSERVQCISKRYVLVEGTLYRHAANGVLLKCILREQGVELLADIHEGECGAHSASRTLVGKAFRQGFYWPTTLNDAVDLVRRCRACQFHAKQTHQPAQALQTIPLSWPFAVWGLDILGPFRRAPGGFEYLYVAIDKFTKWPEAYPVIKIDKHSALKFIRGITARFGVPNRIITDNGTQFTSELFGDYCEDMGIKLCFASPAHPRSNGQVERANAEILKGLKTKTFNILKKHGDSWIEELPAVLWANRTTPSRATGETPFFLVYGAEAVLPSELTLRSPRATMYCEADQDQLRRDDLDYLEERRRRAALRAAHYQQSLRRYHQRHVRARSLCVDDLVLRRVQTRAGLSKLSPMWEGPYRVIGVPRPGSVRLATGDGTELSNPWNIEHLRHFYP

SEQ ID NO: 186655 - protein, 428 aa, Oryza sativa
  Clone ID: PAT_MRT4530_83434C.1.pep
MSRQARKEAAAAAQDMLKLDVAWMRKPAALQSRKDAAAPMRKAQGGRSSGGVDGVYHVLVIAYGKLATALVIFLVPEWINHLYWSIRAPFLSTALSRINPSAINATTTTTHPFPSSILRLASPRRARILSDEPEPEMRCKLHPYANAVGVCAPCLRDRLLDLAAQRDAAADAAEADDHHHSSSSRASSSLFARSVSPYAAARRSDACAYASSSSSSAAAAHHHHHHPNLLFFRTPQVGPARAAGGGDEPEPRGKKVARRRSFLAAIFGGGGRGRHARGDDDVVRGGGVSAKDPPRRSTSWLSSIVRRKRRPEAAATAAESLPPPLDEAPDSPGGSTTSSWWFPSPSPARQHRRRHTGVGASGDGISGFAVCLSPLVRPTSGGGGGRRRCQPPDPSPLGDTHRRNLSAGGAASFGRNTSRKLADMGRFR

SEQ ID NO: 186656 - protein, 1938 aa, Oryza sativa
  Clone ID: PAT_MRT4530_83435C.1.pep
MAERAVAHNLSPSASGEDGEQNPRRRARTPLSLSRRSLGREEALEEVERSATSPHAGDGEGRRDGERRLLVYGDGSTPQGALQAAGALLRHPPVIPDPETPTRRWLDDVANLVMTAQQRLGAGWRSSATKATGVATAGSVSSRRRARRAAAATRRSSAIPSSTPPTQEDVRRGPDARFNIKRRRNDRRAAHASEGASSSGAPLRSGHGGQPPMSPVGGAGCRAFVASLRNVRWPPRFRPTITEKYDGSVNPAEFLQIYTIGIEAAGGDDRVMANFFPMALKGQARGWLMNLPPASVHSWEDLCQQFTMNFQGTYPRPSEEADLHAVQRGDDESLRSYIQRFCQVRNTIPCIPAHAVIYAFRGGVRHNRMLEKIASKEPQTTAELFQLADRVARKEEAWTWNSSGSGVAASAAPGSAARSGWRDRRRKKRSAHSDDEGHVLAVEGALWATRKGRPASDKKKEAGAPSRERPTGRWCTVHNTSLHDLVDCRAVKSLAERTRKWEEERRQERREGNTPAAPAGNRRGEAKQKAPAEDINDADDDLGFQEPEATVATVDGGACAHASHRSLKAMKRELLAVAPTHEATRRARWSEVALTFDQTDHPPCVARGGQIAMVVSPTVCNVKLGRVLIDGGAALNILSPAAFDAIKAPGMVLRPSQPIIGVTPGHTWPLGHIDLPVTFGGSANFRTERVNFDVADLSLPYNAVLGRPALVKFMVAVHYAYLQMKMPGPGGPITVHGDLKVALACMEQRADHLAAASKPAGGDERLSTSVPAAPRQRMITCDEVPIKQEDALVSFLRANADVFAWRPADMPGVPREVIEHRLAVRPGARPVRQKVRRQAPERQAFIREEVARLLEAGFIREVIHPEWLANPVVVPKANGKLRMCIDYTDLNKACPKDPYPLPRIDQIVDSTAGCDLLCFLDAYSGPTFQRTTRISLGSQIGRNVEAYVDDLVVKTRNQETLLSDLAETFESLRTARIKLNPDKCVFGVPAGKLLGFLISARGIEANPEKIRAIERMRPPSKLRDVQCVTGCGQRSVGRGARRGRPSLRASPPCVDSTRERAGRRGPRAERWPEAPNDRNWPSARLSDGARRPRPQDGPKATAGRPRLSPSDPEVVGTEAECAPRGLSDKEHPVSTRPGREQGGEAPEPNGGPRPPTTGAGPLPACPTVPGAPDPQDGPGATAGRPRLSPSDPEVVDTEAECAPRGLSDEKRPGDAAPGEEDRPRQKVQRPVYFVSEALRDAKTQYPQAQKMLYAILMASMRHYFQAHRVTVVTSYPLGQILHNREGTGRVVKWAIELSEFDLHFEPRHAIKSQALADFVAEWTPAPEPVSIPEVSSGPSQLPHTAYWVMQFDGSLSLQGAGAGVTLTSPSGDVLKYLVHLDFRATNNMAEYEGLLAGLRVAVGLGIRRLLVLGDSQLVVNQVSKEYQCSDPQMDAYVRQVRRMERHFNGIELRHVPRRDNAVADELSRLASSRAQTPPGAFEERLAQPSARPDPLGETDAPERPPRPVGVQASGPEGSAPSSLRLIAWIAEIQAYLADKTLPEDREGSERVQRISKHYVLVEGTLYRHAANGVILKCIPREQGIELLADIHEGECGAHSASRTLVGKAFRQGFYWPTARNDAVDLVRRCRACQFHAKQTHQPAQALQTIPLSWPFAVWGLDILGPFRRAPGGFEYLYVAIDKFTKWPEAYPVIKIDKHSALKFIRGITARFGVPNRIITDNGTQFTSELFGGYCEDMGIKLCFASPTHPRSNGQVERANAEILKGLKTKTFKFLKKHGDSWIEELLAVLWANRTTPSRATGETPFFLVYGAEAVLPSELTLRSPRATMYCEADQDQLCRDDLDYLEERRRRAALRAARYQQSLRRYHQRHVRARSLCVDDLVLRRVQTRAGLSKLSPMWEGPYRVIGVPRPGSVRLATGDGTELPNPWNIEHLRRFYP

SEQ ID NO: 186657 - protein, 1641 aa, Oryza sativa
  unsure (1)..(1641): unsure at all Xaa locations
  Clone ID: PAT_MRT4530_83436C.1.pep
MTAQQRLGAGWRSSATKATGVATAGSVSSRRRARRAAAATRRSSAIPSSTPPTQEDVRRGPDARFNIERRRNDRRAAHASEGASSSGAPLRSGHGGQPPVSPVGGAGCRAFVASLRNVRWPPRFRPTITEKYDGSVNPAEFLQIYTTRIEAAGGDDRVMANFFPMALKGQARGWLMNLPPASVHSWEDLCQQFTMNFQGTYPRPXFCQVRNTIPCIPAHAVIYAFXGGVRHNRMLEKIASKEPQTTAELFQLADRVARKEEAWTWNSSCSGVAASAAPGSAARSGRRDRRRKKRSAHSDDEGHVLAVEGALRATRKGRPASDKKKEAGAPSRERPTGKWCTVHNTSLHDLADCRAVKSLAERTRKWEEERRQERREGNTPAAPAGNRRGEAKQKAPAEDINDGDDDLGFQEPEATVATVDGGACAHASRRSLKAMKRELLAVAPTHEVTRRARWSEVALTFDQTDHPPCVARGGQIAMVVSPTVCNVKLGRVLVDGGAALNILSPAAFDAIKAPGMVLRPSQPIIGVTPGHTWPLGHINLPVTFGGSANFRTERVNFDVADLSLPYNAVLGRPALVKFMVAVHYAYLQMKMPGPGGPITVHGDLKVALACMEQRADHLAAASKPAGGDERLSTSVPAAPRQRMITCDEVPIKQEDALVSFLRANADVFAWRPADMPGVPREVIEHRLAVRPGARPVRQKVRRQAPERQAFIREEVARLLEAGFIREVIHPEWLANPVVVPKANGKLRMCIDYTDLNKACPKDPYPLPRIDQIVDSTAGQIGRNVEAYVDDLVVKTRNQETLLSDLAETFESLRTARIKLNPDKCVFGVPAGKLLGFLISARGIEANPEKIRAIERMRPPSKLRDTEEAERALTQLKAYLSSPPVLVAPEPDEPLLLYLAATPQVVSAALVVERDEDDPRSAHPHPVSTRPGREQGGEAPEPNGGPRPPTTGTGPLPACPTVPGAPDPQDGPGATAGRPRLSPSDPEVVGTEAECAPCGLSDEEHPVSTRPGREQGGEAPEPNGGPRPPTTGAGPLPACPTVPGAPDPQDGPGATAGRPRLSPSDPEVVDTEAECAPRGLSDEKRPGDAAPGEEDRPRQKVQRPVYFVSEALRDAKTRYPQAQKMLYAILMASRKLRHYFQAHRVTVVTSYPLGQILHNREGTGRVVKWAIELSEFDLHFEPRHAIKSQALADFVAEWTPAPEPVSIPEASSGPSQLPHTAYWVMQFDGSLSLQGAGAGVTLTSPSGDVLKYLVRLDFRATNNMAEYEGLLAGLRVAAGLGIRRLLVLGDSQLVVNQVSKEYQCSDPQMDAYVRQGFYWPTTLNDAVDLVRRCRACQFHAKQTHQPAQALQTIPLSWPFAVWGLDILGPFRRAPGGFEYLYVAIDKFTKWPEAYPVIKIDKHSALKFIRGITARFGVPNRIITDNGTQFTSELFGDYCEDMGIKLCFASPAHPRSNGQVERANAEILKGLKTKTFNILKKHGDSWIEELPAVLWANRTTPSRATGETPFFLVYGAEAVLPSELTLRSPRATMYCEADQDQLRRDDLDYLEERRRRAALRAAHYQQSLRRYHQRHVRARSLCVDDLVLRRVQTRAGLSKLSPMWEGPYRVIGVPRPGSVRLATGDGTELSNPWNIEHLRHFYP

SEQ ID NO: 186658 - protein, 81 aa, Oryza sativa
  unsure (1)..(81): unsure at all Xaa locations
  Clone ID: PAT_MRT4530_83437C.1.pep
MSCCGGNXGCGXGCQCGGGCGXCKXFPDVEATATTKTFXLXXPSNKASSGGMXGXXXKSXENGGXRAXNTLQVAPSVCWAT

SEQ ID NO: 186659 - protein, 1944 aa, Oryza sativa
  Clone ID: PAT_MRT4530_83438C.1.pep
MAERAVAHNLSPSASGEDGEQNPRRRARTPLSPSRRSLGWEEALEEVERSVTSPHASDGEGRRDGERRLLVYGDGSTPQGALQAAGALLRHPPVIPDPETPTRRWLDDVANLVMTAQQRLGAGRFLVRSATSVRARGQPPVSPVGGAGYRAFVASLRNVRWPPRFQPTITEKYDGSVNPAEFLQIYTTGIEAAGGDDRVMANFFPMALKGQARGWLMNLPPASVHSWEDLCQQFTMNFQGTYPRPGEEADLHAVQRGDDEFLRSYIQRFCQVRNTIPCIPAHAVIYAFRGGVRHNRMLEKIASKEPQTTTELFQLADRVARKEEAWTWNSSGSGVAASAAPGSAARSGRRDRRRKKRSAHSDDEGHVLAVEGALRATRKGRPASDKKKEAGAPSRERPTGKWCTVHNTSLHDLADCRAVKSLAERTRKWEEERRQKRREGNTPAAPAGNRRGEAKQKAPAEDINDGDDDLGFQEPEATVATVDGGACAHASRRSLKAMKRELLAVAPTHEATRRARWSEVALTFDQTDHPLCVARGGQIAMVVSPTVCNVKLGRVLVDGGAALNILSPAAFDAIKAPGMVLRPSQPIIGVTPGHTWPLGYIDLPVTFGGSANFRTERVNFDVADLSLPYNAVLGRPTLVKFMVAVHYAYLQMKMPGPGGPITVHGDLKVALACMEQRPDHLAAASKPTGGDETLSTSVPAAPRQQMITCDEVPIKQEDALVSFLRANADVFAWRPADMPGVPREVIEHRLAVRPGARPVRQKVRRQAPERQAFIREEVARLLEAGFIREVIHPEWLANPVVVPKANGKLRMCIDYTDLNKACPKDPYPLPRIDQIVDSTAGCDLLCFLDAYSGYHQIRMAMEDEEKTAFITPIGTYCYTTMPFGLKNAGPTFQRTTRISLGSQIGRNVEAYVDDLVVKTRNQETLLSDLAETFESLRTARIKLNPDKCVFGVPAGKLLGFLISARGIEANPEKIRAIERMRPPSKLRDVQCVTGCMAALSRFISRLGEKALPLFKLLKRSGPFIWMEEAERALTQLKAYLSSPPVLVAPEPDEPLLLYLAATPQVVSAALVVERDEDDPRSAHPHPVSTRLGREQGGEAPEPNGGPRPPTTGTGPLPACPTVPGAPDPQDGPGATAGRPRLSPSDPEVVGTEAECAPRGLSDEEHPVSTRPGREQGGEAPEPNGGPRPPTTGAGPLPACPTVPGAPDPQDGPGATAGRPRLSPSDPEVVDTEAECAPRGLSDEKRPGDAAPGEEDRPRQKVQRPVYFVSEALRDAKTRYPQAQKMLYAILMASRKLRHYFQAHRVTVVTSYPLGQILHNREGTGRVVKWAIELSEFDLHFEPRHAIKSQALADFVAEWIPAPEPGAGVGVTLTSPSGDVLKYLVRLDFRATNNMAEYEGLFAGLRVAAGLGIRRLLVLGDSQLVVNQVSKEYQCSDPQMDAYVRQVRRMERHFDGIELRHVPRRDNAVADELSRLASSRAQTPPGAFEERLAQPSARPDPLGETDAPEWPPRPVGVQASGPEGGAPSSLRLIAWIAEIQAYLADKTLPEDREGSERVQRISKRYVLVEGTLYRHAANGVLLKCIPREQGVELLADIHEGEYRAHSASRTLVGKAFRQGFYWPTALNDAVNLVRRCRACQFHAKQTHQPAQALQTIPLSWPFAVWGLDILGPFRRAPGGFEYLYVAIDKFTKWPEAYPVIKIDKHSALKFIRGITARFGVPNRIITDNGTQFTSELFGDYCEDMGIKLCFASPAHPRSNGQVERANAEILKGLKTKTFNILKKHGDSWIEELPAVLWANRTTPGRATGETPFFLVYGAEAVLPSELTLRSPRATMYCEADQDQLRRDDLDYLEERRRRAALRAARYQQSLRRYHQRHVRARSLCVDNLVLRRVQTRAGLSKLSPMWEGPYRVIGVPRPGSVRLATGDGTELPNPWNIEHLRRFYP

SEQ ID NO: 186660 - protein, 1740 aa, Oryza sativa
  Clone ID: PAT_MRT4530_83439C.1.pep
MERGGRTERDITEKRRGAVTRGRRRGSNLSGLGPGKRKERARPKSPSASSNAPALPALGEGRRRRDRARGRRQRGGVRHNRMLEKIASKEPQTTAELFQLADRVARKEEAWTWNSSGSGVAAPAAPGPAARSGRRDRRRKKRSAHSDDEGHVLAVEGASRATRKGRPASDKKKEAGAPSRERPTGKWCTVHNTSLHDLVDCRAVKSLAERTRKWEEERRQERREGNTPAAPAGNRRGEAKQKAPAEDINDGDDDLGFQEPEATVATVDGGACAHASRRSLKAMKRELLAVAPTHEATRRARWSEVALTFDQTDHPPCVARGGQIAMVVSPTVCNVKLGRVLIDGGAALNILSPAAFDAIKAPGMVLRPSQPIIGVTPGHTWPLGHIDLLVTFGGSANFRTERVNFDVADLSLPYNAVLGRPALVKFMVAVHYAYLQMKMPGPGGPITVHGDLKVALACMEQRADHLAAASKPAGGDERLSTSVPAAPRQRMITCDEVPIKQEDALVSFLRANADVFAWRPADMPGVPREVIEHRLAVRPGARPVRQKVRRQAPERQAFIREEVARLLEAGFIREVIHPVWLANPVVVPKANGKLRMCIDYTDLNKACPKDPYPLPRIDQIVDSTAGCDLLCFLDAYSGYHQIRMAREDEEKTAFITPIGTYCYMTMPFGLKNAGPTFQRTARISLGSQIGRNVEAYVDDLVVKTRNQETLLSDLAETFESLRTARIKLNPDKCVFGVPAGKLLGFLISARGIEANPEKIRAIERMRPPSKLRDVQCVTGCMAALSRFISRLGEKALPLFKLLKRSGPFIWTEEAERALTQLKVYLSSPPVLVAPEPDEPLLLYLAATPQVVSAALVVERDEDDPRSAHPHPVSTRPGREQGGEAPEPNDGPRPPTTRAGPLPACPTVPGAPDPQDGPGATAGRPRLSPSDPEVVGTEAECAPRGLSDEEHPVSTRPGREQGGEAPEPNGGPRPPTTGAGPLPACPTVPGAPDPQDGPGAIAGRPRLSPSDPEVVNTEAECAPRGLSDEKRPGDAAPGEEDRPRQKVQRPVYFVSEALRDAKTRYPQAQKMLYAILMASRKLRHYFQAHRVTVVTSYPLGQILHNREGTGRVVKWAIELSEFDLHFEPRHAIKSQALADFVAEWTPAPEPVSIPEASSGPSQLPHTAYWVMQFDGSLSLQGAGAGVTLTSPSGDVLKYLVRLDFRATNNMAEYEGLLAGLRVAAGLGIRRLLVLGDSQLVVNQVSKEYQCSDPQMDAYVRQVRRMERHFDGIELRHVPRRDSAVADELSRLASSRAQTPPGAFEERLAQPSARPDPLGETDVPERPPRPVGVQASGPEGSASSSLRLIAWIAEIQAYLADKTLPEDREGSERVQRISKRYVLVEGTLYRHAANGVLLKCIPREQGVELLADIHEGECGAHSASRTLVGKAFRQDFYWPTALNDAVDLVRWCRACQFHAKQTHQPAQALQTIPLSWPFAVWGSISWFTKWPEAYPVIKIDKHSALKFIRGITARFGVPNRIITDNGTQFTSELFGDYCEDMGIKLCFASPAHPRSNGQVERANAEILKGLKTKTFNILKKHGDSWIEELPAVLWANRTTPSRATGETPFFLVYGAEAVLPSELTLRSPRATMYCEADQDQLRRDDLDYLEERRRRAALRAARYQQSLRRYHQRHVRARSLYVDDLVLRRVQTRAGLSKLSPMWEGPYRVIGVPRPGSVRLATGDGTELPNPWNIEHLRRFYP

SEQ ID NO: 186661 - protein, 85 aa, Oryza sativa
  Clone ID: PAT_MRT4530_8343C.1.pep
WAPRRSRGSAECTPRPPNDARAQIRSSLLPAGLSFSAGMPKLPPFGTQGAGAGFCFCKEGKTAGFFLEITRRLRTYRCFAKKRLA

SEQ ID NO: 186662 - protein, 1965 aa, Oryza sativa
  unsure (1)..(1965): unsure at all Xaa locations
  Clone ID: PAT_MRT4530_83440C.1.pep
MAERAVAHNLSPSASGDDGEQNPRRRARTPLSPSRRSLGREEALEEVERSATSPHAGDGEGRRDGERRLLVYGDGSTPQGALQAAGALLRHPPVIPDPETPTRRWLDDVANLVMTAQQRLRAGWRSSATKATGVATAGSVSSRRRARRAAAATRRSSAIPSSTPPTQEDVRRGPDACFNIERRRNDRRAAHASEGASSSGAPLRSGHGGQPPMSPVGGAGCRAFVASLRNVRWPPRFRPTITEKYDGSVNPAEFLQIYTTGIEAAGGDDRVMANFFPMALKGQARGWLMNLPPASVHSWEDLCQQFTMNFQGTYPRPSEEADLHAVQRGDDESLRSYIQRFCQVRNTIPCIPAHAVIYAFRGGVRHNRMLEKIASKEPQTTAELFQLADRVARKEEAWTWNSSGSGVAAPAAPGPAARSGWRDRRRKKRSAHSDDEGHVLAVEGASWATRKGRPASDKKKEAGAPSRERPTGRWCTVHNTSLHDLVDCRAVKSLAERTRKWEEERRQERREGNTPAAPAGNRRGEAKQKAPAEDINDADDDLGFQEPEATVATVDGGACAHASHRSLKAMKRELLAVAPTHEATRRARWSEVALTFDQTDHPPCVARGGQIAMVVSPTVCNVKLGRVLIDGGAALNILSPAAFDAIKAPGMVLRPSQPIIGVTPGHTWPLGHIDLPVTFGGSANFRTERVNFDVADLSLPYNAVLGRPALVKFMVAVHYAYLQMKMPGPGGPITVHGDLKVALACMEQRADHLAAASKPAGGDERLSTSVPAAPRQRMITCDEVPIKQVALGDGPVSFLRANADVFAWRPADMPGVPREVIEHRLAVRPGARPVRQKVRRQAQERQAFIREEVARLLETGFIREVIHPEWLANPVVVPKANGKLRMCIDYTDLNKACPKDPYPLPRIDQIVDSTAGCDLLCFLDAYSGYHQIRMAREDEEKTAFITPIGTYCYTTMPFGLNNAGPTFQRTTRISLGSQIGRNVEAYVDDLVVKTRNQETLLSDLAETFESLRTARIKLNPDKCVFGVPAGKLLGFLISARGIEANPEKIXAIERMRPPSKLRDVQCVTGCMAALSRFISRLGEKALPLFKLLKRFGPFIWTEEAERALTQLKAYLSSPPVLVAPEPEEPLLLYLAATPQVVSAALVVERDEDDPRSAHPHPVHPVSTRPGREQGGEAPEPNGGPRPPTTGAGPLPACPTVPGAPDPQDGPGATAGRPRLSPSDPEVVDTEAECAPRGLSDEKRPGDAAPGEEDRPRQKVQRPVYFVSEALRDAKTQYPQAQKMLYXLRHYFQAHRVTVVTSYPLGQILHNREGTGRVVKWAIELSEFDLHFEPRHAIKSQALADFVAEWTPAPEPVSIPEVSSGPSQLPHTAYWVMQFDGSLSLQGAGAGVTLTSPSGDVLKYLVHLDFRATNNMAEYEGLLAGLRVAVGLGIRRLLVLGDSQLVVNQVSKEYQCSDPQMDAYVRQVRRMERHFNGIELRHVPRRDNAVADELSRLASSRAQTPPGAFEERLAQPSARPDPLGETDTPERPPRPVGVQASGPEGSAPSSLRLIAWIAEIQAYLADKTLPEDREGSERVQRISKHYVLVEGTLYRHAANGVILKCIPREQGIELLADIHEGECGAHSASRTLVGKAFRQGFYWPTARNDAVDLVRRCRACQIHAKQTHQPAXALQTIPLSWPFAVWGLDILGPFRRAPGGFEYLYVAIDKFTKWPEAYPVIKINKHSALKFIRGITARFGVPNRIITDNGTQFTSELFGDYCEDMGIKLCFASPAHPRSNGQVERANAEILKGLKTKTFNILKKHGDSWIEELPAVLWANQTTPSRATGETPFFLVYGAEAVLPSELTLRSPRATMYCEADQDQLRRDDLDYLEERRRRAALRAARYQQSLRRYHQRHVRARSLCVDDLVLRRVQTRAGLSKLSPMWEGPYRVIGVPRPGSVRLATGDGTELPNPWNIEHLRRFYP

SEQ ID NO: 186663 - protein, 127 aa, Oryza sativa
  unsure (1)..(127): unsure at all Xaa locations
  Clone ID: PAT_MRT4530_83441C.1.pep
TAAAVISGXPATCGAASVRWHRAIGXPREXQAIGVAQLGLQRAFARXVHRVPDEPTLGVDGQSWNEPSPSPETGLVLPTEGPPSSGPLTSNVTGGVXDGGSLFSDSAVTTERGSSSRRRGRVRSWTA

SEQ ID NO: 186664 - protein, 135 aa, Oryza sativa
  Clone ID: PAT_MRT4530_83442C.1.pep
SRPREFDPNKKPNTHVLPPSQSDPSKRGGHGTKTAGGTSGCRRRAAAKVLGAVIGLVDELDAERRQGRHQSLRREDSFLLGRRLKAIGLEGSVGGVLIVGPKGRRRFERSRGRRRFLGGRRLQGDQRIRWWRGGR

SEQ ID NO: 186665 - protein, 127 aa, Oryza sativa
  Clone ID: PAT_MRT4530_83443C.1.pep
TQPFGSLDRFRGASVRCRLRLLYDRILKGSGIALALQWTLWPLIVETYCLVAIHMIKSQEKDKSDLAFLVREVKDLLAGNREIRIVKGHRNQNRVSHTLANKARCESMSKFWPKNSCNFISHIDCEE

SEQ ID NO: 186666 - protein, 27 aa, Oryza sativa
  Clone ID: PAT_MRT4530_83444C.1.pep
MGDVAKDLTAGTVGGAAQLVVGHPFDT

SEQ ID NO: 186667 - protein, 1098 aa, Oryza sativa
  Clone ID: PAT_MRT4530_83445C.1.pep
MAPAIGSRRLTVLREFRPHGLAAEEADGEGGPGERPPQDYDYFLFDPALAASPAPEPGEEAASSSSGADGDHELFIRGNRIIWSAGSRVHKRYLSPNTVIMVDTLSIYNVNGEVASIPLPYAVSSIWPLPSGLLLQKSTDGGHMVLSSTSLLKSRDLIRPNKEFGLNYNVSSQVNTLETVSKADGAIFSSHLILKHPLEEPQATYFEEWGRLDMMKDFDEKTIWTSDIVPLMASYHKGKFQHSVWQIDGTTYQEEINDNAVPPIPCDISMHKFAFRKIWQGKCSQSAASKVFLATDIDGTPIICFLLHEQKILLAVRFQVDENNGESFGDIKPHMSWNIPALAAAPVVVTRPRAWAGVLPFTDILILTPDNDLLLYSGKQCLCRYTLPTELGKGIFSNYELNSGVTEFYSDMEITSITDAVEGRINVTCSNGLISPANSSESPCTAWDFLINSKHHAKYGKQSRTSLPMSYNTSSMSFHSFPQDGNSADVSFYIRFISETLDTLHALYENLKLNILRKQELRGALPPEVWVLCDRATDIYNIHAANQWTSKFLKEILNSEDTDSVYRSVEDGMEHIFTSTTQLRYGRDLRLNEVRRLLCSARPVAIQTPNNPSVSDQDLQQQQLWNFAQRTTALPFGRGAFTLATTYTLLTEALVFPKLVLAGRLPAQQNATVNLDLSTRSVSEFKSWAEFHNGVAAGLRLAPFQEKMLRTWIQYNRPFEPNFTHAGLLLAFGLHEHLRVLTMTDAYRYLSQSAAVMGIGLLYEGSAHALTMKILLGEIGRRSGGDNVLEREGYAVAAGSALGLVALGRGSNAFGFMDTFLDRLFEYIGSKEVYHYGKKGDNNYAQWDDKGSVHLVTFGRVEKHLNAAIAADEQSGNTGQMMEGAQINVDVTAPGAIIALALIFLKAESEEIAARLSVPNSHFDLQYVRPDFVMLRIVARNLILWNRIQPTKDWVESQVPSFVNFGVSNTSQEAMDSDELDSEALFQAYVNIVTGACIALGLKYAGSRNSDAQELLYAYAVHFLNEIKHISIQTASILPKGLLQHVDRGTLELCLHLIVLSLSLVMAGSGHLQTFRLLRYLRGRSSAEGQVNYGLQMA

SEQ ID NO: 186668 - protein, 140 aa, Oryza sativa
  Clone ID: PAT_MRT4530_83446C.1.pep
MAASLACAFFFDAEPVGEQGRHALDACALCTKQLTRDSDIFMYKGDTPFCSEECRYEQMQLDAVYARCVKRLRITRCVLLYMACSTNICHDSRRLEEELSSTIGLFWNLDTPLQCACLTMWCCRLIRGQKAGHLGALLNF

SEQ ID NO: 186669 - protein, 1671 aa, Oryza sativa
  Clone ID: PAT_MRT4530_83447C.1.pep
MAPAIGSRRLTVLREFRPHGLAAEEADGEGGPGERPPQDYDYFLFDPALAASPAPEPGEEAASSSSGADGDHELFIRGNRIIWSAGSRVHKRYLSPNTVIMVDTLSIYNVNGEVASIPLPYAVSSIWPLPSGLLLQKSTDGGHMVLSSTSLLKSRDLIRPNKEFGLNYNVSSQVNTLETVSKADGAIFSSHLILKHPLEEPQATYFEEWGRLDMMKDFDEKTIWTSDIVPLMASYHKGKFQHSVWQIDGTTYQEEINDNAVPPIPCDISMHKFAFRKIWQGKCSQSAASKVFLATDIDGTPIICFLLHEQKILLAVRFQVDENNGESFGDIKPHMSWNIPALAAAPVVVTRPRAWAGVLPFTDILILTPDNDLLLYSGKQCLCRYTLPTELGKGIFSNYELNSGVTEFYSDMEITSITDAVEGRINVTCSNGLMLRCSLRKSPSSSLVGDCITAMAEGLQSCFYSHFVSLLWGDSDAAYLCSSSHVDSEWESFSYEVEKICAKYGQISPAKSSESPCTAWDFLINSKHHAKYGKQSRTSLPMSYNTSSMSFHSFPQDGNSADVSFYIRFISETLDTLHALYENLKLNILRKQDLASLASLLCRVASSLGENSYVDYYCRDFPDNLVEFHSLSSATALRAPPCLFRWLENCLRHGCDLKTSDDIPALMCKEKSSAALDKCRESPPDDWPAPAYVLVGRDDLAMARMGSGRRENGFWNNDNLTSISVPYMLHLQPVTVLTTALDVPPSEILNSEDTDSVYRSVEDGMEHIFTSTTQLRYGRDLRLNEVRRLLCSARPVAIQTPNNPSVSDQDLQQALVFPKLVLAGRLPAQQNATVNLDLSTRSVSEFKSWAEFHNGVAAGLRLAPFQEKMLRTWIQYNRPSEPNFTHAGLLLAFGLHEHLRVLTMTDAYRYLSQEHDITRLGLLLGLAASNRGTMHPAISKMLYFHVPSRHPSSTPELELPTLLQAAAAMGKGLLYEGSAHALTMKILLGEIGRRSGGDNVLEREGYAVAAGSALGLVALGRGSNAFGFMDTFLDRLFEYIGSKEVYHYGKNGDNNYAQWDDKGSVHLVTFGRVEKHLNAAIAADEQSGNTGQMMEGAQINVDVTAPGAIIALALIFLKAESEEIAARLSVPNSHFDLQYVRPDFVMLRIVARNLILWNRIQPTKDWVESQVPSFVNFGVSNTSQEAMDSDELDSEALFQAYVNIVTGACIALGLKYAGSRNSDAQELLYAYAVHFLNEIKHISIQTASILPKGLLQHVDRGTLELCLHLIVLSLSLVMAGSGHLQTFRLLRYLRGRSSAEGQVNYGLQMAIAPAGHLRCVGLSVHLPVLSTMQAFRHLYVIATEPRWIQTVDVDTGLPVYCPLEVTVAETEYYDETNYCEVTPCLLPERSVVYTQTGFLSNELHNLKRLFLLQLKNIRVCGPRYWSQVITLTPEDKPWWKSGDRTDPFNGGVLYIKRKVGSCSYSDDPIGCQSLLSRAMHEVCDTPSTSCSNQANSATRSSLRVDQLVYISFYTIIETMWEHLKIGHFPFSDSLFLSSLKVASAYNEALIDGRITTGGIIQSTFLESLMKRIEYIFAELPNLHDSFINYLNKGKWPDAQNEAVLLSWYLQWYSIPPPHIVSSAIEKVKPRTRTSLSMLPLLRLLLPTTHLVGLMEIEKLHMTHGHEGLTLH

SEQ ID NO: 186670 - protein, 326 aa, Oryza sativa
  Clone ID: PAT_MRT4530_83448C.1.pep
MDVNMVLFDDDDDYWDKEEEEDDERVEVPKSGGVYGYDVPFPNMDFLDDPEENDLYLFKVGITHCDGGGHEHYIIAALMFDSSRKMYDLHRFHSKNGSWSTKALHLGTMEPSPGLTFFFHDTYKVITLGGGFMAWVDLRRGILLCDVLLDDPEPHFIPLPPPLKADKELIGDAREFRDIAVVHGYIKYVEIQSYISDGWVAATWSRKITLEDSWEGDWRKDCELHVSDISGSLPELLGDEEARTAQLNLQSLHTGNPTISLQDDDVVYFLAKVGLRDDKSYVLAVNMRSKTLQGAACFGAERVLDMNFTCTQSRISHYLRNTPGKS

SEQ ID NO: 186671 - protein, 82 aa, Oryza sativa
  Clone ID: PAT_MRT4530_83449C.1.pep
GRLGDTVRQRRRPAAAVFSVAAHRAGLLAPRRLPRRPPFPSLPGVGAVDLPAPWLPPADQTTLLLTESPSLCVTMLCVYRLN

SEQ ID NO: 186672 - protein, 161 aa, Oryza sativa
  Clone ID: PAT_MRT4530_8344C.1.pep
MVSESHVSTSNSFATSQSATARRGRSCPAHHCACTADASRTGSSPKSDQCRRQEIQTTARLHHTLAMRDTTARTFDRSLVVSEYLGCYIYDYDVVDNTDDLATHDIPRARTPLAPKGERVVGKTARTASYETAISLRQPENTTDDADEETPTAAAAAEPTV

SEQ ID NO: 186673 - protein, 101 aa, Oryza sativa
  Clone ID: PAT_MRT4530_83450C.1.pep
RFRQSCLEQLGSLRVHLAKTGREELGSWREEVRLVNKPPSASLLRSALLHPRTTAAAAEEEEKLSRRRRRAVAWGSGGETEEEDSFVHFPLPKIRGLCPRV

SEQ ID NO: 186674 - protein, 51 aa, Oryza sativa
  Clone ID: PAT_MRT4530_83451C.1.pep
MPLGHDFCQPPSIRNTNARSKWAVKTSLEDVGDALGYTRTHGRSSRKIEWE

SEQ ID NO: 186675 - protein, 128 aa, Oryza sativa
  Clone ID: PAT_MRT4530_83452C.1.pep
MEVGHGLAAGGRWRRDEGRARARAGGGMAAERGLRLAAVPAWLLVRSMAGTAESPASSCVSSDAEEEAAVAKPMVVAGCPQCLMYVMLSEDEQQPKCPRCKSPVLLHFLHGAAAGAGAAASSKPPSKT

SEQ ID NO: 186676 - protein, 65 aa, Oryza sativa
  Clone ID: PAT_MRT4530_83453C.1.pep
MSAARTEGKLCIVVGVGALWGHDEDGDPWRRGGCEGELCTAELGVGFVAASMAHGAAGEDPIGGA

SEQ ID NO: 186677 - protein, 578 aa, Oryza sativa
  unsure (1)..(578): unsure at all Xaa locations
  Clone ID: PAT_MRT4530_83454C.1.pep
YALFSPSRRSDWFVIGARIVAMGSACSRKRGQLLVDEEDLYSARFSKSSSFKWLLHTLPRSGSDVHRKVQGPVPARCPSLMELCVAKVREDIGKYSDFSLLPRDLSQQVFNELVEWNILTEELLGAFRDCALQDICLADYPGVRDAWMEVAASQGQSLLSVDISCSDVTDGGLNQLKDCINLQSLSCNYCDQISEHGLKTLSGLSNVTSLSFKKCSAVTAEGAKAFANMVNLGSLDLERCPKIHGGLVHLKGLRKLEKLNLRYCNGITDSDMKHLSDLTNLRELQLSCCKISDLGVSYLRGLSKLAHLNLEGCAVTAACLEVISGLASLVLLNLSRCGVYDEGCEHLEGLVKLKVLNLGFNYITDACLVHLKELINLECLNLDSCKIGDEGLAHLKVFHKTLKAENHTISLMXLLKLRSLELSDTEVGSNGLRHLSGWCSFPLXGLTGLTHLDLFGARITDAGTNCLKYFKNLQSLEVCGGLITDAGVKNIKDLKALTLLNLSQNGNLTDKSLELISRLTALVSLNVSNSRVSNSGLHHLKPLQNLRSLSLESCKVTAIEIKKLQLAALPNLVSVRPE

SEQ ID NO: 186678 - protein, 340 aa, Oryza sativa
  Clone ID: PAT_MRT4530_83455C.1.pep
MGRGRAPCCAKVGLNRGSWTPQEDMRLIAYIQKHGHANWRALPKQAGLLRCGKSCRLRWINYLRPDLKRGNFTADEEDTIIKLHGLLGNKWSKIASCLPGRTDNEIKNVWNTHLKKRVSQREKPGDTKKKGKAADASDDADAHSPSSSASSSTTTAANNNNSGDTAGEQCGTSKEPENVDVSFFEQDIDISDMLVDAPTEAPLVAAPMPPSPCSSSSLTTTTCVGAVSDELLDLPEIDIEPDIWSIIDGYGGDEPGDGDATVPCTASPGEEGAEWWVENLEKELGLWGPMDESLAHPDPPGQVCYPGPLTETEGDPVSTYFQSGPTASPLQEIASPAVLS

SEQ ID NO: 186679 - protein, 135 aa, Oryza sativa
  Clone ID: PAT_MRT4530_83456C.1.pep
TPSTLPSMSPPPTTRTPSARAGTALPSASTPRSSCSRRCLPPLHKPSTPRSPLPTPCSVSSPPSPAPPIPSCSTPRSVPSPSPPTRPPPSASSPCASAIRVRSVRGAAPGVQASTRLLPRSPSPSLPLVSDSLCS

SEQ ID NO: 186680 - protein, 155 aa, Oryza sativa
  unsure (1)..(155): unsure at all Xaa locations
  Clone ID: PAT_MRT4530_83457C.1.pep
FNIVLKPSKNAIVTMVAIDITIAHIMDQQEFITIKSSKCWNLIRPPTTLTSNGXPFSGREYLMKSSRSPLSNGSSHISKFYLSQLXSYKQGVTSLIMGVXTCNFIWDPGPCGVRPNQVELDSGDPLIVLPPPXIARNKVDLHRQDQQPMEGCIDR

SEQ ID NO: 186681 - protein, 359 aa, Oryza sativa
  Clone ID: PAT_MRT4530_83458C.1.pep
MIRRFLYMVDIFDKSHGPISRRLRRINPSHLFYPNDALPVPQSSSSATVVEDAPLPPIDMTFCGSTEFMRRSDDKIVSVDRTTRRAILYDPAEHTVRVLPSMVEYKFWTKSFAVGDDLYVMETIPLPDKVDLGRDARPGRSFEALIHREPRPVDGDRIEDECYWRPLPPPPYVHAAGIRTDGQICGYAVVGESHILVSTHSYGAYSFDTASAAWSKVGDWALPFCGRAEFVPEHGLWLGLSVADDGVLGAWDLSSTIHHQQPPPVAHHGCKGFAVPEVPYASHVVHLGAGKLCVAKLFMVAHHRETCSHSCCDFDSDKRYFAILTGVEVVRCNGDKVDIIKHKSCRYSFGEHYIPIYLL

SEQ ID NO: 186682 - protein, 55 aa, Oryza sativa
  Clone ID: PAT_MRT4530_83459C.1.pep
PCSNPNPFAIIHFVTICSCMSERERDRVSDTLLLLQVKYSPSRAHDCLMLLIDSS

SEQ ID NO: 186683 - protein, 539 aa, Oryza sativa
  Clone ID: PAT_MRT4530_8345C.1.pep
MIPLYSGGVIKNSEFNVGLTDWTVPLGVQATVNSSSSGNKFAEARTDGQPSRTVYQTVQIQPNTHYSLSAWLQVSAGTANVMAVVRTPDGQFVAAGATVAKSGCWSMIKGGMTSYSSGQGQLYFEADAAVAIWVDSVSLQPFTFDEWDAHRQQQSAGRARRSTLGVVVARGTDGAPVPNATVTAELLRPGFPFGNAMTREILDNPAYEQWFASRFTVATFENEMKWYATEGRQGHEDYRVPDAMLALAERHGVRVRGHNVFWDDQSTQMAWVRSLGPDELRAAMDKRLRSVVSRYGGGRVIGWDVVNENLHWSFYDGKLGPDASPAIYHQVGKIDGETPLFMNEFNTVEQPVDMAAMASKYVAKMNQIRSFPGNGGLKLAVGLESHFGATPNIPFMRATLDTLAQLKLPIWLTEIDVANGTNQAQHLEEVLREGHGHPNVDGMVMWAAWHATACYVMCLTDDEFKNLAVGDVVDKLIAEWRTHPVAVATTDADGVVELDLAHGEYNVTVTHPSLVSSAVRTLTVDASSSSSENAIDIRV

SEQ ID NO: 186684 - protein, 271 aa, Oryza sativa
  Clone ID: PAT_MRT4530_83460C.1.pep
MRHLRLAAALLLVVLFPLAVSAADGKAAAAPAKAKAPAAPPPAPPNITASMAKGGCKAFAALVAASPDALSTFQSAADGGVTAFCPTDDAMRAFMPTYKNLTADGKASLLLFHAVPVYYSLRSLKSNNGVMNTLATDGSAKNFNFTVQNEGDKVTIKTDASDGVARIKDTVYDKDPIAIYAVDTVLEPVELFEPAESPAPAPAPVADAPKASKSKKASHRHVADAPGPAGDDAPPADQRKSSKKNDAAAGASCLRWLAALPVAVAVAAALA

SEQ ID NO: 186685 - protein, 347 aa, Oryza sativa
  Clone ID: PAT_MRT4530_83461C.1.pep
MASSSGEGKGAGGAGYQYAPYGGSYYDEERRWWPWLVPTVLVACIVVFLVEMFVNDCPRHGSPLRGESCVAGFLHQFAFQPLRENPLLGPSSATLFILIVLRTRGVLSANKLFAPLASLEKMGALDWAKVVHQHQAWRLISCIWLHAGLIHLIVNMLSLLFIGLRLEQQFGFVRIGIIYLLSGFGGSVLSVLFLRNNYISVGASGALFGLLGSMLSELIMNWTIYSNKAAAIITLLFIIAINLAIGILPHADNFAHIGGFVTGFLLGFVLLARPQFGWMERHELPQTNQPRKYRAYQYVLWAVALFLLLVGFVIALVMLFKGKNGNDGCHWCHYLNCIPTSRWKCST

SEQ ID NO: 186686 - protein, 58 aa, Oryza sativa
  Clone ID: PAT_MRT4530_83462C.1.pep
FSLAITTIFFLPPSTTPQENPTKLWSCVYDVYLKKKWQRRHSISRPNLKTSSCLACWE

SEQ ID NO: 186687 - protein, 171 aa, Oryza sativa
  unsure (1)..(171): unsure at all Xaa locations
  Clone ID: PAT_MRT4530_83463C.1.pep
TRPPPPAPILSQKTTPSAIAAHRSPPRRRASALPLSGRRPNIRSPPSPICSIPSRFPTLTSAAPQVTVAHGALASQVVVAPPPPGPHRPSPTAPPHHPXSPSASPPSALGPRTSPRSAAPYRRPRRISLIFWFCSLAPPCKSLAIRRHSVFIVESPSPRTSVGGASIIVRM

SEQ ID NO: 186688 - protein, 109 aa, Oryza sativa
  unsure (1)..(109): unsure at all Xaa locations
  Clone ID: PAT_MRT4530_83464C.1.pep
HKKRRQCXGRGADSAADEQVWQDCCRQLVADDDSCCMCRDLEHMLPGIYRELGATEAGHPMDEVYNSCPIGDLERTAASLPEFCNLDIPNGTGGVCYCLGYPMTPRTVH

SEQ ID NO: 186689 - protein, 38 aa, Oryza sativa
  Clone ID: PAT_MRT4530_83465C.1.pep
SDAGEIGQWHGEGAGERTNLEVDGRGGGLLEDRCRHLL

SEQ ID NO: 186690 - protein, 43 aa, Oryza sativa
  Clone ID: PAT_MRT4530_83466C.1.pep
MHTALKIVKMYTNGPLAHWAAPEGAGGPCTLARVELATWVRGM

SEQ ID NO: 186691 - protein, 99 aa, Oryza sativa
  Clone ID: PAT_MRT4530_83467C.1.pep
MATEEWQSVGRMRQRWAAPRWGDEEDDGGSERGEAVGGGTMAEEASAVDGRGGWRRGERGGRGGERGGGGSKTAAAARRFATRTTLRLCPLFRRAMSYQ

SEQ ID NO: 186692 - protein, 859 aa, Oryza sativa
  unsure (1)..(859): unsure at all Xaa locations
  Clone ID: PAT_MRT4530_83468C.1.pep
MKALELACLLLIIVPQVVLGTHDVYIVTMEGEPVVSYRGGVEGFPATAIDLDEDKVITCCGXNMTILNMFQFTDFSEAVTSYSLHLRRYHDKLLDSLLVEGTYEKLYSYHHLINGFAVHMSPLQAEFLRKAPGVKHVERDMKIQKLTTHTPQFLGLPTGVWPTGGGFDRAGEDVVIGFVDSGIYPQHPSFSAHKTDPYGPVPHYKGKCEMDPVTRRSFCNGKIVGAQHFAKAAIAAGAFNPDVDFASPLDGDGHGSHTAAIAAGNNGIPVRMHGHEFGKASGMAPRARIAVYKVLYRLFGGYVSDVVAAIDQAVQDGVDILNLSVGPNSPPTATRTTFLNPFDAALLSAVKAGVFVAQAAGNGGPFPKTLVSFSPWITTVAAGVDDRRYKNHLVLGNGKLLPGLGVSRCVRNPWFPTLSARTETEQRLAAATHENKSFSLISAADALLGSSATKYSALDCQRPELLNKRKIQGKILLCGYSFNYISGTASIKKVSETARSLGAAGFIVAVENSYPGTKFDPVPVSMPGILITDVSRTKDLIDYYNSSTIRDWAGRATTFQATAAIADGLAPTLYNSAPQVALFSSRGPDVKDFSFQDADVLKPDILAPGNLIWAAWAPNGTDEANYAGEGFAMVSGTSMAAPHIAGIAALIKQKNPKWSPSAIKSALMTTSNTLDKGSHPLRAQQYSTSEIMTLTRATPFDYGSGAVNPKAALDPGLVLDATHQDYITFLCSIPDVEHSEVSNITGSTCSSSSKVQQRPYDLNIPSITISQLRGTQTVKRTVTSVAAEAETYTIMTRMSPEIALEVSPPALTVLPGASREITATLTARSVTGTYSFGEITMKGDRGHLVRIPVVAMGFK

SEQ ID NO: 186693 - protein, 767 aa, Oryza sativa
  unsure (1)..(767): unsure at all Xaa locations
  Clone ID: PAT_MRT4530_83469C.1.pep
LTQESFPIALCGVTILGSHNVLVALDETRSDLFLIELKGESISYNKVHISDLVQDLSGTVKLLPLMFNGVIAXQASSTVSLLKLKGIDGLEVIQSFEQPAAVSDALTITEKDEAFAVVQHTGSEIEFVVKFTSDVTGEVIREKINIDQHRGNIQKVFLNNYIRTDKSHGFRALVVMEDHSLLLVQQGEVVWSREDGLASIVDVTTSELPIEKDGVSVANVEHNLFEWLKGHMLKLKGTLMLANADELAAIQAMRLKSSEKNKMTRDHNGFRKLLIVLTKAGKVIALHTGDGRIIWSNLLQSLRSSKSGEMPSALRICQWQVPHHRVMHENPSILIIGRSGADSAAPGVLSILDSYSGEELNSLKLDHSVVQIIPLTVKDSSEHRLQLIVDSHSRAHLYPRSPDAMNVFLHEMPNTYLYTVDIETNVIRGHSLQKSCDNSADEYCFSTKELWSIVFPSDTERIAISETRKMNEVVHAQAKIIADQDVMYKYLSKNLVFVATVSPKASGEIGSAAPEEAWLVAYLIDAVTGRILHRVTHHGAQGPVHAVVSENWVVYHYFNLRAHRFEMAVIEIYDQSRADNKDVMKLILGKHNLSAPITSYTRPEVMVKSQSYFFTFSVKAIAATQTAKGITSKQLLIGTIGDQVLALDKRFVDPRRSVNPTQQEKEEGIIPLTDALPIIPTSYLTHSLQVEALRGIVSIPSKLESTTLVFTYGVDLFYTQLAPSRTYDSLTDEFSYALLLITIAALVAAIVVTWIWSEKKELRDKWR

SEQ ID NO: 186694 - protein, 75 aa, Oryza sativa
  Clone ID: PAT_MRT4530_8346C.1.pep
MNQVRHWNQSGFGKELDSKNRVCIGCEGIGWGLHRLRWSAQRTADTTDTADSVEDSCRTASRIDQRATQGLPRRR

SEQ ID NO: 186695 - protein, 53 aa, Oryza sativa
  Clone ID: PAT_MRT4530_83470C.1.pep
MDMVPTNNIWDGWLKRGRYGNGYGGNGSPIVILEFCTVQNVDWMKQVQTPIVI

SEQ ID NO: 186696 - protein, 53 aa, Oryza sativa
  unsure (1)..(53): unsure at all Xaa locations
  Clone ID: PAT_MRT4530_83471C.1.pep
MMESWVPSCVLCGDYSHPVCRACILALCKVCLXRTPPXGRTTCARCCLEYGAP

SEQ ID NO: 186697 - protein, 45 aa, Oryza sativa
  Clone ID: PAT_MRT4530_83472C.1.pep
TNKIYNLLYTSSTATQLKNSSTTASANQKKKKTFDLMNQRRNITS

SEQ ID NO: 186698 - protein, 105 aa, Oryza sativa
  unsure (1)..(105): unsure at all Xaa locations
  Clone ID: PAT_MRT4530_83473C.1.pep
TLRRRRRRRHGFWQARDFLFCGVCGTLLKFXSVRSAPAPLRFKRRQDIEGRARTRHAEXLERLNLXPYVILXTTLKEERIVEXATVNKECKMQNLTXYSQELRQQ

SEQ ID NO: 186699 - protein, 90 aa, Oryza sativa
  Clone ID: PAT_MRT4530_83474C.1.pep
TTSRTPPSSIYGRCGFHFHTCCCSLPPPLEAGPGFLRPATRWPPRHIWPKENPAWMASCRRSELPPLTSYRRRLRHLLSRPAAAPTLAPP

SEQ ID NO: 186700 - protein, 103 aa, Oryza sativa
  Clone ID: PAT_MRT4530_83475C.1.pep
FSRVTPFGQAIFLFKPILFYLATNIFFDVQFLTNSITVSLLYSNSLEPVPPLKHLCFPNFFFRTLYFFSQIVFSFSFFVPVRNELCIYKIKKINKIVLVKGPP

SEQ ID NO: 186701 - protein, 322 aa, Oryza sativa
  unsure (1)..(322): unsure at all Xaa locations
  Clone ID: PAT_MRT4530_83476C.1.pep
MPSGSATQFRYTQTPSKVLHLRNMPWECTEEELVELCKPFGRVVNTMCNVGANRNQAFVEFADQNQAISMVSYYASSSEPAQVRGKTVYIQYSNRQEITNNKGTGDSSGNVLLVTFEGVQPNDISIDVIHLVFSAFGFVHKIATFEKAAGFQALIQYTDAPTGLEAKNSLDGRSIPRYLLXRHTDLNVKAHDERSRDYTVSSDPSAQMQAAAQAPGPSTPGVAWQNTAPSASFYGSTAAATPVGQVPAWNPNMQAGAFGSASSAYPTQPMMPGSVPHYPGIGSSSGALPVSFQASHQMPQYGVPPAAPHHAPPAGQPMYFPK

SEQ ID NO: 186702 - protein, 626 aa, Oryza sativa
  Clone ID: PAT_MRT4530_83477C.1.pep
MGQSERVLGWSDRAIYSRHATPHIPNAYNDPNRGYSHDTGHKYNEYVADYIERFRDIKSRCFSLKITDKDLADIAYDGLLDSIKERLNGQIFLDVDHVLHKALDQESRVDDNSLNASLDDSAISCIAKPSDGSNCVNSLDDDAITSIVESSVGSDCFINFDDNAITNIAEPSDGSDCVTSLDDDGIAVPSDGSDCAVSLENDTIENIAELSDGSDYITSESEIALSPKTESKIDHVDVGKYDNNVLRDSSEIESKEAMHTYQRPYLEHVDSVPYLQGFEVPNFTKFTGEDARTTMEHIGQFIDQCGKAGSNDLLKLKLFPLSLSSFASIWFSLLAPSSISTWSQMEHEFPDYFKDASLMEQRPIDTSSVTCETISVTLMPKTGIVSNPLPISTIDDDKMKGKNVIIGDPRPETIRINNAKAEDRKVTKDESSSSIETKKLKLTFEMLMAKYKKGLASQRFDNQTSDSKRPRSSRRKRFGQTSKQSEPSTIPTPYKPPVVMPWYPYPMSPFGYPFMYYMPWMHQPPIPYYQEWKESPRSIPNHSSNSRQNRFSQKNRSGGSKMKKVKKVWVRKEAKAPEVVTIKEESQDVRVPTGDAAKTIQAEKTEADAVTVNIGGLTKIAGRSNR

SEQ ID NO: 186703 - protein, 684 aa, Oryza sativa
  unsure (1)..(684): unsure at all Xaa locations
  Clone ID: PAT_MRT4530_83478C.1.pep
MDEIGENCQSLKSDEFPSQGWSDDSYMPEINQEISSSIMTEHEVDPSDIMPITLEDLNEEQRQDMEQHMKTIREEALVRMFIKTHQGVVCQSDPPLKLVSDDKVTSDSPNPSLAIQKVNDHYVDVSATSSFASIQYAYNAMEGSIGVYTADCMGIGYMQNRADDCAXVAGQTVPYPGQIGPPVAGLTAPLTTGQTGCLAGQTGLSIAGQTSXPWNFSRFSYHYSSPVNTVSQATPHIPKGYNDPNRGYPHDTGYGQYNNIAPQQPPFRPPNPPPNAHRPENIELISIIIRDKFGIEAWNRAREYQKSYPNYYDNIPYPRGYRVSEFTKFSGEDSRTTWEHAGQFLAQCGEASNVETYKLRLFSLSLFNAAFTWFTSLPTNCIHTWAQLEQKFHDYFYTGKTELRLSDLTSVRHKHDEFVTDYIERFRDAKSRCFSLNITDKDLADIAYNGLLDSIKERLNGQIFLDVDHVLHEALAQESYVYDDSLNATLDDNEIATELNDGLDSIISESELVLSPKTESQIGHVEVRMLEQQWSILANLLNNVVSLLAPDSISTWSQMECEFHDYFKDASLMEQRPIDNLSVNCDTISVTPMPTRIVSNPPPISPIDFDNKKVVTRPCQAESTKGKTVIIGDPRPKTIRINNAKAEDRKVTKDESSSSQKTKKPKLTFEMLMAIYRKDSWVHD

SEQ ID NO: 186704 - protein, 935 aa, Oryza sativa
  Clone ID: PAT_MRT4530_83479C.1.pep
MDEIGENCQSLKSDEFPSQGWSDDSYMPEINQEISSSIMTEHEVDPSDIMPITLEDLNEEQRQDMEQHMKTIREEALVRMFIKTHQGVVCQSDPPLKLVSDDKVTSDSPNPSLAIQKVNDHYVDVSATSSFASIQYAYNAMEGSIGVYTADCMGIGYMQNRADGMTGRDTGLTAPYVCQTVPTVAGQTVPYPGQIGPPVAGLTAPLTTGQTGCLAGYNDPNRGYPHDTGYGQYNNIAPQQPPFRPPNPPPNAHRPENIELISIIIRDKFGIEAWNRAREYQKSYPNYYDNIPYPRGYRVSEFTKFSGEDSRTTWEHAAELNDGLDSIISESELVLSPKTESQIGHVEVRMLEQQWSILANLLNNVVSLLAPDSISTWSQMECEFHDYFKDASLMEQRPIDNLSVNCDTISVTPMPTRIVSNPPPISPIDFDNKKVVTRPCQAESTKGKTVIIGDPRPKTIRINNAKAEDRKVTKDESSSSQKTKKPKLTFEMLMANYKKGLAGQRFDNQTSDSKRSRSSRRKRFGQTPKQLEPSTIPTPYKSPVVMPWYPYPMSLYVYPFMYYMPWMPQPHMSCHQEWKQSPKTVPSHSSSRQDRFPQKNRSSGSKVKKVKKIPRGRSDRGALEMSGKVESNTRASTSTENIKNHHLALGTQPQPNYIPSGLSCSQKRRLQRLRVIGQKEKEAEDVENKTCNNLEPRTASKRVWRPKECGIHLAFEITQSRKPIFLGGQDINMLMRKSREMNSDGYNITSLSRRLLDAKARNKFEVHPKKWHKVLSEALWAHRISKHGATKVTPFELVYGQKAVLPVEVNLGSLRYTRQDDLSIEDYKTLMGGNFEDVIDKRLKTFKEMETLQGQHFSQSTQWEILEEILSYGLARCLGSLVADSRCSSKRQGDMCLQPNLAPMGEIGEKCQSFKSDGFRSQGRSDHRLDVEKGL

SEQ ID NO: 186705 - protein, 1073 aa, Oryza sativa
  Clone ID: PAT_MRT4530_8347C.1.pep
MADIAFGAVNLVLGLIQDEARLLGRVREDLQFIMQEMESMNNVLRHIVANKGSTTAGDYQLRPWMKQVMELAFDSRNCVELYTQSGSARCGWLPWEMVARHRVVTRIRELKIQAREISERQARYGIAVSHHQLPVEVTTTMEPRDASVRPRNQRRTNAGSWNNPSRRAILEDGWYGDYGSVDEALSRLKPFTEYLYVEVKPPEELNSDDKQQPQPLLDGGNKHDDKEQPPPPVQSGGCVKLQPPLQSDGSDKQDDKVQPLPLQSDGGNKEQPPPLQSEGGDKEQPLPLQSEGGDKEQPLPLQSEGGDKEQPPPLQSEGGDKEQPPPLQSGGGIKQQQQLPQSDGDDQQPLLPQSDGGNKQQHIRVVIISVQDGMDEAAVGETMLKRYKSHWRNPWTDEELHVALQRPPILSEITKAMVDKLRHPKERETDNEAEDRQRLAKKLSNENVLLVLSGLNYPVLWHQVLELLSSTGCSDSAVILCTNDSKMAKYCCDSAKCGPPVIYSLVDIYLNKALALLPHRYDDRHLKGILCNILTQCCPDVFCMKMFLHALYYNPETTEHQLQVLNTSLGKEYTDHGRQDRIMAFCYQALPNNYKNCLWYSTVFTRGISMPDGVRRASLLRRWVAQGLITQVDQSSAEIEAGHCFEAMLRQKLIVPSGLSGARKVKSCTVHPVVADLIDRESSTVEDLLLNNQLPLDLDLLYSIRNGMQLHPANSNITRFLNSLSSTSRLLLTVLDLEGRKGLKANDLHTVCKIHKLKYLSLRNTDVAQLPKQIGQLRLLETLDIRGTRVQVFHTALPMLKHLLAGCIIVCPGKDIVKSKEFFSTVCVPRAVATMEKMEILSHVKVSNSATELNNIGDKLEHLKKLGVVLSGTKASLIDLFLQVDKLHRGLLSLSIRMDPPGNWDAIDAILLRPPKLLESLHICSIRSRLPPRIKELHHLAKITLRDTFLNQGALDVLSRLDGIRYLRLCYHSFAEGALRFWSFGNLMDLIIEDDIIISVTFGYRNPDKLEKIVWSFTHMEKLSGVRKLQSLTHLELKGGTCNPQNLEKLKRKVSEHSNGITFTLKLPENQSQ

SEQ ID NO: 186706 - protein, 231 aa, Oryza sativa
  Clone ID: PAT_MRT4530_83480C.1.pep
KEEKKDQPNKQPTDSQPIHHRLALSGNRFITDSITTKGKIKIKKEKKLHKKRRGMEEPQRAHHRHPRQLSSPSCSPLQHPLQPPHAPVPAQHWKRGMERRSSPLPAKGAATTRRGGERSARSGSSRGGRRTGGGECLSGASKRIEEEEGRAWEGRRTDRLRERGKRTYRRGAKDGASDALGGGVAPRDAPTPVQRQKRQHREKKRRWYGGGLGRRREDVDGGGRGGDRSST

SEQ ID NO: 186707 - protein, 587 aa, Oryza sativa
  Clone ID: PAT_MRT4530_83481C.1.pep
MEYEFHDYFKDVSLMEQRPIDNSSVTYDTISVTPIVKTGIVSNPLLVAPIDSDNKKVLIRPSQAESTKGKNVIFGDPRPETIRINNAKAKDRKVTKDESSSSIKTKKPKLTFEMLMTKFKKGLAGQRFDNQTSDSKRPRSSRGKRFGQTPKQSEPSTIPTPYKPPVVMPWYPYPMSLYGYPFMYYMSWIPMPYYQQCKESPRSVPSHSSNSRQDRFSQKNRSGGSKVKKVKKVWVRKEAKAPEVIIIKKESQDVQDVQKPTGDAVETIQAKKTEADAVIVNDGAEVDTFWLISFSKEEATTSSSHSSKKEVGDVKDKTCNNLEPRTTPKQMWRPKECGIHLAFEIMQSRKPILLGGQDINMLIKKSREMNGRWIQHHIFEQPFVGCQGKMPVLSSGIGKLAYNLFKKSRCLIFKSLGKIGKVIDHGRSDWHCMAGLTGGSLRSDQLCMAGLTMQTGRSDRHCMAGHWFELVASNYFTKWAETVPLKNITYTEAHRIPKHGATKVTPFEFVYGRKAVLPVEGGMCLHPNLALVDEIGENCRVSFAGPVRPQKRKQQRNNGLAKLRLHSHRQLNWGISQTSSPSQLVFN

SEQ ID NO: 186708 - protein, 98 aa, Oryza sativa
  Clone ID: PAT_MRT4530_83482C.1.pep
IRKFLGVTSTRSNRRLLLCRPNTGRGGWRGGRHRCRRRGPPPQGEVDGVELVADRSAPPPPSPPIRPPSSSPPPAQARREAPAAAAVEEVVARGEVSA

SEQ ID NO: 186709 - protein, 113 aa, Oryza sativa
  unsure (1)..(113): unsure at all Xaa locations
  Clone ID: PAT_MRT4530_83483C.1.pep
CLTAIVSDALLSELLTDEDQKMFKPLESVNMHDLKDVKXASXITVTYSKNPHXEDKELTTTYAYADDGTATIDASSVQCIDGMEIADGNAKTKGSKPPLIEERMFTWFTDTEH

SEQ ID NO: 186710 - protein, 335 aa, Oryza sativa
  unsure (1)..(335): unsure at all Xaa locations
  Clone ID: PAT_MRT4530_83484C.1.pep
MSGKVESNTRASTSTENIKNHHLALGTQPQPNYIPSGLSCSQKRRLQRLRVIGQKEKEAEDVENKTCNNLEPRTASKRVWRPKECGIHLAFEITQSRKPIFLGGQDINMLMRKSREMXSDGYNITSLSRRLLDAKARNKFEVHPKKWHKVLSEALWAHRISKHGATKVTPFELVYGQKAVLPVEVNLGSLRYTRQDDLSIEDYKTLMGGNFEDVIDKRLKTFKEMETLQGQHFSQSTQWEILEEILSYGLARCLGSLVADSRCSSKRQGDMCLQPNLAPMGEIGEKCQSSKATGFVHKAGQTTGWTWRRACRGQDQPLFKGQGRFNCNPKNIQYI

SEQ ID NO: 186711 - protein, 418 aa, Oryza sativa
  Clone ID: PAT_MRT4530_83485C.1.pep
MSDHHHLTGDHHPSPASAATTALGPLLLLPSELLHDILIRLALPELLRVRSVARPLSHVISSPDFRRLYHLSSAASGPGPAAAWLLVFKKLRPRDAALRGFHGPSGRWFRIPVSAILAPAVPPGEDLYFLAASGSSFLFAANGRRELVVVDLSAHAARRLPPSPLGPRGTSSWRRFGLKLVADPPGSSQFRFLFAELVNNTPLLFEYQSETDTWQSSEAVQAEGASTAAGTEGTFLCAAHAGPDCVMVYSGPGVERPVFFRPRFPHNPNGGGDRLHVYGDGSAAVVRSTVIDEPGRPRVKVVAGVDLYGFGSVVGGDWQLASTVPGELVEGFRKPYAVMTGLLSEREGVVRLVLISNCRGAWDIVWLSYDRARGEWWWVPVPDWGTKGLNVAGIAVSSTFSRLWPPAAASSCTTTTSQ

SEQ ID NO: 186712 - protein, 34 aa, Oryza sativa
  Clone ID: PAT_MRT4530_83486C.1.pep
KNARSCTAAPRGGARRRRRLLRRRPPPSDLPVTQ

SEQ ID NO: 186713 - protein, 154 aa, Oryza sativa
  unsure (1)..(154): unsure at all Xaa locations
  Clone ID: PAT_MRT4530_83487C.1.pep
ATMREYHHQDQXVYTPGTSSGQAGMGYPMYHSSPAVAQGIGEAASAVSQWHSTPAQPSRSQARLLPGSSAQHSRQTSWCRCEAXSSHMLGGIYRELRRTTQMSGHTPCHEVFQQSVRRGXTWSSAAASTPGVLQTWTSTNRRSGVCYWLARSGY

SEQ ID NO: 186714 - protein, 69 aa, Oryza sativa
  Clone ID: PAT_MRT4530_83488C.1.pep
MCGRSCCEVMIVYRKPQNMNVVTSLSYFVHIGSSLSYFVHMCTSLIEDKLRHRRCLLPPTSQSHGSLAT

SEQ ID NO: 186715 - protein, 203 aa, Oryza sativa
  Clone ID: PAT_MRT4530_83489C.1.pep
MSAPLISCPLRPDDPLQRPARRVEQCVWVKLARRVEHGGTRVLAELVLVEGAVQHLVVDIVVPELALYRHHARRRLGLDAERPADLVPPLVQRQDLPAIEPLAVDGDGDVDVLRLAVAVDLPVLPDDAEECVGVAERALLAVGASPPLPPTSQVGANGTTAACDVPFCYCQVRLRQPACAALAGRAMRRLERECSRPGVFQYF

SEQ ID NO: 186716 - protein, 48 aa, Oryza sativa
  Clone ID: PAT_MRT4530_8348C.1.pep
GRRTRGRRWGLGGGAPRRPAGGGRRGMPRWTADGSDIHRGSTRGFKGG

SEQ ID NO: 186717 - protein, 1573 aa, Oryza sativa
  Clone ID: PAT_MRT4530_83490C.1.pep
MPRGPRVEDPVLEEVQPWETAVDELRLSMMDLQRKVEEDHKLVQEQLQNQAVQAQVYKDEVMQNLLSIQQMLGGTTSCMGQEIKGTPKTPGFAQSVVGGGKAVDTNAASTSRHPLFDYRNLSCPMTTQAIETTDLPPTVFTPKPVSTPPSEWNTSVYFTTPTVPPPIPPVPPPPPNQNNLPQNQNYNPYNMNYQYTPFYYPPYPPYNTPWNLPQYNYPPPSHTPPNQPFLPQNWDRRFGPYHDPNGRERTQYAENAHRRSKHVDFPIFDGECPESWIRKAEKYFALNQTPEEEKVLVAEIYITGRADQWISSSDVLTEQLTWPEFKSMICQRFAAKSNIEVIDTFRNLKQYGSVDVYIDKFEEVMALVKRNRPNLTEQYFLDYFISGLKDHIKRPLKSLHIQSLVDAYEHARNYDVPPRSSPTVAVSQSKEMPKLPVKPALKDDKPSPFTAPKSFGRCFKCQEPWVPGHGRVCKATKQIYLVTLDDDGEEMPDNAAAQFTTPPGSPAHEATTHTDLSLHALEGTNSVATTFTIHVCIGKMSATALIDSGSTSTFISPKFVSKAGLEIVNNDPIPVKVANGGTLYTGARCVDVPYMIQQHQFISTFRLLNLKGYDIVLGCDWIYHHSPLTLNLKTRELTIHKDGLLELTLPDIKPVALPPQRDCDHTIPLIPGAKPVNVRPYRLPYQKKNALEELVQQLLTSQTIQPSMSPYSSPAILVKKKDGTWRLCVDYRQLNASTIKNKYPIPVIEDLLDELQGAQIFSKIDLRSGYHQIRMHAADVHKTAFSTHLGHFEYLVMPFGLTNAPATFQALMNKILAPYLRKFVLVFFDDILIYSKSATEHAQHLSLVLQLLRHHQLFAKPSKCVFGQDQVEYLGYIISSSGVATDPVKVQAVQNWPTPTSITELRGFLGLAGYYRRFIKNFGIICRPMFDALKKNNFHWQEVQQQAFDAIKLQLAQAPVLAMPDFSLPFILEADASGHGIGAVLMQNGRPLAYLSKAIGPKAAALSTYDKEALAILEALKKWKHYFLGTSLIIRTDQASLKYINEQRITEGVQHKLLIKLLSYDYKIEYKKGQENKAADALSRMQQLNALTTTVIVPQWITEVAASYSTDPKCHELESHLHIAPQSHPPYTLKGGILRYKDHIVVGAGNTLREQLLVSFHDSALGGHSGERATYQRMKQLFYWPGMKLAVTQFVKACPVCQKNKTEHNMPAGLLQPLPLPEMAWSHITMDFVEGLPKSEGKDVIWVIVDRFTKYAHFIPLSHPFTADQILTQFLEHFYKLHGLPTVIVSDRDRIFTSSTWKEVFEKAGVKLHFSSAYHPQTDGQSERVNQCLENYLRCMTSSKPRKWKALLPHAEWWYNTTFHTSLGMSPYQALHGIKPPLLAELLLPGSLLEGERNKQEAKAALLETIKSHLVKAQARMKYFADQHRQERTLEVGDMVYLKMQPYRHNSLGLHSSLKLHSRYYGPFRVLERIGSVAYKLLLPVTSQIHHVFHVSQLKKHLGSRAVPEQGLPLIDAEGRILSTPLAVLDRRLIPRNNEPVVQWKIHWANLPESAATWEDAAFITKVFPSFTP

SEQ ID NO: 186718 - protein, 96 aa, Oryza sativa
  unsure (1)..(96): unsure at all Xaa locations
  Clone ID: PAT_MRT4530_83491C.1.pep
LYLNCPHPPLLTTMPLPPFLPPPAIRLHPGHGQPLLRPXPRNPPVTMTMLSPPXPPVAGRAPPSSTRATPPPIPRRAPLPPMTTLLPSRTPSPPLA

SEQ ID NO: 186719 - protein, 91 aa, Oryza sativa
  Clone ID: PAT_MRT4530_83492C.1.pep
LEATGNPAVALRGATRGSQQAANLHLALIIFFQTPSGFHPSQHPHHSYWATSTISRARPRNKGSSSSPQFSFLINGNLPVAKAFRKWFVFQ

SEQ ID NO: 186720 - protein, 283 aa, Oryza sativa
  Clone ID: PAT_MRT4530_83493C.1.pep
MGKASAVVKIDLAPANSERKGDSASCHSKQRCRCSAWLREDYRRLGGEERHRPGVSAEKGEERRQPGALARAPARGGDRGAARAAEWHVACCRRTVRSHLRRWRQRRRRTHREQSALRHADALLRVIGKHRQVHRHRKPQNINVAVAVDSQWLNGGQVLALDERWYEIGGSFRVESKPASRVMLYVIQVRKRDVVVKVKAADAWSAAVGEGASRRRALRRREQPHQRPAHPVQGKFRHYDVNNEMLHGSFYQDKLGKDARAAMFNTASELDPDALLYAPRRSL

SEQ ID NO: 186721 - protein, 91 aa, Oryza sativa
  unsure (1)..(91): unsure at all Xaa locations
  Clone ID: PAT_MRT4530_83494C.1.pep
DISEGGGADMRDPHVSGSEAPXSTVDRAHGTGDGXHHVVPTWRQRGGHAGCHASGPRGAATRAANGRGTRPSARAALPGLAAMAICGPARR

SEQ ID NO: 186722 - protein, 54 aa, Oryza sativa
  Clone ID: PAT_MRT4530_83495C.1.pep
CCAKKKLTLSCRDLWAYGSTNVCMNTHEELYATYDLTNSCGIQYQKQCYCCTHL

SEQ ID NO: 186723 - protein, 343 aa, Oryza sativa
  unsure (1)..(343): unsure at all Xaa locations
  Clone ID: PAT_MRT4530_83496C.1.pep
PRVRPRVRLFGLVKDISRFRPDLKLLISSATLDAEKFSDYFDSAPIFKIPGRRYPVEVHYTKAPEADYIDAAIVTVLQIHVTQPPGDILVFLTGQEEIETIDEILKHRTRGLGTKIAELLICPIYANLPTELQAKIFEPTPEGARKVVLATNIAETSLTIDGIKYVVDPGXCKIKSYNPRTGMESLLINPISKASANQRAGRSGRTGPGKCFRLYTSYNYMHDLEDNTVPEIQRTNLANVVLTLKSLGIHDLVNFDFMDPPPSEALLKALEQLFALSALNSRGELTKTGRRMAEFPLDPMLSKMIVASEKYKCSDEVISIASMLSVGNSIFYRPKDKQVHADN

SEQ ID NO: 186724 - protein, 253 aa, Oryza sativa
  Clone ID: PAT_MRT4530_83497C.1.pep
MANMIINSSHLMGLRSPIGNKIPVSSVGILMWDQNNLKVDSISFPTSYPSWVAEAESALHLCEEAAAEHTQTTAAAEAAVARRAEELRLQEETWQRRDASLVEREAEVARHEAAACRLGDQLTKREEAVTGWESRHLENARAERATMAERVSERAGEIVALHLANDVGPGLLHDVIERLGREAADHQAGARTPARRDGSRQVVVGLLGAGYGGARPSGGGGDGDGDGDDEDWDEVVSGAKLGSPAPRDCPFHH

SEQ ID NO: 186725 - protein, 698 aa, Oryza sativa
  Clone ID: PAT_MRT4530_83498C.1.pep
MPFSYAAAASGSASSSRKPVPVAAAAARRPAPSPAAAAAPAPSPSNPSAVSDSDPSSYSSSGEETDLTASDPAAASVISSYLSVAGDGADLSKVGIFLSSAARRRSPPCLICFDPIRPSDPVWSCSASCFALLHLHCIQSWAHQSSSAAPSPTWGCPKCRFPYPKSQTPTSYLCFCSKTVDPAPDPWILPHSCGDVCGRRLNADRDSGCEHNCLLLCHPGPCPPCPAIVPNAMCFCGSHRETRRCSHQRYSCSGKCNKRLGCGIHRCPVDCHDGPCPPCAVRGKHKCECGETMEERLCSERVFQCKRECGGMLQCGKHSCERGCHAGKCGGCPLQGRRTCPCGKKDYPSLDCDAEAATCGSTCEKVLGCGRHKCPERCHRGSCVETCRLVITKSCRCGGLKKEVPCYQELTCERKCQRLRNCGRHACRRRCCEGDCAPCPEVCDKRLRCGNHKCLSPCHRCHGPIAPPNPEFTLKPIKRKKGKHIDSTPGTPCPPCQEVVLVPCFGHHLGQERAILCSKRRQFPCQNLCENYRIVPICAQKYVTLVNVRCACNNLKKEWICQDVLKEYRQSGRDPKQIPKNQYAVGLLACGEDCVKKVKAADSELHLRKIQEIKTPAVEVENVPKRRKRRNRGQESVESSKFQEIKAVALKFLLVIFLCIIVVAGLYLLWKGVYRLSDWMNDMEEQRARQRHLKPGRL

SEQ ID NO: 186726 - protein, 257 aa, Oryza sativa
  Clone ID: PAT_MRT4530_83499C.1.pep
MSSFGGTSSVASGGGKRLEYGRTHVVRPKGAHKATIVWLHGLGDNGASWSQLLETLPLPNIKWICPTAPTRPVAVFGGFPSTAWFDVADLSEDAPDDVEGLDASAAHVANLLSTEPADIKLGVGGFSMGAATALYSATCYAHGKYGNGNPYPVNLSVSVGLSGWLPCARSLKNKIESSQEAAQKASSIPLLLCHGKADDVVLYKHGEKSADALKTTGFSNVVFKSYNRLGHYTVPEEMDEVCKWLTANLGVSSSSSA

SEQ ID NO: 186727 - protein, 266 aa, Oryza sativa
  Clone ID: PAT_MRT4530_8349C.1.pep
MGHDGPQNRHREIPSLQQSQREATAARQTRRFEGSAGQCDPHPEIAWLRPGMDHGWATRVPVQPRPWDVAGHRDDVHLVLFLVSDVSFADMWLTSTSAELIPIEETYINCAGIGLLLSRAVRRSAADGFSAPARNGPPGGDEQRSTPSGSGYAVGGDMSTYGDVYSFGIILFEIFLRKRPTDDMFKDAVSNVYIFIQGCTRGNYIATLIADLSRRLAGGPALGLFGKLLGDRRAAPIKGAPPIPKGACYYPGKDVLRVIACAVCPR

SEQ ID NO: 186728 - protein, 98 aa, Oryza sativa
  unsure (1)..(98): unsure at all Xaa locations
  Clone ID: PAT_MRT4530_834C.1.pep
CVVRWSDSSNQQVFLHWWSDSRKMVPRAKGRGYDTIIILAAWPIWKERNNHIFNNQQXTWMEVAAAAAEEAALWHSTGVPIWLSLARKLWSQNRCREN

SEQ ID NO: 186729 - protein, 100 aa, Oryza sativa
  Clone ID: PAT_MRT4530_83500C.1.pep
MFTAGVGNKASAIWRCSRPSAESSKEGNSFVLDLIRDRVVNIEGSVFTEDEIKRITSNFSIPIGQGGFGEVYKGTLDDDYDLVAVKRYISKDLRKEFMEE

SEQ ID NO: 186730 - protein, 101 aa, Oryza sativa
  unsure (1)..(101): unsure at all Xaa locations
  Clone ID: PAT_MRT4530_83501C.1.pep
CGLNPKARTRRNKTKVKGWRCAEIVLNVTLSMGGNPHEVRXLNPTTHTASRCRIRLDRLTSSDSNSAXPTAADSDFSRSVLCFHDDFHLEFRFNPILISDT

SEQ ID NO: 186731 - protein, 66 aa, Oryza sativa
  Clone ID: PAT_MRT4530_83502C.1.pep
MIQYGGSGRSPTRGGLQTRPTAGGCWLCFCRGWRTRRRMQARYEDSSATTEQMMSDECKTLLVNHH

SEQ ID NO: 186732 - protein, 83 aa, Oryza sativa
  unsure (1)..(83): unsure at all Xaa locations
  Clone ID: PAT_MRT4530_83503C.1.pep
GFQQQFLLPLKRQVVGIAHRFCKSISNVAQQNICGRVVKALAMCVGVSSXGSGGADLGFAGRKKKKLFLSSQGESKKSVGRLG

SEQ ID NO: 186733 - protein, 55 aa, Oryza sativa
  Clone ID: PAT_MRT4530_83504C.1.pep
PRALFRSPTREPQRVKGRKQKALPHHGPPHGGQNSPPPQKHRRPVPGPRPICLIN

SEQ ID NO: 186734 - protein, 79 aa, Oryza sativa
  Clone ID: PAT_MRT4530_83505C.1.pep
MAGKYIAAGLVGSFAISYVCDHFIAEKKIFGGTTPHTVSDKEWWQATDKKFQAWPRTAGPPVVMNPISRQNFIVKDLES

SEQ ID NO: 186735 - protein, 79 aa, Oryza sativa; identical to SEQ ID NO: 186734
  Clone ID: PAT_MRT4530_83506C.1.pep

SEQ ID NO: 186736 - protein, 76 aa, Oryza sativa
  unsure (1)..(76): unsure at all Xaa locations
  Clone ID: PAT_MRT4530_83507C.1.pep
VEAAPASAPVGGQELGVAASFAGDKRXHRAKDEDNATAQRHREAPPSIAAYLQSTTSYCIPTWPPLDSPSNHEPGG

SEQ ID NO: 186737 - protein, 64 aa, Oryza sativa
  Clone ID: PAT_MRT4530_83508C.1.pep
MDVILNSRDMYRVQLLTRTRMRGGVRGNGEATEFEKPKPHEDSSDESDLNCEGTLEQGRTAPKP

SEQ ID NO: 186738 - protein, 883 aa, Oryza sativa
  unsure (1)..(883): unsure at all Xaa locations
  Clone ID: PAT_MRT4530_83509C.1.pep
KTSNFHSKHFVLKRHEFLKEFHYTQEXVRGWFXNLGIGELMLVGHDECXADGVNVPAQAXDNSTQQINDPSSAVLPVIRPYQGRQHSASDRANVAMQEYLNHFLGNLDIVNSPEVCKFLEVSCLSFLPEYGPKLKEDYVSVGHLPKIQKDHKENCCSCGLFSCCKSSWQKVWVVLKPGFLALLKDPFDPKLLDVLIFDALPHMDISGEGQISLAKEIKERNPLHFGLQIFITGWWLCPELFLRRPFQHHGSSRLDALLEARAKQGVQIYILLYKEVALALKINSLYSKQKLLNIHENVKVLRYPDHFSSGVYLWSHHEKIVIVDNQVCYLGGLDLCFGRYDNSAHKLSDVPPVIWPGKDYYNPRESEPNSWEDTMKDELDRTKYPRMPWHDVQCALYGPPCRDVARHFVQRWNYAKRNKAPNEQGIPLLMPHHHMVIPHYKGIGQEINSEADGKQNHDKDCDVKKPVSVDSRESCQDIPLLLPQELEPPALPNGDLRVNDLDANHSDHLHKTSFNQPLLNRKAKLDSSRQDLPMRGFVDNISSLESSSIRHFDSSKEEKYHMDKNWWEMQERGDQVASVLDIGQVGPRATCHCQVIRSVGQWSAGTTQIEGSIHNAYFSLIEKAEHFVYIENQFFISGLSGDETIKNRVLEALYRRILRAEREKKRFKAIIIIPLLPGFQIYVHSKLMIIDDRITLIGSANINDRSLLGSRDSEIAVVIEDKEVVSSKMNGKPWEAGKFSLSLRLSLWAEHLGLHRGEVSHIMDPIDDSTFKNIWMATAKTNTMIYQDVFSCVPNDLIHSRAQFRQSFAHCRDKIGHNTIDLGVAQEKLETYQDGDLKGTDPIERLQMIKGHLVSFPLDFMSQEDLRPYFSESEYYTSPQVFH

SEQ ID NO: 186739 - protein, 250 aa, Oryza sativa
  Clone ID: PAT_MRT4530_8350C.1.pep
MQKQTAKKKGTKLAPPGPQGASASLSLALAPDEVARALTGTPVFTVCNSSNEFVLVSDPATGLRSLGLLCFRSEDADALLTHVRMRQPVVGRGAKVVPITLDQVYMLKAEGIAFRFLPDPLQIKNALEVILMSVLFTEKYTFMESIETYPLRLLNSDLLVVKKQKKRYCPIYFQKVFTIFAFLAQEDIERELTKASKTSRGSALSKQIMVGSLEDVLKKMEMNERNSGWDDLIFIPPGKSLNQHINEVSA

SEQ ID NO: 186740 - protein, 154 aa, Oryza sativa
  unsure (1)..(154): unsure at all Xaa locations
  Clone ID: PAT_MRT4530_83510C.1.pep
MTRPCRDLPAAPRIDAPQPRPPRAPPCRPSPPAARRQTPPPPPVNAARERLCSGQIRXVGGTGSTRGEAGSGRGGAGSAASTPRSRGILRAPARPPRAETGRHRGQASPPPSRLAARSSGGXARGGRGEEEKVAAAALGFPRVARPRAEFLQPG

SEQ ID NO: 186741 - protein, 46 aa, Oryza sativa
  Clone ID: PAT_MRT4530_83511C.1.pep
CRCAVLTRPPRNLRELWLGTPRADKALSDPSETKDHVRSGRVRVLA

SEQ ID NO: 186742 - protein, 413 aa, Oryza sativa
  unsure (1)..(413): unsure at all Xaa locations
  Clone ID: PAT_MRT4530_83512C.1.pep
SSPSPSHRHQLLRPSAIAADRSIRSHSFSDAGDGRFPPGEYEYGRVXIMSGGVEPETPPGSSSGGSTPVGGKPPRHHLTSIRHCASSARIAAATAEFDLGAGTLSLISPTDIRPGFLPVFRSGSCADIGTKSYMEDEHVCVDNLIEHLGVRTPVIPAPGAFYGVFDGHGGTDAACFVRKNLLRFIIEDGHFPSSIEKAIRSAFVRADHAIADSHSLDRNSGTTALTALIFGRTLLVANAGDCRAVLGKRGRAVELSRDHKPSCRSEKIRIENLGGTVFDGYLNGQLSVARAIGDWHVKGSKGSISPLTAEPEFQEVRLTEEDEFLIIGCDGLWDVMTSQCAVTMVFGSARRDYSLFVNINFTFTNMSNTRDKEKETPVNTNGGNTASNSSRGPLLGFSTAYMDIDPVDIASWQ

SEQ ID NO: 186743 - protein, 104 aa, Oryza sativa
  Clone ID: PAT_MRT4530_83513C.1.pep
THCGWGSTIESFQFGHPLVMLPFIVDQGLIAEAMAARGIGVEVARNDDGLFHRDDVAAAVRRVMVEEEGKVLARKAKELSDIVGDREQQEMYLDELVGYLQLYK

SEQ ID NO: 186744 - protein, 107 aa, Oryza sativa
  Clone ID: PAT_MRT4530_83514C.1.pep
MAKPPASGGSGGRRSSPGISRSPAAASTPIAFNATDLAADESTSTGKVWLYGKLQLPHGMETVNHIWQVGSTVTGGLHVYHVIVIAIRLPISGDQCNRTMDIKMLCV

SEQ ID NO: 186745 - protein, 49 aa, Oryza sativa
  Clone ID: PAT_MRT4530_83515C.1.pep
LVLKHIAEAMVVDPDITFIAFSTHRRTICATMQIGRKSGSYRPPGSLVR

SEQ ID NO: 186746 - protein, 112 aa, Oryza sativa
  Clone ID: PAT_MRT4530_83516C.1.pep
MALMAGGKRGGVGVGEIRWPTSAPVTCAGCCASPPRPPRRCFRFSAIAAPCGPTAGPPPRAATCLCLRLRCRLHKRATGARASPASPTGRSRYLLLCSADGRPSNLRLRCRY

SEQ ID NO: 186747 - protein, 37 aa, Oryza sativa
  unsure (1)..(37): unsure at all Xaa locations
  Clone ID: PAT_MRT4530_83517C.1.pep
TFWGESASXKKKKKXKKKKKKXKKKKKKKKKKKKKKK

SEQ ID NO: 186748 - protein, 176 aa, Oryza sativa
  unsure (1)..(176): unsure at all Xaa locations
  Clone ID: PAT_MRT4530_83518C.1.pep
MTVEERQGRVGGHGVSGGGGGRDQFPVGMRVLAVDDDPTCLKILENLLLRCQYHVTTTGQAATALKLLRENKDQFDLVISDVHMPDMDGFKLLELVGLEMDLPVIMLSANXETQTVMKGITHGACDYLLKPVRLEQLRTIWQHVIRRKNCDAKNRGNDDDAGQKAQGMNNEVRVLV

SEQ ID NO: 186749 - protein, 469 aa, Oryza sativa
  Clone ID: PAT_MRT4530_83519C.1.pep
MWFQDSSNSKWIRVPVQHRLKHTGTSYPTANLFYHNFREIKALITPWMTSDDVAIKTMATSMNKKVEKYWKRSNLTLVVAYFLEPRFKTKAVEYNMLRCMILIRGLDEVAETLVANLTLDEIDDMGIQTRDILLVVTMLKLRQRNLDGSQFGEDLSWVKRGFPRLRGMAGRRGALDLEWLGGIDDGGIYPEGNEPRRPSSSPSPSRVAPDPATTRGSSSSFGGSYDRPLLSPPLVFGGRRRIQQCGGRWPPDLVGMEVGAIGNGGTTAQGSAVLAAVALSVDGTEMIQSNKFENLNGRFASLRTAPSLWSSPSVAAAVVGFARRRRRSSSTSPKLKSTGAPSSPSTRSLPSRFDLRRGPAAPSVIAKLHRHLRWIRNCKQKTVHHLFSAKDRRKVIATVDQYPVATPTSPPSSSVVVCCRSSHRHEMSTVGLGMWRMESSAICGLIHTAVHIGYHHFDCPDMNNPTSYC

SEQ ID NO: 186750 - protein, 421 aa, Oryza sativa
  Clone ID: PAT_MRT4530_8351C.1.pep
MEQIICFKNHAPSLISPSPPYNLMFYSQLIIYSLHFIMHTGTVAHGLMADGEDIQPLVCDNGTGMVKAGFAGDDAPRAVFPSIVGRPRHTGVMVGMGQKDAYVGDEAQSKRGILTLKYPIEHGIVNNWDDMEKIWHHTFYNELRVAPEEHPILLTEAPLNPKANREKMTQIMFETFNAPAMYVAIQAVLSLYASGRIVLDSGDGVTHTVPIYEGYALPHAILRLDLAGRDLTDCLMKILTERGYSFTTTAEREIVRDIKEKLAYIALDYEQELETAKSSSSVEKSYELPDGQVITIGAERFRCPEVLFQPSLIGMEAPGIHETTYNSIMKCDVDIRKDLYGNIVLSGGTTMFPGIADRMSKEITALAPSSMKIKVVAPPERKYSVWIGGSILASLSTFQQMWISKGEYDESGPSIVHRKCF

SEQ ID NO: 186751 - protein, 1277 aa, Oryza sativa
  Clone ID: PAT_MRT4530_83520C.1.pep
MRRAGLMRRRGRRSRPRRSLDGSVTFLTSFFPYLPEWEAVYYLLLADADVLVAARLVVQARGLRRFGFTSGTTAAAVRLALRCAALAVKHPHPDRLVHAWMSLSRRLDEAVSALANRDVRGLVALVGDEAPAPAADMERAWELAESRLRGRGIAARHYWHAMPLQMALLHAIQGFYLRALARLPSGELRSRYHRSLVLAGHCYGPMDPVSNIILNVVWYDAAHPPAEELELAMIPPMSMFRVATRSFLGLVSFLCTRYPDLPLHDAIWCLLAADGDLGAAAREAERRQHRPSCTVQEAYAAAAAAARHPKPDEQVELLSSSRAITTTTTTSLLLQNGGQLSSEDVRRLAAGLLSPNPSAAVSPTQRKPTKPRQRGKLKLQSQFIRDQNKICKKGKAALHRYSLQNNEPGGYELHVICGMNNLVSGPVYCTDDDIVSYTPLIYFRCHVNFLARRRHSDPSAIAGDGALQLFFAECEQVRCLYCEHQGIRIVHPSVENFHGREVEFEKMVCGKDPCEDDFDLLVDEEPFYTNDGIVNNLEYAGAMDGSKRTSFIEIAMKAPTRKKETLMMISILCEFKKGLSKRWQWFPVLRFPAGQVCFSVPRPRSPWRPDIIVPHAGADSRSRKATVRLPRRHPCRVADSPRPRPRRAAGSPRPRCHVPARPHRQVPLRTRRAVGSPCRHVPVPPHQEFPVAISSVEAAAMDIDDDARHRRVIMSRDCRSRTPSSRTQDKNRSLLLDKVRASHAEALERLRPAADLDAGLCFGLLDPVSNAIVNAAVFAEAEDGNDRTGRSLDGAVTFLTTFFPHLPDWEAVRYLLDADADVLVAARLVVRDRGLRRFGFASDTAGAAVRLALRCAALAVKHPHPDRLVHAWLSLSRRLDEAVSALANHDVRGLVALVVDEAEAPAAANMERAWELAASRFLGRDNGIAAPPYRHAMPLQRTLLYAIQGFYLRALARLPSGELRSHYHRSLVKAGHCYGPMDPVSNIILNVVWYDAAHPPVEELELAMIPPKSMSSIATRSFLGLVSFLCTRYPNLGLHDAIRCLLDFDGDLNAAAREADRRQHRPSCTIQESYAAAAAAARHPKPDEQVEFLSSSRAMTTPLLLQNGGQLSSEDVRRLAAALLPPTPSAAVSPMQRKPTKPRRRRQLKLKAQIIRDQNKICRKVKAALDRYALQNNEPGGYELHVICGMNNCVSGPVYCTDDDIVSYTPLIYFRCHVNFLARRRDSDPSAIAGEGALQLFFAECGNYRLNHDGICCPNKCVAFTANMKGLGLCIRR

SEQ ID NO: 186752 - protein, 51 aa, Oryza sativa
  Clone ID: PAT_MRT4530_83521C.1.pep
MRAKGLGPGELDAWVAAAHQLMRKIPPKNHTEREANKRASQGDQLIVPPGY

SEQ ID NO: 186753 - protein, 186 aa, Oryza sativa
  Clone ID: PAT_MRT4530_83522C.1.pep
MAGNKKRGGRNMDQVKKAAVRSDGVGGSATNAELPMANLVRLIKKVLPGKAKIGGAAKGLTHDCAVEFVGFVGDEASEKAKAEHRRTVAPEDYLGSFGDLGFDRYVDPMDAYIHGYREFERAGGNRRVAPPPPAAATPLTPGGPTFTDAELQFLRSVIPSRSDDEYSGSSPAIGGYGYGYGYGKNM

SEQ ID NO: 186754 - protein, 431 aa, Oryza sativa
  Clone ID: PAT_MRT4530_83523C.1.pep
SGRGKGRLRLPFPPILIAIDAALLQARRRLSCRRRVYIHRLPPPPSRLLAAGLGALLRASAPPPERRRRELRRLQRQLAPKMAFNATRCSVTDGYWAYDRSKKLPYTDQTCPYVDRQDSCQRNGRPDSDYLYWDWHLDDCLLPRFDPVSMLEKLRGKRIMFVGDSLQLGQWLSFVCLVNSAVPDTPGAKSMERSRTLSVYTVKEYNASIEFYWAPFLVESNSDRNIALGAGGRVLHVDAIEEHGKHWRRADILVFDSYVWWMTGYRIKSVWGSFGDDGYEELDAWVAYRLGLKTWANWVDSNVDPATTRVFFMSISTTHTRSEDWGREGGIRCYNETWPITQRGYRGSGSDRRMMEVMSDVLGRMRTPVTLLNITQLTEHRVDAHVSVYTETGGLLVTDEEKTDPQRYTDCIHWCIPGVPDTWNRLLYAHL

SEQ ID NO: 186755 - protein, 198 aa, Oryza sativa
  Clone ID: PAT_MRT4530_83524C.1.pep
MASASVVGGGARHGGERRRRVLVFPLPFQGHTNPMLQLAGALHGRGGLCVTVLHTRFNALDPSRHPELAFVEVADGIPPDVAARGRVAEIILAMNAAMEATEDESGAASPSNIREVLASVVAAGEGQPSVACLVIDSHLLAVQKAAAGLGIPTLVLRTGSAACLRCYLAYDMLLQKAICLPKVRTKQSHIFIHPRLKL

SEQ ID NO: 186756 - protein, 694 aa, Oryza sativa
  unsure (1)..(694): unsure at all Xaa locations
  Clone ID: PAT_MRT4530_83525C.1.pep
MSPPQATGYPPPPKSVEPRRRKQKTPARGRGRGHPQNTTRQHGAAQSSSXPHPPGTTPHRAHQTHTPDPATRAAXPRRQRDTTQTTNXTPRHAQDRAAARHTATAPSPQQRWGXHTTAXGRRAPTGRTXANATAXPRTPTTPPTEPNPTSTTATERQRSNERXTXTTXXTRRAATAPRRTHAPTTTHHPNTRSRTTQATAHEQQTHARTPHPTTTRPNHPPATTRRHAQQAHPTTAPHHTRXRSNEATSATHPTRSTPENEPTTRXATHRDARPAAAAPPXTHTQXHRTDTSAEXDAXTTPATAXAHXHRRDATAPHARRPAXARPRQPTRHQQRTTRDDATXRTXXATSTRTXSRARSRTQPHAHTQPTATPAAPSPRRAHDTQQXQPRTHXAXRTXPDPHAQHAHTPDXPSAATTPTPHXATARXATPHDTHTTRARRTPTPQRTTATTATXPAHTPSHRTXPPRPXATTTTTPRAXTQNXTRRTXATTPPRATTTTRRHDNRDTSXXAPRTPDARXERRSTXTTRSSTXARSATRTQASTPQXTPTTTRTHTANTSAXRRQHRTATTAQXTHARRTPDSDTAAARXTRAQRRNXXTTAAPXTTHTHPPQQPXHRRTXPRTRATXXRDTXARTTHRTHRHTKTXQTHTPPTRTXXRRTTTPRATXTQTADTSAQNTTHKHAXRHPPPRPPRD

SEQ ID NO: 186757 - protein, 174 aa, Oryza sativa
  unsure (1)..(174): unsure at all Xaa locations
  Clone ID: PAT_MRT4530_83526C.1.pep
MQRRPRAMLINPRXTRKFVNFQEIPAAVVAAGFEVVPVEPRRDLSIEEFSRVVDSCDVLMGAHGAGLTNFFFLRTNAVMLQVVPWGHMEHPSMVFYGGPAREMRLRDVEYSIAAEESTLYDKYGKDHPAIRDPESIHKQGWQFGMKYYWIEQDIKLNVTRFAPTLQQVLQMLRG

SEQ ID NO: 186758 - protein, 219 aa, Oryza sativa
  unsure (1)..(219): unsure at all Xaa locations
  Clone ID: PAT_MRT4530_83527C.1.pep
HQQEKPAPTRGPRTSAAPRGGHTVDQVHRGLGGTVEQEHGRXSAAHGRTATGCGGATRRRKEGKGRGDGGGPHRGAQATERRRKAVGGARAERGRRRSGDGRRQQRGGQGVRRDLRKVMDGLGERGVAGNHEEGQLEATSTATELTSRGANGVPAGDGDGEEAAKGLLVLAELKEATAHREVVGGGDGFSVMVEGRGAAAGVELSMEMLTAAAAQRSGH

SEQ ID NO: 186759 - protein, 61 aa, Oryza sativa
  Clone ID: PAT_MRT4530_83528C.1.pep
LLSSIVCCYARCLCHLHLYQRILQDCSCTTAREDQKPLITSGKTNKLFNRLDKKHRTWTFL

SEQ ID NO: 186760 - protein, 48 aa, Oryza sativa
  unsure (1)..(48): unsure at all Xaa locations
  Clone ID: PAT_MRT4530_83529C.1.pep
YPPRPPVAQCVVHSYRLRSXDKVKLYALMNFLENIRGSSVFTPSFLER

SEQ ID NO: 186761 - protein, 359 aa, Oryza sativa
  Clone ID: PAT_MRT4530_8352C.1.pep
MATAASLSATASSLLAPAPATTGAAAAQCCSSSSTALFPTPVPSLRAYYPRLLLAFRRPAVAAVADPQGAVLEEEQGEQQDEGPGEYDDDDYDDGYEGGRGPAFTPPTRPRTGKAALPLKRDRTRSKRFLEIQKLRESKKEHDVPTAISLVKQMASARFVESAEAHFRMNLDPKYNDQQLRATVNLPKGTGQSVKIAVLTQGEKIDQARAAGADIVGGDDLIDQIKGGFMEFDKLIASPDMMPKVAGLGKILGPRGLMPNPKAGTVSPNITQAIEEFKKGKVEYRVDKTGIVHIPFGKVDFPEEDLIANFMAVVRSVERNKPSGAKGIYWKTAYLCSSMGPSIKLNIKEMLDYGSESSD

SEQ ID NO: 186762 - protein, 194 aa, Oryza sativa
  Clone ID: PAT_MRT4530_83530C.1.pep
MAEVQVDEVEGGERRRRRPLAEYAAELEAVSLSVRAAPPLRLKALVRACHHALALFDLLGVEAGFWKTEYAERLVALERAAEAMDSAEELVDRDVAAGRVRATGTHSNNLVRVKRGIELKRALFQLMLAQLQQQRPGGGGVSFDGVVSMAYAAVFARYHDKNVQSTVADSICAIPVKSISDFFATINETGCFLY

SEQ ID NO: 186763 - protein, 172 aa, Oryza sativa
  unsure (1)..(172): unsure at all Xaa locations
  Clone ID: PAT_MRT4530_83531C.1.pep
WLVAICIKGKPAPTRGPRTSAAPRGGHTVDQVHRGLGGAVDQEHGRXSVAQGRTATGGGGATQRRKEGKGRGDGGGPHRVAPVTPEATSTATELTSRGADGVPVGDGDGEEAAKGLLVIAEPKEATAHREVXGTATGGGKCGGGLRLVVGVVFRWWLKEDERLPGWSSAWRC

SEQ ID NO: 186764 - protein, 317 aa, Oryza sativa
  unsure (1)..(317): unsure at all Xaa locations
  Clone ID: PAT_MRT4530_83532C.1.pep
CQQGKPAPTRGPRTSAAPRGGHTVDQVHRGLGGAVDQEHGRSTGSAQNRQRRELACQASVAQGRTATGGGGATQRRKEGNGRGDGGGPHRGAPVTXDRARAERGRRRSGDGRRQQRGGQGXRDLRKVMDGLGERGVGSRRQQSTATELTSRGADGVPAGDGDVEEAAKGLLVIAKPKEATAHREVXGTATGGGKCGGGXQVGVELDAAKPSVETAQHGGDENGGGGRLNDAGERRRLVARWGGFPVAIGEYGVAAEVWQRAANAMAQAARRGDGGSGRLEGRRFDKERDVVLQLQGLDLVDRKPDRVRYVSAKSSVR

SEQ ID NO: 186765 - protein, 388 aa, Oryza sativa
  unsure (1)..(388): unsure at all Xaa locations
  Clone ID: PAT_MRT4530_83533C.1.pep
MAHPNSITLTLAWMRQLRGKLHYKPSRCPRWLVQEKPAPTRGPRTSAARREGHTVDQVHRGLGGTVDQEHGRSTGSAQNRQRRELTRQASAAHGRTATGGGGATRGXGRGDGGGPHRGAXVAGNHEEGQPEATSTATELTSRRADGVPAGDGDGEEAAKGLLVLAEPKEATAHREVXGTAAGGGKCGGVLRLAVGMVFRWWLKGEERLPGWSSAWRCXRRRRRSAAATWAVVVAGWMRREAVVARMHGGMVFWXHGGDGNGGGGRLNDASERRRLVARWGGFPVAIGENGAAAGVRQRAANAMAQAAQRGDGGSGQLEGCRRAAALGLAWGARERTRGARGGRSXGGEPISLGLGARARVGGPESAATWAATGGMAASGGCWPGWGWT

SEQ ID NO: 186766 - protein, 1547 aa, Oryza sativa
  Clone ID: PAT_MRT4530_83534C.1.pep
MAEKPPLSPSSGSPGKVKEKTQKFGLTDVHEGNVVPIDPEKLTPEQKKDFNAMMQQARDQFLSSFMQTRNDTFVQKYKVKVVPEDLGIGSSKEGEKKQVPDGSAQPSDKSVTDGSTQESQGDYSHGVHGVQGDGTQGLQGGNLNQNDNAFQDFFNNFQDRVDYAVYIALINQSGVLTNTLSNMMKSVADGSIAEHQAAGPVYLQGGTFPNYRTLITDVHPLTRGTPPAQSTVPASAPAPAAPSSAPGQLINPQLLFYNQFEPTPQQPQGSPQQRPWADVIADVMREQFGLKPNETGNLYRQPYPEWFERVPLPNRFKVLDFSKFLGQDTTSTYEHISRFLAQCGEASTVDALRVRLLRLSLAGSAFTWFSSLPHGLINSCADLEKQFHSYFYSGIHVMKLSDLTSIKQKHDEPVHEYIQRRSDDEDDDSEIAAAEWVRSKKVFRQQIQTAIEGGKIKFDDSKKPMKVDAGQSADRVCAKGFQVSSAKIINKYQRKYDKQQEKHYEEHDDGFDPHWGCEFFRFCWNEGMRLPSIENCPGCSDIIGSSSRSYNRSNRLRQERVSVHQRLGPVNQGHGQEDEIVRTNQWCPSAEFGIDQADVDEVEEESAKLVLSPERAMFKKPEGTENRHLKPLYINGYVNGKPMSKMIIDGGAAVNLMPYATFRKLGRNAEDLIKTNMVLKDFGGNPSETKGVLNVELTVGSKTIPITFFVIDGKGSYSLLLGRDWIHANCCIPSTMHQCLIQWQGDKVEIVPADKSVNVASANLALWEMDGLDFLSGKMENPSYYFEGVVEGSNVYTKDTVDDLDDKQGQGFMSADDLEEIDIGPGDRPRPTFISKNLCVEFRTKLIELLKEFRDCFAWEYYEMPGLSRSIVEHRLPIKPGWISSIVPVTKKNGKVRVCIDFRDLNKATPKDEYPMPVVDQLVDAASGHKILSFMDGNAGYNQIFMTEEDIHKTAFRCPGAIGLFEWVVMTFGLKSAGAMYQRAMNYIYHDLIGWLVEVYIDDVVVKSKEIEDHIADLRKVFERTRKYGLKMNPTKCAFGVSAGQFLGFLVHERGIEITQRSISAIKKIKPPEDKTELQEMIGKINFVRRFISNLSGRLKPFTRLLQLKADQQFTWGAEQQKALDNIKEYLSSPPVLISPQKGVPFRLYLSAVIISPRGACFEFAYSIKPYATNQAEYEAVLKGLQLLKEVEADAIEIMGDSLLVISQLAGEYECKNDTLIVYNEKCQELMKKFRLVTLKHSASRKLRYKALKYVLLNDELYYRTIDGVLLKCLSADQAKVAIGEVHEGICGTHQSAHKMKWLLWRTGYFWPTMLEDCFRYYRGCQDCQKFGAIQRVPASAMNPIIKPWPFRGWGIDIIGMINPPSSKGHMFILVATDYFTKWVEAIPLKKADSGDAIQFVQEHIIYRFGIPQTITTDQGSIFVSYEFVQFADSMGIKLLNFSPYYAQANGQAEASNKSLIRLIKRKISDYPQQWHTRLAEALWSYRMACHGSIQVPPYKLVYGHETVLPWEVQIGSRRTELQNDLTAEEYYNLMADEPEDLVQSQL

SEQ ID NO: 186767 - protein, 60 aa, Oryza sativa
  Clone ID: PAT_MRT4530_83535C.1.pep
ATRTAARTMTASMYKSEKRKEVDKVVCRILGNCSDQWSDLMSACTSALSFKLSYIMCYIT

SEQ ID NO: 186768 - protein, 117 aa, Oryza sativa
  Clone ID: PAT_MRT4530_83536C.1.pep
MLLQAFIYSIAWTPWVPYLGASFVIVSILVNPSIRSIVSKRAGPFEQGMVQGCLTGISSTANVKSPIVFSPLTAWFLSETAPFNFRGFSLACAGFAMLIALAVSINMSPAELQPDSK

SEQ ID NO: 186769 - protein, 100 aa, Oryza sativa
  unsure (1)..(100): unsure at all Xaa locations
  Clone ID: PAT_MRT4530_83537C.1.pep
RSSSRADALVDLCFWRRLCLLLLVVTTLPISIDXPLTIWLSASDASALEAHAPSRTSSXQRPTRSRHYWEEDRPDRPSPGRXGPCCTLGLSHSLRFTCTL

SEQ ID NO: 186770 - protein, 111 aa, Oryza sativa
  Clone ID: PAT_MRT4530_83538C.1.pep
QRAVPSCATVNPAAGQPDTPADPTPLRPPSPLVPRAGQMAFRWGMAMVRRQPRDSSSLQSRRRRRRIARWSGTATGGGKCGGGLRLVVGVVFRWWLKEDERLPGWSSAWRC

SEQ ID NO: 186771 - protein, 1987 aa, Oryza sativa
  Clone ID: PAT_MRT4530_83539C.1.pep
MAEKPPLSPSSASLGSGKEKTQKFGLTDVHEGNVVPIDPEKFTPEQKKDFNAMMQQARDQFLSSFMQTCKGTFIQKYKVKVVPEDFGIGSSKEGEKKQIPDGSAQPSNKGATDGSPGNQGDDPQGVHRVQGDGVHGVQGDGTQGPQGGNLNQNDNAFQDFFNNFQDRVDYAVYNALINQSGVLTNTLSNMMKSGVPPVASSAQPTAPASAPAPAAPSSAPGQLINPQLLVREQSQYPGPNVTQLTQDQVASMFLPPQNAINSAQQQPIQQTPSRQQVVQPIQQASPIQQAVQPVQQTPPKQPDLQPIQQTPLRQQVIQPIQQQASMNASAGFTMPGGQPVQYIANQVVPEHLVHHVQPDGSVVPQVIPEHLARGIRPNLHNCRGYHQAGSVQPQFYNQFEPTPQQTPQQRPWADVIADVMREQFGLKPKETGNLYRQPYPEWFERVPLPNRFKVPDFSKFSGQDTTSTYEHISRFLAQCGEASAVDALRVRLFRLSLAGSAFTWFSSLPHGSINSWADLEKQFHSYFYSGVHEMKLSDLTSIKQKHDEPVHEYIQRFREMRNKCYSLSLTDARLADLAFQGMIAPIRKKFSSEDFESLSHLTQKVALHEQRFADARKNSRKINHVYSYMYGSDDEDDDSEIAAAEWVRSKKVIPCRWVKSSGKEERYDFDITKVDKIFDLLLQKKQIQLPAGHIIPSAEELGKKRYCKWHNSGSHATNDCKDFRQQIQTAIERGKIRFDDSKKPMKVDGNPFPINMVHTADRVRAKGFQVNSDKMINKYQRKYDKQQEKHYEEHDDGFDPHWGCEFFRFCWNEGMRLLSIENCPGCSVIIESSSQSYNMNNRLRQERVSAHQRLGPVNQGRGQEDEVVRTNQWCPSGIFTKNQKRRVQRLRNREHFQEVEQEINHRLKKAKPRQEWRVKNQVPVADDVAAEEAKRMAKGKSVVTAPINMVFTLPAEFGIDQVDVDEVEEESAKLVLSPERAMFEKPEGTENQHLKPLYINGYVNGKPMSKMMVDGGAAVNLMPYATFGKLGRNAEDLIKTNMVLKDFGGNSSETKGVLNVELTVGSKIIPTTFFVIDGKGSYSLLLGRDWIHANCCIPSTMHQCLIQWQGDKIEIVPVDSQLKMKNPSYYFEGVVEGSNVYTKDTVDDLDDKQGQGFMSADDLEEIDVGPGDRPRPTFISKNLCAEFRIKLIELLKEFRDCFAWEYYEMPGLSRSIVEHRLPIKPGVRPHQQPPRRCKVDMLEPVKAEIKRLYDAGFIRPCRYAEWISSIVPVIKKNGKVRVCIDFRDLNKATPKDEYPMPVADQLVDAASGHKILSFMDGNAGYNQIFMAEEDIHKTAFRCPGAIGLFEWVVMTFGLKSAGATYQRAMNYIYHDLIGWLVEVYIDDVVVKSKEIEDHIADLRKVFERTRKYGLKMNPTKCAFGVSAGQFLGFLVHERGIEITQRSISAIKKIKPPEDKTELQEMIGKINFVRRLRHYLLSNECIVICKADVVKYMLLAPILKGRVGKWIFSLTEFDLRYESPKAVKGQAIADFIVDYRDDSIGSVEIVPWTLFFDGSVCAHGCGIGLVIISPRGACFEFAYTIKPYATNNQAEYEAILKGLQLLKEVEADAIEIMGDSLLVINQLAREYECKNDTLMVYNEKCQELMKTFRLVTLKHVSREQDIEANDLAQGASGYKPMIKDVQIEIAAMTADDWRYDVHQYLQNPSQSASRKLRYKALKYTLVDDELYYRKIAGVLLKCLSADQAKVAIGEVHERICGTHQSAHKMKWLLRRAGMGIKLLNSSPYYAQANGQAEASNKSLIKLIKRKVSDYPRQWHTRLAEALWSYRMACHGSIQVPPYKLVYGHEAVLPWEVRIGSRRTELQNDLTAEEYYTLMADEREDLVQSRLRAVAKVTRDKECVARHYNKKVVPKDFSEGELVWKLILPIGTRDSKFGKWSPNWEGPFQIHKVVSKGAYMLQGLDGEVYGRALNGKYLKKYYPSIWVNA

SEQ ID NO: 186772 - protein, 78 aa, Oryza sativa
  Clone ID: PAT_MRT4530_8353C.1.pep
MAAGKRPRRRALQREREAVVAWLAKSTRAEMAVECPAEGATRTASSTENEEGITLKSRNAVHQGVGVKQIHRCYKGAT

SEQ ID NO: 186773 - protein, 70 aa, Oryza sativa
  Clone ID: PAT_MRT4530_83540C.1.pep
ILKLGSDWRKKKTYIKITTGPHRRRRRRWRTMPRDAGHGYAAVGHGGDKKPRNGASAVHSLSSRFRWKHR

SEQ ID NO: 186774 - protein, 1917 aa, Oryza sativa
  Clone ID: PAT_MRT4530_83541C.1.pep
MAEKPPLSPSSASPSNVKEKIQKLGLTDVHEGNIAPIDPEKLTPEQKKDFDAMMQQARDQFLNSFMQTRKGTFVQRYKVKVVPDDPGTGSSKEGEKKQVPDDSAQPSDKGVTDGSTHENQGDHFHGVHGVQGDGTQGPQAGNFNQNDNAFQDFFNNFQDRVDYAVYNALINQSGVLTNTLSNMMKSVADGSIAEHQAAGPIYLQGGTFPNYRPLITDVHPLTQGVPPVASSAQPTAPALAPAPAALSSAPGQLVNPQLLVREQSQHPGPNVTQLTQDQVASMFLPPQNAVNSAQRQPIQQTPPRQQVVQPIQQTSPIQQVVQPVQQTPPRRPALQPIQQTPLRQQVVQPIQQQGSMNASAGWADLEKQFHSYFYSGIHEMKLSDLTSIEQKHDEPVHEYIQRFREMRNKCYSLSLTDAQLADLAFQGMIAPIREKFSSEDFESLSHLTQKVSLHEQRFVEARNNSRKINHVYPYMYGSDDEDDDSEIAAAEWVRSKKVIPCQWVKNSGKEERYHFDITKADKIFDLLLREKQIQLPAGHTIPSAEELGKKRYCKWHNSGSHTTNDCKVFRQQIQTAVEGGKIKFDDSKRPMKVDGNPFPVNMVHTVGQSADRVRAKGFQVNSANIINKYQRKYDKQQEKHYEEHDDGFDPHWGCEFFRFCWNEGMRLPSIENCPGCSDIVESSSRSYNRSNRLRQERVSVHQRLGPVNQGRGQQDEVVRTNQWCPSGIFTKNQKRRVQTLRNRERLQEVEQEINHRLKKVKPRQEWRVKNQVPIADDIAADDEAKRLAKGKSVVTAPINMVFTLPAEFGIDQADVDEVEEESAKLVLSPEQAVFEKPEGTENRHLKPLYINGYVNGNPMSKMMVDGGAAVNLMPYATFRKLGRNAEDLIKTNMVLKDFGGNTSETKGVLNVELTVGSKTIPTTFFVIDGKGSYSLLLGRDWIHANCCISSTMHQCLIQWQGDKIEIVPADSQLKMENPSYYFEGVVEGSNVYTMDRVDDLDDKQGQGFMSADDLEEIDIGPGDRPRPTFISKNLSAEFRAKLIELLKEFRDCFAWEYYEMPGLSQSIVEHRLPIKPGVKPHQQPPRRCKADMLEPVKAEIQRLYDAGFIRPCRYAEWISSIVPVIKTNGKVRVCIDFRDLNKATPKDEYPMPVADQLVDAASGHKILSFMDGNAGYNQIFMAEEDIHKTAFRCPGAIGLFEWVVMTFGLKSAGATYQRAMNYIYHDLIGWLVEVYIDDVVVKSKEIEDHIADLRKVFERTRKYGLKMNPTKCAFGVSAGQFLGFLVHERGIEITQRSINAINKIKPLEDKTELQEMIGKINFVRRLISNLSGRLEPFTPLLRLKADEQFTWGAEQQKALDNIKEYLSSPPVLIPPQKGVPFRLYLSAGILDGSDETNLFETSSTEKDFNSGVGEKRARLSTTHCTQQVIPEEEQGEELQGVTLRHYLLSNECTVICKADVVKYMSAPILKGRVGKWIFSLTEFDLRYESPKAIKGQAIANFIVDYRDDSIGSVEIVPWTLFFNGSVCTHGCGIGLVIISPRGACFEFAYTIKSYATNNQAEYETVLKGLQLLKEVEADAIEIMGDSLLVISQLAGEYECKDDTLIVYNEKCQELMKEFRLVTLKHVSREQNIEANDLAQEASGYKPMIKDVQIEVAAMTADDWRYDVHQYLQNPSQSASRKLRYKVLKYALLDDELYYRTIDGVLLKCLSVDQAKVAIGEVHERICGTHQSAHKMKWLLRRAGMTCHGSIQVPPYKLVYGHEAVLPWEVRIGSRRTELQNDLTADEYYNLMADEREDLVQSRLRALAKVTSDKERVARHYNKKVVLKTFSEGEFVWKLILPIGARDSKFGKWSPNWEGPFQIHKVVSKGAYIGVEGAERDASCGGGGGHLLGDDAGAPADVERERAAEEGAVGERRP

SEQ ID NO: 186775 - protein, 267 aa, Oryza sativa
  unsure (1)..(267): unsure at all Xaa locations
  Clone ID: PAT_MRT4530_83542C.1.pep
MVIRIELGTQEGSVVPTADSHGVRLNAICLSRRLTWHPDAGGDSWVRCLPSAAGGHPVTHRAAGHLLGAGEAVAVLLLRYATAGLHEVPPVREHGRSTGSAQNRQRRELTRQASAAHGRTATGGGGATRRRKEGKGRGDGGGPHRGAPATERRRKAAGGARXEWGRRRSGDGRRQQRGXKGRRDVRKVMDGLGERRVAGNHEEGRRRRIARWSGTAAGGGRRRKMRQRPKVGGGDGFSVVVEGRGAAAGVELSMAMLTAAAAQRSGH

SEQ ID NO: 186776 - protein, 2008 aa, Oryza sativa
  unsure (1)..(2008): unsure at all Xaa locations
  Clone ID: PAT_MRT4530_83543C.1.pep
DQINWHARTSEGEFWTCIGVKQISQASCFPSTRFWHARWGXLEVRRTASFMAEKPPLSPSSASPGSGKEKTQKFGLIDVHEGNVVPIDPEKFTHEQKNXFNAMMQQARDQFLSSFMQTRKGTFFQKYKLKVVPEDFGIGSSKEGEKKQIPDGSAQPSNKGATNGSPGDQGDDPQGDHGVQGDGTQGPQDRVDYAVYCALINQSGVLTNTLSNMMKSVADGSIAEHQAAGPAYLQGGTFPNYRTLITDVHPLTQGVPPVASSAQPTAPASAPAPAAPSSAPGQLINPQLLVREQSQYPGPNVIQLTQDQVASMFLPPQNAINSAQXSRFSKHRLGNRLCSRVCNAWCPACAVHCKSGGPGTLGSSYATGWFDVMREQFGLKPKETGNLYRQPYPEWFERVPLPNRFKVPDFSKFSGQNTTSTYEHISRFLAQCGEASAVDALRVRLFRLSLAGSAFTWFSSLPHGSINSWADLEKQFHSYFYSGVHEMKLSDLTSIKQKHDELVHEYIQRFREMRNKCYSLSLTDAQLADLAFQGLISPIREKFSSEDFESLLHLTQKVALHEQRFTDARKNSRKINHVYPYMYGSDDEDDDSKIAAAEWVRNKKVIPCQWVKGSGKEERYDFDITKADKIFDLLLQEKQIQFPTGHTIPSAEELGKKRYCKWHNSGSHTTNDCKVFRQQIQMAIEGGKIKFDDSKKPMKVDGNPFPINMVHTADRVRAKGFQVNSAKMINKYQRKYDKQQEKHYEEHDDGMRLPSIENCPGCNGIIESSSQSYNGNNRLRQERVSVHQRLGLVNQGRGQKDEVVRTNQWCPSGIFTKNQKRRKAKPRQEWRVKSXVPVADDVAVEEAKRLAKGKSVVTAPVNMVFTLPAEFGIDQADVDEIEEESAKLVLSPERAMFEKPEGIENRHLKPLYINGYVNGKPMSKMMVDGGAAVNLMPYATFRELGRNAEDLIKTNMVLKDFGGNPSETKGVLNVELTVDSKTIPTTFFVIDGKGSYSLLLGRDWIHANCCIPSTMHQCLIQWQGDNIEIVPADSQLKMKNPSYYFEGVVEGSNVYTKDTVDDLDDKQGQGFMSADDLEEIDIGPEFRTKLIELLKEFRDCFAWEYYEMPGLSQSIVQHRLPIKPGVRLNQQPPRRCKADMLEPVKAEIQRLYDAGFIRPCRYAEWISSIVPIIKKNDLNKATPKDEYPMPVADQLVDAASGHKILSFMDGNAGYNQIFMVEEDIYKTAFRCPGAIGLFECVVMTFGLKSVGATYXRAMNYIYHDLIGWLVEVYIDDVVVKSKEIEDHIADLRKVFERTRKYGLKMNPTKCAFGVPAGQFLGFLVHEREIKITQRSISAIKKIKPPKDKTELQEMIGKINFVRRFISNLSGRLEPFTPLLRLKADQQFTWGVERQKALDNIKEYLSSPPVLISPQKGVPFRLYLSAGEKSIGSVLIQELEGKERVVFYLSRRLLDAETRYSSVEKLCLCLYFSCTRLRHYLLSNECTVICKADMVKYMLSAPILKGRVGKWIFSLTEFDLRYGSPKAVKGQAIADFIVDYRDDSIGSVEIVPWTLLFDGLVCAHGCGIGLVIILPREACFEFAYTIKSYATNNQAENEAVLKGLQLLKEVEVDAIEIMGDSLLVISQLAGEYECKNDTLMVYNEKCQGLMKTFRLVTLKHVSREQNVEANDLAQGASGYKPMIKDVQVEVAAITADDWRYDVHQYLRNPSQSASRKLRYKALKYALLDDELYYRTIDGVLLKCLSTDQAKVAIGEVHEGICGTHQSAHKMKWLLRRTGYFWPTMLEDCFRYYKGCQDYQKFSAIQRAPASAMNPIIKPWPFRGWGIDMIGMINPPSSKGHKFILVATDYFTKWVEAIPLKKANSGDAIQFVXEHIIYRFGIPQTITTDQGSIFVSHEFVQFADSMGIKLLNSSPYYAQANGQAEASNKSLIRLIKRKISDYPRKWHTRLAEALWSYRMAYHGSIQVPPYKLVYGHEAVLPWEVRIGSRRTELLNGKYLKKYHPSVWVNA

SEQ ID NO: 186777 - protein, 621 aa, Oryza sativa
  unsure (1)..(621): unsure at all Xaa locations
  Clone ID: PAT_MRT4530_83544C.1.pep
MRVAKAIGWADVADALREHLQLCCISLGLLLIAAACPHIPVLNSVRRLQDALIAVAFPLVGVSAALDALVNIADGKINIHVLMALAAFASIFMGNSLGGAEEHFTSKSMKDVRELXENHPDFGLLLETCGDQSAQFANLCYTKVPVHDLEVGSHILVRAGEAVPVDGEVYQGXWTVNSEHWTGETKPLDSCIRLVMFEADRYSKCISIGKFTCSWWYXTLKRGVPFSDGGQLNKPNLXRWLDVFGEHYSRVVVALSLVFALLAPLLFKWPFFGNSVCRGSIYRGLGLMVAASPCALAVAPLAYATAISSLASKGILLKGGHVLDALSACQSIAFDKTGTLTTGKLMCKAIEPIHGHSDVTNDFSDQACCTPNCESEALAVAAAMEKGTTHPIGRAVLDHSVGKDLPLVAVESFECLPGRGVVATLSGVKAGNNEDELSKASIGSVEYISSLYRSSGESEQIKEAVKASAFGPEFVQAALTVDKKVTLFHFEDEPRSGPEDKLNKVKAVSREGGGGLIMVGDGINDAPALAAATVKQSVALALSCIVFAALPSVLGFLPLWLTXLLHEGGTLLVCLNSIRALNSPTWSWVDDIRQLINSLRKYISSKLQSTSSNYVVDAVPL

SEQ ID NO: 186778 - protein, 133 aa, Oryza sativa
  Clone ID: PAT_MRT4530_83545C.1.pep
MDKTVAIVSAIVGPLGVLSAILGFSAEGTKIIISDVLLIGDECLYPQNPSFALGICAAIFLLMAQITVTAVGGCCGCCKSRAIPSETKRIVGIVCAVVSWYMMQPAADPTSRPPCHRRRLIVSTVDTMLTAQP

SEQ ID NO: 186779 - protein, 1493 aa, Oryza sativa
  Clone ID: PAT_MRT4530_83546C.1.pep
MAEKPPLSQRRRLRGSTRKGTFVQKYKVKVVPEDPGIGSSKEGEKKQVPDGSAQPSDKGSSSCCIISSADGTNIGSSTCSAVIGFREQSQHPGSNVTQLTQDQVASMFLPPQNAISSAQQQPNQQTPPRQQVVQPIQQTSPIQQVVQPVQQTPPRRPALQPIQQTPLRQQVVQPIQQQASMNVSAGFAMPGGQPVQYTTNQVIPEHLVHHVQPDGSVVPQVILEHLARGIQPNLHNYQGGNLSYQYQPPSPQVQYQQAGSVQPQFYNQFEPTPQQPKGTPQQRPWADVIADVMREQFGLKPKETGNLCRQPYPEWFERVPLPNRFKVPDFSKFSGQDTTSTYEHISRFLAQCGEASAVDALRVRFAEARKNSRKINHVCPYMYGSDDEDDDSEIATTEWVRSKKVIPCQWVKNSGKEERYDFDITKADKIFDLLLREKQVQLPAGHTIPSAEELGKKRYCKWHNSGSHTTNDCKVFRQQIQTAIEGGKIKFDDSKRPMKVDGNPFPVNMVHTAGQSADRAHEKGFHVNSAKIINKYQRKYDKQQEKNYEEHDDGFDPHWGCEFFRFCWNEGMRLPFIENYPRCSDIIESSSRSYSRSNRLKRVSVHQRLGPNQKRRVQRLRNRERLQEVEQEINHWLKKAKPRQEWRVKKQVPVADDVAADEAKRLAKGKSVATAPINMVFTLLAEFGIDQADVDEVEEESAKLVLSPEQAVFEKPQGTENRHLKPLYINDYVNGKPMSKMMVDDRVAVNLMPYATFRKLGRNAEDLIKTNMVLKDFGGNPSETKGVLNVELTVGSKTIPTTYFVIDGKGSYSLLLGRDWIHANCCIPSTMHQCLIQWQGDKIDQLKMENPSYYFEGVVEGSNVYTKDTVDDLDDKQGQGFMSADELEEIDIGLGDRPRPTFISKDLSAEFRTKLIELLKEFRDCFAWEYYEMPGLSRSIVEHRLPIKPGVRPHQQPPRRCKADMLEPVKAEIQCLYNAVFIRPCRYVEWISSIVPVIKKNGKVRVCIDFRNLNKATLKDEYPMPVADQLVDAASGHKILSFMDGNAGYNQIFMAEEDIHKTAFRCPGAIGLFEWVVMTFGLKNAGATYQRAMNYIYHDLIGWLVEVYIDDVVVKSKKIEDHIADLRKVFERTRKYGLKMNPTKCAFGVSAGQFLGFLVHERGIEITQRSIDAIKKIKPLEDKTELQEMIGKINFVKRLRHYLLSDEYTVICKADVVKYMLSAPILKGRVGKWIFSLTEFDLRYESPKAIKGQAIADFIVDYRGDSIGSVEVAPWTLFFDRSVCTHGCCICLVIILPRGACFEFAYTVKPSATNNQAEYEAVLKGLQFLKEVEADAIEIMGDSLLVISQLAGEYECKSDTLIVYHEKCQELMKEFWLVTLKHVSREQNIEANDLAQGASGYKPMIKDVQIEVATITANDWRYDVHQYLQNPSQSASRKLRYKALKYALLDDELYYRMIDGVLLKCLSADQAKVAIGEVHEGICGTHQSAHKMK

SEQ ID NO: 186780 - protein, 994 aa, Oryza sativa
  Clone ID: PAT_MRT4530_83547C.1.pep
MTKIKVIDIDELYNFDVDDFFRYQGYSGARLSAASTATACSGGSGGAVAEAKDSGAPEAEGPSARPAARRWRKPRRQAGVDGVGGGGGDLVRQREGVNARGFRQGSQCEGVQARLAAWLAPRRLLSSGGKVLGEEEKAAKNMYIKRICSAAKLTWKILVMRHPTRKGTFVQKYKVKVVPEDPGIADGTNIGSSTCSAVIGFRQQVVQPIQQTSPIQQVVQPVQQTPPRRPALQPIQQTPLRQQVVQPIQQQASMNVSAGFAMPGGQPVQYTTNQVIPEHLVHHVQPDGSVVPQVILEHLARGIQPNLHNYQGGNLSYQYQPPSPQVQYQQAGSVQPQFYNQFEPTPQQPKGTPQQRPWADVIADVMREQFGLKPKETGNLCRQPYPEWFERVPLPNRFKVPDFSKFSGQDTTSTYEHISRFLAQCGEASAVDALREKNYEEHDDGFDPHWGCEFFRFCWNEGMRLPFIENYPRERLQEVEQEINHWLKKAKPRQEWRVKKQVPVADDVAADEAKRLAKGKSVATAPINMVFTLLAEFGIDQADVDEVEEESAKLVLSPEQAVFEKPQGTENRHLKPLYINDYVNGKPMSKMMVDDRVAVNLMPYATFRKLGRNAEDLIKTNMVLKDFGGNPSETKGVLNVELTVGSKTIPTTYFVIDGKGSYSLLLGRDWIHANCCIPSTMHQCLIQWQGDKIDQLKMENPSYYFEGVVEGSNVYTKDTVDDLDDKQGQGFMSADELEEIDIGLVPVIKKNGKVRVCIDFRNLNKATLKDEYPMPVADQLVDAASGHKILSFMDGNAGYNQIFMAEEDIHKTAFRCPGAIGLFEWVVMTFGLKNAGATYQRAMNYIYHDLIGWLVEVYIDDVVVKSKKIEDHIADLRKVFERTRKYGLKMNPTKCAFGVSAGQFLGFLVHERGIEITQRSIDAIKKIKPLEDKTELQEMIGKINFVKSDDGGADEDGNATATTMATSPSDGNDWSDGGARLERRRRRRREVSRG

SEQ ID NO: 186781 - protein, 866 aa, Oryza sativa
  Clone ID: PAT_MRT4530_83548C.1.pep
MAAARPWWLAWISSIVPVIKKNGKVRVCIDFRDLSKATPKDEYPMPVADQLVDVASGHKILSFMDGNAGYNQIFMAEEDIHKTAFRCPGAIGLFEWVVMTFGLKSAGATYQRAMNYIYHDLIGWLVEVYIDDVVVKSKEIEDHIADLRKVFERTRKYGLKMNLTKCAFGVSAGQFLRFLVHERGIEITQRSISAIKKIKPPEDKTELQEMIGKINFVRRFISNLSGRLRHYLLSNECTVICKADVVKYMLSAPILKGRVEKLIFSLTEFDLRYESPKAIKGQAIADFIVDYRDDSIGSVEIVPWTLFFDGSVCAHGCGIGLVIISPRGACFEFAYTIKPYATNNQAEYEAVLKGLQLLKEVEADAVEIMGDTLLVISQLAGEYECKNDTLMVYNEKCQELMKKFRLVTLKHVSREQNIEANDLAQGASGYKPMIKDVQIEVAAMTVDDWRYDVHHYLQNPSQSASRKLRYKALKYALLDDELYYRTIDGVLLKCLSADQTKVAIGEVHEGICGTHQSAHKMKWLLRHAGYFWPTMLEDCFRYYKRCQDCQKFGAIQRAPASAMHPIIKPWPFRGWGIDMIGMINPPSSKGHKFILVATDYFTKWVEAIPLKKADSGDAIQFVQEHIIYRFGIPQTITTDQGSIFVSDEFVQFADSMGIKLLNSSPYYAQANGQAEASNKSLIKLIRRKISDYPRQWHTRLAEALWSYRMACHGSIQVPPYKLVYGHEAVLSWEVRIGSRRIELQNDLTAEEHYNLMADEREDLVQSRLRALAKVTRDKERVARHYNTKVVPKTFSEGELVWKLILLVGTRDSKFGKWSPNWEGPFQVHKVVSKGAYMLQGLDGEVFGRALNGKYLKKYYPSVWVNA

SEQ ID NO: 186782 - protein, 278 aa, Oryza sativa
  Clone ID: PAT_MRT4530_83549C.1.pep
MAQKYKRTDIWEDHERPESHDAGVGDGRFWARERRFCDLQGAATQLPWLAAAQAAAVRLATAAMTAVVPANSGERGGHGEHQWSKGSMVVVAARPWAAWSGGAPCSRRRPNRAAMPGGDAGDTPASDWIGKERGKGERRRYGGGKLEVSRRHSFVVRPRASGNCPKCPPTVIGMQSWTSTPKPGSNGARIGLAEPGGSANLGWPNPAQFRLVASSIALLHGIGLHDHIVRMNAKAVATQSVSAQEPAKKKTSTGPAPSKKAKTPGSILMLPPWESDKL

SEQ ID NO: 186783 - protein, 599 aa, Oryza sativa
  Clone ID: PAT_MRT4530_8354C.1.pep
MKVVNRPSLSNAEFPRLESITDDDGEERTHRRCMSYGEAASTPADSGSKLSAELLKDWFFSFYDDFRFEEINSERYDKSREVFSVAISPCILPVGIHQGRNIQVSYEFYHPMSSARQFGMGQLPIGLYFADKIQRRGEISSTLMMDRLLNIPGPPLGSIENIELAKFKSKAFDRWWGEWKLHLFHQSASMYMTDLFPDVIPQTTESSPPHKSNSGKGIEYAPGLIPNGGGPSPPVIGYHAPRTSSLLQGQLREPTDTGRKRKTRASAADPSAMAPKKKAKKKKSMPTNDLPALDPSIEQALDEEEIEDDVDQAAAELSDLGEKTPSASPKQTPPTPAALAHFSRPPPPPPSPPVQPMPSDRTLSAAGSHNIEEEEQPAAPAILDYFDEEADEETTSKASAPLTDDVKRTLEDISHQLESSLDNLVVDCGSIRARFAEIQALVPDDLANTISPAMYLEQHQFKLEKAKQRIADRRERRDIEATIQANRQTVHEEKAKLDQLSVGPILTNIDRLEARRIDLIAQLEECNAELALEQKKLADLPKAVEEQKSRLKSAIRNVADLTKSLKVIPGTDAQDIQAIEEADQIRQRAVSAIQRYLSM

SEQ ID NO: 186784 - protein, 364 aa, Oryza sativa
  Clone ID: PAT_MRT4530_83550C.1.pep
MADGAGRDRSGLGPGKRKERVRPESTSRVLARAGSSDTHDDERRRRTGQGGAMVRAKMGRIGLGRGSDWDSRSGIGTETDNRQRNRFRVTTGNNPTGVPYVRVLFLVLGCKTEPQTKPYPLDMWKYGSALQQRPEDRSLYGRENDFYFGMNLSGRDKPPLSPSSASLSNVKEKIQKLGLTDVHEGNVVPIDPEKFTPEQKEDFNAMMQQAQDQFLSSFMQTRKGTFVQKYKVKVVLEDPGIGSSKEGEKKQVPDGSAQPSDKGVTDGSTQENQGDYFHGVHGVQGDGTQGPQGGNLNQNDNAFQDFFNNFQDRVDYVVYSALINQSGVLTNTLSNIMKSVADGSIAEHQAAGPVYLQGGTFPNY

SEQ ID NO: 186785 - protein, 505 aa, Oryza sativa
  Clone ID: PAT_MRT4530_83551C.1.pep
MAGRAATWGRGVGVRMRRKRAAWGGGGAGGWSSAPTGWRRKTGPIADVVKYMSAPILKGRVGKWIFSLTEFDLRYESPKAIKGQAIANFIVDYRDDSIGSVEIVPWTLFFNGSVCTHGCGIGLVIISPRGACFEFAYTIKSYATNNQAEYETVLKGLQLLKEVEADAIEIMGDSLLVISQLAGEYECKDDTLIVYNEKCQELMKEFRLVTLKHVSREQNIEANDLAQEASGYKPMIKDVQIEVAAMTADDWRYDVHQYLQNPSQSASRKLRYKVLKYALLDDELYYRTIDGVLLKCLSVDQAKVAIGEVHERICGTHQSAHKMKWLLRRAGMTCHGSIQVPPYKLVYGHEAVLPWEVRIGSRRTELQNDLTADEYYNLMADEREDLVQSRLRALAKVTSDKERVARHYNKKVVPKTFSEGEFVWKLILPIGARDSKFGKWSPNWEGPFQIHKVVSKGAYIGVEGAERDASCGGGGGHLLGDDAGAPADVERERAAEEGAVGERRP

SEQ ID NO: 186786 - protein, 163 aa, Oryza sativa
  Clone ID: PAT_MRT4530_83552C.1.pep
MANWRSNGVPFGLTHHANHSTTAQCMTALPTRCLPRRATCQPAPPTGAHWAIPLRRDRQTRPWSSLHDDEELIRFTTSQKLGFSASPDSQQLLLRILSFPNRSSAKFPPNVAGKTCIANFDECWTSMPVLDSPVASPPRVGSNFVGFSYVRPAPFLQRPSPLG

SEQ ID NO: 186787 - protein, 51 aa, Oryza sativa
  unsure (1)..(51): unsure at all Xaa locations
  Clone ID: PAT_MRT4530_83553C.1.pep
HQPMAFSRASFPFFLFIIFPNRGQSILFPFQTSSHTYPIQGRLFSPHTGXS

SEQ ID NO: 186788 - protein, 45 aa, Oryza sativa
  Clone ID: PAT_MRT4530_83554C.1.pep
VDTQSLPGFWYQWHLLSLCHSLSKLVSLVHHSLNLQTLVPNSCSP

SEQ ID NO: 186789 - protein, 233 aa, Oryza sativa
  Clone ID: PAT_MRT4530_83555C.1.pep
MAGGGDELKLLGMWASPYVLRVKLALSLKGLDYEYVEEDLKNKSELLLSSNPVNKKVPVLIHNGKPVCESQIILQYLDEAFPDAGATLLPADPHERAVARFWAAFCDDTIAKASQQASSGKTEEEKAEGEKKVVEALEKMEVGLSECSKGKPFFGGDTVGYVDIVLGSFLAWVRAGDAMKGVKRFDPATTPLLAAWAERFVELDVAKAAMPEVDKLIELAMARMAGAAAAATN

SEQ ID NO: 186790 - protein, 42 aa, Oryza sativa
  Clone ID: PAT_MRT4530_83556C.1.pep
MAELAMRRKDDGTNKLSTQLPKQLEYGFVLLADFLILKILPK

SEQ ID NO: 186791 - protein, 233 aa, Oryza sativa
  unsure (1)..(233): unsure at all Xaa locations
  Clone ID: PAT_MRT4530_83557C.1.pep
MAGGGDELKLLGMWASPYVLRVKFALSLKGLSYEYVEEDLMNKSDLLLSSNPVNKKVPVLIHNGKPVCESQVILQYLDEAFPGAGATLLPADPHERAVARFWAAFNDDTXLVEASQAASWGKTEEERAEGEKKVVEALEKMEVGLRECSKGKPFFGGDTVGYLDVVLGGFLAWVRATDVMRGVKRFDPATTPLLAAWAERFVELDAAKAVMPDMDKMIEFGKVLQARAAAATN

SEQ ID NO: 186792 - protein, 563 aa, Oryza sativa
  Clone ID: PAT_MRT4530_83558C.1.pep
MGNCCVSRPSGADKRRRCGSSTAPHTRGGRRVIGAANMRCLSTVSSVSDAARAVMSNEPATVLGNSGSSGNGGVMAAEEMLRRYEIGEELGRGEFGVTRRCRDAVTGERLACKSISKRKLRSSVDVEDVRREVAIMRSLPAHANVVRLREAFEDADAVHLVMEVCEGGELFDRIVARGHYTERAAAAVMRTIMDVVQHCHKNGVMHRDLKPENFLYANASENSPLKVIDFGLSVCFKPGARFNEIVGSPYYMAPEVLKRNYGQEIDIWSAGVILYILLCGVPPFWAETDEGIAQAIIRSHIDFQREPWPKVSDNAKDLVRRMLDPNPYTRLTAQQVLEHPWIQNASAAPNIPLGEAVRSRLKQFTVMNKFKKKALLVVAEYLPTEELDAIRELFNMLDTKKKGHLTLEELRKGLQVIGHNIHDTDVDMLMEAADIDGNGILDCKEFVTVSIHLKKIRSDEHLPKVFSFFDKNGSGYIEIEELKEALSPRGDQKSIDDIFLDVDIDKDGKISYEEFELMMSAGMDWRNASRQYSRAVYNTLSRKIFKEVSLKLDHSGPLVAAGK

SEQ ID NO: 186793 - protein, 97 aa, Oryza sativa
  Clone ID: PAT_MRT4530_83559C.1.pep
SSTHALLINVGESMEVMSNGMFRSPVHRVVTSAENERISLAMFYAVDPERVIEPAAGLVDEKRPTLYKKMKARDFLVGLSKHFSRGTRFVDTLKISP

SEQ ID NO: 186794 - protein, 114 aa, Oryza sativa
  Clone ID: PAT_MRT4530_8355C.1.pep
MDHAVITIDAGVGVHLEHPSTPQPKSSLSIIVSCKEHLNIRKSKEKKAGSGSKDTNKRKCQNTMPIHKKFTDNNIHIHRAAHRTDNNTDNLLGQQQQIPVNIFNLQQQLPNARK

SEQ ID NO: 186795 - protein, 105 aa, Oryza sativa
  Clone ID: PAT_MRT4530_83560C.1.pep
QMHVNFQRLYRQKTTALYSHWGGKVTGYTLPDQGLQPDSFSPWNTHKKRSPGGNKGRPQAGKGNKTALQGPHKANYRTGQDPATPTIRNDKENRPPPKMQFPPQK

SEQ ID NO: 186796 - protein, 92 aa, Oryza sativa
  Clone ID: PAT_MRT4530_83561C.1.pep
DGEVGMTQLLELTRESHIQHTKGITVGICLPQLKRVPTIGEAGSLQRQMSRRKHVESPLNMMLGLSRALTGHHMEDPAGTSSLALIMMTTPG

SEQ ID NO: 186797 - protein, 408 aa, Oryza sativa
  Clone ID: PAT_MRT4530_83562C.1.pep
MDEDYLILPKDEPFFYQDDLNLCDPEGTAFPAPYIGELGLLHPTTLGGDDAEPEEAAAPSFPQFIGDLSAQPPPPTPGGSVKAAPQFIGDDVSAQPPYHNGAGEGSGLPPAMSSGMEEAAHLAPSNAPLHPFDDVFDLLEPFDEVPRPEETEELFAYALELDKGNDDQWILGAAHLDANPNQTPCSLLSQFDADSLLGTNHQTAIHNSAVATHQLVQEIPSSDTPPARAAADAMEMAELSRVADECGGEASMVWSSDEDKLLLDGFSRLANQDSVSMCMEIAYGLPKKTAMDVALRIRWFQNKNKSAAQAGVISKESAGGNTEKAQAQAGVRSTESTVRKTRKGKGIENPNKKRNKHALSERGQDCMSTKALNRDNSMLLDQIYDKLRTGQPAGKSHWLASRALSPPS

SEQ ID NO: 186798 - protein, 558 aa, Oryza sativa
  Clone ID: PAT_MRT4530_83563C.1.pep
MAIHHLVASLLLFFSCCHAVAAGAGVRGRLPPTLATWRQYAAAAAPPPQVVQYETRYFTQRLDHFNELPASNGTFRQRYLVNGTFWGGAAAPVFVYAGNEGDVALFASNTGFMWEAAPRFRAMLVFVEHRYYGESLPFGGTRAAAFADASAAGYLTTAQALADFAELILSLKSNLTACKAPVVIFGGSYGGMLAAWMRMKYPHIVMGAVASSAPILGLNGLSDPYSFYNVVSNDFKGKMLAAWMRMKYPHIVMGAVASSAPILGLNGLSDPYSFYNVVSNDFKSESKHCYDVLRNSWSEMYKALATDAGRARLNQTFNMCKGNVDDIPGLVEKALIYGSMMDYPTPSNFLTSLPAYPVREICRAIDKPTSGNDTVSRIKDAMTIYYNSTGGLACFPGAGAEDDDPYGMFPGWTWQACTEVIMTMSYGIGNATVFPPDPFNLTAYLAGCLATTGVPPRPHWIQSYFGGYDIRNVLKRSGSNIIFFNGLRDPWSAGGILKSISNSIIALVEPKGGHHVDLRFSTKEDPEWLKKVRRQEMRIIADWLKQYYSDEAIDSMMN

SEQ ID NO: 186799 - protein, 145 aa, Oryza sativa
  Clone ID: PAT_MRT4530_83564C.1.pep
LVTPMWATQAVRPQAFIESNGDTFVTSFPSPFVLLWLCARRAQRMHVRPRHRAPFGPRRLPPRQRNASMRAPCACGCALPARLRPRLPLCSCSVRQADAPPEAWRLRAPLTGASTLPLAWASAAAAWRHAGLGHRPLRMLEKKRG

SEQ ID NO: 186800 - protein, 142 aa, Oryza sativa
  unsure (1)..(142): unsure at all Xaa locations
  Clone ID: PAT_MRT4530_83565C.1.pep
MLAVLELLLLLLYGVAGIRCSTVPENSTDMLSLIHFRKAINDPAGALGNWDTRCSTKHPGRVTALNLAGQGLSGTIPASLGNLTFVRILDLSNNNFSGQMPDLSNLQKIQVLNLSYNSXGGIIPDTLTNCSNLKELHLYHNS

SEQ ID NO: 186801 - protein, 232 aa, Oryza sativa
  Clone ID: PAT_MRT4530_83566C.1.pep
MASSLGRLKSSIFDKEERKMQYQSHIRGLNAYDRHKKFMKDYVQFYGHDKNVDNRAPIKTDKDTLREGYRFILSEEDDVDSTWEKRLIGLRWRTEKEVISGKGQFLCGNRICDEKNGLGSYEVNFSYIEAGEQKQALVKLVACQRCAEKLAYKRQKEKEREKEKEISREKEMELKERDKRKREREGSEETEDTSEDESTEKYSRRKKDRKRSSRKSSNNDEGFEEFLEGMFP

SEQ ID NO: 186802 - protein, 374 aa, Oryza sativa
  Clone ID: PAT_MRT4530_83567C.1.pep
MLAAAAAALRPAPTTAAFSPSTARSPPPTLLSFAPPRSHQRFHLSATAEGAGTTAAQEGASASASAPPVDEARLAQFAADWQAARAERDQGKILKLQVIRANSGGLIVRFNSLQGFVPNPLLSPAHWCKDPKRPIQDVTKDLVGSSISVKVVEVNEEERKLVFSEKDASWFTHSSLVKIGAIYDGIVGSVFHYGAFVHLRFPDGNYHLTGLVHISEVSWDLVQDVRDFLNEGDTVKVIVVNIDMEKSRIALSIRQLEEDPLLETLDKVIPLEADQSPSAGIISSDSSPSEADLLPGLDGICNELLQEDGCQLRTISSSFLLELGDRSFIRQGLMFSRFSVPTEQKTKVQELYLTTSLDQEGIKKAVQRVLGRVP

SEQ ID NO: 186803 - protein, 66 aa, Oryza sativa
  Clone ID: PAT_MRT4530_83568C.1.pep
MWTEGMSLIQCKGVTWTSTVIVSNRDKGEPWCQTNFQGMGLVRENQASIKADEDDTRDTEEGITDE

SEQ ID NO: 186804 - protein, 743 aa, Oryza sativa
  Clone ID: PAT_MRT4530_83569C.1.pep
MAAHSVAAAHATIAARAGAAAPAPAPPERLGFRLSALAGRGLRSPLPPRRGAPSASASRRRHNNRVRAAAVETLEGQAATGALLEKSVNTIRFLAIDAVEKANSGHPGLPMGCAPMGHILYDEVMRYNPKNPYWFNRDRFILSAGHGCMLQYALLHLAGYDAVLEEDLKQFRQWGSKTPGHPENFETPGVEVTTGPLGQGIANAVGLALAEKHLAARFNKPDSEIVDHYTYCILGDGCQMEGISNEACSLAGHWGLGKLIAFYDDNHISIDGDTEIAFTEDVSARFEALGWHTIWVKNGNDGYDEIRAAIKEAKAVTDKPTLIKVTTTIGFGSPNKANSYSVHGSALGTKEVEATRENLGWPYEPFFVPEDVKSHWSRHVPQGAAFEADWNAKFAEYEKKYPEDAATLKSIVSGELPAGWADALPKYTPESPADATRNLSQQCLNALAKVVPGLLGGSADLASSNMTLLKMFGDFQKDTPEERNVRFGVREHGMGAICNGIALHSPGLIPYCATFFVFTDYMRAAMRISALCEAGVIYVMTHDSIGLGEDGPTHQPIEHLVSFRAMPNILMLRPADGNETAGAYKIAVLNRKRPSVLALSRQKLAQLPGTSIEGVEKGGYIVSDNSTGNKPDFIVMSTGSELEIVAKAADELRKEGKTVRVVSFVCWELFDEQSAEYKESVLPEAVTARVSLEAGSTLGWQKYVGSKGKAIGIDKFGASAPAGKIYQEYGITAENVIATAKSL

SEQ ID NO: 186805 - protein, 1086 aa, Oryza sativa
  Clone ID: PAT_MRT4530_8356C.1.pep
MAALLVLVVLVVLGGGGAAGDDVAALLEFKKGISDRGRDPVLGSWSPPATPDAGGGGGGCPSGWRGVVCDGGAVVGVALDGLGLAGELKLVTLSGMRALQNLSLAGNAFSGRLPPGIGYLSSLRHLDLSGNRFYGPIPGRLADLSGLVHLNLSHNNFSSGFPTDGIRQLQNLRRIDLRSNSFWGNAGDLLAELRNAEYIDLSDNLFTGAVDLELESLSSIGNTVKYLNLSHNKLQGGFFRNETVGAFKNLEVLDLSNSGIAGMVPQIDAWFSLAVFRVAGNALSGVMPEAMLQNSMRLVEVDLSRNGFSGSVPVVNSTTLKLLNLSSNTFSGSLPSTVGKCSSVDLSGNQLSGELAILRAWDVLNLSGNNFTGTIPFQSTHSTESIALIQPVLRIVDLSSNSLSGPLPPDISNLQRVEFLTLAMNELSGEIPSEISKLQGLEYLDLSHNHFTGRIPDMPQASLKIFNVSYNDLQGTVPKSVEKFPITCFRPGNDLLVFPDGLPAGNYDDTGVAQSQSSHGHKAGVRVALIVGCIGAALLVIFIALAIYVVRSQELCGRNGFRGQITIRDLKLGRLSRPNLFKPPKDNVIPTKTSFSNDHLLTAAARSMSAQKELLAEAAVEYGYADPKEVTEPSSSGMAETSAAVPAMEPSPRVVLPTSPHFIDSRFHEEPVAFEVYSPDRLVGELIFLDSTLVFTAEDLSRAPAEVLGRSSHGTTYKAALQSGHVLTVKWLRVGLVKHKKDFTKEIKRIGTIRHPNIISWRAFYWGPKEQERLIISDYVNGDSLALYLYESTPRRYSRLSVSQRLKIAIDLARCLQFLHHEKGLPHGNLKPTNIFLTGPDLSPKLVDYGLHRFMTPSGTAEQILNLGALGYRAPELANTAKPMPSFKADVYAFGVIVMEMLTRKSAGDIISGQSGAVDLTDWVQMCNREGRGTDCFDRDITGLEESPRVMDELLAISLRCILPVNERPNMKTVCDDLCERQALAMIPQPQAASSTPPSWPLIGIVSDAEPGGRRRSRQRLAATGGWAQAGSGPPGRERCEHVGEGPRFGYQTSIWGQSFGCRSREHMGHGAIMIFSPHSLTVVLV

SEQ ID NO: 186806 - protein, 84 aa, Oryza sativa
  Clone ID: PAT_MRT4530_83570C.1.pep
FLHLQAYFLSLLLSARHSFKLGRQQWEGMLTGMKISLAAELDTTRIYKADGRIYYCDQPSIKLFCEDAGESPLESESSSSYLTY

SEQ ID NO: 186807 - protein, 54 aa, Oryza sativa
  Clone ID: PAT_MRT4530_83571C.1.pep
HTVARVPPLLSLEFLGLVRVFQGLKPPFSQIFLDNNLLVILGLESNKRLILFAV

SEQ ID NO: 186808 - protein, 81 aa, Oryza sativa
  Clone ID: PAT_MRT4530_83572C.1.pep
GLDRIHRITDTHGLSLSICLVLAFFSGTRPSNTCYILTYHNFPVQAISCHCKSDGSNSKRGKVIKKIIASNSSKFIKAWSI

SEQ ID NO: 186809 - protein, 385 aa, Oryza sativa
  Clone ID: PAT_MRT4530_83573C.1.pep
MEADATTAAQGRRRDDRWSSLPFDMLVLVVDRLGWSNHPSFALTCRHWRSAVSPFYPAWITPLLLSSADVGVANASYYSPYFHRSFEVDGCTLNVPPEANLCCSNGRRLTLCLPKLVLQTDLVTGAVDELPEMPFYWFNFIVYDDADRRMYCVNTIFVVRLARAIQDEDGEWGPWDLTEFNVEEGAQLQASPISNPVLHGGLLYVLGEDGKLAVYDPCNHDDNFKVVDKLKGFGIEHDRVDSYLFESDQGELMAVLVGYTGTPVHVLKLNEETMEWEKMESLDGRALFTGTYTTMMRKTKLKSMQNKVFLPRLYEWPKTIHVDLVIRDGEPAFIPKSHSQYSIEKITSNTSIWSYKVGQQEEARKFWGSEKVDYSIWVDFSTNLQ

SEQ ID NO: 186810 - protein, 66 aa, Oryza sativa
  Clone ID: PAT_MRT4530_83574C.1.pep
PLLKSRNWAILQSTSRRNPKAYTSAKHISAGDITQNTSAVIIIGGHLPPALSGWGTLGATCRAFLW

SEQ ID NO: 186811 - protein, 147 aa, Oryza sativa
  Clone ID: PAT_MRT4530_83575C.1.pep
MVSSKDIMHVLEYTKFQEDVNAWQGESVGRRRPKMELILGRQEHGIINTEWNMTGQEGSAACPMGDLQMGDSVVSTIDIRALYCNKSPGKSSSSSMYGASSSSKRKACELNHGDGGSAHDDVRDYGVDHVDDNGEYYGDDHDDVMHG

SEQ ID NO: 186812 - protein, 66 aa, Oryza sativa
  Clone ID: PAT_MRT4530_83576C.1.pep
YSFPSASAVYSRGRRIYRESSGSIRRGAAGCQPSIRWRRRRRCLEYDGAAETSLDLIFGVLFGYYM

SEQ ID NO: 186813 - protein, 67 aa, Oryza sativa
  Clone ID: PAT_MRT4530_83577C.1.pep
FGIVKGGWPHPPGVPPQEVPQHAQQMDLSGRETFNYFAKLILPRGYKCPFMGNFTPFIIFLLIFYHV

SEQ ID NO: 186814 - protein, 126 aa, Oryza sativa
  unsure (1)..(126): unsure at all Xaa locations
  Clone ID: PAT_MRT4530_83578C.1.pep
AIRDLINLYCKVNSEYGINLLWVMGLLVLNLQLNNPTGLIIRYXLSKTTALISPWAATTSRLILGRITSVSENLSILSSEINLTGCNQSRNTPINTYDLNLWQDMASRVPSTLIITDTSITFIGIT

SEQ ID NO: 186815 - protein, 115 aa, Oryza sativa
  Clone ID: PAT_MRT4530_83579C.1.pep
MEAAPEGIHAEAIIHSWDPLPTIMGRLVRPRDLVALRLDVEAPIWSSLLGDDARVLATMMRSMELMELQWRSSTPSPRRDMNDLTRRIGPSLGHNVVVAELAAYTEGKTKGVPKV

SEQ ID NO: 186816 - protein, 155 aa, Oryza sativa
  Clone ID: PAT_MRT4530_8357C.1.pep
PRPARRHPQFLTIELLRRLLSFPMPSRCPGGHRCAGHDDTSHIHARIEPPPRPGGRVPTVKSFCCLVLMLRSRRLRLASSCRRAADAVTPPCALAAGPPPRLPARARGRRASLPAREDPASLRRALAPRKLAHGAAAPPCRALAIHSIKQHNSIH

SEQ ID NO: 186817 - protein, 284 aa, Oryza sativa
  Clone ID: PAT_MRT4530_83580C.1.pep
MGPTATYPTRTMSTRHQVIVVQARNGGKRMRVNKVIRTTFPVRKGMQYMDAKKLKEPIGFLDPTRICQTQHTVQLSPQLEQLKDKTPEEIAEYKKGLHKQKLINVAQYIGRAFLHFQNKRVVLAAYNFNDHYIGLIIYPKHCTVTVLDPLDYSHDSYKQFLTILQYAYKYYKFKGGEQIRSREKLLVHTYWPCHKQPRGTVLSGYYACEFLRVNGRYRVNPEDLPREEQQTSFDNTAIKNIQRDLYHFIHRECCHVEGKFFDKEGALATSDKYKNLRECSNAMP

SEQ ID NO: 186818 - protein, 340 aa, Oryza sativa
  Clone ID: PAT_MRT4530_83581C.1.pep
MLPATSTVPPTSPLPHSRAAPRRHLRAGLLHGSVATAAVVRACGVTTGHRRRMGSVRASPRAGGWEVAMADKEGVGVERLVEVAQRAADAAGEVLRKYFRQRVEIIDKEDQSPVTIADREAEEAMVSVILKSFPSHAVFGEENGWRCVEKSADYVWVLDPIDGTKSFITGKPLFGTLISLLYKGKPVIGIIDQPILRERWVGVDGMKTTLNGQEISVRPCNVLAQAYLYTTSPHLFAGEAEDAFIRVRDKVKVPLYGCDCYAYALLASGFVDLVVESGLKPYDFLSLVPVIEGAGGSITDWKGNKLHWPVSAESRPESFNVVASGDARVHKQALDALQWH

SEQ ID NO: 186819 - protein, 147 aa, Oryza sativa
  Clone ID: PAT_MRT4530_83582C.1.pep
LSQPGVAEREVAHVYVLIKTHQPVLGGHQQPQQLAHGPLIHSMRALNVALSVMNQPHASSSSAAAAAAAGHHYPAMTMIRAESTPANRPAADASYNHGDGRQEDHHPPNEEGLTVRTSDCGFTTQMALHEDGYQWRTYGQKKIQGTH

SEQ ID NO: 186820 - protein, 107 aa, Oryza sativa
  Clone ID: PAT_MRT4530_83583C.1.pep
MARHHHQPVSAKGRRERRGRGAAGSEERRSGRRPRAVGTAATSLLDPLPLRLYSGDLHLQIQYAPPLSHDSKAMAAFVDDDFELATELYTQAIEASPATAEFYADRA

SEQ ID NO: 186821 - protein, 653 aa, Oryza sativa
  Clone ID: PAT_MRT4530_83584C.1.pep
MAEPTPPLPSNAGLRILLSKDRPPASSSSALAAATSAAVSSHTDRDRIIGVFRDALSRTESPEAFALQAVQDAIKPQKQTVLVLEENQSLENALRKLLQELASSAVQSGKRIMQYGDNEENNCPITRLLDIVLYLCERGHVEGGMVFQLLEDLTEMSTIKDCKDVFGYIESKQDVLGKQELFGRGKLVMLRTCNQLLRRLSKANDVVFCGRIIMFLAHFFPLSERSALNIKGVFNTSNETKYEKDATDVNCSRKRIELPNEHFSNPALTAANLTRWQKFVSNLTVVLSTFEAQPLSDDDGKLNNLDQEEDAAFNIKYLTSSKLMGLELKDPSFRRHILVQCLIFFDFLKAPGKTDKEGPTGSMLNRLLSLISILLTACATGHKEEIDSCEERVKKLLEIIPPKGKDFLQSIEHILEREKNWVWWKRDGCLAFEKQPFEKKPGQAGVRKRKPRWRLGNKELAQLWKWAEQNPNALTDSERICMPSVTEYWKPLAEDMDPSAGIEDEYHHKNNRVYCWKGLRFSARQDLEGFSRFCDYGIEGVVPQELLPPEVRSKFYSKPGDKAKRPKREDPKGTSAQPKEQQVVSATPETDGGGSGAEPEEGAVPMDSDNAAIDEGRKQSPEEVSGPESGQCEAEADGEDNMKNEASKDGPSA

SEQ ID NO: 186822 - protein, 228 aa, Oryza sativa
  Clone ID: PAT_MRT4530_83585C.1.pep
MATAPRARRLAAADVQPATPAVGPASGGRPQFNLSSGAATAVVFVSIVLCFILLCTYCRCARQRAIAGARSRVMREIRERVPGVLLLRPAAAAAALPVLPYSAAAAAAGAKKGPLVEDCPVCLEAFAGDDGVKVVPACGHVFHAACIDQWLAVRNSCPVCRCAVVCYYADRARDTAVVVDDDDDDQEVVLERVVAMIEAIREEQREEEAAARRAPASDGGGGEGLMTS

SEQ ID NO: 186823 - protein, 66 aa, Oryza sativa
  Clone ID: PAT_MRT4530_83586C.1.pep
FFFFFNKYGDDFTQILLWMDHNSVIMGRIYSSTSMVVNPKESFWSENDGISWAHTQLCSESTCKRI

SEQ ID NO: 186824 - protein, 62 aa, Oryza sativa
  Clone ID: PAT_MRT4530_83587C.1.pep
YFCITIWNQIATGAGAVKGTGDARPCRKGLEGGGGGGSSRGRGLRLYLCGGSSRGNRKLGFT

SEQ ID NO: 186825 - protein, 413 aa, Oryza sativa
  Clone ID: PAT_MRT4530_83588C.1.pep
MAGTEELLVQESTVPIVSDGDPSRPAVRSAHFLLPRAAAGGRPPPLPSSPLCSGGPVPDHHGLLRVVEFKGWAGSPGLWRQWVDRLRPRHEPLWRSVGILDAILATAYRVRRDEGTLLQLAAFWSADTNTFMFPWGEATVTLEDMTVLAGLPLFGKPVRARLPDALVGDVDALMAVRSALHRSKYKKPSYPGWVQYFLKRQEEEDDETAASAGADLIEHGAFLAMWLSLFVFAAPPFDVVGPQVFPIAALLARGIRVALAPAALAGIYGDLSALKRFLDLRDREEEALQVTAPMHILHLWVWERFPQLRPAMATTTIPATTDACRVPMAARWHGVHKALDPQFVHGVFMSPDKFEWRPYGSRSIALPPKEAKAGTWVVQDSPKWNNTYLSYKVNRKHKTMPVPMRQTISTLDK

SEQ ID NO: 186826 - protein, 80 aa, Oryza sativa
  unsure (1)..(80): unsure at all Xaa locations
  Clone ID: PAT_MRT4530_83589C.1.pep
LVAPRAPHLLXHRHSHRRRRAAEQPAGQPGXGVELLHVARPEIDSRSFWKRGFPGSWWRRFARASEAACWAAAALSICSA

SEQ ID NO: 186827 - protein, 65 aa, Oryza sativa
  Clone ID: PAT_MRT4530_8358C.1.pep
MTAAAVEVEAEGAARGNGDDDDDGTMEETARGAGGSAWQQRRRQERDDSGSPASRHLVTALGGDR

SEQ ID NO: 186828 - protein, 813 aa, Oryza sativa
  Clone ID: PAT_MRT4530_83590C.1.pep
MAGTEELLVQESTVPIVSDGDPSRPAVRSAHFLLPRAAAGGRPPPLPSSPLCSGGPVPDHHGLLRVVEFKGWAGSPGLWRQWVDRLRPRHEPLWRSVGILDAILATAYRVRRDEGTLLQLAAFWSADTNTFMFPWGEATVTLEDMTVLAGLPLFGKPVRARLPDALVGDVDALMAVRSALHRSKYKKPSYPGWVQYFLKRQEEEDDETAASAGADLIEHGAFLAMWLSLFVFAAPPFDVVGPQVFPIAALLARGIRVALAPAALAGIYGDLSALKRFLDLRDREEEALQVTAPMHILHLWVWERFPQLRPAMATTTIPATTDACRVPMAARWHGVHKALDPQFVHGVFMSPDKFEWRPYGSRSIALPPKEAKAGTWVVQDDVPGTIARANSNWKVAWRTYTFGYRKFALVVPHYKLGVTLEYARWWEPYSLACSTDVSNYANTREPHSLFIPMKRNTEELSGANSCKKQHVDTSVPLPGTMEDPLDEIPLIERLNNIIMVQCARQEQIADVVKYSVPEFIRGKDNSMIVQQDAEQYLSDSMRVLDSSADESFCGSVTKMEQHISLLQSKQKAQDHASAYEANNFNSGQVMIHHGVESAASTGSNEAIEAATTAGMLPTPEDILVTSDEVMMERNCGYELDAVLLGAAPQQQSTEDMGTCMFALERDNRVKTDKDELASLKGTEKENEDDSTSNQATAGSLIEDCIEISRKNSGNNGISSDILVNASTELVRTKVSTKTLYYLTKIWLLKNAHERDASDMNRDHGVYQPRREVGTREMIEKSFAAREAQKVELERVIKHLKEQLRDRNPSKLDV

SEQ ID NO: 186829 - protein, 89 aa, Oryza sativa
  Clone ID: PAT_MRT4530_83591C.1.pep
AYAWSHYERKCSLSPIEAAAAMAGLACGSTAFAGKPGLARAPSCPAARFSVSSMGVGQQRLRQTDGAEAGGVGEDVFWGASAVLSAAIL

SEQ ID NO: 186830 - protein, 37 aa, Oryza sativa
  Clone ID: PAT_MRT4530_83592C.1.pep
MAVSISIISSNHAGALEVSPEVVGTMDGVAREYNFIQ

SEQ ID NO: 186831 - protein, 77 aa, Oryza sativa
  Clone ID: PAT_MRT4530_83593C.1.pep
RYSSGEYQVVRTSPAVLQSGRPPGVHFSPVLFDATAAPICLLWLRQYNAIAGTFLQALALVRAIEGSAHALHGLSFH

SEQ ID NO: 186832 - protein, 322 aa, Oryza sativa
  Clone ID: PAT_MRT4530_83594C.1.pep
MAARSFQARSPKEESDAAVHEAVTLGLKNAAISGTVVAVPTLVGCRVLPWAKANLNYTAQALIISAACIAGFFITADKAILRNARQNTIGKIDRLKQHKTGSDLCNARTDDVRGDKQPFAPGRMREACAPVPPGAHEEACIEQSDDRSEDGSFSGSSIGSSCSSASDLSDDGSSYRPGDYLEPSSSSSSASSSTLQLDSEGPLCDLSSLIAQLPIRRGLSNYYQGKSQSFTSISDATCVQDLAKKITYNKRMKACKSYAAGLDMNQRSNHLPKPCNKMIAKRPSKGSFTCLLSRPSSTSLLCSSAKPPTHQSKKDVQMHINS

SEQ ID NO: 186833 - protein, 146 aa, Oryza sativa
  Clone ID: PAT_MRT4530_83595C.1.pep
PGLQESARGNILSSEREKEIIEEIINGLVARLMKRMCTTPENAGSVDCSDAQFSLQHLFRKLGNEEFVGQRIILAISQKISNVSEKLLLADPFDDGFPEMHSNMFIMIQLIEFLISDSFNNWLCRDHFDRKLFEEWVRSILKARKD

SEQ ID NO: 186834 - protein, 231 aa, Oryza sativa
  unsure (1)..(231): unsure at all Xaa locations
  Clone ID: PAT_MRT4530_83596C.1.pep
ANNGTQPRSPKTRPLQPIQNSLQRGRLVEARAPPQEDMNLEXACINCLGGFGKGMPRRRIQGEKRRKYHRRRPSRSQREPRLGFHPAAPLEGGRPRQAPPLSASPPAALATASTPTSLVVSHQLLDRTSTHSSRLRCHRPRLTGLRCRQPXSVRALPPPPLLPPTARHHRRRRESPGPRHHLREQPPPALVSRAMLXVRAMSPPSPAGQPTAVAPPSGYPSTCRQHAVTAV

SEQ ID NO: 186835 - protein, 170 aa, Oryza sativa
  Clone ID: PAT_MRT4530_83597C.1.pep
MGLEVLMARDQLLQRPRWRYERLRGDGDGDGEEAAAGVCRVRRQLRLRRRVVAAGAAGRMARGGGGGGGGRKKVRLMRLVFLLPARRVAALFAELVRRLAAAAAASVVVDAAAECPTIVFSSQWGLPVLSHSASGGGGGAASAARNARLRAFYLERSLSSAGASAAASPC

SEQ ID NO: 186836 - protein, 32 aa, Oryza sativa
  Clone ID: PAT_MRT4530_83598C.1.pep
DLKGAAANLPGFCKVEIPNGEGGVCYWLARFG

SEQ ID NO: 186837 - protein, 123 aa, Oryza sativa
  unsure (1)..(123): unsure at all Xaa locations
  Clone ID: PAT_MRT4530_83599C.1.pep
YQRALLRPLWNINAHRFRYSTEGRAXDRVGINNGTTEFSGELLXGQILIVPQHYVVVKKARLEGCANIALNTNCISMVSHIAGKSFIFRAIPTDVVANAYRISXDEAQRLTHNRGDEFGAFTP

SEQ ID NO: 186838 - protein, 62 aa, Oryza sativa
  Clone ID: PAT_MRT4530_8359C.1.pep
TLKFKILIHSTTIFHLRSEVAPFCSSSPYQRQAVNHRHILQYLITISPLFKIRKCKKLVAVQ

SEQ ID NO: 186839 - protein, 121 aa, Oryza sativa
  Clone ID: PAT_MRT4530_835C.1.pep
MGKSRSGVLLALLLVCAAVAAAAAAAVPGSKGKGGAGRAEVACSDLATRGECVASGGGSRCRWCRSEALDDMCFGAAEAWRLPNQVACKITCKLWRLTVTKCPEVELFVANGIPISRKDRL

SEQ ID NO: 186840 - protein, 56 aa, Oryza sativa
  Clone ID: PAT_MRT4530_83600C.1.pep
PLYSTVPHLLPLLFLVVVYHHFRYHIATSRFFNNISGERARWTPRRLWRRRRPTCR

SEQ ID NO: 186841 - protein, 195 aa, Oryza sativa
  Clone ID: PAT_MRT4530_83601C.1.pep
MEEEKTHEQEDVVEQHSSEASSRTEEEGIHALDPSWKPRRERERERIFSPPASTVVPVPPSSHVWRNPMRRRRRPNGETPGGVLPASSAGNGGSPQPAAALHELVRRSSMDINTSPLGGEGRHPPQSTKPQANMLPDLDIRDEPSHTPSGSYGGWQEGSSTISDPTDCVFEEEDYPIVDYELMNKGATSASANRM

SEQ ID NO: 186842 - protein, 65 aa, Oryza sativa
  Clone ID: PAT_MRT4530_83602C.1.pep
ASALRTKTICYFFICKRRIKSLLPSSKQKICSKLKFCTRKTALFQTVSNIWAPKKTFQIGKSVRP

SEQ ID NO: 186843 - protein, 66 aa, Oryza sativa
  Clone ID: PAT_MRT4530_83603C.1.pep
LSALTIPSRPVRFIPVFKSWSDSVEFKSVCSSPQTFLHIDGQAVHQGPLIDPGIFLPVPCGLPIFF

SEQ ID NO: 186844 - protein, 140 aa, Oryza sativa
  Clone ID: PAT_MRT4530_83604C.1.pep
MGVLLRKDKQSEILIQRVFEAEGCSAHWRNRSESLSRTSLKWVKFTEIRIFRTESQNLAVGRWVLARCRLGLLILQSSVGRALSGTAKKVLHVRDFGGCSDGIRFRDLKGFVLAQILESGFKNRWGPGYRHPAVRRLPAV

SEQ ID NO: 186845 - protein, 158 aa, Oryza sativa
  unsure (1)..(158): unsure at all Xaa locations
  Clone ID: PAT_MRT4530_83605C.1.pep
MLTPLVSAAPCPIPPRRPVPRRWRKDSAWRTPASDPTDDVANLLCWRGEGIRSRCRRRQRWEVPASXARSLHPIPPLHPVPTATASVXTTAGAGRTPRGGLQNPPTLNPPPTRNQRRIPSRRAHSRSPCQADSYSSSSPPPTPAPASLFSLPTAVPPR

SEQ ID NO: 186846 - protein, 166 aa, Oryza sativa
  Clone ID: PAT_MRT4530_83606C.1.pep
MLTPLVSAAPCPIPPRRPVPRRWRKDSAWRTPASDPTDDVANLLCWRGEGIRSRCRRRQRWEGGLLAADSKTLDTVPNTGRAVLSTAAVSSSSPSPTTNAYSSAHPPPTLNPPPTRNQRRIPSRRAHSRSPCQADSYSSSSPPPTPTPPPPWLPPSPTPTPRRRRL

SEQ ID NO: 186847 - protein, 112 aa, Oryza sativa
  Clone ID: PAT_MRT4530_83607C.1.pep
LVGLHSAFTHHAAETPRSTIPQPNVDLCNAESERKEHLRHRRPPAGLPPPAPRTAARRREPTSRHRHERHRDPRVLAVDHQDTQGDLPADAGDGVCGAECLRPSRHCRQLPL

SEQ ID NO: 186848 - protein, 73 aa, Oryza sativa
  Clone ID: PAT_MRT4530_83608C.1.pep
SNWSIYLGGKTKKKFNTVTTPTSTGIFLNAHNFWITTHQIYNGNVTGDILPRHGKTSLLLNGHRFRVCPHFFS

SEQ ID NO: 186849 - protein, 80 aa, Oryza sativa
  Clone ID: PAT_MRT4530_8360C.1.pep
LSSPGVCVLLGVLCTCLCRFPQNGKAERMLRSLNNITRSLLFQACLPASYWVEALHIATHLINRHPTKTIQHHTPFFALH

SEQ ID NO: 186850 - protein, 119 aa, Oryza sativa
  Clone ID: PAT_MRT4530_83610C.1.pep
MAPTCVGCGLCCATATARQHDNGTKWWRRRRAVAGRKLQHQLAAQEERRAVWGVVCGGGIKKRALRSIPVEVRVLPRCNHGFHVRCVDAWLVSHGSCPTCRSATGVVGGNGAEVAPEER

SEQ ID NO: 186851 - protein, 207 aa, Oryza sativa
  unsure (1)..(207): unsure at all Xaa locations
  Clone ID: PAT_MRT4530_83611C.1.pep
MTRTTRIVSILVSLVLLGQGDTYGYKYKAPXEERRHRQSTPTIDGTTYKPTYAKTRRRILTSGIGTASPLRCFWILIGETXALSLISPGTNSRRKTTLLSTTSQNYRPPCRQQLDRLPQILYCLAYTLVPTIPIPYKYQNRDIKRRHISPLFISLQARPRPRCRRRLLLRCGTSGRSRARPARRRRTGRGTHDCSAAARAPSRRPRT

SEQ ID NO: 186852 - protein, 56 aa, Oryza sativa
  unsure (1)..(56): unsure at all Xaa locations
  Clone ID: PAT_MRT4530_83612C.1.pep
GQGVKGQQLLPVSLVKKKTPLGANXQTAFSRGLGVFFFQLAPQVFPFEKGQLGPPH

SEQ ID NO: 186853 - protein, 48 aa, Oryza sativa
  Clone ID: PAT_MRT4530_83613C.1.pep
MAEQEEHGRHGGNIIKDSHVAPLKSVARFRFSETGYRISASQNLKLSK

SEQ ID NO: 186854 - protein, 150 aa, Oryza sativa
  Clone ID: PAT_MRT4530_83614C.1.pep
MSALPSLFSIPSFWLGRDMTLFQSQIWGSEAIGEEYPDPEGCAMGTGLWMYACPCTTGMDDPRMNPMVPGAPALGQMACDRVMVCAAVGDFLRWRAHAYAAAVAAAKGDASVEVLETAGEGHVFHLFDPDGGKAKELLNRMVAFVNAAGA

SEQ ID NO: 186855 - protein, 61 aa, Oryza sativa
  Clone ID: PAT_MRT4530_83615C.1.pep
WHLSFYYLLFFFPPLVVNCPDSSIIDATWSHPLVVEPDWISSPGIIGRSKLRTLIISLFFF

SEQ ID NO: 186856 - protein, 146 aa, Oryza sativa
  Clone ID: PAT_MRT4530_83616C.1.pep
RPGRDVATHHTSPSRSVRSCVRASMAAYKKGIMINKASVVAAFSAAWLLLLVLVVLLADEAAAAPAGREAAAAWMRRLDDTVEPEPLPAELDRVQRRVLQATSHYVAPSALNPDRQGCIQSCLPGSQYSVPPPGSHCNRKYYNQGC

SEQ ID NO: 186857 - protein, 93 aa, Oryza sativa
  Clone ID: PAT_MRT4530_83617C.1.pep
GATPKGYAQGTFVTYPPRVAPYGLLLAGTTCRLLLQPVKHQQTKVTFYLDTGAGDNGNDALSGSSASNKRSKSEVWANFEELFKSRNGNQIRR

SEQ ID NO: 186858 - protein, 185 aa, Oryza sativa
  unsure (1)..(185): unsure at all Xaa locations
  Clone ID: PAT_MRT4530_83618C.1.pep
MGSGDWFKTIISKKKSKRGKSKHAKVAGQVPNGPNSTNQKSNNGPSSSSDPEDNAALEEWAATRIQNAFRCYKAKKTLRCLKGVKRLHIIGQTNPVNKQTAATLNYIQSWNKLQAEIRNRRAFMVTEGRNRKKKQENQMKLEAKLQNLXXEWNGGSDTMEEILGRIXXREEAAVKRDELCICIHH

SEQ ID NO: 186859 - protein, 394 aa, Oryza sativa
  Clone ID: PAT_MRT4530_83619C.1.pep
MGSGDWFKTIISKKKSKRGKSKHAKLVPLTCGPGAGGTHMSVTHAVPQMICIRDVDSQPVTFEHGLVAGQVPNGPNSTNQKSNNGPSSSSDPEDTGALEEWAATRIQNAFRCYKAKKTLRCLKGVKRLHIIGQTNPVNKQTAATLNYIQSWNKLQAEIRNRRAFMVTEGRNRKKKQENQMKLEAKLQNLQVEWNGGSDTMEEILGRIQQREEAAVKRERAMAYAFNHQWRARSATSLGNFNYEVGKGGWGWSWMDRWIAARPWEPRSLVHPENLKKGQAKKENASTNPSALKLQGSISLSNNINDRKAPKKKSSPSPPDQKKPVAASPPDQKKPVALSPPDHKKTVTPSPPDQKKPVARVQKAKAAGPPKAKPKDMKGGQQKKQQQLEVPSLSV

SEQ ID NO: 186860 - protein, 753 aa, Oryza sativa
  Clone ID: PAT_MRT4530_8361C.1.pep
AGRSRAGTASAPPPRRPPACRTRRRRRSAAARSPADYPTKNEIVRCNSSGDLYPLPAYAYSSASSARAFVATSTNTDLWHRRLGHLGHEALTRLAQASVIPPPKVTTSLCHACQLGHHTQFSTTIRSIQCDNDREFDNSSARSLFLTNGVSLWMSCPHTFPQNASLPTPIGRRPCPDHIGPAARFSTTAPHTDPNRPASPTRTGPSRPPAPLRPPPTGAPTRPQSARVPGVRIPTQLGLSPVVNEHSMMTRGKTGLRQPVHRLNLSVATLSPVPRTYRAALADPNWRSAMEEEFSALQANHTWDLVPRPHGANVVTGKWIFRHKFQADGSLDRYKARWVLRGFTQRPGIDYDETFSPVVKPATVRTVLSLAVSRDWPVHQLDVKNAFLHGTLQETVYCTQPAGFVDSTRPGMVCRLNKFLYGLKQAPRAWYSRFASFLLSLGFVEAKSDTSLFIYRHGADMVYLLLYVDDIVLIASSDALHQWTIRSLQLEFSMKDLGSLHHFLGISFTRQSSGLYLSQRQYCLEILDRAGMSDCKPCATPVDTNAKLSAVDGAPVAAPTDYRSLAGTLQYLTFTWPNISYAIQQVCLHMHDPREPHLAALKRILRYLRGTPDLGLHIRRSTPVDLTAYSDADWAGCPDTRKSTSGYAVFLGDNLVSWSSKRQHTVSCSSAEAEYRAVANAVAETTWLQQLLHELHTPPSHSTLVYCDNVSVVYLSTNPVQHQRTKHVEIDLHFVRDCVAVGSVRVLHVPTTS

SEQ ID NO: 186861 - protein, 80 aa, Oryza sativa
  Clone ID: PAT_MRT4530_83620C.1.pep
MRIPESARLSVGGVSPDMGDTELRDHFGRYGDVADIWLRRDRLTGLPRRFAFAGSCTPPTPPSPSPTITTSSTARRSFTV

SEQ ID NO: 186862 - protein, 113 aa, Oryza sativa
  Clone ID: PAT_MRT4530_83621C.1.pep
PSTLRHTSHIDMVYLRAYGRFWHTLREFIMEFTDGRSPTRTELGRHCIVPGLMSPSPTWRPADLRYKRDPREDLRHRILPPTHPPQPTKPEPTGAKSPGDLVESTRLRSRRYH

SEQ ID NO: 186863 - protein, 182 aa, Oryza sativa
  unsure (1)..(182): unsure at all Xaa locations
  Clone ID: PAT_MRT4530_83622C.1.pep
MARVSHSRKRTRAPSNSNSKPTSQTQPPPPELTDRPVRVYADGIFDLFHFGHARALEQAKLLFPNTYLLVGCCNDELTNRYKGKTVMTQDERYESLRHCKWVDEVIPDAPWVLTQEFIDKHQIDYVAHDALPYADTSGAANDVYEFVKKIGXFKETKRXTDGVSTSDPHMRIFEGLHQYVMR

SEQ ID NO: 186864 - protein, 117 aa, Oryza sativa
  Clone ID: PAT_MRT4530_83623C.1.pep
AKKKEGALYFFLLAGDMPPFGSWLKQNASIHVTGGIWVFDKGGFETQAGFKGGPLVKKLENKTGGEHKMGSENLHGGKGVKHCLMGWGPTELGEKQNRFMSLRPRGSLFFRYKNKRG

SEQ ID NO: 186865 - protein, 136 aa, Oryza sativa
  Clone ID: PAT_MRT4530_83624C.1.pep
MEIGAGGGRAGGREGEASSGGDGSGGRQRGRGGGGEEVDLGAEGSPAREHAAEAAGHAGYAGRRGGDRRGGAAQAAGRVETGGGVEGEGGGQGDAEIERSILPLCDSWWAGPESLNWAGNIRCQTQPNSTQFRGRC

SEQ ID NO: 186866 - protein, 107 aa, Oryza sativa
  Clone ID: PAT_MRT4530_83625C.1.pep
QAGQTVNNTPRQEIETHYDLTTEEHQTNDQAGQEEASLPWKRLHNKVTGSTTHLMRTRQRGPARSIKQRLRTEERERNMDFVTKTSGLDWKETPRDEETMEMLTALG

SEQ ID NO: 186867 - protein, 264 aa, Oryza sativa
  unsure (1)..(264): unsure at all Xaa locations
  Clone ID: PAT_MRT4530_83626C.1.pep
MAAGQFLDLAGRPPPSARPXVMKVLTKKFGEMAECSAACGAMLGGAGPDEEAALRRYGRTIGVLYQLVDDIRSASGNGKMRSNASVLRALGMDRALGIVEELKAQAKMEADRFGDKYGERVLPLYSFVDYAVERGFELQDAATTPYDAAHITPDWDPLGQVTLESLHTTGQIIPHLSTIPELLAPGPNMDAAMAAPSILARDGRRNHLNRNQPVAGASCAPPEPAPIYISTRVSDTKTRVSDSTNDAAGHWPRSFTARVVGCLG

SEQ ID NO: 186868 - protein, 60 aa, Oryza sativa
  unsure (1)..(60): unsure at all Xaa locations
  Clone ID: PAT_MRT4530_83627C.1.pep
TARGEPTRGSRRRDRRRXGXERGEGGASRAEARHAATARRANKRMIFTAVDATTSVNKIX

SEQ ID NO: 186869 - protein, 472 aa, Oryza sativa
  unsure (1)..(472): unsure at all Xaa locations
  Clone ID: PAT_MRT4530_83628C.1.pep
MGRPAQEGGSERARGRGGEREPVDRAHLAWSRVGPACRXHGSPCGTRTRRVLGFGGGTRCTRAVRGGRGCGGPTCSLTARGGPRAREGPDRGRLDPVLAELAPTWRLRGCHAGRREVDDDASRNGRRTTAVSGGANHGDTGESEHTGWLHRTRGDEPTARIRRRELVGGELRRRQPAERKGENGDEVTRGRFPAARASTRLRESVPCAGLGGNASREAGDERRFRARAATAASTRRATATVGAAPANYGEATRTTVRAGAVTRGRRRGSDLSGLGPGKRKKTXRPESPSASTNAPALPVXAMNGGGEMGKGGGERGRRGRGRRGSASVXGSLRAEWRGPGDDDGDDGGAVWSGAARARGKQRAARXLSGAARARGAGXDADGAGAARAATARARAREQRRAGSGSVGAEREGSARRGSRARARGARAERRRGRERXRERERERDSRGGRGRWAERDSAHRTXGRRNRLLRRD

SEQ ID NO: 186870 - protein, 47 aa, Oryza sativa
  unsure (1)..(47): unsure at all Xaa locations
  Clone ID: PAT_MRT4530_83629C.1.pep
QRCRLVLPRRSGLTDHXPLTSSSPDLRPTGVDLILAAASTSSTPLAS

SEQ ID NO: 186871 - protein, 126 aa, Oryza sativa
  unsure (1)..(126): unsure at all Xaa locations
  Clone ID: PAT_MRT4530_8362C.1.pep
AVAAAAAATVAAVAAATAATPAGTGGTDWWGXIVARLSLSYPVSAIIXIIEVESVIVSTVALLEVEEAXSIXXHXXVLGGXXSCRDGLPXEYASRLWVKREKQTNKRGRGPSTRGXPRTYVXAXXC

SEQ ID NO: 186872 - protein, 240 aa, Oryza sativa
  unsure (1)..(240): unsure at all Xaa locations
  Clone ID: PAT_MRT4530_83630C.1.pep
MEIRLFLGRLGRAARLTVRREYVAHARGRGKDAVHARGPWWTQVRXGPRAASRLAVERAHGEGLTGVGSIRSRLSWXDVAPTWRPRGLAGGRRIRRRLLDGSGLRRRQPAAGEEGNGDEVTRGRFPAVRASMRLRELDASVGLGGTTPSEAGDERVLRSSSGDGGEHTASDGNEEEEGAAEVPFRVLERTGSPGAWRRTAEARQSTGAAATGGQAGELALRLASKAATGSDAGERGKRGE

SEQ ID NO: 186873 - protein, 690 aa, Oryza sativa
  unsure (1)..(690): unsure at all Xaa locations
  Clone ID: PAT_MRT4530_83631C.1.pep
TTGFNLTENFKENLEAFFRCVRPRVVAPQKTLPTKKPVVPAPPTFKTMADKTLREFAAPSADNVAIGPQINMGDVDFDLKSSLIMMAKASPFCGKPNKDANAHLQQFLEICSTYTIKGVTPDAVRLRLFSFSLLGRAKQWFYANRAAVNTWDKCSTAFLLKFFPIGKTNALRGRISSFQQTRDEFIPKAWERLQELTPMSRDHIDATAGGAFFSKTVRGAVXLIDKMVSNMGWSEERLQIRXRGMHTVKESELLAAKLDLLMKRLDDHEKRPQGTIKALDSHVTCEVCXHSGNDCPXTREEAMYMGNNNNGYRPQGDGTMLHGQNKVRAEPTEYSSGRXEPPKTDSLVKFMQNFLEKKTTMPRNRYRKTPVKASTPAKKLEQLAQRKPPSAPKPRKGSGSSSSHHDESSTRSSAIVSMEDAEAPRRLLNDTDLDLVGDRERQAYYMLSDREYANTREYSPELLKKIGMDVEFCAIWKAVGWQKFVVVDEPSSRLLTLQFLCTLKEIEDGISFRFFHKEYTLTWKGLSTLLGFHVSCKIDLXKGISGFEKNRSWEDISSAPICKKPRTNDIHNPTLRLIHKWIAMTWFPRGDLRPIREDELIIMFAMVRKIKIVPMKYMIRQCCHELTIPLQTIEESRAGGAYRETRNMTRNERESSSSXTPVQMYEAGWESTRDAPGWIQAPRHSIGVSS

SEQ ID NO: 186874 - protein, 456 aa, Oryza sativa
  unsure (1)..(456): unsure at all Xaa locations
  Clone ID: PAT_MRT4530_83632C.1.pep
TFLGRLGRGPRERAAWPSLTGRPAQEGGPRRPKTSARGGRRESPVDRAHHARSRVGPACQRLGSPCGEDGRXCTHAVRDGRRYGGPTLSLTARGGTRARGGTDRGRLDPVXAELAPTWHLRGCHAGRREVDDDAGRNGRRSTAASDGANHGDTGKSEHTGRLHVTRGDEPTGRICRGLLDGGGLRRRQPAAGEGGNGDEITRGXFPAARASTRLRESDASVGLGGTTPSEAGDERCFRARAATAASTRRATATVGAGGVGRWSEEEERREALPCGTGAVTRGRRRGSDLSGLGPRKRKKRARPESPSASTNAPALPALGDGRRRRDRARERQQWHGGEWKRREKGGGERGRRGRGRRDAASVPWRLARGVAGPGDDDGDDGGAVWSGAATLAXRRVQRLTAAATGRSATPARARGSQREARRMEWRGSGTRAGSRGQAAARAAHAHXARAERRGAG

SEQ ID NO: 186875 - protein, 71 aa, Oryza sativa
  Clone ID: PAT_MRT4530_83633C.1.pep
MAEGESEGDGFGGGDRVYRAAMSVQKPTLGGRGYRAADAGSGAEGADNGGGDLPVGHLGARAREAMGGAAI

SEQ ID NO: 186876 - protein, 269 aa, Oryza sativa
  unsure (1)..(269): unsure at all Xaa locations
  Clone ID: PAT_MRT4530_83634C.1.pep
QGDRISQQQRSLYYRVEVQSCWAADRSRAHNCITEGKRKPGLGPNNTGATWELGRNPKTHHSRLAPGRTPHQQDPLHLLQQLGGXGYLYRARFYPSCYSDFKFEGDRRYSHRVHDSRGATGWLQGNMAELAPTWRLRGGHVGWRELDDNPAANGRRAAAASGGANHGDTGKSEHTGRLFVMRGDEPTARIRRRELDGGESRRRQPAGREEGNGDEATRGRFPAVRASTRLRELDASVGLDGATPSEAGDVRVLRSSSGDGSEHTASDGN

SEQ ID NO: 186877 - protein, 98 aa, Oryza sativa
  unsure (1)..(98): unsure at all Xaa locations
  Clone ID: PAT_MRT4530_83635C.1.pep
MAEPDLLAPLVDLFFHLGDDFRDYPTLWDDAFALEDFDLDDLDFDLDVDLFPADAPPAVTTSATTSAAGSAEEGTXEAGDGGSKNEENKDSSSPSRSG

SEQ ID NO: 186878 - protein, 375 aa, Oryza sativa
  unsure (1)..(375): unsure at all Xaa locations
  Clone ID: PAT_MRT4530_83636C.1.pep
APRLRRPVPLPCRLQPRSRSAPQPARVPEPRRSIRRASRCKPRARAVVADRLVAAVVSACPRLSPVSPFRSTPPRIGFQTDIAALXSPGALPLFSXPIASTPLLSPPSELXLPPPFIAKRRENRSLCSLPVASRRRPNRCRRSPCARXPSPPVLRSTRSSPASLDVAPPNPTLATDSRSRVDALTAGNWPLVTSSPFLPFLSAGCRRRNPPPTDTLRRIQDVRSLPLILPRHPGVRPVAPHRRKASRRNRRRPPSIRGRRLRLPPASPRRRHVGATSAPARPRSGRADPGQPLPCVSIFVHPVRVSTDAFKLKIXKTSWVKLGFYKRLGKPDTWVGACELNEFXKTADRGTYRVYGFPLSHLRTVSLEFHSNIRQ

SEQ ID NO: 186879 - protein, 567 aa, Oryza sativa
  Clone ID: PAT_MRT4530_83637C.1.pep
MHTVKEMELLAAKLDLLMKRLDDHEKWPQGTVKALDSHVTCEVCGNIGHSGNDSPETREEAMYMGNNNGYRPHGARTTDALSKRLAANDKDVENINVKLEGFASAFQNQLSFNKMIEIQLAQLASLVPATETGRIPGQPDSYIENVKAITTRGDEQFARFVEVIQKIHINVPLLDAMQVLTYACYLKDILNNKRPLPTTEVVKLTEQCSNLILHNLLEKMKDPGCPTITCSIVAQQFDQALCDLGASVSVMPKDVFDKLNFTVLAPTPMRLQLADSLVRYPAGVAEIVPVKIRDFFIPVDFVVLDMDTGKETPLILGRPFLSTAGANIDVGTENSLEPLLEDAGKITYTGQEVRAAGSKEAVFRTKTKEGVEGKAKDVRSITSGDGWKIRALNRKETIEESRAGGTYRETRSMTRNERESSSSSTPVQMYEAGWAPTGDAPGWTQAPRHSIGVSTWATASEDLWHAPHDIQWGDNQPPRSSGAPPSPSECRSSSSRWDLGEITRRMDTLDMQTGEIQYNLTEHIAQTQEWQQSADAQFANINNMMQQQHDDLQAYFRFQGFNPYQVP

SEQ ID NO: 186880 - protein, 117 aa, Oryza sativa
  unsure (1)..(117): unsure at all Xaa locations
  Clone ID: PAT_MRT4530_83638C.1.pep
SHRPRPTPELIAGGHILHRPRHVEARRRRPRPPSSTPHAGARRRRPHPPPSTPRSSXTVAAVALTEPARTSAAAWLPPNNAGAXFLLARRVPPPPVRASASPVVAAVFFLRAGRRAR

SEQ ID NO: 186881 - protein, 64 aa, Oryza sativa
  Clone ID: PAT_MRT4530_83639C.1.pep
MKMLFSQEAGAAAVRFSGSLATSKPATAATVTGWADGSSKRLCLAAWMTATTAVWAAMAAALTG

SEQ ID NO: 186882 - protein, 59 aa, Oryza sativa
  Clone ID: PAT_MRT4530_8363C.1.pep
LQTGRSELKIHSDLTLSLTPLQNGGSSIHKPRSGSTCLQRCVHYIHRSTESQDHKAKIG

SEQ ID NO: 186883 - protein, 477 aa, Oryza sativa
  unsure (1)..(477): unsure at all Xaa locations
  Clone ID: PAT_MRT4530_83640C.1.pep
KKVAQGGPRRARAEEGERVRWTGLTTRGPGWDPLVSGSAHRAEGARGAALGCGGPTRSLTARGGTRARGGTDRGRPVPTSAELAPTWRLHGCHVGWREVDDDPAANGRRAAAASGGANHGDTGKSEHTGRLFVMRGDEPTARIRRRELDGGESRRRQPAGMEEGNGDEATRGRFPAVRASTRFRELDASVGLDGATPSEAGDVRVLRSSSGDGGEHTASDGNGRELALGGRGQSGDREDDAGEEEKGEKEGEKGGLPLCRFGKKEEVSGGDAAEGGGMLPLSLGGLRAEWRGRAMTTAMTAGRFGAERRHWRQARAEADGGGDRAVGHHGTRARLATGGAADGVARLGHARWLAGPSGCTAAGGRAAGPGGADATRHGWQPRGRARERARGAAARERRGKTRLGAGXRRGAGRGSRACARRAREGHSARRRALARAARGGAEGERERGKGRGRGEDGPRENRPIDPGGGKMDFCGGI

SEQ ID NO: 186884 - protein, 143 aa, Oryza sativa
  Clone ID: PAT_MRT4530_83641C.1.pep
PAPPRPLLSLAVCSPPSPPELRSTRSSPASLGVALPNPTLATDSRSRVDALTAGNWPLVTSSPFPPFLSAGYRRRNPPPMGSLRRIQAVGSLPLILPRHPGVRPVAPHRRKASRRNRRRPPSIRGRRLRLPPASPRGSHVGAT

SEQ ID NO: 186885 - protein, 175 aa, Oryza sativa
  unsure (1)..(175): unsure at all Xaa locations
  Clone ID: PAT_MRT4530_83642C.1.pep
NLCRGGTLYPHGITNPDHPARISKADTGLPYADERGPRPTTGXVPDHTVPGRPGVLPDTTPANPLVSRHQGSPDXLITQPGVSHSTHVVVLXICSDVIPXRNRPLNATAQASRPDFKFEGDRRYSHRVHEYRGATRWLQGNMVACLAQGLDLHESSRNPLDENLVTATIRKQSKT

SEQ ID NO: 186886 - protein, 178 aa, Oryza sativa
  Clone ID: PAT_MRT4530_83643C.1.pep
MAPSSPRRDLDGEGTGGGSSAAREKERPRSFDEKTRSACWRKAAVVMGRHPERWRQDAAGNVVCRRFWSCHGCLCYEYDHIVPFSKGGESTVDNCQILQTRVNRSKSDKAWIEQAEMQGFSCDIKFTDKELDVIEMAVYGDVIRPGKQCRCRTVAEMLGKVKSKNQMAACELPHNDAS

SEQ ID NO: 186887 - protein, 413 aa, Oryza sativa
  Clone ID: PAT_MRT4530_83644C.1.pep
MEEQQQVEVEVEVPSYFVCPISLQIMRDPVTLPTGITYDRDGIERWLLTAGTCPLTKQPVPPDCDPTPNHTLRRLIQSWCALHADHGVDLVPTPKPPADRARVADLVSRLRAATSSAALLDALRELRDVAAESERNRKLLAAVPGAVDVLAAVVVASCRDAKAACDEALEIVCSLELSERCLARLVERNEELVDALVATLQRTNTTSRAHAALLLEAVTAVMPSNRLVSLPEEVFGEAVQLLRDRVSSPATRAALHVLVGTTSWGRNRVKAVDAGAVAVLVDMLLDGPVERRGCELALAALDRMCGCAEGRAALVSHGAGVAVVGRKVLRVSEVASEKAVRVLRSVARHAATAAVVQEMAQTGAVEKLCVVAQSEQCGERTRERARETLRLHARAWRNSPCLQPHLQALYPSC

SEQ ID NO: 186888 - protein, 60 aa, Oryza sativa
  Clone ID: PAT_MRT4530_83645C.1.pep
MEKLGEDMERAKSDNAHQRLLVQDNEVIHKKSEAALSFPLLFSIRIKALVGSTARSVARG

SEQ ID NO: 186889 - protein, 70 aa, Oryza sativa
  Clone ID: PAT_MRT4530_83646C.1.pep
MPSADHQHGSRGGPSAACGAGAAAQLVGRQAAAGCRLGAPDLTGAGRQAPRAGPPSAARRGSGHCRRAGP

SEQ ID NO: 186890 - protein, 59 aa, Oryza sativa
  Clone ID: PAT_MRT4530_83647C.1.pep
RAHQREGKLNYIELGILGVSYSVHFVSRTLKRSMHGSDRVCFGIREDAMMVTKKKNAWG

SEQ ID NO: 186891 - protein, 53 aa, Oryza sativa
  Clone ID: PAT_MRT4530_83648C.1.pep
ELSFLFFFGDRVWGSWNREEAGHGGRLGLSQTQGLLINANRLERTLYSRDLIK

SEQ ID NO: 186892 - protein, 334 aa, Oryza sativa
  Clone ID: PAT_MRT4530_83649C.1.pep
MGLLVVMAAAKDLAYPSDTGKSGNAGYPIIVASHAVDLEELVSEKLVGAGDPAGDELRMSIQSLRREYSNKCSKLFFFRLEEPKGLSAEDEAEMARHAAAEVGAADGAGTTGAGVTAVAAAAPTTNVEDINGASIPVHDEVPGEMVMAYDPNNPCMKVGTMYPNMKEFSLAMRQCAIIKEFELKLVKTDPENIGGCKFDGYPWHMVEGLGTENFTRECDRDRYRGESFNNWIKDYKALLICDHAEIYRALVMVLWNKRRRIVEKVELPRVLGAPLPKKTNGRYGKLRTKTCLEGGRKSKSKTASIDNDSGKRVLEEEAKEEHCQLLQIFLVPKD

SEQ ID NO: 186893 - protein, 222 aa, Oryza sativa
  Clone ID: PAT_MRT4530_8364C.1.pep
MSLLMVTCRCIGLELPLCRLPRAATSPLSLFSSPFVHRHPRHLHLSSSTVKVFFVYFEHHHHISKLSLLLPQASGPADPAWVTDVIVPGRWSRCLVFVYLRLLFDAIFSNDCHDCVTIFVFSYSPPLLFNRDESGGRLREQLSRWSWPGQWKLPDPLNLNGVAIRQGLRRSALAPVVRDASVSDPLATPTGSCSKGSSASGSFVLVASAMDVLVGFFSGVSL

SEQ ID NO: 186894 - protein, 394 aa, Oryza sativa
  Clone ID: PAT_MRT4530_83650C.1.pep
MTIVVTTAVVLLSGPQLAAGARVLINHAELRRRDIATAGGGGGGGDGACATAVAPFGYPCEEHEVTTQDGYILGLQRIPRGRIGGVTGGGAAAARQPVLLQHGVLVDGMTWLLGSPEESLPYILADQGFDVWIANNRGTRWSSRHVSLDPKSRSYWNWSWDDIVVNDMPAIVDYVCSHTGQKPHYVGHSMGTLVALAAFSEGRMVDKLKSAALLSPVAYLSHITTPIGVVLAKAFAGELISDLLGIAEFNPASYGRHSRAFQTNKNHFYSLESSPASSVQLAVRDGVLTKYDYVMPDANVARYGGSQGGRPAGVRHGGDPGVVPHLPQLRRPGLAVRPRRRRPPPRRPPPRRPRRRPAHRAVPSPARPRRLRHRRLRQGPCLQRRHLLLPSISL

SEQ ID NO: 186895 - protein, 144 aa, Oryza sativa
  unsure (1)..(144): unsure at all Xaa locations
  Clone ID: PAT_MRT4530_83651C.1.pep
CQWLDHARLGTGRELGGNRCGRCSRGXLGRTLRRLPRSRLGCAGRLXFGDELELDSGVVMTMTGSAVVVGGCTRERRKREGCWLALYPRRGGRLLSWFFLPSRRRLAAQERRGRRRSAVSSAHAFDVDEQGRRLEREGAGWPGW

SEQ ID NO: 186896 - protein, 28 aa, Oryza sativa
  Clone ID: PAT_MRT4530_83652C.1.pep
VTIHFTRNAMTDTIITPIGIAGRPLSTY

SEQ ID NO: 186897 - protein, 130 aa, Oryza sativa
  Clone ID: PAT_MRT4530_83653C.1.pep
PTRPPDSSCPLSSSCLLATFLSVSNRQSTHLPTVNIGRRRGHKRGEAAERDKPLWNPKKGKKKKNKMGQENSTLPPKTLSDRSLKAVSDYILSGDAKKIVVMIGAGVFTAAGIPHFRSPRLFSTPSATVQ

SEQ ID NO: 186898 - protein, 120 aa, Oryza sativa
  unsure (1)..(120): unsure at all Xaa locations
  Clone ID: PAT_MRT4530_83654C.1.pep
KTWTSRLLLPWVFLNPRLSSPTQEPHNPETPSPLPPTAAPPIPXRPPHHHHPSSAPAAAEHGRLRDPRTAPRGLHPPPPPPPATKRRAARGKGGDGGWGRGGNGDKIGGFGGAARVSLPS

SEQ ID NO: 186899 - protein, 35 aa, Oryza sativa
  unsure (1)..(35): unsure at all Xaa locations
  Clone ID: PAT_MRT4530_83655C.1.pep
VSGSAFRGLLVTNTFLSQXFDTVMTEDDNCECFHV

SEQ ID NO: 186900 - protein, 39 aa, Oryza sativa
  Clone ID: PAT_MRT4530_83656C.1.pep
PATRNISIPISISSELQGHKRRPVAFYNRLPRKQKWDPG

SEQ ID NO: 186901 - protein, 55 aa, Oryza sativa
  Clone ID: PAT_MRT4530_83657C.1.pep
KKGLRKKRGQTHPRGVRTFKIVSRVQATPQVVKNLGGGKNFHPFLGLGKKSPQDP

SEQ ID NO: 186902 - protein, 190 aa, Oryza sativa
  unsure (1)..(190): unsure at all Xaa locations
  Clone ID: PAT_MRT4530_83658C.1.pep
NLCRGGTLYPHDITNPDHPARILKADTGSPYANERGPRPTPGXVPHHTVPGNPGVLPGTTPLNPHVFWHHGSPDXLITQPGVSHYTHVVALVLCSDEIPRKRSLSARVGNRTPGTFPGPRFWKXHLVRKHRPRCRVFQGSKVTCLAXDLELDPRNPRTAGLRAPKLHTKRDNSTNGENKALLLTSMRAIG

SEQ ID NO: 186903 - protein, 160 aa, Oryza sativa
  unsure (1)..(160): unsure at all Xaa locations
  Clone ID: PAT_MRT4530_83659C.1.pep
MAEKKRERKEHEQLGREREGGXHVKGGEKSERRTGGDGPNVAKKAGEYCRAAEAWSVCHVIQGTRRFAEVDGLTTTVGRHCHLKELMVEAAIVLGKSATAPHHGMHEFANEVPCEAHRLCTAAACRWTWLEDMNSLPQAVFTTSRMKRSVRTFPEHGPGH

SEQ ID NO: 186904 - protein, 40 aa, Oryza sativa
  Clone ID: PAT_MRT4530_8365C.1.pep
HYLCFISTLLLHSSWLLYPLNLTRVKTTPFTFTSLAHMTD

SEQ ID NO: 186905 - protein, 371 aa, Oryza sativa
  unsure (1)..(371): unsure at all Xaa locations
  Clone ID: PAT_MRT4530_83660C.1.pep
RACSRSAPQPARVPEPRHSICRASRCKPRARAXVADRLVAAVVSACPRLSPVSPLRSTPPRLGFQTDIAALKXPSLPLSLPLPFASTPSLPLLSELCLAXPPFIAKRRESRSTSSLPVASRRRPDRCRRSPCARXPSPPELRSTRSSPASLGVAPPNPTLATDSRSRVDALAAGNRSLVTSSPFPPFLSAGCCRRNPPPTDTLRRIQAVGSLPLILPRHPGVRPVAPHRRKAPRRSRRRPPSIRGRRLRLPPASPRGSHVGATSAPARPRSGRADPGQPLPCARSIVHPVRVSTDAFKLKIXKTSWVKLGFYERLGKPDTWVGACELNEFXKTADRGTYRVYGFPLLHLRTVSLEFHPNIRQEIKNKIYSE

SEQ ID NO: 186906 - protein, 102 aa, Oryza sativa
  Clone ID: PAT_MRT4530_83661C.1.pep
VSVIIQISDRFHSYHGGVFDGPCGTETKDNHVVLVVGYGVTTDNIKYWIVKNSWGEGWGESGYIRMKRDITDKNGICGITTWAMYPVKKYIVAHDDADVAAY

SEQ ID NO: 186907 - protein, 453 aa, Oryza sativa
  unsure (1)..(453): unsure at all Xaa locations
  Clone ID: PAT_MRT4530_83662C.1.pep
ARGPKGAPNRTGLVKEKNPLSPPHPPGPGGDPIYKELAPRAXIARGSRARGGGPTRSFLAWGVTRARXGPDWGRPVPSSVELAPTWAPTXGCHVGXREVDDDAGRNGRRTTAANGGANHGDTGESEHTGWLHRTRGDEPTARIRRRELDGGESRRQQPAGREEGNGDEATRGRFPAVRASMRLRELDASVGLDGATPSEAGDVRVLRSSSGDGGEHTASDGNGRELALGGRGQSGDREDDAGEEEKGEKEGEKGGLXPLCRFGKKEEVSGGARLREEGXLPPSLGGXAREWRGRXAMTTAMTAGRFGAERRHWRQARAEADGGGDRAVGHHGTRARLATGGAVDGVARLGHARWLAGPSGCAAAGGRAAGSGGADATRHGRQPRGRARERARGAAARERRGKTRLGAGGSRARARGGEGHSARRRALARAARGGAEGERERGSGSAPGERARE

SEQ ID NO: 186908 - protein, 65 aa, Oryza sativa
  Clone ID: PAT_MRT4530_83663C.1.pep
GPKKLVITCLLVQSLGANLQEKSPSLRDRLHLKNRTKFLPPPDPVNLRGEVSQARTKEGFPSWRD

SEQ ID NO: 186909 - protein, 469 aa, Oryza sativa
  Clone ID: PAT_MRT4530_83664C.1.pep
MVEKTKLQLPLVHNERLWARPWRWAKTVFFLVSMLASLLLVCAPPLLIVVLDLLLPPALLSNFHRAANHPTSLIDQARGFHFRSSLVDLPAVSAARSLLILCAYTACGGGAAYLWVAVACSVGSVCYVVAKAAVVFGAAPDRAVLGLQGKGQLVAVEAMFLMSLALAAAHIAMAYRASCRERRRLLVYRIDVEAVRLKGGQTPKSLKQQFAEDGCMHGQRVCIVHKMKRLKKWSKEMAELAPTWRLRGCHAGRRKVDDDPATNGRRAAAASGGANHGDTGKSEHTGRLFATGGGEPTARIRRRLLDGGGLRRRQPAAGEEGNGDEATRGRFPSVRASTRLRELDASVGLGGTTPSEAGDERVLRSSGGDGGEHTASEGDERDITGKRRGAVTRGRRRGSNLSGLGPGKGKERARPKSPSASSNAPALPALGGGRRRRDRARGGGNGAETNGRGGVRGGRGGLKGTAMSV

SEQ ID NO: 186910 - protein, 190 aa, Oryza sativa
  unsure (1)..(190): unsure at all Xaa locations
  Clone ID: PAT_MRT4530_83665C.1.pep
NLCRGGILYPHDITNPDHPARISKADTGSPYANERGPKPTPGXVPDHTMPGNPGVLPGTTPLNPHVSWHHGSLDXLITQPGASHSTHVVALALCSDEIPRKRSLSARAGNRTPDFKFEERCSDARARRPVHRSTTVDKGGLVTCLARDLELDPRNPRTAGLRAPKLHAKRDNSTNGENKALLLTSKRAIR

SEQ ID NO: 186911 - protein, 189 aa, Oryza sativa
  Clone ID: PAT_MRT4530_83666C.1.pep
LERWTTRTPHSEPAVVAPRLGSPCGGSTRRTRSGGGGTRCTRALAPTWRLRGCHAGRREVDDDAGRNGRRSTAASDGANHGDTGKSEHTGRLHVTRGDEPTARICRGLLDGGGLRRRQPAAGEGGNGDEVTRGRFPAVRASTRPRESDASVGLGGATPSEAGDERVLRSSSGDSGEHTASDGNGRGGAG

SEQ ID NO: 186912 - protein, 78 aa, Oryza sativa
  Clone ID: PAT_MRT4530_83667C.1.pep
SAWLVLARSVRHWHGSDGQSFLIPSICESCQRGTWSRRTCLTNHNQLVEMSLHQNPYCPKKKKRAPKIEDTELAYARM

SEQ ID NO: 186913 - protein, 113 aa, Oryza sativa
  Clone ID: PAT_MRT4530_83668C.1.pep
MRDSASGVVVNMFNAFEASELGKIEAKLSKSTFAVGPLHKLTTVRTAAEQYRHFVCLYGPDRAWLDAHPPRSMLYVSELERRGEVPGAILPAPARSDGMGLKVASTSSIVAWI

SEQ ID NO: 186914 - protein, 1862 aa, Oryza sativa
  Clone ID: PAT_MRT4530_83669C.1.pep
MAEQAKAHNLSPSVSGDDGEPNPRRRARTPPPPPRQSPRREEALERVEGSATSTSTGDGEGRRDGERRLLVYGDGSTPQGALQAAGALLRHPPVVPDPESPAQRWLDDVANLVMTARQRLGAGGRSSATKTSGAATTGSVSSRRRARRAAAVARHSAATPSSAPPTQEDLRGGPDARIDIERRRNSRRAAHATEGASSSGVSHQHGRGDQPSVPPVGGVGCRAFVASLRNVRWPPRFRPTIAEKYDGSVNPAEFLQVYTTGIEAAGGDDRIMANFFPMALKGQARGWLMNLPPASVHSWEDLCQQFTMNFQGTYPRPGEEADLHAVQRRDDESLRSYIQRFCQVRNTISCIPAHAVIYAFRGGVRHNRMLEKIASKEPQTTAELFQLADRVARKEEAWTWNPSGSGVAASAAPGSAAQTGRRDRRRKKRSAHTDDEGHVLAVEGASWATRKGRPAGDKKKEAGAPSRERPTGKWCIVHNTSLHDLADCRAVKSLAERTRKWEEERRQERREGKSPAVPSCNRRSEAKQKAPAEDIDDGDDDLGFQEPGATIATVDGGACAHVSRRSLKAMKRELLAAAPTHEATRRARWSEVALTFDQTDHPPCVARGGQIAMVVSPTVCNVKLGRVLIDGGAALNILSPAAFDAIKAPGMVLRPSQPIIGVTPGHTWPLGHIDLPVTFGGSANFRTERVNFDVADLSLPYNAVLGRPALVKFMAAVHYAYLQMKMPGPGGPISVHGDLKVALACMEQRADHLAAASKPEGGDERLGTSVPAAPRQRMITCGEVPEDALVSFLRANADVFAWRPADMPGVPREVIEHRLAVRPGARPVRQKVRRQAPERQAFIREEVARLLEAGFIREVIHPEWLANPVVVPKANGKLRMCIDYTDLNKACPKDPYPLPRIDQIVDSTAGCDLLCFLDAYSGYHQIHMAREDEEKTAFITPIGTYCYTTMPFGLKNAGPTFQRTTRISLGSQIGRNVEAYVDDLVVKTRNQETLLSDLAKTFESLRSARIKLNPNNKLRDVQCVTGCMAALSRFISRLGEKALPLFKLLKRSGPFTWTEEAERALTQLKAYLSSPPVLVAPEPNEPLLLYLAATPQVDGPRATAGRPHLSPSDPEANPVPTRPGREQGEEAPEPNGGLRPLTTGVGPLPACPTTPGAPDPQDGPEATVGRPPLSSSDPEVVGTEDKCAPRGRLDEESPRDVAPSEEDRPHRKVQRPVYFVSEALRDAKTRYPQAQKMLYAILMASRKLRHYFQAHRVTVVTSYPLGQILHNREGTGWVVKWAIELSEFDLHFEPRHAIKSQALADFVAEWTPAPEPVSVPEASSGPSQLPHIAHWVMQFDGSLSLQGAGAGVTLTSPSGDVLRYLVRLDFRATNNMAEYEGLLAGLRVAAGLGIRRLLVLGDSQLVVNQVCKEYRCSDPQMDAYVRQAPEARGVQASGPEGSAPSSLRLIAWIAEIQAYLTDKTLPEDREGSERVQRISKHYVLVEGTLYRRAANGILLKCIPREQGVELLADIHEGECGAHSASRTLVGKAFRQGFYWPTALNDAVDLVRRCRACQFHAKQIHQPAQALQIIPLSWPFALWGLDILGPFRRAPGGFEYLYVAIDKFTKWPEAYPVVKIDKHSALKFIKGITARFGVPNRIITDNGTQFTSELFGDYCEDMGIKLCFASPAHPRSNGQVERANAEILRGLKTKTFNILKKHGDSWIEELPAVLWANRTTPSRATGETPFFLVYGAEAVLPSELTLRSPRATMYCEADQDQLHRDDLDYLEERRRRAALRAARYQQSLRRYHQRHVRARSLCVDDLVLRRVQTRAGLSKLSPMWEGPYRVIGVPRPGSVRLATGDGTELPNLWNIEHLRRFYP

SEQ ID NO: 186915 - protein, 41 aa, Oryza sativa
  Clone ID: PAT_MRT4530_8366C.1.pep
GLLVATYKYLVLYHPRSESSPCGSGSRSRWPPRRLLRPSRR

SEQ ID NO: 186916 - protein, 199 aa, Oryza sativa
  Clone ID: PAT_MRT4530_83670C.1.pep
MRRGARVRCGARCTRAVRGGRGCGGPTCSLTACGGPRARGRADRGRPDPISAELAPTWRLRGCHAGRREVDDDPAANGRRVAAASGRANHGDTDKSEHTGRLLVMRGDEPTARIRRRMLDGGGLRWRQPVGREEGNSGEVTRGRFLAVRASTRLRELDASVGLGGTTPSEAGDERVLRSSGGDGGEHTASDGNGRGGAG

SEQ ID NO: 186917 - protein, 2033 aa, Oryza sativa
  unsure (1)..(2033): unsure at all Xaa locations
  Clone ID: PAT_MRT4530_83671C.1.pep
MAEQAKAHNLSPSISGDDGEPNPRRRARTPPPPPRQSPRREEALERVEGSATSTSTGDGEGRRDGERRLLVYGDGSTPQGALQAAGALLRHPPIVPDAESPAQRWLDDVANLVMMARQRLGAGGRSSTTKTSGAATTGSVSSRRRARRAAAVARHSAATPSSAPPTQEDQRGGPDARIDIERRRNGRRAPHATEGASSSGVSPQHGRRDQPSMPPVGGVGCRAFVASLRNVRWPPRFRPTIAEKYDGSVNPAEFLQVYTTGIEAAGGDDRVMANFFPMALKGQARGWLMNLPPASVHSWEDLCQQFTMNFQGTYPRPGEEADLHAVQRRDDESLRSYIQRFCQVRNTIPCIPAHAVIYAFRGGVRHNRMLEKIASKEPQTTAELFQLADRVARKEEAWTWNLFGSGVAASTAPGSAAQTGRRDRRRKKRSAHTDDEGHVLAVEGASRATRKGRPAGDKKNEAGAPSRERPTGKWCTVHNTSLHDLADCRAVKSLAERTRKWEEERRQERREGKSPAVPSGNRRSEAKQKAPAEDIDDGDDDLGFQEPGATIATVDGGACAHVSRRSLKAMKRELLAAAPTLEATRRARWSEVALTFDQTDHPPCVARGGQIAMVVSPTVCNVKLGRVLIDGGAALNILSPAAFDAIKAPGMVLRPSQPIIGVTPGHTWPLGHIDLPVTFGGSANFRTERVNFYVADLSLPYNAVLGRPALVKFMAAVHYAYLQMKMPGPGGPISVHGDLKVALACMEQRADHLAAASKPEGGDERLGTSAPAAPRQRIVTCDEVPVKEVALGDGPVSFLRANADVFAWRPADMPGVPREVIEHRLAVRPGARPVRQKVRRQAPERQAFIREEVARLLEAGFIREVIHPEWLANPVVIPKANGKLRMCIDYTDLNKACPKDPYPLPRIDQIVDSTAGCDLLCFLDAYSGYHQIRMAREDEEKTAFITPIGTYCYTTMPFGLKNAGPTFQHTTRISLGSQIGRNVEAYVDDLVVKTRNQETLLSDLAETFENLRSARIKLNPDKCVFGVPASKLLGFLVSARGIEANPEKIRAIERMRPPXKLRDVQCVTGCMAALSRFISRLGEKALPLFKLLKRSGPFTWTEEAERALTLLKAYLSSPPVLVAPEPNEPLLLYLAATPQVVSAALVVERDEDNPHSAHPHPVLAWPGREQGGEAPEPNGGPRPPTTGAGPLPACQTVPGAPDPQDGPRATAGRPHLSPSDPEANPVPTRPGREQGEEAPEPNGGLRPLTTGVGPLPACPTTPGAPDPQDGPEATVGRPPLSSFDPEVVGTEDECTPRGRLDKERPRDMAPSEEDRPHRKVQRPVYFVSEALRDAKTRYPQAQKMLYAILMASRKLRHYFQAHRVTVVTSYPLGQILHNREGTGRVVKWAIELSEFDLHFEPRHAIKSQALADFVAEWTPAPEPVSVPEASSGPSQPPHTAHWVMQFDGSLSLQGAGAGVTLTSPSGDVLRYLVRLDFRATNNMAEYEGLLAGLRVAAGLGIRRLLVLGDSQLVVNQVCKEYRCSDPQMDAYVRQVRRMERHFDGIELRHVPRRDNTVADELSRLASSRAQTPPGAFEERLAQPSARPDPLGETDAPDRPPRPVGVQASGPEGSAPSSLRLIAWIAEIQAYLTDKTLPEDREGSERVQRISKRYVLVEGTLYRRAANGILLKCIPREQGVELLADIHEGEYGAHSASRTLVGKAFRQGFYWPTALNDAVDLVRRCRACQFHAKQIHQPAQALQIIPLSWPFAVWGLDILGPFRRAPGGFEYLYVAIDKFTKWPEAYPVVKIDKHSALKFIKGITARFGVPNCIITDNGTQFTSELFGDYCEDMGIKLCFASPAHPRSNGQVERANAEILRGLKTKTFNILKKHGDSWIEELPAVLWANRTTPSRATGETPFFLVYGAEAVLPSELTLRSPRATMYCEADQDQLRRDDLDYLEERRRRAALRAARYQQSLRRYHQRHVRARSLCVDDLVLRRVQTRAGLSKLSPMWEGPYRVIGVPRPGSVRLATSDGTELPNPWNIEHLRRFYP

SEQ ID NO: 186918 - protein, 497 aa, Oryza sativa
  unsure (1)..(497): unsure at all Xaa locations
  Clone ID: PAT_MRT4530_83672C.1.pep
MERSGRAKWAGRPKAAQTRARXEGGEREPVDRAHHARSRGGEGTRCTCAVRGGRGCGGPTRSLTARGGTRARGGTDRGRLDPVXAELAPTWRLRGCHAGRREVDDDPAANGRRAAAASGEANHGDTGNSEHTGRLHVTRGGEPTARIRRRLLDGGGLRRRQPAAGEEGNGDEVTRGRFPAVRASARRQELDASVGLDGTTPSEAGDERXYGARAATAASTRRATATEEEGEGAAGVLFRVLARAGSSXTHATTIGDGETEGGNGAEAKMREFGGGGLGLKWTAMSVWERGTDIGRLRRELALGACSQSGGRRMTPARRKKGKRRGRKGLAPLPIREKEGEGNGSIAAEGGGARLRPLAACARRGGGRAMTTAMTAGRFGARLTAAATGRSATTARARGKQRAASARARTRWLARTSGCAAXRRGRARGKGGGARRGGLRARARGVRXEAERGRRDGRARERERERERERERPGREGAGEEGKMGRARFGPSTSGEAK

SEQ ID NO: 186919 - protein, 131 aa, Oryza sativa
  Clone ID: PAT_MRT4530_83673C.1.pep
MPKSDTSLCLMPHYTSRFYFVASYYAIACGTIYYKMDENSSTRIDDFKALSGLGDMPRHAKPKEYVDLNSYLTCGASRYRTGNGSSNREVVDLDSSVHTKKNIPTMVIWYLPVKDVMKRLFSNPNDDELMR

SEQ ID NO: 186920 - protein, 1968 aa, Oryza sativa
  Clone ID: PAT_MRT4530_83674C.1.pep
MAEPAKAHDLSPSMSGDDGEPNPRRRARTPPPPPRQSPMREKALERAEGSATSTPTGGGEGRRDGERRLLVYGDGSTPQGALQAAGALLRHPPVAHDPESPAQRWLDDVAKLIMTARQRLDAGGRSSATKASGAATTGSASSRRRARRAAAAVRHSAATPSSTPPTRKDLRGEPDARISIERRRNGRRAPHATEGASSSGVSPHHGRGDQPSVPPVVGVGCRAFVASLRNVRWPPRFRPTIAEKYDGSVNPAEFLQVYTTGIEAAGGDDTVMANFFPMALKGQARGWLMNLPPASVHSWEDLCQQFTMNFQGTYPRPGEEADLHAVQRRDDESLRSYIQRFCQVRNTIPCIPAHAVIYAFRGGVRHNRMLEKIASKEPQTTAELFQLADRVARKEEAWTWNPSGSGVAASAAPGSAAQIGRRDRRRKKRSAHTDDDGHVLAVEGASRATRKGRPAGGKKNEAGAPNRERPTGKWCTVHNTSLHDLADCRAVKSLAERTRKWEEKRRQERREGKSPAVPSGNRRSEAKQKAPAEDIDDGDDDLGFQEPGATIATVDGGACAHVSRRSFKAMKRELLAAAPTHEATCRARWSEVALTFDQTDHPPCVARGGQIAMVVSPTVCNVKLGRVLIDGGAALNILSPAAFDAIKAPGMVLRPSQPIIGVTPGHTWPLGHIDLPVTFGGSANFRTERVNFDVADLSLPYNAVLGRPALVKFMAAVHYAYLQMKMPGPGGPISVHGDLKVALACLEQRADHLAAASKPEGGDERLGASAPATPRQRMITGDEVPEDALVSFLRANADVFAWRPADMPGVPRGLIEHRLAVRPGARPVRQKVRRQAPERQAFIREEVARLLEAGFIREVIHPEWLANPVVVPKANGKLRMCIDYTDLNKACPKDPYPLPRIDQIVDSTAGCDLLCFLDAYSGYHQIRMAREDEEKTAFITPIGTYCYTTMPFGLKNAGPTFQRTTRISLGSQLGRNVEAYVDDLVVKTRNQEMLLSDLAETFESLRSARIKLNPDNKLRDVQCVTDCMAALSRFISRLGEKALPLFKLLKRSGPFTWTEEAENALTQLKAYLSSPLVLVAPEPDEPLLLYLAATPQVVSAALVVERDEDNSHFTLPHPVPTWPGREQGGEAPEPNGGPRPPTTGVGPLPACQTVLGAPDPQEGPEATVGRPHLSPFDPEANPVPTRPGRKRGEEAPEPNGGLRPLTTGVGPLPACPTTPGASDPQDGPEATVGRPPLSSSDPEVVDTEDERAPRGRLEEERPRDVAPSEGDRPRRKVQRPVYFVSEALRDAKTRYPQAQKMLYAILMASRKLRHYFQAHRVTVVTSYPLGQILHNREGTGRVVKWAIELSEFDLHFEPHHAIKSQALADFVAEWTPAPEPVSVPEASSGPSQLPHTAHWVMQFDGSLSLQGAGAGVTLTSPSGDVLRYLVRLDFRATNNMAEYEGLLAGLRVAAALGIRRLLMDAYVRQVRRMERHFDGIELRHVPRRDNMIASELSRLASSRAQTPPGAFEERLAQPSARPDPLGEMDAPDRPPRPVGVQASGPEGSAPNSLRLIAWIAEIQAYLTDKTLPEDREGSERVHRISKRYVLVEGTLYRRAANGILLKCIPREQGVVLLADIHEGECGAHSASRTLVGKAFRQGFYWPIALNDAVDLVRRCRVCQFHAKQIHQPAQALQTIPLSWPFAVWGLDILGPFRRAPGGFEYLYVAIDRFTKWPEAYPVVKIDKHSALKFIKGITARFGVPNRIITDNGTQFTSELFDDYCEDMGIKLCFASPAHPRSNGQVECANAEILKGLKTKTFNILKKHGDSWIEELPAVLWANRTTPSRATGETPFFLVYGAEAVLPSELTLRSPRATMYCEADQDQLRRDDLDYLEERRRRAALRAARYQQSLRRYHQRHVRARSLCVDDLVLRRVQTRAGLSKLSPMWEGPYRVVGVPRPGSIRLATGDGTELPNPWNIEHLRRFYP

SEQ ID NO: 186921 - protein, 249 aa, Oryza sativa
  Clone ID: PAT_MRT4530_83675C.1.pep
MGRSGRAKWAGRPKTAQGGPGRARAGGRRERAGGPGSPRVVPGGTRLSVTWFTVRSEHAAHARGRGRDTVERMRRAHAQPHGSRWNARTGGADRGRPGPISAELAPTWCLRGCHAGWREVDDDAGRNGRRTTAASGGANHGVTGESEYTEWLLRTRGDEPTARIRRRECVDGGLRRQQPAGREEGKGDEVTRGQSPAVRASTRLRESVPSVGLGGATPSEAGDERVLWSTGGDGGEHMASGGNGRGGAD

SEQ ID NO: 186922 - protein, 619 aa, Oryza sativa
  Clone ID: PAT_MRT4530_83676C.1.pep
MTIFQTTLTWMEAAALVACIFISFRRLLKQDYVDPKDKVKDDHKNIRGSLNVFYGLALAHSMSYYILIVAFQFLVAPLVRLVHSSYKLHDWGMDAVSEYTAKKLWAFIRYNVREALEMNLITFGKELARSDSIDDQLKGVRILDYIIRWEKQHLSRAGVLDIYKIEKYKGRVLTSIRASTETLERVVNMLGLNLKSLEEEETRGHAASIVLELAPYLLFENLPAMPQLIASLLTTGRERINEGPHDINSVELTCYGVKILERLVENPDNRRSVADANVVLSKIVELLNFRDDCKVPVPDETENRSQEEIVEASLNVLHKLVSTTGETGEALRSTISKNSEIMSNIRKILYQHDNKNSSLSVHAVKILSCLAMHETAREVIGSSCQIVRKLVSSVLPRPMDIVQDGNNGSTVADSAAQALVLLSTGSEYNRATILDKINLEELVGMLFDASMEQRIMIAHLLKHLRTYSGPGYGNQLKKVIDGSLPKLLEEIKVAVQKLDNPEFPDGQPSHDLKELKAEEGKLLDSFIGLSSQICHSLQAIDFDKALQSANLTMDTYAQDDYVGVFKRYEMDKALKEVAETATELESFELFCSGSGVGKHDEPISSAVRSTLALLAGDSA

SEQ ID NO: 186923 - protein, 48 aa, Oryza sativa
  Clone ID: PAT_MRT4530_83677C.1.pep
GSWPSVLDESILAVRFHSDVSGESVFAGEEFEVFQGQQGKSHRSQTKT

SEQ ID NO: 186924 - protein, 1990 aa, Oryza sativa
  Clone ID: PAT_MRT4530_83678C.1.pep
MAEQAKAHNLSPSISGDDGEPNPRRRARTPPPPPRQSPRREEALERVEGSATSTSTGDGEGRRDGERRLLVYGDGSTPQGALQAAGALLRHPPIVPDAESPAQRWLDDVANLVMMARQRLGAGGRSSTTKTSGAATTGSVSSRRRARRAAAVARHSAATPSSAPPTQEDQRGGPDARIDIERRRNGRRAPHATEGASSSGVSPQHGRRDQPSMPPVGGVGCRAFVASLRNVRWPPRFRPTIAEKYDGSVNPAEFLQVYTTGIEAAGGDDRVMANFFPMALKGQARGWLMNLPPASVHSWEDLCQQFTMNFQGTYPRPGEEADLHAVQRRDDESLRSYIQRFCQVRNTIPCIPAHAVIYAFRGGVRHNRMLEKIASKEPQTTAELFQLADRVARKEEAWTWNLFGSGVAASTAPGSAAQTGRRDRRRKKRSAHTDDEGHVLAVEGASRATRKGRPAGDKKNEAGAPSRERPTGKWCTVHNTSLHDLADCRAVKSLAERTRKWEEERRQERREGKSPAVPSGNRRSEAKQKAPAEDIDDGDDDLGFQEPGATIATVDGGACAHVSRRSLKAMKRELLAAAPTLEATRRARWSEVALTFDQTDHPPCVARGGQIAMVVSPTVCNVKLGRVLIDGGAALNILSPAAFDAIKAPGMVLRPSQPIIGVTPGHTWPLGHIDLPVTFGGSANFRTERVNFYVADLSLPYNAVLGRPALVKFMAAVHYAYLQMKMPGPGGPISVHGDLKVALACMEQRADHLAAASKPEGGDERLGTSAPAAPRQRIVTCDEVPEDALVSFLRANADVFAWRPADMPGVPREVIEHRLAVRPGARPVRQKVRRQAPERQAFIREEVARLLEAGFIREVIHPEWLANPVVIPKANGKLRMCIDYTDLNKACPKDPYPLPRIDQIVDSTAGCDLLCFLDAYSGYHQIRMAREDEEKTAFITPIGTYCYTTMPFGLKNAGPTFQHTTRISLGSQIGRNVEAYVDDLVVKTRNQETLLSDLAETFENLRSARIKLNPDNKLRDVQCVTGCMAALSRFISRLGEKALPLFKLLKRSGPFTWTEEAERALTLLKAYLSSPPVLVAPEPNEPLLLYLAATPQVVSAALVVERDEDNPHSAHPHPVLAWPGREQGGEAPEPNGGPRPPTTGAGPLPACQTVPGAPDPQDGPRATAGRPHLSPSDPEANPVPTRPGREQGEEAPEPNGGLRPLTTGVGPLPACPTTPGAPDPQDGPEATVGRPPLSSFDPEVVGTEDECTPRGRLDKERPRDMAPSEEDRPHRKVQRPVYFVSEALRDAKTRYPQAQKMLYAILMASRKLRHYFQAHRVTVVTSYPLGQILHNREGTGRVVKWAIELSEFDLHFEPRHAIKSQALADFVAEWTPAPEPVSVPEASSGPSQPPHTAHWVMQFDGSLSLQGAGAGVTLTSPSGDVLRYLVRLDFRATNNMAEYEGLLAGLRVAAGLGIRRLLVLGDSQLVVNQVCKEYRCSDPQMDAYVRQVRRMERHFDGIELRHVPRRDNTVADELSRLASSRAQTPPGAFEERLAQPSARPDPLGETDAPDRPPRPVGVQASGPEGSAPSSLRLIAWIAEIQAYLTDKTLPEDREGSERVQRISKRYVLVEGTLYRRAANGILLKCIPREQGVELLADIHEGEYGAHSASRTLVGKAFRQGFYWPTALNDAVDLVRRCRACQFHAKQIHQPAQALQIIPLSWPFAVWGLDILGPFRRAPGGFEYLYVAIDKFTKWPEAYPVVKIDKHSALKFIKGITARFGVPNCIITDNGTQFTSELFGDYCEDMGIKLCFASPAHPRSNGQVERANAEILRGLKTKTFNILKKHGDSWIEELPAVLWANRTTPSRATGETPFFLVYGAEAVLPSELTLRSPRATMYCEADQDQLRRDDLDYLEERRRRAALRAARYQQSLRRYHQRHVRARSLCVDDLVLRRVQTRAGLSKLSPMWEGPYRVIGVPRPGSVRLATSDGTELPNPWNIEHLRRFYP

SEQ ID NO: 186925 - protein, 201 aa, Oryza sativa
  unsure (1)..(201): unsure at all Xaa locations
  Clone ID: PAT_MRT4530_83679C.1.pep
RRRGRGKGKRGRERGLAXPAALGKRRRGAGASRQREEGLCLRPLAACARSGGAEAMTTAMTVGRFGAERRHGRQAWAGADDGGDQAAAGQRDRVTRTAQTARHGRQPRGRARELRRAGAGFAGGELARDGEKESEEGRRGARRADGPYASNSTMLIEHVLVSKAQTTRGFVNWLFEEDKNPNPNPTRLFRFDVTPVVSRAV

SEQ ID NO: 186926 - protein, 117 aa, Oryza sativa
  Clone ID: PAT_MRT4530_8367C.1.pep
HKGGAQGTLGFWKNYFGSKTGGQKKMGGRGLLGVKKEKKGGARGRLAHFGRGEQDTGTRPQQGKRETGEKKKKEKLKTGPSSGAPGLHHLFLQGPAGGSKNKGPKKNGPPPNQNFFF

SEQ ID NO: 186927 - protein, 90 aa, Oryza sativa
  Clone ID: PAT_MRT4530_83680C.1.pep
DNPEFPDGQPSHDLKELKAEEGKLLDSFIGLSSQICHSLQAIDFDKALQSANLTMDTYAQDGTERVQISYHRFPGDKKSNTQSDEMADKK

SEQ ID NO: 186928 - protein, 50 aa, Oryza sativa
  Clone ID: PAT_MRT4530_83681C.1.pep
VLGQARQIQWRRLVRARRKDGRGSGFVAGVVVAATLPSSPTPASPSPLRH

SEQ ID NO: 186929 - protein, 46 aa, Oryza sativa
  Clone ID: PAT_MRT4530_83682C.1.pep
GWVASDLGRAASSFPHSKGTACTTRCVADNLPMVARCARGPARIPL

SEQ ID NO: 186930 - protein, 97 aa, Oryza sativa
  Clone ID: PAT_MRT4530_83683C.1.pep
MAMVGRARDDLGRKIRGIREGLGKEVDIRTGYGQFISNQYQGRIQFSFTVQGWRLVCPTHQLVDLCRRPRILGGASFSFLHMDDDPVFPMHHPLDLS

SEQ ID NO: 186931 - protein, 92 aa, Oryza sativa
  Clone ID: PAT_MRT4530_83684C.1.pep
QHQLLGYGLEVTEHPKLSAGRRRRRPPPHPPRRPPGRSAAAWKGASWPCCRSSPGPWPPPAPLHPPAGAGRCAHGRVVAMAAQLGPRLTGRL

SEQ ID NO: 186932 - protein, 644 aa, Oryza sativa
  Clone ID: PAT_MRT4530_83685C.1.pep
MTRMRCIPGLLAGRRKKRVVADAKKASGDCPKVKPVEFIDSPAAECGDRKVAPCDVKVVVDDTVVTALAATKGGGGGDDHGGDMALAKRGSMSSDFEFEFHAHEKPDGHGVPAGASPDAVIASGKEVVVADASPKLKRSCSNIETKRPGTHDAAAEAAPARSRSYGDLGNLPGGGGGGISLETTPRGAAPQAEASPASVRTSRTADRVMLKKRSSSQVLPSRSRKLWWRLFLWSHRNLHRPSPAARPAAAACTPAGHHGGGGGYTSDTLEEGPATAAADRKNKKVMVDDSPPIPNQWVAFSADNSLHDRISAWVNSIDNDTFRIAEEDDDDHHHHHHYHGDADDDDGEHAMEHGDCVARAPRALEIGESSGKGHGKSKRSTAADEVAQANTIIQSLNAFSSVAHISGMGLKVVPMIAPFSSLRAINLSGNFIVHISPGSLPKGLHSLDLSRNKIANIEGLRELTKLRVLNLSYNRISRIGHGLSGCTALRELYLAGNKISDVEGLHRLLKLAVLDLGFNKVTTARALGQLVANYHSLRALNLVGNPVQANVGDDALRRAVTGLLPHLAYLNKQPVKPRGAAPADGAVSRAALEAGGAGGGSRSARKRSSAAAASRRLGQRGEGSGSGRSRSKGRQPSSSLPARR

SEQ ID NO: 186933 - protein, 612 aa, Oryza sativa
  Clone ID: PAT_MRT4530_83686C.1.pep
MVGPQYDLVGNPLGAVRSTFERAAAESGGHEPVAAFRGKDWGATEVFRSFLFEQGGLDKVPVLDESNLGLIKPNTLVRFRGMVQDMLGNEFYVGAFKDGSTWRTNKFSDSSPFSMPHPCDSHLWERHLFHCVPVPGQNSWTRESSPGPDLRRIASCFTSEQREKRKRGADNDAMDVSESGSGETSSSSKKTLADWESDLNCLTFPQKDDGVKISNSSVEMSMNEEHHVPEMNGGDHHIPGSSFSCLVKVYDMPESQVKLNDVSEFIGVYTFDPELAAPNDNSDDIMFDLMEDVTAQLPPSKVPRLHCLVWRNLSAHDFLPRPPAVEPSPILLRGIRQSLLSHLTLVLGKDELAAQCLLLHLLSRLRNKVDVVTVGRLSLNFTGFNRESVSIFGNQLNNLFQRLLPYSQVIPLSIEYLNTATLQPRKDNQSGRLVTGVLQLPQGTHLTFDETLLQSGSLTSKGVENTMLLKNLMESQKVEYDFEFYKLEMATDVQLLILSEGKSNILPSDLIVPFRPSSVPAVNASSEELESWRWYLATVRSLPQSTETDTYQMIQDEMVNAMRDDRSLGCSELSRWLTMAQIMAASFGEKSLSMEHWQMVKELERLRKERLQ

SEQ ID NO: 186934 - protein, 517 aa, Oryza sativa
  Clone ID: PAT_MRT4530_83687C.1.pep
MTPTLLDIIMITGLDITSSANLSSLNTQLTHEFKTRSIGGWSGYVAKNMGTGPVTPREHTAFLMMWLEKFLFCGPSCGPTANWQWVAENLVEKKHFPLGKYLLGYLYQTLNTAIDKIASGKTIGTGGPWWLLQIWLNLHTRKVANRPALADVEFPRFEPIIRDDGETSTTCRCMSFEEAASVSAMSKLSAEPFREWFNNFYDGFPKNDRIWFAYEGSASFELPEVFSTAISPFIIHVGIHQGKNIQMTYEFYHPTSASKSGVEIEYALGLLPNGGGLTPPVIGYNAPKTSTLLHGLSRMPIARAAGRKRAKSAAAPSAAKKKSKKQKTAADDLPAIDPDVADFLEDEAMSEEKKKIASKKPQGAAAPVNFPDPINSLFQFSTDANLYSRFQPPRHSTPVFESSESTPSVIGSHHVEEEEEEVAPTPAVPRERRDLEATIQANRTSINEEKAKLDELEAGPSATQTNIDQLNKWKIELIAGLEQCNAQLALEQEKLADLPKAIEDQKIQVESICEASN

SEQ ID NO: 186935 - protein, 45 aa, Oryza sativa
  Clone ID: PAT_MRT4530_83688C.1.pep
LCEDILPFGPLYYNSLAVVLQRRDWENPGVTQLNRLAAHPPFASW

SEQ ID NO: 186936 - protein, 930 aa, Oryza sativa
  Clone ID: PAT_MRT4530_83689C.1.pep
MLMRHPTIAAAAASSFLLLMIAADGQAATPPPPAAIGNYCEPRERDALLAFKEGVTDDPAGLHASWRRGGGQLQEDCCQWRGVRCSNLTGHVVKLRLRNDHAGTALAGEIGQSLISLEHLRYLDLSMNNLAGSTGHVPEFLGSFKSLRYLNLSGIVFSGMVPPQLGNLSNLRYLDLSGIRLSGMVSFLYINDGSWLGHLSNLQYLNLDGVNLSTVVDWSHVLNMIPSLKIVSLSSCSLQSANQSLPELSFKELEKLDLSNNDFNHPAESSWIWNLTSLKYLNLSSTSLYGDIPRALGNMLSLQVLDFSFDDHKDSMRMSVSKNGNMGTMKANLKNLCNLEVLDLDCRLEYGNITDIFQSLPQCSPSKLKEVHLAGNTLTGMLPNWIGRLTSLVTLDLFNNSITGQVPSEIGMQTNLRNLYLHFNNMNGTITEKHFAHLTSLKSIYLCYNHLNIVMDPQWLPPFKLEKSYFASITMGPSFSRWLQSQVDIVALAMNDAGINDTFPDWFSTTFSKAKLLEFPGNQISGGLPTNMENMSLEKLYLKSNQIAGLIPRMPRNLTILDLSNNSLSGPLPLNIGSPKLAELNLLSNRITGNVPQSICELQNLHGLDLSNNLLHGEFPQCSGMSMMSFFRLSNNSFSGNFPSFLQGWTELSFLDLSWNKFSGNLPTWIGNFSKLEILRLKHNMFSGNIPASITKLGNLSHLDLASNSISGPLPQYLANLTGMVPKQYYTNEHEERLSGCDYKSLVTMKGLELEYDEKMDMQSLESLDLSKNMLYGEIPQSLSDLSSLSFLNLSYNNLMGRIPLGTQLGTLYDQNHHLYDGNDGLCGPPLPKSCYKSDASEQGHLMRSKQGFDIGPFSIGVAMGFMAGLWIVFYALLFMKTWRVAYFCLLDKVYDELQYLKKNENRACRAGTEVLRCKLHQLFWAYILP

SEQ ID NO: 186937 - protein, 349 aa, Oryza sativa
  Clone ID: PAT_MRT4530_8368C.1.pep
MGNREVLVVAFFIRSIYGGVQIVTKIAFNRGMSTTVFVFYRHAIAILFLVPVAFVVERKTAPPLSYKILLKLFVHALYGIAGSVNIYGLGLSYSSATSSSAISNLLPVLAFFLAVLMGMESLNLKRIHGIAKVFGVLFSIVGVIILAFYQGPELKSLNLQHLSSRNVVPTGSTAYTTKAWTSGIFLTVLSTTSWALWTVLQIVLPQGLMLEVYPSKLLNTTIQMVFATIQCFFIALAVERDFSRWKLGLDAGLIAVIYSGALVSGLAYYMQVWVIDKSGPVFLAMTMPITLIVTIVLSSFVLGEAVTLGSIISGVVMVGGLYCVLWAKKAEQAIASKEEATLPVQATQV

SEQ ID NO: 186938 - protein, 256 aa, Oryza sativa
  unsure (1)..(256): unsure at all Xaa locations
  Clone ID: PAT_MRT4530_83690C.1.pep
MAGGKLAGKPAGAQAQRKQTSRGRGSRAGTAAAGQNRDNGMTGRNAGLTAPYAGQTVPIMAGQTMPTIAGQTVPYPGQIRPPIAGLTAPLTSGQTGPWAEWKQSPRAVPSHSNSRQDRFPQKNRSGGAKVKKVKKVWVRKEAKASEVVAVKEESQDVHVPTGDVVETMQAKEIEADTVIVKSGGLMEASGQSDRQPVAGLTAFLAGLTAXTTAGASTSTKNIKNHCLAPRKQPQPKWIPSGLSRSQKRRLQRLRAI

SEQ ID NO: 186939 - protein, 211 aa, Oryza sativa
  Clone ID: PAT_MRT4530_83691C.1.pep
MPYYQEWKESPRSVPNHSSNSRQDRFPQKNRSGGSKVKKVKKVWVRKEAKAPEVVAINEESQDVHVPTGDAVETTQAKEIEADAVTANIEGLIETTGRFNRQTTAGLTDPPSRSDRRLVAGLTGPRGRYDRGALEKSGKIKSNIGASTSTKNMKNHCLAPGKQPQLKWIPSGLSRSQKRRLQRLRAIGQKEKEAGDVENKTSNNLEPRIAT

SEQ ID NO: 186940 - protein, 59 aa, Oryza sativa
  Clone ID: PAT_MRT4530_83692C.1.pep
FFFFLNHKCWALVPKLLFICYCHNKRTTRQRNSDEKNEHYSVHINQTVEILPWKNHPLS

SEQ ID NO: 186941 - protein, 199 aa, Oryza sativa
  unsure (1)..(199): unsure at all Xaa locations
  Clone ID: PAT_MRT4530_83693C.1.pep
ITENRFLGKALPKDESXGAQIAMLISGDETPSSSTTTRFVQCGSCCSATSASLRGCMRRRWGMSTTAASXVPVQCPRCRPPXRLALPTACAARGTRRALPKEDRXSSPAVVGTELERGSSSSATAFVASSPLTRSSSSALPSLLQHPPRRCPPPIAPSTRSSAADRTSVPHAPPPPPTASPRTPERERESERESRGEEE

SEQ ID NO: 186942 - protein, 482 aa, Oryza sativa
  Clone ID: PAT_MRT4530_83694C.1.pep
MSSYVVVAAALLVFVVVVVAAIKNLGKGKLPPSPPSLPFVGHLHLVGELPHRSLDALHRRYGSDGGLMFLRLGRAGALVVSTAAAAADLYRGHDLAFASRPPSHSAERLFYGGRNISWPWRTSSPLAAPARAAEAAALVARARRAAEAARAVQLRELLYAYTNGVITRVAAGGSGATAERFRKMMADTSELLAGFQWVDRLPEAAGWAARKLTGLNKKLDDMADESDRFLGEILAAHDDEKAEGEEEDFVDVLLRLRRQGAAAAGGLELAEDNVKAIIKDIMGAATDTSFVTLEWIMTELIRNTQVMSKLQNEIIQVTGSKPTVTEEDLTKLDYLKAVIKEVLRLHPPAPLLIPHHSTMPTTIQGYHIPAKTIAFINVWAIGRDPAAWDTPDEFRPERFMGSAVDFRGNDYKFIPFGAGRRLCPGIILALPGLEMVIASLLYHFDWELPDGMDVQDLDMAEAPGLTTPPMNPVWLIPRCRTI

SEQ ID NO: 186943 - protein, 125 aa, Oryza sativa
  unsure (1)..(125): unsure at all Xaa locations
  Clone ID: PAT_MRT4530_83695C.1.pep
SWPQHKSYSHRLPRLQWRSQDFKVGYSRLSAEPLAAPAPRSRRQPXRPDRLSLAECRAPATARRSNGLPLRGSTVQLLPPVAASPCRYLGFANRKRREGAEPGRDGSRRESERGLSRRVVAKSRY

SEQ ID NO: 186944 - protein, 82 aa, Oryza sativa
  Clone ID: PAT_MRT4530_83696C.1.pep
AVPSRAEPLRAPRRAARSSPSPRAVAQTEGAADPGEGQDPQDLEQGKSSLFLEHVDPNCEIVLFINKIACNYEPPTCDYAMP

SEQ ID NO: 186945 - protein, 115 aa, Oryza sativa
  Clone ID: PAT_MRT4530_83697C.1.pep
MKTETDTMGVRRRQRIRHSECNRQLKWFGRTRTQSMRSRGDPPVVFSVETTLTTHHPVSGCLVSSTRESGQCHAGSCEVSFQIDTVTVGSSKLEATTALREWLDGTMHHGRSCWQ

SEQ ID NO: 186946 - protein, 374 aa, Oryza sativa
  Clone ID: PAT_MRT4530_83698C.1.pep
MLACIACVKQEDGGRRQDTPRAGAGAGDDTPTCRDPVKTLTSQAVAALLKDMVMKLSGTSRHHGQQRRGGSPPPRGRTTSVYRSGYYRPGMVQDDMAVPPATYLGGGGTSMSSASSTPAWDFARPAEGEAREWVAQVEPGVQITFVSLAGGGGNDLKRIRFSREMYDKWQAQKWWGENNERIMELYNVRRFSRQVLPTPPRSDDGERESFYSQVGSTRGSPAATPSPAPLTPDRVTSWSAFVRPPSASRQQQQHSFRPLSPPPPSSSNPSERAWQQQQQPQRAGKSPAAASDAMDAARTTSCSSRDEVSISNASELEVTEWVIQDEPGVYITVRELADGTRELRRVRFSRERFAELNAKLWWEENKERIQAQYL

SEQ ID NO: 186947 - protein, 471 aa, Oryza sativa
  unsure (1)..(471): unsure at all Xaa locations
  Clone ID: PAT_MRT4530_83699C.1.pep
MGRPAQKAAQSARGRGGEREPVDRAHLAWSRVGPAYQRLGSPCGGSMQRALGFGEGTRCTRAVHGGRGCGGPTRSLTARGGPHPRAGPEGAADRGRLDPVLAELAPTWRLRGCHAGRREVDDDAGQNGRRTTAASGGANHGDTGESEHTGWLHETRGDEPTARIRRRELDGGELRRRQPAAEEGGNSDEVTRGRFPAAKASTRLRESDASVGLGGNASREAGDERRFRARAVTAASTLRAVATVGAAPASYGETTRATMRRGAVTRGRRCGRDLSGLGPGKRKERTRPESPSASXCAPAPPAHXATAAVGERDGNGAGEKQGRLGGGGAWVYRGGNRVEWRGPGDDDGDDGGADLSGAARARVLARGAERLRGCRRGRAAGPGDADGAGAARTATTRARAREQQRAGVESEGSARRRARARGARAERRVSPGGRERERXRGGRGRWAERDSAHPTWGRRNRLLRRDFREGF

SEQ ID NO: 186948 - protein, 107 aa, Oryza sativa
  Clone ID: PAT_MRT4530_8369C.1.pep
RRWWLGWWLRRRWGGGGRRRPRAPGEDEGLRAGGRSRFGTTSRLRTWNCSSGISRLPLPTVKLVSESIVLNVEERSVVEQGAEGPFGGEASRYPFSRWETGLADLIL

SEQ ID NO: 186949 - protein, 290 aa, Oryza sativa
  Clone ID: PAT_MRT4530_836C.1.pep
MSYSYASRRRGGGGGGGMAATVLAAKVAFAAAAVAGAGSFARLAVPQLVSVAGAVFPRVWAAARVWLVPPYLFVTVHLIILVIWKLSDHKHFQAQQQQLKDPWPHPHPAVPVAAAEDAPSLVVKPKEEFNAAAAVYGGGGGGMPEHEASPEISPDSGGGESCVTTESDEDASTAASYTSDERRSLAPPPQEHSVLEREFSLPLPAVDSGRDAAAAAADDDDDDDLDATWNAIMQKTRPATAPAMAAPPAQKAPPAGPPPPRARDPSIGAEEMNRRFDDFIKKNRHSFGRQ

SEQ ID NO: 186950 - protein, 151 aa, Oryza sativa
  unsure (1)..(151): unsure at all Xaa locations
  Clone ID: PAT_MRT4530_83700C.1.pep
NLCRGGTLYPHDITNPNHPARISRADTGLPYADERGPRPTTGXVPDHTVLGSPGVLPDTTPLNSHVSRHQGSPNXQFTQLGASHSTRVVALXVCSNVIPXRNRSLDATAQRSYSYFKFEGDRRYSHRVHEYRGAARWLQGNMVACLAQGLH

SEQ ID NO: 186951 - protein, 54 aa, Oryza sativa
  unsure (1)..(54): unsure at all Xaa locations
  Clone ID: PAT_MRT4530_83701C.1.pep
FFFFFFFFFFFLCQPXITKLQLXLRRALYSSQAKKASTQRSXIISHRLQLTSSG

SEQ ID NO: 186952 - protein, 477 aa, Oryza sativa
  unsure (1)..(477): unsure at all Xaa locations
  Clone ID: PAT_MRT4530_83702C.1.pep
TGRPAQEGGPERPKTRARGGRRESPVDRAHHARSQGGGWTWCTHVVRGRRRCGGTTRSLTARGGTRARGGTDRGRPDLVXAELAPTWRLRGCHAGRRKVDDDAGRNGRRSIAASGGANHSDTGKSEHTGRLHVTRGDEPTARICRGLLDGGGLRRRQPAAGEGGNGDEVTRGXFPAARASTRLRESDASVRLGGTTPSEAGDERRFRARAATAASTRRATAXEEEEGAPGVPFCVHERTSSPGAWRWTAEARQSTGVAAMGGQRRELALGGRGQSGDXGRMTPARRKKGKRRGRKGLALLPIREKGGGXSGATRQREGGRCLRPLAACARSGGGRAVTTAMTPGGLERRDDTGDRRVQRLTVAATGRSATXARARGLQREARRGSRAREHGAREAAAGKRGXRARLGAGGARARAERRGAGRGSRACARRAREGHSARRRGGRKRESGSAPGERAREREREGGGAPGREGRGPGERG

SEQ ID NO: 186953 - protein, 187 aa, Oryza sativa
  unsure (1)..(187): unsure at all Xaa locations
  Clone ID: PAT_MRT4530_83703C.1.pep
SPSAAPPLGARRAPSTSARIAWITSRSASRPSAPGPRGPRPRRHRLPRSTASVRSSASPPPFSLDSLPGAAPYQRWERMPRSWPSVLKRPRTAVALLPLSSSTGHQHGDGRTSCTEVAAALDRLAGTYERVEVAKQEVTRLEERRLEAMPDLEIERMRILVRVAISASXVGRRRHCHXRRPLIGICP

SEQ ID NO: 186954 - protein, 107 aa, Oryza sativa
  Clone ID: PAT_MRT4530_83704C.1.pep
GTPNPAPSPPPPFRTQSPPRAQPDAPIPTPIPPHRRRSHLVRVVGADPRLRGRRKAPPPPSSQPRGFRWSARAAARRRREEGGGGRRPCRPCAWSGTGALNPPKFVG

SEQ ID NO: 186955 - protein, 87 aa, Oryza sativa
  unsure (1)..(87): unsure at all Xaa locations
  Clone ID: PAT_MRT4530_83705C.1.pep
DGCRRGIVRSALQPSLGCNLGRPXAKTRIQRRQDWFGRTWGWPNPTQFRLVASSIAPLCRLVNFGPIHRVNSEFLAHSYISLVLDIV

SEQ ID NO: 186956 - protein, 523 aa, Oryza sativa
  unsure (1)..(523): unsure at all Xaa locations
  Clone ID: PAT_MRT4530_83706C.1.pep
MPKDVFDKLNFTVLAPTPMSLQLANSSVRYPAGIVDDVPVKIRDFFIPVDFVVLDMDMEKXTPLILGRPFLSTAGANIDNIQEVEVEPPKTDSLVKFMXNFLEKETTMPRNRYWRTPXVWKEKPKTPALPPPETGGXIHQLKRKEGSGSPSSCHDESSTHSSADVSMEDAVAPXRLLNNADLDLVSDRERQAYYMLSDREYAHTXEYSPELLKKIGMDVEFRSIWKAIGWQRFAVVDEPGSRLLTLQFMCTLKEIEDGISFHFFRKEFTLTWKGLSTLLGFHDSCKINLQKGISRFEKNRFWEDISGAPVCKKPRTNDIHNPKLRLMHKWIAMTLFPRMQGHILKHGADGSLIYFFPGCTNEIPLPNAGYHLYNCHELAIPLQTIEESRAGGTYRETRNMKRNERESSSSSTPVQMYEAGWAPTGDAPGWTQARCPSIGVSTWVSASEDQWHAPHDIHWGDNQPSRSSGVPPSPSEWRSSSSRWDLGEITKRMDTLDVQTGEIQYNLTEHIAQTQEWQQSADA

SEQ ID NO: 186957 - protein, 296 aa, Oryza sativa
  unsure (1)..(296): unsure at all Xaa locations
  Clone ID: PAT_MRT4530_83707C.1.pep
CYRAGGRSPRLPQLASSADPCRRHTRPAADPAAHGRRAIAARQSQRGEAGRAKEGRMGREGRGWGSGAXAVRLPPPRLCAISCRRRAPSSRRCRLPLSSHRXRRPPRRRIRPPLAAACTGRRPPCGWRCGRTGHPWPSWAQRALSARTSSACRPPAPSRCRRRPPSIRRRLPRPPSPRSPLRRDVRAARRVAPPPHRRLARLRGRRHRPPRRRWARAAHRRPVQESLGLPQEAPQGRALQVQGDPGPAATASLGRPPPCAPPPRPLHSPWIHSPGRRHTKARRRKDIVHGGGGGAG

SEQ ID NO: 186958 - protein, 486 aa, Oryza sativa
  unsure (1)..(486): unsure at all Xaa locations
  Clone ID: PAT_MRT4530_83708C.1.pep
PAGPRRPKCARAGGEEREGRWTGLTVRGPGWDPLVSGSAHRAEGARGRWKRCGGPTRSLTARGGTRARGGADRGRPVPTSAELAPTWRLRGCHVGWREVDDDAGRNRRRTTAASGGANHGDTGESEHTGWLHETRGDEPTARIRRRKLDGGESRRRQPAGREEGNGDEVTRGRFPAVRASTRPRESDASVGLGGATPSEAGDERVLRSSSGDGGEHTASDGNGRALRLAAKTATGGREDDAGGRKKGKKEGEKGACPXCLFGKRRRERGRRGRGRREALPLSLGGLRGSGGAEAMTTAMTAGRFGAARRHGRQARAGADGGGDRAVGHHGTRARVATGGAADGVARLGHARWLXGPSGCAAAGAAGQRGRAAQTRRGRGPRGRARERXARGAAARARLGAGGSRARARGARAERRGREALGAAAHAHARAARTTRERSEGREGERERERERAPGGRGEGRGRGGDGPREIRPIDPGGGKLDFCGGI

SEQ ID NO: 186959 - protein, 174 aa, Oryza sativa
  Clone ID: PAT_MRT4530_83709C.1.pep
RTPPWQWRRRPRRRRRWRRGRESACARSRGRAWPPGVAPPAASPPASPPPPARMFRRAYPAPPPPPCTMSFHRAWPPGAAPPAASPPSASPPPPARMFRRAYPAPPPPPCTASLLRPRADAPRRSSTVATPPPSSAASAPTARNGAEEPRRTPPSPLPPPAPPLPPLAWRRRGK

SEQ ID NO: 186960 - protein, 162 aa, Oryza sativa
  Clone ID: PAT_MRT4530_8370C.1.pep
SSLDLSSRPPCSFPPSGAGRRRAWARGTATAAGVPTAHEAGPVPARQRQPMRRRGMQRGRGAREMAVLDAAWRHNGGRRRRRLSRRWREGAEVEEGGADASGGCRSRPRRDAGPGEDEDDGFGGGRGGGGRGLWRWRPCGRLGRARSRRPRGLARPNASAPC

SEQ ID NO: 186961 - protein, 262 aa, Oryza sativa
  Clone ID: PAT_MRT4530_83710C.1.pep
MTSKRHGPRETERFGRAKRAGRPKAAQGARAGGKERESRWTGLTTRGPGWDPLVGDTVHRAERARGAHARAGKGCGARAWFAEERMRRAHAQPHGSRWNARTGGADRGQPDPISGELAPMWRLRGCHAGWREVDDDAGRNGRRTTATSGGVNHGDTGESEHTGWLLRTRGDELTARIHRRECVDGGLRRRQPAGREEEKGDEVTRDRFPAARASTRLRESVASVGLGGATPSEAGDERVLRSTGGDGGEHMASGDNGRGGAG

SEQ ID NO: 186962 - protein, 799 aa, Oryza sativa
  unsure (1)..(799): unsure at all Xaa locations
  Clone ID: PAT_MRT4530_83711C.1.pep
MYMGNKNNGYRPQGGQGWNQPHAYYQGGNNNGNFSNQPCLKHLVFAQAKTTDALSKNLAANDKVLENINVKLYGFASAFQNQLSFNKMIETQLAQLASFVPANETGRIPGQPDSSNENVKAITTREGKSTRDPPYPNPSGTTGMSKEAPSSDSADMDVQPEKTVPXEYCDTRLLPFPQXSRRPSVDEQFARFVEVIQKIHINVPLLDAMQVPTYARXLKDILNNKRPLPTTEVVDLTEQCSNIILHKLPEKKKYPGCPTITCSIGAQQFDQDLCDLGASVSVMPKXSSTSSTSRKRSLSFNRGRNNAPWSEXKFPGEGNNDAXEPLLEDADKTTHTGQEVRAASLEEAAIHTKTKEGVEEEANDARSNTSGDGXKILELNQKEFALKFIQTLIVSLKFKLLVAYIQVALVKLTGEMKRRLSRLFKESGSSSSHHDESSTRSSADIVMEDAKVPPQLLNHADLDLVGDRERQAYYMLADREYAHTREYSPELIKKIGMDTEFRAIWKAVGWQKFAMVDEPGSRLLTLQFLCTLKEIEDGISFRFFHEEFTLTWKGLSTLLGFHDTCKIDLQKGISGFEKNRFWEDISGAPICKKPRTNDIHNPTLRLMHKWIAMTLFPRGDLRPIRGDELIIMFAMTIEESRAGGTYRETRNMTRNEQESSSSSTPVQMYEGGWEPXGDALGWTQTPRHSIXVSGWASASEDRWRAPHDIQXGDNQPSRSSGVPPSPGEWRSSSSRWDLGKITRRMDTFDMQTGEIQDSILIQDPERKPNLGEDISTPTKVVVRYEMVNKSCYDPDTSLT

SEQ ID NO: 186963 - protein, 163 aa, Oryza sativa
  Clone ID: PAT_MRT4530_83712C.1.pep
MERVIHPGLVAGGGGDHAVLNAQEQVLLHVVQPLDIVHVLDEQDLYGDATGSVSVLVPTTASLMEALGSASSRRMRTLPYLGHHRPTRAAARAGFLAGLEATGWITVRAPAYVTCWAGPRYTEALVASPDAAALDTVVFTSTAEVEVLLRGLDAAWFLTLSPR

SEQ ID NO: 186964 - protein, 229 aa, Oryza sativa
  Clone ID: PAT_MRT4530_83713C.1.pep
MELSGRAKWAGRPKLARAREGGEREPVDRAHHAQSRVGPACQRLGSPCGGSMRRTRAGGVGTRCMRAVRGGRRCDGPTRSLTACGGTRARGGTDRGRREVDDDPAAIGRRAAAASGGANHGDTGKSEHTGRLFVTGGGEPTARIRRRSLDGGGLRRRQPAAEEKGNSDEATRGRFPAVRASTRLREFDASVGLGGTTPSEAGDERVLRSSGGDGGEHMASEGNGWGGAG

SEQ ID NO: 186965 - protein, 39 aa, Oryza sativa
  Clone ID: PAT_MRT4530_83714C.1.pep
SHRAYSRKAGRCLAPLPLSSVTAVTGLTVGYGNINTVVT

SEQ ID NO: 186966 - protein, 127 aa, Oryza sativa
  Clone ID: PAT_MRT4530_83715C.1.pep
MSEIRQSTHAPAGRAPQRLHEAGRGGDEDRHAPGRVSVEAGEERGVKEVQTLENAVPEHLLLLVEDMDDVKRLDDMEQDLLLRIEDGVVAAAAGDEAWVDDLEERTAGLGEQGAIWSHQAIFQRKWN

SEQ ID NO: 186967 - protein, 518 aa, Oryza sativa
  unsure (1)..(518): unsure at all Xaa locations
  Clone ID: PAT_MRT4530_83716C.1.pep
KGRLGRAKWAGRPKAAQARXARGREGEREPVDRAHLAWSRGVGGTRCTRAVRDGRGCGGPTRSLTARGGTRARGGTDQGRLDPVLDELAPTWHLRGCHAGRWEVDDDAGRNGWRTTAASGGANHGDTGESEHTGWLHRTRGDEPTARIRRRMSVGGGLRRLQLAERKGGNGDEVTTGQFRAARASTRLRESDASVGLGGNASREAGDERRFRARAATAASTRQAAATEEEGEGVPRVPFRVLARAGSSXTRATTNGDGEQXREAAAMAWRRMGEERKGGGLVYRMAMSVWEXDLGRXRRVLALGGRGQSGDRXGGRRMTPXGRKRGKEGEKRGARPLLLWEKEEGSGCVAAEGGGLCLRPLATCARSGGAEAMTTAMTTGRCGAALTMAATRRSATXARARGLQREARGRRRRRGTGGDHAGARANNGARGPTLRAGSSPGIGRRRARGRGRXRGTRARAGRARGREGARRERLTRMRARRACGAEGEGERERERXAGGGRGEMGRERFGPSTPGESK

SEQ ID NO: 186968 - protein, 248 aa, Oryza sativa
  unsure (1)..(248): unsure at all Xaa locations
  Clone ID: PAT_MRT4530_83717C.1.pep
QGRELALGGRGQSGDREDDAGEGGKGEKEGEKGGLPLCRFGKKEEGSGXDAAERGGARPPSLGGLRAEWRGXRAVTTAMTXGRFGAARRHGRQTRXDADDGGDQAVGHHGTRARLATGGAAEGAARLXHARWLQGPSGCGRGRAAGPGGADATRAWTTQARAREHGAREAAARERRGRTWLGAGGLRARARGARARRSGAMEGAVAPTLSLKRFSFMTSSSFQPSTRSTRLGHSSSATFPRALPPRLI

SEQ ID NO: 186969 - protein, 60 aa, Oryza sativa
  Clone ID: PAT_MRT4530_83718C.1.pep
PVLRKVPSGLDPFTSDPPPPPRPFTKFPFLRKVPQGPDPITPGPPPFLGVSSNVCTNFCS

SEQ ID NO: 186970 - protein, 130 aa, Oryza sativa
  Clone ID: PAT_MRT4530_83719C.1.pep
MADDCCAKFSSSSSPQLSMRKWRRIRQHLTCCCACATAFSYKYGHAAARAELRHQAWCASLDVGSDPEPLLDTTAGVLLPLPPDSCNSIYGTYSVGVFQARISRKQGVDEVMDNSAGSTMRTGWSGEMDQ

SEQ ID NO: 186971 - protein, 633 aa, Oryza sativa
  Clone ID: PAT_MRT4530_8371C.1.pep
AGIRARDCSSLKELHLYHNTLRSEIPRNIGLLTNLVLLALNSNNLTGSIPQSVGNITHLDKIYLELNQLAGNIPEELGQFSNITVLGLGDNRLSGIIPASLFNLSSLQTLARGANQLGGTLPTNMGDHLTNLQILYVSNNMLEGHIPASLGNASMLREIVFQFNNFTGQIPTSFGKLSTLIRLDLQANKFEANDSESWAFLQALGNCSELDILSISRNQLQGVIPDSIGNLPTNITSIALGGNKLSGTVPPSIGNLSRLIQLGLDVNSLSGEIGPWIGNLKKLQSLSLNNNNFTGPLPPSIGDFSGLTALYLQSNGFESAIPQNIGNLGKLLELDLSYNNLQGNIPLEIGNLKQLISISLSANKLTGEIPGTLVQCYGLQHIKMDKNLLTGSIPVSFGNLTSLTALNLSYNYLSGTIPRALGDLQQLNELDLSHNHLQGEIPTNGIFKNANAVSLGDNWGLCGGVLDPHTPSCPRASRKISIQYYLIRVLIPIFGFMSLVLLVYFLFLVKKVPTSKFLQSSFGEYFLKVSYNDLAEATKNFSQSSLIGKGTYGSVYKGTLKESKVLVAVKVFNLEMRGAERSFLAECEALRSIQHRNLLPIITACSTVDHTGNVFKALVYEFMPNGNLDTWLH

SEQ ID NO: 186972 - protein, 136 aa, Oryza sativa
  Clone ID: PAT_MRT4530_83720C.1.pep
LAPPPPPPPPPSCCCLLAPPCPPLPRAVARAQPSPPPPLPSLSPSAATSAFASLRPYLAPRRSCRRCRAPPERRPPFLSLSPSATDASFAAMADDCCAKFSSSSSPQLSMRKWRRIRQHLTCCCACATGNNRFHLP

SEQ ID NO: 186973 - protein, 69 aa, Oryza sativa
  Clone ID: PAT_MRT4530_83721C.1.pep
RKRGMTNIVTQPVKPPQWPRCILFSRLRSTLALVRADLVEPRIIGSLRFGNISTALVQASILIDNKRAL

SEQ ID NO: 186974 - protein, 156 aa, Oryza sativa
  unsure (1)..(156): unsure at all Xaa locations
  Clone ID: PAT_MRT4530_83722C.1.pep
SSHHSTRRLATNQPPPSPATVGSHSHHQPPPTSRRPDLAGAADASQPLPPTPAPPRRPPPPPSFPAAGYRSPRTGQPWHGXAALSTVATFIPRRRLPLPQIRPAMADLGTTAAAPSGVPSRRAPVAAKGREAPPPPFLRAHGFADALSQYKPLWNT

SEQ ID NO: 186975 - protein, 88 aa, Oryza sativa
  unsure (1)..(88): unsure at all Xaa locations
  Clone ID: PAT_MRT4530_83723C.1.pep
HPRXSLSLSLRRXPPPPLLLPPMXSSSKRRXVAGXXGAXKKDLFHVVHKXPAGXSXYXXAKXLQXFDKDXXTTIVWXWKAXNFRDKVD

SEQ ID NO: 186976 - protein, 305 aa, Oryza sativa
  Clone ID: PAT_MRT4530_83724C.1.pep
MPPSTTAAAAAAVLSQPSSPVFGRRHRIRTPWTPTSPRLPRHCIRQRRQPPPPHRHHYHGAASLAATTAAIRPPPQLASRRISSCRLSSHHSTRRLATNQPPPSPATVGSHSHHQPPPTSRRPDLAGAADASQPLPPTPAPPRRPPPPPSFPAAGYRSPRTGQPWHGSGHRHRRAASLAATSRTAALSTVATFIPRRRLPLPQIRPAMADLGTTAAAPSGVPSRRAPVAAKGREAPPPPFLRAHGFADACFWQGMNSYSSMACIHTHIGVIGGNRSTRWMGTTAMVAWSAERARGHGAIDVVPCC

SEQ ID NO: 186977 - protein, 78 aa, Oryza sativa
  Clone ID: PAT_MRT4530_83725C.1.pep
MSSRMKREVEPPPQIVVRSTGPLAVPTPQAAPYPYGGLWFSLPPTAWLASPQSQAMPGSSAFPLPADGKTDVHPDLEE

SEQ ID NO: 186978 - protein, 106 aa, Oryza sativa
  Clone ID: PAT_MRT4530_83726C.1.pep
MPCGYGLVEALHSSSLSRAGDADGVRQLRRLELLAIIHVMRERVEYLCSLILSNKVEDLAIRCSAVNDSRSPQDSRATLVRLPSHGAASCRRPTPLSTPPTRYTSP

SEQ ID NO: 186979 - protein, 460 aa, Oryza sativa
  unsure (1)..(460): unsure at all Xaa locations
  Clone ID: PAT_MRT4530_83727C.1.pep
LKKIKSVRNYLAYQLFAYFGLTFAIMLAITLAIPNFDARSFSRLEKGEHEFFIQESRQTELQYNLDEIFERRLSVATQNGFNIILFDPKTRIFVGAGADSNRIQSFQVFLYRAQTPLEPLQRRFGSLEISGPFLVKSNKREYMQYFAQIVDPQEEFFNRIFDSPWLMLMIVLIVSVPILLWLSWKIARPVKELRICANAVATGNLAINPKLETEGIHEFREVGRSFNQMITSLQELTEYQQRLLSDISHELKTPLARLQLATALIRQRNGDSAELTRIDNQIMKLDTMVHDLLSLSRQQINQHLMREVFSINKIWDDILEDAKFEAEQNQIDLFIEQRIDNVEGYFINGXEIILASAVEKLIRNAQSYAKQSITVLIYIDDKELVMSVNDDGEGVPESEYXXXXXXXXXXXXXXXXXXXXXXXXXXXXANAAQQHKGRVEAMKSILGGLRVETRLPLWLE

SEQ ID NO: 186980 - protein, 695 aa, Oryza sativa
  Clone ID: PAT_MRT4530_83728C.1.pep
LCIFWSFQKPKKKLKYSELFSKHQEVSASESVKSDALKTFKLPETRKNTEDNKEVLPVCIGVHNGIGNNASYFPEEQNSRRQKCYDSTEEWENMIAANQQENLSVSKAKLLGEDSSNHIGSITEESINKGPSPLGSAPRALVENLSESLHVNVCSQAAGAEECTQAQICAKGGQQPRYYSDSGGSMLKTSSESRSKSRAELLKQMHDLSAMLLSTCNSVPLQGYEEELLQLVIQNLRDASSCISKVQNMSCSRNNLWMAMPEHSLVENDSELKTSISQAVAKLPEDKTLDDIDVSQLSIYKNLWVEAEASAFPVDLSKGNKIFISTIPNSKPQNSTAYPANLQCQGADSCDGQLPAVNRSIIDGVDAEVIERLKFLQSNLKDCRAFCQNNCEEQEEASKKPCAIEDAVMARLRVLNSCPDNIASLKQENNNHHQLDTSTNRADNIDDAVMSRLRILKSRPDNVNPLGQESSKHEPDAATGTNNFIDNAVMSRLRILKSRPDNANSLGQESSKHEPDASTGTNDLIDNAVMSRLRILKCRDDNINSLDDAIKQHVEACTDQPNWDEDGVVAKIQAPNGDTVSTADGFQNILHSNNFVRHSEGKDSVSGLDSPGDATCSDEDNGRKAPSDEVNDKTAVQSEGSFPMNIGWPLSTMDSHICTAGSQETPLISSSVHRYDIFPPKWEHMLKENFFHPGK

SEQ ID NO: 186981 - protein, 56 aa, Oryza sativa
  Clone ID: PAT_MRT4530_83729C.1.pep
NRFKLRQVVPLYQLLAPQVFGILLLCSPLSCVYSYLAVFSCPPSFLFRPPPFFVSS

SEQ ID NO: 186982 - protein, 709 aa, Oryza sativa
  Clone ID: PAT_MRT4530_8372C.1.pep
MSPTEDAPRRSWSELSTDLAGEIFGRILCHGDRVRFGAVCRQWRISARRNPLPRQFPCSRCPTGPSTACQTPPSGGCRSISTATSSCRTPRAPAASGSSSSAATARTRWMPTDPPVTHDTPPPLQKLVVCSPTLVAAVVGKRPSQLLLCRPGSASWSCRHDRLQALEIQDMVSYQGKLHALVNSGDLLSISISEDDDGSHAGGEPTVSSVDCLVRISPGRRTEPPLYLVESDGALLMVRKENHSTREGSYSDDEQSNVILYPDDDDSYVPLYSAEQIELQTKFEVFAADMAGSRWRKDRGADGYGGQQWRTVEFFCTIYDMRERRSQLFLKTPLRPVGSLGTWLFPPSGRESGGGDRVARERRGGDRGVRMRRGMGMVDATHADGRRWLLILVAREIATDTVGEAIYQTQRYTKLIEGHSAIDAHRALPLSAPAALALHSIRALPLSGPAMLALHSIRQLQQAATIGDRHKLLCSANRMSRPLFLDIMNAVEDHDDNFVQKRNAAGLIGFSCHQKDTAAVRQLAYGLAAYALDEYLGIAESTAIESLRRFVKAVVEVFEHEYLRSPNENDTTRLLELGRTEVSPLAEGKAPEVNYSINGHNYTMGYYLADGIYPSWATFVKTIPEPHGNKRKYFAKAQEAVRKDVERAFGVLQARFAIVRGPTRHWDEKTLGYIMKACVIMHNMIIEDEGEVDWEERFPEGGENVSVPR

SEQ ID NO: 186983 - protein, 128 aa, Oryza sativa
  Clone ID: PAT_MRT4530_83730C.1.pep
ELLQLVIQNLRDASSCISKVQNMSCSRNNLWMAMPEHSLVENDSELKTSISQAVAKLPEDKTLDDIDVSQLSIYKNLWVEAEASACKLKYELQLTRVKLAAMENHNNTQVPVDLSKGNKIFISTIPHR

SEQ ID NO: 186984 - protein, 43 aa, Oryza sativa
  Clone ID: PAT_MRT4530_83731C.1.pep
GFLMRLKELLRAMVAAAVASNSICQAPLVSASWGLRRAKARML

SEQ ID NO: 186985 - protein, 282 aa, Oryza sativa
  Clone ID: PAT_MRT4530_83732C.1.pep
MAILDSNPPPAADAVVAADGSGDYTTIAAAVAAAPSKSTKRYVIYIKKGTYNELITIGQNTWNLTLIGDGMDVTIITGNQSVGGGVSSTSKTGTVTVDGIGFVAIDLTIENTAGAENEQAVALLSNSDASALYRCGIRVYQDTLYAKSNSATGFSFQDCNIYADDDLLRGAPAGGVETYLGRPWQPIPDSPPFSRVVFMECGMSDVIDPKGWLPWEGRTDVSNVYYGEYENTGDGADVSGRVKWTSFHVIQDASEAAKYTVENFIQGDKWIPGTGVYFEPSH

SEQ ID NO: 186986 - protein, 231 aa, Oryza sativa
  unsure (1)..(231): unsure at all Xaa locations
  Clone ID: PAT_MRT4530_83733C.1.pep
MKDVAALIYAASKKKKXTLQYALXSDLPAGTGWTTEVIDKLITVWSASQTIELSEXNNENLNSLGEYTSTSVYNAXLSTTITNFNNLIRKPXTPRECKTFASLVIQNRAXTPNKLAIKGRPNGSTYLLCRWVQETTLNLFPGYHYTGRIWAALGKCAVCNNLHPNQWQXSSTVLQWXELIISVKEAPKKTLRSLTLLIVWVIXNKRSRRTFQQKKLSXSGLLAKIKVKVII

SEQ ID NO: 186987 - protein, 53 aa, Oryza sativa
  Clone ID: PAT_MRT4530_83734C.1.pep
FFFFFFFFFFFFFFFFFFFFFFFFFLKRKKFFFWPPLPIKEEPPFRKFSEKGT

SEQ ID NO: 186988 - protein, 300 aa, Oryza sativa
  unsure (1)..(300): unsure at all Xaa locations
  Clone ID: PAT_MRT4530_83735C.1.pep
MGAEIAAVPNISEGLAKISTKMMDLAAQLQALAAPSAEQAMSLGAAERSDRQAMTFLLPRQHEFKQRLRGANSRRRMSCLPQPKAAIPRGRLPGVMPLISAETRLGGVVLGMASTAPLLPKPPSTTTAKRHPSPMPSRNSTSLFGLAMPPWLLAFSTEAEETTASSTSMAAXHGTGIRAISGXMRSCESVSTVGGANSGDGWSRAMGSGAASSGARFGTICWRTVPFARMAPLVHSIGSRGGVGTAQIAPSPSAGSRSSRFDRSWLHRCCRRGHVKKRIGFLSSSSWAGWSGLVGFHVGP

SEQ ID NO: 186989 - protein, 188 aa, Oryza sativa
  unsure (1)..(188): unsure at all Xaa locations
  Clone ID: PAT_MRT4530_83736C.1.pep
NLCRGGTLYPHDITNPDHLARISKADTGSPYANDKGPRQTPDXVPDHTVPGNSGVLPDTTPLNPHVSWHHGSPDXLVTQPGVSYSTHVVALVLCSDEIPRKWSLSARAGNRTPDFKFEGDRRYSHRVHRXATRWLQGNVVACLARDLELDPRNPRNAGLRAPKLHAKRDNSTNGENKALLLTSRRAIR

SEQ ID NO: 186990 - protein, 201 aa, Oryza sativa
  unsure (1)..(201): unsure at all Xaa locations
  Clone ID: PAT_MRT4530_83737C.1.pep
MARRRKMREFGGGGLGLKWTAMSVWERGTGIERSRRELALGACSQSGGRRMTPARRKKRGKKRGRKGLAPLPIREKXGSGSIAAEGGGARLRPLAACARSGGGRAMTTVMTXGQLGAERRLRRLARSEADGGGDRAVDHSCSRARLATGGVRGGARTQTLRAGNRFCYQGARARGRGARSRLLPLTLEHTAGQAERPDDQL

SEQ ID NO: 186991 - protein, 69 aa, Oryza sativa
  unsure (1)..(69): unsure at all Xaa locations
  Clone ID: PAT_MRT4530_83738C.1.pep
MRRGATKEVLGNQRRSGGKMRKMRWQRSTSASLXGDEKEEGVAAATAAVAGCHACATRVTSYNARMTFT

SEQ ID NO: 186992 - protein, 110 aa, Oryza sativa
  Clone ID: PAT_MRT4530_83739C.1.pep
WPPRRSPGFSKERVAPPFWQVPLPPHGSSKWFCRFDVTAPPSGWSDDDDNGEELIAGQGFGLRRKFRFFSPPPPSPAPKVPKAQFGFLLFGPRSRFWVGNPADPLPPGPP

SEQ ID NO: 186993 - protein, 117 aa, Oryza sativa
  Clone ID: PAT_MRT4530_8373C.1.pep
YGVGGDCPSGRLLRRNLPGQLVAETVLVLRTTEYSRSEEAGSPPRHPSAGPTSRPPPPRPCLSGPPPPTSPPSSPGPPPPPSPPRPPSLHTPSACFPPCPPLAAPITGHLVAAPSDI

SEQ ID NO: 186994 - protein, 83 aa, Oryza sativa
  Clone ID: PAT_MRT4530_83740C.1.pep
GDCRCTASGPWGYRSRTPAGDPPRRGRRRGSGGGRGCTSRCRARRRRTAPSGRGSSRRFPATAAASPSPSPEPPRGNQLPPQP

SEQ ID NO: 186995 - protein, 464 aa, Oryza sativa
  unsure (1)..(464): unsure at all Xaa locations
  Clone ID: PAT_MRT4530_83741C.1.pep
MGRSGRAKWAGRPKAAQXRARGRGGERGPVDRAHHAWSRVGPACQRLGSPCGGSTRRGXGWGRDAVHAHAQGGTHAREGLXGRPDPISAELAPTWRLRGCHAGRREVDDDAGRNGRRMTAASGGANHGDTVESEYTGWLLRTRGDEPTARIRRRESVGGGLRRRQPAERKGENGDEVMRGQFPAVRASTRLWESVASVGLGGATPSEAGDERRFRARAATAASTRRAAATEEEEEGAPGVPFRVLVRTGSSGTHATTNGDGEQGRQWRRETKTREIGGGGXLGFKWAAMSVWERGTDIGRSSRRAGAPASGQNGDRRXIPARGKNREKKGEGKGACPLPLWEKXRGAGATRQREGELCLRPLAACARRGGAEAMTTAMTVGRCGAGLTAAATRQSATTAHARGNNGRRGGLSGAAQARALASGIGRLRGRRRRDAGDDHAGARVNDARGSGSEGAERRTRLGAA

SEQ ID NO: 186996 - protein, 98 aa, Oryza sativa
  Clone ID: PAT_MRT4530_83742C.1.pep
MVLLAVVRLCWSRQLLTSARLILLTIWDVIILLMSDRFMKEDCHMNKRYFKYARLFDKFKVDRERGITIDIALWKYETTKYYCTVIDALLVIVYLLRT

SEQ ID NO: 186997 - protein, 513 aa, Oryza sativa
  unsure (1)..(513): unsure at all Xaa locations
  Clone ID: PAT_MRT4530_83743C.1.pep
MGRSGRAKWAGRPKTAQARARGRGGERGPVDRAHHARSRGRGGTRCTRAVRGGRGCGGPTRSLTARGGTRAREGIDRGRLDPALAVLAPTWRLRGCHAGRREVDDDAGRNGRRSTAASDGANHGDTGKSEHTGRLHVTRGDEPTARIRRRELEGGESRRRQPAAGEEENGDEVARGQFPAARASTRLRESDASVGLGGTTPSEAGDERRFRARAATAASTRRATATEEEEEGAPGVPFRVLVCTGSSGTHATTNGDGEQERRWRRETKTREIGGGGLGFKWAAMSVWERGTDIGRSRRELALGACGQNGVXGGGRMTPAGRGKEKEGEKRGLAPLPLWGKGGGSGATRQREGGLCLRPLEASARSGGAEAMTTAMTAGRFGAKLTAAATGRSATTARARGKQRAASARARAREHGAREAAARERRGRTRLGAGGAALAHARAARGQSGGRGAGRGSRARARGARAERRKGEREGESGSAPGERARERERKRAPGREGEMGREGFGPSNPGDAN

SEQ ID NO: 186998 - protein, 121 aa, Oryza sativa
  Clone ID: PAT_MRT4530_83744C.1.pep
MYRYVFICGRALIARRQWPRPPPSMSHSTSELVAGGCILCRSHPTPHQELIADGHVLRHPRSTPELVAGDRVLCRPYSTPRQDIVADNRVLCRPCPTPPRSLSPAAASSAVHALHHTGAHR

SEQ ID NO: 186999 - protein, 464 aa, Oryza sativa
  unsure (1)..(464): unsure at all Xaa locations
  Clone ID: PAT_MRT4530_83745C.1.pep
TGLTVRGPGWDPLVSGSAHRAEGARGARARAGEGRGARARSAEERMRRAHAQPHGSRWNACTGGADRGRPVPTSAELAPTWRRRGCHAGRREVDDDAGRNGWRTTAASGGANHGDTGESEHTGWLHETRGDEPTARIRRRKLDGGESRRRQPVGREEGNGDEVTRGRFPAVRASTRPRESDASVGLGGATPSEAGNERVLRSSSGDGSEHTAGDGNGASCRSXLAAKTATXEGGRMTPAGGKGEKGGRERGARPFLLWENWEGSGGVAAEGGGLGLRPLAACARTGAAEGDGGGDQMVGHSARARGLQWEGAADGEARLEHARWLRGRAAACAAGQRGRAAQTRXRVGSGSEGAERRAWLGAGGSRARARGARAEQREREARGAAAHARADRAGXRSXGARRGLRARARSARGARAGRSGAEGEGERERAGGGEGEXXXXXXXXXXPXGGRGGPAAPPPPAGRP

SEQ ID NO: 187000 - protein, 346 aa, Oryza sativa
  unsure (1)..(346): unsure at all Xaa locations
  Clone ID: PAT_MRT4530_83746C.1.pep
MGRPAQKAAQSARGRGGEREPVDRAHLAWSRVGPACQRLGSPCGGSMRRALGFGEGMRRTRAVRGGHGCGGPTRSLMARGGPRPXAVPEGAADRGRLDPVLAELAPTWRLRGCHAGRREVDDDASRNGRQTTAASGGANHGDTGESGHTGWLHRTRGNEPTARIRRRELDGGELRRRQPAAEEGGNGDEVTRGRLPAARASTRLRESVPSVGLGGNASRKAGDERRFRARAAMAASTWRAAATVGAAPASYGEATRTTVRAGAVTRADGAKRDRFGLGPRKRRKIARPKSPSASLLVPAPPTRATTNGDGEQGDSGSERRTRGRLXGGAWVYLGGXRVEWRGPGDD

SEQ ID NO: 187001 - protein, 118 aa, Oryza sativa
  Clone ID: PAT_MRT4530_83747C.1.pep
MGANFPGFNGVVLSVVGDVPVDSETPVVTSSISLEFAGPVFEDAHRAQYLRQVIRGRHTHTGIASGASTYTRLQPRRTRVGEPTRHRAKQQPAMRRAGSDSIPGNKSTQQAKLSMASR

SEQ ID NO: 187002 - protein, 133 aa, Oryza sativa
  Clone ID: PAT_MRT4530_83748C.1.pep
MEEARARDCVTRTASVVTLPEKGNAELAPTWRLRGCHAGRREVDDDPAANGRRVAAASGRANHAAREEGNGDEATRGRFPAVRASTRLRELDASVGLGGTTPSEAGDERVLRSSGGDGGEHTASDGNGRGDAG

SEQ ID NO: 187003 - protein, 263 aa, Oryza sativa
  Clone ID: PAT_MRT4530_83749C.1.pep
MPPLLASTSSTSPLLLASRLRGGGGCGCGGAPLLHRTRRGFLAPSTTTTQTTRTSFAAMSWLGKLGLGGLGGSPRASAASAALAQGPDEDRPAAGNEFAQFGAGCFWGVELAFQRVPGVTRTEVGYSQGNLHDPTYEDVCTGATYHNEVVRVHYDVSACKFDDLLDVFWARHDPTTPNRQGNDVGTQYRSGIYYYTPEQEKAARESLEKQQKLLNRTIVTEILPAKRFYRAEEYHQQYLAKGGRFGFRQSAEKGCNDPIRCYG

SEQ ID NO: 187004 - protein, 428 aa, Oryza sativa
  Clone ID: PAT_MRT4530_8374C.1.pep
MGMVDATHADGRRWLLILVAREIATDTVGEVIYQTQRYTKLIEGHSAIDAHRALPLSAPAALALHSIRALPLSGPATLAPHLIRNRMSRPLFLRIMNAVEDHDDYFVQKRNAAGLIGFSCHQKVTAAMRQLAYGIAADALDEYLGIAESTAIESLRRFVKAVVQVFEHEYLRSPNENDTTRLLELGEDRGFPGMLGSIDCMHWKWKNCPTELHGMYQGHVHEPTIILEAVASKDLWIWHAFFGMPGSHNDINVLHRSPLFAKLAEGKAPEVNYSINRHDYMMGYYLADGIYPSWATFVKTIPEPHGNKRKYFAKAQEAVRKDVERAFGVLQARFAIVRGPARHWNEKTLGYIMKACVIMHNMIIEDEGEVDWEERFPEGGENVRVSHDEIPDLDDFIQMHKKIRDDETHYQLREDLVEHLWQHYPDKY

SEQ ID NO: 187005 - protein, 649 aa, Oryza sativa
  unsure (1)..(649): unsure at all Xaa locations
  Clone ID: PAT_MRT4530_83750C.1.pep
MHTVKETELLAAKLDLLMKRLDDHEKRPQGTVKALESHVTCEVCGGTGHSGNECPETCEEVMYMGKNNWYRPQGAKTTDALSKKLAANDKILENINVNLDGFASAFQNQLSFNKMIETQLAQLASLVPANESRRIPGQPDSSIENVKAITTRGVIQKIHINVPLLDAMQVPTYARYLKDILNNKRPLPTTEVAKLTEHCSNIILHKLPEKKKDPGCPTITCSIGAQQIDQALCDLGASVSVMPKDIFDKLNFTSVRYPAGITEDLPDKIQDFFIPVDFVVLDMDTGKKTPLILGRPFLSTAGANIDVGTGSIRFHINGKEEEFEFQPRTEQCSMXQNQVRTEPAEYSSGRIGATQDGXPGKVHAELPGKGNNNEQEPLLEDAGKITYTGQEVRATGSEEAVYRTKIXKVNCMRRRLSRLFKGSGSPSSHHGESSTRSSADVSMEDADAPRQLLSDTDLDLVSDRERQAYYMRSDREYAHTREYSPELLKKIEIEDDIFFRFFRKEFTLTWKGLSTLLGFHDSCKIDLQKGISGFEKNRFWEDIFGAPICKKPRTNDIHNPTLRLMHKWIAMTLFPRSDLRPIRGDELIIMFAMIYEAGWAPTGDAPGWTQALRYSXGLSTWASASEDRWHAPHDIHWGDNQPSRSSGLG

SEQ ID NO: 187006 - protein, 465 aa, Oryza sativa
  unsure (1)..(465): unsure at all Xaa locations
  Clone ID: PAT_MRT4530_83751C.1.pep
MGRPAQDGPRRARAGGESEPVDRAHHARSXVGPACQRLGSLCGGSTRRGARVGEGXRCTRAVRGGRGCGGPTRSLSARGGPRAWGGADRDRPDPISAELAPTWRLRGCHAGRREVDDDAGRNGRRTTAASGGANHGDTGESEYTGWLLRTRGDEPTARILRRESVSGGLRWRQPAERKGENGGEVTRGQFPAARASTRPRESDASVGLGGATPSEAGDERRFRARAATAASTRRAAATAGAAPASYRKATRATMRRGAVTRGRRRGSNLSGLGPGKRKKRARPGSPSASLLVPAPPTRAMTNGDGEQGKGGGERGRRGRGRRALCLRPLEAXRAEWRGPGDDDGDDGGGGLSGAARARALASGAGRLRVRAAGPGGTDGAGAARAATARARAREXRRAGSGSEGAERERARARGARAERRXGGERERERERERRGGRGRWAERDSAHRPRGRQNRLLRRDFIWKD

SEQ ID NO: 187007 - protein, 83 aa, Oryza sativa
  Clone ID: PAT_MRT4530_83752C.1.pep
GSKGAPPHLSQLGFPYALKVFCFPLLGPCPGGSFFAFRLGPVFPPPLPLWVPPVIKFFWPLAPPRPLSMFRGGVFFPSHFASP

SEQ ID NO: 187008 - protein, 103 aa, Oryza sativa
  Clone ID: PAT_MRT4530_83753C.1.pep
VLRPGQLLFIPQQNVVFKKPHHEGCQYISFKTNANSMVSPPPGKNSIFRPIPVNVIDNAYRISREQARTLKNNRGKKLGAFPPKYQQQTHPGFSNKSKNKALK

SEQ ID NO: 187009 - protein, 143 aa, Oryza sativa
  unsure (1)..(143): unsure at all Xaa locations
  Clone ID: PAT_MRT4530_83754C.1.pep
RHISLCGHGSSEDLPLPGWPPRDDHPRRPKGQKGNGDAAPTAPRGDALHRKRCPARPLRRQRPTNPSHPLPSPHGGPPTPPTPPPPPTPHPPXPPPNLLPQPRNEAGHGPPPRHPPPPPNHPPAPPPPPPPRTPPQPPPPTPR

SEQ ID NO: 187010 - protein, 106 aa, Oryza sativa
  Clone ID: PAT_MRT4530_83755C.1.pep
CQTPKEGPQKSVMKEGGLHVMRPKSCEGKLFPGIHRTKIFWSPGEGPVTRKKWKVEFGGVLCEPAQIRNERPPKTEMEGVLDPQTKYGFKKPGFQKRTVSKKLQMS

SEQ ID NO: 187011 - protein, 152 aa, Oryza sativa
  Clone ID: PAT_MRT4530_83756C.1.pep
GGQAPDCGTTHKRDPLITTRCVLIGQRLILSKNLAILQGQSMYYYEGNNSSGSSFRLLAYGGRFLVDRCTKDDLNGTDVKGRIVLCISIEISPLTLFPLALKTVLGAGASGLIFAQYTTDLLGITTACNGTACDLVDLESANLIGSYISEAR

SEQ ID NO: 187012 - protein, 351 aa, Oryza sativa
  Clone ID: PAT_MRT4530_83757C.1.pep
FRLLMGVKASIRGNLRELLADQKVVNGLTKIAENIEFLQEVIKKSLGRSETLDKIFERLAEVKVQLQKLSNTSIVGYCYWYEANGRYFGLHITPLTVADKFGEQLKKQQIGWVFASATLEVGGQFDHFCQRLGIENAEQIVLPSPFDYANQSLLCVPRYLPDTNKSHTLTTLGNMLMPVIEANNGRCFLLCTSYSMMRGMADFLREHSQLSVLLQGETSKARLLAQFITEKNSVLVATQSFWEGIDVRGDALSLVIIDKLPFTSPDEPLLKARMEDCRLQGGDPFNDIQIPEAVITLKQGVGRLIRDVTDKGVVIICDARLVMRQYGKTFLESLPPSSRTRDLAKVIQFLK

SEQ ID NO: 187013 - protein, 372 aa, Oryza sativa
  Clone ID: PAT_MRT4530_83758C.1.pep
MVVHVVYRRRESSWRGGETSARLHQGAAAMSNPAGGKHLVRLAGSSSLRGGAALSPAVSISSGSRPATRAGARALRAASPPPACSIASVGCWESRALRLDGDEDWEVVVAQGDDAVGADSGAFDAVQEAADEHAEAFGAPPTDQEVRAAVASIQEVFENHPGLDSDAPAQALALSPISGLPPSGMFVNYFSEGSTPSDIKIEDSTPSDVKIDQLASLEHSTPDTASEECIEPAMLVLNSTALLTREHRNVLDAFHLLQVDSSVQKMVMALSTDKSVWDAVMKNEVVQEFRKSFQDAKEADPNGSSSASPGVMKWVMETTQAKIKEFLESILKLVNMLFQAQSEDYDLYDDTVRMSFMLAVFVFIVVTVARIK

SEQ ID NO: 187014 - protein, 662 aa, Oryza sativa
  Clone ID: PAT_MRT4530_83759C.1.pep
MASASYFWSNTLNAFMFNQGPMTPTLLDVIMITGLDVTSSANPMNLNSKNQFDFMTKSIGGSFGYVDSYMGKGSVTPREHTTFLLMWLEKFLFCESSCGPITNWQFLAEALEAKKQIPLGKILLGYLYQMLNNTSAKIAVGSVVGAEAASTPADSRAKLSAELLKDWFCSFYEGFQKDARVWFTYEDSVEFELPSDFIFEDINSEKFDKSIEVFSAAISPSSMYMTDLFPDVIPQTTESSPPHKSNSGKDIEYALGLIPNGGGLAPPVISYHAPRTSSLLQGQLKEPADAGRKRKTKALAVDPSALAPKKKAKKKKSKPTDDLPVLNPSIEQALDEEEIEEDVDQAATELSDLGEKTPSASPKQTPPTPAAPAHFSRKKKTVVKKKSAPAPSKLAPPPPPPPSSPVQPTPSDHTPSAAGSHNIEEEEQTTAPSIPVLADMLSFDIKDYFDEEAEEETTSKTLAPLDEDVKRTLEDISHRLESSLDNLVAYCGSIRARFAEIQALVPDDLANTISSAVYLKQHQFKMEKAKQRIADRREQRDIEATIQANQQLVHEEKAKLDQLYVGPIQSNKDRFEARKIDLIAQLEECNAKLDLEKQKLANLPNAVEEQKSRLRSAIKNVADMTKSLKVIPGTDAQDIQAIEEVDQIRQRVVSAIQRYLSG

SEQ ID NO: 187015 - protein, 415 aa, Oryza sativa
  Clone ID: PAT_MRT4530_8375C.1.pep
MRRRRRRRREDEKEKENIGGDNKAVGCRMWAVRGNKAEAEPLAPTEFGASLVEHGTRTKSHQSPPTQASRQDLGESHKLGKERKRVEIEDDMWDPPYFQVHMKIDPTDRKPQKMSEAEMTSRRRRPTSPAPAQPLEDDDLLSEILLRLPPLPSSLPRASVVCSRWRLIVSDPGFLRRFQSRHRKHPLLGFFKAGFRRVDPTFIPTLDPPDRIPAARFSWRLPGGDDDRYSMFGCRHGLVLLFNWVLHRLMVWDPVTGDRRAVDIPGSFLDGHGRSLVVVFRGAVRCVVDGGCHFEVAILGNHPLQTRLFTCVYSSKTGDWGNVISTEFYSAGYICHHSSALVGNSVYWLFQGDGISILQFDFDTQGLARIDVPPDVHAHVVTYYQIRIMPAEDGGLLLLVLPEFSLNVWKYQGQL

SEQ ID NO: 187016 - protein, 140 aa, Oryza sativa
  unsure (1)..(140): unsure at all Xaa locations
  Clone ID: PAT_MRT4530_83760C.1.pep
TPTTGAARRGGGGRAGKSAPRRSPHRKRRRRSEGPRPQGRGHCAARTLQGAAPSNRRRRIGFSGSLPALPASPSPRRPRXATTAASATSSAALPDVLRPAPSRATPLDRRRXRPSPSPASPDPGHRPQPSPPAHRRRQLQ

SEQ ID NO: 187017 - protein, 507 aa, Oryza sativa
  Clone ID: PAT_MRT4530_83761C.1.pep
MADSGDSSPHSAAATDDAHHEGSEAAAAQAAPPPPAPPAKVRLMVSYGGRIQPRPHDHQLSYVNGETKILSLERPLRFADFAARLAGLAGSPGDFCVKYQLPGEDLDALVSVTNDEDLEHLVLEYDRLHLLRPAPGSGGGSSRGGSTPRLRVFLFPVQSPTPPPPPQPSGLLEPKQEQRQWFVDALNSVHQPPPPSPPQPKQESVSVQSPPPAVVPMPQPPPVLPAPTGPDYLFGLDNGFVPPPAVKVKDPAGDPPTVKDNVPVEIPAKNDDRHTTNPVSDHVVVSPVVSPGEFQRQIQGLEKLQFADTAAQQPPPPPAPATAAPPPAALPRNGSDDSLTRAYPPATVTPTPPTATPEYYLPKYQEKPAAPPPSSAPPPTAFLPVPGRYTSVAPGSGADHAPVFFIPAPPHGYFTTAAGPGATSFPAVYAVAQHNGNANASGNGPSPAAASNAQAYAPQVAYDSNGHAIYYTSVLPQYASAVSGVPAAATVLGTDPAKPVAVKPTVS

SEQ ID NO: 187018 - protein, 724 aa, Oryza sativa
  Clone ID: PAT_MRT4530_83762C.1.pep
MNLKRQNFKWVFNKGFRTGGDIDHRGGSVSGFMGRLAGSDQGDCRVTSGKAEVRGSGSGWNEGGQSGAQQEATVQLRRLRCLMAAVADALAKLRTPTSCPPGRQPAEAAAREAGEAGIRAGGQRGGGAPWAAEQAANEVAALPGRAAEPEAAAGRHRPPRRQAAAEPEAARPEAGEAADGRHPISAMWRRRRRGAGCGRRDDGGVRRRRRRWPSLPPPLPLPVGLDGRPSLPLGDGRPYGSVDGDDGVCGIHSDEESPEAKAPLLTSSDDGQTMQPLAQATPSLVCKALNSTADLAKHLPTSVVLAFGVLSPSSTADGSCTAANRALTACLVGACALCCFLLCFSNSYRDGTGAVRYDFVTPSGRLRLIDGSGSLPPRDNRYRLGARDVLHGALSFAVFLAVAMVDHNVVAHFYPVESPATSIDGSGSGRGSGQQRSRNGLRLRRRSLGPSPPQPPRALPQPTAPPPCARALPGPPPLRPHAAVLKMLPAGATMARLSAMDAGARLSPIPSTSLRAAVRTDHRPAPARRCPSHPLADASAGAHLSTMACRRVQHCPLLTEEERERGMEEERKSAGRLSHHRRRFPSLLPPFLPVRRDDGGLRQRQRLSFPSRRHGAATAGCGGDSRPSPSIFLSLSPSASASSEGGSVDGGGHRGRFRQRRSLRRLSSPPAAMVVEDRASPSEQISQGDLPEPISPSILNVSTMANHLDQNRFRKDQSRLPEPI

SEQ ID NO: 187019 - protein, 216 aa, Oryza sativa
  unsure (1)..(216): unsure at all Xaa locations
  Clone ID: PAT_MRT4530_83763C.1.pep
MASRPTGADEETPEAKAPLLASSDDGQTTQATQASLVCKALNSTADLAKHLPTGAVLAFEVLSPSFTADGSCTAANRALTACLVGACALCCFLLCFTDSYRDATGSVRYGFXTPSGSLRLIDSGSGSGSPPPPPPRDDRYRLGARDVLHGALSFAVFLAVAMVDRNVVACFYPVESPATRQLLAAVPMAAGAAGSFLFAMFPSTRRGIGFPVAAGA

SEQ ID NO: 187020 - protein, 50 aa, Oryza sativa
  Clone ID: PAT_MRT4530_83764C.1.pep
SRPGSGRRPTSGPTPLGGGPRGIGGQPPPSSLWEGVAAALPRASVQSLGL

SEQ ID NO: 187021 - protein, 194 aa, Oryza sativa
  unsure (1)..(194): unsure at all Xaa locations
  Clone ID: PAT_MRT4530_83765C.1.pep
RIFPTQKLAIEVRGSPTYIRXLPFHNXCGTIQQSLPLHIGIPQPFTAPSPFPHGSSGIRALQAPTVHQNRKGSFTPQKLGIKVRGSPTYILGPLPFYNQCETIKQFVLMFALYYKISNKSGCALSWNGGSIRXTCTIYNLQLHYRYLLQQLVLLLLRTASWSAVSPLLFRLLANALAAASPATPPPPPLLARSR

SEQ ID NO: 187022 - protein, 68 aa, Oryza sativa
  Clone ID: PAT_MRT4530_83766C.1.pep
WFFFFFFFFFFFFFFFFFFFFFRNQGQLCSVLLKKRVQPVLLLMKGNFFFVSQDHSVVATRDSLIINE

SEQ ID NO: 187023 - protein, 108 aa, Oryza sativa
  Clone ID: PAT_MRT4530_83767C.1.pep
HCFHLSSSPRTRSQASLLTATSHENAYKRNSKSLISDPGTGNAKTSATNRHQSRHRHTQQSITIYSRKRESAPHHQSSEPNHARRAPERTMRLRTAVRENCVRRRPRA

SEQ ID NO: 187024 - protein, 491 aa, Oryza sativa
  unsure (1)..(491): unsure at all Xaa locations
  Clone ID: PAT_MRT4530_83768C.1.pep
MHTIKETELLATKLDLLMKCLDDHKKRPQGTAKALDSHVMYEVCGGMGHSGNDCPETCEEAMHMGNNSNGYRLQGGQGWNQTRPYYQGGNNNGNFCNQPSLKDLVFAQAKTTDALAQLASLVPANETRRIPGQPDSSIENVKAITTRGGKSTRDPPYPNPTGTNGMSKETPCNDSADKEIQPENTVPQEYCDTLLLPFPQRSRKPSVDKQFACFVEVIQKIHINVPSLDAMQVPTYARYLKDILKNKRPLPTTEVVKLTEHYSNIILHKLPEKKKDPGCPTITCSIEAQQFDQALCDLGASVSVMPKDVFDKLNFTVLTPTPMRLQLANSSVRYPAGIAEDVPVKIRDFFIPVDFVVLDMDTGKEKPLILGRPFLSTVGANIDVGTGSIRLHINGKEEKFEFQPRTEQCSMVRIKYGPNPQNIQEVKVEPPKTDSLXRYWRTPVKSPIPXKKLEQSAQKKPSSTPKSKKVWKEKPKTPAPLPPETGGKSMN

SEQ ID NO: 187025 - protein, 137 aa, Oryza sativa
  unsure (1)..(137): unsure at all Xaa locations
  Clone ID: PAT_MRT4530_83769C.1.pep
EKRPQGTVKALDSHITCEVCGGTGHSGNDCPEIREEAMYMGNNNNGYRPQGGQEWNQPRPYYQGAEXNKMIETQLAPLASLVPTNESGRIPGQPDSSIENVKAITTRGGKSTRDLPYPKPVGTNGMSKEAPSIDSFC

SEQ ID NO: 187026 - protein, 554 aa, Oryza sativa
  Clone ID: PAT_MRT4530_8376C.1.pep
MGPSSFQKLFRSVSWVRFKDFLQPQRKHADLGEDDGELQQTESFFLANLCKFANSQKLHVCTSKQKLHKWHKGQLKLYVYANHGESGGGDRVARERRGGDRGVRMRRGMGMVDATHADGRRWLLILVAREIATDTVGEVIYQTQRYTKLIEGHSAIDAHRALPLSAPAALALHSIRALPLSGPATLAPHLIRQLQQAATIGDRHKLLCSANRMSRPLFLRIMNAVEDHDDYFVQKRNAAGLIGFSCHQKVTAAMRQLAYGIAADALDEYLGIAESTAIESLRRFVKAVVQVFEHEYLRSPNENDTTRLLELGEDRGFPGMLGSIDCMHWKWKNCPTELHGMYQGHVHEPTIILEAVASKDLWIWHAFFGMPGSHNDINVLHRSPLFAKLAEGKAPEVNYSINGHDYMMGYYLADGIYPSWATFVKTIPEPHGNKRKYFAKAQEAVRKDVERAFGVLQARFAIVRGPARHWDEKTLGYIMKACVIMHNMIIEDEGEVDWEERFPEGGENVRVSHDEIPDLDDFIQMHKKIRDDETHYQLREDLVEHLWQHYPDKY

SEQ ID NO: 187027 - protein, 168 aa, Oryza sativa
  unsure (1)..(168): unsure at all Xaa locations
  Clone ID: PAT_MRT4530_83770C.1.pep
MPHGSRWNARTGGADRGRPVPTSAEXWRLRGCHAGRWEVDDDAGRNGRRTTAASGGANHGNTGESEHTGWLHETRGDEPTARIRRRKLDGGESRRRQPAGREEGNGDEVTRGRFPAVRASTRPRESDASVGLGGATPSEAGDERVLRSSCGDGGEHTAGDGNGRGGAG

SEQ ID NO: 187028 - protein, 142 aa, Oryza sativa
  Clone ID: PAT_MRT4530_83771C.1.pep
MANKSLREFAAPSADNVAIGPQINMGDVDFDLKSSLITMAQASPFCGKTNEDVNAHLQQFLEICSTYTIKGVSPDAVRLRLFPFSFLGRAKQYFCANRAAVNTWDKCSTTFLSKFFPMGKTNALRGRTSSFQQTRDESIPEA

SEQ ID NO: 187029 - protein, 465 aa, Oryza sativa
  unsure (1)..(465): unsure at all Xaa locations
  Clone ID: PAT_MRT4530_83772C.1.pep
TGLTVRGPGWDPLVSGLAHRAEGARGARARAGEGHGARARSAEERMRRAHAQPHGSRWNARTGGADRGWPVPTSAELAPTWRLRGCHAGRREVDDDAGRNGRRTTAASGGANHGDTGESEHTGWLHETRGDEPTARIRRRKLEGGESRRRQPAGREEGNGDEVTRGRFPAVRASTRPRESDASAGLDGATPSEAGDVRVLRSSSGEHAASDGNGEGXRSAVTAKAATXGGRRMTPAGGKKGKRGREKGACPLASSGKGGGSGGVAAEGGGRLCLRPLEASARAGAAEGDGGGDQAVGHSARVRGKQRXGAAGHARWLXRGRAAAGVAEQRGRATRXRRRRGSGGEPRGRARERRRAGAVFASGELARERRRRARGGGACARAGRARGKGGGRSARRSRTRARGARAGRSEAEGEGERERAGGGEGEREREREREGAPGRGREGDGPSEIRPIDPGXGKIDFCGGL

SEQ ID NO: 187030 - protein, 47 aa, Oryza sativa
  Clone ID: PAT_MRT4530_83773C.1.pep
HTLQVTKKPVALNNYPIDYMHVPFHVLHNLSAHQHLPAERTDTCIYL

SEQ ID NO: 187031 - protein, 464 aa, Oryza sativa
  unsure (1)..(464): unsure at all Xaa locations
  Clone ID: PAT_MRT4530_83774C.1.pep
MERSGRAKRTGRPKTAQARAREGXREGAGGPGSPRVVPGGTRLSAARLTVRREYAAYARRRGWDAAEVAPTWRLRGSHAGRREVDDDPAANGRRATAASGGASHGDTGESAHTGWLHRTRGDEPTARIRRRLLDGGGLWRRQPAAREEGNGDEATRGRFPAVRASTRLRELDASVGLGGTTPSEAGDERVLRSSGGDGGEHTASDGNEEEEGAPGVPFRVHERTGSPGAWRWTAEARQSTGAAATGGQAGELALRLASKAATGGDAGERGKRGGKEEKEGEKGGLPLCRFGKKGEGSGGDAAERGGAWPPFLGGLRAEWRWPGGDDGDDGGXFGAARRHGRQARAGXHRVTAAATRRSATRHARAGNNGRRPRGARASNGARGRLWERGARARGGXALGAGDSRARARGARAERRGXRERRSARLSHARAARGGKRXRGGERERERGEEMGRAEFGPSNPGEAN

SEQ ID NO: 187032 - protein, 487 aa, Oryza sativa
  unsure (1)..(487): unsure at all Xaa locations
  Clone ID: PAT_MRT4530_83775C.1.pep
MGRPVQGGLSARARXGGEREGRWTGLTVRGPGWDPLVSGSAHHVEGARGARARAGEGRGARARSAEEXDAAGPRAASRLAVERAHGRGXRGRPVPTSAELAPTWRLRGCHAGRREVDDDAGRNGRRTSAASGGANHGDTDESEHTRWLHETRGDEPTARIRRRKLDGGESRRRQPAGREEGNGDEVTRGRFPAVRASTRPRESDASVGLGGATPSEAGDERVLRSSSGDGGEHTASDGKEEGEGAAEVPFRVLARAGSSXHAQRRTATAKQRGGNGAVGGQRRGLALGGRGQSGDREEGXDDAGGREKGERGREKGACPLASSGKGGGKQGRRGRGRRARPPSLGGLRAEWRGRGDDDGDDGGAVWRARRHGRQARXARLRVTAAATRRSATRHARAGNNGRAPAGPGGEDAARARARTTRGERHRGGGKEGSARXRAAHAHARAERGEREGALGAAAHAHARAARGRGGAERRERGRGSAPGEGRG

SEQ ID NO: 187033 - protein, 122 aa, Oryza sativa
  Clone ID: PAT_MRT4530_83776C.1.pep
MALTVTTSWVASSDPVAATTMRGEEKRTYRNLASSRSASKRPLRLGAVARHGVGPSPRRLPNSGPYPCPRRLWPTSWLGEDGDERRKELTANVLERAIALHRLRRIKWHNHGPQAYEPVRAS

SEQ ID NO: 187034 - protein, 133 aa, Oryza sativa
  Clone ID: PAT_MRT4530_83777C.1.pep
MGEVDQRGRWAPQGVVLRLLGIIIWGYMLRMRCGPLMVTAQCGNSAVRGGFSNYQDGIGKGAPNEGYCYGKYPNYPPTIIGMKSGASTRKMAINGDRHGLAKLDQTDCDARISPRFGTALELSRSLRQLCSST

SEQ ID NO: 187035 - protein, 383 aa, Oryza sativa
  unsure (1)..(383): unsure at all Xaa locations
  Clone ID: PAT_MRT4530_83778C.1.pep
MGRPAQGGPXARARGRGGERGPVDRVHPAWSRVGPACQRLGSPCGGSTRRGARMGERRGARVRFAEDADAAGPRAASRLAVDHAHGGKRRERLPVAAEVAPTWRLRGSHAGRREVDDDAGRNGRRTTAASGGANHGDTGKSEHTGWLHETRGDEPTARIRRRELDGGELRRRQPAAREGXNGDEVTRGRFLAARASTGLRESVPCAGLGGAAPSEAGDERXLPSSGGDGGEHTASGGNGRGGAXSYGEATRATTRRGAVTRXANGAGVISPASGRGRGRRGRARSPLLRPRTHRLSRCLAMNGGGGTEHGRRRQRRGGGKXKRGGGIDGRAPWFIGXDVGLETDXGGQGASWSSALAAKTVTEADDAGGEGKRKRGREKRACL

SEQ ID NO: 187036 - protein, 303 aa, Oryza sativa
  Clone ID: PAT_MRT4530_83779C.1.pep
MAPTHRNIVLQLLGTINLSVLEEGVDIGIGERRSAAACEQAPHLMHEPYSADNGMEEDIGIGREGRMGSYGGCCSLVSSRTISGQPLHLCAGRHRQRRRDEDPGSTAITTRCATNSSNALSRMALTVTTSWVASSDPVAATTMRGEEKRTYRNLASSRSASKRPLRFGAVAQHGVGPSPRRLPNSGPYPCPRRLWPISWLGEDGDERRKELTADVWDPCEPHADSTKLTEVKAPHQMKPGAILPRDKKLIWFREFVDGLYLIMVHLMGFHWAGSLERAIALHRLRRIKWHNHGPQAYEPVRAS

SEQ ID NO: 187037 - protein, 153 aa, Oryza sativa
  Clone ID: PAT_MRT4530_8377C.1.pep
MWDLILRKNDIIVTNQNYCTKIESSHNKLATKSRLGSGLNSLMLNAIAERGGIDKNSYIAITGKKKPSTDYLPAKLKVEANHLIAASWQTPESNNRGAGVSPCCSPIDALPFRGLEDQCGSCTGKMKKYTSNKAFIESKTAILSHVIHLSLDA

SEQ ID NO: 187038 - protein, 88 aa, Oryza sativa
  Clone ID: PAT_MRT4530_83780C.1.pep
MRSSLEGERDWPSVASSSVGVSIFCRFARFLSFFSFTMANNDDSGCQHHSSFCSVSCCIIHCMMTMIRENLLHAPPLGRQHLPSSKHP

SEQ ID NO: 187039 - protein, 393 aa, Oryza sativa
  Clone ID: PAT_MRT4530_83781C.1.pep
MTQHAHAESRAVRPSTNLEGGEAIDRREAPPPPKEAAAEKVDGSPQPQPQAELRLRLPAEIDWDRLDKWRFFVLGAGLFSAVSTALYPAVVLKTRLQVAPSPAHAAASSLPPSAAAAATAILRSEGPLAFYRGFATSLAGTVPARALYMGALEATRSAVGPTALALGAPEPVASAAAGAPAGLAAAVAAQVVWTPVDVISQRLMVQGNPCPASRYRGGLDAFRKIVAADGLRGLYRGFGMSILTYAPSNAVWWATYSLSQKTIWSGIGCYLCEYGVGVQEIDAGEGDSSLQPGYKTVMVVQGVSAAMAGGASALVTMPLDTIKTRMQVMDGEGGEPITVGRTVRRLIKEGGWGACYRGLGPRWASMSLSATTMITTYEFLKRLSAKGHESSLP

SEQ ID NO: 187040 - protein, 71 aa, Oryza sativa
  Clone ID: PAT_MRT4530_83783C.1.pep
MLGQELIAARRPWGEAFRAPAFSKSPSVGEAIAKARWNTAYFRANYALVVAASSLLWHPGTLFALHALCTA

SEQ ID NO: 187041 - protein, 1029 aa, Oryza sativa
  Clone ID: PAT_MRT4530_83784C.1.pep
MASKTLREFAAPSADNVAIGPQVNIGDVDFDLKSNLITMAQASPFCGKPNEDANAHLQQFLEICSTYTIEGVRPDTDKYSTAFLSKFFPMGKTNALRGRISSFQQTRDESIPEAWERLQEHVAACPHHGMVDWLILQNFYNGLTPMSRDHLDAAAGGAFFSKTVQGAVELIEKMVSNMGWSEERLQTRQRGMLTVTETELLAAKLDLVMKRLDDHEKGPQGTVKAMDSHVTCEVCGGTGHSRNDCPETREETMYMGNNNGYRPQEGNNNDNLSNQPSLKDLIFAQAKTTDALSKNLAANDKILENINVKLDGFASAFQNQSSFNKMIETQLAQLASLVPANETGRIPGQPDSSIENVKAITTRGGKSTRDPPYPNPAGTNGMSKEAPSNDSAYKEIQPNKTVPLEYYNTRLLPFPQRSRKPSVDEQFARFVEVIQKIHINVPLLDAMQVPTYARYLKDILNNKRPLPTTEVVKLTEQCSNVILHMLLEKKKDPGCATITCLIGAQQFDQALCDLGASVSVMPKDVFDKLNFTMLEPTPMRLQLVDSSVRYPAGIAEDVPDKIRDSFIPVDFVVLDMDTGKKTPLILGRPFLSTAGANIDVGMGSICFHINGKEEKFEFQPRTEQCSMVRIKYGPNPQNIQEVKVEPPKTDSLVKFMQNFLEKETTIPRNRYWRTPVKSPVSAKKLEQPAQKKPPSAPKPKKVWKEKPKMPAPSPPETEIEDGISFRFFHEEFTFTWKGLSTFLGFHDSCKIDLQKGISGFEKNRFWEDISGAPICKKPRTNDILNPTLRLMHKWIAMTLFPRAKGLGVVSDQIAFILAARPRIDEAYLVLAHILKHGADGSLIYFFPGCTNEIPLPNAGYHLYNCHELTIPLQTIEESRAGGTFREMHNMTRNEREISLSSTPVQMYEAGWTPTGDAPGWTQAPRRSIGVSTWASASEDRWHAPHDIQRGDNQPPRSSDVSSSPSEWRSSSSRWDLGEITRRMDTLDVQTGEIQYNLTEHMAQTQEWQQSADAQFANINNMMQQQHDNL

SEQ ID NO: 187042 - protein, 82 aa, Oryza sativa
  Clone ID: PAT_MRT4530_83785C.1.pep
MRAGIIQVRAATERNTLLLCVRFRVECYKGSSTLGRTLTLLPLGLRLTESRPPFSVGRNVGALRRPIGCDRPQTGHNPVMPD

SEQ ID NO: 187043 - protein, 139 aa, Oryza sativa
  unsure (1)..(139): unsure at all Xaa locations
  Clone ID: PAT_MRT4530_83786C.1.pep
MTSAMTSPPAAAARXGSGAHARRRTAALRHERRAPTGSGRHGELTGDQSDGGRGTDGDDDEEEAAAEIGSTAATVLRXSSATAKGRMRTAATWRPRRRSSXAMTMTETAAAHGWSDGGARAHGARALRTTRGEGEGGGG

SEQ ID NO: 187044 - protein, 79 aa, Oryza sativa
  Clone ID: PAT_MRT4530_83787C.1.pep
MAGCCVFLRWPSTLPSVLGYRFLDDSKVAGLSSPVVTVVVEKECYPSRLLLETAVRKDESKATLFVNVTILFLSVLCAK

SEQ ID NO: 187045 - protein, 74 aa, Oryza sativa
  Clone ID: PAT_MRT4530_83788C.1.pep
MAVKANTTGVVSFSLVLKPSRGDFVVRKWFDSAGGGDDSAVTTWGTRVLPAPTLDPPLATNTAMAQEEEGGTGS

SEQ ID NO: 187046 - protein, 492 aa, Oryza sativa
  unsure (1)..(492): unsure at all Xaa locations
  Clone ID: PAT_MRT4530_83789C.1.pep
MDAVAGAGQLVGLAAATLLTAAFLVAVKMGWRRRRRQREVAPEGNDRVVGGDGGDRTDIVIVGAGVAGSALAYTLGKDGRRVHVIERDMTEPDRIVGELLQPGGYLKLMELGLEDCVEEIDAQRVLGYXLLKDGRNTKLSYPLEKFHSDVAGRSFHNGRFIQKMRQKAXSLPNVHLEQGTVTSLLEEGGXVKGVQYKTKXGEELKALAPLTFVCDGCFSNLRRVLCSPKXTEIRCLVDIPGQKVPSMATGEMAKYLKTVVAPQIPPELHDSFIAAIDKGSIRTMPNRSMPAAPLPTPGALLMGDAFNMRHPLTGGGMTVAFSDIVVLRNLLKPLGNLHDAPSLCKYLESFYTLRKPVASTINTLAGALYKVFCASTDQAKNEMREACFDYLSLGGVFSNGPIALLSGLNPRPLSLVAHFFAVAIYGVGRLMLPVPSPKRMWIGARLVSGACGIIFPIIKAEGEHRVSRTAKRAWAEVTVGLKTTLGGGKMRD

SEQ ID NO: 187047 - protein, 51 aa, Oryza sativa
  Clone ID: PAT_MRT4530_8378C.1.pep
MTGFGQQERDDIVDNNNGLGDLLSSSAGPKVDEMRACQLGAYTYKIKVSKP

SEQ ID NO: 187048 - protein, 167 aa, Oryza sativa
  unsure (1)..(167): unsure at all Xaa locations
  Clone ID: PAT_MRT4530_83790C.1.pep
MTVAFSDIVVXRNLLKPLGNLHDAPSLCKYLESFYTLRKPVASTINTLAGALYKVFCASTDQAKNEMREACFDYLSLGGVFSNGPIALLSGLNPRPLSLVAHFFAVAIYGVGRLMLPVPSPKRMWIGARLVSGACGIIFPIIKAEGVRQMFFPATVPAYYRAPPPME

SEQ ID NO: 187049 - protein, 157 aa, Oryza sativa
  Clone ID: PAT_MRT4530_83791C.1.pep
KYKLNDCMMLESTVTRAQVPPRFPSLQFSSSTLQINKNIIAYAHINNKKAHHISRSQEQANHIPDQNNSHRSKSSAIPNHYMPNISDSPSQWMWICCRRHRFPCCLSPSSRRYHHLLPARPHQPPSACEVIHDSEVGCGWIQRAPTSRRSDPTVPDL

SEQ ID NO: 187050 - protein, 239 aa, Oryza sativa
  unsure (1)..(239): unsure at all Xaa locations
  Clone ID: PAT_MRT4530_83792C.1.pep
TRPLLQPGGYLKLMELGLEDCVEEIDAQRVLGYALLKDGRNTKLSYPLEKFHSDVAGRSFHNGRFIQKMRQKAASLPNVHLEQGTVTSLLEEGGTVKGVQYKTKSGEELKAYAPLTIVCDGCFSNLRRVLCSPKVDVPSCFVGLVLENCQLPHPNHGHVILANPSPILCYPISSTEIRWLVDIPGQKVPXMATGEMAKYLKTVVAPXIPSELHDSFIXXIDKGSIRTMPIGSMPVGPFQ

SEQ ID NO: 187051 - protein, 75 aa, Oryza sativa
  unsure (1)..(75): unsure at all Xaa locations
  Clone ID: PAT_MRT4530_83793C.1.pep
PGRPGRLLYQPRPLGSRRDQPRPPDRXPLSPPAAAPHRRGGRPPRPQSRRPPTRRRVRSPLPPRRARPVVASSCR

SEQ ID NO: 187052 - protein, 634 aa, Oryza sativa
  Clone ID: PAT_MRT4530_83794C.1.pep
MKERLDVYIYDYLVKRNMHNTAKAFMTEGKVATDPIKSREQQMRLQLLQQQQNAHQQRRDPPLNAAMDALNSDVSAVLASKMMQDRMRNPNPTDSDASHQLLDANRIALLKPATNQTGQLVQGASVNMSALQQIHSRNQQPVIPFHLLKLHWFMYRLSLLTLCPTIFKDMKGDAAMSQRSMPTDPSTLYGSGMMQPKSGLVSTGLNQGVGSVPLKGWPLTKSLPTSCLLKVPGIDQLRSNLGVQKQLMASPNQFQLLSPQQQLIAQAQSQNDLARMGSPAPSGSPKVRPDESDYMMKLKMAQMQQPSGHRLMELQQQQQQLQQDNLDSFVDFDENVDSFLSNDDGDGRDIFASLKKGSSEQDSLKGLSLSEFGNNRTSNNKVVCCHFSTDGKLLASAGHEKKVFLWNMDNLNMDTKIEEHTNFITDIRFKPNSTQLATSSSDGTVRLWNAIEIFTRNLQRFYALVTTMEKFVSGKLVKMKQGGTGRVRFQPQIGQLLAVATGSIVNIVDVEKEASLHSLPKVHTNEVNCICWDEKGERVASVSQDTVKVWSVASGACIHELRSHGNQYQSCIFHPRYPNVLIVGGYQTMELWSLSDNHRNTVQAHEGLIAALAHSQFTGMIASASHDRSVKLWK

SEQ ID NO: 187053 - protein, 69 aa, Oryza sativa
  Clone ID: PAT_MRT4530_83795C.1.pep
YLSTVTYSIESGMVFTIHKKRNLPASTVFRHCMVYECLLSKKISPLFVWLFIGWSFLLQILVPIPAARG

SEQ ID NO: 187054 - protein, 280 aa, Oryza sativa
  Clone ID: PAT_MRT4530_83796C.1.pep
MSFQDLEAGNARGLPRRGGGGRAGAAAAGAGASQAVASGVFQINTAVSTFQRLVNTLGTPKDTPDLRERIHKTRQHITQLVKDTSEKLKQASEADHRVEVSASKKIADAKLAKDFQAVLKEFQKAQRLAVEREAAYAPFISQAGLPQSYNSSEVNNGADKLAEQRTALLESRRQELVFLDNEIVFNEAVIEERDQGIQEIQHQITEVNEIFKDLAVLVHDQGQMIDDIDTHIENAVIATTQAKGQLSKAAKTQKSNSSLICLLLVIFGVVLLIVIIVLAA

SEQ ID NO: 187055 - protein, 174 aa, Oryza sativa
  unsure (1)..(174): unsure at all Xaa locations
  Clone ID: PAT_MRT4530_83797C.1.pep
TRDEVPNVPLWNPVLFQLPSXEILLFYKVGKTVESWSGCMKCSSDGGVIWSKREQLPPGILGPIKNKPFLLKDGHLLCGTSVESWNSWGAWLEVTKDHGKTWKKYGPIYVRGKTMGVIQPVLYQTSSGTIRMLLRPSDEVGRICVAESKDSGVNWSYAQPTELPKPNSGIDGVK

SEQ ID NO: 187056 - protein, 376 aa, Oryza sativa
  Clone ID: PAT_MRT4530_83798C.1.pep
MARKTFHEFAAPFADNVPVGPEVSMGDGDFDMKTSLITMVQASSFCAIPGNLQHGVTPDTIRLRPFLFFLLRRAKQWFYANRATVNTRNKCSTAFLSKFFPMGKTNALRGRISSFQQTRDETAPEAWERLQEYVVTYPHHGMDKRLILQTRNDSKPINGTEMLAAQLDLLMKRMDNDKKDTKQGAVKALNSYMTCEVCGNDGHSGTDRPKTRKDVMKPRMEHCSMGRIKYGPNPQNFKEVKLQPRRTDSLIDFMMNFSEREEKRNRQHLRLASKKPGTQACQPSFLVTKRSSSAPKIKKVWQVKEKTLFLYLRNRVPRQAEMLEVRSCSLDLKQRHPCQQVWKFDLEKGHVNVVSGADIEETVQAHANNLSKLGMQ

SEQ ID NO: 187057 - protein, 100 aa, Oryza sativa
  Clone ID: PAT_MRT4530_83799C.1.pep
LQHKGRHCLHCAVCRHSQVFKRTRHLLSLSTVLAILSLAPVLISFHPPFSWAPCELSSALFASVGLVWFGCFFSASTVGRLQCKKASAAIAPPVEFFVVV

SEQ ID NO: 187058 - protein, 71 aa, Oryza sativa
  Clone ID: PAT_MRT4530_8379C.1.pep
MRSRDSGWQRPSRGRQGHTALVGNDLRKEDAKEANRRRRRWRCVRRGEAKSVTPSSIADGGRMGEVVQMTA

SEQ ID NO: 187059 - protein, 336 aa, Oryza sativa
  Clone ID: PAT_MRT4530_837C.1.pep
MTRGPPPRGVRPEVGWRPLPSRDWTEEAAPNTTWPSESLQICTTIIEMAGGDDQVMASFFPMTLRGQARGWLMNLLPASASQDGSEPMVGGSLRAKGLKGRDMQASRAPPSLRSSSSLGKATVGIAKSSPSPSAPSPPSKIAGAPSPPSTRSPPPLLPRRRRRLLLFRRGFGHRGTPRVRRQDLTGLIIKMTCACFPSQETRHAFNAKIEGGLEPLMINTFYPNKEILGLNPSKSHSFTHRILESHPLPPAELTKRGLTVPWWRSSFSDRGRVIQAQKHKLFVTRRRNEQPSCKPDPTPRPAPPAIFESFEALAVFATLLTSRSRAMDFTRPFNIW

SEQ ID NO: 187060 - protein, 414 aa, Oryza sativa
  Clone ID: PAT_MRT4530_83800C.1.pep
MTMMGCAVLLVVVASMAGEAAGRFVVEKNSLRVTSPAGLRGVYECAIGNFGMPQYGGTMHGVVVYPKANKKACRSFDDFDLSFKPKPGGLPIFLLVDRGDCYFTTKGWNAQTAGAAAVLVADDRLEPLITMDSPESSGTDYIEKITVPSALVTKKFGDDLKKALENGDMVNVLLDWRESLPHPDERVEYEFWTNSNDECGAKCDMQMNFVRNFRGTAQVLEKRGYTQFTPHYITWYCPEAFVLSKQCRSQCINHGRYCAPDPEQDFNIGYDGKDVVLQNLIQICLFKVGNETHKPWVWWDYVHDFSIRCPMKEKKYTRECANGVIKSLGLDLERINKCVGDPEADEENPVLKAEQDAQIGQGSRGDVTILPTLVVNNKQYRGKLEKSAVLKAVCSGFEETTEPDVCLSQGYKTF

SEQ ID NO: 187061 - protein, 492 aa, Oryza sativa
  unsure (1)..(492): unsure at all Xaa locations
  Clone ID: PAT_MRT4530_83801C.1.pep
RAKWVGRPKLARAREGGEREPVDRAQHARSLVGPACQRLGSPCGGSMRRTRAGGVGTRCMRAVRGGRRCDGPTRSLTACGGTRARGGTDRGRLDPVXAELAPTWRLRGCHAGRREVDDDPAANGRRAAAASGGANHGDTGKSEHTGRLFVTGGGEPTARIRRRSLDGGGLRRRQPAAEEKGNGDEATRGRFPAVRASTRLRELDASVGLGGTMPSEAGDERXYGARAATAASTWRARATXEGEGAAEVPFRVLECTGSPGARRRTAEVRQSTGRRLWRGDEWKRRGKGRPGPNXATRRMTPAGRKRGKERGKRGLXPLPIWVRGGGXAGATRQREGGXCLRPLAACARSGGGRAMTTAMTAGGLERSGDTGGRRGQALTTVATGRSATRHARAGGTGRHPRGRARATARGERQRGMGRRRARGRSARRHTRGGTRRGGAERRERGARGDSRTREQRAGEAEREREREIEREPGREREMGRAEFGPSNPGGGK

SEQ ID NO: 187062 - protein, 152 aa, Oryza sativa
  Clone ID: PAT_MRT4530_83802C.1.pep
SQERQLLPAGGGAHASASIKSLATRGPCGRRCCPAGLTSLSPAPGRGAFSQEEEDLIIHLHSMLGNKWSQIAAQLPGRTDNEVKNFWNSYIKKKLRQRGIDPATHKPLKWSDYVFDGYNHQLPPYNHGGIYGGGDSKDTAVHFDAHALGNWC

SEQ ID NO: 187063 - protein, 486 aa, Oryza sativa
  Clone ID: PAT_MRT4530_83803C.1.pep
MPCSAADARHARKMFTEIIFPRFGTPRMVISDGGSHFIDKTFRDLLREMRAKHNVATPYHPQTSGQAETSNKQIKNILQNMVNKMGTGWKDRLSDALWAYRTAYKTPIGMSPYQIVYETAYKTPIGMSPYQIVYGKSCRLPVELEHRAYWAIRNWNMDFEGAGEWRKMQIAELEEWREKAYHNAKIYKERTKRWHEKRIKIKKFKPGDKVLMFNSRVKLFGHGKLRSKWEGPFDVIDTSSHGAITLRDDSGNIFKARRLFQDDGKATPPPAERYVGTLFTKAGDEGVRTPGGGNGKGLLRPLTASEKKGAAESRSPPPMKDQTDWHARISPTFEPALELSRSPRLMSHLNSGFALYRHYNSLSPEYQAQPKGIVYHTSLKITSSRCSKVACLARDLELDPRNPRTAAARLTVRREHATHARGRGRDAVHARGPRWTQVRRAHAQPHGSRWIARTRREGLTGVGSTRSWPSWRRRGAYVAATRAGGR

SEQ ID NO: 187064 - protein, 342 aa, Oryza sativa
  Clone ID: PAT_MRT4530_83804C.1.pep
MAKRAGGARKKLRRGLWSPEEDEKLMNHIAKYGHGCWSSVPKLAGLERCGKSCRLRWINYLRPDLKRGAFSQEEEDLIIHLHSMLGNKWSQIAAQLPGRTDNEVKNFWNSYIKKKLRQRGIDPATHKPLAEVVAAAACARTPAVFSDAELILSSIGAQPPPESYDGSRYSTECGAASVGGDGSLSSLSGYSQATAEFAVDGASASALLHCGGGGPTSSGGGAPPAPTAAVIPSVSSSSTLNSMVGLSPAATTTTTTTDEQYGNTNHLPWLELGPSTTTPSSSAAAATFDHYGAALDELKWSDYVFDGYNHQLPPYNHGGIYGGGDSKDTAVHFDAHALGNWC

SEQ ID NO: 187065 - protein, 79 aa, Oryza sativa
  Clone ID: PAT_MRT4530_83805C.1.pep
MAATALSTQVRLAMSLRVANGPAPARVSVLPASNKLGDKLGMQATFNVEVITPDREVELQVPDHLCILDQAEEGGIDLA

SEQ ID NO: 187066 - protein, 377 aa, Oryza sativa
  Clone ID: PAT_MRT4530_83806C.1.pep
MGQEHRNNTTHWAKIHKSAEKNNGEGRQPKLGWIGPAPGQCMTGFNLPENFKEIPEAFFRSVRTRVVAPQKTLPTEKPVVPAPPTFKTMASKTLREFAAPSADNVAIGQQVNIGDVDFDLKSSLITMAQARPFCGKPNEDANAHLQQFLEICSTYTIKGVSPDAVRLQLFPFSLLGRAKQWFYANRAFINTWDKCSTAFLSKFFPMGKTNALRGRISSFQQTRDESIPEAWERLQEYVAACPHHGMDDWLILQNFYNGLTPVSHDHLDTVARRAFLSKTVQGAIELIEKIVSNMGWSEERLQYALSKKLAANDKILENINVKLDGFTSAFQNQLSFNQMIETQLAQLASLVPANDTGRIPGQPNSSVENVKAITTRG

SEQ ID NO: 187067 - protein, 591 aa, Oryza sativa
  Clone ID: PAT_MRT4530_83807C.1.pep
MAMVVASVMWAYRWSHPRANGRLPPGSLGLPLLGETLQFFAPNTTCDISPFVKERLNRYGSIFKTSVVGRPVVVTADPEMNYYVFQQEGKLFESWYPDTFTEIFGRDNVGSLHGFMYKYLKSLVLRLYGQENLRAVLLDETDRACRTSLASWAAQPSVELKDSISAMIFDLTAKKLISYEPSKSSENLRKNFVAFIRGLISFPVDIPGTAYHECMKGRRNAMKVLKKMMRERMEEPGRQCEDFFDVLIEELGREKPVLTEGIALDLMFVLLFASFETTSLALTLGVRLLAENPTVLDALTEEHEAIVRGRKEGCDAAGLTWADYKSMTFTSQVTLEMVRLANIVPGIFRKALQDIEFKGYTIPAGWGVMDKVEITGGSKHFMAFGGGLRFCVGTDLSKAAWTPVRRRGAASHAQSEPTAAAAAGGSPSAPNAPISYAAAGCSSRLFSTALNYHLDSPENNSDMPWESKEANMKKGEAELVRRGGAPAAGRERRRGAGGVRPAGRVRGGARSSQFPLLRSEHRRHEDELCREPPAGVLRLPPPLRPDHSRRKESCREPPAGALRPEQRRREDGPRHKPPAGAFRLAIAAPPL

SEQ ID NO: 187068 - protein, 165 aa, Oryza sativa
  Clone ID: PAT_MRT4530_83808C.1.pep
RLFGAGSCAFDNAFAAALALAVGTPAQEGEARARGNRANPATLYFLVIFSLYFALEKSLTSEREGARLPSSKACGKRQAKTHAKGEKNTKPKGREGLAGASLSPLRRSSAAGFAFASAAGALVASVDNFADDGFIRSHAGYHRDSLDLAPSYPVRTPTKKPTIMA

SEQ ID NO: 187069 - protein, 133 aa, Oryza sativa
  Clone ID: PAT_MRT4530_83809C.1.pep
MSVWKPTLGGQASELALRLAAKSATGRREDDAGGRKEKGKRRERKGACPLPLWEKEEGSGGDAAEGGGALPPSLGSLRTEWRGPGDDDGDDGGAVWSGATTRAAGAAEADGGGDQAVGHHGTRARQTTSGAAV

SEQ ID NO: 187070 - protein, 102 aa, Oryza sativa
  Clone ID: PAT_MRT4530_8380C.1.pep
CMHTMGKSPALPLYYLLITLLAFYFLIVPSNAIPLSRVQRLHLQESSEMPLVRGSTAKPKMEMERPVVALEEDAMINARMALETQDYAPSGPNNHHKPPGWS

SEQ ID NO: 187071 - protein, 413 aa, Oryza sativa
  unsure (1)..(413): unsure at all Xaa locations
  Clone ID: PAT_MRT4530_83810C.1.pep
MRGPGLTARGGTRARGGTDRGRPVPTSAGLAPTWRLRGCHVGWREVDDDPAANGRRATAASGGANHGDTGNDEHTGRLHVTREGEPTARIRRRLLDGGGMRRRQPAAGEEGNDDEVTRGRFPAVRASSPPRELDASVGLGGATPSEAGDVRVLRSSGGDGSEHTASDGNGGGNVGLETDLRGQGRELALGGRGQSGDRGDDAGEEEKGEKKGRKGXVPCRFEKGGGSGSVAAEGGGALPPFLGSLRXWRGQAVTTAMTXGRIGAARRHRRQTRAEADGGGDWAVGHHGTRARLATEGAADGVAWLGHARWLXGPSGCAAAGTGRAAGPGXADATRRRPHGRAQRTSAGSGVGGLRLGAAGSRARAQAERRGRETAWLSRLTAAQRARATSARASSACPHPRLPAAILDAAVLV

SEQ ID NO: 187072 - protein, 143 aa, Oryza sativa
  unsure (1)..(143): unsure at all Xaa locations
  Clone ID: PAT_MRT4530_83811C.1.pep
NLCRGGTLYPHDVTSLGHPARISKADTGLPYANERGPRPTTGXVPDHTVPGSPGVLPDTTPLNPHVSWHQGSLDXLFTQSGVSHSTRVVALXVCSDVIPXRNRSLDATAQVFRPDFKFEGDRRYSHRVHKYRGATRWLQGNMI

SEQ ID NO: 187073 - protein, 457 aa, Oryza sativa
  unsure (1)..(457): unsure at all Xaa locations
  Clone ID: PAT_MRT4530_83812C.1.pep
MGRPAQGGPTRAREGGEREPVDRAHLAWSRVGPACRXHGSPCGASTRRTRAGGGGTRCTRAVRGGHGCSGPTRSLTARGGTRAQGGADRGRLDPVLAELAPTWRLRGCHAGRREVDDDASRNGRRTTAASGGANHGDTGESEHTGWSHRTGGDQPMARIRRRECVGGGLRRRQPAAREGGNGDEVTRGQFPTARASTRLRESDASVGLGGAAPSEAGDERRFRAWAATAASTRRAAATVGAAPASYGEATRTTVRAGAVTRGRRRGSNLSGLGAGKRKERARPESPSASLLVPAPPTRATTNSDGEQSTGGGXQWRGGEWERKGKGEAWVYRSSNRVEWRGPGDDDGDDGGGGLSGAARARALVRGAERLRGRAAGPGGADGAGAARAATMRLSRTRGQSEGGAXRRGSRARTRGARVEQRGEGERERERRGGRGRWAERDSAHRTRGRQNRLLRRN

SEQ ID NO: 187074 - protein, 53 aa, Oryza sativa
  Clone ID: PAT_MRT4530_83813C.1.pep
MRVTVISTSPVKRQEALERLGADGFIVSTNASEMKFYINRVVIWKDILLMQMQ

SEQ ID NO: 187075 - protein, 643 aa, Oryza sativa
  unsure (1)..(643): unsure at all Xaa locations
  Clone ID: PAT_MRT4530_83814C.1.pep
VKLRAHLNVPFLDAMQVPTYARYLKVILNNKRPLPTTEVVKLTEHCSNLILHKLQEKKKDPGCPTITCSIGAQQFVHALCDLGASVSVMPKNVFDKLNFMVLAPTPMCLQLADSSVRYPAGIVEDVPVKIRNFFIPVDFVVLDMDMGKETPLILGRPFLSTAGANSDXHSRGRSGATQDGXPGKVHAELPGKGNNNAQEPLLEDAXGVEGKAKDARSITSGDGWKIRELNRKEGSGSLSSRHDESSTRSSADASMENADAPRQLLSDTDLDLVSDRERQAYYILSDREYAHTREYSPELLKKIGLDVEFRSIWKAVGWQRFAVVDESGSRLLTLQFLCTLKEIEDGISFRLFXRKEFTLTXKGLSTLLVFHDSFKIDLQKGISWFKKNRFWEDISGAPICKKPRTNDIHNPALRLMHKWIAMTLFPRMQGHILKHGVDGSLIYFFPGCTNEIPLPNAGYHLYNCHELTIPLQTVEESRADGTYRETRKMTRNEQGSSSPSTPVQMYEAGWAPTGDAPGWTQAPRHSIGVSTWSSASEDRWHAPDDIHWGDNQPPRSSGVPPCPSEWGSSSSHCNLGEITRRMDTLDMQTGEIQYDLMEHIAQTQEWQQSADAQFTNINNMMQQQHDDLQAYFCFQGFNPYQGP

SEQ ID NO: 187076 - protein, 454 aa, Oryza sativa
  unsure (1)..(454): unsure at all Xaa locations
  Clone ID: PAT_MRT4530_83815C.1.pep
GRPAQDGPRRAYAREGGERXRWTGLTTRGPGWDPLVSGSAHRAEGARGAALGCGGPTRSLTARGGTRARGGTDRGRPVPTSAELAPTWRLRGCHVGWREVDDDAGRNGRRTTAASGGANHGDTGKSEHTGRLFVMRGDEPTARICRGLLDGGGLRRRQPAAGEGGNGDEVTRGXFPAARASTRLRKSDASVGLGGTTPSEAGDERXLPSSGGDGGEHTASDGNGRELALGGRGQSGDREDDAGEEEKGERRGRKGXLSFCRFGKKEEGSGGDVAEGGGXLPPSLGGLRAEWRGRLQREAMTXGRFGAARRHGRQTRAEADGGGDRAVGHXGTRARLATGGAADGVARLGRGRLTRTRTRRAGSGSGEAGRRARLGAGGARARAERRGAGRGSRACARHAREGHSARRRALARAARGGAEGERERGKGWGRGEDGPRENRPIDPGGGKLDFCGGI

SEQ ID NO: 187077 - protein, 152 aa, Oryza sativa
  Clone ID: PAT_MRT4530_83816C.1.pep
DDATAAATGSRHHLFHANNANFVLQSCKPLLGDEWAAARESIVERHVAGYAEACWAPVVACLEPAGRKPAAKVVAKFSAAFDRAYESQARCEVRDPALRDALRRAVSDKVVTAYGVYLKTHPKLEKKLRYTAGELGERLSELFEGEAAEHNK

SEQ ID NO: 187078 - protein, 158 aa, Oryza sativa
  unsure (1)..(158): unsure at all Xaa locations
  Clone ID: PAT_MRT4530_83817C.1.pep
FFFFFYNXMRIXQNCNSMALVQDQQFTQQDPHISAISSKQNRCXQFIPQEITRKHAQCPLHLHHRGCTHTHPLASFCSPHTHSSTSSVIPPYFTTRRLQLLRCTSGNLHCPNHLKKLGRPSQLYSCLSICNSCLSYKFCTQCCYDQNWLQYTVDNKQI

SEQ ID NO: 187079 - protein, 243 aa, Oryza sativa
  Clone ID: PAT_MRT4530_83818C.1.pep
MAEELKLLGSLSGVSPYVIRAQMALAVKGLAHDYLPEDLTRKSKLLLDSNPVHKSVPVLIHNGKPVCDSLVIVEYVDEAFPGGAAALLPADPYHRAVARFWAAFIDSKVFPPCLAILKTAAAEAEEEKAAKVKETVEALQLVEGAFGECSKRKPFFGGDAVGYLDVVLGCYLCWFEGVSEIAGGVSPPLLDASRTPQLAAWAARFRSAADAVGCSVPRVDKVEAYLNNVLKPKWSAAAAASSH

SEQ ID NO: 187080 - protein, 375 aa, Oryza sativa
  unsure (1)..(375): unsure at all Xaa locations
  Clone ID: PAT_MRT4530_83819C.1.pep
TARGGGGGGGVGEGERAGGSGXSAAAAARRGGGGACGGEGGEGGADSRETGGDGQEVGKARREARSSAGQGGFVARIAGASSSRTDPLLKDLKQEFALKDLGDLHYFLGIEVNKVRDGILLTREKYGSDLLKRAGISSCKPVATLICTTEKLSVHSGSTLWEHDATXYRSIVGALQYLTLTRPDISFAINKVCQFLHNPTTQHWMTVKRILRYIIKSSVGLGLKINISPSTLVSAFSDADWAGSVDDRRSTSGFAVILGSNLVSWSARKQATVSRSSTXAKYKAVTNATTEVMWVQTLLKEIGVQVPSAAMLWCDNLGATYLSVNPVFHARTKHIEVDYHFIRERVARKQLEINFISYDDQVADGFTKPISVQRF

SEQ ID NO: 187081 - protein, 43 aa, Oryza sativa
  unsure (1)..(43): unsure at all Xaa locations
  Clone ID: PAT_MRT4530_8381C.1.pep
RXHCLGQRPRTREAYPQVPEMRDPEEPVMLFTRPIDPDKLKMA

SEQ ID NO: 187082 - protein, 359 aa, Oryza sativa
  Clone ID: PAT_MRT4530_83820C.1.pep
MIQELLGGTTMDQLKGASALNHASLPVVLQPIVSNPSPTSSSSTSSRSSAQATQQRSSSATSSPHGQGQGGGAAEQAPLRCPRCNSSNTKFCYYNNYNLTQPRHFCKTCRRYWTKGGALRNVPIGGGCRKPRPMPAPVAKPPMSCKAAPPLGLGGGPVSWASGQQAATAHLMALLNSARGVQGHGGSNVHRLLGLDTMGHLQILPGAPNGAGAGTAASLWPQSAPRPVTPPPPHMDSQLGMGTLGHHDVLSSLGLKLPSSASSSPAASYYSDQLHAVVSNAGRPQAPYDVATASLPCTTAVTSLPSALSSVSAAAPTSNTVGMDLPPVSLAAPEMQYWNGPAAMSVPWPDLPTPNGAFP

SEQ ID NO: 187083 - protein, 128 aa, Oryza sativa
  Clone ID: PAT_MRT4530_83821C.1.pep
MATARIGEEEVEAEAVRPCVRRGGGATQVRRGGGGRLGFWCGVATSAPFIPEPTIARLRKGYGDIPYFHHGNGSAIMVHLDNGSDIMEEDMNPLLTSPNQFIPEGIEEEMACARFRRGSSEAGGKELV

SEQ ID NO: 187084 - protein, 107 aa, Oryza sativa
  unsure (1)..(107): unsure at all Xaa locations
  Clone ID: PAT_MRT4530_83822C.1.pep
GRQAIFCTQDKGPGRKDKSNXFHRMSNTDASTSRNSLGRPYDNNNQTGYALKKARPSDDTASASGKKEPSAXYKDXEPLSHRLKRXEXSKRSPLQRNTKRRELDLYR

SEQ ID NO: 187085 - protein, 171 aa, Oryza sativa
  unsure (1)..(171): unsure at all Xaa locations
  Clone ID: PAT_MRT4530_83823C.1.pep
FFFFFKYINEHSGTKKNHIVFIEVVYQHILPYQLGETILIIIHWIHLSNPGVHFGIKINLTRHIDIANVCIDKDFRVDAMFPSNHFITASVIQLIVRMHNLYPLILTVNERISHGRTTSACRAFPRLHNNGGEGLDDASAAATEVLEDVLGRARVVEDCDRAIVNGXXDVR

SEQ ID NO: 187086 - protein, 69 aa, Oryza sativa
  Clone ID: PAT_MRT4530_83824C.1.pep
MATEIPHTHTRVGDGYPSGARGVELRQRWMIGCVGSRRGGSGHRGKEAATLRQRRFKAAPLILNLDQIQ

SEQ ID NO: 187087 - protein, 220 aa, Oryza sativa
  Clone ID: PAT_MRT4530_83825C.1.pep
MAAASPPLLPTTVLPANTTATVSPAPTSVSSADAKPAATRAFLARLLDSVKRALSGARPWPELIDRSALSHSESLSDSGARLRKNLAYFRVNYAAIVALSLAASLLAHPFSLAALLALLAAWCFLYLLRPSDAPPLAAFGRTFSDRETLGGLIVASAFVIFLTSVGSLIFSALALGAAIVCAHGAFRIPEDLFLDEPDQANGAASVNLLSFITSATGGRV

SEQ ID NO: 187088 - protein, 51 aa, Oryza sativa
  Clone ID: PAT_MRT4530_83826C.1.pep
MNVTWASLAASCVGENPSLRPSMASMVRPMKQAAHPSISGVFMRYAVQGKL

SEQ ID NO: 187089 - protein, 33 aa, Oryza sativa
  Clone ID: PAT_MRT4530_83827C.1.pep
VIVLCTVIKERILISSSLTTLSMTTTWIENDYY

SEQ ID NO: 187090 - protein, 127 aa, Oryza sativa
  unsure (1)..(127): unsure at all Xaa locations
  Clone ID: PAT_MRT4530_83828C.1.pep
MAWSRRAAVAAGAASGRREEDDAGGRKXRGKEGEERGLVPCLFGKRXEGAEATRQREEELCLCPLAACARSGGAEAMTTAMTAGRCGAERRHGRQARAGAAEADGGGDQAVGHHGTRAREATGGAAV

SEQ ID NO: 187091 - protein, 346 aa, Oryza sativa
  unsure (1)..(346): unsure at all Xaa locations
  Clone ID: PAT_MRT4530_83829C.1.pep
WAGRPKRIRPSRARGRGGEREPVDRAHLAWSRVGPACQRSAHRXGGSTWRGARVRCGARCTRAVRGGRGCGGPTCSLTARGGPRARGGADRGRLDPVLAELAPTWRLRGCHVDRREVDDDAGRNGRRTIVASGGANHGDTGESEHTGWLHETRGDEPTARIRRRMPDGGELRRRHPAAEEGGNDDEVTRGRFPAARASMRLRESVPCAGLGGNASREAGDERRSRARAATAASTRRATATVGAAPASYGEATRTTVRAGAVTRADGAKHDRFGLGPRKRRKRARPKSPFASLLVPAPPTRATTNGDSEQXGDIGGERRKRGRXGGGGAWVXMGDNAPRWRAPSDTH

SEQ ID NO: 187092 - protein, 138 aa, Oryza sativa
  unsure (1)..(138): unsure at all Xaa locations
  Clone ID: PAT_MRT4530_8382C.1.pep
GKQLFDPSGKGTKRKAVKKDFPKDVPCTIRPDHSIDGPHGFKXGINTNPPXVPGGDLAKVMRAVCMISNSTAIAEVFSRIDHKFDLMYAKRAFVHWYVGEGMEEGEFSEAREDLAALEKDYEEVGIETAEGEGEEEGY

SEQ ID NO: 187093 - protein, 64 aa, Oryza sativa
  Clone ID: PAT_MRT4530_83830C.1.pep
LFIGNHRSSSSSSVITLLKRTFPSLDFTIPDNWGYAWRHLHKVVRPSIIWVQVNHSFPVPLISK

SEQ ID NO: 187094 - protein, 558 aa, Oryza sativa
  Clone ID: PAT_MRT4530_83831C.1.pep
MGSVGMEAKPTPDWLQARVLGWQGGQAEQAQDKTTAHGIGTMRGQVREIAQALNLGVLSLPIPQIDIKFPIIQYADDTLIIMKACQREVFCLKGILQSYAISTGLKINFHKSSMIPVIVNQDKIELLARTFGCTIGALPFTYLGLPVGTTIPKICEFAPLIDRVERRLPAITMFLNQGQRLTMVNSVLSSLPTFYMCTLKIPKKVLLHIDRARRHCLWRKSHEIDARTHSLAAWDKHLDKFFNKKNLRWVKLLWTSFYTNRSMPPHALQDFGSFWWKDITRLIPLFRGISSIQVNSGDTVLFWKDLWSDKLFQNSLPAVFSFAINEDLSVRAFLQNNLAQNFLLPLSPQAILQFNELSDLLENILLIDQNDIWTYSWGPIYKTRKMYDLFFAHITPHPVLTSIWKSKCSMKGKAFFWLLLMDRLNTRDMLQRRHLSIQDGPSCRICNLDILEDMSHLFFTCPFAQNCWNSLAIYWDVNLDLFDMIQSAFGNFGQSFFMEVVGTACWQIWLKRNALIFDNVQPSLTIWKADFKEDFTLLLHRVKEEDRPRYQSWIDNIF

SEQ ID NO: 187095 - protein, 225 aa, Oryza sativa
  Clone ID: PAT_MRT4530_83832C.1.pep
MPLDRSRDLRNFGTARLTVRREHVAHARGRGWDAVHARGSRRNGCGGPTRSLTAHRGPCAREEKRREQLAGSADPVAAEVAPRWRLRGSHTGQREVDDDAGRNGRRTTAASGGANHGDTGESEHTGCLHRTRGDEPTARIRRRELDGDELRRRQAAAEEGGKGDEVTRGQFPAARASTRPRESAASVGLGGATPSEAGDERVLRSTGGDGGEHTASDGNGRGGAG

SEQ ID NO: 187096 - protein, 832 aa, Oryza sativa
  unsure (1)..(832): unsure at all Xaa locations
  Clone ID: PAT_MRT4530_83833C.1.pep
MNDIMIFNDIISNVGLQELPLKGRSYTWSNMQDQPLLQQLDWFFTSLAWTLAYPNIMVTALSKYIADQAPCVVSIETSTPKSHIFRFENYWADLPSFLDVVQTYWNLPIRATHQGVIINAMFKNVRRGLKQWSKRLSNLNTLIANSTEAVDTLDKIEEQRPLFIQEWNFRKIVKEHILKLLQYKHSFWKKXRCTIRWVKFGDDNTKFFHAAATQRHRHNKISHLIQSDGSTISTHQEKAHAFLSCFKARMGTTEGNECLINLQELITPHESLSQLSVMPSIDEMXSIDEMDKIIKHMPNDKSPGPDGFNGLFMKKCWHIISGDFYKLALDFFXQQISIQNLNKSFICLVPKKTSPETTNDFRPISLQSISLKFLTKIMAERLQYVITELIHENQYGFIKQRTIQDCLAWTFEFLHQCHQSKKEIIILKIDFEKAFDTVEHACILEILKAKDFDNMWINWVKNILTTASSSILLNGVPGKNFNCLRGVKQGDPISPLLFVLAADLLQSMINKALNLGVLSLPVPQVDTKFPIIQYADDTLIIMKACQREVFYLKGILQSYAMSTGLKINFHKSSMILVNVNQDKIELLARTFGCTIGALPFTYLGLPVGTTKPKICEFAPLIDRVERRLPTITMFLNQGQRLTVVNSVLSSLPTFYMCTLKIPKKVLLHMDRARRHCLWRKSHEIDAKTHSLAAWDKVCRQKXRRGLSVINLEFQNCALLMKHLDKFFNKINLPWVKLLLTSFYSNRSMPPHALQDFGSFWXKDITRLIPLFRGISSIQVSSLXKDLWSDKLFQNSLPTVFSFAVNEDLSVRAFLQNNMAQNFLLPLSPQAIL

SEQ ID NO: 187097 - protein, 466 aa, Oryza sativa
  unsure (1)..(466): unsure at all Xaa locations
  Clone ID: PAT_MRT4530_83834C.1.pep
RAGRPKTAQARAREGRGERAGGPGSPRAVPGGTRLLAARLTVRREFAAYARGRGWDAAELAPTWRLRGCHAGRREVDDDAGRNGRRTTAASGGANHGDIGESEHTGWLHVMRGDEPTARIRRRELDGGESRRRQPAAGKGENGDEVTRGQFPAARASTRLRESDASVGLGGTTPSEAGDERVLRSSGGDGGEHTASDGNEEEEGAPGVPFRVHERTGSPGAWRWTAEARQSTGAATTGGQAGELALRLASKAATGGDAGERGKRGEKEEKEGEKGGSPLCRFGKXGGSGATRQRERGSLPPPLGGXRAEWRGPGDDDGDDGGXRFGAARRHGRQARAGXQRVPPAATGRSATRHARVGNNGRRGWAXGTGRRGRRRRRGSGGKPRGRARERRRTGPALRAGSSRERRGRSARLSHARVASRGGGTRRGKRERERERESAREREERAGGEGEMGRARFGPSTSGEAK

SEQ ID NO: 187098 - protein, 94 aa, Oryza sativa
  Clone ID: PAT_MRT4530_83835C.1.pep
ALTSNRLTANNHLDGEDNRPASSEVKPSPNNLQFLKAPIERSVSNMFAASTFFVPGNNVLILFWTDQWIEGCSVASLAPDLLLDVPLIRTSQLH

SEQ ID NO: 187099 - protein, 505 aa, Oryza sativa
  unsure (1)..(505): unsure at all Xaa locations
  Clone ID: PAT_MRT4530_83836C.1.pep
WAGRPKXAAQSARGRGGERGPVDRTHRARSRGRGXGTRCTRAVCGGRGCGGPTRSLTARGGTRAHGETDRGWPDPVWAELAPTWCLRGCHAGRRKVDDDPAAKGRRTAAASGGANHGDTGKSEHTGRLFVTRGDEPTARIRRRLLDGGGLRRRQLAAGEGENGDEATRGRFPAVRASTRRRELDASVGLDGTTPSEAGDVRXYGARAATAASTRRAKATEEEGEGAAGVLLPLXASLLVPAPPTRATTIGDGEIEGGNGVEAKMREFGGGGLGLKWTAMSVWERGTDIGRLRRELALGACSQSGGRRMTPARRKRGKGGGERGLPLCRFGKKRGRGTGASRQRXGGARLHPLAACARRGGGRAMTAGRFGARLPAAAIGRSATTARARGKQRAASARARTRWLARTSGCAAAGAAERGEREGALGAAAHAHARAACGRGXSGERGARGGSRTREQRTGEXSGGGGDGRARERERERERERAPGERGAGGEMGRAEIGPSNPGEAN

SEQ ID NO: 187100 - protein, 89 aa, Oryza sativa
  unsure (1)..(89): unsure at all Xaa locations
  Clone ID: PAT_MRT4530_83837C.1.pep
IISQSSLYMIFPSQAIDRAILALVVMALCLAFVPTRLLVLMMFLEAFTNHSPPRRASTERWTRRLREXWFSIPAAPVVVEKDKXDKKTK

SEQ ID NO: 187101 - protein, 191 aa, Oryza sativa
  unsure (1)..(191): unsure at all Xaa locations
  Clone ID: PAT_MRT4530_83838C.1.pep
NLCRGGTLYPHDITNPDHPARISKADTGLPYADERGPRPTTGXVPDHTVPGSPRVLPDTTPANPLVSRHQGSPDXLITQPGVPHSTHVVALXVCSDVIPKENXSLSARAGNRTPGTFPDPRFWKXHLVRKHRPRCRVFQGSKVTCLARDLELDPRNPRTAGLRAPKLHAKRDNSTNNENKALLLTSKRAIK

SEQ ID NO: 187102 - protein, 798 aa, Oryza sativa
  unsure (1)..(798): unsure at all Xaa locations
  Clone ID: PAT_MRT4530_83839C.1.pep
MYMGNNNGYCPXGGQGWNQPHSYYQGGNNNGNFSNXPSLKDLVFAQAKTTHALSKKLAANDKILENINVKLDGFASAFQNQLSFNKMIETQLAQLASLVPANETGRIPVQPDSSIENVKAITTRGGKFIRDPPYPNPAGTNGISKEVPSNDLADKEVQPEKIVPQEYYDTRLLPFPQRMRKLLVDEQFACFVEVIQKIHINVPLLDAMQVPTYTRYLKDILNNKRLLPTTKVVKLMEQCSNVILHKLPEKKKDPXCPTITSLIGAEQFDQALCDLGASVRVMPKXSSTSSTSXKRSLSFNRGRNNAPWSGXKFPGEGNNDAXEPLLEDAGKTTHTGQEARAVGSKEAAIRTKAKEGVEGEAKDARSITSGDGXKIQKLNXKEFALKFSQALIVSLKFKYLVVYIQVALVKLTGGMRMRLSRLFKGSSSSSSHHDESSTRSSAEVSMEDAEAPRLLLNDTDLNLVSDRERQAYYMLSDREYAHTREYSPELLKKIGMDVEFCAIWKAIGCXRFVVVDELGSRLLTLQFLCTLKEIEDGISFRFFHKEYTLTWKGFSTLLGFHDSCKIDLQKGISGFEKNRFWEDISGAPICKKPRTNDIHNPTLKLMHKWIAMTLFPRGDLRPIRGVELIIMFAMTIEESRACGAYKETRNMTRNERESSSSSTPXQMYEAGWAPTGDAPGWTQAPRHSIGVSTWASASEDRWRAPHDIQWGDNQPYRSSGVPPSPSKWRSSSSRWDLGEITRRMNTLDMQTGEIQGSILIKDPERKTSLGGDISPPLRVVARYEIVNKSCYDPDTRLT

SEQ ID NO: 187103 - protein, 64 aa, Oryza sativa
  Clone ID: PAT_MRT4530_8383C.1.pep
ADDLRVLLSRVTEQTRDAPLSRTRQMPSRKSGRHHIQQWDRWIYATNRGLAGRLARTNSGRIHG

SEQ ID NO: 187104 - protein, 472 aa, Oryza sativa
  unsure (1)..(472): unsure at all Xaa locations
  Clone ID: PAT_MRT4530_83840C.1.pep
KKVAQGGPRRARAEEGXRVWWTGLTTXVSGSAHRAEGARGAALGCGGPTRSLTARGGTRARGGTDRGRLDPVXAELAPTWRLRGCHAGRREVDDDAGRNGRRSTAASDGANHGDTGKSEHTGRLHVTRGDEPTARICWGLLDGGGLRRRQPAAGEGGNGDEVTRGXFPAARASTRLRESDASVGLGGTTPSEAGDERXLPSSGGDGGEHTASDGNGRELALGGRGQSGDREDDADEEEKGEKEGEKGGLPLCRFGKKGEVSGGDAAEGGGMLPPSLGGLRAEWRGQAMTTAMTAGRFGAERRHWRQARAEADGGGERAVGHHGTRTRLATGGAADGVARLGHARWLAGPCGCAAAGGRAAGPGSADATRHGRQPRGRARERARGAAARERRGKTRLGAGGSRACARGARARRSGAERGGGGGNRSAXRGGEGARERERARAXRERGGRGRDGPSGIRPIDLGGGKMDFCGGI

SEQ ID NO: 187105 - protein, 163 aa, Oryza sativa
  unsure (1)..(163): unsure at all Xaa locations
  Clone ID: PAT_MRT4530_83841C.1.pep
SFFHDARAATDHLLARARVPIVAGGTGLYLRWYIYGKPSVPQSSMDVTSAVWSELSRFRDTGRWEEAVDLVANAGDPKARDLSVNNWSRLRRSLEIIRSSGSPPSAFSLPYNAYNLNHHRRLSLTNQADQPTELELDYDXLCIFLACPRVELYRSIDLRCEEM

SEQ ID NO: 187106 - protein, 489 aa, Oryza sativa
  unsure (1)..(489): unsure at all Xaa locations
  Clone ID: PAT_MRT4530_83842C.1.pep
TGRPAQEGSPERPKTRARGGRRESPVDRAHYARSRVGPACQWLGSPCGGSTRRTRAGGGRTRCTRAARGGRGCGGPTRSLTARGGTRARGGTDRGWPIPTSAELAPTWRLRGCHVGWREVDDDPAANGRRAAAASDGANHGDTGKSEHTGLLFVMRGDEPTARIRRRELDGGESWRRQPAGREEGNGDEATRGRFPAVRASTRLRELDASVGLDGATPSEAGDVRXYGARAATAASTQRATAXEEEEGALGVPFRVLVCTGSSGTHATTNGDGEQGRQQWHGGXGRGRERGGGGQNGDRRMTPARRKKGKXGGERGLAPLPIREKXRGAGATRQREEGRCLRPLEASARSGGGRAMMTAMTAGGRXRQTLTTAATRRSATXARARGLQRAASARARAREHGAREAAARERRGRTWLGAGGLRARARAERRGAGRGSRARARRGARRRVRGRETERERERERPGERXRWVGGEGKMGREKFGPSTPGEAK

SEQ ID NO: 187107 - protein, 783 aa, Oryza sativa
  unsure (1)..(783): unsure at all Xaa locations
  Clone ID: PAT_MRT4530_83843C.1.pep
MAQTSPFCGKPNEDANAHLQQFLEICSMYTIKGVTPDAVRLRLFPFSLLGRAKQWFYANRAAFPADKGRXIPEAWERLQEYLAACPHHGMDDWLILQNCYNGLTPMSRNHLDTTAXSKTVQGAVELIEKMVSNMGWSEERLQTRQRGMHTVKETELLAAKLDLLMKRLDDHEKRPQGTVKALEVCGGTGHSGNDCPETREEAMYMGNNNNGYRPQGGGNNNGNFSNQPSLKDLVFAQANTTDALSKKLAANDKILENIDVKLDGFASVFQNQLSFNKMIETQLAQLASLVLANETGRTLGQPDSSIENVKAITMRGGKSTRDPPYPNPAGTNGISKEAPSMDPADKEVQPEKIVPQEYCDTRLLPFPQHMRKPSVDEHFARFVEVIQKIHINVPLLDAMQVPTYARYLKDILNNKRPLPTMELPEKKKDPGCATITCSIGAQQFDQALCDLGASVSVMPKDVFDKLNLTVLAPTPMHLQLADSSVRYSAGIAEDVLVKIWDFFISVDFVVLDMDTGKETPLILGRPFLSTAGANIDVGTRSIRFHINGKEEKFEFQPRTEQCSMVRIKYGPNPQNIQEVEVEPPKTDSLVKFMQNFLKKETTIPRNRYWKTPTVGESRVGGTYRETRNITRNERESSSSLTPVQMYEAGWAPTGDAPEWTQVPRHSIRVSTWASASEDRWHAPHDIHWGENQPPRSSDVPPSPSEWRSSSSRWDLGEITRRSDTLDVQTGEIQYNLTEHIAQTQEWQQSADAQFTNINNMMQQQHDDLQAYFRFQGFNPYQGP

SEQ ID NO: 187108 - protein, 211 aa, Oryza sativa
  Clone ID: PAT_MRT4530_83844C.1.pep
APLSSLCPSSLEAGTGTSTDTIEWAMSLLLNNPDVMRKARDEIDAFIGQPVRLLEADDLPKLQYLRCIIMETLRLYPPAPLLVPHESSSDCTVAGFHIPRGTMLLVNTFDIHRDPHIWDEPTSFIPERFEDGRSEGKMAIPFGMGRRKCPAENLGMQMVGLGLGTMIQCFEWERVGEELVDMTEGSGLTMPKKVPLEAFYQPRASVMHLLS

SEQ ID NO: 187109 - protein, 108 aa, Oryza sativa
  Clone ID: PAT_MRT4530_83845C.1.pep
PTRPPTRPVNWSYAQPTELPNPNSGIDGVKLKDGRVVLVYNSTSRGVLKVAVSQDDGDKWEDVLTLEETHGVEFSYPAVIQTSDGLVHVTYTYKRTQIKHVVLQPSEV

SEQ ID NO: 187110 - protein, 994 aa, Oryza sativa
  Clone ID: PAT_MRT4530_83846C.1.pep
MAETAVSASKGVIGALFEKLTKLVEDKCTNLVGMSKNIVFLKDELPTMSALLEKLEDADELDPVVKAWRNQVREMAYDIEDCIDDFVHHVGGGDVEAGFIDKVSHFLRTLRARLETAEHIKDLKIQLIEINERHKRYKFDLDDTPSSSFVAIDPRLPALYSEAANLVGIEGPREQVIKWLTDADQQIMVLPIVGFGGLGKTTLAKEVYQKIGQQFNTTEFVSVSQRPDVTRFLKGIQSKLPIRLSSEYCEVKDIIDNIRAYLQHRRYLFVVDDLWDAPTWNIIRSVFPENGMGCRIIVTTRSEDVARWVCCNHRRFIYRMEPLSDENSRWLFFNRIFGSEDGCPSQFREISAQILKKCSGLPLAIITIASLLANQPAPHKKEYWESIRNSIGTWGSGTNPTLEGMRQILHLSYKDLPRHLRTCFLYLGIYPEDFTIKKDDLIRQWLAEGFVHHFHGGSSEEVAKSYFNELINRSLIQPEETKYGEVVSCRVHDMMLDLILSRCAEDNFICVAYNLEELSGKHEFKVRRLLVDSRVGDSGDTKISGTPAPRLLQLRSLQLFGVSVSLSLLPLSKYIRVLILHLGKTGTGGNERVDVTAIGQLFQLRYLKIVSLHHALVLELPTEIRGLQYLSTLEIDCTNENSLPSDIVHLSRLSHLIVPSGIGLPDGKIGSMKSLCTLQKIEILDIKSAIGLGELTNLKDLELYSKQALSEREIDALVTSLGKLHKLISLRMSKFAECIWYDEDNRLGSLSNPPLNIERLHLGGWRLRRVPRWINGHLQNLCFLVLDVTEMSTDEVRLLGELPSLSELCLSVKRLAPCSASLVFGAGFPALECLEFFCGGDISHLCFEAGVMPNLRKIILFYIDIEWSGTAPVGIEHLLNKQLRYIQLHPVTDTAVDAERISLAFTEAIRAHTSRGGAEPYLRFARIRSGSLIGANSLIRHSFTCHRVSALFLLNHILAILFSKFILCISVLSLLFWLYAYLAEYWKLFHFQND

SEQ ID NO: 187111 - protein, 34 aa, Oryza sativa
  Clone ID: PAT_MRT4530_83847C.1.pep
MRRKLRASRFWWLYDDGNGGNGWKRWSLMAQEEA

SEQ ID NO: 187112 - protein, 66 aa, Oryza sativa
  unsure (1)..(66): unsure at all Xaa locations
  Clone ID: PAT_MRT4530_83848C.1.pep
PRXQTVPXXXXDGXRRXRRRXVXERXTAXXDXARAPWRGRAGGTTRRRSCTTXPSSTLASLAXDLX

SEQ ID NO: 187113 - protein, 136 aa, Oryza sativa
  Clone ID: PAT_MRT4530_83849C.1.pep
LLVADSLAAVTACSSCAEALTATIAIAAAAVDARSRLPKPAATAPEGGGERIRVLPVLPLTPGRSRGRRPLDSCDVVAPEDGRRRIHAPLSFPGYAARRGRAKRWLGAEMEAPRWMEEERDGGGEGVDGGSGGIWI

SEQ ID NO: 187114 - protein, 96 aa, Oryza sativa
  Clone ID: PAT_MRT4530_8384C.1.pep
PGISEGSDLIPPARGSFLGTRDASSFTNLRELSGGRATRSPAGGGGPRFFARAGCWAFNHCVEETVFFFIFPPLCLQGLVSIGFQKKAGVGMCMEG

SEQ ID NO: 187115 - protein, 138 aa, Oryza sativa
  Clone ID: PAT_MRT4530_83850C.1.pep
MWNKAAVATAAGSSFPTIAAVRSSDTPTLRRPLPSPSLRRAIGPLPLPHLPRQRGLEDSEGEEGSRYPCARRTSCAASTAVATASSRPDESDRGGEARLGGKWRRAATVVPPLFRRRSEPRSLPLTTHHREKKEDRVI

SEQ ID NO: 187116 - protein, 445 aa, Oryza sativa
  unsure (1)..(445): unsure at all Xaa locations
  Clone ID: PAT_MRT4530_83851C.1.pep
MQRRRGNGRDIHDALDDGSPSEASHRIRLVHGLMTHGVDPLSDIYLFAVLIVLFEQSPSAHCSPAPSARIPLRGFTDCRLKASPGSGSFTRWRISPWGGTWWPASPTIDLVVDILRRLPVRSVCRSKGVCPYWRDLIADHDHRKKLPQTLSGFFYTSFSEERSAAEHHFTNVTGIGMPLISPTFAFLPQCKEVIPLDSCNGLLLCRCLQFDGVSKFHYAVCNPATEEWVMLPDANWADGENRIACLCFDPAISSHFHVVEYVXDEAECVTGVEINSSKTGLWSVHXSVNRRSVFLNGFLHSVTPADEIVAVDMEGKKWRKIPVPDRDNDIGIIHQTQGCLSAFNVDLLDIFKLSIWFLEDYDTNNWILKHTVSSLDLFEGKNYRLDFEYQVIAVHPDCNLIFFVYGLDNTLMAYEMDRKEVRVIRNLGXDYCWPYLPYELRSSPV

SEQ ID NO: 187117 - protein, 149 aa, Oryza sativa
  Clone ID: PAT_MRT4530_83852C.1.pep
MEISVAVVTASLHLFIIDLKQMMRQRGLKQCLRLKRRSPPLTGHCHQPPRIIDSTYVGGCKWGTATADHTVGEVRAFDGPEEDFTNSTCRTSACDICHLLVAGTMGYSCSSCRYKVHKVCPVPLDNVNVQQQSRRRDSNSIWGSGRSSA

SEQ ID NO: 187118 - protein, 131 aa, Oryza sativa
  Clone ID: PAT_MRT4530_83853C.1.pep
MRVPPLKTRKGGGGRKIDLFLNPQIISFSSIRNSGVGHGHRPSPRTARHSSAPAADLPPARLRGLIYRCHARARARGVTPRRQATAEQEAGRLHASFEENVRRPPPSPSHSPRAAFSDLDLIVVYPAPAAG

SEQ ID NO: 187119 - protein, 56 aa, Oryza sativa
  Clone ID: PAT_MRT4530_83854C.1.pep
GDQNGVQSIGNEHYNKPNGSVALYLATCEYIYFKSRLHLISRFQFGRNRMNIICIY

SEQ ID NO: 187120 - protein, 41 aa, Oryza sativa
  Clone ID: PAT_MRT4530_83855C.1.pep
VHGKSCIPTHYRNGQYERFFLQLTLAGQIDNVDRINASYTG

SEQ ID NO: 187121 - protein, 55 aa, Oryza sativa
  unsure (1)..(55): unsure at all Xaa locations
  Clone ID: PAT_MRT4530_83856C.1.pep
MCXXXQXPHXLTMXXARXGPEGLGFSEPKRRGQAXXPXHGXSKITLKVVVFHLRP

SEQ ID NO: 187122 - protein, 63 aa, Oryza sativa
  Clone ID: PAT_MRT4530_83857C.1.pep
GRVGGGRTPSTYAETLNQGRRSRFASVSRATQPAATSGPFLVRRTDFSGGTASSATAPNCALT

SEQ ID NO: 187123 - protein, 182 aa, Oryza sativa
  Clone ID: PAT_MRT4530_83858C.1.pep
MATGNGEAAVVEKEGEGTMVPEALEKKVVLDAAEKEEEEKDSEAEAEAEARISKLVGDMIDNVCADHGIPLPKVDIKTVRKMAEYMNKHFAITNKEELKIWDEGFINELDGDEDKYSLFKIIRASERVGFYGLLDLASDMVARKIKAGKAIDEIRKFLGVEKDFTKEEEEKIRRENAWAFEE

SEQ ID NO: 187124 - protein, 55 aa, Oryza sativa
  Clone ID: PAT_MRT4530_83859C.1.pep
MQTPYPNPYGNVGEAHTQYFRHWQPAVPRCRSTTYPDKEDFSDLEGCHHLYTHLN

SEQ ID NO: 187125 - protein, 763 aa, Oryza sativa
  unsure (1)..(763): unsure at all Xaa locations
  Clone ID: PAT_MRT4530_8385C.1.pep
MAGSVVAAAAAAGGGTGSSCDALYRELWHACAGPLVTVPRQGELVYYFPQGHMEQLEASTDQQLDQHLPLFNLPSKILCKVVNVELRAETDSDEVYAQIMLQPEADQNELTSPKPEPHEPEKCNVHSFCKTLTASDTSTHGGFSVLRRHAEECLPPLDMTQNPPWQELVARDLHGNEWHFRHIFRGSPHHSLILGQPRRHLLTTGWSVFVSSKRLVAGDAFIFLRGENGELRVGVRRLMRQLNNMPSSVISSHSMHLGVLATASHAISTGTLFSVFYKPRTSQSEFVVSANKYLEAKNSKISVGMTPTNSWLSPGTGLKMRFEGDEAPERRFSGTIIGVGSMSTSPWANSDWRSLKVQWDEPSVVPRPDRVSPWELEPLAVSNSQPSPQPPARNKRARPPASSSIAPELPPVFGLWKSSAESTQGFSFSGLQRTQELYPSSPNPIFSTSLNHFYWPMRETRADSYSASISKVPSEKKQEPSSAGCRLFGIEISSAVEATSPLAAVSGVGQDQLAASVDAESDQLSQPSHANKSDAPAASSEPSPHETQSRQVRSCTKVIMQGMAVGRAVDLTRLHGYDDLRCKLEEMFDIQGELSASLKKWKVVYTDDEDDMMLVGDDPWPEXCSMVKRIYILMRWTLTTLLQCLILLSRVLVNAALLILYIQRAVLFNGLCFQIHWINAGGFGGWKEGYSTKRASGVCREPVVDAIDVEGPQGIDMLAIALRKHSLNVAQGSNLEALPFITELIIEILVVQTQRKTYIEVLS

SEQ ID NO: 187126 - protein, 459 aa, Oryza sativa
  unsure (1)..(459): unsure at all Xaa locations
  Clone ID: PAT_MRT4530_83860C.1.pep
WAGQPKTAQARARAGGRRESGGPGSPRAVPGGTRLSAARLTVRREHATHARGRGRDAAELAPTWRLRGGHVGWREVDDDPAANGRRAAAASGGANHGDTGKSVHTGRLHVTRGDEPTARIRRRLLDGGGLRRRQPVAGEEGNGDEVTRDRFPAVRASTRLRELDASVGLGGTTPSKAGDERVLRSSGGDGGEHTASDGNEEEEGAAEVPFRVHERTGSPGARRWTAEARQSTGATATGGQGAXLALGACGQNGDRXDDAGEEEXGEKEGEKGGLSPCLFGKRSRERGRAAEGGGXALPPSLGGXAREWRGRGDDDGDDGGXRFGAARRHRRQARAGXQRVTAAATRRSATRHARAACNGRARRMERRGSTRRGRLSRSCTGRAGGAEGEGGARRGLRARARSVRGARARRSGGRARRGRGGGDGRVRERERERETPGREGAGEEMGRAEFGPSNPGEAN

SEQ ID NO: 187127 - protein, 74 aa, Oryza sativa
  Clone ID: PAT_MRT4530_83861C.1.pep
MAACVVHAGGSDGGIQAHIKACAALGAICSSVVTAHNTIVVQLIFYETNLRVFRAQYRQIIVPILSAIDEKRFN

SEQ ID NO: 187128 - protein, 1043 aa, Oryza sativa
  Clone ID: PAT_MRT4530_83862C.1.pep
MEFDRRKAAALAALASPAPDKSPKGGVDAPIAPLLDALNSHPDLFTTSSCSGRVSVLAQPPPPQQADPGGAKTKKKARGGGWVYISHDPADPEALVEVLFGVKEGGGGGDDELVFRFEPMIVAVECRDAAAAAALVAAAVGAGFRESGITSLQKRVMVALRCSIRMEVPLGQTKELVVSPDYIRYLVRIANSKMEANKKRMGGFLDLLQAKISLEASYLESQDPVLQNGAKHGFGNAKRHVLISLSFYPAFISPHGVILTQEEALPTLSGNTTHCLSTAALEITGEPIEKLFLWGQSACALTVGREHHILTFGGFGGPGRHARRNYSLLVNPGSGLLTELKVTGSPSPRMGHTITVVGNDIYVVGGRSGPSEILNDIWVLERSNNRWSKVDCSGDFFRPRHRHAAAAVDRKVYVFGGLSDDGLCSCMNIMDTASIQWNVISPDDKWPCARHSHSLVSYGSKLFLFGGHDGQRALNDFYSFDTTTLKWNKENTNGKAPSPRFSHCMFIYKDYLGILGGCPIRESSQEIALLNLKHKIWFYVSIPSLSQCLCVRSSSVIIDDDLVIVGGGASCYAFGTRFSQPIKIDLHLLESIFKLAYNKEKEMSVQHGSVSNVDLLEGHEENCNPSDNVKVVIDTATLGSSPLVLQLEKKYAKLAKDILKKFGWLDLTRKVRVSQDNIHVLFPVSKTFHALITDKHLKVQPDDSCVFEELLPFSENKLFGASISLQKALEILLLCRGSILKDEVAISRKASKTPQTIMRELVSVLLDKKGLPSQLLEQLPTRWETLGDIIVLPKTCFKDPLWESVRDDLWPLVAKSLGAQRLARQGKITPNGTRDSTLELLVGNDGWLTHHENGICYSLDATKCMFSSGNRSEKLRMGKLDCRDEVVVDLFAGIGYFVLPFLVKANAKLVYACEWNPHALEALQRNVMDNHVADRCIILEGDNRLTAPKGIADRVCLGLLPSSECSWDTAVRALRAEGGMLHIHGNVNDSDESLWLDNVVKSITNIAKTHGLSWNVTVEHVERVKWYGPHIRHLVVDVKCRAT

SEQ ID NO: 187129 - protein, 293 aa, Oryza sativa
  Clone ID: PAT_MRT4530_83863C.1.pep
MITGYSEIVDSVAWNAFDIAIDMLQGNLENSKGTAASWNAMLSGLTRAGQSFDAIHYLSVMLHEHKITPDSVTFANVISACVEKHGEKPDSMSLVTAVQAVSELGHLNGLKQIHCFVYRSLTHRNTQLALAISKELLEHGPQKPEGVHFTHTTLLTRITQPVGISHVGRPPSFHDKAFPKPTQATVDTGTGCTNIEAQLDGSRCSKVACLARDLELDPRNPRTAGREEGNADEVTRDRFPAVRASTRPRESDASVGLDGATPSEAGDVRVLRSSSGDGGEHAASDGNGRGGAG

SEQ ID NO: 187130 - protein, 51 aa, Oryza sativa
  Clone ID: PAT_MRT4530_83864C.1.pep
MKAKGNKKEKNDDNKTEALPRAAASSLLLISYTASQLAQEEEAKGGWPVEH

SEQ ID NO: 187131 - protein, 186 aa, Oryza sativa
  unsure (1)..(186): unsure at all Xaa locations
  Clone ID: PAT_MRT4530_83865C.1.pep
AAGPRAASRLAVERAHGRGXRGRPDPISAELAPTWRLRGCHAGWREVDDDAGRNGRRTTATSGGANHGDTGESEHTGWLLRTRGDEPMARIRRRELDGGELRRRQPAAGEGGNGDEVTRGRFPAARASTRLRESVASVGLGGATPSEAGDERRFRARAATAASTRRAAATVGAAPASYGEATRATT

SEQ ID NO: 187132 - protein, 314 aa, Oryza sativa
  unsure (1)..(314): unsure at all Xaa locations
  Clone ID: PAT_MRT4530_83866C.1.pep
MGRGGRTEGGITEMRRGAVTRGRRRGSNLSGLGPGKRKERARPKSPSASLLVPAPSTRATTNGDGEQSTGGGSYGVEAKTRGKERGKLGFXGGNVGLGTDLRRSKERAGARXAAKAATGRMTPAGEKGEKGGGERGLPFCRFGKXGGGERGRRGRGRRXALPPSLGGLRAEWRGPGGDDGDDGGRFXSGATTRATDACXADGGGDQACRRTAAFVLPRRHSRAAAPPFPCPRTAVLVRRAATPAPPCATIAAAVVAAAAAVCWRMPGSDDQVNGGCPFRMAIVFVDLVHANIDLAPSAERGFFVNTVLVEHKAP

SEQ ID NO: 187133 - protein, 198 aa, Oryza sativa
  unsure (1)..(198): unsure at all Xaa locations
  Clone ID: PAT_MRT4530_83867C.1.pep
MCSPPLPPVLRSTRSSPASLGVAPPNPTLGTDSRSRVDALTAGDWPLVTSSPFPSSLPAGCRRRNPPSTHSLQRIRAVGSSPLXPPASPRGSHVGATSAPARPRSAWADPAVRLRVGPPHPFHREPRACTASLPRSRACAACSLRMVNRVTDKRVPPGTTRGEPGPPVLSLLPPARARPGPPWAVLGRPAHLARPDRP

SEQ ID NO: 187134 - protein, 454 aa, Oryza sativa
  unsure (1)..(454): unsure at all Xaa locations
  Clone ID: PAT_MRT4530_83868C.1.pep
WAGRPKAAQDARAREGGEREPVDRAHRARSRVGPACRXHGSPCGASTRRTRAGRGGTRCMRVVRGGRGCGGPTRSLTARGGTRAWGGADRGRLDPVLAELAPTWRLRGCHAGRQEVDDDTGRNGRRTTAASGGANHGDTGESEHTGWLHETRGDEPTARIRRRELDGGESRRRQPAAGEGGNGDEVTRGQFPVVRASTWLRESVASVGLGGATPSEAGDEWXYGARAATAASTRRATATVGAAPASYGEATRTTVRAGAVTRXADGAXSNLSGLGPGKRRKTXRPESPSASTNAPAPPTRATTNGDGEQSTGGXRQWRGGEEGEGARGFKGGNRAEWRGPGYDDGDDGGGGSSGAARARALARGAERLRGCRRGRAAGPGGDHAAXRARAGRAREGRSARRTRXARGARAERKREGERERERRGGRRRWAERDSAHRTRGRQNRLLRRNLIWKD

SEQ ID NO: 187135 - protein, 65 aa, Oryza sativa
  Clone ID: PAT_MRT4530_83869C.1.pep
MPVGRPRHGPAVRPGRHGPDPSRAMPCLGRAKMPCRGPVEQREERSGAPVLRWLGGCDAGGQTCS

SEQ ID NO: 187136 - protein, 337 aa, Oryza sativa
  Clone ID: PAT_MRT4530_8386C.1.pep
MEEAKMGDVATIRAVLAILQWWGFNVTVIIMNKWIFQKLEFKFPLTVSCVHFICSSIGAYIAIKILKMKPLIEVAPEDRWRRIFPMSFVFCINIVLGNVSLRYIPVSFMQTIKSFTPATTVILQWLVWRKYFEWRIWASLVPIVGGIMLTSITELSFNMFGFCAAMVGCLATSTKTILAESLLHGYKFDSINTVYYMAPFATMILSVPAIVLEGSGVINWLYTYDSIVPALIIITTSGVLAFCLNFSIFYVIHSTTAVTFNVAGNLKVAVAVLVSWMIFRNPISAMNAVGCAITLVGCTFYGYVRHLISQQSVNSSPRTPRSRMEMLPLVGDKQEKI

SEQ ID NO: 187137 - protein, 108 aa, Oryza sativa
  unsure (1)..(108): unsure at all Xaa locations
  Clone ID: PAT_MRT4530_83870C.1.pep
MVRMAGTGHMDVHGTCAGMVRMAGTGHMDVHGTCAKNSRVKXHGAHGWYWTHGRAWHMRWYWTGXSVLGLEQFGMGMVRLAGTGHMDVHGTCAGTGHMDVAKRGRFWP

SEQ ID NO: 187138 - protein, 486 aa, Oryza sativa
  unsure (1)..(486): unsure at all Xaa locations
  Clone ID: PAT_MRT4530_83871C.1.pep
TRARGREERESRWTGLTTPGPGWDPLVSGSAHRAEGARGAALGXGEGRGARARFTVDADAAGPRAASRLAVERAHEEGLTGVGSTRSWLSWRLRGCHASRREVDDDAGRNGRRTTAASGGANHGDTGESEHTGWLNRTRGDEPTARIRRRMPDGGELRRRHPAAEKGGNGDESIYAATGIRCXRRIGRSYAERGRRRAALPSSGGDGGEHPARGGNGREVERGGRTEGXTTAMRRGAVTRGRRRGSNLSGLGPGKRKKRARPESPSASLLVPAPPTRATTNGDGEQSTGAAAMARRRWKEKRGRAPGALRAAMSRPNRRQGGGRRMTPAVTEKGEKRERKRGLPPCRFWKRRRGAGASRQREEGLCLRPLVACAXGGAEAMTTAMTAGXVWSGATTRATGAGWRGRGWGPGGTDGAGAARAATARARARXTARGKWQRGSGEGGLGSARAAHAHARGQSGGGRERSVRLSRTRARRAGGAVGGGGG

SEQ ID NO: 187139 - protein, 85 aa, Oryza sativa
  Clone ID: PAT_MRT4530_83872C.1.pep
SRWCRRKARRAASPENAARHRRAAPFEARLEKGDFGGRPEVAGERSEQPVGAHGRDYLSCSASIAKVKKNTVRIQQVGLVPEFLQ

SEQ ID NO: 187140 - protein, 468 aa, Oryza sativa
  unsure (1)..(468): unsure at all Xaa locations
  Clone ID: PAT_MRT4530_83873C.1.pep
GPAGPRRPKARARGRGGERGPVDRVHPAWSRVGPACQRLGSPCGGSTRRGARMGEXTRCTRAVRGGRGCGGPTRSLTARGGPCARGKTEGAAXPVAAEVAPTWRLRGSHAGRREVDDDAGRNGRRTTAASGGANHGDTGKSEHTGWLHETRGDEPTARIRRRELDGGELRRRQPAAREGXNGDEVTRGRFLAARASTGLRESVPCAGLGGAAPSEAGDERRFRARAATAVSTRRAAATVGPAPASYGEATRATTRRGAVTRGQRRGSNLSGLGPGKRKERARPKSPSASTNAPALPVLGDXTAEAGQSTEGGGERKRXADGGGALPPSLGSLRAEWRGPGDDDGDDGGADLSGAARARVLARGAERLRGCRRGRAAGPGDADGAGAAWAATTRARAXEQRRAGPESEGKGGRSARAAHAHARGQSGGGERERERGRRGGRGRXAEKDSAHRPRGRQNRLLRRDRFGKD

SEQ ID NO: 187141 - protein, 748 aa, Oryza sativa
  unsure (1)..(748): unsure at all Xaa locations
  Clone ID: PAT_MRT4530_83874C.1.pep
MYMGNNNNRYRPQGGQGWNKPCPYYQGGNNNGNNQSSLKDLVFAQAKTTYALSKKLAANDKVLENXVKLDGFASAFQNQLRFNKMIETXLAQLASLVPANQTGRIPGQPDSSIENKXAITTRGGKSTRDPPYPNPVGTNGISKXVPSNDSAGKEVPPEKTVPQEYCDTRLLSFPQRSRKPSVDEQFARFVEVIXKIHINVPLLDTMQVPTYACYLKDILNNKRPLPTTEVVKLTEQCSNVILHKLPEKKKDPGCPTITCSIGAQQFDQALCDLGASVSVMPKXSSTSSTSRKRSLSFNXARNNAPWLEXKFPRKENNNAYEPLLEDAGRTTHTGQEARXAVGSKEAAVRTKTKEGVEGEAKDARSVTSRDGXKIRKLNWMEFALKFIQALIVSLKFKXLVAYIQVAFVKLTGGMRRQLSRLFKGSGSSSSHHDESSTCSSADVSMEDAEAPRXLLNDTDLDLVSDRERQDYYMLNDREYAHTREYSPELLKNIGMDAEFRTIWKAVGWQRFAVVDEPGARLLTLQFLCTLKEIEDVISFRYFREEFTLTWKGLSTLLDFHDSCKIDLQKGISGFEKIRFWEDIYGAPICKKPRTNDIHNPTLRLMHKSIDMALFPRGDLRPIRADELIIMFAMTIEESRAGGAYRETHNMTRNERESXTPVQMYEAGWEPIGDAPGWTHAPRHSIGFSTWASASEDRWRAPHDIQWGDNQPSRSSGVLPSSSEWRSSSSRWDLGEITRRMDTLDMQMG

SEQ ID NO: 187142 - protein, 91 aa, Oryza sativa
  unsure (1)..(91): unsure at all Xaa locations
  Clone ID: PAT_MRT4530_83875C.1.pep
KESTLHLVLSLRDGXQIFVKTLTGQTISLEFESSDTMDSLKAYFQVKXTFPQTSQRLIFAXKHLMNGRTLSDYNVQKESPLHLVPRPRGGR

SEQ ID NO: 187143 - protein, 90 aa, Oryza sativa
  Clone ID: PAT_MRT4530_83876C.1.pep
MVWGGFVRTVRRSREGGVGANATAKSVKRGCKIRSGRHPTSGLTPLGEGHVALGGGLLRLVFGKEWPPPHLRPDSPPGRATWHRGTASSD

SEQ ID NO: 187144 - protein, 55 aa, Oryza sativa
  Clone ID: PAT_MRT4530_83877C.1.pep
QKGFFHGTSVVSILCLSCLTFNHWVYLLSLPHSSYRLLKKKHFFCCFTFVVINLI

SEQ ID NO: 187145 - protein, 262 aa, Oryza sativa
  Clone ID: PAT_MRT4530_83878C.1.pep
MATMNHSRVCRGHHIRLRRRRRGAGAGGRRAGAGRRWREEGIRSQSGLLSGDASEMREAKRCGGRGKGDDANIGVVGELSCGFVGLGHLHCGLAWDGGPAAAGGQTSEGRSRGQIFGDGGGRGPERRWPAPPPTPSTAFSTPPRGIVAGGSDPISLPLLPSPRGAATRSGHGARFRRGDGDGAMENGPLLPPPYCRTTAPPLYSLELRCRRRRAAVAAATAAALLSRLPPSPLPNAAATRCRRPRSCKKTALCHQKCIQMEK

SEQ ID NO: 187146 - protein, 244 aa, Oryza sativa
  unsure (1)..(244): unsure at all Xaa locations
  Clone ID: PAT_MRT4530_83879C.1.pep
CLFFGIARSAPTRPPSGAGHXPRPAPQPTPPRHPPQNGTDSPNCAHPAPLSAPAPPTPPPPPHPRPPTQTPAEPASRTPGPANPPRPPTXAAPPPPPPPARSQPPPPASAPRPSPXPTPPAAPSTTQPATPPPPPPPTPAKGPGRRGHQAHPSRPAPSSAQPXSPPSKPGAVIPRPXSAPRPITPRGTPLRPPCPPFPPGSAPPPPPIPRFKPPPPTQXPLSPSHASSPPPSTVVAVATILPSC

SEQ ID NO: 187147 - protein, 86 aa, Oryza sativa
  Clone ID: PAT_MRT4530_8387C.1.pep
RQRLRRHRRRRRERAATLSVGGRDGDGARGGHLHTPLPQPLLFQQGGDQMKSSALGRRCSKTPASSARGRRNIKLLMLVATTHWAF

SEQ ID NO: 187148 - protein, 230 aa, Oryza sativa
  Clone ID: PAT_MRT4530_83880C.1.pep
MTSQIHLLNGQTWPAQVASPLVGPTPKRLISPRATCVTVESVKEDAAVGQHDEERHPRPPARRPRCSGSSWLPRRKRHHYIQHCRLRSRPHPPASSSFPARSRSADAHAAKVSTQPQTPNTAKMHRSTLVINKFVGSTPLTVADQLLCNSDAAAAAVETTTDAPAPALRRVPSSTSTTTLAAPVAVASTSTDGDDDDECGEPHHPAGAAAPAANTKQLLLFAVAKDLIWD

SEQ ID NO: 187149 - protein, 283 aa, Oryza sativa
  unsure (1)..(283): unsure at all Xaa locations
  Clone ID: PAT_MRT4530_83881C.1.pep
MDLADVIKGEGRRRQAGPTGQRHKGAGPPWTGTTEAXAGDVERRRAAGGQRRARGRRRTPRGGXSPATEEGGAPADFRRRGAAAEVLLVLAELREATARVDVDRSGGATRLESAAAAERGGSRGYGATEVERGNGAVADFARAAAKLAVAAEQCGGDPSDGKRRPEFAGVWRRVGVAWGERGRARRLGENWGNGRGDHGDRFYWLGAVGSWPRRTESTGNGLRSGLRRRGRSGVVRRRFWRGKKWGRRVEEVGRRGPAVGASARVEEEAESAATWGGRGGGFG

SEQ ID NO: 187150 - protein, 519 aa, Oryza sativa
  Clone ID: PAT_MRT4530_83882C.1.pep
MAGQGSQKKKSCDWSKRYVDHLNGKMKCFHLQMSANFGHSMTIPNKFLDHFGGTLSRTIELVSPKGIVYIVKVTEHMNKTILQCGWEAFVDAHHIEENDSLLFRHIENSRFEVLILDSDGCEKVFTCAGIKKTSSVQERNAAPVDISRSTHDETTQSSGSKKFVRCQRASDSQRGKTAKLAETSSSGESGEEGTDSSTSEDESSYELDDPQMPPGRNYVLSRWTSLSEAQEEKVDMLVQDIQPEIPVFVAIMKHSNVNSRRACLVIPKRYASAHFPLESQTITLQRQGKNKKWYPMFYIRKDGSGYMLYGCWKNFVRDNHVKEGDMCIFHLTKFTGGEFGATVHLLRETKSGSLGSFHTSHKRFDLRDGRTWPKVTGVRRVSSRPYLTADRVSLTEEQVRKVEEVVHSIQSEGPMYVSIMNKSNVGTDGLYIIIFGRQFATRYLPEGEQTLTLLMTGKSNAWQVKMRPRSGDAQMITTGWRHFVHDNHLQIEDICLFQLMNDESKLTMTVHIIRRNEKS

SEQ ID NO: 187151 - protein, 840 aa, Oryza sativa
  unsure (1)..(840): unsure at all Xaa locations
  Clone ID: PAT_MRT4530_83883C.1.pep
HQRGGAAPASGPHRSAAQRRRSTVDRDHRGGPPPVHGIRRPGSAQSRSDGHEAARLGHGHGMKPARPRHGAAAARGRRQGGGGNRLQQPATWNGGGWPEDSGAHGDGDAPQEAAVGKKGDXEKRKGGEILTGSGGRRGGGGRRRRLPNGGLRGRRADGVALDLQKXEEGVREGRTDAGEAAAEVLLVLAELREATARVDVDRSGGATRLEAVKGAAASGVRWEWCSRGGEGEIRGGRTSPCGGEAGGGGXARRGDGCGGGKRRPELAGVWQRVGAAWGERGRVCRAREKWGNGRGEHGDAFYGLGKAGSRPDXRNRPAKWGGFAPVPSRQRAAPLSCRGESGSRSTGHPGRPNSITPTLAWEKAVLTSSKGRGGAGKRAPPVSGTKAPVHRGPGPPRRSTAGPRDPTARIGPKPIGRPRGGAAGARARHEAGSAETWRGGGKGEAXQGGGGNRLQQPATWNGGGWPEDSGAHGDGDAPQEAAVGKKGDXEKRKGGEILTGSGGRRGGRGRRRRLPNGGLRGRRADGVALDLQKEKRELGRGGPMREVELTGDRGRRSSGGFPAKRGGGRGPPRPCGAEGGNGASRRRPKRRRDAAGGGERGGGLGCAVGVVLEGWRGGNKRRPDFPLRWRSWRWRWLGAATAVAAGNGDRSSPECGSAWVRRGESEGEYAGLGKNGETDEGSTGMLFMGSGRRDRGRTXGGIGRRSGAPTWGGGGXTGADFRGESGGNGGGRGGDRAHVVGCELGCGRAPDFAATWTAMAVGVGRRKVEEGADGWDRRSHLSAKGEKKGRKTDFCERAKREGSRPERGRRRAARGRGKKTWAENGPKRGRGKFXICFLFI

SEQ ID NO: 187152 - protein, 398 aa, Oryza sativa
  unsure (1)..(398): unsure at all Xaa locations
  Clone ID: PAT_MRT4530_83884C.1.pep
RHQGKTSADTRAPHVSGTKGXAHGGPSPHVASGARPPRXTAQIGPXPIGRPRGAAARGTARHKAGLAEPWRGGGAREKVATXAARGRRQGGGGNRLHQPATWNGGGWPEDSGAHGDGDAPQEAAVGKKGDXEKRKGGEILTGSGGRRGGRGRRRRLPNGDLRGRRADGVALDLQKEKREXLTGDRGRRSSGGFPAKRGGGRGPPRPCGAEGGNGASRRRPKRRRDAAGGGERGGGLGCAVGVVLEGWRGGNKRRPDFPLRWRSWRWRWLGAATAVAAGNGDRSSPECGSAWAGSRPDVAESAGEVGRRRGVVEGLTGADFRGESGGNGGGRGGDRAHVVGCELGCGRAPDFAATWTAMAVGVGRREVGGGADGWDRRSHLSAKGEKEGCKTDFCERAK

SEQ ID NO: 187153 - protein, 671 aa, Oryza sativa
  Clone ID: PAT_MRT4530_83885C.1.pep
MAPPTLLPDSARAALDDAVQAVADAVRTSFTPREGSAVDPATGSSVANLAANRASKAAHAALSDALTAFVLSTNIDGSPISASSSASTSDTVLSSLTSSSTSTSAPVSSSTPPAPAVPPPTSSSPDPAVLLLPALEAILDPVRFPGTPQQPSRCPPAAPALGPDALAALHAQAVSVLNIKALVPITLDVATANFTRWRGLFLIALGKYALTAHVLSDERRPDLAEWIQMDCVVLGWLYGTISSDLLQEVMSHDATARSVWRALELQFLGYCEQRALNLTTEFRTFHQGDLSVNDYCRRMKTMADSLGDLGDPLTDRALVLATLNGLNEKFDTLRSLVTMQRPFPSFADVRSQLLLEELTKASRPSGQSTVLLAGASRGKPPSTPNPAHVTGYGAGASGGSGNSSNNKNRRRRGGGSGNSGGGTNTGGGGGGGNTPCGPKTPAQGCHAQKFTPNFQTILRIKSLSRTSQGKGLPLTSAREGAGADKRVPPVSDTRAPVHHGPGPPRRSTAGPREPTVRIGPSRSGGQGRRDWAQHGTKPAGQTTARGGAATRGDGRQQLPWAKAAHAREQRRGAARGRRHHRQRRGHGAPERGGSDPVGRPPAAAARREDAREAADEGEEKGEGGECSPRCTTAKERPTARNGGDGAPQEDDATELRRRASLGMGRTGSASI

SEQ ID NO: 187154 - protein, 390 aa, Oryza sativa
  unsure (1)..(390): unsure at all Xaa locations
  Clone ID: PAT_MRT4530_83886C.1.pep
VNPEATEAVAGPAPLHHAHPCLADVIKGEGRRRQAGPTGQRHKGAGPPWTGTTEAVHRRSTGTAGPDRPKADRTATRRRGWGTGTAXKPARPRHDAAAARGRRQGGGGNRRKRRPTRRKRTATTIAQWRLARTEGGRGRPXPATEEGGAPADFRRRGAAAEVLLVLAKLREAMARVGVDRSGGATRLESAASGGERLHGGEVVPMAVEGNRVATGVRRGMAKLAVAAARRGNGCGGGKRRLEFAGVWQRVGAAWGERGRVCRAREKWGNGRGEHGDAFYGLGKAGSRPDVAESAGEVGRRRGVVEGLTGADFRGESGGNGGGRGGDRAHVVGCELGCGRAPDFAATWTAMAVGVGRREVGGGADGWDRRSHLSAKGEKEGRKTDFCERAK

SEQ ID NO: 187155 - protein, 61 aa, Oryza sativa
  Clone ID: PAT_MRT4530_83887C.1.pep
RASFSMMDPLDFDFLVPSVYYWGFLLVCLLMLSKMAIFICNVAISTSDANKLKICGHFIAL

SEQ ID NO: 187156 - protein, 416 aa, Oryza sativa
  unsure (1)..(416): unsure at all Xaa locations
  Clone ID: PAT_MRT4530_83888C.1.pep
MQMCKGNFLKGKGCADVSKGDGRRRQAGPTGQRHKGAGPPWTGTTEAVHHRSTGTDGPDRPKXDRAARXRRGWGTARHKAGWPNDGARRRGQGEAATGCPAPPATARARSAERGGRQRXRGRPGGGRRRGGKGRGRGVLTEMHDGEGAADGKERWRRGSSGRRCDRAPATGVAQDGADXARPRSATEEGGAPTDFRRRGAAAEVLLVLAELREATARVGVDRSGGATRLESAAVAERGGSRGYGATEVERGNGAVAELARAAAKLAVAAEQCGGDPSDGKRRPEFAGVWRRAGAAWGARESAREGAMSWGKRXGEVGVHFYRPRRGRSWPWRXGNGRRMELRRRGRVGLERRRFFGGGNGGESGGRGGRGVDHVCTRAGAWRRAEEAASWGGSGGHGGSSLCLNPKCHSAIQFIPS

SEQ ID NO: 187157 - protein, 101 aa, Oryza sativa
  Clone ID: PAT_MRT4530_83889C.1.pep
YGSQEHPLIGRARFPGAVDAVVPSTSSTAPPVQDVKLNHQIKQIDYQHLWFGLQFGTSLQRLTTLIANNLVPVCIVICLPAPTINFLLRSKNYISVKGLQQ

SEQ ID NO: 187158 - protein, 113 aa, Oryza sativa
  unsure (1)..(113): unsure at all Xaa locations
  Clone ID: PAT_MRT4530_8388C.1.pep
KHEAWEICLTPVHVQRLAFRYVSVPVDLILQSTRNKDKETTVKSINDSRSARTLFMHGNPHEAHXLNPITCTESHCRNRLNRPTLSDSNSADPSHSRFGLSRFLLCFQNNLCL

SEQ ID NO: 187159 - protein, 43 aa, Oryza sativa
  Clone ID: PAT_MRT4530_83890C.1.pep
RKQKLKFSGLYNPRSCRLNPRSFCCKCSSLISPRSRISSCIHY

SEQ ID NO: 187160 - protein, 45 aa, Oryza sativa
  Clone ID: PAT_MRT4530_83891C.1.pep
SPGCSASSLKLLPVSPPGRPFTLAPFTCFSWLDFWGNFSVDVLCA

SEQ ID NO: 187161 - protein, 92 aa, Oryza sativa
  Clone ID: PAT_MRT4530_83892C.1.pep
CISQLDDYLHVRLTHSSTLLKLLPASSPGKIKMKKRPVSAAGGERGQAGRTNRGARKDGEQEDAVGADEELGEVLDGALAGAGGWRRTPHGE

SEQ ID NO: 187162 - protein, 837 aa, Oryza sativa
  Clone ID: PAT_MRT4530_83893C.1.pep
MGKVAAMDNPHLVHTILLAQSLLLFTCLFLHSNCETITRDDEKAVLLSLERSWGGSVTVNWSSVIYEDQCNWPGINCTDGFVTGISLTGHGLNNLPAAICSLTKLSHIDLSRNSISGSFPTALYNCSNLRYLDLSYNTLVNSLPSNIDRLSPRLVYLNLASNSLSGNIPSSIGQLKVLTNLYLDANQFNGSYPAEIGNISALRVLRLGDNPFLSGPIYPQFGNLTNLEYLSMSKMNIIGKIPAAMSKANNVMFFDLSGNHLSGSIPSWIWSLKRLVTLQLYANHLSGQINAPIESTNLVEIDVSSNNLSGQIPEDIGQLEELERLFLSNNHFTGSIPDSVALLPKLTNVQLFQNSFEGILPQELGKHSLLFNLETHYNNFSGTLPEGLCSKGALAYISMSANMFSGELPASLLRCNSLNYVWLSNNNFSGTFPAGLTEVQIQEVNLSGRLPSNWASNLVEIDLSNNKFSGRLPNTIRWLKSLGVLDLSENRFSGPIIPEIEFMNLTFLNLSDNQFSGQIPLLLQNEKFKQSFLSNLGLCSSNHFADYPVCNERHLKNRLLIIFLALGLTSVLLIWLFGLLRIKVLPRRQNENTTTPRWKLTAFHNINFNYQDIICGLADNNLIGSGGSGKVYKICLHNNSYRFVAAKKIVSDRSRSNMLEKHFQAEVEILGSIRHANVVRLLSSMSSTESKVLIYEYMENGSLYQWLHQKDMRNNNEPLSWPRRMSIAIDAARGLCYMHHDCSPPIAHCDVKPSNILLDYEFKAKIADLGLARALAKAGEPESISTMVGSFGYMAPEFGSSRKINEKVDVYSFGVVLLELTTGRFANGGGGYENLAQ

SEQ ID NO: 187163 - protein, 112 aa, Oryza sativa
  unsure (1)..(112): unsure at all Xaa locations
  Clone ID: PAT_MRT4530_83894C.1.pep
FFFFFFFFFLEQRIVRFQLFISWVMYSTTAIIGHSTQTLPIPKCKTPKQQKTPPVNFKTPISRRFTNHHRGMHDPAPIPRRLVAESDGYNSTRLWLHLTYRRSRPNLXRXTY

SEQ ID NO: 187164 - protein, 545 aa, Oryza sativa
  Clone ID: PAT_MRT4530_83895C.1.pep
MVLTPVLSNVTGRPAVVARPRASPGRPASEYRRQLGSAVDMPLDADVFRAPPGHNAPQQLLRAIEMMMTLSAAGADGLLPGLRFNPLSAPPPWMLLADHGRGDEAAFLEDARAKNANGKRQNHTADGGGFWQGKRMCVGGPDDGGGGGGGLAFLPPTIFPSPPPARHCSTPLSPSSPPFQPRGLLVRWAPPLAPRCSTPLSPYSPPFRPARLIVRWARPPPGWHKLNFDGSVFHDGSRQASIGGVIRGCDGGVVLAFAETTEHRGVGVVEARAMMRGLRLALSCGVDRLVVEGDDLVLVELLRGEKPHTRIPAAMHEEILSLLRRFAEVEVRHIYREGNSVAHTLCRQAYVCPGIWSEGGGGMPAVVWDKVDDDRRGVRVLDNIVSGPSICGVSGVEMVCDSTDGQRSGQQLDGGASERDAHHLFGEMPSQLGHDSSAVLHVAVSHGLFPVTHEVLSQVYDAYGAVAVQRAQLFPRNGADVTPTKSSASGTSGTITKPVAESTAVAVEHVFPATPASSAPLISSTAMMTPISLTMTKEADADMGK

SEQ ID NO: 187165 - protein, 85 aa, Oryza sativa
  Clone ID: PAT_MRT4530_83896C.1.pep
HVHTHAMVEACLGNYHQVLLILSQKVFIYKHNCIELNLDRRGTGVLMFTWQEITSRKVQFIFQYYFQVKEVNVTALSTTCKRFQH

SEQ ID NO: 187166 - protein, 194 aa, Oryza sativa
  unsure (1)..(194): unsure at all Xaa locations
  Clone ID: PAT_MRT4530_83897C.1.pep
NLCRGGTLYPHDVTNLGHLARISKADTGSPYANERGPRPTSGXVPDHTVPGSPRVLPGTTPLNPHVSWHHGSPDXLITQPGVSHFTHVVALVLCSDEIPRXRSLSARTGNRIPGTSPGPRFWKFILVRKHRPKCPFFQGSKVTCLAQGLHEASRIFEKTTINENPVTATIRKQLKTYTRPKIKILFRLNNSAIR

SEQ ID NO: 187167 - protein, 155 aa, Oryza sativa
  Clone ID: PAT_MRT4530_83898C.1.pep
MPRHPKTQRTSVVLEDQINDSDQSSTIAGCSACCDHAMTSENKEDQRFQSIANKIRLVDLKMRMEWFDTFGLHNRIFYVLQLSIIHLKRRKGSEENLRKYLRLCLVSQDSRSWSHVYMYHANVILSFLSRPCCINQYIQCYDGIFSIREDIALPD

SEQ ID NO: 187168 - protein, 326 aa, Oryza sativa
  Clone ID: PAT_MRT4530_83899C.1.pep
PRVRANLFKLMEKRGYGEDYINRYKMMTRFHHQRVPLVVLVCGTACTGKSTIATQLAGRLNLPNVLQTDMVYELLRTSTDAPLTSVPVWARDFDSPEELITEFCRECRVVRKGLAGDLKKAMKDGKPIIIEGIHLDPSIYLMDEEKRDDNSKMEKKVAESENSPATVKSKTEKQQENELHEKRMDDSQECMSEEGRISEGLSCAKSHVISSSDPACSKEKNPRAEGEGHKDLDLQKNNATKKDKPAAKPIIVPIVLRMSDFDHKALLEEWIATRASRDNCLPQDHRKLINNLKLIQDYLCSFESQGLTVVDISANSFPQTLDWLHS

SEQ ID NO: 187169 - protein, 118 aa, Oryza sativa
  unsure (1)..(118): unsure at all Xaa locations
  Clone ID: PAT_MRT4530_8389C.1.pep
HLGHIRTGLRASVAKHYRXFHMSSGANEGYTSYGPVVEMSWHKAVGNFGNGNERQTPEEKNQSEDEGDVDGSGSHATEAKTIPATSKNYSIALVDRNSTHPYLACQLSKQIFGNMKRG

SEQ ID NO: 187170 - protein, 166 aa, Oryza sativa
  unsure (1)..(166): unsure at all Xaa locations
  Clone ID: PAT_MRT4530_838C.1.pep
GNVPYPGHIALAFAQILMAAGHFLFAMAWPGTXYVATFLVGLGYGAHWAIVPAAVSELFGVKHFGAMYNFLTVANPTGSLIFSGVIASNLYDYEAEKQAHHQSSLSGRSLFDMSFLAEGPLKCEGAVCFFVSSLIMSAFCIVGAGLSLIVVHRTKRVYANLYRAVR

SEQ ID NO: 187171 - protein, 146 aa, Oryza sativa
  Clone ID: PAT_MRT4530_83900C.1.pep
MRRAHVQPHGSRWNARTGGADRGRPDPISAELAPTWRLRGAYVAATRSGGRTRGDEPTARIHRRMPDGGELRRRQPAAGEGGNGDEVSRGRFPAVRASTRLRESVASVGLSGATPSEAGDERVLRSTGGDGGEHTASGSNGRGGAG

SEQ ID NO: 187172 - protein, 149 aa, Oryza sativa
  unsure (1)..(149): unsure at all Xaa locations
  Clone ID: PAT_MRT4530_83901C.1.pep
MPRHPKTQRTSVVPEDHLNDSDQSSTIAGCSTCCDHAMTSENTEDQRFQSIANNMRLVDLKLRMVWFDTFGLHTRIFHVLQLSITHLQRRKGSEENLRILLLPLILPQGPGVXSHANMHHANVVLSFQIRPCCIDQYIQAGGYRKIFQP

SEQ ID NO: 187173 - protein, 322 aa, Oryza sativa
  Clone ID: PAT_MRT4530_83902C.1.pep
MGSGAVTAAEGVHFTHTTLLTRITLPTGISHVGRPPSFHDKAFPKPTQATVDTRTECTNIEAQLDGYKGTCHAGRREVEEDAGRNGRRTAATKGGANHGDTGESEHTGWLFETRGDEPTARIHRRELDGSELRQRQPAERKGENGDEVTRGRFPAVRASTRLRESVASAGLGGNASREAGDERRFRARAATAASTRRATAAVGAAPASYGEVTMGRRHGSDLSGLGLGKRKKRARPESPSVPLLVPAPPTRATTNGDGEQSTGGGDNGVEAMGQREEKRGRAPGLYRMAMSVWERGTDFERSSQRAGAPASGQIGDKEEGGG

SEQ ID NO: 187174 - protein, 421 aa, Oryza sativa
  unsure (1)..(421): unsure at all Xaa locations
  Clone ID: PAT_MRT4530_83903C.1.pep
GFSDNELLDDFSXGEIQPNQIGAIIVIDNLVYRDHPSLKLRGVPKDVRSHDIERVRNKEQLSTRVGCGQVHRIIENDLNKCRVVAPNLPTKTDDLSHSTGHGWTTREKHVAISCTANLYWCPRDNSTRSLVLQPYVAISRTANLHWCSRDNSTRSLVLEPYVAISHTANLHWCSRDNSTRSLVLEPLAPQPQMVEFSTSGVAILPLFLLLVVELRLPPGPRPEXCGDSSITSTPTKLTSDTQYRQVFYPEIPYHKRHIALKPILLFLYAVLTRPPRNLRELWLGTPRADKALSDPLEAGRRDLALSLIPSGVSSRRKATLLSTDSSGARTCIKIPVSISFSSVSRISGGHGSDVWTTAATAGGGDDDGSLTTGSMAAAGGSPATTSFKTSTRLAADCGGELSTRNARVAARTRCAYDAAAA

SEQ ID NO: 187175 - protein, 33 aa, Oryza sativa
  Clone ID: PAT_MRT4530_83904C.1.pep
PKLIQSSKGLQENSCNTNKIKKKTKNGACICVT

SEQ ID NO: 187176 - protein, 125 aa, Oryza sativa
  unsure (1)..(125): unsure at all Xaa locations
  Clone ID: PAT_MRT4530_83905C.1.pep
NLCRGGTLYPHDVTSLGHLARISKADTGSPYANERGPRPTSGXVPDHTVPGSPGVLPGTTPLNPHVSWHHGSPDXLITQLGASHSTHVVALVLCSDEILRKRSLSARAGNRTPGTSPGLRFWKFI

SEQ ID NO: 187177 - protein, 440 aa, Oryza sativa
  unsure (1)..(440): unsure at all Xaa locations
  Clone ID: PAT_MRT4530_83906C.1.pep
KKVAQGGPRRARAEEGERVRWTGLTTRGPGWDPLVSGSAHRAEGARGAALGCGGPTLSLTARGGTRARGGTDRGRLDPVXAELAPTWRLRGYHAGWREVDDDAGRNGRRSTAASDGANHGDTGKSEHTGRLHVTRGDEPTGRICRGLLDGGGLRRRQPAAGEGGNGDEVTRGXFPAARASTRLRESDASVGLGGTTPSEAGDERXLPSSGGDGGEHTASDGNGRELALGGRGQSGDREDDAGEEXKGEKEGEKGGLPLCRFGKKEEVSGGDAAEGGGMLPPSLGGLRAEWRGRAMTTAMTAGRFGAERRHWRQARAEADGGGDRAVGHPGTRARLATGGAADGVARLGHARWLAGPSGCAGGSRARARAERRGAGRGSRACVRRAREGHSARRRALARAARGGAEGEGERGKGRGRGEDGPRENRPIDPGGGKMDFCGGI

SEQ ID NO: 187178 - protein, 276 aa, Oryza sativa
  unsure (1)..(276): unsure at all Xaa locations
  Clone ID: PAT_MRT4530_83907C.1.pep
KLIVTGLLLEELLISRIRFIFFSSWGNKCLMQASLLTSAEGVHFTHTTLLTRITQPVGISHVGRPPSFHDKAFPKPTQVYHMPTRGVTDQQQFYPRSFSDFKFEGVRRYSHRVHEYRDATRWLQGDTAELAPTWRLRGARXCHAGWREVDDDAGRNGRRTTATSGGANHGDTGESEHTGWLLRTRGDELTARIRRRESVGGGLRRRQPAERKGENGDEVTRGQFPAARASTRLRESVASVGLGGATPSEAGDERXLRSSGGGEHTASGGNGRGGAG

SEQ ID NO: 187179 - protein, 667 aa, Oryza sativa
  unsure (1)..(667): unsure at all Xaa locations
  Clone ID: PAT_MRT4530_83908C.1.pep
MASKTLCEFAAPSAANVAVGPQVNIGDVDFDLKSSLITMAQASPFCGKPNEDANAHLQQFQEICTTYTIKGVSPDAVRLRLFPLSLLGRAKQWFYANRAAINTRDKCSTAFLSKFFPMGKTNALHGRISSFQQTRDESVPEAWERLQEHMAACPHHGMDDWLILQNFYNGLTPMSRDHLDAAAGGAFFSKTVQGAVELIEKMVSNMGWSEERLQTCQRGMHTVKETELLAAKLDLLMKRLDDHEKRPQGTVKALDSHVTCEVCGSTGHSGNDCPETREEAMYMGNNNGYRPQGGQGWNQLSPYYHEDLVFAQAKTIDVLSKKLAANDKILENINVKLDGFASAFQNQMSFNKMIETQLAQLESLVPANESGRIPGQPDPSIENVKAITTRRGTNEISKGAPSSDSVDKEVQPEKTMPQEKPSVDEQFTRFVEVIQKIHINVPLLDAMQVPTYARYLKEILNNKRPLPTTEVVKLMEQCSNVILHKLPEKEKDPGCPTITCSIRAQQLDQALCDLGASVSVVPKDVFDKLNFTVLAPKPMRLQLADSSVCYPARIAEDVPVKIRDFFIPVDFVXIKYGPNPQNIQVVEVEPPKTDSLVKFMQNFLEEETTMPRNRYWRTQVKSPALAKKSEQPAXKKPSSAPKSKKVRKEKPKTPAPSPPETGGKSVN

SEQ ID NO: 187180 - protein, 129 aa, Oryza sativa
  Clone ID: PAT_MRT4530_83909C.1.pep
DQLSSLDLSSPQIRSLPPPLPSPPPPSSLPPPLYSPSSLCTAERRAEPRPARASAGPGGGRRKRAANGGPSYGRCERAPGQATVGAGRRLAAATAGRRPAASGDGRAAGGQRRRALGGAAHAGGGRRPP

SEQ ID NO: 187181 - protein, 150 aa, Oryza sativa
  Clone ID: PAT_MRT4530_8390C.1.pep
VEQIFYINDPANKKMHVVRDGKQRIVGVDNVVNEEEYNKNLHVRPQIDLDDDPEDEVAYAVASRPQPPPSTPPGSRSTAASLHAPWFKIQRRRLLLQAITSRPPPPPSTPPGSRSTASSSSTPPPPPGSRSTAASSLAVDPAFLTTAAAS

SEQ ID NO: 187182 - protein, 477 aa, Oryza sativa
  unsure (1)..(477): unsure at all Xaa locations
  Clone ID: PAT_MRT4530_83910C.1.pep
MSLGIKAPLWDPLVSGSAHRAEGVRGARARAGEERGACARSVEERMRRAHAQPHGSRWNARTGGADRGRPVPTSAELAPTWRLRGCHVGWREVDDDTGRNGRRTTAASGGANHGDTGENEHTGWLHETRGDEPTARIRRRKLDGGESRRRQPAGREEGNGDEVTSGRFPAVRASTRLRESDVSVGLGGATPSEAGDERVLRSSSGDGGEHTVGAAPGEGXRSAVAAKAATXGGRRMTPAGGKKGKRGREKGACPLASSGKGEGSGGVTAEGGGRLCLRPLEASARAGAAEGDGGGDQAVGHSARARGKQRAARLGTRAGSRGRAAAGAAEQRGRATRTAQTTRLGRGTTRARARERRRAGAVFASGELARERRRRARGGDARRGACARAGRARGKGGGARRGXSRTRARGARAGRSGAEGEGERERXGGGEGARERERGRAGARRGRGEGRGRGEDGPREIRPIDPGGGKIDFCGGI

SEQ ID NO: 187183 - protein, 190 aa, Oryza sativa
  Clone ID: PAT_MRT4530_83911C.1.pep
MQEGKLAHWRTATGRRCAPPTGSPAQSCAADGCRMRKIEPENCYYFLLFLVTTHPTDAPSDSVPGRGAADDGGSVEGEDRKEHKQEEDAAELLFLKSSPPLSLSLRPPLPDSVGSASSYRAAATGSGGKRELPPRRRHRIWSSPSRHRWLLHHLSASESFPPSAKGGTRPSERSRAPLLGDGFGRKSDRR

SEQ ID NO: 187184 - protein, 172 aa, Oryza sativa
  unsure (1)..(172): unsure at all Xaa locations
  Clone ID: PAT_MRT4530_83912C.1.pep
NGVYSSKSAYFLQFQCIFPTTNFEKIWSAPAEPKXRFLGWLVLHKKTLTAQNLLQXHWSDWIYPLCREAFEGTSHMFKECSFISEVWNKICIWKGLDHNSLPNNLDLKSWWCSLSAIQPKPHQKRIMGCLITSWXNIWLERNKRIFQKTLSSADRVASLILQDLDLRHSAFQ

SEQ ID NO: 187185 - protein, 280 aa, Oryza sativa
  unsure (1)..(280): unsure at all Xaa locations
  Clone ID: PAT_MRT4530_83913C.1.pep
AETLKLIVTGLLLEELLISRIRFIFISNLGGGIXYIEQGLLISAEGVHFTHTTLLTRITQPVGISHVGRPPSFHEKAFPKPTQAYHMPTRGVPDQQQFYPSCFSDFKFEGDRRYSHRVHEYRGATGWLQGDIAELAPSWRLRGCHVGWREVDDDPAANGRRAAAASGGANHGDTGNSEHTGWLHVTRGGEPTARIRRRLLDGGGLRRRQPVAGEEGNGDEVTRGRFPAVRASTRLRELDASVGLGGTTPSEAGDERVLRSSGGDSGEHTVSDGNGRGGAG

SEQ ID NO: 187186 - protein, 135 aa, Oryza sativa
  Clone ID: PAT_MRT4530_83914C.1.pep
HEASRPPSPSPAAVAERRLRLSLVSPPPPHAVAIVFPVASRRRLRAPSLSPSVGVSASGRGGAKIMPKQVPWYFFFQVWGSSLTCPTPGSAPGLRSPSATRSERRRPHHRRREKLRAQILVLPPPPSPRAAVASP

SEQ ID NO: 187187 - protein, 232 aa, Oryza sativa
  unsure (1)..(232): unsure at all Xaa locations
  Clone ID: PAT_MRT4530_83915C.1.pep
MLGFGEELTRLGACTPSPPTPFVAPSPSPPRSAETVPRKSWASLRRPARSLIPRSYRHVGAPSISTSAPMSAPPXTPKPATPPIRAAGTPAPLALVCAXPPPPAPAPASRPCATQPPVVAAPATWIWRRDLQRGRRRALLVLAQRLQFTRISFGRTTKLPGIWGSALASPRPPQELPLPLHRSSIIASTCRPRLFAHRLAGPPPAFHTSATACLLGCTWNARASAATMVSQC

SEQ ID NO: 187188 - protein, 111 aa, Oryza sativa
  Clone ID: PAT_MRT4530_83916C.1.pep
LAVNSTGLLFRERAVVVSITVEDYLVTTYSLTRDKVWKVTNSLSHLSSPCKPDAAVAFLSSLTRLLHSSIAAAVAANLRLLCADVEKNLALLFSLLLPTAAASGSGSGDPH

SEQ ID NO: 187189 - protein, 82 aa, Oryza sativa
  Clone ID: PAT_MRT4530_83917C.1.pep
LFRVLFLPPVFPFIFLALFSPWRTSAALPGRIAAASSSPPLPSFLSFPVQTLTIPRLSNSRCCPGDGRCQALRNSGGPVLSP

SEQ ID NO: 187190 - protein, 93 aa, Oryza sativa
  Clone ID: PAT_MRT4530_83918C.1.pep
GSGRRSSASNPWKHARWWRGRVVTTAMTAGAVWKGTATGRQARGQARQALTAARARRKQRSGHRRSGRHRPLPAPLSSEGAPSPTPRQYPPPS

SEQ ID NO: 187191 - protein, 48 aa, Oryza sativa
  Clone ID: PAT_MRT4530_83919C.1.pep
NIFQPSSCNTIPWLAEMSNYCQFSKPKMVYLKSVLKHIFSGSNVWGNM

SEQ ID NO: 187192 - protein, 61 aa, Oryza sativa
  Clone ID: PAT_MRT4530_8391C.1.pep
LFELLVRLVTDGWHKDAHTLCEASSADVFCCFCQFVVARDKMLMSSAVCILILQATLQNVN

SEQ ID NO: 187193 - protein, 35 aa, Oryza sativa
  Clone ID: PAT_MRT4530_83920C.1.pep
TIMANEGLTPVYHSPKGKHTYQDYALHRTRSILTN

SEQ ID NO: 187194 - protein, 119 aa, Oryza sativa
  unsure (1)..(119): unsure at all Xaa locations
  Clone ID: PAT_MRT4530_83921C.1.pep
REQETRVHGRERSXREEDDDPGGGAHAGAPSAHARARHRREGATRLGPGGGPGGEEGEAAREGEGEGGSWAEGKEGGRPKREREGRKKRGRREGLWPRAEREREAWGLFLAFFFFLINF

SEQ ID NO: 187195 - protein, 79 aa, Oryza sativa
  Clone ID: PAT_MRT4530_83922C.1.pep
TPPPPPPRRYRALRRRTPRPPDPPPWPGRRRAPQPTLPHRARPPRSRAGPVKRGCGRRGPRWRWGGRKEGASGHAGAEE

SEQ ID NO: 187196 - protein, 559 aa, Oryza sativa
  Clone ID: PAT_MRT4530_83923C.1.pep
MAMDRAMRQWHHLLLVLCFVGSSSLLLVSSQTTSDSCTAALSLGNLISFNTTGLNCFQAWSSQGFILRLHWFRSLDVINGDALQFGKDASSAGSNSVWNFVLSAPDSGGYIAVGFSPNGKMVGGSAVAGWATPGAAGTARQYYLGGTTSSLCPPDQGKLSLSRGAAAPTIVSKGSRLYLAFQLSGQPLTNVIYAVGPAGTLPGPSGLLAQHKDMAAGTISLSGGTSGGGGSGTPATGGGGDGDEGHEDHEGGGEGKGKSDQSGGVGGESGSDGNGGRSTTTTASASSSGSASGRVFCAQWTKCSLVVQMLAETLKLIVAGLLLEELLISRIRFIFFSNWGDYLYRARESVLKCESGKNRIPDFKFEGDRRYSHRVHEYRGATGWLQGDMPHGSRWNARTGGADRGRPVPTSAELAPTWRLRGCHVGWREVDDDAGRNGRRTTAASGGADHSDTGENEHTGWLHETRGDEPTARIRRRKLDGGESRRRQPAGREEGNGDEVTRGRFPAVRAPTRPRESDASVGLGGATPSEAGDERVLRSSSGDGGEHTAGDGNGRGGAG

SEQ ID NO: 187197 - protein, 94 aa, Oryza sativa
  unsure (1)..(94): unsure at all Xaa locations
  Clone ID: PAT_MRT4530_83924C.1.pep
WRPPSSTPPRPSSSTAPPPPVAAAGRSPPPPPVATPPPLSASAPSSTAGSTSPTTGSTSPGAPVAXPSPSAPRSPVASSPPSRAPGHQIRSLCG

SEQ ID NO: 187198 - protein, 326 aa, Oryza sativa
  Clone ID: PAT_MRT4530_83925C.1.pep
MVSSAMAAVAVAFAVVVAATMSSAQLDPHFYDGLCPAALPTIKRIVEEAVAAEPRMGASLLRLHFHDCFVNGCDGSILLDDTPFFTGEKNAAPNMNSVRGFDVIDRIKDAVNAACRRNVVSCADIVAVAARDSIVTLGGPSYHVPLGRRDARTASQAAANSSIPAPTLNLDGLVSSFAAQGLSVQDLVLLSGAHTLGFSRCTNFRDRLYNETATLDASLAASLGGTCPRTAGAGDDNLAPLDPTPARFDAAYYASLLRARGLLHSDQQLFAGGGLGATDGLVRFYAANPDAFRRDFAESMVRMASLSPLVGSQGEVRVNCRKVNYY

SEQ ID NO: 187199 - protein, 391 aa, Oryza sativa
  unsure (1)..(391): unsure at all Xaa locations
  Clone ID: PAT_MRT4530_83926C.1.pep
PAGPRRPKRARERGGEGEGRWTGLTTRGPGWDPLVSGSAHRAEGARGARARXGRAHAQPHGLRWNARTGGTDRGRLDPVXAELAPTWRLRGCHVGWREVDDDPAANGRRAAAASGGANHGDTGKSEHTGRLYRTRGDEPTARICRGLLDGGGLRRRQPAAGEEGNGDEATRGRFPAVRASTRLRELDASVGLDGATPSEAGDVRVLRRSSGDGGEHTASDGNGRELALRLAAKTATGGXGMTPAGGKGEKGGGERGLPLCRFGKKEEGSGGDAAERGGAXLRPLAACARTARRHGRQARAGAAEGDGGGDRAVGHSARARGKQREARWFXAAWLGRARWLAGXRAAARLQAAGQRDRAASMRRQRGMGRRRARERRELCGRNKACTRRRME

SEQ ID NO: 187200 - protein, 167 aa, Oryza sativa
  Clone ID: PAT_MRT4530_83927C.1.pep
MILFNIRRPSSCIFAVAIPLAIASLPRTRSFPARALLPNRSRRLALPPCYAVAPVPPSRALAVPCRRRSRRLVPPLFRHRAALAPAFVSPCGGRRIVLQRRLRTWIRMLIARKGTWISRVLDRCAIGWFLQQASMVGRHKVCSSVSKSPMRRSAQVSGNKIVVFLRT

SEQ ID NO: 187201 - protein, 467 aa, Oryza sativa
  unsure (1)..(467): unsure at all Xaa locations
  Clone ID: PAT_MRT4530_83928C.1.pep
GPAGPRRPKARARGRGGEREPVDRAHHARSRVGPACRXHGSPCGASTRRTRAGGEGXRCTHAVRGGRGCGGPTRSLTARGGTRARGGTDRGRLDPVLAELAPTWRLRGCHAGRREVDDDAGRNGRRTTAASGGANHGDTGGSEHTGWLHETRGDEPTARIHRRELDGGELRWRQPAAGEGGNGDEVTRGRFPAARASTRLREFDASVGLGGNASREAGDERRFRARAATAASTRXVTATVRAAPASYEEATQATTRRGAVTRGRRRGSNLSGLGPGKRKERARPESPSASLLVPAPPKRATTNDDGKQSTGGGERERRGRGRRSSASVPWRLARGVAGPGDDDGDDGGGGLSGAARARALARGAERLRGRAAGPGGANGAGAARATTTRARAHANNGARAEXGAEREGSTRRSSRARARGARAERRRGRERERERRGGRGRWAERDSAHXPRGRQNRLLRRDLIWKD

SEQ ID NO: 187202 - protein, 298 aa, Oryza sativa
  Clone ID: PAT_MRT4530_83929C.1.pep
MGGGRKCVWVWENAAFMRFSGACERETRDVATVLFIGCAQLISGAAAPVKIGRTTALPNNLFPRRRSYTCTSSWGMRQIGCIIPFHSASIPHSEHEMPGRNAALSARFCIEPDERQQQKLKARRRTRTRSSRTPGLIRRARDCMSRSRVGPKPHPSVRHNVVDPACLHVANALKGGRELRFSRRLVQCAHEPNYRTSGDLRERERERQRGSIALLRRRTRRSIQWSTAQVNTYQQCEQVKCLFISQPPLVELKELLPPESSHCPVSAATSSLVAYKATTRPRQLVAAYRRLGNWVVLK

SEQ ID NO: 187203 - protein, 286 aa, Oryza sativa
  Clone ID: PAT_MRT4530_8392C.1.pep
FSTAVLPTFSVSIETPKYILAGAYSVVSTINAQYVFGKPVLGRYTFKYGVIQDGTVQELGERQGLIGDTGRAVVTLDDLSNDFDGPDWFDRFRGRHFHAKAIVHESATQFSEASINTKAIFVDSPYKFSRKRTVQYFKAGLNLQVNLDLTFANGDVATDVPVSVIATARFLGGREEPLRRTDIYGSQVDLRSNTDDQGGVSMDFGVQSSIRSINIVASTHDPQYPNNQADMSFGVSLADSANGNDYLVIRPRYADYRSLNVDVTTDFLVQRIGTTGNEDIDLHFLV

SEQ ID NO: 187204 - protein, 230 aa, Oryza sativa
  unsure (1)..(230): unsure at all Xaa locations
  Clone ID: PAT_MRT4530_83930C.1.pep
MRRRLSHLFKGSGSSSSHHDESSTRSSADISMXDAEAPRXLMNGTDLGLVGDRERQAYYMPSDREYAHTREYSPELLKKIGIDVEFRAIWKVVGWQRFVVVDEPGSRLLTLQFLCTLKEIEDVISFRFFHKEYTLTWKGLSTHFGFHDSCKIDLQKGIFGFEKNRFWEDIFGGLICKKPRTNDIHNATLRVMHXWIAMTLVSRGDLRPIKGDELXMMFAMVRKIKIAPVK

SEQ ID NO: 187205 - protein, 468 aa, Oryza sativa
  unsure (1)..(468): unsure at all Xaa locations
  Clone ID: PAT_MRT4530_83931C.1.pep
PRRRPRAAQDARAREGGEREPVDRAHHARSRVGPACQRLGSPCGGSTRHGTRVGEGXRCTRAVRGGRGCGGPTRSLTARGGMRTRGGTDWGRLDLVLAELAPMWRLRGCHAGRREVDDDAGRNGRRTTAASGGANHGDTGKSEHTGXLHETRGDEPTARIRRREXSAADCGGGLRRRQPAERKGENGDEVTRGQFPAERASTRLRESVASVGLGGATPSEAGDERXYGARAATAASTRRATAMVGAAPASYGEATRTTVRAGXAVTRGRRRGSNLSGLGPRKRKKRVRPESSSASLLVPAPPTCATTNGDGEQGKGGGERGRRGXGGGALPPSLGGLRAERRGRGDDDGDDGGGGLSGAARARALAAGPSGCRRGRAAGPGGADGAGATRATTTXARARERRAGADFAGEGRSRARARGARAERRGRGRGRERERAPRPRGRWAERNSAHRPRGRXNRLLRRDLIWKD

SEQ ID NO: 187206 - protein, 101 aa, Oryza sativa
  Clone ID: PAT_MRT4530_83932C.1.pep
LALTLLMALLKCNGSRASSLVTLLLIAALLFPAVCYAHVEAKTVCQKTEYGCTQEKCHQMCLGDGRTVASQYCRHYDTQCCCTYELQANDNDKMDDGRLHA

SEQ ID NO: 187207 - protein, 275 aa, Oryza sativa
  unsure (1)..(275): unsure at all Xaa locations
  Clone ID: PAT_MRT4530_83933C.1.pep
KLIVTGLLLEELLISRIRFIFISNXGGNIYIEQGLLISAEGVHFTHTTLLTRITQPVGISHVGRPPSFHDKAFPKPTQAYHMPTRGVPDQQQFYPSCFSDFKFEGDRRYSHRVHEYRGATGWLQGDMAELAPTWRLRGCHVGWREVDDDPAANGRRAAAASGGANHGDTGESEHTGRLFVMRGDEPTARIRRRELDGGETRRRQPAGREEGNGDEATRGRFPAVRASTRFRELDASVGLDGATPSEAGDVRVLRSSSGDGGEHTASDGNGWGGAG

SEQ ID NO: 187208 - protein, 182 aa, Oryza sativa
  Clone ID: PAT_MRT4530_83934C.1.pep
MGIVFTRLFSSVFGNREARILVLGLDNAGKTTILYRLQMGEVVSTIPTIGFNVETVQYNNIKFQVWDLGGQTSIRPYWRCYFPNTQAIIYVVDSSDTDRLVTAKEEFHAILEEDELKGAVVLVYANKQDLPGALDDAAITESLELHKIKSRQWAIFKTSAIKGEGLFEGLDWLSNALKSKSS

SEQ ID NO: 187209 - protein, 501 aa, Oryza sativa
  Clone ID: PAT_MRT4530_83935C.1.pep
MVSNMGWSKERLQTRQRGMHTVKETELLAAKLDLLMKRLDNHEKRPQGTVKALDSHVTCEVCGGTDHSGNDCPETREEAMYMGNNNNGYRPQGVQGWNQPRSYYQGGNNNETQLAQLAYLVPANETGRIPGQPYSSIENVKAITTRGGKSTRDPPYPNPAGTNGMSKETPSNDSADKEIQPEKTVPQEYCDTRLLPFPQWSRKTSVDELFARFVEVIQRIHINVLLLDAMQVPIYARYLKDILNNKRPLPTTEVVKLTEHCSNVILHKLPEKKKYSECPTITCSIGAQQFDQALCDLGASVSVMPKDVFDRLNFTVLAPTPMRLQMADSSVRYQAGIAEDVPIKIWDFFIPVDFVVLDMDTRKETPLILGRPFLSTAGANIDVETSSICFHINEKEEKFEFQPRTEQCSMVRIKYGPNPQNIQEVEVEPPKTDSLVRFIQNFLEKETTMPRNRYWRKPVKSPVPAKKFEQSAQKKPSSAPKSKKVWKEKLKTPAPSHPETG

SEQ ID NO: 187210 - protein, 60 aa, Oryza sativa
  Clone ID: PAT_MRT4530_83936C.1.pep
APKAMITTAQDVVSLFDRRIHYTQASTANICDGCVIKMTDLKPLVSKTLRLNKIETQLRI

SEQ ID NO: 187211 - protein, 213 aa, Oryza sativa
  unsure (1)..(213): unsure at all Xaa locations
  Clone ID: PAT_MRT4530_83937C.1.pep
SRLAVDRAHAEGPTGVGPTRXAELAPTWRLRGCHVGWREVDDDPAAKGRRAAAASGGANHGDTGKXEHTGRLFVTRGDEPTARIRRRLLDGGGLRRRQPAAGEGENGDEATRGRFPAVRASTRRRELDASVGLDGTCGTGRSXREADGAGVISPASGXEEEEGGAPGVPFRVHERTGSPGAWRWTAEARQSTGAATTVRRRMGEERKGGGRRV

SEQ ID NO: 187212 - protein, 838 aa, Oryza sativa
  Clone ID: PAT_MRT4530_83938C.1.pep
MVRNKPIRNEQCAQVPSEPSSSFLGHKPILINMLEWAKRAIPQSPHLSSLQYKKPSLLLLPFRGFQKQKGIKLVTDTAAVSVPCNLPPSPPQPPLPLPSPMAASPPWANLVSAVVGEIANHLPCEFDRVHFAAVCRSWRASLEQQAPVPLPPALPVLILPLAERPAVSFVLSNCAIHPAVLPEWPHDARYIGAYDDGWSSSPLLHLEDGAPGQEWQLPFSIVAATLSSQPDVDGCVFAGIISVDPVPRGQRTIGFWRASDRVIPHLFQTHNPPWDVEDVVFYDGAFHFLTQGEHIIVAGPDFHGGDPVDWEMRAFEHIGREYDQYVEARYLVESREDLLMVVRCSPYPGQPTSEFRVFRMAQAGPDDVFPYQHYVWLELPSLEGRMLFVGRGCSRSYDADQYPGFEGGVYFFDDDIQDPAMLPLGVATLFSFNDCEKWTRTPASMVERCFPAIGYTPQACPTTLERFGMGPNGSDPIADRQLSWPLASKYSWCIYKRRPDESAASANKQKGCSIPDLPEDIWRHIHSLMPMRDAARTACLSHSFLCSWRCYPNLTFNKYVFRPKAFTYGGDISHRIDSILGNHSGIGVKTLKLELSGTAYHNLDNWLQVAVTPGIEELTLMRFSCLRVHGCVRLKLIESKVPNLSTLDLSGKAELLLGETLQMKNLSMRHPNVVCYARSELPSSMPNIDTLALSSYDEVVNTPMLPTKFLYLKHLTICLSSGTFSPSYDYFSLVSFLDASPSLETLNLDVTNDPMKHESILGHSSKSHLRQMAEDHHCHLKNVEITGFSSAKSLVELTCYILKNSVSLECLTLDTLYPYDFRCSDERFERCRTMRIVF

SEQ ID NO: 187213 - protein, 467 aa, Oryza sativa
  unsure (1)..(467): unsure at all Xaa locations
  Clone ID: PAT_MRT4530_83939C.1.pep
MGRTAQDGPSARARGREEREXRWTGLTTRGPGWDPLVSGSAHRAEGVCGVRAWAGLERGRGGADVALRGSHAGRREVDDDPAANGRRAIAASGGASHGDTGEGEHTGWLHRTRRDEPTARIRRRESVGGGLRRWQPAERKGGNGDVVPRGXFPATRASSRLWELDACVGLGGTTPSEAGDERVLRSSGGDGGEHTASDGNGRGGAGXTTGRLLKLLPKARGRRWSEEEERREALPCGGXGAVTRGRRRGSKLLRPRADEEEEEGDGETEGGKGAEAKMRXGKGGGDGATRQRERRARPPPLGGLRAEWRGPGDDDGDDGGXFGAARRHGRQARAGXQRVTAAATRRSATRLARGXNGRRPRGRAHANTARGKRFCEREARARGGALGAGDSRARARGARAERRGXKKRRSARLSHARAASGRDXRGGGGARRGEREREGERERERDGPRKGEMGRARFGPSTLGEAK

SEQ ID NO: 187214 - protein, 48 aa, Oryza sativa
  Clone ID: PAT_MRT4530_8393C.1.pep
MELLGLSWSALPGQPISGWPSPSVCEARAGGSRRWQTMSGRELMSVDD

SEQ ID NO: 187215 - protein, 317 aa, Oryza sativa
  Clone ID: PAT_MRT4530_83940C.1.pep
MSGEDFTSSRDDEELPTPFTSSHYLMANGKNEVNKDSLDITIESSNGDDDDDDDGDEPSYDEVLDMLREATSSCITSKTNMSTSCDDLQDIPYSSNIDENSCSSSSMYVVANLVEENKQLQAKVKDLKEDLDRNYIRKNTLDEILSKQKSSNDKCGLGFHHKENAKKTRHMPRYTRKHAYLRKDGKKNVSKNHPHITCCGCHEKGHFASLCPKMKDEKYNSKLRQTGKKTSHRGQSLTCYNCRKKGYIGKNCLIGNTSKPNIIFDDYVLRKNRQGNVFASYVGLPRLAPRRRTIWVPRILVTNIDGPNFVGDQNVPK

SEQ ID NO: 187216 - protein, 62 aa, Oryza sativa
  unsure (1)..(62): unsure at all Xaa locations
  Clone ID: PAT_MRT4530_83941C.1.pep
WEKETWDRGRVHRACSCDGAGRVGVVQLNVRVVIVSCPLGEMGEGEFXRKHMQFRRDGVCCI

SEQ ID NO: 187217 - protein, 98 aa, Oryza sativa
  Clone ID: PAT_MRT4530_83942C.1.pep
GGVRVSLMIYRDYGEFIIISIASNSDLFWFITYTIVPMIPAKGEIHNITISAMIPPGKLPFGVLDESKGMFSTGPFGTGWEGLGLGCLAGGGLCCGGI

SEQ ID NO: 187218 - protein, 489 aa, Oryza sativa
  unsure (1)..(489): unsure at all Xaa locations
  Clone ID: PAT_MRT4530_83943C.1.pep
WAGWPKAAQTRARXGRRERAGGPGSPRAVPGGTRLSVAQLTVRREHATHARGRGRDAVHARGPRWTQVRRGHAQPHGSRWIARTRRDRPGSARPGLAKLAPTWRLRGGHVGWREVDDDPAANGRRAAAASGGANHGDTGKSVHTGRLHVTRGGEPTARIRQRLLDGGGLRQRQPAAGEEGNGDEVTRGRFPAVRASMRLRXLDASIGLGGTTPSEAGDERVLRSSGGDGGEHTAIDGNGRGGGAPGVPFRVLVRTGSSGTXRRLRSARGTAMARASGGQGXELALRLAAKTATGGREDDAGXEEKGKKEGEKRGLPFCRFGKRGRERGDSAEGRGXSLPPPLGGXRAEWRGPGDDDGDDGGXRFGVARRHGRQTRAXLTAAATGRSATRHARAACNGRRPRGXAYAGTTERGEGKGALGAALRARARGARARRSGAERGGRESGARREGERAGGEGEREREREREPGRERAGEEMGRAEFGPSNSGEAN

SEQ ID NO: 187219 - protein, 481 aa, Oryza sativa
  Clone ID: PAT_MRT4530_83944C.1.pep
MVMSSADSHVPTSRLLPVEVEVDVGFSHALDDRAPTSGQEKCLYLDAQATNALFCVLSDDMFNEVCNLKSAHAMWVKLKEKYEVSTLVENGCTQEWMSGEDSTSSSDNEELPTPSTSPHCLMTNGKNEVNNDSLDSTIENTCVVDDDGDDDEPSYDDLFDMLREASKYIAKEKKKNQILEKTLLSLKDSNVELINSYKELCDSYKKIKEAYESLLIGNAFSKLKVDIGITSSSCSTSKASVSTSCDDLLDVPCSSNIDENSCSSSSMYVVANLVEENKQSQAQVKDLKEDLDRSYKGKNSLDEILSKQKSSNDKCGLSFHRKENAKKTRHMPKYARKHAYLRKDGKKNVSKNHPHITCFGCHEKGHFASVCANTKDEKYNFKLRQTGKKQDKKTSHRGQNLTCYNCHEKRHIGKNYTIGNTPKFTIIFDDYVLRKNRQDNVFARYVGLPRLAPRRRTIWVPRNLVTNIDGPNFVGDQNMLK

SEQ ID NO: 187220 - protein, 77 aa, Oryza sativa
  unsure (1)..(77): unsure at all Xaa locations
  Clone ID: PAT_MRT4530_83945C.1.pep
MAPAVSASHGDIMRSLTSKLDSLLLQPSQSPTTAQPXVVAEGERXKILLLKGDLRQLLDDYYLLEEPXPSDTVPPSD

SEQ ID NO: 187221 - protein, 84 aa, Oryza sativa
  unsure (1)..(84): unsure at all Xaa locations
  Clone ID: PAT_MRT4530_83946C.1.pep
LFSGXCPXVFXLPIWXPNVAXHLPVXCNIVQLXHXAMRLGSLSXKRXXKFLXFQCXFLLXXLLHFXCXLFSKKXKKKKKKKRGG

SEQ ID NO: 187222 - protein, 159 aa, Oryza sativa
  unsure (1)..(159): unsure at all Xaa locations
  Clone ID: PAT_MRT4530_83947C.1.pep
YSFDSADVPLRYDAAAMASVMQKIKDIEDEMARTXEEHKIDQITLEELEILDKXLPHYCPISAHLEWNLDGLLEMIWEYLDLVRIYTKPKGLNPDYEDPVIVSSKKKTVEDFCNRIHKDMVKQFKYALVWGSSVKHKPQRVGKEHELEDEDVVQIIKKV

SEQ ID NO: 187223 - protein, 77 aa, Oryza sativa
  Clone ID: PAT_MRT4530_83948C.1.pep
NKIPRNPFYTYYHPTAIEDPHATPLHINNYDTYQSFFTDSTIFRVDQYFFIVLYPFHQCLHHSPIFSLAQNLNGPIY

SEQ ID NO: 187224 - protein, 392 aa, Oryza sativa
  Clone ID: PAT_MRT4530_83949C.1.pep
MATVMQKIKDIEDEWSFVKGCILQMARTQKNKATAHHLGLLKAKLAKLRRELLTPTSKGGGGGAGEGFDVTKSGDARVGLVGFPSVGKSTLLNKLTGTFSEVAAYEFTTLTCIPGVIMYKGAKIQLLDLPGIIEGAKDGKGRGRQVISTARTCNVILIVLDAIKPITHKRLIEKELEGFGIRLNKTPPNLTFRRKDKGGINFTSTVTNTNLDLETVKAICSEYRIHNADVSLRYDATADDLIDVIEGSRIYMPCIYVVNKIDQITLEELEILDKLPHYCPISAHLEWNLDGLLEMIWEYLDLVRIYTKPKGLNPDYEDPVIVSSKKKTVEDFCNRIHKDMVKQFKYALVWGSSVKHKPQRVGKGISPNINLGGFVQEHELEDEDVVQIIKKV

SEQ ID NO: 187225 - protein, 319 aa, Oryza sativa
  unsure (1)..(319): unsure at all Xaa locations
  Clone ID: PAT_MRT4530_8394C.1.pep
AKWSFVQQTLRGRLVLINSVISSLTMFIISFFNISKGVLQKNDYYRSRLFWQGDDYKNKYRFTRQDIICQPKYXMDPGVHNLEVXNKCLFSKLSFKLINEQGVWIGLLKRKYFNNQSICQVDRKQGDSHFLSGLMKVKSTLLNMGSWIMNNVXHVRFWEHKWISNYNFKDRYMSLXAIVRRRNYSIANVISSVPLNVSLRRALIGXNLANWCNLCASIVHIHLSKESDIFRWNFSXNGQFSVRSMYLGLINNDYIERNKIIWKLKKPLKIKMFIWCLLKXVVLIKDSLVRRNWNGSLRCCFYMKNETIQHLFIECHYAQ

SEQ ID NO: 187226 - protein, 65 aa, Oryza sativa
  Clone ID: PAT_MRT4530_83950C.1.pep
VIYLLESYFSLEPRRDSGFDCLVFSFPCTAVVRIYPRPARSLARSLCEPTQTSHLIAFLAFFCSN

SEQ ID NO: 187227 - protein, 581 aa, Oryza sativa
  unsure (1)..(581): unsure at all Xaa locations
  Clone ID: PAT_MRT4530_83951C.1.pep
LRSTSRPTPPRILLAGDANGRLHQLFKRVTSVNQSTGPFHALLCVGQFFSPDAGDGDGGGGGEVADYLEGRAAVPIPTYFTGDYGPAAPRLLAKAASSARGFSPGGIQICPNLFWLRGSARFTLHGSKGVFYAREPYVSDSAAHVTRFIGLANVGNKEKQQSQFLLKXTPKRPAEDADLQYWRYDVKKQRHGEAGGNRLCFKFTSSGSCPRGSKCNYRHDEEAREHYNRNRTXRVESSCWFCLSSPDVESHLVISIGEGYYCALAKGPLVPNHVLVIPVEHCSSTLKMPVEAEAELGRYKDALAKYFEKQGKIAIYFEWVSQQSRHANLQAVPVPLSKASSVKKIFHLAAQRLGFEFSVVNPDGDANRARELLRSECDSKSSLFYVELPEGSVLLHLVDSNEKFPAQFGREVLAGLLSMADRADWRNCGGGGGGVGQSQACAACKYQRRKCNADCPLARYFPADEQRRFLNAHHLFGVSKIQKTLRDTPPELHADAMQALTFEANARASDPVGGAARVVVELCRQYEMLHAELAAVQHHLKLCRQQHAAAAAAAANDPLVANVDPLADPAAEMLFAGRRRP

SEQ ID NO: 187228 - protein, 94 aa, Oryza sativa
  unsure (1)..(94): unsure at all Xaa locations
  Clone ID: PAT_MRT4530_83952C.1.pep
MDVAANWKVVVIHVLYHLCKAFKKIHVRLVKELEKKFSGKDVVFDATRRIVRPLNKGSAVHHPRTRTLITVHDGILEDVVXPAEIVGKYIRYRL

SEQ ID NO: 187229 - protein, 362 aa, Oryza sativa
  Clone ID: PAT_MRT4530_83953C.1.pep
MTASSSTTNSSSSVSTADTSSSNPPPQHALHRQHIASSSASSGGGGAAAPLPPRAPPRVGGGGGGGVGQSQACAACKYQRRKCNADCPLARYFPADEQRRFLNAHHLFGVSKIQKTLRDTPPELHADAMQALTFEANARASDPVGGAARVVVELCRQYEMLHAELAAVQHHLKLCRQQHAAAAAAAANDPLVANVDPLADPAAEMLFAGAVVPNQNDDAMVDAFYADQQTAGDGDQEQYLVKDEALAAQPPPQQPYEYLNYGTAGDEGSSHAWYTGNGGDADASPPMGLSDQLQQCQIGAAPPFDVKPELPATMEHGGSVFVEQPEQKILPAAGSSSSAAAHCQLELGCSSNAWKVGTHVIN

SEQ ID NO: 187230 - protein, 363 aa, Oryza sativa
  Clone ID: PAT_MRT4530_83954C.1.pep
KFIHAISPTPASTMSSVDIHARPPNTTLSPYISPAKSVPVEETPKRPAEDADLQYWRYDVKKQRHGEAGGNRLCFKFTSSGSCPRGSKCNYRHDEEAREHYNRNVCFDFLNKGKCEKGPECRFAHSLSDEGAVRDTKPRSERRRVESSCWFCLSSPDVESHLVISIGEGYYCALAKGPLVPNHVLVIPVEHCSSTLKMPVEAEAELGRYKDALAKYFEKQGKIAIYFEWVSQQSRHANLQAVPVPLSKASSVKKIFHLAAQRLGFEFSVVNPDGDANRARELLRSECDSKSSLFYVELPEGSVLLHLVDSNEKFPAQFGREVLAGLLSMADRADWRNCKVSKEEEIQMVDDFKQGFREFDPAE

SEQ ID NO: 187231 - protein, 315 aa, Oryza sativa
  Clone ID: PAT_MRT4530_83955C.1.pep
MNDAIFMFLEAQLSNADPEFQRPLRFTQKPKPHHGRRRCLAVSGDAAADPPRRRRERPPPPALQARHLGNLLLRRRRVLPSHLVVSSHRLPSAQVNQSTGPFHALLCVGQFFSPDAGDGDGGGGGEVADYLEGRAAVPIPTYFTGDYGPAAPRLLAKAASSARGFSPGGIQICPNLFWLRGSARFTLHGLSVVYLSGRKGPGGPGCYSQDDVDALRALAEEPGIDCTNEWPAGVVNGVDTSNAPSQISDPHGYDPVVAELVAEIKPRYHIAGSKGVFYAREPYVSDSAAHVTRFIGLANVGNKEKQVHLYLAKST

SEQ ID NO: 187232 - protein, 76 aa, Oryza sativa
  Clone ID: PAT_MRT4530_83956C.1.pep
NVQYLQFVIVARNTKLPQQSLSYNLQLNTIAGSGHTIGSIAVNAIPETDQKKLQTKRELGNHISHGDAGSRPFIEF

SEQ ID NO: 187233 - protein, 79 aa, Oryza sativa
  Clone ID: PAT_MRT4530_83957C.1.pep
DGKGTQTKRGPNFFPSLQRGHKIWVLPGTGKKTNHPKECREKKRPRKSGALRKNLKPTTKKSREISPKNKGQGGNPSKT

SEQ ID NO: 187234 - protein, 102 aa, Oryza sativa
  Clone ID: PAT_MRT4530_83958C.1.pep
MVGCEHMVLRVVLMTIKDRFASYCCETLTVPTTSQRGQRLYLLYNMIHCGAPRLKKGGDNPPGVAGESMPCFIRGGFEPRMGPGGSWVFPGIGPPLSGPFPE

SEQ ID NO: 187235 - protein, 141 aa, Oryza sativa
  Clone ID: PAT_MRT4530_83959C.1.pep
MKAAQRARPLDTGGPLDSNAPPRPAHLAQHDVRRPAHGRAGAPRPPKKSRPTHGRTVAAAARPEADARRAHGCYVPARNRLAPPLPLLNPPGCSPLHTCSLASHRRPAVPGEPTTVTADDPTPDACLSGRRPSTSAGPTDR

SEQ ID NO: 187236 - protein, 90 aa, Oryza sativa
  unsure (1)..(90): unsure at all Xaa locations
  Clone ID: PAT_MRT4530_8395C.1.pep
PPVFXASCGXCAVVAXCPLVXLSLSVSLLSPPAFAGPRFLPLLXFPRPCPPFVFVSPVLSVALAVGGSSXAXLLLGGASVPLVFARSGSL

SEQ ID NO: 187237 - protein, 132 aa, Oryza sativa
  Clone ID: PAT_MRT4530_83960C.1.pep
MADATGRVEPRVVVRRSSVRQRKFEKTKRDWAADFPRSAIEGLGGTLSKETAAMSRRVTALFGDRAARSKLSGTKISPSSNEGKGTLNWGRDWGGGEELEEKRSRMGEESGRRATGDLVAAVARRRMGGCRG

SEQ ID NO: 187238 - protein, 54 aa, Oryza sativa
  Clone ID: PAT_MRT4530_83961C.1.pep
MSHPEHTRMAVRILQTAAMQVRYGKPANNSDRSGYQQQETRVCITKVGTCIQVI

SEQ ID NO: 187239 - protein, 190 aa, Oryza sativa
  unsure (1)..(190): unsure at all Xaa locations
  Clone ID: PAT_MRT4530_83962C.1.pep
IANCPHXHMHASFTQAIAAQVQPVWNSKSNNRKGGHSRPIRLGAQIQAAHATQAAHLGVSPRLWPQGXTLDXDNPGGMALGLSMAKRTQGVFAPXPAPATRPTNGPFPCETPLWRHLGGKTKNKPDTWPKKSAPRXGGNHDGERRPENQSRPASKYGDQSGCTRLXGGRLXGTSXGYCAHXXSPVTRQEY

SEQ ID NO: 187240 - protein, 549 aa, Oryza sativa
  unsure (1)..(549): unsure at all Xaa locations
  Clone ID: PAT_MRT4530_83963C.1.pep
NEVQRFNPVDAFPGDAIIFMRVPNLLRGLSASLNVRIAYLDIMRPFAESTLLGSMTRGPTANSQWIYDSPVNSEVESKLRNLLLELGSNKILGIQVCAYKDGLNVXTHEASGTLGKYDPRPVQPDSLFPVFSVTKGITAGMVHWLVDKGKLKYEETVANIWPKFGTSKKELIKVXNPMIDEWCKEAPKELDFNHEAENTKAVSSNLSRKTNCESGAVSSAVDVLIPEVIQCTXGGIIEAASGKKLQEVLEEAIVHPLHINGELYIGIPPGVESRLAALTVDMEELEKLSGFRAGPDVPQELLSNVAQMATGLPVLFNTLNIRRAILPAANGHCSARALARYYAALGAGGAIPPRDSGGGSKPPLGSHVHTPKFPTMQSTXKKRNVKALQEKMKMNKKEVQRFSTSDAFDEEATMSAVVFGNGSGSGSSMFVDGGAKMLDAFMGVGDFSGMIHPNGKFGLGFRRYGYGAGAGEKVATTTFGHSGMGGSTGFCDVEHGLAMAVTVNKMSLGGVTRRVVRLVCEELGVPVPDEFSVAGDKGPDMVLNLAPPE

SEQ ID NO: 187241 - protein, 397 aa, Oryza sativa
  unsure (1)..(397): unsure at all Xaa locations
  Clone ID: PAT_MRT4530_83964C.1.pep
LPAGPPRPPRIAGGARRGGRPRAPPXQPSSSLNCVIVSHVLPSSDNIVQPSTSCTSCADLDVLLALILMRTTDPFLGGGALLCTDIKLNGQNYXLSALMLLRSIGQASHLTDDPPDEKTDATKVKAWKIADDRVMGFIFMSVDVAIRIGFKAHTSAKEMWNYLKQRYTQESGALRFSLLQNLNNLQQQQNQSIEEFYNVFTRLTGQFEVQIQKVVXGCAQCKAREKHDQENLVYQFAMRLLPKFEPKRVQLLARSTLPTMTEALADLIAEETRLSTLEITSTHSVAHNVLAATHRVGVPMGSVPRFXTIICSYCKKVGHTFHDCFHLHPKKLVDYQARRAITSRPHVAASVPGFSDSIAARSSMSVVGTISGAALCAPQLAIVGPSYLSSDWSWPSP

SEQ ID NO: 187242 - protein, 245 aa, Oryza sativa
  unsure (1)..(245): unsure at all Xaa locations
  Clone ID: PAT_MRT4530_83965C.1.pep
IPPGVESRLAALTVDMEELEKLSGFRAGPDVPQELLSNVAQMAPGRPVLFNTLNIRRAILPAANGHCSARALARYYAALGAGGAIPPPHSGGGSKPPLGSHVHTPKFPTMPSKKKKREVRRMMSASXDKDGYTQLRTSDGSDEGSTVSAVVAGNGSGSGSSMFVDGGTKMLDAFMGVGDFSGMIHPNGKFGLGFRRYGYGAGAXREGGDERRFGHSGMGRSPGXSCDVEHGLALAGTVNQMSLGG

SEQ ID NO: 187243 - protein, 53 aa, Oryza sativa
  Clone ID: PAT_MRT4530_83966C.1.pep
FLLCFFFEKGRCPLGDKSWIRLKKGINNRAFYGLQRECATNIRLFDGLLQNIH

SEQ ID NO: 187244 - protein, 503 aa, Oryza sativa
  Clone ID: PAT_MRT4530_83967C.1.pep
MEELKAPSSSTKLWTVLPWRISTLMMAMRISTQFHLPPPLTVAPGGRRATAAGGLARRAATGGSGGGRQRRAGSRGGLRRAAAAAGGLARRARAATSWRAATGGGGRRRAAAGGLDYRDLGSGCGNGVGGRRRQAAAATASVGGDDRRRAAAAVRIWRRATRRPAKNRLHHTSSLMRVLLHAFRGFYLRSLARLPAGELRNRYHQVIVKAGHCYGPMDPVSNIILNTVWYDAAFPAAAPPPVLDMIGPHILTRIESRSMYGLISFLQSRYHHLSEHEIVQCLVACRGDLPLAADEAMVIKAGQQSPCAGLQEAYEAAATAAWHPNPTAQAAFLTSCKAKLQESPAAMLLLQQGGDRVLSPEDVRYLAGVLLAEQKPSPQEIHMAEYYCSKQEDYLSFAPCEYKYTHVNFLATEKTDCSPSSPVLFFAEFDNKKAEGEPAIMCCKVDMPLPFAALEKFHGGDKEFEEVIRGKHSLTNSRIICLNEYAVQRLYAHDEDFMYVDVA

SEQ ID NO: 187245 - protein, 60 aa, Oryza sativa
  unsure (1)..(60): unsure at all Xaa locations
  Clone ID: PAT_MRT4530_83968C.1.pep
MDLQDPAGDPAAADPXLTMAETXDDQPTPSAPPLEAEGVAVAEEDPLSDPPLEVVEEDVA

SEQ ID NO: 187246 - protein, 695 aa, Oryza sativa
  Clone ID: PAT_MRT4530_83969C.1.pep
MELCTSSVSGSVQWSRISAFDYRTRSHGYASSSCWVSQRRRKTSFYVMNAASTGALPPTKKLIPRTNVRNISGDKPSSALEQLDIERGVCIPFRKYTPEMVRNRVLGSRGSVLSLASRGVEIIWKLGLYWSALMYDFLVGRDEGKLGLYWSALMYDFLVGRDEEIVPFRARQLRNLLCDLGPSFIKAGQVLANRPDIIREDYMNELCILQDDVPPFPNQVAFSIIEEELGQPLERLFSRISSRTIAAASLGQVYRATLRETGEDVAIKVQRPGIEPIIYRDLFLFRTLASFLNGISLQKLGCNAELIVDEFGEKLLEELDYTLEATNIEDFLENFKDDPTVKIPQVYKQYSGSRVLVMEWIDGIRCTDPQAIKEAGIDVEGFLTVGVSAALRQLLEFGLFHGDPHPGNIFAMRDGRIAYVDFGNVAVLSQQNKQILIDAVVHAVNEDYAEMANDFTRLGFLASGTDVSPIVPALEAIWQNSAGKGLADFNFRSVTGKFNQLVYNYPIRIPERFSLVIRSLLTQEGICFTLQPDFKFLEVAYPYVAKRLLTDPNPALRERLIQVLFKDGLFQWKRLENLIVLAKENVSKMSSNPALKKNSSQIERNRQMEKKLDLTDTIKDGARLFLIDAGIRRQLIMAFTEDSKLHVEELVDVYRLVEDQIDIPSVALEVIQDLPSVARDFMLSWSDSILSDRQY

SEQ ID NO: 187247 - protein, 268 aa, Oryza sativa
  Clone ID: PAT_MRT4530_8396C.1.pep
MMAAAGLESAWEYLITHFSEFQLASIGTFLLHESVFFLSGLPSLLFERLGLFSKYKIQKKSNTPDYQNRCVVRLVLYHVCVNLPLTILSYRTFKFMGLRSTLPLPHWTVVVSQVLFFFVLEDFIFYWGHRALHTKWLYQHVHSVHHEYATPFGLTSEYAHPAEILFLGFATVAGPALTGPHLFTLWVWMVLRVLETVEAHSGYHFPWSPSNFLPLYGGAEFHDYHHRVLYTKSGNYSSTFIYMDWLFGTDKDYRKTKALEEKERTKHL

SEQ ID NO: 187248 - protein, 62 aa, Oryza sativa
  unsure (1)..(62): unsure at all Xaa locations
  Clone ID: PAT_MRT4530_83970C.1.pep
LEIIHMLKLGXGQNVTAIALQKDNTNLLXSTADKQLIVFTYPALSSKIGDRMLQEGNGVLES

SEQ ID NO: 187249 - protein, 83 aa, Oryza sativa
  Clone ID: PAT_MRT4530_83971C.1.pep
PRGPPTGPPTGPRTRGRQSAPAWWTWRTRCRRQTKASATTRAKGCPSPATAGSQPGKVSRANHPQCPCLLVVELVLVVNSEWR

SEQ ID NO: 187250 - protein, 75 aa, Oryza sativa
  Clone ID: PAT_MRT4530_83972C.1.pep
GHSRRSQQGFLMGWLHSLFSPLRKLWVRAHSARRNRRGMHILYKDVKSCQDEDVHVLWSILVDSHRHPALMKLKL

SEQ ID NO: 187251 - protein, 122 aa, Oryza sativa
  unsure (1)..(122): unsure at all Xaa locations
  Clone ID: PAT_MRT4530_83973C.1.pep
PGLGPAGKGALPFPLFLGESPPAAPPAFLLSSPGGFFFSLXGPARFLPRLRTVPSAPRIYFGSPLSIGGPGFGRCGYVSCVARAVFAFSFSTGPSSVRGLAHLFFRLTIGWPGFPAGTGMEL

SEQ ID NO: 187252 - protein, 87 aa, Oryza sativa
  Clone ID: PAT_MRT4530_83974C.1.pep
LALRKAELVHQRPQDHREAWPRHRRQKGRHGPEQEIDQIMMMMMHTYIGFIINSQHVLNIPELVCETVLKACMSMMEFIAKNYSMHT

SEQ ID NO: 187253 - protein, 582 aa, Oryza sativa
  Clone ID: PAT_MRT4530_83975C.1.pep
MSPRVRMSVARWLPSSPAHGKTKSRRSSSAVRPTLLVIAVTVIAVLLVAVVFGGAGRWTLSGGGDTSWVSAGARVVINAVSGQQRDGDDPVAAAVEPRNDRLLGGLLSPDFDDSSCLSRYRAGLYRRQSPHAVSPHLVASLRRYESIHRRCGPGTSAYERAVERLRSPPPSNTSDAECRYLVWTPLEGLGNRMLTLTSAFLYALLTDRVLLFHHPAGEGLRDLFCEPFPGSTWTLPEGDFPFSGMQGFNARTRESLGNALRRGEGAAKDHPPPPPPWMYVHLRHDYNRNANDPRFFCDDGQDALRRVGWVVLLSDNYFVPGLFLVPRFERALSRMLPRRDAAFHHLGRYLLHPSNTVWGMVARYHASYMACANERVGIQVRSFYWARISTDELYGQIMSCAHGENILPRVTQQGPNFTAAGDQPQPAARPGRRKAVLVVSLHGAYSERIKDLYYEHGAAGGESVSVFQPTHLDRQRSGEQLHNQKALAEMMLLSFSDVVVTSAASTFGYVGHGLAGLRPWVLMSPLDKKVPDPPCRLAATIEPCFHNPPNYDCRTRAKGDTGKIVRHIRHCEDFENGVQLVD

SEQ ID NO: 187254 - protein, 164 aa, Oryza sativa
  Clone ID: PAT_MRT4530_83976C.1.pep
MGFPLVCYCMAIPKPLIALAKLLAAIREALQLMLFVVGICHHPERSGRPAAVDAPLPDEVKDRLPPLEFAQLLAASEHGCHGCDDDEAVAGCIVCLERLEADDVVRRLGNCAHAFHRGCIDRWIDLGRLTCPLCRSTLLPRARPAAGPRGRLGRLATRLTGVVW

SEQ ID NO: 187255 - protein, 64 aa, Oryza sativa
  unsure (1)..(64): unsure at all Xaa locations
  Clone ID: PAT_MRT4530_83977C.1.pep
FTNMVADDDDLGYVFLEREVSGRAINGETAFLFGSMLPMHLMVYCYKQQICYPPSSPINFXSLD

SEQ ID NO: 187256 - protein, 209 aa, Oryza sativa
  Clone ID: PAT_MRT4530_83978C.1.pep
MGAECKYEVAQVAYVKLALHALKHPAAAVNGLLVGRLLDGAASPAAVVSIADAVPLSHHPHHLPLLPTLELALTLVEDHFAAQGLAVVGYYHANARRDDADLPPVAKRVGDHVFRNFPRAAVLLLDNKKLEEAVKGKSREPVVQLYTRDSSKSWRQAGSDGSSQLTLKEPSTNMVLADHVTTKKWQQVVDFDDHLDDISKDWLNPGLLA

SEQ ID NO: 187257 - protein, 294 aa, Oryza sativa
  Clone ID: PAT_MRT4530_83979C.1.pep
MGAECKYEVAQVAYVKLALHALKHPAAAVNGLLVGRLLDGAASPAAVVSIADAVPLSHHPHHLPLLPTLELALTLVEDHFAAQGLAVVGYYHANARRDDADLPPVAKRVGDHVFRNFPRAAVLLLDNKKLEEAVKGKSREPVVQKIQLPNISLHSDICKKAHPPGPCSTPWHPGDEVQGLVQPSNTELLIGRPYLVLISAMEFSSFRQIEERRSSDNIRSFMLYTRDSSKSWRQAGSDGSSQLTLKEPSTNMVLADHVTTKKWQQVVDFDDHLDDISKFVVASTTKVTNNRGKT

SEQ ID NO: 187258 - protein, 58 aa, Oryza sativa
  Clone ID: PAT_MRT4530_8397C.1.pep
YFLPLYGGAEFHDYHHRVLYTKSGNYSSTFIYMDWLFGTDKDYRKTKALEEKERTKHL

SEQ ID NO: 187259 - protein, 108 aa, Oryza sativa
  Clone ID: PAT_MRT4530_83980C.1.pep
MATALCHAGAALRSAGAAGDWRFSDARPRLREVSALTAAETATDDILVASPDVVMTSVAGKMSWSTGERDVEGGRNREKRKKEDTDYAIATGKAHYVVIVEELNSAAA

SEQ ID NO: 187260 - protein, 71 aa, Oryza sativa
  Clone ID: PAT_MRT4530_83981C.1.pep
IVQTGFSEHDIHLTFTVQAEQPGALDLICCSRNAPNNTVRDVMTQLASRYRKKTLWIWPNGIRLLNLTCFL

SEQ ID NO: 187261 - protein, 84 aa, Oryza sativa
  Clone ID: PAT_MRT4530_83982C.1.pep
MARTTELVVFLAGLLLSAAAEEAETYLHVEIKLATLLATRKRIFTIRTNIKLQILIRLYQMHERWIKSAYMLLTLETSLGPALE

SEQ ID NO: 187262 - protein, 136 aa, Oryza sativa
  Clone ID: PAT_MRT4530_83983C.1.pep
DVGDDVIIGGGSGVHARRRTTARQRERRTPTHRGRRGELTEGRTRLATAWRTRRRLSRATTTTEATAAHGWSDGGDGDARLHGARALRATRGEGEGGGGTAVAPRGHAGGGGTADDGRAAAQDARRRRSNTAIGRN

SEQ ID NO: 187263 - protein, 95 aa, Oryza sativa
  unsure (1)..(95): unsure at all Xaa locations
  Clone ID: PAT_MRT4530_83984C.1.pep
TEGEREASRPAASGGQTGGKRRSDRWWRQARQAILAVRPEIQHRSDRXHLLGQTGRSISVRPTSVDFKAAVAVAAAARRRGPRPPLHQIWPKGGW

SEQ ID NO: 187264 - protein, 335 aa, Oryza sativa
  unsure (1)..(335): unsure at all Xaa locations
  Clone ID: PAT_MRT4530_83985C.1.pep
MVQEMSKSNELSAQTLSSIQSFASEDGSSDEEYDYDEFTMHLFETVASNLSSTRKAVESYNTLYLEKAPPRTSRLSGMEWVQETLATXGECYKMLRMNGNTFIVLHGLLVTSLXSTIHMHTMEALAIFLYILGDGSSNQRAQSHFKHYGETISRKFEEVLLAVVELGRDIVRPKDPNFPTTHDRIRRDHRMWPHFKDCIGAVDGTHILAVVLDEDKVRYIGRSKLTTQNVMANCDHDMRFTYASIGQPGSMHDTTVLFNALETDIAIFPHPPQGKYYLVDVGYPNRPGYLAPYKGQRYHVPEFWRGSTPTGEKKNSTSYTRVCALLLSDALVYGR

SEQ ID NO: 187265 - protein, 64 aa, Oryza sativa
  Clone ID: PAT_MRT4530_83986C.1.pep
LLGAPDTDSFIQTESTTAVELAGVYYCSTKSEAPSETEVRLDPRPQFSSLETPPRHNKKDVLRS

SEQ ID NO: 187266 - protein, 88 aa, Oryza sativa
  unsure (1)..(88): unsure at all Xaa locations
  Clone ID: PAT_MRT4530_83987C.1.pep
KYNXWLGEXGXXADGGSDTAKRALKPXPPAAAAXITATPRCPRRCFPPRDPSRXLGLALQXLDAEAXXQQRVVGXRRSNDDGGGGXEX

SEQ ID NO: 187267 - protein, 97 aa, Oryza sativa
  Clone ID: PAT_MRT4530_83988C.1.pep
IDGVKIFIYQISAVTVRVLMANQSMDPHIQSQQMAHSLKLCAYVLLLFLDHSDSPVNESTTQFCIRASSSRHSVWPRSHYCCSKIPPDDTWSGGVWN

SEQ ID NO: 187268 - protein, 106 aa, Oryza sativa
  unsure (1)..(106): unsure at all Xaa locations
  Clone ID: PAT_MRT4530_83989C.1.pep
MTRLAASELWYVSQKTNALRSRRPTVAASACDSDCPPASRPTPTPTPSTGSSSXPRDALKLRVCANVLGLVKAKVGAVAPYEPCCSLLDGLVDLEAVVCPPAQLIR

SEQ ID NO: 187269 - protein, 66 aa, Oryza sativa
  Clone ID: PAT_MRT4530_8398C.1.pep
LIFFTSQKVHSGPFHYDCSNLQVGRLENKMQLIFPTSMIRGGGSCVNPRLELFHPKTNPCAQSTVD

SEQ ID NO: 187270 - protein, 142 aa, Oryza sativa
  Clone ID: PAT_MRT4530_83990C.1.pep
MTRSTCARSSGGRGVEAVEHGGVVLPDLDDIAKVALHSDALDTVKSDGMALLFESLAATGVLEPDDALLTEMRVRIDEEVLQAVVVPQAAFVYSTNWENGILIRKKRQWQADQSYCQPILQFNVTFRAYTGSGPQQQELQKS

SEQ ID NO: 187271 - protein, 66 aa, Oryza sativa
  Clone ID: PAT_MRT4530_83991C.1.pep
VFVEFPFLVHHFSKSLIILSLMSTLNKNIGLYDHHVIMYLSRFSLLQTGVSYRLPYIKLTSQITAL

SEQ ID NO: 187272 - protein, 47 aa, Oryza sativa
  unsure (1)..(47): unsure at all Xaa locations
  Clone ID: PAT_MRT4530_83992C.1.pep
LFKGTSGXSNGSNRSLSSRTIRLTLHSQLETREEENSITFKRKMGIS

SEQ ID NO: 187273 - protein, 151 aa, Oryza sativa
  Clone ID: PAT_MRT4530_83993C.1.pep
TGAPWAALPTTTASIQPDLDDIAKVALHSDALDTVKSDGMALLFESLAATGVLEPDDALLTEMRVRIDEEVLQAVVVPQAGEPRRAPSPVSPRHRTARRRPPTPSSSPTPPRRRQQPAESPTSSPAACPNEKREREGRERERRGEGDDVAS

SEQ ID NO: 187274 - protein, 29 aa, Oryza sativa
  Clone ID: PAT_MRT4530_83994C.1.pep
RLRPHQVPVLRERLVLPPSRQLTPPLLLG

SEQ ID NO: 187275 - protein, 62 aa, Oryza sativa
  Clone ID: PAT_MRT4530_83995C.1.pep
FFFIRYSRISVRYAGSCTVCDERSTILSNILNCTVRCQCRSCGCSKRCGGAPPVAGELPGRV

SEQ ID NO: 187276 - protein, 134 aa, Oryza sativa
  Clone ID: PAT_MRT4530_83996C.1.pep
RIGEVGDNGLTGSTWIDAGKGDRAHRFRRVACVPHPSAPLRLTAAEEEGNGPMDKNAHAPVSVRMRVCVLAVTEAAAAPRPGPDRIHESTKRPWPWRYPPPDSARALVDTGCDWVFLLPGGSLRFVSSQDSSEV

SEQ ID NO: 187277 - protein, 315 aa, Oryza sativa
  Clone ID: PAT_MRT4530_83997C.1.pep
NLFNLRYIGLRRTKVKSLPDSIEKLLNLHTLDMKQTKIEKLPRGITKIKKLRHLFADRCVDEKQSEFRYFVGMQAPKDLSNLKELQTLETVEASKDLAEQLKKLIQLKSVWIDNISSADCDNIFATLSNMPLLSSLLLSARNENEPLSFEALKPSSTELHRLIVRGQWAKSTLDYPIFRSHSTHLKYLSLSWCHLGEDPLGMLASNLSDLTYLKLNNMQSAATLVLRAKAFPKLKTLVLRQMPDVKQIKIMDGALPCIECLYIVLLPKLDKVPQGIESLNSLKKLSLLNLHKDFKIQWNGNEMHKKMLHVAEICV

SEQ ID NO: 187278 - protein, 89 aa, Oryza sativa
  unsure (1)..(89): unsure at all Xaa locations
  Clone ID: PAT_MRT4530_83998C.1.pep
NQTKVIANNSVKPTATELVTQQSHYQXAISHVQAIVQQLQLQQVGVVYFDQTQAQAQAKLALNLPSICGIYPNYYIAPKSIPTVGGVWY

SEQ ID NO: 187279 - protein, 169 aa, Oryza sativa
  Clone ID: PAT_MRT4530_83999C.1.pep
MMPPRSKRSNKVSEIKKKKKKIHQEDDSRRKDYYYCHHSPTLTPTQNPPKPPPKKKQIKNTNSKQQRPRTPSKPNPPKRNPPKTPESKPEHEQRGKERTRSTDSLSTASRLSPFSAISPLLRLCAAARGREKRETTKPPASPSRRLRLLRLLLLLLLLPLDGHSLCCPI

SEQ ID NO: 187280 - protein, 53 aa, Oryza sativa
  Clone ID: PAT_MRT4530_8399C.1.pep
MVLIIIGYRRRGASLPSCYRMPPCYFHLPPLGCPCRCELPQLCAYGTVPQQRI

SEQ ID NO: 187281 - protein, 694 aa, Oryza sativa
  unsure (1)..(694): unsure at all Xaa locations
  Clone ID: PAT_MRT4530_839C.1.pep
MGKVGEKVRAFATNRWLVFVAAMWLQSMAGIGYLFGAISPVVKAALGYNQRQVAALGVAKDLGDCVGFLAGTLSATLPAWRXLLVGAAQNFLGYGWLWLIVTRQLSAFLLSMVLLCNGQWXMCLPFFVGIIGEIYINTASLITCIQNFLKRCGPIVGFIIWFASLRSASLTQLYSVLHIPSNVSLVFMGAVRTSGGAIGLMFWGRHVGGHRQLRPSDNNSLMLNYAISLLLASYLFGVMIVQDVVPLSDNNLVFITAVRFIQDLLQIAIPVVLTLSPKTEHPMEEALLAEPSKGQASTSQEKEPDVFLSEVEDEKPKEIDSLPPSERRKRIAELQARLVQAAARGGVRIRRRPHRGENFTLMQALVKADFWLIWLSLLLGSGSGLTVIDNLGQMSQAVGYKDAHIFVSLTSIWNFLGRVGGGYFSENIVRERTYPRHIALAFAQILMAAGHFLFAMAWPGTIYVATFLVGLGYGAHWAIVPAAVSELFGVKHFGAMYNFLTVANPTGSLIFSGVIASNLYDYEAEKQAHHQSSLSGRSLFDMSFLAEGARATYAIKAQNLCPSLEGISQMVSTLEVHLAAESKIDGESDWYRILSLTAFADEEEVKKQYRKLALQLHPDKNKSVGAEEAFKLISEAWSVLSDNSKKVLYDQKRKDHSVVNVTNGMYTYDKKANKRSRLLSPALSVANTSAHCTI

SEQ ID NO: 187282 - protein, 56 aa, Oryza sativa
  Clone ID: PAT_MRT4530_83C.1.pep
KWAPSPPSPGTTAKFPKTAGVFIYSASVCLKKNKFLGLFPRPSKQRGLCFSVPGML

SEQ ID NO: 187283 - protein, 508 aa, Oryza sativa
  unsure (1)..(508): unsure at all Xaa locations
  Clone ID: PAT_MRT4530_84000C.1.pep
MGWDEPTFRGVWLRGEWDGLVPGEEYSSQIRDQLIGENVADELVPPGTSERRDDAFLPRSRCSPSGATADGSGDGDSGRLGDGDHAGLGDDDRGGGXIGDGXGGSSGGEGSGGXSGDGEDCGGGFGDGEEQRRHARRRSRGGGGFGDGDCDGSRXRSSRGRSGGGVRGGGLGAAADLAMGRRRIRRWGEAAAACDEELAGKERRRRARRKSRDGGGSGDGKERRRLFLLLLLAAGFSSCSPPAFPLALARRRLILLLFLRRWGGLWWQIRRSVDGDCKRRPSLPSLIPSTKQKIGIVPSYKPNITLKRTIQFLIKELLKECFFIWLAVKGRCLTGDNLAKRGWPHDPLCALCSIDMEDCHHLLVKCPYTNRVWSLLRDRINVHFDIPGRLDLSLADWWQLARTRFQTRYSKAFDTFFMLVCWLVWKERNARVFDQKFNTADLLSADIKEELTRKKRKNSEREAGMDLANIQLTDHRQQKDSPFQQHMLESTYYMHMTNQCALLVEVLV

SEQ ID NO: 187284 - protein, 101 aa, Oryza sativa
  Clone ID: PAT_MRT4530_84001C.1.pep
EAVRRYGLLDVPQRDRRLVRRRPVHDRAIARRARPALLLLALVIRHPAAGTHLAELALVAFAGAEERSAGGRSGWGAAGTLPMVPRSCAANAGLARRRARG

SEQ ID NO: 187285 - protein, 125 aa, Oryza sativa
  Clone ID: PAT_MRT4530_84002C.1.pep
KLRRFWARFGFQPPRLECAGGDPAGPWPVVEVFLFLFLFYFYYYFYSFIFLYFLFFFFFIFLAEMLFLFFYLFIFYFSFFYYFFIYFSIFYLPLSYFLLFFIIYKITIIFYIILYFSYFYSISYI

SEQ ID NO: 187286 - protein, 141 aa, Oryza sativa
  Clone ID: PAT_MRT4530_84003C.1.pep
LGGGFSKVSPWIGGGDWSIFGTMEFCGWGQKIFWSREGAVCWVKKNLGLKIKAACFSIGFFFLGLPLKLKNFAREFCSLVGAFVVGGPPPLGPSFFFFVFMRFCWGGPRFSPKKKKKKKKKKKKKKKKKKKKKKKKKKNHK

SEQ ID NO: 187287 - protein, 560 aa, Oryza sativa
  Clone ID: PAT_MRT4530_84004C.1.pep
MAGARSAPSVAAAPLPMPLPRPSSSGSTLQKLVGPAAPSLAPLTLRAAFVSFPALLPRPGTSGSALPRPARAGFPPRCPLSHASTAAPFPTQPPFPSSLPLPSSTRFGQPDPLAGRLGRQIRKPSLMRGGTGRRWREKGRRREEGEGWERGVERREAEGPREEGESRREFGGCWILIASKFILQWRPLPTVSENPIFAGGHLRGVKPMSFGNLGGGGGAGGSGKAAASSFLQLPLSTAAAATAYYGTPLALHQAAAAAGPSQYHGHGHPHHGGGHHHSKHGGAGGGEISAAEAESIKAKIMAHPQYSALLAAYLDCQKVGAPPEVLERLTATAAKLDARPPGRHDARDPELDQFMEAYCNMLAKYREELTRPIDEAMEFLKRVESQLDTIAGGAHGGGAGSARLLLADGKSECVGSSEDDMDPSGRENEPPEIDPRAEDKELKFQLLKKYSGYLSSLRQEFSKKKKKGKLPKEARQKLLHWWELHYKWPYPSETEKIALAESTGLDQKQINNWFINQRKRHWKPSEDMPFVMMEGFHPQNAAALYMDGPFMADGMYRLGS

SEQ ID NO: 187288 - protein, 525 aa, Oryza sativa
  Clone ID: PAT_MRT4530_84005C.1.pep
MVRNGEAINGPVPDAPPQDIYVAHPEIVILRVPKNTHNGDTGSAFVNGGVLKEIRDWVNAKRDTPLGEDEATTHMENTCHAIHDYLKLYFPAYRPQIGGKVRGHQVSRVWELGERLGKDDGRCLACHKRVKGFNGSRPRRQRLQPTGAAAASASRQWEQAEAAAGGLEQSCTKQAISKVQAFSSSCVWISLRSLFSIHYRIHFLKANFWFLTKGLPEFSYLGWGHWFTLRDLELATNCFSKDNVIGEGGYGVVYRGRLSNGTPVAVKKILNNLGQAEREFRVEVEAIGHVRHKNLVRLLGYCVEGTQSLAYLHEAIEPKVVHRDIKASNILIDDEFNAKISDFGLAKMLGAGKSHIATRVMGTFGYVAPEYANSGLLNEKSDVYSFGVVLLEAITGRDPIDYDRPTDEVNLVDWLKMMVAHRRSEEVVDPNLERRPSTKELKRALLTALRCIDLNSEKRPRMDQVVRMLDSNEPIPQEERRQRQNHISNNSETEPLRGKSSSGKSDAPENEMRPPRYKNRSFPPK

SEQ ID NO: 187289 - protein, 136 aa, Oryza sativa
  Clone ID: PAT_MRT4530_84006C.1.pep
MELDVAATWSGEELVATAGRSPSRLSRGRIGCPRPSSDYVVVAAASLPYRAPPSSWRRIRPPPVVVAAAPASPVIVATDLATHVVAAADPATPVIAAADPASPIDAAVVAMAALGGGGDGSPRRWRKEREKERRRD

SEQ ID NO: 187290 - protein, 110 aa, Oryza sativa
  Clone ID: PAT_MRT4530_84007C.1.pep
KMMVAHRRSGEVVDPNLERRPSTKELKRALLTALRCIDLNAEKRPRMDQVVRMLDSNEPIPQEERRQRQNHISNNSETEPLRGKSSSGKSDAPENEMRPPRYKNRSFPPK

SEQ ID NO: 187291 - protein, 373 aa, Oryza sativa
  Clone ID: PAT_MRT4530_84008C.1.pep
MSSNSTLTDSLHERTIVFGLKLWVVIGISVGASLLGVLLILIVCLTLQTWIKRSRRTFKEIPITQIPSASKDIKEVRAVEEFLPNDFVVHDGLLLAIQNEPVEPVDKDVNQFAQEDKTIQGEENSPVPLHYVDNYDVIQSVSTCEQSSSHAPVDSVLLPGLPEFSYLGWGHWFTLRDLELATNCFSKDNVIGEGGYGVVYRGRLSNGTPVAVKKILNNLGQAEREFRVEVEAIGHVRHKNLVRLLGYCVEGTQRMLVYEYVNNGNLESWLHGELSQYSSLTWLARMKILLGTAKALAYLHEAIEPKVVHRDIKASNILIDDEFNAKISDFGLAKMLGAGKSHIATRVMGTFGYVAPEYANSGLLNEKSDVYSF

SEQ ID NO: 187292 - protein, 73 aa, Oryza sativa
  Clone ID: PAT_MRT4530_84009C.1.pep
MSTYFTLCSCCTEYTASLSGRCFGAGIMFPYAITLCHDDDIRVVSGSFDVVSSPGCMVITGCLKELGNTHLMW

SEQ ID NO: 187293 - protein, 226 aa, Oryza sativa
  unsure (1)..(226): unsure at all Xaa locations
  Clone ID: PAT_MRT4530_8400C.1.pep
MEPGAPPPRPINLPPGRPSIPHHHPPHSLLFPPFPSTAPRCRLRAAVVAPPSRRRTAAFMPPRRAPSSCRRRRRRRRQDPHVSEARXVAGLPWTGTTRVVHRRSTRSTARIGPGLIGRCSGDLARLGSAQSRPAGHGKGXRRARVAGDGNRRRETAAQRRWRTTGAAARPDAARREREGKRGGGXASPRVAGAEEDDGERRRRATGGQRRRADELRDALREARREI

SEQ ID NO: 187294 - protein, 110 aa, Oryza sativa
  Clone ID: PAT_MRT4530_84010C.1.pep
MAAMRRLAVASLTPPRIPRLLRLRRPDRTPSAFSTWTPHRRPRPHAADPTPIYLPAIEKIEKMKTVSSLTKDALKVLQDAGDKAKTHLRIMHNQYIEEYVLTVSTLSITS

SEQ ID NO: 187295 - protein, 111 aa, Oryza sativa
  Clone ID: PAT_MRT4530_84011C.1.pep
FFLCLALDIFPIPNLPIMRSLPDLFGSKVVSIAKKKKKKQFPFGEVHLWITSLFPAFCWGFDFRVKIFYTMALNLAHSAAVVASFANLGDARRASSVVVMPSFVFVGHNQP

SEQ ID NO: 187296 - protein, 651 aa, Oryza sativa
  unsure (1)..(651): unsure at all Xaa locations
  Clone ID: PAT_MRT4530_84012C.1.pep
MAGALHISCSPAPLLXNAFYLPGSYMHTYSQGEEIWAKVNSLTSIETEMPFSYYSLPYCRPQGGIKKSAENLGELLMGDQIDNSPYRFRVNVNESLYLCTTKGLNENDAKLLKQRTRDLYQVNMMLDNLPVMRFTEQNGITVQWTGFPVGYTPAGISEDYIINHLKFKVLVHEYEGRNVEIIGTGEEGSGVISEFDKKGMSGYQIVGFEVVPCSVKRDAEAFSKSNMYDSIEPVSCPMELQKSQVIRQQERITFTYDVEFVKSDIKWPSRWDAYLKMEAGAKVHWFSIMNSLMVILFLAGIVFVIFLRTVRRDLTRYEELDKEAQAQMNEELSGWKLVVGDVFREPTCPKLLCVMIGDGVQILGMAIVTIIFSTLGFMSPASRGMLLTGMIILYLFLGIAAGYVSVRLWKTIKGTSEGWRSVSWLTACFFPGVLFMVLTVLNFVLWGSKSTGALPISLFFALLAMWFCISVPLTLVGGFVGTRSAQIEFPVRTNQIPREIPARKYPSWLLVLGAGTLPFGTLFIELFFILSSIWLGRFYYVFGFLLIVLVLLVIVCAEVSVVLTYMNLCVEDWRWWWKAFFASGSVAIYVFLYSINYLVFDLRSLSGPVSAMLYLGYSFLMAFAIMLATGTIGFLTSFSFVHYLFSSVKID

SEQ ID NO: 187297 - protein, 68 aa, Oryza sativa
  Clone ID: PAT_MRT4530_84013C.1.pep
TNPNFMVSPIAGKSSIFRALPNDVLANANRISKKKAQRLKHNKGNELGAFPPIQNKSYQNVYNSAKSF

SEQ ID NO: 187298 - protein, 64 aa, Oryza sativa
  Clone ID: PAT_MRT4530_84014C.1.pep
MALLTTSSSAVKAVKVKERKGNGDGVVSGIVREMGAAGGDAWRGRERGGCSAVGFLVWVWTDGD

SEQ ID NO: 187299 - protein, 101 aa, Oryza sativa
  Clone ID: PAT_MRT4530_84015C.1.pep
KKGCNVRIFCTSLEQQANKHARFGSSALADSRCLMFLIERRCLISDRDFFCFCCLYAAWFASCIFTGVFFRSSERWCIQSARVCLSVRFRLFFMPRKRTKM

SEQ ID NO: 187300 - protein, 131 aa, Oryza sativa
  unsure (1)..(131): unsure at all Xaa locations
  Clone ID: PAT_MRT4530_84016C.1.pep
RRRGEEERRRRRSGEEKERRPWEKKEAFIVLQGLVSTHGYXNMYTRGYCNKSXRSILLSAHRHPLYRGFYLSSSGIWHLTRGCIGSVRSPVKGXVLRSTGPGESIGYISVVQGCIASISXIALVWLIYLST

SEQ ID NO: 187301 - protein, 59 aa, Oryza sativa
  Clone ID: PAT_MRT4530_84017C.1.pep
PSPVVPVVVVVVIFTARTSDIFRHPPPHSQEPQLPLPPQDILIVWVSCTLFSHVCSCIK

SEQ ID NO: 187302 - protein, 317 aa, Oryza sativa
  Clone ID: PAT_MRT4530_84018C.1.pep
AGPCPVVRFEMGDFDVADRVSVGLHGRSDEMIFEATVRDPSSELYGSTVVLRQLMSFQAKRRGRRALEVLKKLARRQMMYHSYAMQVHGYVTPGNDVEQDDGSFILVHGVGILGNAVDFHDNDPRNSTLASNDERRKMMIAFDMRMVMIVGLHLQDLLGDTFVKVLQEIRTQTPPEMFDLSKIVCGTYVDARLMILRGVNGVQGGSIKRVPSSNSQSELEHADEGDGQAKAQSTAVNLDDLTIGFRNDDYAGLVMLESDMMCDTMRRYHDVGFTLPHTRSLHMEEFIFTNRMVMIVGLHLQHLLGDTFVVSGEKFLK

SEQ ID NO: 187303 - protein, 65 aa, Oryza sativa
  Clone ID: PAT_MRT4530_84019C.1.pep
EGPELIIISSACHYLFSYTICTFLFIRIFSKTILINPSFLGTFFVYPPQNLYCALLSASLGLKTH

SEQ ID NO: 187304 - protein, 120 aa, Oryza sativa
  Clone ID: PAT_MRT4530_8401C.1.pep
FLKTGQIKEKAINLLRLQRKRIILIVERYTSVPSLIRSFLHWPPYAFARLAMHGVTTIPYFSWHPKMFLFPSMSPSVIRSCGHLGGNGPHEGGRSRRLGLAGSWISGRLPRQSSSSRSSS

SEQ ID NO: 187305 - protein, 403 aa, Oryza sativa
  unsure (1)..(403): unsure at all Xaa locations
  Clone ID: PAT_MRT4530_84020C.1.pep
VHVSPIDKHVKVGILGNAVDFHDNDPRNSTLASNDERRKMMIAFDMRCVGFIMAKMVLRELMDSSTFLKFKSFLTKGDDPACLREFLLPILCRNSPSGNIGLQMLDRQWGAGWNLLALLLATKPDKRISFLDACHHPFLCGPXYLLYFLFCLLQDRYGSYCQSIFRTYIFLFFSSSCSSLPKHNIFGGGGVLFTQNWLNILPATRRLLYCTGRHIGLTLRQPSPRILITDVFLTFAQTSDSIDPVFSLTSDIGFKIMAESDWPHDKSGSEATLSVTSSARIATGRIYIHEQDGDDSRVASSRSSRRYLRGKWRKVSKMKELPASLPTVNITMDELDVSMSCSSTLNVSSAQKVLQEIRTQTPPEMFDLSKIVCGTYVDARLMILRGVNGSALFFTRSNSRADS

SEQ ID NO: 187306 - protein, 73 aa, Oryza sativa
  unsure (1)..(73): unsure at all Xaa locations
  Clone ID: PAT_MRT4530_84021C.1.pep
MGSLPSFAAVSPYMSLLALGHCDVGDFNAPDADVDXSRSGVDLNSSDASVYWXPCTNATATXTAQPNGDAPDY

SEQ ID NO: 187307 - protein, 66 aa, Oryza sativa
  Clone ID: PAT_MRT4530_84022C.1.pep
MDSDIPFRCPHEADKGSLTLSLNSPRTFTRDENVISDLTGHGFEEEDYPVVDYESELQTAISTTVR

SEQ ID NO: 187308 - protein, 435 aa, Oryza sativa
  Clone ID: PAT_MRT4530_84023C.1.pep
MASIPLVVVQLLLLLLPLPLREHLWSGQHRRNDVDAGELHPIVVLPGVACSDLEARLTEAYRPSAARCGAMKGKGWFPLWKNSSDLSTHRYNECFLEQMSLIYDPVANDYRNFPGVETRVPYFGLVKGYHQKWPFDKPWCLTPLIRALEEMGYRDGDNMHGAPYDFRHVPPVPGQESQVYSRYYEEFMELVEATSKRHRKKKVIILGHSHGGCVALEFVRNTPLAWRKEYIKHLFLVTPTLSAGLLDPVENLATGPHNLFYVPDATELSLRPMWRSFETSIANLPSPAVFGREPIVVTERRNYSAYDMEDLLAAVGFGDGIEPFRRRMVVRMNYLEAPMVPLTYINGVGKRTPRQLVYWDGNFDKAPEKVYGDGDGIVNLVTMLAFDEEMRRQPGQRGQFKSIKVENASHMGILMDEWALKRVMQEILEVNQDSS

SEQ ID NO: 187309 - protein, 58 aa, Oryza sativa
  Clone ID: PAT_MRT4530_84024C.1.pep
DSPWSGALNPGGVAVTPSGTDTLVSALGPGSLGSFPSFLAKFAGFPREAVNPGVPLGL

SEQ ID NO: 187310 - protein, 97 aa, Oryza sativa
  Clone ID: PAT_MRT4530_84025C.1.pep
MGYLDMLNGFGIGLGYWGSSDEFDVGLGYLGSSSEFDLDKGYLGSLSIGLDVGMGCLDGLIGFVDVGMGPLVSAHHFHMDCPFVGDNLVTEMALSQQ

SEQ ID NO: 187311 - protein, 90 aa, Oryza sativa
  Clone ID: PAT_MRT4530_84026C.1.pep
MKARNPKTIQDQIDQAACGTSRKLYRINGAEFLLQVTPKGVKSWCYRYTLNNKTRVMGLGPVHRISFDEATKRARKIRVLLDDGIDPLAE

SEQ ID NO: 187312 - protein, 689 aa, Oryza sativa
  Clone ID: PAT_MRT4530_84027C.1.pep
MASPEREEEEAARSPPPKRPRRDGDAPPEPQPARVGLNPADCDLGTHGSSFAGCNRSRALLTTPSSVAVWRPDFDVGGGGLRGEALHDGGFAYCWSGARATVGVRGGGKYCFGCKVVAEQAVEMEDTAADQQHLCRVGVSRGGDPVGALGETGHSFGFGGTGKFSHQGKFVEYGVKFGVGDTVVCAVDLDSKPLASIGFSRNGEWLGIAKHFDASDKGLGLVESPVSSMQWESAIFPHVLLKNVVVEMQFSKEDGLQLVDGYELWPSACVDGNAVSGPVFAEQKECEIMMMVGLPASGKSTWAEKCIKEHKEKRFILLGTNLALVQMKVPGLLRKNNYGERFERLMDRATMIFNTLLTRAAKIPRNYIIDQTNVYKNARSRKLRPFANYRKVIFVELSRDEAQRNLDEMKRLLPKASTPSYANFSNQNVSSTYSGTIAGTMPSLSPGYHRQMDSPYGSGVQTPRALTHQQAAWGVQGFQSPAGINHHQVHLSSYPNTPYQHQQIQSNHPSTPYQHQAQSTSYPSTPYQDQIHSSYPSNPTQHQIHLNYPSTPNQYQSHSTYPNTPFPGHGNSVYDSNGGPGPYNPNPYSMNTDMQQRIQAPIGDRNQSYAVVSNEAYGRSGYEAANSVGRPINTHPAVYNSGSGNYMPYMQHSHDVHNSGSQYSAPVPRPPYGAPPPNYMNPQTSIWHI

SEQ ID NO: 187313 - protein, 202 aa, Oryza sativa
  unsure (1)..(202): unsure at all Xaa locations
  Clone ID: PAT_MRT4530_84028C.1.pep
RVRKRFILLGTNLALVQMKVPGLLRKNNYGERFERLMDRATMXFNTLLTRAAKIPRNYIIDQTNVYKNARSRKLRPFANYRKTAVVVFPSPSELKVRAAKRFKEMGKDVPADAVNEMTANFVLPLSKDMPDSKEPFDEVIFVELSRDEAQRNLDEMKRLLPKASTPSYANFSNQNVSSTYSGTIAGTMPSLSPGYHRQMDSP

SEQ ID NO: 187314 - protein, 60 aa, Oryza sativa
  Clone ID: PAT_MRT4530_84029C.1.pep
SEPPTGRAPDLHLCLCPARSPIHARPAGDSREQSPLAETMTPWHGAWPFAAWPHRARQRV

SEQ ID NO: 187315 - protein, 394 aa, Oryza sativa
  unsure (1)..(394): unsure at all Xaa locations
  Clone ID: PAT_MRT4530_8402C.1.pep
RRGPHVSGAQXAGLPWTGTTRVVHRRSTGSTARIGPGPIGRCGGGLARLGSAQSRPAGHGXSAARARVAGNGNQRREAAAQKRRRTTGAAARPGAARREREGNRGGGMPHREWPARRRTTANGDGEPLEDNGGGRTSSGRPXREEKREIRGREMDPGDRKPWLKAADMAALTVARXGNDXSGGEPRRRRGGRGGSRPLEPNGGDGAVRRRAXRWLEAAGVAGKAAAGGCTVRERWRARERREGTGRGRERRESPADVGXSGRGERGGIRKSNPGRLGSAGERERGGSGRGRRGARXGAADVARRGRXRGRGGGFGGGGDVGTGDRRKGMTPIGGAQLSAXPGREGRRAAGPRGLAGPRPSAGPDSTKNLVSVFRHVKLKKNSTCQFRLLFALIY

SEQ ID NO: 187316 - protein, 83 aa, Oryza sativa
  Clone ID: PAT_MRT4530_84030C.1.pep
MEKASCLEEALLLPESCKEEEITASDEVKRQLRLAGPLIAGSLLQNLIQMISVMFVGHLGELPLAGASMASSFAAVTGFSLLC

SEQ ID NO: 187317 - protein, 62 aa, Oryza sativa
  Clone ID: PAT_MRT4530_84031C.1.pep
ELTSIDWASSAVIHMSLLYLTCEALYSGYCLTFVALYRGSVTGCNAHSSSLRRKEECSFVGC

SEQ ID NO: 187318 - protein, 109 aa, Oryza sativa
  Clone ID: PAT_MRT4530_84032C.1.pep
MIERGKECLAEMSCARLADRRPWKRHCMGWDVGPEMHQDQIVLCGQEGVYVIRDGTLGVLCHEILRVVSPNVREDDKDGHFVFDGGDRLAPRYRINAKRGKVYWPSCLF

SEQ ID NO: 187319 - protein, 846 aa, Oryza sativa
  Clone ID: PAT_MRT4530_84033C.1.pep
MAQQRGGHHQRHAGLRIPGNCAFNLRDEHLFRSQYCDYDTVHDEAPLVAMIGWFFRLRRDFWCVCKNILSVGVPSFSWPAVLIDDALPINCYVLTSQRIGRLPNGQSTGWKGQSTLIGRKRIPLRPYAISFSEKSHSNEEGKQVQAFAVVLLHDGIDSFPDRPQFLMAKSTEECEAVCSSYCSCMAYAYDVTCLLWYGELWNTTMLGSDSVGRHIYIRVSQQETSLKNSILSLIISVALSFLWIFLAKLFATRPLDARSGLMVFSYAQVKNATKNFSEKLGEGGFGSVFKGTLPGCSVMAVKKLKCVFRVEKQFRSEVQTIGMIQHTNLVRLLGFCVTERNRLLVYEYMPNGSLSSHLFSDNSETLCWQLRYCVALGTARGLAYLHEECMDCIVHCDMKPDNVLLDTDFCPKIADFGMAKLLNRDFSRALTTMRGTIGYLAPEWISGLPITHKADVYSYGLMLLEIISGRRNSEKIKEGRHTYFPIYAACKVNEGDVMCLLDSRLEGNADAEQLERACRIACWCIQDYEDQRPMMGQVVLMLEGVMDVLVPPIPMSLQNFLLRGHQERRHQDYYEVLRGDSDAQPILRDVAVSHLRHVNHVPEETSRRILASDRALIATESSPRPSTTNDNYYLDGYGDGFDDIWDERSDLFHALLPEEELVIVESEFADEEEGSPEEILAFCRAKRRLERLEPAQLNAEAGVDRERAGARRRIAGVEDAGVEGGGGANGEVCAAAEAPVVSQEWRQERHPQAFGCKQASKQRKSKSTMITTKLTIATSMNRRRGKMIGPTKSTTRRPSQLRPVGWPKKVEPYGGRVTGSKTEYQPKTTGLLPVSAKESPKLKMAS

SEQ ID NO: 187320 - protein, 56 aa, Oryza sativa
  Clone ID: PAT_MRT4530_84034C.1.pep
PCAFGIRHLLVAGEADVVADLSLQLPHDSSAGNMCTYKLVTVHAPGHVVVVQPAFV

SEQ ID NO: 187321 - protein, 365 aa, Oryza sativa
  Clone ID: PAT_MRT4530_84035C.1.pep
MKNNLIEAFGDSFADTGNNPVVFGWYSVFDPVTRPPYGSTFFGHPTGRNCDGRLVVDFVAERLGVPLLPPFLAYNGSFRRGANFAVGAATALDSSIFHAGDPPPGASPFPVNTSLGVQLGWFESLKPSLCSTTQGKKSSSYDFFGRSLFFVGEFGFNDYEFFFRKKSMEEIRSFVPYIIETISIAIERLIKHGAKSLVVPGMTPSGCTPLILAMFADQAGPDDYDPVTGCLKVQNELAILHNSLLQQSLRNLQARHPDASIIYADFFSPIMEMVQSPGKFGFEDDVLTICCGGPGTALCGNQGAITCEDPSARLFWDMVHMTEVAYRYIAEDWLRIRVTWEQNNLSVFRVHKKIYTESTKFSVLI

SEQ ID NO: 187322 - protein, 52 aa, Oryza sativa
  Clone ID: PAT_MRT4530_84036C.1.pep
RKTRVVYSQIKDTGCGISPQDLPQVFTKFAQSQPGGNRGYSGSGLGLAICKR

SEQ ID NO: 187323 - protein, 209 aa, Oryza sativa
  Clone ID: PAT_MRT4530_84037C.1.pep
MASALSSLRYGDSLSVVAISGATGVLCEGISWLLIYRTGTYNSLRATIERHSRKLDAMKAGASNSSSSSSAGAGASGSSQPAGSSSSRAKKMDRVETSLKDAARELSLSKLKSGAVVAAVLFVVFGLLNSLFEGRAVAKLPFAPVPLVQRMSHRGVPGNDPTDCSMVFLYFLCSISIRTNLQKLLGFAPPRAAAAAGGGLFPMPDPKVN

SEQ ID NO: 187324 - protein, 46 aa, Oryza sativa
  Clone ID: PAT_MRT4530_84038C.1.pep
VATGSELRLSLIKRLCVAFLLALLLRCMFSFDWAHFGYLLSVLTIY

SEQ ID NO: 187325 - protein, 296 aa, Oryza sativa
  Clone ID: PAT_MRT4530_84039C.1.pep
MQGNWARQTPARAGRVKPGPVGRGRSYVHAPSPSRTPHGSPRSRHSLRDAVPCMRPPVDPARADRSIRHPCMHHASASIPADLRSTPVPERGGYKKNPAGGATPTYELQRFACCVNRSGHSNPTATSVQFGSLVRRHRTMATARGELRVRCTVPSVPVPSHKCQCWSTSGLDARTMPATATPADASESRSMAVPRAFRAGCRHGRRRVAHMQASSMIDHSTVMDTVYGRCFTPVSWVFRDIYRQILHEKQYNICAHNARAITSINTHMYAPTHLIISKRLKPTYLDIDEVIMNASL

SEQ ID NO: 187326 - protein, 148 aa, Oryza sativa
  Clone ID: PAT_MRT4530_8403C.1.pep
MHACKRKPKALTVAGSIEFSAITSGTEGIRWQSNVPEPPNVGRVRKKGRSRVRLRVNLTYSINPCPASACVRLPMPKSPDASASRRSDPHVRDSSTFTRGSIWRKRRRRACVARAGDRSIMDACIELPCPCIPGYRAGPEEAGRGAVK

SEQ ID NO: 187327 - protein, 92 aa, Oryza sativa
  Clone ID: PAT_MRT4530_84040C.1.pep
GREERGREQKRLYTPLSINFNHSQESDLPTTRHTSKIHQVITSLLFSLPPLPPPPPPPPPLHWSNPSSTSAFRHLGGRRRAIAGRAAIRGSL

SEQ ID NO: 187328 - protein, 60 aa, Oryza sativa
  Clone ID: PAT_MRT4530_84041C.1.pep
YIRQLAAHRGISKYCEPTRLKITRDSQHHKVCYTCVYTRKQVKDYKNTLKPDGIFNIKTH

SEQ ID NO: 187329 - protein, 59 aa, Oryza sativa
  Clone ID: PAT_MRT4530_84042C.1.pep
MGNLPMADSTCGAWPWADVRAKELGDTKFSIGTSTMVDPLTAGPPSCRNGSGPFGKSIG

SEQ ID NO: 187330 - protein, 105 aa, Oryza sativa
  Clone ID: PAT_MRT4530_84043C.1.pep
ARHRPKGKKGRERERRERGRRKVCQWAHISFCAPRGTTSAKPPPKTAQGVKLHRFCKFGESRFLILRLRDTIYIRWSVEGVKVILFLSQKERGSEFHITPPIMPR

SEQ ID NO: 187331 - protein, 45 aa, Oryza sativa
  Clone ID: PAT_MRT4530_84044C.1.pep
SPIKPPQKNLVFVFPNYSLIKPVCYRLIKQVVAWGTMGVSKYKFV

SEQ ID NO: 187332 - protein, 81 aa, Oryza sativa
  unsure (1)..(81): unsure at all Xaa locations
  Clone ID: PAT_MRT4530_84045C.1.pep
LSSTFPSPPNPQPKLHPIYTTIKSSINYYYIPITKKTNKSLKNHPSLNKKQFLYKKNLHKTHTLQLHPSFTHYXTNHSLTS

SEQ ID NO: 187333 - protein, 105 aa, Oryza sativa
  unsure (1)..(105): unsure at all Xaa locations
  Clone ID: PAT_MRT4530_84046C.1.pep
KRHGVRISYARLIRFGYAEWRSCGRLCTAPSLIDYSIPLAGVNLRSGEQVSGTSTFDVLHXCAAAIRFLGSALRDCSLFVRDGPSSSPLACCAPSSTPATTSSSC

SEQ ID NO: 187334 - protein, 134 aa, Oryza sativa
  unsure (1)..(134): unsure at all Xaa locations
  Clone ID: PAT_MRT4530_84047C.1.pep
GEVGVRLGVQRHSRWXGGRLNVRGAGGGDGGRLGARGAADEGRPXWRERRVRWRRPAWRERRDRRWKRRPRCVVDLLVGVVRSSAHKGWPTGGVGARAPHVGRVXVVGEHRCVNRRFAGGIRCYSDASWKDNKV

SEQ ID NO: 187335 - protein, 621 aa, Oryza sativa
  Clone ID: PAT_MRT4530_84048C.1.pep
MLAHHSNSADMWGPCTDAPRRPAFVRRRPHHTNQQVHHAPRSPLPPPVAPLAPSRPSPPDAPLAPVGLPSSAAPLAPSRPPSPPPAPLTLSRPPLPSAVPLYTKPDSDLSSKRRHAGQMQPSTTPLASRPRPPCLLPPQARSPTPCLLPPQPRSLPCLHPPPSQVTIASQRSRQLLLSPPSSAVAIQPLPPSPATIADSSCAAAVGCRHLQQLPPPAAATAAVGSRHRATAAAVDNRHRQPGRPSSGRTPPPPPPGAAADAPTSGRRRRPPPHQIQADLEVTSVAAPPPTTVATPSTAAARTTARPHRRQLSPRQIRPGGTDLDDFCRPGQSPSTRAWREDEAPPPPSLRRAALPAAARTAARTPKKKKSLVLLEMSPPMPLSWVQDSKMYFAKQRLPLEDLTQTCRRDRYCVSCARAFCSHCCSSHHLWPGHHHIVVPVTVDAATGRPTFQNRDAEGHRMFPRVIADAIVSHDYATRLPRDAYCASCQVAFCAASCHHHYDHHRNGDDDPVPDSVLRIEEGGGRRCVRSTGSDWWLPYLESVLGDPVHEGEDERGEYYELLPILTRPPGGCAHCRRHIGIQHSSHCSMACYNSHQGEVAERRRRREARNAARGIAKLQVE

SEQ ID NO: 187336 - protein, 47 aa, Oryza sativa
  Clone ID: PAT_MRT4530_84049C.1.pep
FRVRPFLFFVVPYVNLIIGDSHILGHLLLPRYGLLVIACLCLCHVCS

SEQ ID NO: 187337 - protein, 186 aa, Oryza sativa
  unsure (1)..(186): unsure at all Xaa locations
  Clone ID: PAT_MRT4530_8404C.1.pep
MRQLEESYTISPAVAHASLWADVXQGGGADRRGPHVSGARXAGLPWTGTTRVVHRRSTGSTARIGPGPIGRCGGGLAWLGSAQSRPAGHGKGXAARARVAGDGNRRREAAAQRRRCTTGAARREREGNRGGXDASLRVAGAEENDGERRRRATGGQRRRADELREALREEKREIRGREMDHGDQKP

SEQ ID NO: 187338 - protein, 356 aa, Oryza sativa
  Clone ID: PAT_MRT4530_84050C.1.pep
MAVEAGSAREARAAEMEAGLAREARPMEGGRTGARGASGGGGRLGARGAAGGGRGDLGAWWSCWWVWRVLRRMKAGRRGASVQGPHMSVEFEWWWSIGGSCAVAPRRHARKWGSAVCAAKADGAQGEAVKERSVSVVLLSGGQGKRMGASMPKQYLPLLGLPIALHSLKTFCQLKEVKEVVVVCDPDYKDIFEGSIENVQIPIKFALPGKERQDSVYNGLQEIDGDSELVCVHDSARPLVSSEDVKKVLEDAIVHGAAVLGVPVKATIKEADSNSFVVKTLDRKTLWEMQTPQVMRPSLLRDGFELVKRDGLEVTDDVSIVEYLKHSVYITEGSYTNIKVTTPDDLLLAERLMNEK

SEQ ID NO: 187339 - protein, 50 aa, Oryza sativa
  Clone ID: PAT_MRT4530_84051C.1.pep
CIRCLTALMCLLGQRPWISYQNACQIILSLKVGVVQLLAENLGWMPRVMI

SEQ ID NO: 187340 - protein, 100 aa, Oryza sativa
  unsure (1)..(100): unsure at all Xaa locations
  Clone ID: PAT_MRT4530_84052C.1.pep
TVGETRGVVAAARCSLRXALTGSVTLEVESSXHRNVKARSRQGGIRDQQRSSSRESWMRRPWRSHQKESRHLVSARAXRALHIRATSALRKYRRESVRSL

SEQ ID NO: 187341 - protein, 170 aa, Oryza sativa
  Clone ID: PAT_MRT4530_84053C.1.pep
MTEYGLDDDATDGADKQVLCKVYRSPRAVCAEARTAAAKCSGSKRKADDGVDHPEAPPPSARPRQEEAGSEHDEQSSELLPELDLDALLSAPMDENLESTFSTAATEQYMRYLLNDEPLPWAPTTELVDGGGGGGDEFIQTANGPCMDGEVFTRLAAGETLDDILGSTSS

SEQ ID NO: 187342 - protein, 109 aa, Oryza sativa
  Clone ID: PAT_MRT4530_84054C.1.pep
AFPVPKGIHPGLALYQGVCPIYMGFFEDAGGAFPRALDLLQKQGMVNSGEEVALVQSGGRPLWGFPSPPNIRVRPVEANLKRVRMALTPVSAFRGHFFFFRGACSLLVG

SEQ ID NO: 187343 - protein, 675 aa, Oryza sativa
  unsure (1)..(675): unsure at all Xaa locations
  Clone ID: PAT_MRT4530_84055C.1.pep
PSSILCLSLLASTSLQILGSTCSCLHFNFPNFDTTSVDDFSFSPGSGIANGSLQITLSTGNITNQSGRVCYTRETLRLWDSKKRTVASFRTEFVLNILPNQQQNETGEGLAFILTSNLSSPRGSSGQWLGIANEQTDGSPANRIVAVEFDTRKSYDEDLDSNHVGLDVNGIRSVVQYPLSNVSIFLSSGFDLFVSISYXKQVSIVDSRSDAVEYQRAACCSWSVDLSQFLFDDVYVGFAGSTGDFTELNQIKSWNFATIDDDITTGRRHGRKVLLPLVAFILFAMSSFLVFLVWRRSTRKRRLAYRNLEKMIDAHGPVKFKLKELRRATANFSSSRKLGRGGFGTVYHGYLSSMNMEVAVKRVAANNKSSSNRGEQEFVAEVNTISKLSHRNLVKLIGWCHEGGELLLVYEYFPMGSLDKLLYGGARPAELTWERRYKIICGVASALEYLHHGSSSRILHRDVKASNVMLDEEYSARLGDFGLARVIHLDEVTHHSTQAVAGTRGYMAYECFFTGRASLDTDVYAFGVFVMEVLTGRSPSSSVTYHNRQQEHDHDGRRQPMYIVDWMWRHYGDGTVLEAADAVLGGAYDEAQVERAARLALACCHPSPRERPSMRTAVQVLVGGAPAPEPPFEKPAFVWPPDGKRQEIELPHVGVLFTGGQLSFCSMTSTSITGR

SEQ ID NO: 187344 - protein, 66 aa, Oryza sativa
  Clone ID: PAT_MRT4530_84056C.1.pep
LYNVLHQSLKHSLVLTDLLHPPQTLLKHGPTSICQHIHLCLYHQTPSLLSILTLHNNSLAIIENIP

SEQ ID NO: 187345 - protein, 352 aa, Oryza sativa
  Clone ID: PAT_MRT4530_84057C.1.pep
MDLDNFHPMNIYSMDDFIAEATFLDEYSEQIILRLKENITSEPPRRLCQSGTRRYVPRNREAGNADLVANYFSKSPIYTDEMFRRRFRMRKPLFLRIVSALSEWSPYFTNRLNATGRAGHSPLQKCTAAIYMLAYGTPADQLDEELKIGPSTALECLGKFTEGVIEIFRKEYLRAPRSDEVERLLQVGKKEQGRMLSEPSVCCSLAPARMWRQGDVINIMEACVILHNMIVEDEQEMAEIPLDLNENPGASFVLPPEVRNSSDPNPFFAAGGDGARRVQVEAAYSGGGGDLERSGSERLRRALSEAMTLGETTGSRSSVLLAHEGGGTREGGGAEARARQRMEGKRSSPAHG

SEQ ID NO: 187346 - protein, 44 aa, Oryza sativa
  Clone ID: PAT_MRT4530_84058C.1.pep
LQLHLHVYFRWYSQLLLHRLLLANYWYLIYEDSCFLNVLLSLMC

SEQ ID NO: 187347 - protein, 626 aa, Oryza sativa
  Clone ID: PAT_MRT4530_84059C.1.pep
MAHKFYEADKKKLGRFVLIDVWYACCDQPKWNAYNDALKRDRKRKSSDNREMLGQASGPSDVEETPWPIGQKAAKRAARESMGKLNDISDAEEIDKLDQVQSDIHTRCMKMMEMQEVIYSSDHTMSPNNIDHLDDDVVVDADLAIEDDAVIDLDLDDDAAVDADIDLDLDLDDDAVVDLDLDLDDDAAIDLDNFHPMNIYSMDDFIAEATFLDEYSEQIILRLKENITSEPPRRLHQSGTRRYIPRNREASNADLVANYFSESPIYTDKMFRRRFRMRKPLFLRIVSALSEWSPYFTNRLDATGRAGHSPLQKCTAAIRMLAYGTPADQLDEVLKIGPNTALECLGKFAEGVIEIFRKEYLRAPRSDEVERLLQVADSRGFPGMLGNIDCMHWAWKNCPVSWCGQFTRGDKGVPTMILEAVASKDLRIWHDFFATAGSNNDINVLNKSPLFIEALRGEAPRVQFSVNGNQYNTWYYLADGIYPEWATFVKTIQLPQTDEHKLYAAREEGTRKDVERAFGVLQSRFNIVCRLARMWRQGDVINIMEACVILRNMIVEDEQEMAEIPLDLNENPGASFVLPPEVRNSSDPNPCFAAVLRRNSSIRDRAKHMQLKKDLVAHIWQRFGKK

SEQ ID NO: 187348 - protein, 106 aa, Oryza sativa
  unsure (1)..(106): unsure at all Xaa locations
  Clone ID: PAT_MRT4530_8405C.1.pep
RHQRGGGADRRGPHVSGARVAGLPSTGTTRVVHRRSTGSTAQIGPEPIGRCGGGLARLGSAQSRSTGHGKGXAARARVAGDGNRRLGWRRKGGGTRPGQWLDPARL

SEQ ID NO: 187349 - protein, 713 aa, Oryza sativa
  Clone ID: PAT_MRT4530_84060C.1.pep
MDFGDEPEGSDSQRRRKRYHRHTPRQIQQLEAYAFSLFFFLLLFFYVLLAFVRHGGGAMDGGMKWMFKECPHPDENQRAQLSRELGLEPRQIKFWFQNRRTQMKAQHERADNCFLRAENDKIRCENIAIREALKNVICPTCGGPPVGEDYFDEQKLRMENARLKEELDRVSNLTSKYLGRPFTQLPPATPPMTVSSLDLSVGGMGGPSLDLDLLSGGSSGIPFQLPAPVSDMERPMMAEMATRAMDELIRLAQAGDHIWSKSPGGGVSGGDARETLNVDTYDSIFSKPGGSYRAPSINVEGSRESGLVLMSAVALADVFMDTNKWMEFFPSIVSKAHTIDVLVNGMGGRSESLILMYEELHIMTPAVPTREVNFVRYCRQIEQGLWAIADVSVDLQRDAHFGAPPPRSRRLPSGCLIADMANGYSKVTWVEHMEVEEKSPINVLYRDLVLSGAAFGAHRWLAALQRACERYASLVALGVPHHIAGVTPEGKRSMMKLSQRMVNSFCSSLGASQMHQWTTLSGSNEVSVRVTMHRSTDPGQPNGVVLSAATSIWLPVPCDHVFAFVRDENTRSQGLNASQNSMLILQESCTDASGSLVVYSPIDIPAANVVMSGEDPSSIPLLPSGFTILPDGRPGSAAGASTSSAGPLAAARGGGGGGAGGGSVVTVAFQILVSSLPSSKLNAESVATVNGLITTTVEQIKAALNCSAHGHHP

SEQ ID NO: 187350 - protein, 52 aa, Oryza sativa
  Clone ID: PAT_MRT4530_84061C.1.pep
LSNAHKTHTQYYYLFELVSHALLDIDTSIHTVIAALYIDIKRISKSNHRTLI

SEQ ID NO: 187351 - protein, 95 aa, Oryza sativa
  Clone ID: PAT_MRT4530_84062C.1.pep
MASGQQQQGRSELDRMAREGQTVVPGGTGGKSLEAQENLAEGRSRGGQTRKEQMGEEGYREMGRKGGLSTGDESGGERAAREGIDIDESKYKTKS

SEQ ID NO: 187352 - protein, 71 aa, Oryza sativa
  Clone ID: PAT_MRT4530_84063C.1.pep
RLQMLKSKQGKIKLEDVAEKQARVAMSSKNLAAVLWLRYLALFRGALDSEKQLFESVTTDSQKLWTVWGSF

SEQ ID NO: 187353 - protein, 79 aa, Oryza sativa
  Clone ID: PAT_MRT4530_84064C.1.pep
MSIEKAAFGPLSSEVLSLAPSLVLREVARDRYDLLVEDQVYVYLNHLEMNFHAVRDRYDLLVKDQAVRDRYDLLVEDQV

SEQ ID NO: 187354 - protein, 91 aa, Oryza sativa
  Clone ID: PAT_MRT4530_84065C.1.pep
ERRCRLVRKVSLWRRTLCSKRMRKLTKELSDLVKAAEDKHVLVKLSDTIQTEGVATLPRMLHALRELTQVHQSRAAVNGLDDRYSSMCPHS

SEQ ID NO: 187355 - protein, 250 aa, Oryza sativa
  unsure (1)..(250): unsure at all Xaa locations
  Clone ID: PAT_MRT4530_84066C.1.pep
MVAESKMQPSPAAAPPAEHRRRALRYVVFLAVSLLAFSCWALVSSRIDGAVLAATAGGEHDDDGIIVRSSQAEMPASSGNATSRGAVEAGSPAAMTTRQPSSGETTTAAAATCDAESTLLRVYLYDLPPEFHFGMLGWDGKAAGAAWPDMIGXGAPCYPGGLNLQHSVEYWLTLDILSSTSGDRRHRPCTAVRVTNAGEASADASRGARPVTSPLTALSGHGGGGESPSWLTATGGELAKRARWMDLGRR

SEQ ID NO: 187356 - protein, 230 aa, Oryza sativa
  unsure (1)..(230): unsure at all Xaa locations
  Clone ID: PAT_MRT4530_84067C.1.pep
MDGGRRGSHRSTDRRSSVMGEHTGTKRRTRGDDPMARMRRRRSDGGGLRRRPLAAAKEGNRRWSSGVRFEAAGAYPGLGELISGAGWGNGPPREAGDGELPLGAGGNGGKPMAGGGETWGSVHAXRGGLAELPRELGRERTSEKGERGXALPSRDGRSDERPTARXELSGLGPGKGRRGMAGVLVSRPRTHRPPTRAKARGGSGGXRQQWCGGVKEGNNIRRRVKGRWII

SEQ ID NO: 187357 - protein, 139 aa, Oryza sativa
  unsure (1)..(139): unsure at all Xaa locations
  Clone ID: PAT_MRT4530_84068C.1.pep
AISVSKFIQHRSWSHTSGLHCPYNYRGKTLLTPPIRLMLDEGSKSKNAYRLQEGLLKDKSESIAVYHTEHMDPXITMGSARXDGCVTILGVEVPIAEWGGNIXRGAIRAACRGLDRSLPNYIGMSTTVINAICAQPTMD

SEQ ID NO: 187358 - protein, 96 aa, Oryza sativa
  unsure (1)..(96): unsure at all Xaa locations
  Clone ID: PAT_MRT4530_84069C.1.pep
MGSQLSAATSEPQLHGLRTYSSPRSMATLPSVRMITKMSXGIRCDYIGXATNVIMVTTTTXLMLAAARLWLAPSENRKSTAELKLEGRDCCLETGD

SEQ ID NO: 187359 - protein, 126 aa, Oryza sativa
  unsure (1)..(126): unsure at all Xaa locations
  Clone ID: PAT_MRT4530_8406C.1.pep
LSXEWALPLARDKKFXEIADPKPPRDVFXEAELKAXCLLGLACSQNKQEQRPIMSEVVELLKGESAEKLSNLENDEMFKPDLTSSFQDSSHSSHPDSSDCITEEKNSKADTIDEAVDSSETVPSAR

SEQ ID NO: 187360 - protein, 99 aa, Oryza sativa
  Clone ID: PAT_MRT4530_84070C.1.pep
MADDRERGGGCGGLERLKLELEPCLPSRSSSASRIIFLSLSSSSYAILASRIIFTASPPLPSMPPVATRPLLTSSSDSCCDPTTYTYPRFARLRALAKR

SEQ ID NO: 187361 - protein, 574 aa, Oryza sativa
  Clone ID: PAT_MRT4530_84071C.1.pep
MPNASPLHHLASLLLLALALAPRPAAPAATDRAALLAFRAFLPAALPRGARLPAAPLALLRRVRALDLSANALSGELPCSLPRSLLDLDLSRNALSGAVPTCFPASLPALRALNLSANALRFPLSPRLSFPASLAALDLSRNALTGAVPPRVVADPDASGLLLLDLSHNRFSGEIPVGITAIRSLQGLFLADNQLSGEIPTGIGNLTYLQALDLSRNRLSGVVPAGLAGCFQLLYLRLGGNHLSGALRPELDALDSLKVLDLSNNRISGEIPLPLAGCRSLEVVNLSGNKITGELSGAVAKWQSLRFLSLAGNQLSGQLPDWMFSFPTLQWIDLSGNRFVGFIPDGGFNVSAVLNGGGSGQGSPSEAVLPPQLFVSVSTDMAGRQLELGYDLQAATGIDLSRNELRGEIPDGLVAMKGLEYLNLSCNYLDGQIPSGIGGMGKLRTLDFSHNELSGVVPPEIAAMTELEVLNLSYNSLSGPLPTTDGLQKFPGALAGNPGICSGEGCSAHSRMPEGKMAGSNRHGWLGGWHGENGWVSLGAFCISTMTSFYVSLATLLCSRKARNFVFRPGRMEY

SEQ ID NO: 187362 - protein, 80 aa, Oryza sativa
  Clone ID: PAT_MRT4530_84072C.1.pep
PFQMVLLQSLVALGAKSTPKAFNKVPVVFKALFFWGVLGKKRINPGEKEFFFFGRGFPVVKNAQPFLAWFPRGVFFLQKK

SEQ ID NO: 187363 - protein, 767 aa, Oryza sativa
  Clone ID: PAT_MRT4530_84073C.1.pep
MGCTASKVEQEDTVRRCKERRRHMKEAVASRQQLASAHADYLRSLRLTAAALSRFAQGHPSLAVSHHTAPVLLTTAAPALAPTPTPPPPSSTASSSLPPPTPLLPKHQQAPPPPPPTQSHQPPPPVAVRAPRGGPRRLKVPHILSDSSVASPARSSFRKPVVGTPSSSSAWDWENFYPPSPPDSEFFDRRKADLEEANRLRELEEEEKARGYLHPHHLKEEDEVDDDDDEREEEMHCGGWEDDDDHYASTTTSETRSEEGEMGNRSECGFAARSEYGGTAPSEYAAAPLPLPLRRRDERSEAGDSSSTVTAAAEMRMVIRHRTLAEIVAAIEEYFVKAAEAGNGVSELLEASRAQLDRNFRQLKKTVYHSNSLLSSLSSTWTSKPPLAVRYKLDTNALEMESMEGKSHGSTLERLLAWEKKLYQEVKARESVKIEHEKKLSTLQSLEYRGRDSTKLDKTKASINKLQSLIIVTSQAATTTSSAIVRVRDNELAPQLVELCFALLSMWRSMNHFHEIQNEIVQQVRGLVDNSMAESTSDLHRLATRDLEAAVSAWHSNFNRLIKYQRDYIRALYGWLKLTLFQVDSNIPQEAYTSLISRELTTFCDEWKQALDRLPDASASEAIKSFVNVVHVIYTKQAEEMKIKKRTETYSKELEKKTNSLRAIEKKYYQSYSMVGLGLPGSGRDGIESHSFDARDPLAEKKTEIAQCRRKVEDEMTRHAKAVEVTRSMTLNNIQTGLPGMFQAIAGFSGTVVEALDVVCRRAGSVR

SEQ ID NO: 187364 - protein, 375 aa, Oryza sativa
  unsure (1)..(375): unsure at all Xaa locations
  Clone ID: PAT_MRT4530_84074C.1.pep
MGYLPSSLGSKAAHFVSDLTTVILNPISEREPSSPLPVVDEVXHDLEDDKDSEQNSDTPDGPDTSSFRAFLISFLSSSGSSTGSMEGPDTSSFRAFLISFLSSSGSSNGSMEIIPDQNGELGYPTLTPMGKSKKGKSGLLSRGKHSIGKIISKAARIGGFKQNVEPKIDREVVDHVESVSPVLELEESKEVASFINLPAMSEPSVLLSEVMRFNIYASFPVLAKGMNWVLLYRFKTCLLFNMVVGDKEGAVFGGLVEAPLQPTSAKKYQGSNSCFVFTNLHSNPSIYRPTGANNYFTVCSTDYLALGGGGHFALYLDADLLSGSSSNSETFNNMCLSHSPDFAVKDVELWGFVYPSKYDETLALCRTEKPGICRW

SEQ ID NO: 187365 - protein, 697 aa, Oryza sativa
  unsure (1)..(697): unsure at all Xaa locations
  Clone ID: PAT_MRT4530_84075C.1.pep
EMLAAKLDLLMKRLDDXEKKPQGAVKALDSHIMCELAQLVALIPAKEXGRILGQPEHSFENVKAITTRGGVKQASKEARPSKIEEEEAQTEKSTPLEYCDTTIHINIPLMDVMQVPTHARYLKDILNNKRPLPITEMVKLMEECSNAILHRLPEKKKDLGCPTITCSIGTQHFDQVLYDLGASVNIMPKDVLDKLNYIVLVPTPMRLXLADSSVRYPAGMXEDVPVKIXNFFIPVDFVVLDMQSDKETPFILGCPFLSTVEASIILGLDGQDQVWTKSAEHQRGRSEASKDGQPHCLHEELIREGSVNEXDPVQRRHHLKLXAGQAACESDSQEAAAHTQDQEDVADQKNDIRSTTFGDRIKSRLSHLFKKGSGSQSSHHQDESSAHSTVDIAMEDANAAPRLLSDSDHDRIGDREMEAYRMLKDWTFAHTRAYDPQLLLKIGMDADFRTVWKAVGWQKFAEVDELGSRLLTLQFLCTLREVEDGISFRLFRNELELTWRGLSTLLGFHDIYRSNFQKATSGFEKDRFXEDISDAPICKKPKTNDIYNPTLRLMHKWIAMTLFPRGDVRPIREDELIILYAMTIEEFRAGTMHREPRNMVRDEHEGSTSXPPAHMYEADWEPTGDAPGWTQVPHYSAGGSTWQSAGEHQWQVPQDTSHENSHSSNTSGMPPISKMWSSSSSRGDLGELTRRMDTLEL

SEQ ID NO: 187366 - protein, 106 aa, Oryza sativa
  unsure (1)..(106): unsure at all Xaa locations
  Clone ID: PAT_MRT4530_84076C.1.pep
DTGRERTGREATRRRRTGRHLAAPPPSPPLLRKRRGGLDLTVPPPSPLKPSWRSCLAPPSXPPLATSLLAXPTAPSPLGPPPATPHTRPKGGRQAPAPAPTDRPET

SEQ ID NO: 187367 - protein, 72 aa, Oryza sativa
  unsure (1)..(72): unsure at all Xaa locations
  Clone ID: PAT_MRT4530_84077C.1.pep
ECGGDQFQETXLLSFIEPVDYILISRRTGDRSIRRPSSVPAWRKGRCCADGARAADDRTGEGSPVSGGTQAG

SEQ ID NO: 187368 - protein, 270 aa, Oryza sativa
  Clone ID: PAT_MRT4530_84078C.1.pep
MRGRTRGGLGMAMSATSSNLIVYLVHKYNVKAIHAAQISNVVRGCMQLAPVRAPALPPAFFGPWPLAGPGPVLRMQSFVLFTLTAALPSLLPPPCQRGAGGGGATATSCEPPNAAQSAVLYAALCLLAAGNGGTRYNMAALGADQFAGEGQPRRRRQGGGFFSCYFAFLYASYATGDTVLVYVQDGVSWALGFGVCVATTGLALAALLLGSRHYRRPVPKGSPFTAMARVAVAAARKATVDLGSRVQYYHGCNRDDAVPRADQAPSDRFR

SEQ ID NO: 187369 - protein, 223 aa, Oryza sativa
  unsure (1)..(223): unsure at all Xaa locations
  Clone ID: PAT_MRT4530_84079C.1.pep
IIDRKYIKFTADPXNMRICXLCTDDMNLFGDMSSSHSIXNYNLPPWLCLKWKYVMLRLLIHGPKQPXLNDNDVLLEPVIDDLEILWXKNFNLRVLLFCTINDYSILGNLSRQTVKGKKGLLRLKKSQNIFYMGHRXSWLRLRHSYRKKKKXFNGKKELQHAPVDLTIDEVHDMINXISNEFRKKMKCPKENEKGLWKKIPIYWQLPYWKDIDVRHYIDLMYTS

SEQ ID NO: 187370 - protein, 366 aa, Oryza sativa
  unsure (1)..(366): unsure at all Xaa locations
  Clone ID: PAT_MRT4530_8407C.1.pep
MRQLEESYTTSPAVDHAGLWXSTRNSXGGGGADKRAPHGSGARVVSLPWTGTTRVVHGXSTTRIGPGPIGRCGGVLARLGSAQSRPAGHGKGXRRARVAGDGNRRRETVAQRRRRMTGAAARPGAARKEREGNRGGXDASPRVAGAEEDDGEQRRRATGGQRWRRTDELRDAIREEKREIRGRGVDHGDRKPWPKAAVXVVLTGVRGDAGSGDGPRWRRCGRGTRTWPVGAGFAGRHGGGGGGKRGGIRNSNPGHLGRGRERERGGSGCGRRGACAGVADVARRRRGRGRGGGCGRGGXGWRLGEDPTGGPHLSVTPRERKGRRLSQAVASGRPSKARGEMXGMGRRPTKGKGKRKKKKEERNFQD

SEQ ID NO: 187371 - protein, 111 aa, Oryza sativa
  Clone ID: PAT_MRT4530_84080C.1.pep
MAGARQGRHGCGGSSGTAQHSNGGDTNSSDVAAMHGWQQAVHGRQRRHVALGGCDARGQPTVDSVHRGTSACALNKEDHVAAMAAQRGEVVLTWRHEGTDAWPRGNATRTA

SEQ ID NO: 187372 - protein, 1596 aa, Oryza sativa
  unsure (1)..(1596): unsure at all Xaa locations
  Clone ID: PAT_MRT4530_84081C.1.pep
EYRYHPRQPQGSDRGSYLETEGIENDATTRHLVEMLWAMDESRAETVLAAQDREDQNRGKICKLEDKVDRLEKELAALKGEAPPQKARIRLTARKRALFVPRYQLVPKLPPPSPLPACPAQAASPSSPPGPAARPNPSGALPPPALSPILXNGILIPRSLVLAPSRASPWSLAISPPPSSLSHAAGRLQPPVPPRPCAGRSRRRLLQRRRHLLHPGLPSVSRGDHRRRVPAIALLFPPRRPPPAASPSSPEHRPAAPSSPSAXSHLLSLGQPSVSRGKHRRRILAGKTVALPPLFHLRPPLSRFPCTGRRRHHLPRLRDAALIPGITSSSPEVRRNAAAAPTTHSSSSARRPAAPPPSPTSQQRVPRRPLLXLSRCCLPSSFSSSXVRPRRSTSRRSPGSSSRGAASVIVIAAACSTPSSSPCSRCRLPSSPPRRFRSSSSSSSRRSRFRSSWRSSXPSSRSRPSSAFVQCAAAAPVVVFVLGSVSSSLVPAASRLRSRIAAEVVPSPSVSAAPVRRCRSHASSRGGKVSSSRCPVLVLSVSPRTRCAVVDPGTRVPVSVVVHVCGWXRVVSVLVCPLGSRVVSTCATRVVFMQSLIIIIRKSPYNSIKLRMIISWSYELRIDPFKSPNVCYNLKNPVLSFYVLLLLLYRLVAXACVLCVASVVPEVXRSVVRGRRRRFGRPFSLSKASHIILEHIESQAQGWCPAARGLNPACLSRGFRPXVGLGRYSCLWLGWVGNYVTSSVXYRGGMWHVVAREEDVSXWVKLYTSDQSIIYSNSRALGYGLLAQQTQLMNLMNKVFMEYLDKFVVVFIDDILIYSRTKEEHEEHLRLTLEKLREHQLYAKFSKCEFWLSEVKFLGHVISAGGVAVDPSNVESVTNWKQPKTVSEIRSFLGLAGYYRRFIENFSKIAKPMTRLLQKDVKYKWSEECEQSFQELKSRLVSAPILILPDPKKGFQVYCDASKLGLGCVLMQDGKVVAYASRQLCPHEKNYPTHDLELAAVVHALKIWRHYLFGTRTEMYTDHKSLKYIFTQPDLNMRQRRWLELIKDYDMGIHYHPGKANVVADALSRKGYCNATEGRQLPLALCKEFERLNLGIVNRGFVAALEAKPTLIDQVREAQINDPDIQEIKKNMRRGKAIGFLEDEQGTVWLGERICVPDNKDLKDAILKEAHDTLYSIHPGSTKMYQDLKERFWWASMRREIAEYVAVCDVCQRVKAEHQKPAGLLQPLKIPEWKWEEIGMDFITGLPRTSSGHDSIWVIVDRLTKVAHFIPVKTTYSGSRLAELYMARIVCLHGVPKKIVFDRGSQFTSNFWKKLQEEMGSKLNFSTAYHPQTDGQTERVNQILEDMLRACALDFGGSWDKNLPYAEFSYNNSYQASLQMAPYEALYGRKCRTPLLWDQTGERQVFGTDILREAEEKVKIIQERLRVAQSRHKSYADNRRRDLSFEEGDYVYLRVTPFRGVHRFRTKGKLAPRFVGPYKIVSRRGEVAYQLELPQSLAGVHNVFHVSQLKKCLRVPTEEANLEQIEVQEDLTYVEKPIRILETSERRTRNRVIRFCKVQWSNHSEEESTWEREDELKSAHPHLFASSSESRGRDSV

SEQ ID NO: 187373 - protein, 1740 aa, Oryza sativa
  unsure (1)..(1740): unsure at all Xaa locations
  Clone ID: PAT_MRT4530_84082C.1.pep
QKFSGPHLNFSCTYFIPLFPESPFSPKKSLKSSKASKATPGLEWYIPGLEIELCSRDGCSEWLGLYNRMPRYKPEYLFGVEGFVQELRTMSFAIGFGTAPFYAQIPHDRHEEKCRVKVTLNSNSEEVPSVMFEAGGRNYIHACQEVARIAIGELRDRYSDQLADTEYRYHPRQPQGSDRGSYLETEGIENDATTRHLVEMLWAMDESRAETVLAAQDREDQNRGKICKLEDKVDRLEKELAALKGEAPPQKARIRLTARKRALFVPRYQLVPKVLNFPVNGAPNRRERPRHSRPPSIAAGRGSRRRSRSSRGRLSPPSYKMGSSXPRSLVLAPSRASPWSLAISPPPSSLSHAAGRLQPPVPPRPCAGRSRRRLLQRRRHLLHPGLPSVSRGDHRRRVPAIALLFXSAPAASSRLSLLAGAPSGRTVFSLGLAATSSPSVSPPFRGGSTGDASSPAKQWRCRHCFHLRPPLSRFPCTGRRRHHLPRLRDAALIPGITSSSPEVRRNAAAAPTTHSSSSARRPAAPPPSPTSQQRVPRRPLLRSAAAACHHRFLVTVRPRRSTSRRSPGSSSRGAASVIVIAAACSTPSSSPCSRCRLPSSPPRRFRSSSSSSSRRSRFRSSWRSSLRQAVLVRRPRSSSVPLQXPVVVFVLGSVSSSLVPAASRLRSRIAAEVVPSPSVSAAPVRRCRSHASSRGGKVSSSRCPVLVLSVSPRTRCAVVDPGTRVPVSVVVXCAGGDRVVSVLVCPLGSRVVSTCATRVVFSXSPFVGHSPRLTHGIRFRRTVDRLCVLGLPRSFRLTCGVRMSTAQPSCLFQASAYTCFIIAKXIIIIRKSPYNSIKLRMIISWSYELRIDPFKSPNVCYNLKNPVGLGRYSCLWLGWVGNYVTSSVXYRGGMWHVVAREEDVSXWVKLYTSDQSIIYSNSRALGYGLLAQQTQLMNLMNKVFMEYLDKFVVVFIDDILIYSRTKEEHEEHLRLTLEKLREHQLYAKFSKCEFWLSEVKFLGHVISAGGVAVDPSNVESVTNWKQPKTVSEIRSFLGLAGYYRRFIENFSKIAKPMTRLLQKDVKYKWSEECEQSFQELKSRLVSAPILILPDPKKGFQVYCDASKLGLGCVLMQDGKVVAYASRQLCPHEKNYPTHDLELAAVVHALKIWRHYLFGTRTEMYTDHKSLKYIFTQPDLNMRQRRWLELIKDYDMGIHYHPGKANVVADALSRKGYCNATEGRQLPLALCKEFERLNLGIVNRGFVAALEAKPTLIDQVREAQINDPDIQEIKKNMRRGKAIGFLEDEQGTVWLGERICVPDNKDLKDAILKEAHDTLYSIHPGSTKMYQDLKERFWWASMRREIAEYVAVCDVCQRVKAEHQKPAGLLQPLKIPEWKWEEIGMDFITGLPRTSSGHDSIWVIVDRLTKVAHFIPVKTTYSGSRLAELYMARIVCLHGVPKKIVFDRGSQFTSNFWKKLQEEMGSKLNFSTAYHPQTDGQTERVNQILEDMLRACALDFGGSWDKNLPYAEFSYNNSYQASLQMAPYEALYGRKCRTPLLWDQTGERQVFGTDILREAEEKVKIIQERLRVAQSRHKSYADNRRRDLSFEEGDYVYLRVTPFRGVHRFRTKGKLAPRFVGPYKIVSRRGEVAYQLELPQSLAGVHNVFHVSQLKKCLRVPTEEANLEQIEVQEDLTYVEKPIRILETSERRTRNRVIRFCKVQWSNHSEEESTWEREDELKSAHPHLFASSSESRGRDSV

SEQ ID NO: 187374 - protein, 128 aa, Oryza sativa
  Clone ID: PAT_MRT4530_84083C.1.pep
LELSKVYHRSLNLYRCVIPVPKLANQPFRSSNLFDCVIPIPKLADHSFRSSNLFSCVTPVPKLGFEYHMGQIGWDRGDTTEQVGGPKRVIRMFRDWDDTVEQSGYLTTCFINFADQPPRGKTGTTIIC

SEQ ID NO: 187375 - protein, 34 aa, Oryza sativa
  Clone ID: PAT_MRT4530_84084C.1.pep
FIHSNIVDAQESDFSVIMGSAGVALIPRTTFLGQ

SEQ ID NO: 187376 - protein, 206 aa, Oryza sativa
  Clone ID: PAT_MRT4530_84085C.1.pep
MAGKPAPRRRATSEFEIDLNTLSNSPASAAAAICKAIDAPRARTAAVRDATTTAAREGGEEEKEAAAVEEEKEAAALDEASPRRWQRRKSQGQDGNFGSHLCGSAAGLRLLRSRDCSYLRNSRAPSLSYHVLSTPPPPLPPQRHWSPYFPSTSGLSPGSSLGMVMGEGTTSPVSPSLLCERWWRRISAPDLAASDGLSPPTPFSLR

SEQ ID NO: 187377 - protein, 94 aa, Oryza sativa
  Clone ID: PAT_MRT4530_84086C.1.pep
MTVVTVGMVGNTLQPPLGINPSLPSKPCIHRRHGRFGRTWGWPNPAQFQLVASSIAPLRRLVNFGPIHRVNSEFLAYSHISLVTDIVRLIYRLS

SEQ ID NO: 187378 - protein, 82 aa, Oryza sativa
  Clone ID: PAT_MRT4530_84087C.1.pep
MAVLDREPVRGAKSSREPGRVVSDQQRWKALDESLDFLKLVDLLKNSDGLAPELQSLTTSIAMSSSSSLLFFLVPLVLNKIY

SEQ ID NO: 187379 - protein, 322 aa, Oryza sativa
  unsure (1)..(322): unsure at all Xaa locations
  Clone ID: PAT_MRT4530_84088C.1.pep
APDARAPPVQAAGGRAGGSWWTLSGVRRTSSPSRQAVNSVPENNTVRVIMQINAGSYIEXVVVPATKPYITFQXAGRDVTVVELARQGELTCGPDGQQLRTYNTASVXVLSNYFTAKNISFKQNTAPAPMPGMQGWQAVAFRISGDKAFFFGCGFYGAQDTLCDDAGRHYFRDCYIEGSIDFVFGNGRSLYKDWELHSTAQRFGSVAAQGRHDPCERTGFAFVNCRVTGTGRLYVGRAMGQYSRIVYAYTYFDSVIAPGGWDDWDHASNKSMTAFFGMYRNWGPGADAVHGVPWARELDYFAARPFLGKSFVNGFHWLTPDV

SEQ ID NO: 187380 - protein, 92 aa, Oryza sativa
  unsure (1)..(92): unsure at all Xaa locations
  Clone ID: PAT_MRT4530_84089C.1.pep
FFFFFFFFFFFFXGIEXPEYXLNESDQXXQGSXQFACPSKNTTWLKAYTXKQLLPXGPLGXPQTPYLGWLNPSLGKXFDGTPSRLPILERGQ

SEQ ID NO: 187381 - protein, 79 aa, Oryza sativa
  Clone ID: PAT_MRT4530_8408C.1.pep
VIWTFSLLIALVYNTIQPLFDQKNLSDQYKVTNRMNQGMLVLNLSERTQLMPCGKSKCCVSRPQIHSRVVPLRDFSFSL

SEQ ID NO: 187382 - protein, 121 aa, Oryza sativa
  Clone ID: PAT_MRT4530_84090C.1.pep
SVFGGGSSAHLRQLPELHRHDRLKSVEIMGFSSAKGLVELTCCIVKKAVSLERLVLNTLRHNSCCSKEYIPPYSPFNKVVLDEAFRAVAAIRSYIQDEVPPEVNLTVVEPCARCHSFCASS

SEQ ID NO: 187383 - protein, 564 aa, Oryza sativa
  Clone ID: PAT_MRT4530_84091C.1.pep
WRSRWRRSRRASCRRWRARRRRRRASARRAGTTSTGSRWAVRRIVVDASGGGDFLSIQQAVNSVPENNTVRVIMQINAGSYIEKVVVPATKPYITFQGAGRDVTVVEWHDRASDRGPDGQQLRTYNTASVTVLSNYFTAKNISFKAVAFRISGDKAFFFGCGFYGAQDTLCDDAGRHYFRDCYIEGSIDFVFGNGRSLYKDCELHSTAQRFGSVAAQGRHDPCERTGFAFVNCRVTGTGRLYVGRAMGQYSRIVYAYTYFDSVIAPGGWDDWDHASNKSMTAFFGMYRNWGPGADAVHGVPWARELDYFAARPFLGKSFVNGFHWLTPDVDDTVIATIIGDTVDCVTTPRPLADPRRSSPAEPPAGAVGRPSPQRRRALALTHLATRRTCRLLAVSAQSASPHAGLRLDQFFEVEMKVRDYELDQYGVVNNAIYASYCQHGRHELLESVGISADAVARSGESLALSELHLKYYAPLRSGDKFVVKVRLASTKGIRMIFEHFIEKLPNREATLPACRSSPLPPADGDQSVHSFAFVPLLLLRLMAQTVQISRSRQESWLVQRDGL

SEQ ID NO: 187384 - protein, 69 aa, Oryza sativa
  Clone ID: PAT_MRT4530_84092C.1.pep
PSWSLWWLTPLAGVDPTMLGHCTHRKPVILHAICPDARDPRRLVSFFSLGDCACDPSHPSGGPAIALSL

SEQ ID NO: 187385 - protein, 74 aa, Oryza sativa
  Clone ID: PAT_MRT4530_84093C.1.pep
KGGGRNPQWTSSFEFPIKKSLWEGPINALTNKLRMATFFPFCPLKKAYFFCPYPIMASLPFNMAPKQPFSPWKS

SEQ ID NO: 187386 - protein, 51 aa, Oryza sativa
  unsure (1)..(51): unsure at all Xaa locations
  Clone ID: PAT_MRT4530_84094C.1.pep
FFWQYLYILFILFFILXIVLERYRWIYIYAHQSSLEPRAVRPLAACSPGPQ

SEQ ID NO: 187387 - protein, 299 aa, Oryza sativa
  Clone ID: PAT_MRT4530_84095C.1.pep
MTVAAAAASGGVGGRRYALLLALNDSEYARKVYGGYGNVFVSALGGGGGGGEEERWDCFRVIDGEFPAAEEVGRYEGFVVSGSPHDAYGDERWILRLCSLLRALHAMGKRILGICFGHQVLCRALGGRIGKARSGWNIGVKKMTFVRDFEGSKLFGDLKEIPQSASIIEVHQDEVLEVPPMGRVLAYSDKTPVEMFAVGDNVLGIQGHPEYTSDILLNLIDRLVNNNTITSGIGEEARRTVEASEPDRRFWTGLCKGFLKRPTAATTVDMPPREVAPEMMSCSHIIAGGHFVATTPIGL

SEQ ID NO: 187388 - protein, 300 aa, Oryza sativa
  Clone ID: PAT_MRT4530_84096C.1.pep
MGEHAEVATAHVPNGVLLGARCGVGTRIVIATTSILMIHGSRSFPSHDMIKINRDKKLENVVGSGGVHEHGLGFLLAGGILVRVDTTRGGHAAAVGPMEDEEGIGEHVRKGIVERVDGPGSRAKEPRILVPPLGTEQIKSLDRYNVHVSTICGRVAKDDQGVALASGGRYALSSTTAHNSPQQPHHLSLMQNDTVRERVWSGHPSYLRATSRLTHTGVIPLEFGPPGLVTEPRSAMGLPSEAREHSMVWATCGPQPPHHGADRHKNGLSGCLLMMRSPSEAIVRVAVVEATVKVASFERG

SEQ ID NO: 187389 - protein, 125 aa, Oryza sativa
  unsure (1)..(125): unsure at all Xaa locations
  Clone ID: PAT_MRT4530_84097C.1.pep
GDLVQKLVLNIXVGESGDRLTRAFKGVEQLNGQSPIFFKGRYTVRSFGIPRNQKIACYLTGKGQKAIHLLESGLKVKEYQLLRRNFSETGCFGFGIQEHIDLGIKYDPSTGIYGMDFYVVLERAG

SEQ ID NO: 187390 - protein, 78 aa, Oryza sativa
  Clone ID: PAT_MRT4530_84098C.1.pep
SSKQLLAIYLFRYSLWGCHIAGERSIFRALPNDVLANAYRILRDEAQRREHNIRDEFCAFTPIQYKSYQDVYNAVESS

SEQ ID NO: 187391 - protein, 43 aa, Oryza sativa
  Clone ID: PAT_MRT4530_84099C.1.pep
LVQRHTTPTTWTHCNPWPVSRQHLADPGLQRKPQPLDLIRGCT

SEQ ID NO: 187392 - protein, 188 aa, Oryza sativa
  unsure (1)..(188): unsure at all Xaa locations
  Clone ID: PAT_MRT4530_8409C.1.pep
RRFGRPFSLSKASGARSSGKXRRRVDARCGSDGELGRVRRNGEKEREVGEEREAGFENRIPVVSGARASGRERXEVGAGDAAHDRGGRRGPEGXDVGAAAVSAVGRRGDGRPEEGDDPDRWGPPVGVPGRXGEAGGRPAQLSWASAFGRIQREEGEKKXNGPAAHSKEKKRKEKKEKGKRRKKDFSWD

SEQ ID NO: 187393 - protein, 64 aa, Oryza sativa
  Clone ID: PAT_MRT4530_840C.1.pep
RAILRFLKKTPPEKILFGEVKKGIFPICILNSKGKFFFFNCQSGLLKFLNRAGIVEELKKTQKF

SEQ ID NO: 187394 - protein, 93 aa, Oryza sativa
  Clone ID: PAT_MRT4530_84100C.1.pep
LISADNFVSKEKVMGVFKIGRNTQAVTWTVATLLITINGYLLLDFFSSEIRGLLSGSILCVAVLAYASFVLYLILRGTELPNQIITTIRKSFS

SEQ ID NO: 187395 - protein, 107 aa, Oryza sativa
  unsure (1)..(107): unsure at all Xaa locations
  Clone ID: PAT_MRT4530_84101C.1.pep
GGAALGGQRLAGPPAVAHTNIFVQVTAGVHTGSCAFAXKKNIQPTTDLKKYIEAIKRFLHHXSSSFYAVTINSTFIKQDRVYFTKEFSQNYIKPLMEGKKLSTLKYK

SEQ ID NO: 187396 - protein, 146 aa, Oryza sativa
  Clone ID: PAT_MRT4530_84102C.1.pep
MSSLPAFASDRVELEAAHLKEERLILECAAGTGKHPDEAHVGRAASAQPGDLHVEQIRLHKEFDNYLSSGELDHSMDEFISSKDEFVEDLIRDESTMAQFSDLNHALLKLSLERRADVLENQQQICIYSECLRHLLEDESVKLTVC

SEQ ID NO: 187397 - protein, 145 aa, Oryza sativa
  Clone ID: PAT_MRT4530_84103C.1.pep
MASAPFAVSSSPAASAVAARSKVLRGGRSEARTGCRLGITRKNFGRVMMALAVDVSRFEGVPMAPPDPILGVSEAFKADQNDLKLNLGVGAYRTEELQPYVLNVVKKAETLMLEKGENKEYLPIEGLTAFNKATAELLFGADNPV

SEQ ID NO: 187398 - protein, 78 aa, Oryza sativa
  Clone ID: PAT_MRT4530_84104C.1.pep
LFSRLTSLPPRIGALKEAGRSQWLPPQLVFFKSSKAFYLLQEALPQLITLIHCRIQRQLETTEVTSHCQVVVSASSNK

SEQ ID NO: 187399 - protein, 1237 aa, Oryza sativa
  Clone ID: PAT_MRT4530_84105C.1.pep
MAENQGIEQVMGKLVDMLAKKFSEASTTSNAIIPHTESILKIELMQNEIKLGVKNYLSWSRRALLILKTKGLEGYVTGEVKEPENTSSVEWKTWSTTNSLVVAWLLTSLIPAIATTVETISSASEMWKTLTKLYSGEGNVMLMVEAQEKISALRQGERSVAEYVAELKSLWSDLDHYDPLGLEHSDCIAKMKKWVERRRVIEFLKGLNPEFEGRRDAMFHQTTLPTLDEAIAAMAQEELKKKVLPSAAPCSPSPTYAIVQGKETRECFNCGEMGHLMRDCHAPRKPTYGRGRGVDRGGTRGGRGYAGRSNRGRGYGYRGDYKANAVTLEEGSSGTTPDNVANFAHSTPGSFNQAFMSMNTSHSSWILDSGASRHVTGMSGEFTSYKPYSFAHKETIQTADGTSCQERRTGKKLGIGIMRDGLWYLDRRGTNEDVCALMASTSKEVTENGVAERKNRHLLEIARSLMYTMNVPKFLWSEAVMTAAYLINRTPSRILGMKTPYEMIFGKNEFVVPPRVFGCTCFVRDHRPSIGKLDPRAVKCIFIGYSSSQKGYKCWSPSERRTFVSMDVTFRESVHSMEGEILGLKENEQSKGKIVVGEIPCAIGDPVQEQEWRKPHEEENLQVYTRRMRLPTTQQVEVDDQVSDDLTHVQVSSESGGEQIEIREEESNLPIAIRKGMRSNAGKPPQRYGFEIGDESGDENDIANYVSYTSLSSTYKAFVASLNSAIIPKDWKEAKQDPRWHQAMLDELEALEKNKTWDLVSYPNGKKVVNCKWVYAVKQNPDGKVERYKARLVAKGYSQTYGIDYDETFAPVAKMSTVRTIISCAVNFDWPLHQLDVKNAFLHGDLQEEVYMEIPPGFATLQTKGKVLRLKKSLYGLKQSPRAWFDRFRRAMCAMGYKQCNGDHTVFYHHSGDHITILAVYVDDMIITGNDCSEITRLKQNLSKEFEVKDLGQLKYFLGIEIARSPRGIVLSQRKYALDLLSDTGMLGCRPASTPVDQNHKLCAESGNPVNKERYQRLVGRLIYLCHTRPDITYAVSMVSRYMHDPRSGHMDAVYRILRYLKGSPGKGLWFKKNGHLEVEGYCDADWASCPDDRRSTSGYCVFVGGNLVSWRSKKQPVVSRSTAEAEYRAMSVSLSELLWLRNLLSELMLPVDTPMKLWCDNKSAISIANNPVQHDRTKHVELDRFFIKEKLDEGVLELEFVMSGGQVADCFTKGLGVKECNSSCDKMGMIDIYHPS

SEQ ID NO: 187400 - protein, 175 aa, Oryza sativa
  Clone ID: PAT_MRT4530_84106C.1.pep
MEARNSFFFVRLTAWPALAAGRAPPSASWSRPLSRRRRAATCCPPEHLDLAALLLELMHASTPVASLAAAAAILTALFLGRAAARAPPSPCYPAVKPPPEHRGLLPAYASPSSRQSAAAFCPPAPSHRRSALVALLLGRALRLARHCRLFARRCRLARWVGLGELREGGEEVGVG

SEQ ID NO: 187401 - protein, 1991 aa, Oryza sativa
  Clone ID: PAT_MRT4530_84107C.1.pep
MKSGKSKFAVANITSTAWRGRRQGGQRAPPSLNMPSTTPPPPQSSLPPSTGEKQDGNSDVEGNLEAVSPLAQTTHATGFGAKINDNDGHPAASREGEGRRGRRPPVASAREAAILKTKWCCEEGGARRGLDAAWGSRGRNYGLFGFTMNDYLSVGTVISFTTIINFGRVMMALAVDVSRFEGVPMAPPDPILGVSEAFKADQNDLKLNLGVGAYRTEELQPYVLNVVKKAETLMLEKGENKEYLPIEGLAAFNKATAELLFGADNPVLKQGRVATLQSLSGTGSLRLAAAFIQRYFPEAKVLISSPTWGNHKNIFNDAKVPWSEYRYYDPKTVGLDFEGMIADIQAAPDGSFVLLHGCAHNPTGIDPTPEQWEKIADVIQEKKHMPFFDVAYQGFASGSLDEDASSVRLFVQRGLEVFVAQSYSKNLGLYAERIGAINVVCSTPEVANRVKSQLKRLARPMYSNPPIHGARIVANVVGDPTMFGEWKQEMEEMAGRIKNVRQKLYDSLSAKDDSGKDWSFILRQIGMFSYTGLNKTQSDNMTDKWHIYMTKDGRISLAGLSLAKCEYLADAIIDSFHNGPSSHVYVNKDSNTEKVKLPEKIGCQKTSWYQSRPAGGRRRLNPSWPEAWRLEQGRECASAAARKSGASAARRGGRSRAAAGAELLLLLGAELAGRSGSCSVVAGSQHSEDFASLVENQGIEQVMGKLVDMLAKKFSEASTTSNAIIPHTESILKIELMQNEIKLEGVKNYLSWSRRALLILKTKGLEGYVTGEVKEPENTSSVEWKTWSTTNSLVVAWLLTSLIPAIATTVETISSAREMWKTLTKLYSGEGNVMLMVEAQEKISALRQGERSVAEYVVELKSLWSDLDHYDPLGLEHSDCIAKMKKWVERRRVIEFLKGLNPEFEGRRDAMFHQTTLPTLDEAIAAMAQEELKKKVLPSAAPCSPSPTYAIVQGKETRECFNCGEMGHLMRDCHAPRKPTYGRGRGVDRGGTRGGRGYAGRSNRGRGYGYRGDYKANAVTLEEGSSGTTPDNVANFAHSTSGSFNQAFMSMNTSHSSWILDSGASRHVTGMSGEFTSYKPYSFAHKETIQTADGTSCQERRTGKKLGISIRRDGLWYLDRRGTNEDVCALMASTSKEVTEFIRTDNGGEYMNSEFGHFLSLEGILHQTSCPDTPPQNGVAERKNRHLLEIARSLMYTMNVPKFLWSEAVMTAAYLINRTPSRILGMKTPYEMIFGKNEFVVPPRVFGCTCFVRDHRPSIGKLDPRAVKCIFIGYSSNQKGYKCWSPSERRTFVSMDVTFRESVPFYGEKTDISSLFVDLDDLTRGDHDQQKEGEILGLKENEQSKGKIMVGEIPCAIGDPVQEQEWRKPHEEENLQVYTRRMRLPTTQQVEVDDQVSDDLTHVQVSSESGGEQIEIREEESNLPIAIRKGMRSNAGKPPQRYGFEIGDESGDENDIANYVSYTSLSSTYKAFVASLNSAIIPKDWKEAKQDPRWHQAMLDELEALEKNKTWDLVSYPNGKKVVNCKWVYAVKQNPDGKVERYKARLVAKEYSQTYGIDYDETFAPVAKMSTVRTIISCAVNFDWPLHQLDVKNAFLHGDLQEEVYMEIPPGFATLQTKGKVLRLKKSLYGLKQSPRAWFDRFRRAMCAMGYKQCNGDHTVFYHHSGDHITILAVYVDDMIITGNDCSEITRLKQNLSKEFEVKDLGQLKYFLGIEIARSPRGIVLSQRKYALDLLSDTGMLGCRPASTPVDQNHKLCAESGNPVNKERYQRLVGRLIYLCHTRPDITYAVSMVSRYMHDPRSGHMDAVYRILRYLKGSPGKGLWFKKNGHLEVEGYCDADWASCPDDRRSTSGYCVFVGGNLVSWRSKKQPVVSRSTAEAEYRAMSVSLSELLWLRNLLSELMLPVDTPMKLWCDNKSAISIANNPVQHDRTKHVELDRFFIKEKLDEGVLELEFVMSGGQVADCFTKGLGVKKCNSSCDKMGMIDIYHPS

SEQ ID NO: 187402 - protein, 88 aa, Oryza sativa
  Clone ID: PAT_MRT4530_84108C.1.pep
FIGVAKNFIGFKFQRIFLPMFPFDLQDYVPMLHFYRKNTKWYNLFVNFPLFFLWHYQRAPIIFSYVFYSCRIKEAHHFYSWVFPICVL

SEQ ID NO: 187403 - protein, 134 aa, Oryza sativa
  Clone ID: PAT_MRT4530_84109C.1.pep
MSRNSGRSSKQIKEDMTEVRGSSCRKSTRHNGRAGGEGRAAAVAGAREPGEGTAEVAGAEGESDGIGQSRGAGGWSQRAGGWGGDSGWSQRAGDGAREPGEGGATVVVAGSGEGRRWRWCGARDGGGSSGGGQS

SEQ ID NO: 187404 - protein, 45 aa, Oryza sativa
  unsure (1)..(45): unsure at all Xaa locations
  Clone ID: PAT_MRT4530_8410C.1.pep
HPYIXYSSLASHWGSDPTALLRALERTIILRGARMCLMTGCDGMR

SEQ ID NO: 187405 - protein, 81 aa, Oryza sativa
  unsure (1)..(81): unsure at all Xaa locations
  Clone ID: PAT_MRT4530_84110C.1.pep
HEVHFLWNHVDILLAAFIFVITVKTFIFVXFVKGFGYSNKTSFLFGMFLAQLGDFAFCLLSRAXSIHLIEGKLSALLGTTH

SEQ ID NO: 187406 - protein, 1113 aa, Oryza sativa
  Clone ID: PAT_MRT4530_84111C.1.pep
MAGLAPPPLLLLPLSSSLSPAAASHHPTSPPSRTRRRRRLLSAVASADGDAPSPVSVSASAATKGPSSSSVLTFQQAIQRLQDYWASVGCAVMQCSNTEVGAGTMNPLTFLRVLGPEPWNVAYVEPSIRPDDSRYGDNPNRLQRHTQFQVILKPDPGNSQDLFLHSLSALGINVREHDIRFVEDNWESPVKFLLFYSFLLKISTNAIIEPKCIWLQKAGSLFQYNDLSFKKVYLVLGAWGLGWEVWMDGMEITQFTYFQQSGSLPLLPVSVEITYGLERILMSLQGVDHFKNIQYTKGITYGELFLENEKEMSAYYLEHANVDNIQKHFDDFEEEARSLLSLWLPIPAYDHVLKASHAFNILDSRGFVGVTERARYFGRMRSLARQCAQLWVKTRENLGYPLGTYQESNLIYPHVSEKPSRKGVVGQPRAFVLEIGTEELPPHDVIEATKQLEKSLIQILEKRRLSHGKVRSYGTPRRLAVVVENLNMKQMEEEIELRGPPVAKAFDQEGRPTKAAEGFCRKNNVLIDSLYRRTDGKTEYIYARVKESARFADEVLTEDLPTIISGISFPKSMRWNSNIVFSRPIRWIFALHGDLIVPFCFAGISSGNQSCGLRNSSLANFKVEAAELYLHTLEKAGILIDMQERKQRILHDSSILAEGVGGDIIAPDSLVQEVINLVEAPMPIIGRYDVSFLALPKDVLITVMQKHQKYFPVTSKTMGNLLPCFITVANGAIKEEVVRKGNEAVLRARYEDAKFFYKMDTQKKLSEFRDQLSSILFHERLGTMLDKMKRVENTVAEVALLLGINEKMIPAIKDAAALAMSDLATNIVTEFTSLAGIMARHYALRDGLSEQIAEALFEITLPRFSGDVFPKTDPGIVLAVTDRLDSLVGLFGAGCQPSSTNDPFGLRRISYGLVQILVENKKNFDLTKALTLVAEEQPITIDSGVIDEVVQFVTRRLEQLLVDEGINCEIVRSVLIERANCPYLASQTAIEMEAFSRTEDFPKIVEAYSRPARIIRGKEIGSALEVDASVFEKDEERALWSAYLEVADKIHPGVDIKAFADASLELLQPLEDFFTNVFVMAEDERVRNNRLALLTKVASLPKGIADLSVLPGF

SEQ ID NO: 187407 - protein, 359 aa, Oryza sativa
  Clone ID: PAT_MRT4530_84112C.1.pep
MRRRHREQLPPGADRERLLAEEVLYLHSLWRRAAPAPIPPRGSGSVATLRRVDRRRRRRLERRAQEQQREESGPEWPLAPSPPASPTTWHDNKAASSPAQRPPQQKQPSPGSLSQRAALRAAEEFFSNRGSDDDDEVVEEEGSESEGEEAAGFFMGLFERDAALRGHYERGWEGGEFVCMACVGRKGKARRFAGCVGLVQHARAATRCGRPRAHRAFAAAICRVLGWDIDRMPSVVIDPRGTLGQALAAAEAAAAVAAQENNVDAVEKTISSEDQVAEKEDVETGKNDGSLSDVDAMKENSNVGKNSSSINDNNGDVHEKGNGGAYEKRKRKKKWPETLMVAGASSRHGGWCLVAYDVS

SEQ ID NO: 187408 - protein, 150 aa, Oryza sativa
  unsure (1)..(150): unsure at all Xaa locations
  Clone ID: PAT_MRT4530_84113C.1.pep
MAAALAGEGDGGRCRRSRVEAAGSNGWRCGGGGCRRIWQAAVGWRRRRRLAVGGEAPDPRPPNVSRLAVVRRXEAAASGGRQAEEEVAGGGAGERPWWSDPRSVAQIQSGGRRSKGGGGGAGRRXGRRRRKRPVRVESEAAAGLGARRVD

SEQ ID NO: 187409 - protein, 157 aa, Oryza sativa
  Clone ID: PAT_MRT4530_84114C.1.pep
MPALAATVALCRAAGAPVVYTRHVDPVPRSGPLDEWWPGDRIADGTPAAELLPGSGRREGDLVVEKSTYSGFAGTGLEEALRRMGVEEVIVTGVMTNLCCETTARDAFVRGFRVFFSADATATASQDLQEATLANMAYGFAYVVDCQRLEAAFGKVK

SEQ ID NO: 187410 - protein, 145 aa, Oryza sativa
  unsure (1)..(145): unsure at all Xaa locations
  Clone ID: PAT_MRT4530_84115C.1.pep
KERRSAVNIKTSLRVGGKVGGHFVSGHVYGVGQLLSNEQINNAWLLSCGSVGSLQKQWQEYLAPCLVPKGSISVNGICXSVSDCVXVWSNVSVILHTFIIANLQLLQPWDWVNLEGDILGKNKARFLSSGRARVVHRRSSIVNLQ

SEQ ID NO: 187411 - protein, 65 aa, Oryza sativa
  Clone ID: PAT_MRT4530_84116C.1.pep
IIIHFRRQSYFSLLLFLLNLYFFLSIFAYLFIFVYFYYLLILIYYYYFYSYLFLYILSFLSFYFY

SEQ ID NO: 187412 - protein, 503 aa, Oryza sativa
  Clone ID: PAT_MRT4530_84117C.1.pep
MQRGTEEIKLDADVKKKSTVQEIRKDADVEEFKQADHMLLILREMMVMMKLMLVGEWIMQKMNPEICEFRFRGKVIVFDKLLVQKITGLNDGDLPVKLSGANSEVIAYMDHLQMPTTGLHLRIIDYNTPRFCHVTDEDFEYVAVVDRCRMNLGYVTYGSRPFHPRNEIPYLAQVHAVVGGSEAENAGVARAEDVPIGAVQDGVGIGAAVAQDSVAQDSASLNEWIRLSASSSQGTTDEFVSALDNFKRDMIDLRAKRTCDMISDISKVLADSNTAVGISEAVSNPPSTGLAAEVVSNTPSTEGVAEAVSKPSSIEGAAEATDFDGPSQEASGGSVPSSPAIDDYIFASHSDISNLDDACDAPSFRLFNESDPDFISTQDLAVEMLSLDVSNDIFCNSFTHCKDTFSSPPFTHCNKNINFSSSLSSSSKGNIPSYIFTATCYKLATSSGPSTHEKKNRKKRAQKGDSDVEAKKLKTASEIDDVYRRSVVDSLPNRSRKADAKEL

SEQ ID NO: 187413 - protein, 59 aa, Oryza sativa
  Clone ID: PAT_MRT4530_84118C.1.pep
IQSLNPNFSPFPSHQPQIKQSQWTDPQKHFDIQSHGWWCHVEVVSFRTCWPVVAYPVCH

SEQ ID NO: 187414 - protein, 388 aa, Oryza sativa
  Clone ID: PAT_MRT4530_84119C.1.pep
MSVTVRWQFVIAPGCEAFGSELRACHGGVPAYVGGQAREDEAEAEDLGTPLRSGNPRASAPAARRPRLCPILRRLSTAWRMRSTGAGGGGGGVTGEVAGSGFLHRAPPGGGRRSGGRRRRRTTTTTRNELLPASPPPSSSCALAAGVVEEGGALAVGRPHSSSAPHQVAAECVVARHIRTGEPVDNEDGRLEYRGDNWRALWPGSGKPGLWMSAMSRLAAVYRLFTTDEEIHELTGERSVVKTKDAELELVIPPVFVRCNKVLDAGEQKEGERERERGRRGNNREVMSWHPDMWGHVGLPLTQRLRRIKLGSKPPKDLKGQSSPNLSVEFCEAARLPERIISISEKTKPGHECALSRISPGPFLIRSKKARTPVESGDGHFVQALGSG

SEQ ID NO: 187415 - protein, 380 aa, Oryza sativa
  unsure (1)..(380): unsure at all Xaa locations
  Clone ID: PAT_MRT4530_8411C.1.pep
MADAEDIQPLVCDNGTGMVKAGFXAGDDAPRAVFPSIVGRPXRHTGVMVGMGQKDAYVXGDEAQSKRGILTLKYPIEHGIVSNWDXMEKIWHHTFYNELRVAPEEHPVLLTEAPLNPKANREKMTQIMFETFNTPAMYVAIQAVLSLYASGRTTGIVLDSGDGVSHTVPIYEGYALPHAILRLDLAGRDLTDYLMKILTERGYSFTTTAEREIVRDMKEKLSYIALDYDQEMETAKTSSSVEKSYELPDGQVITIGAERFRCPEVLFQPSFIGMEAAGIHETTYNSIMKCDVDIRKDLYGNIVLSGGTTMFPGIADRMSKEITALAPSSMKIKVVAPPERKYSVWIGGSILASLSTFQQMWIAKAEYDESGPSIVHRKCF

SEQ ID NO: 187416 - protein, 348 aa, Oryza sativa
  Clone ID: PAT_MRT4530_84120C.1.pep
MCYYAGTWRGGAPVGGRAVGPHLTGWGQDELKPVAAAVRACHGGVPAYVGGQAREDEAEAEDLGTPLRSGNPRASAPAARRPRLCPILRRLSTAWRMRSTGAGGGGGGVTGEVAGSGFLHRAPPGGGRRSGGRRRRRTTTTTRNELLPASPPPSSSCALAAGVVEEGGALAVGRPHSSSAPHQVAAECVVARHIRTGEPVDNEDGRLEYRGDNWRALWPGSGKPGLWMSAMSRLAAVYRLFTTDEEIHELTGERSVVKTKDAELELVIPPVFVRCNKVLDAGEQKEGERERERGRRGNNREVMSWHPDMWGHVGLPLTQRLRRIKLGKKARTPVESGDGHFVQALGSG

SEQ ID NO: 187417 - protein, 67 aa, Oryza sativa
  unsure (1)..(67): unsure at all Xaa locations
  Clone ID: PAT_MRT4530_84121C.1.pep
PXGXXXXXXHHSEXPXXXAXXQXXMAFTCCXRKLQTXPTXFXVXXXXXXYCXXDXCXRXXYXXFXFX

SEQ ID NO: 187418 - protein, 84 aa, Oryza sativa
  Clone ID: PAT_MRT4530_84122C.1.pep
LPPENEVEKKKTQGGQDVRLPSDVNALGLHKLEAFAATPNVLDALVDSNDVVKNAKQPAEPPPQMSVASPLQFMLDGQSFAPSL

SEQ ID NO: 187419 - protein, 109 aa, Oryza sativa
  Clone ID: PAT_MRT4530_84123C.1.pep
LYPSLSLSLSLSLSQSRRRMQAARRCHYSRRRATGWLDPASAAGGVAGSGISSRRGWLDPASAAGGVAGSDVSICSRGGSALTAGMVQRQRRWAPSSASYRGSGGRHPR

SEQ ID NO: 187420 - protein, 622 aa, Oryza sativa
  unsure (1)..(622): unsure at all Xaa locations
  Clone ID: PAT_MRT4530_84124C.1.pep
MASADNWLGFSLSGQGNPQHHQNGSPSAAGDAAIDISGSGDFYGLPTPDAHHIGMAGEDAPYGVMDAFNRGTHETQDWAMRGLDYGGGSSDLSMLVGSSGGGRRTVAGDGVGEAPKLENFLDGNSFSDVHGQAAGGYLYSGSAVGGAGGYSNGGCGGGTIELSMIKTWLRSNQSQQQPSPPQHADQGMSTDASASSYACSDVLVGSCGGGGAGGTASSHGQGLALSMSTGSVAAAGGGGAVVAAESSSSENKRVDSPGGAVDGAVPRKSIDTFGQRTSIYRXHRWTGRYEAHLWDNSCRREGQSRKGRQXSNYEKELEEMKHMTRQEYIAHLRRNSSGFSRGASKYRGVTRHHQHGRWQARIGRVAGNKDIYLGTFSTEEEAAEAYDIAAIKFRGLNAVTNFDMSRYDVKSILDSSTLPVGGAARRLKEAEVAAAAAGGGVIVSHLADGGVGGYYYGCGPTIAFGGGGQQPAPLAVHYPSYGQASGWCKPEQDAVIAAGHCATDLQHLHLGSGGAAATHNFFQQPASSSAVYGNGGGGGGNAFMMPMGAVVAAADHGGQSSAYGGGDESGRLVVGYDGVVDPYAAMRSAYELSQGSSSSSVSVAKAANGYPDNWSSPFNGMG

SEQ ID NO: 187421 - protein, 854 aa, Oryza sativa
  Clone ID: PAT_MRT4530_84125C.1.pep
MGFKAREGGGLLDFLHAPPSAHITSDGCVLRPSHRRCPSGGHSTNGPYSSFPIFPSPPSLHERDGKTAARGGGETHRAAASRRGSDHHGRGGARYEVKRRLRRSSSYSSPSPDLQAEAKALRRKEGASGLRLASDRPAATVAGFRRARDSAAAASDMPSFPSSGASPQKQQHNARRRQLIRQQRKSLPIASVEKRLIEEVRKNDTLIVVGETGSGKTTQLPQFLYDAGFCQDGKVIGITQPRRVAAVTVAKRVAEECNDQLGKKVGYSIRFDDSTSNATRIKYMTDGLLLREALLDPLLSKYSVIVVDEAHERTVHTDVLLGLLKKVQHSRSIYANKNGKILPDIQHQSQYFTLKACQGTKIDPLKLIIMSASLDAKCFSDYFGSAKAVHIQGRQYPVDILYTYQPESDYLDATLVTIFQIHLEEGPGDILAFLTGQEEIESLDRLIQERARQLPPQRSKIWTTPIYSSLPSEQQMNAFKPAPAGTRKVVLATNIAETSVTIPGIKYVIDPGMVKARAYNPVTGMESLIIIPVSKAQALQRSGRAGREGPGKCYRLFQESEFDKLVDSTVPEIKRCNLANVVLQLKALGIDDIIGFDFMEKPSRTAILKSLEQLILLGALTDDYKLSDPVGRQMARLPLDPMYSKALIVASEFKCLEEMLIVVSMLSVESIFFSPREKLEEARAARKSFESSEGDHITLVNVYRAAKECLEKSKNANAKEKTMEKALNRWCRENFINYRSLRHACDVHSQIQGHVQQMGLNVSSCGDDMVLFRRCLTAAFFLNAAMRQPDGSYRALATSQSVQIHPSSVLFQKKPDCAIFNELVRTSQNYVKDLTRIDPVWLAELAPQYYATED

SEQ ID NO: 187422 - protein, 87 aa, Oryza sativa
  Clone ID: PAT_MRT4530_84126C.1.pep
MCLYLPSSSGEREAALATSPLAGENKEEDCLLLLRLELKSDATELSPTSMMTVDTRMRPSSAASTTVAEVHGVDDGGHVDAVELGAA

SEQ ID NO: 187423 - protein, 72 aa, Oryza sativa
  unsure (1)..(72): unsure at all Xaa locations
  Clone ID: PAT_MRT4530_84127C.1.pep
LTTDVKLFEMRPXALQEAISGDNIXFNVTNVSAKDLNLGNRVSNSTEDRSKEATLFTSEAIIMNHSSQTRYT

SEQ ID NO: 187424 - protein, 1463 aa, Oryza sativa
  Clone ID: PAT_MRT4530_84128C.1.pep
MAEPTIADLLKEIKNMSAELTSLKADMATMKDKASTAASTETRHPDGLRDLDLPPRPKKWDFPRYDGTTDPLLFLNKFEAYFRHHRTMAEERVGMASYHLDDVTQTWYTQLLEDEGTPTWGRFKELVNLRFGPPLRSAPLFELSECRRTGTVEEYSNRFQALLPRAGRLDESQRVQLFTGGLLPPLSHAVRIHHPETLAAAMSLARQVELMERDRPAPPPLRAPPRGLLPAPAPRLALPAPAQQLALPAPPAAAPQGRDAANPRRLTPEEMAERCRQGLCFNCNEKFTRGHNRFCRRLFFVDGVEIDDVAIEGDAAAAAGDTEAPVFSLHAVAGVPIADTIQLQVTVGDASLLALLDGGSTHSFIGEEAARRAGLPIQSSPRMTAIVANGERVACPGVIRDAAFTINGSTFHTDLFVMPLAGFDVVLGTRWLGTLGPIVWDFTSRSMAFQRDGQRFAWKGVASTSTTHLRTLAAASGTLLDELLVAYEDVFGEPTGLPPPRGRDHAIVLKPSSAPVAVRPYRYPAAHKDELERQCAAMIEQGVVRRSDSPFSSPVLLVKKADGSWRFCVDYRALNALTVKDAFPIPVVDELHGARFFTKLDLRSGYHQVRMRPEDVHKTAFRTHDGLYEFLVMPFGLCNAPATFQALMNDVLRPFLRRFVLVFFDDILIYSETWTDHLRHLRTVLSVLRQHRLFVKRSKCTFGSPSVSYLGHVISEAGVAMDPAKVQAIHEWLVPRSARAVRSFLGLAGYYRKFVHNYGTIAAPLTALTKKDGFSWTEDTAAAFDALKAAVTSAPVLAMPDFAKPFTVEGDASTHGFGAVLVQDGHPVAFFSRPVVLRHRALAAYERELIGLVHAVRHWRPYLWGRRFVVKTDHYSLKYLLDQRLATIPQHHWVGKLLGFDFAVEYKPGAANTVADALSRRDTEEGAILALSAPRFDFISKLHDAQRQDPALTALRDEVSAGTRTGPWALVDDLLQYNSWLYIPPASPLAREIIEATHEDGHEGVKRTMHRLRREFHIPNMKQLVQDWVRSCAVCQRYKSEHLSPAGLLLPLPVPQGVWTDIALDFIEALPRVRGKSVILTVVDRFSKYCHFIPLAHPYSAESVAQAFFAEIVHLHGVPQSMVSDRDPIFTSTFWRELMRLMGTKLHMTTAFHPQSDGQSEAANRVIIMYLRCLTGDRPRQWLRWLPWAEFIFNTAYQSSLRDTPFRVVYGRDPPSIRSYEAGDTRVAAVAKSMEERAEFLFDIRYRLEQAQAVQKLHYDKHHRHVAYQVGDWALLRLRQRPTTSLPQSGTGKLKPRFYGPYRITELINDVAVRLELPAGARLHDVFHIGLLKKFHGPPPGAPPALPPLHHGAIAPEPERAVRFRLARGVRQALVQWKGESPASATWEDIEVLRAKYPALQLEDELSLEEGGDVMWGKTYTRRHRARDVRRAAERAGARMDAERAVIAGTAHATEDEAISASG

SEQ ID NO: 187425 - protein, 311 aa, Oryza sativa
  Clone ID: PAT_MRT4530_84129C.1.pep
MEARAGLAMQSRAAVGVGAGPGVGRRGRARDPRGEAANRGEPAGRRPRRTGGGQAPRPAVLPQGVQSFLIGLGEVVTFVVIWSKCDNLCVGNGVVQGHDSLHNSVDEALLLKRKSEEVLFYLNGRCIYLVGMMGSGKSTVAKILAEVLGYSFFDSDKLVEQAVGMPSVAQIFKEHSEAFFRDNEAMKYMKKGLSVWLDVPLDALARRIAQVGTASRPLLDQPSSDPYTAAFSKLSMLAEQRGDAYANADARVSLEEIAAKQGHDDVSKLTPTDIAIEALLKIENFVTEHSTSSGPVGDLIVDSQNRRTKAL

SEQ ID NO: 187426 - protein, 62 aa, Oryza sativa
  Clone ID: PAT_MRT4530_8412C.1.pep
GLRSHWLEQERRREGVGAARLRERESLAGAPWRILAREARDGEEEGIATASGGGGGGGSANP

SEQ ID NO: 187427 - protein, 132 aa, Oryza sativa
  Clone ID: PAT_MRT4530_84130C.1.pep
EALLLKRKSEEVLFYLNGRCIYLVGMMGSGKSTVTKILAEVLGYSFFDSDKLVEQAVGMPSVAQIFKEHSEAFFRDNESSVLRDLSSMRRLVVATGGGAVIRPVNWKYMKKGLSVWLDVPLDALARRIGQRG

SEQ ID NO: 187428 - protein, 135 aa, Oryza sativa
  Clone ID: PAT_MRT4530_84131C.1.pep
MEIGNEARRGEVEAMRGLIVHRASVDPSCASSDFRRRGASDRALARSDSSCNTTPACSDSDDEDNDDKVGTRRSRRRWRTRGGLAAALQEPVREARRRTSSPVLQIQPPPPRTACCPPPRTATPPPPLPPSGKAR

SEQ ID NO: 187429 - protein, 665 aa, Oryza sativa
  Clone ID: PAT_MRT4530_84132C.1.pep
MAGSSESDYYSEEEEELGWEEDGLGSEGEEEDAEAARERALKRLDGLGKRGVCYLSRVPPNMNPSHVRQMLSKYGEVQRIYLVPEGGKKRSPFYYDIWNIKYLKKFKWDDLVGEIAEKTHIREQKLNLEIAAAKKQRDHYLSNVEKSRTLKHIQERRKKHSFLFLLREASASAAARRRLPPLHALLVKLGLQPYARVHNALIQAYAASGLVDDARRVFDGMSHRDTVSFNSMIHAHAMSGDVVSARRLFERVPSPTPVTWTALVAGLCRAGDVAAARRLFEEMPVRDLVSWNAMMSGLAGNRRPVEALCLFRRMMAEGFAPNRGTVLSALAACAGAGALETGKWIHAFVERKRLFRWWDEFLGTALLDMYAKCGAVELALDVFTKLRSRNTCTWNAMINGLAMNGYSAKALDMFRKMELDRTVVPDEVTFVGVLLACSHGGFVDVGREHFHMIEKKYGIRLILEHYACMVDLLARSGHLQEAHKIIAGMPMKPDAVVWRALLGGCRLHKDVKMAETAISEMEATCSGDHVLLSNLYAAVGRWSGVEDVRRTMRSKGIEKIPGCSSIEINDSIHEFVSGDKSHPSYNDIHAKLAEISARMQQQGYVTETAEVFYDVEEEEKEQALGHHSEKLAIAFGLIGGPPNVAIRIVKNLRFCADCHKFAKLL

SEQ ID NO: 187430 - protein, 114 aa, Oryza sativa
  Clone ID: PAT_MRT4530_84133C.1.pep
MDTSTSSPMEGPPQPSKGNWQNPTQNIKRKAYNKTTMNHRSNRGRSKTFKARDATTEAATNARPKRTGFLPKGKESQNKTTSPRRIWHLQASMSLNLEKLGGAFVTPRTSPERD

SEQ ID NO: 187431 - protein, 152 aa, Oryza sativa
  Clone ID: PAT_MRT4530_84134C.1.pep
MSSAPPPQQSKPSYNHRRHNNAAPRHHHGQQQQQPQPQPQPQQRYVPKPAAPKPSPPPTLTTALRSSASPSASGAGRVGGEADGFVAYLPHDEVVAAGLGGPDAQESQAVVDLLNDALAALLRAKPREFWRQGNRNARLCITVLMKPCSWKA

SEQ ID NO: 187432 - protein, 841 aa, Oryza sativa
  Clone ID: PAT_MRT4530_84135C.1.pep
MYGAVEAIASAAVTTCSMRNIRQIHDTSGPAMVYDLAAVAQRERGERGWYSWSRPARDCTEILRMANELSGKFCTPVSQPDNDSTVIQIISTIMPRYYPQLKFERLVTSLEAKVGYDVLMADFFIHKNVPREEKINLIVVQKEDLNASSCIANPPHVSFLVNGKGVDKRTNVSMETGPQFPTDITRMLKYGANIIQAIGYFNANYIIAVAFLNKLESFDAPNLNDYAQPVAADPPDSDLLEGPSRVSLKCPISFRRIKTPIKGRLCKHYQLNLRKPTWRCPFCNTPSNFTDLRIDQKMVKSLFFHKILQETGEDTIDVLVFADGSWKAISTNDERSDRHSSDVIQQSRDTMDTDATADDVIDLINEDNDGDVPMSFTSASEDVKPFLNCQDLSVADYLSDLPMNTVSQAEDLYAGGASRGNNERGNATSTSGQNSSLPSTGGLGSSSFGTLESILPHNILHPVITDAVSPSLDTSNSVVLRQHVAQGTRSDIVPSQPRIDPQLRLEIARPPIPRNVAREPTGIQALPVQPQRVRPNIYNCPPPFPQSSPASAYQVHQVTNADSVITAMSTGIGSLSRAPDAAPLLQHQSTQQGQIFNRHLNYFTIFITHFVLLACVLQIQVEIRATQNYHQGQFIGLTAPQNFMGTRPPPGVPGQAIGANAHGAPPAQQSHHVHRLVSNLMNQLGQATVAQPSTAPQVLPSQPGGTSAVNPQIRGHLFPAQQRSQAMRPQAVPRPTISQAPPRAQSPFLPATARPPSTPPPIGTSDDLQELPVDESWRPTGQMRGSLTGEAYSVAIGRYNPSVNIAGQQTSHVTSQARPAGPDARSFRRLREPSEGANALN

SEQ ID NO: 187433 - protein, 193 aa, Oryza sativa
  Clone ID: PAT_MRT4530_84136C.1.pep
PRVRKNVPREEKINLIVVQKEDLNASSCIANPPHVSFLVNGKGVDKRTNVSMETGPQFPTDITRMLKYGANIIQAIGYFNANYIIAVAFLNKLESFDAPNLNDYAQPVAADPPDSDLLEGPSRVSLKCPISFRRIKTPIKGRLCKHYQCFDYDNYMELNLRKPTWRCPFCNTPSNFTDLRIDQKMVKRLEKIY

SEQ ID NO: 187434 - protein, 99 aa, Oryza sativa
  unsure (1)..(99): unsure at all Xaa locations
  Clone ID: PAT_MRT4530_84137C.1.pep
XXKQCPDLQFLRHHLVHSLPSCQLLLGLRAHPPPIGTSDDLQELPVDESWRPTGQMRGSLTGEAYSVAIGRYNPSVNIAGQQTSHVTSQARPAGPDARR

SEQ ID NO: 187435 - protein, 143 aa, Oryza sativa
  Clone ID: PAT_MRT4530_84138C.1.pep
MVQARLQSMIDAAAGRSSAASRPRPLPRHGTTETAAERQVQRGGPCRCACNYCGGHYDDGGGGASCGQRRPCVVLVAVDRRTSDPREEFRRSIAEVITAKRMAEPAELRALLNCYVSVNAREHRAAILEAFHEVCSGLFSRKR

SEQ ID NO: 187436 - protein, 73 aa, Oryza sativa
  Clone ID: PAT_MRT4530_84139C.1.pep
PPQVGWPPPQRKKVRVLGGRPPGGGGDPGARQPPPPQGPHPGPLNSGGFPPAKGPLVDPCPDPPGLPPRPVCF

SEQ ID NO: 187437 - protein, 613 aa, Oryza sativa
  Clone ID: PAT_MRT4530_8413C.1.pep
MPVQDPSSPVPAAARPKRTSSAPIRPSDYTHSPAHHRVALRDAAGLAGVLHGLPPLAHPSRILTAADAAREARLAASVSGALDRRDVPGGDTALHLAVRLRLPSLASALAAAGADPTLQNHAGWTPLQEALCLGCKDIAACLLRAHRLAAWAKLRRRAPALSAALRRVQDFYLEVDFHFESSVVPLLSRAAPSDTYRIWKRGAELRADTTLAGFDGLRIRRADHSFLFFGEEADAGGRHLPPGSLLVLHRGKREVHDAFAAAAAAGDEDSATSDAAAYRPGLNISSARLVPRTTWLRKEKTESVGEWKARVFDVHNVVFSFRTLKAANAGRKDFTFELAGDDDDDDNNDDEEDFLPLEIRDDDEDGDFLVADIPPPPSRRSCYVPGRRSVAAPPSHMATPQRRRNSVDVPRRLPACASVGRGEGGVFGRHATTTGGARWKEEETVKTLRPTVWLTEDFPLTVDEFLPLLDILASRVRAVRRLRELLTTKFPPGTFPVKVAIPVVPTVRVVITFTKFVPLLEPEEFFTPMSSPSLLVSPGPGSIMHKPDTQKSSYLKWGLKNSRSKPVNLSQVADNTDPFTIPSDYTWVSLGSKGQDKKSSKTKKGKTKETKLS

SEQ ID NO: 187438 - protein, 76 aa, Oryza sativa
  Clone ID: PAT_MRT4530_84140C.1.pep
MDGVSGRPPPALLVVILAGHRVYKRTTFRSSHAADRCVGNSPHIDYLGEVEMGLIMAVAEANRCCDRGETGRPAQH

SEQ ID NO: 187439 - protein, 141 aa, Oryza sativa
  Clone ID: PAT_MRT4530_84141C.1.pep
TSTLLPSPLSSLVGIPNLKSLSSPDPTRSDGRHIAGLRATSSWSSRPSRGPGSPVVTINRPKALNALTRPMMVSLAAAFRRLDADDGVAAVVLAGRGRAFCSGVDLTAAEEVFKGDVKDPDADPVVQMERCRKPIVGAIAG

SEQ ID NO: 187440 - protein, 60 aa, Oryza sativa
  unsure (1)..(60): unsure at all Xaa locations
  Clone ID: PAT_MRT4530_84142C.1.pep
TISAESAGLLPSRSDKPQGSDLLLEATLEAEVAEHXKXFVSSSIMMNCTRSDAIFDRNCA

SEQ ID NO: 187441 - protein, 76 aa, Oryza sativa
  unsure (1)..(76): unsure at all Xaa locations
  Clone ID: PAT_MRT4530_84143C.1.pep
EKRIYCVSGLXGFGGPGARAAVHANGRPRSNRSKMDGRDRSGPRXRLTADDPDDVSDDVTXGGGGSAERTASAGHA

SEQ ID NO: 187442 - protein, 176 aa, Oryza sativa
  Clone ID: PAT_MRT4530_84144C.1.pep
MSSDSSSWARALVQISPYTFSAIGIAVSIGVSVLGAAWGIFITGSSLIGAAIKAPRITSKNLISVIFCEAVAIYGVIVAIILQTKLESVPTALVHHPESLRAGYAIFASGLIVGFANLVCGVCVGIIGSSCALSDAQNSSLFVKILVIEIFGSALGLFGVIVGIIMSSQATWPAKA

SEQ ID NO: 187443 - protein, 145 aa, Oryza sativa
  unsure (1)..(145): unsure at all Xaa locations
  Clone ID: PAT_MRT4530_84145C.1.pep
MSPVNPASHCLLRFWLRFRCRLRGRSLAEESGYRRHFRALRERRPPTRRASYEYHVLLLLHQRYAVLGTPSAYSASPSAARPSSPASSRRSPPRWPDLRDPPRTNPSRPSTPRATSXRQTRPPSPHAPLVYKLHARASPQPPCTH

SEQ ID NO: 187444 - protein, 117 aa, Oryza sativa
  unsure (1)..(117): unsure at all Xaa locations
  Clone ID: PAT_MRT4530_84146C.1.pep
VYYNYRYHPLFGRTRDYSTFWDASSEDDATMMHLARVVEAYDSARIEFHXMLPXGMVENNMRILDVRXEDLHLTSDLDPREAHLHNFXKRHGEVCRPIPAWLPIPKIPPTYSFRPHL

SEQ ID NO: 187445 - protein, 76 aa, Oryza sativa
  Clone ID: PAT_MRT4530_84147C.1.pep
MWGLAQVGFTRLIGFPHENVVKFRPIPEGTGDEICHARQGAMIAQSMRSSSRLNVTDAMAIPPSSMLSQELEINSV

SEQ ID NO: 187446 - protein, 402 aa, Oryza sativa
  Clone ID: PAT_MRT4530_84148C.1.pep
DSYRAIGLLRAGREDPAIHPTHTSPPAHPPPVLRRRRRPAAMDMDSVECLSLPDSSMDVDDVDGGGSVHHHHHHHHALPPHLPAGVAVGVGPGGRAFPKANVAGVGGGGAAGAPAAGGAVAGGGGPGGGPPATSVHELLECPVCTNSMFPPIHQCQNGHTLCSTCKARVHNRCPTCRQELGDIRCLALEKVAESLELPCKYCSLGCPEIFPYYSKIKHEAQCSFRPYNCPYAGSECAVAGDIPFLVAHLRDDHKVDMHSGCTFNHRYVKSNPREVENATWMLTVFHCFGQYFCLHFEAFQLGMAPVYMAFLRFMGDENEARNYTYSLEVGGNGRKMVWEGTPRSIRDSHRKVRDSHDGLIIQRNMALFFSGGDRKELKLRVTGRIWKEQTNPDGACIPNLCS

SEQ ID NO: 187447 - protein, 379 aa, Oryza sativa
  Clone ID: PAT_MRT4530_84149C.1.pep
MASSTVTLEKTTTIRSEAVVAADAAVDRAATLKSPLLEGKKCGDGGVAKRCCERKYELVSYDALPAFLKHNEFIIDYYRSEWPIKQALLSAFAVHNETVNVWTHLIGFFMFLALTVCAATMVPMESSATSMTMANNTGNPMVLMMMSYGSNGAAMAVQALRNVSVESELAAAALSAAGDQVARWPFYAYLCGAMFCLLMSSACHLLACHSEHASYVLLRLDYAGITGLIVTSFYPLVYYTFLCDPFFRTLYLGFITLFGAAAVAVSLMPVFEKPELRWARAGLFACMGMSGLVPIVHKMLVFGARPEAVLTTGYEMVMGAFYLAGVVVYATRVPERWMPGKFDLAGHSHQLFHVLVIAGAYAHYLAGVVYLSWRDGEAC

SEQ ID NO: 187448 - protein, 51 aa, Oryza sativa
  Clone ID: PAT_MRT4530_8414C.1.pep
HIAYQKPLQSSNSTSSKYLNLICTTGLACATGLARRPNCAYVLFRFRFVGA

SEQ ID NO: 187449 - protein, 60 aa, Oryza sativa
  Clone ID: PAT_MRT4530_84150C.1.pep
MVAEAEDGGSWAAGDRVARLRRKTAATMRRTSEDGVGDEKRQRKAGPTVSSSGACNPMTN

SEQ ID NO: 187450 - protein, 112 aa, Oryza sativa
  Clone ID: PAT_MRT4530_84151C.1.pep
FYFFFFFNFIILFFFLFLYFFLFFSSLSFPIYKNFFLHRPKKTLIKNKKQRGGEKNRGGPNTRAEKKGTNTPRQKKKRRKTPQNLTGPYITLGKKNKGGLSGPPPPPTRARE

SEQ ID NO: 187451 - protein, 384 aa, Oryza sativa
  Clone ID: PAT_MRT4530_84152C.1.pep
MPASSRLNPSSATCSLAAASASTSASPRRRGRGRGPASAMGQAPSSPPGPGRSRSRGISRWPPPPPPLQGLRLDLGLLLGRKARTRSGGGKLDLANWLSSADWKFAAEQFVKRLPGKVFVHRSQCNHSKLTYDGVDLMGERLAEEVRQVVQRRSNLQKISFVAHSLGGLVTRYAIGKLYDPSINEEASLDKENFSNELRTSDGGKIAGLEPINFIAVATPHLGSRWNKQLPFLFGVPLLERTAAVTAHFIVGRTGKHLFLTDSDDGKPPLLLRMAEDCDDGKFMSALRSFKRRVAYANLQLTPSDKKYPHIIHVDKGNSEHHQQEESVEASLTDSMEEVMIHGLTQVPWERVDVCFHKSWLRYNAHHNIQILFVKHNLRLITDQ

SEQ ID NO: 187452 - protein, 504 aa, Oryza sativa
  Clone ID: PAT_MRT4530_84153C.1.pep
MGLLVLKRLMSVQQERRHIQARMAKRKGSVCLQLANSEGGKIMGYSGLNLPEDIWSHIHSLMPLRDAARAACVSRAFRSFWRYHPNLIFRIETPDLNFIKKVDCILKNHSGIGIKSLRFESGIFYNASTSYYLDSWLQIAVTPLIEELTLGILSYNTNYFDSKYDDEYNFPCSLLSDGRGSSMRHLYLSRCSFHPTINLELRNLTRLHLAFVHITGNELGCVLSNSYALERLELNYCYGIICVKIPCLLQRLSHLEVFECRMLQVIENSAPNLGSFHFGINHVQLLLGESLQMKSLSMCYPGAVYYACAELPSNVPNLETLTIGSPHEMVDTPMLPSKFLHLKCLTISLVGMVTFSPAYDYFSLVSFLDASPSLETFFLDVSQERMGHVSIFGDSLQLRQMPEHHRHGNLQSVKITGFCSAKSLIELTCYILDNTTSLKCLTLDTTRGVSSCSTGEHKKCFPIGKMLTEANRAVLAIETFIERKVPSTVKLAVTKPCSRCHVKS

SEQ ID NO: 187453 - protein, 174 aa, Oryza sativa
  unsure (1)..(174): unsure at all Xaa locations
  Clone ID: PAT_MRT4530_84154C.1.pep
GLGMLTLSPVLVPHQQAESGDNADNNASSSMDIHVAFFYLSLYIVAFAQGGHKPCVQAFGADQFDENDPEECASRSSFFNWWYFGIYGGNVITVSILNYIQDNIGWQLGFGIPCIAMSLSXAVXLLGTKSYRXYPLRSNTSLFDQXGXSLLAKIRWWXASWCXSTGDLHCXQAF

SEQ ID NO: 187454 - protein, 463 aa, Oryza sativa
  Clone ID: PAT_MRT4530_84155C.1.pep
MPASSRLNPSSATCSLAAASASTSASPRRRGRGRRPASAMGQAPSSPPGPGRSRSRGISRWPPPPPPLQGLRLDLGLLLGRKARTRSGGGKLDLANWLRCFVAPPLPQPSEAEASAEGRDAGNREEEEAGNEEADHLVVMVNGLYGSSADWKFAAEQFVKRLPGKVFVHRSQCNHSKLTYDGVDLMGERLAEEVRQVVQRRSNLQKISFVAHSLGGLVTRYAIGKLYDPSINEEASLDKENFSNELRTSDGGKIAGLEPINFIAVATPHLGSRWNKQLPFLFGVPLLERTAAVTAHFIVGRTGKHLFLTDSDDGKPPLLLRMAEDCDDGKFMSALRSFKRRVAYANVTYDHIVGWRTSSIRRQHELPKLQLTPSDKKYPHIIHVDKGNSEHHQQEESVEASLTDSMEEVMIHGLTQVPWERVDVCFHKSWLRYNAHHNIQVRIHPVNSDGEDVIYHLIDNFLV

SEQ ID NO: 187455 - protein, 132 aa, Oryza sativa
  Clone ID: PAT_MRT4530_84156C.1.pep
MPFTAIHKSIIGYWITYMYIHIYIYIYINVYMYIYDIYIYICIYIYMYIYTYIYIHIYIYTCIYICIYLYMYIYVHIYIYTCTYIYIYIYIYTYTYIYMYIHIHIYICIYIYIYICIYIYIYIYIYIYIYIY

SEQ ID NO: 187456 - protein, 103 aa, Oryza sativa
  Clone ID: PAT_MRT4530_84157C.1.pep
MVVDPATLESGGDDAGEEGCRWLQQREEELSWAKRTVGDCSCISGEEEASWANRTDCGCGRGEEEAQRWREWHLPPALERQLWQASGEQPSHCGAHALGIVSA

SEQ ID NO: 187457 - protein, 57 aa, Oryza sativa
  Clone ID: PAT_MRT4530_84158C.1.pep
STTETLCEIPALLDRWIFFILTLHSTRSRRGLETRVFFFFFFQQVESLHFQFKTKLI

SEQ ID NO: 187458 - protein, 796 aa, Oryza sativa
  Clone ID: PAT_MRT4530_84159C.1.pep
MGYTTPPSPLTDEVIRRVRKLNVVGRIPAELQNLTFLQDLGLGFNPLSGQLPKELGNLTNLLSLGISLDNFTGELPEELGNLTKLEQLYIDSSGFSGPFPSTISKLKNLKKASDNEFTGKLPDYLGSLTELEDLVLRNCRISENLETVDFSKFAALTMLFLGNNSLIGTLPDVISSSLKVMNLVANNIVLGSTKNSDISTRGSDNTIYEADATNLGDASYYVTDQIRWGVSNVGYFYQATDRMDIIYSSEHFQTAVDSKLFETARMSPSSLRYYGLGLENGNYTVMLQFAEFAFPDTQTWLSLGRRIFDIYVQGALKEKNFDIRKTAGGKSFTAINRTYTATVLKNFLEIHLFWAGKGTSGIPTQGYYGPMISALSVTPSKQTCYINFNVGYIGSILGLAGLFGIFMWIKKRRTMAKQKEELYNLVGRPDVFSNSELKLATDNFNSQNIIGEGGYGPVYKVVYFPQLSDLGKLPDGRVIAVKQLSESSHQGKSQFVTEVATISAVQHRNLVKLHGCCIDSNTPLLVYEYLENGSLDQAIFGHSSLNLDWAMRFEIILGIARGLSYLHEESSVCIVHRDIKASNILLDTDLIPKISDFGLAKLYDEKQTHVSTGIAGTFGYLAPEYAMRGHLTQKADVFAFGVVMLETVAGRSNTNNSLEESKINLLEWAWDQYEKEQALRILDPNLKGFNKDEAFRVIRVALHCTQGSPHQRPPMSKVVAMLTGEVEVPKVVTKPSYITEWQMMDGNRSYVTSSYSGSTTHEFGRQNEIEPLQQSPPIIKSGRKLSMMEDECEVAK

SEQ ID NO: 187459 - protein, 61 aa, Oryza sativa
  Clone ID: PAT_MRT4530_8415C.1.pep
MEAAACASASPPRERNWSARSRVDPVHGEIRGAAPWAPGGGDYHLVLANTYVVSDEADQEG

SEQ ID NO: 187460 - protein, 388 aa, Oryza sativa
  Clone ID: PAT_MRT4530_84160C.1.pep
MVSDQEIASCVESVLRSSGGAAGEASLAAVLSQAEAKLGVDLAHKATFIRDQMDLFFGPRLQPPLVAKAQAAAAAAPNPPPLVAAPAPAMPQVQVQAQLQQMQQQLAVLQPQLIFQAMPQLPAGVPGGAAGAVSPQPPVPAMAFYPPPPLAFRVTSGLAGVATGGTVSFQQPAPGTGGTASPTAAVQAAGDNKESASKRKRGGPGGLNKVCAISPELQTIVGETVMSRTQIVKQLWQYIRQNNLQDPDDKRKIICNDELRVVFGTDTTDMFKMNKLLAKHITPLDPKDQIREAKKFKPSNVATQPMPLINQPSVVISDALAKFIGMEGTVPQDDALRYLWDYIKANQLEDAITGSILCDSKLQELFGCESIPSSGLSELLAHHFIKET

SEQ ID NO: 187461 - protein, 81 aa, Oryza sativa
  Clone ID: PAT_MRT4530_84161C.1.pep
TNRALPIRCFPAARDSFLRGSKHISLHIVSRDLVSRRLKLLHRRQHLPQIWQEITGEWASRLVGSGSACGSKQERSSGPGR

SEQ ID NO: 187462 - protein, 492 aa, Oryza sativa
  Clone ID: PAT_MRT4530_84162C.1.pep
MYAYVGLVGGAAALVLLLLLRHQARRWRNPRCGGQLPPGSMGLPLVGETFQFFSSDASLDIPPFIRHRLASLGCKFRYGPIFKTSLVGHPVVVSADEELNHMVFQQEGQLFQSWYPDSFVEILGKDNVGEQQGAMFRYLKNMVLRYFGPESLKEGIIRDVERAVSSSLCTWSTLPAVELKEAVSTMVFDLAASKLLGLEPSRSKILRKSFFDFVRGLISFPLYLPGTAYYSCMQGRRRAMVVLEQVLEERKQSTGLQRGGEAQQHGDFLDYVIQEITKEKPVMTEKMALDLMFVLLFASFHTTSLALTLAVKLLADHPLVLEELTVEHETILKDREAGSELDRITWKEYKSMAFTSQVINETVRLANIAPVIFRKALKDIRFNGYTIPAGWGVMVCPPAVHLNPYIYPDPLTFIPSRFKDKPEINRGSKHFMAFGGGLRFCVGADFSKLQLAIFLHFLVTKYRWIPLGASRVVRTPGLEFPDGYRIKVIQRH

SEQ ID NO: 187463 - protein, 47 aa, Oryza sativa
  unsure (1)..(47): unsure at all Xaa locations
  Clone ID: PAT_MRT4530_84163C.1.pep
GVRAAAGYRSVAHCSSLLSFISLKYVCSWLIVFLLYXLLLLIKVPTN

SEQ ID NO: 187464 - protein, 43 aa, Oryza sativa
  Clone ID: PAT_MRT4530_84164C.1.pep
MRAISTCRHDRLKYNSTRGQDHPAQRATTEQALQPLVGKWFTL

SEQ ID NO: 187465 - protein, 351 aa, Oryza sativa
  Clone ID: PAT_MRT4530_84165C.1.pep
MATMNSTNLTLHLCSPAAGANVSGGGGSSSVFTRALHAAQARKMHQRKQLPGSAVSNSKKTSGIKGKKAIHVDRTYDARSDIEPPSFNLGITQDIEEANMVACTPGHDISNVAEDSDKEQELNFLARTPDQPISKHDQKALDDLYTYAVSLTDAEALKKIWVHISQPVPMSLSLHDIQQAIRLDTQMQEETFNVAVQVLAADEIQRFGGTDFVCWRHFLNQDFAMFATAGDDQWNPEDHLPSFKDDSLIPYDVPSCHLIFIPLLQPLHYSLYAFDMEKKKLCILDPLRDASKRSEDTAERHLKTKFHISSALKECMKLAFSDWDEDIPNWVSEFPSAIPAITTGFQFMLPI

SEQ ID NO: 187466 - protein, 214 aa, Oryza sativa
  Clone ID: PAT_MRT4530_84166C.1.pep
MWSGLWFSPYEMPAAPRRSGSPLVGAASTATPASLVVGPYSVPFLLPRPSSSSGSHLVSGELYAVSPRALVDLDALEGTHLGVYERRKVTVVVEGGSGEVVEAEAYFAHTSYMEALWLRCGGEAAEIGEYTMEHAAKDLDPQLQVALKGYLVARGVNSKLASSLHHHLVEKERWQYMNWLKTLEDMFSHHLVEKERWQYMNWLKTLEDMFSKDH

SEQ ID NO: 187467 - protein, 519 aa, Oryza sativa
  Clone ID: PAT_MRT4530_84167C.1.pep
MATMNSTNPTLHLCSPAAGANVSGGGGSSSVFTRALHAAQARKMHQRKQLPGSAVSNSKKTSGIKGKKVVQEKIYTRCTPAILSDLFSSFGDQQKELVKQMGFDGLLSMRLTKLNKQFGAWILCKLDPSSGNLFTGSRHEICLTCEDVSLLLGIPCGRKEILPAIKNEVKDVKAYMYEIFEKDSFDGLTIVTIQRILEKKFNRTMTVHEQIVFKTAFIIFVVTKFLAPQSVNNHISIRYMKALVDVENIHKYNWAEFVLHDIKDAAAALQHKIRHRKSIGYINGCIILPQLFYLDNLDFGTDTPEQENIPRIGMYNDSMIAEFIEKDVILKNRNPFPAYGKMKKLQTIDIFIGFQLRNKHDEKYNIGHHTGAIEAIHVDHTYDARSDIEPPSFNLGITQDIEEVNMVACTPGHDISNVAEDSDKEQELNFLARTPDQPISKSVDASDKSGEAGDDQWNPEDHLPSFKDDSLIPYVVPSCHLECMKLAFPDWGEDIPNWVSKFPSVIPALNNKFQFMLPI

SEQ ID NO: 187468 - protein, 758 aa, Oryza sativa
  Clone ID: PAT_MRT4530_84168C.1.pep
MATMNSTNPTLHLCSPAAGANVSGGGGSSSVFTRALHAAQARKMHQRKQLPGSAVSNSKKISGIKGKKVVQEKIYTRCTPTILSDLFSGFGDQQKELVKQMEFDGLLSMRLTKLNKQFGAWILCKLDPSSGNLFAGSRHEICLTCEDVSLLLGIPCGRKEILPAIKNEVKDVKAYMCEIFEKDSFDGLTIVTIQRILEKKFNRTMTVHEQIVFKTAFIIFVVTKFLAPQSVNNHISIRYMKALVDVENIHKYNWAEFVLHDIKDAAAALQHKIRHRKSIGYINGCIILPQLFYLDNLDFGTDTPEQENIPRIGVYNDSMIAEFIERDVILKNRNPFPAYGKMKLRNKHDEKYNLGHHTGAIEAIHVDRTYDARSDIEPPSFNLGITQDIEEANMVACTPGHDISNVAEDSDKEQELNFLARTPDQPISKSVDASDKSGEGYQQTKLSSFSPYSMLKETSGARIFMREEYACTKLPPKSKRRIIGGPSDILFDRPKRSIKPSHSVKSPFLSKQHSFVRHDQKALDDLYTYAISITDAEALKSSNVSHLPEMFLSFTTNCKDITFNRKIWVHISQPVPMSLSLHDIQQAIRLDTQMQEETFNVAVQVLAADEIQRFGGTDFVGWRHFLNQDFAMFATAGDDQWNPEDHLPSFKDDSLIPYDVPSCHLIFIPLLQPLHYSLYAFDMEKKKLCILDPLRDASKRSEDTAERHLKTKFHISSALKECMKLAFPDWDEDIPNWVSEFPSAIPAINNRFQFMLPI

SEQ ID NO: 187469 - protein, 159 aa, Oryza sativa
  Clone ID: PAT_MRT4530_84169C.1.pep
MAMRQGALRGPSDYSQEPTRHPSLRINAKEPFNAEATRRDLVASYITPVDLFLKRNHGPIPILHDIDSYYVTVAGLIERPAKLYLNDIKKLPKYNVTATLQCAGNRRTEMSKSRKVRGVGWDVCALGNATWGGAKLSDVLQLIGVPYHTEITPSGGKHV

SEQ ID NO: 187470 - protein, 43 aa, Oryza sativa
  unsure (1)..(43): unsure at all Xaa locations
  Clone ID: PAT_MRT4530_8416C.1.pep
RTSPTPTGGAFKPTSLSPPSPRRFPPRPPASXTPTTPTPPPPS

SEQ ID NO: 187471 - protein, 73 aa, Oryza sativa
  Clone ID: PAT_MRT4530_84170C.1.pep
MAGCILRPRPALPCTRARVASIDRHGHHACEVVRERRRMAQSSPAPLARAGGETDVPSGKRPAGAGLARSMPQ

SEQ ID NO: 187472 - protein, 105 aa, Oryza sativa
  Clone ID: PAT_MRT4530_84171C.1.pep
GPSKAFQRADWHVIGIVGGGHGNCGEDRRRAGATAQQSLRSGTDVGAEFCCAGWKRRSHVGHAMISRPSSSGHSVSDTPQPREYGDEKQGCVGRPEIPARSCGRP

SEQ ID NO: 187473 - protein, 411 aa, Oryza sativa
  Clone ID: PAT_MRT4530_84172C.1.pep
MAMRQGALRGPSDYSQEPTRHPSLRINAKEPFNAEATRRDLVASYITPVDLFLKRNHGPIPILHDIDSYYVTVAGLIERPAKLYLNDIKKLPKYNVTATLQVDFGVLVDWWCCAGNRRTEMSKSRKVRGVGWDVCALGNATWGGAKLSDVLQLIGVPYHTEITPSGGKHVEFTSVDQCPEEKGGPYKASISLGHATNPAADVLVAYEMNGEVLKRDHGYPLRVVVPGVIGARSVKWLDRIDIIEEECQGFFMQKDYKMFPPSVDWDNIVWSTRKPQMDYPVQSAICSLEDTNAIIPGEVTVTGYALSGGGRGIERVDISTDGGKTWFGAVRYQKEGVPYVAGDISSDKWAWVLFKTVIDVKGDTEVIVKAVDSSANVQPESVETIWNLRGILNTCWHRVRLLTIHNLRSLL

SEQ ID NO: 187474 - protein, 316 aa, Oryza sativa
  unsure (1)..(316): unsure at all Xaa locations
  Clone ID: PAT_MRT4530_84173C.1.pep
MQNFFGMALRLKWLAKRGEHRDRPWTTIETKQPKELQDLFFSATRQVLGDGXNTKFWLADWLPIGSIKARFPLIFSHVERKGLTVARGLQNHRWVRDIKGAPSNRAIGEYFQIWDAIQKVQLRGGEEDETIWKWASNGRFTPSSAYDMFFMANTEARCGNLVWHTRTPTKVKFFMWLAEKGRCLTADNLSKRGWPHHQTFSLCTSSDEDCEHLFVSCPYTTRVWRMIKGWAGIGIQLPAEAGLELGEWWLLAWQGVQTSCRGAFDTLVLLVCWMVWKERNARVFQSQSRTAGSLFALIKEEVVVWKEAGVFKVLGE

SEQ ID NO: 187475 - protein, 440 aa, Oryza sativa
  Clone ID: PAT_MRT4530_84174C.1.pep
MPTDHHHPDAAAAAAGKGAHHHHGGGKVHKLLKSAFKRGGDHHHPGSGGGGGDQEGDLLSRSASGSSSTSAASSSRAASSSSGRRGGGGRRGDDTCSSVDGESGELDGSKNAKVLAALRDAKISYAYESFPWEKKMKELLPVPAASCFLSMLLLPKSADGSHTRYKSLEDTLARADAWLVSSQAAGVPVAFMNVQTEALLTKISGEMALSTVNMGSLSDLANMANASLYGFEDYHGVDIGVVRAVRLWYTPVAGEAALEIKLLPGDTRLGFAISRTEEGFIYVSSVAEESTPGVASTRSGLLELHRAARRASRLLVVSRVGGEKVLPWMVSTAGDVKCFDTVSLSQKLSLHRHALRPITLHFLMWDTALAIKDVVAKPPLPPPPTMLMLPSPPSPPPSDAEGDAPPPSGDGDEAPGSGAKGGKDSSFRFQNIDLLPDSWL

SEQ ID NO: 187476 - protein, 534 aa, Oryza sativa
  Clone ID: PAT_MRT4530_84175C.1.pep
MGTTESDASRRGLNFQNLGLEQLNLAELVEDFGEEEIWKTIRDMPAEKAPGPDGFTGLFYQACWDTIKCDVLAALQKFFSGNSQNLERLNSAVIILLPKKEAPALLKDYRPISLIHSFSNLATKLMATRLAGRMGDLIPYTQSAFIRGRSIHENFMFVRGMARRFHTEHQPMALVNKAISAGAMCGMGGRLWPPAISLYADDAVLFFRPMQQDTWAVKAILQLFGEATGLKANFAKSAITTIRCLEDQAILVQSILCCRLEPFPITYLGLPLSLRKLTKQDVQPLLDRFSKKFAGWKPKFLSTGDRLTLIKSVLFALPVHYLSVLELPQSAIKEIDRKCRGFLWKGQEEVSGRHCLVAWKSVCMPYEKGGLAIKNLNFFGMALRLKWLAKRGEHRDRPWTTVETKQPKELHDLFFSATRQVLGDGENTKFWLADWLPIGSIKARFPLIFSHVERKGLTVARGLQNHRWVRDIKGAPSNRGIGEYFQIWDAIQEVQLRGGEEDETIWKWASNGRFTPSSAYDMFLWQTQRRVVAI

SEQ ID NO: 187477 - protein, 120 aa, Oryza sativa
  Clone ID: PAT_MRT4530_84176C.1.pep
MASVDLPPRRGGGPTQGAGCCRVELTTACARWPRMVVAAQGPVIADGVRRLDIEVNVVGARFSSFHGVLDALASMRSSAASRSPPTSRSSLENGVMPWCAVRLSAWCAAAPAWLAAKCSP

SEQ ID NO: 187478 - protein, 56 aa, Oryza sativa
  Clone ID: PAT_MRT4530_84177C.1.pep
VAAAELVTSTGEEPVAMTPTRKPWPRPTSRRARQAAASVGFSELAAPSSPHLVARS

SEQ ID NO: 187479 - protein, 400 aa, Oryza sativa
  Clone ID: PAT_MRT4530_84178C.1.pep
MAGGDLRQRRAVAAADGEGDGKMGSGGEEAEVKGKGQGRKEALGWLEWGRGWMGIVGEFLFQRIAASNLSNPLELPPLDGVSFVVTGATSGIGLEIARQLALAGGHVVMAVRRTKLAQELIQKWQNDNSEIGKPLNAEVMELDLLSLDSVVKFADAWNARMAPLHVLINNAGIFSIGEPQRFSKDGYEEHMQVNHLAPALLAVLLLPSLLRGSPSRIVNVNSVMHTVGFVDAEDMNLTSGKRKFTSLMGYSNSKLAQIKFSSMLHRRIPAEAEINVICASPGIVHTNVARDLPKLVVAAYHLIPYFIFDAQEGSRSTLFAASDPQVPDYCEMLKSEDWPVCACISYDCNPMNASEESHNLETSQLVWEKTLEMIGLPPDAVDKFIEGESVQCRYGQQKAE

SEQ ID NO: 187480 - protein, 773 aa, Oryza sativa
  Clone ID: PAT_MRT4530_84179C.1.pep
MAEERESFESQWVPSDVTEENLKEMVAHGVLPAKEIIGWRPACGEAFPTPDTHEVVVFSHFFYGRFSLPTSRFFRGILEFYGISLHHLNPNSIVHIANFIHACEAFLGIRPHFSLFRRIFFLKPQPNKSKPCVVGGAGFQLRGTLSQKYFSMPFKTSNKGWHANWFYVQNPEPALPEYSCLPPVYQDTWNSLPMGDEVAQALALIDRMLKLKEQGLQGEQITRHFIKSRLAPIKERSRTTFEFDGKHDPNREDLDSLEFKVMKERMYKIFSNAIVVSYSHLLPVVPYNAFNPPPREFALMKSDPPIAQHRSPRRQTSQASGVQKIRSDTQPNTSKSTNQSDSRKRKLVLSDDEGDDAGNKGVTEKQPRQANPKKKTSSRPIPKIRKSSRKPSDIDPSGKDPEPNGAETSPSTETRPTAEGRPSDNQPATDNVEASNEPPTGNQLAEAEANVEQEPPTRDQSGTEQNKDIPEVETQANSPPRKDAGVDPGSNSPVRIKGPAHPRPEIITASIILSATLLNKDALVMQRIHLRNEAKTAILEKLVPHLGTLEATRDQLREAKELARKTEHDLRDRIAELQDSNFELSGSSKVESNIVKAAKISKLERRIQALEKDKVELAKQRDSALKDVEDRKIKSQAQFDILVNKIKKLEGARDEVANAATPLVQAMFFNNNGPSSIDAVEIFDKLRTAPDTYFKNIKEAGSMGASLELAMTKSLYPKIDIDVVDGFADGTSEEAALDLISDAQKAADKIAADVVERLQDNDLKPTGSDNSND

SEQ ID NO: 187481 - protein, 503 aa, Oryza sativa
  unsure (1)..(503): unsure at all Xaa locations
  Clone ID: PAT_MRT4530_8417C.1.pep
MTASTRSRMLESTSSDAGTSAVLPAWGRAPPHPECRAPPHVMTARPPSNARINIERRRDERSAARMGEGASSSGVSRSSTRGGPPPAFTPGGTGCRAFVASLWNVRHVPRHDNAIADDLSRIALARAPXPPGAFEERLLQSSAQLDPLREPGATVLAPMPGEPQASGPEGVDPDPPRQVVWMTDIRAYLDDNTLPEDRAEAEKLVRISKQYVLVEGTLYRRATNGILLKCISREQGIELIADAHHFECRAHSASLTSVGKAFRQGFYWPTALQDAQEWVRRCKPFAVWGLDILGPFKAAHGGYQHLYVTIDKFTKWPEAYPVVKIDKHSALKFNRGITSRFGVPNRIITNNDTQFTNELFGDYCDDMGIKLCFALPTHPKSNGQVERANVEILKGLKTKTYNILKKHGDSWLEELPAVMWANRTTPSRATGEMPFFLVYGAEAVLPSELSLRSPRVALYNEANQDDLRRDDLNYLEGQRRCAALRVARYQQSLRPYHRHHVWT

SEQ ID NO: 187482 - protein, 104 aa, Oryza sativa
  unsure (1)..(104): unsure at all Xaa locations
  Clone ID: PAT_MRT4530_84180C.1.pep
FPSAPDKNGYGYLSADNFWIVRIQNMNTDMVLGFSSDTDNNSDIQKNCFRIRIRSYSIFIRFXDNPYLFSYLSYPYSFSYPVKKYENEYDMSIIRMYPLQFCIS

SEQ ID NO: 187483 - protein, 67 aa, Oryza sativa
  Clone ID: PAT_MRT4530_84181C.1.pep
MAELGLQGDRALGLSSNQIDEGVSIYGVVWEGWLNGRRDGRRTGLEDDMMARGARGRHDGAQGSRAT

SEQ ID NO: 187484 - protein, 97 aa, Oryza sativa
  Clone ID: PAT_MRT4530_84182C.1.pep
MEVESAVVGARGLRRQSIEVGGRGGGDSDGRSWMEAMRTRARGGGGGGRGGDRSSGLEAKAEVFFIGFTNGPVTIKFLAVTSCARGALSRVGFSLAR

SEQ ID NO: 187485 - protein, 60 aa, Oryza sativa
  Clone ID: PAT_MRT4530_84183C.1.pep
DTFVARVDSAHNKWAYDTTQYNNILKNLYEESATHAIKDLEDDVSNSPYSSPKETEPTND

SEQ ID NO: 187486 - protein, 425 aa, Oryza sativa
  Clone ID: PAT_MRT4530_84184C.1.pep
MSTPKKHVLFPFTSKGHIAGFLSLASRLHRILPHATITLVSTPRNVAALRAAAAAPFLDFHALRFDPAEHGLPPGGESQDEIFPPLLIPLYEAFETLQPAFDDFVASTAAAAARVVVISDVFVAWTVEVARRHGSQVPKYMLYQYGLPAAGAANDGSGGRADRRFLDRQLAHGNNTDAVLVNAVAEPEPAGLAMLRRTLRVLPVWPIGPLSRDRRDAATEPTDDTVLRWMDTQPPGSVLYISFGTNSMIRPEHMLELAAALESSGRCFLWKIKPPEGDVAGLNGGATTPSSYNRWLAEGFEERVTASKRGLLVRRHCGWSSVLESMAHGVPVIGWLLTAEQFHNVMVLEGLGVCVEVARGNTDETVVERRRVAEVVKMVMGETAKADDMRRRVQEVRTMMVDAWKEEGGSSFEASQAFLEAMKLK

SEQ ID NO: 187487 - protein, 84 aa, Oryza sativa
  Clone ID: PAT_MRT4530_84185C.1.pep
QETPGKPIWAVGGQGLRNHCEVPWDSSCGHSGGGERRVLPRMRVGQPILSTKNWHLGCSPGTTWPPALPCSDLVEASKSGPQMA

SEQ ID NO: 187488 - protein, 54 aa, Oryza sativa
  Clone ID: PAT_MRT4530_84186C.1.pep
LAEPICRKNIVHYGLAFIHVPHKSHAITFLRPSHGMNCRRVGARPCWCGTASTR

SEQ ID NO: 187489 - protein, 63 aa, Oryza sativa
  Clone ID: PAT_MRT4530_84187C.1.pep
QLMNHLNDVCARLLPHFKYSTNVTVGLPLACLASKKEPKVQAMVFGGIIACEAVHISMDSING

SEQ ID NO: 187490 - protein, 77 aa, Oryza sativa
  Clone ID: PAT_MRT4530_84188C.1.pep
MRNRSGGMRGGFLWTFGSGLGQNVFVFTTRQACVGKIEALGLLFLRELFDCKAAGLTAVCPPVGPPRCRRSDCRCAA

SEQ ID NO: 187491 - protein, 468 aa, Oryza sativa
  Clone ID: PAT_MRT4530_84189C.1.pep
MAPGSAKDRDGHTTERVLGRGDYEAAHHKPSAAAAANAPSRPPPPPRVAKSLPGKKTSTATQGGGHASSSPRRLGEKLARDHPGGGGRGAEGLASAAFPVVDRKGKRKVCAASEGAASSSSPPFERLSGEELGPGAGGRGTEASTSASAAAVVDQDEREVREWPRFALLSNSHLLEIGARCEGHKDLSADAQESTYTVVSSVVRNFSADFSWWSIMGNPMKQTIPNTCTILACAVCIEALHRLEWERLHGPGTFLCRAAAPRKLRRACIRDDILHPEEGVESKKMVLLLKKIKGMGGIRTTNAPPPAPFLLPLKSWRMYRQKGSLTRERAVHLLRTGGPYIGIIRVSLLYHFIDASVNDELVYRWVPPELRTAADVWLIDALVAGRATDNDICDLISETNGNHVIVCYGYRHRGGELQILIWDNHAQTGPSRWIGFEELEKVCVLRVDPLPLDLDQLNPLPVYPISGC

SEQ ID NO: 187492 - protein, 510 aa, Oryza sativa
  unsure (1)..(510): unsure at all Xaa locations
  Clone ID: PAT_MRT4530_8418C.1.pep
ADDDLGAYVRWPLNFRPNFDGLELRHVPRHDNAIADDLSRIALARAXTPPGAFEERLLQSSAQLDPLREPGATVLAPMPGEPQASGPEGVDPDPPRQVVWMTDIRAYLDDNTLPEDRAEAEKLVRISKQYVLVEGTLYRRATNGILLKCISREQGIELIADAHHFECRAHSASLTSVGKAFRQGFYWPTALQDAQEWVRRCKVCKFDAKQTHQPSQALQVIPLSXPFAVWGLDILGPFKAAHGGYQHLYVTIDKFTKWPEAYPVVKIDKHSALKFNRGITSRFGVPNRIITNNDTQFTNELFGDYCDDMGIKLCFALPTHPKSNGQVERANVEILKGLKTKTYNILKKHGDSWLEELPAVMWANRTTPSRATGEMPFFLVYGAEAVLPSELSLRSPRVALYNEANQDDLRRDDLNYLEGQRRCAALRVARYQQSLRPYHRHHVWTXSLQVGDLVLRRIQSRLGLSKLSPLWEGPYKVIGVPQPGSVQLATEDGTKLPNPWNIEHLRRFYS

SEQ ID NO: 187493 - protein, 43 aa, Oryza sativa
  Clone ID: PAT_MRT4530_84190C.1.pep
KGLWEKGYYGEQQQQPGMTRVRLTRARQYAAQILSMCRVKSKV

SEQ ID NO: 187494 - protein, 496 aa, Oryza sativa
  Clone ID: PAT_MRT4530_84191C.1.pep
MAPGSAKDRDGHTTEPVLGRGDYEAAHQKPSAAAAANAPSRPPPPPRVAKSLPREQPGGRGSGRGAEGSASASPVAVGDREGKKTSTATQGGGHASSSPRRLGEKLARDHPGGGGRGAEGLASAAFPVVDRKGKRKVCAASEGAASSSSPPFERLSGEELGAGAGGRGTEASTSASAAAVVDQDEREVREWPRFALLSNSHLLEIGARCEGHKDLSADAQESTYTVVSSVVRNFSADFSWWSIMGNPMKQTIPNTCTILACAVCIEALHRLEWERLHGPGTFLCRAAAPRKLRRACIRDDILHPEEGVESKKMVLLLKKIKGMGGIRTTNAPPPAPFLLPLKSWRMYRQKGSLTRERAVHLLRTGGPYIGIIRVSLLYHFIDASVNDELVYRWVPPELRTAADVWLIDALVAGRATDNDICDLISETNGNHVIVCYGYRHRGGELQILILDNHAQTGPSRWIGFEELEKVCVLRVDPLPLDLDQLNPLPVYPISGC

SEQ ID NO: 187495 - protein, 125 aa, Oryza sativa
  Clone ID: PAT_MRT4530_84192C.1.pep
MAAATGYGDAPTADDLAAYDQLLGLRHTRHMAEVFAVRLPHAAGLRRPPPCGTISFCGGNHCNDVIYSRSRTDDSTYPPPCDTHVKLPPCRQLATARCRRRRSDRLATAGLTAACRWSDCRYIAG

SEQ ID NO: 187496 - protein, 287 aa, Oryza sativa
  Clone ID: PAT_MRT4530_84193C.1.pep
MAAISSLPFAALRRAADCRPSTAAAAAGAGAGAVVLSVRPRRGSRSVVRCVATAGDVPPTVAETKMNFLKSYKRPILSIYSTVLQELLVQQHLMRYKTTYQYDAVFALGFVTVYDQLMEGYPSNEDRDAIFKAYITALNEDPEQYRADAQKMEEWARSQNGNSLVEFSSKDGEIEAILKDISERAQGKGSFSYSRFFAVGLFRLLELANATEPTILDKLCAALNINKRSVDRDLDVYRNILSKLVQAKELLKEYVEREKKKREERSETPKSNEAVTKFDGSLNSMRH

SEQ ID NO: 187497 - protein, 53 aa, Oryza sativa
  Clone ID: PAT_MRT4530_84194C.1.pep
SGIPSRFPDVLMTELAFIHLEFVPWKDYLSIPRRIRCLRCRCGEVLPAYIYDS

SEQ ID NO: 187498 - protein, 47 aa, Oryza sativa
  unsure (1)..(47): unsure at all Xaa locations
  Clone ID: PAT_MRT4530_84195C.1.pep
LLIVAPHYTVLKKPXREVCQYIAIKTNATAFVSRLAAKNSVLRSLTS

SEQ ID NO: 187499 - protein, 114 aa, Oryza sativa
  unsure (1)..(114): unsure at all Xaa locations
  Clone ID: PAT_MRT4530_84196C.1.pep
YVNALAMNAVPVTPSSMMPVTRASRCTSDPRHPDQIWTAGVWRRWLATVAADGGGWTGVSVEVAVXADGGGWXQWWLWQWRWLASVPNERWRRSTSHPPWGTVLEKPLRARILS

SEQ ID NO: 187500 - protein, 614 aa, Oryza sativa
  Clone ID: PAT_MRT4530_84197C.1.pep
MDQARISFFPDGLRVMIIDDDAKAVRRATATLSQLQYAVVATHSTASAGLRALSGDNVVEIQAILCDVHKVVSSGFDFRRVVESELRIPVIYLLSKMEEEDMVAGEDAEFLNHLLLTATYIVRKPLNPTVMARLWRVVAWRMYCLEERIQANVAANAGAGGEDDDDDDDVVIVEEPQVHFKVVRRTSGGSRKRQLTINVVDDGNRGSGSGGGGGGGADANPTRILQHITSNLQEFRTKHQKKDMAIERPLISSDSMFLKAILPTLKISPCNPLTLTGGIGSSSVAAEAFAGGSSSAAPLQIPVFQQQSTGNGNTVISFSNNASPMAMRAPTDNTMISFNNVSAAPVANAVISFSNISRSAAMQAPAARGQHLSGDVQQLDFPQQKLYFGPFSYQGPPPPSMHNHINLLPPTSSPVTCSMDKGKVPIIELPYGMPVDDFLVSQTTYGGAGPSIGATDAAAAAYPYTDAPSNNVATGCLMVPPMGPAFSITEPTVVAQGEGTGTGVDAGTSEKNAIVEAPNNPAPLMVLDQVAADAAMDVQEDIMFSLESLLGPDYDLLPMEDVSAPDTAAAGDAAGGSLDGEEGGMDIGWDLDLDDILVENVNDFAFLDNLAGSE

SEQ ID NO: 187501 - protein, 84 aa, Oryza sativa
  Clone ID: PAT_MRT4530_84198C.1.pep
MVVLEVVKGYYVGDEMELEMDVGRRSSSPLIGDKKEAYATDGIDCLPSAPPLCCRGGGRVPWGDPRGRRGRGMLPKGETDDALR

SEQ ID NO: 187502 - protein, 28 aa, Oryza sativa
  Clone ID: PAT_MRT4530_84199C.1.pep
LLTGGPTWPILLEDYHLIKKAAYFAPKR

SEQ ID NO: 187503 - protein, 96 aa, Oryza sativa
  Clone ID: PAT_MRT4530_8419C.1.pep
MILLSASPRATRPFRWRLATLRHSAPAIQNVAALEHPPKHDALTPDPVEGIGSCPGRGRTPNTRQNYHVQRQHIFDNPGIYHYLTPVSQSAVRNQR

SEQ ID NO: 187504 - protein, 233 aa, Oryza sativa
  Clone ID: PAT_MRT4530_841C.1.pep
MANKLQLAIAFVVVVVVLGAMAASAAAAVAPMLTMHNLCPYTVWPIVSPDSGSPPIADGIRLEGRGVGLRSLNLPAGFWSGRVVPRTWCRDGGRCDTGNAPPATVVRLSFNGAGGLAEYSVNLGEGFNVPTVVSPHAIGGGMCPALGCTADLNAGCAAGQRVYGGDTGGDVVACRGPASYFKQRCPLTRTGGGDVEPVPQHCISPGEIKLVFCQAAMVAGEPELIRTVDVADN

SEQ ID NO: 187505 - protein, 134 aa, Oryza sativa
  Clone ID: PAT_MRT4530_84200C.1.pep
MPHFPSGSRVKCTVLAVLCGKVGKQRAPPCPVPGSQQQRPSYPFPELISSGRLEVHTLINPTVDEFLEAQRALQPRFMYLRGQQLDNEEEIGTLVWRDADVSDPQILSSLIRPPFPTILGLEPGNNCINTLMEP

SEQ ID NO: 187506 - protein, 35 aa, Oryza sativa
  Clone ID: PAT_MRT4530_84201C.1.pep
MEKKHHRKFKHDDPIEARYLVPEFSCGLHLQGIDY

SEQ ID NO: 187507 - protein, 1003 aa, Oryza sativa
  Clone ID: PAT_MRT4530_84202C.1.pep
MRKLDCLDLGILRRSNELRQELAIVELEMIRSEQPKLCVWRSEWWELKWPPIFPVGGGNLDVDKLTWNWDTDTVIAFGNYLCFVDYCNGVLFCDAFDDNPKLLYLEFLCKIPGLDRFYHGRAWSDVNEELAPSFGFTKGEKDRGYHYDDTWIVAIDMSCKIVGVTFRYIEAVEKSTLEVTRCIEHKYWYFEPFLHVEFPAYFHLDDRLKGLGSGHLALAYHPGMLSWEIREPFNVFARSIYALNDLFNNSMQISLSTSNLSFYQMGCTKWTGEIGTISLIARFITLSVIFLLSIPLLVASVPQDILSPGSSIPVEDNSNMLVSPNGLFSCGFYEVGANAFIFAVWVNQSIGKTVVWTADRDVPVNGRGSRIELRDGNMVLLDFNSRLVWSTGTTSGQVRSAKLLDTGNLVLLGHDGSRIWQSFDSPTDTLLPTQPIAANLKLVSGKYMLSVDNNGSLALTYDTPEGHSKYWPRNINATPFSGDQPQGLDMLGCISAGNHIRYCASDLGYGVLRRLTLDHDGNLRLYSLLEADGHWKISWIALADSCQVHGVCGNNGFVFADVSDLSKGCKPTFNISCDKVAQAYFVEIEKMSVWGYNSNYTASTAFDVCRKSCLDDLHCEAFSYQYGLGGCTLKSSLYTGGFTPSEISITCMKLTADAAVQNSIDYKPHVEAILFPLAWCFLRKRKQDSISRNDGFALIRDHFRKFTLKELVAATAKFKHEIGRGGSGVVYEGILDDGKKIAVKKLQDMVQGELDFQSELSVIGRIYHMNLVRMWGFCSECGHKLLVFEYVENGSLAKLLFDTASTTGARLRWEQRLRVALGVARGLAYLHHECLEWVIHCDVKPENILLDEELEPRLADFGLAKLLNRGKDVQMLSRVQGTRGYIAPEWASNLPITGKVDVYSFGVVLLEIVRGLRVSDWTVVDGEEEEVEMVFRTTVAVLKERLRGEDRSWLPGFVDPRLDGNFCRLQAAAMVELAVACVEEERSRRPNMKLVVEKLLNFL

SEQ ID NO: 187508 - protein, 120 aa, Oryza sativa
  Clone ID: PAT_MRT4530_84203C.1.pep
MAAAAARVELDRQVDDNLEELKGCVDLGFEFRYDVIPELYELSKWSTSRGTSTASGAAAAKQRLTPLARGSRTRSHRGRLGMREQEDSRPSLVESQRMTPAARGCFIPNRMATGASARSR

SEQ ID NO: 187509 - protein, 60 aa, Oryza sativa
  Clone ID: PAT_MRT4530_84204C.1.pep
MTCHTVFIKGFLNNNQTAQLIHPKIKLINQAYNIANAAYTITIATDPVLPTLLPEEFGPV

SEQ ID NO: 187510 - protein, 674 aa, Oryza sativa
  Clone ID: PAT_MRT4530_84205C.1.pep
PRVRGRKPLPSHAPPTEAAAAAATAAASPAAATASPAADAMEAEAGGVAIVYDALPGLTLAFSPEEEEHLEGATADLGGASTSASAAVVEEVEDATAAYSVFRNEITAAGDALVDIPAADFFSLDVSAAVEDEPATPRALSPQPAPEATLSGSLAPAEQPAQGSERAWFRGGRRFRSPMLQLHKEILDFCDFISPSAEEQSSRTAAVKAVSNVEVFGSFRTGLFLPTSDIDLYDPLEHNIYFDSNAGIVILNILMDEIAIQEKKSKHRRKVVIFDSRVKTPQVGLYALAKALSQKGVAKKIQLSVVIVNQVDSSLLIFLVDHFFFLSWQVIAKARVPIVKFVERKSEIAFDISFDMDGGPQAADFIKDYVKKFPALRHLCMILKVFLHQRELNEVYTGGIGSYALLTMLITHLQLIWGGKDILGYRKKEHNLGILLIALFDFYGRKLNNWDVGISCNSARTFFLKTDKNFANPDRAYLLAIQDPMVPDNDIGKNSFNYFKVKSAFSKAYSVLTDANLITSLGPNRSILGTIVRPDSVLLDRKGWNKDATIPDMLTEPWEPLPRQFDSDNDAVYNWHVIDDEPLPRNTRSSSEDTRPSPTQKRKSSKPKQRSRKKAKADSSSGNNAENGFKRGKGLAQCDRSHQSAGSSRRSKGPREYDRFTNTLPQYTQHISRW

SEQ ID NO: 187511 - protein, 216 aa, Oryza sativa
  unsure (1)..(216): unsure at all Xaa locations
  Clone ID: PAT_MRT4530_84206C.1.pep
GVGGGGTYTANSTYDTNLQSLIAALQQNASTSPTLFAAGALGAAPDAVYGLILGGGDVSSSDCYDCGTRAGQDVAPACNRTRDAILVYNQCYTRFSAAGDFLASANNSGQAPLMNSDNVTXADVAGYDRAVTELLSATLMYAVVNTTRLFATGQRVGADPGFPNIYSAAQCTPDLSPALCRSCLXDLVARWGKTFPRTTAGARIVGTRCSLRAEVS

SEQ ID NO: 187512 - protein, 563 aa, Oryza sativa
  Clone ID: PAT_MRT4530_84207C.1.pep
MAPPPPPTRCLPVLLLLLLVVAPLLAHGRRPFISDGGNANANANASVLRLPSAAAAAGEDMGCEMSYGFLPCTTTAWGNLFLVLAYGFLMFKSATYLSSGSEMLLQILGPGIVGGLFLPILGALPDALLILVSGLSGTKEVAQSQVLIGMGLLAGSTICRTSFYLNKKSVFNLQQGHAGLMAGSGVSTDKQTSYAARIMAISILPFIIVQIPKIFKLHSGHQITVLIGLIVAALLLLSYCLYQVFQPWIQRRRLEYTRLKHVMSGLLRHAQKHSIGRLLDDEGRPNVSVIEKLFHRIDQDNDGKLERGELQAFIVGINFEDIDWNSNLAADQVMADFDTSRNHFIEKGEFVNGMLRWLDEAKRTVTSGAYSKKFLNDFHARTRDEQTGLLDKDEEEGEADGNPTWTCIKAILLLLLGTAMAAASADPLVDAVHNFSNATHIPSFFISFIVMPLATNSSEAVSAIIFASRKKKRTLSLTFSEVYGGVTMNNTLCLAVFLALVYVRGLTWDFSSEVLIILLVCIIMGLFTSFRTDFPLWTCFVAFLLYPLSLIMVYILDYKFGWS

SEQ ID NO: 187513 - protein, 84 aa, Oryza sativa
  Clone ID: PAT_MRT4530_84208C.1.pep
NKGTPFFSAPRGPQEQFPNPNPVKSPHLLSLKNEGSPLGWIIREANPRQETNPPRETPPGQGAASTPPPGKGGPPQKDCPRGGE

SEQ ID NO: 187514 - protein, 73 aa, Oryza sativa
  Clone ID: PAT_MRT4530_84209C.1.pep
MNLTMGHKVVYTTNKLYEFIRGRAGAGAGAGVRTAGGGVAAWRPASEEGCTAGGSLWLYRREGGRREAAAMDM

SEQ ID NO: 187515 - protein, 46 aa, Oryza sativa
  unsure (1)..(46): unsure at all Xaa locations
  Clone ID: PAT_MRT4530_8420C.1.pep
CRRLVMKSIXPXXMAGLLGIYDXXIXVIIXTXINPKXKXYXLFNGY

SEQ ID NO: 187516 - protein, 51 aa, Oryza sativa
  Clone ID: PAT_MRT4530_84210C.1.pep
LAMIICLTYLTCGLISYCCSLMCMCPYLNDDYVEPLAWHYDYRDIGLCMRC

SEQ ID NO: 187517 - protein, 960 aa, Oryza sativa
  Clone ID: PAT_MRT4530_84211C.1.pep
MEGSPSKSRGVTGPAHTDDGDWFSDVPDDIILNIMSFLTTRQAVQTCVLSRRWRNLWRSVPCINSDIDEFTRDSDSEGYYDEKTELAFIMFMERVMELRDPAALISTFQFRCKFELDEGFDDISDPEDINAWISHAVQKQARVLDIVVLCDKLYLDHSEFASRYLTRIEFTSVVLMEGFFKQLEMGCPAWESLFLDECAVNDVEISSQTLKVLTIKNTLFSSDKTTISTPSVTYLKLWRPVDSCVFNDMPLLVTSLLVLYHVQDSGDFFQNLRSLSAAKSLEFNYIGKELTMENNLQLYPKFNNLVRLTLGQWCLDANFYGLMVFLQTSPKLEKLTLKIEKEKTQRIIGKIEDRSFTCEHLTRVEIVCSEDDPLVKDVVTFFVNSGLTSAQVVGVVRARVAKAGGAWWGHTHLLEDDAAVVRAGDDGVFVRGSVHEGVTAVAPVVGGRRRGTGGGRGGGGGKGRGRSHRKRICLITFCSLSDLPRNHRKKGFLFGLLFTSGDQRLSFSRAARLQQQQEEEERCGGGSSHALHLFDETPARAVSSFYARDLFDETPLRACSAAMEGSPSKRRGVTAPAHTDDGDWFSDVPDDVILNIMSFLTTRQAVQTCVLSRRWLNLWRSVPCINADVGEFQRSDTEWEEYDQERESAFKMFMDRVLELRNPAAPIRTFRFRCCRLDGFEGTSDEADMNRWITHAMQKQPWVLDILVLYDALKLDHSAFTCRYLTRIKFINVLMMPGFFQQLEMGCPVLENLFLDESIVADVEISSRTLKVLTIKSTQFSYKFRTTISTPSVTYLKLWRPVNGIYVFNDMPLLVTSILVLYDVQDSSDFCQNLRSLSAAKRLEFDYFGRKLTMENNLQLYPKFNNLVSLTLGQWCLDANFYGLVVFLQNAPKLEKLTLELEKNTPERIIGKLEDRSFTCEHLTRVEVVCSEGDPLVKDVVNFFVNSGLTSAQVQIIRWC

SEQ ID NO: 187518 - protein, 58 aa, Oryza sativa
  Clone ID: PAT_MRT4530_84212C.1.pep
PVGGGCVRWSSPIHFWFLFASSGRVDLVLIIFVFMIHREMDLFLSILMYAVAGLYQSK

SEQ ID NO: 187519 - protein, 95 aa, Oryza sativa
  Clone ID: PAT_MRT4530_84213C.1.pep
MSVETAALQLSGEKARALTSIRRYSNAPILAAQRLDTDKIHLPHLTIQVHPLDRDADAVGEEKRGKRRRVVTDLKMIDGSLDPSPWRQNRTAKDF

SEQ ID NO: 187520 - protein, 131 aa, Oryza sativa
  unsure (1)..(131): unsure at all Xaa locations
  Clone ID: PAT_MRT4530_84214C.1.pep
NSLDSGEIPMLSMDTTIAHIMNQQXYIKIKSFKCWNPIQPPSTLLTSNGRQIYIRALFLAHEYLVECSWSPLSNRSSLISIFLLXSCNXQKQDVVSPILGQWAXNFVWDPSPSGAHVRYAPTRWSTNLGTP

SEQ ID NO: 187521 - protein, 123 aa, Oryza sativa
  Clone ID: PAT_MRT4530_84215C.1.pep
SNVNFTKTRPQLNQAQLGETFKGGSNKTNLNGKAGLITGLKNPSPSNAGIPFPLLFQALGTKPSRVHVYRSLASTVTKTQNPRVEFYRLFGVAKTFSAGMPNPWENFPEGALAPNLAMPITLP

SEQ ID NO: 187522 - protein, 126 aa, Oryza sativa
  unsure (1)..(126): unsure at all Xaa locations
  Clone ID: PAT_MRT4530_84216C.1.pep
MVGYTQHVSLGLGAIIAIFARGTTASTTIQHGPPTLAMGTMXPGMQHMMQTMGMGSSTDMFMEKTKELLRTPTXMQLQSMKPQGHCGTRCYMMHSLQHVIRARLGQQQTMNMGTQMQYMRNMDSVN

SEQ ID NO: 187523 - protein, 123 aa, Oryza sativa
  unsure (1)..(123): unsure at all Xaa locations
  Clone ID: PAT_MRT4530_84217C.1.pep
CKYTFNARPGFLLFSYLFTCQIIFHRKWQLIKAIDTARKNCLWRGNNPSSTRKSLASWDRMCTPKEKGXLGVINFRVQNIALLLKHMVKFYNGADLPRVNLISQTYYASRIPHLVLNKGFPPK

SEQ ID NO: 187524 - protein, 65 aa, Oryza sativa
  unsure (1)..(65): unsure at all Xaa locations
  Clone ID: PAT_MRT4530_84218C.1.pep
KRXLRRMRLVGIPEFSAXGQTKRANXXKIFLLCPIXHKAYNNKXXSLQTGRKGDKSFPSSMAFPG

SEQ ID NO: 187525 - protein, 255 aa, Oryza sativa
  Clone ID: PAT_MRT4530_84219C.1.pep
MAAFASALRVLPSPPAAVPRRLRSREQRQGCRSRRYSKVVAYYALTTPPYKLDALEPYISKRTVELHWGKHQQDYVDSLNKQLATSMFYGYTLEELIKEAYNNGNPLPEYNNAAQVWNHHFFWESMQPEGGGSPGRGVLQQIEKDFGSFTNFREEFIRSALSLLGSGWVWLVLKRKERKFSVVHTQNAISPLALGDIPLINLDLWEHAYYLDYKDDRRMYVTNFIDHLVSWDTVTLRMMRAEAFVNLGEPNIPVA

SEQ ID NO: 187526 - protein, 70 aa, Oryza sativa
  Clone ID: PAT_MRT4530_8421C.1.pep
SPGGTRCSRWPSSSPPPPPRHPRRRSPATVPITMTTTTTTTATTTAATTPPCRSPPITATTIMAVKPPRR

SEQ ID NO: 187527 - protein, 1687 aa, Oryza sativa
  Clone ID: PAT_MRT4530_84220C.1.pep
MPRYKPEYLFGVDGFVQELRTMSFVIGFETAPFYAQIRHDRHEEKCRVKVTLNSNSEDIPSVMFEAGGRNYIHACQEVARIAIGELRDRYSDQLADTEYRYHPRQPQGSDRGSYLETEGIENDATTRHLVEMLWAMDESRAETVLAAQDREDRNRGKICKLEDKVDRLEKELAELKGEAPPQKARIRLTARKRALFVPRYQLAPKIRVVEKEVAPTLADPPVIIISDDEEEESKRNNSKIEWFSPVSLLVPCPCLMVNTRSNGNGPSNNNNGENPTLAQVLAQQTQLMNMMMQQLQNQGNNHASPQNKLAEFLRVRPPIFSSTTNPVEAGDWLHAIDKKLDLLQCTDQEKVSFASHQLHGPASEWWDHFRLNRTTAEPITWLEFTAAFRKTHIPSGVVSLKKKEFRSLTQGSRSVTEYLHEFNRLARYAPEDVRNDEERQEKFLEGLNDELSYPLMTGDYADFQKLVDKAIRQEDKYNRMEQKKRRIAQFKTQQGNNQRPRLTLGPQSMPQGGSSSVVRPQRQFFNNNAGNNIRNQAPRPVAAPTQQQPAKREQGSKSVVCFNCGDPGHYADKCPKPRRVKARVNHVAAAEAQDAPDVILGTFLVNSVHATVLFDSGATHSFLSMSFAGNHGMEVEDLRRPLMVSTPSNQALSLQRSPSVRIEIQGIPFLANLILLESKDLDVILGMDWLARYKGVIDCANRKVTLTSNDGRVVTVHALSSETLRSRLNQITLEEIPVVREYSDVFPDDLPGMPPKRDIEFRIDLVPGTTPIHKRPYRMAANELAEVKRQVDDLLQKGYIRPSSSPWGAPVIFVEKKDHTQRMCVDYRALNDVTIKNKYPLPRIDDLFDQLKGATVFSKIDLRSGYHQLRIKEEDIPKTAFTTRYGLFDVFMEYLDKFVVVFIDDILIYSRTKEEHEEHLCLALEKLREHQLYAKFSKCEFWLSEVKFLGHVISAGGVAIDPSNVESVTNWKQPKTVSEIRSFLGLAGYYRRFIENFSKIAKPMTRLLRKDVKYKWSEECERSFQELKNRLISAPILILPDPKKGFQVYCDASKLGLGCVLMQNGKVVAYASRQLRPHEKNYPTHDIELAVVVHALKIWRHYLFGTRTEVYTDHKSLKYIFTQPDLNMRQRRWLELIKDYDMGIHYHPGKANVVADALSRKGYCNATEGRQLPLELCKEFERLNLGIVSRGCVAALEAKPTLIDQVREAQINDPDIQEIKKNMRRGKAIGFLEDEQGTVWLGERICVPDNKDLKDAILQEAHDTLYSIHPGSTKMYQDLKERFWWASMKREIAEYVVVCDVCQRVKAEHQKPAGLLQPLKIPEWKWEEIGMDFITGLPRTSSGHDSIWVIVDRLTKVAHFIPVKTTYSRSRLAELYMARIVCLHGVPKKIVSDRGSQFTSNFWKKLQEEMGSKLNFSTAYHPQTDGQTERVNQILEDMLRACALDFGGSWDKNLPYAEFSYNNSYQASLQMAPYEALYGRKCRTPLLWDQTGERQVFGTDILREAEEKVKIIQERLRVAQSRHKSYADNRCRDLSFEEGDYVYLRVTPLRGVHRFHTKGKLAPRFVGPYKIVSRRGEVAYQLELPQSLAGVHNVFHVSQLKKCLRVPTEEANLEQIEVQEDLTYVEKPIRILETNERRTRNRVIRFCKVQWSNHSEEESTWEREDELKSAHPHLFASSSESRGRDSV

SEQ ID NO: 187528 - protein, 205 aa, Oryza sativa
  Clone ID: PAT_MRT4530_84221C.1.pep
MAPRGHRCRVARGGPRAQPRSPRGGSGGHGLAGRQQPADRSGGGAAGPDGRQRRAAASHMGGGGGRRGGSPRGRDGEAKMGRRPTTRISGGASRVGVGDGAPATPESGGGAAEGQRDLGSKEEGLEEGEASRHGEERRPSMAFAAGLTGERGEMVTTAPGSSEVVAEDLLALAEPKEVTAHREEVGNSGRRCQSRGGDLGFTVGW

SEQ ID NO: 187529 - protein, 61 aa, Oryza sativa
  Clone ID: PAT_MRT4530_84222C.1.pep
KSLHKIGVWFKKTPDKSANSKINLWPRDNNGKNNEWLDKLFSRAPMTVELFIPGSIIFQNL

SEQ ID NO: 187530 - protein, 1411 aa, Oryza sativa
  Clone ID: PAT_MRT4530_84223C.1.pep
MVVQNGWAYATGVYTHMPRYKPEYLFGVEGFVQELRTMSFVVGFGTAPFYAQIPHDRHEEKCRVKVTLNSNSEDIPSVMFEAGGRNYIHSCQEVARIAIGELRDRYSDQLADTEYRYHPRQPQGSDRGSYLETEGIENDATTTHLVEMLWAMDESRAETVLAAQDREDWNRGKICKLEDKVDRLEKELAALKGEAPPQKVRIRLTARKRALFVPRYQLAPKVRVVEKEVAPADPPVVNMVNTRSNGNGPNPNNPNNNNNGENPTLAQVLAQQTQLMHMMMQQLQNQQNQGNNHAPPQNKLAEFLRVRPPIFSSTTNPVEAADWLHAIEKKLDLLQCTDQEKVSFASHQLHGPASEWWDHFRLNRTTAEPITWLEFTAAFRKTHIPSGVVSLKKKEFRSLTQGSRTVTEYLHEFNRLARYAPENVRNDEERQEKFLEGLNDELSYPLMTGDYSDFQKLVDKAIRQEDKYNRMEQKKRQIAQFKTQQGNNQRPRLTLGPQSMPHGGSSSVVRPQRQFFNNNVGNNIRNQVPRPVAAPTQQQPAKREQGSKPVVCFNCGDPGHYADKCPKPRRVKVVPVQSNSTAPASEARVNHVAAAEAQDAPDVILGTFLVNSVPATVLFDSGATHSFLSMSFAGNHGMEVEDLRRPLMVSTPSNQALSLQRSPSVRIEIKGVPFLANLILLESKDLDVILGMDWLARHKGMIDCANRKVTLSSNDGRVVTVHALSSESLRSRLTQVTLEEIPIVREYPDVFPDDLPGMPPKRDIEFRIDLVPGTTPIHNRPYRMAANELAEVKRQKDHTQRMCVDYRALNDVTIKNKYPLPRIDDLFDQLKDKFVVVFIDDILIYSRTKEEHEEHLRLALEKLREHQLHAKFSKYEFWLSEVKFLGHKDVKYKWSVECEQSFQELKSRLISAPILILPDPKKGFQVYCDASKLGLGCVLMQDGKVVAYASRQLRLHEKNYPTHDLELAAVVHALKIWHHYLFGTRTEVYTDHKSLKYIFTQPDLNMRQRRWLELIKDFDMGIHYHPGKANVVADALSRKSYCNATEGRQLPLELCKEFERLNLGIVRRGFVAALEAKSTLIDQVREAQINDPDIQEIKKNMRRGKAIGFLEDEQGTVWLGERICVPDNKDLKDAILKEAHDTLYSIHPGSTKMYQDRKERFWWASMKREIAEYVALCDVCQRVKAEHQKPAGLLQPLKIPEWKWEEIGMDFITGLPRTSSGHDSIWVIVDRLTKVAHFIPVKTTYSGSRLAELYMARITDGQTERVNQILEDMLRACALDFGGSWDKNLPYAEFSYNNSYQASLQMAPYEALYGVHNVFHVSQLKKCLRVPTEEANLEQIEVQEDLTYVEKPIRILETNERRTRNRVIRFCKVQWSNHSEEESTWEREDELKSAHPYLFASSSESRGRDSV

SEQ ID NO: 187531 - protein, 1474 aa, Oryza sativa
  unsure (1)..(1474): unsure at all Xaa locations
  Clone ID: PAT_MRT4530_84224C.1.pep
PGLEWYIPGLEIELCSRDGCSDWLGLYNRMPRYKPEYLFGVEGFVQELRTMSFAIGFGTAPFYAQIPHDHHEKKCRVKVTLNSNSEDIPSVMFEAGGRNCIHACQEAARIAIGELRDRYSDQLADTEYRYHPRQPQGSDRGSYLETEGIENDATTRHLVEMLWAMDESRAETVLAAQDREDRNRGKICKLEDKVDRLEKELAILKGEAPPQKARIRLTARKRALFVPRYQLAPKVRVVEKEVAPALADPPVIIISDDEEEESKHNHSKIEWVATQDDEDEPNEPSIDLRCSEELDGITTNPVEAGDWLHAIEKKLDLLQCTDQEKVSFASHQLHGPASEWWDHFRLNRTTAEPITWLEFTAAFRKTHIPSGVVSLKKKEFRSLTQGSRSVTEYLHEFNRLARYAPEDVRNDEERQEKFLEGLNDELSYPLMTGDYHDFQKLVDKAIRQEDKYNRMEQKKRRIAQFKTQQGNNQKSRLTLGPQSMPQGGSSSVVRPQRQFFNNNAGNNIRNQAPRPVTAPTQQQPAKREQGSKPVVCFNCGDPGHYADKCPKPRRMKVVPAQNNSTVPASKARVNHVAAAEAQDAPDVILDDLPGMPPKRDIEFRIDWVPGTTPIHKRPYRMAANELAEVKRQVDDLLQKGYIRPSSSPWGAPVIFVEKKDHTQRMCVDYRALNDVTIKNKYPLPRIDDLFDQLKGATVFSKIDLRSGYHQLRIKEEDIPKTAFTTRYGLFECTVMSFGLTNAPTFFMNLMNKVFMEYLDKFVVVFIDDILIYSRTREEHEEHLRLALEKLREHQLYTKFSKCEFWLSEVKFLGHVISAGGVAVDPSNVESVTNWKQPKTVSEIHSFLGLAGYYRRFIENFSKIAKPMTRLLQKDVKYKWSEECEQSFQELKNRLISAPILILPDPKKGFQVYCDASKLGLGCVLMQDGKVVAYASRQLRPHEKNYPTHDLELAAVVHALKIWRHYLFGTRTEVYTDHKSLKYIFTQPDLNMRQRRWSELIKDYDMGIHYHPGKANVVADALSRKGYCNATEGRQLPLELCKEFERLNLGIVSRGFVAALEAKPTLIDQVREAQINDPDIQEIKKNMRRGKAIGFLEDEHGTVWLGERICVPDNKDLKDAILKEAHDTLYSIHPGSTKMYQDLKERFWWASMKREIAEYVAVCDICQRVKAEHQKPAGLLQPLKIPEWKWEEIGMDFITGLPRTSSGHDSIWVIVDRLTKVAHFIPVKTTYSGSRLAELYMARIVCLHGVPKKIVSDRGSQFTSNFWKKLQEEMGSKLNFSTAYHPQTDGQTERVNQILEDMLRACALDFGGSWDKNLPYAEFSYNNSYQASLQMAPYEALYGRKCRTPLLWDQTGERQVFGTDILREAEEKVKIIQERLRVAQSRHKSYADNRRRDLSFEEGDYAYLRVTPLRGVHRFHTKGKLAPRFVGPYKIVSRRGEVAYQLELPQSLAGVHNVFHVSQLKKXFKGTYRRS

SEQ ID NO: 187532 - protein, 386 aa, Oryza sativa
  unsure (1)..(386): unsure at all Xaa locations
  Clone ID: PAT_MRT4530_84225C.1.pep
MADRDDEQFIISEITSGSKLWFYAHGGSLNPEDGSLIFGDEIHEAAHRLTDAVEASSQGMFRPDREKNELTLALQNPEHLGRTRGRGVVPWKIGVKEDIHTYKSRMRSKRDTESKIADLEYRXMHEEVARRVDERLASQRSQEPXPTFRLPRSAPQAIAAATPQQDRLAWIACKQCQLRKKPPAGPLMESRNEHHASCLFPSGTYPSRWRRAWPSHVGRFHLGTQGWKLSSWKPSPTLAPAPMAPQPPPPPHTAKSRSRQAPLARSRSPPPAPSKSRTTKKAKVEDSRCPDPVTQPYLCTQEEADKSVQEYVKSHFRKRSPEKKIPIDPAVKDFFLKMGQPVKEKVPVSDYDRALKKHSHHKKSKKVAQLGEQSQQEVEPLLSPRE

SEQ ID NO: 187533 - protein, 1708 aa, Oryza sativa
  Clone ID: PAT_MRT4530_84226C.1.pep
MPRYKPEYLFGVDGFVQELRTMSFVIGFETAPFYAQIRHDRHEEKCRVKVTLNSNSEDIPSVMFEAGGRNYIHACQEVARIAIGELRDRYSDQLADTEYRYHPRQPQGSDRGSYLETEGIENDATTRHLVEMLWAMDESRAETVLAAQDREDRNRGKICKLEDKVDRLEKELAELKGEAPPQKARIRLTARKRALFVPRYQLAPKIRVVEKEVAPTLADPPVIIISDDEEEESKRNNSKIEWFSPVSLLVPCPCLMVNTRSNGNGPSNNNNGENPTLAQVLAQQTQLMNMMMQQLQNQGNNHASPQNKLAEFLRVRPPIFSSTTNPVEAGDWLHAIDKKLDLLQCTDQEKVSFASHQLHGPASEWWDHFRLNRTTAEPITWLEFTAAFRKTHIPSGVVSLKKKEFRSLTQGSRSVTEYLHEFNRLARYAPEDVRNDEERQEKFLEGLNDELSYPLMTGDYADFQKLVDKAIRQEDKYNRMEQKKRRIAQFKTQQGNNQRPRLTLGPQSMPQGGSSSVVRPQRQFFNNNAGNNIRNQAPRPVAAPTQQQPAKREQGSKSVVCFNCGDPGHYADKCPKPRRVKARVNHVAAAEAQDAPDVILGTFLVNSVHATVLFDSGATHSFLSMSFAGNHGMEVEDLRRPLMVSTPSNQALSLQRSPSVRIEIQGIPFLANLILLESKDLDVILGMDWLARYKGVIDCANRKVTLTSNDGRVVTVHALSSETLRSRLNQITLEEIPVVREYSDVFPDDLPGMPPKRDIEFRIDLVPGTTPIHKRPYRMAANELAEVKRQVDDLLQKGYIRPSSSPWGAPVIFVEKKDHTQRMCVDYRALNDVTIKNKYPLPRIDDLFDQLKGATVFSKIDLRSGYHQLRIKEEDIPKTAFTTRYGLFECTVMSFGLTNAPAFFVNLMNKVFMEYLDKFVVVFIDDILIYSRTKEEHEEHLCLALEKLREHQLYAKFSKCEFWLSEVKFLGHVISAGGVAIDPSNVESVTNWKQPKTVSEIRSFLGLAGYYRRFIENFSKIAKPMTRLLRKDVKYKWSEECERSFQELKNRLISAPILILPDPKKGFQVYCDASKLGLGCVLMQNGKVVAYASRQLRPHEKNYPTHDIELAVVVHALKIWRHYLFGTRTEVYTDHKSLKYIFTQPDLNMRQRRWLELIKDYDMGIHYHPGKANVVADALSRKGYCNATEGRQLPLELCKEFERLNLGIVSRGFVAALEAKPTLIDQVREAQINDPDIQEIKKNMRRGKAIGFLEDEQGTVWLGERICVPDNKDLKDAILQEAHDTLYSIHPGSTKMYQDLKERFWWASMKREIAEYVVVCDVCQRVKAEHQKPAGLLQPLKIPEWKWEEIGMDFITGLPRTSSGHDSIWVIVDRLTKVAHFIPVKTTYSRSRLAELYMARIVCLHGVPKKIVSDRGSQFTSNFWKKLQEEMGSKLNFSTAYHPQTDGQTERVNQILEDMLRACALDFGGSWDKNLPYAEFSYNNSYQASLQMAPYEALYGRKCRTPLLWDQTGERQVFGTDILREAEEKVKIIQERLRVAQSRHKSYADNRCRDLSFEEGDYVYLRVTPLRGVHRFHTKGKLAPRFVGPYKIVSRRGEVAYQLELPQSLAGVHNVFHVSQLKKCLRVPTEEANLEQIEVQEDLTYVEKPIRILETNERRTRNRVIRFCKVQWSNHSEEESTWEREDELKSAHPHLFASSSESRGRDSV

SEQ ID NO: 187534 - protein, 48 aa, Oryza sativa
  Clone ID: PAT_MRT4530_84227C.1.pep
GRPLFFFLDIIPMPLLFQRYKCYKSQPRVVLIKHAYVAPKKHSEDLKP

SEQ ID NO: 187535 - protein, 85 aa, Oryza sativa
  Clone ID: PAT_MRT4530_84228C.1.pep
AHIKRKLTKEERLEMVKAGREDRGKYQARTAVKQKKTGGLSNRQKQHKKKMPLAASRAKAARSRQEKKKLQKRSGKQFRGRKAWK

SEQ ID NO: 187536 - protein, 103 aa, Oryza sativa
  Clone ID: PAT_MRT4530_84229C.1.pep
MALVLVSMASASSTREVVVVAGDDAHRLERRRGGGAGGEEPNSTPSPERRWDDGWRRTGRAAGRGKKRQRVIAGEEKKTLTLALEEEGRGGKAAHRREDGGRR

SEQ ID NO: 187537 - protein, 70 aa, Oryza sativa
  unsure (1)..(70): unsure at all Xaa locations
  Clone ID: PAT_MRT4530_8422C.1.pep
MATGRDEGGASERWWRWRPCGVCSPPKLMPACCCAPPLSSVELPMNIADPYIVPGFXQPAIASSYSDAAS

SEQ ID NO: 187538 - protein, 163 aa, Oryza sativa
  Clone ID: PAT_MRT4530_84230C.1.pep
MGKPWGVAVGASLWGRRRRQPPPWSATNCTATSTFSAAAIRLHRHLPSMVGTVLYPLHKDPTRCFLNQRRRRRCDRDGRGGHNRSCRHTTRVMAAATNPSPASAGSPARPPHRSTKKMVKPACALMAREAENDIHDPMKDQKRCFFLSLRDLLRESESADNVL

SEQ ID NO: 187539 - protein, 46 aa, Oryza sativa
  Clone ID: PAT_MRT4530_84231C.1.pep
FLEYILAGIIIHERSGGASPPVSATWKDVRHRHRTPASPTGQLPCP

SEQ ID NO: 187540 - protein, 78 aa, Oryza sativa
  unsure (1)..(78): unsure at all Xaa locations
  Clone ID: PAT_MRT4530_84232C.1.pep
KKRPGGPTRDNGAQGGEGGPHGXGGKKGAPPPGGPQGGGPGAFGEPKGPGGKGGGPPPGGGAPGRETPPGGGSKKGFP

SEQ ID NO: 187541 - protein, 132 aa, Oryza sativa
  Clone ID: PAT_MRT4530_84233C.1.pep
PPFFFLCVQDYIDITIHTLRTLKLYCKPVSDIMFHARITYTIVHPVCHLFLFHFNTYTSVFKCGTSIGYCRRGVGYRQATNLYAGLVIMSAGPAYRRCWKSSSAPCRMRIAGSYMTGLVAAPAGPACLSSWK

SEQ ID NO: 187542 - protein, 353 aa, Oryza sativa
  unsure (1)..(353): unsure at all Xaa locations
  Clone ID: PAT_MRT4530_84234C.1.pep
MAAARNPRNPRRRGAILAAVAPFLAFADYLRLRLVDRAWRLYCRRVGHAPPPFPWLMLPERESPPGAGAVARRVFYDVPGGRSYGYRVPSRDMHRCVATGHGWVVMVAVDAPRRVMLLNPITGDQRIVAWPFARWNARFHAVLTSSPAAGEAGCFLVVVADRLLAFCRPGADFQGWETLRAPGFRHHAALSDVVAVGATVAGTRGSRSRXLELRRHYLVESLGHVLLVLSDERHNRVALYKLNWDARAWLPIAACPGERVLLLGRGCSAAVPPSSAAGRAPGTVLFAHQPSTLPDVDVAARGQAWFWSESRVGAAPGDLLVLKKTVPHRHGEFPADGDSFWFFPAVDPDEDAR

SEQ ID NO: 187543 - protein, 55 aa, Oryza sativa
  unsure (1)..(55): unsure at all Xaa locations
  Clone ID: PAT_MRT4530_84235C.1.pep
HGXRHPWRKAAVEVELTERXGDANSGDESRRRKGGQGGVRPCEPNGGAGAVRQRV

SEQ ID NO: 187544 - protein, 1000 aa, Oryza sativa
  Clone ID: PAT_MRT4530_84236C.1.pep
MKAQDKNGGAAKPAGTTALAKKPVLSIPEKPSAAPSMAACDQDCSARRKTSKYFASKTEKEEDTSAGKGTGRGLPKRKLQKVSDELEDDMKPLPAKEVHKEEEDDDDDDFVAPSKRKTPVKPPPSKKLKGASTAEAHGKTGLDDDNEDKMDEDAKTPSKASGSGRGRGRGRGRGGRGAGAAHGKTIGLDDDGEEDKMDEDAKTPSKAAGRGRGGASGGRGRGGGGRGFMNFGERKDPPHKGEKEVPEGAPDCLTGLTFVISGTLDSLEREEATDLIKRYGGRVTGSISKKTNYLLADEDVGGVKSNKAKELGVPFLTEDGLFDMIRKSKPAKATVAKHQSDKNSEKQQKSPMKSSPVKVERRDGNQITTGKNISPKSNKGSASIDNQKVNIVDRGSLQWTEKYRPKVPNDIVGNQSMVKQLHDWLRSWEDQFLHSGQKGKGKKQADSGAKKAVLLSGPPGIGKTTTAKVVSQMLGLQAIEVNASDSRGKADSKIEKGVGGSTSNSIKELISNATLNYSNNRLKRPKAVLVMDEVDGMSAGDRGGVADLIASIKMSKIPIICICNDRYSQKLKSLVNYCLLLNFRKPTKQQMGKRLMEIAKKEGLQAQENAMEELAERVHGDIRMALNHLQYMSLSQSVVKYDDIRQRLNSSTKDEDISPFTAVDKLFGFNGGRLRMDERIDLSMSDPDLVPLIIQENYINYRPITVGKDDSGVKRMNFLARAAESIADADIVNVQIRRYRQWQLSQAACLSSSIVPGERNFNRFGGWLGKYSTTNKNIRLLEDAHSHILASQQANLDRESLRLDYLTLLLRQLTDPLKTMPKDEAVQKVVEFMDTYSLSQEDFDTIVELSKFKGHPNPMDGIQPAVKSALTKAYKQGSSSRVVRAADLVNIPGMKKPLKKRVAAILEPVGESLPEENGVASSEGDEEDSSDAENNDELVPGDTKPKLDLQSDKKKGIQVQLDLKSNGNGLNSKKMPAGRSKASGSAGKAAGGSGGKRKRK

SEQ ID NO: 187545 - protein, 192 aa, Oryza sativa
  unsure (1)..(192): unsure at all Xaa locations
  Clone ID: PAT_MRT4530_84237C.1.pep
WPWRGLLPSARQRGAQPGRWAAAGGGTCGTRRQRHRTWRRRRPSTPAQPTLTARGAPPPPPPQPPTPTPPQPPALSPHMPPGXSPPLPSHQPSAXPPALPPPQPPXGSLPSPLPQPPALPPPAPPTAPGGPSPPPWKSSATPSVASTTSPLPPSSASPCRARGVTPAAARRQLLMTQLRPPXPPPAPTPPRV

SEQ ID NO: 187546 - protein, 326 aa, Oryza sativa
  Clone ID: PAT_MRT4530_84238C.1.pep
MEYSYSYRFMLVCSVLVLCLNTRGARCQLSDDFYDYICPDVYTVVQQHVYAAMRTEMRMGASLLRLHFHDCFVNGCDGSILLDGDDGEKFALPNKNSVRGFEVIDAIKEDLENICPEVVSCADIVALAAGYGVLFSGGPYYDVLLGRRDGLVANQSGADNGLPSPFEPIKSIIQKFNDVGLDTTDVVVLSGGHTIGRARCTLFSNRLSTTSSSADPTLDATMAANLQSLCAGGDGNETTVLDITSAYVFDNRYYQNLLNQKGLLSSDQGLFSSDDGIANTKELVETYSADAHKFFWDFGRSMVKMGNISPLTGDDGQIRKNCRVVN

SEQ ID NO: 187547 - protein, 53 aa, Oryza sativa
  Clone ID: PAT_MRT4530_84239C.1.pep
AVRGHGDGHAAIVQLWLLTNFFPEVGEVSPIGTHATYIVIFGARAHSVLLFDL

SEQ ID NO: 187548 - protein, 123 aa, Oryza sativa
  unsure (1)..(123): unsure at all Xaa locations
  Clone ID: PAT_MRT4530_8423C.1.pep
LGDGIPLPQRDSFPSTSISCKSTRHKGRAGGGGRAAAVAGARXAGGGGGGGGKSARDPRKQWRYDXTRNIGGGAAAVAGARSRGWEGVAVVRRRSRRRERWRWPELGRKGRWGGSDRRRQCRV

SEQ ID NO: 187549 - protein, 95 aa, Oryza sativa
  unsure (1)..(95): unsure at all Xaa locations
  Clone ID: PAT_MRT4530_84240C.1.pep
QKLPLSSXQKVTNVLIXYKTMILVAVFLMATVIIYDRLSLQELQITPTKLDLDEEVWLSNSALFYLAATXNSXFXRGNQNKIAVRSVFHNNHKQL

SEQ ID NO: 187550 - protein, 125 aa, Oryza sativa
  unsure (1)..(125): unsure at all Xaa locations
  Clone ID: PAT_MRT4530_84241C.1.pep
PRPPSPARRGRWPPRATAAVPRPRCGHRPPLAXPPALCSARPPSPARRGPPSPXSPRPLAPARRGRGRRPLAPSLSAPPPATATRKPSPFLFPRPPPTTREAATLSAFHGRRGRVREMPRKPLLP

SEQ ID NO: 187551 - protein, 76 aa, Oryza sativa
  Clone ID: PAT_MRT4530_84242C.1.pep
NGPKGGFSPNGNKGSFFLKGRASLKQQGCSGPRLKAHQKNKLFLFQLCPNQVNVIFKKILTKWGGPNRSPMLVSPQ

SEQ ID NO: 187552 - protein, 384 aa, Oryza sativa
  Clone ID: PAT_MRT4530_84243C.1.pep
MLLLLPAAWPRGSMAAAMAFLAVVCAAAMAAVSGAEEVYEFGSGASFIFGDSLVDAGNNNYIPSLSKANMTPNGIDFAASGGMPTGRFTNGRTIADIIGEMLGQTDYSPPFLAPNTTGGALLNGVNYASGGAGILNGTGRIFVNRIGMDLQVDYFNITRKQLDDLLGKAKAKEFLKKKAIFSITVGSNDFLNNYLMPVLSAGTRVAESPDGFINDLIIHLREQLTRLYTLDARKFVVANVGPLGCIPYQKTINRVGENECVKLPNQLASQYNGRLRELLIQLNGDLAGAKFCLANVYDLVMDVITNYDSYGFETASMACCGNGGTYDGMVPCGPASSMCGDRKSHVFWDPYHPSEAANLVMAKYIVDGDSKYISPMNLRKLFSL

SEQ ID NO: 187553 - protein, 117 aa, Oryza sativa
  Clone ID: PAT_MRT4530_84244C.1.pep
NRQIDPQVIAIGDSKATTARPIGYSKVTASADVYAGVFHYQCLQYDYPQATGWPKSCDQTTTPLIFGQVSLAVRDGIDAGPCYDQDDAERVPELEHRLCCRSNLFGACKCEMHVSWT

SEQ ID NO: 187554 - protein, 85 aa, Oryza sativa
  Clone ID: PAT_MRT4530_84245C.1.pep
SQLYATLLQLHRQQCPARRLFQRCSLRHELLNSYEFVGWKRGERGRKKEEEGARPCTPAPKDKKCFAIKATKSNISKFIGVSKNR

SEQ ID NO: 187555 - protein, 41 aa, Oryza sativa
  Clone ID: PAT_MRT4530_84246C.1.pep
SSRLLVGLRGHSRFYSFLQLHRCQVRHLRHVSARHCLSHPL

SEQ ID NO: 187556 - protein, 132 aa, Oryza sativa
  unsure (1)..(132): unsure at all Xaa locations
  Clone ID: PAT_MRT4530_84247C.1.pep
NHKKCPTLCSKRTKVNHLXTKSXVYCFFRLHFSERPLKTQHDVFGYXRGEVGAGDDGGXGXDAVSQHXRRCKQPEATTXVRGEGESATTTERRRRGGDPEAAGRGEVGDARERGVRRGEVGDARERGEGSAA

SEQ ID NO: 187557 - protein, 53 aa, Oryza sativa
  Clone ID: PAT_MRT4530_84248C.1.pep
LIRWTNLMKCFLYDLIEISLAIRRGDYYVHAHFWSGGPLLWTHLPEILNVRTL

SEQ ID NO: 187558 - protein, 403 aa, Oryza sativa
  Clone ID: PAT_MRT4530_84249C.1.pep
MGVLSRPEEVLPLVKLRVAAGRIKRQIPPEEHWAFAYTMLQRVSRSFALVIQQLGPDLRNAVCIFYLVLRALDTVEDDTSIPAAVKVPILKEFHRHIYNRDWHYSCGTKDYKLLMDKFRLVSTAFLELGQGYQEAIEEITRLMGAGMAKFICKEVETVDDYNEYCHYVAGLVGYGLSRLFHAGGTEDLASDSLSNSMGLFLQKINIIRDYLEDINEIPKSRMFWPREIWSKYVNKLEDLKYEENSEKAVQCLNDMVTNALSHAEDCLQYMSALKDHAIFRFCAIPQIMAIGTCAICYNNVNVFRGVVKMRRGLTARVIDETNTMSDVYTAFYEFSSLIESKIDNNDPNASLTRKRVDAIKRTCKSSCSLKRRGYDLEKSKYNSMLIMVVLLLVAIVLGMIYAK

SEQ ID NO: 187559 - protein, 36 aa, Oryza sativa
  Clone ID: PAT_MRT4530_8424C.1.pep
SVHGNHLHDILNTYTYKDIQFNNLHGLAKSPLKIFR

SEQ ID NO: 187560 - protein, 145 aa, Oryza sativa
  Clone ID: PAT_MRT4530_84250C.1.pep
RDHHLTLIPDHVVHLPLHLRVGVRHQKQLHHRGPQTPRLCSPGASERTLSRNSPRRELGSPPADRSSRRPPRRTRWPRTRRAPAPPSRRTWPSSPSSSRRTPAAAPAGRRTTRSAPARGRRCRAPCAPRPCRPRRTTAPSGEGSS

SEQ ID NO: 187561 - protein, 210 aa, Oryza sativa
  Clone ID: PAT_MRT4530_84251C.1.pep
MKPQPPPIQGDGVAKKSRAAKASRREMLKVLYVLLALASTPFLYYIFFDLPPKFSLQINSAEGLDAVAAAAAAQPLSTIVNMTLHASNRRAPGRCYRHGEAVVRYAGFTVAAGRTRVFCVGARDALDVPVVAWADGVTLPNEVHDRMAAEQRACSVELEVDVKLFDRESEMPTWMWCKVTTQEAEPSDVTPCRVFATQNWASDIAPRWMQ

SEQ ID NO: 187562 - protein, 98 aa, Oryza sativa
  Clone ID: PAT_MRT4530_84252C.1.pep
LSRLRDRRRRRQMERNQHRDGDGDGEGRHHHVVQVPASAVEVAAMEETSSEAADHSLRQKAAAMVASSMETYRSKPMSFWLLLVLSAGAMLTGGSRRR

SEQ ID NO: 187563 - protein, 617 aa, Oryza sativa
  Clone ID: PAT_MRT4530_84253C.1.pep
MGGQGAGGGGGRRWTQRPCRTGGGGVVRRTVAALAKEQGATAAAAVPRRAEGTGLSLVGKQRCIRGVSNFRSNTGSTTENDYICSDSRVFNYRNSSGTSTRCSAGEQLKNGMGSCHSQPSVLAELMHLDTAKAETSFSSSRRSKFSYNWKSLHGSSTTSSYGSPCHPMFNLSKHSTNPKPPPPLKNSARMSNFSYQLVRSAESPKNAKYSLSEKMSHLLKPPNSSSHQNGNFTVGALKRRHNIAHFGGAINKLLKNEVHKKATPSEGRHWQTLLDNSLIRQNKLYCSEPRNEESTEQSWSSTDSESEKAVCFSSSGSIADLHASVSTDTSDSSDHSMSSSCLSVNDRWKMTFKKVHCALAANLDSMYVTNHKELEQPSPVSVLEIPDEDFSVTKSIKLDLHPESELVRCPSVESTAEVGEIGISDYALGVDGLDASLNGEAIQLVEDIFEEFGDEEEREFSYVLDILIVSGIHGTAEDQLYKVCQSLDCPAGYDVFEKLEKKYMKVAEWSRSDRKLIFDMVNTILSEILAPCLDMHPWVKSARKMAPVWGSEGLLEKILQMLVQRREELGLSKTKPEKKALDRKWPDLSDCIDRVGRDVENMIKDDLLEEMLLDLFS

SEQ ID NO: 187564 - protein, 116 aa, Oryza sativa
  Clone ID: PAT_MRT4530_84254C.1.pep
IFFFTGGRSVPSMTCSFGSCQSLLIQVYVFWALFPSRSLFTLLPGCFPLPKSSGGCLAHLWVPNFAPLSFTPFGSPLGCAPLDMLFCGWDFFRVSFTRVSSFVFSLPERPVTKKAT

SEQ ID NO: 187565 - protein, 70 aa, Oryza sativa
  unsure (1)..(70): unsure at all Xaa locations
  Clone ID: PAT_MRT4530_84255C.1.pep
WCGCSTPPPAPSAPPPPASSSPASPSSSPPPASPTPTSSPSAPRPPXTPCPRGLHPPQAQPRPGPGGSPS

SEQ ID NO: 187566 - protein, 215 aa, Oryza sativa
  unsure (1)..(215): unsure at all Xaa locations
  Clone ID: PAT_MRT4530_84256C.1.pep
MELSPPNHESWLATAGGGGGGGGDGAGGSSSAGASSSAGGGAATPQTPSRYEAQKRRDWNTFGQYLRNHRPPLGLAQCSGAHVLEFLRYLDQFGKTKVHTAACPFFGHPNPPAPCPCPLRQAWGSLDALVGRLRAAFEENGGXRPESNPFGARAVRLYLREVREHQARARGVSYEKKKRKKPPHPSSAAAAHDDAANGALHHHHHMPPPPPGAAA

SEQ ID NO: 187567 - protein, 83 aa, Oryza sativa
  unsure (1)..(83): unsure at all Xaa locations
  Clone ID: PAT_MRT4530_84257C.1.pep
VPPRRRLRAAAPPPQSRRATXATCAAIESERVADPSEGQDPKDFEQGKSSLFFEHVDPNCEIILFTNKIACNDKHPTCDYAMP

SEQ ID NO: 187568 - protein, 174 aa, Oryza sativa
  Clone ID: PAT_MRT4530_84258C.1.pep
RRLSASLLALPSCVPRAPTPTPATSTFVMMSTSQTTSTAAPATASTPSTPPTGAHWPSLRARARRPGGHGAATMRLGWRTRSTISPRRMPPAAAAAVAGRRRGTSGQSTPCSAATAVSPYSTAPSSPRGRLVTATAASQFDSARGCRQTVRRPHGAAAECRTSPADRPLPALQQ

SEQ ID NO: 187569 - protein, 177 aa, Oryza sativa
  Clone ID: PAT_MRT4530_84259C.1.pep
PGFPITPYAYIHKAPKFDPSEVKVIHLRATGGEVGASSALAPKIGPLGLSPKKVGEDIAKATGDWKGLRVTVKLTIQNRQAAVSVVPSASSLVIKALKEPPRDRKKEKNIKHTKSVPLDEIISIARTMRFKSMAKDLKGTVLEILGTAFSTGCKVDGRSPKDISDDIKAGEIEIPEE

SEQ ID NO: 187570 - protein, 87 aa, Oryza sativa
  Clone ID: PAT_MRT4530_8425C.1.pep
ILGLNNFPTGKGKVTLGESNVRPPKVFMSSVVPKMGYGDGFKWVSQNIKKIPCQKKLANFAQQFFSLPACSSGLFFTPTIFIRVWRV

SEQ ID NO: 187571 - protein, 1544 aa, Oryza sativa
  Clone ID: PAT_MRT4530_84260C.1.pep
MTGKKRCRAKPQKKDEDTTDKGKLDEGPLDATKEMNGVGKGDSRAACKRPRRAAACSDFKEKSVRLSDKSSVVATNGNKMEEEEMDAVKLTKLGPEVQRPCRKLIDFILHDADGKLQPFEMSEIDDFFITALIMPMDDDLEKDRQKGVRCEGFGRIEDWAISGYDEGTAVVWVSTEVADYECVKPAGNYKSYYDHFYEKAQVCVEVYRKLARSVGGNPNLGLEELLASVVRSINAIKGYSGTLSKDFVISNGEFVYNQLIGLDETANTDDEKFATLPVLLALRDGCKSRVEVSKLQPNISNGSLKINDAECKEVSEDDDEKLARLLQQEEEWKMMKQRGKRGTTSQKNVYIKISEAEIANDYPLPAYYKPSSQEMDEYIFDSEDSFYSDVPVRILNNWALYNADSRLIPLELIPMKAGAENDIVVFGSGFMREDDGSCCSTAESAKLSSSSSSNHQDAGVSIYLSPIKEWVIEFGGSMICITIRTDVAWYKLRQPTKQYAPWCEPVLKTARLSVSIITLLKEQSRASKLSFADVIKKVAEFDKGSPAFVSSNVALVERYIVVHGQIILQQFSDFPDETIRRSAFATGLLMKMEQRRHTKLVMKKKVQVMRGENLNPSATMGPASRRKVMRATTTRLINRIWSDYYTHHFPEDSKDADVNEAKEIDDELEENEDEDAEEEAQIEEENVSKTPPSTRSRKLVSQTCKEIRWEGEAIGKTPSGEALYKCAYVRELRINLGRTVALEDDSGELVMCFVEYMFQKLNGAKMVHGRLLQKGSETVLGNAANERDLFLTNECLEFELEDIKELMSVNLQSLPWGHKYRKENAEADRIERAKAEDRKKKGLPMEYLCKSLYWPEKGAFFSLPHDKLGLGNGFCSSCQQKEPDCDELQILSKNSFIYRNITYNVNDYLYIRPDFFSQEEDRATFKGGRNVGLKPYVVCHLLDVHEPAGSRKIHPASTKISVRRFYRPDDISSAKAYVSDIREIFLLTLALILFLDQVYYSENIVKVPVDMIEGKCEVKKKIDISNSDVPVMVEHEFFCEHFYDPATGALKQLPPNVKLMSVQQKATGALKKNKGKQICESDQVDSDKCTKVSKENRLATLDIFAGCGGLSEGLQQAGVSFTKWAIEYEEPAGEAFTKNHPEAAVFVDNCNVILKAIMDKCGDADDCISTSEAAEQAAKFSQDNIMNLPVPGEVEFINGGPPCQGFSGMNRFNQSPWSKVQCEMILAFLSFAEYFRPRFFLLENVRNFVSFNKGQTFRLTVASLLEMGYQVRFGILEAGTFGVAQSRKRAFIWAAAPGETLPDWPEPMHVFASPELKINLPDGKYYAAAKSTAGGAPFRAITVRDTIGDLPKVENGASKLLLEYGGEPISWFQKKIRGNTIALNDHISKEMNELNLIRCQRIPKRPGCDWHDLPDEKRNVNHYERVQVKLSSGQLVDLIPWCLPNTAKRHNQWKGLYGRLDWEGNFPTSVTDPQPMGKVGMCFHPDQDRIITVRECARSQGFPDNYQFAGNIQSKHRQIGNAVPPPLAFALGRKLKEAVDAKRQ

SEQ ID NO: 187572 - protein, 87 aa, Oryza sativa
  Clone ID: PAT_MRT4530_84261C.1.pep
ILAYHIRIIIKVLKRQYLYLFHFPQDRENMLCFKNIECILYTFSVYVILVYKVEGFVKKLSFLSTQGRKASSVIIGSSWVIIAEYRI

SEQ ID NO: 187573 - protein, 287 aa, Oryza sativa
  unsure (1)..(287): unsure at all Xaa locations
  Clone ID: PAT_MRT4530_84262C.1.pep
MDFLACVCLLHLLFLATSRVAAQASSPARALDAMLQDHAYRAFVHPHTGIVYNATVPANLTGVALSAVRLRSGSLRRKGFSDYFDFTVPTGIVVQPYVERVVLVYXHLGNWSDHYYPLPGXELVASGSPISINFSDVRSVPAGGPAPRCVWFDLDGVPQFRDLEASNVCSTYRRGHFSIVVNSSAIPPGPVPSGNITPPIPTPTGRSKGSSKGWKIAVGVVGGVIALVLLASLVVCLARYKRDKKLELMEQNAETGETLRMAQVGRSQAPVALGTRTQPVIESEYVA

SEQ ID NO: 187574 - protein, 65 aa, Oryza sativa
  Clone ID: PAT_MRT4530_84263C.1.pep
MRASNGHGVAFIGESHPWFGRARGLADPKWAPMLPSIQGPRLVLSVKSVPAGLILQPARKIINRN

SEQ ID NO: 187575 - protein, 104 aa, Oryza sativa
  Clone ID: PAT_MRT4530_84264C.1.pep
MDVSDLLRADEVTNEVQPASERNDDDSGNGGPASSAHASGVDSAVVLHLRGWGPQFKGGAELCSLGGIDSLKKWERTSDSHAPCNSGVCRLGDGAKPNLPVPAK

SEQ ID NO: 187576 - protein, 25 aa, Oryza sativa
  Clone ID: PAT_MRT4530_84265C.1.pep
KDSSSLIFRDLNRLYWIHPPYINKK

SEQ ID NO: 187577 - protein, 52 aa, Oryza sativa
  Clone ID: PAT_MRT4530_84266C.1.pep
MHTVKEMDMLAAKMDLLMKRLDECARDKAEMNALGIQGMTTRFCGQKTGDLA

SEQ ID NO: 187578 - protein, 77 aa, Oryza sativa
  Clone ID: PAT_MRT4530_84267C.1.pep
MALALVSPMAALSLHSGRISAAAIGGGLLSRRASPMGAAVTPFLQELLRLLPTSRYPPTTPPPCFLPRARLYQTFYH

SEQ ID NO: 187579 - protein, 453 aa, Oryza sativa
  Clone ID: PAT_MRT4530_84268C.1.pep
MMEEGLAVADLRELVHLPDVLVVCTSVGWTNEKHMLYLSLLEESFVSQLHDSKYSFKELFNHSPGACIHELSSKGHVKNVEAEQEHMDVDEVDRAESWIKIEHVRSPSENQDDVKVCFSDDNASSTRLIQECYARATSSGQSSTCHLGKNRHSPSRSADYECQKLVCFIYMSDMARFLQENYSCISVEGSDQNFIDEETKGSGEPNGRCSKKRLKSTANTMDDQVVPFVKAELQEAREKDADIHDNSMEADAKGSVDVGFVSGLFGGDGDHGGEGESLRFRSVGASTVKGQTRRERPRGARPHGLTKQKRQEIKEAFDLFDTDNSGTIDAKELNVAMRALGFEMTEEQINQMIADVDKDGSGSIDYEEFEHMMTAKIGERDSKEELTKAFSIIDQDKNGKISDVDIQRIAKELGENFTYQEIQEMVQEADRNGDGEIDFDEFIRMMRRTGYGY

SEQ ID NO: 187580 - protein, 84 aa, Oryza sativa
  Clone ID: PAT_MRT4530_84269C.1.pep
DITYLSSEESVIITRRMTGGWFKNPRPFNGPPTSYGSLRGQGILSLGFRLCYWPFLYADRDGCGLECPPQTAHPGGAWRPWMVQ

SEQ ID NO: 187581 - protein, 372 aa, Oryza sativa
  Clone ID: PAT_MRT4530_8426C.1.pep
MGRVPCCEKDNVKRGQWTPEEDNKLLSYITQYGTRNWRLIPKNAGLQRCGKSCRLRWTNYLRPDLKHGEFTDAEEQTIIKLHSVVGNRWSVIAAQLPGRTDNDVKNHWNTKLKKKLSGMGIDPVTHKSFSHLMAEIATTLAPPQVAHLAEAALGCFKDEMLHLLTKKRPSDFPSPAVHDGAGAGASASALAAPCFPAAPPHHPQADDTIERIKLGLSRAIMSDPSTASAAAAAAAPSAPAEDKPWPPGDMSEGLAGMYATYNPAAHAHAQAQAEFRYDGASAAQGYVLGGDGDQGTSMWSHQSLYSGSSGTEEARRELPEKGNDSVGSSGGDDDAADDGKDSGKGAASDMSGLFASDCVLWDLPDELTNHMV

SEQ ID NO: 187582 - protein, 255 aa, Oryza sativa
  Clone ID: PAT_MRT4530_84270C.1.pep
MASREHLLLDPAALAVSWADPAAVEIPPELLAALGEYLSARRSDGEAEADAEAEADDEFMMYEFKVRRCARARSHDWTACPYAHPGEAARRRDPRRVAYTGEPCPDFRRRPGAACPRGSTCPFAHGTFELWLHPSRYRTRPCRAGVACRRRVCFFAHTAGELRAGSKEDSPLSLSPKSTLASLWESPPVSPVEGRRWVDGIDECDADAEMEELMFAMRELGLRKVRPSASSVTPVLPPVTDEDGPDFGWVSELVM

SEQ ID NO: 187583 - protein, 70 aa, Oryza sativa
  unsure (1)..(70): unsure at all Xaa locations
  Clone ID: PAT_MRT4530_84271C.1.pep
SFXGRQEWGTATTIVRXNXEGGSXSXXXXXXSSPSLYTSPHPPPRLRYLRPNQRMGINIITADAGSTGNP

SEQ ID NO: 187584 - protein, 69 aa, Oryza sativa
  Clone ID: PAT_MRT4530_84272C.1.pep
KSGTMVCRAITHENSASILNNSTLAQYNYFKEQGLKNNPCKYVQLIGHIHFWNVNELNLFGKMNLSVTF

SEQ ID NO: 187585 - protein, 42 aa, Oryza sativa
  Clone ID: PAT_MRT4530_84273C.1.pep
LLSTCDPSAPARRIDPNTSAPRAIQSEERFSSSYYTPSITFI

SEQ ID NO: 187586 - protein, 107 aa, Oryza sativa
  Clone ID: PAT_MRT4530_84274C.1.pep
REKVPPPVVPVLVFYRKAPGWASLVGLCCSSGFHLGEPGNPGAFCFPPYLVAQGALPLKPPWGVFLGPRTICPVGGSPLVGFFFGGGPFLGHFCPLLCRGCPFLSPP

SEQ ID NO: 187587 - protein, 94 aa, Oryza sativa
  Clone ID: PAT_MRT4530_84275C.1.pep
RPLKPVRPPLKGKNPVPFGPPSGGGNNIWYHIFPHSLNLEPLLVEDTPRVKAKNPTAGKPLGGGRARGRGRGRGRGRLASLQFPILETFAPGQK

SEQ ID NO: 187588 - protein, 45 aa, Oryza sativa
  Clone ID: PAT_MRT4530_84276C.1.pep
KKALTMASFRQRAKRSVLPDNFSNQDSLLLLSIVQDGHFCYPLIY

SEQ ID NO: 187589 - protein, 962 aa, Oryza sativa
  Clone ID: PAT_MRT4530_84277C.1.pep
MAALRICTPGGGAPEARRGSLAAAGSAVQHGPDLIGFSSWVLPISAGYAVDRRHAAAGGVAACHGLSCADSGRRKNHPRASLVNGVVSSLEDSSGGEPALCVSDSPEDASSSGKVLSDLRRDMVDGISGIPRISAGKKKGMKFRRRGQGGNRLTRRSAPRRASGKSGQDQRILLSEDDIAAILSSVTHESSIEECNSVLICLEKHSDKTALGFFEWMKANGKLKGNAEAYHLALQAIAWKEDWEAAGQLLHEMVADSGCALDAQAFNGLIYVCAKRRLVDWGTKWLHMMLERDVQPNVSTVGMLMGLYQRIGNLPEAEFTFAKMRKCGIKCVNAYSAMVTLYTRLGHFAKSEEVITLMNNDEVVPNMENWLVRLNAYCQQGKMEEAELVLKSLVDEGIALNVVAYNTVITGYGKVSDMQKAMEVFDRLKSAGLAPDETTYRSMIEGFGRADKYKQAILYYRKLRNSGFKPNASNFYTMINLLARHDDSEGATEILEDMRAAGCQCSSIVTVLVRAYGSVGRMHKVLQILKACFYKKILFDATSCSILVTGFVQNSLVEEAMRVLREKKWKDSDFEDNLYHILICSCKEAGCCDDAVRIYNQMPKSATHPNLRIYCSMIDVFSIMERFTDAEALYLELKASSCVLDMIAYSVIVRMYTKAGRPEDACLVLEDMEKQKEIVPDKYLFLDMLRTYQKCGLLEKLSDTYYWILKSQVELDEAMYNCIINCCGRAIPVDELSRIFDEMIQQGHLANTVTLNVLLDIYGKAGLFNKAEKVFLMARKQGMADIISYNTIIAAHAKNGDFRSMIYFVQRMQEAGFPVSLEAYNCMLDAYGKAGQLEEFAAVLQKMERAGCEFDHYTYNIMINIYGRKGWIEGVANVLAELKSRGGEPDLYSYNTLIKAYGIAGMPEDAVKLMQEMRIKGIAADRVTYTNLIAALQRNENFLEAVKWSLWMKQTGVAATRT

SEQ ID NO: 187590 - protein, 152 aa, Oryza sativa
  unsure (1)..(152): unsure at all Xaa locations
  Clone ID: PAT_MRT4530_84278C.1.pep
MATDAYPVQLLHRQATAATGGGQWHNLGAAYAAVRFLRPQGRSLVLYSGPDGGAQQRIVFAYPILPGDAFERMDGETLSWEEPECGDEFALCFLDEAACAAVSGAISPVTESLAALXASRRGSPGCAWRGRRVPPPEWTSPAGLLRSAWAAH

SEQ ID NO: 187591 - protein, 205 aa, Oryza sativa
  Clone ID: PAT_MRT4530_84279C.1.pep
EQLAELSDRHTVTLLYISRRLEGSLETLVTSCRSIRDRFLDIHDKIPDELANTITPIAYLEQHRLKLEKAQKRIANRRERKDLEAIIQVSRTSINEEKAKLDQLEAGPDSTRVSIDRLNARKIELLAELEQCNAQIDLEEQKLADLPKAIEDQKSKLKASVNHLAELTKSLKVIPGSDAADAQIIDEVDQIRQRAISAIQKYLSG

SEQ ID NO: 187592 - protein, 339 aa, Oryza sativa
  Clone ID: PAT_MRT4530_8427C.1.pep
MRMADEVAFETARKIIMHPLYTPRSSPWLDLKVFYVRVSNCEVDESAPDRLTLNHIPLSPDTVIEVNGQRSSMHTEFISSSLRRDRVDKMTEEATFVSTDSIRMTGSVRFQVFDKNDLLLTGDLELCSANGVVGESKNSSKRWNMKCQPASSCNGFLKGKPSTASESVHPVIEVYLAGTFCGTPIILTKTVQHISRRKSQMKLKLDSIPENEATEQQKEELNEDSLQIQRIMITDMSTYCKVLISQIFDSLYPFLPYRSFQVSESQNPKSEQDVDVDYNSLYSRQDFIEGEDGELSWFNAGVRVGVGIGLGICVGVGLGVGLLVRTYQSTSRNFRRRLP

SEQ ID NO: 187593 - protein, 81 aa, Oryza sativa
  Clone ID: PAT_MRT4530_84280C.1.pep
SLFSPSHVPPPIPPSSLHPSLAKSAPPPSPSLLPSTTTTPPSPHPRPPPRFMSLSTPSAPICSSPSARPPPIPAAESPFVA

SEQ ID NO: 187594 - protein, 68 aa, Oryza sativa
  Clone ID: PAT_MRT4530_84281C.1.pep
VPTVPAMPCSGYYARRLYGFLHAKCGDSAKRNLLTSASVQRTLMNQVFGFVITGPPTIYQGVILKFQG

SEQ ID NO: 187595 - protein, 95 aa, Oryza sativa
  Clone ID: PAT_MRT4530_84282C.1.pep
MRRWGDIIIAEGVKADDHSRISRLAIASCLALASLSSAKRQEKISIVALFYAAYLALSGADHLRPPRWRRWQCRPLSGGGWGLGRGEEGLHIEGE

SEQ ID NO: 187596 - protein, 130 aa, Oryza sativa
  Clone ID: PAT_MRT4530_84283C.1.pep
ADGAAHASAHASASLPSSSSSAFAAAAAAADYSLPPPPQPRSSPTNQPQVTSPLDLPQYVFVDSFHFHPGSSVQSKRILSSLEFGWCLVVILPPLESSFIHTPLAVSAAAAAAQSVAKLLLSSYMRMQPS

SEQ ID NO: 187597 - protein, 490 aa, Oryza sativa
  Clone ID: PAT_MRT4530_84284C.1.pep
MARRQQAHFLIVTYPSQGHVTPARHLARRLVHGAGVRATVCVPVSAFRKMFPADDGEVVVEEEGGAVAYAAYSDGYDGGFDRAVDDHTRYMAQLSTVGARTVAGVLRRLRGEGRPVTCAVYTLLLPWVAGVARDHGVGAVAVFWIQPTTALAAYYHYFRGGRDAVVAAAASGDASAEVNLLPGLPPLRVRDIPSFLAITSDDDPFAFVLSEFAELIDTLERGGGGGGELPTYVLANTFDAMERDALASLRPHIDVVAVGPVLSFLHDADETKTASSPNDLFDHDGGGYLDWLGTKPARSVVYISFGSSSVMSKNQVAEIAAAMAESKKPFLWVIRKDNCKDDDDDNEAIKKLVAAAAAADTGGGGMAVEWCDQARVLSHASVGCFVTHCGWNSTVEAVACGVPVVAAPQYSDQGTSAWVVERIGVGVRAAARAGDGVVEAAELGRCVGAAMSEAVAGRAAAWREEARAAVARGGASERNLSEFVRRFVPK

SEQ ID NO: 187598 - protein, 46 aa, Oryza sativa
  Clone ID: PAT_MRT4530_84285C.1.pep
HNQGAKNLIAFFAVDYGQYACSMINKSPCNGRSPICFVFPSVSAML

SEQ ID NO: 187599 - protein, 62 aa, Oryza sativa
  Clone ID: PAT_MRT4530_84286C.1.pep
AALGITERLGGRCPRSCYGKGARCPVDEHGGAQEPPGRRRPAPCRCTAKPNSTVAGIRWRLS

SEQ ID NO: 187600 - protein, 59 aa, Oryza sativa
  Clone ID: PAT_MRT4530_84287C.1.pep
MQGIDKPKGGRGHHAPYLTTHLRVPIPVKDEVQGIIDRYREDLLARRQVQDVPSFYEVK

SEQ ID NO: 187601 - protein, 338 aa, Oryza sativa
  Clone ID: PAT_MRT4530_84288C.1.pep
MEGAAAAAAVIRHRTVEANGISIHVAEAGGEGGDGAAVLFLHGFPELWYSWRHQMEHLAGRGFRCLAPDLRGYGDTDAPPEIESYSAFHVVGDLVALLDALGLAKVFVVGHDWGAIIAWYMCLFRPDRVTALVNTSVAFMRHVFIRSGADAIKTTDHFHKAYGPTYYICRFQEPGVAEEEFAPAHARHIIRRTLCNRFTVHKAGKPESEESPPPPPLPLPAWLTEEDIDYFAAAFERTGFTGGINYYRNMDRNWEMAAPWADAKVQVPTKFIVGDGDLTYHYAGIQDYLHKGGLKAEVPLLEDVVVIPGAGHFIQQERAEEVSDLIYNFITKFIPQPN

SEQ ID NO: 187602 - protein, 1547 aa, Oryza sativa
  Clone ID: PAT_MRT4530_84289C.1.pep
MARSVASSSSISTMPSSSAAAAAAALEAVQVLVTSLADESPVARDAALAALREIAPMNPLLVLDCCATVSRGGRRRFGNIAGVFLVMASAVKALDRSDAEREFLRKLAKIATAEIVSSKILHFWPFRETKPITAVTELNVDWQRAAASLLVAIGSHDPDLMMEELFLYFAGPTSALPAMLQILADFASAEAFRCWCQAAWQYIGDAPSELPFDTDVMSFMNSVFELLLKVWTGSRDLKVRLSSVEALGEMVGLVTRSQLKSALPRIIPTMLDLCRKDQEIAFVASHSLHNLLNASLLSESGPPLLDFETYNEIQHCFLVISSAYPEDLCMFLLNLIVVMASHCYLSGHPAELAVEFLVRHSAITDDDLNDPNTLKNEYFQDKRFEMKISLSGLSELRAVCEKGLLLLAITIPEMELVLWPFILKLIIPKKYTGAVATICKCITELCRHKLSQTNPLYTEFNASNEIPNPEDLFARLLVLLHNPLARGQLATHILMVMCYLGQLFPRNLSLFLQDEVPKMKAYIGDPEDLKQDSTYQETWDDMIINFLAESLDVVNDSEWVISLGDAFARQYDLYATCDGHSALLHRCLGMLLQKVDDRIYVREKIDWMCAHSSMSIPINRLGLAQGIGLVAASHLDTVLEKLKNILENAGQSALQRFLSLFSLGAKVEDVDDTYAALALMYGYAAKYAPSTVIEARINALVGTNMLGRFLHVQHPTAKQAVITAIDLLGQAVITAAEMGISFPLKRRDQLLEYVLTLMGRDQNDDLVDFSTELLHTQSLALSACTTLVSIEPRLPMETRNRVMKATLGFFALPTEPSNIVESLITNLIILLGAILLTSGEDGRSRAEQLLHILRQLDPYVSSSAEHQRRRGCAAVNEVLVKFRNLCSGGFGVLGSYPTFTLNKQIDQAAPRSLSSLPSAFVLPTRDSLSLGERIMAYLPRCADTDAEVRKVAIQILALFFNIALSLPKKKASVNDIDLESSYSALSSLEDIVSIIRREASIDQAEVFHRVVSSLCVLLSKDEISCLAENTNHTVVFNEVLFVAGRDICTKDIARIRGGWAIQDVFHAFSQHKVLAILFLEYILSILHKEPVATNDSEKGEITSESSADDCILQATMFALNAFMRGGGKIGKQAVEQSYPSVLSALILKLGSLHGLAELGRNELLRSLLIAFQSFCDCVGDIEMGKVLPTCSILSKALNKNQRAEREAAAAALSEYIRHSEKEPILLDQMVLELCQHVSDDSPTVRSLCLRGLVQIPESCIPKYIQQVLGVILALLEDTKESVQLTAVQCLLTVLNVSEQDAIDPVLINLLVRLRNLQVSMNTKMRSNAFAVYGALSAYGVGSQQFLEQIHATLPRLILHLHDDDLSVRLACRNTFQLLAPLMEVDGLSSLLSKKYFTSDRRSDYEDFIRDLTRQLCRLSPARVDSYFESAIQAFDAPWPVIKANAVCLVSCMLSFLDDQRFLAPYFSQVFAILVGRLSQSPDAVVRAASSSALGLLIKRSNVVKTLTPKFDRADSSQNFQHGDTRTKTSSEPQQETIDMPNDTQREP

SEQ ID NO: 187603 - protein, 79 aa, Oryza sativa
  Clone ID: PAT_MRT4530_8428C.1.pep
QFPKNLRSIPPPRGNSDQQVLCPWELIKAHFFGIKITALDQWPSPLLSVEGSSLLPNATLSRKIRFTRWIIMHHNKIHF

SEQ ID NO: 187604 - protein, 108 aa, Oryza sativa
  Clone ID: PAT_MRT4530_84290C.1.pep
KKIRGLRTRLFPAFRHQSSHLRLRRSPSLPESPVLLPPSPRSGRILLPYACVVCVEFGCRVQVKTLCSFHLLLPLPTCSNRSKSCVVVLSRMALCYAMLRYATSCTSN

SEQ ID NO: 187605 - protein, 1579 aa, Oryza sativa
  Clone ID: PAT_MRT4530_84291C.1.pep
MARSVASSSSISTMPSSSAAAAAAALEAVQVLVTSLADESPVARDAALAALREIAPMNPLLVLDCCATVSRGGRRRFGNIAGVFLVMASAVKALDRSDAEREFLRKLAKIATAEIVSSKILHFWPFRETKPITAVTELNVDWQRAAASLLVAIGSHDPDLMMEELFLYFAGPTSALPAMLQILADFASAEAFRCWCQAAWQYIGDAPSELPFDTDVMSFMNSVFELLLKVWTGSRDLKVRLSSVEALGEMVGLVTRSQLKSALPRIIPTMLDLCRKDQEIAFVASHSLHNLLNASLLSESGPPLLDFETYNEIQHCFLVISSAYPEDLCMFLLNLIVVMASHCYLSGHPAELAVEFLVRHSAITDDDLNDPNTLKNEYFQDKRFEMKISLSGLSELRAVCEKGLLLLAITIPEMELVLWPFILKLIIPKKYTGAVATICKCITELCRHKLSQTNPLYTEFNASNEIPNPEDLFARLLVLLHNPLARGQLATHILMVMCYLGQLFPRNLSLFLQDEVPKMKAYIGDPEDLKQDSTYQETWDDMIINFLAESLDVVNDSEWVISLGDAFARQYDLYATCDGHSALLHRCLGMLLQKVDDRIYVREKIDWMCAHSSMSIPINRLGLAQGIGLVAASHLDTVLEKLKNILENAGQSALQRFLSLFSLGAKVEDVDDTYAALALMYGYAAKYAPSTVIEARINALVGTNMLGRFLHVQHPTAKQAVITAIDLLGQAVITAAEMGISFPLKRRDQLLEYVLTLMGRDQNDDLVDFSTELLHTQSLALSACTTLVSIEPRLPMETRNRVMKATLGFFALPTEPSNIVESLITNLIILLGAILLTSGEDGRSRAEQLLHILRQLDPYVSSSAEHQRRRGCAAVNEVLVKFRNLCSGGFGVLGSYPTFTLNKQIDQAAPRSLSSLPSAFVLPTRDSLSLGERIMAYLPRCADTDAEVRKVAIQILALFFNIALSLPKKKASVNDIDLESSYSALSSLEDIVSIIRREASIDQAEVFHRVVSSLCVLLSKDEISCLAENTNHTVVFNEVLFVAGRDICTKDIARIRGGWAIQDVFHAFSQHKVLAILFLEYILSILHKEPVATNDSEKGEITSESSADDCILQATMFALNAFLRGGGKIGKQAVEQSYPSVLSALILKLGSLHGLAELGRNELLRSLLIAFQSFCDCVGDIEMGKILARDGEQTEKEKWIDLVQEVACSSSVKRPKEVLPTCSILSKALNKNQRAEREAAAAALSEYIRHSEKEPILLDQMVLELCQHVSDDSPTVRSLCLRGLVQIPESCIPKYIQQVLGVILALLEDTKESVQLTAVQCLLTVLNVSEQDAIDPVLINLLVRLRNLQVSMNTKMRSNAFAVYGALSAYGVGSQQFLEQIHATLPRLILHLHDDDLSVRLACRNTFQLLAPLMEVDGLSSLLSKKYFTSDRRSDYEDFIRDLTRQLCRLSPARVDSYFESAIQAFDAPWPVIKANAVCLVSCMLSFLDDQRFLAPYFSQVFAILVGRLSQSPDAVVRAASSSALGLLIKRSNVVKTLTPKFDRADSSQNFQHGDTRTKTSSEPQQETIDMPNDTQREP

SEQ ID NO: 187606 - protein, 40 aa, Oryza sativa
  Clone ID: PAT_MRT4530_84292C.1.pep
LFERHTNPITRGHLNPWRGTRQHLETRGLLRILHPVDLIR

SEQ ID NO: 187607 - protein, 96 aa, Oryza sativa
  Clone ID: PAT_MRT4530_84293C.1.pep
MEEKALIQSTLKFEDFWKTSCYHLEEDVPKKKNDDKEIERYSDRKRKTHSKREALASYLILTPANFPVELVQGSKRGQPSSKKLRWDRSSGLFHKE

SEQ ID NO: 187608 - protein, 306 aa, Oryza sativa
  Clone ID: PAT_MRT4530_84294C.1.pep
MARGGGVAVAMAVAVAAVVLLLHPAASAAAAGPKKVATAARKEDIPYIRCQVCERIAREISAQVAKKQQALPATKKVPEIEIIEIAENVCNLKKQEADWMLKIDIVEKGDKLELVEQDEEGHCNAECKTIERACQEVMGYADTDVAEFVYKKKPSADQLVKFLCKDLSEACVVDPPPVPKDRVPGEPFAAKPSKDAEMDRILKSMEGIPGAPSMKMYSRDDLMKNNFGVDGDDDDDDEDEDDDFPKNLGKVFKDKGSPKKDLKQQVVKQIKDTGKKLKGHVNKVSKVVKKWWQGKKKPSKSSKTEL

SEQ ID NO: 187609 - protein, 177 aa, Oryza sativa
  Clone ID: PAT_MRT4530_84295C.1.pep
MGGTDEKGEGKMQIPEDRLTSAGIPLQGFGGQQVHALGKIALQVVFGKGDTVRKEEIVFDVVDMLYRYNAILGRSAMNIFEAIIHHNYIRMKLPGPRGVITIRGAQLAARKFELQGTTSVKGVHVVDQKHSEYLKMQKPVPEGKTKKVLLDENDLGKYILLGENLERQHGCICLVTR

SEQ ID NO: 187610 - protein, 213 aa, Oryza sativa
  Clone ID: PAT_MRT4530_84296C.1.pep
MAVMKSQLVLATLFLAGLVARGAEASIAGVVYCSLQCLTLPNLLPKATVRLQISSYEIPTAGNQGFIRRNSKGQFVVLLNVTSSEMMGSLMSGSGRVAVITPPPAASGGASLPAAAAAGGTTLVAPVVPHGARILGATAADNTLRQILDQLQSSSDLLPGLAQGLDYLLSNATMEVLRELADDIVPTGVSYGGDTVDAYVAFDVGPFSYSPNN

SEQ ID NO: 187611 - protein, 76 aa, Oryza sativa
  Clone ID: PAT_MRT4530_84297C.1.pep
EPSFCPGVPVQPFSVLSRPMSPLRLDLLVQVQLHSESILYQVSANEPSFSLFQLLWKFIQKIRSLVKKNPKIKKTK

SEQ ID NO: 187612 - protein, 109 aa, Oryza sativa
  Clone ID: PAT_MRT4530_84298C.1.pep
MVLCDDSEGGGSSVEPLMMLGPMVDLEGQLDREGHVAKASTKKVDGDHRPCQGRQQQMIEFIDKDLHQQHSGELLYIQLQASNFMRVEFVDEDYINGHGGQLRYMQMQI

SEQ ID NO: 187613 - protein, 104 aa, Oryza sativa
  unsure (1)..(104): unsure at all Xaa locations
  Clone ID: PAT_MRT4530_84299C.1.pep
IGRERHAIRVGREYIHVNYYTIGKRALINNGGFSVLYRYRKGSRALGRTSAPADSLPXSLVLNPKYPGARCAPVVVVDHPVKVFMYKLTGSKHVGMMDASASGF

SEQ ID NO: 187614 - protein, 103 aa, Oryza sativa
  unsure (1)..(103): unsure at all Xaa locations
  Clone ID: PAT_MRT4530_8429C.1.pep
WCPRGFKFGIRYQPPIVVPGGGLAKVQRTLCMISNSTSVVSVFSRMDTKLDLMFSKRALVPWYVGEGMEXGKFLKSRQGLTSLNKVXEKVGSEFYQWWLGSSG

SEQ ID NO: 187615 - protein, 79 aa, Oryza sativa
  Clone ID: PAT_MRT4530_842C.1.pep
NCSKLVHNNDITAYTYNYDLEILFRIQIKRGIRCPKVYFSCIGYNIYFIFWKKLIIYITRLMFIYLFKTKIIFICTINY

SEQ ID NO: 187616 - protein, 86 aa, Oryza sativa
  Clone ID: PAT_MRT4530_84300C.1.pep
MAVARRWQWWLKLDGGKLMPLVSLATSNDDVKLIGSACNESCHVWTKIETAWAIYTDQPNSQKPVALHGLVPRVNPVVGFRSGCVS

SEQ ID NO: 187617 - protein, 211 aa, Oryza sativa
  Clone ID: PAT_MRT4530_84301C.1.pep
MMLSSSASRREVGGGGAASSTKSGELSLSKVASVAIRESSGSGSGGISKSSELLSRAGTMAAAREAAAAAVHHEGWMVRYGRRKIGRSFFHTRYFVLDSRLLAYYKKKPKDNMVPLKSLLIDGNCRVEDRGLKTHHGQMVYVLCVYNKKEKEHQITMGAYDIEDALAWKKNIELIIDQQQENMTFKNRKAFASMDFDTELGGQFIFSDHDS

SEQ ID NO: 187618 - protein, 143 aa, Oryza sativa
  unsure (1)..(143): unsure at all Xaa locations
  Clone ID: PAT_MRT4530_84302C.1.pep
MRIAVVDLWSLMDEDRDYCVVVRMELLTVLEVGVATAALMFANRHGRLYXGQHPQLPRPRRAXHSRRRCQHHRGIHERAILQHPVGQGRVCPRWRGGARDRVPAHVPAHVARWPRXGESEERRRERGKGNWREEEEEEEEQKG

SEQ ID NO: 187619 - protein, 252 aa, Oryza sativa
  unsure (1)..(252): unsure at all Xaa locations
  Clone ID: PAT_MRT4530_84303C.1.pep
PRVRKSRNCWTVPDSKLFKVRSKNFPHDKSKIPAASYLMELAAIDWFKDSKRMDNVXRQKGCVAQVAAEKGMHTFVANIQIPGSTHYSLVMYFVTKSLKKGSLLQRFFDGDDEFRNSRLKLIPSVPKGSWIVRQSVGSXPCLLGKAVDCSYVRGAGYLEVDVDIGSSAVANGVLGLVFGVVTTLVVDMAFLIQANTYEELPEQVIGAARLAHVEPAAAIVPQDLTPPPPALADDDNAAASSSEDDHLSKKTN

SEQ ID NO: 187620 - protein, 685 aa, Oryza sativa
  Clone ID: PAT_MRT4530_84304C.1.pep
MAAAREAAAAAVHHEGWMVRYGRRKIGRSFFHTRYFVLDSRLLAYYKKKPKDNMVPLKSLLIDGNCRVEDRGLKTHHGQMVYVLCVYNKKEKEHQITRYISIYMTRFNSQMGAYDIEDALAWKKNIELIIDQQQENMTSKNRKAFASMDFDTELGGQFIFSDHDSAAEDEEERPMLIRRTTIGNGLRIFEELLEFDYLARSCSRAMRAVGVVEATCEAIFGLVMSMDVTRYEWDCSFRYGSLVEEVDGHTAILYHKLQLHWCPMLVWPRDLCYVRYWRRNDDGSYVVLFRSTEHPNCGRQKGYVRAFIESLREYFSQTDETHITPRIPVMENMVDTSAVQKDDKKSTEEVDSKTKTPDRGQADSKNMGIIDEETDEDEDYQVPEANIEEDPNKDAKRADEPPEKIDLSCFSGILRCDADEKSRNCWTVPDSKLFKVRSKNFPHDKSKIPAASYLMELAAIDWFKDSKRMDNVGRQKGCVAQVAAEKGMHTFVANIQIPGSTHYSLVMYFVTKSLKKGSLLQRFFDGDDEFRNSRLKLIPSVPKVGSPAVGLRWWGGVCPQGSWIVRQSVGSTPCLLGKAVDCSYVRGAGYLEVDVDIGSSAVANGVLGLVFGVVTTLVVDMAFLIQANTYEELPEQVIGAARLAHVEPAAAIVPQDLTPPPPALADDDNAAASSSEDDHLSKKTN

SEQ ID NO: 187621 - protein, 303 aa, Oryza sativa
  unsure (1)..(303): unsure at all Xaa locations
  Clone ID: PAT_MRT4530_84305C.1.pep
MLIRRTTIGNGPPEXIHDWTKEHDIGPPNQIDPIQVSSKKNWRLLRCQNGLRIFEELLEFDYLARSCSRAMRAVGVVEATCEAIFGLVMSMDVTRYEWDCSFRYGSLVEEVDGHTAILYHKLQLHWCPMLVWPRDLCYVRYWRRNDDGSYVVLFRSTEHPNCGRQKGYVRAFIESGGFKISPLKCRNGRPRTQVQHLMQIDLRGWLVNYSPSFQYHSLLQIQNCVAGLREYFSQTDETHITPRIPVMENMVDTSAVQKDDKKSTEEVDSKTKTPDRGHADSKNMGIIDEETDEDEDYQVPEAT

SEQ ID NO: 187622 - protein, 91 aa, Oryza sativa
  unsure (1)..(91): unsure at all Xaa locations
  Clone ID: PAT_MRT4530_84306C.1.pep
LATATVTVAAAAAATSPSGIGESNRSINSSHVWRRPRQSPRHHRRRRPXXXXXVGGGGGDGXXXGPXXXXXXGVQXXXXRTXTTSTTXXKX

SEQ ID NO: 187623 - protein, 533 aa, Oryza sativa
  Clone ID: PAT_MRT4530_84307C.1.pep
MAADTSKPFFPAAPNPALLPSGRKPSRLSPEASYWRSFRASELTPANEFNVTHLAFSPSSAPTLAASLSTSVLLFSGDPLSPLPRIPASQDVAFSPSFRSDGSLLAVGDKKGVVRVFRADKKQSSGALRTLTAHTAETRVVRYPVAGGDKVHLFTAGDDALLAYWDVPSETPVFAAPAAHRDYIRAGAASPADHNIFATGSYDRIVKLWDARMGKTSTLSFSHGELVESVLFLPSGGLLATAGGNVVRIWDVIGGGRLLHSVESHVKTVMALALAKMTNTGETRLLSAGSDGYVKSFDYGELKLTHSMRYPKELLSLACSPCGTVLVAGSSKGTIYMGRRKKKSTGEDEEEGKGVGGELDWAPTKPEKRRLAPSNYRYFLRGQNAKAKEGDLVIEKPKKVKVAEHDKLLRKFRHKDALVSALARNNPRSIVAVMEELVSRRKLVRCIENLDTEELVLLLLFLHRNATLPRYARFLMGVANKVLEMRADDIRSDENLRGCVRNLKRMAAEEIQIQHTLQGIQGMISPMLALASR

SEQ ID NO: 187624 - protein, 171 aa, Oryza sativa
  unsure (1)..(171): unsure at all Xaa locations
  Clone ID: PAT_MRT4530_84308C.1.pep
MHRETVEIKGRCRKTGLHRPRPRDRQLIQDRMMXLRQLVPNTSKCSIDSLLDKTIAHMQFLQCVSEKADKLEKIINSEGSTKRQPGSCPLKVEVLDQPGHLLLIEMVCEEYGVFLEIAHVMKDLEVTILKGLLESRSDKLWARFVIQASQGFDQMQILYPLMHLLQKQRWS

SEQ ID NO: 187625 - protein, 75 aa, Oryza sativa
  unsure (1)..(75): unsure at all Xaa locations
  Clone ID: PAT_MRT4530_84309C.1.pep
GTSNDGDAPFVAVYFYNINNNANQLEPRQKEFLLAGNNNRAQQQQVYGSSFEQHSGQNISSGFXGVEMLCESLGI

SEQ ID NO: 187626 - protein, 153 aa, Oryza sativa
  Clone ID: PAT_MRT4530_8430C.1.pep
MAVARAQPHREDAHVLLSPSVTAHSQRPEEKERQEQEGEERSKDAERDGRRERSSVQQAVRVERPLSVGGGMAIGEKGNDRREGARRWARCHRARPLWGGLGTSAPASPSGLLSSRRGEAKHQTHDNHGDLGPLPSMMDPRASQSWIPSRRVS

SEQ ID NO: 187627 - protein, 57 aa, Oryza sativa
  Clone ID: PAT_MRT4530_84310C.1.pep
LAVGVEGGLEGAALVWPRRAPPTKRLDGCIRGGHLNPLSPRRATEPNRGGKGKEGEK

SEQ ID NO: 187628 - protein, 50 aa, Oryza sativa
  unsure (1)..(50): unsure at all Xaa locations
  Clone ID: PAT_MRT4530_84311C.1.pep
VKRPXSYACITHGRSKGHMTRTYYNSQISANXKCKSXCATLANSSWIRTA

SEQ ID NO: 187629 - protein, 87 aa, Oryza sativa
  Clone ID: PAT_MRT4530_84312C.1.pep
ARASGDELRGGEAGPAESSSSAYVDPRRSGSDRACLTCRLRPATVVLLPCRHLSLCGDCFAAGDVDVAMACPVCHCVRTGGVEAILC

SEQ ID NO: 187630 - protein, 725 aa, Oryza sativa
  unsure (1)..(725): unsure at all Xaa locations
  Clone ID: PAT_MRT4530_84313C.1.pep
MPGIIVDGVVTEEAQNEVNSSQNKDNSSAPRSPVASKSMHSEALEMHVEGSGAGEPSIEQLYNNVCEMESSSEGGSPSRESFGSDGEESRIDSELRHLVAGEMEAMKVIEEEEGEGSGNAANAVTAAENGTPVKAMSSNSSKKSSKKAAKSQLESESSVGPNGKASTEEGEAEVSKPGSRVGRRRKASPNPHNGTEDAGLNNPDLGPFLLKHARDLLSSRMQIERKRKTRGEESAWRREEKPEPLSRRPPPRARARPASPARIELEGEIGGLEXKILVQFSRKMPGIIVDGVVTEEAQNEVNSSQNKDNSSAPRSPVASKSMHSEALEMHVEGSGAGEPSIEQLYNNVCEMESSSEGGSPSRESYGSDGEESRIDSELRHLVAGEMKGXHEAALEHLVKASMAMVANGQETEVASVDCSIGDIYLSLGRYDEAVFSYQKALTVFKTSKGENHATVASVFVRLADLYNKTGKLRESKSYCENALKIYQKPIPGTSLEEIATGLTDVSAIYETMNEHEQALKLLQKALKMYNNSAGQQSTIAGIEAQMGVLHYILGNYGEAYDSFKSAIAKLRTCGEKKTAFFGVALNQMGLACVQRYSINEAAELFEEARAVLEQEYGPYHPDTLGVYSNLAGTYDAMGRLDEAIEILEHVVGMREEKLGTANPDVDDEKRRLAELLKEAGRGRSRKAKSLENLLETNPYTVTKRVAKYDSLPLVPCSWLFTVLGK

SEQ ID NO: 187631 - protein, 116 aa, Oryza sativa
  unsure (1)..(116): unsure at all Xaa locations
  Clone ID: PAT_MRT4530_84314C.1.pep
NNNRRGKEERGGKGKKGGGQGKKRKGGAGQQRGGNXQEQSNKKGQITKKGGRNXPGGLGGRGNTKACGRRPGYGGGSGAHRAPGHKRRQFKQTRVSKQESALKKRGYAPPFQELKG

SEQ ID NO: 187632 - protein, 265 aa, Oryza sativa
  unsure (1)..(265): unsure at all Xaa locations
  Clone ID: PAT_MRT4530_84315C.1.pep
DAWGENHATVASVFVRLADLYNKTGKLRESKSYCENALKIYQKPIPGTSLEEIATGLTDVSAIYETMNEHEQALKLLQKALKMYNNSAGQQSTIAGIEAQMGVLHYILGNYGEAYDSFKSAIAKLRTCGEKKTXAFFGVALNQMGLACVQRYSINEAAELFEEARAVLEQEYGPYHPDTLGVYSNLAGTYDAMGRLDEAIEILEHVVGMREEKLGTANPDVDDEKRRLAELLKEAGRGRSRKAKSLENLLETNPYTVTKRGTVAA

SEQ ID NO: 187633 - protein, 258 aa, Oryza sativa
  Clone ID: PAT_MRT4530_84316C.1.pep
EAEVSKPGSRVGRRRKASPNPHNGTEDAGLNNPDLGPFLLKHARDLIASDNPRRALKYALRATKSFEKCAGGKPSLNLVMSLHVVAAIYCNLGKYDEAVPVLQRSLEIPVIEEGQEHALAKFSGCMQLGDTYGMLGQTALSLQWYAAGLEIQKQTLGEQDPRVGETCRYLAEAHVQALQLDEAQRLCQKALDIHRENGEPASLEETADRRLMGLICDTKGDHEAALEHLVMASMAMVANGQETEVASVDCSIGDIYLS

SEQ ID NO: 187634 - protein, 108 aa, Oryza sativa
  unsure (1)..(108): unsure at all Xaa locations
  Clone ID: PAT_MRT4530_84317C.1.pep
RATAPDPSSATAPPLALAGSGSQTTTAPPLPPLPDLAAGPPXCPRRLGDAPPLPPLPDLPAGPPPRLPSCPCRIRRPGRRRPSRPGAAAPPLATAQRKRGEIEKKWKR

SEQ ID NO: 187635 - protein, 158 aa, Oryza sativa
  Clone ID: PAT_MRT4530_84318C.1.pep
MNKKKRGRVGRGSAAGDILFLEIPGQGGGETLGLQGDLGAVLGGQIGLNRNGFRLSREHSMKQPPTAAASSGAQSLTPADSGQTAHLQHAGAQGGLRREASGGGRRRTSPHAMLGARWWQSWCRLLRTLSARSASARRSCSRARRPRSTAHPPAAAST

SEQ ID NO: 187636 - protein, 181 aa, Oryza sativa
  Clone ID: PAT_MRT4530_84319C.1.pep
MADIARREAEVDGAASSKIAAALGLFGVATVSLIINLAAACDPPPAYGGNTYYHLALVGSFLAGMGQVGAAIWVSDDPRGRRAAVGKKIMIASIAPLVVAVGLTGAALLWSNISGGGEGKGRGFAAAAAEGHGHGAGDFAFALPTHSNAVSFAVGVVVGFTLKRRLRRWAARLLKRIKDDD

SEQ ID NO: 187637 - protein, 126 aa, Oryza sativa
  Clone ID: PAT_MRT4530_8431C.1.pep
MSNTGDNINTGAKEKEAPVNTNGSNTASNSSGGPFSGYNVLLLLFVLRFLLVTATMSLRCLVYVDAYFILSILMLYTFSTVTRSTYIAKIKICQIMTKFPTASRVRTASSMVSCSTSEPGATLQVS

SEQ ID NO: 187638 - protein, 161 aa, Oryza sativa
  unsure (1)..(161): unsure at all Xaa locations
  Clone ID: PAT_MRT4530_84320C.1.pep
TGGATGSERPRRSTRRRRPVPARAAPSRRRPGRSRPPSTPCSPAAPSRTATAAAPAPAPPARRRCAGACPPPPGAXQREQRREDAEAXPPATRGRRGGRTRPAPRAARRRRRPPRGRPAPAPPSPRAATRWCRSRSPTTASRLPPPRTAAAAASPRRRPTP

SEQ ID NO: 187639 - protein, 234 aa, Oryza sativa
  unsure (1)..(234): unsure at all Xaa locations
  Clone ID: PAT_MRT4530_84321C.1.pep
FPAGFLGTPIAACSFAPGQRSTRRRHGPVRTTASSRTTRASARRRGSQRWGGGCGSRRRGRAGSVARVEGREQRAEERRERSAEERRALARLHLRGARHGLEAAPATASSPTTTKRGSTSTKTDEVRYPPPGXRSVSATQRLSKARLRRRPPGRSPPPPPGXVRLHRRLPTGRSPPPPPAADRARSASAACRWLLVQDHAQERAGGLRDKSDKWAQGVILFCFADWIATLASRV

SEQ ID NO: 187640 - protein, 95 aa, Oryza sativa
  unsure (1)..(95): unsure at all Xaa locations
  Clone ID: PAT_MRT4530_84322C.1.pep
YKYTDICQTCXELINGSHCCLLDLNYGLPYRARDTSLGLNTQDATPRSDVXNRKFFAEQHDRIDQGWKPNDHSHGKARESDTILNVHRTGPYYTE

SEQ ID NO: 187641 - protein, 64 aa, Oryza sativa
  Clone ID: PAT_MRT4530_84323C.1.pep
SNQAPNSTSVQECCCSFFYSIRTSPVIHIHELANLFKKAICGPWAVLYLKNPDDHPPHPGTVLD

SEQ ID NO: 187642 - protein, 34 aa, Oryza sativa
  Clone ID: PAT_MRT4530_84324C.1.pep
MVAARSLYRWRNDQERRWEQTLAWVKVDGEVTHS

SEQ ID NO: 187643 - protein, 42 aa, Oryza sativa
  Clone ID: PAT_MRT4530_84325C.1.pep
FELRDGGSDYLGKGVSKAVYNENSIIVPSLIVKFSTISCSSI

SEQ ID NO: 187644 - protein, 63 aa, Oryza sativa
  Clone ID: PAT_MRT4530_84326C.1.pep
IIGHTVHNQYYKIYHTDLEIKTTFGRCSPWKILATLYPGDNRLRLHYIYIGWGKKKNKGGNCP

SEQ ID NO: 187645 - protein, 64 aa, Oryza sativa
  Clone ID: PAT_MRT4530_84327C.1.pep
YTKYIFAQGKINYDNINTLIAIIKPVSQQSIMHKHAYQSQHAYRFIQELNLYNNHTHYKSESTK

SEQ ID NO: 187646 - protein, 143 aa, Oryza sativa
  Clone ID: PAT_MRT4530_84328C.1.pep
MGIRFVVMVNKQGQTRVAQYYEHLSVDERRALEGEIVRKCLARTDHQCSFVEHRNYKVVYRRYASLFFLVGVDNDENELAILEFIHLLVETMDRHFGNVCELDIMFHLEKVHFMLEEMVMNGCIVETSKQNILAPIHLMEKTS

SEQ ID NO: 187647 - protein, 68 aa, Oryza sativa
  Clone ID: PAT_MRT4530_84329C.1.pep
AASCSMRTSCDMRRKGGRCRDDSIYIRVLKFFCNVDLLASLPIDGPLPYLQLIRQKKKKRTSGPSRLT

SEQ ID NO: 187648 - protein, 377 aa, Oryza sativa
  unsure (1)..(377): unsure at all Xaa locations
  Clone ID: PAT_MRT4530_8432C.1.pep
MQIFVKTLTGKTITLEVESSDTIQNVKAKVQDKEGIPPDQQRLIFAGKQLEDGRTLADYNIQKESTLHLVLRLRGGLNVKVRTLTGKEIDIDIEMTDTVDRIKERVEEREGIPPVQQRLIYGGKQLADDKTAHDYKIEAGSVLHLVLALRGGMQIFVKTLNGRTITLVVDSCDSVENVKARIHDREGVPPHQQRLIFAGKQLEDGRTLADYNIQKESTLHLVLRLRRGMNDIKVKMLTGKEIDVDIEPTDTMGRIKERIDEREGRLVYGGKQLADDKTVHEYDIEAGSVLLHDRPCSQGXMQIVVETQMGKLITLEVESSDTIXKEKVQEKEGIPIPPDQQLLFFDHKLLENGCTVAGYNIQDGSTLSLYLRLLPGS

SEQ ID NO: 187649 - protein, 42 aa, Oryza sativa
  Clone ID: PAT_MRT4530_84330C.1.pep
MALIGIAGCSQPNASSFSTAATGCPACWLQQPAETISANMVV

SEQ ID NO: 187650 - protein, 418 aa, Oryza sativa
  Clone ID: PAT_MRT4530_84331C.1.pep
MASGGARRRKGRRGGRGNVKRRTKYLSLSRFLIKKEEEEEVVVVAVRSPELVPKDEAPSSPEDGGDGGEDEEEKPQMEPFALHPEPSTLFAAAPSLTDILGASAGGGGGAGGESSSAASPGVSGGKELSGEEDDLARRALRGRERWVYCSSSSPSATTTTTTTTSSSCSSAASTGASSGGAAARSLLLKLDYEEILAAWPGRGSLYIGGAAAATAGGTDNAAAELELDSVFVEVSASPEPAAAAAAWSVAEPAARAEKVRRYKEKRQGRLFAKRIRYEVRRLNAVKRPRLKLLLFPPLPRRLPPSHRRHRHLIAAAAPSPSRPASRRACVPSSPRAARHHCRAVVVAIPSPRARSIAASSRAAAAPRAVPSPRAVAMCRAALRPEPRRAVVISGRAPRAVTLPPCAVVPLPLPHRVAV

SEQ ID NO: 187651 - protein, 141 aa, Oryza sativa
  Clone ID: PAT_MRT4530_84332C.1.pep
MAKSELEVELGVNGLASCQVTDLFRLHLNWIPSTDNGTDATLEQRDHPHGRRKGSAFATTPAQNKRNPSRDDLRAAAAGRRAEAGNHLPSPPPRRRVEQKNGEETTPRLQACSVGPGRDMVYLEGRPRNGDTSRFNAGGSG

SEQ ID NO: 187652 - protein, 410 aa, Oryza sativa
  unsure (1)..(410): unsure at all Xaa locations
  Clone ID: PAT_MRT4530_84333C.1.pep
DSDTWSSSSHSPSLPGDPSSAARRRSPLPPSQPPPPPPPPPPASPPPAPPTPRAGTRARHPPPRPPPPPRRRPRSAAPRAPRPSTPAPRRTRPPSPPPPRAPPPPPPSSPPFPPTRPTXPAPAEPPPPHVGVPLPSANPTSPGHDFNLPSSIKRSPHLLLSFPLSPEPSRARKPPRHRRTPSPPLAGNLRPPATAALVVATPRSHRRXAPPHGATPRPPLRFPIPSPEPPPHRAPSXTTHRRAPAAPPRRSSHRRAMPPPPPASPRRAPPWPPLHFPPPPLEPPLHHHTRAASTPQPPAARRWHSEPRPAVPTPPPSPTPLPLPLPPLRWPPPGPARDAPSPPVAVRPPAPPEPPPVVTSPLTSSWPFAVSRSWTTRSRPSVLDVRHNSIKIHISVLIRLNLQKFITNSS

SEQ ID NO: 187653 - protein, 54 aa, Oryza sativa
  Clone ID: PAT_MRT4530_84334C.1.pep
LACYLSREECFVGNPESLVGNTVSKLRRVSVVTDKNMVMLPSMDEVQYKVASGI

SEQ ID NO: 187654 - protein, 196 aa, Oryza sativa
  unsure (1)..(196): unsure at all Xaa locations
  Clone ID: PAT_MRT4530_84335C.1.pep
FFFFFFFFFFFFFFFFFFFFFFFFFFFFXPXXXXFFWXXXXXWVXKXXXPXFEFXXFXXGXVXPXXFFXSXXXXKKFXXGSKTKXFKXXXXKKKXPPXXKLGPPXXXNXASXKKKPXXXXGXXGLXFGXPXXGXPXQKPLGRXPXXAQKIPKKQKGFXXGPLPXQNPXXXPPXXXXFXNLXXNLXGQKXVXPXXNF

SEQ ID NO: 187655 - protein, 73 aa, Oryza sativa
  Clone ID: PAT_MRT4530_84336C.1.pep
SGVATTAICLLSIMREGGSVAPEPAGGRSALPEHAGGGSNAEDGFGAPDPADGGSAVLEPACCHRVRVEALPK

SEQ ID NO: 187656 - protein, 478 aa, Oryza sativa
  Clone ID: PAT_MRT4530_84337C.1.pep
MASRAVEGEGEGEEEGEGKGNLEDESLIQMINIYGHNNWETVARAIPGRNAQQCRVREHASNHFKRLSELKLLEHFTGRTSAAIKEHWRGPMKRKLNSYLASGLLKKSPGLPENLSVSQSSDSNILQQCDVSSDENKLLSDLRPSLKSKEGVSSKCDGSSSDNQLLSDLRASLKSKGASSKCDGSSGDNQLLSDLRASLKSKGASSKCDGSSGDNQLLSDLRASLKSKGASSKCDGSSDENKLLSDLRACLKSKQGASSKCDGSSGENQLLSDLQASLMSKQRTSSKYKQGASSKYKQGASSKSKQGTSSKSKQGFIDLCENTDTSEGESSELICTERPDPDSGEASQRIRDRLNWRKRARKKLVFLSSPVELKVSAVAESERHLQESKEMSPEVNIVSPPAVLQGFSPEVPSVCEKIVEPPLADFNQAKNVCSLETSSDPCTLEQHLANVSDLLDMSYIDGLMIIPPSGCPYDGDFI

SEQ ID NO: 187657 - protein, 113 aa, Oryza sativa
  unsure (1)..(113): unsure at all Xaa locations
  Clone ID: PAT_MRT4530_84338C.1.pep
MDRRGEHAQTSELSAPVVRRTAASCRAPSSSETNACAGRSSSSFSPTPVWVMNVVPTAAVANTLGVIYERGLIGTYQDWXEAMSTYTRTYAVSIPAYTPVSCAALSVLRAGDR

SEQ ID NO: 187658 - protein, 650 aa, Oryza sativa
  Clone ID: PAT_MRT4530_8433C.1.pep
MPASAAAATRPAAEGVGGNDGATLAGRDHVVVFPLMSKGHMIPLLHFAAALAVHHGDHLRVTLVTTPANLAFARRRLPPSPSVRVVAIPFPAHPQIPPGVESTDALPSQSLFPAFLRATALLREPFAEFLASLPSPPPLVLVSDFFLGFTQRVADDAGVRRLTFNGMSPFSLALCFTLASRRPHVGVEGGAEFHVPGFPDDVRITADEVPDAVIQGGNPDDPVTQFLHDEVRDWDHRSWGVLVNSFAALDGDYAAILESFYHPGSRAWLVGPLFLAAGESPETKQEEDDDDDDDPEGCVAWLDERAARPGSVVYVSFGTQAHLPDAQLDELAHGLVDSGHAFLWAIGRSGGEWSPPVDAGGDGKIVRGWVPQRRVLSHPAVGAFVTHAGWNSVLESLAAGLPMLAWPVMAEQAANAKLVADIIGAGVRAVRGGGVVVGRAEVAGKVGRLMDGGEEGRAIRARAEEVREAARAAVGEGGASREALRRLVDELRSSYVVAGDGTAAASSANGGSGKVKKLSFGTLAHGRHGVVDSGHACLWAIGRSSGGDGKIVRGWVPQRAFVTHAGWNSVLESLAAVRPMLTWPVMAEQAANAKHVADILCAGVRVDRLLRGPNAAVVVGRVEEQNLGLSQAEEAQIKQGWSTLEPHRMA

SEQ ID NO: 187659 - protein, 44 aa, Oryza sativa
  unsure (1)..(44): unsure at all Xaa locations
  Clone ID: PAT_MRT4530_84340C.1.pep
FLXXVXYSXXVXXYWXXXWXXASAVXXDCPLXERLAXXXSFSXL

SEQ ID NO: 187660 - protein, 101 aa, Oryza sativa
  Clone ID: PAT_MRT4530_84341C.1.pep
MRYHFCRAINQDMATKYIVGSVTASFAFAYVCGVYFADKKVLGGTTPRTVADKEWGKVTEEKLDAWPRVAGKPVSMNPVTRQNYVLVKKKKASGSKKASEP

SEQ ID NO: 187661 - protein, 52 aa, Oryza sativa
  Clone ID: PAT_MRT4530_84342C.1.pep
MAKNYSTSVQLLVVLLVILVSVGGILGRSGPSTCANNPAFQQSCPPIPGRGH

SEQ ID NO: 187662 - protein, 70 aa, Oryza sativa
  Clone ID: PAT_MRT4530_84343C.1.pep
FLFFIFFLFFFFFFFFFLFLLSFYHWNQLYFVLGTHGNTWHCRAGRPGEPGPPMESQTKIRMEHGNSARR

SEQ ID NO: 187663 - protein, 166 aa, Oryza sativa
  unsure (1)..(166): unsure at all Xaa locations
  Clone ID: PAT_MRT4530_84344C.1.pep
LSPPRSFSWIWKSECVNKIRVFMWLLLCDRLNTGDMLDMRKCAKXNDDLTCALCGLGLRETREHLFFSCPFTEACWHKLGFHWNYSLELNQMLSLARSAFQRNGFXLEIISIACWHIWNQRNVLILRNIPPSVQSWLRSFKEDVLLHFCRMNGPLLNSVSSWLQTL

SEQ ID NO: 187664 - protein, 1075 aa, Oryza sativa
  Clone ID: PAT_MRT4530_84345C.1.pep
MELEEEKDPPKHQSKIKMNSAEIKKRKIRLGKDQGPEKKEMSGKNIKSIKETGTKGQSKELQKEESKSRKSTKDKSKKNKDLSQVSANAEEFHKEYTTKVIRKESRTDSSSIEQVIGSSSIQEMETNEQVKSKDTSKDMTQVPANAEGIHKEYTTKVNRQESRTGNKDNGQSGRSISLDTKKDVNLKYKDDGLILGKAKIFSKYHSEITYYIFNFYEAGRSISLDTGNKDNKDAERSIQHGNIQNMTQLVLTEHNANTLISGAQNFSYTSLMEQIISSQPSISEVQQEISTESNFVATPRAFQVEDEDLEDNELENWNLDMFNLSNGQNVQNSADNSTEIGNQATTNVDTVESNDLDANGEMLTEEDINNFLEQEQEEATKGNNAAIDAKYIPRVDMQFKSIKEAHDFFNFYALLAGFSVVIAHSYHSTSKKRNGEVIRVTFKCNRHGKAKSESQEEETEETVVAERNNNEIKATSCNCALVISKRNLIWRIIRVNLDHNHKMSPRDEVRFLKSHKNMTTEEKMMIRTLKECNIPTRHMIVILSTLRGGLTSLPYTKKDVSNVRTCINKETSSNDMMQVLQFFRKKKEKDPKFFYEFDLDENKKDGAMRSAIRQIFPNSTHRNCFFHIVRKAFNLSGTLFKSKEGLYDEYEDIMNNSVTEEEFEYLWNEMVDSYEVQHIYFLKHMWSIRKRFIPVYFKTNFCPFIKSTALSEGTNSRFKKDVGPQYSIISFLIEYVRVMDTIQNLEQLDDHNSRTKRPSKLWSHYYIEYQAVKLYNSKIFKKFQVELKRTTRLQLIEVEKLKTYEVFLALNQKIKVVRRRKYLVIVDSEKEEYTCICSKFEKDGLLCSHILKIMLHLNIMKIPKKYIIDRWRKKDYKEKYDFEDRIIPLSESSILRFNILSRKCAEIASQGSKSIDSFQFTVDQIDKLEKESISMNSEQRTKQQMEIDKIDTTNGEVIEETEENNEEILIDPDIAKSKGRPSQRYKSFREELQSKEVYHCSYCQRTDHTFPTCPLKHIEFDLPRKKIRKTKNTAQKNAEEEQTDGSKKTNKGKKQEATTQVLMEQKGTKKRKTDG

SEQ ID NO: 187665 - protein, 1005 aa, Oryza sativa
  Clone ID: PAT_MRT4530_84346C.1.pep
MELEEEKDPPKHQSKIKMNSAEIKKRKIGLGKDQGSEKKEMSGKNIKSIKETGTKGQSKELQKKESKSRKSTKDKSKKNKDMTQVPTNAEEFHKEYTTKVIRKESRTDSSSIEQVIGTSSIQEMETNEQVKSKDTSKDMTQVPANAEGIRKEYTTKVNRQESRTGNKDNGQSGRSISLNTKKDVNLKYKDDGLILGKAKIFSKYHSEITYYIFNFYEAGRSISLDTGNKDNKDAERSIHPGNIQNMTQLVLTEHNANTLILGISNELSQEEISINDNMKLNREKTNSSDEYNNCTLHDEWSLLGAQIFSYTSLMEQIISSQPSISEVQQEISTESNFVATPRAFQNSMILTTSRTEDIPFDMDYANTNQVEDEDLEDNELENWNLDMFNLSNGQNVQNSADNSTEIGNQATTNVDTVESNDSDANGEMLTEEDINNFLEQEQEEATKGNNAAIDAKYIPRVDMQFKSIKEAHDFFNFYALLAGFSVVIAHNYHSTSKKRNGEVIRVTFKCNRHGKAKSESQEEETEETVVAERNNNEIKATSCNCALVISKRNLIWRITRVNLDHNHKMSPRDKVRFLKSHKNMTTEEKMMIRTLKECNIPTRHMIVILSTLRGGLTSLPYTKKDVSNVRTCINKETSSNDMMQVLQFFRKKKEKDPKFFYEFDLDENKKVTNLFWTDGRSIDWNCFFHIVRKAFNLSGTLFKSKEGLYDEYEDIMNNSVTEEEFEYLWNEMVDSYEVQHINFLKHMWSIRKRFIPVYFKTNFCPFIKSTALSEGTNSRFKKDVGPQYSIISFLIEYVRVMDTIQNLEQLDDHNSRTKRPSKLWSHYYIEYQAVKLYNSKIFKKFQVELKRTTRLQLIEVEKLKTYKVFLALNQKIKVVRRRNYLVIVDSEKEEYTCICSKFEKDGLLCSHILKIMLHLNIMKIPKKYIIDRWRKKDYKEKYDFEDRIIPLSESSVLRFNILSRKCAEIASQGSKSIDSFQFAVDQIDKLEKELISMNSEQRTKQ

SEQ ID NO: 187666 - protein, 70 aa, Oryza sativa
  Clone ID: PAT_MRT4530_84347C.1.pep
MERGGPCDGLCRFRIHLGTRGDCPLPCEEWGTSTMIVEGHGKLGTEGDDFSLKRATSPYLARQLSRGDPL

SEQ ID NO: 187667 - protein, 96 aa, Oryza sativa
  Clone ID: PAT_MRT4530_84348C.1.pep
DDVDKTMDEINDNMENMRQIQDLLSAPIGAAADFDEDELEAELADLEGEELEAELLAPTTTAPTAPVRVQQPTRPSAQSSKTEDDELAALQAEMAM

SEQ ID NO: 187668 - protein, 43 aa, Oryza sativa
  Clone ID: PAT_MRT4530_84349C.1.pep
EMPSWRSLTGSSVVWGLYIYVSCEARRPWKPFDSVCVSRFSDT

SEQ ID NO: 187669 - protein, 73 aa, Oryza sativa
  Clone ID: PAT_MRT4530_8434C.1.pep
SLLHSGEVQTKLSYLMRFKIPDLSCLFRIKHVGSNRTRCRSSADRNRGACRVLRASAPHSPSRRPRQRRGKVG

SEQ ID NO: 187670 - protein, 110 aa, Oryza sativa
  unsure (1)..(110): unsure at all Xaa locations
  Clone ID: PAT_MRT4530_84350C.1.pep
ITFSFTRPFTTLISLQNPFFLPNLFVFPXTSPLFYPLTTNYPLIPSSXSSFQTISPNLPFSIITPPIISTLSPPLFSSHHSXSPFLFPPPYSPILFLSSLPFPSXSFFFS

SEQ ID NO: 187671 - protein, 125 aa, Oryza sativa
  Clone ID: PAT_MRT4530_84351C.1.pep
QVKRFLVLQGSRRDKFKRRILHPQATRQLRTREIQPGQSTSANVIGITINNSIYRALSSIESDCHPVGWWSNISWIGFGQVTGGNTCPACTTRTCTRVLYAWLCTWRPYMHQYTVYYKVSVNKDI

SEQ ID NO: 187672 - protein, 115 aa, Oryza sativa
  Clone ID: PAT_MRT4530_84352C.1.pep
MRKKSQMNACRSPPTSAAPTAWLSSTARRNITRHAPVRSRRGSCSCRREPSLPSPARPTARRRLICLRIRLLGASSLAASMNQSPSRAREQRLWHPTMKQKQERRWMLQGRWMKD

SEQ ID NO: 187673 - protein, 75 aa, Oryza sativa
  Clone ID: PAT_MRT4530_84353C.1.pep
SGVSVINCSKLHDVLSVSQWKIGMTWISGQNRAVHQEILKRDQPCSSQIQQMILILRRSDFLSTRSDSGMVAIGA

SEQ ID NO: 187674 - protein, 82 aa, Oryza sativa
  Clone ID: PAT_MRT4530_84354C.1.pep
MDCMVVKEETNVRAKRAERACLATLNVACRSLDRILTDGRDGGKATCGPLGSQAECSRYALSHQDDGRRSAQDRVPGAYKPQ

SEQ ID NO: 187675 - protein, 275 aa, Oryza sativa
  Clone ID: PAT_MRT4530_84355C.1.pep
MGSFASPLDAAPAPPTAKPSPPPAPAPANGLVTQEELKRVAAHRAVEMVEPGMTLGLGTGSTAAHALDRLGDLLRSGELAAVAGVPTSLKTEAHAARVGIPMLPLGEAGGIDLSIDGADEVDPELNLVKGRGGSLLREKMIEGSGGRFVVIVDESKLVPRLGCTGAVPVEVVPFGCDHTLGLVRKVFDGLPGFSARLRTVASKDGEGKEEMFVTDNGNYIVEMFFEDGIRGDLNEISDRLLRITGVVEHGMFLGMATSVVVAKKDGTVALLHKKK

SEQ ID NO: 187676 - protein, 177 aa, Oryza sativa
  unsure (1)..(177): unsure at all Xaa locations
  Clone ID: PAT_MRT4530_84356C.1.pep
KIVNRKKKETGEMTKRQALVCSFVLLREIRICXVLETFRKIRCVKTAWSPXSYARLIRFGYVEWRSCGHPDQVTFLYINRATAFTQHTRNQSKVCLLLYAVPSLVDYSIPLAGVHRRSGKQVSGTSAFDILHREKKAIRFLGSASRDCSLFVHDGSSSCSLACCALSSTPATASNSC

SEQ ID NO: 187677 - protein, 60 aa, Oryza sativa
  unsure (1)..(60): unsure at all Xaa locations
  Clone ID: PAT_MRT4530_84357C.1.pep
PELGGQLPSPLNMYYFLECCLXRKGLYLRSXRKKTXPFRAXRLLLTRLFIADCTPLSXCI

SEQ ID NO: 187678 - protein, 79 aa, Oryza sativa
  Clone ID: PAT_MRT4530_84358C.1.pep
RSASRRPRCAPRPSWSPRRAAERPRGWPPTPLGWFTASYKRMMKTLNKMEFEVKDSVVWQKYFTATTNSIVLKGDQMLL

SEQ ID NO: 187679 - protein, 65 aa, Oryza sativa
  Clone ID: PAT_MRT4530_84359C.1.pep
MRWPTRSYLVGVEPGVASAAAGFNDVRRAYSAHHHHCLVLQIQEVTLRVLSEDMMHFRANDLATA

SEQ ID NO: 187680 - protein, 1066 aa, Oryza sativa
  Clone ID: PAT_MRT4530_8435C.1.pep
MRTCGLLDVKLEVQGESSLVTRDSVFGQRAELLGRHLSEIYTNVLESITVTTSNSTLVAKSVERLVDAIRPNLCHLVRNESNSSSEFVYSVIGKHISNKQGANWQKIPSLSWLYVFFFRIYMSCRSLYLQSIGLMPPDSAIEATELVGNSFVVCCGKEWTNSANILAEGYFAWIVQNSFPLFDAIEILTQSLSRNCSGFTLLVFILHVMALQRLNDLNRQINAFDFLLEDDTDQFDKENSEGTELLKKSSFLEATQLTSFMMSYRSCKDVENSGSQSSHREITLCNVSVQLLCDTIIYDRKYSSWISCKLQVIVATYSLHSPSGKTAAIGNEFPELKQYSAFSKIFGGSCLIWLLRSVQELVSLSHKIFEEHTDELKNTIFSLVNKTSEIFSTLTNMNSVFYLLGAKKQIISSSGESSTPKHDDQAFNILENSALEHVKIMAELLEKSTTGIPVTVKGSQCVIKLENCYDTVCWDRLLCTMSCIRGFLWGLISALEGTCKDYLSSPEERNVMFQYASRFSGCVAKFEAFVDICMHVLFMETKDCELADLISVHLPQELDCENNSLNITAIMDEWTRHQPEENGFHSDGVLNISTETRGFDLPKVQFVKGFLLENLLSGEGPSIAFTLRELYNASAAIVKLKGILSFPSEVCRQICSPFQKLPLGPMVATAYIALHKLADMSNWPDMFSLLWIDGILSYLEAVGNILALPEINMSKELYTQVVNAHLRAIGKCILLQGKNATLPTHEIGSSTKTLYLQNRSGHVVAKGNCDGGTVSSDVAAGIYCLYLVLETVPGNKRVFKRTVPGLIGALFNIVLHLESPFIFYTERMPVHYPYLHPDAGAIVLMCIEMRQQRELLGKHSMYFLAGYISMYSGQGPFQTGITRGSMPNNFCKSGAGLQITLPVSGQNLVKLAKGFLEHLMLIRLILHLKLIKLICWIWNKMKRSKQENELSNQDEKDLVICSLWLLFHKSQLGANNDKDDTVLNEVIISPKEVLDYPRCDTWSVSIRGHERISEVIGGGDKGTMEGVMCYTWWGHAEELGGCGNKIAEKWTKSWSTHAHTVATIIG

SEQ ID NO: 187681 - protein, 62 aa, Oryza sativa
  Clone ID: PAT_MRT4530_84360C.1.pep
MARWGSVTPRNSRIEFHAECALKPSSRTARGILDGTDEAYSSEKSPSDAYSNSGVLGKIEQD

SEQ ID NO: 187682 - protein, 571 aa, Oryza sativa
  Clone ID: PAT_MRT4530_84361C.1.pep
MAPPPAGVEAVCAAVIKSTLTQPHNHHHLLAASPSLLAAVLHRLSPLPSTALAFFRSLPPPHPLDASLALLRLLAPHPRHHPTARSLLRDLSLRHPLSSPLLLPSLLADPHLPSWLLLLLSQSARPHDALRVFDHMRAREVVPDAHASSALLTALAKSRMTATARKVFDQMTRAGVAMNTHVYNAMLHVCLKAGDAALAESLMTRMDAAGVPLDRFSFNTVIALYCRKGMQYEAMCVRERMENQGVKADVVTWNSLIHGLCKERRVKEASQLLREMAMAGVAPDHVTYTTLVMGTVEQATWRRRKLCEDGKMKEVNVLLNEMDERKVQADHVTCNTLINAYCKRGDMTSALKVKRRMMESGLQLDQFTYKALVHGFCKAKELDEAKEALFEMMGAGFSPNYSVLSWIVDGLCNKNNAVAVLAIPDELMKRGFPPDKAVYRSLIRRLCKKGFIDLAGNVFNEMQGKGLEADCLVYATLACAYLTAGKPVAALDILNEMAKKQLYITPQIYNYKSSCKFAGDGVLQFQTKQCRCDQKKTWEGRSGCLRLDYEFLRLRGAASRTWIIFMATRYS

SEQ ID NO: 187683 - protein, 540 aa, Oryza sativa
  unsure (1)..(540): unsure at all Xaa locations
  Clone ID: PAT_MRT4530_84362C.1.pep
MAKKTLCEFAAPSADNVPVGPXVNIGDTDFDLKSSLITMAQASPFFGKPNEDASVHLQQFLEICTTYTVKGVSLDAERLCLFPFSLLGKAKQWFYVNRMIVNTRDRCSTAFLSKFFPMEAWECLQEYVAACPNHGMDDWLILQSFYNRLTPSSMDHQDAATGVAFFSKIVRAAIDIIEKMVSNMGWSEERLQTSHRGMHTVKETEMLAAKLDVLMKRRDDQEKSKPQDTVKALDSHITCEVCGNTGHSGNDCPETHEEAMFMGNNGYRQQGGQGWNQLRPFYQGGNNSNNNGNFDQPSLKDLVFTQAKTTVAVXKKLSINDKVAALVPTKETGRILRQPXITTRGRKSTRDPPYPNTAGTRQAGEEEWGIAEPKEDEEAQLDKIPPQEYYDSTLLPFPPCQKKPSVDXQFARFMDVIQKIHINILLVDAMRVPIYARYLKDILNNKRPLPTMEMVKLTEECSNAILHXLPEKKKNPGCPTISCSIGTLHFNQALCDLGASVSVMRKDVFDKLNYTILIPTPMRLQLADFSICYQAILGGD

SEQ ID NO: 187684 - protein, 55 aa, Oryza sativa
  unsure (1)..(55): unsure at all Xaa locations
  Clone ID: PAT_MRT4530_84363C.1.pep
ILIPIMASNTPCTNTGLQMLDRQCGACXNLLNILLATKPNKRISCLDAFMHPLLL

SEQ ID NO: 187685 - protein, 149 aa, Oryza sativa
  unsure (1)..(149): unsure at all Xaa locations
  Clone ID: PAT_MRT4530_84364C.1.pep
SSPAACSGAVEYAAAAAERTSSLRTLSVSLLRSRVVVRLLTVKFGKPLSSGGIWHLTRGCIGSVRSPAKGXVQRSAGPGESIGYSSLSTLRVSSPTLSMMIDGGADSSLARLERSGFAVPHDRRSHVFTPSATAASPLFLDRIQRRIAV

SEQ ID NO: 187686 - protein, 87 aa, Oryza sativa
  Clone ID: PAT_MRT4530_84365C.1.pep
MAYETGYYQEKYAESTSLCVMALERTVWYSMAFVTAGLLRKPPVSPQSHAALPTSPSPAVDEETSHSLGGVWKRGTKGVFGWRDMGG

SEQ ID NO: 187687 - protein, 169 aa, Oryza sativa
  Clone ID: PAT_MRT4530_84366C.1.pep
MKPAGAVAAPAPASGGAVAFAWEHEPGVSKLLQGTATTAAGEAEKLPPAKKEAVPHSIRVRPPPGAAGRGGRRGGGAAAAVRPEEDPFLAAFLACTERGNRGTPKGGSKLLGLGLGLGSGLGLGLSCKGPGGVVQSVDNIVFETLVPSSCVVIEFVPSRGTTIVGARPP

SEQ ID NO: 187688 - protein, 392 aa, Oryza sativa
  unsure (1)..(392): unsure at all Xaa locations
  Clone ID: PAT_MRT4530_84367C.1.pep
FKLILSVFGKLSSLKINFYKSELFCFGQTQDCREQYSNIFYCKLSTFRVRYPSNKDWKIIEERIEKKLGSXNGKHMSEGGRLVLINYVLSSLVMFMISFLIPKGVLQNIDYYRSRFFWXDDDHKKKKKYRLIRWDIICQXKIDQGGFGVHNLEVQNKCLLSKXLFKFINEQGVWKDLLKMKYFNYQSICQVDRKQGDSHFWLGLMKVKTTFLNMGSWIVNNGEQIRXFSWIDRXVIIPLKIPSLSAIAGGRNSSIANVMNSFRRDLVGQNLPYXHNLCASKVHIHLTEESDXFRWNFHQNGQFSVRSIYLALINNGYIEKNNIVCKLKMPHKIKIFMWYLLKAVVLIKDNLVKRNWNGILRCCFCMKNKTIQHLFMECHLREDGSRSGEGRR

SEQ ID NO: 187689 - protein, 58 aa, Oryza sativa
  Clone ID: PAT_MRT4530_84368C.1.pep
KNGPLPMFSKLGFLVQAMVTGKGPLENLLDHLADPVANKAWVYPPKFTPGSLMAHPPL

SEQ ID NO: 187690 - protein, 207 aa, Oryza sativa
  Clone ID: PAT_MRT4530_84369C.1.pep
MATVDGTTAPSSGGKTATVALESGGGRYGGPAPAKCSGANLALRALLFAVSLSALVVLVTAKQTVMVPFVIRPPQFILAPVPAKYTHSPALIYLLAALCATCFYSLITAISSVRLLSSSACSAKTLFYLILLDVFYAAVMASATGTAGAVAWVGLKGNSHTRWNKICNVYGKFCRHIGSSTFLALIAAIVLVLLAFLNAYSLYRRSR

SEQ ID NO: 187691 - protein, 790 aa, Oryza sativa
  Clone ID: PAT_MRT4530_8436C.1.pep
MKTWGLLDCKLERPGGSSLVTRESVFGQRAELLGRHLSEIYTNVLESITVTTSNSTLVAKSVERSLYLQSIGLMPPDSAIEATELVGNSFVVCCGKEWTNSANILAEGYFAWIVQNSFPLFDAIEILTQSLSRNCSGFTLLVFILHVMALQRLNDLNRQINAFDFLLEDDTDQFDKENSEGIELLKKSSCLEATQLTSFMMSYRSCKDVENSDSQSSHREITLCNVSVQLLCDTIIYDRKYSSWISCKLQVIVATYSLHSPSGKTAAIGNDKTSEIFSTLTNMNSVFYLLGAKKQIISSSGESSTPKHDDQAFSILENSALEHVKIMAELLEKSTTGIPVTVKGSQCVIKLENCYDTTKDCELADLISGHLSQELDCENNSLILLASWMNGLGTNPEEIGFHSDGVLNISTETRGFDLPKVQFVKGFLLEKVLSGEGPSIAFTLRELYNASAAIVKLKGILSFPSEVCRHICSPFQKLPLGPMVEPAYIALHKLADMSNWPDMFSLLWIDGILSYLEAVGNILALPEINMSKELYTQVVNAHLRAIGKCILLQGKNATLPTHEIGSSTKTLYLQNRSGHVVAKGIINRQNRLNSLKSRLRLSLGKYVNVSSNMHLNTAVQVIERALVGVNRFSHSIYEINTGNCDGGTVSSDVAAGIYCLYLVLETVPGNKRVFKRTVPGLIGALFNIVLHLEKAFIFYTERMPVHYPYLHPDAGAIVLMCIEMRQQRELLGKHSMYFLAGYISMYSGQGPFQTGITREIDEALRPGVYSLIDICEESDLQLLHTYLGGQ

SEQ ID NO: 187692 - protein, 50 aa, Oryza sativa
  Clone ID: PAT_MRT4530_84370C.1.pep
NQAHSRSLTALRSYKANLTGRSKLVHDVASALGTLRTVELGDGWVDRIGE

SEQ ID NO: 187693 - protein, 111 aa, Oryza sativa
  Clone ID: PAT_MRT4530_84371C.1.pep
LLRSSSPFPYARAREGVRRVRAAAAAAAAVVADREKKLRVASRAEAGSGEEARARSVVLSMKELGAQGREARRRTHWRREGRARHRRLVERRRKDDERGVEALGNADCVGR

SEQ ID NO: 187694 - protein, 150 aa, Oryza sativa
  Clone ID: PAT_MRT4530_84372C.1.pep
MAVPASPSRSDRQWRTQGRQGTGSGGSTIFFGDGGGVVHTLQAGGGATAIPFLIDDDNDDDEEATSSIHTPPLTLPPLTTRRRQQWSTSGGRPPPTHIWQRWNGSGGSGRQRRLASSRPDPTVAGLLPPRFGSGSGRQWEQRARRRHSAD

SEQ ID NO: 187695 - protein, 76 aa, Oryza sativa
  Clone ID: PAT_MRT4530_84373C.1.pep
HDSRLEADTIAHVAWHPRGTSGPRVMCAPTSWSSQGGGARITHGPGVRRGCQASWAIVSASSRVSRYSRPLVTVRC

SEQ ID NO: 187696 - protein, 286 aa, Oryza sativa
  Clone ID: PAT_MRT4530_84374C.1.pep
MPPPRLGSAEPVSCRARAPAAPPRDRPIGFVPIRAVGSRGPAVDSLGGPGPRWTGAHVPLTGGARLPAPPLPLDDVSEGIHETLQLGANARDPQPWGDAGSKELRASSAYCSTPTSRKQARQSHYNPHQSQIPTAAAAATTTAAAAELLVVWTGGSSCSTARRRWQEEWIHRWARGNGYVDADEEDFTHWRRKEEGGCKGRIGARVAGGFARGRANWRARGWGSELQRAGSGGNGVQRAGVGGRCGGAIWGKGARDLILAWKSRLLSLAQAHTASVTERDRRGNRR

SEQ ID NO: 187697 - protein, 89 aa, Oryza sativa
  Clone ID: PAT_MRT4530_84375C.1.pep
SIKGTLAGILASIILASVGYLLGQVNVSQGAVCVLASQIANFCESYIGATLQDKEGFEWLTNDVVNVLNISTGGILAVLMQQLLVSWRS

SEQ ID NO: 187698 - protein, 291 aa, Oryza sativa
  Clone ID: PAT_MRT4530_84376C.1.pep
MACSLLPPLAPVSPPPRLLLPSSRSALLPRGPRVAPRVPVSPPRALPDTAVGAAEALRGALADAFLASPPTWRPADRCPLPASFVAGSPVLLSASSASGFAAAYLLGTLTWRAFGPKGLVLVASYFVLGTAATKLKIKQKEALGVAEKRGGRRGTGSVIGSSAAGCVCALLSIYNVGSAALAELWRLGFVASYCTKLSDTVSSEIGKAYGRTTYLVTTLKVVPRGTEGAISIEGTLAGILASIILASVGYLLGQVNVSQGAVCVLASQIANFCESYIGATLQDKEGFEWIQ

SEQ ID NO: 187699 - protein, 157 aa, Oryza sativa
  Clone ID: PAT_MRT4530_84377C.1.pep
MGKKTKPSPSGRPGAREAGQSAECGGGVEAAEEDDRRDRRRGGSRPWRRIRRAGGWIHVVAEEEEETRGFGDFAAASARDLARLGFATKSGREGRGERGATMLRCPPPPAMDGVEHADDCAVIVLHEARGRRDSREMREKTEERRKKMEKERERWEK

SEQ ID NO: 187700 - protein, 86 aa, Oryza sativa
  unsure (1)..(86): unsure at all Xaa locations
  Clone ID: PAT_MRT4530_84378C.1.pep
CCSTQPTRXASGFFMLGPAFPPGCLSYEQIWTAVCSKDPRPRAADWRIPGPDNSRTVTPRDAPRLKEMLARLLPVPRAEVLPQVRR

SEQ ID NO: 187701 - protein, 474 aa, Oryza sativa
  Clone ID: PAT_MRT4530_84379C.1.pep
MSLRRFDLEIASRELVRASRPPPGFPPVLAVSNLDLILGPFPIYLVSVYAPPPGGVAAVVSAVRAALPAYLSHFFPFAGRVVRDPATNIPEVACNNAGAELVVADAAVPLAAVDFAQVDRSIGLMRVAFDASLPLSLQLVRFACGGFSLTVATNHLLADGRAFIVLLNALGEMVREGRLTSEPLLDRSLLMPRSPPRFSPSLDEEFSRFTPATMINPLMAAAIQRRLYRIEAADLERLREEASAGGGGGRRATRFVALCAHVWKLLARAVGDSDTHCRMAWIIDGRKRLEPPSVGGGEGGALDRYMGNVVTYTSREASVEEVLGAPLHAVAGMVRAAITAAMTRDRFQQLVDWMETKKAAAFKDGGKWTEAVNLGLGSPAMVISGLLPFAIDGDMGFGKPRLVMPWLQHGRLGSASATVVPSPAGDGSWFFAGTRLWPRLLEVVEAAGPDCLLKPATAASLGLAYPAGAHGSRL

SEQ ID NO: 187702 - protein, 87 aa, Oryza sativa
  Clone ID: PAT_MRT4530_8437C.1.pep
ALNLQQQPYSLSVLKGENSVHKQSAINSTAQTQDHADDALDILCRIRRINIKCSKKPLASLTRFCPDTGSVICSPAPDLQKLVGMDP

SEQ ID NO: 187703 - protein, 43 aa, Oryza sativa
  unsure (1)..(43): unsure at all Xaa locations
  Clone ID: PAT_MRT4530_84380C.1.pep
RPRVLLNIVDNDDTGHKHCTGQYFGXGSFIDKCXTPKLLKKLK

SEQ ID NO: 187704 - protein, 48 aa, Oryza sativa
  Clone ID: PAT_MRT4530_84381C.1.pep
KGLEDLTGELLATISGEDHAAKIKCAENVEKFFTLARSALAHVLSKLG

SEQ ID NO: 187705 - protein, 58 aa, Oryza sativa
  unsure (1)..(58): unsure at all Xaa locations
  Clone ID: PAT_MRT4530_84382C.1.pep
MIFPRDXINMIPLEYSRVKCYNGLSVRLRMNSVTIIYQEYFYTIAGNYISSNVVKKYQ

SEQ ID NO: 187706 - protein, 55 aa, Oryza sativa
  Clone ID: PAT_MRT4530_84383C.1.pep
MEDKVSKAGGFQRTAFPTAQMWNRWREGIKANGAWGPVKVMQLQAAFSTEDILLL

SEQ ID NO: 187707 - protein, 114 aa, Oryza sativa
  Clone ID: PAT_MRT4530_84384C.1.pep
METNQSPPCKRPRRDRNREKAPSSNKIEVMEQEIWRDFPEDLFETVIARLPVAAIIRFRTVCRRWSSLLGSDSFSRQYSEAPHGLPWFYTITHENSNNNVGMNDPLLKKWHHQS

SEQ ID NO: 187708 - protein, 113 aa, Oryza sativa
  unsure (1)..(113): unsure at all Xaa locations
  Clone ID: PAT_MRT4530_84385C.1.pep
GRSGARRPGDEGGGARRPGERRGRSRQPGEQGGGARRPGKEGGDARRPGEEGGLQPGCDHRGRRRXAAGRGEAAGGTQARREAALGDRARRGGAVLLGISGGAADDVEPALAG

SEQ ID NO: 187709 - protein, 74 aa, Oryza sativa
  Clone ID: PAT_MRT4530_84386C.1.pep
SGKTRKKNQPHHHRHHPPPRRAARGGRHGAAWGSRRAASPSPYPPSSPQILTSNKLISNAPWNNQDPIEIGIGI

SEQ ID NO: 187710 - protein, 163 aa, Oryza sativa
  unsure (1)..(163): unsure at all Xaa locations
  Clone ID: PAT_MRT4530_84387C.1.pep
XGSQLLYLASWQASLVSWDHPISSPPVAVVCTFNAANKQDSAYNQQQHVPLHFHHSSHTCFHIFFSFRKFQPNFHHTHTQHSFRAHHFPHATQRTPFTSSCRLTFPVLITTVVHSIFSSLHTLASSIFSTQQPLRHPQALNISTGPQHALSLPNPSKKGLKHR

SEQ ID NO: 187711 - protein, 70 aa, Oryza sativa
  Clone ID: PAT_MRT4530_84388C.1.pep
KTENHRPLVASVDPCLNLDHVHVQLVSSVHLCCCSSLVVSFHVLLIAAATHLAGHCRSPILIFKSLSRFC

SEQ ID NO: 187712 - protein, 136 aa, Oryza sativa
  Clone ID: PAT_MRT4530_84389C.1.pep
DGDVAGLRYLQCVVKEALRVHPPGPLLSWARLAVRDAHVGGHVVPAGTTAMVNMWAIAHDPELWPEPDEFRPERFAEEDVSVLGGDLRLAPFGAGRRACPGKTLALATVHLWLAQLLHRFEWAPVGGGVHLLERLN

SEQ ID NO: 187713 - protein, 90 aa, Oryza sativa
  unsure (1)..(90): unsure at all Xaa locations
  Clone ID: PAT_MRT4530_8438C.1.pep
HLTFEEQQFLGAAAIGGKLASLPVAQCRXHXVNPVVFQQSGLQEGILVFVSGSLRRGPGEHPLKFXQMLHVLVHEGIFYVHSDMFRLSYG

SEQ ID NO: 187714 - protein, 788 aa, Oryza sativa
  Clone ID: PAT_MRT4530_84390C.1.pep
ADGTKLTAGYSRCRLKDKLDKIEKLIEKAQDIIKLANLPGNNNESGDHRRYVGVTAKHTSKPTAAYLPRKVIGRDKDREEIISMLRDENQSSADRCFSVIGIHGIPGSGKTTLAQYVCEYEEEANHFDIVMWIHVSQNFGLDTILREMIEQATKQPCPQFKSLTALQKRLKQDLCEKRFLLVLDDVEHNKDISEDDLSALEVGGAGSKILATSRTRDALLALGAVRSKCIPISKLDEHVFRELFLQYALDGAEICERDRIVLQMIGADIAKKLKGSPLAARTVGGQLRIRQDVEFWRSVRDKDFFSDAMEALRWSYQLLDEKVRRCFAYCSIFPRGHHLGRSKLINLWAAEGFISREEVGGDYFHKLVATSFLQLERKDSSGEEYYLLHDLLQDLAETVGRSDCCRIEGGCTGQVPRDDVRHLYIKACNGATVAGNKAFEKMITENIVKLKELRTLIIDGGETGIEAKVFDDIFDSLKSLRVLIVETQSRRILQIPESIGYLKYLRYLSIEYRCRIFFPRTVTKLYHLRVLDFGEYGMLERSCSPENMSNLVNLQRVVGRSLGDFPNIGRLTLLRTLPTFRVKRDLLGYDIKQLKHLNKLQGKLVISGLQHVRSEEEAVEAKLAEKEHLKQLTLAWDDDNTSSNHDPAVLECLCPPMGLQVLEIIGYRGSYPGWMVGKHSGQLYLQKLELRQCSPLGPAPRLFECFVHLESLCLSHLSWHTLPDNMEQVRTLKVLMISHCKNMKVLPTLPQSLSRFKLSNCGHEFTRSCKQNGENWEKIQHILEKIIL

SEQ ID NO: 187715 - protein, 996 aa, Oryza sativa
  Clone ID: PAT_MRT4530_84391C.1.pep
MDIVVSVSHGALGPLLGKLNTLLVDECARLKGVHREIRSLRSELSNMHAALHKYTSLEDPDIQVKTWTSELRELAYDIEDCIDKFMHQLGANDDQHHTSNGVKDFFGKSAKRLKTLGSRHNIAAEIEELKMRVISVRDQKNNYKLDDIFCSSSSNTNAFVDPRLAALFAEENHLVGIDSPRDELVNWLDADSRSIVGFGGLGKTTLANEVYRRVKIHFDCPAFTSVSQKPDMKKIFKDIIYHMPTKDAFLKDIDTWNEKKFIEKLRELLVDKRYLVIIDDVWSISAWKAISVVFPENGSSIIIVTTRISDVGRSCCLNGIDRNFEMEPLSEIHSRRLFCQRIFSTDEDGCPDILQEVSTDILKKCGGIPLAIISISGLLSNRPIIKEEWEKVKESIGFVLDKNQNLEGMKSILSLSYNDLPNYFKACLIYLCIFPEDYIIETNMLLRRWIAEGFVSEDCGMNLEDVAESYFCELVNRSLVQPVDIRFDSKARACRVHDIMLELITSKATEENFITLLRGQTRKTNLHGYVRRLSIQDTDNDLSSLLVNKDLSHVRSLTCFGGNMNLLPQLARFEAIRVLEFEGSMNLEQYDLENTDKLFQLKYLSLRGSDISHIPRQIAKLQNLLTLDISETFVEELPTELCLLKKLLHLFGNSLKLPDGIGNMRNLQVLTGINISNSSASTVPELGELTSLRDLKISLSDKLSKCKTKEEMLLASLCKLSSYKLQSLHIIYNSSDDLLERWFPIPCFLRLFRMSTNHFLPQLPKWIKPSLTKMAYLNINLREIKEEDMETLGDLPALLCLEIWLEPNPKKQLTVQSTGFPCLKEFLLVCGDHDGGAYLTFGKGAMPKLEKLEIPFHVLMAKSHGKGSPKGGRATEDYGHGPSASRRLQYGFNKVLASSTASNALRGKEAPKGGGLLNNVAKTTRGLYVLIPSLRWLQSREKQVQIPTILDLPSSEQMQKRSKRIIAKRVIITGVQRMTMLLTPDIVASHDLSGNP

SEQ ID NO: 187716 - protein, 257 aa, Oryza sativa
  Clone ID: PAT_MRT4530_84392C.1.pep
MASSSSTPVGALPFVVPVIEKLGKGNYLLWKAQVLPTIRGAQMFGYLDGTAEVPVKEIKVKEGDKAPRSSAEVGQARSFVASEVVRPHTRSQSGVVKPKVYTDGHIRYNFLTALGEPQNIDEALANERWKEAMDSEYHALIKNKTWHPIPAKEGRNVIDCKWVYKIKRKADGSLDRYKAGLIAKCFKQRGWCLRQLDIQNAFRHGILEEEVYMKQPPGYEDKSRPDHVLKLDKALYGLKQAPRAWFERLSQKITGQQ

SEQ ID NO: 187717 - protein, 439 aa, Oryza sativa
  unsure (1)..(439): unsure at all Xaa locations
  Clone ID: PAT_MRT4530_84393C.1.pep
SSWERISESAAAFSTNEDASAPNQAPRSSAEVGQARSFVASEVVRPHTRSQSGVVKPKVYTDGHIRYDFLAALGEPHNIDEALANERWKEAMDSESHALINNKTWHPIPAKEGRNVIDCKWVFKINRKADGSLDRYKAGLIAXCFKQRYGIDYEDTFSLVVSREXAPSRGWCLRQLDIQNAFRHGILEEEVYMKQPPGYEDKSRPDHVLKLDKALYGLKQAPRAWFERLSQKVHQLGFISSKADYFTIFHNKGSVTMFLLERLILSALRXVALTRTNISFPVNNVCQFLXLPMADHWTAVKQILRYLQYTLGAGLXIKKESSTLVCAFSDTDWAGNVDDRHSTSGLVVFLGCNLVSWSARKQAMVSRSSTKAKYKSLAKKNPPPQTHXIIWIQTLLRELKVSSPPAAQVWCDNIXATYLSTNLVFHARTKHIDIDYYFV

SEQ ID NO: 187718 - protein, 112 aa, Oryza sativa
  Clone ID: PAT_MRT4530_84394C.1.pep
MGEGINGDAGDLAAAPNDQGVPLSPAGGSPRPSARYKHAAEVGREKLYEAGGSPKGRYVSDIQAFDFRTHKWSALSAARDSSQMNSQNNTTDPSFPALAGHSLVNWTKIYCG

SEQ ID NO: 187719 - protein, 596 aa, Oryza sativa
  Clone ID: PAT_MRT4530_84395C.1.pep
MGEGINGDAGDLAAAPYDQWLPFSPAGGSPRPSARYKGTHVKNKRMRVVDAVVSILRERTLRTNECENVTNRVPNPVALEMPSLRIVGQCRGIGIRTEMADRSSLERILVSDTRHAAEVVREKLYVVGGSRNGRYLSDIQVFDFRTLKWSALSAARDSSQLNIENNTTDPSFPALAGHSLVNWKKYIVVVAGNTRTSTSNKVSVWLINVETNSWSSVDTYGKVPISRGGQSVSLVGSRLIMFGGEDNKRRLLNDLHILDLETMMWEEVKTGKGGPAPRYDHSAAVYADQYLLIFGGSSHSTCFSDIYLLDLQTMEWSQPDTQGAHINPRSGHAGTMIDENWYIVGGGDNASGSTDTIMMNASKFVWSVVTSVPARDPLACEGLTLCSTTVDGEKFLVAFGGYNGQYNNEIFVMKLKPRNLVQPRLLQSPAAAAAAASVTAAYAVITDEKTRDIVATDDLDVKRVQPSGSSKQITTELDALNGEKGKLESRLAEVRDENSKLKDRLDMVKLSHGELTKELKSVQHQLAAEGSRCQKLESQIAAAHKRLESTDSLENELEVLRQQISQVEQTMTTAQRQKSGGVWKWVAGSAEISDDE

SEQ ID NO: 187720 - protein, 81 aa, Oryza sativa
  Clone ID: PAT_MRT4530_84396C.1.pep
PPDLPPPDLVAWRRSPSGRARMAWSGGGGPDFFFFQFFSIAIANLIGLLMEENSDEIRCDDQKNTNIYISYYRYMRLKKKK

SEQ ID NO: 187721 - protein, 177 aa, Oryza sativa
  Clone ID: PAT_MRT4530_84397C.1.pep
MAMGMRSDGGALPRRPLYHPVSHLTGAAAPFMLSPLIHSSLLSSREQAASGRPSRRRKSALEAGGNERETAATLAVMPPCRRALFPDFSPREFPVAEYIASWDAKDEAVALVTGTGGSCGGSCSCSEKWTSSSISRVTAYRDEAHKDASAGAIAHTNTVVVTDALTLPHRRHGCIKL

SEQ ID NO: 187722 - protein, 366 aa, Oryza sativa
  Clone ID: PAT_MRT4530_84398C.1.pep
MHTPFVDKSPHRRLDGLGAGGWLKQRLAQILVRSTCTTNTTTTTTTTSSTAFVSLDKTNADTHQEPPPPPSPYFCTPCTYQRPKLDAPGRPRRRRRSASLVHISIDCTGGAGATSGRRSVHSDAPLLPYSSSLPTKDGRKQSRARRKARSSPSTSRRHCPSSSWGRARLPRGAPGQYSSSSSTVTDDELAPFSTDEEGGEEADTRTLFSSLSFSSDSTSEFYHTNSSSSLARKGHKNAPARRPPARRASARITSDPADAFRPVVSVAATKKQHNDMKKKEETAIKRQLGTDDDTAAGAGMAVVKRSSNPYADFRSSMVEMVVERRICSVPEMEELLGSYLSLNSPQHHPAILAAFEDVWEAVFGEE

SEQ ID NO: 187723 - protein, 125 aa, Oryza sativa
  Clone ID: PAT_MRT4530_84399C.1.pep
MEDYFYFSATLELEPVGNLESVSPSPSPRRTTSRDVDVAGELRGRHHHYLDACFLCGRMLAGNKDIFMYRGDTPFCSEECRQRQIDADDASEMMKKRAKMQPAAARGEQQPQRRQSPHGIPVWAR

SEQ ID NO: 187724 - protein, 247 aa, Oryza sativa
  Clone ID: PAT_MRT4530_8439C.1.pep
THTNGIDKLWICENLLNFFSTVPGFHANSKSLLQLIAYILHLERLLLLAMVCHRYESCNSMGLLRLFVCCRRAMKNLIFNFGKEFPELKQYSAFSKIFGGSCLIWLLRSVQELVSLSHKIFEEHTDEMKNTIFSLVDKTSEIFSTLTNMNSVFYLLGAKKQIISSSGESSTPKHDDQAFSILENSALEHVKIMAELLEKSTTGIPVTVKGSQCVIKLENCYDTVCWDRLLCTMSCIRRFLWGLISAL

SEQ ID NO: 187725 - protein, 650 aa, Oryza sativa
  Clone ID: PAT_MRT4530_843C.1.pep
MSGPVVPLASTAQGPCEPSPGSGPLPVSAAASDPPAPSSSVPAGGREPSASGLPPAVTPQLGDHDQGGLPNCVPKVGMTFNSENEAYDFYNSYARNVGFSIRKNHANTRADGSLCSKYFLCSNEGQPVASTTQPGRKKRSSTRSDCKARLQFYISREGIWTVQKVELDHKHYLVSPDKSHMLRSQRRLTPSYQQIVNEMRQEGITAADMQRVFRQWSRGAENVHLLKKDTQRKYLQPSYAQKLLEYLKNKQTENPSFFYAVQLNDDGRIANFFWTDCQAIVDYACFGDVVSFDTTFETNKFEMPFAPFVGTNHHKQPILFGASLIYDESSESFNWLFQTFLTAMSGKQPATIFTDPSAEIIKSVRLVFPNSSHRLCLRHICHNAVKHLNHVICNHPEFLSDFKRRIYEERSVTFFDLKWKELVNAYNLDGNDWMNNLYAMREKWAAVYSRDSFYADMMTIQNAEGTSDALKNFRRKLCLPEFLEEYEKCITSFRQNELEADYNSRQTSPVPYVPDLPMLKTAAESYTRNLYSHFEEEFKKLFTLSCSLLSQDRTISTYKLTPLNSEEEAYVVFNSEDTTVSCSCRMYECTGMLCKHALRVLNYSNIFTFPSHYVYKRDESYIILGISSALHLLGVNFLPLPSSSKARQSP

SEQ ID NO: 187726 - protein, 152 aa, Oryza sativa
  Clone ID: PAT_MRT4530_84400C.1.pep
KSLMSPRCRYFLWLVALNRCWMADHLRSHGLSHPDCCVLYDQCEKTIDHLLVACAESHQLWWIALRAIGHSDCLLINESSFHLWLCDSRRKMIKELHQGFDTIATLVAWTVWKKINNRVFNQQSRTWAEVVRAMAGESELWRLAKAVIPPLI

SEQ ID NO: 187727 - protein, 203 aa, Oryza sativa
  Clone ID: PAT_MRT4530_84401C.1.pep
QKRNRKRKYFLGNGIKYDNRSLRRNSESVGNIPENLSKFPKLKRPIQSIVHNPSPSPQPAQPKLLTQEKRVEREKSDRSGGRPGAAHRHPEAAAERRIQSAPPPTAGLPSSLPWLPATSQPAVSHLAPPFLFAPSSPPPSRGAVPPPLALSPVTPPPTRRRRRHRHTTDAGHTDDDATSTTRPQATATPHRRHLKPHWLPHRH

SEQ ID NO: 187728 - protein, 88 aa, Oryza sativa
  Clone ID: PAT_MRT4530_84402C.1.pep
LKHIPCKAQIHQKAFIHSSQACSHCRWTCCLFAFCFSIFLLRRRHRPSVLSKERKTAVFTSVDLIRLTAPTTSAGARVARVFAGVPRP

SEQ ID NO: 187729 - protein, 82 aa, Oryza sativa
  Clone ID: PAT_MRT4530_84403C.1.pep
GFALPPSPSMADIETALPPPPPQQAQLPRWASAAAALRGVADVLVYSYVTAMWVNAAANGAAVFSRWACGEDSPAAAVTMEV

SEQ ID NO: 187730 - protein, 617 aa, Oryza sativa
  Clone ID: PAT_MRT4530_84404C.1.pep
MPKVAGDGGGGGRRSEDLRVVFLRVGAAVALSVAGLLLSRRRPRQQLRLPPPPPRSDSDGMKGGGGLKDELRILKNEDTKAKIINGNSVHTTTTTTTMTTTALVPLPPKCRTLDDDEEFLLPEFNEIVLKEFGRDMGNIATSPAPRVSEEDATKTPEIFELREMVRSLQEREKTLELQLLESYGLQEQDVAVRELENQLKINTVESKLYTLKIESLQSENERLQAQLTESSKLASELEAARMKCKLLKKKLRQDAEQAKERIASLQEMADSWQCKEIITEGKFSAEVEEKLSKLEELENEARELRVVNSRLQQENAHLARRLELTRLPPVPKPINNMEVKALQEADHLRQENDKLAKEVEQLKTDRFSDVEELVYLKWINACLRYELRNQDAPSGKNVARDLSKTLSPQSEEKAKQLIMEYANAGPDEKNFDHIEFCSEYSSSRASSLGEPDDASIDVSLMNKHKNPKKKKFFSKLRKLVLGKEKENKTIPTLERRISISSCSFDEFNGRESIDSYSSFMTEPGNSGNQQHDNHGSRWHSMDSQSARHLSKEIADARNLHLGVKSVSFGEGRVSNFGHSSHLGNGEATVPEDAKKIHKFAEALKTSRPGSRSSRKDH

SEQ ID NO: 187731 - protein, 174 aa, Oryza sativa
  unsure (1)..(174): unsure at all Xaa locations
  Clone ID: PAT_MRT4530_84405C.1.pep
PQKKRGSKNPPQIFFQGWLVPLGGGPPTPQFLSPNPYQGEXSPRETPKGGNFKRWKHFDPFRGGGPKVGKMDFSKAPKECFQGPENFVAPQFFNPKGQQHPLNLRGASLEYSPQGKGITGPISPGCLEPNQKNSQKXGKPHLPKSKTQTLIFRVKLQKFPLSKQENVTPCPVGE

SEQ ID NO: 187732 - protein, 246 aa, Oryza sativa
  Clone ID: PAT_MRT4530_84406C.1.pep
MALSAGDVQFIYSVLANSLSADAATRQPAEALLAQCEARQGFCSCLLAIITSRGEESDDDVRLLAAVHLKNCVTRCWRNSVDSPAIDNEEKVYIRKSLLLNMREENGKIALQLAALIARIVYFDYPKEWSDVFSVLAQQLQTSDVFTSYQVSTVLFRSLKKLSKKRLAFDQRNYSEITVYLFDYIWNLWKSNAQIVLQNFSVLSQHNSSLDQSNDLLLIYERWLVCLKIIRELICSGYASDSTTMQ

SEQ ID NO: 187733 - protein, 130 aa, Oryza sativa
  Clone ID: PAT_MRT4530_84407C.1.pep
AELNLSLAMGRFSNGVLGALSFAALLASVPLIGAGAYLLDHPASECQRLVRVPAVALGSAALLLSLMAIAGVTCCRGAALLWAYASAMFLLIVGMFFVTAFVFVVTNRGVATAVFGTGYGDYRVRDYSEW

SEQ ID NO: 187734 - protein, 100 aa, Oryza sativa
  Clone ID: PAT_MRT4530_84408C.1.pep
MVLGLYAFADIAADGAPHLNSAAGEELVRVERAAAVALGSRAPEPPGTLFITTSEVEKGKAYAVDFLAVSLHAVSRDPEAYSSPCIYTQERFGRVEKGRD

SEQ ID NO: 187735 - protein, 145 aa, Oryza sativa
  Clone ID: PAT_MRT4530_84409C.1.pep
MGPDGAMVRVEHKNGFWATMAGLEDRHRRPSEGGARSQGIQPGHHDGECRDREGVASTRWRPAGTEAVEGVAAREKEEGLHHGGGGGGRTSGGQNPTGVPPQRALPPRASPRSPFGALSSEPKRERTEEEGREEIGKKGMTWVPL

SEQ ID NO: 187736 - protein, 106 aa, Oryza sativa
  Clone ID: PAT_MRT4530_8440C.1.pep
MGNAGSSPEQAAGNNKEDAEARRQPPSTVRFYPSADQPKARQPPPIKLEEEDVPPPPVADEEMAPRNLWQVYALGAFIVLRWAWVKWKESKERDDSPDGRSPDGSS

SEQ ID NO: 187737 - protein, 576 aa, Oryza sativa
  Clone ID: PAT_MRT4530_84410C.1.pep
MRVAAKQAAAAAAAKGKSVESNGVRVVGGRIYDPENGKTCHQVTPPPTPTYLPDYHVFDTVSSRCPMRSGASLFFLPGGWVGLDLRNSCSPPLAFAGNSCSPLGGAVALFLAPSQCRQKTMDFAASCHKIKKNNKQCTIQYCRKCLFNRYGQEAEKVANDGTWTCPKCKDICNCSFCMKKKGLPPTGILAHAAKASGCASVHHLLKKGKEAVAAAQRSTQKVRSTPVKKSPKRAIQPDAAADEPLAEGDENVCIDFNAAPVKKQKRSRKVGNGVALTKDESPDAPKEQVVLPKGTPVTSVAGAEWEPEDVGLALQFFEFCRTFAEIFQVRKGQPERILRDIAGGRGLRVVSSVIADFHITLLSIIQEGRGIKPITYSRDNDAWIVDTGKCISESIFVPEGLPLDSLSQGVSGYKNLSPSCKLSVLNFLCDESLSTEKLRSCILSETKNPSREKAHSAKEKEEPKEETIKNTDEAVLLKTEGAAVAIEEDKNGISQQKDVKEVKNADTNEKKHGGFLRTNPFMVDKKVIYWKLDDYCNNTTMMLQEVDADDLMGNKDKWFMLNEDEKKIVENYLSTR

SEQ ID NO: 187738 - protein, 92 aa, Oryza sativa
  Clone ID: PAT_MRT4530_84411C.1.pep
MTARGSLADPAILRFLLAPGTWDLWKGRRGWGMPSVLGIMAVSPPAKGGGIDWSGGVEGGSKVDDKNNESERKEDEKTDPGKKKLIWVVLIK

SEQ ID NO: 187739 - protein, 60 aa, Oryza sativa
  Clone ID: PAT_MRT4530_84412C.1.pep
RRSLALSELVLNHLQIFVCEFNDQYSHRMDSYIYWSLHPDQGIPTSRLTGSLTDEYRSAR

SEQ ID NO: 187740 - protein, 188 aa, Oryza sativa
  Clone ID: PAT_MRT4530_84413C.1.pep
MDERVGDRGAHLPCHNTSASVSTRNPARAHRQGNHGRFRRKRGESAPDLAGGVSRPHGLFYGTTGSRAGVVRSTRGGGGGEAGVVWLRAAIRSIEEMGRGGHTHFLDACFLCRKRLAGNRDIFMYRGDTPFCSEECRREQMEADAAAERTEKARRAGKLTRGAPSSRREVEGPQERGNSVRAGSILAL

SEQ ID NO: 187741 - protein, 457 aa, Oryza sativa
  Clone ID: PAT_MRT4530_84414C.1.pep
MEVFYYLVFGGLAAVVAGLELGKSAKDRVTTSQAFNSFKNNYVLVYSLMMSGDWLQGPYVYYLYSQYGFDKGDIGRLFIAGFGSSMLFGTIVGSLADKQGRKRACITYCISYILSCITKHSPEYKILMIGRVLGGIATSLLFSAFESWLVAEHNKRGFDSQWLSITFSKAIFLGNGLVAIVSGLFANLLADNLGFGPVAPFDAAACFLAIGMAIIMSSWSENYGDPSESKDLMSQFKVAAKAIASDEKIALLGAIQSLFEGSMYTFVFLWTPALSPNEEDIPHGFIFATFMLSSMLGSSIAARLLARKLKVEGYMQIVFTISAFTLFLPVVTNILVPTSSVKGGSISFGGTLQLLGFCTFEACVGIFWPSIMKMRSQYIPEEARSTIMNFFRIPLNLFVCVVLYNVNAFPITVMFGMCSIFLFMAAILQRRLMVVSDLHKSSTKAQEMVDEDEPLNP

SEQ ID NO: 187742 - protein, 38 aa, Oryza sativa
  Clone ID: PAT_MRT4530_84415C.1.pep
RAVTRVFGDRQATCSRAVPGCLSGSAPTDAQCLNSTLT

SEQ ID NO: 187743 - protein, 105 aa, Oryza sativa
  Clone ID: PAT_MRT4530_84416C.1.pep
NQALLDQLFDLKSKEQQLQDLNKDLRKKLQETSAENVLHMSWQDGGGHSGSSTVLADQPHHHQGLLHPHPDQGDHSLQIGYSSFLPVTVNFLPEKIPKMQRSCSF

SEQ ID NO: 187744 - protein, 508 aa, Oryza sativa
  Clone ID: PAT_MRT4530_84417C.1.pep
MYSLATHSLPPPRCTTFVPYGASGSGTSKTPHPGCAAGGGCGCATVEADRSHAPSTPSSAAERPNQRPCSGTLREIGPCDLSKLSPDHRCPGLQDAGGDWALPFRGSSCRRAAALADRIYSSFANANPISRLGTIPNNRSGILEKKKAKKRFGKTKNRRFLYMVDFRAVDPSFQRLRRIDPSSLFYADPAAAAAAAAVEDVRLSPADMNFFPPRNDDKIIAVDHAGRTIVYDPAKHSVGALPAMVTPKFRTLSLAVGKDLYVMAVSPRPDGVTDRSFEALVRCKKEAEDGCLWRAMPPPPYVHAAGYENAVGDTCAYAAVGGSRILLSSRRHGTYSFDTARATWSKDGDWTLPFSDRAEYVPEHGLCFGFSAADDDVLGAWDLFSSSTVQQPEPPPPAHPGCRDFAVPGPSRRRARPSHAVDLGEYTEVYSSHVVHIGDSKLCVAKLYTVSRRGTCTEYCCDFESDERNFAVLTGVEVVRGHDDELRIITHKSQRYSFGERYIPTSVL

SEQ ID NO: 187745 - protein, 321 aa, Oryza sativa
  Clone ID: PAT_MRT4530_84418C.1.pep
MAETRGVGGRLAALASKVDSKIYYLKDVLVEYMDMKNVVAEIAEERERFQLEQRGNDALLEAMKEELVAANNELEAAKEEISRKNNELESVKKQLQESEARNIQAEQQSGIVVELMQPRGVQTRSMQKRKRPLQGLRAGFLDIDNGGRKLGIKEMGQLNEKVFQIACLAKLPPEEVGEASYELYSSWQKQLSDLSWNPFKTITVDGNGKEIVNVDDEKLQELKRDYGEGAHKAVMNALMEMKEYNVLADRSIAYELWNYKDGRKATLRECVEYVCNQVKQLTVTKRRKSRRVVNNLSSTDQKFTREVDLLVAPQQHKGGEG

SEQ ID NO: 187746 - protein, 139 aa, Oryza sativa
  Clone ID: PAT_MRT4530_84419C.1.pep
VRLVGLLTNSGATSSPSSARRRPAAGPLQELPAMSKRQAILKSIWSPLTAVFRTKNCAATSSNLVVVNAGGEIIAGGGREDAIVTRKSRSSLEDLLKIESSSNPGTMAADEPLPNHMASPKNSSMESELQVVLAGYPEN

SEQ ID NO: 187747 - protein, 524 aa, Oryza sativa
  Clone ID: PAT_MRT4530_8441C.1.pep
METATATPGAARKRRRRRRRSQSPPPAGEGPSEPKLSKLRFGCGGGGGGGGGTRSGWENLDLVLSLQGKELSLERKIELTFNFTSTESNWSNHGRRLDIVQLLRAVSFIGNWVQSILILPENSKKTSEPFDPVLDYRCWAILRVCIEKKPSISISPNVLKSLGRVARNGLSRVDTGALYDDKESFDLFGHVLGCMSSVFSINTRTFFNAGVDSWASCAIDVISLAQKVSHNERNGCTVLWNLGNCLFEQFSSFLRFYANPKNIFRTFVDRILDPLLELLVLLNSQVNSLTHKQDRTMLKVVEEILSNGLFHPQHLSGYFGLKNLNKSSTSRDVIGSYHRHLFERFKAIKAENKSVMLAGFGYLLQLFVRRSGNQRASLGPRETSLQKSSEGSEEPHHHRESLFEVFMQFMEPLILECKSYSEKNFSNLGVTKLVEVHCMLKSINKVLTTVIEEKIYVPTEDTSEGSYFEFLQDIYRVLVSMAEKMYEFWVSAVHLEDANVKKMLPLMFAEIVDAVGHLLDIEYK

SEQ ID NO: 187748 - protein, 377 aa, Oryza sativa
  Clone ID: PAT_MRT4530_84420C.1.pep
MAETRGVGGRLAALASKVDSKIYYLKDVLVEYMDMKNVVAEIAEERERFQLEQRGNDALLEAMKEELVAANNELEAAKEEISRKNNELESVKKQLQESEARNIQAEQQSGIVVELMQPRGVQTRSMQKRKRPLQGPSGCEADDQEYTSQINVQSPRCLESMRTPDVKKRSVQKQKHLSQGLPGDPGELQLMEGHLSDPNAGEASGALVSKDDDLEAVREELIKGFLDIDNGGRKLGIKEMGQLNEKVFQIACLAKLPPEEVGEASYELYSSWQKQLSDLSWNPFKTITVDGNGKEIVNVDDEKLQELKRDYGEGAHKAVMNALMEMKEYNVLADRSIAYELWNYKDGRKATLRECVEYVCNQVKQLTVTKRRKSRRW

SEQ ID NO: 187749 - protein, 102 aa, Oryza sativa
  Clone ID: PAT_MRT4530_84421C.1.pep
MAGKKFERTYGSDVEAHVSHNRRAGGRKLTARGPGSVLWAKVGRARWAYLSAAQTLHMTLVFAKVCHVGPHLGTHSIRKQIRRDTICQCTGVQCIPVRAYLS

SEQ ID NO: 187750 - protein, 60 aa, Oryza sativa
  Clone ID: PAT_MRT4530_84422C.1.pep
PFTGPAPTTIVPVVMFVAYFTGSTRSIVGHPPPHLQEHLVATSPGIHIDRMGILYRLAFV

SEQ ID NO: 187751 - protein, 107 aa, Oryza sativa
  Clone ID: PAT_MRT4530_84423C.1.pep
VGRHHHVGVNPSDPTHGCRSGGWEQYPSPSTAPPWAALRGYPRPPRPSYASSLSVSIPAWSSEAFKSDGVSARRFLERSVVVGPRAPGGGIRSRRDSDGGGGEVGEV

SEQ ID NO: 187752 - protein, 218 aa, Oryza sativa
  unsure (1)..(218): unsure at all Xaa locations
  Clone ID: PAT_MRT4530_84424C.1.pep
MHGGKFKLNWXKVCSPXRYGGLGVPNLEKFTIAFQLRWLWFEWSTSEKPWIGTKTPCDELDKDTFDASMKVQIGDGQKASFXNLIDLVPKXVKCQVPNLYRHSKRKNSTIQEALQQRRWINDIRHNLTIPLLDEFLWEVLARDTPQLTEEVQDLIVLRWTTDGEYSAKSAYQFQFNGMVLSPSTKLSWEEWASANCKIFSWLVLQNRVWTANQLQIRR

SEQ ID NO: 187753 - protein, 67 aa, Oryza sativa
  Clone ID: PAT_MRT4530_84425C.1.pep
MRCQQTAASFSATSPFISDSNRVRCISPSSTVQHAASRSPELPPFPSPPPPNVISYPSFAPDVNSLL

SEQ ID NO: 187754 - protein, 78 aa, Oryza sativa
  Clone ID: PAT_MRT4530_84426C.1.pep
AQTEETVRWLAVSQTLSSPSAAPEKMSGREGWKQTSLTAARWPRSTATGSGAGRRRRGGFSASARAMARVRHAWADAW

SEQ ID NO: 187755 - protein, 388 aa, Oryza sativa
  unsure (1)..(388): unsure at all Xaa locations
  Clone ID: PAT_MRT4530_84427C.1.pep
MAPPLFRFPPETWCSSVSLATLSPAAAPELWRRHSTSAAGAPAPCSTAASTAAASSAALRHCSLCARPRCNSASSASRARSDARRRSATRAASRAALSLSACSVSLAFVAVSFTAWEASSAIFISSALSASTAAMSAXSTSASPSARRSPCPSWPSSPGDRPPRRPSQSASPSARRPPCPSPSASSSAVRPPALPCSXSRSPTMAAVTLFTSSSSAISLVSSPWASPGSAASGTSPAGEITPHFSSLTACGGVCSAAADEEAAPAVATLFLAAEKRFLDSTSAARASFLAFSAAASCSRISASWPSAFPSFASSSATRDTAAPPPAGFFGARGDVRCGISNTALAGLAVTVSESSNLLGFFTVRTSIMTSKESTSSPCSSLTPRASSS

SEQ ID NO: 187756 - protein, 81 aa, Oryza sativa
  Clone ID: PAT_MRT4530_84428C.1.pep
YAERMPAAAASGVAGHAERRPRLRLAEAARCAEFHHSHGVPMQQQQLASSTPMVTPSTPPLSTSSTAAGAGHDLFEAAEGS

SEQ ID NO: 187757 - protein, 243 aa, Oryza sativa
  Clone ID: PAT_MRT4530_84429C.1.pep
MRSVIPRAVSRVRTAIPSLLSRPRCTRSRARVERDRKRSRALKARQRCPTSLLALAHAYSDTVFGLALPKRDAAGPLPSPRLSLSRACRVSSLAHAKRDTACPRLPRRVITGLAVSYYETGLGLAQRKCESDGSARGSRGDFSTWRSHSWEKRYRCGLASRLRESASSTSLSLCQIAISPRYRTFNERTSVSLFQKAILMVYFRKSFAIRYIFAQSIDKQYNFKKFSSKLSANSHNDPLIRVE

SEQ ID NO: 187758 - protein, 107 aa, Oryza sativa
  Clone ID: PAT_MRT4530_8442C.1.pep
MPAMHILPFLPGARVGRYLNTKQDGAVPMERSHYQLGDHLVGDALPLAPVGFATFITLIVKPLEEIASRSAAARCPHAVVAPPSSKVVVDRLIRPRGKNLPAPALES

SEQ ID NO: 187759 - protein, 164 aa, Oryza sativa
  Clone ID: PAT_MRT4530_84430C.1.pep
RTKKKTRRAKKKEKKKVTHQRQGTKEKKKKGTSLTGNTTWAEQKKTAKHPKNEDPKEQERGGGRKKRKDCEPSTSGPTDRQTKDRAPARNRTRRTNTQKKKAILLDLKKRPRKREKKKSNPKPTYRTSQVKKTKKGLSRAPPNRWCNKIISRRKHQPPRRTSTA

SEQ ID NO: 187760 - protein, 53 aa, Oryza sativa
  Clone ID: PAT_MRT4530_84431C.1.pep
LSSAIRHRDAATPTTPIPLPSASVTNVVDLLRASARADLSRPHRHRRSLTDRH

SEQ ID NO: 187761 - protein, 62 aa, Oryza sativa
  Clone ID: PAT_MRT4530_84432C.1.pep
RTHLLLESESFLLSKWEGISNTVEVGGSLEAACNYHSLPVPSCKKRVNCEPDFQTSVQIGGA

SEQ ID NO: 187762 - protein, 326 aa, Oryza sativa
  Clone ID: PAT_MRT4530_84433C.1.pep
MSSLAAARADNFYYPPEWSPKKGGLNKFHGQHALRERARKLDQGILIIRFEMPFNIWCGGCNSMIAKGVRFNAEKKQVGNYYSTKDQGSPNRFGWGYRHPMIWSFTMKSPCCKQEIVIQTDPKNTEYVIISGAQRKTEDYDVEDAETLLLPADEERDKLADPMYKLEHQEEDLKKKKEAEPVLVRLQRLSDSRHSDDYALNRALRDRLRSQKKRVAEEKRSARKMGLGVRLLPPSAEDATAAASVKFASKFEKSRRDKRAAIKAASIFPESSSSTSKNKLDLALKRRNIKAGAASALMASRVKPSSWQSAGSGSSRTQMPIMATRK

SEQ ID NO: 187763 - protein, 238 aa, Oryza sativa
  unsure (1)..(238): unsure at all Xaa locations
  Clone ID: PAT_MRT4530_84434C.1.pep
MSSLAAARADNFYYPPEWSPKKGGLNKFHGQHALRERARKLDQGILIIRFEMPFNIWCGGCNSMIAKGVRFNAEKKQVGNYYSTKIWSFTMKSPCCKQEIVIQTDPKNTEYVIISGAQRKTEDYDVEDAETLLLPADEERDKLADPMYKLEHQEEDLKKKKEAEPVLVRLQRLSDSRHSDDYALNRALRDRLRSQKKRVAEEKRSARKMGLGVRLLPPSAEDATAAASVKFASXFEKS

SEQ ID NO: 187764 - protein, 66 aa, Oryza sativa
  Clone ID: PAT_MRT4530_84435C.1.pep
MVPQSLAREGVLTSSTEAKAMPSTAFACIDLIDPLWPALLQKRRPVAAVDRRIDWSVVIVIYERDV

SEQ ID NO: 187765 - protein, 33 aa, Oryza sativa
  Clone ID: PAT_MRT4530_84436C.1.pep
MANQDADVEYRRGGTDRQVRVLQRSIQYNELMK

SEQ ID NO: 187766 - protein, 71 aa, Oryza sativa
  Clone ID: PAT_MRT4530_84437C.1.pep
MEVVGGVKRATCYNVAVGGGGSGSRDPPQQVTHLRCRGGGRGEGGGEEADQINLTGTIDIFRPPNEVGRHW

SEQ ID NO: 187767 - protein, 274 aa, Oryza sativa
  unsure (1)..(274): unsure at all Xaa locations
  Clone ID: PAT_MRT4530_84438C.1.pep
MDAGVAGPHTASRLAVDRARERDGGERRTXSALTRSRPRWRRRGGSHAGRRXGGRRGRPGKWTAGGGRVLRSXQDDYGQGGAHRIGERRKRGRANGSDRAGRGQGRRIATAATGGKQKGKFHRSDGSSIQRGGSISGARGIRFRRRMGRRGTEEGQRREAASGSGRQWRRGHAGRQRALGRRLCAFGTATELLCELKEARESEEGEREEALPSRAGSDGRSTARGEFSGLGLGKRKKRGGRSPLRLLAHSGFPAHAMAEGGEDGGSKAAMALQR

SEQ ID NO: 187768 - protein, 509 aa, Oryza sativa
  Clone ID: PAT_MRT4530_84439C.1.pep
MFVEGFRVESPRVRYGDGEIESEYRYDTTEVVAPPSPEKGWVVRPKSVTYHFKTTTTVPKLGVMLVGWGGNNGTTLTAGVIANREGISWATKEKVHKANYFGSLTQSSTIRVGSYNGEEIYAPFKSLVPMVNPNDIVFGGWDISSMNLADAMTRARVLDIDLQKQLRHHMESMVPLPGVYNPDFIAANQGSRANNVIKGTKKEQVEQVKKDIREFKEKSKVDKVVVLWTANTERYSNVVAGMNDTMDNLLASLDKDEPEMSPSTLYAIACVMEGVPFINGSPQNTFVPGLIELAIKKNSVIGGDDFKSGQTKMKSVLVDFLVGAGIKPTSIASYNHLGNNDGMNLSAPQTFRSKEISKSGVVDDMVSSNAILYEPGEHPDHVIVIKYIPYVGDSKRAMDEYTSEIFMGGKNTIVLHNTCEDSLLAAPIILDLVLLAELSTRIQLKAEDQDKYHSFHPVATILSYLSKAPLVPPGTPVVNALAKQRAMLENILRACVGLAPENNMMLEYK

SEQ ID NO: 187769 - protein, 42 aa, Oryza sativa
  unsure (1)..(42): unsure at all Xaa locations
  Clone ID: PAT_MRT4530_8443C.1.pep
MLVSLSTKNPRHSSIRQSPSSFSCRTHNQLGQQXMHTMQGTG

SEQ ID NO: 187770 - protein, 68 aa, Oryza sativa
  Clone ID: PAT_MRT4530_84440C.1.pep
METDLAVGKQCGQRGWERTQRGWRKVGPRQRAVGTHPILPNGLNIMLRLFQKLFAIDKSLLATMAGAR

SEQ ID NO: 187771 - protein, 82 aa, Oryza sativa
  Clone ID: PAT_MRT4530_84441C.1.pep
NSARGPACLPFHKHFHGVITGTPKLTNKCGHCKNKLDLGKEFVCCSDSSDPTILIKHSKMGYCKSGAELSMQLKPDGIFNCS

SEQ ID NO: 187772 - protein, 157 aa, Oryza sativa
  Clone ID: PAT_MRT4530_84442C.1.pep
MASKVELVVEVKSPADKLWTALRDSTELFPKIFPEQYKSIETVEGDGKSAGTVRLLKYTEGVPMVTFAKEKVEVADDEKKVVSYSVVDGELVSFYKNFRVTLQVTPKGGAAAPAADGAVVSWTMDFDKASEEVPDPDVIKETAAKTFHDLDDYLLKN

SEQ ID NO: 187773 - protein, 285 aa, Oryza sativa
  Clone ID: PAT_MRT4530_84443C.1.pep
MARTRFVALSFIVLLSIGLSNAARVARYASAGGGGGGGGGGGGSGNGSGWGSGSGSGYGQSSGSGGAYASGGGGGGGGGGGQNGGSGYGSGSGSGYGQAGGYGPYGGGAYAQGEGGGGGGGGGQNGGSGYGSGFGSGYGQAGGYGPYGGNAYAQGGGQGGGGGGGQNGGSGSGSGSGSGYGQAGGYGPYYGPYGGSGAYAQGGGQGGGGGGGQNGGSGQGSGSGSGYGQAGGYGPYYGGYWPYGGGYAQAGGQGGGGGGGQSVPGGSGSGSGSGSGSGSAGVRYP

SEQ ID NO: 187774 - protein, 74 aa, Oryza sativa
  Clone ID: PAT_MRT4530_84444C.1.pep
MGHPRLRAGPARPDSWWTVPGREAQPMGRHSPARSADRAVPARWLVGRAWAGPCRAGLLAIYSLHKVASYKSEG

SEQ ID NO: 187775 - protein, 575 aa, Oryza sativa
  unsure (1)..(575): unsure at all Xaa locations
  Clone ID: PAT_MRT4530_84445C.1.pep
GQNWLSWISAIVGSSSSKIILNGRAGNSFLHGRGLRQGDPLSPMLFILAIDPLQQLLAAAQEEGLLKPIHKRTARFNMALYADDAVIFTRPDKQELXTVQSILXFFCQATWMITNLAKSEIFAIRCENLDLQDILSPFPAQQKSFPCTYLGLPLHIRKLKKLDVQPLIDRFSARLPKWKGKLLNKSGRTVLVKSTLSTLPTYHLTVSPLKKWAEKKMDKIRRSFLWTGSEQAHGGHCLVNWKKVCRPKDLGGLGVTNLEIFGRSLRLXWLWQEWIDEDKPWKGSNLPCDETDKQLCRASMIISLGNGGKAKFWHDRWLQGSSPKELTPSLYQLVTRKNRTVAQELQDNRWLRPMRRMNSTTQVREFILLWGLIQQVHLDESATDSITWKWTPNGAYSASSAYRIQFLGSIQDNRANFFWKAKTENKCRFFAWLMVHKKILTSDKLQLRGWDNSPICSLCGIELETARHLIMECAFAKQVWSSIWSKLGLQMPTTSLFNGDILAXWDSCWKKIVKEQRRNLDGLIIYTTWGIWLQRNSRIFHDTYNTVSQVVESSAQEESICMLECHALFQDCLGL

SEQ ID NO: 187776 - protein, 163 aa, Oryza sativa
  unsure (1)..(163): unsure at all Xaa locations
  Clone ID: PAT_MRT4530_84446C.1.pep
MATVSAAAATSVVARAVLAGPLGLPXDEGEEEREGEVQLLQGGGDTGGGRQGSRRVATGDGGDGGARDGARRREDVDGGHRAQPRAEQQPAGVDPARGVRPHLVALHHLHLRPRGGRGVRRPLALESLYTCKHGGCERCNLRRTYMAVLYLNCSYSERCFSIR

SEQ ID NO: 187777 - protein, 130 aa, Oryza sativa
  unsure (1)..(130): unsure at all Xaa locations
  Clone ID: PAT_MRT4530_84447C.1.pep
CSAAAPPAAAAGVAVSSASGPPSSAARPSEVAAASPAAPPPHPDPCARSPPCXTPTARSNSSPPAPPPPPWKRLTRGSPERGETASTVMSAPNDAAATSSASLTSSPCSLSNSCCWLSPPPPPPPPAAAA

SEQ ID NO: 187778 - protein, 125 aa, Oryza sativa
  Clone ID: PAT_MRT4530_84448C.1.pep
HNRVPEDPYAKVKFKIPSFSGYYDAEKYFDWEMIVEKKISTHLVPEQHRVRQATSEFKEFAYIWWTRLDVWRPLPTTRKELNVAMRDTFVPPSYLRDLNKKLKRLEQGDKSVHDYYGELQKGLKR

SEQ ID NO: 187779 - protein, 101 aa, Oryza sativa
  unsure (1)..(101): unsure at all Xaa locations
  Clone ID: PAT_MRT4530_84449C.1.pep
DAGARDGARRREDVDXGHRAQPRAEQQPAGVDPARGVRPHLVALHHLHLRPRGGRGVRRPLALESLYTCKHGGCERCNLRRTYMAVLYLNCSYSERCFSIR

SEQ ID NO: 187780 - protein, 391 aa, Oryza sativa
  unsure (1)..(391): unsure at all Xaa locations
  Clone ID: PAT_MRT4530_8444C.1.pep
MHYMGPAHIGCLLVARWHHCELRTLTLLLPPPSPPLPHTPPPVASPPVQPPPSHRPPSPHRRPPLSPTSGAAPLSAPTTLLLPPRVAPSPPVAPLHAPPPPAVPLHALPSPAVSLPLPPPYPSAPLIPPPLSPTSTSTPTTSRPPSPASTPTLPPPAPAISPPSSPPSRPTCRPSSATSSSSPAASPPTRRPARXPPHPSLPSLSLSPHVGVMEPRLPVVGVSTSPPSVPRRRPPPKTPXHPPKPSSSPPEPSSSSSPXPPPRCIAKSSARAPPTRPTPSAPSASSRASPPSSATTACPCGHVRERPHHGRRRRVGSPPXASSPLPSPPPTSTLSGTPPRSSPRPTSASPPPTPRRRPARQPPPYPRHLRGVEGGPQDRRAPARHYRLAAA

SEQ ID NO: 187781 - protein, 99 aa, Oryza sativa
  unsure (1)..(99): unsure at all Xaa locations
  Clone ID: PAT_MRT4530_84450C.1.pep
YNNPLLSINYFQLKNNQFLQHLPLFXPHSPYQDINIVXAIAQQLQPQQFGDLPFDRNLAQAQALLAFNVPSKYGIYPRYYGAPSTIPPLGGVLSSVFTV

SEQ ID NO: 187782 - protein, 43 aa, Oryza sativa
  Clone ID: PAT_MRT4530_84451C.1.pep
MATVSAAAATSVVARAVLAGPLDEGEEEREGEVQLLQGGGDTG

SEQ ID NO: 187783 - protein, 167 aa, Oryza sativa
  unsure (1)..(167): unsure at all Xaa locations
  Clone ID: PAT_MRT4530_84452C.1.pep
INTTYCWERRQMVNGEMIQMAARSAISIVALTLNYKMARKNRMQNHGKGGINRLKEFSRHLPHVADATMAEAYALKXGLVLAQQIGCQNIITQTDCLQVVENWKRCKMEAFGNFGSDFLXCNILICDFVEVSVKPCNREANVVAQVLAKHASNLKSSCNWVDGHPYQ

SEQ ID NO: 187784 - protein, 72 aa, Oryza sativa
  Clone ID: PAT_MRT4530_84453C.1.pep
MAAARVLCKRLTPLFLAAHASSSSVTCAGAAAAARTGMALMKNNPMKPPFSDSINGAKRPFSSTSTKNTDPL

SEQ ID NO: 187785 - protein, 85 aa, Oryza sativa
  Clone ID: PAT_MRT4530_84454C.1.pep
LSDSSAASTLDNAYWDPYFSDESLLHEDNSLSADLSSSLHLGDSANPTSGSARTANVQSHIFMGSNPLPGGESYRADHFFSRIFS

SEQ ID NO: 187786 - protein, 120 aa, Oryza sativa
  Clone ID: PAT_MRT4530_84455C.1.pep
MVVPRSTKKEVYDSYKGSVFLVDVDEKGLLAPLIESENGGFMGLFFIKAMPVLAACVRQYHKLEDNKPLDGGREGIKRDKSLVWAYSSSACAGDRGRRRMSGKEQGRQSLAQDTRGGHLS

SEQ ID NO: 187787 - protein, 94 aa, Oryza sativa
  Clone ID: PAT_MRT4530_84456C.1.pep
MAQKYSWDIFMGIQCLLLVWVPNGPSDMALSLAKPLEGVSARWAFSWQCSIIGETHALCGKALASRPSTIRPSNRAWSKVLVVYLQQAPHGKGE

SEQ ID NO: 187788 - protein, 178 aa, Oryza sativa
  Clone ID: PAT_MRT4530_84457C.1.pep
MTFLPLSSSTESSIDSPQSITPLADGDCLEPRAGTPHAAGQAEARRGAAAGFLGHGTGGATAAPAVTGGDRGVLLVARHRAFRPFLGGGGSKKASKKAISSSSRRRRKVGLELSFHAEDGVWRKEILMEEQCQSLDFSGMIYYDVAGRRLEQPPPPRTLLCSPLPSSIKLAANAAGGY

SEQ ID NO: 187789 - protein, 211 aa, Oryza sativa
  Clone ID: PAT_MRT4530_84458C.1.pep
MGWAARFLTAVSFLAAGVLFAPDALLGGSGRSGAGVAAARLAHVLCFATAWGAALWVTFIGGIVMFKYLPRHQFGSLQGKMFPAYFMLISVCSAISVAAFAYLHPWKTASTIERYQLGFLISALGFDLSNLLVFTPMTTEMMMRRHKIEKDLGIGSEVGFSKNAEVARTNPTLAAMNKKFGMIHGLSSLANIMAFGSLAMHSWYLASKLQI

SEQ ID NO: 187790 - protein, 301 aa, Oryza sativa
  Clone ID: PAT_MRT4530_84459C.1.pep
MKIERDFHMMKGDSEFSYAKNSRIQKRVVLAAKPIVEKAVREVCIDLHPQSMVIADLGCSFGANTLLFISEVITTIYEDYNNTIKESPMEVPEQLDGSMNEGNIHIGATTPPSVAKLYQNQFEKDFSRFLQMRCMEIVPGGRMVLTVAGRKSKDVFNAGGTTTIFDLLSQGLRILVAEGRVAKEKLDSFNIPVYCPSADELTQLVQQCELLDISDIQLFEMDENRMHDSEQAEGTTAAHTAGQSMSATLRVATESLVASHFGEDILEEIFTVFARNFTSYIESEVEKSGITIITLYLQAKH

SEQ ID NO: 187791 - protein, 48 aa, Oryza sativa
  Clone ID: PAT_MRT4530_8445C.1.pep
VAAAPHRGCPARAEASRQIAAAEILPEWSERASHWRDEGEQQCSCSPG

SEQ ID NO: 187792 - protein, 370 aa, Oryza sativa
  Clone ID: PAT_MRT4530_84460C.1.pep
DFHMMKGDSEFSYAKNSRIQKRVVLAAKPIVEKAVREVCIDLHPQSMVIADLGCSFGANTLLFISEVITTICEDYNNTIKESSMEVQFFLNDLPSNDFNHIFQSLEQFEQLITQDCACKGLQPPPHFVAGLPGSFYTRLFPCNSVHLFHSSMSVTWLSQVPEQLDGSMNEGNIHIGATTPPSVAKLYQNQFEKDFSRFLQMRCMEIVPGGRMVLTVAGRKSKDVFNAGGTTTIFDLLSQGLRILVAEGRVAKEKLDSFNIPVYCPSADELTQLVQQCELLDISDIQLFEMDENRMHDSEQAEGTTAAHTAGQSMSATLRAAAESLVASHFGEDILEEIFMVFARNFTSYIESEVEKSGITIITLYLQAKH

SEQ ID NO: 187793 - protein, 45 aa, Oryza sativa
  unsure (1)..(45): unsure at all Xaa locations
  Clone ID: PAT_MRT4530_84461C.1.pep
PSSCQPRDERTPNSSPVRRSQAPPWLXAGVXSPSLVLVISAILDD

SEQ ID NO: 187794 - protein, 89 aa, Oryza sativa
  Clone ID: PAT_MRT4530_84462C.1.pep
NGSIAYLLFHADQSFSYWVHLNSDNSPRVYNADTEKIQSLPNLVHLASYPVYSTFDPNQRRGHYAIAIANSELTPDMAIWNCSPVLTSL

SEQ ID NO: 187795 - protein, 221 aa, Oryza sativa
  Clone ID: PAT_MRT4530_84463C.1.pep
MVSEQTAPVATAEAELESSAAPPVKPDEAAAKAQPEDDAPVVEDAKDDDDDEEDDDDDEDEDEDGEQGAIGNEGSKQSRSEKKSRKAMMKLGMKPVTGVSRITIKRAKNILFVVSKPDVFKSPTSETYVIFGEAKIEDLSSQLQAQAAQQFRMQDLSKVMSKPDAAAAAPADEEEEVDETGIEPRDIDLVMTQASVSRAKAVKALKAHDGDIVSAIMELTA

SEQ ID NO: 187796 - protein, 112 aa, Oryza sativa
  Clone ID: PAT_MRT4530_84464C.1.pep
DLLGKNRTQTRGSRERRYKKMPNAMIPSHTRTLYTSTTITAPVSGEPGTNLYGGRGGDRDPQSLLRSNRPEPCGLFYASTRMCYTALARTGSSHTISIHTYDHTTNCIQCVL

SEQ ID NO: 187797 - protein, 263 aa, Oryza sativa
  Clone ID: PAT_MRT4530_84465C.1.pep
MVSEQTPVATAEAELVSSAAVPVKPEEAAAKAQPEDDAPIVEDAKDDDDDDEDDDDDGDEDEDGEQGAIGNKGSKQSRSEKKSRKAMMKLGMKPVTGVSRITIKRAKNILFVVSKPHDVFKSPTSESYVIFGEAKIEDLSSQLQAQAAQQFRMQDLSKVMSKPDAAAAAPADEEQEVDETGIEPRDIDVVMTQASSSSPPPYRRHRRHRVIRRRVVVACPSVSSSPPPRRRRRVARRLLLSRLTLVVSSAAGRLAHRTKEKSV

SEQ ID NO: 187798 - protein, 83 aa, Oryza sativa
  Clone ID: PAT_MRT4530_84466C.1.pep
RPRSRKSTNILASPELGGYHNIHAVIGLQRDPAIELTKHYSSELPPLMLMLHPSYTLFQDLASPASWVPLGLCPPSALSQELP

SEQ ID NO: 187799 - protein, 185 aa, Oryza sativa
  Clone ID: PAT_MRT4530_84467C.1.pep
MANASVPKPAKRLSRKRSFRLGLPLLCGQSDVASPRGGGGAAAAARSSSSGRRQGELHRIFQHFDRDNDGKISGAELSAFFASMGDEMPAPSPGGGGAAAGYMLDFAGFVALMERGDSQEEDLRSAFEVFNAVESAGRITARGLQRVLAQLGDERSVADCEAMIRAYDVDGDGGLDFHEFQRMMS

SEQ ID NO: 187800 - protein, 171 aa, Oryza sativa
  Clone ID: PAT_MRT4530_84468C.1.pep
RRRRVCISIAFLLRILSQKTERNMLVTRSRLFGVSQLRKSSLKHLLKFRSMSDQSSVLAADDTETSWAMSDQSSVPAGKATEFSLGDFPKHLRKLPPWIQEPASVHEVNDTLKHIAETSNEFKLLSSDCMQKKIFEQEIRPFLLSRGLLCTSPMGSSFVKGLHKMNHTIHH

SEQ ID NO: 187801 - protein, 2360 aa, Oryza sativa
  Clone ID: PAT_MRT4530_84469C.1.pep
MGEEDAPEMPDASPRLPWEPGGVEHFDAALLGDAAYIVDEEEVSDVEMSEGSPVAPSESSALPSPPSLRKRLAPVVPSDVPEEVVRAVDAVIMGGGLERLREMVSGEDGELSHFVVDVLMLTMGGVDGLDEGAGDGAVTLPSIMSSSRAAAIAAELLPYIPCGVEPSPRTRMARALLATLSSCTRNRTMCTSSGLLAILLDAAEKLFVGMGQRSKWDGAPLVQCIQMLGGHSVSVKDLHSWLLLIKKTLGTCWATSLTLALEKAVGCKEAKGPAVTFELGGEGSGLLAPAESRWPFSNGFGFATWIYVESFSDSLNTGMATAAIAAAAASTSGKSSPSAAAAAASTLAGEGTKHMPRLFCFLTMDNHGVEAYFHGQFLVVESGAGKGKKASLHFTYEFRPQCWYFVGLEYTSKQALLGKVESELRLYVDGELHESCPFELPRILKPLAFCCIGTNPPPTIAGLQQRRRQCPLFAEMGPIYIFTESIGPERMSRIASRGGDALPSFSNGSGLPWKATNAHIRHIAEDNYTLDIEIGGSLHLLYHPSLLNGRFCPDASPSGSTGTHRRPAEVLGMVHLSYRVRPAESLWALAYGGPMALLPLTVSNVEMDNMEPILGDLSSSLATASLSVPIFRIISLATQHPGNKEELCRAHGPELLSQVLHYLLETLSRLESGEKEILSDEELVAAIASLCQSQKNDHGLKVQLFSTLLLDLKMWSSCNYVLQKKLLSSLADMVFAESACMHDANALQMLLDGCRRCYWVIHEADSIDTFTFTGTERPLEKVNSLVDELLVVIELLLGAVSSTLASDDVRSLVGFVVDCPQPNQVARVLLLIYRLIVHPNTSRANVFAQSFISRGGVEALLVLLQREAKSGDNNISDSCIVPQNSLWNAGSDPKSISSDLDLKTTAGEANCNGHKTQPLEHHEPPCHEGSTEPGFSSKWCLLKNQFLKNLGGIDFLNIADNVQNDIYNIDNGDGVLVGIVHVLGALVASGHLKFNLPAAKPKLPSSFLTTSNGEGNSMFEDRVSLLLFAMQKAFQAAPRRLMTRNVYKALFSAVINVPSANGSLKLHDSGHRVKHTPLLSVLLRSLPFASRAFQAHAIQDLLYLGGTNNENRIALTSIAEWPEWILEVLISNHEDVEATIHCAEWLSMVGGSSTGDQRIRREESLPIFKRRLLGNLLEFSAQELQVQNSKIIFPDLSFSLGRSIALPNKHRDKQVSENSSSITHEFILRDIAHIVSMKQTEGINAAAAGVAEEGMMPKETKIQADKATHLSLALAENAIVLLMLVEDHLRSRSQHYFLSCSIDSAASPASGASSAATRSNSLSRTGSEPLDAGGSRQSLSSDAGGLPVDVLASMADANGQISSEVMERVTAAAAAEPYGSVRHAFVSYGTCISDLSEGWKYRSRLWYGVCIPPKSNIFGGGGSGWESWKSVLEKDSNGSWIELPLVKKSIAMLQALLLDSQLGGGLGIGGGSGAGMDAMSALNQLLDSDQPFFCILRLTLASIREDDNGEDDIFMRNISMKNVISEGLGCQTGSMMIHDDNSCSPSRKPQSALLWRVLGPILNMPVSESKRQRVLVASSIIYSEVWHAVSSDRKPLRKKYVGLIMPPFVAVLKRYRSVLAGIHELTSSDGQNPLVVDDCALAADTLPIEAAVSMISPGWAAAFASPPVAMALAMIAAGTSGTETIAPPTNKLRRRDTSLLERRSAKLHTFSSFQKPIDATPNLPTSAPKDKAAAKAAALAAARDLERSAKIGSRRGLSAVAMATSGQRRAAGDIERAQRWNTSEAMCAAWLECLQSADSKSVSGRDFSALSYKYVALLVSSFALARNLQRVEELLTCEYTIEATFGHADGEANTVNKRKKNILAVNTMHAFFSYRHLDLLYYFSTQIFWKLDSTETSSRMRRFMKRNYKWSEHLSMANNYEENMLLCDGAESNYSHREDADSLFANALRTNSSIIVADAISVDGGHGNAKQTETETIYSSVDDSTSSDFSSVHNLVRSTVVAPCYSSSKNNERIIVELPSLMVRPFKVVRGTFQVTSKMINFIIDEHMSDSDSYMDDAASTSGQYDQQDKDRSWFISSLHKIYSRRYLLRRSALELFMVDRSNFFFDFEDTEACKHAYRAIVHTKPPYLNSIFLATQRPEKILKKSQLTERWARWELFMQYPVFPWVLADYHSKTLDLEDPSAYRDLSEPIGALNPARLKKFQEHYSSFNDPTIPKFHYSSHYSCPGTVLYYLVRIEPFTALSIQQQGGRFGQDDHMFSCINKTWNSVLEDMNDVKELVPEMFYLPELFTNVNSVDLGSTQLTGKLSSVQLPPWAENPVDFICKHRKALESDYVSAHLHEWIDLIFGYVIYVLFLFVATS

SEQ ID NO: 187802 - protein, 73 aa, Oryza sativa
  Clone ID: PAT_MRT4530_8446C.1.pep
HLAALARRAHDWNLTECARPAPHRDAHRSSKRRPRSCSPCINSGPRILRETRLDRCASYGHIAYTNPCSHCAL

SEQ ID NO: 187803 - protein, 217 aa, Oryza sativa
  unsure (1)..(217): unsure at all Xaa locations
  Clone ID: PAT_MRT4530_84470C.1.pep
NPIAAAAQRHFSKWVEKPEFVFALAYKITRDFVDSMDEILQPLVDKANLVGYSCREEWISGMVITLSTYLVKEIFPKHIELLQEISSADASSKQSQARVSWLNLIDLMISFDKQTQALISSSGLLLFGWRDDGNXAGGSRVLSVFCDRPDWLEIWAEIERQDTHDKLRLSMENEKNWNTRFQGTVLEYGSDDYKSPAITGVIQKGLSLLIDRARPIP

SEQ ID NO: 187804 - protein, 34 aa, Oryza sativa
  unsure (1)..(34): unsure at all Xaa locations
  Clone ID: PAT_MRT4530_84471C.1.pep
XGSVAPEHLKFFRAHIEGKALSTGPIKFYKGQLC

SEQ ID NO: 187805 - protein, 67 aa, Oryza sativa
  Clone ID: PAT_MRT4530_84472C.1.pep
SSASLASLHHTLEKVIVQVSSRAMIDQRGGTYVLHYMFDRSIDFFFFQCRSDALPFILSLSSGRTPV

SEQ ID NO: 187806 - protein, 84 aa, Oryza sativa
  unsure (1)..(84): unsure at all Xaa locations
  Clone ID: PAT_MRT4530_84473C.1.pep
HSATICLFLKKQEREGCQYIAIKTNGKAFVSXITGKNSVFRALPVDVVDNAYRISREQAQSLKNNREEEHGAFSPRFHHQCYPG

SEQ ID NO: 187807 - protein, 64 aa, Oryza sativa
  Clone ID: PAT_MRT4530_84474C.1.pep
MVRIIVPAVDSRCKSKVHPVRHQADRWTRWAVISLVTYDGLCRNCGGRRNRAVGDSAFSFIFRD

SEQ ID NO: 187808 - protein, 84 aa, Oryza sativa
  Clone ID: PAT_MRT4530_84475C.1.pep
RSCAASVSRSTYNKTMHMTCTNDLLGVEQDGPWTCSGYQLLAQLSAPSPITSKMTAYLIPIGIYSFCLNPAMYCLKIYMHSNFV

SEQ ID NO: 187809 - protein, 99 aa, Oryza sativa
  Clone ID: PAT_MRT4530_84476C.1.pep
NSISCQFPSLHSIPPLYRLGAFMHSKHFQGRVPSFWRVSMSVAGGRREASSSTTHSSFPSLDNPAGSYLQCPINSETSSHCRWAILKTSSVVVMLAWGN

SEQ ID NO: 187810 - protein, 68 aa, Oryza sativa
  Clone ID: PAT_MRT4530_84477C.1.pep
ALLCTHNSFSEVLPCNALAIPDFFSNSKVALPIYFRGEEPVLELYCVHFILLVTGNCCTPYSENSGPY

SEQ ID NO: 187811 - protein, 68 aa, Oryza sativa
  Clone ID: PAT_MRT4530_84478C.1.pep
GRVRALLSNTMGVLRHGTRIWWIDRTPVSHSQCVLNYCSIIVKRSQPIFAGCCLKLIDQDFYVPDNYL

SEQ ID NO: 187812 - protein, 313 aa, Oryza sativa
  Clone ID: PAT_MRT4530_84479C.1.pep
MASDGTDVVALYGGANGLSHKSGSFSVKVGLAQMLRGGVIMDVVTPEQARIAEEAGACAVMALERVPADIRAQGGVARMSDPGLIRDIKRSVTIPVMAKARIGHLVEAQILEAIGVDYVDESEVLTLADDAHHINKNNFRVPFVCGCRDLGEALRRIREGAAMIRTKGEAGTGNVVEAVRHVRSVMGDIRALRSMDDDEVFSYAKRIAAPYDLVMQTKQLGRLPVVQFAAGGVATPADAALMMQLGCDGVFVGSGIFKSGDPALRARAIVQAVTHYSDPKILAEVSSGLGEAMVGINLSDPKIHVERFAARSD

SEQ ID NO: 187813 - protein, 1068 aa, Oryza sativa
  Clone ID: PAT_MRT4530_8447C.1.pep
MATAKQAPENESPPPPPHCWIYPECTLVTRSCCLLLRLKLLRHGHPLHLGSHGGRGQPGSREAVGKDVDQRGLLELLDALLMVMEGHDHEASRCRAFIGGDAMVSHHMLIVGVCAGVIGMRNLGFGTAVCGGSDCMKKDRNVQPRFNWPWRSESPLSAQLLIDIPPEIELSDYRRLPGSGSESPSGLLHGEGFKDEPIADLDIFFERLYEYFCAKGLRCIVTKWIIEMLNVLFMVCCIGFFFLIVDWNALGHLKCGVEALESGEKPCDLMQVVKHNPLVPFTFPKMITIGSMVILTTYGLINFLKFFVQLRSTLNIRDFYCNSLKITDLEIQTISWPKIIEKVVLLQKSQKLCVVRDLSEHDIIMRIMRKENYLIGMVNKGIISFPIRPWVPGAGPTVKSHLQNRRNHLILPKALEWTLNWCIFQSMFDSKFCVRKDFLTSPAVLKKRLVFVGISMLILSPCLVIFPLVYLILRHAEEIYNHPSTASSRRWSNLSRWIFREYNEVDHFFRHRMNNSAVHSLNYLKQFPTPLISIMAKFISFVSGGLAGALIIIGFLGESVLEGHIFGRNLFWYTIVFGTIAAISRKVVADELQVIDPEGAMCNVVQQTHYMPKRWRGKEDSEVVRREFETLFQFTIVMLLEEMASIFISPYLLIFEVPKRVDDILRFISDFTIYVDGVGDVCSLSLFDFRRHGNRNYASPFDALKTLRSSQGKMEKSFLSFQSVYPSWEPNAEGKQFLTNLQKFKEKQIRQQALAQYQAMEASGFVASTRGHRDDIFHQLLPSDIHTRAEAISPAVYNLGPLGLLDTDQRSHPYILDWYYVCHPPHLDRTEAPYFNEVFPETSENTGSAAFKASEIEEARGWDSDMVPPPRADRDEWNFNHERVRSHMDASTSSNLFHHAPVEHHDTKGNIIDWWDQAPEHSTGQQGSFLEPPEFGNRYVAGNRSSYHSGDVSDGSVEELERSYNRSSSSWRRPQDLSTTRYMDDSDIEEGLNLPFADLPQKDEDARHGTSDTNDPTPVGLPEYSIKQSGHAVDPVIDQQPKLYEGIRCWGPLPWSSRRARVEAEGSV

SEQ ID NO: 187814 - protein, 318 aa, Oryza sativa
  Clone ID: PAT_MRT4530_84480C.1.pep
MATDGTGVVTVYGSGTNGAALLEPSNHKSATFSVKVGLAQMLRGGVIMDVVTPEQARIAEEAGACAVMALEHVPADIRAQGGVARMSDPGLIRDIKRAVTIPVMAKARIGHFVEAQILEAIGVDYVDESEVLTLADDAHHINKHNFRVPFVCGCRDLGEALRRIREGAAMIRTKGEAGTGNVVEAVRHVRSVMGDIRALRNMDDDEVFSYAKRIAAPYDLVMQTKQLGRLPVVQFAAGGVATPADAALMMQLGCDGVFVGSGIFKSGDPARRARAIVQAVTHYSDPKILAEVSSGLGEAMVGINLSDPKVERFAARSE

SEQ ID NO: 187815 - protein, 85 aa, Oryza sativa
  unsure (1)..(85): unsure at all Xaa locations
  Clone ID: PAT_MRT4530_84481C.1.pep
LNNGDAGMVQIVPPKPMVVXPFYQHPPFGPFPVRNMRQTVSVGLLKNVKNQDPPGPKVPKTTPKKKLASFKWWLSRPPFINFSVH

SEQ ID NO: 187816 - protein, 320 aa, Oryza sativa
  unsure (1)..(320): unsure at all Xaa locations
  Clone ID: PAT_MRT4530_84482C.1.pep
MATDGTGVVTVYGSGTNGAALLEPSNHKSATFSVKVGLAQMLRGGVIMDVVTPEQARLAEEAGACAVMALERVPADIRAQGGVARMSDPGXLIRDIKRAVTIPVMAKARIGHFVEAQILEAIGVDYVDESEVLTPADDAHHINKHNFRVPFVCGCRDXLGEALRRIREGAAMIRTKGEAGTGNVVEAVRHVRSVMGEIRALRNMDDDEVFSYAKRIAAPYDLVMQTKQLGRLPVVQFAAGGVATPADAALMMQLGCDGVFVGSGIFKSGDPARRARAIVQAVTHYSDPEILADVSAGLGDAMXGINLNDQNVERYAARSH

SEQ ID NO: 187817 - protein, 403 aa, Oryza sativa
  Clone ID: PAT_MRT4530_84483C.1.pep
MVFPSVPAYLDPPNWNNQQGQPPRPANVGGGDAQHLPVGPTAAAAAPGEIGGLPTSSSSASAAAAAAQQARPNSMAERARLARAPQPEPALKCPRCDSTNTKFCYYNNYSLSQPRHFCKTCRRYWTRGGSLRNVPVGGGCRRNKRSGKSSSAAAAGASSSSSKPSSSAARQLPGGGASPMPSAAASTQPGGAAAGAIIPPSGLSSMSHHLPFLGAMHPPGPNLGLTFSAGFQPLGGMHHHVDTADQFPVASGGGATIGASLEQWRVQQQQQQQPQQHQFPFLGGALELPPPPPMYQLGLEATRAAGTGATAAAAFTLGQTSATATTSRQEGSMKLEDSKGLEMSLQRQYMAALRQGDGVWGNNNGGNGGSDGGGNGGGGSWTMNFPGFHSSSGGGGDDGGGVL

SEQ ID NO: 187818 - protein, 103 aa, Oryza sativa
  Clone ID: PAT_MRT4530_84484C.1.pep
LYTHLFFMLSMSLSTSFMVGPVENKLFMGPLPLTDRPEELKTSLLTTTEEPSQNNTGPFSTGRAGSLLHALTRRPAAATCYIWEAVASSRGGGAGGHTAKPLF

SEQ ID NO: 187819 - protein, 57 aa, Oryza sativa
  unsure (1)..(57): unsure at all Xaa locations
  Clone ID: PAT_MRT4530_84485C.1.pep
SIVSREMTRRYXTFLFSYXDTVLVVFGACSVVLFCAYDLFKDPFVSVAVIEQVVSPA

SEQ ID NO: 187820 - protein, 100 aa, Oryza sativa
  Clone ID: PAT_MRT4530_84486C.1.pep
ISKSGSSVWGHKESPVRLLFYIPMWRDRQRLDQTPETTRRPHGVPKSPEVLTTREHLPVKCTGAGDISGRGRHTNPSSTHTKNLTPEARHPQERSPTHRG

SEQ ID NO: 187821 - protein, 82 aa, Oryza sativa
  unsure (1)..(82): unsure at all Xaa locations
  Clone ID: PAT_MRT4530_84487C.1.pep
KRKKGQGGGEKKEGPHREERTGGKKEERGXAHTQEPRRKRLAHDLSPHHLHKSTNTSSARRCNARRLELLRCWVEMRPDAGS

SEQ ID NO: 187822 - protein, 53 aa, Oryza sativa
  Clone ID: PAT_MRT4530_84488C.1.pep
HTYALIHALDFYLQLYDKLRRACGLTVDRTSTTPFKPSSSTSYTTHDSHCHSY

SEQ ID NO: 187823 - protein, 477 aa, Oryza sativa
  Clone ID: PAT_MRT4530_84489C.1.pep
MLGPGGNVVLMWNRVFLVCLRSFLDIFFIAHIAISFSTAHVDPSSKVLGRGELVTDPKKIANRYIRTNFFIDLVAALPVPQVLVWIAMPSISFKHINAPFFLIILVQSAIRLYIVILLSLSIMEMVGFIAKNGWEGAIYSLVLYLVASHVVGAIFYLTAVDRQKTCWETQCSIEDRMAHKGLTYGNPLVTSSFIGENLFAIGLTLLSIGLFAQLIGNMQGVEEDSILRQLPADLHRDIKRYLCLDLVERVPFFSAMDHQLLDAICERMTYFLRTEGTYITREGDPVKVMLFIIRGKLESSTTDGGRTGFFNSIILKPGDFCGEELLTWALLPSSRDSYPSSTRTVKTIAELEAFSLQADDIKCVASTFRMMHSKHLQHTFRLHSYQWRTWAARFIQSAWRRRQNRQKMAEVGLSNRWKSFFSLVNDFNDTRCEDINGSSSTVSHRETVTVSKIASIFKKAQKERPEEPDFSEDHHPE

SEQ ID NO: 187824 - protein, 134 aa, Oryza sativa
  Clone ID: PAT_MRT4530_8448C.1.pep
MVIIITSFLLPDLVLLISSSYLLTRGQATEVLEKGNIRLQDREIAGLEEQIRTLRMKLQNHESYEEQKRREYYNLESEYNKLHSSYRNLQACHHNLQTSYHNLEARHNALRWQMSWPGRSGRLSNRLRLSLPQV

SEQ ID NO: 187825 - protein, 244 aa, Oryza sativa
  unsure (1)..(244): unsure at all Xaa locations
  Clone ID: PAT_MRT4530_84490C.1.pep
TYCNPLVTSSFIGENLFAIGLTLLSIGLFAQLIGNMQIHMRSLSKNTEDWRMWQTEMEDWMIDHQIPDELRYRISQFFKYKWFATQGVEEDSILRQLPADLHRDIKRYLCLDLVERXVPFFSAMDHQLLDAICERMTYFLRTEGTYITREGDPVKVMLFIIRGKLESSTTDGGRTGFFNSIILKPGDFCGEELLTWALLPSSRDSYPSSTRTVKTIAELEAFSLQADDIXCVTSTFRMMHSKPL

SEQ ID NO: 187826 - protein, 211 aa, Oryza sativa
  Clone ID: PAT_MRT4530_84491C.1.pep
MAEGDEWARHRCIVAPAFSATNLNDMIGVMEETTSKMLGEWSDIVALGHSCIDIEKGVVRNAAEIIAKASFSIAADDATAWKLGRKIDALLLDIIESRRRCEGGGRKTTTTDLLWLLLAGNEASAAAERKLTTALALSWTLLMLATHPEWRAAVREEVEEVTGWSGPMDAAAMGKLTKMGCMLNEVLRLYPPSPNVQRPAACDAEVVRGKR

SEQ ID NO: 187827 - protein, 132 aa, Oryza sativa
  Clone ID: PAT_MRT4530_84492C.1.pep
MSSKIVLKLKDFTRIWISREESMLDPGGNVVLMWNRVFLVSCVASHFIDPLFFFLPIVERRDRQLCMTMDHHLAIILTCLRSFLDIFFIAHIAISFSTAHVDPSSKVLGRGELVTDPDELRYRISQFFKYKW

SEQ ID NO: 187828 - protein, 153 aa, Oryza sativa
  Clone ID: PAT_MRT4530_84493C.1.pep
MFLLIMNIYSALVCCYWVIRLGTMLNVCFNMQDSFHSLLHKADGKRSEWEYPFAVAGVNISYMLVQMLDLQSGKMGTKVSSQFVQLLREDEMAFDNLFCMAFQMLDAQWLTRQASYMEFNEVLKSMRIQLEQELTIGSISCVQEMPSFRLLKR

SEQ ID NO: 187829 - protein, 483 aa, Oryza sativa
  unsure (1)..(483): unsure at all Xaa locations
  Clone ID: PAT_MRT4530_84494C.1.pep
MNCGPPDQLPPATAPSCFLNLNWDQSMDAAAGGHLDPALSSMVSSPASNSTGALHGISPQPHYGGGTPLSSPPKLNLSMMGQFHHYAAPPQVGGGGGGGGGLPILENLMPMGHLDQFLADPGFAERAARLSGFDARGGGGGGGYGGAGPAQFGLPDAGAAGASKEMELGNTRDESSVSDPAPGGAEIPPKGASDGNARKRKASGKGKGKDSPMSTSAAKEDSSGKRCKSTEESNAAAEENSGKGKAAQSNSENGGGKKQGKDSSSKPPEPPKDYIHVRARRGEATDSHSLAERVRREKISQRMKLLQDLVPGCNKVVGKAVMLDEIINYVQSLQRQVEFLSMKLATVNPQLDFNNLPNLLAKDMHQSCSPLQSSHFPLETSGAPLPYINQPQQGNPLGCGLTNGMDNQGSMHPLDPAFCRPMGSHHPFLNGVSDAASXRLVLSGKMISKVLFRWIWGKVRRSPPLPIATMXVANSPHENGALT

SEQ ID NO: 187830 - protein, 287 aa, Oryza sativa
  Clone ID: PAT_MRT4530_84495C.1.pep
MASKAIKRKPYTADIDRSEKQMETIIPDSVREPLLGNRTHESKSERHEPNMQPNLWDGKGQERLGWMHVISTFIAQSVRKIGNALSQFGPLLAKFFSRSCASHGSHDEQAVLLDLSPLQEERLRFLRQRLNVPFDSSSVKHQDALKELWRLAYPSRQLPPLKSDLWKEMGWQNSDPATDFRIPFTVYYTRRMLYAELQLISFTSFVGKMGTKVSSQFVQLLREDEMAFDNLFCMAFQMLDAQWLTRQASYMEFNEVLKSMRIQLEQELTIGSISCVQEMPSFRLLKR

SEQ ID NO: 187831 - protein, 65 aa, Oryza sativa
  unsure (1)..(65): unsure at all Xaa locations
  Clone ID: PAT_MRT4530_84496C.1.pep
ANCSQFSDVFSDSKLHIICRQSHSAPLTQHCVVIXVPLVNPCAPNTHFQSTPIPIRLLSILIVIL

SEQ ID NO: 187832 - protein, 84 aa, Oryza sativa
  Clone ID: PAT_MRT4530_84497C.1.pep
LRLTNCHAHACSLRITTTCPCSPNTSTLHPEMPPSWQRQAQRQDHPRTRQFDAPHYPHLPIIQDSLSLLHGSPAEPKPAATQDC

SEQ ID NO: 187833 - protein, 569 aa, Oryza sativa
  Clone ID: PAT_MRT4530_84498C.1.pep
MEVAECSEKLQILKASASASMAYSIVQFPVKWQSIKYKLQQLCSNLNAPGDDGSCNENVILVQFLQTATATVSHIQAIASQCSDESYNGGRLRLRSDLDSISSKLDIHLKDLKEMVSSRISVRSQAVIATRPAIGASLSNKRFYINDLFLRVRIGDLAQRKQALVTIGELLSEDIEYVKIVALDIDNSITLLISFLESGDACIQEQAARIVSLIAGYDSYRGMLVKAGVVAPLVQLLDSPSCTSTTVSSRERAAHALRELTSNSDNVWAVCAQGGVTVLLIVCANVDSRGKLVSSAFAVLKNLSRVEEVKMFMVEQGAVMELVKLSRQKEEERKVGSVELLHYMALADANVRQAAISMGMIQSLTQLMNPDLPYSSKAREVALSAIAFFCLPSKALTDDLISSNFLSWLQTYLNNVDYAVLECTLNILVRLTRISEEYSKMVGRAGFMTALVSSLGAKSCQVREMAAQVLCNLLLLHSNRVVFIQDGDNLNRLLQSLEHGDGKTMAKDLAISCLVSLAETSAGRKKIISSQHFVSLKGLADSGDLPAKKIVKKLCANKLQSILTRIRIT

SEQ ID NO: 187834 - protein, 337 aa, Oryza sativa
  Clone ID: PAT_MRT4530_84499C.1.pep
MGELTKKVTMEKEEEHGGGMAAGKEEKQQPTLKKQQQVGKVKKKFLDFAQELTWEEKVVSVLDIVRRYQLAEYDPKLKEFTPTRVSFCFCNMAFFDHDKESKISPGSPIRTIPSSKFVMLEGSVNVIAIKEDTLTLTGPKRGLATKGSMYFEFNLKIKGDGATDKDFSKGFIEHDAVAYEKPLKTLELESFMSRVAFIYTPVPYAVQATLAVNFLEGLSNFTGTVSAWTTGNVENEIILYDSRVEGTETTVRNDGRVTLTRNIVAVVCKHKLVLKVCVFEGGSEVACFKFVLGHRNEECTRKKGPYVLQVKVRWIGIIEHYNRKMWERIGRFGNILW

SEQ ID NO: 187835 - protein, 49 aa, Oryza sativa
  Clone ID: PAT_MRT4530_8449C.1.pep
SGSPGCRSKHDICHLNLSALSVLRVEAMSSGGCLLIFCQMDRLLSRDLK

SEQ ID NO: 187836 - protein, 384 aa, Oryza sativa
  unsure (1)..(384): unsure at all Xaa locations
  Clone ID: PAT_MRT4530_844C.1.pep
MTAPPPTSPSSPPPPRPPRVSSRAPTSPRPPSGPDGPSRRGPPPSALPRRPRPLRLRLPPMVPRGDDGAASAAPGSPVAQLPRRYPPELPRRRATPLQPPQPAXRSAPAPPPPAXPLQAAGARPSPPPLPQEPSHRRGRAPPGPLPLRRPGPPPPPTPAXDPPPPTSTSASPPPSPPHPRPQPPPPGSSDLPTDVAILPSPPHPRPPPPPCXVGPPDGPRRPVAPRRAPATPXPPPPPWLLILRSPCVYQSLPDGELRPVPGANSSRAIPYFSSYDDGWLLEYQCFGRRDRIRDGGRRRGVLRGASWKPPRRSLTSPSPTWARPSTSFAAAAAAGATARLVGPPGGPRRPDRLLAAVPPRPPQLRRRLQPVAPRRAPAAPAAAA

SEQ ID NO: 187837 - protein, 270 aa, Oryza sativa
  Clone ID: PAT_MRT4530_84500C.1.pep
MADEEQVERKEEVSELTPFDPTKKKKKKKVVIQDPSDEVDKLAEKTESLTVAETGEPSFTGMKKKKKKHVEHDTSLTEAGDGEDAIDDQIGEDEEGEGIVLGGATRYPWEGTDRDYKYEELLGRVFNILRENNPDLAGDRRRTVMRPPQVLREGTKKTVFVNFMDLCKTMHRQPEHVMMFLLAEMGTSGSLDGQQRLVIKGRFAPKNFEAILRRYINEYVICNGCKSPDTILSKENRLFFLRCEQCGSSRSVAPIKAGFVAQVGRRKAGT

SEQ ID NO: 187838 - protein, 138 aa, Oryza sativa
  unsure (1)..(138): unsure at all Xaa locations
  Clone ID: PAT_MRT4530_84501C.1.pep
TCPTGISYPSFLLPQGRTLVRRQCVRRGAVSSADEQVXQDCCRQLVAVXTRWCTCXALDHMLLGIYRELGATRVPTPHGLKRPRXRRGDLKHPRXSLPDLCNEDISNGPGGVCYXLAYSKTPRTRHYATITSCECVTI

SEQ ID NO: 187839 - protein, 286 aa, Oryza sativa
  Clone ID: PAT_MRT4530_84502C.1.pep
MADEEQVERKEEVSELTPFDPTKKKKKKKVVIQDPSDEVDKLAEKTESLTVAETGEPSFTGMKKKKKKHVEHDTSLTEAGDGEDAIDDQIGEDEEGEGIVLGGATRYPWEGTDRDYKYEELLGRVFNILRENNPDLAGDRRRTVMRPPQVLREGTKKTVFVNFMDLCKTYDLTFLPLHTICSRPAFISEKINYHELTEIIVYTSRMHRQPEHVMMFLLAEMGTSGSLDGQQRLVIKGRFAPKNFEAILRRYINEYVICNGCKSPDTILSKENRLFFLRCEQLYMVL

SEQ ID NO: 187840 - protein, 95 aa, Oryza sativa
  unsure (1)..(95): unsure at all Xaa locations
  Clone ID: PAT_MRT4530_84503C.1.pep
TSTRPIKVILANLNGXEDIFDFXYHVMSSPWRSLNTVLXRSTRISLNKMPPHYWTYFNRIKKPSTAYTCVKRXWVEDNNCYQTLLARAIIWITGS

SEQ ID NO: 187841 - protein, 102 aa, Oryza sativa
  Clone ID: PAT_MRT4530_84504C.1.pep
QNNRQGLKESKRETGPCAKLLPQECFSTGYASTITISSSSPLSFSSYLNDIDASLSCRVHRSQLQHSRGAAPFQMVEGAISHDCLRFAGEFRKVKHAFLRPS

SEQ ID NO: 187842 - protein, 169 aa, Oryza sativa
  unsure (1)..(169): unsure at all Xaa locations
  Clone ID: PAT_MRT4530_84505C.1.pep
RSRLVVAVKDAYRVRVESSRCERQESFFLVREGLVSTHGYXNMYTWGHCKLXHRSIQLLSAHLHPLYRGFYLSXGGTWHQMRGCIGFRSPAKGXSYVPPAPANYIGYIXVVQGCIXHSTSWIALVXLIYFPTYLSYILVNLVKHLYLIISAEIRLGLMXYRLNYLARLD

SEQ ID NO: 187843 - protein, 1516 aa, Oryza sativa
  unsure (1)..(1516): unsure at all Xaa locations
  Clone ID: PAT_MRT4530_84506C.1.pep
MYIPTIQHHHQLQPPTMMHQAAGPTRKTTVKITHPDTHEELKLDKRMDSSGQRGLPSVQQQSQPGPRFVSTQTVSYISPSMNTGPGSNKDNLAGSTTSGHSQVTGKPHPAGLHMEKSGVQTVTISAPPGKSDVNKLKPAEDVVSHRQKDNEAVSGVRKSGENESKASPITEKHPTPVSQPLQALAANPETTAAASFVVNSVPGDDGKSKESIQRTGSFKDSNKNATKDTRNLSQEPQSASSAEDLKVHTSVKDVCCGVSLMESKAADASSIDRSSARSTSESTENVQEVGKSDVAIGDSEKSGITNKVSPDLTKDDISSGSTGNESHEVCTLDLAEQLPVGASNPDNLDTATSVTDQGQLLKEPSSSVSDENVIMDRSHQSAEKMSDLVDDTVASVASSETLPESIIQNANAKGNTSGNQETGSATSSNILNVLPVPHSVASEDPLKPETVKKKKRREMLSKADAAGSSDLYNAYKGPEEKVDFIGASESLDSSSIADHELPDESSEKEVNMGEDEGKKKVELDDWEDAAEMSTPKLERSDSSNQTTEANGRKRYSRDFLLTLAQSCTNLPVGFQMIEYASVLFPNLAGKSYVVDHPSPGRGADRPASRGDRRGVVIEDDRWGKSGHLFGSGRDMSMDNGPPTMNHRGAPGVMRNPRGGLINVGPVAPQMSRSGSDADRWQQKGIFPSPVTPMQVMHKAEKKYVVGKVSDEEEAKQRQLKAILNKLTPQNFEKLFEKVKEVNIDNVATLTGVISQIFDKALMEPTFCEMXEFERGEREEAEADKTEEEEPXEENIEALCKLMSTIGEMIDHAKAKEHMDAYFDIMLKLSTSQQLSSRVRFMLRDSIDLRKNKWQQRRKVEGPKKIDEVHRDAAQERHAQSSRLARGSVVGSGPRRGAAPMDYGPRGSAAALASPSSQQVGHRGMPSHSRGFGTQDIRFEERSPLDHRTTVLPPRKDEAITLGPQGGLARGMSIRGQPLISNAELSSADSRRMVSGPNGPASQEGRSGNKLYSEDDLREKSISAIREYYRLATVLGSLEDALSDAPRAAEYLGRLLARFVVESILSLQEVGTLIEKGGEEPGELVHHGIGADVLGAVLESIKVEKGDSFLNEAKASSNLNPPTALAAPTTGGRRHDVLAGAGADLRPTSTRRRAPRGDLPPHRLARRPRTGLRRLVTGRSFLRRYRSLHKPAPLLGLLGHDGFHPAEPPHPSAAAAARALAQAADFTFSFLPSPCRWIQQDCRDGRVLLERSLSDNDDAGEGELVPFDTRNMADLAVCDPVSRRYVILPPIPDDLITSGEQEGLLVFETFLAPAAKEEEEMVGTTSFRVVARANYESKVVIFVFSSLTEEWHSSRSVSWSLLTADPWLSSTAQAHLWFFPRYYAHFVYWVMHLVDMLLVLDTSKMAFFTINFQLVWFNEKECSGARKEYLGRHEATTDVRQIVAFGAFQPVDPTSLYTENILPPDELLEEILLRVGSPADLARVSTACAAFRRIVTSRSFHVCPYFRFSPPSAKPCV

SEQ ID NO: 187844 - protein, 86 aa, Oryza sativa
  Clone ID: PAT_MRT4530_84507C.1.pep
MQIFVRTLDECITLEVEGSDTIGDVKVKIHDKNGIPADDQRLMHAGRQLDDRRTLADYGIQTEHTLRLAIRLRRRGQPPHTRAQAQ

SEQ ID NO: 187845 - protein, 150 aa, Oryza sativa
  Clone ID: PAT_MRT4530_84508C.1.pep
RELYKKRMLTERIMHECIKKLLGNYQNPDEENIEALCKLMSTIGEMIDHAKAKEHMDAYFDIMLKLSTSQQLSSRVRFMLRDSIDLRKNKWQQRRKVEGPKKIDEVHRDAAQERHAQSSRLARGSVVGSGPRRGAAPMDYGPRGSAAALA

SEQ ID NO: 187846 - protein, 230 aa, Oryza sativa
  unsure (1)..(230): unsure at all Xaa locations
  Clone ID: PAT_MRT4530_84509C.1.pep
MVSGPNGYNSASTAREEPGSRIPDRSGRIAPNTQFAGPSNRPASQEGRSGNKLYSEDDLREKSISAIREYYSAKDEKEVALCIEELNAPSFYPSVVSLWVNDSFERKDMERELLTKLFVSLCNSRNNLLSKSHLTAGLATVLGSLEDALSDAPRAAEYLGRLLARFVVESILSLQEVGTLIEKGGERERELQQSGIGADVLXAVLESIKVEKGDSFLNEAKASSNLKLEI

SEQ ID NO: 187847 - protein, 53 aa, Oryza sativa
  Clone ID: PAT_MRT4530_8450C.1.pep
VAPSCRSKPGGTRWVLRGTRLCLSRQWSPPPPRCPAKRANVQWHEVRAWATSR

SEQ ID NO: 187848 - protein, 2160 aa, Oryza sativa
  unsure (1)..(2160): unsure at all Xaa locations
  Clone ID: PAT_MRT4530_84510C.1.pep
MEEEEHRGVVLVCSICGFLFAVLGPLSFWILWAVNWRPWRLFSWIYARKWPAYVQGPQLSTLCSFFTLFAWLVVVSPITVLLVWGGILIALLERNIIGLAVIMVGVALLLSFYSIMLWWRTQWQSSKAVAYLLLLAVGLLCAYEFCAVYVTTGASASELNSPSGFFFGVSAISLAINMLFISKILFNGSGFDVDEYVRRLYKFAYSDCVEVAPVSCSPDPPDPSELYMTKSSRVLHLGLLYLCSLMVLVVYSILYGLTSKEARWLGALTSVAVVILDWNLGLCSFRFELLKSRMIALFVAGTSRVFLICFGVHYWYLGHCISYAFVASVLLAAAVSCWLSISNPSVARIDALRSTVIKLREGFRRKGQTSSSNSSDGCGSSVKRSSGSVEAGPHGNATDSMYRSNSQSDCVNWNNVPFDRSNSCQEGQSSDKNIDSGRASLAHRSNSCLSAVAVQDPETAVVSADRHGDPTASLVVCSSSGLESQGCESSGSATASGNQQLLDLNLAAIFQDRLNDPRITSMLKRNGGLGDVELANLLQDKGLDPNFSYMMKDKVMDPRILALLQRSSLDADREHQDDVDVTGTDSDRLDTTIANQISLSEELRRSGLENWLNLSRLMFHQVAGSPIRAFVVFTLIFIIETVTVAVHRPKPIKVINATHEQFEFGFSILLLSPVVCSIMAFIWSLCAEEMTMTSKPRKYGFIAWLLSTCVGLFLSFLSKSSVILGLSLTVPLMVACLSFAIPIWMRNGYRFWIPGGELDSRENIRQAPGKKERALFAISITVFTASVIGLGAIVSAKPLDALGYKGWDADKKSFYSPYATSMYLGWALSSTIAVLATGVIPIVAWFATYRFSPSSAICVGLFATVLVSFCGVSYWGVVNSRQDGVPLKADFLAALLPXLCIPAVFSLFTGMYKWKDDDWKISRGVYLFVGMGVLLLLGAISAVIVTIRPWTVGVACLLVILFLVFAIGVIHYWTSNNFYLTRTQMLLVCSLAFLLALAAFLMGLFQEKPFVGASIGYFSFLFLLTGRALTVLLSPPIVVYSPRVLPVYVYDLNFAGKXVDGHKLVQIRNPWANEVEWNGPWSDSSQEWTERXSTNLSMFHSQRMGYPGCLGKIFRSDAVHFLSKDTVVQAMSRSANKTRNAISGTYSAPQRSASSAALLVGDPAITLDRAGNFVLPRADVMKLRDRLRNEEITAGSFFCGVKNCLMIGSPVDVDYRRNMCAHARILALEEAIDTEWVYMWDKFGGYLLLLLGLTAKAEQIQDEVRLRLFLDSIGLSDLSAKEIKKWMPEDRRHSKLIEESYIMEKEIXEGVLIQMREEEGNMKQQLXLLNLNILGFIRRYMQPHKLDXLPNVXRKGHLSLSAGMVLIXSDSALEDSFARDRVSSIARHIRKAQLARPGSPIPCIGIPCHRVHTIELDELTLWCRFLLAKXALVQLGNTILACCSFADQGEQSSAIAFSLIACMXSKSSEQGMEAGQVGLRLVTKGERMTTVAKEWNIGASSIADGRWHLVTVTIDADLGEATSFIDGVYDGYQNALPLPRNNGIWEPGTDIWVGARPPTDLDAFGRSDSEGSDSKMQIMDAFLWGRCLTEDEVAMLHTAICSAEYGLFDLAAEDAWHGSYSARVDDWESEEANFELYDQEDVEWDGQYSSGRKRHARDSVAIDIDSFARRPRKPRFETREEVNQRMLSVERAVREALIAKGERNFTDQEFPPDDRSLFVDPMNPSLKLQVVSEWMRPSDIAKEVSISSQPCLFSGSVNSSDVCQGRLGDCWFLSAVAVLTEMARISEVIITPEYNEEGIYTVRFCIQGEWVAVVVDDWIPCESPGKPAFATSRKQNELWVSILEKAYAKLHGSYEALEGGLVQDALVDLTGGAGEEIDMRSPQAQIDLASGRLWSQLLHFKQEGFLLGAGSPSGSDAHISSSGIVQGHAYSILQVREVDGHKLVQIRNPWANEVEWNGPWSDSSQEWTERMKHKLKHVPQSKNGVFWMSWQDFQIHFRSIYVCRVYPPEMRYSVHGQWRGYSAGGCQDYDSWHQNPQYRLRVTGRDALYPVHVFITLTQGVGFSRKTNGFRNYQSSHDSSMFYIGMRILKTRGCRAAYNIYMHESVGGTDYVNSREISCELVLEPYPKGYTIVPTTIHPGEEAPFVLSVFTKAPIKLEAV

SEQ ID NO: 187849 - protein, 98 aa, Oryza sativa
  unsure (1)..(98): unsure at all Xaa locations
  Clone ID: PAT_MRT4530_84511C.1.pep
VDPVAPLGQGDRRRARSMPAPLHGPGRGVAGGGDGDGCGGEKVGDDGSGLRRVPXTPSSMTPATRTARCTSXPRHPGRIWTAGGWRRWRLTVATGRGD

SEQ ID NO: 187850 - protein, 2094 aa, Oryza sativa
  Clone ID: PAT_MRT4530_84512C.1.pep
MEEEEHRGVVLVCSICGFLFAVLGPLSFWILWAVNWRPWRLYSWIYARKWPAYVQGPQLSTLCSFFTLFAWLVVVSPITVLLVWGGILIALLERNIIGLAVIMVGVALLLSFYSIMLWWRTQWQSSKAVAYLLLLAVGLLCAYEFCAVYVTTGASASELNSPSGFFFGVSAISLAINMLFISKILFNGSGFDVDEYVRRLYKFAYSDCVEVAPVSCSPDPPDPNWNLGLCSFRFELLKSRMIALFVAGTSRVFLICFGVHYWYLGHCISYAFVASVLLAAAVSCWLSISNPSVARIDALRSTVIKLREGFRRKGQTSSSNSSDGCGSSVKRSSGSVEAGPHGNATDSMYRSNSQSDCVNWNNVPFDRSNSCQEGQSSDKNIDSGRASLAHRSNSCLSAVAVQDPETAVVSADRHGDPTASLVVCSSSGLESQGCESSGSATASGNQQLLDLNLAAIFQDRLNDPRITSMLKRNGGLGDVELANLLQDKGLDPNFSYMMKDKVMDPRILALLQRSSLDADREHQDDVDVTGTDSDRLDTTIANQISLSEELRRSGLENWLNLSRLMFHQVAGSPIRAFVVFTLIFIIETVTVAVHRPKPIKVINATHEQFEFGFSILLLSPVVCSIMAFIWSLCAEEMTMTSKPRKYGFIAWLLSTCVGLLLSFLSKSSVILGLSLTVPLMVACLSFAIPIWMRNGYRFWIPGGELDSRENIRQAPGKKERALFAISITVFTASVIGLGAIVSAKPLDALGYKGWDADKKSFYSPYATSMYLGWALSSTIAVLATGVIPIVAWFATYRFSPSSAICVGLFATVLVSFCGVSYWGVVNSRQDGVPLKADFLAALLPLLCIPAVFSLFTGMYKWKDDDWKISRGVYLFVGMGVLLLLGAISAVIVTIRPWTVGVACLLVILFLVFAIGVIHYWTSNNFYLTRTQMLLVCSLAFLLALAAFLMGLFQEKPFVGASIGYFSFLFLLTGRALTVLLSPPIVVYSPRVLPVYVYDAHADSAKNVSYAFLILYGIALATEVWGVIASLILNPPFIGAAISAITLVIAFSFAVSRPCLTLKMLEDAVHFLSKDTVVQAMSRSANKIFNISLRNIVCFVCNQTRNAISGTYSAPQRSASSAALLVGDPAITLDRAGNFVLPRADVMKLRDRLRNEEITAGSFFCGVKNCLMIGSPVDVDYRRNMCAHARILALEEAIDTEWVYMWDKFGGYLLLLLGLTAKAEQIQDEVRLRLFLDSIGLSDLSAKEIKKWMPEDRRHFELIQESYIREKEMEEEVLMQRREEEGKGRERRKALLEREERKWKELEISLLSSIPNAGSRDAAAMAAAVRAVGGDSALEDSFARDRVSSIARHIRKAQLARRAEQTGIPDTVCILDDEPRSTGRHCGEIDLCLCESKKVSFSIAVMVQPVSGPVCLFGTEFQKKVCWEILVAGSEQGMEAGQVGLRLVTKGERMTTVAKEWNIGASSIADGRWHLVTVTIDADLGEATSFIDGVYDGYQNALPLPRNNGIWEPGTDIWVGARPPTDLDAFGRSDSEGSDSKMQIMDAFLWGRCLTEDEVDDWESEEANFELYDQEDVEWDGQYSSGRKRHARDSVAIDIDSFARRPRKPRFETREEVNQRMLSVERAVREALIAKGERNFTDQEFPPDDRSLFVDPMNPSLKLQVVSEWMRPSDIAKEVSISSQPCLFSGSVNSSDVCQGRLGDCWFLSAVAVLTEMARISEVIITPEYNEEGIYTVRFCIQGEWVAVVVDDWIPCESPGKPAFATSRKQNELWVSILEKAYAKLHGSYEALEGGLVQDALVDLTGGAGEEIDMRSPQAQIDLASGRLWSQLLHFKQEGFLLGAGSPSGSDAHISSSGIVQGHAYSILQVREVDGHKLVQIRNPWANEVEWNGPWSDSSQEWTERMKHKLKHVPQSKNGVFWMSWQDFQIHFRSIYVCRVYPPEMRYSVHGQWRGYSAGGCQDYDSWHQNPQYRLRVTGRDALYPVHVFITLTQGVGFSRKTNGFRNYQSSHDSSMFYIGMRILKTRGCRAAYNIYMHESVGGTDYVNSREISCELVLEPYPKGYTIVPTTIHPGEEAPFVLSVFTKAPIKLEAV

SEQ ID NO: 187851 - protein, 401 aa, Oryza sativa
  Clone ID: PAT_MRT4530_84513C.1.pep
MSEQVTNAQLTYAVYACKFYDETQRRGFYQNTINAAWENVCMLGVIGMGEWVAVVVDDWIPCESPGKPAFATSRKQNELWVSILEKAYAKLHGSYEALEGGLVQDALVDLTGGAGEEIDMRSPQAQIDLASGRLWSQLLHFKQEGFLLGAGSPSGSDAHISSSGIVQGHAYSILQVREVDGHKLVQIRNPWANEVEWNGPWSDSSQEWTERMKHKLKHVPQSKNGVFWMSWQDFQIHFRSIYVCRVYPPEMRYSVHGQWRGYSAGGCQDYDSWHQNPQYRLRVTGRDALYPVHVFITLTQGVGFSRKTNGFRNYQSSHDSSMFYIGMRILKTRGCRAAYNIYMHESVGGTDYVNSREISCELVLEPYPKGYTIVPTTIHPGEEAPFVLSVFTKAPIKLEAV

SEQ ID NO: 187852 - protein, 135 aa, Oryza sativa
  unsure (1)..(135): unsure at all Xaa locations
  Clone ID: PAT_MRT4530_84514C.1.pep
STRRRCSTSATPAARSSCSSRTTSCTHRHSHSRPRTAAADGAPPVRSAWTPATGSPPSXAVSPRSRPSSGAPCTGSPARSGTGSSKPTAWSSSPCASTRRAPRRWSYRRAPPTRCWAAGRTAISSCSPRRGAARR

SEQ ID NO: 187853 - protein, 79 aa, Oryza sativa
  Clone ID: PAT_MRT4530_84515C.1.pep
GVKTVRKLSGFRTYFRKRNLSVGIFFGIFRKRKRIQKYFLGNGIENDKGSFRRNSKSVGNFPEIFSEFPEIFSELPEIL

SEQ ID NO: 187854 - protein, 72 aa, Oryza sativa
  Clone ID: PAT_MRT4530_84516C.1.pep
VWRGRDESTRWPPCSSWCCDVRTGAHKREARPEYGTRSIWRHCTRWTEHEKEELATHSARETNAGAVALKVL

SEQ ID NO: 187855 - protein, 43 aa, Oryza sativa
  Clone ID: PAT_MRT4530_84517C.1.pep
AVVRRNNRGLQLCLHPMNILWMVTLRQAMSTPHYTCQTECECI

SEQ ID NO: 187856 - protein, 76 aa, Oryza sativa
  Clone ID: PAT_MRT4530_84518C.1.pep
CLVWPDTQLREELRISIAEKLLPAYRSFLGRFRHHIENGRHPELYIKYSVEDLETSVTNFFEGCPPSLHNRRRSHG

SEQ ID NO: 187857 - protein, 67 aa, Oryza sativa
  Clone ID: PAT_MRT4530_84519C.1.pep
RCKPCHSEDTTSDIDTHYLVFFPNLIATCCSTNLKQTALLNLYSHLHDTSAESQETQISHKAVDRPI

SEQ ID NO: 187858 - protein, 47 aa, Oryza sativa
  Clone ID: PAT_MRT4530_8451C.1.pep
TWTTPIHSVLIYKVLQQRLESNLYIRDFLYSLGARVPAPTLQIRTFT

SEQ ID NO: 187859 - protein, 238 aa, Oryza sativa
  unsure (1)..(238): unsure at all Xaa locations
  Clone ID: PAT_MRT4530_84520C.1.pep
MSSCMDLLTAVSSFFPSLLSGLEEDIIELLKEDNELLKEGIAHVLSKAGGNIREQLASSSSITLLLERLCLEGTRKQAKYSVHALAAITKDDGLMSLSVLYKRLVDLLEEKKVHLPSILQXLGCIAQIAMPIFETRGEEIINFITKKILDCNDDSXDVSAHKSEWSDRLXSCXWKIYGIKTLVKSCQPCKDAQAHPGIEKLMGILKNILTYGDISXNMISSTIDKAHLRLAAQKAXLR

SEQ ID NO: 187860 - protein, 411 aa, Oryza sativa
  Clone ID: PAT_MRT4530_84521C.1.pep
MTDNMVGRGGYGEVYRGVLEDGSAVAVKRLSPAAAADEKKEKDFLTELGTVGHVRHPNVTALLGCCVDRGLHLIFEFSARGSVSANLHDERLPVMPWRRRHGIAVGTARGLRYLHKGCARRIIHRDIKASNVLLTADYEPQISDFGLARWLPSEWTHHAIAPIEGTFGCLAPEYFTHGIVDEKTDVFAFGVFLLELISGRKPVDGSHKSLLAWAKPYLNDCVAQGLVDPRLGDGGYDGAQLRRLMFVASLCVRPAAAWRPTMTQVLHSSTSTTRNGPFIIVKGFFADISSEMAWFNSSIKPYNDMKNLNRNQENRRDIGCSVASYLLHYPFLPPIDSREAQSQVLELLESGEISQDQWLMPEEEEEDEFWDFDDLDDFEDDDDDDDDNYDNDDESDSPSISSSACSIHAND

SEQ ID NO: 187861 - protein, 297 aa, Oryza sativa
  Clone ID: PAT_MRT4530_84522C.1.pep
MARHQLCLLTTTMLVAVVVFLPCLATATGKTGQIAVFWGRNKTEGSLKEACDTGLYTTVIISFFSVFGHGRYWTDLSGHDVSRVGADVKHCQSKNIPVLLSVGGDGYQYSLPTANSAKDVADHLWHAYLGGGRRGVFRPFGDAVLDGVDLYIDHGGPANYDVLVRRLAGYRGKPVLLTATPRCVYPDANAAAALGTGLVRRIHPRFYDDRRCSYDSSERRPFYGAWLGWTARYANASVHVGLPAAWDAASDGWINPAALVFDALPLVRGTPNYGGVVLWNRHFDRRSRYGQTIKGML

SEQ ID NO: 187862 - protein, 1311 aa, Oryza sativa
  Clone ID: PAT_MRT4530_84523C.1.pep
MVNTRTGGHGSEHENTDARTTSQQPPQAPQVNQQNFEVFMQAQIELMRMMMQQLRNQQQQQPQQQPQGGPPPQSKMFEFLRTKPPTFKGMEDVTRDADRQRHFLKGLNSGLKVGLVAHDFSSFQSLVNKTLLLEEERRKLGEDRKRKMNQQASGPSQRPRGAFQQNNNCQLAAPQFRTIPQTLVLAAQTPRQATPTQSVREVGHVTKNCPHPKNIITPVKFNLGNTPAKAPAPGVAQQTAPATQQTIVRGRVNHVTAEEAQTSTDVVLGKFLVNSVPATVLLDSGASHSFVSRSCASQHQFPTIPLKCSLLIQTPGSEMRTQTGCPRVKIEIEGVEFFANLIMLDTPQLDVILGMDWLHSSKAVLDCGSRSITLENSKGERVNFKAIVNPPWKGALVHNMEVSELQKVPIVREYPDVFPEELPGMPPHRDIEFVIDLVPGISPIFKRPYRMAANESLNDVTIKNKYPLPRIDDLFDQMKGAGVFSKIDLRSGYHQLRIRTEDIPKTAFSTRYGLYEFTVMSFGLTNAPAYFMNMMNKVFMEYLDKFVVVFIDNILIYSKDEKEHENHLRLVLEKLREHQLYAKFSKCEFWMKEVEFLGHVVTAAKVVVDPKKVSTVINWQPPKTVTQVRSFLGMAGYYRRFIEGFSKVARPLTQLLKKEKKFMWTSECQRSFEALKKSLTSAPVLVLPDIHKGFDIYCDASRTGLGCVLMQEGKVVAYALRQLRPHEENYPTHDLELAAVVHALKIWRHYLIGNRCEVYTDHKSLKYIFTQHDLNLRQRRWLEVTKDYDMGIHYHPGKANIVADALGRKAYCNNVEIKESQLSLYREFERLNLEIVPKGFVANLEVKPTLEDQIKEAQKDDANVKEIKLNMKKGKAIGFTEDENGVIWLHEKLVVPDQPELKKLILSEAHESRYSIHPGTTKMYQDLRNRLWWPSMRREIAEYVVLCDVCQRVKAEHQQLAGLLQPLKVPEWKWYEIGMDFITGLPKTQLGYDSIWVIVDHLTKVAHFIPVKITYSGDKLAEFYVNRIALHEAMGTHLNFSTAYHPQTDGQTKKVDQILEDMLRACALAYTSNWDKNLPYVEFSYNNSYQASLQMSPFEALYGRPSRTPLNWNETGERMVFGPDVIREAEERVALIRDRLKVAQSRQKSYADNRRRDLTFEKEDYVYLKVTPMRGTKRFQVKGKLAPRYVGPFRIIARRGEVAYQLELPSSMSGIHDVFHISQLKKCLRVPEEETPLQSVELQPDLTYREVPIKILETAERTTRSKTIRLCKVQWSHHTEAEATWEHEDDLKAEFPELFPSQSESRGRDSV

SEQ ID NO: 187863 - protein, 150 aa, Oryza sativa
  Clone ID: PAT_MRT4530_84524C.1.pep
MLGSLSFSSVSLHGSECCIVGSSGLRVPKQRRPAPPPTSSQLTFTRRRPSQGRISIDRQVLERWRQQEGSALCGAGKHCQLRRRESPSPPSSSLAHLLRRLSLPVSAPNASTTGATDDNDPLSFEEGRNRGEREIRKREREEEEGRKEDA

SEQ ID NO: 187864 - protein, 163 aa, Oryza sativa
  unsure (1)..(163): unsure at all Xaa locations
  Clone ID: PAT_MRT4530_84525C.1.pep
TRANLCVFGSEGSTTNVVDRAIQAVLQLVKSSNIAVQIQAYRVVATLSMRQQHRSAIVSACTIPLLVQLWSSVNRPLQKLATQTVANLADTKDYQDAIVSAGAIPSLVQLLDDPDXRHKMRTXVALQNLAVHSVAHKAAIVSADAIPRLVRLLESTTQDLQAR

SEQ ID NO: 187865 - protein, 56 aa, Oryza sativa
  Clone ID: PAT_MRT4530_84526C.1.pep
MEVRLQASRSAVAATGVRDPGNGNNDKWGLGGAAESRNSGLEKGKANGRLLDPNMS

SEQ ID NO: 187866 - protein, 107 aa, Oryza sativa
  Clone ID: PAT_MRT4530_84527C.1.pep
MAASSSPPSPTTNYSKLELTGGRGDQEGRRGGAEQILKRCSSLGRRQQEQKQVSEWEEEEEGVRLAVRRAEGPLPGFVATSKGRKDLMLLNVLRQFDASNCSVRIKI

SEQ ID NO: 187867 - protein, 104 aa, Oryza sativa
  Clone ID: PAT_MRT4530_84528C.1.pep
SGARAWGGGSRSRSRSASGKRKKKASGLPSDVPRGHFPVYVGERRRRFVVPLALLDRPEFRSLLRRAEEEFGFAGAGAGGLLVLPCEEVAFRSLTSSLQYSCTR

SEQ ID NO: 187868 - protein, 59 aa, Oryza sativa
  unsure (1)..(59): unsure at all Xaa locations
  Clone ID: PAT_MRT4530_84529C.1.pep
TPNPLSGKNPFQNPPKGGKGPGPPKTPRENPIPKGPVKTQQTXPGPKSPPKEKPPTPGR

SEQ ID NO: 187869 - protein, 138 aa, Oryza sativa
  Clone ID: PAT_MRT4530_8452C.1.pep
MQNDGVKRAYTARHVGRSRGTGATLYSLPFGLQHARDQLVRSRGSIDEPSRACAVVCILHSCLCFERKAGGRLAVYRARTRSRLRARDYARRRGRPLTETAPRGDRQGGNRGLARSFPRSERGAALDFRQGGHGVAFW

SEQ ID NO: 187870 - protein, 139 aa, Oryza sativa
  Clone ID: PAT_MRT4530_84530C.1.pep
HFVVKQVEGSELISLLGQSWVQVHREFIEQYLKTYVDLSWGPAISCLSARTGMLGGCFSQPSSTVRFSLQFDSTYYNQECWKVEDPQLREKVRRAVCDKVILAYQAHLDKYMKAKRKHEWYTPELLKAQLMKLFEGRTE

SEQ ID NO: 187871 - protein, 91 aa, Oryza sativa
  Clone ID: PAT_MRT4530_84531C.1.pep
ESLHKTAETNDVTVVKQRRRRPNSRLIKPFHPYSWQMMEDEQMKGQQSNRSEYLTMLIVDKLPCTKLSTETIFPCYHLRALTQINGYKYLC

SEQ ID NO: 187872 - protein, 106 aa, Oryza sativa
  Clone ID: PAT_MRT4530_84532C.1.pep
MSVVILDGSTVRGFVADDDAFARSVDARFEALNTNGDGVLSCAKLRRALESFLLLYGAGFGSAQLAPVPAEVSALYDSIFEQFDADHSSAVDRAEFRDRMRCILGS

SEQ ID NO: 187873 - protein, 96 aa, Oryza sativa
  Clone ID: PAT_MRT4530_84533C.1.pep
WGWLPKKTGVQPSRPRPCQGYHRANPKWYNVSVKHQCVNWHDSLIKVGHGSDGRNLLFIMNILPFVHTQLSSNSSPFWLHPNLDDRKCSFGMANNV

SEQ ID NO: 187874 - protein, 229 aa, Oryza sativa
  unsure (1)..(229): unsure at all Xaa locations
  Clone ID: PAT_MRT4530_84534C.1.pep
MELNAIIFGGNMMADDDGGGFTFAEVPPLAGGRCVGPPLYPVFGRPRSPPPTPPPHRQAPEKASRLPLWRFLMVDHGPPPPPPPTTQPAADDDLDLDLDGEPAESTFLYCPLCPALPXLAAASPARCRKSGSTGSSLLRWRQRSIGRSHSDGKEKFVFLNASSSSSGSEHKGGRGGEVGHDGALSYYANGGSRGGGGGGGRRRSFLPYRQDIVGLFANATAFRRSYHPF

SEQ ID NO: 187875 - protein, 260 aa, Oryza sativa
  Clone ID: PAT_MRT4530_84535C.1.pep
MAREAENGIHDPMKGFAFRLSHAIPQLKAHVHTTHTNSDALPHEQALEPTLLLFIFLYHSILQVSPQYESGTAGVDADHVPDGSFHCFHVRYSGIGTAKIEGEMLEAGKVHIALLEPKASGQEYFKIEKLGFPGAAASSLFSRHGAIASTPARLPPQQGRRGHRGIEATAGAATSSPPPRRGRCRIQPHRDSRGPRLIEGAVPAAVPSRRRPLSHRAGRASRRIQAAACSRIQSHSAASAAPYTADSTNFEDQPQVHCAV

SEQ ID NO: 187876 - protein, 558 aa, Oryza sativa
  Clone ID: PAT_MRT4530_84536C.1.pep
KKKNIDVPKQTTLSNLAHEMTAEFRSLCAEEAYLQQELEKLQDMRNKSKLEGELWDERISSSSGQNSHLVSKATRLWETILARKDQTPDSESDSDSPIESWYRISGSQLLAAMDLSSSVPHSELLSARASEASPFLDKQEQMSALFQGKEEALSRLDDRNGRAQQQTVDVAEILRRWTHALQRIHKQSLHLAKANDGDGPELLRSASDGETSTHADSLTATLAEHRQHLVSIQGLINQLKEAIPAMQQSIADLSEEVNSVSSNPMDKIISRLSPSVQNSGFGRAEESSSELSEMTSKLSSTHLDKAGSSPALKLPPLFSLTPSSSGKGTQAQKRNALGRQPSQEILSEEKTLPLPSTKDETNGSIHENEGYFAHNIRRSVREAALSKPLRNPERPHDQSSDDGSEHFFIPLSTGASKMEIDAVDNNRRMQKLGFSSPQMKFSDLHFNVDSPMHATPVLSSKLNGHDDPNTVTSMLDPVSGLGHQSFITDDALDQVFSPPLLLETSLFQDAYEDLLAWRFLWFGSDCCWDIFGEFLAGCVACQLPPACEGCLRQKKGYY

SEQ ID NO: 187877 - protein, 103 aa, Oryza sativa
  Clone ID: PAT_MRT4530_84537C.1.pep
MAYVDHAFSISDEDDLVGGAVGGPRGAPVKEIAFAAALLAFGALGAIGGVLMAANNVGGDRAHGIFFMILGIVMFIPGFYYTRIAYYAYKGYKGFSFSNIPPI

SEQ ID NO: 187878 - protein, 126 aa, Oryza sativa
  Clone ID: PAT_MRT4530_84538C.1.pep
MFGAISGLSPREVFMCVLNLLERVLDGHSRTQPGAIHLQNVLQRKRGHDLSTENALAAHKGCPFLAVLFTGLQAMTQASAPAPTSSREAQALKHRIPDTECVGQGTEQRTDAKLLKASRRCDATRT

SEQ ID NO: 187879 - protein, 84 aa, Oryza sativa
  Clone ID: PAT_MRT4530_84539C.1.pep
VSLVPQCGQVLVRAGLEILLFTLEAALLCMSYTTSPGCTVTVFSVISLLLPAHWGLIGSRPNEVTARYHGVGDRVPPTMGARVQ

SEQ ID NO: 187880 - protein, 48 aa, Oryza sativa
  Clone ID: PAT_MRT4530_8453C.1.pep
HEGQFGQHRREQEEASKLILWFNWYPLLQFFFFVFSQVVVFFSQRIPI

SEQ ID NO: 187881 - protein, 94 aa, Oryza sativa
  Clone ID: PAT_MRT4530_84540C.1.pep
GETTTPHRRHRRRTLQPRRVEGGKDEGGRRWSGSAAGRSSWRTAPCPSQSLDSRGFAIAICLTVSWLRFRWLANLLWLLLDFNKSWDSLVSCIL

SEQ ID NO: 187882 - protein, 38 aa, Oryza sativa
  Clone ID: PAT_MRT4530_84541C.1.pep
PIISMNECMGSQFPFFVPTKRQSFSLAELTSVVYYSRL

SEQ ID NO: 187883 - protein, 997 aa, Oryza sativa
  Clone ID: PAT_MRT4530_84542C.1.pep
MQPRGRRLPSPRRGFGPKRSFQVSNIWAWKLLYGLFKIVGDKLAPLVIREYSSLMGVTKDLQELQDLVEEIKSGLQSEKHDTDNDRDKYAVLKYMRTKPKLAMFQLKMANKIKTIKNRFAAIVEQRGDVNTILNAIPIDHNVHKNKIISEPSLLGNVDDSKIHMVEAISNELNGNKFLLVLDDAWHKNQYDWERFMLYLKSGSPGSRILLTTRDQGVAEAVESTCTYKLAFLSDEDSWNLFQQSLRLAAKGLPSEFVEIGREIIKKCGGVPLAIKILAGVLRNKKTVDAWCALRDSNMWNVDDIEDRVFASLRLSYFHLPDHLKQCFVYCSIFPKGYKIYKHQLIGEWIANGFINPMNEIEQVEDVANDCFDSLLKVHFLQDLEVDEYDEMEICKMHDLVLDLTRQILQGEMVSHSQNATIGNSQKCRYLSLASCNENIEVKLFSKVHAIYISGDNFALNKPIKKRCHVRSIILESMGATNLLLPLIPKFEYLSYFRISHASCRAFPEEISHCWNLQALHVTYCRALTTLPESIGKLKKLRTLELSCLLDLESLPQSIGDCHNLQSFLLRGSGIREIPNSICKIKKLRVLNIMHCRSLRQQWSEFFGTLCNLQSINLAQIEGIHNLFSSFACHKLRTLTLSGTEITRLPQCLTLVSTLEYIDLQNCWGLLELSEGIGNLERLEVLNLKGCSNLGGLPVGIGQLTHLQRLHLFVIGGSSEHATISGLRNLNLLTDNDLEIKIIKYVEDPDDAEKASLKEKSGILNLTLDWSSNGAEGCSDSLEEEPLLDMEKELRVLNGLDPPSQIKKLNIYNYKDSLLEQIDPPHFTQLTKLVLEQFPNLENLQGLARLPSLNTFVLKGMPNLVELWTSSPALESSSICFSVDSPHLKKLELGGMAGSSSGWEVLQNLTGLESLSIYSSDLRQLGEIIRSLTSLQYLCISGCPVLAMLPEWLGGFRSLQTLVLKEIPLLASLPKSIMLLTSLEKLAIVECDNLRGVA

SEQ ID NO: 187884 - protein, 607 aa, Oryza sativa
  unsure (1)..(607): unsure at all Xaa locations
  Clone ID: PAT_MRT4530_84543C.1.pep
MASKTLHEFAAPTADNVAVGPQVNIGDVDFNLKSSLVTLAQASPFCGKPNEDANAHLQQFLEICSMYTIKGVSPDAVRLRLFPFSLLGRAKQWFYANRAAINTWDKCSTAFLSKFFPMGKTNTLCGRISSFQQTRDESIPEAWERLQEYVAACPHHGMDDWMILQNFYNGVTPMSRDHLDAAAGGAFFSKTMVSNMGWSVERLQTRQRGMHTVKETELLATKLDLLMKRLDDHEKRPQGTVKALDSHVTCEVCGGTGHSGNDCXETHEEAMYMGNNNGSHPQGGXGWNQPRPYFQGGNNKVPANETGRILGQPEXGKSTCDPLYPNPAGTNGMSKGTPSNDSADKEIQPEKTVPQGYCDTWLLPFPQRSRKPSVDEQFAHFVAVIQKIHINVPLLDAMQVPTYACCLKDILNNKRPLPTAEVVKLTEHCSNVILHKLPEKKKDPGCPTITCSIGAQQFDQAFCDLGASVSVMPKDVFDKLNFTVLAPTPMRLQAADSSVRYPAGIVEDVPVKIRDFFIPVDFVVLDMDTGKETPLILGRPFLSTTGANIDVGTGSIRFHINRKEENFEFQPRTEQCSMVRIKYGPNPQNIQVVEVEPPKTDSLVRFM

SEQ ID NO: 187885 - protein, 235 aa, Oryza sativa
  Clone ID: PAT_MRT4530_84544C.1.pep
GSPPKSLAGTPRAAACAAGSGVRDRTSSIGTSSRRVFDLRDLAAAEVPAEVPHFELDEDPAFWKDRNVQVLIRIRPINAAESTANGQRRCLVQDSSKTLSWTGHPDTMFTFDHVACETISQEKLFGVVGLPMVENCMSGYNGCLFAYGQTGSGKTYTMMGELSKLDNELSKDSGLTPRIFEYLFARIKEEEERRREDKLKYICKCSFLEIYNEQITDLLEPSSTNLQVVCLLVSI

SEQ ID NO: 187886 - protein, 359 aa, Oryza sativa
  unsure (1)..(359): unsure at all Xaa locations
  Clone ID: PAT_MRT4530_84545C.1.pep
GLATAQPLGPAASARARAAPLNQPRLPLQAARACRGGRPPGRRRRQRLPAPVAHVAAPLHTALPSSPRPRHSSRKPPRDGGRALLPLPRRSLSPSSFSPKRQGGKPPFSPSFSPFPPAGVILPPLPPPPVAPPRPLPPLALCSPPSPPVLRSTHSSPASLGVAPPNPTLATDSRGRVDALTAGNWPLVTSSPFPPFLSAGRRRRNPPPTDSLRRIQAVGSLPLFLPRHPGVRPVAPHRRKTPRRNRRRTPSIRGRRLRLPPASPRGSHVGATSAPARPRSGRADPGQPPPVRAFHREPXEAARGPAASGACAACSLRTVSRAADKRVPLGTARGEPGPPALSLLPSRARTSWAALGRPA

SEQ ID NO: 187887 - protein, 493 aa, Oryza sativa
  unsure (1)..(493): unsure at all Xaa locations
  Clone ID: PAT_MRT4530_84546C.1.pep
GPAGPRRALAXGGRRERAGGPGSPRVVPGGTRLPITRFTVRSEHAARARGRGXGRGARARFAVDAXVRRAHAQPRGSRWNARTGGADRDRPDPIXPSWRRRGCHAGWREEDEGAGRXNGRRAAAVSPGRLATMRGDGAYTGMTXRKRGSEPTAWIRRRESVGGGFRRRQPAESKGGNGDEVTRGQFPAVRASTRLRESVASVGLGGATPSEAGDERVLRSTGGDGGEHTASDGNGRGSGAPGVPFRVHERTGSPXLGDERRRRXTELGRRRQXGDGRELALGARVQSATGRREDDAGGRKRGKGGRERGACPFLLWEKEEGSGGVAAEGGGLCLRPLAACARSGGAEAMTTAMTAGRCGAERRHGRQARAGTDDGGDQAVGHXGTRARLATGGVADGVARLGHARWLRGRVAAGAAGQRGRAAQTRRGRRPRRRARANDARGAAARERRGGLGSARAAHAHARGQSGEGGALGAGGSRARARSGGFFRVAPAK

SEQ ID NO: 187888 - protein, 505 aa, Oryza sativa
  unsure (1)..(505): unsure at all Xaa locations
  Clone ID: PAT_MRT4530_84547C.1.pep
WAGRPKAAQTRARAGGRRERAGGPGSPRAVPGGTRLSAAWLTVRREHAAHARGRGRDAVHARGLRWTRVRRAHAQPLGSRWNARTGRGXPGSVRPGLAELSPTWRLRGCHAGRREVDGDPAANGRRAAAASGGANHGDTGNSEHTGRLHVTRGGEPTARIHRSLLDGSGLRRRQPVAGEEGNGDEVTRGRFPAVRASTRLRELDASVGLGGITPSEAGDERVLRSSGGDGGEHTASDGNEEEEGAPGVPFRVHERTGSPGAWRWTAEARQSTGAAATGGQAGELALRLASKAATGGDAGERGKRGEKEEKGXGEKGGSPLCRFGKRRRERGDSVEGXGSLPPPLGGXRVEWRGPGDDDGDDGGXFGAARRHGRQARAGAAEGDGGGEAGGRPLGTRAGSNGRRGWAAGPGDADGADDAARAGNHAGARASNGARGRLCERGARARGGGARRGSRTREQRGGGKRAGVRREREREREREREREGGAPEREGAGEEMGRAEFGPSNP

SEQ ID NO: 187889 - protein, 75 aa, Oryza sativa
  unsure (1)..(75): unsure at all Xaa locations
  Clone ID: PAT_MRT4530_84548C.1.pep
YFXLPGEVRRRGMPXXEVAXSPSSIRRARCRQQQQXHIRMRRRRXRRXSXAPLVFAXPEEEYDYXASNYCKXNAS

SEQ ID NO: 187890 - protein, 174 aa, Oryza sativa
  unsure (1)..(174): unsure at all Xaa locations
  Clone ID: PAT_MRT4530_84549C.1.pep
WRTRGSEPTAWIRRRESVGGGLRRRQPAERKGGNGDEVTRGRFPAVRASTRLREPIASVGLGGAMPSEAGDEQALRSTGGDGGEHTASGGNGREGAPGVPFRVLARAGSSDTRDDERSTGGGDNGVEAMGQNKRRRERGRLGFIXVATSIWEPTXGGQGRELALGGRGQSGDGG

SEQ ID NO: 187891 - protein, 407 aa, Oryza sativa
  unsure (1)..(407): unsure at all Xaa locations
  Clone ID: PAT_MRT4530_8454C.1.pep
MDTDFRAIWKAVGWHXFVVVDKPGSHLLTLQFLCTLKEIQDGISFRFFHNEYTLTWKGLSTLLGFHDSYKINLRNGISWFEKKXFWEDIYIHNPTFRLMHKWIAMNLFPRGDLRPIREDELIIMFATVSKIKVSPVKCMIRQWLESIRFTAPVECTSLITCIARGLGVITNDQIAYISTPRPCVDENYLXQGHILKHGVDGSLIYFFPXCTNEIPLXNAGYNLYNCHELTIPLXTIEESRVGGTYREACNMARNERDGSTSSTPVQKYEAGXEPTGDAPGCTQAPRHSIGGSGWECASESRWRAPHDIQWGGLNNQSPRSSGMPPSPGEWHSSSSRWDLGEITKRMDTLDMQTGEIQYNLEEHIAQTQEXQQNADAQFTNINNLMQQQHDDLQAYFCFXGFNPYQGS

SEQ ID NO: 187892 - protein, 515 aa, Oryza sativa
  unsure (1)..(515): unsure at all Xaa locations
  Clone ID: PAT_MRT4530_84550C.1.pep
MTSKRRGRRELGRSGRAKWAGRPKTVARAGGRRESRWTGLTARGPGWDPLVSGSAHRAEGVCGARAQAGEGRGARARSAEERMRRAHAQPHGSRWNARTGGADRGRPVPTSAELAPTWRLCGCHVGWREVDDDADRNGWRTTAASGGANHGDTGENEHTGWLHETRGDEPTARIRRRKLDGGESRRRQLAGREEGIGDEVTRGRFPAVRASTRLRESDVSVGLGEATPSEAGDERVLRSSSGDGGEHTASDGNGEGXRSAVAAKAATXGGRRMTPAGGKRGKRGREKGACPLASSGKGGGSGGVAAEGGGRLCLRPLEASARAGAAEGDGGGDQAVGHSARARGKQRAARLGTRAGSRGRAAAGAAEQRGRATXRRRRRGSGGEPRGRARANDARGGRLRERGAXRERRRRARGRGARRGACARAGRARGKGGGARRGXSRTRARGARAGRSGAEREGERERAGGGEGARERERERGRAGARRGRGEGRGRGEDGPREIRPIDPGGGKIDFCGGI

SEQ ID NO: 187893 - protein, 183 aa, Oryza sativa
  Clone ID: PAT_MRT4530_84551C.1.pep
WRPPVGLPYPRTFRCWAMDVLIIRSEELDEVGGTGGQRRCELRRGGGVEPEPSSGGTAPGRERSSEPRRRRDVVVYGCDRRSRSASPIISELAKKICVPCNSKDIHAMPEDSAKKMLEQVGGWELATEEGHHPDLHLVGWNNVKIDVWTHSVRGLTDNDFILAAKINNLNLEGLLSKKATVQK

SEQ ID NO: 187894 - protein, 347 aa, Oryza sativa
  Clone ID: PAT_MRT4530_84552C.1.pep
NSKETVLKCKSGKPYSRYVPRSAILSLKATVDTRAECTISEAQLGGYKGTWWLALLEIWSLILEILALRVFGLRNYTRNGTTQQTGAARENWGGPAELNGPAGPRRLKVAQGARSRGREERESRWTGLTTRGPGWDPLVGDSVHRADQARGTRARAGLGRGARARFAEERMRPAHAQPHGSRWNARTGGTDRGRPDPISAELAPTWRLRGCHAGRREVDDDAGRNGRRTTAASGGANHGDTGESEHTGWLHETRGDEPTARIRRRMPDGGELRRRQPAAGEGGNGDEVTRGRFSAARASTRLWESDASVGLGGATPSEAGDERVLRSSGGDGGEHTASDGNGRGCAG

SEQ ID NO: 187895 - protein, 1058 aa, Oryza sativa
  unsure (1)..(1058): unsure at all Xaa locations
  Clone ID: PAT_MRT4530_84553C.1.pep
MDGGTGPGAELLSPGEAEWPPELRLPPPPPPHPPPPPPLEPAPPSTPQLRGEASPPPPPPPPVGPPGAAVVAAAARKEASASAEGFDDSHFLGSIMGAPAHQHQHQHQQPPAVGPPVVVKRKRGRPPKNRDGAAPPPPPKPVKKREDDEDVVCFICFDGGNLVVCDKXGLLEDLIDDNGTFSDKITGAFVRIRTPCVGQKQDIYRLVKVLGTHKVAERYSVGKKTTDHALEILNLDKKEVITMDTISNQDFTEEECKRLRQSMKCGLITRLKVVLLIKIHYTGDIHEKAKIFQLLRVNDXSCNFWALLKKEHASLMKIQKYMLTHNHRQNCSATSHHTTTSPPTEGMTHGQGEEASFASSEIVSGDMEPEKVWHYKDPSGSVQGPFTLLQLSKWAAYFPHQLVLMMSGPLEATLVNGTIVRIVVEGSHWSSTADSITHDGLQLSLASAKPESCSAVNPIRDGDSSSASRVPNQSGAHVYSPPHPATTNLSKSEETMNQCKSCEPEASNKSRKPDASHAPVNQHPKPESDPLLPDTQDFERTHPSPSTEHDTKEPLKDQSRSTSVAPEGSGTMAHGQSSIAFISEASGPLSSKIVGLQPPKDTSFLVEKDIKDGGSITQTEQQKEESTAFKKENVAVDPISDSEAIVSGVLESLTETYNLHEETALENFTPTSAEEEQPQCSTPIALSPWDETSDYQGEAVDSALWGVQDDQNNEMWSLSSPTPTLQPSGIGADTKGASCAIEEVIVAQGNSGVVEPSPALEKKRIEKVPSASIDRGVPEQVKPKSDAALSPEESRKPSGLQLSSTYLQGSTKSSGLPPSGTSLDGGIEPSGLLPSGTSLEWGTKISGVQSSASSLEGSKKAFVRQPSGSSLEGNTKASEKLQHGNHQVLRLLQGAQKHQVGSHHLARARNLSLIPHGVPAKAATRLRTNQQHQQLNTHQKPQGDKETTTQILLAGETLSETRAGIHPQAMRAAEAAILATTMTGTIRAANHGVVAQIIPGDQIIVKNMATVARRDHRRRGGNLKGGSVDTTRMATAGRALPASSSTVENALTFLYSPK

SEQ ID NO: 187896 - protein, 278 aa, Oryza sativa
  Clone ID: PAT_MRT4530_84554C.1.pep
MARALLLRRGHPFLRRLLRPPPPPTSSVLESCNRNVSPRVQLWRFSAEGKDQTNSSEDGYSEANIKKKDFALQQALDQIKSAFGEESIMWLNHSYGPKEVPVISTGSFALDMALGIGGLPKGRVVEIYGPEASGKTTLALHIIAEAQKNGGYCAFIDAEHALDPTLAESIGVKAEHLLLSQPDCGEQALGLADILIRSGSIDVVVVDSVAALVPKTELDGEMGDAHVALQARLMSQALRKLSHSLSRSRTMLVFINQVCLLYNSLGNAGHPTIFVVKF

SEQ ID NO: 187897 - protein, 509 aa, Oryza sativa
  unsure (1)..(509): unsure at all Xaa locations
  Clone ID: PAT_MRT4530_84555C.1.pep
TGRPAQEGGPERPKTRARGREERESRWTGLTMRGPGWDPLVSGSAHRAEGVRGSCARAAEGRGARARFAVDADAAGPRAASRLAVERAHGEGLTGAELAPTWRLRGCHAGRREVDDDPAANGRRAAAASGGANHGDTGKSXHTGRLFVMRGDEPTARIRQREFDGGESRRRQPAGREEGNADEVTRDRFPAVRASTRFRELDASVGLDGATPSEAGDVWVLRSSSGDGGEHTASDGNGRGGGAPGVPFRVLVRTSSSGTHATAAVGERDGNGAGEKQGRSLRLAAKTATGGREDDAGXEEKGKKEGEKRGLAPFFFGKXGEGSGGVEAEGGGXRPPSLGGLRAEWRGRGDDDGDDGGXRFGAARRHGRQTRAXARQRVTAAATRWSATRHARAACNGRGPRGRARXTTARGGRLCERGARQGEEKGXARGGGARRGDSRARARTERRRRSARRGSRARGARAERSGAKGEGRGXCAGKGRGRERARERERESGSAPGERGRWAGGEGEM

SEQ ID NO: 187898 - protein, 478 aa, Oryza sativa
  unsure (1)..(478): unsure at all Xaa locations
  Clone ID: PAT_MRT4530_84556C.1.pep
AGRPKKAAHSGPRRARGGGRRESRWTGLTMRGPGWDPLVSGSAHRAEGVRGSCARAGEGRGARARFAVDADAAGPRAASRLAVERAHGEGLTGVGSTRSXAELAPTWRLRGCHAGRREVDEDPATNGRRAATASGGANHGDTGKSXHTGRLLVMRGDEPTARICRRKLDGGESRRRQPAGREEGNGGEATRGRFPAVRASTRFRELDASVGLDGATPSEAGDVRVLRSSSGDGGEHAASDGNEEGEGAAEVLFRVLARAGSSDTXTTNGDGEQSTGAAAMGGQGRELALGGRGQSGDRXDDAGGGKGEKGEGERGLPFCRFGKKEEGSGGDAAEGGGTLPPSLGGLRAEWRGPGGDDGDDGGRFGAARRHGRQTRQGSGAGRQPRGRRRRPRGRARXTTARGGWLCEREARQGWGEGERGEGALGAGDSRAPAPGARXGTVGRGGKGAHRGGERARERERDRERERERERERERERES

SEQ ID NO: 187899 - protein, 225 aa, Oryza sativa
  unsure (1)..(225): unsure at all Xaa locations
  Clone ID: PAT_MRT4530_84557C.1.pep
WRWEEKRGRAPGXLRAAMSVWNXLGGQGASWHLALASXSTTGRREDDAGGRKRGKGGRERGLAPFFFGKXRRGAGTSRQREEGXCLRRLAACARSGGAEAMTMAMTAGRCGAVRRHGRQARAGADDGGDQAVGHHGTRVRLATGGAADGAARLGTRAGCGAERLQARQGSGAGRRRRDAGEDHAGVRAINARGAAARERKGGLGSARAARLTRSRARHAGEAERS

SEQ ID NO: 187900 - protein, 50 aa, Oryza sativa
  Clone ID: PAT_MRT4530_84558C.1.pep
FNGLRYHSIYKLLVLNFGACLRVNILFYTGGSVFPWYNLVDQSFNGRYVT

SEQ ID NO: 187901 - protein, 99 aa, Oryza sativa
  unsure (1)..(99): unsure at all Xaa locations
  Clone ID: PAT_MRT4530_84559C.1.pep
XXAPGXKIXVRFECGGDGGGKIXXREXXXXGXXQVGNKPSXKGTKGGXPTAGGGRFRNSESPGLQEFGRRGXXCAHXXGFGPXXXFCXXSXFXXSINRK

SEQ ID NO: 187902 - protein, 69 aa, Oryza sativa
  Clone ID: PAT_MRT4530_8455C.1.pep
MSPRTPATVRNIPAMATWSSRRLFLLTQMNTSLLVKVMSDVRRQGPKQRLRLNRHRPPPLTATVSSSSS

SEQ ID NO: 187903 - protein, 140 aa, Oryza sativa
  Clone ID: PAT_MRT4530_84560C.1.pep
WSRYDYGNNVAVLAPRLQMVEARLRLVFDQQYSGPRTSTSIGREMRLLLVLGPFSTSGVAIHPLALLLMVELRLHLVFDQRCSDTPTSFTSRGRVKATPGSRLEERHSAVSDLAGHGFKEEDYSVVDYGMVYGPKSMTNR

SEQ ID NO: 187904 - protein, 88 aa, Oryza sativa
  Clone ID: PAT_MRT4530_84561C.1.pep
QRIQGKHVGRGPVFLCCLNMAPCQRDPHGKEVTDNSEKETETKRRLEDVHMRNELLQHQLIELNVSIERISTNMGKLHNEVSVMEAKL

SEQ ID NO: 187905 - protein, 44 aa, Oryza sativa
  Clone ID: PAT_MRT4530_84562C.1.pep
ALRNNPIPNETKPHPRPHPCPDHHHLTVRPPPLPLAMLPATTCS

SEQ ID NO: 187906 - protein, 656 aa, Oryza sativa
  Clone ID: PAT_MRT4530_84563C.1.pep
MAHHVAPLLLLLTLAAVAAAASEEAAAADTEAAAAVEAGLLVRREAQLARLEELTESLAKSVQALESALARSVEPDPPPPAAAAAAPGDRRAPQGVAVTKRRPYWSERFHFAAAARLGDGAYAAAATALPYEDADGLTKYFAVGDSRGRVFVFSAAGDALLELEPGVSGEPPVTALLAYLSPRRTDCFLFAGHADGSIAAHRLIESSPHGDDWLTLAAASSRLLVRGLDAAPVLHLEAHHAGRARYVLSCDSGGRIRVFTENGTLYGTAIASSTPLAFVKQRLLFLTEAGAASLDLRSMSVRETPCEGLAEALNGSLPKAYSFDPSERFKAYGFTDAGDLVHVLLLGDIASLKCRVRAIKKAEIDNPVAIQTIKGYLLVASQDKILVYNTSTQYYGRVGAPRLLFATSIKDIKSVFAGSGGVMPASPAGKPLVAADREKLVILGLGDGYIAIYRSNFPVYKPESNAVVWSGPALLFLLFLIGIWQVYVKKKDSLGWTPEETFNTSVTAPTGSILNHSTSDRAFADSSTRTGERGYVDGTTRASDRSYVDATTRATDRAYAEATRGVDLRGGALRGAPRRYVSPTRYTGAAGIPYRPVSTEPVLRTTPELKYRGPDGEITLKFMGYIIAMKEGIVELFSYDFHLQRCRKIGQVYNNF

SEQ ID NO: 187907 - protein, 50 aa, Oryza sativa
  Clone ID: PAT_MRT4530_84564C.1.pep
FWVFLNQTLIISMIHKGEPKRTFTIHTLASRSRWNSKHGTRNAHVTHGVP

SEQ ID NO: 187908 - protein, 363 aa, Oryza sativa
  Clone ID: PAT_MRT4530_84565C.1.pep
MNSLETVIRLWENFTALQEDPALSPCYADQLRLVYDPVAGDYRNVPGVDTRVVSFGSTRGFRSDDPARKDVCMERLVEALEEEGYAEGENLFGAPYDFRYAPAAPGLPSGVFSDFTSRLRRLVERASERNGGKPVILVTHSLGGLFAMVFLDRTPLPWRRRYIKHFVMLCLGVGGSPLNMWPLAASSIPSSSSLVGSVLTYGNRSFASMFSLLPSPAVYGDTPLVITRAKNYSADDMPEFLSAAGFSDDEVALYRARALPVTLDFRAPLVPLTSINGVGVPTVDKLVFWDGNFSAKPQVVNGDGDGQINLDTVLALERLIGDDPDQGYFKSILIPNTTHKGVISDELALKRVVSEILGANSIN

SEQ ID NO: 187909 - protein, 85 aa, Oryza sativa
  Clone ID: PAT_MRT4530_84566C.1.pep
GRGNVAGMRKQEQNRSLGNVSLSFCKVIRKLMSTVLTVVPYIVILTIDSHGVCDYPENKNTVVGGLLGESLLRKHKNKLNFRLYS

SEQ ID NO: 187910 - protein, 226 aa, Oryza sativa
  Clone ID: PAT_MRT4530_84567C.1.pep
TASTVNTGPNEPLDVVAGCACMMELEEMACVMEWKCLLELRGRGGPFMMEEIFERIGARERRVLWDLFGAVQCELGITSRLWGQRGMSARATRLVAFLGHADGWQQQLAVAIGMLLPPPPPPGPSFKFPEGDRSGSGMMRGAVAGHDSVARGKRQREGCEFGRYTGDEHPGDKRSGVLRGQYRLRAHSGTVHYCTTYRIGGSEHNLQCRIAAASRSSDSQPDHVLR

SEQ ID NO: 187911 - protein, 224 aa, Oryza sativa
  Clone ID: PAT_MRT4530_84568C.1.pep
LCWAVWLCRNDVVFNGSKTNSFVQVQGLPVVASKASKLTDLDAPISTSQTKYLELLASFCPCFHKVHVSYGMRPTFFASRYQYLSSAAVQGKSEGITADSSRNPIDSSAVDRLEGKLAVLQFQMQIKCPMDKAKELSLNLKSITQLFNNYAVPFNLWEMLTVKLFEKFGPGSLASTRGGVAEACSVVRRVGSKLDPADGSCLPLDIICLHLEKAALDRLSSEKD

SEQ ID NO: 187912 - protein, 188 aa, Oryza sativa
  Clone ID: PAT_MRT4530_84569C.1.pep
MASLPQPMGYYPTSNSIMHAQPATTSRGSFGPVFTVLAVITFLAVAACVVGRLCGRRLSKKRAASAEDQFYGINAVGGDLEKGFEIKYPVMKPMASSRAMIHDIDDGFEIKFTPGKPAAWKNDSKGDGKGHQQQHQQHQHQHHPQQHGMPQHHPQHGMPMPPGFRYPANVVRQGQIRGGTFISAKPST

SEQ ID NO: 187913 - protein, 112 aa, Oryza sativa
  unsure (1)..(112): unsure at all Xaa locations
  Clone ID: PAT_MRT4530_8456C.1.pep
RVGIRCDTYQVSNNSTHVSGDTYKYHVILIRYHAIFYHVSRDTRKGIMXTCQVSNDSTHVSCDTYEXVSCDVCHVSDDXFYHVSCDTREVSTIFYHVSRDTCEVSDDTYQVL

SEQ ID NO: 187914 - protein, 578 aa, Oryza sativa
  Clone ID: PAT_MRT4530_84570C.1.pep
MAWTEDEAIGPDVASTGLHVSERIGRDAAAQPDLEEGPRGLTPRGHASHPYSSYPNEFLRGWAKSTSGTYRKEKVELSAKADELDKKAEVQILIRHELDLKNYLKNRLAHLLREEEIKWYQRVLSSVLGGLKINFHKSELFCYGKSKFAENEYVMLFGCRSGTYPFRYLGIPMHHKKLSNKDWQIIEERFQRKLSSWKGKCLSVGGRLVLINSVLSSLAMFMLSFFEVPKGILKKLDYYRSRFFWQSDGHKRKYRLARWSVICTPKDCGGLGIQNLNVQNKCLLSKWLYKLINEDGVWQKLLRKKYLAKKTITLVEKQPGDSHFWAGLMEVIFKGTYWARQWSLLLKEDNRDLGAGNLQGTLLGSCKITLVRTERLSSLVLVQGLPVVASKASKLTDLDAPISTSQTKYLELLARYQYLSSAAVQGKSEGITADSSRNPIDSSAVDRLEGKLAVLQFQMQIKCPMDKAKELSLNLKSITQLFNNYAVPFNLWEVWLSLFLGDFFLDPAFFSLMLTVKLFEKFGPGSLASTRGGVAEACSVVRRVGSKLDPADGSCLPLDIICLHLEKAALDRLSSEKD

SEQ ID NO: 187915 - protein, 196 aa, Oryza sativa
  Clone ID: PAT_MRT4530_84571C.1.pep
RNPIDSSTIDLLEGKLAVLRFQMQIKQELEFMASQLENLSGSSESPNDPFPRDNILADADTARFAMDKAKELSLNLKSITQLYNDYAVPFNLWEVCLEMLNFANYSGDADSKIVREIWARLLDQALTRGGVAEACSVVRRVGSKLDPADGACLPLDIICLHLEKAALDRLSSGEELVGDEDVARALLRACKVYLNL

SEQ ID NO: 187916 - protein, 145 aa, Oryza sativa
  Clone ID: PAT_MRT4530_84572C.1.pep
MTTSLRKNRKKRGHVSAGHGRIGKHRKHPGGRGNAGGMHHHRILFDKYHPGYFGKVGMRYFHRLRNKFYSPAVNVERLWSMVPAEQAAEAGAGKAPLLDVTQFGYFKVLGKGLLPEKPIVVKAKLISKVAEKKIKAAGGAVVLTA

SEQ ID NO: 187917 - protein, 92 aa, Oryza sativa
  unsure (1)..(92): unsure at all Xaa locations
  Clone ID: PAT_MRT4530_84573C.1.pep
KRGNGKNLGVTKLNRFEKNPLFASWGKKKKARTNRLSKNLPTLNGKGNPPXAANXSGGGGGVTRRGTVKFARAQAPVLLVFFLSFLATFAGF

SEQ ID NO: 187918 - protein, 94 aa, Oryza sativa
  Clone ID: PAT_MRT4530_84574C.1.pep
MARTEVSVLRSSTTCPASGGDNEQGRETGAERSMLVVLAKTMTEGKEYCERKINLLKSNFDELVEMATKKKNIADEMGRLLQAKLRQSSPSPSS

SEQ ID NO: 187919 - protein, 62 aa, Oryza sativa
  Clone ID: PAT_MRT4530_84575C.1.pep
KKRLKLYCIRLKKNFKLNIPKLYLPRMKRRLTGVYLLIQNLEFIIIIYVEKTLQLLNMSNNR

SEQ ID NO: 187920 - protein, 60 aa, Oryza sativa
  Clone ID: PAT_MRT4530_84576C.1.pep
AKPSTRKQHQGCCQRPFRKEPGFHPGQIWRGYQIWRRPQRSRAEPYRRAAIAAGSPTTTP

SEQ ID NO: 187921 - protein, 223 aa, Oryza sativa
  unsure (1)..(223): unsure at all Xaa locations
  Clone ID: PAT_MRT4530_84577C.1.pep
MERGGRTGRCSTVLAGAVTRGRRRGSNLSGLGLGKRKERARPESPFASLLVPAPLTRATTNGDDEQSXGGGGNGAEANGRGRERGRLGFKGXGNVGLGTDLGRSRRELALRLAAKTATXEVTPARGKKEEKGGEKGGSPLASLGKGEGERGRRGRGRRALPPSLGGLRAEWRGRGYDDGDDGGAVWSGAATQATGATEADGGSDQAVGHHGTRAREAMGGAAI

SEQ ID NO: 187922 - protein, 125 aa, Oryza sativa
  Clone ID: PAT_MRT4530_84578C.1.pep
MRMERPARATAFRRNKGAAGGEDNAATSIGVPATYRSRPEAGRYWTPTRRPLRQASGEEEWHQCHWLPAGAPFRRVSGEETASHRRPDLARIGYGLTGYGGHGLTGIVHGLTGHVGHGLTDIGCG

SEQ ID NO: 187923 - protein, 656 aa, Oryza sativa
  Clone ID: PAT_MRT4530_84579C.1.pep
MAGVDAARYAHSEAHHAVATRDHAALRRVLDALPRARRPEEIRTEADSVAEEARAEAASAVIDRRDVPGRETPLHLAVRLGDAAAAEMLMAAGADWSLQNEQGWSALQEAICAREEALARVIVRHYQPLAWAKWCRRLPRVVAAMRRMRDFYMEITFHFESSVIPFISRIAPSDTYRVWKRGANLRADMTLAGFDGFKIQRSDQTILFLGEGSDDGKVPPGSLCMINHKDKEVMNALEGSGAPASEAEVQQEVTAMSQTNIFRPGIDVTQAVLLPQLTWRRQERTESVGPWKAKVYDMHHVMVSVKSRRVPGAMTDEEFFSACNENDTESEGFDDVLTEEEKKQLEAALKMDSPDGAGGEGQSDTFVGPRHSCVEPREREIPIEDLSISGNGDSKHDKKGWFGHWGKRVQSSKLEGTKKMAPPRSSLCVDEKVSDILIESPSNVQTRPGRHSVDVVRGDESRRGKERDYRRPAASSECGHRRKEGSKESEYKKGLRPVLWLSPNFPLRTEELLPLLDILANKVKAIRRLRDLLTTKLPPGTFPVKVAIPVVPTIRVLVTFTKFEELQPLEEFTTPPSSPDNSKSPVAQSSSSSWIQWIKAPYHQNFSTAPGPSSRVEDIQDPFVIPADYVWTTPEEKKKKTQENKSKSKKGRNAAA

SEQ ID NO: 187924 - protein, 113 aa, Oryza sativa
  Clone ID: PAT_MRT4530_8457C.1.pep
GPRPSLALPPTNPSPIPNSTGAAVARRRRDRPDHNGPMGRALPCGDAPDDAYIIFDIVESSRRQAVDYVCTPTGDDTSGKRPYLSSLGNCGRFKVTRANTSGFGEGTFLTQGG

SEQ ID NO: 187925 - protein, 863 aa, Oryza sativa
  unsure (1)..(863): unsure at all Xaa locations
  Clone ID: PAT_MRT4530_84580C.1.pep
MPAHMQMRLCQVELALDLAWHAGTVHYKRRCVPATLSARLGPQIRSENEGSMCLEDVSPKGKRASYSFVFFLLRAAQRCLCCSSNRRGRAGDGASRGAADSPTEPTGGGERETAPAGTAARRTLRRSRVDRRRRGATSAAPPTGGGERETAPAGAWRTPRRSRADQRRRGAASAAPSIGGPSDTGERRGEARRLRGAASPPPTGXSGPRSDGRVGGAAQEASAGKGAAASPLSTKSTPALPFPSLSGAPHLPADDEHRGLGGPAAAQELGRHGILPSGERHPASAPPPSSFSLRALKEIGATLARGEQLHEEAHGHGPEEEPEQRIASGRAGLEVALEVARVQKRDAHQDPGPREQPQPAPQEGRHTATAGEGVVVVEVGVIIAAAAPRSRTSHRRRGEPSPSASSLPRGEXPLSSPSTRASRARGAAAAGCRLPASCLVSGGSRLPPPRASRSRSRRRGHRLPPRAHGETSPPPPRVRGETSSPPPPASCAGSRHHRERAPGGEPTRRGRYQPQCKCNTGVLRTPCRGDRSVGVVIVVEETCWAVSLLVGVTGRATEEEIGVWFFHTVFSAAVFFVAVLFPHGAETLKLIVADLLLEELLVSRIHFIFFSNWGGIIYIEQGLLTSAEGVHFTHTTLLTRITQPVGISHVGRPPSFHDKAFRKPIQVYHMPTRGVPDQQQFYPSCYSDFKFEGDRRYSHRVHEYRGATGWLQGDMAELAPTWRLRGCHAGRREVDDDLAANGRRAAAASGGANHGDTGKSVHTGRLHVTRGDEPTARIRRRLLDGGGLRRRQPAAGEEGNGDEVTRGRFPAVRASTRRRELDASVGLDGTTPSEAGDERVLRSLGGDGGEHTASDGNGRGGAG

SEQ ID NO: 187926 - protein, 148 aa, Oryza sativa
  unsure (1)..(148): unsure at all Xaa locations
  Clone ID: PAT_MRT4530_84581C.1.pep
KNNRSSKRRREKKRRSSPPRRRLDAYAPRLPVSFPAGDEWTSPHARLDPVPPPPPRGTSSPLPLAPFSPTPPRTTGSPTPSPPPPPPCPPPSPPLPLPLMSSSRPGPSPPPPTDASPILSSPPPNPSPQPRKPXPPPPPPPKIHCRTV

SEQ ID NO: 187927 - protein, 339 aa, Oryza sativa
  unsure (1)..(339): unsure at all Xaa locations
  Clone ID: PAT_MRT4530_84582C.1.pep
MESPTWPGTFGDVGPEGEVSALLLISPRGGRVAPAPTPRAEAELAPTWRLRGGHVGWREVDDDPAANGRRAAAASGRANHGDTGKSVHTGRLHVTREGEPSARIRRRLLDGGGLRRRQPAAEEEGNGDEVTRGRFPAVRASMRLRELDASVGLGGTTPSEAGDERVLRSSGGDGGEHTASDGNEARQSTGAAATGGQGRELALGGRGQSGDREDDAGEEEKGEKEGKKGGLPLCRFGKKVEGNGSIAAEGGGARXPSLGGLRAEGRGPGDDDGDDGGXRFGAERRHWRQARAXLTAAATGRTAVCAAAAPPSPAGTAPPAPPSRGATGAYPPPPPTSGA

SEQ ID NO: 187928 - protein, 191 aa, Oryza sativa
  unsure (1)..(191): unsure at all Xaa locations
  Clone ID: PAT_MRT4530_84583C.1.pep
NLCRGGTLYPHDITNPDHPARISKADTGLPYADERGPRPTTGXVPDLTVPGSPGVLPDTTPVNPHVSRHQGSPDKLVTQPGVSHSTHVVVLVLXSDEIPRKRSLSTRAGXNCTPDFKFEGDRRYSHRVHEYRGATGWLQGDMVACLARDLELDPRNPRTAGLRALKLYAKRNNSTNDENKALLMTSKRAIR

SEQ ID NO: 187929 - protein, 123 aa, Oryza sativa
  Clone ID: PAT_MRT4530_84584C.1.pep
MEGSEELENYFIFNDRYRGMRMDIDGMSYEELLALGDRIGTVSTGLSEDALSKCLDRSMYMATTSGTHEDCERKCSICQEEYSDGEEVGKMVCKHYYHFSCIKNWLRQKNWCPICKSVALNTN

SEQ ID NO: 187930 - protein, 390 aa, Oryza sativa
  unsure (1)..(390): unsure at all Xaa locations
  Clone ID: PAT_MRT4530_84585C.1.pep
MVTREYASRLAVERAHGEGLTGVGSTRSWPSWRRRGAYVAATRAGGRTRGDEPTARIRRRELDGGGLRRRQPAAEKGGNGDKVTRGRFPAARASTRLWESDASVGLGRAAPSEAGDERXLPSSGGDGGEHTASGGNGRGGAPGVPFRVLARAGSSDTRNDERRRRTEHGRRRQWRGGEWERKGKREAWVYRGDNVGLGTDXGGQRRGLALGGRGQSGDRDEXEDDAGXEEKGEKRERKGGLSLASLGKGGGSGGDAAGGGGALPPSLGSLRAEWRGPGDDDGGDGGXRFGAGRRHGRQARADXQRLTAAATRRSATXRHARAGSSGRRGGLSGAARARALARGAERLRGRAAGPGGVDGAGAARAATTRARAREQRRAGADFGAGSSLGM

SEQ ID NO: 187931 - protein, 94 aa, Oryza sativa
  unsure (1)..(94): unsure at all Xaa locations
  Clone ID: PAT_MRT4530_84586C.1.pep
ELLALGDRMGTVSTGLSEDALSKCLDRSMYMATTSGTHEDCERKCSICQXEEYSDGEEVGKMVCKHYYHFSCIKNWLRQKNWCPICKSVALNTN

SEQ ID NO: 187932 - protein, 527 aa, Oryza sativa
  unsure (1)..(527): unsure at all Xaa locations
  Clone ID: PAT_MRT4530_84587C.1.pep
MTSKQKERREGGNIDFSRAARVRPKRFGVARPSLTGRPAQDGPSARAREGGERVRWTGLTTRGPGWDPLVSGSAHRAEGARGARARAGLGRGARARLAVDADAAGPRAASRLAVERAHGEVPTGVGSTRSRLSWRRRGAYVAATRAGRRGDEPTARIRRRLLDGGGLRRRQPAAREEGNGDEATRGRFPAVRPSTRLRELDASVGLGGTTPSEAGDERVLRSXGGDGSEHTASDGNGRGEEMERGGRTEGGTXRAGRGAVTRGRRRGSNLSGLGPGKRKKRARPKSSSASLLVPAPPTRATTIGDCETEGGNGAEAKMREXEGEGLGLNGQQCRFGRGEPTXTGEGSGSVAAEGGGARXPSLGGLRAEWRGPGDDDGDDGGXRLGAERRHWRQARAXLTAAATGRSATRHARTACNGRRPRGRARTRRAGSGSEGAVREDLARHGRLTRAGSRGRAEGRRARLSRSRAAREGGALGAATRARARGAGRSGGREGESGGVPGKARGRWAEGKSAHRPWGRQNGLLRRN

SEQ ID NO: 187933 - protein, 273 aa, Oryza sativa
  Clone ID: PAT_MRT4530_84588C.1.pep
MANPDALSSGDDSSTVHFTPFLHADQSSKQADDISSAQVNMQLPTRRHIQKANTFSGGSGDGGRLGGAAGDGDGGGAAGDGDGDDADVGVEGCSARRRGWGRRPYAARARLPPMDPALKTDANCIRGCVSQVWVHAAPKEGAPDRVSFQADSDAQLTKGLAALLVLGLFDAPARDVAMVPVEFIELLGIRQSLSPSRNSGLLNMISLMKHKVLEITIGEVTTEEIGRQDVVQEVAEPPAAVTVPMPSRAAAAIPVPSRAGATHHWQWRGVRDI

SEQ ID NO: 187934 - protein, 37 aa, Oryza sativa
  unsure (1)..(37): unsure at all Xaa locations
  Clone ID: PAT_MRT4530_84589C.1.pep
GPVHWQEELSLSSKAAEERRPPKAASRSSXGATVGMP

SEQ ID NO: 187935 - protein, 68 aa, Oryza sativa
  Clone ID: PAT_MRT4530_8458C.1.pep
WRNWVEMARLAFGHIQDLSGLLVVSCFIRKRLYTNHGALMHKILAFKHQKKKKGGGHKGGNLLKEGSM

SEQ ID NO: 187936 - protein, 403 aa, Oryza sativa
  unsure (1)..(403): unsure at all Xaa locations
  Clone ID: PAT_MRT4530_84590C.1.pep
RAGRPKTAQARARAGGRRESPVDRAHHTRSRVGPACQRLGSPCGGSMRRTRTGGAGTRCTRAVRGGXGCGGPTRSLTAHRGPRARGETEGAAGRVGLXPVAAEVAPTWRLRGSHAGRREVDDVPAANGRRATAASGGASHGDTGESEHTGWLHRTRGDEPTARIRRRESVGGGLRRRQPAKRKGGNGDEVPRGXFPAARASTRLRELDACVGLDGTTPSEAGDERXYRARAATAASTRRAMATVGAAPANYGENRGRHYRAGRGAVTRSRRCGSNLSGLGPGKRKKRARPKSSSASLLVPAPPTCATTIGDGETEGGNGAEAKMRDVAAEGGGARLPPLGGLRAEWRGPGDDDGDDGGMRVTAAATRRSTTRHARAGSIGRRGWAAGPGDADGADDAARAGNH

SEQ ID NO: 187937 - protein, 366 aa, Oryza sativa
  unsure (1)..(366): unsure at all Xaa locations
  Clone ID: PAT_MRT4530_84591C.1.pep
AARAEPSPPLRSRAAAPRASFARAPASSSPRRVCTARPRCPAAPAAARPCSQHACPSRATPSAAPPVASRARVPSGRPPGRRRRQPQPRHSARKPPRDGGRALLPQPRRPRSPPPFPKEERGEPPFPPSFSPFPPAGVIFPPPCRRLDASAERQFAPLPSLAVCSPPSPPELRSTRSSPALLGVAPPNPTLATDSRGRVDALTAGNWPLVTSSLLPPLPSAGCRRRNPPPTDSLRQIRAVGSLPLLLPRHPSVRPVAPHRHKAPRRNRRRPPSIRGRRLRLPPASPRGSHXRRHVGATSASARPRSGRANPAVRLRVGPPHPFHREPRACTASLPRPRACATCSLRTVNRVTDKRVPPGTTRGEPG

SEQ ID NO: 187938 - protein, 173 aa, Oryza sativa
  Clone ID: PAT_MRT4530_84592C.1.pep
RYFGKGPPEGLIRILNCVRDKSRVQQGPIMYFGYKYGPTPCNQGTTVQYTSAHRHPFYFHCFDEFLLSSWAASGSISDEERVPSDGLRTVGIYSRSSMPNNLQVFICLRRSDASCIGVAPDDMSSAILPIGYRSNQLARSEPEGNFFGPALELSRSLRPLRVDFSRHHLTSSF

SEQ ID NO: 187939 - protein, 475 aa, Oryza sativa
  unsure (1)..(475): unsure at all Xaa locations
  Clone ID: PAT_MRT4530_84593C.1.pep
PGLTGRPAQEGGPERPKTRARGRXREREPVDRAYHARSRGGGRMRCTRVVRGGRRCGGPTRSLTARGGTRARGGADRGRLDPVLAELAPTWRLRSCHAGRREVDDDAGRNGRWTTAASGGANHGDTGKSEHTGWLHVTRGDEPTARIRRRKLDGGESRRRQPAAGEGENGDEVTRGQFPAARASTRLRESDASVGLGGTTPSEAGDERXYGARAATAASTRRVTTTEEEEEGAPGVPFRVLVCTESSGTHATTNGDGEQGRQWRQETKTREIGGGGXLGFKWAAMSGWERGTGIGRSSRRAGAPASGQNGDRRXTPARGKKXKEGEKRGARPLPLWEKGGGXSGSVPAEGGGLCLRPLAACARGGGAEVMTTAMTAGRFGAARRHERQALTTAATRRSATTARARGKQRAARARWLAGPGGCAAAGAAGQRGRAARXGADGAALVHARAARGRSXGGGAGRGSHARARGARAYRI

SEQ ID NO: 187940 - protein, 273 aa, Oryza sativa
  Clone ID: PAT_MRT4530_84594C.1.pep
MAVVKAARPAFRGAHDGVAFAANAAFLAAGYSLCAVGPAALTDPPPSGEEEVGIDGWNSMDNCYAFLYIKEERGKKKRVLVKCLVIGDVLAIDVLDLESQNKGPYNIQINVKDFFSEEQPKNYGNMYKNFAGLIETMNSNALSKLDEKDAGAAKNPEVETSSSIHSLVYPPIAPLGHDDAFPGPGAGFYPHSGIGGGGSMHVGPNDPRFFPSNPFPVPFGGPGSVPPGGRYDPIGPPDVPGFEPSRFVRRPRPPAGTTHPDLEFFQPGPHGPF

SEQ ID NO: 187941 - protein, 260 aa, Oryza sativa
  unsure (1)..(260): unsure at all Xaa locations
  Clone ID: PAT_MRT4530_84595C.1.pep
SPINDGPKRARGRGGEREPVGRVHPAWSRVGPACRRLGSPCGASTRRALGFGEGXTRCTRAVRGGXRCGGPPRSLTAHRGPCARGGERRERLAGSADPVAAEVAPTWRLRGSHVGRREVDDNAGRNGRRTTAASGGANHGDTNESEHTGWLHETRGDEPTARIRRRECVGGGLPRRQPAGREEGNGDEVMRGRFPAARASTRLRESVPCVGLGGNASREAGDERRFRARAATAASTRRATAAVGAAPASYGEATRATTRV

SEQ ID NO: 187942 - protein, 265 aa, Oryza sativa
  Clone ID: PAT_MRT4530_84596C.1.pep
PANAAFLAAGYSLCAVGPAALTDPPPSGEEEVGIDGWNSMDNCYAFLYIKEERGKKKRVLVKCLVIGDVLAIDVLDLESQNKGPYNIQINVKDFFSEEQPKNYGNMYKNFAGLIETMNSNALSKLDEKDAGAAKNPEVETSSSIHRSENPGLRTTEPGLVYPPIAPLGHDDAFPGPGAGFYPHSGIGGGGSMHVGPNDPRFFPSNPFPVPFGGPGSVPPGGRYDPIGPPDVPGFEPSRFVRRPRPPAGTTHPDLEFFQPGPHGPF

SEQ ID NO: 187943 - protein, 291 aa, Oryza sativa
  unsure (1)..(291): unsure at all Xaa locations
  Clone ID: PAT_MRT4530_84597C.1.pep
WRRRSRRDRSKIKMFRALQIVLRGXAGKVAVITGAASGIGKATAAEFVRNGAKVILADVQDDVGRAVASELGADAASYTRCDVTDEAQVAAAVDLAVARHGQLDVMVNNAGIVGSLSRPPLGALDLADFDAVMAVNTRGVLAGVKHAARVMAPRRRGSIICVASVAGVLGSVTPHPYSVSKAAVLGAVRAAAGEMARSGVRVNAISPNYIPTPLVMRIMAEWYPGASADEHRRVVEREINEMEGATLEPEDIARAAVYLASDEAKYVNGHNLVVDGGYTVGKAPNLPAPPQ

SEQ ID NO: 187944 - protein, 76 aa, Oryza sativa
  Clone ID: PAT_MRT4530_84598C.1.pep
HSKLVVQKVNSTLMLIKKGTCWLYVGPVTAPLLKICGPPGNLYPKCYVQQLRSSMDGDRPTLEKMNKMKLKVELMR

SEQ ID NO: 187945 - protein, 74 aa, Oryza sativa
  Clone ID: PAT_MRT4530_84599C.1.pep
LYLQYMKSRLQIHPRWHQAQQAGDELQSLRSWSKTLTSLSAPTSRTPRLFSIIGADGRAEVLMILRECRADPGR

SEQ ID NO: 187946 - protein, 221 aa, Oryza sativa
  Clone ID: PAT_MRT4530_8459C.1.pep
MPSSRAGPRHVVLVMLFFAAAVAARGADAASPVTTRPCGAAAAASFLCSRCATTVYPAVCYDSLLPYAGAFQDSRVRLARAAADVAAARLRDFSASLDELVHGSGDVGAVTTPPRVAAAVRDCVGTVSSAAGLARRSSAALDRLDAGAAAGGGGSRLARWEVSNAKTWLSAAMANVATCADGFADADSWSAAGIEEVVAGEAANVSKYTSNALALVNGIPL

SEQ ID NO: 187947 - protein, 475 aa, Oryza sativa
  unsure (1)..(475): unsure at all Xaa locations
  Clone ID: PAT_MRT4530_845C.1.pep
MVPRGDDGAASAAPGSPVAQLPRRRPGHGPRRRHYLKNPLTGEVVRLPGHCHCGDPARLRRQHPPGSPTAYFYIRKVIVCGGGGLVVARISYSHDNADDVVACCRPGTSPSWSAGPWEGKGYHDMAFHDGKVYTVAGRGDLFAHEITTHRKTKQPMVSDLATQIIQVGLFESFLLDGTYAAVRCKRLHYLVMSKQSNGLMFISRAWVMRRSSLVQAAPWQFVRRAMEVMWKQFVFAAHSRGAMGLCFGIDTRSSPPPSPPHPRPQPPPPGSSDLPTDVAILPSPPHPRPPPPPCWSXPPDGPRRPVAPRRAPATPXPPPPPWLLIXVAPASTRASPTASSAPSPARIRAARSPTSPPTMMAGSWSTNASAAETGSGILSPAPPLTYLAASISASGASTTSWATTTAVIALTPPSTRCLRSSCARRASSSPPSSTLPASPLSGRELIIHGRLFPVMKLCRRPVVMMMMTTMMIIRG

SEQ ID NO: 187948 - protein, 825 aa, Oryza sativa
  Clone ID: PAT_MRT4530_84600C.1.pep
MNGMACFPLFIFSFCKCDDQLTQAKKLYPGDVLVSQNGVFALGFFSPATSNQSLFLGIWYNNIPERTYVWIANRDKPITAPSSAMLAISNSSNFVLSDLEGHTFWTTMANINTRGDRAYAVLLDSGNLVLRLPDNTTAWQSFDHPTDTLLPNKKFFLRYKAQVAMRLVAWKGPNDPSTGDFSYHSDPRSNLQAFIWHGTKPYYRFIALSLNRVLVSGEAYGSNIATLMYKSLVNTRDELYIMYTTSDGSPYTRIKLDYMGNMRFLSWNGSSSSWTVISQQPAAAGDCNLYASCGPFGYCDFTLAIPRCQCLDGFEPSDFNSSRGCRRKQQLGCGGRNHFVTMSGMKLPDKFLQVQNRSFEECMAKCSHNCSCMAYDYAYGNLTKADTMSDQSRCLLWTGDLADMARASLGDNLYLRLADSPGHTSEDKKKNRYLVMVLVTIIPCLLMLTCIYLVRKWQSKASVLLGKRRNNKNQNRMLLGNLRSQELIEQNLEFSHVNFEYVVAATNNFSDSNILGKGGFGKVYKGKLEGGREVAVKRLNTGCTQGIEHFTNEVVLIDKLQHKNLVRLLGCCIHGDEKLLIFEYLRNKSLDYFLFDDSKKPILDWQTRFNIIKGVARGLVYLHQDSRMRVIHRDLKASNILLDEEMSPKISDFGMARIFGGNQHQANTKHVVGTYGYMSPEYAMEGIFSVKSDTYSFGVLVLELISGCKISSTHLIMDFPNLIACAWSLWKDGKAATFVDSPILECYSLNEFLLCIHVGLLCVQEDPNARPLMSSVVAMFENEATTLPTSKQPAYFVPRNCMAEGAREDANKSVNSISLTTLQGR

SEQ ID NO: 187949 - protein, 129 aa, Oryza sativa
  Clone ID: PAT_MRT4530_84601C.1.pep
TLLHIYTTLIKGKKNAPPPPPLNLQRRWPDRPGVAGNGEGGRPSSRKPMTAVAGGLIYSICSLWRSPLAFSSSCLILLTWMWISTFCSNLTTLLLSPCSSSISFSIVAAAASINNLDMCFAGRVGRLVA

SEQ ID NO: 187950 - protein, 144 aa, Oryza sativa
  Clone ID: PAT_MRT4530_84602C.1.pep
KACRVHDMILDLIVSKAVDENFSTSIGDETHRLASQAKIRRLSVDYSGQEVSVSWPSLMLAHVRSLSIFGYSEQMPPISEFKALRVLDLESSVKLQNSDLNNVVDLFQLRYLRIAASRITHLPEQIGELQFLKTLDLRRTWIRK

SEQ ID NO: 187951 - protein, 60 aa, Oryza sativa
  Clone ID: PAT_MRT4530_84603C.1.pep
WFFNRFFTRQFFFGFHKPFSCKLLFLGFLVSFQNVFGFVSGLNFMPLLNSWYAFFRGLLF

SEQ ID NO: 187952 - protein, 276 aa, Oryza sativa
  Clone ID: PAT_MRT4530_84604C.1.pep
MAAAGAALRLRLLYRMLRVGELLALVVFLSWSSSRVPAAAAAVVRLAGSLLLNARFVFVLGNAIVLLLLALSRHDLSISSNHGTTTTAAAAAVSSDSAGAGSTPASTTAPPAASFPLFIVPQPSPPPPHATEAPVVAAPPAPVVPCAPSVAPAAPAAAAAFEDKQAVRVNKARAPRRSRSEKMGSRGAFRRAVSPELRRSESDNGRRRRSSVTARDAEVCWGADDAEEFRRTVEAFIAKQTRFHREESMTMTMSIVAGVGHGEVAPAIAGALAVVE

SEQ ID NO: 187953 - protein, 94 aa, Oryza sativa
  unsure (1)..(94): unsure at all Xaa locations
  Clone ID: PAT_MRT4530_84605C.1.pep
MSSAFTVDETGPFFGCLGASYGLMFXCMGAAYGTATSGIRLAAMGVMHPELVMKCIAPLVMAGGLGIYGLIIAAMLWTGISHLAKPDYLCDRYS

SEQ ID NO: 187954 - protein, 142 aa, Oryza sativa
  Clone ID: PAT_MRT4530_84606C.1.pep
MAEDDPRGLISATSHDDVTTGGGSGTHSRRRMTAWRRERRAPKRCGHRCELTGYQSDGGRATDDVGDEEKAAATFGLTTATAFRRSTVTEKVRMETATRRRSRRRPSRAVTTTGATAAHGWSDGSDGGSRSHAEAALQTAAG

SEQ ID NO: 187955 - protein, 450 aa, Oryza sativa
  Clone ID: PAT_MRT4530_84607C.1.pep
MASDTKAVAALFSMYNDDEEEDDGDEPRPPSPPAAATSSSPSPQTEGEGSNPNPNAAASSAPPSPPLAEDPAGRRTLASPYPSPGLPPLPSRRSSSPFAISSPSPLRPAAAMPPADLPRPPRRGPLAIVDYAHDETAMSPEQEDGEINGIDRSGLDAQVAEGNYEEKTLSGIVHILTPNIRSEMSQQNDAPEQNQVGAAAAMSVTGAEMEDVQVEEAADNMQNDDPLSRFLPPPVTAKCSAALQQKINKFLAYKRAGKSFNSEVRNRKDYRNPDFLQHAVRYQEIDQIGTCFSKDVFDPYGYDRSDYYDEIEADMKREVERKELEKKKSGKVDFITGGVQAPISAAIPKIAVLIASFTAAVSAAAAAGAPLVSISGEGVQKEARPNKKSKWDKVDGDIKNPVAPSGLDNLSAAALLTSANVGAGYAAFAQQKRKEAEEKKTSDHKSDRRS

SEQ ID NO: 187956 - protein, 165 aa, Oryza sativa
  Clone ID: PAT_MRT4530_84608C.1.pep
MGEGEIYLTKKDRWASPASRWLRPSHGSAGGEDLGAEDLVAAYPSEHSLEEDGWEAVDWGVMKGGGGGLGGGAVWWRRRRRRGTAEGLHCSKRRLGKANLPLCKSKPNHQPIKVLRPILIHGLMPLYNADHTYTRLSAKMPIIGLIFGNFWRVALQPVRVSDQVI

SEQ ID NO: 187957 - protein, 199 aa, Oryza sativa
  Clone ID: PAT_MRT4530_84609C.1.pep
VPRGRSGLNVNQARLPQQGTYMALLRQVPSHHREASGSHTSEPVDFNDDEPLQLIESGDSRDARCSRAVEIKTYPEFSAIPQSSSEDDFAVLIHLKAPCANPEQVTGRPFNATSIGYPTSRAPVDLVTVLDVSGSMAGTKLALLKRAMGFVIQHLGPSDRLSVIAFSSTARRLFHLRRMSHSGRQQALQAVNLLGAGGG

SEQ ID NO: 187958 - protein, 41 aa, Oryza sativa
  Clone ID: PAT_MRT4530_8460C.1.pep
YKGLDLLVRLKIYSYYFIIFMLNSMKDFRVDKKSNKFIKSK

SEQ ID NO: 187959 - protein, 470 aa, Oryza sativa
  Clone ID: PAT_MRT4530_84610C.1.pep
MPAGARSWLADLRARFGGGAREEAGLGILAFEAAAAMSRLVSLHRSLSDVEVRRLRADALRAEGVARVTSTDQSLLLRLACGEFVADLDHAAGTAARLGARCCAGAPFLHDFDRVYAEAKRGNGLARLDATVGFYRSATKQFRKMERHVAATAKLYAEMDAVSELEASERRMEQWMRHSGPIPAQPGPSAKRQVPEPGEKLIRELNSQRQKVRRLMESSLWSVAAHKVSKLMAKSVLAVLARISITFGAYVPGLPLLTVGRAWALRRTSGPLQQAASPAAAIRHSAPIFRQKDTAFSASESIKPPASTVGGSGMELRYANMIVCAEMLLRQLWPTIHSNEVDAGMDLSKRDELYKMLPVTIRTAVKAKLRESWRGQPVDEAAAAASMDAVDRMLRWLGPMAHDTVRWHDEHSMERAQRFSMRPRVLMVQTLHFADRHKAENVIVEVLIGLSCVCWYDDERRRPADWDDDD

SEQ ID NO: 187960 - protein, 68 aa, Oryza sativa
  Clone ID: PAT_MRT4530_84611C.1.pep
MPIRNIAGGSHQEVYHPGALKAAMAEFISTLICVFAGQGSGMALKKANGRGTNNPGRPNPAGVAHAFA

SEQ ID NO: 187961 - protein, 56 aa, Oryza sativa
  Clone ID: PAT_MRT4530_84612C.1.pep
RVAGAAMEEDMMEMSVRSSDGSIIWRWTVDVSSPILHACWPACLFWILFVSFLCSS

SEQ ID NO: 187962 - protein, 41 aa, Oryza sativa
  Clone ID: PAT_MRT4530_84613C.1.pep
VRPQGVFSARGDSTPTHFICGVPPICIRLPFPNCAQTCVHL

SEQ ID NO: 187963 - protein, 155 aa, Oryza sativa
  Clone ID: PAT_MRT4530_84614C.1.pep
RLGFSSPARVDPLFPWSFSGPLHRRRAPPYPSATAAGSARGGEESSPAAGSARGEEESSPEGGSQRGDDGRTASSPRHGCWSELIRRGSGPLVSWCCSAPDLPAPLLHFLLAITSAGKVVVPRADELMSARHGLPSSAGMADEVRRQGAARKLKF

SEQ ID NO: 187964 - protein, 75 aa, Oryza sativa
  Clone ID: PAT_MRT4530_84615C.1.pep
AGHSPPRIPQSCPCSQRWLSSHWDRSPSGAVICASPKCAALRSAHSRCFRAASSFRAGPRSGATKAPWRRRNARP

SEQ ID NO: 187965 - protein, 547 aa, Oryza sativa
  unsure (1)..(547): unsure at all Xaa locations
  Clone ID: PAT_MRT4530_84616C.1.pep
WAGRPKAAQARXGREGERGPVDRAHHAWSRGGGGTRCTRAVRGGRGCGGPTRSLTAHGGTRAREGXDRGRPDPTSAELAPTWRLRGCHAGRREVDDDAGRNRRRTTAASSGANHGDTGESEHTGWLHRTRGDEPTARIHRRESVGGGLRRRQPAERKGGNGDEVTRGQFPAVRDSTRLRESVASVGLGGATPSEAGDERRFRARAATAASTRRAAATXREGVPRVLFRIHERTGSPGAXAMNGGGETELGRRRQWRGGEWERKGKGETWVYRMAMSXGTDLGRPRRRQGGRRMTPAEGKGXEKEGRKGLASLPLWEKEEGAGATRQGEEGLCLRPLAACARSRGAEAMTTAMTVGRCGAERRHKRQARAGCAAESNGRRGGLSGAAWARALACGAGRLRGYRRGRAAGPGGADGANGTALAHARAARGQSGGRGAGRGSRARARGARAERRGGRESEKERAPGREGGDFFLVVVPRPPCFARASFGVFLLCWFWCFCLSLLLSLGLCLGRGFLVPSWWLCVFSFVLVVGCLAWSYFCAVLSFLLVGF

SEQ ID NO: 187966 - protein, 538 aa, Oryza sativa
  unsure (1)..(538): unsure at all Xaa locations
  Clone ID: PAT_MRT4530_84617C.1.pep
MTVGTAVRTPVGISHVGRPPSFHDKAFRKPIQDSVLKCESGKPYSRYVPRSAILSLKATVDTRTECTNIEAQDVQRWLALLEIRSLILEILALRVFGLRNARGPGWDPLVSGSAHRAEGVRGARARAGEGRGARARSAEERMRRAHAQPHGSRWNARTGGADRGRPVPTSAELAPTWRLRGCHVGWREVDDDAGRNGRRTTVASGGANHGDTGENEHTGWLHEMRGDEPTARIRRRKLDGGESRRRQPAGREEGNGDEVTRGXFPVVRASTRLRESDVSVGLGGATPSEAGDERVLRSSSGDGGEHTAGDGNGEGXRSAVAAKAATXGGRRMTPAGGKKGKRGREKGACPLAYSGKGGGSEGVAAEGGGRLCLRPLEASARAGAAEGDGGGDQAVSHSARARGKQRAARLGTRAGSRGRAAAGATEQRGRATRXRRRRGSGGEPRGRARERRCAGAVFASGELARERRRRARGKGGGARRGARAHARAARGRAGRSGAEGEGERERAGEGEGARERERERAGARRGRGEGRGRGEDVL

SEQ ID NO: 187967 - protein, 45 aa, Oryza sativa
  unsure (1)..(45): unsure at all Xaa locations
  Clone ID: PAT_MRT4530_84618C.1.pep
TKKEMVQLKGHSSVDGVGASIYKVMXLAGVKKLVAFIKDFQDRNP

SEQ ID NO: 187968 - protein, 190 aa, Oryza sativa
  unsure (1)..(190): unsure at all Xaa locations
  Clone ID: PAT_MRT4530_84619C.1.pep
NLCRGGTLYPHDITNPNHPARISRADTGLPYADERGPRPTTGXVPDHTVPGSPGVLSDTTPLNPHVCQHQGSPAXQFTQPGVSHSTHVVALVLXSDEIPRKRSLSARAGNRTPDFKFEGDRRYSCRVHDYRGTTRWLQGNMVACLARDLELDPRIPRTTGLRAPKLHAKRDNSTNSENXALLMTSKRAIR

SEQ ID NO: 187969 - protein, 89 aa, Oryza sativa
  Clone ID: PAT_MRT4530_8461C.1.pep
NTQFPLQYFSKEFSVNHLKPLMDDATVQIQVQALEGPSTNMILHRSTDHCCNLKKGWADFAVNNNIKLQTVCILHFYKTSHLGATIDIF

SEQ ID NO: 187970 - protein, 496 aa, Oryza sativa
  unsure (1)..(496): unsure at all Xaa locations
  Clone ID: PAT_MRT4530_84620C.1.pep
MWLQLLAMAVVLTGSSSCQAARLLADATPPAVPAVTLPPMPAIPAIPAATLPPIPAVPTVPNAALPPMPAVPKVALPPMPAVPAVPTVPAVALPPMPAVPAVPTATLPPMPAVPAVPNAVLPPIPAVPKVTLPPMPSIPAVPKVTLPPMPSVPMPFLAPPPSAXLRTMFVPRASGLLATVLAMAVLLAGSSRSCQAARHLADATPPAAVPVPTVPAVTLPPMPAIPAVPAATLPPMPAVPIVPNTALPPMPAVPKVALPPMPAVPAVPTVPAVTVPPMPAVPAVPAATLPPMPAVPAVPAASLPPMPAMPAVPNAALPPMPAVPKVTLPPMPSMPAVPKVTLPPMPSVPMPSCQAARHLADATPPAAVPVPTVPAVTLPPMPAIPAVPAATLPPMPAVPTVPNAALPPMPAVPKVALPPMPAVPAVPTVPAVPAVPAASLPPMPAVPAVPNAVLPPMPAVPKVTLPPMPSMPAVPKVTLPPMPSVPMPFLAPPPSA

SEQ ID NO: 187971 - protein, 226 aa, Oryza sativa
  Clone ID: PAT_MRT4530_84621C.1.pep
MEAAVGYAADSLIKATELRLGLPGTADDLPSTPRGKKRAAAAEDNNANAAAADDDEHDAVEAAPPVAKAQVVGWPPVRSYRKSCFQQQSAAASKSKAAVSSCNNKDEPITKNAAPAPAASSAAAANGGSLVKVSMDGAPYLRKIDLRMYKGYRELREALEAMFVCFSGAADGANPSEFAITYQDKDGDLMLVGDVPFDMFTSTCKKLRIMKRSEATGLGSPRQMKI

SEQ ID NO: 187972 - protein, 60 aa, Oryza sativa
  Clone ID: PAT_MRT4530_84622C.1.pep
KWGSPPGIMGPPGPLPPLGGSCKKFYQKKGSEVKKKPQNPQMCHVKPWGKKKKKKFSFLF

SEQ ID NO: 187973 - protein, 598 aa, Oryza sativa
  unsure (1)..(598): unsure at all Xaa locations
  Clone ID: PAT_MRT4530_84623C.1.pep
MTVSTAVRTPVGISHVGRPPSFHDKAFRKPIQESVLKCESGKPYTRYVPRSAILSLKATVDTRTECTNIEVQLGGYKGTWARSKVNGAARPSLTGRPAQDGPSTRARGREEREXRWTGLTTRGPGWDPLVSGSAHHAEGVRGSCARAGKGRGARARSVVDAGAAGPRAASRLAVERAHGEGLTGVGSIRSXAELAPTWHLRGGHVGWREVDDDPAANGRRAAAASGGANHGDTGKSVHTGRLHVTRGDEPTARIRRRLLDGGGLRRWQPAAGEEGNGDEVTRGRFPAVRASMRLQELDASVGLGGTTPSEAGDERVLRSSSGDGGEHTASDGNEKGEGAAEVPFRVLERTGSPGAWRRTAEARQNTGAGALRGQGRXALGACSQSGDRRMTPAERGKEKKRERGARPFLLWEKGGGERGDSAEGEGTLPPSLGGLRAEWRGPGGDDGDDGGRFGAERRHWRQARQALTTAATGRSATRRARAGNNGRRPRGRAHANTARGKRLCERGARARGGALGAGDSRARARGARAGRRGERGERRSGRLSHARAACGRGXRGGKERAGGRERERERAPGREGEMGRGRERWAERDSAHRPRGRQ

SEQ ID NO: 187974 - protein, 85 aa, Oryza sativa
  Clone ID: PAT_MRT4530_84624C.1.pep
VPKVALPPMPAVPAVPTVPAVPAVPAASLPPMPAVPAVPNAVLPPMPAVPKVTLPPMPSMPAVPKVTLPPMPSVPMPFLAPPPSA

SEQ ID NO: 187975 - protein, 518 aa, Oryza sativa
  unsure (1)..(518): unsure at all Xaa locations
  Clone ID: PAT_MRT4530_84625C.1.pep
MVTRGHGSRCSKVACLARLLELDPRNPRAAGRGPREMGRSGRAKWAGRPKTAQARARGRGGERGPVDRAHHARSRGGGRTRCTRAVRGGRGCGRPTRSLTARGGTRTRGGTDRGRLDPVXAELAPTWRLRGCHAGRREVDDDAGRNGRRSTAASGGANHGDTGKSEHTGWLHVTRGDEPTARIRRRELDGGESRRRQPAAGEEENGDEVARGQFPAARASTRLRESDASVGLGGTTPSEAGDERRFRARAATAASTRRATATXRGGGAPGVPFRVLERTGSPGAXAMNGGGETELGRRRQWRGRETGRNRGKGEGXGGGRMTPAGGKGEKEGEXRGACPLLLWEKEEGAEASRQREXGGLCLRPLAACARSGGAEAMTTAMTAGRFGRVTAAATRRSATXARARGKQRAARLGTRAGSRGRAAAWLQARQGSGAGRHRRDAGEDHAGARANDARGAAARERKGGLGSARXGSRARARGVRAERRGEAGERARKRGRDSGSAPGERAREGERAPWRDGE

SEQ ID NO: 187976 - protein, 220 aa, Oryza sativa
  Clone ID: PAT_MRT4530_84626C.1.pep
MAIAKSECERLAWALLLESNLLVGNRRSNGDDDDDDVDLLPSKLLATANLAMASNSVLFATVLAMAVVLTGSSSCQAARLLADATPPAVPAVTLPPMPAIPAIPAATLPPIPAVPTVPNAALPPMPAVPKVALPPMPAVPAVPTVPAVALPPMPAVPAVPTATLPPMPAVPAVPNAVLPPIPAVPKVTLPPMPSIPAVPKVTLPPMPSVPMPFLAPPPSA

SEQ ID NO: 187977 - protein, 498 aa, Oryza sativa
  unsure (1)..(498): unsure at all Xaa locations
  Clone ID: PAT_MRT4530_84627C.1.pep
MVRCGGLCCARGTVTAPFRAPGLEWYIPGLEIDLYSRLWLFRKVGPIQQGANTDVGTGSIRFHINGKEEKFEFQPKTEQCSMVRIKYGPNLQNIQMVEVEPPKKDSLVKFMQNFLEKETTMPRNRYWKTPVKSSTPAKKLEEPAQRKPSPAPSPPETVENPCTKRKGGTVLHVGPKMTRPSPTGNPSNEFFRXNQNKIFNENSLCHDHTDHWNPTAESGASWVHQGMRRRLSRLFKGSGSSSSCHDESSTHSSADLDHVQEDAEAPRRFLNDTDLDLIDDRERQAYYMLSDREYAHMREYSPELLKKIGMDVDFRAIWKAVGWQRFAVVDKPSSRLLTLQFLCTLKEIEDGISFHFFHKEYTFTWKGLSKLLGFHDSCKIDLQKGISGFEKNRFWEDISGAPICKKPRTNDIHNPDLRLMHKWIAMTLFPRGDLRPIRGDELIIMFAMVRKIKIAPVKCMIRQWLETARPRIDEAYLVQGHILKHGVDGSLIYFFPGC

SEQ ID NO: 187978 - protein, 373 aa, Oryza sativa
  unsure (1)..(373): unsure at all Xaa locations
  Clone ID: PAT_MRT4530_84628C.1.pep
SLSHGFHFGSPRHGARHGRLARRQQPQLPSGAPPRXATPPAAVPVPTVPAVTLPPMPAIPAVPAATLPPMPAVPTVPNTALPPMPAVPKVALPPMPAVPAVPTVPAVTVPPMPAVPAVPAATLPPMPAVPAVPAASLPPMPAMPAVPNAALPPMPAVPKVTLPPMPSMPAVPKVTLPPMPSVPMPCQAARHLADATPPAAVPVPTVPAVTLPPMPAIPAVPAATLPPMPAVPTVPNAALPPMPAVPKVALPPMPAVPAVPTVPAVPAVPAASLPPMPAVPAVPNAVLPPMPAVPKVTLPPMPSMPAVPTMETLSSSSSSIAKIHCAWRSSMAIAKSECERLAWALLLESNLLVGNRRSNGDDDDDDVDVAPAA

SEQ ID NO: 187979 - protein, 399 aa, Oryza sativa
  unsure (1)..(399): unsure at all Xaa locations
  Clone ID: PAT_MRT4530_84629C.1.pep
MQPATRTRQTPTTAAAAEPTNGLTPNATGNGRERGRLDPVLAELAPTWRLRGCHAGRQEVDDDTGRNGRRTTAASGGANHGDTGESEHTGWLHETRGDEPTARIRRRELDGGESRRRQPAAGEGGNGDEVTRGQFPVVRASTWLRESVASVGLGGATPSEAGDEWVRAGRRSXREADGAGVISPASGXGEEEEDERPESPSASTNAPAPPTRATTNGDGEQSTGGGGNGVEAKRGRAPGALRAAMSVWNRLGRSRRELVLGARVQTATRRREDDAGGRKKKGKRREXERGLAPFFFGKRRRGXGRRGRGRRXSASVPWRLARGVAGAGXMTTAMTAGRFGAARRHGRQARAGAAEADGGGDQAVGHHGTRAREATGDAVVRVARLGHARWLAGPSGCAE

SEQ ID NO: 187980 - protein, 868 aa, Oryza sativa
  unsure (1)..(868): unsure at all Xaa locations
  Clone ID: PAT_MRT4530_8462C.1.pep
MRGRRQRPAGFGWRGGEAEDDLAAVMPKVVEVRPTVARARRKGRPTVARARRKGRPKGLARGRMGWRRLAAVFRAKQRSSQRKGRRCDVDGGDGDVGRCSGTAEGAAGGDAVAATPLFTGGAAGGRPAPEREKEKAGRGGAATGERGMGLKLENGPRGFHFLDEGREPATGEVGRKAGMAAGGHGKRLGLRHGFRQMWLKGLMPSANKPLTGKGEIGASAETVQTMWYGKAVVPKPIDNRMVVFAVFLEAGLRFPCNVLLPEILRLFQVELPQLSPLALVRIAIFDWACRTSGFEPNAELFGAIFFATVNSKTAITPAGTKKTVFGSVNFNVRPERSDLSPVNAAMSKSDRHWIARWFYHTIPFEAGSDLAKALQCRRKVIAPNRKPKIAVDGAMETRFVLLRRVCSRLSCRDLVEEFCILRIFPLSQAWQVTVDQGEEVDGLPNLILPEGTNMLTLDQAENEARRMIGDVSVVEVPASSDSDADDEDDTEERDGEEKGEEEEEEAVADKAAKETVEDRVDTPGYTPTPSPGHNETGVESNSSPLRRKDLEGAKALVAFSSGKVAKGGPVKKISEKKGLVDIARVFSDDESSDGTPTSPAGRSLDLSTAPLAPLGAAGAGSNAAAGASASAERIASTAARVFGSPLREPAISPLVKAKCAAAKTSASEYSLAAPHFAPGDFETRADLFPFVEGAKDDEISRKNLEVEALANTLKEAKTEVKRLQSELDKGKEARAEVDRLKAELEKEKAHSAXVFVGDGKDRRIRENGLPNAPPRPYRHGREGLLQQFGCEHVAEFPTYAKGDWEISAQNISPALRAWRKQFWQKDGRSAAKARLLEQLAKAKAAGRGEEEGAAGEEVGGDAQDHPEV

SEQ ID NO: 187981 - protein, 252 aa, Oryza sativa
  Clone ID: PAT_MRT4530_84630C.1.pep
MLTIKFGKAVGRIQSQSQSRFEGIPFMEIKVRIGYERHRLPYVSIDTKSNEDKPMQPVPKRRPRSNQLARSEPEDTFGPALDISRPLRPVHDFPRQHSNKELDHKYFLKKASPFLTTSPSPPEAKGSSGDLGNDGGRIRRQRTGRRRRWLLRRSSLSLSLSPLLILFLSLTLQVDEGTRGGRWIADPMSAGLVTCEEAALLTDPAPPTISLMDLAAVALSLERSESAAAGLGCNGVSTTTMVVADCIAYDGG

SEQ ID NO: 187982 - protein, 339 aa, Oryza sativa
  unsure (1)..(339): unsure at all Xaa locations
  Clone ID: PAT_MRT4530_84631C.1.pep
WAGRPKAAQARAREGRRERADGPGSPRVVPGGTRLSAARRTVRREHAXGARVWEGRGACARFAVDAXRRAHAQPLGSLWTARTXGGADWGRLDPVLAELAPTWRLRGCHAGRREXRGDEPTARIRRRELDGGELWRRQPAAGEGGNGDEVTRGRFPAARASTRLWESDASVGLCGAAPSEAGDERXLPSSGGDGGEHTASGGNGAAMSVWERXPTLDGQADELALRLAAKTATGGDAGERVKGRKGGRERGLXPLPLWEKEEGXGATRQREEELCLRPLEASAWSGGGRVMTTAMTAXGRCGAERRHGRQARQXANGGSDQAVGHHGTRAREATGGAAI

SEQ ID NO: 187983 - protein, 188 aa, Oryza sativa
  unsure (1)..(188): unsure at all Xaa locations
  Clone ID: PAT_MRT4530_84632C.1.pep
KNLLVLHPPLSSLILSSPPSPASPFLTTSPSPPEAKGSSGDLGNDGGRIRRQRTGRRRRWLLRRSSLSLSLSPLLILFLSLTLQVDEGTRGGRWIADPMSAGLVTCEEAGREGPRRQRQRHRVLGASLLRRXRLALLTDPAPPTISLMDLAAVALSLERSESAAAGLGCNGVSTTTMVVADCIAYDGG

SEQ ID NO: 187984 - protein, 477 aa, Oryza sativa
  unsure (1)..(477): unsure at all Xaa locations
  Clone ID: PAT_MRT4530_84633C.1.pep
MGRPAXRRPKRARGRGGERGPVDRAHHAWSRVGPACQRLGSPCGGSTRRGARVGEGXRCTRAVRGGCGCGGPTRSLTARGGTRARGGADRGSARPGLGRAGADVVPTWRLRGCHAGRREVDDDAGRNGRRTTAASDGANHGDTGESEHTRWLHRTRGDEPTARIRRRECVGGGLRRWQPAAREGGNGDEVTRGQFPAARASTWLXESIASVGLGGAMPSKAGDERCFRARAATAASTRRATATARAAPASYGEATRATTRAGAVTRGRRRGSNLSGLGLGKRKERARPESPSASLLVPAPLTRATTNGDDEQGKGGGERGRRGRXEEGSALRPLAGLRAEWRGRGDDDGGTGRGGLSGAARARSAGCGAXRRRGGRAWRRARRGSWPSRRASWAGAARCCRGARRRGGGSSRPSSSRRRTSSPPRPARRVRRHRRRSPRRRRTWRPPTXGRGAERDEVRDGHGRQERRRGQQARAPP

SEQ ID NO: 187985 - protein, 1159 aa, Oryza sativa
  Clone ID: PAT_MRT4530_84634C.1.pep
MTGFNLPENFKENPEAFFRRVRPRVVAPQKTLPTEKPVVLAPPTFKIMASRTLREFAAPSTDNVAVGPQVNIGEVDFDFKSSLITMAQASPFCGKPNEDANAHLQQFLETCSMYTIKGVSPDAVRLRLFLFSLLGRAKQWFYANRAAINTWDKCSMAFLSKFFPMGKTNALRGRIFSFQQTRDESIPEAWERLQEYVAACPHHGMDDWLILQNFYNGLTPMSRDHLDAAAGGAFFSKMVQGAVDLIEKMDTELLAAKLDLLMKRLDDHEKRPQGTVKALDTHVTCEVCGSTGHSGNDCPETHEEAMYIGNKNNGYSPQGGQGWNQPRPHYQGETQLAQLASLVPANEIGRIPGQLDSSIENVKAITTRGGTSGMSKETPSNNSADKEIQPEKNVPQEYGDTRWLPFPQRSRKPSVDEQFARFVEVIQKIYINVPLLDAMQVPTYARYLKDILNNKRPLPTTEALCDLGASISVMPKDVFDKLNFTVLAPTPMRLQLADSSVRYPTGIAGGRASQESSTGQTRRIFKRLKWSHPRRIACMRRRLSRPFKGLGSSLSHHDEASTHLADVSMEDANTPRQLLNNADLDLVSDRERQAYYMLSDQKYAHMREYSPELLKKIGMDVEFRSIWKAIGWQRFAVVDEPGSRLLTLQFLCTLKEIEDGISFHFFRKEFTLTWKGLSTLLGFHDSCKTDLQKGISGFEKNRFWEDISGAPICKKTRTNDIHNPTLRLMHKWIAMTLFPRSDLRSIRGDELIIMFAMTIEESLAGGTYRETRNMTRNEQGSSSSSTPVQMYEAGWAPTGDAPGWTQAARHSIRVSTWASASEDRWHAPHDIHWGDNQPSKSSGVPPSPSEWRSSSSRWDLGEITRRMDTLDVQMGEIQYNLTEHIAQTQEWQQSADAQFANINNMMQQQHDDLQAYFRFQGLNPIKDPVQKPSLGGDLAPPPELLCFISLIYGFLARRSSVSWESGVRSSIWFCTALPDHLRLRLHTGPPERSAGWQAIAELGEKYDAVLDHLRGLRSRGQTAVMVFADYFRRRIAPLQERSALRGHTPGTMTRCAPTWASVGIRAIRTSGRCDHDRDSILAVMMAVGAARGRGRRAATGGDHGDGAGSSSAGAGGGQAAGSGNSDGSSRVPGPSHGAGRGPVTDFLSRGVVRSVGQTR

SEQ ID NO: 187986 - protein, 171 aa, Oryza sativa
  Clone ID: PAT_MRT4530_84635C.1.pep
MAVLCGTAAENFFPYKWLGLGWVARGGAVEACRVGWPGILIFRIGNVTDERSGTGEVDTDGDVVPPVRFACQGDGVEMEIRVVARRSVAMATGNWHLRDEMPTMVPCIQRQPRRRRARPSSRSSIHEEADSQRREQTVIHVDADNEMVGDEVPPYKEVRREGGLHPLGSTL

SEQ ID NO: 187987 - protein, 138 aa, Oryza sativa
  unsure (1)..(138): unsure at all Xaa locations
  Clone ID: PAT_MRT4530_84636C.1.pep
VVCKGFYPPLGVFYNSRRSERRFRRTDLANDTCLWEPKLLLRVGNRAAGACVASSPDSDLKAFSHNPAHGSFAPLAFQPSAMTNCANQRFLSYXVELLSRRGHQXGKTNLSHDGLNPAHVPYWWVNNPTLGEFCFTMI

SEQ ID NO: 187988 - protein, 192 aa, Oryza sativa
  Clone ID: PAT_MRT4530_84637C.1.pep
MGNSTNQGLEIASPVILVDGYNVCGYWGKLKKDFMNGRQEIARQMLIDELVSFSAVREIKVVVVFDAAASGLSTHKETYKGVDVVYSGDLSADSWIEKEVEALVADGCPKVWVVTSDALEQQLAHGEGALIWSSKRLVKEIKESEKELDEELKETRSTSLQGKLFQHKLKPKVVHALKDLRNKLEEEERRKR

SEQ ID NO: 187989 - protein, 119 aa, Oryza sativa
  Clone ID: PAT_MRT4530_84638C.1.pep
MTESKNQRVHGNTHDADIWILRCRYLDFNLSRGVLASYHNINTIISVQSLQKYYQCTRPLLFHPAAHKLCSSLAAQDHRCLLAAPTLHLNSERVGKLECSLAAQQTGEFSIASVFRFVS

SEQ ID NO: 187990 - protein, 43 aa, Oryza sativa
  Clone ID: PAT_MRT4530_84639C.1.pep
SILDFAMNRGVRVVPEIHTPGKYSIPFIFQVALIFLQSNVSRV

SEQ ID NO: 187991 - protein, 489 aa, Oryza sativa
  unsure (1)..(489): unsure at all Xaa locations
  Clone ID: PAT_MRT4530_8463C.1.pep
MRDPFSAPVDFNNENHRAGNELTRTNMPLSVGDYGLQNGDATTFAVNTDTLVRHQLQGASLQNDLTAEDSITRLMDPETKGLYFRSRSQEEEILLLRKQIADASVKAVDEKQEDAISGALKQLSQKKGHVEENMRLANDLKGEEEELYFFTSSLLSMLAEYNVRPPQINASAITAGTKRLYHQMQWKIKYLNDATRNNFHQYAQDPNDRNTGQMYHGSNYHQEIVAATPSNYFEENNGPREVRLDDSQFYRQDNQEYSADDDPLPGIEGFQIVGEPRPGFTLTACGFPTNGTTLCNFQWVRYLDNGTRQSIEGATMYDYVVTADDVDTLLAVDCTPMDDNTRQGELVTEYANNGSKITCDPEMQNTIDMHISNGRAHFNLLVLGYSSDEWELAILTLKRTGYHIKVKDEVLTEEKYSSNLQTKIPNGRTTQFVLVSSGGVNIPFNTQGISEPNNEDSDVRXRDLIVLVLRTFQRLSXSKALDAKRKGKV

SEQ ID NO: 187992 - protein, 138 aa, Oryza sativa
  unsure (1)..(138): unsure at all Xaa locations
  Clone ID: PAT_MRT4530_84640C.1.pep
RVXCTPHCNMHRSHQHTSXGSHSKAAQIIFKLPALLAKPPHFCTPQAHYLXCAWQACVSTLATGXGSFILPRSVTDXQPATASCALXMSRNAAKHAPXRXGHIQQTRXHHNTNPSGTXXXGKSXIYTQXXKTINXESH

SEQ ID NO: 187993 - protein, 587 aa, Oryza sativa
  unsure (1)..(587): unsure at all Xaa locations
  Clone ID: PAT_MRT4530_84641C.1.pep
MVAAQSFVSTQDSASDTVVDYSGNEDEFHEVPDPDDDVSDFREEKRWERELKRWEMGEEDRKKRGLQRHQSPADAVARVQPPPPPPPRPPEMSAAAKAAALEVVLAAKSSRIASLEARVSFLEAENARLRRAMADRSTGKGGPNLRRSEEMAGGRVARDVIEVSDGEEXEGMAVDVRKGRGAEEXMDAXVATPRKRAALRVVIGESGDEYEIDDAKGDGDGDGGDHGSVSCGDNVGLEDDDVTTALPDRKRAAALVVTSDSEDEVESQGGHGRRGKDGSRKRALRGVRDNGNEDKGVTRSRKRALRGISDNEDEDEDEDGVDGAHVVVTEIESSDDDMIPIREVVKKMRKERASKGGGGFGETNGSSTPATRRSARLAKGQPKRAQSARRVLNFVEPKDCEESASDSDEDDDLDDFIINDSDCSENSANSAEPEESDASAPSEGSSSELEESDNEIDYKDVMACIGRKRNAKEWKYEAEMLSAFAAHPELCLKAVCALYRKQTKDEQEVKATILHNKQGFNQIDAARGSSIAEFLLDGDTFGPLKKTVHDLEQYDRYALEFCHKLAARYSKQLFSIYQNKEDPSFHP

SEQ ID NO: 187994 - protein, 42 aa, Oryza sativa
  unsure (1)..(42): unsure at all Xaa locations
  Clone ID: PAT_MRT4530_84642C.1.pep
QCNFSTQLCPCANLLXKKKKKKKKKKKKKKKKKKKKKKKKKK

SEQ ID NO: 187995 - protein, 323 aa, Oryza sativa
  Clone ID: PAT_MRT4530_84643C.1.pep
MRADEDRHGGRRRGDNEYGGGGGGGQEEGGAGGCCSCLPPFCGVWGSRTKPRRRRRRFRFRLRLIRLSWFFSWPWRKNSGNKKKKTTATATKEAKGMKKRMLLLLSSSSSSAASPPSPAKKALAAAASVSAAAAGSLLLPKVGSFAADGGKKQRKSGSKSLPQQTVTGGGGGGGGGDAAAPAKETAPPAWQPCPRPAPGELAGVKRAPSRRHGSFRREPGGGGGGGGGLWTMATTLGVIVFFGRVTAVAFLCSCLYAARFVRAQAAAAAAAKGKGSGGSGRFGEPAAEERPAVVEVCTEEHKKKVVMEGLLDRGGKRLSSRFL

SEQ ID NO: 187996 - protein, 58 aa, Oryza sativa
  Clone ID: PAT_MRT4530_84644C.1.pep
FLYSRIRLEQLNASFFFLFFPAFVGRAGFVLPPGKSWYRKFGDPRISVAVKFTTYPPY

SEQ ID NO: 187997 - protein, 74 aa, Oryza sativa
  Clone ID: PAT_MRT4530_84645C.1.pep
MAVVSSYFPDIAISTSSSYLRLPLPDSPTARVGSPSSPGHRRRACNTKLMAMAITQVGVGSHQTVDVICKSVQI

SEQ ID NO: 187998 - protein, 61 aa, Oryza sativa
  Clone ID: PAT_MRT4530_84646C.1.pep
FFFIIFLARLSQSWTRDLQRTTWYRTVSSGVAGESKLGQDVQEASMWCGRGAISVSLERTQ

SEQ ID NO: 187999 - protein, 402 aa, Oryza sativa
  Clone ID: PAT_MRT4530_84647C.1.pep
MRSSSSSVQSRWNSRLESSAPAPGCGCGGGGGGIAAVGSGGAWGAAAWSGLEPSLSVPSSSSSSAGEEEEWEAAASSSAAMVVVVVVVVVGMGLARGLGGNQVSDRTDQLGAWQRGIIAWFSSVGSLTALCAITTPHVIDGISYSSGGAAAFEESGASVDHAPISSPSAASTSTAKTSPAPSCRASTGRRRRQWGEAGEEEDGVATAGGGEARRQPGGGGERRRREMAEGEGEGWREFVVVVAGEVGVMVSWWKKGRDDDHPVVQPLPAVGRKANADLVAAAALPYALTLGRDRARKRYNKTNNTSVGSMSDNTSVLDPYLESYETIPVLDSYLESYDKSRQHDNKNHKREIEILCSNTICDTLNNTRCDTSKLYTPESFFYSARTPHTTRQNFTPLDLNNP

SEQ ID NO: 188000 - protein, 75 aa, Oryza sativa
  unsure (1)..(75): unsure at all Xaa locations
  Clone ID: PAT_MRT4530_84648C.1.pep
SKSPGSFDIGFTQKPVVTSGTKKFWXIYYKMILSIFHMLDRNALILVXSEIMHLLVTLAGMHGYLVIXVMCTFGG

SEQ ID NO: 188001 - protein, 205 aa, Oryza sativa
  Clone ID: PAT_MRT4530_84649C.1.pep
MVQPKKKFRGVRQRHWGSWVSEIRHPLLKRRVWLGTFETAEEAARAYDEAAVLMSGRNAKTNFPVQRNSTGDLATAADQDARSNGGSRNSSAGNLSQILSAKLRKCCKAPSPSLTCLRLDPEKSHIGVWQKRAGARADSNWVMTVELNKEVEPTEPAAQPTSTATASQVTMDDEEKIALQMIEELLSRSSPASPSHGEGEGSFVI

SEQ ID NO: 188002 - protein, 550 aa, Oryza sativa
  unsure (1)..(550): unsure at all Xaa locations
  Clone ID: PAT_MRT4530_8464C.1.pep
MAFTTRKCIFDDVGVLFSQAGIDMGRRQWMYHSPRFLAPYRDEVSKFISIAKAHAEQNNMWEILCPCVDCKNEIAWNNVSKVMEHLVTHGFMEKYEIWTRHGEEQVDMPENVVPTXVEDMVYDDGSSEDKIDLGEMLRHAEPEVLTGSARGLNNIEALQKAAKEVLYDKSKGCDSEFTTLRKEYASLDECPTCGASQYKSNSNNGIELSDTAEGTKRKIPQLVMRYLHVKDRIKRIYSNPRDAELMRWHQEGRKKDVIIRHPADARXYKEFAKDPRNIRFALSTHGVNPFGDMSSSHSTWPVLLTMYNLPAXALSKAKICISLYPDTGTRQPGIDIDVFLEPLSEDMDDLWKEGLKVYLPGSNKLVYIRHRRFLHTNYKYRKMKAEFDGTEESDPPXKPTSGEEVCAMTEKIVCEFGKVTKKPSKGTERKKPDKTKKPKDSKKPDDKLPXSFKKHSIFFKYLPYWKYLEIRHAIDVMHLEKNMFDNIVGTLLDMPRKTKDGMQLRIDLVEIGIREELHPQGEKNDKLYLPPACFTLTHKEKKSFCKSLRD

SEQ ID NO: 188003 - protein, 279 aa, Oryza sativa
  unsure (1)..(279): unsure at all Xaa locations
  Clone ID: PAT_MRT4530_84650C.1.pep
AETLKLIVAGLLLEELLISRIRFIFFSNWGGXIYIEQGLLTSEEEVHFTHTTLLTRITQPVGISHVGRPPSFHDKAFLKPTQVYHMPTRGVPDQQQFYPSCYSDFKFEGVRRYSHRVHEYRDATRWLQGDMTEVAPTWRLRGSHAGRREVEEDAGRNGRRTAVASGEAKHGDLGESEHTGKLRGTRGVEPTTRICRGMLDGGGLRRRHPAERKGGNGDEVTRGQFPAVRASTRLRESVASVGLGGATPSEVGDERVLRSTGGDGGEHMASGGNGWGGAG

SEQ ID NO: 188004 - protein, 429 aa, Oryza sativa
  unsure (1)..(429): unsure at all Xaa locations
  Clone ID: PAT_MRT4530_84651C.1.pep
MTLLTRITQPVGISHVGRPPSFHDKAFPKPTQAELAPTWHLRGCHAGRREVDDDPAANGRRAAAASGGANHGDTGESEHTGRLLETRGDEPTARICRGLLDGGGLRRRQPAAGEEENGDEATRGRFPAVRASTRLRELNASVGLGGTTPSEAGDERVLRSSGGDGGEHTASDGNEEEEEEGAPGVPFRVHERTGSPGAWRWTAEARQSTGAVARARRRMGEXGKGRLGFIGGRQCRFGNRLARSRARAGAPASGQNGDXEDDAGEKGKRGEKEEKEGEKGGSPLCRFGKRRRGRGDAAEXGRARPPPLGGLRAEWXGPGDDDGDDGEXFGAARRHGRQARQALTTAATGRSATRRARAGNNGRRPRGRAPANTARGKRLCERGARARGGALSAGDSRARARGARAGRRGXRGERRSGRLSHARAAWGCR

SEQ ID NO: 188005 - protein, 32 aa, Oryza sativa
  unsure (1)..(32): unsure at all Xaa locations
  Clone ID: PAT_MRT4530_84652C.1.pep
NRSXLLTIPHSHCLNWVQRSXTTETYVSWNRV

SEQ ID NO: 188006 - protein, 1006 aa, Oryza sativa
  unsure (1)..(1006): unsure at all Xaa locations
  Clone ID: PAT_MRT4530_84653C.1.pep
MASKTLREFAAPSAANVAVGPQVNIGDVDFDLKSSLITMAQASPFCGKPNEDANAHLQQFLEICSTYTIKGVSPDAVRLRLFPFSLLGRAKQWFYANRAAINTWDKCSMAFLSKFFPMGKTNALRGRISSFQQTRDESIPKAWERPQEHVAACPHHGMDDWLILQNFYNGLTPMSRDHLDAAAGGAFFSKTVQGAVELREKMVSNMGWSEERLQTRQRGMHTVKETELLAAKLDLLMKRLDDHEKRPQGTVKALDSHVTCEVCGGTGHSGNDCPETREEVMYMGNNNRYRPQGGQGWNQPRPYYQGVPANESGRIPGQPDSSIENVKAITTRGVIQKIHINVPLLDAMQVPTYARYLKDILNNKRPLPTMEVVKLTEHCNNLKLHKLPEKKKDPGCPTITCSIGAQQFDQALCDLGASVSVMPKDVFDKLNFTVLAPTPWCWHQHXMRLQLXDSSVRYPAEIAEDVPVKIWDFFILVDFVVLDMDTGKETPLILGRSFLSTAGANIDVGTGSIRFHINEKEEKFEFQPRTEQCSTVRIKYGPNPQNIQVVEVEPPNTDSLKKREREKDGNENTEDHILAAKKANCDRDRQQLEPAAGGARRRRGSPAQSRMRLLLGTPAQQLAARSNQAQHPSGAQVDSRGSPGSSQMTMTNQRNLSDRRAQQPLSQVYVDVDSEHGTAERQEIGTTKRARWSHQMKMFLIELLTDHDVPGFRTQNAWSKEAWTNIVCRLNTKFGTSFTTNQVKQKEQDLKKDYRSVKDLLDQSGFGWDSDRMMVSAPQSVWDTFADRKNKDAIHWRDKSFPYFDDLAPLYDGRYAEGRTRHGMDHYARKTKNAPAHSTQEANVVDTYQSPSPNSNAPGESGLQFPFGEEVETANLDFSQHSPTPVHLTKVPPSSAQTPSEVPESRPGKKQKIKSVSPDDGFHERYLKLKKEEIDRFAAIEEKKLEDPYSINKCITVLEGLHGLQIGDILVAADIFKGKDNREVFLSFSSDALRLAWIRKEIAALE

SEQ ID NO: 188007 - protein, 436 aa, Oryza sativa
  unsure (1)..(436): unsure at all Xaa locations
  Clone ID: PAT_MRT4530_84654C.1.pep
KKAAQSGPRCARAEEGEREPVDRAHLARSRVGPACQRLGSPCGGSTRRGXGCGGSTRSLTARGGTRARGGTDRGRLDPVXAELAPTWRLRGCHAGRREVDDDAGRNRRRSTAASDGANHGDTGKSEHTGRLHVTRGDEPTARICRGLLDGGGLRRRQPAAGEGGNGDEVTRGXFPAARASTRLRESDASIGLGGTTPSEAGDERRFRAQAATAASTRRATATAGELALRLAAKTTTGGDAGERGKRGKKGKMRERKGARPLPLWEKAEGAGATRQGEEGRCLRPLAACARSGGGRAMTTAMTAGRXGAERRHGRQARQALTTAAIRRSATTARARGLQRAASARARSCEHGAREAATRDRRGRTWLGAGGLRARARAERRGAGRGSRARARRARVGRSARRRALARAARGGAEGERGGAGEMGREGFGPSNPGEAN

SEQ ID NO: 188008 - protein, 190 aa, Oryza sativa
  unsure (1)..(190): unsure at all Xaa locations
  Clone ID: PAT_MRT4530_84655C.1.pep
NLCKGGTLYPHDITNPDHPARISKADTGSPYANERGPRPTPDXVPDHTVPGNLGVLPGTTPLNPHVSWHHGSPDXLVTQPGVSHSTHVVALVLCSDEIPRKQSLSARAGNCTPGTFPGPRFFXIHLVRKHRPRCRVFQGSKVTCLARDLELDLRNPRTAGLRAPKLHAKWDNSTNGENKAILLTSRRVIR

SEQ ID NO: 188009 - protein, 163 aa, Oryza sativa
  Clone ID: PAT_MRT4530_84656C.1.pep
RPGCSLQPVQLGGGGGGRRRGGGGAGMVSLAAYSPCSTVAGVPKNKGNGAASSTHKVSSILLLLPAIESKPTHGRGSAACYCSHPDAVRASYPPSHPSPRRRASASRRRRHHRQPRVAASLPLSIGTPPVAGCFISSTGRNVFRNHRPRGPTPLVRHIWFFPI

SEQ ID NO: 188010 - protein, 112 aa, Oryza sativa
  unsure (1)..(112): unsure at all Xaa locations
  Clone ID: PAT_MRT4530_84657C.1.pep
MEWRRWKEKRGRAPGLXRAAMSVWKPTLGGQGASWRSXLAAKSATGRREDDAGGRKKGKRXRKRGLAPCFFGKRRRGAGATRQREEGRCLRPLAACARSGGAEAMTTAMTAG

SEQ ID NO: 188011 - protein, 450 aa, Oryza sativa
  unsure (1)..(450): unsure at all Xaa locations
  Clone ID: PAT_MRT4530_84658C.1.pep
TGLTTRGLRWDPLVSGLAHRAEGARGAALGWGEGRGARARFAXTRVRRAHAXPHGSWWSARTGXGTDRGRLDPVXAELAPTWRLRGCHAGRREVDDDAGRNGRRSTAASGGANHGDTGESEHTGWLHETRGDEPTARIRRRKLDGGESRRRQPAGREEXENGDEVTRGQFPAARASMRLRESDASVGLGGATPSEAGDERVLRSSGGDGGGHTASDGNGAGWRSXLAAKTATXEGGRMTPAGGKREKGGGERGLXPPCRFGKKEEGGGGVPAEGGGLGLRPLAACARAGAAEGDGGGDQTVGHSARARGLQREGAADGEARLEHARWLRGRAAAGAAGXRGRAAHTRRGRGPRGRXARERRAGSGKEGXERRTRLGAGGSXHARTERRERRRGARRGLRARARSARGARAGWSGGREREREGAGEGGGDGPRGIRPIEPGGGKLDFCGGI

SEQ ID NO: 188012 - protein, 336 aa, Oryza sativa
  unsure (1)..(336): unsure at all Xaa locations
  Clone ID: PAT_MRT4530_84659C.1.pep
NIRHNIAELLEYLWDVPSHRNAWRRIAKEXEKGVYLNFLXFLINDSIYLLDESLNKILELKEIEAEMANVVEWESRPPQEREERLRVFHQWENVVRFDMKLANEDVGMLAFTSEQIPAPFLLPEMVERVASMLNYFLLQLAGPQRKSLTVKDPEKYEFKPKQLLKQIATIYVHITRGDKEGIFPAAISKDGRSYNEQLFASAANILWKIGGDKKKIQEFMQLASKSKTAASEAMDAEAMLGDIPDEFLDPIQYTLMKDPVILPSSRVTIDRPVIVRHLLSDSTDPFNRSHLTQDMLIPDTELKSRIEEFIRSQRSKKRTAADSEMGEPDGAADMAD

SEQ ID NO: 188013 - protein, 329 aa, Oryza sativa
  Clone ID: PAT_MRT4530_8465C.1.pep
HKETGVESNSSPLRRKDLEGAKALVAFSSGKAVKGGGSAAAGASASAKRIVTAAARVFGSPLREPAVSPLVKTKGKGVAAEASASEYSLAAPHFAPGDFETRADLIPFVEGVSNLVLPAGTSSLFTELNEFDEGCSAIKSLAVQILAAHCSTERTVRARLDGFKNRLRAKDDEISRKNLEVEALANTLKEVKVEVKRLQSELEKGKEARAEVDRLKAELEKGREAIAEVDRLQTELKEEKAHSAVLTDYYNLTEPKMEALRLKVSKAEASAVEESQWCEGSLLAGDSVSDCATAYGDCCVRVSAAFTLGLLQQFGCEHVAEFPNYAKGD

SEQ ID NO: 188014 - protein, 513 aa, Oryza sativa
  unsure (1)..(513): unsure at all Xaa locations
  Clone ID: PAT_MRT4530_84660C.1.pep
WAGRPKRRPRARAXEGRREGTGGPGSPRAVPGGTRLSAARLTAQREHAVHARGRGRDAVHARGPRWTQVRRAHAQPHGSRWIARTRRDRPGSARPGLAELAPTWRLRGCHVGWREVDDDPTAKGRRAAAASGGANHGDTGKSEHIGRLFVTRGDEPTARIRRRLLDGGGLWRRQPAAGEGENGDEATRGRFPAVRASTRRRELDASVGLDGTTPSEAGDERVLRSSGGDGGEHTASDGNEEEGGAPGVPFHVHERTGSPGAWRRMAEARQSTGAATTGGQAGELALRLASKAATGGDAGERGKRGEKEEKEGEKGARPFADSGKGGGSGATRQRERGSLPPPLGGXRAEWRGPGDDDGDDGGXRFGAARRHGRQARAGXQRVTAAATGRSATXRHARAGNNGRPGWAAGPGDADGADDAARAGNHAGARASDGARGRLCERGARARGGGARRGSRTREQRAGGGVRAKRAGEGXGRGRGGERERERERAPGRERAGEEMGRAEFAPSNPGEAN

SEQ ID NO: 188015 - protein, 77 aa, Oryza sativa
  Clone ID: PAT_MRT4530_84661C.1.pep
QTRDWFVVGGLLRASGLYLAFLDDWTDATPYWRWLLKPSVLPGPVMTIGRRASHIAVPRAGLTVSTKGWEGTNRGLT

SEQ ID NO: 188016 - protein, 815 aa, Oryza sativa
  Clone ID: PAT_MRT4530_84662C.1.pep
MVSNMGWSEERLQTRQRGMHTVKETELLAAKLGLLMKRLDDHEKRPQGTVKALDSHVTCEVYGGIGYSGNDCPETHKEAMYMGNNNGYRPQGGQGWNQPRSYYQGGNNNGNFSNQPSLKDLVFAHAKTTDSLSKKLAANEKILENKNVKLDGFASTFQNQPSFNKMIETQLAQLASLVLANQSGRIPGQPDSSIENVKAITTRRGKSTRDPPYPNPVGTNGVTKEVPSNDSADKEIQPEKTVPEDYCDTRLLPFPQRIIQKIHINVPLLDGMQVPTYARYLKDILNNKRPLPTTKVVKLTEHCSNIILHKLPEKKKDLGCPTITCSIGAQQFDQALCDFGASVSVMPKYVLDKLNFTVLAPTPMRLQLADSLVRYPAGIAEDVPVKIRDFFIPIDFVVLDMDTGKETPLILGRPFLSTARANIDVGTRSIHFHINGKEEKFEFQPRTEQCSMVRIKYGPNPQNIQEVEVKPPKMDSLVKFMQNFLEKETTMPRNRYWRTPVKSPVLAKKLEQPAQKRPSSAPKSKKVWKEKPKAPAPPPPETEIEDGISFRFFRKEFTLTWKGLSTLLGFHDSCKIDLQKGISGFEKNRFWEDISRALICKKPRTNDIHNPTLRLMYKWIAMTLFPRSDLRPIRGDELIIMFAMTIEESRGSGTYRETRNMTRNERESSSSLTPVQMYEAGWAPTGDARGWTQAPRHSIGVSTWASASEDRWHAPHGIHWGDNQPSRSSGVPPSPSEWHSSSSCWDLGEITRRMDTLDVQTGEIQYNLTEHIAQTQEWLQSADAQFVNINNMMQQQHGDLQAYFHYQGFNPYQGP

SEQ ID NO: 188017 - protein, 1122 aa, Oryza sativa
  Clone ID: PAT_MRT4530_84663C.1.pep
MATSPSDDDDRNGGGARLERRRRQRHEYQINWHACEPKGKLFGPALELSRSPRPRVSTSTREGIGKRCMTGFNLPENFKENPEAFFRSVRPRVVAPQKTLPTDKPAVSVPPIFKTMASKTHREFTAPSADNVAIGPRINMGDVDLKSSLITMAQASPFCGKPNEDANAHLQQFLEICSTYTIKGNFYNGLTPTSRDHLDAAAGGAFFSKTVQGAVDLIEKMVSNMGWSEERLQTRQRGMHTIKETELLAAKLDLLMKRLDDHEKWPQGTVKALDSHVTCEVCGNTGDSGNDCLETYEGAMYMGNNNNNNNNGYRSQGGQVWNQPRPYYQGDNNNGNFSNQPSLKDLVFAPAKTTDALSKKLAANDKLSFNKMIEIQLAQLASLVPANETRRIPGQPDSSIENVKAITTKGGTTGISKEAPSNDSADKEVQPEKIVSQEYCDTRLLHSVNRSRRPSVDEQFAHFVEVIQKIHINVPLLDAMQVPTYARYLKDILNNKRLLPITEVVKLTKQYSNIILHKLPEKKYSGCPMITCSIGAQQFDQVLCDLGASVSVMPKDVFDKLNFMVLAPTPMRLQLADSLVRYPAGIAEDVPVKIRDFFIPVDFVVLNMESGKVTPLILGRPFLSIAGANIDVGTGSIRFHINGKEKKFKFQPRTEQCSMVRIKYGPNPQNIEEVEVEPPKTDSLVKFMQNFLEKETTMPRNRYWRLPVKPPIPAKKLEQLAQKKPPSPPKPKKPKVGPVGPTKGSVEPARMRRRLSRLFKGSGSSSSHHDESSTRSSADIMMEEAEAPRQLLNDADLDLVGDRERQAYYMLADREYAHTREYSLELLKKIGMDTEFRSIWKAVGWQKFAVVYEPGSHLLTLQFLCTLKEMEDGISFCFFHEEFTLTWKGLSTLLGFHDTCKIDLQKGISGFEKNRFWEDISGAPICKKPRTNDIYNPTLRLMHKWIAMTLFPRGDLRPIRGDELIIMFAIVRKIKIAPVKCMIRQWLESIKFFSPVECTSLITRIAKVLGVVSDQIAFVSAARPRIDEVYLVQGHILKHGVDGSLIYFFPCCTNEIPLPNAGYHLYNCRELTIPLQTIEESRAGGIYRETRNMTRNERESSSSSTLVQMHEAGWAPTGDAPG

SEQ ID NO: 188018 - protein, 65 aa, Oryza sativa
  Clone ID: PAT_MRT4530_84664C.1.pep
VYWMSAACISQPSEDTFVGSPATNYESSASSKGGEFADDCFRCTFVAFKYVAHPLCFNGPQNTGH

SEQ ID NO: 188019 - protein, 121 aa, Oryza sativa
  unsure (1)..(121): unsure at all Xaa locations
  Clone ID: PAT_MRT4530_84665C.1.pep
YLIVVDQTHKPHHIPYGAYGGRQEGSSAISDLAEYRFEEEDYPLIDYVLMNKXEQHRLRPTGCRAIICQIRDLNLYKNPCLHLFYLNLAYTLVPMISIPSKYRSRGTTHRHFGALNKFKSG

SEQ ID NO: 188020 - protein, 67 aa, Oryza sativa
  Clone ID: PAT_MRT4530_84666C.1.pep
EAFSPLKVKKIKAGSPAMISMGGLFVQAIVSGRGPLDNLDEHLGETVNSDVWAYVTNLVAGKLSGGP

SEQ ID NO: 188021 - protein, 74 aa, Oryza sativa
  Clone ID: PAT_MRT4530_84667C.1.pep
MEMRPRDLAAVLAMSCLLLLPLLVSSVPVSGIVHLSSQQQHPSSRNIYADVVNLSHVLQFLNSRIWWQRRRTWR

SEQ ID NO: 188022 - protein, 104 aa, Oryza sativa
  Clone ID: PAT_MRT4530_84668C.1.pep
MDDLAAALARGEGAWTEEQHAAFLDRMELSFVQQELAAVAVSDERRASRRLCRRPAPPPAPAAAGRCGQHQLSLSLDRPLPDSAVESNRAAPSSRPAARGRGTG

SEQ ID NO: 188023 - protein, 209 aa, Oryza sativa
  Clone ID: PAT_MRT4530_84669C.1.pep
MLVRLGVVVVASVAALTLKRANSGNRDGQARKGKDKTRYSEHGEKEEEKEEVKTISGIINSALSDDDDMLSEIESLLSGEIDIPLPSDRFDVKERSWYNSVNSELERLRGLVRELEEREVKLEGELLEYYGLKEQETDVVELHRQLKIKMVEIDMLKMTINSLQEERKKLQDDVIHASTPSLRSPTSPRPPFSRLEFSPPLDPGQNPQT

SEQ ID NO: 188024 - protein, 73 aa, Oryza sativa
  Clone ID: PAT_MRT4530_8466C.1.pep
FCHPIQSMCETGPEMEHTTWQSAHHHQQDKEKEKIIKRKKNQEKRELICQATPHTLDQRSASSIDYRVIVLSV

SEQ ID NO: 188025 - protein, 197 aa, Oryza sativa
  Clone ID: PAT_MRT4530_84670C.1.pep
TSERRDDAARALTLLALRRRRRAHRRRRRQARQRRWRQARATTADSTAAMARATVEGSRAADPTMGRAALTEDGSGDGGDKLGSGGVEGLGGTGSCGGEGGGGGSDDGEGCADGSGGGPAVRRRPRSSRRRRRLAEPWLLRAKVDAITRRIASLRDRSSVAEIEVRAEAAAAMVVANGVVSGGKRRPSHPSLVPSTK

SEQ ID NO: 188026 - protein, 155 aa, Oryza sativa
  Clone ID: PAT_MRT4530_84671C.1.pep
MARATAEGSTAADPTMGRAAPTEDGSGDGGRLGGDGGDKLGSGGVEGLGGTGSCGGEGGGGGSDDREGCADGSGGGPTVRHRPRSSWRHRPIASRPFVGPKVDAITRRIASLRDRSSVAEMEVRAEAAAAIVVANGVFSGGKRRPSNPSLIPSTK

SEQ ID NO: 188027 - protein, 74 aa, Oryza sativa
  Clone ID: PAT_MRT4530_84672C.1.pep
MEGDLEKMIDHRVIKFFIQSNLLRSNLPFYKRDQIKLDRATEALIMQRTTKKVESFSKRNRGETLTPQRNNDTN

SEQ ID NO: 188028 - protein, 60 aa, Oryza sativa
  Clone ID: PAT_MRT4530_84673C.1.pep
MDDAGFMASFSIQAIREDGVWCESSFKAGAKSDTRGIMAGMHRYQAWYLGHRYHLITIGA

SEQ ID NO: 188029 - protein, 59 aa, Oryza sativa
  unsure (1)..(59): unsure at all Xaa locations
  Clone ID: PAT_MRT4530_84674C.1.pep
MPFEHYPPWKPIHSNNIYPRAKXRTISTILFPGGPPPXXTHGHRISXRPHKWANTLPGQ

SEQ ID NO: 188030 - protein, 147 aa, Oryza sativa
  unsure (1)..(147): unsure at all Xaa locations
  Clone ID: PAT_MRT4530_84675C.1.pep
MERAREEDEVSGGGGGVVARYSLDVSDGCGGRHSALLDEYERMAFEAQLNRAIVLRRCYSEPSPARFPVAPPQRGGAEGXAARRRGGPAGSTSSRRXFLRWLEAVKPVLCWLRSAWEQRRRRMERAAAAPRGPPATVPRVQLMDYFC

SEQ ID NO: 188031 - protein, 90 aa, Oryza sativa
  unsure (1)..(90): unsure at all Xaa locations
  Clone ID: PAT_MRT4530_84676C.1.pep
IDRXRERERERXRXRERERERESSVGRWLNQLRCCLLLAAVCLVAAASXGGADAXXXXVTTVGVYELRKGDFSMQGTPIGDRSSCXYVSS

SEQ ID NO: 188032 - protein, 150 aa, Oryza sativa
  Clone ID: PAT_MRT4530_84677C.1.pep
MASAAATARGPRYAPPDPTLPKPWRGLIDGNTGYLYFWNPETKAVQYDRPTAPPPSSPPAQQPPERPRNSDPAESQAQAGASRTQNAAPADDRARNDHLNDHFERRTEAAVSHAQNVPFTEQNTRSNHSSQPCSAAGVYPAQIVFSEAAS

SEQ ID NO: 188033 - protein, 160 aa, Oryza sativa
  unsure (1)..(160): unsure at all Xaa locations
  Clone ID: PAT_MRT4530_84678C.1.pep
LNLEKVRITPLNYHGRPNYPPEPQNRTFFTPNYANRTNYPPGPNPRWFXSTSQSRQRRQRRGEGGSGEARRGGAAARRARRRRGERGGGGGGSERGGGGSVRRGEARRRRRRGEARRRRRAXSGGEAVGEGTTSPRGGERGGGRGEAAAAARQLVGATGG

SEQ ID NO: 188034 - protein, 227 aa, Oryza sativa
  unsure (1)..(227): unsure at all Xaa locations
  Clone ID: PAT_MRT4530_84679C.1.pep
RRRGRCSAGPAAWRWRTGSRRAAPRACRRRAPPPAPRGSPGNPAAPPTRPPSPRWRRRGRPPRTAPAPAPRGRTPTATGPRTPSPPPXTTPAPPGTRRAPAGRAPGPAAAPPPRRAATPTRSPRAPPLSPGRSWXRRRRPRCSPRGAPRRRRRAARSREXRTTRADASSSGARRSGRRWNRWWWVVVGAGARRRPSSPASRAVAWDETTTTRRVRSRGSHARQVPSC

SEQ ID NO: 188035 - protein, 824 aa, Oryza sativa
  unsure (1)..(824): unsure at all Xaa locations
  Clone ID: PAT_MRT4530_8467C.1.pep
MAPRKPNPASAKGPDPGRVNDDSTAFLGVSLVDDVELAKLVSSGALVDGQAFAPGKAVVPKPVNNRTVVFAVFFEAGLRFPCNVLLPEILRLFQVELPQLSPSALVRISIFDWACRTSRFEPSAELFGAIFFATVNSKTVITPAGTKKTVFGSVNFNVRPERSDLWLVNAAMSKWDRHWMARWFYHTIPLEAGSDSAKALRCRRRAIASNRKPKIAVNGAMEARFVLLRKVCSRLSCRDLVEEFCMLRIFPLSQSWQVTVDQGEEVDGLPNLVLLEGTNTLTLDQAEAEARRMIGDVSVVKFSHLLTRQAAGRANRVYNSELPPRANPHKADDDVGPSRKRMRGQVKLAPRKRRVLASSDSDADDEDDAEEHDGEEEGEEEEEVEAVAEKAADEAVENRVDTPGYTLTPSPGXEGAKLLVAFSAGKAAKGGPVKKISKKKGLVDAARIFSDDESSDETPTSPAGRSLDLSTTPILSLGADGAGGSAAAGASASAERIVTAAARVFGSPLHEPAVSPLVKTKGKGAAAEASASEYSLVAPPLRPCLAVRILAAHCSTERTARARLDGFKNRLRAKDDEISCKNLEVEALANTLKEAKAEVKRLQSELEKGKEARAEVDRLKAELEKEKAHSAVLTDYYNLTEPKMEALRLKVSKAEASAVEESQRFLREMAKTTESARTACQTLRLALTDMGAKVRGIPVEDASAFDFSEWTQQAGGSVSDCATAYGDCCARVSAAFTMGLMQQFDCEHVDEFPNYAKGDWEISAQNISPALRAWRKQFWQKDGRSTAKARLLEQLAKAETADRCEEEDAAAEAGGGDAQDHPEV

SEQ ID NO: 188036 - protein, 614 aa, Oryza sativa
  Clone ID: PAT_MRT4530_84680C.1.pep
MEIAGGGMAAAAVQRAVRCLGRGVDMAGDLRLKHCKDEGGCLVARSGEKAAAVAVPGVGVVAGVPADVKFGKGDRIRFKSDVLEFNKMSDLFNHRSSLPGKIPSGLFNSCFDFGSDSWASDAGDTRCLAFDGYFISLLDLRLDCRPLALAGHVVADVPAAWDPSAIASFIEKYGTHIIVGLSMGGQDVVYVKQDKSSPLSPSVIKEHLDKLGDQLFTGTCTLPPSHCKSRDHKFKVPEAFNVFDAQMTRQRIEGMTAPMSCKEGVTVIYSKRGGDTAASNHSEWLPTVPLMPDAINFKLVPITSLLKGVAGVGFLSHAINLYLRYKPPVAELRYFLDFQHHRLWAPVLSDLPLGLCSNRQGTNPALHFSLVIVPKLPITGMRLHLEGKKNNRLGIHLQHLSTTPTFIAGGWSGRPPAWRGSEAIADERYYEPVQRRMFAHVCTVPVKHDPRWLAAGDGGGGRPAAYVVSGAQLHVKAHESTSVLHLRLLYTELPGHSVVQSRWAHGGGGGGAARMSGVKGSFLSMSFASMAAAAAEKEQQKQAAARLNVDSGVFAGGPPAPVGAQRLLKFVETSQVTMGPQDCPGYWLVTGAKLDVDKGRISLHVKFSLLAPVS

SEQ ID NO: 188037 - protein, 1141 aa, Oryza sativa
  unsure (1)..(1141): unsure at all Xaa locations
  Clone ID: PAT_MRT4530_84681C.1.pep
MSTYFTLCSCYAEYTASLSVRCFGAGIVFAYAITLCHDDDIRVVSGSLDVVSRLRDTIIWGYILRMIGGPLMVTAQYGLTLFVFTFCCENRVVHDWFQPAGKLQRKSRSFLPERQAASRCSVENSTNRETSRTSATNFQDYGQQESREFVAPSTDNMAVGPQVNIGDMDFDLKSSLITMAQTSPFCGKPNEDANAHLQQFLEICSTYTIKEFFPMGKTNALRGRISSFQQTRDESIPEAWERLQEYVAACPHHKMDDWLILQNFYNGLTPMSRDHLDVAAGGAFFSKTVQGAVKLIEKMVSNMGWSEERLQTRQRGMHTVKETELLAAKLDLLMKRLDDHEKRPQGNVKALESHVTCEVCGGMGHSGNDCPETHEEAMYMGNNNGYRPQGGQGWNQPRPYYEGGNNNGNFSNQLLNKMTETQLTQLASLVPANESGRISGQPDSSIENVKAITTRGVIQKIHINVPLLDAMQVPTYARYLKDILNNKRPLPTTEVVKLTEHCSNVILNKFPEKKKDPGCPMITCSIGAQQFDQALCDLGASVSVMPKDVFDKLNFTVLAPTPMRLQLADSLVRYPAGIAEDVPVKIRDFFIPVDFVVLDMDTGKETPLILGRPFLSTAGAXLTWELGVSVSISTGRRKSLSFNQGRNNAPWSESKLPGKGKNNAQEPLLEDTGKITCTGQEVRAAGSEEAVFRTEIKXRVEGKAKGACSITSGDGWKIRALNRKEFAFKFIHALIVFLKFKSLVAYIQVALVKLTGGMRRRLSRLFKGSGSPSSRHDESSTCSSADVSMEDADAPQQLLSDDDLDLVSDRERQAYYMLSDQKYAHMREYSPELLKKIGMDVEFRSIWKAIGWQRFAVVDEPGSRLLTLQFLCTLKEIEDGISFHFFRKEFTLTWKGLSTLLGFHDSCKTDLQKGISGFEKNRFWEDISGAPICKKTRTNDIHNPTLRLMHKWIAMTLFPRSDLRSIRGDELIIMFAMTIEESLAGGTYRETRNMTRNEQGSSSSSTPVQMYEAGWAPTGDAPGWTQAARHSIRVSTWASASEDRWHAPHDIHWGDNQPSKSSGVPPSPSEWRSSSSRWDLGEITRRMDTLDVQMGEIQGLNPIKDPVQKPSLGGDLAPPPEVVARYEIVNMSSYDPDTSLA

SEQ ID NO: 188038 - protein, 458 aa, Oryza sativa
  unsure (1)..(458): unsure at all Xaa locations
  Clone ID: PAT_MRT4530_84682C.1.pep
MEMLNMAFLKGREEANKLVPTNNTLFAGFDGASLLKTEPAVDEPTLMFGRSGGSGRGRKNRHGEEDDLEAETGRSSKLMVPPQEDTAAASEMFDEIMFNGYEVIMKGMEELRVAMDSEAEKKARNGGGAGRRAARAKAGVVDLHTLLIHCAQAVATSDRRSATELLKQIKQNSSARGDATQRLACCFAEGLEARLAGTGSQVYKSLVAKCTSTVDFLKAYKLFAXCCIKKVSFIFSNKTILDAVAGKRKLXIVDYGLSYGFQWPGLFKCLSEREGGPPEVRITGIDFPQPGFRPADQIEETGRRLSNCARQFGVPFRFQAIAAKWETVRREDLHLDREEEEEEEEEVLVVNCLHFLNALQDESVVVDSPSPRDMVLNNIRDMRPHVFVQCVVNGAYGAPFFLTRFRETLFFYSSQFDMLDATIPRDNDERLLIERELHFFFCYYSLGLCALLFADNLL

SEQ ID NO: 188039 - protein, 722 aa, Oryza sativa
  Clone ID: PAT_MRT4530_84683C.1.pep
MEAVVRLIDVAHSKLQVLGTLFRRIHLGMPAAIAMDLFGDPATVGVSPTEILEEARREISLSGARHGKTMHVFARYVVAHLHVQQDDPGTHYQDAIRFIDKGAGEDRSITEPTTQPNSLLFFSFPMDFITVEREAKLRRPRDPSDHSTSCGGDDDSPISHLSDDVLVHVLGFLPTATDLMRACAVSRWWCRLGARVPLLRFLCIDRAFDRQETLDRFVAFINNVLTRRAAGQSDAGVEELTISLKSGMSSVDVAEVDAWIRYGMQHVSNTFTLELNIPLRSGNNSNHRYLDDDEDDDDDNNGMILAELPSSPRLKSVMLSLSNARLRLPTAAAFDSLVDLSLENVRLEDNSIHLLNRLLSPACCPRLQRLRFNKLTVGRQIKTPRLRVFHMRYTSLIGKLTISAPRLEEFILPYTGRVSVINVEDMPCVRVLEIDLWLLGGSQYGGYINKDRIRLLQCCRFLQFLTIRLVHACEIYLIPKFVMFSTPGLTQAGEVVQKDNGNAEVELMKDVPELPHVTSLSLRVIEMNEMYDIASVLCVIGRCKFLKHLELDIKMAHCEGPTEVSNQNQKDYHIISLEHLQEIKITCSYMRNHEVGLIKFLHTSAPALKKMRIAFISGFMCSQSLDIFFMRSRSLEILKELLISRICFIFFSNWGGDYLYRARMSTGVLSKPRENSLLTSAEGVHFTHTTLLTRITQPAFPKPTQVYHMPTRGVPDQQQVRS

SEQ ID NO: 188040 - protein, 511 aa, Oryza sativa
  unsure (1)..(511): unsure at all Xaa locations
  Clone ID: PAT_MRT4530_84684C.1.pep
KERTGRAKWAGRPKAAQVRARGRGGERGPVDRAHRARSRGGGGTRCTRAVCGGXGCGGPTRSLTARGGPRARGAXEAADRGRPVPTSAGPAPTWRLRGCHAGRREVDDDACRNGRRSIAASDGANHGDTGKSEHTGWLHVTRGDEPTARIRRRELEGGESRRRQPAAGKGENGDEVTRGQFPVVRASTRPRESDASVGLGGATPSEAGDERXYGARAVTAASTRRATTKEEEGEGAPGVPFRVLARAGSSXTRATTNGDGEQSTGAAAMARRRMREEGKGGGXGFKWAAMSVWEXDLGRSRRELALGACVQIGDRAVTLARGKKEDKXGEKRGGSPLSSLGKGGGSGGVAAEGGGRLCLRPLAACARRGGAEAMTTAMTAGRFGAALTTAATRRSATTARARGLQREARRXERRGLGTHAGLRGRAAARLQGGRAAGPDGADGADGAALAHARATRGQSGGRGAGRGSRTRARGARAERRGRGRERERAGREGEREMGRARFGPSNPGVAK

SEQ ID NO: 188041 - protein, 290 aa, Oryza sativa
  unsure (1)..(290): unsure at all Xaa locations
  Clone ID: PAT_MRT4530_84685C.1.pep
EDIEFLRLLDFLSRVVPSGTRLSVTRFTVRSEHAARGLAVDRAREQGRGERRTGASLTRSRPRWRRRGAFVAATRAGGRRKKGRPRWTADGGRVHRSKHDGFGLRGAHQSEEGIEKERANGSDSSYGVRRRWNSMAATGGERKGKSPRGDEDSIKGGGSISGVQGTHFRGRMGLSGAVEVRRRDAASGGGRQWRRGHAGWRRSLGRRLRAFGRATKLPRNLEGARVSGEGEREGGTTEPGRRGDEQPTARERALRRRAGEGXEDGRPESRVTRPRTHRLPRCSATDGDGV

SEQ ID NO: 188042 - protein, 103 aa, Oryza sativa
  Clone ID: PAT_MRT4530_84686C.1.pep
FTTLFGCSRFGKFVEIQFDANGRISGAAIRTYLLERSRVVQINDPERNFHCFYQLCASGKVPLPTIAIPYLAHYYVHNCVSSITARFDYGLSVKSALNVEEYA

SEQ ID NO: 188043 - protein, 243 aa, Oryza sativa
  Clone ID: PAT_MRT4530_84687C.1.pep
MASNTALGQLKAIQLLDGSNYVEWRNNVLINLAMLDYDLAIREDPPEEPQPAEELNIIGEEYDNLMWAYNKKLANWEKSNRMCLIYVKDAISPEVIGGIIDSNDIKTYLANIEESFEFAPEAHANTLKEEWTIQELILHSVEEEERQKAEKQKIKDRLNLTNAFDKGKKVYQGESSNKNSEPEGEQNQEGIKASTSAVPFKYKSLLPLLCVRWTLAEKLHTLHSVETRTIQTVAKRGVNTQSN

SEQ ID NO: 188044 - protein, 152 aa, Oryza sativa
  Clone ID: PAT_MRT4530_84688C.1.pep
SCPHTHQQNGAAERKHRHIVEVGLSLLAHAGMPLKFWDEAFLTAAYLINRLPTPVNDGIPPLTKLFQQNPDYASLRTFGCACWLHLRPYNSRKLQFRSKQCVFISRDVIFDESVFPFMSLHPNAEARLRAEISLLLHAHSSCWRECRNWRAS

SEQ ID NO: 188045 - protein, 206 aa, Oryza sativa
  unsure (1)..(206): unsure at all Xaa locations
  Clone ID: PAT_MRT4530_84689C.1.pep
QLPQHASPVSDASSRFTATTRPPSRSARYTVPKLPLPMQYASLKCSIAARMLPKENVMSLLHIEAGGWPEPXRRREGGDIGERRELDGGSGQLRHLPAAAPPWPPPPPPRRGRAVPAQATRRRASALPMAAGWESLLRCLHHXFEFQPRTEQCSMVRIKYGPNRQNIQEVEVEPPKTDSLVKFMQNFRLHQNQRRCGGRSQRHPLH

SEQ ID NO: 188046 - protein, 782 aa, Oryza sativa
  Clone ID: PAT_MRT4530_8468C.1.pep
MVPRKPNPALAKGPDPGRVDDNSTAFLGVSLVDNIELAKLVSSGVLVEGQAFATGKAVVPKPVDNRTVVELPQLSLSALIRISIFDWACRTSGFEPSAELFSAIFFATVNSKTVITLAGTKKTVFGSVNFNVRPERSDLWPVNAAMSKWDRYWMASWFYHTIPFEAGSDLAKALRCRRRAIAPNRKPKIAVDGAMEAWFVLLRKVCSRLSCHDLVEEFCMLRIFPLSQSWQVMVDQGEEVDGLPNVVLPEGTNMLTLDQAEAEARRMIGDVSVVEYSQLLTRQAAGRANQVYNGELPPRANPHKADDDAGPSRKRMRGQVKLAPRKRRVPASSDSDTDDEDDAKEHEGEEEGEEEEEALEGAKALVSFSSGKAAKGGPVKKISQKKGLIDIARIFNDDESSDETPTSPTGRSLDLLTAPLLPLGVAGEGGSAAAGASTSAERIVIAAARVFGSPLREPAVSPLVKSKGKGAAAEASASEYSLAAPHFAPGDFETRADLISFVEGVSNLVLPAGTPSLFTELNEFDEGCSAIKSLAVRILAAHCSTEQTARACLDGFKNRLRDKDDEISRKNLEVEALANTLREAKAEVKRLQSELEKGKEARAEVDRLKAELDKEREAIAEVDRLQTELKEEKAHSAVLTDYYNLTEPKMEALRLKVSKAEASAVEESQRFSREMAKTTESARTACQTLHLALTDMSAKVRGVPAEDVSAFDFSEWTQQDGGSVSDCATVYGDCCARVSTAFTLGLLQQFGCEHVAEFPNYVKGDWEISAQNISPALRAWRK

SEQ ID NO: 188047 - protein, 79 aa, Oryza sativa
  unsure (1)..(79): unsure at all Xaa locations
  Clone ID: PAT_MRT4530_84690C.1.pep
WNRLLKYLCHKTICLMFLEVVAWAKEKRPSVTNKWMIEEVDXGPNQDLXQVYFYLTTSLLVHRRQEIKFYIFWIRIRAS

SEQ ID NO: 188048 - protein, 731 aa, Oryza sativa
  unsure (1)..(731): unsure at all Xaa locations
  Clone ID: PAT_MRT4530_84691C.1.pep
MASSSSTIAPSPALSQPVTEKLARGNFSLWRAQVLATLRGAQMAGFFDGTKEMPAPTKIVKKDEKDIVVPNPDYTEWVAQEQQMHGLADEMTAAGKKLDDEDLVSYILAGLDFDYYPVVSAVAACVEPITISELITQLISFEQRLELRQGMAQANAAMRGRGGXSGQRGRGRGGGNPGGGGGRDAPQGGRGGANNQEWPKCQLCGKLGHTRIGISHYVSCLHTHQQNGAAERKHRHIVEVDLSPCPCWHAIEILGCGISHCRLSHQSSAYSXSMMESHLSQSCFNKTLTTPLSAPLGRVYIXRDVIFDESVFPFMSLHPNAEAHLRAEISLLPEHMQNSSAPAPQRPGTRLQQGIRKPKCYMDGTLRYLNLVTTSEPTSLYDAMTNSNWKATMDSEFNALQKNKTWHLVPSTSGKNIIDCKWVYKIKKKADGSIDRYKARLVAKGFKQRYGIDYEDTFSPVVKVATIRVILSIVVSKGWSLRQLDVQNAFLQGVLEEEVYMRQPPGYEDKAYPHYISHLRKLQLVYLKSLEADFALKDLGDLHYFLGMEVKRTKDSLLINQEXHWAAVKRILXDWAGCPDDRKSTGXARKQPTVSRSSTEAEYKALANATAEIMWVQKLLDELGVKHPIAACLWCDNLGAKYLSANPVFHARTKHIEIDFHFVREQVSRKLLDIWFINTNNQLADGFTEALPVRKLNEFRRNLNLVPVLGLPGGVKQIDSSDRNISVDKIR

SEQ ID NO: 188049 - protein, 515 aa, Oryza sativa
  unsure (1)..(515): unsure at all Xaa locations
  Clone ID: PAT_MRT4530_84692C.1.pep
GAARPSLTDRPAQDGPSARAREGGERGSRWTGLTTRGPGVXGSARRTRAARGWDADAAGPRAASRLAVERAHGEGPTGVGSTRSXAELAPTWHLRGCHAGRREVDDDPAANGRRVAAASGGANHGDTGKSEHTGRLHGTRGDEPTARIRRRLLDGGGLRRRQPAAREEGNGDEATRGRFPAVRASTRLRELDASVGLGGTTRSEAGDERVLRSSGGDGGEHTASDGNXEEEEEGAAEVLFRVLARAGSSDTRNDDRXGETEGGNGAEAKMREFGGGGLGLKWAAMSVWARETDIERSRRELALGACSQSGXQEDDAGEKEKGEKEGEKGXLPLCRFGKKGKGSGSVAAEGGGARXPSLGGLRVEWRGPGDDDDDDGGXRLGARLMAVATGRSTTQHARAACNGRRPRGHAHANTARGKRQRGSGEGGXWLGAGGLRVLARGAERRGAGRGSRARARRAREGRSARRRALARASRGGAEGERERAGARRGKREREPGERGEDGPRENRPIDPGGGK

SEQ ID NO: 188050 - protein, 104 aa, Oryza sativa
  Clone ID: PAT_MRT4530_84693C.1.pep
MTAVAGTHFLHSVLNPNRRAHAPWKATRAMAGTLCPLRIETLITDPQHRSPKSIDAEDRSKDDNNGEEDRFRTCIPESVDWRQRANRRMKATMAQRTPNTRGGG

SEQ ID NO: 188051 - protein, 75 aa, Oryza sativa
  Clone ID: PAT_MRT4530_84694C.1.pep
GSPPGGNFPSSPPAGGSVGTGAPPDVDSPASAPRDAPLSPAVFASPGTADSSPTPSTPRGPSASPPTTPRALSPI

SEQ ID NO: 188052 - protein, 279 aa, Oryza sativa
  unsure (1)..(279): unsure at all Xaa locations
  Clone ID: PAT_MRT4530_84695C.1.pep
AETLKLIVAGLLLEELLISRIRFIFFSNWGGIIYIEQGLLTSAEGVHFTHTTLLTRITQPMGISHVGRPPSFHDKAFPKPTQVYHMPTRGVPDQQQFYPSCYSXFKFEGVRRYSRRVHEYRDATRWLQGDMAELAPTWRLRGCHAGRREVDDDAGRNGRRTTAASGGANHGDTGESEHTGXLHETRGDEPTARIRRRESVGGGLRRPQPAERKGENGDEVTRGRFPAERASTRLRESVASVGLGGATPSEAGDERVLRSSGGDGGEHTASDGNGRGGAG

SEQ ID NO: 188053 - protein, 42 aa, Oryza sativa
  Clone ID: PAT_MRT4530_84696C.1.pep
REISSNLSTMISSAPSNLLTMISSVSFASSTLFVIPILNLSC

SEQ ID NO: 188054 - protein, 76 aa, Oryza sativa
  Clone ID: PAT_MRT4530_84697C.1.pep
MAAEGEGRLAADEGTLRPNLRLVDRLHARPAPDLRRLFSRLDRLHARRRKPISSAPPHSVPSNSRGLRASTVAHGD

SEQ ID NO: 188055 - protein, 1475 aa, Oryza sativa
  unsure (1)..(1475): unsure at all Xaa locations
  Clone ID: PAT_MRT4530_84698C.1.pep
FPHGVIFFHYRSFPGALAAGDREAGSQQLLPVTSSVLATLRGAQMAGFVDGTKEMPAPTKIVKKDEKDIVVPNPDYTEWVAQEXQVLSYLLLSLSREILSQVVHMNTAAGVWTAIKGMFTSQSRARAINTRIALTTTXKGNLFVINYVNKMRGLADEMTAAGKKLDDEDLVSYILAGLDFDYDPVVSAVAARVEPITISELITQLISFEQRLELRQGMAQANAAMRGRGGGGGQRGRGRGGGNPGSGRGAPQGGRGGANNQERPKCQLCGKLGHTVIKCYKRFDTSFTGEDIAVNAATTSYGIDTNWYVDTGTIDHVTGELDKLTVRDKYTGNEQVHAANGTGMEISHIGHATVPISSGNLVLKNVLYVPEATKNLVSASRLAFDNDAFVELHPYHFSIKDRDTRRLLHRGRCKGRLYPLKPSTDPVVKHAFGVHKISSFRWHSRLGHPSPAVMRQVLSQNNLPFVSDSNKDTICDACQQGKSHQLPYPKSLSRSKAPLELIFSDVWGPAPTSVGSHSYYVSFVDDFSKFTWIYLLKRKSEVFXCFHDFQHLVERRFDRKILALQTDWGGEYQRLNSFFXRIGISHYVSCPHTHQQNGAAERKHRHIVEVGLSLLAHAGMPLKFWDEAFLTAAYLINRLPTPVNDGIPPLTKLFQQNPDYASLRTFGCACWLHLRPYNSRKLQFRSKQCVFLGYSTMHKGFKCLDVASGRVYISRDVIFDESVFPFMSLHPNAEARLRAEISLLPEHMENSSGLSTMEQLADXIPVMRTPPAGGSAGTGAPPDVDSPASAPRDAPLSPALSASPGIADSSPTPSTPRGPSASPPTTPRAPSPIQGGHADAVLESPPSHGSASSSSSSSSTLSGSSTATHESTATSAASPVPAPAPQCPVTRLQQGIRKPKCYTDGTVRYLNLVTTSEPTSLYDAMNNSNWKAAMDSEFNALQKNKTWHLVPSTSGKNIIDCKWVYKIKKKANGSIDRYKARLVAKGFKQRYEIDYEDTFSPVFKAATIRLILSIVVSKGWSLRQLDVQNALLHGVLEEEVYMRQPPGYEDKAYPHYICKLDKALYDLKQAPRAWYSRLSHKLQXTSLFYLNKGKYTIFVLVYVDDIIVASSSQEAKXTVGLLKSLEADFALKDLGDLHYFFXMEVKRTKDSLLINRERYATDLLKRVAMQNSKPVNTPLSSFEKISVYEGEKLGPEDATRYRSIVGALQYLTLTRPDISFSVNKVCQFLHTPTTVHWAAVKRILRYVQGTVNLGLKFNQASSMLVSGFSDADWARCLDDRKSTGGFAVFLGSNLISXSARKQPSVSRSXTEAEYKALANATAEITWVQKLLDELGVKHPIAACLWCDNLGAKYLSANPVFHAITKHIEIDFHFVREQVSRKLLDIRFINTNDQLADGFTKALPVRQLNEFRRNLNLVPVLGLPGGVKQIDSSDWNICVVPILPPTPLPPLLPLLLNVLLPSVGAIFAPALCHLHH

SEQ ID NO: 188056 - protein, 378 aa, Oryza sativa
  unsure (1)..(378): unsure at all Xaa locations
  Clone ID: PAT_MRT4530_84699C.1.pep
PESPSPHFESRHRFTICQREGSQTNTRVRRXRGARALLAEDADAAGPRAASRFAMDRARERGRGERRTGVSLTRSRLRWRRRGALVAATRAGERKTTTPAGTDGGXRSTAMRVKASTPGDGDTTREAGDXGRYRAWAATTASTQRAVAAVGTAPASYGRGAVTMVDGAGRDRSGLGPGKRRETVRPESTSRVLARAGSSDTRDDERRRRAGQGDNGAAAWSELGRAKGNRRAKRGKRETEGGKGARAXCQLGEERDGSGRRCLRVLDRRERRGSGTCAGSRGRATARPQARQGSGAGRRRXRHGRRRRGMGGDRASARERGNGARGACQGWSGERERGSSARRRLTRTRRRVRRTGRARGELRERERERELGREGIGP

SEQ ID NO: 188057 - protein, 146 aa, Oryza sativa
  Clone ID: PAT_MRT4530_8469C.1.pep
MTLEAAEAIMDEPLPKPPLFCSCRRHSPDLGRQGHRCWPPPLRTDMGEGRGGDGKERRGREDRCGATVIGLLLSGQIWEGMGEQGRCLRFLYGGSVSRTVLAAEPGCRHHPSPFPLPEPPPLPVGREEERGGWPPAVGDWNLLNDR

SEQ ID NO: 188058 - protein, 70 aa, Oryza sativa
  unsure (1)..(70): unsure at all Xaa locations
  Clone ID: PAT_MRT4530_846C.1.pep
SDVETKSPSASLWECVKSSQRQPXLVAHDGHHKHQQQQQSPSAGNTXQHQQGYGQGQLSLNNEVIDISST

SEQ ID NO: 188059 - protein, 47 aa, Oryza sativa
  Clone ID: PAT_MRT4530_84700C.1.pep
KKSNIHQPKVPSKHQYLDHDTTTMYGKANPLHSSNHLSHEPRRCIRI

SEQ ID NO: 188060 - protein, 142 aa, Oryza sativa
  Clone ID: PAT_MRT4530_84701C.1.pep
MEEFQEADILWPEPAEDNSDDGAVVVTTTPSPVARRPVGSPESSSLSAPVEIAASRRKRRSRSWASEYNMFDQTNDDDDAVKKKMMNNGVMVAPPHAIVDRRRLRGRTAAYSMCAGKGRTLKGRDLRNVRNLVLQMTGFIEK

SEQ ID NO: 188061 - protein, 97 aa, Oryza sativa
  unsure (1)..(97): unsure at all Xaa locations
  Clone ID: PAT_MRT4530_84702C.1.pep
LYFYVLYFYFYLYINFFFFFYYIFLCLLYYFYFFLFIFIIVFFXFFFFFLFFFIIILISFNIFFILFDNFYIFIFIFYYNFYKVIFYFVYFVFFFFY

SEQ ID NO: 188062 - protein, 130 aa, Oryza sativa
  Clone ID: PAT_MRT4530_84703C.1.pep
MAGRPSIPTNSSALIAIIADEDTVTGFLLAGVGNVDLRKKTNYLIVDNKTTVKQIEDAFKEFTTREDIAIVLISQYVANMIRFLVDSYNRPVPAILEIPSKDHPYDPAHDSVLSRVKYLFSAESVASDRR

SEQ ID NO: 188063 - protein, 130 aa, Oryza sativa; identical to SEQ ID NO: 188062
  Clone ID: PAT_MRT4530_84704C.1.pep

SEQ ID NO: 188064 - protein, 71 aa, Oryza sativa
  Clone ID: PAT_MRT4530_84705C.1.pep
MAYSSKKQMATVVEGSARQRCTWNTSDATMAVAAEDASRAASAAETGKTDGESEDLGAAHRQGIAVDISYQ

SEQ ID NO: 188065 - protein, 226 aa, Oryza sativa
  Clone ID: PAT_MRT4530_84706C.1.pep
TRLADRRNHTRKRAPTTASSPPPGLSGRRPWPCSSPPSSPLPLFPPPPPLPRRRGLSGSRRRSRSPPLSQRWPRRGSWRCPRPRRRRRRPGRRSSRCTTARRRARRTTAGTAGTRARRTRRSTCTRCRRGGRRGWCPRWRRAPTARTASSSTRGSGRSGSTSRSSPGSGRWRRWAPCSTTSRSPTSGSRTRSRRRTACCRRSGGTAAGSSTTSTRSPAPARTASSP

SEQ ID NO: 188066 - protein, 111 aa, Oryza sativa
  Clone ID: PAT_MRT4530_84707C.1.pep
IKQLLIASLVSIAILAVYYSANENKIDAFEEWKAQYGANFAAEEEAYRRLIFEKNLVKINKHNADASQTYKMGVNQVTIYTTEEFGTRFLTPMPQVGLTQNTEVNHEMNIV

SEQ ID NO: 188067 - protein, 40 aa, Oryza sativa
  Clone ID: PAT_MRT4530_84708C.1.pep
GGQVAQQAGNMPVPKGCTNPVSNKLNPSARSEDGSCLYSF

SEQ ID NO: 188068 - protein, 246 aa, Oryza sativa
  Clone ID: PAT_MRT4530_84709C.1.pep
MYRAYSRAAPSSPYTPTVKFPPSLSIVEPLEPAYWGHPPDQNLSGEQELPDGIGIERLTWTRFNTSDRAGTAASVQHNTHADPTELPLILIAIPGQERANPIPHRRHLLRSANTTEGNTSKIEGKKSSHNRGEKRLNRVMNKYSKKEQRTTQPQCGLTSTDSGREDGKQQGAPTKATGQASSYEETTGDGETTNPKGTRKKKGSTRAPYRDGRQGKIAPPYPTQEQTTNTPQKQNFAFFTFNLHKS

SEQ ID NO: 188069 - protein, 359 aa, Oryza sativa
  Clone ID: PAT_MRT4530_8470C.1.pep
MGSNGGGGGGGKQVLWEFHATGPRNISNPSWRDLIRSSWTDPNYRRIAVSCFVQAAYLLELDRQEKRNGESALAPNWWKPFKYKLVRPLIDSRDGSIYGVLLEWDQLAALSDLIVLRPNGAPKVVLAIRGTVLKQSTVVRDLEDDFRFFTMESLRGSVRFTGALEALKSAIDKRGSNNVCIAGHSLGAGFALQVGKTLAQDGIFVECHLFNPPSVSLGMGLRKLQEKAGKVLKRYVSGSSSNATELSHPTEDGGAASEIGEEKLIKEVKRWVPNLYINSCDYICCFYADRSGVATVTAEKHDGHSGTHSKLFVIAKGPKKFLEAHGLQQWWSDDYELQLAVHDSKLMYRHLKSLYVNES

SEQ ID NO: 188070 - protein, 99 aa, Oryza sativa
  unsure (1)..(99): unsure at all Xaa locations
  Clone ID: PAT_MRT4530_84710C.1.pep
YXYIVAVXRFXFLASXHXLVLIAFPFPFPFLFMIYLSRYFAGCNLLLEICSAWKNTMQMRSXIDFHYGILTGYMLLCATDXQRRXXKGDSCSICXDLSI

SEQ ID NO: 188071 - protein, 99 aa, Oryza sativa
  Clone ID: PAT_MRT4530_84711C.1.pep
MAFATSFPSPPFCALKLIVGRKPAEGKWLCSWLPRNSLLVETLAISEGEEAEGALPIHELASWHGDAEIHGGMAEKTGEMLNRQRHPGVSCTILLGMNL

SEQ ID NO: 188072 - protein, 119 aa, Oryza sativa
  Clone ID: PAT_MRT4530_84712C.1.pep
EHIPNPEEGGAPSPPPALMREVAGAVVSDAARVLHPPLSSVVSCGWLCPLDRWSSVAVPPVSGGGSLTVHLQERRVFSSCGARDFWGVGFSLCCILLFFFSFYLLSLFIFGLLSRLGVL

SEQ ID NO: 188073 - protein, 86 aa, Oryza sativa
  unsure (1)..(86): unsure at all Xaa locations
  Clone ID: PAT_MRT4530_84713C.1.pep
MVGCENMVLMVVLMTIKDRFTSFGCETLTVPTTSQHEQQLYLLYSMVYCGAPDXEVAEITPRGSPRSPCLXYKEVIMIQEWCAVVD

SEQ ID NO: 188074 - protein, 109 aa, Oryza sativa
  unsure (1)..(109): unsure at all Xaa locations
  Clone ID: PAT_MRT4530_84714C.1.pep
SMVRTGNMLREEKRSSAVGIPCDKVTRVRILGGQLRSTVGIETRLREELRSRWSRIPGDEVGYEMAHGGXTLYERDLHNGLHEVCVXVPVFTKEIGRGYSTVLEIVNIL

SEQ ID NO: 188075 - protein, 79 aa, Oryza sativa
  Clone ID: PAT_MRT4530_84715C.1.pep
QESDPAYLDSDLHVSHIFGGSTAYSSKREYKKVEREVCSTWQGAAPKMKWSTIRNIKVVRVLIDGGSSINLLFASTLDA

SEQ ID NO: 188076 - protein, 516 aa, Oryza sativa
  unsure (1)..(516): unsure at all Xaa locations
  Clone ID: PAT_MRT4530_84716C.1.pep
MGAARERWGGPAELNGPAGQRRPKRARAGGEERVGRWTGLTVRGPGWDPLVSGSAHRAEGARGARARAGEGRGARARSAEERMRRAHAQPHGSRWNTRTEGADRGRPVPTSAELALTWHLRGCHAGRREVDDDAGRNGRRTTAASGGANHGDTGESEHTGWLHETRGDEPTARIRRRKLDGGESRRRQPAVGKGENGDEVTRGRFPAVRASTRPRESDASVGLGGATPSEAGDERVLRSSNGNGGEHTASDGNGASWRSALASKSATGRXTPARGKKEEKGGEIGXSPLSSLGKGGGSGGVAAEGGGRLCLRPLEASARAGAAEGDGGGDQAVGHSARARGKQRAARLGTRAGSRGRAAAGAAEQRGRATRXRRRRGSGGEPRGHARERRRAGAVFASGELARERRRRARGRDTRRGACARAGRARXKGRGARRGXSRTRARGALAGRRGAEGEGERERAGGGERAGGEREXRERERGRAGARRGRGEGQGRGEDGPREIRPIDPGGGKIDFCGGI

SEQ ID NO: 188077 - protein, 123 aa, Oryza sativa
  unsure (1)..(123): unsure at all Xaa locations
  Clone ID: PAT_MRT4530_84717C.1.pep
LPKRQGPGALNGRREARRTRENENCSYHHVSSRRHDNEERGGRSNEDRDRDHRHNRHIHDDRERRTPGDTSRGHRHNDEDDRDRCRDNNGGRXQGSREPGRRSRNPSPGPSDPSSSSSSSSSS

SEQ ID NO: 188078 - protein, 55 aa, Oryza sativa
  Clone ID: PAT_MRT4530_84718C.1.pep
MEGCEGFPNRRGRGYRDPAEVTAVFLLPYPYGKAGNCGNRTVTDGNVNPGCDNMA

SEQ ID NO: 188079 - protein, 463 aa, Oryza sativa
  Clone ID: PAT_MRT4530_84719C.1.pep
WAGRPKAAQTRARAEGRRERAGGPGSPRAVPGRTRLSAARLTVRREYVAYARGRGRDAAELAPTWRLRGGHVGWREVDDDPATNGRRAAAASGGANHGDTGKSEHTGWLHVMREDEPTARIRRRELDGGESWRRQPAGREEGNGGEARRGRFPAVRASTRLRELDASVGLGGTTPSEAGDERVLRRSGGDGGEHTASDGNEEGEGAAEVPFRVLERTGSPGAWRRTAEARQSTGAAATGGQGRELALGGRGQSGDREDDAGEEEKGEKEGEKGGLPLCRFGKKGEGSGGDAAERGGARPPSLGGLRAEWRGPGGDDGDDGGRFGAERRHWRQARQTLTTAATGRSATRRARAGNNGRRPRGRAHANTARGKRLCERGARARGGALGAGDSRARARGARAGRRGERGERRSGRLSHARAACGRGRERERERERESARGERERGAGEEGKMGRERFGPSTSGEAK

SEQ ID NO: 188080 - protein, 644 aa, Oryza sativa
  Clone ID: PAT_MRT4530_8471C.1.pep
MVPKPIDNRTVVFAVFFEAGLRFPCNVLLPEILRLFQVELPQLSPSALVRIAIFDWACRTSGFEPNAELFGAIFFATVNSKTVITPASTKKTVFGSVNFNIRPERAIAPNRKPKIVVDGSMEVRFVLLRKSWQVRVDQGEEVDGLPNLVLPEGTNTLTLDQAKNEARRMIGDVSVLEYSQLLTRQAAGRANRVYNGELPPRANPHKADHGAGPSRKRMRGQVKLAPRKRRVPASSDSDADDEDDVEERDGEEEGEEEEEEAVADKAANEAIEDRVDTPGYNETGGKEARAEVDRLKAELEKEKAHSAVLIDYYNLTEPKMEALCQKASRAEASAAEESQRFSREMAKTTESTRMACETLRLALTDMGAKVRGVPAVDASAFDFSEWTQQAGGSVSDCATAYDDCCASVSAAFTLGLLQQFGCEHIAEFLTYAKGDWEISAQNISPALRAWRKQFWQKDGRSAAKAHLLEQLAKAEAADRGEGEGAAGEEVGGDAQVHPEGVRRKSCIRPPSGSWRSQNEKFVAMKGLPKVRCPFRPIYREMEINGRSYKVFKVADWLRAHPGRTLEDYILVHSRRLEDMARFWRIHQKTKRQETIFQRRYSLVCFSPPTPLKVVYDISSDDEPSSPDHALGRDSDYGDKDVIYL

SEQ ID NO: 188081 - protein, 863 aa, Oryza sativa
  Clone ID: PAT_MRT4530_84720C.1.pep
MSYYVDPCTSVPQYSLYPVYGYHPTTVAHQVGGLGAQGSTTISSSLVDNSANANLNYGLPASTTLASTQVSEIVFPVYTTTPISAGPSRTRNENAVAVTQDDSTSKDPPAEAENGTSTTSELEKNSNAAKPCRSDKKHKPTRITSEATGSWCPIHKTRKHTLQACSVFLNARAEIRAYKERGVQRVFPTRGVYCPIHKTKNHDLSSYKVFLNVTKMSSPKVQQPGKTLRDEDKERGTTLTPDRFVGVIDIGSSEPSVLHLLEDYDSSSTSTPREVLAIDGTGTSARANTGAENQTCTPAQHIRTLNAILRKTPYDPVLHDDLAQWTERPPPRGTSDLRDHLNGRREARRTRENENRSRHHVSSRHHDNEERGGRSNQDRDRDHRHNRHIRDDRERRTPGDTSRGRRHHDEDDRERRWDNNGGRRQDSREPGRRSRNPTPKPSDPSSSSSSSSSSSSDRHPRRTYDRRQPTAPSAGCRAFSRSLRNVRWPERFRLGAIEKYDGSTDPEEFLQVYSTVLYAAGADNNALANYLPTALKGSARSWLMHLLPYSISSWADLWQQFVANFQGTYKLHAIEDDLHALTQNSGESLREYVRRFNECRNTIPEITDASVIHAFKLFEIVERCAHVDDALGRMNDKPKTGGEKKPTTDTPESSKKKNRKNAKRKAQAEVLTAEYANPPKRPDPQGSDARKAWCPIHKSNRHSLEDCLVFKKSLEKHMTSEQGKRVRVVEKDAEMTAQESDPAYLDSDLHVSHIFGGSTAYSSKREYKKVEREVCSTWQGAAPKMKWSEQKIQFSEEDHLKTAVIPGRYPIVVEPTIRNIKVVRVLIDGGSSINLLFASTLDAMGIPRSELTPTDQPFHRITP

SEQ ID NO: 188082 - protein, 404 aa, Oryza sativa
  Clone ID: PAT_MRT4530_84721C.1.pep
MEGKGVLEGRYEMGRVLGHGNFGRVHAARDVRTGRAVAMKVVSKDKVERAGMAEQIKREIAVMKMVSHPSVVELHEVMATRTKVYLALELVRGGELFDRIARHGRVGEGVARRYFRQLVSAVDFCHGRGVYHRDLKPENLLLDEAGNLKVADFGLSALACHARPDGLLHTACGTPAYVAPEVLAGNGYDGAKADLWSCGVILYVLLAGALPFQDDNLVCMYRKMRRGDFCCPPWVTTDARKLIKSLLDPNPGTRITVAGLLETPWFRKTAPVPRPIIADPAAAPVDTRGNAGDDKDEPPEVLNAFHLISLSEGFDLSPLFEHDPAASPGRATARAGGTRFATREAASGVVARLEALAMGGARVAPSLLMVDVKKDGGDAMEYRPFFSEELRPALKDIVWSPAAT

SEQ ID NO: 188083 - protein, 417 aa, Oryza sativa
  Clone ID: PAT_MRT4530_84722C.1.pep
MKAPTNTPIETTRPDLIPTSRAPAPSEEEESSSHAACPSRANAIVKHRREPDDELQAAAMGCSFSGLNALYDTVGGGGGDIWVNDYRFRVVRRLGDAGPAGSFVFLVKEVVAAATASDGTGGAVPGASGLAKKKGIDPSHISADGTYALKKVLIQNEQHLEQVRQEIRVSSQFSHPNLLPLLENAIIAVKGVQDGSQNHEAYLLFPVHLDGTLQDINKNMLEKKEYFPTISILQIFRQLCAGLKHMHSFDPPYSHNGVKPDNVLITQRKDQPHLAILMDFESARPARIAIRSQADAMQLQEWASEHCSAHYRAPELWECPTHADIDERTDIWSLGCCLYAMMYGKSPFDYELDEAAGESLQSVTKSAQIKWPTEAGPSYPDSLRQFVTWMLQPHPAVRPHIDDIIIHVDKLIAKYSI

SEQ ID NO: 188084 - protein, 563 aa, Oryza sativa
  Clone ID: PAT_MRT4530_84723C.1.pep
MRELKEVDDDAARGGHGRDATETRKSEHATMDMMEEEAANAATAQAAAAGDLADVVARANARAFLVSTPHHHPSPLHPLPPPPMPQAPHQYYPAPQITIPYHHHHHGELRRPTTIAYTDAPVPFETAGPPSTVVDSYHHLTPGDAGYGMPRPLALQISQHALCGGGDVVMGGGGAGAADDGEEAIRISPLTPSAHHQMMKRKNEVKKVVCIPAPPATSSRGGGGEVIPSDLWAWRKYGQKPIKGSPYPRGYYRCSSSKGCMARKQVERSRSDPNMLVITYAAEHNHPWPMQRNVLAGYARSHHSTHATASSSRHKQQQQQQTNQLQPALITSSSSSSSSPFNLYADVVLGGQQANMMMTTEGAGAGLGIQPSAADEVFAELEELEPDNPTMINANMQVYSTTSRPGASVDTRTGCTNIGTQLDGYKGTWLKMFKASRLAVERAHGEGLTGVGSTRPSWRLRGAYVAATRAGGRKTKAPAANGPRAAAVSPGRLATMRGDGAYTGMTRENKSERANGLDSPEGVRRRRIAAAAPGGGKRGKRRRGHEGPIPGGESIYAATGIRC

SEQ ID NO: 188085 - protein, 184 aa, Oryza sativa
  unsure (1)..(184): unsure at all Xaa locations
  Clone ID: PAT_MRT4530_84724C.1.pep
MLLDPNPGTRIAVPSLLETLWFRKTAPVPRPIIADPAPAPVDTRGNAGDDKDEPPEVLNAFHLISLSEGFDLSPLFEHDSATSPGRATARAGGTRFTAREAASGVVARLEALAXGRRHATCVTRSGARGVRLAVAADVFSVVPSLLVPXVDVKKDGSDAMDYRSLCSEELRPALKDIVWSPAVT

SEQ ID NO: 188086 - protein, 451 aa, Oryza sativa
  Clone ID: PAT_MRT4530_84725C.1.pep
QAAVAVGGAGRRRQAEFQRPEASAEGVAGRGRRAQHGVLGEDDDDALGVSPGDLAFTIFVPSPELFHRVLRLRRPKDSVVDRKADDATYAVISHVLGFSIVPLPPARYGCSSSAADNGRWRLSWSLGVRVWAEDLRLEKADGLSPLSCRRGLPPFPLILPAQPAASPLSPAGAASPASALPSRRLSHVWEEKKDDGADSHVGATSAPAQPRSGRADLGQSLPVRAFHREPWGCAWARRTCVLREPLADEDEADPADEEFFQEQAEGVHFTHTTLLTRITQPVGISHVGRPPSFHDKAFRKPIQAELAPTWHLRGCHAGRREVDDDPAANGRRVAAASGGANHGDTGKSEHTGRLHGTRGDEPTARIRRRLLDGGGLRRRQPAAREEGNGDEATRGRFPAVRASTRLRELDASVGLGGTTRSEAGDERVLRSSGGDGGEHTASDGNGRGGAG

SEQ ID NO: 188087 - protein, 297 aa, Oryza sativa
  unsure (1)..(297): unsure at all Xaa locations
  Clone ID: PAT_MRT4530_84726C.1.pep
HDIPIHPCFCSSVVNGHPAENLKLIVAGLLLEELLVSGIRFIFFSNWGGXIYVEQGLLTSVEGAHFTHTTLLTRITQPVGISHVGRPPSFHDKAFRMPTQVYHMPTRGVPDQQQFYPRSFSDFKFEGDRRYSHRVHEYRGATRWLQGDMAELAPTWRLRGCHAGRREVDEDAGRNGRRTTAASGGVNHGDTGKSEHTGWLHRTRGDEPTARIRRRMPDGGELRRRQPAAGEGGNGDEVTRGRFPAARASTRLRESDASVGLGGAAPSEAGDERXLPSSGGDGGEHTASGGNGRGGAG

SEQ ID NO: 188088 - protein, 178 aa, Oryza sativa
  unsure (1)..(178): unsure at all Xaa locations
  Clone ID: PAT_MRT4530_84727C.1.pep
NLCRGGTLYPXHDITNPNHPARISKADTGLPYADERGPRPTTGXVPDHTVPGSPGVLPDTTPANPHVSRHQGSPDXQFTQPGASHSTRVVALXVCSDVIPXRNRSLDATAQVFRPDFKFEGDRXYSHRVHEYRGATRWLQGNMVACLAQGLHEASRIFKISTIDENPVTATMLKQTKT

SEQ ID NO: 188089 - protein, 736 aa, Oryza sativa
  Clone ID: PAT_MRT4530_84728C.1.pep
MHAQKNAVVVADDVAIDLHPFIRKYNDGRVERILRSSFVPASEDPAASRGGVAARDVIIDERNGVSARLFLPSGAAAAAGRRRLPVVVYFHGGCFCTESAFCRTYHRYAASLASRAGALVVSVEYRLAPEHPVPAAHDDAWAALRWAASLSDPWLADHADPGRTFVAGDSAGGHIAYRTAVRAASREGGDIGIEGLIIIHPYFWGARMLPSEAAWDGESVIKPHQVGELWPFVTSGKAGNDDPWIDPPVEEVASLTCRRALVAVAEKDFLRDRGRLLAARMRGCAWAGGGDGRNVTLVESEGEDHGFHLYSPLRATSRRLMESIVQFINQPSHSPAPLRWPATILSELHDTTDSPQILLPMPTREYKAGACSVLVPSVEHRCQCPRGYSTRPVRAAATGRRRLPIVVYFHGGSFCTESAFCRTYHRYATSLASRTGALVVSVEYRLAPEHPIPAAYDEAWAALQCRRLGVPPVQYKVDTLWPFVTLVESEGEDHGFHLYSPLRGSLQCPRPFCGAPSGFKERLSLEMKQDWHPANSFSNGHPDQQLFKRPPGPTTFNGHPGLADPPVGISHVGRPPSFHDKAFPKLIQAELAPTWRLRGCHAGRREVDDDPAANGRRAAVASGGANHGDTGKSVHTGRLHVTRGDEPTARIRRRLLDGGGLRRRQPAAGEEGNGDEVTRGRFPAVRASTRLRELDASVGLNGTTPSEAGDERVLRSSGGDGGEHTASEGYGWGGAS

SEQ ID NO: 188090 - protein, 89 aa, Oryza sativa
  Clone ID: PAT_MRT4530_84729C.1.pep
MDNGLRRGPIAVCSKGRVKSNSALNCALSLHHRRCHQEQVSDNLHGNGIAAPNGGGCWPPNAALALGLTVSSQFLQGMARCSSGRVSGQ

SEQ ID NO: 188091 - protein, 148 aa, Oryza sativa
  unsure (1)..(148): unsure at all Xaa locations
  Clone ID: PAT_MRT4530_8472C.1.pep
IGREGAGRGRERRESLADVGEWGRRERRDSKIESRPSRARARARERGEWAREMRRTRGRGXRGPEKAEAWARRRRLEGGDGRLGEDPTGGPHLSATSGEEGGGAAWLGLGLRPAQQGGGGGKERMGQRPIXKGREKEKEKGXKDFPWN

SEQ ID NO: 188092 - protein, 422 aa, Oryza sativa
  unsure (1)..(422): unsure at all Xaa locations
  Clone ID: PAT_MRT4530_84730C.1.pep
GPAGPRRPKARARGRGGEREPVDRAHLAWSRVGPACQRLGSPCGGSTRRGARMGEXTRCTRAVRGGRGCGGPTRSLTARGGPRAXEGAANRGRLDPVLAELAPTWRLRGCHAGRREVDDDAGRNGRRTTAASGGANHGDTGESEHTGWLHRTRGDEPTARIRRRMPDGGELRRRQPAAGEGGNGDEVTRGRFPAARASTRLRESDASVGLGGAAPSEAGDERRFRARAATAASTRRAAATVGAAPASYGEATRTTVRAGAVTRGRRRGSNLSGLGPGKRKEWARSESPSASLLVPAPPTRATTNGDGEQSTGGGXQWRGGEWERKGKGEAWVYRGDNVGLGSDLRWSKERASARRSRPKRRQGGGRRMTLAGGKRGKEGEKRGLVPCLFGKRRREQGRRGRGRRSSASVPWQLARGVAGAGR

SEQ ID NO: 188093 - protein, 368 aa, Oryza sativa
  unsure (1)..(368): unsure at all Xaa locations
  Clone ID: PAT_MRT4530_84731C.1.pep
ATGKIEYGISFXFFHKEFTLTWKGLSTLLGFHDSCKIDLQKGISRFETNRFWEDISGAPICKKSRTNDIHNPTIRLMHKLIAMTLFLRGDMRPIRGDELIIIMVRKIKIVPVKCMIRQWLESIKFSAPVECTSLITRIAKGLGVISDQIIFISAARPRIDEAYLVQGHILKHGIDGSLTIEKPRAGGTYRETRNMTMMKRESSSSLTPVQMYEAGWAPTGDAPGWTQAPRHSIGVSTWASASEDRWHAPHDIQWGDNQPPRSSGVPPSPSEWRSSSSCWDLGEITRRMDTLDMQTGEIQYNFTEHIAQTGSIRIKDPERKPSLGGDISPPTELLCFISLIYGFLLLLMLYDQDHTPTYMHMLNSYTGS

SEQ ID NO: 188094 - protein, 341 aa, Oryza sativa
  Clone ID: PAT_MRT4530_84732C.1.pep
MGKQEQEKMLLQAAYDDNLRLLRKMARGLDTGQGEAAVVAAVAGRADGNRALHLAAARGSMDVLRYLVEDLHLSVNQFNAKVCIVEGSIHMTIRVPYGPYAIFFLAGHCEIVELFLSRGVDVDLDSITGTPLLTAAMNGQYSTMKILLEHHADVGADVNFRDPNGVTCVMVAANHGSPVIMKCLLDAGANSNIPDEFNRTPIEVAANRGRRDIVKMLFPLTSPISTLPDWSIDGVISHVQTFGLKPRDNDLSKRKSAELKLQAREAFEREEYMLAGQHYTNAIELTTNAHDKATLLANRSLCWLRLSTGNGALADANMCRMLRPSWPKACYRQGAAFMFLK

SEQ ID NO: 188095 - protein, 85 aa, Oryza sativa
  Clone ID: PAT_MRT4530_84733C.1.pep
MEGGVGRWTGGASQLSMKNRAKNREKKILQELATTLTNELARTPTRPCPLVAAAAVFAGRRRRRGRVRLSATMPCPLVTAAAEAT

SEQ ID NO: 188096 - protein, 34 aa, Oryza sativa
  Clone ID: PAT_MRT4530_84734C.1.pep
AQKSLKLNSHPLLLYKTANVPLAYCLGNNHLMID

SEQ ID NO: 188097 - protein, 103 aa, Oryza sativa
  unsure (1)..(103): unsure at all Xaa locations
  Clone ID: PAT_MRT4530_84735C.1.pep
MDAIRARFFLDGLEGKKKYHMIKWEALCRPKEDGGLGFLNTKIMNEALLCNGAAIRFWDDIWIGEVPLKIMFPYIYSISADPGMTVKQVYKEGXWEINLRRTL

SEQ ID NO: 188098 - protein, 47 aa, Oryza sativa
  Clone ID: PAT_MRT4530_84736C.1.pep
MAPTPTRMLRSRRRSSGAGAKSFSKKRLSATVEGKGKATLTLQITDT

SEQ ID NO: 188099 - protein, 58 aa, Oryza sativa
  Clone ID: PAT_MRT4530_84737C.1.pep
HFLLPVATAQVLIDDDHDKSRLGFGSPSPPPYNLDLTCRPLQCVQDIHPIFPSKVKLF

SEQ ID NO: 188100 - protein, 289 aa, Oryza sativa
  Clone ID: PAT_MRT4530_84738C.1.pep
MAATTAKHQTMRWSDLDEDDDYGGGGGGGLSALQLPPRVVIGPDENGIKKTVEYRLNEEGKAVRVTTTTRVREVARTRVTKRAAERRGWAKFGDAAHNDDAGARLTVVSPEEIVLERPSAPGSKSEDPLIPALDKGAALMVCRICNAKGKHWTSKCPNKDFAPLQLDALVDNNIPPNSGGDNGGGSRPGKYVPPKPRESEMRRRNDENSVRVTNLSEDTREEDLRELFGSFGPLTRAYVALDHRTGESRGFGFLSFVYREDAERAIAKLNGYGYDSLILNVEWAAPRPN

SEQ ID NO: 188101 - protein, 69 aa, Oryza sativa
  Clone ID: PAT_MRT4530_84739C.1.pep
MDGQVVRCMRAAAGARKPLGKPHTTSGSTHAACRCSGGLVAGAVPNHANDVILTMTHLQGKATQATAPA

SEQ ID NO: 188102 - protein, 271 aa, Oryza sativa
  Clone ID: PAT_MRT4530_8473C.1.pep
MRKPTPYVSLHDVVAFDFVDGDVPFDDLVDGEGLCCPDDPFEEVMRCLSAVDDPFLAAFKLDCSPPTPAADADVDSRSEEHMHADVGGGLDLQRAVGGGDEKAGTPSTVDDVPWLQASAVARKPRRAPAAVRKRVWSLVSPQLATAAAAAVDNSRDEVSSGGGGGGEGGEHCSRPAKRRRKCGEEKRCGHCQTTETPQWRVGPDGPSTLCNACGIRYRIDHLLPEYRPSTSPGFGSDGYSNRHRKVVKLREKKRKKAMLAATATALTSGPV

SEQ ID NO: 188103 - protein, 110 aa, Oryza sativa
  Clone ID: PAT_MRT4530_84740C.1.pep
PSLWTSSSQQVTLVISPPFTPHGEGTKRSPTGMGSSHAEWIRSRLAPQDLGVPWLPNRDPSAHWVDPPGVVPGGQPQWCSRRLFWQPGTGCPPSVWSRILPVHVCDLDTK

SEQ ID NO: 188104 - protein, 63 aa, Oryza sativa
  unsure (1)..(63): unsure at all Xaa locations
  Clone ID: PAT_MRT4530_84741C.1.pep
RAVGGXEQKTAKRAHRPGASETNLSETVIKKTKDLPAWTTICMCVLRWSGNNNACPRVNQRMQ

SEQ ID NO: 188105 - protein, 513 aa, Oryza sativa
  unsure (1)..(513): unsure at all Xaa locations
  Clone ID: PAT_MRT4530_84742C.1.pep
MERTGRAKWAGRPKAAQVRARGRKGERGPVDRAHRARSRGGEGTRCMRAVRGGRGCGGPTRSLTARGGTRARGGTDRGRLDPVXAELAPTWRLRGCHAGRREVDDDAGRNGRRSTAASDGANHGDTGKSEYTGWLHVTRGDEPTARICRGLLDGGGLRRRXPAAGEGENGDEVTGGXFLAARASMRLRESDASVGLGGATPCEADDERXYGARAATAASTRRATATEEEGEGAPGVPFRVLERTGSPTRATTNGDGEQSSGAAAMARRRWEEKRGRAPGAFKGGNVGLGTDFGRSRRELALGARVQIGXQGGGRRMTXGGDGKRGKEGEKRGLASLPLLEKEEGSGGVAAEGGGRLCLRPLETSARSGGAEAVTTAMTAGRCGAEVTAAATRRSATTARARGLQRAAGQRGRAAQXGAGATRATTTRARARTTTRGADSAGGELARDGGGEKEIEGKGGHSARAAHAHARGQSGGREGESGGASGKSERVREPGXEGEMGREGFGPSNPGEAN

SEQ ID NO: 188106 - protein, 316 aa, Oryza sativa
  unsure (1)..(316): unsure at all Xaa locations
  Clone ID: PAT_MRT4530_84743C.1.pep
LITQPGVSHSTHVVALALCSDEIPRKRSLSARTGNRTPGTFPVHDFRGAREGLTGVGPTRSRPSXADVAPTWRLRGCHAGWPEEDEGVGHEWTAGGGGFSGTPCDDEGRRGVHRDDEGEXEGASQRLGFAGGSPSAADFGGGNRRREKGETATRSRGANSRRXEHLRGYGNPLLASDWAELRRARLATSGCYGARAATAASTRRATAMVGAAPASYGEATRATALPALGDERRRRDRARKAVATMAMGGEEREGAWALRAAMSVWNRLGRSXARAGERGLAPCFFEKRRRXERGLRGIRRRGSASVPWRLARGVAR

SEQ ID NO: 188107 - protein, 44 aa, Oryza sativa
  Clone ID: PAT_MRT4530_84744C.1.pep
MPPMRILSIRQEGQMKLEGYAIELGIFLKKIPWGLLQPLLQAGT

SEQ ID NO: 188108 - protein, 1421 aa, Oryza sativa
  Clone ID: PAT_MRT4530_84745C.1.pep
MVNLCRLSKCLVMKAWRSPDVADPHGLGDPAVPTVMGGCEVLEIRILPQKHLSGLTFWYTPIPGLYNIALCLRAALLLGGGRRMKIRLVPPLLSHRRRLVIPLLVLLLAAAASDEQLLSLRGQAAVLVSIKDAFSPPLPTPLRTTWSIANDASLCSSWHAVRCAPDNRTVVSLDLSAHNLSGELSSAIAHLQGLRFLSLAANSLAGDLPPTIAALRHLRYLNLSNNQFNGTLHYYLSTMNSLEVLDVYDNDLSGPLPLPDTNSNLRHLDLGGNFFSGSIPTSFGRLQAIQFLSVAGNSLSGRIPPELGNLTALRQLYLGYYNQFDGGIPASLGRLASLVHLDLASCGLQGEIPPSLGGLANLDTLYLQTNQLNGTIPPALANLTALRFLDVSNNALTGEIPPELAALTHLRLLNMFINRFRGGIPEFIADLRSLQVLKLWQNNFTGSIPGALGRVAPLRELDLSTNRLTGEVPRWLCALRKLDILILLDNFLFGPVPEGLGACRTLTRVRLARNYLTGPLPRGFLYLPALTTLELQGNYLTGQLHNEDEDAGSPLSLLNLSGNRLNGSLPASIGNFSSLQTLLLSGNHFTGEIPPEVGQLRRLLKLDLSGNNLSGEVPGEVGECASLTYLDLSANQLWGAMPARVVQIRMLNYLNVSWNKLNGSIPAEMGSMKSLTDADLSHNDFSGHVPHNGQFAYFNASSFAGNPRLVLCGTPAPGPAPGTTTPGSGGDGRAPVMWLAAALGLLACSVAFAAAAMRAFQKVRFGCEDVMRCVKENSVVGRGGAGVVYAGEMPGGEWVAVKRIVDGGFSAEVQTLGRIRHRHIVRLLAMCWSAEAKLLVYEYMAGGSLGDALHGHHRHHDEYDDDGSNTNIIGSLLLPWAARLRVATEAAKGLCYLHHDCSPPILHRDVKSNNILLDARLEAHVADFGLAKYLRAGASECMSAIAGSYGYIAPEYAYTLKVDEKSDVYSFGVVLLELITGQKPVGEHLQLHQEEEEEEANTTTTVVDLVQWVRARCGSGKDGVWRVLDRRLGGDVPAAEATHMFFVAMLCVQEHSVERPTMREVVQMLEQAKQQLSRCHPPPPPPTSTFQVFFSSSVALALLPLRSLRPPSVAASLAAAPLFPHHVHFLGYFRYHRLRYGVVFHLYRRPGFRQPADCCLCSWLFGSVADDVLDLAMEHDQSAQDLWIAIDNLFQANKEPRAIYPHHEFHSMTQGDLSVADYCQRMKTAADALRDVGHPVTESQLVLNLLRGVNSRFTSTADNIASAPILSSFASARNMLVLKELRNTNSVQVQSETALVAANNAHSNCTGGTCHSSGSGGQQQNRAGGSKNKGKNGGRPGGQNNGSNSFGTSTFSIPAPRQAAPWAHIAFAGPYSSPLPAGSVQPAWDQAGLVAALNGMMLYNPNSWVLDTGATSHMSTD

SEQ ID NO: 188109 - protein, 1487 aa, Oryza sativa
  unsure (1)..(1487): unsure at all Xaa locations
  Clone ID: PAT_MRT4530_84746C.1.pep
VLGFRPHVENNMQHIMAVQTQILQGITTAIAGFQHNAHGNGHPHVGNNRSKLTDFLRSRPPEFSQTVEPVEADDWLKDVDRKLNLVQCTPVEKTLYASHQLRGPAADWWENYCNAHPEPTNIAWDEFAMAFHAAHVPESTIDMKKEEFNRLKQGNSSVNEYLSQFNKLARYAPEEVDTDKKKIRKFLKGIAVGMRLQLLAHDFPTFQHMINKALLLEDARKEATEEYKKRKSQXNHQGNSSRGAPRPRYGQPMQYHQSVTQANRQPGYAPRPQMNRPAPPPQQRAPSGNTAPNSVTSFKSPQGPSAVQCFRCNQMGHYARQCPQNPTNTNSGHANGSTARTPTPAAAQSRPSSQASGXGSRASNHFGRGRVNHIQAETAQDAPDVVMGMFSVNSVPAIVLFDSGASHSFISQAFVKRNGWKTQNLRVPMIVHSPGRNIRATQICPEVNLRIEEVDFLAKPIILDSQSLDIILGMDWLAKHKGQIDCAEKSITLQGPGGKQVRFTPNTPTASRSILTCLQVTSLESVPIVCEYPDVFPEELTSMPPDREIEFAIELAPGTAPIAKRPYRMAANELAEVKRQIEELESKGYVRPSSSPWGALVLLVKKKDGSERMVIDYRALNEVTIKNKYPLPRIDDLFDQLKGARVFSKIDLRSGYHQLKIRSEDIPKTAFSTRYGLYEFTVMSFGLTNAPAFFMNLMNQIFLEYLDQFVVVFIDDILIYSKNEEEHTEHLRLIMEKLRDHQLFAKFSKCEFWLDRVAFLGHVISSNGVEVDPSKVEAVLAWNPPKNVSEIRSFLGLAGYYRRFIEGFSKLARPMTELLKKEKKFQWSAACEDSFQEMKKRLTTAPVLTLPDIRKDFEIFCDASRQGLGCVLMQERKVVAYASRQLRPHEVNYPTHDLELAAVVHALKIWRHYLIGNRCEVYTDHKSLKYIFTQTELNMRQRRWLELIKDYDLGIHYHPGKANVVADALSRKAYCNVAQIRPDQEHLCRELEKLRLTVVQSGVPASLTVQPTLESQIREAQKDDEGIKELIKRIQEKKDTNFSIDDQGTVWCGPRICVPAKKELRDLILKEAHESAYSIHPGSTKMYQDIKAYFWWAGMKRDVAEYVALCDICQRVKAEHQRPAGMLQPLPIPEWKWEEIGMDFITGLPRTPNGYDSIWVIVDRLTKSAHFVPVKTTYDGKKLAELYMTHVXCRFGCPKKIVSDRGTQFTSRFWKQLHEALGTDLNFSTAYHPXTDGQTERVNQILEDMLRACALDFEGTWDRCLPYAEFSYNNSYQASIQMSPNEAMFGRKCRTPLCWNEVGEALVFGPDILKSAEEQVKLIRERLKTAQNRXKNYADNRRRDLEFEKGDHVYLRVSPLRGMRRFGMSGKLAPRYIGPYLITARRGEVAYQLELPEGLADVHNVFHVSQLKKCLRVPEEQVPLGNIELEKNLTYKERPIKVLEEAEHQTRRKTIKFYKVQWSNHSEDEATWEREDLLRAEFPELFP

SEQ ID NO: 188110 - protein, 88 aa, Oryza sativa
  Clone ID: PAT_MRT4530_84747C.1.pep
MGSVHVQSNLHQSSPLTIGRKGLPLLGGASIEEELVVHDVVVGVGLSGSSSGGGDGTAAGRRRRRGLASSSSSTTATAAWWCSGIGQF

SEQ ID NO: 188111 - protein, 495 aa, Oryza sativa
  unsure (1)..(495): unsure at all Xaa locations
  Clone ID: PAT_MRT4530_84748C.1.pep
KKAAQSGPRRARAEEGERVRWTGLTTRGPGWDPLVSGSAHRAEGARGAALGCGGPTRSLTARGGTRARGGTDRGRPVPTSAELAPTWRLRGCHVGWREVDDDPAANGRRAAAASGGANHGDTGKSEHTGRLFVMRGDEPTARIRRRELDGGESRRRQPAGREEGNGDEATRGRFPAVRASTRFRELDASVGLDGATPSEAGDVRVLRSSSGDGGEHTASDGNGRELALGGRGQSGDREDDAGEEEKGEKEGEKGGLPLCRFGKKEEVSGGDAAEGGGMLPPSLGGLRAEWRGRAMTTAMTAGRFGAERRHWRQARAEADGGGDRAVGHHGTRARLATGGAADGVARLGHARWLAGPSGCAAAGGRAAGPGGADATRHGRQPRGRARERARGAAARERRGKTRLGAGGSRARARAERRGAGPGSRACARRAREGHSARRRALARAAWGGAEGERERGSGSAPGEREXKGQGRGEDGPRENRPIDPGGGKMDFCRGI

SEQ ID NO: 188112 - protein, 51 aa, Oryza sativa
  Clone ID: PAT_MRT4530_84749C.1.pep
KKVVIQPKINILGKYFLIIDFWWCKYYYRFSVSRLTKAFNISNANCPSYCF

SEQ ID NO: 188113 - protein, 533 aa, Oryza sativa
  unsure (1)..(533): unsure at all Xaa locations
  Clone ID: PAT_MRT4530_8474C.1.pep
MSKWDRHWIARWFYHTIPFEAGSDPAKALRCWRRAIAPNRKPKIAVDGAMEARFVLLRKVCSHISCHDLVEEFCMLRIFPLSQSWQVTVDQGEEVDGLPNLILPEGANRPSRKRMRGQVKLAPRKRRAPASSDSDADDEDDAEERDGEEEGEEEEEEVVADKAANEAVEDRIDTPGYTPTPSPGHNETGVESNSSPLRRTDLEGAKALVAFSSGKEAKEVRLDLSTAPLVPLGVAGAGGSIAAGASASAERIVSAVARVFGSPLRELAISPLVKAKGKCAGAEASASEYSLAAPHFAPGDFETRADLVPFVEGVSNLVLPAGTPSLFTELNEFDEGCSAIKSLAVRSELDKGKEARAEVDRLKAELEKEKAHSAVLVDYYNLTEPKMEALRLKASRAEASAVEESQRFLREMAKTAESARTACQTLRLALTDMGTKVRGVPSKDAXSLRLLRVDPKDGRSAAKARLLEQLAKAEAADRGEGEDAACEEGGGNAQDHPEAVDPIWGRAILAQWAADHTGVRSGFSHDAGNFHTS

SEQ ID NO: 188114 - protein, 466 aa, Oryza sativa
  unsure (1)..(466): unsure at all Xaa locations
  Clone ID: PAT_MRT4530_84750C.1.pep
SSKSSHCGSSGSETRAVPSGTRLSAARLTVRREHAAHACGRGWXGARGARARFAEERMRRAHAQPHGSRWNARTVKGXGVGSTRSWPSWRRCGAFVAPTWRLRGCHAGRREVDDDAGRNGRRTTAASGGANHGDTGESENTGWLHRTRGDEPTARIRRRELDGDELRRRQAAAEEGGKGDEVTRGQFPAARAFMRPRESVASVGLGGATPSEAGDERVLRSTGGDGGEHSASDGNGREGAPGVPFRVLARAGSSDTRNDERRRRKEHGRRRQWRGGEWERKGKGEAWVYRTAMSVWEPTXGGQRRGLALGSRGQSGDREEGXEDDAGGRKKGKRGREXRGLAPLPLREKEEGXGATRQREEELCLRPLAACARSGGXAEAMTTAMTAGWFGAERRHGRXGADDGGDQAVGHHGTRARGKQRATRWIERRSSGTRAGCGAERRGRDGVGSAGVSGCPAAGFTAEILV

SEQ ID NO: 188115 - protein, 210 aa, Oryza sativa
  Clone ID: PAT_MRT4530_84751C.1.pep
GQSGSAHRAEGARGARARAGEGRGARARSAEERMRRAHAQPHGSWWNARTGGADRGRPVPTSAELAPTWRLRGCHAGWQEVDDDAGRNGRRTTAASGGANHGDTGESEHTGWLHETRGDEPTARIRRRKLDGGESRRRQPAGREEGNGDEVTRGRFPAVRASTRPRESDASVGLGGATPSEAGDERVLRSSSGDGGEHTASDGNGRGGAG

SEQ ID NO: 188116 - protein, 925 aa, Oryza sativa
  unsure (1)..(925): unsure at all Xaa locations
  Clone ID: PAT_MRT4530_84752C.1.pep
MPRTTSPVRRCDARGGGGAADGARVEEGPTGEIPAKWMERPARHGGVPAKPRSGRGRRRCRGIEGGDEGVDRRIGDEQEPAGDGVVVATPLNAGENAPPVLSALNGGRPGGEEAAARLLVATARPDGAPARWERRLEAAGGTGERGGRRGEVDVTNVPFLDAMQVPTYARYLKVILNNKRPLPTTEVVKLTEHCSNLILHKLQEKKKDPGCPTITCSIGAQQFVHALCDLGASVSVMPKNVFDKLNFMVLAPTPMCLQLADSSVRYPAGIVEDVPVKIRNFFIPVDFVVLDMDMGKETPLILGRPFLSTAGANSDVGTGSDTNIQEVEVEQPKTDSLVRFMQNFLGKETTMPRNRYWRTLVKSPVPAKKLEQPAQRKPSSALKXKVWKEKPKTPAPLPPETXWKIRELNRKEGSGSLSSRHDESSTRSSADASMENADAPRQLLSDTDLDLVSDRERQAYYILSDREYAHTREYSPELLKKIGLDVEFRSIWKAVGWQRFAVVDESGSRLLTLQFLCTLKEIEDGISFRLFRKEFTLTWKGLSTLLVFHDSFKIDLQKGISWFKKNRFWEDISGAPICKKPRTNDIHNPALRLMHKWIAMTLFPRSNLRPIRGDELIIMFAMVRKIKISPVKCMIRQWLESIKFSTPVECTTLITRIAKGLGVVSDQIAFISAARPRIDEAYLVQGHILKHGVDGSLVYFFPGCTNEIPLPNAGYHLYNCLELTIPLQTIEESRAGGTYRDTRNMTRNERESSSSSTPVQMYEAGWAPTGDAPGWTQAPRHSIGVSTWSSASEDRWHAPHDIHWGDNQPSRSSGVPPSPSEWCSSSSRWDLGEITRTMDTLDVQTGEIQYNLTEHIAQTQEWQQSANAQFANINNMMQGSILIKDPEQKASLEGDISPPTKILLMLYDQDHTPTYMHMLNSYTGS

SEQ ID NO: 188117 - protein, 229 aa, Oryza sativa
  unsure (1)..(229): unsure at all Xaa locations
  Clone ID: PAT_MRT4530_84753C.1.pep
KLIVAGLLLEDLLVSRICLIFFSKSAHDRGHGCSNSFVNLCRGGTLYPHDITNPDHPARISKADTGLPYADERGPRPTTGXVPDHTVPGSPGVLPDTTPANPHVSRHQGSPDKLVTQPGVSHSTHVVVLVLCLDEIPRKRSLSARAXGNRTPDFKFEGVRRYSHRVHEYRDATRWLQGDMVACLARDLELDPRNPRTAGLRAPKLHAKRDNSTNGENKALLMTSKRAIR

SEQ ID NO: 188118 - protein, 514 aa, Oryza sativa
  Clone ID: PAT_MRT4530_84754C.1.pep
MGLSISYPPDDYLPAMEDNMGRLFIRSLSFDDDMEAAADDSPSTSPMPSPSATLLPAFGSGGKLIIEGSLSFKRREADPVQMETMISIRSPKSDKESCSSKPNATAGASRFALAGDQTPEDSPVIAGVASPKHQAAAVRLQKVYKSFRTRRQLADCAVLVEQSWWKLLDFALLKRNSVSFFDIEKPETAISRWSRARMRAAKVGKGLSKDEKAQKLALQHWLEAIDPRHRYGHNLHYYYHRWLHCEINQPFFYWLDVGEGKDVNLEEHCPRWKLHKQCIKYLGPKERESYEVIVEDSRLIYKLSRQIVNTTKSRKGSKWIFVLSTCKTLYIGQKQKGTFQHSSFLAGGATSAAGRLIVEDGILKAVWPHSGHYRPTEQNFQEFMNFLKERNVDLTDVMLNPSEGEDDAEFSLKSSHSRQDLTELCEPDMQEHEEQVTQHHGADETKTSSDAPTMTSTETMASTPAIRKSTSANKLQGNRLLRLQIIWNYTKLFSFLFFFFFFFFFFGKLKIAFI

SEQ ID NO: 188119 - protein, 256 aa, Oryza sativa
  Clone ID: PAT_MRT4530_84755C.1.pep
YQQSPYYANTGIATSNVDTAEGVHFTHTTLLTRITQPVGISHVGRPPSFHDKAFRKPTQVYHMPTRGVPDQQQFYPSCYSDFKFEGDRRYSHRVHEYRGATGWLQGDMAEVAPTWRLRGSHAGRREVDDEPAANGRRATAASGVASHGDTGESEHTGWLHRTRGDEPTARIRWRLLDGGGLRRRQPAAREEGNGDEATRGRFPAVRASTRLRELDASVGLGGTTPSEAGDERVLRSSGGDGGEHTASDGNGRGGAS

SEQ ID NO: 188120 - protein, 60 aa, Oryza sativa
  Clone ID: PAT_MRT4530_84756C.1.pep
CKFSPSNEIKDSKLPRRPRALVSSKDSRVDSPPPGEQFLGYNLIQPTQDWPSIESRIVPG

SEQ ID NO: 188121 - protein, 85 aa, Oryza sativa
  unsure (1)..(85): unsure at all Xaa locations
  Clone ID: PAT_MRT4530_84757C.1.pep
NTINAXNXSCTXTPIDLIHAKPXFTMPGXWHPHHXFILHILHWPLXICGALCAHTISHFWLSRNKAXHTLHLPLQXTHCITPFQF

SEQ ID NO: 188122 - protein, 64 aa, Oryza sativa
  Clone ID: PAT_MRT4530_84758C.1.pep
MPQKTFCPQLCALLIDRLVKTNGCRDRQGGIHHSLSKRWEKNGEERTPALDHAQALSANPSPRS

SEQ ID NO: 188123 - protein, 589 aa, Oryza sativa
  Clone ID: PAT_MRT4530_84759C.1.pep
MAVAARVVEEEDPDVVEMMKRRDDEEEVVGEAWDYKGRGAIRGSTGGWRSAAMILCVELNERLTTLGVAVNLVTYLTGTMHLGSAASANAVTNFLGTSFMLCLLGGFLADTYLGRYLTIAIFTAVQAAGMAVLTISTAAPGLRPPPCSSGGSGCAAANGTQLGVLYLGLYMTALGTGGLKSSVSGFGSDQFDESDGGERGSMARFFSWFFFFISMGSLLAVTVLVYVQDKVGRRWGYGICVVAILTGLLFFLAGTTTYRFKKLLGSPLTQIAAVTAAAWTNRNLPLPSDPSMLNHDDSAHTTAKPNQKLPHSKQFRFLDHAAIVETTTAEAKKRKRWAACCTVTEVEEVKQLVRMLPTWATTILFWTVYAQMTTFSVSQAAVMDRRLSTSFVIPAGSLTVFFVAAILLTVPLYYRLLAPLVRRLTANPRYDLSPLHRIFVGLLLAALAMVAAALTERARRDAAVTLSVFYLLPQFLLVGAGEAFTYIGQLDFFLRECPKGMKTMSTGLFLSTLSLGFFFSTALVTVVHKVTAESRRPWLADNLDEGRLDNFYWLLGGISVVNLAVFVAAAARGYVYREKRLADAGIIHI

SEQ ID NO: 188124 - protein, 261 aa, Oryza sativa
  unsure (1)..(261): unsure at all Xaa locations
  Clone ID: PAT_MRT4530_8475C.1.pep
MGRRPILSFFSPSSLLGRPQAEAQPGRPASLLSRGRRQVGPTCRVLPQPPAIRAGHHPRNRPPRPRLRLLRATSPTLACAPRSPRPLPSLSRSCPRPRWPGFDFRIPPLSPPPLXPTLAGDSRLSRPRPXPLSPYLSFPVAPSRFFPISPNSPELPIAPAPCNHPPPPFPLLRPPLAAARVAAAPRCRRRRVREAKLHPGRPLPVEFRRRDSHPLALRAPRIPSAGGRXLPWLAVAVRHXLPPRRPPSVRHPLPSIPLPLP

SEQ ID NO: 188125 - protein, 65 aa, Oryza sativa
  Clone ID: PAT_MRT4530_84760C.1.pep
GGEICWGLVRLRLRITPRSTLCTVMWELPKNDEPLQTHYIRTQLWRICNLRLIVSTIKPVVSVVI

SEQ ID NO: 188126 - protein, 85 aa, Oryza sativa
  Clone ID: PAT_MRT4530_84761C.1.pep
TAQLIGVSLSRISFPHGIMMCLVMLSMLSSEICLKWRNTCSLGPYLDVMGGDDFVTWRHNCGVCFSRETSLCLVGIGSPSQDGSL

SEQ ID NO: 188127 - protein, 82 aa, Oryza sativa
  Clone ID: PAT_MRT4530_84762C.1.pep
MLVIVMFTKANSHGSMLSRSLRKTVGVINNAFHFSTFSVVSNLQIVYRFPNKKIADKFHWSFKEKEKEWMARWFFSLPVMTG

SEQ ID NO: 188128 - protein, 150 aa, Oryza sativa
  unsure (1)..(150): unsure at all Xaa locations
  Clone ID: PAT_MRT4530_84763C.1.pep
MATSMPEPDAVRTAFVKSTGGHVVSTIGYLASELGHTGRPSKASDIFAFGVFMLEVTCGRRPVXTRHEHGGNLLLVDMVLEHWRQGTVTDAVDPPLQGDFAVEEASRLHHSRRHRQIWEGRRAAAAVRPGPLRPAAVRLPCREGWERRRH

SEQ ID NO: 188129 - protein, 169 aa, Oryza sativa
  Clone ID: PAT_MRT4530_84764C.1.pep
VATSGLLTEMHQSTILVPALQSQWLMMHVSMMLLSYATLLCGSLLSAALLMIRFRKNLDFFSKKKKNVLLKTFFFNEIEYFYAKRSALKSTFFPLFPNYYKYQLIERLDSWSYRVISLGFTLLTIGILCGAVWANEAWGSYWNWDPKETWAFITWTIYIYIYIYIHIYV

SEQ ID NO: 188130 - protein, 71 aa, Oryza sativa
  Clone ID: PAT_MRT4530_84765C.1.pep
CKKPVSDEDMESPEWEYGVSCPYSFATKSEEEKERARARQRQLETWGVIGGPDKGRSPKRLEANHTAKEPK

SEQ ID NO: 188131 - protein, 427 aa, Oryza sativa
  Clone ID: PAT_MRT4530_84766C.1.pep
MLFATLEHILTHISFSTISIVITIHLITLLVRELGGLRDSSEKGMIATFFCITGFLVSRWASSGHFPLSNLYESLIFLSWALYILHMIPKIQNSKNDLSTITTPSTILTQGFATSGLLTEMHQSTILVPALQSQWLMMHVSMMLLSYATLLCGSLLSAALLMIRFRKNLDFFSKKKKNVLLKTFFFNEIEYFYAKRSALKSTFFPLFPNYYKYQLIERLDSWSYRVISLGFTLLTIGILCGAVWANEAWGSYWNWDPKETWAFITWTIFAIYLHSRTNPNWKGTKSAFVASIGFLIIWICYFGINLLGIGLHSYGSFTLPIAGSARGGRHCRRIHPRTKPTPSPSTPPSPSTPPSTPPSTPPSPSTPTGRGRRIHLRPPPTPPRPPDPSRPDLGREGGKRGGGSRCRPVAAATADDPPADAASPPDL

SEQ ID NO: 188132 - protein, 111 aa, Oryza sativa
  unsure (1)..(111): unsure at all Xaa locations
  Clone ID: PAT_MRT4530_84767C.1.pep
QAEHPRPRVALFLAAAKFFRPQSVVSTHLREFFHFNHLHTTATARRHRRSLAPSPRRLQPLSPSIAAFGERLEVEEEKREREXTGLEDSSDTLDNINQSQDIEQGNLPYTF

SEQ ID NO: 188133 - protein, 46 aa, Oryza sativa
  Clone ID: PAT_MRT4530_84768C.1.pep
KNFHQGPRLVYLKKIYTRIFLTNRILSGSTQFHFFRPVDRYICSGA

SEQ ID NO: 188134 - protein, 91 aa, Oryza sativa
  Clone ID: PAT_MRT4530_84769C.1.pep
MAAKMATMVALVFGLALLLSAAAPAAAQNCGCQDGYCCSQWGYCGTTEAYCGQGCQSGPCWGSGGEAAAGMAGRKAGAGGVEVPESNNRSR

SEQ ID NO: 188135 - protein, 989 aa, Oryza sativa
  Clone ID: PAT_MRT4530_8476C.1.pep
MASRKPNPASAKGPDPGRVDDDSTAFLGVSLVDDVELAKLVSSGALVAGQAFAPGKAVVPKPIDNRTVVFAVFFEAGLRFPCNVLLPEILRLFQIAIFDWACRTSGFEPNAELFGAIFFVTVNSKKVITPAGTKKTVFGSVNFNVRPERSDLWPVNAGMSKWDRQWMARWFYHTIPFEAGTDSAKALYCRRRAIAPNQKPKIAVDGAMEARFVLLWKVCSRLSCLDLVEEFCMLRIFPLSQSWQVRVDQGEEVDGLPNLVLPEGMNTLTLDQAENEARRMIGDVSVVEYSQLLTRQAAGRANRVYNGELPPRLAPRKRRVPASSDSDADDEDDAEERDGEEEEEEEAMADKAVNEAIEDRVDTPSYTPTPSPGHNETGVESNSSPVRRKDLEGAKALVAFSSGTVAKGGPVKKISKKKGLVDIARVFSDDESSDETPTSPAGRSLDLSTAPLAPLGVAGAGGSAAARASASAKRIVSAAAMVFGSPMREPAISPLVKAKGKCAAAEASASEYSLAAPHFTPGDFETRADLIPFVEGVSNLVLPAGTPSLFTELNEFDEGCSTIKSLAVRILAAHCSMERTVRARFDGFKNRLWAKDDEISRKNLEVEALAHTFKEAKTEVKRLQSELDKGKEARAEVDRLKAELEKEKAHSAVLIDYYNLTEPKMEALRQKASRAEASATEESQRFSREMAKTTESARMACQTLRLALTDIGTKVRGVPAEDASAFDFSEWTQQAGGLVSDCATVYGDCCARVSAAFTLGLLQQFGCEHIAEFPTYAKGDWEISAQNISPALRAWRKQFWQKDGRSAAKARLLEQLAKAEAADRCEEEGAVGEEVGGAAQDHLEGVRRKSCIRPSSGSWRSQNEKFVAVKGLPKVRCPFRPVYREMEINGRNYKAFKVADWLRAHPGRTLEDYDLVHSRHLEDMARFWRNHQKTKRQETIFQRRYSLVCVSPPTPLKVVYGISSDDEPSSPDHSLGRDSDYGDKDVIYL

SEQ ID NO: 188136 - protein, 1050 aa, Oryza sativa
  Clone ID: PAT_MRT4530_84770C.1.pep
MQAAAGRARRLLTSPAASGILSAPRPGCAALAGSGALLPRLDGVPSSPSPSPAPPLLARSFSATSSSRLPRNLLSPSISSQWRNEKSVCYHMAATHYSTEASDIDQPTEAVVELYQKMLKSVEAETMPPNAWLWSMISSCSNKEDIKLLIQILQKLRVFRLSNLRIDANFNDHLCMKVAEACARVGALDYGLKVLWKHNVYGITPTIGSAHYLLKHAKEKNDTKLMGSIMQVLQRNSMPLQPGTADIVFSICYNADRWDLLSKYARRFVKSEVKLHGASFDIWMDFAAKVGDSQSIWNINSLRGKSVKRYNLATGFACVKGFLLERKPESAAAMIKLLHKHSPDEKKQLVTDELQKLVAEWPAEVIKRQKKDDRKKHALEYLIVHNGWCDWSFGDYCFVENLGEIARMKFRMQTGNFSMRRIRGFVFVVILVMISSLCSATNALSWSMFSSSSKKPSMAPPPPLDGGVPVAEFSIDGGGDARGDKLMENARRRIAAGDGRPGTTCWSEAYRSLFASCGDIMADKELQARLAWRLSGCFQEDSGRPPLPPCDAAAAHGHGHADMVHCRERLSDSESKVFLAFFLETNTLCHQLQAEAFKRSTERLVNDLTRSARSAREKLEAIEERSEKIMRESDHLRRSLSSIMSQTEHLATASEDVRARIGDVLDRSAAIFERSREIAAAQAELRGGQAAMREELAAGMAQVEASYRSIGEEMGRLRQEAMGIEREVRAVGDAMAARMVDLQSAADDIGAAAGRSLENQMLLLDGQAKAMEGLNHLYSFQAQALQESRETIQKLAQFGQQQQEELLSRQEQIRHAHDDLMKNSESILEAQEEFRAKQASIFAALDKLYVLHNAVLVESRFIKAFFFYCCITFLVYLLTSAKQTFAIRGHLYFGLCITLVLETVVIKLGADDFSKQFLIMSKVLLIRSVFLAAAAAQILHSIFTYKDYEVLNHQLLQTLMEKVRAIEGNGSGGDQMNPWSTGSDCSSIGDCSWFFDEQLQDEVDSEIDPDFALPREICGNGSILPEEFGENSVTTSISRRYNLRPRIRPR

SEQ ID NO: 188137 - protein, 159 aa, Oryza sativa
  unsure (1)..(159): unsure at all Xaa locations
  Clone ID: PAT_MRT4530_84771C.1.pep
FNIYPPSPFYNCRIPPTHRPTNHAAVATPSFPIAFPLPRHPAARAPPPITLIRTGVAVATPEPLPIASIPAVPPPIAPIRAATDDDLVRTAPPPIAPIRAARPXLPSPPPMYARAPASTPPYHRRPESPGSSSPSRSPPPPIEGTKILLPYQMICLALY

SEQ ID NO: 188138 - protein, 67 aa, Oryza sativa
  Clone ID: PAT_MRT4530_84772C.1.pep
MAILLTPEFGKPKVIIGLELVSASESWNQPMGIVKSPAVVFLVESDQLKKIYLEESEFKEDTARVTP

SEQ ID NO: 188139 - protein, 190 aa, Oryza sativa
  unsure (1)..(190): unsure at all Xaa locations
  Clone ID: PAT_MRT4530_84773C.1.pep
NLCRGGTLYPHDITNPDHPARISKADTGSPYANERGPRPTPDXVPDHTVPGNPGVLPDTTPLNPHVSWHHGSPDXLVTQPGVSHSTHVVALVLCSDEIPRKRSLSARAGNRTPVFKFEGDRRYSCRVHDYRGATRWLQGNMVACLARDLELDPRNPRTAGLRAPKLHAKRDNSANGENKALLLTSKRAIR

SEQ ID NO: 188140 - protein, 584 aa, Oryza sativa
  Clone ID: PAT_MRT4530_84774C.1.pep
MWSYLSYVWMKFQGNRSLSARAGNRTPASRLTADHTNGEKRRERLAGSAYPVAAEVAPTWRLRGSHAGRREVDDDPAANGRRATAASGGASHGDTGESAHTGWLHRTRGDEPTARIHRRLLDGGGLRRRQPAAREEGNGDEATRGRFPAVRASTRLRELDASVGLGRTTPSEAGDERVLRSSGGDGGEHTASDGNGQLKAIQLLDGSNYIEWRNNVLINLAMLDYDLAIREDPPEEPQPAEELNIIGEEYDNLMWAYNKKLANWEKSNRMCLIYVKGAISPEVIGGIIDSNDIKTYLANIEESFEFAPETHANTLVNEMITSHYDGKSGIRKHILEMTHMANQLRSMDMKISDGFLVHIIMRSLGPNYDPFKIKYNTQKEEWTIQELILHSVEEEERQKAEKQKIKDRLNLTNAFDKGKKVYQGESSNKNSEPEGEQKQEGIKASTSAVPLSTSPYCHFFEGDKEGGTIELLSPPCRPELAGRSEVILYRQIRVAGLGGEPPVVGAKKGWSPSWESDEDQGGGGVAARTAHRRRLRPPHRPAPSPPGPCRTPVAASLPPPHRLPVPRFVRFDWAVEARSLAYTY

SEQ ID NO: 188141 - protein, 508 aa, Oryza sativa
  unsure (1)..(508): unsure at all Xaa locations
  Clone ID: PAT_MRT4530_84775C.1.pep
MERSGRAKWAGRPKAAQTRARAGGRRERAGGPGSPRAVPGGTRLSAARLTVRREHATHARGRGRDAVHARGPRWTQVRRAHAQPHGSRWIARTRRDRPGSARPGLAELAPTWRLRGCHAGRREVDDDPASNGRRAAAASGGANHGDTGKSVHTGRLHVTRGDEPTARIRRRLLDGGGLRRRQPAAGEEGNGDEVTRGRFPAVRASTRLRELDASVGLGGTTPSEAGDERVLRSSGGDGGEHTASDGNEEEEGAPGVPFRVHERTGSPGAWRWTAEARQSTGAAATGGQAGELALRLASKAATGGVAGERGKRGEKEEKEGEKGGSPLCRFGKXGEGSGATRQRERGSLPPPLGGXRAEWRGPGDDDGDDGGXFGAARRHXDRRGLARQRVTAAVTRRSATRHARAGSNGRRGWAAGPGDADGADDAARAGNRAGARASNGVRGRLCERGARARDGGARRGSRTREQRAGREETRRGGEGAREREREGGRRPGERXAGEEMGRAEFGPS

SEQ ID NO: 188142 - protein, 129 aa, Oryza sativa
  Clone ID: PAT_MRT4530_84776C.1.pep
MANAKATGPNGYGNRGPEQSVMRSIMKRELHPIYVFIVYFCNVLEDKGMGAGVIDLLFLCMRDLHEPPCAVDGGRPSAPPDRLATAVSSIGSSSSDTRTGASVADLDLGLGRLVLVRLVDAHTHINRAI

SEQ ID NO: 188143 - protein, 190 aa, Oryza sativa
  unsure (1)..(190): unsure at all Xaa locations
  Clone ID: PAT_MRT4530_84777C.1.pep
TSAEGGTLYPHDITNPDHPARISKADTGSPYANERGPRPTPDXVPDHTVPGSPGVLPDTTPANPHVSXHHGSPDKLVTQPGVSHSTHVVVLVLCSDEIPRKRSLSARAGNRTPDFKFEGDRRYPCRVHDYRGATRWVQGNMVACLARDLELDPRNPRTAGLRAPKLHAKWDNSANGENKALLLTSKRAIR

SEQ ID NO: 188144 - protein, 863 aa, Oryza sativa
  Clone ID: PAT_MRT4530_84778C.1.pep
MAPPCSISSASHLLITASLPKPSLRPPRLPHPKPLPAALLALAAAAPTLPALADVPAPPPSPTQDVQVLEAPSPAANPFSNALLTAPKPTSSAAADLPEGAQWRYSEFLSAVKKGKVERVRFSKDGGLLQLTAIDGRRATVVVPNDPDLIDILATNGVDISVAEGDAAGPGGFLAFVGNLLFPFLAFAGLFFLFRRAQGGPGAGPGGLGGPMDFGRSKSKFQEVPETGVTFVDVAGADQAKLELQEVVDFLKNPDKYTALGAKIPKGCLLVGPPGTGKTLLARAVAGEAGVPFFSCAASEFVELFVGVGASRVRDLFEKAKAKAPCIVFIDEIDAVGRQRGAGLGGGNDEREQTINQLLTEMDGFAGNSGVIVLAATNRPDVLDAALLRPGRFDRQVTVDRPDVAGRVKILEVHSRGKALAKDVDFEKIARRTPGFTGADLQNLMNEAAILAARRDLKEISKDEISDALERIIAGPEKKNAVVSEEKRRLVAYHEAGHALVGALMPEYDPVAKISIIPRGQAGGLTFFAPSEERLESGLYSRSYLENQMAVALGGRVAEEVIFGQENVTTGASNDFMQVSRVARQMVERFGFSKKIGQVAIGGPGGNPFLGQQVRRAHAQPHGSRWIARTRRDRPGSARPGLAELAPTWRLRGCHAGRREVDDDPAANGRRAAAASGGANHGDTGNSEHTGRLHVTRGGEPTARIRRRLLDGGGLRRRQPAAGEEGNGDEVTRGRFPAVRASTRLRELDASVGLGGTTPSEAGDERVLRSSGGDGGEHTASDGNGRGEEMERGGRTERDITEKRRGAVTRGRRRGSNLSGLGLRKRKKRARPESPSASTNAPALPALGDGRRRRGRAQERRQR

SEQ ID NO: 188145 - protein, 174 aa, Oryza sativa
  unsure (1)..(174): unsure at all Xaa locations
  Clone ID: PAT_MRT4530_84779C.1.pep
PWAQAVRTRLLTSYADERGPRPTTGXVPDHTVPGSPGVLPDTTPANPHVSRHQGSPDKLVTQPGVSHSTHVVVLVLCLDEIPRXNRSLSARAGNRTPDFKFEGDRRYSHRVHEYRGATGWLQGDMVACLARDLELDPRNPRTAGLRAPKLHAKRDNSTNGENKALLMTSKRAIR

SEQ ID NO: 188146 - protein, 136 aa, Oryza sativa
  unsure (1)..(136): unsure at all Xaa locations
  Clone ID: PAT_MRT4530_8477C.1.pep
IGEGRAGRGRERRDSAGQRGXEWGRRERRDSKIESRPSRARARAGERGEWAREMRRTRGRGXRGPEKAEAWVRRRAAGLGEDPIGGPHLSATPGEEGGAAWLGLGLRPAQQGGGGGKERMGRKKRKRKRKKDFPCN

SEQ ID NO: 188147 - protein, 509 aa, Oryza sativa
  unsure (1)..(509): unsure at all Xaa locations
  Clone ID: PAT_MRT4530_84780C.1.pep
MAQDIQSLTARGGPRPRAGPRGAADRGRLDPVLAELAPTWRLRGCHAGRREVDDDAGRNGRRTTAASGEXGANRGDTGENEHTGWLHGTRGDEPMARIRRRELDGGESRRRQPTAGKGENGDEVTRGQFPAARASTRLRESDAGVGLGGATPSEAGDERRFRARAATAASTRRAAATVGAAPASYGEATRTTVRAGRSDERPTAREXSLRPRAGEEEGEGAPGVPFRVLARAGSSXTRATTNGDGEQSTGAAAMAQMRNGEEGGGKRKGGRLGLLRAAMSVWXTDFGRSRRELALGARGQIGDRXGGRMTPAGEKGEKEGEXRGLPPCRFGKRRRGAGATRQREEGLCLRPLVACARSGGXAEAMTTAMTAGRFGARVTAAATRRSATTARARGGQREARRIERRGSGTRAGCGAERLQARQSSGAGXAQTAQARRGRRPRGRACERRAGSSSEGAKRRARLGGSRARARGXAGGAEGEGEREREREIAXGRGEMGREKFGPSTLGEAK

SEQ ID NO: 188148 - protein, 67 aa, Oryza sativa
  Clone ID: PAT_MRT4530_84781C.1.pep
QELNGGINILDKDGEDEGKNDGGFLHGPRGVGHIKQYQAHEHLGLLSQPDACSLHNVQTPFSSQTNL

SEQ ID NO: 188149 - protein, 553 aa, Oryza sativa
  Clone ID: PAT_MRT4530_84782C.1.pep
MRAAVQGRAHAWTTTTTTPPGAMRGRALVLVAALLLQLLLLAAAGGAGAAATERKAHNYEDALRKSLLYFEAQRSGRLPHNQRVAWRDHSGLTDGLEQGVDLVGGYYDAGDHVKFGLPMAFTVTMLSWSMIEYGDDVEAAGELGHALEAIKWGTDYFIKAHTKPNELWAEVGDGDTDHYCWQRPEDMTTSRQAYKVDRERPGSDVAGETAAAMAAASIVFRKSNPHYASLLLHHAQQLFEFADKYRGKYDSSIAEVKSYYASVSGYKDELLWAALWLHRATGKAHYLDYVVDNADCFGGTGWAITEFSWDVKYAGVQILAARLLLRGEHEERHRSTLEQYRAKAEHYVCGCLGRNADGGADANVERSPGGMLYVRQWNNMQYVTNAAFLLAAYADYLGDDADGAVSCAGGETAGAGEVAALARAQVDYVLGTNPRGISYLVGYGAKYPNRVHHRAASIVPYKHSKEFIGCTQGFDHWFGRRSSNPNVLVGAIVGGPDRRDRFRDNRENYMQTEACTYNTAPMVGMFAKLNRMARQKREQEEVAAPARSTAADV

SEQ ID NO: 188150 - protein, 543 aa, Oryza sativa
  Clone ID: PAT_MRT4530_84783C.1.pep
MPRDMWIRRGGVGEDPWASWHSMVWDLTCCWSGTPLVGIWVIWMAASFVIVIVISFFISLAFMCYVHYTSRQRRKLHGYGHEKAVRLPPGSMGWPYIGETLQLYSQDPNVFFASKQKRYGEIFKTHILGCPCVMLASPEAARFVLVTQAHLFKPTYPRSKERMIGPSALFFHQGDYHLRLRKLVQGPLGPDALRALVPDVEAAVRSTLASWDGNVSSTFHAMKRLSFDVGIVTIFGGRLDERRKAELRQNYAIVEKGYNSFPNSFPGTLYYKAIQARRRLHGVLSDIMRERRARGEPGSDLLGCLMQSRAGDDGALLTDEQVADNIIGVLFAAQDTTASVLTWIVKYLHDHPKLLEAVRAEQAAIRAANDGGRLPLTWAQTRSMALTHKVILESLRMASIISFTFREAVADVEYKGFLIPKGWKVMPLFRNIHHNPDYFQDPQKFDPSRFKVSPRPNTFMPFGNGVHACPGNELAKLEMLVLIHHLVTGYRWEIVGSSDEVEYSPFPVPKHGLLAKLWRDDSVSVETDGCQNGDNDDNGVAMV

SEQ ID NO: 188151 - protein, 137 aa, Oryza sativa
  unsure (1)..(137): unsure at all Xaa locations
  Clone ID: PAT_MRT4530_84784C.1.pep
SAGKQAERRRRGGILAGGGAPEARERETRRSFTSDRDHRRRGRQAGPRGGGGGGSDRRRGGDRDDXSQTSLXPERTARPPRCPRGRLGRRAARPPRCPRGRPGHPPFPPARPPGPPRRRPPGPPPAGRQALRPPALV

SEQ ID NO: 188152 - protein, 70 aa, Oryza sativa
  unsure (1)..(70): unsure at all Xaa locations
  Clone ID: PAT_MRT4530_84785C.1.pep
TXDGMGLNFQVLSASGSSQLPSIGDTCTXEAARTLARLQRDLQGRGTXSLHYNDRNLSNXASPIXRIHPT

SEQ ID NO: 188153 - protein, 56 aa, Oryza sativa
  Clone ID: PAT_MRT4530_84786C.1.pep
MVMMEGILMEFFAVYQLVWSSEIALIEGTRDTIIWRWTSTGKYMTKSAYLAQFAGK

SEQ ID NO: 188154 - protein, 49 aa, Oryza sativa
  Clone ID: PAT_MRT4530_84787C.1.pep
EDIPDVTYNDYAGCMELIDKIRMVDVLPILDLDMLSNLIVDIFNGVLTL

SEQ ID NO: 188155 - protein, 105 aa, Oryza sativa
  Clone ID: PAT_MRT4530_84788C.1.pep
KNFFETISETGPQINFGYLGPQKEKKMLKKGPKTAGGPSGWRRTGGKKGFGAGIGLGDKLYQKRGKGRDKPLGGEKRLLFGPRVKGPGFGGRVRGVPNGGPQGGG

SEQ ID NO: 188156 - protein, 79 aa, Oryza sativa
  Clone ID: PAT_MRT4530_84789C.1.pep
MVQALAKFSTYPSACLNFVDLSLDQRRRSSSRHNMGLIVKTCMNCLGMPATLVSWDKRRLRGITIRIFIRLSDSTNKYD

SEQ ID NO: 188157 - protein, 735 aa, Oryza sativa
  Clone ID: PAT_MRT4530_8478C.1.pep
MDPRKPNPASAKGPDPGRVDDDNIAFLGVSLVDDVELAKLVRSGVLVEGQAFAPGKSVVPKPIDNRTVVFTVFFEAGLWFTCNMLLPEILRLFQVELPQLSPSALVRVAIFDWACRTSGFEPNAELFSAIFFATVNLKTVIIPAGTKKTVFGSVNFNVRPERSDLWPVNAAMSKWDRHWMARWFYHTIPFEAGTDLAKALRCRRGRRYGGAVRSAAKALTLDQAENEARRMIGDVPVVEYSQLLTRQAAGRANRVYNGELPPRANPHKADDDAGASRKRMRGQVKLAPRKRRVPASPDSDADDEDDAEERDGEEEGEEKEEAMADKAANEAIEDRVDTPDYTPTPSPGHNETGVESNSSPLRRKDLEGAKALVAFSSGKAAKGGPVQKISKKKGLVDIAHVFSDDESSNGTPTSPAGRSLDLSTAPLTPLGVAGAGGNVAAGASASAERIVSAAARVFGSPLREPAISPLVKAKGKCAAAEASASEYSLAAPHFAPGDFETRADLIPFVEGVSNLVLPAGTPSLFTELNEFDEGCSAIKSLAVRSHLRAKDDEISRKNLEVEALANTLKEAKTEVKRLQSELDKGKEARAEVDRLKAELEKEKAHSAVLIDYYNLTEPKMEALRLKASRAEASAAEESQRFSQEMAKTTESARTACQTLRLTLTDMGAKVRGVPAEDASAFDFSEWTQQADGSVSDCATAYGDCCARVSAAFTLGLLQQFGCEHVAEFPTYAKGD

SEQ ID NO: 188158 - protein, 557 aa, Oryza sativa
  Clone ID: PAT_MRT4530_84790C.1.pep
MAATPAADSRLLVIYASETGNAMDAAERVGRQAERGGCPAVDVLPMDSFDPSCLPSERFVVFVVSTTGQGDPPDSMKGFWRYLLKKNLGARWLEGVRYAVFGLGDSGYQKYNFAAKKLDKRLLHLGAEPIIQVGLGDDQHPSGYEGALDPWLLSLWESLNQTTPSLLPRMYDIINPDLSVLGDAKVEVIYHSSDEAQQDSNLLDFKNLIQRARSMSPSLQFYNNDKEPHYMLQMVSNRCLTKENSDRDVRHFELENPSSGITYQVGDALEILPSQSPSAVDSFIERCKLDPDCYITVMSFFATAEHEKEKLQYFASPEGRDDLYQYNQKEGRTILEVLDDFPSVQMPFEWLVQLTPPLKKRAFSISSSPLAKPNQIHLTVSIVSWRTPFKRMRRGLCSSWLAGLNPNEGTGCAPFCAFVAERAAQSTSEATAPILFFFGCRNQENDFLYKDFWYAHAHDQGVLSSKNGGGFFVAFSRDQPQKVYVQHRIREQSARVWNLLKSGAAIYIAGSSTKRPTDVTAALEEVICQETGCSEEEASIWLRKLERNGKFHTETWS

SEQ ID NO: 188159 - protein, 84 aa, Oryza sativa
  unsure (1)..(84): unsure at all Xaa locations
  Clone ID: PAT_MRT4530_84791C.1.pep
TRKDYRVDVLVIIDTXGGVKQAXYLLKYDSALAITDADVKPAVDDGISVXGTIIDGVADRNHVHLDWNEMNIYLMIEGTGLMMA

SEQ ID NO: 188160 - protein, 73 aa, Oryza sativa
  Clone ID: PAT_MRT4530_84792C.1.pep
NVLFLCHHSSRVSKIKTISLHPHSKIFIIQPEVKGLNRRAMSSHYNCFVQELFFIYECGREYTSPILTTLIYT

SEQ ID NO: 188161 - protein, 169 aa, Oryza sativa
  unsure (1)..(169): unsure at all Xaa locations
  Clone ID: PAT_MRT4530_84793C.1.pep
KNLIQRARSMSPARQFYNNDKEPHYMLQMVSNRCLTKENSDRDVRHFELENPSSGITYQVGDALEILPSQSPSAVDSFIERCKLDPDCYITVRAKDRVKISKGSLLKDRIKLKTFVALTMDVASASPRRYFFEVMSFFATAEHEKEKLXYFAFSEGRDDLYQYNQKEGR

SEQ ID NO: 188162 - protein, 84 aa, Oryza sativa
  Clone ID: PAT_MRT4530_84794C.1.pep
LGVEQVHHIMPTEYIYLNPRAKKPPVLFGTKNPRKNHDGSSNNDKNIERDKTPEHDCFIIHPTHEGDTCLAANHLVIPRAEVQA

SEQ ID NO: 188163 - protein, 163 aa, Oryza sativa
  Clone ID: PAT_MRT4530_84795C.1.pep
HASDQIHLTVSIVSWRTPFKRMRRGLCSSWLAGLNPNEENLIPCWVHHGSLPPPHPSTPLILIGPGTGCAPFCAFVAERAAQSTSEATAPILFFFGCRNQENDFLYKDFWYAHAHDQGVLSSKNGGGFFVAFSRDQPQKVYVQHRIREQSARVWNLLKSGAAI

SEQ ID NO: 188164 - protein, 196 aa, Oryza sativa
  Clone ID: PAT_MRT4530_84796C.1.pep
PGDPEVAPIATQQMAELIGRFFPLDTCRRFKFLPLAQQEGDPPSVLVAMVDPDNLAAQDELNRILRVKGFELRRLVVTQDDFNQLLEQYYAIREEWEAAQEKRDQERALDKLNDLTDIVGSIDMNLGEDKEDVDNALDSNDANQAPVINLVNKILAKALQEGTSDIHVEPQKKTLRIRFRKDGVLNQAFDPLESTC

SEQ ID NO: 188165 - protein, 213 aa, Oryza sativa
  unsure (1)..(213): unsure at all Xaa locations
  Clone ID: PAT_MRT4530_84797C.1.pep
MSDNGEIEVENSALYEVLPKDVVKEVGNVKLFNKWDYDVEVRDISLTDYISLRNPVYVTHTAGRYATKRFRKANCPIIERLTNSLMHHGRNNGKKLMAVRIVAHAFEIIHLMTDQNPIQVAVDAIVNCGPREDSTRIGSAGTVRRQAVDVSPLRRVNQAISLLTTGAREASFRNVKSIAECLAEELINAAKGSSNSYAIKKKDEXERVAKSNR

SEQ ID NO: 188166 - protein, 211 aa, Oryza sativa
  Clone ID: PAT_MRT4530_84798C.1.pep
MGGGGGSSRSSKVYHERQRLQFCLLHALNNLMQENWNSVLSHLKATAYLSRSLSVLFVGTEKESFTRAELDGIAGNLVQIDPNKEHWTPMSLIFKPHHNVFTGNYDVNVLITALEARKKKVIWHDHRKGASSIDLDADALFGLMINVPVRRFRGLWTGRHWVAIRSINGTWFNLDSDFSAPKEFQDKEKLIAFLDSILSQGGEVMIVLQDE

SEQ ID NO: 188167 - protein, 122 aa, Oryza sativa
  Clone ID: PAT_MRT4530_84799C.1.pep
YTAPETQPPAPGGVAQPLGMPPPAPAPATLVSLSALVTSLARLGRPVDALRAFRDMLARGEPADHLTLPPVLRYCALTGSAVLGDYAHALALKIGAQGNPLVAFGLVLCYSGLPKLSRLPEA

SEQ ID NO: 188168 - protein, 155 aa, Oryza sativa
  unsure (1)..(155): unsure at all Xaa locations
  Clone ID: PAT_MRT4530_8479C.1.pep
MGRRPILSFSLPPXLLGRPQAETQPSRPSXLSPGRRQVGPTCRTRPLPPAAPATXRKRLRLLRATSATSARAPHLPRPLPFLSRPRPRPRWPGFDFRIPPLSPSSLPTLAGXSRLSRPRPALXLPYLTFPVTPSCFFPIXPNFPELPIAPAPCNH

SEQ ID NO: 188169 - protein, 78 aa, Oryza sativa
  Clone ID: PAT_MRT4530_847C.1.pep
MPNSATVQDMVPPLATLETRSFLFPIGHSWSRRPPHLPPPTELRSSPAAAAAAKLQRCHRLRPYFGMVVCFGDQGMVP

SEQ ID NO: 188170 - protein, 908 aa, Oryza sativa
  Clone ID: PAT_MRT4530_84800C.1.pep
MAASQLLAAAVAAAVFLAALLVPPARCQQQQVATPPPASATPPVRLPPSAPPPLVGVPPGVLMARIDAVRDELAAEVQAKYGFCMANVQEDFTQAFSFSNASFVSDCMEETQGQMTGMLCGKAEIEIYVKSLGKKPSTRGITVQQQPKNLTVLRGTIAVKAPQRNISVFGKTHVILSVVLLLVYNCSDQFIKIRAKILSKSRRKAATIAQESATARGRWKLAKELVLSHELEMSESDQLAASSNEARHATEGNGKRSKNRKKLAHARTERFRRAYSQIGRERVLQPDNDKITLSGVVALAAENRSRRPMFEVVFKGLTLSIGKKKLLQCVTGKLSPGRVTAIMGPSGAGKTTFLNAVLGKTTGYKKDGLVLINGKSGSMQSYKKIIGFVPQDDIVHGNLTVEENLWFSACCSLKFSFANPHPWSSKGMSKSDKIIVLERVIGSLGLQEIRNSLVGTVEKRGISGGQRKRVNVGIEMVMEPSLLILDEPTTGLDSASSQLLLRALRHEALQGVNVCAVIHQPSYTLFNMFDDFVLLARGGLIAYLGPISEVETYFSSLGIKVPERENPPDYYIDILEGITKTKMRGHAAPKHLPLLWMLRNGYEVPEYMQKDLEDINNVHELYTVGSMSREESFGDQSENADSVHQNVREPYSLLDRKTPGVLAQYKYYLGRVTKQRLREATLQAVDYLILCIAGICIGTIAKVKDDTFGVASYGYTIIAVSLLCQLAALRSFSPERLQYWRERESGMSTLAYFLARDTIDHFNTLVKPVAFLSTFYFFNNPRSEFKDNYLVFLALVYCVTGIGYTFAIWFELGLAQLCSALIPVVLVLVGTQPNIPNFIKGLCYPKWALEALIIAGAKKYSGVWLITRCGALLKGGYDINNFVLCIVIVMLMGVLFRFIALLSLLKLK

SEQ ID NO: 188171 - protein, 465 aa, Oryza sativa
  Clone ID: PAT_MRT4530_84801C.1.pep
MVDRIGAAWWCACAVGMLVVGACLAGETSEYRRQLGSAVDMPLDADVFRAPPGRNAPQQVHITQGNHDGTAMIISWVTTIEPGSSTVLYGTSEDNLNFSADGKHTQYTFYNYTSGYIHHCTIKKLEFDTKYYYAVGIGQTVRKFWFRTPPKSGPDVPYTFGLIGDLGQSYDSNITLAHYESNSKAQAVLFVGDLCYADNYPYHDNVRWDTWARFVERNVAYQPWIWTAGNHEIDFAPELGETKPFKPYSYRYPTPYKASGSTAPFWYSVKRASAYIIVLASYSSYGKYTPQYKWLEAEFPKVNRSETPWLIVLLHAPWYNSYNYHYMEGESMRVMYEPWFVKYKVDLVFAGHVHAYERTHRISNVAYNIVNGQCTPVHDQSAPVYITIGDGGNQEGLATNMTAPQPGYSAFRESSFGHAILDIKNRTHAYYTWHRNQDGNAVAADSMWFTNRYWQPTDESLDDSQ

SEQ ID NO: 188172 - protein, 62 aa, Oryza sativa
  unsure (1)..(62): unsure at all Xaa locations
  Clone ID: PAT_MRT4530_84802C.1.pep
ETNKNTSTHASSKVVGLQAAKADDVKGPNLQKXASEWVNGRVLVVENVRAYKAEEKNYTYNI

SEQ ID NO: 188173 - protein, 167 aa, Oryza sativa
  Clone ID: PAT_MRT4530_84803C.1.pep
ERGGVEEGKGERGRARECKLHKCKCDNQMRQGDKRFFTEVRKLAGFLLPVEASPTPPLNHEATARPLRKGVGKAGASPRTGLPKPRSLEVVLPSLRRPCYSATARKLAIVALSESPIGLAGQTTVDWPVRPASAQSDRHQLGLTEYGSVGSVLATPSNTIPASRGPV

SEQ ID NO: 188174 - protein, 109 aa, Oryza sativa
  unsure (1)..(109): unsure at all Xaa locations
  Clone ID: PAT_MRT4530_84804C.1.pep
HTPDLDIRDXPRHTPSDAYRGWQEGSSAISDLDEFIFKEEDYLVVDYELMNKXQHRLRPTGCRAIACQIRGXVCLRLFNLNLAYTLVPMIPIPSKYRSRDLECQTVRMI

SEQ ID NO: 188175 - protein, 87 aa, Oryza sativa
  Clone ID: PAT_MRT4530_84805C.1.pep
DILSPPYISNHPSIWNHLFDLCAVGPSHPVRLMPCIIHLESVHSLTLILALASWGNLKRTQSVQSCSALCGASPSGTTFVCRHCGPL

SEQ ID NO: 188176 - protein, 202 aa, Oryza sativa
  unsure (1)..(202): unsure at all Xaa locations
  Clone ID: PAT_MRT4530_84806C.1.pep
KCKLHKCKCDNQMRQGHKRFFTEVRKLAGFLIPIEASPTPPLNHEATARPLRQGVGKAGAGPWRGLPKPRSLGXVLPXLQRPCYSATARKLAVVTLSEGPIGLAGQTGVEWAVRPASARSDRHRLGLTEYGSIGSVSATPSSTIPASRGPVXPRMCRRSDRPYAPVXTAVVAPVRPARACRSDRHNVAGLTAPGPLRSLTYS

SEQ ID NO: 188177 - protein, 205 aa, Oryza sativa
  Clone ID: PAT_MRT4530_84807C.1.pep
MPDRRGVTTTKIQNGMGGETIKYRGLGSGGRPRPARAWESWSGGVEPKAKAAGAGPAGLELWSCAEGDLLAVLSTGKPSQAMASQALSSAPPPRGRAAAGGELGALTGDGCIFERCRCHRHGAWSSSTMITPPPRGAAVSKLGILSDNGAFCSAPTHLSSQSHRCCQRRVRVPARSRLSSAMAYSSGPEDLARTRGGQTGHIVAV

SEQ ID NO: 188178 - protein, 202 aa, Oryza sativa
  unsure (1)..(202): unsure at all Xaa locations
  Clone ID: PAT_MRT4530_84808C.1.pep
KCKLHKCKCDNQMRQXDKRFFTEVRKLAGFLLPVEASPTPPLNHEAXARPLRQGVGKAGAGPRRGLPKPRSLGXVLPSLRKPCYSATARKLAVVALSEGPIGLAGQTGMGCPVRPASARSDRHRLGLTEYGSVGSVSAIPSSTISASRGPVXPRKCRRLDRPYAPVXTAFLRPVRPARARRSDRHYVAGLTAPGQVYLKNGR

SEQ ID NO: 188179 - protein, 124 aa, Oryza sativa
  Clone ID: PAT_MRT4530_84809C.1.pep
MAAKAALVLAVSLLAVAVAASACGTDCPPAPRPRPSTGSCPRDALKLRVCANVLGLVKAKVGAVAPYEPCCSLLDGLVDLDAAVCLCTAVKANVLGIKLDLPVDLSLILNNCGKICPSDFKCVH

SEQ ID NO: 188180 - protein, 54 aa, Oryza sativa
  Clone ID: PAT_MRT4530_8480C.1.pep
ARSSITPRGSSSSAGNTNALMNYSTKVPMPVKTDYLLHLYLVTNTVTSASGTKV

SEQ ID NO: 188181 - protein, 187 aa, Oryza sativa
  unsure (1)..(187): unsure at all Xaa locations
  Clone ID: PAT_MRT4530_84810C.1.pep
KLHKCKCDNQMREGDKRFFTEVRKLTGLLLPVEASPTPPLNHEATARPLRQGVGKAKAGPRRGLPKPRSPGXVLPSLRRPCYSATARKLAVEMLSEGPIGLAGQTGVEWAVRPASARSDRHRLGLTDYGSAGSVSAIPRSIISASRGPGSLLLWCLSWPLCASSGSSPSVFFAGASVSGRACGGAGG

SEQ ID NO: 188182 - protein, 188 aa, Oryza sativa
  unsure (1)..(188): unsure at all Xaa locations
  Clone ID: PAT_MRT4530_84811C.1.pep
KCKLHKCKCDNQMRQGDKRFFTKVRKFAGFLLPVEASPTPPLNHEATARPLRQGVGKAGAGPRRGLPKPRSLGXVLPSLRRPCYSATARKLAIVALSEGPIGLXPVRPASARSDRHRLGLTEYSSVGSVSAIPSSTIPGLQGAGXPRMCRRSDRPXASQTAVVRPVRPARARRSDRHYVAGLTAPGQV

SEQ ID NO: 188183 - protein, 179 aa, Oryza sativa
  unsure (1)..(179): unsure at all Xaa locations
  Clone ID: PAT_MRT4530_84812C.1.pep
KCKLHKYKCDNQMRQGDKRFFTEVWKLASFLLPVEASPTPPLNHEATARPLRQGVGKAGAGPRRGLPKPQSLGXVLPSLRRPCYSATARKLAIVVLSEGPIGLAGQTGVEWAVRPASARLDRHRFGLAKYGSVGSVSAIPSSTIAASKGPRPGRGSSGSSRTLLSARSGQRGGGRPRGR

SEQ ID NO: 188184 - protein, 202 aa, Oryza sativa
  unsure (1)..(202): unsure at all Xaa locations
  Clone ID: PAT_MRT4530_84813C.1.pep
KNRVRKCKLHKCKCDNQMRQXDKRFFTEVRKLAGFLLPVEASPTPPLNHEATARPLRQGVGKAGAGPRRGLPKPRSLGVVLPSLRRPCYSATARKLAVVALSEGPIGLAGQTDIGWPVRPAXSVRPASARSDRHRLGLTDYGSVGSVSAIPSSIISASRRPGTPVRPPLCGRSDRPCLENHTQNRENRARGEGSTNLEASGH

SEQ ID NO: 188185 - protein, 124 aa, Oryza sativa
  Clone ID: PAT_MRT4530_84814C.1.pep
MAFPGESGGSTTRGGVNRDKEGKGGGGSAPPSPSNGGILATRRLRRRRRRLASDARIRRLPAAGAQIRRRPAAGAQIRRRPAAGAQIRRRPVSGRGGKGMRQLGFSLCRQLRRLSDEKGGGAQR

SEQ ID NO: 188186 - protein, 371 aa, Oryza sativa
  Clone ID: PAT_MRT4530_84815C.1.pep
METSILRSEVRRAKAFTLIVFDKEKVYLDSLNYRLEYDSYPPTIKPDISAPPTIKTSTNNVPRWFSSGGGGDKAEGSSGGGERRRAGGGGEGGTDVGQITDAAPSEGQEEAADGVLLHRVLTTKFGLVFFTNTVCCILFWLLVIAISVAVLIIFLIYHPQSPKMRVTTATLNTGYVDELDLVGGARALNADLNAPTSPSSLPSTTRTPSSTSPPPPLPSASSPPLQPPLLFADKERSWATAHLCRLSRVGLIVVRLRFILRQGASSAIVCFEKYELRLLLYPEHRRRRCNLFRYNGIETPIDVDSKWEWEEYMDGYDVIVLAVHVCVYILFMIDLCMLEWQNFNMHLNTNYYFCNAKTFATKTFAIYHLLF

SEQ ID NO: 188187 - protein, 151 aa, Oryza sativa
  unsure (1)..(151): unsure at all Xaa locations
  Clone ID: PAT_MRT4530_84816C.1.pep
KCKLHECKCDNQMRXGDKRFFTEVRKLAGFLLPVEVSPTPPLNHEATARPLRQGVGKAGAGPRRGLPKPRSLGVVLPSLRRPCYSATARKLAVVALSEGLIGLAGQTDMGWPVRPASARSDRHRLGLTEYGTVGSVSAIPSNTIPASRGPV

SEQ ID NO: 188188 - protein, 177 aa, Oryza sativa
  Clone ID: PAT_MRT4530_84817C.1.pep
MADSFYGASEEDDDVHQWLPSEILRDIGAVIDPCEGRRAIVEDLAACLADVLFGSAVQRTTTQHHATVGPLPAMVDNKYQCYHAPPSMGVRPFMSNGGMMLDRVPIAPPRLAPEMRTPLLLVATSAPALPPPPTKQRDAGGTGFFLPHTEAYNKRTSKAPRATKTPRHVKRQQWLSK

SEQ ID NO: 188189 - protein, 493 aa, Oryza sativa
  Clone ID: PAT_MRT4530_84818C.1.pep
MANKAVTIGDLIHRVATSCLSNRLPGSYAVSDSGDTDFDDDDDDDPFADAISGAGGERRRTPSSSEEAEAEAEADDEGEDGGEGGEEEDEENLKIWEEKRKVKAAAAVAASGAERAREAETLMAEVFDAVSGVRRAYSDLQGAHCPWDPDKMRSADAAVVAKLRHLSRLRDRFRRSVATGGHIPGPIPTAPPLREAVAPYEAALDDLRRQLQAKQAEVDGLKEKLAVASNRRNSRHHPSKHNASGGGGGAPTAELFAACAEQARAAIRAFAGHLLQLMRAAGLDLAAATRSLTKIPVSSPQLAKHALEAHVTRVLLVGFEHESFYLDGSLSSLLDPAAFRRERYTQFRDMRGMEPAELLGLLPTCPFGRYAASKFAALLPPRVEQAVLGDGEHRRAVEGGAHPRTPFYGEFLRAAKAVWMLHLLAFALETPPSHFEAGRGAEFHPDYMESVAGGRGGGAAGMVVGFAVAPGFRLGNGAVVRARVYLVPRGGRP

SEQ ID NO: 188190 - protein, 209 aa, Oryza sativa
  Clone ID: PAT_MRT4530_84819C.1.pep
MGQTSRTEARVNANSRKRGRMRRKQEDEGWMGDRRWRRMRSPGWKRQDERRRRGRSRDGWGSAGAVRKAKVTRSRGGGAAVTARPPPHRVLGETKEETASVLRCCRCCACLGQRQPWQPGRLAPASKNGSGGAVPVRPSAGIRWSHASRRGGDVPPGAAATQLHAYTRRVRTTLLGRVRDASGWEAARPSGGRLCTAMTEAGGTRCKGG

SEQ ID NO: 188191 - protein, 338 aa, Oryza sativa
  Clone ID: PAT_MRT4530_8481C.1.pep
LSPLALVRIAIFYWACRTSGFEPNAELFGAIFFATVNSKTVITPARTKKTVFGSMNFNVRPEWSDLWPVNAAMSKWDHHWMARWFYHTIPFEAGTYSAKALRCRHRAIAPNWKPKIAVDGAMEARFVLLRKSWQVTVDQGEEVDGLPNLILPEGTDREEEEEEAVADKAANEAIEDRVDTLGYTPTPSPGHNETGVEFNSSHLRRKDLEGAKALVAFSSGKAAKGGPVQKISKKKGLVDIARVFSDDESSDGTPTSPAGRSLDLSTAPLAPLGVAGAGGNAAGASASTERIVSAVARVFGSPLREPAISPLVKAMGKCAATEASSTGVFPCGAPLRPW

SEQ ID NO: 188192 - protein, 207 aa, Oryza sativa
  Clone ID: PAT_MRT4530_84820C.1.pep
DAILLLLLLLLAVHGVLGVLLPRIPLPPLSEVAIVVDHLDGQRLRQAGQVLQARRHPLLGAALVPPVAADPAAAAAEVDVDVDDGELLALAAGGAGREDGEAGAELRGDAGHGRLHVRLPLPQPLQLALRLGQLRLQLPQAAQHRRRRRPPAAAAGGLAARPAGGAEAPFAEHLDGLPDRLERPGGVHHGTARRRRDLHRSTRSRGQ

SEQ ID NO: 188193 - protein, 49 aa, Oryza sativa
  Clone ID: PAT_MRT4530_84821C.1.pep
EANSKCMLTHKTVNVLPNLKMRVLRILFDKNRSYFCLLQKKRLDRITLV

SEQ ID NO: 188194 - protein, 80 aa, Oryza sativa
  Clone ID: PAT_MRT4530_84822C.1.pep
MALKWPRGLGVPRHTPRAFEAYYPEALARPPCGEESGRAEGAVQRLQCAAPQPSLTAFNAVWVDVRRSATDPCQSGMTGL

SEQ ID NO: 188195 - protein, 122 aa, Oryza sativa
  Clone ID: PAT_MRT4530_84823C.1.pep
MARQRTVTVTAKGRTRCVSSSRIQRWRCERRRWLQRRRSTARPAAAAALGLRRQSGLEGKRIRLRGGGGSDSARRPEVEYDPDVWGPHIGGREIEIERDREEWHGWATQCARGREELGRDSK

SEQ ID NO: 188196 - protein, 262 aa, Oryza sativa
  Clone ID: PAT_MRT4530_84824C.1.pep
MAHHRVTDDMSSVTGVKYMLNDSDKHRQNNNIGYYLKEAVSEGGTAFDKAYGTSLFQYLGQDGNEPSNTLFNQAMASHSVVITNKLLQFFRGFDAGAGVDVLVDVGGGVGATLRMITARHPHLRGVNYDLPHVIAQAPPVEGVEHIGGSMFDHVPSGSAILLKWILHLWGDEECVKILKNCYKALPAKGKVILVEYVLPASPEATLAAQEAFRLDVMMLNRLAGGKERTQQEFTDLAVDAGFSGDCKPTYIFTNVWALEFTK

SEQ ID NO: 188197 - protein, 1160 aa, Oryza sativa
  Clone ID: PAT_MRT4530_84825C.1.pep
MKVYSQSQVTLKIAKSILCGSEFMVMGFPQCANAYYLLMQLDKSFKPVFCLLEIQSNEGDNNNADATTDAKEAIRFIRIDINKLKIDEDVQIGNFFDKDKLLALQNVEDRPQRQSGADEPLPARPSFFSIVDEVFRCDRGSPITESQRLPPNSLPSSHSSYQVGLHGFSGGAGSPDQDYGSLQSNINAAKVTSGTGLNNYLLSNSKNAQSTSAFSGSVPAGLGNVSSSRSEGAYKKRSLSEFLQNIPSSKQSIIGDGPGKRRKLSEFMLDGLPLKANSPNMQPRTSLTYGKLLEEVNNCITANIYSSVLLHVIKHCSICIKYAQLTAQMDSRNIPHVEEVGMPTSSSNLWLRLPFAHDASWKHICLHLGKAGSMSWDVRINDPHYGALWKLHGGSTTTEWGSGVRVANTSEVDSHISFDDDGVLLTYNTVEADSIQRLVSDLQRLSHARAFSCGMRRLIGVKLDGKLAEHQTAAETKLHSRRKASRDRLSEQMRKTFRIEAVGLMSLWFSYGAVPMVYFVVEWETGKSGCTMRVSPDQLWPHTKFLEDFVNGDEIASFLDCIRLTAGPLLALGGAIRPAKMPVTVPAGYSALPKQNNILTTAGSANSLSSSTVHNMSVPQGAAVAHSNSQLQTSSMLSVAGRTAPGLVPSSLLPFDVSVVLRGPYWIRIIYRNKFSVDMRCFAGDQVWLQPATPPKGGPSVGGSLPCPQFRPFIMEHVAQGLNALEPNLLNARHTGPPLNASANTVSGNQQLASAPNRFGGAPGVARPTSTVANQVASSLSRAGNAMMPSGFASGIAGAPAHLSPGNVPAHMKGELNTAFIGLGDDGGYGGGWVPLAALKKVLRGILKYLGVLWLFAQLPDLLKEILGSVLKDNEGALLNLDHEQPALRFFVGGYVFAVSVHRVQLLLQVLNVKRFHHQQQQQQQTPQNNGQEELTVPEISEICDYFSRRVASEPYDASRVASFITLLTLPISVLREFIKLIAWKKSLPQAHADNATTHRARIEICLEKHPRLVSDDYTASSSSSKSNIHHDRANNSVDFALTFVLDQALVPHMSISGGAAWLPYCVSVRVRYTFGEDSHIAFLAMDGSHSGRACWLQHEDWERCKQRVSRAVETMNGSAAVGDMSQGRLRMVAEMVQKQLQLSLLQLRDSPVSTGSAAS

SEQ ID NO: 188198 - protein, 37 aa, Oryza sativa
  Clone ID: PAT_MRT4530_84826C.1.pep
MAEWLVLLLLSGSSTLSFGSVRILGILHECFTIYGSV

SEQ ID NO: 188199 - protein, 76 aa, Oryza sativa
  unsure (1)..(76): unsure at all Xaa locations
  Clone ID: PAT_MRT4530_84827C.1.pep
SLVDHKMNKGTYPXIETRKTGISCVHFTYKSNSCEVYLXTVSYMKDISELPTYLTVCEIKGPSELKALLMRDLTYA

SEQ ID NO: 188200 - protein, 123 aa, Oryza sativa
  Clone ID: PAT_MRT4530_84828C.1.pep
DGSTCSTKARWCVARMFARRRSRQALDQRGWHVQHPMLQYACHARWPVAVIANRHGEDGEHADMSSEMTIEDALWSLDSLDDVGWRARTRTGIAQRNIDHRNGGFHIPTARSTCSTSACLTWG

SEQ ID NO: 188201 - protein, 402 aa, Oryza sativa
  Clone ID: PAT_MRT4530_84829C.1.pep
MPPDWHGYAAANAGVASMADLNNDNVFPAPHLLTHPAKHHLVSKTIHSVFNIEVNVRHQEEDNKSAFRHFCRILKRLPINKNLDRAEIEETTIPTELCTGFVIEQRGNILYLLTTAHALDDYYDAKNHDLTPKDLNKSFIFKVLCIHQERHLLSLQGVDDKSEHLNRYFCDAKVVAVNTQVDLMLLKLNREDIYYSYQDADNFIICPEDHTRIKLGKSPPVESENVFLQGWPALRSQTSVWGHISHTNRRYDTLTSLNVKGYKMNLIEVPEFQCAAGTSGSAILNGAARCVAVYHGIQKNCKAGYAISYQDVKTFVDTALANLPGDGDGDGDGDGDGDGDDDDDEENDDNDSDSDYDESDEEEEERKRKRGKGIGSGRGRGRGRASGSEKGRGSGKGKAKMR

SEQ ID NO: 188202 - protein, 192 aa, Oryza sativa
  unsure (1)..(192): unsure at all Xaa locations
  Clone ID: PAT_MRT4530_8482C.1.pep
MNHGDRHSWPKAAVAVELTGARGGEESLGRGRXGRDFAGQRGXWGRRERRDSKIESRPSRARARAGERGEWAREMRRTRGRGXRGPEKAEAWARRRXGRGGAGWRKGTGPTGGAHLSAXPGREGGAAWLGLGLRPAQQGGGREKERMGQRPIXKGREKEKQKGEKDFLELKYCLLNFNWLKLFLGLCHGLRG

SEQ ID NO: 188203 - protein, 72 aa, Oryza sativa
  Clone ID: PAT_MRT4530_84830C.1.pep
HQQYDSHQHTIVSHTKTDSLLESPGLIGCLRGPGLTGTQVLTACLPSENTIHRIFNNTYRCDNGSSPKLIII

SEQ ID NO: 188204 - protein, 107 aa, Oryza sativa
  Clone ID: PAT_MRT4530_84831C.1.pep
PPPRPRNATPPPPPRRRANHRPDAATPPLTNENENDRTNESENEHVNVRCRENVNENENDRTNESENENDRSKTSENEGTNVNENKRTNVNENERTNVNERTNEDER

SEQ ID NO: 188205 - protein, 150 aa, Oryza sativa
  unsure (1)..(150): unsure at all Xaa locations
  Clone ID: PAT_MRT4530_84832C.1.pep
ISPISISLRRLRRRRLRRRATPPPHANATPPPPSPRRRRLRRRARNAAAATPRRRRHATPRHAXRRHATPPPPRPHNATPPPPSPRRRANRRPDAATPPLTNENENDRTNESENEHVNVRCRDNVNENENDRTNVNELGNVNERTNEDER

SEQ ID NO: 188206 - protein, 173 aa, Oryza sativa
  unsure (1)..(173): unsure at all Xaa locations
  Clone ID: PAT_MRT4530_84833C.1.pep
CEAGPRRIRFLPWPGHLGARARHPRSLLSSGRRLRRRARNAAAATPRRRRHXHATPPPPRPRNATPPPPSPPPPRRRANRRPDAATPPLTNENENDRTNESENEHVNVRCRENVNENENDRTNESENENDRSKTSENEGTNVNENKRTNVNENERTNVNELGNMNERTNEDER

SEQ ID NO: 188207 - protein, 278 aa, Oryza sativa
  Clone ID: PAT_MRT4530_84834C.1.pep
AAAAATVECRSSAMASAAAAAAAGGGSAGSGSGTSAGGLPAYVFDALVQYAAAAGANATASMPEEDVRAIASVLRRRAPCRLLVFGLGAETPLWRALNHGGRTVFLDENPFYVAHVEGALPGLEAYDVSYATAVREFPDLLDAARAAQSADCRPVQNLLFSDCRLAINDLPNQLYDVSWDVILVDGPSGFTEGSPGRMSAIFSAAVMARTKGSETEVLVHDYQREVEIACAREFLCPENRVEATATPSLGHFLVRGGAAANRDAFCGGAAGATTKKAN

SEQ ID NO: 188208 - protein, 233 aa, Oryza sativa
  unsure (1)..(233): unsure at all Xaa locations
  Clone ID: PAT_MRT4530_84835C.1.pep
CRLLFKAPSNLISLHLDLSDLDLSPSRRPPRDAAPRRRRATPTPRQAAAGTPRRRLRRRARNAATGTPRRRLRRRARNAAAGTPRRRLRRRATPPPHANATPPPPSPRRRRLRRRARNAAAATPRRRXPRPRNATPPPPPPPHRRVNRRLDAATPPLTNENENDRTNESENEHVNVRCRENVNENENDRTNESENENDRTKTSENEGTNVNENERTNVNELGNVNERTSEDER

SEQ ID NO: 188209 - protein, 183 aa, Oryza sativa
  Clone ID: PAT_MRT4530_84836C.1.pep
MASDLSQSLDLSICQYREYILLISTADRVDLVFPYLFMIADRCIYDIGSKDQINWHAHTPEGEFWTCTGVKQISQAAVFDFHINTHALLSREVFVCPRSTSILDLVSQVLIGATASDSHEWMMAWLLMMNEFLDVVLGMLKGCYRLGCVLCVDALGMLTWVLVIPRVLLRELLSNSQFVLHLS

SEQ ID NO: 188210 - protein, 99 aa, Oryza sativa
  Clone ID: PAT_MRT4530_84837C.1.pep
DAATPPLTSENENDRTNESENEHVNVRCRDNVNENENDRPNESENENDRTKTSENEGTNVNENKRTNVNENERTNVNENERTNVNELGNVNERTNEDER

SEQ ID NO: 188211 - protein, 68 aa, Oryza sativa
  Clone ID: PAT_MRT4530_84838C.1.pep
LPFFSSCCHHLTSCIFLCTFNLDVFFPIFRMTILLCCNFSFFIDKMTVVGSIVVISLPWLIRVQFLSI

SEQ ID NO: 188212 - protein, 168 aa, Oryza sativa
  unsure (1)..(168): unsure at all Xaa locations
  Clone ID: PAT_MRT4530_84839C.1.pep
RLRRRATPPPHANATPPPPSPRRRRLRRSARNAAAVTPRRRRHATPRHRRHATPPPPRPHNATPPPPXPRRRANRRPDAATPPLTNENENDRTNESENEHVNVRCRDNVNENENDRTNESENENDRTKTSENERTNVNENKRTNVNENERTNVNELGNVNERTNEDER

SEQ ID NO: 188213 - protein, 590 aa, Oryza sativa
  Clone ID: PAT_MRT4530_8483C.1.pep
MAPRKPNPASAKGLDPGRVDDDSTVFLGVSLVDDVELAKLVSSGALVEGQAFAPVKAVVPKPINNRTVVFAVFFEAGLRFPCNVLLPEILRLFQPNAELFGAIFFATVNSKTVITPARTKKTVFGSMNFNVRPEWSDLWPVNAAMSKWDHHWMARWFYHTIPFEAGTYSAKALRCRHRAIAPNWKPKIAVDGAMEARFVLLRKVCSRLSCRDLVEEFCMLRIFPLSQSWQVTVDQGEEVDGLPNLILPEGTDREEEEEEAVADKAANEAIEDRVDTLGYTPTPSPGHNETGVEFNSSHLRRKDLEGAKALVAFSSGKAAKGGPVQKISKKKGLVDIARVFSDDESSDGTPTSPAGRSLDLSTAPLAPLGVAGAGGNAAGASASTERIVSAVARVFGSPLREPAISPLVKAMGKCAATEASSTGGVSNLVLPAGTPSLFTELNEFDEGCSAIKSLAVRILVAHCSTERTVRARFDGFKSRLRAKDDEISRKNLEVEALANTLKEAKTEVKRLQSKARAEVDHLKAELEKEKDHSAVLIDYYNLTEPKMEVLCLKASRAEASAAEESQRFTGDGEDHRIRENGLPNAPPRPY

SEQ ID NO: 188214 - protein, 77 aa, Oryza sativa
  Clone ID: PAT_MRT4530_84840C.1.pep
LSSVLCVGAVATNRGEPLTRGSDARTNRRVRTSSRQTTLGGSSRLAVGERCQELMLRGGQPDDGAHSWYAAGVAVER

SEQ ID NO: 188215 - protein, 162 aa, Oryza sativa
  unsure (1)..(162): unsure at all Xaa locations
  Clone ID: PAT_MRT4530_84841C.1.pep
MASDSRLRAEKRAFGGSAVPVERERLLHTERSSVRRSVSAMERMSSAPEMNAVWRGDGGEERHGGGRRERGGRLAGLPASPSLSXPVKRWGDKVGRPRXALLSDSLGQLSLDARLPAAAAAAAEMAGAACPCRRPASPIAAAAVEMTGANHRATPAAASYPH

SEQ ID NO: 188216 - protein, 72 aa, Oryza sativa
  Clone ID: PAT_MRT4530_84842C.1.pep
AGGGAGQPQGSKEGGLQGALHPDALPQGRDRQKGAPFRVMATPPPAVFASQTTTISRKNFSRVLSGGKRGFP

SEQ ID NO: 188217 - protein, 48 aa, Oryza sativa
  Clone ID: PAT_MRT4530_84843C.1.pep
MDHVLARYRCNKLTWRTGSRGMRMRLVASVTEDVGVGGGSEGYRSWQW

SEQ ID NO: 188218 - protein, 83 aa, Oryza sativa
  unsure (1)..(83): unsure at all Xaa locations
  Clone ID: PAT_MRT4530_84844C.1.pep
RRRASSRRLPDSNSGRPPAAVLSDSLGQLSLDARLPAAAAAAAEMAGAACPXSRRPASPIAAAAVEMTGANHRATPAAASYPH

SEQ ID NO: 188219 - protein, 139 aa, Oryza sativa
  Clone ID: PAT_MRT4530_84845C.1.pep
MSSPETTTDQSGSNKQQRRRRRHHFILVHGVCHGAWCWYRVTTALSSAGHRVTALDMAACGARPGRADEVPSFERYTAPLLDAVADQDGEEKAVVVAHSFGGQSLALAMERHPEKIAVAVFVTATMPAAGKSMSFAFKQ

SEQ ID NO: 188220 - protein, 193 aa, Oryza sativa
  Clone ID: PAT_MRT4530_84846C.1.pep
MASAAAAAAAAQEGITHRAVRGDGGDAAATAGGGEAASRDPRKAGRAKRGLRSLAAAVSVSVALMAASFYGSGSASASASAARVTVARAGSVAAEAVMALAAWMVWAEGGLHRRPGATLAPFVAQLVAALAWAPLALGLAAPAAGLACCAAMAAGAAACARGFGGVNPVAGDLAKPCVAWAVLLAVINYKMMN

SEQ ID NO: 188221 - protein, 280 aa, Oryza sativa
  unsure (1)..(280): unsure at all Xaa locations
  Clone ID: PAT_MRT4530_84847C.1.pep
PPPPPPPPPAPLTSPLPPPPPLLSQPPPPSPLCALSLPPSPPPPLFPPPMTFLLPPLDPFILPLPPLLIPRSPFXPFPRPMPLPIPLPLPLPLPFPPLPPASPSPSSPSSPLSPSSPPFPPPPPPPPPPPPPPPPPPPPPPPPPPRPPPPPPPPPPPPPPPPPPPPPPPPPPPPPPPPPPPPPPPXPYPPSPQARMALNIVHVPAHRILPLLENHLIFALLDAAVGVATAEVAACSSSSASASRRSNAPAARKSRPSHGALLLWPILPPACIICISASCW

SEQ ID NO: 188222 - protein, 284 aa, Oryza sativa
  Clone ID: PAT_MRT4530_84848C.1.pep
MDRTATASWEVMSRRGEQQQQLMMQAPASHNGGSGGGEPARSRWAPKPEQILILESIFNSGMVNPAKDETARIRRLLERFGAVRDANVFYWFQNRRSRSRRRARQLQQACGAALHQLPSAAAAAGAGGGGDYYHHHHQPSSSPFLMHGGGGGGVVTSTTAAPAVAASGHFLADEVDGGGDDDLFAISRQMGLMARHGGGDHHYSSYADSDATQLSYQPTGTIQVFINGVAYDVPSGGALDMAGTFGRDAMLVHSSGEVLPVDEHGVLINSLQMGECYYLVSKSI

SEQ ID NO: 188223 - protein, 251 aa, Oryza sativa
  unsure (1)..(251): unsure at all Xaa locations
  Clone ID: PAT_MRT4530_84849C.1.pep
RTPLASSPPPPPPPPPAPLTSPLPPPPPLLSQPPPPSPLCALSLPPSPPPPLFPPPMTFLLPPLDPFILPLPPLLIPRSPFXPFPRPMPLPIPLPLPLPLPFPPLPPASPSPSSPSSPLSPSSPPFPPPPPPPPPPPPPPPPPPPPPPPPPPRPPPPPPPPPPPPPPPPPPPPPPPPPPPPPPPPPPPPPPPRILPLLENHLIFALLDAAVGVATAEVAACSSSSASASRRSNAPAARKSRPSHGALLLWP

SEQ ID NO: 188224 - protein, 270 aa, Oryza sativa
  Clone ID: PAT_MRT4530_8484C.1.pep
MLVYVTFKLFTPSVVSQSVDLIEIKTNQRAYPVHLEQYPGRTSRTPVAFAESGGDIPASALPTHQVVRPGRSAQHRPACCLSILFVPSSRRFPAPAPCSPTHPLHLSHTRSLLDEWFAPCQKLGIAAKHGYFVRWNKAAEWESSYPNHDFEWKHIAEPVMQVYTETTDGSSIEPKEKCPNGTSAYHPNETGITTERSALLAFRAGLLDPANLLSSWEGDGCCRWKGVGCGNRTGRIVKLALQGSDCGQNIITATRSVPYKYQSSYLRCAT

SEQ ID NO: 188225 - protein, 57 aa, Oryza sativa
  Clone ID: PAT_MRT4530_84850C.1.pep
GRDLFKLVSPFVQRVISACKNERIISLGRGGGGFGLLMDICKVFYNPCIQHGIGISH

SEQ ID NO: 188226 - protein, 298 aa, Oryza sativa
  unsure (1)..(298): unsure at all Xaa locations
  Clone ID: PAT_MRT4530_84851C.1.pep
MYFEGYGYRGSTFEQTYRCYPASFIDKPQLETGDKIIMPPSALDRLASLHIEYPMLFEVHNAAAERTSHCGVLEFIAEEGMIYMPYWMMQNLLLTEGDMVFIKNANLPKGTYVKPXETLRNYSCLTTGDSIMVAYNNKKYYIDIVETKPSNAISIIETDCEVDFAPPLDYKEPERQKAAVPPSTAPTAEEAAEEEPKFIPFTGPGRRLDGKAPKDKDVSASSPAKRQANATNSVQPSTASTSQSSSSRKTTEKLVFGPGGNRTSKETEKVPEKEPKEDPKKDEPKFSAFTGRKYSLKG

SEQ ID NO: 188227 - protein, 84 aa, Oryza sativa
  Clone ID: PAT_MRT4530_84852C.1.pep
MAAAAVRRSREGAPVSSCGLQLGNASTPKRTRGSGLSGATGATRHDKQEAAGQGSNNKRVVQQTAGADRFFFVLRHCCYTDAPR

SEQ ID NO: 188228 - protein, 173 aa, Oryza sativa
  unsure (1)..(173): unsure at all Xaa locations
  Clone ID: PAT_MRT4530_84853C.1.pep
PPSALDRLASLHIEYPMLFEVHNAAAERTXHCGVLEFIAEEGMIYMPYWMMQNLLLTEGDMVFIKNANLPKGTYVKLXPHTTDFLDILNPKAILEKTLRNYSCLTTGDXIMXXYNNKKYYIDIXETKXXNAXXIIETDWEXDFAXXLDYKEPERQKXAGALXTAXTAEEXXEE

SEQ ID NO: 188229 - protein, 249 aa, Oryza sativa
  Clone ID: PAT_MRT4530_84854C.1.pep
MDAFYSTSSAYGAAASGWGYDSLKNFRQISPAVQSHLKLVYLTLCVALAASAVGAYLHVALNIGGMLTMLGCVGSIAWLFSVPVFEERKRFGILLAAALLEGASVGPLIKLAVDFDSSILVTAFVGTAIAFGCFTCAAIVAKRREYLYLGGLLSSGLSILLWLQFAASIFGHSTGSFMFEVYFGLLIFLGYMVYDTQEIIERAHHGDMDYIKHALTLFTDFVAVLVRILVIMLKNASDKSEEKKRKKRS

SEQ ID NO: 188230 - protein, 121 aa, Oryza sativa
  Clone ID: PAT_MRT4530_84855C.1.pep
GATQQARRHGARRDGTGGAAAAQGDGDWTAARRGAGARTMGGDATARGARGARATARGRGAGRNAAGARRGDGTAARRGSGDGDGARRLEATGARRARGRDGYGGAELGVARRVRQRRGQG

SEQ ID NO: 188231 - protein, 365 aa, Oryza sativa
  Clone ID: PAT_MRT4530_84856C.1.pep
MQGERWPEGTVDVEHRAAVAVVWAEKATARRVATVAATFARGRALGHWGRGDRGRRKGNGRGGRHANGIVLACYTAVLDEPGAPPRDTSSASAAACLVRLRHYSRPPKRIQAKDVKTIRAKPYGESHKRSWRRLESRIGTPQVKASRAKGIRCPFDNSWRRPWGTQTKRLKWEPFATPTPFAMLPIRYDVKGCGRTGFATPRPFAAIPIRFRHTQTLRHNTNKVRRQGLRMNRFRPPTPFAIVLIRYDVKGWGFRPPTPFAIVPIRYGVKGYGRRGFATPRPFATIPIRHGVKGCGRLGFATRHALRHNTNKVRRQGLGANRFHHTQTLRRNTIKVRHQGLRANRPFATVPMRYGAKGSGLIRQG

SEQ ID NO: 188232 - protein, 72 aa, Oryza sativa
  Clone ID: PAT_MRT4530_84857C.1.pep
LSLAEHCKASIVPCKSAAEGPYESILSMSQVDYEGACNPGNGFQYYGSGPQSATGLQPVFIHDRGVLCFIKG

SEQ ID NO: 188233 - protein, 197 aa, Oryza sativa
  Clone ID: PAT_MRT4530_84858C.1.pep
MEAAAARPVIRVAAICGSLRKASYNGGLLRAAAGVCEESIPGLRVDHVDISGLPLLNTDLETADGGFPPAVEAFRDKVRQADCFLFGSPEYNYSIATPLKNALDWASRGQNCWADKPAAIVSAGGGFGGGRSQYHLRQVGVFLDLHFINKPELAVKAFEQPPKFDSDGNLIDAQIRERIKQVLLSLQAFTLRLQKKD

SEQ ID NO: 188234 - protein, 122 aa, Oryza sativa
  unsure (1)..(122): unsure at all Xaa locations
  Clone ID: PAT_MRT4530_84859C.1.pep
SLLPSTGGHRDHATSTSIQMCIQCLFSASEYLMESSSSPLSNGXSLISKFYINRPQSRKQGVASPIMGLXACNFIWDPXPKWGTCGVLHNIVEHDPRDPLVILPPPEIAISSLPVGAHTQQP

SEQ ID NO: 188235 - protein, 195 aa, Oryza sativa
  Clone ID: PAT_MRT4530_8485C.1.pep
MTPPRLAAASPPPRRPSASLHRAPTRRRTTGPRRTPTRRRAPPPDALCTTPPARPLPPRPRRRAPPPDALCPAPPARPLPPRPRRRAPLPDTPCTAPPARSFPSRPRQAAQPRPRMASPHRHRSPAAAPLPPYRSPAAELPRPATATLPVAPLTTVRRRCLAAAPPAQGNCGVNGKRRRKEEEKRKEKRKMERFP

SEQ ID NO: 188236 - protein, 83 aa, Oryza sativa
  unsure (1)..(83): unsure at all Xaa locations
  Clone ID: PAT_MRT4530_84860C.1.pep
MGRGVRQTACRHLTHDLTETHKGSGRLGPRGRGGTGPIPXGEIKRRANTSPSGPTXPRVPGHVGDCVCLKPLVMILPVPCHRQ

SEQ ID NO: 188237 - protein, 310 aa, Oryza sativa
  Clone ID: PAT_MRT4530_84861C.1.pep
MALFGVREMRRFERMTPERRAEYLLGMAGVVTLVTSILLLLSGSTYGYGPKVCTGRGVFFSPTIALGLLLMAAFILGTCGQRYGDECLFGCYLLGLLIAFPLLLAFIIFGYVAVGGIDLGGVSIREYNLEEYSGWLRGRVADPHYWETTSACLRDGNVCSGMTRLVRDPDTGIFVPELSRYERWLKEHGIKKGVHVMSPIESGCCKPPTSCGFRYVNGTTWIPTPAAAGTPAAATNVDCSRWSNNQQTLCFQCDSCKAGFLDDIKKAWSFDALYPILALVGAFLSCFAGVKYWRPRLDTGYSLIRERAVA

SEQ ID NO: 188238 - protein, 85 aa, Oryza sativa
  Clone ID: PAT_MRT4530_84862C.1.pep
RRRHRAGARRRSAEDAQDAAAGELILLPGAPRCIGSPRRSPERTHVFILSFLLFFSDIFFYISKKKKKEEILEKLSCKKKMTTLL

SEQ ID NO: 188239 - protein, 45 aa, Oryza sativa
  Clone ID: PAT_MRT4530_84863C.1.pep
MASQETLKRLDGIGRKVVQGRVVIREDTMRDKLAEEEARMWASRI

SEQ ID NO: 188240 - protein, 313 aa, Oryza sativa
  Clone ID: PAT_MRT4530_84864C.1.pep
MEATAKYNRGNPAVKRILQEVKEMQSNPSPDFMAMPLEEDIFEWQFAILGPRDSEFEGGIYHGRIQLPSDYPFKPPSFMLLTPSGRFEIQKKICLSISNYHPEHWQPSWSVRTALVALIAFMPTPGGGALGSLDFKKEDRRALAIKSRETPPKFGSAERQKVIDEIHEQMLSRAPPVPQLLTNETNEETNQLPASDASDEHAHKAVGGVNTAGSNSDSVNNDLPRPDSESEIVQHIVEGRTEGVSNHSRANLSRENIPRVAPTPQNPVVAIQKPKHDRLLTLAAFGLTLAIMALVIKKFFKINGLAGYIEGKF

SEQ ID NO: 188241 - protein, 45 aa, Oryza sativa
  unsure (1)..(45): unsure at all Xaa locations
  Clone ID: PAT_MRT4530_84865C.1.pep
KASAQASAQAFRKRXXGRLGRTGRKKSKLIDGTCKRKRFKYKEWN

SEQ ID NO: 188242 - protein, 67 aa, Oryza sativa
  Clone ID: PAT_MRT4530_84866C.1.pep
HFKFFVATPPSQGRVFFAPFSCPYAALIPFAAPLSFFSMGSLPRKKKEPLFFFHEISLNKYNVCKKI

SEQ ID NO: 188243 - protein, 55 aa, Oryza sativa
  Clone ID: PAT_MRT4530_84867C.1.pep
KVGNTTIQMLQTYKDQTTSQCIRQCIMYWKRIRSDSTYQSITKKSAERGDKERRT

SEQ ID NO: 188244 - protein, 67 aa, Oryza sativa
  Clone ID: PAT_MRT4530_84868C.1.pep
YDLRTPHPHALLFFALLPDTTAPPDGIMEDPYSGAAFLIMGAWWVRYSPANFTFESVFPHKSLREVS

SEQ ID NO: 188245 - protein, 229 aa, Oryza sativa
  Clone ID: PAT_MRT4530_84869C.1.pep
MGELTLPIVPLKPDLEYGQNLCVLARDNKTDLICTTVRVKYVDPYEYQHNHYLFIDGSIPKCGTGGALADFSGNIVGMLFCTLPIVAFIPSSLILTCMRLWRNFGQLVRPQLGLKLRTVDFLEMAHIELLSRKYNIASGLIVREVFSQCAAEKHGIRVGDVILSCQGENISNVTQLEDILLGVGERHLEKGNDSGSKVDVEVGVFHVRKCSRRLVTLTVELSDGIEVFH

SEQ ID NO: 188246 - protein, 114 aa, Oryza sativa
  unsure (1)..(114): unsure at all Xaa locations
  Clone ID: PAT_MRT4530_8486C.1.pep
VNAANLWKRIVRWVEDEEKAVGGQYLRYKLXLHLRARRIIYSXGIQKLIQGHGELNRKAVKIVATNNLMALEDKLVLSGVVELNRQRSMVLSNGYALCVCNDTLHASSIKRACV

SEQ ID NO: 188247 - protein, 90 aa, Oryza sativa
  Clone ID: PAT_MRT4530_84870C.1.pep
LWSETPPVGKGFGCLPMVNNISLNFAPFPGDKFSGGVPGGPHFLFWKWWGGPPQRWKIPPSFWVGGYMDPAFFQGSGFFPRFWGRIFFFC

SEQ ID NO: 188248 - protein, 185 aa, Oryza sativa
  Clone ID: PAT_MRT4530_84871C.1.pep
GVRRVVGDNGRVEESHLGELHYMRAIIKETFRLHPAVPLLVPRESVAPCTLGGYDIPARTRVFINTFAMGRDPEIWDNPLEYSPERFESAGGGGEIDLKDPDYKLLPFGGGRRGCPGYTFALATVQVSLASLLYHFEWALPAGVRAEDVNLDETFGLATRKKEPLFVAVRKSDAYEFKGEELSEV

SEQ ID NO: 188249 - protein, 162 aa, Oryza sativa
  unsure (1)..(162): unsure at all Xaa locations
  Clone ID: PAT_MRT4530_84872C.1.pep
SPPNCFTGPTLILALRAGGSAARAACSSAVAVAAPPSASASDTRPSSKLPSSKSASTSSTSSSSYTXSNPSSSMTPPSSTRSPPTSSSLSSSAANSTSCGSSSSSSNSTSYGSASSSAAAAAAASSRNAKNSASTSPSNHATGSRSPSNCTYSGRDADDDDS

SEQ ID NO: 188250 - protein, 113 aa, Oryza sativa
  Clone ID: PAT_MRT4530_84873C.1.pep
MAASVFTRRRWSTGRKREAIGSVTQRRTSAGVDVVAHGRRRWLAALLWMATRRRQGTGGGAWEQAAAGDTAMHGHGVKIFTVIPNGYPLGMPVPNGHGVLPKRLRRRGSDTGT

SEQ ID NO: 188251 - protein, 560 aa, Oryza sativa
  unsure (1)..(560): unsure at all Xaa locations
  Clone ID: PAT_MRT4530_84874C.1.pep
MAAAVLNALAPAATVAQLAGADAAGLVSAILQAVRAARRNRRECRLLARRAMMVGDLLRLLPPESETMRRPEVRRALDGLGGALRQALELVESCQESGAVRGLMTAGRQAEQFREVQGEINDYMLLFPVVSHIDITRRLDLIYGLLLPADSQPHQMPEDAPGSPGDHFEADVRNVEITAAEVIPFESNQTITEPFEFGEHHVAGHQEGLEELLSKVQRLKWLCWWSQHDSLERPSTYDLLKAATNNFSSKSKIASGGWATVYKDIQTLTICKSFAAQIDNQSHLEKISFDFTFQAQMRNSLEIAIKVYPMGTGEKRVFSQYERELNLLTKLQHTNIIKLLGHCTGEWELILIYEYMPNGSLDKFIHGPNREVSFDWFSCFKIIQGIAEGLLYLHTGYIAPEYLRGGILSTKVDVYAYGVILLEIITGRRSCIPCLKDDEYVHLTEYAWDLWRTGRSAELLDAALRNEARIAEITSCIQIALLCVQKDPADRXPSMLDVLAMLRDEKIVAAPKKPGDLLLGDETSVESGDLLLGEETSGETAHWFASSGATCSSTEFTVPR

SEQ ID NO: 188252 - protein, 41 aa, Oryza sativa
  Clone ID: PAT_MRT4530_84875C.1.pep
PLHSDSCLPVPSHRITAWLISGIGWPRLEPWFVSPLSLSKA

SEQ ID NO: 188253 - protein, 76 aa, Oryza sativa
  Clone ID: PAT_MRT4530_84876C.1.pep
PELYLNKGKLKGDNWVFTFKGGQNFLVPFGGFKPPNWGDNWILGDNPFNYLGEKQYQYLKNMTVFQEPNGGIFGTI

SEQ ID NO: 188254 - protein, 142 aa, Oryza sativa
  unsure (1)..(142): unsure at all Xaa locations
  Clone ID: PAT_MRT4530_84877C.1.pep
SIAIRAILHNGWGPLYYTGAQYMAVQEVDDACTIGPATXCLAGLAWCYKXAMMPMCAIGMSIVLSFSLAAMSGVAVAGLGMLSTIATGLAIDAYGPISDNAGGIAEMAGMSHRNSERTDALDAAGNTTAAIGKGFCLRLCKL

SEQ ID NO: 188255 - protein, 128 aa, Oryza sativa
  unsure (1)..(128): unsure at all Xaa locations
  Clone ID: PAT_MRT4530_84878C.1.pep
KPPPPPPPKPPPPPTPPPAPPPTPAPAPNPPPXPPPRPPPPPPPNPPPPPTPPPAPPPTPAPPPNPLPCPPPRPPPPPPPNPPPPPTPPPAPLPTPAPPPKPPPCPPPRPPPPPPPKPPPPPRGPNGQ

SEQ ID NO: 188256 - protein, 169 aa, Oryza sativa
  Clone ID: PAT_MRT4530_84879C.1.pep
MATFWGLEGKPGEAYTHHSAPARLRITQAVLGSCDQGWTTLQCDTNDRETVRLCVLNPGLAVACHLELELQKDENVLLSVDGQNSIHLSGYYTCSHSGNHGRNSQKPTSKAVGSTGFNKKHQDISDKAPVIEEILDDQTVQQQQQQGVNISSKDVEPSHKNGHGQNSEW

SEQ ID NO: 188257 - protein, 98 aa, Oryza sativa
  Clone ID: PAT_MRT4530_8487C.1.pep
NSTLLRVPPNFSSSSKGLKTPCCCPGSPRLFGGGNFQAKKSFTTPNTCSDPLSTKYVLRGLVFSFLPVFIPKLFPRFPCQDLKNSLFNLPEGEYLCTV

SEQ ID NO: 188258 - protein, 318 aa, Oryza sativa
  Clone ID: PAT_MRT4530_84880C.1.pep
MVARRALRRYTDMQRNLSSISSSAASPSPLSPADGFLCVKDGVDEMIKYVANEPSVGLYFVQQHAQASMPLLLDVKGQVGIAGHIICVKQVFYQYIVQQLKGSSYKNMEEQMNTGKVAEKIHEVTLHTEDIEDSICAVRSMAEFGLPIADDMIKDINKSLKIMSKTQPKRGLIQNPTWGFQSGKSSGTWEEDLGTTDGGSSRNYFSSMFNTAKQKASTLRWPQPDFGTKDDTTEESESSAAPESSQAGGHGASTPSDTEKDDLPVSSQLLDNNTATMKESSSTDISKSVENYNKFKEEQELKLQEWLRQSEEADDNKE

SEQ ID NO: 188259 - protein, 518 aa, Oryza sativa
  Clone ID: PAT_MRT4530_84881C.1.pep
MNMESLAAGAWWVVVLLLLVLTIVASWYRSWWKTTEAGGPLLPPPAAGAGPWWVWVWQWRETAAFLASHGSGRGFYHFVQERYKLYKGEGEGEATCCFRTALMGRVHVFVSASHPAASQLLTAEPPHLPKRYARTAADLLGPHSILCSTSHAHHRHARRALATTLFATPSTAAFAAAFDRLVIRHWTTLLPPHNQNQVVVVLDAALHISYRAICEMLLGAGGGKLRPLQSDVFAVTQAMLALPLRWLPGTRFRRGLHARKRIMAALREEMAARNHHHHHHHHHHDLLSVLMQRRQLGHPDALTEDQILDNMLTLIIAGQVTTATAITWMVKYLSDNRLIQDKLRAEAFRLELKGDYSLTMQHLNAMDYAYKAVKESLRMATIVSWFPRVALKDCQVAGFHIKKDWIVNIDARSLHYDPDVFDNPTVFDPSRFDEEGEGDDAKLGRAQPQKRRLLVFGAGGRTCLGMNHAKIMMLIFLHRLLTNFRWEMADDDPSLEKWAMFPRLKNGCPILLTPIHNS

SEQ ID NO: 188260 - protein, 59 aa, Oryza sativa
  Clone ID: PAT_MRT4530_84882C.1.pep
FYRPIGTVRIYLSRSIVHQQGSSPVDRRRWRFRVVRKRAVYFSLPARHRLPGVVWSCVV

SEQ ID NO: 188261 - protein, 175 aa, Oryza sativa
  Clone ID: PAT_MRT4530_84883C.1.pep
MQAARAAVRGGVSVVIGDLRRSYPSLTFGVGTVLNPEDARKAITAGAQFLMSPGTVMEILHALKESEVLCIPGVLTPTEVISASNAGAEVVKVYPVSVMGGEVYMLALKKPFPFLPMVASQGISIDSIKGYLEAGASAVVLSDAIFDKELMRERKFDEISELANLATLRASQSGT

SEQ ID NO: 188262 - protein, 886 aa, Oryza sativa
  unsure (1)..(886): unsure at all Xaa locations
  Clone ID: PAT_MRT4530_84884C.1.pep
MKFGSSNIYGPCSGDLRDDFVDWLNGIVIQPDENWLLMGDFNFIRSMQNRNLPGGDMNDIMIFNEAISNIGLQELPLKGRTYTWSNMQSQPLLQQLDWFFTSPSWTTHYPNTMVTALNKCVSDHAPCVISIETSIPKSIIFRFENYWVDMTGFMEVVKIFWDIPVRATNQGIVINGKLKNVRRGLKRWSKRLSNLNQLIQNSNEAIDMLDKIEEVRPLFIQEWNFRTIAKKHVLKLLHFRNIFWKKRCTILCVKFGDDNTKFFHAAATQRFRQNKFSHLTLNDGNIVTSHQEKALAFLSCFQARMGTSNGYQMIINLQDLYHPSNHLSDLSTMPSKEEIDKVIRTMPTDKAPGLDGFNGLFMKKGWSIISEDYCKLAHDFFGQKISIQNLNSSFICLVPKKPSPESVDDYRPISLQSSSTKFLTKIMAERLQAVILDLIHENQYGFIKQRTIQGCLAWAFEYIHQCYQSERETLILKIDFEKAFDSVEHSAILTVLKAKGFTNTWINWVKDILTTSTTSVLLNGVPGKTFKCLRGVKQGDPISPLLFVLVADLLQSMINKAPEIGILSLPIPQPDTKFPIIQYADDTLIIMKASQKEIFCLKGILQSFASSTGLKINYHKSCMIPINVSEENSKILAETFGCQIGNLPFTYLGLPVGTTKPKIADFAPLIDRVERRLPAITMFLNQGQRLTLVNSVLSSLPTYYMCTLKIPKKXVIEHIDRARRHCLWRKSSEVDARSLSLAAWDKVCKPKKRGGMGIINLEFQNCALLMKHLDKFYNKRDLPWVKLIWNTYYSNNSVPPHALQERGSFWWKDIFRLIPIFRGVSKIQINTGDSVLFWKDPWTEDLHQNAFPTLFSFAINEDITVQNYVQNDXQNFNLPLSSQALQ

SEQ ID NO: 188263 - protein, 61 aa, Oryza sativa
  Clone ID: PAT_MRT4530_84885C.1.pep
MSSAYRFLIMEKAILSHWVLTTLFREDMITVLTKGRIVLSQHHTNDHHSHAGLGMLDELAA

SEQ ID NO: 188264 - protein, 195 aa, Oryza sativa
  unsure (1)..(195): unsure at all Xaa locations
  Clone ID: PAT_MRT4530_84886C.1.pep
MYYCDMLSLNRPITFFXFCLILWSNGSLYRQIXPNNYAMLNVSSRNSXNACHHELVNISTNSEVVRSQDGTIDLFHVPXDQVLCTVSMLLTGIVIVPRGLLLPHYTNGASLIYIVQGRAITGPTFPECPDAYQQPYQPSPRPXIDRTTLQSQEFKAEHPKIHRFRPPYEIALAVAGSHCGYYDREVPLAAIYDTD

SEQ ID NO: 188265 - protein, 131 aa, Oryza sativa
  unsure (1)..(131): unsure at all Xaa locations
  Clone ID: PAT_MRT4530_84887C.1.pep
MRRHDSTRAAARRLEGGGAAVRGEGEEGEEGEHGRGSARGEGDGRRDDDGGASTXGDGTARRGTGLGARRWRQGGAGLEMTATRRTRRAGAGRHDSGGARREAVTATRRQAARRGARARGGVAAAARGARQ

SEQ ID NO: 188266 - protein, 92 aa, Oryza sativa
  Clone ID: PAT_MRT4530_84888C.1.pep
IILWTIVKKKKPPKVLEEKREENRGKKDEPGPILTDPRPGRPQGGDATRPPGRATGGNQSYKGRKHQPKAGLKPTTDERGPHPPQGGEPPTP

SEQ ID NO: 188267 - protein, 356 aa, Oryza sativa
  unsure (1)..(356): unsure at all Xaa locations
  Clone ID: PAT_MRT4530_84889C.1.pep
LPRARARTVAARAAPAPPXPLLYRALPREPARVPEQRRPHPSKNRRQRLPLPSLXSPNRHGFRAMDAEEQPRQPSPLPFDHAREPIPSPRSSLAPVPLERLSSPASLGVAPPNLTLETDSGGRVEALVRRNQTPVAPSPFPPFLVAGCRRRNPPPSSIPRRIQAVGSSPLNPCYLPVAPPFAAAVRPATXAPRRRHLGQDQVKPTSARRSPPPRLRARSTASRRAACSLLTVSRAADKQVPRPRKVDLAINNLRNSISSQPYIRLTPFNLQNSSNLKIYLMPRLEYGLGPNLMSVXDPSRWHMVNLCRLSKCLVMKASRSPDVAVLYGLGDPVAGEDGVDPADEEFFQEXVSYDEF

SEQ ID NO: 188268 - protein, 457 aa, Oryza sativa
  unsure (1)..(457): unsure at all Xaa locations
  Clone ID: PAT_MRT4530_8488C.1.pep
PLLHNHLALILSDRSPSPPPPPPTPLPPPIPGPLLPVLPSHPLRSISLSSSPPPSQIDLPPPPPPPPPLSLPSHPRPSPPPPPFPCSRRPAGPPPPPPPPPLPPPSPVAPKSIPTPGHKANRGWKSIPAAGPYEPLPHPHGDDPPDKPPPPRTPSEYPPPGPPPPPPXSPPPPQIRRPVPETSPAASRHPLDTHDALPPPPRPRAPPPPTPPSPPRTPSPSPPAPAAAPPARRAARRRRARHHPAASSPPPPRRRRRLTPTPTPTPTNTKTSSSHHHHHRQPTNTTLXSPPPRRRAIPPPPHPSSSSSPAAASSPPSPLTPPPPXPSSSQPPPPLPSSPSPSLAAGTTTPPRSTPATAXRPLPSPPPTVXSSLSLRPSSPPPPAAFVVPEVVVTAGEVVIAAPEPDPPCPSSPPSSSSSPPPYPLWPPPPPPHVPPLEPATRRLLSPAPRSRVIRQS

SEQ ID NO: 188269 - protein, 45 aa, Oryza sativa
  Clone ID: PAT_MRT4530_84890C.1.pep
GWGFFFWGKKNGFLLGTKKFTILGGLQGGGLPQGNIDANSTQRKV

SEQ ID NO: 188270 - protein, 89 aa, Oryza sativa
  Clone ID: PAT_MRT4530_84891C.1.pep
MNMTGVPWSEEEHRLFLVGLEKLGKGDWRGISRSYVTTRTPTQVASHAQKFFLRQSSIGKKKRRSSLFDMVQSQFLGLLKLIRVLEFFG

SEQ ID NO: 188271 - protein, 65 aa, Oryza sativa
  Clone ID: PAT_MRT4530_84892C.1.pep
SKWWEKINPVLQKKLEAWRFQKKKILKVEKGPFSLKKKGCSWGKKKNKKKKKKKKKKNQKKKKHK

SEQ ID NO: 188272 - protein, 100 aa, Oryza sativa
  Clone ID: PAT_MRT4530_84893C.1.pep
MVSLPPSRPPASAPATTPRGGALEAVASGPIRRGGNGTVGRGGGGCRRPVWMREGGAARATPGSSIESICRRRVNSGRDGVGGGAGHRRSAPVRRRRRRS

SEQ ID NO: 188273 - protein, 93 aa, Oryza sativa
  unsure (1)..(93): unsure at all Xaa locations
  Clone ID: PAT_MRT4530_84894C.1.pep
EDREGAKPAPAPKXPREXPAKATXATRTASPPXXXXXXTPPPTSHDPPXPPPPPPPPSPSPTSTTGHGPTGSPPAHSNRGGWKPNRAQNRRSF

SEQ ID NO: 188274 - protein, 66 aa, Oryza sativa
  Clone ID: PAT_MRT4530_84895C.1.pep
FFQANGNIKITGDGMTYFTGGAFFFPSELGTKNKHPWVIPRATIGWGERPKRNRGGKSGKTGLDKG

SEQ ID NO: 188275 - protein, 901 aa, Oryza sativa
  Clone ID: PAT_MRT4530_84896C.1.pep
MAGAIVSVSTGALSTLLPKLSLLIQGEYKLLKGVKGGISFLKDELTSMHTLLVKLANNEENLDEQVKDWRNKVRELSYDIEDCIDLFLHKVSSSNAKAGLVRKTAAKIRKLWSRHKIANLIEELKARVIEESDRRLRYNFEEVADNFSHVQIDPRLPALYVEAEKLVRIDGPREKIIEWLEKDESQKLKVVCIVGFGGLGKTTLANQVYHKMKGQFDCSSCMPVSRNPNMTKILVDLLKELGSRVDTSDDERQLICKLRTFLQCKRYLVIVDDIWSTKAWEVVKCALPENNLCSRVISTTRNADVATSCCSCLAGYIHNMQPLTEQDSQKLFFKRIFGDKSACPPYLEQVSHGIISKCHGLPLAIISIASLLAGKSHMKEQWEQVHNSIGFVFSQQGIRDILLLSYYDLPINLKTCLLYLSVFPEDYKIDREELIWRWIAEGFISEVKGQTLDQIADNYFNDLVNRSMIQPFDIKYDGRADACKLHDMVLDLIISLSTQENFTTIMEGQQYKCSSNKIRRLSVHSKYLEDEVMHEIMMNCSQVRSISFYELQDQEISLLSTLNSLRVLAFNNSHHLGNKSIKYLGRFFQLTYLSIASRGITDLPEQIGGLQNLLTLDIRGSSVEKLPSTIGCLKNLVRLLVNEAVKLPNEVGDLQALQQLSFAGNYNSIVFVEQLKRLANLRAISIRLHDSARLGHHDMARYMEALKSSLAVMDKQGIQSLEISCFDSVIGEKLMDLLCYSPCLQRLVIHGCCIGLLSKQMTLLVNLRHLEIWVRNIKQDDLCVLGSIPTLLFFREQCLSSDGSLEFRAHESDCKMGFEFSLKHLASLEHLKVTIFCHVATRSRVEAAEASVRNAASAHPGCPIFEINRCGEQNMVDDKVDKEEILKDIDAHEVVRRDMNN

SEQ ID NO: 188276 - protein, 660 aa, Oryza sativa
  Clone ID: PAT_MRT4530_84897C.1.pep
MLTRYLVIVDDIWSAKAWEVVKCALPENNLCSRVISTTRNADVATSCCSCLAGYIHNMQPLTEQDSQKLFFKRIFGDKSACPPYLEQVSHGIISKCHGLPLALISIASLLAGKSRLKEQWEQVYNSIGFAFSQQGIRDILLLSYYDLPIHLKTCLRYLSVFPEDYEIDREELIWRWIAEGFISEVKGQTLDQVAENYFNDLVNRSMIHPVDIKYDGRADACKLHDMVLDLIISLSTQDNFTTIVEGEQYKCPPNKIRRLSIHSKCLEDEVMQEIMTNCSQVRSISFYGLQDQEISLLPTLNSLRLLAFENYWHRHGNKNIKYLGRFFQLTYLKIKSITELPEQIGDLRNLLTLDIRSSRVEKLPSTIGCLKNLVRLLVDYNVELPNEIGDLQALQQLSRASVVFVEQLKRLTNLRAIDIDLRGSEQLGDHDTARYMEALKSSLAVMGKLQILQISYGNDTVIGEKLMDLLCYSPCVRKLVIDNCIFSRLSKQLGLLVNLRHLEIGVRNIKQDDLCVLGSIPTLLFVRLFVKNEPDERLAIGSHQFRCLKQFIFKNHGGGLEMLFMQEAMPELRWLSLEFRARLTDCKMGFEFDFKHLASLEHLEVSINCHFATWSGVEAAEAAVRNAASAHPGCPTVEINRVWESYMVDNEQGGGVTYDQ

SEQ ID NO: 188277 - protein, 209 aa, Oryza sativa
  Clone ID: PAT_MRT4530_84898C.1.pep
MEADPAPSSTPPPSSPAPAASPSRHPPGEEGGGAERVEVEEYVDPPSPDCCGGADPDHAPPPSPKGEEPVVSAEEEQAAVAGGEGEALRSFLEEFGDQGDDSLVPSPKLKQINTPDRLAALRFLGGKYNSLLERYKQQVAKCAEECAPRYDGLKKKYADECAERRRLYNELIELRGNIRVFCRCRPLSTAEISNGCSSIVQIDPSHETE

SEQ ID NO: 188278 - protein, 80 aa, Oryza sativa
  Clone ID: PAT_MRT4530_84899C.1.pep
DATSAKPPTYTVMGPPLNGLCELRGTHFWSFWSGVGIRSNREIRFGLSVFLKFRSSKTQDRSVQKKMKTEHFGSSVRSRS

SEQ ID NO: 188279 - protein, 785 aa, Oryza sativa
  Clone ID: PAT_MRT4530_8489C.1.pep
MPPPPPFPSLDAFYLHLLRACTSLRHAAAVHAHIARAHPAASLFLRNTLLAAYCRLGGPLPARRLLDEMPRRNAVSFNLLIDAYSREGLAPLSLETLARARRAGVDVDRFSYAAALAACSRAGHLRAGRAVHALAILDGLSSGVFVSNSLVSMYSKCGEMGEARRVFDVAEERDDVSWNSLVSGYVRAGAREEMVRVFAMMRRGGMGLNSFALGSVIKCCSGRGDGTMDIAEAVHGCVIKAGLDSDVFLVSAMIDMYAKKGALVEAAALFRSVQEPNVVMFNTMIAGFCRTETVIGKEVASEALTLYSEVQSRGMQPTEFTFSSVLRACNLAGYLEFGKQIHGQVIKYTFQEDDFIGSALIDLYFNSGCMEDGFRCFRSSPKHDIVTWTAMVSGCVQNELHEKALSLFHESLGAGLKPDLFTISSVMNACASLAVARAGEQIQCFATKSGFDRFTVMGNSCVHMYARSGDVDAATRRFQEMESHDVVSWSAVISCHAQHGCARDALHFFDEMVDAKVVPNEITFLGVLTACSHGGLVDEGLRYYETMTKDYGLSPTIKHCTCVVDLLGRAGRLADAEAFISNSIFHADPVIWRSLLASCRIHRDLERGQLVANRIMELEPTSSASYVILYNMYLDAGELSLASKTRDLMKQRGVKKEPGLSWIELKCGVHSFVAGDKSHPESSAIYTKLEEMLSRIEKLATTDTEISKREQNLMNCHSEKLAVALGMIHLPQSAPIRVMKNLRVCRDCHSTMKLISKSENREIILRDPIRFHHFRDGSCSCADYW

SEQ ID NO: 188280 - protein, 66 aa, Oryza sativa
  Clone ID: PAT_MRT4530_848C.1.pep
QRIKNWSVYSLLWMYVYQCIQYPYRNEKAMKKNEKKKVCFSPSDHTSKTPNWTSDYRSLLKTNKDS

SEQ ID NO: 188281 - protein, 855 aa, Oryza sativa
  Clone ID: PAT_MRT4530_84900C.1.pep
MEADPAPSSTPPPSSPAPAASPSRHPPGEEGGGAERVEVEEYVDPPSPDCCGGADPDHAPPPSPKGEEPVVSAEEEQAAVAGGEGEALRSFLEEFGDQGDDSLVPSPKLKQINTPDRLAALRFLGTPCTMKYTFYLAHGGGKYNSLLERYKQQVAKCAEECAPRYDGLKKKYADECAERRRLYNELIELRGNIRVFCRCRPLSTAEISNGCSSIVQIDPSHETELQFVPSDKDRKAFKFDHVFGPSDNQETVFAESLPVVRSVMDGFNVCIFAYGQTGTGKTFTMEGIPEDRGVNYRALEELFRLSEERSSSVAYTFAVSILEVYNEKIRDLLDESSEQTGRKLDIKQTADGTQEVAGLIEAPIYTIDGVWEKLKVGAKNRSVGATSANELSSRSHSLVKVTVRSEHLVTGQKWRSHIWLVDLAGSERVNKTEVEGDRLKESQFINKSLSALGDVISALASKNAHIPYRNSKLTHLLQSSLGGDCKTLMFVQISPSSADSGETLCSLNFASRVRAIDHGPARKQADPAETFKLKQMTEKIRHEEKENAKLLESLQLTQLKYASRENVIKTLQEKIREAEQTSKTYQQRVRELENELANEKKAARDTARSTKPPLAPMRQRPPLGRIGNHIPPKAPLRLRLSKAPTIQNKENIPVMLNKGSSGADTSKAVAGKARRVSLTPVIRHIPLQPKRRSSLAVLPTQREQLSIFPDKRSVSRLSHIQMPRRSIATFNSIPATPLAAAAHKQVDGTPEARQLRRIEFSSSKFRSPPALARFNSRNNALSPQQKLRLASGSGNASKICFSVQKRVILGSPAPVKSSLLSGTGIFNPALREKMMAAKIGNAQRVFNTNRRKSVL

SEQ ID NO: 188282 - protein, 409 aa, Oryza sativa
  Clone ID: PAT_MRT4530_84901C.1.pep
MVEMQPESYFPILSRCQRIHTVLPLLGKGDGDLGAIATVPQLLSLSMGRIRPAAVLATIWLGQRAAWTRQEGWESLQPAVATDLVIVVSQRRYRYLPRHCSKYCHRGAVLLLQPSRVTDCFIARGHRDHHRVHKEKEHLGLPIVLVASCQNAVVVIFPKPPSALRFCHRAVIRCAPPFSCRAPHHHLISNMFVGWLWRHGGEVRHGGVCRGPHPGVVEDVAEKHSDERTRGTGGRPWVCCPIRNRPWRWSFGELLGRADGEIDPDFASASTSNSSPALLPPPPPRLRPHDVASSAAPGHLENPSTDTLASTPEVHPTQRNLASLHTPPHPPAPVTATRAAAGRALYPTPRHPLRPLPRHSYPTTRHPAASQEEEEARKPAVSAVTITALASSSAATTTRRHASDVGRRG

SEQ ID NO: 188283 - protein, 62 aa, Oryza sativa
  Clone ID: PAT_MRT4530_84902C.1.pep
NQTERERERERERERERRHMFTPTLRTTHTEEEVGKEWVRCIWHQRSYAHEQMRRQAHHVEI

SEQ ID NO: 188284 - protein, 173 aa, Oryza sativa
  unsure (1)..(173): unsure at all Xaa locations
  Clone ID: PAT_MRT4530_84903C.1.pep
MRLTKTNTSTRTAGAEVVGSGGLGRSHRGERLLACRPTGREQTPGRRPADRSVRRRPRPRLRMPXDERRVEAFHQRFGTGATEMPTCLAPLAAALLEMEMEDIEDVLGLARLTGGEAPSGLRLPLAAVAGPLAHATWRTLPLPIRRRRARVLLPPPPLRWSPCACTLPPPAAA

SEQ ID NO: 188285 - protein, 239 aa, Oryza sativa
  unsure (1)..(239): unsure at all Xaa locations
  Clone ID: PAT_MRT4530_84904C.1.pep
VKKKRRSEWKKIDYYKRQKKVVKKKRXDLIPLKKKKEKKSDSFKGEKNPKKTSKKVCPIPLKKWRKKWFVKNKKLVXYKIKNAREKKNGKGETKKKKQKRTFNKKXKKKAREKMIVRKNMQKTHEKXKSKKKGRKIWFSSSLKKEKKHARKKLLERNAPFLKNSLRKSRKKKNTKKSYPRSLRIKKRKKEKKRKEKSRKKKKTQSRQVKEETGKTGWEKEKKNRRDKHSRSLVSSFLKL

SEQ ID NO: 188286 - protein, 100 aa, Oryza sativa
  unsure (1)..(100): unsure at all Xaa locations
  Clone ID: PAT_MRT4530_84905C.1.pep
SPLPWKAHDPPTSSVTVAPTQHHRLAPPSSPSPVAPRYRIRYHRPPHNPVAPLCPHHXTGPPPATNSTTSAAASPPCHPPVPPPPMAIPLRSTNSSFPFP

SEQ ID NO: 188287 - protein, 71 aa, Oryza sativa
  unsure (1)..(71): unsure at all Xaa locations
  Clone ID: PAT_MRT4530_84906C.1.pep
LRLWSQVVLLAYPLCRLCRPRLLRCPPPCPSSGXXRTAXLLLFFPLSFQANKGREKKRRKRWIASERGEAG

SEQ ID NO: 188288 - protein, 32 aa, Oryza sativa
  Clone ID: PAT_MRT4530_84907C.1.pep
ASICVVKSTVRTTISARTSAYTWAILMDKLAH

SEQ ID NO: 188289 - protein, 39 aa, Oryza sativa
  Clone ID: PAT_MRT4530_84908C.1.pep
GEAYLALRDPTQRQAYHSYGQSGFSTGAMIDPAAIIAML

SEQ ID NO: 188290 - protein, 165 aa, Oryza sativa
  unsure (1)..(165): unsure at all Xaa locations
  Clone ID: PAT_MRT4530_84909C.1.pep
MCSRGENGSEFFRIPDLFSETESAGRNFFGISRKRKYFFGNGIEYDNSSFRRNSESASRRLSRARXAGRRLVALPLSLIFAAATTDDDADDAGHWPHRRRRPQHHTADAGHSHRTDDAAADADDAGHXPHRRRRRRLALQAAAASSPVAAAPRSAPAAARADRRL

SEQ ID NO: 188291 - protein, 368 aa, Oryza sativa
  unsure (1)..(368): unsure at all Xaa locations
  Clone ID: PAT_MRT4530_8490C.1.pep
APPPGYRRPPPSPARPPPPLPSSPSPSXPLVQPPRPDPLQPQLXRPLPSPPPXPSSSLSLRPSSPPPPAAFVVPEVVVTAGEVVIAAPEPDPPCPSSPPSSSSSPRGRGPAPDPRGRRAARPWIRSGGGWSSPYPXGRPPPPPTRAASRACHAPPPEPRAALERSPPTPPPPGXRRGGETLPPMNPSPPSXPPPPHRRRPPPSPPPMHPPPPAXAATSVPPPASTPSAVAPAXPPPQLPGEESIPRXVPPTEERSPAASSSSAPXPPPPRAHSFPRFLPHNPHPPRFPSPSPPLHLPSPPPPPPRXPPGAAPXPSPRAGGSPDPLPPPHPRLRSPWRPVTPPQRLPSPSSHRSSMELRNRYRWLSRRR

SEQ ID NO: 188292 - protein, 368 aa, Oryza sativa
  Clone ID: PAT_MRT4530_84910C.1.pep
MMMGGQQSALNQLVSFLLGVSAAAVLIFFFSSAGGGWSTTTDLSSWANGTVAATAKETNLTSTAAHVEEKANLTNSQAAAAEAAKEEEEKELEKLLAAVADEHKNIIMTSVNEAWAAPGSLLDLFLEGFRAGEGIARFVDHLLIVALDDGAFRRCRDVHPHCYRLAVAGRNFTDEKVFMSEDYLDLVWSKVKLQQRILELGYNFLFTDVDILWFRDPFEQMSMAAHMVTSSDFFVGGAYNPANFPNTGFLYVRSSRRAVGVMEAWRAARASYPGRHEQQVLNEIKRELVERRGVRIQFLDTAHVAGFCSNTRDFATLYTMHANCCVGLGAKLHDLRNLLEEWRAYRRMPDEQRRQGPVRWKVPGICIH

SEQ ID NO: 188293 - protein, 268 aa, Oryza sativa
  Clone ID: PAT_MRT4530_84911C.1.pep
MGLLSNRVERSEIRPGDHIYTWRAVYAYSHHGIYVGGSKVVHFTRKKEAEGSDSSNSTSSLLLEPSSECPTFPDCGFQLPDSGVVLTCLDCFLRNGSLYCFEYGVPSAVFLAKLRGGTCTIAQSDPSEVVVHRAMYLLQNGFGNYDIFENNCEDFALYCKTGLLPVEEPGIGTSGQASSAIGVPLAALLSTPLKLFAAGPLGMATVTAGMYCAGRYITDIGVRKDVAKIEVENLSSHLGRRLIEDEGSVNVRSEKPKTLLPMKRKRER

SEQ ID NO: 188294 - protein, 44 aa, Oryza sativa
  Clone ID: PAT_MRT4530_84912C.1.pep
MAQRHGRGEGGGEAHQSSGDGNETVMEQDKPLGHGEVIVHCECS

SEQ ID NO: 188295 - protein, 55 aa, Oryza sativa
  Clone ID: PAT_MRT4530_84913C.1.pep
VSTILFKGWILSCQCVVFTLGQIGYFWKLSLFRDEKYIGLSRANILLKKIFVKDP

SEQ ID NO: 188296 - protein, 84 aa, Oryza sativa
  Clone ID: PAT_MRT4530_84914C.1.pep
VLLKSPIYHLKFDVHLFSTDPYLITLSCPSPFITLVGRRIVSGQVFFFLAKSYSCPYTATYHLHPISFCSPLFFIFLEYAEEKH

SEQ ID NO: 188297 - protein, 310 aa, Oryza sativa
  Clone ID: PAT_MRT4530_84915C.1.pep
MRTSRDLLSQRNIMYPRNTRITRCQEVSLQHHRNNITPAAPQPRLATVRDEYPTHRDRDYFMGADTARAVNADITSIIVRLDAGLYLSDAEQRITFDRMQEKMHAVMRVFSCCSAMDAVPPPGPVPPCPRAPSTGVVRPTAGSSHGTAPPRGPTVRFYDDDLHGAPDQEILGSSQLGGAPKAHTQEQPLTYRTLCNYIEWVDTENPQNDRTRPYARSESRSDYLRRKDEHERQIAAEALEWQVNPLGLPTWRERPECRCGDRCQVIRAIQGGAHSLWIDNVNPTYDGQKITESETQVYVKYLFRKILSAK

SEQ ID NO: 188298 - protein, 146 aa, Oryza sativa
  Clone ID: PAT_MRT4530_84916C.1.pep
RPRVFACSKTTSFERKTSRISPPCEEQELAIGSHDSDIEADCAHLQEVLFNYNENIVHRRVVQRGTSRCVSVTPRGRTTSCNEDESLVGKDVILYAVTRNDVPVAKATIVSTNPITTVGGQALGVQYYEVVVNVVLKKDTALPWPF

SEQ ID NO: 188299 - protein, 1248 aa, Oryza sativa
  unsure (1)..(1248): unsure at all Xaa locations
  Clone ID: PAT_MRT4530_84917C.1.pep
MSSKVMFQIVHGEGNLRFGPDGVDLSDFVMTSKGIDRPAERSFQSIYNWLMRGFRIDSEVYTMSVSVVVSHATEGYFWELVPMHSTVAWKRYLEMAFERSWPLVIFVSVHENDRNIAMETEDVEGPSHEGDFVKPSGEDEGNDTGVVQAMGVADEGERISTIVDEMEREDSDNEQTEGDASSDEEGDVMPTDWTNEDFSGLAISEGHHVPWEYKDNEVIEGATYAHKEEMKEAVKHWAVSLMREFRVVKSTNYVYEVRCVKEDCLWRVHAYKGKWKDYWKVSIVTEHQCHLQGVEKYHRNITSAFVASEMYSSVVGNSGFEPRAIISHIEDKFKCTITYAKAWRAKQKVLEMRYGTFEASYDNLQRLLATIAQRNSNTYYDVHTFPSTVDPNKSVLQRAFFSLGACMKAFVHCQPVLCIDGTFLIGKYRGQILTAIGVDGNNQLLTMAFAFVESDNTENWYWFLERVQRKVVCVRPNVCLIHDRHAGMLRAIDYLQNGWDEKGILAKWPDVRSRWSRRGIMRKHAVQECVLKVDGGCSCTCMKPKLRHLPCSHVLAAAAIADDTPELFSCGIDRSHRSYLSAVQGAQLGTFRPRPLRQLLHVDPWHVPWLRAAGLLPLCRLVEARADDRDPARRWDADRSLLAALVDCWRPETHTFHLPCGEMAPTLQDVSYLLGLPLAGDAVGPVDGGADWKEDITERFLPMMRRPDLPPPTALHAYTTVGPTKAWLLQFTVDKFHPDADEYLVQRTLEVYLLCLFGWMMFTSTQRHAVDKGLIHYACAIADVEPENRNYAHVQVRRSYPEFVFEFDRLQPNDVVWEPYTEEAVAMRALLGLSSLCTRDMTYWLTTIPMVFDIYIEPHCPQRVMRQFGVRQVXTRRGQLPATLWAPRVXAVIDEFVPHSEDTYRDYLRWYLPRTRGHVTFTPATPQPRLATIRDEYPTHRDRDYFMGADAAQAVNANITSVLVRLDAGLHLSDVEQRLTFDRMQENMHTVMRVLSCRIAVDAVPLAGPVPPRPRAPSTGVVRPTAVASHGTVTPRGPYLPSGVFVGGSSSSQRSPSPRPDTQPRGIFASGASSSHAGGTGPTAHFYDDDFHGALDQEILGSSQLGGAPEANTQEQPQVTPVQEGRTGRVVPPDHLTYSQGHVRAQGRRDRERMEAPFLERLNWRSDPFTGWFPPWCDRSLCTCGDRCILKSSLMTYRTLCNYIEWVDTEDPQNDGTRPYARSESRSDYLRRKDEHERRIDAEALEWQ

SEQ ID NO: 188300 - protein, 1228 aa, Oryza sativa
  unsure (1)..(1228): unsure at all Xaa locations
  Clone ID: PAT_MRT4530_84918C.1.pep
MSSKVMFQIVHGEGNLRFGPDGVDLSDFVMTSKGIDRPAERSFQSIYNWLMRVFRIDSEVHTMSVSVVVSRATEGYFWELMPMHSTVAWKRYLEMAFERSWPLVIFVSVHENDRNIAMETEDVEGPSHVGDFVEPSGEDEGNDTGVVQAMGVADEGERISTIIDEMEREDSDNDIVTEHQCHLQGVEKYHRNITSAFVASEMYSSVVGNSGFEPRAIISHIEDKFKYTITYAKAWRAKQKVLEMRYGTFEASYDNLQRLLAIIAQRNSNTYYDVHTFPSTVDPNKSVLQRAFFSLGACMKAFVHCRPVLTSKLWNKLDELTSKQTDEQSRRPQAEGDEPPVLLGALHDDPPTMRRRSGSSIRKFSHWIENEPKEKWSLLFDTDGSRYGIMTTNLAEVYNWVMRGVRGLPLVGIVEFILHGTQAYFWDRYKKIGPSMVDNKIIFGSVVTKKEAIFHTWSEEIYGFGISGSNTTQRSQVFFIPDPSKLRVKKGRRRTRRIRNDMDESEAGGRTLRCSKCDQRGRTYKKCLKTAQGPSVEDVGPSGEASDERRPAGEGTTTRRARPRRPRAAAMANDTPELLSRGIDRSHRSYLSAVQGGLRAVGFLPLCRLVEAGADERDPARRWDADRSLLAALADCWRPETHTFHLPCGEMAPTLQDVSYLLGLPLAGDTVGPVDGGAGWQEDITERFLPVMRRPGLPPPTALHAYTTVGPTKAWLLQFTVNQLVELAEMLHSDANEYSVRRALEAYLLWLFGWVMFTNTHGHAVDKGLIHYAWAIVDAEPENLWATERFAIGRLVVDPTAYTIGRSAEWPEDGPTMGTYWCRRGRSYAHVQVXTRRGQLPGTLWAPRVXTPHHSRDRLATVRDEYPTHRDRDYFMGADAARAVNADITSIIVRLDAGLHLSDAEQRITFDRMQEKMRAVMHVFSCRSAMDAIPPPGPVPPRPRAPSTGVVRPIAVSSHGTAPPRGPRLPSGTFVGGSSSSQRSPIPRPDTQTRGIFASGASSSHAGGTGPTGRFYDDDLHGAPDQEILGSSQLGGAPEAHTQEQPLVTPVQEGRAGHAVPPDRLTYSQGHVRAQGRRDRTYRTLCNYIEWVDTENPQNDGTRPYARSESRSDYLRRKDEHERRIAAEALEWQEEVRKCQFVQWIDTVRVTSIGQTITQPETTTQFIQAWMEYERQGNPRRCAFTLWIDNVNPTYDGQKITESETQVEYQREKDHQNAIHVERRGRGR

SEQ ID NO: 188301 - protein, 1227 aa, Oryza sativa
  unsure (1)..(1227): unsure at all Xaa locations
  Clone ID: PAT_MRT4530_84919C.1.pep
MAFERSWPLVIFVSVYENDRYIAMETEDVEGPSHVGDFVEPTGEDEGNDTGVVQAMGVADEGERISTIVGEMDREDSDNEQAEGRLHHPTRKVMVEKYHRNITSAFIASEMYSSVVGNSGFEPRAIINHIEDKFKYTITYANAXRAKQKVLEMXRLLATIAQRGQILTAIGVDGNNQVLPMAFAFVESENTKSWYWFLDRVRRKVVCMRPNVCLIHDCHAGMLRAIDYLQNGWEEKGIPAKWPDVRSRWCMRHMGANFYKQFKNKHLMDLFKRLCSQNQEKKFNELWNKLDELTSKQTDEQSRRPQAEGDEPPVPLGALHDDPPTMRRRSGSSIRKFSHWIENEPKEKWSLLFDTNSSRYGIMTTNLAEVYNWVMRGVQGLPLVGIVEFILHGTQAYFRDRYKKIGPSMVDNKIIFGSVVTKYMEDKIAKAQRHRVVPQGTKVHRYEIMCVDRSRHGIMRKHVVHECVLKADGGCSCTCMKPKLRHLPCSHVLAAAGDCGIRPDVYVSPYFRKEAIFHTWSEEIYGFGISGSYTTQRSQVFFIPDPSKLRVKKGRRQTRRIKNDMDELEAGGRTLRCSKCDQRGHTYKKCPKTAQGPSVEDVGPSGEATMADDTPELLSRGIDRSHRSYLSAVQGAQLGTFRPRPSHQLLRVDPRHVPWLRVAGLLPLCRLVEAGADERDPARRWDADRSLLATLADRWRPETHTFHLPCGEMAPTLQDVSYLLGLPLAGAAVGPVDGGAGWQEDITERFLPVMRRPDLPPPTALHAFVPHSEDTYRDYLRWYLPRTRGRVTFTPAAPQPRLATVRDEYPTHRDRDYFMGADAARAVNADITSITVRLDAGLHLSDAEQRITFDRMQEKIRAVIRVFSCRSAMDAVPPPGPVPPRPRAPSTGVVRPTTGSSHGTALPRGPTARFYDDDFHGAPDHEILGSSQLGGALEAHTQEQPLVTPVQEGRAGRAVPPDRLTYSQGHVRAQGRRDRERMEAPFLERLNWRSDPFAGRFPPWCDRPLCTCGDRCILKSSLMVETRGRRFFQCANLDQTYRKLCNYIEWVDTENPQNDGTRPYARSESRSDYLRRKDEHERRIAAEALEWQNKQLPGGYIVCPNVDDNFVGNPRRCAFTLWIDNVNPTYDGQKITESETQWHIPLLSSPSSLKRGRATMAWPRDARSAAVAGERSLELGAEKLTAAAGERGGAGDEDGAPIPQLPCDASWVEAVEYVVPPVMRTML

SEQ ID NO: 188302 - protein, 264 aa, Oryza sativa
  Clone ID: PAT_MRT4530_8491C.1.pep
MRCLLLLVLALLAAAAADAEPVLRTVTGVPTGVSSGGGGGGGESSDELYCDGWRLSVETGNAGPWTAIPPRCLEFVRAYMEGERYASDSAVAAADSLAFAARALASGGGGARPAWVFDVDETLLTNAPYYAVNGWGSLEFNETSFDEWVDVAKAPALPASLKLYNELQGLGIHIILLTGRSEFQRNATQVNLLFAGYHSWEKLILRQSPDIGKTAVQYKSERRAALEAEGFKILGNSGDQWSDLLGLPMATRSFKLPNPMYFIS

SEQ ID NO: 188303 - protein, 80 aa, Oryza sativa
  Clone ID: PAT_MRT4530_84920C.1.pep
MVANGDAPARGSAAAAASLRRRRTTSSGTGGGGASTMLQFYTDEAAGRKMSPNSVLIMSIGFIAVVALLHVFGKLYRTSA

SEQ ID NO: 188304 - protein, 52 aa, Oryza sativa
  unsure (1)..(52): unsure at all Xaa locations
  Clone ID: PAT_MRT4530_84921C.1.pep
NEPFLPLAKNVKRILVSXGHGDNMGGEGGCFTISXIRDMGRITIGTSILVGV

SEQ ID NO: 188305 - protein, 74 aa, Oryza sativa
  Clone ID: PAT_MRT4530_84922C.1.pep
AHLRQLILTIICVLDMYCNVIIRHWVEKMIGRITQRGVWRNGGIYGLHKGEMGNKRGSTLVGLDEMGWNLSARK

SEQ ID NO: 188306 - protein, 71 aa, Oryza sativa
  Clone ID: PAT_MRT4530_84923C.1.pep
KFLTCIKLFKLCHPLILSTRCPLLRKFWNSMIPHFRSKVKLALLTNILAFLNSRKKVMFLLGHGLYPYREI

SEQ ID NO: 188307 - protein, 439 aa, Oryza sativa
  Clone ID: PAT_MRT4530_84924C.1.pep
MAEHDLTARMAGQMDCHLVFPLLEFLQERALYANKEILEAKLRLLSGTNMVDYAMDIHKSLHDTDEVPDDMVRRRTDVVSRLRALDEATAPIVSFLQNQQLVQELRPDKQYNLHMLQDRFQIGPEQIETLYQYAKFQFDCGNYSDAAVYLYQYRALCTNSERSLSALWGKLAAEILMQNWDVALDELNRLKEIIDSKNFSSPLNQLQNRIWLMHWSIFIFFNHENGRNGIIDLFFQDRYLNAIQTNAPHLLRYLATAVVVNKRRRNMLKELIKVIQQEQHSYKDPITEFLECLYVNYDFDGAQQKLIECEQVILNDPFLGKRIEEGNFVTVPLRDEFLENARLFIFETYCRIHRCIDIGMLSQKLNMSYDEAELWIMNLVRNSKLDAKIDSVSGTLIMTTNHVNIHEQVIESLKNLNMRTFLLAKNIVEPAQAAQQAAR

SEQ ID NO: 188308 - protein, 444 aa, Oryza sativa
  Clone ID: PAT_MRT4530_84925C.1.pep
MAEHDLTARMAAHMNCHLVFPLLEFLQWRPGRVYAVEEILQAKLRLLIQGTNMVDYAMDTHKLLHGDTDDDVVVPVPDDMVERRHEVVTRLGALAAPAAPIVSALKNHHLGPDKEHNIRMLHERFQIGPDQIEALYQYAKFQFDCGNYPDAAENLHRYRALCTSSERSLSAQWGKLSAEILNNNWDVALEELNCLKEMIDSKNSSSPLNQLQNRIWLMHCSIFIFFNHGNGSYGIIDLFFQDKYLNAIQTDAPHLLRYLAAAIVVNRRRRNMLKELVKVIQQEQHSYKDPITEFLECLYVNHDFDGAQQKLIECEEVILNDPFLGKRIEEGNSITVPLRDEFLENARLFIFETYCRIHRSIDIGMLSQKLNMRYDEGELWIMNLVRNSKLDAKIDSVSGTLIMTTNHVNIHEQFIESLKNLNMRTSMLAKNIVEPAQAMQQATR

SEQ ID NO: 188309 - protein, 105 aa, Oryza sativa
  Clone ID: PAT_MRT4530_84926C.1.pep
QKQKKGGGKNPKPTPQKKKRGAPPKEKTRENPTRGGPPPPPISGGGGGKKTTLLKRVGPGNPTKKRVLPKIHWPPHHGRHKHRKKKTDRYLRLPATKEHIGSGAS

SEQ ID NO: 188310 - protein, 596 aa, Oryza sativa
  Clone ID: PAT_MRT4530_84927C.1.pep
MASWEDEPSGGSREPSEPSGCTDLIMPPLRPKSPPELLDRLLLHDEEEEETTSYVASAHPAPIEYGSDDDAGLTRFVDDMYSCVELDDVVDKETVCPAVLFVFPVDPFQTFLFNVGLESIKKINNHIHFLHCMQRVEVGPADVEQGFLKFTPKEISRKWLATYIRRNAEHTEAYKEFVASGYDYAQLLRYPLRLFPKTSYHCIKKSIYCDHHEYLTFTTSETASTIGMNEPNDTLQIFSLKLSSNESYPISVYGIFAVRDELDRLRNYVFNRTRDNPVLIEQDSITLPLCSPCRGMYILSFALFEVDLWVKAESEGGGSDDKQLLSEYAEIENRGLKDPMIYGRIPSDRCLLDVDCMFLLNSVEAVIQVFTKDDSDNPHRVRFTAFSSGFDHEIVLYDDRLCKKGKLFQNVVAVKSKEKLVIRLEFEGSTFRWTFQDGAVAAVSSPDDSVSKLFDVVVQIIQQETKDKLCWKFTNNGICSTKSAYKEVYKREISNAHQLWKARNDLKFQGKIKEPTQVCMEAKAMIKTYTNFLSNDLMQEDLDEEDTNRRMGGAASISTGNGDCQILEVHFLTDSAIIARTLAREETFKKNQGIGA

SEQ ID NO: 188311 - protein, 1238 aa, Oryza sativa
  unsure (1)..(1238): unsure at all Xaa locations
  Clone ID: PAT_MRT4530_84928C.1.pep
MPRRHDALRLLLLVVVVAAADAATEADALLAWKAGLQDGAAALSGWSRAAPVCAWRGVACDAAAGGARVTSLRLRGAGLGGGLDALDFAALPALAELDLNGNNFTGAIPASISRLRSLASLDLGNNGFSDSIPPQLGDLSGLVDLRLYNNNLVGAIPHQLSRLPKVAHFDLGANYLTDEDFAKFSPMPTVTFMSLYLNSFNGSFPEFILKSGNVTYLDLSQNTLFGKIPDTLPEKLPNLRYLNLSINAFSGPIPASLGKLTKLQDLRMAANNLTGGVPEFLGSMPQLRILELGDNQLGGPIPPVLGQLQMLQRLDIKNSGLSSTLPSQLGNLKNLIFFELSLNQLSGGLPPEFAGMRAMRYFGISTNNLTGEIPPVLFTSWPELISFQVQNNSLTGKIPPELGKASKLNILYLFTNKFTGSIPAELGELENLTELDLSVNSLTGPIPSSFGNLKQLTKLALFFNNLTGVIPPEIGNMTALQSLDVNTNSLHGELPATITALRSLQYLAVFDNHMSGTIPADLGKGLALQHVSFTNNSFSGELPRHICDGFALDHLTANYNNFTGALPPCLKNCTALVRVRLEENHFTGDISEAFGVHPKLVYLDVSGNKLTGELSSAWGQCINLTLLHLDGNRISGGIPAAFGSMTSLKDLNLAGNNLTGGIPPVLGNIRVFNLNLSHNSFSGPIPASLSNNSKLQKVDFSGNMLDGTIPVAISKLDALILLDLSKNRLSGEIPSELGNLAQLQILLDLSSNSLSGAIPPNLEKLITLQRLNLSHNELSGSIPAGFSRMSSLESVDFSYNRLTGSIPSGNVFQNASASAYVGNSGLCGDVQGLTPCDISSTGSSSGHHKRVVIATVVSVVGVVLLLAVVTCIILLCRRRPRELTYVRALRFFELVTGTIYQAVFQKELAFEYLXPLTCHGMSFQGVIPASISNLSCLRCVKSLKHPLIGEAYPQXTSSDSLWIPQFIASFGPLWLPFDNSXRHLDWMREMKIIKNLIYKEAMQVAEDVCTKYSSDATQQPNNMPLLLFLDKKKKKSTNWTSVAGSYGYMAPGKNERKKLRSDLFKIVLHIIVIHESTEVITICRTLKDCHWEKELLKFRQVRHRTINTYRLRLFLAEFAYTMRVTEKCDVYSFGVVALEVMMGKHPGDLLTSLPAISSSEEDDLLLKDILDQRLDAPTGQLAEEVVFIVRIALGCTRVNPESRPSMRSVAQEISAHTQAYLSEPFKLITISKLTDYQK

SEQ ID NO: 188312 - protein, 84 aa, Oryza sativa
  Clone ID: PAT_MRT4530_84929C.1.pep
MAQEEATYFSFKGRSKTCCVVHLFGGSYVKGPVIDPFRSPPKQDTDEKLLLEKESADNEDENAIEDGNDDDRLSWSGGRGGRGR

SEQ ID NO: 188313 - protein, 401 aa, Oryza sativa
  Clone ID: PAT_MRT4530_8492C.1.pep
MRRGRKRKRAGKPTCLPPADASFPSIDSLNDDVLEEILVRLPCIASLARAACACARLRAIASSWAFLRRFRTLHPSLLGHFATDADDESVIPTFHPARAQFDGCSDAAVRGGDFFLTRVDANAGWRVQDCRHGRLLFANESDLLVYDPLSRRGVSIRRPSWYPSSHFTHCLLAGYGGDGCPGSFRVVSVEHNGERAARGAVYSSCTGAWRRGRWDYDRVINPKRPSEYSYFPGMQAAGRIYWKHRDTTKLQVFDAGPMRFSYVHLPEGVHPRSKYAVGEAEDGGCCLVVLADAPHGTVFKVWRLRTGKGSWPWAWTWELERRLPACEVIGKVQYPPIRHVCAVVAGVVLICFQNHAGPHRHIAFWLSNMQVEATFRSAGWAYPFLMPWRHSSPLLLPSAKF

SEQ ID NO: 188314 - protein, 117 aa, Oryza sativa
  unsure (1)..(117): unsure at all Xaa locations
  Clone ID: PAT_MRT4530_84930C.1.pep
FWGGGGGGGGGGGGGFGCGGDXGEGRRRRGMGGGGGGGAVGSVFLGAGGLGTWAIGRGLSGGGGGGGGGAGHVEESARGGGRGGWERRRRPFRPAAWSRAPLRVCAAKGGVGVRGWS

SEQ ID NO: 188315 - protein, 53 aa, Oryza sativa
  Clone ID: PAT_MRT4530_84931C.1.pep
DHPHFKKKKNKKMKKKKKKKKKNKKKKKKKKKKKKKKKKKKKKKKKKKKKKNK

SEQ ID NO: 188316 - protein, 98 aa, Oryza sativa
  Clone ID: PAT_MRT4530_84932C.1.pep
VALDWCEPFDTYPRTYDLLHAFSLFSKEQKRCNISSILLEMDRILRPGGRAYIRDLKQVVQDVKEITTAMGWRSIMRDTAEGPYASRKVLMCDKPMVR

SEQ ID NO: 188317 - protein, 84 aa, Oryza sativa
  Clone ID: PAT_MRT4530_84933C.1.pep
MVSSLLSYGGCRCSARDVDGDVAAGHPGGVYAWRCASAVGGAVRMGCRLVSSSVEFGGHLSCRRRGGRGPVWSSASGGGNARMG

SEQ ID NO: 188318 - protein, 57 aa, Oryza sativa
  unsure (1)..(57): unsure at all Xaa locations
  Clone ID: PAT_MRT4530_84934C.1.pep
PRVRPRLRHIDAIAAINATPKXXXQRXHKQTRRSHGYDSLARITKLTSCLPMHGLLH

SEQ ID NO: 188319 - protein, 122 aa, Oryza sativa
  Clone ID: PAT_MRT4530_84935C.1.pep
GGRDAKIHLRTSPASILNDVQIHLRTATESASTSTVSLRHSRSSSGRERERREGPLTVVEGEKSPGAGARGRQRWRRRKLEGEDDRGAPSEDVRPGPATVSILLIAADDGRRGGRGVVRTRG

SEQ ID NO: 188320 - protein, 136 aa, Oryza sativa
  unsure (1)..(136): unsure at all Xaa locations
  Clone ID: PAT_MRT4530_84936C.1.pep
MGXMXTIXXLCLXXLXXXQXXWXNXXXGGXPLXXXXGFRGDQDXXXQWXFEHXTXLEATHQQRXEAGFTEYYNIEGXNEXXXAGGSXRGLXXXSXXLXLPMDXNGXKXXYXXQGGGVFGMALXGLXETFSVKLFSF

SEQ ID NO: 188321 - protein, 799 aa, Oryza sativa
  Clone ID: PAT_MRT4530_84937C.1.pep
MTLIPTTSEIGELIAKIKSKTVPTDEIKTPDLSLPVEIQDEIIVREAGLPNQATPHHRHHHLQTNLPNDVNIAGYLLPQEADAGHSRPNSEMCGGPRSSNQGTYKRHAIEDDLHALTQNQGESLRDYIRHFNECRNTIPEITDASVIHAFKSGVRDRYTTQELATRRITSARKLFEIIDRSTHANDALRCKEGKSKTGEEKRSSNKDAPKSSKKRSRKNGKRKPSGEVLAAERTEIRTRPKTGHTRTARQTSQRWLHRGGSPPRVARQSNNDQHGQGTLGSQLGKNVEAYVDDIVIKTKTGDSLIDNLRETFDNLRRYRMKLNPEKCTFGVPSGKLLGFLVSGRGIESNPEKIKAIENMKSPTRLKEKQDKFKWTQEAENTFIALKCYLSNPHVLVAPQINEELFLYIAATPYPVSTVIVVEREKVQHPVYCVSEALHDAKTRYPHIQKLLYAMVMTSRKLRHYFQAHKVTVVSSFPFGEVVRNKDVVDCFTKWVVELSQFDVHFVPRTAIKSQVLADFVADWTIPDDRPASQMDNKTWTMAFDGALNSQGAGAGFILTSPSGDQFNHAIHLNFRATNNTAEYEGLLAGIRAAAALDAKRLIVKGDSELVANQVHKEYKCSNPEFAKYLAKVQKHERRFDGIKPSVKDTHNESTTANTDNPPGAAEVTCVNANIETTDDWRIPLINILESDELPDDDMEAEKLSRQAKIYCMIGRDLYKKAPNGILLKCVSSDDGQAHLLDIHEGICGSHAGGRTLVGKALKDACDIVQRCEPCQFFSKHTKLPAQALQTIPLTWPFSC

SEQ ID NO: 188322 - protein, 709 aa, Oryza sativa
  unsure (1)..(709): unsure at all Xaa locations
  Clone ID: PAT_MRT4530_84938C.1.pep
MTTSDRFVGYVEANPNEPFVLHLLEDYESYSESPRDVNVVDNTETSASTAARTLTQQLRTLDAILSESPFDPVTNPDVNQWAMRLRETMTNLNVAFAEAAVNPEQHEDGGPTAGDANGENPNGTRPSGDHSPRGRRDPTPPRPANRDLRDHLDYRRRDRRDRDNNRCRSPSRRGDNTAAQRHRHHTPPRQRRDDSRGGAPNEDQDRRAHSGHRNDANNDNRRDQGANRRDQEQNCGNRRDRNSRSPALGRDRGRDHRSRSRAPEPSNPSSSSSSSSDQPPRLRQHRGPPFAIRHRCRAFTLELRDVRWPEKFRPGAIEKYDVSTDPKEFLQVYSTILYAASADNNMLANYLPAALKGSTRSWLVHLPSRSISSSEDLWQQFVANFQGTYKRHAIEDDLHALTQNQGESSRDYIRRFNECKNMIPEITDASVIRAFKSGVRDRYTTQELATRRITSAQKLFEIIDRCAHADDALRREEGKSKTSEEKRSSNKDAPESSKKRSRKSGKRKPSGEVLAAEQTDMVEQCSVXKRSLDIVLLKMPGPKGTITIQGNAKLAVQCDKRSLDMVEHTPNPPTTTEXPRKYRMKLNPEKCTFGVSSGRLLGFLVSGQGIEANPEKVKAIENMKLPTRLKEVQRLMGCMASLSRFVARMGEQGQAFFAVLKKQEKFKWTQAAKNAFIMLKRYLSNPXVLGSPQINEELFLYIAATPYSV

SEQ ID NO: 188323 - protein, 346 aa, Oryza sativa
  unsure (1)..(346): unsure at all Xaa locations
  Clone ID: PAT_MRT4530_84939C.1.pep
MWRPAPARAPRVLSTTSSTGAASSGLSEPLPPGGAVVLGSSTSAKSSRTPSRGSSMGGSLAVTRTRRASIASGGTRARAIRRVVSPANSRLRGNRTEEGRGALPLPRPRPSTGSEAPAPIPIRFISRNGGGVERRGGEEGVLGVARKREEEASNGGGGAAADFLQKRPCARVNTGDSSSHSPTTSALPFPAPPPPSPPAPSLPLVATSTSTLPTSHDLSSRRAATRPTPARRVARSRSPPSAERTTRSXSPADRGGEGMADGAGTGRSGGRGEDRDEQARARARRPGSPRHPRXKHTQARPRTRHEFSSRRVPAPIGANPADHLGWRRRRARHPTRTDFLPSSEAR

SEQ ID NO: 188324 - protein, 51 aa, Oryza sativa
  Clone ID: PAT_MRT4530_8493C.1.pep
SFKGRTDLKFYLLPQNSRLIQHRGHNQIYIYELYKFIMLLSLRYLILITLN

SEQ ID NO: 188325 - protein, 760 aa, Oryza sativa
  Clone ID: PAT_MRT4530_84940C.1.pep
MASAQVSSSSAAAGAASSSSSRKKDLHAGKKLLAEYRKKKNKAAKKAAETADQATAPVPDTLENPPPNATSTNSGDKLVSDVDVNTTSTSSVPPVYENGPTSYSRGDEPLSNGPAPVNVPVSVSNPAPSHDVSSVGGSKIYGNLSFSDLVNGHNEDWRGDAARKREEHSPDKDVTLKSKLSAFGNSDEVSHSSDEVLLSQGRNPVLREVSDTEQSSSYSSGSLFGKLEGTQSQGYSANNDIFGRFRATSKDSSQADGLAYASSREYGSAFNNSWNTSNSTPVCFDKQDPFMSSGYPTTYNRSRPSFLDSIGVQRAPTTEVPYVEPAKASKPFGNSNSESSFFQPPNQQSAGSNDVDGSLKSGRQEYNNEKGSYGNSIRTDSFPSKDERNLHHSTQMFQNFTIPGKDDDFAALEQLIEDLTKEKFALQRTLEKSQELAQTLATDNSALTDKFNQQAQVISNLTSDMERLQNEIQAQLLALESVRTEYANAQLECNAADERAKVLAAEVILLEDKALRLRSSELKLEKEIEGLSSEISSYRRKVSSLEKERQHLQSTVEALQEEKKLLHSKLRNTSVTEKVNIIEKPSADKRDASTATEDLDTGESSSSETLTSAIDTVEDGETSVSRSNNVADFTYLEEVSSSIPHDQLRMIDNINSLMSELAVEREELLRALRIESSNCSKLKELNKDLTQKLEIQTHRLELLSSQRMANENVLPKPIDTRSINDATLYADEGDEVVERVLGWIMKLFPGGPKRRTSKLL

SEQ ID NO: 188326 - protein, 67 aa, Oryza sativa
  Clone ID: PAT_MRT4530_84941C.1.pep
IVLFWDGRFPPEHLTRPLVQTKYIFRGGKQKRGGFSSALKRASFTRGGGLRAPAYNGSKGYSPGIGF

SEQ ID NO: 188327 - protein, 56 aa, Oryza sativa
  Clone ID: PAT_MRT4530_84942C.1.pep
LARVGMVGAVGSRHDDGGGSGVVRVRGAVAGWCGTSGVCCGRRSGWSLGGGMGGIL

SEQ ID NO: 188328 - protein, 79 aa, Oryza sativa
  Clone ID: PAT_MRT4530_84943C.1.pep
RLVPPPLAHRQLVLSPTRPAPPCPPQATAAISSSAGAPPLASPQLGRRWLVHQAAGSPSSPIDSRRFPVAATSIFDRLR

SEQ ID NO: 188329 - protein, 66 aa, Oryza sativa
  Clone ID: PAT_MRT4530_84944C.1.pep
MGTVFSLNQILHVENDNCALKFLCHLCDGKRGEEEADVGQRWRWKRQINLIDGSMSLRETGYYANN

SEQ ID NO: 188330 - protein, 186 aa, Oryza sativa
  Clone ID: PAT_MRT4530_84945C.1.pep
MALASGTSCALPGAARPHLAVSPSPPASSIRFCRGGSRGGRAVVSLRASVPPAAAAATTSGSIAPAISLTEKALKHLNKMRAERNEDLCLRIGVRQGGCSGMSYTMEFEDRSNASPDDSVVEYDGFAIVCDPKSLLFMFGMELDYSDALIGGGFAFQNPNATKTCGCGKSFATGKETESTATACNN

SEQ ID NO: 188331 - protein, 46 aa, Oryza sativa
  unsure (1)..(46): unsure at all Xaa locations
  Clone ID: PAT_MRT4530_84946C.1.pep
GGLATLVFSGXIISAWDNIIKRYSYDKYVWDAVSLDLEVINVCLAQ

SEQ ID NO: 188332 - protein, 451 aa, Oryza sativa
  Clone ID: PAT_MRT4530_84947C.1.pep
NLHQVRRGDASNKREVMDGDRPCRGWCPSYVHATPLHGSCTLLWLSSMKTFAFPNPSSLNPPSPSGTNNSASKILVITLPTVTVAIVAAISLCIWNVRQIHANLPADTTEDFESVKSGLLSLASLQVATDNFHKSKKIGEGGFGEVYQGLLSGQEVAVKRMAKDSHQGLQELKNELILVAKLHHKNLVRLVGFCLEKGERLLVYEYMPNKSLDTLLFGTKHLVKKDTEQRKRLDWATRFKIIEGTARGLQYLHQDSQKKIVHRDMKASNILLDADMNPKIGDFGLAKLFEQDQTREVTSRIAGTFGYMPPEYVMCGQYSTKSDVFSFGILVIEIVTGQRRNSGPYFSEQNGVDILSIVWRHWEEGTTAEMIDHSLGRNYNEAEVVKCINIGLLCVQQNPVDRPTMADVMVLLNSDATCSLPAPAPRPTSLIDGSSVCVVSYSNYLFSICNP

SEQ ID NO: 188333 - protein, 207 aa, Oryza sativa
  unsure (1)..(207): unsure at all Xaa locations
  Clone ID: PAT_MRT4530_84948C.1.pep
LRETVTNLNTVFAEAAGGPKPNRDGERPTGDAEDENPDGRRTGDRSPPRCDHRSPRREDGDPHRQHRPRSQLRRERDDGRRNISNGNRDRRPRDDRRDDNDRDRKTXPRRQERNNDDRRDRNSQSPHPSRDRGRDHRLRTRAPDPSDPSSSSSSSSSDRPPRRHRGHGPRPXEEFLQVYSTVLYVTGADXNVLANYLPAALKGSARS

SEQ ID NO: 188334 - protein, 378 aa, Oryza sativa
  unsure (1)..(378): unsure at all Xaa locations
  Clone ID: PAT_MRT4530_84949C.1.pep
MENGTSTAPTPGTNPQAAEFHPPCEKSKPTRTTTLKPRTWCPIHKTTKHALEDCPVILHVQAELYTCWERGIQRTSPTSTTYCLIHRSRVHDLTNCRIFLRTLKPAHHRVQQPRVQTPCVAKEPDAAPIPNRFVGFVGANEPSVLHLLEGYESSSQSPRDVNVVDNTETSTSAAVRTPAHQLQNLDAILRKSPFDPVTNPDASRWTERLRETVTNLNTVFAEAAGGPKPNRDGERPTGDAEDENPDGRRTGDRSPPRCDPTPPRHEDGDLREHLNGRRRNRRERNENECRRHRSPRREDGDPHRQHRPRSQLRRERDDGRRNISNGNRDRRPRDDRRDDNDRDRXNSPRRQERNNDDRRDRNSQSPHPSRDRGRDHRL

SEQ ID NO: 188335 - protein, 46 aa, Oryza sativa
  Clone ID: PAT_MRT4530_8494C.1.pep
PPTNINVKKLHQEEKNIYSQDVAEEDMSNESLEGSQKDEDLFLHEK

SEQ ID NO: 188336 - protein, 1425 aa, Oryza sativa
  unsure (1)..(1425): unsure at all Xaa locations
  Clone ID: PAT_MRT4530_84950C.1.pep
MAEQQEDSFDLPLFVEDDDEDAAAAAKQRRREESQKPRRPRPRAPSFLDTPEVKERRARSSALAAKYWEHDPKTGISYYTRACFRDLTTFDLDKETQYGPMRFTDSIINKDHMLTSSLNVLSLKNENIILTGPTRGIVFHGEIFFEINLKIKENEECNDKEFSKGLLEMKVYTRKSMIVSETLESRLSEVELVSASVKEALEGTVEINILSGPEVFHGKITACTTDVPNDIILYDSDVDDATTVESLAPSSNGMVVLRWQGERANKSYSERVKSPVYRVGLHIFKSYLRVKVSHDIKGTPRESQRASHLIANTPTKVYEAGVPGANSLGDLVEFLDYGLIGIANSVGGLGAQGSTSMTSRLPDNSLVTSANQGVSTSTPLVWTQVGSIVVPIYIVTPISTGPIVIGNEKGTATTERNNAPPTIPPTPVENGTSTAPTPGRNPQAAEFHPSCEKSKPTRTTTLKPRTWCPIHKTTKHALEDCPVILHVQAELYACWERGIQRTSPTSTTYCPIHRSRVHDLTNCRVFLRTLKPAHHRVQRPRIQTPCVAKEPDAAPVLDRFVGFVDANKPSVLHLLEGYESSSQSPRDVNVVDNTETSSSAAARTPAHQLRNLDAILREGPFDPVTNLDTSRWAEWLRETVTNLNTAFAEAAGGPEPNRDRERLTGDAEDENPDGRPTGNRSPPRRDPTPPHCEDGDLREHLNGRRRNRRERNENERRQHHISNRNRDRRTRDDRRDDNDRDRDNCPRRQERNNDEXRDRNSKSPHPSRDRGRDHRSRSRAPDPSDPSSSSSSSSSDRPPQRHRDRGPCPVPGNGCRAFTPALHNVRWPEKFXPGSIGKYDGSTDPEEFLQVYSTVFYAAGADDNVLANYLPAALKGSARSWFVHLPPNSICSWEDLWQQFVANFQGTYKRHAIEDDLHALTQNPGESLRDYILRFNECRNTILEITDASVIRAFKSGVRDRYTTQELATRRITXHADDTLRRKEGKSKAGDEKKKSTDKDAPESSKKRSRKSGKRKSSGEVLAAEQVEPSRRSNPQGDDSRKPWCPIHMTSNHALEDCYVIKKELTKQLAIERGKRVRRLQKKPPPXNSNSAFPEYDLHVSHIFATTPGRYPIVLEPTIRNIKVARVLIDGGSSISLLFASTLDAMGIPRSNLTPTDQPLHGITLESSSKPLGKITLHVTFGHAENFXIEQITFDVAEFDTAYNAIIGRTALAMFMAASDYAYXCSKCQDRKGLPGPKGTINILGNAKLVVQCDKRSLDIVEHTPNPPATTENPKKVSKIKKTPKPDGTIKIITLSSANPDKTELALITFLRDNADMFAWQPSDMPGVPREVIEHKLMVXPNAKPVKQKLRXFAPDRKQAIXEELDKLLKAGFIREVIHPEWLANPVMVRKANRKWRLCVDFTDLNKACPKDHFPLPQIDQLADS

SEQ ID NO: 188337 - protein, 90 aa, Oryza sativa
  Clone ID: PAT_MRT4530_84951C.1.pep
MPAAAPRVASAASGSASATRGVRVARDKSGGGKLEERTAVAVAVACLLIRVVGFISYCNVLNSAVFLSGQVKVVVVDPQRLRMAAFEPHR

SEQ ID NO: 188338 - protein, 132 aa, Oryza sativa
  unsure (1)..(132): unsure at all Xaa locations
  Clone ID: PAT_MRT4530_84952C.1.pep
PQKGNXWAVYXNWSLNWDEDTPDKVXSLPYDVVEVLDEYDEDLGISVIPLVXKVAGFRTVFQRNXQDLNAIKKIPKEEMFRFSHEVPFYRMSGEEAPNVPKDSYELDPAAISKELLQEITETVESSKATSEC

SEQ ID NO: 188339 - protein, 57 aa, Oryza sativa
  Clone ID: PAT_MRT4530_84953C.1.pep
CQNNHDCVANYAESIHSKQKSWFRAFFRSYFAKINKNTSQENVYFLFAHLIYMLPCL

SEQ ID NO: 188340 - protein, 93 aa, Oryza sativa
  unsure (1)..(93): unsure at all Xaa locations
  Clone ID: PAT_MRT4530_84954C.1.pep
MAASARDQTTSXCGTAPCRDELVRRDRDSGGRITMRRTVMSAPQSIWYGPDRPKFLGPXSGQTPFHLSGEFPVDFGWDTAVATGLPGDVLLGS

SEQ ID NO: 188341 - protein, 94 aa, Oryza sativa
  unsure (1)..(94): unsure at all Xaa locations
  Clone ID: PAT_MRT4530_84955C.1.pep
MELSLASAKPSPRAAAAAEEAAVASXSLMSMRGRRRREEDNCVGYQILPAGRIRLHHQWCHEGEEGTVYCLRAFNGGTSAAGERTTTRWSDARM

SEQ ID NO: 188342 - protein, 1254 aa, Oryza sativa
  Clone ID: PAT_MRT4530_84956C.1.pep
MGKSSADLSASSESAVLLHGDLDIWITEAKCLPNMDIMSERMRRFFTGYGACGSSCGGTGDNARRAGGGVRPKKIITSDPYVSVCLAGATVAQTRVIPNSENPRWEERFRVEVAHAVSRLEFHVKDNDVFGAQLIGVASLPVDRILSGAPAEGWFPIDGHCSSNPMRPPPELRLSVQYRPIDDNPLYRGGAGAVPNAYFPLRRGGGVTLYQDAHVADGGLPAIQIAGGRAYEHGRCWEDICHSIVEAHHLVYMVGWSIYHPVKLVREPTRALPGETPSTLGELLKKRAREGVRIVILLWDDKTSHDKFLLKTDGVMHTHDEETKKFFRHSGVHCVLVPRYASTKLSIFKQQKCVLVDTQATGNNRKITAFIGGLDLCDGRYDTPEHRLFKDLDTAFNKDFHNPTFPVNSYGPRQPWHDLHCKIEGPAAFDILTNFEQRWRKATKWKVNLKKVASWHHDTLIKINRMSWIVTPAADEANAHVCEEKDPENWHVQVFRSIDSGSVKGFPKIVQEAESQNLVCAKNLKIDKSIHSAYVKAIRSAQHFIYIENQYFIGSSFLWSSHKSAGADNLIPVELALKIASKIKANEQFAVYIVLPMWPEGIPTAAPMQQILFWQGLVEAHPQDYLNFYCLGKREVAAGDSMSQTSLCNDNSTLRSAQKLRRFMIYVHSKGMVVDDEYVIIGSANINQRSMEGCRDTEIAMGAYQPHYKWSADHGQGPPRGQVYGYRMSLWAEHLGAVEECFGRPETGECVRRVREMAEENWRAYVSPEMEETKGHLMCYPLKVDKDGRVRSLPGHDCFPDVGGKVLGTQTSLPNALTTYSARCCRGGDDAFSDDLPSNPIQPKSSLLPSRRRPPPSPAPAARLLEPSAYGRLLLAASRTRALALGKLLHSHMLRAAYRPGLFLRNNLLALYCRCGDMRHARLLFDGMPRRDAVSWNTLIAGYSGLGSCRLALDAFRDARASGDGVDRFTFAAALASCARVGDWRDGRVVHGLAVVSGLARTAFLTNSVIDMYAKCGMIDEVRLLFDRAEERGEASWNLLLSAYVRMGWPEVAVNVLVWMHRSGVKLDSFALGGILKACSELGDSEDVRRMLHSCVVKVGLDLDVFVGSAMVDMYAKNGGLEEAIKNEHFEKALYLFRELLYTRKGTDQFTISIKTGLDQFTVSGNSQIAMYRNIGDLKASKQTFEQISCLDTFSWSAMILSYAVHGYESKALELFEKMKNLGVMMNESASLAALIACSHQGLGDEGLRRAMMA

SEQ ID NO: 188343 - protein, 179 aa, Oryza sativa
  unsure (1)..(179): unsure at all Xaa locations
  Clone ID: PAT_MRT4530_84957C.1.pep
RRYNITNGLHQHGNMPPPXLVHEDGHLASSDRLICKTLYRRHRPRPLRRQRPRHRRRHRSRHLXRQRLHQSGITIVMTATWCGRTNRSGCKMLTITVSSSHHGVNIFFXPSAICGYINYHDHHDYNYYMISYIDERLQQKSLTGIEESQGTTQKGTQAPGGGPSIRDAIDDGELKKMKK

SEQ ID NO: 188344 - protein, 37 aa, Oryza sativa
  Clone ID: PAT_MRT4530_84958C.1.pep
THHTGWPILFICSSQIGMLVHATVTNPLILAVAGVAL

SEQ ID NO: 188345 - protein, 61 aa, Oryza sativa
  Clone ID: PAT_MRT4530_84959C.1.pep
LPIGTRDNNFNKWSPNWEGPFRIHRYVPKNAYLLEGFDAEFYGKALNGKYLKKYYPSVWIN

SEQ ID NO: 188346 - protein, 49 aa, Oryza sativa
  Clone ID: PAT_MRT4530_8495C.1.pep
MKLASTGEPRRVRELRLTRELELGGIDVDEVARGAIAWVGWGCGPQEGG

SEQ ID NO: 188347 - protein, 80 aa, Oryza sativa
  Clone ID: PAT_MRT4530_84960C.1.pep
SRVFFFFFSLSGLVVQKIVGFLKHYHGPGVSLSAAATHRTILQYRVCTLCGGSGDAALHLYRKPDLLVRLVGHTVACTKV

SEQ ID NO: 188348 - protein, 88 aa, Oryza sativa
  Clone ID: PAT_MRT4530_84961C.1.pep
GRRTRKRDCGGDDRIFNTCLKTNSNENPLRGGSDLTLADPPFPYRKPRYRLPTAPTVPDPPTPMRPVAARTGGGMAPRRLMVPTRAAR

SEQ ID NO: 188349 - protein, 69 aa, Oryza sativa
  Clone ID: PAT_MRT4530_84962C.1.pep
HSWTGAHTTTVRTQSRAAPGDRDSTSNIASPNGVAKGGLIRTTECAQERANYNNWVVLMEPHDKKLNED

SEQ ID NO: 188350 - protein, 179 aa, Oryza sativa
  Clone ID: PAT_MRT4530_84963C.1.pep
MQYPSFSPRRTPSIEAKSTATVGKDDGDGFLLFSPTPPLSSPSFLTAIEGLAATVGKNDGKGFLLFSPTPRSSPLSSLLKAVEGASSWGGRRRRATAAATAGKGLGQRGRVEEGSDGDGGCRLCGSDGGGPHPTQRSYDDDWQRRWEGRTQPPLRPHDNDKDEDEDEDNDDKEESRGGF

SEQ ID NO: 188351 - protein, 90 aa, Oryza sativa
  unsure (1)..(90): unsure at all Xaa locations
  Clone ID: PAT_MRT4530_84964C.1.pep
RPRAYPPAENTRTXRRLDRRSGARRATXRVERATALAQGXGRVRRSGHXRRXXVRRRRAPEPAAMRRREGFGFARVSSPPTPVKRTKERL

SEQ ID NO: 188352 - protein, 101 aa, Oryza sativa
  Clone ID: PAT_MRT4530_84965C.1.pep
MATSSRGRKGGSGQRDLGNQSSQWRQRRWGAQRIRDKRSKLSSLHIAPLRDAIEAHRHCLAPLPLAVVLLYVYRRRPREIGKRGKPGDPVSEPLPDLGPTL

SEQ ID NO: 188353 - protein, 85 aa, Oryza sativa
  Clone ID: PAT_MRT4530_84966C.1.pep
RIESISKCSTTKIIYTQPYTPMKQEFQDSLFRNMARHHNQAAVKTVPQSSAHTCWRYLSVAAFISQFIYQTELTKAMRSIANSLH

SEQ ID NO: 188354 - protein, 48 aa, Oryza sativa
  Clone ID: PAT_MRT4530_84967C.1.pep
LFFYSILHSANFLCSIFFSFVLVIFLLHAYDLNLMTTPCKSIILSRQV

SEQ ID NO: 188355 - protein, 101 aa, Oryza sativa
  Clone ID: PAT_MRT4530_84968C.1.pep
ARGHLLPLQAPCGGSAAVKLRDAVAAAMTAFSGGGAGKRELVSSERGRRIFAGENRVIARRFKMVHSKRDFFFSRTPAFFLFFFYLLFSSFFSFARGGGSS

SEQ ID NO: 188356 - protein, 311 aa, Oryza sativa
  Clone ID: PAT_MRT4530_84969C.1.pep
MDMTLGVKMPLFLERNKSISHPSSFILDRIASSNRKIGYNTSPIFENRCKSTHSVVSEVVFIGGAHMTMRRGRIILGPEKVHLRSLILSSDYKIIPQSQNQIYGIPQLIKPGHFGSLDGFDPVLSDVAAESAWVPYVSRPAGARWERGRAADAGAATANAGEGETVSRPTATTTPSIPSSLLRPLALISSSPFSAASSRSPHPPTPSSANAVHSYPPPPHPHNLASGWLKMKWLGSDAPRSSRAAVLSSRSGFELDCASSCVRLVIPLPRSLPLPPRSRVINYMPIARGEKRSVEAVKVTDEMKAFKAYAN

SEQ ID NO: 188357 - protein, 98 aa, Oryza sativa
  Clone ID: PAT_MRT4530_8496C.1.pep
NSCKIHTFRTGLRYQPICWQGIYFFSLNKLTYARQTSVFHAWNSASDVKLPFLLLSKRHCLDEIIVESLLFHNNLQPMHEHFPKLGARRQVDLWPFLF

SEQ ID NO: 188358 - protein, 380 aa, Oryza sativa
  Clone ID: PAT_MRT4530_84970C.1.pep
HIVDNSFSIGRFPIKDELSYQRIKQLFAWPGLRADVVRFVQSCDICQHAKSEHVRYPGFLQPLPVPDQSWPVVSLDFIEGLPRSASFNCILVVVDKFSNRWLTLAEYWYNTSFHSSLGTTPFEVLYGHKPRYFGLTAAAACPSSDLANWLTERDHMLSLIREHLQRAQLRMKSQADAKRSEREFAVGDWVYMKLQPFVQQSVVTRTNRKLSFRFYGPFQVLARVGQVAYRLALPASSLIHSVVHVSQLKKALAPTETVQSQLPVFLADQDASPTPLRILDRRFVRKGAKLVEFVQVTWSGPDAEVITWENAQELRHRFPSAEAWGQASSQWGENVTASSSSSPVPHQTSDAASPSDQDGLRKSHCERRPNAAYNRSEWTQ

SEQ ID NO: 188359 - protein, 57 aa, Oryza sativa
  Clone ID: PAT_MRT4530_84971C.1.pep
FPFRLQRLRACCFTFYAILASHVPKSNRFFKRLSLICSLGSKSCYLIPSLKSCGKQQ

SEQ ID NO: 188360 - protein, 92 aa, Oryza sativa
  Clone ID: PAT_MRT4530_84972C.1.pep
SPLTPHFLPSPILFPSQHLPFFLHCLYDLQPHASPVPPYPPLPLNSNHHSAIVPFTPSFPQNLHLPYPFLTHAPLFTRPCSTFSFCVLSNPT

SEQ ID NO: 188361 - protein, 2548 aa, Oryza sativa
  Clone ID: PAT_MRT4530_84973C.1.pep
MVPAGGGGGELERRVMAALKASEARGDQPLVWAVEVARVVAGEGAGLPSADLAGILVSNLCFAHNSPSLWKLVGHAVASRLLCPLHVLALLTPRVLPQRRAQPEAYRLYLELLRSNVTSSFLSMEAGPNRDKITKSIDDALQLSKIYGFSGIDNGHVIIFFMMFVITKLIDCTLEDCGFPSGLTEEQGSIYAIEGPQDMDLDVKGVSTEKQNEHRAQLRRKNTVMALDVLIMMVADRKIQSFLRLIFLNMVSNTAYQPNNKRLLGVLGNMKYGGSMLGQFTGAGRAACWVIFDIYVENAIDGKHLSAISAIEVLKEMTKTLQAINEASWQETFKALWISALRLVQRAREPLEGPIPHLDSRLCMLLALIPLSIGAILKEETDVHGAQGSKSLPKTSGLVSSLQDLIQYSGLLVPPSSVVNAANAAASKAAAFKANYKSGGGNPGMMGQNDSSTKTVGNMLHLIVEACISRNLIDTSSYLWPGYVVSSGHLKDATLPQESPWLNFMQGAPLSGPLIDALIATPASSTTELDRLYHIALNGSEEEKSAAAKILCGASFVCGWNIQEYVVRMVVKLLSPPLPSNSSTQGSMSHYLAQMSTLNALLLGISYGDAIHIISLYGMVPDVAAALMPICEVFGSIPPPSNHKPAIVGEISVYSVFSCAFLCLLRLWKFYKPPQEYCLAGRGGSVRLELTLDYLLLMRNNHIDFANSSASSRNSSNNIGPLNEVPAQPLYIDSFPKLRAWYFQNQACIASTLSGLCNKNPVHQVANKILSMICRKMNKPVVSSGNLSSTSSSSVSGSSVSTPDDYQRPTVPAWEFLEAVPFVLEAVLTACAHGRFSSRDLTTSLRDLVDFLPASIAAIVSYFLAEITRGIWKMVPMNGTEWPSPGASLHSIEAEIKEILASAGIQIPSCYPRGVPPMLPLPMAALVSLTITFKLDKSSEYIHAISGQALENCAGGSSWPSMPIIAALWTQKVRRWHDFIILSCLRSPFGRDKDAVAQLIQSCFSSFLRSSCSGSDFTANRGVGALMGDAITGQGLQLPMAPGFIYLRTCRTFHDTYFVSEVILKQVIEWADKLANGFSSSGPPQLKSGRTPLSSAACMAHQVAMLGGGLLCVAGGPLLVQVLYEETLPTLLLSAREESMKDPGPVSSTLQGYAMANMLFFCGSLLWGAERTSPVMKLSFLSRRPRVVGNHMDFMAGVLDGHILLGCDHGTWKAYVSRFVFLVVKFVPSWLRDIKLDTLKKIASGLRSWNEHDLALALLERGGPQAISTGSIVNPKSYRGLARQRIQLELSDLSMYISTYFGFSGFRSYQREIIQKVLEGRDCLVVMATGSGKSICYQIPPLVTKKTAVVVSPLLSLMQDQVMSLKQHGVKSEYLGSTQTDISVSGQAEKGAFDVLYMTPEKAVSLPSRFWSNLQAAGICLLAVDEAHCISEWGHDFRTEYKQLHMLRDLLVGVPFVALTATATQRVRGDIATSLTLRIPHIVVGSFDRPNLFYGVKSCNRSMAFINELVKDVSKNCTVHEALVAAGIKSSIYHGRMGNKAREESHRSFVRDEVLVMVATIAFGMGIDKPDVRCVIHYGCPKSLESYYQESGRCGRDGLPSVCWLYYQRSDFMKSDFYCAEAKSQTHRKAIMESFMAAQKYCLLATCHRKFLLQYFGEDRTTDCGNCENCTRTKNERDLSKESFLLLSCIKSCGGRWGLNLPIDVLRGSRVKKIVENNFDKLPLHGRGKDYPPNWWKALGGLLLAHGTIISEYRFVNAVLLINGYNYLKETVHDTFRSISVSPNGYKFLSTADKGDGASLFLQLTAEMIELEGHGGSQCKEEGLNPLGPSESEKISEDELKIYQVLLNVRMQLAQDIGTAPYAICGDQTLRNFAKFRPSTIARLANIDGVNQHFISHYGSIFIQNITQLAKELNLPVDDLSAVESIPAAPKPTQNNLPRSLGGAKFCSWELWQKMKFSFQKVAIHLHYRRAVPIKEKTVISYILDAARDGCEMDWSRFCEEVTYEMIQTFLAIEGLGLSDQVFGTVPTDGIQSKTSEAPKTTSNGGEVGADVCDASPLTRRGQTDGSLICGDEPASKLQKIDGQGVNSTAAIGATEDAILELVEGRNGVSLEDVVKHFNGSKRECVVEMLDNLEGNFLVYKKNGCYMIMGYVTTDERRRQEVVLPEFHHVEKADGDGTVNGLNQDAPKKTPKVNSGGLQKHKQTDRHTSRISTKPKVLPSPKVDPSEAVKESTQGTREVSKVRKRLDKGTNTDEVENEKACQLEFGSYCLWSREHKVVMKDSIVKRLKDQLFVARSYYPSIAKLEGQEELTVLMKQNIQDHERVLSVSTVDADLPSFINKKMEQMEQTIARAKSCTVDCRNVDRKLRQILDMTEDEAHFHMKQSAFLYNLGAQTLPKSHHCLSMRLTLEYFTSSSLGSNDSSARKFSAAHGRHYVILSKNILAASVVINSTVNSSKDPKKIIFHILTDAQNFYAMKYWFDKKSYREAAIHVVNYEDIIKEKLTKFNVRHLYLSEEFRVLVGSTEQPAGKTRMEYLTVFRYSHSFLYEQ

SEQ ID NO: 188362 - protein, 439 aa, Oryza sativa
  Clone ID: PAT_MRT4530_84974C.1.pep
MVAGLGEGGRERSDGRRSRANNIVGTTFSLSVRRRRRAEVGEHGKRATGEHGGGSEPDCRHLTAADHTCLLTRCRRHRRVAPRARAAPLGMECGGVVRAWTTSMSRRVTRVARTAEGAPPLPPAARSASAADRPGSSASATRRPGSSASAVGRLPAPPLPPAVWGAPLPLSRPLPGKLRLRRWSPSLPSSLPPAIYRQHSSKLRLLPPLPTRRQYRCRHASELLGLIDPFSGSWDEDLLQQIFWEEDVQVIKTIPVHVELEDTLAWHFDPRGCFSVRSAYKVQKEAERRSRRRGSAGSSNGENETGVSWRKLWKMGIPGKIKHFLWRLSHNSLAMRCNLKRRGWRWIPAAIGATSERGIMKVEFETDSLLLKSALQENSFNLSAMGGVILEIKNVISSRYRVSVGNNFFHTGKIDEFEKKRVERGCESAIILPLTTHSF

SEQ ID NO: 188363 - protein, 100 aa, Oryza sativa
  Clone ID: PAT_MRT4530_84975C.1.pep
LLKIGKGVKLYYIGGEVFAECLSDSAIFVQSPNCNYMYKWHPATVCKIPPGCNLKIFNNQEFANLLTENVTKGFEAVYSLTNMCTIRMSFVKGWGADYRH

SEQ ID NO: 188364 - protein, 423 aa, Oryza sativa
  Clone ID: PAT_MRT4530_84976C.1.pep
MAGSIAASAFLPGSPAAAPPKSVLGERPDSLDVRGIAAKPGSSSSAAALRAGKTRTHAAIPKVNGGSSALADPEHDTMSSSSSSAAPRTFYNQLPDWSMLLAAITTIFLAAEKQWTLLDWKPKRPDMLTDTFGFGRMIHEGLMFRQNFSIRSYEIGADRTASIETLMNHLQETALNHVKSAGLLGDGFGSTPEMSKRDLFWVVSQMQAIVERYPCWGDTVEVDTWVGAHGKNGMRRDWHIRDSVTGHTILKATSKWVMMHKLTRRLARIPDEVRTEIEPYFFEHASIVDEDNQKLPKLPDIEGANVAKYVRTGLTPRWADLDINQHVNNVKYIGWILESAPISILEKHELASIVLDYKRECGRDSVLQSHTTVYTDCNKHSGQTTLHCEHLLSLESGPTIVKARTMWRPKGTRPQESIIPSSS

SEQ ID NO: 188365 - protein, 43 aa, Oryza sativa
  Clone ID: PAT_MRT4530_84977C.1.pep
RTCPPLVSPAPCAKSGSPLSCRCSTSPSGDPKGYRTQGTCVIY

SEQ ID NO: 188366 - protein, 362 aa, Oryza sativa
  unsure (1)..(362): unsure at all Xaa locations
  Clone ID: PAT_MRT4530_84978C.1.pep
MKALILVGGFGTRLRPLTLSFPKPLVDFANKPMILHQIEALKEVGVTEVVLAINYRPEVMLNFLKDFEDKLGITITCSQETEPLGTAGPLALARDKLVDGSGEPFFVLNSDVISEYPFAELIKFHKNHGXGEATIMVTKVDEPSKYGVVVMEEVTGMVEKFVEKPKIFVGNKINAGIYLLNPSVLDRIELKPTSIEKEVFPRIASDAKLFALVLPGFWMDVGQPRDYITGLRLYLDSLRKRSTNRLATGAHIVGNVLVHESAKIGEGCLIGPDVAIGPGCVVEDGVRLSRCTVMRGVHIKKHACISNSIIGWHSTVGQWARIENMTILGEDVHVGDEVYTNGGVVLPHKEIKSSILKPEIVM

SEQ ID NO: 188367 - protein, 257 aa, Oryza sativa
  Clone ID: PAT_MRT4530_84979C.1.pep
MADKTLCEFAAPSADNVATGSQINMADVNFDLKSSLITMAQASPFCGKPKEDANTHLQQFLEICSMHTMKGVIQKIHINVPLLDAMQVPTYARYLKDILNNKRPLPTTEVVKLTEQCNNVILHKLPEKKKDPGCPTIICSIRTHKFDQVLYELGASVSVMPKDVFDKLNFMVLAPTPMHLQLTDSSVRYLAGIAEDVPIKIRDFFIPVDFVVLDMDTKKETPLILGSPFLSTADANIDVGTGSIRFRINGKEEKFEF

SEQ ID NO: 188368 - protein, 974 aa, Oryza sativa
  Clone ID: PAT_MRT4530_8497C.1.pep
MAPRKPNRASAKGPDPGRVDDDSTAFLGVSLVDDVELAKLVRSGALVEGQAFAPGKAVVPKPIDNRTVVFAVFFEAGLRFPCNVLLPEILRLFQVELPQLSPSALVWVAIFDWARRTSGFEPNAELFGAIFFATVNSKTASSDAAKALRCRRRAIAPNWKPKIAVDGTMEARFVLLRKVCSRLSCRDLVEEFCMLRIFPLSQSWQVTVDQGEEVDGLPNLILPEGANMLILDQVETEARRMIGDVSIVEYSQLLTRQAAGRANRVYNGELPPRANPHKADDDAGPSRKRMRGQVKLAPRKRRAPASSDSDADDEDDAEERDGEGEAEEEEEAVADKAANEAVGDRVDTLGYTPTPSPGPNETGVESNSSPLRRKDLEGAKALVAFSSGKAAKGGPVQKISKKERLVDIARVFSDDESSDGTPTSPAGRSLDLSTAPLAPLSVAGAGGNAAAGASASAERIVSAAARVFGSPLREPAISPLVKAKGKCAAAEASVSEYSLAAPHFAPGDFETRANLVPFVEGVSNLVLPVGTPSLFTELNEFDEGCSAIKSLAVRILAAHCLTERTVRARFDGFKSRLWAKDDEISRKNLEVEALTNTLKETKTEVKRLQSELDKGKEARAEVDRLKAELEKEKAHSTVLIDYYNLTEPKMEALRLKASTAEASAAEESQRFSQEMAKTTESARTACQTLRLALTDMGAKVRGVPAEDASAFDFSEWTQQAGGSVSDCAIAYGDCCARVSAAFTLGLLQHFGYEHVAEFPTYAKGDWEISAQNISPALHAWRKQFWQKDGRSAAKARLLEQLAKAEAADRREGEDAAGEEGGGNAQDHPEGVRRKSCIQPPSGSWQSRNEKFVALKGLPKVRCPFRPVYREMEINGRSYKVFKVANWLRAHPGRTLEDYDLVHSRRLEDMARFWRNHQKTKRQEMIFQRRYSLVCVSPPTTLKVVYDISSEDEPSSPVHSLGRDSDYGGEDVIYL

SEQ ID NO: 188369 - protein, 137 aa, Oryza sativa
  Clone ID: PAT_MRT4530_84980C.1.pep
LLPRECQKTCKVMMYDVPVGTTVLVNVWSINRDPKYWEDPETFKPERFEDGHIDFKGTDFEFIPFGAGRRMCPGITFAEAIMELALASLLYHFDWKLLGNGISSTKLDMTEELGATVRRKNDLYLVPTIRVPLPADS

SEQ ID NO: 188370 - protein, 35 aa, Oryza sativa
  Clone ID: PAT_MRT4530_84981C.1.pep
SKQRKDCTSQDCPAKTGLSRIHVVWSCIELNLTLV

SEQ ID NO: 188371 - protein, 122 aa, Oryza sativa
  Clone ID: PAT_MRT4530_84982C.1.pep
MVGERRRGVSLRARYHRWCSNADVGTRGEVGRSARAPAKGSGGRRRAASAERSERGMQCGEGGEKGKGIRWVRRAPPLLHLLHCRSALLYRARSSKESVRRCFISSIAILPPPPLRLVYRCE

SEQ ID NO: 188372 - protein, 48 aa, Oryza sativa
  Clone ID: PAT_MRT4530_84983C.1.pep
SRKHAYMHSEQMNPLYYNFTMNRTTPTMVTLPQPTISRRLKRTMEWQA

SEQ ID NO: 188373 - protein, 152 aa, Oryza sativa
  unsure (1)..(152): unsure at all Xaa locations
  Clone ID: PAT_MRT4530_84984C.1.pep
CLPPDQQRMIFFGKHLLDRRTLADYNIQKESTLHLVLRLKGGMQILEKTVTGKTMTLEVESSDTIDNVMAKIQDKEGITSDQQSLIFAGKQLEDGRTLADYNIQKESTLHLELRLRGGMQISVKTLTGXTITLEAESVDTINNVKVKIQDKE

SEQ ID NO: 188374 - protein, 85 aa, Oryza sativa
  Clone ID: PAT_MRT4530_84985C.1.pep
MELDDPLILIHEVSNLHAVAKVLELALKKQRPLLIVAEDLESEALGTLIINKLCAGIKVCAVKAPGFGEIVSTRTKVLGLVFHFH

SEQ ID NO: 188375 - protein, 777 aa, Oryza sativa
  Clone ID: PAT_MRT4530_84986C.1.pep
MAYNDDEQTAPTSTATEPARPTVGITGQLVKQVRLNKYHNDVASMAPHDQELLLELRGSSSSTDRAGLDLVAVIDVSGSMDGDRIDKVKTALQFVIRKLSDLDRLCIVTFCTNATRLCPLRFVTAAAQAELKALVDGLKAYGDTNMKGGLETGMSVVDGRSLAAGRAVSVMLMSDGYQNHGGDARDVHLKNVPVYTFSFGASHDSNLLEAIARKSLGGTFNYVADSANLTGPFSQLLGGLLTIIAQDLELTVTRFHGEVTIKRVVWVDAGTYPQTTASDGSSVTVSFGTLYSAEARRVIVYLALADKTASPPYDANVCLAQYRFTFQAQQVTSNPDLITIKRRPSAAPGAARKPQPVENELARRQHADMIRAARDMAEANKMEDARNKLEEARKALEENFNQAANPTVAMLLEELRQLRGLMERQGQADGVRLYTTPHMDTYLKQAEQFEKNPDEAPPPATKHVPEPDQVVDQEPPAPPAEADVVPDVPRDMAAGDRRTLSAALRVAPAVLSLPAFVLMASVRTSGWDSDRYDLYEQYYRRRCHREPPPPGPAPLPPFAGTDAAAPPPGPGFLPSFAGAGHPSYAPMQMPPARLRRQARLPSLPSSMPASASLLARRCRRRATTSTARPGSPFFPRCAPDLRLPPHCARRCRRRRCNSLAGERDMERHVDRVRDGYGFLKDRIDEEAEEQVEELIDNLFRRWCNNSDGPKSSKHNGIDLSGLEVLAYLLMSASSTAAFGKEPLNTKINNAVWLSFLGFLALAASALISMDNLFRRML

SEQ ID NO: 188376 - protein, 589 aa, Oryza sativa
  Clone ID: PAT_MRT4530_84987C.1.pep
MAYNDDEQTAPTSTATEPARPTVGITGQLVKQVRLNKYHNDVASMAPHDQELLLELRGSSSSTDRAGLDLVAVIDVSGSMDGDRIDKVKTALQFVIRKLSDLDRLCIVTFCTNATRLCPLRFVTAAAQAELKALVDGLKAYGDTNMKGGLETGMSVVDGRSLAAGRAVSVMLMSDGYQNHGGDARDVHLKNVPVYTFSFGASHDSNLLEAIARKSLGGTFNYVADSANLTGPFSQLLGGLLTIIAQDLELTVTRFHGEVTIKRVVWVDAGTYPQTTASDGSSVTVSFGTLYSAEARRVIVYLALADKTASPPYDANVCLAQYRFTFQAQQVTSNPDLITIKRRPSAAPGAARKPQPVENELARRQHADMIRAARDMAEANKMEDARNKLEEARKALEENFNQAANPTVAMLLEELRQLRGLMERQYLYNKEGRPYAASSLASHDRQRVATRGQADGVRLYTTPHMDTYLKQAEQFEKNPDEAPPPATKHVPEPDQVVDQEPPAPPAEADVVPDVPRDMAAGDRRTLSAALRVAAAVLSLAAFVLMASVRTSGWDSDRYDLYEQYYRLLHDHLPVASKHHAFLTCNKSRC

SEQ ID NO: 188377 - protein, 196 aa, Oryza sativa
  Clone ID: PAT_MRT4530_84988C.1.pep
RGYYLTSSIRIDALSKLRAQVNETLAASDGGKLSLNDFIIKASALALRKVPACNSSWHGDFVRQYNVVDCSVAVQTPIGLMVPVVRDADTKGLAQIAAEVKQLAAKAKDGKLQPDEFTGGTFTVSNLGMYGVTQFAAIVNPPQACILAVGGAEKRVVSGPSGFEEGTFMQVTLSCDHRVVDGAVGAQWVQAFKSYL

SEQ ID NO: 188378 - protein, 49 aa, Oryza sativa
  Clone ID: PAT_MRT4530_84989C.1.pep
FFFFLFLLSSQYGCQKLIFSSKGESCSKDLKLILSNQQCKNYVVLKNFY

SEQ ID NO: 188379 - protein, 789 aa, Oryza sativa
  unsure (1)..(789): unsure at all Xaa locations
  Clone ID: PAT_MRT4530_8498C.1.pep
MEAGEDHLHSAEKLQRQEGAVATDARWGGDLEAARTHFRCGGCRGIPAAPLAVENGGGGQDPPGTTLGLRHGFRQIWSRGLMPSASKPLTGKGEIGASAETVQTMWYGPDPGRVDDDSTAFLGVSLMDDVELAKLVSSGALVEGQAFAPGKAVVPKPIDNRTVVFVVFFEAGLRFPCNVLLPEILRLFQVELTQLSPSALFRIAIFDWACRTSGFEPNAELFGAIFFATVNSKMVITLAGTKKTVFERVNFNVRPERSDLWPVNAVMSKWDRHWMARWFYHFIPFEAGSDSAKALRCRRRAIAPNRKPKIAVDSAMEARFILLRKVCSRLSCRNLVEEFCMLRIFAFSQAWQVTVDQGEEVDVLTLDQAETETHRMIGDVSVVEVPASSDSDADDEDDAEERDGEEEGEEEEEEAVADKASNEAIEDRVDTPGYTATSSPGHNETGVESNSSPLRRKDLEGAKVLVAFSSGKAAKGXDDESSDGTPTSPAGRSLDLSTAPLAPLGVAGXPLREPAISPLVKAKGKCAAAEASASEYSFAAPHFAPGDFETWADLIPFVEGVSNLVFAAGTPSLFTELNEFDEGCSTIKSLAVRSRLRAKDDEISRKNLEVEALANTLKEAKTKVKRLQSELDKGKEARAEVDHLKAELEKEKAHSAVLIDYYNLTEPKIEALRQKASRAEASAAEESQRFSREMAKSTESARTACQTLRLALTDMGVKVRGVPAEDASAFDFSEWTQQAGGSVLDCATAYGDCCARVSAAFTLGLLQQFGCEHVAEFPTYAKGDWEISA

SEQ ID NO: 188380 - protein, 67 aa, Oryza sativa
  Clone ID: PAT_MRT4530_84990C.1.pep
MPCLSMRRWPVLRFGGDNTRQSGMKNTTVGVDIAAPRDRGFATRGSRRRCLEFRSMSPDLMEANSDG

SEQ ID NO: 188381 - protein, 83 aa, Oryza sativa
  Clone ID: PAT_MRT4530_84991C.1.pep
MGSETNKEGARGGGQFEVVATTCEVTIVVGCMKEMSAGQFYCKGEERVDGGAGIKRRGAPQRKGVGGETLGMATSERAHRRSQ

SEQ ID NO: 188382 - protein, 101 aa, Oryza sativa
  unsure (1)..(101): unsure at all Xaa locations
  Clone ID: PAT_MRT4530_84992C.1.pep
RLLRLSSASPLRRLHRGPPACASWHHHLQPCQATLASKNNTKKKKKTLPKKNHKFKLDLNPEEEPNRGIPLEMLRLVGIWELGFGFXADGVGRTREXPVPV

SEQ ID NO: 188383 - protein, 81 aa, Oryza sativa
  Clone ID: PAT_MRT4530_84993C.1.pep
MEACFTPAAAAAASASPRAAAPPCSSAPAPPRRPLPSAAAGAQAQWRRAPPPPPPPLGPPRSSAPAPPPPRCSASARLAVA

SEQ ID NO: 188384 - protein, 886 aa, Oryza sativa
  Clone ID: PAT_MRT4530_84994C.1.pep
MRKLFFSELTSCKETKLHSAPHSWLPLEKGKLSKFAGHSTSSIESLMKMPEPVVLPHFKPADYVDILAQIHEELESCPPDEKSCLYLLQFQVFRGLGEVKLSRRSLQSAWEKASTIHEKLIFGAWLKYEKKGEEPISDLLSSCGKCSQEFKLLDFVSQISTGSHEISYDDESDVFWGSPVVHFRIRDDMIACDRRKLAALSTPLYAMLNGGFRESHLEVIDMSRNGISSIGMRAISKFSLTGRLPYLSADAILEMLDFANKFCCNGLKDACERKLASFICSRQDAIDFMECALELGCSILAAACLQVLLNELPECLNDEQVVRIFSCASKQQRSTMAGNASFSLYCLLSEVSMSINATSDVTVTFLEKLVDSASDSRQKQLALHQLACTRLLRKDYAEAERLFNAAFTAGHLYSVVGLARLASMRGNKHFSLKLLDSVMSSRWPLGWMYQERALYLEGDNKLENLNKATELDPTLTYPYMFRAASLMKRQSVEAALMEINRILGFKLVLECLELRFCCYLALEDHRAALCDVQAILTLAPDYRMIGGRVSAKQLRMLVMENVEQWTTADCWMQLYDRWSSVDDIGSLSVIYQMLESDAAKGVLYFRQSLLLLRLNCPEAAMRSLQLAREHAASQHEQLVYEGWILYDTGHCEEGLQKAEASIAIQRSFEAFFLKAYALADSSLDPSTSATVVSLLEDALRCPSDRLRKGQALNNLGSVYVDCGKLDLAAECYINALKIGHTRAHQGLARVHFLRNSRTGAYEEMTKLIEKARSNASAYEKRSEYCDRELTKSDLQMVTKLDPLRVYPYRYRAAVLMDNHKEKEAIAELTKAIAFKADLNLLHLRAAFHEHVGDISSALRDCRAALSVDPNHQEMLELHHRVNSQEP

SEQ ID NO: 188385 - protein, 416 aa, Oryza sativa
  Clone ID: PAT_MRT4530_84995C.1.pep
MFGRVPRSNNTKYYEVLGVPKTASKDELKKAYRKAAIKNHPDKGGDPEKFKELSQAYEVLTDPEKRDIYDQYGEDALKDGMGGGSDFHNPFDIFEQFFGGGAFGGSSSRVRRQRRGEDVAHTLKVSLEDVYNGSMKKLSLSRNILCPKCKGKGTKSEAPATCYGCHGVGMRNIMRQIGLGMIQHMQTVCPECRGSGEIISDRDKCTNCRASKVIQEKKVLEVHIEKGMQHGQKIVFQGEADEAPDTVTGDIVFILQVKVHPRFKRKYDDLFIERTISLTEALCGFQFILTHLDSRQLLIKANPGEIIKPGQHKAINDEGMPHHGRPFMKGRLFVEFNVEFPESGVLSRDQCRALEMILPPKPGHQLSDMDLDQCEETTMHDVNIEEEMRRKQYQRKQEAYDEDEEEDAPRVQCAQQ

SEQ ID NO: 188386 - protein, 675 aa, Oryza sativa
  unsure (1)..(675): unsure at all Xaa locations
  Clone ID: PAT_MRT4530_84996C.1.pep
MDHCRAEQRDGCTALQKGTMVDSSNMMATGMCWGSGMHLVELEAIRARYIPKALFSLEGIEEDFIPSQSKILFNPLQTEQSLKGINQTRPHCIRNGVEPGVFIGRGDLPAPRCAMDQLSAAGTYNELLPPRRPSPVKGCHCTAEFSFTVHGASSAMQLWSIHRREHIAEKAISGEIFNYPWSLKEMILTKESSPSAPPPLPPTLAVDVSVVLFLFLIYTKHCKHRCLGVARGVAVLGLGFQPSSSSCKRCRSSLSNCAVGALRCSGSATWATLRDVVRDQTTECAVCRGAFDTAELLRVLSQCQHAFHPGCIDVWLMTHSACLVCRRSAADGALRVPGDXNQRFLAMYRRQRGRSAATCADGSVHRGHERLRERGWRRSRVGKTLPIEKPAVPVPPTFKTMADKTLREFAAPSAENVAIGPQINMGDVDFDLKSSLITMAQASPFCGKPNEDANAHLQQFPEICCTYTIKGNFYNGLTPMSRDHLDAAAGGAFFSKTVQGAVDLIEKLVSNMGWSEERLQTRQRGMHTVKEMELFAAKLDLLMKCLDDHDKRPQGTVLALDSHVTCEVYGKAPSSPWTHMLRVRSTATRVILGMTARKPVRRRCIWATTITGTVHKEVRGGTSHARTIKELTDILANTLYPMPSWYFEKTPQTAELLTTVRHDHTTGLNTEEYPP

SEQ ID NO: 188387 - protein, 131 aa, Oryza sativa
  unsure (1)..(131): unsure at all Xaa locations
  Clone ID: PAT_MRT4530_84997C.1.pep
SNQLQNTLIIHLNLNLLSSSCLVHNIQSVQLNPTKPDRITXRLTNHSDYSVSSAYKAXLLGSTKSNYNLIMWKPXVLRKCQFLAWLVXQNRVWTSDRLAARGLKSFPTQGAHGYRLLLQRKKRGPRHLQTS

SEQ ID NO: 188388 - protein, 66 aa, Oryza sativa
  Clone ID: PAT_MRT4530_84998C.1.pep
RRCDILIQYNIHLGYSHLLLLAQAMRRIQLVHPFFSPHMLYSSSTMGLVVFCRLVADVEHHNNQLQ

SEQ ID NO: 188389 - protein, 252 aa, Oryza sativa
  Clone ID: PAT_MRT4530_84999C.1.pep
MRRPEMVFFDVETTAASADEGQRSVLEFGAIVVCPRRLVEVDSYHTVIRPGDMSAVSKRFAAMVDVDVASAPSFDQVAERIFGVLDGRVWAGHNIQRFDCHRIREAFAAIGRAAPEPVAIVDSLNVLAHDFGRRAGDLKMATLASYFGIGKQSHRSLDDARMNLEVLKRCATLLLLESTLPPGMLHSSAAGSITRKRSNHQEEPSSSSLVNVTPSKRKQRQGSGGKIRPKAATTTPKPCFHMILRHSRTILR

SEQ ID NO: 188390 - protein, 197 aa, Oryza sativa
  unsure (1)..(197): unsure at all Xaa locations
  Clone ID: PAT_MRT4530_8499C.1.pep
MPSFDRANHVVFRPFSSFATAYTPFAMAPRKPNLASAKGPDPGRVDDDSTAFLGVSLVDDVELAKLVSSGALVEGQAFAPGKAVVPKPVDNRTVVFAVLFEAGLRLPCNVLLPEILRLFQVELPQLSPSALVRISIFDWACRTSGFEPSVELFGTIFFATVNSKTVITPAXTKKTVFGSVNFNVRPERSDLWPVNAA

SEQ ID NO: 188391 - protein, 621 aa, Oryza sativa
  unsure (1)..(621): unsure at all Xaa locations
  Clone ID: PAT_MRT4530_849C.1.pep
ARGRCACTRWDGASSTENGRIGRLWMAEAGVVDAFFFVGSEPKDVIKQYISVTGTPSMPQQFAVAYHQCRWXYRDEAVVAPGVAPCAEPLVPAAGLRLVGVPSARPRYFTWDHSAFPNPEVMQGKIADKGRKMVTIVDPHIKRDSSFHLHEEATAKGYYVKDATGKDFDGWCWPGASSYPDMLNPEIREWWADKFSYENYKGSTPTLYIWNDMNEPSVFNGPEVTMPRDAVHYGDVEHRELHNAYGYYFHMATADGLLKRGEGKDRPFVLSRAFFAGSQRYGAIWTGDNSADWDHLKSSIPMVLTLGLTGMTFSGADIGGFFGNPEPDLLVRWYQVGAFYPFFRGHAHHDTKRREPWLFGERRTALMREAIHMRYSLLPYYYTLFREASVTGVPVMRPLWLEFPDDKETYNNGEAFMVGPSLLAQGIYEEGQKSVSVYLPGEELWYDLRNGSPYKGGVSHKLEVSEDSIPSFQRAGAIVPRKDRFRRSSTQMVNDPYTLVIALNSSSAAEGELYVDDGKSYDYQQGAFIHRRFVFADNKLTSMNIAPKNLGNKKFSTECVIERIIILGVSSGSKKAIVEPGNHEVDIELGPISLRSGSSSVAPTVRKPNVRVVDDWTIRIA

SEQ ID NO: 188392 - protein, 81 aa, Oryza sativa
  Clone ID: PAT_MRT4530_84C.1.pep
PVSGMNSYGEMLEITKQVRIMNPHKEFWLTSPSSSHPAAINTSKICHIDCQAITDVCQGPFKFHKLDQHSQKRKRQNAQCL

SEQ ID NO: 188393 - protein, 471 aa, Oryza sativa
  Clone ID: PAT_MRT4530_85000C.1.pep
MAASLVTSLRSLSAHALVPLVASALLFVVAVVLRRRRRPVYLLNYSCHLPDVDRKVNLEVCEYFGQRCRHYSDDTADFMRLIYRKSGLGQETYAPPFIFSGEFQKTQAFAVQEAEEGLFATVAHLLAKSDVRPRDVGFVVVACSMFSPAPSLASMIVRRFGMPPGTRTYSLAGMGCSAGTVGIDMAARALRVSRRGGYALVVVTENMSLNWYFGENKHMLVTNCIFRVGSAAALVTDVAARRGDAKYELVRTLRTHHGGDDAAYNAAVQMEDEEGNVGVALTKDLVRVAGAGLRQHIATLAPHVLPVSELLRYVWRVARAYVAGNPKAVAAIVPDFQRAFEHMCIHSGGKAVIDAVVKLMAFGPQVVEPARATLHRFGNTSSSLVFYELAYFEAKRRVRAGDRLWMLAFGTGFKACSNVWRALRDSAPDADNPWNACAHRYPAALPPPSTRRSSGGAPAMDFTHLKNDKLP

SEQ ID NO: 188394 - protein, 57 aa, Oryza sativa
  Clone ID: PAT_MRT4530_85001C.1.pep
HVCLNLLKKLLATPKFSPKLKSAVDCLPFRFSISISSTYTSINILLVECPLEVLPMF

SEQ ID NO: 188395 - protein, 89 aa, Oryza sativa
  Clone ID: PAT_MRT4530_85002C.1.pep
MRSLEDRFNGLMIFVLELFKRVNLLVGATSVPPTIGSSKRIVRRAISLLPPTTLPALPTTTPTRATAEATHRAEEASQDTKAPSLRFCK

SEQ ID NO: 188396 - protein, 43 aa, Oryza sativa
  Clone ID: PAT_MRT4530_85003C.1.pep
MEALCHLTGRRRKIISGPVFTSFDVTRLSFDNSGHCVASRVLA

SEQ ID NO: 188397 - protein, 132 aa, Oryza sativa
  unsure (1)..(132): unsure at all Xaa locations
  Clone ID: PAT_MRT4530_85004C.1.pep
DYVHRIGRIVRADNKGVAHTFFTQYSNAHAGDRVNVLRKAAQVVPPALTQFGSHVKTKESPIYGSRFNRDQIXDAPKSAKITLGDSNEVYLHLLVFCIAAFLSFATWSSPNIRHQTNTFLEGRTPIAVSLYT

SEQ ID NO: 188398 - protein, 60 aa, Oryza sativa
  Clone ID: PAT_MRT4530_85005C.1.pep
KNIFISCTFLHWSFSQLTTLYSHTLPYLHHKLIIGNKTPTDDSYTFLHTEKHNSLKQQSI

SEQ ID NO: 188399 - protein, 86 aa, Oryza sativa
  Clone ID: PAT_MRT4530_85006C.1.pep
YGPQVTTPRVGSTLTPKHYLPTSRCVEDTRTRDQDNSTLAEHGTAWGIIHALTHTTLSPQTTRTPLALEAMISHPHSRGTERQPPS

SEQ ID NO: 188400 - protein, 181 aa, Oryza sativa
  unsure (1)..(181): unsure at all Xaa locations
  Clone ID: PAT_MRT4530_85007C.1.pep
PPPRETFFFFAPLPNAATRAFAQFDAVPPVSRQYQLHPLFFLHPPMFSPSGGFLRPQSRPVAPPFFQSPVFXLGNSPFFPPQCFPQLRMFPPQFPCPAFTSVPVFVPPLRLPPFVRVFFVQSQAPAPVFLALTLPPIWGFSPSSPPAPCGIPPVGGFWFLIVPVFLPGKKNKVLPLCVCPV

SEQ ID NO: 188401 - protein, 255 aa, Oryza sativa
  Clone ID: PAT_MRT4530_85008C.1.pep
MVIPASNIVVGPYAGDSRVKEAEFVKSSARARDCPKDDRPEFAVLGRSNVGKSSLINALIRRKEAALTSKKPGKTQTINHFLVNKSWYLVDLPGYGMYHNDKIIDGIANGEKQSEKYNFALVFIGLFAAASQSARTDWSSFTKGYFLNRDTLVGVLLLVDASIPPQKIDIDCANWLGRNNIGLTYVFTKCDKSKKGKGGRPEENIKEFQETISSLYPEPPPWIMTSSVTGLGRDGLLLHMSQLRNYWDNEATMSP

SEQ ID NO: 188402 - protein, 322 aa, Oryza sativa
  Clone ID: PAT_MRT4530_85009C.1.pep
MDWVEGEISYLDFFEKKKSNGTKGQKLLTSYEGTTTPSITIWLPMVTNEENEFLTAPFSEDEIQGAVFEMEHNKAPGPDGFPAEFYQNFWEAIKDDLMNLFRDFHTKKGVRQGDPLSPILFNIIADMLTVRINRAKEDGQIAGVVPHLINDGLSTLQYADDMVLFMDHDLEKARNMKLLLFVFEQLSGLKINFHKSELYCFGEAKDFENEYMELFGCSTGQFPFRYLGIPIHYRRLRNADWKEVVERFEKHLSSWKGKLLSTGGRLTLINSVLSSFPLYMMSFFAIPRGILTKLDYFRSRFYWQSDGYIFSYPLASYMGYPT

SEQ ID NO: 188403 - protein, 38 aa, Oryza sativa
  Clone ID: PAT_MRT4530_8500C.1.pep
KKKKKKKKKKKKKKKKKKKKRKKKKKKKKKKKEDLGRF

SEQ ID NO: 188404 - protein, 697 aa, Oryza sativa
  unsure (1)..(697): unsure at all Xaa locations
  Clone ID: PAT_MRT4530_85010C.1.pep
MWRSPAAGAGRDVDGGADGAEAAAGERAAVGAVDRVLMTTEWESKYPLVSVQALDRGLSDHTPLLLDTGSAAFSGNHAQFKLELGXLLRDDFRDRVVEIXISQLRNNKMSALRKHLRGWAAHTSGSYKQEKNTVQNIIDELDITTEISYPDFFEKKKSNGTKGQKLAKVTDVLLGDNNTKYYHMVANGKKRKKRIFFLDQDEGKIEGNIALKSYITKFYKNLFGPPEDTYCTLDESRIEDIPQDKIRGAVFEMEHNKAPGPDGFPAEFYQNFWEVIKDDLMNLFRDFHVGDLPLFSLNFEIITLLPKVHEANHIQQYRPICLLNVSFKIFTKVATNRINFVADHVVSSSQIAFMRGRNILEGVVVLHETVHELHRKKLNGVIFKVDFEKAYDKVNWPFLLQTLHMKGFSPKWISWVESFISGGSVVVKVNDEVGHFFQTKKGVRQGDPLSPILFNIIADMLTVLINRAKEDGQITGVVPHLINDDLSILQYADDTVLFMGHDLQKARNMKLLLFVFEQLSGLKINFHKSELYCFGEGKDFENEYMELFGCSTGQFPFRYLGIPIHYRRLRNADWKEVVECFEKRLSSWKGKLLSTGGRLTLINSVLSSLPLYMMSFFAIPIGILTKLDYFRSRFYWQSDGQKKVIYSLIHWLRTWAILQKPGSQDMVVAACQHLEKVVKEFFTQGYGWRTSFRIGGP

SEQ ID NO: 188405 - protein, 244 aa, Oryza sativa
  Clone ID: PAT_MRT4530_85011C.1.pep
MDGPLSESAASHLHSFLVAMTMVRIIGPSPAQSSSPTPRRPRPPRPRRRPPTMGSAAASSQTSVVLGCGAVSADYLATVASFPNPDDKIRSLTLKVQGGGNTGNALTAAARLGLRPRIISKVSNDPQGRNILKELQDDGVDTSHILVAEEGNSPFTYIIVDNQTKTRTCIHTPGYPPMVPEELTQENLFAALDGADIVYFDVRLHETALLVAEEVIFSWHKILSSYRGSCKYKCLLSVFNIFFG

SEQ ID NO: 188406 - protein, 814 aa, Oryza sativa
  unsure (1)..(814): unsure at all Xaa locations
  Clone ID: PAT_MRT4530_85012C.1.pep
MAGLRKGIRDGHAQHRVLHLRXDMSTSPCDAYEIHDYNFGRVESKLPFYDGKYDSVAYIDWELAVDNEFDKYDFSDAQMIVAASNKLTSSTLFWWSYVINKPETWDECKXYYRCTLLEKXEHLKQGDRTVKEYIREFKVCIIYSALKECNEKTMRRFFNGLNSEVQVLLANMTYNHIGHLFMFAHSIESQIISKLRTHKQSFVSLVTNVLQGDQHIQQKEENGVLEKKEDEAPMMSEESLQGKLNGAEINEVEQQLVEPIAEMPLSQVDLLVVPCDKEELCDNASLISMLQLVNEHAIPTVNSYYVDFKHVVHDANEVEEHEMISCLNTLVYVMFDDFCELDNLKEKLFAKSDLPCPTNAIFHIFGEYNDRGIYLVHRVFIYSDLERHVYVDKTCKLERYVIANHITSTFSSFHWMKQVVXNGLHDEHHMEXPRTVFREEEEDDVTMTTMDATIAHIMDEXENIMVKASKCWNPVRPPTTLLISNGRRICIRPPFLTREYLIERSRSPLSNPASLPNSILVXPRMKKKGIGLICTGKINNPRRGVSIAKALTKVATNRINFVADHVVSSSQTAFMSGRNILEGVVVLHETVHELHRKKLNGXIFKVDFEKAYDKVKWPFLLQTLHMKGFSPKWISWVESFISGGSVAVKVNDEVGLFFQTEKVVRQGDPLSPILFNIIADMLTVLINRAKEDGQIVGVVPHLINDGLSILQYADDTVLFMDHDLEKARNMELLLFVFEQLSGLKINFHKSELDYFRSRFYWQXMVKKKYRLAKWNILCRPKVQGGLGIHDLEIKNMALLSKWLFKLLSTKGVWQ

SEQ ID NO: 188407 - protein, 1250 aa, Oryza sativa
  Clone ID: PAT_MRT4530_85013C.1.pep
MARKADATVAGDDREVGEAGRQWAPVQQYPRADGAFKNSAHCGGDGGSGSGGDDAGWTGSKGDDVEMRIDSDRRRRLTLAPVSSSVENRDGDDDDGVNTSHEIADEAVIETRQSGRDNGGHRQATSDGGGHGRPARSDEASLVQEFWSEGRNFRPGFQGHGRDEQPRRDAGNQGVPVHQALIESTVKQDIQAGRGETAALSSKNSVEVTTAKAKKPRPLHCFRCKGSGHLLDGCKTVLDCFICNKKDAHVPNRCPILKEPKPTAALFGFSEQNMGFLPIQEFDMKLKPPKPAPMALVTILGGHLAASAVQNELARLIRADWNWEAVPHGDNSYLVTFPSEEELNRMDDVEFRLKNHGVSITIQQWQQDSDIIPVYQLDEVWVHITGVLHSWRHYLCFWALGTVVGTTQEVDMLTFRKKGIIRVKVGVLSRADLPIKTDIVFGKIGYHITFSLEEEGFQPAVHVVDEPTGGGDEGAEEGGDSKEDNNTNHIVKKHKSNSSTTTQPDQGSGPTPMQLALTPFGPLKSSPSRRPVVMDLVGLQLQHPDVSQEISPAGISPPATPRSVGLENMRMNAAEVQEIEAVPRTLPATEIQSNRKQHVVPVAHPISKQQNPSPGLMDGHLSVPLVKKCSVGNTVAPFGSTSKVRMGTVSAPLSSQQTTQGNYEEWPVLSSPGDCNGLRRSGRSNAEQISGIAMTDEDSLSKAMRRKAICNLDGPVKELAVINSPSSSDTTPASPPQSIFWNSRGLGDLAKYRYVAECIKEHNLDFVALMETGKSDMSKTNLNRLSGGVDFVWHCLPPRGRSGGIILGVKASTYDLSLIVEGEFYVKFHLVNKEDKFKWILMAVYGPAQDEFKSSFLAELVRSCQQNPLPTLIGGDFNILRSSLEKNNDRFNDRWPFLFNAVIDSFDLRGIALTGRQFTWANSLPSPTYEKLDRVLMTTEWESKYPLVSVQALDRGLSDHTPLLLDTGSSAFSGNRAQFKLELGWFLRDDFRDRVVEIWNKPVKGRNPVQRWNNKMSALRRHLRGWAAHTSGSYKQEKNTVQNIIDELDITAEVRELTDSEREHLAQSRDQLSRLFREEEIKWYQRAKVTDVLLGDNNTKYYHMVANGKKRKKRIFFLDQDKGKIEGNIALKSYITKFYKNLFGPPEDTSITLDESRIEDIPQVTNEENEFLTAPFSEDEIRGAVFEMEHNKAPGPDGFPAEFYQNFWEVIKVDLMNLFRDFHMGDLPLFSLNFGIIILLPKVHEANCIQ

SEQ ID NO: 188408 - protein, 138 aa, Oryza sativa
  unsure (1)..(138): unsure at all Xaa locations
  Clone ID: PAT_MRT4530_85014C.1.pep
PEECRFNRLEAFEPIQSVRFQAGTLEFFDVFNNHLQGPELSVVRGVIELKGLLLPHYTNGAFLVYIIQGRGITGPTFPGCPESYQHQFQHXGQAQLTESQIQIXKFKDEHQRIHRFKQGDVIALPAGVAHWCYNDGEV

SEQ ID NO: 188409 - protein, 425 aa, Oryza sativa
  unsure (1)..(425): unsure at all Xaa locations
  Clone ID: PAT_MRT4530_85015C.1.pep
MKLLLFVFEQLSGLKINFHKIELYCFGEAKDFENEYMELFGCSTGQFPFRYLGIPIHYRRLRNADWKEVVERFEKRLISWKGKLLSTGGRLTLINSVLSSLPLYMMSFFAIPRGILTKLDYFRSRFXWQSDXKKKYRLAKWNILCRPKEQGGLGIHDLEIKNMALLSKWLFKLLSTEGVXQQLMRNKYLGDKPLPQAQWKAGDSHFWSSLMKVKWDFLRFGSFIIKDGSQIRFWEDKWLGNSTLKEHYPCLYNIVRHKHATVAQVFENNPPSFSWRRDLIGSKLAAWNNLLPRITGFHLTQEQDEFHWNLTSNGEFSVKSHYLALIHSNVPNINNRLWKLKIPLKVKIFLWYLRRGVVLTKDNLIKRKWQGNKNCCFCCNDETIRHLFFECHYLKNTVSTSPIGTNQNVNLRDIFIIFGNFNIKS

SEQ ID NO: 188410 - protein, 149 aa, Oryza sativa
  Clone ID: PAT_MRT4530_85016C.1.pep
MLTQQQQRCARRLRAHSHGEESEKLGARRGARGAGRRERKRDARARLLRRGPASFLAVAIDHTFAHSSLTQQRRVRPPRRRAEWRDVSSVGLLLSPPPLVAKYRLNPRISRGAVDARCARGTEGQRGQVAAMWGHQRVSVKLGPHVCDR

SEQ ID NO: 188411 - protein, 256 aa, Oryza sativa
  unsure (1)..(256): unsure at all Xaa locations
  Clone ID: PAT_MRT4530_85017C.1.pep
MCPTVEKFKTGPKXNLVFQDIYNECLGRDGGGGSPISIRRARXDPEDRSDYWRGGAXSRLHNSELSPSQNRTNAQTGKPRTRTLETLTMDSGGGGGASHKAASGSAPSGAAAANPTAMLSALMSKRAKLQEELRSIERQVYEMETTYLQESNQFGSVLKGFESFLSSSKNTSNLKRSRKFQADERLFSLSSVTSPAVDEHMAGRDDGREYGSGRSKGATTPANGQGKPKKGGRPGGRDGKRIRPSNDPDLDDEEDF

SEQ ID NO: 188412 - protein, 370 aa, Oryza sativa
  unsure (1)..(370): unsure at all Xaa locations
  Clone ID: PAT_MRT4530_85018C.1.pep
MNKYNFCRIYLLXLSLLKIQTGFQXVYLLLISPTWAHLTVSQASSNTHNERERVIGSGRARRVAETWQRRAEPPSLPSHIAHPHSSLQCRPNRENKLXLLSSPSISPPAVMKXDARPRLRVFANPISSTFHTHLTIRKISPFDFILSRAADRRERRRALXAPERAPNVAVVASSPSPPIWTKPGHAIAPSSSPRTPLHFPSRTTKNGATSVEIGHRLLHLRLPSPLSFPPPPFLVPIEPSPFTXRFLPSPSRSASHRCRQDHGNLRXRLMASILEALPLKSHAPPPETIFRSDPPPALLRCPLIEKMYKLCRVXKTNRLAVLVVTSGMWICIEYSLVFILLNAEIYLQIILRFENDLLAAMDGNEVNIYT

SEQ ID NO: 188413 - protein, 113 aa, Oryza sativa
  Clone ID: PAT_MRT4530_85019C.1.pep
MDPPPASDSRRRGGGRGGKNRAGKQLGLKRPAAPAPSSRPGSPSPPHRTPLPPISTSAASISAAAPTPTPAAASSSPAAPMSNMPPWPAQGGGWGGIPPNFPFGHGEQQGPNS

SEQ ID NO: 188414 - protein, 889 aa, Oryza sativa
  unsure (1)..(889): unsure at all Xaa locations
  Clone ID: PAT_MRT4530_8501C.1.pep
MAPRKPNPASAKGPDPGRVDDDSTAFLGVSLVDDVELAKLVSSGALVEGQAFAPGKAVVPKPVDNRTVVFAVFVEAGLRFPCNVLLPEIFRLFQVELPQLSPSALVRISIFDWACRTSGFEPSAELFGAIFFATLNSKTVITPAGTKKTVFGSVNFNVRPERSNLWPVNAAMSKWDRHWMARWFYHTIPFAAGSDSAKALRCRHRAIAPNRKPKIAMDGAMEARFILLRKVCSRLSCRDLVEEFCMLCIFPLSQSWQVTVEQCEEANGLPNLVLPEGTNRPSRKRMRGQVKLAPRKRRVPASSDSDADDEDDAEECDGEGEGEEEEEVEAVADKAANEAIEDRVDTPGYTPTPSPGHNETRVESNSSPLQRKDLEGAKALVAFSSGKAAKGGLVKKISKKKGLVDIARVFSDDESSDETPTSPAGRSLDLSTAHLAPLGVARAGGSAAAGASASAERIVSAAARVFGSPVREPAISPLVKAKGKCVAAEASASEYSLAAPHFVPGDFVTQADLIPFVEGVSNLVLPAGTPSLFTELNEFDEGCSTIKSLAVRILATHCSTERTVRARFDGFKSRLRAKDDEISRKNLEVESLAHTLKEPKTEVKRLQSELDKGKDAWAEVDRLKAELEKEKAHSAVLIDYYNLTEPKMEALRQKASRVEAGAXGGVAAVFAGDGEDHRIRENGLPNAPPRPYRHGREXFWQNDGRSAAKARLLEQLAKAEAADRGEGEGAAGEEVGGDAQDHPEGVHRKLCIRSPSGSWRSQNEKFVALKDLPKVRCPFRPVYREMEINGHSYKVFKVADWLRAHPGRILEDYDLVHSRRLEDMARFWRNHQKTKRQEMIFQRRNSLVCVSPPTPLKVVYDISSDDEPSSSDHSLGRDNDYRGEDVIYL

SEQ ID NO: 188415 - protein, 391 aa, Oryza sativa
  unsure (1)..(391): unsure at all Xaa locations
  Clone ID: PAT_MRT4530_85020C.1.pep
MAMASLARRRAAEAALLRRAPAAAWASAWRGYAAAAAGEESDVVVIGGGPGGYVAAIKAAQLGLKTTCIEKRGKLGGTCLNVGCIPYSALLHSXSEAKSYFAHHGIKXQIDLAAMMAQKDNXLLKKNKVEYARGFWKFLYPSEVPVDLHGXRSTIFKGKNIMIATCSDVKSLPEVTIDEKKIVTYXPTGALXLSEIPKKLVIVGAGYIGLEXGSFWXRARSEVSVVEFASDIVPSMDGQIRKPFKHMLEKQKMKFMLKTMVVGVDASGSCVKLTVEPAAGGEQSILDVVXTNVKRVHTTGDAIPGPMLAHKAEEDXIACVEFIAGKGHLDYEXVPSVVYAHQEVASFGKIEEQVKASGVAYQVGKSSLLAHRCSKAIDDAEELVKVMAEKQ

SEQ ID NO: 188416 - protein, 99 aa, Oryza sativa
  Clone ID: PAT_MRT4530_85021C.1.pep
STCIKADQAPGEHPAPRSCSSCWSCTSEMPPSVPPPNRRNGPWSRGPYRRASAWGCSARRRSRRGGRNCNGGSPYSPSCPCTSPVHMVRPQCAQHGRQL

SEQ ID NO: 188417 - protein, 142 aa, Oryza sativa
  unsure (1)..(142): unsure at all Xaa locations
  Clone ID: PAT_MRT4530_85022C.1.pep
MESWKDVAVWYRDELDVAQDDEEKKNSRQPPSPADSTLSSAASHMEHDVQTFMREVEGEYADANQSVIXSYFLVLSMSPTWSSRWLLLLXPSVRQRGPKQCLHLNRRWPPLVGHRHQPPRCRRPPPWCVADMWAARCGMWGV

SEQ ID NO: 188418 - protein, 1975 aa, Oryza sativa
  Clone ID: PAT_MRT4530_85023C.1.pep
MAGEEKSDGSVVDPKNIITVTLEDLSEDQRQEVLRQHDEELKKLLAAYQKTRNGVVKKHPYFQSTYSNHPLPLASIGVPRGPVQDACVDAVPLQTYVAPTHPVNSIQPSANFRDQLASVLREFGLEPKGRARAYQKPYPDYFDTTPYPRGFRVPEFVKFTGEDGSSTFEHVGQFLAQSSEVQSDVFRVKLFPLSLSGTAFTWFTSLAPNSITTWAQLEQKFHDYFYSGETELRLSDLTMVKQKYGESVSDYIRRIRNVKNRCFSLTIAKKDLADLAFSGLLAHLKEKLDGQEFLGINQIQSAINDGRLTIKDGGKMKLDSDPFPVNVIEFANKKMLIRSHQTESAEGKNVVVNDSVPPRMIKPKNPEVGVWKVNKGKKPVLKPRPRPTFKQLLEKYTSQKNTNVFSRLGGAKRPRSSPGHSYGDQGYWHGESYVQQPYFGMGPMHWGYPPPVYPQFPSWGCDPWAPYPVVPVTHFQQGWNAPVAIGGEHLYNQRGREARASDAIVINGGDNNLSKRKRLTVPARSNSLKNNMASNSIKSGSQRMWVPIRPRDDAGASVAHEGGEVGPSSVVVSRAVATLDESRAAGPLKIGDVVIEKPELAAAAIEELKTRGVGSSSQGQLADGASPGSSVQGVVCQPCGLGSSRDTWQQLGKSGSNTHYGRNQQPTGFWREKRQQEDAGVGSSSSVQQTVGVQQRASSSGGNRSKRLAPGTVPQPQWCPPGIKHTQKRRLQRLRALEIREQKEEKARDEWFNRDRPMVLTDKTWKDRRIENEGNADANEDVDVISESKQNVPSDCMDINMVFELPAEFRAPEMEVAELVLGPKNAIFEKPEKSGEHLKPLFIKGHIDGKPIGRMLVDGGAGVNVMPLSVFSKLGRKESELMKTNMGLSGFSGELSEAKSVISMELTVGNKTIPTAFFVVDVKGRYNILLGRDWIHANCCIPSTLHQCLVQWVDDEVEKLGQGFSSADPLEEVDIGDGSIPRPTFINANMGADQKSKVCKLLREFVDCFAWSYNEMPGLSRDLVEHRLPIKSGFRPYKQPPRRFNSDMYDRIKQEIDRLLKAGFIRPCRYAEWISNIVPVEKKNTGKIRVCVDFRNLNKATPKDEYPMPIADMLVNDASGHKVISFLDGNAGYNQIFMAEEDMFKTAFRCPGLVGLFEWMVMTFGLKNAGATYQRAMNLIFHDLLGIVVEVYIDDVVVKSDGFDSHLADLRLAFQRMRRYRLKMNPLKCAFGVSAGKFLGFIIHEQGIEIDPKKLGAEQWEAFNNIKRYLLSPPVLRAPKSGVPFRLYVVAQQRVIGAVLTQEDDGKEYVVAYLSRRLLDTESSGRIGKWAYALIEFDLLYEPLRAMKGQVVADFIVDHMVKDVDFVSVCPWKLYFDGSVCGNGQGIGIVLFSPNDMIYETSVHLEYSCTNNQVEYEALLFGLQSLVDMGVRDIDAFGDSRLVVEQVNGEFNCFDGLLNSYLDRCLDIIKSLHTFTIRHISREDNVRANFLAQQASGYHVNRGVFFVTNKPAFVTVGVDSVGGVISTVTMDTINDLTEQGNTGSVQQQGITGSVGDELGDWRSPLVNYLRDPSQSRDRKVRRQALKYTLLDDELYRRTIDGLLLKCLGPDQSKVAMGEVHEGICRTHQSAHKMQWLLKRAGFYWPTMLEDCFRYYKGCEACQRFGNIQLAPAAMLHPIVKPWPFRGWGLVFVGEIHPSSSKGHRFVLVATDYFSKWTEAVPLKNMTHKEVINFVLEHIIHRFGIPQTLTTDQGASFMSHQFSEFAESFRIKLLNSSPFYAQANGQAESSNKILIKLIKKKVEEHPRRWHEVLSEALWAHRISKHGATQVTPYELVYGQKAVLLVEVNLQALRIARQNGLSAVDYRNLMMDRIDDVPEERLKALRHIEKEKLRVARAYNKKVREKSFQIGELVWKTILPIGTRSSKFGKWSPSWEGPYKVVEIVPGNSYFVQSLQGDKLPKALNGRYLKKYYPSIW

SEQ ID NO: 188419 - protein, 1592 aa, Oryza sativa
  Clone ID: PAT_MRT4530_85024C.1.pep
MAGEEKSDGSAVDPKNIIAVTLDLSEDQRQEVLRQHDEELKKLLAAYQKTRNGVVKKIIPEHPYFQSTYSNHPLPQASIGVPRGPVPNACVDAVPLQTYVAPTHPVNSMQPSANFRDQLASVLREFGLEPKGRARAYQKPYPDYFDTTPYPQGFRVPEFVKFTGEDGRSTFEHVGQFLAQSSEIQSAINDGRLTIKDGGKMKLDSDPFLVNVTEFANKKMLIRSHQTESAEGKSVVVDDSVPPRMIKPKKKSRSGSMEGRGSQCQQEAIHQKITWQAIVPRVVHNACGCQFDLEMMPGCQFAQEGGEVGPSSVVVSRTVATLDGSRAASSLKIGDVVIEKPDLAAAAIEELKTRGVGSSSQGQLADGASPESSVQGVVCQPYGLGSSRGTWQRLGWSSSNTHYGRNQQPTGFWRVKRQQEDAGVGSSSSVQQTVGVQQRFGAETLANQCSASSSGGNRSKRLAPGTVPQPQWCPPGIKHTRKRRLQRLRALEIREQKEEKARDEWFNRDRPMVLTDKTWKDRRIENEGNADANEDVDVISESKHNVPSDCMDINMVFELPAEFRAPEMEVVELVLGPKNAIFEKPEKSGEHLKPLFIKGHIDGKPIGRMLVDGGAGVNVMPLSVFSKLGRKESELIKTNMGLSGFSGELSEAKGVISMELTIGNKTIPTAFFVVDVKGRYNILLGRDWIHANCCIPSTLHQCLVQWVDDEVEVIEADNSACIALTEAPVDWQHGDMRCLTEDNIKWLQKRTEQYRSGKNDMHETIEDFDNVQKLGQGFSSADPLEEKSKVCKLLREFVDCFAWSYTEMPGLSRDLVEHRLPIKSGFRPYKQPPRLFNSDMYDRIKEEIDRLLKAGFIRPCRYAEWIFNIVPVEKKNTGQIRVCVDFRDLNKATPKDEYPMPIADMLINDASGHKVISFLDGNAGYNQIFMAEEDMFKTAFRCPGFVGLFEWVVMTFGLKNAGATYQRAMNLIFHDLLGIVVEVYIDDVVVKSDGFDSHLADLRLAFERMRRYGLKMNPLKCAFGVSAGKIESFVPLLRLKHENEFSWGAEQREAFNNIKRYLLSPQVLRAPKSGVPFRLYVAAQQRVIGAVMTQEDDGKEYLVAYLSRRLLDTESSGRIGKWAYALIEFDLLYEPLRRAMKGQVVADFIVDHMVKDDIDVDFVSVCPWKLYFDGSVCGNGQGIGTVLFSPNDMVYETSVRLEYPCTNNQVEYEALLFGLQSLVDMGVRDIDAFGDSRLVVEQVNGEFNCFDGLLNSYLDRCLDIIKSLDTFTIRHISREDNVRANFLAQQGSGYHVNRGVFFVINKPAFVTVGVDLVGGVISTVTMDTINNMTEQGNTGSVQQQGITRSVGDELGDWRSPLVNYLRDPSQSRDRKVRRQVLKYTLLDDELYRRTIDGLLLKCLGPDQSKVAMGEANGQAESSNKILIKLIKKKVEEHPRRWHEVLSEALWAHRISKHGATQVTPYELVYGNLMMDRIDYVPEERLKALREIEKEKLRVARAYNKRVREKSFQIGELVWKTILPIGTRSSKFGKWSPSWEGTARGLCMHGEALLRQDVYRAGVPCMAMCRWAEKVLLCLHDGDGGPCTALCCC

SEQ ID NO: 188420 - protein, 167 aa, Oryza sativa
  Clone ID: PAT_MRT4530_85025C.1.pep
MATTPAPTTGRRAAASTSKAQLLPPRRLLVTNLVGAVSTYRNTAEEKRRSFSRLVALVSAAAGDADGRRRGASLRRRDEEDDSDDDDRKEEAVELEMLRSERRAVRLPRSHSTGQSLVASAAAAAESGDHNRFTLRLPQHGRRRPTMEPRDATLAEGGGKPTGRDSR

SEQ ID NO: 188421 - protein, 49 aa, Oryza sativa
  Clone ID: PAT_MRT4530_85026C.1.pep
FVFLIFWCASSTNIPLYSIWVCLAHSNNLSCTEYAMQLFLVASWGTHNS

SEQ ID NO: 188422 - protein, 1292 aa, Oryza sativa
  Clone ID: PAT_MRT4530_85027C.1.pep
MAGEEKSDGSAVDPKNIIAVTLEDLSEDQQQEVLRQHDEELKKLLAAYQKTRNGVIKKHPYFQSTYSNHPLPQASIGVPRGPVQDACVDAVPLQTYVAPTHPVNSMQPSANFRDQMASVLREFGLEPKGRARAYQKPYPDYFDTTSYPRGFRVPEFVKFTGEDDRSTFEHSVSDYIRRFRDVKNRCFSLTIAEKDLADLAFSGLFAHLKEKLDGQEFLGINQVLQKALIQENRAKEVKQYSRFKDGKNRDKEKHAVNTLDCSDEDLASDEDTDICVAEWVHTSKTKPFIQSAINDGRLTIKDGGKMKLDSDPFPVNVIEFANKKMLIQSHQTESAEGKNVVVHDSVPPRMIKPKNPEVGVWKVNKGKKPRKRLAVPARSNSPKNNMASNSIKSGSQRMWVPIRPRDDAGASVAHEDGASPGSSVQGVVCQPYGLGSSRGTWQRLRRSSSSTHYGRNQQPTCFWREKRQQEDAGVGSSSSVQQTVGVQQRFGDETLANQCSASSSGGNRSKRLAPGTKARDEWFNRDRPMVLIDKTWKDRRIENEGNADANEDVDDISESKQNVPSDCMDINMVFELPAEFRAPEMEVAELVLGPKNAIFEKPEKSGEHLKPLFIKGHIDGKPIGRMLVDGGAGVNVIPLSVFFKLGQKESELMKTNMGLSGFSGELSEAKGVISMELTVGNKTIPTAFFVVDTIEDFDDVQKLGQGFSSADPLEEVDIGDGSIPRPTFINANMGADQKSKERLNLLRAPKSGVPFRLYVAAQQRVIGAVLTQEDEGKEYVVAYLSRRLLDTESRIGKWAYALIEFDLLYEPLRAIKGQVVADFIIDHMVKDDMDVDFVSVCPWKLYFDGSVCGNGQGIGIVLFSPNDMIYETSVRLEYPCTNNQVEYEALLFGLQSLVDMGVRDIDAFGDSHLVVEQVNGEFNCLDGLLNSYLDRCLDIIKSLDTFTICHISREDNVRANFLAQQASGYHVNRGVFFVIKKPAFVTVGVDSVGGVISTVTIDTINDLTKQGKTGSVQQQGITGSVGDELGDWRSPLINYLRDPSQSRDRKVQRQALKYTLLDDELYRRTIDGLLLKCLGPDQSKVAMGEHIIHRFGIPQALTTDQGASFMSHQFSEFVESFRIKLLNLSPYYAQANGQAESSNKILIKLIKKKVEEHPRRWHEVLSEALWAHRISKHGATQVTPYELVYGQEAVLTVEVNLQALRIARQNGLSAVDYRNLMMDRIDDVPEERLKALRHIEKEKLRVARAYNKKNNMGLGYIKTNGSCRDEAGCFDAEAYTEGNTRWHACQLR

SEQ ID NO: 188423 - protein, 371 aa, Oryza sativa
  Clone ID: PAT_MRT4530_85028C.1.pep
KYTLLDDELYRRTIDGLLLKCLGPDQSKVAMGEVHEGFYWPTMLEDCFRYYKGCEACQRFGNIQLAPAAMLHPIVKPWPFRGWGLVFVGEIHPSSSKGHRFVLVATDYFSKWTEAVPLKNMTHKEVINFVLEHIIHRFGIPQTLTTDQGASFMSHQFSEFAESFRIKLLNSSPFYAQANGQAESSNKILIKLIKKKVEEHPRRWHEVLSEALWAHRISKHGATQVTPYELVYGQKAVLLVEVNLQALRIARQNGLSAVDYRNLMMDRIDDVPEERLKALRHIEKEKLRVARAYNKKVREKSFQIGELVWKTILPIGTRSSKFGKWSPSWEGPYKVVEIVPGNSYFVQSLQGDKLPKALNGRYLKKYYPSIW

SEQ ID NO: 188424 - protein, 94 aa, Oryza sativa
  Clone ID: PAT_MRT4530_85029C.1.pep
QHIPCPQQNGAIGLTRQAAARGREERRLGPARGGVGRGQARRGGPEEQRLRRRGGAAALRSGGSVGAVARRPRDRGAAERSGAALSARRRGGSV

SEQ ID NO: 188425 - protein, 205 aa, Oryza sativa
  Clone ID: PAT_MRT4530_8502C.1.pep
MEAFGGFFVDEKPARVENIFLEFLRRFKEADAAEAFYETELEAMRSRESTTMYVDFAHVMRFNDVLQKAISEEYLRFEPYLRNACKRFVMEQRTGENRAPIISDDSPNKDINIAFYNIPMLKRLRELGTAEIGKLTAVMGVVTRTSEVRPELLQGTFKCLDCGNVVKNVEQQFKYTEVVTVNLMFYFFLSCNVSNERFLLLNFSQ

SEQ ID NO: 188426 - protein, 93 aa, Oryza sativa
  Clone ID: PAT_MRT4530_85030C.1.pep
MEKCRSVPHEHSAAYYGCGGGYDYEDVSGGGGGAAAKSYSFNGPSARDDPEAKRRRRVAAYNVFATQGRLKSTVRSSFKWIKSKFSDIRYGGL

SEQ ID NO: 188427 - protein, 207 aa, Oryza sativa
  Clone ID: PAT_MRT4530_85031C.1.pep
IKLLNLSPYYAQANGQAESSNKILIKLIKKKVEEHPRRWHEVLSEALWAHRISKHGATQVTPYELVYGQEAVLTVEVNLQALRIARQNGLSAVDYRNLMMDRIDDVPEERLKALRHIEKEKLRVARAYNKKGDKLPKALNGRYLKKYDAILSGEQQQQIDGLEDSCMMNNMGLGYIKTNGSCRDEAGCFDAEAYTEGNTRWHACQLR

SEQ ID NO: 188428 - protein, 76 aa, Oryza sativa
  unsure (1)..(76): unsure at all Xaa locations
  Clone ID: PAT_MRT4530_85032C.1.pep
XFXXXXKKDYKCMPFIYLCFLFLVLSTVYSLLYFPNKCTGQIIYTSFVSQYKVILVFSIFILMLMNHQHQYKYGKC

SEQ ID NO: 188429 - protein, 228 aa, Oryza sativa
  Clone ID: PAT_MRT4530_85033C.1.pep
MAEANDEAKSDSEAELHLTVVLCTDKKGKLKPRRASSQILEKPKDVDGPENKSNPEGQVSDSSDSDYRQPIEQNSSDNDEEAEQLWKFAKEIKRNIRARKLGVHSNQAGLLRAAAELIPRVEHRICARHIYANWRKRYTNQKLQKKFWNCTKSSCRELFNYNRAKLAQDTPQGAKDMMTTALEHWSRAFFQLGSNCESVNNNMCESFNNSIMDSRFFPVISMNEDKGR

SEQ ID NO: 188430 - protein, 57 aa, Oryza sativa
  unsure (1)..(57): unsure at all Xaa locations
  Clone ID: PAT_MRT4530_85034C.1.pep
MESGYGFRFSDDDVXWESASSLTVGERLSAAVLAIAAIAVDEFYGVTYMLIYLVQLN

SEQ ID NO: 188431 - protein, 383 aa, Oryza sativa
  Clone ID: PAT_MRT4530_85035C.1.pep
MASSAPAWVPYEPTRDCSQGLCSMYCPQWCYFIFPPPPPFDVAGTSADDSSGPVFSPLVIAIIGVLASAFLLVSYYTFISKYCGTVSSLRGRVFGSSSGGAAYGGGAGSGGRHGHGQSRSHESWNVSPPSGLDETLINKITVCKYRRGDGFVHTTDCSVCLGEFSDGESLRLLPRCSHAFHQQCIDTWLKSHSNCPLCRANITFVTVGLASPEPEGCAPGETGGDNTHEVVVVMDGLENLCEEQQEAVSRASTADDDHDAKDVAEGMEEANGAAEIREEGSPPKRGASSFDLHRDNRMCIADVLQESMEDELTAARESGLLAGGAGTSRRCHGENSKGRGGRSRRALQLQDAMEALPGKRLPSGGRSCFSSKSGRGKDSDHPM

SEQ ID NO: 188432 - protein, 258 aa, Oryza sativa
  unsure (1)..(258): unsure at all Xaa locations
  Clone ID: PAT_MRT4530_85036C.1.pep
RQRFFFSMAQLVHDHYMNNHEQKCVGSVFGHQVLDRNTDHWRLYIDYLSEEPMYGPVYFKSMFRMRXLFLLRIMHVVEEYDNYXQKRNASGTLELSCLXKITTVFQMLSYGVASDAIDEYVHIGGSTTTXSLKWLVKAIGEVFREEYLRTQNENNIARLLAIGEGEIFLVMLSSIYCMHXKXDNCFAAWQGIYGAHVWEPTIILKVGAVHDLWFWHAFLVYPXSHNDINFFFNGCGVFAKLAEGKSSKVNYIINMHNY

SEQ ID NO: 188433 - protein, 35 aa, Oryza sativa
  Clone ID: PAT_MRT4530_85037C.1.pep
LIPCLMLANCWCSSILMVIDCVPTFRYAGLQAVQL

SEQ ID NO: 188434 - protein, 514 aa, Oryza sativa
  Clone ID: PAT_MRT4530_85038C.1.pep
MRPIFFPHEFFRPRAPAAVARDDEAEGTKPILAPHELFHHEAPAAAAATVVRDEESDEEPIVGIVGLEMSDFQVIGELGGGLYNVVYKARLRRCPHGGVFALKTPYYDLGGREEDEAVAAVLRRVEGLEHVVRCHAMFRRNESLRVAVFEHMNGGSLDRALSRRGGRGLPEPALAEVAAACLAALRGLHSRGVVHLHLNPFHILADADGNIKICDFDDAKIIPPGPGSTVYSGIGFGSPEYMSPERCAPMAMAGARVARAADVWSLGITVLHLYQGYCPARPLPSKRTLERLSYEISHGEPPSVPDEDTRASIELRGFVSACLQKCVCTRATVAELLNHPFVAERDVAESRRVLKEASTQCNGRAKACPVFQLPSFSLAELSLVDASSRRASNLLTLGSTEEDQQEADGAEDPALVFDVDDEGEMSVLLAAAAEYARRMRHVGMQVVAMTSRYPEVGFGEASFTEPSPTNGRIRYHSPSAAELLPADELVATGPSAADAVRMRRFSAAVGALQK

SEQ ID NO: 188435 - protein, 123 aa, Oryza sativa
  unsure (1)..(123): unsure at all Xaa locations
  Clone ID: PAT_MRT4530_85039C.1.pep
MWAPHXASSPFLLLPPLPSLFLSPSPLRPSAGSERRRRPWAGAEAAGWSPCHAARTTTTRTTQRTASRRRRRPSDGCGSPRAAAVGGSGRAGRRAGGQGXGGSRQWEDEGNGGGREKQATAVT

SEQ ID NO: 188436 - protein, 247 aa, Oryza sativa
  Clone ID: PAT_MRT4530_8503C.1.pep
MARWFYHTIPFEAGTYSAKALRCRHRAIAPNWKPKIAVDGAMEARFVLLRKVCSRLSCRDLVEEFCMLRIFPLSQSWQVTVDQGEEVDGLPNLILPEGTDTLTLDQAENEARRMIGDVSVVDLPLGEEEEEEAVADKAANEAIEDRVDTLGYTPTPSPGHNETGVEFNSSHLRRKDLEGAKALVAFSSGKAAKGGPVQKISKKKGLVDIARVFSDDESSDGTPTSPAGRSLDLSTAPLAPLGVAGAG

SEQ ID NO: 188437 - protein, 178 aa, Oryza sativa
  unsure (1)..(178): unsure at all Xaa locations
  Clone ID: PAT_MRT4530_85040C.1.pep
MASSPFLLLPPLPSLFLSPSPLRPSAGSERAAAAGASWXRRRPWAGAEAAGWSPCHAARTTTTRTTQRTASRRRRRPSDGCGSPRAAAVGGSGRAGRXRAGKGGGGSRQWEDEGNGGGREKQATAVTSKPRDRTAWPHGEAEPLEERNEEEHAAEEVASRRHPPPPTRRGRPPRGEAP

SEQ ID NO: 188438 - protein, 92 aa, Oryza sativa
  Clone ID: PAT_MRT4530_85041C.1.pep
MVARMKKLQAQSHMSDKITHSQPHEARCVNVGPVQSINSDKVHGRGMAVGGGEEFWLPTGWLTNEYGGGLGSSMAEVEKEEEINTLQSVLLE

SEQ ID NO: 188439 - protein, 154 aa, Oryza sativa
  unsure (1)..(154): unsure at all Xaa locations
  Clone ID: PAT_MRT4530_85042C.1.pep
WRTAVSFIKSISLSFFDTWNDYDAVFFLCSRAVVGGQTLGLRRGRRGESVVFCCSAYLAPPYGEGGLSGKAGPLGILIMGAPMDSNLMNVRSHVTATDTTRSTCDQVITLGDKDEPKPADGAATSNDTLXMLAHPESLLNRITGHYSCTENGHM

SEQ ID NO: 188440 - protein, 88 aa, Oryza sativa
  Clone ID: PAT_MRT4530_85043C.1.pep
ARGSSTTPTPSSAATAGRATRCSPSPGANSSKSACPTRSDRSLMHPPSIPSLIIAFISSSLFIISISIHLLFFISSLLLPLVMVSTSS

SEQ ID NO: 188441 - protein, 75 aa, Oryza sativa
  Clone ID: PAT_MRT4530_85044C.1.pep
IHPCSTLVRRVRFTSQLNRYLLYCLCTNHCMSWPLFLNPYLMKLEVDLWLYACGRTNGSPCSAPVPSARRPERLA

SEQ ID NO: 188442 - protein, 108 aa, Oryza sativa
  unsure (1)..(108): unsure at all Xaa locations
  Clone ID: PAT_MRT4530_85045C.1.pep
PGIAAATPRRAARHATPRRRRHATPPPPRHAXPPSPRRRRRANRRPDAATPPLTNENENDRTNESENEHVNVRCRENVNDNENVNENKRTNVNENERTNVNERTNVNE

SEQ ID NO: 188443 - protein, 55 aa, Oryza sativa
  Clone ID: PAT_MRT4530_85046C.1.pep
MATVESAHYIKTEHLVPLSEQQLVDYADIALNHTSRRALEWIAENDGITMQLDYP

SEQ ID NO: 188444 - protein, 54 aa, Oryza sativa
  Clone ID: PAT_MRT4530_85047C.1.pep
DLLPMANLKYDLPLLNQGCYNFIVQVTNWRTIVCLHEVVWRMKVLMLKGKFVSR

SEQ ID NO: 188445 - protein, 301 aa, Oryza sativa
  Clone ID: PAT_MRT4530_85048C.1.pep
MAGGGGAGSKVSVAAVQFACTDVESENVDTAERLIREAHKKGANIVLVQELFEGQYFCQAQRLDFFQRAKPYKGNPTIIRFQKLAKELEVVIPVSFFEEANNAHYNSVAIIDADGTDLGLYRKSHIPDGPGYQEKFYFNPGDTGFKAFKTKYATIGVGICWDQWFPECARAMVLQGAEILFYPTAIGSEPQDNNLDSREHWKRVMQGHAGANLVPLVASNRIGRETVETEHGESTITFFGNSFIAGPTGEIVKLANDKDEDVLVAEFDLDEIKSTRHGWGIFRDRRPDLYKVLLTLDGEKS

SEQ ID NO: 188446 - protein, 166 aa, Oryza sativa
  unsure (1)..(166): unsure at all Xaa locations
  Clone ID: PAT_MRT4530_85049C.1.pep
MAEHDLTARMAGHLDCHLVLPLLEFLQERHLYPEEEILEAKIRLLRGTNMVDYAMDIHKSRYGTDDVPEDMVKRRAEVVSRLTSLGEAIDNIHQNQQIGPDQIETLYQYAKFQFDCGNYSFAAQYLHQYRALCTNIERSLSALWGKLATDILMENXDVALEELNRL

SEQ ID NO: 188447 - protein, 45 aa, Oryza sativa
  Clone ID: PAT_MRT4530_8504C.1.pep
FRCSLQFKTLNLSNTWTKSSLVCTMGVRIMYSLLYWLSCWHYFLL

SEQ ID NO: 188448 - protein, 65 aa, Oryza sativa
  Clone ID: PAT_MRT4530_85050C.1.pep
AMEVEAKKMRREVAAMEKEVAAMRLDKDQENKAKRPGNFKGPGTTSQAPHGSRNAPRGGLTRNLQ

SEQ ID NO: 188449 - protein, 149 aa, Oryza sativa
  Clone ID: PAT_MRT4530_85051C.1.pep
MGDNNNCVATVTTTIVKASRGEDPLVPVSGAMLVKERQGMAVEVQDPPPRPAMGGSIEGGKGVLRRGGNGFWGSDDDIGLCRRRRQYEWELRSGHDPGSGVSRLTAVAQIWQRDRPISLISMQIQQLAQQWCRYGVNVSSRVAVVLIQQ

SEQ ID NO: 188450 - protein, 147 aa, Oryza sativa
  unsure (1)..(147): unsure at all Xaa locations
  Clone ID: PAT_MRT4530_85052C.1.pep
RPTLPWATMDPCXSDMMQTFGMGXSPQPMFMFPPMAAPASTNVCMQLHRHDPSVHCGTSCQMIRAMQQVICAGLGXQQMMKMAIRXPYMCNMAPGATVQLSSCGCFDQRWLHGTLVIRCCILCVVPTLEIRTLNENDACMFAGLAKK

SEQ ID NO: 188451 - protein, 68 aa, Oryza sativa
  unsure (1)..(68): unsure at all Xaa locations
  Clone ID: PAT_MRT4530_85053C.1.pep
HIKQQTXPTPPINFHHHAQNSLDYGQQQQPSGAQXPRTGTAGNNSKESKYENDLHCCWILLPRFNYNI

SEQ ID NO: 188452 - protein, 312 aa, Oryza sativa
  Clone ID: PAT_MRT4530_85054C.1.pep
PVYKGKLPDGRVIAVKQLSQSSHQGKSQFITEVTTISSVQHKNLVKLHGFCIDNNAPLLVYEYLENGSLDQALFSDSNLNLDWVMRFEIILGIARGLIYLHEESSIRIVHRDIKASNVLLDTNLVPKISDFGLAKLYDENQTHVSTRIAGTLGYLAPEYAMRGHLSEKADIFAFGVVMLETVAGRPNTDNSLEESKICLLEWAWGLYEKDQALGIVDPSLKEFGKDEAFRAICVALVCTQGSPHQRPPMSKVVAMLTGDVDVAKVVTKPSYITEWQLRGGGNSSNTTSSYAWSSNPELSRQKEITEVSLQVR

SEQ ID NO: 188453 - protein, 100 aa, Oryza sativa
  unsure (1)..(100): unsure at all Xaa locations
  Clone ID: PAT_MRT4530_85055C.1.pep
MNHSLLHSAAMAAAAATPNSLLLRRPTAPKLATAAXQLRLPTRAARXISCMAVATPAQSSFSPTGGGVAANRKVFNFAVGMATLPFSVLQXAQAELVHYH

SEQ ID NO: 188454 - protein, 383 aa, Oryza sativa
  Clone ID: PAT_MRT4530_85056C.1.pep
MSRYLKQYEKEHMKMAMLRQEETFKQQVQELHRLYRVQKLLMDAGSAITMQGISCIPEDDYHAEENEAGSSRPWHTFPGSDNDKPQAHTSVLEESELDLTLAIGRTTTTKKEAPSSSVDSRTSNSSSSTESGSTNCRAVMPHRPSRLGSSSAVKVVAGGPGVGTTQQHLDLEQQDALKQPPWLHPWPGRSNPADALATRSSQMSLYYVPGQGGLKYDGCEKGKCPNCPATVFGRASGASMPNPRINGDQRGSPEPRLGPPGLAFDVGGIESTFNSRQQSLIYHPTSTENKEPTAKSIGFTPTSAQYDRVAHGWWTGLRTLTRDCWARCVTTVEIVEFSLTSVIDDGRARLKSVMLKDKTGCNGCKLDDTQRISSYKLCPIDKT

SEQ ID NO: 188455 - protein, 34 aa, Oryza sativa
  Clone ID: PAT_MRT4530_85057C.1.pep
WLDMLAAILGRGLSNISWLQYPQCMTVTMLRPSA

SEQ ID NO: 188456 - protein, 664 aa, Oryza sativa
  Clone ID: PAT_MRT4530_85058C.1.pep
CRNSARGRIAPPPPLRLSLSFLHPKPPKAGEGEARRGLSMESRGEGDGERASIRRGRRRVMGSEGEGEGEGEGEEVKWAMLFTLPIPVTDEELPPTRDLAMSKQPPPLISFLCLPQRSLGEAAHCFVEIVCADSAGRLLLSAKPRPAPAATTSAALPPRQGVIIICDATNLKVMRLPLPVGATCDDNERGFPCLAVLSDPRDEEDGDAYIVVLLHADASGAFQEVLCYESKTGGVLDTQTHDQDWSDTETHDQDWSEKLLSCNSQQPPRGWHRHSHSHRAIPLDGEVCWIDAAYGLVLCEVLLEDPRLRYVQLPEGCTMDEDDDMGSPAVVEKLRRRCIGVSDGKLRYLQIDSSGQSIAVWTLMTLKDVTFWEHTFSVDLVSLRADKSFQEAGLNPHIFPSVAGIHPIDTSTIFLVQNSIIFSVSSDTTTSSIKVGDHHKFLLNENEITPSLFLLPWLVHDPADLLPQETPPRSNCSKRWLRALKLKQALKRGIVWLSDNHEVVTHVGDVIDFLTIPAGGSFRSAAICVKKVGSYCSKTGKILKFHNSRLHANDPVKALPMEDFQIINDVDEDVESLSMEGIHIVKNVNEARRFINQWISCQQPHSCIMDVAKSVGVEECINILTYLGGENATFMLMNSPTFLEKTGNNLRKSSDLKEWVYLKE

SEQ ID NO: 188457 - protein, 468 aa, Oryza sativa
  Clone ID: PAT_MRT4530_85059C.1.pep
MGSSAEPPPPCHVVAVPYPGRGHVNAMLNLCRILAARDGVTATVVVTEEWLGLLGGAAAAAAEGGVRLEAIPNVVPSEHGRAGDMLGFVRAVYTRMEAPFERLLDRLALGAAPPPPAAIVADTFVLPWAVGVGNRRGLPVCVLSPLSATMFSVHYHFDRLPTATDIADGDEVGNYIPGLKSIRFSDLEPTHTNKNMVDLILEAYSHARKAQCVIFTSFYELESNAMDALRRDLPYPAFSAGPCIPYMALQADEHHAGDEEEEPYMAWLDAQPVGSVLYVSLGSFLSVSRPQLDEIAAGLADSKVTFLWVLRGDSGARDILRGGGGMVVPWTDQLKVLCHPSVGGFFTHSGMNSTLEAVHAGVPMLTLPIAFDQPIVARLVADEWRIGYGLRENGDGGGCSGVVGREEIAAAVRRLMVMDSDAAAAEEAKEMRRRASLMREASRAAVQEGGSSYRDVTSLINYISEFKN

SEQ ID NO: 188458 - protein, 723 aa, Oryza sativa
  unsure (1)..(723): unsure at all Xaa locations
  Clone ID: PAT_MRT4530_8505C.1.pep
VELPQLSPLALVRIAIFDWACRTSGFEPNAELFGAIFFATVNSKTAITPAGTKKTVFGSVNFNVRPERSDLSPVNAAMSKSDRHWIARWFYHTIPFEAGSDLAKALQCRRKVIAPNRKPKIAVDGAMETRFVLLRRVCSRLSCRDLVEEFCILRIFPLSQAWQVTVDQGEEVDGLPNLILPEGTNMLTLDQAENEARRMIGDVSVVEYSQLLTRQAAGRANQLAPRKRRVPASSDSDADDEDDTEERDGEEKGEEEEEEAVADKAAKETVEDRVDTPGYTPTPSPGHNETGVESNSSPLRRKDLEGAKALVAFSSGKVAKGGPVKKISEKKGLVDIARVFSDDESSDGTPTSPAGRSLDLSTAPLAPLGAAGAGSNAAAGASASAERIASTAARVFGSPLREPAISPLVKAKCAAAKTSASEYSLAAPHFAPGDFETRADLFPFVEGILVAHCSTERTMRARFDGFKSRLQAKDDEISRKNLEVEALANTLKEAKTEVKRLQSELDKGKEARAEVDRLKAELEKEKAHSAVLTNYYNLTEPKMEXLRQKASRAEASXTEESQRFSWEMAKTAESARTACQTLRLALTDMGAKVRGVPAEDASAFDFSEWTQQAGGSVSDCATAYGDCCARVSAAFTLGLLQQFGCEHVAEFPTYAKGEWEISAQNISPALRAWRKQFWQKDGRSAAKARLLEQLAKAKAAGRGEKKGAAGEEVGGDAQDHPEV

SEQ ID NO: 188459 - protein, 421 aa, Oryza sativa
  Clone ID: PAT_MRT4530_85060C.1.pep
MDEEQLRALLRDLDALKQRPDPAAIDRMRERVAGMVTPAAAARSKIKDMSSEVVDSNPYSRLMALQRMGIVDNYERIRDYSIAIVGIGGVGSVAAEMLTRCGIGRLLLYDYDTVELANMNRLFFRPDQVGMTKTDAAVQTLSGINPDVTLESYSLNITTVKGFETFLGSLKARSSDGRNTGVDLVLSCVDNYEARMVVNQACNELGQTWMESGVSEDAVSGHIQLLVPGETACFACAPPLVVASGVDERTLKREGVCAASLPTTMGVVAGLLVQNALKYLLKFGQVSPYLGYNSLKDYFPTMEMKPNPQCSNPACVQRQKEYMQSKPARDAAAKAKMEAEASAADECPVHLDNDWNISVVDDSDTVTPSILSTGADSLPEGLVRELPTADSYQEPVAPVTSGAIDDDLEELQRQLDALNSS

SEQ ID NO: 188460 - protein, 191 aa, Oryza sativa
  Clone ID: PAT_MRT4530_85061C.1.pep
MRSVQTPVEQKLSNGGGGVEAATMVFVYGTLKRGFPNHPLLAASGSPLVGAASTATPASLVVGPYSVPFLLPRPSSSSGSHLVSGELYAVSPRALVDLDALEGTHLGVYERRKVTVVVEGGSGEVVEAEAYFAHTSYMEALWLRCGGEAAEIGEYTMEHAAKYVPPSCRSPDASGLMHAIHVFLLATSPSP

SEQ ID NO: 188461 - protein, 1540 aa, Oryza sativa
  Clone ID: PAT_MRT4530_85062C.1.pep
MDEEQLRALLRDLDALKQRPDPAAIDRMRERVAGMVTPAAAARSKIKDMSSEVVDSNPYSRLMALQRMGIVDNYERIRDYSIAIVNSVEGWWLSSSPAVIASCRRPPSPLVVASGRRRNPSLLVAGLRNPSLLVAGLRLAPLVTGLRPPSPLVVGLRTSSTLVAGASAWVVGRRRLGRSVSVSPIRIWIGSHWAQHMRLHMRGQRLWDVLSGELPFPPCPIAPTMPSLASQATDDDRAKAKEQFDDAMENYQSQFALYKAWLDEDARASAILVASMEIHLTGEVVTLTSAHLMWTHLRDRYAPTSDALYLAMVRQEQSLQQGDSTVDEFYTQLSSIWRQLDSLGPAICHTCQCCQRQRSHMDLRRIYDFFTRLRSEYESTRAQLLARHPRVTIMEALTEIRSEDIRLREAVVPSGRGHLHFTYYDKDGHVESFCFRKKDLRRGNSSKGTSGSSQKSAGGSDSQEILMLLRRLTASAATGSVGSVALPSAQFGSAVLGSSSSTEGPSSAPGTIPWILDSGASFHMTHDRSSLSSICSPLVPTTVHTVDGTPLAVVGRGTLSTSSFSVPAVSYVPKLAMQLMSAGQLTDHGCRVILDSDSCCVQDRHTGLLVGTGPRRRDSQRLWDLDWLRLPFAAPASLLASAASSMVSFAQWHHRLGHLCGSRLSALVRRGLLGSVLGDVSLDQCQGCKLGKQIQLPYHSSESVSKRPFDLVHSDVWGPAPFVSKGGHRYYIIFIDDFSRHTWIYFMTHRSEVLAIYKSFARIIRTHFDSPIRVFRADSAGEYLSIELRVFLSEQGTLSQFSCPGAHAQNGVAERKHRHLLETARALMIASSVPPHFWAEAVSTANYLTNIHPSSALQGGIPIEHLCGQPPDYSNLRLFGCACYVLLAPQDRYGYVATVLAEPRSYRDAVVHQEWQHAMAEELAALERTGTWDLVPLPSHACPITSSAHHWNISQLDVKNAFLNGELHEEVYMRPPQGYSVPEGMVCRLRRSLYGLKQAPRAWFQRFSSVVLEAGFSASAHDPALFVHTSPHSRTILLLYVDDMLITGEDAEFITFVKARLSEQFLMTDLGPLRYFLGIEISPTPEGFHLSSQGYSDATWASDSSDRRSLFAFCVFLGGSLIAWKTKKQTTVSRSSAEAELRTMALLTAEVTWLRWLLEDFGVFVTSPTSLLSDNTSAISIARDPIKHELTKHIGVDASYTRTQGIGGVGSVAAEMLTRCGIGRLLLYDYDTVELANMNRLFFRPDQVGMTKTDAAVQTLSGINPDVTLESYSLNITTVKGFETFLGSLKARSSDGRNTGVDLVLSCVDNYEARMVVNQACNELGQTWMESGVSEDAVSGHIQLLVPGETACFACAPPLVVASGVDERTLKREGVCAASLPTTMGVVAGLLVQNALKYLLKFGQVSPYLGYNSLKDYFPTMEMKPNPQCSNPACVQRQKEYMQSKPARDAAAKAKMEAEASAADECPVHLDNDWNISVVDDSDTVTPSILSTGADSLPEGLVRELPTADSYQEPVAPVTSGAIDDDLEELQRQLDALNSS

SEQ ID NO: 188462 - protein, 1204 aa, Oryza sativa
  Clone ID: PAT_MRT4530_85063C.1.pep
MSSLSGTVSVPHCPVLFDGCNYSHWAQHMRLHMRGQRLWDVLSSELPCPPCPIAPTMPSLASQATDDDREKAKEQFDDAMENYQSQFALYKAWLDEDARASAILVASMEIHLTGEVVTLTSAHLMWTHLHDRYAPTSDALYLAMVRQEQSLQQGDSTVDEFYTQLSSIWRQLDSLGPTICHTYPCCQRQRSHMDLRRIYDFLTRLRSEYESTRAQLLSRHPRVTIMEALTEIRSEEIRLREAGILPLPSSVLAVRTVASSASSTPAVHSTVSSSSSSARPPTTVVPSTRGHLHCTYCDKDGHVESFCFRKKKDLRRGNSSKGTSGSSQKSSGGSDSQEILMLLRRLTASAATGSVGSVALPSAQSGSAVLGSSSSTEGSSSASVPTTVHTADGTPLAIVGRGTLSISSFSVPAVSYVPKLAMQLMSAGQLTDHGCRVILDSDSCCVQDHRTGLLVGTGPRRRDSQRLWELDWLRLPSAAPASLLASTASSTVSFAQWHHRLGHLCGSRLSALVRRGLLGSVSGAVSLNQCQGCKLGKQIQLPYHSSESVSKRPFDLVHSDVWGPAPFVSKGGHRYYIIFIDDFSRHTWIYFMTHRSEVLAIYKSFARMIRTHFDSPIRVFRADSAGEYLSRELRVFLSEQGTLSQFSCPGAHAQNGVAERKHRHLLETARALMIASSVPPHFWAEVYSRKPRIQEPSLDASPVAPPRYNFRDRNLVTIRPEDRYGYVATVLAEPCSYRDAVVHQEWQHAMAEELAALERTGTWDLVPLPSHARPITGKWIYKVKTRSDGTLERYKARLVARGFQQEHGRDYDETFAPVAHMTTVRTLLAIASARHCNISQLDVKNAFLNGELHEEVYMRPPQGYLVPEGMVCRLRRSLYGLKQAPRAWFQRFSSVVLDAGFSASAHDPALFVHTSPRSRTILLLYVDDMLITGDDAEFITFVKARLSEQFLMTDLGPLCYFLGIEISSTPEGFHFSQAKYIQDLLDRASLTDQRTVETPMELNLHLSATDGEPLADPTRYRHIVGSLVYLGVTRPDISYSVHILSQFVSAPTQIHYSHLLRVLRYLRGTISRCLFFPRSTSLQLQGNSDATWASDSSDRRSLSAFCVFLGGSLIAWKTKKQTAVSRSSAEAELRAMALLTAEVTWLRWLLEDFSVSVTSPTSLLSDSTGAISIARDPIKHELTKHIGVDASYTRTQVQDQVVAL

SEQ ID NO: 188463 - protein, 78 aa, Oryza sativa
  Clone ID: PAT_MRT4530_85064C.1.pep
SAGQLTDHGCRVILDSDSCCVQDRHTGLLVGTGPRRRDSQRLWDLDWLRLPFAAPASLLASAASSMVSFAQWHHRLGH

SEQ ID NO: 188464 - protein, 472 aa, Oryza sativa
  Clone ID: PAT_MRT4530_85065C.1.pep
MVGANKARELGGGRTSWARGCSKTREMGGAGLSTPGNLKRASRGGDLQISFPLAASCSSVGNQIRPSRTEGGREAWQRGSAQVQRGFRDMYRGGLDRFKKAQALEPFSVQSGSAAKNVPAAARTAKGPPAPLTLPQNSHVGTSQSHLSPQGASLRVAGQETGAPGHAGTQVGGGQSAWQPPDWAIEPRPGVYYLEVLKDGDVIDRINLEKKRHIFGRQVPACDFVLDHQSVSRQHAAVVPHRNGSIYVIDLGSVHGTFVANERLTKDNPVELEVDPNDEDAVVAYNTILNRYGISKSDLSRSKDSSGDASGANDDNEPAGRPLKRSKKLRVSFRDQVGGELIQVVGISDGADVETEPGPVGVKEGSLVGKYESLVQVTVIPKGKEQPSPKESASPSGVTDKLKQVLTKVKSTAKGGIYDDLYGDTVPQLLGPSWAYRSDDQAEKVKAADEKKSSGNMDTNSADDNDDLFGDL

SEQ ID NO: 188465 - protein, 53 aa, Oryza sativa
  Clone ID: PAT_MRT4530_85066C.1.pep
MMVLLATLSAHKRMGLLATLSAHKRMGLLQRRPTGSDLLKQELTGVTARVLWC

SEQ ID NO: 188466 - protein, 61 aa, Oryza sativa
  Clone ID: PAT_MRT4530_85067C.1.pep
MAPALALAIAVVGDSKQPPPVTPTLPPPHVAKETFCVRAMAFSIRYQSSYIRLGTHKYQSL

SEQ ID NO: 188467 - protein, 133 aa, Oryza sativa
  Clone ID: PAT_MRT4530_85068C.1.pep
MVVVVSHVMALLSSALSGKKAAAEGDGDDDGGQCRCWRDGDGVGGGQAAAAGCCVCISGFRDGEEVRRLPCGHAFHRDCVDRWLALYCRRRTCPLCRLHVGGAVVAAAVAGLDELQLGDDLVIWFSSLFVAGF

SEQ ID NO: 188468 - protein, 135 aa, Oryza sativa
  Clone ID: PAT_MRT4530_85069C.1.pep
FFFFFCLSPKYRATTCDQSTTVAEPEKPFSFLLFFSFFLYLPIQIRIGETDTERPSDGALQPRRRRPRPGVDDGRRPTTRGDGGRRPATSGGGRRPATSSDGFQRPATSSGRVPTAAGGHDEGRRRSATRSDDSR

SEQ ID NO: 188469 - protein, 165 aa, Oryza sativa
  unsure (1)..(165): unsure at all Xaa locations
  Clone ID: PAT_MRT4530_8506C.1.pep
RRRGSAPTSATATSAATCTRASTASTRRRRRGNTPRGIVGNDITGPIPLSLGCLGLVEELNLAGNQLXGKLQNLSLSDNYFHSVGRRHCLELVRSKVLDVRLNCIPNFPHQRPALECARFYADPPQHCPFVPHIPCDLPGFRPPAAALPSAVAAEEGGGGGGGGN

SEQ ID NO: 188470 - protein, 421 aa, Oryza sativa
  Clone ID: PAT_MRT4530_85070C.1.pep
MYRGGLDRFKKAQALEPFSVQSGSAAKNVPAAARTAKGPPAPLTLPQNSHVGTSQSHLSPQGASLRVAGQETGAPGHAGTQVGGGQSAWQPPDWAIEPRPGVYYLEVLKDGDVIDRINLEKKRHIFGRQVPACDFVLDHQSVSRQHAAVVPHRNGSIYVIDLGSVHGTFVANERLTKDNPVELEVGQSLRFAASTRTYILRKNSAAFFPTHSLPSDVSLPSPPDPNDEDAVVAYNTILNRYGISKSDLSRSKDSSGDASGANDDNEPAGRPLKRSKKLRVSFRDQVGGELIQVVGISDGADVETEPGPVGVKEGSLVGKYESLVQVTVIPKGKEQPSPKESASPSGVTDKLKQVLTKVKSTAKGGIYDDLYGDTVPQLLGPSWAYRSDDQAEKVKAADEKKSSGNMDTNSADDNDDLFGDL

SEQ ID NO: 188471 - protein, 1233 aa, Oryza sativa
  Clone ID: PAT_MRT4530_85071C.1.pep
MSSLSGTVSVPHCPVLFDGCNYSHWAQHMRLHMRGQRLWDVLSSELPCPPCPIAPTMPSLASQATDDDREKAKEQFDDAMENYQSQFALYKAWLDEDARASAILVASMEIHLTGEVVTLTSAHLMWTHLHDRYAPTSDALYLAMVRQEQSLQQGDSTVDEFYTQLSSIWRQLDSLGPTICHTYPCCQRQRSHMDLRRIYDFLTRLRSEYESTRAQLLSRHPRVTIMEALTEIRSEEIRLREAGILPLPSSVLAVRTVASSASSTPAVHSTVSSSSSSARPPTTVVPSTRGHLHCTYCDKDGHVESFCFRKKKDLRRGNSSKGTSGSSQKSSGGSDSQEILMLLRRLTASAATGSVGSVALPSAQSGSAVLGSSSSTEGSSSASGTIPWILDSGASFHMTHDRSSLSSICSPLVPTTVHTADGTPLAIVGRGTLSISSFSVPAVSYVPKLAMQLMSAGQLTDHGCRVILDSDSCCVQDHRTGLLVGTGPRRRDSQRLWELDWLRLPSAAPASLLASTASSTVSFAQWHHRLGHLCGSRLSALVRRGLLGSVSGAVSLNQCQGCKLGKQIQLPYHSSESVSKRPFDLVHSDVWGPAPFVSKGGHRYYIIFIDDFSRHTWIYFMTHRSEVLAIYKSFARMIRTHFDSPIRVFRADSAGEYLSRELRVFLSEQGTLSQFSCPGAHAQNGVAERKHRHLLETARALMIASSVPPHFWAEVYSRKPRIQEPSLDASPVAPPRYNFRDRNLVTIRPEDRYGYVATVLAEPCSYRDAVVHQEWQHAMAEELAALERTGTWDLVPLPSHARPITCKWIYKVKTRSDGTLERYKARLVARGFQQEHGRDYDETFAPVAHMTTVRTLLAIASARHCNISQLDVKNAFLNGELHEEVYMRPPQGYLVPEGMVCRLRRSLYGLKQAPRAWFQRFSSVVLDAGFSASAHDPALFVHTSPRSRTILLLYVDDMLITGDDAEFITFVKARLSEQFLMTDLGPLCYFLGIEISSTPEGFHFSQAKYIQDLLDRASLTDQRTVETPMELNLHLSATDGEPLADPTRYRHIVGSLVYLGVTRPDISYSVHILSQFVSAPTQIHYSHLLRVLRYLRGTISRCLFFPRSTSLQLQGNSDATWASDSSDRRSLSAFCVFLGGSLIAWKTKKQTAVSRSSAEAELRAMALLTAEVTWLRWLLEDFSVSVTSPTSLLSDSTGAISIARDPIKHELTKHIGVDASYTRTQVQDQVVAL

SEQ ID NO: 188472 - protein, 345 aa, Oryza sativa
  Clone ID: PAT_MRT4530_85072C.1.pep
MMQTAGRRRHRWVKEWVPQDLMGSLAVAGCLNSMGEDRLSALKSRDKEQEAELAKPEPTTEVLFLCSYEGCGKTFVDAGALRKHAHVHGERQYVCHYAGCDKKFLDSSKLKRHFLIHTGEKNFVCPHEGCGKVLAFSLDFNLKAHMKTHSVDNYHVCKYPECARRFTQESKLRAHIKQQHEKGGLQNPGGSATNRSGLADHSHNSHTPKPSAAPPTPSADRPYVCPYDGCAKAYIHEYKLNLHLKKEHPNHYQDAGAQAASSKMSKRRSKPSLTAKMPLPKVPKRRGYTEPYQPPVSVVEEHQWPRNVLYEDDSEETEEEGDNVGDGARYRAASSDDDEETEDEE

SEQ ID NO: 188473 - protein, 52 aa, Oryza sativa
  Clone ID: PAT_MRT4530_85073C.1.pep
SPVICQASHAAGSSHWCCACAALRSASPRVLSPPSLSVTGPPDYPHRVGSQP

SEQ ID NO: 188474 - protein, 45 aa, Oryza sativa
  Clone ID: PAT_MRT4530_85074C.1.pep
LTLGARSVLFRVGRGQVHRIIENDLDKCRVVMPNLANVVGLITRH

SEQ ID NO: 188475 - protein, 111 aa, Oryza sativa
  Clone ID: PAT_MRT4530_85075C.1.pep
MSLEVSTAVLVIVIAVAITHSRRHQSCPFHRRCRSGGEARANPARRGRGAPCRRRLEEEERRKGKEVGRGERRGMEVRPDGGSGARVAKVSWRVGLKRVYDCKEKRIGEGD

SEQ ID NO: 188476 - protein, 82 aa, Oryza sativa
  unsure (1)..(82): unsure at all Xaa locations
  Clone ID: PAT_MRT4530_85076C.1.pep
KPKSEICRSFGAPVFINANPXFALNFPQDGIRVLFFFFPNWSPWCKTGVDESPPLVPKVPHWQKVXEKLFFWVVPKFFPFIR

SEQ ID NO: 188477 - protein, 1107 aa, Oryza sativa
  unsure (1)..(1107): unsure at all Xaa locations
  Clone ID: PAT_MRT4530_85077C.1.pep
MSGIGGMIASSVANRVASRLSELVVEEATLLWRFKDDVDDMEEKMRDLEAVIQDVDGKARQGGKDGEAERRWLNKLKSVAYDVEDVLDELDAAQLIKNHQPKLKLFLSRNNPLLRKMTIARNMKNSREKIVSIKKDSIKLHHVHRELVAEGSRDNETFADDGDVDIGMLGRDAETKKIINLLLNTEAKEDISIIPIVGLGGLGKTTLAQAVFADKRVNVFDLRIWVYVSKEFDLLKIGKAIIRGANRSINLDNCNLQFVNNNLKKELANRRYLIVLDDLWEEYGENLEKLKQMLQHGGKGSKIIATTRSGSVVQVLYTGYLANERKVCPVPEPDHINLGVLSPYDCWSVMKRRVFGPDDGQNGLEEIGRQIAEKCGGLPLVANALGQGFVMDTDRLIQQWIALGYIEARDNGQSLRDMPDSISDMASLTLLDVISGTKVELGKLSCRALGIQHLENVERLDNAREAKLRDMTDLRELTLSWGLGGTRNVDKDEXSGLRTFPDILQSFVSLRELYLCSWENLEILPEWLGQLICLERLEAPSVARRVASKLGDLAVEEATLLWRFKDDVNDMKEKMRDLADHINLDVLSPDDCWKVMKQRIFGPDDDQSGLEEIGRQIAGSIVELGRLRCRELEVRHLENVERLEDARKANLRDMVELRWLKFSWELGGTRSVDKDKLVLENLIPPRTLEEFLLDGEFEQAFALGRFENQQILVLNGLAIFPFDYLQASPSPAIQALVAPITKDTKTGLHTLSISNKNYLLDLSGQLLWSPCSPSHPTVPCSSGECAAASGAHKSCNNGGRACTARPTNPVTGERAVGDLTLADIVANATDGKTLTSEVTVRGVVSSCAPGSLLRSLPAMAAGDAGLGRGGVSLPTQLYSKLSLKRQFAVCLPSTAAAPGVAFFGGGPYNLMPPTLFDASTVLSYTDLARSPTNPSAYSIKLRGIAMNQEAVHLPPGALSRGGGVTLDTAAPYTVLRRDVYRPFVAAFAKATARITRMPSVAPFELCFNSSALGFTRVGYAVAPIDLVTSGGRNWTVFGSNSLAQVAGDTACLAFVDGGRAARSAVTVGAFQMENNFLLFDEAASRLGFSGTLFFIRTTCGNFNFARN

SEQ ID NO: 188478 - protein, 221 aa, Oryza sativa
  Clone ID: PAT_MRT4530_85078C.1.pep
MPSLNHYRYLAAVVLDRAISSSSSSSSSTLPSTSKMKIGKAPELLKKAATIVRSKASTVRARLLIVASLRRRMAMIGAISHRIHALIVEKEKARVDYYHKNKNHDGNKALVMRKVVVHDEMVIADDHDRHLSELAMFDQEDHHGYSTDHWTHSLFNDDDTCYSDDQDDCGDDDGDDDEPSVIDIIRSNREDEGLEFNIDDEIDQAADMFIRRIRSRMSRSV

SEQ ID NO: 188479 - protein, 355 aa, Oryza sativa
  unsure (1)..(355): unsure at all Xaa locations
  Clone ID: PAT_MRT4530_85079C.1.pep
MTIARNMKNLRDKIVAIEKDGKMLNLVRHEPHAKGSRSNETFTVSDDMEIGMLGRDAETEKIISLLLKTEAKEDISIIPIVGLGGLGKTTLAQAVFADKRVRVFDMKIWVYVSEDFDLLKIGKAIIRGANRSINLDNCNLQFVNNNLKKELANRRYLIVLDDLWEEYGENLEKLKQMLQHGGKGSKIIATTRSGSVVQVLYTGYLANERKVCPVPEPDHINLGVLSPYDCWSVMKRRVFGPDDGQNGLEEIGRQIAEKCGGLPLVANALGQVMSEHRTVEAWTDIRDRKIVLDFKADHQQDTIERLMLSYYYMKREFKMCFTYLAAFSKGFVMDTDRLIQQWIALGYIEXRDNGQ

SEQ ID NO: 188480 - protein, 973 aa, Oryza sativa
  Clone ID: PAT_MRT4530_8507C.1.pep
MAPRKPNPASAKGPDPGRVDDDSTAFLGVSLVDDVELAKLVSSGALVEGQAFAPGKAVVPKLVDNRTVVFAVFFEAGLQFPCNVLLPEILRLFQVELPQLSPSALVRISIFDWACRTSGFESSAELFDAIFFAIMNSKTVITPAGTKKTVFGSMNFNVRPERSDLWPVNAAMSKWDRHWMARWFYHTIPFAAGSDSAKALRCRRRAIAPNRKPKIAVDGAMEARFVLLRKVCSRLSCRDLVEEFCMLRIFPLSQSWQVTVEQCEEANGLPNLVLPEGTNMSTLDQAEAKARRMIGDVSVVEYSQLLTRQAAGRANRVYNGELPPRANPQKADDDVGPSRKRMRGQVKLAPRKRRVPASSDSDADDEDDAEERDGEEEGEEEEEVEAVADKAANKAIEDRVNTPGYTPTPSPGHNETGVESNSSPLRRKDLEGAKALVAFSSGKAAKGGLVKKISKKKGLVDIARVFSDDESSVETPTSPAGRSLDLSTAPLALLGVAGAGGSAAAEAATSAERIVSAVARVFGSPVREPAISPLVKAKGKCTAVEASASEYSLAAPHFAPGDFETRADLILFVEGVSNLVLPVGTPSLFTELNEFDEGCSTIKSLAVRGKEAWAEVDRLKAELEKEKDHSAVLIDYYNLTEPKMEALRQKASRVEASAAEESQRFSREMANTAESTRTACQTLRLALTDMGAKVRGVPAEYASAFDFSEWTQQAGGSVSDCATTYGNCCARVSAAFTLGLLQQFGCEHVAEFPTYAKGDWEISAQNISPALRAWRKQFWQKDGRSAAKARLLEQLTKAEAADRGEGEGAAGEEAGGDAQDHPEGVRRKLCIRPPSGSWRSQNEKFVALKDLPKVRCPFRPIYCEMEINGRSYKVFKVADWLRAHPGRTLEDYDLVHSRRLEDMARFWRNHQKTKRQETIFQRRYSLVCVSPPTPLKVVYNISSDDEPSSPYHSLGRDSDYGDEDVIYLNCIVL

SEQ ID NO: 188481 - protein, 99 aa, Oryza sativa
  Clone ID: PAT_MRT4530_85080C.1.pep
MAPCFMLLLGACLLGCNLRHLEANPSSPTVTRGMPPNHAGSWNGEGQGGLAHFGGRVTRVRRGDGKRGARARARCCQGLKARGAEAPCHDVDGATRHKE

SEQ ID NO: 188482 - protein, 150 aa, Oryza sativa
  Clone ID: PAT_MRT4530_85081C.1.pep
ASIRGWKLRQGRPLASAVVLEAVAQAAVRRHRRHVRRGVSFFGSGPYNLMPLSADAVRREQHPLLRGISVNQEEVRPPPSRRRRAHVMTRRGRARPTLHRPATPRKATPPRIDTVHAERGESDTACLAFVDCGWAATMSAVTVRAFQMEN

SEQ ID NO: 188483 - protein, 232 aa, Oryza sativa
  Clone ID: PAT_MRT4530_85082C.1.pep
MEVESAARRMWGYLRAVFFMVRKGVISKRRLLLGMQLAMRLKRRNRAVARSVASLLSHHHGGGGGGALRRRREYEFSCSNSPDVVHGGAASRRRLAYFPCLSAEDDVVDAGASATAAAALQRIEYYGYAAAAASSPAPSSPGFMVRDELLAPGDECSTPGLSPLLGTTGGYSVRVSNYSSEEEEDGDYGHADGGGGGEAVDDEAEEFIRRFYEQLRRQNHVALLPYMTESAP

SEQ ID NO: 188484 - protein, 319 aa, Oryza sativa
  Clone ID: PAT_MRT4530_85083C.1.pep
MDSSSSEILVDAGSFRLYKDGHADRTGDMETVPAGFDADTGVTSKDVVIDAVTGVFVRLYLPLIQAATDDDGKTKLPILVFFHGGYFVVGSASCPKRHRNINDIVARARLIAVSVDYRLAPEHLLPAAYDDSWAALNWALSGADPWLSEHGDTGRVFLAGVSAGGNIAHNMTIAVGVRGLDAAVPARIEGTILLHPSFCGETRMEGEPEEFWESVKKRWSIIFPDAKGGLDDPRMNPMAAGAPSLTKLACERMLVCAASEDPIRPRERAYYDAVKRSGWGGEVDWFESEGEGHAFFVRKYGSSKAVKLMDRVIAFLAGH

SEQ ID NO: 188485 - protein, 351 aa, Oryza sativa
  Clone ID: PAT_MRT4530_85084C.1.pep
MASNGAAAGAMAPFFPPNFLLQMQQPLPLHHQHLQDHAHGGHGGHHLLPPPPPSLSPFLPDLAMDAPPPPMYEASGGDGGGGGAASEDEEDGCGGGGGGGGGEKKRRLSVEQVRTLERSFESGNKLEPERKAQLARALGLQPRQVAIWFQNRRARWKTKQLEKDFDALRRQLDAARAENDALLSLNSKLHAEIVALKGGAAAAGGGGSSCRQEAASELINLNVKETEASCSNRSENSSEINLDISRPAPPPPPPPANESPVNRGIPFYASIGRGGAGGVDIDQLLLRGGHSPSPAAVTTPPPPKMELGITGNGGGADAAAAGAGSFGGLLCGAVDEQPPFWPWADGHHHFH

SEQ ID NO: 188486 - protein, 424 aa, Oryza sativa
  unsure (1)..(424): unsure at all Xaa locations
  Clone ID: PAT_MRT4530_85085C.1.pep
MAAHPFPLPFLPQCTSILCDADTDNLWLASGNAQSSAAVRSRLLAAEREEAKAVLSLFLRQKGLRSILAARIANKADGFIEHLVSKLHITYRSRYAEGRELSTPEIRDALIPYLEALSKEHGDGLVEVVENFPDPFAMEREALSSSMVLTPTSSNKHKAIARVSAPTSGGALPELVLYLLDLGMDHEEIKNVVRKFPAFAYYNVDRKIKPLVALLLELGVPRSNIPGIIKKRPQLCGISLSDNLKPMMTYLENVGINKDKWSKVLSRFPALLTYSRQKVETTVSFLTELGVPKENIGKILTRCPHIMSYSVNDNLRPTAEYFQSIGADAASLIQKSPQAFGLNIEAKLKPITEFFLERDFTMEEIGTMANRFGIIHTLSMEDNLLPKYEYFLTMGYPRNELVKFPQYFXVQFRTADKASVCSDD

SEQ ID NO: 188487 - protein, 128 aa, Oryza sativa
  Clone ID: PAT_MRT4530_85086C.1.pep
EEDRGGRTSSTKPKATHTQVLGNPCHVANQGGRGDQKPNHASCSSKPNPNTFWHIIKQGIAPRSPGPKTTHSRSISPQQAIKSHLAQVQALNPQSRNTRYPDAFQKGPKKQAIHSSAIQVPFVRRKPI

SEQ ID NO: 188488 - protein, 225 aa, Oryza sativa
  Clone ID: PAT_MRT4530_85087C.1.pep
MSTPSQKKRRSKGKDGAVAPVGLRLNRLGRASPREAAGKPVYLAVEHDDDQEVPAHSIVELGGGGGGGGEAHLVLHNVRGMSFATVESRYGPRIVGVGGKLFTTVYDPKTSMEIPGPFLVEPKLRPVLIPRGSKLYALSRTPSVVPGLDFLPWFVYLDLNYVLVAPHDARTMGWHRLPPPPIFPVRLNPLEYRDPPEVRVASYAVVGSHILLFVQQDKGTCAFRH

SEQ ID NO: 188489 - protein, 62 aa, Oryza sativa
  Clone ID: PAT_MRT4530_85088C.1.pep
FLGFFIFWGFFFFFFFSQAHIFWIGTTQQGFNEGHSPHMGYQHTHFSLPAFTNLTNWSSPLT

SEQ ID NO: 188490 - protein, 176 aa, Oryza sativa
  Clone ID: PAT_MRT4530_85089C.1.pep
MASLYAPQLTRWRVATSGGVVRDCVEYDGKPLFFSREDCRRRLVPDDDEEDARECLEIAGEVFPLMEERTVPAALHDGGGVREAVRCVEYVDDDGAVLLLTVTTEKEVAVVDGGEVRVVDGGGGYYDPDSGTVEHVVDVEVEGAREAYVLLVSVREELNRIVRIKRLNWSFLRRNF

SEQ ID NO: 188491 - protein, 425 aa, Oryza sativa
  Clone ID: PAT_MRT4530_8508C.1.pep
MAAASGHNARLLALALALLLAALHLHGVVCDPSHTHFAMVSRNAPSWRPDRGGQGKAFKATITSDPRGVTASWVGPNLCDSYFGGDMYKGFYCEHPPAPPGATTPKDNTTLTIASIDFNGYGLGAPSLSGFVDAFPDLALFHANSNNFSGEVPDLTGLPYFYELDLSNNNFSGAFPATVVPLGRLLFLDLRFNRFVGTVPPPVFDLTVVALFLNNNGFYGNIPDNFGSTTAEYLVVANNQFTGPIPRSIYNTSANLSEVLFLNNHLSGCLPYEIGLVEGLTVFDAGGNDITGPIPLSLGCLGLVEELNLAGNQLYGHIPDVLCALAKTGKLQNLSLSDNYFHSVGRRHCLELVRSKVLDVRLNCIPNFPHQRPALECARFYADPPQHCPFVPHIPCDLPGFRPPAAALPSAVAAEEGGGGGGGGN

SEQ ID NO: 188492 - protein, 56 aa, Oryza sativa
  Clone ID: PAT_MRT4530_85090C.1.pep
HRQNPLGITKGSKWQHRAKQPEHPQKLKHFSSGPFSWPSWDTPNISLFASSSQPRE

SEQ ID NO: 188493 - protein, 111 aa, Oryza sativa
  Clone ID: PAT_MRT4530_85091C.1.pep
STNRTYSCFSWQPFIVGNHGDLNFLSTVSNCRKLSTLQMDLISHQLLSYHELRATDDFSDDNMLGFGSFGKVFRGQLSNGMVVAIKVIHQHLEHAMRSFDTKCHVLRMARH

SEQ ID NO: 188494 - protein, 354 aa, Oryza sativa
  Clone ID: PAT_MRT4530_85092C.1.pep
MRVHEEASEDKEREVEEAPDLMPLSPPPTAAATAAVVAVAGQRLVVGYALTKKKVKSFLQPKLLSLARKKSIHFVSIDETRPLSEQGPFDIILHKLTDKEWQQVLEDYREEHPEVTVLDPPNAIQHLHNRQSMLQEVADLNLSNAYGEVCTPRQLVIMKDPLSIPSAVAKAGLTLPLVAKPLVVDGTSKSHELSLAYVETSLSMLDPPLVLQEFVNHGGILFKVYVVGETIRVVRRFSLPDVNIYDLENNDGIFRFPRVSCATNTAEDAEVDPSIAELPPKPLLEKLGRELRRRLGLRLFNFDMIREHGRKDRYYVIDINYFPGYGKMPGYEHIFIDFLLSLVQNKYKRRLSGS

SEQ ID NO: 188495 - protein, 103 aa, Oryza sativa
  Clone ID: PAT_MRT4530_85093C.1.pep
SPHTRAAAGDRWTSPPSPPLPATDILDSPSLPAFAAQDTMCKQAAKPWQSREQVGNLAYSCENTMCYGAKDGRRPLQADFFLFLHASFACKSVTKLLLFQLTV

SEQ ID NO: 188496 - protein, 880 aa, Oryza sativa
  Clone ID: PAT_MRT4530_85094C.1.pep
MALVRLPVWIFVAALLIASSSTVPCASSPGPIASKSNGSETDLAALLAFKAQLSDSNNILAGNWTTGTPFCRWIPLGLTACPYLQVIAMPYNLFEGVLPPWLGRLTNLDAISLGGNNFDAGPIPTKLSNLTMLTVLDLTTCNLTGNIPTDIGHLGQLSWLHLAMNQLTGPIPASLGNLSSLAILLLKGNLLDGSLLSTVDSMNSLTAVDVTKNNLHGDLNFLSTVSNCRKLSTLQMDLNYITGILPDYVGNLSSQLKWFTLSNNKLTGTLPATISNLTALEVIDLSHNQLRNAIPESIMTIENLQWLDLSGNSLSGFIPSSTALLRNIVKLFLESNEISGSIPKDMRNLTNLEHLLLSDNKLTSTIPPSLFHLDKIVRLDLSRNFLSGALPVDVGYLKQITIMDLSDNHFSGRIPYSTGQLQMLTHLNLSANGFYDSVPDSFGNLTGLQTLDISHNSISGTIPNYLANFTTLVSLNLSFNKLHGQIPEGGVFANITLQYLVGNSGLCGAARLGFPPCQTTSPNRNNGHMLKYLLPTIIIVVGVVACCLYVMIRKKANHQNTSAGKPDLISHQLLSYHELRATDDFSDDNMLGFGSFGKVFRGQLSNGMVVAIKVIHQHLEHAMRSFDTKCHVLRMARHRNLIKILNTCSNLDFKALVLQYMPKGSLEALLHSEQGKQLGFLERLDIMLDVSMAMEYLHHEHYEVVLHCDLKPSNVLFDDDMTAHVADFGIARLLLGDDNSMISASMPGTVGYMAPEYGTLGKASRKSDVFSYGIMLLEVFTAKRPTDAMFVGELNIRQWVQQAFPAELVHVVDCQLLQNGSSSSSSNMHGFLVPVFELGLLCSAHSPEQRMAMSDVVVTLKKIRKDYVKLMATTVSVVQQ

SEQ ID NO: 188497 - protein, 497 aa, Oryza sativa
  Clone ID: PAT_MRT4530_85096C.1.pep
MASPPQPGPYMPDLPAVPAWLNKGDTAWQLVAATFVGIQSMPGLVVIYGSIVKKKWAVNSAFMALYAYASTLIVWVLVGFRMAFGDRLLPFWAKAGPALTQDFLVQRAVFPATAHYGSDGTLETPRTEPFYAEAALVLFEFEFAAITLVLLAGSLLGRMNIKAWMAFTPLWLLFSYTVGAFSLWGGGFLYQWGVIDYSGGYVIHLSSGVAGFTAAYWVGPRLKSDRERFSPNNILLMIAGGGLLWLGWAGFNGGAPYAPNVTATVAVLNTNVSAATSLLTWTCLDVIFFGKPSVIGAVQGMMTGLVCITPGAGLVHTWSAMLMGMFAGSVPWFTMMILHKKSTFLMKVDDTLAVFHTHAVAGILGGVLTGLLATPELCALDCPIPNMRGVFYGSGIGQLGKQLGGALFVTVWNLIVTSAILLCIGLFIPLRMSDDQLMIGDDAAHGEEAYALWGDGEKFDVTRPETTRTGGAGGAGREDTMEQRLTNMGARGVTIQL

SEQ ID NO: 188498 - protein, 62 aa, Oryza sativa
  unsure (1)..(62): unsure at all Xaa locations
  Clone ID: PAT_MRT4530_85097C.1.pep
SQKKTTPRPAKQEKEEASKAQEPIXSGHQETKTCNIKRSDRAEQIKGGPDSMKQSKKRRRAT

SEQ ID NO: 188499 - protein, 92 aa, Oryza sativa
  Clone ID: PAT_MRT4530_85098C.1.pep
MGRKNVVTVVEARRSCRSHTHGLIKLTSIIEGREINQVLRLRFKRKKYLENSYPRAKAAAESLKQPYLTATRAEIRIETLNLGVKKKGSFIE

SEQ ID NO: 188500 - protein, 219 aa, Oryza sativa
  unsure (1)..(219): unsure at all Xaa locations
  Clone ID: PAT_MRT4530_85099C.1.pep
MPPPPPPQPQPTTTATTSANGGKVTPNLTMDAEGTRLLNLTVLQRLDPAVEDILITAAHVTLYDFNIDLNQWSRKDVEGSLFVVKRNTQPRFQFIVMNRRNTDNLVEDLLSDFEYELQPPYLLYRNAAQEVNGIWFYNQHDCEAVASLFGRILNAYAKVPPKPKVPSTKSEFEELEAVPTSAAIDGPLEPSXATTTIVSDAPDXSLXNYFSSAASIGSV

SEQ ID NO: 188501 - protein, 660 aa, Oryza sativa
  Clone ID: PAT_MRT4530_8509C.1.pep
MAPRKPNPASAKGPDLGRIDDDSTAFLGVSLVDDVELAKLVSFGALVEGQAFSPGKAVVPKPIDNRTVVFAVFFEAGLRFPCNVLLPEILRLFQACRISRFQPNAELFGAIFFATVNSKTWDCHWMARWFYHTIPFEAGTDSANAHRCRRRAIAPNRKPKITVDGAMEARFVLLRKVCSRLSCRDLLEEFCMLRIFPLSQSWQVRVDQGEEVDGLPNLVLPEGTNRPSRKRMRGHVKLAPRKRRVPASSDSDADDEDDAEERDGEEEGEEEEEEAVADKATNDAIEDRVDTPGYTPTPSPYHNETGVESNSSPLRRKDLEGAKALVAFSSGKAAKGGPVRKVSKKKGLVDIARVFSDYESSDGTPTSPVGRSLDLSTAPLALLGVAGAGGNAAAGASASAERIVSAAARVFGSPLRELAISPLVKAKGKCAAAEASASEYSLAAPNFAPGDFETRADLIPFVEGVSNLVLPAGTPSLFTELNEFDEGCSAIKSLAVRVLVAHCSTKRTVRARFDGFKSRLRAKDDEISCKNLEEEALANTLKEAKTEVQRLQSELDTGKEARAEVDRLKAELEKEKAHSAVLNDYYNLTEPKMEALRLKASRAEASAAEELQRFSQEMAKTTESARTACQTLRLALTDMGAKVRGVPAEDASAFDFSEWT

SEQ ID NO: 188502 - protein, 125 aa, Oryza sativa
  Clone ID: PAT_MRT4530_850C.1.pep
EGRIPSTCVGGFRLTCGRNGITTCMRPIFFVPLWAFSFLRSKNGAQGISAYMRPTIVGPEGKWTRVRLMLVRLMGSPVIQPPTPTPTPKPTGASATLKTSLAMALLPEEPSPPPLTHEWPYVVVP

SEQ ID NO: 188503 - protein, 110 aa, Oryza sativa
  unsure (1)..(110): unsure at all Xaa locations
  Clone ID: PAT_MRT4530_85100C.1.pep
AXXWXGVLXXLXACSXXXXLRVRXCCLVXWLPXGGFXAVFSPGPLXXASCXLXLPLXXGWFXXPXXXLSCLLCVXPSFXXXXXLLLXXLXXXPVPXXXXXXXXXXXXXXX

SEQ ID NO: 188504 - protein, 481 aa, Oryza sativa
  Clone ID: PAT_MRT4530_85101C.1.pep
MQGEEYMLKGDDFAKAKLGPKKPFRPIKPRGCWADDRLTTHQGPLNLITLCIDRKSEFYWKAVADVFNTSAPTNGHKRSVKQLKTHWGDVKRDITKFCGVYGRLKATWKSGQSDDMVMNSAHAIFEKENKDKPFTLEYMWREKHTLLHLTKTQEETISKEKRPDGQKKAKAGLKGKGKDAAPSPLGNQPTKEKKYQTYLKLLEKDTSNFSEAHHKRHEGVLDQLAKELAGDHSDESTEAQLEAELEVELEAELGAELEAESAGTSIRRGGYTRSHHCSPNSYKAEHPPFSSLIKKEQEKMWNELSGFCKNVGPSYVTQHGYGNGNNLQISSSAPATRRRSFAFISICAPPQPPEQIREAVVPRSEPIVKGDGGEDQWEERCCVHLRIWRVIEMAGALPAAENSVCSGGVGTLGQELGGGGNGGQGMRRRGDLSGIGGGGEGWCGGGGEVVQRRRMGRDLGAAIEEESNSRTRAKETRISRG

SEQ ID NO: 188505 - protein, 371 aa, Oryza sativa
  Clone ID: PAT_MRT4530_85102C.1.pep
MASSDAAAAQAATPLLKDELDIVIPTIRNLDFLEMWRPFFQPYHLIIVQDGDPKKTIRVPEGFDYELYNRDDINRILGPRASCISFKDSACRCFGYMVSKKKYIYTIDDDCFVAKDPSGKDINALEQHIKNLLNPSTPFFFNTLYDPYRDGADFVRGYPFSLREGAPTAVSHGLWLNIPDYDAPTQLVKPLERNSRYVDAVMTIPKGTLFPMCGMNLAFDRDLIGPAMYFGLMGDGQPIGRYDDMWAGWCTKVITDHLGLGVKTGLPYIWHSKASNPFVNLKKEYNGIFWQEELIPFFQSASLPKEADTVQKCYLELAKQVRAKLGKVDGYFNKLADSMVTWIEAWDQLNPDTKGSCCHRKRHCQEQVRGR

SEQ ID NO: 188506 - protein, 90 aa, Oryza sativa
  Clone ID: PAT_MRT4530_85103C.1.pep
FTVHTNVCILTPIFFYHSGFSHKHTSKAHQETKPLLLQLIACNLPFPTCSLEDQMKWEVSIYISGCYGARMLRQKNRMVLCYRLSARMRQ

SEQ ID NO: 188507 - protein, 66 aa, Oryza sativa
  unsure (1)..(66): unsure at all Xaa locations
  Clone ID: PAT_MRT4530_85104C.1.pep
MLAVLLGFAATFAGNANGQVKDELFDKYLEKSEVNNELNVKKRLANCGSNFTRAYTGXFGSYHFPY

SEQ ID NO: 188508 - protein, 480 aa, Oryza sativa
  Clone ID: PAT_MRT4530_85105C.1.pep
MVRGARTAEEPVLEEVQPWEIAVEELRVHLQDIQRKVDEDGKQFQEQLQNQAVQAQVHKDEVMQNLKVPYSIHNVSFISDFRLLDLKGFDIIFGWVAIDPTKVQAVKNWPVPKSVTDLSGFLGLAGYYRKFIKDFGLICKPLFTALKKTGFTWQDEQQQAFATIKDKLAHAPVLAMPNFTQPFILEADASGTGLGAVLMQNNRPLAYFSKAIGPKAAGLSTYDKEALAILEALKKWKHYFLGTSLIIRTDQASLKYINEQRLTEGIQHKLLIKLLSYDYKIEYKKGKENKAADALSRIPSVAQLFSTTIIVPTWITEILASYATDPKCTALESQLRITPQGHPPYTLTSGILRYKNRLYVGAGMKKDIASYVKLCPVCQKNKSEHNLQPGLLHPLPIPEMAWTHISMDFIEGLPKSDNKDVIWVIVDSANTLGAEVGRGSYLSANRIGAKMANLCANRVGAEVPNFSANGPGAERHFRWR

SEQ ID NO: 188509 - protein, 408 aa, Oryza sativa
  unsure (1)..(408): unsure at all Xaa locations
  Clone ID: PAT_MRT4530_85106C.1.pep
RCSLYADGVALFVKPSEDELSTLKKILIFFAHVTGLHTNMSKTEIHNIFCSDLDLDGILPFFPGNIKSFPCKYLGLPLHTRKLRKVELQPLVDKIGSRIRGWKGRFFSSAGREVLVKSTLSATPIYDLTVLPQNRWLYMRINRFRXSFHWKGDGMDNVSAGSCLLNWNYVCKPKDYGGLGILNLEKFTPAFRLRWLWLGWKDDSKPWANMETPCNDINRALFRAGTVISIGNGEKIKFLTDNWLQGSSPKEITPSIFRLVKRKSNCLKWDFESNHWMAWKNPTTSVSEIDEVVQIGSKLQNVTLTQRSSDDISWKWSXNDQYSAKSAYLAQFQGGTTHAMFKPIWTPQDKPKQRFFGWLLLHQKTLTADNLLKRHCSCDWICGVCTSAFEDANHLAKECTFTLSVWNQ

SEQ ID NO: 188510 - protein, 128 aa, Oryza sativa
  Clone ID: PAT_MRT4530_85107C.1.pep
MAAASLAEGGGSYWTLDLVEKMEEVQFWSLRYVSSFICVLNRKNRVTYLTIVKLSIRAKVDKKSHVVAMEGISIDVNHVRRRQRPCHGGLGLVKGASTQGPPTDWPHQAPAYCRLPPRLEHVVSRVDE

SEQ ID NO: 188511 - protein, 485 aa, Oryza sativa
  unsure (1)..(485): unsure at all Xaa locations
  Clone ID: PAT_MRT4530_85108C.1.pep
TFFTLSKSEYHPLLLLIILRLGSIVTTPVLCLPEQASALLQLKGSFNVTAGDYSTVFRSWVAGADCCHWEGVHCDGADGRVTSLDLGGHHLQADSVHPALFRLTSLKHLDLSGNNFSMSKLPFTGFQELTELMHLDLSNTNIAGEVPAGIGSIMNLVYLDLSTKFYALVYDDENNIMKFTLDSFWQLKAPNMETFLTNLTNLEQLHMGMMDMSREGERWCDHIAKSTPKLQVLSLPWCSLSGPICASLSAMQSLNTIELHRNHLSGSIPEFFASFSNLSVLQLSKNDFQGWFPPIIFQHKKLRMIDLSKNPGISGNLPNFSQESSLENLFVSSTNFTGTITRSISNLKSLKKLDLXASGFSGTLPSSLGSLKYLDLLEVSGLQLVGSIPSWISNLTSLTALQFSNCGLSGQVPSSIGNLRKLTKLALYNCXFTGKVPPQIFNLTQLQSMQLHSNNLAGTVELTSFTKVKNLSVVNLSNNKLLVLH

SEQ ID NO: 188512 - protein, 82 aa, Oryza sativa
  unsure (1)..(82): unsure at all Xaa locations
  Clone ID: PAT_MRT4530_85109C.1.pep
MENNSNNQPPPGYPTAAGAAEQGGKKSRRGSTKSRGDKGFIEGCIXRCAAAGSARCAATKPAHIRLYVHTELIHSQWYVRDA

SEQ ID NO: 188513 - protein, 480 aa, Oryza sativa
  Clone ID: PAT_MRT4530_8510C.1.pep
MAAASGHNARLLALALALLLAALHLHGVVCDPSHTHFAMVSRNAPSWRPDRGGQGKVSAPSLDTCGCGPAPAPADPLKSASLDKCGCPPAPAPSPEDFLNENLQALYPVIQAFKATITSDPRGVTASWVGPNLCDSYFGGDMYKGFYCEHPPAPPGATTPKDNTTLTIASIDFNGYGLGAPSLSGFVDAFPDLALFHANSNNFSGEVPDLTGLPYFYELDLSNNNFSGAFPATVVPLGRLLFLDLRFNRFVGTVPPPVFDLTVVALFLNNNGFYGNIPDNFGSTTAEYLVVANNQFTGPIPRSIYNTSANLSEVLFLNNHLSGCLPYEIGLVEGLTVFDAGGNDITGPIPLSLGCLGLVEELNLAGNQLYGHIPDVLCALAKTGKLQNLSLSDNYFHSVGRRHCLELVRSKVLDVRLNCIPNFPHQRPALECARFYADPPQHCPFVPHIPCDLPGFRPPAAALPSAVAAEEGGGGGGGGN

SEQ ID NO: 188514 - protein, 210 aa, Oryza sativa
  Clone ID: PAT_MRT4530_85110C.1.pep
MTTTLSSLNRCTVAGVLPLGIRGGRMLLAPPLLWNSGAATRKMAVATAAAASPPAEGGGKADGSAVAGGVSRTMQLGAMILVWYLLNIYFNIFNKLVCTGIPPEAPVRRRRVAALRVHVNQRVPRDETQSNLPFRDAPVRLPTQRKVSNLRARRERDGGGGDDVDAHATIIRHGEEKHHSLVKNPCLAWLVTMAVQETSAHAEASSPCAR

SEQ ID NO: 188515 - protein, 183 aa, Oryza sativa
  Clone ID: PAT_MRT4530_85111C.1.pep
MSDFCDRSRTDAWDFSAFVRTYAAYLDDRLEYRMQAKHGGAAHQGRPLREQLYASPGNRFNYDDFIMRDDEATNAEADKAMALVARETPTSEMTLEQLLAKAQLLLAPHCLLLPVAMVVVVLALEKKLLVVVLGGALVEAGGVGGHQASRGEGIRAVVVGDGEAIGVGRQLRLLPTIEMPMRP

SEQ ID NO: 188516 - protein, 387 aa, Oryza sativa
  unsure (1)..(387): unsure at all Xaa locations
  Clone ID: PAT_MRT4530_85112C.1.pep
MKLLLCAFEHLSGLKINFHKSELFYFGDARTMEDQYTKLFGCSSGEFPLCYFPIHYRKLRNNDWKWVEERYEKRLGSWKGKLLSTGRRLTLINSVLSSLPLYMMFFFAISRGVLKKLYCFRSRFYWQCDDQKKKCHLMKWSIMCRXKNKGDLGIHDLYMKNIALPSKWLFKLLTMDGVWQQLIRNKYLGSKPMSQVEWKARDSYFXASLMKVKRDFLRFGKFIMREAPLXEQYPCLYNKQDTIANVLQNYPPNVSWRRDLIEPKLVAWNNHVPRMANLALTQDRDKFHXNLIQNGEFSVKSHYLALVHSDVPNINKVIWKVKIPLKVMIFLRYLRRGIVLTRANLAKRNWQGSKNCSFCHTDETILHLFYECPDSQDLVAAACQRLE

SEQ ID NO: 188517 - protein, 81 aa, Oryza sativa
  unsure (1)..(81): unsure at all Xaa locations
  Clone ID: PAT_MRT4530_85113C.1.pep
TVESLLCAQRSLSCGETPGSXHGVPTSLNLATFSWRYQRITTATSGLDADACAERDAIVFRSYVALGSYQVSSAPLPFPSV

SEQ ID NO: 188518 - protein, 88 aa, Oryza sativa
  Clone ID: PAT_MRT4530_85114C.1.pep
MVIIDNAKTKRYKYHLKVLHVLFFQYMHRLEIFSNFCSSLVTFLLIEHLKKPHERLYRTHIRRSTILKTVRSSTTSFSIFGSILNEQQ

SEQ ID NO: 188519 - protein, 55 aa, Oryza sativa
  Clone ID: PAT_MRT4530_85115C.1.pep
MSPSFTWKPLDLRYKRDPLGGPKRRNLIANIITIAYEVGACGSQIAERRSSGRDV

SEQ ID NO: 188520 - protein, 35 aa, Oryza sativa
  Clone ID: PAT_MRT4530_85116C.1.pep
YCSESLLPSESLDYTSARLSWLCFESIDLSWLGLN

SEQ ID NO: 188521 - protein, 99 aa, Oryza sativa
  unsure (1)..(99): unsure at all Xaa locations
  Clone ID: PAT_MRT4530_85117C.1.pep
AATAIAXDWXRAAAIIFGCNXVXXTXTGYIRNAAVVSNLHTTPTRXKTRRTRPXETSPATILGEGGQPLSLPPPATRPPESRRXRGRERXKNCXKRGFE

SEQ ID NO: 188522 - protein, 109 aa, Oryza sativa
  unsure (1)..(109): unsure at all Xaa locations
  Clone ID: PAT_MRT4530_85118C.1.pep
YSVLRTGTPGRRLTRGASTYFAGLAMVIMFGMELRNYLAANTSTSVIAARISDGXLLRIDCNLSLPALSCECASVDXCNVVATNRSYITKTATAYSIDRNLVTTGSELY

SEQ ID NO: 188523 - protein, 159 aa, Oryza sativa
  Clone ID: PAT_MRT4530_85119C.1.pep
TTPRKLLRSLQSSYDFDSARNEERSIAKLNSSSSPSEESNELEESSEEMQSQLSDSKIEEAKYDNETIDAQSADDTTQILSNEDKSVLCTPEVEDASCKASSEGECKEQDICVTRSMGKSRKYKAVFSFLLSIVMIVLAIIAVLIRIESYDDYVGLVPT

SEQ ID NO: 188524 - protein, 670 aa, Oryza sativa
  unsure (1)..(670): unsure at all Xaa locations
  Clone ID: PAT_MRT4530_8511C.1.pep
MAPRKPNPASAKGPDPGRVDDDSTAFLGVSLVDDVELAKLVSSGALVAGQAFAPGKAVVPKPIDNRTVVFAVFFEAWLRFPCNVLLPEILRLFQVELPQLSPSALVQIAIFDRACRTSGFEPNAELFGAIFFATVNSKTVITPAGTKKRVFGSVNFNIRPERSNLWPVNAAMSKWDRHWMARAIAPNRKPKIAVDGAMEARFVLLRKVCSRLSCRDLVEEFCMLRIFPLSQSWQVRVDQGEEVDGLPNLVLPEGTNRPSRKRMRGQVKLAPRKRRVPASSDSNADDENDAKERDGEEEGEEEEEAVADKAANEAIEDRVDAPGYTPTPSPGFGRGEGSSCVLLGHGGEGXGPVKKISQKKGLVDIARIFSDDESSDETPTSPAGRSLDLSTAPLAPLGVAGAGGGAAAGASASAERIVSTAARVFGSPVREPAISLLVKAKGKXLAAHCSTERTXRARFDGFKSRLRAKDDEISRKNLEVEALAHTLKEAKAEVKRLQSEWDKGKEARAKVDRLKAELEKEKAHSAVLVDYYNLTEPKIEALRQKASRAEASAAVESERFLREMAKTTESARTACQTLRLALTDMGAKQFGCEHVAEFPTYAKGYWEISAQNISPALRAWRKQFWQKDGRSAAKARLLEQLAKAEVADRCEEEGAVGEEVGGDAQDHPDV

SEQ ID NO: 188525 - protein, 137 aa, Oryza sativa
  Clone ID: PAT_MRT4530_85120C.1.pep
MDAEMDLLADDDGGEAERLEAAEAQADLLRDRLRLAVISIATSEGKKAGMEVSDPVVACIADLAYKTVEQLAKDVELFAQHAGRKSIKMEDVILTAHRNEHLMGLLRTFSQELKGKEPSSERKRKKSSKKDDNVMQI

SEQ ID NO: 188526 - protein, 123 aa, Oryza sativa
  unsure (1)..(123): unsure at all Xaa locations
  Clone ID: PAT_MRT4530_85121C.1.pep
LGQLQLSNMSRTTSQELMWCTWHEDRCDELESVXAREPCARLXPLTGLGVYCTXRALRLSLSLSXPAGYVCXVRQXPVDVGLHILFCLXILVGSNLSIGNLYCPDIANISVXGYLHLKEKKKS

SEQ ID NO: 188527 - protein, 148 aa, Oryza sativa
  Clone ID: PAT_MRT4530_85122C.1.pep
MDAEMDLLADDDGGEAERLEAAEAQADLLRDRLRLAVISIATSEGKKAGMEVSDPVVACIADLAYKTVGSSKLLATYITEQLAKDVELFAQHAGRKSIKMEDVILTAHRNEHLMGLLRTFSQELKGKEPSSERKRKKSSKKDDNVMQI

SEQ ID NO: 188528 - protein, 251 aa, Oryza sativa
  unsure (1)..(251): unsure at all Xaa locations
  Clone ID: PAT_MRT4530_85123C.1.pep
MAPLATSSTSIPPSSSSLVKTTSPKKYCVRPNNGVVRPRSASVVVVTMQAQIVAPPDFQCKDKFLVQSVVVDDGLSAKDITSQMFLRDENNMVEEVKLKVSYVMPPEPAMEIAEESDIPKRILVPMQRILDNGRSGSELSSGNVSLRSAEMGTELGSPLGRFVRNEDMLKTASPVVETRVHAGPDEQYLELSALVAKLTEEKKSALEQNRKLREELMLLVLNTKFSRLSIDDNGXLVIGLLSIILGCLVKK

SEQ ID NO: 188529 - protein, 60 aa, Oryza sativa
  Clone ID: PAT_MRT4530_85124C.1.pep
MATSKCVVRRINHLKAEMEGEGGISTTPSGEITTPKASVTLPPSNYYYQYAIFAKLAPLH

SEQ ID NO: 188530 - protein, 335 aa, Oryza sativa
  Clone ID: PAT_MRT4530_85125C.1.pep
MTSEIKHGGKLSCSGMDSDGPHTSLIHGLPDEIAILCLARVPRRYHNALRCVSKRWRALLSSEEWHSCRKRNNLDEPWVYVICRSTGIKCYVLAPDPTTRSLKIMQVIEPPCSSREGISIETLDKRLFLLGGCSWLKDANDEVFCYDASSNCWSSVAPMPTARCYFVSAALDKKLYITGGLGLTDKSPNSWDIYDPVTNSWCVHKNPMLTPDIVKFVALDGELVTVHKAAWNRMYFAVVMDGTLYMLEQSLGTKLMMWQKETKEWIMLGRLSDKLTRPPCELVGIGRKIYIIGRGLSIVTIDLDTVRADGFLVSSSTGPLVEHDFPPERCRVISI

SEQ ID NO: 188531 - protein, 92 aa, Oryza sativa
  unsure (1)..(92): unsure at all Xaa locations
  Clone ID: PAT_MRT4530_85126C.1.pep
AAWARSLLRERGVKGTNGAGGTTVPLSRHLHKEPHIAEYTTAASLXNLISSEPCXISRGSPGEFAXYHXLIPYWLWRNYYQKHPDGVDFHQS

SEQ ID NO: 188532 - protein, 217 aa, Oryza sativa
  Clone ID: PAT_MRT4530_85127C.1.pep
FCYDASSNCWSSVAPMPTARCYFVSAALDKKLYITGGLGLTDKSPNSWDIYDPVTNSWCVHKNPMLTPDIVKFVALDGELVTVHKAAWNRMYFAGIYDPLCRTWRGTENEIALCWSGSTVVMDGTLYMLEQSLGTKLMMWQKETKEWIMLGRLSDKLTRPPCELVGIGRKIYIIGRGLSIVTIDLDTVRADGFLVSSSTGPLVEHDFPPERCRVISI

SEQ ID NO: 188533 - protein, 38 aa, Oryza sativa
  Clone ID: PAT_MRT4530_85128C.1.pep
LVHGRYKTGIDFRFIIVQDVITEAKKLHPKHQSVVSLG

SEQ ID NO: 188534 - protein, 198 aa, Oryza sativa
  Clone ID: PAT_MRT4530_85129C.1.pep
MAPPTTLVGCAIDSAPGASRLLTACTCSRAASASMDVEPCLDDALGHSFCYAAAATANAHSLSFRHASPVPRSPPTASPPSAVAPERTRREEKRKRKETFMWAHGIRDPDPRPADASSTPSSSSAAAGRRQRSGPYSSPRRSSPCFSSSSSALRRHALARSSRSTPPSSAAAPPPLGSTWPQRKLRMHPRTPYPSTSH

SEQ ID NO: 188535 - protein, 67 aa, Oryza sativa
  Clone ID: PAT_MRT4530_8512C.1.pep
MDGTNDDGLHRRRVTGPGDNDASPFGSSPLAKPARCRRAARADLRRRGGVYGTRRATQRSKSDKTWN

SEQ ID NO: 188536 - protein, 216 aa, Oryza sativa
  Clone ID: PAT_MRT4530_85130C.1.pep
MAKIQPLPAASPSAEWHHGDGGGGGVQGKQAVYTVWMKSLVFNGHGCTVYGSDGRVAFRVDNYGCRGSRDVFFMDTAGTTLIGIQTKSFGMMKRWEASRHHGGEKETTTATVTTPWFRVQRGRGPGGAMATVTLHGGVGMAYRIDGCPSKSEYRISRGGGGGGGGDGEVVAEVARKQTASGVVLGEDVLTLTVGPGADHLLVLGLVVVCGLISRAM

SEQ ID NO: 188537 - protein, 116 aa, Oryza sativa
  Clone ID: PAT_MRT4530_85131C.1.pep
MCGHCLASCETCVQSRDWLGNPSMSSFSSYSTYSYVQPCQSGQIDCDFEPLDLPPSSYSGTECYGSDPLEGGAARSTGLELRPPAHYCRCHIHRTAIATPPSAPFVDLKEGEVEEA

SEQ ID NO: 188538 - protein, 66 aa, Oryza sativa
  Clone ID: PAT_MRT4530_85132C.1.pep
HVLKGPAVIMNGNSTVIVEKDCKAIITKYGNIKIEISAAPSSVEVLQTAGVGLCPSIFSMLSMCIA

SEQ ID NO: 188539 - protein, 98 aa, Oryza sativa
  Clone ID: PAT_MRT4530_85133C.1.pep
EAAERRGQPGRARRRAGAGAGRPVRCAPSPATRLAHPPRRHRRVSTLQAPATEPLRTVHPASPASRPLQAPAATRRPAGTPPRAAWQAPPQVAGRWPH

SEQ ID NO: 188540 - protein, 90 aa, Oryza sativa
  Clone ID: PAT_MRT4530_85134C.1.pep
LSCTTPSADLSSWWRSARKSISKQDRKTFDAGVILVTWLIWKERNARIFDNKAILAAHLCAAMEDEWTTWGAAGLLCPLQAGSNLMAREQ

SEQ ID NO: 188541 - protein, 72 aa, Oryza sativa
  Clone ID: PAT_MRT4530_85135C.1.pep
YTPSLKFALNKFRIVYDQVLYYPVLNFGVLVLLLLLYCTVLSFGIQYIGPEGTSHQEAGAFLPSFFWFNLQF

SEQ ID NO: 188542 - protein, 867 aa, Oryza sativa
  Clone ID: PAT_MRT4530_85136C.1.pep
MRKRSSSNEEQERSQSLLSMSWSGDYEKYMATAAAVAGTAMVVRGVVSELVPDELREMLRSAARGIRARVSSTHTVVIDETEGLSTNQIYDAARTYLAARINTDMQRLRASRVDDAQGIMITMDQGEEMLDVHDGVEYTWRLVSRDTAAAATAHAAPYGIGGGGAANRRGRSRFEVKSFEVSFHKKHKEKALRSYLPFVIDTAKAMNDKHRNLKMHMIEYDALTGVHLRHPSSSDTVAMAHSLKHSVMYVLERIVKRKGYYGRNGRKWKSAYLLYGPPGTGKSSLIAAMANYLKFDIYDLELTEVKSNSDLRRLLVGMSNRSILVVEDIDCTIDLQQRDEGEIKRAKPTYSGEENEDKVTLSGLLNFVDGLWSTSGEERIIVFTTNYRERLDPALLRPGRMDMHIHMGYCTREAFRVLASNYHNVENHAMYPEIEQLIEEVLTTPAEVAEVLMRNDDVDVALQVLAEFLKAKRNEPGETKAENKNGNQKINKYEQSMVHNQPYNTLVGIKSSDRTTIFPKGKVCPVKKSPMKVHSRKRFRFYYDVNSDLNMIGVRRVRATAAAAVAAVVAEEGEEAEGGLAEGGGRAGGGGEGAERGVEHEGIGGAGEGGKEAEHGVGRGERGVGGLWSGGERLSAMPSRRAWRASGWSVAATRMAASMASSRASPRYSPSRGQTALRRNRMDSSAGDPGDGVPSKRPRTERDPYRVETMEFLVLVKSELPDDVYSHFVRSMIKIRRQRNMSIEKCKEIILEILDGQPEAIQVFEHFIQGYSPCRAKMRSKAHNFVERVKACPDISREDFHALLNVLAKYYKNEIKTSEEVLEKVERIIGNYPEFLEEFKIFVPHHLRAHLPNEKSCTSPKSSRVSE

SEQ ID NO: 188543 - protein, 540 aa, Oryza sativa
  unsure (1)..(540): unsure at all Xaa locations
  Clone ID: PAT_MRT4530_85137C.1.pep
MGLVGGLLGFGVGLPLGIAVAYLVYLRLFAPRRRLQDPIIRPLRDLDSETLQTTIPDIPLWVKCPDYERVDWINKFIFDMWPFLDKAICNTIRSVIRPTFDQYVGQYGIKSIEFGHLTLGALPPTFQGIKVYEMREKELVIEPVIRWASIANVIVKVKVHSFQVSAQLLDLHIMLTPRVTLKPLVPSFPCFANLCVSLMEKPHIDFGFKLLGGDVMAIPGLHRFVREKISKQIANLYHWPKLIQIPILDEASGATKKPVGILHVKVIRAMNLLKMDLLGKSDPYVKLRLSGEKLPSKKTSIKMSNLNPEWNEHFRFIVKDPETQILELRMFDWEKVXMHDKLGMQVVPLRLLTPYESKLFTLDLLKSMDPNDPHNKKNRGKLVVELTFDPFRDDSNSTILMSDGEGNVSVKRDVPPSGGLLLVSVENAEDVEGKRHTNPYAVVHFRGERKETKIIKKTRDPRWNEEFQFMVDEAPVDDKIHIEVVSKRRGLRLPFRNKESLGHVDINLVDVVNNGRINEKYHLINSRNGMVHVEMKWSTV

SEQ ID NO: 188544 - protein, 100 aa, Oryza sativa
  Clone ID: PAT_MRT4530_85138C.1.pep
MAKWAAEATVMVVLAVTVAVAVVAAQAPPPVQCDPGKLSACAVPIFFGTAPSKSCCSNLRAQEKDGCFCQYARDPMYASYINSTNARNTIAACGIAFPSC

SEQ ID NO: 188545 - protein, 67 aa, Oryza sativa
  unsure (1)..(67): unsure at all Xaa locations
  Clone ID: PAT_MRT4530_85139C.1.pep
MAAPDXEYRXFVGXLVWATDDXSLXEVAXXTYGEXLDXKXXNDRXTXRXXXFGFXTXFXEXSMXDRH

SEQ ID NO: 188546 - protein, 856 aa, Oryza sativa
  unsure (1)..(856): unsure at all Xaa locations
  Clone ID: PAT_MRT4530_8513C.1.pep
VDQQWMYTTGQWSKEFLEGVHYFLSVGNVNMHKGFIYCPYKKCXNQKKYYTSRTIHAHLFESGFMRSYNCWTSHGEFGVAMEEDEEEDENIPDXLNAVDFKXNITGEADGAVEDNDDADNLGQMLHDIHKDCKSEKEVQKLERMFADHKASLYPGCEQGXKKLGTTLKFLQWKAKNGGSDKAFGELLKFVRNILSEGDELPETTYEXKKVVCPLELEVQKMHACPNNCILYRGEEYENMSTCPICKALRQKIRQDDPGDVDGQPSKKRVPTKLMCYFPIIPWLRRLFRKKAHARIMRWHAEKHQQDRMLRHPTNGLQWQNIDRTFEDFGEDTRNIGFGLSTDGMNPLGEISSGHSTWPITIYIYSFPPXLCMKRKYIMMPIIIQGPKQPGNDIDVXLRPLVENLKLLXKKEGAPVWNEDKXIGLRALLTINDWPALSNLSGQSNNRYKACTHCMDETKSTYLXHCRKVVYMGRHRFLIASHLVRKKXKHFEXKADQRTKPKHRNGKTVFALVKDLRVLFRKGPGSQPIVSEDGHAAMXKKKSIFXKIPCWEVLHLTKSLYVNLVGFLGLYGKSXDALKARNDLKHMKQCDDLHSEPKEKRSHYLRPANYTLSKVEKESMFECLKSIKVPFGYSXNAILQKIIDPDXFNSVVQCLVSFEIIFPPSFFNIMTHLLCHLVKEIGILGPTYLPNMFPFKRYMGVRKKYIHNRSRPEASIAKGYGTGEGIEFCVEFIEDLCPIRVSESSHEGRLRGNMTLGRKTIMNVDNDLFRKAHFTVLQQSSLVAPXIEEHLAIVRSKNIGKSDACITRHHIDTFPAWQRQHLICNETIDQQLAFLARGLSYSILTLQGYEINGYTIE

SEQ ID NO: 188547 - protein, 67 aa, Oryza sativa
  Clone ID: PAT_MRT4530_85140C.1.pep
TTVMTLRGGVVSNTSSPFYLFQHYPEKVITTTRCVVLFHFNKYSNETPKIAHKGKNIFHFKFHKPLV

SEQ ID NO: 188548 - protein, 87 aa, Oryza sativa
  Clone ID: PAT_MRT4530_85141C.1.pep
MEHLVRALITLADRSAITISPGKTNRLVPIRVLLDRVTIADVRDLRPLGFCPTVETGPTCHQALGSDVTPDRFPRGGRSPWHNAGGY

SEQ ID NO: 188549 - protein, 428 aa, Oryza sativa
  Clone ID: PAT_MRT4530_85142C.1.pep
MAINDAWLHCLPRADLIIMDEPPKKHEGIAVAILEPPPKKQEHFVLVVYYVQNTLGYHVLDTSRHASEFAFIHIASAVLRDALVLGGPYDVNEQITLRFVNHDNTSTCHNSPPIREGWVMFLDFPLDLQTDRIVDKPVVDQGSEAGFLRRSFTPWLRRSLSKVVIKKYSSFGDVQPADEDLPLVNHIPLPEPSPVPQQANVWGNADEDIGENDEDSGEWQIFPAHQVAPTISLDVAMGPLVSQTEEVVPSFIVYPQFWKLLSICRTLLCGPRLLGPQPMSSDVVPYQLPVHHVFQFAMLASALIWAKENWVSQQVISVQPIQAIHPQHTVSVLNLLLDPFQQDVSPALPPRPKRRTGKLILLDSEIRRSERINKLSDGFMSPDPNLGVGKPRGKARAKSSKKLKMLAQESGILLSLNPLPLELNDRIA

SEQ ID NO: 188550 - protein, 61 aa, Oryza sativa
  Clone ID: PAT_MRT4530_85143C.1.pep
KNLWARNFNLKTGGAKRRAQNHFIGAATNPFYKKGKLWQPFIIIKRPPAGKGGFFFSAQGF

SEQ ID NO: 188551 - protein, 126 aa, Oryza sativa
  unsure (1)..(126): unsure at all Xaa locations
  Clone ID: PAT_MRT4530_85144C.1.pep
FASSFCRAAPVTSRLSQARPXLHLIAFIGHKLPSQTNTSLFCTLCPHSCAPGKNFPVGHPXRISLGQARLTLEFFGNRLPEKKLQLVDMSILLILLSLGLGCYILTPLRFSIVKGSKCHSCVQSKQ

SEQ ID NO: 188552 - protein, 223 aa, Oryza sativa
  unsure (1)..(223): unsure at all Xaa locations
  Clone ID: PAT_MRT4530_85145C.1.pep
TYLGMPLTIHRLRKVHVQYLLDRIKARLAXWKKKLLSAGGXRELVIAVLSSMPIYIITALKIHKQLIQEIDKARRKFLWDRGDEIHGGKGKVNXKRVCRPIKYGGLGIPDLXKKTGHAPWLRCLWYERTSPNKPWIGTPTPXDEQDKELFAASTEVLVGDGRKALFWESTXTSSTPPLRTIASNLYKHSRRKKRIVAEALGGDKWMDDIRHNLTTTLVTEFFK

SEQ ID NO: 188553 - protein, 237 aa, Oryza sativa
  Clone ID: PAT_MRT4530_85146C.1.pep
MAAAKPVEPLPLLRAGADTAAAAALRRFQLPPQPPRSVRANAIRASPPSNGAGSPDELPAALLPNAARRRDGCGFSLGVDLGEARTGVAVGRGITLPRPLTVLKLRGQKLELMLLDIAQQQEADELIVGLPVSADGSETPQSNKVRSVVGRLAVQAADRGLRVYLQDEYGTTIDALEFMISRGVKRSARDVKSDAYSAMMILERYFSSSGQGAKIVLPKQPQLQSKLLEKSRQDAQV

SEQ ID NO: 188554 - protein, 94 aa, Oryza sativa
  Clone ID: PAT_MRT4530_85147C.1.pep
MRERRSRAPNGGSTSVLHDQYTQSTQSRIAKQRDCAGHASPTRTTMSEPSGVGDKVLLEVNQEAVAESGMTDGQQQEFVIEVKDIDAVLPMAIH

SEQ ID NO: 188555 - protein, 946 aa, Oryza sativa
  Clone ID: PAT_MRT4530_85148C.1.pep
MDVLDMLVVRFHLKGVFVLDGKEKKYCGGSEALSYIDRDKVSLPELFGHLRDHCNVLAGTLLHWLFPRKDLHTGLRALSNDQACKVMCDCIGELEVAEVYVEEPEIVDLCDGSDDDSDYEAEMEIEVDSEEEGCKMDVDGCKGKAVVEAVGSANKGKSVAEAVCTTYEGKKVAEAVGEDGGTESKGKQVAEVVGEAGGGASKGNADRMIVLYHSDSAPIASVPPSDSDSDSEYTPGDDAASDDDEEVAEIEKHYKEVTKKVKAGQLEDLDDFFLQGHRAEPRMQAGGEEDGNETPYADSDEEDLVEEVGSDGSSQLKPTIIQAYALGERKVINFVKDDAKRVRARRDNKMVTSVRIAEKYSNFISANPSWPLSHMKATVQEEMFAEASVSKLKRAKWLVMKKKMDAVKGQYQKLFNYQLELLRSNPGSTVVVNREIGLDPPVFKRIYICLDACKKGFSAGCRRVIGLDGCFFKGQTNGELLCAIGRDANNQMYPIAWAVVAKENNEEWDCDLKVGTGADWVFISDQQKGILNAVEKWAPEAEHRNCARHIYANWKRHFHDKKFQKKFWKCAKARCRMLFNLARAKLAQVTQAGAQAILNTHPEHWSRAWFRLGFNCDSVDNNLCESFNKWILESRFYPIITMLETIRRKVIVRISDQKTNGARWRTVICPGILKKLNVYINESTFCHAICNGGDSFEVKHHEHRFTVHLDKKECSCRYWQLSGLPCPHAISCIFYRTNKLDDYIAECYSVEAFRSTYDHYLQPLEGMSAWPQDDREPLNAPGYIKMPDWPKTARRREMHEPPKPTKMSRFGSVMRCTRCHQVGHNKSSCAKNNAPAAGTSSAQPMETQSQQMVLSNTPGSSAQSKKRKAATVTTTSTTIQSRSKKSKNKAPNETQELVRVNASAKVSTEHGGSARVDLHAIVPHSQGSTTASVKVTSGRAFVLVSA

SEQ ID NO: 188556 - protein, 59 aa, Oryza sativa
  Clone ID: PAT_MRT4530_85149C.1.pep
GGGGSFFLPGGFLFFGGYRGGIFSEKFFFCCSQNFLVFSVFFFYRGFIVWGVFYPGLIF

SEQ ID NO: 188557 - protein, 189 aa, Oryza sativa
  Clone ID: PAT_MRT4530_8514C.1.pep
VIYLITRSDIHFYLAQFLVLVVAAVVAIAGAVHAAAGETTATTTHIKVYWHDVVSGPSPTAVQVARAATTNSSASFFGAVVVIDDPLTSGPDLNASSPVGRAQGTYVSAGKDTVALLMNMNFVFQSGRYNGSTVAIMGRNEVFAAVREMAVVGGTGVFRWARGYAQARTHTLDMKTGDATVEYNLYINH

SEQ ID NO: 188558 - protein, 67 aa, Oryza sativa
  Clone ID: PAT_MRT4530_85150C.1.pep
PRVRRASLQGAQEGTYVYTIPNTYNYTYHTTVFMYVCVYNVRYELLLIINKCSHMYSLRSILLVLSD

SEQ ID NO: 188559 - protein, 798 aa, Oryza sativa
  Clone ID: PAT_MRT4530_85151C.1.pep
MLTSGLLRPVDDAHAIDEAALLRYAAEHVAGFPSPARGLALTQFGHGQSNPTYCIEASAPGGVTARYVLRKKPPGAILQSAHAVEREFQVLKALGTYTDVPVPKVFCLCTDASVIGTPFYIMEHLEGLIYPDNKLTGVTPTKRKTIYLAAAETLAAIHKVDVTAIGLQKYGRRDNYCKRQVERWGRQYLSSTGEGKPARYQKMLDLAHWLKEHIPKEDSSAGFGTGLVHGDYRVDNLVFHPTEDRVIGVLDWELSTLGNQMCDVAYSSLPYIIDATTSTGYSYGGFEYTGIPDGIPPLEEYLAAYCSISGNASGGERARFSGKIANAMVDRAWDIINRENVLREQPARGMHASNGPSQEFQRKHEGSISTKDQGKFVPSEKVMQLRNKLMKFMEDYIYPMESEFYKRAHSTSRWTIHPEEEKLKALAKREGLWNLFIPLDSAARARELLFEDMSHGSPGSSEELLLGAGLTNLEYGYLCEIMGRSIWAPQIFNCGPPDTGNMEVLLRYGTKEQQKQWLVPLLEGKIRSGFAMTEPQVASSDATNIECSISRQGDFYVINGTKWWTSGAMDPRCQILVLMGKTDFSAPKHKQQSMILVDVKTPGVQIRRPLLVFGFDDAPHGHAEITFENVRVPATNILLGEGRGFEIAQGRLGPGRLHHCMRLIGAAERGMNLMVERALSRTTFGKKIAQHGSFLADLAKCRVELEQARLLVLEAADQLDRHGNKKARGILAMAKVAAPNMALKVLDMAMQVHGGAGLSSDTVLSHLWATARTLRIADGPDEVHLGTIAKLELQRARM

SEQ ID NO: 188560 - protein, 261 aa, Oryza sativa
  unsure (1)..(261): unsure at all Xaa locations
  Clone ID: PAT_MRT4530_85152C.1.pep
KFSGCPSSFTYRYAPFLAXVTYLALLGCRVGDPIGQMLSSAACTAAEDALLASDLAVMTLEKQQAMRRFREQNMVYSYCYDTLRYPAPFLECDVVESERRRFKGSGHLRLAFRRRRRTRPGSRPARPTRAADIRCLVYPNPNTTSSSASASAAVKPSPPPPPPPPPRRIRSSSPCPALRGAWSRLDMVLWELTAITAYFLGLRRTYRLALRIQRRLIGPNHPRIRHFVYRRISYSSFPSATAKRNDFMQGVFRKDIAQLMV

SEQ ID NO: 188561 - protein, 82 aa, Oryza sativa
  unsure (1)..(82): unsure at all Xaa locations
  Clone ID: PAT_MRT4530_85153C.1.pep
GPPPSPTSSPASPPTRSSRPPPSTAPSPQXPPPPPAPASSAPAPTRGRTPRTDRPPQVSPPCWACPPLGLPSQGKCPGPGQG

SEQ ID NO: 188562 - protein, 72 aa, Oryza sativa
  Clone ID: PAT_MRT4530_85154C.1.pep
TVDSNSFTWKINNSRRDLKLKSKTCLQSGENIYVTQLILILVLPADNRRLPHRAFHKSRAYTPSNASRITKY

SEQ ID NO: 188563 - protein, 2614 aa, Oryza sativa
  Clone ID: PAT_MRT4530_85155C.1.pep
MAMTIGLTSARRGCGAGKRGPLVSGSGESGSPWTGTTRVVHRRSTEPTAQIALGADRTGGDRGGDVGAAAVAGAVARREVGEGPDRLGRRTSGCDTRPRAEGGHDASGHDAASLTVTAARPEARFRRRVSFCGIPPEEEGPSIGHGLEAVHGSNIVGGLGKPEASRRSLRGAGRSNQYRATPGRAPSCPHGEGASSSGVPRSSPRDGPPPTLSPGGTGCRAFVASLRNVRWPPKFRPNLTEKYDGSINPSEFLQIYTTIIVAAGGDDRVMANYFQMALKGQARGWLMTQPPDFIHSWEDLCQQFVTNFQGTYPRPGEEADLHAVRWKDDESLRSYIQRFCQVRNTIPCIPAHAVVYAFWNGMRHNRMLEKIASKEPKTTAELFELADKVAWKEAWAWNSPGTADGPSWAPCKGKATGDKPSSTAPSGEGRSADKWCLGRREGKAPATPADDRRGEAKKKAPTDDGDNSEDLEFQIPQGTVATLDLGGGGACAHTSRRGFKAIRRELLATVPTHEAARKAHWSEVKLTFDQSDHLTVLARGGKLALVVSPTIHNVRMKRVLVDGGASLSIISPAAFNALKAPGMKLQPSLPIIGVTPGHTWPLGHVELPITFGDSTNFRTERIDFDVADLNLPYNAVLGRPALVKFMAATHYAYLQMKIPGPSGPITVFGDVKVTLACAEQRADNLAVATEPQAPEASASHASKKRLTSADEESALVSFLRANSDVFEWKPSDMPGVPREVIEHRLAMRLDARPVRQKVRCQAPERQAFIREEVARLLEADFIREVIHPEWLANPVVVPKANGKLRMCIDYTDLNKACPKDPFPLPRIDQIVDSTAGFTLPKSSPAHQWSPRSPRRFPSPPAALSHSQPYLNAPRASLLRFRRPPLALPVGFELAPSSSLSAVAAELRFAAVVAPDLLPLRRRLLRLRRVLVDLVHSSVSPADRRSTIVLVDPSRAAASLRFGRRSRRRRQPGMAGSVTRRGLDMTGFVLELRGMCVVLGYPHGVDYQARPLPEQEGDDAEPHAAWEVTAVILAGSPERTSLTVTAGGDSFPAACQSAALLAIGTLHQRYPDELQHSPYRYHPRRGGARDHATFRDASSEDDATIVHLARMVEAYDAARIDFHQMVRRGMVENNLKILELRQENLQLKKDLDAVEAQLHQLKIAQGEICRPKRRRVCRSQKITARKSTSRPELMVMTRRNANTGDGNQPEGSNHNHQGNPPPPPPPPPPPPPDTNAILTQILAQQANMMTAFLHHLQNPPQLNPPPPPPQHSKLAEFLRIRPPTFSSSNNPVDALDWLHAVGKKLDTVQCSDEEKVIFAAHQLHGPASLWWDHFQAMQPEGQPVTWARFTAAFRRTHVPAGVVALKKREFRELKQGNRSVMEYLHEFNNLARYTPEDVRKDEEKQEKFLAGMDPELSVRLVSGDYPDFQRLVDKSIRLEAKHKELESHKRRLANFRNQQGANQRVRYTNPYPGGSSSQQQQQQQQPRSAPRPQFVVRVPQPQQQQNQQGTRAPRPPTPTVQPGQGRRDASGPQRLCFNCFEPGHFADKCPKPRRQQGQAPPRPNNGGKDVSRGRVNHVTAEDVLTTPDVIVGTFLIHSIPATILFDSGASHSFISVPFVGRNQLGVERLRNPLLITTPGGVMTAKYYSPAVPIEIQGIPFPSDLILLDTKNLDIGLSEIPIVREFGDVFPEELPGMPPKREIEFRIDLAPGTTPLYKRPYRMAANELAEVKKQLEELKEKGYIRPSTSPWGAPVIFVEKKDKTKRMCVDYRALNEVTIKNKYPLPRIDDLFDQLKGATVFSKIDLRSGYHQLRIREEDIPKTAFTTRYGLFEFTVMSFGLTNAPAFFMNLMNKVFMEYLDKFVVVFIDDILIYSQSEEDHQHHLRLVLGKLREHQLYAKLSKCEFWLSEVKFLGHVISAKGVAVDPETVTAVTDWKQPKTVTQVRSFLGLAGYYRRFIENFSKIARPMTQLLKKEEKFVWSPQCEKAFQTLKEKLVSSPVLILPDTRKDFMVYCDASRQGLGCVLMQDGHVVAYASRQLRPHEGNYPTHDLELAAVVHALKIWRHYLIGNRCEIYTDHKSLKYIFTQSDLNLRQRRWLELIKDYDVGIHYHPGKANVVADALSRKSHCNTLNVRGIPLELNQQMEALNLSIVGRGFLTTLEAKPTLLDQIREAQKNDPDMHGLLKNMKQGKAAGFTEDEHGTLWNGNRVCVPDNRELKQLILQEAHESPYSIHPGSTKMYLDLKEKYWWVSMKREIAEFVALCDVCQRVKAEHQRPAGLLQPLQVPEWKWDEIGMDFITGLPKTQGGYDSIWVVVDRLTKVARFIPVKTTYGGNKLAELYFARITDGQTERLNQILEDMLRACVLDFGKTWDKSLPYAEFSYNNSYQASIQMAPYEALYGRKCRTPLLWDQVGESQVFGTDILREAEAKVRTIRDNLKVAQSQQKSYADNRRRDLEFAVDDFVYLRVTPLRGVHRFQTKGKLAPRYVGPFRIVARRGEVAYQLELPASLGNVHDVFHVSQLKKCLRVPSEQADSEQIEVREDLTYVERPVKILDTMERRTRNRVIRFCKVQWSNHAEEEATWEREDELKAAHPDLFARPTRHPLPRAAPAASPVP

SEQ ID NO: 188564 - protein, 419 aa, Oryza sativa
  Clone ID: PAT_MRT4530_85156C.1.pep
MTRRSANTGDGNQPEGSNHNHQGNPPPPPPPPPPPPPDTNAILTQILAQQANMMTAFLHHLQNPPQLNAPPPPPQHSKLAEFLRIRPPTFSSSNNPVDALDWLHAVGKKLDTVQCSDEEKVIFAAHQLQGPASLWWDHFQATQPEGQPITWARFTAAFRRTHVPAGVVALKKREFRELKQGDRSVMEYLHEFNNLARYAPEDVREDEEKQEKFLAGMDPELSVRLVSGDYPDFQRLVDKSIRLEAKHKELESHKRRLANFRNQQGANQRVRYTNPYPGGSSSQQQQQQQQPRSAPRPQFVVRVPQPQQQQNQQGTRAPRPPPPTVQPGQGRRDAQGPQRLCFNCFEPGHFADKCPKPRRQQGQAPPRPNNGGKDVIRGRVNHVTAEDVLTTPDVIVESSETCFRKNYLVCRLSERLSSG

SEQ ID NO: 188565 - protein, 75 aa, Oryza sativa
  unsure (1)..(75): unsure at all Xaa locations
  Clone ID: PAT_MRT4530_85157C.1.pep
KKAQRKGRAPKATKPNPTARGSPRAGRGSIXGAPPXEVPANANRNPREEAQRPKQTRGDGFGAIPPPQNKSHQDV

SEQ ID NO: 188566 - protein, 868 aa, Oryza sativa
  Clone ID: PAT_MRT4530_85158C.1.pep
MAGGNPHDFFSQSFNEAPTGHMDGSDYGFSQGSSGYGSRSTVPPSRPPPAAGGGRGSSRGGRGGGRGRGRSLTNGAGFGRGMRGFVPPGSSSGQGGVRGHGASMSHSGPPAFNFGVFGGGRRAGASSSQGTNVSEDDGNEEDEEDFGPDGQHMNTYDKANWTEEKTYTLCEIACEEIRDGHCPNGAWTTRGYQNLKAKYFQRANLRHSTKQIKNRFTHLKNYYSAWVWLNQQTGAGRSASGEIIASNAWWEKKLRYAVVKNIASLHDFRVFCDIDLVSIQEKGDAKKFRHGNPEYLDFLIEIFQGVAVDGSTAYIPGFEDEDEEEGEEEAGDAGEAARGERAVGDGYENSPMSNNSRKRGSSSYDVSTASSPGKKSKSPVVKLMKGLLNSFNSDCDKSNTLITELVNSKKLKEQKKEEIAESLTNCQRLAVECGAAEDSVEYFCATQLFASKHNRDGEGSGDEDTSDEDSSDDEIDLIIYILKKREMDRRRACMLAAMIGTYYLELYSNKAPRRVAPESGHDWVMRTLANRTACYNMFRMHRPVFERLHSVLVESYELKSTNNMDSMECLGLFLWIVGAPQSVRQAQDRFVRSLKTVHSNFKAVLTTLLKLAQDIIRPKDPLFTIVHKKLLSPQYTPYLDNCIGAIDGTHIQVVVPNSAAVQHRNRHKENSQNVMCVCDFDMRFTFVLAGWPGSVHDMRVFNDAQTRFSAKFPKPPPGKFYLVDSGYPNRPGYLAPYKGITYHFQEYNESTLPRGKREHFNYCHSSCRNVIERSFGVLKNKWRILFSLPSYSQEKQSRIIHACIALHNFIRDSQMADTEFDNCDHDENYDPLGGTSSPSSEPTNELDSRVMNQFRDWIADGLWYLKGM

SEQ ID NO: 188567 - protein, 1807 aa, Oryza sativa
  Clone ID: PAT_MRT4530_85159C.1.pep
MEVDEVGGRWTFSRANEGYTSCGPVVEMSWHRAGVLLLGAQSCLPVSGVPAVGGIGSVLLSIARMGWKLCHVFRLYTVVMAGSVTRRGLDMTGFVLELRGMCVVLGYPHGVDYQARPLPEQEGDDAEPHAAWEVTAVILAGSPERTSLTVTAGGDSFPAACQSAALLAIGTLHQRYPDELQHSPYCYHPRRGGARDHATFRDASSEDDATIVHLARMVEAYDAARIDFHQMVRRGMVENNMKILELRQENLQLKKDLDAVEAQLHQLKIAQGEVCRPKRRRVCRSLKITARKSTSRPELVRQSLAWTCFIETPRAEPAPVMVTTRRNAVTGDGNQPEGSNHNNHGSPPPPPPPPPPPPPDTNAILTQILAQQANMMTAFLHHLQNPPQLNAPPPPPQHSKLAEFLRIRPPTFSSSNNPVDALDWLHAVGKKLDTVQCSDEEKVIFAAHQLQGPASLWWDHFQATQPEGQPITWARFTAAFRRTHVPAGVVALKKREFRELKQGNRSVMEYLHEFNNLARYAPEDVREDEEKQEKFLAGMDPELSVRLVSGDYPDFQRLVDKSIRLEAKHKELESHKCHLENFRNQQGANQRVRYTNPYPGGSSSQQQPQQQQPRSAPRPQFVVRVPQPQQQQNQQGTRAPRPPTPTVQPGQGRRDASGPQRLCFNCFEPGHFADKCPKPRRQQGQAPPRPNNGGKDVIQGRVNHVTAEDVLTTPDVIVGTFLIHSIPATILFDSGASHSFISVPFVGRNQLGVERLRNPLLITTPGEVMTAKYYSPAVPIEIQGIPFPSDLILLDTRNLDVILGMNWLAQFQGVVDCARRTVTLYRGPEQPVVFFAPPTSVNRSELHQIGLSEIPIVREFGDVFPEELPGMPPKREIEFRIDLAPGTTPLYKRPYRMAANELAEVKKQLEELKEKGYIRPSTSPWGAPVIFVEKKDKTKRMCVDYRALNEVTIKNKYPLPRIDDLFDQLKGATVFSKIDLRSGYHQLRIREEDIPKTAFTTRYGLYEFTVMSFGLTNAPAFFMNLMNKVFMEYLDKFVVVFIDDILIYSQSEEDHQHHLRLVLGKLREHQLYAKLSKCEFWLSEVKFLGHVISAKGVAVDPETVTAVTDWKPPKTVTQVRSFLGLAGYYRRFIENFSKIARPMTQLLKKEEKFVWSPQCEKAFQTLKEKLVSSPVLILPDTRKDFMVYCDASRQGLGCVLMQDGHVVAYASRQLRPHEGNYPTHDLELAAVVHALKIWRHYLIGNRCEIYTDHKSLKYIFTQSDLNLRQRRWLELIKDYDVGIHYHPGKANVVADALSQKGHCNTLNVRGIPPELNQQMEALNLSIVSRGFLAALEAKPTLLDQIREAQKNDPDMHGLLKNMKQGKAAGFTEDEHGTLWNGNRVCVPDNRELKQLILQEAHESPYSIHPGSTKMYLDLKEKYWWVSMKREIAEFVALCDVCQRVKAEHQRPAGLLQPLQVPEWKWDEIGMDFITGLPKTQGGYDSIWVVVDRLTKVARFIPVKTTYGGNKLAELYFARIVSLHGVPKKIVSDRGSQFTSHFWKKLQEELGTRLNFSTAYHPQTDGQTERLNQILQDMLRACVLDFGKTWDKSLPYAEFSYNNSYQASIQMAPYEALYGRKCRTPLLWDQVGESQVFGTDILREAEAKVRTIRDNLKVAQSRQKSYADNRRRDLEFAVDDFVYLRVTPLRGVHRFQTKGEARTSLPASLGNVHDVFHVSQLKKCLRVPSEQADSEQIEVREDLTYVERPVKILDTMERRTRNRVIRFCKVQWSNHAEEEATWEREDELKAAYPDLFASSSESRGRDSV

SEQ ID NO: 188568 - protein, 364 aa, Oryza sativa
  Clone ID: PAT_MRT4530_8515C.1.pep
MGASCSSPFPPPPSPAESNAPSASAMHHPPHPAAGGGGPVMPYADADRTLRALAGAAEGFGRRAIGGLHGPLYRVTSLDDDGHGTLRQACRAHGPLWIVFDVSGDIHLRTYLRVTSHKTIDGRGQRVRLLGKGLQLKECRHVIVCNLQIEGGRGHDVDAIQIKPSSADIWIDRCSLADCDDGLVDITRGSTDVTVSRCRFSRHDKTMLVGADPSHTGDRGIRVTVHHCFFDGTRQRHPRVRFGRAHLYNNYTRGWGIYAVAAGVEAQVASQCNVYEAGAERKAVFRYVPERAADREEAEAGWVRSEGDAFLNGARPCLVDGGDAAVFRPEEYYERWTMEAASPALKEVVQLCAGWQPVPRPPGE

SEQ ID NO: 188569 - protein, 563 aa, Oryza sativa
  Clone ID: PAT_MRT4530_85160C.1.pep
MAGGNPHDFFSQSFNEAPAGHMDGSDYGFSQGSSGYGGSGADIHFGGGGSGGLNLNSQADAFPDFASYQQIIQPGSLGGMRGWVPPGSSSSEGRVRGHGTSMSHSGPPAFDFGVFGGGQRVGASSSQGTYVSEDDGNDEDEEDFGPDGQHMEKGDAKKFCHGNPEYLDFLIEMFQGVAVDGSTAYIPGFEDEDGEEGEEEAGDAGETARGERAVGDGYENSPMSTNNRKRGSSSCDVSTASSPGKKSKSPVVKLMKGLLNSFNSESDKSNTLITELVNSKKLKEQKKEEIVESLTHCQRLAVECGAAEDSVEYFCATQLFASNHNRDGEGSADEDICEEDSSDEEIDLIISILKKREMNRRRACMLADMIGAPQSVRQAQDRFVRSLRTVHSKFKAVLTALLKLAKDIIRPKDPLFTTVHKKLLSPQYTPYLDNCIGAIDGTHIQVVVPNSAAVQHRNRHKEKSQNVMFVCDFDMRFTFVLAGWPGSVHDMRVFNDAQTRFSAKFPKPPPGKFYLVDSGYPNRLGYLAPYKGITYHSKSTTKAHCQGEEGSTLITAILRVGMS

SEQ ID NO: 188570 - protein, 1701 aa, Oryza sativa
  Clone ID: PAT_MRT4530_85161C.1.pep
MDEVGGRWTFSRANEGYTSCGPMAGSVTRRGLDMTGFVLELRGMCVVLGYPHGVDYQARPLPEQEGEDAEPHAGWEAYDAARIDFHQMVRRGMVENNMKILELRQENLQLKKDLDALESQLHQLKLAQGEDSRPKRRRVCRSQKITARKSTSRPELVRQSLAWTCFVETPRAEPAPVVPQEGEASGVGSTEDALLLAFRPGPSQRRNVSTGEGNQPEGSNPNPQGNPPPPPPPDTNAILTQILAQQANMMTAFLHHLQNPPQQNAPPPPPQHSKLAEFLRIRPPTFSSSNNPVDALDWLHAVGKKLDTVQCSDEEKVIFAAHQLQGPASLWWDHFQATQPEGQPITWAHFTAAFRRTHVPAGVMALKKREFRELKQGNRSVMEYLHEFNNLARYAPEDVREDEKKQEKFLAGMDPELSVRLVSGDYPDFQRLVDKSIRLEAKHKELESHKRRLANFRNQQGANQRVRYTNPYPGGSSSQQQQQQQQSRSAPRPQFVVRVPQPQQQQNQQGTRAPRPPTPTVQPVQGRRDAQGQQRLCFNCFEPGHFADKCPKPRRQQGQAPPRPNNGGKDVIRGRVNHVTAEDVLTTPDVIVGTFLIHSIPATILFDSGASHSFISVPFVGKNQLGVERLRNPLLITTPGGVMTAKYYSPAVPIEIQGIPFSSDLILLDTKNLDVILGMNWLAQFQGVVDCARRTVTLYRGPEQPVVFFAPPTSVRSSELHQIGLSEIPIVREFGDVFPEELPGMPPKREIEFRIDLAPGTTPLHKRPYRMAANQNLAEFKKQLEELKEKGYIRPSTSPWGAPVIFVEKKDKTKRMCVDYRALNEVTIKNKYPLPRIDDLFDQLKGATVFSKIDLRSGYHQLRIREEDIPKTAFTTRYGLYEFTVMSFGLTNAPAFFMNLMNKVFMEYLDKFVVVFIDDILIYSQSEEDHQHHLRLVLGKLREHQLYAKLSKCEFWLSEVKFLGHVISAKGVAVDPETVTAVTDWKQPKTVTQVRSFLGLAGYYRRFIENFSKIARPMTQLLKKEEKFVWSPQCEKAFQTLKKKLVSSPVLILPDTRKDFMVYCDASRQGLGCVLMQDGHVVAYASRQLRPHEGNYPTHDLELAAVVHALKIWRHYLIGNRCEIYTDHKSLKYIFTQSDLNLRQRRWLELIKDYDVGIHYHPGKANVVADALSRKSHCNTLNVRGIPPELNQQMEALNLSIVGRGFLAALEAKPTLLDQIREAQKNDPDMHGLLKNMKQGKAAGFTEDEHGTLWNGKRVCVPDNRELKQLILQEAHESPYSIHPGSTKLYLDLKEKYWWVSMKREIAEFVALCDVCQRVKAEHQRPAGLLQPLQVPEWKWDEIGMDFITGLPKTQGGYDSIWVIVDRLTKVARFIPVKTTYGGNKLAELYFARIVSLHGIPKKIVSDRGSQFTSHFWKKLQEELGTRLNFSTAYHPQTDGQTERLNQILEDMLRACVLDFGKTWDKSLPYAEFSYNNSYQASIQMAPYEALYGRKCRTPLLWDQVGESQVFGTDILREAEAKVRIIRDNLKVAQSRQKSYADNRRRDLEFAVGDFVYLRVTPLRGVHRFQTKGKLAPRYVGPFRIIARRGEVAYQLELPASLGNVHDVFHVSQLKKCLRVPSEQADSEQIEVREDLTYVERPVKILDTMERRTRNRVIRFCKVQWSNHAEEEATWEREDELKAAHPDLFASSSESRGRDSV

SEQ ID NO: 188571 - protein, 768 aa, Oryza sativa
  Clone ID: PAT_MRT4530_85162C.1.pep
MDGSDYGFSQGSSGYGGSGTGIHFGGGGSGGLDLNSQADAFPDFASYQQILEPGSLVLPPIRAGSRSTVPPSRPPPAAGGGRGRSRGGRGGGRGRGMSLTNGAGSGRGMRGFVPPGSSSGQGGVRGHGASMSHSGPPAFNFGVFGGGRRAGASSSQGTNVSEDDGNEEDEEDFGPDGQHMNTYDKANWTEEKTYTLCEIACEEIRDGHCPNGAWTTRGYQNLKAKYFQRANLRHSTKQIKNRFTHLKNYYIAWVWLNQQTGAGRSASEEIIASNAWWEKKIKEKGDAKKFRHGNPEYLDFLIEIFQGVAVDGSTAYIPGFEDEDEEEGEEEAGDAGEAARGERAVGDGYENSPMSTNSRKRGSSSCNVSTASSPGKKSKSPVVKLMQGLLNSFNFDCDKSNTLITELVNSKKLKEQKKEEIDGEGSGDEDISDEDSSDDEIDLIIYILKKREMDRRRACMLAAMIGTYYLELYSNKAPRRVAPESGHDWVMRTLANRTVCYNMFRMHRPVFERLHSVLVESYELKSTNNMDSMECLGLFLWIVGAPQSVRQAQDRFVRSLKTVHSKFKAVLTALLKLAQDIIRPKDPLFTTVHKKLLSPQYTPYLDNCIGAIDGTHIQVVVPNSAAVQHRNRHEEKSQNVMCVCDFDMRFTFVLAGWPGSVHDMRVFNDAQTRFSAKFPKLPLGKFYLVDSGYPNRPGYLAPYKGITYHFQEYNESTLPRGRREHFNYCHSSCRNVIERSFGVLKNKWRILFSLPSYSQEKQSRIIHA

SEQ ID NO: 188572 - protein, 1385 aa, Oryza sativa
  Clone ID: PAT_MRT4530_85163C.1.pep
MSWHRAGVLLLGAQSCLPVQGVPAVGGIGSVLLSMARMGWKLCHVFRLYTVVATQPEGQPITWARFTAAFRRTHVPAGVMALKKREFRELKQGNRSVMEYLHEFNNLARYAPEDVREDEEKQEKFLAGMDPELSVRLVSGDYPDFQRLVDKSIRLEAKHKELESHKRRLANFRNQQGANQRIRYTNPYPGGSSSQQQQPRSAPRPQFVVRVPQPQQQQSQQGTHAPRPPTPAAQSGQGRRDVQGPQRLCFNCFEPGHFADKCPKSRRQQGQAPPCSNNGGKDVIRGRVNHVTAEDVLTTPDVIVGTFLIHSIPATILFDSGASHSFISVPFVGRNQLGVERLRNPLLITTPGGVMTAKYYSPAVPIEIQGIPFPSDLILLDTKNLDVILGMNWLAQFQGVVDCARRTVTLYRGPEQPVVFFAPPTSVSSSELHQIGLSEIPIVREFGDVFPEELPGMPPKREIEFRIDLAPGTTPLYKRPYRMAANELAEVKKQLEELKEKGYIHPRTSPWGAPVIFVEKKDKTKRMCVDYRALNEVTIKNKYPLPRIDDLFDQLKGATVFSKIDLRSGYHQLRIREEDIPKTAFTTRYGLYEFTVMSFGLTNAPAFFMNLMNKVFMEYLDKFVVVFIDDILVYSQSEEDHQHHLRLVLGKLREHQLYAKLSKCEFWLSEVKFLGHVISAKGVAVDPETVTAVTDWKQPKTVTQIRSFLGLAGYYRRFIENFSKIARPMTQLLKKEEKFVWSPQCEKAFKTLKEKLVSSLVLILPDTRKDFMLRPHEGNYPTHDLELPAVVHALKIWRHYLIGNRCEIYTDHKSLKYIFTQSDLNLRQRRWLELIKDYDVGIHYHPGKANVVADALSRKSHCNTLNVRGIPPELNQQMEALNLSIVGRGFLAALEAKPTLLDQIREAQKNDPDMHGLLKNMKQGKAAGFTEDEHGTLWNGNRVCVPDNRELKQLILQEAHESPYSIHPGSTKMYLDLKEKYWWVSMKREIAEFVALCDVCQRVKAEHQRPAGLLQPLQVPEWKWNEIGMDFITGLPKTQGGYDSIWVVVDRLTKVARFIHVKTTYGGNKLAELYFARIVSLHGVPKKIVSDRGSQFTSHFWKKLQEELGTRLNFSTAYHPQTDGQTERLNQILEDMLRACVLDFGNTWDKSLPYAEFSYNNSYQASIQMAPYEALYGRKCRTPLLWDQVGESQVFGTDILREAEAKVRTIRDNLKVAQSRQKSYADNRRRDLEFAVDDFVYLRVTPLRGVHRFQTKGKLAPRFVGPFRIIARRGEVAYQLELPASLGNVHDVFHVSQLKKCLRVPSEQADSEQIEVREDLTYVERPVKILDTMERKTRNRVIRFCKVQWSNHAEEEATWEREDELKAAHPDLFVSSSESRGRDSV

SEQ ID NO: 188573 - protein, 569 aa, Oryza sativa
  Clone ID: PAT_MRT4530_85164C.1.pep
MASGSSVGGDSYDEEAAAAAVPRRPPVELDGRGAASDHRSGFIPRYQVGSSKVDTSERYFDEWQKKLPNTDEIRKSKPRSRYFTISGVELSPDNMAVATVYFVQGVLGLARLAVSFYLKDDLHLDPAETAVISGFSSLPWLIKPLYGFISDSIPLFGYRRRSYLILSGFLGALSWGLMATLVDSKYSAAFSILLGSLSVAFSDVVVDSMVVERARGESQSTSGSLQSLCWGSSAFGGIVSAYFSGSLVDTYGVRFVFGVTAFLPLMTSAVAVLVNEHRLSSGERAMSHSGSGFIETSKQHIRQLWTSVKQPNIFLPTLFIFLWQATPKSDSAMFFFITNKLGFTPEFLGRVKLVTSIASLLGVGLYNYFLKAVPLRKIFLATTIIGSALGMTQVLLVTGLNRQFGISDEWFSIGDSLIITVLSQASFMPVLVLAAKLCPPGMEATLFATLMSISNAGSVSGGLVGAGLTQFFGVTKDSFKNLALLIVICNLSALLPLPLLGLLPEESGQTFFSLTINLQAGTMVQDHQKMSFNAKQYSSNELAISLLLHHDYNLRRLWSLFSPSAILPV

SEQ ID NO: 188574 - protein, 392 aa, Oryza sativa
  Clone ID: PAT_MRT4530_85165C.1.pep
MAGGNPHDFFSQSFNEAPAGHMDGSDYGFSQGGMRGWVPPGSASGDGGFRGHAASMSHSGPPAFDFGVFGGGPRVGASSSQGTYVAEDDGNDEDEEDFGPDGQRMNTYDKAIWTEEKTYTLCEIACEEIRDGHCPNGAWTTRGYQNLKAKYFQRANLRHSTKQIKNRFTHLKNYYVAWVWLNQQTGAVSIQEKGDAKKFRHGNPEYLDFLIEMFQGVAVDGSTAYIPGFEDEDEEEEEEEAGDARETARGERAVGDGFENSPMSTNSRKRGSSSCDVSTASSLGKKSKSPVVKLMRGLLNSFTSKSDKSNTLITELVNSKKLKEQKKEEMAESLTHCQKLAVECGAAEDNVEYFCATQLFASKHNRVMFENISTNEARFMWLKRWCQHKNLY

SEQ ID NO: 188575 - protein, 658 aa, Oryza sativa
  unsure (1)..(658): unsure at all Xaa locations
  Clone ID: PAT_MRT4530_85166C.1.pep
MALRVLFLMLSAFPASCLAVAAPISPDAVPLLAFKSACADPAAALVSWTEASDPCSDRWRGITCRKPSPSPPPSSPPRVRRVVLEGLRLGGDAGAVAALAGLPMLSFLSLKNNSFTGSLGDVDFSTLAPHLKLLYLSGNGFSGRFPESVLRLRHLRRLDLSGNRLTCTIPPEIGHRLPSLLTLHLARNSLVGPLPASLGAMARLAKLNVSGNHLQGRIPKRLAAVFPASSFTGNPELCGAPLRRRCNEQLHMVYGGGGSGADTSHQPKRGRRRSNDRWMVAMIMAAVGAAVASLVAAALXSCGVLWLKNKKPERPRASSRTSSMAREETVRFDGCCVEFDVCTLMRGAAEILGKGATATTYHVAMGGDDVIVDDAGVVEEGKAGEVVVMKRMRRREGTTREDERRKRELAREMGTWRHANVVSLCAFYASADELLLVFDYVPNGSLHSLLNENRGPARVPLEWQTRLKLAQDAAQGHAYLHGVSGGKLAHRHLTSSNILVDAGGNARVSDFALLQLLVPAPAADEAAQKQDVHAFGVVLLEILTGRSPEDGNVDLALWARTVVREEWTSEVFDVELLPSRGGAEDEMVALLHVALLCVADDPGERPRMAVVAKMIEDIRDRGSKRSRYSASPSQVGHSYESSPSISEDTTRSTNASSS

SEQ ID NO: 188576 - protein, 1804 aa, Oryza sativa
  Clone ID: PAT_MRT4530_85167C.1.pep
MDEVGGRWTFSRANEGYTSCGPMAGSVTRRGLHMTGFVLELRGMCVVLGYPHGVDYQARPLPEQEGEDVEPHAGWEVTAVILSGSPERTSLAVTAGGDSFPAACQNAALLAIGTLHQRYPDELQHSPYRYHPRRGGASDHATFRDASSEDDATVVHLARMVEAYDAARIDFHQMVRRGMVENNMKILELRQENLQLKKDLDAVEAQLHQLKIAQGEICRPKRRRVCRSQKITARKSTSRPELVRQSLAWTCFVETPRAEPAPVVPQEGEASGVGSSEGALLLTFRPGPSQRSPSLFAGSVWGFQMVTTRRNVNTGEGNQPEGSNPNPQGNPPPPPPPDTNAILTQILAQQANMMNAFLHHLQNPPQQNAPPPPPQHSKLAEFLRIRPPTFSSSNNPVDALDWLHAVGKKLDTVQCSGEEKVIFAAHQLQGPASLWWDHFQAAQPEGQPITWARFTAAFRRTHVPAGVVALKKREFRELKQGNRSVMEYLHEFNNLARYAPEDVREDEEKQEKFLAGMDPELSVRLVSGDYPDFQRLVDKSIRLEAKHKELESHKRRLANFRNQQGANQRVRYTNPYPGGSSSQQQQQQQQPRPAPRPQFVVRVPQPQQQQNQQGTRAPRPPTPAVQPVQSRRDASGPQRLCFNCFEPGHFADKCPKPRRQQGQAPPRSNNGGQDVIRGRVNHVTAEDVLTTPDVIVGTFLVHSIPATILFDSGASHSFISVPFVGKNQLGVERLRNPLLITTPGGVMTAKYYSPAVPIEIQGIPFPSDLILLDTKNLDVILGMNWLAQFQGVVDCARRTVTLYRGPEQPVVFFAPPTSVRSSELHQIGLSEIPIVREFGDVFPEELPGMPPKREIEFRIDLAPGTTPLYKRPYRMAANELAEVKKQLEELKEKGYIRPSTSPWGAPVIFVEKKDKTKRMCVDYRALNEVTIKNKYPLPRIDDLFDQLKGATVFSKIDLRSGYHQLRIREEDIPKTAFTTRYGLYEFTVMSFGLTNAPAFFMNLMNKVFMEYLDKFVVVFIDDILIYSQSEEDHQHHLRLVLGKLREHQLYAKLSKCEFWLSEVKFLGHVISAKGVVVDPETVTAVTDWKQPKTVTQIRSFLGLAGYYRRFIENFSKIARPMTQLLKKEEKFVWSPQCEKAFQTLKEKLVSSPVLILPDTRKDFMVYCDASRQGLGCVLMQDGHVVAYASRQLRPHEGNYPTHDLELAAVVHALKIWRHYLIGNRCEIYTDHKSLKYIFTQSDLNLRQRRWLELIKDYDVGIHYHPGKANVVADALSRKSHCNNLNARSIPPELSQQMEALNLNIVGRGFLAALEAKPTLLDQIREAQKNDPDMHGLLKNMKQGKAAGFTEDEHGTLWNGKRVCVPDSRELKQLILQEAHESPYSIHPGSTKMYLDLKEKYWWVSMKREIAEFVALCDVCQRVKAEHQRPAGLLQPLQVPEWKWDEIGMDFITGLPKTQGGYDSIWVVVDRLTKVARFIPVKTTYGGNKLAELYFARIVSLHGVPKKIVSDRGSQFTSHFWKKLQEELGTRLNFSTAYHPQTDGQTERLNQILEDMLRACVLDFGKTWDKSLPYAEFSYNNSYQANIQMAPYEALYGRKCRTPLLWDQVGESQVFGTDILREAEAKVRIIRDNLKVAQSRQKSYADNRRRDLEFAVDDFVYLRVTPLRGVHRFQTKGKLAPRYVGPFRIIARRGEVAYQLELPASLGNVHDVFHVSQLKKCLRVPSEQADSEQIEVREDLTYVEKPVKILDTMERRTRNRVIRFCKVQWSNHAEEEATWEREDELKAAHPDLFASSSESRGRDSV

SEQ ID NO: 188577 - protein, 372 aa, Oryza sativa
  Clone ID: PAT_MRT4530_85168C.1.pep
MASSRDFDHADCFDNSGPVHMMAKNGAGSPRTVLDWGKEEHRRCVAACLVKGVYIIENDSTRRRVHTNALAPPWWENFGFNLLDVIRDDSDHDVLSIIGAIYEHVPPLGEPAHPLSPHYVVAFRGTMMSHPKALIDLYLDAKIMVNTLKESKRSRLANTAVKKLVATIDKGMGGACAHGTAGSCIVWLAGHSLGASLALDVGRAMMVEQGYNLPTFLFNPPQVSPTPAIDVLLPIEKAQKAKRDIYAVSYFVKAGLGKVLNPHKERMENLFKRLSPWAPELYVHERDVICKGYIDYFEQRQQVQERFRAVATSAMTLSYRDMFFSMFGMEKEQPHLLPSARLWKSTSKDEDAHALQQWWKPMGVQAMVEADG

SEQ ID NO: 188578 - protein, 869 aa, Oryza sativa
  Clone ID: PAT_MRT4530_85169C.1.pep
MAGGNPHDFFSQSFNEAPTGHMDGSDYGFSQGSSGYGGSGTGIHFGGGGSGGLDLNSQADAFPDFASYQQILEPGSLVLPPIRAGSRSTVPPSRPPPAAGGGRGRSRGGRGGGRGRGMSLTNGAGSGRGMRGFVPPGSSSGQGGVRGHGASMSHSGPPAFNFGVFGGGRRAGASSSQGTNVSEDDGNEEDEEDFGPDGQHMNTYDKANWTEEKTYTLCEIACEEIRDGHCPNGAWTTRGYQNLKAKYFQRANLRHSTKQIKNRFTHLKNYYIAWVWLNQQTGAVSIQEKGDAKKFRHGNPEYLDFLIEIFQGVAVDGSTAYIPGFEDEDEEEGEEEAGDAGEAARGERAVGDGYENSPMSTNSRKRGSSSCDVSTASSPGKKSKSPVVKLMQGLLNSFNSDCDKSNTLITELVNSKKLKEQKKEEIAESLTNCKRLAVECGAAEDSVEYFCATQLFASKHNRDGEGSGDEDISDEDSSDDEIDLIIYILKKREMDRRRACMLAAMIGTYYLELYSNKAPRRVAPESGHDWVMRTLANRTACYNMFSMHRPVFERLHSVLVESYELKSTNNMDSMECLGLFLWIVGAPQSVRQAQDRFVRSLKTVHSKFKAVLTALLKLAQDIIRPKDPLFTTVHKKLLSPQYTPYLDNCIGAIDGTHIQVVVPNSAAVQHRNRHEEKSQNVMCVCDFDMRFTFVLAGWPGSVHDMRVFNDAQTRFSAKFPKPPLGKFYLVDSGYPNRPGYLAPYKGITYHFQEYNESTLPRGRREHFNYCHSSCRNVIERSFGVLKNKWRILFSLPSYSQEKQSRIIHACIALHNFIRDSQMADTEFDNCDHDENYDPLGGTSSPSSEPTNDLDSRVMNQFRDWIADGL

SEQ ID NO: 188579 - protein, 96 aa, Oryza sativa
  Clone ID: PAT_MRT4530_8516C.1.pep
KGKEILLSLGTKKPIPFVHLTNPTRLKNKTLPYKGGAPAVRTKRGPKKPGPGRKFPPPPKRETGGGPPPPPGKPPPRDKSFSFSLTGPPWPFPLLT

SEQ ID NO: 188580 - protein, 2018 aa, Oryza sativa
  unsure (1)..(2018): unsure at all Xaa locations
  Clone ID: PAT_MRT4530_85170C.1.pep
MAAGSSATDSPSSGRSLLLPTLHKHSPCLPPSFPPLAALSPRRNRARAVVLSLRRRRRAPVRRRRRPGPPPVSASPSSGSPRPRRSRPPLRFARRPPERRRPRRPEPRRRLPPLRSPFPSSPSTRGEPWTAHFVSPFPLLSRAPLRRAGGRRRRPSGRGCAASRRLCRRGRLRARPAAAMWGPAVSRPCPRVRLTRGTHGAXGRRKPRAPGPPWTHLGHIRTGLRASVAKHYRXFHMSSGANEGYTSCGPVVEMSWHRAGVLLLGAQSCLPVPGVPAVGGIGSMYTSDQSKIYSNSRALGYGQAEQCTQMAGSVSRRGLDMTGFVLELRGMCVVLGYPHGVDYQARPLPEQEGDDAEPHAAWEVTAVILAGSPERISLTVTAGGDSFPAACQSAALLAIGTLHQRYPDELQHSPYRYHPRRGGARDYATFRDASSEDDATIVHLARMVKAYDAARIDFHQMVRRGMVENNMKILELRQENLQLKKDLDAVEAQLHQLKIAQGEVCRPKRRRVCRSQKITARKSTSRPELVRQSLAWTCFVETPRAEPTPVVPQKGEASGVGSTEDALLLTFHGXTRRNAATSDGNQPEGSNHNNHGSPPPPPPPPPPPPPDTNAILTQILAQQANMMTAFLHHLQNPPQHNAPPPPPQHSKLAEFLRIRPPTFSSSNNPVDALDWLHAVGKKIDTVQCSDEEKVIFAAHQLQGPASLWWDHFQATQPEGQPITWARFTAAFRRTHVPAGVVALKKREFRELKQGNRSVMEYLHEFNNLARYAPEDVREDEEKQKKFLAGMDPELSVRLVSGDYPDFQRLVDKSIRLEVKHKELESHKRRLANFRNQQGANQRVRYTNPYPGGSSSQQRQQQQQPRSAPRPQFVVRVPQPQQQQSQQGTRAPRPPTPTVQPGQGRRDASGPQRLCFNCFEPGHFADKCPKPRRQQGQAPPRSNNGGKDVIRGRVNHVTAEDVLTTPDVIVGTFLIHSIPATILFDSGASHSFISVPFVGRNQLGVERLRNPLLITTPGGVMTAKYYSPAVPIEIQGIPFPSDLILLDTKNLDVVLGMNWLAQFQGVVDCARRTVTLYRGPGQPVVFFAPPTSVSSSELHQIGLSEIPIVREFGDVFPEELPGMPPKREIEFRIDLALGTTPLCKRPYRMAANELAEVKKQLEELKEKGYIRPSTSPWGAPVIFVEKKDKTKRMCVDYRALNEVTIKNKYPLPRIDDLFDQLKGATVFSKIDLRSGYHQLRIREEDFPKTAFTTRYGLYEFTVMSFGLTNAPAFFMNLMNKVFMEYLDKFVVVFIDDILIYSQSEEDHQHHLLLVLGKLREHQLYAKLSKCEFWLSEVKFLGHVISAKGVAVDPETVTAVTDWKQPKTVTQVRSFLGLAGYYRRFIENFSKIARPMTQLLKKEEKFVWSPQCEKAFRTLKEKLVASPVLILPDTRKDFIVYCDASRQGLGCVLMQDGHVVAYASRQLRPHEGNYPTHDLELAAVVHALKIWRHYLIGNRCEIYTDHRSLKYIFTQSDLNLRQRRWLELIKDYDVGIHYHPGKANVVADALSRKSHCNTLNVRGIPPELNQQMEALNLSIVSRGFLATLEAKPTLLDQIREAQKNDPDMHGLLKNMKQGKAAGFTEDEHGTLWNGNRRVKAEHQRPAGLLQPLQVPEWKWDEIGMDFITGLPKTQGGYDSIWVVVDRLTKVARFIPVKTTYGGNKLAELYFARIVSLHGVPKKIVSDRGSQFTSHFWKKLQEELGTRLNFSTAYHPQIDGQTERLNQILEDMLRACVLDFGKTWDKSLPYAEFSYNNSYQASIQMAPYEALYGRKYRTPLLWDQVGESQVFGTDILREAEAKVRTIRDNLKVAQSRQKSYADNRRRDLEFAVDDFVYLRVTPLRGVHRFRTKGKLAPRYVGPFRITARRGEVAYQLELPASLGNVHDVFHVSQLKKCLRVPSEQADSEQIVVREDLTYVERPVKILDTMERRTRNRVIRFCKVEWSNHAEEEATWEREDELKAAHPDLFASSSESRGRDSV

SEQ ID NO: 188581 - protein, 916 aa, Oryza sativa
  Clone ID: PAT_MRT4530_85171C.1.pep
MAGGNPHDFFSQSFNEAPTGHMDGSDYGFSQGSSGYGGSGTGIHFGGGGSGGLDLNSQADAFPDFASYQQILEPGSLVLPPIRAGSRSTVPPSRPPPAAGGGRGSSRGGRGGGRGRGRSLTNGAGSGRGMRGFVPPGSSSGQGGVRGHGASMSHSGPPAFNFGVFGGGRRAGASSSQGTNVSEDDGNEEDEEDFGPDGQHMNTYDKANWTEEKTYTLCEIACEEIRDGHCPNGAWTTRGYQNLKAKYFQRANLRHSTKQIKNRFTHLKNYYSAWVWLNQQTGAGRSASGEIIASNAWWEKKLRYAVVKNIASLHDFRVFCDIDLVSIQEKGDAKKFRHGNPEYLDFLIEIFQGVAVDGSTAYIPGFEDEDEEEGEEEAGDAGEAARGERAVGDGYENSPMSNNSRKRGSSSCDVSTASSPGKKSKSPVVQLMKGLLNSFNSDCDKSNTLITELVNSKKLKEQKKESIAESLTNCQRLAVECGAAEDSVEYFCATQLFASKHNRDGEGSGDEDISDEDSSDDEIDLIIYILKKREMDRRRACMLAAMIGTYYLELYSNKAPRRVAPESGHDWVMRTLANRTACYNMFRMHRPVFERLHSVLVESYELKSTNNMDSMECLGLFLWIVGAPQSVRQAQDRFVRSLKTVHSKFKAVLTALLKLAQDIIRPKDPLFTTVHKKLLSPQYTPYLDNCIGAIDGTHIQVVVPNSAAVQHRNRHKEKSQNVMCVCDFDMRFTFVLAGWPGSVHDMRVFNDAHTRFSAKFPKPPPGKFYLVDSGYPNRPGYLAPYKGITYHFQEYNESTLPRGKREHFNYCHSSCRNVIERSFGVLKNKWRILFSLPSYSQEKQSRIIHACIALHNFIRDSQMADTEFDNCDHDENYDPLGGTSSPSSEPTNELDSRVMNQFRDWIADGLWYLKGM

SEQ ID NO: 188582 - protein, 1655 aa, Oryza sativa
  Clone ID: PAT_MRT4530_85172C.1.pep
MAGSVTRRGLDMTGFVLELRGMCVVLGYPHGVDYQARPLPEQEGEDAEPHAGWEVTAVILSGSPERTSLAVTAGGDSFPAACQNAALLAIGTLHQRYPDELQHSPYRYHPRRGGARDYATFRDASSEDDATVVHLARMVEAYDAARIDFHQMVRRGMVENNMKILELRQENLQLKKDLDAVEAQLHQLKIAQGEVCRPKRRRVCRSQKITARKSTSRPELVRQSLAWTCFVETPRAEPTPVVPQKGEASGVDGETRRNAATSDGNQPEGSNHNNHGSPPPPPPPPPPPPPDTNAILTQILAQQANMMTAFLHHLQNPPQHNAPPPPPQHSKLAEFLRICPPTFSSSNNPVDALDWLHAVGKKLDTVQCSDEEKVIFAAHQLQGPASLWWDHFQATQPEGQPITWARFTAAFRRTHVPAGVVALKKREFRELKQGNRSVMEYLHEFNNLARYAPEDVREDEEKQEKFLAGMDPELSVCLVSGDYPDFQRLVDKSIRLEAKHKELESHKRRLANFHNQQGANQRVRYTNPYPGGSSSQQQQQQQQPRSAPRPQFVVRVPQPQQQTNQQGTRAPRPPPPTVQPGQGRRDAQGPQRLCFNCFEPGHFADKCPKPRHQQGQAPPRPNNGGKDVIRGRVNHVTAEDVLTTPDVIVGTFLIHSIPATILFDSGASHSFISVPFVGRNQLGVERLRNPLLITTPGGVMTAKYYSPAVPIEIQGIPFPSDLILLDTKNLDIGLSEIPIVREFGDVFPEELPGMPPKREVEFRIDLAPGTAPLYKRPYRMAANELAEVKEQLEELKEKGYIRPSTSPWGAPVIFVEKKDKTKRMCVDYRALNEVTIKNKYPLPRIDDLFDQLKGATVFSKIDLRSGYHQLRIREEDIPKTAFTTRYRLYEFTVKSFGLTNAPAFFMNLMNKVFMEYLDKFVVVFIDDILIYSQSEEDHQHHLRLVLGKLREHQLYAKLSKCEFWLSEVKFLGHVISAKGVAVDPETVTAVTDWKQPKTVTQVRSFLGLAGYYRRFIENFSKIARPMTQLLKKEEKFVWSPQCEKTFKTLKEKLVSSPVLILPDTRKDFMVYCDASRQGLGCVLMQDGHVVAYASRQLRPHEGNYPTHDLELAAVVHALKIWRHYLIGNRCEIYTDHKSLKYIFTQSDLNLRQRRWLELIKDYDVGIHYHPGKANVVADALSRKSHCNTLNVRGVPPELNQQMEALNLSIVSRGFLAALEAKPTLLDQIREAQKNDPDMHGLLKNMKQGKAAGFTEDEHGTLWNGNRVCVPVNRELKQLILQEAHESPYSIHPGSTKMYLDLKEKYWWISMKREIAEFVALCDVCQCVKAEHQRPAGLLQPLQVPEWKWDEIGMDFITGLPKTQGGYDSIWVVVDRLTKVARFIPVKTTYGGNKLAELYFARITDGQTERLNQILEDMLRACVLDFGKTWDKSLPYAEFSYNNSYQASIQMAPYEALYGRKCRTPLMWDQVGESQVFGTDILREAEAKVRTIRDNLKVAQSRQKSYADNRRRDLEFAVDDFVYLRVTPLRGVHRFRTKGKLAPRYVGPFRIVARRGEVAYQLELPASLGNVHDVFHVSQLKKCLRVPSEQADSEQIEVREDLTYVERPVKILDTMERRTRNRVIRFCKVQWSNHAEEEATWEREDELKAAHPDLFA

SEQ ID NO: 188583 - protein, 591 aa, Oryza sativa
  Clone ID: PAT_MRT4530_85173C.1.pep
MQRDAIAAARNAGCSSGRISQPPPPPFYSAATGIYSSIHPPVALPTDPSLTLVAHLFARLPLADPGAPTLVDAATASAVSRADLRRLVASLAAGLRRRHGVRKGSVVLLLLPNSVAFPVSFLAVLAAGAVATTMNPSSSPAEIAAQARATGACLVLASRDGAARLPPLAAPVVLVPEILDHSAAADDGDDDQRVFAAFRAMLDGGGGDGTETAVPVVGQDDAVAILYSSGTSGRSKGVVLTHRNLIAMTELFVRFEASQYHARGARENVYMAALPMSHVYGLSLFAVGLLSIGATVVVMRRFDAGDAVAAIGRYKVTHMPLVPPIMAAMVRAAAAGGVPPSQVASLVQVSCGAAPITAALIHEFLQAFPHVDFIQGYGMTESTAVGTRGFNTSKHKKYTSVGLLAPNMHAKIVHLESSSCLPPGFSGELWLHGPGIMKGYLSDDDDACTRKDGWLRTGDIAYFDLDGYLYIVGRLKDTIKYKGFQIAPGDLEEVLIHHPEILDVAVTSAEDEEAGEIPVAFVVRRSGSNLSCKQVMEYVAKQVAPYKRVRKVVFVEAIPKSPAGKVLRRLLRNSHDTAAAATSSCSISSKL

SEQ ID NO: 188584 - protein, 877 aa, Oryza sativa
  Clone ID: PAT_MRT4530_85174C.1.pep
MAGGNPHDFFSQSFNEAPTGHMDGFSQGSSGYGGSGTGFHFGGGGSGGLDLNSQADASYQQILEPCSLVLPPIRAGSRSTVPPSRPPPAAGGGRGRSRGGRGGGRGRGRSLTNGAGSSRGMRGFVPPGSSSGQGGVRGHGASMSHSGPPAFNFGVFGGGRRAGASSSQGTNVFEDDGNEEDEEDFGPDGQHMNTYDKANWTEEKTYTLCEIACEEIRDGHCPNGAWTTRGYQNLKAKYFQRANLRHSTKQIKNRFTHLKNYYMAWVWLNQQTGAGRSASGEIIASNAWWEKKLRYAVVKNLASLHDFRVFCDIDLVSIQEKGDAKKFRHGNPEYLDFLIEIFQGVAVDGSTAYIPGFEDEDEEEGEEEAGDAGEAARGERAVADGYENSPMSTNSRKRGSSSCDVSTASSPGKKSKSPVVKLMKGLLNSFNSDCDKSNTLITELVNSKKLKEQKKEEIAESLTTDGEGSGDEDISDEDSSDDEIDLIIYILKKREMDRRRACMLATMIGTYYLERYSNKAPRRVAPESGHDWVMRTLANRTACYNMFRMHRPVFERLHSVLVESYQLKSTNNMDSMECLGLFLWIVGAPQSVRQAQDRFVRSLQTVHSKFNAVLTALLKLAQDIIRPKDPLFTTVHKKLLSPQYTPYLDNCIGAIDGTHIQVVVPNSAAVQHRNRHQEKSQNVMCVCDFDMRFTFVLAGWPGSVHDMRVFNDAQTRFSAKFPKPPLGKFYLVDSGYPNRPGYLAPYKGITYHFHEYNESTLPRGRREHFNYCHSSCRNVIERSFGVLKNKWRILFSLPSYSQEKQSRIIHACIALHNFIRDSQMADTEFDNCDHDENYDPLGGTSSPSSEPTNELDSRVMNQFRDWIADGLWYLKGM

SEQ ID NO: 188585 - protein, 1793 aa, Oryza sativa
  unsure (1)..(1793): unsure at all Xaa locations
  Clone ID: PAT_MRT4530_85175C.1.pep
MSWHRAGVLLLGXSVLPARPGCSGRRXGVGSVLLSMARMGWKLCHVFRLYTVVMAGSVTRRGLDMTGFVLELRGMCVVLGYPHGVDYQARPLPEQEGDDAEPHAAWEVTAVILAGSPERTSLTVTAGGDSFPAACQSAALLAIGTLHQRYPDELQHSPYRYHPRRGGARDHATFRDASSEDDATIVHLARMVEAYDAARIDFHQMVRRGMVENNLKILELRQENLQLKKDLDAVEAQLHQLKIAQGEVCRPKRRRVCRSLKITARKSTSRPELVRQSLAWTCFVETPRAEPAPVVPQEGEASGIGSTEDALLLTFRPGPSQRRNANTGDGNQPEGSNHNHQGNPPPPPPPPPPPPPDTNAILTQILAQQANMMTAFLHHLQNPPQLNAPPPPPQHSKLAEFLRIRPPTFSSSNNPVDALDWLHAVGKKLDTVQCSDEEKVIFTAHQLQGPASLWWDHFQATQPEGQPITWARFTAAFRRTHVPAGVVALKKREFRELKQGNRSVMEYLHEFNNLARYAPEDVREDEEKQEKFLAGMDPELSVRLVSGDYPDFQRLVDKSIRLEAKHKELESHKRRLANFRNQQGANQRVRYTNPYPGGSSSQQQQPRSAPRPQFVPGQGRRDAQGPQRLCFNCFEPGHFADKCPKPRRQQGQAPPRPNNGGKDVVRGRVNHVTAEDVLTTPDVIVGTFPIHSIPATILFDSGASHSFISVPFVGRNQLGVERLRNPLLITTPGGVMTAKYYSPAVPIEIQGIPFPSDLILLDTKNLDVILGMNWLAQFQGVVDCARRTVTLYRGPERPVVFFAPPTSVRSSELHQIELSEIPIVREFGDVFPEELPGMPPKREIEFRIDLAPGTAPLYKRPYRMAANELAEVKKQLEELKEKGYIRPSTSPWGAPVIFVEKKDKTMRMCVDYRALNEVTIKNKYPLPRIDDLFDQLKGATVFSKIDLRSGYHQLRIREEDIPKTAFTTRYGLYEFTVMSFGLTNAPAFFMNLMNKVFMEYLDKFVVVFIDDILIYSQSEEDHQHHLRLVLGKLREHQLYAKLSKCEFWLSEVKFLGHVISAKGVAVDPETVTAVTDWKQPKTVTQVRSFLGLAGYYRRFIENFSKIARPMTQLLKKEEKFMWSPQCEKAFQTLKEKLVSSPVLILPDTRKDFMVYCDASRQGLGCVLMQDGHVVAYASRQLRPHEGNYPTHDLELAAVVHALKIWRHYLIGNHCEIYTDHKSLKYIFTQSDLNLRQRRWLELIKDYDVGIHYHPGKANVVADALSRKSHCNTLNVRGIPPELNQQMEALNLSIVSRGFLAALEAKPTLLDQIREAQKNDPDMHGLLKNMKQGKAAGFTEDEHGTLWNGNRVCVPDVRELKQLILQEAHESRYSIHPGSTKMYLDLKEKYWWVSMKREIAEFVALCDVCQRVKAEHQRPAGLLQPLQVPEWKWDEIGMDFITGLPKTQGGYDSIWVVVDRLTKVARFIPVKTTYGGNKLAELYFARIVSLHGVPKKIVSDRGSQFTSHFWKKLQEELGTRLNFSTAYHPQTDGQTERLNQILEDMLRACVLDFGKTWDKSLPYAEFSYNNSYQASIQMAPYEALYGRKCRTPLMWDQVGESQVFGTDILREAEAKVRTIRDNLKVAQSRQKSYADNRRRDLEFAVDDFVYLRVTPLRGVHRFRTKGKLAPRYVGPFRIVARRGEVAYQLELPASLGNVHDVFHVSQLKKCLRVPSEQADSEQIEVREDLTYVERPVKILDTMERRTRNRVIRFCKVQWSNHAEEEATWEREDELKAAHPDLFASSSESRGRDSV

SEQ ID NO: 188586 - protein, 184 aa, Oryza sativa
  Clone ID: PAT_MRT4530_85176C.1.pep
MGFWEAFLNWLRSLFFKQEMELSLIGLQNAGKTSLVNVIATGGFSEDMIPTVGFNMRKVTKGNVTIKLWDLGGQPRFRSMWERYCRAVSAIVYVVDAADRENMAIAKSELHDLLSKPSLTGIPLLVIGNKIDKPEAFPKQSFTDVMGLKTITDREVACFMISCKNSTNIDSVIDWLVKHSKKKN

SEQ ID NO: 188587 - protein, 886 aa, Oryza sativa
  Clone ID: PAT_MRT4530_85177C.1.pep
MAGGNPHDFFSQSFNEAPTGHMDGSDYGFSQGSSGYGGSGTGFHFGGGGSGGLDLNSQADASYQQILEPGSLVLPPIRAGSRSTVPPSRPPPAAGGGRGRSRGGRGGGRGRGRSLTNGAGSGRGMRGFVPPGSSSGQGGVRGHGASMSHSGPPAFNFGVFGGGRRAGASSSQGTNVSEDDGNEEDEEDFGPDGQHMNTYDKANWTEEKTYTLCEIACEEIRDGHCPNGAWTTRGYQNLKAKYFQRANLRHSTKQIKNRFTHLKNYYIAWVWLNQQTGAGRSASGEIIASNAWWEKNIKEKGDAKKFRHGNPEYLDFLIEIFQGVAVDGSTAYIPGFEDEDEEEGEEEAGDAGEAARGERAVGDGYENSPMSTNSRKRGSSSCDVSTASSPGKKSKSPVVKLMKGLLNSFNSDCDKSNTLITELVNSKKLKEQKKEEIAESLTNCQRLAVECGAAEDSVEYFCATQLFASKHNRDGEGSGDEDISDEYSSDDEIDLIIYILKKREMDRRRACMLATMIGTYYLELYSNKAPRRVAPESGHDWVMRTLANRTACYNMFRMHRPVFERLHSVLVESYELKSTNNMDSMECLGLFLWIVGAPQSVRQAQDRFVRSLQTVHSKFKAVLTALLKLAQDIIRPKDPLFTTVHKKLISPQYTPYLDNCIGAIDGTHIQVVVPNSAAVQHRNRHKEKSQNVMCVCDFDMRFTFVLAGWPGSVHDMRVFNDAHTRFSAKFPKPPPGKFYLVDSGYPNRPGYLAPYKGITYHFQEYNESTLPRGKREHFNYCHSSCRNVIERSFGVLKNKWRILFSLPSYSQEKQSRIIHACIALHNFIRDSQMADTEFDNCDHDENYDPLGGTSSPSSEPTNELDSRVMNQFRDWIADGLWYLKGM

SEQ ID NO: 188588 - protein, 2355 aa, Oryza sativa
  Clone ID: PAT_MRT4530_85178C.1.pep
MDEVGGRWTFSRANEGYTSCGPMAGSVTRRGLDMTGFVLELRGMCVVLEYPHGVDYQARPLPEQEGEDAEPHAGWEVTAVILSGSPERTSLAVTAGGDSFPAACQNAALLAIGTLHQRYPDELQHSSYRYHPRRGGARDFATFRDASSEDDATVVHLARMVEAYDAARIDFHQMVRRGMVENNMKILELRQENLQLKKDLDALEAQLHQLKIAQGEISRPKRRRVCRSQKITARKSTSRPELVRQSLAWTCFVETPRAEPAPVVPQEGEASGVGSSEGALLLTFRPGPSQRRNVNTGEGNQPEGSNPNPQGNPPPPPPPDTNAILTQILAQQANMMNAFLHHLQNPPQQNAPPPPPQHSKLAEFLRIRPPTFSSSNNPVDALDWLHAVGKKLDTVQCSDEEKVIFAAHQLQGPASIWWDHFQATQPAGQPITWARFTSAFRRTHYLHEFNNLARYAPEDVREDEEKQEKFLAGMDPELSVRLVSGDYPDFQRLVDKSIRLEAKHKELESHKRRLANFRNQQGANQRVRYTNPYPGGSSSQQQQQQQQPRSAPRPQFVVRVPQPQQQQNQQGTRAPRPPTPAVQPVQGRRDAQGQQRLCFNCFEPGHFADKCPKPRRQQGQAPPRSNNGGKDVIRGRVNHVTAEDVLTTPDVIVGTFLVQSIPATILFDSGASHSFISVPFVGRNQLGVERLRNPLLITTPGGVMTAKYYSPAVPIEIQGIPFPSDLILLDTKNLDVILGMNWLAQFQGVVDCARRTVTLYRGPEQPVVFFAPPTSVRSSELHQIELSEIPIVREFGDVFPEELPGMPPKREIEFRIDLAPGTTPLYKRPYRMAANELAEVKKQLEELKEKGYIRPSTSPWGAPVIFVEKKDKTKRMCVDYRALNEVTIKNKYPLPRIDDLFDQLKGATVFSKIDLRSGYHQLRIREEDIPKTAFTTRYGLYEFTVMSFGLTNAPAFFMNLMNKVFMEYLDKFVVVFIDDILIYSQSEEDHQHHLRLVLGKLREHQLYAKLSKCEFWLSEVKFLGHVISAKGVAVDPETVTAVTDWKQPKTVTQIRSFLGLAGYYRRFIENFSKIARPMTQLLKKEEKFVWSPQCEKAFQTLKEKLVSSPVLILPDTRKDFMVYCDASRQGLGCVLMQDGHVVAYASRQLRPHEGNYPTHDLELAAVVHALKIWRHYLIGNRCEIYTDHKSLKYIFTQSDLNLRQRRWLELIKDYDVGIHYHPGKANVVADALSRKSHCNTLNVRGIPPELSQQMEALNLSIVGRGFLAALEAKPTLLDQIREAQKNDPDMHGLLKNMKQGKAAGFTEDEHGTLWNGKRVCVPDSRELKQLILQEAHESPYSIHPGSTKMYLDLKEKYWWVSMKREIAEFVALCDVCQRVKAEHQRPAGLLQPLQVPEWKWDEIGMDFITGLPKTQGGYDSIWVIVDRLTKVARFIPVKTTYGGNKLAELYFARIVSLHGVPKKIVSDRGSQFTSHFWKKLQEELGTRLNFSTAYHPQTDGQTERLNQILEDMLRACVLDFGKTWDKSLPYAEFSYNNSYQASIQMAPYEALYGRKCRTPLLWDQVGESQVFGTDILREAEAKVRIIRDNLKVAQSRQKSYADNRRRDLEFAVDDFVYLRVTPLRGVHRFQTKGKLAPRYVGPFRIIARRGEVAYQLELPASLGNVHDVFHVSQLKKCLRVPSEQADSEQIEVREDLTYVEKPVKILDTMERRTRNRVIRFCKVQWSNHAEEEATWEREDELKAAHPDLVEVEAVDWENEQGKTHHLDHIESQTSWDPGSGCQFGLNHHRPWVKAAARAEEAAKEEAARARQAEATAAAGASTGPTPSGNPQATASGEARDVAAGTSPGPTSPGDAQDQTGPGDIPEPSTSSGGPSRIAFSPRRLFSSSSVAPLSAEPILQALAAANTAVLDGFSAQVEALRAERAELEAAWARVEEGRRSVDAMVEVGRKAHRRHISELEARKAALAEIAREVEEEREAALIATTAMIEAQDTLRLQHASWEAELKKKLDAAQGVLDSAAARERRVTETEAASRRREEALEARAMALEEHAGAVERGLTDREAAAVLREATLAAHEAACAEEECALRLREDALAERERALEEAEATTKRLADSLSLREAAQEEQARRNLECVRAERAALEQRAADLEAREKELDARARVGGAAAGESDLAARLAAAEHTVADMQRALDSSIGEAEALRLAGEMGPDMLWDSVSRMDRAGRQAGLWKGQTRMRPANLEGLAPHLNRMAWVLEQLPEELEKTIKSSSRDLARGAVELVLASYQARDPNFSPWMALEEFPPGTEDDARARVRDAADHIVNGFEGSAPRLAFAPSSDEEGDASGEDDGGDEAGDPGASE

SEQ ID NO: 188589 - protein, 263 aa, Oryza sativa
  Clone ID: PAT_MRT4530_85179C.1.pep
MDASRVGELRTFVEACKKDPSLLADPNLAFFRDYLESLGAHLPAAAFTKATPKPKPSSMDDIDDEYDDDDDDDLNMRDATPEPDELDQDIVESDLELEGDIVESDHQDPPQKMGDPSIDVTEENRDASQEAKSKAMEAMSEGKLEEAIDHLTKAILLNPLSAIMYGTRASVFIKMKKPVAAIRDANAALEINPDSAKGYKTRGMAYAMLGKWEEAAHDLHTASNMDYDDEINAVLKKVEPNAHKIMEHRRKYERLRKEREEKR

SEQ ID NO: 188590 - protein, 192 aa, Oryza sativa
  Clone ID: PAT_MRT4530_8517C.1.pep
MALLRALRRALPPLSSAAAGVLLRGATRHAAPLPLRPPPLLRLLDPIGLRPFSAAAATASQAPSMGAGLFSGLMDTRFPKRRPGFKSRRKRASLRPKGPYYWVKCKPGEPIPANQPNEGSVQGRKEKKRIKQRKAFIMAEKKKRKAQYSAAVKRKEAERTERKMAAVARERAWTERLADLKRIEEEMKPATA

SEQ ID NO: 188591 - protein, 87 aa, Oryza sativa
  Clone ID: PAT_MRT4530_85180C.1.pep
MVKWAAWHGPAQARPCLGQGLSGWHGPTDTPGRAVPVHGRHLRPKHGPILLGPCRVGPKARWPIVLPHRKSIFLVPQLFSPRKCFYS

SEQ ID NO: 188592 - protein, 39 aa, Oryza sativa
  Clone ID: PAT_MRT4530_85181C.1.pep
LHLWPCKVHALELLHRWFIESLALHISRVCIVRNIWPKR

SEQ ID NO: 188593 - protein, 125 aa, Oryza sativa
  Clone ID: PAT_MRT4530_85182C.1.pep
MEIKLSDRQLYLLIRIFHVISLEICLSKILTQRLMVSQSLLEITVMSGKDIFCNLRFSSSCLDLILVFMFNAASYLNIEWNRSTSRYMLDLSDREDDYLDFELLRMIFGTSLEEAWIGNVGEQQD

SEQ ID NO: 188594 - protein, 94 aa, Oryza sativa
  Clone ID: PAT_MRT4530_85183C.1.pep
MGFVMEFAENLILRMMEDPGKRDAAQREHVYRMKERCERTKAAWSLPLRPYGFWTFDRFNSQLSWDPQISHAPGRRDPYDDVLHRHSNPPPSSS

SEQ ID NO: 188595 - protein, 106 aa, Oryza sativa
  Clone ID: PAT_MRT4530_85184C.1.pep
LVFEKKPGQSWQKRERARKHLEGVFQGHIGSSIIEAPKIYDALRTMNNICTHYATVHMGQMRPKPGLKAQLSTVASKAAPSSAGSSPGLRSTLPSVGLSCFQRFIA

SEQ ID NO: 188596 - protein, 1688 aa, Oryza sativa
  Clone ID: PAT_MRT4530_85185C.1.pep
MAARRLTSRVAVVDEDRCKPNKCGQECRRSCPVVKIDLTFRVVGSIALISEELCIGCGICVKKCPFGAITIINLPKELDKDTTHRFGQNSFKLHRLPVPIPGQVLGLVGINGIGKSTALNILAGQIKPNLGRYDKIRGGGSLLSDKRSVSLHFLGDGILGPYPCAGIASCSSISTVTPIASQPWILDSGASFHMSFDDSWLTSCRLVKNGATVHTANGTLCKVTHQGSISSPQFTVPNVSLVPKLSMNLISVGQLTDTNCFVGFDDTSCFVQDRHTGAVIGTGHRQKRSCGLYILDSLSLPSSSTNTPSVYSPMCSTACKSFPQWHHRLGHLCGSRLATLINQGVLGSVPVDTTFVCKGCKLGKQVQLPYPSSTSRSSRPFDLVHSDVWGKSPFPSKGGHNYYVIFVDDYSRYTWIYFMKHRSQLISIYQSFAQMIHTQFSSAIRIFRSDSGGEYMSNAFREFLVSQGTLPQLSCPGAHAQNGVAERKHRHIIETARTLLIASFVPAHFWAEAISTAVYLINMQPSSSLQGRSPGEVLFGSPPRYDHLRVFGCTCYVLLAPRERTKLTAQSVECVFLGYSLEHKGYRCYDPSARRIRISRDVTFDENKPFFYSSTNQPSSPENSISFLYLPPIPSPESLPSSPITPSPSPIPPSVPSPTYVPPPPPSPSPSPVSPPPSHIPASSSPPHVPSTITLDTFPFHYSRRPKIPNESQPSQPTLEDPTCSVDDSSPAPRYNLRARDALRAPNRDDFVVGVVFEPSTYQEAIVLPHWKLAMSEELAALERTNTWDVVPLPSHAVPITCKWVYKVKTKSDGQVERYKARLVARGFQQAHGRDYDETFAPVAHMTTVRTLIAVAATRSWTISQMDVKNAFLHGDLHEEVYMHPPPGVEAPPGHVFRLRRALYGLKQAPRAWFARFSSVVLAAGFSPSDHDPALFIHTSSRGRTLLLLYVDDMLITGDDLEYIAFVKGKLSEQFMMSDLGPLSYFLGIEVTSTVDGYYLSQHRYIEDLLAQSGLTDSRTTTTPMELHVRLRSTDGTPLDDPSRYRHLVGSLVYLTVTRPDIAYAVHILSQFVSAPISVHYGHLLRVLRYLRGTTTQCLFYAASSPLQLRAFSDSTWASDPIDRRSVTGYCIFLGTSLLTWKSKKQTAVSRSSTEAELRALATTTSEIVWLRWLLADFGVSCDVPTPLLCDNTGAIQIANDPIKHELTKHIGVDASFTRSHCQQSTIALHYVPSELQVADFFTKAQTREHHRLHLLKLNVDPPDWHEILAYFHGSELQNYFKRMVEDNLKPIMKPQVEIMHKNRNSFQVSVGQLLDRKDERGMKDQLCNGLQLNEVIDRKVAKLSGGELQRVGIAAAALQSADVYMFDEPSSYLDVKQRLNAARVIKSLLRTNSFKKFTIICLPNFVFSYVIVIADAQEDAEIKTYQRYKYPTMSKTIGNFKLTVMEGEFTDSQIFVMLGENGTGKTTFIKMLAGVEKPDTVDGIDIEVPEFCVSYKPQKLASTYQGTVRQFLHEKIRDSYTHPQFVSDVMKPLKMQQLMDQEVQHLSCGQLQRVALCICLGKPADIYLIDEPSASLDSEQRLVASKVIKRFIMHAKKTAFIVEHDFIMATYLADRVIVYEGQPAVDCTANAPQSLLSGMNKFLSLREQERVRKMGRSGTGRKPCLDHFMEQVFRLKELQNDQRSPAF

SEQ ID NO: 188597 - protein, 64 aa, Oryza sativa
  Clone ID: PAT_MRT4530_85186C.1.pep
LIFPYLHKGGAQGPLAFWQIFLASNTGVQANMCARCFLGFKNEKKEGFRVMLAHFVLGEQPTVT

SEQ ID NO: 188598 - protein, 142 aa, Oryza sativa
  Clone ID: PAT_MRT4530_85187C.1.pep
MTRNKPVSACSASPSSPLGAPAAAAPPPLPRPCSAHRGRRRHHRSGLALICIAMEQLRLCDCLPPPRHVSLSASLPAPRGRPRSATAGPALLLLRAAAANPASIRTASALFLGIMCIGGTTAVVAGIATVVIPGLYPHQHDE

SEQ ID NO: 188599 - protein, 125 aa, Oryza sativa
  Clone ID: PAT_MRT4530_85188C.1.pep
MRRQGAVLSGPDPPYPHRDSYSYKPLTRGPWIAWPHLSWRRQLDGGWGYLFPHRVVPTGAQKYLHADADALTLARRTRGGSGPSVAGSAEAQPSDGAGRIIVLSGPPTKIDFRKRYLRMSACKKF

SEQ ID NO: 188600 - protein, 62 aa, Oryza sativa
  Clone ID: PAT_MRT4530_85189C.1.pep
HWRSTRASTLCYMQGTVLSIMPLSLADDYYHCPSDLHAVRDMLSITKIRHTWLTKLLVPGDS

SEQ ID NO: 188601 - protein, 2035 aa, Oryza sativa
  Clone ID: PAT_MRT4530_8518C.1.pep
MDYDDSDFQSQNFQLAGEDNNKFPAGLRQFPLPKLDIDDQLQSHLRFDNLIDSEGLFSGQGHGNSWIEVLSTGSSVVDFSSSAAESCSINRTNNVWSEATSTESVEMLLKSVGENEMTGNMDENAHHQISGMDSKTDPSNMPSKTSDSPTGNIIVPAENDKSQSTRSEMAEDPSRIQPQLEHIRPFSVDDKAEQAVGSTLSDRKSNYTLESVSERCIVSGRSSSPKKTSESCPDVGSYFEVVHDDDSLDNLNIQSDGVGSRKLNNEPFSDLAPLQNIYTTSSYHFEQDNQESGVGVTTQGSEICHTNENKDGLHDLQNLSCTSQHLGSSNLTSEVSNETLLSGSSDGLLEAITNPVKMLHRSDDTSKRASATLQSSFLQVEHASEGTKGSIDRSSEPAMKKFGASEEPNSAKSQGEPDLKNSSPHLVIPLPTISGEFIQSPKGKQLAHVAGVSEETTYRPVDDTNHSTSDDSKLAMLEQLQDSVDNLSSGVMEEKTIRGQISAVSGNVVHVVKSGHCEKVAVSTSTTDDKFESPGDIVPDNSSACLPDEKDPSITVNHEVSFKEGVVPALEDDPEKMSSMNHEEPLKEDDKSTLEVGEHNTTSPVSEPLLMGSTGSVNPNIDTICSSGTDAVAETPQCEEQATSSGSLTTNATQDKLGDHPDACPPKVLTTGPLMQPEDHEDLVAPSSVLGASSEKGEQNNGKVPLNGMDDSGVQLQDKVLSHGGDRTLVTVSSENKNGLEHGTGEGSCTDATCGSPTVISCNESCPEEDGQGSNALLHHKQTEPPKDPKDHTASTNNSHVSKEGSSRNVKPTLTSEETHTAEDKSFSFEVGAPLNITEKAHAPAWSPLPRPEVAQSPEVTTGIPKPGNPSNHGSDESKNLAIVETSKEQLSGRKVVGSAEGSSVSSHIGHITKAKSTPLEQEQQHPTPDVNALGHQPFTDLQHVQLRAQIFVYGALIQGMPPAESYMVSAFGEPACGRKPPWGTLLQAALERYNSQRSSLTGLETPTSSHIGSRVTEKASRSTAVKTAPASKKGGKTVLPAHTAVPLHLPTLNMSPLGSSALSLPRGTHLDFGQAVSPVFPYSSQTRQPTSGVASWFPQSPGGRAAPWLVQPQNLIFDSSMKPPVPASANETAKGASSKNISISQAVSPVAFPPNQAPSTISPLAVIPEEKQKASVSTSKRGATPQKSRKRKKAPASPEQPIIAPLLKTDIASVTPATQHTPGFTLSTHSPSNILASGLVSNTGLVTPVPNYQITGIKDAEQRIFSEQISGAIEQSMGQAKGAGVHAMDAVRHAEGIWSHLSTNSKGKLPAEVEEKLTSAAAAASAAVSVAKAAAEAAKMASEAALQAKMMAEEVLSSTYANSSQKHDAGEFKVSNNLASFSSLTPTSSWKTKDDISKGSIISVAREVARKRVEEAAAAAKRAENLDAILKAAELAAEAVFKAGTIIGMGEPLPFTLSELLEAGPDGYWKSDQVRNKKATKLELPTDFSKSGRKRGGKAKHDHAIQNLEPSSSGKGLQLDVVHSGNVAEDVPTIAPVNGNRNDAAPNIIWNGIEKGSAVEVLVHKGESGVAWFSAKVLDINNDSACISYDSHTEETGLRKEWVPLRQEGEKAPQIRLAHPATVSRFKGTRKRRRDTSGNYSWAIGDHVDVLIEDSWREGIISRNRDGDETKLTVQFSGTSDSLVVDAWNLRPSLVWNDGQWIEWSRGKTVDCNKGDSPHEKRQRTKGNDHVPIGGAAAGPSMDTSTNAAAKPEEPKPLALSDRDMVFNIGKRVVESKTDGVAFKRPGLRKEGSRVVGVPKPGKKKKFMEVSKHYDADQADKISEGNASTRPVKHLVPNVPRPREGTSKVDQKGKRIGEMRSRVPKSTKSQDGATNIIPGKGPLSMSAPSTGVFESSHTFIGSTIGSSNNMNLSVEKNSSVHGVGLRSEDSSVSEPHIQAASAAPTSRKNLTTTDRAKRKLVPSMDNSNRTTNKTSEIPGKSADSTEPRRSNRRIQPTSRLLEGLQSSLIVSKVPGEKGPRTNYRSASSRGRNLG

SEQ ID NO: 188602 - protein, 54 aa, Oryza sativa
  unsure (1)..(54): unsure at all Xaa locations
  Clone ID: PAT_MRT4530_85190C.1.pep
KSCNMVDYKKVAAILEKXPYSSESYXSTFGPRRATQNTKNKFLDTLIKRLREAS

SEQ ID NO: 188603 - protein, 67 aa, Oryza sativa
  Clone ID: PAT_MRT4530_85191C.1.pep
MPSSLDREKGGTYMTRTKSNRPRRMRTKSNQPRRTRTKSNRPQSHISDLYVVTGVIPDTDEGCHPIE

SEQ ID NO: 188604 - protein, 98 aa, Oryza sativa
  Clone ID: PAT_MRT4530_85192C.1.pep
MDIPQVAQFLSRNIRTRMRVKNMMRLICSKCATSARKRMATPEQPKSVLQVVASVLERNHKKSVFLRNVGMHTKRSRMSAELKAEKRENAKLRLIVSI

SEQ ID NO: 188605 - protein, 122 aa, Oryza sativa
  Clone ID: PAT_MRT4530_85193C.1.pep
ERFWSYVVVQSTILLSTNRWGPPIRSLSSLSPLSNLSLARTDADDEDEACAGSAAPSRRRSHAAPLLPQPRRHPAAICPPRAAFATSRHHLAHPELPPYPALACRHLLLSSAPQAASATARH

SEQ ID NO: 188606 - protein, 80 aa, Oryza sativa
  unsure (1)..(80): unsure at all Xaa locations
  Clone ID: PAT_MRT4530_85194C.1.pep
LANNKTVTIQPSGVKDAAVVLSTTKTKKQNAPAKLYHXSVMRKEFRKMAKAVKNQIFKWNILILKTPVLAAVDTTFSENS

SEQ ID NO: 188607 - protein, 111 aa, Oryza sativa
  Clone ID: PAT_MRT4530_85195C.1.pep
MAPRTPAPWLALGTWQERKEHEPRERPRKEHEHSAGELGCRSTQCRQFKIRAVKVKEDLESFVPGVSVPRRGCLEIREEGGEVFISLLNMPRPFTAMKKLDMDEVIKDIAK

SEQ ID NO: 188608 - protein, 318 aa, Oryza sativa
  Clone ID: PAT_MRT4530_85196C.1.pep
MNMDELLRSIWTAEESQAMASASAAAAAAEGGLHKQGSLTLPRTLSVKTVDEVWRDLQREASPGAAAADGGGGGGEHHQPRRQPTLGEMTLEEFLVRAGVVRENTAAAAAMVAAAAAPPVAPRSIPAVNNSSIFFGNYGGVNDAAAAAAGAMGFSPVGIGDPTMGNRLMSGVAGIGGGAITVAPVDTSVGQMDSAGKGDGDLSSPMAPVPYPFEGVIRGRRSGGNVEKVVERRQRRMIKNRESAARSRARKQAYTMELEAEVQKLKEQNMELQKKQEEIMEMQKNFFPEMQKNQVLEAVNNPYGQKKRCLRRTLTGPW

SEQ ID NO: 188609 - protein, 77 aa, Oryza sativa
  Clone ID: PAT_MRT4530_85197C.1.pep
RAAGIRQRLLRAPLTLSSFLDAAAAPDLLFPSRRRLPSNPVNYRLSKRGKRRDLFWTFEAYGRQGKKVYIIHIMRVL

SEQ ID NO: 188610 - protein, 612 aa, Oryza sativa
  Clone ID: PAT_MRT4530_85198C.1.pep
MDLKDGGGSERRGAAAGAGAGAAPLARQGSIYSLTFDEFQSTLGGMGGGLGKDFGSMNMDELLRSIWTAEESQAMASASAAAAAAEGGLQRQGSLTLPRTLSVKTVDEVWRDLEREASPGAAAADGGGGGGEQQQPRRQPTLGEMTLEEFLVRAGVVRENTAAAAAMVAAAAAPPVAPRSIPAVNNSSIFFGNYGGVNDAAAAAAGAMGFSPVGIGDPTMGNRLMSGVAGIGGGAITVAPVDTSVGQMDSAGKGDGDLSSPMAPVPYPFEGVIRGRRSGGNVEKVVERRQRRMIKNRESAARSRARKQAYTMELEAEVQKLKEQNMELQKKQEEIMEMQKNFFPEMQKNQKLFSVGRDGVHYSATKCTKYTISTEKVMITLIHGKQVLEAVNNPYGQKKRCLRRTLTGPCFWFDSEGCIMSEEFMPKMINMGSHLTRKNKPDQSDTTVEFHPRPDVLLQGAGEGLVFLLGGQVNCIGLQDSTESRPENDTVLVQIQGPATVSSGSVTVQAGPNCRAKEEPIRDTNHWRQHPGVPYAPGHGEPTPSLLGLRDTQHCPFHGQFQKQFFPPRSSSGNQRRPMADLSPDWGRFGLDWDCGVTSARTFGNDRDGTAF

SEQ ID NO: 188611 - protein, 1475 aa, Oryza sativa
  Clone ID: PAT_MRT4530_85199C.1.pep
MMVTTRRSANTGDGNQPEGSNHNNHGSPPPPPPPPPPPPRDTNAIPTQILAQQANMMAAFLHIQNPPQYNAPPPPPQLSKLAEFLRIRPPTFSSSNNPVDALDWLHAVGKKLDTVQCNDEEKVIFAAHQLQGPVSLWWDHFQATQPEGQPITWARFTAAFRRTHVPAGVMALKKREFRELKQGNRSVMEYLHEFNNLARYAPEDVREDEEKQEKFLAGMDPELSVRLVSGDYPDFQRLVDKSIRLEAKHKELESHKRRLANFRNQQGPNQRVRYTNPYPGGSSSQQQQQQQPRSAPRPQFVVRVPQPQQQQSQQGTRAPHPPTPAVQPGQGRKDVQGQQRLCFNFFEHGHFADKCPKPRRQQGQAPPRPNNGGKDVIRGRVNHVTAEDVLTTPDVIVGTFLIHSIPATILFDSGASHSFISVPFVGRNQLGVERLRNPLLITTPGGVMTAKYYSPAVPIEIQGIPFPSDLILLDTKNLDVILGMNWLAQFQGVVDCARRTVTRYRGPEQPVVFFAPPTSVGSSELHQIGLSEIPIVREFGDVFPEELPGMTPKREIEFRIDLAPGTTPLYKRPYRMASNELAEVKKQLEELKEKGALNEVTIKNKYPLPWIDDLFDQLKGATVFSNIDLRSGYHQLRIREEDIPKTAFTTRYGLYEFTVMSFGLTNAPAFFMNLMNKVFMEYLDKFVVVFIDDILVYSQSEEDHQHHLRLVLGKLREHQLYAKLSKCEFWFSEVKFLGHVISAKGVAVDPETVTAVTDWKQPKTVTQIRSFLGLAGYYRRFIENFSKIARPMTQLLKKEEKFVWSPQCEKAFQTLKEKLVSSPVLILPNTRKDFLVYCDASRQGLGCVLMQEGHVVAYASRQLRPHEGNYPTHDLELAAVVHALKIWRHYLIGNRCEIYTDHKSFKYIFTQSDLNLRQRRWLELIKDYDVGIHYHPGKANVVADALSRKSHCNTLDVRGIPPELNQQMEALNLSIVSRGFLATLEAKPTLLDQICEAQKNDPDMRGLLKNMKQGKAAGFTEDEHGTLWNGNRVCLLDDRELKQLILQEAHESPYSIHPGSTKMYLDLKEKYWWVSMKREIAEFVALCDVCQRVKAEHQRPAGLLQPLQVPEWKWDEIGMDFITGLPKTQGGYDSIWVIVDRLTKVARFIPVKTTYGGNKLAELYFARIVSLHGVPKKIVSDRGSQFTSHFWKKLQEELGTRLNFSTAYHPQTDGQTERLNQILEDVLRACVLDFGKTWDKSLPYAEFSYNNSYQASIQMAPYEALYGRKCRTPLLWDQVGESQVFGTDILTEAEAKVRTIQDNLKVAQSRQKSYADNRRRNLEFAVDDFVYLRVTPLRGVHRFQTKGKLAPWFVGPFRIIARRGEVAYQLELPASLGNVHDVFHVSQLKKCLRVPSEQADSEQIEVREDLTYVERPVKILDTMERRTRNQVIRFCKVQWSNHAEEEATWEREDEMKAAHPDLFASSSESRGRDSV

SEQ ID NO: 188612 - protein, 34 aa, Oryza sativa
  unsure (1)..(34): unsure at all Xaa locations
  Clone ID: PAT_MRT4530_8519C.1.pep
FSSCQLLSVICLMMVRFPVTXSXSVVCQMQXIHD

SEQ ID NO: 188613 - protein, 42 aa, Oryza sativa
  Clone ID: PAT_MRT4530_851C.1.pep
LPQYIPILVYQSSSNTYITVSVQSFEKAFSISDFQRREKNKA

SEQ ID NO: 188614 - protein, 1198 aa, Oryza sativa
  unsure (1)..(1198): unsure at all Xaa locations
  Clone ID: PAT_MRT4530_85200C.1.pep
MVTPMVTTRRNVNTGEGNQPEGSNPNHQGNPPPPPPPDTNAILTQILAQQANMMTAFLHHLQNPPQQNAPPPPPQHSKLAEFLRIRPPTFSSSNNPVDALDWLHAVGKKLDTVQCSDEEKVIFAAHQLQGPASLWWDHFQATQPAGQPITWAHFTAAFRRTHVPAGVVALKKREFRELKQGNRSVMEYLHEFNNLARYAPEDVREDEEKQEKFLAGMDPELSVRLVSGDYPDFQRLVDKSIRLEAKHKELESHKRRLANFRNQQGANQRVRYTXPTQGDPPRSSNNSSSNLAQRPDLNSWCASHSRSNSRISKGLVRPVLLRQLGSPFKAAGTLQVRSGCASTASSPDTLRINAQSQGVSKAKRLPAPTTAGRMSFXGRVNHVTAEDVLTTPDVIVELHQIGLSEIPIVREFGDVFREELPGMPPKREIEFRIDLAPGTTPLYKRPYRMAANELAEVKKQLEELKEKGYIRPSTSPWGAPVIFVEKKDKTKRMCVDYRALNEVTIKNKYPLPRIDDLFDQLKGATVFSKIDLRSGYHQLRIREEDIPKTAFTTRYGLYEFTVMSFGLTNAPAFFMNLMNKVFMEYLDKFVVVFIDDILIYSQSEEDHQHHLRLVLGKLRKHQLYAKLSKCEFWLSEVKFLGHVISAKGVAVDPETVTAVTDWKQPKTVTQIRSFLGLAGYYRRFIENFSKIARPMTQLLKKEEKFVWSPQCEKAFQTLKEKLVSSPVLILPDTRKDFMVYCDASRQGLGCVLMQDGHVVAYASRQLRPHEGNYPTHDLKLAAVVHALKIWRHYLIGNRCEIYTDHKSLKYIFTQSDLNLRQRRWLELIKDYDVGIHYHPGKANVVADALSRKSHCNTLNVRGIPPELNQQMEALNLSIVGRGFLAALEAKPTLLDQIREAQKNDPDMHGLLKNMKQGKAAGFTEDEHGTLWNGKRVCVPDSRELKQLILQEAHESPYSIHPGSTKMYLDLKENYWWVSMKREIAEFVALCDVCQRVKAEHQRPAGLLQPLQVPEWKWDEIGMDFITGLPKTQGGYDSIWVIVDRLTKVARFIPVKTTYGGNKLAELYFARITDGQTERLNQILEDMLRACVLDFGKTWDKSLPYAEFSYNNSYQASIQMAPYEALYGRKCRTPLLWDQVGESQVFGTDILREAEAKVRIIRDNLKVAQSRQKSYADNRRRDLEFAVDDFVYLRVTPLR

SEQ ID NO: 188615 - protein, 49 aa, Oryza sativa
  Clone ID: PAT_MRT4530_85201C.1.pep
MGGDWVEWRSKKEEREKSPGPTCSAGQTDPMQPVRPPRPRRSDRPYMGG

SEQ ID NO: 188616 - protein, 2309 aa, Oryza sativa
  unsure (1)..(2309): unsure at all Xaa locations
  Clone ID: PAT_MRT4530_85202C.1.pep
MKRVLVDGGASLSIISPAAFNALKAPGMKLQPSLPIIGVTPGHTWPLGHVELPITFGDSTNFRTERIDFDVADLNLPYNAVLGRPALVKFMAATHYAYLQMKIPGPSGPITVFGDVKVTLACAEQRADNLAVATEPQAPEASASHASKKRLTSADEESALVSFLRANSDVFEWKPSDMPGVPREVIEHRLAMRLDARPVRQKVRCQAPERQAFIREEVARLLEADFIREVIHPEWLANPVVVPKANGKLRMCIDYTDLNKACPKDPFPLPRIDQIVDSTAGFTLPKSSPAHQWSPRSPRRFPSPPAALSHSQPYLNAPRASLLRFRRPPLALPVGFELAPSSSLSAVAAELRFAAVVAPDLLPLRRRLLRLRRVLVDLVHSSVSPADRRSTIVLVDPSRAAASLRFGRRSRRRRQPGVSRGPPFRFPLPSPLSAAAPPCLWPPIYLNSRVITVLFSHAYLPLLRPYYCYCYYYLVHPRTNKTPTSEHSTHGTGFRLGSGCMVLIVAPRPYKDRSSGLCCKALPYFHMSSGANEGYTSCGPVVEMSWHRAGVLLLGAQSCLPVPGVPAVGGIGSMYTSDQSIIYSNSRALGYGQAEQCTQMAGSVTRRGLDMTGFVLELRGMCVVLGYPHGVDYQARPLPEQEGDDAEPHAAWEVTAVILAGSPERTSLTVTAGGDSFPAACQSAALLAIGTLHQRYPDELQHSPYRYHPRRGGARDHATFRDASSEDDATIVHLARMVEAYDAARIDFHQMVRRGMVENNLKILELRQENLQLKKDLDAVEAQLHQLKIAQGEICRPKRRRVCRSQKITARKSTSRPELVRXSLAWTCFVETPRAEPAPVVPQEGEASGVGSTEDALLLTFHXMTRRNANTGDGNQPEGSNHNHQGNPPPPPPPPPPPPPDTNAILTQILAQQANMMTAFLHHLQNPPQLNPPPPPPQHSKLAEFLRIRPPTFSSSNNPVDALDWLHAVGKKLDTVQCSDEEKVIFAAHQLHGPASLWWDHFQAMQPEGQPVTWARFTAAFRRTHVPAGVVALKKREFRELKQGNRSVMEYLHEFNNLARYTPEDVRKDEEKQEKFLAGMDPELSVRLVSGDYPDFQRLVDKSIRLEAKHKELESHKRRLANFRNQQGANQRVRYTNPYPGGSSSQQQQQQQQPRSAPRPQFVVRVPQPQQQQNQQGTRAPRPPTPTVQPGQGRRDASGPQRLCFNCFEPGHFADKCPKPRRQQGQAPPRPNNGGKDVSRGRVNHVTAEDVLTTPDVIVGTFLIHSIPATILFVSGASHSFISVPFVGRNQLGVQCLRNPLLIXTTRGGVMPAKYYSPAVPIEIQGIPFPSDLILLDTKILDVILGMNWLAQFQGVVDCARRTVTLYRGPEQPVVFFAPPTSVRSSELHQIGLSEIPIVREFGDVFPEELPGMPPKREIEFRIDLAPGTTPLYKRPYRMAANELAGVKKQLEELKEKGYIRPSTSPWGAPVIFVEKKDKTKRMCVDYRALNEVTIKNKYPLPRIDDLFDQLKGATVFSKIDLRSGYHQLRIREEDIPKTAFTTRYGLFEFTVMSFGLTNAPAFFMNLMNKVFMEYLDKFVVVFIDDILIYSQSEEDHQHHLRLVLGKLREHQLYAKLSKCEFWLSEVKFLGHVISAKGVAVDPETVTAVTDWKQPKTVTQVRSFLGLAGYYRRFIENFSKIARPMTQLLKKEEKFVWSPQCEKAFQTLKEKLVSSPVLILPDTRKDFMVYCDASRQGLGCVLMQDGHVVAYASRQLRPHEGNYPTHDLELAAVVHALKIWRHYLIGNRCEIYTDHKSLKYIFTQSDLNLRQRRWLELIKDYDVGIHYHPGKANVVADALSRKSHCNTLNVRGIPLELNQQMEALNLSIVGRGFLTTLEAKPTLLDQIREAQKNDPDMHGLLKNMKQGKAAGFTEDEHGTLWNGNRRVKAEHQRPAGLLQPLQVPEWKWDEIGMDFITGLPKTQGGYDSIWVVVDRLTKVARFIPVKTTYGGNKLAELYFARIVSLHGVPKKIVSDRGSQFTSHFWKKLQEELGTRLNFSTAYHPQTDGQTERLNQILEDMLRACVLDFGKTWDKSLPYAEFSYNNSYQASIQMAPYEALYGRKCRTPLLWDQVGESQVFGTDILREAEAKVRTIRDNLKVAQSQQKSYADNRRRDLEFAVDDFVYLRVTPLRGVHRFQTKGKLAPRYVGPFRIVARRGEVAYQLELPASLGNVHDVFHVSQLKKCLLVPSEQADSEQIEVREDLTYVERPVKILDTMERRTRNRVIRFCKVQWSNHAEEEATWEREDELKAAHPDLFDSSSESRGRDSV

SEQ ID NO: 188617 - protein, 1821 aa, Oryza sativa
  Clone ID: PAT_MRT4530_85203C.1.pep
MSWHRAGVLLLGAQFCLPVPGVPAVGRIGSVLLSMARMGWKLCHVFRLYTVVMAGSVTRRGLDMTGFVLELRGMCVALGYPHGVDYQARPLPEQEGDDAEPRAGWEVTAVILAGSSERTSLTVTAGGDSFPAACQSAALLAIGTLHQRYPDELQHSPYRYHPRRGGARDYATFRDASSEDDATIVHLARMVEAYDAARIDFHQMVRRGMVENNMKILELRQENLQLKKDLDAVEAQLHQLKIAQGEICRPKRRRVCRSQKITARKSTSRPELVRQSLAWTCFVETPRAEPAPVVPQEGEASGVGSTEVVWGMVMPMVTTRRNANTGDGNQPECSNHNHQGNPPPPPPPPPPPPPDTNAILTQILAQQANMMTAFLHHLQNPPQQNAPPPPPQHSKLAEFLRIRPPTFSSSNNPVDALDWLHAVGKKLGTVQCSDEEKVIFAAHQLQGPASLWWDHFQATQPEGQPITWARFTAAFRRTHVPAGVVALKKREFRELKQGNRSVMEYLHEFNNLARYAPEDVREDEEKQEKFLAGMDPELSVRLVSGDYPDFQRLVDKSIRLEAKHKELESHKRRLANFRNQQGANQRVRYTNPYPGGSSSQQQQQQQQPRSAPRPQFVVRVPQPQQQQNQQGTRAPRPPTPTVQPGQGRRDAQGQQRLCFNCFEPGHFADKCPKPRRQQGQAPPRSNNGGRDVIRGRVNHVTAEDVLTTPDVIVGTFLVHSIPATILFDSGASHSFISVPFVGRNQLGVERLRNPLLITTPGGVMTAKYYSPTVPIEIQGIPFPSDLILLDTKNLDVILGMNWLAQFQGVVDCARRTVTLYRGPEQPVVFFAPPTSVRSSELHQIELSEIPIVREFGDVFPEELPGMPPKREIEFRIDLAPGTTPLYKRPYRMAANELAEVKKQLEELKEKGYIRPSTSPWDAPVIFVEKKDKTKRMCVDYRALNEVTIKNKYPLPRIDDLFDQLKGATVFSKIDLRSGYHQLRIREEDIPKTAFTTRYGLYEFTVMSFGLTNAPAFFMNLMNKVFMEYLDKFVVVFIDDILIYSQSEEDHQHHLRLVLGKLREHQLYAKLSKCEFWLSEVKFLGHVISAKGVAVDPETVIAVTDWKQPKTVTQIRSFLGLAGYYRRFIENFSKIARPMTQLLKKEEKFVWSPQCEKAFQTLKEKLVSSPVLILPDTRKDFMVYCDASRQGLGCVLMQDGHVVAYASRQLRPHEGNYPTHDLELAAVVHALKIWRHYLIGNRCEIYTDHKSLKYIFTQSDLNLRQRRWLELIKDYDVGIHYHPGKANVVADALSRKSHCNTLNVRGIPPELSQQMEALNLSIVGHGVLAALEAKPTLLDQIREAQKNDPDMHGLLKNMKQGKAAGFTEDEHGTLWNGNRVCVPDDRELKQLILQEAHESPYSIHPGSTKMYLDLKEKYWWVSMKREIAEFVALCDVCQRVKAEHQRPAGLLQPLQVPEWKWDEIGMDFITGLPKTQGGYDSIWVVVDRLTKVARFIPVKTTYGGNKLAELYFARIVSLHGVPKRIVSDRGSQFTSHFWKKLQEELGTRLNFSTAYHPQTDGQTERLNQILEDMLRACVLDFGKTWDKSLPYAEFSYNNSYQASIQMAPYEALYGRKCRTPLLWDQVGESQVFGTDILREAEAKVRIIRDNLKVAQSRQKSYADNRRRDLEFAVDDFVYLRVTPLRGVHRFQTKGKLAPRYVGPFRIVARRGEVAYQLELPASLGNVHDVFHVSQLKKCLRVPSEQADSEQIEVREDLTYVERPVKILDTMERRTRNRVIRFCKVQWSNHAEEEATWEREDELKAAHPDLFASSSKSRGRDSV

SEQ ID NO: 188618 - protein, 50 aa, Oryza sativa
  unsure (1)..(50): unsure at all Xaa locations
  Clone ID: PAT_MRT4530_85204C.1.pep
SIGTSDVGIVVILISTTASMKKLQDDGALPGRGTMXRETGGIKPEPVLGR

SEQ ID NO: 188619 - protein, 1760 aa, Oryza sativa
  Clone ID: PAT_MRT4530_85205C.1.pep
MEVDEVGGRWTFSRANEGYTSCGPVVEMSWHRAGVLLLGAQSCLPVPGVPAVGGIGSVLLSMARMGWKLCHVFRLYIVVMAGSVTRRGLDMTGFVLELRGMCVALGYPHGVDYQARPLPEQEGDDAEPHAAWEVTAVILAGSPERTSLTVTAGGDSFPAACQSAALLAIGTLHQRYPDELQHSPYRYHPRRGGARDHATFRDASSEDDATIMHLARMVEAYDKARIDFHQMVRRGMVENNLKILELRQENLQLKKDLDAVEAQLHQLKIAQGEICRPKRRRVCRSQKITARKSTSRPELVRQSLAWTCFVETPRAEPAPVVPQEGEASGVGSTEDMVMTRRSANTGDGNQPEGSNHNHQGNPPPPPPPPPPPPPDTNAILTQILAQQANMMTAFLHHLQNPPQLNAPPPPPQHSKLAEFLRIRPPTFSSSNNPVDALDWLHAVGKKLDTVQCSDEEKVIFAAHQLQGPASLWWDHFQATQPEGQPITWARFTAAFRRTHVPAGVVALKKREFRELKQGNRSVMEYLHEFNNLARYAPEDVREDEEKQEKFLAGMDPELSVRLVSRDYPDFQHLVDKSIRLEAKHKELESHKRRLANFRNQQGANQRVRYTNPYPGGSSSQQQQQQQQPRSAPRPQFVVRVPQPQQQQNQQGTRAPRPPPPIVQPGQGRRDAQGPQRLCFNCFEPGHFADKCPKPRRQKGQAPPRPNNGGKDVIRGRVNHVTAEDVLTTPDVIVGTFLIHSIPATILFDSGASHSFISVPFVGRNQLGVERLRNPLLITTPGGVMTAKYYSPAVPIEIQGIPFPSDLILLDTKNLDVILGMNWLAQFQGVVDCARRTVTLYRGPEQPVVFFAPPTSVRSSELHQIELSEIPIVREFGDVFPEELPGMPPKREIEFRIDLASGTAPLYKRPYRMAANELAEVKKQLEELKEKGYIRPSTSPWGAPVIFVEKKDKMKRMCVDYRALNEVTIKNKYPLPRIDDLFDQLKEEDHQHHLHLVLGKLREHQLYAKLSKCEFWLSEVKFLGHVISAKGVAVDPETVTAVTDWKQPKTVTQVRSFLGLAGYYRRFIENFSKIARPMTQLLKKEEKFVWSPQCEKAFQTLKEKLVSSPVLILPDTHKDFMVYCDASRQGLGCVLMQDGHVVAYASRQLRPHEGNYPTHDLELAAVVHALKIWRHYLIENRCEIYTDHKSLKYIFTQSDLNLRQRRWLELIKDYDVGIHYHPGKANVVADALSQKSHCNTLNVRGIPPELNQQMEALNLSIVSRGFLAALEAKPTLLDQIREAQKNDPDMHGLLKNMKQGKAAGFTEDEHGTLWNGNRVCVPDNRELKQLILQEAHESPYSIHPGSTKMYLDLREKYWWVSMKREIAEFVALCDVCQRVKAEHQRPAGLLQPLQVPEWKWDEIGMDFITGLPKTQGGYDSIWVVVDRLTKVARFIPVKTTYGGNKLAELYFARIVSLHGVPKKIVSDRGSQFTSHFWKKLQKELGTRLNFSTAYHPQTDGQTERLNQILEDMLRACVLDFGKTWDKSLPYAEFSYNNSYQASIQMAPYEALYGRKCRTPLMWDQVGESQVFETDILREAEAKVRTIRDNLKVAQSRQKSYADNRRRDLEFAVDDFVYLRVTPLRGVHRFRTKGKLAPRYVGPFRIVARRGEVAYQLELPASLGNVHDVFHVSQLKKCLRVPSEQADSEQIEVREDLTYVERPMKILDTMERRTRNRVIRFCKVQWSNHAEEEATWEREDELKAAHPDLFASSSESRGRDSV

SEQ ID NO: 188620 - protein, 1779 aa, Oryza sativa
  unsure (1)..(1779): unsure at all Xaa locations
  Clone ID: PAT_MRT4530_85206C.1.pep
MSSGANEGYTSCGPVVEMSWHRAGVLLLGAQSCLPVPGVPAVGGVGSMYTSDQSIIYSNSRALGYGQAEQCTQMAGSVSRRGLDLTSFVLELRGMCVALGYPHGVDYQGRPLPEQEGDDAEPHAAWEVTAVILTGSPERTSLAVTAGGDSFSAACQNAALLAIGTLHQRYLDELQHSPYRYHPRRGGARDYATFRDASSEDDATIMHLARMVXAYDAARIDFHQMVRPGMVENNMKILELRQENLQLKKDLDVVEAQLHQLKIAQGEVCRPKRCRVCRSQKITARKSTSRPELVRQSLAWTCFVETPRAEPAPVVPQEGEASGVGSTEDALLLTFHXTTRRSAATGDGNQPEGSNHNNHGSPPPPPPPPPPDTNAILTQILAQQANMMAVFLHHIQNPPHHNAPPPPPQHSKLAEFLRIRPPTFSSSNNPVDALDWLHAVGKNLDTVQCSDEEKVVFAAHQLQGPASLWWDHFQATQPEGQPITWARFTAAFRRTHVPAGVMALKKREFRELKQGNRSVMEYLHEFNNLARYAPEDVREDEEKQEKFLAGMDPELSVRLVSGDYPDFQRLVDKSIRLEAKHKELESHKRRLANFRNQQGANQRIRYTNPYPGGSSSQQQQQXQQPRSAPRPQFVVRVPQPQQQQSQQGTHAPRPPTPAAQSGQGRRDVQGPQRLCFNCFEPGHFADKCPKSRRQQGQAPPRSNNGGKDVIRGRVNHVTAEDVLTTPDVIVGTFLIHSIPATILFDSGASHSFISVPFVGRNQLGVERLRNPLLITTPGGVMTAKYYSPAVPIEIQGIPFPSDLILLDTKNLDVILGMNWLAQFQGVVDCARRTVTLYRGPEQPVVFFAPPTSVSSSELHQIGLSEIPIVREFGDVFPEELPGMPPKREIEFRIDLATGTTPLYKRPYRMAANELAEVKKQLEELKEKGYIRPSTSPWGAPVIFVEKKDKTKRMCVDYRALNEVTIKNKYPLPRIDDLFDQLKGATVFSKIDLRSGYHQLRIREEDIPKTAFTTRYGLYEFTVMSFGLTNAPAFFMNLMNKVFMEYLDKFVVVFIDDILVYSQSEEDHQHHLRLVLGKLREHQLYAKLSKCEFWLSEVKFLGHVISAKGVAVDPETVTAVTDWKQPKTVTQIRSFLGLAGYYRRFIENFSKIARPMTQLLKKEEKFVWSPQCEKAFQTLKEKLVSSPVLIMPDTRKDFTVYCDASRQGLGCVLMQDGHVVAYASRQLRPHEGNYPTHDLELAAVVHALKIWRHYLIGNRCEIYTDHKSLKYIFTQSDLNLRQRRWLELIKDYDVGIHYHPGKANMVADALSRKSHCNTLNVRGIPPELNQQMEALNLSIVGRGFLAALEAKPTLLDQIREAQKNDPDMRGLLKNMKQGKAAGFTEDEHGTLWNGNRRVKAEHQRPAGLLQPLQVPEWKWDEIGMDFITGLSKTQGGYDSIWVVVDRLTKVARFIPVKTTYGGNKLAELYFARIVSLHGVPKKIVSDRGSQFTSHFWKKLQEELGTRLNFSTTYHPQTDGQTERLNQILEDMLRACVLDFGKTWDKSLPYAEFSYNNSYQASIQMAPYEALYGCKCRTLLLWDQVGESQVFGTDILREAKAKVRTIRDNLKVAQSRQKSYADNRRRDLEFAVDDFVYLRVTPLRGVHRFQTKGKLAPRFVGPFRIIARCGEVAYQLELPASLGNVHDVFHVSQLKKCLRVPSEQADSEQIEVREDLAYVERPVKILDTMERRTRNRVIRFCKVQWSNHAEEEATWEREDELKAAHPDLFASSSESRGRDSV

SEQ ID NO: 188621 - protein, 81 aa, Oryza sativa
  Clone ID: PAT_MRT4530_85207C.1.pep
KNPSLSRAWDGLRRRRRSWAYPAEGRTASLPVCLGTAGILAPLRRCEARHRWPRAHRPRARLAIQECGGRVGRSAYSVPVR

SEQ ID NO: 188622 - protein, 2016 aa, Oryza sativa
  unsure (1)..(2016): unsure at all Xaa locations
  Clone ID: PAT_MRT4530_85208C.1.pep
MEPRSPRPFPPSPAALSPSRRYIFAPRASLLRFRRSPLALAVGFVLAPSSSLSAVAANLRFAAVVAPDFLPTRRHLHRLRRVVVDPVRSSVSPADRRSTVALVIPNRAAASRRFGRRFRRPRRPGVSRGPPFAFPLLSALSGAAPPRRWSPAVTIGERVRRLPSAVPARPPSAASRGCQVGPGRQPPAPAGAADAWDPRRRPPPAACSRSTVDPPRPYKDRSSGLCCKALPYFHMSSGANEGYTSCGPVVEMSWQRVGALLLGAQSCLPVPEVPAVGGIGSMYTSDQSLIYSNSRALGYGQAEQCTQMAGSVTRRGLHMTGFVLELRGMCVVLGYPHGVDYQARPLPEQEGEDAEPHAGWEVTAVILSGSPERTSLAVTAGGDSFPAACQNAALLAIGTLHQRYPDELQHSPYRYHPRRGGARDFATFRDASSEDDATIVHLARMVEAYDAARIDFHQMVRRGMVENNMKILELRQENLQLKKDLDAVEAQLHQLKIAQGEVCRPKRRRVCRSQKITARKSTSRPELVRQSLAWTCFVETPRAEPAPVVPQEGEASGVGSTEDALLLTFHXTTRRNAVTGDGNQPEGSNHNHQGNPPPPLPXPPPPPPDTNAILTQILAQQANMMTTFLHHLQNPPQQNAPPPPPQHSKLAEFLRIRPPTFSSSNNPVDALDWLHAVGKKLDTVQCSDEEKVIFAAHQLQGPASLWWDHFQATQPEGQPITWARFTAAFRRTHVPAGVVALKKREFRELKQGNRSVMEYLHEFNNLARYAPEDVREDEEKQEKFLAGMDPELSVRLVSGDYPDFQRLVDKSIRLEAKHKELESHKRRLANFRNQQGANQRVRYTNPYPGGSSSQQQQQQQQPRSAPRPQFVVRVPQPQQQQNQQGTRAPRPLTPAVQPGQGHRDAQGQQRLCFNCFEPGHFADKCPKPRRQQGQAPPRSNNGGKDVIRGRVNHVTAEDVLTTPDVIVGTFLVHSIPATILFDSGASHSFISVPFVGRNQLGVERLRNPLLITTPGGVMTAKYYSPAVPIEIQGIPFPSDLILLDTKKLDVILGMNWLAQFQGVVVCARRTVTLYRGPEQPVVFFAPPASVRSSELHQIGLSEIPIVREFGDVFPEELPGMPPKREIEFRIDLAPGTTPLYKRPYRMAANELAEVKKQLEELKEKGYIRPSTSPWGAPVIFVEKKDKTKRMCVDYRALNEVTIKNKYPLPRIDDLFDQLKGATVFSKIDLRSGYHQLRIREEDIPKTAFTTRYGLYEFTVMSFGLTNAPAFFMNLMNKVFMEYLDKFVVVFIDDILIYSQSEEDHQHHLRLVLGKLREHQLYAKLSKCEFWLSEVKFLGHVISAKGVAVDPETVTAVTDWKQPKTVTQIRSFLGLAGYYRRFIENFSKIARPMTQLLKKEEKFVWSPQCEKAFQTLKEKLVSSPVLILPDTRKDFMVYCDASRQGLGCVLMQDGHVVAYASRQLRPHEGNYPTHDLELAAVVHALKIWRHYLIGNRCEIYTDHKSLKYIFTQSDLNLRQRRWLELIKDYDVGIHYHPGKANVVADALSRKSHCNTLNVRGIPPELSQQMEALNLSIVGRGFLAALEAKPTLLDQIREAQKNDPDMHGLLKNMKQGKAAGFTEDEHGTLWNGNRRVKAEHQRPAGLLQPLQVPEWKWDEIGMDFITGLPKTQGGYDSIWVVVDRLTKVARFIPVKTTYGGNKLAELYFARIVSLHGIPKKIVSDRGSQFTSHFWKKLQEELGTRLNFSTAYHPQTDGXTERLNQILEDMLRACVLDFGKTWDKSLPYAEFSYNNSYQASIQMAPYEALYGRKCRTPLLWDQVGESQVFGTDILREAEAKVRTIRDNLKVAQSRQKSYADNRRRDLEFAVDDFVYLRVTPLRGVHRFQTKGKLAPRYVGPFRIIARRGEVAYQLELPASLGNVHDVFHVSQLKKCLRVPSEQADSEQIEVREDLTYVERPVKILDTMERRTRNRVIRFCKVQWSNHAEEEATWEREDELKAAHPDLFASSSESRGRDSV

SEQ ID NO: 188623 - protein, 332 aa, Oryza sativa
  Clone ID: PAT_MRT4530_85209C.1.pep
MAVEQYCPPPQSLLPPPPLPPVAVPTTCGCAACLQGCFVPVGVQAAFPHAAAGCAPPPPVMPVMIVYRVVQPPPPAAHATRCQITEIEDGGGVETAKAVDGDEPQPFIRTVRSTRRRKAAAIRLPKAFRAALLPPPPPPCALGFTATTTSLMIRNIPNKFLKARLMAILDQHCADENGKCHRRGGGGGRSVVKSEYDFFYVPIDFKFVYYSNLGFLSFHLVLPDLTRWLCASSFYRTGFNKGYAFVNMTTATAARRLRAFLQDHRWDAAMSGKVCDVVPAAIQGLDAFVAHFSASCFPCRTKEFLPVWFEPPRDGEQQTKAHVVGRLVVRPR

SEQ ID NO: 188624 - protein, 40 aa, Oryza sativa
  unsure (1)..(40): unsure at all Xaa locations
  Clone ID: PAT_MRT4530_8520C.1.pep
YSCALGKNFPIGHPSLNCSRXSTLNLGVLXRSASGKEVAT

SEQ ID NO: 188625 - protein, 1763 aa, Oryza sativa
  unsure (1)..(1763): unsure at all Xaa locations
  Clone ID: PAT_MRT4530_85210C.1.pep
MSSGANEGYTSCGPVVEMSWHRAGVLLLGAQSCLPVPGVPAVGGIGSMYTSDQSIIYSNSRALGYGQAEQCTQMAGSVTRRGLDMTGFVLELRGMCVVLGYPHGVDYQARPLPKQEGDDAEPHAAWEVTAVILAGSPERTSLAVTAGGDSFPAACQNAALLAIGTLHQRYPDELQHSPYRYHPHRGGARDYATFRDASSEDDATIVHLARMVEAYDAARIDFHQMVRRGMVENNLKILELRQENLQLKKDLDAVEAQLHQLKIAQGEVCRPKRRRVCRSQKITARKSTSRPELVRQSLAWTCFVETPRAEPAPVVPQEGEASGVGSTEDALLLTFHXTTRRSANAGDGNQPEGSNRNHHGSPPPPPPPPPPPPPDTNAILTQILAQQANMMTAFLHHLQNPPQQNAPPPPPQHSKLAEFLRIRPPTFSSSNNPVDALDWLHAVGKKLDTVQCSDEEKVIFAAHQLQGPASLWWDHFQATQPEGQPITWARFTAAFRRTHVPAGVVALKKREFXELKQGNRSVMEYLHEFNNLARYAPEDVREDEEKQEKFLAGMDPELSVRLVSGDYPDFQRLVDKSIRLEAKHKELESHKRRLANFRNQQGANQRVRYTNPYPGGSSSQQQQQQQQPRSVPRPQYVVRVPQPQQQQSQQGTRAPRPPTPAVQSGQGCRDAQGQQRLCFNCFEPGHFADKCPKPRRQQGQAPPRSNNGGKDVIQGRVNHVTAEDVLTTPDVIVGTFLIHSIPATILFDSGASHSFISVPFVGRNQLGVERLRNPLLITTPGGVMTAKYYSPAVPIEIQGIPFPSDLILLDTKNLDVILGMNWLAQFQGVVDCARRTVTLYRGPEQPVVFFAPPTSVSSSELHQIGLSEIPIVREFGDVFPEELPGMPPKREIEFRIDLAPGTTPLYKRPYRMAANELAEVKKQLEELKEKGYIRPSTSPWGAPVIFVEKKDKTKRRCVDYRALNEVTIKNKYPLPRIDDLFDQLKGATVFSKIDLRSGYHQLRIREEDIPKTAFTTRYGLYEFTVMSFGLTNAPAFFMNLMNKVFMEYLDKFVVVFIDDILIYSQSEEDHQHHLRLVLGKLREHQLYAKLSKCEFWLSEVKFLGHVISAKGVAVDPETVTAVTDWKQPKTVTQVRSFLGLAGYYRRFIENFSKIARPMTQLLKKEEKFVWSPQCEKAFQTLKEKLVSSPVLVLPDTRKDFMVYCDASRQGLGCVLMQDGHVVAYASRQLRPHEGNYPTHDLELAAVVHALKIWRHYLIGNRCEIYTDHKSLKYIFTQSDLNLRQRRWLELIKDYDVGIHYHPGKANVVADALSRKSHCNTLNVRGIPPELNQQMEALNLGIVSRGFLAALEAKPTLLDQIREAQKNDPDMHGLLKNMKQGKAAGFTEDEHGTLWNGNRRVKAEHQRPAGLLQPLQVPEWKWDEIGMDFITGLPKTQGGYDSIWVVVDRLTKVARFIPVKTTYGGNKLAELYFARIVSLHGVPKKIVSDRGSQFTSHFWKKLQEELGXNQILEDMLRACVLDFGKTWDKSLPYAEFSYNNSYQASIQMAPYEALYGRKCRTPLLWDQVGESQVFGTDILREAEAKVRTIRDNLKVAQSRQKSYADNRRRDLEFAVGDFVYLRVTPLRGVHRFQTKGKLAPRYVGPFRIIARRGEVAYQLELPASLGNVHDVFHVSQLKKCLRVPSEQADSAQIEVREDLTYVERPVKILDTMERRTRNRVIRFCKVQWSNHAEEEATWEREDELKAAHPDLFASSSESRGRDSV

SEQ ID NO: 188626 - protein, 1344 aa, Oryza sativa
  Clone ID: PAT_MRT4530_85211C.1.pep
MVMPMVTTRRNAATGDGNQPEGSNHNHQGNPPPPPPPPPPPPPDTNAILTQILAQQANMMTAFLHHLQNPPQHNAPPPPQHSKLAEFLRIRPPTFSSSNNPVDALDWLHAVGKKLDTVQCSDEEKVIFAAHQLQGPASLWWDHFQATQPEGQPITWARFTAAFRRTHFNNLARYAPEDVREDEEKQEKFLAGMDPELSVRLVSGDYPDFQRLVDKSIRLEAKHKELESHKCRLANFRNQQGANQRVRYTNPYPGGSSSQQQQQQQQQPRSAPRPQFVVRIPQPQQQQNQQGTRAPRPPTPTVQPGQGRRDAQGQQRLCFNCFEPGHFADKCPKPRRQQGQAPPRSNNGGKDVIRGRVNHVTAEDVLTTPDVIVELHQIGLSEIPIVREFGDVFPEELPGMPPKREIEFRIDLAPGTTPLHKRPYRMAANELAEVKKQLEELKEKGYIRPSTSPWGAPVIFVEKKDKTKRMCVDYRALNEVTIKNKYPLPRIDDLFDQLKGATVFSKIDLRSGYHQLRIREEDIPKTAFTTRYGLYEFTVMSFGLTNAPAFFMNLMNKVFMEYLDKFVVVFIDDILIYSQSEEDHQHHLRLVLGKLREHQLYAKLSKCEFWLSEVKFLGHVISAKGVAVDPETVTAVTDWKQPKTVTQVRSFLGLAGYYRRFIENFSKIARPMTQLLKKEEKFVWSPQCEKAFQTLKEKLVSSPVLILPDTRKDFMVYCDASRQGLGCVLMQDGHVVAYASRQLRPHEGNYPTHDLELAAVVHALKIWRHYLIGNRCEIYTDHKSLKYIFTQSDLNLRQRRWLELIKDYDVGIHYHPGKANVVADALSRKSHCNTLNVRGIPPELNQQMEALNLSIVSRGFLAALEAKPTLLDQIREAQKNDPDMHGLLKNMKQGKAAGFTEDEHGTLWNGKRVCVPDNRELKQLILQEAHESPYSIHPGSTKMYLDLKEKYWWVSMKREIAEFVALRDVCQRVKAEHQRPAGLLQPLQVPEWKWDEIGMDFITGLPKTQGGYDSIWVVVDRLTKVARFIPVKTTYGGNKLAELYFARIVSLHGVPKKIVSDRGSQFTSHFWKKLQEELGTRLNFSTAYHPQTDGQTERLNQILEDMLRACVLDFGKTWDKSLPYAEFSYNNSYQASIQMAPYEALYGRKWRTPLLWDQVGESQVFGTDILREAEAKVRIIRDNLKVAQSRQKSYADNRRRDLEFAVDDFVYLRVTPLRGVHRFQTKGKLAPRYVGPFRIVARRGEVAYQLELPASLGNVHDVFHVSQLKKCLRVPSEQADSEQIEVREDLTYVERPVKILDTMERRTRNRVIRFCKVQWSNHAEEEATWEREDELKAAHPGLFA

SEQ ID NO: 188627 - protein, 1803 aa, Oryza sativa
  Clone ID: PAT_MRT4530_85212C.1.pep
MGWKLCHVFRPYTVVMAGSVTRRGLSMTGFVLELRGMCVVLGYPHGVDYQARPLPEQEGEDAEPHAGWEVTAVILSGSPERTSLAVTAGGDSFPAACQNAALLAIGTLHQRYPDELQHSPYRYHPRRGGARDYATFRDASSEDDATVVHLARMVEAYDAARIDFHQMVRRGMVENNLKILELRQENLQLKKDLDALEAQLHQLKIAQGEDSRPKRRRVCRSQKITARKSTSRPELVRQSLAWTCFVETPRAEPAPVVPQEGEASGVGSSEGALLLTFRPGPSQRSLSLFAGSVWGFQMVTTRRNVNTGEGNQPEGSNHNHQGNPPPPPPPPPPPPPDTNAILTQILAQQANMMTAFLHHLQNPPQQNAPPPPPQHSKLAEFLRIRPPTFSSSNNPVDALDWLHAVGKKLDTVQCSDEEKVVFAAHQLQGPASLWWDHFQATQPEGQPITWARFTAAFRRTHVPAGVVALKKREFRELKQGNRSVMEYLHEFNNLARYAPQDVREDEEKQEKFLAGMDPELSVRLVSGDYPDFQRLVDKSIRLEAKHKELESHKRRLANFRNQQGANQRVRYTNPYPGGSSSQQQQQQQQPRSAPRPQFVVRIPQPQQQQNQQGTRAPRPPTPTVQPVQGRRDAQGQQRLCFNCFEPGHFADKCPKPRRQQGQAPPRSNNGGKDVIRGRVNHVTAEDVLTTPDVIVGTFLVHSIPATILFDSGASHSFISVSFVGRNQLGVERLRNPLLITTPGGVMTAKYYSPAVPIEIQGIPFPSDLILLDTKNLDVILGMNWLAQFQGVVDCARRTVTLYRGPEQPVVFFAPPTSVRSSELHQIGLSEIPIVREFGDVFPEELPGMPPKREIEFRIDLAPGTTPLHKRPYRMAANELAEVKKQLEELKEKGYIRPSTSPWGAPMIFVEKKDKTKRMCVDYRALNEVTIKNKYPLPRIDDLFDQLKGATVFSKIDLRSGYHQLRIREEDIPKTAFTTRYGLYEFTVMSFGLTNAPAFFMNLMNKVFMEYLDKFVVVFIDDILIYSQSEEDHQHHLRLVLGKLREHQLYAKLSKCEFWLSEVKFLGHVISAKGVAVDPETVTAVTEWKQPKTVTQVRSFLGLAGYYRRFIENFSKIARPMTQLLKKEEKFVWSPQCEKAFQTLKEKLVSSPVLILPDTRKDFMVYCDASRQGLGCVLMQDGHVVAYASRQLRPHEGNYPTHDLELAAVVHALKIWRHYLIGNRCEIYTDHKSLKYIFTQSDLNLRQRRWLELIKDYDVGIHYHPGKANVVADALSRKSHCNTLNVRSIPPELNQQMEALNLSIVGRGFLAALEAKPTLLDQIREAQKNDPDMHGLLKNMKQGKAAGFTEDEHGTLWNGKRVCVPDNRELKQLILQEAHESPYSIHPGSTKMYLDLKEKYWWVSMKREIAEFVALCDVCQRVKAEHQRPAGLLQPLQVPEWKWDEIGMDFITGLPKTQGGYDSIWVIVDRLTKVARFIPVKTTYGGNKLAELYFARIVSLHGIPKKIVSDRGSQFTSHFWKKLQEELGTRLNFSTAYHPQTDGQTERLNQILEDMLRACVLDFGKTWDKSLPYAEFSYNNSYQASIQMAPYEALYGRKCRTPLLWDQVGESQVFGTDILREAEAKVRIIRDNLKVAQSRQKSYADNRRRDLEFAVDDFVYLRVTPLRGVHRFQTKGKLAPRYVGPFRIIARRGEVAYQLELPASLGNVHDVFHVSQLKKCLRVPSEQADSEQIEIREDLTYVERPVKILDTMERRTRNRVIRFCKVQWSNHAEEEATWEREDELKAAHPDLFASSSESRGRDSV

SEQ ID NO: 188628 - protein, 316 aa, Oryza sativa
  Clone ID: PAT_MRT4530_85213C.1.pep
MAVQAQRLAQAFPYDLHAAASGGALFLDELAGECAPPMAAVEGIGGAVVFGGDNGEYGFVERKRPRVAAGLLEDQRAVLAHAMAAPLQGILPFGDVAGRAACAGAASTSGRRMDGAGGISQGLLSQLYHHGVEIDALVRLEAERMRAGLEEAQRRHVRALVAAAARATTGRVRAAEAELERARCRNAELEEKLRQVSAEGQAWMGVAKSHEAVAAGLRATLDQLLLQSPCAAAAAAASAGEGDAEDAHSCCFETPAAAADVAVSTATSCKACRVAEASVLLLPCRHLCLCGACEAAADACPVCAATKNASVHVLLS

SEQ ID NO: 188629 - protein, 125 aa, Oryza sativa
  Clone ID: PAT_MRT4530_85214C.1.pep
DLDQLLDLSSKQLRDVVHARALRRINSGLKRRPMGLIKKLRKAKQEAQPNEKPDLVKTHLRDMIVVPEMIGSVIGIYSGKEFNQVEIKPEMVGHYLAEFSISYKPVKHGRPGIGATHSSRFIPLK

SEQ ID NO: 188630 - protein, 1981 aa, Oryza sativa
  Clone ID: PAT_MRT4530_85215C.1.pep
MAARRCGSRRRRRRAAATRVGLISRLADTPCIKRGLESPSAWKSPWFVDMQFQGSYFVSPADRTYNALGFVKQINVQTAAALAEAREVLVSGGQSENINSGKENLESPNAKKEPGATTKLQAKIKIGKGLLPPLPMAATEHKPAGRKTAEKVEEKPSPPPLLLLLLGVCFLWGESPRKQARLKSAIVVPETRKLSVFNRLSKGEPGAPSSIWQEVKPRFWWRQGRAPLPATASRRPTTGVIPAWRPFNPATLGRCLRCLAQDHKIADCRDPPRCYICKRSGHISSGCPSKYKNKPSIFSCIYSTHPAPPSKQEIPNPLAFPPLTGHKAPVRERLGPKMDYIPGLPENHPACGYAVVVADAAMEHEAMRLYNHGAVIKARLPNYDVSAKEMAQALQQQVGTPNYDVRRCSKMSASSTNPNLLPRVSVFTLFPAGVGQVLETGGMPTPSQEVASAPLGRVRHLLIHLDMVEDWRPLPARSSNSSGSTDSDDPPRRRVHRFDWHLGYEDGVSPPPLQPPQPPLPVRRLHEERGRPEQRGIDLRNRLSQRGSPKAETTAGTAAAPPVAAIATSPAIGWVAPQPGAHPGRLLAAGALAGRARQARGVVRSRRVAVFAGALPKVVGATREGEDPMFLELAVAAAFHAEKSANASTLEAGASVPIGSAAPLGPVAPIGPVSPGPVAPLGPDGSAASPGLIASPGLGLLELVGEQMEGTATQPMQGGVEPFFAPLPPPLVATPPVRRRGRPRKKVLLPSRHSKRLEARPSPVLISMRAQVRIMKEMRVLKPGEPVGDEAVAEYIKRFQDPLPTVVVQGIRALTGLDSGKPLPPDVTEEADGATPEWCTSLGVTYGSRMIEGLKILNWNVRGLNNPARREAICEVANNADASILCIQETKLANIDQFLGREIGGSRLRRFEFLPADGVRGGVAIFWDDTKVQVDNTQIHTFSVSIRAQVIGGNVPFILTSVCGPSEDEHKSDFLAELESLVPQPLLPWVVLGDFNLICEASDKNNLNLDRRRMGQFRSTLNRCCLKEFKLQNRKFTWSNEQEAPTLERIDKVFCNIDGDILFSNHTLQALSSSCSDHCPLLLAFTVSPPKRVVFRFENFWVWVPGFMEVVQQAWSSHTFGGHPFTKLSHKLTATAKALRKWSRSLFGEIKMQFHVAQEVILRLDLAQEDRILTADEHQLRKDLKLRILGLAAVAKSKKRQRSRLTWLKEGDANTKFFHIHANSRRRKNHIHQLHTTSAILTEHEEKSEALFNHFNSILGNKEARNCTLNWNAIDLPQVNPDELDEPFTEEEVWAALKQMQAEKAPGPDGFNGGNFGVLNRAAITLLPKRNAPTLVTDFRPISLIHSVAKLISKVLAIRLARQMDGLISVAQSAFIKKRCIQDNFLYVRNMLRNLNASKKPTLFFKLDIARAFDSVSWEYLLELMQNMGFGPRWRNWICLLFSTATSKVVLNGDQGECIAHRRGLRQGDPISPYLFILAIDPLQRLLHLATEGGQLTNIGSRHARLRTSLYADDAAVFLNPVQSEVDVLITMLRDFGKATGLHVNLGKSLVAPIRCQEVDLDDVLCSFSGARASFPLTYLGLPLTPGRLRKVHFQPLQDKIKGRLSGWKPSLLYMGGRRIMVNSVLSAIPTYTLTVLKPPKQSLQEIDKARRRFLWAGNENMHGGKCKVNWLKVCSPVRTPEKPWIGTETPCDELDKDLFAASTRVQIGDGQKASFWESNWIGGQRLKSQAPNLYRHSKRKTRTVQDALQQGRWINDILHSLTIPLLDEFFHVWEILARNTPQLTEGVQDSIVWQWTTNGEYSAKSAYQFQFNGMVLLPSTKLSWEAWAPVKCKIFSWLVLQNRVWTADRLQIRGWPNNYFYQLCFRNLETIDHLLFECLVSKQIWFGILTWLHQGHIIPKWNTSRNLLDWWTQGTSDLEATKQKGLRTLFLLIAWEIWKERNARIFRAKEATVHQMISRIQEELGWWSMAGAKHIGRMLP

SEQ ID NO: 188631 - protein, 583 aa, Oryza sativa
  Clone ID: PAT_MRT4530_85216C.1.pep
MDLPQVNPDELDEPFTEEEVWAALKQMPAEKAPGLDGFNALNRAAITLLPKRNAPTLVTDFRPISLIHSVAKLISKVLAIRLARQMDGLISVAQSAFIKKRCIQDNFLYVRNVLRNLNASKKPTLFLKLDIARAFDSVSWEYLLELMQNMGFGPQWRNWICLLFSTATSKVVLNGDQGECIAHRRGLRQGDPLSPYLFILAIDPLQRLLHLSTEGGQLTNIGSRHARLRTSLDADDAAVFLNPVQSEVDVLITMLRDFGKATGLHVNLGKSLVAPIRCQEVDLDDVLRSYSGARASFPLTYLGLPLTPGRLRKVHFQPLQDKIKGRFSGWKPSLLYMGGRRIMVNSVLSAIPTYTLTVLKPPKQSLQEIDKARRRFLWVARDTPQLTEGVQDSIVWQWTTNGEYGAKSAYQFQFNGMVLSPSTKLSWEAWAPAKCKIFSWLVLQNRVWTTDRLQIRGWPNNYFCQLCFRNLETIDHLLFECPVSKQIWFGILTWLHQGHIIPKWNTSRNLLDWWTQGTSDPEATKQKGLRALFLLIAWEIWKERNARIFRAKEATVHQMISRIQEELGWWSMAGAKHIGRMLP

SEQ ID NO: 188632 - protein, 547 aa, Oryza sativa
  Clone ID: PAT_MRT4530_85217C.1.pep
MASGSSGGGYADEKGPGAATMQALGLQQQHGGGGEVEEESSEMGEKTAARTRLSGLLWHGGSAYDAWFSCASNQVAQVLLTLPYSFAQLGMASGLLFQLFYGLLGSWTAYLISILYLEYRTRKERDKVDFRNHVIQWFEVLDGLLGRHWRNVGLAFNCTFLLFGSVIQLIGCASNIYYINDHLDKRTWTYIFGACCATTVFIPSFHNYRIWSFLGLLMTTYTAWYIAVASLIHGQVEGVAHSGPTSIVLYFTGATNILYTFGGHAVTVEIMHAMWRPQKFKAIYLLATVYVLTLTLPSASAAYWAFGDALLTHSNALALLPRTPWRDAAVVLMLIHQFITFGFACTPLYFVWEKLVGLHGCPSLCKRAAARLPVVLPIWFLAIIFPFFGPINSAVGSLLVSFTVYIIPSLAYMVTFRSPQSRQNAVERPPRFAGGWTGAYVINSFVVAWVLVVGFGFGGWASITNFVHQVDTFGLFAKCYQCPPHPAAAALSPPGAIAPAPASMLPPFNSTAAGIFAAPVPSPAPAPAGMHFALGHHHHHRHHRHGL

SEQ ID NO: 188633 - protein, 298 aa, Oryza sativa
  unsure (1)..(298): unsure at all Xaa locations
  Clone ID: PAT_MRT4530_85218C.1.pep
MALMVVLNGDQGECIAHRRGLRQGDPXSPYLFILAIDPLQRLLHLATEGGQLTNIGSRHARLRTSLYADDAAVFLNPVQSEVDVLITMLRDFGKATGLHVNLGKSLVAPIRCQEVDLDDVLRSFSGARASFPLTYLGLPLTPGRLRKVHFQPLQDKIKGRLSGWKPSLLYMGGRRIMVNSVLSAIPTYTLTVLKPAKQSLQEIDKARRRFLWAGNKNMHGGKCKVNWLKVCSPVRYGGLGVPNLEKFARALRLRWLWFEWRTPEKPWIWTETPCDELDKDLFAASTRVQIGDGQKASF

SEQ ID NO: 188634 - protein, 53 aa, Oryza sativa
  Clone ID: PAT_MRT4530_85219C.1.pep
MRVLHAACACYGICASRPNLVVNRNQQKRNLDTIIMDEPYGSYDTITDSTRVA

SEQ ID NO: 188635 - protein, 72 aa, Oryza sativa
  Clone ID: PAT_MRT4530_8521C.1.pep
NHGPSVSGVVCNIMYPYLSAKTSSTTNSATTVLGVAPNKGLFKVMVDQAAESAEAAHACICGSICKCNPGIC

SEQ ID NO: 188636 - protein, 913 aa, Oryza sativa
  unsure (1)..(913): unsure at all Xaa locations
  Clone ID: PAT_MRT4530_85220C.1.pep
MEVVQQAWSSHTFGGHPFTKLSHKLTATTKALRKWSRSLFGEIKMQFHVAQEVILRLDLAQEDRILTVDEHQLRKDLKLRILGLAAVAKSKKRQRSRLTWLKEGDANTKFFHIHANSRRRKNHIHQLHTTSAILTEHEEKSEALFNHFNSILGNNQARNCTLNWNAMDLPQVNPDELDEPFTEKEVWAALKQMPAEKAPGPDGFNGTFYKKCWHLIKXDIMDVFXCLYNLSGGNFGALNRAAITLLPKRNAPTLVTDFRPISLIHSVAKLTSKVLAIRHARQMDSLISVAQSAFIKKRCIQDNFLYVRNVLRNLNASKKPTLFFKLDIARAFDSVSWEYLLELMQNMGFGPQWRNWICLLFSTATSKVVLNRDQGECIAHRRGLRQGDPLSPYLFILAIDPLQRLLHLATEGRQLTNIGSRHARLRTSLYADDAAVFLNPVQSEVDVLITMLRDFGKATGLHVNLGKSLVAPIRCQEVDLDDILRSFSGARASFPLTYLGLPLTPGRLRKVHFQPLQDKIKGRLSGWKPSLLYIGGGRRIMVNSVLSAIPTYTLKVLKPSKQSLQEIDKARRRFLWAGNENMHGGKCKVNWLKVCSHVRYGGLGVPNLEKFARALRLRWLWFEWRTPEKPWIGTETPCDELDKDLFAASTRVQIGDGQKASFWESNWIGGQSLKSQAPNLYRHSKRNTRTVQDALQQGRWINDVRHSLTIPLLDEFFXVWEILARDTPQLTEGVQDSIVWQWTTNGEYGAKSAYQFQFNGMVLSPSTKLSWEAWAPAKCKIFSWLVLQNRVWTTDRLQIRGWPNNYFCQLCFRNLETIDHLLFECPVSKQIWFGILTWLHQGHIIPKWNTSRNLLDWWTQGTSDPEATKQKGLRALFLLIAWEIWKERNARIFRAKEATTMTSLTTCNRQGQS

SEQ ID NO: 188637 - protein, 66 aa, Oryza sativa
  Clone ID: PAT_MRT4530_85221C.1.pep
KMGGAGADKNIIIHWHHWRDYRGGTQKLNIIVKKCRKKREGTRAQMYMGANKRIYNTGHYDPGVII

SEQ ID NO: 188638 - protein, 1098 aa, Oryza sativa
  Clone ID: PAT_MRT4530_85222C.1.pep
MDLIPVGVDQAQRGMDLYSKSFLLYLAPIRDKNYSYLMISTSYSSTSVRFVLDSSGKVQFLSWDPGHSLWAVQYILSVQGCGRYGSCGPYGHCDLTGVHTCKCLDGFEPVSDKFVYISGISFEECTVLCSRNCSCTAYAYTNSTSLLPPQCLLWMGELIDTAKLGENDDARKFSNADARKSMLDWPTRFKTIKGVAKGLLYLHQDSRLTVVHRDLKASNKLLDADMSPKVSDFGMAMIFGSAQQQANTNRLVGTYGYMSPEYALEGTCSVKSYISFGVLLLKIVSGLKISHPHRITDFLNLIAFLSTEDGSEPGWLSHGENTLRPFPPDISLIPCSIHLCASDNRLVPGKPISPGSTIISDDGTFALGFFSPSNPKKHYYVGIWYNNIPKFTVVWVANRAAPITVPSSAVFTLTRSSNLTLSDGNGHVLWTTMAKSRISISSPRNTKNISTEAMLDNTGNLILRSLADNAIIWQSFDHPTDTLLPGMNLRLSHNTHPLQRLISWKDIRDPSPGPFSYGADPNNLLQRFIWHGSVPHRRSPVWNNYLLIGKYMNNLNSTIYMAINHDSDEVYMSFGMPTGPFSVLIRMKITYLGKVNMLGWQSNISAWTTLYSEPVHDCNIYGYCGPNSYCDNTDAVPACKCLDGFEPREEERRTNNRSFLLGCRRRKALRCHHGNSFLTYPSMKVPDNFIYIHKRSFDECMVECRSNCSCVAYAYSNISSGIIDDTRCLLWTGELIDMEKVTQGGENLYIRANRLNGNRKTTDILEFVLPAVASLLILICMLIWICGVRGKQRGDEIYGGLMLGDISTSRELSDRKVDFPIFSFREIASATNNFSDSNILGHGGFGTVYKGTMDGDKEIAVKRLSKGSAQDASRNSALDWTTRFKIIKGVARGILYLHQDSRLTIIHRDLKASNVLLDADMHPKISDFGTARIFGGNEQQSNTNRVVGTYGYMAPEYALEGIISVKSDVYSFGVLLLEIVSGLKISGIIDPTTGHSNLIAYAWSLWKNGNMSTFVDASISESSSLNEALRCIHIALLSIQNNPNARPLMSWVVSSLDNKDIELPEPKEPMYFAHRSYGADGAGESFVNDMSIASVEAR

SEQ ID NO: 188639 - protein, 54 aa, Oryza sativa
  unsure (1)..(54): unsure at all Xaa locations
  Clone ID: PAT_MRT4530_85223C.1.pep
LQPLRPFVHYKNTFFPSIQQXFLNQQPFFSQPYLHSRNQKHLFFFTFHNYKLFI

SEQ ID NO: 188640 - protein, 139 aa, Oryza sativa
  Clone ID: PAT_MRT4530_85224C.1.pep
MAPFPGDKASWRGRGSRPALGSWRPVTSAPTRQLGCRRDGGAGAVPTPRALTYGVLEKFGAIDFKGMLDCQVDSHNIAFLSLSHTLIVVVDGYVVAAIVGLEGPFGPAAGYHPLTLSSGSHGLSQRLSRLTGSHLTGSS

SEQ ID NO: 188641 - protein, 249 aa, Oryza sativa
  Clone ID: PAT_MRT4530_85225C.1.pep
MSSSSSSFPTSRSPFPAGAGAGTSGGGGGGGGGSGGGGGGGRWSGVRPWGSSGGTSVSSSGKRIQKELMDLNASDCSAGPKGDNLYHWLSTIIGPQGSPYEGGIFFLDIVFPIDYPFKPPMGITKVMNIEKGFVHWKPNVLGHHLHPMSIYYLHSSLPTQPYMITCFMVTFKTRIYHCNVDSTGNLSMDILREGWSPALTISKVLLAIKAIITNPDPYCPLVPSIGHLYLTDRTKHDEIAAEWTMRFAR

SEQ ID NO: 188642 - protein, 103 aa, Oryza sativa
  unsure (1)..(103): unsure at all Xaa locations
  Clone ID: PAT_MRT4530_85226C.1.pep
FQSPRIAITTSPKSKHTREPQDPSSRHKQPTTLPFALVSTTGDGRLASVPVAAGRHGLLLQXEAQEAAGQCSCVLPPLQXPAEAANRRPAALRRRRGQEVLSR

SEQ ID NO: 188643 - protein, 125 aa, Oryza sativa
  unsure (1)..(125): unsure at all Xaa locations
  Clone ID: PAT_MRT4530_85227C.1.pep
AKLTLLNNQQLTNFPIFSPQHAHPTQHGHCRCPKHAXLTEWGFPTITPSSPDSWPANSHTHPPHPTHQIPLSEPPRTHTGASSHAKPATTATPVVFHLHPHFNSTTHPHHSLPVRPSQAXTXRLG

SEQ ID NO: 188644 - protein, 76 aa, Oryza sativa
  Clone ID: PAT_MRT4530_85228C.1.pep
TRTRTGACQYKLLAAGHPVAQGYCFFVTCKAASLQMHFNILLSSHNIKILSFYLYYLITRLIKKNYANIKKTKSCA

SEQ ID NO: 188645 - protein, 39 aa, Oryza sativa
  Clone ID: PAT_MRT4530_85229C.1.pep
VVCASGAPVSAALISHLFFPFTLAVSFIQWSLPFPCIHL

SEQ ID NO: 188646 - protein, 84 aa, Oryza sativa
  Clone ID: PAT_MRT4530_8522C.1.pep
KSLCRGTQQLLCLVPTHCNVYQHQANQIWGTKYHRRRSATWVSSKNLITSWTWLALYIVDAGDKMRVRETSSSAASQSPIHALN

SEQ ID NO: 188647 - protein, 155 aa, Oryza sativa
  Clone ID: PAT_MRT4530_85230C.1.pep
MASLGYYDDRGAPSSYRYDARQAADGAGTSFHLFIFLATASLLGAASLYSRCESAVESLFDQVRVVVVLSPLLLLLAMQYWAAAAGGGGRRSGLSSLLMAPLVGEHSGGGGGWYDQRRDGSSPWGVALALALVLLLISYQSCFQDWWFPLVNRRR

SEQ ID NO: 188648 - protein, 998 aa, Oryza sativa
  Clone ID: PAT_MRT4530_85231C.1.pep
MHYSSGGLVGPVQRGVVDCARRTVTLYRGPEQPVVFFAPPTSVSSSELHQIGLSEIPIFREFGDVFPEELPGMPPKREIEFRIDLAPGTTPLYKRPYRMAANELAEVKKQLEELKEKGALNEVTIKNKYPLPRIDDLFDQLKGATVFSKIDLRSGYHQLRIREADIPKTAFTTRYGLYEFTVMSFGLTNAPAFFMNLMNKVFMEYLDKFVVVFIDDILVYSQSEEDHQHHLRLVLGKLREHQLYAKLSKCEFWLSEVKFLGHVISAKGVAVDPETVTAVTDWKQPKTVTQIRSFLGLAGYYRRFIENFSKIARPMTQLLKKEEKFVWSPQCEKAFQTLKEKLVSSPVLILPDTRKDFMVYCDASPQGLGCVLMQEGHVVAYASRQLWPHEGNYPTHDLELAAVVHALKIWRHYLIGNRCEIYTDHKSLKYIFTQSDLNLRQRRWLELIKDYDVGIHYHPGKANVVADALSRKSHCNTLGVRGIPPELNQQMEALNLSIVSRGFLATLEAKPTLLDQIREAQKNDPDMRGLLKNMKQGKAAGFIEDEHGTLWNRNRVCVPDVRELKQLILQEAHESPYSIHPGSTKMYLDLKEKYWWVSMKREIAEFVALCDVCQRVKAEHQRPAGLLQPLQVPEWKWDEIGMDFITGLPKTQGGYDSIWVVVDRLTKVARFIPVKTTYGGNKLAELYFARIVSLHGVPKKIVSDRGSQFTSHFWKKLQEELGTRLNFSTAYHPQTDGQTERLNQILEDMLHACVLDFGKTWDKSLPYAEFSYNNSYQASIQMAPYEALYGRKCRTPLLWDQVGESQVFGTDILREAEAKVRTIWDNLKVAQSRQKSYADNRRRNLEFAVDDFVYLRVTPLRGVHRFQTKGKLAPRFVGPFRIIARRGEVAYQLELPASLGNVHDVFHVSQLKKCLRVPSEQADSEQIEVREDLTYVERPVKILDTMERRTRNRVIRFCKVQWSNHAEEEATWERENELKAAHPDLFASSSESRGRDSV

SEQ ID NO: 188649 - protein, 547 aa, Oryza sativa
  Clone ID: PAT_MRT4530_85232C.1.pep
MSTSASPSAAPSAEYAEHLSNLVAIPSLSHEHHYFLGPIGNPDPTEFIIAETNRIPFRLANPNLGHWKNTFKSWPALEKTSPEKNWSVCCGPTTNWQFLAEALEIKRQFPLGKILLGYLYQMLNNASAKIAVGSVVGAGGPWWLLQTWLNLVAMKAVNWPSVAEAEFPRLESITDDDGVERTHRRCMSYGEYAFTPADAGAKLSTEFLKDWFFSFYDGFQKDARVWEIFTTAVSPCILLVVIHQGRNIQTSYEFYHPMSSARQFGMGQMPIGLYFVDKIQCRGDITSALMMDRLLNIPGPPLGSIENIELARFRSKAFDRWWGEWKLHLFHQLASMYMTDLFPDVIPQTTESSPPRKSNSGKDIEYASGLIPNRGGPSPMVIGYHAPRTSSLLQGQLREPADASKKRQTKASAVDTSALAPKKKAKKKKSKPTDDLPALDPSIEQALDEEEIEEDVDQAAAELSDLGEKTPSASPKQTPPTPTTPAHFSRKKKTIMKKKSTPATSKPAHPPPPPSPHVQPTPSNRTPSAAGSHNIEEEEQPAAPAIP

SEQ ID NO: 188650 - protein, 261 aa, Oryza sativa
  unsure (1)..(261): unsure at all Xaa locations
  Clone ID: PAT_MRT4530_85233C.1.pep
MLTQMNCFYLFNEQFFLMKSSVTQLCITSFIIICFFTFLFTFTRSFLDSQYSFRLAKLKLMLRSSIMGIIYRKCLCLSLSERCRFSEXEIQTFMSVDSDRTINLCNSLHDAWSLPLQIGVALYLLYTQVNYAFLSGLAITVILMPVNKWISTRIAHATEKMMKHKDERISCAGELLAHIRTVKMYSWERLFTQRLVERRELEVKHLATRKYLDAWCVYFWATTPTLFSLFTFSIFAIMGHSLDAATVKQYPDDMFGHMQSG

SEQ ID NO: 188651 - protein, 1705 aa, Oryza sativa
  Clone ID: PAT_MRT4530_85234C.1.pep
MSWHRAGVLLLGAQSCLPVPGVPAVGGIGSVLLSMPRMGWKLCHVFRLYTVVMAGSVTRRGLDMTGFVLELRGMCVVLGYPHGVDYQARPLPEQEGDDAEPHAGWEVTVVILSGSPERTSLAVTAGGDSFPAACQNAALLAIGTLHQRYPDELQHSPYRYHPRRGGARDYATFRDASSEDDATIVHLARMVEAYDAARIDFHQMVRRGMVENNLKILELRQENLQLKKDLDAVEAQLHQLKIAQGEVCRPKRRRVCRSQKITARKSTSRPELVRQSLAWTCFVETPRAEPVPVVPQEGEASGVGSTEDALLLTFRPGPSQRRSANTGAGNQPEGSNHNHEGNPPPPPPPPPPPPPDTNAILTQILAQQANMMTAFLHHLQNPPQHNAPPPPPQHSKHAEFLRIRPPTFSSSNNPMDALDWLHAVGKKLDTVQCSDEEKVIFAAHQLQGPASLWWDHFQAAQPEGQPITWARFTAAFRRTHVPAGVVALKKREFRELKQGNRSVMEYLHEFNNLARYAPEDVREDEEKQEKFLAGMDPELSVRIVSGDYPDFQRLVDKSIRLEAKHKELESHKRRLANFRNQQGANQRPQQQQNQQGTRAPRPPTPAVQPGQGRRDAQGQQRLCFNCFEPGHFADKCPKPRRQQGQAPPRSDNGGKDVIRGRVNHVTAEDVLTTPDVIVGTFLIHSIPATILFDSGASHSFISVPFVGRNQLGVERLRNPLLITTPGGVMTAKYYSPAVPIEIQGVPFPTDLILLDTKNLDVILGMNWLAQFQGVVDCARRTVTLYRGPEQPVVFFAPPTSVRSSELHQIGLSEIPIVREFGDVFPEELPGMPPKREIEFRIDLAPGTTPLYKRPYRMAANELAEVKKQLEELKEKGYIRPSTSPWGAPVIFVEKKDKTKRMCVDYRALNEVTIKNKYPLPRIDDLFDQLKEEDHQHHLRLVLGKLREHQLYAKLSKCEFWLSEVKFLGHVISAKGVAVDPETVTAVTDWKQPKTVTQIRSFLGLAGYYRRFIENFSKIARPMTQLLKKEEKFVWSPQCEKAFQTLKEKLVSSPVLILPDTHKDFMVYCDASRQGLGCVLMQDGHVVAYASRQLRPHEGNYPTHDLELAAVVHALKIWRHYLIGNRCEIYTDHKSLKYIFTQSDLNLRQRRWLELIKDYDVGIHYHPGKANVVADALSRKSHCNTLNVRGIPPELNQQMEALNLSIVSRGFLATLEAKPTLLDQIREAQKNDPDMHGLLKNMKQGKAAGFTEDEHGTLWNGNRVCVPDNRELKQLILQEAHESPYSIHPGSTNMYLDLKEKYWWVSMKREIAEFVALCDVCQRVKAEHQRPAGLLQPLQVPEWKWDEIGMDFITGLPKTQGGYDSIWVVVDRLTKVARFIPVKTTYGGNKLAELYFARIVSLHGVPKKIVSDRGSQFTSHFWKKLQEELGTRLNFSTAYHPQTDGQTERLNQILEDMLRACVLDFGKTWDKSLPYAEFSYNNSYQASIQMAPYEALYGRKCRTPLLWDQVGESQVFGIDILREAEAKVRTIRDNLKVAQSRQKSYADNRRRDLEFAVDDFVYLRVTPLRGVHRFQTKGKLAPRYVGPFRIIARRGEVAYQLELPASLGNVHDVFHVSQLKKCLRVPFEQADSEQIEVRKDLTYVERPVKILDTMERRTRNRVIRFCKVQWSNHAEEEATWEREDELKAAHPDLFASSSESRGRDSV

SEQ ID NO: 188652 - protein, 386 aa, Oryza sativa
  unsure (1)..(386): unsure at all Xaa locations
  Clone ID: PAT_MRT4530_85235C.1.pep
IANSTKDEPLIAAATYFWSNALNAFLFNQGPMTPTLLNITMITGLDVTSSANTMSLNTKNTFEFKTKSIGGWLGYIVAYMGKGHVTPREHVAFLLMWLEKFLFCGSSCGPTTNWQFLAEALEIKRQFPLGKILLGYLYQMLNNASTKIAVGSVVGASGPWWLLQTWLKLVAMKSCNLASWAEAXSPRIEVDTDDDGVERTHRRCMSYGEYAFTPVNAGAKLSTEFQKDWFFSFYDGFQKDARVWFPYTDSMDFELPSDFRFXEINSEKYDQSREIFTTAVSPCILLVVIQXGNIQTSYEFYHPMSSARQFGMGQMPIGLYFVDKIQCRGDITSALMMDRLLNIPGPPLGSIENIELARFRSKAFDRWWGEWKLHLFHQLASMYMTD

SEQ ID NO: 188653 - protein, 1805 aa, Oryza sativa
  Clone ID: PAT_MRT4530_85236C.1.pep
MVMPMVTTRRNVNTGEGNQPEGSNPNHQGNPPPPPPPPPPPPPDTNAILTQILAQQANMMTAFLHHLQNPPQQNAPPPPPQHSKLAEFLRIRPPTFSSSNNPVDALDWLHAVGKKLDTVQCSDEEKVVFAAHQLQGPASLWWDHFQATQPEGQPITWTRFTAAFRRTHVPAGVVALKKREFRELKQGNRSVMEYLHEFNNLARYAPEDVREDEEKQEKFLAGMDPELSVRLVSGDYPDFQRLVDKSIRLEAKHKELESHKRRLANFRNQQGANQRVRYTNPYPGGSSSQQQQQQQQPRSAPRPQFVVRVPQPQQQQNQQGTRAPRPPTPTVQPVQGRRDAQGQQRLCFNCFEPGHFADKCPKPRRQQGQAPPRSNNGGKDVIRGRVNHVTAEDVLTTPDVIVELHQIELSEIPIVREFGDVFPEELPGMPPKREIEFRIDLAPGTTPLHKRPYRMAANELAEVKKQLEELKEKGYIRPSTSPWGAPVIFVEKKDKTKRMCVDYRALNEVTIKNKYPLPRIDDLFDQLKGATVFSKIDLRSGYHQLRIREEDIPKTAFTTRYGLYEFTVMSFGLTNAPAFFMNLMNKVFMEYLDKFVVVFIDDILIYSQSEEDHQHHLRLVLGKLREHQLYAKLSKCEFWLSEVKFLGHVISAKGVAVDPETVTAVTDWKQPKTVTQVRSFLGLAGYYRRFIENFSKIARPMTQLLKKEEKFVWSPQCEKAFQTLKEKLVSSPVLILPDTRKDFMVYCDASRQGLGCVLMQDGHVVAYASRQLRPHEGNYPTHDLELAAVVHALKIWRHYLIGNRCEIYTDHKSLKYIFTQSDLNLRQRRWLELIKDYDVGIHYHPGKANVVADALSRKSHCNNLNVRGIPPELSQQMEALNLNIVGRGFLAALEAKPTLLDQIREAQKNDPDMHGLLKNMKQGKAAGFTEDEHGTLWNGNRRVKAEHQRPAGLLQPLQVPEWKWDEIGMDFITGLPKTQGGYDSIWVVVDRLTKVARFIPVKTTYGGNKLAELYFARIVSLHGVPKKIVSDRGSQFTSHFWKKLQEELGTRLNFSTAYHPQTDGQTERLNQILEDMLRACVLDFGKTWDKSLPYAEFSYNNSYQASIQMAPYEALYGRKCRTPLLWDQVGESQVFGTDILREAEAKVRIIRDNLKVAQSRQKSYADNRRRDLEFAVDDFVYLRVTPLRGVHRFQTKGKLAPRYVGPFRIVARRGEVAYQLELPASLGNVHDVFHVSQLKKCLRVPSEQADSEQIEVREDLTYVERPVKILDTMERRTRNRVIRFCKVQWSNHAEEEATWEREDELKAAHPDLFATAKGGPVKKVAKKKGLVDVARVFSDDESSDGTPTSPAGRSLDLSAAPIPSLGVAGVGGSTAAGASASAERIVTAAAKVFGSPPHQPVASPLIEAKGKRAVAETSTSEYSLSVPRFAPGDFETRADLLPFVEGVSNLVLPASAPSLFTELNEFDEGCTAIKSLAVRILAAHCSMERTVRARLDGFKSHLRAKDDELGRKNLEMDALANSLKEAKAENKRLQSELEKGKEARAEVDRLKAELEKEKAHTAVLIDYYSLTEPKMEALRQEVRKAEASAAEESWRFSREIVKTTESARTACQTLRLARIDMGAKVWGVPSEDASAFDFSEWTQQAGGSVSDCATAYGDCCARVSATFTMGLLQQFGCEHIAEFPKYAKGDWEISAQDISPTLRAWRKQFWQKDGRSAAKARLLEQLAKAEAADLCEDEGAAARGGGGDARDHAEIILGRGLASAMTLATFALLDLLNTDFQHSGPINSLSKYFGGHCSCSLVRAT

SEQ ID NO: 188654 - protein, 47 aa, Oryza sativa
  Clone ID: PAT_MRT4530_85237C.1.pep
MDLSAADAVAPLAGRPTSPPVDVAAPHLQPVAALPDPCSQWASAVTL

SEQ ID NO: 188655 - protein, 1781 aa, Oryza sativa
  unsure (1)..(1781): unsure at all Xaa locations
  Clone ID: PAT_MRT4530_85238C.1.pep
MSSGTNEGYTSCGPVVEMSWHRAGVLLQGAQSCLPVPGVPAVGGIGSMYTSDQSIIYSNSRALGYGQAEQCTQMASSINRRGLDLTGFVLELRGMCVVLGYPHGVDYQGKQLPEQEGDDAEPHAAWEVTAVILTGSPERTSLAVTAGGDSFSAACQNAALLAIGTLHQRYPDELQHSPYRYHPRRGGARDYATFRDASSEDDATIMHLARMVEAYDVARIDFHQMVRRGLVENNMKILELRQENLQLKKDLDAVEAQLHQLKIAQGEVYRPKRRRVCRSLKITARKSTSRPELVRQSLAWTCFVETPRAEPAPVVPQEDGASGVGSTEDALLLTFHXTTRRSAATGEGSHLEGSNHNNHGSPPPPPPPPPPPPPDTNAILTQILAQQANMMTGFLHHIQNPPQHNAPPPPPQHSKLAEFLRIRPPTFSSSNNPVDALDWLHAVGKKLDTVQCSDEEKVIFAAHQLQGPASIWRDHFQATQPEGQPITWARFTVAFRRTHVPAGVMALKKREFREMKQGNRSVMEYLHEFNNLARYAPEDVREDEEKQEKFLAGMDPELSVRLVSGDYPDFQRLVDKSIRLEAKHKELESHKRRLANFRNQQGANQRVRYTNPYPGGSSSQQQQQQQPRSAPRPQFVVRVPXPQQQQSQQGTRAPRPPMPAVQPGQGRRDVQGQQRLCFNCFKPGHFADKCPKPRRQQGQAHPRSNNGGKDVIRGRVNHVTAEDVLTTPDVIVGTFLIHSIPATILFDSGASHSFISVPFVGRNQLGVERLRNPLLITTPGGVMTAKYYSPAVPIEIQGIPFPSDLILLDTKNLDVILGMNWLAQFQCVVDCARCTVTLYRGTEQPVVFFAPPTSVGSSELHQIRLSEIPIVREFGDVFPEELPGMPPKREIEFRIDLALGTTPLYKRPYRMAANELAKVKKQLEELKEKGYIRPSTSPWGAPVIFVEKKDKTKRMCVDYRALNEVTIKNKYPLPRIDDLFDQLKGATVFSKIDLRSRYHQLRIREEDIPKTAFTTRYGLYDFTVMSFGLTNARAFFMNLMNKVFMEYLDKFVVVFIDDILVYSQSEDDHQHHLRLVLGKLREHQLYAKLSKCEFWLSEVKFLGHVISAKGVAVDPEIVTAVTDWKQPKTVTQIRSFLGLAGYYQRFIENFSKIARPMTQLLKKEEKFVWSPQCEKAFQTLKERLVSSPVLILPDTHKDFMVYCDASRQGLGCVLMQEGHVVAYASRQLRPHEGNYPTHDLELAAVVHALKIWRHYLIGNSCEIYTDHKSLKYIFTQSDLNLRQRRWLELIKDYDVGIHYHPGKANVVADALSRKSHCNTLGVRGIPPELNQQMEALNLSIVGRGFLATLEAKPTLLDQIREAQKNDPDIRGLLKNMKQGKAAGFTEDEHGTLWNGNRRVKAEHQRPAGLLQPLQVPEWKWDEIGMDFITGLPKTQGGYDSIWVVVDRLTKVARFIPVKTTCGGNKLADLYFARIVSLHGIPKKIVSDRGSQFTSHFWKKLQEELGTRLNFSTAYHPQTDGQTEXLNQILEDMLRACVLDFGKTWDKSLPYAEFSYNNSYQASIQMAPYEALYGRKCRTPLLWDQVGESQVFGTDILREAEAKVKTIRDNLKVAQSRQKSYADNRRRNLEFAVDDFVYLRVTPLRGVHRFQTKGKLAPRFVGPFRIIARRGEVAYQLELPASLGNVHDVFHVSQLKKCLRVPSEQADSEQIEVREDLTYEERPVKILDTMERRTRNRVIRFCKVQWSNHAEEEATWERQDELKAAYPDLFASSSESRGRDSV

SEQ ID NO: 188656 - protein, 555 aa, Oryza sativa
  Clone ID: PAT_MRT4530_85239C.1.pep
MVQQQQQQQHRIYILQFRKGEQDQEVACKVSTPPKAGTGRRVMYYYHDYGGGGAGKNGKAAQPRAFSMRRFFGLLLLSFVSVGTLFVAPVSFFSFVHSDEGGGGAAAAARRAVEVAAAPCSGMGNDSLCCDRTSTRADICFARGDVRMHSASASFQLVSSSSGNATAAAVEEERIRPYTRKWEANVMATIDEVRLRRVPAGGAARCDVVHDVPAVVFSTGGYTGNVYHEFNDGILPLFVTSNHLRRRVVFVILEYHDWWMTKYGDVVSRLSAFPPIDFTADRRVHCFPEVIAGLRIHGELTVDPEKTPEGKSIRHFRTLLDDAYRGRIQYLERLERRAARSRKRRAAAAKPTTTSIALPIMAPPAKQASPSPPDRPRLVIVSRTGSRVIENEADVAALAADVGFDVRVVRPERTTELCKIYRELNASDAMVGVHGAAMTHFLFMRPGKVFVQVVPLGTDWAAGAYYGEPAARLGLRYVGYKILPEESSLSREYPTGDPVLTDPAGVGKRGWDVTKKVYLDRQNVRLDLPRFREVLVGAHRHLVAGKRRRRQRESQ

SEQ ID NO: 188657 - protein, 663 aa, Oryza sativa
  Clone ID: PAT_MRT4530_8523C.1.pep
MASTPNGLARIETHGAKTKKHENGICHDDSSAPVRAQTIDELHSLQRKRSAPTTPIKDGASSPFAAALSEEERQRQQLQSISASLASLTRETGPKVVRGDPARKGEAAAKGAPSPHPQPVHHHHPHVTPTIAVSDSSLKFTHVLYNLSPAELYEQAIKYEKGSFITSTGALATLSGAKTGRSPRDKRIVKDEASAQELWWGKGSPNIEMDEHTFLTNRERAVDYLNSLDKVFVNDQFLNWDTENRIKVRIISARAYHSLFMHNMCIRPTEEELEEFGTPDFTIYNAGQFPCNRYTHYMTSSTSVDINLARREMVILGTQYAGEMKKGLFGVMHYLMPRRGILSLHSGCNMGKQGDVALFFGLSGTGKTTLSTDHNRLLIGDDEHCWSDTGVSNIEGGCYAKCIDLSQEKEPDIWNAIKFGTVLENVVFDEHTREVDYTDKSVTENTRAAYPIEYIPNAKIPCVGPHPKNVILLACDAFGVLPPVSKLNLPQTMYHFISGYTALVAGTEDGIKEPQATFSACFGAAFIMLHPTKYAAMLAEKMQKYGATGWLVNTGWSGGRYGVGKRIRLPYTRKIIDAIHSGELLTANYKKTEVFGLEIPTEIDGVPSEILDPINTWTDKGAYKETLLKLAGLFKKNFEVFANYKIGGDSSLTDKILAAGPNF

SEQ ID NO: 188658 - protein, 996 aa, Oryza sativa
  Clone ID: PAT_MRT4530_85240C.1.pep
ANMMTAFLHHLQNPPQQNAPPPPPQHSKLAEFLRIRPPTFSSSNNPVDALDWLHAVGKKLDTVQCSDEEKVIFAAHQLQGPASLWWDHFQATQPEGQPITWARFTAAFRRTHVPAGVVALKKREFRELKQGNRSVMEYLHEFNNLARYAPEDVREDEEKQEKFLAGMDPELSVRLVSGDYPDFQRLVDKSIRLEAKHKELESHKRRLANFRNQQGANQRVRYTNPYPGGSSSQQQQQQQQPRSAPRPQFVVRVPQPQQQQNQQGTRAPRPPTQTVQPGQGRRDAQGQQRLCFNCFEPGHFADKCPKPRRQQGQAPPRPNNGGKDVIRGRVNHVMAEDVLTTPDVIVEKKDKTKRICVDYRALNEVTIKNKYPLPRIDDLFDQLKGATVFSKIDLRSGYHQLRIREEDIPKTAFTTRYGLYEFTVMSFGLTNAPAFFMNLMNKVFMEYLDKFVVVFIDDILIYSQSEEDHQHHLRLVLGKLREHQLYAKLSKCEFWLSEVKFLGHVISAKGVAVDPKTVTAVTDWKQPKTVTQVRSFLGLAGYYRRFIENFSKIARPMTQLLKKEEKFVWSPQCEKAFQTLKEKLVSSPVLILPDTRKDFMVYCDASRQGLGCVLMQDGHVVAYASRQLRPHEGSYPTHDLELAAVVHALKIWRHYLIGNRCEIYTDHKSLKYIFTQSDLNLRQRRWLELIKDYDVGIHYHPGKANVVADALSRKSHCNTLNVRGIPLELNQQMEALNLSIVSRGFLTALEAKPTLLDQIRKAQKNDPDMHGLLKNMKQGKAAGFTEDEHGTLWNGNRVCVPDNRELKQLILQEAHESPYSIHPGSTKMYLDLKEKYWWVSMKREIAEFVALCDVCQRVKAEHQRPAGLLQPLQVPEWKWDEIGMDFITGLPKTQGGYDSIWVVVDRLTKVARFIPVKTTYGGNKLAELYFARIVSLHGVPKKIISDRGSQFTSHFWKKLQEELGTRLNFSTAYHPQTDGQTERLNQILEDMLRALY

SEQ ID NO: 188659 - protein, 2016 aa, Oryza sativa
  unsure (1)..(2016): unsure at all Xaa locations
  Clone ID: PAT_MRT4530_85241C.1.pep
MEPRSPRRFPSPPAALSHSQHYLSTPRASLLRFRPLPLSLPVGIELAPSSSLSAVAAELRFAAVVAPDLLPLRHRLLRLRRVLVDLVHPFVSPADRRNAAVLVDPSRAAASLRFGRRSRHRRRPGVSRGLPSRFPLPSPLSGAAPSRRRSPPVTIGARARRLPSAVPARPPSGAPRGCHVGPGCQPPAPSGAADAWDPRRRPAQAVCTRSTVDPPRPYKDRCSGLCCKALPYFHMSSGANEGYTSCGPVVEMSWHRAGVLLLGAQSCLPVPGVPAVDGIGSMYTSDQSKIYSNSRALGYGQAEQCTQMAGSVSRRGLDMTGFVLELRGMCVVLGYPHGVDYQARPFPEQEGDDAEPHAAWEVTAVILAGSPERTSLTVTAGGDSFPAACQSAALLAIGTLHQRYPDELQHSPYRYHPRRGGARDYATFRDASSEDDATIVHLARMVEAYDAARIDFHQMVRRGMVENNMKILELRQENLQLKKDLDAVEAQLHQLKIAQGEICRPKHRRVYRSQKITARKSTSRPELVRQSLAWTCFVETPRAEPAPVVPQEGEASGVGSTEDALLXPSMVMTRRNAATSDGNQPEDSNHNNHGSPPPPPPPPPPPPPDTNAILTQILAQQANMMTAFLHHLQNPPQHNAPPPPPQHSKLAEFLRICPPTFSSSNNPVDALDWLHAVGKKLDTVQCSDEEKVIFAAHQLQGPASLWWDHFQATQPEGQPITWARFTAAFRRTHVPAGVVALKKREFRELKQGNRSVMEYLHEFNNLARYAPEDVREDEEKQEKFLAGMDPELSVCLVSGDYPDFQRLVDKSIRLEAKHKELESHKRRLANFHNQQGANQRVRYTNPYPGGSSSQQQQQQQQPRSAPRPQFVVRVPQPQQEQNQQGTRAPRPPPPTVQPGQGRRDAQGPQRLCFNCFEPGHFADKCPKPRRQQGQAPPRPNNGGKDVIRGRVNHVTAEDVLTTPDVIVGTFLIHSIPATILFDSGASHSFISVPFVGRNQLGVERLRNPLLITTPGGVMTAKYYSPAVPIEIQGIPFPSDLILLGTKNLDVILGMNWLAQFQGVVDCARRTVTLYRGPEQPVVFFAPPTSVRSSELHQIELSEIPIVREFGDVFPEELPGMPPKREIEFRIDLAPGTAPLYKRPYRMAANELAEVKKQLEELKEKGYIRPSTSPWGAPVIFVEKKDKTKRMCVDYRALNEVTIKNKYPLPRIDDLFNQLKGATVFSKIDLRSGYHQLRIREEDIPKTAFTTRYGLYEFTVMSFGLTNAPAFFMNLMNKVFMEYLDKFVVVFIDDILIYSQSEEDHQHHLRLVLGKLREHQLYAKLSKCEFWLSEVKFLGHVISAKGVAVDPETVIAVTDWKQPKTVTQVRSFLGLAGYYRRFIENFSKIARPMTQLLKKEEKFVWSPQCEKAFQTLKEKLVSSPVLILPDTHKDFMVYCDASRQGXGCVLMQDGYVVAYASRQLRPHEGNYPTHDLELAAVVHALKIWWHYLIGNRCEIYTDHKSLKYIFTQSDLNLRQRRWLELIKDYDVGIHYHPGKANVVADALSRKGHCNTLNVRGIPPELNQQMEALNLSIVSRGFLAALEAKPTLLDQIREAQKNAPDMHGLLKNMKQGKAAGFTEDEHGTLWNGNRRVKAEHQRPAGLLQPLQVPEWKWDEIGMDFITGLPKTQGGYDSIWVVVDRLTKVARFIPVKTTYRGNKLAELYFARIVSLHGVPKKIVSDRGSQFTSHFWKKLQEELGTRLNFSTAYHLQTDGQTERLNQILEDMLRACVLDFEKTWDKSLPYAEFSYNNSYQASIQMAPYEALYGRKCRTPLMWDQVGESQVFGTDILREAEAKVRTIRDNLKVARSRQKSYADNRRRDLEFAVDDFVYLRVTPLRGVHRFRTKGKLAPRYVGPFRIVARRGEVAYQLELPASLGNVHNVFHVSQLKKCLRVPSEQADSEQIEVREDLTYVERPVKILDTMERRTRNRVIRFCKDQWSNHAEEEATWEREDELKAAHPDLFASSSESRGRDSV

SEQ ID NO: 188660 - protein, 139 aa, Oryza sativa
  Clone ID: PAT_MRT4530_85242C.1.pep
MAVGSCLAAGCRGLPFCRRPPSILRKGGLTLCRGPLVKEQRGPWKHILETAPRTVLNRLSKGGKGAAYKKGGKGGLAFFAGGLLHSVKPPSLYGWQGGRLQNGMPPLLAVTCEATAVCHVIKIAPSQIRGWWATTIVNF

SEQ ID NO: 188661 - protein, 1494 aa, Oryza sativa
  Clone ID: PAT_MRT4530_85243C.1.pep
MGWKLCHVFRPYTVVMAGSVTRRGLDMTGFVLELRGMCVVLGYPHGVDYQARPLPEQEGDDAEPRAGWEVTAVILSGSPERTSLAVTAGGDSFPAACQNAALLAIGTLHQRYPDELQHSPYRYHPRRGGARDHATFRDASSEDDATVVHLARMVEAYDAARIDFHQMVRRGMVENNLKILELRQENLQLKKDLDALEAQLHQLKIAQGEDSRPKRRRVCRSQKITARKSTSRPELVRQSLAWTCFVETPRAEPAPVVPQEGEASGVGSSEVLFVSSSSLFAGSVWGFQMVTTRRNVNTGEGNQPEGSNPNSQGNPPPPPPPDTNAILTQILAQQANMMNAFLHHLQNPPQQNAPPPPPQHSKLAEFLRIRPPTFSSSNNPVDALDWLHAVGKKLDTVQCSDEEKVIFAAHQLQGPASLWWDHFQATQPEGQPITWTRFTAAFRRTHVPAGVVALKKREFRELKQGNRSVMEYLHEFNNLARYAPEDVREDEEKQEKFLAGMDPELSVRLVSGDYPDFQRLVDKSIRLEAKHKELESHKRRLANFRNQQGANQRVRYTNPYPGGSSSQQQQQQQQPRPAPRPQFVLCFNCFEPGHFADKCPKPRRQQGQAPPRSNNGGKDVIRGRVNHVTAEDVLTTPDVIVGTFLVHSIPATILFDSGASHSFISVPFVGKSQLGVERLRNPLLITTPGGVMIAKYYSPAVPIEIQGIPFPSDLILLDTKNLDVILGMNWLAQFQGVVDCVRRTVTLYRGPEQPVVFFAPPTSVRSSELHQIGLSEIPIVREFGDVFPEELPGMPPKREIEFRIDLAPGTTPLYKRPYRMAANELAEVKKQLEELKEKGYIRPSTSPWGAPVIFVEKKDKTKRMCVDYRALNEVTIKNKYPLPRIDDLFDQLKGATVFSKIDLRSGYHQLRIREEDIPKTAFTTRYGLYEFTVMSFGLTNAPAFFMNLMNKVFMEYLDKFVVVFIDDILIYSQSEEDHQHHLRLVLGKLREHQLYAKLSKCEFWLSEVKFLGHVISAKGVAVDPETVTAVTDWKQPKTVTQIRSFLGLAGYYRRFIENFSKIARPMTQLLKKEEKFVWSPQCEKAFQTLKEKLVSSPVLILPDTRKDFMVYCDASRQGLGCVLMQDGHVVAYASRQLRPHEGNYPTHDLELAAVVHALKIWRHYLIGNRCEIYTDHKSLKYIFTQSDLNLRQRRWLELIKDYDVGIHYHPGKANVVADALSRKSHCNTLNVRGIPPELNQQMEALNLSIVGRGFLAAMEAKPTLLDQIREAQKNDPDMHGLLKNMKQGKAAGFTEDEHGTLWNGKRVCVPDSRELKQLILQEAHESPYSIHPGSTKMYLDLKEKYWWVSMKREIAEFVALCDVCQRVKAEHQRPAGLLQPLQVPEWKWDEIGMDFITGLPKTQGGYDSIWVVVDRLTKVARFIPVKTTYGGNKLAELYFARIVSLHGVPKKIVSDRGSQFTSHFWKKLQEELGTRLNFSTTYHPQTDGQTERLN

SEQ ID NO: 188662 - protein, 221 aa, Oryza sativa
  Clone ID: PAT_MRT4530_85244C.1.pep
TTESSFPHQSNNVRDIEYAPGLIPNGGGPSPPIIGYNAPKTSALLQGLIREPADAAKKRNNKSSTVNISAPAKTAKTKKTTPADDLPALDPSSEQALDEEIIEDDVDEAAAEKKKTVVKKKPAAMIPKSAPPKVFLRLNNSIGYYPPRSYLPSPGLLSTRRIRMTRENPLHIVDVPGKLGKDYLPSERERVGEPVVPAALMNQPTRGESPLPFGAHSGSGH

SEQ ID NO: 188663 - protein, 1782 aa, Oryza sativa
  unsure (1)..(1782): unsure at all Xaa locations
  Clone ID: PAT_MRT4530_85245C.1.pep
MSSGTNEGYTSCGPVVEMSWHRAGVLLLGAQSCLPVPGVPAVGGIRSMYTSDQSKTYSNSRALGYGQAEQCTQMAGSVTRRGLDMTGFVLELRGMCVVLGYPHGVDYQARPLPEQEGDDAEPRAGWEVTAVILAGSSERTSLTVTAGGDSFPAACQNAALLAIGTLHQRYPDELQHSSYRYHPRRGGARDYATFRDASSEDDATVVHLARMVEAYDAARIDFHQMVRRGMVENNLKILELRQENLQLKKDLDAVEAQLHQLKIAQGEVCRPKRRRVCRSQKITARKSTSRPELVRQSLAWTCFVETPCAEPAPVVPQEGEASGVGSTEDVLLLTFHXTTRRNAVTGDGNQPEGSNHNHQGNPPPPPPPPPPPPPDTNAILTQILAQQANMMNAFLHHLQNPPQQNAPPPPPQHSKLAEFLRIRPPTFSSSNNPVDALDWLHAVGKKLDTVQCTDEEKVIFAAHQLQGPASLWWDHFQATQPEGQPITWARFTAAFRRTHVPAGVVALKKREFRELKQGNRSVLEYLHEFNNLARYAPEDVRGDEEKQEKFLAGMDPELSVRLVSGDYPDFQRLVDKSIRLEAKHKELESHKRRLANFRNQQGANQRVRYTNPYPGGSSSQQQQQQQQPRPAPRPQFVVRVPQPQQQQNQQGTRAPRPPTPTVPPGQGRRDAQGQQRLCFNCFEPGHFADKCPKPRRQQGQAPPRSNNGGKDVIRGRVNHVTAEDVLTTPDVIVGTFLVHSIPATILFDSGASHSFISVPFVGRNQLGVERLRNPLLITTPGGVMTAKYYSPAVPIEIQGIPFPSDLILLDTKNLDVILGMNWLAQFQGVVDCARRTVTLYRGPEQPVVFFAPPTSVRSSELHQIGLSEIPIVREFGDVFPEELPGMPPKREIEFRIDLAPGTTPLYKRPYRMAANELAEVKKQLEELKEKGYIRPSTSPWGAPVIFVEKKDKTKRMCVDYRALNEVTIKNKYPLPRIDDLFDQLKGATVFSKIDLRSGYHQLRIREEDIPKTAFTTRYGLYEFTVMSFGLTNAPAFFMNLMNKVFMEYLDKFVVVFIDDILIYSQSEEDHQHHLRLVLGKLREHQLYAKLSKCEFWLSEVKFLGHVISAKGVAVDPETVTAVTDWKQPKTVTQVRSFLGLAGYYRRFIENFSRIARPMTRLLKKEEKFVWSPQCEKAFQTLKEKLVSSPVLILPDTRKDFMVYCDASRQGLGCVLMQDGHVVAYASRQLRPYEGNYPTHDLELAAVVHALKIWRHYLIGNRCEIYTDHKSLKYIFTQSDLNLRQRRWLELIKDYDVGIHYHPGKANVVADALSRKSHCNTLNVRGIPPALNQQMEALNLSIVGRGFLAALEAKPNLLDQIREAXKNDPDMHGLLKKMKQGKAAGFTEDEHGTLWNGKRRVKAEHQRPAGLLQPLQVPEWKWDEIGMDFITGLPKTQGGYDSIWVVVDRLTKVARFIPVKTTYGGNKLAELYFARIVSLHGVPKKIVSDRGSQFTSHFWKKLQEELGTRLNFSTAYHPQTDGQTERLNQILEDMLRACVLDFGKTWDKSLPYAEFSYNNSYQSSIQMAPYEALYGRKCRTPLLWDQVGESQVFGTDILREAEAKVRIIRDNLKVAQSRQKSYADNRRRDLEFAVDDFVYLRVTPLRGVHRFQTKGKLAPRYVGPFRIVARRGEVAYQLELPASLGNVHDVFHVSQLKKCLRVPSEQADSEQIEVREDLTYVERPVKILDTMERRTRNRVIRFCKVQWSNHAEEEATWEREDELKAAHPDLFASSSESRGRDSV

SEQ ID NO: 188664 - protein, 1734 aa, Oryza sativa
  unsure (1)..(1734): unsure at all Xaa locations
  Clone ID: PAT_MRT4530_85246C.1.pep
MYTSDQSKTYSNSRALGYGQAEQCTQMAGSVTRRGLDMTGFVLELRGMCVVLGYPHGVDYQARPLPEQEGEDAEPHAGWEVTAVILSGSPERTSLAVTAGGDSFPAACQNAALLAIGTLHQRYPDELQHSPYRYHPRRGGARDYATFRDASSEDDATVVHLARMVEAYDAARIDFHQMVRRGMVENNLKILELRQENLQLKKDLDALEAQLHQLKIAQGEDSRPKRRRVCRSQKITARKSTSRPELVRQSLAWTCFVETPRAEPAPVVPQEGEASGVGSSEGALLLTFHXTTRRNVNTGEGNQPEGSNPNHQGNPPPPPPPPPPPPPDTNAILTQILAQQANMMNAFLHHLQNPPQQNAPPPPPQHSKLAEFLRIRPPTFSSSNNPVDALDWLHAVGKKLDTVQCSDEEKVVFAAHQLQGPASLWWDHFQAAQPEGQPITWARFTAAFRRTHVPAGVVALKKREFRELKQGNRSVMEYLHEFNNLARYAPEDVREDEEKQEKFLAGMDPELSVRLVSGDYPDFQRLVDKSIRLEAKHKELESHKRRLANFRSQQGANQRVRYTNPYPGGSSSQQQQQQQPRPAPRPQFVVRVPQPQQQQNQQGTRAPRPPTPAVQPGQGRRDAQGQQRLCFNCFEPGHFADKCPKPRRQQGQAPPRSNNGGKDVIRGRVNHVTAEDVLTTPDVIVGTFLVHSIPATILFDSGASHSFISVPFVGRNQLGVERLRNPLLITTPGGVMTAKYYSPAVPIEIQGIPFPSDLILLDTKNLDVILGMDWLAQFQGVVDCARRTVTLYRGPEQPVVFFAPPTSVRSSELHQIGLSEIPIVREFGDVFPEELPGMPPKREIEFRIDLVPGTTPLHKRPYRMAANELAEVKKQLEELKEKGYIRPSTSPWGAPVIFVEKKDKTKRMCVDYRALNEVTIKNKYPLPRIDDLFDQLKGATVFSKIDLRSGYHQLRIREEDIPKTAFTTRYGLYEFTVMSFGLTNAPAFFMNLMNKVFMEYLDKFVVVFIDDILIYSQSEEDHQHHLRLVLGKLREHQLYAKLSKCEFWLSEVKFLGHVISAKGVAVDPETVTAVTDWKQPKTVTQIRSFLGLAGYYRRFIENFSKIARPMTQLLKKEEKFVWSPQCEKAFQTLKEKLVSSPVLILPDTRKDFMVYCDASRQGLGCVLMQDGHVVAYASRQLRPHEGNYPTHDLELAAVVHALKIWRHYLIGNRCEIYTDHKSLKYIFTQSDLNLRQRRWLELIKDYDVGIHYHPGKANVVADALSRKGHCNALNVRSIPPELNQQMEALNLSIVGRGFLAALEAKPTLLDQIREAQKNDPDMHGLLKNMKQGKAAGFTEDEHGTLWNGKRRVKAEHQRPAGLLQPLQVPEWKWDEIGMDFITGLPKTQGGYDSIWVIVDRLTKVARFIPVKTTYGGNKLAELYFARIVSLHGVPKKIVSDRGSQFTSHFWKKLQEELGTRLNFSTAYHPQTDGQTERLNQILEDMLRACVLDFGKTWDKSLPYAEFSYNNSYQASIQMAPYEALYGRKCRTPLLWDQVGESQVFGTDILREAEAKVRIIRDNLKVAQSRQKSYADNRRRDLEFAVDDFVYLRVTPLRGVHRFRTKGKLAPRYVGPFRITARRGEVAYQLELPASLGNVHDVFHVSQLKKCLRVPSEQADSEQIEVREDLTYVERPVKILDAMERRTRNRVIRFCKVQWSNHAEEEATWEREDELKAAHPDLFASSSESRGRDSV

SEQ ID NO: 188665 - protein, 55 aa, Oryza sativa
  Clone ID: PAT_MRT4530_85247C.1.pep
IHPQLPTNTPLPFTDYFHPQKNSDELPTNTLFILLHWQALLTLQHLNNFSFGGEG

SEQ ID NO: 188666 - protein, 1796 aa, Oryza sativa
  Clone ID: PAT_MRT4530_85248C.1.pep
MDEVGGRWTFSRANEGYTSCGPMAGSVTRRGLDMTGFVLELRGMCVVLGYPHGVDYQARPLPEQEGDDTEPRAGWEVTAVILAGSSERTSLTVTAGGDSFPAACQNAALLAIGTLHQRYPDELQHSPYRYHPRRGGARDYATFWDASSEDDATIVHLARMVEAYDAARIDFHQMVRRGMVENNMKILELRQENLQLKKDLDAVEAQLHQLKIAQGEICRPKRRRVCRSQKITARKSTSRPELVRQSLAWTCFVETPRAEPAPVVPQEGEASGVGSSEALSLLAGSVWGFQMVTTRRNAVTGDGNQPEGSNPNHQGNPPPPPPPPPPPPPDTNAILTQILAQQANMMNAFLHHLQNPPQQNAPPPPPQHSKLAEFLRIRPPTFSSSNNPVDALDWLHAVGKKLDTVQCSDEEKVVFAAHQLQGPASLWWDHFQATQPKGQPITWARFTAAFRRTHVPAGVVALKKREFRELKQGNRSVMEYLHEFNNLARYAPEDVREDEEKQEKFLAGMDPELSVRLVSGDYPDFQRLVDKSICLEAKHKELESHKRRLANFRNQQGANQRVRYTNPYPGGSSSQQQQQQQQPRPAPRPQFVVRVPQPQQQQNQQGTRAPRPPTPTVQPGQGRRDAQGQQRLCFNCFEPGHFADKCPKPRRQQGQAPPRSNNGGKDVIRGRVNHVTAEDVLTTPDVIVGTFLVHSIPATILFDSGASHSFISVPFVGKNQLGVERLRNPLLITTPGGVMTAKYYSPAVPIEIQGIPFPSDLILLDTKNLDVILGMNWLAQFQGVVDCARRTVTLYRGPEQPVVFFAPPTSVRSSELHQIELSEIPIVREFGDVFPEELPGMPPKREIEFRIDLAPGTTPLHKRPYRMAANELAEVKKQLEELKEKGYIRPSTSPWGAPVIFVEKKDKTKRMCVDYRALNEVTIKNKYPLPRIDDLFDQLKGATVFSKIDLRSGYHQLRIREEDIPKTAFTTRYGLYEFTVMSFGLTNAPAFFMNLMNKVFMEYLDKFVVVFIDDILIYSQSEEDHQHHLRLVLGKLREHQLYAKLSKCEFWLSEVKFLGHVISAKGVAVDPETVTAVTDWKQPKTVTQVRSFLGLAGYYRRFIENFSKIARPMTQLLKKEEKFVWSPQCEKAFQTLKEKLVSSPVLILPDTRKDFMVYCDASRQGLGCVLMQDGHVVAYASRQLRPHEGNYPTHDLELAAVVHALKIWRHYLIGNRCEIYTDHKSLKYIFTQSDLNLRQRRWLELIKDYDVGIHYHPGKANVVADALSRKSHCNTLNVRGIPPELNQQMEALNLSIVGRGFLAALEAKPTLLDQIREAQKNDPDMHGLLKNMKQGKAAGFAEDEHGTLWNGNRVCVPDNRELKQLILQEAHESPYSIHPGSTKMYLDLKEKYWWVSMKREIAEFVALCDVCQRVKAEHQRPAGLLQPLQVPEWKWDEIGMDFITGLPKTQGGYDSIWVVVDRLTKVARFIPVKTTYGGNKLAELYFARIVSLHGVPKKIVSDRGSQFTSHFWKKLQEELGTRLNFSTAYHPQTDGQTERLNQILEDMLRACVLDFGKTWDKSLPYAEFSYNNSYQASIQMAPYEALYGRKCRTPLLWDQVGESQVFGTDILREAEAKVRIIRDNLKVAQSRQKSYADNRRRNLEFAVDDFVYLRVTPLRGVHRFQTKGKLAPRYVGPFRIIARRGEVAYQLELPASLGNVHDVFHVSQLKKCLRVPSEQTDSEQIKVREDLTYVERPVKILDTMERRTRNRVIRFCKVQWSNHAEEEATWEREDELKAAHPDLFASSSESRGRDSV

SEQ ID NO: 188667 - protein, 132 aa, Oryza sativa
  Clone ID: PAT_MRT4530_85249C.1.pep
SPSPPPCARAHRRDRSIDRPLLSSYGRTIGRIGCARGGPVPQRACVLVWRATRWARLGGGGESAGLALDGCVIGAARLLLRARPVRPSVSSLAAAVAGGVVQGWWWRPPRGVRKGSPKSAASRVSASERIRS

SEQ ID NO: 188668 - protein, 187 aa, Oryza sativa
  Clone ID: PAT_MRT4530_8524C.1.pep
ARGPDQVNDQPPTRPGQTHATRRDAAQLNDKLNPSIPLSQSYRLASSPSLSISPQRWLRLRLRLLSPYSSSSSSSSASPRSPRRRGRTSRRGSRPPGRRPSPRRRRSPRRLRPPARLRPPRRRRRRRRRGSGATSPWPLTSRCTRPAPAPPRPSLWPPPRRTRGHRRRRRSPPSARYPARPHLRHQP

SEQ ID NO: 188669 - protein, 133 aa, Oryza sativa
  Clone ID: PAT_MRT4530_85250C.1.pep
SPPAAPVRPASPPTDALRDPHGLADRHQLVIFWWQYCLHSINFGLILHRSPPDLRRGRRFPTSNGEQPALDPAGVVSATAAGNFSSGQIDGALAAGFRWGQVCPPRPNTAKRSQMWASAGRVSPSGYNNGCQR

SEQ ID NO: 188670 - protein, 213 aa, Oryza sativa
  Clone ID: PAT_MRT4530_85251C.1.pep
MGEIGAEVVYLARPMEGGVGAAGEEPIGVEEGEQGSAMANRGGRANRKEGEDELRGWLMLLATLTASITYAAALNPPGGVWQADDAAKDFVAGYPVLLDKSPWRYYVFYYCNATSFASSVCIIVLLATNFYLSHTSVMVFNVLVALDMASLGAAFVAGSSSSKRFTAFNAGLMVCLVVLFLLWKLKFLMGNDQAGQNPASGGVANLQHGNSAL

SEQ ID NO: 188671 - protein, 62 aa, Oryza sativa
  unsure (1)..(62): unsure at all Xaa locations
  Clone ID: PAT_MRT4530_85252C.1.pep
TRVHSFMKEKYSVLCYALFTGGHYQCRIKVXHVIRKILFSSIYTPPLLCMAHCVSALSTCLN

SEQ ID NO: 188672 - protein, 602 aa, Oryza sativa
  unsure (1)..(602): unsure at all Xaa locations
  Clone ID: PAT_MRT4530_85253C.1.pep
MAKNGGAHGAATLFGLLALASMVKLGFVAGGGHDYAMALRKSILYFQAQRSGVLPPNQRVSWRASSGLFDGKANGVDLVGGYYDAGDNVKFGLPMAFTVTMMSWSILEYGKQMAAAGELRNAMDAVKWGTDYFIKAHPEPDVLYGEVGDGDTDHSCWQRPEDMTTSRQAFRVDPQHPGSDLAAETAAGHGRRVHRLPRHLFEFADKYRGKYDASITVARNYYGSFSGYGDELLWAAAWLFEATEDRSYLEYLAGNGEALGGTGWSINQFGWDVKYPGVQVLAAKFLLQGRAGDHAAALQRYRQNAEFFVCSCVGKGAVNVARTPGGMMYHQRWNNLQFVTSASFLLTVYADFAAISGRGAVHCPAGAAQPFDILKFVKSQVNYILGDNPRGTSYMVGYGASYPRQXPSFVSCQEGYSSWYGREAGNPNXLDGAVVGGPDEYDDFADERDNYEQTEAATYNNAPLLGVLARLAASCGGLKEEEYEQETATPVVNRTSSSSSLPATATAIGIEQNVTGTWARRRRTYYRYAVTVTNRSRGKTVRELHLGVSGLRGRLWGLEEARYGYVPPRWLPALRPGRSLRFVYVQPAPAPANIWVTGYKLV

SEQ ID NO: 188673 - protein, 92 aa, Oryza sativa
  unsure (1)..(92): unsure at all Xaa locations
  Clone ID: PAT_MRT4530_85254C.1.pep
MDEAAAAAHGAHGRVSEYGWRALELCNFSPSLLCFSRXRGGGSERSVILVVGIMVVQPRPPANSEKARATGNGDARWKACEQRGRRRQGHPL

SEQ ID NO: 188674 - protein, 629 aa, Oryza sativa
  Clone ID: PAT_MRT4530_85255C.1.pep
MAKNGGAHGAATLFGLLALASMVKLGFVAGGGHDYAMALRKSILYFQAQRSGVLPPNQRVSWRASSGLFDGKANGVDLVGGYYDAGDNVKFGLPMAFTVTMMSWSILEYGKQMAAAGELRNAMDAVKWGTDYFIKAHPEPDVLYGEVGDGDTDHSCWQRPEDMTTSRQAFRVDPQHPGSDLAAETAAAMAAASIVFRGTYPGYANLLLVHSKQLFEFADKYRGKYDASITVARNYYGSFSGYGDELLWAAAWLFEATEDRSYLEYLAGNGEALGGTGWSINQFGWDVKYPGVQVLAAKFLLQGRAGDHAAALQRYRQNAEFFVCSCVGKGAVNVARTPGGMMYHQRWNNLQFVTSASFLLTVYADFAAISGRGAVHCPAGAAQPFDILKFVKSQVNYILGDNPRGTSYMVGYGASYPRQVHHRGASIVSIKRDPSFVSCQEGYSSWYGREAGNPNLLDGAVVGGPDEYDDFADERDNYEQTEAATYNNAPLLGVLARLAASCGGLKEEEYEQETATPVVNRTSSSSSLPATATAIGIEQNVTGTWARRRRTYYRYAVTVTNRSRGKTVRELHLGVSGLRGRLWGLEEARYGYVPPRWLPALRPGRSLRFVYVQPAPAPANIWVTGYKLV

SEQ ID NO: 188675 - protein, 114 aa, Oryza sativa
  unsure (1)..(114): unsure at all Xaa locations
  Clone ID: PAT_MRT4530_85256C.1.pep
VDSLRAASLWNRSFDYAVRLLARSLFTIVARIAQVFGLEPKNVATMDDDAMISLATTRLSWTNSFVGSVHSLVYPSDFAADTHTPRRSLLDAKSGKVFNGGEHVRRFLCXQEPE

SEQ ID NO: 188676 - protein, 297 aa, Oryza sativa
  unsure (1)..(297): unsure at all Xaa locations
  Clone ID: PAT_MRT4530_85257C.1.pep
LLLKRKRDLLRHQGQSTINRVHRSGPRNQRPRSXDLKLTESDGRDRSGLPRSTADXGTAIDNDIITGGGPAPHARQRTMARRRKRRAPRRRARLNELIGGSDDGGGELRVGGDGGPPAVYDGNGGRDGDGGDLANPMVXSRATTTTGAPAAHSRTSFGFGGARALVAKVLRATASXGEGGGGGLRGGGXAHGDRRXKERARVLEREAXPNRHRIRXISKRISSGLQKRKGRGDRGDYFPSIDSAGEGTSRWAPPVSGRQRXREGLGRARAGRGKGRERELGRLSAQXEKKILKPFSI

SEQ ID NO: 188677 - protein, 303 aa, Oryza sativa
  Clone ID: PAT_MRT4530_85258C.1.pep
MAESALCHTAKANRSVELAASAPSPTAKAASVVSPWMGLNLLLRLSSALIANRTREQLVEGARGGGRSPWRGGGEVRAVEGEGEGEDGGDGGDGEQAGGESAGGRRVASASASLFFFFLLGLLLRVRRNEGAVESDGRPVTMGEARGTMVVRTAEEERVDSVKNPAHECTTVRGRESARRKCVGDAGERGGKSETQDGGCGVISPFQVRGGEEGERWGNLRRWIGIDNCSSFSLVEGQKQKRGKMGAVLRVNDIMSCCPAKSTTIHSMRSWSMSLVQLDEVGFVGSSSSSFLLLGFGLIWFTL

SEQ ID NO: 188678 - protein, 67 aa, Oryza sativa
  Clone ID: PAT_MRT4530_85259C.1.pep
KFSGRKLETDLCIFFLNFDSFLFSFHAVMTCVFELYNFVRALFLNLIYSLWTEVVFCIMWEAMAQDT

SEQ ID NO: 188679 - protein, 42 aa, Oryza sativa
  Clone ID: PAT_MRT4530_8525C.1.pep
FWFFFFFWFFFFFFFLGNNSHSNFKSTLGPGSHRPLTHLKDF

SEQ ID NO: 188680 - protein, 189 aa, Oryza sativa
  unsure (1)..(189): unsure at all Xaa locations
  Clone ID: PAT_MRT4530_85260C.1.pep
MSRYRGPRFKKIRRLGALPGLTRKTPKSGSNLKKKFHSGKKEQYXYGLTERQLLRYVHIAGKAKSSTGQVLLQLLEMRLDNILFRLGMASTIPEARQLVNHRHILVNGRIVDIPSFRCKPRDIITTKDNQRSKRLVQNSIASSDPGKLPKHLTIDTLQYKGLVKKILDRKWVGLKINELLVVEYYSRQT

SEQ ID NO: 188681 - protein, 201 aa, Oryza sativa
  Clone ID: PAT_MRT4530_85261C.1.pep
MSRYRGPRFKKIRRLGALPGLTRKTPKSGSNLKKKFHSGKKEQYRIRLQEKQKLRFHYGLTERQLLRYVHIAGKAKSSTGQVLLQLLEMRLDNILFRLGMASTIPKARQLVNHRHILVNGRIVDIPSFRCKPRDIITTKDNQRSKRLVQNSIASSDPGKLPKHLTIDTLQYKGLVKKILDRKWVGLKINELLVVEYYSRQT

SEQ ID NO: 188682 - protein, 1790 aa, Oryza sativa
  Clone ID: PAT_MRT4530_85262C.1.pep
MDEVGRRWTFSRANEGYTSCGPMAGSVTRRGLDMTGFVLELRGMCVVLGYPHGVDYQARPLPEQEGEDAEPRAGWEVTAVILAGSSERTSLTVTAGGDSFPAACQNAALLAIGTLHQRYPDELQHSPYRYHPRRGGARDYATFRDASSEDDATVVHLARMVEAYDAARIDFHQMVRRGMVENNMKILELRQENLQLKKDLDALEAQLHQLKIAQGEDSRPKRRRVCRSQKITARKSTSRPELVRQSLAWTCFVETPRAEPAPVVPQEGEASGVGSSEVVWGMVTPMVTTRRNVNTGEGNQPEGSNHNHQGNPPPPPPPPPPPPPDTNAILTQILAQQANLMNAFLHHLQNPPQQNAPPPPPQHSKLAEFLRIRPPTFSSSNNPVDALDWLHAVGKKLDTVQCSDKEKVVFAAHQLQGPASLWWDHFQATQPEGQPITWARFTAAFRKTHVPAGVVALKKREFRELKQGNRSVMEYLHEFNNLARYAPEDVREDEEKQEKFLAGMDPELSVRLVSGDYPDFQRLVDKSIRLEAKHKELESHKRRLANFRNQQGANQRVRYTNPYPGGSSSQQQQQQQPRPAPRPQFVVRVPQPQQQQNQQGTRAPRPPTPAVQPVQGRRDAQGQQRLCFNCFEPGHFADKCPKPRRQQGQAPPRSNNGGKDVIRGRVNHVTAEDVLTTPDVIVGTFLVHSIPATILFDSGASHSFISVPFVGRNQLGVERLRNPLLITTPGGVMTAKYYSPAVPIEIQGIPFPSDLILLDTKNLDVILGMNWLAQFQGVVDCARRTVTLYRGPEQPVVFFAPPTSARSSELHQIELSEIPIVREFGDVFPEELPGMPPKREIEFRIDLAPGTTPLYKRPYRMAANELAEVKKQLEELKEKGYIRPSTSPWGAPVIFVEKKDKTKRMCVDYRALNEVTIKNKYPLPRIDDLFDQLKGATVFSKIDLRSGYHQLRIREEDIPKTAFTTRYGLYEFTVMSFGLTNAPAFFMNLMNKVFMEYLDKFVVVFIDDILIYSQSEEDHQHHLRLVLGKLREHQLYAKLSKCEFWLSEVKFLGHVISAKGVAVDPETVIAVTDWKQPKTVTQIRSFLGLAGYYRRFIENFSKIARPMTQLLKKEEKFVWSPQCEKAFQTLKEKLVSSPVLILPDTRKDFMVYCDASRQGLGCVLMQDGHVVAYASRQLRPHEGNYPTHDLELAAVVHALKIWRHYLIGNRCEIYTDHKSLKYIFTQSDLNLRQRRWLELIKDYDVGIHYHPGKANVVADALSRKSHCNTLNVRGIPPELNQQMEALNLSMVGRGFLAALEAKPTLLDQIREAQKNDPDMHGLLKNMKQGKAAGFTEDEHGTLWNGKRVCVPDSRELKQLILQEAHESPYSIHPGSTKMYLDLKEKYWWVSMKREIAEFVALCDVCQRVKAEHQRPAGLLQPLQVPEWKWDEIGMDFITGLPKTQGGYDSIWVIVDRLTKVARFIPVKTTYGGNKLAELYFARIVSLHGIPKKIVSDRGSQFTSHFWKKLQEELGTRLNFSTAYHPQTDGQTERLNQILEDMLRACVLDFGKTWDKSLPYAEFSYNNSYQASIQMAPYEALYGRKCRTPLLWDQVGESQVFGTDILREAEAKVRIIRDNLKVAQSRQKSYADNRRRDLEFAVDDFVYLRVTPLRGVHRFQTKGKLAPRYVGPFRITARRGEVAYQLELPASLGNVHDVFHVSQLKKCLRVPSEQADSEQIEVREDLTYVERPVKILNTMERRTRNRVIRFCKVQWSNHAEGEATWEREDELKAAHPDLFASSSESRGRDSV

SEQ ID NO: 188683 - protein, 128 aa, Oryza sativa
  unsure (1)..(128): unsure at all Xaa locations
  Clone ID: PAT_MRT4530_85263C.1.pep
READRLTLGSXRHXDVGRRSIVRLAFHGAAASFVLHRTSVARMAHSAHLRATAEGQKRTRLLVNPPSHRKKKEKKNQXPAWLPAALLRLAAFLDAGVGVLDNDGFYGGGGGGGAKLAKSGRRRRRRRA

SEQ ID NO: 188684 - protein, 1736 aa, Oryza sativa
  unsure (1)..(1736): unsure at all Xaa locations
  Clone ID: PAT_MRT4530_85264C.1.pep
MYTSDQSKTYSNSRALGYGQAEQCTQMAGSVTRRGLDMTGFVLELRGMCVVLGYPHGVDYQARPLPDQEGDDAEPPAAWEVTAVILSGSPERTSLAVTAGGDSFPAACQNAALLAIGTLHQRYPDELQHSPYRYHPRRGGARDYATFRDASSEDDATIVHLARMVEAYDAARIDFHQMVRRGMVENNLKILELRQENLQLKKDLDAVETQLHQLKIAQGEICRPKRRRVCRSQKITARKSTSRPELVRQSLAWTCFVETPRAEPAPVVPQEGEASGVGSTEDALLLTFHXMTRRNAATGDGNQPEGSNHNHQGNPPPPPPPPPPPPPDTNAILTQILAQQANMMTAFLHHLQNPPQLNAPPPPPQHSKLAEFLRIRPPTFFSSNNPVDALDWLHAVGKKLDTVQCSDEEKVIFAAHQLQGPASLWWDHFQATQPEGQPITWARFTAAFRRTHVPAGVVALKKREFRELKQGNRSVMEYLHEFNNLARYAPEDVREDEEKQEKFLAGMDPELSVRLVSGDYPDFQRLVDKSIRLEAKHKELESHKRRLANFRNQQGANQRVRYTNPYPGGSSSQQQPQQQQQPRSAPRPQFVVRIPQPQQQQNQQGTRAPRPPTPTVQPGQGRRDAQGQQRLCFNCFEPGHFADKCPKPRRQQGQAPPRSNNGGKDVIRGRVNHVTAEDVLTTPDVIVGTFLVHSIPATILFDSGASHSFISVPFVGRNQLGVERLRNPLLITTPGGVMTAKYYSPAVPIEIQGIPFPSDLILLDTKNLDVILGMNWLAQFQGVVDCARRTVTLYRGPEQPVVFFAPPTSVRSSELHQIGLSEIPIVREFGDVFPEELPGMPPKREIEFRIDLAPGTTPLHKRPYRMAANELAEVKKQLEELKEKGYIRPSTSPWGAPVIFVEKKDKTKRMCVDYRALNEVTIKNKYPLPRIDDLFDQLKGATVFSKIDLRSGYHQLRIREEDIPKTAFTTRYGLYEFTVMSFGLTNAPAFFMNLMNKVFMEYLDKFVVVFIDDILIYSQSEEDHQHHLRLVLGKLREHQLYAKLSKCEFWLSEVKFLGHVISAKGVAVDPETVTAVTDWKQPKTVTQVRSFLGLAGYYRRFIENFSKIARPMTQLLKKEEKFVWSPQCEKAFQTLKEKLVSSPVLILPDTRKDFMVYCDASRQGLGCVLMQDGHVVAYASRQLRPHEGNYPTHDLEVAAVVHALKIWRHYLIGNRCEIYTDHKSLKYIFTQSDLNLRQRRWLELIKDYDVGIHYHPGKANVVADALSRKSHCNTLNVRGIPPELNQQMEALNLSIVSRGFLAALEAKPTLLDQIREAQKNDPDMHGLLKNMKQGKAAGFTEDEHGTLWNGKRRVKAEHQRPAGLLQPLQVPEWKWDEIGMDFITGLPKTQGGYDSIWVVVDRLTKVARFIPVKTTYGGNKLAELYFARIVSLHGVPKKIVSDRGSQFTSHFWKKLQEELGTRLNFSTAYHPQTDGQTERLNQILEDMLRACVLYFGKTWDKSLPYAEFSYNNSYQASIQMAPYEALYGRKCRTPLLWDQVGESQVFGTDILREAEAKVRIIRDNLKVAQSRQKSYADNRRRDLEFAVDDFVYLRVTPLRGIHRFQTKGKLAPRYVGPFRIIARRGEVAYQLELPASLGNVHDVFHVSQLKKCLRVPSEQADSGQIEVREDLTYVERPVKILDTMERRTRNRVIRFCKVQWSNHAEEEATWEREDELKAAHPDLFASSSESRGRDSV

SEQ ID NO: 188685 - protein, 1521 aa, Oryza sativa
  Clone ID: PAT_MRT4530_85265C.1.pep
MDEVVATMDISEANEGYASCGSMYTSDQSKSIRIAEPSDMGKPSNVGLGWLGTSWDPASGCQNAALLAIGTLHQRYPDELQHSPYRYHPRRGGARDYAIFRDASSEDDATIMHLARMVEAYDATRIDFHQMVRRGLVENSMKILELRQENLQLKKDLDAVEAQLHQLKIAQGEMVTTRRSAATGEGSHPEGSNHNNHGSPPPPPPPLPPPPPDTNAILTQILAQQANMMAAFLHHIQNPPQHNAPPPPPQHSKLAEFLRIRPPTFSSSNNPVDALDWLHAVGKKLDIVQCSDEEKVIFAAHQLQGPASLWWDHFQATQLEGQPITWARFTTSFRRTHVPAGVMALKKREFRELKQGNRSVMEYLHEFNNLAWYAPEDVREDEEKQEKFLAGMDPELSVRLVSGDYPDFQRLVDKSIRLEAKQKELESHKRRLANFRNQRGANQRVRYTNPYPGGSSSQQQQQQQPRSAPRPQFVVRVPQPQQQQSQQGTRAPRPPTPALQPGQGHRDAQGQQRLCFNYFEPGHFAAKCPKTRRQQGQAPPRSNNGGKDVIRGRVNHVTAEDVLTTPDIIVGVVYCARRTVTLYRGPEQPVVFFAPPTSVGSSELHQIRLSEIPIVREFGDVFPEELPGMPPKREIEFRIDLAPGTTPLYKHPYRMAANELAEVKKQLEELKEKGYIRPSTSPWGAPVIFVEKKDKTKRRCVDYRALNEVTIKNKYPLPRIDDLFDQLKGATFVVVFIDDILVYSQSEEDHQHHLRLVLGKLRQHQLYAKLSKCEFWLSEVKFLGHVISAKGVAVDPETVTAVTDWKQPKTVTQIRSFLGLAGYYRRFIENFSKIARPMTQLLKKEEKFVWSPQCEKAFQTLKEKLVSSPVLILPDTRKDFMVYCDASRQGLGCVLMQEGHVVAYASRQLRPHEGNYPTHDLELAAVVHALKIWRHYLIGNRCEIYTDHKSLKYIFTQSDLNLRQRRWLELIKDYDVGIHYHPGKANVVADALSRKSHCNTLEVRGIPPELNQQMEALNLSIVGRRFLATLEAKPTLLDQIREAQKNDPDMRELLKNMKQGKAAGFTEDEHGTLWNGNRICVPDDRELKQLILQEAHESPYSIHPGSTKMYLDLKGKYWWVSMKREIAEFVALCDVCQHVKAEHQRPAELLQPLQVPEWKWDEIGMDFITGLPKTQGGYDSIWVVVDRLTKVARFIPVKTTYGGNKLAELYFARIVSLHGVPKKIVSDRGSQFTSHFWKKLQEELGTRLNFSTAYHPQTDGQTERLNQILKDMLRACVLDFGKTWDKSLPYAEFSYNNSYQASIQMAPYEALYGRKCRTPLLWDQVGESQVFGTDILREAEAKVRTIRDNLKVAQSRQKSYADNRRRDLEFAVDDFVYLRVTPLRGVHRFQTKGKLAPRYVGPFRIIARRGGVAYQLELPASLGNVHDVFHVSQLKKCLRVPSEQADSEQIEVREDLTYVERPVKILDTMERRTRNRVIRFCKVQWNNHAEEEATWKREDELKAAHPDLFASSSESRGRDSV

SEQ ID NO: 188686 - protein, 1473 aa, Oryza sativa
  Clone ID: PAT_MRT4530_85266C.1.pep
MTRRSANTGDGNQPEGSNHHHQGSPPPPPPPPPPPPPDTNAILTQILAQQANMMTAFLHHLQNPPQQNAPPPPPQHSKLAEFLRIRPPTFSSSNNPVDALDWLHAVGKKLDTVQCSDEEKVIFAAHQLQGPASLWWDHFQATQPEGQPITWARFTAAFRRTHVPAGVVALKKREFRELKQGNRSVMEYLHEFNNLARYAPEDVREDEEKQEKFLAGMDPELSVRLVSGDYPDFQRLVDKSIRLEAKHKELESHKRRLANFRNQQGANQRVRYTNPYPGGSSSQQQQQQQQPRSAPRPQFVVRVPQPPQQQSQQGTRAPRPPTPTVQPGQGRRDAQGPQRLCFNCFEPGHIADKCPKPRRQQGQAPPRPNNGGKDVIRGRVNHVTAEDMLTTPDVIVGTFLIHSIPATILFDSGASHSFISVPFVGRNQLGVERLRNPLLITTPGGVMTAKYYSPAVPIEIQGIPFPSDLILLDTKNLDVILGMNWLAQFQGVVDCARRTVTLYRGPEQPVVFFAPPTSVKSSELHQIGLSEIPIVREFGDVFPEELPGMPPKREIEFRIDLAPGTTPLYKRPYRMVANELAEVKKQLEELKEKGYIRPSTSPWGAPVIFVEKKDKTKRMCVDYRALNEVTIKNKYPLPRIDDLFDQLKGATVFSKIDLRSGYHQLRIREEDIPKTACTTRYGLYEFTVMSFGLTNAPAFFMNLMNKVFMEYLDKFVVVFIDDILIYSQSEEDHQHHLRLVLGKLREHQLYAKLSKCEFWLSEVKFLGHVISAKGVAVDPETVTAITDWKQPKTVTQVRSFLGLAGYYRRFIENFSKIARPMTQLLKKEEKFVWSPQCEKAFQTLKEKLVSSPVLILPDTHKDFMVYCDASRQGLGCVLMQDGHVVAYASRQLRPHEGNYPTHDLELAAVSDLNLRQRRWLELIKDYDVGIHYHPGKANVVADALSRKSHCNTLNIRGIPPELSQQMEALNLSIVSRGFLAALEAKPTLLDQIREAQKNDPDMHGLLKNMKQGKAVGFTEDEHGTLWNGNRVCVPDNGELKQLILQEAHESPYSIHPGSTKMYLDLKEKYWWVSMKREIAEFVALCDVCQRVKAEHQRPAGLLQPLQVPEWKWDEIGMDFITGLPKTQGGYDSIWVVVDRLTKVARFIPVKTTYGGNKLAELYFARIVSLHGVPKKIVSDRGSQFTSHFWKKLQEELGTRLNFSTAYHPQTDGQTERLNQILEDMLRACVLDFGKTWDKSLPYAEFSYNNSYQASIQMAPYEALYGRKCRTPLLWDQVGESQVFGTDILREAEAKVRTIRDNLKVAQSRQKSYADNRCRDLEFAVDDFVYLRVTPLRGVHRFQTKGKLAPRYVGPFRIVARRGEVAYQLELPASLGNVHDVFHVSQLKKCLRVPSEQADSEQIEVREDLTYVERPVKILDTMERRTRNRVIRFCKVQWNNHAEEEATWEREDELKAAHPDLFASSSESRGRDSV

SEQ ID NO: 188687 - protein, 130 aa, Oryza sativa
  unsure (1)..(130): unsure at all Xaa locations
  Clone ID: PAT_MRT4530_85267C.1.pep
FPAPISPRHSGPTPISSGRRQQTPSPPRRTHPADGKLKAAPVLHGRRRRRQEDETGRLTYLHAEGDSNDSEEVARATSALXLEHAPEHHHWHHHSVAGRSTFAFLAGDHGRTYYALADPTPGSPDTVRFL

SEQ ID NO: 188688 - protein, 157 aa, Oryza sativa
  unsure (1)..(157): unsure at all Xaa locations
  Clone ID: PAT_MRT4530_85268C.1.pep
VFLMTTDKSASARNTTIALHLRVTTKGYRTQGTINGKEYRAVTTCRLPLPNPXDNNKQRRSFSEPGAXCTDSSGAPPEFLLESYTCRGRSXESAKLPGTPPELPPTLYLFXMYNRYNRASCNSAQSCVYWNEVSSSFYRLQMTITIMGNILNALNHH

SEQ ID NO: 188689 - protein, 1868 aa, Oryza sativa
  unsure (1)..(1868): unsure at all Xaa locations
  Clone ID: PAT_MRT4530_85269C.1.pep
MDEVGGRWTFSRANEGYTSCGPVVEMSWQRVGALLLGAQSCLPVPEVPAVGGIGSMAGSVTRRGLDMTGFVLELRGMCVALGYPHGVDYQARPLPDQEGDDAEPHAGWEVTAVILSGSPERTSLAVTAGGDSFPAACQNAALLAIGTLHQRYPDELQHSPYRYHPRRGGAHDYATFRDASSEDDATIVHLARMVEVYDAARIDFHQMVRRGMVENNLKILELRQENLQLKKDLDAVEAQLHQLKIAQGEVCRPKRRRVCRSQKITARKSTSRPELVRQSLAWTCFVETPRAEPAPVVPQEGEASGIGSTEALSLFAGSVWGFQMVTTRRNAATGDGNQPEGSNHNHQGNPPPPPPPPPPPPPDTNAILTQILAQQANMMTAFLHHLQNPPQHNAPPPPPQHSKLAEFLRIRPPTFSSSNNPVDALDWFHAVGKKLDTVQCSDEEKVIFAAHQLQGPASLWWDHFQATQPEGQPITWARFTAAFRRTHVPAGVVALKKREFRELKQGNRSVMEYLHEFNNLARYAPEDVREDEEKQEKFLAGMDPELSVRLVSGDYPDFQRLVDKSIRLEAKHKELESHKRRLANFRNQQGANQRGRYTNPYPGGSSSQQQQQQQQPRPAPRPQFVVRFPQPQQQQNQQGTRAPRPPTPTVQPGQGRRDAQGQQRLCFNCFEPGHFADKCPKPRRQQGQAPPRSNNGGKDVIRGRVNHVTAEDVLTTPDVIVGLSEIPIVREFGDVFPEELPGMPPKREIEFRIDLAPGTTPLHKRPYRMAANELAEVKKQLEELKEKGYIRPSTSPWGAPVIFVEKKDKTKRMCVDYRALNEVTIKNKYPLPRIDDLFDQLKGATVFSKIDLRSGYHQLRIREEDIPKTAFTTRYGLYEFTVMSFGLTNALAFFMNLMNKVFMEYLDKFVVVFIDDILIYSQSEEDHQHHLRLVLGKLREHQLYAKLSKFIENFSKIARPMTQLLKKEEKFVWSPQCEKAFQTLKEKLVSSPVLILPDTRKDFMVYCDASRQGLGCVLMQDGHVVAYASRQLRPHEGNYPTHDLELAAVVHALKIWRHYLIGNRCEIYTDHRSLKYIFTQSDLNLRQRRWLELIKDYDVGIHYHPGKANVVADALSRKSHCNTLNVRGIPPELSQQMEALNLSIVSRGFLAALEAKPTLLDQIREAXQKNDPDMHGLLKNMKQGKAAGFTEDEHRTLWNGKRVCVPDNRELKQLILQEAHESPYSIHPGSTKMYLDLKEKYWWVSMKREIAEFVALCDVCQRVKAEHQRPAGLLQPLQVPEWKWDEIGMDFITGLPKTQGGYDSIWVVVDRLTKVARFIPVKTTYGGNKLAELYFARIVSLHGVPKKIVSDRGSQFTSHFWKKLQEELGTRLNFSTAYHPQKDGQTERLNQILEDMLRACVLDFGKTWDKSLPYAEFSYNNSYQASIQLAPYEALYGRKCRTPLLWDQVGESQVFGTDILREAEAKVRIIRDNLKVAQSRQKSYADNRRRDLEFAVGDFVYLRVTPLRGVHRFQTKGKLAPRYVGPFRIVARRGEVAYQLELPASLGNVHDVFHVSQLNKCLRVPSEQADSEQIEVREDLTYVERPVKILDTMERRTRNRVIRFCKLQWSNHAEEEATWEREDELKAAHPDLLATARARGCGDAWDPRRRPASAACARSTVDREGDAWAPLPWTRPTVHGGPGARGWRRSAPWVPRVSRTRGRGRLTAGPTWQPRGRARGRPRRRGRRERRARAPMVTAGDHRRGGAAPEREEGRGKANGGPRLTPGQRRRRERRPERRKTAARLGMTMATALRRSASETEARTRSTAMRRCRGRWRRVRRKSGAAAAAERSSAAMAERAEHGASTNPTARASGERRKRKSGARATFK

SEQ ID NO: 188690 - protein, 94 aa, Oryza sativa
  Clone ID: PAT_MRT4530_8526C.1.pep
CHSPPQGPPQCHTAPSPPSPSLAAAPSVAARSSPTSGGGQRPTATASSASAPTCGSPSPPPPPGRPRPRSPAAAPPAAPSLSGSLRRRRPSERS

SEQ ID NO: 188691 - protein, 626 aa, Oryza sativa
  Clone ID: PAT_MRT4530_85270C.1.pep
WPSHSYRRPSCCHEARAIIFPLLSNRAIPRRLIGEDSECDENVIIKSDIPGGAKSFELVARFCYGLKIELSSENVVYLRCAAEHLEMTEETSGDNLINQTESFFNQVVLRSWKDSLEALRTCDGLLPHAEDLHIVKRCIESLAGKASIDPDLFGWPVSEHSTMQSPGGSVLWNGISTGAKVRNCSSDWWYDDASSLSFPTYKRLISSMESRGIKQEIIAGSLTYYAKKFLPGLNRRQSTGPMPLPAATLSDEEQRRLLEEIDRMLPLQRGLISTNVLLWLLRTAMILKVDRACISNLEKRVGMQLDEATLEDLLLPNFSYTMDTLYNVECVHRILDHFLAMDQTMGGGGASPCLDDVMASPSLAPITAVAKLIDGYLAEIAPDINLKPLKFQSLAAVLPEYARPLDDGLYRAIDVYLKSHPTLPEAEREQLCRLIDCQKLSLEACTHAAQNERLPLRVVVQVLFFEQLQLRTSVAGCLLVSDNLEASSRTLRGGGAVAASGEAGCWATAAVRENQALRVGMDSMRLRLMELERECSDMRQDIRKLGRGRRRLRGGGGIVAGGKDGGGWAARVQRMLTPRMMKLQMCSAQHDAAEQQRMNNEHKKVEKVAKNKKQLSMDDGDDEEEA

SEQ ID NO: 188692 - protein, 1755 aa, Oryza sativa
  Clone ID: PAT_MRT4530_85271C.1.pep
MDISRTNEGYTSCGPVVEMSWHSAGVLLLGAQSCLPILEVPAVGGVGSVLLSMARMGWKLCHVFRPYAVVMAGSVNRHGLDLCGFVLELRGMCIVLGYPHGVDYQGKKLPEQDGDDAEPHAAWEVTAVILTGSPERTSLAVTAGGDSFSAACQNAALLAIGTLHQRYPDELQHSPYRYHPRRGGARDYATFWDASSEDDATIMHLACMVEAYDAARIDFHHMVRRGLVENNMKILELRQENLQLKKDLDAVEAQLFQLKIAQGEVCHPKRRRVCRSLKITARKSTFRPELVRQSLAWTCFVETPCAEPAPVVPQEEEASGVGSTEDMVTTRRSAVAGDGNQPEGSNPNTQGGPPPPPPPPPPPPPDTNPILTQILAQQANMMAAFLHHIQNPPQHNAPPPPPPQHSKLAEFLRIRPPTFSSSNNPVDALDWLHAVGKKLDTVQCNNEEKIIFATHQLQGPASLWWDHFQATQPEGHPITWARFTAAFRRTHVPAGVMALKKREFRELKQGNRSVMKYLHEFNNLARYAPEDVREDEEKQEKFLVGMDPELSVRLVSGDYPDFQRLQQQQPQPRFAPRPQFVVRVPQPQQQQSQQGTRALRPPAPAVQLGQGRMDAQGQQRLCFNCFEPGHFADKCPKPRRQQGQAPPCPNNGGNDVARGRVNHVTAEDVLTTPDVIVGTFLIHSIPATILFDSGASYSFISVPFVGRNQLGVERPRNPLLITTPGGDMTAKYYSPTVPIEIQGIPFPFDLILLDTNNLDVILGMNWLAQFQGVVDCARRTVILYQGPKQPVVFFAPPTSVGSSELHQIGLSEIPIVSEFGDVFPEELPGMPPKREIEFRIDLAPGTTPLYKRPYRMAANKLAEVKKQLEELKKKGALNEVTIKNKYPLPRINDLFDQLKGAIVFSKIDLRSGYHQLRIREEDIPKTAFTTRYGLFEFTVMSFGLTNAPAFFMNLMNKVFMEYLDKFVVVFIDDILLSKCEFWLSEVTDWKQPKTVTQIRSFLGLAGYYRRFIENFSKITRPMTQLLKKEEKFVWSPQCEKAFKTLKEKLVSSPVLILLDTRKDFMDGHVVAYASRQLRPHEGNYPTHDLELAAVVHALKIWRHYLIGNRCEIYTDHKSLKYIFTQSDLNLRQRRWLELIKDYDVGIHYHPGKANVVADALSRKSHCNTLNVRGIPPELNQQMEALNLSIVGRGFLAALEAKPTLLDQIREAQKNDPDMHGLLKNMKQGKATGFTEDEHGTLWNGNRVCVPDNRELKQLILQEAHESPYSIHPGSTKMYLDLKEKYWWVSMKREIVEFVALYDVCQRVKAEHQRPAGLLQPLQVPEWKWDEIGMDFITGLPKTQGGYDSIWVVVDRLTKVARFIPVKATYGGNKLAELYFARIVSLHGVPKKIVSDRGSQFTSHFWKKLQEELGTRLNFSTAYHPQTDGQTERLNQILEDMLRACVLDFGKTWDKSLPYAEFSYNNSYQASIQMAPYEALYGRKCRTPLLWDQVGESQVFGTDILREAKAKVRTIRDNLKVAQSRQKSYADNRRRDLEFAVDDFVYLRVTPLRGVHRFQTKGKLAPRFVGPFRIIARRGEVAYQLELPASLGNVHDVFHVSQLKKCLRVPSEQADSEQIEVREDLTYVERPVKILDTMERRTRNRVIRFCKVQWSNHAEEEATWEREDELLPLRHRLLRLRHVLADLVHSSVSPADRRNTAVLVNPSRAAAFLRSGRRFRRPRRPGVSRGPTLSLPPSLPSLGRRSAASVVAGGDH

SEQ ID NO: 188693 - protein, 1788 aa, Oryza sativa
  unsure (1)..(1788): unsure at all Xaa locations
  Clone ID: PAT_MRT4530_85272C.1.pep
MAGSITRRGLDLTGFVLELRGMCIVLGYPHGVDYQGRPLPEQEGDEAEPVAAWEVTAVILFFSPERTSLAVTAGGDSFSAACQNAALLAIGTLHQRYPDELQHSPYRYHPRRGGARDYATFRDASSEDDATIMHLARMVEAYDAARIDFHQMVRRGLVENNLKILELRQENLQLKKDLDAVEAQLHQLKIAQGEVGRPKRRRVCRSQKITARKSTSRPELVRQSLAWTCFVETPRAEPAPVVPQEGETSGVGSTKDALLLTFCPGPSQRQLSLFAGSVWGFQMVMTRRSANTGDGNQPEGINLNNHGSPPPPPPPPPPPPPDTNAILTQILAQQANMTAAFLHHIQNPPQHNAPPPPPPPQHSKLAEFLRIRPPTFSSSNNPVDALDWLHAVGKKLDTVQCNDEEKVIFATHQLQGPASLWWDHFQATQPEGQPITWARFTAAFRRTHVPAGVMALKKREFRELKQGNRSVMEYLHEFNNLARYAPEDVREDEEKQEKFLAGMDSELSVRLVSGDYPDFQRLVDKSILLEAKHKELESHKRRLANFRNQQGANQRVRYTNPYLGGSSSQQQQQQPRSAPRPQFVVRVPQPQQPQGQQGPRAPRPPAPAVQPGQGHRDVQGQQRLCFNCFEPGHFAEKCPKPRRQQGQAPPRPNNGGKDVARGHVNHVTAEDVLTTPDVIVGTLLIHSIPATILFDSGASHSFISVTFVGRNQLGVERLRNPMLITTPGGVMTAKYYSPAIPIEIQGIPFPSDLILLDTKNLDVILGMNWLAQFQGVVDCARRTVTLYRGPEQPVVFFAPPTSVSSSELHQIGLSEIPIVREFGDVFPEELPGMPPKREIEFRIDLAPGTTPLYKRPYRMAANELAEVKKQLEELKGKGYIRPSTSPWGAPVIFVEKKDKTKRMCVDYRALNEVTIKNKYPLPRIDDLFDQLKGATVFSKIDLRSGYHQLRIREEDIPKTAFTMRYGLYEFTVMSFGLTNAPAFFMNLMNKVFMEYLDKFVVVFIDDILVYSQSEEDHQQHLCLVLGKLREHQLYAKLSKCEFWLSEVKFLGHMISAKGVAVDPETVTAVTDWKQPKTVTQIRSFLGLAGYYRRFIENFSKIARPMTQLLKKEEKFVWSPQCEKAFKTLKEKLVSSPVLILPDTHKDFMVYCDASRQGLGCVLMQEGHVVAYASRQLRPHEGNYPTHDLELAAVVHALKIWRHYLIGNRCEIYTDHKSLKYIFTXSDLNLRQRRWLELIKDYDVGIHYHPGKANVVADALSRKSHCNTLNVRGIPPELNQQMEALNLSIVGRGFLAALEAKPTLLDQIREAQKNDPDMRGLLKNMKHGKAAGFTEDEHGTLWNGNRVCVPDNRELKQLILXEAHESPYSIHPGSTRMYLDLKEKYWWVSMKREIAEFVALCDVCQRVKAEHQRPAGLLQPLQIPEWKWDEIGMDFITGLPKTQGGYDSIWVVVDRLTKVARFIPVKTTYGGNKLAELYFARIVSLRGVPKKIVSDRGSQFTSHFWKKLQEELGTRLNFSTAYHPQTDGQTERLNQILEDMLHACVLDFGKTWDKSLPYAEFSYNNSYQASIQMAPYEALYGRKCRTPLLWDQVGESQVFGTDILREAEATVRTIRENLKVAQSRQKSYADNRRHDLEFAVDDFVYLRVTPLRGVHRFQTKGKLAPRFVGPFRITARRGEVAYQLELPASLGNVHDVFHVSQLKKCLRVPSEQADSEQIEVREDLTYVERPVKILDTMERRTRNRVIRFCKVQWSNHAEEEATWEREEELKAAHPDLFASSSESRGRDSV

SEQ ID NO: 188694 - protein, 561 aa, Oryza sativa
  Clone ID: PAT_MRT4530_85273C.1.pep
MYFRVVLGRDNYQGKQLPEQEGDDAEPHAAWEVTAVILTGSPERTSLAVTAGGDSFSAACQNAALLAIGTFHQRYPDELQHSPYRYHPRRGGARDYATFRDASSEDDATIMHLARMVEAYDVARIDFHHMVRRGMVENNMKILELRQENLQLKKDLDAVEAQLHQLKIAQGEICRPKRRRVCRSQKITARKSTSRPELVRQSLAWTCFVETPRAEPAPVVPQEGEASGVGSSEGALLLTFRPGPSQRSLSRFAGSVWGFQMVTTRRNANTSDGNQPEGSNHNHQGNPPPPPPPPPPPPPDTNAILTQILAQQANMMTAFLHHLQNPPQQNAPPPPPQHSKLAEFLRIRPPTFSSSNNPVNALDWLHAVGKKLDTVQCSDEEKVVFAAHQLQGPASLWWDHFQATQPVGQPITWARFTAAFRRTHVPAGVVALKKREFRELKQGNRSVMEYLHEFNNLARYAPEDVREDEEKQEKFLAGMDPELSVRLVSGDYPDFQRLVDKSIRLEAKHKELESHKRRLANFRNQQGANQRVRYTNPYPGGSSSQQQQQQQPRSAPRPQFV

SEQ ID NO: 188695 - protein, 1912 aa, Oryza sativa
  Clone ID: PAT_MRT4530_85274C.1.pep
MDISRTNEGYTSCGPVVEMSWHRAGVLLLGVQSCLPVPEVPAVGGVGSVLLSMARMGWKLCHVFRLYTVVMAGSINRRGLDLTGFVLELRGMCIVLGYPHGVDYQGKQLPEQEGDDAEPHAAWEVTAVILTGSPERTSLAVTAGGDSFSAACQNAALLAIGTLHQRYPDELQHSPYRYHPRRGGARDYATFRDASSEDDATIMHLARMVEVYDAARIDFHQMVRRGLVENNMKILELRQENLQLEKDLDAVEAQLRQLKIAQGEVCRLKRRRVYRSLKITARKSTSRPELVRQSLAWTCFVETPRAEPAPVVPQEDGASGVGSTKDALLLTFRPGPSEQVVWGMVMPMVTTRRRANTGDGNQPEGSNHNNHGSPPPPPPPPPPPPPDTNAILTQILAQQANMMPAFLHHIQNPPQHNAPPPPPQHSKLVEFLRIRPPTFSSSNNPVDALDWLHAVGKKLDTVQCSDEEKVIFAAHQLQGPASLWWDHFQATQPEGQPFTWARFTAAFRRTHVPAEVMALKKREFRELKQGNRSVMEYLHEFNNLARYAPEDVREDKEKQEKFLAGMDPELSMRLVSGDYPDFQRLVDKSIRLEAKHKKLESHKRCLANFRNQQGANQRVRYTNPYLGGSSSQQQQQQQPRSAPRPHFVVRVPQPQQQQSQQGTRAPRPPTPAVQPGQGRRDVQGQQRLCFNCFEPGHFADKCPKPRRQQGQPPPRPNNDGKDVIWGRVNHVTAEDVLTTPNVIVGTFLIHSIPTTILFDSGASHSFISVPFVGRNQLGVERLRNSLLITTPRGVMTAKYYSPAVPIEIQGIPFPSDLILLDTKNLDVILGMNWLAQFQGVVDCARRTVTLYRGPEQPVVFFAPPTSVGSSELHQIGLSEIPIVREFGDVFPEELPGMPPKREIEFRIDLAPGTTPLYKRPYRMASNELAELKGATVFSKIDLRSGYHQLRIREEDIPKTAFTTRYGLYEFTVMSFGLTNAPTFFMNLMNKVFMEYLDKFVVVFIDDILVYSQSEEDHQHHLRLVLGKLREHQLYAKLSKCEFWLSEVKFLGHVISAKGVAVDPETVTAVTGWKQSKTVTQIRSFLGLAGYYRRFIENFSKIARPMTQLLKKEEKFVWSPQCEKAFQTLKEKLVSSPVLILPDTRKDFMVYCDALRQGLGCVLMQEGHVVAYASRQLRPHEGNYPTHDLELAAVVHALKIWRHYLIGNRCEIYTDHKSLKYIFTQSDLNLRQRRWLELIKDYDVGIHYHPGKANVVANALSRKSHCNTLDVRGIPPELNQQMEALNLSIVGRGFLATLEAKPTLLDQIREAQKNDPDMRGLLKNMKQGKAAGFTEDEHGTLWNGNRVCVPDDRELKQLKLQEAHESPYSIHPGSTKMYLDLKEKYWWVSMQREIAEFVALCDVCQRVKAEHQRPAGLLQPLQVPEWKWDEIGMDFITGLPKTQGGYNSIWVVVDRLTKVARFIPVKTTYGGNKLAELYFARIVSLHGVPKKIVSDRGSQFTSHFWKKLQEELRTRLNFSTAYHPQTDGQTERLNQILEDMLRACVLDFGKTWDKSLPYAEFSYNNSYQASIQMAPYEALYGRKCRTPLLWDQVGESQVFGTDILREAEAKVRTIRDNLKVAQSRQKSYADNRRCNLEFAVDDFVYLRVTPLRGVHRFQTKGKLAPRFVGPFRIIARRGEVAYQLELPASLGNVHDVFHVSQLKKCLRVPSEQADSEQIEVREDLTYVERPVKILDTMERRTRNRVIRFCKVQWSNHAEEEATWEREDEPRELRRRINGARDRRADFLPFGPPFLTPNLRLRRVLVDLVHSSVSPADRRNAAVLVDPSRAAAFLRFGRRFRCHRRPGVSRGPPFHFPLLSSLSGAAPRAGGRRRRPSGRGCAASRRPCRRGRLRARLAAARWGPAVSRPRLGGG

SEQ ID NO: 188696 - protein, 119 aa, Oryza sativa
  Clone ID: PAT_MRT4530_85275C.1.pep
MASPAIITILAVSLLLLLPPLALGSITGGDQRRKEPWITTILNGGGSIAGMELQQRRRGGHGLPVMTLVMVDVTLQSPLHETDQGRKPDEMGNCALCAREKLVPWQNIHDLVCVILCEN

SEQ ID NO: 188697 - protein, 1778 aa, Oryza sativa
  Clone ID: PAT_MRT4530_85276C.1.pep
MSWHRAGVLLLGAQSCLPVPGVPAVGGIGSVLLSMARMGWKLCHVFRLYTVVMAGSVTRRGLDMTGFVLELRGMCVVLGYPHGVDYQARPLPEQEGDDAEPHAAWEVTAVILAGSPERTSLTVTAGGDSFPAACQSAALLAIGTLHQRYPDELQHSPYRYHPRRGGARDHATFRDASSEDDATIVHLARMVEAYDAARIDFHQMVRRGMVENNLKILELRQENLQLKKDLDAVEAQLHQLKIAQGEICRPKRRRVCRSQKITARKSTSRPELMVMTRRNANTGDGNQPEGSNHNHQGNPPPPPPPPPPPPPDTNAILTQILAQQANMMTAFLHHLQNPPQLNPPPPPPQHSKLAEFLRIRPPTFSSSNNPVDALDWLHAVGKKLDTVQCSDEEKVIFAAHQLHGPASLWWDHFQAMQPEGQPVTWARFTAAFRRTHVPAGVVALKKREFRELKQGNRSVMEYLHEFNNLARYTPEDVRKDEEKQEKFLAGMDPELSVRLVSGDYPDFQRLVDKSIRLEAKHKELESHKRRLANFRNQQGANQRVRYTNPYPGGSSSQQQQQQQQPRSAPRPQFVVRVPQPQQQQNQQGTRAPRPPTPTVQPGQGRRDASGPQRLCFNCFEPGHFADKCPKPRRQQGQAPPRPNNGGKDVSRGRVNHVTAEDVLTTPDVIVGTFLIHSIPATILFDSGASHSFISVPFVGRNQLGVERLRNPLLITTPGGVMTAKYYSPAVPIEIQGIPFPSDLILLDTKNLDVILGMNWLAQFQGVVDCARRTVTLYRGPEQPVVFFAPPTSVRSSELHQIGLSEIPIVREFGDVFPEELPGMPPKREIEFRIDLAPGTTPLYKRPYRMAANELAEVKKQLEELKEKGYIRPSTSPWGAPVIFVEKKDKTKRMCVDYRALNEVTIKNKYPLPRIDDLFDQLKGATVFSKIDLRSGYHQLRIREEDIPKTAFTTRYGLFEFTVMSFGLTNAPAFFMNLMNKVFMEYLDKFVVVFIDDILIYSQSEEDHQHHLRLVLGKLREHQLYAKLSKCEFWLSEVKFLGHVISAKGVAVDPETVTAVTDWKQPKTVTQVRSFLGLAGYYRRFIENFSKIARPMTQLLKKEEKFVWSPQCEKAFQTLKEKLVSSPVLILPDTRKDFMVYCDASRQGLGCVLMQDGHVVAYASRQLRPHEGNYPTHDLELAAVVHALKIWRHYLIGNRCEIYTDHKSLKYIFTQSDLNLRQRRWLELIKDYDVGIHYHPGKANVVADALSRKSHCNTLNVRGIPLELNQQMEALNLSIVGRGFLTTLEAKPTLLDQIREAQKNDPDMHGLLKNMKQGKAAGFTEDEHGTLWNGNRVCVPDNRELKQLILQEAHESPYSIHPGSTKMYLDLKEKYWWVSMKREIAEFVALCDVCQRVKAEHQRPAGLLQPLQVPEWKWDEIGMDFITGLPKTQGGYDSIWVVVDRLTKVARFIPVKTTYGGNKLAELYFARIVSLHGVPKKIVSDRGSQFTSHFWKKLQEELGTRLNFSTAYHPQTDGQTERLNQILEDMLRACVLDFGKTWDKSLPYAEFSYNNSYQASIQMAPYEALYGRKCRTPLLWDQVGESQVFGTDILREAEAKVRTIRDNLKVAQSQQKSYADNRRRDLEFAVDDFVYLRVTPLRGVHRFQTKGKLAPRYVGPFRIVARRGEVAYQLELPASLGNVHDVFHVSQLKKCLRVPSEQADSEQIEVREDLTYVERPVKILDTMERRTRNRVIRFCKVQWSNHAEEEATWEREDELKAAHPDLFASSSESRGRDSV

SEQ ID NO: 188698 - protein, 59 aa, Oryza sativa
  unsure (1)..(59): unsure at all Xaa locations
  Clone ID: PAT_MRT4530_85277C.1.pep
RAHXLXXQCVEKAXRYCSXVLXSWSCHCLLAVIPREXXASEXDCLWLSGPAXLVQSKWN

SEQ ID NO: 188699 - protein, 44 aa, Oryza sativa
  Clone ID: PAT_MRT4530_85278C.1.pep
PPSRSLPSQQISGQRRQRHQQNRWIEREPWFYLLERPDGDLDLL

SEQ ID NO: 188700 - protein, 641 aa, Oryza sativa
  Clone ID: PAT_MRT4530_85279C.1.pep
MVSSSSSPQSKPPKPKPKPLSPPMGARASRHRQSPDQSQSQSPSPHHKHHHHHQTTRAPKPKPKPQPPPPQQPRSQPPPPPRHQPQQAPQQAAAEDGVGRVLGRPMEDVRATYTFGRELGRGQFGVTYLATHKPTGRRYACKSIAARKLARPDDLDDVRREVHIMHHLTGHRNIVELRGAYEDRHSVNLVMELCEGGELFDRIIARGHYSERAAAALCREIVSVVHSCHSMGVMHRDLKPENFLFLNKREDSPLKATDFGLSVFFKPGEQFRDLVGSAYYVAPEVLKRLYGAEADIWSAGVILYILLSGVPPFWAENEDGIFDAVLQGHIDFSSEPWPSISSGAKDLVKRMLRQDPKERLTAAEILNHPWIREDGEAPDKPLDITVISRMKQFRAMNKLKKVALKVVAENLSEEEIVGLKEMFKSLDTDNSGTITLEELRAGLPKLGTKISESELRQLMEAADVDGNGSIDYVEFISATMHMNRLEKEDHIYKAFEYFDKDHSGFITVDELEEALTKYDMGDETTIKEIIAEVDPDLADVDGNGSIDYVEFISATMHMNRLEKEDHIYKAFEYFDKDHSGFITVDELEEALTKYDMGDEATIKEIIAEVDTDHDGRINYQEFVAMMKNNSPEIVPNRRRMF

SEQ ID NO: 188701 - protein, 70 aa, Oryza sativa
  Clone ID: PAT_MRT4530_8527C.1.pep
QQSSSLTTTPAADANHWFLDRTSWKRLPVACRSSYSEKAAVDQGKTGNGEQNRGLSAEKHTESCSPGLTS

SEQ ID NO: 188702 - protein, 55 aa, Oryza sativa
  Clone ID: PAT_MRT4530_85280C.1.pep
CPLYNLVLMLHLSIYFRSTSLSYHFHILMLISFCMKQQRDTEVTNDPNLGKICRQ

SEQ ID NO: 188703 - protein, 408 aa, Oryza sativa
  unsure (1)..(408): unsure at all Xaa locations
  Clone ID: PAT_MRT4530_85281C.1.pep
LLLIRARNRRFRVSLYADVVALSVTPTYLNLFASVSGMHIYLQHSKQKLSLKKREIYPISCNELNVEARFTNFPGKVSTLSCKYLSLPLTIKSXKNDYQPLFDKFGFKLAGWLGRFFTSSSRKTLVKSVLNVPPLXYRVHLHLAAFIGYKLLSQTNTNLFCTLCPHSCALGKNFLIGRPSQICSKLSMLNLRVLSRXLPEKKLWFQWKDPEKPXFMNIPCDKIDXLFNACTLITARDGEKIKLWNDYWLQNKRPNEIAPSLFKISKRKKQETNNVWLSTLTVTSSIEEINQLVTXGLLQQVTLDPNIQDDXMWKGTTNGEYSAKSSYKMQFQELITHNNXQCLSEAKAQSKHKFFRRLIIHQRXTLTTDNLLGRHWPCAWICRLCNEAFXSTDHLLKECEFMVNVWGE

SEQ ID NO: 188704 - protein, 290 aa, Oryza sativa
  Clone ID: PAT_MRT4530_85282C.1.pep
MGNASGKEGEENGHVAAGAAAGVAGSAGAAARAPPPLMPPDAVMRELPPPVPYVFTPQVPVAPLHIPTEFSPVFNNSWINESDESTNNHPQEKGIPTLISWSQGGNEVFVEGSWDNWTSRRVLEKSGKDHTILLVLPSGVYHYRIIVDGEPKYVPELPHVADEGGQVANLLDVHDYIPESLGSVAGFDSPPSPEHSYDLQLPGDEEFAKEPPILPPQLVMSVLGDTDNSEEQTLKPKHVVLNHLYIEKGWGSQSLLALGVTHRFQSKYVSFVLYKPLRRSSTAKRTKNGG

SEQ ID NO: 188705 - protein, 40 aa, Oryza sativa
  Clone ID: PAT_MRT4530_85283C.1.pep
MRLPRGLHSRGPDVAASEDPLFVEVEEDVWESEQGKSHHP

SEQ ID NO: 188706 - protein, 46 aa, Oryza sativa
  unsure (1)..(46): unsure at all Xaa locations
  Clone ID: PAT_MRT4530_85284C.1.pep
KKIRLVCGYCFLFKEEHWRGRATSRILTFLNEKVFXVLKRPDYTGR

SEQ ID NO: 188707 - protein, 48 aa, Oryza sativa
  Clone ID: PAT_MRT4530_85285C.1.pep
PYAVSVGLSKSAPHLLIEPPRVERMQEHPGKAAWVGRASKSGSVPAGD

SEQ ID NO: 188708 - protein, 149 aa, Oryza sativa
  Clone ID: PAT_MRT4530_85286C.1.pep
NPFGQIPAFQDGDLYLFESRAIGKYILRKYKTREADLLREGNLREAAMVDVWTEVETHQYNSAISPIVYECIINPAMRGIPTNQKVVDESAEKLKKVLEVYEARLSQSTYLAGDFVSFADLNHFPYTFYFMGTPYASLFDSYPQVKAWW

SEQ ID NO: 188709 - protein, 83 aa, Oryza sativa
  Clone ID: PAT_MRT4530_85287C.1.pep
MATLQIEMFLPAVMFRGGSNVVQGDLAMHGSGSRLLGDGGSGGASRHVKLGSQGPDISTQWAWAAWACPLSTARPMPEADMVD

SEQ ID NO: 188710 - protein, 79 aa, Oryza sativa
  Clone ID: PAT_MRT4530_85288C.1.pep
MALVASPPPPAAVGIAPATAAYDRRSGPLLFFLFQLLLSLHGVHSEGSGELRHGRRFSGAGAAATLERGRAVLGSGRRL

SEQ ID NO: 188711 - protein, 196 aa, Oryza sativa
  unsure (1)..(196): unsure at all Xaa locations
  Clone ID: PAT_MRT4530_85289C.1.pep
MAEEREISFEQWATFDVKESTLKETVKKGVLPAKXIIGWQSAYSEEFSTPNIGEIVPPSXERSKPSFQHEGQTGPNREDPDSIEFQTMYSQMYKVFSTGIVIDYGHNLPVIPYSLMNPTPPENESIISNPLAMARQSPRRSPRNKQPTGGPSIKTPQKGKRSLSLSFNVMRSYLEDLCKQKYSIRRREKLENRTAL

SEQ ID NO: 188712 - protein, 154 aa, Oryza sativa
  Clone ID: PAT_MRT4530_8528C.1.pep
MASRGGPPCPLVLDDPLYQPRHLLLGLTTTTTHTHPRFRFQRPYIKKVNTKKMRGIGESGGAAEAGEWGRDGEGGASIRRNYKKALIPTNTCMNSMRTFKVNFWRRLSQMKADHEPSASNKRLPVINHNYKSKRYATLTPQMMRQKMVNRRTKH

SEQ ID NO: 188713 - protein, 85 aa, Oryza sativa
  Clone ID: PAT_MRT4530_85290C.1.pep
RLNQAAPKERRAPGPCPKSISPRARGPRARGFQPIESPPPLTPFSRCSARYKRVAFSPRFFVRLGFYISRLVGGGGIRLNGRSRW

SEQ ID NO: 188714 - protein, 129 aa, Oryza sativa
  unsure (1)..(129): unsure at all Xaa locations
  Clone ID: PAT_MRT4530_85291C.1.pep
NKFEKWIPSCIFSHGHTFSIISTHHLGHTGEQVTVIRSDXHNIRSRGGTHTGGRVQLGTPGGSIQHIPALNRHVNSIRQQHIIHSMPFTPFXSQYSLFYLFWTTVLFHFIPIKYAMKILTQNMRQNVIV

SEQ ID NO: 188715 - protein, 200 aa, Oryza sativa
  unsure (1)..(200): unsure at all Xaa locations
  Clone ID: PAT_MRT4530_85292C.1.pep
TARPARSPPPSLPLPPLPAPAAAWRPPPSPPPRHLVRNAASAPAPAGPARTPRPSXWTPPPPLLPPLLPRSXSPPLLRRPQASSVAPPWTASSPPRPPSPAPAAPAGTAPPRRPPPTPPLPHAGSRSNRTPTRRRRGRGAAWRCSRRRGTGRGSWRRTGASPSQRSTRCAPASAAPPTTASRSSRPRPAPATTRRRWRRR

SEQ ID NO: 188716 - protein, 173 aa, Oryza sativa
  Clone ID: PAT_MRT4530_85293C.1.pep
MALSSSLLHRLLRGSTPVSSSSAAASSILRATFCSSSSSAPLPTESPLSSVFGDGAEVSNVPPLTAPKLFISGLSRLTTDEKLKNAFAPFGQLLEAKVITDRISGRSKGFGFVRYATLEEAENARQEMNAKFLDGWVIFVDPAKPRQQKPAPRPDTDSSHTGFTTNKTVGWCG

SEQ ID NO: 188717 - protein, 1806 aa, Oryza sativa
  unsure (1)..(1806): unsure at all Xaa locations
  Clone ID: PAT_MRT4530_85294C.1.pep
MEMDEVGGRWTXSRTNEGYTSCGPMAGSVTRRGLHMTGFVLELRGLCVVLGYPHGVDYQARPLPEQEGEDAEPHAGWEVTAVILSGSPERTSLAVTAGGDSFPAACQNAALLAIGTLHQRYPDELQHSPYRYHPRRGAXHHATFRDASSEDDATVVHLARMVEAYDVARIDFHQMVRRGMVENNMKILELRQENLQLKKDLDALEAQLHQLKVAQGEICRPKRRRVCRSQKITARKSTSRPELVRQSLAWTCFVETPRAEPAPVVPQEGEASGVGSSEGALLLTFRPGPSQRSPSLFAGSVWSLQMVSTRRNVNTGEGNQPEGSNPNPQGNPPPPPPPDTNAILTQILAQQANMMNAFLHHLQNPPQQNAPPPPPQHSKLAEFLRIRPPTFSSSNNPVDALDWLHAVGKKLDTVQCSDEEKVIFAAHQLQGPASLWWDHFQATQPEGQPITWARFTAAFRRTHVPAGVVALKKKEFRELKQGNRSVMEYLHEFNNLARYAPEDVREDEEKQEKFLAGMDPELSVRLVSGDYPDFQRLVDKSIRLEAKHKELESHKRRLANFRNQQGANQRVRYTNPYPGGSSSQQQQQQQQQSRSAPRPQFVVRVPQPQQQQNQQGTRAPRPPTPAGQPVQGRRDASGPQRLCFNCFEPGHFADKCPKPRRQQGQAPPRSNNSGKDVLRGRVNHVTAEDVLTTPDVIVGTFLVHSIPATILFDSGASHSFISVPFVGKNQLGVERLRNPLLITTPGGVMTAKYYSPAVPIEIQGIPFPSDLILLDTKNLDVILGMNWLAQFQGVVDCTRRTVTLYRGPEQPVVFFAPPTSVRSSELHQIGPSEIPIVREFEDVFPEELPGMPPKREIEFRIDLVPGTTPLHKRPYRMAANELAEVKKQLEELKEKGYIRPSTSPWGAPVIFVEKKDKTKRMCVDYRALNEVTIKNKYPLPRIDDLFDQLKGATVFSKIDLRSGYHQLRIREEDIPKTAFTTRYGLYEFTVMSFGLTNAPAFFMNLMNKVFMEYLDKFVVVFIDDILIYSQSEEDHQHHLRLVLGKLREHQLYAKLSKCEFWLSEVKFLGHVISAKGVAVDPETVTAVTDWKQPKTVTQIRSFLGLAGYYRRFIENFSKIARPMTQLLKKEEKFVWSPQCEKAFQTLKEKLVSSPVLILPDTRKDFMVYCDASRQGLGCVLMQDGHVVAYASRQLRPHEGNYPTHDLELAAVVHALKIWRHYLIGNRCEIYTDHKSLKYIFTQSDLNLRQRRWLELIKDYDVGIHYHPGKANVVADALSRKSHCNTLNVRGIPPELNQQMEALNLSIVGRGFLAALEAKPTLLDQIREAQKNDPDMHGLLKNMKQGKAAGFTEDEHGTLWNGKRVCVPDNREPKQLILQEAHESPYSIHPGSTKMYLDLKEKYWWVSMKREIAEFVALCDVCQRVKAEHQRPAGLLQPLQVPEWKWDEIGMDFITGLPKTQGGYDSIWVIVDRLTKVARFIPVKTTYGGNKLAELYFARIVSLHGVPKKIVSDRGSQFISHFWKKLQEELGTRLNFSTAYHPQTDGQTERLNQILEDMLRACVLDFGKTWDKSLPYAEFSYNNSYQASIQMAPYEALYGRKCRTPLLWDQVGESQVFGTDILREAEAKVRIIRDNLKVAQSRQKSYADNRRRDLEFAVDDFVYLRVTPLRGVHRFQTKGKLAPRYVGPFRIIARRGEVAYQLELPASLGNVHDVFHVSQLKKCLRVPSEQADSEQIEVREDLTYVERPVKILDTMERRTRNRVIRFCKVQWSNHAEEEATWEREDELKAAHPDLFASSSESRGRDSV

SEQ ID NO: 188718 - protein, 52 aa, Oryza sativa
  Clone ID: PAT_MRT4530_85295C.1.pep
MEEYDDTVAVDGGGRRRLRQRHCFRPRCRSICFRLMLKKRLAHGERVWLRLD

SEQ ID NO: 188719 - protein, 1757 aa, Oryza sativa
  Clone ID: PAT_MRT4530_85296C.1.pep
MDEVGGRWTFSRANEGYTSCGPMAGSVTRRGLDMIGFVLELRGMCVVLGYPHGVDYQARPLPEQEGEDAEPHAGWEVTVVILSGSPERTSLAVTAGGDSFPAACQNAALLAIGTLHQRYPDELQHSPYRYHPRRGGARDFATFRDASSEDDATVVHLARMVEAYDAARIDFHQMVRRGMVENNMKILELRQENLQLKKDLDALEAQLHQLKIAQGEDSRPKRRRVCRSQKITARKSTSRPELVRQSLAWTCFVETPRAEPAPVVPQEGEASGVGSSEAPSLFAGSVWGFQMVTTRRNVNTGEGNQPEGSNPNPQGNPPPPPPPDTNAILTQILAQQANMMNAFLHHLQNPPQQNAPPPPPQHSKLAEFLRIRPPTFSSSNNPVDALDWLHAVGKKLDTVQCSDEEKVVFAAHQLQGPASLWWDHFQATQPEGQPITWARFTAAFRRTHVPAGVVALKKREFRELKQGNRSVMEYLHEFNNLARYAPEDVREDEEKQEKFLAGMDPELSVRLVSGDYPDFQRLVDKSIRLEAKHKELESHKRRLANFRNQQGANQRVRYTNPYPGGSSSQQQQQQPRPAPRPQFVVRVPQPQQQQNQQGTRAPRPPTPAGQPVQGRRDASGPQRLCFNCFEPGHFADKCPKPRRQQGQAPPRPNNGGQGVIRGRVNHVTAEDVLTTPDVIVGTFLVHSIPATILFDSGASHSFISVPFVGRNQLGVERLRNPLLITTPGGVMTAKYYSPAVPIEIQGIPFPSDLILLDTKNLDVILGMNWLAQFQGVVDCARRTVTLYRGPEQPVVFFAPPTSVRSSELHQIELSEIPVVREFGDVFPEELPGMPPKREIEFRIDLAPGTTPLYKRPYRMAANELAEVKKQLEELKEKGYIRPSTSPWGAPVIFVEKKDKTKRMCVDYRALNEVTIKNKYPLPRIDDLFDQLKGATVFSKIDLRSGYHQLRIREEDIPKTAFTTRYGLYEFTVMSFGLTNAPAFFMNLMNKVFMEYLDKFVVVFIDDILIYSQSEEDHQHHLRQVLGKLREHQLYAKLSKCEFWLSEVKFLGHVISSKGVAVDPETVTAVTDWKQPKTVTQVRSFLGLAGYYRRFIENFSKIARPMTQLLKKEEKFVWSPQCEKAFQTLKEKLVSSPVLILPDTRKDFMVYCDASRQGLGCVLMQDGHVVAYASRQLRPHEGNYPTHDLELAAVVHALKIWRHYLIGNRCEIYTDHKSLKYIFTQSDLNLRQRRWLELIKDYDVGIHYHPGKANVVADALSRKSHCNTLNVRGIPPELNQQMEALNLNIVGRGCLAALEAKPTLLDQIREAQKNDPDMHGLLKNMKQGKAAGFTEDEHGTLWNGKRVCVPDSRELKQLILQEAHESPYSIHPGSTKMYLDLKEKYWWVSMKREIAEFVALCDVCQRVKAEHQRPAGLLQPLQVPEWKWDEIGMDFIPGLPKTQGGYDSIWVIVDRLTKVARFIPVKTTYGGNKLAELYFARVVSLHGVPKKIVSDRGSQFTSHFWKKLQEELGTRLNFSTAYHPQTDGQTERLNQILEDMLRACVLDFGKTWDKSLPYAEFSYNNSYQASIQMAPYEALYGRKCRTPLLWDQAGESQVFGTDILREAEAKVRIIRDNLKVAQSRQKSYADNRRRDLEFAVDDFVYLRVTPLRGVHRFQTKGKLAPRYVGPFRIIARRGEVAYQLELPASLGNVHDVFHVSQLKKCLRVPSEQADSEQIEVREDLTYVEKPVKILDTMERRTRNRVIRFCKVQWSNHAE

SEQ ID NO: 188720 - protein, 1831 aa, Oryza sativa
  unsure (1)..(1831): unsure at all Xaa locations
  Clone ID: PAT_MRT4530_85297C.1.pep
MEVDEVGGRWTFSRANEGYTSCGPVVEMSWHRAGVLLLGAQSCLPVPGVPAVGGIGSVLLSMARMGWKLCHVFRLYTVVMAGSVTRRGLDMTGFVLELRGMCVVLGYPHGVDYQARPLPEQEGEDAEPHAGWEVTAVILSGSPERTSLAVTAGGDSFPAACQNAALLAIGTLHQHYPDELQHSPYRYHPRRGGARDYATFRDASSEDDATIVHLARMVEAYDAARIDFHQMVRRGMVENNMKILELRQENLQLKKDLDAVEAQLHQLKIAQGEDCRPKRXCRSQKITARKSTSRPELVRQSLAWTCFVETPRAEPAPVVPQEGETSGVGXNVNTGDGNQPEGSNPNHQGNPPSPSASPPPPPPDTNAILTQILAQQANMMTAFLHHLQNPPQQNAPPPPPQHSKLAEFLRIRPPTFSSSNNPVDALDWLHAVGKKLDTVQCSDEEKVIFAAHQLQGPASLWWDHFQATQPEGQPITWARFTAAFRRTHVPAGVVALKKREFRELKQGNRSVMEYLHEFNNLARYAPEDVREDEEKQEKFLAGMDPELSVRLVSGDYPDFQRLVDKSIRLEAKHKELESHKRRLANFRNQQGANQRVRYTNPYPGGSSSQQQQQQPRSAPRPQFVVRVPQPQQQQNQQGTRVPRPPTPAVQPGQGRRDAQGQQRLCFNCFEPGHFADKCPKPRRQQGQAPPRSNNGGKDVTRGRVNHVTAEDVLTTPDVIVGTFLIHSVPATTLFDSGASHSFISVPFVGRNQLGVERLRNPLLITTPGGVMTAKYYSPAVPIEIQGIPFPSDLILLDTKNLDVILGMNWLAQFQGVVDCARRTVTLYRGPEQPVVFFAPPTSVRSSELHQIGLSEIPIVGEFGDVFPEELPGMPPKREIEFRIDLAPGTTPLYKRPYRMAANELAEKKDKTKRMCVDYRALNEVTIKNKYPLPRIDDLFDQLKGATVFSKIDLRSGYHQLRIREEDIPKTAFTTRYGLYEFTVMSFGLTNAPAFFMNLMNKVFMEYLDKFVVVFIDDILIYSQSEEDHQHHLRLVLGKLREHQLYAKLSKCEFWLSEVKFLGHVISAEGVAVDPETVTAVTDWKQPKTVTQIRSFLGLAGYYRRFIENFSKIARPMTQLLKKEEKFVWSPQCEKAFQTLKEKLVSSPVLILPDTRKDFMVYCDASRQGLGCVLMQDGHVVAYASRQLRPHEGNYPTHDLELAAVVHALKIWRHYLIGNRCEIYTDHKSLKYIFTQSDLNLRQRRWLELIKDYDVGIHYHPGKANVVADALSRKSHCNTLNARGIPPELNQQMEALNLSIVGRGFLAALEAKPTLLDQIREAQKNDPDMHGLLKNMKQGKAAGFTEDEHGTLWNGNRRVKAEHQRPAGLLQPLQVPEWKWDEIGMDFITGLPKTQGGYDSIWVVVDRLTKVARFIPVKTTYGGNKLAELYFARISQTAGMELGTRLNFSTAYHPQTDGQTERLNQILEDMLRACVLDFGKTWDKSLPYAEFSYNNSYQASIQMAPYEALYGRKCRTPLLWDQVGESQVFGTDILREAEAKVRIIRDNLKVAQSRQKSYADNRRRDLEFAVGDFVYLRVTPLRGVHRFQTKGKLAPRYVGPFRIIARRGEVAYQLELPASLGNVHDVFHVSQLKKCLRVPSEQADSEQIEVREDLTYVERPMKILDTMERRTRNRVIRFCKVQWSNHAEEEATWEREDERRHRLPEPRRRLLPLRPPFSSSSLSRGEPKTAVRLPPFLLFLGCHSAAPLVAGGDHRGAGARRSRRPRRRGRPRARPRGYQVGPAVSRPRPRVRLTRGTHGADRRQPRAPGPPWTERLVHPRINKTPTSGHSIH

SEQ ID NO: 188721 - protein, 3275 aa, Oryza sativa
  unsure (1)..(3275): unsure at all Xaa locations
  Clone ID: PAT_MRT4530_85298C.1.pep
MVMPMVTTRRNAATDDGNQPEGSNHNNHGSPPPPPPPPPPPPPDTNAILTQILAQQANMMTAFLHHLQNPPQHNAPPPPPQHSKLAEFLRIRPPTFSNSNNPVDALDWLHAVGKKQDTVQCSDEEKVIFAAHQLQGPASLWWDHFQATQPEGQPITWARFTAAFRRTHVPAGVVALKKREFRELKQGNHSVMEYLHEFNNLARYAPEDVREDEEKQEKFLAGMDPELSVRLVSGDYPDFQRLVDKSIRLEAKHKELESHKRRLANFRNQQGANQRVHYTNPYPGGSSSQQQQQQQQPRSAPRPQFVVRVPQPQQQQNQQGTRAPRPPTLAVQPGQGRRDAQGQQRLCFNCYEPGHFADKCPKPRRQQGQAPPRSNNGGKDVIRGRVNHVTAEDVLTTPDVIVGTFLIHSIPATILFDSGASHSFISVPFVGRNQLRVERLRNPLLITTPGGVMTAKYYSPAVPIEIQGIPFPSDLILLDTKNLDVILGMNWLAQFQGVVIGLSEIPIVREFGDVFPEELLGMLPKREIEFRIDLAPGTTPLYKRPYRMAANELAEVKKQLEELKEKGYIRPSTSPWGAPVIFVEKKDKTKRMCIDYRALNEVTIKNKYPLPRIDDLFDQLKGATVFSKIDLRSGYHQLRIREEDIPKTAFTTRYGLYEFTVMSFGLTNAPAFFMNLMNKVFMEYLDKFVVVFIDDILIYSQSEEDHQHHLRLVLGKLREHQLYAKLSKCEFWLSEVTFLGHVISAKGVAVDPETVTAVTDWKQPKTVTQVRSFLGLAGYYRRFIENFSKIARPMTQLLKKEEKFVWSPQCEKAFKTLEEKLVASPVLILPDTRKDFMVYCDASRQGLGCVLMQDGHVVAYASRQLRPHEGNYPTHDLELAAVVHALKIWRHYLIGNRCEIYTDHKSLKYIFTQSDLNLRQRRLLELIKDYDVGIHYHLGKANVVADALSRKSHCNTLNVCGIPPEPNQQMEALNLSIVSRGFLATLEAKPTLLDQIREAQKNDPDMHGLLKNMKQGKAASFTEDEHGTLWNGNREKYWWVSMKREIAEFVALCDVCQCVKAEHQRPAGLLQPLQVPEWKWDEIGMDFITGLPKTQGGHDSIWVVVDRLTKVARFIPVKTTYGGNKLAELYFARIVSLHGVPKKIVSDRGSQFTSHFWKKLQEELGTRLNFSTAYHPQTDGQTERLNQILEDMLCACVLDFGKTWDKSLPYAEFSYNNSYQASIQMAPYEALYGRKCRTPLLWDQVGESQVFGTDILREAEAKVRTIWDNLKVAQSRQKSYENNRRRDLEFAVGDFVYLRVTPLRGVHRFQTKEKLAPRYVGPFRIIARRGEVAYQLELPASLGNVHDVFHVSQLKKCLRVPSEQADSDQIEVCEDLTYVERPVKILDTMERRTRNRVIRFCKVQWSNHAEEEATWEREDELKAAHPDLFARPPPATIGARARRLPSAVSARPPSGAPRGCQVGPGRQPPAPSAPRPFKDRSSGLCCKALPYFHMSSGANEGYTSCGPVVEMSWHRAGVLLLGAQSCLPVPGVPAVGGIGSMYTSDQSIIYSNSRALGYGQAEQCTQMAGSVTRRGLSMTGFVLELRGMCVVLGYPHGVDYQARPLPEQEGDDAEPHAGWEVTAVILSGSPERTSLAVTAGGDSFPAACQNAALLAIGTLHQRYPDELQHSPYRYHPRHEGARDYATFRDASSEDDATIVHLARMVEAYDVARIDFHQMVRRGMVENNMKILELRQENLQLKKDLDAVEAQLHQLKIAQGEVCRPKRRRVCRSQKITARKSTSRPELVRQSLAWTCFMETPRAEPAPVVPQEGEASGVGSTEDALLLTFXVTTRRNAATGDGNQPEGSNHNHQGNPPPPPPPPPPPPPDTNAILTQILAQQANMMTAFLHHLQNPPQHNAPPPPPEHSKLAEFLRIRPPTFSSSNNPVDALDWLHAVGKKLDTVQCSDEEKVIFAAHQLQGPASLWWDHFQATQPEGQPITWARFTAAFRRTHVPAGVVALKKREFRELKQGNRSVMEYLHEFNNLARYAPEDVREDEEKQEKFLAGMDPELSVRLVSGDYPDFQRLVDKSIRLEAKHKELESHKRRLANFRNQHGANQRVRYTNPYPGGSSSQQQQXQQQPRSAPRPQFVVRVPQPQQQQNQQGTRAPRPPTPTVQPGQGRRDAQGQQRLCFNCFEPGHFADKCPKPRRQQGQAPPRSSNGGKDVIRGRVNHVTAEDVLTTPDVIVGTFLIHSIPATILFDSGASHSFISVPFVGRNQLGVERLRNPLLITTPGGVMTAKYYSSAVPIEIQGIPFPSDLILLDTKNLDVILGMNWLAQFQGVMDCARRTVTLYRGPEQPVVFFAPPTSVKSSELHQIGLSEIPIVREFGDVFPEELPGMPPKREIEFRIDLAPGTTPLYKRPYRMAANELAEVKKQLEELKEKGYIRPSTSLWGAPVIFVEKKDKTKRMCVDYRALNEVTLKNKYPLPRIDDLFDQLKGATVFSKIDLRSGYHQLRIREEDIPKTAFTTRYGLYEFTVMSFGLTNAPAFFMNLMNKVFMEYLDKFVVVFIDDILIYSRSEEDHQHHPRLVLGKLREHQLYAKLSKCEFWLSEVKFLGHVISAKGVAVDPETVTAVTDWKQPKTVTQVRSFLGLAGYYRRFIENFSKIARPMTQLLKKEEKFVWSPQCEKAFQTLKEKLVSSPVLILPDTRKDFMVYCDASRQGLGCVLMQDGHVVAYASRQLRPHEGNYPTHDLELAAVVHALKIWRHYLIGNRCEIYTDHKSLKYIFTQSDLNLRQRRWLELIKDYDVGIHYHPGKANVVADALSRKSHCNTLNVRGIPPELNQQMEALNLSIVGRGFLAALEAKPTLLDQIREAQKNDPDMHGLLKNMKQGKAAGFTEDEHGTLWNGKRRVKAEHQRPAGLLQPLQVPEWKWDEIGMDFITGLPKTQGGYDSIWVVVDRLTKVARFIPVKTTYGGNKLAELYFARIVSLHGVPKKIVSDRGSQFTSHFWKKLQEELGTRLNFSTAYHPQTDGQTERLNQILEDMLRACVLDFGKTWDKSLPYAEFSYNNSYQASIQMAPYEALYGRKCRTPLLWDQVGESQVFGTDILREAESKVRIIRDNLKVAQSRQKSYADNRRRDLEFAVGDFVYLRVTPLRGVHRFQTKGKLAPRYVGPFRIIARRGEVAYQLELPASLGNVHDVFHVSQLKKCLRVPSEQADSEQIEVREDLTYVERPVKILDTMERRTRNRVIRFCKVQWSNHAEEEATWEREDELKAAHPDLFVSPSESRGQDSV

SEQ ID NO: 188722 - protein, 89 aa, Oryza sativa
  Clone ID: PAT_MRT4530_85299C.1.pep
MVDKCDITLVPSRVKLDDPNPKSGQFALSHPLQSGLFLHRRRRKMQGGRRGLWRSPTQDPLLCKASKRGSAAVSSGHEEAGRLVAWMLR

SEQ ID NO: 188723 - protein, 195 aa, Oryza sativa
  Clone ID: PAT_MRT4530_8529C.1.pep
MWVPLIILLFLPLLSLLSYRAAHRGGEVGGGVVMGNGLEEARCWHLRAVVLAVEGATGRRLHAAEAELGLAADEGIDEAELRLVEDRVIDNDPTVAGAKAVAPFREEHGQPLVERGGDPRGQQPCVVAIPPAARGCLALDLKSMKKTTNNISYMIEKGDLRSKSIKKATTSNSYMMENGYLRSKPMKKLQPVILT

SEQ ID NO: 188724 - protein, 64 aa, Oryza sativa
  unsure (1)..(64): unsure at all Xaa locations
  Clone ID: PAT_MRT4530_852C.1.pep
EISRENPXPSPTTGARRRGARGALRRXXGGGXGSXCRRRSILHHFRCAVWPXXXXPRYHXXFHP

SEQ ID NO: 188725 - protein, 1809 aa, Oryza sativa
  unsure (1)..(1809): unsure at all Xaa locations
  Clone ID: PAT_MRT4530_85300C.1.pep
MDEVGGRWTFSRANEGYTSCGPMAGSVTRRGLDMTGFVLELRGMCVVLGYPHGVDYQARPLPEQEGEDAEPHAGWEVTAVILSGSPERTSLAVTAGGDSFPAACQNAALLAIGTLHQRYPDELQHSPYRYHPRRGGARDYATFRDASSEDDATVVHLARMVEAYDAARIDFHQMVRRGMVENNLKILELRQENLQLKKDLDALEAQLHQLKIAQGEDSRPKRRRVCRSQKITARKSTSRPELVRQSLAWTCFVETPRAEPAPVVPQEGEASGVGSSEGALLLTFRPGPSQRSPSLFAGSVWGFQMVTTRRNVNTGEGNQPEGSNPNHQGNPPPPPPPPPPPPPDTNAILTQILAQQANMMNAFLHHLQNPPQQNAPPPPPQHSKLAEFLRIRPPTFSSSNNPVDALDWLHAVGKKLDTVQCSDEEKVVFAAHQLQGPASLWWDHFQAAQPEGQPITWARFTAAFRRTHVPAGVVALKKREFRELKQGNRSVMEYLHEFNNLARYAPEDVREDEEKQEKFLAGMDPELSVRLVSGDYPDFQRLVDKSIRLEAKHKELESHKRRLANFRSQQGANQRVRYTNPYPGGSSSQQQQQQQPRPAPRPQFVVRVPQPQQQQNQQGTRAPRPPTPAVQPGQGRRDAQGQQRLCFNCFEPGHFADKCPKPRRQQGQAPPRSNNGGKDVIRGRVNHVTAEDVLTTPDVIVGTFLVHSIPATILFDSGASHSFISVPFVXKNQLGVERLRNPLLITTPGGVMTAKYYSPAVPIEIQGILFPSDLILLDTKNLDVILGMNWLAQFQGVVDCARRTVTLYRGPEQPVVFFAPPTSVRSSELHQIGLSEIPIVREFGDVFPEELPGMPPKREIEFRIDLAPGTTPLYKRPYRMAANELAEVKKQLEELKEKGYIRPSTSPWGAPVIFVEKKDKTKRMCVDYRALNEVTIKNKYPLPRIDDLFDQLKGATVFSKIDLRSGYHQLRIREEDIPKTAFTTRYGLYEFTVMSFGLTNAPAFFMNLMDKVFMEYLDKFVVVFIDDILIYSQSEEDHQHHLRLVLGKLREHQLYAKLSKCEFWLSEVKFLGHVISAKGVAVDPETVTAVTDWKQPKTVTQIRSFLGLAGYYRRFIENFSKIARPMTQLLKKEEKFVWSPQCEKAFQTLKEKLVSSPVLILPDTRKDFMMYCDASRQGLGCVLMQDGHVVAYASRQLRPHEGNYPTHDLELAAVVHALKIWRHYLIGNRCEIYTDHKSLKYIFTQSDLNLRQRRWLELIKDYDVGIHYHPGKANVVADALSRKGHCNTLNVRGIPPELNQQMEALNLSIVGRGFLAALEAKPTLLDQIREAQKNDPDMHGLLKNMKQGKAAGFTEDEHGTLWNGKRVCVPDNRELKQLILQEAHESPYSIHPGSTKMYLDLKEKYWWVSMKREIAEFVALCDVCQRVKAEHQRPAGLLQPLQVPEWKWDEIGMDFITGLPKTQGGYDSIWVIVDRLTKVARFIHVKTTYGGNKLAELYFARIVSLHGVPKKIVSDRGSQFTSHFWKKLQEELGTRLNFSTAYHPQTDGQTERLNQILEDMLRACVLDFGKTWDKSLPYAEFSYNNSYQASIQMAPYEALYGRKCRTPLLWDQVGESQVFGTDILREAEAKVRIIRDNLKVAQSRQKSYADNRRRDLEFAVDDFVYLRVTPLRGVHRFRTKGKLAPRYVGPFRITARRGEVAYQLELPASLGNVHDVFHVSQLKKCLRVPSEQADSEQIEVREDLTYVERPVKILDAMERRTRNRVIRFCKVQWSNHAEEEATWEREDELKAAHPDLFASSSESRGRDSV

SEQ ID NO: 188726 - protein, 2027 aa, Oryza sativa
  unsure (1)..(2027): unsure at all Xaa locations
  Clone ID: PAT_MRT4530_85301C.1.pep
MEPRSPRRFPSPPAALSHSQHYLSTPCASLLRFRPLPLSFPVGIELAPSSSLSAVAAELRFAAVVAPDLLPLRHRLLWLRRVLVDLVHPFVSPADRRNAAVLVDPSRAAASLRFGRRSRRRSRPGVSRGPPFRFPLPSPLSGAAPSRRRSPPVTIGARARRLPSAVPARPPSGAPCGCHVGPGRQPPAPSGAADAWDPRRRPAQAACTRSTVDREAAAWAPLPWTRANEGYTSCGPVVEMSWHRAGVLLLGAQSCLPVLGVPAVGGIGSMAGSVTRRGLDMTGFVLELRGMCVALGYPHGVDYQARPLPEQEGDDAEPHAAWEVTAVILAGSPERTSLTVTAGGDSFPAACQSAALLAIGTLHQRYPDELQHSPYRYHPRRGGARDHTTFRDASSEDDATIVHLARMVEAYDAARIDFHQMVRRGMVEDNLKILELRQENLQLKKDLDAVEAQLHQLKIAQGEICRPKRRRVCRSLKITARKSTSRPELVRQSLAWTCFVETPRAEPAPVVPQEGEASGVXMVMTRRSANTGDGNQPEGSNHNHQGNPPPPPPLPPPPPPDTNAILTQILAQQANMMTAFLHHLQNPPQLNAPPPPPQHSKLAEFLRIRPPTFSSSNNPVDALDWLHAVGKKLDTVQCSDEEKVIFAAHQLQGPASLWWDHFQATQPEGQPITWARFTAAFRRTHVPAGVVALKKREFREWKQGNRSVMEYLHEFNNLARYAPEDVREDEEKQEKFLAGMDPELSVRLVSGDYPDFQRLVDKSIRLEAKHKELESHKRRLANFRNQQGANQRVRYTNPYPGGSSSQQQQQQQQPRSAPRPQFVVRVPQPQQQQNQQGTRAPRPPPPTVQPGQGRRDAQGPQRLCFNCFEPGHFADKCPKPRRQQGQAPPRPNNGVKDVIRGRVNHVTAEDVLTTPDVIVGTFLIHSIPATILFDSGASHSFISVPFVGRNQLGVERLRNPLLITTPGGVMTAKYYIPAVPIEIQGIPFPSDLILLDTKNLDVILGMNWLAQFQGVVDCARRTVTLYRGPEQPVVFFAPPTSVRSSELHQIELSEIPIVREFGDVFPEELPGMPPKREIEFRIDLAPGTAPLYERPYRMAANELAEVKKQLEELKEKGYIRPSTSPWGAPVIFVEKKDKTKRMCVDYRALNEVTIKNKYPLPRIDDLFDQLKGATVFSKIDLRSGYHQLRIREEDIPKTAFTTRYGLYEFTVMSFGLTNAPAFFMNLMNKVFMEYLDKFVVVFIDDILIYSQSEEDHQHHLRLVLGKLREHQLYAKLSKCEFWLSEVKFLGHVISAKGVAVDPETVTAVTDWKQPKTVTQVRSFLGLAGYYRRFIENFSKIARPMTQLLKKEEKFVWSPQCEKAFQTLKEKLVSSPVLILPDTHKDFMVYCDASRQGLGCVLMQDGHVVAYASRQLRPHEGNYPTHDLELAAVVHALKIWRHYLIGNRCEIYTDHKSLKYIFTQSDLNLRQRRWLELIKDYDVGIHYHPGKANVVADALSRKSHCNTLNVRGIPPELNQQMEALNLSIVSRGFLAALEAKPTLLDQIREAQKNDPDMHGLLKNMKQGKAAGFTEDEHGTLWNGNRVCVPDNRELKQLILQEAHESPYSIHPGSTKIYLDLKEKYWWVSMKREIAEFVALCDVCQRVKAEHQRPAGLLQPLQVLEWKWDEIGMDFITGLPKTQGGYDSIWVVVDRLTKVARFIPVKTTYGGNKLAELYFARIVSLHGVPKKIVSDRGSQFTSHFWKKLQEELGTRLNFSTAYHPQTDGQTERLNQILEDMLRACVLDFGKTWDKSLPYAEFSYNNSYQASIQMAPYEALYGRKCRTPLMWDQVGESQVFGTDILREAEAKVRTIRDNPKVAQSRQKSYADNRRRDLEFAVDDFVYLRVTPLRGVHRFRTKGKLAPRYVGPFRIVARRGEVAYQLELPASLGNVHDVFHGSQLKKCLRVPSEQADSEQIEVREDLTYVERPVKILDTMERRTRNRVIRFCKVQWSNHAEEEATWEREDELKAAHPDLFASSSESRGRDSV

SEQ ID NO: 188727 - protein, 73 aa, Oryza sativa
  Clone ID: PAT_MRT4530_85302C.1.pep
NGYIKNKPINHLNKPLRIAPKVVVTMAHHKADDVVPVTNFQKKKKLLINKHSSVCTHLSLPCCCPSLYICSTD

SEQ ID NO: 188728 - protein, 4143 aa, Oryza sativa
  Clone ID: PAT_MRT4530_85303C.1.pep
MKFTYVATCQIYGNLKQAGDRRATDILNLMVNYPGLRVAYIDEVEERDGDKVKKVFYSVLVKALDNHDQEIYRIKLPGPAKLGEGKPENQNHAIIFTRGEALQTIDMNQDNYLEEALKMRNLLEEFNENHGVRQPTILGVREHIFTGSVSSLAWFMSNQETSFVTIGQRVLANPLKVRFHYGHPDVFDRIFNITRGGISKASCGINLSEDIFAGFNSTLRRGNVTHHEYIQVGKSMAGSVTRRGLDMTGFVLELRGMCVVLGYPHGVDYQARPLPEQEGEDAEPHAGWEVTAVILSGSPERTSLTVTAGGDSFPAACQSAALLAIGTLHQRYPDELQHSPYRYHPRRGGARDYATFRDASSEDDATIVHLARMVEAYDAARIDFHQMVRRGMVENNLKILELRQENLQLKKDLDAVEAQLHQLKIAQGEICRPKRRRVCRSQKITARKSTSRPELVRQSLAWTCFVETPRAEPAPVVPQEGEASGVGSTEALSLFAGSVWGFQMVTTRRNAVTGDGNQPEGSNHNHQGNPPPPPPPPPPPPPDTNAILTQILAQQANMMNAFLHHLQNPPQQNAPPPPPQHSKLAEFLRIRPPTFSSSNNPVDALDWLHAVGKKLDTVQCSDEEKVVFAAHQLQGPASLWWDHFQATQPEGQPITWARFTAAFRRTHVPAGVVALKKREFRELKQGNRSVMEYLHEFNNLARYAPEDVREDEEKQEKFLAGMDPELSVRLVSGDYPDFQRLVDKSIRLEAKHKELESHKRRLANFRNQQGANQRVRYTNPYPGGSSSQQQQQQQQQPRPAPRPQFVVRVPQLQQQQNQQGTRAPRPPTPTVQPVQGRRDAQGPQRLCFNCFEPGPFADKCPKPRRQQGQAPPRPNNGGKDVIRGRVNHVTAEDVLTTPDVIVGTFLVHSIPATILFDSGASHSFISVPFVGRNQLGVERLRNPLLITTPGGVMTAKYYSPAVPIEIQGIPFPSDLILLDTKNLDVILGMNWLAQFQGVVDCARRTVTLYRGPAQPVVFFAPPTSVRSSELHQIGLSEIPIVREFGEVFPEELPGMPPKREIEFRIDLAPGTTPLHKRPYRMAANELAEVKKQLEELKEKGYIRPSISPWGAPVIFVEKKDKTKRMCVDYRALNEVTIKNKYPLPRIDDLFDQLKGATVFSKIDLRSGYHQLRIREEDIPKTAFTTRYGLYEFTVMSFGLTNAPAFFMNLMNKVFMEYLDKFVVVFIDDILIYSQSEEDHQHHLRLVLGKLREHQLYAKLSKCEFWLSEVKFLGHVISAKGVAVDPETVTAVTDWKQPKTVTQVRSFLRPHEGNYPTHDLELAAVVHALKIWRHYLIGNRCEIYTDHKSLKYIFTQSDLNLRQRRWLELIKDYDVGIHYHPGKANVVADALSRKSHCNTLNVRGIPPELNQQMEALNLNIVGRGFLAALEAKSTLLDQIREAQKNDPDMHGLLKNMKQGKAAGFTEDEHGTLWNGKRVCVPDNRELKQLILQEAHESPYSIHPGSTKMYLDLKEKYWWVSMKREIAEFVALCDVCQRVKAEHQRPAGLLQPLQVPEWKWDEIGMDFITGLPKTQGGYDSIWVVVDRLTKVARFIPVKTTYGGNKLAELYFARIVSLHGVPKKFVSDRGSQFTSHFWKKLQEELGTRLNFSTAYHPQTDGQTECLNQILEDMLRACVLDFGKTWDKSLPYAEFSYNNSYQASIQMAPYEALYGRKCRTPLLWDQVGESQVFGTDILREAEAKVRIIRDNLKVAQSRQKSYADNRRCDLEFAVGDFVYLRVTPLRGVHRFQTKGKLAPRYVGPFRIIARRGEVAYQLELPASLGNVHDVFHASQLKKCLRVPSEQADSEQIEVREDLTYVERPVKILDTMERRTRNRPIPISSPVPPNLGVEIPFKGGRRARPPPSLTGGAHPSSPFSRRARRRARALAPPPPPNPPHPAVPARIKEGEITPRDSLPFFPLFPLSLSLGFVRNRARDLRRRHQWRPRFPRPIPSPPGALSLSRRYLIASRAPLLRFRRSPLTLPVGIEPAPSFSLSAIAAELRSVAVVAPDLLPFRRHPLRLRRVLADPVRPSASLADRRNAAVLVDPSPRRRRPPLRSPFPPPSSSRGEPWTAVRFPSSLLSLGCRSAAPLVAGGDHRGAGAPPPVGRAGEAAFGRARGCQVGPAVSRPRPWVRLTRGTHGAGRRQPRAPGPPWAVRLPRGPHSRGPAPLPYKDRSSGLCCKALPYFHMSSGANEGYTGCGSVVEMSWHRAGVLLLGAQSCLPVPGVPAVGGIGSMAGSVTRRGLDMTGFVLELRGMCVVLGYPHGVDYQARPLPEQEGEDAEPHAGWEVTAVILSGSPERTSLAVTAGGDSFPAACQNAALLAIGTLHQRYPDELQHSPYRYHPRSGGARDYATFRDAGSEDDAPIVHLARMVKAYDAARIDFHQMVRRGMVENNMKILELRQENLQLKKDLDAVEAQLHQLKIAQGEDCRPKRRRVCRSQKITARKSTSRPELVRQSLAWTCFVETPRAEPAPVVPQEGEASGVGSTEALSLFAGSVWGFQMVTTRRNANTGDGNQPESSNHNHQGNPPPPPPPPSPPPPDTNAILTQILAQQANMMTAFLHHLQNPPQHNAPPPPPQHSKLAEFLRIRPPTFSSSNNPVDALDWLHAVGKKLDTVQCSDEEKVIFAAHQLQGPASLWWDHFQATQPEGQPITWARFTAAFRRTHVPAGVVALKKREFRELKQGNRSVMEYLHEFNNLARYAPEDVREDEEKQEKFLAGMDPELSVRLVSGDYPDFQRLVDKSIRLEAKHKELESHKRRLANFRNQQGANQRVRYTNPYPGGSSSQPQQQHQQPRSAPRPQFVPGQGRRDASGPQRLCFNCFEPGHFADKCPKPRRQQGQAPPRSNNGGKDVIRGRVNHVTAEDVLTTPDVIVGTFLIHSIPATILFDSGASHSFISVPFVGRNQLGVERLRNPLLITTPGGVMTAKEFGDVFPEELPGMPPKREIEFRIDLAPGTTPLYKRPYRMAANELAEVKKQLEELKEKGYIRPSTSPWGAPVIFVEKKDKTKRMCVDYRALNEVTIKNKYPLPRIDDLFDQLKGATVFSKIDLRSGYHQLRIREEDIPKTAFTTRYGLYEFTVMSFGLTNAPAFFMNLMNKVFMEYLDKFVVVFIDDILIYSHSEEDHQHHLRLVLGKLREHQLYAKLSKCEFWLTEVKFLGHVISAKGVAVDPEAVTAVTDWKQPKTVTQIRSFLGLAGYYQRFIENFSKIARPMTQLLKKEEKFVWSPQCEKAFQTLKEKLVSSPVLILPDTRKDFMVYCDASRQGLGCVLMQDGHVVAYAFRQLRPHEGNYPTHDLELAAVVHALKIWRHYLIGNRCEIYTDHKSLKYIFTQSDLNLLQRRWLELIKDYDVGIHYHPGKANVVADALSRKSHCHALNVRGIPPELNQQMEALNLSIVSRGFLAALEAKPTLLDQIREAQKNDPDMHGLLKNMKQGKAAGFTEDEHGTLWNGNREKYWWVSMKREIAEFVALCDVCQRVKAEHQRPAGLLQPLQVPEWKWDEIGMDFITGLPKTQGGYDSIWVVVDRLTKVARFIPVKTTYGGNKLAELYFARIVSLHGVPKKIVSDRGSQFTSHFWKKLQEELGTRLNFSTAYHPQTDGQTERLNQILEDMLRACVLDFGKTWDKSLPYAEFSYNNSYQASIQMAPYEALYGRKCRTPLLWDQVGESQVFGTDILREAEAKVRIIRDNLKVAQSRQKSYADNRRCDLEFAVGDFVYLRVTPLRGVHRFQTKGKLAPRYVGPFRIIARRGEVAYQLELPASLGNVHDVFHASQLKKCLRVPSEQADSEQIEVREDLTYVERPVKILDTMERRTRNRPIPISSPVPPNLGVEIPFKGGRRARPPPSLTGGAHPSSPSSRRARRRARALAPPPPPNPPHPAVPARIKEGEITPRDSLPFFPLFPLSLSLGFVRNRARDLRRRHQWRPRFPRPIPSPPAALSLSRRYLIASRAPLLRFRRSPLTLPVGIEPAPSSSHSTVAAELRSVAVVAPDLLPFRRRPLRLRRVLADPVRPSASLADRRNAAVLLRSGRRFRHPRRPGVSRGPPFAFPLPSSLSGAAPPRRWSPAATIGARVRRLPLAVPARPPSGAPAAARWARPSAARARGCG

SEQ ID NO: 188729 - protein, 1857 aa, Oryza sativa
  Clone ID: PAT_MRT4530_85304C.1.pep
MVLMVAPRPYKDRSSGLCCKALPYFHMSSGANEGYTSCGPMAGSVTRRGLDMTGFVLELRGMCVVLGYPHGVDYQARPLPEQEGEDAEPHAGWEVTAVILSGSPERTSLAVTAGGDSFPAACQNAALLAIGTLHQRYPDELQHSPYRYHARRGGARDYATFRDASSEDDATVVHLARMVEAYDAARIDFHQMVRRGMVENNMKILELRQENLQLKKDLDAVEAQLHQLKIAQGEDSRPKRRRVCRSQKITARKSTSRPELVRQSLAWTCFVETPRAEPAPVVPQEGEASGVGSSEGALLLTFRPGPSQRSPSLFAGSVRGFQMVTTRRNVNTGEGNQPEGSNPNHQGNPPPPPPPDTNAILTQILAQQANMMNAFLHHLQNPPQQNAPPPPPQHSKLAEFLRIRPPTFSSSNNPVDALDWLHAVGKKLDTVQCSDEEKVIFAAHQLQGPASLWWDHFQATQPEGQPITWARFTAAFRRTHVPAGVVALKKREFRELKQGNRSVMEYLHEFNNLARYAPEDVREDEEKQEKFLAGMDPELSVRLVSGDYPDSQRLVDKSIRLEAKHKELESHKRRLANFRNQQGANQRVRYTNPYPGGSSSQQQQQQQQPRSAPRPQFVVRVPQQQQQQNQQGTRAPRPPTPTVQPVQGRRDAQGQQRLCFNCFEPGHFADKCPKPRRQQGQAPPRSNNGGKDVIRGRVNHVTAEDVLTTPDVIVGTFLVHSIPATILFDSGASHSFISVPFVGRNQLGVERLRNPLLITTPGGVMTAKYYSPAVPIEIQGIPFPSDLILLDTKNLDVILGMNWLAQFQGVVDCARRTVTLYRGPEQPVVFFAPPTSVRSSELHQIGLSEIPIVREFGDVFPEELPGMPPKREIEFRIDLAPGTTPLHKRPYRMAANELAEVKTQLEELKEKGYIRPSTSPWGAPVIFVEKKDKTKRMCVDYRALNEVTIKNKYPLPRIDDLFDQLKGATVFSKIDLRSGYHQLRIREEDIPKTAFTTRYGLYEFTVMSFGLTNAPAFFMNLMNKVFMEYLDKFVVVFIDDILIYSQSEEDHQHHLRLVLGKLREHQLYAKLSKCEFWLSEVKFLGHVISAKGVAVDPETVTAVTDWKQPKTVTQIRSFLGLAGYYRRFIENFSKIARPMTQLLKKEEKFVWSPQCEKAFQTLKEKLVSSPVLILPDTRKDFMVYCDASRQGLGCVLMQDGHVVAYASRQLRPHEGNYPTHDLELAAVVHALKIWRHYLIGNRCEIYTDHKSLKYIFTQSDLNLRQRRWLELIKDYDVGIHYHPGKANVVADALSRKSHCNTLNVRGIPPELNQQMEALNLNIVGRGFLAALEAQPTLLDQIREAQKNDPDMHGLLKNMKQGKAAGFTEDEHGTLWNGKRVCVPDSRELKQLILQEAHESPYSIHPGSTKMYLDLKEKYWWVSMKREIAEFVALCDVCQRVKAEHQRPAGLLQPLQVPEWKWDEIGMDFITGLPKTQGGYDSIWVIVDRLTKVARFIPVKTTYGGNKLAELYFARIVSLHGVPKKIVSDRGSQFTSHFWKKLQEELGTRLNFSTAYHPQTDGQTERLNQILEDMLRACVLDFGKTWDKSLPYAEFSYNNSYQASIQMAPYEALYGRKCRTPLLWDQVGESQVFGTDILREAEAKVRIIRDNLKVAQSRQKSYADNRRRDLEFAVDDFVYLRVTPLRGVHRFQTKGKLAPRYVGPFRITARRGEVAYQLELPASLGNVHDVFHVSQLKKCLRVPSEQADSEQIEVREDLTYVEKPVKILDAMERRTRNRVIRFCKVQWSNHAEEEATWEREDELRHRHPEPRRRFPPLRPPFSSSSLSRGEPKTAVRLPPSLLSLGRRSAAPVVAGGDH

SEQ ID NO: 188730 - protein, 122 aa, Oryza sativa
  Clone ID: PAT_MRT4530_85305C.1.pep
KKRIDPVNKDIRTQKPYIRMVNYRKDRVKPIVSLSNHDGGPQQQDVVAMLNTKATQQLAHHIRGVIVAKLAFQATHYRRLDNHIDTKVMKVGKAKSSSYIQQWASATPSRGQCLYTASTTYF

SEQ ID NO: 188731 - protein, 1767 aa, Oryza sativa
  Clone ID: PAT_MRT4530_85306C.1.pep
MDEVGGRWTFSRANEGYTSCGPMAGSVTRRGLDMTGFVLELRGMCVVLGYPHGEDYQARPLPDQEGDDAEPHAGWEVTAVILSGSPERTSLAVTAGGDSFPAACQNAALLAIGTLHQRYPDELQHSPYRYHPRRGGARDYATFRDASSEDDATIVHLARMVEAYDAARIDFHQMVRRGMVENNMKILELRQENLQLKKDLDAVEAQLHQLKVAQGEICRPKRRRVCRSQKITARKSTSRPELVRQSLAWTCFVETPRAEPAPVMVTTRRNAATGDGNQPESSNHNHQGNPPPPPPPPPPPPPDTNAILTQILAQQANMMNAFLHHLQNPPQQNAPPPPPQHSKLAEFLRIRPPTFSSSNNPVDALDWLHAVGKKLDTVQCSDEEKVVFAAHQLQGPASLWWDHFQATQPEGQPITWARFTAAFRRTHVPAGVVALKKREFRELKQGNRSVMEYLHEFNNLARYAPEDVREDEEKQEKFLAGMDPELSVRLVSGDYPDFQRLVDKSIRLEAKHKELESHKRRLANFRNQQGANQRVRYTNPYPGGSSSQQQQQQPRPAPRPQFVVRVPQPQQQQNQQGTRAPRPPTPAVQPVQGRRDAQGQQRLCFNCFEPGHFADKCPKPRRQQGQAPPRSNNGGKDVIRGRVNHVTAEDVLTTPDVIVGTFLVHSIPATILFDSGASHSFISVPFVGRNQLGVERLRNPLLITTPGGVMTAKFYSPAVPIEIQGIPFPSDLILLDTKNLDVILGMNWLAQFQGVVDCARRTVTLYRGPEQPVVFFAPPTSVRSSELHQIELSEIPIVREFGDVFPEELPGMPPKREIEFRIDLAPGTTPLHKRPYRMAANELAEVKKQLEELKEKGYIRPSTSPWGAPVIFVEKKDKTKRMCVDYRALNEVTIKNKYPLPRIDDLFDQLKGATVFSKIDLRSGYHQLRIREEDIPKTAFTTRYGLYEFTVMSFGLTNAPAFFMNLMNKVFMEYLDKFVVVFIDDILIYSQSEEDHQHHLRLVLGKLREHQLYAKLSKCEFWLSEVKFLGHVISAKGVAVDPETVTAVTDWKQPKTVTQVRSFLGLAGYYRRFIENFSKIARPMTQLLKKEEKFVWSPQCEKAFQTLKEKLVSSPVLILPDTRKDFMVYCDASRQGLGCVLMQDGHVVAYASRQLRPHEGNYPTHDLELAAVVHALKIWRHYLIGNRCEIYTDHKSLKYIFTQSDLNLRQRRWLELIKDYDVGIHYHPGKANVVADALSRKGHCNTLNVRGIPPELSQQMEALNLNIVGRGFLAALEAKPTLLDQIREAQKNDPDMHGLLKNMKQGKAAGFTEDEHGTLWNGNRVCVPDNRELKQLILQEAHESPYSIHPGSTKMYLDLKEKYWWVSMKREIAEFVALCDVCQRVKAEHQRPAGLLQPLQVPEWKWDEIGMDFITGLPKTQGGYDSIWVVVDRLTKVARFILVKTTYGGNKLAELYFARIVSLHGVPKKIVSDRGSQFTSHFWKKLQEELGTRLNFSTAYHPQTDGQTERLNQILEDMLRACVLDFGKTWDKSLPYAEFSYNNSYQSSIQMAPYEALYGRKCRTPLLWDQVGESQVFGTDILREAEAKVRIIRDNLKVAQSRQKSYADNRRRDLEFAVDDFVYLRVTPLRGVHRFQTKGKLAPRYVGPFRIVARRGEVAYQLELPASLGNVHDVFHVSQLKKCLRVPSEQTDSEQIEVREDLTYVERPVKILDTMERRTRNRVIRFCKVQWSNHAEEEATWEREDELKAAHPDLFASSSESRGRDSV

SEQ ID NO: 188732 - protein, 60 aa, Oryza sativa
  Clone ID: PAT_MRT4530_85307C.1.pep
MELRFKSRSYSTTRVWQKKLGDGAIFLERSPAKQPLKSGERASCWADIGLCARELLDCMD

SEQ ID NO: 188733 - protein, 670 aa, Oryza sativa
  unsure (1)..(670): unsure at all Xaa locations
  Clone ID: PAT_MRT4530_85308C.1.pep
MENFSKIARPMTQLLKKEEKFVWSPQCEKAFRTLKEKLVASPVLILPDTRKDFIVYCDASRQGLGCVLMQDGHVVAYASRQLRPHEGNYPTHDLELAAVVHALKIWRHYLIGNRCEIYTDHRSLKYIFTQSDLNLRQRRWLELIKDYDVGIHYHPGKANVVADALSRKSHCNTLNVRGIPPELNQQMEALNLSIVSRGFLATLEAKPTLLDQIREAQKNDPDMHGLLKNMKQGKAAGFTEDEHGTLWNGNRVCVPDNRELKQLILQEAHESPYSIHPGSTKMYLDLKEKYWWVSMKREIAEFVALCDVCQRVKAEHQRPAGLLQPLQVPEWKWDEIGMDFITGLPKTQGGYDSIWVVVDRLTKVARFIPVKTTYGGNKLAELYFARIVSLHGVPKKIVSDRGSQFTSHFWKKLQEELGTRLNFSTAYHPQTDGQTERLNQILEDMLRACVLDFGKTWDKSLPYAEFSYNNSYQASIQMAPYEALYGRKCRTPLLWDQVGESQVFGTDILREAEAKVRTIRDNLKVAQSRQKSYADNRRRDLEFAVDDFVYVRVTPLRGVHRFRTKGKLAPRYVGPFRITARRGEVVTTGNNPTGIPYVRALILVPGGKAQHTKTTKNSGRLGRRPQALDGRHELDTEAFIFKELLIWAWEXLSKTEYNHRTQQDTPTNAE

SEQ ID NO: 188734 - protein, 50 aa, Oryza sativa
  Clone ID: PAT_MRT4530_85309C.1.pep
VILCADSLGFLTPLPCVEAMQCCYESVTRLFLCCKTSSEPLFHGIFANEK

SEQ ID NO: 188735 - protein, 62 aa, Oryza sativa
  Clone ID: PAT_MRT4530_8530C.1.pep
FKLPQKKTIKSQARLIKPRSPKTTPPIKSFSSSPIQPFHHFLLFSHTFSIFVISAASYFDKT

SEQ ID NO: 188736 - protein, 75 aa, Oryza sativa
  Clone ID: PAT_MRT4530_85310C.1.pep
SPISSLGMKSARSAYLRPNAIGVRSLSDRCRTGYSSPYIRKERAVTNQESRSDQTLESVQWLPDPKKRSKSVLLG

SEQ ID NO: 188737 - protein, 37 aa, Oryza sativa
  Clone ID: PAT_MRT4530_85311C.1.pep
KGGGNYNLLKKKKKKKKKNKKKKKKKKKKKKKKKNDY

SEQ ID NO: 188738 - protein, 339 aa, Oryza sativa
  Clone ID: PAT_MRT4530_85312C.1.pep
MGKRSAPRYPDDGGGGGGGICCVLCWCCCFLFLIVAALAGAAAYALFLYKPKAPSYSVSNMSVSQFDFNSNDLTLYTKLVATVRAENPNEMIGIIYGDGSRTVVSYRGTPLCSGHLPTFYQGFKNVTVMEISMEGRHGFGSGLQSALEESEKEGNVPLDVFVSVPVSLRFGSFDVREVRVNVHCALVVDSISPKKKPTIKSATYQGNWSWGETSSPPIHHVKALKSPMLTQVLECSFKLAVVRERLPTLCSIHGDEAGQPGLRRRAHRTGEPRAAAAACQPPVHATAKWLKWEVEDELASAEQDNGMIYYMAVPVDGVTAELLGLQQRLVRSTSLQNIQ

SEQ ID NO: 188739 - protein, 94 aa, Oryza sativa
  unsure (1)..(94): unsure at all Xaa locations
  Clone ID: PAT_MRT4530_85313C.1.pep
MPGRIYIKPGKSLLHLAAFIGYRLXSQTNTSLFCTLCPHSCAPEKNFPIGHPSQIAPGQARLTLEFXDRLPKKKLQLVDMSILLILLSPEPGYH

SEQ ID NO: 188740 - protein, 100 aa, Oryza sativa
  Clone ID: PAT_MRT4530_85314C.1.pep
LHSLSTSRLWQAYKQTCYPQPYTSRWFRHLRPHRSHIDNSSARHVQQLRYRTHLIFQTPDESGAVSTPLPRIRLFSNARTVRVPSKRVHLSVGRRVGPQL

SEQ ID NO: 188741 - protein, 83 aa, Oryza sativa
  Clone ID: PAT_MRT4530_85315C.1.pep
KAKKAQKKGAQGAARNKTGKTGENMGPPRNHIGKKDPIRPFGKGPPHRGSEHLRGETLRGNHNFYPIKKANHRRDGPALSRHN

SEQ ID NO: 188742 - protein, 62 aa, Oryza sativa
  Clone ID: PAT_MRT4530_85316C.1.pep
MAAHSAAKYASSRPRLSSKTTAAIVRSPAAPLHSPKVAGTPLPPPKIEDEPVRLFLSATRRR

SEQ ID NO: 188743 - protein, 160 aa, Oryza sativa
  unsure (1)..(160): unsure at all Xaa locations
  Clone ID: PAT_MRT4530_85317C.1.pep
MSISPRFLAVAAVLAGAMYSAATVAADTPGGSCPYPCLPPPIAGGAVNSYPPPPPAGSSSSSSSGGGRWRRRRVVWXTYPPPPPGVMPGAFAPPFGGGFPYGPAPPPPNPILPWFPWYYQHNNPITGSTTSAAAVGRTPASMVTTVVLLPLFLVALLRVL

SEQ ID NO: 188744 - protein, 49 aa, Oryza sativa
  unsure (1)..(49): unsure at all Xaa locations
  Clone ID: PAT_MRT4530_85318C.1.pep
GGGRPPPPKXTRPPAERAIVRHPCQDPHLLVTPQFVKSTQEYGYLLTCS

SEQ ID NO: 188745 - protein, 985 aa, Oryza sativa
  unsure (1)..(985): unsure at all Xaa locations
  Clone ID: PAT_MRT4530_85319C.1.pep
MGTLHQRYPYELQHSPYRYHPRRGGARDYATFRDASSEDDATIVHLARMVEAYNAARIDFHQMVRRGMVENNMKILELRQENLQLKKDLDAVEAQLHQLKIAQGKVCRPKRRRVCRSQKITARKSTSRPELVRQSLAWTCFIETPRAEPAPVVPQEGEASGVALSLFAGSVWGFQMVTTRRNAVTGDGNQPEGSNHNHQGNPPSPSPPPPPPPPDTNAILTQILAQQANMMTAFLHHLQNPPQQNAPPPPPQHSKLAEFLRIRPPTFSSSNNPVDALDWLHAVGKKLDTVQCSDEEKVIFAAHQLQGPASLWWDHFQATQPEGQPITWARFTAAFRRTHVPAGVVALKKREFRELKQGNRSVMEYLHEFNNLARYAPEDVREDEEKQEKFLAGMDPELSVRLVSGDYPDFQRLVDKSIRLEAKHKELESHKRRLANFRNQQGANQRVRYTNPYPGGSSSQQQQQQQQPRSAPRPQFVVRVPQPQQQQNQQGTRAPRPPTQTVQPGQGRRDAQGQQRLCFNCFEPGHFADKCPKPRRQQGQAPPRPNNGGKDVIRGRVNHVMAEDVLTTPDVIVVTAVPDWKQPKTVTQVRSFLGLAGYYRXRVKAEHQRPAGLLQPLQVPEWKWDEIGMDFITGLPKTQGGYDSIWVVVDRLTKVARFIPVKTTYGGNKLAELYFARIVSLHGVPKKIVSDRGSQFTSHFWKKLQEELGTRLNFSTAYHPQTDGQTERLNQILEDMLRACVLDFGKTWDKSLPYAEFSYNNSYQASIQMAPYEALYGRKCRTPLLWDQVGESQVFGTDILREAEAKVRTIRDNLKVAQSRQKSYADNRRRDLEFAVGDFVYLRVTPLRGVHRFQTKGKLAPRFVGPFRIIARHGEVAYQLELPASLGNVHDVFHVSQLKKCLRVPSEQADSEQIEVREDLTYVERPVKILDTMERRTRNRVIRFCKVQWSNHAEEEATWEREDELKAAHPDLFASPSESRGRDSV

SEQ ID NO: 188746 - protein, 91 aa, Oryza sativa
  Clone ID: PAT_MRT4530_8531C.1.pep
QTKGRTQSDRSILRGKAWFQLKLQTYRGNTANETTLTGAHPIHSKERERGFWQSLILGDTMKYVAHWDDMEDLGFLHRPVTHWNAHAQNLV

SEQ ID NO: 188747 - protein, 1805 aa, Oryza sativa
  Clone ID: PAT_MRT4530_85320C.1.pep
MDEVGRRWTFSRANEGYTSCGPMAGSVTRRGLDMTGFVLELRGMCVVLGYPHGVDYQARPLPEQEGEDAEPHAGWEVTAVILSGSPERTSLAVTAGGDSFPAACQNAALLAIGTLHQRYPDELQHSPYRYHPRRGGARDYATFRDASSEHDATVVHLARMVEAYDAARIDFHQMVRRGMVENNMKILELRQENLQLKKDLDALEAQLHQLKIAQGEDSRPKRRRVCRSQKITARKSTSRPELVRQSLAWTCFVETPRAEPAPVVPQEGEASGVGSSEGALLLTFRPGPSQRSPSLFAGSVWGFQMVTTRRNVNTGEGNQPEGSNPNPQGNPPPPPPPDTNAILTQILAQQANMMNAFLHHLQNPPQQNAPPPPPQHSKLAEFLRIRPPTFSSSNNPVDALDWLHAVGKKLDTVQCSDEEKVVFAAHQLQGPASLWWDHFQATQPEGQPITWTRFTAAFRKTHVPAGVVALKKREFRELKQGSRSVMEYLHEFNNLARYAPEDVREDEEKQEKFLAGMDPELSVRLVSGDYPDFQRLVDKSIRLEAKHKELESHKRRLANFRNQQGANQRVRYTNPYPGGSSSQQQQQQQQQPRSAPRPQFVVRIPQPQQQQNQQGTRAPRPPTPTVQPVQGRRDAQGPQRLCFNCFEPGHFADKCPKPRRQQGQVPPRSNNGGKDVIRGRVNHVTAEDVLTTPDVIVGTFLVHSIPATILFDSGASHSFISVPFVGKNQLGVERLRNPLLITTPGGVMTAKYYSPAVPIEIQGIPFPSDLILLDTKNLDVILGMNWLAQFQGVVDCARRTVTLYRGPEQPVVFFAPPTSVRSSELHQIGLSEIPIVREFGDVFPEELPGMPPKREIEFRIYLAPGTTPLYKRPYRMAANELAEVKKQLEELKEKGYIRPSTSPWGAPVIFVEKKDKTKRMCVDYRALNEVTIKNKYPLPRIDDLFDQLKGATVFSKIDLRSGYHQLRIREEDIPKTAFTTRYGLYEFTVMSFGLTNAPAFFMNLMNKVFMEYLDKFVVVFIDDILIYSQSEEDHQHHLRLVLGKLREHQLYAKLSKCEFWLSEVKFLGHVISAKGVAVDPETVTAVTDWKQPKTVTQIRSFLGLAGYYRRFIENFSKIARPMTQLLKKEEKFVWSPQCEKAFQTLKEKLVSSPVLILPDTRKDFMVYCDASRQGLGCVLMQDGHVVAYASRQLRPHEGNYPTHDLELAAVVHALKIWRHYLIGNRCEIYTDHKSLKYIFTQSDLNLRQRRWLELIKDYDVGIHYHPGKANVVADALSRKSHCNTLNVRGIPPELNQQMEALNLSLVGRGFLAALEAKPTLLDQIREAQKNDPDMHGLLKNMKQGKAAGFTEDEHGTLWNGKRVCVPDNRELKQLILQEAHESPYSIHPGSTKMYLDLKEKYWWVSMKREIAEFVALCDVCQRVKAEHQRPAGLLQPLQVPEWKWDEIGMDFITGLPKTQGGYDSIWVIVDRLTKVARFIPVKTTYGGNKLAELYFARIVSLHGVPKKIVSDRGSQFTSHFWKKLQEELGTRLNFSTAYHPQTDGQTERLNQILEDMLRACVLDFGKTWDKSLPYAEFSYNNSYQASIQMAPYEALYGRKCRTPLLWDQVGESQVFGTDILREAEAKVRIIRDNLKVAQSRQKSYADNRRRDLEFAVDDFVYLRVTPLRGVHRFQTKGKLAPRYVGPFRIVARRGEVAYQLELPASLGNVHDVFHVSQLKKCLRVPSEQADSEQIEVREDLTYVEKPVKILDTMERRTRNRVIRFCKVQWSNHAEEEATWEREDELKAAHPDLFASSSESRGRDSV

SEQ ID NO: 188748 - protein, 44 aa, Oryza sativa
  Clone ID: PAT_MRT4530_85321C.1.pep
LVNQKLKCTQLPPMANHLIKKCSSPHSPKSNYSNPRRLHTAVDQ

SEQ ID NO: 188749 - protein, 1948 aa, Oryza sativa
  Clone ID: PAT_MRT4530_85322C.1.pep
MDEVGGRWTFSRANEGYTSCGPMAGSVTRRGLDMTGFVLELRGMCVVLGYPHGVDYQARPLPEQEGEDAEPHAGWEVTAVILSGSPERTSLAVTAGGDSFPAACQNAALLAIGTLHQRYPDELQHSPYRYHPRRGGARDYATFRDASSEDDATVVHLARMVEAYDAARIDFHQMVRRGMVENNLKILELRQENLQLKKDLDALEAQLHQLKIAQGEDSRPKRRRVCRSQKITARKSTSRPELVRQSLAWTCFVETPRAEPAPVVPQEGEASGVGSSEVLIVSSLSLLAGSVWGFQMVTTRRNVNTGEGNQPEGSNPNHQGNPPPPPPPDTNAILTQILAQQANMMTAFLHHLQNPPQQNAPPPPPQHSKLAEFLRIRPPTFSSSNNPVDALDWLHAVGKKLDTVQCSDEEKVIFAAHQLQGPASLWWDHFQATQPEGQPITWARFTAAFRRTHVPAGVVALKKREFRELKQGNRSVMEYLHEFNNLARYAPEDVREDEEKQEKFLAGMDPELSVRLVSGDYPDFQRLVDKSIRLEAKHKELESHKRRLANFRNQQGANQRVRYTNPYPGGSSSQQQQQQQQPRPAPRPQFVVRVPQQQQQQNQQGTRAPRPPTPAGQPVQGRRDASGPQRLCFNCFEPGHFADKCPKPRRQQGQAPPRSNNGGKDVIRGRVNHVTAEDVLTTPDVIVGTFLVHSIPATILFDSGASHSFISVPFVGRNQLGVERLRNPLLITTPGGVMTAKYYSPAVPIEIQGIPFPSDLILLDTKNLDVILGMNWLAQFQGVVDCARRTVTLYRGPEQPVVFFAPPTSVRSSELHQIGLSEIPIVREFGDVFPEELPGMPPKREIEFRIDLAPGTTPLYKRPYRMAANELAEVKKQLEELKEKGYIRPSTSPWGAPVIFVEKKDKTKRMCVDYRALNEVTIKNKYPLPRIDDLFDQLKGATVFSKIDLRSGYHQLRIREEDIPKTAFTTRYGLYEFTVMSFGLTNAPAFFMNLMNKVFMEYLDKFVVVFIDDILIYSQSEEDHQHHLRLVLGKLREHQLYAKLSKCEFWLSEVKFLGHVISAKGVAVDPETVTAVTDWKQPKTVTQIRSFLGLAGYYRRFIENFSKIARPMTQLLKKEEKFVWSPQCEKAFQTLKEKLVSSPVLILPDTRKDFMVYCDASRQGLGCVLMQDGHVVAYASRQLRPHEGNYPTHDLELAAVVHALKIWRHYLIGNRCEIYTDHKSLKYIFTQSDLNLRQRRWLELIKDYDVGIHYHPGKANVVADALSRKSHCNTLNVRSIPPELSQQMEALNLSIVGRGFLAALEAKPTLLDQIREAQKNDPDMHGLLKNMKQGKAAGFTEDEHGTLWNGKRVCVPDSRELKQLILQEAHESPYSIHPGSTKMYLDLKEKYWWVSMKREIAEFVALCDVCQRVKAEHQRPAGLLQPLQVPEWKWDEIGMDFITGLPKTQGGYDSIWVIVDRLTKVARFIPVKTTYGGNKLAELYFARIVSLHGIPKKIVSDRGSQFTSHFWKKLQEELGTRLNFSTAYHPQTDGQTERLNQILEDMLRACVLDFGKTWDKSLPYAEFSYNNSYQASIQMAPYEALYGRKCRTPLLWDQVGESQVFGTDILREAEAKVRIIRDNLKVAQSRQKSYADNRRRDLEFAVDDFVYLRVTPLRGVHRFQTKGKLAPRYVGPFRIIARRGEVAYQLELPASLGNVHDVFHVSQLKKCLRVPSEQADSEQIEVREDLTYVEKPVKILDTMDGLLGSLLGFSEADVGALQIAAEGEDPLGDEGCLHGAEIQHPLDHHPEVLRVPVLFAPLVGPHDVLGPGVLPGAPGAPLERRDPATKVVAEHHGPCEPLGSQARQAVKNGVVAVSQIYRRPPAGGLRRGLARKSEARFVDEGGVEPVALPVVPLFAEDAGNVAVQHLPPRLEVAATDYRRRRHRLNGEEPPEQPERWPTSLSRWG

SEQ ID NO: 188750 - protein, 230 aa, Oryza sativa
  Clone ID: PAT_MRT4530_85323C.1.pep
MAEAASYEEQRRRQVEANKRKLEELRLHHLSAAVRESASKPSPVKQRKRKARALPGAGEDAPLRRSGRVANLPEKPKYRDEFQDFEKRIRRSYGGKRRDLSNRVYATDEQRDYAINAAQELEEELGSDYPIFVKPMLQSHVTGGFWLSLPTHFSRKYLPKRDETIRLVDEEDDEFDTLYLANKRGLSGGWRGFSIAHKLVDGDCLVFQLIQRTKFKVYIIRASSYYETDD

SEQ ID NO: 188751 - protein, 1803 aa, Oryza sativa
  unsure (1)..(1803): unsure at all Xaa locations
  Clone ID: PAT_MRT4530_85324C.1.pep
MSWHRAGVLLLGAQSCLPVPGVPAIGGIGSMYTSDQSKIYSNSRALGYGQAEQCTQMAGSVTRRGLDMTGFFLELRGMCVALGYPHGVDYQARPLPEQEGDDAEPHAAWEVTAVILAGSPERTSLTVTAGGDSFPAACQSAALLAIGTLHQRYPDELQHSPYRYHPRRGGARDHATFRDASSEDDATIVHLARMVEAYDAARIDFHQMVRRGMVENNLKILELRQENLQLKKDLDAVEAQLHQLKIAQGEICRPKRRRVCRSLKITARKSTSRPELVRQSLAWTCFVEAPRAEPAPVVPQEGEASGVGSTEDALLLTFRPGPSQQRSANTGDGNQPEGSNHNHQGNPPPPPPPPPPPLPDTNAILTQILAQQANMMTAFLHHLQNPPQLNAPPPPPQHSKLAEFLRIRPPTFSSSNNPVDALDWLHAVGKKLDTVQCSDEEKVIFAXAHQLQGPASLWWDHFQATQPEGQPITWARFTAAFRRTHVPAGVVALKKREFRELKQGNRFVMEYLHEFNNLARYAPEDVREDEEKQEKFLAGMDPELSVRLVSGDYPDFQRLVDKSIRLEAKHKELESHKRRLANFRNQRGANQRVRYTNPYPGGSSSQQQQQQQQPRSAPRPQFVVRVPQPQQQQNQQGTRAPRPPTPTMQPGQGRRDAQGQQRLCFNCFEPGHFADKYPKPRRQQGQAPPRPNNGGKDVIRGRVNHVTAEDVLTTPDVIVGTFLIHSIPATILFDSGASHSFISVPFVGRNQLGVERLRNPLLITTPGGVMTAKYYSPAVPIEIQGIPFPSDLILLDTKNLDVILGMNXLAQFQGVMDCARRTVTLYRGPEQPVVFFAPPTSVGSSELHQIGLSKIPIVSEFGDVFPEELPGMPPKREIKFRIDLAPGTTPLYKRPYRMAANELAEVKKLLEELKEKGYIRPSTSPXGAPVIFVEKKDKTKRMCVDYRALNEVTIKNKYPLPRIDDLFDQLKGATVFSKIDLRSGYHQLLIREEDIPKAAFTTRYGLYEFTVMSFGLTNAPAFFMNLVNKVFMEYLDKFVVVFIDDILVYSQSEXLRLVLGKLREHQLYAKLSKCEFWLSEVKFLGHVISAKGVAVDPKTVTAVTDWKRPKTVTQVRSFLGLAGYYRRFIENFSKIARPMTXLLKKEEKFVWSPQCEKAFQTLKEKLVSSPVLILPDTRKDFLVYCDASRQGLGCVLMQEGHVVAYATRQLRPHEGNYPTHDLELAAVVHALKIWRHYLIGNCCEICTDHKSLKYIFTQSDLNLRQRRWLELIKDYDVGIHYHPGKANVVADALSRKSHCNTLGVRGIPPELNQQMDALNLSIVGRGFLATLEAKPTLLDRIREAQKNDPDMHGILKNMKQCKAAGFIEDEHGTLWNGNRVCVPDDKELKHLILQEAHESPYSIHPSSTKMYLDLKGKYCVSRQSTSDRPDFSNLSKYQNGNGMKLGWISSPDFQKPKEDMILYGLLWTDXTKVARFIPVKTTYGGNKLAELYFARIVSLHGVPKKIVSDRGNQFTSHFWKKLQEELGTRLNFSTAYHPQTDGQTERLNKILEDMLRACVLDFGKTWDKSLPYAEFSYNNSYQASIQMAPYEALYGRKCWTPLLWDQVGESQVFGTDNLREAEAKVRTIRENLKLAQSRXKSYADNRRRDLEFAVDDFVYLRVTPLRGVRRFQTKGKLAPRFVGPFRIIARRGEVAYQLELPASLGNVHDVFHVSQLKKCLRVPSEQADSEQIEVREDLTYVERPVKILDTMERRTKNRVIRFCKVQWSNHAKEEATWEREDELKSAHPDLFASSSESRGRDSV

SEQ ID NO: 188752 - protein, 152 aa, Oryza sativa
  Clone ID: PAT_MRT4530_85325C.1.pep
MATDPRGRRPRHHAAVNEVLSTLAAANSTLADVQRRLDADFRAAYPDHANPVKLVARLKRIQEEVAAVKGLCRDLLTQKQELIDAMRTSLAVQRSAVQRLLASSGLPPMSEEDAATDANLNQIIDEWTAHVGPDTGDDKDEDTNQIFFAAVV

SEQ ID NO: 188753 - protein, 46 aa, Oryza sativa
  Clone ID: PAT_MRT4530_85326C.1.pep
MALILQVKPEAKSVSHMRKGMVAMRCGEESRGGGLYAMNKYWEWER

SEQ ID NO: 188754 - protein, 79 aa, Oryza sativa
  Clone ID: PAT_MRT4530_85327C.1.pep
SNAANQHGANIIHIIIMFACTTLILSLCNPQEAETYMRDIYVYSTRHIVSSSCYTLKLMQKLSRRRYRAVIAPAATSEI

SEQ ID NO: 188755 - protein, 82 aa, Oryza sativa
  unsure (1)..(82): unsure at all Xaa locations
  Clone ID: PAT_MRT4530_85328C.1.pep
PATRRGRDSWCTCSALKPWLAGIYKXLGPPXLTGVRXCPYYHKTNFXLPAARLPSFYNMNIQNGTSRVCYWLSHSMTPRTGH

SEQ ID NO: 188756 - protein, 82 aa, Oryza sativa
  Clone ID: PAT_MRT4530_85329C.1.pep
ILLLALQKVTCVLYPVTQGVSSPYRLITGATLGIASPYRLPDFRLDFHRPSPPVMMGRDEDVATILSRQPLTRRNILKSIRI

SEQ ID NO: 188757 - protein, 931 aa, Oryza sativa
  unsure (1)..(931): unsure at all Xaa locations
  Clone ID: PAT_MRT4530_8532C.1.pep
MAPRKPNPASAKGPDPGRVDDDSTAFLGVSLVDDVELAKLVSSGALVEGQAFAAGKAVVPRPIDNWTVVFAVFFEAGLWFPCNVLLPKILHLFQVELPQLSPSALVRISIFDWACRTSGFEPSAELFGAIFFATVNSKTVITPAGTKKTVFGSVNFNVRPERSDLWPVNTAMSKWDRHWMARWFYHTIPFAAGSDSAKALRCRRRVIAPNRKPKIAVDGAMEARFVLLCKVCSRLSCRGLVEEFCMLRIFPLSQSWRVTVEQCEEADGLPNLVLPEGMNMSTLDQAEAEARRMIGDVSVVEYSQLLTRQAARRANRVYNGELPPRVNPQKADNDAGPSRKRMRGQVKLAPRKRRVLASSDSDADDEDNAEERDGEEEGEEEEEVEAVADKAANEATEDRVDTPGYTPTPSLGHNETGVESNSSLLRRKDLEGAKALVAFSSGKAAKGGLVKKISKKKGLVDIARVFSDDESSDETPTSPAGRSLDLSTAPLAPLGVAGAGGSAAAGASASTERIVSAAARVFGSPVRKPAISPLVKAKGKCAAAEASASEYSLAAPHFAPGDFETRADLIPFVEGVSNLVLPAGTPSLFTEFNEFDEGCSTIKSLAVRILAAHCSTERTVRARFDGFKSRLRAKDDEISRKNLEVESLARVLKEAKTEVKRLQSELDKGKEAWAEVDRLKAELEKEKAHSAVLIDYYNLTEPKMEALCQKASRAEASAAEESQRFSWEKAKITESARTACQTLRLXLTDMGAKVRGVPAEDASAFDFSEWTQQAGGSVSDCATXLLQQFGCEHIAEFPTYVRGDWEISAQNISPALRAWRKQFWQKDGRSAAKACLLEQLTKAEAADRGEEEEAAGEEVGGDAQDHPEGVRRKSCIRPPSRSWQSQNEKFVAMKGLPKVRCPFRPVYREMEINGRSYKVFKVANWLRAHPG

SEQ ID NO: 188758 - protein, 110 aa, Oryza sativa
  Clone ID: PAT_MRT4530_85330C.1.pep
MAVRSPHRAFLVAMILVSFLLGAAAGIRSTTLSSSQSLAEDKSRLGSTPPSCHNRCNACNPCTPVQVAALPGVSRPASAADRVDVAGFAQYSNYKPLGWKCRCAGRLFDP

SEQ ID NO: 188759 - protein, 570 aa, Oryza sativa
  unsure (1)..(570): unsure at all Xaa locations
  Clone ID: PAT_MRT4530_85331C.1.pep
MAPRKPNPASVTGPDPGRIDDDTTAYLADSLVDEDELAKLVTSGMLVDGQAFAPGKAVVPKPDDNRTMVLAVFSEAGLQFPCNMLLPEILRLFQVELPQLSPSALVRIAIFDRACRTAGFERSAELFGVVFYATVNSKMVVTPAGTKKTVFVSVNFNVRPGRSDLWPVNAAMSKWDRHWMSKWFYHAIPFEVGSDAVKALRWRRRPIVPNQKPKXAVDGAMEAWFALLHKAADRANRVHDGKLPPRAKPFKADGDEADARASEVGPSEAXAPASTDSDADDEDTVEDNDGEQEGEDKGETEAAAEKAMDEATDTHTEMRSYILTPSPDHVETENLEGAKALVSIAAAKVSKKKVLVDVARVFSDDKSSDETPTSPAGRSMGLSTAPGAVVEVGRVGGSVAAGTLASADRVVKAAARLFGNHVRKPVASPLANGKGKKTAAETSALEYSLAGPHFVPSNFETRVDLIPFVEGESNLVSPASSPSLFTELNEFDEGCSAIKSLAVWILAAHCSTERTMWAHIDGFKNHLRAKDNELGRKSLEMEGLANTLKEAKAENKWLQAELEKGSEAKA

SEQ ID NO: 188760 - protein, 276 aa, Oryza sativa
  Clone ID: PAT_MRT4530_85332C.1.pep
MASGSGEGKGDIPSVVLLELWGHVADDDDDDDDHRPDATTATSTTSTGLTISVTLRAATPPALSHLSVYCPGLADLDPQPLGQVRGAHGGARLYRLPSRPSDRGFGDDNIAILSCGNDDSSSSSYAVAVLQPWYHVDFRLHLCRSTSDGKPGSSWISHQLTVEEPLMRRTVCPVPDSALRRIFHTTTKVITLGGAKGTVGWVDLWRGILLCDVLEDSPKLRDMPLPLPARVNWPLFLNRCPYYCRDIVVSQSRDTIKYVEMEFTNGWPPSDFEARI

SEQ ID NO: 188761 - protein, 358 aa, Oryza sativa
  Clone ID: PAT_MRT4530_85333C.1.pep
MIRRFLYMVDIFDKAGYGPQPYRLRRINPSHLFFPKDALPVPQSSSAATVVEDLPLPPTEITFCGSTEFMRRSDDKIVGVDRTTRRAILYDPAEHSVRVLPSMLAPKFNTKALAIGDDLYLMDMTPWPDKGDDRQGRRSGHSFEALIHRDRRPLNGGRLEDECYWRPLPPPPCVHAAGYRGSSGEIRGYAVVGDAHILVSTQSYGTYSFATANTAWSKAGDWALPFCGRAEYVPEHGLWFGLSAANDDVFGAWDLSSTVQQQPVVAHRGCKGFAVLETPYASYVVHLGDGKLCIAKLFMVARRETCSESWCDFDRDRRFCTMLTGVEVVRCNGDKLHIIKHRSCRYSFGEHYIPTYVL

SEQ ID NO: 188762 - protein, 73 aa, Oryza sativa
  Clone ID: PAT_MRT4530_85334C.1.pep
LEVVTGERPIIQGQGHIIQRIKMKVVAGDISSIADARLRGDYDVNSIWKVVEIAMLCTEPVAVIHTFCLGVRA

SEQ ID NO: 188763 - protein, 886 aa, Oryza sativa
  Clone ID: PAT_MRT4530_85335C.1.pep
MATRVNPRVAARGGDQRRLLLRAGVQPAAAALKAAEQRRKSDEEILQYVNKLSIFVTSNFRYLPYDVDLTICELFSVTTGNHPTGVPDVRVLFLVPGGKTEPQTKPYPLDMWKYGSALQQRPELNPYSGRGATSHNWHAPKPHRKQVLGVLKEEESAASVSVEAGPKQAGINSDDPAWAHCFCPDITKKHHLRCKYCDKVCTAGITRIKYHLAGIKGFNTTKCQKVPSPVQQEMFDLLTKKTSEKEQKNKEKEVARAEVDIENSDCESGSEGSDHGNNVLVVKPKETTGSSSSRSVAGGHTIDKYYKPPSIEESASMTQRVIKLSNKVQTALTTQKREERRNRTCEYICQWFYEASIPHNTVTLPSFAHMLEAIGQFGRSLKGPSPYEMSGSFLQKRKEKVMDGFKEHKESWELTGCSIMTDAWTDRKGRGVMNLVVHSAHGVLFLDSVECSGDRKDDKYIFELVDRYIEEIGEQHVVQVVTDNASVNTTAASLLTAKRPSIFWNGCAAHCLDLMLEDIGKLGPVEETIANARQVTVFLYAHTRVLDLMRKFLNRDLVRSGVTRFATAYLNLKSLLDNKKELVRLFKSDEMEQLGYLKQAKGKKASKVIKSETFWKNVDIAVNYFEPLANVLRRMDSDVPSMGFFHGLMLEAKKEISQRFDNDKSRFIEVWNIIDKRWDNKLKTPLHLAGYYLNPYYYFPNKQEIESDGSFRAAKWWLNHGTSTPNLRKLAARILSLTCSSSACERNWSVFEQVHTKKRNRLLHERMRDLVFVKFNSKLRNKRENKDGDNEFITGVVPSSSEMDQQCAKESQQHTTPQAPAPAKRKRPVHAKKRKVRSLQSLMRNAPVHPEAPSSDSEDCDDGIPMQTSDSDKSPSPSPYVSETDD

SEQ ID NO: 188764 - protein, 536 aa, Oryza sativa
  Clone ID: PAT_MRT4530_85336C.1.pep
NPSSAASVSVEAGPKQAGINSDDPAWAHCFCPDITKKASPTKVPSPVQQEMFDLLTKKTSEKEQKNKEKEVARAEVDIENSDCESGSEGSDHGNNVLVVKPKETTGSSSSRSVAGGHTIDKYYKPPSIEESAKAIGQFGRSLKGPSPYEMSGSFLEKRKEQVMDGFKEHKESWELTVECSGDRKDGKYIFELVDRYIEEIGEQHVVQVVTDNASVNTTAASLLTAKRPSIFWNGCAAHCLDLMLEDIGKLGPVEETIANARQAKGKKASKVIRSETFWKNVNIAVNYFEPLANVLRRMDSDVPSMGFFHGLMLEAKKEISQRFDNDKSRFIEVWDIIDKRWDNKLKTPLHLAGYYLNPYYYYPNKQEIESDGSFRAAKWWLNHGTSTPNLRKLAARILSLTCSSSACERNWSVFEQVHTKKRNRLLHERMRDLVCVKFNSKLRNKRENKGRDPIEKEVDDVVADVDNEFITGVVPSSSEMDQQCAKESQQHTTPQAPAPAKRKNTKKRKLGGSDGSDGARSPANGGAPARTEDTNG

SEQ ID NO: 188765 - protein, 682 aa, Oryza sativa
  Clone ID: PAT_MRT4530_85337C.1.pep
MDGFKEHKESWELTVECSGDRKDGKYIFELVDRYIEEIGEQHVVQVVTDNASVNTTAASLLTAKRPSIFWNGCAAHCLDLMLEDIGKLGPVEETIANARQVTVFLYAHTRVLDLMRKFLNRDLVRSGAKGKKASKVIRSETFWKNVDIAVNYFEPLANVLRRMDSDVPSMGFFHGLMLEAKKEISQRFDNDKSRFIEVWDIIDKRWDNKLKTPLHLAGYYLNPYYYYPNKQEIESDGSFRAGCVWGLMRMLYFRRDAKFLLDTKQVSRRHTFRELADGRHSVKNSSDFVETDDDDDGSKSLNHSEEYDLESVLANFLGEIYRCHGECPHGDCKNKENLPGDSHQLKDSVVEDKDPRHLTEGSLPDKAASNFKNGIKPSASSKQKQQNDSQSEISDHTTGASIFYEKAKKHLADMLKNTSQSASYPTAQVSKSLEGMLSQPHYNVSPPRSDHRGKCHNAFSPEEPEVCLVKAVDVAVLEECGIKEDTQEGIIYATDEVDTVPVEGVGKLDCSKTICNIQCIPAEQYTDSPLPEILEGTEGKEPVQMFMSSPESMVENLEQQDPKTPEPKSSPKLPDGCPEQSNEKKEQPSPVSVLDSFDEDDSSPECKTMKKYELHEVSCGTLYFPDNESGVKAWMDIRSKTEGIVVEIWEFVLDELIDEACRRHTPPPFSVSAAAAAFAAGE

SEQ ID NO: 188766 - protein, 1170 aa, Oryza sativa
  unsure (1)..(1170): unsure at all Xaa locations
  Clone ID: PAT_MRT4530_85338C.1.pep
MERFELGGKSVEGVDMLRRRHGASRLDFWSFLALYALWLVVVVPGLDFTVELIVLGALSAPHVLAFVITGWDFDFQSLGGYSKGIGLXKLPNCPNIAAATXAIVPLHKQNTHASRTRSTLTSARTGTHTQRMQKTFESTSKQQXPFDSYIKGSGYGTDFNINRDVGKCGRYIFEYPQPTFQKLMKEQCMEPFFVFQVFCVGLWCLDEYWYYSLFTLFMLFLFESTMAKNRLKTLTELRRVKVDNQIVATYRCGKWVRIPGTELLPGDIVSIGRSVSGEDRSVPADMLLLAGSAIVNEAILTGESTPQWKVSVAGRGPEETLSVKRDKNHILFGGTKILQHTPDKSINLRAPDGGCIAFVLRTGFETSQGKLMRTILFSTERVTANSKESGLFILFLLFFAVIASGYVLVKGLEDPTRSRYKLFLSCSLILTSVIPPELPMELSIAVNTSLIALARRGIFCTEPFRIPFAGKVDICCFDKTGTLTSDDMEFQGVVSLEDDEELITDANKLPLRTQEVLSSCHALVFVDNKLVGDPLEKAAIKGIDWIYTSDEKAISKKSGGQPVKIVHRYHFASHLKRMSVVVSIHEKYYAFIKPTAALAHRQTIQERLVDLPAGYVETYKKYTRQGSRVLALAYKLLPDMPVNEARSLERDQVESDLTFAGFAVFNCPIRSDSGAVLQELEQSSHDLVMITGDQALTACHVAGQVHICSKPVLILTRTKTGGFEWVSPDETDRAPYSAEEVAAVSGSHDLCISGDCFEMLQRTDAVIQVIPYVKVFARVAPEQKELVLTTFKTVGRVTLMCGDGTNDVGALKQAHVGIALLNAEPVQKSDTKSQASKSENKQGKLKKPKPSQEGSSSQLTQPANSSARASSSRPLTAAERQRERLQKMMDEMNEESDGRSAPIVKLGDASMASPFTAKHASVAPTLDIIRQGRSTLVTTLQMFKILGLNCLATAYVLSVMYLDGVKLGDVQATISGVFTAAFFLFISHARPLQTLSAERPHPNIFCAYVFLSILGQFAMHLFFLISAVNEATKYMPEECIEPDSEFHPNLVNTVSYMVNMMIQVATFAVNYMGHPFNQSITENKPFKYALYAAVAFFTVITSDMFRDLNDYMKLEPLPEGMRGKLMLWAILMFCGCYGWERILRWAFPGKMPAWEKRQKQAIANREKKHE

SEQ ID NO: 188767 - protein, 122 aa, Oryza sativa
  Clone ID: PAT_MRT4530_85339C.1.pep
MAWPLNTSTDLRLGPLVKYSHAISCTNSLCHCRLHWPSSHHPGQRARHTVLSWWLSSPLWWTALNEPCAAAYRLRSARTWPPTVRPATTASPPAEGPQRAVRCHLPLPLRQRGGRCCCPLSA

SEQ ID NO: 188768 - protein, 379 aa, Oryza sativa
  Clone ID: PAT_MRT4530_8533C.1.pep
EAPQRKNGSGVQEGVKGLKSLGVRDLSYRLAFVANSVQVADGRREVDIRDRDIDGDDSERQKFTEEEEDEVVRMRNVPDFFNKIVDSICPTVFGHQEIKRAILLMLLGGVHKITHEGINLRGDINVCIVGDPSCAKSQFLKYTAGIVPRSVYTSGKSSSAAGLTATVAKEPETGEFCIEAGALMLADNGICCIDEFDKMDIKDQVAIHEAMEQQTISITKAGIQATLNARTSILAAANPTGGRYDKSKPLKYNVALPPAILSRFDLVYIMIDEPDENTDYHIAHHIVRVHQKREEALAPAFSTAELKRYIAFAKSLKPQLSSEAKKVLVESYVTLRRGDSTPGTRVAYRMTVRQLEALIRLSEAIARSHLERVIMQYGV

SEQ ID NO: 188769 - protein, 931 aa, Oryza sativa
  Clone ID: PAT_MRT4530_85340C.1.pep
MPLPPLRPPPRRSPPTTIGEAYPDARGFATLKWIVILLLVSCMFAGGLYALTPLVSKDPLYLARVPWRLPVARGGDRRRLLLRAGVQPAAAALKAAEQRRKSDEEILQYVNKLSIFVTSNFRYLPYDVDLTICNPSSAASVSVEAGPKQAGINSDDPAWAHCFCPDITKKHHLRCKYCDKVCTAGITRIKYHLAGIKGFNTTKCQKVPSPVHQEMFDLLTKKTSEKEQKNKEKEVARAQVDIENSDCESGSEGSDHGNNVLVVKPKETTGSSSSRSVAGGHTIDKYYKPPSIEESASMTQRVIKLSNKVQTALTTQKREERRNRTCEYICQWFYEASIPHNTVTLPSFAHMLEAIGQFGRSLKGPSPYEMSGSFLQKRKEKVMDGFKEHKESWELTGCSIMTDAWTDRKGRGVMNLVVHSAHGVLFLDSVECSGDRKDGKYIFKLVDRYIEEIGEQHVVQVVTDNASVNTIAASLLTAKRPSIFWNGCAAHCLDLMLEDIGKLGPVEETIANARQVTVFLYAHTRVLDLMRKFLNRDLVRSGVTRFATAYLNLKSLLDNKKELVRLFKSDEMEQLGYLKQTKGKKASKVIRSETFWKNVDIAVNYFEPLANVLRRMDSDVPSMGFFHGLMLEAKKEISQRFDNDKSRFIEVWDIIDKRWDNKLKTPLHLAGYYLNPYYYYYPNKQEIESDGSFRAGVISCIDKLVDDEDIQDKIIEELNLYQDQHGSFGHEIAVRQRKNKNFNPAKWWLNHGTSTLNLRKLAARILSLTCSSSACERNWSVFEQVHTKKRNRLLHERMRDLVFIKFNSKLRNKRENKGRDPIEKEVDDVVADGDNEFITGVVPSSSEMDQQCAKESQQHTTPQAPAPAKRKRPVHAKKRKVRSLQSLMRNAPVHPEAPSSDSEDCDDGIPMQTSDSDKSPSPSPYVSETDD

SEQ ID NO: 188770 - protein, 87 aa, Oryza sativa
  Clone ID: PAT_MRT4530_85341C.1.pep
VLWLLWMGADFAMGVPRQDASMGEASETGNCKSGEKTRIGSCFFFLHFNFLLHWHSFNLICRVGLVCGLYRPYQILSVSNFGKFWHD

SEQ ID NO: 188771 - protein, 1168 aa, Oryza sativa
  Clone ID: PAT_MRT4530_85342C.1.pep
MAENVPSKSVKMPIDYADWNDYNTRVVCEIFADQVVAGNRPNTHLSNSGYDEVIEQFASKTGLRYTRLQIKNKWDKLRIEYNCWKKLKSQTGLGWDDARQTVTATAARWKQLKEMSSESEDGSSDEEYDCDLLAMQLFETVTSNISSTRRMAESYHSLYMNKAAPRTSRLSGMGWVQETLATPGECYRMLRMNGNTFLALHDLLVDKYKLAPTVHMHTMEALAIFLYILGDGSSNQRAQNRFKHSGETISRKFEEVLFAVVELGHDIVHPKDPNFPTVHDRIRKDRRMWPHFKDCIGTVDGTHILAVVPDEEKIRYIGRSKSTTQNVMAICDHDMRFIYASIGQPGSMHDTTVLFNALRTDINIFPHPPQGNPSSAASVSVEAGPKQAGINSDDPAWAHCFCPDITKKHHLRCKYCDKVCTAGITRIKYHLAGIKGFNTTKCQKVPSPVQQEMFDLLTKKTSEKEQKNKEKEVARAEVDIENSDCESGSEGSDHGNNVLVVKPKETTGSSSSRSVAGGHTIDKYYKPPSIEESASMTQRVIKLSNKVQTALTTQKREERRNRTCEYICQWFYEASIPHNTVTLPSFAHMLEAIGQFGRSLKGPSPYEMSGSFLQKRKEKVMDGFKEHKESWELTGCSIMTDAWTDRKGRGVMNLVVHSAHGVLFLDSVECSGDRKDGKYIFELVDRYIEEIGEQHVVQVVTDNASVNTTAASLLTAKRPSIFWNGYAAHCLDLMLEDIGKLGPVEETIANARQVTVFLYAHTRVLDLMRKFLNRDLVRSGVTRFATAYLNLKSLLDNKKELVRLFKSDEMEQLGYLKQAKGKKASKVIRSETFWKNVDIAVNYFEPLANVLRRMDSDVPSMGFFHGLMLEAKKEISQRFDNDKSRFIEVWDIIDKRWDNKIKAPLHLAGYYLNPYYYFPNKQEIESDGSFRAGVISCIDKLIDDEDIQDKIIEELNLYQDQHGSFGHEIAVRQRKNKNFNPAKWWLNHGTSTPNLRKLAARILSLTCSSSACERNWSVFEQVHTKKRNRLLHERMRDLVFVKFNSKLRNKRENKGRDPIEKEVDDVVADGDNEFITGVVPSSSEMDQQCAKESQQHTTPQAPAPAKRKRPVHAKKRKVRSLQSLMRNAPVHPEAPSSDSEDCDDGIPMQTSDSDKSPSPSPYVSETDD

SEQ ID NO: 188772 - protein, 828 aa, Oryza sativa
  Clone ID: PAT_MRT4530_85343C.1.pep
MRPRVTSTGTAQTPGFASLLVVGRQEAVLQLEAGADGEDLAGLHAEGLHVEGIQAGHHRVELEGHVEALCFFHERHGRLGNPSSAASVSVEAGPKQAGINSDDPAWAHCFCPDITKKHHLRCKYCDKVCTAGITRIKYHLAGIKGFNTTKCQKVPSPVQQEMFDLLTKKTSEKEQKNKEKEVARAEVDIENSDCESGSEGSDHGNNVLVVKPKETTGSSSSRSVAGGHTIDKYYKPPSIEESASMTQRVIKLSNKVQTALTTQKREERRNRTCEYICQWFYEASIPHNTVTLPSFAHMLEAIGQFGRSLKGPSPYEMSGSFLQKRKEKVMDGFKEHKESWELTGCSIMTDAWTDRKGRGVMNLVVHSAHGVLFLDSVECSGDRKDDKYIFELVDRYIEEIGEQHVVQVVTDNASVNTTAASLLTAKRPSIFWNGCAAHCLDLMLEDIGKLGPVEETIANARQVTVFLYAHTRVLDLMRKFLNRDLVRSGVTRFATAYLNLKSLLDNKKELVRLFKSDEMEQLGYLKQAKGKKASKVIKSETFWKNVDIAVNYFEPLANVLRRMDSDVPSMGFFHGLMLEAKKEISQRFDNDKSRFIEVWNIIDKRWDNKLKTPLHLAGYYLNPYYYFPNKQEIESDGSFRAAKWWLNHGTSTPNLRKLAARILSLTCSSSACERNWSVFEQVHTKKRNRLLHERMRDLVFVKFNSKLRNKRENKGRDPIEKEVDDVVADGDNEFITGVVPSSSEMDQQCAKESQQHTTPQAPAPAKRKRPVHAKKRKVRSLQSLMRNAPVHPEAPSSDSEDCDDGIPMQTSDSDKSPSPSPYVSETDD

SEQ ID NO: 188773 - protein, 658 aa, Oryza sativa
  Clone ID: PAT_MRT4530_85344C.1.pep
MDFFTRPAMSVLLLLFLPLAAAQPWQVCQDSRGKYTSNSTYQANIQSLSSTLPAKAAAPSTGLFATRVAGNAPDTVYALAFCRGDITNASACAGCVASGFQDAQQLCPFNKAASLYYDLCLLRFADENFLATNNSDVVMLMNSQNFTASVGSVRLLLFTLLNATAESAASSSRRFTTSRLDVSSLPTLYCLMQCTPDLTAGECAACFEDFPRLTLQYLDGARGGRILATRCTMRYEIYPFYSGDTMLRIINLATTVPEMNTTAPTTPVTVYPQPAGPGDHKSKVWIVAIVAPLLAILFCFMLSIVWIRRGRKGEVNMQNNIAAVNRLEEDALVWRLEERSSEFSLFEFSELLEATDNFAAENRLGQGGFGPVYKGQLHDGVEVAVKRLASQSGQGFTEFKNEVELIAKLQHTNLVRLLGCCIQGEEKILVYEYLPNKSLDFFIFGIAQGLLYLHKHSRLRVIHRDLKASNILLDQDMNPKISDFGLAKIFSSNNTEGNTKRVVGTYGYMSPEYASEGIYSIKSDVFSFGVLLLEILSGKRNSGFHQYGDFLNLLGYAWHMWEEGRWLDIIGASIPQTIPTEGLRKYINIALMCVQENADDRPTMSDVVAMLSSESAVLPEPKHPAYYNLRVSKVQGSTNVVQSISVNDVTITSNPEGR

SEQ ID NO: 188774 - protein, 129 aa, Oryza sativa
  Clone ID: PAT_MRT4530_85345C.1.pep
MAIKMKGIFKGLKIISQMFVHKEHEMEIGYPTDVKHVAHIGLGTSDTSPSWMNEFTGTEDLSTGSLSTTAPSRQTSWASLDFEQPRSMLPIEILPEKSGQEAPSCPDIPRGPRKILLMIGWQSADVRLQ

SEQ ID NO: 188775 - protein, 73 aa, Oryza sativa
  Clone ID: PAT_MRT4530_85346C.1.pep
SRIDKGSDSCQTFSNARPYMDSFRCGAVFFIRSVSCFVLAARKKLVGLTFLLLHRFLRARWDSGCIKVSGSIP

SEQ ID NO: 188776 - protein, 85 aa, Oryza sativa
  Clone ID: PAT_MRT4530_85347C.1.pep
MEGASNGAFLPWKKQGHQIKLRATKGKRTLVLRLGKQAWISRAIIKIQFKDQEPGPGKTSSETLKHGTIVSVNNQQDGSNDIRTY

SEQ ID NO: 188777 - protein, 175 aa, Oryza sativa
  Clone ID: PAT_MRT4530_85348C.1.pep
MASWLRAPAAAPSSPAAAFARRHHRWTYAGFGLFGLVGWVWPVWVGLGGASAVAGWARDTGLKNWHVALSSRSSAEAEAPNPHEVGGGGGRVVPLVAVATTVLVILGIGGGCRMGDDGVRPMNNNGGHSKRHFFSGFSCKASLPSEISLPAHYSEGIGYHTFVGSPEISPSRGFC

SEQ ID NO: 188778 - protein, 138 aa, Oryza sativa
  Clone ID: PAT_MRT4530_85349C.1.pep
HSFEMLFDYHDNYMSNVLPWLSISVPTISTLVYRQVFERVKEIAPVRFRLDFAHSHAQTNTTDVKTHMQTRMAELKDLLRELITYDYTYVYMCVLKGMDNGMIDIIIDLGVKYLVYWLDFKKQLQKSEQWYVGVYRWI

SEQ ID NO: 188779 - protein, 403 aa, Oryza sativa
  unsure (1)..(403): unsure at all Xaa locations
  Clone ID: PAT_MRT4530_8534C.1.pep
MAPRKPNPASAKGPDPSRVDDDSTAFLGVSLVDDVELAKLVSSGALVEGQAFAPGKAVVPKPIDNRTVVFAVFFEAGLRFPCNVLLPEILRLFQVELPQLSPSALVRIAIFDWACRTSRFEPNAELFGAIFFATVNSKTVIISAGTKKIVFGSLNFNVRPERSDLWPVNAAISKWDRHWMARWFYHTIPFKVGTDSAKALRCRRRAIAPNRKPKITVDGAMEARFVLLRKVCSRLSCCDMVEEFSLTLDQAENEARRMIGDVSVVEYSQLLTRQXSGRANRVYNGELPPRANPHKADDDAGPSRKRMRGQVKLAPRKRRVPASSDSDANDEDDAEERDGEEEGEEKEEEAVADKAADEAIEDRVDTPGYTPTPSPSHNKTGVESNSSPVTPGNSLIISELICA

SEQ ID NO: 188780 - protein, 82 aa, Oryza sativa
  Clone ID: PAT_MRT4530_85351C.1.pep
ESPLSELGVREWPKWGCEKNKFPWRYSPKKTFSLFQGKVKVFPHGPGKNFLEIPAGDLVVFPKGINCPWEVPEAVAKPSKFE

SEQ ID NO: 188781 - protein, 110 aa, Oryza sativa
  unsure (1)..(110): unsure at all Xaa locations
  Clone ID: PAT_MRT4530_85352C.1.pep
ILCEGTVQPLKLHGHLRHRRLCGEQPAGGADKRRAGALRERKMALTGXRDGESEDAAAIVVHGRRSRARAVSGVGGGTSQPSPPSFFRVAAAASRACQMVRPXRSHAPPP

SEQ ID NO: 188782 - protein, 58 aa, Oryza sativa
  unsure (1)..(58): unsure at all Xaa locations
  Clone ID: PAT_MRT4530_85353C.1.pep
AKVTTNLNYYFLTEFCFNDIIFMIVQTTNXDKMLRRRYSLNLPEHLPEHHVITSAEQK

SEQ ID NO: 188783 - protein, 120 aa, Oryza sativa
  unsure (1)..(120): unsure at all Xaa locations
  Clone ID: PAT_MRT4530_85354C.1.pep
EKFTTPSETPRHHIITTKPLSLRIWWVTDLMRWMSRXKRRSASKQHADSDASSSSTSSAATARPQPNVAVDPDERERKAAFERLDNLGRCIADVESIGEKVFRALVNTRVSLLNILSPSF

SEQ ID NO: 188784 - protein, 398 aa, Oryza sativa
  Clone ID: PAT_MRT4530_85355C.1.pep
NTTKTNTKRREKSHKDRECTHKGRKLQRIASKARAVEDKPPPPPPAGLPADGTALAAAIADATAAVASASAAVFSGVSSLSIAAATARVEVAATPCWMPSPARFTTPSATPRHHIITTKPSSLRIWWVADLMRWMSRAKRRSASKQHADSDASSSSTSSAATARPQPNVAVDPDERERKAAFERLDNLGRCIADVESIGEKVFRALGMAFYEIKPRVQKGALRVHSSCGRSRVSTLCVCEPEVPGSPDVAMYGIEFDRLQSRSASTRFRAERGPRPCGFEISRPSGGPSPGVPVALILGGRKLPSCHAVVALEYDHASVQKERWLAGCPTGCVPPVPLAADYGCFHSVSQLVYYTSCLYILLVRARQGHIPYLYGLWRNAQLFRAGSMGSKQCYLKVR

SEQ ID NO: 188785 - protein, 126 aa, Oryza sativa
  Clone ID: PAT_MRT4530_85356C.1.pep
MAAILRHMTEAYQWRVANFTRLRALADLYVIVNRIAEVNLPRIRSDVRDAQAVALLRGRGATIIELAGEIGGPSVDIFAAFVLRLNRLADHIGDRLRSVRARQGLLDDFASVILNLLFANILLPFP

SEQ ID NO: 188786 - protein, 78 aa, Oryza sativa
  Clone ID: PAT_MRT4530_85357C.1.pep
MAASGEKVGGWRLAVRTTAGGKKLAQPFHPPTRAKASADSTAGSTRLQAAAASGSRNGCWCRVLGNAVLAGKHHRTVV

SEQ ID NO: 188787 - protein, 164 aa, Oryza sativa
  Clone ID: PAT_MRT4530_85358C.1.pep
SKLKELISGPSTMLSRLGRQHPSAPSPPPAPAAQAAQASPAAAAVVRRPRLRLRAISWSTSSRRRSPALSCAMSHSSSAFVSTIFTFITDDDDDDPAASSSSSPPPPPPQTLLLMLIFPSPNAAAPPPPLCRQLPMADGHRRRRADRARSRGRSSFRTRGRTRG

SEQ ID NO: 188788 - protein, 230 aa, Oryza sativa
  Clone ID: PAT_MRT4530_85359C.1.pep
CIAQPTLGPDGKIKEPESNVLLASIENMQYAVTVDVLHTVFSAFGTVQKIAMFEKNGGMQALIQYPDITTAAVAKQALEGHCIYDGGYCKLHLSYSRHTDLNVKAHDERSRDYTVSSDPSAQMQAAAQAPGPSTPGVAWQNTAPSASFYGSTAAATPVGQVPAWNPNMQAGAFGSASSAYPTQPMMPGSVPHYPGIGSSSGALPVSFQASHQMPQYGVPPAAPHHAPPAG

SEQ ID NO: 188789 - protein, 657 aa, Oryza sativa
  unsure (1)..(657): unsure at all Xaa locations
  Clone ID: PAT_MRT4530_8535C.1.pep
MPSANKPLTGKGENGASAETMHTMWYGKAVVPKPVDNRTVVFAVFFEAGLRFPCNVLLPEILRLFQVELPQLSPSALVRISIFDWACRTSGFEPSAALFGAIFFATVNLKTVITPAGTKKIVFGSVNFNVRPERSDLWPVNAAMSKWDRHWMARWFYHTIPFEAGSDSVKALWCRRRAIVPNRKPKIAVDGAMEARFVLLRKVCSRLSCRDLVEEFCMLRIFPLSQSWQVTVDQSEEIDSLPKLVLLEGMNMLTLDQAETEARRMIGDVSVIEYSQLLTRQRVGPSRKRTRGQVKLAPRKRRAPASLDFDADDEDDAEEHDGEEEGEEEEEAEAVAEKAASEAIEDRVDTPGYTPTPSPATTRPGFGRGEGPSCILVGQGXKGGPVKKISKKKGLVDVARIFSDDESSDGTPTSPAGRSLDLSIAPVLPLGADGEGGSAAAGASASAERIMTTAVRVFGSPLRQPVASPLIEAKGKGAAVETSASEYSLVAPHFAPSDFETRADLLPFVEGILAAHCSTERTMRARLDGFKNRLRAKDDEIGRKNLEMEALANTLKEAQAENKRLQSELEKGREARAEVDHLKAELEKEKAHSTVLTDYYNLTEPKMEALRQEVSKAEASAAEESRRFSREMAKTTKSARTACQTLRLALTDMGAKL

SEQ ID NO: 188790 - protein, 198 aa, Oryza sativa
  Clone ID: PAT_MRT4530_85360C.1.pep
MLSLHDAMPLDFGLPDMDVGFGLFGVDAAAFGYDGVASDAAAGLSPVVGAGDGSGGGGDVLLYCDGGGGGGGGGEDGEEERRRRLRRKISNRESARRSRARRRQRVEELERAADELRAERRALASRLDATARRALAVRGANARHHAEAGVLRRRLGEAQRNAAVLIGLSRLLRSTANGAHGGAAPAQLSNGGVASLMT

SEQ ID NO: 188791 - protein, 186 aa, Oryza sativa
  Clone ID: PAT_MRT4530_85361C.1.pep
MTIQHASRTKRAIGKGDKRTASEPRTQINIKRTIVHKKHGSCGHDQMKLRTQRARIRTILHRYSQRFASETQQINSKAPTSAPNQTKTTATTGNNQLSGKSRSGDQIKQRVKPTGRWVTELPNSAARSLTCGGGGGRRRAAASATRLDTPHLRKNPSSSGGGGSCSSKRRRASRRGIRAISPRLWI

SEQ ID NO: 188792 - protein, 205 aa, Oryza sativa
  Clone ID: PAT_MRT4530_85362C.1.pep
MLIKISSLHAAFDAIHRIDMHGDVAGQHPRSRSFELSQPNKLCGFSTGKLHSPCNLLLLAAVAAFLPEINITYNILVVRSTSITESLKVFDRKLYIRIILWYYTPRSPLYIEVLKQQHWSYGERSAMVSKNLLETISRTTFQSLWSRRDRAGRMPQRFSDITAKVYKIKMSTSRKREIYVNRQPVLRLTESHKRSYVVLMQLAGR

SEQ ID NO: 188793 - protein, 58 aa, Oryza sativa
  Clone ID: PAT_MRT4530_85363C.1.pep
KAVMRKCTSAELQTGTLGFRQFATIKLQPHIHMFLEKLNAKMRQTETSQTWFKHQTSL

SEQ ID NO: 188794 - protein, 128 aa, Oryza sativa
  Clone ID: PAT_MRT4530_85364C.1.pep
RYPLPQIPGSFVKPTVLSPPAPVDDPVHGRAAPPVPAIDNHWSRSRCAQPHAEDQSTGRAAAADAGHTPWHEVFTAGIHGEGTFRAAAGRQSTSPGSSWQTVDIPNGSRQVSATWLPGNWLLAIHVCS

SEQ ID NO: 188795 - protein, 217 aa, Oryza sativa
  Clone ID: PAT_MRT4530_85365C.1.pep
MWGKIRQEAEINTSSEENIRHSSARFDPLLALPFSVQSEQAILMDLNSVPGSDSDTSIPKIDDDSGGEYVGLQPLDNRDSTRSSPYKNDQELADAFIAACERYAKPFAEKWRLPEDLEKRKRQDECKMLKIPLRMYAKQKNMPPAELEIMELKEYTLFDEHGKVYAHYNFVVKDSDGTLTLFFAEFIVLGAKFGSWNLGIPLVLNIWVATVMSAFHT

SEQ ID NO: 188796 - protein, 273 aa, Oryza sativa
  unsure (1)..(273): unsure at all Xaa locations
  Clone ID: PAT_MRT4530_85366C.1.pep
ARPIPNIALRAEFIKISTSPLLSEFLGWMLQRCQEAEGLTALADDNALLKVSQSINAARYLESTLTEWCNDVFFLEMENIDGRSECIFQVEINQLKDFRVQWTEKISTVILRDFDARSRDYLKNKRQWXQEKSEGLTLSRAFVECLDYMQGRIAKLEDGLNVLDFVTVWRTVASGVDQLLFSGIFSGSTKFSNGGVERLHGDLSILFAAFSAWCMRPEGFFPRLSEGLKLLDIDEKQLRDGACTDNNRLREYGIRRLTAAEVEKIIKNRIYES

SEQ ID NO: 188797 - protein, 167 aa, Oryza sativa
  Clone ID: PAT_MRT4530_85367C.1.pep
MAGASTFSGDETAPFFGFLGAAAALVFSCMGAAYGTAKSGVGVASMGVMRPELVMKSIVPVVMAGVLGIYGLIIAVIISTGINPKAKPYFLFDGYAHLSSGLACGLAGLAAGMAIGIVGDAGVRANAQQPKLFVGMILILIFAEALALYGLIVGIILSSRAGQSRAD

SEQ ID NO: 188798 - protein, 103 aa, Oryza sativa
  unsure (1)..(103): unsure at all Xaa locations
  Clone ID: PAT_MRT4530_85368C.1.pep
DRKGRFPPQKLAIXVRDSPTYILGPLPFHNPSHIGVSQLFTAPSPYPGPXPTVHQDRKXSFPPQKLAIEVRGSPTYILGPLPFHNQYGTIQQYRYXYVYCYPS

SEQ ID NO: 188799 - protein, 475 aa, Oryza sativa
  Clone ID: PAT_MRT4530_85369C.1.pep
MRCYGRKRPWKRASFYGRVRNVNEGVIVAELVEQDGVRSSCRHGKEKLAGGSKMTTHGLGGTERHGMKQFTQGHDSEPQPCVAHEKQAQGRFRVTARFLELERQKLKRMGSKKRMSRYAKKHEEATLKFDVVGYSLNEGMAAGEFIRSPAFAVGATTGQSASTPTAPRCPKPQRSNPMQRYRLEKEESGYIKDDCLKIELRRTRACSPVFKAELYGGMKEREARSVTVDDTQPDVFRALPHFMYTDSLPDMDGVEDADYVEMIRLLLVAADRYAMDRMKLLCESVLDDLLDAETVGTTLALADQHSCNNLKDVCVKFMATSKGMDAVMATEGYDNLKRNCPYVLIDVLEKHASVANSGENVVDPLVNLSLPFISPAFIAGSPPPPLFSTARPTVPHRHRRRLVADHRREPFRSRHPIVTADGEEDEHHVELQRLGDALVGHEAAPASMGRSQPRGREKRGGGGEPAMNARGDEGQ

SEQ ID NO: 188800 - protein, 312 aa, Oryza sativa
  Clone ID: PAT_MRT4530_8536C.1.pep
MEGTGESGGKRKKVEGSAGKLYWGSGETDVAGVLPISPATWEILAAHYSTERTVRARFDGFKSRLRAKDDEISRKNLEVEALAHTLKEAKTEVKRLQSELDKGKEARAEVDRLKAELEKEKAHSAVLIDYYNLTEPKMEALRQKASRAEASAAEESQRFSREMAKTTESARTACQTLCLALTDMGAKVRGVHAEDASAFDFSEWTQQAGGSVSDCATAYGDCCARVSVAFTLGLLQQFGCEHVAEFPTYAKGDWEISAQNISPALRAWRKQFWQKDGRSAAKACLLEQLAKAEAADRCEEEGAVGKEVGGDA

SEQ ID NO: 188801 - protein, 61 aa, Oryza sativa
  Clone ID: PAT_MRT4530_85370C.1.pep
ISNRWSCGPIKHVSILGFPPSIFRINPHQWFSFLSYSGLGFLNSASLRCTHAPISLTFFHI

SEQ ID NO: 188802 - protein, 199 aa, Oryza sativa
  Clone ID: PAT_MRT4530_85371C.1.pep
MAGASTFSGDETAPFFGFLGAAAALVFSCMGAAYGTAKSGVGVASMGVMRPELVMKSIVPVVMAGVLGIYGLIIAVIISTGINPKAKPYFLFDGYAHLSSGLACGLAGLAAGMAIGIVGDAGVRVWAAKSIPCISGVQRHVYVLFKCLAEIFKCLRANAQQPKLFVGMILILIFAEALALYGLIVGIILSSRAGQSRAD

SEQ ID NO: 188803 - protein, 68 aa, Oryza sativa
  Clone ID: PAT_MRT4530_85372C.1.pep
GTRVWRLDAGGCYLWRLDLQAALSLSLGAGREYASVARRRILVAYYTRIRILVGRRLGLPNYKIKRWN

SEQ ID NO: 188804 - protein, 111 aa, Oryza sativa
  Clone ID: PAT_MRT4530_85373C.1.pep
NIQVSRLNRSFAAECAQRQTSTSHSTTVVVSDVLVVFWQLSTVLKSEEPHDRKYGIVEPLQKFTLHQKGKLLQLTCLSCVFVFIKYEQASTIEERNSGSASPNRNLAGLRV

SEQ ID NO: 188805 - protein, 349 aa, Oryza sativa
  Clone ID: PAT_MRT4530_85374C.1.pep
TQNINQSANVETDRQPSLSFEMDVTPNRNYSVWLHFAEIENGITAEEERVFDVLINGDTAFKDIDIIRMAGERFTALVLNKTIVVTGTTLTIVLQPLKGTRATISAIEVFEIILAEKKTLTQEVSALRTVKGSLGLPLRLGWNGDPCVPQQHPWSGVECQFDDIKGHWVIDGLGLDNQGLRGFIPSDISKLQHLQSINLSGNSIKGNIPVTLGTISGLQVLDLSYNELNGSIPDSLGQLASLQILFTDNAGLCGIPGLHECGPHLSVAAKIGMAFGVLVAILFLVVFAACWWKRRQNIRRAQKLAAAREAPYAKSRTQFTRDMQMAKHHRPHESSRSGNDESTPHLLPS

SEQ ID NO: 188806 - protein, 75 aa, Oryza sativa
  Clone ID: PAT_MRT4530_85375C.1.pep
PTLDQQHPHQESCKLTGATLPTYGICIARLITCCSPAPPQTPPRPALPPPPPLPPPPPPSPPPHPHPISPPPPPP

SEQ ID NO: 188807 - protein, 79 aa, Oryza sativa
  Clone ID: PAT_MRT4530_85376C.1.pep
TPSITCKDNSNYLNQIRQKHHKNITMCGGALIPNDYGDKPPPATSESSEWDATTNDEEEEEAWWRRRLRLGGRLAGVHG

SEQ ID NO: 188808 - protein, 59 aa, Oryza sativa
  Clone ID: PAT_MRT4530_85377C.1.pep
MPFCSFYASTSLQLRRGGRNGRAPHVRLVPVGPCGGAGDPTRHGTARRWDVVVGEQTSG

SEQ ID NO: 188809 - protein, 380 aa, Oryza sativa
  unsure (1)..(380): unsure at all Xaa locations
  Clone ID: PAT_MRT4530_85378C.1.pep
MADRQQSEEPEEQVDLEGDDDIMDDDDGYRRHRREDSDDPEEEDSVIRQGEGDGRREDAEGPGGAGGDPAAGGEGGADVMDKVGGDAGPEDEEEKRKWDELLALPPQGSEVFIGGLPRDTTEDDLHELCEAFGEISEVRLMKDKETKENKGFAFVTFTGKDGAQRAIEDLHDKEHKGRTLRCSLSQAKHRLFVGNVPKGLSEDELRNIIQGKGPGVVNIEMFKDLHDPSRNRGFLFVEYYNHACADYAKQKLSAPNFKVDGSQLTVSWAEPKGSSSSDSSSAAAPVYTVKTIYVKNLPDNASKEKIKEIFEIHGEPMIYGRGPAPAGMRMVPMVLPDGRLGYVLXQPGGIPPPPPPRRGDRRDGGSRGGEGSHGRRYRPY

SEQ ID NO: 188810 - protein, 811 aa, Oryza sativa
  Clone ID: PAT_MRT4530_85379C.1.pep
RGFSPPDPIPAQSPDPPTTPPDPPPTGGRAAAASAAMEKPCTLLVHFDKGSPSMANEIKADLEGSDVAAKVDAMKRAIMLLLNGETLPHLFITVVRYVLPSEDHTIQKLLLLYLEIVDKRDVASGKVLPEMILICQNLRNNLQHPNEYIRGVTLRFLCRLNEPELLEPLIPSILANLDHRHHFIRRHALSAISAIYRLPHGDQLLPDAPEVVERALTGEQDASARRNGFLMLCACAQERAVAYLLTNAERVAEWPDLLQMAAVDLIRKVCRSPNRADKGRYIKIIISLLSAPNSAVVYESAGALVSLSSAPTAVRAAANTYCQLLSSQSDNNVKLIVLDRLHELRASHRDVMVDVVMDVLRALSSPNVDVRRKVLDLVLDLLTPRNVEEVVMYLKKEVVKTQAGDLEKGGEYRQMLVQAIHSCAVEYPEVAGSVVHLLMDFLGDTNVAAAVDVVLFVREIIETNPKLRVSMIQRLIDTFYQIRASRVCSCALWILGEYSLSLSEVESAISTIKQCLGDLPFYTVSEEGESTDASKPAQPVVNSVTVSSRRPVVLADGTYATQSAATETAISSPAVAPGSLSSTQNLRSLILSGDFFLAAVVACTLTKLVLRLEEVQPSKAEANKASTGALLIMVSILQLGQSSYLPHPIDNDSYDRIVLCVRLLCNTGDDVRKVWLQSCRQSFTKMLAEKQFRETEEMKAKAQISHAQPDDLIDFYHLKSRRGMSQLELEDAVQDDLKAATGEFTKDADDANRLNRILQLTGFSDPVYAGAYVTVHHYDIVLDVTVINRAKETRQKLCLDAANLYDKECFR

SEQ ID NO: 188811 - protein, 973 aa, Oryza sativa
  unsure (1)..(973): unsure at all Xaa locations
  Clone ID: PAT_MRT4530_8537C.1.pep
MGRKDFFGPRGSELAMAKSSSFGRYSSPCTLRLGRLWLTRTTPRLSPFLLHSLCHGFQQIWSKGLMPSANKPLTGKGENGASAETVHTMWYGTRRPLSTDAPAETYIVPANKRFLTPQVLRPFSSFANAYTPFAMAPRKPKPALAKGPDPGRVDDDSTAFLGVSHVDDVELANLVSSGALVEGQAFAPGKAVVPKPIDNRTVVFAVFFEAGLRFPCNVLLPEILRLFQLSPSALVRIFIFEWACRTSGFEPSAELFGAIFFATVNSKMVITPAGTKKTVFGSVNFNVRPEWSDLWPVNAAMSKWDHHWMARWFFHTIPFEAGSDSAKALRCRRRAIAPNRKPKIAVDGAMEARFVLLRKVCSCLSCRDLVEEFCMLRIFPLSQSWQVTVDQDEEIDGLPKLVLLEGMNMLTLDQAEAEARRMIGDVSVVKYSELLTRQAAGRANWVYNSELPPRANPHKADDDAGPSRKRTRGQVKLVPRKRRVPASSDSDADDEDHAEEHDGEEEGEEEEEVEAVXEKAANEAIEDRVDTPGYTPTPSPSCVLVEQGGEXGGPVKKISKKKGLVDIARVFSDDESSDETPTSPAGRSLDLSIAPILPLGANGAGSSAITGASASAERIMMAAARVFGSPLREPAISPLVKTKGKGAAAEASASEYSLAAPHFAPGDFETRADLIPFVEGVSNLVLPASTPSLFTELNEFDEGCSAIKSLVVRNLEMEALANTLKEAKAEIKRLQSELEKGKKARAEVDCLKAKLEKGREAIAEVDRLQAELKEEKAHSAVLTDYYNLTEPKMEALRLKVSKAEASVVDESQRFSREMAKTIESARTACQTLRLALTDMGAKVRGVSAEDASAFDFSEWTQQAGGSVSDCATTYGNCCARVSAAFTLGLLQQFVCEHVAEFPNYAKGDWEISAQNITPALRAWRKQFWQKDGPSAAKARLLEQLAKAEAADRSEEEDMAGEEGGGDAQDHPEV

SEQ ID NO: 188812 - protein, 490 aa, Oryza sativa
  Clone ID: PAT_MRT4530_85380C.1.pep
CGACELKTVCSSFVFLAASVAVNRWNNLSADIQLDLQKKENNKKSGDDSTVDNSFLPRAKLEFPTYDGKGDPLPWLNRCETFFRGQKTPESRRVCPLGELTTLWRTGTVDDYINSFLALACRDAKLSENQQVQLFTAGLVNPLKTDVALCRPSSLDDTIMLARAYEQRVQLGTTDPVPARSGRTPRPSLPALPAPVSAASAASTAPDAASSASTSKQPLVSALPRKRLSPAEMAQRRSEGLCYNCDEKSSASQRKLRRTPTAHALTLDEPSISLHALAGVRTPTFNTIKVQARIGATDLVALLDSGSTHNFISDVAARRARVPLEPRHGLSVAVANGDRITSPGCFPSQRVTIGDHTFVIDFYALPLGGYDVVLGAQWLGSLGPTLWDFAKQSLAFGSPNNRAATIDGATGELMSELLDSFQDLFTEPQGLPSERHLCHRIRLEHGVSAVAVRPYRYAHIQKDELERQCDTMLQQGVIRPSSSAFSPRPY

SEQ ID NO: 188813 - protein, 44 aa, Oryza sativa
  Clone ID: PAT_MRT4530_85381C.1.pep
PRLCSYRPPLLPLFIVMSRCLCFSSLVFLVVTGPYFYKIPPFQL

SEQ ID NO: 188814 - protein, 63 aa, Oryza sativa
  Clone ID: PAT_MRT4530_85382C.1.pep
SHDQAQPTTLIQPSFVLGFDGHKTIQNLKFFFGRGFIYFFLGQKKTSLFLQAFMRRARLIGAV

SEQ ID NO: 188815 - protein, 86 aa, Oryza sativa
  Clone ID: PAT_MRT4530_85383C.1.pep
FYWRDGRAGAERLRKAYVSHNIDEGRKPSFLDSVTCSTMHAMHTLVLRLAVLTAIFIIGQEQDRGAGAPKHPHTLGACGHAILARR

SEQ ID NO: 188816 - protein, 73 aa, Oryza sativa
  Clone ID: PAT_MRT4530_85384C.1.pep
MARAQLVLVALVAAALLLAGPHTADRRTACNCLKNVAGSISGLNAGNAASIPSKCGVSIPYTISPSIDCSSVN

SEQ ID NO: 188817 - protein, 118 aa, Oryza sativa
  Clone ID: PAT_MRT4530_85385C.1.pep
MARAQLVLVALVAAALLLAGPHTTMAAISCGQVNSAVSPCLSYARGGSGPSAACCSGVRSLNSAASTTADRRTACNCLKNVAGSISGLNAGNAASIPSKCGVSIPYTISPSIDCSSVN

SEQ ID NO: 188818 - protein, 79 aa, Oryza sativa
  Clone ID: PAT_MRT4530_85386C.1.pep
ARKYYASTIQLTGGKNTRALFGVCLCSSAINQLTKGRNKEEESSELQSLASEALLKDYKQRAPSKEALITSLLKNMKLS

SEQ ID NO: 188819 - protein, 503 aa, Oryza sativa
  Clone ID: PAT_MRT4530_85387C.1.pep
MSRACLLLVVAAVCLAGREAAAFNYADALDKAILFFEAQRSGKLPPGQRVAWRADSGLSDGSADGVDLAGGYYDAGDNVKFGLPMAFTVTMLSWSVIEFGDMMPARRSSFLGGIFGGGGVAQLDNARAAVRWGADYLLKAATATPDTLYVQVADPYQDHRCWERPEDMDTPRSVYKVTPQSPGSDVAGETAAALAAASIVFRVSDPSYSAKLLDAAQLVFDFADKYRGSYSDSLSSVVCPFYCSHSYHDELLWAASWLHLASPEKKDVYLSYIGSNGHALGAEQDDFTFSWDDKRVATKGFLQSRADGLQLYKAHTDNYICSLVPGANGFQSQYTPGGLLFKEGDSNMQYVTSTAFLLLTYAKYLSSSAATVSCGSTAVSPSTLISLAKKQVDYILGANPAGMSYMVGFGARYPRHVHHRGASMPSVRDHPARIGCDEGFRYLHSPEPDRNLLAGAVVGGPDAGDAFADGRDNYAQAEPSTYTNAPLVGALAFFAGAHKIFTP

SEQ ID NO: 188820 - protein, 118 aa, Oryza sativa
  Clone ID: PAT_MRT4530_85388C.1.pep
MARAQLVLVALVAAALLLAGPHTTMAAISCGQVNSAVSPCLSYARGGSGPSAACCSGVRSLNSAASTTADRRTACNCLKNVAGSISGLNAGNAASIPSKCGVSIPYTISPSVYCSSVN

SEQ ID NO: 188821 - protein, 118 aa, Oryza sativa
  Clone ID: PAT_MRT4530_85389C.1.pep
MARAQLVLVALVAAALLLAGPHTTMAAISCGQVNSAVSPCLSYARGGSGPSAACCSGVRSLNSAATTTADRRTACNCLKNVAGSISGLNAGNAASIPFKCGVSIPYTISPSIDCSSVN

SEQ ID NO: 188822 - protein, 580 aa, Oryza sativa
  unsure (1)..(580): unsure at all Xaa locations
  Clone ID: PAT_MRT4530_8538C.1.pep
MRRYAPPVRSRLPERVHGPSEEKNKERKTAQQQDHHRRQQQPLDADCVPENRRCHVHDVPEQQDHPHRRRRVAPPHPIVMPVPTRSPSPPSCAAASLLVRRLLPPDAVAPPRLPPWAPPSRRRRRPSPPDVVDANGEGKGRRGEELKMHDADRGDRTRPCLRHGFRQIWSKGLMPSANKPLTGKGEIGASAETMQTMWYGMRRPLSTDAPAETYIIPANEHRLFGVSVVDDVELAKLVSSGALVTGQAFAPGKAEVPKPIDNWTVVFAVFFEAGLRFPCNVLLPEILRLFQVELPQLSPSALVRIAIFDWACRTSGFEPNAELFGAIFFSTVNSKTAKDDEISRKNLEVKALAHTLKEAKTEVKRLQSEFDKGKEARAEVDRLKAELEKEKAHSVVLIDYYNLTEPKMEALRQKASRAEASAVEESERFSREMAKTTESARTACQTLRLALTDMGAKVRGVRIEDASAFDFSEWTQQAGGSVSDCAXRNISPALRAWRKQFWQKDGRSAAKAHLLEQLAKAEAADRCKEEGAVGEEVGGDAQDHPEGVRRKSCIRPPSGSWRSQNEKFVAVKGLPKVRCP

SEQ ID NO: 188823 - protein, 38 aa, Oryza sativa
  Clone ID: PAT_MRT4530_85390C.1.pep
KKKGEKIALFKLLVYKKTLSQKGEKTLKISLKEPFPVF

SEQ ID NO: 188824 - protein, 126 aa, Oryza sativa
  Clone ID: PAT_MRT4530_85391C.1.pep
MAFCCSLLAFKAEAVAACRCRSPRLISVADRRGKGWSPGGASVERIGEACRWSYGGADEISEADTFLALHETYKPCPQRYRRRRKIVGGGGVEGEGDSRRGRREALAPAAPSTRRRAASHSFAAVH

SEQ ID NO: 188825 - protein, 110 aa, Oryza sativa
  Clone ID: PAT_MRT4530_85392C.1.pep
FLAQPPFSRGWNRQAPSCPQGKGQKSPVPLLKFHHCFAWPPLPVSPLIAPPLIALRCSPWEPPNKKDASLFKPPATLLGGFGTPPSFSPYLGTPSPFFIKTGLPPAPFGP

SEQ ID NO: 188826 - protein, 242 aa, Oryza sativa
  Clone ID: PAT_MRT4530_85393C.1.pep
MAIHKSTSRKCEGLRMSFLNNNSKEILLTKYTPVRKYNLTVILGTVHVNITLKSKRYQRNLNLREIAPLIWELRLVKCIQDYGLKGWGSARRWMGGGVGFLYLLAFKAEAVAACRCRSPRLISVADRRGKGWSPGASWTMQTTWIFAFLIELITPKAAMSGMGSSNALPCPQRYRRRRKIVGGGGVEGEGDSRRGRREALAGEGRGRWRLVVTRSAGRGVGIDGGGGGGWRERDGANNARGA

SEQ ID NO: 188827 - protein, 90 aa, Oryza sativa
  unsure (1)..(90): unsure at all Xaa locations
  Clone ID: PAT_MRT4530_85394C.1.pep
LNQKAAEDSSATCLELVTNVSISEVEVKEKGGXDWPAFKETVSNTWTLKSDAPLKGPFSVCLLCNNGGYRVXNDGHPXSFTAGSEYKSGI

SEQ ID NO: 188828 - protein, 100 aa, Oryza sativa
  Clone ID: PAT_MRT4530_85395C.1.pep
CIITASTSTRSSSSLISAFTKAPAAASPSPAADGPWPAAPPPRSSPPPLQLGVLPTPSSSPALAPPAAPPRPATSSPPTTTSQPTSWVRSLLLGSQSHFT

SEQ ID NO: 188829 - protein, 73 aa, Oryza sativa
  Clone ID: PAT_MRT4530_85396C.1.pep
DRTVHRSGAFICRQAVGPGVDHRQFFTSSESSARWWFIPPFSLQIEHAPSRYYICHVTMFHAAIVVTHPYVVI

SEQ ID NO: 188830 - protein, 99 aa, Oryza sativa
  unsure (1)..(99): unsure at all Xaa locations
  Clone ID: PAT_MRT4530_85397C.1.pep
AVTISWPSPSGGTEPSSTMSSGSDALPHRMRXAAPSPIXASTAAAPFPIACGGGGGGNFPXRRGKGRSASERWKGRPVSRRGKRRSPRERGRGEEPPLP

SEQ ID NO: 188831 - protein, 516 aa, Oryza sativa
  Clone ID: PAT_MRT4530_85398C.1.pep
MSSTSGSAWDHSNNGGGGSPELREALLLGDGGSSPESREIKGIAVKKQDDLEEIRSVGELMRLAAEENRRLWYLAGPAIFTSLAQYSLGAVTQVFAGHLTTLELDAVSTENMVIAGLAFGIMYGMGSALETLCGQAFGAKQHHMLGIYLQRSWVILTAMSVILLPIYLFATPILRFFHQDDEIAVLASRFSLYMIPQLFAYALNFPIQKFLQAQSKVMAMAAVSAAVLLFHVALTWLLLVPLRMGLVGLAVALNVSWWLVVLGQLAYIVMGYCPGAWNGFDWLAFTDLLSFARLSLGSAIMICLEFWFYMFLIVIVGNLPNAQVAVAAVSICTNLFGWQIMVFFGFNAAISVRVSNELGAGRPRAARLAIAVVLVSSVAIGVAFFAAVLLLRDVYGAPFTGSPEVVRAVASLGVVFAFSLLLNSVQPVLSGVAVGAGWQWLVAYINLGCYYCVGIPVGYAIAFPLRRGVQGMWGGMLTGVGLQTAILVAITARTNWNKEASEAHARIQHWGGTAKL

SEQ ID NO: 188832 - protein, 378 aa, Oryza sativa
  Clone ID: PAT_MRT4530_85399C.1.pep
MDADRHAKLAWEDATQGLSTTRRWSDADGARTPPPRPSHAPTSSIQHSALFSLCRQRPAVSPSNLALGNRQQLADDVRSSQARPLHVTVILAAVVAVSSTTLAVSARCAAGDGENVGDSGAERRVGDQVVGARLGPARALGLGGDVVLDAPVAEAVEAALARQHRVGHHVPTNLAVEFRRDDAARSPGRRPPFGARLQLPQGMEKITERGESLTKKKEALYPVFRLRDVIHTCARDKGGYLDGLSNKLAHYETGMRPTTHQNTRSSRINHSRRKICTGRSPPFISATDGSKSNQYENTSLVQIEGVNTKEEVAWYCGKRMAYVYKAKTKSGGTNYRCIWGKVTRPHGNSGVVRAKFKSNLPPASMGRKVRVFMYPSSI

SEQ ID NO: 188833 - protein, 253 aa, Oryza sativa
  unsure (1)..(253): unsure at all Xaa locations
  Clone ID: PAT_MRT4530_8539C.1.pep
TIRKDHIALRLSRLGKYTTNSLYRAMSFRGVKDEMLQLIWKSPCXCPMKVKHFLWLAIRDRVQSCEQLKKEGWDGSEFCLLCSTIESTNHILFNCPMATFAWCICRDVLNWDTVPCNIEEFLLLIKHNSNNDRRALTTLLAAICWVLWTMRNNMIFISQLVYSPLMLPFRIASYLLQWKALGRAEEANRMMELGEKMKVAAANTGREGLGKEIGMTRPAATVTAYDRDVRRQGWRELSSSSPPRTDDRTSEFA

SEQ ID NO: 188834 - protein, 89 aa, Oryza sativa
  Clone ID: PAT_MRT4530_853C.1.pep
YLNRIFFFFCLFKAAILYILLLEDMNPSFLRQALCAAICGAHLSKSTPLVLTHSSLKDLSLADTARSFFHWWLFSNELRWPAFPNEKSG

SEQ ID NO: 188835 - protein, 164 aa, Oryza sativa
  Clone ID: PAT_MRT4530_85400C.1.pep
MPDNGTVQEECMRWRAIGPNRDNSSYVSACTIKYDFTMPSETTIKASNVAPESEAKVEDVKYKSKPRTALFQGREDDEPMTHQDVHGDMTSDNSIIVAGNSLISSGFQFKAIYFDEKYGKNMEKFTSAGLSSNIFFRGVNFHKKREEKKQRKYIQIGCIQVDVT

SEQ ID NO: 188836 - protein, 42 aa, Oryza sativa
  Clone ID: PAT_MRT4530_85401C.1.pep
KEWRQRYHVLGYAQVSITPSSSCSRLIPPGWQVLWSPSQLAR

SEQ ID NO: 188837 - protein, 56 aa, Oryza sativa
  Clone ID: PAT_MRT4530_85402C.1.pep
IHQHFKRHAIKKSEILVDIEHSSPTITNTISFPRTTTIGSITLPCVNNTCKYHFNV

SEQ ID NO: 188838 - protein, 498 aa, Oryza sativa
  unsure (1)..(498): unsure at all Xaa locations
  Clone ID: PAT_MRT4530_85403C.1.pep
PPVSAYSDEDLVERAFEPAQKIVVSISSDPDDPDADDEHLYYGGHAPXFSWRKLWLFTGPGFLMSIAXLDPGNLEGDLQAGATAGDTLLWLLFWATAMGLLVQLLAARLGVATGKHLAELCRDEYPDWARRALWLMAEVSMVSADIQEVIGSAIAIKILSNGFLPIWVGVVITALDCFFFLSLENYGVRKLEAVFAVLIATMALSFAWMFFKTKPNGKDIIIGILVPRLSSRVISQAVGLVGCVITPHNVFLHSALVQSRKIDPHKEYQVREALRYYTXESTMALVVPFMINLFVTTVFAKGFYGTKEAGNIGLENAGHFLQEKFGEDFFPILYIWGIGLLAAGTSSTITGTYAGQFIMSGFLNWRLKKWIRALITRSFAIVPTITVAVYFNTSDSALDVLNEWLNVLQSIQIPFALIPLITLVSKEQVMGVFKIGPRTQIATWAVASVPIIINGCLLLDFFSSEVKGLLSGLVLFAAVLAYVSFLLYLIFRGIAVFS

SEQ ID NO: 188839 - protein, 64 aa, Oryza sativa
  Clone ID: PAT_MRT4530_85404C.1.pep
LIKLPPPLINQIVSYATCLCMYGHEGSNGKWEMWTDKKRTYAGENKSHEKIKKTVLSTVFVLCF

SEQ ID NO: 188840 - protein, 1755 aa, Oryza sativa
  Clone ID: PAT_MRT4530_85405C.1.pep
LKKKKEVRLPAVEKKVEILSSDLATLNHKVQQLESSIQRQPSGDEFAGKVTTAVLPKEELNYHSTPFIKGQRDPEFASPDQQNQDGLTFQSGNSGLGGGIAGSIPPMSCPQFNGDNPQLWKSNCEVYFDIYGIHPQNWVKIATLNFCGNAAFWLQSVRSQLAGATWFELCDRVCGRFARDRKQALIRQWIHITQTSSVADYVDRFDSIMHQLMAYGGSNDPAYFVTKFVDGLKDHIRVVVMVQRPQDLDSACTVALLQEEALEGVQSVSNKKNETTTFLKTKPSHNLTSPTFQARSIPFTNIEDKRGVEFSKGRDDKVSALRSYRRSKGLCFVCGEKWGRDHKCATTVQLHVVEELINALKTDPEENCNSEGAPESEEDSLMAISFQALNGTDSSKSIRLRGWVQNTELLMLVDSGSTHSFIDAKLGAQLCGLQKLNQAIKVQVADGSQLFCDSFLPNCSWWSQGHSFTSDFRLLPLGSYDAILGMDWLEQFSPMQVDWVHKWIAFQHHGQAVQLQGIHPQLSTCFPISNDQLQGMSKKGAVMCLVHLNVAETLTATTVPEIVQPILNEFQEIFSEPTELPPKRNCDHHIPLVEGAKPVNLRPYRYKPALKDEIERQVAEMLRSGVIQPSSSPFSSPALLVKKKDGTWRLCIDYRQLNDVTVKSKYPVPVIDELLDELAGSKWFSKLDLRAGYHQIRMAEGDEYKTAFQTHSGHYEYKVMSFGLTGAPATFLSAMNETLSPVLRKFALVFFDDILIYSPTLELHLQHVRTVLQLLSAHQWKVKLSKCSFAQQEISYLGHVIGAAGVATDPAKIQDVVSWPQPTTIKKLRGFLGLAGYYRKFVRHFGLISKPLTQLLKKGIPFKWTPEIESAFQQLKQALVAAPVLALPDFSKHFTIETDASDVGIGAVLSQEKHPIAYLSRALGPKTRGLSTYEKEYMAIILAVEHWRPYLQQGEFIILTDHHSLMHLTEQRLHTPWQQKAFTKLLGLQYKICYRKGVSNAAADALSRRESPISEVAAISECIPSWMQELMQGYQLDGQSKQLLAELAISPNSRKDYQLCQGILKYKGKIWVGNNTALQHKLVNELHATPLGGHSGFPVTYRKVKSLFAWPGMKKLIKEQLQSCQVCLQAKPDRARYPGLLQPLPVPAGAWQTISLDFIEGLPRSSHYNCILVVVDKFSKYSHFIPLSHPFNAGGVAQEFMKNIYKLHGLPRAIISDRDKIFTSQFWDQLFSKFGTDLHMSSAYHPQSDGQTERVNQCLEIYLRCFVHAAPHKWSSWLYLAEFWYNTSFHSTLNKTPFEVLYGYTPSHFGIGLDDCQIADLHEWHTERKFMQQLLQQHLNRAQQQMKHQADKKRSFRQFAVGDWVYLKLQPYVQTFVAQRACHKLAFRYYGPFQVMSRVGTVAYHIQLPATSSIHPVFHVSQLKAAVGFSKKVQDELPTSLGALQVPFQFLDKRLVKKGNRSVLQLLTHWYHSSPSESTWEDMEDLFARFPRALAWGQASFQDWGIVRPSQPSGITTSGRSDKSAVALGVDKEDDELQQGGESGKDLGRGLRAKRPSVRVNGPMWANSVEMSRAHGSPRSFFPVGNPFRVMFPGGAHLSRKLQELLASYEDALALSLRKLKPEAASDVLTLSWMRLAVDCLSELHTNIANLITDLELPVSDWDDKWVDIYLNSSVKLLDICIALSSELSRLDQGQLLLQYALHVLGSESGVPSQEQLKRAEPSLREWMELVGVRCARLCKLLGRPCKELAGEPFF

SEQ ID NO: 188841 - protein, 92 aa, Oryza sativa
  Clone ID: PAT_MRT4530_85406C.1.pep
ALSRPPSFRLWRNPLGERSSPQAPSRSPPPPDSSSVNDVMNGGGVNVNPWSNPPVEDAMASVPQLSQQASELAKRGVRNEPQEESDRSREQE

SEQ ID NO: 188842 - protein, 78 aa, Oryza sativa
  unsure (1)..(78): unsure at all Xaa locations
  Clone ID: PAT_MRT4530_85407C.1.pep
QYIPIKTNTNPFINPLPKKNSIFPPFPIYIFPNTYPISXXQSLTLNNTMVQKPGXFTPTFQQQYYPGLXNXSHTHTSK

SEQ ID NO: 188843 - protein, 97 aa, Oryza sativa
  Clone ID: PAT_MRT4530_85408C.1.pep
KGHIEHGHVARSANFGAFIHSDSHANSTSLASWSPPCPSVQRPTHRQFPPRVTCCSTANTHATPAFHPSRAVPCASQPLSPNLSIPGCTASPLGTAH

SEQ ID NO: 188844 - protein, 65 aa, Oryza sativa
  unsure (1)..(65): unsure at all Xaa locations
  Clone ID: PAT_MRT4530_85409C.1.pep
MAEETPVETPAALVLGEPMDLLTDLEVEELKXGPHHALGTGLREAAKAMEKHAGAILPFDEGCDP

SEQ ID NO: 188845 - protein, 96 aa, Oryza sativa
  unsure (1)..(96): unsure at all Xaa locations
  Clone ID: PAT_MRT4530_8540C.1.pep
HQSNTLYHHFHQAAHSFLWGGFSSIFSLCPCYDGHATNIASHAAKARSHHWITQRRNGILIVCSCLICTFLWLTRXQARGTHSQAWVFHSGGCALS

SEQ ID NO: 188846 - protein, 61 aa, Oryza sativa
  Clone ID: PAT_MRT4530_85410C.1.pep
FNPPPPRAACLPHTCLMTDLMRLTALAQRSRRMKLRGLGDANMSRPQKQHVTSKKKKFPPS

SEQ ID NO: 188847 - protein, 133 aa, Oryza sativa
  unsure (1)..(133): unsure at all Xaa locations
  Clone ID: PAT_MRT4530_85411C.1.pep
MACTSSNVYMRYVINYFSYEVHDLPNLIMLNYLTLNIIPCSALHDNERSLPSGAIRAMRLGITTYRNSDHYXKKLAEYYHLLRQATTDLIAMNQPDFVITILFQEIDANKDTVRHHESEMRLSMPALSQVVHG

SEQ ID NO: 188848 - protein, 88 aa, Oryza sativa
  Clone ID: PAT_MRT4530_85412C.1.pep
MAREGIRSDRRRAEKVEEGYPKDESHGSGVHVFRRTRTPSGGHLGEYGKAKALARGHGFRQGTKPHLRKPSGPLRPRKGFARSMGQAI

SEQ ID NO: 188849 - protein, 150 aa, Oryza sativa
  unsure (1)..(150): unsure at all Xaa locations
  Clone ID: PAT_MRT4530_85413C.1.pep
LLIIIFVLAATVTMADHHRDQMECGLGERCQAGMGYTMYSMPRCRAVVKRQCVGHCAXGGAVDDQLADDCCGSLAXVNYSWCRRCRLKHMVLGMYREDGATDVVYRMGEVFPYCRRGDLXRLSDSLPVFVNVDIPNETGGVCYWLCYSRT

SEQ ID NO: 188850 - protein, 672 aa, Oryza sativa
  Clone ID: PAT_MRT4530_85414C.1.pep
MAEPAKAHDLSPSMSGDDREPNPRRRARTPPPPPRQSPRREKALERAEGSATSTPTGGGEGRRDGERRLLVYGDGSTPQGALQAAGALLHHPPVAHDPESPAQPPRCWWAVLRHQGLWCCYHRLRIVKTEGAASGSRCSPFGRHSFVNASDPGRSAWGTGCSHQYRAPAFRPTIAEKYDGSVNPAEFLQVYTTGIEAAGGDDRRFCQVRNTIPCIPAHAVIYAFRGGVRHNRMLEKIASKEPQTTAELFQLADRVASKEEAWTWNPSGSGVAASAAPGSAAQIGRRDRRRKKRSAHTDDEGHVLAVEGASRATRKGRPAGGKKNEAGAPNRERPTGKWCTVHNTSLHDLADRRAVKSLAERTRKWEEERRQERREGKSPAVPSGNRRSEAKQKAPAEDIDDGDDDLGFQELGATIATVDGGACAHVSRRSFKAMKRELLAATPTHEATCRARWSEVALTFDQTDHPPCVARGGQIAMVVSPTVCNVKLGRVLIDGGAALNILSPAAFDAIKAPGMVLRPSQPIIGVTPGHTWPLGHIDLPVTFGGSANFRTERVNFDVADLSLPYNAVLGRPALVKFMAAVHYAYLQMKMPGPGGPISVHGDLKVALACLEQRADHLAAASKPEGGDERLGASAPATPRQRMITGDEVPVKEVALGDGPSKTTRIGGLLDGK

SEQ ID NO: 188851 - protein, 110 aa, Oryza sativa
  Clone ID: PAT_MRT4530_85415C.1.pep
MAPCFIAPKDCARQIKRGRRCSVDVLERREGSGGGRGGGEGKGGSPRGIVVRRHPSPRGGPRLRDAATRSGELGNDIDGGFRPRRRWLPARHRRRLASSTLPPFVARLVE

SEQ ID NO: 188852 - protein, 53 aa, Oryza sativa
  Clone ID: PAT_MRT4530_85416C.1.pep
MVDETTTNRAVVREALPKTLITRLPAHASWDRGIVHALLRRQSWERGIVVAKE

SEQ ID NO: 188853 - protein, 795 aa, Oryza sativa
  unsure (1)..(795): unsure at all Xaa locations
  Clone ID: PAT_MRT4530_85417C.1.pep
MAEPAKAHDLSPSMSGDDGEPNPRRRARTPPPPPRQSPMREKALERAEGSATSTPTGGGEGRRDGERXLLVYGDGSTPQGALQAAGALLRHPPVAHDPESPAQRWLDDVAKLIMTARQRLDAGGRSSATKASGAATTGSASSRRRARRAAAAVRHSAATPSSTPPTRKDLRGEPDARISIERRRNGRRAPHATEGASSSGVSPHHGRGDQPSVPPVVGVGCRAFVASLRNVRWPPRFRPTIAEKYDGSVNPAEFLQVYTTGIEAAGGDDTVMANFFPMALKGQARGWLMNLPPASVHSWEDLCQQFTMNFQGTYPRPGEEADLHAVQRRDDESLRSYIQRFCQVRNTIPCIPAHAVIYAFRGGVRHNRMLEKIASKEPQTTAELFQLADRVARKEEAWTWNPSGSGVAASAAPGSAAQIGRRDRRRKKRSAHTDDDGHVLAVEGASRATRKGRPAGGKKNEAGAPNRERPTGKWCTVHNTSLHDLADCRAVKSLAERTRKWEEKRRQERREGKSPAVPSGNRRSEAKQKAPAEDIDDGDDDLGFQEPGATIATVDGGACAHVSRRSFKAMKRELLAAAPTHEATCRARVVEVALTFDQTDHPPCVARGGQIAMVVSPTVCNVKLGRVLIDGGAALNILSPAAFDAIKAPGMVLRPSQPIIGVTPGHTWPLGHIDLPVTFGGSANFRTERVNFDVADLSLPYNAVLGKPALMKMPGPGGPISVHGDLKVALACLEQRADHLAAASKPEGGDERLGASAPATPRQRMITGDEVPVKEVALGDGPSKTTRIGGLLDGK

SEQ ID NO: 188854 - protein, 885 aa, Oryza sativa
  Clone ID: PAT_MRT4530_85418C.1.pep
MGKRKQRGGGGAATEGDAAAGGGHSPSTVFVSNLPYTFKSADLEAVFSEVGPVRRCFMVAPKGSETSRGFGFVQFATVKDAERSIQQKDGFSVAGRKIRVKLATHRAPLKERLQKKENAMQAKDADVTNEAKDADSTNEAQDADATNEEDDTSTAKHKETSHKKDAGLERDGCTTDAAAVLFASVTSAWDSVVHLHRKEVKGAVVWARQLGGEGSKIRKWRVIVRNLPFKITVKEIMDMFSLAGFVWDVSIPQKSDNGTSKGFAFVSFTRKQDAENVWSVPCSAIKNVNGKVVAKRTVAVDWAVPKKVYTVAAAKSSAKDDELVNVSDKGSDEESEDNLVGEDDSYELDQEASNRPADDDFETEIDISRKVLENLIKSSEKAEPSGNEGSDVDTDTETEQDTSEKKQKQTHLPASVPAADKLENSKRVAEEENTLPASKFKKQDAGLDRTIFICNLPFDLSNEEVTERFSAFGKVESFFPVLHKLTKRPRGTGFLKFSTAEAADAAVSAANAAPGLGIFIKSRALKIMKALDKESAHKKELEKSKNEVEDRRNLYLTKEGEILAGTPAAEGVSDADMNKRSWLARRKAEMLQSPKFHVSRTRLIIYNLPKTMTINDVKKLCREAVISRAHKQNPIIRKVNILKNEKKSNSTAQKHSRGVAFVDFQEHEHALVALRVLNNNPETFGAERRPIVEFALENIEKVRLQKIWKERRDKLQEGAQDKARPLGDHSATDGPQANNTRAFNKGHKRKTHDRSSKLSNSGKGSAEDLSAAGDGGSGIMESMVEDKRKAQRPAKRARKPNKTSDGDRQDATPPTADGNQTLSSKHNQAGTPTKRKNRKDSHSEQRRGKAPKTKKEPAGEGGVDKSLVEQYRSKFLQHGLNKTKG

SEQ ID NO: 188855 - protein, 77 aa, Oryza sativa
  Clone ID: PAT_MRT4530_85419C.1.pep
MASKFLRIASEYGFGYDLLLGPVALGDAPPRGRVDAIPRNQISSQEYCKPFNGLVERTVGRGPVRVNMCRFILSSAG

SEQ ID NO: 188856 - protein, 146 aa, Oryza sativa
  Clone ID: PAT_MRT4530_8541C.1.pep
KREEAESARGQFAPATCASFPASARTHKPWLPLQSSLARAGPQPPRSCRRRGGVRRRRGCQPRPGTGAARPRRRRTPRTPWHPWTRRTPSSGGTSSRRRRCPPRSCRRRARPAAPTPPASAATPAASPRPRTPPRSRRPRRCCCCS

SEQ ID NO: 188857 - protein, 975 aa, Oryza sativa
  Clone ID: PAT_MRT4530_85420C.1.pep
MGKRKQRGGGGGGGGAATEGGAATGGGAGGHSPSTVFVSNLPYTFKSSDLEAVFSEVGPVRRCFMVAPKGSETSRGFGFVQFATVQDAERSIQQKDGFSVAGRKIRVKLATHRAPLKERLQKKENAVQAKDADATNEAKDADATNEAKDANATNEAYATSTAKHKETSHKTDTEPLQLLKKETTLSKEVSISNTAKVKSSEKQRVAKTVIFGGLRDFAMASEVFRLAGEIGTVVSVSYPLPKEEMELHGLERDGCTTDAAAVLFASVKSAWDSVVHLHRKEVKGAVVWARQLGGELFPQLPAVVSNLLAIQGSKIRKWRVIVRNLPFKITVKEIMDIFSLAGFIWDVSIPQKSDDGASKGFAFVSFTRKQDAENAIKNVNGKVVAKRTVAVDWAVPKKVYTVAAKSSTKDDELANVSDRGSDEESEDNLVGEDDSYELEQETSNCPADDFKTEMDISRKVLENLIKSSERAEPSGNEGSDIDTDTETEQDTSEKKQKQTHLPTSVPAADKLENSKRVAQEENTLPATKFKKQDAGLDRTLFISNLPFDLSNEEVTERFSAFGKVESFFPVLHKLTKRPRGTGFLKFSTPEAADAAVSAANAAPGLGIFIKSRALKIMKALDKESAHKKELEKAKNEVEDRRNLYLTKEGEILAGTPAAEGVSDADMNKRSWLARRKAEMLQSPKFHVSKTRLIIYNLPKTMTINDVKKLCREAVISRAHKQNPVIRKVNILKNEKKSSSTAQKHSRGVAFVDFQEHEHALVALRVLNNNPETFGAERRPIVEFALENVEKVRLQKIWKDRRDKLREAAQDKARPLGDQSATDGPDANNRRAFNKGNKRKSHDRSSKLPYAGEGPAEDLSAAGDGGTVESMVEDKRKDQRPAKRARKSNKGTTALDGDRQDATPTADRNRTLSSKHNPADALAKRKNRNDSHSEQKRGRAQRKTKKELAGEGSVDKSLVEQYRSKFLQHGLNKTKG

SEQ ID NO: 188858 - protein, 439 aa, Oryza sativa
  Clone ID: PAT_MRT4530_85421C.1.pep
MATEGLVPITRAYLARYYDKYPLPPLPDAATALADRLRAISAALALAAAAPITPDEELLEKEANGIPAHKIDENLWKNREQMEEILLLLNKSRRPVALQQRSTAEDTETFIILDDVETKLKDMLKKLEQFQIKNADNVFNTVMTYMPQDFRGTLIRQQRERSERNKQAEVDALVNAGGSIRDRYALLWKQQMDRRVQLAQLGSATGVYKTLVRYLVGVPQVLLDFIRQINDDNGPMEEQRERYGPALYTLTKLVLAIRLYLHVSLARYGQRKIEKDDIAVLQQAVAIYTEEFEKFTEFIGEVFVNAPFFISAEDAGAESRNSDDYKETIIPAGKTHEVILSVEAVNSYIAWDFSLQQGALNMVLDIGFHVEYISPSGQKTLILPYRRYEADQGNFCTVSAGSYKLVWDNSYSSFFKKRLRYLVDAVPYIDSPAEPAAEP

SEQ ID NO: 188859 - protein, 151 aa, Oryza sativa
  Clone ID: PAT_MRT4530_85422C.1.pep
MEMAGFNKIGPWGGNGGIEYVMETVPHRLESITIYSSVVVDSLEFSYSEVNGDNHTSGPWGSASSESSQMIRLGSHDFLREVSGTVGPFNSMPNVITSLKFFTNGGTYGPFGQGGGTPFKVDPLEYSSNIVGFFGRAEQCLETFGIYIRKF

SEQ ID NO: 188860 - protein, 188 aa, Oryza sativa
  unsure (1)..(188): unsure at all Xaa locations
  Clone ID: PAT_MRT4530_85423C.1.pep
ARYKDTPGIWTKEQVEAWKPIVDGVHAKGGIFFCQIWHXFQPNGQAPISSTNKSLXLQVAARNAIEAGFDGVEIHGAHGYLIDQFLKDQVNDRSDKYGGSLENRCRFALEVVQAVTDEIGADKVGIRLSPFASYSEAADSNPEALGLYMANALNKFGILYCHMVEPRMVKLGEKFETXHSLRPIRDAF

SEQ ID NO: 188861 - protein, 163 aa, Oryza sativa
  Clone ID: PAT_MRT4530_85424C.1.pep
MRQAVGLCKAHQLRPAALLSPRPLLRRASPCLPAAGAGGELRRASAASRLVVRRRCQEEEQQQQQEEEERSNGGGGDGEQEQRTFLSLEEAGLVEMSGLSTHERFLCRLTISSLNLLRVISEQEGVPIEELNAGLVCDWFVKDKLKREQNVGSAVLQWDDPGF

SEQ ID NO: 188862 - protein, 51 aa, Oryza sativa
  unsure (1)..(51): unsure at all Xaa locations
  Clone ID: PAT_MRT4530_85426C.1.pep
GREMKRGRXGIGGGRRRGVRMTCGAHVGSTIFINLLCETDMWVPRGFIIFS

SEQ ID NO: 188863 - protein, 96 aa, Oryza sativa
  Clone ID: PAT_MRT4530_85427C.1.pep
MSTTKLTNTLGSPSEQRKEGGQKWRSGAVPAAVPGCRGSSGLGRSRVAGGLRRGEPGLAGADDDFPRPPRRALAEKGEEGTQTLGSIWRLRRDGYF

SEQ ID NO: 188864 - protein, 93 aa, Oryza sativa
  Clone ID: PAT_MRT4530_85428C.1.pep
MAMKDPSLWHKVAAISGVAALGLGTYGAHMFRPKNPAYKECLSSLQFGGLLTAGIVLFSGTCYTVAYLEDRKYSSTAPLGGFAFIAAWASLLF

SEQ ID NO: 188865 - protein, 64 aa, Oryza sativa
  Clone ID: PAT_MRT4530_85429C.1.pep
FTQHRISTTQSWLPFWRRTNYTPDGVIVILQDGFQSLQLLRFSAPILPLLSFSENAMPKLKGSS

SEQ ID NO: 188866 - protein, 39 aa, Oryza sativa
  Clone ID: PAT_MRT4530_8542C.1.pep
MAAPLQQLSHKHCHSEDFCGLTGRYGRSIAATEPQALPQ

SEQ ID NO: 188867 - protein, 142 aa, Oryza sativa
  Clone ID: PAT_MRT4530_85430C.1.pep
MINRDSRREQKRASKEGDPRKKMAAAAAMAMKDPSLWHKVAAISGVAALGLGTYGAHMFRPKNPAYKEVWHTASLYHLVHTAALLGAPITKRPDVFGGLLTAGIVLFSGTCYTVAYLEDRKYSSTAPLGGFAFIAAWASLLF

SEQ ID NO: 188868 - protein, 115 aa, Oryza sativa
  unsure (1)..(115): unsure at all Xaa locations
  Clone ID: PAT_MRT4530_85431C.1.pep
WRRRQATATAEAAWRRNRSSAGGGGGWFHAATALRVAGXHPKWVTKLGQFDVHFIPRTTIKSQVLSDFVANWTVAEDGKVGHTNNERSTMAFNGAFSIQGAGVGFILTSLKGDQF

SEQ ID NO: 188869 - protein, 52 aa, Oryza sativa
  Clone ID: PAT_MRT4530_85432C.1.pep
TLTSLSSDHTWKLVSGPSILVPDKCVVRYYAYPGCKIIHDLMAALLLSMNEG

SEQ ID NO: 188870 - protein, 78 aa, Oryza sativa
  Clone ID: PAT_MRT4530_85433C.1.pep
INQSIIFPFSIAQSIKNSECPSELEPADKKSQVNVNLVRKEEKCPEPVKRAAPFHGAAKTLGTPSDNNSTPPEATSAA

SEQ ID NO: 188871 - protein, 45 aa, Oryza sativa
  Clone ID: PAT_MRT4530_85434C.1.pep
ARTRTLGIHFFDRPSFFFFLDKNDRLIPLYYWGSITEPNNSYQIT

SEQ ID NO: 188872 - protein, 351 aa, Oryza sativa
  Clone ID: PAT_MRT4530_85435C.1.pep
MAAGDAARAPPAAEAQSLVESFCGVTSATPQEAAFFLESHNWALESAVRSFYDSADGDASAAAADAADPPPRQPPPPPPASDGADSDDEDYVVGGGDEDQDDEDYVGDGDGDGEGDDDDDEDAALAAEEAAASDERRRPLKRLKRGQNARGGSGSGKGNVRTLSDLGGGKDSAGSEDSEDDEYKPPQELYTGGEKSGMVVRDRSKRKNRADEIFKEAKRKGAKKGSFEARRKSKSFAGTGRLLTGESAEPVAPQSPESIVHNIYFWTNGFTVNDGPLRSFDDPANASFLKSIKNSECPSELEPADKKSQVNVNLVRKEEKCAAAWSRVSTRATRSRMFGGSSTQQGPGVRR

SEQ ID NO: 188873 - protein, 168 aa, Oryza sativa
  unsure (1)..(168): unsure at all Xaa locations
  Clone ID: PAT_MRT4530_85436C.1.pep
FGCRDSRTSYLDGTLPGDXXFDPLGLSXPEGTGGFIXPRWLAYXEVFXGRTAIMGVFRMVXPELLXKLGLVPXETAIPWFQTGXIPPAGTXTXWAXPYTLFXFXLXLLXFXXHXRFXXWFXXGSXGXQXFLRLQGGPXPNSPYXNPITIHWAFYNLTGKTWLSPLNPL

SEQ ID NO: 188874 - protein, 183 aa, Oryza sativa
  Clone ID: PAT_MRT4530_85437C.1.pep
NAWTASRHFACPCNRGPSPSEGFGSVRSAAQLSLLTFAPFIPSGGPSWSLQTGLVRCCGGHPLSAAAVQLSRCNYGSLHRQPQQSPPVVLSGPSLHGHGERWSFLAPPSPHRPAAPFIPSPAPSRSAILCHSSSPPLQSNRSFPRLSSPAMISLLPCRFPLAAPPGLPWRWRWRRRPRSLPTL

SEQ ID NO: 188875 - protein, 225 aa, Oryza sativa
  Clone ID: PAT_MRT4530_85438C.1.pep
MASTALSTASNPTQLCRSRASLGKPVKGLGFGRERVPRTATTITCQAASSIPADRVPDMGKRQLMNLLLLGAISLPTVGMLVPYGAFFIPAGSGNAGGGQVAKDKLGNDVLAEEWLKTHGPNDRTLTQGLKGDPTYLVVEADKTLATYGINAVCTHLGCVVPWNAAENKFICPCHGSQYNNQGRVVRGPAPLSLALVHADVDDGKVLFVPWVETDFRTGDNPWWA

SEQ ID NO: 188876 - protein, 70 aa, Oryza sativa
  Clone ID: PAT_MRT4530_85439C.1.pep
SLHSRPLRYWTAIVRSTYGLLSLWFIRVGSLLALMSCLGGARGCQQFRREAPPRRLLRGPLLQMDRERWA

SEQ ID NO: 188877 - protein, 33 aa, Oryza sativa
  Clone ID: PAT_MRT4530_8543C.1.pep
RHELRQAGGLYKPKGRMLPGRCKVGELVSIATQ

SEQ ID NO: 188878 - protein, 75 aa, Oryza sativa
  Clone ID: PAT_MRT4530_85440C.1.pep
IPPTFGNKPTLFFKKIFLPLTFIQHFFPFFFESPPKLPIPLHFLKNYFFHFREWNQFLFLLALATCFNSQLYQPK

SEQ ID NO: 188879 - protein, 197 aa, Oryza sativa
  unsure (1)..(197): unsure at all Xaa locations
  Clone ID: PAT_MRT4530_85441C.1.pep
LVLLLLLVLVLYFGVLLYGNVIMVLTTRSYCMLXRVANRPVPVRRTCLSRRLLALTFYVALLVGLLPLACVRRPLSLSFLALIFVVAHFQRRAAARLRAALALFVPVSRVFSFRWVLCLSRLLCGLLGVPFLPVSYSCCSVLVLVADFGSSGFDPASSLCFCLLLLLWTFVLVLRSLVLSLLLLVGSLFLSGVVCPA

SEQ ID NO: 188880 - protein, 519 aa, Oryza sativa
  Clone ID: PAT_MRT4530_85442C.1.pep
MVSALAGLQDHLKLARDYALEGLYDTSIIFFDGAIAQINKHLTTLDDALIRTKWLNCKKAICDEVEIVKQLDAQLKAFKEAPGARRSSSPPIRSNNKSFVFQPLDEYPTSSPAPFDDPDVWAPPRDTPNRRPTRGQSSTRKSSQDGAWARGPSKTGTPSRGAKPNGSKGNSGARSSTASSTGGRKGKSSSSKADSVSSDAEEGKSKKGQYEGPDMDLAAMLERDVLDSTPGVRWDDVAGLSEAKRLLEEAVVLPLWMPEYFQGIRRPWKGVLMFGPPGTGKTLLAKAVATECGTTFFNVSSATLASKWRGESERMVRCLFDLARFYAPSTIFIDEIDSLCTSRGASGEHESSRRVKSELLVQIDGVNNSSTTEDGQPKIVMVLAATNFPWDIDEALRRRLEKRIYIPLPNFESRKALININLKTVEVATDVDIDEVARRTEGYSGDDLTNVCRDASMNGMRRKIAGKTRDEIKNMSKDEISKDPVAMCDFEEALAKVQKSVSPADIEKHEKWQAEFGSA

SEQ ID NO: 188881 - protein, 147 aa, Oryza sativa
  unsure (1)..(147): unsure at all Xaa locations
  Clone ID: PAT_MRT4530_85443C.1.pep
PPSCASPPSPRPVPSSPSHVXSPPPRAATIASPYSSPPSPPPSLPSCRRVRHLRLPLPPPPPPVHHSPPPFPTATVAVSISAPRPPRATASSAVTGHLPRGTPLPSLSAQSPPLSTAVSGCRHPDPVGGGQIRVPKPHGKGGLGWSR

SEQ ID NO: 188882 - protein, 163 aa, Oryza sativa
  unsure (1)..(163): unsure at all Xaa locations
  Clone ID: PAT_MRT4530_85444C.1.pep
MHKRTDFYQRITAPSQFTCSPIQESSEKNXEISKNRCPEPRNRRQQSLRIQQELVKNRDLSHDRXGGNARISRIQSRLGGRRQTARSPATAAXPTRCRRGGAVRWXATGGRSTGGRCGYIRGGCARRGRPPCHRGRSSRAPSCGQQDIADETIGEETQKQSAT

SEQ ID NO: 188883 - protein, 203 aa, Oryza sativa
  unsure (1)..(203): unsure at all Xaa locations
  Clone ID: PAT_MRT4530_85445C.1.pep
MGDHVAVDVGGLMVECRICQEEDLAKNLESPCACSGSLKYAHRECVQRWCNEKGDIICEICHVSYKPGYTAPPQVHHDETTIEISSGDWSISGNRLDLHDPRILAMAAAQHRLLEDEYDEYTATNNNAAAFCRSIFLILMALLLLRHTLTITSSDDEDDASAIFSXFLLRAAGFLLPCYIMGWAISIMQRQRQRQEESMLLPT

SEQ ID NO: 188884 - protein, 250 aa, Oryza sativa
  Clone ID: PAT_MRT4530_85446C.1.pep
MGDHVAVDVGGLMASRGAGEEETGALIGMVECRICQEEDLAKNLESPCACSGSLKYAHRECVQRWCNEKGDIICEICHVSYKPGYTAPPQVHHDETTIEISSGDWSISGNRLDLHDPRILAMAAAQHRLLEDEYDEYTATNNNAAAFCRSIFLILMALLLLRHTLTITSSDDEDDASAIFSLFLLRAAGFLLPCYIMAWAISIMQRQRQRQEEAMLLPTEVAIILHRNGRTMQFAVAPESPTTPHPEQGQ

SEQ ID NO: 188885 - protein, 130 aa, Oryza sativa
  Clone ID: PAT_MRT4530_85447C.1.pep
MEMIGVTHVEAFGNSELVVQQVAGVYKCLDGSLNWYLDQCLDIIANFDDFAIRHISRHDNSRGNDLAQQASSYNVKRGLFLILEKPVLDFKSLDEIGKVTDQGRSDRHCTTGLTGDHGRSDWPDAAGLTG

SEQ ID NO: 188886 - protein, 105 aa, Oryza sativa
  unsure (1)..(105): unsure at all Xaa locations
  Clone ID: PAT_MRT4530_85448C.1.pep
LNPKPPTFPNPHLNGRSGRRPAAVEAQQAGGXHRRLVGAPXRRRRALXRPLPRAPILPQXPLLQQLPLLXVPRXRRAARAGXSFXXXGXXPFYPKRHPXFPGDDL

SEQ ID NO: 188887 - protein, 71 aa, Oryza sativa
  unsure (1)..(71): unsure at all Xaa locations
  Clone ID: PAT_MRT4530_85449C.1.pep
STTIYSIYSFHKSRSGRRVADWIYSPLPPWLDPSPPRPDQPHPPMQPLPFVVTXPPPPPPPLPRRPLLELS

SEQ ID NO: 188888 - protein, 337 aa, Oryza sativa
  Clone ID: PAT_MRT4530_8544C.1.pep
MSAVEMKTACVTGGNGYIASALIKMLLQKGYAVNTTVRNPGDDMKKTSHLKDLEALGPLEVFRADMDEEGSFDDAVAGCDYAFLVAAPVNFQSQNPEKELIEAGVQGTMNVMRSCVRAGTVKRVILTSSAPAVSGRPLQGDGHVLDEDSWSDVEYLTKEKPPAWAYSVSKVLMEKAACKLAEENNISLITVFPVFTLGAAPTPTAATSVSAMLSLLSSDETQLKTLKGLAATGPIPTVHVDDLCRAEVFVAEKESASGRYICSSLSTTVVAFARFVAGKHPRYNVKTDGFQGFPEKPRVCYSSEKLVREGFEFKWTDLDEVFDDLIEYGKVLGILPQ

SEQ ID NO: 188889 - protein, 56 aa, Oryza sativa
  unsure (1)..(56): unsure at all Xaa locations
  Clone ID: PAT_MRT4530_85450C.1.pep
KTFCRKKRKKRTDSRREKKSPTREKEVFSSVIKKKKKKHLXKLRKKKRRKKRPDQT

SEQ ID NO: 188890 - protein, 374 aa, Oryza sativa
  unsure (1)..(374): unsure at all Xaa locations
  Clone ID: PAT_MRT4530_85451C.1.pep
VSVAPVRGRRRRRRGTNFYFSYKLLLPPFCFIYYIICFDFFSXLNIFSFDQTFRKKNNISRSEYNPDQYLWETEFILAGRKYKRLDLELTNARGLTIKCSHYVPAFIPENTSLPCVIYCHGNSGCRADANEAAVILLPANITVFTLDFSGSGLSGGDYVSLGWHEKEDLKCVVSYLRTTKQVSCIGLWGRSMGAVTSLLYGAEDSSIAGMVLDSAFTNLYGLMMELVDVYKIRVPKFTVSIAVFALXLIIFFXNSSFQVKMAVQYMRKIIQKRAKFDIMDLNVLQVLKQFAPKTFIPALFGHASNDMFIQPHHCDRIHQAYGGDKSIIKFEGDHNSPRPQSYYDSVSMFFYNTLHPPQLPGPGFWAPVGEEGAP

SEQ ID NO: 188891 - protein, 212 aa, Oryza sativa
  Clone ID: PAT_MRT4530_85452C.1.pep
TLRSEVLLVAVILNACSLLQLWLTLCSLVLKQFAPKTFIPALFGHASNDMFIQPHHCDRIHQAYGGDKSIIKFEGDHNSPRPESYYDSVSMFFYNTLHPPQLPVKCSNNLGAFKVGTVTNESFIFEIISGLRGAGTNSCSSSIDASKFPNATTPVVELLSESVNQLSIKNDSDLDFLLDENRTLSEIDGIGLGHACRTNQVGTMRNPAHVQA

SEQ ID NO: 188892 - protein, 289 aa, Oryza sativa
  unsure (1)..(289): unsure at all Xaa locations
  Clone ID: PAT_MRT4530_85453C.1.pep
MEAGGGCAHWRLRVALVCGGSGGHQLRPPASWQRRSGALMVPMASRASTAGPMAASAGGRCSSGWRRLGGLFSRGVGVSCVQEVVLWCISQQFNKDDITAYEISCFLHPVSDIQLFILSIFRQELSIHLSALHCQMADMGARQQVMMRTGTQAKLHVQGYSGKGTNYPLNYHGRPNYPLEPQNRIFFTPNFANQTNNPPGLIRGGFDPTCVPSEAAPVRADAAADVQTGCRTMLGLIVTGIAGGALAQAALAEAAKPIKLGPPPPPSGEGEVLPAAAAAXGGGGEGEGG

SEQ ID NO: 188893 - protein, 88 aa, Oryza sativa
  Clone ID: PAT_MRT4530_85454C.1.pep
DSNPIGKFHIWSSETKNWSFSNPMKFLRNGSIHVDFKGKLARDTTSWKISFESIFVIYFLCFSYSCILPFLISTGALTYLWRADGYIY

SEQ ID NO: 188894 - protein, 365 aa, Oryza sativa
  Clone ID: PAT_MRT4530_85455C.1.pep
MGGGGDGELSPAEARLAMMELANMISVPMALTAVIRLGVPAKLWAGGANAPLAAADLLPAGHPDPSVLERLLRLLASRGVFSEHTGSSSPSPRRFSLTAVGRTLVPGGGGSPSGSGASYADYVLQHHQDALVRAWPLLHEAVLDPSGPEPFARANAGVPAYAYYGKDREANEVMLRAMTGVSEPFMEALLEGYGDGGFEGVSTLVDVGGSSGACLEMIMRRVRTIRDAGRFDLPDVVAAAPPIPGVRHVGGDMFKSIPSGDAIFMKWVLTTWTNEECTAILSNCHKALPGGGKVIACEPVVPDTTDGSTRTRALLENDIFVMATYRTQGRERSEEEFRHLGLAAGFASFRAIYLDPFYAVLEYTK

SEQ ID NO: 188895 - protein, 80 aa, Oryza sativa
  unsure (1)..(80): unsure at all Xaa locations
  Clone ID: PAT_MRT4530_85456C.1.pep
CWSIIAILKAAGSACSSDPIPSLVNVIVFNNNVVCLAXKKKKKKKKKKKKKKKKKKKKKKKKKKKKKKKKKKKKGGAGFK

SEQ ID NO: 188896 - protein, 207 aa, Oryza sativa
  unsure (1)..(207): unsure at all Xaa locations
  Clone ID: PAT_MRT4530_85457C.1.pep
VRSHPKPLPSAISLLLEVNRANSCHTVGLKINGGFPSHNLNHSPPSRPFXPSLPPRVAPGLAPTRRQPFLPMVKPILLRILSPNRSSASSFTSPHQAEHRCPRVALFFAAEKIFRLQSVISTNLAASSITYXINPSAAARHRRRTLAPSPPRPQPLSPSTAAFGDPLEVEEEKRERDXQLGLEDSSDTLDNINQSQDIEQGKLPYTF

SEQ ID NO: 188897 - protein, 93 aa, Oryza sativa
  Clone ID: PAT_MRT4530_85458C.1.pep
SVEGTRQNCICQRTPLPTPPIYAIISGQKHTDFHCSASPVGGPKPHNMILLSDGMSDDENTYGYFIIRMAELKGDTCHATGVISAGQPMTDRA

SEQ ID NO: 188898 - protein, 558 aa, Oryza sativa
  Clone ID: PAT_MRT4530_85459C.1.pep
MDKLGANPANSCALTPLGFLERAATVFGDCPSVVYHDTVFTWSQTHRRCLRLASALVSSLGISRGDVVSVLLPNVPAMYEMHFAVPMSGAVLNSINTRLDARTVSVLLRHSGSKLIFVDPALLPVLRDALRLLPAGHTAPRVVLVEDPHEKEFPPAPAAALTYERLVEKGDPEFAWVRPASEWDPMILNYTSGTTSAPKGVVHCHRGIFLITVDSLVDWAVPPRPTYLWTLPMFHANGWSFPWGMAVVGGTNVCLRRVDAAEVFDTIARRGVNHLCGAPVVLNMLANAPEGVRKPLPGKVRILTAGAPPPAAVLYRTEAIGFEVSHGYGLTETAGLVLSCAWKGEWDKLPASERARLKARQGVRTPGMAEVDVVDGETGRSVPRDGSTMGEIVLRGGCITLGYLNDEAATKAAIRDNGWFYTGDVGVMHPDGYVEIRDRSKDVIISGGENISSVEVESVLYGHPAVNEAAVVARPDEFWGETPCAFVSLKQGGGAVTAADVVAWSRERMPRYMVPKTVIFRDELPKTSTGKIQKYVLRNIAKEMGPTTGTNTNRNSKM

SEQ ID NO: 188899 - protein, 554 aa, Oryza sativa
  Clone ID: PAT_MRT4530_8545C.1.pep
MAYLRAGEATLLLERRWPAVVVSGGVTHATTGISSFRSSAGATAVSPELVGEDLEKISLFPEGGFKPLIHKIPALLRNMENAGSLFDPDVVAIGPCHHDNPDLQGMKNIKKMAAKEFCSKSEHKVSAFYLTVQKVSGQASKCYPTSIDLNDFTDMMFYDGCFLLQFIKSTADRRARSPWTDLIRRMGLWDSIARDVLLLENQIPWVVLEALMSLKHVSVDRFIAYIISWFDEQMVRPQVQLDKYRPSHLLDLVRHFQIGSRPTKVEPISEPRLAISAIKLAENGIHFEPSETTRFGDITVVKKRFLFGKISLPPLFLGRRTMCWLANMVAFERTKAGRCDCGVGSYMHIIAGLMNSEEDVRELRTKGILYPVFSDKQTLKFFKSITQHVPYGYDYMRIRTGIDDYHRQRKLAHRSVKVALGVASPSAEPAGVRRRLLAGSHRRPLIALGRCGVRSSVKPILSAARVSSSVQQPRRRLRPRLHVVKPRAGHASPSSKDRRRSRSLAVCFRRPRAASAAPVRRRRSHASLRGAPIVPEVLKAWVAVIAEGSEGRSL

SEQ ID NO: 188900 - protein, 155 aa, Oryza sativa
  Clone ID: PAT_MRT4530_85460C.1.pep
RPGPVQVNSAPLPLPPPPPPLLHLPSPVPLSLASSFFHGRKGWGDDAHEPIHFDPCHPGPIYILPVGSHSQSLLAAASACDCELSPLSLFFFFFWLAKLLLCFRCFFSTPLLFPHFSLLCHAHEKLLPLPYLRSPSLTPVVVGFGGCSPLAFLLL

SEQ ID NO: 188901 - protein, 255 aa, Oryza sativa
  Clone ID: PAT_MRT4530_85461C.1.pep
MASILSPLGKFWRIELEKDELGMFFKGGWLQFLSFHGISPGDVVLLRHEGNLVFKIKVFGINGCKKDLKTKDDITIQQSARNQHETPSFSTRKCNKNSRFGEDCKNQLQEIPCSIKGSRKKGRETKRPKKSKSIYEIGPPSWIKKEISNYMLENGNISLPGIFCKSIGLVEETTITLMINSSRGRSSSSSSRSWEVACSVNKNGYGCCNLLPSGWKRFCQANGLLVGDVCTFSVVEATLWHVAIDRVERSRLHRR

SEQ ID NO: 188902 - protein, 194 aa, Oryza sativa
  unsure (1)..(194): unsure at all Xaa locations
  Clone ID: PAT_MRT4530_85462C.1.pep
FNSTSIRNSVRRGPSSSVAGLSDGSNRVASTKKFRKNRSLLRTGRREFSPSNSGLVHGFGQDHGSNPNHTNKRFRVSNKETSKKLKHTQEDTADNDFSYESDVPALGQXDDQYDAAQQAGISQMYYEGEEPETEMQCASPSRSDPVDCSNDMSSDSLSPGNNETADDVLGGGYSVAIGDPCSNEKSAYHAYFPT

SEQ ID NO: 188903 - protein, 219 aa, Oryza sativa
  Clone ID: PAT_MRT4530_85463C.1.pep
MARREEGRWAAARGRAGGRRARGAPGGGGDGGEAGVGGHGRKRRGEDGGRRTEAHVGSWSGVGRRTGRRSKRGGRGRKQRRRRRPFPRPNPSAPHGGTTVVGSARATATAPPHYRQIHTVAQSTLPGEERGEEEWGRRGEEGRSRSSGQGGAAAAAAVATAVEAAHEVLWAHGYASTAGRQLRWTAARGEGAAAVVPACPSSTPPRRYGHEHYAAVCSP

SEQ ID NO: 188904 - protein, 66 aa, Oryza sativa
  Clone ID: PAT_MRT4530_85464C.1.pep
TVMIINFNNVLGFILTEALCLNLHDIIRLYHPDVSTCHTTMMHALYFSLLYSLYCYQFQYPDTTAR

SEQ ID NO: 188905 - protein, 490 aa, Oryza sativa
  Clone ID: PAT_MRT4530_85465C.1.pep
MAAELVHLLRYLFSVPMLFFIVPLLFLVCSPRRRRGRGSCRLPPSPWALPVVGHLHHLAGALQHRAMRDIARRHGPLVLLRLGRLPVVVASSADAAREVMRTSDVAFAARPVNRMIRVVFPEGSEGVIFAPYGETWRQLRKICTAELLSARRVHSFRSVREEEAGRMLRAVASAAAQTTVNLSELMSAYAADSSARAMIGRRLKDRDTFLAMVERGIKLFGEQSLPNLYPSSRLAVLLSTMPRRMKRHRERMTAYLDAIIEEHQESRASREDDEDLLDVLLRMPERRDMFIGGSEPPAITLQWIMAELIRNPEVMQKVQDEVRQLLVGQHRVTEESLSKLGYMNLVIKETLRLHPPGPRLLLRVCRTTCQVLGFDVPKGTMVLVNMWAINRDPKYWSQAEEFIPERFENAGINFKGTNFEYMPFGAGRRMCPGMAFGLATLELALASLLYHFDWKLPDGVEIDMKEQSGVTTRRVHDLMLVPIIRVPLPV

SEQ ID NO: 188906 - protein, 86 aa, Oryza sativa
  Clone ID: PAT_MRT4530_85466C.1.pep
PHASQNIEVFQHSKYFCEFCVKFPVKRQSVVLWGCQLCVKVKVRGPFPLNPASSVSVTSPILRLKDHTEALSGSVSESVFGPPPHW

SEQ ID NO: 188907 - protein, 519 aa, Oryza sativa
  Clone ID: PAT_MRT4530_85467C.1.pep
MAEVVQLHHLILLLPLFILPFLLLRSSRRRRGACGRLPPSPWALPVIGHLHHLAGALPHRAMRDIARRHGPLVLLRLGELPVVVASSADAARDVMKTHDLAFATRPITRMMRLVFPEGSEGIIFSPYGETWRQLRKICTVELLSARRVNSFRSVREEEVNRLLRAVAAAAASATSPAKTVNLSELMSAYAADSSVRAMIGRRCKDRDKFLAMLERGIKLFVTPSLPDLYPSSRLAMVVSRMPRRMRRHREEVFAFLDAIIAEHQENRASGEDEEDLLDVLLRIQREGCMESTVIHRIHQDNNWRKYSHEHTNNSKKRLPSKLAKSYHGFSTKCSYLKIWLHGTQDLFNGGSETTATTLQWIMAKLMRNPRVMQKAQDEVQRVFIGQHKVTEENLSNLSYMYLVIKEALRLHPPRPPLLPRECRTTCQVLGFDVPKGTIVLVNMWAINRDPKYWDQSEEFILERFEHVDINFKGMNFEYMPFGAGRRMCPGMAFGLVNLELVLASLLYHFDWKLSDKISR

SEQ ID NO: 188908 - protein, 326 aa, Oryza sativa
  Clone ID: PAT_MRT4530_85468C.1.pep
MAEVVQLHHLILLLPLFILPFLLLRSSRRRRGACGRLPPSPWALPVIGHLHHLAGALPHRAMRDIARRHGPLVLLRLGELPVVVASSADAARDVMKTHDVAFAARPVNRMIRVVFPEGSEGVIFAPYGETWRQLRKICTAELLSARRVHSFRSVREKEAGRMLRAVASAAAQTTVNLSELMSAYAADSSARAMIGRGLKDRDTFLAMVERGIKLFGEQSLPNLYPSSRLAVLLSTMPRRMKRHRERMTAYLDAIIEEHQESRASREDDEDLLDVLLRIQREGDLEVSRESIRSTIGDMFIGGSEPPAITLQWIMAELIRNPEVMQK

SEQ ID NO: 188909 - protein, 73 aa, Oryza sativa
  unsure (1)..(73): unsure at all Xaa locations
  Clone ID: PAT_MRT4530_85469C.1.pep
AKMHRQENVYMGKLVQQVEGHEVMAVNMEMVAXDCTXEELTAVECNLSSVAXKNVIGAHHASRDVDLFSAHYE

SEQ ID NO: 188910 - protein, 62 aa, Oryza sativa
  Clone ID: PAT_MRT4530_8546C.1.pep
MAGGLARLHRLLQHLRATTFGYPNKVIAPLSWSDVNQEKGMLHHHQLLAELDALIEADKEKY

SEQ ID NO: 188911 - protein, 504 aa, Oryza sativa
  Clone ID: PAT_MRT4530_85470C.1.pep
MAAELVHLLRYLFSVPMLFFIVPLLFLVCSPRRRRGRGSCRLPPSPWALPVVGHLHHLAGALQHRAMRDIARRHGPLVLLRLGRLPVVVASSADAAREVMRTSDVAFAARPVNRMIRVVFPEGSEGVIFAPYGETWRQLRKICTAELLSARRVHSFRSVREEEAGRMLRAVASAAAQTTVNLSELMSAYAADSSARAMIGRRLKDRDTFLAMVERGIKLFGEQSLPNLYPSSRLAVLLSTMPRRMKRHRERMTAYLDAIIEEHQESRASREDDEDLLDVLLRIQREGDLEVSRESIRSTIGDMFIGGSEPPAITLQWIMAELIRNPEVMQKVQDEVRQLLVGQHRVTEESLSKLGYMNLVIKETLRLHPPGPRLLLRVCRTTCQVLGFDVPKGTMVLVNMWAINRDPKYWSQAEEFIPERFENAGINFKGTNFEYMPFGAGRRMCPGMAFGLATLELALASLLYHFDWKLPDGVEIDMKEQSGVTTRRVHDLMLVPIIRVPLPV

SEQ ID NO: 188912 - protein, 389 aa, Oryza sativa
  Clone ID: PAT_MRT4530_85471C.1.pep
MKGFRAALARASARSRAELQVARRRRHPSDPARRLSHSGTAPARPSFGIAFDIDGVILRGRSPIGGSPQAIRRLYSEDGTLKIPFLFLTNGGGVPEHKRAQELSELLGVNISPAQVVHGSSPYKELVNRFENDLIIAVGKGEPAAVMVDYGFRKVLSIDEYSSYFGDIDPLAPFKKWIVQQPDNINLMSEKVHPSYDVFEERVKGVFVVSDPVDWGRDLQVLCDILSTGGLPGSGRGDQPPLYFASDDLEYQAAFPSERLGMGAFRIALESIFNQVNDHRLKYISYGKPNPFVFKNAANILEKLAICMHPSSLPTKEVEEHRFSTIYMVGDNPKVDINGALKAGPPWSPVLTRTGVFRGKDNDPQYPADLVVDTVEDAINCILEKECIQ

SEQ ID NO: 188913 - protein, 1482 aa, Oryza sativa
  unsure (1)..(1482): unsure at all Xaa locations
  Clone ID: PAT_MRT4530_85472C.1.pep
MPYSARNQNNNHHNSQLPPPPTRNSGASGSRPTGAMDPTLAQILAAQSQLFDRLVATQEALGNALLQNNRQPQSKLAEVQRTQPPVFSAAADPLDADDWLRDIENKLNFVRCDDEEKATYAAYYLQGAAAAWWETYKSTLPQGTAITWNVFKQGFRTAHVPEGLMKAKRKEFLNLTQGDLPFMEFLSRFNYLARYATDELGTTEARKVQLCLDRLSPELKHGLSTHEIDSMKTLVDKALRWEASEKEVAVDRKRKFLARRATVSRSSRPRTWQPAPAARPASAPPQRLQYAPGGYNRAANVNCFNCGKLGHYSNNCPYPRRTGAPPPRPAAPQPRPPQGRGAPAAAPRGGRAAPKPAQNFGRGRLNHATAEEAVDAPDVVLGTFLVHSVPXLVLFDSGASHSFISTKVAKQNNIATTLLDTPMIIQSPGSTFKTRTICKDVPILIDKVEFKADLIQVSSLSLDVILGMDWLSKHKGNINCASKTISFVNTNGKTATFTSNKATTSKQPCINSLIKPELESIPVVCEYPDVFPDELPGMPPDRDIEFVIDLVPGATPVAKQPYRMTSDELVELKKQIDEQLEKGFIRHSSSPWGCPVLFAPKSDGTLRLCVDYRPLNEVTIKNKYPLPRIDDLFDQMTGAQVFSKIDLRSGYFQLKIRPEDIPKTAFRTRYGLFEYTVVSFGLTNAPATFMNLMNKVFMEYLDKFVVVFIDDILVFSKNEEEHAQHLRLVLDKLREHQLYAKFNKCEFWMNEVAFLGHVISGGGIAVDPSKVESVLNWEQPKTVTEVRAFLGLAGYYRRFIGNFSKIARPLTQLLKKENKFVWSEVCEASFQELKKRLTTAPVLIMPDIHKNFDVYCDASQNGLGCVLMQERKVVAYASRQLRPHELNYPTHDLELAAVVHALKIWRHYLIGKRCEIYTDHKSLKYFFTQPDLNLRQRRWLELIKDYDLGIHYHPGKANVVADALSWKLNHISASELVTQPELLLEFQKLNLGVVEEGFVTALALQPTLLSQIKEAQLTNQEVAEIKKEMASGKPTIFSLDDDGVVVHGKQLFVPDTQHLRELILTEAHESPMSIHPGCTKMYQDIRSLYWWPTMRRDIAAYVAICDVCQRVKAEHQRPAGLLQPLQIPEWKFNEVGMDFITGLPKTSNGHDSIWVIVDRLTKVAHFIPVNVSYNGAKLAKLYLTHIVRLHGVPKAIVSDRGPQFTSRFWENLHELLGTQLFFSTAFHPQTGGQTERTNQILEDMLRSCVLSYNTNWEKCLSFAEFSYNNSYQASLQMSPFEALYGRKCRTPLFWSEVGERQLFGPAVIKEAEQNVALIRNRLKEAQSRQKSYSDRRRRELSFEVGDYVYLKVSPLRGTRRFQVHGKLAPRYIGPYRVLAKRGQVAYKLQLPSQLSDVHDVFHVSQLKKCLRVPTELTPLEDINIQPDLSYQEYPIRILEEAERHMRSRSIKMLKIQWSNHTPEEATWEREDRLRADFPSFFS

SEQ ID NO: 188914 - protein, 2875 aa, Oryza sativa
  Clone ID: PAT_MRT4530_85473C.1.pep
MNIVKGVADLLRKSAAASSGVGGGGGGVVGVDDGVVDGGAGAGGSSSSAPDRLPAAPSPRVRFSDSGVEGVLNMLWQKYENAIDKAEKKESLQIFIMHFVQAFKEWEPQYTEQSVDQEPISDDTVLGCSRGHPSEIILILVQEVSQITSFITEMHNCRVFSYYGGVQKVTALLKAAVVKLKTLTSLLAADEQLSNKAIDNMKMMQKILVHIVTIISNFMNLEPTATRLTQFVNTTGKTLSNEFLATVTPISAKSAVHDTNWQQKAIVAVMEAGGVNWLVELLRVIRRLNLKEQWTDVLLHFITLHALRSTISQHARAQNHFRSIGGLEVLLDGLGLPSSKLSVSKYSFVPSDESFGNVNNLQFLCENGRIHKFANSICWPAFMLQGFHQQKALDSRVQNCKLEESTGISLTSESFASPIDILDTTEWTEYSVKLSIALCSFLLPPNEIRNSSGAVDSQVSLSISVAYCEQCARWIIKVLSTVFPCIKACASESELPNHIRILANTLQHYILCTFRKVLISVPALLKSFRAEGLWSLIFSDKFFYFGSSMEYIHHIVCDTQNNHFIDATESAGSKGLNQADVNILQAEAISFLEFAATINENTNNLPECSALLDVLERCTYDPGLAGTILKSFHVILQLATEQTISSFKSLDALTRVLKVACLQAQHLRKLSHPGDGLSGNVFQSENVQMSSSDEKIKSTIACVELAFNLFKEYTTISELGKILVLHNANCIECLFDLFQEENLRKNVLEQVLDLFRLPSASAQDHTAKLQLCSKYLEAFTRAKEKEDFAELSIDLLVNMREIIMIDRMYYQNLFRNGECFLHIVSLLNGTFDEAVGEQLVLNVLQTLTVLLAENDVSKNEDVIILFLNVLQKSSTALQHYGLVVLQQLLKGSITNRSSCFKAGFLSFLLDWFSVEETDDTVIKIAELIQIIGGHSICGKDIRKMFALLRDEKIGVKQKRNSLLLTSLSHMLKEKGPEAFFEFSGHDSGIEIKSPVQWPYNKGLSFCCWLRVESFLENSMMGLFSFFTESGKGCLAMLGKDALIFESISQKHQCVLSPLSLPTKQWIFLSVTHSVGRAFSTGSQLRCYVDGGQISNQKCRWAKVNEVMTRCSIGTDLMPIGEEPTSLGFESTSAFVGQMGPVYAFSDALSSEQIKGIYNLGPSYMYSFLGDQNLLMNVDTLYKGILDGKDGISSKMIFGLNAQASNNRTLFNVSAALDGLDKSKFEATIMGGTKLCSRRLLQEIIYCVGGVSVFFPLLIHFDDAVIHSREPAIGDELAGQVVELVASVLDGNVANQQQMHLLSGFSILGFLFQSVSPQLLNFKTLSSLKYMLNVLKNCGMSDVLLKDALSQIYLNPHIWAYASYEVQRELYLLLIQYFECDGKCLPMLCGLPRIIDIVLQFYSEKTDLRSSKTSLHPVTKKVIAERPNIEEIRKIRLLLLSLAEMSIKLKVSQHDITTLVSFFERSQDVACIEDVLHMIIRALSHNSLLSSFLEKVNPLGGCYIFINLLKREFEPIRLLGLQFLGELLVGVPSEKKGPKFFGLPVGRPRSISENLRKGMTAAPQLFFYSISERLFKFPLSDHLRATLFDVLLGGASPKQVLQKRSQSEVSKDSAISSASLSPFAVPQILVCIFKYMQSCQDTLARTKILSDLLDLLDSNPSNVEALVEYGWSSWLETSVKLDVFRDYKSSSEAEDNTYETNELILVRNMYSLVLTYCLCSMKGGWHQLEDTTNFLLLKIEQFPSPGLSAQSSSDDSLIEDINTSVVEILNAEGSGQLTSFPWSNSTYTDGDKLSDDWWSFYDKIWTLICNLNGRGQNRLTPKGSNAAVPSIGQRARGLVESLNIPAAEMAAVVVTGGIGSALSGKANKNADKAMMLRGERFPRIIFHLIILYLCKAGLENLSKSLLRGRSQYGGLDDGARSHIMSPLIFEILVQGKSLLATNMLARDDSTEVNSNKDSGYVLKDSGYVLNFVQKDRVLAAAADEVKYMKDAKADRLRQLQELHSKIDESLIEDIEQLQSFEDDIQFAKSAAISVDDSRKAALQLAFDEDQQIIADKWIHIFRALSEERGPWSANPFPNSTVTYWKLDKTEDKWRRRLKLKRNYKFDERLCQPPSKFSNESNASSVNPSVSAKIPEKMKHLLLKGVRGITGDVSSEPCEDNNDMSEPSQNTLSETQGSSDAADSSGYSTSVQNRKEPVSTGGDDDYAAILSSVQCVLVTPKRKLAGQLTITQKALHFSFEFLVEGTGGTSVFNRYQEKDSDPKNDLGGAEKLKGSLDGGRGNATESGDALMKNTSNNIKHHRRWKISRIKAVHWTRYLLQYTATEIFFDDANALVFLNFSSQNDAKNIGSLLVSLRNDALFPKGSTKDKNSVISFVDRKVALEMAESARESWRRREMSNFEYLMILNTLAGRSYNDLTQYPIFPWILSDYSSEKIDFNKSSSFRDLSKPVGALDAKRFKVFEERYLNFCDPDIPSFYYGSHYSSMGIVLYYLLRLEPFTALHRNLQGGKFDHADRLFQSIESTYRNCLSNTSDVKELIPEFFYMPEFLENSNSYHLGVKQDGEPLGNVGLPPWAKGCPEEFIHINREALESEYVSSNLHHWIDLIFGYKQRGKPAVENSFQIISLGDGRIVQSVRQHKDVVSCVAVSSDGSVIATGSYDTTVMIWHAFRGKSADKKSRNANYDLSTKDHVIIESPYHILCGHDDIITCLFVSTELDIVISGSKDGTCIFHTLREGKYVRSIRHPSGAGLSKLVASQHGRLVFYSDSDLSLHMYSINGKHIASSEANGRLNCMELSCCGEFVVCAGDHGQIVLRSMHSLDVVWRYEGAGKTITSLVVTPEECFLAGTKDGSLIVFSIENPLIRKGTVQRNKIKSSVGG

SEQ ID NO: 188915 - protein, 429 aa, Oryza sativa
  Clone ID: PAT_MRT4530_85474C.1.pep
MRINLGNKVEAWCGDPSMGGWRLGVVVWGNGHQYNIRWDGGDVVSGRIRRVSVRPPPPHLEIPTDLEAGDLVEALDDRMWKLAELVRAGDGDGEGEFTVKIVGSPSAITVPPSMVRVRQVLTDGDIWVATYKGEEIPGAREPTARPNAAANRRAPAAAAKHRPAADQFAPPPAPSHQWAKIKRSRHATDHDAAGEVRRVEANSKRIRAMEEEEGELLVGYGNVEVVRANEPPPTAVFVNKQQEMSDEETDDDAKSVSSAGSGSSSNSESSSDGSSSESDNGDRAAPRSPPGDAQVAANQPPPPPLQPQCQPHIKEERADDDDVRTKSRAATAMKPRPAVAPIMQRRLANEQPPPPLAAAAAAVGEQIHRLEVDAYGALMRVFHATGALTWEKEELLTQLRLQLHVSSDEHLQLIRALNGGRRRLPKPEN

SEQ ID NO: 188916 - protein, 2975 aa, Oryza sativa
  Clone ID: PAT_MRT4530_85475C.1.pep
MLWQKYENAIDKAEKKESLQIFIMHFVQAFKEWEPQYTEQSVDQEPISDDTVLGCSRGHPSEIILILVQEVSQITSFITEMHNCRVFSYYGGVQKVTALLKAAVVKLKTLTSLLAADEQLSNKAIDNMKMMQKILVHIVTIISNFMNLEPTATRLTQFVNTTGKTLSNEFLATVTPISAKSAVHDTNWQQKAIVAVMEAGGVNWLVELLRVIRRLNLKEQWTDVLLHFITLHALRSTISQHARAQNHFRSIGGLEVLLDGLGLPSSKLSVSKYSFVPSDESFGNVNNLQFLCENGRIHKFANSICWPAFMLQGFHQQKALDSRVQNCKLEESTGISLTSESFASPIDILDTTEWTEYSVKLSIALCSFLLPPNEIRNSSGAVDSQVSLSISVAYCEQCARWIIKVLSTVFPCIKACASESELPNHIRILANTLQHYILCTFRKVLISVPALLKSFRAEGLWSLIFSDKFFYFGSSMEYIHHIVCDTQNNHFIDATESAGSKGLNQADVNILQAEAISFLEFAATINENTNNLPECSALLDVLERCTYDPGLAGTILKSFHVILQLATEQTISSFKSLDALTRVLKVACLQAQHLRKLSHPGDGLSGNVFQSENVQMSSSDEKIKSTIACVELAFNLFKEYTTISELGKILVLHNANCIECLFDLFQEENLRKNVLEQVLDLFRLPSASAQDHTAKLQLCSKYLEAFTRAKEKEDFAELSIDLLVNMREIIMIDRMYYQNLFRNGECFLHIVSLLNGTFDEAVGEQLVLNVLQTLTVLLAENDVSKNEDVIILFLNVLQKSSTALQHYGLVVLQQLLKGSITNRSSCFKAGFLSFLLDWFSVEETDDTVIKIAELIQIIGGHSICGKDIRKMFALLRDEKIGVKQKRNSLLLTSLSHMLKEKGPEAFFEFSGHDSGIEIKSPVQWPYNKGLSFCCWLRVESFLENSMMGLFSFFTESGKGCLAMLGKDALIFESISQKHQCVLSPLSLPTKQWIFLSVTHSVGRAFSTGSQLRCYVDGGQISNQKCRWAKVNEVMTRCSIGTDLMPIGEEPTSLGFESTSAFVGQMGPVYAFSDALSSEQIKGIYNLGPSYMYSFLGDQNLLMNVDTLYKGILDGKDGISSKMIFGLNAQASNNRTLFNVSAALDGLDKSKFEATIMGGTKLCSRRLLQEIIYCVGGVSVFFPLLIHFDDAVIHSREPAIGDELAGQVVELVASVLDGNVANQQQMHLLSGFSILGFLFQSVSPQLLNFKTLSSLKYMLNVLKNCGMSDVLLKDALSQIYLNPHIWAYASYEVQRELYLLLIQYFECDGKCLPMLCGLPRIIDIVLQFYSEKTDLRSSKTSLHPVTKKVIAERPNIEEIRKIRLLLLSLAEMSIKLKVSQHDITTLVSFFERSQDVACIEDVLHMIIRALSHNSLLSSFLEKVNPLGGCYIFINLLKREFEPIRLLGLQFLGELLVGVPSEKKGPKFFGLPVGRPRSISENLRKGMTAAPQLFFYSISERLFKFPLSDHLRATLFDVLLGGASPKQVLQKRSQSEVSKDSAISSASLSPFAVPQILVCIFKYMQSCQDTLARTKILSDLLDLLDSNPSNVEALVEYGWSSWLETSVKLDVFRDYKSSSEAEDNTYETNELILVRNMYSLVLTYCLCSMKGGWHQLEDTTNFLLLKIEQFPSPGLSAQSSSDDSLIEDINTSVVEILNAEGSGQLTSFPWSNSTYTDGDKLSDDWWSFYDKIWTLICNLNGRGQNRLTPKGSNAAVPSIGQRARGLVESLNIPAAEMAAVVVTGGIGSALSGKANKNADKAMMLRGERFPRIIFHLIILYLCKAGLENLSKSLLRGRSQYGGLDDGARSHIMSPLIFEILVQGKSLLATNMLARDDSTEVNSNKDSGYVLKDSGYVLNFVQKDRVLAAAADEVKYMKDAKADRLRQLQELHSKIDESLIEDIEQLQSFEDDIQFAKSAAISVDDSRKAALQLAFDEDQQIIADKWIHIFRALSEERGPWSANPFPNSTVTYWKLDKTEDKWRRRLKLKRNYKFDERLCQPPSKFSNESNASSVNPSVSAKIPEKMKHLLLKGVRGITGDVSSEPCEDNNDMSEPSQNTLSETQGSSDAADSSGYSTSVQNRKEPVSTGGDDDYAAILSSVQCVLVTPKRKLAGQLTITQKALHFSFEFLVEGTGGTSVFNRYQEKDSDPKNDLGGAEKLKGSLDGGRGNATESGDALMKNTSNNIKHHRRWKISRIKAVHWTRYLLQYTATEIFFDDANAPVFLNFSSQNDAKNIGSLLVSLRNDALFPKGSTKDKNSVISFVDRKVALEMAESARESWRRREMSNFEYLMILNTLAGRSYNDLTQYPIFPWILSDYSSEKIDFNKSSSFRDLSKPVGALDAKRFKVFEERYLNFCDPDIPSFYYGSHYSSMGIVLYYLLRLEPFTALHRNLQGGKFDHADRLFQSIESTYRNCLSNTSDVKELIPEFFYMPEFLENSNSYHLGVKQDGEPLGNVGLPPWAKGCPEEFIHINREALESEYVSSNLHHWIDLIFGYKQRGKPAVEAANIFYYLTYEGAVDLENMDDMLQKSAIEDQIANFGQTPIQIFRKKHPRRGPPIPIAHPLYFAPQSITVTSVVPSSSSSSSPVLFVSLLDSNIVVMNEGLVLSVKLWLTTQLQSGGNFTFSGSLEPFFGIGSDVISPRKISTSLAENVDFGRQCLTAVQIHGDNYLILCGNWENSFQIISLGDGRIVQSVRQHKDVVSCVAVSSDGSVIATGSYDTTVMIWHAFRGKSADKKSRNANYDLSTKDHVIIESPYHILCGHDDIITCLFVSTELDIVISGSKDGTCIFHTLREGKYVRSIRHPSGAGLSKLVASQHGRLVFYSDSDLSLHMYSINGKHIASSEANGRLNCMELSCCGEFVVCAGDHGQIVLRSMHSLDVVWRYEGAGKTITSLVVTPEECFLAGTKDGSLIVFSIENPLIRKGTVQRNKIKSSVGG

SEQ ID NO: 188917 - protein, 285 aa, Oryza sativa
  unsure (1)..(285): unsure at all Xaa locations
  Clone ID: PAT_MRT4530_85476C.1.pep
MAANKAVVVVAAVLLLLAVVARRASSQSYNAIYNFGFSITDTGNLCTGGCPSWLTTGQPPYGNTFFGRPTGRCTNGRVIIDFLADRFGLPLLPPSKASGGDFKKGANMAIIGATTMNFDFFQSLGLGNSIWNNGPLDTQIQWFQQLLPSICGNDCKSYLSKSLFIVGEFGGNDYNAPLFGGKSMDEVKGYVPQIIAKITSGVGHLIGLSLPDIAXTGLMPSGCFRRYXGSYNYNNKARCGMSGASACGDPENYLVWDGIHLTEAAYRSIADGWLSGPYCSPAILH

SEQ ID NO: 188918 - protein, 79 aa, Oryza sativa
  Clone ID: PAT_MRT4530_85477C.1.pep
MRGRGCAAWRGRDGNDRAGGAVQGVSGSGARRRGRGGSGRAGGARQNAFSGSARLRRLRGNGSSGWVLQKLVPRRGPGG

SEQ ID NO: 188919 - protein, 108 aa, Oryza sativa
  Clone ID: PAT_MRT4530_85478C.1.pep
LKQGLAGVQAKYPPVRLMYGNFYDQVTRMVQSPGSFGLQYGLKVCCGAGGQGSYNYNNKARCGMSGASACGDPENYLVWDGIHLTEAAYRSIADGWLSGPYCSPAILH

SEQ ID NO: 188920 - protein, 383 aa, Oryza sativa
  Clone ID: PAT_MRT4530_85479C.1.pep
MAANKAVVVVAAVLLLLAVVARRASSQSYNAIYNFGDSITDTGNLCTGGCPSWLTTGQPPYGNTFFGRPTGRCTNGRVIIDFLADRFGLPLLPPSKASGGDFKKGANMAIIGATTMNFDFFQSLGLGNSIWNNGPLDTQIQWFQQLLPSICGNDCKSYLSKSLFIVGEFGGNDYNAPLFGGKSMDEVKGYVPQIIAKITSGVDTLIGLGAVDIVVPGVMPIGCFPLYLTLYQSSNSDDYDGNGCLKSYNSLSVYHNGLLKQGLAGVQAKYPAVRLMYGNFYDQVTQMVQSPGSFAKGILVLKSLKVAKYFEGLQYGLKVCCGAGGQGSYNYNNKARCGMSGASACGDPENYLVWDGIHLTEAAYRSIADGWLSGPYCSPAILH

SEQ ID NO: 188921 - protein, 37 aa, Oryza sativa
  Clone ID: PAT_MRT4530_8547C.1.pep
IGKSFSYPLVNSPAKQAMLHSPWTEQSHHLKYAIAWQ

SEQ ID NO: 188922 - protein, 28 aa, Oryza sativa
  Clone ID: PAT_MRT4530_85480C.1.pep
PRVRIDHIMTSESSLLETQVVRNYRIRP

SEQ ID NO: 188923 - protein, 51 aa, Oryza sativa
  Clone ID: PAT_MRT4530_85481C.1.pep
LTRYVLSAYIHRCISFCCSCNVVRVTHQHEPALMHCTLEPTPNLIVPNGNN

SEQ ID NO: 188924 - protein, 68 aa, Oryza sativa
  Clone ID: PAT_MRT4530_85482C.1.pep
MEFKEGDGVAAIAGRLAATPYVGLVAFLLWLLGAALAMLSVAAGQFPALVAATVAIATQLRNYLLGGL

SEQ ID NO: 188925 - protein, 235 aa, Oryza sativa
  Clone ID: PAT_MRT4530_85483C.1.pep
MADGWLRSGALTALDGVAQPHPLPLPALRFAPTLRVVKLGWCDFPSGMAPRPHFPRLKQITLSDVSISEDAIHGVLSCCPALESLLLEGKSFGVRRLRIASQTLRSLGLCYSWNARDDGRLQEVVIVDAPCLQRLLTPYLNNGPATIRVIAAPKMEALGWISDGISELHLGTTYFPKTTAVNMPSSMPTVKVLALVSDGPNLDAVVDFLKCVPCLETLYITSRPDKVIKNARRYE

SEQ ID NO: 188926 - protein, 92 aa, Oryza sativa
  Clone ID: PAT_MRT4530_85484C.1.pep
MAPPPPSQSDAATLPCRPRRRCQETTIDVIRHLTPPTEREHAWPPPSRPFNHRSTGALPLFLSVVAREKKQKEGEKNGRKKKRHMTSGPSAQ

SEQ ID NO: 188927 - protein, 106 aa, Oryza sativa
  Clone ID: PAT_MRT4530_85485C.1.pep
GHPTRAGGSNRRRGRSRRRRRRGGRRLVLLGCFVRLCHGHSGRSEQTEAGFMDTTCTCYSNALPSLHVHVREAHLLSHTHSLSLSSLWCFLAKLAWSSNEEEDRQQ

SEQ ID NO: 188928 - protein, 1022 aa, Oryza sativa
  unsure (1)..(1022): unsure at all Xaa locations
  Clone ID: PAT_MRT4530_85486C.1.pep
SDHEGRAFIRSNSDKXRFSNHSVSXDGNNVSILYGPTVGAHIVSESFAFAYLSDKTIMPTNKFFKHPNGNLIEGFGIVQECLSFXDGKEVILDFHVFEIQDFDVLIEHPIEXLLINTARLDSLKISIGGNEFSIPSSRARFALTDSLPEEEYAEEVMAVLLHESLESLLENEVPDFIVKEDEHCETFELPILESPLXPPIELKPLPQGMRYAFLYGNKEALVIISDKLSDGKTSRLLAVFEKHRAVLGYSLQDLKWINPVLYTHRKPIVPESSPSREPQRQLNNAMREVVKKEVLKLLHVWIIYPVQYSEWDSPVQVVPNKGGMTVVANAKNELIPQRTITGWRMCIDYRKLNKATKKDHFSLPFIDEMLERLANHSYFCFLDGYSGYHQIPIHPDDQSKTTFTCPYGTYAYYRMSFRLCNAPVSFQSCMMSIFSDMIEHIMEVFMDDFSVYGKTFGHCLXNLDKVLQRCQENDLFRSYLIGAKVIVYTDHAALKYLLTKKDAKPSLLRXILLLQEFDLEIKDKKRVENTIVDHLSRMQITNMQEPPINDFLWDDMLMTVHDSNPCYANIVNYMVLKYVSLEENQRKLKYESXRHIXDEPYLYRVCSDGLLXGLKIIERCHSSPYGGHYGAFRTQAKIWQSGFFWPTIYEDSKEFVKRCQSCQRXGGITAHDAMPLTYNLQVEIFDVWGIDFMGPXPKSHNCEYILVAVGYVSMVISDGGSHFIDKTIIYLLREMGTKHNVATPYYPQTSGQAETSNKQIKNILQKMINKLGTGWKDKLPDALXAYRTAHKTPIGXSTYQIIYGKSCRLPVELEHXAYLAIQNWNMDFEGAGEWRXMQLAELEEWRDKVYHNSKTYKERTKRWHDKRIKHQEIQARKWERLFGHGKLRNKWEGPYDVIDTSPHRAITLRDDSGNIFKARGLFEEQLKANLLPAKKYVGTLYTKAGDEVLNKYKTPTATPSTPKGERFCIMGVRTPSGGYGKGLCRPLTPMEKDEAAESVGSSPAKVRRHLTPPPIIRAPGQY

SEQ ID NO: 188929 - protein, 86 aa, Oryza sativa
  unsure (1)..(86): unsure at all Xaa locations
  Clone ID: PAT_MRT4530_85487C.1.pep
WATTAAGCVTRDDGGNLDGRRRRRARCVTAAXLDARRQRRARCATAAAVDGRRCWGARQRHGWATTVAVGSMGDDSVEERLRVFVY

SEQ ID NO: 188930 - protein, 67 aa, Oryza sativa
  Clone ID: PAT_MRT4530_85488C.1.pep
MSSLPAFASDRVELEAAHLKEERLILECAAGTGKHPDEAHLQDFHDHSWWSTGPTVVRHTTVIVASR

SEQ ID NO: 188931 - protein, 504 aa, Oryza sativa
  Clone ID: PAT_MRT4530_85489C.1.pep
MTVVCRTTVGPVDHQEWSWKSCNCGIQSHASFDLAYSLRGSTYSPTCRSPGCALAARPTCASSGCFPVPAAHSRMRRSSLRCAASSSTLSLAKAGKEDMVAEDGDGSSRPAAYGSTSLDMLCDRTIDYTEQLSVMAKWHICNGMDQLILYSKQSSVFQEVEVVNNNVKLICYRDPVPGTTKFNYPFYYASVYDLLNPKTAIDQSIRQYVVLRRKPLQDAYDTFNFLSLCEHPNILKPYGFWEDNDNKGFIAFPRVKGTLGNLPTDELFSVEIDANKVTWLKGFSPSGMQIIRDIVSSVHYVNERYPQAGTSSSGSAIPPLTMFPLELASHKILYEKIPTGEYKIFLGDISTTNHWPKTMKKNFSVEDLKRHNWNCLGKYISTIMAGHKPNTELIHLVDVLIKGCSALLGLNYNEAKSLLSSVMLLRNKIVAHQDDPYQNYTGPKEQIGVAKALLEKLVLDSKPAYMIKLIEEIRKLNWIGESPLVRSLTSYVKAFDPNLKIRTS

SEQ ID NO: 188932 - protein, 91 aa, Oryza sativa
  Clone ID: PAT_MRT4530_8548C.1.pep
ARGATRRPSAVVAAVGYKMMACRALALLPLPAALPSPPPARRLARAARLRPPAGLCLLIGPVLRQPSPVPEAREDYDEDPRLIAISQVSNI

SEQ ID NO: 188933 - protein, 125 aa, Oryza sativa
  Clone ID: PAT_MRT4530_85490C.1.pep
MAPSRRERAAKLGVSPPAAAEDKEMTAAQLPPSPFAELVIKMERGNDGMRVLASVVEGSSPRKPGMTSNTWRLSQKTEVFRNALGPFAPHRIASLRPHRLFASPGLIAYSPPPTATTTTACHAPN

SEQ ID NO: 188934 - protein, 60 aa, Oryza sativa
  Clone ID: PAT_MRT4530_85491C.1.pep
QSVIYNLLSYIIISMEGLYLHYCYFPLFLPNPNLIPSLIIPTFYNTFSFSTYTHLSFTTN

SEQ ID NO: 188935 - protein, 110 aa, Oryza sativa
  Clone ID: PAT_MRT4530_85492C.1.pep
IVFSSVQLLVLLSSGDGGDGAAGEVHGRDQVEASRRRREEDREEEGGGGDDDVRQDGQDGEHEGGDQEQAGAEAHRQEPRRRRLHRPPQQALLPRLLISDSSVHHHRESN

SEQ ID NO: 188936 - protein, 236 aa, Oryza sativa
  Clone ID: PAT_MRT4530_85493C.1.pep
WLIASIILLLYIVLDADLPICSFAAGGNCPYGEECPQMHGDLCTTCGKMCLHPYRPDEREEHTKLCEKNHKRLESLKRSQEIECSVCLDRVLSKPTAAERKFGLLSECDHPFCISCIRNWRNNSPTSGMDVNSALRACPICRKLSYYVIPSVLWYFSKEEKLEIIDNYKAKLKSIDCKYFDFGTGTCPFGSSCFYKHAYRDGRLEEVILRHLDADDGSTVIAKNIRLSDFLSRLHL

SEQ ID NO: 188937 - protein, 67 aa, Oryza sativa
  unsure (1)..(67): unsure at all Xaa locations
  Clone ID: PAT_MRT4530_85494C.1.pep
RPHVNPLLPGFLPRPLQHLAIPRQLRPRQVSSPTRSIWCQPAYHVYTCSTHALSLQLQFHQCMYVCX

SEQ ID NO: 188938 - protein, 125 aa, Oryza sativa
  unsure (1)..(125): unsure at all Xaa locations
  Clone ID: PAT_MRT4530_85495C.1.pep
DTAMDLHRPATGWPRERRGRRIRSRRRRILQPPCLSRRCSGSGSPDDRGSVSGDCGSAGDDDGNHSSHGDVCNKLPPSPTQLDDGIRRLGIRDFLLEFFLLEKNVFVGDYLNIAASESYFHWWXS

SEQ ID NO: 188939 - protein, 212 aa, Oryza sativa
  Clone ID: PAT_MRT4530_85496C.1.pep
MWDKKPPSTAHGGESLPASTRPSNTRKRKDREDEAEEVAAAAAAQEEEGAMRRGKAVARRRSLVSLGMAAVVGAVAWAADAPCLPLLVGLFATMGVSMCSVTRFFFLRESAAALRGGRPTFSSSNTVPLLSLNWFLLGILTSPMLPGAAHAIVSAANLSSHRRRRFSSHRPPSGGGRSKGRKGERKRKAFRADSSTAHARKIGEKYTAYHII

SEQ ID NO: 188940 - protein, 178 aa, Oryza sativa
  unsure (1)..(178): unsure at all Xaa locations
  Clone ID: PAT_MRT4530_85497C.1.pep
DVHQWWGTDELLVAWCGAIAEASQAASTRPSNTRKRKDREDEAEEVAAAAAAQEEXGGGGVATEVTMEEXDSETSVQMRRGKAVARRRSLVSLGMAAVVGAVAWAADAPCLPLLVGLFATMGVSMCSVTRFFFLRESAAALRGGRPTFSSSNTVPLLSLNWFLLGILTSPMLPGAAHA

SEQ ID NO: 188941 - protein, 157 aa, Oryza sativa
  Clone ID: PAT_MRT4530_85498C.1.pep
MSVWRREGGGTHVKTRFVWLVLAPRTSTKFVREKACHTQSRREREEARRRSHFHAEEARRRGRGVGAPLPPPLSVALCLRPAVIHSAAAVRSAAPLDAVFVFCHATQRCRGRSTPPPSSAVPSSTEDGEMRGEREDRTRGDEEEVNEKAPSRPAAAA

SEQ ID NO: 188942 - protein, 61 aa, Oryza sativa
  Clone ID: PAT_MRT4530_85499C.1.pep
PCSQPICKHGLPSLLSAISSTSPPQLQPSSSCTCTQAPQLVTQTLGSTSGTFCSAIMYLAT

SEQ ID NO: 188943 - protein, 134 aa, Oryza sativa
  Clone ID: PAT_MRT4530_8549C.1.pep
WGRWFPIASLFEKVVLVSPNGSLSFDWCKPPLGVGFVLVVRVFFWAISPMFLCWSKGSGSNLTAAGPVLPFSRFFFLNLSVCGWWKIFPFSGVRPFRVVILEFFPALSKKFGGEKPQKNLKKNKKKKKKKKEII

SEQ ID NO: 188944 - protein, 151 aa, Oryza sativa
  Clone ID: PAT_MRT4530_854C.1.pep
MARTGTMFREKQRSSAVGIPCEKVTRVRILGGQLRSTVEIRTRLRKELRSRLSRIPGDEVGYEMAYGGWIPCGRDLRNGLHEVCVQASVFAKGIGRNWKRLIFSDGRLDPCRGKPSRLRQQAAAATAGGVRLLCGCSFGEKGNYGIESYYE

SEQ ID NO: 188945 - protein, 600 aa, Oryza sativa
  Clone ID: PAT_MRT4530_85500C.1.pep
MGNPTAAAITQVLHNKQEFRLTAGVDDLLVVSIGSGSSSAAPSATPSSRGLLLGPVGEADAELAAAQEVAVEVAASAAGRPDGWRGREKRGTPSMRRGHRAAAGPGRGGGGDEEDADNHHGNADDHHAHRPPRARTPPSPPAAARSCYSPAAKRTAPPATRPHEAEAARRGRTRPAALEPPQQEAVKPSPTNGRIRYRSPSAADLLPADDLAAAAGPSAADAARMRRFSAAAGARQQQQQGEAVSDRVLRFRGVLVVVLAPVLLISLVLLLMPRAPASATVEGSAGELVAAAGRRWGPRAVSGLGDGSTRYAVIFDAGSSGSRVHVYCFDGNLDLLPIGKEIELFKQKKPGLSAYAMDPQEAAKSLVSLLEEAEKVIPVELREQTPVRVGATAGLRALGTEKSEEILQAVRDLLQDKSSFRSQPEWVTVLDGSQEGAFQWVTINYLLGNLGKPYSHTVGVVDLGGGSVQMAYAISEKDAGKAPPVAEGEDSYVKELLLKGTTYYLYVHSYLRYGLLAARAEILKAGEGNDYRNFVSIYVFLERWYRILIVLVNCTQDNTDMVTIYSKHQESSPKFDEPACTPHMYIWVVCGNGGGDGEDP

SEQ ID NO: 188946 - protein, 56 aa, Oryza sativa
  unsure (1)..(56): unsure at all Xaa locations
  Clone ID: PAT_MRT4530_85501C.1.pep
KIQSFGGVRIXNNVFVTGPGCKNLTNCPRETWEIXTVMGGAPWPVGAPNNSLSKGS

SEQ ID NO: 188947 - protein, 79 aa, Oryza sativa
  unsure (1)..(79): unsure at all Xaa locations
  Clone ID: PAT_MRT4530_85502C.1.pep
KLNGKLHRISTLKNFNFSACLKDIRPYVQIRDIYKYLCKIITSISISDLCFXKSAVTDKGNRSDHDIPSCRFLQPGDPL

SEQ ID NO: 188948 - protein, 34 aa, Oryza sativa
  Clone ID: PAT_MRT4530_85503C.1.pep
MASDVYTVFAAGARSCSCTFGPRNHRGHGTRHKG

SEQ ID NO: 188949 - protein, 78 aa, Oryza sativa
  unsure (1)..(78): unsure at all Xaa locations
  Clone ID: PAT_MRT4530_85504C.1.pep
MYYXGXASXDXXXAXNRXXXCXXCWVWHXLIXATPXXHLXXCIXXGFICAXCLXXXXDLGRWXPKKKXKKKKKKKKKK

SEQ ID NO: 188950 - protein, 516 aa, Oryza sativa
  Clone ID: PAT_MRT4530_85505C.1.pep
MAACVDDVGKPRASRKVCVIGAGMAGLAAARELRREGHAVTVLEQAGDVGGQWLYDDPRADDDDEDPLAAAAAAAKPVRVHSSMYASLRLLGPREVMGFSDFQFVPARKSRCGGGDNPGGRDPRRFPGHREVYLYLRDFYRAAGLTDSVRFNTRVVRVAVAPPPCRGGPGDALRWVVRSMDAGLWKRCTDDQMAEAHCVEEVFDAVVVATGHYSQPKLPSIQGMGDWKRRQMHSHWYRVPDSFRDEVVVLVGCGDSGMDIALDLLAVAREVHLSAKSVEAAATPAMSKMLARHANLHLHPQIERLCDDGRVVFADGGGGVVAADTVMYCTGYRYSFPFLDTEGKVAVDDDDNRIGPLFEHTFPPSLAPSLSFVGIPRKVMVPWFFEAQGRWIAGVLSGRRALPSEEEMTRSVEEFYRARELAGVPKAHTHDVEPHKMYELGEKYCDFPRTEEWKRELMAIISRNTSDDMETFRDRDDDSDNVRRCLQEWYALAEHQAQDEEDPAAAAAQAPVHSSL

SEQ ID NO: 188951 - protein, 103 aa, Oryza sativa
  unsure (1)..(103): unsure at all Xaa locations
  Clone ID: PAT_MRT4530_85506C.1.pep
KEQFSPIIATIFVXATGAVALPXEVQERXVPYTPCSGLYGXAQCCATDILGLANLDCGQPSDAPVDADNFSEICAAIGQRARCCVLPILDQGIXCNTPAGVTP

SEQ ID NO: 188952 - protein, 101 aa, Oryza sativa
  Clone ID: PAT_MRT4530_85507C.1.pep
MEKSSTAAGGRSSTPPPPMYTDEFALEGKKPVKNPFVPIGALVTAGVLTAGLISFRYGNSKLGQKLMRARVVAQGATVALMIGSAYYYGDQIKLFKKGSSP

SEQ ID NO: 188953 - protein, 245 aa, Oryza sativa
  Clone ID: PAT_MRT4530_85508C.1.pep
MAMNAKYVTSPSRLYKKGILDVEGARELPRLHAAWSSVGVGSKLYTIFSEGFVMAQVTLNYARILMKIVDQLGLEKPTMAHEKSADGIFHSFIEVDLVNWVSKGFRGPRQFIGTSPISSRRATRKATRNAVQRLEKCGLVKISDYSRRDLKLWKKRVIRVTTVCKEVVEGRDELERDFFFLQQNRAKLLVENCELQRKIVELQENVDCWKADKEEKDNLIIENYELKAELRALKRQLSEAKNKNE

SEQ ID NO: 188954 - protein, 129 aa, Oryza sativa
  unsure (1)..(129): unsure at all Xaa locations
  Clone ID: PAT_MRT4530_85509C.1.pep
ITDKAYLLSYHLWNIPIRYTFTYTDRSNIRCRNXLQIMENISTGQXVISKVLLGILLGDQDDPRYKRDPXEGCKASHIITYTPTIVYEAGVCEAKLLGDLVGYTDYDLILVPTDPNTQIIRSTGIPRRH

SEQ ID NO: 188955 - protein, 900 aa, Oryza sativa
  Clone ID: PAT_MRT4530_8550C.1.pep
MAAAAAADASAEAAAIARRLASCNGSARERAVRHLLSTFLPASAPHLSGCDLLKLWKGLFFCFWHSDKPLYQSSLATRLAAGVSSGPSPAAAAAFFAAYLATLRREWVHIDTHRLDKFYLLNRRFLHHAFLLLAANSFAADLTSQVVSILSEKVLLPEADNVAAGSPRGLGYHVAEVFLDELSPVLPVSLQTMEVLLSPFFAVLEKSSDRVMVAKVKSSVFERFLESGKQLLERAKKGQGVEKGSADEKIGKVGLLFGFSKRFSDIGAKAETVQANRKVLFGLRDAFVKVEKGLELSGVEIAVPEFKSTEVTGVENGMDLDEVKVEKKKKKKVKKASLVEGETEGAKDSKQEKKVKKEKKEKKKKKKVEVVDEGDVTKQSTDAPAEEDQQMGDGTEAVTFDETLMSNLQKQFEKAAAEAGMVNGGSSSSASPASGKAAKKRKRAKSADRLSVSDGDDVSSEGTIISQDGEKSGKKVRFSMKNNLVWKPHNPLPPQCLRLPPSATPRGSALKKGVLPGPIKETPTPVKKTKPKAKSAKKISCSIVSVQYLRDPRKLLKSRFKSRAFRRAGMRVKHEPKAALVKVTKGHMSGKIHTKVGEAEMEIVERGVGNEVKYVMPKVWVQCKGLPSELREYLIIWAVGSILGITKAVDMIFTRRYDIARLQVLVLDPSLIPDVVDVVIGDHLYELSFRVEPENRPEEPVPMEMENLDDGDLEKKKEGNMNQDLGKGAGLFDSGNSSKMGSGGQFSERGGPSAPSSQLNLIPESDDLTVSDEEFDGLDEETIMVDKAQIQESLVAKLSAIPEAVISPSRKKNNRISGCACSSINQVCTPNVDTESLDDQLEDNFLLQHLCSEIMEEVMDFSEDCENSLKNTLNPMASSPNSKKKSKRGKNKKNNKNSFK

SEQ ID NO: 188956 - protein, 220 aa, Oryza sativa
  Clone ID: PAT_MRT4530_85510C.1.pep
MLDYIPTVFDNFSANVSVDGNIINLGLWGTAGQEDYSRLRILSYRGADIFVLAFSLISRASHENVLKEELEFDLWPRWGDGGADFIGIFLVDGCRMDWGQLRSCSPHIIDDPLDHNVGGYLKRKAKHRSTEHCSNGLMEATLSHARSPKQLKVITLILALAAPVVSYAGLVICMVDVVIGSIMYKNVGVMWQFEQYWTLLLMAFQLADDCSYMLMASLYV

SEQ ID NO: 188957 - protein, 88 aa, Oryza sativa
  unsure (1)..(88): unsure at all Xaa locations
  Clone ID: PAT_MRT4530_85511C.1.pep
TFSSRGSTRSSKPSASPLKSAGRSCPTPCAHLANSIDSDYTIRSYXTQGLVNGGINVPMMSASPIFANAPAEKGGKNSMIDFLMGGGV

SEQ ID NO: 188958 - protein, 78 aa, Oryza sativa
  Clone ID: PAT_MRT4530_85512C.1.pep
SGVVSSSTPIPSSPAVPPPTALPPRRREDITARGFLLTPKCPGAAAAGIPEDIVEEILLRLPVKSILRFRSVCKSWRA

SEQ ID NO: 188959 - protein, 163 aa, Oryza sativa
  unsure (1)..(163): unsure at all Xaa locations
  Clone ID: PAT_MRT4530_85513C.1.pep
RPYCARKPRGPPRYHPGESTCLPASRLPCLPRDLELDPRNPRTAGLWAPKASGDGGXADRDRLDPVXAELAPTWHLRGSHADRREVEDGVGGSPGALATNGGGASRAERRWRGGGRRRKQGRGRGREGARRQTRAQARQALTAAATGRSATTARARGKQRVAR

SEQ ID NO: 188960 - protein, 180 aa, Oryza sativa
  Clone ID: PAT_MRT4530_85514C.1.pep
EAGELEDEVHGGAGGEDVEEPHHVRAAATVGLEELRRRMADFARERDWEQFHSPRNLLLALVGEVGELSEIFQWKGEVPKGLPGWDEAEKVHLGEELADVLLYLVRLSDMCGVDLGSAALRKLEINARKYPASQCKGSSKKHTYYSSRCDVSGNSNGTNHLTSNEEHDNNTSSNNDNNGV

SEQ ID NO: 188961 - protein, 511 aa, Oryza sativa
  unsure (1)..(511): unsure at all Xaa locations
  Clone ID: PAT_MRT4530_85515C.1.pep
PQRQRRRRRTRGRTRRGSRRIRRRCGKRRRRGAGLGKEEEREKRKERGRGNRLPSGGXGAAREKRAARPSXMGRPAREGGPKARAXGEREGNRWAGSTSRCPKWDPLVGGSAHRERRVGAVHACGLRWTRRASGPRAASRLSVXRARERGRRERLTGXSLDPVRPSWRRRGTYVAATRTGGRLKTASAXNRRRTAAANGRANHGDTGESEHTGXVAWVERGRTNGSDSLEGVRRQRIAAAATGGGKRGXATARREIDSGELEHLRDFGNPFLALDWTEHRRGRLMMXATTERGGDGGKPTASGDGGKPTARKEEEXGGRTGRCSTETRRGAVTRGRRHGSDLSGLGPGKRKKXERPESPSRVLRTHWLSRCXLATNGGGASRAERRWRGGGRRRREKKEGERATRQEEEELCLHPLEASTRXWRGLVDDNDDDGGAVWKGAATRRQTRAQARQALTAAATGRSATTARARGKQRVARXFERRWREAASRGSESREREGKERERERALSCSA

SEQ ID NO: 188962 - protein, 77 aa, Oryza sativa
  Clone ID: PAT_MRT4530_85516C.1.pep
MERSCQAKEPGNYFTYFSPSAEDEDVCPTCLEDYTSENPRIVMQCSHHFHLGCIYEWMERSEACPVCGKKMEFDETT

SEQ ID NO: 188963 - protein, 162 aa, Oryza sativa
  Clone ID: PAT_MRT4530_85517C.1.pep
MTPPPPPPRRPVCVTGAGGFTGSWLVKLLLSRGYAVHATLRDPDDPKNAFLKQLENAPENLRLFKADVLDGGSLTAAFAGCEGVFHPATPVPEHKTVDPEKEMLAPAVKGTRNVLEACSAASVQKLVVVSSICAVCFNPSLPRDRLIDETCWSDKKSCKENE

SEQ ID NO: 188964 - protein, 93 aa, Oryza sativa
  Clone ID: PAT_MRT4530_85518C.1.pep
FVLINKPQKKFPPRKKNFLKGFSVFNRVLNKNPGAQNFGEKFPSKKKIGENLPGGQLTHPELVFYRGGPVKIQNKSCPLFPPTPWRGRAEINP

SEQ ID NO: 188965 - protein, 93 aa, Oryza sativa
  Clone ID: PAT_MRT4530_85519C.1.pep
PRAAGIRHEVSTSHCGIICSQLLILYYYDDYYYYYYYYYYYYYYYLQKKREKLLLLFINEMCLCFKKIKKGKERKTLHWNYISNVRYRFIEKW

SEQ ID NO: 188966 - protein, 358 aa, Oryza sativa
  Clone ID: PAT_MRT4530_8551C.1.pep
MLARGAVRSLFDRLRPPPHHRRRRSSPAAIMPAAAAAHRGCFCSLSHSNLCGEGSVIQRKGFLDLGMGRRFAPGSALGSKGCLNWQDRGRSKRGVDGGEAVRIKAQVLAPQRQLLHDPEVLPLEEVATKSLNGNGACRRGKPLGFPENAAPTKMVVAVDVDEVLGSFLAALNKFIADRYSLNHSVSEYHVYEFFKIWNCSRERANFLVHEFFTTHYFQDGIHPIPGARDALQNLSSFCSLSVVTSRQDAIKNHTLDWIDKYYPGLFEQIHFGNHFALQGQSKPKSEICRSFGAQVLIDDNPRYALDCAEDGMRVLLFDYHNSYPWCKTGVDESHPLVTKVHNWQEVEEKLLSWVVPEF

SEQ ID NO: 188967 - protein, 153 aa, Oryza sativa
  Clone ID: PAT_MRT4530_85520C.1.pep
AQRIRLHHCLPPCEDREACHHLAIGCLTGFHNIYRTCCGCMALGKCHTRYTRPVLISNHNNCGLLPVPLLQSKHNAKEVTKYCKNIIGATDRNDCGCSTCAFVSFAWQLVTWWSMQLWDNCPLQFNLSCPVHANKTMRGCRAAACCWHIQTYK

SEQ ID NO: 188968 - protein, 56 aa, Oryza sativa
  Clone ID: PAT_MRT4530_85521C.1.pep
ETAELFANTIGAIDDATKGIYLTTGVLTLVHRKAPIGEWAWADEGPNAQTCHCRLR

SEQ ID NO: 188969 - protein, 537 aa, Oryza sativa
  Clone ID: PAT_MRT4530_85522C.1.pep
MLLLRHCAGVAATSRAPPRSSSVPAGAQASPRPPTSSGGACAPSVPSPTPPPQAPTAETSVRSPPPSDPRFSLGPPKTFPSPTPPPSAPTAEMSVRSPPPPAPRFSLGPPKTFPSPTPPPPSPMAETSVQSPPPPAPRFSLGPPKTFPSPTPPPPTPTAETSIRSSPPPAPRFSLSPPKTFPGPTPPPPASVAETSELSPPPPVPRFSLGPPKTFPRRTPPPLAPVAETSVRSPPPSAPRFSLGPPKTFPRITPPPPAPMAETSEHPPPPPVPRFSLGPPKTFPRRTPPPPAAVAETSELSPPPPVPRFSLGPPKTVPRRTPPPPAPVAETSELSPPPSVPPKTFPRRTPPPQTPMSETSVRSPPPPAPRFSLGSPKTFPRRTPPPPAPVVETSVRLPPPEHPTASSSGTNTPPPDAYTSVRSPPPRTPKISGGTHTPPDANTSVRSPPPPQDTPPRVSGGKHTPPDAYASVRVPPPSTPRVSGGGTQAPPEEPPPPPPSPTFSGNMTGRPPPPCSPTAVSSGSPAVPVLFMAMNTS

SEQ ID NO: 188970 - protein, 96 aa, Oryza sativa
  Clone ID: PAT_MRT4530_85523C.1.pep
TSIFSLPLWLPRRWRNADGVLVVEQAVVVVLVADHGFRHAPDLKECIRVAVVVPVAGGGGTLQPKPGFLLPLHESHHYPGGVLYCFPFLGCFCIPS

SEQ ID NO: 188971 - protein, 689 aa, Oryza sativa
  Clone ID: PAT_MRT4530_85524C.1.pep
MAASRLVAAAAIVVVVLVLAGAGAAGAAGAGEVRALLDLAAGLDPTGRLLPSWAPGRDPCGREGGGGFEGVACDGATGAVANVSLQGKGLAGTLPPAVAGLTALTGLYLHYNRLTGALPRELAALSRLTDLYLNVNNFSGPIPPEIAAMPSLQVVQLCYNQLTGGVPTQLGLLKRLTVLELQSNHLSGAIPASLGDLPQLVRLDLSFNNLFGSIPVRLALLPRLLALDVRNNTLTGSVPSELAKLQGGFQYANNTDLCGTGLPALRPCTPADLISPDMPQPFSAGISPQITPGSSSDGHGHCTGTHCPPSTKALAAVVVVAVILLAVTGAGMFALSWYRWRKQRVVAGSPAAVGGRCSTDAAGKDSFRKSASSTLVSLEYSNGWDPLADGRGGIGFSQEVAQSFRFNMEDVESATQYFSELNILGKNGNFAATYRGTLRDGTSVVVKRLGKTCCKQEEAEFLKGLKLLAELQHENIVGLRGFCCSRARGECFLVYDFVPNGSLSQFLDIDADDVARSNGRVLEWSTRISIIRGIAKGIEYLHSTRANKPPLVHQNISADKVLVDYTYRPLISGSGLHKLLVDDLVFSTLKASAAMGYLAPEYTTTGRFSEKSDVYAFGVIVFQILTGKSKIMQLPLESSNDEDLIDGNLRGCYSAAEAAKLAKIASACTSENPDHRPTMEELIQELCTF

SEQ ID NO: 188972 - protein, 1010 aa, Oryza sativa
  Clone ID: PAT_MRT4530_85525C.1.pep
MAVDKLVFNGFSNSSLVLDGSAAVLPNGILKLANGSSYAYTKGHAFFPSPIQSRNSTDGSIFSFSATFIFAMLHTLPLEEGDGIAFFLAAHTNFTGTGISGDFGLPAEDDNGKSLDHILSIELDTLHNERFGDIDDNHVGININSLNSSQSSPAGYYTDEPYSILHPLRLKSGEEMQVWIDYDHRRMQLNVTLAPVPMAKPKRPLLSATHNLSKLLLDHMYVGFSSSSSAALYISGHAHGHFIAGFCFRLDGKPASLQYSKLPKINTSDLPDHVTYGTGRGSSIYWPDFLTLPLIYASALGGAISMPVILYLIVRRCRRYQELHEDWEVEFGPHRFSFKELFKATNGFVDKQLLGVGGFGKVYKGVLPSSKLEVGVKVMSHDSKQGMKEFVAEVVSMGRLRHRNLVQLLGYCRRKGELLLVYEYMPNGSLDKYLYDQDKPSPNWIQRFEIIKGVASGLLYLHEEWEQVVIHRDIKASNVLLDSEMNGRLGDFGLARLHDHGVDAHTTCVAGTRGYISPELARLGKATKATDVFAFGAFILEVACGRRPIGMNSSGELQVLVDFVLRFWQRDLILCMLDTRLGGEFVTEEAELVLKLGLLCSHPSPASRPSMRLVMQYLCGDVLLPAMPESYRSIRSFSEMQVEGDQLDENPLLRQYLSAFLLKLADDLGVVLHAMLAKKEELTAVGNNGAEASCRSRALLAALPSESCWVPPMDEDDYSSLSPWMILSTTKSVKYIDTAHYAVPGGARVVELVTGMETAMVQEVSTVPGLSYRLEFSVGDAGDGRSGSLTVQAYACGDERGGRRGGGRRRAALLACCYAVRRGGRLSAEEKADVGATATAVRSIDGRTAIAAASGGVAAMGNPTAAPSATPSSRGLLLGRPARPTRSSWPRRRWPWRLRQALRVVPSSRWLAREGEAGHTVDVVAAEEEDAGHRSVAGSGRGGGGDEEDTDNHYGNADDHHAHQPPRARTPPPPPAAQPCSPPPVLATPLPQREIPRVSGFAVRGRILSR

SEQ ID NO: 188973 - protein, 205 aa, Oryza sativa
  Clone ID: PAT_MRT4530_85526C.1.pep
MGLTWAPHAFLAKLADDLGVVLRAMLAKEELATVGNNGVVLFIVHNPGVSDDEARGPLIDSFAIHTPLPPQTAPGNMLKNGGFEEGPYIFPNTSWGVLVPPMDEDDHTPLSPWTILSTTKSVKYIDAVPGGARAVELVSGMETAMVQEVSTVPGRSYRLEFSVGDASDGCSGSLTVQAYACGDERGGRRGGGRRAALLACCCPVR

SEQ ID NO: 188974 - protein, 194 aa, Oryza sativa
  Clone ID: PAT_MRT4530_85527C.1.pep
MAGRSRYDNPFEEGGGDEVNPFADKASKGGSAAIRPSAPPATHLSPLPPEPADFYNDFSTPVDIPMDTSKDMKTREKELLAKEAELNRREKICTADLTSFAAGIVLEDKNWPPFFPIIHNDIGNEIPVHLQRTQYVAFASLLGLVLCLFWNIICVTAAWIKGEGPKIWFLAVIYFILGCPGAYYLWYRPLYRAM

SEQ ID NO: 188975 - protein, 167 aa, Oryza sativa
  Clone ID: PAT_MRT4530_85528C.1.pep
MAGRSRYDNPFEEGGGDEVNPFADKASKGGSAGQSSYSGGAFYTTQSRPSAPPATHLSPLPPEPADFYNDFSTPVDIPMDTSKDMKTREKELLAKEAELNRREKEIKRREEAAARAGIVLEDKNWPPFFPIIHNDIGNEIPVHLQRTQYVAFASLLGLVLCLVWTSS

SEQ ID NO: 188976 - protein, 159 aa, Oryza sativa
  Clone ID: PAT_MRT4530_85529C.1.pep
KAHDTRSPTPRHLAPVTLPKPTIPKRHPANSHAEPRNKGTPLPYEAAHITHPLHPNQDLTPSNTLAAFQFLGTLESRHHTRHETQKTPGSDVKPSPSSMSEAPATGRPLPHSRMLPAQSDTRGRGQGTAERRRDRLTYGFRCHKVKVEMVKGEALGVNN

SEQ ID NO: 188977 - protein, 151 aa, Oryza sativa
  Clone ID: PAT_MRT4530_8552C.1.pep
MSSLRAVSFPSQTGSTKLAGMWGRGEAQGGRAREEWRGDGREEWRSGEGVERGVATLLSLLDRLPLGLPPPRLWLHKVRWTVGERSSVQWLVGEERSAVRQRDKSGTPCGSGVELWTANGNGSSLAAELRGPPAKMYTFSLAAHLNVRQRK

SEQ ID NO: 188978 - protein, 61 aa, Oryza sativa
  Clone ID: PAT_MRT4530_85530C.1.pep
MLRSAFPHQGCNGRALMQTAQVVQAKFITAHKSMDAVKCICRSISMRWRILEHQHLSFSTS

SEQ ID NO: 188979 - protein, 326 aa, Oryza sativa
  Clone ID: PAT_MRT4530_85531C.1.pep
MATPASAGGGSGSVGGVGSSSGGGERRPLFQRLWTEEDEIVILRGFAEFTAARGTAFASHQYDTDPFYEDMRGRLQLGFSKSQLVEKLRRLKRKYRNCVSRLRGSGSAFSFRSPHEQAIFEIARNIWRPTNKHGRDGDSDDEDATQVTPAPVPVNTSPNGEVKSPTSGRQRRRRRGGDFAATAPAAAPATTNMVQPIQPVQVPVSVPVKMDDTLPALSQTTMPITVTMEGSEPLRLPVMPPQPAVLDADKSCLTPLFKEMVRAVINIESNPFGAQLSEPPHGLPMEGEKWRKQRILELEVYLKRIELLQDQVKATLEELKSSAPGT

SEQ ID NO: 188980 - protein, 114 aa, Oryza sativa
  unsure (1)..(114): unsure at all Xaa locations
  Clone ID: PAT_MRT4530_85532C.1.pep
MSTTGDNNNTGDKEEEPPVNTNGGNTVSNSSGWPFSVYNVSLLPFVLRFLXTXVAILLRSLVYVDTYSILSMLMLYTSSNFTRSTQITNIKICRIMTKFLTIDTHKXGFHPXGT

SEQ ID NO: 188981 - protein, 261 aa, Oryza sativa
  unsure (1)..(261): unsure at all Xaa locations
  Clone ID: PAT_MRT4530_85533C.1.pep
DTIDYSRLPVRARTFGCTSGEMPFTYLGLLMGTTKPKIIDFAPLVDRVERWLPSIAAFLNHGQRLTMVNFVLYAPPNFYMCTLKLXKKVIQHIDRARRHCLWRKSNDPNTKIHSLATWDLVCQPKKKGGLGIINLELXNIALLTKHLDKFFNKKDLPXVKLIWNKXYSLSDSPHAHTXKGSFWCKDIFRLIPIFRAVSKITIGNGDTALFWKDNWSGKFLQDEMNSLFSFAKNKDISCQSFLELESLEQAFHIPLSVQACM

SEQ ID NO: 188982 - protein, 126 aa, Oryza sativa
  unsure (1)..(126): unsure at all Xaa locations
  Clone ID: PAT_MRT4530_85534C.1.pep
MGSWYGSGRIVGSLEHKPIWKSLAPPRCRYFLWLVALNRCWTADRLRSRGLXNEHSFHSWLCDSRKRMAKEHRRGFDTIATLVAWTIWKERNNRVFNEKSRTWAEIARAMTGEADLWRLAKATIPA

SEQ ID NO: 188983 - protein, 318 aa, Oryza sativa
  Clone ID: PAT_MRT4530_85535C.1.pep
MVKQRQTVGNLAIDGDLTYEILLQLPAKTVLRCGAMSKAWCRITTNPTFLSDHAHHRPLEALLYNSFGKAAGKIDMELDTLSVAVHYHAAVPERKGIGHHVICNPTMRQWAELPRLTGGRNLIECHREFGFYFHLQYDEYHLLCHCTMNLAGRLTNHMVAFDMVAETFKEMMPPLVTTKFFANLLAMDKFLMASKFTDLGMDLWVLEGYGVMDERWELWHHVVLPWQLSATLKRPLLIEGGDSGDVIMGTTYDLGVYNVKSKIFRVVVTVKPPDALLLSRDMLRESLVPHTFFNNQQPNPTRYVTKKTTCLPLFRFLS

SEQ ID NO: 188984 - protein, 249 aa, Oryza sativa
  unsure (1)..(249): unsure at all Xaa locations
  Clone ID: PAT_MRT4530_85536C.1.pep
EDYCLQGSSIRSLAPAVYAAVPARFRNRRTVAEALQDKRWIRDIXFGIGDSGNPGISQALGHSAIGLARXGTGHDLLAHKPIWKSLAPPRCWYFLWLVALNRCWTADRLRSRGPSHPACCPLCDQCDEMIDHLLVACSESHQLWWIALSAIGHSECLPLNEHSFHSWLCDSRKRMAKEHRRGFDTIATLVAWTIWKKRNNRVFNQKSRTWAEIARAMTGEADLWRLARAAIPAMATLMSGGRSPHSLGD

SEQ ID NO: 188985 - protein, 1932 aa, Oryza sativa
  Clone ID: PAT_MRT4530_85537C.1.pep
MDNQSGQPQYGMADHGFRPFSASISAPSTAQQHTGSSSNTAVIQVATPPSHTDYGNIYLADDGYHWRMCGQNTIQGEPCQTIFYYQCAQANCMVQKSVARSADGQTTQTFSMGVHNHPQRGPTPPRSPSVDPPVPFSSPSCSPPRSPVECAERGCASLSPARANPPSEFEHVPPGDPELRVNREICVLPFSAAMREREAQLRRAVVAVVVGAARTPSAAQVHDELCSEFSLSPHSFSVRRFFPEDFLVTFQSDEIFDRVARRRSIPLGQFRLLVAPWSRQLHAREGSMLFRVRLHLEGIPGHAWDEATAAAVLGSSCRIISCDPVSSSASDMAVFKLYAWTSDPASIPKEKWLRIVEDGGPVVTPQGTCERYLDYVVLIHLTAMEDHISPPEPYLPFAPSSGDSGRPSSDDSDDGPPRRHFFHTSRGRRDGSPPPPQSGQGSTGGGGGGGHRAAPVAVMPAELCSGRLLRRAGALAPEKPVRAVAGAEAAMARRRRPRGRRRQQKVLKWKSKFLKLSPVRSCCRWQPRKGQDTSEPVSVAKAKESSALQSLSLGSVVGQEDREFVLPVSAASEADSAVSSRRDMVGLAASPVGLEAQQGGLVLSTVAGPAVESAGSRPEVQSQPSPLAMEEAHHDASTFLQGSVSAHADPFLSVVLAAKPSMAMAAPGESALPPPDSVPDATLGVEAVSAPLVCPEQHLAASSTPLSQVFSPVSALPTASAVVVVAEIGGPFPDEVVPVDEMAASPPAPSTAVFAAAVEEASAPPPTLITFSRRAKKAIPPALLPPPAPQQPPQPAPLQTPRRSVRQALQATHGAPTFSRCQSVLAKKMGEKDTAVPAAPAPTVCTIQQYNELFEKELSQDQMLALADLFGICLPPPASAVETKLDAISVPLATQFLGPNLADFCYLPSIQTRGGVLLAWDRSVVSCDSHSLGEFSLTARLSFCDGNSCWITVVYGPQPDADKVRFLQELRDTRSTRDGPWMVVGDFNLIYQDQDKNNSNLNRRMMGRFRRAINDLALNELHLNGRSFTWSNGWEHPTLERLDRIFVTSDLEELFPQSFLKALPSVISDHCPLLLSTLPSLPAKGRFRFENFWCKLEGFEEVVQEAWSADCRLQDPISRLDFKLRSTGRALQSWSDKKVGNVKLQLEMARELIGRFDRMEESRGLSGQERFLHRELKRKYLALASLERTMARQRSRISWLREGDANTRFFHQHAAWRRRRNFVQQLEHGSQVATAPDEKAALAHDFFDGVLGSVSHRNFSVNLDFFESRGQHIEELEDPFTEDEVRKAIADSPHDKAPGPDGFSGMFYHRCWVIIKDDPCLVHSFVKLFTKILSRRLSPKLDSLVAKNQSAFIKKRCIQDNFMLVRQSAKYLHDRRTPSVLLKLDIAQAFDSISWQFILEVLEHKGFGVRWRSWIAMLFRTASSRVLINGEPGCPIIHRRGVRQGDPISPMMFILAMDVLSSILAKAENVGLLRPLGIPFRVSLYADDVVAFIRPAVEEIHVATEVLSIFGEASGLRTNFAKCSALPIQCNEADLQILHDELPCQVASFPCTYLGLPLSIFRLKKEDLQPLIDKIGRRLPFWMSHLMTPIGRTTMVKAVLSSIPIYLLMAINAPKWVIKGIDKIRRGFLWAGKATANGGVCRVAWARVCSPIEYGGLGILDLERLGIALRSRWLWQQRTSSDKPWQGLNIPVSQKERNLVSISLVCSVGDGKLVRFWEDCWLQGSSIRSLAPAVYAAVPARFRNRRTVAEALQDRRWIRDICAALGIQAILEYLKLWDILRSIQLGEEPDTISWRWESSGSYSARSAYRLLFAGRTSLEHKPIWKSLAPPRCRYFLWLVALNRCWTADRLRSRGLSHPARCPLCDQCDETIDHLLVACSESRQLWWIAPSAIGHSECLPLNEHSFHSWLCNSHKRMAKEHRRGFDTIATLVA

SEQ ID NO: 188986 - protein, 85 aa, Oryza sativa
  Clone ID: PAT_MRT4530_85538C.1.pep
MVDVTNLTAAKDRRKRDREVFYGSWKCSSTVLISEGDAVSDGVRTRHKGKHLWCLRPTFLLRHPILLEQEACKTFEGWIMINGRG

SEQ ID NO: 188987 - protein, 77 aa, Oryza sativa
  Clone ID: PAT_MRT4530_85539C.1.pep
KQRKKEATTSLSGCIDPIGSKLNHEKKKGTMTCELCTPKIRVHVCVGSQIMKGAHKRYHKLCWLWCYPSLFRNRDTE

SEQ ID NO: 188988 - protein, 112 aa, Oryza sativa
  Clone ID: PAT_MRT4530_8553C.1.pep
MRRQPLQVSGNSRFGPTPLFLFLEVRTGGKTLCSSSANEQWTDVQLLIHTRAGAALEHRHYTFPGLPFKIWGAVVQRAVAEVVVVADEVSTETFAGDVDAARGRSRGGWRGG

SEQ ID NO: 188989 - protein, 106 aa, Oryza sativa
  unsure (1)..(106): unsure at all Xaa locations
  Clone ID: PAT_MRT4530_85540C.1.pep
FPWCAARDDNNVDIARCRQCCGGRRHDDGRDGSHSDQAHXHGYGHGPPXRVQDHGSGHGHVHGHGHGHGYSRHDHNHRHASDXAHASGHGNPHHRGHRRAGPRGYS

SEQ ID NO: 188990 - protein, 109 aa, Oryza sativa
  Clone ID: PAT_MRT4530_85541C.1.pep
MWLIAWHVHNLSVNSANLRPPFSRALLAAAARPRPNALALNQGRATPHRVKKKPIPASKRGPGCSPPVLGVVSPYVSCPASRTAPRTTLSPPPSPANFSHKLGGLGAPG

SEQ ID NO: 188991 - protein, 138 aa, Oryza sativa
  unsure (1)..(138): unsure at all Xaa locations
  Clone ID: PAT_MRT4530_85542C.1.pep
KIIIDKSRVQKGLTMYFGYKYSPTPCNQTTSVQYTSAHRHPFTFHCSFXDEFLLSSWAASGSISDKKHAPSNGLHAADIYSQSSTPNNLQVFTCLRRSNLSCIGVAPNNMSSADLSIGYRSNHLARSGPEGKFPGPAL

SEQ ID NO: 188992 - protein, 658 aa, Oryza sativa
  unsure (1)..(658): unsure at all Xaa locations
  Clone ID: PAT_MRT4530_85543C.1.pep
MAMAKALLFAILGCLCLCSAVLAARELSDDAAMAARHERWMAQYGRMYKDDAEKARRFEVFKANVAFIESFNAGNHKFWLGVNQFADLTNDEFRSTKTNKGFIPSTTRVPTGFRNENVNIDALPATMDWRTKGXGCCWAFSAVAAMEXGCEGGLMDDAFKFIIKNGGLTTESNYPYAAVDDKFKSVSNSVASIKGYEDVPANNEAALMKAVANQPVSVAVDGGDMTFQFYKGGVMTGSCGTDLDHGIVAIGYGKASDGTKYWLLKNSWGMTWEEEEGGVVVVAKEEEEEEEGGVAVGMRRRRKKGSSGEKEEAAEDNASRLAGGGDSGNHALRSARSGRRGGGGGRRGGVSDRQGWSDPALAAGGVAQEGEAAEGSPAAGSLKGDGAMGGGATDDRATATTEEPFPPPLPRSPSRPAPLHTPRRCRPLLRAASRPAPPSPSPSPRSAARCRAASRPARRRRRRRVAIITTPHAVAIAVASSSPPRRLPVTVGCAAPSPTPLSSPPSRRPSRRHHHAPRAVAVGLAPRAAARPSLPPQAARLSSSRPSRRRSEPRAVASPLVTVASLTARRAVPSPSGRPPSPRPINPPPCRHYPHHLLSLSPLFPISGVAAYLEAAAAAAEPTRPAAALRLVAAPCSGVDPAAVVAGPVSPSAFLRCR

SEQ ID NO: 188993 - protein, 327 aa, Oryza sativa
  unsure (1)..(327): unsure at all Xaa locations
  Clone ID: PAT_MRT4530_85544C.1.pep
MAMAKALLFAILGCLCLCSAVLAARELSDDAAMAARHERWMAQYGRVYRDDAEKARRFEVFKANVAFIESFNAGNHNFWLGVNQFADLTNDEFRWMKTNKGFIPSTTRVPTGFRYENVNIDALPATVDWRTKGAVTPIKDQGQCGCCWAFSAVAAMEGIVKLSTGKLISLSEQELVXCDVHGEDQGCEXNGGLTTESNYPYAAADDKCKSVSNSVASIKGYEDVPANNEAALMKAVANQPVSVAVDGGDMTFQFYKGGVMTGSCGTDLDHGIVAIGYGKASDGTKYWLLKNSWGTTWGENGFLRMEKDISDKRGMCGLAMEPSYPTA

SEQ ID NO: 188994 - protein, 68 aa, Oryza sativa
  Clone ID: PAT_MRT4530_85545C.1.pep
GRHNPTARENKIIPCSLLNPTAREDGFFHAVGPPARENIYFCRHLGVDGQDLHTENSFRSSDGVPDYK

SEQ ID NO: 188995 - protein, 378 aa, Oryza sativa
  Clone ID: PAT_MRT4530_85546C.1.pep
MARAVLTLTVLAFLCLVALGLSGRANANATAGRKMVGVYELKKGDFSIRVTNWGATIMSVILPDSKGNLADVVLGYDTVAEYVNGTAYFGGLIGRVANRIANARFTLDGKTYRLFRNDGNNSLHGGHRGFSKVIWTVKEHVAGGDSPRITLYYHSFDGEQGFPGDLDVFVTYELPRPYVLAVRMNATARGKATPVNLAHHAYWNLAGEGSGAASVLAETVRIHASRYTPVDAATLIPTGRVAPVAGTPYDFLAGAPVGARIVGAAVPGGAVSGYDTNYAVDGAAADGERRRLRPVAEVRDGATGRAMEVWADQPGVQFYTSNGLAGVRGKGGRVYGRYGALCLETQGFPDAVNHPSFPSQIVRPGQVYEHNMVFKFTF

SEQ ID NO: 188996 - protein, 51 aa, Oryza sativa
  Clone ID: PAT_MRT4530_85547C.1.pep
FLHFIMLITGTQLVKHSYGIECVARQGRAVLLCISNIVSESVHVVVQVLCL

SEQ ID NO: 188997 - protein, 86 aa, Oryza sativa
  Clone ID: PAT_MRT4530_85548C.1.pep
MGGGRAAGSALACNALCFHPANASRTKPKLKRNPKNPKPTDCDAFAVPDLIDVREFHYQDYLIFLSIHPMLRAYALSVTWGRGYRD

SEQ ID NO: 188998 - protein, 43 aa, Oryza sativa
  Clone ID: PAT_MRT4530_85549C.1.pep
CNRWTMPPPRLTTQQKPVAARAVRRCCNPPLAARHDPCTPAVR

SEQ ID NO: 188999 - protein, 109 aa, Oryza sativa
  Clone ID: PAT_MRT4530_8554C.1.pep
VAIFFFFFFFFIERQGPTNPTGNKKSTRVTQQWTSPHPKKAKLNTNQTKGAPPPRRHKPKNFQPETAKRIGGGGKQTPQMFCPRTLTLPPRGRGDWPAPQNPHRGPRNT

SEQ ID NO: 189000 - protein, 47 aa, Oryza sativa
  unsure (1)..(47): unsure at all Xaa locations
  Clone ID: PAT_MRT4530_85550C.1.pep
LSISSLFFFFFFLSXPNSHIIKPQEKKKRTPPLQAFKTTGDYMYTQM

SEQ ID NO: 189001 - protein, 93 aa, Oryza sativa
  Clone ID: PAT_MRT4530_85551C.1.pep
MWGVGTGSGEERPRSGASPEKGEERRCPGEEIRLRPGGRGTGVRGKGSGCEDKPQALQNRWRTANAINAQSAASRNNNAHVHETSQSRLALLH

SEQ ID NO: 189002 - protein, 62 aa, Oryza sativa
  Clone ID: PAT_MRT4530_85552C.1.pep
WGPAPGSTIYWAIGNRIGSHGRHNGSHGPRVPPSRDGAVAGVKGGTTSYIHLATGRGKRRSR

SEQ ID NO: 189003 - protein, 531 aa, Oryza sativa
  Clone ID: PAT_MRT4530_85553C.1.pep
MEHDAHAPPPAAQELGDASASASVVDDWARDEDTEPMAVDPHHAVAAAATATEDGEGVADAAPPAAPAEDVTEIQSSLQSLELKTNAAAHEDAQEVVEEEKETKRHLNVVFIGHVDAGKSTAGGQILFLSGQVDDRTIQKYEKEAKDKSRESWYMAYIMDTNEEERLKGKTVEVGRAHFETETTRFTILDAPVKMKGHKSYVPNMISGASQADIGVLVISARKGEFETGYEKGGQTREHVLLAKTLGVAKLIVVINKMDEPTVKWSKERYDEIESKMVPFLRSSGYNVKKDVHFLPISGLLGSNMKTRMDKSICSWWDGPCLFEVLDCIEVPLRDPKGPVRMPIIDKYKDMGTVVMGKIESGTIREGDSLLVMPNKTNVKVIGISLDEHKVRRAGPAENVRVKLSGIEDEDIMAGFVLSSIGNPVGAVTEFNAQLQILELLDNAIFTAGYKAVLHIHSVVEECEIVDLIEEIDMKKKKEADPKKKKPKRKPLFVKNGAVVVCRIQVNNLICIENFSDFPQLGRFTLRTEGK

SEQ ID NO: 189004 - protein, 64 aa, Oryza sativa
  Clone ID: PAT_MRT4530_85554C.1.pep
VFFFFFFFFFFFFFFFFFFFFWTGGLCFYYRVLKGDRNPGKPTKVSWDLQGGEAWFSSKRRGKI

SEQ ID NO: 189005 - protein, 135 aa, Oryza sativa
  unsure (1)..(135): unsure at all Xaa locations
  Clone ID: PAT_MRT4530_85555C.1.pep
FFFFFSTTPVTANXCFAILACPKMLSTKQATXTFHLHTHINTCSHWGTLQAAGMHCLNTACQAXHPTFPWHTLLLAFTSPSHLHCRLHLAIPSACSTLWRSLPGSSCSTHGAQAHWGSHPPPHPMSRPISSTKAH

SEQ ID NO: 189006 - protein, 137 aa, Oryza sativa
  unsure (1)..(137): unsure at all Xaa locations
  Clone ID: PAT_MRT4530_85556C.1.pep
MNERGCSSSQMAHLLPRRRPVTTLRQLQAHNGTLCMPMLHTYGTDICTEFLKDGRTMRPXQRGTNVTVTTDYNIYDEETMTTMNHMKLTEDVMPAKGMLCLDGTMAVTVYRXNHKAATATSRCDNTMMIVHRYNCTV

SEQ ID NO: 189007 - protein, 70 aa, Oryza sativa
  Clone ID: PAT_MRT4530_85557C.1.pep
MDRKADAGLWCLSEDSENINLKLTGNKLLRISLFSSKGGRRGAFALFVAAAPAEALTDVDSDPVRTGPGK

SEQ ID NO: 189008 - protein, 138 aa, Oryza sativa
  unsure (1)..(138): unsure at all Xaa locations
  Clone ID: PAT_MRT4530_85558C.1.pep
MFFFFHFTAGFTTRGTYKHRXXEXARGGXXQDTRQGKKGGKGAQPGPGPARRQGAKKAXXARKGXEGRREKAERXARHRDXEXSNXRXXDNEGAKXGDXEGXXQXPDXAARPHXXRGPGTXXXQAPEXARTGQXNTKS

SEQ ID NO: 189009 - protein, 116 aa, Oryza sativa
  Clone ID: PAT_MRT4530_85559C.1.pep
LCISFQLSPLEVTSNDLLLTSRHVTVAVAVDGGARARRQARTSRSPAGAATAAAGPRGRAPWRQQTCHRSGAPPNPVQRVPRRASGVARRRRRRRGRRRGLGRVLALAGKYWLSWE

SEQ ID NO: 189010 - protein, 328 aa, Oryza sativa
  Clone ID: PAT_MRT4530_8555C.1.pep
MALEAVVYSHGGHFGGYGGGLMGGAPAAPWDVFAAAGGGGSWDDPGLFAAEASLDVIQGVDEWEVDQDQHASSSSKVAARPPVKAAAAAGKRKRRRAKAAKNREEIESQRMTHIAVERNRRRQMNEYLAVLRSLMPPSYAQRGDQASIVGGAINYVRELEQLLQTLEARRTIKDHIDGGAGESPSPFAGFFAFPQYSTATSGHGGGGDAHSRIVVKPAETTTTAAGGGAGAAIADIEASMVEGHASVKVQARRRPRQLLKLVAGLHQLGLTTLHLNVTTVAAMAMYSFSLKVEDGCKLGSVEEIATAVHEILERMQEEQAFADAKTSL

SEQ ID NO: 189011 - protein, 217 aa, Oryza sativa
  unsure (1)..(217): unsure at all Xaa locations
  Clone ID: PAT_MRT4530_85560C.1.pep
HRDKSNHDIERNRQPNQTDTTPINARPKSPFHPQLSPLPPLKLFLPPLPXPILAPPXPPPARHSPSADPRKTQPGPPLPVMSPPPPPDPGGWGAPPPGEHGATLPAHXPPLHVTPGPVFAGRPPLLLSPPAPVFIGRFAFLFPPPPFLAFFPPSPPPFFPPPPPLFCRPPFTXFSPFPIFGPPPPRHCSPPPPFLSPSPPPSLCVGMVPRRANRPVF

SEQ ID NO: 189012 - protein, 114 aa, Oryza sativa
  Clone ID: PAT_MRT4530_85561C.1.pep
GRDSRCEDVCSNFVSMWISAASFDGAYYIEDTCHMPRLLDDYMDVFRVLKPDGLYLSYECMTTSLYRVRQPVAGLGPARHPTTATRLPCLSPPRLDGCHRRGWRISVAQGAQPR

SEQ ID NO: 189013 - protein, 60 aa, Oryza sativa
  Clone ID: PAT_MRT4530_85562C.1.pep
KAFNQIPYSHTELTCWRFLHTTPCTITSYGSGRIIKVAQSVYLSERFIYCLMPATSWLVG

SEQ ID NO: 189014 - protein, 503 aa, Oryza sativa
  Clone ID: PAT_MRT4530_85563C.1.pep
MAAVAGTGVFAEILEGEVYRYYADGEWRVSASGKSVAIVNPTTRLTQYRVQACTQEEVNKVMETAKVAQKAWARTPLWKRAELLHKAAAILKEHKTPIAECLVKEIAKPAKDAISEVVRSGDLVSYTAEEGVRILGEGKLLVSDSFPGNERNKYCLSSKVPLGVVLAIPPFNYPVNLAVSKIGPALIAGNALVLKPPTQGAVAALHMVHCFHLAGFPKGLINCVTGKGSEIGDFLTMHPGVNCISFTGGDTGIAISKKAGMVPLQMELGGKDACVVLEDADLDLVAANIVKGGFSYSGQRCTAVKVVLIMESVADIVVEKVKAKLAKLTVGPPEADSDITPVVTESSANFIEGLVMDAKEKGATFCQEYRREGNLIWPLLLDHVRPDMRIAWEEPFGPPLAPVLPVIRINSVEEGIHHCNASNFGLQGCVFTKDINKAIMISDAMETGTVQINSAPARGPDHFPFQGLKDSGIGSQGITNSINMMTKVKSTVINLPSPSYTMG

SEQ ID NO: 189015 - protein, 155 aa, Oryza sativa
  Clone ID: PAT_MRT4530_85564C.1.pep
MGDKGVRVATAFPTVQNQPRNGRVAATGASVAKLGLRGADLVTELGLRQVNLAGRGGGGLRREGAATAGPGRRSSGCDGVRSTDLVAAVGDSGMAATKLELQRCISNRSTRPAGCGSDGAEACGGQVGDNGVSTADLTAPIRAGSGVAGRRRRRR

SEQ ID NO: 189016 - protein, 71 aa, Oryza sativa
  Clone ID: PAT_MRT4530_85565C.1.pep
MAVSVAPVEAPRNRRATEFPKAQHAKRKAPFFSYLAAARDQALLSLSVPPLRRVAEVRAVTFGQEHDDRKN

SEQ ID NO: 189017 - protein, 208 aa, Oryza sativa
  Clone ID: PAT_MRT4530_85566C.1.pep
DDFVIRRQVEGPLVYLFVKEKKHRPSIDNEAQTDQQAKPILSQEKKGEKLLLSKRRPRLKNREETCSCDPSHSLPPRVDGRPPTWGKPSHRRRSRRTPPSLPAAAGHSRVLPRASACGVEAWGATAMGSMTIGAKYKTTLKDPGTTGVLRMVRRDPPSVPPSLSLSRIASPLSLQLRLVGFNPCGRALLDTHSAGGAVGVLILWRDVA

SEQ ID NO: 189018 - protein, 58 aa, Oryza sativa
  Clone ID: PAT_MRT4530_85567C.1.pep
MRLWADGGRHRRGWKLGQRGDHLEIALRTEEIAGERRDKDGLSGENGSNEVKFLGDNG

SEQ ID NO: 189019 - protein, 78 aa, Oryza sativa
  Clone ID: PAT_MRT4530_85568C.1.pep
VVMVRTSSNLAKCQENFVSSQGRKRGSSDTQADWSPLKSVVLPEGQGYSGFPVEAMVWFALPKMGEVLATSLFYGKRR

SEQ ID NO: 189020 - protein, 166 aa, Oryza sativa
  unsure (1)..(166): unsure at all Xaa locations
  Clone ID: PAT_MRT4530_85569C.1.pep
SSANCKPSAFVPAAALARLRCAASPAARIRLHSHRGPRRCCIRRAALNTSREKWMAFPTSTAAGLEIIAEEGPSGSSAQQQQAXHPVAAAGRDSGGTAGMGSGKSSVDGGSGHRALXDSPPRVLQELKDALSSLQQTFVISDAMRPNCPIFYSSEGFFTMTGYSPK

SEQ ID NO: 189021 - protein, 52 aa, Oryza sativa
  Clone ID: PAT_MRT4530_8556C.1.pep
PAPCPRSPPAPPLRWWPHQPEIIWFKGSCTLFPPVCAKQSISCSPQAVPVSP

SEQ ID NO: 189022 - protein, 547 aa, Oryza sativa
  Clone ID: PAT_MRT4530_85570C.1.pep
MSHVRSASAAADAASDWQKVRAEWFARFKEEYERKVAEHPDVDWSDELAVDARHYRESWERIYARAYGPFDKSSPTRAVVVCDPVYLEAVLRVKGSTESEDEDLSFFTVPLTDVNRPRETCLITREYTSKLSTLELTFGYVVRSVEATIKARIVDGSWPEEDGSSARFTACTSSLKHNGVLLLDSGDKRRKMRVDADGVVGLSRRVVSVEFEGELEVSVVTFDGSNICSKMEAEIRFVPEEASLYAVRRIHGLNMTKKRVKRGYFLICSSFVDNNVSTSLSQVLPASTMLASTQVGEIVFPVYTTMPISTSPPMTGDENAVATNQGDSMSKNPPVETENGISTTSKLEKDSDTAKPCPSDMNHEPTKMTSEATRSWCPIHKTKKHTLQDCWVFLNVRAEIRTCKERGIQRTSPTRDVYCPIHKTKNHDLSSCKVFLGAMKAPSPKSYVPIRDNGKEQGATPTSDRFVGVIDIDPHEPSVLHLLEDYGSSTTSAPREHTRSSHQLARPMVKIRNGGNHLNELPLHLAALAIFKIKSTAVEKHDAHETM

SEQ ID NO: 189023 - protein, 115 aa, Oryza sativa
  Clone ID: PAT_MRT4530_85571C.1.pep
MADRVIHYLLRGNQLQGRRQTLAVGVGHHHRRRLLLLDSSRVFMLLAVVILVHLLTAGAAAVQGAEPCVLVAAFLLWLLGAAFAVLSLAAGQFPVLAATAATIATTLRSYLIGGL

SEQ ID NO: 189024 - protein, 704 aa, Oryza sativa
  Clone ID: PAT_MRT4530_85572C.1.pep
MAWAARGQATVAPRGGNGAGLGWVGMPPPPPSCGYPGPVPAKKVSFVDNNVSTSLSQVLPASTMLVWTQVGEIVFPVYTTTPISTGPPMTGDENAVATNQGDSMSKNPPIETENGISMASKLKKDSDMAKPCPSDMNHEPTKMTSEATSAMKAQCPKSYVPIRDNGKEQGATPTSDRFVGVIDIDPHEPSVLHLLEDYGSSTTSAPREVLAIDDIGTSAHANTEAGNQSTTPAQHIRAVQAILRETPYDPVLNVDLERWTERLRESVTNLSNAFEEAATAAHQEQPPTSEANGEDPERRESPQQATPSPRGTGDLRDQINGRWEARRTRDNVNRSRRHVSSWRHDNGNRGDRSNEDRDHNNHHNHNNRERRVLDNTDLWQQFIVNFQGTYKRHAIEDDLHALTQNSGESLREYVRHFNECRNTIPEITDASVIRAFKSGVRDRYTTQELATRRITTTRRLFEIVERCAHADDALRRKNDRPKTGGEKKPATDTSESSKKKNRKNGKRKAQAEVLAAEYANPPKRIDPQSSDTKKSWCPIHKTDRHSLEDCLVFKKSLEKHMAFEKGKPLGKITLPVTFGQANNFHTEHITFDVAEFDIAYNAIIGRTALAKFMAASHYAYQVLKMPGPKGTITIQGNAKLAVQCDKRSLDIVEQTPSPPATTEPPKKVTKTNKTPKPDGAIKIVPLSSANPDKTVKIGATLNEK

SEQ ID NO: 189025 - protein, 996 aa, Oryza sativa
  unsure (1)..(996): unsure at all Xaa locations
  Clone ID: PAT_MRT4530_85573C.1.pep
MSTTGDNNNTGDKEKEPLVNTNGGNTASNSNGGPFSGVLADNIVDVYMHMPSGKDMWDALEAKFGVSDAGSELYVMEQFYDYKMVDDRSVVEHAHEIQMLAKELENNNCELPDKFVTGGIIVKLPPSWTDFATSLKHKMQEFSVTDLIGSLGVEENARVGRGFSLLMGNGSLAAIHGVGTVDLEFTSGKIVQLKNMQHVPSIKKNLVSGSLLCRDGFRLVFESNKCVISKYGTFIGKGYDSGGLFRFSLDDMCNKVVNHVSNDDDESNVWHSRLCHVNFGCMTRLANMSLIPKFTLVKGSKCHTCVQSKQPRKPHKASEARNLAPLELVHSDLYEMNDVLTKGGKKYFMTLIDDCTRFCYVYLLKSKDEALHYFKIYKAEVENQLERKIKRLRSDRGGEYFSNEFISFCEEYGIIHDKTPPYSPQSNGVAERKNRTLTEMVNAMLDTTGLSKEWWGEAILTACHVLNRIPSKHKEVTPFEEWERKKLNLSHQRTWGCLAKLNVPIAKKRKLGPKTVDCVFLGYAIHSVGYRFLIVNSGLPDMRVEHIDQTLEENPEEDNIVATRKSKRQRTAKSFGDDYIVYLVDDTARTIEEAYSSPDADYWKEAVSNEMDSIMSNGTWKVVERPYGCKPVECEWFFKKKLRPDDTIEKYKARLVAKGCTQKEGEDFFDTYSPVARLTMIRVLLALAASHGLLGHQMDVKTAFLNGELEEEIYMDQPDGLNVIEEVKDFLSKSFEMKDLGVAHVILNIKLLRGDEGGITLVQSHYVDKVLSRFGYSDCKAAPTPYDPSVLLRKNRRIARDQLRYSQIIGSLMYLASATRSDISFAVSKLSRFVLNPGDDHWHALERVMRYLKGTMSYEIHYAGYPKVLEGYSDSNWISDADEIKATSGYVFTLVGGAVSWKSCKQTILTRSTMEAELTALDTATVEAEWLRELLMDLPVVEKPVPAILMNCDNQTVIIKVNSSKDNMKSSRHVKRRLKSVRKQKXLRSDSIRLCL

SEQ ID NO: 189026 - protein, 328 aa, Oryza sativa
  unsure (1)..(328): unsure at all Xaa locations
  Clone ID: PAT_MRT4530_85574C.1.pep
MSHVRSASAAADAASDWQKVRAEWFARFKEEYERKVAEHPDVDWSDELAVDARHYRESWERIYARAYGGPFDXPIFCVKIKELRRGLQWPIHVFGLIAARDTIDHNRNMVFDRTRDDCQTLTQEDPYLLLTGPTRAVVVCDPVYLEAVLRVKGSTESEDEDLSFFTVPLTDVNRPRETCLITREYTSKLSTLELTFGYVVRSVEATIKARIVDGSWPEEDGSSARFTACTSSLKHNGVLLLDSGDKRRKMRVDADGVVGLSRRVVSVEFEGELEVSVVTFDGSNICSKMEAEIRFVPEEVGESCVELDVGFCKMEITVAWSCLSLSCR

SEQ ID NO: 189027 - protein, 530 aa, Oryza sativa
  Clone ID: PAT_MRT4530_85575C.1.pep
KETVMPHEHFAPIEHNDETPEENPEEGTIVNTRKSKRQRVAKSFGDDYIVYLVDDTPRTIEEAYSSPDADYWKEAVRSEMDSIMSNGTWEVVERPYGCKPVGCKWVFKKKLRPDGTIEKYKARLVAKGYTQKEGEDFFDTYSPVARLTTIRVLLALAASHGLLVHQMDVKTAFLNGELEEEIYMDQPDGYVLEGQEGMVCKLLKSLYGLKQAPKQWHEKLDITLTSAGFVVNEADKCVYYRYGGGEGVILCLYVDDILIFGTSLNVIEEVKDYLSKNFEMKDLGEADVILNIKLQRGDEGGITLVQSHYVDKVLSRFGYGDCKPAPTPYDPSVLLRKNRRIARDQLRYSQIIGSLIYLASATRPDISFAVSKLSRFVSNPGDDHWQALERVMRYLKGTMSYGIHYTGYPKVLEGYSDSNWISDADEIKATSGYVFTLGGGAVSWKSCKQTILTRSTMEAELTALDTATVEAEWLRELLMDLPVVEKPVPAILMNCDNQTVIIKVNSSKDNMKDVDLQNISEGTHLYEFDC

SEQ ID NO: 189028 - protein, 487 aa, Oryza sativa
  Clone ID: PAT_MRT4530_85576C.1.pep
MRRRRAAGDGSRQAARAAPPDPGERRSRAAQAAAASPAAAAAARKRSMSRRPIPSISGLRVSPVDSGAPGRGPWYSRFTTPISTSPPMTGDENAVATNQGDSMSKNPPIETKNGISMTSKLEKDSDTVKPCPSDMNHESTKMTSEATRSWCPIHKTKKHTLQDCWVFLNVRVEIRACKEHGIQRTSPTQDVYCPIHKTKNHDLSSCKVFLGAMKAPSPKSYVPIRDNSKEQGATLTSDRFVGVIDIDPHEPSVLHLLEDYGSSTTSAPWEVLAIDDVGTSAHANAEVGNQSTTLAQHIRAVQAILRKTPYDPVLNVDLERWTERLRESVTNLSNAFEEATTAAHQEQPPTGEANGEDPERRESPQRATPPPRGTGDLRDQINGRREARRTRDNVNRSRRHVSSRCHDNINRGDRSNEDRDHDNHHDHNDRERRVPDNTGHGRRRIDDDDGDRRRDNSGRRRQDSRDPGRHPRNRTPEPSDPEALPIF

SEQ ID NO: 189029 - protein, 939 aa, Oryza sativa
  Clone ID: PAT_MRT4530_85577C.1.pep
MSTEIGDKMMNDINGGNTASKSGGGTFSGYTFILPILLDVSLLILFAMAALRYYVNVDAYLILSILKLYTSSTVTRSTHIAIVMFIVLIFWIKICRIVTKFPTIQKLDRSFSVVGFAASLKPHAFDGSNYKRWKARALLWLTVMHCFFVSRGKPSEPPFSPEEEAKFEATDCLFHGALISVLADNIVDVYMHIPSGKDMWDALEAKFGVSDAGSELYVMERFYDYKMVDDRSVVEQAHEIQMLVKELENNNCELPDKFVAGGIIAKLPPSWSDFATPLKHKKQEFSVADLISSLGIEEKARAKDNRGKKIEGGSSANLVQKKNPHASHNNKKKVKPDVKPKATTNFKKKGKGKAKGDCFVCGKPGHWAKDCPERKDKKSANMVISEGEETLGYGKFLPIVLSVCHSPDWWVDTGANIHECADISLFSSYQVGRGSSLLMGNGSLAAVHGVGTVDLKFTSGKIVQLKNVQHVPSIKKNLVSGSLLCRDGFRLVFESNKCVVSKYGMFIGKGYDSGGGKKYFMTLIDDCTRFCYVYLLKTKNEALHYFKIHKAEVENQLVNVPIAKKRKLGPKIVDCVFLGYAIHSMGYRFLIVNSGVPDMRVGTITESRDATFFENEFPMKNAPSTSSQEPILSPEHFVPIEHIDQTLEENPEEDNIVATRKSKRQRTAKSFGDDYIVYLVDDTPRTIEEAYSSPDADYWKEAIRSEMDSMSNGIWEVVERPYGCKPIGCKWVFKKKLRPDASHGLLIHQMDVKTAFLNGELEEEIYMDQPDGYVLKGQEGMVCKLLKSLYGFKQAPKQCHEKFDNTLTFAGFVVNEADKCVYYRYGGGEGVILCLYVDDILIFGTSLNVIEEVKDFLSKSFEMKDLGVANVILNIKLLRGDEGGITLVQSHYVDKVLSRFGYSDCKAAPTPYDPSVLLRKNRRIVRDQLRYSQIIGSLM

SEQ ID NO: 189030 - protein, 239 aa, Oryza sativa
  Clone ID: PAT_MRT4530_85578C.1.pep
PEVTIEKYKARLVAKGYTQKEGEDFFDTYSSVAHLTTIRVLLALAASHALLVHQMDVKTAFLNGELEEEIYMDQPNGYALEGREGMVCKLLKSLYGLKQAPKQWHEKFDTTLTSAGFVVNETDKCVYYRYGGGEGVILCLYVDDILIFRTSLNVIEEVKDFLSKSFEMKDLGEADVILNIKLLRGDEGGITLVQSHYVDKVLSRFGHNDCKPAPTPYDPNHLNEVNNGSRTYRTRYCDS

SEQ ID NO: 189031 - protein, 533 aa, Oryza sativa
  Clone ID: PAT_MRT4530_85579C.1.pep
MGLFDQGCKWVFKKKLRPDGTIEKYKARLVAKASHGLLVHQMDVKTAFLNGELEEEIYMDQPDGYVLEGQKGMVCKLLKSLYGLKQAPKQWHEKFDNTLRSAGFVVNEADECVYYRYGEGEGVILCLYVDDILIFGTSLNVIEEVKDFLSKCFEMKDLGVADVILNINLLRGDEGGITLVQSHYVDKVLSRFGYSDCKAAPTPYDPTSATRPDILFAVSKLSQFVSNPGDDHWHALERVMRYLKGTMSYGIHYARYPKVLEGYSDSNWISDADEIKATSGYVFTLGGGAVSWKSCKQTILTRSTMEAEFTALDIATVEAEWLRELLMDLSVVEKPVPAILMNCDNQTMIIKVNSSKDNMKSSRHVKRRLKSVRKQKNSGVIALDYVQTAKNLADQFTKGLGRGDAGPGRELGGGRRCILYSSVRARAREVKPGRKWGRKDGSGIKGSSLGGRRRRGWRGFCRCFDAAGVGQTNTPPDIDIRDKPRQTPFGACRGQLKGSNAIFDLDEFIFEEEDYPIVDYVLVIHAAKSMTAR

SEQ ID NO: 189032 - protein, 50 aa, Oryza sativa
  Clone ID: PAT_MRT4530_8557C.1.pep
WKRRTTSTFLFKRAGLGNRDPETFLSLHIKVLYPPNKVSKEVHRSHLGYQ

SEQ ID NO: 189033 - protein, 184 aa, Oryza sativa
  unsure (1)..(184): unsure at all Xaa locations
  Clone ID: PAT_MRT4530_85580C.1.pep
ASRTDRPRVGCPAAGGRGGAAARRRGRRRRRSPGGREAGERGVRDXSRRPPTRSGSAPTSAXPGGAAARPRLRAPAAAGRRRRGGAARRRGGRRPRPGRRRGREVGREHPGRRRRPRPCLRRRHPGRPGAGRPRFHGGRLPNLYHHHRPRQPVRSLHPRRVVGLAAGAHEEARRHPEDAVATTL

SEQ ID NO: 189034 - protein, 157 aa, Oryza sativa
  Clone ID: PAT_MRT4530_85581C.1.pep
VVGWVFFFFFFFGFFFFSPKHIHSLLPTPSPTPLRPPPTHGLVPLPAPLPHLAYSSTPGPSHSPLRSRSSPPPAPPPLLPHTPSARWESASTRFHRVTPGFPHLPRCTLRPFRACKRLSHRLNWVPGPPPRIFFSKKKRRYAPFCFLALSANHHMIS

SEQ ID NO: 189035 - protein, 244 aa, Oryza sativa
  unsure (1)..(244): unsure at all Xaa locations
  Clone ID: PAT_MRT4530_85582C.1.pep
MNGVLTKGGKKYFMTLIDDCTRFCYVYLLKTKDEALHYFKIYKVEVENQLERKIKRLSTSSQEPILSPEHFASIEHIDQTLEENPEEDNIVETQKSKRQRTAKSFEDDYIVYLVDDTPRTNEEAYSSPDANYWKEAEVIEHAYGCKPVRCKWIFKKKLRPDASHGLLVHQMDVKTAFLNGELEEEIYMDQPDDLNVIEEVKDFMSKSFEMKDLGVVDVILNIKLLRGDEGGXTLVQSHYVDKVL

SEQ ID NO: 189036 - protein, 181 aa, Oryza sativa
  Clone ID: PAT_MRT4530_85583C.1.pep
MASASTGSSVAARVGWSLLRRFGVGSSPRAAAATAEGDSVGMRRIPSTMVVIAGTVPIPVAVSMAGSDCCMNQRMVSLSDLCPSSRVSQRMVSQSNLSPELAPPPPSRRRLALLPTRWAAAPACPERRKEMRRLPRERDEEGREEGKEGEEADVDNPNMWAPRGSHADSAATKGPRVTNFV

SEQ ID NO: 189037 - protein, 422 aa, Oryza sativa
  Clone ID: PAT_MRT4530_85584C.1.pep
PDGTIEKYKARLVAKGYTQKEGEDFFDTYSPVARLTTIRVLLALAASHGLLVHQMDIKIAFLNGELEEEIYMDHPDGYVLEGQEGMVCKLLKSLYGLKQAPKQWHEKFDTTLTSAGFVVNEADKCVYYRYGGGEGVILCLYVDDILIFGTSLNVIEEVKDYLSKSFEMKDLGEADVILNIKLQRGDEGGITLVQSHYVDKVLSRFGYSDCKPAPTPYDPSVLLRKNRRIARDQLRYSQIIGSLMYLASATRTDISFAVSKLSRFVSNPGDDHWQALERVMHYLKGTMSYGIHYTGYPKVLEGYSDSNWISDADEIKATSEYVFTLGGGAVSWKSCKQTILTRSTMEAELTALDTATVEAEWLREFLMDLPVVEKPAGDQVFGECLPHDCSSRCLESPPLLEEMAEVVRRQQEPELVRQEEVP

SEQ ID NO: 189038 - protein, 125 aa, Oryza sativa
  Clone ID: PAT_MRT4530_85585C.1.pep
MHSQQQCNKLEGIIEQGGWCLAHYKDPTGGKQHAPVPAAGVGAPADAAHAYPPTPSQLFRRLLAVVPALRKLLPVTPVLRKFPPAVPGVPAAASAQIWASPFGLRRLDGSRDARSATCCRSPVLR

SEQ ID NO: 189039 - protein, 121 aa, Oryza sativa
  unsure (1)..(121): unsure at all Xaa locations
  Clone ID: PAT_MRT4530_85586C.1.pep
MATSSRAGGTPQKPDHPPTRCRSQAKVWFRRHCSXPISRARKRSEAGKREQLRRGEGETNTGKEAKKTDRARGLLIYQEKERGRAVAEGIVGTWDSWHWFFNHWQIHQEFTKPLGLNCRSI

SEQ ID NO: 189040 - protein, 906 aa, Oryza sativa
  Clone ID: PAT_MRT4530_85587C.1.pep
MAEVVRRRQELEPVARTTTSTEAILPHNPAEGHSRVDVYMHMPSGKDMWDALEAKFGVSNAGSELYVMEQFYDYKMLPDKFVAGGIIAKLPPSWSDFATSLKHKRQEFSVSDLIGSLGVEEKARATDIREKKVEGGSSANMVQKKNPHASYNNKKVKPDVKPKAATNFKKKGKGKAKGDCFVCGKSGHWAKDCPERKDRKSANMVIGEGGGTSGYGKILPTVLSVFHSPDWWVDTGANIHVGRGSSMLMGNGSLAAVHGIGTVDQKFTSGKTVQLKNVQHVPSIKKNLVSGSLLCREGFRLVFESNKCVVSKYGTFVRKGYDSGGLFRFSLNDMCNNHNVVNHISENDESNVWHSRLCHVNFSCMTRLANMSLIPKFTLIKGSKCHTCVQSKQPRKPHKASEARNLAPLELVHSDLCEMNGVLTKGGKKYFMTLIDDYTRFCYVYILKRKDEALHYFKIYKAEVENQLERKIKRLRSDRGEEYFSNEFASFCEEFGIIYERMPPYSPQSNGVAERKNRTLTEMVNAMLETAGLSKEWWGEAVLTACHVLNKISMKHKEVTPFEEWERKKLNLSYLRTWGCLAKHFAPIEHNDQTPEKNPEEDNIVDTHKSKRQRVAKSFGDDYIVYLVDDTPRTIEETYSSPDADYWKEIMDVKTAFLNGELEEEIYMDQPDGLNVIEEVKDYLYKSFEMKDLGEANVILNIKLQRGDEGGITLVQSHYVDKVLSRFGYSDCKPAPTPCDPSVLLRKNRRIVRDQLRYSQIIGSLMYLASATRPDISFAVSKLSRFVSNPGDDHWQALERVMRYLKGTMSYGIHYTGYSKVLEGYIDSNWISDADEIKVTSGYVFTLGGGVVSWKSCKQTILTRSTMEAELTALDTATVEAEWLRELLMDLPVVEKPVRASYPNEL

SEQ ID NO: 189041 - protein, 1201 aa, Oryza sativa
  unsure (1)..(1201): unsure at all Xaa locations
  Clone ID: PAT_MRT4530_85588C.1.pep
MSGVAAAAAAGGDGGGGAPPTGAGSGAGAGAPGGAMNDSNNGGNSASPSSGGLFSGMLLRYCYVPVPDIHDAHSMILVMLRSPYTAYAMIIALTFWIKICRLMTIFPTIQKPDRSFSVVGFAAALKPHAFDGSNYKRWKARALLWLTAMQCFYVSRGKRSEPPLSPEEEAKFEASDCLFRGALISVLADNIVDVYMHMPSGKDMWDALEAKFGVSDAGSELYVMEQFYDYKIFDDRSVVEQAHEIQMLAKELENNNCELPDKFVAGGIITKLPPSWSDFATSLKHKRQEFSISDLIGSLGVEEKARAKDVRGKKVEGGSSANMVQKKNPHASHNNKKVKPDVKPKAATNFKKKGKGKAKVDCFVCGKSGHWAKDCPERKDRKSANMVISEGGGTSGYGKILPIVLSVFHSPDWWVDTGANIHVGRGFSLLMGNGSLAAVHGVGTVDLKFTSGKTVQLKNVQHVPSIKKNLVPSAILAFNRNNLASLTRHLIDDCTRFCYVYLLKTKDEALHYFKIYKAEVENQLERKIKRLRSDRGGEYFSNEFAFFCEEFGIIHERMPPYSPQSNGVAERKNRTLTEMVNALLDTAGLSKEWWGEAVLTACHVLNKIPMKHKKVTPFEEWERKKLNLSYLRTWGCLAKVNVPIAKKRKLGPNTVDCVFLGYAIHSVSYRFLIVNSRVPDMHVGTILESRDATLFENEFPMKHTPSTSSKETVMPHEHFAPIKHNDQTPEENPKEDNIVDTRKSKRQRVAKSFGDDYIVYLVDDTPRTIEEVYSSLDADYWKEAVHSEMDSIMSNGTWEVVERPYGCKPVGCKWVFKKKLRPDGTIEKYKARLVAKGYTQKEGEDFFDTYSPVALLTTIRVLLALAASHGLLVHQMDVKTAFLNGELEEEIYMDQPDGYVLEGQEGMVCKLLKSLYGLKQAPKQWHEKFDTTHTSAGFVVNEADKCVYYHYGGGEGVILCLYVDDILIFGTSLNVIEEVKDYLSKSFEMKDLGEADVILNIKLQRGDEGGITLVQSHYVNKVLSRFGYSDCKPAPTPYDPSVLLRKNQRIARDQLRYSQIIGLLMYLASAMRPDISFAVSKLSRFVSNPGDDHWQALERVMRYLKGTMSYGIHYTGYPKVLEGYSDSNWISDADEIKATSGYVFTLGGGAVSWKSCKQTILTRSTIEAELTALDTATVETEWLRELLMDLPVVEXPVPAIL

SEQ ID NO: 189042 - protein, 161 aa, Oryza sativa
  unsure (1)..(161): unsure at all Xaa locations
  Clone ID: PAT_MRT4530_85589C.1.pep
YKRHNTACARAQARVLYIARALFFFFFFFFFFFFFFFFFKAKLGEKKNGRKMTLHWDDAQHPEPDAGAKDVESLQPHSTSLQKLSIKGHGGLCXPSWLNNELSVKALRAFNLTGGAWKGLPSFNQIWELYELTLENIGTIRKSVLEQWCCKLKRLTLIDLK

SEQ ID NO: 189043 - protein, 137 aa, Oryza sativa
  Clone ID: PAT_MRT4530_8558C.1.pep
SPSRRRRSFPATSPASPWRSSCRCRPRSLRAARKPPPPPPPCRRRRGRSPSTTCRRAPSPCTPPPSASAASAAARRRPCRGAAPPRSPGVGAGAGPPGAPPRRPSHTTHAARAPAPARGPATSRRRSRRRVGAACSP

SEQ ID NO: 189044 - protein, 54 aa, Oryza sativa
  Clone ID: PAT_MRT4530_85590C.1.pep
EEMHHRLEGNGGTDYKYVTSQNLKQKFLHISYKKYITTQIHYRSDSISHTIHIK

SEQ ID NO: 189045 - protein, 133 aa, Oryza sativa
  unsure (1)..(133): unsure at all Xaa locations
  Clone ID: PAT_MRT4530_85591C.1.pep
GRLPDATHGWDHLMQVAAAQMGLSDRDIADLSGGHTLRRFHKERHYFPGAXTRQPFDLLTTITRPSLGVARXERHVHLARDRALLADPPLRALEEKYAGDEDAFIADYYXAHLKLSELRFVEEYEASRECHIH

SEQ ID NO: 189046 - protein, 146 aa, Oryza sativa
  Clone ID: PAT_MRT4530_85592C.1.pep
MSRVDPSRAVPMDMATEWIPTAPTPCSKAALAGMVFFGALERLASSSIMAAPATLVPSPCQCGTRARGWADVAKRGANHTGTVPHITAPAVLAHSPKDFFVEIEEKEKDHYRNVSLMVMSPLFFPYPYKSSRFPYPSKPSHTYMFT

SEQ ID NO: 189047 - protein, 298 aa, Oryza sativa
  Clone ID: PAT_MRT4530_85593C.1.pep
MDLSSSKEATPPPEAWWTGETVAVVTGANRGIGHALAARLAEQGLAVVLTARDGARGEAAAAALRARGLRSVRFRRLDVSDPASVAAFASWLRDELGGLDILVNNAAVSFNEIDTNSVEHAETVLRTNFYGAKMLIEALLPLFRRSAANSRILNISSQLGLLNKVRDPSLRSMLLDEASLTEGKIERMASRFLAEVKDGTWSAPGRGWPAVWTDYAVSKLALNAYSRVLAARLARGGDRVAVNCFCPGFTRTDMTRGWGTRTAEEAGRVAAGLALLPPGDLPTGKFFKWCTPQLYSKL

SEQ ID NO: 189048 - protein, 1064 aa, Oryza sativa
  Clone ID: PAT_MRT4530_85594C.1.pep
MAHRGDRFLVVVVVVVVLGVVVRPAPALSADGKALLSLLPAAAPSPVLPSWDPTAATPCSWQGVTCSPQSRVVSLSLPNTFLNLSSLPPQLASLSSLQLLNLSTCNISGAIPPAYASLAALRVLDLSSNALYGDIPASLGALSGLQYLLLNSNRLTGAIPRSLASLAALQVLCVQDNLLNGTIPASLGALTALQQFRVGGNPGLSGPIPASLGALSNLTVFGAAATALSGAIPEELGNLANLQTLALYDTGVSGPIPAALGGCAELRNLYLHMNKLTGPIPPELGRLQKLTSLLLWGNALSGRIPPELSNCSALVVLDLSGNRLAGEVPGALGRLAALEQLHLSDNQLAGRIPAELSNCSSLTALQLDKNGLTGAIPPQLGELRALQVLFLWGNALSGAIPPSLGNCTELYALDLSRNRLAGGIPDEVFALQKLSKLLLLGNALSGRLPPSVADCSSLVRLRLGENQLAGEIPREIGKLPNLVFLDLYSNKFTGALPGELANITVLELLDVHNNSFTGAIPPQFGELMNLEQLDLSMNKLTGEIPASFGNFSYLNKLILSGNMLSGTLPKSIRNLQKLTMLELSNNSFSGPIPPEIGALSSLSISLDLSSNRFTGELPDEMSSLTQLQSLDLSSNGLYGSISVLSGLTSLTSLNISYNNFSGAIPVTPFFKTLSSSSYINNPNLCESYDGHTCASDMVRRTALKTVKTVILVCAVLGSITLLLVVVWILINRSRTLAGKKAMSMSVAGGDDFSHPWTFTPFQKLNFCVDNILECLRDENVIGKGCSGVVYRAEMPNGEIIAVKKLWKTSKEEPIDAFAAEIQILGHIRHRNIVKLLGYCSNKYVKLLLYNYIPNGNLQQLLKDNRSLDWDTRYKIAVGAAQGLAYLHHDCVPAILHRDVKCNNILLDTKYEAYLADFGLAKLMNSPNYHHAMSRIAEYGYTTKITEKSDVYSYGVVLLEILSGRSAVEAVVGDSLHIVEWAKKKMGSYEPAVNILDPKLRGMPDQLVQEMLQTLGIAIFCVNPAPAERPTMKEVVAFLKEVKCSPEEWGKISQQPLIKPGSQQG

SEQ ID NO: 189049 - protein, 101 aa, Oryza sativa
  unsure (1)..(101): unsure at all Xaa locations
  Clone ID: PAT_MRT4530_85595C.1.pep
MEGKEEDVRLGANKFXERQPIGTAAQGSDDKXYKEPPPXPLFEPGXLKSWSFYXAGIAEXMXTXLFXYXXXXTXIGVNXFXFKCAXXXIQGIVXSFXGIFF

SEQ ID NO: 189050 - protein, 103 aa, Oryza sativa
  Clone ID: PAT_MRT4530_85596C.1.pep
CYIISTLGFEQGLTHTRLHIEQNKNQYIPFDSSATACMHIFLTLNISYKQGPGATSFRDSLLDKWMNVTLCTRSLPQALVTTIPQGVRYSTSRPPPQGHNFNT

SEQ ID NO: 189051 - protein, 87 aa, Oryza sativa
  unsure (1)..(87): unsure at all Xaa locations
  Clone ID: PAT_MRT4530_85597C.1.pep
EGEGEEEETGNAYGTPARTVSKSYXAISTIRDISFTEEESVCPKKPTSIDEVEKHSELCGTLLSXDESKMKYGKYFNCLFLMSLLPY

SEQ ID NO: 189052 - protein, 46 aa, Oryza sativa
  Clone ID: PAT_MRT4530_85598C.1.pep
MAPKGDVTQQYCLVQPKEKAPQAGEAAAATPTPPEQPQSANPRACM

SEQ ID NO: 189053 - protein, 100 aa, Oryza sativa
  Clone ID: PAT_MRT4530_85599C.1.pep
QPRVDATRHRCMPAELSQPGPASSMPRCRGSIQTMFMDGSGQSCTGCHEGGTEATHTTQQHHASGGVQTSGLPHAKRTVLLPMLSATPNSQFTEKLNLLI

SEQ ID NO: 189054 - protein, 482 aa, Oryza sativa
  Clone ID: PAT_MRT4530_8559C.1.pep
MSGAEEEAAAARGGGSGSESGGSGGGGRGGGGGGAGSSGSSGARRRFDDKGLVARTSLILWHTHQNDAGAVRKLLEEDAALVNARDYDSRTPLHVAALHGWHDVAECLIANGADVNAQDRWQNTPLADAEGAKRHAMIELLKEHGGLTYGKTGSHFEPKTIPPPLTNKADWEINPLELDFSKAVIIGKDDLFRCYMQIEIVGCSKLAIILAGSFGEILKANWRGTPIAVKRILPSLSDDRLVIFFGVCRQDFKHEVNLLIKLRHPNIVQFLGAVTETKPLMLVTEFLRGGDLHQYLKEKGALAPATAVNFALDIARGMAYLHNEPNVVIHRDLKPRNILLVNSAANHLKVGDFGLSKIIKAQHANDVYKMTGETGSYRYMAPEVFKHRKYDKKVDVFSFAMILYEMLEGDPPFSNYEPYEAAKLIELCWSGDIHLRPSFLEILKRLEKIKEYLAAHDHHWHLFSQFPALFMFLENQYSGYRK

SEQ ID NO: 189055 - protein, 98 aa, Oryza sativa
  Clone ID: PAT_MRT4530_855C.1.pep
RQLRLQTVPAWSCLIRTTDNHDHDDPAPAAPPPRRPGGAPPSTAPPPPPRARRTRRSRRRPRGARGTTRRRTPRPRARCTCSRSRRRPPSAAARRSGS

SEQ ID NO: 189056 - protein, 393 aa, Oryza sativa
  Clone ID: PAT_MRT4530_85600C.1.pep
MAVLLLLPVPVPPSLLYAVAALALAAVTHLLHLPSLLLYALHTYIHPDAVPSSTPRAVLRPPGAAAGSGNPKQQRGGGGGGGKAAASPFDEGSNSAQLYRLRLSHATLATRPRFADFHLALLLPLALLPPALLLPASAAGAAAPLAPLPPVVFLFVALLRLVMLPSPRPAYLAAALGALLVATLLSSSPFAGALASLAALPATRFARSFWLGTDQPRSGLAVLASSAPARLLLYLAVLVSSAASILQCCGFLDSPELEVKLLAAAAGLQLLASRAAVQMYLNEAVFCWYQRLHVSRSPDTEYGRAKVFLHNHHLCAVATQLVAPPLLVLSLLALWRVQGKDYFEGVEELNWLVGWSVAMKEAALLAARWIVAVWSTVTVGTLVFYKRGWLFVL

SEQ ID NO: 189057 - protein, 111 aa, Oryza sativa
  Clone ID: PAT_MRT4530_85601C.1.pep
MRLSESIGARPSPPSPLAAASTGGGGASPRRGSRSGGNATREGWCPAATTRDAGVLAVTTHGAASPAGTRRAEGGSGGGNSRGCRSGGNEYEFLSAGVESFFGLTKIRRPT

SEQ ID NO: 189058 - protein, 76 aa, Oryza sativa
  Clone ID: PAT_MRT4530_85602C.1.pep
MADLDQRRFPGSSSSGSGGGRSGEAALGVLPPEQGLEKTRWWLPSVIAAGKRGDVPAEFQTFDGLPNQLWIKTRTA

SEQ ID NO: 189059 - protein, 175 aa, Oryza sativa
  unsure (1)..(175): unsure at all Xaa locations
  Clone ID: PAT_MRT4530_85603C.1.pep
MLPPALLLVVAVGAALLLAFRPPLPALAARPIVAAAGGKPAPTEAAATARWLAAQNTWGVLSTISSDLSGAPFGNVVSYSDGVPGESHGIPYFYLTTLDPTARDALEDERTSFTLSEFPLATCGKIDPENPTCAKLTLTGKXLAKEALFTTHPEMQGWPKDHHFQIFKLEIKTYF

SEQ ID NO: 189060 - protein, 1020 aa, Oryza sativa
  Clone ID: PAT_MRT4530_85604C.1.pep
MDTYPFSNVEIDNSGFHVCDLIYSFRPSPRESFPGSVHLRAQVYGTSRCLRNSVRLRTCTGRRAIKFFGSASSATALVLRGYCCCIGAFTKMSTEIGDNKMNDINGGNTASNPAMGRSRGKDMWDALEVKFGVSDAGSELYVMEQFYDYKMVDYRSVVEQAYEIQMLVKELENNNCELPDKFVAGGIIAKLPPSWSDFATSLKHKRQKFSVTDLIGSLGIEEKVRAKDNQGKKIEGGSSANLVQKKNTHASHNNNKKVKPDIKSKATTNFKKKGKGKAKGDCFVCGKPGHWAKDCPERKDKKSANMVISEGGGTLWPDGTIEKYKMDVKTAFLNGELEEEIYMDQPDGYVLEGQEGMVCKLLKSLYGLKQAPKQWHEKFDNTLTSVGFVVKEADKCVYYRYGGGEGVILCLYVDDILIFGNSLNVIEEVKDFLSKSFKMKDLGVADVILNIKLLRGDEGEITLVQSHYVDKVLSRFGYSDCKAAPTPYDPSVLLRKNRRIARDQLRYSQIIGSLMYLASATRPDISFAVSKLSQFVSNPGDDHWHALERVIHYLKGTMSYGIHYAGYPKVLEGYSDSNWISDADKIKATRGYVFTLGGGAVSWKSCKQTILTRSTMEAELTALDTATVEAERLRELLMDLLAGDQVFGSASSATALVLRGYCCCIGAFTKMSTEIGDKKMNDINGGNTASKSSGGTFSSSSSSNANTLAYMAEGTYKTNLLNLAKDLIANVTKTGSHSAAGATAGTTGPDIVYGAVLCRGDSTNCSSRLQRVLDTASISNNGSTSSESDSQSQSHKSTVTLYDHEFQALLSFSDTDFISSFSNAPACIVSNYLNPAVPQRDADRTRFSELFSELMERISDAMVSSRASYLTGKGKGWFDGQESQPVVYGLAQCMDGMPPERCRSCLGGITDQGKEMVSNGLTEGMVLGVRCSLWYHYQTDGEFFAGEPGVLAFLNMPSSRDAAASPTAALDATVAYRPLGGRFLKIALSEGGENDVADGRSLSGDGRQRNLQGGPLAALR

SEQ ID NO: 189061 - protein, 215 aa, Oryza sativa
  Clone ID: PAT_MRT4530_85605C.1.pep
MLPPALLLVVAVGAALLLAFRPPLPALAARPIVAAAGGKPAPTEAAATARWLAAQNTWGVLSTISSDLSGAPFGNVVSYSDGVPGESHGIPYFYLTTLDPTARDALEDERTSFTLSEFPLGTCGKIDPENPTCAKLTLTGKLKLIDPQSSEADLAKEALFTKHPEMEGWPKNHHFQIFKLEIKNIFLIDWFGGPKPISPTEYLEYEKNRALLKSS

SEQ ID NO: 189062 - protein, 936 aa, Oryza sativa
  Clone ID: PAT_MRT4530_85606C.1.pep
MSTTGDNNNTGDKEKEPPVNTNRGNTASNSSGGPLSGVLADNIVDVYMHMPSGKDMWDALEAKFGVFDAGSELYVMEQFYDYKMVDDRSVVEQAHEIQMLAKELENNNCELPDKFVAAGIIAKLPPSWSDFATSLKHKRQEFGVTDLIGSLGVEEKARAKDNRSKKIKGGSSANLVQKKNPHASHNNNKKVKPDVKPKATTNFKKKGKGKAKGDCFVCGKYGHWAKDCPECKDKKSASMVIGEGGGTLRYGKFLPTVLFVCHSPDWWVDTGANIHVGRCSSLLMGNGSLAAVHGVGYDSGGLFRFSLDDMCNKVVNHDEALHYFKIYKAEVENQTGKENQTVEYGIIHERTPPYSPQSNGVAERKNRTLTEMVNAMLDTAGLSKEWWGEAILTACHVLNRIPTKHKEVTQFEEWERKKLNLSHLRTWGYLAKVNVPIAKKRKLGPKTVDCVFLGYAIHSVGYRFLIVNSRVPDMRIGTITESRDATFFENEFPMKNAPSTSSQEPILSPEHFAPIEYIDQTLEENPVEDNIMDVKTAFLNGELEEEIYMDQPDGYVLESQEGMVCKLLKSLYGLKQAPKQWHEKFDNTLTSAGFVVNEADKCVYYRCGGGEGVILCLYVDDILIFGTSLNVIEEVKDFLSKSFEMTDLRVADVILNIKLLRGDEGGITLVQSHYVDKVLSRFGYSDCKAAPTPYDPRTMSYGIHYAGYPKVLEGYSDSNWISDADEIKATSGYVFTLGESFPGSVHLRAQVYGTSRCLRNSVRLRTCTGRRAIKFLGSASSATAPVLRDYYYCIDAFVNMSMEIGDKEVNDINGGNTASKSSGGTFLGEILLSGRKFTWANSMPSPTYKNAASASARAPPSLPRVQPSAAAAPVTAVAPEGHRQVRKVATVLIPSSVSAKDCRSAAAIDDPKTAAASTSLPSSSKPPVSCRVALYA

SEQ ID NO: 189063 - protein, 123 aa, Oryza sativa
  Clone ID: PAT_MRT4530_85607C.1.pep
FVFFFFPGFFFFFFFFFFFWKKTRPCHRQKVKKKQKTGAKIQNGGAKPGGPNGEGPGSPQPKRKPDGLWNELEGTSQKQTASLPPPTKDSPPFGSTPKPTAGADTPGLGAPAGAAQEKTRAPG

SEQ ID NO: 189064 - protein, 66 aa, Oryza sativa
  Clone ID: PAT_MRT4530_85608C.1.pep
PFTCFLHVRSSFLYAVVSLFCFYKRHISYQCAYRLFGYCASQLLHLLTYLLLESPPRTGAPQHRTP

SEQ ID NO: 189065 - protein, 793 aa, Oryza sativa
  Clone ID: PAT_MRT4530_85609C.1.pep
MQCFYVSRGKRSEPPLSPEEEAKFEASDCLFRGALISVLADNIVDVYMHMPSGKDMWDALEAKFGVSDAGSELYVMEQFYDYKMVDDRSVVEQAHEIQMLAKELENNNCELPDKFVAGGIIAKLPPSWSDFATSLKHKRQEFSVPDLIGSLGVEEKARAKDVRGKKVEGGSSANMVQKKNPHASHNNKKVKPDVKPKAATNFKKKSKGKAKGDCFVCGKSGHWAKDCPERKDRKSANMIISEGGGTSRYGRERFLLVDGKRVACGCSCVGYRFLIVNSGVPDMHVGTILESRDATFFENEFPMKYTPSTSSKETVMPHEHFAPIEHNDQTPEENPEEDNIVDTRKSKRQRVAKSFGDDYIVYLVDDTPRTIEEAYSSPDADYWKEAVRSEMDSIMSNGTWEVVERPYGCKPVGCKWVFKKKLRPDGTIEKYKARLVAKGYTQKEGEDFFDTYSPVARLTTIRVLLALAASHSLLVHQMDVKTAFLNGELEEEIYMDQPDGYVLEGQEGMVCKLLKSLYGLKQAPKQWHEKFDTTLTSVGFVVNEADKCVYYRYGGGEGVILCLYVDDILIFGTSLNMIEEVKDYLSKSFEMKDLGEADVILNIKLQRGDEGGITLVQSHYVDKVLSRFGYSDCKPAPTPYDPSVLLRKNRRIARDQLRYSQIIGSLMYLASATRPDISFAVSKLSRFVSNPGDDHWQALERVMRYLKDGRAIRFLGSARRDYSLFVNIYFIFTNMSNTGDKEKETPVNTNGGNTASNSSGGPFLGPDAAIVFLADLGLSAADIATTVAYDHCY

SEQ ID NO: 189066 - protein, 137 aa, Oryza sativa
  Clone ID: PAT_MRT4530_8560C.1.pep
SGDFGLSKIIKAQHANDVYKMTGETGSYRYMAPEVFKHRKYDKKVDVFSFAMILYEMLEGDPPFSNYEPYEAAKYVGEGHRPPFRSKGFTNELKELIELCWSGDIHLRPSFLEILKRLEKIKEYLAAHDHHWHLFSQ

SEQ ID NO: 189067 - protein, 246 aa, Oryza sativa
  Clone ID: PAT_MRT4530_85610C.1.pep
MWCQSCKEEYEEEDAGTCKECYEEASETEEELKREIDDLRSRLHFLRLPSPSLDASSLSHSDLLLHAIPADAPARPDTPAVPAHRVILASRSPVFRAMLENEMEESRSGIIKIYDVSYDVLRAFVHYMYTAEALLDEQMASDLLVLAEKYEVKNLKAYCEKFLTSKVSNDNAITHYAFAHRHSAKQLLETSLAAIMDNMSTLADREEYKELVEKDPRLVVEIYEAYLNRQVNTAAGKETDSSSRKG

SEQ ID NO: 189068 - protein, 807 aa, Oryza sativa
  Clone ID: PAT_MRT4530_85611C.1.pep
MQCFYVSRGKRSEPPLSPKEETKFEASDCLFRGALISVLADNIVDVYMHMPSGKDMWDALEAKFGVSDAGSELYVMEQFYDYKMHKRQEFSVPDLIGSLGVEEKARANDVRGKKVEGGSSANMVQKKNPHASHNNKKVKPDVKPKAATNFKKKGKGKAKGDCFVCGKSGHWAKDCPERKDRKSANMIISEGGGTSGDATFFENEFPMKYTPSTSSKETVMPHEHFAPIEHNDQTPEKNPEEDNIVDTRKSKRQRVAKSFGDDYIVYLVDDTPRTIEEAYSSPDADYWKEAVRSEMDSIMSNGTWEVVERPYGCKPVGCKWVFKKKLRPDGTIEKYKARLVAKGYTQKEGEDFFDTYSPVARLTTIRVLLALAASHGLLVHQMDVKTAFLNGELEEEIYMDQPDGYVLEGQEGMVCKLLKSLYGLKQAPKQWHEKFDTTLTSAGFVVNEADKCVYYRYGGGEGVILCLYVDDILIFGTSLNVIEEVKDYLSKSFEMKDLGEADVILNIKLQRGDEGFWGVPPARLLIAMSGVAAAAIGGGGASPPTGAAPLPTPTGAAPLPMPTGAGSGAGAPGGGAVNDYNNGGNSASPSSGGPFSGRIEEYELRREEADRRTRADIRSLIDVVEACTPEVGKKAKDLPASIKKEQSKVTPTTCSTKCSSPDIEPNLTVVAVDKCATTAMASMKLVADDGATSTTKIPTTDYSKETHAKCSMLGFDVKWDANKADITFLTKTVVLETVPASIASLSAFSPRMIADIKQYTLMPTRKDNCYLSWRHLLLARVMVVELSSTGQFGSENISIKGKHVDKL

SEQ ID NO: 189069 - protein, 772 aa, Oryza sativa
  Clone ID: PAT_MRT4530_85612C.1.pep
MARLELEPPEVVRQELEPRRAILPGAGAAGGGAPGAGAGAVNNNINGGNSASQSSGGPFSGVLADNIVDVYMHMPSGKDMWDALEAKFGVSDAGSELYVMEQFYDYKIVDDRSVVEQAHEIQMLANELENNNCELPDKFVASGIIAKLPPSWSDFATSVKHKRQEFSVSDLIGSMGVEEKAMAKDVRGKKVEGGSSANMVQKKNPHASHNNKKVKPNVKPKAATNFKKKGKGKAKGDYFVCGKSGHWAKDCPERKDRKSANMVISEGGGTSGDATFFENEFPMKHTPSTSSQETVMPHEHFAPIEHNDQMPEENPEEDNIVDTRKSKRQRVAKSFGDDYIVYLVDDTPRTIEEAYSSPDADYWKEAVRSEMDSIMSNGTWEVVERPYGCKPVGCKWVFKKKLRPNGTIEKYKARLVAKGYTQKEGEDFFDTYSPVARLTTIRVLLALAASHGLLVHQMDVKTAFLNGELEEEIYMDQPDGYVLEGFVVNEADKCVYYRYGGGEGVILCLYVDDILIFGTSLNVIEEVKDYLSKSFEMKDLGEADVILNIKLQREDEGGITLVQSHYVDKVLSRFGYSDCKLAPTPYDPSVLLRKNRRIARDQLRYSQIIGSLMYLASATRPDISFAVSKLSRFVSNPGDDHWQALERVMRYLKGTMSYGIHYTGYPKVLEGYSDSNWISDADEIKATSGYVFTLGGGAVFWKSCKQTILTRSTMEAELTALDTATVEAEWLRELLMDLPDGSCLNVIRVAFPSRDVDLQNISEGTHLYEFDC

SEQ ID NO: 189070 - protein, 1086 aa, Oryza sativa
  Clone ID: PAT_MRT4530_85613C.1.pep
MALFCYRRASDFLPDHAAHAYGIQTAPLLAFYALANSALVTLYAMCWKGRRRLLAGEEAGGAGERVRAAAGAAVPPRLRRPVRGRRVPRPPEGAGAQRAGREVVTTEAAGVPFNFLNGLDIDQRTSDIYFTDSSSTYWRRPLVNLFLSKSNYYPSPKFLFSWADSHEPTLLKPKSNIPTPQNTVSVLDLPMDPFQQNVSPALPPKPKRRAGKVILMDLERRRSASINKLSDGFMSPDPNLGVGKPRGKDRAKSTKKLKMLAQESGILLSLNPLPLELNDPNASDDEIDAPLADCSIRLLQQIGTERCNVSWGKRSEPPFSPEEEVKFEASDFLFRGALISVLADNIVDVYMHTPSGKDMWDALEAKFGVSDAGMEQAHEIQMLAKELENNNCELPDKFVAGGIIAKLPPSWSDFATSLKHKRQEFSVSDLIGSLGVEEKARAKDNGAKRSREKVKPDVKPKATTNFKKKGKGKAKGDCFVCGKSGHWAKDCPERKDRKSANMVICEAEEYWGTDLQLTPPYSPQSNGAAERKNCTLTEMVNAMLDTAGLSKERWGEAILTACHVLNKIPTKHKEVTPFEEWERKKLNLSYLRIRGCLAKVNVPIAKKRKLGPNTVDCVFLSYAIHSVGYRFLIVNSGVPDMRVGTIIESRDATFFDNEFPMKNIPSTSSQETVIPHEHFAPIQHNDQAPEGNPEEDNIADTRKSKRQRVAKSFGDDYIVYFVDDTPRTIEEAYSSPDADYWKEAVRSEMDSIMSNGTWEVVERPYGCKPVGCKWVFKKKLRPDGTIEKYKARLVAKGYTQKEGEDFFDTYSPVARLTTIRVLLALAASHGLLVHQMDVKTAFLNGELDEEIYMDQPDGYVLEGQEGMVCKLLKSLYGLKQAPKQWHKKFDTTLTSVGFVVNEADKCVYYRYGGGEGVILCLYVDDILIFGTSLNVNEEVKDFLSKSFEMKDLGKADVILNIKLLKGDEGGITLVQSHYVDKVLSGFGYSDCKPAPTPYDPNVLLRKNRRIARDQLRYSQIIGSLMYLASATRPDISFAVSKLSRFVSNPGDDHWQALERVMRYLKGTMSYGIHYTGYPKVLEGYSD

SEQ ID NO: 189071 - protein, 189 aa, Oryza sativa
  unsure (1)..(189): unsure at all Xaa locations
  Clone ID: PAT_MRT4530_85614C.1.pep
RNSANNRNRRRRLYPENSPPLDGEAELPPLLLSFTAPPGAPAPAPDPAPVGGAPPPPSPPAAAAATPDMAMSSRAGGTPQKPDHKPTRCRSQAKVWFRRHCSXPISRARKRSEARKQEQLRHGEGETNTGKEAMKLDRTRGLLIYQEKERGRAVAEGIVGTWVSGCKRIAGVGAGLQSLYPKRLKTLFT

SEQ ID NO: 189072 - protein, 44 aa, Oryza sativa
  Clone ID: PAT_MRT4530_85615C.1.pep
KTKAICLKSSLSSCRNQTLGPNSEVNVIGYLPPLVVSIVEPTRQ

SEQ ID NO: 189073 - protein, 244 aa, Oryza sativa
  Clone ID: PAT_MRT4530_85616C.1.pep
MGATWAHVSFSPLLFFIPSPHLGISPLFISLNLLSLLSPGTTTKGQWPVGRRDGARQPQLRRNQSGSGASGGAAWDTILDGPPNTRGCAAAAVGGHRTVASRRFLSQAACTVAAASPRRRPAPLPTIPPLAAAAPCHHTSSSSDVDSNHHHPSAVLQPLPRGNGLKWGDGAAAGYCGGGRLPEEGGEAGGPGEPSDSPEGVRGGPVPDVPPLFLPPRLVTYQEQQPPGDPMGWYHFLLIVTILT

SEQ ID NO: 189074 - protein, 512 aa, Oryza sativa
  Clone ID: PAT_MRT4530_85617C.1.pep
MRKEKIPHQAPFAIQAAQLLGRAIGAGLFAITPAGERGMCCKAIKLGNARACKLRPDGTIEKYKARLVAKGYTQKEGEDFFDTYSPVARLTTIRVLLALAASHGLLVHQMDVKTAFLNGELEEEIYMDQPDGYVLEGQEGMVCKLLKSLYGLKQAPKQWHEKFDTTLTAAGFVVNEADKCVYYRYGGGEGVILCLYVDDILIFGTSLNVIEEVKDYLSKSFEMKDLGEADVILNIKLQRGDEGGITLVQSHYVDKVLSRFGYSDCKPAPTPYDPSVLLRKNRRIARDQLRYSQIIGSLMYLASATRPDISFAVSKLSWFVSNPGDDHWQALERVMRYLKGTMSYGIHYTGYPKVLEGYSDSNWISDADEIKATSGYVFTLGGGAVSWKSCKQTILTRSTMEAELTALDTATVEAEWLRELLMDLPVVEKPVPAILMNCDNQTVIIKVNSSKDNMKSSRHIKRRLKSVRKQKNSGVIALDYVQTARNLADQFTKGLPRNVIDSASREMGLIPT

SEQ ID NO: 189075 - protein, 1107 aa, Oryza sativa
  unsure (1)..(1107): unsure at all Xaa locations
  Clone ID: PAT_MRT4530_85618C.1.pep
MSTTGDNNNTGDKEKEPLVNTNGGNTASNSSRGPFSGYNVSLLPFVLRFLQLSVAVLLRSLIYVDAYSILSMLMLYTSSTVTRSTQITNVMWKARALLWLTVMQCFFVSRGKPSEPPLSPEEEAKFEVADCLFRGALISVLADSIVDVYMHMPSRKDMWDALQAKFRVSDAGSELYVMEQFYDYNMVDDRSVVEQFVAGGIIAKLPPSWSDFATSLKHKRQEFSVTDLIGSLGVEEKARAKDNRGKKKNDGGSSANLVQKKNPHASHNNKKKVKPDVKPKATTNFKKKGQGKAKVDFFVCGKPGHWAKDCLDRKDKKSANMIISEGGGTSGRGSSLLMGNGSLAAVHDVGTVDLKFTSGKIVQLKNMQHVLSIKKNLVSGSLLCKGGFRLVFESNKCVVSKYGTFIGKGYDCGGLFRFSMDDMCNKVVNHVSDDDDESNVWHSRHCHVNFGCMTRLANMSLIPKFTLVKGSKCHTCVQSKQPRKPHRASEVRNLAPLELVHSDLCEMNGVLTKGGKKYFMRVIDNCTRFCYMYLLKTKDEALHYFKIDKAEVENHLERKIKRLRSDRGGEYFSNEFNSFCEEYEIIHERTPPYSPQSNGVAERKNRTLTEMVNAMLDTAGFSKEWWGEAILTVCHVLNRIPTKHKEVTPFKEWERKKLNLSHLHTWGCLVKVNVPIAKKCKLGQKTVDCVFLGYAIHSVGYRFLIVNSRVPNMRVGTITESRDATFFENEFPMKNALSTSSQEPILSPEHFVPIEHIDQMLEENPEEDNIVATRKSKRQRTAKSFGDDYIVYLVDDTPRTIEEAYSSLDADYWKEAVCSEMDSIMSNGTWEVAERPYGCKPVGCKWVFKKKLRSDGTIEKYKARLVAKGYTQKEGDDFFDTYSPVARLTTIRPLMVYSSIRWMLKTAFLNGELEDEIYMDQPDGXKQWHEKFDNTLTSAGFIVNEADKCVYYRYGGGEGVILCLYVDDILIFGTSLNVIGEVKDFLSKSFEMKDLEVADVILNIKLLRGDEGRITLVQSHYMDKVLSRFGYSDCKAAPTPYHPSVLLRKNQRIGKDQLRYSQIIGSLMYLASATRPDISFVVSKLSRFISNPGDDHWHALERVMRAI

SEQ ID NO: 189076 - protein, 425 aa, Oryza sativa
  Clone ID: PAT_MRT4530_85619C.1.pep
MESPDSSSGSAPPRVLRRQQQQPGSAPELPPGFRFHPTDEELVVHYLKKKAASVPLPVTIIAEVDLYKFDPWDLPEKANFGEQEWYFFSPRDRKYPNGARPNRAATSGYWKATGTDKPIMSSGSTREKVGVKKALVFYRGKPPKGVKTNWIMHEYRLTDTSSSAAAVATTRRPPPPITGGSKGAVSLRLDDWVLCRIYKKTNKAGAGQRSMECEDSVEDAVAAYAPSSQQHATAAAGMAGSDGAGGVAAAHGGDYSSLLHHDSHEDTFLVNGLLTAEDAAGLSTGASSLSQLAAAARAAATPCDATKQLLAPSPTPFNWFEAFLPRAKEFPSGLSRSSRDIGDMSLSSTVDRSLSEAGAVAIDTGDAANGANTMPAFINPLGVQGATYQQHQAIMGASLPSESAAAAAACNFQHPFQLSRVNWDS

SEQ ID NO: 189077 - protein, 45 aa, Oryza sativa
  Clone ID: PAT_MRT4530_8561C.1.pep
SAVSALKFTACIVKVGLNLNDLSKDSSFGFFLNAVNSEQTCLYST

SEQ ID NO: 189078 - protein, 1456 aa, Oryza sativa
  Clone ID: PAT_MRT4530_85620C.1.pep
MSGVAAAAIGGGGAAPPPTPTGAGSGAGAPGGGAVNDYNNGGNSASPSSGGPFSGYNLLLLLLMLSHYWYVPVSDIHDAHSMLLVMLRSPYTAYAMIIVSISWIKICRIMTIFPTIQKPDRSFSVVGFAAALKPHAFDGSNYKRWKARALLWLTAMQCFYVSRGKRSEPPLSPEEEAKFEASDCLFRGALISVLADNIVDVYMHMPSGKDMWDALEAKFGVSDAGSELYVMEQFYDYKMVDDRSVVEQAHEIQMLAKELENNNCELPDKFVAGGIIAKLPPSWSDFATSLKHKRQEFSVPDLIGSLGVEEKARAKDVRGKRVEGGSSANMVQKKNPHASHNNKKVKPDVKPKAATNFKKKGKGKAKGDCFVCGKSGHWAKDCPERKDRKSANIVISEGGGTSGTVGRGSFLLMGNGSLAAVHGIAKKRKLGPKTVDCVFLGYAIHSVGYRFLIVNSGVPDMHAGTILESRDATFFENEFPMKYTPSTSSKETVMPHEHFAPIEHDDQTPEENPEEDNIVDTRKSKRQRVAKSFGDDYIVYLVDDTPRTIEEAYSSPDADYWKEAVRSEMDSIMSNGTWEVVERPYGCKPVGCKWVFKKKLRPDGTIEKYKARLVAKGYTQKEGEDFFNTYSPVARLTTIRVLLALAASHGLLVHQMDVKTAFLNGELEEEIYMDQPDGYVLEGQEGMVCKLLKSLYGLKQAPKQWHEKFDTTLTSAGFVVNEADKCVYYRYGGGEGVILCLYVDDILIFGTSLNVIEEVKDYLSKSFEMKDLGEADVILNIKLQRGDEGGITLVQSHYVDKVLSRFGYSDCKPAPTPYDPSVLLRKNRRIARDQLRYSQIIGSLMYLASATRPDISFAVSKLSRFVSNPGDDHWQALERVMRYLKGTMSYGIHYTGYPKVLEGYGDSNWISDADEIKATSGYVFTLGGGAVSWKSCKQTILTRSTMEAELTALDTATVEAEWLRELLMDLPVVEKPVPAILMNCDNQTVIIKVNSSKDNMKSSRHIKRRLKSVRKQKNSGVIALDYVQTARNLADQFTKGLPRFWGVPPARLLIAMSGVAAAATGPPTGAGGTPPPTGAGSGAGAPGGGAVNDYNNGGNSASPSSGGPFSGDGYAFASTENSMVIYNINVAPLIKSNKYTLLAERTRKWEEEKRQERREGKAPAAPAGNRRGEAKQKATAEDIDDGDEDLGFQEPEATVATVDGGACAHASRWSLKAMKRELLAAAPTHEATRRARWSEVALTFDQTDHPPCVARGGQIAMVVSPTVCNVKLGRVLIDGGAALNILSPVAFDAIKALGMVLRPSQPIIGVTLGHTWPLGHIDLPVTFGGSANFRTERVDFDVADLSLPYNAVLGRPALVKFMAAVHYAYLQMKMPGPGGPITVHGDLKVALACMEQHADHLAAASKPAGGDERLSASVPAAPRQRMVTCDEVPVKEVALGDGPSKTTRIGGLLDDK

SEQ ID NO: 189079 - protein, 52 aa, Oryza sativa
  Clone ID: PAT_MRT4530_85621C.1.pep
LHQSTSAQLTTIVVFAKHNSTVICSAHSPPGSLHLVCTSGTHCSHHCVAHTY

SEQ ID NO: 189080 - protein, 243 aa, Oryza sativa
  Clone ID: PAT_MRT4530_85622C.1.pep
MAAALTPVPRWQGKDVGRRAGTSLQCTGLRPQGALPPGCKKTRAGGQNLETELEFFDQDTVNRVLGPAFVDNLYFLQELVQDLSELDEPFTKDENKIAVFQSSWLMVQKKILSSDKLQFRGWDNSPICSLCGIEPETSVHLFMECFYARHVWNNIWLKLGLQIPSLSPFNGDMLEWGKASRKQMIKEQRRYFNGLIIYTTWGIWLQRNDQVFNDAYGSVQQVVNSIITMCKAYDEAISCLCNI

SEQ ID NO: 189081 - protein, 409 aa, Oryza sativa
  unsure (1)..(409): unsure at all Xaa locations
  Clone ID: PAT_MRT4530_85623C.1.pep
MASHAGGSGGGGGGSGRDAGSAQRGPMQGLARQGSLYGLTLNEVQSQLGEPLLSMNLDELLKSVFPDGADLDGGGGGGGIAGQSQPALGLQRQGSITMPPELSKKTVDEVWKGIQDVPKRGAEEGGRWRRVMMSIVNFVDYMGSAHIFRILXAVGKIDXLEIPSSPSSRWWFRACKHQHGQSPSHVAPAADLFGGFVTSQYAYMATHLAPQPLAVATGAVLDPIYSDGQITSPMLGALSDPQTPGRKRCATGEIADKLVERRQKRMIKNRESAARSRARKQAYTNELENKVLRLEEENERLKKQKPTFILSSKVSRKQVTKAMRSATICVLCICILMILQCFASISAVDLGDAAASASGGEGLIRPRKLLQNAPAARSPPSRSAAAVEVEVNASLGKQKPSSKSNPRQN

SEQ ID NO: 189082 - protein, 191 aa, Oryza sativa
  unsure (1)..(191): unsure at all Xaa locations
  Clone ID: PAT_MRT4530_85624C.1.pep
RSAWIDGCKPKVLMPLVYAISKNKGKSLRQVKEDDTWVHDLTLDADSYFTINLVDQLVRXWEAVRNVNLNNEEPDQIVWKFISNRHYTSSSAYHAQCLRAPNTSLNSLFXKIWAPGKCKFHAXLIIQNRVWTSDRLAKGVXQNNSHCPLCRCKAETALHLVTMXGYTKIIXHLVARWVGYQQLVPAQWEEA

SEQ ID NO: 189083 - protein, 191 aa, Oryza sativa
  unsure (1)..(191): unsure at all Xaa locations
  Clone ID: PAT_MRT4530_85625C.1.pep
YTDSWYAGTHGGTSSGIDATIHVRSLFSDARQHWITRRFITLIPLKKRLSKTVLLATLCNPFLGRKRKPVLLLQPPSSTLSCVHPFNGRTLTCPHASPTEADQNVETSGYLPPXTVQDLVDQIEHLQRLNRVPSLEYTMDGFDYRENHRITRNYYRRYWTMCKLAMFGCTETTQMLKELXEASKASPDALV

SEQ ID NO: 189084 - protein, 640 aa, Oryza sativa
  Clone ID: PAT_MRT4530_85626C.1.pep
MAAGNGRMEAALGCLAALPDEVLCAVVDLLPPTDVGRLACVSRLNLCSENDEIYQKPRHFDGFNPTHLYRTRYRCLTSLCSFSFDNGHVERKDDLSLDQFRAQYDGKCPVLLTKLAETWPARTKWTAQQLTHDYGEVPFRISQRSPQKIKMKLKDYVFYMELQHDEDPLYIFDDKFGESAPTLLEDYSVPHLFQEDFFEIMDYDQRPAFRWLIIGPERSGASWHVDPGLTSAWNTLLCGRKRWAMYPPGRVPGGVTVHVSDEDGDVDIETPTSLQWWLDIYPNLAEHEKPLECTQLPGETIFVPSGWWHCVLNLDMTIAVTQNFVNQSNFKHVCLDMAPGYCHKGVCRAGLLAAPDKSIRDIENLPSITSRLNHSDMACKEKRLKSSEPIRTSNNANQCSAFEFSDVHENLGDQVFSYDIDFLSQFLEKEKDHYSSVWSPTNSIGQREAREWLRRLWVLKPELRELIWKGACLAINVDKWYSCLEEISACHSLPPPSEDEKLPVGTGSNPVFIVSGNVIKIYAEGGLGYSIHGLGTELEFYDLLQKLGSPLINHVPEIIASGFLVYLDGVYKTVPWDGNGIPDVLAKYYSLEVSYANGSFPLGLWSKQLFGLSNSTDAPDRPICPYMVTRKCKGDIFARM

SEQ ID NO: 189085 - protein, 175 aa, Oryza sativa
  Clone ID: PAT_MRT4530_85627C.1.pep
MFPVEVAAAAAAAGRMQGEAVVPMMLPPFFMDSGIWPAAAGVVDVAASAEEEAAAAAAAQDRALAASRNHREAEKRRRERIKSHLDRLRAVLACDPKIDKASLLAKAVERVRDLKQRMAGIGEAAPAHLFPTEHDEIVVLASGGGGVCGAGGAAAVFEASVCCDERSDLLPELIE

SEQ ID NO: 189086 - protein, 117 aa, Oryza sativa
  unsure (1)..(117): unsure at all Xaa locations
  Clone ID: PAT_MRT4530_85628C.1.pep
MPLGAAGGAVIGVAGALYPEPEGRILEVPNLXIFMFAELRAATRNFKPDSVLGEGGFGRALELLLVKQSGERGDGEAIAGGAPPHPSPPPLLSPPVVSRAPQSSRMAGCQEEREEER

SEQ ID NO: 189087 - protein, 91 aa, Oryza sativa
  Clone ID: PAT_MRT4530_85629C.1.pep
MDLISATASGDGGFGRGGEERECGGAYLTAAVAAPKESAAAAASRGGAAASSRRPPPCRPISRPTSCFSSFRLAARVNRQIYWMNLYLPNG

SEQ ID NO: 189088 - protein, 221 aa, Oryza sativa
  Clone ID: PAT_MRT4530_8562C.1.pep
DKGLVARTSLILWHTHQNDAGAVRKLLEEDAALVNARDYDSRTPLHVAALHGWHDVAECLIANGADVNAQDRWQNTPLADAEGAKRHAMIELLKEHGGLTYGKTGSHFEPKTIPPPLTNKADWEINPLELDFSKAVIIGKGSFGEILKANWRGTPNAVKRILPSLSDDRLVIQDFKHEVNLLIKLRHPNIVQFLGAVTETKPLMLVTEFLRGGDLHQYLKE

SEQ ID NO: 189089 - protein, 105 aa, Oryza sativa
  unsure (1)..(105): unsure at all Xaa locations
  Clone ID: PAT_MRT4530_85630C.1.pep
RARSYIVYPETNTQAAGRQRTDWGQRDVTQLNRLAAHTTFACWRISEXARSDRPSQQLTSVHGEWDTPRTLSLSTKGVGGTRNATGALDSGLGPSACAFCPFFLV

SEQ ID NO: 189090 - protein, 229 aa, Oryza sativa
  Clone ID: PAT_MRT4530_85631C.1.pep
MAAPAILRLLPLLLLAAAANAATFTITNKCQITVWAAAVPSGGGQQLDPGQQWVIDVPAGTTGGRVWARTGCSFDGSGNGRCQTGDCGGVLRCAAYGQPPNTLAEFALNQFSNLDFFDISLIDGFNVPMDFLPAGDGAGCAKGGPRCEADVAGQCPSELRAPGGCNNACTVFKQDQYCCTGSAANNCGPTNYSQFFKGLCPDAYSYPKDDQTSTFTCPAGTNYQVVFCP

SEQ ID NO: 189091 - protein, 142 aa, Oryza sativa
  unsure (1)..(142): unsure at all Xaa locations
  Clone ID: PAT_MRT4530_85632C.1.pep
GQARFXXTSRAFWNNXPRKQFQGPPXERKERKLPFFKVXLPGSXPISNSGPIPPYQFXLPVPGNLPRRPKPFPFRLRFLFLTQKRPGAEGFPSKGGLPRKETFNPLPSPIGPLPTPKQVTQVGNRKGCAMGVHIECRTMLVG

SEQ ID NO: 189092 - protein, 492 aa, Oryza sativa
  Clone ID: PAT_MRT4530_85633C.1.pep
MDQPSNGFAAGGLFLRHIDGQNASPPSVIVIGGGISGIAAARALSNASFKVTLLESRDRLGGRVHTDYSFGCPIDMGASWLHGVCNENSLAPLIRLLGLRLYRTSGDNSVLYDHDLESYALFDKDGRQVPQEIVTKVGETFEKILKETVKVRAEHEDDMPLIQAISIVLDRNPHLKLDGLQYEVLQWCICRLEAWFATDVDNISLKNWDQEHVLTGGHGLMVHGYDPVIKALAQDLDIHLNHRVTKIIQRYNKTIVCVEDGTSFVADAAIITVPLGVLKANIIKFEPELPDWKLSSISDLGIGIENKIALRFNSVFWPNVEVLGRVAPTSNACGYFLNLHKATGHPVLVCMVAGRFAYEFEKLSDEESVNFVMSQLKKMLPGATEPVQYLVSRWGTDPNSLGSYSCDLVGKPADLYERFCAPVGNLFFAGEAACIDHSGSVHGAYSSGIVAAEDCRRHLSTQLGISDLFQVGKIIMREEMTEVMVPFQISRL

SEQ ID NO: 189093 - protein, 311 aa, Oryza sativa
  Clone ID: PAT_MRT4530_85634C.1.pep
MSFAVVSLCIAWLTIKKNIKYHLPLLNRWTPPTAAAAERHPPPPPVRLPRPCASSHDPVPPPTQPFAPALEAVGASGCATRGDEGERKGEKLGFRLESSRDSDRRRIRFFAVPVLNRKEFRGISPHRRARASRTSTASSRRTPPRKHWICIEDKFRAAGDYVSQKRSPYQQRSSVFGKKKVEPMVKDAAAPGKGGRLKMESSNAQPQDSAYSVPKNPSMTCCRKRTDGATFLEDLKDHIEEFIHASMDEHKTCFKHHPKGQMCKHSDTALLCSFCILDILMMKHFLCFMFRISDVWDVKGCRGAFGGCQGS

SEQ ID NO: 189094 - protein, 153 aa, Oryza sativa
  Clone ID: PAT_MRT4530_85635C.1.pep
PTRPPTRPPTRPVAGRFAYEFEKLSDEESVNFVMSQLKKMLPGATEPVQYLVSRWGTDPNSLGSYSCDLVGKPADLYERFCAPVGNLFFAGEAACIDHSGSVHGAYSSGIVAAEDCRRHLSTQLGISDLFQVGKIIMREEMTEVMVPFQISRL

SEQ ID NO: 189095 - protein, 639 aa, Oryza sativa
  Clone ID: PAT_MRT4530_85636C.1.pep
MPPQVSLQLVVMAADEGSQIWWLVVMSDESGISQADGGKRSEPPLSHEEEAKFEASDCLFRGALFSVLADNIVDVYMHMPSGKDMWDALEAKFGVSDAGSELYVMEQFYDYKMELENNNCELPDKFVAGGIIAKLPPFLSDFATSLKHKRQEFSVNDLIGSLGVEEKARAKDNRGKKIEGGSSANMVQKKNPHASHNNKKVKPDVKPKATTNFKKKGKGKAKGDCFVYGKPGHWAKDCPERNDKKSANIVISEGGGTSGYGKFLPTVLSVFHSPDWWVDTGANIHVGRGSSLLMGNGSLAAIHGVGSKCHTCVQLKQPRKPHKASEARNLAPLELVHSDLCEMNGVLTKGGKKFFMTLIDDCTRFCYLYLLKTKDEALHYFKIYKAEVENQLERKIKRLRSDRGGEYFSNEFTSFCKEFGIIHERTSPYSPQSNGVAERKNRTLTEMVNAMLDTAGLPKEWWGEAILTACHVLNKIPMKHKEITPFEQWERKKLNLSYLRTWGCLAKEAVRSEIDSIMFNGTCEVVERPYGCKPVGCKWVFKKKLRPANGFSTKSLGLMMDVKTAFLNGELEEEIYMDQPDGYALEGQEGMVCKQLKSLYGLKQAPKQWHEKFDTTLTSAGFVVNEADKCVYYRYGGGE

SEQ ID NO: 189096 - protein, 495 aa, Oryza sativa
  Clone ID: PAT_MRT4530_85637C.1.pep
MVKQFVSNALVATRRALTEGMVYRTSRYLRNSVRLRTCTGRRAIKFLGSASSATALVLRGYCCCISAVTKMSTEIGDKKMNDINGGNTASKSSNGTFSGVLADNIVDVYMHIPSGKDMWDALEAKFRVSDAGSELYVMEQFYDYKMVDDRSAVEQAHEIQMLVKELENNNCELPDKFVAGGIIAKLPPSWSDFATSLKHKRQEFSVTDLIGSLGIEEKARAKDNRGKKIEGGSSANLVQKKNPHASHNNNKKVKPDVKPKATTNFKKKGKGKAKGDCFVCGKPGHWAKDCPERKDKKSTNMVISEGGGTLGYVVERPYGCKPIGCKWVFKKKLRPDGTIEKYKARLVAKVSHGLLVHQMDVKTAFLNGELEEEIYMDQPDGYVLEGQEGMVCKLLKSLYGLKQAPKQWHEKFDNTLTSAGFVVNEADKCVYYRYGGGEGVILCLYVDDILIFGTSLNVIEEVKDFLSKSFEMMDLGVADVILNIKLLRVTMWTRS

SEQ ID NO: 189097 - protein, 815 aa, Oryza sativa
  Clone ID: PAT_MRT4530_85638C.1.pep
MRDYSLFVNVYFVFTNMSNTGDNGNTGDKALISVLADNIVDVYMHMPSRKDMWDALEAKFEVSDTGSELYVMEQFYDYKMMLAKELENNNCELPDKFVAGGIIAKLPPSWSDFATSLKHKRQEFSVTDLVSSLGVEEKARAKDNWGKNIEGGSTANLVQKKNPHASHNNKKVKSDVKPKATTNFKKKGKGKAKGDCFVCGSKCHTCVQSKQPRKPHKASEARNLAPLELAHSDLCEMNGVLTKGGKKYFMTLIDDCTRFCYVYLLKTNDKALHYFKTYKAEENPEKDNIIDTRKSKRQRVAKSFGDDYIVYLVDDTPKTIEEAYSSPDTDYWKEAVRSEMDSIMSTGTWEVVERPYGCKPLGCKWVFRKKLNPNGTIEKYKARLVAKGYTQKEGEDFFDTYSPVARLTTIRVLLALAASHGLLVHQMDVKTAFLNGELEEEIYMDQPNGYVLEGQEEMVCKLLKSLYGLKQAPKKWHEKFNTTVTSAGFIVNKADKCVYYRYGGGEGVIFCLYVDDILIFGTSLNVIEEVKDFLSKSFEMKDLGVADVTLVQSHYVDKVLSRFGYSDCKPATTPYDPNVLLRKNRRIARHQLRYSQIIGSLMYLASATRPDISCDVSKLSRFVSNPRDDHWQALERVMRYLKGTMSYGIHYTGYPKVLEGYSGSNWISDADEIKATSGYVFTLGVGAVSWKSCKQTILTRSTMEAELTALDTTTVEAKWLCELLMDLPVVEKPVPAILMNCDNQIVIIKVNSSKDNMKSSRHVKRRLKSVRKQKNSGVITLDYVQTAKNLADQFTKGLPRNVIDSASREMGLRPT

SEQ ID NO: 189098 - protein, 71 aa, Oryza sativa
  unsure (1)..(71): unsure at all Xaa locations
  Clone ID: PAT_MRT4530_85639C.1.pep
SDDLSLMSDEYDSDLCSMTDEXCLIGIANVDADDWRNEIVAYLKNLSVDEKHEDWDICLTQCRSKARLRAC

SEQ ID NO: 189099 - protein, 668 aa, Oryza sativa
  Clone ID: PAT_MRT4530_8563C.1.pep
MSAAVGGAEFHGFRGGGGGAAQLQRSRMLGRPLRVATPHAAAPAGGGGSSSASIRAVSAPLKKDASEVKRSKVEIIKEKSNFLRYPLNEELVSEAPNINDSAVQLIKFHGSYQQTDRDVRGQKNYSFMLRTKNPCGKVPNQLYLAMDTLADEFGIGTLRLTTRQTFQLHGVLKKNLKTVISTVIKNMGSSLGACGDLNRNVLAPAAPYVRKDILFAQETAENIAALLTPQSGAYYDLWVDGEKIMSAEEPPEVTKARNDNTYGTNFPDSPEPIYGTQYLPRKFKIAVTVAGDNSVDILTNDIGVVVVSDSAGEPVGFNIYVGGGMGRTHRVETTFPRLADPLGYVPKEDILYAIKAIVVTQRENGRRDDRRYSRMKYLIDNWGIEKFRAEVEKYYGKKFEDSRPLPEWQFNSYLGWQEQVTAVFLLPYPRSNHVVTGGLGNSGHTPGDGKLFYGVHVDNGRVAGQAKKTLREIIEKYNLEVSITPNQNLILCGIDQAWKDPITAALAQSGLLEPKDVDPLNITSMACPALPLCPLAQTEAERGILPILKRIRAVFDKVGIKDHESVVVRITGCPNGCARPYMAEVGFVGDGPNSYQIWLGGTPNQSTLAETFMNKVKLQDIEKVLEPLFSYWNSTRQEGESFGSFTRRTGFDKLKEVVNKWAESASAA

SEQ ID NO: 189100 - protein, 216 aa, Oryza sativa
  Clone ID: PAT_MRT4530_85640C.1.pep
LEEEIYMDQPDGYVLEGQEGMVCKLLKSLYGLKQAPKQWHEKFDTTLTSAGFVVNEADKCVYYRYGGREGVILCLYVDDILIFRTSLNVIEEVKDYLSKSFEMKDLGEADVILNIKLQRGDEGGITLVQSHYVDKVLSRFGYSDCKPAPTPYDPSVLLRKNRRIARDQLRYSQIIGSLMYLASATRPDISFAVSKLSRDVDLQNISEGTHLYEFDC

SEQ ID NO: 189101 - protein, 111 aa, Oryza sativa
  Clone ID: PAT_MRT4530_85641C.1.pep
RRLSQTPMEIGWPTDVRHVDHVNFHRVHGLQGPPVELQPEVCGNAPSARAAADNYGVRCVTESMHCSYDARGNSVPSILLLMQRWLYKHGGLKAEGIFRIGGDDAQEQAVR

SEQ ID NO: 189102 - protein, 931 aa, Oryza sativa
  Clone ID: PAT_MRT4530_85642C.1.pep
MSNTGHNGNTGDKEKEVPVNINGVNTASNSNRGPFLGSFSVVGFAATLKHHAFDGSNYKRWKARALLWLTAMQCFYVSRGKQSEPPLSSEKEAKFEASDCLFRGALISVLADNIVDVYIHMPSRKDMYDALEAKFRVSDAGNELYVMEQFYDYKMVDDHSVVQQAHEIQMLAKELENNNCELPGKFVAGGIIAKLPPSWLDFATSLKHKRQKFSVTDLIGSLGVEEKERAKDNRGNKIEGGTRSPPTWLLARVDEHWGTATTNFKKKGKGKAKGNCFVCGKPRHWAKNCPDRRDKKSANMVISKGGGTLGYGRERFLFVDGKRIACGCSWCCMLTKGGNKYFMTLIDDCTRFCYVYLLKTKDEALHYFKIYKAETLRDFPRNGWGEAILTAFHVLNKIPVKHNLAKVNVPIAKKRKLGPKTVDCVFLGYAILSVGYWFLIVNSGVPDMCMGTITESRDATFFDNEFPMKNTPNTSSQEPVLPHEHFAPIEHNDQTPEENPEEDNIVDTRKSKRQRVAKFFGDDYIVYLMDYTPRTIEEAYSSPDADYWKEVKARLVAKGYTQKEREDFFDTYSLVARLTTIQVLLALAASHGLLVHQMDVKTAFLNRELEEKIYMDQPDEYVLEGQEGMVCKLLKSLYGLKQAPKQWHEKFDTTLTSAGFVVNEVDKCVYYRYGGGEGVILCLYVDDILIFGTSLKVIEEVKDFLSKSFEMKDLRVADVILNIKLLRGDEGGIILVQSHYVDKMIIGKLWKRVMRYLKGTVSYGIHYTGYPKVLEGYSDSNWISDADEIEATSGYVFTLGGGAVSWKSCKQTILTRSTMEAELTALDTATVEAEWLRELLMDLPVVKKPVPAILMNCDNQTMIIKVNSSKDNMKSARHVKRRLKSVGKQKKSRVIALDYVQTAKNLVDQFTKGLLHNVIDSASREMGLRPT

SEQ ID NO: 189103 - protein, 65 aa, Oryza sativa
  Clone ID: PAT_MRT4530_85643C.1.pep
SCPARAHVVAASAPKMCHDGSYTHMQRVYHLWYAGVLTVFTSFIRWGHMFHLEQLASMPFARSVY

SEQ ID NO: 189104 - protein, 1040 aa, Oryza sativa
  Clone ID: PAT_MRT4530_85644C.1.pep
MQCFYVSRGKRSEPPLSPEEEAKFEASDCLFRGALISVLADNIVDVYMHMPSGKDMWDALEAKFGVSDAGSELYVMEQFYDYKMVDDRSVVEQAHEIQMLAKELENNNCELPDKFVAGGIIAKLPPSWSDFATSLKHKRQEFSVPDLIGSLGVEEKARAKDVRGKKVEGGSSANMVQKKNPHASHNNKKVKPDVKPKAATNFKKKGKGKAKGDCFVCGKSGHWAKDCPERKDRKSANMIISEGGGTSGDATFFENEFPMKYTPSTSSKETVMPHEHFAPIEHNDQTPEENPEEDNIVDTRKSKRQRVAKSFGDDYIVYLVDDTPRTIEEAYLSPDADYWKEAVRSEMDSIMSNGTWEVVERPYGCKPVGCKWVFKKKLRPDGTIEKYKARLVAKGYTQKEGEDFFDTYSPVARLTTIRVLLALAASHGLLVHQMDVKTAFLNGELEEEIYMDQPDGYVLEGQEGMVCKLLKSLYGLKQAPKQWHEKFDTTLTSAGFVVNEADKCVYYRYGGGEGVILCLYVDDILIFGTSLNVIEEVKDYLSKSDLGEADVILNIKLQRGDEGGITLVQSHYVDKVLSRFGYSDCKPAPTPYDPSVLLRKNRRIARDQLRYSQIIGSLMYLASATRPDISFAVSKLSRFVSNPGDDHWQALERVMRYLKGTMSYGIHYTGYPKVLEGYSDSNWISDADEIKATSGYAFTLGGGAVSWKSCKQTILTRSTMEAELTALDTATVEAEWLRELLMDLPVVEKPVPAILMNCDNQTVIIKVNSSKDNMKSSRHIKRRLKSVRKQKNSGVIALDYVQTARNLADQFTKGLPPTNPRSHDSLRNSASTFFLLIDKEAASLIRVPRFFPGFWGVPPARLLIAMSGVAAAAIGGGGAPPPTPTGAGSGAGAPGGGAVNDYNNGGNSASPSSGGPFSGTTFRFRRANYVTRNFAIAAVTVFFPRPEEGPSALVNSAHHQFDRVRRCEVVGEMSSGGEEGKTSWPEVVGLRAEEAKKVILKDMPDADIVVVPVGTPVTMDFRPNRVRIFVDTVAGTPTIG

SEQ ID NO: 189105 - protein, 638 aa, Oryza sativa
  Clone ID: PAT_MRT4530_85645C.1.pep
MSTTGDNNNTRDKEEPPVNTNGGNTVSNSSGGPFSGYNVSLLPFVLRFLQLSVAILLRSLVYVDAYSILSTLKLYTSSTVTRSTHIANVMFIVLIFWIKICRIMTKFPTIQKLDSVHADSIVDVYMHMPSGKDMWDSLEAKFGVSDADSELYVMEQFYDYNMVDDRSVVEHAHEIQMLAKELENNNCELPDKFVAGGIIAKLPPSWSDFGTSLKHKRQEFSVTDLIGSLGVEEKTRAKDNRDKKIEGGSSANLVQKKNPHASHNKNKKVKPDVKPKATINFKNKDKGKAKGDCFVCGKPRHWAKDCPECMDKKSANMVISEGGGTSGYGRERFLLVDGKRIVCGCSWCRFCYVYLLKTKDEALHYFKIYKAEVENQLERKIKRLRSGRGGEYFSNEFTSLCEEYGIIHERTPPYSPQSNGVAEKKNRTLTEMVNAMLDTARLSKEWWGEAILTACHVLNRIPTMHKELTPFEEWERKKLNLPHLRTWGCLAKVNVSIAKKRKLGPKTVDCVFLGYAIHSVGYRFLTVNSGVPDMRVGIITESRDATFFENEFPMKNAPSTSSQEPILSPEHFVPIEHIDQMLEENSEEDNIVATQKSKRQRTAKSFGDDYVVYLVDDTPRTIEEAYSSPDTDYWKEAV

SEQ ID NO: 189106 - protein, 797 aa, Oryza sativa
  unsure (1)..(797): unsure at all Xaa locations
  Clone ID: PAT_MRT4530_85646C.1.pep
MTSLASSATGRENNPLEFYSLPISPNIEQRSFSVVGFAAALKPHAFDGSNYKRWKTRALLWLTVMQCFYVSRGKRSEPPLSPEEEVKFEASDCLFRGALISVLADNIVDVYMHMPSGKDMWDALEAKFGVSDAGSELYVMEQFYDYKMFVVGGIIAKLPTSWSDFATSLKHKRQEFSVSDLISSLGVEENARAKDNRDKKVEGGSSANMVQKKNPHASHNNKKFKPDVKPMATTNFKKKGKGKAKGDCFVCGKSGYWAKDCPKRKDRKSANMVTSEGRGTSGYDWWVDTGANIHVGRGSSLLMGNGSLTAVHGVDEALHYFKTYKAEVENQLERKIKRLRSNRGGEYFSNEFTSFCEEFGIIHERTPPYSPQSNGVAERKNRTLTEMVNAMLDTXGLSKEWWXKEVTPFEKWERKKLNLSYLRTWGCLAKVNVPIAKKRKLVPNTVDCVFLGYAIHSVGYRFLIVNSRVPNMRVGTIIESRDATFFENEFPMKNTPSTSSQETVISYEHFAPIEHNDQTPEGNREEDSIVDTRRSKRQRVAKSFGDDCIIYLVDDTPRTIEEAYSSPDADYWKEAVHSEMDSIMSNGTWEVVEHPYGCKPVGCKWVFKKKLRPDGTIEKYKARLVAKASHGLLVHQMDVKTAFLNGELEEIYMDQPDCLNVIEVVKDFLSKSFEMKDLGEADVILNIKLLRGDEGGITLVQSHYVDKVLSRFGYSDCMPDPTPYDPSVLLRKNRRIARDQLRYSQIIGSLMYLASTTRPDISFADGLYLNVIQVAFLSRDVDLKNISEGTHLYEFDC

SEQ ID NO: 189107 - protein, 813 aa, Oryza sativa
  Clone ID: PAT_MRT4530_85647C.1.pep
MDLALQELARRIFCGVQIAFQEWPESRFGSLPHASAVDRASVPCAISCSPSLPLPRWLSSPPPDVFVRPDLCTAHLLLPDPILCARCLRSSVRLRTCTGRRAIKFLGSASSATALVLRGYCCYIGAFTKMSTEIGDKKMNDINGGNTASKSSGGTFSGVLADNIVDVYMHMPSGKDMWDALKAKFGAHEIQMLAKELENNNCELPDKFVAGVIIAKLPPSWTDFGTSLKHKRQEFSVTDLIGSLGVEEKARAKDNRGKKIEGGSSANLVQKKNPHASHNNNKKVKPDVKPKATTNFKKKGKGKAKGGCFVCGKSGYWAKDCPERKDKKSGNMVISEGGGTSRYGCKWVFKEKLRPDGTIEKYKARLVAKGYTQKEGEDFFDTYSSVARLTTIRVLLALAASHGLLVHQMDVKTAFLNGELDEEIYMDQPDGYVLEGQKGMVCKLLKSLYGLKQAPKQWHEKFDNTLTSAGFVVNEADKCVYYRYGGGEGVILCLYVDDILIFETSLNVIEEVKDFLSKSFEMKDFDCKAAPTPYDPSVLLRKNRRIARDQLRYSKIIGSLMYLASATRPDISFAVNKLGRFVSNPGDDHWHALERVMRYLKGIMSYEIHYVGYPKVLEGYSESNWIFDADEIKATSGYVFTLGGGAVSWKSCKQTILTRSTMEAELTALDTATVKAEWLRELLMDLPVVEKPVPAILMNCDNQTVIIKVNSSKDNMKSSRHVKRRLKCLRSSVRLRTCTGRRAIKFLGSASSATALVLRGYCCYIGAFTKMSTEIGDKKMNDINGGNTASKSSGMGGARPTPAPPGGFATGGG

SEQ ID NO: 189108 - protein, 88 aa, Oryza sativa
  unsure (1)..(88): unsure at all Xaa locations
  Clone ID: PAT_MRT4530_85648C.1.pep
KKKNKKKGKKKKRKRKDKKKRKNKXNKKRKXKKSKKVERKKNRKKKXKRESKIRKKYSKKQAHIEKKNQKKKKEDKNNQKDKKIIQSP

SEQ ID NO: 189109 - protein, 371 aa, Oryza sativa
  Clone ID: PAT_MRT4530_85649C.1.pep
MRILVGQPLKQPPNYISEDFMVSVATGTGSNPDYGFDSLFEDKGCCKGLNEFLIYGTSDFVTICKEVYVRTRRVRLLGLEGAGKTSLLKALLGQFKERSKAVLECIHVDLHGKGVSNGLCYVDSATVNLQELPLEVRQFKEELQLGIHDLSRKTDLVIVVHNLAHRIPQYHQSNTSQPQPALSLLLDEAKALGIPWILAITNKFSVSAHEQNALITSAMEAYQASPDMTKVVNSSPFLMPSATNSLRPISSASGSLRNENPSGRAAFYPVNFSLSPFQRKDIVMHVEGVTALRQLVHQVIHSNEEPAFEELSRERLSLELEREKAASLQGKRKPQKRDGSVTAAAVGASLGAGLGVVMAVIMGAASALRKP

SEQ ID NO: 189110 - protein, 79 aa, Oryza sativa
  Clone ID: PAT_MRT4530_8564C.1.pep
DCSVIGEALSVSPESYRLTLDISYYNIMLSSDPSMESTNNHTSALHTIRYFAGFAFVYFEDERDGDEAIRALDGYPFGP

SEQ ID NO: 189111 - protein, 1329 aa, Oryza sativa
  Clone ID: PAT_MRT4530_85650C.1.pep
MSGVAAAATGPPTGAGDTPPPTGAGSGAGAPGGGVVNDYNNGGNSASPSSGGPFSGYNLLLLLLLLALFLFLFPLLALYYVRYVLVPVLHNASSMLSRYCASMVSRGKRSEPPLSPEEEAKFEASDCLFRGALISVLADNIVDVYMHMPSGKDMWDALEAKFGVSDAGSELYVMEQFYDYKMVDDRSVVEQAHEIQMLAKELENNNCELPDKFVAGGIIAKLPPSWSDFATSLKHKRQEFSVPDLIGSLGVEEKARAKDVRGKRVEGGSSANMVQKKNPHASHNNKKVKPDVKPKAATNFKKKGKGKAKGDCFVCGKSGHWAKDCPERKDRKSANMIISEGGGTSGTVGRGSFLLMGNGSLAAVHGIGTVDLKFTSGKTVQLKNVQHVPSIKKNLVSGSLLCREGFRLVFESNKCVVSKYGTFVGKGYDSGGLFRFSLNDMCNNHNAVNHISENDESNVWHSRLCHVNFGCMTRLANMSLIPKFTLVKGSKCHTCVQSKQPRKPHKASEARNLAPLELVHSDLCEMNGVLTKGGKKYFMTLIDDCTRFCYVYLLKTKDEALHYFKIYKAEVENQLEMKIKRLRSDRGGEYFSNEFASFCEEFGIIHEMTPPYSPQSNGVAERKNRTLTEMVNAMLDTAGLSKEWWGEAVLTACHVLNKIPMKHKEVTPFEEWERKKLNLSYLRTWGCLAKVNVPIAKKRKLGPKTVDCVFLGYAIHSVGYRFLIVNSGVPDMHAGTILESRDATFFENEFPMKYTPSTSSKETVMPHEHFAPIEHDDQTPEENPEEDNIVDTRKSKRQRVAKSFGDDYIVYLVDDTPRTIEEAYSSPDADYWKEAVRSEMDSIMSNGTWEVVERPYGCKPVGCKWVFKKKLRPDGTIEKYKARLVAKGYTQKEGEDFFNTYSPVARLTTIRVLLALAASHGLLVHQMDVKTAFLNGELEEEIYMDQPDGYVLEGQEGMVCKLLKSLYGLKQAPKQWHEKFDTTLTSAGFVVNEADKCVYYRYGGGEGVILCLYVDDILIFGTSLNVIEEVKDYLSKSFEMKDLGEADVILNIKLQRGDEGGITLVQSHYVDKVLSRFGYSDCKPAPTPYDPSVLLRKNRRIARDQLRYSQIIGSLMYLASATRPDISFAVSKLSRFVSNPGDDHWQALERVMRYLKGTMSYGIHYTGYPKVLEGYGDSNWISDADEIKATSGYVFTLGGGAVSWKSCKQTILTRSTMEAELTALDTATVEAEWLRELLMDLPVVEKPVPAILMNCDNQTVIIKVNSSKDNMKSSRHIKRRLKSVRKQKNSGVIALDYVQTARNLADQFTKGLPRNVIDSASREMGLIPT

SEQ ID NO: 189112 - protein, 989 aa, Oryza sativa
  Clone ID: PAT_MRT4530_85651C.1.pep
MENGEIEGAADDGVPVPAPPNGRRYRPVGSSDRAVIQMTSMEPGSSSSTAVAAVSGITPQPPRNLTVDPSMQEDHTVSQGDSKLELFGFDSLVNILGLKSMTGEQIQAPSSPRDGEDVAITIGRPKETGPKFGTMMGVFVPCLQNILGIIYYIRFTWIVGMAGVWQSLVLVSFCGACTFLTGISLSAIATNGAMKGGGPYYLIGRALGPEVGVSIGLCFFLGNAVAGSMYVLGAVETFLDAVPSAGFFKESVTVVNNTLVNGTATASTATISTPSLHDLQVYGVIVTILLCFIVFGGVKIINKVAPAFLIPVLFSLLCIYLGVFIAPRHNAPKGITGLSITTFKDNWGSEYQRTNNAGVPDPNGSIYWDFNALVGLFFPAVTGIMAGSNRSASLKDTQRSIPIGTLSATLTTTAMYLFSVLLFGALATREELLTDRLLTATVAWPAPAVIYIGIILSTLGAALQSLTGAPRLLAAIANDDILPVLNYFKVSEGAEPHSATLFTAFICICCVVIGNLDLITPTITMFFLLCYAGVNLSCFLLDLLDAPSWRPRWKFHHWSLSLVGALLCVVIMFLISWSFTVVSLALASLIYYYVSLKGKAGDWGDGFKSAYFQLALRSLRSLGANQVHPKNWYPIPLIFCRPWGKLPENVPCHPKLADFANCMKKKGRGMSIFVSIIDGDYHELAEDAKTACRQLDTYIEYKRCEGVAEIIVAPSMSEGFRSIVQTMGLGNLKPNIIVMRYPEIWRRENLIQIPSTFVSIINDCIIANKAVVIVKGLDEWPNEYQRQYGTIDLYWIVRDGGLMLLLSQLLLTKETFESCKIQVFCIAEEDTDAEELKADVKKFLYDLRMHAEVIVVTMKSWEPHMESSSSGAPQDDSQEAYTSAQRRISTYLSEMKETAQREGHPLMEDGKQVVVNEQKIEKFLYTMFKLNSTILRYSRMAAVVLVSLPPPPLNHPAYFYMEYMDLLVENVPRMLIVRGYRRDVVTFFT

SEQ ID NO: 189113 - protein, 104 aa, Oryza sativa
  unsure (1)..(104): unsure at all Xaa locations
  Clone ID: PAT_MRT4530_85652C.1.pep
VXXXFXXEGAARRKTRTGXPCGRARTPAVXXXADTAAGRVVXCAAAWPMMSTRRRPSRRSXQXHPXPVAXRXRGGRSXRRRSPPWIKNELPXRDSSSSCRILQP

SEQ ID NO: 189114 - protein, 75 aa, Oryza sativa
  Clone ID: PAT_MRT4530_85653C.1.pep
LEILTAVSRYAWMDGFSAGVMSTFSVLTSDDVMYAAMYSTVQVVTYSNMASSYHSMFADAIVKIGPVGVLAVTMR

SEQ ID NO: 189115 - protein, 137 aa, Oryza sativa
  unsure (1)..(137): unsure at all Xaa locations
  Clone ID: PAT_MRT4530_85654C.1.pep
CKRVTSNEGAIPFLAQTFFPPKARASPPNPNPFKYPHPLPPPPTNPRLPHPALTDTSGPHXPHASPAPPRRPPPPRAXRRPPPLPPPRRPRPPPRRQAPAPXPPSPAPPLPRRLRLPPPRPRRLPLLLRPGTARAAR

SEQ ID NO: 189116 - protein, 170 aa, Oryza sativa
  Clone ID: PAT_MRT4530_85655C.1.pep
RRASCASARSRRVTGCASSATARTRSTRRASTSGSTRARPPARSAAPPSSPPPTTPTPPPSPPPPGTTSPPSDPCRQEPILLSTQHPLPPQEQQGFPPPFSTNGSNPIKMEEHTTQEKRDRERNQWRKKMRGERGGVCGGGVLLVGEALIMRRTRMATCTALDLVNFSPS

SEQ ID NO: 189117 - protein, 1897 aa, Oryza sativa
  Clone ID: PAT_MRT4530_85656C.1.pep
MFPFLNLSVSISHLARQRYGSVDDYITRYPTDPFDRFWEAALRYKFPFLNMTTNQDVTKLPGNDDFQVPMPILQKASTISSNFSEFNVSVIFPDNMKNIDNINNIDYRSLELLPIFHFADIGGNNQNRTFDIYNDGNLMFPNYIPPLFRAESTYQSGKFLRKRGLNFTLRKTPSSELQPLINAFEVYSLVHTDNLTTSPDDGKSAEQEDYSIYEEEAPLHIDIKRFTYAELKLITNNFQSIIGKGGFGTVYHGILENNDEVAVKVLVETSIAESKDFLPERKSSAVMVGITYQRRSRTGLQDTASGDAAQRTPSIVHRDVKTPNILLDKNLVAKISDFGLSRAFNAAHTHISTVVAGTLGYLDPEYHATFQLTVKTDVYSFGIVLLEIVTGQPPVFMDPQTVHLPNWVRQKIDKGSIHDVVDKKLLDQYDATHLQTVIDLAMNCLENTSIDRPSMTEVVSVLKVLFTVAISSEKRSVTSTPQEKNVMDADIPRQFHLMISGATTTSYDNEGSSSQSGPTAAVPTHVPPAAAATATAEVSDPGVLSSDMRARTLAPSSNAKTEGFDGDQLQLLGWYQADMDIVVAAHPGRGDTSPWRVSSCSKKYLIRATFTYGNYDGLNSSEKGSLFIFGLHIGVNFWTTVSRKIRLTNFIKREGFPTDQYDRFWEGWVFTMHTFPWVNKSSNGKVAELPNIDTFGLPPAILGSASTINGNFSWLNISVSASNSLATDLELLPVFHFVELGNNGSKRIFDIYNVDEPQALFSNFSPPSFLSSMFHNWFLRKGRRAYFQLRKTPDSQLPPLINAYEVYSRVQVENFTTASSDVDSMKTIKEKYMVIKNWNGDPCSPREYIWNGLTCTYPNGGQNPRIVEIDLSNNQLNGSIPDSILQRYKAGKSRKSEEEDYDMYEEETPLHIDIRRFTYAELKLITNNFQSIIGKGGFGTVYHGILENNDEVAVKVLVETSIAESKDFLPETPNILLDKNLVAKISDFGLSRAFNAAHTHISTVAAGTLGYLDPEYHATFQLTVKTDVYSFGIVLLEIVTGQPPVFMDPQTVHLPNWVRQKIANGSVHDVVDKKLLDQYDATHLQTVIDLAMNCLENASIDRPSMTEVVSVLKAGAAARCGHRHRPRPYLGCPVKELTNPSDMFRQIELFSSMHRHVHAQPPAGFLSIDCGYTDSAGYDDKNTMLPYVSDKGYIKGGKTFSILSQYMKEAANKQEETLRSFPDGQRNCYTLPTNRSKKYLIRATFTYGNYDGRNSSESGSPFLFGLHIGINFWTMVNLTKLPSSNTIWKELIMVAPGNSVSVCLINNELGTPFISTLDLRPLQDTMYPFVNVSVAVSYFSRQRYGQVNDVITRYPEDVYDRFWEGAFHTRSYPWINLNTTQEVKRLPGDEKFMVPNTILQKASTINITFSWLNITVRGANNLLGLGDLELLPVFHFAEIASNTTRLFDIYSDSEELFANFSPSPFQVDSMYQNGRFLPGVSSTFTLRKQPTSQPPLINAFEVYSLVRIATASDDELKTITNNFQSIIGKGGFGMVYHGILDNGEEVAVKVLRETSITLSKDFLPEVQILSKVQHKNLVTFLGYCHNKKCLALVYDFMARGNLQEVLRGGLEYLHESCTPPIVHRDVKTANILLDKNLVAMISDFGLSRSYTPAHTHISTVAAGTVGYLDPEYHATFHLTVKADVYSFGIVLLEIITGQPSVLVDSEPVHLPNWVRQKIAEGSIHDAVDSRLRHQYDATSIQSVIDLAMSCVENTSTDRPSMTDIVIKLKECLPAGTGEMQLVSRSYKQKEAMDADIARQFQLLISGVSIESIEGNSSGTTELRYPSGSQAAAHRPSLHVRRLHRQPWCFLSPQPGIPSSGYVCRRRGELPAEQARVADSKQTPSQPPPLRSYRRLAR

SEQ ID NO: 189118 - protein, 225 aa, Oryza sativa
  Clone ID: PAT_MRT4530_85657C.1.pep
QVSAYSFFKRALFALFGRMSNSDKTTAGRHRRLSYGEICAKIIRTCVSGRRPRDASSDWLFGFDFEETFFRDYTIYALSWLDAAEVANLESKRNDGNVWLHDQFDAFPGRNQSQVCMPIIYEVARIGLEEGFNDRVCERSRMHALGPEHVRALMSELRTPGSDTSAVAVAAAAGGTCVGTAAEASLSSLSGIGAEWIGDIRVSSLRKVCPSSFLVSISLLNEDFL

SEQ ID NO: 189119 - protein, 130 aa, Oryza sativa
  Clone ID: PAT_MRT4530_85658C.1.pep
YFQLRKTPDSQLPPLINAYEVYSRVQVENFTTASSDVDSMKTIKEKYMVIKNWNGDPCSPREYIWNGLTCTYPNGGQNPRIVEINLSGSGLQGELEISFMKMSSLKKLDLSHNNLTGTIPDYQVNSLTVM

SEQ ID NO: 189120 - protein, 187 aa, Oryza sativa
  Clone ID: PAT_MRT4530_85659C.1.pep
MGQTLRGAAGRVRTPPTPAPPRPHHLPPAPPSPAGAGGAAAQDRLRVFQDDVTTQPKDAPGVLKERDPSYDEMLKHMVGRITTKPGGKPEMGEAFVVDQYNRPLPRVRTSRPEPGEGGHRQLPPGTISVAHVHEIIQLYQGKSSNHPGPMSVDKIASKFRVEASVVQNIVQFVSLPQEEHVTKKEEY

SEQ ID NO: 189121 - protein, 311 aa, Oryza sativa
  Clone ID: PAT_MRT4530_8565C.1.pep
MAEVENTTITTDDDEIHVPPVLGEIKDIGIDPEISMAKEDKEKTTFIMPFDVFCYTKMPFELISVGNMYQREIQGALGDLIGRNVVAYVDDVVVKTKTSDKLIDDMRETFNNLRRHRLKLNPEKWTFLVPSGKLLSFLVSKRGIKANLEKIKAIENMNSPTRLKEPMEELFPYIAATPYSVSTVIVVERDKAQHPVYYVNEALHDAKVNANDLFYGIAGYIDSGWRTDPMEHMAFRDDEQFLLDEINESRRQYWVDEEGNEDPNQYMNEERSEEVDEEGNEDEQQDNQSNIGSKRVRGQWGLARKVEGRRL

SEQ ID NO: 189122 - protein, 118 aa, Oryza sativa
  Clone ID: PAT_MRT4530_85660C.1.pep
PPINRPPCSKRPPSPAPTPSYPFLAAGGPSLGPSPFFTKLEPRVAMGFIINKPPQGWVGATPGYFFQKLCECSNLPPTLACGGFQLNLLGARAPEKVSWSGFSCTLCFPFLVSWRWPF

SEQ ID NO: 189123 - protein, 182 aa, Oryza sativa
  unsure (1)..(182): unsure at all Xaa locations
  Clone ID: PAT_MRT4530_85661C.1.pep
ISLHIDIRRFTYAELKLITNNFQSIIGKGGFGTVYHGILENNDEVAVKVLVETSIAESKDFLPEVQTLSKVHHKNLVALVGYCQNKKCLALVYDFMPRGNLQQLLRGGYDSLNWEERLHIALDAAQGLEYLHESCTPSIVHRDVKTPNILLDKNLVARYLIWALTAFNXCYTHISTGAAGTL

SEQ ID NO: 189124 - protein, 81 aa, Oryza sativa
  Clone ID: PAT_MRT4530_85662C.1.pep
LIFSSWWSHVVRGVSKEAKKELNSVIILVAWEIWKHRNDCIFNNATPSTAAVLDALARESLLLCTAGARALHELLARSLST

SEQ ID NO: 189125 - protein, 78 aa, Oryza sativa
  unsure (1)..(78): unsure at all Xaa locations
  Clone ID: PAT_MRT4530_85663C.1.pep
MDDEPINAHKLLKEQFVSNLTGSSLLEIAALSTVXPILPLVLMDKSDVWHFSEHRTVYLLQNVSDVSSIKEKCFIAST

SEQ ID NO: 189126 - protein, 93 aa, Oryza sativa
  Clone ID: PAT_MRT4530_85664C.1.pep
VDLTVGFTAENKTNRSRGTTELKGLMSIIFIVLSIVALEKFQSLSCENMWENRRSIANEYNGFSSISRSWSCCFISIWSLDRATGATGKCKSQ

SEQ ID NO: 189127 - protein, 72 aa, Oryza sativa
  Clone ID: PAT_MRT4530_85665C.1.pep
SPPKGGNCFFNHFGGGAKPFPPWILVFFKIQEALSWARPQPIGPPRLGGLIFKLRFLFSREGPGPPFFGGGA

SEQ ID NO: 189128 - protein, 71 aa, Oryza sativa
  Clone ID: PAT_MRT4530_85666C.1.pep
YNIDNVQCTREDDRERCELDIQGRGCNEEVYPWTMTERCVRRMQARRESRSWSRLQPSWVFFVQHLYIYSF

SEQ ID NO: 189129 - protein, 965 aa, Oryza sativa
  unsure (1)..(965): unsure at all Xaa locations
  Clone ID: PAT_MRT4530_85667C.1.pep
MALLGKTSCKAAVFLAALVVMATAFSSSHAAQGQDGRAIRFLGSARRDYSLFVNIYFIFTNMSNTGDKEKETPCFYVSRGKRSEPPLSPEEEAKFEASDCLFRGALISVLADNIVDVYMHMPSGKDMWDALEAKFGISDAGSELYVMEQFYDYKMVDDRSVVEQAHEIQMLAKELENNNCELPDKFVAGDIIAKLPPSWSDFATSLKHKRQEFSVPDLIGSLGVEEKARAKDVRGKKVEGGSSANMVQKKNPHASHNNKKVKPDVKPKAATNFKKKSKGKAKGDCFVCGKSGHWAKDCPERKDRKSANMIISEGGGTSGYGXRGSSLLMGNGSLAAVHXVGYRFLIVNSGVPDMHVGTILESRDATFFENEFPMKYTPSTSSKETVMPHEHFTPIEHNDQTPEENPEEDNIVDTRKSKRQRVVKSFGDDYIVYLVDDTPRTIEEAYSSPDADYWKEAVRSEMDSIMSNGTWEIVERPYGCKPVGCKWVFKKKLRPDGTIEKYKARLVAKGYTQKEGEDFFDTYSPVARLTTIRVLLALAASHGLLVHQMDVKTAFLNGELEEEIYMDQPDGYVLEGQEGMVCKLLKSLYGLKQAPKQWHEKFDTTLTSAGFVVNEADKCVYYRYGGGEGVILCLYVDDILIFGTSLNVIEEVKDYLSKSFEMKDLGEADVILNIKLQRGDEGGITLVQSHYVDKVLSRFGYSDCKPAPTPYDPSVLLRKNRRIARDQLRYSQIIGSLMYLASATRPDISFAVSKLSRFVSNPGDDHWQALERVMRYLKGTMSYGIHYTGYPKVLEGYSDSNWISDADEIKATSGYVFTLGGGAVSWKSCKQTILTRSTMEAELTALDTAIVEAEWLRELLMDLPVVEKPVPAILMNCDNQTVIIKVNSSKDNMKFLGSARRDYSLFVNIYFIFTNMSNTGDKEKETPVNTNGGNTASNSSGGPFLGFASTAVKQCNACVECGESR

SEQ ID NO: 189130 - protein, 206 aa, Oryza sativa
  unsure (1)..(206): unsure at all Xaa locations
  Clone ID: PAT_MRT4530_85668C.1.pep
GNKNSANNSXRRRRVYPENGPPLDGEAELPPLLLSFTAPPGAPAPDPAPVGGVPPPPAVAAATPDMAMSSRAGGTPQKPDHPPTRCRSQAKFIRIAGTGFSTTGKSIRSSRSHSASTVAVSSAMVCLQDFQETAPPPSVNTYPLVAFISSALDIQFESLYPSSTFGYPIPSFPESPFSQEKSLKSSKASKASHTDPKQPFEHVDPI

SEQ ID NO: 189131 - protein, 1346 aa, Oryza sativa
  unsure (1)..(1346): unsure at all Xaa locations
  Clone ID: PAT_MRT4530_85669C.1.pep
MLVAILLRSWYVHDAYYTLSMLLVMLHFITRSPHIVHAMIIILTFWIKICRYMTIFPTIQKPDGSFSVVGFAATLKPHAFDGSNYKRWKARALLWLTAMQCFYVSWGKRSEPPLSPKEDVKFEASNCLFRGALISVLADNIVDVYIHMPSGKDMWDALEAKFGVSDAGSELYVMEQFYDYKMVDDRSVVEQAHEIQMLAKELENNNCELPDKFVAGGIIAKLPPSWSDFATSLKHKQEFSVSDLIGSLGVEEKARAKDNRGKKVEGGSSANMVQKKNPHASHNNKKVKLDGKPKATTNFKKKGKGKAKEDCFVCGKSGHWAKDCPERKERKSANMVISEGGETSGXGKILPTVLSVFHSPDWWVDTGANIHVCDDGRGSSLLMGNGSLAAVHGVGTVDLKFTSGKTVQLKNVQHVASTKKNLVSGSLLCREGFRVVXFESYKCVVSKYGTFIGKGYDSRGLFHFSLDDMCNNHNVVNHISENDESNVWHSRLCHVNFGCTTRLANMSLIPKFTLVKVSKCHTCVQSKQPRKPHKAFEARNLALLELVHSDLCEMNGVLTKGGKKYFMTLIDDCTRFCYVYLLKTKDEALHYFKTYKAEVENQLERKXKRLRSDRGGEYFSNEFASFCEEFGIIHERTPPYPPQSNGVAERKNCTLTEMVNAMLDTAELSKEWWGEAVLTACYILNKIPMKYKEVTPFEEWERKKLNLSYLRTWGCLAKVSVPIAKKRKLRPNTVDCMFLGYAIYSVGYRFLIVNSGVPDMRVGTIIESRDAIFFDNEFPMKHTPSTSSQETVIPHEHFAPIEHNDQTPEGNPEDNIVDTLKSKRQRVAKSFGDDYIVYLVDNTPRTIEEAYLSPDADYWKEAVRSEMDSIMSNDTWEVVEYPYGCKPVGCKWVFKKKLRPDGTIEKYKVRLVAKDYTQKEGEDFFDTYSLVARLTTIRLLLALAASHGLLVHQMDVKTAFLNGELEEEIYMDQPDGYVLEGQEGMVCKLFKSLYGLKQAPKQWHEKFDTTLTSAGFVDNEADKCVYYRHGGGEGVILCLYVDDILIFWTSLNVIEEVKDYLSKSFEMKDLGEADVILNIKLPRGYEGGITLVQSHYVDKVLTPTPYDPSVLLRKNRRIARDQLRYSQIIGSLMYLASATRPNISFAVSKLSRFVSNPGDDHWQALERVMRYLKGTMSYGIHYTGYPKVLEGYSDSNWISDADEIKATSGYVFTLGGGAVSXKSYKQTILTRSTMEAELTALDTATVEAEWLRELLMDLPVVEKPVSAILMNCDNQIVIITVNSSKDNMKSSRHIKRRLKSVRKXKNSGVIALDYVQTANNLADQFTKGLPRNVIDSASRKMGLIPT

SEQ ID NO: 189132 - protein, 136 aa, Oryza sativa
  Clone ID: PAT_MRT4530_8566C.1.pep
SAAVAAVAPAVRRRRSRRRRRSGRPPSWLPSRRRPRPPLRRRRRPPEHRRSRRPEVCRRSFVTSTQPPPSSQCACRARRTPPQTSPLRNQAGAVLFAPTPPTPCLAFLLCRPILRQPPPQLADDIAVGASLFPRPP

SEQ ID NO: 189133 - protein, 1170 aa, Oryza sativa
  Clone ID: PAT_MRT4530_85670C.1.pep
MSVVEHGTSAMVLPVPYMSVSGTSAAPEEEKDDPCSAGGRRGSLLTRQKEMRYDVRRIEPTESLKDTAARGAKPHGRAIRFLGSARRDYSLFVNIYFIFTNMSNTGDKEKETPVNTNGGNTASNSSGGPFLGYNLITLFQLECFYVSRGKRSEPPLSPEEEAKFEASDCLFRGALISVLADNIVDVYMHMPSGKDMWDALEAKFGVSDAGSELYVMEQFYDYNMVDDRSVVEQAHEIQMLAKELENNNCELPDKFVAGGIIAKLPPSWSDFATSLKHKRQEFSVPDLIGSLGVEEKARAKDVRGKKVEGGSSANMVQKKNPHASHNNKKVKPDVKPKAATNFKKKSKGKAKGDCFVCGKSGHWPKDCPERKDKKSANMIISEGGGTSGDATFFENEFPMKYTPSTSSKETVMPHEHFAPIEHNDQTPEENPEEDNIVDTRKSKRQRVAKSFGDDYIVYLVDDTPRTIEEAYSSPDADYWKEAVRSEMDSIMSNGTWEVVERPYGCKPVGCKWVFKKKLRPDGTIEKYKARLVAKGYTQKEGEDFFDTYSPVARLTTIRVLLALAASHGLLVHQMDVKTAFINGELEEEIYMDQPDGYVLEGQEGMVCKLLKSLYGLKQAPKQWHEKFDTTLTSAGFVVNEADKCVYYRYGGGEGVILCLYVDDILIFGTSLNVIEEVKDYLSKSFEMKDLGEADVILNIKLQRGDEGGITLVQSHYVDKVLSRFGYSDCKPAPTPYDPSVLLRKNRRIARDQLRYSQIIGSLMYLANATRPDISFAVSKLSRFVSNPGDDHWQALERVMRYLKGTMSYGIHYTGYPKVLEGYSDSNWISDADEIKATSGYVFTLGGGAVSWKSCKQTILTRSTMEAELTALDTAIVEAEWLRELLMDLPVVEKPVPAILMNCDNQTVIIKVNSSKDNMKSSRHIKRRLKSVRKQKNSGVIALDYVQTARNLADQFTKGLPHGRAIRFLGSARRDYSLFVNIYFIFTNMSNTGDKEKETPVNTNGGNTASNSSGGPFLGLFDRRIPEEEEEEEKMSYYGQQPPVGVPPQQGYPGKDGYPPPGYPPAGYPPAQGYPPAGYPPQQGYPPPYAQPPPQQQQHSSGPSFMEGCNYRTLVSDLSTPTGAVAGASAAAAAAAAAHLGCPLLLLSPGRLLLRIEATGARELKRFVSWS

SEQ ID NO: 189134 - protein, 1187 aa, Oryza sativa
  unsure (1)..(1187): unsure at all Xaa locations
  Clone ID: PAT_MRT4530_85671C.1.pep
MSAPGAGASDGAPGAGAGDGAPGAANVNTNGGNFASQSSGGPFSGEPPLSPEEEAKFEASDCLFRGALISVLADNIVDVYMHMPSGKDMWDALEAKFGVSDAGSELYVMEQFYDYKMVDDRSVVEQTHEIRMLAKELENNNYELPDKFVAGGIIAKLPPSWSDFATSLKHKRQEFSVSDFIGSLGVEEKARAKDVRGKKVEGGSSANMVQKKNPHASHNNKKVKHDVKPKAATNFKKKGKGKAKGDCFVCGKSGHWAKDCPERKDKKSANMVISEGGGISGYGKILPTVLFVFHSPDWWVDTSANIHVGRGSSLLMGNGSLAAVHGVGMVDLKFTSGKTVQLKNVQHVPSIKKNLVSGSLLCREGFRLVFKSNKCVVSKYGTFVGKGYDSGGLFRFSLNDMCNNHNVVNHISENDESNVWHSRLCHVNFGCMTRLANMSLIPKFTLVKGSKCHTCVQSKQPLKPHKASEARNLAPLELVHSNLCEMNGVLTKGGKKYFMTPIDDCTRFCCVYLLKTKDEALHFFKTYKAEVENQLERKIKRLRSDRGGEYFSNEFSSFCEEFGIIHERTPPYSPQSNGVAERKNRTLTEMVNAMLDIVELSKEWWGKAVLTACHVLNKIPMKHKEVNVPIAKKWKLGPNTVDCVFLGYAIHSVGYRFLIVNSGVPGMHLGTIIECRDATFFENEFPMKHTPSTSSQETVMPHEHFAPIEHNDQTPEENPEEDNIVDTRKKEAYSSPDADYWKEAVRSEMDSIMSNGTWEVIEHPYGCKPVGCKWVFKKKLRLDGTIEKYKARLVXKGYTQKEGEDFFXDTYSPVARLTTIRVLLALAASHGLLVHQMDVKTAFVNRELEEEIYMDQPYGYVLEGQEGMVCKLLKSLYGLKQAPKQCHEKFDTTLTSAGFVVNETDKCVYYHYSGGEGVILCLYVDDILIFGTSLNVIEEVKDYLSKSFEMKDLGEADVILNIKLQRGDEGGITLVQSHYVDKVLSRFGYSDCKPAPTPYDPSVLLRKNRRIARDQLRYSQIIGSLMYLASATRPDISFAVSKLSRFVSNPGDDHWQALERVMRYLKGTVSYGIHYTGYPKVLEGYSDSNWISDADEIKATGGYVFTLGGGAVSWKSCKQTILTSSKDNMKSSRHIKRRLKSVRKQKNSGVIALDYVQTARNLADQFTKRLPRNVIDSASREMGLIPT

SEQ ID NO: 189135 - protein, 620 aa, Oryza sativa
  Clone ID: PAT_MRT4530_85673C.1.pep
MEVGMVVVVAAKVLVSLWCVGACCLAAYLYRVVWVAPRRVLAEFRRQGIGGPRPSFPYGNLADMREAVAAARHQLAEARRRRRARDSGDGGSGAGIVHDYRPAVLPFYEKWRKDYVDVYMHMLSGKDMWDALEAKFGVSDAAASCMSWSNSMTTRWSMTVLLWRQAHEIQMLAKELENNNCELPDKFMRGGIIAKLPPSWSDFATSLKHKRQEFGLTDLIGSLGVEEKARAKDNLGKKIEGGSSANLSGHWAKDCPERKDKKSANMVISEGGGTSRYAVHGVDTIDLKFTSGKIVQLKNVQHVPSIKKNLIDVKTAFLNGELEEEIYMDQPDGYVLEGQKGMVCKLLKSLYGLKQAPKQWHEKFDNTLTSAGFVVNEADKCVYYRYGGGEGVILCLYVDDILIFGTSLNVIEEVKDFLSKSFEMKDLGVADVILNIKLLRGHEGGITLVQSHYVDKVLSRFGYSDCKAAPTPYDPSVLLRKNRRIARDQLRYSQIIGSLMYLASATRPDISFAVSKLSRFVSNPGDDHWHALERVMCYLKGTMSYGIHYAGYPKVLEGYSDSNWISDADEINATSGYVFTLGGGAVSWKSCNVSWKSCKKTILTRSTMEAELTALDTATV

SEQ ID NO: 189136 - protein, 174 aa, Oryza sativa
  unsure (1)..(174): unsure at all Xaa locations
  Clone ID: PAT_MRT4530_85674C.1.pep
FFFFFFSPPPTWGGFCPFPLLFLLGSVLLPLFFFHFLFLLVLLVLVGRYLLPLXLLPXFLWSGXSGSSWSPISGRVLLCLSRSPTFPYFSXYSIYXLSFSSLFYSSSSLLQXFSFLPLNXASIXAPRLVPSCFFKLPCVFSCMLSXVPTRGNFITLSTXLGXGMGLVWRLGAAQ

SEQ ID NO: 189137 - protein, 1297 aa, Oryza sativa
  Clone ID: PAT_MRT4530_85675C.1.pep
MSGVATATAGGGGTPPTGARSGAGAPGGAVNDNNNGGNSASPSSGGSASRTTAHRHVWSCHRHCWRRWSFSVVGFAAALKPHAFDGSNYKRWKARALLWLTAMQCFYVSRGKRSEPPLSPEEEAKFEASDCLFRGALISVLADNIVDVYMHMPSGKDMWDALEAKFGVSDAGSELYVMEQFYDYKMVDDHSVVEQAHEIQMLAKELENNNCELPDKFVAGGIIAKLPPSWSDFATSLKHKRQEFSVPDLIGSLGVEEKARAKDVRGKKVEGGSSANMVQKKNPHASHNNKKVKPDVKPKAATNFKKKGKGKAKGDCFVCGKSGHWAKDCPERKDRKSANMVISEGGGTSGYGKMLPTVLSVYHSPDWWVDTGANIHICADISLFSSYQVGRGSSLLMGNGSLAAVHGVGTVDLKFTSGKTVQLKNVQHVPLIKKNLVSGSLLCREGFRLVFESNKCVVSKYGTFVGKCYDSGGLFRFSLNDMCNNHNAVNHISENDESNVWHSRLCHVNFGCMTRLANMSLIPKFTLVKGSKCHTCVQSKQPRKPHKASEARNLAPLELVHSDLCEMNGVLTKGGKKYFMTLIDDCTRFCYVYLLKTKDEALHYFKIYKAEVENQLERKIKRLRSDRGGEYFSNEFASFCEEFGIIHEMTPPYSPQSNGVAERKNRTLTEMVNAMLDTAGLSKECVGYRFLIVNSGVPDMHAGTILESRDATFFENEFPMKYTPSTSSKETVMPHEHFAPIEHNDQTPEENPEEDNIVDTRKSKRQRVAKSFGDDYIVYLVDDTPRTIEEAYSSPDADYWKEAVRSEMDSIMSNGTWEVVERPYGCKPVGCKWVFKKKLRPDGTIEKYKARLVAKGYTQKKGEDFFDTYSPVARLTTIRVLLALAASHGLLVHQMDVKTAFLNGELEEEIYIDQPDGYVLEGQEGMVCKLLKSLYGLKQAPKQWHEKFDTTLTSAGFVVNEADKCVYYRYGGGEGVILCLYVDDILIFGTSLNVIEEVKDYLSKSFEMKDLGEADVILNIKLQRGDEGGITLVQSHYVDKVLSRFGYSDCKPAPTPYDPSVLLRKNRRIARDQLRYSQIIGSLMYLASVTRPDISFAVSKLSRFVTNPGDDHWQALERVMRYLKGTMSYGIHYTGYPKVLEGYSDSNWISDADEIKATSGYVFTLGGGAVSWKSCKQTILTRSTMEAELTALDTATVEAEWLRELLMDLPVVEKPVPAILMNCDNQTVIIKVNSSKDNMKSSRHIKRRLKSVRKQKNSGVIALDYVQTARNLAYQFTKGLPRNVIDSASREMGLIPT

SEQ ID NO: 189138 - protein, 128 aa, Oryza sativa
  Clone ID: PAT_MRT4530_85676C.1.pep
MTVPLSDIETGAGWHGGAARRGEGRAAPGKEGEEGGGGGGGGGPRGRLDLWEQPSNNSTTPVTSLSMIITEWKEDIKELRAVLQDLWPPCRHNFKISKRADLRHRPCQGGHRPLGVGLGNGVIVGKVE

SEQ ID NO: 189139 - protein, 751 aa, Oryza sativa
  Clone ID: PAT_MRT4530_85677C.1.pep
MVCKLLKSLYGLKQAPKQWHEKFDNTLTSAGFVVNEADKCVYYRYGGGEGVILCLYVDDILIFGTRLNVIEEVKDFLSKSFEMKDLGVADVILNIKLPRGDEGGIILVQSHYVDKVLSRFGYSDCKAAPTPYDPSGRTALVLHGYCCCIDAFTKMSTEIGDKIMNDINGGSTASKSSGGTFSGYTFILPILLDRTLALLLLRSAPAPCLRCARETPHEGGAAIPRRPAARRPSLFPPQHPPPQGSMKPSPASTKAPLPWISPLHYRSPTRAAPPSPPPPPPPLPEAPLTQLRYVHHPDLARLIASSPSAQRALDLFNAAAAQRGFSHTPATFAALLVRLARSRLPSAAAAVLRRAASAPCRFLEPQFLPLLRLLPPDHSLALLRLLPALLRRGRVSRKALAVCLDRLVSSRRCPDVLTELLADLRDPRSKYLPQPNTCIYNILIKHYVKKGDLGTAFQVFDEMRKMNCADVRPSLVTYSTLIGGLCRGAQMKEAFELFEDMIEKDRIVPDQLTYNLLIGGFCRLGQVEKAQSIFGFMRKNECEPNAFNYATLINGHCKKGEVEAARGVFEEMIRSGVQPDAVSYTSLVGCLCRHGNVDEGINLVQEMWQKGCKADVVTYNLLLEGLCKDRRIAEAVTLLEKLPSEGVQLNVASYRIVMNCLCSCGEMEKAAGLLGMMLGRGFVPHYAASNMLLIGLCDVGRVSDATVTLYGLVDTGFMPEARCWARLIESVFRERKLRRSIELLDVLIAEG

SEQ ID NO: 189140 - protein, 1253 aa, Oryza sativa
  Clone ID: PAT_MRT4530_85678C.1.pep
MQCFYVSRGKRSEPPLFPEEEAMFEASDCLFRGALISVLADNIVDVYMHMPSGKDMWDALEAKFGVSDAGSELYVMEQFYDYKMVDDRSVVEQAHEIQMLAKELENNNCELPDKFVAGGIIAKLPPSWSDFATSLKHKRQEFSVPDLIGSLGVEEKARAKDVRGKKVEGGSSANMVQKKNPHASHNNKKVKPDVKPKAATNFKKKGKGKAKGDCFVCGKSGHWAKDCPERKDRKSANMIISEGGGTSGYGKILPTVLSVFHSPDWWVDTGANIHVCADISLFSSYQVGRGSSLLMGNGSLAAVHGVGTVDLKFTSGKTVQLKNVQHVPSIKKNLVSGSLLCREGFRLVFESNKCVVSKYGTFVEKGYDSGGLFRFSLNDMCNNHNAVNHISENDESNVWHSRLCHVNFGCMTRLANMSLIPKFTLVKGSKCHTCVQSKQPRKPHKASEARNLAPLELVHSDLCEMNGVLTRFCYVYLLKTKDEALHYFKIYKAEIENQLERKIKQLRSDRGGEYFSNEFASFCEEFGIIHEMTPPYSPQSNGVAERKNHTLTEMVNAMLDTAGLSKEWWGEAVLTACHVLNKIPMKQKEVTPFEEWERKKLNLSYLRIWGCLAKVNVPIAKKRKLGPKTVDCVFLGYAIHSVGYRFLIVNSGVPDMHAGTILESRDATFFENEFPMKYTPSTSSKETVMPHEHYAPIEHNDQTPEENPEEDNIVDTRKSKRQRVAKSFGDDYIVYLVDDTPRTIEEAYSSPDADYWKEAVRSEMDSIMSNGTWEVVERPYGCKPVGCKWVFKKKLRPDGTIEKYKARLVAKGYTQKEGEDFFDTYSPVARLTTIRVLLALAASHSLLVHQMDVKTAFLNGELEEEIYMDQPDGYVLEGQEGMVCKLLKSLYGLKQAPKQWHEKFDTTLTSAGFVVNEADKCVYYRYGGGEGVILCLYVDDILIFGTSLNVIEEVKDYLSNNFEMKDLGEADVILNIKLQRGDEGGITLVQSHYVDKVLSRFGYSDCKPAPTPYDPSVLLRKNRRIVRDQLRYSQIIGSLMYLASATRPDISFAVSKLSRFVSNPGDDHWQALERVMRYLKGTLSYGIHYTGYPKVLEGYSDSNWISDADEIKATSGYAFTLGGGAVSWKSCKQTILTRSTMEAELTALDTATVETEWLRELLMDLPVVEKPVPAILMNCDNQTVIIKVNSSKDNMKSSRHIKRKLKSVRKQKNSGVIALDYVQTARNLADQFTKGLPRNVIDSASREMGLIPT

SEQ ID NO: 189141 - protein, 1051 aa, Oryza sativa
  unsure (1)..(1051): unsure at all Xaa locations
  Clone ID: PAT_MRT4530_85679C.1.pep
GKPRHWAKDCPKCKVKKSANMVISEDGGTSGYGKFLPIVLSVCHSPDWWVDTSADIHVCADIFLFXSYQVGRGSSLLMGNRSLAAIHGVGTVDLKFTSGKIEQLKNVQYVPSIKKNLVSGSLLCRDGFRLVFEFNKCVISKYGSFIGKCYDSRGLFRFSLDDMCNNSNVVNHISENNESNVWHSRLCHVNFGCMTRLANMSLIPKFNLVKGSKCHTCVQSKQPRKPHNASEARNLAPLQLVHSDLCEMNGVLTKGGKKYFMTLIDDCTRLCYVYLLKTKDEALQYFKIYKAEVENQHERKIKQLRSDRGGEYFXSNEFTSFCEEFGIIDEMTSPYSPQSPRVAERKNRTLTEMVNSMLDTAGLSKEWWGEAILIACHVLNKIPTKHKEVTPFEEWERKKLNLSYLRTWGCLAKVNVPITTALLSREGRTDLVYYGYRVHLQAHVYTIVTISIPXMYIXSILIKVQSLQKRREKLLEPYPNSSEDFRTPVFYFIPIQHNDQTPEENPEEDNIVDTRKSKRQRVAKSFGDDYIVYLVDVTPRTIEEAYSSPNSDYCKEAVRSEMDSIMSNGTWEVVEHPYGYKPIGCKWVFKKKLRPDGTIEKYKARLGAKGYTQKEGEDFFDTYSPVARLTAIRVLLGLAASHGLLLHXMDVKTAFLNGELEEEIYMDQPDGYVLEGQEGMVCKLLKSLYGLKQAPKQWHEKFDKTLTSVGFVVNEADKCVYYRYGGGEGLILCLYVDDILIFGTNLNVIEVVRDFLSKSFEMKDLGVADVILNIKLLRGDEGGTTLVQSHYVDKVLSRFGYSDCKTASTPYDSSVLLRKNRRIARDQLRYSQIIGSLMYLDSTTRPGISFAVSKLSRFVSNPGDDHWHALERVVHYLKGTMSYEIHYAGYPKVLKGYSDSNLISDADEIKATSGYVFTLGGGAISWKFCKQTILTRSTMEAELIALDTATIEAEWLRELLMDLPVVEKPVPTILMNCDKQTVIIKVNSSKDNMKSSRHVKRRLKSVRKQKNSGVIALDYIXTAKNLADQFTKGLPRNVIDCASREMGLRPT

SEQ ID NO: 189142 - protein, 136 aa, Oryza sativa
  unsure (1)..(136): unsure at all Xaa locations
  Clone ID: PAT_MRT4530_8567C.1.pep
MRTETDWIGKAARTRTIKAGEVRVTMAEVENTTITTDDDEIHVPPVLGEIKDIGIDPEVVLPIIXSFVVFIIIDRWLSKATRTPXHLSYQREIQGALGDLIGRNVVAYVDDVVVKTKTSDKLIDDMRETFNNLRRH

SEQ ID NO: 189143 - protein, 108 aa, Oryza sativa
  unsure (1)..(108): unsure at all Xaa locations
  Clone ID: PAT_MRT4530_85680C.1.pep
PPTPWSPKLSPAPWSSSPPSPAPWSPPPPATWPLTASLAPWPPTPXAPPPSPPMAGPPTPTPRESKSAPIPAPVSQPHWENCHPLVPGTPPPPPLDPGGGQLPPLDPG

SEQ ID NO: 189144 - protein, 150 aa, Oryza sativa
  unsure (1)..(150): unsure at all Xaa locations
  Clone ID: PAT_MRT4530_85681C.1.pep
KANKHFTGPIPIPHVAVQIHISQQIPQNPFPFHQKQPLPRPPLPVATALPLPPSVGSGRGGEGSRHHPPPSLLWLDLGGKGRGAAATPKAAAXRCHRPPPSLLRLDLGGEPPPRPKQPPLSPXPPPSLLRLDLGGEGKGXPPCPEQPPPP

SEQ ID NO: 189145 - protein, 123 aa, Oryza sativa
  unsure (1)..(123): unsure at all Xaa locations
  Clone ID: PAT_MRT4530_85682C.1.pep
IIIXXFEDRFCXYRFQDGPPKXXQGPXSIXGXDHXXWIXXXSXXLXXTXXCPHXXXSXXIGVLGXEXXXPNXXTIILTTRGENHVHPQQAARXCSDQPXEXRMXXGXXYIXXXVAXXXLLXIX

SEQ ID NO: 189146 - protein, 1318 aa, Oryza sativa
  Clone ID: PAT_MRT4530_85683C.1.pep
MGFVFGIDDFVFPPGQAFRSLGVNSRPTEIGEYDDFGYHYDHRSLDDFDESYEDNYTPLYFGIFMADNEMEEQRQAREAEEQRVRQEAERRRLEEERQAQERERLQREQQERERAAKEAEDRRQRALDAERRARELIGQQDVEGTAVFRTTQQNAVAAITLLDTLLKEDALNQTNHVVNILNQTKTMIAASVPVNSASVRTPTSGRVPPLQPQDYHQPSLSVAGAGSSRRSRDHGERSVHSPPDRHKERRAERPHSPHRRRPVDLRETINQRHAARGHIPHHSLDRYDDDVDGVAAFTSDLRRVDWPAGFKTTRIEKYDGTTNLESWLTVYNLAIHAAGGDSKAMANYLPVALADSARTQFDLYNVVQKSGESLRDYIRRFSEQRNKISNITDDVIIAAFTKGIHHDLLVGKFGRKPPRTVKQMFEKANEYTKAEDAVTASKQSGTTRKPKKDTLTAGGSGSTNHKDRKRKPEELVATTTPSSRQHSRVNTFDKIMNSQCPHHPNSNHVAKDCFVYKQFAEQYTKSARKPTDGDQSTSKKKDDEDDAPTGFQDSRKELNDIFETAIKFDRSDHPDRVVHPGRYPLITLPVTFGTRENFRTENICFEVADFETAYHAILGRPALAKFMAVPHYSYMMMKMPGPRGVISMRSNIKQAVTCDKESCEMAQTREITLAREEVIEHSLHVKEDAKPIKQRLCRFAQDRKDAIKEELTKLLAAGFIKEVLHPDWLANPVLVRKKTGQWHMCVDYTDLNKSCPKDQFGLPCIDQVVDSTAGCELLSFLDCYSGYHQIRLKDSDCLKTSFITPFGAYCYITMSFGLKNVGATYQRMIQRCFSTQISRNVEAYVDDVVVKTKQKDDLIEDLEETFAIIRAFRMKLNPEKCIFGVPLGKLLGFMVSHRGIQANPEKIYAILNMKPPSSRKDVQKLTEGMAALSRFVSRLGERGMPFFKLLKKTDNFQWGPKAQKAFEDFKKLLTTPPVLASSHPQEPLLLYVLATSQVVSTVLVVEREEEGHVQKVQRPIYFVSEDLADSKTRYPQVQKLLYGVLITIRKLSHYFQGHSVTVVMSFPLRDILHNREANGRIAKWALELMSLDLSFKPRTSIKSQALADFVAEWTECQEDTPVEKMEYWTMHFDGSKRLSGTEAGVVLISPTGERLSYVMKEWSYLVKNMTAYRQEVRKLEDKFNGLELTHVLRHNNEAADRLANFGSKREAAPSDVFVEHLYEPTILRKETVEAMDAQEELQTIPLSWPFAVWGLDMVGPFKKAIGGYTHLFVAVDKLSKWIEAKPVITITADKARDFFINIVHWFRVPNRIITDNGT

SEQ ID NO: 189147 - protein, 115 aa, Oryza sativa
  Clone ID: PAT_MRT4530_85684C.1.pep
MAACLEAAREACVKFAKEKCIEPFRDARIASEGLLENTKFAIWGAGDTGLDDKVREKATVQPTVYIFFMAHARPWPWQWQWHPRTEPKLGFDSVFVFVGMAWQAGTNVEATSLLF

SEQ ID NO: 189148 - protein, 94 aa, Oryza sativa
  Clone ID: PAT_MRT4530_85685C.1.pep
GLGEGEMEAALMAFHRFGNQSAASLWYQLAYMEAKGRVRRGDTVWQLAVGSGLKANSLVWERVADDDHFATERHGRTTLGPWADCIHKYPVTEG

SEQ ID NO: 189149 - protein, 278 aa, Oryza sativa
  Clone ID: PAT_MRT4530_85686C.1.pep
MAMVAMVVAAMAVAAVARGDMSADRTECADQLVGLAPCLQYVQGEAKAPAPDCCGGLRQVLGKSPKCLCVLVKDKDDPNLGIKINATLALALPSACGATHANVSHCPQLLHIPPNSKDAAIFSPGGDKGSPAAPDHVVLQITDHDPYYIVEFTAVTNLPIETKNTGLDGARSISGRLYWTMPATFMLPRKRSKDIEKKEGVRGFGELNSKPHLMDTQVKLAVVVKVMGRTGSRGQVTQVRVKFLDDQNRLIMRNVKGPVREGDILTLLESEREARRLR

SEQ ID NO: 189150 - protein, 150 aa, Oryza sativa
  Clone ID: PAT_MRT4530_85687C.1.pep
MTPTTTMAQRLWTAGSLGGMAPDYWSKPPSVTTSSRAPSPREGDRTQARLRVSWYLDTGELAEASEEDHGLRRGLMPPEPIKAFGAHQGLRRGPWPPEPAKAFGAVQGLRGRPRPSGLPEAFGVIRGLRSRAGPSEPTMTLGASRCLRSQ

SEQ ID NO: 189151 - protein, 474 aa, Oryza sativa
  Clone ID: PAT_MRT4530_85688C.1.pep
MGCGRWATCAGRWGMWRGGRGDLFLIMVAPLDPANLVSLFLLRYMKHIVDTSLARWELKLVSDFTSAFQNPVWSHKAWCQLAFGLEVVHSPEWRNSKATDLGYLTQLNGRTPRLRMSLYAEDAAMFVRPTVRDMSHLAQILHSFRDVTGLQTNMKKSQITPIRCVGIDIQEILRVFPANITGFAMKYLCLPLVVSKLKKVHIQPLLDKCKARLAPWQGKKVVQLIALNVVLLITFVLHCPKLGRGKKEDNGGEKTKDNNPKSTFKGKKTKENLKKMFDQVLLMRKTHTGLEDLLNFSAGFGGKEGERVDRGFRLFVAHDRFLLRYIVTGSGEDGRIFKDESDDFDNEVGSAGQIGRQAVRPLAHVQSDRRRMCGQTGQMENCKPISTPIGSTAVLDPNEDGEAVDQKEYRGVADCRVRSDRPMVAGQTGVYCAVRPATTADLGGQTKDTISVRPMAFRRSDRCNYFGQTAIRRN

SEQ ID NO: 189152 - protein, 339 aa, Oryza sativa
  Clone ID: PAT_MRT4530_85689C.1.pep
MRRLGSGNAGGGAAVAGEWDGGGIAGRMRGVNAGIMDEKVLELVFRALNWDPRELCVVARVSRRLRAVAERVLWRELCVSRAPRMVSALSGPTAAVAAAAGRIGGGWPAMAKLLFFCCGAAGAAVPGHFAPVSRFSKTSGRTFLSRRCAGDLLFVSDPCEHAAGAASDDDVVGAYRGVYRGFMRSRTRAFLVGHRAPLEPRVRCPYCGARVWSMTAAGLAPRSACRWLGANEGRLEYFVCVSGHLHGSCWLARLSSSSSSSDGERSADSDSNHSDDETFAAADYNAVQTTDKRCIGARPSNMSLNNEHHCQLWLTGNDMCCYYTKACRKDGSRLSHSLA

SEQ ID NO: 189153 - protein, 502 aa, Oryza sativa
  Clone ID: PAT_MRT4530_8568C.1.pep
MAHSLPLDVWGWITNLPPFSQWRSNAMSLCICPTPSASESSQPSVNLSVVKTPPTQPSFVTFSIFANYRVPISLWTSKPVHLKSYTQQSLDEQEMLELFVDIVDWVLRSGPNKKLSFQFPRAQIHGNLKDVFNIVFLSLAFLVCIYEAPHALRCRCLESLRTQLTGPKCKDAAKTFVRMLGANLEEQWMQTMNLAVTNWIVEQRSSHHSFGVPSPLFSYALSASGLWKVQLYCPLIAMSMEDPAVPTQDERLLFSLTYQQLEGVIQLAYKTIRRDNWIDVEIKVDNIRCDVDSLVSEILMTERGHGSEEKHFPSRVMLQITPMQQSDVLSVSVSKSSDNPTHEFGLEKGIEGSFDPPNTFGLKASVSESLTLTMKPWKFEQSVHGNTTTLNWFLHDGVNGREVYSSKPSKLSLLQPRAWFRDRYSTVYRPFTKKGGVIFARDEYGDSVWWKICGAALGKTMDWEIRGWIWLTYWPNKQKTFHSETRRLEFRECLQLPLMKSP

SEQ ID NO: 189154 - protein, 100 aa, Oryza sativa
  Clone ID: PAT_MRT4530_85690C.1.pep
MEFRSNLDETQSKWKPNCPEDVHVMMIVDEVDHLMNQVGERFWRRLRLNLNSHKIFMNSGSGGLNRELRVSHTDKRFLNLEARRNKKLRSEEGYRKVRHR

SEQ ID NO: 189155 - protein, 1031 aa, Oryza sativa
  Clone ID: PAT_MRT4530_85691C.1.pep
MAGLSPRFLGRTSPPVDAIAARRLVALLLEHQDRRRQLLQIHSQLIAHQVFDRRPTPWHALLKAYSHGPHPQDALQLFRHARWHAADDTYAFTFALKACAGLGWPRCCMQLHGLVVRKGFEFQTYVHTALVNVYILCGCLADSRMAFEEMPVKNAVSWNVVITGFAGWGEVEYARLLFERMPCRNVVSWSGMIDGYTRACRPVEAVALFRRMMAEGISPSEITVLAVVPALSNVGKILIGEALHGYCEKEGLVWDVRVGNSLIDLYAKIGSIQNSLRVFDEMLDRRNLVSWTSIISGFAMHGLSVKAVELFADMRRAGIRPNRITFLSVLHACSHGGLVEQGVAFFKSMIYEYNINPDVKHFGCIIDMLGRAGRLREAEQIIRDFPVEVNATVWRTLLGCCSKYGEVEMGERTMKKILALEREFGGDFVVLSNMLTELRRFSDAEIVRKLVDQRNSVKSFFNIVRMEAIKRLHAYYIVSGLYNCHYAMSKVLRSYAILQPDLVFAHKVFDQIEAPTTFLWNILIRGLAQSDAPADAIAFYKKAQGGGMVPDNLTFPFILKACARINALNEGEQMHNHITKLGLLSDIFVSNSLIHLYAACGNLCYARSVFDEMVVKDVVSWNSLICGYSQCNRFKDILALFKLMQNEGVKADKVTMIKVVSACTRLGDYSMADYMVRYIEDYCIEVDVYLGNTLVDYFGRRGQLQSAEKVFFNMKVRNIVTMNAMIAAYAKGQDIVSARKIFDQIPKKDLISWSSMISGYSQANHFSDALEIFRQMQRAKVKPDAIVIASVVSSCAHLGALDLGKWVHEYVRRNNIKADTIMENSLIDMYMKCGSAKEALQVFKEMKEKDTLSWNSIIIGLANNGFEKESLNLFQAMLTEGFRPNGVTFLGVLIACANAKLVEEGLDHFESMKRLYSLEPQMKHYGCVVDLLGRAGQLEKALRFITEMPIDPDPVVWRILLGSCNTHGDVAIAEIVTKKLNELEPSNSGNYTLLSNAYASAHRWSEAMNVRQCMADTDVRKSPGCSAVEAA

SEQ ID NO: 189156 - protein, 51 aa, Oryza sativa
  Clone ID: PAT_MRT4530_85692C.1.pep
MALTLISIICRQIQVDAGIGFGESLMGDGQFTFSSAYNLFFMAKTKCLYEV

SEQ ID NO: 189157 - protein, 362 aa, Oryza sativa
  unsure (1)..(362): unsure at all Xaa locations
  Clone ID: PAT_MRT4530_85693C.1.pep
EKEKTNALTVSEERTTGNLNGATINQEEQPLVEPTVEMPLSHVDLLDVPCNKEELCDNASLISMPQLVNEHIVSSVSLCADFKHVVYIANEIEKRELTSSLNTLGNVQFDDFCELDNLKEKLFAKSDLPCPTSAIFHIFGESDYRGIYLEHRVYIYSDLEPPVHVDKTCKLERNVIDNKIISSLSCFNWKKHVVLNGLHEEHHMEKPRTVFREEGEDDVTMATIDTTVVHIKIKLTKFWNPIRPPATLLPSNGRQNCIRAPFWVREYLMESSRGPLSNGSSIISEFHLVWPQSQKQGVVSPIXAYGLVTSSGTPAQVGPMWRIRLICTDKINNPRRGVSIAKAQHNNVXYGCSRVVNVSPKS

SEQ ID NO: 189158 - protein, 534 aa, Oryza sativa
  unsure (1)..(534): unsure at all Xaa locations
  Clone ID: PAT_MRT4530_85694C.1.pep
MASGGEDPGPSDVRSHVPALVADRSHLMQGNDVRLHDDVQRGGLQQLGGGDGGGDTGSESTRTDRPPCVDDAHMRMPTRNVMHIHGAHVPDEMVPKFGMEFKSYEMAYAFYNKYVEHAGFNVRKSRSRAAYREICCSKEGKNKYRGDETKRERRRGSARIGCRAYVRVRNVVIEGEVAXNHHLQSTLFGCALLRDERAESFEWLFETFKNCMGDCPTPRCILXQTYTPIEFEYAWKEFIDKFGLHDSTELRDLYDIRHRWVPAFFKEDYCGHMTSTQRSESFNRLVKSSFVDHQTALHRFARRILEVVLSRKEKEAAETRACQDVPNVKTAWPFAEQLSRVYTRAVFKVFENTLDESVHFRIEQYGVDQTQWIISHSKRSEKHDWCQRQFKVTADVVNGQFICECMQWEHTGLFCPHLLRAFVHVQVEKIPHTYVLRRYSREAKSDVNFDRRDRPIAGLDGVKLSNRTKVLSLDAQQLVKWGRRSSVAFERATSVMKGLRNQLEEIPADVHGLDADDGVSEHEVEVGDGARPSI

SEQ ID NO: 189159 - protein, 1163 aa, Oryza sativa
  Clone ID: PAT_MRT4530_85695C.1.pep
MAAPDRRGSREIGKGGGRRRGRRPSDLLRPVGEDGRAIRFLGSARRDYSLFVNIYFIFTNMSNTGDKEKETPVNTNGGNTASNSSGGPFLGYNLITLFQLEVLLLMFIAMSTLCHYVIVDANSTLSMLMLITFTTITGSNPIVNIMFIILLFWIKICRIMTKFPTIQKPDRSFSVVGFAATLKPHAFDGSNYKRWKARALLWLTAMQCFYVSRGKRSEPPLSPEEEAKFEASDCLFRGALISVLADNIVDVYMHMPSGKDMWDALEAKFGVSDAGSELYVMEQFYDYKMVDDRSVVEQAHEIQMLAKELENNNCELPDKFVAGDIIAKLPPSWSDFATSLKHKRQEFSVPDLIGSLGVEEKARAKDVRGKKVEGGSSANMVQKKNPFASHNNKKVKPNVKPKAATNFKKKSKGKAKGDCFVCGKSRHWAKDCPERKDRKSANMIISEGGGTSGSGKILPIVLSVFHSPDWWVDTGANIHVGRGSSLLMGNGSLAAVHGVGTVDLKFTSGKTVQLKNVQHVPSIKKNLVSGSLLCREGFRLVFESNKCVVSKYGTFVGKDTAGLSKEWWGEAVLTACHVLNKIPMKHKEITPFEEWERKKLNLSYLRTWGCLAKINVPIAKKRKLGPKTVDCVFLGYAIHSVGYRFLIVNSGVPDMHVGTIHESRDATFFENEFPMKYTPSTSSKETVMPHEHFAPIEHNDQTPEENPEEDNIVDTRKSKRQRVAKSFGDDYIVYLVDDTPRTIEEAYSSPNADYWKEAVRSEMDSIMSNGTWEVVERPYGCKPVGCKWVFKKKLRPDGTIEKYKARLVAKGYTQKEGEDFFDTYSPVARLTTIRVLLALAASHGLLVHQMDVKTAFLNGELEEEIYMDQPEGQEGMVCKLLKSLYGLKQAPKQWHEKFDTTLTSAGFVVNEADKCVYYRYGGGEGVILCLYVDDILSNQLRYSQIIGSLMYLASATRPDISFAVSKLSRFVSNPGDDHWQALERVMCYLKGTMSYGIHYTGYPKVLEGYSDSNWISDADEIKATSGYVFTLGGGAVSWKSCKQTILTRSTMEAELTALDTATVEAEWLRELLMDLPVVEKPVPAILMNCDNQTVIIKVNSSKDNMKSSRHIKRRLKSVRKQKNSGVIALDYVQTARNLADQFTKGLPRNVIDSASREMGLIPT

SEQ ID NO: 189160 - protein, 89 aa, Oryza sativa
  unsure (1)..(89): unsure at all Xaa locations
  Clone ID: PAT_MRT4530_85696C.1.pep
FLLQPRTIGGGGFWAXFLDLPLVAVSPSRSRRMAGSAASECSPTRFSSPRLRVYLTRAFHAMNNELNTVFSESCSPWILARDGHCDHRI

SEQ ID NO: 189161 - protein, 550 aa, Oryza sativa
  Clone ID: PAT_MRT4530_85697C.1.pep
MESLRIAASHRPPLLLPSPHQLRRRHIAAVSLSLPHTSLSLSSHHHHHHRLAPTPLRRRIPPLLASQTPNPEADSPAPAGTKLAPLLVSLAVGLAVRFLAPRPPEVSPQAWQLLSIFLSTIAGLVLGPLPVGAWAFLGLTAAVATHTLPFAAAFSAFTNEVIWLIVISFFFARGFVKTGLGDRIATYFVKWLGGSTLGLSYGLTISEAFISPAMPSTTARAGGVFLPIIKSLSLSAGSKPNHPSSRKLGSYLVMSQFQAAGNSSALFLTAAAQNLLCLKLAEELGIIVANPWVAWFKAASLPAIASLLATPYLLYKIFPPETKDTPDAPALAAEKLERMGPVTKNEWVMIGTMLLAVSLWVFGDAIGVSSVVAAMLGLSILLLLGVLDWDDCLNEKSAWDTLAWFAVLVGMAGQLTNLGIVSWMSSCVAKLLESFSLSWPAAFCVLEASYFLIHYLFASQTGHVGALYSAFLAMHVAAGVPRVLSALALAFNTNLFGALTHYSSGQAAVYFGAGYLELPDVFRMGFVTALINILIWGVVGTFWWKLLGLY

SEQ ID NO: 189162 - protein, 726 aa, Oryza sativa
  unsure (1)..(726): unsure at all Xaa locations
  Clone ID: PAT_MRT4530_85698C.1.pep
MASGGEDPGPFDVRSHVPTLGVDRSHLMQGSGVHPHDDVQRGGLQQLGAGDREEEIQGASQPERIALHGAHVPDEMVPKFGMEFKSYEMAYAFYNKYAEHVGFDVRKSRSRAAYREICCSREGKNKYRGDETKRERRRGSARIGCRAYVRVRNVVREGEVVSVVFDDVVVEHNHPLTRSPSAVKHMRSHKQRDDTLMEFVDTMQQCRVPQSSVMGVLSDMHGDCETIPFTTRDLENRKTANVREENADDISKLLNFFNECKKDNPKFYWDIKTYEEGVAXNHHLQSTLFGCALLXDERAESFEWLFETFKNCMGDCXRPRCILTDQDPAMAIAVGRAFPYTIHRLCRWHIIDGHSDHLNTIFMRHKDTETEMMVCINQTYTPIEFEYAWKEFIDKFGLHDSTVLRDLYDIRHRWVPAFFKEDYCGSVPNVKTAWPFAEQLSRVYTRAVFKVFENTLDESVHFRIEQYGVDQTQWIISHSKRSEKHDWCQRQFKDKGIVIGCTAASKVGEEVAVAFERATSVMKGLRNQLEEIPVDVHGLDADDGVSEHEVDVGDGAGPSIHRGGSAGDEISKRPPPKSMTKGRGSDSNETERCWLSTGDSTGRRVDGWNIWVGVDNDVTERLTPSPVMREVDLPPEFRVRGPPMPDWPPPPTESDEERFQEDLEQYYNDGYVSTPCPSPASDLCDSEENLEDEVRKMIIGGMGMCCLRLINKGYSVAAEQAQEGLG

SEQ ID NO: 189163 - protein, 571 aa, Oryza sativa
  Clone ID: PAT_MRT4530_85699C.1.pep
MPLAMFVGANHHLQSTLFECALLRDGRAESFEWLFETFKNCMGNCPTPRCILTDQDPAMAIAVGRAFPDAIHRLCRWHIIDGHSDHLNTIFMRHKDIEIEMMVCINQAYMPMEFENAWKEFIDKFGLHDSTVLRDLYDIRHRWVPAFFKEDYCGRMTSTQRSESFNRLVKSSFVDHQTALHRFARRILEVALSRKEKKATETRAYQAVPIVKTTWPFAEQLSRVYTRAVFKVFENTLDESVHFRIEQYGVDQTQWIISHSKRLEKHDYCQRQFKVTADVVNGQFSCLFCPHLLRAFVHVQVEKIPHTYVLRRYSKEAKSDVNFDRRDRPISGPDGVKLSYRTKVLSLDAQQLVKWGRRSSVAFERATSVMKVLRKQLEEIPADVHGLDVDDGVSEHEADVGDGAGPSIHRGGSVGDEISRRPPPKSMTKGRGSDPNETAHRLSKLPDGSPASPSIHGDSSGSHSPERLTPSPVMREVDLPPEFCVRGSPTPDWPPPPTESDEERFREDLEQYYNDGYVSTPCPSPPSDLFDCEENLEDGDVEDDNLRHGDVLPKDNQSKDTASPPSKRKKV

SEQ ID NO: 189164 - protein, 48 aa, Oryza sativa
  Clone ID: PAT_MRT4530_8569C.1.pep
MALAVLQLLGGKSMKLLNLTMKHIEFLENVYCHYMNTVHKLRKLNVDA

SEQ ID NO: 189165 - protein, 153 aa, Oryza sativa
  unsure (1)..(153): unsure at all Xaa locations
  Clone ID: PAT_MRT4530_856C.1.pep
YTRSDCLHPYCDDYTSPIFALLALIALSAXATTVITTMHHLPPXLTMDTXDPCTPNMMNMIVMVSSTVMTLPQTMMLLQHLCYMLLQCMMPQXHCDTRCLTTDTMQLLIRDLLLQNDMVQIGMQMAYLRHMGPVLFRLSTCASYFDPTIVIHV

SEQ ID NO: 189166 - protein, 1261 aa, Oryza sativa
  Clone ID: PAT_MRT4530_85700C.1.pep
MSTEIGDKKMNDINGGNTTSKSSGGTFSGYTFILPILLDVSLLILFAMAALRYFVNVDAYFILSILKLYTSSTVTRSTHIVNVMFIILIFWIKICRIMTKFPTIQKLVRSFSVVGFAASLKPHAFDGSNYKRWKARALLWLTVMHCFFVSRGKPSEPPLSLEEEAKFEATDCLFRGAMISVLADNIVDVYMHIPSGKDMWDALEAKFGVSDAGSKLYVMEQFYDYKMVDDRSVVEQAHEIQMLKELENNNGELPDKFVAGGIIAKLPPSWSDFATSLKHKRQEFSVTDLIGSLGIEEKVRAKDNRCKKIEGGSSANLMQKKNPHASNNNNKKVKPDVKPKATTNFKKKGKGKVKGDFFLCGKPEHWAKDCPEHKDKKFANMVISEGRGTLGYGKFLPTVLSVCHSPDWWVDTGANIHVCADISLFSSYQVGRGSSFLMGNGSLAAVHGVGTVDLKFTSGKIVQLKNVQHVPSIKKNLVSGSLLCRDGFRLVFESNKCVVSKYGTFIGKGYDSGGLFRFSLDDMCNKVVNHVNDDDDESNVWHLRLCHVNFGCMTRLANMSLIPKFTLVKGSKCHTCVQSKQPRKPHKASEARNLAPLELVHFDLCEMNGVLTKGGKKYFMTLIDDCTRFCYVYLLKTKDEALHYFKIYKDEVENQLERKIKRLRIPTKHKEVTPFEEWERKKLNLSHLRTWGCLTKVNVLIAKKRKLEPKTVDCVFLGYAIHSVGYRFLIVNSGVPDMRVGTITESRDATFFENEFPMKNAPSTSSQEPILSPEHFVPIEHIDQTLEENPEEDNIVATRKSKRQRTAKSFGYDYIVYLVDDTPRTIEEAYSSPDADYWKEAVCSEMDSIMSNGTWEVVEHPYGCKPVGCKWVFKKKLRPDGTIEKYKARLVAKGYTQKEGEDFFDTYSSVACLTTIRVLLALAASHGLLVHQMDVKTAFLNGELEEEIYMDQPDGLNVIEEVKDFLSKSFEMKDLGVADVILNIKLLRGVEGGITLVQSHYVDKVLSRFGYSDCKAAPTPYDPSVLLRKNRRIARDQLRYSQIIGSLMYLASATRPDISFAVSKLSRLVSNPGDDHWHALERVMRYLKGAMSYGIHYARYPKVLEGYSDSNWISDADDIKATSGYVFTLGGGAVSWKSCKQTILTRSTIEAELTALDTATVEAEWLRELLMDLPVVEKPVPAILMNCDNQTVIIKVNSSKDNMKSSRHVKRRLKSVRKQKNSGVIALDYVQTAKNLADQFTKGLPRNVIDCASREMGLRPT

SEQ ID NO: 189167 - protein, 472 aa, Oryza sativa
  unsure (1)..(472): unsure at all Xaa locations
  Clone ID: PAT_MRT4530_85701C.1.pep
MSAPGAGAAAAAGGDGGDGAPPGAAAGGGAPGAGAGAANNNTNGGSSASQSSGGPFSGYILLLFLFLLLALYCYVPVPDIHDASSMLPRYCYVLLPDIHNVVHDAFSMLLVMLHAVTRSPYTVYAMIIVLTFWIKICRFMTIFPTIQKPDRSFSVVGFAAALKPHAFDGSNYKRWKARALLWLTAMQCFYVSRGKRSEPPLSPEEEAKFEASDYLFRGALISVLTDNIVDVYMHMPSGKDMWDALEAKFGVSDAGSELYVIEQFYDYKMVDDRSVVEQTHEIQMLAKELENNNCELPDKFVAGGIIAKLPPSWSDFATFLKHKRQEFSEKARAKDVRGKKVEGGSSANMVQKKNPHASRNNKKVKPDVKPKAATNFKKKGKGKAKGDCFVCGKSGHWAKDCPERKDRKSANMVISEGGGTSGXVGRGSSLLMGNGSLAAVHGVGTVDLKFTSGNTVQLKNVQHVPSIKKNLV

SEQ ID NO: 189168 - protein, 543 aa, Oryza sativa
  unsure (1)..(543): unsure at all Xaa locations
  Clone ID: PAT_MRT4530_85702C.1.pep
MAIKDWFAGCPGRTYPGPGPGQGFNTQNSLEIWAKFLDVTPGEGRSAYGFAQISGLFFVQTISFQPWRSGQPYGRSDRPLATGLTAPDRQCKISFRLTECFLNLLLIFLYCSLDSAMPPRTRHGHQAAVQEPECEHEESSGEEYEQFVVNIRNSAQYTILRHHDQFKRPRDTTDPRFHTAFQKTIYEQLYRSRAFAKHKWISWRNINETLEFTSLQALFRAVGIDCIVIMAQDYDEELIRQFYATTGVAGDCSEMKWMSHTLQYSISRRQFRRLLNIRFDFGDDLHKEHTHNPLSIDYLSQVYEDGRRHXTHGKVAGLMTILSVVNRIVRATILPRCGNNDDIKGVAWHVINAIMQGRQFDVGNFIMQEIAISKGTFSQXIYHAPYIMRXIQAQLGSVGNNLKKHKQYKPGLQLGTPHTPRMRHXSFHLGAISSSAPPPPQGINEYFTPPYAYFGMPLQDYFNSVLGAINSLSESIQRLTTEHEGXAMHEDARGIRSEVARISSQVTSLDRRMTTMENTHAYVYSRCRDPSSSSSHYPIPHPP

SEQ ID NO: 189169 - protein, 1371 aa, Oryza sativa
  Clone ID: PAT_MRT4530_85703C.1.pep
MSGVAAAAAGGDGRGGAPPGAGAGGGAPGAGAGAANDNINGGNSASQSSGGPSSEYILLLFPLLALSLYCYVLYVPVPDIHDASSMLLRYCNVPVPDIHDAHGMLLVMLRAPYTAYAMIIALTFWIKICRFMTIFPTIQKSDRSFLVVGFAAALKPHAFDDSNYKRWKARALLWLTAMQCFYVSRGKRSEPPLSPEEEAKFEASDCLFRGALISVLTDNIVDVYMHMPSGKDMWDALEAKFRVSDAGSELYVMEQLYDYKMVDDRSVVEQAHEIQMLAKELENNNCELPDKFVAGGIIAKLPPSWSDFATSLKHKRQEFSVSDLIGSLGVEEKARAKDVRGKKVEGGSSANMVQKKNPHASHNNKKVKPDVKPKAATNIKKKGKGKSKGDCFVCGKSGHWAKDCPERKDRKSANMVISEGGGTSGYGKILPTVLSVLHSPDWWVDTGANIHVGRGSSLLMGNGSLAAVHGVGTVDLKFTSGKTVQLKNVQHVPSIKKNLVSGSLLCREGFRLVFESNKCAVSKYGTFVGKGSKCHTCVQSKQTRKPHKASEARNLAPLELVHSDLCEMNGVLTKRGKKYFMTLMDDCTRFCYVYLLKTKDEALHYFKIYKAEIENQLERKIKRLRSDRGGEYFSNEFASFCEEFRIIHERTPPYSPQSNGMAERKNHTLIEMVNAMLDTAGLSKEWWGEAVLTACHVLNKIPMKHKEVTPFEEWQRKKLNLSYLQTWGCLAKVNVPIAKKRKLGPNTVDCVFLGYAIHSVGYRFLIVNFGVPDMHVGTILESRDATFFDNEFPMKHTPSTSSKETVMPHEHFAPIEHNDQTPEENPEEDNIVDTRKSKRKRVAKSFGDDYIVYLVDDTPRTIEEAYSSPDADYWKEAVRSEMDSIMSNGTWEVVEHPYGCKPLGCKWVFKKKLRPDGTIEKYKARFVAKGYTQKEGEDFFDTYSPVARLTTIRVLLALAASHGLLVHQMDVKTTFLNGELEEEIYMDQPDGYILKGQEGMVCKLLKSLYGLKQAPKQWHEKFDTTLTSAGFVVNEADKCVYYRYGGGEEVILCLYVDDILIFGTSLNVIEEVKDYLSKSFEMKDLGEADVILNIKLQRGDEGGITLVQSHYVDKVLSWFGYSDRKPAPTPYDPSVLLRKNRKIARDQLRYSQIIGSLMYLASAMRPDISFAVSKLSRFVLNPGDDHWQALERVMRYIKGTMSYGIHYTGYPKVLEGYSDSNWISDADEIKATSGYVFTLGGGAVSCKSCKQTILTRSAMKAELTALDTATVEAEWLRELLMDLPVVEKPVPAILMNCDNQTVIIKVNSSKDNMKSSRHIKRRLKSVRKQKNSEVIALDYVQTARNLTDQFTKGLPRNVIDSASREMGLIPT

SEQ ID NO: 189170 - protein, 1126 aa, Oryza sativa
  Clone ID: PAT_MRT4530_85704C.1.pep
MQCFYVSRGKRSEPPLSPEEEAKFEASDCLFRGALISVLADNIVDVYMHMPSGKDMWDALEAKFGVSDAGSELYVMEQFYDYKMVDDRSVVEQAHEIQMLAKELENNNCELPDKFVAGGIIAKLPPSWSDFATSLKHNRQEFSVPDLIGSLGVEEKARAKDVQGKKVEGGSSANMVQKKNPHASHNNKKVKPDVKPKAATNFKKKSKGKAKGDCFVCGKSGHWAKDCPERKDRKSANMIISEGGGTSGYGKILPTVLSVFHSPDWWVDTGANIHVRRGSSLLMGNGSLAAVHGVGTVDLKFTSGKTVQLKNVQHVPSIKKNLVSGSLLCREGFRLVFESNKCVVSKYGTFVGKGYDSGGLFRFSLNDMCNNHNAVNHISENDESNDEALHFFKIYKAEIENQLERKIKRLRSDRGGEYFSNEFASFCEEFGIIHEMTPPYSPQSNGVAERKNRTLTEMVNAMLDTAGLSKEWWGEAVLTACHVLNKIPMKHKEVTPFEEWERKKLNLSYLRTWGCLAKVNVPIAKKRKLGPKTVDCVFLGYAIHSVGYRFLIVNSGVPDMHVGTILESRDATFFENEFPMKYTPSTSSKETIMPHEHFAPIEHNDQTPEENPEEDNIVDTRKSKRQRVAKSFGDDYIVYLVDDTPRTIEEAYSSPDADYWKEAVRSEMDSIMSNGTWEVVERPYGCKPVGCKWVFKKKLRPDGTIEKYKARLVAKGYTQKEGEDFFDTYSPVARLTTIRVLLALAASHGLLVHQMDVKTAFLNGELEEEIYMDQPDGYVLEGQEGMVCKLLKSLYGLKQAPKQWHEKFDTTLTSAGFVVNEADKCVYYRYGGGEVVILCLYVDDILIFGTSLNVIEEVKDYLSKSFEMKDLGEADVILNIKLQRGDEGGITLVQSYYVDKVLSRFGYSDCKPAPTPYDPSVLLRKNRRIARDQLRYSQIIGSLMYLASATRPDISFAVSKLSRFVSNPGDDHWQTLERVMRYLKGTMSYGIHYTGYPKVLEGYSDSNWISDADEIKATSGYVFTLGGGAVSWKSCKQTILTRSTMEAELTALDTATVEAEWLRELLMDLPVVEKPVPAILMNCDNQTVIIKVNSSKDNMKSSRHIKRRLKSVRKQKNSGVIALDYV

SEQ ID NO: 189171 - protein, 1457 aa, Oryza sativa
  unsure (1)..(1457): unsure at all Xaa locations
  Clone ID: PAT_MRT4530_85705C.1.pep
ASGSCVRGPRVGLPRRRRRQAASRAPSPPAPPSLPAPSPPVPPPRPPAPSPPAPPPPTPAPSGAGTGAPGAGAPIDNTNGGSSASQSSGGTFTGYNSLLLLRFLLFRLVTMLLRSMYXMVLIISEACSCLCLIXITRSTHIVHAMIIVLIFWIKICXYMTISPTIQKPDRSFSVVGFAAALKPHAFDGSNYKRWKARILLWLTAMQCFYVSRGKRSEPPLSPKEEVMFEASDCLFRGALINVLADNIVDMYMHMPLGKDMWDALEAKFGVSDASSELYVMEQFFDYKMVDDRSVVEQAHEIQMLAKELENNNCELPDKFVARGIIAKLPPSWSDFATSLKRKRQEFSVSDLIGSLGVEEKARAKDNRGKKVEGGSSANMVQKKNPHASHNNKKVKPDVKPKATTNFKKKGKGKAKGDCFMCGKSGYWAKDCPERKDRKSANMVISEGGGTWGYDKILPTVLSVFHSPDWWIDIGANIHVCVDISLFSSYQVGRGSFLLMGNGSLAAVHGVGTVDLKFTSGKTVQLKNVQHIPSIKKNLVSGSLLCREDFRLVFESNKCVVSKYGTFIGKGYDSGGLFRFSLDDMCNNNNVVNHISENDESNVWHSLLCHVNFGCMTRLANXMSLIPKFTLVKCFKCHTCVQSKQPRKPHKASEARDLAPLELVHSDLCEMNGVLTKGGKKYFMTLIDNCTRFCYVSLLKTKDEALHYFKTYKAKVENQLERKIKRLRSDRGGEYFSNEFTSFYEEFGIIHERTSPYSPQSNGIAERKNRTLTEMVNAMLDTAGLSKEWWGEAVLIACHVLNKIPMKHKEVTPFEEXERKKLNLSYLRTWGCLAKVNVPIAKKRKLGPNTVDCVFLGYAIHSVGYIFLIVNSGVPDMRVGTIIESRDATFFENEFPMKNTPSTSSQETVIPHEHFAPIEHNDQTPEGNPEEDNIVDTRKSKRQRVAKSFGDDYILYLVDDTPRTIEEAYSSPDADXWKEAVRSEIDSIMSNGTXEVVEHPYGCKPVGCKWVFKKKLRPDGTIEMYKARLVAKGYTQKEGKXFFDTYSPVARLTTIQVLLALAASHGLLVHQMDVKTAFLNGKLEEEIYMDQPDWYVLEGQEGMVCKLLKSLYGLKQAPKQWHEKFDTTLTSAGFVVNKADECVYYRYGGGEGVILCLYVDDILIFGTSLNVIEEIKDFLSKSFEMKDLRESDIILTMKLLRGDEGGITLVQSHYVDKVLTLTPYDPSVLLRKNRRIARDQLRYSQIIGSLMYLASAMRPDISFAASKLSRFVSNPGDDHWQALERVMRYLKGTMSYGIHYTXYPKVLEGYSDSNWISDADEIKATSGYVFTLGGGVVSWKTCKQTILTRSTMEAXLTALDTTTVEADXLRELLMDLLVVEKPVPAILMNCDNQTVXKDNMKSSRHIKRRLKSVRKQKNSAVIALDYVQTARNPRWRSLRKQSKNRLESRSAESELDED

SEQ ID NO: 189172 - protein, 1126 aa, Oryza sativa
  Clone ID: PAT_MRT4530_85706C.1.pep
MQCFYVSRGKRSEPPLSPEEEAKFEASDCLFHGALISVLADNIVDVYMHMPSGKDMWDALEAKFGVSDAGSELYVMEQFYDYKMVDDRSVVEQAHEIQMLAKELENNNCELPDKFVAGGIIAKLPPSWSDFATSLKHKRQEFSVPDLIGSLGVEEKARAKDVRGKKVEGGSSANMVQKKNPHASHNNKKVKPDVKPKAATNFKKKGKGKTKGDCFVCGKSGHWAKDCPECKDRKSANMIISEGGGTSGYGKILPTVLSVFHSPDWWVDTGANIHVGRGSSLLMGNGSLAAVHGVGTVDLKFTSGKTVQLKNVQHVPSIKKNLVSGSLLCREGFRLVFESNKCVVSKYGTFVGKGYDSGGLFRFSLNDMCNNHNAVNHISENDESNVWHSRLCHVNFGCMTRLANMSLIPKFTLVKGSKCHTCVQSKQPRKPHKASEARNLAPLELVHSDLCEMNGVLTKGGKKYFMTLIDDCTRFCYVYLLKTKDEALHYFKIYKAEVENQLERKIKRLRSDRGGEYFSNEFASFCEEFGIIHEMTPPYSPQSNGVAERKNRTLTEMVNAMLDTAGLSKECTSSKETVMPHEHFAPIEHDDQTPEENPEEDNIVDTRKSKRQRVAKSFGDDYIVYLVDDTPRTIEETYSSPDADYWKEAVRSEMDSIMSNGTWEVVERPYGCKPVGCKWVFKKKLRPDGTIEKYKARLVAKGYTQKEGEDFFDTYSPVARLTTIRVLLALAASHGLLVHQMDVKTAFLNGELEEEIYMDQPDGYVLEGQKGMVCKLLKSLYGLKQAPKQWHEKFDTTLTFAGFVVNEADKCVYYRYGGGEGVILCLYVDDILIFGTSLNVIEEVKDYLSKSFEMKDLGEADVILNIKLQRGDEGGITLVQSHYVDKVLSRFGYSDCKPAPTPYDPSVLLRKNRRIARDQLRYSQIIGSLMYLASATRPDISFAALERVMRYLKGTMSYGIHYTGYPKVLEGYSDSNWISDADEIKATSGYAFTLGGGAVSWKSCKQTILTRSTMEAELTALDTATVEAEWLRELLMDLPVVEKPVPAILMNCDNQTVIIKVNSSKDNMKSSRHIKRRLKSFRKQKNSGVIALDYVQTARNLADQFTKGLPRNVIDSASREMGLIPT

SEQ ID NO: 189173 - protein, 52 aa, Oryza sativa
  Clone ID: PAT_MRT4530_85707C.1.pep
ILLVLLPACMVRIVFTTITERFGQIGLDLRNVGWSLLRVGNSIGLYVKTLKQ

SEQ ID NO: 189174 - protein, 60 aa, Oryza sativa
  Clone ID: PAT_MRT4530_85708C.1.pep
INNLFEKLPKTIRVSSAHGIYTGKELTMGRRSLITAVLPIEHSFQHSINTPFAVRAAGNS

SEQ ID NO: 189175 - protein, 1082 aa, Oryza sativa
  Clone ID: PAT_MRT4530_85709C.1.pep
MSGVAAAAGGDGGGGAPPTGAGASAPGGGAVNDNNNGGNSASPSSGGPFSGAIPVPLLALSLYYVRYVLVPVLHDASMRYCYVPVPDIHDAHSMLLVMLRSPYTAYAMIIALTFWIKICRLMTIFPTIQKLDRSFSVVGFAAALKPHAFDGSNYKRWKARALLWLTAMQCFYVSRGKRSEPPLSPEEEAKFEASDCLFRGTLISVLADNIVDVYMHMPSGKDMWDALEAKFGVSDADSELYVMEQFYDYKMVDDRSVVEQAHEIQMLVKELENNNCELPDKFVAGGIIAKLPPSWSDFATSLKHKRQEFSVSDLIGSLGVEEKARAKDVRGKKVEGGSSANMVQKKNPHASHDNKKVKPDVKSKATTNFKKKDKGKAKVDCFVCDKSGHWAKDCPERKDRKSANMVISEGGGTSGYGKILSTVLSVFHSPDWWVDTGANIHVGRGSSLLMGNGSLAAVHGVGSKCHTCVQSKQPRKPHKASEARNLAPLELVHSDLCEMNGVLTKGGKKYFMTLIDNCTRFCYVYLLKTKDEALYYFKIYKAEEVTPFEEWERKKLNLSYLQTWGCLAKVNVPIAKKWKFGPNTVDCVFLGYAIHSVVYRFLIVNSGVPDMHVGTILESRGATFFENEFPMKHTPSTSSKETVMPHEHLAPIEHNDQTPKENPEEDNIVDTRKSKRQRVAKSFGDDYIVYLVDDTPRTIEETYSSPDADYWKEAVRSEMDSIMSNGTWEVVERPYGCKPVGCKWVFKKKLRPDGTIEKYKARLVAKCYTQKEGEDFFDTYSPVARLTTIRVLLALAASLGLLVHQMDVKTAFLNGELEEEIYMDQPDGYVLEGQEGMVCKLLKSLYGLKQAPKQWHEKFDTTLTSAGFVVNEADKCVYYRYGGGEGVILCLYVDDILIFGTSLNVIEEVKDYLSKSFEMKDLGEADVILNIKLQRGDEGGITLVQSHYVDKVLSRFGYSDCKPAPTPYDPSVLLRKNRRIARDQLRYSQIIGSLMYLASATRPNISFAVSKLSRFVSNPGDDHWQALERVMRYLKGTMSYGIHYTGYPKVLEGYSDSNWISDADEIKATSGYVFTLGGGAVS

SEQ ID NO: 189176 - protein, 260 aa, Oryza sativa
  Clone ID: PAT_MRT4530_8570C.1.pep
MWSFASNAIAGSIRKKAQPSKCSQSNPDCSDDDVSSCASREEGLECPICWESFNLVENVPYVLWCGHTMCKNCILGLQWAVVKFPTLPIQLPLFISCPWCNLLSFRLVYKGNLKFPRKNYFLLWMVESMNGERAKFHSPSHEERHSLCPSGGGPSSSQHHRRPAPRTESASGRERSVAGNVFNTYSISASLQKIMLSFVQMTAKFPLVIIFLLIVLYAVPASVAVLVLYVLVTVLFALPSFLILYFAYPSLDWLVREIFN

SEQ ID NO: 189177 - protein, 222 aa, Oryza sativa
  Clone ID: PAT_MRT4530_85710C.1.pep
MGNALTGKRRVAKVMTVDGATFRYRAPATAGAALRGHPAGHQLLESEEVRRLGVRARPLDRDAPLKPGKLYFLVQLPRGAAGYGGDDDPRAPRKTWSGALHVGARERLENPDAVAAHRVGHGVGGAGGEGGGRRPAASRRGGRRPWSKDAAEAAERIMQLCVARDQGGAGAGAAVTLAASGPVSAMSGRKTSAMKKEFAGVCAALGVSNLFGSRGAHVRAAQ

SEQ ID NO: 189178 - protein, 1093 aa, Oryza sativa
  Clone ID: PAT_MRT4530_85711C.1.pep
MWDALEAKFGVLDAGSELYVMEQFCDYKMMLAKELENNNCELPDKFVAGGIIAKLPPSWLDFATSLKHKRQEFSVSDLIGSLGVEEKARIKDNRSKKVEGGSSANMVQKKNPHASHNNKKVKPDVKPKATTNFKKKGKGKAKGDYFVCGKSGHWAKDCPERKDRKSTNMVISEEGGGTSGYGKLLPTVLSVFHSPDWWVDTGANIHVGRGSFLLMGNGSLAAVHGVGTVDLKFTSGKAVQLKNVQHVPSIKKNLVSGSLLCREGFRLVFESNKCVVSKYGTFIRKGYDNGGLFCFSLDDMCNNNNVVNHISENDESNVWHSRLCHVNFGCMMRLANMSLIQKFTLVKGSKCHTCVQSKQPHKPHKASEARDLAPLELVHSDLCEMNGMLTKGGKKYFMTLIDDCTRFCYVYLLKTKDEALHYFKTYKAEVENQLERKIKRLRSNRGGEYFSNEFTSFCEEFGIIHERTPPYSPQSNGVAKRNNCTLTEMVNAMLDTAGHFKEWWGEAVLIACHVLNKIPMKHKEVNVPIAKKHKLGPNTVDCVFLGYAIHSVGYRFLIVNSGVPDMRVGTIIESRDATFFENEFPMKNTPSTSSQETVIPHEHFAPIEHNDQTLEGNPEEDKIVDTRKSKRQRVAKSFGDDYIVYLVDDTPRTIEEAYSSPDADYWKEAVRSEMDSIMSNGTWEVFERPYGCKPVGCKWVFKKKLRPDGTIEKYKARLVAKGYTQKEGEDFFDTYSLVARLTTIRVLLALAASHGLLVHQMDVKIAFLNGELEEEIYMDQPDGYVLEGQEGMVCKLLKSLYGLKQAPKQRHEKFDTTLTFAGFVVNEADKCVYYRYGGGEGVILCLYVDDILIFGTSLNVIEEVKDFLSKSFEMKDLGEADVILNIKLLRGDEGGITLVQSHYVDKALKRVMRYLKGTELWALSYGIHYTGYPKVLEGYSDSNWISDANEIKATSGYVFTLGGGAVSWKSCKKTILTRSTMEAELTALDTATVEAEWLRELLMDLPVVEKPVPAILINCDNQTVIIKVNSSKDNMKSSRHIKRRLKSVRKQKNSGVIALDYVQTAKNLADQFTKGLPRNVIDSASREMGLIPT

SEQ ID NO: 189179 - protein, 58 aa, Oryza sativa
  Clone ID: PAT_MRT4530_85712C.1.pep
KQPSSQRGILLVLKIQQVKGTPELQTPHDQKWRLTRGYLGHSYGGGHLHGIYELPNSG

SEQ ID NO: 189180 - protein, 1084 aa, Oryza sativa
  Clone ID: PAT_MRT4530_85713C.1.pep
MMYRETFADEVGHIRKSFEMLEGANVQQVIPEAAGGYAQDREQDERWDLLRRRHGVQARSAAQIHLCRGHRREATLLHFVVQEMTLSSAAEAADIAAGLAAELTNVRKTATVDLDVLTTSVSGPSHGLSQIKELIGSDLSGYERNQCFARGLHVTTLFTLFAFPLLKLDFGSESIRKSGRSSEPPLSPEEEAKFEASDCLFRGALISVLADNIVDVYMHMPSGKDMWDALEAKFGVSNAGSELYVMEQFYDYKMLPDKFVAGGIIAKLPPSWSDFATSLKHKRQEFSVSDLIGSLGVEEKARATDIREKKVEGGSSANMVQKKNPHASYNNKKVKPDVKPKAATNFKKKGKGKAKGDCFVCGKSGHWAKDCPERKDRKSANMVIGEGGGTSGYGKILPTVLSVFHSPDWWVDTGANIHVGRGSSMLMGNGSLAAVHGIGTVDQKFTSGKTVQLKNVQHVPSIKKNLVSGSLLCREGFRLVFESNKCVVSKYGTFVRKGYDSGGLFRFSLNDMCNNHNVVNHISENDESNVWHSRLCHVNFSCMTRLANMSLIPKFTLIKGSKCHTCVQSKQPRKPHKASEARNLAPLELVHSDLCEMNGVLTKGGKKYFMTLIDDYTRFCYVYILKRKDEALHYFKIYKAEVENQLERKIKRLRSDRGEEYFSNEFASFCEEFGIIYERMPPYSPQSNGVAERKNRTLTEMVNAMLETAGLSKEWWGEAVLTACHVLNKISMKHKEVTPFEEWERKKLNLSYLRTWGCLAKHFAPIEHNDQTPEKNPEEDNIVDTHKSKRQRVAKSFGDDYIVYLVDDTPRTIEETYSSPDADYWKEIMDVKTAFLNGELEEEIYMDQPDGLNVIEEVKDYLYKSFEMKDLGEANVILNIKLQRGDEGGITLVQSHYVDKVLSRFGYSDCKPAPTPCDPSVLLRKNRRIVRDQLRYSQIIGSLMYLASATRPDISFAVSKLSRFVSNPGDDHWQALERVMRYLKGTMSYGIHYTGYSKVLEGYIDSNWISDADEIKVTSGYVFTLGGGVVSWKSCKQTILTRSTMEAELTALDTATVEAEWLRELLMDLPVVEKPVRASYPNEL

SEQ ID NO: 189181 - protein, 1224 aa, Oryza sativa
  Clone ID: PAT_MRT4530_85714C.1.pep
MLSAAAVMAPAPAAAKSSLEVLLETIKKRDEQPKDAPPALPARPTCRGRLPSARRPSLPSGVKLENGAAKGAVADTVMAGVNLENGAAEGAVADMVMADKKPGVEMKICVQEAKEENVVKTRIFGAKRKFSNGEVLEESPYADNIHKERKEMMVSKELPSVSPRTKTNGKPVFTDTMDYVLQKKLRVWCSSPDATWKLGQIQSVSGDDVEILLVNGEVLTLSPDRLLPANPDILDGVDNLIHLSYLNEPSVLYDLQSRYSRDLIYTKAGPVLVAVNPLKEVALYGKDFISQYRKKLNDDPHVYAIADLAFNEMRRDGVNQSIIISGESGAGKTETAKIAMQYLATLGDARGMESEVLQTNAILEALGNAKTSRNDNSSRFGKLTEIHFSETGKLSEKLFLKEADYYNYLKQSACLRIDGVDDAKRFSMLVDALDIIQISKEDQMKLFSMLAAVLWLGNISFSVIDNENHVEIVSNEGLATAAKLLGCSAPQLMNALTTRKIQAGKDNIIQKLTLTQAIDARDALAKSIYAHLFDWVVEQINHSLGTGREHTWRSISILDIYGFESFIKNGFEQFCINYANERLQQHFNRHLFKLEQEEYLEDGIDWANVEFVDNADCLTLFEKKPLGLLSLLDEESTFPKATDFSFANKLKQHLRGNSAFRGEQEGAFKICHYAGEVTYDTTGFLEKNRDPLNSELIQLLSSCKSELPKYFASVMVADSQNKSTLSWHSAVDSQKQSVVTKFKAQLFKLMQQLENTTPHFIRCIQPNSKQRPMLFEHDLVSHQLKCCGVLEVVRISRAGYPTRMTHQQFAERYGCLLLRSIASQDPLSISVAVLQQFNIPPEMYQVGYTKLFLRTGQVAALENAKNRMLHGALRIQKNFRGLCTRQEYQGLKKGAMTLQSFIRGEKARVHFDHLVKRWKASVLIQKYARRRIAATMFIDQLKYVVLLQSVMRGCLARKKYKCLKEEKDSKASHRKVIHVRNNVSQARMYHVYPLTISIPWQETNGDYPRQPVITELQGRVSKAEAALRDKEEENEMLKQQLDQYEKKWSEYEAKMKSMEEAWKKQLSSLQLSLVAAKKSLTAEDVASRAARTDAAPMHAHYDSEDTSTGTHTPEGTEFKYQNHNSEARVAAPNSDRRINAVNHLAKEFEDRRQVFEDDAGFLVAVKSGQVGSNMNPDDELRKLKDRFATWKKDYKSRLKETKVNLQKVGEEKSRKRWWGKKSSK

SEQ ID NO: 189182 - protein, 218 aa, Oryza sativa
  Clone ID: PAT_MRT4530_85715C.1.pep
RLLSCSSSCCCSPPNLLAARLSASAVSLPSRLVPCALACSASICCSPARHRGARLLFHDCARLRLFAIAGSPKHLVAGLQDRTTMTPWMDEWGQRLSARHRSGDGEESTEEARWMPGVAEGAAERGIEPSRARDRGGCEERGEVDDSGGGEGMHVSAPTAPILKRWISGSNGYDCACLSPLQNFKVVEISGKDRYRYLSLRDHSLSRTAVSCFYCARS

SEQ ID NO: 189183 - protein, 198 aa, Oryza sativa
  unsure (1)..(198): unsure at all Xaa locations
  Clone ID: PAT_MRT4530_85716C.1.pep
RSSPPAWSKAATAGMCGEAADPAPPRPDPAIPRLELARRRREAAGRHATVVAARGCRAAWWRAAVVVGRGGWRSPSSAQAARRRCSGRGGRXRRCERERPGLGGWATDAXRGGQVGSGGRAMGAPAGGTGAKAAMFPASAQAQMVVLRELAAIGRLPRCRLLKQCHPIPGSPSARSGEEAGGWWNGEVLGQFSGMVVR

SEQ ID NO: 189184 - protein, 212 aa, Oryza sativa
  unsure (1)..(212): unsure at all Xaa locations
  Clone ID: PAT_MRT4530_85717C.1.pep
YICSNKHLLAVEEGCAPEHTPRTMCQPXRTHTTEREAKHRTGHRYARPIATELTTPLRHEDSKMTPSRGSRRQKTPSSSXPKTGQGFHPELLAEGGGIPQQCPQEGYYVRRRXTVGPKXGLSFRSEPPATVVHHPIRIHHLNIGGTWLPPHPTDAPPSAGFIEPPSLRAGPGPLRSTTRRPPRQIWPKENPGLDGIASAETPHREGEELQEG

SEQ ID NO: 189185 - protein, 204 aa, Oryza sativa
  unsure (1)..(204): unsure at all Xaa locations
  Clone ID: PAT_MRT4530_85718C.1.pep
EEKVKKKVLRRQLAVEEGCAPEHTPRTMCQPXQTHTTERKAKHRTSHRYARPIATELTTPLRHEDSKITPSRGSRRQKTPLSSXPKTGQGFHPELLAEGGGIPQQCPQEGYXPEDEVTIGPKXGLSFRSAPSTTMVRHPIRIRHLNIGGTWLPPHLTDAPPSAGFIEPPSLRTGLGPLRSTTCWPPHQIWPKENLGLDGIASAA

SEQ ID NO: 189186 - protein, 192 aa, Oryza sativa
  unsure (1)..(192): unsure at all Xaa locations
  Clone ID: PAT_MRT4530_85719C.1.pep
LAVEEGCAPEHTPRTMCQPXRTHTTEREAKHRTGHRYARPIATELTTPLRHEDSKMTPSRGSRRQKTPSSSXPKTGQGFHPELLAEGGGIPQQCPQEGYYVRRRXTVGPKXGLSFRSEPPATVVHHPIRIHHLNIGGTWLPPHPTDAPPSAGFIEPPSLRAGPGPLRSTTHRPPRQIWPKENPGLDGIASAA

SEQ ID NO: 189187 - protein, 117 aa, Oryza sativa
  Clone ID: PAT_MRT4530_8571C.1.pep
LSPIAAIHQHFDWITPLPPAPPLGSRRRPSLTPPATQTLSLCASIPSRPRANPILIAPSLPAKDRVFFFCPSICRDRFHNLAAWRFYRLVRVQNSRHCSTCPRLVSRGENKTQIKLY

SEQ ID NO: 189188 - protein, 152 aa, Oryza sativa
  unsure (1)..(152): unsure at all Xaa locations
  Clone ID: PAT_MRT4530_85720C.1.pep
NPTTTNIIFFFAPLAIAACSXASAQVDAVTQAYRQYQMQPHLMLQQQXMLTPSREFVRHSVQKQWQAPFFQSPELQLRNCQAMRPACCQQLRMIAQHSHCQDISRGQVIVQQLQLPQFAAVYFNQAQAQAQAMMALNLPAICGIYPSYNTAP

SEQ ID NO: 189189 - protein, 164 aa, Oryza sativa
  unsure (1)..(164): unsure at all Xaa locations
  Clone ID: PAT_MRT4530_85721C.1.pep
AQRRTSSPRALSPPRRRAHPPRVLAPSPPGGNRCAPPPQSAPPSXAARPSVPRKIAAPPLHRCASPTSPRRRPPSSPPPXSPPCLHCGYALPLSVLTLSPRLSSFRPPTTDAATPRSDSSPTPTPTPTPYPPPPTPPPSTPTPVAVWRTAASLSPSGVCTICVC

SEQ ID NO: 189190 - protein, 120 aa, Oryza sativa
  Clone ID: PAT_MRT4530_85722C.1.pep
MNKLGLHSLRQRTGTFRALATSGEGLYEGLDWLSNNIASKLERFGSWISEPCTSAGLHIIYISPTTHRLPLTKLFVEASTRLFLFVDHMVNVCCSHYSFKIVAELIDYVLSICTRLSEMV

SEQ ID NO: 189191 - protein, 107 aa, Oryza sativa
  unsure (1)..(107): unsure at all Xaa locations
  Clone ID: PAT_MRT4530_85723C.1.pep
MALLRCLFLLAVLLPHRNGAVVAAASPHHGPAPHDYREALTKSILFFERQRSXKLPPSQRVSWRGDSVPSPTCSSIKVXTCVGGYYDAGDNMKFGFPLAFSMTMLAW

SEQ ID NO: 189192 - protein, 43 aa, Oryza sativa
  Clone ID: PAT_MRT4530_85724C.1.pep
PLSPSPGSTLVTNGLPLTRAEIRAWRLPRLSRWGERAEQRMIG

SEQ ID NO: 189193 - protein, 89 aa, Oryza sativa
  Clone ID: PAT_MRT4530_85725C.1.pep
NNRISICNQWMEMILLTHHSMFCIFILHLFPGYSNWPACRIQQPNLERVIISLLFSSCCDLLIRSWKYINPHYIKKMKRRSQMPTSVLP

SEQ ID NO: 189194 - protein, 128 aa, Oryza sativa
  Clone ID: PAT_MRT4530_85726C.1.pep
EPGALFLKKRRMGFFWGFFERNQVKKKQFFRGAPPLGKIKKPRIPGGGFFGGGFLKFGPKGAPFFKFLHPPKKSGGVYYYYLYWGGGYYFFLPIIPPHPPFFFFGGKKKYPLFGVSFQKKKKFFFFFK

SEQ ID NO: 189195 - protein, 55 aa, Oryza sativa
  Clone ID: PAT_MRT4530_85727C.1.pep
PTTRIDTCTNPGTVDRQHSLMPLWRYLANAIVANRHSATLLSRQPLGPGCHASTA

SEQ ID NO: 189196 - protein, 136 aa, Oryza sativa
  Clone ID: PAT_MRT4530_85728C.1.pep
MSGVAAAAIGGGGAPPPTPTGAGSGAGAPGGGAVNDYNNGGNSASPSSGGPFSGYNLLLLLLLALYCVRYVLGSVLHDASSMLSHYWYVPVSDIHDAHSMLLVMLRSPYTAYAMIIVSISWIKICRIMTIFPTRSR

SEQ ID NO: 189197 - protein, 441 aa, Oryza sativa
  Clone ID: PAT_MRT4530_85729C.1.pep
MDVEGEVPAAAAEAVANGLGGAEPSPAPVSAEQLDVEAYAAQYTGRTRLARLLFIAERCGVEAVELEALRMAYDEIKRGEDTMFHREVTNKINGRLGPKYALDQAWTDSVNRRAEQRKEKLESELNGYRTNLIKESIRMGYNDIGDFFYAHGHLSDAFKSYIRTRDYCTTSKHIVQMCMNVILVSIELGQFPHVSNYVSKAEQTPDTLDPIIVAKLRAAAGLAYLATKKYKLAARKFVETGHELGNNYSEVIAPQDVAVYGALCALASFDRSDLKSKVIDNSNFRNFLELVPEVRELVNDFYSSRYGSCLEHLEKLKTNLLLDIHLHDHVETLYMDIRHKAIIQYTLPFISVDLNTMAAAFMTSVSMLEKELAALITENKIQARIDSHNKILYARHADQRNATFQRVLQTGNEFERDVKSLLLRANLIKHDFNQRAGQRKM

SEQ ID NO: 189198 - protein, 133 aa, Oryza sativa
  unsure (1)..(133): unsure at all Xaa locations
  Clone ID: PAT_MRT4530_8572C.1.pep
GGPLFLGLVCALKTNITTLXPLGRXXSGEGVFXATLVXXKGLXMKIKPYIPGXGVAFEHFWIHAGGRAGLDELEKNLEVAGWHMEPSRVALDRVGNTSRRSLWCGLGDTEANGRSMDRDRVWQIGFGSGFKGN

SEQ ID NO: 189199 - protein, 941 aa, Oryza sativa
  unsure (1)..(941): unsure at all Xaa locations
  Clone ID: PAT_MRT4530_85730C.1.pep
MQCFYVSQGKRSEPPLSPKEEAKFEASDCLFRGALISVLTDNIVDVYMHMPSGKDMWDALEAKFGVSDAVSELYVMEQFYDYKMMLAKEFENNNCELPDKFVAGGIIAKLPPSWSDFATSLKHKRQEFSVTDLIGSLGVEEKARVKDNRGKNIEGGSSANLVQKKNPHASHNNNNKKVKPDVKPKATTNFKKKGKGKAKGDCFVCGKPGHWAKNCPDRKDKKSANMVISEGGGTSGYGXRGSSLLMGNGSLAAVHGVGTVDLKFTSGKNVQHVPSIKKNLVSGSLLCRDGFRLVFESNKCVVSKYETFIGKGYDSGGSKCHTCVQSKHPRKPHKASEARNLAPLELVHSDLCEMNSVLTKGGKKYFMTLIDDCTRYCYVYLLKTKDEALHYFKIYKAEVENQLERKIKRLRSDRGGEYFSNEFTSFCEEFGIIHERTPPYSPQSNGVAERKNRTLTEMVNAMLDTAGLSKEWWGEAILTACHVLNKIPVKHKEVIPFEEWERKKLNFSYLRTWGCLAKVNVPIAKKRKLGPKTVDCVFLGYAIHSVGYRFLIVNSGVPDMRVGTITESRDATFFENEFPMKNTPSTSSQEPVLPHEHFAPIEHNDQTPEENPEEDNIVATRKSKRERTAKSFGDNYIVYLVDDTPRTIEEAYSSTDADYWKEVVRSEMDSIMSNGTWEVVERPYGCKPVECKWVFKKKLRPGGTIENLNVIEEVKDFLSKSFEMKDLGVTDVILNIKLLRGDEGGITLVQSHYVDKVLSRFGYSDCKPAPTPYDSSVLLRKNRRIARDQLRYSQIIGSLMYLASATRPDISFAVSKLSRFVSNPGDDHWQALERVMRYLKGTMSYGIHYTGYPKVLEGYSDSNWISDADEIKATSGYVFTLGGGAVSWKSCKQTILTRSTMEAELTALDTATIEAEWLRELLMDLPVVEKXKPVPAILMNC

SEQ ID NO: 189200 - protein, 237 aa, Oryza sativa
  Clone ID: PAT_MRT4530_85731C.1.pep
MAASRSTVDRVHPGSHRPAPWAPRISRTRGAGQLTAGPHTARPEAATSARPAGGGARAPMVAAGDHRRSGAATERGREGGKEAVVLSSSRVMAATKEAAGAEGGGGAARVNGDGGVPAVDGLGVVVDDVGGGAEAGGSPRQRRRAAGARRRRRRERATARARFRWGGWAANGGNGQGRYGEGLYGIGDERGRPEEGETGVGDPAAFNGAGEIRGGVSKRIRGRERGKWEKGGGNRGK

SEQ ID NO: 189201 - protein, 390 aa, Oryza sativa
  Clone ID: PAT_MRT4530_85732C.1.pep
MDSANNSSRRRRLYPENGPPLDGEAELPPLLLSFTAPPPGAPAPDPDPAPVGGVPPPLAVAAATPDMATSSRAGGTPQKPDHPPTRCRSQAKVWFRRHCSPAYPVQISGEGVVSEALLFPISRARKRSEARKREQLRRGEGETNTGKEAKKTDRTRGLLIYQEKERGRAVAEGIVGTWVSVAEGIVGTWVPISSLVGKTVGLYFSAHRCAPCIKFTAKLAAIYSNLKGKAEDFEIIYIPMDKEEDGYLRSCSDMPWLALPYDDGASSGALARYFDVREIPTLVVVGPDGKTVTREGRNLVNLYFDMAFPFTDEQIRLLQEMEDEDAKGYPPSLRHTGHRHELSIVSDKSGGGPYICCECDEQGLGWAYQCIACGYEIHLRCGRDMEGRAE

SEQ ID NO: 189202 - protein, 1327 aa, Oryza sativa
  unsure (1)..(1327): unsure at all Xaa locations
  Clone ID: PAT_MRT4530_85733C.1.pep
APESNTNVNTKGGNSASQSSGGPFSGSFSVVGFAAALKPHAFDGSNYKRWKARALLWLTAMQCFYVSWGKRSEPPLSPGEEAKFEASDCLFRGALISVLADNIVDVYMHMPSGKDMWDALEAKFGFSDAGSELYVMEQFYDYKMVDDCSVVEQAHGIQMLAKELENNNCELPDKFVAGGIIAKLPPAWSDFATSLKHKRQEFSVSDLIGSLGVEEKARAKDVRGKKVEGGSSANMVQKKNPHASHNNKKVKPDVKPKAATNFKKKGKGKAKGDCFVCGKSGHWAKDCPERKNRKSANMVVSEGRGTSRYGKILPTVLSVFHSPDWWVDTGANIHVCADISLFSSYQVGRGSLLMGNRSLAAVHGVGTVDLKFTSGKTMQLKNVQHVPSIKKNLVSGSLLCREGFRLVFESNKCVVSKYETFVGKGYDSGGLFRFSLNDMCNNHNVVNHISENDESNVWHSRLCHVNFGCMTRLANMSLIPKFTLVKGSKCHTCVQSKQPRKPHKASEARNLAPLELVYSDLCEINGVLTKGGKKHFMTLIDDCTRFCYVYLLKTKDEALHYFKTYKAEVENQLERKIKRLRSDRGGEYFFNEFASFCKEFGIIHERTPPYSPQSNGVAERKNCTLTEMVNAMLDIAGLSKEWWVEAVLIACHVLNKMPMKHKEVTPFEEWERKKLNLSYLRTWGCLAKVNVPIAKKRKLGPNTVDCVFLSYAIHSVGYRFLIINSGVPDMHVGTIIMSRDATFFENEFPMKHTPSTSSQETVTPHEHFTPIEHNDQTPEENPEEDNIVDTRKSKRQRVAKSFGDDYIVYLVDDTPRTIEEAYSSPDADYWKEAVRSEMDSIMSNGTWEVVERPYGCKPVGCKWVFKKKLRPDGTIEKYKARLVAKGYTQKEGEDFFNTYSPVARLTTIRVLLALAASHGLLVHQMDVKTAFLNGELEEEIYMDQPDGYVLEGQEGMVCKLLKSLYGLKQAPKQWHEKFDTTLTSAGFVVNEADKCVYYRYGGGEGVILCLYVDDILIFGTSLNVIEEVKDYLSKSFEIKDLGQADVILNIKLQRGDEGGITLVQSHYVDKVLSRFGYSDCKPAPTPYDPSVLLRKNRRIVRDQLRYSQIIGSLMYLASATRPDISFAVSKLSRFVSNPGDDHWXAREKVMRYLKGTMSYGIHYTGYPKVLEGYSDSNWISDADEIKATSGYVFTLAGGAVFWKSCKQTILTRSTMEAELTALDTATVEAEXLHELLMDLPVVEKPVPAILMNCDNQTVIIKVNSSKDNMKSSRHIKRRLKSVRKQKNSGVIALDYIQTVRNLADQFTKGLPRNVIDSASREMGLIPT

SEQ ID NO: 189203 - protein, 116 aa, Oryza sativa
  Clone ID: PAT_MRT4530_85734C.1.pep
IILEIVVTTTQFSTSHPTHFPTGWQTISKCIVAFILHLLHAKLPRTGASTAHNTHLSEHHALTTFSWSKPPWSLECHCCNPPHLRNHLCVSQPSSSTVALCLALSICTLHQHPIVV

SEQ ID NO: 189204 - protein, 1286 aa, Oryza sativa
  Clone ID: PAT_MRT4530_85735C.1.pep
MASTGENRGDNINGGNTTTSKSSGGTFSGYIFILPILLDVSLLILFAMAALRYYVNVDAYFILSMLKLYTSSTVTRFTHIANVMFIVLIFWIKICRIITKFPTIQKLDRSFLVVSFAASLKPHAFDGSNYKKWKARALLWLTVMQCFFVSRGKPSEPPLFPEEEAKFEATDCLFRGALISVLADSIVDVYMHMPSGKDMWDALEAKFGVSDVDSELYVMEQFYDYKMVDDCSVVGQAHENQMLAKELENNNCELPDKFVAGGIIAKLPPSWTDFATSLKHKRQEFSVTDLIGSLSVEEKARAQDNRGKKIEGGSSANLVQKKNPHASHNNNKKVKPDVKPKATTNFKKKGKGKAKGDCFVCGKPGHWAKDCPERKDKKSANMVISEGGGTLGYGKFLPTVLSVCHSLDWWVDTGANIHVFADISLFSSYQVGRGSSLLMGNGSLVAVHGVGTVDLKFTSGKIVQLKNVQHVPSIKKNLVSGSLLCRDGFRLVFESNKCVVSKYGTFIGKGYDSGGLFRFSLDDMCNKVVNHVSDDDDESNVWHSQLCHVNFGCMTRLANMSLIPKFTLVKGSKCHTCVQTKQPRKPHKSSEARKLAPLEIVHSNLCEMNGVLTKGGKKYFMTLIDDCTRFCYVYLLKTKDEVLHYFKIYKAEVENQLERKIKRLRSDRGGEYFSNEFTSFCKEYGIIHERTHSYSPQSNGVAERKNRTLTEMVNAMLDTAGLSKEWWGEAILTACHVLNRIPTKHKEVTSFEEWERKKLNLSHLRTWGCLAKRCHIFENEFPMKNAPSTSSQEPILSPEHFVLIEHIDQTLEENSEENNIVATRKSKRQRTAKSFGDDYIVYLVDDTPRTIEEAYSSPDVDYWKEAVRSEMDSIMSNGTWEVIECPYGCKPVGCKWVFKKKLRPDASHGLLVHQMDVKTAFLNGELEEEIYMDQPDGYVLEGQEGMVCKLLKSLYGLKQAPKQWYEKFDNTLTSTGFVVNEADKCVYYRNGGGEGVILCLYVNDILIFGTSLNVIEEVKDFLSKSFEKKDLGVADVILNIKLLRGDEGRITLVQSHYVDKVLSRFGYSDCKAAPTPYDPSVLLRKNRRIARDQLRYSQIIGSLMYLASATRPDISFAVSKLSRFVSNPGDDHWHALERVMRYLKGTMSYGIHYAGYPKVLEGYSDSNWISDADEIKATSGYVFTLGGGAVSWKSCKQIILTRSTMETELTALDTATVEAEWLRELLMDLPVVEKPIPAILMNCDNQTVIIKVNSSKDNMKSSRHVKRRLKSVRKQKNSRVIALDYV

SEQ ID NO: 189205 - protein, 1348 aa, Oryza sativa
  unsure (1)..(1348): unsure at all Xaa locations
  Clone ID: PAT_MRT4530_85736C.1.pep
MSRCLRNSIRLRTCTGRRAIKFLGIASNATALVLRGYCCCIGAFTKMSTEIGDKKMNDINGGNTASKSSGGTFSGSFSIVDFAASLKPDAFDGSNYKRWKAHTLLWLTAMHCFFVSLGKPSEAPLSPEEEAKFEASDCLFRGALFSVLADKIVDVYMHMPSGKDMWDSLEAKFGVSDANSERYVMEQFYDYNMVDDRSVVEQAHEIQMLAKELGNNNYELPDKFXDLIGSLGVEEKAKAKDNXGKRIEGGFSTNLVQKKNPHASHNNNKKVKPDVKSKATTNFKKKGKGKAKEDCFVCGKPGHWAKDCPERKDKKFANMVISEGGGTLGXGKFLPTVLSVCHSPDWWVDTGANIHVYADISLFSSYXVGRGSSLLMGNGSLAAVHGVGTVDLKFISGKIVQLKNVXHVPSIKKNLVSGSLLCTDGFRLVFESNKCVISKYGTFIGKGYDSGGLFRFSLDDMCNKVVNHVSDDDDESNVWHSQLCHVNFGCMTCLANMSLIPKFTLVKGSKXHTXVQSKQPRKPHKASEARNLAPLELVHSDLXEMNGVLTKGGKKYFMTLIEDCTRFCYVYLLKIKDEALHYFKIYKAEVENQLERKIKRLRSDRGGEYFSNEFTSFCEEYGIIYERTPPYSPQSNGVAERKNRTLTEMVNAMLDTAGLSKEWWGEAILTACHVLNIIPTKHKEVTPFEEWERKKLNLSDLRTWGCLSKVNVPIAKKRKLGPKTIDCVFLGYAIHSVGYRFLIVNSGVPDMRVGTITESRDATFFENEFPMKNAPSTSSQEPILSPEHFMPIEHIDQTLEENPEDDSIVATRKSKRQRTAKSFGDDYIVYLVNDTPRTTEEAYPSPNASYWKEAVHSEMDSIMSNGTWEVVEHPYGCKPVGCKWVFQKKLRPDGTIEKYKARLVAKGYTQKEGEDFFDTYSPVARLTTIRVLLALAASDGLLVHQMDVKTAFLNGELEEEIYMDQPDGYVLEGQEGMVXKLLKSLYVLKQAPKQXHEKFDNTLTSAGFVVNKADKCVYYRYGGGEGVILCLYVDDILIFGTSHNVIEEVKDFLSKSFEMKDLGVADVILNIKLLRGDEGGITLVQSHYVDKVLSRFGYSDCKAAPTPYDPSVLLSKNGRIARDQLRYSQIIGSLMYLASATRPDILFAVSKLSRFVSNPGDNHWHALERVMRYLKGTMSYGISSTGYPKVLEGYSDSNWISDADEIKATSGYVFTLGGGVVSWKSCMQTILTRSTMEAELTALDTATVEAEWLRELLMDLPVVEKPVPAILMNCDNQTMIIKVNSSKDNMKSSRHVKRRLKSVRKQKNSGVIALDYVXTAKNLADQFTKGLPRNVIDCASREMGLRPT

SEQ ID NO: 189206 - protein, 130 aa, Oryza sativa
  Clone ID: PAT_MRT4530_85737C.1.pep
MWMLNCRHQPYREEDGELRIVGPPHQHAHLKRVRISGFFGHKDQVELALHILRSSMTLEQMVITPKLEIGNDLAFSDPCADEYEKKHYVDGHRVATEFVCKTDHRNVVTVERVVPEPADGEVERKRRRAN

SEQ ID NO: 189207 - protein, 892 aa, Oryza sativa
  Clone ID: PAT_MRT4530_85738C.1.pep
MASGNDMWDALEAKFGVSDASSELYVMEKFYDYKMVDDRSVVEQAHEIQMLAKELENNNCELPDKFVAGGIIAKLPPFWSDFVTSLKHKRQEFSVSDLIGSLGVEENARAKDNLGKKVERGSSANMVQKKNPQASHNNKKVKPDVKPKATTNFKKKGKGKAKGDCFVSRKSGHWAKDCPERKDRKSANMVISKGGGTSGYGKILPTVLSFFHSPNWWVDIGANIHVGRGFSLLMRKGSLAAVHGVGSKCHTCVQSKQPRKPHKASEARDLAPLELVHSDLREMNGVLTKGGKKYFMTLIDDCTRFCYVYLLKTKDEALHYFKTYKAEVETQVERKIKRLSSDRSGEYFSNEFTSFCEEFGIIHERTPPYSPQSNGVAERKNHTLTKLHKEVTPFEEWEMKKLNLSYLRTWDCLAKSRDATFFENEFPMKNTPSTSSQEIVIPHQHFAPIKHNDQTPEGNPEEDKIVDTRKRCKWVFKKKLRPDGTIEKYKARLVAKGYTQKEGEEFFDTYSPVARLTTIRVLLALAASHGLLVHQMDVKTAFLNRELEEEIYMDQLDEYVLEGQEGIVCKLLKSLCGLKQASKQWHEKFDTTLISAGFVVNEADKCVYYRYGGGEEVILCLYVDDILIFGTSLNVIEEVKDFLSKSFEMKDLGEADVILNIKLLRGDEGMITLVKSYYMDKILSRFGYSDCKPAATPYDPSALERVMRYLNDTISYGIHTTGYPKVLEGYSDSNWIYDADEIKATSGYVFTLGGGAVSWKSCKQIILTRSTMEAELTALDTATVEAEWLRELLMDLPVVEKPVPAILMNCDNQTVIIKVISSKDNMKSSRHIKRRLKYVRKQKNSGVIALDYVQTAKNLDGLCLNVVQVAFLSRDIDLQNISEGTHLYEFDC

SEQ ID NO: 189208 - protein, 127 aa, Oryza sativa
  Clone ID: PAT_MRT4530_85739C.1.pep
MSGVAAATTGGGGTPPPTGAGSGAGAPGGGAVNDYNNRGNSASPSSEGPFSGYNLLLLLLLLALYYVSYVLVPVLHDASSMLSRYWYVPVSDIHDVHSMLLVMSAYAMIIVSISWIKICRIMTIFPT

SEQ ID NO: 189209 - protein, 81 aa, Oryza sativa
  Clone ID: PAT_MRT4530_8573C.1.pep
MADATNRADIADFDGDSFEAVSGINRYDWRTGAAAGGVPGGGGWRGVAASSRSVGLQFRRRHNRIQRFSVRSGRGGFGARA

SEQ ID NO: 189210 - protein, 91 aa, Oryza sativa
  Clone ID: PAT_MRT4530_85740C.1.pep
VGDGDAERRGEPGLAQGLSFSPCLSAQPPERLACWPAKLCSARRWTWTLRRRVDPPADEVVGRAADELGGRSGAARRGGNTRGGASAEFLQ

SEQ ID NO: 189211 - protein, 179 aa, Oryza sativa
  Clone ID: PAT_MRT4530_85741C.1.pep
MVGSHPPLLPPLYPTPLYSLSLPSPLSSPTAEERCGARQPGEEGRCHSAGHRGRSGGRLNNPYQDLNIPYKQLYDLPTSLEFLFQESLAQRCSWGPLHGEHAQGHRPALCREPGIESGMVTVRDRDDWINSVTVGLSTGALFRAADGSRSAAITSAIGGVLTGAAMSGKQAAKRYVPAL

SEQ ID NO: 189212 - protein, 1119 aa, Oryza sativa
  unsure (1)..(1119): unsure at all Xaa locations
  Clone ID: PAT_MRT4530_85742C.1.pep
MQCFYVSRGKRSEPPLSPEEEAKFEASDCLFRGALISVLADNIVDVYMHMPSGKDMWDALEAKFGVSDAGSELYVMEQFYDYKMVDDRSVVEQAHEIQMLAKELENNNCVEEKARAKDVRGKKVEGGSSANMVQKKNPHASYNNMKVKPDVKPKAATNFNKKGKGKAKGXTAFVCGKSGHWAKDCPXERPYRKSANMVISEGGGTSGYGKILPTVLSVFHSPDWWVDTSANIHVGRGSSLLMGNGLLAAVHGVGTVDLKFISGKTVQLKNVQHVPSIKKNLVSGSLLCREGFRLVFESNKCVVSKYGTFVGKGYDSGGLFRFSLNDMCNNHNAVNHISENDESNVWHSRLCHVNFGCMTRLANMSLIPKFTLVKGSKCHTCVQSKQPRKPHKASEARNLAPLELVHSDLCEMNGLLTKGGKKYFMTLIDDCTRFCYVYLLKTKDEALHYFKIYKAEVENQLERKIKRLRSDRGGEYFSNEFASFCEEFGIIHEMTSPYSPQSNRVAERKNRTLTEMHKEVTPFEEWEMKKLNLSYLRTWGCLAKVNVPIAKKRKLGPKTIDCVFLGYAIHSVGYKFLIVNSGVPDMHAGTILESRDATFFENEFPMKYTPSTSSKETVMPHEHFAPIEHNDQTPEENPEEDNIVDTRKSKRQRVAKSFGDDYIVYLVDDTPRTIEEAYSSPDADYWKEAVRSEMDSIMSNGTWEVVEHPYGCKPVGCKWVFKKKLRPDGTIEKYKARLVAKGYTQKEGEDFFDTYSPVARLTTIRVLLALVASHGLLVHQMDVKTAFLNGELEEEIYMDQPDGYVLEGQEGMVCKLLKSLYGLKQAPKQWHEKFDTTLTSAGFVVNKADKCVYYRYGGGEGEVKDYLSKSFEMKDLEEADVILNIKLQRGDEGGITLVQSHYVDKVLSHFGYSDCKPAPTPYDPSVLLRKNRRIARDQLRYSQIIGSLMYLASATRPDISFAVSKLSRFVSNPGDDHWQALERVMRYLKGTMSYGIHYTGYPKVLEGYSDSNWISDPDEIKATSGYVFTLGSGAVSWKSCKQTILTRSTMEAELTALDTATVEAEWLRELLMDLPAVEKPVPAILINCDNQTVIIKVNSSKDNMKSSRHIKRRLKSVRK

SEQ ID NO: 189213 - protein, 60 aa, Oryza sativa
  Clone ID: PAT_MRT4530_85743C.1.pep
SWVVSPPKAFFLAVSIALTTETGSGLLATSVPESVASPTSPTCGCAMSLSFSSNNRIIIS

SEQ ID NO: 189214 - protein, 159 aa, Oryza sativa
  Clone ID: PAT_MRT4530_85744C.1.pep
HIPKINGDIPSAIEAFADHQRLLDRLVLYDLAEVKVKGDRNCQHVSFTQFRALSDQMYHTTEHHRFVRQQVVKQLESYPEIYAGYVPMDYREYLKKMTEDGEWGDHVTLQAAADLDYVNDLGMLYVDPCYKCETQVSALVFAVWCKDNPADIMQRYLLH

SEQ ID NO: 189215 - protein, 1616 aa, Oryza sativa
  unsure (1)..(1616): unsure at all Xaa locations
  Clone ID: PAT_MRT4530_85745C.1.pep
MPYVTSEAQARALLQVGGWPVGTLVHVVIVDAACRARRLDHTLRAMVARRGWVVVNRHAVLRVIRVSDLVHNILDITLPRLLDDAYDATQLTHFRRQAAALRTMAGVIGGNFRNRAYVVVRKIRFVASSARNHSMAAARLQQRLLDIRRRLSGLVEAPDMNLQRLCADCSYLINQIAGELLALLADAAFETVSIPFRFIFAKVIGDCSLVAKQRAFIIHAACALDKAMMVRLCEKSGNFYCTELGRIANHFYLQYSSVETYNEMLWHHMNESKIRRPRVRSEFLASFPVLVSPSPRLSCSRFSASDLLRAREIGRSSASETTPSPEMGDQVFGGVPPARLLIAMSGVAAAAIGGGGAPPPTGAGAPGGGAVNDYNNGGNSASPSSGGPFSGYNLLLLLLLALLLFPLLALYCVRYVLVPVLHDAFSMLSHYWYVPDSDIHDALSMLLVMLRSPYTAYAMIIVSISWIKICRIMTIFPTIQKPDRSFSVVGFAAALKPHAFDGSNYKRWKARALLWLTAMQCFYVSRGKRSEPPLSPEEEAKFEASDCLFRGALISVLADNIVDVYMHMPSGKDMWDALEAKFGFYDYKMVDDRSVVEQAHEIQMLAKELENNNCELPDKFVAGGIIAKLPPSWSDFATSLKHKRQEFSVPDLIGSLGVEEKARAKDIRGKKVEGGSSANMVQKKNPHASHNNKKVKPDVKPKAATNFKKKGKGKAKGDCFVCGKSGHWAKDCLERKDRKSANMIISEGGGTSGYGRXRGSSLLMGNGSLAVVHGVVPSAILVFNRNNLASLTRHLRRGXLAPLELVHSDLCEMNGVLTKGGKKYFMTLIDDCTRFCYVYLLKTKDEALHYFKIYKAEVENQLERKIKRLRSDRGGEYFSNEFASFCEEFGIIHEMTPPYSPQSNGVAERKNRTLTEMVNAMLDTAGLSKEWWGEAVLTACHVLNKIPMKHKEVTPFEEWERKKLNLSYLRTWGCLAKVNVPIVKKRKLGPKTVDCVFLGYAIHSVGYRFLIVNSGVPDMHAGTIFESRDATFFENEFSMKYTPSTSSKETVMPHEHFAPIEHNDETPEENPEEDNIVDTRKSKRQRVAKSFGDDYIVYLVDDTPRTIEEAYSSPDADYWKEAVRSEMDSIMSNGTWEVVERPYGCKPVGCKWVFKKKLRPDGTIEKYKARLVAKGYTQKEGEDFFDTYSPVARLTTIRVLLALAASHGLLVHQMDVKTAFLNGELEEEIYMDQPDGYVLEGQEEMVCKLLKSLYGLKQAPKQWHEKFDITLTSAGFVVNEADKCVYYRYGGGEGVILCLYVDDILIFGTSLNVIEEVKDYLSKNFEMKDLGEADVILNIKLQRGDEGGITLVQSHYVDKVLSRFGYSDCKPAPTPYDPSVLLRKNRRIARDQLRYSQIIGSLMYLASATRPDISFAVSKLSRFVSNPGDDHWQALERVMRYLKGTMSYGIHYTGYPKVLEGYSDSNWISDADEIKATSGYAFTLGGGAVSWKSCKQTILTRSTMEAELTALDTATVEAEWLRELLMDLPVVEKPVPAILMNCDNQTVIIKVNSSKDNMKSSRHIKRRLKSVRKQKNSGVIALDYVQTARNLADQFTKGLPRNVIDSASREMGLIPT

SEQ ID NO: 189216 - protein, 161 aa, Oryza sativa
  unsure (1)..(161): unsure at all Xaa locations
  Clone ID: PAT_MRT4530_85746C.1.pep
ASCHRPAPVTFCITARCTARQQREFSHQVTSGGSGSGAVGSILSISACTCAFTAQPHTGMHPHIIRFPCIGSSMLVPPAHHRIRFTFTCELPCXRWKMHTNXXYTVXXALEXFIQPFFNVGSXNIRXNVEDHVGSXNTLDRSRXIENQKVPTYSTHLRSKS

SEQ ID NO: 189217 - protein, 71 aa, Oryza sativa
  Clone ID: PAT_MRT4530_85747C.1.pep
MEIGAPPLFSREMTQGAEETRRDTSARTETETRTTAAAAAAAAATSGAQPQGRDSEGDEGFGFSVSEGWFE

SEQ ID NO: 189218 - protein, 1654 aa, Oryza sativa
  unsure (1)..(1654): unsure at all Xaa locations
  Clone ID: PAT_MRT4530_85749C.1.pep
MCARDLPRYRAPHARERPPISVFSTMAGMSVFRVYFGEGEIMENESGVDLSNFRQCTLYHPNPDTLTMPEVWYWLTSTFSLDPGIYSVNVRVMWSRSANNIKWELKNVTRSKAWQDWLAGCRRRGYEYVMLVQACQGRVPTESAAGQSNNREEMGLXSHEEDEVVAPHHGGDVGPDIQNLSIQGDEVVNRHPTGEADEGEDIPAIVEEIERVDRHAVEDEENLAAEENDDEDEQEVEEVPMPASWNLEDPGYIAENSCHDSIWFYGDGQINLGAMFRDKIGLQDAVKSWSFXMQRQFRVVKSNKTEYTVXHGHVPKYESYWIVSKLQEHSCLIRNTRESHRNLTAAYVANKYYKEIIEGDDLPVRHIIKLVEKGEQYTISYHKAWRAKQKAMEKRYGTFEEAYDTLPQMLNILKSRNPGTYVAVQDWESIRPPNYLVMQRAFFAFGACIHVFKCSRPVLCVDGTFLSGKYRGQILTAIGADANIQIIPVAFAFVESENYESWLWFLQHLKWGVVQKHTSICIIHDWNAGLLKAIKELQEDGDGAYYWPDMHSRWCMRHMGANFFKQFNSRRLMNMFKRLCKENQSTKFDELXKQLDEGTRTHIRSKQTNNNPQDVHVPQALEPMDDLIPSNGKKRRSSKNIKCFTHWIECKPNDKWALLHDTNGARHGIMTTNLAEAYNAVLRKLRPLPLTAIVEGIMHRTTMWMRTRRAIALQQMSNTQTPFCKKMAEYLQEKAEKARFHTVITTGNVRRRWEVTCRTKGGFGSSNGVITHEVTLGHESDNTCSCFCNKPKLLHKPCSHVLAACAKIKLDSTSYVSTFYLKDRVLNAWSAEILGWRSLQHLVETGGDKRIYVPDLVLLKAGKGRRLLTVKFGNRQRQFTLHDAHADMEEEWPYPLLSKEIDARHHAKKISDGNSCSSLVVLIPRTAGWWGIDPRWKPRXTRARMHYDAREPKQKQMGAHSKRRQNIDKSLLMALVDRWRPETHTFHLPCGEMTITLQDVSMLTGLPLAGQAIVRPDPPEDWRDDIVSXYACILPRYATGDTDAHGPTLKWLSQFECDICPDDVQEYQLTLYLEAYLLWLFGWVMFTGSHGNTVDARLIPLARQIAEGNIAPSAXFSWGSAVLAATYHGFCDACIKTGQREAIFTGCPLLVMLWSYERFSFRRPYMSVAVAHKDDYTDAVDDRPTFGTRWCYGPPQWARIQVHNVYEYFTEAFESLRENEVRWTPYTNEEAILRAPHGVSILCYHDEAYWMTRKMLVYDIFVEGYNVQRVMRHMGLYQQVPVPIGLHLPPDVNTYQKRQADNRFHRSMHSRMTPWIEAWSQALNDAVQETRAYDHNTYEQYMAWYSSQTRIRLLAPEDPDERGPPTIDQIYDMXASTPRSLDGSMQTDIARELVRDAKTLWEKLRDGMAGTNQEVMAPVDSLRRKGKRIMRLASCXHSSDVYTPVTSRRTIEPMPERPSTSSRPSTSARPSASARRSSDGCAGVRSTSFREFVRSTTGTGTPXSSTPITSQWQGGFASFAVLTIYFLILTGPTQSVPLHAPTYVTNPWQGQSMDYGGTHSHHSPYTYIDGTFXAIHDSHFNXDNNSVTLYMDARHVAPQVTQPTQPEVGEGNDNDPRRSNRERHEPNRLSLSGPRHAAGQRKKTTKKQGGPSRT

SEQ ID NO: 189219 - protein, 94 aa, Oryza sativa
  Clone ID: PAT_MRT4530_8574C.1.pep
KFSYRDPCLRAKGHLDSVARKVTTLESMTVPIAGLVNTGLGFRLGPSSSLLLWFVVPNSDTTRQGLQLGMVSRARAHPPLVMLPFSACSMPYSA

SEQ ID NO: 189220 - protein, 304 aa, Oryza sativa
  Clone ID: PAT_MRT4530_85750C.1.pep
PCSDRGDDGDGDGPRIHRSRRRSEHTAAPARAHVLSGLLRPKLSAAAAAALRASIIIHAPRHACYTVTQKKTAPDTASNMHVEPPSCDSPFFAYGSSILFPFKCARRRGEASLSLSPLSDGAAAAAAEEEARRRGERRGRRRRGDGGEASDGSGGGEAAAAAKEARRRGKRRERRRRGGGGGGGSAAARRVAGAEEAQRRGERRERRRRDGGGGGGEAVAFSSRAASSSRTAVSPRAASRHRAAPASRLAAATASPPPPPRSPPRGDVVPPPAALPPPRLASSLPPPLPPLPRRCRRLKEERER

SEQ ID NO: 189221 - protein, 852 aa, Oryza sativa
  Clone ID: PAT_MRT4530_85751C.1.pep
METKQQRARRNRRGSQDMEEEWPYPLLSKEIDARHRAKKIYDGNSCSSLAVLIPRTAGWLSAAGLLTFVQMTQARMHYDAREPKQKLMGAHSKRRQNIDKSLLMALVDRWRPETHTFHLPCGEMTITLQDVSMLTGLPLAGQAIVLPDPPEDWRDDIVSRYACILSRYATGDTDDDEDKIFFSEKETHGPTLKWLSQFEVRYMPDDVQEYQLTLYLEAYLLWLFGWVMFTGSHGNPVDARLIPLARQIAEGNISPSTQFTWGSAILAATYRGFCDACIKTGQREAIFTGCPLLVMLWSYERFSFGRPYMSVAVAHKDDYTDAVDDRPTFGTRWCYGPPQWARIQVHNVYEYFTEAFESLRENEVRWTPYTNEEAILRAPHGVSILCYRDEAYWMTRKMLVYDIFVEGQNRQADNRFCRSMHSRMTPWIEAWSQALNDVVHETRAYDHNTYKQYMAWYTSQTRIRLLAPEDPDERGPPTIDQIYDMQLAPPAHLTTDIAGELVKEAKTLWEKLRDGMAGTNQEVMAAVDSLRRKGKRIMRLASCRHSSDIYNPATSRRTFEPMRERPSTSSRPSTSSRPSASARRSSDGRVGVRSTSFREPPTIPTIPKITEISERLGGFGSTQAQPEWVPPYSSTPITSQWQGESASFAEGTRMVRPVPHMPPARPQMIRQMAPDVPTSHWQGGFAPFAGTSQGIPTIPQMSADFIGQGGFTSLGGPTQPVPLHAPTYGTNPWQGQSMDYGGSFRPELMSGFRPYTTSYGDMSCFGGGSSSVPNELRTSQTDDAPQVTQPIQPEVGEGNDNDPRRSNRERHEPNRLSLSGPRHAVGQRKKTTKKRGGTSMTTTDHDDDDEYN

SEQ ID NO: 189222 - protein, 82 aa, Oryza sativa
  unsure (1)..(82): unsure at all Xaa locations
  Clone ID: PAT_MRT4530_85752C.1.pep
MAAPDVEYRCFVGGLXWATDDRSLEAAFSTFGEILESKIINDRETGRSRGFGFVTFSSEQAMRDXIEGMNGKEPSWPSYLSI

SEQ ID NO: 189223 - protein, 70 aa, Oryza sativa
  Clone ID: PAT_MRT4530_85753C.1.pep
MEYEIQKDRAPARLRCSPTSHDAHRHSLANGRRRRRAARIVRKTGTSRVEFPEKYTRDASLGPQASGQHA

SEQ ID NO: 189224 - protein, 489 aa, Oryza sativa
  Clone ID: PAT_MRT4530_85754C.1.pep
MPPPPPPPRLLAGGDHHPSPTSASSPEHPVPLRPPPSSLPPPPPTSPPFTSLSPSPSPSSPTLPPSPAASSSCSTPPAAATPPSTTPSPPRFSPFPFPLLLPHPRNRLLLAASELARAAAPGFAPLLVSLLRRLPFPGDARLLDIFHEHASFLADEEPQLLASAVFAFLRLLAKNRLDPAPQCLECSDCGECKNAKNLAGCRENLVSFCASVLRDHTQVCELIGRDLVRCLHELVLVQEFHELWKDSMLGRAAEICRIGMPGWCTAMAVSPEMETQLLFMMNNVRWGNQKRYQLWFARKHLMVPGGEERIPDIVRFICCGYHPTNKVMQSGVIARWAVIGWLLTSCNKSYVQANAKVALFYDWLFFDEGKGNLMNIEPAMLLMVNSVSQYTDITNMLLEFLFLLVENYDVRRKEAIAECVRNAFAVLVKKGVVPSLDILTCCEKLSPMLRQKLVAFLSSASPEETEKTCGQPIDEASKAMDLNNRVCSN

SEQ ID NO: 189225 - protein, 84 aa, Oryza sativa
  unsure (1)..(84): unsure at all Xaa locations
  Clone ID: PAT_MRT4530_85755C.1.pep
YVRGYGVCAACYGQRREGGYAVRWLRCAVVAAATVVATAXAAATPTGTGGTERWGPHGXVIYLSNRATIIIIRSLSSLVLCGTI

SEQ ID NO: 189226 - protein, 103 aa, Oryza sativa
  unsure (1)..(103): unsure at all Xaa locations
  Clone ID: PAT_MRT4530_85756C.1.pep
SVLRPARGVRRSTLASATVLLSACGGYGQRRDSAVTPVXVATVAARGAAATVVATAXAAAAATPTGTGGTXRWGPHGXVIYLSNRATIIIIRSLSSLVLCGTI

SEQ ID NO: 189227 - protein, 141 aa, Oryza sativa
  unsure (1)..(141): unsure at all Xaa locations
  Clone ID: PAT_MRT4530_85757C.1.pep
DAIEGMNXPKELDARNITVNEAXQSRRSGAGAAXCGYASSAGAGGLRVAAGYSCWCGRXGGYGQRREGRLTRRCQVAYRCSPVVPAATXVVATAASGSSQTPTGTGGTXRWAPHAQVIYLSNRATIIIIRSLSSLVLCGTI

SEQ ID NO: 189228 - protein, 316 aa, Oryza sativa
  Clone ID: PAT_MRT4530_85758C.1.pep
MRTSRAAAAAASLPLLLLVALLVAAEGRRHKDGSGDEEAKACDKGWECSGSRFCCNDTITDYFKAYQFEELFAHRNDRSLAHAAGFWDYHAFITAAALFEPRGFGTTGGKEVGMKEVAAFLGHVGAKTSCGYSVATGGPLAWGLCYNHELSPSQSYCDNSNELYPCVEGVEYYGRGALPVYWNYNYGIIGQGIKQDLLNHPELLEQNATLAFEAAIWRWMTPMKRKQPSAHDVFVGNWKPTKNDTLSKRYPGFGATMNILYGDLICGQGSIDKMNVIVSHYQHYLDLMGVGSDKAGDNLDCADQVAFNPSSKNLDS

SEQ ID NO: 189229 - protein, 168 aa, Oryza sativa
  unsure (1)..(168): unsure at all Xaa locations
  Clone ID: PAT_MRT4530_85759C.1.pep
MAAPDVDYRCFVGGLAWATDNRSLEAAFSTYGEILESKIINDRETGRSRGFGFVTFSSEQAXMRDAIEGMSGXKELDGRNITVNEAQSRRSGGGGGGGYGQRGXGGGGYGGRGYGGGGGGGGYGQRREGGYGGGGGYGGGGGGGGYGGGYGGGYGSRGGGNSDGNWRN

SEQ ID NO: 189230 - protein, 696 aa, Oryza sativa
  Clone ID: PAT_MRT4530_8575C.1.pep
MMAGTPVGDGHKHPALAARPSRAGACPPGLRRNGVRHGERRRRGIRVAEKGLREWRRMAAAALPSVAMETGDHGAALAQEGVEGQPPTVAIVSFFVGGSATSWPSPSSASSSARCCAGTSAPGGSGVTRPSPPPLPRGGAGVASRDLRRSSPLLRPPCLSSSSSDRRGEVGVARSGVERCRGFPAPAGRHERHPELRREGSGEEGFEMAAAADATTAMTIDFLRARLLSERSVSRAAKERADQLTKRVRELQSLSLSTAFSLRLTVSLLLLQVAELEEQVRAVTAQRRKAERAAGEVLAILESQGLARFSDVADSGSGSDDEDGLESAESGSKARGDAEDALSGSEFGGTATAAAAGGLSWKGRAASHESQRRRQQQQQQLKGRHLRPRHSHRRGYFYLVAADSSPKYHPGQSCRKVKRKELRLHTEGDEGKDNAMESTEEGHERSDCTVCTDEQPDIDGEVSQDGQGSCGNGRDGDDDNPYTVEYEKDGEMERVLEKQAELIGQYEEEEYAQREWERKFNNSRDSTAMHQPSSDGVGGVLEALQRAKMSLREKLSKPSPPSLEMLALPAPEYHYATDDSPVRDTELSLCMSTFPSQEILALPEPAEYRSRIIPRDDVKVPVGLAGLFRLPTDSFAQNELCSADGYHSRFSLTATSRENLSNHFRANLSLSGYGSEFSPDPCFSAGAAMMEPTASF

SEQ ID NO: 189231 - protein, 115 aa, Oryza sativa
  unsure (1)..(115): unsure at all Xaa locations
  Clone ID: PAT_MRT4530_85760C.1.pep
VSGGGAVGVLQASGGGGGGYGAGRLRCVCGAAVWLQASTREAGYAGAVATVQPVVAGSYRWWLQAASSAGNSRQGTGGTEQVGPHHGXQVIYLSNQSYTSIIIRSLSSLVLGGTI

SEQ ID NO: 189232 - protein, 125 aa, Oryza sativa
  unsure (1)..(125): unsure at all Xaa locations
  Clone ID: PAT_MRT4530_85761C.1.pep
RQGARRRNITVNEAQSHRSGAXAGGYGQPRSGGYGGGGYGGGGGXGGGYGQPVKAATAVAVATVAAXVVAAATVVATAAAAAATPTGTGGTEXRWGPHGPVIYLSNRATIIIIRSLSSLVLCGTI

SEQ ID NO: 189233 - protein, 51 aa, Oryza sativa
  Clone ID: PAT_MRT4530_85762C.1.pep
MDRTSPRGLHLGVMPSGRIHRLLVDIVRRASTSGIMVDTYRFQTWYQWYHG

SEQ ID NO: 189234 - protein, 125 aa, Oryza sativa
  unsure (1)..(125): unsure at all Xaa locations
  Clone ID: PAT_MRT4530_85763C.1.pep
RPRELAAPQHHRYEAHSPAPEAERGGYSQPRSGGYGGXGYGGGARXGGYGQPREGGLRQVPVATGARPGAAATXVVATATTAAATPTGTGGTXRWGPHGPVIYLSNRATIIIIRSLSSLVLCGTI

SEQ ID NO: 189235 - protein, 136 aa, Oryza sativa
  Clone ID: PAT_MRT4530_85764C.1.pep
MARLRPCHLPRSATPASSLSLATALALRRFLVLGEQCVPLLATLDLEVRGQRRSMLPISTGSGWTPLSGDLSPQAAAFRSAPQQTDSIAILEPRTIHLNYQCAEAIGNVMLHCEPSYYPLMGWRYRIEMIAKNIQG

SEQ ID NO: 189236 - protein, 964 aa, Oryza sativa
  Clone ID: PAT_MRT4530_85765C.1.pep
MVFVWAERLYVGRAFTKADFPSSRKPYRAEPWAHTTDRDSRATRPRARVPTESPTRTSLGPTCHPPFPIPVRVTETATDPTTSLPPAVLVPVSATWAPHAPHYLFLHANPYAYTSTRRVFPSPPSPTRRRFAATVAAASRLGFRRRPPLYEQSPHRRQPGPSPPPPPPRCRRRGRPRAPAAAAAAAGTKKVGSGPSRVTLERLREGIERRAEEEERRAEEERRAEAERAAAEERARREEEEGRARAEEERRRREEERRRRRKGEKVREEARRREEQRRRLGITVVADSPGGGGDGDRRRPVYDSRKTKLQAKPHGDAQSEADTAELLSSKPQLEDEQINALSIEVAAAADAVELGVGRKTGSSEEDGTVSDGGDDSCEDKSLDGFDVQSDGNSPCVAEGETEDKLATSASQVVNPVDIDVAGEVEEDGILDSQDACAIEGDRVLRETICCILGHVDAGKTKLLDCIRHTNVQKGDAGGITQQIGATYVPVEYVKERAKPHKDAPIKKALENQSGDVKREFGWRLTKVVTQLKENGFNTALYYDNQKFRKVFDIVPTSAISGEGIPDLLLMLVLRSQATMMEKLTFVNTVECTVLEVNDDKDLGTTIDVVLINGVLHKGDQVNVCTKQGPVTTTIRDLLTPHPLKELRVKGIYKHHKELKAAQGVKIVARGLKYAIPGTSLVVVKPGDDLGQSEAKSQRNENEEGNVIQEISRLKTCKEGVYVQASTFGILEAIIEHLNSPGVNVPVSGCNLGPIEKKDVMKASAMLKRKEEYAAILAFNVRVMPEADVLASESGVKIVTADTVYKLVDSFNEHIKRSKELKKMQCAANAVFPCTLKILPNRVYRKKDPFLCDVEVLEGVVKVGTPICVYVGGTVHGLGRISSMQTSNGNQIDSAKRGVVVSVKITGESPKEKTWLYGRHFDESNELISQISRRSIDVLKEYYRDEMNDENWQLIRRLKKLLDIA

SEQ ID NO: 189237 - protein, 109 aa, Oryza sativa
  unsure (1)..(109): unsure at all Xaa locations
  Clone ID: PAT_MRT4530_85766C.1.pep
TRPTSPRSGARSSPVATPAAAECGGYGAAATLLCRVGGYGQRREAATAVRWLRCRLCAATLVLRTRAATPTGTGGTERWGPHXQVIYLSNRATIIIIRSLSSLVLCGTI

SEQ ID NO: 189238 - protein, 172 aa, Oryza sativa
  Clone ID: PAT_MRT4530_85767C.1.pep
MAAPTSKNLLLVVVVAATAVGIVAPHGSEAAAGRAVTGLVTGVVPCSAGSSINAASVPAFPDAGVQMVCGGRVVGGATADGTGAFTINMGALNATMLMAMAGNQCKVVVTTPLAACDASLAAVAGTLTAPVQLLGGTGGLGGLGGLITLITQILSGLLGEILNIIPLPFSLV

SEQ ID NO: 189239 - protein, 147 aa, Oryza sativa
  Clone ID: PAT_MRT4530_85768C.1.pep
KAKKGGGIFFCFLQTEKMCFYPRGKTTERGGRGVKGQRGNIPPKTTLKSFRIPGLFYFGHPLRREQNRGGKILLPPGGGRAQDGAPILKVLPYRGKQRNRLIHGTPTSLAGRTHPSSPAFGGTLNQKENSAMAAGIYHMRARLCKTF

SEQ ID NO: 189240 - protein, 103 aa, Oryza sativa
  unsure (1)..(103): unsure at all Xaa locations
  Clone ID: PAT_MRT4530_85769C.1.pep
EIFPGVEGTLYVGFVTSNPDNRVLFKGVNKGDVFVFPXGVIPFQFNPNPPKPAVAIGALSSQNSGGISIAKAGFGLNPPISDDIFMKGFQGDKKIINLVPGPF

SEQ ID NO: 189241 - protein, 778 aa, Oryza sativa
  Clone ID: PAT_MRT4530_8576C.1.pep
MESERPDASAEDRRLEDLRKREERCCSYRSQEIAQKKKHFDELAAREEIQSYVMQLFICLGMANFRVYYGDGEIISNKMGVDLSNFSQCTLYHPNRDNLRMPEVWYWLTCSFSLDPQVYSVNVSLLWSRSATDIQWQLKEVTGSQSWKNWLQGCRRRGYEMAMLVQACPRRARPNSSFGQSDMQGEACAQSSAFHVEVSRHNEDNISIDMQSLHIEQVEQTVVAMPSTVQQDGSGEADEGEEINAIVDEIERVDRNAREDEANLAWEEDEEEDDEEYEVQPVPASWNREDLGYIRENELHDSIWFYGDGPINKGAMFSTKSAFQDAVKSWSFKMQRQFKVLKSSPTVYTVLCETEGCNFRVHGHVPKYESYRLVSREGTTAVETGEWYTISYHKAWRAKQKATEKRYGSFEVAYDTLPQILDILKQRNHGTYVAVQDRDSMRPPNFHVMERAFFSFGACIHAFQWSRPVLCVHGTFLTRKYRGSILIAVGADASNHIIPVAFAFVESENYDSWLWFLQHVKWGVVQSRSNVCIIHDRNAGLLKAIKELKEDENGAYYWPDLHSRWCMRHMGANFFKQFHSKRLMQMFKRLCMQNQRQKFEDLWRQLDEATSAHVKSKKDSKKNDQPAPEALEPMDGLITSNGLDSTAYVSPFYLKDRVLQAWSADILGYRAHENLIRTGGDDTVWVPDLHLLKGGKGRRQTRRLRNDMDESEAGGPIRRCETCLQYGHRTRDCTNNNDGTSSTAQQGQQTWESSRATRARRTRRGTGSSRNTPEGTTL

SEQ ID NO: 189242 - protein, 248 aa, Oryza sativa
  Clone ID: PAT_MRT4530_85770C.1.pep
MRSCCCCCPCPAALGIGIGPRLRSFLRDYDALQSLALALIYLQIGCALIGSLGALFNGVLVINLVIGLFAVVAIESSSQTLGRTYAVLLFFAIVLDVAWFILFSHAIWNITPEEKYGQLFVLSLKLALWMQIIGFSMYRLGVSSSTPTYHEVNYDGRNSFLSPRSSSVRRNSMADDILGGSIYDPAYYSSLFADVRNNTCTHQGDKQSGSNDSGSTSAGQSPRLKSFASRSFVANDLEDHTFQFSDFS

SEQ ID NO: 189243 - protein, 795 aa, Oryza sativa
  Clone ID: PAT_MRT4530_85771C.1.pep
MKVDGNPFPMNMVRTSGKTADSKNYRSKQLNYVRIINKYQRKHDRQEERLGPIHQDYFQDSEDEDGTKKQWCPSGIFTKNQKRRVQRMRNREQFQEVQEEINHRLKKAKPKQEWCVKSKVVSADEIEADKVKRLAKGKSVASTSVNMVFVLPAEFGISQAHADADVVEESLALLVLSPEQAIFEKPEGTENRQLKPLYLKGFVNGKPMSKMLVDGGAAVNLMPYATFTKLGKNSDDLIKTNMVLKDFGGYRPYKQPPRRCKADMYDAIKAEITHLYDAGFIRPCRYAEYLNKATPKDEYPMPIADQLVDAASGHKIICFMDGNAGYNQIFMAEEDIHKTAFRCPGEIGLYEWVVMTFGLKSAGATYQRAMNYIFHDLIDLLVEIYIDDVVVKSRELDDHIANLRKVFERTRKNGLKMNPTKCAFGVSAGQFLGFLVHERGIEVTQRSINAIKNIEPPEDKNKLQSWVGKINFIRRFISNLSGRMEPFTPLLRGACFEFAYTIKPYATNNQVEYEAVLKGLQLLKEVEANAIEIMEDSLLVISQLAGEYECKSDTLMIYNEKCRELMGGFRLVTLKHVSREQNIEANDLAQGASGYKPMVKDVDIEVATITVDDWRKLRYKALRYVLLEDELYYRTIDGVLLKCLSIDQAKVVMGEMHEGICATDYFTKWVQAIPLKKVDSRDAIQFVKVHIIYRFGVPQTITTNQGSIFVSDEFVQFAESMGIKLLNSSPYYAQANGQAEASNKSLIKLIKRKIADYPKQWHNRLAEALWAYQMACHGSIQVPPYKLVYGHAMGN

SEQ ID NO: 189244 - protein, 186 aa, Oryza sativa
  unsure (1)..(186): unsure at all Xaa locations
  Clone ID: PAT_MRT4530_85772C.1.pep
MLAIGWTWKYLPIHFFFKIQGEYFDIVQSFNLILYLYRNITPEEKYGQLFVLSLKLALWMQIIGFSVRFLSSFIWIQMYRLGVSSSTPTYHEVNYDGRNSFLSPRSSSVRRNSMADDILGGSIYDPAYYSSLFADVRNNTCTHQGDKQSGSNDSGSTSAGXSPRLXSFAXRSFXGPGGAGLRPLGC

SEQ ID NO: 189245 - protein, 148 aa, Oryza sativa
  Clone ID: PAT_MRT4530_85773C.1.pep
MGPVTFIVLVINVRLDFRPLGLMLVRVSSPITLSHRRLATCSAANLYLHRSCHKSLPFLALAGCAMRPSFLPFNAMPRRSSPLSSCWMQWQALHWTTEMRKGAAAEGGRPDVVVTPAEVGIEKVALLVWAGPLETQTLLSTRMNECEC

SEQ ID NO: 189246 - protein, 214 aa, Oryza sativa
  Clone ID: PAT_MRT4530_85774C.1.pep
MENSVVAIGRLAMENPNGYAQQLNHLLQQLGFFKEPVYRGEQVVQGFQKSWKVIIFFHFQGDGEEVIAFQTRHPRTTLESAIQDVFREALLRFCGVCVPLGVANNFGLHPYRKEGDNWCHLHPTEWPEGSRFTLLSELACTTENVYEQVLKELDELRDRYADLEARYQHLTLAHTTTLLLEASRRARRMKYKKKARLLRKLPLEVDPLTPPPSP

SEQ ID NO: 189247 - protein, 1187 aa, Oryza sativa
  Clone ID: PAT_MRT4530_85775C.1.pep
MDTYPFSNVEIDNSGFHVCDLIYSFRPSPRESFPGSVHLRAQVYGTSRCLRNSVRLRTCTGRRAIKFFGSASSATALVLRGYCCCIGAFTKMSTEIGDNKMNDINGGNTASNPAMGRSRGKDMWDALEVKFGVSDAGSELYVMEQFYDYKMVDYRSVVEQAYEIQMLVKELENNNCELPDKFVAGGIIAKLPPSWSDFATSLKHKRQKFSVTDLIGSLGIEEKVRAKDNQGKKIEGGSSANLVQKKNTHASHNNNKKVKPDIKSKATTNFKKKGKGKAKGDCFVCGKPGHWAKDCPERKDKKSANMVISEGGGTLCVGHRFLIVNSGVPDMRVGTITEFRDATFFENEFPVKNAHSTSSQEPILSPEHFMPIEHIDQTLEENPEEDNIVATRKSKRQRTAKSFGDDYIVYLVDDTPRTIEEAYSSPDVTIGKERSGCKWVFKKKLRPDGTIEKYKMDVKTAFLNGELEEEIYMDQPDGYVLEGQEGMVCKLLKSLYGLKQAPKQWHEKFDNTLTSVGFVVKEADKCVYYRYGGGEGVILCLYVDDILIFGNSLNVIEEVKDFLSKSFKMKDLGVADVILNIKLLRGDEGEITLVQSHYVDKVLSRFGYSDCKAAPTPYDPSVLLRKNRRIARDQLRYSQIIGSLMYLASATRPDISFAVSKLSQFVSNPGDDHWHALERVIHYLKGTMSYGIHYAGYPKVLEGYSDSNWISDADKIKATRGYVFTLGGGAVSWKSCKQTILTRSTMEAELTALDTATVEAERLRELLMDLLVVEKPVPAILMNCDNQTVIIKVNSSKDNMKSSRHVKRRLKSVSKQKNSGVIALDYVQTAKNLADQFTKGLPRNAGDQVFGSASSATALVLRGYCCCIGAFTKMSTEIGDKKMNDINGGNTASKSSDGTFSGSSSSNANTLAYMAEGTYKTNLLNLAKDLIANVTKTGSHSAAGATAGTTGPDIVYGAVLCRGDSTNCSSRLQRVLDTASISNNGSTSSESDSQSQSHKSTVTLYDHEFQALLSFSDTDFISSFSNAPACIVSNYLNPAVPQRDADRTRFSELFSELMERISDAMVSSRASYLTGKGKGWFDGQESQPVVYGLAQCMDGMPPERCRSCLGGITDQGKEMVSNGLTEGMVLGVRCSLWYHYQTDGEFFAGEPGVLAFLNMPSSRDESKFGLWATIGSFFLMKQDLNYD

SEQ ID NO: 189248 - protein, 1094 aa, Oryza sativa
  unsure (1)..(1094): unsure at all Xaa locations
  Clone ID: PAT_MRT4530_85776C.1.pep
MAEVVRHQELELEVVRQELEPVPRTTTPTESILPRNPVEGHSRGISFXLFLFPLLALYCYVPVPDIHDVSSMLLRYCYVLVPDIHNAHDAISMLLVMLHVVTRSPYTVYAMIIVLTFWIKICRFMTIFLTIQKPDRLFSVVGFAAALKPHAFDGSNYKRWKARVLLWLTAMQCFYVSRGKRSEPPLSPEEEANFEASDCLFCGALISVLADNIVDVYMHMPSRKDMWDALEAKFGVSDTGSELYVMEQFYDYKMVDDRSVVEQAHEIQMLAKELENNNCELPDKFVAGGIIAKLPPSWSDFATSLKHKRQEFSVSDLIGSLGVEEKARAKDVRGKKVEGGSSANMVQKKNPHASHNNKKVKSDVKPKAATNFKKKGKGKAKGDCFVYGKYGHWAKDCPERKDRKSANMVISEGGGTSVYGKILPTVLSIFHSPDWWVDTGANIHVGRGSSLLMGNGSLAVVHGVGTVDLKFTSGKTVQLKNVQHVPSIKKNLVSGSLLCREGFRLVFESNKCVVSKYGTFVGKGSKCHTCVQSKHPRKPHKTSEARNLAPLELVHSDLCEMNGVLTKGGKKYFMTLIDDCTTFCYVYLLKTKDEALHYFKIYKAEFGIIHERTPPYSPQSNGVVERKNRTLTEMVNAMLDTVGLSKEWWGEAVLTVCHVLNKIPMKHKEVTPFEEWERKKLNLSYLRTWGCLAKVNVPIAKKQKLGPNTVDCVFLGYAIHSVGYRFLIVNSGVPDMHIGTIFESRDATFFENEFPMKHTPSTSSQETVMPHEHFAPIEHNDQTPEENPEEDNIVDTRKSKRQRVAKSFGDDYIVYLVDDTPRTIEEAYSSPDADYWKEAVRSEMDSIMSNGTWEVVERPYGCKPVGCKWVFKKKLRPDGTIEKYKTRLVAKMDVKTAFLNGELEEEIYMDQPDSLNVIEEVKDYLSKSFEMKDLGEADVILNIKLQRGDESGITLVQSHYVDKILSCFGYSDCKPTPTPYDPSVLLRKNRRIARDQLRYYQIIGSLMYLASATRPDISFAVSKLSRFVSNPGDDHWQALERVIRYLKGIMSYGIHYTGYPKVLEGYSDSNWISDADEIKATSGYVFTLGGGAVS

SEQ ID NO: 189249 - protein, 177 aa, Oryza sativa
  unsure (1)..(177): unsure at all Xaa locations
  Clone ID: PAT_MRT4530_85777C.1.pep
MHCFFVSRGKPSEPPLSPEEKAKLEASDCLFRGALISVLTDNIVDVYMHMLSGKDMWDALEAKFGVSDAXSELYVMEQFYDYKMVDDRSVVEXQAHEIQMLAKELENNNCELPDKFMAGGIIAKLPPSWSDFATSLKHKRQEFGLTDLIGSLGVEEKARAKDNLGKKIEGGSSANLV

SEQ ID NO: 189250 - protein, 1276 aa, Oryza sativa
  Clone ID: PAT_MRT4530_85778C.1.pep
MSGVAGGGGAPPPTGAGSGAGAPPPTGAGSGAGAPGGGAVNDYNNGGNSASPSSGGPFSGYNLLLLLLLLALYCVSYVLVPVLHDASSMLSHYWYVPVSDIHDAHSMLLVMLRSPYTAYAMIIVSISWIKICRIMTIFPTIQKPDRSFSVVGFAAALKPHAFDGSNYKRWKARALLWLTAMQCFYVSRGKRSEPPLSPEEEAKFEASDCLFRGALISVLADNIVDVYMHMPSGKDMWDALEAKFGVSDAGSELYVMEQFYDYKMVDDRSVVEQAHEIQMLAKELENNNCELPDKFVAGGIIAKLPPSWSDFATSLKHKRQEFSVPDLIGSLGVEEKARAKDVRGKKVEGGSSANMVQKKNPHASHNNKKVKPDVKPKAATNFKKKGKGKAKGDCFVCGKSGHWAKDCPERKDRKSANMIISEGGGTSGYGKILPTVLSVFHSPDWWVDTGANIHVGRGSSLLMGNGSLAAVHGVGTVDLKFTSGKTVQLKNVQHVPSIKKNLVSGSLLCREGFRLVFESNKCVVSKYGTFVGKGYDSGGLFRFSLNDMCNNHNAVNHISENDESNVWHSRLCHVNFGCMTRLANMSLIPKFTLVKGSKCHTCVQSKQPRKPHKASEARNLAPLELVHSDLCEMNGVLTKGGKKYFMTLIDDCTRFCYVYLLKTKDEALHYFKIYKAEVENQLERKIKRLRSDRGGEYFSNEFASFCEEFGIIHEMTPPYSPQSNGVPERKNRTLTEMVNAMLDTAGLSKEWWGEAVLTASHVLNKIPMKHKEVTPFEEWERKKLNLSYLRTWGCLAKINVPIAKKRKLGPNTVDCVFLGYAIHSVGYRFLIVNSGVPDMNAGTILESRDATFFENEFPMKHSPSTSSKETVMPHEHFAPTEHNDQTPEENPDEDNIVDTRKSKRQRVAKSFGDDYIVYLVDDTPRTIEEAYSSPDADCWKEAVRSEMDSIMSNGTWEVVERPYGCKPVGCKWVFKKKLRPDGTIEKYKARLVAKGYTQKEGEDFFDTYSLVARLTTIRVLLALAASHGLLVHQMDVKTVFLNGELEEEIYMDQPDGYVLEGFVVNEADKCVYYRYGGGEGVILCLYVDDILIFGTSLNVIEEVKDYLSKSFEMKDLGEADVILNIKLQRGDEGGITLMQSHYVDKVLSLFGYSDCKPAPTPYDPSVLLRKNRRIARDQLRYSQIIGSLMHLASATRPDISFVVSKLSRFVSNPGDYHWQALERVMRYLKGTMSYGIHYTGYPKVLEGYSDSNWISDANEIKATSGYVFTLGGGAIS

SEQ ID NO: 189251 - protein, 1504 aa, Oryza sativa
  Clone ID: PAT_MRT4530_85779C.1.pep
MARREPEPLRTSTPTEAILPHNPAEGHSRVVLVASQLRPWYVHDAYDTLSILLVMLHVITRSPHIVHAMVIVLIFWIKICRYMTIFPTIQKPDRSFSVVGFAAALKPHAFDGSNYKRWKARALLWLTAMQCFCVSQGKRSEPSLSHEEEAKFEASDCLFHGALISVLAHNIVDVYMHMPSGKDMWDALEATFGVSDAGSELYVMEQFYDYKMVDDRSVVEQAHEIQMLAKELEDNNCELPDKFVAGGIIAKLPPSWSDFATSLKHKRQEFSVSDLIGSLGVEEKARAKDNRGKKVEGGSSANMNNKKVKPDVKPKAATNFKKKGKGKAKGDCFVCGKSGHWAKDCPERKDRKSANMVISEGGGKSGYGKILPTVLSVFHSPDWWVDTGANIHVGRGSSLLMGNGSLAAVHGVGTVDLKFTSGKTVQLKNVQHVPSIKKNLVSGSLLCREGFRLVFESNKCVVSKYGTFVGKGYDSGGLFRFSLNDMCNNHNVVNHISENDESNDEALHFFKTYKAEVENQLERKIKRLRSDRGGEYFSNEFASFCEEFGIIHERTPPYSPQSNGVAERKNRTLTEMVNAMLDTMGLSMEWWGEAVLTACHVLNKIPMKHKEVTPFEEWERKKLNLSYLRTWGCLAKVNVPIAKKRKLGPNTVDCVFLGYAIHSVGYRFLIVNSGVPDMHVGTIIESRDATFFENEFPMKHTPSTSSQETVMPHKHFAPIEHNDQTPEENPEEDNVVDTRKSKRQRVAKSFGDDYIVYLVDDTPRTIEEAYSSPDANYWKEAEVVERPYGCKPVGCKWVFKKKLRPDGTIEKFKARLVAKGYTQKEGEDFFDTYSPVARLTTIRQAPKQWHEKFDTTLTSVGFVVNEADKCVYYRYGGGEGVILCLYVDDILIFGTSFNVIEEVKDYLSKSFEMKDLGEADVILNIKLQRGDEGGITLVQSHYVDKVLSHFGYSDCKPAPTPYDPSVLLRKNRRIARDQLRYSQIIGSLMYLVSATRPDISFAISKLSRFVSNPGDDHWQALERVMRYLKGTMSYGIHYTGYPKLLEGCSDSNWISDADEIKATSGYVFTLGGGTVSWKSFKQTILTRSTMEAELTTLYTATVEAKWLRELLMDLSVVEKPVPAILMNCDNQIVIIKVNSSKDNMKSSRHIKRRLKSVRKQKNSGVIALDYVQTARNLDGSYLNVIRVAFSSRDVDLQNISEGTHLYEFDCYSYPRWKFNLTVSTKTQKEQGLRNYTFARDLHQKCTSYYCCFHVFFTSILAQQQSSVVEIVAAVMHGEEVTRQRCRRPAVLRGERITRRQRSRLARRCKPPVGNAVAILRGERITQRRRMRSARRCKAPVGNAVAVLRGERITRWWRMRSARRCKPSVGNAVAILRGERITRRRCMRSARCKRSVGDEVAILRGERITWWWRVVPRQRGVSSPRARGKVGEEHPDDAGGEAPESVARSTKNAQATREVKPPSPWRVGVEHPDDAGGEAPESMVRSAKNAQTTRKRSPRVRGKSV

SEQ ID NO: 189252 - protein, 333 aa, Oryza sativa
  Clone ID: PAT_MRT4530_8577C.1.pep
MASPATLTPSSQPMRSGGSDDAGGGEACAQPIAFHVEVSQHNEDNIGIDMQSLHIEQAEQTVVAMPSTVQQDGSSEADEGEEINGIVDEIERVDRNAREDEANLAQEEDEEADDEEYEVQPVIASWNREDLGYIGKNELHDSVWFYGDGPINKGTMFSTKSAFQDAVKSWSFKMQRQFKVLKSSLTVYTAVCETEGCNFRVHGHVPKYESYWLVSRVEEHNNCMLRNTRSSHRNLTAAYVANKYYSNIIEADDLLVRHIIKAVETSERYTISYHKAWRAKQKAMEKRYGSFEVAYDTLPQILDILKQRNPGTYVVVQDRNPGTYVVVQDRDSV

SEQ ID NO: 189253 - protein, 55 aa, Oryza sativa
  Clone ID: PAT_MRT4530_85780C.1.pep
ICLPFFYLFLCRKFKVFTFAQMPDTFGEFPPLLFVLQHCMFIRNFPVVHHCVKTL

SEQ ID NO: 189254 - protein, 351 aa, Oryza sativa
  Clone ID: PAT_MRT4530_85781C.1.pep
MTPNITLALAYRYSAATRRTEKFFTTLALRVPPPFFLSCLRAQVYRMSRCLRNSIRLRTCTGRRAIKFLGIASNATALVLRGYCCCIGAFTKMSTEIGDKKMNDINGGNTASKSSGGTFSGYTFILPILLDVSLLILFAMAALRYFVNVDAYFILNILKLYISSTVTTSTHIANVMFIVLIFWIKIYRIMTKFPIIQKLDRSFSIVDFAASLKPDAFDGSNYKRWKAHTLLWLTAMHCFFVSLGKPSEAPLSPEEEAKFEASDCLFRGALFSVLADKIVDVYMHMPSGKDMWDSLEAKFGVSDANSERYVMEQFYDYNMVDDRSVVEQAHEIQMLAKELGNNNYELPDKFY

SEQ ID NO: 189255 - protein, 66 aa, Oryza sativa
  Clone ID: PAT_MRT4530_85782C.1.pep
KGSAKFRSVSITSRFILNFRSETRVIEFFSRGGRNKRGLRNEFRSGIFHALICHQMRWHPSFMPFG

SEQ ID NO: 189256 - protein, 1204 aa, Oryza sativa
  unsure (1)..(1204): unsure at all Xaa locations
  Clone ID: PAT_MRT4530_85783C.1.pep
MSALVAAAASPRAGAAATVPGDGMPGAGAAVNDNVNGGSSASQSSGGTFSGSPHIVHVMIIVLIFWIKICRYMTIFPTIQKPDRSFSVVGFALKPHAFDGSNYKRWKARALLWLTAMQCFYVSRGKRSEPPLSPEEEVKFEASDCLFRGALISILADNIVDVYMHMPSGKDMWDALEAKFGVSDAGSELYVMEQFYDYKMVDDRSVVEQAHEIQMLAKELENNNCELSDKFVAGGIIAKLPPSWSDFATSLKHKRQEFSVSDLIGSLGVEEKARAKDNRHKKVEGGSSANMVQKKNPHASHNNKKVKPDGKPKATTNFKKKGKGKANGDCFVCGKSGHWAKDCPKRKDRKSANMVISKGGETSGYGKLLPTVLSVFHSSDWWVDTGANIHVGRGSSLSMGNGSLAAVHGVGMVDLKLTSGKTVQLKNVQHVLSIKKNLVSGSLLCREGFRLVFESNKCVVSKYGTFVGKGYDRGGLFRFSLDDMCNNHNVVNHISENGSKCHTCVQSKQSRKPHKASEARNLAPLELVHFDLKALHYFKTYKAEVENQLERKIKRLRSDRGGEYFSNEFASFCEEFGIIHERTPLYSPQSNGVAERKNRTLTEMVNAMLDTTGLSKEWWGEAVLTACHVLNKILMKHKDVTPFEEWERKKLNLSYLRTWGCLAKVSVPIAKKRKLGPNTVDCVFIGCAIHSVGYRFLIVNSGVPDMRVGTIIESRDATFFENEFPMKHTPRTSSQETVIPHEHFAPIEHNDQTPEGNPEEDNIVDTRKSKRQRVAKSFGDDYIVYLVDDTPRTIEEAYSSPDAYYWKEAVRSEMDSIMSNASHGLLVHQMDVKTAFLNGELEEEIYMDQPDEYVLEGQEGMGCKLLKSLYGLKQAPKQWHEKFDTTLISVGFVVNEADKCVYYRYGGGEGVILCLYVDDILIFGTSLNVIEEVKDFLSKSFEMKDLGVADVIINIKLLRGDEGGITLVQSHYVDKVLSRFGYSDCMPAPTPYDPSVLLRKNRRIARDQLRYSQIIGSLMYLASATRPDISFAVSKLSRFVSNPGDDHWQALERVMRYLKGTMSYGIHYTRYPKLLEGYSDSNWISDADEIKAASEYVFTLGGGVVSWKSCKQTILTRSTMEAELTALDTATVEAECLRELLMDLPMVEKPVPAILMNYDNQTMIIKVNSSKDNMKSSRHIKRRLKSVRKHKXLRSDSIRLCPNS

SEQ ID NO: 189257 - protein, 977 aa, Oryza sativa
  unsure (1)..(977): unsure at all Xaa locations
  Clone ID: PAT_MRT4530_85784C.1.pep
MWGALEAKFGVSDAGSELYVMEQFYDYKMVDDRSIVEQAHEIQMLVKELENNNCELPDKFVVGGIIAKLPPSWSDFATSLKHKRQEFSVTDLIGSLGIEEXARAKDNWGKKIEGAXHWAKDCPERKDKKSANMVISEGGGTLGYGYDSGGLFRFSLDDMCNKVVNHVSDDDDESNVWHSRLCHVNFGCMTRLANMSLIPKFTLVKGSKCHTCVQSKQPRKPHKASEARNLAPLELVHSDLCEMNGVLTKGGKKYFMTLIDDCTRFCYVYLLKTKDEALHYFKIYKAEVENQLERKIKRLRFDRGGEYFSNEFTSFCEEYGIIHERTHPYSPQSNGVAERKNRTLTEMVNAMLDSAGLSKEWWGEAILTACHVLNIIPTKHKKVTPFEEWERKKLNLSHLRTWGCLAKVNVPIAKKRKLGPKTVDCVFLGYAIHSMGYRFLIVNSGVPDMRVGTITESRDATFFENEFPMKNAPSTSSQEPILSPEHFVPIEHIDQTLEENPEEDNIVATRKSKRQRTAKSFGDDYIVYLVDDTLKTIEEAYSSPDADYWKEAVRSEMDSITSNGTWEVIERRYGCKPIGCKWVFKKKLRPYGTIEKYKARLVAKGYTQKEDEDFFDTYSSVARLTTIRVLLALAASHGLLVHQMDVKTAFLNGELEEEIYMDQPDGYVLEGQEGMVCKLLKSLYGLKQAPKQWHEKFDNTLTSAGFVVNEADKCVYYCYGGGEGVILCLYVDDILIFGTSLNVIEEVKDFLSKSFEMKDLGVADVILNIKLLRGDEGGITFVQYHYVNKVLSRFCYSDCKAAPTPYDPSVLLRKNRRIARDQLRYSQIIGSLMYLASATRPDISFAMSKLSRFVSNPGDDHWHALERVMHYLKGTMSYGIHYAGYPKVLEGYSDSNWISDADEIKATSGYVFTLGGGAVSWKSCKQTILTRSTMEAELTALDTATVEDEWLRELLMDLPVVEKPVPAIMMNCDNQTV

SEQ ID NO: 189258 - protein, 245 aa, Oryza sativa
  unsure (1)..(245): unsure at all Xaa locations
  Clone ID: PAT_MRT4530_85785C.1.pep
VCGKSGHWXKDCLEPKXRKSATMVISEGRETSGYGKLLPTVLSVFHSPDWWVESGANIHVCADISLFSSYEVGKGFSLLMGNGSLVPVHGVGTVDLKFTSGKTVQLKNVQHVSSIKKNLVSGSLLCREGFRLVFESNKCVVSKYETFIGKGYDSGGLFRFSLDDVCNNNNVVIHISKNDESNVWHSRLCHVNFGCMTRLANMSLIPKFTLVKGSKCHNVXQSKQLREPHKASEARDFAPLELVHS

SEQ ID NO: 189259 - protein, 170 aa, Oryza sativa
  unsure (1)..(170): unsure at all Xaa locations
  Clone ID: PAT_MRT4530_85786C.1.pep
RNSANNRNSRRRLYPENSPPLDGEAELPPLLLSFTAPPGAPAPAPDPAPVGGAPPPPSPPAAAAAATPDMAMSSRAGGTPQKPDHKPTRCRSQAKVWFRRHCSXPISRARKRSEARKQEQLRHGEGETNTGKEAMKLDRTRGLLIYQEKERGRAVAEGIVGTWVSGCKRI

SEQ ID NO: 189260 - protein, 174 aa, Oryza sativa
  Clone ID: PAT_MRT4530_85787C.1.pep
MEWARGPAMAAAAAAAVVMVAAVLAGQAMAAGATTYTVGAPDGLWDMETDYKEWVARRTFHPGDKLTFTYSRELHDVVEVTKAGYDACSNANNISAFRSGNDLVALTAVGTRYFLCGLTGHCGSGMKIRIDVVAAASSGPAAAAAPLPSTSSVTAAVAGSRLVLVLLYALLPLW

SEQ ID NO: 189261 - protein, 65 aa, Oryza sativa
  Clone ID: PAT_MRT4530_85788C.1.pep
PLAVVLAIFRLWHRILRSFIFPLASSSQSIAYFNSMSHGLYVIDVSLCVCPHRVLFTKKKKKGAA

SEQ ID NO: 189262 - protein, 108 aa, Oryza sativa
  Clone ID: PAT_MRT4530_85789C.1.pep
GSGHAHNCPFICPGFLTVRSICVVHVLMRFFARQSSCWTWYLFSSWKHHMCRRLHLWLGLYSRSMQQLFSPREQSPSLQWRGIKHLLSHHRVQTILPWSSLETPMKTK

SEQ ID NO: 189263 - protein, 78 aa, Oryza sativa
  unsure (1)..(78): unsure at all Xaa locations
  Clone ID: PAT_MRT4530_8578C.1.pep
PDEPVVRSIVPSIHDHQQSIVWDSIISTSQELWRSLLSYIQSSQLGPXLALXXVAIIVLLQVTIIVLLLRSXKVYMVN

SEQ ID NO: 189264 - protein, 110 aa, Oryza sativa
  unsure (1)..(110): unsure at all Xaa locations
  Clone ID: PAT_MRT4530_85790C.1.pep
MEMNKDIASLFWSHETQAKKIADSYPNPASPPPLTASHNRCPPPPVVAPPTXPAEGRAPPLPPARPPLPTAHRPPPASSPLPDPAEGRAPPPPAASPSCATIARYPPPLP

SEQ ID NO: 189265 - protein, 201 aa, Oryza sativa
  Clone ID: PAT_MRT4530_85791C.1.pep
MGSTLGADYFAFHPGQAYRFSDLDSPTTSTRSLSSTRNQLGRDSTSLAPFGIPNAAETYSSIFSESAPSYLRESSSTNHRLRSLSNNAAIYPQIAMRLPPFLATTFGTRLASPPKTRPSLVPRSLEIGSRRWGVMLQPLGSCSPIEIVNSFSLSDGYSDFDTESFNNSEFTDNYTPLFFEFFKTDAPGATDIEEVACLARE

SEQ ID NO: 189266 - protein, 404 aa, Oryza sativa
  Clone ID: PAT_MRT4530_85792C.1.pep
MKKIPEKLGGYLEYEVISSTLSNVVYDSLNRDDFDKGWMKMIDEFSLQDNEWLAGLYDNRELWVPAYVKDTFWAGMSSSQRSESVNAFFDGYVNARTTLKQFVEQYDNALRDKVEKENKSDCKSFQEAIPCITHYEFERQFQVAYTNKKFKEFQDELRGKIYYYATLRKTEGLVHTFSVREDRKIGEQRQGNSGISAKWKNKDMVLKQGKMVLSPISVRRRGRPPSLRKQSKLDQVVRRLRMKKQQESTIEVQSRRRRKTRTKNVISKDKQLINIQNSRQMEVNFDHCYGGAYEAGSAEFAANEFQGLQSNHPAPPSHISSYMDLLQGNVVQASDTCVGRIAKLIENLMGLTTSKSATGDGGKTTSSSAIDSKRAMETGSVTIQVAGYSRTKGIGVGKSINSYV

SEQ ID NO: 189267 - protein, 836 aa, Oryza sativa
  Clone ID: PAT_MRT4530_85793C.1.pep
MALQLRRLRVIQMLCYARKLGFGVIKRGSKKTEDGKVRYFTLACSRQGKAQYTSTNKFKPNPSTRQQCPAKVNFYLHDEKFCISTLTLDHNHVVSPSKARHLRCHKKLDLQAKRRLELNDQARIRINKNFSSLVMQAGGYENLQFGEKECRNYLQDVRKLKLGAGDAHAVYQYFLRMTSKDPNFFYVMDVDEDSRLKNVLWVDARSRATYESFSDVVTFDTTYLTNKYHMPFAPFVGVNHHGESVLLGCALLSNEETETFVWLFRSWLSCMSNKAPNAIITDQCRAMQNAIMEVFPEARHRWCLWHIMKKIPEKLGGYLEYEVISSTLSNVVYDSLNRDDFDKGWMKMIDEFSLQDNEWLAGLYDNRELWVPAYVKDTFWAGMSSSRRSESVNAFFDGYVNARTTLKQFVEQYDNALRDKVEKENKSDCKSFQEAIPCITHYEFERQFQVAYTNKKFKEFQDELRGKIYYYATLRKTEGLVHTFSVREDRKIGEQRVVSELLVLFNQEDCDLHCECRHFEFRGILCRHILSILPLVDIEKVPSKYILQRWRKDFKRKHTFIKCSYDDQLDTPIVRRFDTLCKRFNEVAENGSVSDALCNLVMDGLNELQIKIDAHHGSKEIQEYQQNGKNKDMVLKQGKMVLSPISVRRRGRPPSLRKQSKLDQVVRRLRMKKQQESTIEVQSRRRRKTRTKNVISKDKQLINIQNSRQMEVNFDHCYGGAYEAGSAEFAANEFQGLQSNHPAPPSHISSYMDLLQGNVVQASDTCVGRIAKLIENLMGLTTSKSATGDGGKTTSSSAIDSKRAMETGSVTIQVAGYSRTKGIGVGKSINSYSNEL

SEQ ID NO: 189268 - protein, 281 aa, Oryza sativa
  Clone ID: PAT_MRT4530_85794C.1.pep
MVRTGTMLMEKQKSSTVRIPCEKVTRVRILGGQLQSTVGIGTKLREELRSRRSRIPGDEVGYEMAYGGWTSCGRDLRNGFHEAGQARGLLEPAQDVRREETECELAKDRSEGVRPGAGFQMAGAAAVLEKKEIEGLSPIVCARSDRWDSGGLTAARDWTINSALAIPSIQLAELDAAFNEEEVRHVIREMPSNKPPWSDGSTDHFYKSCWPITKKEIMSALNAPHVTNGQGFYKLNCALITLLPKKDGVILIKDFWPIGLIHSFGKLFSKLLVSRLSPCLG

SEQ ID NO: 189269 - protein, 450 aa, Oryza sativa
  Clone ID: PAT_MRT4530_85795C.1.pep
MFNWHDGDHTTFSVLEMFERRLQSELILLIRSVISEAPYEHLYTHSSKACYLWKKHHMNTFGRFCSIRNCSTVYSLYGRARYRTYEKKYFFVVSQKKKKTKNSETSDIQIPSHSFLDKSSDITPYTKGETWDFQTSGDQANSYAQLVTEWKNSALMISRTLAMAYVMDQIRGPLANIRALAKMLSVHTKRNEISYDIVEDVMIQGDHLKDALQQIQDAVYLTKVNIVRYNEETLKKIQGSPSSRTLPHYQSDPKNSSQKVDSLSSHDSDNGDMVIPMPPLWLAPLQPQDARPCDLSVVLEDLVGAAQPLAFRQQRTLDVTGISHPLQVAVEESALRQALSNLIEGALLRTQLGGRVQIYAGEAPAGGILVVIDDDGPDMQYMTQMHCLAPFGSDLADGLTVAREILENYGCVLRVISPRRPDAIIGTGGSRIEIWLPTSQTELSEITEGA

SEQ ID NO: 189270 - protein, 489 aa, Oryza sativa
  Clone ID: PAT_MRT4530_85796C.1.pep
MEFSLVVALIAVASSCVFVHFLARGATKKRRSPAAKKLPPGSLGLPVIGQSLGLLRAMRSNSGERWVRRRIDRYGAVSKLSLFGKPTVLVAGAAANRFVFFSGALALQQPRSVQRILGDRSILDLVGADHRRVRGALSEFLRPEMLRMYVGKIDGEARRHVAGCWSGRAAVTVMPLMKRLTFDIIASLLFGLGPGAAARDALAGDFERVMGGMWAVPVDLPFTAFRRSLRAAARARRLLAGITRERKAALERGAATRSSDLIACLLSLTDDRGGAPLLSEEEIVDTAMVALVAGHDTSSILMTFMVRHLANDPDTLAAMHEEIARSKRDGEALTWEDLTRMKLTWRVAQETLRMVPPIFGNFRRALEDIELDGYVIPKGWQVFWVASVTHMDAAIFHDPDKFLPSRFDSQSSSPSTAKAAPPCSYVAFGGGPRICPGIEFARIETLVMMHHLVRKFRWKLCCKEDTFARDPMPTPLHGLPIEIEPRISP

SEQ ID NO: 189271 - protein, 54 aa, Oryza sativa
  unsure (1)..(54): unsure at all Xaa locations
  Clone ID: PAT_MRT4530_85797C.1.pep
HTVRLFCARGDDYFLSEHISKLCLNVDNHSVDIPXWINVMRHSNGIRARTDRWS

SEQ ID NO: 189272 - protein, 408 aa, Oryza sativa
  unsure (1)..(408): unsure at all Xaa locations
  Clone ID: PAT_MRT4530_85798C.1.pep
MNDEEVGRAVEGDDLAFELLAEGGLHGDQHPDRELLAATLHVAAAARRWVDGRGGGEVGCEILGVQRRTRPCWRKKSAPQSLTTRPAWPLEPKSPTLCSTGETAVVRPVRPDNFVTARKLAVTGQSLSPLNLAGLTAVXWPVRPSTARSDRRRLGLTGCGSGGSVSPPKTRPVQQTNGAGQTGLTTPVRPANRPGQTGLRPTALELTLSVPNLELMGIALRSRWSWMQRVPSDKPWQGLTIPTLHKEQAFVAASTICHLGDGRTILFWEDSWLREGCIRSIAPSIFEHVPPRIRRRRTVSGALLNRRWIRDIQGALGTQAILDYLKLWSLVQSVDCSTAVSDRLSWKWESSERIDWSILQIVQGPDERERDVPMEHDEMFVLLGLRDEDGRAAEALNAGVVEESTNDL

SEQ ID NO: 189273 - protein, 325 aa, Oryza sativa
  Clone ID: PAT_MRT4530_85799C.1.pep
MAGTCAHAEFFRAQPAWALALAGVGLLAAARAALRLALWLYAAFLRPGKPLRRRYGAWAVVTGATDGIGRAMAFRLAASGLGLVLVGRSPDKLASVSEEIRGRYPRVEVRTFVLDFAADGLAAGVEGLREAIRGLEVGVLVNNAGVSYPYARYLHEVDEELMRTLIRVNVEGLTRVTHAVLPAMVERKRGAIVNIGSGSSSVMPSDPLYSVYAATKAYVDQFSRCLYVEYKSKGIDVQCQVPLYVATKMASIRKSSFFVPSADTYARAAIRHIGYEPRCTPYWPHSVMWFLISILPESLIDSIRLGMCIKIRKKGQAKDAKKKAQ

SEQ ID NO: 189274 - protein, 68 aa, Oryza sativa
  unsure (1)..(68): unsure at all Xaa locations
  Clone ID: PAT_MRT4530_8579C.1.pep
VXTLGXKLFPAXXXPXXXKFXXGRXXWXKXGXXXNGKXMXPXLKDPXSXGTGHVPPAARQLPCASQVS

SEQ ID NO: 189275 - protein, 60 aa, Oryza sativa
  unsure (1)..(60): unsure at all Xaa locations
  Clone ID: PAT_MRT4530_857C.1.pep
MRHYLVLRMQTSFLFRYIVLCDIISSSRLLYYGTEEVILSXISICAPNFDVTQQQTNQSK

SEQ ID NO: 189276 - protein, 39 aa, Oryza sativa
  Clone ID: PAT_MRT4530_85800C.1.pep
MASANGIIAYACVFREWEQHMREDMDAPSDGDPSVQASS

SEQ ID NO: 189277 - protein, 39 aa, Oryza sativa
  Clone ID: PAT_MRT4530_85801C.1.pep
SCNFFPAISIELRTVSCELLKKSYVVIRNNPEEIVSLCL

SEQ ID NO: 189278 - protein, 365 aa, Oryza sativa
  unsure (1)..(365): unsure at all Xaa locations
  Clone ID: PAT_MRT4530_85802C.1.pep
MATSSKLRSPVLPRRRLAEPFLLLLLLLLLAAVARPTAAADVVELTLLAGAQEKGAVCLDGSPPGYHLQRGFGSGEHSWLVFLEGGAWCNSIESCSRRKMGVYGSSKFMKAAEFNGILSNDQQLNSDFYNWNKVAXKDGSTLHFRGLRIWEAVVDELMGKGLATAKQXVYYLHLSASFCSSEDLSGERHMWSVFNGTVHLQNVREVLSKDCLTKKDPTECFFPAELVKSITAPTLILNSAYDSWQIRNALAPDGSFPGQSWSSCKTDIRNCSSTQIQVFNGFRNKFVDDVEIVKDKKDWGLFIDSCFTHCQTPFNISWSSQASPVLGSKTVAEAVGDWYFERSYEVKEIDCEYPCNPTCSSQLPT

SEQ ID NO: 189279 - protein, 128 aa, Oryza sativa
  Clone ID: PAT_MRT4530_85803C.1.pep
MGLVPTSIGGFDWYLPVKDRGTSLTKYKYQGLVLRNNLGIRSEEGALLLGVRRAGFWLGLLGVVAASRSVAGEAVPARYRGFGAKEGALLLRVVAASRSVAGELHISRVLDRESSRVGLGRKNDEVWY

SEQ ID NO: 189280 - protein, 128 aa, Oryza sativa
  Clone ID: PAT_MRT4530_85804C.1.pep
MASRAFLLVALNLVLFFTVASACGKYCPTPSTPSTTPSTPSYNTKCPKNALKFAACADVLGLVSAEVGQPPYEPCCGVLGGLADLEAAVCLCTAIKANVLGITLDIPVKLSLLVNYCGKNVPSGFICA

SEQ ID NO: 189281 - protein, 55 aa, Oryza sativa
  Clone ID: PAT_MRT4530_85805C.1.pep
VEEDDTLTKKHCLVGHKNPISFVAWSPNDRMLLTCGNGESVKLWNVATGECSLKF

SEQ ID NO: 189282 - protein, 577 aa, Oryza sativa
  unsure (1)..(577): unsure at all Xaa locations
  Clone ID: PAT_MRT4530_85806C.1.pep
MEMHASSVSSHGEARLGGERGLVDREELVRVIAXSLYSLGYRRAAAALEAESGMPLYPAEHDRLLFDVMSGRWDACVAAIRAVAGLGDRERAAAEFLVWRGHFLELLGIGDAGLPRAREVLWRRIAPLGVDRECVHWLARAMVSCEGAVAPDAVVGWRIGLFLDLVDAFPPWFHVPSGRLELLVENAVVKQVSSCVYHNLPDEVTLFEDHKCPEEQIPSKCSQVFCGVLIFQILLYSKRNDHNLRYFKTNDNNVIRFFFSQEGITIQILCGHNNEVWFVRFSNDGNYLASSSSDCTAIIWKVEEDDTLTKKHCLVGHKNPISFVAWSPNDRMLLTCGNGESVKLWNVATGECSLKFSSSVGHIINSCAWFPNSEKIVCASCEPESSPKRIFTCDLEGQELESWVGDRIPKVSDIAVTPDSKHLICVCSNEIWIRELPKGREWRIREQQTISSLSLSGDGQSLIVNLNSQEIHLWRISESSTAADNKFKGHKQGKFVIRSCFGGSNSLFIASGSEDSQVYIWKRHLETPIKVLYGHSLTVNCVSWNPAKPHMLASASDDRTVRIWLAHKGSHRTRLTA

SEQ ID NO: 189283 - protein, 66 aa, Oryza sativa
  Clone ID: PAT_MRT4530_85807C.1.pep
MNHIINPWPFKDQGSIFVSDEFVQFADRVGIKLLNSSPYYAQANGQAEAKFGKWSPNWEGPFQIHK

SEQ ID NO: 189284 - protein, 1504 aa, Oryza sativa
  Clone ID: PAT_MRT4530_85808C.1.pep
RLRAAAPPAACRLPRLRPPLFALTRHQTASYGAAARGLELLRLASASAAPAATSCQRQLPPGGGGTPPPTGAGAPPPTGAGAPGGGAVNDYNNGGNSASPSSGGPFSGYNLLLLLLLLALFLFPLLALYCVRYVLVPILRDASSMLSRYWYVPVSDIHDAHSMLLVMLRLPYTAYAMIIVSISWIKICRIMTIFPTIQKPDRSFSVVGFAAALKPHAFDGSNYKRWKARALLWLTAMQCFYVSRGKRSEPPLSPEEEAKFEASDCLFRGALISVLADNIVDVYMHMPSGKDMWDALEAKFGVSDAGSELYIMEQFYDYKMVDDRSVVEQAHEIQMLAKELENNNCELPDKFVAGGIIAKLPPSWSDFATSLKHKRQEFSVPDLIGSLGVEEKARAKDVRGKKVEGGSSANMVQKKNPHASHNNKKVKPDVKPKAATNFKKKGKGKAKGDCFVCGKSGHWAKDCPERKDRKSANMIISEGGGTSGYGKILPTVLSVFHSPDWWVDTGANIHVCADISLFSSYQVERGSSLLMGNGSLAAVHGVGTVDLKFTSGKTVQLKNVQHVPSIKKNLVSGSLLCREGFRLVFESNKCVVSKYGTFVGKGYDSGGLFRFSLNDMCNNHNAVNHISKNDESNVWHSRLCHVNFGCMTRLANMSLIPKFTLVKGSKCHTCVQSKQPRKPHKASEARNLAPLELVHSDLCEMNGMLTKGGKKYFMTLIDDCTRFCYVYLLKTKDEALHYFKIYKAEVENQLERKIKRLRSDRGGEYFSNEFASFCEEFGIIHEMTPPYSPQSNGVAERKNRILTEMVNAMLDTAGLSKEWWGEAVLTACHVLNKIPMKHKEVTPFEEWERKKLNLSYLRTWGCLAKVNVPIVKKRKLGPKTVDCVFLGYAIHSVGYRFLIVNFGVPDMHAATIFESRDATFFENEFLMKYTPSTSSKETVMLHEHFAPIEHNDETPEENPEEDNIVDTRKSKRQRVAKSFGDDYIVYLVDDTPRTIEEAYSSPDADYWKEAVRSEIDSIISNGTWEVVERPYGCKPVGCKWVFKKKLRPDGTIEKYKARLVAKGYTQKEGEDFFDTYSPVARLTTIRVLLALAASHGLLVHQMDVKTAFLNGELEEEIYMDQPDGYVLEGQEGMVCKLLKSLYGLKQAPKQWHEKFDTTLTAAGFVVNEADKCVYYRYGGGEGVILCLYVDDILIFGTSLNVIEEVKDYLSKSFEMKDLGEADVILNIKLQRGDEGGITLVQSHYVDKVLSRFGYSDCKPAPTPYDPSVLLRKNRRIARDQLRYSQIIGSLMYLASATRPDISFAVSKLSWFVSNPGDDHWQALERVMRYLKGTMSYGIHYTGYPKVLEGYSDSNWISDADEIKATSGYVFTLGGGAVSWKSCKQTILTRSTMEAELTALDTATVEAEWLRELLMDLPVVEKPVPAILMNCDNQTVIIKVNSSKDNMKSSRHIKRRLKSVRKQKNSGVIALDYVQTARNLADQFTKGLPRNVIDSASREMGLIPT

SEQ ID NO: 189285 - protein, 380 aa, Oryza sativa
  Clone ID: PAT_MRT4530_85809C.1.pep
MEPDASSAAAAQNPNPNPSTGLPPISAYYQTRAEHHAVVSSDWLAHAAAAASLPPSSDAADADAASDAAALLSPGSNGGGGGVIEEFNFWRRKPEAAEAVAAIMALAAVIRSSRATTMMELEIELKKASDKLKSWDATSISLSAACDLFMRFVTRTSHLEHEKFDAAKSRLIERGEKFGEISLKARKTIAMLSQDFISDGCTILVHGYSRVVLEVLKLAASNRKLFRVLCTEGRPDRTGLRMSNELAALGIPVKVLIDSAVAYSMDEVDMVFVGADGVVESGGIINMMGTYQIALVAHSMNKPVYVAAESYKFARLYPLDQKDMTPAHRPIDFGVPIPAGVEVETSARDYTPPQYLTLLLTDLGVLTPSVVSDELIQLYL

SEQ ID NO: 189286 - protein, 572 aa, Oryza sativa
  Clone ID: PAT_MRT4530_8580C.1.pep
MMLAYMDHAAAAAEPDAGAEPAVAAVDAAEFAAAMDFGGLVSARPAAVVRPASSDDVASAIRAAARTAHLTVAARGNGHSVAGQAMARGGLVLDMRALPRRMQLVVAPSGEKFADVPGGALWEEVLHWAVSKHGLAPASWTDYLRLTVGGTLSNGGVSGQSFRYGPQVSNVAQLEVVTGDGECHVCSRSADPDLFFAVLGGLGQFGVITRARIPLSPAPQTVSTTPPPNRNERRPNRPAAADRRELALQVRWTRVVYASFADYAADAEWLVTRPPHEAFDYVEGFAFVRSDDPVNGWPTVPIPDGAHFDASLLPANAGPVLYCLEVALYQRGGGGDGGGDDMDKRVGEMMRQLKYVRGLEFAAGVGYVDFLSRVNRVEDEARRNGSWAAPHPWLNLFISSRDIAAFDRAVLNGMLADGVDGPMLIYPMLKSKWDPATSVALPNGEIFYLVALLRFCRPYPGGGPPVDELVAQNNAIIDACRSNGYDYKIYFPSYHAQSDWSRHFGAKWSRFVDRKARYDPLAILAPGQNIFARTPSSVAAAAAVIVMMVMMGMKRRDRDEHNDDGDDDRVIV

SEQ ID NO: 189287 - protein, 171 aa, Oryza sativa
  unsure (1)..(171): unsure at all Xaa locations
  Clone ID: PAT_MRT4530_85810C.1.pep
RNSANNSSRRRRVYSENSPPLDGEAELPPLLLSFTAPPGAPAPDPAPVGGVPPPPAVAAATPDMAMSSRAGGTPQKSDHPPTWCRFQAKVWFRRHCSXPFSRARKRSEARKREQFRRGEEETNTGKEAKKTDRTRGLLIYQEKERGRAVAEGIVGTWVSACKRIATTFFLI

SEQ ID NO: 189288 - protein, 671 aa, Oryza sativa
  Clone ID: PAT_MRT4530_85811C.1.pep
MAMATPMAPRSTFAIFLILLLRSGHSPAAAFYLPGSYPHRYRPGEALAAKVNSLTSPSSKLPFPYYSLPFCAPQGGVNRAAESLGELLLGDRIETSPYRFSMLKNATAFLCRTDPLPPATADLLMFRIDDAYHVNLLLDTLPVVRYVKNLAAPGVFVRSTGFPVGVRADDGEYYVYNHLKLTVLVNKPRNGTTRAEALMATADAVELISFAGGSKDGGGYTVVGFEVVPCSVEHDAAAIKGKKMYDELPARAAAGCDPSVVGMRVRANRPLVFSYEVAFVESGVEWPSRWDAYLEMGGAKVHWFSILNSIVVVAFLAAILLVILLRTVRRDLAQYDEHGGEAGLAPQADELAGWKLVAGDVFREPAHPVLLCVMVGDGVRILAMAVATILFAALGFMSPASRGALVTGMLGIYLLLGFAAGYAAVRLWKTVRHGDSAGWKRVAWRASCAFPGAGFAVFTALNCVLWYNGSTGAVPFLLFAVILLLWAFVSVPLTLAGGLVASRVGHLEYPVKTNKIARQVPAAQCSPWVFVAVAGTLPFGTLFIELLFIMSSLWLGRVYYVFGFLLVVMALLVAVCGEVSVVLTYMGLCVEDWRWWWRAFFASGSVAAYTLGYAVYYLVFDLHSLSGPVSAALYVGYSLLMALAVMLATGAVGLAASFAFVYYLFSAVKLD

SEQ ID NO: 189289 - protein, 1361 aa, Oryza sativa
  Clone ID: PAT_MRT4530_85812C.1.pep
MSASVGGGGTPPPTGAGAGSGVGAPGGGAVNDYNNGDNSASPSSGGPFSGYNLLLLFPLLALYYVPVPVLHDASSILSCYWYAPVPDIHDAHSMLLVMLRSPYTAYAMIIVSFSWIKICRLMTIFPTIQKPDRSFSVVGFAAALKPHAFDGSNYKRWKARALLWLTAMQCFYVSRGKRSEPPLSPEEDAKFEASDCLFRGALISVLADNIVDVYMHMPSGKDMWDALEAKFGVSDAGSELYVMEQFYDYKMVDDRSVVEQAHEIQMLAKELENNNCELPDKFVAGGIIAKLPPSWSDFATSLKHKRQEFSVPDLIGSLGVEEKARAKDIRGKKVEGGSSANMVQKKNPHASHNNKKVKPDVKPKAATNFKKKGKGKAKGDCFVCGKSGHWAKDCPERKDRKSANMIISEGGGTSGYGKILPTVLSVFHSPDWWVDTGTNIHVCADISLFSSYQVGRGSSLLMGNGLLAAVHGVGTVDLKFTSGKTVQLKNVQHVPSIKKNLVSGSLLCREGFRLVFESNKCVVSKYGTFVGKGYDSGGLFRFSLNDMCNNHNAVNHISENDESNVWHSRLCHVNFGCMTRLANMSLIPKFTLVKGSKCHTCVQSKQPRKPHKASEARNLAPLELVHSDLCEMNGVLTKGGKKYFMTLIDDCTRFCYVYLLKTKDEALHYFKIYKAEVENQLERKIKRLRSDRGGEYFSNEFASFCEEFGIIHEMTPPYSPQSNGVAERKNRTLTEMVNAMLDTAGLSKEWWGEAVLTACHVLNKIPMKHKEVTPFEEWERKKLNLSYLRTWGCLAKVNVPIVKKRKLGPKTVDCVFLGYAIHSVGYRFLIVNSGVPDMHAGTIFESRDAIFFENEFPMKYTPSTSSKETVMPHEHFAPIEHNDETPEENPEEDNIVDTRKSKRQRVAKSFGDDYIVYLVDDTPRTIEEAYSSPDADYWKEAVRSEMDSIMSNGTWEVVERPYGCKPVGCKWVFKKKLRPDGTIEKYKARLVAKGYTQKEGEDFFDTYSPVARLTTIRVLLALAASHGLLVHQMDVKTAFLNGELEEEIYMDQPDGYVLEGQEGMVCKLLKSLYGLKQAPKQWHEKFDITLTSAGFVVNEADKCVYYRYGGGEGVILCLYVDDILIFGTSLNVIEEVKDYLSKNFEMKDLGEADVILNIKLQRGDEGGITLVQSHYVDKALERVMRYLKGTMSYGIHYTGYPKVLEGYSDSNWISDADEIKATSGYVFTLGGGAVSWKSCKQTILTRSTMEAELTALDTATVEAEWLRELLMDLPVVEKPVPAILMNCDNQTVIIKVNSSKDNMKSSRHIKRRLKSVRKQKNSGVIALDYVQTARNLADQFTKGLPRNVIDSASREMGLIPT

SEQ ID NO: 189290 - protein, 1232 aa, Oryza sativa
  unsure (1)..(1232): unsure at all Xaa locations
  Clone ID: PAT_MRT4530_85813C.1.pep
IANSAIKEVSHSRSGGGRFTVQTDKDGLNLWSDRPCEGNPSLSKLWQFSPISSIGAKFGCKQLAKELENNNCELLDKFVAGGIIAKLPPSCSDFATCLKHKRXEFSVSDLIGSLGVEEKARAKDVQGKKIEGGSSANMVQKKNPQASHNNKKVKPDVKPKAATNFKKKGKGKAKGDCFVCGKSGHWAKDCPERKDRKSANMVISEGGGTSGYGKILPTVLSVFHSPDWWVDTXANIHVCADISLFSSYQVGRGSSLLMGNGSLAAVHGVGTIDLKFTSGNTVQLKNVQHVPSYIKKNLVSGSLLCREGFRLVFESNKCVVSKYETFVGKGYDSGGLFRFALNDMCNNHNAVNHISENDESNVWHSRLCHVNFGCMTRLANMSLIPKFTLVKGSKCHTCVQSKQPRKPHKASEARNLAPLELVHSDLCEMNSVLTKGGKKYFMTLTDDCTRFCYVYLLKRKDEALHYFKIYKAEVENQLERKIKRLRSDRGREYFSNEFASFCEEFGIIHERTPPYLPQSNGVAERKNRTLAEIVNAMLDTTGLCKEWWGEAVLTACYVLNKIPMKHKKVTPFEEWERKKLNLSYLRTWGCLAKVNVPIAKKRKLGPNTVDCVFLGYAIHSVGYRFLIVNSGVPDMHVGTIFESRDAIFFENEFPMKHTPSTSSQETVMPHEHFAPIEHNDQTPKKNPEEDNIVDTRKSKRQRVAKSFGDDYIVYLVDDTPRTIEEAYSSPDADYWKEAVRSEMDPIMSNGSWEVVERPYGCKPIGCKWVFKKKFRPNGTIEKYKARLVPKGYTQKEGEDFFDIYSPVARLTTIRVLLALAASHGLLVHQMDVKTAFLNGELEEEIYMDQLDGYVLEGREGMVCKLLKSLYGIKQAPKQWHEKFDTTLTSVGFVVNVVDKCMYYRYGGGEGVILCLYVDDILIFGISLNVIEEVKDYLSKSFEMKDLGEADVILNIKLQRGDEGGITLVQSHYVDKVLSRFGYSDCKPAPTPYDPSVLLRKNRRIVRDQLRYSQIIGSLIYLASATRPDISFAVSKLSRFVSNPGDDHWQALERVMRYLKGTMSYGIHYTGYPKVLEGYSDSNWISDADEIKVTSGYVFTLGGGAVSWKSCKQTILTRSTMEVELTALDTATVEAEWLRELLMDLSVVEKPVPAILMNCDNQTVIIKLNSSKDNMKLSRHIKRRLKSVRKXKNSGVIALDYVQTARNLADQFTKGLPRNVIDSASREMGMIPT

SEQ ID NO: 189291 - protein, 124 aa, Oryza sativa
  Clone ID: PAT_MRT4530_85814C.1.pep
DNDHTMSVIGDMSYMDPVYFQTGLLTDKSDVYSFGVVLLELITRKKASHSDKNSLLRNFLDAYTSGKTVTEFVDEEIAAANDHELLVNLAGMIAQCLNLEVDQRPEMTDIAERLRYMAKRARSN

SEQ ID NO: 189292 - protein, 1110 aa, Oryza sativa
  Clone ID: PAT_MRT4530_85815C.1.pep
MSAPGAGAATAAGGDGGGGAPPGAGAGAGGGAPGARAGAANNNTNGGNSASQSSGGPFSRSPYTVYAMIIVLTFWIKICRFMTIFSTIQKPDRSFSVVGFAATLKPHAFDGSNYKRWKARALLWLTAMQCFYVSRGKRSEPPLSPEEEAKFEASDCLFRGALISVLADNIVDVYMHMPSGKDMWDALEAKFGVSDAGSALYVMEQFYDYKMVDDRSVVEAHEIQMLAKELENNNCELPDKFVVGGIIAKLPPSWSDFATSLKHKRQEFSVSDFIGSLGVEEKARAKDVRGKKVEGGSSANMVQKKNPHVSHNNKKVKPDVKSKAATNFKKKGKRKAKGDCFVCGKSGHWAKDCPERKDRKSANMVISEGGGTSGYGKILPTVLSVFHSPDWWVDTGANIHVGRGSSLLMGNGSLAAVHGVGTVDLKFTSGKTMQLKNVQHVSSIKKNLVSGSLLCREGFRLVFECNKCVVSKYGTFVGKCYDNGAEVENQLERKIKRLRSDRGGEYFSNEFASFCEEFGIIHERTPPYSPQSNGVAERKNRTLTEMVNAMLDTAGLSKEWWGEAVLTACHVLNKIRMKHKEVTPFKEWERKKLNLSYLRTWGCLAKVNVPITKKRKLGPNIVDCVFLCYAIHSVGYRFLIVNSGVPDMHVGTIFESRDATFFENEFPMKHTPSTSSQETVMPHEHFAPIEHNDQTPEENPEEDNIVDTRKSKRQRVTKSFGDDYIVYLVDDTPRTIEEAYSSPDADYWKEAVRSEMDSIMSNGTWEVVERPYGCKPMDVKTTFLNGELEEEIYMDQPDGYVLEDQKGMVCKLLKSLYGLKQAPKQWHEKFDTTLTSAGFVVNEADKCVYYRYDGGEGVILCLYVDDILIFGTSLNVIEEVKDYLSKSFEMKDLGEADVILNIKLQRGDEGGIALVQSPLCGQDDHWQALERVMRYLKGTMSYGIHYTGYPKVLEGYSDSNWISDADEIKATSGYVFTLGGGAVSWKSCKQTILTRSTMEAELTALDTATVEAEWLRELLMDLPVVEKPVSAILMNCDNQTVIIKVNSSKDNTKSSRHIKRRLKSVRKQKNSGVIALDYVQTARNLADQFTKGLPRNVIDSASRKMGLIPT

SEQ ID NO: 189293 - protein, 143 aa, Oryza sativa
  unsure (1)..(143): unsure at all Xaa locations
  Clone ID: PAT_MRT4530_85816C.1.pep
PSYINTSKHHLGPNNTLVPDDTPGAQENEDVAINQDAPVIEDSDSSIVEQSTKHSIAKDKLKRNTKPPRRYIEEANIVAYAFSVAEEIEGNTEPSTYPEAIVSDDCNRXFITAIHNEMESLEKXWELMKLPNEKKSIRCKWYQ

SEQ ID NO: 189294 - protein, 325 aa, Oryza sativa
  unsure (1)..(325): unsure at all Xaa locations
  Clone ID: PAT_MRT4530_85817C.1.pep
LGTGGGEGVILCLYADDILIFGTSLNVIEEVKDFLSQSFEMKDLGVANVVLNIKLLRGDEGGITLVQSHYVDNVLSRFGYSDCKPSPTPYDSSVLLRKNRRIARDQLRYSHIIGSLIYLASATSPDISFAVSKLSRFVSNPGDDHWQALERVIRYLKGTVSYGIHYTVYPKVLEGYSDSNLISDADEIKATSGYVFTLGGGAVXQTILTRSTMEAELTALDTATVETEWFRELLMDLPVVGKPVPAILMNCDNQTVIIKVNSSKDNMKSSRYVKRRLKSVRKQKNSGVIALDYVQTAKNLANQFTKGLPRNVIESASREMDLRPT

SEQ ID NO: 189295 - protein, 157 aa, Oryza sativa
  Clone ID: PAT_MRT4530_85818C.1.pep
MSAPRAGAAAAGGDGGGGAPGAGACAANNNTNGGNSASQSSGGPFSGYILLLFLFPLLVLYCYVPVPDIHDASSMLLRYCYVLVPDIHNAHDAFSMLLVMLHVVTRSPYTVYAMIIVLTFWIKICRFMTIFPTAIGDDVSGLKGDRSSFQQTEQQGV

SEQ ID NO: 189296 - protein, 106 aa, Oryza sativa
  Clone ID: PAT_MRT4530_85819C.1.pep
RDRPRPFFFFFSVKLTSWGVYINFILHTSILLHPAIQKKPVVYHWFESKHFVQTRGSKNYSTALRKRLPSFWGGGGGGFVLLSALINQRFLPIYHSLFTPPNNRNG

SEQ ID NO: 189297 - protein, 99 aa, Oryza sativa
  Clone ID: PAT_MRT4530_8581C.1.pep
KESPGKKKERKLVVSLLSSSPLSISPQFVVVVRMMMMMSVGFLSQKTLEESRGWSWVPPSSSLVQPWLWLLVTIIPSLGHIMTPRFRCRLQSPSFVSQW

SEQ ID NO: 189298 - protein, 36 aa, Oryza sativa
  Clone ID: PAT_MRT4530_85820C.1.pep
ASRQRSHGAAASPCLLSTIGLDKKVTDAIHSQLRTH

SEQ ID NO: 189299 - protein, 868 aa, Oryza sativa
  unsure (1)..(868): unsure at all Xaa locations
  Clone ID: PAT_MRT4530_85821C.1.pep
MSAPGAGAATAAGGDGGGGAPPGAGAGAGGGAPGARAGAANNNTNGGNSASQSSGGPFSRSPYTVYAMIIVLTFWIKICRFMTIFSTIQKPDRSFSVVGFAATLKPHAFDGSNYKRWKARALLWLTAMQCFYVSRGKRSEPPLSPEEEAKFEASDCLFRGALISVLADNIVDVYMHMPSGKDMWDALEAKFGVSDAGSALYVMEQFYDYKMVDDRSVVEAHEIQMLAKELENNNCELPDKFVVGGIIAKLPPSWSDFATSLKHKRQEFSVSDFIGSLGVEEKARAKDVRGKKVEGGSSANMVQKKNPHVSHNNKKVKPDVKSKAATNFKKKGKRKAKGDCFVCGKSGHWAKDCPERKDRKSANMVISEGGGTSGYGXRGSSLLMGNGSLAAVHGVXVGYRFLIVNSGVPDMHVGTIFESRDATFFENEFPMKHTPSTSSQETVMPHEHFAPIEHNDQTPEENPEEDNIVDTRKSKRQRVTKSFGDDYIVYLVDDTPRTIEEAYSSPDADYWKEAVRSEMDSIMSNGTWEVVERPYGCKPMDVKTTFLNGELEEEIYMDQPDGYVLEDQKGMVCKLLKSLYGLKQAPKQWHEKFDTTLTSAGFVVNEADKCVYYRYDGGEGVILCLYVDDILIFGTSLNVIEEVKDYLSKSFEMKDLGEADVILNIKLQRGDEGGIALVQSHYVDKALERVMRYLKGTMSYGIHYTGYPKVLEGYSDSNWISDADEIKATSGYVFTLGGGAVSWKSCKQTILTRSTMEAELTALDTATVEAEWLRELLMDLPVVEKPVSAILMNCDNQTVIIKVNSSKDNTKSSRHIKRRLKSVRKQKNSGVIALDYVQTARNLADQFTKGLPRNVIDSASRKMGLIPT

SEQ ID NO: 189300 - protein, 104 aa, Oryza sativa
  unsure (1)..(104): unsure at all Xaa locations
  Clone ID: PAT_MRT4530_85822C.1.pep
DRKGSFPSQKLAIEVRGXSPTCILGLLSFHNQCVTIQQSPPSHISVSQHFTAPLPYTNCKGSFPPQKLAIEVRGPXTYILGSLLFHNQCGIIQQPLMNILLAIP

SEQ ID NO: 189301 - protein, 146 aa, Oryza sativa
  unsure (1)..(146): unsure at all Xaa locations
  Clone ID: PAT_MRT4530_85823C.1.pep
SYRKLPTKTLPDGXVXTIEKEXXXVGEXLFPPPFWAXKIYGIVPPLVSNVXNXXPXXLXXLLXXTXFXXXXASMXGFEXXFXKKXNLXXXXIXXSLVXXPQXXPXTTXFSAXLXGAIFWXRGFPPNPPGEKKVPPIFPQKPPPGGG

SEQ ID NO: 189302 - protein, 645 aa, Oryza sativa
  unsure (1)..(645): unsure at all Xaa locations
  Clone ID: PAT_MRT4530_85824C.1.pep
STILTGTCPVSHLEKYLFPNASVLIPVLGKAGRCPSSPDFVHLYPCPLARTRXEHRVKPYQLDMWXYGSALQQSPEXGPYGGRGAPSXNHAPRAQPKTIFGVLNRGGGGEWLSEPSATTANHASGTFGTTKATXSIQAKLQAYKEAITIDKKKTRYIETIHGSTEADPLCQSRQVADKRTLLDTARAAHMETTRLPSGHTNMVTTCTHEQLPKPVHGRDAAGATLDDTELRTKTTTGLRRTLDEXAGDERARLDEGRADDKRERREDDDDRGRRGGDEGSRQQLHGCEDGAAMTMTEVALRDDEPVRMNGQLKXVVGEDGQGRRRTTPAGRPAHGHGGRGCRRDSGEEDGEAGVGSGELRARGRXGRGRWWRRRAEGGGGDVGRCTGEAAQAAGGGAVAATPLFAGXDAAPVIFPXNGGDADEGEAAVTSTMATEQPDGARARRQRRLEXGRRXRERRGRRGEEVRPRGDMGEGQEEGVSVTAVLSKLVAAGRQVSRYAAAHARRALVLGDHLPLPQPALALQRLAAGGARRALVRGRRRSSTIWITEHGRRRQPRRLSHSRHLLLQRRRRRHLPPGDRVERHRSRQKTESTTAAVATGHRRRSTRIDDDDGRLVSGVLVDNSGGHWDAVVETARGNVGGGDDDG

SEQ ID NO: 189303 - protein, 878 aa, Oryza sativa
  Clone ID: PAT_MRT4530_85825C.1.pep
MSTTGDNNNTGDKDKAILPQTPAEGHSRVGFAASLKPHAFDGSNYKRWKARALLWLTAVHCFFVSRGKPSELPLSPEEEAKFEAADCLFRGALISVLADNIVDVYMHMPSRKDMWDAFEAKFGVSDASSELYVMEQFYDYKMVDGRSVVEQAHEIQMLAKELENNNCELPDKFVAGGIIAKLPPSWTDFATSLKHKRQEFSVTDLIGSLGVEEKARAKDNRGKKIEGGSSANLVQKKNPHASHNNNKKVKPDVKPKATTNFKKKGKGKAKGGCFVYGKSGHWAKDCPECKDKKSTNMVISEGGGTSRYGKFLPTVLSVCHSPDWWVDTGANIHVGRGSSLLMGNGSLAAVHGVGYDSGGLFRFSLDDMCNKVVNHDEALHYFKIYKAEVENQLERKIKRLRIPTKHKEVTPFEEWEKKKLNLSHLRTWGCLAKRCHFFENEFPMKNAPSTSSQEPILSPEHFMPIEHIDQTLEENPKEDNIVATRKSKRQRTAKSFGDDYIVYLMDDTPRTIEEAYSSPDADYWKEAVRSEMDSIMSNGTWEVVERPYGCKPVGCKWVFKKKLRPDGTIEKYKARLVAKGYTQKEGEDFFDTYSPVARLTTIRVLLALAASHGLLVHQMDVKTAFLNEELEEEIYMDQLDGYVLEGQKGMVCKLLKSLYGLKQAPKQWHEKFDNKLTSAGFVVNEADKCVYYRYGGGEGVILCLYVDDILIFGTRLNVIEEVKDFLSKSIEMKDLGVGGVILNIKLLRGDEGGITLVQSHYVDKVLSRFGYSDCKAAPTPYDPSVLLRKNRRIARDQLRYSQIIGSLMYLASATRPDISFAVSKLSRVFSNPGDDHWHALERVIRYLKGTMSYEIHYAGTQKCWRAIVIQIGYLMLMR

SEQ ID NO: 189304 - protein, 991 aa, Oryza sativa
  unsure (1)..(991): unsure at all Xaa locations
  Clone ID: PAT_MRT4530_85826C.1.pep
MGQLLIPMCGPATTAGTKYCEVPATATAEVWACETSTLLEGDPPSSAPSAGKCMSLVHELTRVGLLEPLYKISFGYESKNDKSHIYIENMEIMKSRQSRNRSDRADGGLTEPWTLVWHLIILGKHPRLVTLGGCRLLDGLCRCCPVTSPRRLWWKPGAVWKDMWDALEAKFGVPDAGNELYVMEQYYDYKMVNDRSVVEQAHEIQMLAKELENNNCELPDKFVAGGIIAKLPPSWSDFGTSLKHKRQEFSVSDLIGSLGVEEKARAKDIGGIKVERGSSANMVQKKNPHASHNNKKVKPDVKAKATANFKKKGKEKANGDCFVCGKFGHWAKDCLEHKDRKFANMVISEGGGTSGYDKLLPTVLSVFHSPDWWVDTGANIHVGRGSSLLMGNESLAVVHGVGLSKEWWGEAVLTACHVLNKIPMKHKEVTPFEEWERKKLNLSYLRTWGCLAKVNVPIAKKRKLGPNTVDCVFLGYAAIHSVGYRFLIVNSRVLDMRVSTIIESRDATFFENEFPMKNTPSTSSQETVIPHKHFALIEHNDQTPEGNPEEDNIVDTHKSKKLRVVKSFVDDYIVYLVDDTPRTIEEAYSPPDTDYWKEAVRSEMDSIMSNGTWEVVERPYGCKPVGCKWVFKKKLRPDGTIEKYKASLVAKGYTQKEGEDFFDTYSPVARLTTIRVLLALAASHGLLVHQMDVKTAFLNGELEEEIYMDQPDGLNVIEEVKDFLSKSFEMKDLGEADVILNIKLLRGDEGGITLVQSHYVDKVLSRFGYSDCKPAPTPYDPSVLLRKNRRIARDQLRYSQIIGSLMYLVSATRPDISFAVSKLSRFVSNPGDDHWQALERIMRYLKGTMSYGIHYTGYPKVLERYSDSNWISDADEIKAISGYMFTLGGGAGSWKSCKQTILTRSTMEAELTALDIATVEAEWLRELLMDLPVVEKPVPAILMNCDNQTVIIKVNSSKDNMKSSRHIKRRLKSVRKQKXLRSDSIGLCPNG

SEQ ID NO: 189305 - protein, 299 aa, Oryza sativa
  Clone ID: PAT_MRT4530_85827C.1.pep
MKKMWRANARVVERRGGREAEERGGVISVVLAHGYGASQAVWDKLVPSLSKSHNLLLFDWDFTGAGAGKDDDEYTYGRFADELIAVMEERGVGASGAVVVAHSMSAMAACIAAQRRPDLFAHIFLVCASPRYINLEEEGYVGGFEEAAIHGMLAAMESDFDGWVRSFLPNAAGDASAVEHLLKSFLAMDPTVALKLAKMIFLGDQREVLDGVKTPCTIVQVKADFAAPPSVAEYMHLRMKGAATAVEIIGSVGHFPQLVAPQQLLDILAGVLRLREAAAEAEHDDAGTVEIAGGIDVAI

SEQ ID NO: 189306 - protein, 98 aa, Oryza sativa
  Clone ID: PAT_MRT4530_85828C.1.pep
KLSLTPFFYVWWGLGFFFLFPPRSFFCGPFSPLASFFFMENLGHACPLPGEPLEFSQWPPNGARRLPRSCFFWGIPPPPILGSELNIMILFGPPAVVG

SEQ ID NO: 189307 - protein, 66 aa, Oryza sativa
  Clone ID: PAT_MRT4530_85829C.1.pep
RRQGLYDELASVEISSKEKSSPSVMVMLDLGRMACRAFAESGGDEDESFDKEDSWREWRTQQKNNL

SEQ ID NO: 189308 - protein, 200 aa, Oryza sativa
  Clone ID: PAT_MRT4530_8582C.1.pep
MTDGQRLDLEFPHLDLALQHVSRTCYPSHGDDGGWGGEEMAMDSTQQWPQASKHLVKGGFWSRPQVGRGSTDRLTMRASKHEVMLRVSCSAREESEGSRVGFLSHMREVAMQAVPIEQPCINVLGAKAEPLGRCGKLDNDNSQLFSFWLCGKGFLGGVVLMASVEQLSCRGGGATAPGGKLSNDNPQYLCSGNTRGVRQM

SEQ ID NO: 189309 - protein, 37 aa, Oryza sativa
  Clone ID: PAT_MRT4530_85830C.1.pep
FGCEQNSDEWPILRRWDVPWEWQTVVLTMVGCGVRYS

SEQ ID NO: 189310 - protein, 259 aa, Oryza sativa
  Clone ID: PAT_MRT4530_85831C.1.pep
MAASQRSVAVSAKCAAASWAEERRPFTDPIEIPAPSGAATARREDTEYGEGDYGGSGSGCGGEVVPPHVLLARRRAAFSMCSGQGRTLKGRDLRRFRNDAFRQPRYLWALGHYTPSKKMLRIEQQQLDKEEFQEADILWPDAAQDLDFPQMYYSLVDADEDDDEHRSVKQHGNRQKASSPIDIPARKVSSAGAKGARAPAGFSKFGQTLAGAGGGSFFVGSHVFVPPHVIVDHRRAKREKAMMMLVVPKGRARKMVMRE

SEQ ID NO: 189311 - protein, 36 aa, Oryza sativa
  unsure (1)..(36): unsure at all Xaa locations
  Clone ID: PAT_MRT4530_85832C.1.pep
XNFQLXXHIETXLRTNXQXXXHXXSXXIKXLXXMGX

SEQ ID NO: 189312 - protein, 81 aa, Oryza sativa
  unsure (1)..(81): unsure at all Xaa locations
  Clone ID: PAT_MRT4530_85833C.1.pep
NPHQXXTTXNYTHPNQQKKKKKKKRKKKKKRMYRYTSIWNKLQVTVIXMHIDXXPSQSXXTIRILXXSTXNWXAYVLHTSS

SEQ ID NO: 189313 - protein, 359 aa, Oryza sativa
  Clone ID: PAT_MRT4530_85834C.1.pep
MAASPSPPPLQELTITRPDDWHLHLREGDVLAAVLPHSAMHFGRAIVMPNLKPPVTTTARALEYREEILRALPPGSNFVPLMTLYLTDNTSPEEIKLAKKSGVVFAVKLYPSGATTNSQDGVTDIFGKCLPVLEEMARQEMPLLVHGEVTDQHVDTFDREKVFIEKILAPLVQRLPQLKIVMEHITTMDAVNFVESCKEGHVAATVTPQHLLLNRNALFQGGLQPHNYCLPVLKRETHRQAIVSAVTSGSKQYFLGTDSAPHDKRRKECSCGCAGIYSAPVALSLYAKVFEQAGALDKLEAFTSFNGPDFYGLPRNTSKIVLRKSAWKVPDTYSYSSGEIVPMFTGNTLEWLPSDQLEE

SEQ ID NO: 189314 - protein, 171 aa, Oryza sativa
  Clone ID: PAT_MRT4530_85835C.1.pep
MADLKIGRPVAGVASLNQPLAESCKASASQPGDDSNSECSSGASSAIALGIVAANCGAAIYHSWHDPWSVAFVVASFLILVLLFLALRVYESSPRGSRRSLHVKAGVWALSTALTIMFSYKVAAFMPFPVAAVVWVTAGSTIFAGFYMLFFCRDEVEPAVEEKPAKVSDMA

SEQ ID NO: 189315 - protein, 189 aa, Oryza sativa
  unsure (1)..(189): unsure at all Xaa locations
  Clone ID: PAT_MRT4530_85836C.1.pep
WRCRRRWRVGPWPTARWRAAPGGSRRPHPHPSHRATLRLRIPIALPSFPSRAAAPPPPPPPPPXATLPLPPPSALRIPIHPTPPPPPPPPPSASTSPVPSPPSASAPPLRSHRASGCRIHRAAPPPPPPHRRRRLRPPPPRCLAGRRIHPPPPPRPYSHRPPPYRRRQRVPPTAGPALACRSPKLKTWI

SEQ ID NO: 189316 - protein, 220 aa, Oryza sativa
  unsure (1)..(220): unsure at all Xaa locations
  Clone ID: PAT_MRT4530_85837C.1.pep
NLPRVVDRAEIEVRAVGDLTHRLPSGCNLILNNVLFAPSIKRNLISVKSLSRDRLXCHFXKRNMFKFNNKVVGLAFVRDKLYLLSLDDFVMNVINAYNDKAEMSSKLWHYRLGHISRERIECLIKEXILLPSDFSEVDHYVDCIKGNFTKTIKKGAXLEIIQINICGLFPMTFLDGFDSFITFTNDYSRFGYIYPINGCSKSLEKFKAKVENQHNAKLKL

SEQ ID NO: 189317 - protein, 321 aa, Oryza sativa
  Clone ID: PAT_MRT4530_85838C.1.pep
MAPASVKVFGSPTSAEVARVLMCLFEKDVEFQLVRVDAYRGTQRMPQYLKLQPLGEALTFEDDNLTLSESRGILRHIAHKYARQGNPDLIGTGALERASIEQWLQTEAQSFDVPSAEMVYSLAFLPPNMPKQNDNGNGNGNGNGYGNSNGREVQVANASSKRVVAGATDGKTAASGANGNKQQQKEEEMRKVFEKSKKDLEKLLDIYEQRLEEAAYLAGDKFTIADLSHLPNADRLASDPRSRRMFEARKNVSRWWNNISSRESWEYVKSLQRPPSAAHAGNAQQQQQQQSPSAGNNYQHQQGQGQGQQHYRNEQVENYNN

SEQ ID NO: 189318 - protein, 264 aa, Oryza sativa
  Clone ID: PAT_MRT4530_85839C.1.pep
HKEVTPFEEWEMKKLNLSYLRTWDCLAKSRDATFFENEFPMKNTPSTSSQEIVIPHQHFAPIKHNDQTPEGNPEEDKIVDTRKRCKWVFKKKLRPDGTIEKYKARLVAKGYTQKEGEEFFDTYSPVARLTTIRVLLALAASHGLLGRQMDVKTADKCVYYRYGGGEEVILCLYVDDILIFGTSLNVIEEVKDFLSKSFEMKDLGEADVILNIKLLRGDEGMITLVKSYYMDKILSRFGYSDCKPAATPYDPSVLLRKNRRIARD

SEQ ID NO: 189319 - protein, 125 aa, Oryza sativa
  Clone ID: PAT_MRT4530_8583C.1.pep
KPVFCELGVFSPRIATVNQCFRGSTPLKPLFFQAPGEAPPCLIKFRLGLVPKARPEAVILNGSPVQGPPLMRFVVKTTWVPPFISSQPFLLNETGSFSSKGFIAVGFQKTQKVFSRFLSFFLNSE

SEQ ID NO: 189320 - protein, 1367 aa, Oryza sativa
  unsure (1)..(1367): unsure at all Xaa locations
  Clone ID: PAT_MRT4530_85840C.1.pep
NHIIPFKDGWVISFLRSARRDYSLFINIYFTFTNMSNTGDNSNTGYKEKEPPVNTNRGNXASNSSGGPFLGSFSVVGFAATLKPHAFDGSNYKRWKARALLWLTAXCFYVSRGKRCEPPLSPEEEAKFEVSDCLFRGALISVLADNIVDVYMHMPSGKDMWDALEAKFRVSDAGNELYVMEQFYDYKMVDNRSVVEQDHEIXMLANELENNNCELPDKFVVGGIIAKLPPSWSDFATSLKHKRQEFSVIDLIGSLGVEEKARAKENRGKNIEGGSSANLVQKKNPHASHNNNNKKVKSDVKPKATTNFKKKGKGKAKGDCFVCGKPRHWAKNCPDRKDKKSANMVISEGGGTSGYDNFLPTVLSVFHSPDWWVDTGANIHVCADISLFSSYQVGRGSSLLMGNGSLAAVHGVGTVDLKFTSGKTVXLKNVQHVPSIKKNLVSGSLLCRDGFRLVFEFNKCVISKYXTFIGKGYDNGGLFRFSLDDMCNNNNNVVNHISENDESNVWHSXTLANMSLILKFTLVKGSKCHTCVQLKQPCKPHKASEARNLAPLELVHSDLCEMNGVLTKGGKKYFMTLIDDCTRYCYVYLLKTKDETLHYFKIYKAEVENQLERKIKRLRSDRGGEYFSNEFTSFCKKFGIIHERTHPYSPQSNGVAERKNRTLTEMVNAMLDTAGLSKEWWGEAILTVCHVLNKIPVKHKKVTPFEEWERKKLNLSYLRTWGCLAKVNIPIAKKRKLGPKTVDCVXLGYAIHSVGYRFLIVNSGVPDMRVGTITESRDATFFENEFPMKNTLSTSSQEPVLPHEHFAPIEHNDQTAEENPEEDNIVATRKSKRQRTAKSFGDDYIVYLVDDTPRTIEEAYSSPDADYWKEAVRSEMDSIMSNGTWEVVERPYGCKPVGCKWVFKKKLRPDGTIEKYKARLVAKGYTQKEGEDFFXDTYSPVARLTTIRVLLAFEASHGLLVHQMDVKTAFLNGELEEEIYMDQPDGYVLEGQEGMVCKLLKSLYSLKQAPKQWHEKFDTTLTSAGFVVNEADKCLYYHYGGGEGVILYLYVDDILIFGTSLNVIEEVKDFLSKSFEMKDLGVADVILNIKLLRGDEGGITLVQSYYVDKVLSRFGYSDCKPAPTPYNSSVLLRKNRRIERDQLRYSQIIGSLMYLASATRPDISFAVSKLSRFVXNLGDDHWQALEMVMRYLKDTTSYGIHYTSYPKVLXGYSDSNWISDADEIKATSGYVFTLGGGAVSWKSCKQTILTRSTMEAELTALDTATVEAEWLXRELLMDLPVIEKPVPAILMNCDNQTVIIKVNSSKDNMKSFRHVKRRLKSIRKQKNSRVIALDYVQTAKNLADQFTKGLPRNVIDSASREMGLRPT

SEQ ID NO: 189321 - protein, 57 aa, Oryza sativa
  Clone ID: PAT_MRT4530_85841C.1.pep
LSWLATGSCGCNGMMKSTATLVAVTKYSDLARTSHTLNAVEVDPDASATSYSQQYGR

SEQ ID NO: 189322 - protein, 843 aa, Oryza sativa
  unsure (1)..(843): unsure at all Xaa locations
  Clone ID: PAT_MRT4530_85842C.1.pep
MSTTGDNNNTGDKEKEPLVNTNRGDTVSNSSGGPFSGVLADNIVDVYMHMPSGKDMWDALEAKFEVSDAGSKLYVMEQFYDYKMVDDRSVVEQAHEIQMLAKELENNNCELPDKFVAGGIIAKLPPSWTDFATSLKHKRQEFSVTDLIGSLGVEEKSGAKDNRAKKIKGGSSANLVQKKNLHASHYNKKVKPNVKPKATTNFKKKGKGKTKGGCFVCGKSGHWAKHCPERKDKKYANTVISEGGGTSRYGKYLPTVLSVCHSPDWSVDTGANIHVCADISLFSSYQVGRGSSLLMGNGSLAAVHGVGMVDLKFTSGKIVQLKNVQHVPSIKKNLVSGFLLCRDGFRLVFESNKCVVPKYGTFIGKEYGIIHERTPPYSPQSNGVAERKNRTLTEMVNTMLDTAGHSKEWWGEAILTVCHVLNRIPTKYKKVTPFEEWERKKLNLSHLRTWGCLAKVNVPIAKKHKLGPKTVDCVFLGYAIHSVGYRFLIVNSGVPDMRVGTITESRDATFFGNEFLMKNAPSTSSQEPILSPEHFVPIEHIDQTLEENLEEDNIVATRKSKRQRTAKYFGDDYIVYLVDDTPRTIEEAHSSPDADYWKEAVRSEMDSLMSNGTWEVVEHPYGCKPVGCTWVFKKKLRPDGTIEKYKARLVAKGYTQKEGEDFFDTYSLVARLTTIRVLLALATSHGLLIHQMDVKTAFLNGELEEEIYMDQPDGYVLEGQEEMVYKLLKSLYGPKQAPKQWHEKFDNTLTSVGFVVNEADKCVYYRYGGGEGVILCLYVDDILIFGTSLNVIEEVKDFLSKSFEMKDLGVADIILNIKLLRGGXGITLVQSHYVDKVLSRFGY

SEQ ID NO: 189323 - protein, 1540 aa, Oryza sativa
  unsure (1)..(1540): unsure at all Xaa locations
  Clone ID: PAT_MRT4530_85843C.1.pep
MASLGANPSVFVAWLRPSASPYCFAPSALLWTQSTPSGFGGFSSPTSCNRSSACLWSLQKDRGDADMCENEMKREPPQRQVVLPTVITVLQPCQHCHWRRAGDQVFGSSRRDYSLFVNIYFTFTNMSNTGDKEKETPVNTNGGNTASNSSGGPFLGYNLITLFQLEVLLLMFIAMSTLCHYVIVDAYSTLSMLMLITFTTITGSNPIVNIMIIILLFWIKICRIMTKFPTIQKPDRSFSVVGFAAALKPHAFDGSNYKRWKARALLWLTAMQCFYVSRGKRSEPPLSPEEEAKFEASDCLFRGALISVLADNIVDVYMHMPSGKDMWDALEAKFGVSDAGSELYVMEQFYDYKMVDDRSVVEQAHEIQMLAKELENNNCELPDKFVAGGIIAKLPPSWSDFATSLKHKRQEFSVPDLIGSLGVEEKARAKDVRGKKVEGGSSANMVQKKNPHASHNNKKVKPDVKPKAATNFKKKSKGKAKGDCFVCGKSGHWAKDCPERKDRKSANMIISEGGGTSGYGKILPTVLSVFHSPDWWVDTGANIHVCADISLFSSYQVGRGSSLLMGNGSLAAVHGVGTVDLKFTSGKTVQLKNVQHVPSIKKNLVSGSLLCREGFRLVFESNKCVVSKYGTFVGKGYDSGGLFRFSLNDMCNNHNAVNHISENDESNVWHSRLCHVNFGCMTRLANMSLIPKFTLVKGSKCHTCVQSKQPRKPHKASEARNLAPLELVHSDLCEMNGVLTKGGKKYFMTLIDDCTRFCYVYLLKTKDEALHFFKIYKAEVENQLERKIKRLRSDRGGEYFSNEFASFCEEFGIIHEMTPPYSPQSNGVAERKNRTLTEMVNAMLDSAGLSKEWWGEAVLTACHVLNKIPMKHKEVTPFEEWERKKLNLSYLRTWGCLAKVNVPIAKKRKLGPKTVDCVFLGYAIHSVGYRFLIVNSRVPDMHVGTILESRDATFFENEFPMKYTPSTSSKETVMPHEHFAPIEHNDQTPEENPEEDNIVDTRKSKRQRVAKSFGDDYIVYLVDDTPRTIEEAYSSPDADYWKEAVRSEMDSIMSNGTWEVVERPYGCKPVGCKWVFKKKLRPDGTIEKYKARLVAKGYTQKEGEDFFDTYSPVARLTTIRVLLALAASHGLLVHLXQMDVKTAFLNGELEEEIYMDQPDGYVLEGQEGMVCKLLKSLYGLKQAPKQWHEKFDTTLTSAGFVVNEADKCVYYRYGGGEGVILCLYVDDILIFGTSLNVIEEVKDYLSKSFEMKDLGEADVILNIKLQRGDEGGITLVQSHYVDKVLSRFGYSDCKPAPTPYDPSVLLRKNRRIARDQLRYSQIIGSLMYLASATRPDISFAVSKLSRFVSNPGDDHWQALERVMRYLKGTMSYGIHYTGYPKVLEGYSDSNWISDADEIKATSGYVFTLGGGAVSWKSCKQTILTRSTMEAELTALDTATVEAEWLRELLMDLPVVEKPVPAILMNCDNQTVIIKVNSSKDNMKSSRHIKRRLKSVRKQKNSGVIALDYVQTARNLADQFTKGLPRNVIDSASREMGLIPT

SEQ ID NO: 189324 - protein, 109 aa, Oryza sativa
  unsure (1)..(109): unsure at all Xaa locations
  Clone ID: PAT_MRT4530_85844C.1.pep
GDPPGRRVFNGELPQQQILLIPQNFTVVVKAPLXGFAWVSFKTNHNSFASQIAGKAPIFWVLPVEVVANVYRLSREDFRHVKFNPGNKMAVFVPRGGPQQYFXWQINEK

SEQ ID NO: 189325 - protein, 1234 aa, Oryza sativa
  Clone ID: PAT_MRT4530_85845C.1.pep
MSNTGDKEKETPVNTNGGNTASNSSGGPFLGYNLITLFQLEVLLLMFIAMSTLCHYVIVDAYSTLSMLMLITFTTITGSNPIVNIMFIILLFWIKICRIMTKFPTIQKPDRSFSVVGFAAALKPHAFDGPNYKRWKTRALLWLTAMQCFYVSRGKRSDPPLSPEEEAKFEASDCLFRGALISVLADNIVDVYMHMPSGKDMWDALEAKFGVSDAGSELYVMEQFYDYKMVDDRSVVEQAHEIQMLAKELENNNCELPDKFVAGGIIAKLPPSWSDFATSLKHKRQEFSVPDLIGSLGVEEKARAKDVRGKKVEGGSSANMVQKKNPHASHNNKKVKPDVKPKAATNFKKKSKGKAKGDCFVCGKSGHWAKDCPERKDRKSANMIISEDGGTSGYGKILPTVLSVFHSPDWWVDTGANIHVGRGSSLLMGNGSLAAVHGVGTVDLKFTSGKTVQLKNVQHVLSIKKNLVSGSLLCREDFRLVFESNKCVVSKYGTFVGKGYDSGGLFRFSLNDMSNNHNAVNHISENDESNENQTVGSDRGGEYFSNEFASFCEEFGIIHEMTPPYSPQSNGVAERKNRTLTEMVNAMLDTAGLSKEWWGEAVLTACHVLNKIPMKHKEVTPFEEWERKKLNLSYLRTWGCLAKVNVPIAKKRKLGPKTVDCVFLGYAIHSVGYRFLIVNSGVPDMHVGTILESRDATFFENEFPMKYTPSTSSKETVMPHEHFAPIEHNDQTPEENPEEGNIVDTRKSKRQRVAKSFGDDYIVYLVDDTPRTIEEAYSSPDADYWKEAVRSEMDSIMSNGTWEVVERPYGCKPVGCKWVFKKKLRPDGTIEKYKARLVAKGYTQKEGEDFFDTYSPVARLTTIRVLLALAASHGLLVHQMDVKTAFLNGELEEEIYMDQPDGYVLEGQEGMVCKLLKSLYGLKQAPKQWHEKFDTTLTSAGFVVNEADKCVYYRYGGGEGVILCLYVDDILIFGTSLNVIEEVKDYLSKSFEMKDLGEADVIINIKLQRGDEGGIHLCNPTMWTSATRPDISFAVSKLSRFVSNPGDDHWQALERVMRYLKGTMSYGIHYTGYPKVLEGYSDSNWISDADEIKATSGYVFTLGGGVVSWKSCKQTILTRSTMEAELTALDTATVEAEWLRELLIDLPVVEKPVPAILMNCDNQTVIIKVNSSKDNMKSSRHIKRRLKSVRKQKNSGVIALDYVQTARNLADQFTKGLPRNVIDSASREIGLIPT

SEQ ID NO: 189326 - protein, 593 aa, Oryza sativa
  unsure (1)..(593): unsure at all Xaa locations
  Clone ID: PAT_MRT4530_85846C.1.pep
MQCFYISRKKRSELPLSPEEEARFEDSDCLFRGTLISILADNIVDVYMHMPSGKVMWNAFEAKFGVSDTSSELXSWSSSMTMRWSITEKARAKDNXGKNIEGGSSANLVQKKNPHASHNNNNKKVKPDVKPKATTNFKDKGKGKAKGDCFVCGKPRHWAKNCPNRKDKKSANMVISEGGGTSGYGKFLPTILSVFHSPDWWVDTGANIHVCADISMFSSYQVGRDSSLLMGNGSLAVVHGVGMVDLKFTSGKTVQLKNVQHVPLIKKNLVSSSLLCRDAFRLVFESNKCAVSKYGTFIGKGYVSGVLFRFSLDDMRNNNNDVNHISENDEFNVWHSRLCHMNFGCMTRLANMSLIAKFTLVKGSKCHTCVQWKQPRKPHNASEARNLAPLELVHFDLCEMNGVLSKEGKKYFMTLIDDCTRFCYVYLLKTKDEALYYFKIYKAEEWWGEAILTTFHVLNKIPVKHKKVAPFKEXGKEETKSLIPTHMGLFGQEHSNQTPEENPEEDNIVXTRKSKRQRVAKSFGDDYIVYLVDDTPRTIEEAYSSPDADYWKEAVRSEMDSIISNSTWEVVERPYGCKPVGCKLVFKKKLRPD

SEQ ID NO: 189327 - protein, 279 aa, Oryza sativa
  Clone ID: PAT_MRT4530_85847C.1.pep
MASWCGDLAAPPRLLVAPRPSDGNCQGNVLSLRHPRSDEETGYLFIDGQLHEFNWFKERFGSWFLGDYVCEDGSLYYCTVVDPIFILLPILKAARMSNGKDPGKFRQLDEILYVEGYPGYQHLMGIAGNHIDLVCEVKEVANVKFFRLDDSKVLSWLCCKVHNLKEVFPKLGKNYAAQGEKELLKDAVQIIREYLNDEPWLTLLCKKLQLDIKEIIEANKTSEASFCAENSPVPFHPAEEKLGSSSTRSSKGRPAKKQKAEVESKNIKDMFRRVTRKGT

SEQ ID NO: 189328 - protein, 624 aa, Oryza sativa
  Clone ID: PAT_MRT4530_85848C.1.pep
MPLRSGHGPWKCRRCRPNKRKGRLSLAAYLATCHSYHCSANIKHVGNDLLIGVGVHRGVLGWGEIKNRSCPWPVVRLSRARLVTLCLGSWCVVNRDYRELEFLVGVSGSLRGESGLSGRRGDRRRTEFLVCCRLKLWFSEVLETFSIGEKFVRFLSSGYRKFDPQITSSHGLGAYDESDNEDIDRAIALSLSEEQNKGKAVDIDYNLEEDEQLARALQESLNADSPPRQNIPVENVPSEPPRELPPILFASSGSRTCAGCKNPIGHGRFLSCMDSVWHPQCFRCFACNKPISEYEFAMHEDQPYHKSCYKDFFHPKCDVCKNFIPTNRNGLIEYRAHPFWMQKYCPSHEDDGTPRCCSCERMEPMDIKYITLDDGRKLCLECLNSSIMDTPECQQLYMDIQEFFEGLNMKVEQQVPILLVERQALNEALETEKNGHHLPETRGLCLSEEQIVRTILRRPIIGPGNRIIDMITAPYKLERRCEVTAILILYGLPRLQTGSILAHEMMHAYLRLKGFRSLSPQVEEGICQVLSHMWLESEIIFGSSIDISATSVASSSSSSSTPTTSKKGAKTEFEKKLGAFIKHQIETDSSEAYGDGFRAANRAVESYGLRSTLNHMKMTGSFPY

SEQ ID NO: 189329 - protein, 1008 aa, Oryza sativa
  Clone ID: PAT_MRT4530_85849C.1.pep
MSAPGAGAAAAAGGDGGGGAPPGAGAGGGAPGAGACAANNNTNGVNSASQSSGGPFSGYILLLFLFPLLALYCYVPVPDIHDVSSMLLRYCYVLVPDIHNAHDAISMLLVMLHVVTRSPYTVYAMIIVLTFWIKICRFMTIFLTIQKPDRLFSVVGFAAALKPHAFDGSNYKRWKARVLLWLTAMQCFYVSRGKRSEPPLSPEEEANFEASDCLFCGALISVLADNIVDVYMHMPSRKDMWDALEAKFGVSDTGSELYVMEQFYDYKMVDDRSVVEQAHEIQMLAKELENNNCELPDKFVAGGIIAKLPPSWSDFATSLKHKRQEFSVSDLIGSLGVEEKARAKDVRGKKVEGGSSANMVQKKNPHASHNNKKVKSDVKPKAATNFKKKGKGKAKGDCFVYGKYGHWAKDCPERKDRKSANMVISEGGGTSVYGKILPTVLSIFHSPDWWVDTGANIHVGRGSSLLMGNGSLAVVHGVGTVDLKFTSGKTVQLKNVQHVPSIKKNLVSGSLLCREGFRLVFESNKCVVSKYGTFVGKGSKCHTCVQSKQPRKPHKTSEARNLAPLELVHSDLCEMNGVLTKGGKKYFMTLIDDCTTFCYVYLLKTKDEALHYFKIYKAEFGIIHERTPPYSPQSNGVVERKNRTLTEMVNAMLDTVGLSKEWWGEAVLTVCHVLNKIPMKHKEVTPFEEWERKKLNLSYLRTWGCLAKVNVPIAKKQKLGPNTVDCVFLGYAIHSVGYRFLIVNSGVPDMHIGTIFESRDATFFENEFPMKHTPSTSSQETVMPHEHFAPIEHNDQTPEENPEEDNIVDTRKSKRQRVAKSFGDDYIVYLVDDTPRTIEEAYSSPDADYWKEAVRSEMDSIMSNGTWEVVERPYGCKPVGCKWVFKKKLRPDGTIEKYKTRLVAKGYTQKEGEDFFDTYSPVARLTTIRELLVLAASYGLLVHQMDVKTAFLNGELEEEIYMDQPDSLNVIEEVKDYLSKSFEMKDLGEADVILNIKLQRGDESGITL

SEQ ID NO: 189330 - protein, 373 aa, Oryza sativa
  Clone ID: PAT_MRT4530_8584C.1.pep
MPTPSHLKNPLCFDFRAARRVPETHAWPGLDDHPVVDGGGGGGEDAVPVVDVGAGDAAARVARAAEQWGAFLLVGHGVPAALLSRVEERVARVFSLPASEKMRAVRGPGEPCGYGSPPISSFFSKLMWSEGYTFSPSSLRSELRRLWPKSGDDYLLFCDVMEEFHKEMRRLADELLRLFLRALGLTGEEVAGVEAERRIGERMTATVHLNWYPRCPEPRRALGLIAHTDSGFFTFVLQSLVPGLQLFRRGPDRWVAVPAVAGAFVVNVGDLFHILTNGRFHSVYHRAVVNRDRDRVSLGYFLGPPPDAEVAPLPEAVPAGRSPAYRAVTWPEYMAVRKKAFATGGSALKMVSTDAAAAADEHDDVAAAADVHA

SEQ ID NO: 189331 - protein, 97 aa, Oryza sativa
  Clone ID: PAT_MRT4530_85850C.1.pep
MGWLNKIFKGSVNRVSRGHYDGSWHEGHSSDNARGAYDESDNEDIDRAIALSLSEDQIREKLLISIIIWKEDEQLARALQESPYADSPPRQNIPVEN

SEQ ID NO: 189332 - protein, 1676 aa, Oryza sativa
  Clone ID: PAT_MRT4530_85851C.1.pep
MRLLPTASPLSEALVPSALLARAHDLRARSPSQIQRPLLPSRGDSVHNQNNSLNGIKPKGLVRKIGYIPHRPTQMASRRRASTSNEETQVPDLTTLARVMATQTQLLQAIANNQDNCGGSSFGEFMRTKPPTFATADEPMEAEDWLRIIEKKLTLVRVRETDKVIFAVNQLEGPASDWWDTYKEARENDAGEPTWEEFTAAFRENFVPAAVMRMKKNEFRWLRQGNTTVQEYLNKFTQLARYAIGDLADEEEKIDKFIEGLNDELRGPMIGQDHESFQSLINKVVRLENDQRTVEHNRKRRLAMSRLPQIVPQRLKGATSSGWKPPIVATNRPAAPSNFNRPVAIQNRTPTPTLAAPGAKMNVNCFNCGGYGHYANNCPHPRKTPVRTGTNAMTVRGTTTPVTGRGLFKTPQSNRTATGLGRGQVNHVRAEEAQEDQGILMGMFSINSTPVKVLFDSGASHSFISLKASQKHNLTLVGLRKPMIVHSPGGEITVSHACIDVPIRLRDVVFPSNLMILIPQTLDVILGMDWLTKNRGVIDCGRREVTLTTPWGSDMRATMDQDPRLTERAGGIFTMLPLKGMPVVQRFPDVFPEDLPGMPPDRDIKFIIDLIPGTAPISKRPYRMPVNELEELKKQIRELQEKGFVRPSSSPWGAPVLFVKKKDGSMRMCVDYRSLNEVTIKNKYLLPRFDDLFDQLKGAKVFSKIDIRSGYHQLKIRTKDIPKTAFSTHYGLYEFTVMSFGLTNAPAYFMNLMNKINTLDIQPLLRTQIEEAQKDNEEIRELKERLAAGRAKEFSIDEKDVLWYKKRIYVPEQGGLRGLILKEAHESAYSLHPGSTKMYQDLKEGYWWPNMKRDVAEYVALCDVCQKVKAEHQRPAGLLQPLRIPEWKWDEIGMDFIVGLPKTATGYDSIWVIVDRLTKTARFIPVKTNYSSAKLAELYMTRIVCLHGIPKRIISDRGTQFTSHFWEKVHEALGSYLAFSTAYHPQTDGQTERTNQVLEDMLRACALDFSKDWERCLPYAEFSYNNSFQASLKMSPNEALFGRRCRTPLMWSETGERAVFGPDIINEAEEKVRLIRDRLKVAQSRQKSYADTRRRNLEFKEGDYVYLKVSPMRGTKRFRVKGKLAPRYVGPFQITARRGEVAYQLQLPENIADVHPVFHVSQLKKCLRVPEEQAPLEEIHISNDLTYPEHPIRILDEAEKRTRSKVWRMNKEAVRSEIDSIMSNGTWEVVERLYGSKPVGCKWVFKKKLRPEVTIEKYKARLVAKGYTQKEGEDFFDTYSSVAHLTTIRVLLALAASHALLVHQMDVKTAFLNGELEEEIYMDQPNGYALEGREGMVCKLLKSLYGLKQAPKQWHEKFDTTLTSAGFVVNETDKCVYYRYGGGEGVILCLYVDDILIFRTSLNVIEEVKDFLSKSFEMKDLGEADVILNIKLLRGDEGGITLVQSHYVDKVLSRFGHNDCKPAPTPYDPSVLLRKNRRIARDQLRYSQIIGSLMYLASATRPDISFAVSKLSRFVSNLVDDHWQALERVMRYLKGTMSYGIHYTGYLKVLEGYSDSNWISDADEIKATSGYVFTLGGGTVSWKSCKQTILTRSTMEAELTGLDTATVEAEWLRELLMDLPVVEKPVPAILTNCDNQTVIIKVNSSKDNVKSSRHIKIRLKSVRKQKNSGVIALDYV

SEQ ID NO: 189333 - protein, 105 aa, Oryza sativa
  Clone ID: PAT_MRT4530_85852C.1.pep
ASPSPLRMCSLLLPASHWRPHPARTSHAAEPRVCSVGCRYREMEICAGSPSAMLASTVPTMAFADSPPGSSLAAVAAVISSSSPSKPLSRAKTPPPALLQAILPT

SEQ ID NO: 189334 - protein, 196 aa, Oryza sativa
  Clone ID: PAT_MRT4530_85853C.1.pep
MVVSPTICNVKLGRVLIDGGAALNILSPAAFDAIKAPGMVLRPSQPIIGVTPGHTWPLGHIDLPVTIGDSANFRTERVDFDVADLSLPYNAVLGRPALVKFMSAVHYAYLQMKMPGPGGPITDHGDLKVALACMEQRADHLAAASKPAGGDERLSTSVPAAPRQRMVTCDEVPVKEVALGDGPSKTTRIGGLLDNK

SEQ ID NO: 189335 - protein, 1170 aa, Oryza sativa
  Clone ID: PAT_MRT4530_85854C.1.pep
MSAAPGAAAAAAAAPGDAPGAGAAANDNVNGGSSASQSSGGTFTGSFSVVGFASALKPHAFDGSNYKRWKARALLWLTAMQCFYVSRGKRSEPPLSPEEEVKFKASDWLFRGALISVLADNIVDVYMHMPFGKDMWDALEAKFGVSDAGSELYVMEQFYDYKMVDDRSVVEQAHEIQMLAKELENNNCELPDKFVAGGIIAKLPPSWSDFATSLKHKRQEFSVSDLIGSLGVEEKARAKDNRGKKVEGSSSANMVQKKNPHASHNNKKVKLDVKPKATTNFKKKGKGKAKGDCFVCGKSGHWAKDCPERKDRKSANMVISEGGGTSGYGKLLPTVLSVFHSPDWWVDTGANIHVGRGSSLLMGNGSLAAVHGVGTVDLKFTSGKTVQLKNMQHVSSIKKNLVIGSLLCREGFRLVFESNKCVVSKYGTFVGKGYDSGGLFRFSLDDMCNNHNVVNHISENDESNVWHSRLCHVNFGCMTRLANMSLVPKFTLVKDSKCHTCVQSKQPRKPHKASEARNLAPLELVHSDLCEMNGVLTKGGKKYFMTLIDDCTRVCYVYLLKTKDEALHYFKTYKTEVENQLERKIKRLRSDRGGEYFSNEFTSFCEEFGIIHERTPPYSPQSNGVAERKNRTLTEMVNAMLDTAGLSKEWWGEAVLTACHVLNKIPMKHKEMTLFEEWERKKLNLSYLRTWGCLAKGNPEEDNIVDTRKSKRQRVAKSFGDDYIVYLVDNTPRTIEEAYLSPYADYWKEAVHSEMDSIMSNGTWEVVERPYGCKPVGCKWVFKKKLRLDGTIEKYKARLVAKGYTQKEGEDFFDTYSPVARLTTIRVLLALAASHGLLVHQMDVKTAFLNGELEEEIYMDQPDGLNVIEEVKDFLSKSFEMKDLGEADVILNIKLLRGDEGGIPLVQSHYVDKVLSRFGYSDCKPAPTPYDPSVLLRKNRRIARDQLRYSQIIGSLMYLASATRPDISFAVSKLSRFVSNPGDDHWQALERVMRYLKGTMSYGIHYTGYPKVVEGYSDSNWISDADEIKATSGYVFTLGGGTVSWKSSKQTILTRSTMEAELTALDTATVEAEWLCELLMDLPVVEKPVPAILMNCDNQTVIIKVNSSKDNMKSSRHIKRRLKSVRKQKNSGVIALDYVQTAKNLADQFTKGLPRNVIDSASREMGLIPT

SEQ ID NO: 189336 - protein, 66 aa, Oryza sativa
  Clone ID: PAT_MRT4530_85855C.1.pep
MGKRADLGAGQRWSARRCRWRRKGPRSAPATAVMKNGGGFGEFSVERRQRGGAPARMRLQYMRGGG

SEQ ID NO: 189337 - protein, 40 aa, Oryza sativa
  Clone ID: PAT_MRT4530_85856C.1.pep
MASPIVRKTMISALLDFDEMGLRDGFSNNKLLDNFGCGKI

SEQ ID NO: 189338 - protein, 50 aa, Oryza sativa
  Clone ID: PAT_MRT4530_85857C.1.pep
WVEMASARCRVPLLRRNHRLGHQPPITCFILQNKQIYIHPQNINCIITKK

SEQ ID NO: 189339 - protein, 89 aa, Oryza sativa
  Clone ID: PAT_MRT4530_85858C.1.pep
VLFFKKIFFFFFFFFFFFFKSNWISANKLFHRFTATNPPKNTKLEHTFFNGEAPHYTTIILKKKRWYISHPIARVILEQKYKLLSCFIN

SEQ ID NO: 189340 - protein, 46 aa, Oryza sativa
  Clone ID: PAT_MRT4530_85859C.1.pep
FFLEQLWFNMNMKGREKGFYLTQVVGSSTGVVVGDNNEQDVASGYG

SEQ ID NO: 189341 - protein, 89 aa, Oryza sativa
  Clone ID: PAT_MRT4530_8585C.1.pep
PAVACSAASASARAPPSLPRVQPSAAAAPVTAVAPEGHRQVRKVATVLIPSSVSAKDCRSAAAIDDPKTAAASTSLPSSSKPPVSCRVA

SEQ ID NO: 189342 - protein, 220 aa, Oryza sativa
  Clone ID: PAT_MRT4530_85860C.1.pep
MEMNWFRDLLGLLCPDDLADMDGPGATASAVGQITASWWNWPDLLHSEGLGGRAASEHRDSGVVEATMWVCGRVPWIPLARPDQRRRRWWQGKSERGGRSGGVDGSSTVLEDQKSEHGVGEDHGSVFGGGSGGMWRRRRMGTTSAPAAVDGEDRLGTTSVASGGVRGGGGGGGRGCPRLRPLRSGRWGRSRIRQRLEKSAPARMRRCGAVPIHAGRSEEE

SEQ ID NO: 189343 - protein, 151 aa, Oryza sativa
  Clone ID: PAT_MRT4530_85861C.1.pep
QKFTQAFKYPHKFTSTIYSKKISPKHSSITTINKNLKSSRRCPRQQRWWIRPPATPVVVAAGSGRPRAHGGRGDDSPWQWWRWQLAAVEEGEGEESPPLEQSRDRLHDELTSHWPHPLQPYLGSRHRYPFRCCHWQEVRPRGPLLLLSPRH

SEQ ID NO: 189344 - protein, 93 aa, Oryza sativa
  Clone ID: PAT_MRT4530_85862C.1.pep
SGSPGCRLVFFPGNGHATRELPPRRAVAVASRLPPLPLPHHTRRRRGLTAIPNTAPRRLPLDRGREDWPVVLQLREGGATVCDPPPATGRPRS

SEQ ID NO: 189345 - protein, 102 aa, Oryza sativa
  Clone ID: PAT_MRT4530_85863C.1.pep
MVAMSGERKHTGRPIRLLTLTAHGSTKVSAIMPEEISRHWVETQVEGKTLGMASRRTPPSAAAAAAPPSRPRRWVVGGSGGGELGQFILAGKLRIWGEVGGR

SEQ ID NO: 189346 - protein, 48 aa, Oryza sativa
  unsure (1)..(48): unsure at all Xaa locations
  Clone ID: PAT_MRT4530_85864C.1.pep
LTDPRTXHTPIRTGTPYDGYPHRYMYRRADALALSTLXFFKVAARRSA

SEQ ID NO: 189347 - protein, 87 aa, Oryza sativa
  unsure (1)..(87): unsure at all Xaa locations
  Clone ID: PAT_MRT4530_85865C.1.pep
CVLPCSFSPIDGFDFHEERIFRSCSVGRTRLAAVGAVGPTRQPHPRARAADSRAPHGSREGAPEGGLAGTADGXGTRPRPDGHRRRP

SEQ ID NO: 189348 - protein, 80 aa, Oryza sativa
  Clone ID: PAT_MRT4530_85866C.1.pep
RPTTVLVYWIACVQLIEGVTGQVNRPNDDADKRCWLTGSSHAHKLDSLDSFRGRTLMILLCEREASAAAFLHGSVSAVGA

SEQ ID NO: 189349 - protein, 158 aa, Oryza sativa
  Clone ID: PAT_MRT4530_85867C.1.pep
MAGGGGAVGEHYMRVIRGDDGYGDDGGQHQEKPGAAVSVAKGAAAAAAAGSMLALAGLTATGTALALIVATPLLVLFSPVLVPAAFAASLLAAGLASSGALGAAAVGVLAWMYRYLQSPSGEHAPAGAGKVEHARALLDAKAHDVGDWVQHRLDQART

SEQ ID NO: 189350 - protein, 39 aa, Oryza sativa
  Clone ID: PAT_MRT4530_85869C.1.pep
LSRIPSTRGTGSSSVGEGGSEGTRRRRRSPMSRIGSRRV

SEQ ID NO: 189351 - protein, 41 aa, Oryza sativa
  Clone ID: PAT_MRT4530_8586C.1.pep
AHTYQKNQRLVLNDPPGVGGAASTRFWSTKFTSPRITYQMS

SEQ ID NO: 189352 - protein, 152 aa, Oryza sativa
  Clone ID: PAT_MRT4530_85870C.1.pep
MAGRGEMPMRPVRPGPPMQYRGPPPMARARVEPVDREKTCPLLLRVFTKVGGHHQNEEFAVRGKEPKDEVQIYTWKDATLRELTDLVKEVALAARKRNARLSFAFVYPDKHGRFVVKEVGSTFSYGHGRGDDAKTLAELGFQIGDYLSVAIY

SEQ ID NO: 189353 - protein, 105 aa, Oryza sativa
  Clone ID: PAT_MRT4530_85871C.1.pep
MTAAAAASRFLPFSSAPSKSVARVLGFWRLGAMENSAEMQRFIEQEQQKAMVSEMVGKLTSVCWDKCITSTPGSKFSSGETTCLTNCAQRFLDMSVIIAKRFEMQ

SEQ ID NO: 189354 - protein, 638 aa, Oryza sativa
  unsure (1)..(638): unsure at all Xaa locations
  Clone ID: PAT_MRT4530_85872C.1.pep
MWRSPAEPVCILVAAVLLSAVAAATAGEEYVKYKDPKKPIGERVDDLLSRMTLAEKIXGRCMQIERANATSAVIEKYFVGSVLSGGGSVPSEKATAKEWQQMVAKMQKAALKTRLGIPIIYGIDAVHGHNNVHNATIFPHNVGLGATRDPKLVKRIGQSTAHEARATGIPYTFAPCVAVCRDPRWGRCYESYSEDTKLVQLMTSAMVPGLQGDAPARYPKGTPFVAGGMNVAGCAKHFVGDGGTRDGINENNTVLSFHDLMRIHMPPYDDAVIKGVASVMISYSSWNGVKMHENRFLITDILKNKLKFRGFVITDWQAVDRITTPPHKHYYHSIQETIHAGIDMVMIPYDYPEFVADLTTQVSNGSIKLDRINDAVSRILRVKFAMGLFENPLPDPRLAGELGDKEHRQIAREAVRRSLVLLKNGKHGEKPVLPLSKKADKILVAGSHAHNLGFQCGGWTVSWQGQGGNNVTAGTTILEAIKAAVDESTVIDYTEHPDKSSIAESAKEYDYAVVVVGEEPYAETEGDNLNLTIPSPGPKVIKDVCGLVKCVVVLVSGRPLVVEPYIGAMDAFVAAWLPGTEGHGVADVLFGDHGFTGKLPRTWFKSVDQLPMNFGDKHYNPLFPFGFGLTTKPSHSQS

SEQ ID NO: 189355 - protein, 68 aa, Oryza sativa
  unsure (1)..(68): unsure at all Xaa locations
  Clone ID: PAT_MRT4530_85873C.1.pep
MPCVRXXLLVXVISSSTFFXRFVTKKRGHLYPTLQVWKACSLSIIINXKHRKIDIAAACVLLQKKKKK

SEQ ID NO: 189356 - protein, 105 aa, Oryza sativa
  unsure (1)..(105): unsure at all Xaa locations
  Clone ID: PAT_MRT4530_85874C.1.pep
SDHRRVCVCPASLIDIXRSALLAEDRDIIYIYIYILRXPHRXRMPRDQRSRSRASXIGSSIXMMPSSPLCWLXXIFXASWCGSIPHHLLHVSAHSIPYAYILLSF

SEQ ID NO: 189357 - protein, 79 aa, Oryza sativa
  Clone ID: PAT_MRT4530_85875C.1.pep
PRVRPRVRTNQPTNQPTSQPSECLPPTPTSLTRVSSARPSTPSPTPPTTSPRPSRAPLLRLPRRPTSSRPRATLPDRTP

SEQ ID NO: 189358 - protein, 71 aa, Oryza sativa
  unsure (1)..(71): unsure at all Xaa locations
  Clone ID: PAT_MRT4530_85876C.1.pep
DAWAPRPPVHNWWTGRPYSARYLEILXKHRTLPVWQQKDDFLAVLRDNQTLILVGETGSSKTTQYRGAVLR

SEQ ID NO: 189359 - protein, 108 aa, Oryza sativa
  unsure (1)..(108): unsure at all Xaa locations
  Clone ID: PAT_MRT4530_85877C.1.pep
EFIRQHHNLGECSLWQPATFELINXPVMQHQGCQQLTLAAQQSNYQAITCCQAIVRTLQLALVRVGYCDQTDAKAHSLLHXNWTSIWGIYPNYYIGPRSIATVVGVWL

SEQ ID NO: 189360 - protein, 111 aa, Oryza sativa
  unsure (1)..(111): unsure at all Xaa locations
  Clone ID: PAT_MRT4530_85878C.1.pep
VLSHLKHTGLXPPCFPFQRHVLHEVHRHSCHDKRQMSECAPFQKQPRQQLAVLMHTIYRSRRCCWLLPAYDEPCRLDSSSFQGAAASHRVRERTRSLTSKARQGSTIALRQ

SEQ ID NO: 189361 - protein, 357 aa, Oryza sativa
  unsure (1)..(357): unsure at all Xaa locations
  Clone ID: PAT_MRT4530_85879C.1.pep
MATTLAFTVKRSAPELVAPSRATPRELRPLSDIDDQDGLRFYRSGLHFFRGRGGGGADPAAVVRRGLADALVHYYPVAGRISEVEAPARKLVVDCTGDGVVFVEADADVSLSDFGDVLCPPFPCYQELLCEPDGNCAAVVGRPLLFIQVTRLRCGGFVFGLQICHNIADAAGTVQLLRAIGEMSRGMPAPTVPPVWARELLMARSPPVVTHRHPEYDETAAGGNHDVLAHHEPLVQRAFFFGPKEMSALRELAAPAGAAAGKRISRFDMLAAFLWQRQKAALEYDDDDEVRVMIVVNARGRSPPLPAGFYGNAFAFAVAACTAGRLRDSPLADVVGMVAGAKARAXSEGNLQSVADP

SEQ ID NO: 189362 - protein, 108 aa, Oryza sativa
  unsure (1)..(108): unsure at all Xaa locations
  Clone ID: PAT_MRT4530_8587C.1.pep
XEAGREKKNLPILQPKPHNARRRRPPPTPSRVPDAQLRNSVKMAFANTLYRSLFSTNYLMLATVFSAGFAWEIGFNNVMDKVWDNHNRGRQWKDIRHKFIEGGDEDEE

SEQ ID NO: 189363 - protein, 123 aa, Oryza sativa
  unsure (1)..(123): unsure at all Xaa locations
  Clone ID: PAT_MRT4530_85880C.1.pep
MACDAKPDSPAAGVXPPPSTVDAKAENVGEGEEPQTGGRKRGRRKKGEAEKEKEKPAHVTSTNERPSKERKTVERYSELLPRDTPDKTSPAILQGSGSKLKDIPNSQTKLSKGKADDNLPSLH

SEQ ID NO: 189364 - protein, 89 aa, Oryza sativa
  Clone ID: PAT_MRT4530_85881C.1.pep
MARLLLLQLYAGEEQEKEYYLRQGVQVYSPSSFPFTSWNGFNSWLLDLVALPVKVGSSDGDEKCEQRTVAREVKEVASGGAKGPEWVGE

SEQ ID NO: 189365 - protein, 155 aa, Oryza sativa
  unsure (1)..(155): unsure at all Xaa locations
  Clone ID: PAT_MRT4530_85882C.1.pep
MATDELHSAGAPAGVAAAEEGEGEAAHGFSFSIWPPTQRTRDAVVRRLVDTLGGDTILCKRYCAVPAADAEPAARGIEAEAFDAAAASGEAAATASVEEGIKALQLYSKEVSRRLLXLVKSRSAAAAAAAAAAPPEGEAPAAPSESEVVDPQPAE

SEQ ID NO: 189366 - protein, 46 aa, Oryza sativa
  Clone ID: PAT_MRT4530_85883C.1.pep
GICTAEPSCCWGSTKDSLSCTSAFVFTILGMNCGAAIYHSRRDPCS

SEQ ID NO: 189367 - protein, 114 aa, Oryza sativa
  Clone ID: PAT_MRT4530_85884C.1.pep
LVVISVSLKLGAMGDSSSSASYIRMVHHLIEKCICFNLNKEECMEALEKHANINPVVTSTVWKELEKENKEFFETYNKDRAERNIEAETMQRIQKMLSDAAASKGSDDDDDDES

SEQ ID NO: 189368 - protein, 41 aa, Oryza sativa
  Clone ID: PAT_MRT4530_85885C.1.pep
LINNGSLIVNTSHLMHTQLTHTTQKKLILAYKYIYHSDVRS

SEQ ID NO: 189369 - protein, 47 aa, Oryza sativa
  unsure (1)..(47): unsure at all Xaa locations
  Clone ID: PAT_MRT4530_85886C.1.pep
LIVVATLKLARCTSSCLLFVVRTCHDXGRISDGARGDQLEXAPGGAG

SEQ ID NO: 189370 - protein, 352 aa, Oryza sativa
  Clone ID: PAT_MRT4530_85887C.1.pep
MAMGMEGSGGGGSAKKKEESLPPGFRFHPTDEELITYYLRQKIADGGFTARAIAEVDLNKCEPWDLPEKAKMGEKEWYFFSLRDRKYPTGVRTNRATNAGYWKTTGKDKEIFTGQPPATPELVGMKKTLVFYKGRAPRGEKTNWVMHEYRLHSKSIPKSNKDEWVVCRIFAKTAGVKKYPSNNAHSRSHHPYTLDMVPPLLPALLQQDPFGRGHHPYMNPVDMAELSRFARGTPGLHPHIQPHPGYINPAAPFTLSGLNLNLGSSPAMPPPPPPPPQSILQAMSMPMNQPRSTTNQVMVTEQMIPGLANGVIPQGTDGGFTTDVVVGGTGIRYQNLDVEQLVERYWPGSYQM

SEQ ID NO: 189371 - protein, 50 aa, Oryza sativa
  Clone ID: PAT_MRT4530_85888C.1.pep
SASNHPAFVIVLIRLGIQCYQCSCRLSPAACVNFFPMIKIYLALFSQVYV

SEQ ID NO: 189372 - protein, 748 aa, Oryza sativa
  Clone ID: PAT_MRT4530_85889C.1.pep
MLPSRGRPWGKAAGCRIRAGTAAAHQIPRLHRWRGSPCTGERARPSQVSHPWVSGGGGGYIHPRVTQRGPRLLARDAATTLRLSFSFESSACPAYQSMTPQPPFVPSPHRSCGAHSTVGSSTGAGVAQVIHPVANVRPGAGRNVGAFLPNLAPPHPAATPNCHWNIVLLLLACLLLDAPHLSSAAATVPTPPFSFNFDFSNMSTYKPDDLRFEGNATVHGSFVDLTCNAYGLDISQCTAGRMSYNHPVPFYDQTTKEVASFSTQFTFKIIVPRFNNDKEKGDGMAFFLARYPSRMPPDSGGGSLGLITNNNYSSFGPDQFVSVEFDTYNNTWEQPKQTGDHMGININTVTFSTNTTSVSSFSPNESMMKASITFDSKTSMLVASLQYTATGAAFELHQIHSWSFNSTIAAPQLTPICRNIDADHKKAIAVGVSIGGGLILVLLVWSILSWWKWRKTNREFDKGTRGACRFNYHRLAAATNHFSMDNRIGAGNKDFFDEVQTISRAKQKNLVELLGWGMKGSSIIDFVMCWRRQKNTDLFLVYEFVDNGNLHMHLYEKEALLSWRIRKTGKFNRSSDVFSFGLVLLEIACKKDENSYAQVWERYIDKTLMQAADDRLQGAFDKRQMERVIVLGLWEKLGESVMEGGASREWLRAGIGDAPTVHRSRARGGGGGEGGEVRRRRREEDIRRRFGAGELNLPTAPSLLGPPDVVITARASRRPRSATASSPLGLPGAARAVLALAPPLIRVI

SEQ ID NO: 189373 - protein, 955 aa, Oryza sativa
  Clone ID: PAT_MRT4530_8588C.1.pep
MRGSNAYTQFHHTVVHIHSPTKTKEYGEDLLPSVLDALNELLQHLHSENKLSERFPIGLEEQIHKWDPDKIRRFHERWYYPANATLYLVGEIDDIPRAIREIEAVFEHTLPEGEAAPMSTASPFGAMASLFAPKLPGGLAASLTGERSPAADKIKPVKRERQAIRPPVEHKWSLPGVAQDAKPPAIFQHELIQSFSINMFCKIPVNQVQTYKDLRSVLMKRIFLSALHFRINTRYKSSNPPFTSVELDHSDSGREGCTVTTLTVTAEPQNWRSAIKVAVHEVRRLKEFGVTMGEMTRYMDALIKDSEQLAMMIDSVPSVDNLDFIMESDALRHTVMDQLQGHESLLAVAETVTLEEVNTVGAEVLEFISDYGKPDAPLPAAIVACVPKKVHMDGVGETDFEIHPEEITDSIKAGLEEPIYPEPELEVPKELITRSELEDLKLQRKPSFASLSKEENVVKIFDDETGIAQRRLSNGISINYKITQNEARVGVMRLIVGGGRATEDSESKGSVIVGVRTLSEGGCVGNFSREQVELFCVNNLINCSLESNEEFIFMEFRFALRDNGMRAAFQLLHMVLEENSVFPNANISCLQIFVSILQHNVWLEDAFDRATQLYLSYYRSIPKSLERSTAHKLMLAMLNHDERFVEPSPHSLQKLTLQSVKDAVMNQFVGDNMEVSIVGDFTEEEVESCVLDYLGTVYIKDTDERACAYIAGPAPNRWGFATEGNDLFNVIRSSSGDAQVSESANTDLTERKHNDVRSHSLFFGITLSLLAEIINSRLFTTVRDSMGLTYDVSFELNLFDKLDLGWYVIAVTSTPSKVHKAVDACKGVLRGLHSNKIVERELDRAKRTLLMKHEAETKTNAYWLGLLAHLQSSSVPRKEISCIKELTMLYESATIEDLYLAYEHLKVDESSLFACIGIAGAESGEETTDDELDMGLHGMGPIGGRGLSTMTRPTT

SEQ ID NO: 189374 - protein, 61 aa, Oryza sativa
  Clone ID: PAT_MRT4530_85890C.1.pep
MCYETGRPSFDLQEMLCIWDMPAFTADAGYLADGLLDVPFARELELATKLLLLRFVMPPFI

SEQ ID NO: 189375 - protein, 42 aa, Oryza sativa
  Clone ID: PAT_MRT4530_85891C.1.pep
IVKHTIEAAESNHWTPITLTMVQYSYKWWNAIHNAMSVCPAL

SEQ ID NO: 189376 - protein, 84 aa, Oryza sativa
  Clone ID: PAT_MRT4530_85892C.1.pep
MTARTCTAPPPSSLSQLRAHSVPRRTDWKRTGKRATYGLSAAREEAGSVMLRFGLHHASTDGLASSRSLATSPIPSLRSTEGPS

SEQ ID NO: 189377 - protein, 1422 aa, Oryza sativa
  Clone ID: PAT_MRT4530_85893C.1.pep
MEEMNEVRTELAGMKKDLLDLKNLKSEVREVKKLLQELCKQKGGETGNTEAGGGATGGISETGVNAIEAAGTSELRGPDGGMPSTALPTSAVFEHRHEMFYEQNQGNPRVRMFDEQRNFYVGHQGDGGHYAEAVLKGPRLEIPLFNGDDPIDWLKQCEKFFELTGTPMDQWVNMSLAHFQGRAAKWFRGVGLPWQIISWPQWCAMISTRFSAANVHEAVELFQNVKQYGMTVEQYIDKFEEYVDLVRRDHPYLQEQYITSCFIGGLRSDIKHDVCGQKPQGLLESYWYAKTYEKAANAKRNSFSINRNRNQNFNMGNQGRNQAGKAPQRNEGEKKEEKKCWFCKEPWFPRHQCKVKQALHALLLEDEEVEENTEEKNGEVDLTEENDDMADTEEKGKEEELMFVSLNALQGTSRPDTFLVIILINGRKAVGLIDSGSTSTFMDQEFAIKSQCPLKNSEVKKVVVARGGELRSEVQVPEIQYVIQGEQFSNPFNLIPLKGYDIILGADWIFQYSAITLYLKKRILEITTGGKKLILQDFTKPGKHVFISNKKMERVVKKGAVGCVFQVCEVTEEKKEQQIPIDISNILKKFPAVMKEPQGESPYASPAVMVRKNDGSWRLCVDYRELNSQTVKNKFPMPIIEDLFDELHGARIFSKLDLKSGYYQIRMAEKDVHKTAFRTHTGHYEYQVMPFGLTNAPATFQSLMNQVLKPFLRKFVLVFFDDILIYSQNREEHLEHLRLVLQALEKHNLVIRLKKCDFGLTKISYLGHIISQQGVATDPSKIEKILGWPTPQDVTQLTKFLGMTGYYRRFIKNYGLICRPMHDMLKKGSFQWGPEQTAAFNTLKEKMCSSPVFAMPDFDKEFVIEADACGSGIRAVLMQSGRPIAFFSKAFRPKANSQSVYEKEAIAILEALKKWRHYFLGGSCIIGTMVDPNQEYKLESGLLKYKGRIYVGEATEIRGELLRAYHSSSFGGHSGMRATYHRIKTLFYWSGLKRSVDKFIRECPICQVTKGEHIHVPGLLDPLAIPDMAWSHITMDFIEGLPVSRGKDVILVMVDRLTKYAHFLALSHPYTVEQVVWECPICQVTKGEHIHVPGLLDPLAIPDMAWSHITMDFIERLPISRGKDVILVVVDRLTKYAHFLALSHPYTVEQVVEVFMNNIHKLHGMPTAIITDRDRIFTSNLYQEIFKAKGVHLRFSTAYHPQTDGQTERVNQCLESYLRNMTFQEPRNWYSWLPLAELWYNTTYHTAIQMTPFKALGQSHFGREAIIQKLKDSLDVAQKRMKHFADRNRMERTLEVGDMVYLKLQPYRQAALGIRESLKLRSKYYGPSKVIQKIGRVAYKLQLPAEALIHPVFHVSQLKKHLGSHAVPMANLPAAGPEGQIKTEPVAIMRRRMIPRRGVAVTQWLVFWKNLSPADATWKMLR

SEQ ID NO: 189378 - protein, 711 aa, Oryza sativa
  Clone ID: PAT_MRT4530_85894C.1.pep
MAVIPQAPTATPPPYKLTSTPTPHPLAGAHPPTPTSASASAAMQMQAATTTTAAGRLAPKPQPQANRCRPSSVSVVAAGRSRRRSARSSLRASASLDQEVKERASPAAGKSGQATRRDVRNIAIVAHVDHGKTTLVDSMLRQAKVFRDNQVVQERIPDVSARVRERGITILSKNTSITYKGTKINIIDTPGHSDFGGEVERVLNMVEGVLLVVDSVEGPMPQTRFVLKKALEFGHAVVVVVNKIDRPTARPEFVVNSTFELFIELNATDEQCDFQTVYASGIKGKAGLSPENLGDDLGPLFEAILRCIPEPRIEKDGALQLLVSNTEYDEHKGRIAIGRLHAGELQRGMEVKVCTPDDACRISKISELFVYQNFSRVPVDNVSAGDICAVCGINDIMIGETIADKVSGTPLPTIKIEEPTVRMSFSINTSPFVGKEGKYVTSRNLRDRLYRELERNLAMKVEDGETADTFLVSGRGTLHLTILIENMRREGFEFMIGPPKVINKTVDGKLQEPYEIAAVEVPEEYMGSVVELLGKRRGQMVDMQPSGPEGTTLLKYKIPTRGLIGLRNAVLTASRGTAILNTIFDSYGPWAGDLSSRDQGSLVAFEDGSTTSYALLNAQERGILFVSPGQDVYKGQIVGIHQRPGDLAINVCKKKAATNVRSNKETTVVLDEALSYSLDDCIEFIQEDELVEVTPASIRMCKNPKVSKKNR

SEQ ID NO: 189379 - protein, 45 aa, Oryza sativa
  Clone ID: PAT_MRT4530_85895C.1.pep
MGLMMHIGGPANYWAHHGFGESPPKWHMPYVGLRVEKVQIWFLII

SEQ ID NO: 189380 - protein, 55 aa, Oryza sativa
  Clone ID: PAT_MRT4530_85896C.1.pep
GRAPFKESEKNLESLTTMGMPENIFGSKVRQASSLILYRVQNFGASKLKYFLNTG

SEQ ID NO: 189381 - protein, 122 aa, Oryza sativa
  unsure (1)..(122): unsure at all Xaa locations
  Clone ID: PAT_MRT4530_85897C.1.pep
YLPSLLIVLTTKFRNPSIGDGDKTEAESKIEIVPEIEQGSAKXPNRPRPRSAEFESDKVSXIEXFRQYDSFRQKSAAKTYGILKFVRDKSRVRHGHILIKSTGTLTNLKAXFWTCTEVKQIF

SEQ ID NO: 189382 - protein, 80 aa, Oryza sativa
  Clone ID: PAT_MRT4530_85898C.1.pep
MVKLRACSVLKLCFVLGEPLCSGPALRMRPEHGAQLAKPWGPGPWLHSRLILLSDLGGPWCPEQLEVGTRVSTFSSLVLL

SEQ ID NO: 189383 - protein, 46 aa, Oryza sativa
  Clone ID: PAT_MRT4530_85899C.1.pep
FLVFPAAKNTTRMLQLAGLDYCVIRPLRYSRGTATYLIFYWPLPSQ

SEQ ID NO: 189384 - protein, 70 aa, Oryza sativa
  Clone ID: PAT_MRT4530_8589C.1.pep
SGRKKKTRRRERREKGIGTDRRQLRIDRLIGQEDDHIAMVRKAAAMTTGGVVVLVSVEVTRQRHYAAMTT

SEQ ID NO: 189385 - protein, 162 aa, Oryza sativa
  Clone ID: PAT_MRT4530_858C.1.pep
MEGRGGGGLPTATAATATAAQGGDARRGGSGATVRRLRRRQRGGTTTAARGEGGEGEEEGMEWGGEGGRGRDGDGDGAGLGTASNTYAKMNRCYILGFVAPSDLAGYIEADIEAEVILLADTISKESRAGECCPMVICGIGSTIGCLGLNMDATWFGETRGM

SEQ ID NO: 189386 - protein, 188 aa, Oryza sativa
  Clone ID: PAT_MRT4530_85900C.1.pep
MVGLGRGLLSLVSQLGPSRFSYCLTSFLSPEPSRLNFGVFATLNGTNASSSGLPVQSTPLVVNAALPSLYFMSLKGISLGQKRLPIDPLVFAINDDGTGGVFIDSGTSLTWLQQDVYDAVRRELVSVLRPLPPANDTEIGLETCFPWPPPPTVTMTVPDMELHFDGGANMEDKGDFFLKFGSCNPILR

SEQ ID NO: 189387 - protein, 60 aa, Oryza sativa
  Clone ID: PAT_MRT4530_85901C.1.pep
GSSAARFRAASCIDSARPRLSGSVAPHAALAVCRSCAWCLVPYRRAWRRLAGAARRHHRV

SEQ ID NO: 189388 - protein, 313 aa, Oryza sativa
  unsure (1)..(313): unsure at all Xaa locations
  Clone ID: PAT_MRT4530_85902C.1.pep
MDPRPVITTECLKCGVCRSCDXRLKPTPMESPTYRLGANKIWQNFEIGSGGYRCRYIMFWLWRWRLLSHTNKGQDKVYMEIRRSTLIIVKKTIDMYDQINDGINGTSSIFECRVQAPAIEENTTSSDITMATLCINQPKHQLQTELAAGLEGISGPISTWWKAYGVYFQMVLVPRQSSYRAAGKLQNKPRISLLGEVIRVSTRLITRGNVVLQLQGSVAYSLRSRIELCRDFAQIKCLSIPIRRSGSIIPHQPSPPVPFQISLEASSPSWTSASKVSPKANTLEPIRRSPLCHHHAVGPVWFFSPWANLRAKV

SEQ ID NO: 189389 - protein, 122 aa, Oryza sativa
  unsure (1)..(122): unsure at all Xaa locations
  Clone ID: PAT_MRT4530_85903C.1.pep
YSTAHGLTETPELHLGVRLAAGRRVIGAAAVGDLVVPPLGHLHVVVAGLLAAIAAAAARRKTKMLAAAAAXEEEDEDAGGGGALGVVSVWGMRRPASPPSPCAHEEERTMNMREKGGGRREE

SEQ ID NO: 189390 - protein, 43 aa, Oryza sativa
  unsure (1)..(43): unsure at all Xaa locations
  Clone ID: PAT_MRT4530_85904C.1.pep
LGGVLVCVPLLVXWRSVTLSGGRSGVSLLLGLCVGDVGVWVVV

SEQ ID NO: 189391 - protein, 41 aa, Oryza sativa
  Clone ID: PAT_MRT4530_85905C.1.pep
MGRNSAERCGGIHASKFVTFEGGIYVSKFVTFEGAEVGYWE

SEQ ID NO: 189392 - protein, 331 aa, Oryza sativa
  Clone ID: PAT_MRT4530_85906C.1.pep
MDLAEQVQALVALSAEQAMSLGATERSDRQVVMFLRPRQHNFKRRLRGASSRKKMSRLAVNFKPKMAAPRGRLPGALLLILAETRSGGVVLGMASTTAPLPKPPNKADRTRSWEIQPIQHSITPLGLAMASSPLAPSTEAAKTTASSTSTATQHGLGVRFSSAISRRCDAVSAVSGANFADGWSRAMGGGAVSLSAWFGTIYSRTACFAGLAHFVRSMGRGVEAAQIAPSPSARSLQLVARSGVVSGRKGRYGFCPLLVGLVGFHVGPYVKVDHYHILGQGFLVKASVGIYWWAVLVVNWTGDWVTIRALLSLKVLGWGPPVHAACIVAWQ

SEQ ID NO: 189393 - protein, 53 aa, Oryza sativa
  Clone ID: PAT_MRT4530_85907C.1.pep
WVFLIFVYGKKFSNDHNIISICWLCQTLTNPILIPVAILHMARRSFIQITILQ

SEQ ID NO: 189394 - protein, 82 aa, Oryza sativa
  Clone ID: PAT_MRT4530_85908C.1.pep
LNEGSMTLLLNMHNISKLETCIIALRSTLYWTPIIPAGNRRIYRKLTILTTIIHGLYATIQTDTICIPWVPARFLKHTYLQF

SEQ ID NO: 189395 - protein, 49 aa, Oryza sativa
  Clone ID: PAT_MRT4530_85909C.1.pep
TPGVRLGPGEMCFVNVYALGFVPGQWEYCKCAGFGSWNKYPQPWHFRAA

SEQ ID NO: 189396 - protein, 272 aa, Oryza sativa
  unsure (1)..(272): unsure at all Xaa locations
  Clone ID: PAT_MRT4530_8590C.1.pep
AGPDEXHVASPTWSETALDKHYVDQPIGKEELEGFLNTPLPSHPKLVRGQLKNGLRYLILPNKVPANRFEAHMEVHVGSIDEEEDEQGIAHMIEHVAFLGSKKREKLLGTGARSNAYTDFHHTVFHIHSPTKTKEYGEDLLPSVLDALNEIAFHPKFSSSRVEKERRAILSELQMMNTIEYRVDCQLLQHLHSENKLSERFPIGLEEQIHKWDPDKIRRFHERWYYPANATLYLVGEIDDIPRAIREIEAVFEHTLPEGEAAPMSTGSPFGA

SEQ ID NO: 189397 - protein, 41 aa, Oryza sativa
  Clone ID: PAT_MRT4530_85910C.1.pep
SLGVTKLNTDVLWVCKFVAVMLQIYEALTKFYSCVIQKKLN

SEQ ID NO: 189398 - protein, 77 aa, Oryza sativa
  Clone ID: PAT_MRT4530_85911C.1.pep
GSSHLPFMPRPVKGGAVRASRCLPVDARAVLASLPPATSPSPSLTVAELRWAATAAVSRRGAALLLSRLASRSRRLA

SEQ ID NO: 189399 - protein, 197 aa, Oryza sativa
  Clone ID: PAT_MRT4530_85912C.1.pep
RHEARVVVVAAPLARTGSCSRAGVPLLLALCPRAAFGGDAIPDVPLLSFHDDLLRLAPVKVVAGPVVGEMVVEDVAVDCAPRSAELRRRLRFKRMPFLVQTQVRLVRQLSPGDSLMLDALDEVGGGSLQPEVGGELVQPYLQAMAAGLAVIAPSMDESFRLGGKPRCLCAGIGGGALLMSIRMGLQCDVLGIEADGV

SEQ ID NO: 189400 - protein, 67 aa, Oryza sativa
  Clone ID: PAT_MRT4530_85913C.1.pep
YSYLHLHSLWLESLHKELLLINRFTHPPWLSHASGWLAGGVSSSSRSRMGGGMDLTPMVAESQTRGS

SEQ ID NO: 189401 - protein, 77 aa, Oryza sativa
  unsure (1)..(77): unsure at all Xaa locations
  Clone ID: PAT_MRT4530_85914C.1.pep
KEHFLVATEHKFNCVLLRPIVXNLPALLTEDLESALKDDVDSTFKVHEMRHSRGHRETDLEIQLKRIKRLKGEVRIV

SEQ ID NO: 189402 - protein, 86 aa, Oryza sativa
  Clone ID: PAT_MRT4530_85915C.1.pep
NKKTPFFFSNFCPLTSPRCRLTFSRPTLEPARGLFHFQHFYFKPPFLFLKKFTPQMGGSPFPGCLGLKNKHPLFFFLTLGNLLTLN

SEQ ID NO: 189403 - protein, 142 aa, Oryza sativa
  Clone ID: PAT_MRT4530_85916C.1.pep
MEFGRPACFRALLRASAQNRGKWMCHIFVHHLRDANDARLLCIIFTNILTTGDNNNTGDKEKEPPVADEDLKAISFPPLILRPARLMDVGVATAGTTGLLPWFCATIPSSSSSTGTGWTEFGRTARSEHSCAQVLRTEEKQK

SEQ ID NO: 189404 - protein, 51 aa, Oryza sativa
  unsure (1)..(51): unsure at all Xaa locations
  Clone ID: PAT_MRT4530_85917C.1.pep
AVLYLELPLSIYNYSHLXDIXYVTVPPINWKTQFYYFNLTLNXIPXXXXSL

SEQ ID NO: 189405 - protein, 388 aa, Oryza sativa
  Clone ID: PAT_MRT4530_85918C.1.pep
MDPPAVPSPFRRRGLGDAGDEPSPVSILPDDVLAEILHILPPDPSSLPCLSLVCKRWRRLVSDPAFHRRFHSHARRRRAPLLGFFHNSFNVPCFVPTGRAPDRVPAEAFSLRRHPGRWLFLGCRGGRALLASPFSVCRLLMRRRPCACVYSSLSGEWGEVVCGRTVIPHDLDLGLGLRHLDESISGEKISAIDMKPPVLVGNVLYWLLVENCILEFNMDAKSLAVNVVSGPDLMYFPAPNWSLQIMLAEGGSKLGCGAVDSRGPPVWVRKSDSDSTASWVMRKRIKLCMFIPPPHPPLRQLEALFDRLIAWSGLLGFTEDGSVAFLQTPNGVIMLQLDTMEFKLVLPMERLHWVYPHSSFYLTGKLISVVICMGRDGYKSECSWFLHV

SEQ ID NO: 189406 - protein, 53 aa, Oryza sativa
  Clone ID: PAT_MRT4530_85919C.1.pep
KDWKQIIALSFLCSNDYCQKRCDRDCLLLDHSVKSSYVLPKKKKKQKKKKTPK

SEQ ID NO: 189407 - protein, 225 aa, Oryza sativa
  Clone ID: PAT_MRT4530_8591C.1.pep
PTRPLMLAMLNHDERFVEPSPHSLQKLTLQSVKDAVMNQFVGDNMEVSIVGDFTEEEVESCVLDYLGTVSAPKSSKTQEHIEKISFLPFPSDLHFQQVYIKDTDERACAYIAGPAPNRWGFATEGNDLFNVIRSSSGDAQVSESANTDLTERKHNDVRSHSLFFGITLSLLAEIINSRLFTTVRDSMGLTYDVSFELNLFDKMDLGWYVIAVTSTPNKVHKAVDA

SEQ ID NO: 189408 - protein, 69 aa, Oryza sativa
  Clone ID: PAT_MRT4530_85920C.1.pep
MDGDKRARPPTHPAPAAEPMRQGTLKPDARRSAYKRGVDVQVSSGGRAGGGGGEARLGLAESREEHGGG

SEQ ID NO: 189409 - protein, 36 aa, Oryza sativa
  Clone ID: PAT_MRT4530_85921C.1.pep
LNVGAARIHGHRGSIRNWSDGTAASNTPRDLCAARA

SEQ ID NO: 189410 - protein, 186 aa, Oryza sativa
  Clone ID: PAT_MRT4530_85922C.1.pep
SPLPLFLSLSLSHAKRSAADAAAIEPPSVPAFRSMASAPLGPARPSRRRRFPSLHRDPHADRQRILTQDRRRRHPTQRVDSRLQMMPPALRRCSAECTAAPNSAPPRSDSPRESFLLSQRPRQLFLPPTPPSSPFVQPIAGKASLPFSPDRVLDLPGHGGLRQVCLDSGFSHCQLWICLYHRHSPT

SEQ ID NO: 189411 - protein, 94 aa, Oryza sativa
  Clone ID: PAT_MRT4530_85923C.1.pep
QQGQAWGNSNSPRRSEKDTGKDNPLDPRPEAIIQSYKPINKVKDMVRIMTGGDSCIGWPVCLCFTLEGTTVTFTYVKGQEEKDAKKTLRALRDI

SEQ ID NO: 189412 - protein, 75 aa, Oryza sativa
  Clone ID: PAT_MRT4530_85924C.1.pep
MRQSNSISLCVPAYEIVKMEPQEKNSQSTSLGARSSNHLFFYMVVCKNIFKMNGTLPHWGCNGIKGGNWPQFNAR

SEQ ID NO: 189413 - protein, 219 aa, Oryza sativa
  Clone ID: PAT_MRT4530_85926C.1.pep
MPADGAAEGRAERRQAAGGGGGWLWEFGLYVRRVVTGLAVADTPTNNTKVQRHPLPSNHPPQPVRRKQRNATHAPASPSCAGTRTATPTPRYSRKPHPAPCALTARTHAKAFDPAVRLCRALISWRGNRKEYMKNHQAGPLYHTVGSPVRNYIVFIGDSVVPAVQTACSPFHSLFSILSILCDGYSSIRIGASNKIAALAHIDRYGRWKRRRGCCVMAS

SEQ ID NO: 189414 - protein, 101 aa, Oryza sativa
  unsure (1)..(101): unsure at all Xaa locations
  Clone ID: PAT_MRT4530_85927C.1.pep
ACGSSHIYLNNSAADSLRQWSVNXIRGLEDLFQIQSLDPILPRGSXHMLFLKRTQHFCEDYKTRKYRRRHFSTPAVAFKAVGGGSWLLKFSWEDIAKMAMP

SEQ ID NO: 189415 - protein, 85 aa, Oryza sativa
  Clone ID: PAT_MRT4530_85928C.1.pep
FLFPVTVAVDLKRDLRFGHDDACYKYQVVVTARRRRSIRRSRLRREIGCAPSLSLERFHGALPPPRRRRRCRRRAFGTLMMPLLS

SEQ ID NO: 189416 - protein, 54 aa, Oryza sativa
  Clone ID: PAT_MRT4530_85929C.1.pep
IIKTTKHFYFGGRPQDLKNLKVSLMCYIIPSVTHKWAENTDPFQLLGPTKILTC

SEQ ID NO: 189417 - protein, 1176 aa, Oryza sativa
  Clone ID: PAT_MRT4530_8592C.1.pep
METQRTADQGGNGGAGAGGYPRWVILCRYGEYQGYERDDSFPPFSTPDAKTEAASVFSSGGHHVLVSLCLDAPPASSRVCFDFFPRIGGGRGASLAVVAAHGDSVLVRLSYQGEGYRYGDDGVLDYFVYNAGSAAADPPRPPSLSLLPAYVTTDADEEESETWRPRHDLDERTTGLLRRGEDDMVVVDLAVMEEGDELEEAELLVLRSGEWTVTRAPVVHFDGRAEKLPSWITDMAVPVGERRMCWADLYRGIILCDVDDVFDQNPQLRFVPLPPEALTDESNDDDDDYDDHTRKYVIAERSVCVTGGGAALKFIDVIPRCCCGRPGPTYCGHSTGAFIIKTWILRVDDGSGDMAWTMDAMVDASELWSSHAYAGLPHAIPEHPIVSIDDPHLISFMVDERESEGRYCRIKETWMILFDTRSKTLLSAISCSHGRNFLPSKVSSYFTSSNGSCSNGGAMSEPAVIIDKAPTHDAIIGDSVRISCESSGAKHFRVSGSVASPDEIFAALEEIPELSRHDLLRAYSMLCHDNGRRFKSLLGLPMSLRKTWLLMEIQTFCVTLSFHQSPPPSPPTMETQPTPATLRRVGCYDPRWALLERDVRRKHKKGSDDQGDRDDSSNPCSAAGGSCAETEASCRNSAGHVVRLSLCREAPPASSRMWYTSSPSHDEGGGPLVCVVAAHRDSVLLQMHYKNEARRGGEYGLYHFVYSAGDAAAGDPPSLSLLPIHWVHYGLSDRTPNRLDDARTGLLRRRRRRCGDNDLVVSKLTVTEGDDGVDAELLVFRSGEWSVTPAEIIHDDGKADELFHWKTDMVVPVGDRRLCWVDLYRGIILCDMFDDDEPLRPRYVSLPVEPPAGEFDDDDYGYRYYEYESGGGRGRNPRLCLMKDRTVCATNGGGGGGDTLKFVDIFPRCCCGGPGVTTCDHSSSAFVINTWTLRTSDMTWTMDAIVDATELWSLSLHADAGIPPHKRPYYPVVSTRDSHIICFLVYDHDYCVKEKFWKIMLDTTNKTLPSVFAYKNQSSPCLRCIPSEISGYLLTSCSSDSTKPAAIVVDVLPAAAATTTTTTAVISKKSHELSTNVSEMASPEEILAALEEIPDLGCDDLLEAYSLLINDGSGRRFRSLLVLPMGLRKKWLLIEVKNSQACSICSACTTQPTTWMGAEAELQGSDVLSKHLSRVL

SEQ ID NO: 189418 - protein, 94 aa, Oryza sativa
  Clone ID: PAT_MRT4530_85930C.1.pep
REFRESQGRNKQQGEGEGGTFKEETRVVNDSKAIFRFFFLSLPPPPSPLSLYSLHTLRAEAAASPSVEHIKDAQEKREREASSWKLASQASSSH

SEQ ID NO: 189419 - protein, 75 aa, Oryza sativa
  unsure (1)..(75): unsure at all Xaa locations
  Clone ID: PAT_MRT4530_85931C.1.pep
NFDGLYRNFAKADQFSLRSTTLLKMGNNIKAEYSHHTQQATPMMQTCKGIXGRFVAICIKAVVKHFIKQNGKTVE

SEQ ID NO: 189420 - protein, 114 aa, Oryza sativa
  Clone ID: PAT_MRT4530_85932C.1.pep
TAHDGLEREVKGIHLQASGSRPGYSSVASSAAPSFTVCRSAADVAAAVLSYDLLGLQYSLLQRSTRGKTTERLSCVVVTGTSTSAPILHAAHSAPGLAAASPTAVLFVAIHNPS

SEQ ID NO: 189421 - protein, 120 aa, Oryza sativa
  Clone ID: PAT_MRT4530_85933C.1.pep
MATAAGGVEAERSGADERLLGSGSDEMGTFLAMAALTFQVMLLGGAVVAGGCNDTRRSSVPAIFLFGDGALDVGNNQYLPSSEAGDPIRADHPFYGIDFPGGNATGRVSNGYTMADFIGN

SEQ ID NO: 189422 - protein, 919 aa, Oryza sativa
  Clone ID: PAT_MRT4530_85934C.1.pep
MRHQVGLLSRLLLRRHVHRRSKPATAPPPPPPPTPPRPPQKPEPVSIHGETWHDSYAWMGALSDAAAMRHMDVHMEAEEKYAEACLAAAGADRLARKLQLEMASRLASDACTPPVRWGPWLYYRRADEGKQYPVLCRRSAALHSEFISYSDPSAGFDFTAGKRIEQKLVDYNKEAERFGGYSYEELSEVSPDHRFIAYTMYDKDKDSFTLMVRDLVTGTLCDKPRADRVSNISWAMDGKALVYLINASDPLSRMRLVWEGESQVHCIVEHHHGRLYLFTDASREGTPVDSHYLMLSDVESPGPKSWKDVFLEEPGVILEDVDFCDTHMVLVLRQGRKLKLCSVKLPFPEHIRILPGPNYDYRSSTMRFTISSPVMPDAVVDYNLPNGKWRIVQQQNMLHERTKALYGNAFAASMVKPSSKGGDLSSEDFGDCDWNELSEYYACEYYDVPSKDGVLVPLTLVYSQKHKQEGNPGLLHGHGAYGEILDKRWRSELKSLLDRGWVIAFADVRGGGGYGKKWHQDGARTKKMNSIYDFISCGEFLLEKGIIKENKLAGWGYSAGGLLVASAINTRPDLFRAVVLKVPFLDVCNTLLHPILPLTAIDYEEFGFPVDHEEFLSIRKYSPYDNIQKDVPYPAVFVTSSFNTRFGVWEAAKWVAKVREVTRYDPERPSQLYGLMIWKPKFLSTGDRLTLIKSVLFALPVHYLSVLELPQCSIKEINRKCRGFLWKGQEEGEQQDRPWTTVATVEPKDLRDLYYSASRQEVGDGKNTKFRLADWLPMGSIKSRFQLIFSHVERTGLTVAQGLRNHRWVCDIKGAPSNRAIGEYFQIWDAVQEVQVQGGEEDVTVWKRAANGKFTPASAYELFFMANTEARCGSLIWHTREPSKVKFFMWLAEREVSHGRQSHQARMATPTILPPLHEQ

SEQ ID NO: 189423 - protein, 119 aa, Oryza sativa
  unsure (1)..(119): unsure at all Xaa locations
  Clone ID: PAT_MRT4530_85935C.1.pep
AAAAANLGDGEFSEADKKTIMASEYLSQLVLSDPKKVKRVLCNRRSAARSKERRLNYTXELESKVLVLKIEIEKLSEKLATAQRTFNELLAQNNELKIKIQETGRERQMKESYIQINRL

SEQ ID NO: 189424 - protein, 294 aa, Oryza sativa
  Clone ID: PAT_MRT4530_85936C.1.pep
MENVTGEGISDQIERFQTQLQMDGRGRKHRILMVSDFFFPNFGGVESHIYYLSQCLLKLGHKVIVMTHAYGNRSGVRYVTGGLKVYYVPWKPFLMQNTLPTLFLTFPIVRTILIREKISVVHGHQAFSTLCHEALMHARTMGYKVVFTDHSLYGFADAGSIHMNKVLQFTLADIDQAICVSHTSKENTVLRSGISPEKVFMVPNAVDTAMFTPSPDRLSCDEIVIVVISRLVYRKGADLLVEVIPEVCRLFPKVRFIVGGDGPKRVRIEEMREKFSLQDRVEMLGAVPHAQVAI

SEQ ID NO: 189425 - protein, 184 aa, Oryza sativa
  unsure (1)..(184): unsure at all Xaa locations
  Clone ID: PAT_MRT4530_85937C.1.pep
AAISSTRCHQPAGTRRPPSPCRRACRPLAGRDDLPVISHNALLLRQPLPRLLPRGCRAWHHTHSSCTYHRSTHPPVVGCRDCQSPTVHDRRXPNDDASGPSPATARAVSRYSLPSPFVAFASPSRRLAGAAAVFTELLLLTQEAERRWGLAPLPPSRLAARLSGRRAPAAVRQRRGGRGAASDG

SEQ ID NO: 189426 - protein, 777 aa, Oryza sativa
  Clone ID: PAT_MRT4530_85938C.1.pep
MSRRRAAAVAAAAREEEEASPAQRLVEAALRGDVVTMEACLAAAAAAAAADDDTDDGVPAASRVGVARLRVRCAEVALREEAAGEVIVESRELKTDVSPLFAAAHAGHAEVVRTLLSGGGGKVAGVSSCKKVYCSVFEVAGADVNQKLFLGYATTAAAREGNIHILEMLLQAGVTREACEDSLSEAALFAEAEAVRLLVCSEMIQPEAAAHALVTASSRGFDDVVVILLQNGVDVNSMARVLLRSVKPALHANVNCTPLVAAVMSRQISTVKLLIEEGSYLDCLVQVGSWCWDSATGEELRVGACLGEKYNAIWCAVEYYECSGEILKLLLDKAPWLLETPRKGRNLLCHAILCQNPNAVSVLLNAGANPRFPIMMTNGTHVSYPIHFAARLGHAPVLKQLMLDGANINAQTSTGDTPLMVSARCGHSDCFLELIKSGADLGIVNNAGDTAIMLAKKSSFSSTIIDILSRALSCGGCITSSDITVFSPLHFFAASDSAEALLMTLHYSAADLNRPDGSGLTPVMISLPRVPKGNPRCRSSEAELLNQDRFEQILLQASLADAIAGQQPSFRPLHYAARIGDTSSLTQLLKMGHDPNAMDEDGYTPLMHAAAAGKLEACRALVSRGGAADAGSETALSVARRSGRSNKATEEWLLDHVARAHVLAGEELTKHTRGGRGPPHRKAVRMMRSGVLTWGATRRRNVACREARAGPSAAFRRNRRIIRTGSEEQLILMVETVTGREIHFEATSASSVELWVRGINLIVQDCAWSRPDEAEQA

SEQ ID NO: 189427 - protein, 797 aa, Oryza sativa
  unsure (1)..(797): unsure at all Xaa locations
  Clone ID: PAT_MRT4530_85939C.1.pep
MSRRRAAAVAAAAREEEEASPAQRLVEAALRGDVVTMEACLAAAAAAAAADDDTDDGVPAASRVGVARLRVRCAEVALREEAAGEVIVESRELKTDVSPLFAAAHAGHAEVVRTLLSGGGGKVAGVSSCKKVYCSVFEVAGADVNQKLFLGYATTAAAREGNIHILEMLLQAGVTREACEDSLSEAALFAEAEAVRLLVCSEMIQPEAAAHALVTASSRGFDDVVVILLQNGVDVNSMARVLLRSVKPALHANVNCTPLVAAVMSRQISTVKLLIEEGSYLDCLVQVGSWCWDSATGEELRVGACLGEKYNAIWCAVEYYECSGEILKLLLDKAPWLLETPRKGRNLLCHAILCQNPNAVSVLLNAGANPRFPIMMTNGTHVSYPIHFAARLGHAPVLKQLMLDGANINAQTSTGDTPLMVSARCGHSDCFLELIKSGADLGIVNNAGDTAIMLAKKSSFSSTIIDILSRALSCGGCITSSDITVFSPLHFFAASDSAEALLMTLHYSAADLNRPDGSGLTPVMVAAESGHADIFRLLVMAGADIAATSAEGKSAMSIIRSRAPETRDRFEQILLQASLADAIAGQQPSFRPLHYAARIGDTSSLTQLLKMGHDPNAMDEDGYTPLMHAAAAGKLEACRALVSRGGAADAGSETALSVARRSGRSNKATEEWLLDHVARAXVLAGEELTKHTRGGRGPPHRKAVRMMRSGVLTWGATRRRNVACREARAGPSAAFRRNRRIIRTGSEEQLILMVETVTGREIHFEATSASSVELWVRGINLIVQDCAWSRPDEAEQA

SEQ ID NO: 189428 - protein, 226 aa, Oryza sativa
  unsure (1)..(226): unsure at all Xaa locations
  Clone ID: PAT_MRT4530_8593C.1.pep
WLKYHFEESEDFFLLRSVAPPQGRRERRNPPPPHPSPPPPASPPLEQPPAKPGSCKDGGGGAPHLPHSMVNAVGAPTRSEAGARHRRRRSDPAPVSSDPALAWRQRAYEGLAGWWRSRRELRTDXXPGGGDGDEPRPARGELGSGPPLAGSGTSTGGGEPTRGWRSGGGRRPSVPXQRRRGRAAASTGFFGAGSSATTAAPAVAAADLAGGCRPAAVCRWQGRRLN

SEQ ID NO: 189429 - protein, 99 aa, Oryza sativa
  Clone ID: PAT_MRT4530_85940C.1.pep
KRWPPVFRERFTPFSLDLVSRVVPVFASFRGPFLGGCRHPFFCGLRGPPPRLLIGCPPPPLFGLPPTRARWYPSRTPQKSGFFPCDKPQFVKGVFLPGF

SEQ ID NO: 189430 - protein, 1437 aa, Oryza sativa
  Clone ID: PAT_MRT4530_85941C.1.pep
MDAPVLSSSLALGAMSPLLGKLDELLASTEHTAPSIQQIRANLGITSTRLVELSMLQDPPLVAKYWMKDARELSYDMEDCLDLDQVAGGGEEADWIDRIAGFRSRVEEANRRYERYNLDSILGSSTNIPIDHRLKPAVGKPAMEHVGMEGPMDELRRWLTDEAQELKVVSIVGVGGVGKSTFAQKLWRKLGGQFDCRAFVHTAKKPDMRRILRSILSQVRPRQQPEVCEVHNLLEDLRKHLLDKRYFIIVEDLWDTSVWDVVSRAFPKGNCGSRIVTTTKFEEVALTSCGYHSKYVFKIKPLSEDLSKELIVRRVFVSGKGCPQQCSAILDEITNKCGGLPLALNIIASLLSCQHEVLEHWKHARDFLCNSLRTNPTFDEILKQVVNLCYNSLPHCLKTCLLYFSIYPENYTVMKEDLVKQWAAEGFLCATKGEEIMAVAVSCFDRLVNLGLIQPIDINYNDKVVHYAVNNMVLDIITYKSIEENFITVMDKDCYQMSIELSDKVRRLSLHFGSATYATIPAGIGLSQVRSLTFIGLFNCLPSIVKFKLVRVVILHFLGDHGNLSLNLRKLGELSQLKYLQIKCNVTVELPYQMQGLKHLEALEIRARTVSIPSDIFHLPMLFHLLLRADRNLSPRIAKSFCLEPNPSGKISSLDNLNVLSSPPIFLQTFEVLPPIGVYSRLPEWIQQLRKLRILKIAIRQLMRNDIDILSGLPVLTAVSLHIRQSMEEIIVFHRESFPALDCLKLSCSVLYLTFQEEAMPNLRRLKLGFNAHRREFFYVNMLSGIEHLKTLQEVVGQIGLGFGAGESEWAAAEYAFKNAFSRHSNLTSFNIRRVGGVDEDNWEPQILDQTESSSLSLSAPGVSSLEKFIFTKTEFSQFPGCVDVSDQKENSSLSLSLGVRNPGKCAVDTESSQFPGCIDVSDQKENSSLSLSLGVRNPGKCVVDTESSQFPGCIDVSDQKENSSLSLSLGVRNPGKCAVDTESSQFPGCIDVSDQKENSSLSLSLGVRNPGKCAVDTESSQFPGCIDVSDQTESSSLSLLLGVRNPGKCVVDTESNQFPGCIDVSDQKESSSLSLLLGVRNPEKCAVDAESSQFPRCVDGSDQKESSSHSLCASVVSDASEMLAANTVKSSGGSVAGASGSGKCKKQGCEEKAGGKTIFCRAHGGGKRCYYPGCTKSAEEHTDFCLAHISRRCMHEGCFRFARRKTDFCSKHGGGKKGETETHKKSSRSAESRSGATITHVSSGKNCKSPGCTGTADGVTMLCEKHRMKMACSFPGCTKMAWGPSAHCVRHGAGKRCKFLGCTKSTRRSTDFCKTHGGSGGADDTLCSWRGGESSVGGGEDKCDRIARGRSGLCAAHSALVLDDRASCDGTIAPAAAQLVQADELIKPDVIEHPAVEAGRDDKADGGVGGSGSAAAVADQRLDLNAEAIITQHFFV

SEQ ID NO: 189431 - protein, 71 aa, Oryza sativa
  Clone ID: PAT_MRT4530_85942C.1.pep
PSVAGPRPAPSSCCSCVTPRAISREATAPDFKTWPGPSGEWRHPQGVTCWHSRFSYPEHLWLCIRACTRLI

SEQ ID NO: 189432 - protein, 611 aa, Oryza sativa
  Clone ID: PAT_MRT4530_85943C.1.pep
MVVALPAFTDNLKEVVCSSWDTTGKGRAVGFLQTYHAAAAAAADEEEMWRRSGARALLLLRSSIHRPLPPPPSPLRALTRAPPPPRPLSRFLSSSPEPLPDAGGGAASASSDPTDAGEDGLASDPTEAGEDNLASLWEEDAGDADDVFAADASPDPADAVVDEVLAARVGAVVESTPEDQIPSALADMVVDFNEPLLAAILVSAAESCSGKKLLRLFKSAGKNNPAAKSLANLEIVVDKIADSDEIDKMDVYLLWDLVKEMGAVPGSVNTQVLNKLLAMFWKLEKSKAALEAFDMFSELGCAPDGDSYYLAIQAAGRKSMVDAAWRVCDGMISSGCFPDGEKVGDIVMFFCKKKKVKEAHSVYITAKEKKVQAPTSALTFLVSALARNDETINTALELLEEYQGESLKDAGQSYAAVIHGLCNTNNVEDAKKVLMRMVNLGPAPGSAVFNFVITALSKNGEMEDAKGLMRVMENQGICPDIYTYSVIMSGYAKGGMMDEAHALLRDAKRIHPRLSRVTYHTLIRGYCKMEEFEKALECLKEMKEDGMEPNMDEYNKLIQSLCLKALDWRTAENLLKEMEDGGLCLKGTTRSLIAAVKELEMDELSKASQEA

SEQ ID NO: 189433 - protein, 158 aa, Oryza sativa
  Clone ID: PAT_MRT4530_85944C.1.pep
MRQKQQAATRPREMEIGAGGGRLSSSPSSTKLRRRGWSYSSPLRPPPERERAGVGGDDGVTEKAREDATRLSPLAVGHRSDFEEPIQGYPPFRAEFLYSTLEADSVGGAVSSPASTKWSNVGAIATWSIDGILGLISGKRRVEQRQAHSWSLPRPEIH

SEQ ID NO: 189434 - protein, 494 aa, Oryza sativa
  Clone ID: PAT_MRT4530_85945C.1.pep
MAPPEKGAAAHGAVAKNGGEGEVSAVRRPGRPRVVHPDVAEFLLNFRRLRREKKKRATPRPAVVVVPGERARYDCAFEDEGEVGRRGGFAPGRLVWGKVRCHPWWPGQVFDPADASEQALEERRKHGATLVAFFWDKTFAWVDADELLPFRGDGGDFALLAGQSAHAMPALTASVDAALGEVARRVAAGLSCCCCCDGAAVAKKQVIENAGIREGAHGATVDAAFTRGALRGEAFVGYVSALAVAPLAGADRLDLAIATAQLKAFDRWRGAAARSLPEYTCHHGIEANAMAPRRKRGRATKNTITGNVDDDASELENFEPTPQPLSHQMSTKIGKLMSRAAQQMSRSPAVIHRDTTTTTTNGDAPPPPPPAISLTMGRCTRSADEKKKNSDIREDPFLAGLVLNFICPSAVLPLSELVNIFSKFGPIMEAKTENAYAMVMFKRRADAEAAFSGTTKINALSSSLISFRLNYSMSASPIDSPECSLNTAMDRLLF

SEQ ID NO: 189435 - protein, 89 aa, Oryza sativa
  unsure (1)..(89): unsure at all Xaa locations
  Clone ID: PAT_MRT4530_85946C.1.pep
PHPPDCPAARPASEPPKQLVAPQKGWDGRLDTYPSINHXPRAPPHRRKEGPPPSKKDEFNVLPRPTTAFSAGSAATSKGETTVGPRPXA

SEQ ID NO: 189436 - protein, 993 aa, Oryza sativa
  Clone ID: PAT_MRT4530_85947C.1.pep
MVKTRNDPRDSNDASGSEEQTDGAHTSGASGSSASPPPENPTVTQMMTMMMQQMQQHYHQMLQQAQQNQQSGPPPSHLSKLLDFLRIQPPTFSSTTNPMEANDWLRAIEKKLNLLQCNDQEEVAFANTSCKVPLLHGRTTTWKAQIPEGIMAQKKREFRALQQGTKTVTEYLHEFNRLARYAPEDVRTDAEKQEKFLFGLDDELTNQLISRVYEDFEKLVDKAIRQEEQRNKMDCASHSFISKRFAGTHGLSVVVLKIPMQVHTPRSDMKTAHYCPSVNIEIKKSLFLSNLILLESKDLDVILGMDWLTRHKGVIDCASRTITLTNDKGEKITFRSPAPQMSVASLNQAATEDQTEIMEKSLKRLEDIPIVQEYPEVFPEDLTTMPPKREIEFWIDLAPGTAPIYKRPYRMAANELAEVKKQGAPVIFVEKKDKTKRMCVDYRALNEVTIKNKYPLPRIDDLFDQLKGAKVFSKIDLRSGYHQLRIREEDIPKTAFTTWYGLFKCTVMSFGLTNAPAFFMNLMNKVFMEFLDKFVVVFIDDILIYSKSEEQHEQHLRLVLEKLKEHQLYAKFSKCDFWLLEVKFLGHVITAQGVAVDPSNVESVTKWTLPKTVSQIRSFLGLAGYYRRFIENFSKIARPMTQLLKKDEKFKWSAECNQSFEELKKKLVSAPVLILPDKTKDLQRHYLIGNRCEVYTDHKSLKYIFTQPDLNLRQRRWLELIKDYDMGIHYHPSKANVVADALSRKSYCNAVCTEGMCDKLQQDLEHLNLGIVEHGFVVALEARPTLVDQVRAAQDQTGERQLFRTEVLIEAEEKVRTIRERLRIAQSRQKSYADNRRRELTFEAGDYVYLRVTPLRGVHRFQTKGKLAPRFVGPNRILERRGKVAYQLELPSNMVGIHDVFHVSQLKKCLRVPEEQASSEHIDIQENLTYVEKPIRILETSERRTRNKVIRFCKVQWSHHSEEEATWEREDELKAAHPHLFASSSESRGRDSV

SEQ ID NO: 189437 - protein, 552 aa, Oryza sativa
  Clone ID: PAT_MRT4530_85948C.1.pep
MAPAQPAPPAQAKETGAKPGPCYNCGEHGHFADKCPKPCRAGPRFVLARVNHASAEEAQTAPEVVLDLDVIRGMDWLTMFKGVIDCVNRTVTLVNEKGETVVYKSPASPKQGASLNLVEAKSSVTAEEKSSTKLEDIPIVYQYPEVFPEDLTTMPPKREIEFRIDFALGTAPIYKRPYRMAANELAEVKNQVDEQQQKRYIRPSTSPWGAPIIFVEKKDMTKRMFVDYRALNEVTIKNKYPLPRIDDLFDQLKGAKVFSKIDLRSGYHQLRIREEDIPKSGEEHEQHLRLVLEKLQEYQLYAKFSKCDFWLSEVKFLGHVITAQGVAVDPSNVEPVTKWTPPKTVTQIRSFHGLMGYYRRFIENFSRIARPMTQLLKKDEKFKWTAECDKSFEELKRKLVSAQEELLQRLGFEDMSVKLQQELEHLNLGIVEHRYVAALKARPTLVDQVRAPQVNDPEIAELKKNMRFGKARDFHEDEHGTIWLGERFCVPEDKELKDLILTEAHQTQYSIHPGSTKMYQDLKEKFWWASMRREMAEFVAVCDVCQRVKAEH

SEQ ID NO: 189438 - protein, 1174 aa, Oryza sativa
  Clone ID: PAT_MRT4530_85949C.1.pep
MVKTRNDPRDSNDASGSEEQIDGAHTSGASSNIPSPLPENPTVTQMMTMMMQQMQQHYHQMLQQAQQNQQFGPPPSHLSKLLDFLRIKPPTFSSTTNPMEANDWLRAIEKKLNLLQCNDQEKVAFATHQLQGPASTWWDNYVVTRPDATEVTWAEFCQSFRKAQIPEGIMAQRKREFRALQQGTMSVTEYLHEFNRLARYAPEDVRTDAEKQEKFLFGLDDELTNQLISGVYEDFEKLVDKAICQEEQHNKMDRKRKATQFRAPQGNNQKPRFMTGQQAQLDLPAVLAQSEQLKKESAGKPGPCFSCGKHGHFAGKCPKLKRAGPRFIQARVNHASAEEAQAAPEVVLGTFPVNSYLATVLFDSGASHSFISKRFAGTHGLSVVELKIPMRVHTPGNNMKTAHYCPSVTIEIKRSQFLSNLILLESKDLDVILGMDWLTRHKGVIDCASRTITLTNDKGEKITFRSPVSQKSVVSLNQAAIEDQTEIVKKSLKELEDIPKVQEYPKVFPEDLTTMPPKREIEFRIDLAPGTAPIYKRPYRMATNELAEVKKQVDEQLQKGYIRPSTSPWGAPVIFVEKKDKTKRMCVDYRALNEVTIKNKYPLPRIDDLFDQLKGAKVFSKIDLRSSYHQLRIQEEDLPKTAFTTRYGLFECTVMSFGLTNAPAFFMNLMNKVFMEFLDKFVVVFIDDILIYSKSEEQHEQHLCLVLEKLKEHQLYAKFSKCDFWLSEVKFLGHVITAQGVAVDPSNVESVTKWTPPKTISQIRSFLGLAGYYRQFIENFSKIARPMTQLLKKDEKFKWSAECNQSFEELKKKLVSAPVLILPDQMKDFQVYCDASRQGLGCVLMQEGRVVAYASRQLRPHETNYPTHDLELAAVVHALKIWRHYLIGNRCEVYTDHKSLKYIFTQPDLNLRQRRWLELIKDYDMGIHYHPGKANVVADALSRKSYCNLVCTEGICDKLQQDLEHLNLGIVEHGYVATLESRPTLVDQVRAAQEKVRTVRERLRIAQSRQKSYADNCRRELTFEAGDYVYLRVTPLRGVHRFQTKGKLAPRFVGPYRILERRGEVAYQLELLSNMAGIHDVFHVSQLKKCLRVPEEQASSKHIDIQEDLTYVEKPICILETSERRTRNKVIRFCKVQWSHHSDEEATWEREDELKAAHPHLFAGSSESRGRDSV

SEQ ID NO: 189439 - protein, 43 aa, Oryza sativa
  Clone ID: PAT_MRT4530_8594C.1.pep
HIHPVFQWGLRINQHHPTTALVKLKLEIKGQNNNWRGFFSLVF

SEQ ID NO: 189440 - protein, 65 aa, Oryza sativa
  Clone ID: PAT_MRT4530_85950C.1.pep
MLLVFPSLFFRSRRVLPRFLPLPCRSPELRRAPPPLGPPPSRAVIAFGFACSRAISSTSPLSKSA

SEQ ID NO: 189441 - protein, 142 aa, Oryza sativa
  unsure (1)..(142): unsure at all Xaa locations
  Clone ID: PAT_MRT4530_85951C.1.pep
ACARWCVWALFWARSFFFGVFFGXSGGFQRGGSCFMNNNPVWAYLVELYSFSNQGDGRRQHSSLSGGLTGLPYHTTKMVSQSVQRLATSLNNWQFSYGPAAAGQLDLQAGFNFFQGGPFRLGPDEEFENMGRPCNHPKRREE

SEQ ID NO: 189442 - protein, 53 aa, Oryza sativa
  Clone ID: PAT_MRT4530_85952C.1.pep
KITRELGMVAHAHFAWACIVAVFEIIVSNRLIVLKCCICYIVNYRHMDLISLV

SEQ ID NO: 189443 - protein, 645 aa, Oryza sativa
  Clone ID: PAT_MRT4530_85953C.1.pep
MSAQSKQLKKESAGKPRPCFNCGKHGHFAGKCPKLKRIGPRHKGVIDCASRTITLTNDKGEKITFRSPTKIAEKNPKKLEDIPIVQEYPEVFPEDLTTMPPKREIKFRIDLAPGTAPIYKRPYRMAANELAEVKKQVDEQLQKGYIRPSTSPWGAPVIFVEKKDKTKRMCVDYRALNEVTIKNKYPLPRIDDLFDQLKGAKLRIREEDIPKTAFTTRYGLFECTVMSFGLTNAPAFFMNLMNKVFMEFLDKFVVVFIDDILIYSKSEEEHEQHLCLVLEKLKENQLYAKFSKCDFWLSEVKFLGHVITAQGVVVDPSNMESVTKWTPPKTVSQIRSFLGLVGYYRRFIENFSKIARPMTQLLKKDEKLKWSAKCNQSFEELKKSNYPTHDLELAAVVHALKIWRHYLIGNRCEVYTDHKSLKYIFTQPDLNLRQRRWLELIKDYDMGIHYHPGKANVVADALSRKSYCNAVCTEGMCDKLQQDLEHLNLGIVEHGYVAALEARPTLVDQVRAAQVNDPEITELKKNMRVGKARDFHEDEHGTIWLGERLCVPDDKEFKDLILTEVHQTQYSIHPGSTKMYQDFKEKFWWVSMRREIAEFVALCDVCQTNVPSLGGNTLAPAGDERLEALVLTGWGEACVRLPVAT

SEQ ID NO: 189444 - protein, 1264 aa, Oryza sativa
  Clone ID: PAT_MRT4530_85954C.1.pep
MIVLQHRPYNPGNFNNDYNSGSHNSSEEHHHNSTPPPLMAPAQSDLPAVSTQSEQPQGSAGKPGPCFNCGKHGHFAGKCPKLKRAGPRFAGTHGLTVVELKIPMQVHTPRSDMKIAHYCPSVTIEIKRSPFLSNLILLESKDLDVILGMDWLTRHKGVIDCASRTITLTNNKGEKITFRSPMPHKSVATLNQAAIEEQTEIAKKSPKKLEDIPIVQEYPEVFPEDLTTMPPKREIEFRIDLAPRTAPIYKRPYRMAANELAELRIREEDIPKTAFTTRYGLFECTVISFGLTNASAFFMNLMTKVFMEFLDKFVVVFIDDILIYSKSEEEHEQHLRLVLEKLKEHQLYAKFMDPSNVESVTKWTPPKTVSHIRSFLRLAGYYRRFIENFSKIVRPMTQLLKKDEKFKWSTECNQSFEELKKSCPRGMTYARGSSPSSSVHTTYTGKRLAELYLSRIMCLHGVPKKIVSDRGSQFTSKFWQKLQEELGTRLNFIIAYHPQTDGQTERVNQILEDMLRACALDFGGAWDKSLPYAKFSYNNNYQDSLQMAPFETLYGRKCRTPLFWDQTGERQLFGTEVLTEAEEKDYPTKTEIVRCNSSGDLYPFPADDFSSAASARAFIATESTTDLWHHRLGHIGHEALTRLSQASVIPPPRGAAPVVMLANLTQFSTTIRNIQCDNGREFDNLTARTFFLTNGVHMRMSCPHTYPRTDFTAPSLTPISRPHSGRSGPAARVAPAGPTAEVARSTEPPTPPVGSAPVSSAPAGPASTAPSAELPAHESASPGPPSTGSAARRPPASPSSTSSMLWRPPGPPPGFPALPSRPPPLLAPPSGAPTRARSSRVPDAVIPNQLGVSPGVNTHGMTTRGKDDIHLPVTRYNLNATTLSPVPRTYRAALEEEFAALMPSCMVLYKRPSTALSHLDLKTTPGLIWCVASTSRWYSRFASYLLTLGFIEAKFDTSLFIYHHGSHLVYLLLYVDDIVLTASSAGLLRWAIQALQSEFSMKDLGSLHHFLGITVTGDSSGLLLSQHQYSIEVLERAGMSDCKPCSTPVDTNAKLSSSDGSPVVDPTDCHSLAGALHYLTFTRPDISYAVQQVCLHMHDPGIPIVPLSSGYSDWAGCPDTRKSTWSFKRQNTVSRSSDEAEYRVVANTVAETCWLCQLLHELTPPSRATLVYCDNVSAIYLSTNPVQHQRTKHVEIDLHFVHDRVAAGSVRVLHVPTTSQYADIFTKGLPTSIFVEFRSSLNVRCTNVATAGGVSCIYVFHVYL

SEQ ID NO: 189445 - protein, 76 aa, Oryza sativa
  Clone ID: PAT_MRT4530_85955C.1.pep
ANKMLVTITKVSCNDDRELEKFEKTPCIVHICSVYQIPFHVMYHISPNVGITDMCNLNPIMATVFWDLFLSSELEP

SEQ ID NO: 189446 - protein, 1309 aa, Oryza sativa
  Clone ID: PAT_MRT4530_85956C.1.pep
MVKTRNDLRDSNGASGSEEQTDEAHTSGAPGSSSSPPPENPTVTQMMTMMMQQMQQHYHQMLQQVQQNQQFGPPPSHVSKLLDFLRIQPPTFSSTTNPMEANDWLRAIEKKLNLLQCNDQEKVAFATHQLQGRQLDRKRKTAQISFPQGNNQKPRFMTGQLGGPSTLIVCQHRPYRPSNFNNYYNGGSHNNSKQHNHNSTPPPLMAPAQSDPPAVSAQSEQPKKGAVGKPGPCFNCGKHGHFASKCPKLNRTGPRFIQAHANHVSAMEAQAAPEVVLGTFPVNSYPATVLFDSGASHSFISKRFAGTHGLSVVELKIPMQVHTPGNDMRTAHYCPSVTIEIRRSPFLSNLILLESKDLDVVLGMDWLTRNKGVIDCASRTITLTNDKGEKITFRSPASQKSVASLNQAAIEGQTETVEKSPRKLEDIPIVQEYPEVFPEDLTTMPPKREIEFRIDLAPGTAPIYKRPYRMAANELAEVKKQVDEQLQKGYIRPSTSPWGAPVIFVEKKDKTKRMCVDYRALNEVTIKNKYPLPRIDDLFDQLKGAKVFSKIDLRSGYHQLRIREEDIPKTAFTTRYGLFECTVMSFGLTNAPAFFMNLMNKVFMEFLDKFVVVFIDDILIYSKSEEQHEQHLRLVLEKLKEHQLYAKFSKCDFWLSEVKFLGHVISAQGVAVDPSNVESVTKWTPPKTVSQIRSFLGLAGYYRRFIENFSKIAKPMTQLLKKDEKFKWSAECNQSFEELKKKLVSAPVLILPDQTKDFQVYCDASRQGLGCKANVVADALSRKSYCNALCTEDMCGKLQQDLEHLNLGIVEHGYVAALEARPTLVDQVRAAQVNDPEIAELKKNMRVGKARDFHEDEHGTIWLGERLCVPDDKELKDLILTEAHQTQYSIHPGSTKMYQDLKEKFWWVSMRKEIAEFVALCDVCQRVKAEHQRPAGLLQPLQIPEWKWEEIGMDFITGLPRTSSGHDSIWVVMDRLTKVAHFIPVHTTYTGKRLAELYLARIMCLHGVPKKIVSDRGSQFTSKFWQKLQEELGTRLNFSTAYHPQTDGQTERVNQILEDMLRACALDFGGAWDKSLPYAEFSYNNSYQSSLQMAPFEALYGRKCRTPLFWNQTGERQLFGTEVLTEAEEKVRTVRERLRIAQSRQKSYADNRRRELTFEAGDYVYLRVTPLRGVHRFQTKGKLAPRFVGPYRILERRGEVAYQLELPSNMVGIHDVFHVSQLKKCLRVPEEQASSEHIDIQEDLTYVEKPIRILETSERRTRNKVIRFCKVQWSHHSEEEATWEREDELKAAHPHLFANSSESRGQDSV

SEQ ID NO: 189447 - protein, 1244 aa, Oryza sativa
  Clone ID: PAT_MRT4530_85957C.1.pep
MEANDWLRAIEKKLNLLQCNDQEKVAFATHQLQGPASAWWDNYVVTRPDATKVTWVEFCQNFRKAQIPEGIVAQQKREFRALQQGTRTVTEYLHEFNRLARYAPEDVRTDAEKQEKFLFGLDDELTNQLISGVYEDFEKLVDKAIRQEEQRNKMDRKRKAAQISFPQGNNQKPRFMTGQLGGPSTLIVCQHRPYHPSNFNNDYNGGSHNNSKQHNHNSTPPLLMAPAQSDLPAVSAQSEQPKKGAVGKPRPCFNCGKHGHFAGKCPKLNRTGPRFIQAHANHVSAEEAQAAPEVVLGTFPVNSYPATVLFDSGASHSFISKRFAGTHGLSVVELKIPMQVHTPGNDMRTAHYYPSVTIEIKRSPFLSNLILLESKDLDVILGMDWLTRNKGVIDCASRTITLTNDKGEKITFRSPASQKSVASLNQAAIEGQTETVEKSPRKLEDIPIVQEYPEVFPEDLTTMPPKREIEFRIDLAPGTAPIYKRPYRMTANELAEVKKQVDEQLQKGYIRPSTSPWGAPVIFVEKKDKTKRMCVDYRALNEVTIKNKYPLPRIDDLFDQLKGAKVFSKIDLRSGYHQLRIREEDIPKTAFTTRYGLFECTVMSFGLTNEPAFFMNLMNKVFMEFLDKFVVVFIDDILIYSKSEEEHEQHLRLVLEKLKEHQLYAKFSKCDFWLSEVKFLGHIISAQGVAVDPSNVESVTKWTPLKTVSQIRSFLGLAGYYRRFIENFSKIARPMTQLLKKDEKFKWSAECNQSFEELKKRLVSAPVLILPDQTKDFQVYYDASRQGLGCVLMQEGRVVAYASRQLRPHETNYPTHDLELAAVVHALKIWRHYLIGNRCEVYTDHKSLKYIFTQPDLNLRQRRWLELIKDYDMGIHYHPDKANVVADALSRKSYCNALCTEDMCGKLQQDLEHLNLGIVEHGTKMYQDLKEKFWWASMRREIAGFVALCDVCRRVKAEHQRPAGLLQPLQIPEWKWEEIGMDFITGLPRTSSGHDSIWVVVDRLTKVAHFIPVHTTYTGKSYQASLQMAPFKALYGRKCRTPIFWDQIGERQLFGTEVLTEAEEKVRTVRERLRIAQSRQKSYADNRRRELTFEAGDYVYLRVTPLRGVHRFQTKGKLAPRFVGPYRILERRGEVAYQLELPSNMVGIHDVFHVSQLKKCLRVPEEQASSEHIDIQEDLTYVEKPICILETSERWTRNKVIRFCKVQWSHHSEEEATWEREDELKAAHPHLFASSSESRGRDSV

SEQ ID NO: 189448 - protein, 1626 aa, Oryza sativa
  Clone ID: PAT_MRT4530_85958C.1.pep
MVKTRNDPRDSNDASGSEEQTDGAHVSGASGSRSSPPPENPTVTQMMTMMMQQMQQHYHQMLQQAQQNQQFGPPPSHVSKLLDFLRIQPPTFSSTTNPMEANDWLRAIEKKLNLLQCNDQEKVAFATHQLQGPASAWWDNYVATRLDATEVTWAEFCQSFRKAQIPEGIMAQQKREFRALQQGTMSVTEYLHEFNRLARYAPEDVRTDAEKQEKFLFGLDDELTNQLISGVYEDFEKLVDKAIRQDEQRNKMDRKRKAAQISFPQGNNQKPRFMTGQLGGPSTLIVCQHRPYHPSNFDNDYNGGSHNNKQPKKGAVGKPGPCFNCGKHGHFAGKCPKLNRTGPRFIQARANHVSAEEAQAAPEVVLGTFPVNSYPATVLFDSGASHSFISKRFAGTHGLSVVELKIPMQVHTLGNDMRTAHYCPSVTIEIKRSPFLSNLILLESKDLDVILGMDWLTRNKGVIDCASRTITLTNDKGEKITFRSPASQKSVASLNQAAIEGQTETVEKSPRKLEDIPIVQEYPEVFPEDLTTMPPKREIEFRIDLAPGTAPIYKRPYRMAANELAEVKKQVDEQLQKGYIRPSTSPWGAPVIFVEKKDKTKRMCVDYRALNEVTIKNKYPLPRIDDLFDQLKGAKVFSKIDLRSGYHQLRIREEDIPKTAFTTRYGLFECTVMSFGLINAPAFFMNLMNKVFMEFLDKFVVVFIDDILVYSKSEEEHEQHLRLVLEKLKEHQLYAKFSKCDFWLSEVKFLGHVISAQGVAVDPSNVESVTKWTPPKTVSQIRSFLGLAGYYRRFIENFSKIARPMTQLLKKDEKFKWSAECNQSFEELKKKLVSAPVLILPDQTKDFQVYCDASRQGLGLVHALKIWRHYLIGNRCEVYTDHKSLKYIFTQPDLNLRQRRWLELIKDYDMGIHYHPGKANVVADALSRKSYCNALCTEDMCGKLQQDLEHLNLGIVEHGYVAALEARPTLVDQVRAAQVNDPEIAELKKNMRVGKARDFHEDENGTIWLGERLCVPDDKELKDLILTEAHQTQYSIHPGSTKMYQDLKEKFWWVSMRREIAEFVALCDVCQRVKAEHQRPAGLLQPLQIPEWKWEEIGMDFITGLPRTSSEHIDIQEDLTYVEKPICILETSERRTRNKPTLDAISPGQELAAGDKLVSSNGRFALGFFQTDSNKSSSNSTPNIYLGIWFNTVPKFTPVWVANGENPVADLASCKLLVSSDGNLAIVATTHAKNSSMVWSSKANIPTNTTHAVLLDDGNLVLRSTSTTNASSTILWQSFDHPTDTVLQGGKIGWNNATGVNRRLVSRKNTVDQAPGMYSFELLGHNGPTSMVSTFNSSNPYWSSGDWNGRYFSNIPETVGQTWLSLNFTSNEQEKYIEYAIADPTVLSRTILDVSGQLKALVWFEGSRDWQTIFTAPKSQCDVYAFCGPFTVCNDITFPSCTCMKGFSVQSPEDWELDDRTGGCVRNTPLLCNSNKTAAGTADKFYPMTSVQLPDKAQSIGAATSADECAAACLSSCSCTAYSYGEGGCSVWHDKLLNVRQQGNGVLYLRLSAKEVLESRRNNRWGVILGASIGASTAALGEKSREFPTFSTYDSCSKIFSSSGNSSKLELPKTEEDGGTEARECK

SEQ ID NO: 189449 - protein, 45 aa, Oryza sativa
  unsure (1)..(45): unsure at all Xaa locations
  Clone ID: PAT_MRT4530_85959C.1.pep
VPGHPSVPVGRPRHGPAXGPGPTPCLGQAKMPCRGPGLRASGFMA

SEQ ID NO: 189450 - protein, 77 aa, Oryza sativa
  Clone ID: PAT_MRT4530_8595C.1.pep
LGKTPRNPKPQGQIHLIKHEDSVKQKPAKIKKQEVVAQNGVHGSFNWGVPFHHQIDIIHPNKQKHSGTISPKKSRPI

SEQ ID NO: 189451 - protein, 134 aa, Oryza sativa
  unsure (1)..(134): unsure at all Xaa locations
  Clone ID: PAT_MRT4530_85960C.1.pep
LVQHPCTIMVTITIITITMVMKTAGIRLRLRLQYITLCMNPDMELHLHLGVHMVLTSQRIKLMXCQLLSLCPLFLLLMLILQVNIHQEEILLDCRLWPHAVRGTLLTVRPGKCYAWASNWALLVEAEGGDVIVR

SEQ ID NO: 189452 - protein, 343 aa, Oryza sativa
  Clone ID: PAT_MRT4530_85961C.1.pep
HRPYYPSNFNNDYNGGSHYRSEQGNDNSTPHPLMAPAQSELPAVSAQPKQLKKESARKPGPYFNYGKYDHFAGKCPKLKRARPRFVQARVNHASAEEAQAAPEVMLGTFPVNSHPATVLFDSGASYSFISKKFAGTHGLSVVELKIPMRVHTPGDDMNTAHYCPSIHKGVIDYASRTITLTNDKGEKITFLSPVSQESVASLNQAAIEDQTEIVKKSLKELEDIPIVQEYTEVFPEDLSTMPLKREIEFRIDLAPGTALIYKSPYRMAANELAKVKKQVDEQLQKGYIRSSTSPWGAPVIFVEKKDKTKRMCVDYRARNEVTIKNKYPLPRIDDLFDQLKEAK

SEQ ID NO: 189453 - protein, 108 aa, Oryza sativa
  Clone ID: PAT_MRT4530_85962C.1.pep
ISKTALAKHGYHSIAFCSTRVIQEGLARQAIICTESSAPGFIAVGSHFERVWSIVVALKVEEAGRCHQQQQEPHTVGCSQRASRKGMLPQLRPRMNIGLSYVHGQKVS

SEQ ID NO: 189454 - protein, 471 aa, Oryza sativa
  unsure (1)..(471): unsure at all Xaa locations
  Clone ID: PAT_MRT4530_85963C.1.pep
LSNVEKPVWHLLFTEIADIVASFRLHKMVPELNGNASKLELDIYEEIGIPNSTKPHATFNFTLNFPIYKVQDRIDELKDQMKTGLLLNSYENLYIKLANLNGSTVDPPTIVETSIFLEVGNHQPSVPRMKQLAQTITNSSSGNLVGVVLKHLVQHPCTIMVTITIITITMVMKTAGIRLRLRLQYITLCMNPDMELHLHLGVHMFFQNHLCPLFLLLMLILQVNIHQEEILLDCRLWPLHLIHFGGLFLISLLLNRTRHGSGGCAASELRLAQIGEDDGIGASPLPPPSSPLLFSGDHRLIAMPSSYLMSRRFSYRRLKKLPTAAVAAPPDVPQQLQEQYYAAITAAAAAAAQHGGGGGIGRRRRRRMRPRLRISRLARVLRRKAAAVGGAVRASVAKVVRRLKEGSPYVGDLFAGNYMFMQVTPSPTMVXAAGLAKNGVVPYYHHGIIGGKNSKLGTTCSPSVMYKVKFN

SEQ ID NO: 189455 - protein, 1276 aa, Oryza sativa
  unsure (1)..(1276): unsure at all Xaa locations
  Clone ID: PAT_MRT4530_85964C.1.pep
MVKTRNDPRDSNDASGSEEQTDGAHTSGASGSRSSPPPENPTVAQMMTMMMQQMQQHYHQMLQQAQQNQQSDFLRIQPPTFSSTTNPMEANDWLRAIEKKLNLLQCNDQEKVAFATHQLQGPASAWWDNYVVTRPDATEVTWAKFCQSFRKAQIPEGIMAQKKREFRALHQGTRTVTEYLHEFNRPARYAPEDVRTDAEKQEKFLFGPDDELTNQLISGVYEDFEKLVDKAIRGPSTLIVCQHRPYHPSNFNNDYNGGSHNNSKQHNHNSTPPPLMAPAQSDPPAGSAQSEQPKKGAVGKPGPCFNCGKHGHFAGKCPKLNRAGPRFIQARANHVSVEEAQAAPEVVLGTFPVNSYPATVLFDSEIKRSPFLSNLILLESKDLDVILGMEWLTRHKGVIDCASRTITLTNDKGEKITFRSPASQKSVASLNQAAIEGQTETVEKSPRKLEDIPIVQEYPEVFPEDLTTMPPNREIEFRIDLAPGTAPIYKRPYRMAANELAEVKKQVDEQLQKGYIRPSTSPWGAPVIFVEKKDKTKRMSVDYCALNEVTIKNKYPLPRIDDLFDLLKGAKVFSKIDLRSGYHQLRIREEDIPKTAFTTRCGLFECTVMSFGLTNAPAFFMNLMNKVFMEFLDKFVMVFIDDILIYSKSEEEHEQHLRLVLEKLKEHQLYAKFSKCDFWLSEDKFLGHVITAQGVAVDPSNVESVTKWTPPKTVSQIRSFLGLAGYYRRFIENFSKIARPMTQLLKKDEKFKXKDFQVYCDASRQGLGSALSYXNRCEVYTDHKSLKYIFTQPDLNLRQRSWLELIKDYDMGIHYHPGKANVVADALSRKSYCNALCTEGMCGKLQQDLEHLNLGIVQHGYVAALEARPTLVDQVRAAQVNDPEIAELKKNMRVGKARDFHEDEHGTIWLGERLCVPDDKELKDLILTEAHQTQYSIHPGSTKMYQDLKEKFWWASMRREIAGFVALCDVCQRVKAEHQRPIGLLQPLQIPEWKWEEIGMDFITGLPRTLSGHDSIWVVVDRLTKVAHFIPMHTTYTGKRLAKLYLSRIMCLHGVPKKIVSDRGTLYGRKCRTPLFWDQTGERQLFGTEVLTKAEEKVRTVRERLRIAQSRQKSYADNRQRELTFEVGDYVYLRVTPLRGVHRFQTKGKLAPRFVGPYRILERRGEVAYQLELPSNMVGIHDVFHVSQLKKCLRVPEEQADSEHIDIQEDLTYVEKPVRILETSERRTRNKVIRFCKVQWSHHSQEEATWEREDELKAAHPHLFASSSESRGRDSV

SEQ ID NO: 189456 - protein, 358 aa, Oryza sativa
  Clone ID: PAT_MRT4530_85965C.1.pep
MGKEAVGEGQHQQQRPPDGAGGGGGGRGGRGGGGGRGGSGRLGWWWCCCCGVGGVVRLKCVAALVLGVAVLLSAVFWLPPFARRGRGSEGPDPGAGFDADIVASFRLHKMVPELNGNASKLELDIYEEIGIPNSTKPHATFNFTLNFPIYKVQDRIDELKDQMKTGLLLNSYENLYIKLANLNGSTVDPPTIVETSIFLEVGNHQPSVPRMKQLAQTITNSSSGNLVGVVLKHLVQHPCTIMVTITIITITMVMKTAGIRLRLRLQYITLCMNPDMELHLHLGVHMFFQNHLCPLFLLLMLILQVNIHQEEILLDCRLWPLHLIHFGGLFLISLLLNRTRLLAERLQSHFGLKRNPAR

SEQ ID NO: 189457 - protein, 70 aa, Oryza sativa
  unsure (1)..(70): unsure at all Xaa locations
  Clone ID: PAT_MRT4530_85966C.1.pep
XACCAHHRGSMRPPVGLQVXTLISTNIYSPSSHVQHRGISMHXVTYYTKTLGDNTTTHQISPAIFLGLFC

SEQ ID NO: 189458 - protein, 373 aa, Oryza sativa
  Clone ID: PAT_MRT4530_85967C.1.pep
MSFAGVSLVRDGRLQSPSSSAITSGATSGYYLLVVEGYSRTKDTVPNGDFIRSRPFRVGGYRWVIDYYPNGESSDDADSISVSLQLDQDSERPFMAHYEFSFIDETERQKSTHICSEALFDFSDDNRWGYTNFIRREELEKSKHLKDDCFTIRCDIILKKDGSNTTGDDVAAPLVAVPPSDMHRQFTDLLLTKVGADVTFQVGGETFAAHRCVLAARSTVFMVELFGPMKEGATTASVHISEMVPEAFKAMLAFIYNDTPPPETEEDEDGKVAMWQHLLVAADRYDLPRLKLICEEKLCGHIGVGTATTILLLADKHHCRGLKEACLEFLSSPANLEEVMEHGGLEDVVGTCPSVLVELIAKLALLRTQRDYK

SEQ ID NO: 189459 - protein, 37 aa, Oryza sativa
  Clone ID: PAT_MRT4530_85968C.1.pep
SQRSFAVNYPFRTLMRTRQRIIDFPTAYEFVGLVGRH

SEQ ID NO: 189460 - protein, 58 aa, Oryza sativa
  unsure (1)..(58): unsure at all Xaa locations
  Clone ID: PAT_MRT4530_85969C.1.pep
FFFFFFLEKKKXDYVRMRHHLGHVGHVLSPPRYGLSPGPSPKPQLISFQTFKAAHAIQ

SEQ ID NO: 189461 - protein, 66 aa, Oryza sativa
  Clone ID: PAT_MRT4530_8596C.1.pep
SFLSPPATQPWGCHHLGTGGIRGRTKTGWLLLCAHLWVRVLDYLTGLRYMSSPLGCEEHCKPEDFD

SEQ ID NO: 189462 - protein, 142 aa, Oryza sativa
  Clone ID: PAT_MRT4530_85970C.1.pep
MAYSKIAPLLALTILLFAAAAHGCAPYCPGGAPPVIPTPPVVVPTPPSHHHHGGHGHGRCPIDALKLRVCANVLNGLVGVKIGAGPDDCCPLLSGLADLDAAVCLCTAIKANVLGIINLNIPVDLSLILNNCGKICPSDFTC

SEQ ID NO: 189463 - protein, 124 aa, Oryza sativa
  Clone ID: PAT_MRT4530_85971C.1.pep
FSHQNFCSLSRILLSANISDGSSLNTKEHMNGLSCLGGVHNPLIRNGSILRSGLMNLTCKQLTTECTCCNVGSLSFNFYKAGSSILELYTSVCKVVKSLEKKTSIGDTKLYSTIHSALCHVLTI

SEQ ID NO: 189464 - protein, 105 aa, Oryza sativa
  Clone ID: PAT_MRT4530_85972C.1.pep
SFSFLAFSLELFNCSLGFSSFFCPFLLFTDPLEVGRRMAMKNNSNSRLVGAGAGERIAYGAGVKGAFIDIEIIIERAGLRAASALCKLRACQTIGALPPPLSFLN

SEQ ID NO: 189465 - protein, 256 aa, Oryza sativa
  Clone ID: PAT_MRT4530_85973C.1.pep
MDSSAASAAAAAAAPVVLVTNDDGIDAPGLRFLVGQLVAARRYRVLVCAPDTIYSGTVGGAREAFLYGIPSLAMSYDWVASQSSVNDLKVAAEVVMPLINNVMAEIKNGTYPQGSFLNIDIPTDAAHHKGYKITKQGRYMARIGWEQTVYKKPAVESYQTANMDVDSEKDSEKLADIQAYLRCAPYSLCCTKSLRSSTSERAPCSSFTLLASRTSAAAVAASAVDTAAPPPLSDVAAPPQPSTSPQNPSGHSAAAD

SEQ ID NO: 189466 - protein, 87 aa, Oryza sativa
  Clone ID: PAT_MRT4530_85974C.1.pep
GAFCEQILSMRFSRVLLSMVKVGPYPEEVQKAPEEWLREFRENRHKWMEEGILHSSVLSPYDQASTAAEGKPAIARDYKRKYTGKYV

SEQ ID NO: 189467 - protein, 312 aa, Oryza sativa
  Clone ID: PAT_MRT4530_85975C.1.pep
MDSSAASAAAAAAAPVVLVTNDDGIDAPGLRFLVGQLVAARRYRVLVCAPDTDRSGVSHSITWRPALRCKRVDIDGATAFAASGTPADCASLGISGKLFDGLVPDLVVSGINVGNNCGCHVIYSGTVGGAREAFLYGIPSLAMSYDWVASQSSVNDLKVAAEVVMPLINNVMAEIKNGTYPQGSFLNIDIPTDAAHHKGYKITKQGRYMARIGWEQTVYKKPAVESYQTANMDVDSEKDSEVDTSSENDLLFKRVLVRRSYDEEEGDDIDHKCLVDGYITVTPLGALSRAEADVIPYYKACLSRDQDTFVAH

SEQ ID NO: 189468 - protein, 121 aa, Oryza sativa
  unsure (1)..(121): unsure at all Xaa locations
  Clone ID: PAT_MRT4530_85976C.1.pep
YETVKNSYSSNNYYKKKGGEQIQTREKLLIHIYIYCHKQSRGTVLCRYYACEFLRVNGKXRVNAEDLPRIEYQTSFDDTCITNVQRDLCHFIHRECCHIKGXFFDPESILVGGPPACLRRL

SEQ ID NO: 189469 - protein, 162 aa, Oryza sativa
  Clone ID: PAT_MRT4530_85977C.1.pep
MAKCFEVLCLSQQQQQAKLSYSVSSPNQNNSNSKPSFHFTSKSSPSQVAAAPATAPPKSPPLERTTIANSTKSFSVDPTSNSCASLSRCAPYSLCCTKSLRSSTSERAPCSSFTLLASRTSAAAVAASAVDTAAPPPLSDVAAPPQLSTSPQNRSGHSAAAD

SEQ ID NO: 189470 - protein, 168 aa, Oryza sativa
  Clone ID: PAT_MRT4530_85978C.1.pep
FAFYSPGEAVQDHGGLPYQVCGYLNLFSDGVHNFTDGMALGSAFPLHGCVGGWSSTLFLLAHELSQEVGDFDFGILVRSGFTVTKALFFNFLSALVALAGTALALSLGKDPGHSSLIEGFTAGGFIYIAVAGVLPEMNDQKTTVKSSMIQLVSLTMGMLVALGISLVE

SEQ ID NO: 189471 - protein, 104 aa, Oryza sativa
  Clone ID: PAT_MRT4530_85979C.1.pep
KVLYIAITGKKKPSTDYLPAKLKVEANHLIAAPWQTPESNNRGAGVSPCCSPIDALPFHGLEDQCGSCTGKMKKYTSNKAFIESKTAILSHVIHLSLDACRASP

SEQ ID NO: 189472 - protein, 108 aa, Oryza sativa
  unsure (1)..(108): unsure at all Xaa locations
  Clone ID: PAT_MRT4530_8597C.1.pep
MQLNPKARTRRNKTKVKGWRCAEIVLNVTLSIRGNHHEAHQPKPTTFAASYCRIRLNRLTLSDSNSAGXAVADSDFSQFLLCFRDTLHLXFCFDLIFFSDADITKFGR

SEQ ID NO: 189473 - protein, 120 aa, Oryza sativa
  Clone ID: PAT_MRT4530_85980C.1.pep
EVYGFVGSITTVVATVIFLVWAYVPESWLQSVGISYYPSRYWALAVPTYVMVTIVLMLGFYIGLNFISTPSPASLNTVFDEFSRDPLSLECTLEDEKPIEPISDIGIDRINDIMFKNNAA

SEQ ID NO: 189474 - protein, 63 aa, Oryza sativa
  unsure (1)..(63): unsure at all Xaa locations
  Clone ID: PAT_MRT4530_85981C.1.pep
KWKNYLDLNGEXLNKHYPKNSXRIKVVSEWSFMRXSCIIHCSRLNTGLIYPEISERQGQLSSY

SEQ ID NO: 189475 - protein, 73 aa, Oryza sativa
  Clone ID: PAT_MRT4530_85982C.1.pep
VNPRPLQEKPSTTSASTSKDHSSKDTVQQGRPCLISSHPLPKKLWQEPRMQAQCAEAEEDSRKRILLLAGHRM

SEQ ID NO: 189476 - protein, 396 aa, Oryza sativa
  Clone ID: PAT_MRT4530_85983C.1.pep
MASSPSAVVLQAALDGDLHLLCEMAKKLDLRGFKDMNGRNALHLAASYGHLEICKFLVEESGLDVNSGSHRGACTSMISRALGDINVLIYLLDHGGDPAIPDVGGLLSKGVPVEPLNFRVVRLYLSASEDRVHPMNVRVAQRADVSGVVNHIFSPLMMACCGHSLKCVKLLVEAGADVNGNSTNGPTPLTEAVDDSLTDVVKFLVGAGADPNIPDEQEGRIPIMVAAARGQRELVEILFPRTKPIPCLPDWNVDGIIRTMRTTRIEPQVCSPVEEQVSDAKSKGKEAFAKGDYLTAIYFYTLAMDKSPLDATLFANRSLCWLRQREGDRALLDAQQCRMLRPGWSKAWYREGAALSFMKDYKGAVDAFGEALKLDPMSDEVKNALREAIECLKRAA

SEQ ID NO: 189477 - protein, 66 aa, Oryza sativa
  Clone ID: PAT_MRT4530_85984C.1.pep
PIVPTTGAFTVHANFRCQSWFHEGVLTSNTFKLYGSRLNFRNVPRRSEGLRSKKKAWVAPPGNSGP

SEQ ID NO: 189478 - protein, 135 aa, Oryza sativa
  Clone ID: PAT_MRT4530_85985C.1.pep
PAWLPIDVPLGAGIPSTRSGGRSPGSPSMSGGGRSTGSPSTRGRAQGSPSTCGGGRSPGSPSTHGRGRLPASQSMRSGGRSPGTSSTLGHGRSPGSPSTHRRPANYAAAWAQPAAGCDPRPASWCYLPLRRNHLP

SEQ ID NO: 189479 - protein, 126 aa, Oryza sativa
  unsure (1)..(126): unsure at all Xaa locations
  Clone ID: PAT_MRT4530_85986C.1.pep
GVLLTTAHLRRRRRRDTTEDRPATAAAKCTRRRRYGARERTREGPNERGRRGDALYSLGLKRSDSKREESIRENQNSVLEINSKTSLIRTRYTTICSKTWGXKIEENERIKTPQKSGRKEAGLERI

SEQ ID NO: 189480 - protein, 95 aa, Oryza sativa
  Clone ID: PAT_MRT4530_85987C.1.pep
FVFFFFWFFFFFFFFFFFFFFFFFLETKGEPQGFCQMEKTIAQKKGGNQKMGGHHKKRLGFNQQKGADDVSMTQERVRPPRPGGPKFGAPPIRGG

SEQ ID NO: 189481 - protein, 262 aa, Oryza sativa
  unsure (1)..(262): unsure at all Xaa locations
  Clone ID: PAT_MRT4530_85988C.1.pep
MSSPSPTPPASANRTTQAPTSANPPQSPPAPPDRPPQPPASANPPQSPPAPPDRPPQPPSSANPPQSSPTTPPPSTPTTPSPSPPVIPPQPPPGNPTPPPPENPPPPPPGNPPSPPSVIPPTPAPAPRXPPPVDPPMPPPVFXPPPPSPPFSPPASPVIAPVPAPGPAPTPNPVPSPNPRPNPQFPPPSSSSSGVPSPPSSVSPSPLSPVNPSPPPPSRPRPSATPSSPSPPPPSPPPPQAVEAPTTSPSPFLGNKFLAFAL

SEQ ID NO: 189482 - protein, 285 aa, Oryza sativa
  Clone ID: PAT_MRT4530_85989C.1.pep
MSSPSPTPPAPANRPPQAPPSANPPQSPPAPPDRPPQPPASANPPQSPPAPPDRPPQPPPSANPPQSSPTTPPPSTPTTPPPSPPVIPPQPPPGNPPPPPPENPPPPPPGNPPSPPPVIPPTPAPAPRPPPPVDPPMPPPVFPPPPPPPPFPPPAPPVIAPVPAPGPAPTPNPVPSPNPRPNPQFPPPPPPPPGVPSPPPPVSPPPLPPVNPPPPPPSRPRPSATPSPPPPIASPPPPEVQNSPPPPPSPPPPQAVEAPNDVTLTFIIIQKQRDHSGCGRGCRRG

SEQ ID NO: 189483 - protein, 136 aa, Oryza sativa
  unsure (1)..(136): unsure at all Xaa locations
  Clone ID: PAT_MRT4530_8598C.1.pep
PGHGRPCSSETGTNRSTPVGTRKRVTYAXGGQCLTNVWWRLDPILSCESYVXLGFLGDRLIEPSSGWSPPACVSGSLDALRPSIGYSEYLDGSVAHCPRPVLWSLSWFAGAGAPVRRARDSGAPCGPFRVSRRGDT

SEQ ID NO: 189484 - protein, 102 aa, Oryza sativa
  unsure (1)..(102): unsure at all Xaa locations
  Clone ID: PAT_MRT4530_85990C.1.pep
FFFRTDRRCTXXIYYYLYTLLSRKECHRHGNSQHIGPVQHHHSQHNKFSITTSGLSQVAPSLNKTPHVHTSQQGTHTTAKPSTQLRPSIPPIHSPRQSGDNQ

SEQ ID NO: 189485 - protein, 114 aa, Oryza sativa
  Clone ID: PAT_MRT4530_85991C.1.pep
MADDDMGGDNAEAEQVWPVGGGHGGAVMGFVPAGTAVDALLLLLVRARRRVARLRPGCRRCVATPPRRPSLATPSRERQEGRRGIEKKKEERDWVTWPADILGTCGSHADLAAT

SEQ ID NO: 189486 - protein, 308 aa, Oryza sativa
  Clone ID: PAT_MRT4530_85992C.1.pep
MAARSSSRASSPTRPSHGDEQEGVAAGNEQQPSLTTGLGGRDLTRSWRQGGAGSVRLGCKQVAKGGAAGCGLVLVSTLLEHILQMEEIFMVDNTEMNMRQKCNVIGVGKRLTPTGPNPVHNEFQPPPPPPPPSPPNGGNVIGNGKRLTPTGPDPIHNEFQPPPPPPPPSPPNGGKVIGDGKRLTPTGPDPVHNKFQPPPPSPPNGGNVIGDGKRLTPTGPDPIHNEFQPPPPPPPPSPPNGANVIGDGKRLTPIGPDPIHNEFPPPPPSPPNGANVIGDGKRLTPTGPDPVHNEFQPPPPSPPNGMIA

SEQ ID NO: 189487 - protein, 63 aa, Oryza sativa
  Clone ID: PAT_MRT4530_85993C.1.pep
LKPCMYLLKISTILIFCGRMEGVITNSFTVIIDKKKKKKKEGAHYRGPAHARARMPRQLSYRV

SEQ ID NO: 189488 - protein, 232 aa, Oryza sativa
  Clone ID: PAT_MRT4530_85994C.1.pep
MPPRRKKGVAAKQKPPEPPAADAPLRDRLRWLNDQEYEHRSAAIKAIQAAEIESILSRLRLVESYISKEQQEGCALQYFQENLPNLSVVRNEEQNELELKREDWDKRLIGDHCDDKIFRASVSSLPNGGYVQFSGDSVRKSFIESMPFNFNDFLTFPCFNMFFNSRDLSTLDLTFGILVFFFFLPKLGYSPRIKMQSLVQVSCSIYLLSLCSWQSARVLLDADFIQVKSCIK

SEQ ID NO: 189489 - protein, 298 aa, Oryza sativa
  Clone ID: PAT_MRT4530_85995C.1.pep
MAAPGLDEVMAFLTDHGFAGAASALRDDVLARAASAAGDAGSDSDAALDPQLPPLRLPASTSGGGGAPAAPPASPGSSSDSASSSAFVSMRSSPSGWLYDDHLFHSKSELDDDNGEDKEEDKFVLGVHDGSGRIEMGVLSAGDDHRHEHVGNDGCEGCAELKHPADVVLECHLPRDSGEGDERSELSVVEKELQMLSSFGTRVDADAFTSPGLVHDITDNAKLDDSIEKNMKNSSDKYLKEGYSIEPFPESSVDDTFEFGDIGPLNTDAQNSTAAKAEEENPETNVDLALANFHREYE

SEQ ID NO: 189490 - protein, 149 aa, Oryza sativa
  Clone ID: PAT_MRT4530_85996C.1.pep
MMPSPSASNELMPHVAGSSCPSWTPSSPPPLGPSAPPESSAVTVEEILFHPNSQASAAPRSAAAEGIRLLLTLNLAPALKPPPSRAASAPRVATAATREVFRRTYKPLLLVTAANKTTFTKSCHVLAKDTPTMLRPPPSSARRDAADDT

SEQ ID NO: 189491 - protein, 246 aa, Oryza sativa
  Clone ID: PAT_MRT4530_85997C.1.pep
MSSSSSKLHLPADDSVLLLLTHSNLSTFSSDIRVSKQTSVEALKDKLWRKTGTSVAFMRLQLRDDTGAMIADLDHDDATLASYSPYDGYRLHIIDLDPSSITSGGWLEDTSLVEKYTISDEAYNNLDTNFRKFKEKMAFKNPTSDDKQQQSDKHMEELCANIKVGDRCEVEPGAKRGTVKFVGRAEALGRGFWVGVQYDEPLGKHDGMVKGIRFFECPQGHGAIVRPEKVKVGDYPERDPFEEEEI

SEQ ID NO: 189492 - protein, 68 aa, Oryza sativa
  Clone ID: PAT_MRT4530_85998C.1.pep
PQKGGFFGPKTVWVKKLNFFFLLKTTICFFWATRGFGFLKGAFSWFFVFLEKIWGLPWVWGKEPAQMV

SEQ ID NO: 189493 - protein, 828 aa, Oryza sativa
  Clone ID: PAT_MRT4530_85999C.1.pep
MKTLGPFEVSTVSEGRTGLGLGIIIGTCEVMSVSDKVMSSSIGNRIIGRQRWGRTGARVQPSLASGEWGGVDTEPVNNFRAIRPTTVDASRRGDAVVVVDEIGAPARRGKRRQRGEESGASNTGSGSEDGGRPRHVASGRGLHISWLCSLPCLDQGRLLASRLRLASLPSPNADATAYLTRRATRLRGAANRMAAPGLDEVMAFLTDHGFAGAASALRDDVLARAASAAGDAGSDSDAALDPQLPPLRLPASTSGGGGAPAAPPASPGSSSDSASSSAFVSMRSSPSGMLNPYGVWSPRHSDTSSSEMEFGTARQYDATDFFFQEGWLYDDHLFHSKSELDDDNGEDKEEDKFVLGVHDGSGRIEMGVLSAGDDHRHEHVGNDGCEGCAEVYTCSSPLCGCCGEGLKNGGLEVVKDSSSTVYGRYQIIDDQTEILDECGMDGFQLKHPADVVLECHLPRDSGEGDERSELSVVEKELQMLSSFGTRVDADAFTSPGLVHDITDNAKLDDSIEKNMKNSSDKYLKEGYSIEPFPESSVDDTFEFGDIGPLNTDAQNSTAAKAEEENPETNVDLALANFHREYEVFELRIVHRKNRTGFEVSKDFPIVINSVIAGRYYVTEYLGSAAFSKVVQAHDLQTGTDVCLKIIKNDKDFFDQSLDEIKLLKFVNKYDPLDEYHVLRLYDYFYHQKYNQESGGEAYFTLPRIQPENILIKSYSRCEIKVIDLGSSCFLTDNLCLYVQSRSYRAPEVILGLPYDQRIDIWSLGCILAELYTGEVLFPNEPVPIMLAQMIGIIGPIDMEMLALGEETQKYFTDDYDLFTKNEEKTNGK

SEQ ID NO: 189494 - protein, 311 aa, Oryza sativa
  unsure (1)..(311): unsure at all Xaa locations
  Clone ID: PAT_MRT4530_8599C.1.pep
AIGHSGIQVTYSRVRKLFAWLGLKLSICEFVEDCAICKHAEAKRVCYPGLLQLLPIPDHAWQIVSLDFIEGLLLSSGYDFILVVVDKFXSRYAHFISLAHPFXALDFVMAYLSYITSMLWTELFHLADTQLRMILVYHPQTDGQMEWVNQQXFVHACPKRWYRRIALTEFWYXTTNHWALGSSPFMVLYGHSSCYFGIRDIFSCTMSDLEEWMKECKVVSSLLRKHLHRAQXRMKHQPDLKCSQREFLPRDXGVFGDWRSVPFGQTSMAVRTNHKXFYHFCPFHVRENIGSVEYCLELPVDCAIHPMVHTS

SEQ ID NO: 189495 - protein, 550 aa, Oryza sativa
  Clone ID: PAT_MRT4530_859C.1.pep
MSLILSRRRLAAAVRRSGPAALASRWMHTPPFATVSPQEISGSSPAEVQNFVQGSWTTSGNWNWLVDPLNGEKFIKVAEVQEAEIKPFVESLSNCPKHGLHNPLKAPERYLMYGDISAKAANMLGQPVVSDFFAKLIQRVSPKSYQQALAEVQVSQKFLENFCGDQVRFLARSFAVPGNHLGQSSNGYRWPYGPVAIITPFNFPLEIPLLQLMGALYMGNKPVLKVDSKVSIVMDQMLRLLHACGMPAEDVDFINSDGITMNKLLLEANPKMTLFTGSSRIAEKLAADLKGKIKLEDAGFDWKILGPDVQEVDYIAWVCDQDAYACSGQKCSAQSILFMHKNWSSSGLLDKMKSLSERRKLEDLTIGPVLTVTTSSMIEHMKNLLKIPGSKVLFGGEPLENHSIPEIYGAFKPTAVFVPLSEILKSGNFELVTREIFGPFQVVTEYSDDELELVLEACERMNAHLTAAVVSNDPLFLQEVLGRSVNGTTYAGIRARTTGAPQNHWFGPAGDPRGAGIGTPEAIKLVWSCHREIIYDIGPLPKNRALPSAT

SEQ ID NO: 189496 - protein, 70 aa, Oryza sativa
  Clone ID: PAT_MRT4530_85C.1.pep
VVATVELDFPHGVAVGLDPHHYSHRGFDLPSSPPRLVGNRHLHKERLAVYRWHASFICSGNTMPIGLGDW

SEQ ID NO: 189497 - protein, 70 aa, Oryza sativa
  Clone ID: PAT_MRT4530_86000C.1.pep
FFPMSRGRLPLSSHSPHSSWGSTQPSPHINPHSVSIWAAQALLHIHHSITSRHRINRSCIQSSRTHSAPR

SEQ ID NO: 189498 - protein, 392 aa, Oryza sativa
  Clone ID: PAT_MRT4530_86001C.1.pep
MEKGDETLAYPAAAAGGQKTAPIGCFAGDDVAATTDGHPTKSYAAVAAEKTLPNGSVEEDEVTVTAAENPAKSYAAVVAEKTSPNGSVAEDEVTVTAAENRAKSYADVAAEKTYPNGNVEEDEVSVTAAVNPAKSYATVAAEKTVPDGSVAEDEVTVTAPVNPAKSYAAVAANAEIEDLRTTNHDLEEKLAAADREKKGRATEIDGLKDTSDKAKQNSVVFQYIASSSDAKVLALREELEDLQKLLQAEKDEFKADKRDSNQLAGKVGSERAVKMRLEEEVIAMKERARARAAAAAAAAAAEDERVAAPTPGTLQGARVAWPVMAGAAAVGAAAAAVAVVIFLRLKSLHIWMCPYIDLMHRKFCSAATAYGRFDEFFCGDELMMVECWMRIV

SEQ ID NO: 189499 - protein, 134 aa, Oryza sativa
  Clone ID: PAT_MRT4530_86002C.1.pep
MASETEPDAVVFEAPAHFRIYKSGKMDRLHRPPCLPAGVDEATGVASKDVVIDAGTGLSVRLYLPKIQEPSKKLPVLVFFHGGGFLIESADSSTYHNYVNPFAAAAGVDVVSVDYRLAPEHPLPAAYDDSWAGL

SEQ ID NO: 189500 - protein, 139 aa, Oryza sativa
  Clone ID: PAT_MRT4530_86003C.1.pep
MHGLLSDISSINTLMCILSLHHHIDNIRSHSASNQAVLTLELARAMVKWAAVMEMLLLTAAATAVAVVAAQCDPEQLSACVSPIFYGTAPSESCCSNLRAQQKEGCLCQYAKDPTYASYVNNTNARKTIAACGIPIPSC

SEQ ID NO: 189501 - protein, 60 aa, Oryza sativa
  Clone ID: PAT_MRT4530_86004C.1.pep
MGGEEAGGRRRVVRRTVGWRNPPTGIQRDTGDSALPTRSNSHPKIYTQIKTSDSSARPWR

SEQ ID NO: 189502 - protein, 45 aa, Oryza sativa
  Clone ID: PAT_MRT4530_86005C.1.pep
METGSKSATELADWRPRNMERRELGESSIEQQPVVDLKKWSLLLD

SEQ ID NO: 189503 - protein, 63 aa, Oryza sativa
  Clone ID: PAT_MRT4530_86006C.1.pep
MEEMLPLVLQRVDAPHQVGRRGGISSVRRCLEIRGEQAIFLVTAASTIGSVGGKAVWTSRCAS

SEQ ID NO: 189504 - protein, 80 aa, Oryza sativa
  Clone ID: PAT_MRT4530_86007C.1.pep
MEEMLPLVLQRVDAPHQVGRRGGISSVRRCLEIRGLCFVGVETVELFSRRLQPQAIFLVTAASTIGSVGGKAVWTSRCAS

SEQ ID NO: 189505 - protein, 95 aa, Oryza sativa
  Clone ID: PAT_MRT4530_86008C.1.pep
MAAEDNITCSGSGNGSSSNDDHAPPPPQQLAVARGRRRAEPPMRLSALYLMLFGATVIVGAAGVGAPVTPLPRLFAALVAWLVGCLSLLVPLPPP

SEQ ID NO: 189506 - protein, 696 aa, Oryza sativa
  Clone ID: PAT_MRT4530_86009C.1.pep
MSSKHRSAAAAAAPAAAPPSAVRTPRRLRRRPLKTASGSGGGGGGGGGRRSGPATPLLKWDVGNGAEKGGGGGEKAGGPSEKAAAARDVSVRRLAAGVWRLRPPEAVAGGAAAGSGERRRVHVGLEHIPRHLQVQLIKQNNLVHHQTLKNEISSPISVLERKSGELHKVPLHAATAVLPVTAMEKATKWEPESLEGMEAHDAYLIASQLNLLNEQQDATYVANLQMELQQARDRVSELETERRAAKKKLDHLFKKLAEEKAAWRSREHEKVRAILEDMKADLDHEKKNRRRLEMINLKLVNELKEAKMSAKQLLQEYDNERKARELTEEVCNELAREVEEDKAEIEALKHDSLKLREEVDEERKMLQMAEVWREERVQMKLVDAKLTLDAKYTQLSKLQQDVEAFIAACSCARGDIMVVEEAENIIQAIKSVRAQDIEFRYEPPAQSEDIFSIFEELRPSEEPVIKEIEPCYKNNSAMCESEIQEASPMTDIFLEKPTKVYSSKSPQNESDTEDGSSWETISHEDMQASSGSPDGSEPSVNKICDGSISWTSRNDFEYKEAEKLKDDSTDIYLTNMNQPKKKESALSKLWKSSRPKNNDVCKKDAVETINGRSSNVRLSVGTHSTIDSGIQEIGLSSPSIGQWSSPDSMSMQFNRGFKGCMEYPRTSQKHSLKSKLMEARMESQKVQLRQVLKQKI

SEQ ID NO: 189507 - protein, 69 aa, Oryza sativa
  Clone ID: PAT_MRT4530_8600C.1.pep
DVSHFFWIISNIKRRIQLVPSWLVRVEQWCCAYAHGQTQPVNSRASDVCDYTVHVIHSSIVELTFDHHW

SEQ ID NO: 189508 - protein, 207 aa, Oryza sativa
  Clone ID: PAT_MRT4530_86010C.1.pep
MDDRRRGADATWPPFPADTFLCTHPRGPFGLVEQQHYSGSIHPIQPSKTLLSLAALPSSGTVYKAYLQVQHLIPAKQRHWGSWVAEIRHPLLKTRIWLGTYGTAEDAARAYDEAARLMSGPAARTNFPLSSSGGNARSCLSPTLRARLEKCCGAGSSAQAQQGAVAGQDNDDAAAAAAAMGVDDGDEYVEEMIQELTFYGSIEIVQP

SEQ ID NO: 189509 - protein, 92 aa, Oryza sativa
  Clone ID: PAT_MRT4530_86011C.1.pep
PFLSQIETDGGKSVDLSNYAYIFMRWKEQYFVNVGVDCGLTIAGFYYVCFSCSDGSISGYYYDPNSSPFQKLELKCTNEKDSGFTFSSYELQ

SEQ ID NO: 189510 - protein, 96 aa, Oryza sativa
  Clone ID: PAT_MRT4530_86012C.1.pep
CRNRHEGRHRRRPHPRRRRHSPISTDPLTPAPHPTLYLPLWPSRLRSAPALNPAVAEGGSHTNMRYRGCSATTVFSAKIWNPVCKEWLMTLSSICL

SEQ ID NO: 189511 - protein, 226 aa, Oryza sativa
  Clone ID: PAT_MRT4530_86013C.1.pep
MPVRVVDTATPSSQPTSGQDANAGHPSPPSCSLLSAGRCYAGTQNVSTIQKEEAWKVNVRINDCDLEQGYLCGTMEAVNVPLADTPVVTFWEGEIVDAKNYTFFTGKWEASPEDDIRHWSKFPSFTPLLSQIETDGGKSVDFSNYAYIFMVLHHLTFHRWKEQYFVNVGVDCGLTIAGFYYVCFSCSDGSISGYYYDPNSSPFQKLELKCTNEKDSGFTFSSYELQ

SEQ ID NO: 189512 - protein, 63 aa, Oryza sativa
  unsure (1)..(63): unsure at all Xaa locations
  Clone ID: PAT_MRT4530_86014C.1.pep
ITASTPRPLPWRASFVAVLVARKTRLAFGPCXAPRSPFRDFCSLVRXLAPAPVFSLLPFSLLP

SEQ ID NO: 189513 - protein, 624 aa, Oryza sativa
  Clone ID: PAT_MRT4530_86015C.1.pep
MERRRKAMWLYPKVVGFNPPERWGHSACFFEGVVYVFGGCCGGLHFSDVLTLNLETMAWSSLATTGARPGTRDSHGAALVGHRMMVFGGTNGSKKVNDLHVLDLRTKEWTKPPCKGTPPSPRESHTVTACGGCDRLVVFGGSGEGEGNYLNDVHVLDVATMTWSSPEVKGDVVPAPRDSHGAVAVGSRLVVYGGDCGDRYHGEVDVLDMDAMAWSRFAVKGASPGVRAGHAAVGVGSKVYVIGGVGDKQYYSDAWILDVANRSWTQLEICGQQPQGRFSHSAVVLNTDIAIYGGCGEDERPLNELLILQLGSEHPNGRYNISMCKVLSNHWSQERRKFLRTENQRDPNMSNGELGPRSREAEIEQRNPFLRGLENGHVKRRRTGDVRLKETESEQEEHSLSLSQHSSPSQSDQEQNGAQKLSASPNGSISALQPFVHLNTNGTLRAAGGVSPRTLKTDQFLRTIAPQQRHEVQFLAAEPKLHHRPPTPPLIGAEVHGTIDGAFDSGYLMTAVVNGQLFRGVLFAPGPGVTAPRPTLHHPILMSSAIPPQQQQQRPVLAHAIPVHARPVPQATGFVLPDCSNHARQAFPASAAAAAAKIIKSEPERGGSDLHDVVLTLGGPGAGK

SEQ ID NO: 189514 - protein, 52 aa, Oryza sativa
  Clone ID: PAT_MRT4530_86016C.1.pep
FPLHSIPPFGRPPENSFEFNFCKRPPQGGYLTLYLQPCPGRVPHPLFSIVSG

SEQ ID NO: 189515 - protein, 746 aa, Oryza sativa
  Clone ID: PAT_MRT4530_86017C.1.pep
MENEWMHARLEKLRRSGRQCISAAEENGNINNACLCCICACSRMHVAAGGGHGGGADDGMVVDYRGNPVDKSKTGGWLGAGLILGTELAERVCVMGISMNLVTYLVGDLHLSNAKSANIVTNFMGTLNLLALVGGFLADAKLGRYLTIAISATIAATVRSRSRTHRTTHLRSSSRGAGISLRSAAMQGVSLLTVDTMVPGMRPPPCADARGAGAHLRCEPARGGQLAMLYAALYTVAAGAGGLKANVSGFGSDQFDGGDPREERAMVFFFNRFYFCISLGSLFAVTVLVYVQDNVGRGWGYGVSAVAMVLAVAVLVAGTPKYRYRRPEGSPLTVIGRVLATAWRKRRLPLPADAGELHGYHTSKVAYTDRLRVYVTRCALLIVQYCCCQPVTVKAEMDTSYREEAEDDNSVRPLANTARKSKSCMVLDEMNEWSKCLDRAAIMEADLAASPAKTNQTSAAPAATVTEVEEVKMVVKLLPIWSTCILFWTVYSQMTTFSVEQATRMDRHLRPGAAPGGFAIPAGSLSVFLFLSILLFTSLNERVLVPAARRLTRRPQGLTSLQRVGAGLVLATVAMATSALVEKKRRDAANDGGGGGMISAFWLVPQFFLVGAGEAFAYVGQLEFFIREAPERMKSMSTGLFLVTLSMGFFLSSFLVFAVDAATRGAWIRNDLDAGRLDLFYWMLAVLGVANFAVFLVFARRHEYKQPAGTAAVVVAPAAAKDGGAGEEKEMDDFVVVKEAVEGMDV

SEQ ID NO: 189516 - protein, 65 aa, Oryza sativa
  Clone ID: PAT_MRT4530_86018C.1.pep
EPEHGKSSFNSYMAHKYKPSTGQYSLEHTLLATYDLLILVLSIALEAHVEEATAAKGSTAAKQQN

SEQ ID NO: 189517 - protein, 30 aa, Oryza sativa
  Clone ID: PAT_MRT4530_86019C.1.pep
MSYKCGNCDCAYKSQCVKKGTSYGVFIVEA

SEQ ID NO: 189518 - protein, 412 aa, Oryza sativa
  unsure (1)..(412): unsure at all Xaa locations
  Clone ID: PAT_MRT4530_8601C.1.pep
AIGHSGIQVTYSRVRKLFAWLGLKLSICEFVEDCAICKHAEAKRVCYPGLLQLLPIPDHAWQIVSLDFIEGLLLSSGYDFILVVVDKFXSRYAHFISLAHPFXALDFVMAYLNNVYKLHGLSXSRSYITSMLWTELFHLADTQLRMILVYHPQTDGQMEWVNQQXFVHACPKRWYRRIALTEFWYXTTNHWALGSSPFMVLYGHSSCYFGIRDIFSCTMSDLEEWMKECKVVSSLLRKHLHRAQXRMKHQPDLKCSQREFLPRDXGVFGDWRSVPFGQTSMAVRTNHKXFYHFCPFHVRENIGSVEYCLELPVDCAIHPMVHTSXLSKATPSTSPALASLPVAGHLEELVPMQVLLRRRCNKKGSSCARTTQVSCFXSLSTETTWEDVVALHARFPXAPAWGQAAYKGEGML

SEQ ID NO: 189519 - protein, 436 aa, Oryza sativa
  Clone ID: PAT_MRT4530_86020C.1.pep
MCKFYICYICLLSCSVLHCIPGIFTEFANLPFHELFFGRSLKTSVSFPLLPLFACLKKDGAKNNSDEQLLYTTHLQILSFKRYEVSWVHRRAVGHSIPYRFLQGDFDIIGGASPIPEAEIVKVTLDVGAHFYDPKAIIIRLNHSKLAEAVCSWAGVPQERRQNVAEFFSSTLVQYWPNKADRKSQWSLIRGQLLQDLRLSEEVVEKLHKADQRFCGSADQVLARLRGTLFYDKSACKALDEISAFLKCLRIWSIEEHITIDVLMPPSECYYTDLFFQIYVKEGNPGSSSHEKLLAIGGRYDWLIEQAWDRTYKSKPPGAVGVSIALEKFLPNSPSSDIGFPRIEPSISVLVCSKGGGGLLNERMELVAELWEANIKEDPSLQEQYEYASDHDIKCLVFITEAGVSQTELVKLYFQSWLPFCEPRLRTVASVQGSRQ

SEQ ID NO: 189520 - protein, 44 aa, Oryza sativa
  Clone ID: PAT_MRT4530_86021C.1.pep
ISGLGYGCASGVINLESAIKQLSSLNLPSLCFKINIVLNCPCLL

SEQ ID NO: 189521 - protein, 167 aa, Oryza sativa
  Clone ID: PAT_MRT4530_86022C.1.pep
MVHGKLEVLLVCAKGLEDTDFLNDMDPYVILTCRTQEQKSSVAKGAGSEPEWNETFVFTVSDDVPQLNVKIMDSNAFSADDFVGEANIPLEPVFLEGSLPPAVHRVVKEEKYCGEIKVALTFTPAAETRHHHNHENEGTRTRGRVTAAGTDCLLLMSINERRSCLKN

SEQ ID NO: 189522 - protein, 66 aa, Oryza sativa
  Clone ID: PAT_MRT4530_86023C.1.pep
MDLTVGGQTVYGAVDVDLVYSWGIPRKGREAKRRKGKRRDAAGSRQQQQQWWCNNKGVSMNEMRCC

SEQ ID NO: 189523 - protein, 252 aa, Oryza sativa
  Clone ID: PAT_MRT4530_86024C.1.pep
MIRDQGRFCGFCPPRESRRPGHFTPHYDLLSSSQSTHAQAPPPPHLLGRSQQQHQQQKQMGGLSVIAPPAGDSASPAHRRARRAFLVSNYMILGAASGCGFLTLSLRLVPSVDGFLLILLHAITVAAAVAGCAVIAAPDPPRGRVYTTHMAGTVFVSILQGAAAVLTFSRTSDFLADGLKSYVREEDGAVILRMIGGLGVAIFCLEWIALALAFVLRYYAYVDRECGGNPLRRSAKVGGEDGAGTWPWPFQV

SEQ ID NO: 189524 - protein, 892 aa, Oryza sativa
  Clone ID: PAT_MRT4530_86025C.1.pep
MPPTPPLAALHRFLASPSPPPLPSLLTLHALAVTSGLSPRPDFAAKLVSAYSSAGLPALAALAFAASPCPDAFLWNSLLRSRHRASDFASTLSAHRRMRASGARPSRFTAPLVASAAAELGALPVGAAVHAYSVRFGLLEGDGSVAVASSLVYMYARCGSVRDAVRLFDEMPERDVVAWTAVISGCVCNGQCGEGLSYLVRMVRSAGDGGARPNSRTMESGLEACGVLGELSVGTCLHGFGVKAGVGHCPSVVSSLFSMYTKCDSTEDARILFPELPEKDLVSWTSLIGAYCRAGHAEKAVELFLGMEESGLQPDEVVISCLLAGLGNDAKVRGGKTFHAAIVRRNFGDSVLIGNALISMYAKCKQVDIAATVFRMLHQRDTDSWSSMVVAYCKAGLDLKCLELYREMQFRDKDEFEYDTNSLISIISSCSRLGRLRLGQSAHCYSIKHLAGENSSVANALISMYGRCGNFDVARKIFGMVKTKDVVTWSALISSYSHLGHSKDALLLYDQMLTEGVKPNSATLVSVISSCANLAALEHGELIHSHVKDVGLECDLSICTALVDMYMKCGQLGIARKMFDSMLERDVVTWNVMISGYGMHGEAIQALKLFSMMERGNVKPNSLTFLAILSACCHAGLVDKGRELFTRMEEYSLEPNLKHYACMVDLLGKSGHLQEAEDVVSAMPIEPDGGIWGTLLGACKMHDNFEMGLRVAKKAFASDPENDGYYILMSNSYGSAEKWNEIEKLRDMMKNHGVEKSIGWSTIDICGFMKNQLTQWQHSLFEQSEFRSSEDMCISFVSGIWSESMVNGLTEWGNEVVDSSEFRNKAQRLKVAAMLMFLRHSTEPGTSHVEGHISYQSYEVEWVIIPKSPHAFGATYPQRSELVALVALHWSK

SEQ ID NO: 189525 - protein, 225 aa, Oryza sativa
  unsure (1)..(225): unsure at all Xaa locations
  Clone ID: PAT_MRT4530_86026C.1.pep
RKIAKSTNYPPNYRGRPNYPPEPQNRTFFTPNYINWTNYPPRPNPRWFXSTWRTRGSPWEGRAGGGEAAAAGCGGGGEAAAEGRRARRQRWRGGCGGTTSPPSRLAPPVAPSRTRRRRSAPSCRSRPPLRCPASPPPPRLLRHNRSPRRRTRLSTPSPPPPSPPWPRHAATSPPLPPPFLASASSAASPRRCLLRRTRCLRGHRLKEKKAATPPSAVAAMPPSTV

SEQ ID NO: 189526 - protein, 180 aa, Oryza sativa
  unsure (1)..(180): unsure at all Xaa locations
  Clone ID: PAT_MRT4530_86027C.1.pep
MAAPPPSSPSPPPAAAAAATQQTQPHPQTPFYELVKGNSGIEKVLLRGTRGFSAEVYLYGAQVTSWKNDHAEELLFVSSKAIFKPPKAIRGGIPICFPQFGTHGNLEQHGFARNRLWTIDDNPPPLPVNPAIKSFVDLILXPSDEDLKIWPHSXFEFRLRVALWSXGILSLTSRIRNTNT

SEQ ID NO: 189527 - protein, 68 aa, Oryza sativa
  Clone ID: PAT_MRT4530_86028C.1.pep
CKAQRRPIWVCERAAATARQHQDRRVTSCKLQGLSELRRLLSVRLRVRGSSCTRCVPPVSRGCCTGPL

SEQ ID NO: 189528 - protein, 377 aa, Oryza sativa
  Clone ID: PAT_MRT4530_86029C.1.pep
MVRVKVFYSSPTRGAMAAPPPSSPSPPPAAAAAATQQTQPHPQTPFYELVKGNSGIEKVLLRGTRGFSAEVSDPFSPANPNPTLASVPLSLLPFVVYLYGAQVTSWKNDHAEELLFVSSKAIFKPPKAIRGGIPICFPQFGTHGNLEQHGFARNRLWTIDDNPPPLPVNPAIKSFVDLILRPSDEDLKIWPHSFEFRLRVALGPNGDLSLTSRIRNTNTDGRSFSYTFAYHTYFSVSDISEVRVEGLETMDYLDNLKGKERFTEQGDAIVFESEIDKVYLAAPSKIAIIDHEKKRTFVLTKEGLPDAVVWNPWDKKAKAMQDFGDGEYKHMLCVEPAAVEKPITLKPGEEWKGRLALSAVPSSYCSGQLDPLKVLQG

SEQ ID NO: 189529 - protein, 261 aa, Oryza sativa
  unsure (1)..(261): unsure at all Xaa locations
  Clone ID: PAT_MRT4530_8602C.1.pep
MGALAASIASHLPSGVSAAVAALAASPGEVVRRAAGLEDELRELLRLNGGGRGRGGAAAEQGQGEQTRDRFVRAYERLKSELLNDRAFNFDFTEETRQWVAKMMDYNVPGGKLNRGLSVVDSYMLLRQGTEVDDEDFYLACVLGWCVEWLQASALVLDDITDNAYTRRDNLCWYKLPTVGMSAINDGVLLKCHVQAIIKRYFKEKFYFLDLMELXNEIGLQTAMGQMLDLITTHTGAKDLARYRIQGYRRIVKYKTSYYSF

SEQ ID NO: 189530 - protein, 65 aa, Oryza sativa
  Clone ID: PAT_MRT4530_86030C.1.pep
MTHVLCSMFLSVAAFDGSFEAAAKVLAFVAGGDGLMGLSSSAVAVASCHEGADPSPGQAGPRPRA

SEQ ID NO: 189531 - protein, 78 aa, Oryza sativa
  Clone ID: PAT_MRT4530_86031C.1.pep
ARGNTTRSHLSTFDTHLRTRGDVCFPSLLSFFPFFFSSYIRFPLFLTISCAFMRRFNHKNFEYLALTFLIWSHTTSNI

SEQ ID NO: 189532 - protein, 111 aa, Oryza sativa
  Clone ID: PAT_MRT4530_86032C.1.pep
MGISQISDESGHTFGERSGGRVGDREAAARVSACAQETLDRTRRKRESESSPEEERGGGRRELRRRGHGRHERSFGSGGGLRPCGSQAACWDSGGYPTRRPSDLTSTAQMG

SEQ ID NO: 189533 - protein, 140 aa, Oryza sativa
  unsure (1)..(140): unsure at all Xaa locations
  Clone ID: PAT_MRT4530_86033C.1.pep
KVLDHTDLGTVSFRKRLHIYYLIYSKNHLLTKINQIQPMKKQHLFLSLPLNEXTICKLQFLITLQIVLXEPNSSXHGMNHTFLSSHYQEQILENHNVTLYQVLDHFXLSAHLVQKYIKASCLSKLSILHTILKSFSDIQL

SEQ ID NO: 189534 - protein, 164 aa, Oryza sativa
  unsure (1)..(164): unsure at all Xaa locations
  Clone ID: PAT_MRT4530_86034C.1.pep
QGGLAEFPDAVLNAXRLDLYNLYXEVVSRGGFYVGNGINWKGQVFSKMSNHTVTNKMTGVGNTLKRHYETYLLEYELSHDDVGGECCLLCHSSAPGDWVNCGLCGEWAHFGCDRRQGLGTFKDYAKTDGLEYICPHCSLANYKKKPPPPESANGFRIASAQRNI

SEQ ID NO: 189535 - protein, 41 aa, Oryza sativa
  Clone ID: PAT_MRT4530_86035C.1.pep
MSCRSVVVGFGCTARWRTGVGGQRRWPGVNIVRRVVERLTL

SEQ ID NO: 189536 - protein, 756 aa, Oryza sativa
  Clone ID: PAT_MRT4530_86036C.1.pep
MAQIQSSSLVNCTLLAVLCGKVTDKQQKPPGLVPEVKRPRLSYPFPELISSGRLEVHTLINPTVDQFRKAQQAVQPNLMYLQGQQLENEEEIGTLVWGDADVSDPQIFSSLISPPFPTIVYLEVPAGEKLAQSLQLKGIPYVLYWRNSFSSYAASHFRQALISVVQSSCSHTWDAFQLAQASFRLYCARNNDAQSVKLGPRLLGDAPKINIFLPENEMVEEEGSSEHFPAIKIYDEDVNMKLLICGAPCILIRGCRLQNRVSAAPPPLHAETLPHGVVTMRCDITTCSSSHVSLLVSGSPQTCFDDKLLENHIKKEIVEKGQLVRAVLVREDDKPSSVEPLTSISVASGASTFEVWMTLPKWAGQVLKYLAPEISYKSLVPLGIACVNGTPVSSFDRQDVDRLLFFCKNEAIVNGLYSHLPRWSASLVKDRLKGTPESKSSTFSANGVGEYQKHPMKGTSLVVKPKLKSAKMRPIPHSSKRQMHPFVGIPPSFIHDASQVKPSLPAPPVRHNALPVAPTTQRKLSSGTSRVEPAVPLNPLPMKKHGCDRLPIGICSEEDFLKDVMQFLLQRGHTRLVPQGGLAEFPDAVLNAKRLDLYNLYKEVVSRGGFYVGNGINWKGQVFSKMSNHTVTNKMTLLCYLDLLYYMGQPGVGNTLKRHYETYLLEYELSHDDVGGECCLLCHSSAPGDWVNCGLCGEWAHFGCDRRQGLGTFKDYAKTDGLEYICPHCSLANYKKKPPPPESANGFRIASAQRNI

SEQ ID NO: 189537 - protein, 815 aa, Oryza sativa
  Clone ID: PAT_MRT4530_86037C.1.pep
MPSGGRRLPPWTSPRGAAPRWSPCTPAGADGSGRAAHATPPASGGCSSHVTPPASGGGGCYGYRVTPPTSGGCSRPPRAPLSSVDSPYVRAKQAQVIEKDPNKAVPLFWAAINSGDRIESALKDMATVLKQANRAEEAIEAIRSFRDRCPNEAQESLDNILLDLYKKCGRTKEQIEMLTLKLRIVDEELASGRWKTKLSKSHGRVVYLSLRDEKARLLGNLAWAHMQSENYDEAEMLYRQALAIEADYNKECNLAICLIKTGKVAEAKYLLQSIPDNCSDESHVRSLARAREMLMELESPTLHSPITQMKSKESLIWLAIDAENLGHLQPQVSSTALTQLKSEEPHISVAADAEKQEDCNSQVFPSPITQMKREEPESLIATSGENNEKCLNEYQDLSRLFNDAATPQSLLEKLRKRLVKEDTLNISIQHQVQIPSFVECLPNSGGSTDAGENTRPEGKALVNGVRKTWADMVEEDERQLGDVSSTIGMDTTKRNVSCKHANEEMYRTPSFSQESSALKRSSVDDHPQSSSADSWRHSDSKISTDENVNMKFVRTAPQWRQQKVQDYSNRVSQRLDTSHLSDRAEGTEQPPWRSSTAQRSLFPDWKSKCERYGHGYVPFGDNEHFQGSSHFEATNRWPKNARPWRPQNRLWVFQEITNEINQKQTRALWLTIYTTLLFGTTALDDTAWFLVECFHLLAGHLLLHDGLQDLSVAPPSGQFAEMAMQMHPATGLSTHWSQVDSPPLKLREGANMVVLLQDQLLPMAFSIANVCEDCIMAYMSASASSVLFYTSCLDMQQLPYTGHVITINKSEAATI

SEQ ID NO: 189538 - protein, 81 aa, Oryza sativa
  Clone ID: PAT_MRT4530_86038C.1.pep
IADARCRGSQAGRTRACDPSTRTLACDKINSLYGDLQRIDWPNPDSAQPNRTAAHPNLVSWHNIQQARADRPSKQPRTLNG

SEQ ID NO: 189539 - protein, 168 aa, Oryza sativa
  unsure (1)..(168): unsure at all Xaa locations
  Clone ID: PAT_MRT4530_86039C.1.pep
YTDSSIRSLTAMKYSHTSGWDNYTGCXHIQWSIKDQELNYTFQSTNNIXMLIDMSYNSFTGPIPRELTLLKGLQSXLNLSGNQLSGTIPNDXGILRRXESLDLSYNDLVGEIPSSLSDLTFLSWLNLSYNNLSGRIPSGTTITNTLINLYHVLGNPWDFGGSLFFPQC

SEQ ID NO: 189540 - protein, 486 aa, Oryza sativa
  Clone ID: PAT_MRT4530_8603C.1.pep
MARSAARSGGTVGAPPFSFHGRRSSYVAASSLLSSHHGGGQEAGDAAAEEAETGVEPPIPRAPTSSAEWRGLAGVERDGTELGQVRERAEALRSNRSGSRNPLPVAAVRLLLLNTTTPSEPQLIGGYLLFLGVMPLPATPAYGAVHLPRHTGVSMDTSAEAIFVGPSPPVTADIEESLSDYTSMMEGWTKEHVLAARGLRNKVAPIRVEAMRLGIAADSAGITCFLDAFDECMKRVDLHLVTQKNSFQEFLGSPLQQTVPDTCAIVSSTKCVEVQHRREYETMHGTGSFPCNAAAPRKLRRACFCQKVWKPKEGARVGDVIDMIQRLGGARTTSAPAPAPYMLPVRSWQRHRWDVGGGLTADRIAELLDTRGPFIGTIWVCPWYDLFNSVEDEDLVYRSGCARSKMLQRLSKFCFGKDLVGLHSVLCFEYRICDGQLHIHILDNHETTGPQRWIHHSELEEVHTITVERINHLGDRHIRYPHSGVS

SEQ ID NO: 189541 - protein, 117 aa, Oryza sativa
  Clone ID: PAT_MRT4530_86040C.1.pep
RNLIDPLDYDRKNAEHTGSTVAQAPHNDGHQWRKYGQKWISRAKHSRSYYRCANSKVQGCPATKTVQQMDSSGNGTPELFNLVYYRLLSCRGEGFPRPHLVVTAHHSMGTYQSKRMQ

SEQ ID NO: 189542 - protein, 920 aa, Oryza sativa
  Clone ID: PAT_MRT4530_86041C.1.pep
MTMLSILVRNFAGNTSSKFNKVALLKLSRWLSGSTPNTNSLSSKKHNFDKSALLFQGCADVRFLKKIHANVFTHGLCWDVILGSKILSCYANLGALHESRLVFQKIVNDDISLWNSAMVDYFRAGYPEEVIILYKRLKLNQIGFNGKTITFVMKSCTELKNLYLGKGVHADSLKLALSGNKFVGSSLIGLYSKFSKTNDSRGVFEEIINKDIVAYTSMITGYSETVDSIAWNAFEIATDMLQNNLEVNRVTLVSLLQIAGNLGALQEGKSLHCYSIRRAIGVSDDILETSIVNFYTRCGAYQSAATVLQNSKGTVASWNALLSGLNRAGQSFNAIQYLPVMLHEHKVTPDSVTFANVLSACAELCYFCFAASIHAYFIRRFIPMDVVLTTALIEVYTKCTRVMRSKYLFDQLIIKDVVSYNAMIYGYLQNDMANEATSLLNYMMAEGVAPDFATVLSLLAAFADQRDLVRGRWIHGFAIRHGFCSDVDVENQILYMYSACGKIAAARAIFDSLEKKNLVSWTAMMKGCLSNGHADEVVQLFQVMQKYGEKPDSVSLVTAVQAVSDLGHLNGLKQIHCFVYRSLLEKDKITANSLISAYAKCGKLDLSAGLFFSLKYRNLDTWNAMISAYAMHGFHINVLEMFKQMEEENIQPDELTFSTVLTACSHAGLVKDGWRIFNSMTSVYSVLPQEEHYGCMVDLLGRAGHLEDGYKFIKLSTLKDKSTIFCALLSACRTHGNTRLAHAISKELLEHGPQNPVPGQTSWQNDTSWRLTLHCRGVSSKLVGADPGATQSWIEAVVVYPTLCLPSSLMQRTEVHDPQIPLKLAPNQRVFCGLHMEIVLEAYMFDTETLDDDEVVSNLNCRPMAARSAISIVALTLNYKMARKNRMQNHGKGGINRLKEFSRHLPHVADATMAEAYALK

SEQ ID NO: 189543 - protein, 179 aa, Oryza sativa
  unsure (1)..(179): unsure at all Xaa locations
  Clone ID: PAT_MRT4530_86042C.1.pep
RGLNEREVQIVDTTCPWVSNVWXAVDNQARKGHTSVIHGKWAHEETIATASFAGTYIVVKDLAEAQYVCDYRLHGGDKQAFLKKFANAVSQRFDPDVDLDNVGVANQTTMLKGETEAIGKLLEKTMMQKHGPAALSEHFMVMDTICDATQERQDAIYSMTGKQGXEEKLDMLLVVGGFN

SEQ ID NO: 189544 - protein, 177 aa, Oryza sativa
  unsure (1)..(177): unsure at all Xaa locations
  Clone ID: PAT_MRT4530_86043C.1.pep
GCRNRHEDINVLEMFKQMEEENIQPDELTFSTVLTACSHAGLVKDGWRIFNSMTSVYSVLPQEEHYGCMVDLLGRAGHLEDGYKFIKLSTLKDKSTIFCALLSACRTHGNTRLAHAISKEXVEHGPQNPGIYALISEVYAQEGQWNEVANTKARADLSGLKKHPGSSLIESMEQGMS

SEQ ID NO: 189545 - protein, 124 aa, Oryza sativa
  unsure (1)..(124): unsure at all Xaa locations
  Clone ID: PAT_MRT4530_86044C.1.pep
MTMLSILVRNFAGNTSSKFNKVALLKLSRWLSGSTPNTNSLSSKKHNFDKSALLFQGCADVRFLKKIHANVFTHGLCWDVILGSKILSCYANLGALHESRLVFQXIVNDDISLWNSAMVDYFRA

SEQ ID NO: 189546 - protein, 152 aa, Oryza sativa
  unsure (1)..(152): unsure at all Xaa locations
  Clone ID: PAT_MRT4530_86045C.1.pep
MDIVAYTSMITGYSETVDSIAWNAFEIATDMLQNNLEVNRVTLVSLLQIAGNLGALQEGKSLHCYSIRRAIGVSDDILETSIVNFYTRCGAYQSAATVLQNSXGTVASWNALLFGLNRAGPEFNAIQXYLPVMLHEHNGTSDFCTFCKLGFQ

SEQ ID NO: 189547 - protein, 116 aa, Oryza sativa
  Clone ID: PAT_MRT4530_86046C.1.pep
IAAIILSYSACAKTRNALHSALASILHPTYQIATPGLPKQGAYTHQYPCGDSPAPACQSCRASWLKAAVNTQGQGASNLGTGSSAWLSDSMVCRCWVRQTTSSNSRMVMPVRAKAS

SEQ ID NO: 189548 - protein, 78 aa, Oryza sativa
  unsure (1)..(78): unsure at all Xaa locations
  Clone ID: PAT_MRT4530_86047C.1.pep
FAPGGPPPLSPPGGAAPPPAXVLSGVAPPPGNAPFGGVVPAPAKAPRVAGCPPPPKGLFFAGLPAPPPKGFLSPGPFP

SEQ ID NO: 189549 - protein, 97 aa, Oryza sativa
  unsure (1)..(97): unsure at all Xaa locations
  Clone ID: PAT_MRT4530_86048C.1.pep
ASWIRLLMVQNLIRLVVKPNCNLLVGCGYEVSFELNVGTSLTWHALPTYGKTRISDSRTGMKLVCCGIFRPYGWEGNXRKGRVSSLKDIGNCKFYNC

SEQ ID NO: 189550 - protein, 137 aa, Oryza sativa
  Clone ID: PAT_MRT4530_86049C.1.pep
MLVDGATTAFVGGVLDGRGTAEPGHGGPAQVLASSGRHAMMRCVGRDGDDGLRRSEHVAAERAEEEKPSPLNALSRLRLSSSFAPPLLSSSRAGGGGGEATRPSRRRAPDRCRGGATSATRHSSSFAPPITAPSLAG

SEQ ID NO: 189551 - protein, 1725 aa, Oryza sativa
  Clone ID: PAT_MRT4530_8604C.1.pep
MAEQAKAHDLSPSVSGDDGEPNPRRRARTPPPPPRQSPKQGEALERVDKSVASPVAGDAGERRDGERRLLVYGDGSTPQGALQVAGALLRHPPVVHDPESPAQRWLEDVANLVMTAQQRLGAGGRSATTKTSGAATTGSVSSRRRARRAAAAARHSAATPSSTPSTRKDQHGEPDARLNIERRRNSRRTPRATEGASSSRVSPRHGREDQPSVPPAGGVGCRAFVASLRNVRWPPRFRPTITEKYDGSVNPTEFLQVYMTGIEAAGGDDRVMANFFPMALKGQARGWLMNLPPASVHSWEDLCQQFTMNFQGTYPRPGEEADLHAVQRGDDESLRSYIQRFCQVRNTIPCIPAHAVIYAFRGGVRHNRMLEKIASKEPQTTAELFQLADRVARKEEAWTWNSSGSGVAASAAPGSAAQTGRRDRRRKKRSDRSGDEGHVLAVEGAPRATRKGRPASDKKKEAGTPSRERPAGRWCSVHNTSLHDLADCRAVKNLAERTRKWEEDRRQERREGKSPAVPSGKRRSEAKQKAPAVDIDDGEDDLGFQEPGATIATVDGGARAHVSRRSFKAMKRELLAMAPTHEAMRRARWSEVALTFDQTDHPPCIARGGQVAMVVSPTICNVKLGRVLIDGGAALNILSPAAFDAIKAPGMVLQPSQPIIGVTPGHTWPLGHIDLPVTFGGPANFRTERVSFDVADLSLPYNAVLGRPALVKFMAAVHYAYLQMKMPGPGGPISVRGDLKVALACMEQRADRLAAASKPEGGDERLGPSAPTAPRQRMATCDEVPEDALVSFLRANADVFAWRPADMPGVPREVIEHRLAVRPGARPVRQKVRRQAPERQAFIREEVARLLEAGFIREVIHPEWLANPVVVPKANGKLRMCIDYTDLNKACPKDPYPLPRIDQIVDSTAGCDLLCFLDAYSGPTFQRTTRISLGSQIGRNVEAYVDDLVVKTRNQETLLSDLAETFENLRSARIKLNPDKCVFGVPAGKLLGFLASARGIEANPEKIRAIERMRPPSKLRDVQCVTGCMAALSRFISRLGEKALPLFKLLKRSGPFTWTEEADNALAQLKAYLSSPPVLVAPEPNEPLLLYLAATPQVVSAALVVERDEDNPHSAHPHSVPTWPGSRQGGEAPESDGGLRPLTTGVGPLPACQTVLGAPDPQEGPEATAGRPHLSPFGPEANPVLTRPGRKQGEEAPEPNGGQRPLTTGAGPLPACPMTPGAPDPQDGSGATVGRPLLSSSDPEVIGTEDECAPRGHLDEERPGDTAPSKEDRPHRRVQRPIYFVSEALRDAKTRYPQAQKMLYAILMASRKLRHYFQAHRVTVVTSYPLGQILHNREGTGRVVKWAIELSEFDLHFEPRHAIKSQALADFVAEWTPAPETVSMPEASTNPSQLPHAAHWVMQFDGSLSLQGAGAGVTLTSPNGDVLRYLVRLDFRATNNMAEYEGLLAGLRVAAGLGIRRLLVLGDSQLVVNQVCKEYRCSDPQMDAYVRQGITARFGVPNRIITDNGTQFTSELFGDYCEDMGIKLCFASPAHPRSNGQVERANAEILKGLKTKTFNILKKHGDSWIEELPAVLWANRTTPSRATGETPFFLVYGAEAVLPSELTLRSPRATMYCEADQDQLRRDDLDYLEERRRRAALRAARYQQSLRRYHQRHVRARSLCVDDLVLRRVQTRAGLSKLSPMWEGPYRVVGVPRPGSVRLATGDGTELPNPWNIEHLRRFYP

SEQ ID NO: 189552 - protein, 177 aa, Oryza sativa
  Clone ID: PAT_MRT4530_86050C.1.pep
MTLRPPSSRRPSPTPRTPSGGGYPTTSSPGCSSASPSSTCSASATSSPRAGSTSGAPSRCISMTASSPLPGSPPPTSPTPSPTFSSSTSAASTASEWRPRGGAPTNSTAGAPRSSAAVFVRSPSPTSPWKGTPSSPRASATAPQASRDSTSSSSPWKPTTSTPSSTSASSGCMAALA

SEQ ID NO: 189553 - protein, 57 aa, Oryza sativa
  Clone ID: PAT_MRT4530_86051C.1.pep
ARGSNNLYLLFISATVSFNMKESSSIQKFSFYFPLWCMVTQPAVLNYQNFLLSFLSC

SEQ ID NO: 189554 - protein, 237 aa, Oryza sativa
  unsure (1)..(237): unsure at all Xaa locations
  Clone ID: PAT_MRT4530_86052C.1.pep
MPLRPPSSRRPSATSRTPGGGGYPTTSSPGCSSTSPSSTCSASATSSPRAGSTSGAPSRCISTTASSCLLGSPQPTSPTPXPTFSSSTAGATTTTTTMTTTTTTTTMKTTTTTTTTTTTTTEMEAPTTASSATTTSTATTTSQMVVTRSAASTASEWRPRGGAPTSSTAGAPRSSAAVFVRSPSPTSPWKGSPTSPRASSIAAQASRDSTSSSSPWRPTTSTPSSTSASSGCTAAAA

SEQ ID NO: 189555 - protein, 125 aa, Oryza sativa
  Clone ID: PAT_MRT4530_86053C.1.pep
MLARCSSLQELLARQQGDAVSSLVYEANDRMRDPVYGCVGAISFMQNQVSQLQMQLAVAQGEILCIQMQHRDGNENKKNLRDLGCTFFASCGPSRSVAGQAERFGGLQFIMGRNHFWASIWPIGI

SEQ ID NO: 189556 - protein, 667 aa, Oryza sativa
  unsure (1)..(667): unsure at all Xaa locations
  Clone ID: PAT_MRT4530_86054C.1.pep
HDHPPGVLAFARIHRGSIHRFAAAGRGLFEDGSSSTSRQPTWPPRRRHVGASSAEVGTGRPRSNFSKIAKPTTQLLKKEEKFIWSVECNRSFEELKXRLVSTPVLILPDQMXDFQVYCNATRQGLGCVLMQDGRVVAYVSRQLRPHEGNYPTHDLELATVVHALKIWRHYLIGNRCEVYTDHKSLKYIFAQPDLNLRQRRWLELIKDYDMGIQYHPGKANVVADALSRKSYWNVAWVEQLCGEVQHDLEHLNLGIVEHGFVAAXEAQPTLVEQVRIAQASNLEIAKLKKNMRVGKARGFTEDEHEAIWMGERLCIPRNKEHLILTEAHQTQYSIHPGNTKMYQDLKEKFWWVSMRREIAEFVSLYDVCXRVKAEHQRPAGLLQLLQIPEWMWEEIGMDFITGLPRTSSGHDSIWVVVDRLIKVAHFILVHTTYLGKKLAELYLARIMCLHGVPKKIVSDXGSQFTSKFWQKLQEELGTRLNFSTAYYPQTDGQTEQVNQILEDMLRACALDFGGAWDKSLPYAEFSYNNSYQASLQMAPFEALYXWRCRTPLFWDQTGEHQLFGTEVLNEAEEKVRTVRERLRIAQSRQKSYADNRRRELTFEAGDSVYLHFTQLRGVHRFQTKAKLEPRFVGPYRILERRGEVVPWGRSRFTIPDVKPLVVKPGKT

SEQ ID NO: 189557 - protein, 94 aa, Oryza sativa
  Clone ID: PAT_MRT4530_86055C.1.pep
DRWICLISYLSYASKLEEDKGKRCLISDRLSSNTYGTMIMYGFPFGPSSIAAAHRRAQWEPPAGPWFTYIARGHLDASPCLTGLISHARQGLPY

SEQ ID NO: 189558 - protein, 442 aa, Oryza sativa
  Clone ID: PAT_MRT4530_86056C.1.pep
MRMSGGGGGGGEMMAPLMEGPDPESGDGEGGGGGGGGGGGGGGGGRGARGRRGEGWGQWVRGQLSRTPSSVAAAAAGAGAARNDLRLLLGVMGAPLAPVHVSAAEPLPHLSIKDTPIETSSAQYILQQYLAASGGQKLLASVRNAYTMGKVRMVATEFETAGRLVKNRNAARCAEPGRFVLWQMAPEMWYIELAVGGSKVHAGCNGKLVWRHTPWLGAHAAKGPVRPLRRALQGLDPLTTASMFAGARCIGERKVNGEDCFILKLCTEPETLKARSEGLAEIIRHVMFGYFSQRTGLLVHIEDSHLTRIQSTTGGDAVYWETTINSFIEDYRPVEGIMIAHSGRSAVTLFRFGEVAMSHTKTRMEEAWSIEEVAFNVPGLSMDCFIPPTDIKSGSISETVELSHGEKSKVGPPPGHRAKVAALEKAVDGKVAWSGTILEDHN

SEQ ID NO: 189559 - protein, 68 aa, Oryza sativa
  Clone ID: PAT_MRT4530_86057C.1.pep
PRVRELMGSVLFTHVLHGGRRRHGAYHRLLHSFSGEPFMQALGWPPESIRNSSIRRWSLDGPVSDVSG

SEQ ID NO: 189560 - protein, 74 aa, Oryza sativa
  Clone ID: PAT_MRT4530_86058C.1.pep
GKRKKQRFSIKKKKKKKKKKKIKKKRENTKKKGKKKKKNLGKFKNKKIKRLGKIKKKKKKKGKNPKKKKGGARF

SEQ ID NO: 189561 - protein, 120 aa, Oryza sativa
  Clone ID: PAT_MRT4530_86059C.1.pep
MRLQQNEYRSATAPQIEHLASGNACGTGAFHGYTTRRAPPPPGSCAPPPAPAPAPPRPPPAPAPAPPWPPPAPAPPRAPPAPAPAPPWPPPAPAPPRPPPELCERGEDSDGVGHWVGNPW

SEQ ID NO: 189562 - protein, 302 aa, Oryza sativa
  Clone ID: PAT_MRT4530_8605C.1.pep
MSKHNLGLSIHVIYIMFAAHQILGGGFHLTNQDVNMTRFGKSLQSKVGDATKSYMAMHQTYEGTYFGFVATLDVYGFEINYSQRIISSVWIVNRGPNDNLEENAIRIGWQVFPELYGDSHTHFFTYWTRDSYRTTGCYNMRCPGFQLTLGSKITPGDVISPVSDVDGARQNITIKVSREKSTGDWWIYYGFNSAPTVVGYFPANLFTNLSEKATSILFGGSVLAVEGASTPPMGSGLLPSILSDKAASIEDILLVDEDGKIAPFDVKTIKDETSDLCYAMTPIFGESTSRCLYGGPGGCVVG

SEQ ID NO: 189563 - protein, 59 aa, Oryza sativa
  Clone ID: PAT_MRT4530_86060C.1.pep
MVCSIGFDRNIGQKGAPRGTPFNLHSLGRGSLLTLAREGLVGGIPRKAFGRTCRNQGPG

SEQ ID NO: 189564 - protein, 437 aa, Oryza sativa
  Clone ID: PAT_MRT4530_86061C.1.pep
MSDSHETDRNIEIWKIKKLIKALESARGNGTSMISLIMPPRDQIARVAKMLGDEYGTASNIKSRVNRQSVLAAITSAQQRLKLYNKVPPNGLVLYTGTIVTEDGKEKKVTIDFEPFKPINVSLYLCDNKFHTEALNELLESDDKFGFIVMDGNGTLFGTLSGNTREVLHKFTVDLPKKHGRGGQSALRFARLRMEKRHNYVRKTAELATQFFINPATSQPNVSGLILAGSADFKTELSQSDMFDQRLQAKILNVVDVSYGGENGFNQAIELSAEILANVKFIQEKKLIGKYFEEISQDTGKYVFGVDDTLKALEMGAVETLIVWENLETNRYVLKNSASGETVIKHFNKEQEADQSNFRDPASNAELEVQEKMSLLEWFANEYKKFGCSLEFVTNKSQEGSQFCRGFGGIGGILRYQLDIRSFDELSDDEGLYEDSD

SEQ ID NO: 189565 - protein, 331 aa, Oryza sativa
  Clone ID: PAT_MRT4530_86062C.1.pep
MAFAIRLRPSGLDGFGLNPCWYYDFGRSGRRASWHASNKPLTGKAMKKMLKGGSPSPLRTAFADESDLNFLRLPPAKITLGELAPSPWRRTSLPLAPYLIGIVAKGMGVAKGPLMTYLIGTVAKGVGVAKAPLAPYLTGIVAKGVGVAKGPLTPYLIGVVVKGVGVAKGSLAPYLIGVVAKGVQRLEARLASKPPSLDLTNFRLQPLTPYLIGTVAKGVGVAKGPLAPYLIGILAKAWGWRKPLTPYLIGTVAKGMGATKPFHPQPLTPYFIGILAKGLGMVKGGMAWRRGSHFTLLVWVPHGRRQLLSNGQLRHVEGLSFAYMGLLAKGP

SEQ ID NO: 189566 - protein, 135 aa, Oryza sativa
  Clone ID: PAT_MRT4530_86063C.1.pep
MVVLDLVEKTLTTLHDFSQEQSPRKKTTTQRSGAGRPPPHRPPAGRLVLRRRLGSAAAPGAPPPAASPPAQGAPPRGPRRPPARPRRPSPDSPARPRAASRPSPASPARPPAASPASPAACSAARLPAAAARPHV

SEQ ID NO: 189567 - protein, 339 aa, Oryza sativa
  Clone ID: PAT_MRT4530_86064C.1.pep
MGICASSEQLEHVHETDESIVYVKDEQGRGGRGVESGGARKVASLFSQRGKKGPNQDSVILCQGFGMEDGVFCGVFDGHGRCGQFISKLPSASASAQMLEEWRQACASAFAAMDGELKLQPNLDCAFSGTTAVCAIKQGRDLIIANLGDSRAVLATMSDTGYLQAVQLTVDHKPSVPEEAARIKRSGGRVFGLKDEPGVMRVWLPGENSPGLAMARSLGDMRLKRHGVIPAPEVTSRRVTGADLFMVLATDGVWDVLSNEEVVSIVCATPRKQHASKAVVEAAVQRWRAKFPTSRVDDCSAVCLFLHDHTLGTAAAASAAAAAAARKARRASTATPPAS

SEQ ID NO: 189568 - protein, 72 aa, Oryza sativa
  Clone ID: PAT_MRT4530_86065C.1.pep
FDSLLFLEYLVCKIISAMHIEPHFLLSIMTCHICISCDDSFVSLLFVNCNILLAKLCEQQINGHVIYVQVEM

SEQ ID NO: 189569 - protein, 388 aa, Oryza sativa
  unsure (1)..(388): unsure at all Xaa locations
  Clone ID: PAT_MRT4530_86066C.1.pep
MGICASSEQLEHVHETDESIVYVKDEQGRGGRGVESGGARKVASLFSQRCMKGRNQDSVILCQGFGMEDGVFCGVFDGHGRCGQFISKLVRDYLPFMILSHRNALLLADVPSDDADDAAFSDDAAASSSADSSGNSSPQPSASASAQMLEEWRQACASAFAAMDGELKLQPNLDCAFSGTTAVCAIKQGRDLIIANLGDSRACSXMSDTGYLQAVQLTVDHKPSVPEERXRIKRSGGRVFGLKDEPGVMRVWLPGENSPGLAMARSLGDMRLKRHGVIPAPEVTSRRVTGADLFMVLATDGVWDVLSNEEVVSIVCATPRKQHASKAVVEAAVQRWRAKFPTSRVDDCSAVCLFLHDHTLGTAAAASAAAAAAARKARRASTATPPAS

SEQ ID NO: 189570 - protein, 65 aa, Oryza sativa
  Clone ID: PAT_MRT4530_86067C.1.pep
MDASTSRKASYSVPLQLIIDGWLFALDTPLQEQFQMSQRLSFGGSAPGQFTWTTNLSVVLHVLTS

SEQ ID NO: 189571 - protein, 39 aa, Oryza sativa
  Clone ID: PAT_MRT4530_86068C.1.pep
TAIAVSKKPDFRRCFQDGIACLHCRAEATATRRLRGGVR

SEQ ID NO: 189572 - protein, 118 aa, Oryza sativa
  unsure (1)..(118): unsure at all Xaa locations
  Clone ID: PAT_MRT4530_86069C.1.pep
KKKGRSSSGEKAKNKKPRKRKRRKHEKKKKSPETGGRRQXRRRRKTEKATPRRRKRRXQPRRRRQRHPTRRHRWSGRSPRAQRTPSRRCNWPPRPILSVTSKTRPRQGRDKLNKGAKK

SEQ ID NO: 189573 - protein, 1624 aa, Oryza sativa
  Clone ID: PAT_MRT4530_8606C.1.pep
MEAARGARSRVPVAAVVAVVLVAGLAAGGSAAEIRRQKNVQVALRAKWAGTPLLLEASELLSKEWKDLFWDFIDHWKELDKASECLTAKCCVHKIVEDARSFLSEPLASIFEFSLTLRSASPRLVLYRQLAEESLSSIPVKDGTLEQTSGPSTGENFHEAVKGTCCWVDTGSALLFNSADLRKWLDGLGKLAVDSTQQPELFEFDHIYPQSNITAPIAIFYGAFGTKCFKELHVHLAEASKQGKVRYALRHVLPSGCQATSSFCGSVGAIDAVTLSGYGVELALKNMEYKAMDDTAIKKGVALEDPKTEDLSQEVRGFIFSKILERKPALNAEIMSFRDYLLSSTVSDTLEVWELKDLGHQTAQRILHASDPLQSMQEINQNFPSIVSSLSRMKLDDSIKDEIIANQRMVPPGKSLMALNGALINIEDLDLYLLMDMVHEELSLADQFVKLKIPGSAVHKILSAAPPTESNSFRVDFRSSHVHYLNNLEEDALYKRWRSNINELLMPVFPGQMRYIRKNLFHAVYVLDPASTIDMVLSLYQDSVPIRFGIILYSSRLISVIEENDGNLPVNNGSKTEEDISILIIRLFLYIKETYSTQLAYQFLSNIHKSQNSGDDYNEESVEAHHVEGAFVDSLLSSAKSHPQDVLLKLQKENMHKQEAEESSRFVHKLGLYKLQCCLLMNGLVHESSEDATMNAMNDELPRIQEQVYYGHIQSHTDVLEKFLSESSYKRYNPSITGKSTENKRFVSLVVPYHQGDSTLHDITYLHSHGTTDDAKPVTHLVAVDISSKIGIKLLHEAIRYLFVSDLDEPIFVLSYKEKVLDFLHELCKFYEGQHVPSSGVGDKISTMREKVYSIAAETGLPVDNYKAWFTSYSHDAVLRGMNKLSDFLFGKLGLEFGSNAVITNGRVFVVNEGDSFLTDDLGLLESMEYELRTKHIYEIIEEIEWTGVDPDDLTSKFYSDVAMLISSSMSIRERPSERAHFEILHAEHSAIKLNGMSSGVHIDAVIDPLSPAGQKLAPLLRILWRQIQPSMRIVLNPISSLADLPLKNYYRFVLPSMDDFSSTDYSVHGPKAFFANMPLSKTLTMNIDVPEPWLVEPVIAIHDLDNILLENLGDVRTLQAVFELEALLLTGHCKEKDRDPPRGLQFILGTKRRPHLVDTLVMANLGYWQMKVSPGVWYLQLAPGRSADLYELPSKLIAIDSLRGKLMHIEVQKRGGKEHEDLLNADDDNHFQEKMDNKGWNNNLLKWASSFISGDSSSKKKDEKISDLKAARQGETINIFYGASGHLYERMDLKTTLQGETINIFSVASGHLYERFLKIMILSVLKQTQRPVKFWFIKNYLSPQFKDVIPHMAQEYGFEYELVTYKWPTWLHKQKEKQRIIWAYKILFLDVIFPLSLRKVIFVDADQIVRADMGELYDMNLKGRPLAYTPFCDNNKEMDGYRFWKQLFAKSLLLDNDVKVSGKMICEEDHTKSRGRAYHISALYVVDLAKFRQTASGDTLRVFYETLSKDPNSLSNLDQDLPNYAQHTVPIFSLPQEWLWCESWCGNATKARAKTIDLCNNPMTKEPKLQGAKRIVPEWVDLDSEARQFTARILGDNPESPGTTSPPSDTPKSDDKGAKHDEL

SEQ ID NO: 189574 - protein, 144 aa, Oryza sativa
  Clone ID: PAT_MRT4530_86070C.1.pep
MTNGQDNLLPIANVGRIMKDGLPPQAKISKRAKETIQECATEFISFVTGEASERCRRERRKTVNGDDVCHAMRSLGLDHYADAMHRYLQRYREGEELAASLNSSSSAAAAAAAAGSRGGGAIQIDVRAELSIFRSGNNQGRPNN

SEQ ID NO: 189575 - protein, 47 aa, Oryza sativa
  Clone ID: PAT_MRT4530_86071C.1.pep
MALCFTLQPSPVVDLRLIDEPGGKPFGFHFTASPILDGETPLVFVIL

SEQ ID NO: 189576 - protein, 308 aa, Oryza sativa
  Clone ID: PAT_MRT4530_86072C.1.pep
MMGTAVELGRRHGGDHRFYDASRVRRGYHHHGLPKARWAPAVHQEKAAEEPSPSPARAPVPPPGVAGNLERFVAAVTPFVPAQFPSKMQRAARGWRGCGVDAEREEAPHFFLRDVWEAYREWSAYGAGVPLVLDGCDGVVQYYVPYLSAIQLYGDPAVLRLSSGPSDCIDSKISSLSARFPGLRTLRSCDLSPRSWISVAWYPIYRIPTGPTLKDLDACFLTFHRLSTGPEEDNGGAVKYWGPGSKPTIPLSVFGMASYKFSNSIWSSTDGDRQLASFLQQAASDWLRDSRTSHPDYQFFASRGAYNR

SEQ ID NO: 189577 - protein, 315 aa, Oryza sativa
  unsure (1)..(315): unsure at all Xaa locations
  Clone ID: PAT_MRT4530_86073C.1.pep
TPLGPLGSAPDYMCSLSLLKSVIESIDRARRHCLWRGSDINSSRKSLVLWERVCQPKNRGGLGVIDLNLQNAALLMKNLHKFYNRHPIPWVNLIWTSYYSHKLPHVVRPRALFHKDSVSITSTKSISQLFALPLSEQAFQEYESMSEADPLNLLSDDKDVWAYVXGNGLFSSHKIYTINCMHVQAPGYLSWIWKSKCSMKVKVFAWLLLIDRLNTYDMLQRRHCPPENSDLACVLCPAXARETSFHLFFQCQFSSDCWVQLGIVWNLSLNFDDMLLQAKNSXSTHFVEKILYVAWNIWKQRNAFILQNVPPSVVS

SEQ ID NO: 189578 - protein, 153 aa, Oryza sativa
  unsure (1)..(153): unsure at all Xaa locations
  Clone ID: PAT_MRT4530_86074C.1.pep
SKCSMKVKVFAWLLLIDRLNTYDMLQRRHYPPENSDLTCVLCPAQARETSFHLFFQCQFSSYCWAQLGIVWNLSLNFDDMLLQAKSSYRSTHIVEXILYAAWNIWKQRNALIFQNEPPSVVSWKALFKIDLSLLVFRLKDSERQALSQCINLL

SEQ ID NO: 189579 - protein, 730 aa, Oryza sativa
  unsure (1)..(730): unsure at all Xaa locations
  Clone ID: PAT_MRT4530_86075C.1.pep
MLGGGKMKGGETMGGGGGSGSSSISPLVSFVLGAAMATVCILFVMSASPGRRLADISAWSNADDAPPLPLPLQDAAVDSNDSLAAAAAANVTVVAAPAPAPVQAPAPASPYGDLEEVLRRAATKDRTVIMTQINLAWTKPGSLLDLFFESFRLGEGGVSRLLDHLVIVTMDPAAYEGCQAVHRHCYFLRTTGVDYRSEKMFMSKDYLEMMWGRNKFQQTILELGYNFLFTDVDVMWFRDPFRHISMGADIAISSDVFIGDPYSLGNFPNGGFLFVRSNDKTLDFYRSWQQGRWRFFGKHEQDVFNLIKHEQQAKLGIAIQFLDTTYISGFCQLSKDLNKICTLHANCCVGLGAKMHDLRGVLDVWRNYYSREYVVTAASARSNSSTCSGVAAISGKETXKAAIFVRLVNCNPSIATSTPTYTNTQINTAYIHDTYIHXAADSSYSLQPKISAXFRVAVARAATDDRTVIITCVNHAFAAPDSLLDIFLQGFRVGDGTPELLRHVLVVAMDPTALTRCRAVHPHCYLYTMPGLDVDFTSEKFFASKDYLELVWSKLKLQRRILQLGYNFLFTDVDIVWLRNPFKHVAVYADMAISSDVFFGDPDNIDNFPNTGFFYVKPSARTIAMTKEWHEARSSHPGLNEQPVFNHIKKKLVKKLKLKVQYLDTAYIGGFCSYGKDLSKICTMHANCCIGLQSKISDLKGVLADWKNYTRLPPWAKPNARWTVPGKCIH

SEQ ID NO: 189580 - protein, 39 aa, Oryza sativa
  Clone ID: PAT_MRT4530_86076C.1.pep
RIDSDYGPIEGGAPSVLRQQLPVHLHEEQPFDHPQSQAI

SEQ ID NO: 189581 - protein, 468 aa, Oryza sativa
  unsure (1)..(468): unsure at all Xaa locations
  Clone ID: PAT_MRT4530_86077C.1.pep
VLADRSQSVFTELIHHNQYGFIRGRTIQDCLAWSFEYLHQCQQSKREIVLLKLDFEKAFDTIEHSVILNIMKQMGFDSKCLSWINLIFSSASSSVLLNGVPGKSFYCTRGVRQGDPLSPLLFVLGAYLLQAVINKTYSQGXLSIPIPTPDNDFPVVQYVDDSLLFLTASSKXLFCLKAILNTFADSTGLKVNYSKSCSPQKKXSKSCMIPLNVDPEKVQHLSGLFGCAIGPLPFTYLGLPLGTTRPKVIDFAPLVDRIERRLSATSALLSYGDRITMVNSVLSSLPTYYICSLSLPKSVIESIDRARRHCQWRGSDINSSRKSLVLWERVCQPKNTGGLGVIDLNLQNAALLMKNLHKFYNRHPITCVNLIXTSYNSDKLPHVVHPRGSFWWKDVLQFVDIFRSPSNCKVGDGKTFLFWDDFWNGKVRSAVFPRIHSFALSRKDSVSITSTKSISQLFALPLSEQAFQ

SEQ ID NO: 189582 - protein, 283 aa, Oryza sativa
  Clone ID: PAT_MRT4530_86078C.1.pep
MNLGDGFALNFALGRDCPPLPGWPTVVGRVRWAGAAAVRSASDVYWAEAGKPLLSPVRRGAAPRPPPPLRLLLRCRCSTGGATARGPSGDTTPSPPTPPPRGPCLPPLHFLLRRRRCYTSSVVASTAISTTVRSTSAAARPPSLPLQPNDAVTFTVAKHDGAGIDELATDDPREVAKIASLVLALPQGGAVLTVQATVLLRLAAPRSLALGVTVHHAACDSVSTTHSTPALPLLRRRLDPHRLGGWDTRRWRRRRGEGLTGGVHGADSCKIASLNLVQFEGSI

SEQ ID NO: 189583 - protein, 130 aa, Oryza sativa
  unsure (1)..(130): unsure at all Xaa locations
  Clone ID: PAT_MRT4530_86079C.1.pep
YALLSTAASNSPPPPSPPPYPPPSPPSPLPSTPSSPPPXPSPPTPTPTFPTPGSTTPACTAXPSRPSSSPRPRPPKTTSGSTTPATAPXPPPTPTSPTPGSTTRTSAAKTPPPRPLLLDRRPGATPPSSW

SEQ ID NO: 189584 - protein, 1929 aa, Oryza sativa
  unsure (1)..(1929): unsure at all Xaa locations
  Clone ID: PAT_MRT4530_8607C.1.pep
MAEQAKAHDLSPSVSGDDGEPNPRRRARTPPPPHQSPKQGEALERVGKSAASPVAGDAGERRDGERCLLVYGDGSTPQGALQAASALLRHPPVVHDPESPAQRWLDDVANLVVTAQQRLGAGGRAFVASLRNVRWPPRFRPTITEKYDGSVNPTEFLQVYTTGIEAAGGDDRVMANFFPMALKGQARGWLMNLSPASVHSWEDLCQQFTMNFQGTYPRPGEEADLHAVQRGDDESLRSYIQRFCQVRNTIPCIPAHAVIYAFRGGVRHNRMLEKIASKEPQTTAELFQLADRVARKEEAWTWNSSGSGVAASAAPGSAAQTGRRDRRRKKRSDRSGDEGHVLAVEGAPRATRKGRPASDKKKEAGTPSRERPAGRWCSVHNTSLHDLADCRAVKNLAERTRKWEEDRRQERREGKFPAVPSGKRRSEAKQKAPAVDIDDGDDDLGFQEPGATIATVDGGACAHVSRRSFKAMKRELLAMAPTHEAMRRARWSEVALTFDQTDHPPCIARGGQVAMVVSPTICNVKLGRVLIDGGAALNILSPVAFDAIKAPGMVLRPSQPIIGVTPGHTWPLGHIDLPVTFGGPANFRTERVSFDVADLSLPYNAVLGRPALVKFMAAVHYAYLQMKMPGPGGPISVHGDLKVALACMEQRTDRLAAASKPEGGDERLGPSAPTAPRQRIATYDEVPEDALVSFLRANADVFAWRPADMPGVPREVIEHRLAVRPGARPVRQKVRRQAPERQAFIREEVARLLEAGFIREVIHPEWLANPVVVPKANGKLRMCIDYTDLNKACPKDPYPLPRIDQIVDSTAGCDLLCFLDAYSGYHQIRMAREDEEKTAFITPVGTYCYTSMPFGLKNAGPTFQRTTRISLGSQIGRNVEAYVDDLVVKTRNQETLLLDLAETFENLRSARIKLNPDKCVFGVPAGKLLGFLVSARGIEANPEKIRAIERIRPPSKLRDVQCVTGCMAALSRFISRLGEKALPLFKLLKRSGPFTWTEEAEHALTQLKAYLSSPPVLVAPEPNEPLLLYLAATPQVVSAALVVERDEDNPHSAHPHSVPTWPGSRQGGEAPESNGGLRPLTTGVGPLPACQTVLSAPDPQEGPEATEGRPHLSPFGPEANPVLIRPGREQGEEAPESNGGLRPLTTGAGPLLACLTTPGAPDPQDGPEATVGRPLLSSSDPEVIGTEDECAPRGHLDEEHPGDTAPSEEDRPRRKVQRPVYFVSEALRDAKTRYPQAQKMLYAILMASRKLRHYFQAHRVTVVTSYPLGQILHNREGTGRVVKWAIELSEFDLHFEPRHAIKSQALADFVAEWTPAPETVSIPEASADPSQLPHAAHWVMQFDGSLSLQGAGAGVTLTSPNGDVLRYLVRLDFRATNNMAEYEGLLAGLRVAAGLGIRRLLVLGDSQLVVNQVCKEYRCSDPQMDAYVRQVRRMERHFDGIELRHVPRRDNMIADELSRLASSRTQTPPGAFEERLTQPSARPDPLGETDAPDRPPRPVGVQASGPEGSAPSSLRLIAWISEIQTYLTDKTLPEDREGSERVQRISKRYVLVEGTLYRRAANGILLKCIPQEQGVELLADIHEGECGAHSASRTLVGKAFRQGFYWPTALNDAVDLVRRCRACQFHARQIHQPAQALQVIPLSWPFAVWGLDILGPFKRAPGGFEYLYVAIDKFTKWPEAYPVVKIDKHSALKFIKGITARFGVPNRIITDNGTQFTSELFGDYCEDMGIKLCFASPAHPRSNGQVERANAEILKGLKTKTFNILKKHGDSXIEELPAVLWANRTTPSRATGETPFFLVYGAEAVLPSELTLRSPRATMYCEADQDQLRRDDLDYLEERRRRAALRAARYQQSLRRYHQRHVRARSLCVDDLVLRRVQTRAGLSKLSPMWEGPYRVIGVPRPGSVRLATGDGTELPNPWNIEHLRRFYP

SEQ ID NO: 189585 - protein, 104 aa, Oryza sativa
  Clone ID: PAT_MRT4530_86080C.1.pep
NPELIGAAAEEAYRAVLCSHFMPWHPQRRRPCGRSTSRHSRRQGMILAAVTAAPARPNSSRRSAATRAAIANLSDLDLDPCSVVSLNSGEVEIARWWWSGRREV

SEQ ID NO: 189586 - protein, 125 aa, Oryza sativa
  Clone ID: PAT_MRT4530_86081C.1.pep
MAAMVASTATSFSYHKPRFAVECRKKDRDRDRDRERPEREKEHKYPFKVVEITPPPRCLGVRCFPTNIHCGESVTIEGQAYTVSAVTHRYQLRKGRYEPSEKRLDVLSTGRYLLNLYLDGLLDKS

SEQ ID NO: 189587 - protein, 136 aa, Oryza sativa
  unsure (1)..(136): unsure at all Xaa locations
  Clone ID: PAT_MRT4530_86082C.1.pep
VQSLAWLRQSIHFSFFILATSNXYIQSNICRHHSHLKENLAAQIFKHVSAHCIPFHSSCTHPILLLWPGVGGQQACSGANPVHPLNSPGFTPPFPSLVTTAGFWGLLKPSSTASKHHQQGGEATIAPHHQXPFSTW

SEQ ID NO: 189588 - protein, 61 aa, Oryza sativa
  Clone ID: PAT_MRT4530_86083C.1.pep
HLYVHLVHHRCGSTSKSALHVLRNSAERPWVTIGKSITALAGVEPVWLRLTPPEMMRPGAA

SEQ ID NO: 189589 - protein, 60 aa, Oryza sativa
  Clone ID: PAT_MRT4530_86084C.1.pep
SQHHLACNMPVTDRLECYPKLAYMFIGGHSFLHFCASMHSAPCCRIPLYDLFYIHVMICN

SEQ ID NO: 189590 - protein, 85 aa, Oryza sativa
  Clone ID: PAT_MRT4530_86085C.1.pep
LYRGWSCPLQALLHVQLGVETKGNPKHAFRNKETSKPDETGSDSDLLVRPATYRRSDRPSTGGLTAQHMAVRPAVMEWVLSVMYV

SEQ ID NO: 189591 - protein, 340 aa, Oryza sativa
  Clone ID: PAT_MRT4530_86086C.1.pep
MEGSPGKIRLSTLPDDIVFRIMSFLTMRQAVRMCVLSRRWRNLWRTVPCINADISEFKRRDTEHYDQETELAFKMFMERLNELRDPAPLIHTFRFRSSHFLDIVLLCDKLELNHSAFNCRYLRRIDFTNVILMQGFFKQLEMGCPAMRGLFLDECSVEDVEISSQTLKVLTIKNTHVSYGNKTTISTPSVTYLKLWSPLNGTYVLNDMPLLVTSLLVLYHVQDSGDFFQNLRSLSAAKSLEFDYVGRRKQPDSRSMVSGCKLLWIDGLPSDLTKNKLTLKLEKEKPQRIIGKLEDRSFTCEHLTRVEVVCSEDDPLVEDVVNFFVNSGLTSAQVHIIRRV

SEQ ID NO: 189592 - protein, 104 aa, Oryza sativa
  Clone ID: PAT_MRT4530_86087C.1.pep
MEMDLAAEQYGCVHYRRKCKIRAPCCGEIFDCRHCHNEAKDSLEVSISDRHEIPRHEIKLVGVPVQLFWLPFPAYHYRCYFIGYFAAFDANCRVGHDISNLRCP

SEQ ID NO: 189593 - protein, 79 aa, Oryza sativa
  Clone ID: PAT_MRT4530_86088C.1.pep
IRYYSLAPSEDSDVYYIYTVKKVGYYSTKGGPIFQLHTPCYKWTKAIMCVIMMTILYYTNDSNAEDNPLYDYPSELSKN

SEQ ID NO: 189594 - protein, 204 aa, Oryza sativa
  Clone ID: PAT_MRT4530_86089C.1.pep
DPPGCRLGNALVVMYSRCGNVQTAFDLFDRLPEKDIVTWNTMVTAFIQNDFDLEGLLLVYEMQKSGFAADSVTLTAVLSASSNTGDLQIGKQAHGYLIRHGIEGEGLESYLIDMYAKSGRVEMAQRVFDSFKNAKRDEVTWNAMIAGYTQSGQPEKAILVFRAMLEAGLEPTSVTLASVLPACDPVGGGVYSGKQIHCFAVRRC

SEQ ID NO: 189595 - protein, 2027 aa, Oryza sativa
  Clone ID: PAT_MRT4530_8608C.1.pep
MAEQAKAHDLSPSVSGDDGEPNPRRRARTPPPPPRQSPKQGEALERVDKSVASPVAGDAGERRDGERRLLVYGDGSTPQGALQVAGALLRHPPVVHDPESPAQRWLEDVANLVMTAQQRLGAGGRSATTKTSGAATTGSVSSRRRARRAAAAARHSAATPSSTPSTRKDQHGEPDARLNIERRRNSRRTPRATEGASSSRVSPRHGREDQPSVPPAGGVGCRAFVASLRNVRWPPRFRPTITEKYDGSVNPTEFLQVYMTGIEAAGGDDRVMANFFPMALKGQARGWLMNLPPASVHSWEDLCQQFTMNFQGTYPRPGEEADLHAVQRGDDESLRSYIQRFCQVRNTIPCIPAHAVIYAFRGGVRHNRMLEKIASKEPQTTAELFQLADRVARKEEAWTWNSSGSGVAASAAPGSAAQTGRRDRRRKKRSDRSGDEGHVLAVEGAPRATRKGRPASDKKKEAGTPSRERPAGRWCSVHNTSLHDLADCRAVKNLAERTRKWEEDRRQERREGKSPAVPSGKRRSEAKQKAPAVDIDDGEDDLGFQEPGATIATVDGGARAHVSRRSFKAMKRELLAMAPTHEAMRRARWSEVALTFDQTDHPPCIARGGQVAMVVSPTICNVKLGRVLIDGGAALNILSPAAFDAIKAPGMVLQPSQPIIGVTPGHTWPLGHIDLPVTFGGPANFRTERVSFDVADLSLPYNAVLGRPALVKFMAAVHYAYLQMKMPGPGGPISVRGDLKVALACMEQRADRLAAASKPEGGDERLGPSAPTAPRQRMATCDEVPEDALVSFLRANADVFAWRPADMPGVPREVIEHRLAVRPGARPVRQKVRRQAPERQAFIREEVARLLEAGFIREVIHPEWLANPVVVPKANGKLRMCIDYTDLNKACPKDPYPLPRIDQIVDSTAGCDLLCFLDAYSGYHQIRMAREDEEKTAFITPVGTYCYTSMPFGLKNAGPTFQRTTRISLGSQIGRNVEAYVDDLVVKTRNQETLLSDLAETFENLRSARIKLNPDKCVFGVPAGKLLGFLASARGIEANPEKIRAIERMRPPSKLRDVQCVTGCMAALSRFISRLGEKALPLFKLLKRSGPFTWTEEADNALAQLKAYLSSPPVLVAPEPNEPLLLYLAATPQVVSAALVVERDEDNPHSAHPHSVPTWPGSRQGGEAPESDGGLRPLTTGVGPLPACQTVLGAPDPQEGPEATAGRPHLSPFGPEANPVLTRPGRKQGEEAPEPNGGQRPLTTGAGPLPACPMTPGAPDPQDGSGATVGRPLLSSSDPEVIGTEDECAPRGHLDEERPGDTAPSKEDRPHRRVQRPIYFVSEALRDAKTRYPQAQKMLYAILMASRKLRHYFQAHRVTVVTSYPLGQILHNREGTGRVVKWAIELSEFDLHFEPRHAIKSQALADFVAEWTPAPETVSMPEASTNPSQLPHAAHWVMQFDGSLSLQGAGAGVTLTSPNGDVLRYLVRLDFRATNNMAEYEGLLAGLRVAAGLGIRRLLVLGDSQLVVNQVCKEYRCSDPQMDAYVRQVRRMERHFDGIELRHVPRRDNMIADELSRLASSRAQTPPGAFEERLTQPSARPDPLGETDAPDRPPRPVGVQASGPEGSAPSSLRLIAWISEIQTYLTDKTLPEDREGSERVQRISKRYVLVEGTLYRRAANGILLKCIPQEQGVELLADIHEGECGAHSASRTLVGKAFRQGFYWPTALNDAVDLVRRCRACQFHAKQIHQPAQALQIIPLSWPFAVWGLDILGPFKRAPGGFEYLYVAIDKFTKWPEAYPVVKIDKHSALKFIKGITARFGVPNRIITDNGTQFTSELFGDYCEDMGIKLCFASPAHPRSNGQVERANAEILKGLKTKTFNILKKHGDSWIEELPAVLWANRTTPSRATGETPFFLVYGAEAVLPSELTLRSPRATMYCEADQDQLRRDDLDYLEERRRRAALRAARYQQSLRRYHQRHVRARSLCVDDLVLRRVQTRAGLSKLSPMWEGPYRVVGVPRPGSVRLATGDGTELPNPWNIEHLRRFYP

SEQ ID NO: 189596 - protein, 94 aa, Oryza sativa
  unsure (1)..(94): unsure at all Xaa locations
  Clone ID: PAT_MRT4530_86090C.1.pep
YPIQSCLLILSCFRILNLIKKTISCFRIWFPENPSQXMIPANLLLTCLLTRSPFVFWDTYIERXDHPSVNSPLKHTFQTLQWMKDEKNHQGHSD

SEQ ID NO: 189597 - protein, 100 aa, Oryza sativa
  Clone ID: PAT_MRT4530_86091C.1.pep
PTRALRMACGMPYMSIVFHQPMLVILMSMSFMRHLGSSRIGRSHFRRSILRIEPIGWRGRTGLLVWWLVISPTSYASRWRASPSAAAAAARTARGGGVGK

SEQ ID NO: 189598 - protein, 40 aa, Oryza sativa
  Clone ID: PAT_MRT4530_86092C.1.pep
PSKTSTNERAASPASLAIAGKPTRLNLNITPRTETETKTK

SEQ ID NO: 189599 - protein, 38 aa, Oryza sativa
  Clone ID: PAT_MRT4530_86093C.1.pep
KVLLPPDHGAGLLAAGYLLPKLSYYPRRLSVPFMVFLP

SEQ ID NO: 189600 - protein, 65 aa, Oryza sativa
  Clone ID: PAT_MRT4530_86094C.1.pep
MVGSGYKYGNTIQVNLAYVIHMDLLIRYCGPSIQGRDGIEKESESLERKDLPNEKSNLRKVGSTN

SEQ ID NO: 189601 - protein, 184 aa, Oryza sativa
  Clone ID: PAT_MRT4530_86095C.1.pep
MASASSSSHSSRKRRRPSIPLIKCPSCGVKQILELTATTEANRGRIFFTCPDHKDGSGCNFWYWEEAYIKFLKRSGFIYEAACAELLKEAKMKDGDELKKSSAQEFKKEPDVGHFKELEDMIFILTKMMVLLKLFLAGATAGTEIQHETEFAPEIEIAPTEKTCTCNASPYLSHPNLIPPYNGT

SEQ ID NO: 189602 - protein, 115 aa, Oryza sativa
  unsure (1)..(115): unsure at all Xaa locations
  Clone ID: PAT_MRT4530_86096C.1.pep
LRLHRWLAFVVADWCLRLHGWPIMPLLLGIYIFTDRLAFVAADWCLRLHGWPIMPLLLGVYVFTDQLAFAVADXCLRLHGWPIVPLLLGVYVFNTXFAFAAADWCARHYKHLHQL

SEQ ID NO: 189603 - protein, 46 aa, Oryza sativa
  Clone ID: PAT_MRT4530_86097C.1.pep
MVKAALINGEEEMEESVACGILGWEDEGLHMKLGIANEVGLVHVYE

SEQ ID NO: 189604 - protein, 566 aa, Oryza sativa
  unsure (1)..(566): unsure at all Xaa locations
  Clone ID: PAT_MRT4530_86098C.1.pep
TPPLLGVYVSTXRPAFAAADWCFCLHGWLVXHRCWASTSSPTGRLICCRLVSSPTRSVGTYVFTDQXASSAADWCTRLHGWMVXTTVVGHLCFHRPAASSAADWCPRFHGWLVMLLLMGIIIFHHRPPSSPLTGIFAYTVGLLRSKNGSVRTSPSACRRRRRLVSSPIWLGGHXLTPLLLDIVVFTDXAASSAADXCLRLYGWLVXTTVVGRLRLYRXACLRHHRLEFSLIRLVGHTTVVGRLRLHRXACLRRRRLVSPPARLAXMPLLLGIYIFTDRLAFVAADWCLRLHGWPIMPLLLGVYVFTDQLAFAVADXCLRLHGWPIXRCCWASTSSTLVCLRRRRLVCSPSRLVGHTTVVGHISLHHWLAFVATDWCLCLHAWPIMPPLFNVYIFTDRPPRIMPTGAIVLTAGYVXPSLIGIIIFMPLPLQLVYTTTTTDGRHLLPSPTGYAAADWCFYLHNYASTLPVCFCCRRLVFTSSRLCNFVTMVERLHLYYLWHRQTIMPLLHELRYFTNHDVYKSLDISACTTKFDVVLIYYYKWFSNFQEFYSTTRSYSSRLYVQLFLD

SEQ ID NO: 189605 - protein, 708 aa, Oryza sativa
  unsure (1)..(708): unsure at all Xaa locations
  Clone ID: PAT_MRT4530_86099C.1.pep
MFKFLKEVVAGSGSGLKDFPYTIGEPYASAWGSWTHHRGTSKDDGSPVSIFSLSGSNPQDRHLVAGRNGVKRLRTVRHPNILSFLHSTEAEVPDGPAMKHTIYIVTEPVTPLSEKLKELNLGGTQRDEYFAWGLHQISKAVSFLNNDCKLVHGNVCVTSVVVTQTLELKLHAFDLHACAVLSEFDANNEASNSPMLQFEWLVGTQYKPMELTKSDWVSIRKSPPWAIDSWGLGCLIYELFSGAKLTRTEDLRNTASIPKSLLPDYQRLLSSAPSRRMNPSKLIDNSEFFQNKLVETIQFMEVLNLKDSVEKDSFFRKLSAYDFRXSLLKYLSKIQSDEEPAIRTNTTILLGNIANYMNYGTRKRVLINAFTVRALRDTFPPARAAGIMALSVTSSYYEMTEIATRILPNVVVLTFDPDSDVRTKAFQATDQFLQIAKQHHEKLTMGDNSAAEATGIQLKPGKAGLLGLAMSIYCQXGKGSDHGPVSSANASNSQISATSSVTXDNRSSTVAYAPSTCSSLDQTAPASARSSVDGWGEIENDNTQEENGSDXTGWDDVDPYDEKPPPSLLSNIQAAQKRPVAQPKQPVSNSSRLNQPKVPKPEEDPLWGSIAAPAPKNASKSSDIKPSTSHNDDDDLWGSIAAPPPKSAGKPLKPPPAANSDDLWGAIAAPPPSTKARPLASSGRGRGTKPAQPKLGAQRIGRTSSTGM

SEQ ID NO: 189606 - protein, 295 aa, Oryza sativa
  unsure (1)..(295): unsure at all Xaa locations
  Clone ID: PAT_MRT4530_8609C.1.pep
LPYNAVLGRPALVKFMAAVHYAYLQMKMPGPGGPISVHGDLKVTLACMEQRADHLADASKPEGGDKRLGTXSVPAAPRQRMITCDEVPVKEVALGRRPXPRPHESVKVRRQAPERQAFIREEVARLLEAGFIREVIHPEWLANPVVVPKANGKLRMCIDYTDLNKACPKDPYPLPRIDQIVDSTAGCDLLCFLDAYSGPTFQRTTRISLGSQLGRNVEAYVDDLVVKTRNQEMLLSDLAETFESLRSARIKLNPDKCVFGVHAGKLLGFLVSARGIEANPEKIRAIERMRPPQQT

SEQ ID NO: 189607 - protein, 125 aa, Oryza sativa
  unsure (1)..(125): unsure at all Xaa locations
  Clone ID: PAT_MRT4530_860C.1.pep
SARGQDQGARVDGAVGEGRRASVGGYLYFGRVGNKEEFHKETCRKVKALHQYDCLRANKATSAWGLEVRVPFLDKEFINVAMSMDPEWKMYNADLGRIEKXVMRKAFDDEEHXYLPKHILYRQKE

SEQ ID NO: 189608 - protein, 170 aa, Oryza sativa
  Clone ID: PAT_MRT4530_86100C.1.pep
MGNNLRCCLACVLPCGALDLVRIVHLSGRVDEYGRAVSAGEVLAAHPNHVLSRPCSSQQGAAGRILIVSPESELERGEIYFLIPAASVPDAKRRTSTGGGGAGRGHHVRSKSEGSAVAADRLGSPAGSASPETTRMMRAQKQQHQHRRRMSTGSHASPWQPHLSCITEDP

SEQ ID NO: 189609 - protein, 82 aa, Oryza sativa
  Clone ID: PAT_MRT4530_86101C.1.pep
WPSCREKNFAFSCCRQKFFRSSLIQKAKFEIVLGKAGKFYQLMPPPPEKKEAPATEVEAQGQSLFLKPKSLPVGALILGFFC

SEQ ID NO: 189610 - protein, 122 aa, Oryza sativa
  Clone ID: PAT_MRT4530_86102C.1.pep
SVRGMPFQEYSYCVARTTFRAHALGVAAAWVVQSIVEVYRCFSGKPSNDQAMFDEMDKVKLFGKKIYGITVKCGFSLVFASIGAGIGVLVHPVHGQWLGCTLGDFAGPIVAILVFEKFQLPL

SEQ ID NO: 189611 - protein, 135 aa, Oryza sativa
  unsure (1)..(135): unsure at all Xaa locations
  Clone ID: PAT_MRT4530_86103C.1.pep
TLLLHFLLPSYPTPARHLLSSRRCPLFSSQSQHRRCLFSHPIASPYLHVATAGPDPPVGRSCPPDPSAMTSLPAYSVARRRGLSREAHRQHRRRSSLHGSALHRERLCSPTLFFILTLPLNVIQXHSWVGKLNMI

SEQ ID NO: 189612 - protein, 292 aa, Oryza sativa
  Clone ID: PAT_MRT4530_86104C.1.pep
MEQPGSRSTAAGGEVEVEQLPGFRFHPTEEELLEFYLKQVVQGKKLKFDIIPTVHLYRHDPRELPGLARIGEREWYFFVPRDRKQATGGGGGGRPSRTTERGFWKATGSDRAIRCAADPKRLIGLKKTLVYYEGRAPRGTKTDWVMNEYRLPDAAAIPDTMQLQMQHDDMVLCKVYRKAVSLKELEQRVAMEELARSTTSSGTHNTGSPLQQDSSSISISSSSDAMKKEVVGVDEASAAAHELVRPATLSLPQLEVARPQSGLEWMQEPFLTQLRSPWMETWSPYYASVLNF

SEQ ID NO: 189613 - protein, 75 aa, Oryza sativa
  Clone ID: PAT_MRT4530_86105C.1.pep
PFLSFLFCPLHVGPRNYLVLQCDIQLLQLYVWGCGGGEGDLLFRGLERTVPVKVATPRNKMYPHLQSGMVVQSLL

SEQ ID NO: 189614 - protein, 1060 aa, Oryza sativa
  unsure (1)..(1060): unsure at all Xaa locations
  Clone ID: PAT_MRT4530_86106C.1.pep
MVDVDHDLLQDMLRDVEDLAQNERDGMKFSRLAMHPVENTLPETTYXKQSRFCVHWGXEENFKLRVLLFCTINDYPALGNLSGQTIKGKKACSDCKEHPRNRWLKKSRKMPAPKDLSGDEVHNMVKDISNEFGKKRKRSKTKEKEKNVCESLVGLMLNIPGKTKDGLNARLDLQDMNIRSELQPKRDAEIGKVYLPPACHTLSEDEKIAMLSCLKDIKVPSGYSARISKYVKLDDLKLVGMKSHDCHVLITQILPVAIRGILPPKVRHTIQRLCAFFNAIGQKVIDPEDLDGLQTDIVNTLCHLEMFFPLSFFDIMVHLSVHLVKQTKLCGPAFLREMWPFERYMGVLKSYIRSRAKPEGSIIKGYTTEEAIEFCVNYMSDADPIGVPASRHEGRLSGVGTIGRKRIRPDQASYVQAHYAVLQHMAEVVPYFEEHLAKIRDENLGRSDAWINREHNSRFNEWFKNRVTMSTDVPNETVQLLGMGPSWTIDTWQGYDINGYTFYTVKQDDKSTVQNSGVRIDAFQDQVGSNTYYGRIEEIWELNYVKFKVPLFHCRWVNLRTSVKADKEGFTLVDLSKVGYADEPFVLAKQVEQIFYTKDPSNKKMHIVRDGKRQIVGVDNVVDEEEYNHNLHVRPHIDLDDDPQETLAPPSSSLAKPAAVATEPAAVATEPAATAVVLPRQACRRHHRASSALHSDLRRRASSPTTLPPSRKPPPPPSLYTDRTSVGLPRRRRPRPHRPTSPTPIEHDAARPVPTCPIGVSTDRRRPPPSPGAAEPHRPSSDDFKLMPAAEKDIAWLMFKESFDYPAEHEDRLRRAAFKVMGTAWKNFKTKLVGEFVYNPANPDPREKFPWITEQVWEEFHAKKSTPESRARSEAYRLLQTRNQHPHRLGTTGYAGKEEEWQREDEEAEESCTPLVFGDIPHPRARNWARARYQKHDDGTIFMPNAEDQRVYEAIKELVAEQQASQEACSQRREDDLLTKALGNKEHRGRTRGIGSSVPWKYGFPDYAWQYKKRTSNKAEKDAHLEAKIQESIRAELTSEFDEKLESMRAKIRQEIREEQ

SEQ ID NO: 189615 - protein, 945 aa, Oryza sativa
  unsure (1)..(945): unsure at all Xaa locations
  Clone ID: PAT_MRT4530_86107C.1.pep
CLCADCKNENMFDSREDVHGHLIQQGFIKGYTCWVKHGEQESGSGAAADRSGAHNXEDEDEHDMFIPSPLGGEMVDVDHDLLQDMLRDVEDPAQNERDSMKFSRLVSDSETPLYAGCKAKHTKLSVTLDLMKLKASSGWTDKSFIDLLGILKAMLPTEDTLLGTTYEAKQVLCSLGLEVRRIHACPNDCILYHKQYADLDACPVYKASRYKRKKSADKGKKSKRGGPGKVVWYLPIIDLFKRIFANPNEAKLVRWHATERRNDGMLRHPADSIEWRNIDRKHKDFAADPRNMRICLCTDGMNPFGDMSSTHSTWPVLIANYNVPPWLCFKRKYIMLCLLIQGPRQPGNDIDVFLEPVIDDLEILXKEGVETWDAYGQENFKLRVLLFCTINDYRALGNLSGQTIKGKKACSDCKEHTRSRWLKKSQKMVYMGHRRXLPLHHAFRRKKKIFNGKRELQPTPKDLSGDEVHNMVKDISNDFGKKRKRSKTKEKEKNVCESLVDLMLNIPGKTKDGLNXSELQPIRDAKTGRVYLPPACHTLSKDEKIAMLSCLKDIKVPSGYSARISKYVKLDDLKLVGMKSHDCRVLITQILPVAIRGILPPKVHHTIQRLCAFFYTIVQKVIDPEDLDVLQIDIVNTLYHLEMFFSLSFFDIMIHLPVHLVKQTKLCGPAFQREMWPFERYMGVLKSYVRNRAKPEGSIIEGYTTEEAIEFCVNYMSDANRIGVPASRHEGRLSGVGTIRRKRIRPDQASYTQAHYAMLQHMAXSWPRLEEHLAKIRDENLGRSDAWINREHNSRFNEWFKNRVTMPTDVPNETTVDIWQGYDINGYTFYTVKQDDKSTVQNSGVCIDAFKDQLGSNTYYGRIEETXELNYVKFKVPLFRCRWVNLRTGIKADKKGFTLVDLSRVGYADESFVLAKQVEQIFYIKDTERAFMPLVGFGLLMTNGT

SEQ ID NO: 189616 - protein, 63 aa, Oryza sativa
  Clone ID: PAT_MRT4530_86108C.1.pep
MNPGQFRVVGPVLTGIRGCEAPHYYDGTGRSTPPDTLTGRGYTVAVPSVIRSVTDRSDAQHAV

SEQ ID NO: 189617 - protein, 1488 aa, Oryza sativa
  Clone ID: PAT_MRT4530_86109C.1.pep
MDQSTIDRSWMYAKNLKRHSTEYRKGVINFMNAAEEDRIRRNSDYMCCPCADCKNKNMFDSREDIHGHLIQRGFMEGYTCWVKHGEQESGSGVAADKSGAHNQKDENEHDMFIPSPLGGEMVDVDHDLLLVSDSETPLYAGCKAKHTKLSVTLDLMKLKASSGWTDKSFTDLLGILKAMLPVENTLPETTYEAKQVMCPLGLEKRKKSADEGNKSKRGGPAKVVWYIPIIDRFKRIFANLNEAKLVRWHATERRNDGPRQPGNDIDVFLEPVIDDLEILWKEGVETWDAYGQENFKLRVLLFCTINDYPALGNLSGQTIKGKKACSDCKEHTRSRWLKKSRKMVYMGHRRWLPLRHTFRRKKKIFNANSSPYEMQRQDIKVPSGYSARISKYVKLDDLKLVGMKPHDCHVLITQILPVAIRGILPPKVRHTIQRLCAFFNAIGQKVIDPEDLDGLQTDIVNTLYHMEMFFPLSFFDIMVHLPVHLVKQTKLCGTAFLREMWPFERYMGVLKSYVRNRAKLEGSIIEGYMTEEAIEFCVNYMSDADPIGVPASRHEGRLSGVGTIGRKRIRPDQASYAQAHYAVLQHMAEVGPYFEEHLAKIRDENLGRSDAWINREHNSWFNEWFKNHVTMSTDVPNETVQLLGMGPGLSWTIDTWQGYDINGYTFYTVKQDDKSTVQNSGVRIDAFQDQVGSNTYYGRIEEIWELNYVKFKVPLFRCRWVNLRTGVKADKEGFTLVYLSKVEQIFYIKDPSNKKMHIVRDGKRRIVGVDNVVDEEEYNHNLHLVPTAEKGIAWLTFKESFDYPAEHEDRLRRVAFKVMGTAWKNFKTKLVGEFVYSPANPDPREKFPWITEQVWEEFHAKKSTPESRARSEAYRLLQTRNQHPHQLGATGYAEDQRVYEAIKELVAEQQASQEACSQRREDDLLIKALGNKEHRGRTRGVGSSVPWKYGFPDYAWQYKKRTSNKAEKDARLEAKIRESIRAELTSEFDEKLESMRAKIRQEIREEQQIPQATAAAAHKELGSPTEKRSSCASTELAENPTSVDSAVDHITEPTSCTLTVRVMPTFTVPAAEGLAYKPTPETRVHGAQLRADCAKVQVDSVKPEYELFPLKYPPNDEVLSLGNARGIFIQWPKDLIEIRLQYDTDFGEDRTEADSKAIHEPPPMKKSRKAHSSPQRITLNKPEAKGRGRGGKVQASLLAPRKLDLGKGQEETKGKEVKKKYVAPQEFQLGMPLVGDDVLAAMGTACKDLHLYYMEKSNVRKPSKATDILGQHDGKPFLGPTNYIVVDFKDLFDLYRLRAVDTSLLKCYSLLSWQWCQKHAPEVAFLYPQVVTVTNLQNDRQGMVNYIYDTLWSRRDKEYIMCAYNQYAHWILLVITPKWSTCHYLNSRIDKNAYDWTPIQLAIDEAWAQYVQRGGLRKTGHDTLIHKKDFPVKQQIGDQCGFHVCHNMRLLYREKVKTLAEFEGTIIKSLTTSFEEAMMNTYYATVMM

SEQ ID NO: 189618 - protein, 120 aa, Oryza sativa
  Clone ID: PAT_MRT4530_8610C.1.pep
PTRTTTRPPTRPIAPIHTVVVNMVVLSSAVVGTDVTIAVWGLVYIPTAITIMNAIRNPGSVHLMPFWILFENVMAMHRMRAALSGLLVTARANYWVVTENVGDQVKVELDVPSFRPLKPT

SEQ ID NO: 189619 - protein, 89 aa, Oryza sativa
  Clone ID: PAT_MRT4530_86110C.1.pep
MTFSVTLSHLECYRIPIPQLHMNNVVVTTHRTVSVKTTPEMGEEEAAAMPTAILLMQCKELKTSVLTPAMVSVLWTHDKYACMLVMRGS

SEQ ID NO: 189620 - protein, 380 aa, Oryza sativa
  Clone ID: PAT_MRT4530_86111C.1.pep
MEQSTIDRSWMYAKKLKRHSTEYRKGVINFMNAAEEDRKRRNSDYMCCPCADCKNEKMFDSGEDVHGGEMVYVDHDLLQDMLRDVEDPAQNERDSMKFSRLVSDSEMPLYAGCKAKHTKLSVTLDLMKLKASSGWTDKSFTNLLGILKAMLPAENTLPETTYEAKQVLCPLGLERIFANPNEAKLVHWHATERRNDGPRQPGNDIDVFLEPVIDDLEILWKEGVETWDAYGQENFKLRVLLFCTINDYPALGGSKKKIFNDKRELQPTPKDLSGDEVHDMAKDISNEFGKKRKRSKTNEKEKNVCESLVGLMLNIPGKTKDGLNARLDLQDMNIRSELQPIRDAETGTSGLTIKNKQQRTSGPTAPSSQALNWGISQDST

SEQ ID NO: 189621 - protein, 391 aa, Oryza sativa
  Clone ID: PAT_MRT4530_86112C.1.pep
MVHNIHRSDTGGWDMKTAAYRRQGEEEECLDRIPTLLARIDGVAGAADKEKDNSRQSTGSSATGGRQELCDGCDVRAQPPLGGLGASAPTSPLRASSVFGLGLGRARRPLSPPRCLLVPLAGLPTSSLSVRACRLPCRLLSARSHWHPHPPASLRHCSLSASAEKIERCHVGATSAKTDDNIILLRDLVRTGFDENRIRYKVKGPQLNLLHPIIIAVRDRNTGSGQQRVNHRVGRSPIYIQVVYSLGVVFMGLYFCTLEELLRVAWANSIHLHVARPDSRIRSHAQPSDCISTRHRRLIQHIRRVTAADLRPDLLPAAPKPLYPLRLHMSRLRGHLVGSIIGGEEAWRWCRGSSAGGGTSSTSGAFPGSAWSPTTATPWEPPRGARTVAFR

SEQ ID NO: 189622 - protein, 1231 aa, Oryza sativa
  Clone ID: PAT_MRT4530_86113C.1.pep
MSCTYAYRFKFVTIGDAGVGKSCLLLQFTDKRFREVEDLTTGVEYGACVVAVDGKNTKLQIWDTFAKEHGLLFMEASAKTAHNVEKAFILAARTVHKKIEDGVINLLDEPAPKDLSGDEIHNMVKDISNEFGKKRKRSKTKEKEKNVCESLVGLMLNIPGKTKDGLNARLDLQDMNIRSELQPIRDAETSKVYVPPACHTLSKDEKIAMLSCLKDIKVPSGYSARISKYVKLDDLKLVGMKSHDCHVLITQILPVAIRGILPPKVRHTIQRLCAFFNAIGQKVIDPEDLDGLQTDIVNTLCHLEMFFPLSFFDIMVHLPVHLVKQTKLCGPAFLREMWPFERYMGVLKLEHNSRFNEWFKNRVTMSMDVPNETVQLLGMGPSWTIDTWQGYDINGYTFYTVKQDDKSTVQNSDVRIDAFQDQVGSNTYYGRIEEIWELNYVKFKVPLFRCRWVNLRTGVKADKEGFTLVDLYKVGYADEPFVLAKQVEQIFYIKDPSNKKMHIVRDGKRRIVGVDNVVDEEEYNHNLHSSSLAKPAAVTTEPPRPSIRTSAAEPPHRRPPFPSRKPLPPPSLYTDRTGVGLPRRRRPRPHRPTSPTPTEHDAARPVPTCPIGVSTDRRRPPPSPGAAATEPHRPSSGESSIAPPSANWRQKFSILQDDFKLVPAAEKDIVWLTFKESFDYPAEHEDHLRRAAFKVMGTAWKNFKTKLVGEFVYNPANPDPREKFPWITEQVWEEFHAKKSTPESRARSEAYRLLQTRNQHPHRLGTAGYAGLGTRNMMMAQSSCQMQKINEYTKLYAVDYITEPTSCTLTVRVMPTFTVPAAEGLAYKPTPETRVHGAQLRADCAKVQVDSVKPEYELFPLKYPPNDEVLSLGNARGTFIQWPKDLIEIRVTARPTTAPGSRPPKRPASAPSAPPAQDRHAQFYDVQLQYDTDFGEDRTEADSKAIHEPPPMKKSRKAHSSPQRITLDKPEAKGRGRGGKVQASLLAPRKLDLGKGQEETKGKEVKKKYVAPQEFQLGMPLVGDDVLATMGTACKDLHLYYMEKSNARKPSKATDILGQHDGKPFLGPTNYIVVDFKDLFDLYRLRAVDTSLPKCYSLKTGHDTLIHKKDFSVKQQIGDQCGFYVCHNMRLLYREKVKTLAEFEDYFCAITRIYIPSNIIKKYFDNMKEVATMGARKTLAMFKSLYPRMDINVAGDGFLDGTIDEQALELINEAQESAGKIAFDVLDNFCE

SEQ ID NO: 189623 - protein, 602 aa, Oryza sativa
  unsure (1)..(602): unsure at all Xaa locations
  Clone ID: PAT_MRT4530_86114C.1.pep
MPSTEPGAAVTEPAATAVVLPRASTPTGPVSAFLVVDARILTDARRRPPPSPTPPARRRPTKPASPPTGXPSTEPGAAAANSSVAEPATAATETAASTEPNATSTDQRRPPPSPAPPPPSPTDRPQQGEPMSTTTNGSSRARTPRTGNKIPKERFRITAVDAVGLPTSPRKILSRFRSICGVIGRQKFSILQDDIKLVPAAEKDIAWLTFKESFDYPVEHEYRLRRAAFKVWEEFHAKKSTPESRARSEAYRLLQTRNQHRHRLGTAGYADKEEEWQREDEEAEESCTPLVFGDIPHPRASNWARARYQKNYDGTIFMPNAEDQRVYEAIKELVAEQQASQEACSQRREDDLLTKALGNKEHRGRTQGVGSSVPWKYGFPDYAWQYKKRTSNKAEKDARLEAKIRASIRAELTSEFDKKLESMRAKIRQEIREEQQNPQAAAAAAHKELGSPTQKRSSCASTELAENPTSVDSAVDHITEPTSCTLIVRVMPTFTVLAAEGLAYKPTPETRVHGAQLRADCAKVQVDSVKPEYELFPLKYPPNDEVLSLGNDHGTFIQWPKDLIEIRVTYDTDLGEDRTEADSKAIHEPPPMKKSRKAHSSP

SEQ ID NO: 189624 - protein, 288 aa, Oryza sativa
  Clone ID: PAT_MRT4530_86115C.1.pep
MSTTCSSALAADPASPVIAAVDPATPVVAAADPVFPVNAAAGSGLELAAERRRQPVAYLVAPYVEFHLVRCLMSQFRGRLRNSSSHRHSTAERTRDQSLHLPQVYPKQENPLWFPCPPVPDKRRERGVHGRVPLGSRSVHHEGGSRRTSTPGKEKHPSQAARRRRPTARRRCDGVREGEKRKGEETTVLTEQTRRREVDGVAGGEEETARSFGSSASASFPRSLYSTEGWTGKRRKRRSGWWRRRAPMRSRPPARGGRSCDGGGTRRERRGGRGERRERAAGVTSYSP

SEQ ID NO: 189625 - protein, 36 aa, Oryza sativa
  unsure (1)..(36): unsure at all Xaa locations
  Clone ID: PAT_MRT4530_86116C.1.pep
LIDKVIAFERGDLVFVFNCHPNKTYKGYKVXCDLPG

SEQ ID NO: 189626 - protein, 167 aa, Oryza sativa
  unsure (1)..(167): unsure at all Xaa locations
  Clone ID: PAT_MRT4530_86117C.1.pep
MLTLAFSLGLSDDGDYKGSTLVLDGRVDFGGGGAAERAVVGGTGRFRRARGYSLMTKFGNPTPSTGVFEMDTGENECLLEVNARFARCTSGARRGKSLITSXFVGSGRYVNQIMHTAAYLFSKESWNGRYCRIVKGSAHRPKLKLYHPKPIVILSRVLKNHFYGKSK

SEQ ID NO: 189627 - protein, 1386 aa, Oryza sativa
  Clone ID: PAT_MRT4530_86118C.1.pep
MESKNQEVEQQQTEVVRIIRKMKMSMTCPRQPGNDMDVFLEPVIDDLEILWKEGVETWDAYGQENFKLRVLLLCTINDYPALGNLSGQTIKGKKACSNCKEHTRSRWLKKSRKMPAPKDLSGDEVHNMVKDISNEFGKKRKRSKTKEKEKNVCESLVGLMLNIPGKTKDGLNVRLDLQDMNICSELQPIRDAETGRVYLPPACHTLSKDEKIAMLSCLKDIKVPSGYSARISKYVKLDDLKLVGMKSHDCHVLITQILPVAIRGILPPKVRHTIQRLCSFFNAIGQKVIDPEDLDGLQTDIVNTLCHLEMFFPLSFFDIMVHLPVHMVKQTKLCGPAFLREMCPFERYMGVLKSYVRNRAKPEGSIIEGYTTEEAIEFCVNYMSDADPIGVPASRHEGRLSGVGTIGRKRIRPDQTSYAQAHYVVLQHITEVGPYFEEHLAKIRDENLGRSDALINREHNSRFNEWFKNHTWQGYDINGYTFYTVKQDDKSTVQNSGVRIDAFQDQVGSNTYYGRIEEIWELNYVKFTVPLFRCRWVNLRTGVKADKEGFTLVDLSKVGYADEPFVLAKQVEQIFYIKDPSNKKMHIVRDGKRRIVGVDNVVDEEEYNHNLHVRPHIDFSRLLRTLAPPPTPTSPPSSSLAATATETATAATEPAAAATEPLHQLASAFLIVLTDARRRPPDADLHRARRRRRELLLRRARRRRHRARRRLHRPATPSTEPGAAAANSSFAEPGAAATEPGAATTEPPRPTSAVDAVGLPASPKKILSRFRSICGVIGRQKFNILQDDIKLVPAAEKDIAWLTFKESFDYPAEHEDRLRWAAFKVMGNAWKNFKTKLVGEFVYNPANLDPREKFPWITEQVWEEFHTKKSTPESRSSSEAYRLLQTKNQHPHRLGTAGYAGKEEEWQREDEEAEESNTPLVFGDIPHPRARNWARARYQKKDDGTIFMPNPEDQRVYEAIKELVAEQQASQEACSQRYEDDLLTKVLGNKEHRGRTRGVGSSIPWKYGFPDYAWQYKKWTSNKAEKDARLEAKIRALIRAELTSEFDEKLESMRAKIRQEIREEQQNPQAAAAGAHEELGSPTQKRSSCTSTEVAENPTSVDSAIDHITEPTSCTLTVRVMPTFTVPAAEGLAYKPTPETRVHGAQLRSDCAKVQVDSVKLEYELFPLKYPPNDEVLSLGNARGTFIQWPKDLIEIRITYDTDFWEDRTEADSKAIHEPPPMKKSRKAHSSPQRITLDKPEAKGRGRGGKVQSSLLAPRKLDLGKGQEEAKGKEVKKKYVAPQEFQLGMPLVGDDVLAAMGTACKDLHAYYMEKSNARKPNKATNILGEHDGKPFLGPTNYIVVDFKDLFDLYRLRAVDTSLLKCYSLLSWQWCQKNAPEVAFLDP

SEQ ID NO: 189628 - protein, 553 aa, Oryza sativa
  unsure (1)..(553): unsure at all Xaa locations
  Clone ID: PAT_MRT4530_86119C.1.pep
MAFRRNRGQAGVEVDAATPREETARPARTGGEEAATRPRVATAQPDGAQARREVRLLTKALGTKEHRGRTWGIRSTVLWKYGFLDKRTSNKAEKDARLEAKIRASIRVELTSEFDEKLESMRAKIRQEIREEQHNPQAAAAAAQEELGSPNQKRSSCASTELAENPTSVDSAINHITEPTSCTLTVRVMPTFMVPAAEGLAYKPTPETRVHGPQLRADCAKVQVDSVKPEYELFLLKYPPNDEVLSLGNARGTFIQWPKDLIEIRITLQYDTDFREDRTEADCKAIHEPLPMKKSRKAHSSPXRITLDKPDAKERGRGGKVKASLLAPRKLDLGKGHEETXGKEVKKKYVAPXEFQLGMPLVRDDVLATMGTTCKDLHVYYMEKSNARRXNRATDILGEHDGKPFLGPTNYIVVDFKDLFDLYRLRAVDTSLLKCYSFAHWILLVITPKWSTCHYLNSRIDKQAFDWTPIQLAIDEAWGQYVQRGGLRKTGHDTLIQKKDFSMKQQIGDQCGFYVCHNMRLLYREKVKNLAEFEGQIAKSLPTSFEEVLNNFC

SEQ ID NO: 189629 - protein, 2739 aa, Oryza sativa
  Clone ID: PAT_MRT4530_8611C.1.pep
MARGSALLDGSVLPPSRIVNERHAGLPRRFMPESATGREIVMLGEGRPAPDYPGRSIFFLPFAMAGLVPPFPHFFMDVLEFYDLQMAHLTPNAVMTLAIFAHLCEMFIGVRPSLQLFRWFFTVQSVSPPSVVGGCYFQPRGPVLNRYIPCGLRKKWDDWKSDWFYTPLANEARLRLPSQPPAQVSSWRAPVDLGEDYDAVLDRLAGLRSQGLTGAMVYGDYLRRRIAPLQRRARNAWEYTGPEDYMRTHQGARWDWAPEDFKIVVQRVLNLSSAEASRIPQEILPLCSDPDRASILTIMMEVGASEERAPKGHDGAGERRRGEQSAPGGGRASGPRAGGSGSSRPADAQGKRKLGGTPPPSPPRGGGAARANSRRPEGAAPTSQPEGERKKKRLRKTGETEPCRGNLISPPRWSFNRPPRSDVPSHSSRHPKSGQSEAEDPAAAEERRRESDRREAAARLREAEEAAREAARVRQAEEAAREEAARARQAEEAAREEAARSRQAEATAAAGASLGPTPSGGPQATSSEAACDEAAGASPGPTSPGDAQDQTGPGDIPEPSASSGGPSHVAFSPRRLFSSSSVAPLSAEPLLQALAAANTAVLDGFNTQVEALRAERAELEAAWARVEEGRRSVDAMVEVGRKAHRRHVSELEARKAALAEIAREVEEERAAALISTTAMIEAQDTLRLQHASWEAELKKKLDAAQGVLDSAAARERRVTETEAAFRRREEALEARAMALEEHAGAVERGLTDRKAAAGLREATLAAHEAACAEEECALRLREDALAERERALEEAEARTKRLADSLSLREAAQEEQARRNLECVRAERAALEQRAADLEAREKELDARAPIGGAAAGESDLAARLAAAEHTVAEMQRALDSSTGEAEALRLAGEIGPDMLWDAVSRMKRAGRQAGLWRGQTTVPPTNLEGLAPHLNRMAWVLERLPEELEKTINGPNLPPASVHSWEDLCQQFTMNFQGTYPRPGEEADLHAVQRGDDESLRSYIQRFCQVRNTIPCIPAHAVIYAFRGGVRHNRMLEKIASKEPQTTAELFQLADRVARKEEAWTWNSSGSGVAASAAPGSAAQTGRRDRRRKKRPDRSGDEGHVLAVEGAPRATRKGRPASDKKNEAGTPSRERLAGRWCSVHNTSLHDLADCRAVKNLAERTRKWEEDRRQERREGKSPAVPSGKRRSEAKQKAPAVDIDDGDDDLGFQEPGATIATVDGGACAHVSRRSFKAMKRELLAMAPTHEAMRRARWSEVALTFDQTDHPPCIARGGQAAMVVSPTICNVKLGRVLIDGGAALNILSPAAFDAIKAPGMVLQPSQPIIGVTPGHTWPLGHIDLPVTFGGPANFRTERVSFDVADLSLPYNAVLGRPALVKFMAAVHYAYLQMKMPGPGGPISVRGDLKAALACMEQRADRLAAASKPEGGDERLGPSAPTAPRQRMATCDEVPEDALVSFLRANADVFAWRPADMPGVPREVIEHRLAVRPGARPVRQKVRRQAPERQAFIREEVAKLLEAGFIREVIHPEWLANPVVVPKANGKLRMCIDYTDLNKACPKDPYPLPRIDQIVDSTAGCDLLCFLDAYSGYHQIRMAREDEEKTAFITPVGTYCYTSMPFGLKNAGPTFQRTTRISLGSQIGRNVEAYVDDLVVKTRNQETLLSDLAETFENLRSARIKLNPDKCVFGVPAGKLLGFLVSARGIEANPEKIRAIERIRPPSKLRDVQCVTGCMAALSRFISRLGEKALPLFKLLKRSGPFTWTEEAEHALTQLKAYLSSPPVLVAPEPNEPLLLYLAATPQVVSAALAVERDEDNPHSAHPHPVLTWPGSKQGGEAPEPNGGLRPLTTGVGPLPARQTVLGAPDPQEGPEATAGRPHLSPSDPEANPVPIRPGREQGEEAPKPNGGLRPLTTGVGPLPACPMTPGAPDPQDGPEATVGRPLLSSSDPEVIGTEDECAPRGHSDEERPGGTVPSEEDRPRRKVQRPVYFVSEALRDAKTRYPQAQKMLYAILMASRKLRHYFQAHRITVVTSYPLGQILHNREGTGRVVKWAIELSEFDLHFEPRHAIKSQALADFVAEWTPAPETVSIPEASTNPSQLPHTAHWVMQFDGSLSLQGAGAGVTLTSPNGDVLRYLVRLDFRATNNMAEYEGLLAGLRVAAGLGIRRLLVLGDSQLVVNQVCKEYRCSDPQMDAYVRQVRRMERHFDGIELRHVPRRDNMIADELSRLASSRAQTPPGAFEERLTQPSARPDPLGETDAPDRPPRPVGVQASGPEGSAPSSFRLIAWISEIQTYLADKTLPEDREGSERVQRISKRYVLVEGTLYRRAANGILLKCLPQEQGVELLADIHEGECGAHSASRTLVGKAFRQGFYWPTALNDAVDLVRRCRACQFHAKQIHQPAQALQIIPLSWPFAVWGLDILGPFKRAPGGFEYLYVAIDKFTKWPEAYPVVKIDKHSALKFIKGITARFGVPNRIITDNGTQFTSELFGDYCEDMGIKLCFASPAHPRSNGQVERANAEILKGLKTKTFNILKKHGDSWIEELPAVLWANRTTPSRATGETPFFLVYGAEAVLPSELTLRSPRATMYCEADQDQLRRDDLDYLEERRRRAALRAARYQQSLRRYHQRHVRARSLCVDDLILRRVQTRAGLSKLSPMWEGPYRVIGVPRPGSVRLAMGDGTELPNPWNIEHLRRFYSTPERGGGRVSGFGSGQPRTPLGCAGLAGGYHTCTYIPFSFISAFQ

SEQ ID NO: 189630 - protein, 491 aa, Oryza sativa
  Clone ID: PAT_MRT4530_86120C.1.pep
MDQSTIDRSWMYEKILKRHSMEYRKGVINFMNAVEEDRKRRNSDYMCCPCADCKNENMFDSGEDVHGHLIQRGFMVYTCWVKHAEQESGIGAAADRSGAHNQEDEDEHDMFIPSPLGGEMVDVNHDLLQDMLRDVEDPAQNERYGMKFSRLVSDSETPLYAGCKAKHTKLSVTLDLMKLKASSGWTDKSFTDLLGILKAMLPVENTLPETTYEAKQVLCPLGLEVRRIHVCPNDCILYHNQYADLDACPVYKASRYKRKKSADEGNKSKRGGPAKVVWYLPIIDRFKRIFANPNEAKLVRWHATERRNDGKKACSDCKEHTRSRWLKKLGIGPSWTVDAWHGYDINGYTFYTVKQDDKSTVQNSGVRIDAFQDQVGSNTYYARIEDIWELNYIKFKVLLFRCHWVNICTGVKADKEGFTLVDLSKVGYADELFVLVKQVEQIFYIKDPSNKKMHIVRDGKRRIVGVENVVDEEEYNHNLHVRPHIDLDDDP

SEQ ID NO: 189631 - protein, 81 aa, Oryza sativa
  Clone ID: PAT_MRT4530_86121C.1.pep
GMRRSSCIERNSVANQHFVDQVLVVYVIGINNHFVIIMSLFFPVQVPRCGRCFVVPNSCSPGDPLVVERPPPGRSPQTRSG

SEQ ID NO: 189632 - protein, 901 aa, Oryza sativa
  Clone ID: PAT_MRT4530_86122C.1.pep
MWSFERYMGVLKSYVRNRAKPEGSIIEGYTTEEAIEFYVNYMSDADPIRVPASRHEGRLSDTWQGYDINGYTFYTVKQDDKSTVQNSGVRIDAFQDQVGSNTYYGRIEEIWELNYVKFKVPLFRYRWVNLRTGVKANKEVSRLLRTLAPPSSSLAKPATVATEPAAAAMSSLAEPAAVATDAEAEAAASLAEPTAATTEPPRPSIRTSAASSPTTPPETAARPAPTCPTGVSTDRRRPPPSPPPPPRTPPSPSPPPPPPRPLPPPSPVPPPPTGDALHRARCRHHRAQPAILRSICGVIGRQKFSILQDDIKLVPAAEKDIAWLMFKESFDYPAEHEDRLRWVALKVMGNAWKNFKTKLVGEFVYNPANPDSREKFPWITEQVWEEFHAKKSTPESRARSEAYRLLQTRNQHPHWLGTAGYADYVWQYKKWTSNKAEKDARLEAKIRASIRAELTSEFDEKLESMRAKIRQEIREEQQNPQAAATVAHEELGSPTQKRSSCASTELAENPTSVDSTVDHITEPTSCTLTIMVMPTFTVLAAEGLAYKPTPETRVHGAQHWADCAKVQVDSVKPEYELFPLKYPPNDEVLSLGNAHGTFIQWPKDLIEIRVTARLTTAPGSRPPNRPASAPSTPPAQDRHAQSYDVQLQYDTDFGEDRTEADSKAIYEPPPMKKSRKAHSSPQRITLDKPEAKGRGRGGKVQASLLAPRKLDLGKVQEETKGKEVKKKYVAPQEFQLGMPLVGDDVLAAMGTACKDLHLYYMEKSNARKPNKATDILGEHDGKPFLGPTNYIVVDFKNLFDLYRLRAVDTSLLKCYSLKTGHDTLIHKKDFPVKQQIVDQCGFHVCHNMRLLYREKVKTLAEFEGTITKSLSTSFEEVREEIASFILREIINPKGMFRLKLK

SEQ ID NO: 189633 - protein, 595 aa, Oryza sativa
  Clone ID: PAT_MRT4530_86123C.1.pep
MDERRQRFRHVSHFPDERIAGLSCAVLFVPEGGTDYGGVRDAMPLLKRRPFFLLDPPKDLNPEDKVFQVREYLNRVNLYRERVWTCKVSGKSNLTYEEALVSEHHAAEKAQQLPRELIAPVLHMIQYSTLSLTDLVNKIYSILQEDFFEGLELNGRKDGSVSACKILKVIIGSGNTKMYEVGWIGQDNAETNTSVLQADDLVIRKKARASRSMLKIYIRESTSQNSPWIIHANLAKKYGIPTEPPKDLLLLIVHFLHDYAGEPIDDLLLRPTADDPSLSKRRPLSTDFRVPVDSVGDLLMVWDFCMTYGRILCLSPFSLSDLENAICHKESNLVLLVELHAALFHLLIKDGGGYFMFLQNKRRKLKVTLVTWAEYLCDFLEMTSKEEFSSSLSTVRRGHYGLVHTAVKLKILRELVDEAITTSAVRQNIDEKIDQQQAIAASKRELARNKKEEHKLAMEGVTEKEMSQTDAAENVNGNVNGQVVEKEGKEKKNIYANKMGEGKVHPVRTYTLLHVNLHMHVHSYICKCMSLLKLSMTAGASLVANLCFFCIADVRISMVTLIEKRMALEMGQFSGFLHSLNTKAMSSQRGLDTYL

SEQ ID NO: 189634 - protein, 303 aa, Oryza sativa
  Clone ID: PAT_MRT4530_86124C.1.pep
MAPKRLVCFLAVAAALATTCHGWGAGAGDVVSSSAAALSFVDRLRQMMIPAAVGDGDYCDSWRVGVEANNVRGWTAAPRKCDNYVENYMRGHHYRRDSKVVVDEAAAYAEAAVLSGDPAADANATWVFDVDETALSHVKFYKKHGFGYHRTDEPAFMEWLIAGRASALPNTVTLYKKLLLLGVKIVFLSDRPDTPELRNATATNLIKEGFDCWDELILRSENSTATGSVVEYKSGERKKLEEEKGMVIIGNIGDQWSDLLGSPEGRRTFKLPNPAYYIDNYKRAGAAVRAAVAITASSSSSSS

SEQ ID NO: 189635 - protein, 58 aa, Oryza sativa
  Clone ID: PAT_MRT4530_86125C.1.pep
VCAGLWFLTLVKGRDWETRFLLPIKNGVFGSSWEGCFLANTVLPCSCGLSFFNTQRFD

SEQ ID NO: 189636 - protein, 62 aa, Oryza sativa
  Clone ID: PAT_MRT4530_86126C.1.pep
ALHCGLAYGLLFFSHATLPPVAQHLHLLELVNIHLGCGEEGERGGGAEAAARWEERIGGVDE

SEQ ID NO: 189637 - protein, 128 aa, Oryza sativa
  Clone ID: PAT_MRT4530_86127C.1.pep
MHLNQLVISHLACERGENRLFEGCHFSVSSGEWVQIEGHNGIGKTSLLRILAGLALPVAGEVLWNNLSIHKQRDEYYAELFYLGHYAGIKPELSAWENLRFYQKMQGLSLDDEALWFALDKVSLVERA

SEQ ID NO: 189638 - protein, 183 aa, Oryza sativa
  Clone ID: PAT_MRT4530_86128C.1.pep
SKASQSGQSASSASSSSCIGGCSKWASGAASPAWATASCSGGCSQWASGAASPSPTWATASCRGGCSQWASGAASPAWAATSCGGGCSPATRRAAPPLSSTAAPAPWSCLPALLLEASGRPRFLSPFLASGRPLLSSATAEAPAPWSGASRSFLASPLNAPLPSATAEAPTCSSSAPNSWSHR

SEQ ID NO: 189639 - protein, 33 aa, Oryza sativa
  Clone ID: PAT_MRT4530_86129C.1.pep
KIWSYSLNTCIFRCSERKACRLLILKLYILHVS

SEQ ID NO: 189640 - protein, 37 aa, Oryza sativa
  Clone ID: PAT_MRT4530_8612C.1.pep
TLAQAQAPLALNQPPTYGVNPREYGAPSDISIRGGVT

SEQ ID NO: 189641 - protein, 401 aa, Oryza sativa
  Clone ID: PAT_MRT4530_86130C.1.pep
MEAAPAGAARVAEDDGGGAGMEATPAGEARATKAGGSGGYGDVESMRGPYASKWIEIWYGMFLTFLGLVDLLAVSNSRVCVRLPPTLCGHAYCREARLPLCVGTPIAAALVPVSESIAVTPASVSTSTTSMCASASAPTAAVYGGQERHRPCSHVSDGLHVAGASHVQPLLVTGYMEARRDMHWIGDGGLGNRILAAASAFLYAVLTARVLLVDTSNEMDELFSEPFPGTAWLLLRDFPLVLMRKTHTGLEEFVQLYPHDMNTLVCFVLTTHHDTLHVECGLEWDSGKERQSSGWRGNPANLSPSPAAIGARSREAMATLEATSLAQWLGQRSTGWTGTAMRRKAALWTSGATTSSTQGVRPVRNEISKTRMYQAEVVDHVLMDEMRRSSLEKSRNGSNMS

SEQ ID NO: 189642 - protein, 116 aa, Oryza sativa
  unsure (1)..(116): unsure at all Xaa locations
  Clone ID: PAT_MRT4530_86131C.1.pep
GLNPSCPIRSIRATXSQRSRGLTCHVGMVHRDYIGCXNHHHPNPNPYSTSPSQINKDMGRKISDXNTRWILWYPTRSYIYNSCSISVMLVYALPXQSXFXTKETXXTRWPXKVXYI

SEQ ID NO: 189643 - protein, 1652 aa, Oryza sativa
  Clone ID: PAT_MRT4530_86132C.1.pep
MSFVISPTLLTIVNDAIFGNNLISSWFGMMPRYKPEYLFGVEGFVQELRTMSFAIGFGTAPFYAQIPHDRHEEKCRVKVTLNSNSEDIPSVMFEAGGRNYIHACQEVARIAIGELRDRYSDQLADTEYRYHPRQPQGSDRGSYLETEGIENDATTRHLVEMLWAMDESRAETVLAAQDREDRNRGKICKLEDKVDRLEKELATLKGEAPPQKARIRLTARKRALFVPRYQLAPKMVNTRSNGNGPNNPNNNNNGENPTLAQVLAQQTQLMNMMMQQLQNQQNQGNNHAPPQNKLAEFLRVRPPTFSSTTNPVEAGDWLHAIEKKLDLLQCTDQEKVSFASPQLHGPASEWWDHFRLNRTTAEPITWLEFTAAFRKTHIPSGVVSLKKKEFRSLTQGSRSVTEYLHEFNRLARYAPEDVRNDEERQEKFLEGLNDELSYPLMTGDYHDFQKLVDKAIRQEDKYNRMEQKKRRIAQFKTQQGNNQKPRLTLGPQSMPQGGSSSVVRPQRQFFNNNAGNNIRNQAPRPVAAPAQQQPAKREQGSKPVVCFNCGDPGHYADKCPKPRRVKVVPAQSNSTAPAPKARVNHVAAAEAQDAPDVILEDLRRPLMVSTPSNQALSLQRSPSVRIEIKGVPFLANLILLESKDLDVILGMDWLARHKGVIDCANRKVTLTRNDGRVVTVHALSSEFLRSRLNQIILEKIPIVREYPDVFPDDLPSMPPKRDIEFRIDLVPGTTPIHKRPYRMAANELAEVKRQVDNLLQKGYIRPSSSPWGAPVIFVEKKDHTQRMCVDYRALNDVTIKNKYPLPRIDDLFDQLKGATVFSKIDLRSGYHQLRIKEEDIPKTAFTTRYGLFECTVMSFGLTNAPAFFMNLMNKVFMEYLDKFVVVFIDDILIYSRTKEEHEEHLRLALEKLREHQLYAKFSKCEFWLSEVKFLGHVISAGGVAVDPSNVESVTNWKQPKTVSEIRSFLGLAGYYRRFIENFSKIAKPMTRLLQKDVKYKWSEECEQSFQELKNRLISAPILILPDPKKGFQVYCDASKLGLGCVLMQDGKVVAYASRQLRPHEKNYPTHDLELAAVVHALKIWRHYLFGTRTEVYTDHKSLKYIFTQPDLNMRQRRWLKLIKDYDMGIHYHPGKANVVADALSRKGYCNATEGRQLPLELCKEFERLNLGIVSRGFVAALEAKPTLIDQVREAQINDPDIQEIKKNMRRGKAIGFLEDEHGTVWLGERICVPDNKDLKDAILKEAHNTLYSIHPGSTKMYQDLKERFWWASMKREIAEYVAPLKIPEWKWEEIGMDFITGLPRTSSGHDSIWVIVDRLTKVAYFIPVKTTYSGSRLAELYMARIVCLHGVPKKIVSDRGSQFTSNFWKKLQEEMGSKLNFSTAYHPQTDGQTERVNQILEDMLRACALDFGGSWDKNLPYAEFSYNNSYQASLQMAPYEALYGRKCRTPLLWDQTGERQVFGTDILREAEEKVKVIQERLRVAQSRHKSYADNRRRDLSFEEGDYVYLRVTPLRGVRRFHTKGKLAPRFVGPYKIVSRRGEVAYQLELPQSLAGVHNVFHVSQLKKCLRVPTEEANLEQIEVQEDLTYVERPIRILEIDERRTRNRVIRFCKVQWSNHSEEESTWEREDELKSAHPHLFASSSESRGRDSV

SEQ ID NO: 189644 - protein, 1293 aa, Oryza sativa
  Clone ID: PAT_MRT4530_86133C.1.pep
MVHCGELCCAKGIVTISPFAAPGLEWYIPGLEIELYSRMSRYKPEYLFGVEGFVQKLRTMSFVIGFGTAPFYAQIPHDRHEEKCRVKVTLNSNSEDIPSVMFEAGGRNYIHACQEVARIAIGELRDRYSDQLADSEYRYHPRQPQGSDRGSYLETEGIENDATTKHLVEMLWAMDETRAETVLAAQDREDRNRGKICKLEDKVDRLEKELAALKGEAPPQKARIRLTARKRALFVPRYQLAPKVRVVEKEVTPALADPPVINMVLTRSNGNGPNNTNNNNNNGENPTLAQVLAQQTQLMNMMMQQLQNQQNQGNNHAPPQNKLAEFLRVRPPIFSSTTNPVEAGDWLHAIEKKLDMLQCTDQEKVSFASHQLHGPASEWWDHFRLNRTTAEPITWLEFTAAFRKTHIPSGVVSLKKKEFRSLTQGSRSVTEYLHEFNRLARYAPEDVHTDEERQEKFLEGLNDELSYPLMTGDYPDFQKLVDKAIRQEDKYNRMEQKKRRIAQFKTQQGNNQKPRLTLGPQSMPQGGFSSVVRPQRQFFNNNAGNNIRNQAPRPVAAPTQQQPAKKEQGSKLVVCFNCGDPGHYADKCPKPRRVKVVPAQSNSTAPASKARVNHVAAAEAQDAPDVILGTFLVNLVPATVLFDSGATHSFLSMSFAGNDGMEVEDLRRHLMVSTPSNQALSLQHSPSVRIEIQGVPFLANLILLESKDLDVILGMDWLARHKGVIDCANRKVTLTSNDGRVVTIHALSSESLRPSLNQITLEEIPTVREYPDVFPDDLPGMPTKRDIEFRIDLVPGTTPIHKRPYRMAANELAEVKRQVDDLLQKGYIRPSSFPWGAPVIFVEKKDHTQRMCVDYRALNDVTIKNKYPLPRIDDLFDQLKGATVFSKIDLRSRYHQLRIKEEDIPKTAFTTRYGLFECTVMSFGLTIAPAFFMNLMNKVFMEYLDKFVLVFIDDILIYSRTKEEHEEHLRLVLEKLREHQLYAKFSKCEFWLSEVKFLGHVISAGGVAVDPSNVESVTNWKQPKTVSEIRSFLGLAGYYRRFIENFSKIAKPRTRLLQKDVKYKWSEECEQSFQELKNRLISAPILILPDPKKGFQVYCDASKHGLGCVLMQDGKVVAYASRQLRPHEKNYPTHDLELAAVVHALKIWRHYLFGTRTEVYTDHKSLKYIFTQPDLNMRQRRWLELIKDYDMGIHYHPGKANVVADALSRKGYCNATEGRQLPLELCKEFERLNLGIVRRGFVAALEAKPTLIDQVREAQINDLDIQEIKKNMRRGKAIGFMEDEQGTVWLGER

SEQ ID NO: 189645 - protein, 175 aa, Oryza sativa
  Clone ID: PAT_MRT4530_86134C.1.pep
MAATAPRLLLMALMAATLAGRSEGAWCICRQDMPDSTLQKTLDYACGDGADCKPIQQSGACFSPDTVKAHCSYAVNSFYQRNNQNSQACVFSGTATLVTTDPSSNGCMYPASASAAGTGTPTSGTGGSTGVDGPPGMGLGPSSFNDNSGASLLPEVGTAMWILILACSIMVLNFS

SEQ ID NO: 189646 - protein, 1718 aa, Oryza sativa
  Clone ID: PAT_MRT4530_86135C.1.pep
MAQGAGDAVLPASHITADRHLSLPRKIMPEGAALRAGESRPRPRYSDRFVHLLSFAMVGLVPPFSRFFHEVLDFYEIHALHLAPNAVMTLAIFAHLCEMFVRVRQTMRLFQFFFVPQLLQAWLAASELGEQYDAVRDRLRGLRSQGLTGAMVFGDYFHCRIAPLQERSREAWKYIGPNDLMRTHVGERWDWGEEDAKTIPTFPESPFLQEKNLKSSKASKATPGLEWYIPGLEIELCSRDGCSEWLGLCNRMPRYKPEYLFGVEGFVQELRTMSFAIGFGTAPLYAQIPHDRDEEKCQVKVTLNSNSEDILSVMFEAGGGNYIHACQEVARIAIGELRDRYSDQLADTEYRYHPRQPQGSDRGSYLETEGIENDATTRHLVEMLWAMDETRAETVLAAQDREDRNRGKICKLEDKMVLTRSNGNGPNIKNNNNNRENPTLAQVLAQQAQLMNMMMQQLQNQQNQGNNHAPPQNKLAEFLCVRPPTFSSTTNPVKAGDWLHAIEKKLDLLQCTDQEKVSFASHQLHGPASEWWDHFRLNRTTAEPITWLEFTAAFRKTHIPSGVVSLKKKEFRSLTQGSRTVTEYLHEFNRLARYAPEDVRTDEERQERFLEGLNNELSYPLMTGDYHDFQRLVDKAIRQEDKYNRMEQKKRRIAHFKAQQGNSQRPRLTLGPQSMPQGGSSSVVRSQREFFNNNAGNNIRNQAPRPVAASTQQQPAKREQGSKPGVCFNCGDPGHYADKYPKPRRVKVVPAQSNSTAPASKARVNHVAAAEAQGAPDVILGTFLVNSVPATVLFDSGASHSFLSMSFAGNHGMEVEDLRRPLMVSTPSNQALSLQRNPSVRIEIQGVPFLANLILLEAKDLDVILGMDWLARYKGVIDCANRKVTLTNNDGRVVTVHALSSESLRSSLNQIALEEIPIVQEYPDVFPDDLPGMPPKRDIEFRIDLVPRTTPIHKRPYRMAANELAEVKRQVDDLLQKGYIRPSSSPWGAPVIFVEKKDHTQRMCVDYRALNDVTIKNKYPLPRIDDLFDQLKGATVFSKIDLRSGYHQLRIKEEDIPKTAFTTRYGLFKCTVMSFGLTNAPAFFMNLMNKVFMEYLDKFVVVFIDDILIYSRTKEEHEEHLRLALEKLREHQLYAKFSKCEFWLSEVKFLGHVISAGGVAIDPSNVESVTNWKQPKTVSEIRSFLGLAGYYRRFIEKFSKIAKPMTRLLQKDVKYKWSEECEQSFQELKSRLISAPILILPDPKKGFQVYCDASKLGLGCVLMQDGKVVAYASRQLRPHEKNYPTHDLELAVVVHALKIWRHYLFGTRTEVNTDHKSLKYIFTQPDLNMRQQRWLELIKDYDMGIHYHPGKANVVADALSRKGYCNATEGRQLPLELCKEFERLNLGIVSRGFVAALEAKPTLIDQVREAQINDPDIQEIKKNMRRGKAIGFLEDEQGTVWLGERICVPDNKDLKDAILKEAHDTLYSIHPGSTKMYQDLKERFWWASMKREIAEYVAPLKIPEWKWEEIGMDFITGLPRTSSGHDSIWVIVDRLTKVAHFVPVKTTYSESRLAELYMARIVCLHGVPKKIVSDRGSQFTSKFWKKLQEEMGSKLNFSTAYHPQTDGQTERVNQILEDMLRACALDFGGSWDKNLPYAEFSYNNSYQASLQMAPYEALYGRKCRSPLLWDQTGERQVFGTDILREAEEKVKIIQERLREAQSRHKSYADNRRRDLSFE

SEQ ID NO: 189647 - protein, 842 aa, Oryza sativa
  unsure (1)..(842): unsure at all Xaa locations
  Clone ID: PAT_MRT4530_86136C.1.pep
RIVSLHGVPKKIVSDRGSQFTSHFWKKLQEELGTRLNFSTAYHPQTDGQTEHLNQILEDMLRACVLDFGKTWDKSLPYAEFSYNNSYQASIQMAPYEALYGRKCRTPLLWDQVGESQVFGTDILREAEAKVRIIRDNLKVAQSRQKSYADNRRRDLEFAVGDFVYLRVTPLRGVHRFQTKGKLAPRYVEWSQELSTSVMTLYTLINXSNNCTLLSICYCVPRLIPGRGFTHXKRLEFWIEIPGVTSWYQSPLDPRLCQMVTHRSLLKILEKXNCSPPMPRYKPEYLFGVEGFVQELRTMSFVIGFGTAPFYAQIPHDRHEEKCRVKVTLNSNSEDIPSVMFEAGGRNYIHACQEVARIAIGELRDRYSDQLADTEYRYHPRQPQGSDRGNYLETEGIENDATTRHLVEMLWAMDESRAETVLAAQDREDRNRGKICKLEDKVDRLEKELAALKGEAPPQKARIRLTAMKRALFVPRYQLAPKVRVVENEVAPTLADPPVIIMVNTRSNGNGPNNNPNNNNKXGENPTLAQVLAQQTQLMNMMMQQLQNQQNQGNNHAPPQNKLAEFLRVRPPVFSSTTNPVEAGDWLHAIEKKLDLLQCTDQEKVSFASHQLHGPASEWWDHFRLNRTTAEPITWLEFTAAFRKTHIPSGVVSLKKKEFRSLTQGSRSVTEYLHEFNRLARYAPEDVRNDEERQEKFLEGLNDELSYPLMTGDYSDFQKLMDKAIRQEDNAGNNIRNQAPRPVAAPTQQQPAKREPGSKPVVCFNCGDPGHYAXKCPKPRRXKVVPAQSNSTAPASKARVNHVAAAEAQDAPDVILGTFSVNSVPATVLFDSGATHSFGLQE

SEQ ID NO: 189648 - protein, 1693 aa, Oryza sativa
  Clone ID: PAT_MRT4530_86137C.1.pep
MPRFKPEYLFGVEGFVQELRTMSFVIGFGTAPFYAQIRHDRHEEKCRVKVTLNSNSEDIPSVMFEAGGRNYIHACQEVARIAIGELRDRYSDQLADTEYRYHPRQPQGSDRGSYLETEGIENDATTRHLVEMLWAMDESCAETVLAAQDREDWNRGKICKLEDKVDRLEKELAALKGEAPPQKARIRLTARKRALFVPRYQLAPKIRVVEKEVAPAQADPPVIIISSDEEEESKRNNSKIEWAAIKDEEDEPNEPSIDLLCSEELEFACVCVGLACDLHQWWDMVNTRSNGNGPNLNNLNNNNNGENPTLAQVLTQQTQLMNMMMQQLQNQQNQGNNHAPPQNKLAEFLRVRPPIFSSTTNPVEAGDWLHAIEKKLDLLQCTDQEKVSFASHQLHGPASEWWDHFRLNRTTAEPITWLEFTAAFRKTHIPSGVVSLKKKEFRSLTQGSRSVTEYLHEFNRLARYAPEDVRNDEERQEKFLEGLNDELSYPLMTGDYSDFQKLVDKAIRQEDKYNRMEQKKHRIAHFKAQQGNNQRPRLTLGPQSMPHGGSSSVVRPQRQIFNNNVGNNIRNQVPRPVAAPTQQQPAKREQGSKPVVCFNCGDPGHYADKCPKPRRVKVVPAQSNSTVPASKARVNHVAAAEAQDAPDVILGTFPVNSVPATVLFDSGATHSFLSMSFAGNHGMEVEDLRRPLMVSTPSNQALSLHRSPSVRIEIQGVPFLANLILLESKDLDVILGMDWLARHNGVIDCANRKVTLTSHDGQVVTVHALSTESLRSRLNQITLGEIPIVREYPDVFPDDLPGMPPKRDIEFRIDLVPGTTPIHKRPYRMAANELAEVKRQVDDLLQKGYIRPSSSPWGAPVIFVEKKDHTQRMCVDYRALNDVTIKNKYPLPRIDDLFDQLKGATVFSKIDLRSGYHQLRIKEEDIPKTAFTTRYGLFECTVMSFGLTNAPAFFMNLMNKVFMEYLDKFVVVFIDDILIYSRTKEEHEEHLRLALEKLREHQLYAKFSKCEFWLSEVKFLGHVISAGGVAVDPSNVESVTNWKQPKTVSEIRSFLGLAGYYRSFIENFSKIVKPMTRLLQKDVKYKWSEDCEQSFQELKNRLVSAPILILPDPKKGFQVYCDASKLGLGCVLMQDGKVVAYASRQLRPHEKNYPTHDLELAAVVHALKIWRHYLFGTRTEMYTDHKSLKYIFTQPDLNMRQRRWLELIKDYDMGIHYHPGKANVVADALSRKGYCNVTEGRQLPLELCKEFERLNLGIVSRGFVAALEVKPTLIDQVRKAQINDSDIQEIKKNMRRGKAIGFLEDEQGTRVKAEHQKPAGLLQPLKIPEWKWEEIDMDFITGLPRTSSSHDSIWVIVDRLTKVAHFIPVKTTYSGSRLAELYMARIVCLHGVPKKIVSDRGSQFTSNFWKKLQEEMGSKLNFSTAYHPQTDGQTERVNQILEDMLRACALDFGGSWDKNLPYAEFSYNNSYQASLQMAPYEALYGRKCRTPLLWDQTGERQVFGTDILREAEEKVKIIQERLRVAQSRHKSYADNRRRDLSFEEGDYVYLRVTPLRGVHRFQTKGKLAPRFVGPYKIVSRRGEVAYQLELPQSLAGVHNVFHVSQLKKCLRVPTEEANLEQIEVQEDLTYVEKPIRILETSERRTRNRVIRFCKVQWSNHSEEESTWEREDELKSAHPYLFASSSESRGRDSV

SEQ ID NO: 189649 - protein, 50 aa, Oryza sativa
  Clone ID: PAT_MRT4530_86138C.1.pep
IKPWSSLPGGGGAGQSWRDPQPAGGGPQPPGGPPPGAPGPPPPGGPGFLK

SEQ ID NO: 189650 - protein, 668 aa, Oryza sativa
  Clone ID: PAT_MRT4530_86139C.1.pep
MVNTRASGSGNNNNGENPTLAQVLAQQTQLMNMMMQQLQNQQNQGNNHAPPQNKLAEFLRVRPPIFSSTTNPVEAGDWLHAIEKKLDLLQCTDQEKVSFASHQLHGPASEWWDHFRLNRTTAEPITWLEFTAAFRKTHIPSGVVSLKKKEFRSLTQGSRSVTEYLHEFNRLARYAPEDVRNDEERQEKFLEGLNDELSYPLMTGDYPDFQKLVIKAIRQEDKYNSMEQKKRRIAQFKTQQGNNQKPRLTLGPQSMPQGGSSSVVRPQRQFFNNNAGNNIRNQAPRPVAASTQQQPAKREQGSKPVVCFNCGDPGHYADKCPKPRRVKVVPAQSNSTVPASKARVNHVAAAEAQDAPDDPRCRRYPSPLSPSLLVAGSALAPCRFAPPSSPPLQPCAAVAPVIVVAREGRHRGRRHVAVLVRSFAVAVDRRSTVAAVDPIFSAASISPPVPSVDLPPLLWSPVSSPRHALRPGALRSRRRAVVRRRACAARAAAGGDVTADVIVAVCREPHGSLRSTRLRSGGDKPTGVAPVIVVAQEGRHHGRRHVAVLVRSSAVAVDRRSTVAAVDPIFSAASISPPVPSVDLPPLLWSPVSSPRHALRPGALRSRRRAVVRRRACAARAAAGGDVTADVIVAVCHSDVSGESVFAGEDFEEFQGQQGKSHRSQTTL

SEQ ID NO: 189651 - protein, 891 aa, Oryza sativa
  Clone ID: PAT_MRT4530_8613C.1.pep
MAAAAVGVVVVVVVFLAAAVDGVAGKDCTNGFPGLTASHTERAAAAAEQRPDGEVEAARVLDLLLPHGHGHGDDHDGDRHLTPTDESTWMSLMPRRLLASPVSSPRRDAFDWLMLYRNLRGSGSGAGAIAASGGALLAEASLHDVRLQPGTVYWQAQQTNLEYLLLLDVDRLVWSFRTQAGLPASGAPYGGWEGPGVELRGHFVGHYLSATAKMWASTHNDTLLAKMSSVVDALHDCQKKMGSGYLSAFPSEFFDRVESIKAVWAPYYTVHKIMQGLLDQYTVAGNSKALDLVVGMANYFSDRVKNVIQKYSIERHWASLNEESGGMNDVLYQLYTITNDQKHLTLAHLFDKPCFLGLLAVQADSISGFHSNTHIPVVIGAQMRYEVTGDLLYKQIATFFMDTINSSHSYATGGTSAGEFWTNPKRLADTLSTENEESCTTYNMLKVSRNLFRWTKELSYADYYERALINGVLSIQRGTDPGVMIYMLPQAPGRSKAVSYHGWGTKYDSFWCCYGTGIESFSKLGDSIYFEEKGDRPVLNIIQYIPSAYNWKAAGLTVNQQLKPISSLDMFLQVSLSTSAKTNGQSATLNVRIPSWTSANGAKATLNDNDLGLMSPGSFLSISKQWNSDDHLSLQFPITLRTEAIKDDRPEYASLQAILFGPFVLAGLSTGDWNAEAGNTSAISDWISPVPSSYNSQLVTFTQESSGKTFVLSSANGSLTMQERPTVDGTDTAIHATFRVHPQDSAGQLDTQGATLKGTSVQIEPFDLPGTVITNNLTQSAQKSSDSLFNIVPGLDGNPNSVSLELGTKPGCFLVIGVDYSVGTKIQVSCKSSLPSINGIFEQAASFVQAAPLRQYHPISFIAKGVKRNFLLEPLYSLRDEFYTVYFNLGA

SEQ ID NO: 189652 - protein, 1534 aa, Oryza sativa
  Clone ID: PAT_MRT4530_86140C.1.pep
MSFVIGFGTAPFYAQIPHDRHEEKCRVKVTLNSNSEDIPSVMFEAGGRNYIHACQEGSDRGSYLETEGIENDATTRHLVEMLWAMDETRAETVLAAQDREDRNRGKICKLEDKVDRLEKELAALKGEAPPQKARIRLTARKRALFVPRYQLAPKVRVVEKEVTPALADPPVVNMVNTRSNGNGPNNNNGENPTLAQVLAQQTQLMNMMMQQLQNQQNQGNNYAPPQNKLAEFLRVRPPTFSSTTNPVEAGDWLHAIEKKLDLLQCTDQEKVSFASHQLHGPATEWWDHFRLNRTTAEPITWLEFTAAFRKTHIPSGVVSLKKKEFRSLTQGSRSITEYLHEFNRLTRYAPEDVRNDEERQEKFLEGLNDELSYPLMTGDYPDFQKLVDKAIRQEDKYNRMEQKKRRIAQFKTQQGNNQRPRLTLGPQSMPQGGSSSIVRPQRQFFNNNAGNNIRNQAPRPVAASTQQQPAKREQGSKPVVCFNCGDPGHYADKCPKPRRMKVVPTRSNSTVPASKARVNHVAAAEAQDAPDVILGTFLVNLVPATMLFDSGATHSFLSMSFAGNHGMEVKDLRRPLMVSTPSNQALSLQRSPSVRIEIQGVPFLANLILLESKDLDVIPGMDWLARHKGVIDCANRKVTLTSNDGRVVTVHALSPESLRSRLNQITLEEIPVVREYSDVFPDDLPGMPPKRDIEFRIDLVRGTTPIHKRPYRMAANELAEVKRQVDDLLQRGYIRPSSSPWGAPVIFVEKKDHTQRMCVDYRALNDVTIKNKYPLPRIDDLFDQLKGATVFSKIDLRSGYHQLRIKEEDIPKTAFTTRYGLFECTVMSFGLTNAPAFFMNLMNKVFMEYLDKFVVVFIDDILIYSRTKEEHEEHLRLALEKLREHQLYAKFSKCEFWLSEVKFLGHVISAGGVAIDPSNVESVTNWKQPKTVSEIHSFLGLAGYYRRFIENFSKIAKPMTRLLQKDVKYKWSEECEQSFQELKNHLISAPILILPDPKKGFQVYCDASKLGLGCVLMQDGKVVAYASRQLRPHEKNYPTHDLELAAVVHALKIWRHYLFGTRTEVYTDHKSLKYIFTQPDLNMRQRRWLELIKDYDMGIHYHPGKANVVADALSRKGYCNATEGRQLPLELCKEFERLNLGIVSRGFVAALEVKSTLIDHVREAQINDPDIQEIKKNMRRGKAIGFLEDEQGTRVKAEHQKPAGLLQPLKIPEWKWEEIGMDFITGLPRTSSGHDSIWVIVDRLTKVAHFIPVKTTYSGSRLAELYMARITDGQTERVNQILEDMLRACALDFGGSWDKNLPYAEFSYNNSYQASLQMAPYEALYGRKCRTPLLWDQTGERQVFGTDILREAEEKVKIIQERLRVAQYRHKSYADNRRRDLSFEEGDYVYLRVTPFRGVHRFHTKGKLAPRFVGPYKIVSRRGEVAYQLELPQSLAGVHNVFHVSQLKKCLRVPTEEANLEQIEVQEDLTYVEKPIRILEIDERRTRNRVIRFCKVQWSNHSEEESTWEREDELKSAHPHLFASSSESRGRDSV

SEQ ID NO: 189653 - protein, 58 aa, Oryza sativa
  Clone ID: PAT_MRT4530_86141C.1.pep
CVFFFLGVYLFVFLMFHPSKLPQIMKNGLPSASKNRQQGGGPNCGAVPDGTQKEPKTP

SEQ ID NO: 189654 - protein, 185 aa, Oryza sativa
  Clone ID: PAT_MRT4530_86142C.1.pep
AAAAVVAVAALEAINVTTVAFEEGYTPLFGFDNILRSADDRTVSLLLDRSTGSGFMSSSMYQHGFFSASIKLPSDYTAGVVVAFYTSNGNVIEKRHDELDFEFLGNIRGKPWRVQTNVYGNGSVSRGREERYLLPFDPTTEFHRYSILWTRAAIVFFVDDVPIREVRRRTRPGSRPARPTRAADM

SEQ ID NO: 189655 - protein, 226 aa, Oryza sativa
  Clone ID: PAT_MRT4530_86143C.1.pep
MSGVVAATAGGGGTPPTGADLKYCGWISQGGRSLLCQTSISSALATPDCGKFSYSAGGRKSSSFEVAGHSLRWIWMASTDFRDLFVHLILGAVPFLSDALSRVVSGEGGLTHAQIVVIFGGLGGAELAELLEQFVLADSSHASIPNIVSTDNTSINLLLCLNQLCLNQLSKQQHKSWASKEHAMNPLHHTGNQQATQQGKAAVSMLRLSFGLSTDYLLDFGRQGYC

SEQ ID NO: 189656 - protein, 1081 aa, Oryza sativa
  Clone ID: PAT_MRT4530_86144C.1.pep
MDQSTIDRSWMYAKNLKRHSTEYRKGVINFMNTAEEDRIRKNSDYMCCPCADCKNENMFDSGEDVHGHLIQRGFMEGYTCWVKHGEQESGSGAAADRSGAHNQEDEDEHDMFIPSPLGGEMVDVDHDLLQDMLRDIEDLAQNERDGMKFSRLVSDFETPLYTGWKAKHTKLSVTLDLMKLKASSGWTDKSFTDLFGILKVMLPIENTLPETTYEAKQVLCPLELEVRRIHACPNDCILYHKQYADLDACPVCKASRYKRKKSADEGNKSKRGGPAKVVWYLPIIDRFKRIFANPNEAKLENFKLRVLLFCTINNYPALGNISGQTIKGKKAYSDCKEHTRSRWLKKSRKMVYMGHRRWLLLRHAFRRKKKNFNGKRELQPAPKDLFGDEVHNMVKNISNELGKKRKRSKTKEKENNVCESLVGLMLNIPGKTKDGLNTRLCLQDMNIRSELQPIRDAETVAIRGILPPKVRHTIQRLCAFFNAIGHKVIDPEDIDGLQTDIVNTLCHLEMFFPLSFFDILVHLPVHLVKQTKLCGPAFRREMWLFERKKKYTMFQQGEPISMTTSGSSRARTPRTGNKIPKERFRITAVDTVGLPTSPRKILSRFRSICGVIGRQKFSILQDDIKLVPAAEKDIAWLTFKESFDYPAVHEYRLRQAAFKVMGNAWKNFKTKLVGEFVYNSANPDPREKFPWITEQVWEEFHAKKSTPESRARSEAYRLLQTRNQHPHRLGTTGYAGKEKEWQREDEEAEESCTPLVFGDIPHPRARNWARARRSWLPSNKPRKRPALKDTRTTSSRKRWATRNTVDGHGALGLLFPGSMDFQTSRGSTRSGLPTRRRKMHALKAKIRASIRAELTSEFDKKLESMRAKIRQEIREEQQNPQAAVAAAHEELGSPTRKQSSCASTELVENPTSVDSAVDHITEPTSCTLTVRVIPTFTVSAAEGLVYKPTPETRVHGAQLRADCAKVQVDSVKPEYELFPLKYPPNDEVLSLGNARGTFIQWPKDLIEIRVTARPTTAPGGRPPKRLASAPSAPPAQDRHAQSYDVQLQYDTDFGEDRTEADSKAIHEPPPMKKSRKAHSSP

SEQ ID NO: 189657 - protein, 372 aa, Oryza sativa
  Clone ID: PAT_MRT4530_86145C.1.pep
FSRVSLVVKLVSFYVLPVLCLWSSMKSPVFPSSDLKYCGWISQGGRSLLCQTSISSALATPDCGKFSYSAGGRKSSSFEVAGHSLRWIWMASTDFRDLFVHLILGAVPFLSDALSRVVSGEGGLTHAQIVVIFGGLGGAELAELLEQFVLADSSHASIPNIVSTDNTSINLLLCLNQLCLNQLSKQQHKSWASKEHAMNPLHHTGNQQATQQGKAGPAILCMPATKSPSQSSPMGYILSSSIHVEVIVRVEHRLSVRLWSAGILLVFLRFNDDFHGNHWLSPVKPPTYLRLNSKAQLVPNPWRQPEGSLAGQMGSTFEEALGCNRRGNAADLRRLYSLLLLYQMIWKFASIIQSLPFRKMVLNVCCYQFLAR

SEQ ID NO: 189658 - protein, 311 aa, Oryza sativa
  Clone ID: PAT_MRT4530_86146C.1.pep
MDQSNCKNKNMFDNGEDVHGYLIQRGFMKGYTYWEKHGEQESGSGEAADRSGILKAMLPAENTFPKTTYEAKQVLCPLGLEVRRIHAYPNDCILYHKQYADLDACPVCKASRYKRKKSADEGNKSKRGGPAKVVWYLPIIDHFKRIFANPNEAKLVRWHATERRNDGPRQPDNDIDVLDEDKCILPPKVRHTIQRLCAFFNAIGQKQTKLCVPAFLREMWPFERYMGDLKSYVRNRAKPEGSIIEGYTTEEAIVLCVNCMSDANPIGVPASRHEGRLSGVGTIGRKRIRPDQASYAQAHYAVLQHMAEVDG

SEQ ID NO: 189659 - protein, 174 aa, Oryza sativa
  Clone ID: PAT_MRT4530_86147C.1.pep
MNPLHHTGNQQATQQGKAGPGNSVHAGNEVSFSILTHGIHLKFVRLYHRHHLASLKLKVSWVLGASSISFLCSSIHVEIIVRVEHRLSVRLWSAGMLLVFLRFDDDFHGNHWLSPVKPPTYLRLNSKPQLVPNPWRQPEGSLAGQAGSTFEEALGCNRRGNAADLQRLYSLLMY

SEQ ID NO: 189660 - protein, 96 aa, Oryza sativa
  unsure (1)..(96): unsure at all Xaa locations
  Clone ID: PAT_MRT4530_86148C.1.pep
LGVMQKPAPLFIVFHHIIYGRAAFWRDPHSVKVVLPQSRLSPVXFHSCQSPTPFGVSLLLKLXLVSSGSAEGPPWQASSKHDSRHSKNICFGRHAF

SEQ ID NO: 189661 - protein, 703 aa, Oryza sativa
  unsure (1)..(703): unsure at all Xaa locations
  Clone ID: PAT_MRT4530_86149C.1.pep
MVDVDHDLLQDMLRDVEDPAQNERDGMKFSRLVSDSETPLYARCKAKHTKLSVTLDLMKLKASSGWTDKSFTDLLGILKAMLPVENTLPETTYEAKQVLCPLGLEIRRIHACPNDCILYHKQYADLDACPVCKASRYKRKKSADEGNKSKRGGPAKVVWYLPIIDRFKRIFANPNEAKLVRWHATERRNDGPRQPGNDIDVFLEPVIDDLEILWKEGVETWDAYGQENFKLRVLLFCTINDYPALGNLSGQTIKGKKACSDCKEHTRSRWLKKSRKMVYMGHRRWLPLRHAFRRKKKIFNGKRELQPAPKDLSGDEVPNMVKDKSNEFGRKENVARQRRMDMNIRSELQPIRDAETGKVYLPPACHTLWKDEKIAMLSCLKDIKVPLGYSARITFLREMWLFERYMGVLKSYVRNRAKPEESIIEGYTTEEAIEFCVXYMSDADPIGVPVFRHEGRLSGXHYAVLQHMAEVGPYFEEHLAKIRDENLGRSDAWINKEHNSRFNEWFMNRVTMSTDVPNETLQLLGMGPSWTVDTWQGYDINGYTFYTVKQDDKSTVQNSGIRINAFQDQVGSNTYYGRIEEIWELNYVKFKVPLFRCRWVNLRTGVKADKEGFTLVDLSKVGYADEPFVLAKQVEQIFYIKDPSNKKMHIVRDGKRRIVGVDNVVDEEEYNHNLHVRPHIDLDDDPQEPVAYARSHHTEGITL

SEQ ID NO: 189662 - protein, 84 aa, Oryza sativa
  unsure (1)..(84): unsure at all Xaa locations
  Clone ID: PAT_MRT4530_8614C.1.pep
IIRGAAAVMLPAPPPXAEAQRRPVQRHRRPVVGPEREGEGVRRCXGEEEEEERAPAEEQALAVRHGRRRGGVSRAWHXGNGKIV

SEQ ID NO: 189663 - protein, 550 aa, Oryza sativa
  unsure (1)..(550): unsure at all Xaa locations
  Clone ID: PAT_MRT4530_86150C.1.pep
MSMTTSESSRARTPRTRNKIPKERFRITAVDQVGLPTSPRKILSRFRSICRVIGRQKFSILQDDIKHVPAAEKDIAWLTFKESFDYPTEHEDRIRARREAYRLLQTKNQHPHRLGTAGYVGKEEEWQQEDEQAEESNTPLMFGDIPHPRARNLARARYQKNAHGTIFMPNPEDQRXKELVAEQQASQEACSQRREDDLLTKTLGNKEHRGRTRGVGSSVPWXEGLAYKPTPETRVHGAQLRGDYAKVQVDSVKPEYELFPLKYPPNDEVLSLGNARGTFIQWPKDLIEIRYDMDFGEDRTEAGSKAIHEPPPMKKSRKAHSSPQRITIDKPEAKGRGRGGKVQASLLAPRKLDLGKGQEETKGKEVKKKYVAPQEFQLGIPLVGDDVLAAMGTTCKDLHVYYMEKSNARRPNKAIDILGEHDGKPFLGPTNYIVVDFKDLFDLYRLQAVDTSLLKCYSLKTGHDTLIHKKDFLVKQQIGDQCRFHVCHNMRLLYTEKVKTLADFETGQEQVTWRTSIGGRRATCHVALNAMGAVGALPINASGGQRPRPF

SEQ ID NO: 189664 - protein, 754 aa, Oryza sativa
  Clone ID: PAT_MRT4530_86151C.1.pep
MQLIEVGYCKNENMFDSGEDVHGHMIQRGFMEGYTCWVKHGEQELGSGAAADRSVAHNQEDEDEHGMFIPSPLGGEMVDVDHDLLQDMLRDVEDPAQNERDGMKFSRLVSDSETPLYAGCKAKHTKLSVTLDLMKLKSSSGWTDKSFTDLLGILKAMLPVENTLPETTYEAKQVLCPLGLEVRRIHACPNDCILYHKQYADLDACPVCKASRYKRKKSADEGKKSKRGGSAKVVWYLPIIDRFKRIFANPNEAKLVRWNATERRNDGPRQLGNDIDVFLEPVIDDLEILWKEGVETWDAYGQENFKLRVLLFCTINDYPALDLSGDEVHNMVKDISNEFGKKRKRSKTKEKEKNVCESLVGLMLNIPEKTKDGLNARLDLQDMNIRSELQPIRDAETGRVYLPPACHTLSKDEKIAMLSCLKDIKVPLGYSARISKYVKLDDLKLVGMKSHNCHVLITQILPVAIRGILPPKVRHTIQCLCSFFNAIGQKVIDPEDLDGLQTDIVNTLYHLEIFFPLSFFDIMVHLPVHLVKQIKLCGPAFLREMWPFERYMGVLKSYVRNRAKPEGSIIEGYTTEEAIEFYVNYMSDADPIEVPASRHEGRLSGVGTIGRKRIRPDQASYAQAHYAVLQHMAEVGPYFEEHLAKIRDENLGRSDAWINREHNSRFNKWFKNRVTMSTDVPNETVEQIFYIKDPSNKKMHIVRDGKRRIVGVDNAVDEEEYNHNLHVRPHIDLDDDPQEPVAYARSDHTEGITL

SEQ ID NO: 189665 - protein, 55 aa, Oryza sativa
  Clone ID: PAT_MRT4530_86152C.1.pep
MASFLLINFDSDSGSGGRGTCHMDWCRQPNDPKLHEGCEPGLIQATKHDIHEKYH

SEQ ID NO: 189666 - protein, 781 aa, Oryza sativa
  Clone ID: PAT_MRT4530_86153C.1.pep
MSQQGELMSMTTSGSSRARTPRTGNKILKERFRITTVNQVGLPIGPRKILSRFRFICGVIGRQKFSIPQDDIKQVPAAEKDSAWLAFKESFDYPVEHENLIRQAAFKVMGNAWKNFKNQRVYEAIKELVAEQQTSQEASSQRREDDLLTKVLGNKVHCGRTRGVGSSVPWKYGFPDYAWQYKKRTSNKAEKDARLEAKIRASIRAELTSEFDEKLESMRAKIRQKIQEEQQNPQAAAAVAHEELGSPTQKRSSCASTELAENPTSVNSAIDHIMEPTSCTLTVRVMPTFTVPAAEGLAYKPTPETRVHGLQLRGDCAKVQVDSVKPEYELFPLRYPPNDEVLSLGNARGTFIQWPKDHIEIRVTARPTTAPGGHPPKRPASAPSAPPAQDRPAQSYDVQLQYDTDFREDRTEADSKAIHEPPPMKKSRKAHSSPHRITLDKPEAKGRGRGGKVQASLLALRKLDLGKGQEDTKGKEDLHVYYMEKSNTRRPNKTTDILGEHDGKPFLGPTNYIMVDFKDLFDLYRLRAVDTSLLKCYSLLSWQWCQKNAPEVAFLDPQVVTVTNIQNDRQGMTPIQLAIDEAWAQYVQRGCLRKTGHDTLIHKKDFPVKQQIGDQCGFHVCHNMRLLYREKVKTLAEFEWSLVPLPEEKGEYTMLLYKWTHDSYEDEAKFAKLQAWVCGEYARKGFVEVDYDYFANREDAIRLNKEAQVEVLGHWSDHHYPSHTDLDDEDWKLEINQSNEVYPGETELKKDATSRLSINSEEYPIVYVSLFTQVSDPTLDV

SEQ ID NO: 189667 - protein, 808 aa, Oryza sativa
  Clone ID: PAT_MRT4530_86154C.1.pep
MVYMGHRRWLPLRHAFRRKKKIFNGKRELQPAPKDLSGDEVHNMVKDISNEFGKKRKHSKTKEKVAIRGILLPKVRHTIQRLCTFFNAIGQKQTKLCGPAFLREMRPFERYMGVLKSYVRNRAKPEGSIIEGYTTEEAIEFCVNYMSDADPIGVPASRHEGRLSGVGTIGRKRIRPDQASYAQAHYAVLQHMAEVGPYFKEHLAKIRDENLRRSDAWINREHNSRFNEWFKNRVTMSTDVQNETVQLLGMGPSWTVDTWQGYDINGYTFYTVKQDDKSTVQNSGVRIDAFQDQVGSNTYYGRIEDIWELNYVKFKVPLFCFRWVNLRTSVKADKEGFTLVDLSKVGYADEPFVLAKQVEQVFDIKDPSNKKMHIVTDGKRQIVEVDNVIDEEEYNHNLHVMGNAWKNFKTKLVGEFVYNPTNPDPREKFPWITEQVWEEFHAKKLTPESRARSEAYRLLQTRNQHPHWLGTAGYAGKEEEWQREDEEAEESNTPLVFGDIPHPRARNWARARYQKNDDGTIFMPNAEDQRVYEAILVAEQQASQEARSQRREDDVLTKALGNKEHRGWTWGVGSSVPWKYGFPDYAWQYKKWTSNKAEKDARLEAKIRASIRAELTSEFDENLESMRAKIRQEIREEQKNPQAAAAVAHEELGSPTQKRSSCASTELAENPTSVDSAVDHIMELTSCTLTVRMMPTFTIPAAEGLAYKPTPETRVHGVQLRADYAKVQVDSVKPEYELFPLKYPPNDEVLSLGNAHGTFIQWRKDLIEIKVTARPTIAPGGRPPKRPASAPSAPPAQDRHAQSYDVQL

SEQ ID NO: 189668 - protein, 772 aa, Oryza sativa
  Clone ID: PAT_MRT4530_86155C.1.pep
MDQSTIDRSWMYAKNLKRHSTEYRKGVINFMNAAEEDRIRRNSDYMCCPCANCKNENMFDSGEDVHGHLIQRGFMEGYTCWVKHGEQESGSGAAADRSGAHNQEDENEYDMFIPSPLGGEMVDVDHDMLQDMLCDVEDPAQNERDGMKFSRLVSDSETPLYAGCKAKHTKLSVTLDLMKLKASSGWTDKSFTDLLGILKAMLPVENTLPETTYEAKQVLCPLGLEVRRIHACPNDCILYHKQYADLDACLVCKASRYKRKKSADEGNKSKRGGPAKVVWYLPIIDRFKRIFANPNEAKLVRWHATERRNDGPRQPGNDIDVFLEPVIDDLEILWKEGVETWDAYGQENFKLRVLLFCTINDFPVLDLSGDEVHNMVKDISNEFGKKRKRSKTKEKEKNVCESLVDLMLNIPGKTKDGLNTRLDLQDMNIRSELQPIRDAETGKVYLPPACHTLSKDERIAMLSCLKDIKVPSGYSARISQYVKLDDLKLVGMKSHDCHVLITQILPVAIRGILPPKVRHTIQRLCAFFNAIGQKVIDPEDLDGLQTDIVNTLCHLEMFFPLSFFDIMVHLPVHLFKNRVTMSTDVPNETIQLLGMGPSWTIDTWQGYDINGYTFYTVEQDDKSRVQNSGVRIDAFQDQVGSNTYYGRIEEIWELNYVKFKVPLFRCRWVNLRTGVKADKEGFTLVDLSKVGYADEPFVLAKQVEQIFYIKDPSNKKMHIVRDGKRRIVGVDNVVDEEEYNHNLHVRPHIDLDDDPQEPVAYARSDHTEGITL

SEQ ID NO: 189669 - protein, 67 aa, Oryza sativa
  Clone ID: PAT_MRT4530_86156C.1.pep
THTAEVQIASIGHCFHHLGQTFFSLTINLQAGTMVQDHQKMSFNAKQYRYIIFFSFSILQFSTYTKV

SEQ ID NO: 189670 - protein, 1374 aa, Oryza sativa
  Clone ID: PAT_MRT4530_86157C.1.pep
MKLKESSGWTDKSFTDLLGILKAMLPVENTLPKTTYEAKQVLCPLGLEVRRIHACPNDCILYHKQYADLDACPVCKASRYKRKKSADEGNKSKRGGPAKVAWYLPIIDRFKRIFANPNEAKLVRWHATKRRNDGPKQPGNDIDVFLEPVIDDLEILWKEGVETWDAYGQENFKLRVLLFCTINDYPALGNLSGQTIKGKKACSDCKEHTRSRWLKKSRKMVYMGHRRWLPLRHAFRRKKKIFNGKRELQPAPKDLSGDEVHNMVNDISNEFGKKRKRSKTKEKGMWKKKSIFWRLPYWKDLDVRHCIDLMHVEKNVCESLVGLMLNIPGKTKDGLNARLDLQDMNIRSELQPIRDAETGKVYLPPAYHTLSKDEKIAMLSCLKDIKVPSGYSARISKYVELDDLKLVGMKSHDCHVLITQILPVAIRGILPPKVRHTIQRMCAFFNAIGQKVIDPEDLDGLQTDIVNTLCHLEMFFPLSFFDIMVHLPVHLVKQTKLCGPAFLREMWPFERYMGVLKSYVRNRAKPEGSIIEGYTTEEVIEFCVNYMSDADPIGVPASCHEGRLSGVGTIGRKRIRPDQASEHNSRFNEWFKNRVTMSSDVPNETVQLLGMGPSWTVDTWQGYDINGYTFYTVKQDDKSTVQNSGVRIDAFQDQVGSNTYYGRIEEIWELNYVKFKVPLFRCRWVNLRTGVKADKEGFTLVDLSKVGYADEPFVLAKQVEQIFYIKDPSNKKMHIVRDGKRRIVGVDNVVDEEEYNHNLHKKKVIERQKFSILQDDIKLVPDAEKDIAWLTFKESFDYPAELEDRLRRAAFKVMGNAWKNFKTKLVGEFVYNSVNPDPREKFPWITEQVWEEFHAKKSTPESRARSEAYRLLQTRNQHPHRLGTAGYAGKEEEWQREDEEASQSCTPLVFGDIPHPRARNWARARYQKNDDGTIFMPNAEDQRVYEAIKKLIAEQQASQEACSQRREDDLLTKALGNKEHRGRTRGVGSSVPWKYGFPDYAWQYKKRTSNKAEKDARLKAKIRESIRAELTSEFDEKLESMRAKIRQEIREEQQNPQAAAAAAHEELGSPTQKHSSCASTELAENPTSVDSTVDHITEPTSCTLTVRVMPTFTVPAAEGLAYKPTPETRVHGAQLRADCAKVQVDSVKPEYELFPLKYPPNDEVLSLGNARGTFIQWPKDLIEIRVTARPTTAPGGRPPKRPASAPSAPPAQDRHAQSYDVQLQYDTDFGEDRTEADSKAIHEPPSMKKSRKAHSSPQRITLDKPEAKGRGRGGKVHASLLAPRKLDLGKGQEESKGKEVKKKHVAKQEFQLGMPLVGDDVLAAMGTACKDLHLYYMEKSNAKKPSKATDILGEHDGKCHVRNFYPKFQTLTCV

SEQ ID NO: 189671 - protein, 102 aa, Oryza sativa
  unsure (1)..(102): unsure at all Xaa locations
  Clone ID: PAT_MRT4530_86158C.1.pep
NVMGGHNRLGAVTRLAVEAWGLKNCTQNEEWINYTVTGVDMPPCIDSAXIVKLAWKRYNFSLGLCLDNVGEQALRSGHLGHLNEVQLMDALSGVVMAFIVIR

SEQ ID NO: 189672 - protein, 683 aa, Oryza sativa
  Clone ID: PAT_MRT4530_86159C.1.pep
MEQSTIDRSWMYATNVKRHFPEYRNGIINFMNAAEEDRKRRNSDYMCCPCADCKNENMFDSGGVVHGHLIQRGFMKGYACWVKHGEQESGSGAAADRSGVHNQEDEDEHDMFIPSPLGGEMVDVDHDLLQDMLHDVEDPGQNERDSMKFSRLVSDSETPLYAGCKAKHTKLSVTLDLMKLKASSRWTDKSFTDLLGILKAMLLAENTLPGTAYEAKQASRYKRKKSAYEGKKSKRGGPAKVVWYLPIIDRFKRIFANPNEAKLVRWHATLRRNDGSRQPGNDIDVFLEPVIDDLEILWKEGVETWDAYGQENFKLRVLLFCTINDYPALGNLSGQTIKGKKACSDCKEHTRSRWLKKSRQMVYMGHRRWLPLRHTFRRKKKIFNGKRELQPAYKDLSGDEVHSMVKDISNEFGKKRKRSKTKEKEKNVCESLVGLMLNIPGKTKDGLNAHLDLHDMNIHSELQPIRDAETEHEDLIRQAAFKVMGNAWKNFKTKLVGEFVYNPTNPDPKEKFPWITEQVWEEFHAKKSTPESRARSEAYRLLQTLNQHPNRLGTAGYAGKEEEWQQEDEEAEESNTSWVFGNIPHPRARNWYQKNKELVAEQQASQEACSQRREDDLLTKVLGNKEHRGRTQGVESSIPWKYGFPDYIWQYKKRTSNKAEKDACLEAKIQASIRQNSTKSSSQ

SEQ ID NO: 189673 - protein, 71 aa, Oryza sativa
  Clone ID: PAT_MRT4530_8615C.1.pep
MGLWEWPWDRRRRGPSGLGPTSTAEEVTAGVDATHLTAIVTGATNGIGRETARVLARRGAEVIIPARTMVS

SEQ ID NO: 189674 - protein, 38 aa, Oryza sativa
  Clone ID: PAT_MRT4530_86160C.1.pep
IISMSRDVSYWIKITSYIFLGISVYAIIIYNSMLHMKF

SEQ ID NO: 189675 - protein, 520 aa, Oryza sativa
  Clone ID: PAT_MRT4530_86161C.1.pep
MAMGLLAWMVAAAAAAVLASWAFGAVVHLVWRPRAITRRLRAQGVGGPGYRFFSGNLGEIRRLRGEGAGVVLDVSSHDFLPIVQPHFRKWIPLYGRTFLYWFGARPTICLADVSMVWQVLSDRTGMYPKNLSNPHFARLLGKGLVLTDGDEWKRHRKVVHPAFNMDKLKMMTVTMSDCARSMMSEWESELAAKGGLVEIELSRRFEELTADVISHTAFGSSYKEGKQVFLAQRELQFLAFSTFLTVQIPGSSYLPTMKNLKTWSLDKKVRGMLTDIIKTRLANKDVAGYGNDLLGLMLEACAPEHGESRPQLSMDEIIAECKTFFFAGHDTTSHLLTWTMFLLSTHPEWQEKLREEVATECGGKVPTGDMLNKLKLVNMFLLETLRLYGPVALIRRRVDAELELGGITVPEGTALLTIPIATIHRDKEVWGEDADVFKPERFQNGVSKAAKHPNALLSFSSGPRSCIGQNFAMIEAKAVIAMILQRFSFTLSPKYVHAPTDVITLRPKYGLPMILKSLKV

SEQ ID NO: 189676 - protein, 62 aa, Oryza sativa
  Clone ID: PAT_MRT4530_86162C.1.pep
FPRLICMHVYIIHISMIRIYTALLASYCTCTCTPVGLGCCSCRWLAWQDADRNRSIKQNQLR

SEQ ID NO: 189677 - protein, 61 aa, Oryza sativa
  Clone ID: PAT_MRT4530_86163C.1.pep
ANIFAPMASSGYLSKTVTTTCPQDSIDMHEAMQSWHSRSFSLCFISLLQSCILLLNHIVRD

SEQ ID NO: 189678 - protein, 84 aa, Oryza sativa
  Clone ID: PAT_MRT4530_86164C.1.pep
MGTRVHGTAPGGEEVVAEGLFILAEPKEATVHREEVGNGGDQRPEVANGGGLGLMAKVVLRRWTGQTKWQPALRLRLRSQWRKR

SEQ ID NO: 189679 - protein, 118 aa, Oryza sativa
  unsure (1)..(118): unsure at all Xaa locations
  Clone ID: PAT_MRT4530_86165C.1.pep
NHTLTLTRQDAESTNSGLSNTSNGRRIKCMPSCPLEGIKKLQTLSYLRPLTVEEPLKHIACLLRSKWVPSLQLTKVGLVYRENNRTPXYYYGRYCTMWKLSMFRCTRSTQVLKELKEA

SEQ ID NO: 189680 - protein, 59 aa, Oryza sativa
  Clone ID: PAT_MRT4530_86166C.1.pep
DCPVYVYTGICANNSTPESSQASVEVAVHPHGDFFMTSSFPSMGDARLSIGSTYAICPI

SEQ ID NO: 189681 - protein, 283 aa, Oryza sativa
  Clone ID: PAT_MRT4530_86167C.1.pep
MTTMSSLQLRLLRFLVKRLGEIRLHGEENSHLRVGGIVEFALLINFWTLSARASLLLKLLARVAKRSQAHRRQAGIAPSPWAPWAWPFGVKDDYCRVRAMATIARVWLGIRLRPAIPPEASASTVRCPCCFLLSMRDRREEEVPDPDEASALLPPPLPKEEKMLCQDHHELITAAASQLLGEKIGGNSSLGSHMRVGGTVEFALSIKSSTATPGGDAASRLMCNHFCADQACSVISSLELVDFVSELGLVGISFVEAVGKGGKEIAGIRQSAAMGVGMVGHVL

SEQ ID NO: 189682 - protein, 74 aa, Oryza sativa
  Clone ID: PAT_MRT4530_86168C.1.pep
NQSTLLSPINYIKYVRLIMKRHVWQNIYIKIRTDNSLNRLNRTFEFKEVPTTLPKLDCRESVRLCCRFCHVRCA

SEQ ID NO: 189683 - protein, 225 aa, Oryza sativa
  Clone ID: PAT_MRT4530_86169C.1.pep
MSSWWSWHSIFSSLGNGGGSNADASSGSGTSSSLLSLMLNKKQQGHLTVEAEASGGIAGRSRIPSQTLAIATPKAPKVKEQFQLGDGEPKKKPTSTPSQKRNNKRKRVTAFERLWSRAGELRILRAMASHTNTHRSTLPDTCDLFATLASNFNRRDALADKVQKLKRGMTMHAYNSTALLTTMVCVDCWIAEQHLVDLINTMVVSPHATPEPGGSITPDGGGGEA

SEQ ID NO: 189684 - protein, 72 aa, Oryza sativa
  Clone ID: PAT_MRT4530_8616C.1.pep
SPISTSASTRGRRRRRRRRRRPGSRPLRRRQSYPGPVDESGVDKVDEFPLCLDTTGRRELTGMDLCYKNEWI

SEQ ID NO: 189685 - protein, 92 aa, Oryza sativa
  unsure (1)..(92): unsure at all Xaa locations
  Clone ID: PAT_MRT4530_86170C.1.pep
MNLDWDSTXNLVDFRVASIVSVDISLPNTYVKRTSTTAASRIGTDLDIMLINNVIPLYSGSFCMSSRRRQSYAEQGXYDIYRGAGPPPQPVN

SEQ ID NO: 189686 - protein, 116 aa, Oryza sativa
  Clone ID: PAT_MRT4530_86171C.1.pep
MAICLEHTAHQDANVANVAVDVIKGPSADRRAHTSVTQDGEAAELTKGTASREAAELQQLSTKAEARPRTGGSIGKCGAPARFRRQQVAVEERLGDAEPEKEAGDTARSQPLVTSG

SEQ ID NO: 189687 - protein, 91 aa, Oryza sativa
  unsure (1)..(91): unsure at all Xaa locations
  Clone ID: PAT_MRT4530_86172C.1.pep
YLKHLLLKSIPVLVGKPHSFKGGNNKGMPYGQRPFMRGLLYIRFXTVVIPDYLNPDXCAWHLETHLPAWPSSRGTHILLDKREQTMPYDAN

SEQ ID NO: 189688 - protein, 158 aa, Oryza sativa
  Clone ID: PAT_MRT4530_86173C.1.pep
DKQEETFGVPCERPGGSHEGRPFGGGEELRVAFRPARRRRRRAELERRGRHPVEVHPPAHGPRQLRPRRHPGPHGDPRLVHAHPRRAPGLLRAQSPRASPSPPTSSPAASRRPGTWRTGRWSAPRRPAWPGRWRARRRRSGAPCSCRLPGPSPRTCSP

SEQ ID NO: 189689 - protein, 78 aa, Oryza sativa
  Clone ID: PAT_MRT4530_86174C.1.pep
MIIAPRARALSLAARAPRAGRGGHEMSGRGRGRDALAFRLYLPPMASIARGAAAEGQGPAAAGGHAGNGGCGSRQWED

SEQ ID NO: 189690 - protein, 174 aa, Oryza sativa
  Clone ID: PAT_MRT4530_86175C.1.pep
MVAARRGEDVVAARWEEEATTVAAVYERRRRRQLGTVSNQSMYHYFFNPQYPVSVRTVRGLRIQTTEKSYVVAHIRTSQILRRWNQRNLRGRACRFGDINIVVVRAAPHCPGMAKLQFSALLPSAAKVGAHRNAYVLPYTEFIRWFKFGRVLKNESTQDISTDLGVNVSSPIKA

SEQ ID NO: 189691 - protein, 70 aa, Oryza sativa
  Clone ID: PAT_MRT4530_86176C.1.pep
SILARLTTKPTQNSIAMLFNFLCTLSCLQFVHLSDRSRNINSIDVPDDHRFVHLLRHLEPGAASVCGFQT

SEQ ID NO: 189692 - protein, 119 aa, Oryza sativa
  Clone ID: PAT_MRT4530_86177C.1.pep
NKKAKYQQSSDILGVTKFTIGQHYSWKKGYKETKNGKTKQFFSSFQPGASRGDPIMIGKAPNYTGGNQAPTKGGELFALKGGFISKKKNRSGGKNCLEPPHAGVNNPWGGGGGWGETAF

SEQ ID NO: 189693 - protein, 121 aa, Oryza sativa
  Clone ID: PAT_MRT4530_86178C.1.pep
MWWQNKHVRALLSADTTAMSQQRQPPPPARAGCCRGGNATARAVRRARRTEQGGREEEEYGSCRHGRGLWSVLAVPAAAQLHHAAAGDGGGVLLLPPPWRAPMRVSLVISGWEMASRSSSM

SEQ ID NO: 189694 - protein, 188 aa, Oryza sativa
  Clone ID: PAT_MRT4530_86179C.1.pep
MDPISIEKIRAMSKYSNCKRQHPMILPALAISMVATFVLLLLVTSPVWVPRLCSLMAFFFLTTLPDLAMAFLLSPKCLFVVGNLIVAFLVGESRLAPRGEPASSSVNEIHDEHVKRNAAISAKAVTAVVAIDQNAHVGELGEEEEEEEEEEEEEEGEEEELHQRVEDFIARVKKQRRMEDKSMFDTDR

SEQ ID NO: 189695 - protein, 53 aa, Oryza sativa
  Clone ID: PAT_MRT4530_8617C.1.pep
TENFTPNKQLILFLKFSLNRQLILIPKHNLNLSMSQEHATIISIKADAWRLRG

SEQ ID NO: 189696 - protein, 718 aa, Oryza sativa
  Clone ID: PAT_MRT4530_86180C.1.pep
MAAAEVYSPTAAQQQQQGKARRGRFFVLFPRKTEIKFPKVIKMDQSTIDRSWMYAKNLKRHSTEYRKGVIKFMNSDYMCCPCADCKNENMFDSGEDVHGHLIQRGFMEGYTCWVKHGEQESGSGAAADRSGAHNQEDENEHEMFIPSPLDGEMVDVDHDLLQDMLRDVEDPAQNERDGMKFSRLAMLPVENTLPETTYEAKQPAPKDLSGDEVHNMVKDISNEFGKKRKRSKTKEKEKNVCESLVGLMLNIPGKTKDGLNARLDLQDMNIRSELQPIRDAETARISKYVKLDDLKLVGMKSHDCHVLITQILPVAIRGILPPKVRHTIQRLCAFFNAIGQKVIDPEDLDGLQTDIVNTLCHLEMFFPLSFFDIMVHLPVHLVKQTKLCGPAFLREMWPFERYMGVLKSYVRNRAKPEGSIIEGYTTEEAIEFCVNYMSDADPIGVPASRHEGRLSGVGIIGRKRIRPDQASYAQAHYAVLQHMAKVGPYFEEHLAKIRDENLGRSDAWINREHNSRFNEWFKNCVAMSTVVPNETVQLLGMGPSWTIDTWQGYDINGYTFYTVKQDDKSTVQNSGVLIDAFQDQVGSNTYYGRIEEILELNYVKFKVPLFRCRWVNLRTGVKADKEDFTLVDLSKVGYADEPFVLVKQVEQIFYLKDPSNKKMHIVRDGKRRIVGVDNVVDEEEYNHNLHVRPHIDLDDDPQEPLAYARSDHNEGITL

SEQ ID NO: 189697 - protein, 156 aa, Oryza sativa
  Clone ID: PAT_MRT4530_86181C.1.pep
MWPFERYMGVLKSYVRNRAKPEGSIIEGYTTKEAIEFCVNYMFDADPIGVPASRHEGRLSADKEGFTLVDLSKVGYADEPFVLAKQVEQIFYIKDPSNKKMHIVRDGKRRIVGVDNAVDEEEYNHNLHVRPHIDLDDDPQEPVAYARSDHTEGITL

SEQ ID NO: 189698 - protein, 99 aa, Oryza sativa
  Clone ID: PAT_MRT4530_86182C.1.pep
MAKVALSSLLAVGGAAAFAVQPSKKTGSGGDGEVKPAGNKKKFITREEEPEQYWQAAGERKGENPMKTPLPYIIIFGMSTPFVILAIAFANGWIKVPVR

SEQ ID NO: 189699 - protein, 71 aa, Oryza sativa
  Clone ID: PAT_MRT4530_86183C.1.pep
GRFLLAAGSGRVLAHVAPTDVDPGAGIQWLPKIHRRSSEVKRTGALLERVFMPCQMYFRYTRHKGGNPELK

SEQ ID NO: 189700 - protein, 1485 aa, Oryza sativa
  unsure (1)..(1485): unsure at all Xaa locations
  Clone ID: PAT_MRT4530_86184C.1.pep
MEGYTCWVKHGEQESGSGAAADRSGAHNQEDENEHDMFIPSPLGGEMVDVDHDLLQDMLRDVEDPAQNERDGMKFSRLAMLPVENTLPEMTYEAKQVLCPLGLEPAPKDLSGDEVHNMVKDISNEFGKKRKRNKTKEKEKNVCESLVGLMLNIPGKTKDGLNARLDLQDMNIRSELQPIRDAETGKVYLPPACHTLSKDEKIAMLSCLKDIKVPSGYSARISKYVKLDDLKLVGMKSHDCHVLITQILPVAIRGILPPKVRHTIQRLCAFFNAIGQKVIDPEDLDGLQTDIVNTLCHLEMFFPLSFFDIMVHLPVHLVKQTKLCGPAFLREMWPFERYMGVLKSYVRNRAKPEGSIIEGYTTEEAIEFCANYMSDADPIRVPASRHEGRLSEVGPYFEEHLVKIRDENLGRSDAWINREHNSWFNEWFKNRVTMSTDVPNETVQLLGMGPSWTIDTWQGYDINGYTFYTVKQDDKSTVQNSGVRIDAFQDQVGSNTYYSRIEEIWELNYVKFKVPLFRCRWVNLRTGVKAGKEGFTLVDLSKVGYADEPFVLAKQVEQIFYIKDPSNKKMHIVRDGKRRIVGVDNVVDEEEYNHNLHVRPHIDLDDDPQEPVYIDLTNAVYICHIVKINFKLLETKTLAPPPTPPLPPSSSLAATATETATTGTEPAATAAEPAASTEPAATATEPAATATEPAASTEPAAAATEPIHRPASAFLVVAACLFTDTNSSHHRGRRHPSCTEPAAASTDRGRPSPIPPPPPPSPPGRHHKFSILQDDFKLVPAAEKDIAWLTFKESFDYPAEHEDRLRWAAFKVMGTAWKNFKTKLVGEFVYNPANPDPREKFPWITEQTRNQHPHRLGTAGYAGKEEEWQREDEEAEESCTPLMFGDIPHPRARNWARARYQKHDDGTIFMPNAEDQQKELVAEQQALQEACSQRREDDLLTKALGNKEHRGRTRGVGSSVPWKYGFPDYAWQYKKRTSNKAEKDARLVAKIRESIRAELTSGFDEKLESMRAKIRQEIRKEQQIPQAAAAAAHKELGSPTEKRSSCASTELAENPTSVDSAVDHITEPTSCTLTVRVMPTFTVPAAEGLAYKPTLETRVHGAQLRAGCAKVQVDSVKPEYELFPLKYPPNDEVLSLGNARGTFIQWPKDLIEIRVTARPTTAPGSRPPKRPASAPSAPPAQDRHAQSYDVQLQYDTDFGEDRTEADSKAIHEPPPMKKSRKAHSSPQRITLDKPEAKGRGRGGKVQTSLLAPRKLDLGKGQEETKGKEVKKKYVAPQEFQLGMPLVGDDVLAAMGTACKDLHLYYMEKSNARKPSKATDILGQHDGKPFLGPTNYIVVDFKDLFDLYKLRAVDTSLLKCYXLKHAPEVAFLHPQVVTVTNLQNDRQGMVNYIYDTLWSRRDKEXHDTLIHKKDFSVKQQIGDQCGFHVCHNMRLLYREKVKTLAEFEGTITKSLTTSFEEVREEIASFILREIINPKGMFRLKLK

SEQ ID NO: 189701 - protein, 118 aa, Oryza sativa
  Clone ID: PAT_MRT4530_86185C.1.pep
MAKVALSSLLAVGGAAAFAVQPSKKTGSGLFRNRVITVRRPRISANLGGDGEVKPAGNKKKFITREEEPEQYWQAAGERKGENPMKTPLPYIIIFGMSTPFVILAIAFANGWIKVPVR

SEQ ID NO: 189702 - protein, 781 aa, Oryza sativa
  Clone ID: PAT_MRT4530_86186C.1.pep
MVGCEHMVLKVVLMAIKDRFASYYYCKNENMFDSGEDVHGHLIQRGFIEGHTCWVKHGEQELGSGAAADRSGAHNQEDENEHEMFIPSPLGGEMVDVDHDLLQDMLRDVEDPAQNERDGMKFSRLAMLPVENTLPKTIYDAKQVLCPLGLEASRYKRKKSADEGNKSKRGGPAKVVWYLPIIDRFKRIFANPNEAKLVRWHATERRNDGPRQPGNDIDVFLEPVIDDLEILWKEGVETWDAHGQENFKLRVLLFCTINDYPALGNLSGQTIKGKKACSDCKEHTRSRWLKKSRKMVYMGHLSEDKYVKLDDLKLVGMKSHDCHVLITQILPVAIRGILPPKVRYTIQRLCAFFNAIGQKVIDPEDLDGLQTDIMNTLCHLEMFFPLSFFDIMVHLPVHLVKQTKLCGPAFLREMWPFERYIGVVKSYVRNRAKPEGSIIEGYTTEDAIEFCVNYMSDADPIGVPASRHEGRLSGVGTIGRKRIRPDQASYAQAHYAMLQHMAEVGPYFEEHLAKIRDENLGRSDAWINREHNSRFNEWFKNRVTMSMVVPNETVQLLGMGPSWTIDTWQGYDINGYTFYTVKQDDKSTVQNSGIRIDAFQDQVGSNTYYGHIEEIWELNYVKFKVPLFRCRWVNLRTGVKADKEGFTLVDLSKVGYAYEPFVLAKQVEQIFYIKDPSNKKMHIVRDGKRRIVGVDNVVDEEENNHNLHIRPHIDLDDDPQEPVAYARSDHTEGITLWLMHLPVTDDSSVTGPKIMPDRDRLISIGLELRPVTDDYFVHLPR

SEQ ID NO: 189703 - protein, 776 aa, Oryza sativa
  Clone ID: PAT_MRT4530_86187C.1.pep
MSTTTSGSSRARTPRTGNKIPKERFRITAVDAVGFLTAPRKILSRFRSICGVIERQKFSILQDDFKLVPAAEKDIAWLTFKESFDYPAEHEDRLRRAAFKVMGTAWKNFKTKLVGEFVYNPANPDPRDKFPWITEQVWSEFHAKKSTPESRARSEAYRLLQTRNQHPHRLGTAGYAEDQRVYEAIKELVAEQQASQEACSQRREDDLLTKALGNKEHRGRTRGDGSYVPWKYGFPDYAWQYKKRTSNKAEKDARLEAKIRESIRAELTSEFDEKLESMRAKIRQEIREEQQIPQAAAAAAHKELGSPTEKRSSCASTELAENPTSVDSAVDHITEPTSCTLTVRVMPTFTVPAAEGLAYKPIPETRVHGAQLRADCAKVQVDSVKPEYELFPLKYPPNDEVLSLGNARDTFIQWPKDLIEIRVTARPTTAPGGRPPKRPASAPSAPPAQNRHAQSYDVQLQYDTDFGEDRTEADSKAIHEPPPMKKSRKAHSSPQRITLDKPEAKGRGRGGKVQASLLAPRKLDLGKGQEETKGKEVKKKYVAPQEFQLGMPLVGDDMLAAMGTTCKDLHLYYMEKSNARKPSKATDILGQHDGKPFLGPTNYIVVDFKDLFDLYRLRAVDTSLLKCYSLLSWQWCQKHAPEVAFLDPQVVTVTNLQNDRQGMVNYIYDTLWSRRDKEYIMCAYNQYAHWILLVITPKWSTCHYLNSRIDKNAYNWTPIQLAIDEAWAQYVQRGGLRKTGHDTLIHKKDFPGTITKSLTTSFEKAMMNTYYATVVM

SEQ ID NO: 189704 - protein, 148 aa, Oryza sativa
  Clone ID: PAT_MRT4530_86188C.1.pep
MHTFIRATLCSLQQADLSMASRSGQPMSSHGERMLPLNPAQYLQRLGHSIELSAAMPRLTGEAPRRRTEISRRLGPATGVAIPRTPWLAFPFMGFLGPHNVRPMFNEVVMLWTSSRPISTTYYPSYSLETNWIGKGVFEEYWKEPCQI

SEQ ID NO: 189705 - protein, 696 aa, Oryza sativa
  Clone ID: PAT_MRT4530_86189C.1.pep
MGGGGVVGSDLERRRQATKSVASHTCLILPKENRKFPKMIRMDQSTIDRSWMYAKNLKRHSTEYRKGIINFMNATEEDRKRRHSDYMCCPCADCKNENMFDSVEDAHGHLIQRGFMEGYTCWVKHGQQESGSGAAADRSGAHNQEDEDEHDMFIPSPLGGEMVDVDYDLLQDMLRDVEDPAQNERDGMKFSRLVSDSETPLYDGCKAKHTKLLVTLDLMKLKASSGWTDKSFTDLLGILKAMLPVENTLLETTYKAKQVLCPLGLEVRRIHACPNDCILYHKQYADLDACPVCKASRYKRKKSADEGKKSKRGGPAKVVWYLPIIDRFKRIFANPNEVKLVRWHATERRNDDMLRHPADSIEWRNIDRKHKDFVADPRNMRICLCPRQPSNDINVFLEPVIDDLEILWKEGVETWNAYGQENFKLRVLLFCTINDYPALGNLSGQTIKGKKACSDCKEHTRSRWLKKSRKMVYMGHRKWLPLRHAFRRKKKIFNGKRELQPAPKDLSEDEVHNMVKDISNEFGKKRKRSKTKEKEKNVCESLVGLMLNITGKTKDGLNARLDVQDMNIKCAYNQYAHWILLVITPKWSTCHYLNSRIDKNANDWTPIQLAIDEAWAQYVQRGGLRKTGHDTLIHKTDFPVKQQIGDQCGFHVCHNMRLLYRDKVKTLAEFEGTINKSLPTSFEEAMMNTYYTTVMM

SEQ ID NO: 189706 - protein, 592 aa, Oryza sativa
  Clone ID: PAT_MRT4530_8618C.1.pep
FVLFNTSTLIMGAVCSRKRSQLVHEDDSFQTSSRFSKTSSLKWLLLTLPRSNSDVSRKGQGKGPGRCPSLMELCVAKACEDINKYSSFSVLPRDLSQQIFNELVASNRLTETLLETFRDCALQDIDLGEYPGVNDAWMEVVASQRHSLLSVDISCSEITDSGLYLLRDCPNMQSLACNYCDMISEHGLGILSGLSNLTSLSFKSSDGITAEAMEAFANLVNLVNLDLERCLKIHGGLVHLKGLRNLESLNMRYCNNIADSDIKYLSDLTNLKELQLACCRITDLGVSYLRGLSKLTQLNLEGCPVTAACLEAISGLASLVVLNLSRCGIYGEGCENFQGLKKLKVLNLGFNNITDDCLAHLKELINLESLNLDSCKVGDEGLLHLRGLMLLKSLELSDTEVGSSGLQHLSGLRNLESINLSFTLVTDTGMKKISALNSLKSVNLDNRQITDVGLAALTSLTGLTHLDLFGARITDYGTSCFRFFKNLESLEVCGGLITDAGVKNIKDLKALKQLNLSQNVNLTDKTLELISGLTALVSLNVSNTRVSNAGLRHLKDLQNLRSLSLDSCRVTTSEVKKLQATVLPNLISVRPE

SEQ ID NO: 189707 - protein, 938 aa, Oryza sativa
  unsure (1)..(938): unsure at all Xaa locations
  Clone ID: PAT_MRT4530_86190C.1.pep
MPILSEFLRLVTREGCQDQVGSNTYYGRIEEIWELNYVKFKVPLFRCRWVNLRTGVKADKKGFTLVDLSKVGYTDEPFVLPKQVEQIFYIKDPSNKKMHIVRDGKRRIVGVDNVVDEEEYNHNLHNPSAAVILHRRARRRRHRARSRRPPFGPTPPPHRRPPPPPPLSPPPPPPSLYTDRRRPSSSSPPASSPTHVADPHRARRCPPGAALPDRRLHRPAPPSTEPGAAAANSSFAAIVILRRRHPPPTPPPPPSPAPPPTPPHAPSLAPPPPTGDALHRARRRLHRARYQATPAILTVLRSICGVIGRQKFSILQDDIKLVPAVEKDIVWLTFKESFDYPAEHEDCLRRAAFKVMGNAWKNFKTKLVGEFVYNPANPDPREKFPWITEQVWEEFHAKKSTPESRARSEAYRXAPDQKPASAPAWHRRICRARYXKNDDGTIFMPNAEDQRVYEAIXCASTEVAENPTSVDSAVDHITEPTSCTLTVRVMPTFTVPAAEGLAYKPTPETRVHGAQLRGDCAKVQVDSMKPEYELFPLKYPPNDEVLSLGNARGTFIQWPKDLIEIKITARPTTAPGGRPPKRPASAPSAPPAQDRHAQSYDVQLQYDTDFGEDRTEADSKAIHEPTPMKKSRKAHSSPQRITLDKPEAKGRGRGGKVQSSLLAPRKLDLGKGQEETKGKEVKKKYVTPQEFQLGMPLVGDDVLAAMGTACKDLHAYYMEKSNARKPNKATNILGEHDGKPFLGPTNYIVVDFKDLFDLYRLRAVDTSLLKCYSLLSWQWYQKNAPELAFLDPQVVTVTNLQNDRQGMVNYIYDTLWSRRDKEYIIIDKNAYDWTPIQLAIDEAWAQYVQRGGLRKTGHDTLIHKKDFPVKQQIGDQCGFHVCHNMRLLYREKVKTLAEFEGTITKSLPTSFEKVREEIASFILHKIINPKGMFRLKIK

SEQ ID NO: 189708 - protein, 94 aa, Oryza sativa
  unsure (1)..(94): unsure at all Xaa locations
  Clone ID: PAT_MRT4530_86191C.1.pep
MGPTRHPHLSLPSPPLXALSFPLLGRDCGAVRCAGGRGRQRGSSWVRLVAGRGAARCGWRAQAAGEYLGASDGRRRRGGALATASDGVATRRRR

SEQ ID NO: 189709 - protein, 493 aa, Oryza sativa
  Clone ID: PAT_MRT4530_86192C.1.pep
MNQSNCKNENMFDSGEDIHSHLIQRGFMEGYTCWVKHGEQESGSGAAADRSGAHNQEDEDEHDIFIPSPLGGEMVDVDHDLLQDMLRDVEDPAQNERDGMKFSRVVSDSETPLYVGCKAKHTKLSVTLDLMKLKASSGWTDKSFTYLLGILKAMLPVENTLPETTYEAKQVLCPLGLEVRRIHACPNDCILYHKQYADLDACPVCKASRYKRKKSADEGNKSKRGGPAKVVWYLPIIDRFKRIFANPNKAKLVQGNPTMISMYSWSLLSTIWRFFGKKKEGMLRLQGTYTKRTSNKAEKDARLEAKIRASIRAELTSKFDEKLESMRAKIRQEIRVEQQNPQAAAAAAHKELGSPTQKRSSCASTELVENPTSVDSAVDHITEPTSCTLTVRVMTTFTVPAAEGLAYKPTPETRVHGAQLRADYAKVQVDSLQYDTDFGEDQTEADSKAIHEPPPMKKNRKARLRSSKLPWSLCLRHLADQIASSNHPLPNVT

SEQ ID NO: 189710 - protein, 82 aa, Oryza sativa
  Clone ID: PAT_MRT4530_86193C.1.pep
IWCREGPHPSTTSGQGIHSIRVTPGEPPCNKPVRFWWIIGGREVFLSSSPRPLVLCSKKVAIFWVLMALVVAIMDSTIHVAS

SEQ ID NO: 189711 - protein, 495 aa, Oryza sativa
  Clone ID: PAT_MRT4530_86194C.1.pep
MEQSTIDRSWVYAKNLKRHSTEYRKGVINFMNAVEEDRKRRNSDYMCCPCVDCKNENMFDSGEDVHGHLIQRGFMDGYTCWVKHGELELGSGAATDRSGAHNQEDEDEHDMFIPSPLGGETVDVDYDLLQDILRDLEDPAQNERDSMKFSRLVSDSETPLYAGCKANHTKLSVTLDLMKLKASSGLTDKSFTDLLGILKAMLPAENTLPETTYEAKQVLCPLGLEKSADEGKKSKRGGPAKVVWYLPIIDRFKRIFANPNEAKLVHWHATERRNDGPRQPGNDIDVFLEPVINDLEILWKEDVETWDAYGQENFKLRVLLFCTINDYPALGNLSGQTIKGKKACSDCKEHTRSRWLKKSRKMVYMGHRRWLLLRHTFRRKKKIFNGKRELQPAPKDLSGDEVNNMVKDISNEFGKKRKRGKTKEKGMWKKKSLFWWLPYWKDLDVRHCIDLMHVEKNVCESLVGLMLNIPGKIKDGLNTHLDLQDMNIRSELQPI

SEQ ID NO: 189712 - protein, 98 aa, Oryza sativa
  unsure (1)..(98): unsure at all Xaa locations
  Clone ID: PAT_MRT4530_86195C.1.pep
MDTTVAHIMDQQEDIKIKSSKCWNPIRLPVTLSTSNGRQICXQTPFSARIGLICISKINNPRTVISTHXKIGPTTALSFEWNSRFISRHTRSLWKSIT

SEQ ID NO: 189713 - protein, 638 aa, Oryza sativa
  unsure (1)..(638): unsure at all Xaa locations
  Clone ID: PAT_MRT4530_86196C.1.pep
MGKRELLILVYGDGSTPQGALQVGGGSLGHPPVVPDPETPTRRWLDDVANLVMTAQQRLGAGGRSSATKATGAATAGSVSRRRAWRAAAVTRRSAIPSSTPPTQENKELVAEQQASQEAYSQRREDDLLTKALGNKEHRGQTRGVGSSVPWKYGFPDYAWQYKKRTSNKAEKDARLEAKIRASIRAELTSEFDEKLESMRAKIRQEIREEQQNPQAAAAAAHEELGSPTKKCSSCASTELAENPTSVDSAVDHRTEPTSCTLIVRVMPTFTGQECMECNSGXDCAKVQVNSVKPEYELFPLNCSTTRILGEDRTEADSKAIHEPPPIKKSRKAHSSPQRITLDKPEAKGRGRGGKVQASLLAPRKLDLGKGQEETKGKEVKKKYVAPQEFQLGMPLVGDDVLAAMDTACKDLHLYYMEKCNARKPSKATDILGEHDGKPFLGLTNYIVVDFKDLFDLYRLRAVDTSLLKCYSLLSWQWCQKHAPEVAFLDPQVVTVTNLQNDRQGMVNYIYDTLWSCRDKEYIMCAYNQYAHWILLVITPKLSTCHYLNSRIDKNAYDWTPIQLAIDEAWAQYVQRGGLRKTGHDTLIHKKDFPVKQQIGDQCGFHVCHNMRLLYREKVKTLAKFEAMMNTYYATVMM

SEQ ID NO: 189714 - protein, 87 aa, Oryza sativa
  Clone ID: PAT_MRT4530_86197C.1.pep
MMHPWVCSTKTVLSLILRIVIVVKLLLALALVLVGLQTLDGAWCSWGKQLEIAMSDGDGRWLVQLRRQGRAVGGGPRGCFSCMQDAV

SEQ ID NO: 189715 - protein, 52 aa, Oryza sativa
  Clone ID: PAT_MRT4530_86198C.1.pep
MDDNVSSFKLKSGAAVMVTDKASTIQSEMLLARTLCTLLAILCGSVPIFSQC

SEQ ID NO: 189716 - protein, 330 aa, Oryza sativa
  Clone ID: PAT_MRT4530_86199C.1.pep
MARAYMAVAVALFLVVVCAAVSEAAKPPASHPRLPPNYHMINPGSSGLGKRDQELSCADTKGKKKGCMAKCDKRCPNQCIVMCPSCKTFCMCDFYPGVSCGDPRFTGGDGNNFYFHGKKDHDFCIVSDADLHINAHFIGKRNPTMSRDFTWIQALGIRFADHRLYMGALKTAKWSSDVDRLELAFDGAPVDVPAQLDARWESAAVPGLTVTRTAATNAVRVQLAGVFDIMANVVPITEHDSRIHNYGVTEEDSLAHLDLGFKFYDLSDDVHGVLGQTYRSDYVNKLSVSASMPVMGGAPSYVASDIFSADCAVARFGHRAGITMVTARAS

SEQ ID NO: 189717 - protein, 358 aa, Oryza sativa
  Clone ID: PAT_MRT4530_8619C.1.pep
IYVRSDMHFMETAMVRWKLIDLLPPPPLLLRDVLRGGDDGGEGCATACPVIGGLEEDAGKSWGGCRGPAGLGEGVMRVAAARHAAQGGVPPAARPRLTRALPAELLLPLSRFTTASSSPTPATPVSSSAAPASPSSRPPLRQPQVGACRGRLPDNAPRAWAALHKLSVCCPGLLHAGVLLEPSDDGAGGGGHRLLAAVAAPALAHTPSSPLRPPATAATNGGVPETAGVEAASSSDARGDNRHMPSEDCVAGINSALQRMSVSKFPYLRCEPDPTVRFLREQMEKAGCPVLPRMIRAMNCMSTNHNGSYGSGLGECVKRRALMSVKNNPYCSGTAAKDAVESVWSICYNDTRPFDRAP

SEQ ID NO: 189718 - protein, 132 aa, Oryza sativa
  unsure (1)..(132): unsure at all Xaa locations
  Clone ID: PAT_MRT4530_861C.1.pep
QGDHPEPEPERAVHGLRRHGLRPRRRRAGELLRRRHQGRRRRREDGRAEARVAAAPPXATRGGRRRAAAAQGRRAAXESVVQWVMSLPGGRPVDFAGATGRACRRVEADLEAVPXGCRWFRXRSLXFNKQFF

SEQ ID NO: 189719 - protein, 302 aa, Oryza sativa
  Clone ID: PAT_MRT4530_86200C.1.pep
MASPSRRRRRRRRRQRRRTRTVPLGVFLYHTTLPAARDWAELPVDAILQVFRWLDHVDILMGAGLACQSWRAAARDEPALWRRIDMRGFACLPYWQRHRRDTVRAMAREAVRRSDGRCEEFWSKVGGDDEVLQFLADHAPYLRSIRLVKCDHVSKEGISAIIQSCPLLEALYIDSDCILRRDIDALRDTNKLRETNRALSIQIRSHGEEEEADRAQNGKDEEADTDYGDDEFTGDLSPWSSICFEQDRDDGLDEFLKSEYFLEPHRYLHDVHVNEFDEEQDCRMLDKGDRRYLKAEGWTYVE

SEQ ID NO: 189720 - protein, 194 aa, Oryza sativa
  Clone ID: PAT_MRT4530_86201C.1.pep
MAAFLHLAILVSLLAAGATANNGYTTPSPPPPPQHTPPPSPPPPAPAAHQSSDKVLVRVEGKVYCQSCEHRNSWSLDGARPLRGAEVSVTCRDAKNRAAWWRLAVADESGYFLAEFGVTRASDFLGADPRGACYARLLSSPDRKCDGLTNINAGMVGAPLRDEGKRWPGQGYDNVVYAAGPLAFRPANCPPKHY

SEQ ID NO: 189721 - protein, 326 aa, Oryza sativa
  Clone ID: PAT_MRT4530_86202C.1.pep
MPTPARAASCPSSSSAAAADDAASCCSSDTGSTFTDLSEVDGIALPAAPCESPPLLGPASCRGGRLSSELRSSVPESGGSVRALNPLCYRSLNSALSGCPAPAGKAAVNAARPPQPHGVKAAESKKVAMIGGRKVPGKQEDVHQLRMLENSYLQYRFMNARAEAVARAKASVAEKSLFGLEERITALRVSVAEKKMEVERMRREQTLRSVVDAQVPHLDQWCDLEGDHSSSLIGLTSALYNSSLRLPVIGNVRANSEEITEVLNSSVQLLEPVSSCVKNFLPKVQEVDDVAAKLAQVIASERVAIEECGNLLYQAHNLQKIQRRLV

SEQ ID NO: 189722 - protein, 59 aa, Oryza sativa
  Clone ID: PAT_MRT4530_86203C.1.pep
VISIVTSYRVLHESVGLFKPVALQFLCGTCKISRGVRIQLWSLCLVFSSLKVLRKPVRM

SEQ ID NO: 189723 - protein, 168 aa, Oryza sativa
  Clone ID: PAT_MRT4530_86204C.1.pep
CTVKRSDTQKFPSPTAYPVLPIFFSPTAYAGSSRHDSSRRLAARGTTPRDGCGRGGAVVAGGAHPPAARGTARPRGGDAQNGAAGTATTALRRGLSPSAALRTNATTGPLRLLPDGALRRRSPTVLPDGAPAPPRHLRPAAGAPPHRTSSASPWPTARLRELRSSVRW

SEQ ID NO: 189724 - protein, 87 aa, Oryza sativa
  unsure (1)..(87): unsure at all Xaa locations
  Clone ID: PAT_MRT4530_86205C.1.pep
MAYKKATPVLDEPARAPLRGPFASGAASLRRDQDDDDDDLLVDLVHEFYDDGEPGADATARGGVSSSPEPEPTEWKDXLREALSDAT

SEQ ID NO: 189725 - protein, 94 aa, Oryza sativa
  Clone ID: PAT_MRT4530_86206C.1.pep
KGTFGGGSPQACDEGSPARSAPHCRRGPTAGCAAPPPAASLGPLAPTLLLSCCCSSSAAPRPDRDPPPPPTTPPPSPSPWGISPTTSVTARRPS

SEQ ID NO: 189726 - protein, 89 aa, Oryza sativa
  unsure (1)..(89): unsure at all Xaa locations
  Clone ID: PAT_MRT4530_86207C.1.pep
WRHCLDTVHGRPRLHRRLAFATADWCLRXPFMGVHGFTDRLAFAAADXMSPHGWPIMPSLLGVFDFTAGLPPSPPTGVLAYTVGGLRRH

SEQ ID NO: 189727 - protein, 55 aa, Oryza sativa
  Clone ID: PAT_MRT4530_86208C.1.pep
MDLPFQRTPLPDPTVARLPALDQAVALAGEMPLAVPDLPIQLLPSWRRHCWLLST

SEQ ID NO: 189728 - protein, 793 aa, Oryza sativa
  Clone ID: PAT_MRT4530_86209C.1.pep
MDQSTIDRSWMYAKNLKRHSTEYRKGVINFMNAAEEDRKRRNSDYMCCPCADCKNENMFDSGEDVHGHQIQRGFMKGYTCWVKHGEQELESGASADRSGAYNQEDEDELDMLIPSPLGDEMVDADHDLLQDMLCDVEDPAQNERDGMKFSRLVSDSGTPLYVGCKAKHTKLSVTLDLMKLKASNGWTDKSFTDLLGILKAMLPVENTLPETTYEAKQVLCPLGLEVRRIHACPNDCILYHKQYADLDAYPVCKASRYKRKKSADEGNKSKRGGPRQPGNDIDVFLEPVIDDLEILWKEGMETWDAYGQENFKLRVLLFCTINDYPALGNLSGQTIKGKKACSDCKEHTRSRWLKKSRKMVYMGHRSWLPLRHAFRRKKKIFNGKRELQLAPKDLSGDEVHNMVKDISNEFGKKRKRSKTKEKACHTLSKDEKIAMLSCLKDIKVPSGYSARIIAIRGILPPKVCHTIQRLCAFFNAIGQKVIDPEVLDGLQTDIVNTLCHLEMFFPVHLVHGSIIEGYTTEKAIEFCVNYMSDADPIGVPASRHEGRLSGVGTIGRKRISPDQASYAQAHYAVLQHMAEGGSYFEEHLAKIRDENLGRSDAWISREHNSRFNEWFKNRVTMSTDVPNEIVQLSGMGPSWTVDTWQGYDINGYTFYTVKQDDKGIVQNSGVRIDAFQDQVGSNTYYDRIEEIWELNYSTDKEGFTLVDLSKVGYADEPFLLAKQVKQIFYIKDPSNKKMHIVRDGKCRIVGVDNVVDEEEYNHNLHVRPHIDLDDDPQEPVAYARSDHTEGITL

SEQ ID NO: 189729 - protein, 76 aa, Oryza sativa
  unsure (1)..(76): unsure at all Xaa locations
  Clone ID: PAT_MRT4530_8620C.1.pep
FSLSFLWFLILWSLFYPLLSPPDGATAGCRYLLGAPPARCYGGHSTASNGXGFGGHPXIPPSSSWVSLPREHRIWT

SEQ ID NO: 189730 - protein, 923 aa, Oryza sativa
  unsure (1)..(923): unsure at all Xaa locations
  Clone ID: PAT_MRT4530_86210C.1.pep
VSQIGSKIFLSPATVSRLLRTLAPPSSSLAKPAAVATEPAAPTCPIGVSTDRRRPPPSPXAPPSPTGHPQIMSQQGEPMSTTTSGSSRARTPRTGNKIPKERFRITAVDAVGLPTSPRKILSRFRSICGVIGRQKFSILXDDFKLMPAAEKDIAWLMFKESFDYPAEHEDRLRRAAFKVMGTAWKNFKTKLVGEFVYNPANPDPREKFPWITEQVWEEFHAKKSTPESRARSEAYRLLQTRNQHPHRLGTTGYAGKEEEWQREDEEAEESCTPLVFGDIPHPRARNWARARYQKHDDGTIFMPNAEDQRVYEAIELVAEQQASQEACSQRREDDLLTKALGNKEHRGRTRGIGSSVPWKYGFPDYAWQYKKRTSNKAEKDAHLEAKIQESIRAELTSEFDEKLESMRAKIRQEIREEQXIPQAVVAAAHKELGSPTEKRSSCASTELAENPTSVDSAVDHITEPTSCTLTVRVMPTFTRQECMERNSGXDCAKVQVDSAKPEYELFPLKYLPNDEVLSLGNARGTFIQWPKDLIEIRXTARPTTAPGGRPPKRPASTPSAPPAQDRHAQSYNVXLQYDTDFGEDRTEADSKAINEPPPMKKSRKAHSSPXRITLDKPEAKGXGRGGKVQASLLAPRKLDLGKSQEETKGKEVKKKYVAPQEFQLGMPLVGDDVLPAMGTACKDLHLYYMEKSNARKPNKATDILGQHDGKPFLGPTNYIVVDFKDLFDLYRLRAVDTSLLKCYSLLSWQWCQKHAPEVAFLDPQVVTVTNLHNDRQXMVNYIYDTLWSRRDKEYIMCAYNQYAHWILLVITPKWSTCHYLNSRIDKNAYDWTPIQLAIDEAWAQYVQRGGLRKTGHDTLIHKKDFPVKQQIGNQCGFHVCHNMRLLYREKVKTLAEFEGTITKSLTTSFEEAMMNTYYATVMM

SEQ ID NO: 189731 - protein, 144 aa, Oryza sativa
  Clone ID: PAT_MRT4530_86211C.1.pep
MSQQGEPMSTTTSGSSRARTPRTGNKIPKERFRITAVDQVGLPTTPRKILSRFRSICGVIGRQKFSILQDDIKHMLAAEKDIVGLMFKESFDYPIEQEDCIRQTAFKVMGNAWKNFKTKLVGEFVYNPANPDLREKFPWITEQV

SEQ ID NO: 189732 - protein, 280 aa, Oryza sativa
  Clone ID: PAT_MRT4530_86212C.1.pep
MKFGKSLSSQIVEMQPEWRDNFLSYKDLKKRLNLISGGAAGERASKRRRVGGATAVTVTAAAAGGMTLEQAGFVGLLDAELDKFNFFFLEKEEEYVIKQKELRERKMASAEEVMRVRKEIVDLHGEMVLLENYSALNYTGLVKILKKYDKRTGSMIRLPFVQKVLQQPFFTTDLLYKLVKECEEMLDQLMPTNEHSVASEDGKDDSEGEEKGSKPSSSSSANGGAVPGEAEAEDERSTDMKSTVTAALRALREIRSGSSTVSVFSLPPLHGSNGQDEPGR

SEQ ID NO: 189733 - protein, 760 aa, Oryza sativa
  unsure (1)..(760): unsure at all Xaa locations
  Clone ID: PAT_MRT4530_86213C.1.pep
MSTTTSGSSRTRTPRTGNKIPKERFRITAMDAVGLPTSPKKILSRFRSICGVIGRQKFSILQDDIKLVPAAEKDIAWLTFKESFDYSAEHEDRLRRAAFKVMGNAWKNFKTKLVGEFVYNPTNPDPREKFPWITEQTKNQHPHRFGTAEYAGKKEEWQREDEEAEESNTPLVFGDIPHPRARNWARTRYQKKDDGTIIMPNPEDQRVYEAIKELVADQQASQEACSQRREDDLLMKALGNKEHRGWTWGVGSSVPWKYGFPDYAWQYKKRTSNKAKKDARLEAKIQEPTSYTLTVMVMPTFTVPAAKGLAYKPTXRQECMERNSGXDCAKVQVDSVKPEYELFPLKYPPNDEVLSLGNACGTFIQWPKDLIEIRVTARPTTAPGGRPPKRPASAPSAPPAQDRHAQSYDVQLQYDTDFGEDRTEADSKAIHEPLPMKKSRKAHSSPQRITLDKPEAKGRGRGGKVQSSLLAPRKLDLGMGQEETKGKEVKKKYAAPQEFHLGMPLVRDDVLAAMGTACKDLHAYYMEKSNARKPNKATDILGEHDGKPFLGPTNDIVVDFKDLFDLYMLRAVDTSLLKCYSLLSWQWCQKNAPEVAFLDPQVVTVTNLQNDRQGMVNYIYDTLWSRQDKEYIMCAYNQYAHWILLIIAPKWSTCHYLNSRIDKNTYDWTPIQLVIDEAWAQYVQRGGLRKIGHDTLIHKKDFPVKQQIGDQCRFYVCHNMRLLYRDKVKTLAEFEGTIIKSLPTSFEEAMMNTYYATVMM

SEQ ID NO: 189734 - protein, 273 aa, Oryza sativa
  Clone ID: PAT_MRT4530_86214C.1.pep
MLTVASSLPACAATVAAAAACRPSMAQVIFVYVSLYLVAFAQGFDKPCGLAFGAEQFDPGHPRESAARSSLFNWWFFSMAVGVAVAIAAVSYVQENVGWGVPFAVVSCASAVFLLGTPTYRLYAPPRPDTVMDGKRSSSSEEDARGALRRLLPIWAACVAYGVADAQIMTLFNKQGRMLDRRIGGVELPPAALQTIGPATIVLFVPIYDRAVEFFHGEMPEGRRSVGLALYCGAVGIGGFVSAALIAALDGVTRRDGGEGWTIDQINAPQVKF

SEQ ID NO: 189735 - protein, 171 aa, Oryza sativa
  Clone ID: PAT_MRT4530_86215C.1.pep
PSPQPRSTCRRRYSRRSSSVRGPPPPLSSLVVGAGLAVLLSRPARWLGVAGETMRSSDMLRTASLSTPSAPVSRCSILVLDGRSRGHCPRCLGLRGGRHHFFSGCAWSSPKLLEHVVDSSALPSPTTNAVWFQPEPSLLFLSFFLCFYIIHSLSCHWTVMVCVFFSLPKSH

SEQ ID NO: 189736 - protein, 1440 aa, Oryza sativa
  Clone ID: PAT_MRT4530_86216C.1.pep
MDQSTIDRSWMYAKNLKRHSTEYRKGVINFMNAAEEDRIRRNSDYMCCPCADCKNENIFDSGEDVHGHLIQRGFMEGYTCWVKHGEQESGSGAAADRSGAHNQEDEDEHDMFIPSPLGGEMVNVDHDLLQDMLRNIEDLAQNERDGMKFSRLASSGWTDKSFTDLLGILKAMLPVENTLPETTYEAKQVLCPLGLEVRRIHACPNDCILYHKQYADLDACPVCKASRYKRKKSADEGNKSKRGGPAKVVWYLPIIDHFKRIFANPNEAKLVRWHATKRRNDGPKQPGNDMDVFLEPVIDDLEILWKEGVETWDAYGQENFKLRVLLFCTINDYPALGNLSGQTIKGKKACSDCKEHTRSRWLKKSRKMVYMGHRRWLLLRHAFRRKKKIFNGKREFQPAPKDLSGDEIHNMVNDISNEFGKKRKRSKTKEKGMWKKKSIFWRLPYWKDLDVRHCIDLMHVEKNDMNIRSELQPIRDAETGKVYLPPACHTLSKDEKIAMLSCLKDIKVSSGYSARISKYVKLDDLKLVGMKSHDCHVLITQILPVAIRGILPPKVCHTIQRLCAFFNAIGQKVIDPEDLDGLQTDIVNTLCHLEMFFPLSFFDIMVHLPVHLVKQTKLCGPAFLREMWPFERYIGVLKSYVRNRAKPERSIIEGYTTEEAIEFCVNYMSDADPIGVPASRHEGRLSGVGTIRRKRIRPDQASYAQAHYAVLQHMAEVGPYFQEHLAKIRDENSGRSDAWINREHNSRFNEWFKNRVTMSSDVPNETVQLLGMGSSWTVDTWQGYDINGYTFYTVKQDDKSTVQNSGVRIDAFQDQVGSNTYYGRIEEIWELNYVKFKVPLFRCRWVNLRTSVKADKEGFTLVDLSKVGYADEPFVLAKQVEQIFYIKDPSNKKMHIVRDGKRRIVGVDNVVDEEEYNHNLHVWEEFHAKKSTLESRARSEAYRLLQTRNQHPHRLGTAGYAGKEEEWQREDEEAEESCTPLMFGDIPHPQARNWARARRLTSIRSYLQKELVAEQQASQEACSQRREDDRLTKALGNKEHRGRTRGVGSSVPWKYGFPDYAWQYKKRTSNKAEKDARLEAKIRASIRAKLTSEFDEKLESMRAKIRQEIREEQQNPQAAAAAAHEELGSPTQKRSSCASTELAENPTSVDSAVDHITEPTSCTLTIRVMLTFTVPAAEGLAYKPTPETRVHRAQLRADCAKVQVNSVKPEYELFPLKYPPNDEVLSLGNARGTFIQWPKDLIEIRVTARPTTAPGGRPPKRPASAPSAPPAQDRHAQSYDVQLQYDTDFGEDRTEADSKVIHEPPPMKKSRKAHSSPQRITLDKPEAKGRGRGGKVQASLLAPRKLDLGKGQEETKGKEVKKKYVAPQEFQLGMPLVGDDVLAAMGTACKDLHLYYMEKSNARKPSKATDILGEHDGKPFLDPTNYIVVDFKDLFDLYRL

SEQ ID NO: 189737 - protein, 1000 aa, Oryza sativa
  Clone ID: PAT_MRT4530_86217C.1.pep
MLTVASSLPACAATAAAAAACRPSMAQVIFVYVSLYLVAFAQGFDKPCGLAFGAEQFDPGHPRESAARSSLFNWWFFSMAVGVAVAIAAVSYVQENVGWGVPFAVVSCASAVFLLGTPTYRLYAPPRPDTAMDGKRSSSSEEDARGALRRLLPIWAACVAYGVADAQIMTLFNKQGRMLDRRIGGVELPPAALQTIGPATIVLFVPIYDRAVVPALRRATGNPSGLTTLQRTGAGLATSLAAVEGRRLGAARAGRRPAMSWAWLVPQYASMGVADVLAAVGMQEFFHGEMPEGRRSVGLALYCGAVGIGGFVSAALIAALDGVTRRDGGEGWFADDLDRGHLDYFYWLLAGVSAVALAMFLCFARSYAYRNKTLLTAMYSEKKKARARDGDGDRDAAERRRKGKAPCLEPPPTPPRAMAAAAAAEAGPSRGGCVPSRNPLKDPGDCEAVAIRDTDGEDCGHFSCDMDEIADIEMGMAARGDPMCEHETCLATGSNLMMVCPECGWCFCVGGLAHRAKPLGHIREHAYRRAHWVALRCEDPCEGYCFECEDSLAIESQMVADDGAGGGEEGYGCVVTGMPNLGNTCYLNALLQCLLVLGKLRARILGPGAPSGVLGDLLHDLFVGTNGPSYARRLLDPAMLLRCVRFRYPQFRGIAMQDCHELLCCLRDGLDEDERKWRAGNMQDGSPSAVAPTVIDSIFAGQLSVTLSCKCCSFKSDSEEAPTREENTLIASGHGVERTVSAVLDSIKPEDSIEAKMDTLSAEVATEDKGKDRNRDAVYDKADDINSLASIEEILELHLKAEMIEKRCENCSNADQKASPISGKHGEQPVACTNVNGTVDGDQDEQDQGRGKQVNMGHSAHQVEENQYDRPDRNKGAIKTCLFSKLPPVLALHLKRNLWPLKLKVSGHVSFKETLDVKLFMHPSSEDKDNSSYRLVGVVEHLGRCMDSGHFVAYVRPSRRQQTNGSSLWFCASDTDIREVSLEEVLKCEAYLLFYERMEG

SEQ ID NO: 189738 - protein, 906 aa, Oryza sativa
  Clone ID: PAT_MRT4530_86218C.1.pep
MDQSKIDRSWMYAKNLKRHSTEYRKGVINFMNAAEEDRIRRNSDYMCCPCADCKNENMFDSGEDVHGHLIQQGFMEDYTCWVKHGEQESGSGAAADRSDAHNQEDENEHDMFIPSPLGGEMVDVDHDLLQDMLRDVEDPAQNERDGMKFSRLVSDSETPLYAGCKAKHTKLSVTLDLMKLKASSGWTDKNFTDLLGILKAMLPVENTLPEMTYEAKQVLCPLGLEVRRIHACPNDCILYHKQYADLDACPVCKASRYKRKKSADEGNKSKRGGPAKVVWYLPIIDRFKRIFANLNEAKLVRWHATERRNDGPRQPGNDIDVFLEPVIDDLEILWKEGVETWDAYGQENFKLRVLLFCTINDYPALGNFSGQTIKGKKTCSDCKEHTRSRWLKKSRKMVYMGHRRWLPLRHTFRRKKKIFNGKRELQPTPKDLSGDEVHNMVKDISNEFGKKRKRNKTKEKACHTLSKDEKIAMLSCLKDIKVPSGYSARISKYVKLDDLKLVGMKSHDCHVLITQILPVAIRSILPPKVRHTIQRLCAFFNAIGQKVIDPEDLDRLQTDIVNTLCHLEMFFPLSFFDIIVHLPVHLVKQTKLCGPAFLREMWPFERYMGVLKSYVRNRAKPEGSIIEGYTTEEAIEFYVNYMSDADPIGVPASRHEGRLSGVGTIGRKRIRPDQASYAQAHYAVLQHMVEVGPYFEEHLAKIRDENLGRSDAWINREHNSRFNEWFKNRVTMSTDVPNETVQLLGMGPSWTIDIWQGYDINGYTFYTVKQDDKSTVQNSGVRIDAFQDQVGSNTYYGRIEEIWELNYVKFKVPLFRCRWVNLCTGVKADKEGFTLVDLSKVGYADEPFVLAKQVEQIFYIKDHSNKKMHIVRDGKRRIVGVDNVVDEEEYNHNLHIRPHIDLDDDP

SEQ ID NO: 189739 - protein, 81 aa, Oryza sativa
  Clone ID: PAT_MRT4530_86219C.1.pep
IRGGYTGNRPSLYLSLKPKTGDRCSQSPSPQKPRPSSPSVYFKAEGGYTPPPINPYGCINRRRTRKRKAPRKCLWSTRRHR

SEQ ID NO: 189740 - protein, 204 aa, Oryza sativa
  Clone ID: PAT_MRT4530_8621C.1.pep
MSGMDGSGVPETAGVEAASSSDARGDNRHMPSEDCVAGINSALQHPTVRFLREQMEKAGCPVLPRMIRAMNCMSTNHNGSYGSGLGITVCCDHMRSQDEINQLLIHELIHAYDDCVVKNMDWKNCAHHACSEIRANHLSGDCHYKRELLRGFMKIRGHEQECVKRRALMSVKNNPYCSGTAAKDAVESVWDICYNDTRPFDRVP

SEQ ID NO: 189741 - protein, 1588 aa, Oryza sativa
  Clone ID: PAT_MRT4530_86220C.1.pep
MEGYTCWVKHGEQEAGSGAAADRSGAHNQEDEDEHDMFIPSPLGGEMVDVDHDLLQDMLRDIEDPAQNERDGMKFSRLAMLPVENTLPETTYEAKQVLCPLGLEVRRIHACPNDCILYHKQYEDLDACSVCKASRYKRKKSVDEGNKSKRGGPAKVVWYLPIIDRFKRIFANPNEAKLVRWHAMERRNDGPKQPGNDIDVFLEPVIDNLEILWKEGVETWDAYGQENFKLRVLLFCTINDYPALGNLSGQTIKGKKACSDCKEHTRSRWLKKSRKMVYMGHQRWLPLRHAFRRKKKIFNGKRELQPAPKDLSGDEVHNMVKDISNEFGKKRKRSKTKEKEKNVCESLVGLMLNIPGKTKDGLNARLDLQDMNIRSELQPIRDAETGKVYLPPACHTLSKDEKIAMLSCLKDIKVPSGYSVRISKGILPPKVRHTIQRLFAFFNAIGQKVIDPEDLDGLQTDIDHVGSNTYYGRIEEIWELNYVKFKVPLFRCRWVNLRTSVKADKEGFTLVDLSKVGYTDEPFVLAKQVEQIFYIKDPSNKKMHIVRDGKRRIVGVDNVVDEEEYNHNLHVRPHIDLDDDPQEPVAYARSDHTEGITLTLAPPPTPTSPPSSSLTATATKPAAAATESGAASTDRRRPPPSLAPPPPSPPPPPSSSLAKPAAVATDAEPAAAATEPPRPSIRTTAASSPTTPTSPPPPPPSLYTDRTGVGLPRRRRPHPHQHTSPTPTEPDAARPAPTYPTGISTDRRRPPPSPAPTPRTGNKIPKEQFRITAVDAVGLPTSPRKTLSRFRSICGVIGRQKFSILQDDIKLVPAAEKDIAWLTFKESFDYPAELEDRLRRAAFQVMGNAWKNFKTKLVGEFVYNPVNPDPREKFSWITEQVWEEFHVKKSTPESRARSKAYRLLQTRNQHPHQLGTAGYAGKDEEWQREDEEASQSCTPLVFGDIPHSRARNWARARYQKNDDGTIFMSNVEDQRVYEAIKELVAEQQASQEAYSQRREDDLLTKALGNKEHRGRTRGVGSSVPWKYGFPENAWQYKKWTSNKAEKDARLEAKIRASIKAELTSEFDEKLESMRAKIRQEIREEQQNPQAAAAAHEELGSPTQKRSSCASTELAENPTSVDSAVDHIMELTSCTLTVRVMPTFTVPAAEGLAYKPTPETRVHGAQLRADCAKVQVDSVKPEYELFPLKYPSNDEVLSLGNARGTFIQWPKDLIEIKVTARPTTAPGGRPPKRPASAPSAPPAQDHHAQSYDVQLQYDTDFGEDRTEADSKAIHEPPPMKKSRKVHSSPQRITLDKPEAKGRGRGGKVQASLLALRKLDLGKGQEETKGKEVKKKYVAPQEFQLGMPLVGDDVLAAMGTACKDLHYYMEKFNARKPSKATDILGEHDGKPFLGSTNYIVVDFKDLFDLYRLRAVDTSLLKCYSLLSWQWCQKHAPEVAFLDPQVVTVTNLQNDHQGMVNYIYDTLWSRRDKEYIMCAYNQYAHWILLVITPKWSTCHYLNSRIDKNTYDWTPIQLAIDEAWAQYMQRGGLRKTRHDTLIHKKDFPVKQQIGDQCGFHVCHNMRLLYREKVKTLAEFEVGGLNCDRLTTF

SEQ ID NO: 189742 - protein, 87 aa, Oryza sativa
  Clone ID: PAT_MRT4530_86221C.1.pep
MTERGAPHWETAQAPLCRFGPLRSVIPYSCVLGDLRMKELQSMSQPLPCSGFPIWKSPVPISVGKLPSESPSDETGHNYLHFRREQD

SEQ ID NO: 189743 - protein, 852 aa, Oryza sativa
  unsure (1)..(852): unsure at all Xaa locations
  Clone ID: PAT_MRT4530_86222C.1.pep
MSRQGEPMSTTTSGSSRARTPRTGNKISKERFRITSVDAVGLPTSPRKIVSRFRSICRVIGRQKFSILQDDINFVPAAEKDIAWLTFKKSFDYPVEHDNRLRRAAFKVMGNAWKNFKTKLIGEFVYNQANPDPREKFPWITAQVWEEFHAKKSTPEYRARSEAYRLLXIKNQHPHRLGTAGYAGKEEEWQREDEEAEESCTPLVFGDIPHPRARNXARARYQRNDDGTIFMPNAEDQRVYEAIELVAEQQASQEACSQRREDDLLTKALGNKEHYGQTRGVGSSVPXKYGFPDYAWQYKKRTSKKAKKDARLEAKIRASIRAELTSEFDEKLESMRAKIRQEIREEKQNPQAAAAAAHEELGSPTQKHSSCASTELAENPTSVDSAVDHIMEPTSCTLTVRVMPTFXETRVHGAQLRTDCAKVQVDSVKPEYELFPLKYPPNDEVLSLGNAHGTFIQWPKDLIEIRVTARPTTAPGGHPPKRPASAPSAPAAQDCHAQSYDVQLQYDTDFGEDRTEADSKAIHEPPPMKKSRKAHSSPQRITLDKPEAKGRGRGGKVQTLVLAPRKLDLGKGQEETKGKEVKKKYVAPQEFQLGMQLVGDDVLAAMGTACKHLHLXYMEKSNARKPSNATDILGEHDGKPFLGPTNYIVVNFKDLFDLYRLRAVDTSLLKCYCLLSWQWCQKHAPEVAFLDPQVVTVTNLQNDRLGMVNYIYDTLWSRRDKEYIMCAYNQYAHWILLVITPKWSTCHYLNSRIDKNAYDWTPIQLAIDEAWAQYVQRGGLRKIGHDTLIHKKDFLVKQQIGDQCGFHMCHNMRLLYREKVKTLAEFEGTITKSLPTSFEEAMMNTYYATVMM

SEQ ID NO: 189744 - protein, 928 aa, Oryza sativa
  unsure (1)..(928): unsure at all Xaa locations
  Clone ID: PAT_MRT4530_86223C.1.pep
TSFLVVVASSSPTPDTAXPSLPPPSPSSAQPPPTPVTPSTEPSAAAIEAAANSSXRRRRPPSPSPRPPPPPSPVQTISQXGEPMSTTTSGSLRARTPRTGNKIPKERYRITAVNQIGLPTSPRKMLSRFRSICGVIGRQKFNILXDDIKQVPAAEKDSAWLTFKESFDYPEEHEYLIRQAAFKVMGNAWKNFKSKLVGEFVFNPANPDPTEKFPCITKWVWDEFHAKKSTTESRARSEAFRXLQTLNQYPHXLGTAGYAGKEEEWQQEDEEEEESNTPRVFADIPHPRARNWARARYQKNANGTIFMPNPEDQRVYEAIEMVAEQQASQEACSQRREDDLLTKALGNKEHRGRTRGIGSSIPXKFGFPDYAWQSKKRTSNKAEKDARLKAKIPASIRAELASEFNEKLESMRAKIRQEIREEQHNPQAAVAAAXEELGSPTQKRSNCASTEVAENPTLVDSAVDHITEPTSCTLTVRVMPTFTRQECMERNLGXDCAKVQVNSVKPEYELFPLKYPPNDEVLSLGNARGTFIQWPKDLIEIRVTARPTIEPGGRPPKRPSSSPSAPPAQDRHAQSYDVQLKYDTDFWEDRTEADSKAIHEPPPMKKSRKAHSSPQRITLDKPXAKGRGGGGKVQASLLAPRKLDLGKGQEKTKGKEVKKKYVAPQEFXLGMPLVGDDVLAAMGTACKDLHVYYMEKSNARRPNKATDILGEHDGNPFLGPTNYIVVDFKDLFDLYWLRAVDTSLLKCYSLLNWQXCQENAPEAAFLDPQVVTVTNLENDRQGMVNYIYDTLXVPXDKECIMCTYNQCDHWILLVITPKWSTCHYLNSRIDKNAYDWTPIQLAIDEVWAQYVQRGGLRKTRHHILIHKKDFPVKQQIGDQCGFHVCHNMRLLYKEKVKTLTGFEGKITKSLPTSFEEAMMNIDYVTVIF

SEQ ID NO: 189745 - protein, 60 aa, Oryza sativa
  Clone ID: PAT_MRT4530_86224C.1.pep
TPPCRPTTLSRRAPPRPLRATRRRLVPGGRAPPGQRGFASPAPTSTPRRAPHGPAAMLLH

SEQ ID NO: 189746 - protein, 747 aa, Oryza sativa
  Clone ID: PAT_MRT4530_86225C.1.pep
MSTTTSGSSRARTPRTGNKIPKERFHITAVDAIGLPTSTRKILSRFRSICGVIGRQKFSILQDDFKLVPAAEKDIAWLTFKESFDYPAEHEDRLRRAAFKVMGTAWKNFKTKLVGEFVYNPGNPDPREKFPWITEQVWEEFHAKKSTPESRARNEAYRLLQTRNQHPHRLGTAGYAKDQRVYEAIKELVAEQQASQEACSQRREDDLLTKALGNKEHRGRTRGVGSSVPWKYGFPDYAWQYKKRTSNKAEKDARLEAKIQESIRAELTSEFDEKLESMRAKIRQEIREEQQIPQAAAAAAHKELGSPTEKRSSCASTELAENPTSVDSAVDHITEPTSCTLTVRVMPTFTVPAAEGLAYKPTPETRVHGAQLRADCAKVQVDSMKPEYELFPLKYPPNNEVLSLGNAHGTFIQWPKDLIEIRVTARPTTAPGGRPPKRPASAPSAPSAQDRHAQSYDDRTEADSKAIHEPPPMKKSRKAHSSPQRITLDKPEAKGRGRGGKVQASLLVPTKLDLGKGQEETKGKEVKKKYVAPQEFQLDMPLVGDDVLAAMGTTCKDLHLYYMEKSNARKPSKATDILGQHDGKPFLGPTNYVVVDFKDLFDLYRLRAVDTSLLKCYSLLSWQWCQKHAPEVAFLDPQVVTVTNLQNDCQGMVNYIYDTLWSRRDKEYIMCAYNQYAHWILLVITPKWSTCHYLNSRIDKNAYDWTPIQLAIDEAWAQYVQRGGLRKTGHDNLIHKKDFPVKQQIGD

SEQ ID NO: 189747 - protein, 81 aa, Oryza sativa
  unsure (1)..(81): unsure at all Xaa locations
  Clone ID: PAT_MRT4530_86226C.1.pep
MAPPVPTXAARFVLXXLLSTAVAEAEAAAVAPXAXKAAAKGAKTAAAAGKEKDARSLYRRLXALXGGAGKXSLXRVMNKWV

SEQ ID NO: 189748 - protein, 285 aa, Oryza sativa
  unsure (1)..(285): unsure at all Xaa locations
  Clone ID: PAT_MRT4530_86227C.1.pep
KAWKAEAPFGPFSQTGPFGPFGKPVWPGKPPKTGGLFNRAFSGPFAKWGFGKGGPXGXXKGFXXTXFPPGXXGPXNXWKEKGGRRGGVGWNGAKGGKGGEGRGKGSRGEXLGXXGVGIPRPGRGNGEVCPPRQXXSRVGXWEFPAQXLXGXFPPGXXLGIPGPAPGKCFFXFPGNPXLAFWGAXPPQXRPGESPARPLXNAFPPXFQPGESPARPXXGSIPFLFXSPTQXNGPTPPGXRPXFGGAXKATRHNPXGNXGXAGSPNPLSPPPXWPLGGFRWRGNFRG

SEQ ID NO: 189749 - protein, 82 aa, Oryza sativa
  Clone ID: PAT_MRT4530_86228C.1.pep
PTRPRAHQRGAGDDIADWLGHSCNPVSKFSRFSPVVPVWVVGLLLALGMVFASCESLITFEIPLKIRSDLDVFLWNYTVGDV

SEQ ID NO: 189750 - protein, 110 aa, Oryza sativa
  unsure (1)..(110): unsure at all Xaa locations
  Clone ID: PAT_MRT4530_86229C.1.pep
LSQWAIHHIAIPAGKAHLQHSQHAHHXAHPAWVFPSPSALAFGCTHFSRRRALVLSAREQGAAAEAALAAGVHGRPISTTSPGGIPXNDKSCSPEIGSTISLPGEFSIWG

SEQ ID NO: 189751 - protein, 114 aa, Oryza sativa
  Clone ID: PAT_MRT4530_8622C.1.pep
RKLSGSLKRSLFFPRGWVFLLIRRARFFSLLEGGSWPPLNLGGLPPLLAPPALTIFASGLFVGGVWGWYFFSAGAYVGPCFPLVWTPFPLGRVGLPAGSGHQWLGLPLPPAGGG

SEQ ID NO: 189752 - protein, 72 aa, Oryza sativa
  Clone ID: PAT_MRT4530_86230C.1.pep
NTIFHSSGSKPSQKYTLPVQILPFFQYSYIHLPLPHQYIHLYCTRTYIYYTGYTHTHSPSKTLIIFNLTSLT

SEQ ID NO: 189753 - protein, 472 aa, Oryza sativa
  unsure (1)..(472): unsure at all Xaa locations
  Clone ID: PAT_MRT4530_86231C.1.pep
RWHRGERRPASPAKVTTRKRSASATTAVSSASQLEEGKCHDRENXCIFPNASVLIPVPRKAGRCPSSPDFVHLHPCTLARTRLSTEXKPYPLDMWXYGSVLQQRPEXGPYSGRGATSRTMHLEPSLKPFWEGGEGERPSEPSAMTAKHASETSRTIEATRSTQAKLQAXKEAITIHKKKTEYTETVHGSTEADPVCQPRQVADKRTPLDTTRDAHVETTRLPSGHTNXVTTRTHERLPTPIHGRDAAGATLDDAELRTKTTTGXAATLTKGGRRTARLXRRDEYHDYQEQREDDDEDRRGSDGGEARPRTTLPLRCRRWRRRRRLAHWHGGRGCRSGCRRDRRRGGADDGVPTNLRAGRGGGRRYDVDEGDNGVDRRTGDEQQPAGDGAVAATPLDAGRNAPPVLSGGDGXPAHGRGGRGGWRWPAAREREVEGRERRGGHGGAREEAKTRERTEGRMIFXFGMNLSGRDRK

SEQ ID NO: 189754 - protein, 610 aa, Oryza sativa
  Clone ID: PAT_MRT4530_86232C.1.pep
MRDGSNTTKKSKLSWSKSLVRKWFNIRSKAHDFHADDVAAIGRRGGDDEWRGSSFTRREPSTVKKSKTERSSRRSHERSRRGKIDLDAAEATVTLDYKIFVATWNVGGRSPPNTMSLEDWLHAAPPADIYVLGYLFLFHLAYLNSCQISQLCWFDFSDNFDVVILFTFQEIVPLNAGNVLGTEDNGPARRWVSLVRRTLNNLPGTSGNGSFRTPSPAPDPVVEMDDDFEGLSSRQNNASFFHRRSFQAGLSRSLRMEGDILAPQPRLERRYSVCDRAIYGRRPSDYEATCRWGGSSDDENNTGESPSTVYSPMSYGYGNPSSLEESHRPAGHTRYCLVASKQMVGLFLMIWARKDIRDDIRNLKVSCVGRGLMGYLGNKGSISISMSLHQTSFCFVCSHLTSGQKDGDEMRRNSDVLEILRKTRFPMVYGQYERSPETILEHERIIWLGDLNYRIALSYRSVKALVEMRNWKALLEKDQLRIEQRGGRVFVGWNEGKIYFPPTYKYSNNSDKYAGDDMNQKEKKRTPAWCDRILWYGRGLSQLSYVRGESRFSDHRPVYSVFSAEVESINHSRIQKMSCSSSQLDIEELLPYSYGYTDINPYGYTDLNFY

SEQ ID NO: 189755 - protein, 309 aa, Oryza sativa
  Clone ID: PAT_MRT4530_86233C.1.pep
MTGNDGRTMTAGASEEATRAAGSSCPDARTAWNTPLRCRRRWRHSETMSRQGETADRRRGWRRRTETTTTNTGRVRVEGRRGQGRPCRCDAEGGDGDVGWRPGTAEGAAGVGTDVTEGGAAWTTAFRRIRGQAGAEGDAATSTKETATSIVVPAMNSSRPEMVQWRQRHWTPAGTRLRMGEGAGHGRGGNGSGKDVTGVLVLQDFDEMGLRDGLSDNKLLDDVDCCGQVHRIIENDLDKCRVVAPNPPTKTDDLSHSTGHGWTTREKRFSYYLYFKWSSYDYHLVLDQRKILFDIVEDFMSLWFYTKID

SEQ ID NO: 189756 - protein, 40 aa, Oryza sativa
  Clone ID: PAT_MRT4530_86234C.1.pep
CFFFFFFFFFFFFFFFFFFFFFLESWKGPKPFFFLQLNFS

SEQ ID NO: 189757 - protein, 102 aa, Oryza sativa
  Clone ID: PAT_MRT4530_86235C.1.pep
GTRLSSLSRFALCTAVQAAAPRVLAPPSPESTSPFPGRRTPSCASPPRRIAASLPRLKQSERRKKTSPPATDSRASSPPLPLKIHRKSTVTSIDSIQVPKFF

SEQ ID NO: 189758 - protein, 186 aa, Oryza sativa
  Clone ID: PAT_MRT4530_86236C.1.pep
MAAACSSAAFLAYPGSLGAGPRPLRLFRAFAAASSSGSGSKKKARKSKGAGNKGEASGGGGGKGKEKALEPPPAVIRRAPAGSASVFQQPEPGFTPGGGGGGKGPTEEERRQRQANENAFLLAWLGLGLIILAEGLALAASGFLPEEWDSFFVKFLYPSFTPTVSKRMRRVETRLESKWFIFAMVI

SEQ ID NO: 189759 - protein, 130 aa, Oryza sativa
  unsure (1)..(130): unsure at all Xaa locations
  Clone ID: PAT_MRT4530_86237C.1.pep
DTTVATLQGLKSTAVMPVARRSGNSSLGNVSNGGRIRCMQVWPIEGMKKVETFCYLSPMTVEDLLKHIEYLLRYKWVPCLEFRQXVGSRYRENHRTRXYYDGRYWTMWKLPMFRGTDATQVLKELEEAKK

SEQ ID NO: 189760 - protein, 75 aa, Oryza sativa
  Clone ID: PAT_MRT4530_86238C.1.pep
ALTAGALLATPPLTQTRRGGCGCWMRQPRFLCQRIRGLINGVHTSGAQSIDVFCSSPPRFAAAMDAVDSSHVNHD

SEQ ID NO: 189761 - protein, 70 aa, Oryza sativa
  Clone ID: PAT_MRT4530_86239C.1.pep
DGIWATRHGTAQARPCLCLGRGLSGRHGPTDAPGRVVPAHGRHTRPRHGPILLGPCRVDPKARRPIMLAR

SEQ ID NO: 189762 - protein, 123 aa, Oryza sativa
  Clone ID: PAT_MRT4530_8623C.1.pep
VILSPSLHPSPSLSLPSLSFLSPLRTHWWRRWLGAGVATTACGRGLERRRRRAGDGRHRLPRHRRARGGRRRGGAPGSRRRACGARPTPWARCQRGAAGRGRRRGRGRHWSRRSWRRRRGRES

SEQ ID NO: 189763 - protein, 439 aa, Oryza sativa
  unsure (1)..(439): unsure at all Xaa locations
  Clone ID: PAT_MRT4530_86240C.1.pep
MYDNIIATLRGAGAAEGTHATVSDVTKEAATLTAATYRMDTERQATPLRRSPRTATASPPTTKSLVTSPKSTDEHKDRSTSPPKAMRRSPRSSPASNVHPSSPQQADTQQSGPERSSHDPSAAANPALSASAQEYTEEGAQPLTGTVGQGNDDQQTIDPAGVLENTTPQPTQVVVFQDTGDIGQHIPSSEPIRCPRRSARFVSPLKIGHTRPLPDSAKVVALRERILSDPARFGSANIIEVGISAATASDIASLFTDGSMTKGLFIDAFINLILHDEQEFSPMSAGDRIFLPTSVSVIVPVIHHSHWTLYCVYXNHGRIDVFDSNNYPALNTEYKDHHGDLGSRVVKRLSDRLYAAARTAFKRFGNQKLVRNKCPVMLKPNDCAFFVMRYMELYEGDDSPLIQVAESEEYNDLRSQMLYNMVFHSNNVAAPLPPELEEL

SEQ ID NO: 189764 - protein, 951 aa, Oryza sativa
  Clone ID: PAT_MRT4530_86241C.1.pep
MDQSTIDRSWMYAKNLKRHSTEYRKGVINFMNAAEEDRIRRNSDYMCCPCADCKNENMFDSGEDVHGHLIQRGFMEGYTCWVKHGEQESGSGAAADRSGAHNQEDENEHDMFIPSPLGGEMVDVDHDLLQDMLRDVEDPVQNERDGMKFSRLVSDSETPLYAGCKAKHTKLSVTLDLMKLKASSGWTDKSFTDVLGILKAMLPVENTLPETTYEAKQVMCPLGLEVRRIHACPNDCILYHKQYADLDACPVCKAYKRKKSADEGNKSKRGGPAKVVWYLPIIDRFKRIIANPNEAKLVRWHATERKNDGPRQPGNDIDVFLEPVIDDLEILWKEGVETWDAYGQENFKLRVLLFCTINDYPALGNLSGQTIKGKKACSDCKEHTRSRWLKKSRKMVYMGHRRWLPLRHTFRRKQKIFNDLSGDEVHNMVKDISNEFGKKRKRSKTKEKEKNVCESLVGLMLNIPGKTKDGLNARLDLQDMNIRSELQPIRDAETGKVYLPPACHTLSKDEKIAMFSCLKDIKVLSGYSARISKYVKLDDLKLVGMKSHNCHVLITQILPVAIRGILPPKVRHTIQRLCAFFNAIGQKVIDPEDLDGLQTDIVNTLCHLEMFFPLSFFDIMVHLPVHLVKQTKLCGPAFLREMWPFERYMGVLKSYVRNRAKPEGSIIEGYTTEEAIEFCVNYMSDADPIGVPASRHEGRLLGVGTIRRKRIRPDQASYAQAHYAVLQHMAEVGPYFEEHLAKIRDENLGRSDAWINREHNSRFNEWFKNRVTMSTDVPNETVQLLGMGPSWTIDTWQGYNINGYTFYTVKQDDESTVQNSGVRIDAFQDQVGSNTYYDRIEEIWELNYVKFKVPLFCCCWVNLRTGVKADKEGFTSVDLSKVEQIFYIKDPSNKKMHIVRDGKRRIVGVDNVVDEEECNHNLHVRPHIDLDDDPQELVAYARSDHTEGITL

SEQ ID NO: 189765 - protein, 1012 aa, Oryza sativa
  Clone ID: PAT_MRT4530_86242C.1.pep
MVEVDHDLLQDMLRDVEDPAQNERDGMKFSRLAMLPVENTLPETTYEAKQVLCPLGLELAPKDLSGDEVHNMVKDISNEFGKKRKHSKTKEKEKNMCESLVGLMLNIPGKTKDGLNARLDLQDMNIRSELQPIRDAETGKVYLPPACHTLSKDEKIAMLSCLKDIKVPSGYSARISKYVKLNDLKLVGMKSHDCHVLITQILPVAIRGILPPKVCHTIQRLCAFFNAIGQKVIDPEDLDGLQTDIVNTLCHLEMFFPLSFFDIMVHLPVHLVKQTKLCGPAFLREMWPFERYMGVLKSYIRNRAKPEGSIIEGYTTEEAIEFCVNYMSDADPIGVPASRHEGRLSEVGPYFEEHLAKIRDENLGRSDAWINREHNSRFNEWFKNRVTMSTVVPNETVQLLGMGPSWTIDTWQGYDINGYTFYTVKQDDKSTVQNSGVRIDAFQDQVGSNTYYGRIKEIWELNYIKFKVPLFRCRWVNLRTGVKADKEGFTLVDLSKVGYADEPFVLVKQVEQIFYIKDPSNKKMHIVRDGKRRIVGVDNVVDEEEYNHNLHNPSAAVILPRQARRRRHRARRRRSRPPSPSPPPSPPSPPPLPQSSSLGKPAAVTTEPPRPSIRTSAAEPPHRRPPPPSPPPPPPSLYTDRTGVGLPRRRRPRPHRPTSPTPTEHDATRPVLTCPIGVSTDRRRPPPSPGAAATEPHRPSSGRQKFSILQDDFKLVPAAEKDIAWLTFKESFDYPTEHEDRLRRAAFKVMGTAWKNFKTKLVGEFVYNPANLDPREKFPWITEQVWEEFHAKKSTPESRARSEAYRLLQTRNQHPHRLGTAGYADYAWQYKKRTSNKAEKDARLEAKIRESIRAELTSEFDEKLESMRAKIRQEIREEQQIPQAAAAAAHKELGSPTEKRSSCASTELAENPTSVDSAVDHITEPTSCTLTVRVMPTFTFTVPAAEGLAYKPTPETRVHGAQLRADCAKAQVDSVKPEYELFPLKYPPNDEGGPVDPTCHPFPPAPTAAMAA

SEQ ID NO: 189766 - protein, 1007 aa, Oryza sativa
  unsure (1)..(1007): unsure at all Xaa locations
  Clone ID: PAT_MRT4530_86243C.1.pep
EVNSDYICCPCADCKNENMFDRGEDVHGHLIQRGFMEGYTCWVKHGEQESGSGAAADRSGAHNQEDEDEHDMFIPSPLDGEMVDVDHDLLQDMLRDVEDPAQNERDGMKFSRLVSDSETPLYAGCKAKHTKLSVTLDLMKLKSSSGWTDKSFTDHLGILKAMLPVENTLPETTYEAKQVLCPLGLEVHRIHACPNDCILYHKQYADLDACPVCKASRYKRKKSADEGNKSKRGGPAKVVWYLPIIDRFKRIFANPNEAKLVRWHATERRKDGMLRHPADSXIEXKEYQSKTKDFGCPDSLRNMRICLCTDGMNPFGDMSSTHSTWPVLIANYNLPPWLCFKQKYIMLCLLIQGPRQPGNDIDVFLEPVIDDLEILWKEGVETXDAYGQENFKLRVLLFCTINDYXLGNLSRQTIKGKKACSDCKEHTRSRWLKKSRKMVYMGHRRWLPLRHAFRRKKKIFNGKRELQPAPKDLSGDEVHNMVKDISNEFGKKRKRSKTKEKEKNVCENLVGLMLNISGKTKDGLNARLDLQDMNIHSELQSIRDAETGKVYLPPACHTLSKDEKIAMLSCLKDIKVPSGYSARISKYVKLDDLKLVGMKSHDCHVLITQILPIAIKGILXPKVRHTIQRLCAFFNAIGQKVIDPEDLDGLQTDIVNTLCHLEMFFPLSFFDIMVHLPIHLVKQTKLCGPAFLREMWPFERYMGVLKSYVRNRAKPEGSIIEGYTTEEAIEFCVNYMSDANPIGVPTSRHEGRLSGVGTIGRKRIRPDQASYTQAHYAVLQHMAEVGPYFEEYLAKIRDENLGRSDAWINREHNSRFNEWFKNRVTMSTDVPNEIIVDTWHGYDINGYTFYTVKQDDKSTVQNNGVRIDAFQDQVGSNTYYGRIEEIWELNYVKFKVPLFRCRWVNLRTGVKADKEGFTLVDLSKVGYADEPFVLAKQVEQIFYIKDPSNKKMHIVRDGKRRIVGVDNIVDEEEYNHNLHVRPHIDLDDDPQEPVAYARSDHTEGITL

SEQ ID NO: 189767 - protein, 2207 aa, Oryza sativa
  unsure (1)..(2207): unsure at all Xaa locations
  Clone ID: PAT_MRT4530_86244C.1.pep
MTHHSTITRVSQIGSKLFLSPATVSCLLRTLAQSSFSIAEPAAVATEPAAAATEPPPPSIRTAAASSPTTPTEPTAASTEHATASPAQPPLTPVTPSTEPGAAAIEAAAAANSSFADSSLAEPEAAATEPTASTEPRTPDAASTEHAAASTEPPTPNAASTEPGAATTDPGGAATEPAASTEPCVDPQTISQQGESMSTTTSGSSRARTPRTGNIIPKERFHITAVDQVGLPTSPRKILSRFRSIYGVIGRQKFSILQDDIKHVPATEKDIAWLMFKLSFDYPAEHEDHIRRAAFKVLGNAWMNFKTKLVGEFIYNPANPDPKEKFPWIMEQTKNQHPHRLDTAGYAGKEEEWQQEDEQEEESSTPLVFGDIPYPWARNWARARYQKNADGTIFMPNSEDQRVYDAIYKKRTSNKAEKDARLEAKIRASIRAKLTFEFDEKLESMRAKIRQEIQEEQQKPQAAAAATHEELGSPTQKHSSCASTELAENPTSVNSAVDHITEPTSYTLTVRVMPTFTVPAAEGLAYKPTPETRVHGAQLRGDCAKVQVDSVKPEYELFPLKYPPNDEVLSLGNARGTFIQWPKDLRGILPPKVRRTIQRLCTFFNSIRQKIIDPEDLDALQADIVNTLCHLEMFFPLSFFDIMVHLPVHLVKYMGVLKSYVRNRAKPEGSIIEGYTTEEAIEFCVNYMSDADPIGVPASRHEGRLSGVGTIGRKRIRPDQALYAQAHYAVLQHMAKVGPYFEEHLAKIRDENLGYYGRIEEIWELNYVKFKVPMFRCRWVNLRTGVKADKEGFTLVDLSKMGYADEPFVLAKQVEQIFYIKDPSNKKMHIVRDGKRRIVGVDNVVDEEEYNSNLHSRFRSICGVIGRQKFSILQDDIKHVPTAEKDIAWLTFKERFDYPAEHENHIRRAAFKVMGNVWKNFKTKLVGEFVYKPANPDPREKFPWIAEQNLHPHRLGTAGYAGKEEEWQHEDEEVEELNTPLVFGDIPHPRARNWARARYQKNVDGTIFMPNPDDQRVYEAIELVAKQQASQEACSQRREDDVITKALGNKEHRGRTRGVGSSVPWKYGFPDYAWQYKKRTSNKADKDARLEAKIRASIRAELTSEFDKKLESMRAKIRQEIREEQQNPLAAAAAAHEELESPTQKRSSCASTELAENPTSVDSAVDHITEPTSCTLTVRVMPTFTVPATEGLAYKPTPETRVHGAQLRGNCAKVQVDSVKPEYELFPLKYPPNDELQYDTDFGEDRTEADSKAIHEPPPMKKSRKAHSSPQRITLDKLEAKGRGRGGKEFQLGMPLVGDDVLAAMGTACKDLHAYYMEKSNARKPNKATDILGEHDGKPFLGPTNYIVVDFKDLFDLYRLRAVDTSLLKCYSLLSWQWCQKNAPEVAFLDPQVVIVTNLQNDXYDTLWSRRDKEYIMCAYNQXNAHWILLVITPKWSSCHYLNSRIDKNAYDSTPIQLAIDEAWAQYVQRGGLRKTGHDTLIHKKVFPVKQQIGDQCGFHVCHNMRLLYREKVKTLAEFEGIITKSLPTSFEEQAWLAKMQGLVGVFFLGEANDTEAGVFVSGGGRRRGGGSMRVSGARESGAGAGECGGGGGVWDGGEEDGAAEDGQGVAAAGRGGYNRPYQAVDRTAKILAVAAFFLTLCIVWKVRRLRVRLLLARSPGEAAHVPSNDKVFVYCSSAHLALFVVVLTLNSSCDATVEQHIGLMQDMLLLPQVIGNAAWRVNCKPLRGASTSASPSRACSRACMTSCDHVRWRVPIVLALPPNTLAADALLFSHGSDLVRHRSRPPRLPPPSSRLARHGVDVVLGSGCGGAGLADGRRPASTSLATPSLAEAMAATPGSKDVEASTGTAASTVVVIAMASDAGKLSLWALVKVCEKKKMWGPPVSPIILEVGGSGANRHRIPPFPWDDLDWQRRVEELVGDGLVVPALSVAHDTRAEPHHQHVELHLAQRVVAVLVAFLHHGCRLLHRNLATDSAAPQPQHTRRASPQALRGDGATRQVEGVGGRGGVGASAEEGLGAAVEGSGEDDDGGGAVPAPKRERGREGVCPASERWKRGGCLSGGRDPLHASRWQEKGGGGRRSGGRRPANAIGASSRPNFGNTNPARWPEIALPLLLRRRSTHCLPLLPPFPAGAACGEGGRGRGGRREMGDGSGGRLVLLTASYCCFRACLPPLASLARFPDAEDDIIDLLLVALGLRAVEEKRRKKG

SEQ ID NO: 189768 - protein, 57 aa, Oryza sativa
  Clone ID: PAT_MRT4530_86245C.1.pep
QIHWHASIPEGELWTCTGVKQISQASCFSSTLITSRSFNLVPLYTLSFAPSSRLRTA

SEQ ID NO: 189769 - protein, 823 aa, Oryza sativa
  Clone ID: PAT_MRT4530_86246C.1.pep
MPSTEPGAAVTEPAATAVVLPRASTPTGPVSAFLVVDARILTDARRRPPPSPTPPARRRPTKPASPPTGAALYRARRCRRKLLRCRARHRRHRDRCLHRAQRHLHRPATPSTEPSAAATEPYRPSSEKKYTMSQQGEPMSTTTNGSSRARTPRTGNKIPKERFRITAVDAVGLPTSPRKILSRFRSICGVIGRQKFSILQDDIKLVPAAEKDIAWLTFKESFDYPVEHEYRLRRAAFKVWEEFHAKKSTPESRARSEAYRLLQTRNQHRHRLGTAGYADKEEEWQREDEEAEESCTPLVFGDIPHPRASNWARARYQKNYDGTIFMPNAEDQRVYEAIKELVAEQQASQEACSQRREDDLLTKALGNKEHRGRTQGVGSSVPWKYGFPDYAWQYKKRTSNKAEKDARLEAKIRASIRAELTSEFDKKLESMRAKIRQEIREEQQNPQAAAAAAHKELGSPTQKRSSCASTELAENPTSVDSAVDHITEPTSCTLIVRVMPTFTVLAAEGLAYKPTPETRVHGAQLRADCAKVQVDSVKPEYELFPLKYPPNDEVLSLGNDHGTFIQWPKDLIEIRVTGRGRGGKVQASLLAPRKLDLGKGQEETKSKEVKKKYVTPQEFQLGMPLVGDDMLAAMGTACKDLHLYYMEKSNARKPSKATDILGEHDGKSFLGPTNYIVVDFKDLFDLYRLRAVDTSLLKCYSFAHWILLVITPKWSTCHYLNSRIDKNAYDWTPIQLAIDEGWAQYVQRGGLRKTGHDTLIHKKDFPVKQQIGDQCGFHVCHNMRLLYREKVKTLAEFEGTITKSLPTSFEEAMMNTYYATVMM

SEQ ID NO: 189770 - protein, 849 aa, Oryza sativa
  Clone ID: PAT_MRT4530_86247C.1.pep
MDQSNCKNKNMFDSGEDVHGHLIQRGFMEGYTCWVKHGEQESGSGAAADRSGAHNQEDENEHDMFIPSPLGGEMVDVDHDLLQDMLRDVEDPAQNERDGMKFSRLVSDFETPLYAGCKAKHTKLSVTLDLMKLKASSGWTDKSFTDLLVILKAMLPVENTLPEMTYEAKQVLCPLGLEVCRIHACPNDCILYHKQYADLDACPVCKASRYKRKKSADEGNKSKRGGPAKVVWYLPIIYRFKRIFANPNKAKLVRWHATERRNDGPRQPGNDIDVFLEPVIDDLEILWKEGVETWDAYGQENFKLRVLLFCTINDYPALDLSGDEVHNMVKDISNEFGKKRKRNKTKEKEKNVCESLVGLMLNIPGKTKDGLNARLDLQDMNIRSELQPIRDAETGKVYLPPACHTLSKDEKIAMLSCLKDIKVPSGYSARISKYVKLDDLKLVGMKSHDCHVLITQILPVAIRGILPPKVRHTIQRLCAFFNAIGQKVIDPEDLDGLQTDIVNTLCHLEMFFPLSFFDIMVHLPVHLVKQTKLCGPAFLREMWPFERYMGVLKSYVRNRAKPEGSIIEGYTTEEAIEFCANYMSDADPIRVPASRHEGRLSEVGPYFEEHLVKIRDENLGRSDAWINREHNSWFNEWFKNRVTMSTDVPNETVQLLGMGPSWTIDTWQGYDINGYTFYTVKQDDKSTVQNSGVRIDAFQDQVGSNTYYSRIEEIWELNYVKFKVPLFRCRWVNLRTGVKAGKEGFTLVDLSKVGYADEPFVLAKQVEQIFYIKDPSNKKMHIVRDGKRRIVGVDNVVDEEEYNHNLHVRPHIDLDDDPQEPVYIDLTNAVYICHIVKINFKLLETKLYR

SEQ ID NO: 189771 - protein, 70 aa, Oryza sativa
  unsure (1)..(70): unsure at all Xaa locations
  Clone ID: PAT_MRT4530_86248C.1.pep
MPRAELDLEGRANDGXPWPTSQEGAPHSSAGQTSSEQWTPRRPTNRAGGGPHGYGAAVLAGPRRSDEKCG

SEQ ID NO: 189772 - protein, 754 aa, Oryza sativa
  Clone ID: PAT_MRT4530_86249C.1.pep
MSTTTSGSSRARTPRTGNKIPKERFRITAVDAVGLRTSPRKILSRFRSICGVIGRQKFSILQDDFKLVPAAEKDIAWLTFKESFDYPAEHEDRLRWAAFKVMGTAWKNFKTKLVGEFVYNPANPDPREKFPWITEQTRNQHPHRLGTAGYAGKEEEWQREDEEAEESCTPLMFGDIPHPRARNWARARYQKHDDGTIFMPNAEDQQVYEAIKELVAEQQALQEACSQRREDDLLTKALGNKEHRGRTRGVGSSVPWKYGFPDYAWQYKKRTSNKAEKDARLVAKIRESIRAELTSGFDEKLESMRAKIRQEIRKEQQIPQAAAAAAHKELGSPTEKRSSCASTELAENPTSVDSAVDHITEPTSCTLTVRVMPTFTVPAAEGLAYKPTLETRVHGAQLRAGCAKVQVDSVKPEYELFPLKYPPNDEVLSLGNARGTFIQWPKDLIEIRVTARPTTAPGSRPPKRPASAPSAPPAQDRHAQSYDVQLQYDTDFGEDRTEADSKAIHEPPPMKKSRKAHSSPQRITLDKPEAKGRGRGGKVQTSLLAPRKLDLGKGQEETKGKEVKKKYVAPQEFQLGMPLVGDDVLAAMGTACKDLHLYYMEKSNARKPSKATDILGQHDGKPFLGPTNYIVVDFKDLFDLYKLRAVDTSLLKCYSLLSWQWCQKHAPEVAFLHPQVVTVTNLQNDRQGMVNYIYDTLWSRRDKEYIMCAYNKYAHWILLVITPKWSTCHYLNSRIDKNAYDWTPIQLAIDEAWA

SEQ ID NO: 189773 - protein, 106 aa, Oryza sativa
  Clone ID: PAT_MRT4530_8624C.1.pep
MCTQSSTKISSIQCDNGREVDNITAQTFFLTNGVAMRISCPHTSPRNGKAERILRSINNIVRSLLCQASLTGSLWAETLHTAIHLINRHPTKILHHHSSYYALING

SEQ ID NO: 189774 - protein, 115 aa, Oryza sativa
  Clone ID: PAT_MRT4530_86250C.1.pep
MGVAAVAADGGGGGGGGGWGRGRRIGAAALTGGGRDVADADDLNAMTKRRPRQLAQRGGDFGGPWADDFKVKRPLVSIAWLLAWFMSMVKVHCQAISPYKAAVAPRHTAAAAVGC

SEQ ID NO: 189775 - protein, 511 aa, Oryza sativa
  Clone ID: PAT_MRT4530_86251C.1.pep
MVEYCKNENMFDSGEDVHGHLIQREFMEGYTCWVKHGEQESGSGAAVDRSGAHNQEDEDEHDMFIPSPLGGEMVDVDHDLLQDMLRDVEDPAQNERDGMKFSRLVSDSETPLYAGCKAKHTKLSVTLDLMKLKASSGWTGKSFTDLLGILKAMLPVENTLPETTYEAKQVLCPLGLEVRRIHACPNDCILYHKQYADLDACPVCKASRYKRKKSADEGNKSKRGGRAKVVWYLPIIDCFKRIFANPNKAKLVRWHAMERRNDGPRQPGNDIDVFLEPVIDDLEILWKEGVETWDAYGQENFKLRVLLFCTINDYPALGNLSGQTIKGKKACSDCKEHTRSRWLKKSRKMVYMGHRRWLPLRHAFRRKKKIFNDLSGDEVHNMVKDISNEFGKKRKRSKTKEKVNSSPYEMQRQDIKVPSGYSARISKYVKLDDLKLVGMKSHDCHVLITQILPVAIRGILPPKVCHTIQRLCAFFNAIGQKVIDPEDLDGLQTDIVNTLCHLEMFFPLSFL

SEQ ID NO: 189776 - protein, 687 aa, Oryza sativa
  unsure (1)..(687): unsure at all Xaa locations
  Clone ID: PAT_MRT4530_86252C.1.pep
MLRDVEDPAQNERDGMKFSRLVSDSETPLYTGCKAKHTKLSVTLDLMKLKASSGWTDKSFTDLLGILKAMLPVENTLPETTYXKQSRFCVHWVRWHATERRNDGPRQPGNDIDVFLEPVIDDLEILWKEGVETWDAYGQENFKLRVLLFCTINDYPALGNLSGQTIKGKKACSDCKEHTRSRWLKKSRKMVYMGHRRWLPLRHTFRRKKKNFNGKRELQPAPKDLSGDEIHNMVKDISNEFGKKRKRSKTKEKGRWKKKSIFWRLPYWKDLDVRHCIDLMHVEKNVCESLVGLMLNIPGKTKDGLNVCLDLQDMNIRSELQPIRDAETGKVYLPPACHTLSKDEKIAMLSCLKDIKVPSGYSARISKYVKLDDLKLVGMKSHDCHVLITQILPFAIRGILPPKQTKLCGPAFLREMWPFERYMGVLKSYVRNRAKPEGSIIEGYTTEEAIEFCVNYMSDADPIGVPASRHEGRLSEVGPYFEEHLAKIRDENLGRSDAWINREHNSRFNEWFKNRVTMSTDVPNETVQLLGMGPSWTIDTWQGYDINGYTFYTVKQDDKSTVQNSGVRIDAFQDQVGSNTYYGRIEEIWELNYVKFKVEQIFYIKDPSNKKMHIVRDGKCRIIGVDNVVDEEEYNHNLHVRPHIDLDDDPQEPVAYARSDHLVFTNDAYICHIVKINFKLLETKLYR

SEQ ID NO: 189777 - protein, 512 aa, Oryza sativa
  unsure (1)..(512): unsure at all Xaa locations
  Clone ID: PAT_MRT4530_86253C.1.pep
AASTEPGAATNDXRRRPPPSPPPPPSLPPPXEPGADAQTMSQQGEPMSTTTSGSSRARTPRTGNKIPKERFRITTVNQVGLPTGPRKILSRFRSICGVIGRQKLSILQDDIKQVPAAEKDSAWLAFKESFDYPVEHENLIRQAAFKVMGNAWKNFKSKLVGEFVFNPANPDPTEKFPWITEQVWEEFHVKKSTPESIARSEAYRLLQSKNQHPHRLGTAGYAGKEEEWQHEDEEAEESNTPLVFGDIPHPRARNWARARYQKNADGTIFMPNAEDQRVYEAIKELVVEQQASQEASSQRREDDLLTKALGNKEHRGRTRGVGSSVPWKYRFPDYAWQYKKRTSIKAEKDARLEAKIRASIRAKLTSEFDEKLKSMRANIRQEIREEQQNPQAAAAAAHEELGSPTQKRSSCASTELAENPTSVDSAVDHTMEPTSYTCTGRVIANFTVSRGRGPWFQPTPETRVRDCAKVQVDSVKPKYELFPLRYPPNDEVLSLGNARGTXIQWPKDLIEI

SEQ ID NO: 189778 - protein, 42 aa, Oryza sativa
  unsure (1)..(42): unsure at all Xaa locations
  Clone ID: PAT_MRT4530_86254C.1.pep
RARCRPKSQLKGQQRFCYDLHLSGSELYHSGGYSLSXRRVII

SEQ ID NO: 189779 - protein, 140 aa, Oryza sativa
  Clone ID: PAT_MRT4530_86255C.1.pep
LDSSNFQALLKPIVSQFVIEPPEHFESVPEAPSVDEVDETLVLCLGQMAVTARSDVLWKPLNHEVLMRTRSDKVRPKMLGLKVVRHMVQQLKEEYVVLLPETIPFLAELLEDVELPVKTLAQEIVKEMETLSGESLRQYL

SEQ ID NO: 189780 - protein, 60 aa, Oryza sativa
  Clone ID: PAT_MRT4530_86256C.1.pep
MILRIIHESNKMTFKQEGTVQIPTTNTQSNFWSYTRHHTCTTNVTSRKCERTKQICCGLG

SEQ ID NO: 189781 - protein, 654 aa, Oryza sativa
  Clone ID: PAT_MRT4530_86257C.1.pep
MALTAKEIPQGFLIHIPEVDHSTFDASLPSSAKGTLQNSEGKTWPVELEKLDGHVFLTTGWAKFVEDNSLREYEFLLFRYDDNMHSWFCHLVLQRTTQGHELISPQSFPDQHEVCGSKDGLDEHLSLNGPMEDDKANAIAEVMSILDVDKVTVELFCAMLVFYKWNVDAVAEDFDICRGKPQIQNLFLKHKLHFQFDIVKRKLRKFFPPDDYYSSPILESRKCSLEEPKLSNQPLQCDLTTEKCRLVDEHDLCNFSQKKRRKRGSFCSPETPRRSPRLARQNNSHDSAENTLKERSEERQPSPDSMIDQAESRSEQACLCHDKTDSGSLFQDSKKVKPAHGEVDLCEEPQHNQGENEGNLDQVNNKETDEEQIERNAVETSESFTRRGCIKSSPASCEVPACLRINELSLTWKPAEHVNPLEKVLLDIQRDNFMKTISHVQGIIRNHPSDLLTADVITVVVQKEIFKWNCCLKDRDAQRIVNALLEHARKIKEMHNFNSEMRKEEFSAKLKVHLKWQLKEVETIYTSLELDYKKATSDDNIAFSMLHDKKKKLHNLQDEITGLQQSLEMKKDEMQKLAHQVAEHESVFQKSLMERLRIKEVMKGYEQTLAEVKVQLTSTEVGSIDIEALVKVEMDNMTKEIELSKESLLNITFH

SEQ ID NO: 189782 - protein, 2122 aa, Oryza sativa
  unsure (1)..(2122): unsure at all Xaa locations
  Clone ID: PAT_MRT4530_86258C.1.pep
MSSIASQLQAIKSAVGAAPEPARRPITRPSVLFDAKEAADIDLRAILPIALSGLEHLEGVNERFRRYRNTLFSETSLEVNREQLTTKENDKLNKSISSYLRLLAGYLQLQAAMQTLEYLIRRYLVHVYNLDELLLCALPYHDTHTFVRIVQLINLGNSKWAFLDAVKSSGAPPPRIVMVQQCIRDKAVLETICNYAAPTKEFHHSRTVVCFCTAVXLIMKNMLQVSHQVSFCPSGKYAHSSTKTDAKLSNQAIPILLSVLTTVEVIVKKLGEFVNPYLEEILDLVVLHPECASRNDEKLDAKAADVRKLLTDKVPVRLMLSPLLNLYNGAIKCGEASLSLCFEMLSTLVGARDRLAVGTYHTKVYEHCLVALDLRRQHLDSLKNIAIVEQSIIHAITTLTMKLTEATXGLWSKKTLNVIGKKYPKELRNAIHKFLENSEVNSIGEDFASNLLGLVFDESKGMPTEISDSNIWFSLDHPKAEVRKSALSKIATSNIFKNHNLNPQNLINMQDAIIHNMYDDDLSVVEAALSIEGLAAVASPVSLLKVYDDLLANCINIIHKGGPKASKACDVAVSCLEKIIIEYRLHYIEHAKDIAAVVFRLLIVHPKTVRVNLKALELAKSIQWEFYTSSSLVYNVITTDKMKGISPESVASINMKNIKAFSETFLANPNKHVEWLADAGKGSAFSRALFLLIILQSLLAPAEVLDMQMSLCQACLPVLKNKWCQIKPKDGRVGDEINIDKLEKCITELVKHVFNNDTEALNARILINDGGNTLLDDLFLFFITSPGKIIFQKHLQYLMVNCTRAPFQFISKYFVDEGFSAGVRVESLLMLASICSLLLGFPCVMLPLAHENKDVRSSALKCIEGLSLVWQRLSASLSRNGNGSKLPKCMLSPTFGVFLGSLVNQKTMISSDTRFLPAYISSLLSPSQDLMVPENLHERFDQSTKDAILHFILRSGMKLSSYGKFMILSILKGVGSILFDVEDVKSLLFDLLDRRNQYQSGCESRQIMSTHEIQILCLLLEVMFSVSNSANVSSETSEALLKVLRIDVSAQDDPVVVMPCVTALQAVQPVFFDFLKTDTQEKVFASLISMFRTENTEIRNAARDAILRINVHASTAVKFIELIAAQGDKKMNSKRIKRKEDLNHDIFKNFDDLFGVKPTASVLVSLLDVLFLKKDVIQRTCLLQPLFQLLSKLLSDQWILGIVCQYNKGHDASPENPDLSNFMIEAQQLVLLILKDITDTLQSGHQDELFNCRDINLLINCIQSAKDLGTRNHGFSLIASLAKAFPQVVSESIEDLFVAIGDAVKQLFIKALVDVVEHRRLTLMVYLLRTLGERKCLSTVIMCLLHSLVGRISHSPEHQGALSLRAMPQEWEYGLAVNITNQYSYKLWFHCLSKLLQEIRVHEKQYLLPMLHLAMQFILFKLQDTELIFDLDSEEAANSIQGSLGELMKEVVLCVAAVRDKKTGISGDALKELRDSANTILKVIAGWMCASTYFKGISRMLEHSRSVVKRKALGILCETAKGNSLIQKKQKKARKLNHSTPATALQVDKSSAPCFSELCVKILELVDREVDSDSSVRIAAISSLETLAKEYPSDNPAYRKCLAKITNHINSGDAVTSSRSIYTVGSLINVLGSKALPQLPLIMKNMLQVSHQVSFCPSGKYAHSSTKTDAKLSNQAIPILLSVLTTVEVIVKKLGEFVNPYLEEILDLVVLHPECASRNDEKLDAKAADVRKLLTDKVPVRLMLSPLLNLYNGAIKCGEASLSLAFEMLSTLVGAMDRLAVGTYHTKVYEHCLVALDLRRQHLDSLKNIAIVEQSIIHAITTLTMKLTEATFRPLFLRTLEWAESEVDRSTSKRSMDRAIVFYKLVNSLAEKHRLGLVLPISVRNWPGMGSLFTPYFKYLLEGSVQYLSEDDALISSKQKKKKAKLEDAPVEQKDKLSGPKLWNLRALVLKSLHKCFLYDNDQKILDSSNFQALLKPIVSQFVIEPPEHFESVPEAPSVDEVDETLVLCLGQMAVTARSDVLWKPLNHEVGTKHYARSSFFLDNGQVLMRTRSDKVRPKMLGLKVVRHMVQQLKEEYVVLLPETIPFLAELLEDVELPVKTLAQEIVKEMETLSGESLRQYL

SEQ ID NO: 189783 - protein, 76 aa, Oryza sativa
  Clone ID: PAT_MRT4530_86259C.1.pep
MSSFKSKSEATVRVTDKGLMSPSSTWRSTDLRYKRDPPGGPKASNLIANTTTTAYEVGTYRSQVVGNLQEPSRRVI

SEQ ID NO: 189784 - protein, 111 aa, Oryza sativa
  unsure (1)..(111): unsure at all Xaa locations
  Clone ID: PAT_MRT4530_8625C.1.pep
SVRPASASVRTRSHESSHESCVVRRGFFAVRTTSPPTTPDILYNMMXSIIKAKEASSADTTSSECSAAWYDEEELITAASHPPHKMMETSYQLVDYCWDDNQTTECRTYYN

SEQ ID NO: 189785 - protein, 38 aa, Oryza sativa
  Clone ID: PAT_MRT4530_86260C.1.pep
SVLVVASLVLGPCLACTRDPLHRYFPSGPIPIALASCR

SEQ ID NO: 189786 - protein, 282 aa, Oryza sativa
  Clone ID: PAT_MRT4530_86261C.1.pep
MAGAAAASSAACSSPAPNPTTRYPVRRRVPRPPLVAASRHCTASPFPTTISISSSGLGQARPRDPFLNPRLRFAAAAAAAEGEMAAEASAAAAEGAQAKPFSVLFVCLGNICRSPAAEAVFRNLVSKRGLESKFLIDSAGTIGYHEGNKADSRMRSASKKRGIEVTSISRPVKPSDFRDFDLILAMDRQNYGTLSTPLICVSQCAEDLLSSFERWRHREPLPDSGPKKVKLMCSYCKRHTESEVPDPYYGGPQGFEKVLDLLEDACESLLDSIVAENASVSA

SEQ ID NO: 189787 - protein, 426 aa, Oryza sativa
  Clone ID: PAT_MRT4530_86262C.1.pep
MAAGRAVPPPPEAAAPRLLLLGGGAELWRPVARGGGWATAAALLLLLASHLSVLLLRRLRLRRRLRPADAVSSSSAAAAAVVTADSAPGSAAGMDGLVTEGDLRELVGNLGVAAREPEREGWQQVVAKGNDDVSYRVWCDKPMEGPPRYLSVTTYERCSTELLRDFYMDNEYRMEWDNTVIKHEQLQFDENSGIEIGRTIKKFPLLTPREYILAWRVWEGNDKSFYCLVKECEHPVAPRQRKFVRVQLLRSGWCIRKIPGRDACRITVLHHEDNGMNIEMAKLAFAKGIWNYICKMNSALRRYPQRNISSISILTMQRLTKKFPQALETDVDANHHPQGNTRANVVPTHFARTSSRQQPGKKSSRATIASGLLLIGSIVCLSRGRSNLGAQLAMAFFLKKAFKQDKGSSSQRSISRTDVTEPRHLE

SEQ ID NO: 189788 - protein, 92 aa, Oryza sativa
  unsure (1)..(92): unsure at all Xaa locations
  Clone ID: PAT_MRT4530_86263C.1.pep
KPPSSSPSSLQHSSXCRQPQPWQPSSPWAPWHIPGSDDPPGAPGSYAXGSPERRVVXRPTQGRALGRLAVVVAXXSRRRXSWRRRCRRASSS

SEQ ID NO: 189789 - protein, 484 aa, Oryza sativa
  Clone ID: PAT_MRT4530_86264C.1.pep
MGGVRPTLFDARKVFVRMLSSGVGGGDALVDTADPAKRLFKLIISCRKASAVEHELDHSGVRVTPDVAERVLERLDNAGMLAYRFFEWARRQKRGGCAHTVRSYHTVVASLAKIRQYQLMWDVVAVMRREGAVNVETFGIIMRKYARAQKVDEAVYTFNVMEKYGVVPNLAAFNSLLGALCKSKNVRKAQEIFDKMNSRFSPDAKTYSILLEGWGRAPNLPKMREVYSEMLDAGCEPDIVTYGIMVDSLCKTGRVEEAVRVVQDMTSRGCQPTTYIYSVLVHTYGVEMRIEDAVATFLDMEKDGIVPDIVVYNALVSAFCKAKKFENAFRVLNDMEGHGITTNSRTWNIILNHLISLGRDDEAYKVFRRMIKCCQPDCDTYTMMIKMFCENDKVEMALKVWKYMRLKQFLPSMHTFSVLINGLCDKREVSQACVLLEDMIEKGIRPPGSTFGKLRQLLLKEGRKDVLDFLVEKMNILIQEPLFD

SEQ ID NO: 189790 - protein, 114 aa, Oryza sativa
  unsure (1)..(114): unsure at all Xaa locations
  Clone ID: PAT_MRT4530_86265C.1.pep
SPTPFLIGSPSLLLAVSSPGCIHGLVGLSHATANAWPLVVVSTXSSCSQPDAVNAVVREVPEATELEPGEPLGQQCDGHLACRVVGEAVCPGAPTQLSVSLVTAVNRAKILCAV

SEQ ID NO: 189791 - protein, 117 aa, Oryza sativa
  unsure (1)..(117): unsure at all Xaa locations
  Clone ID: PAT_MRT4530_86266C.1.pep
ALHNALFRRRLAELRAAHPGVTIAYADYYGEVMELVSNPAASGFDDALTAXCAGGGPYNGNFTVHCSDPGATQCADPSRRISWDGLHMTEAVYRIMAHGVLDGPFADPPIMSKCHGY

SEQ ID NO: 189792 - protein, 161 aa, Oryza sativa
  unsure (1)..(161): unsure at all Xaa locations
  Clone ID: PAT_MRT4530_86267C.1.pep
LRQLINRILIKIVCKLGLQFPTHSRANRIEXXXRPKISNPQLALPLPWKIFYYSPRGFLSPARARSGTLGVLGFRPHGGRRIPQPVVSFFFLFLDWFFCAIPIPAEFFFFLVSLFHLNCALFGREIVFGGFSNQFCSDSRRNLFIIKKIWSLLLFFSHRGE

SEQ ID NO: 189793 - protein, 479 aa, Oryza sativa
  unsure (1)..(479): unsure at all Xaa locations
  Clone ID: PAT_MRT4530_86268C.1.pep
LEQVVVLRHVAKRSHLQPAAATAVRFENSSLHEKILHKKLGKLETRTPVTTTILSKRWRDLPRCLPTSYNLAVDDILPPRYHRLKRLNMEAKAAYETEKIVHKLTDIYAIKARHERWMTTIRPLTAILERYERRAMRRYVKQVNAFLLAPKNVRQRWPVQKLRLQTLGRWHENIDEWITTAIAKWGVEDFELVVDGFCLGYDLKQLDTYRSLRLERLALSNCEAVCAWNCLTVKRLTKLSLSEGSFMGLLNDILANCVQLTDFRVAFSSYYRAKVRIYAPSSKLKNLQVDRHVRLDYIQTEDNDIDDESGTKRTYPPSKFFKKIPKLDSLVLQFKGTQXLKKLFIANVPVNWDILWILLLLDATPALELTTTQXDRTAGDLCASLDVGVQQDRYRHLKELVVAGFDGLGWQAGFVRLIMKRSPLLRRVHLLDGEVRDDEGELGDLQIVPRHREWHECERAEVLDDLTTGFRWPPQIILE

SEQ ID NO: 189794 - protein, 396 aa, Oryza sativa
  unsure (1)..(396): unsure at all Xaa locations
  Clone ID: PAT_MRT4530_86269C.1.pep
DAPPRDVPTAPAAAGPPRPPAPVAGCGGESVGAAGGRRGAACGYCRSTGQTSISHGLWANSLRADDYQALLDRGWRRSGCFLYKLEMERTCCPQYTIRLKANDFICSKEQGRVLKKMQRFLDGELDPQVGSPQNKTSPTKHSLAEPMNMPVSKISKTLTNDFQAAKCPNLFEEDEFISCLSSKINEAVGMSFQVGTLGSDVQLPKAVVKTVKPQLKKKVGGASQDKKVGEAVQDLLYTCNISFQIVAEIRRALPKEKDANHNKVVADISPNSIAEKLAMTMECHGDIAGLAVKACNGHLNFYSVTNQTKQNKTSIIVSTHDSRXNLVAQKLCFLNKNTLRPQKRRKLEIKMRRSHFESXNNLYQRYQTKVHKEKKVSESSYKRFLVDTPIVFVPPR

SEQ ID NO: 189795 - protein, 193 aa, Oryza sativa
  Clone ID: PAT_MRT4530_8626C.1.pep
MDRSQEPPHAAAARGAVEVSLRRFDLADVDAMMVWASDPQVAAVCRWEPYESTEPLLAYLRDTVLPHPWFRAICVAAAFDGDGGGDDRPVGAVSVSPTADACRAELGYVVARAHWGKGVATAAVKRVVAAVFGEVEGLERVEALVDVRNAASQRVLEKAGFRREAVLRSYCVLKGEVRDMVIYSFISTDPLVS

SEQ ID NO: 189796 - protein, 1007 aa, Oryza sativa
  Clone ID: PAT_MRT4530_86270C.1.pep
MSTTTSGSSRERTPRTRNKIPKERFRITAVDAVGLPTSPRKILSQFRSICGVIGRQKFSILQDDFKLMPATEKDIAWLTFKESFDYPAEHEDRLRRAAFKVMGTAWKNFKTKLVGEFVYNPANPDPREKFPWITEQTRNQHPHRLGTAGYAGKEEEWQREDEEAEESCTPLVFGDIPHPRARNWARARYQKHDDGTIFMPNAEDQRVYEAIKELVAEQQASQEACSQRREDDLLTKALGNKEHRGRTRGVGSSVPWNYGFPDYAWQYKKRTSNKAEKDARLEAKIRESIRAELTSEFDEKLESMRAKIRQEIREEQQIPQAAAAAAHKELGSPTEKRSSCASTELAENPTLVDSAVDHITEPTSCTLTVRVMPTFTVLAAEGLAYKPTPETRVHGAQLRADCAKVQVDSVKPGYKLFPLKYPSNDEVLSLGNARGTFIQWPKDLIEIRVTARPTTAPGGRPPKRPASAPSAPPAQDRHAQSYDLQLQYDTDFGEDRTEADSKAIHEPPPMKKSRKAHSSPQRITLDKPEAKGRGRGGKVQASLLAPRKLDLGKGQEETKGKEVKKKYVAPQEFQLGMPLVGDDVLAAMGTACKDLHLYYMEKSNARKPSKATDILGQHDGKPFLDPTNYIVVDFNDLFDLYRLRVVDTSLLKCYSLLSWQWCQKHAPEVAFLDPQVVTVTNLQNDRQGMVNYIYDTLWSRRDKEYIMCAYNQYAHWILLVITPKWSTCHYLNSRIDKNAYEWTPIQLAIDEAWAQYVQRGGLRKTGHDTLIHKKDFPVKQQIGDQCGFHVCHNMRLLYREKVKTLAEFEGTITKSLTTSFEEAIPKSDYPDLDFGCFLRIVNSLNHVIGKRKGCNIGWNSGVRREKGQRRRRHRLGRGGRGSDALPSARSGGRGGAVAVDGMEAETPTSRMRQPLLPGGPTVGGEAVVARRRSILGAMVAAVAGLVDGDDPDRGKPNGKEVSLLAKLGVYSVKVEQPSASLVLSQGRPQSGALCSRWWWFLLVPPHD

SEQ ID NO: 189797 - protein, 285 aa, Oryza sativa
  unsure (1)..(285): unsure at all Xaa locations
  Clone ID: PAT_MRT4530_86271C.1.pep
MTSSSAAAARRLGRLGRCTLAGERRHEDANGGHQRVADGTANSPATKTTAETQRTAAATKKKRRSSSVRRRRWCSGGLRRRRSNGRGRRQLGDPNGGLPERRRRLERRRRTAGATAATAELGRTALGLLRRREAKAKGATGRGEXGGPFKGARRRRRRPTATGDEKERSGSKXDPNRPRTHRFPNRFSRRFQRRKGRGDPGDHFPSIDSAGNGKGRPDLERNGGGXRRLGFRAEAXPGRRRXLTGGTHLSATERARAAADWVGWAEEREKRGFXPTFGPKPKEDF

SEQ ID NO: 189798 - protein, 802 aa, Oryza sativa
  Clone ID: PAT_MRT4530_86272C.1.pep
MSTTTSGSSRARTPRTGNKIPKERFRITTVDAVGLPTSPRKILSRFMSICGVIGRQKFSILQDDFKLVPAAEKDIAWLTFKESFDYPAEHEDRLRRAAFKVMGTAWKNFKTKLVSEFVYNPANPDPREKFPWITEQVWEEFHAKKSSPESRARSEAYRLLQTRNQHPHRLGTAGYAGKEEEWQREDEEAEESCTGLVPLVFGDIPHPRARNWARARYQKHDDGTIFMPNAEDQRVYEAIKELVAEQQASQEACSQRREDDLLTKTLGNKEHRGRTRGVGSSVLWKYGFPDYAWQYKKRTSNKVEKDARLEAKIRESIRAELTSEFDEKLESMRAKIRQEIREEQQIPQAAAAAAHKELGSPTEKHSSCASTELVENPTSVDIAVDHITEPTSCTSQLGADCAKVQVDLVKPEYELFPLKYPPNDEVLSLGNARGTFIQWPKDLIEIRVTARPTTAPGGRPPKRPASAPSAPPTQDRHAQSYDVQLQYDTDFGEDRTEADSKAIHEPPPMKKSRKAHSSPQRITLDKPKAKGRGRGGKVQASLLAPRKLDLGKGQEETKGKEDLHLYYMEKSNARKPSKATDILGQHDGKPFLGPTNYIVVDFKDLFDLYRLRAVDTSLLKCYSLLSWQWCQKHALEVAFLDPQVVTVTNLQNDHQGMVNYIYDTLWSRRDKEYIMCAYNQYAHWILLVITPKWSTCHYLNSRIDKNAYDWTPIQLAIDEAWAQYVQRGGLRKTGHDTLIHKKDFPVKQQIGDQCGFHVCHNMRLLYREKVKTLAEFEGTITKSLTTSFEEAMMNTYYATVMM

SEQ ID NO: 189799 - protein, 216 aa, Oryza sativa
  Clone ID: PAT_MRT4530_86273C.1.pep
MITFGLNSRPHPEFRNDLRPSSSSLAAGESESPKAVERLEREGCTRSGSSRRQPRRGSGMRQPLRPSPAALHPRGAAVAPTRSPGAAVAGAEMRQQATGGWGGGWRGAPPARPRAPAAAAAANLSRTAMALTKEAERLDVPFQFNPVVSRLDALDVESLRVKTGEALAICFSLQLHCLLASDDDATAGAGGDKERRSPESGLSPSKSRADAFLGAL

SEQ ID NO: 189800 - protein, 764 aa, Oryza sativa
  Clone ID: PAT_MRT4530_86274C.1.pep
MKFSRLVSDYKTPLYAGCKAKHTKLSVTLDLMKLKASSGWTDKSFTDLLGILKAMLPVENTLPETTYEAKQVLCPLGLEVRRIHACPNDCILYHKQYADLDACPVCKASRYKRKKSADEGNKSKRGGPANVVWYLPIIDRFKRIFANPNEAKLVRWHATERRNDGPRQPGNDIDVFLEPVIDDLEIRWKESVETWDAYGRENFKLRVLLFCTINDYPALGNLSGQTIKGKKACSDCKEHTRSRWLKKSQKMVYMGHQRWLPLRYAFRRKKKIFNGKRELQPATKDLSRDEVHNMVKDISNEFGKKRKRSKTKEKGMWKKKSIFWRLPYWKDLDVRHCIDLMHVEKNDMNIRSELQPIQDAETGKVYIPPACHTLSKDEKIAMLSCLKDIKVPSGYSARISKYVKLDDLKLVGMKSHDCHVLITQILPVAIRGILPPKVRHTIQRLCAFFNAIGQKQTKLCGPAFLREMWPFERYMGVLKSYVRNRAKPEGSIIEGYTTEEAIEFCVNYMSDADPIGVPASRHEGRLSGVGTIGRKRIRPDQASYTYAYYAVLQHMAEVGPYFEEHLAKIRDENLGRSDAWINREHNSRFNEWFKNRVTMSTDVPNETTVKQDDKSTVQNRSVRIDAFQDQVGSNTYYGRIEEIWELNYVKFKVPLFRCRWVNLRTGVKADKKGFTLVDLSKVGYADEPFVLAKQVEQIFYIKDPSNKKMHIVRDGKRRIVGVDNVVDEEEYNHNLHVRPHIDLDDDPQEPVAYARSDDTEGITL

SEQ ID NO: 189801 - protein, 897 aa, Oryza sativa
  Clone ID: PAT_MRT4530_86275C.1.pep
MATTMATFPSDGDDWSDGEARLERRRRLRYEDVTDRRRLLNDDPYRARRHPSSSSSPPPLRRLTPPPPSTPRPPPTPATPSTEPGAAAANSSFADSSLTEPEAAATEAAASTKPPTPDAASIEHAAASTEPATPNARRRPPGNKIPKERFRITVVDAVGLPTSPRKILSRFRSICGVIGRQKFNILQDDIKHVPAAEKDIAWLTFKESFDYPAEHEDRLRRAAFKVWEEFHAKKSTPESRASSEAYRLLQTKNQHLHRLGTAGYAGKEEEWQHEDEEAEESNTPLVFGDIPHPWARNWARARYQKKDDGTIFMPNPEDQRVYEAIKELVAEQQASQEVCSRRREDDLLTKALGNNEHRGRTRGIGSSVPWKYGLPDYAWQYKKRSSNKAEKDARLEAKIRASIRAELTSEFDEKLESMRAKIRQEIREEQQNTQAAAVAAHEELGSPTQKHSSYASTEVAENPTSVDSAVDHITEPTSCTLTVRVMPTFTVPAAEGLAYKSTPETRVHGAQLRGDCAKVQVDSVKPEYELFPLKYPPNDEVLSLGNARGTFIQWPKDLIEIKWPKDLIEIRVTARPTTASGSRPPKRPASAPSAPPAQDRHAQSYDVQLQYDTDFGDDRTEADSKAIHEPPPMKKSGKAHSSPQRITLDKPKAKGRGRGGKGFQLGMPLVGDDVLAAMGTACKDLHAYYMEKSNARKPNKATDILGEHDGKSFLDPTNYIVVDFKDLFDLYRLRAVDTSLLKCYSLLSWQWCQKNAPEVAFHDPQVVTVTNLQNDRQGMINYIYDTLWSCRDKEYIIIDKNAYDWTPIQLAIDEAWAQYVQRGGLRKTGHDTLIHKKDFLVKQQIGDQCGFHVCHNMRLLYREKVKTLAEFEGTITKSLPTSFEEAMMNTYYATVMM

SEQ ID NO: 189802 - protein, 212 aa, Oryza sativa
  Clone ID: PAT_MRT4530_86276C.1.pep
MSETPSQPAGKTRLGFTPATHSLSIRGYHSIAPPPAILHRHVANTTPTPLPPLVSVPPSAAASAYHRHQLLPTSTTLPPIPTIVSSTFLPPTALHERALCRRHVVVPLLPRPATSTQPYPFALSSLLAQELASQGEEAKSGWDGTRFGSCTPAASTFTPPHPRSRAPLSCYRIRLGDRPTAPGSPDPSRTGLDIGVDARSSGAALPSSPRST

SEQ ID NO: 189803 - protein, 869 aa, Oryza sativa
  Clone ID: PAT_MRT4530_86277C.1.pep
MDQSNCKNENMFDSAEDVHGHLIQRGFMKGYTCWVKHGVQESGSGVAADRSGAHNQEDEDEHDMFIPSPLGGEMVDVDHDLLQDMLRDVEDPAQNERDGMKFSRLQYADLDACPVCKASRYKRKKSADEGNKSKRGGPAKVVWYLPIIDHFKRIFANLNEAKLVRWHATERRNNGPRQPGNDIDVFLEPVIDDLEILWKEGVKTWDAYGQENFKLRVLLFCTINDYPALGNLSGQTIKGKKACSDCKEHTRSRWLKKSRKMVYMGHRRWLPLRHAFRRRKKIFNGKRELQPAPKDLSGDEVHNMVKDISNEFGKKRKRSKTKEKGMWKKKSIFWRLPYWKDLDVRHCIDLMHVEKTVCESLVGLMLNIPGKTKDGLNARLDLQDMNIRSELQPIRNAETGRVYLPPACHTLSKDEKIAMLSCLKDIKVPSGYSARISKYVKLDDLKLVGMKSHDCHVLITQILPVAIRGILPPKVRHTIKRLCAFFNAIGQKVIDPEDLDGLPTDIVNTLCHLEMFFPLYFFDIMVHLPVHLVKQTKLCGPAFLREMWPFERYMGVLKSYVRNRAKPEGSIIEGYTTEEAIEFCVNYMSDADPIGVPASRHEGRLSGVGTIGRKRIRPDQASYVQAHYAVLQHMAEVGPYFEEHLEKIRDENLGRSNAWINREHNSWFNEWFKNRVTMSTDVPNETVQLLGMGPSWTVDTWQGYDINGYTFYTVKQDDKSTVQNSGVRIDAFQDQVGSNTYYGCIQEIWELNYVKFKVPLFRCRWVNLRTGVKADKEGFTLVDLSKVGYTDEQFVLAKQVEQIFYIKDPSNKKMHIVRDGKRRIVGVDNVVDEEEYSHNLHVRPHIDLDDDPQEHVAYARSDHTEGMTL

SEQ ID NO: 189804 - protein, 51 aa, Oryza sativa
  Clone ID: PAT_MRT4530_86278C.1.pep
ILIRINCILHGGRMYLVSLYIRVYKIKITSHVAARCSLLILRSDFYFIYSD

SEQ ID NO: 189805 - protein, 983 aa, Oryza sativa
  unsure (1)..(983): unsure at all Xaa locations
  Clone ID: PAT_MRT4530_86279C.1.pep
CPCANCKNENMFDSGEVVHGHLIXRGFMKGYTCWVKHGEQESGSGAAADRSDVHNQEDEDEYDMFIPSQLGGEMVDVDHDLLQDMLSDVEDPAQNERDSIKFSRLVSDSETSLYAGCKEKHTKLSVTLDLMKLKISSGWTDKNFTDLLGILKAMLPAENILPETTYEAKXVLCPLGLEVRRIHACPNDCILYHKQYADLYACPVCKASRYKRKKSADEGKKSKRSGPAMVVWYLSIIDRFKRIFANPNEAKLLRWHATERKNDSMLRHPADSIEWRNIDRKHKDFAADPRNMRICLCTDGMNPFGHMSSTHSTWLVLIANYNLPPWLCFNXKYIMLCLLIQGPRQPGNDIDVFLELVIDDLEILXKESVETWDAYGQEDFKLRILLFCTINDYPALGNLSGQTIKGKKACSDCKQHTRSRWLKKSXKMVYMGHRRWLPLRHAFRRKKKIFNGKRELXPAPKDLSRDGVHNMVKDISNEFGKKRKRSKTKQNEKNVCESLVSLMLNILGKTKDGLNARLDLQDMNIRSELQPIREAETGRVYLPPACHTLSKDEKIRMLSCFKDIKVPSSYSARITKYVKLDDLKLVGTKFHDCHVLITQIMPVAIRGILPPKVRHTIXRLCAFFNAIGQKVIDPEDLDGLQTDILNTLYHLEMFFPLSFFDIMVHLPVHLVKQIKLCGPAFLREMWPFERYIGVLKSYVRNRAKPEGSIIEGYTAEDAIEFCVNYMFDTDPIRVPASRHEGRLSGXYVQAHYAVLQHMAEVGPYFEEHLAKIRDKNLGRSDTWINREHNSRFNEWFMNRVTISTDVPNEITVDTWHGYDINGYTFYTVQQDDKSIVQNSGVRIDAFQDQVGSNTYYGRIEEIWELKYVKFKVTLFRCHWVNLRTGVKADKEGFTLVDLSRVGYADEPFVLAKQVEQIFYIKDPSNKKLHIVRDGKRRIVGVDHVVDEAKYNQNLHVRPHIDLDDDPQEAVAYARSDHTEGKTS

SEQ ID NO: 189806 - protein, 236 aa, Oryza sativa
  Clone ID: PAT_MRT4530_8627C.1.pep
MASLLQFRIRRRGYEPITRRGGEEEEEAAPAYEPAMFEEEGLEPDELEARGDRLMARGHRRASSWWFTSFKHDTAFAIAEDFRMASLSYVLAKNWRKAAAAFGNEAIQRLKRRSPPAELVAAVALLASARCYRKIQDNADEGEVAAIKLALQKAVSLFTKNNDMQSAATCCKELAEFHEEQRELHAAVHCFLQAKDYYGSGPNPNEQGVRYCRAIGSLVSCRIRLLEGAAARANPV

SEQ ID NO: 189807 - protein, 103 aa, Oryza sativa
  unsure (1)..(103): unsure at all Xaa locations
  Clone ID: PAT_MRT4530_86280C.1.pep
NCEEAGVPFDERTPMKXDMLYYQDLLFKRGLLATDQALYTPGSWAGELVLTYSRNQEAFXADFARAMVKMGNIRPDPWTPTEVRIKCSVANGHYWPAVISPFV

SEQ ID NO: 189808 - protein, 1011 aa, Oryza sativa
  Clone ID: PAT_MRT4530_86281C.1.pep
MYAKNLKRHSTEYRKGVINFMNAAKEDRIRRNSDYMCCSCADCKNENMFDSGEDVHGHLIQRGFMESYTCWVKHGEQESGSGVAADRSGAHNQEDEDEHDMFIPSPLGGEMVDVDHDLLQDMLRDVEDPAQNERDGMKFSRLVSDSETSLYAGCKAKHTKLSVTLDLMKLKASSGWTDKSFTELLGILKAMLPIENTLPETTYEAKQVLCPLGLEVRRIHACPNNCILYHKEYTDLDACPVCKASRYKRKKSADERNKSKRGGPAKVVWYLPIIDRFKRIFANPNEAKLVRWHATERRNDGMLRHPADSIEWRNIDRKHKDFDADPRNMRICLCTDGMNPFGDMSSTHSTWPVLIANYNLPPWLCFKRKYIMLCLLIQGPRQLGNGIDVFLEPVIDDLEILWKEGVETWDAYGQENFKLRVLLFCTINDYPALGNLSGQTIKGKKACSDCKEYTQSRWLKKSRKMVYMGHRRWLPLRHAFRRKNKIFNGKRELQPAPKDLSGDEVHNMVKDISNEFGKKRKRSKTKEKGMWKKKSIFWRLPYWKDLDIHHCIDLMHVEKNVCESLVGLMLNIPGKTKDGLNARLDLQDMNIRSELQPIRDAETGKVYLLPACHTLLKDEKIAMLSCLKDIKVPSGYSARISKYVKLDDLKLVGMKSHDCHVLITQILPVAIRGILAPKVRHTIQRLCAFFNAIGQKVIDPEDLDGLQTDIVNTLCHLEMFFPLSFFDIMVHLPVDMVKQTKLCDPAFLREMWPFERYMGVLKSYVCNRAKPEGSIIEGYITEEAIEFCVNYMSDADPIGVPASRHEGRLSRVGTIGRKRIRPDQASHMARIRYKWIFYTVKQDDKSTVQNNGVRIDAFQDQVGSNTYYGRIEEICELNYVKFKVRLFRCHWVNLSTGVKADKEGFTLVDLSKVGYVDEPFVLAKQVEQIFYIKDPSNRKMHIVRDGKRRIVGVDNVVDEEEYNHNLHVRPHIDLDDDPQEPVAYARPVTDESSVTGLNVISIGHYYGARHR

SEQ ID NO: 189809 - protein, 683 aa, Oryza sativa
  unsure (1)..(683): unsure at all Xaa locations
  Clone ID: PAT_MRT4530_86282C.1.pep
CKNENMFYSGEDVHGHLIQRGFMKGYTCWVKHGEQESRSGVAADRSGAYNQEDEDEHDMFIPSPLGGEIVDVDHDLLQDMLRDVEDPAQNERDGMKFSRLAMLPVENTLPETTYEAKQVLCLLGLEVRRIHACPNDYILYHKQYADLDACPVCKASRYKRKKSADKGNKSKRGGLAKVVWYLPIIDRFKRIFANPNEAKLENFKLRVLLFCTISDYPALGNLSGQTIKGKKACSDCKEHTRSRWLKKSRKMVYMGHRRWLPLRHAFIRKKKFFNGKRELQPAPKDLSGDEVHNMVKDISNEFGKKRKRSKTKEKVATRGILPPKVRHTIQRLCAFFNAIGQKVIDPEDLDGLQTDIVNTLCHLEMFFPLSFFDIMVHLPVHLVKQTKLCGPAFLSEMWPFERYMGVLKSYVRNRAKPMGSIIECYTTEEAIEFCVNYMSDADPIGVLASRHEGRLSGVGTIGRKRIRPDQASYAQAHYAVLQHMAEVGPYFEEHLAKIRDENLGRSDAWINREHNSRFNEWFKNRVTMYTDVPNEXQNSGVRIDAFQDQVGXNTYYGRIEEIWELNYVKNKVPLFRCHWVNLRTGAKADNEGFTLVDLSKVGYADEPFVLAKQVEQIFYIIDPSNKKMYIVRDGKRRIVGVDNVVDEEEYNHNLHVRPHIDLDDDPQEPVAYARSGHTEGITL

SEQ ID NO: 189810 - protein, 57 aa, Oryza sativa
  Clone ID: PAT_MRT4530_86283C.1.pep
NSMLFRIFASNKMYTIYNIWPSPDNVVILASPFLIDHYMFHLWCHFKFVCMHYSHNS

SEQ ID NO: 189811 - protein, 792 aa, Oryza sativa
  Clone ID: PAT_MRT4530_86284C.1.pep
MSTTTSGSSRARTPRTGNKIPKERFRITAVDAVGLPTSPRKILSRFRSICGVIGRQKFSILQDDFKLVPAAEKDIAWLTFKESFDYPAEHEDHLRRAAFKVMGTAWKNFKTKLVGEFVYNPANQDPREKFPWITEQVWSEFHAKKSTPESRARSEAYCLLQTGNQHPHRLGTTGYAGKEEEWQREDEEAEESCTPFVFGDIPHPRARNWARARYQKHDDGTIFMPNAKDQRVYEAIKYGFPDYAWQYKKRTSNKAEKDARLEAKIRESIRAELTSEFDEKLESMRAKIRQEIREEQQIPQAAAAAAHKELGSPTEKRSSCASTELAENPTSEPTSCTLTVRVMPTFTVPAAEGLAYKPTPETRVHGAQLRADYAKVQVDSVKPEYELFPLKYPPNDKVLSLGNARGTFIQWPKDLIEIRVTARPTTAPGGRPPKRPASAPSAPPAQDRHAQSYDVQLQYDTDFGEDRTEADSKAIHEPPPMKKSRKAHSSPQRITLDKPEAKGRGRGGKVQASLLAPRKLDLGKGQEETKGKEVKKKYVAPQEFQLGMPLVGDDVLAAMGTACKDLHLYYMEKSNARKPSKATDILGQHDGKPFLGPTNYIVVDFKDLFDLYRLRAVDTSLLKCYSLLSWQWCQKHAPEVAFLDPQVVTVTNLQNDRQGMVNYIYDTLWSRRDKEYIMCAYNQYTCHYLNSRIDKNAYDWTPIQLAIDEAWAQYVQRGGLRKTGHDTLIHKKDFPVKQQIGDQCGFHVCHNMRLLYREKVKTLAEFEGTITKSLTTSFEEAMMNTYYATVVM

SEQ ID NO: 189812 - protein, 932 aa, Oryza sativa
  unsure (1)..(932): unsure at all Xaa locations
  Clone ID: PAT_MRT4530_86285C.1.pep
GLPCRRRPRPHRRTSPTPTEPDAARPAPTYPTANSSFAEPAAAAIETAASTEPNAASTDRRRPPPSPAPPPPSPTDRPXTMSQQGKPISTTTSGSSRARTPRTGNKIPKERFRIIAVDAVGLPTSPRKILSRFRSICGVIGRQKFSILQDDIKLVPAAEKDIAWLTFKESFDYPAEHEDYLRRAAFKVMGNAWKNFKTKLVGEFVYNPANPDPREKFPWITEXVWEEFHAKKLTPESRARSEAYRLLQTRNQHPHRLGTAGYAGKEEEWQREDEEAEESCTPLVFGDIPHPRARNWARARYQKNDDGTIFMPNAEDQRVYEATELVVEQQVSQEACSQRREDDLLTKALGNKEHYGRTRGVGSSVPWKYGFPDYAWQYKKRTSNKAEKDARLEAKIRASIRAELTSEFDEKLKSMRAKIRQEIREEQQNPXAAAAAAHEELGSPTXKRSSCASTELAENPTSVDSAVDHITEPTSCTLTVRVMPTFTRQECMERNSGXDCAKVQVDSVKPEYELFPLKYPPNDEVLSLGNARGTFIQWPKDLIEIRVTARPTTAPGGRPPKRPASAPSAPPAQDRHAQSYDVQLQYDTDFGEDRTEADSKAIHEPPPMKKSRKAHSSPXRITLDKPEAKGRGRGGKVQASLLAPRKLDLGKGXEKTKGKEVKKKYIAPQEFQLGMPLVGDDVLAAMGTACKDLHLYYMEKSNARKPSKVTDILGEHDGKPFLGPTNYIVVDFKDLFDLYRLRAVDTSLLKCYSLLSWQWCQKHAPEVAFLDPQVVTVTNLQNDRQGMVNYIYDTLWSRRDKEYIMCAYNQYAHWILLVITPKWSTCHYLNSRIDKNAYDWTPIKLAIDEAWAQYVQRGGLRKTGHDTLIHKKDFPVKQQIGDQCGFYVCHNMRLLYREKVKTLAEFEGTITKSLPTSFEDAMMNTCYATVMM

SEQ ID NO: 189813 - protein, 601 aa, Oryza sativa
  Clone ID: PAT_MRT4530_86286C.1.pep
MDTIEECSVDDGRRLMLLGSRILVGVPNNSRGCSELLSWAIRVVARPNDSVVAVHVLGGRGRKNRLQKANAFVIYMLGEFVETCEAKQVNLEAKVVCSPSIWRALTQEATLTDANFLIVGRSGNAYRRNHFEVANYCYMNAPRNCSVIAVGRDGLPQSAARFKSRSFDDSSIFSSSTWSRRFPPLQKLLRSNSARKPAQSTGEATEDKSSPRAVLDGPEAGEQHVTEECYSTTSSNEVSRRGQNGIWRRLSDMKLWLPFLRSIDDENVKGGDNSSNYTEDQKPAWRCFSYQEISVATNDFHPDNMAGRGGYAEVYKGILSDGQCVAVKRLAQGKPTEQKEKEFLTELGIQGHVCHPNTAYLLGCCVENGLYLVFEFCENGTLASALHGKSAKILEWPLRYKIAVGVARGLQYLHMFCRHRIIHRDIKASNVLLGDDFEPQISDFGLAKWLPKQWTHHSVIPIEGTFGYLAPEYFMHGIVDEKTDIFAFGVLLLEIVTGRRPIDCSKLSLLQWAKPLLEAGQVTELADPNLGGDYDKDQLKRMVAVASRCIMRPAMWRPSMAEVLHFLSTDECLKEPEKWNIPEDEVDDMDDCTMFSESLSP

SEQ ID NO: 189814 - protein, 71 aa, Oryza sativa
  Clone ID: PAT_MRT4530_86287C.1.pep
SDPATRCNIYISASLSLQVSHHKSGDSAWPSSETPSVSEAQQGHGYGTSHHCSPLDLELGMSLSTTPSIGT

SEQ ID NO: 189815 - protein, 50 aa, Oryza sativa
  Clone ID: PAT_MRT4530_86288C.1.pep
MQYINHWLPRSRVLNHATVAVPHIGAAGPSMSRVLKLRDYRGSVFPSHGT

SEQ ID NO: 189816 - protein, 167 aa, Oryza sativa
  unsure (1)..(167): unsure at all Xaa locations
  Clone ID: PAT_MRT4530_86289C.1.pep
MAAMASPPPTTRVCVTGAGGFIGSWLVKLLLSRGYAVHATLRDPCDPKNAHLKQLDGASEMLSLFKADVLDAGELSAAIAGCEGVFHVASPVPGDKIVDPELEVMAXPAVKGTLNVLEVCSSSKKVQKVVVVSSTAAVHYNPNWPPGKPKDESCWSDRKICMEKKEW

SEQ ID NO: 189817 - protein, 105 aa, Oryza sativa
  unsure (1)..(105): unsure at all Xaa locations
  Clone ID: PAT_MRT4530_8628C.1.pep
EQTPLDSQSHRDGVXTPAPXIQDLHXRRALGRPPXLRYXDATXXLLSXRAXXPGXXFPCDYDVTCGQXXVHXLSCXAFXXYXFXXXILXGXXXDXGXPXDRXXFI

SEQ ID NO: 189818 - protein, 80 aa, Oryza sativa
  unsure (1)..(80): unsure at all Xaa locations
  Clone ID: PAT_MRT4530_86290C.1.pep
APIAMATILAVAAMATFQAGTTLPGAVAPXLPVRRNVVSFAGRRQGRALGRLAVVVAACSPSPPELAQKVSESIKHAEDT

SEQ ID NO: 189819 - protein, 87 aa, Oryza sativa
  Clone ID: PAT_MRT4530_86291C.1.pep
CVHQMAGASSPWNSLKIKTHVLLSETIILTLETTLVYNISNANKFCLQNNSKSMVTSMCSHLISWVTPRDSTACGPAPSEPKYMNGY

SEQ ID NO: 189820 - protein, 290 aa, Oryza sativa
  unsure (1)..(290): unsure at all Xaa locations
  Clone ID: PAT_MRT4530_86292C.1.pep
MRCYRHGFDAASSTASSSAASAAAFATASTAVPSDLTDLRQHCRFQCALQGTFVVIAGHGGAFIVARRTHSARSVIFCGWCYTSFCFNPVDIYTAAAGRARRSRATASLMHGDNGGSGGRRGDDNGSGGRRGDDDGVRAGAAVVARACRRRRRRQSRRGEGGPGDGGGGNRGEGVRAMAAAAARAGAGDGXRAPHWLLLLLPWPLVSTLRRCXPPPPPPTVVAATAPVADDDPILLDVDVSANVALLLVPCSRGSRLIQIQKVRVKLQTLKSEGKTTIGFKSGGTYAIAP

SEQ ID NO: 189821 - protein, 118 aa, Oryza sativa
  unsure (1)..(118): unsure at all Xaa locations
  Clone ID: PAT_MRT4530_86293C.1.pep
FFXVKPVVYCMICRVKTTFTQFVTIHFAPWPLSLQQLETPLNPAQQHSTSLQHEWCQITSHTPALQACTACFSACSVPSSFPWPSPVGLLGLPVCSSLVLELHCLQSFGSHAPCNXCL

SEQ ID NO: 189822 - protein, 886 aa, Oryza sativa
  Clone ID: PAT_MRT4530_86294C.1.pep
MDQSTIDRSWMYAKNLKRHSTEYRKGVINFMNAAEEDRKRGNSDYMCCPCADCKNENMFDSGEDVHGHLIQRGFMEGYTCWVKHGEQESGSGAVADRSDMLHDVEDLAQNERDGMKFSRLVCDSETPLYAGCKAKHTKLSVTLDLMKLKESSGWTDKSFTGLLGILKAMLLAENTLPETTYEAKQVMCPLGLEVRRIYACPNDCILYHKQYADLDTCPVCKASRYKRKKSADEGNKSKRGGPAKVVWYLPIIDRFKRIFANPNEAKLVRWHATKRRNDGPRQPDNDIDVFLEPVIDDLEILWKEGLETWDAYGQENFKLRVLLYCTINDYPALGNLSRQTIKGKKACSDCKEHTRSRWLKKSRKMVYMGHRRWLPLRHAFRRKKKIFNGKRELQPAPKDLSEDEVHNMVKDISNEFGKKRKRSKTKEKEKNVCESLVGLMLNIPGKTKDGLNARLDLHDMNIRSELQPIRDAETGRVYLPPACHTLSKDEKIAMLTCLKDIKVPSGYSARINPEDLDGLQTYIVNTLCHLEMFFPLSFFDIMVHLLVHLVKQTKLCGPAFLREMWSFERYMGVLKSYVHNRAKPEGSIIEGYTTEEAIEFCVNYMSDADPIGVPASRHEGRLSGVGTIGRKRIRPDQASYAQAHYAVLQHMAEVGPYFEEHLAKIRDENLGRSDAWINREHNSRFNEWFKNRVTMSTDVPNETVQLLGMGPSWTVDTWQGYDINGYTFYTVKQDDKSTVQNSSVRIDAFQNQVGSNTYYGRIEEIWELNYVKFKVPLFRCRWVNLRTGVKADKEGFTLVYLSKVGYADEPFVLAKQVEQIFYIKDPSNKKMHIVRDGKRRIVGVDNVVDEEEYNHNIHVRPHIDLDDDPQEPVAYAHSDHTEGITL

SEQ ID NO: 189823 - protein, 166 aa, Oryza sativa
  unsure (1)..(166): unsure at all Xaa locations
  Clone ID: PAT_MRT4530_86295C.1.pep
MDGDGVGGSMHVVMLPWLAFXHILPFAEFAKRVARQGHRVTLFSTPRNTRRLIDVPPSLAGRIRVVDIPLPRVEHLPEHAEATIDLPSNDLRPYLRRAYDEAFSRELSRLXLQETGPSRPDWVXRPTYAALLXRRPPPRXHGVRAAFLSLFGAAAVLSSVAGDAPG

SEQ ID NO: 189824 - protein, 240 aa, Oryza sativa
  Clone ID: PAT_MRT4530_86296C.1.pep
MKGYTCWVKHGEQESGSGAATDKSGAHNQEDEDEHDIFIPSPLGGEMVDVDHDLVQDMLRDVEYPAHNERDCMKFSGLVSNSETPLYAGCKAKHTKLSVTLDLMKLKASSGWTNKSFTDLLGILKAMLPDENTLPETTYEAKQILCPLRLEVHIIHACPNDCILYHKQYADLDGCPVCKAFRYKRKKSADECKKSKRCGLAKVVWYLLIIDRFKTIFSNPKEAKLVRWHATDRRNDGDKP

SEQ ID NO: 189825 - protein, 133 aa, Oryza sativa
  unsure (1)..(133): unsure at all Xaa locations
  Clone ID: PAT_MRT4530_86297C.1.pep
MLKPPPATAYGTAPHPLAGEKVPLTAFNRAAFDIFVPMVFPYRAPVLSNEAIMEGLRMAVAAYPHMAGRLALAVDDRDSRTSTKHQIGVATIGVGSAXNFRPALLQVQLTRFRCGDLIVGLIVHHHVGDGHSM

SEQ ID NO: 189826 - protein, 921 aa, Oryza sativa
  Clone ID: PAT_MRT4530_86298C.1.pep
MDQSTIDRSWMYAKNLKRHSTEYRKSVINFMKAAEEDRKRRNSDYMCCPCADCKNENMFDSGEDVHGHLIQRGFMKGYTCWVKHGEQESGSGAAADRSGAHNKEDEDEHDMFIPSPLGDEMVDVDNDLLQDMLRDVEDPAQNERDGMKFSRLVSDSETPLCAGCKAKHTKLSVTLDLMKLKASIGWTDKSFTDLLGILKAMLPDENTLPETTYEAKQVLCPLGLEVRRIHACPNDCILYHKQYADLDACPVCKASRYKRKKSADEGNKSKRGGPAKVVWYLLIIDRFKRIFANPNEAKLAHWHATERRNDGPRQPGNDIDVFLEPVIDDLEILWKEGVETWDAYGQENFKLRVLLFCTINDYPALGNLSGQTIKGKNACSDCKEYTRSRWLKKSRKMVYMGHRRWLPLHHAFRRKKKIFNGKRELQPAPKDLSGDEIHNMIKDISNEFAKKRKRSKIKEKGMWKKKSIFCRLPYWKDLDVRHCIDLMNVEKNVCEILVGLMLNIPGKTKDGLNARLDLQDMNIRSELQPIRDAETGRVYLPPACHTLSKDEKIAMLSCLKDIKVPSGYSARISMYVKLDDLKLVGMKSHDCHLLITQILPVAIRGILPPKVRHMIQRLCAFFNATGQKQTKLCGPAFLREMWPFERYMGVLKSYVRNRAKPEGSIIEGYTTEEAIEFCVNYMSDADPIGVPTSRHEGRMLGVGTIGRKRIRPDQASYAQAHYTVLQHMAEVGPYFEEHLAKIRDENLGRSDAWINREHNSRFNEWFKNHVTMSTDVPNETVQLLGMGPSWTVDTWQGYDINGYTFYTVKQDDKSTVQNSGVRIDAFQDQVGSNTYYGHIEEIWELNYVKFKVEQIFYIKDPSNKKMHIVRDGKRRIVGVDNIVDEEEYNHNLHVRPHIDLDDDPQEPVAYARSDHTEGITL

SEQ ID NO: 189827 - protein, 534 aa, Oryza sativa
  Clone ID: PAT_MRT4530_86299C.1.pep
MVYMGHRRWLPLHHTFRRKKKIFNGKRELQPAPKDLSGDEVHNMVKDISNEFGKKRKRSKTKEKEKNVCESLVGLMLNIPGKTKDGLNARLDLQDMNIRSELQPIRDAETVAIRGILPPKVRHTIQRLYASFNAIGQKVIDPEDLDGLQTDIVNTLCHLEMFFPLSFFDIMVHLPVHLVKQTKLCGLAFLREMWPFERYMGVLKSYVRNRAELKGSIIEGYTTEEAIELCVNYMSDADPIGVPASRHKGRLSGVGTIGRKRIRPDQASYAQAHYAVLQHMAEVGQYFEEHLAKIRDENLGRSDAWINREHNSRFNEWFKNRVTMSMVVPNETVQLLGMGPSWTIDTWQGYDINGYTFYTVKQDDKSTVQNSGIRIDAFQDQVGSNTYYGHIEEIWELNYVKFKVPLFRCRWVNLRTGVKADKEGFTLVDLSKVGYAYEPFVLAKQVEQIFYIKDPSNKKMHIVRDGKRRIVGVDNVVDEEENNHNLHIRPHIDLDDDPQEPVAYARSDHTEGITLWLMHLYLSIVMNKVFCFIA

SEQ ID NO: 189828 - protein, 98 aa, Oryza sativa
  unsure (1)..(98): unsure at all Xaa locations
  Clone ID: PAT_MRT4530_8629C.1.pep
LITPPVSGKKYQGFRDPSSLAGDRSIDQWPWCSRRGVPRGRRRACXFSTASVAAAGRSPVAGLPKACRGRPYRRCGWSAPPPPRRFXGTXRLGGVRRD

SEQ ID NO: 189829 - protein, 40 aa, Oryza sativa
  Clone ID: PAT_MRT4530_862C.1.pep
FRITLKSRNFTRRIVNSDTDTNRRLIPQSSLTTGVRAQVP

SEQ ID NO: 189830 - protein, 83 aa, Oryza sativa
  Clone ID: PAT_MRT4530_86300C.1.pep
LSTGVLTASSATLSALLCLACKCKSSYANYLSCISWDYTMFQYSSQYHCHSWMEAFNRIPCSARSPARWRSARPPLCVGGGTK

SEQ ID NO: 189831 - protein, 795 aa, Oryza sativa
  Clone ID: PAT_MRT4530_86301C.1.pep
MSTTTSGSSRARTPRTGNKIPKERFRITAVNAVGLPTSPRKILSRFRSICGVIGRQKFSILQDDFKLVPAAEKDIAWLTFKESFDYPAEHEDRLRRAAFKVMGTAWKNFKTKLVGEFVYNPAIPDPREKFPWITEQVWSEFHAKKSTPESRARSEAYRLLQTRNQHPHRLGTAGYDGKEEEWQREDEEAEESCTPLKELVAEQQAPQEACAQRREDDLLTKALGNKEHRGRTRGVGSSVPWKYGFPDYAWQYKKRTSNKAEKDARLEAKIRESIRAELTSEFDKKLESMRAKIRQEIREEQQIPQAAAAAAHKELESPTEKRSSCASTELAENPTSVDSAVDHITEPTSCTLTVRVMPTFTIPAAEGLAYKPTPETRVHGAQLRADCAKVQVDSVKPEYELFPLKYPPNDEVLSLGNARGTFIQWPKDLIEIRVTARPTTAPGGRPPKRPASAPSAPPAQDRHAQSYDDRTEADSKAIHEPPLMKKSRKAHSSPQRITLDKPEAKGRGRGGKVQASLLAPRKLDLGKGQEETKGKEVKKKYVAPKEFQLGMPLVGDDVLAAMGTACKDLHLYYMEKSNARKPSKATDILGQHDGKPFLSPTNYIVVDFKDLFDLYRLRAVDTSLLKCYSLLSWQWCQKHAPEVAFLDPQVVTVTNLQNDRQGMVNYIYDTLWSRRDKEYIMCAYNQYTCHYLNSRIDKNAYDWTPIQLAIDEAWAQYVQRGGLRKTGHDTLIHKKDFLVKQQIGDQCGFHVYHNMRLLYREKVKTLAEFEGTITKSLTTSFEEAMMNTYYATVVM

SEQ ID NO: 189832 - protein, 120 aa, Oryza sativa
  Clone ID: PAT_MRT4530_86302C.1.pep
MAAAASASHRVFVYGTLMVEEVVRVLIGRAPSSSQAILPNQFVHEKGSEGKITCDAPARGGGGRRRTVDEKIKHTGLGDLLNSCAALNNTNVADRFTRARQSVGLTPLLEIESRCSLRQV

SEQ ID NO: 189833 - protein, 949 aa, Oryza sativa
  Clone ID: PAT_MRT4530_86303C.1.pep
MDQSTIDQSWMYAKNLKRHSTEYRKGVINFMNAAEEDRIRRNSDYMCCPCADCKNENMFDSGEDVHGHLIQRGFMEGYTCWVKHGEQELGSGAAADRSDMLRDVEDPAQNERDGMKFSRLVSDSETPLYAGCKAKHTKLSVTLDLMKLKESSGWTDKSFTDLLGILKAMLPVENTLPETTYEAKQQYADLDACPVCKASRYKRKKSADEGNKSKRGAPEKVVWYLPIIDRFKIIFANPNEAKLVRWHAMERRNDGPRQPGNDIDVFLEPVIDDLEILWKEGVETWDAYGQENFKLRVLLFCTINDYPALGNLSGQTIKGKKACSDCKEHTRSRWLKKSRKMVYMGHRRWLLLRHAFRRKKKIFNGKRELQPAPKDLSGDEVHNMVKDISNEFGKKRKRSKTKEKCMWKKKSIFWRLPYWKDLDVRHCIDLMHVEKNVCESLVGLKLNIPGKTKDGLNARLDLQDMNICSELQPIRDVETGKVYLPPACHTLSKDEKIAMLSCLKDIKVPSGYSVRISKYVKLDDLKLVGMNSHDCLVLITQILPVAIRGILPPKVRHMIQRLCAFFNAIGQKVIDPEDLDGLQTDIVNTLCHLEMFFPLSFFDIMVHLPVHLVKQTKLCGPAFLREMWPFERYMGVLKSYVRNRAKHEGSIIEGYTTEEAIEVCVNYMSDADPIGVPASRHEGRLSGVGTIGRKRIRPDQASYAQAHYAMLQHMAEVGPYFEEHLAKIRDENLGRSDAWINREHNSRFNEWFKNRVTMSTDVPNEIVQSLGMGPSWTIDTWQGYDINGYTFYTVKQDDKSTVQNSGVRIDAFQDQVGSNTYYGRIEEIWELNYVKFKVPLFRCRWVNLLTGVKADKEGFTLVDLSKMRYTDEPFVLAKQVEHIFYIKDPSNKKMHIVRDGKRRIVGVDNVVDEEEYNHNLHVRPHIDLDDDPQEPVAYAHSDHTEGITL

SEQ ID NO: 189834 - protein, 654 aa, Oryza sativa
  Clone ID: PAT_MRT4530_86304C.1.pep
MLLKSKFKLATAIGIVLSMLSLLVHLFLANYSAGGITRYSLHMDDVLPFGPRPRPRRLWGSLSTLDHLHPYAKPRKIYPALDYHNGFIYAKIYGGFEKIQSSICDLVAVARLLNATLVIPEIQATTRAKGISSKFKSFSYLYDEDQFISALSSDVAIVRGLPKDLREARKKIKFPTVSPKNSATPEYYVTEVLPKLSKSKVIGIIINGGKCLQSILPATLEEFQRLRCRVAFHALKFRPEIRALGNQIVSRLRVSGRPYLAYHPGLLRDTLAFHGCAELFQDIHTELIQYRRNQMIKRGTVKEQLSVDSVSRKINGSCPLMPEEVGLLLQALGYPSTTIIYLAGSETFGGQRILIPLRAMYANLVDRTSVCSQRELSDLVGPEAPLASDMAHPPPPKTEKELVDEWKRAGPRPRPLPPPPARPYYAHEKVGWYGWIGENDTEPDPSPVEFRRQAHRLLWDALDYFVSVEADAFFPGFHNDGSGWPDYSSLIMGHRLYQTPSGITYRPDRKTISALFENVSDHRYHPPRNWTLAARQHLNNSASVEGIVKSAMLSKPVSFLAHPLPECSCRTPKSPGVQSTKDSHGRLLFGGEEECPDWMVRSLAMVSTKNNEPQNEDYDGDLPEDDSSQDTQQESDRSDMNKSSEQDEEMDPDD

SEQ ID NO: 189835 - protein, 648 aa, Oryza sativa
  Clone ID: PAT_MRT4530_86305C.1.pep
MSTTTSGSSRARTPRTGNKIPKERFRITAVDAVGLPTSPRKILSRFRSICGVIGRQKFSILQDDFKLVPVAEKDIAWLTFKESFDYPAEHEDRLRRAAFKVMGTAWKNFKTKLVGEFVYNPANPDPREKFPWITEQVWEEFHAKKSTPESKARSEAYRLLQTKNQHPHRLGTAGYAGKEEEWQREDEEAEESCTPLVFGDIPHPRARNWARARYQKHDDGTIFMPNAEDQRVYEAILESMRAKIRQEIREEQQIPQAATAAAHKELGSPIEKRSSCTSTELAENPTSVDSTVDHISKPTSCTLIVRVMLTFTVPAAEGLAYKPTPETRVHGAQLRADCAKVQVDSVKPKYELFPLKYPPNDEVLSLENARGTFIQWPKDLIEIRVTARPTIAPGGRPPKRPASAPSAPPAQDRHAQSYDVQMQYDTDFGEDRTEADSKTIHEPPPMKKSRKAHSSPQRITLDKPEAKGRGRGGKVQASLLAPRKLDLGKGQEETKGKEVKKKYVAPQEFQLGMPLVGDDVLAAMGTACKDLHLYYMEKSNARKPSKATDILGQHDGKPFLGPTNYVVVDFKDLFDLYRLRAVDTSLLKCYSLLSCQWCQKHALEVAFLDPQVVTVTNLQNDRQGMVNYIYDTLWSRRDKEYIMCAYNQ

SEQ ID NO: 189836 - protein, 53 aa, Oryza sativa
  unsure (1)..(53): unsure at all Xaa locations
  Clone ID: PAT_MRT4530_86306C.1.pep
ANSIIPXXXWTDWWGASPGSSRSRRRLGRSPCGGRSFRSPPMNLPEIQFRPLN

SEQ ID NO: 189837 - protein, 724 aa, Oryza sativa
  Clone ID: PAT_MRT4530_86307C.1.pep
MEQSTMDRSWMYATTVKRHFPEYRNGVINFMNAVEEDRNRRNNDYMCCPCADCKNKNMFDSGGVVHDHLIQRGFMKRYTCWVKHGEQESGSGATADRSGAHNQEDKDEHDMCIPSPLGGEMVDVDHDLLLDILRDVEDPAQNERGSMKFSRWLPLRHAFRTKKKIFNSKKELQPAPKDLSGDEVHNMVKDISNELSKKRKRSKTKEKENNVCESLVGLMLNIPGKTKDGLNARLDLHDMNIRSELQPIRDVETGRVYLPPAYHTLSKDEKIAMFSCLKDIKVPSGYSARISKYVKLNDLKLVGMKSHDCHVLITQILPVAIRGILPPKVRHTIQRLCAFFNAIGQKVIDPEDLDGLLTDIVNTLCHLEMFFPLSFFDIMVHLPVHLVKQTKLCGTAFLREMWPFERYMGVLKSYVCNRAKPEGIIIEGYTTEEAIEFCVNYMSDVDPIGVPASRHEGRLSGVGTIGRKRIRPDQASYAQAHYVVLQHMAEVDPYFEEQHLAKIRDENLGRSDTWINREHNSRFNEWFKNHVIMSTDVPNETVQLLGMRPSWTVDTWQGYDINGYTSYTIKQDDKSTVQNSGVRIDAFQDQVGSNTYYSHIEEIWELNYVKFKVALFCCRWVNLRTGVKADKECFTLVDLSRVGYANEPFVLAKQVEQVFYIKDPSNKKMHIMRDGKRRIVGVDNIIDEEEYNQNLHVRPHIDLDDDPQEHVAYARSDHTEVITL

SEQ ID NO: 189838 - protein, 186 aa, Oryza sativa
  Clone ID: PAT_MRT4530_86308C.1.pep
MALSTSRPHHLLRPLLRGFHATSQAMARPEPHEFSKPSDYLGSWEPAGDPREAWARLERLRKGYARDVRQLRRQYSYEMQLLEAERQRKAEARAEAARLANEERKATKAAAAQTRAAERRAFEKDFRQALMKERAEKLESWREKEKLKVQKKADHRELLRKKSSMWVAEDKLETTILDAIKNTTAL

SEQ ID NO: 189839 - protein, 57 aa, Oryza sativa
  Clone ID: PAT_MRT4530_86309C.1.pep
MGRPKGAASRSMNTKDTFTASFDVKQLSFDNTWRRPWGTQSKTTDATKKDRERESCA

SEQ ID NO: 189840 - protein, 731 aa, Oryza sativa
  Clone ID: PAT_MRT4530_8630C.1.pep
MGLDNNFGELSGMFCGLSYDGYTDHGSQSDYFRFADPQPAIVPQMDAGPSSAASSTASRAAVSSGTDNPEDWEFISDESLNYISRMLMEEDIDEKVSMYQEESAALRAAAKPFYDILGHKFPPSPDRQLVAWPLDSPSESSTSSYPHSLASSVTSSNISGAVDSSQRRYVGHSEYRSLSGHSSQPPVGPSSDVRNAMETLEDPLISNGRIPEYLFESFPTWDFRRGVDEAQKFLPGSDKVVIDLEAGGVAKRQEAGKAISLNVSKAEVLKVKKNRQSEDLDVMEGRNSKQSAFCSDEPDWIEMFDVLLRQTEKKATDLRKMMRFEASKNSPVAQPKGPSGTRSRGRKPTKKDVVDLRTLLIHCAQAVAADDRRTANELLKQIRQHAKPNGDGSQRLAYCFADGLEARLAGTGSQLYHKLVAKRTTASDMLKAYHLYLAACPFKRLSHFLSNQTILSLTKNASKVHIIDFGIYFGFQWPCLIRRLFKREGGPPKLRITGIDVPQPGFRPTERIEETGQRLAEYAEKIGVPFEYQGIASKWETICVEDLNIKKDEVVIVNCLYRFRNLIDETVAIDSPRNRVLNTIRQVNPAIFIHGIVNGSYSVPFFITRFREALFHFSALFDMLETTVPRDDAQRALIERDLFGREALNVIACEGSDRVERPETYKQWQVRNLRAGFVQSPLNQDIVLKAKDKVKDIYHKDFVIDEDSEWLLQGWKGRIIYAISTWKPNNN

SEQ ID NO: 189841 - protein, 852 aa, Oryza sativa
  unsure (1)..(852): unsure at all Xaa locations
  Clone ID: PAT_MRT4530_86310C.1.pep
MSQQGEPMSTTTSGSSRARTPRTGNKIPKERFRITAVDAVGLLTSPRKILSRFRSICGVIGRQKFSILQDDFKLVPAAEKNIAWLTFKESFDYPTEHKDRLRRAAFKVMGTAWKNFKTKLVDEFVYNPANPNPREKFPWITEQVWEEFHAKKSTPESRARSEAYRLLQTRNQHPHRLGTAGYAGKEEEWXREDEEAEELCTPLVFGDIPHPRARNWARARYQKNDDGTIFMPNAEDQRVYEAIELVAEQQASQEACSQRRKDDLLTKALGNKEHRGRTRGVGSSVPWKYGFPDYVWQYKKRTSNKAEKDARLEAKIRESIRAELTSEFDEKLESMRAKIRQEIREEQQIPQAAAAAAHKDLGSPTEKRSSCASTELAENPTSVDSAVDHITEPTSCTLTVRVMPTFTXTRVHGAQLRADCAKVQVDSVKPEYELFLLKYPPNDEVLSLGNARGTFIQWPKDLIEIRVTARSTTAPGGHPPKRPASAPSAPPAQDRHAQSYDVQLQYDTDFGEDRTEADSKAIHEPPPMKKSRKAHSSPQRITLDKPEPKGRGRGGKVQASLLAPRKLDLGKGKEETKGKEVKKKYVAPQEFQLGMPLVGDDVLATLGTACKDLHLYYMEKSNARKPSKATDILGQHNGKPFLGPTNYIVVDFKDLFDLYRLRAVDTSLLKCYSLLSWQWCQKHAPEVAFLDPQVVTVTNLQNDCQGMVNYIYDTLWSRRDKEYIMCDYNQYAHWILLVITPKXSTCHYLNSRIDKNPSRWTPIQLAIDKAWAQYVQRGGLRKTGHDTLIHKKDFPVKQQIGDQREFHVCHNMRLLYREKVKTLAEFEGTITKSLTTSFEEAMMNTYYATVMM

SEQ ID NO: 189842 - protein, 267 aa, Oryza sativa
  Clone ID: PAT_MRT4530_86311C.1.pep
MKLHVVAAILLAVAASSSPPPAAAVTYEVSNEAASTAGGQRFDREYGAGYAKQVLAAASSFTWSIFSQPSAADRRPVDAVVLAVRDVDGIASTSGNTITLGAGYVAGVTGNDFKTQVTGVLYHEVVHVWQWGLQDYGAHSWVYEGIADFVRLRAGYPAAGWVQPGQGNSWEDSYSVTARFFDYCDSVKPGFVADLNAKLKNGYNVDYFVQITGKTVQQLWQDYKAKYRQSCSHLKQHDALSPVAVRQCPIPQVNLDSHQERFSSGRH

SEQ ID NO: 189843 - protein, 818 aa, Oryza sativa
  unsure (1)..(818): unsure at all Xaa locations
  Clone ID: PAT_MRT4530_86312C.1.pep
MSQQGEPMSTTTSGSSRARTPRTGNKIPKERFRIIAVDAVGLSTSPRKIWSRFRSICGVIGRQKFSILQDDIKLVPAAEKDIAWLTFKESFDYPAEHEDRLRRAAFKVMGNAWKNFKTKLVGEFVYNPTNPDPREKFSWIMEQVWVEFHAKKSTPESRARSEAYHLLQTRNQHPHRLGTAGYAGKEKEWPREDEEAEESNTPLVFGDIPHPRARNWARARYQKNDDGTIFMPNAEDQRVYEAIKELVAEQQPSQEACSQRREDDLLTKVLGNKEHRGRTRGVGSSVPWKYGFPYYAWQYKKRTSNKAEKDAWLEANIRASIRAELTSEFDEKLESMRTKIRQEIREEQQNPQATAAAAHEELGSPTQKRSSCASTELAENPTSVDSTVDHIMEPTSCTLIVRVMPTFTVLAAEGLAYKPXQRQECMERNSGXDCAKVQVDSVKPKYELFPLKYPPNDEVLSLGNARGTFIQWPKDLIEIRVTARPNTAPGGRLPKRPTPAPSAPPAQDRHAQSYDVQLQYDTDFGEDRTEADSKAIHEPPPMKKSRKAHSSPQRITLDKPEAKRRGRGGKVQASLLAPRKLDLGKGQEETKGKEVKKKYVAPQEFRLGMPLVGDDVLAAMGTACKDLHLYYMEKSNARKPNKATDILGEHDGKPFLGPTNYIMVNFKDLFDLYRLRAVDTSLLSATPLVIVTNLQNDRQGMVNYIYDTLCAHWILLVITPKWSTCHYLNSRIDKNAYDLTPIQLAIDEAWAQYVQRGGLRKIGHDTLIHKKDFPVKQQIGDQCGFHVCHNMRLLYREKVKTLAEFEAMMNTYYAIVMM

SEQ ID NO: 189844 - protein, 157 aa, Oryza sativa
  unsure (1)..(157): unsure at all Xaa locations
  Clone ID: PAT_MRT4530_86313C.1.pep
VAGVDDSGDGGRDCGGGGDVGGGDGDGGEVRMATVRWLGPRAWETAASDRHGVVWWRGRRPAWRRKAQPMAAEADSAREAXAAEREAGLARETRPMEGGRIDARGVSGXWRRRPRCEEELPVDVAXVFGARWLAGGGRRCRGPTCRQSLCGGGTSVC

SEQ ID NO: 189845 - protein, 70 aa, Oryza sativa
  Clone ID: PAT_MRT4530_86314C.1.pep
GHNADAYILYRLVMSETGLLMLYLKAGLIKDDEIRWGVETLVWWSGITADVYLAPQSFTKFLYRESRSQD

SEQ ID NO: 189846 - protein, 89 aa, Oryza sativa
  Clone ID: PAT_MRT4530_86315C.1.pep
MLLEAADAAACRRCRHSLQPRAAAARCNLTPPDGAAASEVAAPQPDAARCRDERIWGLGFVVREERRSSDAVELGKNTDKVESGKGNME

SEQ ID NO: 189847 - protein, 239 aa, Oryza sativa
  Clone ID: PAT_MRT4530_86316C.1.pep
MAIQLFLFGCRDEGHRLASLFAGHRQVSGPPPHLLICRPPPYLLFHSPVDDDDDGTPYRLTGSVPSRSGALSRCRLLASGLRARRYRLFPLSSPPPAFGLAAIASSRRRRAPFSHWPPRSSLVAHHRTRATDVCWPRSAAWASDAARRGAVVCEADSSASSVLLDDVLAARVLVMPLDEEAIGSSTASVALLANVAKHGDLQSRLRAAVNVREIVVLSSCCSRNGGATTAIDLSDHHRH

SEQ ID NO: 189848 - protein, 60 aa, Oryza sativa
  Clone ID: PAT_MRT4530_86317C.1.pep
MRRSRVKQSPAQPAMNRGNARKSGESCAERRVGSDRGKSLRSRYRGGVYTRFSLLGEGSY

SEQ ID NO: 189849 - protein, 160 aa, Oryza sativa
  Clone ID: PAT_MRT4530_86318C.1.pep
FDRLFRVVHLIRPPARPVGSSARENINFPIRLAGDGPDNRKKKKKKKKKKKKDFSNPNEIENYKWYSTTPRWWAPWQGPGWWGWSERSTAGSDDEDDHSGAIATACAKKAPPSIAVRLEKEMAFYGDGGGTEGGDVASAGPRGSAIDSRYRSVSTRMTIK

SEQ ID NO: 189850 - protein, 126 aa, Oryza sativa
  Clone ID: PAT_MRT4530_86319C.1.pep
MPHHCQTRGRVVSVELTTPQSSPGLKLETADEEGSSRSSARTVRTSTPHSSSSPRRPLYFLVIMRGRDGFDLCMSELAGRATPRFACVDGERQLAVEEEKELQREGCTTLATTIDEVDESCFSSVG

SEQ ID NO: 189851 - protein, 56 aa, Oryza sativa
  Clone ID: PAT_MRT4530_8631C.1.pep
TNWAISQTWEAHIREQINMLFSACTIHTSEVKHHYIYQCILEKLNTISFVWNPNFA

SEQ ID NO: 189852 - protein, 129 aa, Oryza sativa
  unsure (1)..(129): unsure at all Xaa locations
  Clone ID: PAT_MRT4530_86320C.1.pep
MAAATMALSSPXMAXAAPXTSSALFGEARITMRXTAAKPXXAGXSXSPWYGADRXLYLGPLSGEPXSYLTGEFPGDYGWDTXGLSADPETFXKXRELEVIHXRWXMLGAFGCVFPEFXPEXVKFXEAFG

SEQ ID NO: 189853 - protein, 93 aa, Oryza sativa
  Clone ID: PAT_MRT4530_86321C.1.pep
MRERVAARGRGRRGAGKEVVATAPGRDWRWLTTVEVRERVRRGGDPLMPGLGSGAGKGQQGLSGLRVVVPLYFEIEGIINCVGADWLESTTLT

SEQ ID NO: 189854 - protein, 155 aa, Oryza sativa
  unsure (1)..(155): unsure at all Xaa locations
  Clone ID: PAT_MRT4530_86322C.1.pep
MAAATMALSSPVMGRAAPSTSSALFGEARITMRKTAAEAKPAGSSRSPWYGADRVLYLXPLSGEAPSYLTGEFPGDYGWDTAGLSADPETFAKNRELEVIHSRWAMLGALGCVFPELXARTGQVREGVWVKAGSQXFSEGGXDYLGNPSLIHAQS

SEQ ID NO: 189855 - protein, 116 aa, Oryza sativa
  Clone ID: PAT_MRT4530_86323C.1.pep
MAAATMALFFPVMARAAPSTFSALFGEARITMRKTAGKPKPAALSGSPWYGADRVLYLGPLFGEAASYLNGEFPGDYGWDTAGLFRDPGTFAKNPEPGGIHFRWAMLGALGCVFPE

SEQ ID NO: 189856 - protein, 125 aa, Oryza sativa
  Clone ID: PAT_MRT4530_86324C.1.pep
MAAATMALSSPVMARAAPATSSALFGEARITMRKTAAKPKPAASSGSPWYGADRVLYLGPLSGEPASYLTGEFPGDYGWDTEGLCSDPETFGKNRELEGIHSRWAMLGALGLRLPELLDRNGGKF

SEQ ID NO: 189857 - protein, 146 aa, Oryza sativa
  Clone ID: PAT_MRT4530_86325C.1.pep
INGRGTMGLSSPGMARAGPSTSSALFGEARITMRKTAAKPKPAASSGSPWYGADRVLYLGPLSGEPPSYLTGEFPGDYGWDTAGLSADPETFAKNRELEVIHSRWAMLGALGCVFPELLARNGVKFGEAVWFKAGSQIFSEGGLDY

SEQ ID NO: 189858 - protein, 43 aa, Oryza sativa
  Clone ID: PAT_MRT4530_86326C.1.pep
PRVRLMEKSTARLTTCGSRPCELYAPFYGVINGFQEYSKGRTI

SEQ ID NO: 189859 - protein, 125 aa, Oryza sativa
  Clone ID: PAT_MRT4530_86327C.1.pep
RVGRHLSEVLQLTASVAAATMALSSPVMATAVPPTSSQLLGEARITMRKTAVKPKPAATTGSPWYGADRVLYLGPLSGEPPSYLTGEFPGDYGWDTAGLSADPETFAKNRELEVIHSRRAMLGAL

SEQ ID NO: 189860 - protein, 1830 aa, Oryza sativa
  Clone ID: PAT_MRT4530_86328C.1.pep
MSPPLQAPDYKHVTEECLREWKGQPAAAAAFRVPDPVPMARFLYELCWAVVRGDLPPQKCRVALDSVEFVEEAQRGEVGSVLADIIAHLGQDVTISGEYRSRLVKMTKSFVESSLIAPRLLQERCEEEFLWEVELSKSKGQDLKAKEVRVNTRLLYQQTKFNLLREESEGYAKLVTLLCQIGSDLACQNSSSVTMSIIKSLIGHFDLDPNRVFDIVLECFELYPDNTIFCQLIPLFPKSHAAQILGFKFQYYQRLDVNSTVPPGLFRIAALLVKSGFIDLDSLYAHLLPNDDEAFEHFDSFVTRKIDEVNIHFVLLKFMFLEIFAISRHCERELYASNIGKINLAATGKDLMDDEKQEITIDLYTALEMENDIIDERAPEIEKNQKLGLLLGFLSVHDWDHAQLLFERLARLNPVEHVEICDSLFRLIERSISSVYDIIFQTHYKMPRNPVYMMDTSPSSSQSFSVDPPKEFFQMLSACGPYLHRNTQLFQKVCRVLKAYHLSAKESIRTAGVMSPDSRIEEALGSCLLPSLQLIPANPAVDMEIWGVLSLLPYETRYRLYGEWEKDTEQNPIVLAARQTAKLDTRRLLKRLAKENLKQLGRMVAKLAHANPMTVLRTIIQQVEAYRDMITPVVDAFKYLTQLEFDILQYIVIERLAQGGREKLKDDGLNLSDWLQCLASFWGHLCKKHHSVELRSLFQYLVNQLKKDTGIELVVLEELIQQMANVQYTENMTEEQVDAMAGSETLRLQASSLFGSTRNSKVLTKSTNKLRDSLLPKEEPKLAIPLLLLIAQHRSKIIINADATYIKMVSEQFDRCHGILLQYVEFLSTAVTPTTYVQLIPPLEDLINKYHIEPDVAFLIYRPVMRLFKSTNGGDTYWPLDDNEEGESVSCDDLILHPDTSHKSIISVDIIRMKKVKARQWMTLGSLEGWWSDLLSTVRNTFPAKTWNGLSPDLYATFWGLTLYDLHFPKDRYDAEIKKLHENLKQLEDNSDNSSIAISRRKKDKERIQDLLDKLNNESHKHQQHIASVLQRLGREKVKWLNSSPDALKINMEFFQRCIFPRCVFSMQDAVYCAMFVQTLHSLETPFFNTVNHIDVFICKTLQPMICCCTEYEAGRLGRFLHETLKMAYRWKSDESLYERECGNKPGFAVYIRYPNSQRVSYSQFVRVHWKWSGRITKVLNQCMESKEYMEIRNALIVLTKISSIFPVIRKSGVNLEKRVAKLKGDEREDLKVLATGVAAALAARKSSWLSEEEFGMGLLDLKQGPAKIVPGNQSADPLTAKDQSVRAKSIEGRHERSEAAMKPDAQQKKNALAANGSDNQMPSSSAQGKVSGIIRGSDEPPKLLSDEGVKVSKPTAESETRVPQKRVAHNAGKVSKHDMVKEDTKSGKSTNRGVTQQGSSVPVDKEVLSQAADGVQDTTSNSLAASNGNLHTAPRKVSASSQKSTLLATHTGGAANSSGESTDLIDSNMKQQKRFVPTEEQDRGTKWRKGESEGRDGDFTEHTDKDRNLDSRLVDKFRPMDHDKSASEEQILSRPEKSKEKADDKYDRDPREKADRTERRRGEDIERPTDKSLERRERSIERMQERGTDRAPDKGREDRNKEERNKVKHAEPSIDRAHPSDERFRGQSLPPPPPLPASFVPQSVGNRRDEDTDRRGGSTRHNQRSSPRRDDKEKWHLEDNAASLQDDGKHRREEDIRDRKREDRDVSSSKVDDRDRDKSSIVKDESDPNSASKRRKIARDQSGLEAGEYAPSAPQLPSHGTSSSQVFETRERERKGAISQHRISHADDLPRIHGKDSSKTSRREADQVHEREWEEEKRSRTETKRKHRK

SEQ ID NO: 189861 - protein, 34 aa, Oryza sativa
  Clone ID: PAT_MRT4530_86329C.1.pep
ESLQVSSIVIQNQEDPGERDIHGRANIPSRYRLL

SEQ ID NO: 189862 - protein, 394 aa, Oryza sativa
  unsure (1)..(394): unsure at all Xaa locations
  Clone ID: PAT_MRT4530_8632C.1.pep
VSSCAHLSTERGRDRTLRITPSSQAHHTSGKSLSADVIKEAGADRRAPHVSGSRESVHRGPGPRGGAAEHGHGSGWPGRATARGGAASCGDGRCTRESGGEARQGDPGGPGERGGGKPAGRPNGSGARPGGRRRRPPARQRXHGRQRREARRERRSSPRTRRRGAGKGGGGGGWSLASVLLGMKAERRPGGVPQAGTGGRRPEGPGXDGGEVRRGREGSQRHESLVGGENGRRMLTGARGTVFRRDPGREKRRPXALRSERRLESAAAVDGGGASEAGRGNGADAGVRHDAAKPLVAVVRNDGGGSGCGDRLEGRRPAAGRGGGIELERGRNRPETWEEREMLEAATWPDFXGRAGGNRADVGDNRVHARAGEGVPQEKPRRGRXWRPWRRLGI

SEQ ID NO: 189863 - protein, 93 aa, Oryza sativa
  unsure (1)..(93): unsure at all Xaa locations
  Clone ID: PAT_MRT4530_86330C.1.pep
ILRLISAVIKSVLHYTHRSKQIIHHNIRARHKMLENIGVHDGVKVGVXDLDAPRLEPRAHMLVRQRQRRRHRLHGGASDELLLEHDLQHADEW

SEQ ID NO: 189864 - protein, 357 aa, Oryza sativa
  unsure (1)..(357): unsure at all Xaa locations
  Clone ID: PAT_MRT4530_86331C.1.pep
NDLRWNISRPQGFEAVMRVRCRRGXPSGDFFRSFXKRVPSHLVAFPIDSDKTIMVTFKHDDKLQENSECGFQCALLYTTVYGQRRIRVMNLSLPCTNMLSNLFRYADLETQFTCFLKQAANGIPTSTLLHLREEVTNTCINILQSYRKYCASVSSSGQLILPEALKLLPLYTLALIKSIGLRNEGRLDDRSYWISLVSSVSVLLAVPLVFPRLIPIHDLTSRGDDESLIPSPLMLNSENIREDGVYLLENGEDGLIYVGNVVEPTILEQIFGVSSLAALPSQAVLEQFDNELSRKVNEVINEIRRQRCSYLRLRLCRRGEPSGDFFRSFLTEDKAPGGLSYVEFLVHVHRQIQSKMT

SEQ ID NO: 189865 - protein, 145 aa, Oryza sativa
  unsure (1)..(145): unsure at all Xaa locations
  Clone ID: PAT_MRT4530_86332C.1.pep
FCVVDGKASCMMGAYTLINGVPACASSDLLTKTVRGEWKLDGYTASDCDAVAILHKSEHFTRTAEEAVAVALKAGLDINCGVYMQQNAASALQQGKMTEKDVDKALKNLFAIRMRLGHFDGDPRGNKLYGRLSAXDVCTPVHKAL

SEQ ID NO: 189866 - protein, 82 aa, Oryza sativa
  unsure (1)..(82): unsure at all Xaa locations
  Clone ID: PAT_MRT4530_86333C.1.pep
KKAKKKGCVYIALKKNLNFMVTHIEEKSSIFGVFPIYFLENAYWIXKKKVKRFKHKKGNELGAFTPLQKKSYQNFYNVGESF

SEQ ID NO: 189867 - protein, 73 aa, Oryza sativa
  Clone ID: PAT_MRT4530_86334C.1.pep
VAEQAVGLLVTPSGWSCSSALRSGGPRGHRWAARAAMAAAAAAAAASSSTAAAAATLAIAVYASSRAVIFFLI

SEQ ID NO: 189868 - protein, 826 aa, Oryza sativa
  Clone ID: PAT_MRT4530_86335C.1.pep
NPSAAANSYFAATATETSTAATEPAAAATEPAASTDRRRPPPSPAPPPPSPPPPPSSSLEPLHRPDRCRPFSSSPPASSPTHVADPHRARRRPPGADLPDWHIHRPAPPSTEPGAAAANSSFAEPAAAATETAASTEPNAASTDRRHPPPSPTPPPPPSPTGHPQKFSILQDDIKLVPAAEKDIAWLTFKESFDYPAEHEDRLRRAAFKVMGNAWKNFKTKLVGEFVYNPANPDPREKFPSITEQVWEEFHAKKSTSESRARSEAYRLLQTRNQHPHRLGTFGYAGKEEEWQREDEEAEESCTPLVFGDIPHPRARNWARARYQKNDDGTIFMPNAEYQRVYEAIKELVAEQQTSQEACSQRREDDLLMKALGNKEHRGRTRGVGSSVPWKYGFPDYAWQYKKQTSNKAEKDAHLEAKIRASIRAELTSEFDEKLESMRAKIRQEIREEQQNPQAAAAAAHEELGSPTQKRSSCASTELAENPTSVDSAVDHITEPTSCTLTVRVMPTFTVPATEGLAYKPTPETRVHGAQLRADCAKVQVDSVKPEYKLFPLKYPPNDEVLSLGNARGTFIQWPKDLIEIRVTARPTTAPGGCPPKRPASAPSAPPAQDRHAQSYDASLLAPRKLDLGKGQEETKGKEVKKKYVAPQEFQLGMPLVGDDVLAAMGTACKDLHLYYMEKSNARKLSKATDILGEHDEKPFLGPTNYIVVDFKDLFDLYRLRAVDTSLLKCYSLYVLSPNSIWKTGHDTLIHKKDFPVKQQIGDQCGFHVCHNMRLLYREKVKTLVEFEGTITKSLPTSFEEVREEIASFILREIINPKGMFRLKLK

SEQ ID NO: 189869 - protein, 938 aa, Oryza sativa
  Clone ID: PAT_MRT4530_86336C.1.pep
MSTTTSGSSRARTPRTGNKIPKERFRITAVDAVGLPASPKKILSRFRSICGVIGRQKFNILQDDIKLVPAAEKDIAWLTFKESFDYPAEHEDRLRWAAFKVMGNAWKNFKTKLVGEFVYNPANLDPREKFPWITEQVWEEFHTKKSTPESRSSSEAYRLLQTKNQHPHRLGTAGYAGKEEEWQREDEEAEESNTPLVFGDIPHPRARNWARARYQKKDDGTIFMPNPEDQRVYEAIKELVAEQQASQEACSQRYEDDLLTKVLGNKEHRGRTRGVGSSIPWKYGFPDYAWQYKKWTSNKAEKDARLEAKIRALIRAELTSEFDEKLESMRAKIRQEIREEQQNPQAAAAGAHEELGSPTQKRSSCTSTEVAENPTSVDSAIDHITEPTSCTLTVRVMPTFTVPAAEGLAYKPTPETRVHGAQLRSDCAKVQVDSVKLEYELFPLKYPPNDEVLSLGNARGTFIQWPKDLIEIRITLQYDTDFWEDRTEADSKAIHEPPPMKKSRKAHSSPQRITLDKPEAKGRGRGGKVQSSLLAPRKLDLGKGQEEAKGKEVKKKYVAPQEFQLGMPLVGDDVLAAMGTACKDLHAYYMEKSNARKPNKATNILGEHDGKPFLGPTNYIVVDFKDLFDLYRLRAVDTSLLKCYSFTHWILLVITPKWSTCHYLNSRIDKNAYDWTPIQLAIDEAWVQYVQRGGLRKTGHDTLIHKKDFPVKQQIGDQCGFHVCHNMRLLYREKVKTLAEFEGTITKSLPTSFEEAMINTYYATVMMFRRTIRRGGGHRASRTRWPLPGDASGGRRASRVRWPYLFEASGGQVRRREAMDALPGAQHGRRRPQSLHGQGRRRPRRGLAGESTVLRARSYGCIRVFLILSLLLLAVKVAAYLQGWHLEEVVSLFAIDGLFAASYAWWMRLRLDYLASPLQFLTNACVVLFMVQSIDHEG

SEQ ID NO: 189870 - protein, 600 aa, Oryza sativa
  Clone ID: PAT_MRT4530_86337C.1.pep
MSTTTSGSSRARTPRTGNKIPKERFRITAVDAVGLPTSPKKILSRFRSICGVIGRQKFSILQDDIKLMPTAKKDIAWLTFKESFDYPVEHEDRLRRAAFKVMGNAWKNFKTKLVGEFIYNPANPDPREKFPWITEQREDEEAEESNTPLVFGDIPHPRVRNWARAKYQKKDDGTIFMPNPEDQRVYEAIKELVADQQALQEAFSQRREDDLLTKALGNKEHRGRTRGIGSSVPWKYGFPDYAWQYKKRTSNKAEKDARLEAKIWASIRAELTSEFDEKLESMRAKIRQEIREEQQNPQAAAAAAHEELGSPTQKRSSCASTEVAENPTSVDNAIDHIMEPTSCTLTVRVMPTFTVPAAEGLAYKPTPETRVLSLGNARGTFIQWPKDLIEIRVTARPTTAAGGRPPKRPASAPLAPPAQDRHAQSYDVQLQYDTDFGEDRTEADSKAIHEPPPMKKSRKAHSSPQRITLDKPEAKGRGREGKVQSSLLAPRKLDLGKGQEETKGKEVKKKYIAPQEFQLGMPLVGDDVLAAMSTACKDLHAYYMEKSNAMKPNKATDILGEHDGKPFLGPTNYIVVDFKDLFDLYRLRAVDTSLLKCYSL

SEQ ID NO: 189871 - protein, 76 aa, Oryza sativa
  Clone ID: PAT_MRT4530_86338C.1.pep
NCICLMFVPSGRLIYLKKFFWEIFRHKFVVLCPGMRHGPTCILGEGIIQLDRRGEEKKKSWLAHPFCSKPEDFRRF

SEQ ID NO: 189872 - protein, 675 aa, Oryza sativa
  Clone ID: PAT_MRT4530_86339C.1.pep
MEAKVATTVLVLLLLTLGGEVAAAKMCHDRSQTFKGMCFRTSNCNTSCTNEGYTGGHCTTFRRRCVCTKECGGDSPPDCKNENMFDSGEDVHGHLIQRGFMEGYTCWVKHGKQESGSGAAADRSGAHNQEDENEHDMFIPSPLGGEMVDVDHDLLQDMLRDVEDPAQNERDGMKFSRLAMLPIENTLPETTYEAKQPAPKDLSGDEVHNMVKDISNEFGKKRKRNKTKEKETGKVYLPSACHTLSKDEKIAMLSCLKDIKVPSGYSARISKYVKLDDLKLVGMKPHDCHVLITQILPVAIRCILPPKVRHTIQRLCAFFNAIGQKVIDPEDLDGLQTDIVNTLCHLEMFFPLSFFDIMVHLPVHLVKQTKLCGPAFLREMWPFERYMGVLKSYVRNRAKPEGSIIEGYTTEEAIEFCVNYMSDADPIGVPVSRHEGRLSGVGTIGRKRIRPDQASYAQAHYAVLQHMAEVGPYFEEHLAKIRDENLGRSDAWINREHNSRFNEWFKNRVTMSTDGPNETVQLLGMGPSWTIDTWQGYDINGYTFYTVKQDDKSIVQNSGVRIDAFQDQVGSNTYYGRIEEIWELNYVKFKVPLFRCRWVNLRTGVKADKEGFTLVDLSKVGYADEPFVLAKQVEQIFYIKDPSNKKMHIVRDGKRRIVGVDNVVDEEECNHNLHT

SEQ ID NO: 189873 - protein, 246 aa, Oryza sativa
  unsure (1)..(246): unsure at all Xaa locations
  Clone ID: PAT_MRT4530_8633C.1.pep
RATGSPLSCLGESGSDRGRRRARPAPSRPSLPGPRGGAAEHGHGSGRPGRATARGGAAXPNGSGARPGGRRWRPPARQRXHGRQRREARRERRSSPRTRRRGEGKGGGXSASALLGMKAERRPGGVPXARTGRRRPEGPXARGTVFRRDPGREKRRPRCSSALXSERRRQRDLGWLGAAESAASVEGGGARGDGTSEVGRGNGADAGVWHDAAKPLVAVARNDGGGSGRGRGSRAGEAATWEDLVA

SEQ ID NO: 189874 - protein, 148 aa, Oryza sativa
  unsure (1)..(148): unsure at all Xaa locations
  Clone ID: PAT_MRT4530_86340C.1.pep
RLLRTLAPPPTPTSPPXPPSPPPPLRPPPPPPSPPPPPPSLYTNWRRPSSSSSPTPDAXPPDAXPPPSPAPPPRTPPSPSPPPPPPSPPPPPPTGDXPPPSPVLPPRTPPSPSPAPPPPSPAPPPPSPPGRPQVSPPSRHPLLPACGD

SEQ ID NO: 189875 - protein, 291 aa, Oryza sativa
  Clone ID: PAT_MRT4530_86341C.1.pep
MATTASFSPPLASPSRWSPPSRRLRLRVRAGSSLKEWGDFEDAVRSRDLPRALRFLQSVDVETPPAAAAAGAAVARVALPVPPGRDWEVLDACIDADDMRLVGRAYQFLADRGVLANFGKCKNIVLEGPREVTPTVLKEMTGLEAYLMGCPIRGVILDPFVALRMGIQGQAGTQFWDEKMEKELAEGHLSSTAFDRYCMILFAGIAAEALVYGEAEGGENDENLFRSLCILLDPPLSVAQMANRARWSVMQSYNLLKWHKKAHRAAVKALESGHSLSTVIRRIEEAISSDR

SEQ ID NO: 189876 - protein, 102 aa, Oryza sativa
  Clone ID: PAT_MRT4530_86342C.1.pep
MEKAQDTDDVYRFGPLRSICNGCCPSDPSDGTAHTYLHSAGSRCNVGTRLSSGDITSVRPVTDRTNVPSPGASTLAPARDECLETLILTGRGEACVRSPVAT

SEQ ID NO: 189877 - protein, 42 aa, Oryza sativa
  Clone ID: PAT_MRT4530_86343C.1.pep
CLSMNVISDSLICAPKMAHMAAMSASSKNTTLLAIDDQSDNH

SEQ ID NO: 189878 - protein, 138 aa, Oryza sativa
  unsure (1)..(138): unsure at all Xaa locations
  Clone ID: PAT_MRT4530_86344C.1.pep
QIGSKIFLSPATVSHLLRTLAPPPTPPSPPXPPSPPPPPRPPLPPLSPSPPLPSLPPPPSPPPPPPSLPLQPPSLYTDRRWPSSSSPPASAPPPLTPPSPSPPLAPSPPPPPPTXQRPPPSPPPPPPSPPRPTLCESS

SEQ ID NO: 189879 - protein, 925 aa, Oryza sativa
  Clone ID: PAT_MRT4530_86345C.1.pep
MSFLIFVAYSSPTPDAAHPTPTCPTANSSIAEPAAAATEPAASTEPGTASTDRRRPPPSPAPPPLSPPGRPQTMSQRGEPMSTTTSGSSRARTPRTGNKIPKERFRITAVDAVVLPTSPRKILCRFRSICGVIGRQKFSILQDDIKLVPAAEKDIAWLMFKESFDYPAEHEDRLRWAAFKVMGNAWKNFKTKLVGEFVYNPANPDPREKFPWITEQVWEEFHAKKSTPESKASSEAYRLLQTKNQHPHRLGTTGYAGKEEEWQREDEEAEESNTPLVFGDIPHPRARNWARARYQKNDDGTIFMPNPEDQRVYKAIELVAEQQASQEACSQRCEDDLLTKALGNKEHRGRTQGVGSSVPWKYGFPDYAWQYKKRTSNKAEKDARLEAKIRESIRAELTSEFDEKLESMRAKIRKEIREEQQNPQAAAATTHEELGSPTQKHSSCASTELAENPTSVDSAVDHITEPTSCTLTVRVMPTFMRQECMERNSGGDCAKVQVDSVKPEYELFPLKYPPNDEVLSLGNARGTFIQWPKDLIEIRVTARPTTTPGGRPPKRPASAPLAPLAQDRHAQSYDVQLQYDMDFGEDRTEADSKAIHEPPQMKKSRKAHSSPQRITLDKPEAKGRGRGGKVQASLLAPRKLDLDKGQEETKGKEVKKKYVALQEFQLGMPLVGDDVLAAMGTACKDLHAYYMEKSNAKKTNKATDILGEHDGKPFLGPTNYIVIDFKDLFDLYRLRAVDTCLLKCYSLLSWQWCKKNTPEVAFLDPQVVTVTNLQNDRQGMVNYIYDTLWTRRDKEYIMCAYNQYAHWILLVITPKWSTCHYLNSRIDKNAYDWTPIQLAIDEAWAQYVQRGGLRKSGHDTLIHKKDFPMKQQIGDQCGFHVCHNMRLLYREKVKTLAEFEGTITKSLPTSFEEAMMNTYYATVMM

SEQ ID NO: 189880 - protein, 443 aa, Oryza sativa
  Clone ID: PAT_MRT4530_86346C.1.pep
MAAAASSSLLAAASSSSRAAAVSARRAPSASPAAAASLPSPSRASCAPPLRASAARTLRSRVVASAAPAMQPPPASRVSTVVDVDLGDRSYPIYIGAGLLDEPDLLQRHVHGKRVLVVTNTTVAPLYLEKVTWALTHNNPNVSVESVILPDGEKYKDMGTLMKVFDKAVESRLDRRCTFVALGGGVIGDMCGFAAAAFLRGVNFIQIPTTLMAQVDSSVGGKTGINHPLGKNLIGAFYQPQCVLIDTETLNTLPDRELASGIAEVVKYGLIRDAPFFEWQEKNMPALLAREPSALAYAIKRSCENKAEVVAQDEKESGLRATLNLGHTFGHAIETGTGYGAWLHGEAVAAGTVMAADMSHRLGWIDESIKKRAIDILEKAKLPITPPEAMTGEKFKSIMAVDKKVADGLLRLILLKGPLGSCVFTGDYDRNALDETLRAFCDC

SEQ ID NO: 189881 - protein, 997 aa, Oryza sativa
  unsure (1)..(997): unsure at all Xaa locations
  Clone ID: PAT_MRT4530_86347C.1.pep
CPCADCKNENMFDSEGXIHGHLIQQGFMKGYTCWVKHGEQESGSGAAANRSGAHNQKDEDEHDIFIPSPLDGEMVDVDHDLLQDMLRDVEDLAQNERDSMKFSRLVSDSETPLYAGCNAKHTKLSVTLDLMKLKASSGWTDKSITYLLGILKAMLPAENTLPETTYKAKQVPCPLGLEVCRIHACPNDCILYHKQYADLDACPVCKASRYKRKKSADEGKKSKRGCPAKVVWYLPIIDRLESLPTQTKRSXVHWHATKRRNDGMLRQLADSIEWRNIDQKHKDFAVDPRNMRICLCTDGMNPFGDMSSTHSTWPVLIANYNLPPXLCFKWKYIMLFLLIQGPRQPGNDIDVFLEPVIDNLEILWKEGVETWDAYGQENFKLRVLLFCTINDYPALGNLSGQTIKGKKXICSDCKEHTRSRWLKKSRKMVYMGHRRWLPLRHAFRRKKKIFNGKRELQPAPKDLSXDEVHNMVKDISNEFGKKRKRSKTKEKEKNVCESLVGLMLNIPRKTKDGLNARLDLQDMNIRSELQPIQDAETGRLYLPPACHTLSKDEKIAMLSCLKDIKVPSGYSARISKYVKLDDLKLVGMKCHDCHVLITQILPVAIRAILPPKVCHTIQRLCAFFNAIGQKVIDPEDLYGLQTDIVNTLCHLXMFFPLSFFDIMVHLPVHRVKQTKLCGPAFLREMWPFERYMGVLKSYIRNRAKPEGSIIEGYTTEEAIEFCINYMSDADPIGVPMARHEGRLSGVGTIGRKRIRPDQASYAQAHYVVLQHMAEVGPYFEEHLAKIRDENLGRFDTWINREHNSRFNEWFKNRVTMSTDVPNETTVDTWQGYDINGYTFYTVKQDDKSTVQNNGVCIDAFQDQVGSNTNYGRIEEIWELNYVKFKVPLFRCRWVNLRTGVKADKEGFTLVDLSRVGYADEPFVLAKQVEHIFYIKDPSNKKMHIMRDGKRRIVGVDNVIDEEEYNQNLHVRPHIDLDDDPQEPVAYARSDHTEGITL

SEQ ID NO: 189882 - protein, 678 aa, Oryza sativa
  Clone ID: PAT_MRT4530_86348C.1.pep
MKGYTCWVKYGEQESGSGAAADRSGAHNQKDEDEHDMFIPSPLGGEMVDVDHDLLQDMLCDIKDPAQNERDGMKFSRLVSDSETPLYAGCKAKHTKLSVTLDLMKLKASSGWTDKSFTDLLGILKAILPIENTLPETTYEAKQVLGPLGLEVRRIHACPNDCILYHKQYADLDACPVCKASRYKRKKSADEGNKSKRGGPAKVVWYLPIIDRFKRIFANPNEAKLVHWHTTERRNDGLRQPGNDIDVFLEPVIDDLEILWKEGVESWDAYGQENFKLRVLLFCTINNYPALDLSGDEVHNMVKDISNEFGKKRKRSKTKEKACHTLSKDEKIAMLSCLKDIKVPSGYSARISKYVKLDDLKLVGMKSHDCHVLITQILPVAIRGFLPPKVHHTIQRLCAFFNAIGQKVIDPEDLDGLQTDIVNTLCHLEMFFPLSFFDIMVHLPVHLVKQTKLCGLAFLREMWPFEREGCQLHNSRFNEWFKNCVTMSTDIPNETVQLLGMGPTWTVDTWQGYDINGYTFYTVKQDDKSRVQSSGVRIDAFQDQIGSNTYYGRIEEIWELYYVKFKVPLFHCRWVNIRTGVKADKEGLTLVDLSKVGYADEPFVLAKQIEQIFYIKDPSNKKMHIVRDGKRRIVGVDNIVDEEEYNRNLHVRPHIDLDDDPQEPVAYARSDHMEGITL

SEQ ID NO: 189883 - protein, 137 aa, Oryza sativa
  Clone ID: PAT_MRT4530_86349C.1.pep
RRGSTPAPSPGTPTRSQPARGVSPWAAAPAPSPSPCRLHRSWLPPCSQRRWTSWHYSCSPTRRRSPPRMLGTGGGGGALFIGCPGSRARRRKSIFLPWPRRRRRRRWLSRFLRRPRRSVCLRMPTHTKTRPRTRGRT

SEQ ID NO: 189884 - protein, 188 aa, Oryza sativa
  Clone ID: PAT_MRT4530_8634C.1.pep
MGCVLVVAMVVYLMFRPNLLHATAAGAELSTFSLALKEWTLSYNLSVGVDLTRHNARLALRYHSIAADAYYHDQRFAHALLPDFSQPASTNTTRITPSFQGRHQLLGGLAAAAFRREDTEGIYSIHVTMAAKTEIKLTPSAIIRLPGPNIKLDCPLRLRLHPSPSNATTTTNNHNPHHFHPTTCHISY

SEQ ID NO: 189885 - protein, 57 aa, Oryza sativa
  Clone ID: PAT_MRT4530_86350C.1.pep
LSLASVNGVLGDKMPVHMLKVVRRAVDHQEAGVGIEPHVQPNSQLALGTIGMNASPL

SEQ ID NO: 189886 - protein, 158 aa, Oryza sativa
  unsure (1)..(158): unsure at all Xaa locations
  Clone ID: PAT_MRT4530_86351C.1.pep
LHLYNNAGISTPLRFDKDDTDGSKSWKHTINVDLIAVVEGTQLAIKAMKAKQKPGVIINMGSAAGLYPMPVDPIYAASKAGVVLFTRSLAYYRRQGIRINVLCPEFIKTDLAEAIDASILESIGGYMSMDMLLKGAFALIXAASSAGXCLWFAPRWGF

SEQ ID NO: 189887 - protein, 375 aa, Oryza sativa
  Clone ID: PAT_MRT4530_86352C.1.pep
MPCLFTILPAPLCPISLSLSLSLSEISERFFRVNKQALRPLGSLDQWMQESFMAVRLDPGYLRIGVTPPQFSTSSPSPPPSPPHQLISTSPNWTIDVSDARTIKVTNISMSATADNIKEFFSFSGEVEYVEMRRESETSQVAYVTFKEFHGADTALLLSGASISEASVNITPVEDYVLPPEAYFYRQDTGSPRTPTEAAVKKAEEVVSTMLAKGFVLSKDALKRARSFDDRHQLLSTASARVASLDRRFGLSDKFSAGTAAARGAVRGVDERFQVSELARVAVTAAEQGAASVVASSPYASRGAAWVSAAVGAVARAAFDVGAMTKEKVERAEEEEHGAGAAGDVAHARVQVDAPASPAHAAREQPDGHYKNKMM

SEQ ID NO: 189888 - protein, 502 aa, Oryza sativa
  Clone ID: PAT_MRT4530_86353C.1.pep
MASITSELLFFLPFILLALLTFYTTTVAKCHGGHWWRGGTTPAKRKRMNLPPGAAGWPLVGETFGYLRAHPATSVGRFMEQHIARYGKIYRSSLFGERTVVSADAGLNRYILQNEGRLFECSYPRSIGGILGKWSMLVLVGDPHREMRAISLNFLSSVRLRAVLLPEVERHTLLVLRAWPPSSTFSAQHQAKKFTFNLMAKNIMSMDPGEEETERLRREYITFMKGVVSAPLNLPGTPYWKALKSRAAILGVIERKMEERVEKLSKEDASVEQDDLLGWALKQSNLSKEQILDLLLSLLFAGHETSSMALALAIFFLEGCPKAVQELREEHLGIARRQRLRGECKLSWEDYKEMVFTQCVINETLRLGNVVRFLHRKVIKDVHYKGYDIPSGWKILPVLAAVHLDSSLYEDPQRFNPWRWKSSGSSGGLAQSSSFMPYGGGTRLCAGSELAKLEMAVFLHHLVLNFRWELAEPDQAFVFPFVDFPKGLPIRVHRIAQDDEQE

SEQ ID NO: 189889 - protein, 156 aa, Oryza sativa
  Clone ID: PAT_MRT4530_86354C.1.pep
HTRSLSPARQCFPSMNSLVCMSLPLPPPHAPPPPSAADCPRLHRASHCPRQNSDDPLALGAASRPSAVVVTRDPSSLAAATPSVRSPRAPPTCATSPSSCHRYAARRFQVAPQQVVDDPPPSPEIPSPSPEIPFPGADPGTKIWGRGTQLHSFLNL

SEQ ID NO: 189890 - protein, 58 aa, Oryza sativa
  Clone ID: PAT_MRT4530_86355C.1.pep
YTNQYYNICLTNGLAQLMKVLTTIYSSSRLTSISIHNLKGEICHALLDPKNITSNLYH

SEQ ID NO: 189891 - protein, 315 aa, Oryza sativa
  Clone ID: PAT_MRT4530_86356C.1.pep
MAEVGVIPVLPEPGPTTISAPRHTAADARGAPETESYNRAVQRLKDGSGKGSATEADARCGCSRATSRWCRSYANFSADSAESYGNMMKNKVLGTDGSDGDMPAAQMPAFAYLHLNHDYGDDDKMFFCDDDQRLVMRTDTYIVPSLFLVTTFQDELDALFPERGAVFHYLGRYLFPQANHTAVLQRVPRAGVAAAGRRPDCGSQALFCSSAAAAEDDTLTCAKPWRDILQILMSWLSINYFLESYVSLNRAKAALKGSYNPRGQEGWIWRSIESSLNQVAKEPKRRMGKDTGCARRGNRSRRCMEIRGGEGGEGD

SEQ ID NO: 189892 - protein, 97 aa, Oryza sativa
  unsure (1)..(97): unsure at all Xaa locations
  Clone ID: PAT_MRT4530_86357C.1.pep
MWASRHGMAQARPCLGQGLSGRHGPTDAPSRAVPAHSLYFVCRAWPIGPSCRAGPTVPGQPSVPIGSPRSGRAXPKAKKPCRGPGLRASGLMAIYRS

SEQ ID NO: 189893 - protein, 52 aa, Oryza sativa
  Clone ID: PAT_MRT4530_86358C.1.pep
RTRGFRNKVLAMRIHCSLCQTGFPTGMKRNKSSSRPIVVILLSVGGLAQTIF

SEQ ID NO: 189894 - protein, 801 aa, Oryza sativa
  Clone ID: PAT_MRT4530_86359C.1.pep
MQYLEKNKTVSQFSYIENVAARRTHAATTSGITSSWTRRTQNKIPKEVYTITEVDDLGFLMAPAKAVKKFAMICRVLGRRNFTILKDHIDLTTLVTDYVLNPAQPEPFRKYPFISRVVWEEFHTTKSTPESRAKSEAYRRLQAKNVHPHRLGTGGYAGKQHEWVKEDEATAESNTPPVLGDIPTTRARNGARARVKKNSDETLTFPNPEDQAVYQKIVKMTAERQASEEVCSQKREDDSLTKALGSEEHRGRTRGIGFNVPWKFGFPQYAWQYRKHRLSKAQKDARLKEQLRDEIRNELQEEFNSKLLQVEARVEARLRESEPAAATIIETIPTQRCKSCASTGAAAQETPDPNAVDHISGTISCTLVVRVTKDFAIPAAEGLAFKPTPETRVHGGQLLAGHAKVQVDMVKPDWVGYTLPLPPNDEVLTLGAARGTFIQWPKQNIQINITPRPAPSARPAAPPHPPPALVSAPPAVEKGDQEFQLQYDTDFGDDGQEVSSRAHLPPVSTKRKRAASSPPKLGSRKRATGRGGGRGNVEGPLLAPKKLDLGKAPSAPPKEFTLGMPLVGDDALSKMGPAYKELHGYYMERSNARRKHRETSMTGQHDRQPFLGPEAFIGVDFQDLWDLHRVRAVDTNLLKCYSLLTWKHVHRNAPHVALLDPSVINETTMNYDRANMVEYIKDCLWSRQDKDFIMCAYSQHRHWILLVIVPKWSLVYYFNSNIKKEIYDWSTIETVLNDAWDQYVAKGGRHKEGHPTLGHKKDFPIRQQVGDQCGFHVCHNMRSLADKVTLLDLERAWLAKA

SEQ ID NO: 189895 - protein, 287 aa, Oryza sativa
  unsure (1)..(287): unsure at all Xaa locations
  Clone ID: PAT_MRT4530_8635C.1.pep
MDGPPPVHGLDGPDRPRPIGRLGTARRRGRGRRRGAGRGGGGSSASALLGMKAERRPGGVPXAGTGRRRPEGPXARGTVFRRDPGREKRRPRCSSALRSERQRQRDLGWLXSGAKRRLESVASVQGGGARGDGASEAGRGNGADAGRWHDAAKPLVAVARNDGGGSGCGDRVGDDRVHARAGEGVARERRRRGRIWRPWRRLVRREVGEEDDRWGLGSHRAEPRAAPPARRVAATACRAARRPSRRRRCLAPLARHRAPSLLRLVAVAARRSPVATSSPTRRPSRRH

SEQ ID NO: 189896 - protein, 371 aa, Oryza sativa
  Clone ID: PAT_MRT4530_86360C.1.pep
MPPAAAGYSAGMKRPLAAVAPSCDVDGRNAAAAAAAKRRERRREAKRARAAAAAATGALVPYVAPIDARPIRAVPLAAAAAARRKEADDQAAAAPSAEPAWIRKILLERLGMTYDQPVVFIARKTVTRTDLDPHQNRFRLPIFGVERRLLPMLTVDEAKEANLVENDEEKGVPRPRPRPKKKRRTEKGSVVIAATAAADGELQKPQGTTPETNVEGEDQAPPRPKPVPKKKKRRTEKGSVDVADGEQQQQQKGREKEPRKKAQGKDHGGVPVTVLHLSGAMKELRLVLWDSSHGTIIKGTGYMDFIAGTGLREHDAVQIWAFKRRGFRLFGATVPESRFYLVIVGGSWRPLEAPPPQCMLPPSHAPVEVCA

SEQ ID NO: 189897 - protein, 109 aa, Oryza sativa
  Clone ID: PAT_MRT4530_86361C.1.pep
RNARPGPTHPFRCNPHSHTGREGSFWLREVDAHTSACRWRRCPPKKGFADARNCYASHVRHHLLYIVYERGRTNSPTLRWILRLVQPTQVKIRSLAVVMAVWPKTAVTV

SEQ ID NO: 189898 - protein, 84 aa, Oryza sativa
  Clone ID: PAT_MRT4530_86362C.1.pep
MARGCGRMTGHSEVEVDDGWSASPVATIASSRMVFTTIELLVHPASADATTVTILSLLPIFPLSSPPLLLPSGARMWRPMARRT

SEQ ID NO: 189899 - protein, 69 aa, Oryza sativa
  Clone ID: PAT_MRT4530_86363C.1.pep
FPPILPRGGSHPGPLIDSPAGGQSLGFCLAVRFLSLVLSAKSFVNFFPQNKPGYVSFCPLLGGICFGPI

SEQ ID NO: 189900 - protein, 186 aa, Oryza sativa
  Clone ID: PAT_MRT4530_86364C.1.pep
ARGGTRSNISGQQTSTAQGLYSGPNTARFYPPFHTTNSKEGSISYPNDHKPQPEARNVTENSRLSGREPTVTDTASDSFLNPESSTNPHEQELMGCVKGPTKEAYTSDAEAHTNTTNGEETSVVNNSSEGYGVIKKSSVEETNVTNFSSASTTVNDETLQSDSSEIVDRSQLLPSYESSESKDSWE

SEQ ID NO: 189901 - protein, 240 aa, Oryza sativa
  unsure (1)..(240): unsure at all Xaa locations
  Clone ID: PAT_MRT4530_86365C.1.pep
RGLIMDKDKGNLVKADRFGYIKRAMHGTQMLSTSAVSEIYGRELVDLRKESRWEFLNTLFSVSEAVMFMQMVDKLDQGLVPAELGPLDYKGLYNAVSRALFRAHVEGQLKSEIMAEPERFVEPDPELPLALLDQKEAGKRLLLITNSDYHYTNKMMNHAFNRFLPNDMAWRDLFEMVIVSARKPEXFQISHPLYEVVTNDGLMRPCFKANSGGLYSGGSAQMVEKSLDIHGDEILYVGGS

SEQ ID NO: 189902 - protein, 159 aa, Oryza sativa
  unsure (1)..(159): unsure at all Xaa locations
  Clone ID: PAT_MRT4530_86366C.1.pep
KGKRPQDLPPAPSPDAGTEEPQRGASRARGTGEKNTRKGRPLGXGQAPFPHWKRAFTGGEGKTFSGRGXPEPPGRAGPPPERGPRPEGGKAGGKKGAGGQSLGAQGRGGKSPGPPGSHRGYPGGGLTGAKETPGRPQGGGVPGATGRPPPQNGQHSVSP

SEQ ID NO: 189903 - protein, 221 aa, Oryza sativa
  Clone ID: PAT_MRT4530_86367C.1.pep
MAAAAAVADEVTVLHGGVVVSMDGGFRVFQDGAVAVAGDRIAAVGPSADVLSSFPGAAATVDLAGRILLPGFVNTHVHTSQQLARGIADDVDLMAWLHGRIWPYESHMTEEDSYASTLLCGIELIRSGVTCFAEAGGQYVSEMARAVELLGLRACLTKSIMDCGDGLPPNWSSCSTDDCIQSQKDLYEKHHNTADGRIRIWFGLRQIMNATDRLLLETRDA

SEQ ID NO: 189904 - protein, 951 aa, Oryza sativa
  Clone ID: PAT_MRT4530_86368C.1.pep
MEKPSTLLVHFDKGSAAMAGEIKADLEGSDVAAKVDAMKRAVMLLLNGETLPTLFITVVRYVLPSEDHTIQKLLLLYLEIIDKRDAAGRGLPEMILICQNLRNNLHHPNEYIRGVTLRFLCRLSEPEVLEPLVPSILENLDHRHHFIRRHALSAISSIYRLPHGDQLVPDAPELVERALASEQDASARRNAFLMLCTCAQERAVAYLLSNADRVAEWPDLLQMAAVDLIRKVCRSPNRADKGRYIKIIIALLSSPSTAVVYECAGALVSLSSAPTAVRAAANTYCELLSSQSDNNVKLIVLDRLNELRTSHRDVMVDVVMDVLRALASPNLDVKRKVLDLVLDLLTARNVEEVVLYLKKEVVKTQAGELEKSGEYRQMLVQAIHACAVEYPEVAGSVVHLLMDFLGDTNVAAAVDVVLFVREIIETNPKLRVSMIQRLIDTFYQIRASRVCSCALWILGEYSLSLSEVENAISTIKQCLGDVPFYTVSEEGEATDSAKPAQPVVNSVTVSSRRPVVLADGTYATQSAATEAISTPSVAPGSLSSTLNLRSLILSGDFFLAAVISCTLTKLVLRLEEVQPSMVEVNKACTGALLVMTSILQLGQSSYLPHPIDNDSYDRIVLCVRLLCNTGDDVRKVWLQSCRQSFAKMLAEKQFRETEEMKAKAQISHAQPDDLIDFYHLKSRRGMSQLELEDAVQDDLKAATGEFTKDADDANRLNRILQLTGFSDPVYAEAYVTVHHYDIVLDVTVINRTKETLQNLCLELATMGDLKLVDRPQNYTLAPESSKQIRANIKVSSTETGVIFGNIVYETSNVMERSVVVLNDIHIDIMDYISPATCADVTFRNMWAEFEWENKVAVNTVIQNEKEFLDHIIKSTNMKCLTPPSALDGECGFIAANLYAKSVFGEDALVNISVEKQADGKLSGYIRIRSKTQGIALSLGDKITLKQKGGSS

SEQ ID NO: 189905 - protein, 114 aa, Oryza sativa
  Clone ID: PAT_MRT4530_86369C.1.pep
MYTVWPRVLVRLTSGITLSSLHKWAEICNGCCPSDPSDGTAHTYLHSAGSRCNVGTRLSSGDITSVGIKPGIYLTRTNVPPPGANTPAPARDECLEALILTGWGEACVRPPVAT

SEQ ID NO: 189906 - protein, 110 aa, Oryza sativa
  Clone ID: PAT_MRT4530_8636C.1.pep
MERKVPVTAVCLGESGSSGSRLLLLVGPLLPNRVTPFYGRGNEEDDGFDDHPCEECGLVEVMGDPDAMSLCNLGLQKLQHRGKEGVGIVAIWGDGKLKSVTWLGLVADVG

SEQ ID NO: 189907 - protein, 192 aa, Oryza sativa
  unsure (1)..(192): unsure at all Xaa locations
  Clone ID: PAT_MRT4530_86370C.1.pep
LAKYETVLSWQWCQKNAPEVAFLDPXVVTVTNLENNRQGMFNYIYDTLWSRXDKEYIIAHXILLVITPKWSTCHYLNSRIDKQAYDWTPIQLTIDEVWGQYVXRGGLRKIGHDTLIHKKDFPVKXQIGDQHGFHVCHNMRLLYXREKVKTLAEFEGKITKSLPTNFEEIREEIAGFILREIINPKXECLGLN

SEQ ID NO: 189908 - protein, 45 aa, Oryza sativa
  Clone ID: PAT_MRT4530_86371C.1.pep
CPPSGPTATAAPPLAPALPAAAPAQSLRHHHPLLLLCNLITFPSI

SEQ ID NO: 189909 - protein, 132 aa, Oryza sativa
  unsure (1)..(132): unsure at all Xaa locations
  Clone ID: PAT_MRT4530_86372C.1.pep
MTMAAKEELAAAAPGSVEGGAGRWRRRSGRAAPGGQRRARWGSATCVGEDAGGDDEEGRXGRCRGSXGGGGGLSGGGXWGSSVRRRRRSEWRATAAGSVATAAGSAMEDDGGARVLRRQEIVAGLRKIFDPI

SEQ ID NO: 189910 - protein, 166 aa, Oryza sativa
  Clone ID: PAT_MRT4530_86373C.1.pep
MGASSGIVLEITVISCENLRVTEDPYVVVRAESLNCCTSNIAKDCGSNKTSLFSWNEKLMLNMPMHARSITFEVQCNRFKGFRPAGVARIAVSDFLGGAVSENCMHVLSYRLRDWEGKENGVIHFTMRVAAAPVKGTVVSKGSGDGFVGINVGGNKCNEVVVGVPF

SEQ ID NO: 189911 - protein, 588 aa, Oryza sativa
  unsure (1)..(588): unsure at all Xaa locations
  Clone ID: PAT_MRT4530_86374C.1.pep
MTPTKPAAATTEPLHRPDQCRPSSSSPPASSPTHAADPHRARRRPPGADLPDRHLHRPAPPSTEPGAASTEPHRPSSGNKIPKERFRITVVDAVGYPTTPRKILSRFRSICGVIGRQKFSILQDDIKFVPAAEKDIAWLTFKESFDYPAEHEDRLRRAAFKKELVAEQQASQEACSQRREDDLPTKALGNKEHRGRTQGVGSSVPWKYGFPDYAWQYKKRTSNKAEKDTSLEAKIQASIRAELTSEFDEKPELMRAKIRQEIREEQQNPQAAATVAHEELGSPTKKRSSCASTELAENPTSVDSAVDHITEPTSCTLTVRVMPTFMVPAAEGLAYKSTPETRVHGAQLRADCSKVQVDSVKPEYELFPLKYPPNDEVLSLGNARDTFIQWPKDHIEIRYDTDFGEDRTEADSKAIHEPPPMKNSRKAHSSPQRITLDKPEAKGRGRGGKVQASLLAPRKLDLGKGQEETKGKEGKKKYVAPQEFQLGMPLVGDGVLAAMGTTCKDLHLYYMEKSNARKLNKATDILGEHDGKPFLGPXNYIVVDFKDLFDLYRLRAVDTSLLKCYSFLQYHPVQPYPSHPRHWCCPPT

SEQ ID NO: 189912 - protein, 721 aa, Oryza sativa
  unsure (1)..(721): unsure at all Xaa locations
  Clone ID: PAT_MRT4530_86375C.1.pep
MSTTTSGSSRARTPRTGNKIPKERFRITAVDAVGLPTSPRKILSRFRSICGVIGRQKFIILQDDFKLVPAVEKDIAWLTFKESFDYPAEHEDRLRRAAFKVMGTAWKNFKTKLVGEFVYNPANPDPREKFPWITEQVWSEFHAKKSTPESRARSEAYRLLQTRNQHPHRLGTAGYAEDQRVYEAIKELVAEQQASQEACSQRREDDLLTKALGNKEHRGRTRGVGSSVPWKYGFPDYAWQYKKRTSNKAKKDARLEAKIRESIRAELTSEFDEKLESMRAKISCTLTVRXCRSSLFQQPRDLRTSRPQRQECMERNSGXDCAKVQVDSVKPEYELFPLKYPPNDEVLSLGNARGTFIQWPKDLIEIRVTARPTTAPGGRPPKRPASAPSAPPAQDRHAQSYDVQLQYDTDFGEDRTEADSKAIHEPPPMKKSRKAHSSPQRITLDKPEAKGRGRGGKVQASLLAPRKLDLGKGQEETKGKEVKKKYVTPQEFQLGMPLVGDDVLAAMGTACKDLHLYYMEKSNARKPSKATNILGQHDGKPFLGPTNYIVKHAPEVAFLDPQVVTITNLQNNRQGMVNYIYDTLWSRRDKKYIMCAYNQYAHWIILVITPKWSTCHYLNSRIDKNAYDWTPIQLAIDEAWAQYVQRGGLRKTGHDTLIHKKDFSVKQQIGDQCGFHVCHNMRLLYREKVKTLAEFEGTITKSLTTSFEEAMMNTYYATVVM

SEQ ID NO: 189913 - protein, 634 aa, Oryza sativa
  Clone ID: PAT_MRT4530_86376C.1.pep
MSQQGELMSTTTSGSSRARTPRTGNKIPKERFRITAVGAVGLLASPRKILSRLRSICGVIGRQKFRILQDDIKLVPATEKDIAWLTFKESFDYPAEHEDRLRQAAFKKELVAEQQASQEACSQRREDDLLTKALGNKEHRGRTRGVGSSVPWKYGFPDYAWQYKKRTSNKAEKDARLEAKIRASIRAELTSEFDEKLESMRAKIRQEIREEQQNPQAAAAAAHEELGSPTQKRSSCASTELAENPTSVDGAVNHITEPMSCTLTVRVMPTFMVPAAEGLAYKPTPETKVHGVQLRADCAKVQVDSVKPEYELFPLKYPPNDEVLSLGNARGTFIQWPKDLIEIRLQYDTDFGEDRTEADSKAIHEPPPMKKSRKAHSSPQRITLDKPEAKGRGRGGKVHASLLAPRKLDLGKVQEETKGKEVKKKYVAPQEFQLGMPLVGDDVLAAMGTACKDFHLYYMEKSNARKPNKATDILGEHDGKPFLGPTNYIVVDFKDLFDLYRLRAMDTSLLKCYSLLSWQWCQKHAPEIAFLDPQVVTVTNLQNDHQEMVNYIYNTLWSRRDKEYIMCAYNQQGGLRKTGHDTLIHKKDFPVKQQIGDQCGFYVCHNMRLLYREKVKTLAEFEAMMNTYYATVMM

SEQ ID NO: 189914 - protein, 187 aa, Oryza sativa
  Clone ID: PAT_MRT4530_86377C.1.pep
VHEEPESRTHFAHPQHPLLKTQYGGGERQPSSRHVCRICGTRVVAGAGYRCDHCDFDIHEACADFFPEKMITPPPNFFGHPWSHNLALRQVTAADGSWPCTLCRGPFQHGHLAYRCGARRCGFAAHPLCTMLPGEIRSPLHRKHALTHTELMLIPSGPCTPAEMARVCSVCRRDCSTVRTRHYRCAA

SEQ ID NO: 189915 - protein, 75 aa, Oryza sativa
  unsure (1)..(75): unsure at all Xaa locations
  Clone ID: PAT_MRT4530_86378C.1.pep
ETIEIGSISSETMLDXSVIDHIYYLNYLVSTLIRCRNNCEKTKFKNSKKRYGWKLYPLYGNGARSIGNFLGDHRS

SEQ ID NO: 189916 - protein, 762 aa, Oryza sativa
  Clone ID: PAT_MRT4530_86379C.1.pep
MDQSTIDRSWMYAKNLKRHSTEYRNGVIKFMNAAEEDRIRRNSDYMCCPCADCKNENMFDSGEDVHGHLIQREFMEGYTCWVKYGEQESGSGAAADRSGAHNQEDENEHEMFIPSPLGGEMVDVDHDLLQDMLRDVEDPAQNERDGMKFSRLVSDSETPLYAGCKAKHTKLSVTLDLMKLKVSSGWTDKSFTDLLGILKAMLPVENTLPETTYEAKQVRRIHACPNDCILYHKQYADLDACPICKASRYKRKKSADEGNKSKRGGPAKVVWYLPIIDRFKRIFANPNEAKLVRWHATERRNDGMLRHPADSIEWRNIDRKHKDFAADPRNMRICLCTDGMNPFGDMSSTHSTWPVLIANYNLPPWLCFKRKYIMLCLLIQGPRQPGNDIDDLEILWKEGVETWDAYGQENFKLRVLLFCTINNYLALGNLSGQTIKGKKACSDCKEHTRSRWLKKSRKMVYMGHRRWLPLRHTFRRKKKIFNGKRELQPAPKDLSADEVHNMVKDISNEFGKKRKRSKTKEKGRWKKKSIFWRLPYWKDLDVRHCIDLMHVEKNVCESLVGLMLNIPGKTKDGLNVCLDLQDMNIRSELQPIRDAETGKVYLPPACHTLSKDEKIAMLSCLKDIKVPSGYSARISKYVKLDDLKLVGMKSHDCHVLITQILPFAIRGILPPKQTKLCGPAFLRKMWPFERYMGVLKSYVRNRAKPEGSIIEGYTTEEAIEFCVNYMSDADPIGVPASRHEGRLSGVGTIGRKRIRPDQASYA

SEQ ID NO: 189917 - protein, 406 aa, Oryza sativa
  unsure (1)..(406): unsure at all Xaa locations
  Clone ID: PAT_MRT4530_8637C.1.pep
GKSLSADVIKEAGADRPAPHVSGSRESVHRGPGPRGGAAEHGHGSGRPGRATARGGAASCGDGRCMRESGGEARQGDPGCPGERGGGKPAGRPNGSGARPGGRRWRPPARQRXHGRQRREARRERRSSPRTRRRGEGKGGGXSASALLGMKAERRPGGVPXARTGRRRPEGPXARGTVFRRDPGREKRRPRCSSALXSERRRQRDLGWLGAAESAASVEGGGARGDGTSEVGRGNGADAGVWHDAAKPLVAVARNDGGGSGCGDRLEGRRRAAAGGATVAGWFSCTGGLGREGKMEREVRGMFLXGRGGGIEPERGRNRLATWEEREMREAATWPDFAGRVGGNGADVGDDRVHARAGEGVARERQRRGRIWWPWRRLGMELEVGDDMWGPPVGERGRGKWAREEM

SEQ ID NO: 189918 - protein, 108 aa, Oryza sativa
  Clone ID: PAT_MRT4530_86380C.1.pep
LQSKGSWYYTCLGRFLCWLCFVLAFMATFTERTRLLAALLVVVSAVIIGCSVHVCHGAQEADLQAAGYYRRGGSMDDPDFDFPFPGPRHVVCNDGPCRTGPGRLRPYP

SEQ ID NO: 189919 - protein, 133 aa, Oryza sativa
  unsure (1)..(133): unsure at all Xaa locations
  Clone ID: PAT_MRT4530_86381C.1.pep
MKIIFVFALLAIAACSASAQFDVLGQSYRQYQLQPPVLLQQQALSPYNEFVRHXVWHTVMPLLASAAIYPRNSQXCQLLALQSHHYDINNVHTIARQLQLLQVQDLYYHQNVAHAQALXALNAPTRYGIYRRY

SEQ ID NO: 189920 - protein, 810 aa, Oryza sativa
  unsure (1)..(810): unsure at all Xaa locations
  Clone ID: PAT_MRT4530_86382C.1.pep
MSQQGEPMSTTTSVSSRARTPRTGNKIPKERFRITAVDAVGLPTSPKKILSRIRSICGVIGRQKFSILQDDIKLVPAAEKDIAWLTFKESFDYPAEHEDRLRRAAFKVWEEFHAKKSTPESRASSEAYRLLQTKNQHPHRLGTAGYAGKEEEWQREDEEVEESNTPLVFGDIPHPRARNWARARYQKKDDGTIFMPNPEDQRVYEAIKELVADQQASQEACSQRCEDDLLTKALGNKEHRGRTRGVGSSVPWKYGFPDYAWQYKKRTSNKAEKDARLEAKIRASIRAELTSEFDEKLESMRAKIRQEIQEEQQNPQAAAAAAHEELGSPTQKRSSCASTEVAENPTSVDSAVNHITEPTSCTLTVRVMPTFTVPAAEGLAYKPTPETRVHGAQLRGDCAKVQVDSVKPEYELFPLKYLSNDEVLSLGNACGTFIQWPKDLIEIRVTARPTTAPGGRPPKRPASAPSAPPAQDRHAQSYDVQLQYDLDFGEDRTEADSKAIHESPPMKKSRKAHSSPQRITLDKPEAKGRGRGGKVQSSLLAPRKLDLGKGQEETKGKEVKKKYVTPQEFQLGMPLVGDDVLAAMGTACKDLHAYYMEKSNTRKPNRATDILGEHDGKPFLXPTNYIVVDFKDLFDLYRLRXLSWQWCQKNAPEVAFLDPQVVTVINLQNDHQGMVNYIYDTLWSRRDKEYIMCAYNQYAHWILLVITPKWSTCHYLNSRIDKNAYDWTPIQLAIDEAWAQYVQRGGLRKTGHDTLIHKKDFPVKQQIGDQCGFHVCHNMRLLYRDKVKTLTEFEVKYDKYLNGCEICEWM

SEQ ID NO: 189921 - protein, 837 aa, Oryza sativa
  unsure (1)..(837): unsure at all Xaa locations
  Clone ID: PAT_MRT4530_86383C.1.pep
MNTMSQQGEPISTTTSGSSRARTPRTGNKIPKERFRITAVDAVGLPTSPRKILSRFRSIXIGRQKFSILQDDIKHVSAAEKDIAWLTFKESFDYPAEHADHLRRAAFKVMGNAWKNFKTKLVSEFVYNPANPDPREKFPWIPEQVWEEFHAKKSTSESRASSEAYRLLQTKNQHLHRLGTAGYAGKEEEWQREDEEAEESNTPLVFGDIPHPPARNWARARYQKKDDGTIFMPNPEDQXVYEAIELVAEQQASQEACSQRREDDLLTKALGNKEYHGRTRGVGSSVPXKYGLPDYAWQYKKRSSNKAEKDARLEAKIRASIRAELTSEFDKKLESMRAKIRQEIREEQQNTQAAAAAAHEELGSPTQKRSSCASTDVAENPTSVDSAVDHITXTRVHGAQLRGDCAKVQVDSVKPEYELFLPKYPLNDEVLSLGNAHGTFIQWPKDLIEIRVTARPTTAPGGCPPKRPASAPSAPPAQDCHAQSYDVQLQYDTDFGEDRTKADSKAIHEPPPMKKSRKAHSSPXRITLDKPEAKGRGRGGKVQSSLLAPRKLDLGKGQEETKGKEIKKKYVAPQEFQLGMPLVGDDVLAAMGTACRDLHIYYMEKSNARRPNKATEILGEHDRKPFLGPTNYIVVDFKDLFDLYRLRAVDTSLIKCYSLLSWQWCQKNAPEVAFLDSQVVNVTNLQNDRQGMVNYIYDTLWSRRDKEYIMCAYNQYAHWILLVITSKWSTCHYLNSRIDKNAYDWTPIQLAIDEAWAQYVQRGGLRKTGHDTLIHKKDFPVKQQIGDQCGFHVCHNMRLLYREKVKTLAEFEGTITKSLPTSFEEAMMNTYYATVMM

SEQ ID NO: 189922 - protein, 116 aa, Oryza sativa
  unsure (1)..(116): unsure at all Xaa locations
  Clone ID: PAT_MRT4530_86384C.1.pep
LVRPEADTLYIKGALDWNTVADEHLGXRVISXLWLDADLIHVAANMLRYLLIEIPLEQERVYQEIRAVYLLCRFGGSALHGCRTLTTYISRRCPCSFMWTSYIQGLSSLDTNCGCL

SEQ ID NO: 189923 - protein, 2646 aa, Oryza sativa
  Clone ID: PAT_MRT4530_86385C.1.pep
MGERDLGDIVLSWSLGEVMDDDLYRGKVEEIPRSFMSLDHYFKTYAAPLIEETRSDLCSCLELISEAPISKILSMEEAGKSGLYFMDVDFWDNGAGFSSEAYTARNGDIFILSSMKPESADDLNRYGVTYCLAMVTEVSMDDEFQKGFRVKVAKDVTLQEGFNRLRHAIFLNNIMTNLRIWKAICFDMGMNNNFTVIKSLFAPTYMDEHCLALCTEQLLSINLNQSQVDAIESVISAVQCRHLNLMKLIWGPPGTGKTKTVSALLWALACLKCRTLTCAPTNVAIVGVCTRFLHILRDFNKNANENFLPFSLGDVLLFGNKYNMDITEDLQDVFLDCRADELVECFSSLSGWRYRIASMASFFEDCGSQYDMLLEDDGRSDPICFLDFIKTQFDVTATALKKCIMNLLIHLPRKCFSHDSISNISMLFDSLEKVEALLHHENLTDDGAKRGFGFLSIQDISCAKSAFIIEKELNRAKLSCLQLLEDLERSLDLPTGRDRNWIQNYCMRNATLIFCTSSSSYRLHHMEIAPLDVLIVDEAAQVCKEAGFGISLFERLVVLDFEKHLLNIQYRMDPRISLFPNVQFYGRKILDGPNVMSSVYNKDYTNLPFGTYAFINISDGREEKEGTGNSWRNLVEVAVVLHLIQTIFKTWKRKGQMLSIGVISPYSSQVDSIESRLGKLYDTCDGFHVRVKSVDGFQGEEDDIIILSTVRSNVKGIVGFLADEQRTNVALTRARHCLWILGNANTLYSSGTVWKDLIADAQRRKCIIDATNDAAICKLVLKVKNELDELDDLLNADSAVFSNTRWKVVFSDEFKKSFAKLKYPQLRREVLQKLIKLGVGWRTTMKNLNFNVIDPFQLAKVYKVRDLYLVWSTDIEKSERYVQIIRIWDLLSHQNVARTVQRLENLFSMYTDEYLDKCRRVKTEGKLEVPVIWDAEHDIIRYRKVLEVDAQEDHDHVDISYAMENSKVSESFLLMKFYSLSSGVAKHLLTATDGSEIDIPFELTDEEQAIIRFPLTSFILGRSGTGKTTVLTMKLIQIWQQSLIASRGLNLDERNSTAQKDLSEVETFVKQVFITVSPKLCSAIRNQICKLTRYGSGDVSDQASILQMPDMVDDLEDFTDIPDSFIGLPCEHYPLTITFRKFLMMLDGTCKTSFFGTFCGELRSSTERGYSKSRALQAFIEMKEVTYEKFSASYWPHFNSELTKKLDASTVFTEIISHIKGGYQANKPFGGKLERLDYLKLSEKRFSSLNSQMRERVYDIFLDYESMKCTAREFDLSDFVNSLHRNLLSEGYNGDIVDCIYIDEVQDLTMTQIALLKYVCRNFEEGFVFAGDTAQTIARGIDFRFEDIRSLFYTYFLPEMEPCGQGINHGKQLRITDMFQLTQNFRTHCGILRLAHSIMSLLYYFFPSCVDKLNPEIGLVYGEAPVLLESGNDENAIMTIFGESKSDPGNLQGFGAEQVILVRDDATKKQVVDLVGKQALVLTIVECKGLEFQDVLLYNFFSSSPLRNKWRVVYDYMKGKNVIESSEEMSHSFFDKNKHYLLCSELKQLYVAITRTRQRLWICENADDNCRPMFDYWKKLCLVEVRVLDSSLIEAMQAGSSTEEDWRQRGTKLFAEGQYEMATMCFEKAGDAYREKLARAAGLLATADRVISTNFEMGQSSLQKASEIFESIGKHEKAATCYMKLGDYKKAGMVYMEKCGNSRLKDAGDCFELSACWSLAADAYFRAKCYAKCLSMCSKGKLFQKGLLLLQQLEEHLLENSSLVKVAAIRNTFLEDCALHYFECGDIKHMMPFVKSFSSMDHIRVFLNSKNLVDELLSVEMDMGNFVEAAGIAKHTGNILLEADLLEKAGFLENATQLILLQLFVNSLWASHSTGWPPKRFAEKEQLLAKAKEMSRNVSESFYCLVCSEADALSDEHKSLASITYNLIEGNKCGNLLVELIASRLILDVHLQAEASGYCFESEPGSHDGRHCKDMLVLNQISLETLVYDWNYWSSIIVKVLRHLDHPKDAESNDLAAICEDLCAKYFGWRKDGDYDRYVDFWINELYSVGLSVLKKLESIVQILPTSSCSLGRTILVIYEIAKFLKESEFGMPKNTIKYYSILCERRFFELVFLVWRDETPKSLLCILDSATTYNLLSDSICSYLGSRNNKMTHSQVGRITMLLLHAARLDDSLISQLVEYLDRGSEWATFFLSLKKYLDNGVSRDILLLDFKFALDCTYKANWRAEHYISPICYVDLIECLGFLATTHLVLNDYMFCTKSLLAKMMKCRTTKGYFETCMAPSTDIDLGYAGHSARCFIYLSVKDLLGSKRMIVEWVQNTSTPTSSYVPILLRLVITLYLVTVNQDDGDLYEVTAFLEKNHVFTDLPPEFSEKIRNALRMKSRTVKNFMRVFADALAAIGTRMVVMGDIKKAMAHKCQPDLNADMISSVDLSDAKKVMALLSTEKSSSLKQEPQLPEIKSVCNKICNATSGHFPLTSVGGSQKSTSNFNLSDVDHPLLEKFEAFQVNMPQKKNGSLISQILRSPLSWIEQRAPPVQMLELRHICKQVEEQHVREKRALSVKDLHSNREHGDGEKNIGKIVDVQGSQSNPDRASEWSGCSDDEQETGGSNVVQSTKEAPAAASSGPSSKNKPQKKKKSKKSKRSGRK

SEQ ID NO: 189924 - protein, 2479 aa, Oryza sativa
  unsure (1)..(2479): unsure at all Xaa locations
  Clone ID: PAT_MRT4530_86386C.1.pep
MTGFVLELRGMCVVLGYPHGVDYQARPLPEQEGEDAEPRAGWEVTAVILSGSPERTSLAVTAGGDSFPAACQNAALLAIGTLHQRYPDELQHSPYHYHPRRGGARDFATFRDASPEDDATIVHLARMVEAYDAARIDFHQMENLQLKKDLDAVEAQLHQLKIAQGEICRPKRRRVCRSQKITARKSTSRPELVRQSLAWTCFVETPRAEPAPVVPQEGEASGVGSSEALSLFAGSVWGFQMVTTRRNAVTGDGNQPEGSNHNHQGNPPPPPPPPPPPPPDTNAILTQILAQQANMMTAFLHHLQNPPQQNAPPPPPQHSKLAEFLRIRPPTFSSSNNPVDALDWLHAVGKKLDTVQCSDEEKVVFAAHQLQGPASLWWDHFQATQPEGQPITWARFTAAFRRTHVPAGVVALKKKEFRELKQGNRSVMEYLHEFNNLARYAPEDVREDEEKQEKFLAGMDPELSVRLVSGDYPDFQRLVDKSIRLEAKHXQQQQQQPRPAPRPQFVVRVPQPQQQQNQQGTRAPRPPTPAVQPVQGRRDAQGQQRLCFNCFEPGHFADKCPKPRRQQGQAPPRSNNGGKDVIRGHXLSEIPIVREFGDVFPEELPGMPPKREIEFRIDLAPGTTPLHKRPYRMAANELAEVKKQLEELKEKGYIRPSTSPWGAPVIFVEKKDKTKRMCVDYRALNEVTIKNKYPLPRIDDLFDQLKGATVFSKIDLRSGYHQLRIREEDIPKTAFTTRYGLYEFTVMSFGLTNAPAFFMNLMNKVFMEYLDKFVVVFIDDILIYSQSEEDHQHHLRLVLGKLREHQLYAKLSKCEFWLSEVKFLGHVISAKGVAVDPETVTAVTDWKQPKTVTQIRSFLGLARYYRRFIENFSKIARPMTQLLKKEEKFVWSPQCEKAFQTLKEKLVSSPVLILPDTRKDFMVYCDASRQGLGCVLMQDGHVVAYASRQLRPHEGNYPTHDLELAAVVHALKIWRHYLIGNRCEIYIDHKSLKYIFTQSDLNLRQRRWLELIKDYDVGIHYHPGKANVVADALSRKGHCNTLNVRGIPPELNQQMEALNLSIVGRGFLAALEAKPTLLDQIREAQKNDPDMHGLLKNMKQGKAAGFTEDEHGTLWSGKREKYWWVCMKREIAEYVALCDVCQRVKAEHQRPAGLLQPLQVPEWKWDEIGMDFITGLPKTQGGYDSIWVVVDRLTKVARFIPVKTTYGGNKLAELYFARIVSLHGVPKKIVSDRGSQFTSHFWKKLQEELGTRLNFSTAYHPQTDRQTERLNQILEDMLRACVLDFGKTWDKSLPYAEFSYNNSYQASIQMAPYEALYGRKCRTPLLWDQVGESQVFRTDILREAEAKVRIIRDNLKVAQSRQKSYADNRRRDLEFAVDDFVYLRVTPLRGVHRFQTKGKLAPRYVGPFRIVARRGEVAYQLELPASLGNVHDVFHVSQLKKCLRVPSEQADSEQIEVREDLTYVERPVKILDTMERRTRNRHIPISSPVLPNLGVEIPFKEAGPPATLADGWGPPVIAFLPPQPPLARALTPPPPRIPPHPAVPARHNEGGIIPRDSLSQFPHFPLSLSLGFVRFPSRKPRRRNQWRPRSPRPFPPFPGTLSFSRCYLNVSRALLLRFRRSPLALPVGIEPAPLHLSAVAAVLRFAAAVAPDFLPTRRDLHRLRRGPVDLVRALGLLADRRSTVVLAVPNRAAAFFRFGRRSRRRRRPGRAPPSFQPSPSLGKTTVVLAKSSPSSSDPSPSPEITGAASPSSTRRFPPLPPRRRRRLLVFRRRLGHRNQHPHRLGTAGYAGKEEEWQREDEEAEESCTPLVFGDIPHPWARNWARARYQKNDDGTIFMPNAEDQRVYEAIKELVAEQQASQEACSQRREDDLLTKALGNKEHRGRTRGVGSSVPWKNGFPDYKWQYKKRTSNKAEKDARLGAKIRASIRAELTSEFDEKLESMRAKIRQEIREEQQNPQAAAAAAHEELGSPTQKRSSCASTELAENSTSVDSAVDHITVTEPTICTLTVRVMPTFTVPAAEGLAYKSTLETRVHGAQLRADCANVQVDSVKPEYELFPLKYPPNDEVLSLGNARGTFIQWPKDLIEIRVTTRPTTAAGGRPPKRPASTPSAPPAQDRHAQSYDVQLQYDTDFGEDRMEADSKAIHEPPPMKKSRKAHSSPQRITLDKPEANGRGRGGKVQASLLAPRKLDLGKGQEETKGKEVKKKYVAPQEFKLGMPLVGDDVLATMGTAWKDLHLYYMEKSNARKPSKATDILGEHDGKPFLGPTNYVVVDFKDLFDLYRLRTVDTSLLKCYSLLSWQWCQKHAPEVAFLDPQVVTVTNLQNDRQGMVNYIYDTLWSCRDKEYIIAHWILLVITPKLSTCHYLNSRIDKNAYDWTPIQLAIDEVWAQYVQRGGLRKTGHDTVILKKDFPVKQQIDPLRVWRHVCGIAQAYPVRDRSQHSSLVGAGVRTPGVGTSAPARYIPSFIAIIARKPLYEEG

SEQ ID NO: 189925 - protein, 197 aa, Oryza sativa
  Clone ID: PAT_MRT4530_86387C.1.pep
LGLPLAGSGREGGGEPPLLPRARRRRHRRVRPVRRRHRRAVHAGLPLPPPARSLPPAGSGQSSLVPRRIRKPHRPSQGPSELHHAHPCLDASASEKLYFKSGSYPFPLVASAVCLPGFPTNRSLIAMGATSKTMHPQPTIQSSFSWIITTMKHGRMSRAAAHHDTNRSNTAIIPSTELVPCAAVAPVVAVAPGGRLR

SEQ ID NO: 189926 - protein, 99 aa, Oryza sativa
  Clone ID: PAT_MRT4530_86388C.1.pep
IGFIDINIPHQELLCDIYISNLFAGSAEGRRPNFIKMKEELPVLHDIRLSSRGRTPNKRRKIKKTEKDYLQAPKSLRLLLAREKAGCSPDQDFLLNVCN

SEQ ID NO: 189927 - protein, 368 aa, Oryza sativa
  unsure (1)..(368): unsure at all Xaa locations
  Clone ID: PAT_MRT4530_86389C.1.pep
MICGDSDSPLEFRLGVERRSDDYRQRQCCPYCYYYCVEYCTVCTRALLMAVLLCLLVMTDRPYFRASEETVSTTLCVQRAFDGGGGEIRMNAAAAGGSSSLRLHEGTSRPITCHASWMDGAIAGRRQVTGTWAERWLKRRSKRGSGGVGSSGRGGGGAVAFHGGAGAGRAGRAADRGIDLERRRYVGGGRPTWSRGQRRADERRPASTPPPSSSGPSGDGIGRLRRSAPSSVNPSPSLPTDDPARRLIRPRLPRALHSLGRRAEEIGGVERDSATRRGVHVDIHAPRPGHSLADRPIDASTGVYRFARRRRRSPSIRRVTRAPLFVPLLPPHPAAIALFHWFALSVXLVCPSLSSTLSVELSGYHTLF

SEQ ID NO: 189928 - protein, 333 aa, Oryza sativa
  Clone ID: PAT_MRT4530_8638C.1.pep
MSLSSTWKNRWVRLSHCRLSLFQFPQPPTKFFDLCLLGFGGLTGETPAIRPAVSQRSDRRIQGSQTGNGNREQRRLQGGRIERSTSVRPTASRRSDQHDYFGTKATAAHGLGGHRRRRHGARKHGKRPAKGRKREEGVECSPRAATRGGERRGSSASALLGTKAERRPGGVPRTGTGGRRPEGPGEDGGEVKRGREGSQRHESLVGGENGRRMRTGARGTVFRRDPGREKRRPRSGAKRRLESAAAVEGGGARGDGASEAGRGNGADAGVRHDAAKPLVAVARNDGGGSGCGDRLEGRRRAAAGGATVAGWFSCTGGLGREGKREREVRGMFL

SEQ ID NO: 189929 - protein, 59 aa, Oryza sativa
  Clone ID: PAT_MRT4530_86390C.1.pep
TTRHGVYASLPDCTTKETVKYGLSLEVKNGKAIYYYEKKKKKKKKKKKKIFLNIVLYKK

SEQ ID NO: 189930 - protein, 269 aa, Oryza sativa
  Clone ID: PAT_MRT4530_86391C.1.pep
MSRKLGVSYQHQYQAIYQPATDRKYSSRLDPFNGGRVHVKARKRPPQEKRRRCHTNYTVQRRHSQHTRTHPYKHTHANPISMSIFEDWAYEHTYNYTVQRRYSQRTRTHPYKHTHANPIPMSIFEDWAYEHTHANPIPMNIFEDRAVICIDIGVVRTITVKSEVGVQYKSGWWFTTSFRPLMDHIAQQQAGRKEKRESTCLRSTGLEKEKELEYSTTDLVKLMSMEKYFFLCCVFSALSPLPPRRRLLLLFFPRWSGEYGGKPAPVETG

SEQ ID NO: 189931 - protein, 158 aa, Oryza sativa
  Clone ID: PAT_MRT4530_86392C.1.pep
FFALLMATIGVSQTSAMGSDSAKAKASASSIFAMIDRESKIDSSSDDGMVLANVAGELELHHVCFSYPSRPDIQIFRNLSLRIPSGKMVALVGESGCGKSTVIALLERFYDPDSGTVTLDGVDIKNLKVGFLRQQMGLVSQEPVLFNDTVRANIVYGK

SEQ ID NO: 189932 - protein, 163 aa, Oryza sativa
  Clone ID: PAT_MRT4530_86393C.1.pep
IIVEVFKTQGAEVGDGTTSVAVFAGELLRQAQELVEQKIHPQTIIRGWRKAVKVAYDALHQSSKDNSANPELFRRDLVNIAATTLSSKILNVDKEYFAELAVSAVLRLRGSTDLQNIQILKKVGGSMRDSYLDEGFILDKSIGVGQPKGIENVGIMVANTAMD

SEQ ID NO: 189933 - protein, 273 aa, Oryza sativa
  Clone ID: PAT_MRT4530_86394C.1.pep
MDRRVQRLVSGVAAAAATVSLLYLISHASTSCFPGATTLPLARFPRTSCDAASRRVVPPGRRLAKLRASARWRRRSVALASSSAFASLRGLRLLAGSSRALCLAAGAGHAVDALRAEGVGDVTGIDFVDFPPLVRRADPHHLPFSDGAFDLIFSDDPAGFSGALFPSRFAAEAERAVRSGGTIALAVDRHLDPSAVAVLFKRSRIVDQRDLTMDGSQSYAGVTSFTFNPEHTRQKEEGNQNARKQERGRSPVPDMMMMRKEEEEAGDKQPGTS

SEQ ID NO: 189934 - protein, 35 aa, Oryza sativa
  unsure (1)..(35): unsure at all Xaa locations
  Clone ID: PAT_MRT4530_86395C.1.pep
TDEQLNSGLVYYTCELIHXNTHYLLTKSHTLTLNN

SEQ ID NO: 189935 - protein, 60 aa, Oryza sativa
  Clone ID: PAT_MRT4530_86396C.1.pep
GGKLKSLEPFFSPGLGQNHPQGAYLGGFILLYPDTSFKITLLWGFVFGLIPEPLGEPLGE

SEQ ID NO: 189936 - protein, 60 aa, Oryza sativa
  Clone ID: PAT_MRT4530_86397C.1.pep
MSTPGAGAAAGAAATAAGGDGAPGAGAANVDTNGGNSASQSSGGPFSGYILLLLLLLTLF

SEQ ID NO: 189937 - protein, 59 aa, Oryza sativa
  Clone ID: PAT_MRT4530_86398C.1.pep
RGKKGNLIWGPHKRRAADVHIMGWMSLFFLKEPLPFFFFFFKFFFFFFFFFFFFFFFFF

SEQ ID NO: 189938 - protein, 43 aa, Oryza sativa
  Clone ID: PAT_MRT4530_86399C.1.pep
GEANHTNTPLINFTENCTGTSHHTNSYVDTRIAPKATRCLINQ

SEQ ID NO: 189939 - protein, 562 aa, Oryza sativa
  unsure (1)..(562): unsure at all Xaa locations
  Clone ID: PAT_MRT4530_8639C.1.pep
MHKVVREIKLEVKKVAGNKVAAFSAVVVAEEEREEKCAFLAWREMVERERGRGMDRTVSVIWVRGLDGGGYPQCHVALPRGGSGPRWGGGHSLPKTSRERLPPNATWPSPEGSDARGKSLSADVIKEAGADRRAPHVNGSRESVHRGPGPRGGAAEHGHGSGRPGRATARGGAASCCDGWCMRESGGEARQWDPGGPGERGGGKPAGRPNGSGARPDGRRRRPPARQRXHGRQRREARRERRSSXPRTRRRGAGKGGGGGGSSASALLGMKAERWPGGVPRARTGRRQPEGPGEDGGEVRRGREGSQRHESLVGGENGRRMLTGARGTVFRRDPGREKRRPRCSSALRSERRRQRDLGWLXSGAKRRLESAAAVEGGGARGDGASEAGRGNGADAGVRHDAAKPLVAVAWNDGGGSGCGDRLEGRRRAVAGGATVAGWFLCTGGLGREGKMEREVRGMFLXGRGGGIEPERGRNRPETWEEREMREAATWPDFAGRVGGNGADVGDDRVHARAGEGVARERRRRGRIWRPWRRLGMELEVGDDMWGPPVGERGRGKRAREEM

SEQ ID NO: 189940 - protein, 630 aa, Oryza sativa
  Clone ID: PAT_MRT4530_863C.1.pep
MATAVGAAVVLYFVLSRRLAQEDGGGGGGGGGGGGKRRRVRAARRPAQPPATWIEAVGTLAETLRFTYSETLGKWPIGDLAFGIKYLMRRQGNLHVASVYAGNNCIELKGPEIMEELIVLRRLIDLCFLFSKKPFPVFLELAGFSPEDVLIEEPKAGILKPAHTILRDECTKSFLVLIRGTHSMKDTLTAATGAVVPFHHSLLDEGGVSKLVLGYAHCGMVAAARWIARSITPCLCQAVSQCPDYQIRVVGHSLGGGTAALLTYILREHQELSSTTCVAFAPASCMTWELAESGKHFVRTIVNGADLVPTVSTSSIDDLRSEVTASSWLNDLRDQIQQTRFLNVVYRSATALGTRLQSFSGARDRVAGAGALLRPVSSKTQVVMKQAQNVAQAVARSRSAFSSWSCMGARRRGVGVVAASAKEEITVETHVTSTTNSESYVVEQRGTKTMEELQYTADSVSVHEETEEEALLSEHESSREHAEEEITEGEMWFQYEKDLDRQAEVEAQTRQEEAAAAKEIMEEESAVLKNVEDRQSFSSDSLERQQFYPPGRIMHMVAMPPADSCPDDPVAADECSVGIYETPRDLYSKIRLSNTMINDHYMPMYKKTMEILIEKFANNDENFCTDSTVE

SEQ ID NO: 189941 - protein, 225 aa, Oryza sativa
  Clone ID: PAT_MRT4530_86400C.1.pep
RSDRPPVRRAAHPLSDGPPACVLALVARKENVWIVDSGCSRHMTGDKNWFSSLKKASKTESIIFGDASTSAVLVTGLVKVNEKFELKNVVLFEDLKYNLLSVSQIVDENFEVHFKKTGSKVFYYCDDSVLNISRYGRLFKADFENPVSPVITCLVAKFDKNVMFWHRRLGHVGFDHLTRLSGLDLVRGLPKLKKDLNLVCTPCRHAKMVASSYAPIVYVMTDAPG

SEQ ID NO: 189942 - protein, 365 aa, Oryza sativa
  unsure (1)..(365): unsure at all Xaa locations
  Clone ID: PAT_MRT4530_86401C.1.pep
MALVARKENVWIVDSSCSRHMTGDKNWFSSLRKASKTEWIIFGDASTSAVLATGLVKVNENFELKNVALVKDLKYNLLSVSQIVDEDFEVHFKKIGSKVFDSCGDSVLNISRYERVFKADFDNPVXITCLVAKFDKNVMFGHRRLXKVGFDHLTRLSGLDLVRGLPKLKKDLDLVCTPCRHAKMVASSHAPIVSVMTDAPGQLLHMDTVGPARVQSVGGKWYVLVIVDDFSQYSWVFFMATKDEAFQHFRDLFLRLNLEFPGSLKRIRSDNGGEFKNASFEQFCNERGLEHEFSSPRVPQQNSVVERKNRVFVEMARMMLDEYKTPRKFWAEAINTACYISNLVFLRXKTSYELRFGRQSKVSHL

SEQ ID NO: 189943 - protein, 70 aa, Oryza sativa
  Clone ID: PAT_MRT4530_86402C.1.pep
RSAAPSGERALLEEQCLCPSSTSPAAPARTPAPSLLSPRRRYPPMTMRDRACACLPCRRRCLGRSPTTSR

SEQ ID NO: 189944 - protein, 152 aa, Oryza sativa
  Clone ID: PAT_MRT4530_86403C.1.pep
WIRQQQQQHLALAPVSCLKSTPTANGFTVTSSTRSSSTLQGSARTISRSRWRRRGASGSAASAPSTAAAAIGSTSSSASTSLPAPPTTRRRSRSSSTRASSTSRCPAPALPPPPAAATASSSSSRRERSPAAAAARRRRGAAGTRRGSSPGR

SEQ ID NO: 189945 - protein, 52 aa, Oryza sativa
  Clone ID: PAT_MRT4530_86404C.1.pep
PRGGVISGISLSHHPMSRRRLDSILAASLRPLITLINTQLKPESAPKPEHSD

SEQ ID NO: 189946 - protein, 161 aa, Oryza sativa
  Clone ID: PAT_MRT4530_86405C.1.pep
NQSAPAISALSSLVTSNISLSNRGRSHRVIGPPLWSPLSVCECLCISGFSHSALRSARRRRRDHRFRSSGLGLRCAPLDRNGSRMLPRLTLHPARRTATARRTAGGGRIGRRRRGWTTRSTAGWAPCLASVAQGVAQFRPRGSHHFTDCHFPGDGNVQAPR

SEQ ID NO: 189947 - protein, 100 aa, Oryza sativa
  Clone ID: PAT_MRT4530_86406C.1.pep
SRNTNHNLSSRTLVSSFLDAGTSFLAGWPSPPRAITPWPGAFLPATGHPYDNHVPSRPQPPFTTPHYHRRRHHCSTALQPPPRSPHQLTDACTLKLRKGK

SEQ ID NO: 189948 - protein, 845 aa, Oryza sativa
  Clone ID: PAT_MRT4530_86407C.1.pep
MRAGGCAVQQALAAEAAGVVRQAVTLARRRGHAQVTPLHVASAMLSAAGLLRAACLQSHSHPLQCKALELCFNVALNRLPTAGPAAAAAIFHHHPHHPGGGGGHHPALSNALVAAFKRAQAHQRRGSVEGQPPPQPPPSPVVASKVELEQLIISILDDPSVSRVMREAGFSSSQVKANVEKAVVASLDHANAAGGGGGHAGSPNSGHGGRRKESSSSRARVDDDAMRVLDCMASGTKRCVVVVGGEGAAAAEAVVKAVMDRVSKAELHHRHERLKNLQFVPLSIASFHGAPREEVEAKASDLRALVRSGCAAGKGVVLVLEDLAYAADAWAAASNTRRRAAAAAGGQSYCPMEHAVMEVSSLVSGGGGGGERFWVLGFGSYQVYMKCRAAGQPPLEAVWELHPVVVPDGGLALSLTCSEASQATHQAAAPTAGWPFVNGAGEAAATTASPTIPPWLRRYQDPDHATPASCGTGLQIQDLWNPMRNGSAPHHTSELTLSFSSPSPSSISGYTSCYNNNNMMSSKPWQLEARQPWPIHGHEGQRMAMASYHDHHPLDTNPSPESNSVSNSLDGGETRRPKFIELNAENLKILCNALESRVPQHSNIVPDIASTVLQCRSGMKKMKLRHKEIIKASSTTWLLFQGRDVDGKKAMAQELAKLVFGSSTEFSSISFDELTSPYSDSSSGELTLKRQRSADSNEHSFAQRLCEIVSKNPHQVIVINDIEQLDQDSEISIKKAIANGRMRGCTGEEVDFEDAIIVLSYEEEFDSRSRASSSPRVKQRLMNNNDDEESSSTEKGDNSPQRFSLDLNACLEDEEEDEGFLLIDNGVGMHDIVDGVFFFGLMADF

SEQ ID NO: 189949 - protein, 62 aa, Oryza sativa
  Clone ID: PAT_MRT4530_86408C.1.pep
ISIAGNPDPCQVDAEIPSAPVNYALYDGFLGSFPVSPTLRSSTALLLEGYSYQVTKTEIMVR

SEQ ID NO: 189950 - protein, 74 aa, Oryza sativa
  Clone ID: PAT_MRT4530_86409C.1.pep
STCLHALQVPQGLSREWPQVLHPIRAAARPTADDEHAGGGLEHLLVKVGGGRQRRHRGGHLCSSPSSLLLCSRT

SEQ ID NO: 189951 - protein, 159 aa, Oryza sativa
  unsure (1)..(159): unsure at all Xaa locations
  Clone ID: PAT_MRT4530_8640C.1.pep
RKRQPGWMKLNVDGSFDPNYENGGIGAILKDERGTVIFSSCRFFERCYDALEMELLACKEEIVFGDSWTLKLIVVESDCLEAVRMLQSAERSIYSGXITREINALMCRNREIIIQKVHCGQDCASHILANKARCEEVSNLWLEDEETTQKRRGQTAEEG

SEQ ID NO: 189952 - protein, 376 aa, Oryza sativa
  Clone ID: PAT_MRT4530_86410C.1.pep
MAAAMALQVVAGGGCCCQRPVLGAGRRRLAAARAVASDAAAAKVSEEEGKVRLGGSEVAVSKLGIGAWSWGDTTYWNDSEWDDRRLQEAKAAFDTSIDNGMTLFDTAEVYGTALMGAVNSESLLGGFIKERQEKEQIDVAVATKFAALPWRFGRGSVLSALKKSLDRLGLSSVELYQLHWPGLWGNEGYLDGLADAYEQGLVKAVGVSNYNEKRLRDAYARMKKRGVPLAANQVNYSLIYRTPELNGVKAACDELGITLIAYSPIAQGVLSGKYTPEKPPTGPRANTYTPEFLTKLQPLMNRIKEIGESYGKNPTQVSLNWLTCQGNVVPIPGAKNAGQAQEFAGALGWSLTGDEVEELRSLAREIKGIKMPIEES

SEQ ID NO: 189953 - protein, 86 aa, Oryza sativa
  Clone ID: PAT_MRT4530_86411C.1.pep
NLEIYQAPIYSGHEREEKTSLIAHSLSGCSKSAIIASGESSYHHSSLIHLYSLQNLTCFFCVVPCLHGVSLNGLLGLRFGSILAFK

SEQ ID NO: 189954 - protein, 138 aa, Oryza sativa
  Clone ID: PAT_MRT4530_86412C.1.pep
MAAAMALQVVAGGGCCCQRPVLGAGRRRLAAARAVASDAAAAKVSEEEGKVRLGGSEVAVSKLGIGAWSWGDTTYWNDSEWDVGLVLSSSKQQGQKVCDQVMLPMRTRQETAGGKAAFDTSIDNGMTLFDTAEVYGTA

SEQ ID NO: 189955 - protein, 142 aa, Oryza sativa
  unsure (1)..(142): unsure at all Xaa locations
  Clone ID: PAT_MRT4530_86413C.1.pep
FFFFCTFSSQQHHHPTLSKHPATQTTNQAGSRPATNPIQSPTPILFFFTISAPPTXAQGICTHPNSSHVISXAATMAMLILQLRTRFASACIRQVCIRRSTAHAPLHAFQFAWGPVPGLIPVNLSAHSFAVCTAAWLVLHSS

SEQ ID NO: 189956 - protein, 100 aa, Oryza sativa
  Clone ID: PAT_MRT4530_86414C.1.pep
EELNPCMFNEETSYTFKACMHACRVECAHLILLTCLAVLVLQSTQPLPRNRAVEQRHRSVMRGTVRVKQGRIDVGSARRCSTHSPRRPAAPGVDARQQKK

SEQ ID NO: 189957 - protein, 567 aa, Oryza sativa
  Clone ID: PAT_MRT4530_86415C.1.pep
MVLASTPKVVLGCVAFTIFWVLAVFPSVPFMPVGRTAGSLLGAMLMVLFRVMTPEEAYAAIDLPILGLLFGTMVVSIFLERADMFKYLGNMLSWKSRGSKDLLFRVCVVSAVASALFTNDTTCVVLTEFILKVARQNNLPPQPFLLALASSSNIGSAATPIGNPQNLVIAVESGITFGQFLLGVFPAMVVGILANTCILLCYFWRYLSADRDQLEGGGGAHGPEVVADEEVTSHRFTPARMSHASSVNDSDCISEPIRRSESMNRADALRSRSYNSEGDIQVAIRSLRASSLSREMVEVSTVCDRRDVVVDGGGGGGPRKITRSTSHQRSVIIEDAPEQHQHPAGLFDGEKDKDDEAIGKRRRWKVIVWKYAVYLTTLGMLAALLLGLNMSWTAITAALILLALDFTDAQACLEKVSYSLLIFFCGMFITVDGFNKTGIPNTLWELVEPYARIDSPKGVVLLAIVILVLSNVASNVPTVLLLGTRVAASAAAISPASEKKAWLILAWVSTVAGNLTLLGSAANLIVCEQARRAQFFGYNLTFWSHLRFGVPSTIIVTAIGLLIVMSY

SEQ ID NO: 189958 - protein, 97 aa, Oryza sativa
  Clone ID: PAT_MRT4530_86416C.1.pep
MPSKERNGVVISMYGLAKGSPDDEIYGRKRNEPSEKGAPVFPLQSSQEACKRRAAHRASRASPGVRIWAKTTMGIVIRLQTFLLLPPLVVDSRDHAL

SEQ ID NO: 189959 - protein, 771 aa, Oryza sativa
  Clone ID: PAT_MRT4530_86417C.1.pep
MPPETTEAAALRGAILAASTAGAAGRAVSSVADYLRRHAGDHPRAFFADALPSLLFRVFVASPDSPSFIDLAAGDPALAELLASLLAPSGPLLAAVSAADRHALLRFVFPPERLPDWLRLALSSATAASSSSSSSSDEVISPLLAGRVDSELHLSVFEYYLFWFAYYPISAATAKATGMAAARAPKIPPSISEQSLKSLGRIESWMSTLGSSAGRNLGQKLESSLYLKLLYSYLKEFVPSGCVPPRNMGGTLLHRTVNDGIDAAESFRRAEFFVHTLIQFWLVGDDFSPLAVQTCRAYGLPLLSLQSHANATLVEQPPAPGLGDAVKLFVMYMNRINASVDIDAPNVFEGISSWREACNSPVGYWNPLIQRPLYRFLLRTFLFCPMGVEIKNVAQVFSAWIVYMEPWKAQKDDLDAYDLPPPGCHNVHRVTEGKRQVSEAVYSPEWENFVLSNYLFYSSLVVHFLGFAHKFIHSDVSSVLQMVSKVLEVLASSTELLGLIYSVDATYHHRFFGSASCYLDHVLKYVPSIREQLQDWEYGLSESDADGSFLHERRNFNLRLFSFDEEGAYNLLQLLLLRAESEIQRLPGDAMQSLQTLDLIKSQMKKIFREHIESSQPMNLVERECSQHHGRGEVFAPKHPRPWKHSLANVNWMTRPISDSEVAWLASLLIRFSAWLNEILRLDRDDSDAIPTGPTNIKFDGNELNGVGGPKDAARMVFIGACSLLVLVGQSILHFMRTHSIRINLRILASKKLLTAVMLYALFTVARNALS

SEQ ID NO: 189960 - protein, 61 aa, Oryza sativa
  Clone ID: PAT_MRT4530_86418C.1.pep
MNAVNSVVDSLSEFTKDSVRIVKRWHKRHRKEFTKVAARTAIGFLFMGLLRLLLKLMFIPI

SEQ ID NO: 189961 - protein, 365 aa, Oryza sativa
  Clone ID: PAT_MRT4530_86419C.1.pep
MSMEEAEECSAACGFSLTCQEDGADLGDGVVDDDDDGDVFLFYNAVAAADDEEEEEEYVEQMVSKEASFCCSSSSSLFDAAAGDGYGDGDGDGDWFRQARLAAVKWILETRGYFGFGHRTAYLAIAYFDRFCLRRRVDREAMPWAARLLSIACVSVAAKMEEYQSPALSEFDAGGGRVFCSDSIRRMELLVLSTLGWRMGAVTPFDFLPCFSSRLHRHHHGGAGAAGHGAAAAARVALNAVGFIFATAEAGSVLDYRPSTVAAAAILAASYGAPLTKEALESKMSNLSPSCLIDKENVHACYSMMVGDMNNNRRSSKRPLQCSDSNEITTTSTYDSVLVDDVTDTAAFAATAMNKRLRPEPPRIR

SEQ ID NO: 189962 - protein, 275 aa, Oryza sativa
  unsure (1)..(275): unsure at all Xaa locations
  Clone ID: PAT_MRT4530_8641C.1.pep
LGFCLFQGEQAEGEGRADRVHGSGAHAAASRSTVDRVHPGSHRPAPWAPHVSRTRGRGRLTAGPHAAATRRARGRPRRRGRREAARPRPDGRRRRPPARRSGGRERGGKGERRRRSTAHPGATAATEEAAGAEGGGGAARVDGVDGVPAVGDRNGEVDEVGEDAANPKEAVPRWEAVRGDDSGGPELGGDGGERERRRELESGEEEGRREVETDGGXVRGGGGGSGGRSGMTGGPHPSARVAGGPARQRRARGERPSGPRGEEREGERDGPNLAH

SEQ ID NO: 189963 - protein, 417 aa, Oryza sativa
  Clone ID: PAT_MRT4530_86420C.1.pep
MARASSSSSPPSPRLLLLLLVAVAATLLPEAAALGNFTAESRGARWRSRRARRRAFENGLGRTPQMGWNSWNHFYCGINEQIIRETADALVNTGLAKLGYQYVNIDDCWAEYSRDSQGNFVPNRQTFPSGIKALADYVHAKGLKLGIYSDAGSQTCSNKMPGSLDHEEQDVKTFASWGVDYLKYDNCNDAGRSVMERYTRMSNAMKTYGKNIFFSLCEWGKENPATWAGRMGNSWRTTGDIADNWGSMTSRADENDQWAAYAGPGGWNDPDMLEVGNGGMSEAEYRSHFSIWALAKAPLLIGCDVRSMSQQTKNILSNSEVIAVNQDSLGVQGKKVQSDNGLEVWAGPLSNNRKAVVLWNRQSYQATITAHWSNIGLAGSVAVTARDLWAHSSFAAQGQISASVAPHDCKMYVLTPN

SEQ ID NO: 189964 - protein, 66 aa, Oryza sativa
  unsure (1)..(66): unsure at all Xaa locations
  Clone ID: PAT_MRT4530_86421C.1.pep
VPPCTGIYDSCSRCDSSLTQPPPPSLSFFITRAVDLLRPVHLQHPLYTDPTATHESAHASAHASXY

SEQ ID NO: 189965 - protein, 64 aa, Oryza sativa
  unsure (1)..(64): unsure at all Xaa locations
  Clone ID: PAT_MRT4530_86422C.1.pep
APHDACCMRSSKWLRPFTGXVSATTHYSCSGQGAPSITSPQSLVTVHCCCVFLHPGGTFPGTWV

SEQ ID NO: 189966 - protein, 68 aa, Oryza sativa
  Clone ID: PAT_MRT4530_86423C.1.pep
PTPGHKPSHYFHSEPVWHCESIAGTHVKIPQVWPKIKIEKGVPLQRVRWHLYNSHSEQGGPPFFVSQT

SEQ ID NO: 189967 - protein, 410 aa, Oryza sativa
  unsure (1)..(410): unsure at all Xaa locations
  Clone ID: PAT_MRT4530_86424C.1.pep
MAPRKKKEVFASSQGKQIRFLHYKAETPPQRQEPNRLLLPKRPKPPTSSRPFSPPPPPPPPTRRRPMGSEEEPSQMRRALVDALAGAISGGISRTVTSPLDVIKIRFQVQLEPTTSWGVLRRDVYGPSKYTGLLQASKDILREEXGFWRGNVPALLMYMPYTAIQFTVLHKLKTFASGSSKTVLTXICVICPEDHLHLSPYLSYVSGAIAGCAATVGSYPFDLLRTILASQGEPKVYPDMRSAFLDIMKTRGFRGLYAGLTPTLVEIIPYAGLQFGSYDTFKRSMMTWNRYRYSHLNSGSEDDSVSSFQLFLCGFAAGTFSKAACHPLDVVKKRFQIEGLKRHPRYGARIESSTYKGMYHALKEIVAKEGFGGLYKGLFPSLVKSAPAGAVTFVAYEYISDWIGSKAGVE

SEQ ID NO: 189968 - protein, 414 aa, Oryza sativa
  unsure (1)..(414): unsure at all Xaa locations
  Clone ID: PAT_MRT4530_86425C.1.pep
DLTLYFKTSPETRVYGVDLVAGHAKVQVDMVKDNCXNWQLPIPPKDEILTLAHARGMFIQWPKDLITTKIIPRSNVAAGPTHLARSAKAHAPQMAIEAPFGSHVLDFGGMAIDRPPSKKRKXANSSPPMVSSRPNHGRGKLKGKGKVGGSSLPPKRLDLDKEVYVALKILDHDTFWPGMPLDQDNELARMGTITRELRRYYVDKLNSKRKNSDMSILGHHDQAPFLGPPSYIIVGFSDLFNLFRLRAVDTDLPKCYSLLCWMEARKTRSQVRFLDPRQVNETQLKSXLDDVVGYIMNNLRAHXDKGFIILAHNQXFHWILLCIVPKWSRFYYLNCRISDKYDFNALKEALNTAWDXYVQKWACIKKEKSNLYHHDDFKCKQQSSETCGFHVCHTMKVLTGQVTALDPEVCGILI

SEQ ID NO: 189969 - protein, 43 aa, Oryza sativa
  Clone ID: PAT_MRT4530_86426C.1.pep
GRVGGFGGLYKGLFPSLVKSAPAGAVTFVAYEYISDWLESILM

SEQ ID NO: 189970 - protein, 238 aa, Oryza sativa
  Clone ID: PAT_MRT4530_86427C.1.pep
MGRPGIGQTTMGVAVRPDNTLRSDYHKGCSQTTGHITNRDGEDGSLTNAGRTRRAPAVARGRRRDGRTDDFLLLLLFVVNEWMDLPPAVRTHRDKRLWQTAEMGTTTGGEARFGVESTGSDPRRSGGRGGGGGSSVAGGEAAVVRRLGGGALPSVKSGGRWRWRSGSGRGYSNDGLAAVVRRPERWRQWLPATATAVVVEKAAAPSSSPSDDDGGDGDVSGGGAVEKAVASSSPPSSS

SEQ ID NO: 189971 - protein, 85 aa, Oryza sativa
  unsure (1)..(85): unsure at all Xaa locations
  Clone ID: PAT_MRT4530_86428C.1.pep
HPQGPKPGFMVXGAPLETVPPPPYNVANDPKGGYKDFQSIGRRPQFKTPAPQIKKSFPPLTIISRALFFVGSPPKNFSSQKKKKK

SEQ ID NO: 189972 - protein, 961 aa, Oryza sativa
  Clone ID: PAT_MRT4530_86429C.1.pep
MAVAADITGGEHRVQMPAQGGGGRRQKQLAAPEKQLNCFVHILAVIERMGNALGTLAFTWATVVLLGGYPTVLRPEDDFWFATTMVFLEAARMFSRDNRLDYQLFFSTRGAFRLLGWSGLLTVAVYFSVVLVILSRSLASIGGNVLVALLVDMAMLLALGQLLSPAALKLLCDPLRHAISLWSPLLAILLIATISRLRLPCIRKLADSFPNTKQSVWRQIILNLCMLAAIVMLVFIFSELGPYAMIVYQLCALVVVSFGNFQIPAAVVRVVLALLRLVPQKPHKYLVDDKNGEHDSEKNLEPSLNIFYGMVLAQGILYIVACLLEVFSFIPRRYLIRRSGFGGQMGVEYVNLYYAYAFEKCMGGAVLAPKKISLITFAMDSLNSDSSRNKLYGVQMLHRFLKKEQLRTKTITKLTNAKKTVALLFDMLGWTSDGDEEIRFFAAKVTAELAGSLRVVQIPGATQLVASLLDTDHQQRIRDHFLLIDSQVGREDSPIQQVGMAEQNSPVLKYLKQMAIYFFIPVDEPSNTHQRNSRLLRWWKQITKRWSVPEEEPSTDQDFLPIQGLLILQRLANFDPGNCMEISRTTGLISKMIDFISYRNHMTSTSEAHQIMLASLSLRVLRRLASAEGKLGVTLRQQILEHTFILSNLAEIMDDNGSSHDLKQLAAEILKNLAMDRNTSEDIGHIRVIISSLMREFLSQDPSSSRNCNHLLRKNAGQALAILAMESTDNCLVMLMEPGYVFIRELTTMIHDNRYKCTAASLLWNMCEHAQPELSNSDLKELSYILREGEPTCSLHIVSQSIHICALNIDSIVLERTMDAEGAELEVFIGLSSQICKVIPEDFAREVEHGQIKEKFVKRLVDVLNAHMRPSAHCPGIRRVIVQHAIYLMEFNSRYANDFHKCWMVETLSMVERTPSRSENYKLFSGDTGLMEHNTPLSALVARAKELMGREWVRGISSSVN

SEQ ID NO: 189973 - protein, 236 aa, Oryza sativa
  unsure (1)..(236): unsure at all Xaa locations
  Clone ID: PAT_MRT4530_8642C.1.pep
GKEDLLRQRLGFXVDRAHGGGSRERTAEIDXSKTDGXDRSVHDRLTANGPDDVSDDVTTGGGGSAARACMLAGERRHGGANGRHQRVERDATNSPVTKRAAEDQRTATATTKKRWRSSGQRRRRCSGGQQRRRRSGRGRRRDGDLPERRQRLERRRRTAGATAAMAALGHTALGRYGRREAKARVAAGREELGGPFKGARRRRRRPTTTGDEKERSGLXEESRSDSNSNPSISKPI

SEQ ID NO: 189974 - protein, 109 aa, Oryza sativa
  Clone ID: PAT_MRT4530_86430C.1.pep
MQSAGKHLDDDLVSYILASMDVDFNPVVTSVANRTKAITVGELFARLVSFETRMESWRLSTAGKVVTAAADVGATITFIPWKQILIVRFVIIIASKLFLLPFYSYYKIL

SEQ ID NO: 189975 - protein, 53 aa, Oryza sativa
  Clone ID: PAT_MRT4530_86431C.1.pep
MASFESGWRCSFFVSELIAMSSRNVPTNHNAYIFKPNSKSLINPLGLIAANGT

SEQ ID NO: 189976 - protein, 62 aa, Oryza sativa
  Clone ID: PAT_MRT4530_86432C.1.pep
MPPHTVYLPFPAQGHITPMMKPPPAPSPCAPHLDQQGDQRQLVIELEAHSHARRLRSCCKEA

SEQ ID NO: 189977 - protein, 57 aa, Oryza sativa
  Clone ID: PAT_MRT4530_86433C.1.pep
MKFLVDSDKGMSEKALAVLDAALCTERASRSTRGKRRARGREMSLSSAPHVTEGDTA

SEQ ID NO: 189978 - protein, 1118 aa, Oryza sativa
  Clone ID: PAT_MRT4530_86434C.1.pep
MEKATATTKVAGRRQRGMDSSPAHEGDGVPVGFRRREAVAEMAHTAAELAAAAAWRGGGPSGNGTRPEMGGGDGARRAWRDGGRGRGRGRPLELMKRVEIGRSLLGQCVQNLEEVLESVRRENRRAEVVGGARGSFKSGGFSSVSARAIPGVGGRADDRRSQDDHRTPEDKIAALQAYRRAKGLCHTCGEKWSKEYKCGPTVQLHIVEELLGMFPSEAADGCDSDCREDEVTESEGVLCQISKEAILEFADKLSTQQYFCPAIKVKVADGGSIFDEPQGLPPSRVFDHSIPLLPGAKPVNLHPYRYNPAQKDEIEKQVREMLQQGVIQPSANPFSSLVLLVLKKDGTWRFCIDYHHLNAIIVKNRYPLPIIDELLDELLGACVFTSLDLRAGFHKIHMKLEDEHKTAFKTHNGYYEFRVKRSKCTFASSQLTYLGHVISDAGVSTDPKNIAAVVRWAVPQNVKEVRGFLGLAGYYRKFVRHFGVISRPLTDLLKKHVVFVWTSEHQAAFDALKAALTSAPVLALPDFTQTFEIETDASDRGVGAVLMQVDHWRSYLQFGEFIIRTDQRSLIHLGDQRLATLWQQKALTKLLGLQYKLVYRKGVENRAADALSRCDSPEILQLSALSVCVPSWLDEVRDSYASHPHTSSLLSQVLLQPESAPHFSVTDGVLRYKGRIWLGHNVGLQQKVLGALHNAAVGDHSGVQVTYTRLRRLFAWPGLKKSVQLFVDSCSMCKQAKAERVRYPGLLQPLPVPEHAWQVVSLDFIEGLPLSLGFNCILVVVDKFSRYAHFIALAHPFTAFDVALAYMQNVYKLHGLPQSMISDRDCIFTSNLWSELFKLTDTQLRMSSAYHPQTDGQTERVNQCLETFLRCFVHACPRKWFRWLALAEFWYNTTPHSALGTTPFEALYGHPPRHFGVRYIAECAVPDLTEWLQERQIITNLLRQHHLRAQQRTKSQADKHRSDRVFAVGDWVFLKVTARVGPVAYRLQPPYDCAIHPVVHVSQLRKASPPQSAVAVRPLPLVESEELIPVQIIARRLYKRGAAAVEQVKVRWMGQSSSDATWEDLAVLKQKFPTVPAWGQAGCPEGGHVTADDNPIKTIRRSARERRPNTRVTGPEWV

SEQ ID NO: 189979 - protein, 697 aa, Oryza sativa
  Clone ID: PAT_MRT4530_86435C.1.pep
MGAGKKTQTENEFRELPEKELGGVVFCCNNNTFDECFTKQLFGLPQRNILYVKNVKPGLPLFLFNYSNRQLHGIFKATSTGQLNIDRFAWMSEQSNDAKTNAKTTPFPAQVRFSTRTECPPLPESKYKSVIINNYRKDKPSHFRFELDHRQTRDLISLFLPAPVRANQNKLSIPKPPATAHTVPNPWNRPLPFLTAKAPVVSDKVKSESNVKDVDQFNVSSHSHDIVPHTLPDVEVDLASTSTTSRSNLNKDASGCDDLVAGLIKEDKESVDDDQHAKMDLPVKLQELSSLQQKEANFLEDAPVSTSAQSIRQDTRFAATLPKDSFNATSQCDTSLKDTSFVQCHEYAELYQIINDLSKKTEEMEKMKVDSDQEILLLKKLVKVMERKVEHLEQQLEKSHSSSAPLFGVTNDDVEGPSILLTGGHNGINWLSSLDSYCPATDILETLMPMSSARAYAAVATLKDHVFIFGGWNGIRSLWYNTVECYNRGANKWIGLPCLNHEKGHLAGATLNGKIFAIGGGDGSQSFSEVEMFDPAVGKWIYSLSMQQPRCAPAAAELNGVLYVIGGYDGNMSAERYDPREGFWTQLPRMRTRRGSHSVVVLGDSLHALGGLNRNTTFSSVEIFDTRANSWRRGSPLSVPRAHGCAVTLDGNAYLIGGIQSSEEYVETVEVYKEGQGWSISGSKAFGKRAFACAVAI

SEQ ID NO: 189980 - protein, 340 aa, Oryza sativa
  Clone ID: PAT_MRT4530_86436C.1.pep
MRPSLLRYAAQALRRRDYSSAAAAAERKVAILGAAGGIGQPLALLMKLNPLVSSLSLYDIAGTPGVAADVSHINSPALVKGFVGEEQLGEALEGSDVVIIPAGVPRKPGMTRDDLFNINAGIVKGLCTAISKYCPNALVNMISNPVNSTVPIAAEVFKKAGTYDEKKLFGVTTLDVVRAKTFYAGKANVPVTEVNVPVVGGHAGITILPLFSQATPASNALSHEDIKALTKRTQDGGTEVVEAKAGKGSATLSMAYAGAVFADACLKGLNGVPDVVECSFVQSTVTELPFFASKVRLGKNGVEEVLGLGQLSEFEKEGLENLKGELKSSIEKGIKFAHAN

SEQ ID NO: 189981 - protein, 92 aa, Oryza sativa
  unsure (1)..(92): unsure at all Xaa locations
  Clone ID: PAT_MRT4530_86437C.1.pep
QHYDLFSNSNDSGSVPXYFVDLPPGCCNDDITTRPLSDSYPPEMYRSIVCXGAASSSXPLKATSATXCPYRGSDGDYVEPXTPGILVVEERP

SEQ ID NO: 189982 - protein, 48 aa, Oryza sativa
  Clone ID: PAT_MRT4530_86438C.1.pep
KQLHSDLNFQEVPPQVKSQCLMKHQKSSIQKLVQFIKSSCSSFSVFIS

SEQ ID NO: 189983 - protein, 107 aa, Oryza sativa
  Clone ID: PAT_MRT4530_86439C.1.pep
SMPPPNVRQTKEPPVCSRLHRLSLKAARHNSILRHVCTSWQLLDRSSVNAGRSSSVTTLSPQSVLCLDPICIWYDIYLPDSAVSALSASVLPKVPSDRSWMQCQHIL

SEQ ID NO: 189984 - protein, 251 aa, Oryza sativa
  Clone ID: PAT_MRT4530_8643C.1.pep
MGDEEAGPSSSGHSSPTSNTSTTPPPQPPPPPPPPPHPQACAACKHQRRRCTPECRLARYFPANQPARFRNAHRLFGIKNILRVMASASEELRDDAMKSVVYESDAWVIDPLGGAAGIVKGLSQELARLKAELDAVKGLIELHRRAAAQQQQQPPVAVASNGGFLPSPPPPPQGQQQLLFLPPPPPTMMLQDGHCDDETVEDDYLVDPPAVDAAAATSTAPERHGDGHAPPANVKEEGNVDHTSSISFRDR

SEQ ID NO: 189985 - protein, 438 aa, Oryza sativa
  Clone ID: PAT_MRT4530_86440C.1.pep
MTKKKLQVVRPRAVSPLPALAAAAAVAVVLLLLTAAGRPSFLGRYEAITISGVASLPFGYSSESARRAPPAVAVARVPSDCDIFRGEWVPDDGGGAAPYYTNESCPLIQEHQNCMKYGRPDLGFLRWRWRPERCELPRFDAAAFLELVRGKSMAFVGDSLARNHMQSLMCLLSKVEYPKDVSKTTDPGFRTMHYGSHNFTIAVFWSPYLVTANQSSDPAAGGLWDLYLDEPDAAWAVAVAGFDYAVVSAANWFTRPSMFHERGRLVGCHYCLVPGVPDLTLRYSLRAAFRTALRALAAGAGGAGVFNGTAIVRTLSPTSHFEGGEWNKGGDCRRTRPSTANETRMSGLDLDFHTAQVEEFRRAAMASGRSAARLLLMDTTAAMVLRPDGHPSRYGHWAHEKVTLYNDCVHWCLPGPIDVWNEMLLQMLLLHQPGAVSV

SEQ ID NO: 189986 - protein, 310 aa, Oryza sativa
  unsure (1)..(310): unsure at all Xaa locations
  Clone ID: PAT_MRT4530_86441C.1.pep
MVVGTSGGGGFMIGGELEKVLATPSLSHRRYFDGEDAEKGESGCHAQKFNPNFQTILRIKSLSRTSQEAVAGPAPLHHAHPCLDALTRGKLHYKPSRCPRWLVRDEVAVHRGPGPQGRSTAGPRVGRPRSAKADRTAGDGRAARRRPDNRRRRWRNAALAREAAGEEEKEEGGGSPRGAATDGAAAEGGGGAPRGEDDGGDSAVSNEGEGAAGVRGSAANAVEAVVWREVARNSEAGVLRDAAKPTVAVAWLGGGYGGGGALPESAKXGGARVHGGIGARVVYCGSGAVDGMRQSAARPAMQAARHGDGG

SEQ ID NO: 189987 - protein, 56 aa, Oryza sativa
  Clone ID: PAT_MRT4530_86442C.1.pep
YDGVYVKVLDLQIFITDRRVRLRILRMKTVKVRKRDVVLTFVGARCIFAFFFLLFL

SEQ ID NO: 189988 - protein, 532 aa, Oryza sativa
  Clone ID: PAT_MRT4530_86443C.1.pep
EGLMTYKQFIQVLEDDISPAEAEKRYQEYRTEYITTQKRAYFDLNKNDDRLKDKYHPTNLSSVIDRRNDSCKATAKDFFHDLQNGTLDLGPGITAAAASGSDGNSDDDGDSDKRRKHGRGSSKETDPLSGAPVAHPVSSESRRVQVDIEQALALVHKLDTEKGIVGNILSSGDHDKSDVDKSHIGSMGPIIIIRGLTTVKGLEGVELLDTLLTYLWRIHGVDYYGMSETNEAKGSRHVRADNKTSNTTNINAADWEKKVDTFWQERLRGQDPMVILAAKDKIDAAAVEVLEPYVRKIRDEKYGWKYGCGAKGCTKLFHAPEFVHKHLRLKHPELVLELTSKVREDLYFQNYMNDPNAPGGTPVMQQSAPDKSRQRPGMDNRLRYDRANRREYDRAERDGSRYGRGDRSPSLDGADDQMFDAFRGRGPNAPFVPELPAPPILMPIPGAGPLGPFVPAPPEIAMHMLREQGPPPPFEPNGPPHANPGVLGPMMGGPAPIITMPPSFRQDPRRLRSYNDLDAPDEEVTVLDYRSL

SEQ ID NO: 189989 - protein, 228 aa, Oryza sativa
  Clone ID: PAT_MRT4530_86444C.1.pep
MQRNKGAEFEKSLPTLALVSDFLPISFHHIYLKQMGDKKLTKLKVRGANDVEVKSVLRQEFKESVDQDNFKVKVDGSSLKVDVPGTVDVGKLYERLKKMSSSVKIESVVPDDLMAKMDRYKKDLQNMKKQKEAVESKQIKQEEGYKLLQQEQRKWKRDKENLNSKLEKKTKETKDAKEELKITKREKEYLNTKLETKREENKRLDEENKKLQRKIKDLQEMQKVFVCC

SEQ ID NO: 189990 - protein, 108 aa, Oryza sativa
  unsure (1)..(108): unsure at all Xaa locations
  Clone ID: PAT_MRT4530_86445C.1.pep
KKKKKSKNKDKEPKERKERHQHEKKTDKERREGKRSXGQQGAGRKAKQPPPPTRKGEAQEPQQDRRRQETQQKTGTQHNNGGQRQGKQQQPGERSRKGTPPPRRQEPT

SEQ ID NO: 189991 - protein, 130 aa, Oryza sativa
  unsure (1)..(130): unsure at all Xaa locations
  Clone ID: PAT_MRT4530_86447C.1.pep
HFHNCFSQISNASILLCGQRHNGGGGSLPSXTILHTLILLFNHVEAICIQTVSSAYILSVTAQNYIILYYXLPFFIPTLSNHNLVFXTANQSQSNTYLPAPSSILSQLIGNFSKNGLXXXHMVALSSAHT

SEQ ID NO: 189992 - protein, 108 aa, Oryza sativa
  unsure (1)..(108): unsure at all Xaa locations
  Clone ID: PAT_MRT4530_86448C.1.pep
MDSSYQHDKPLLDEENSSQVTLEYTGDGSVCIRGHPALRKHTGNWKGCSLAIACSFCSYLAFTXMVKNLVSYLTKVLHETYVAAARDVATWSGTSYLAPLVGAFLADS

SEQ ID NO: 189993 - protein, 585 aa, Oryza sativa
  Clone ID: PAT_MRT4530_86449C.1.pep
MFRNKVLVRARAVPSAPPPPFILRQLSFPAAVPALDLDILCCRLSRRHRLACLPQPPSDVLVVYQRCQSCAAAEAVSGIAEAFEGAAVGEEEEVVCSGSLVAKAVECDLRSLMLEHGWRCLGESVYVLSTFADTKERTDQCTVNVEVKLGRNDDIEFAVSPDALRFTTPKFSDFVSSDEMETFENGKEVILDYCNFRTACTTLPTLQEGHVIEDFYFPLITGFSKTLPTGQCLDKFMQLCSLKHDLEADYSHYAAVRFGYESSHEIWLPCSFVLQGSGLQPAPKSSRASRAMCALQSFMGLLNAWNFFGQNQLVIKEQLLLNSTATLPTWDKAMSSARTNNSEDLRLVHTNILTNDQSLALAQVALLKPSFSRGKSEQGHKRKHSSEHSDADNSDKLRHTSLTNSTLVTFPKASYLNPVSLSNASLSKRAETLSDPCRFLEVIKESMQSLWIEIVKKYQKLGFCSTKSIKDCIPQVPDETRAIPGVKNDMLSTKVVDNQKDELMKKATKAKGRRVVNSTELTSMNSKTNSDVLNDDIVRKVTDHQKRGELRLLTVADLKCFLSARKVKVGGTKEMLIKRVAELIG

SEQ ID NO: 189994 - protein, 809 aa, Oryza sativa
  Clone ID: PAT_MRT4530_8644C.1.pep
MKIGMLGVGQDSAVLSIKDDGAPNKLPSTPQALASQSPPPFQPCSAAVPDAAVAREDRRRHRRCVAVLVRPFAAAEDRRSTLVTVDPKSFAASSSSPSPSVDLPPPFWSPMPRYKPEYLFGVEGFVQELRTMSFAIGFGTAPFYAQIPHDRHEEKCRVKVTLNSNSEEVPSVMFEAGGRNYIHACQEVARIAIGELRDRYSDQLADTEYRYHPRQPQGSDRGSYLETEGIENDATTRHLVEMLWAMDESRAETVLAAQDREDRNRGKICKLEDKVDRLEKELAALKGEAPPQKARIRLTARKRALFVPRYQLAPKVRVVEKEVAPAQADPPVIIISDEEEEESKRNHSKIEWVATQDDEDEPNEPSIDLRCSEELDTTNPVEAGDWLHAIEKKLDLLQCTDQEKVSFASHQLHGPASEWWDHFRLNRITAEPITWLEFTAAFRKTHIPSGVVSLKKKEFRSLTQGSRSVTEYLHEFNRLARYAPEDVRNDEERQEKFLGGLNDELSYPLMVGDYPDFQKLVDKAIRQEDKYNCMEQRKRRIAHFKAQQGSNQKPRLTLGPQSMPQGGSSSVVRPQRQFFNNNAGNNIRNQAPRPVAAPTQQQPAKREQGSKSVVCFNCGDPGHYADKCPKPRRVKVVPAQNNSTVPASKARVNHVAAAEAQDAPDVILVREYPDVFPDDLPGYYRRFIENFSKIAKPMTRLLQKDVKYKWSEESPQALASQSPPPLQPCSAAVPDAAVAREDRRRDRRCVAVLVRPFAAAEDRRSTLVTVDPKSFAASSSSPSPSVDLPPPFWSPVSSPRRPLRAGALR

SEQ ID NO: 189995 - protein, 153 aa, Oryza sativa
  Clone ID: PAT_MRT4530_86450C.1.pep
MAIGGGGAAGRRVLAAMMMDVLTSKEGRKLKAEQQQQQLPDGSTIDVRRRCRLVVYALITNSQHVNLVCNAVPLILSLLRRALNDPRGMITRGETAAVLLGYREREIIMFDNSVLTVNALPYTQTIHPANQTQQLTTEQGWIYRRKAGIKRHR

SEQ ID NO: 189996 - protein, 340 aa, Oryza sativa
  Clone ID: PAT_MRT4530_86451C.1.pep
MATARGARGATGDATATRRGSGGAQLEAAMGRDTGLGVDVTSTKSGTYGYQTDLGTWYLQDKVLEHDAVGVFLTHSGWNSTLESPASGVLMLSWLFFAEQQTNCRYKQTEWGVAMEIGGEAWRGEVAAMTLEAMEGEKGREMRQRAEEWKQKAVQVTLLGGPWDTNLDRVIHEVLLSCKDKTLSVNASASAQILALYELQKQQHKFLEQQHNFQMPQNFQKQQHQSSAVAISFQQQQQQQILANSTIKAGSLIFPLATPGAEDEDATQDIPALCQSTMTNCLGHLLALLARLKEWKEKAVRVTMPSGPGDTNLDRIIHEVLLSCKGENGSGSVGSHPSHS

SEQ ID NO: 189997 - protein, 288 aa, Oryza sativa
  Clone ID: PAT_MRT4530_86452C.1.pep
GRGGYGIVYKAKLRNETVAMKILNESSRQGEREFKQEIAILKRIRHQNLITLRGACSEKFALMYELLPNGTLEDRLINEKQRESFSWEERVRVATSICTALVFLHNAKPNPIAHGDLKPGNILFDDENICKLSDFGISRLLQQTNDTGTPNHITEVPKGSGPYMDPEFKNTGKLTPQSDVFALGIILLQLVTGQSATGLRKHIVDKLEGKKLEKMDTRKLDDTSIQDAVKMVSLGLRCSNSERKRRPSLEIEVWPEIESIRTKVITSFSSNVLHLPSTTSPAYFVAYR

SEQ ID NO: 189998 - protein, 691 aa, Oryza sativa
  Clone ID: PAT_MRT4530_86453C.1.pep
MRPLLAFAAVCALLVAAAAPAAAEEEKANKFRQREATDDMLGYPHLDEDALLKTKCPKHVELRWQTEVSSSIYATPLIADINSDGKLEVVVPSFVHYLEVLEGSDGDKLPGWPAFHQSNVHSSPLLYDIDKDGTREIVLATYNGVVNFFRVSGYMMMDKLEVPRRKVHKDWYVGLNTDPVDRSHPDVHDSSIAKKAASEESHPNIQDKPVVNESSKESQSRSTNDSTTRGVDSMKHASKEEPVESKPNSTRGQENMDVLNNLNSTDAGNNSSLSTTTENASHVQRRLLQTDEKSNQAGSSETDASDTGTAKAATVENSEPLEADADASFNLFRDVEDLPDEYNYDYDDYVDETMWGDEDWKEQQHEKAEDYVSIDAHILSTPVIADIDRDGIQEMVISVSYFFDHEYYDKPEHLKELGGIDIGKYIASSIVVFNLDTRQVKWTAELDLSTDSGNFTAHAYSSPTVVDLDGDGNLDILVGTSFGLFYVIDHRGKVRNKFPLEMAEIHAPVIAADINDDGKIEMVTADVHGNVAAWTAEGEEIWERPTLRGVNVASPTPVAVPTVPGNIGVLSGKDGSKLQPFPSVTDVMIMTAALVLEKEEKANKFRQREATDDMLGYPHLDEDALLKSKCLKHVELRWQTEVSSSIDETPLIADINSDGKLDVVVPSFVHYLEVLESSGGASLPGWRSSSQ

SEQ ID NO: 189999 - protein, 90 aa, Oryza sativa
  Clone ID: PAT_MRT4530_86454C.1.pep
ILMLLPWGTSPQFPARPTPPFYLPPPSYPPRGGFFNNPGGLQNLLSPTTIFFLNPYLPLPDALHLSSPNFLLLPLLHPYDLHPELSLYSP

SEQ ID NO: 190000 - protein, 116 aa, Oryza sativa
  unsure (1)..(116): unsure at all Xaa locations
  Clone ID: PAT_MRT4530_86455C.1.pep
VLVQISPDSSVAAFSIRGRRCRLPSCHRPPLPPLTAAAPCVGPEPPLPTGFSGGETLLPPPLPPPPASAAAAXIPPPPASTTSLIWRRSPSPPPPPLPSGSGGGEAPPPPPLPGRH

SEQ ID NO: 190001 - protein, 154 aa, Oryza sativa
  Clone ID: PAT_MRT4530_86456C.1.pep
MQILTNPVTESSTSYLDDHIIDAYVTCLREKDMKEGTGTRAEGMVFLEKPLITKLLQRDGEHYVSKDIIDRAMAKATANRYLKHDMIFLPMNIKEKHWYLAVIHAKRRIMQVLDSRANSSTQRKELRKVEDIKYFRRKLAAILGGAQKKDKKRN

SEQ ID NO: 190002 - protein, 79 aa, Oryza sativa
  Clone ID: PAT_MRT4530_86457C.1.pep
KGRSLPPFHNKSCLNALLLHEQYQASGKYCLRMPNKWNFSFNYFYASIFFMVLYAPVYPRLFRYLIAQRKKALAKAKTT

SEQ ID NO: 190003 - protein, 121 aa, Oryza sativa
  Clone ID: PAT_MRT4530_86458C.1.pep
EKDMKEGTGNRAEGTVFLEKPLITRLLPRDGEHYVSKDIIDRAMAKATANRYLKHDMIFLPMNIKEKHRYLAVIHAIRRIIQVLDSMANSSTQRKELCCAAAMTLLSSIGSFGIGPVHAVT

SEQ ID NO: 190004 - protein, 93 aa, Oryza sativa
  unsure (1)..(93): unsure at all Xaa locations
  Clone ID: PAT_MRT4530_86459C.1.pep
MALSVMASSATTVCPFQGLKSTAGMPASRRSGSSSSCNGSTGRTIRCMQVCPTEGIXKFETFCYLSPITVEDLLKHIEYLLRSKWVTWLTTNT

SEQ ID NO: 190005 - protein, 211 aa, Oryza sativa
  unsure (1)..(211): unsure at all Xaa locations
  Clone ID: PAT_MRT4530_8645C.1.pep
CDLPCSLSQTSASTSTKSGSSEAAATGAPGLTPTGAXGPTRQPHPRARAADGRAPHGSHSARPRAAKPAQPAGGGARAPMVAGGGHRHGGAAAERGEGKGEKKRRSTAHPRSTATTKKAAGAKEGGGAARVDGVDGVPAVSERNGGVDEVGEDAAKPKEAAPRWEVVRSDDGGGPELDGDGGEREQRRELDSGEEEGRREAETDGGGAGRV

SEQ ID NO: 190006 - protein, 117 aa, Oryza sativa
  Clone ID: PAT_MRT4530_86460C.1.pep
LSVESVSYGGMGLYVVSWCSPRFEVPDNHYMANHGCFPLTVTLCDWILDTTGTPFVYRAVSTLVAMPQSRRTPHRLYAKYVETRHCGDLVCMGTTSMIEKGFVHRTDGGGGYPLKHK

SEQ ID NO: 190007 - protein, 62 aa, Oryza sativa
  Clone ID: PAT_MRT4530_86461C.1.pep
PRVRPRVRRRLPVETGDTIKILIVTHAMTRDEKGNVKTLDDLHTMTGLIEQSELRCTKIRYH

SEQ ID NO: 190008 - protein, 1200 aa, Oryza sativa
  unsure (1)..(1200): unsure at all Xaa locations
  Clone ID: PAT_MRT4530_86462C.1.pep
MGFVSGIDDFVFPPGQAFRRGEARSPPRSIPPNSAEFYPKIISIESASNHSDEIQSTPTRPDQDDGPYPSILMKLPDDLATVFTRRVSSPRKPRRDPASAPIQSNSREVGIILQPLGTVSMEELDSYLSSPGVDSRPTEILEYDDFGYHYDYSNFDDFDEGYEDNYTPLFFGVFMADNETAEXHRAREAEEERTXQEAERHRLEEGRQAQERERLQREQLERERAAKEAEDRRQRALEAGRXARELIGQQDVEGTAVFXPQQNAVAAITLLETLLKEDVPDHVVNILNQTKTMIAASVPVNSSSVRTPTGSRVPPLRSQDYHQPSLSVVGAGSSRRSRDHGERSVHSPPDRHREHRAAQSRSPRHRRPVDLRDTINQRCAARGYIPHHSSDRYDDDVDGVAAFTSDLRRVDWPAGFKPTGIEKYDGTTNPESWLTVKGLAIRAAGGDSKAMANYLPVALADYARSWLHGLPRGMIGFWAELRDHFIANFQGTFECPVGQHLEAKERYADYRGSGNTNHKDRKRKPEELVETTTPSSRQRSRVNTFDKIMNSQCPHHPNSNHAAKDCFVYKQFVEQYAKTARKPTDGDQSTSKKKDDEDDALTGFQDSRKELNHIFGGPLAYESKRKQKLTEREINAVQPDTPQYLRRSETATKFDRSDHPDRVVHLGRYPLVLDPVIGRNVEAYVDDVVVKTKQKDDLIADLEETFASIRTFRMKLNPEKCIFGVPPGKLLGFMVSHRGIQANQEKINAILNMKPPSSQKDVQKLTGCMAALSRFVSRLGEQGMPFFKLLKKTDNFQWGPEAQKSFEDFKKLLTTPPVLASPYPQEPLLLYVSATSQVEVCKLEDKFDGLELAHVLRHNNEVADRLANFGSKREAAPSDVFVEHLYEPTVPKKEVTEAADTQEVNIIEVDLREPLIKFLTKQELPQDKDKAERISRHSRLYVMHETELYKKSPSGILQCCVSLEEGRQLLKDIHSGMCGNHVAARTIVSKAYRQGFFWPTAVFDADKIVRTCEGCRFFARQTHLPAQELQTIPLSWPFVVWGLDMVGLFKRATGGYTHLFVAIDKFSTWIEAKPVVMITADKARDFFINIMHRFGVPNRIITDNGTQFTGGVFKDFCEDFGMKICYASVAHPMSNGQVERANGMVLQGIKTRVFHRLHPYAGKWVDQLPSVIWSLRTTPSRATGQSPFFLVYGVEAMLPS

SEQ ID NO: 190009 - protein, 210 aa, Oryza sativa
  Clone ID: PAT_MRT4530_86463C.1.pep
MEQQPQKKMVVSKKIMKVGPWGGTGGSPWDDGGHTGVRSITLSYDRCIDSIAVEYDRNGVAVAGERHGGAGGNQTTQIKLGFPEEYLTAVSGHYAAVAQGGAPAVIRWLAFRTNRREYGPLGGGAAEGTPFAFPVDGGAIVGFWGRSGRQLDAVGLHVAPLRPETMYEKAHKLGLMAYRSVRQRFGPQQQQQVQVQHHNSFALSQSGRTF

SEQ ID NO: 190010 - protein, 500 aa, Oryza sativa
  Clone ID: PAT_MRT4530_86464C.1.pep
MEPWAIRVAYFIVFSFLVTARFGSCAPCSEEGRALPGYSESEQDQSTDSLSNRGEGKLIGRVLNLLLKEKMFSSETPSELKEHSTISESVPHGSAGFEPCRKCLAKTVHNATPRRLLQARELVSNQTQKHHKKQSPPVQSSASHLVPRWAIYALTVAGVLFIAAVATAIYVFFSRRKKDNTVMPWATGLSGQLKKAFVTGVPSLERTELEAACEGFINVIGTLPECTLYKGTLSSGVEIAVLSTSLNSSQQWSAQSEEQFRNKISVLSRVNHKNFMNLIGYCACEEPFTRMMVFEYAPCGSLFEHLHIREAEHLDWKTRLRIIMGVAYCLEHMSQLDPPPLLPTNLSSSSIYLTEDNAAKIADIEFWKDDINKQDDQESVVYKFGILVLEVISGRRPFSEDDRLLVLWASSYLDGKRPLSAMADRTLVRSSSAAPEKDVAALCDVVRQCVRRPEGGKRAISMGEVARLVRGIAGLSPEQAAPREKPLWWAELEIASSETA

SEQ ID NO: 190011 - protein, 287 aa, Oryza sativa
  Clone ID: PAT_MRT4530_86465C.1.pep
MALYGTVMLSAALGPSPLTVPPWYGLFLLLPWKPDAINQFVMTIHGIHRGAHDVQGTNSGPTPFCVPCPPGRERGPKEERHPHHRARRKERKRTGPAPAMAMQPPRRKTGPAPTMTTQPLRIRIGRGEEEGRGRGELEVDPRRRLGHTAATVVGGGGEGAAATPLDSRRSEEEERSGGRRGACPRVGQEGRPSKEEIRGVDRSWKKREAGEEGAAARWGERPPDLAAPPPLRPAPSPPRHRSARCRRRSSCHPALYGWKRKRGEREKWKSGIGETQTFSLVLGYKMF

SEQ ID NO: 190012 - protein, 57 aa, Oryza sativa
  unsure (1)..(57): unsure at all Xaa locations
  Clone ID: PAT_MRT4530_86466C.1.pep
RRRXXDSAVAPLKXLRRLXAGKNVNTXATIASSLPPPTXLAGQRSSNTKQLSATDYY

SEQ ID NO: 190013 - protein, 442 aa, Oryza sativa
  Clone ID: PAT_MRT4530_86467C.1.pep
MAKDGDGEFAFDLNEPPLEHGNGFDLNLPLNEFGVVDFDYVQHLAEHVVAPIEVNHRRKDMTEEVRKQVYQALLARSKNGKLGKKDTRVVADQFGLHIRAVQRLWKRAIQAIQYKKNAKTVEALIPTVQEAFMEYSPHKANRMFLTLQSVLKEAMKREHGHSDECARFHAWRSSWTRWQRAHRKAPGGKESGTISESGGKESGTISESGAISASGSANSDEAKSGGSNISESGNTSDKTSATSIFESGTTSMALRANEVSGRNERRDGGGDRDESGAGEHDASGGGGECDESSGGERDESAAGERDASGSGGESDESRAGELDASGGGEVERRAACLHATLKELNEASAGVLRINCGSGYRIDEGKSTPKVPQLIIKLQNRPSITTCSVFTPAGDGRRCGEEAAVGRGGGTAAGGGNTAVRILVAPSWHSAAGLVLEAVREV

SEQ ID NO: 190014 - protein, 98 aa, Oryza sativa
  Clone ID: PAT_MRT4530_86468C.1.pep
IYMFFLVCGSSRSIEAITSLLVLEGSNICRAKLLRPNLNMSRFTPVLHQHARHSHFGVSIQYFCPRHQRKAWICKESQSSSESFGNALSCESSWRIFP

SEQ ID NO: 190015 - protein, 475 aa, Oryza sativa
  Clone ID: PAT_MRT4530_86469C.1.pep
MLDTKYREEIDGSRRNVAFPWMHRSRLGLGGIAAAATAAGNGGATAGNVHRAAYIRKQRDHRSGLYRPWRGHHRKQVNLHDEEDREDAEVTGRHSQSQILSLSPKKSSLSLLPALHDCTQLLPMASVAATTFPSMARPAARGIVAGAAASTVPLPRAGVASPCPTARSLGFAARGTDPRLAIHVSSRRRAASASAGSRLARAVATMAKKSVGDLAAADLEGKRVLLRADLNVPLDASQNITDDTRVIAAIPTIKHLIGNGAKVILCSHLGRPKGITPKFSLAPLVPRLSELLGIQVQKADDVIGPEVEKSVSVLPNGSVLLLENVRFYKEEEKNDPEFAKKLASLADLYKELDYLVGAVSNPKRPFAAIVGGSKVSSKIGVIESLLEKCDILLLGGDVIVADKFAPEANCQAIAKKLAELSGKGVTTIIGGKDSVAAVEKVGVANVMSHISTGGGASLELLEGKELPGVVALDEA

SEQ ID NO: 190016 - protein, 634 aa, Oryza sativa
  Clone ID: PAT_MRT4530_8646C.1.pep
MSSIFADNSVNTNLHQGFPASTMLVWTQVGEIVFPVYTTMPISADPSMTGNENAVATTQNDSMLKDPPAEAENGTSTTSELEKDSNAAKPFRLDKSHEPTRMTSEATRSWCPIHKTRKHTLQACWVFLNVRAEIRACKERGIQRISPTRDVYCPIHKTKNHDLSSCKVFLSATKTSSPKVQQSGISLRDEDKEQGTTLVSDRFVGVIDISSPEQSVLHLLEDYGSSPANRHPRRTHDRRQPTFPNAGCRAFSRSLRDVRWPERFRPGAIEKYDGSTDPEEFLQVYSTVLYAAGADDNALANYLPTALKGSNSGESLREYVRRFNECRNTIPEITDASVIRAFKSGVRDHYTTQELATRRITTTRRLFEIVEQCAHANDALRRKNDKPKTGGEKKPATDAPESSKKKNRKNGKRKAQAEVLAAEYANPPKRPDPQGNDAKKAWCPIHKTDKHSLEDCLVFKKSLKKHIAFEKGKRVRVVEKDAEAAPQESDSAYPDSDLHVSHIFGGSTAYSSKREYKKVEREVCSTWQGAAPKMKWSEQKIEFSEEDHPKTAIIPGRYPIVVEPTIRNIKVAQVLIDGGSSINLLFASTLDVMRIPQSELTPTNQPFHGITPQSSSKPLGKITLPVTFSQANNF

SEQ ID NO: 190017 - protein, 111 aa, Oryza sativa
  unsure (1)..(111): unsure at all Xaa locations
  Clone ID: PAT_MRT4530_86470C.1.pep
LNSSTTTISLTSPYPLSPTFTTQLSSPIPYFQTPPSPYPYTLHPSSHHYSYPPPSYSQSSYFNHQYFTHYISYHHTPIPHYLLSXYITPIQNTHPHHSFFXTPPLTHTNYL

SEQ ID NO: 190018 - protein, 262 aa, Oryza sativa
  unsure (1)..(262): unsure at all Xaa locations
  Clone ID: PAT_MRT4530_86471C.1.pep
MLLQIPKDVLSHIVERGFKKGYKIWTLHGEVAGHNKEAEDSCFDDAEXFIIEDISQGTILECGGSGIDDTNIDFDLEHMLRHVEPEVLTGRRRGLDNXEALEKIVKELLHDEAKGCDKNYMVLRSVLELLRLKAIHEWSDTSFNDLMDLLRVNTYQAKKLICPLSLGVQKIHACENHCILYNKEYADLDSCPTCETSRYKTGNGASDGEVVDQDASVDEXKKIPRMVMWYPPVKDCLKWLFSNRTDAELMRWQQEGRKKDGG

SEQ ID NO: 190019 - protein, 276 aa, Oryza sativa
  Clone ID: PAT_MRT4530_86472C.1.pep
MQEQQPETGRRPAQQFATVDLRRPKGYAAAPATPQPGSAATAAAAAGPAATAAAAAAGEGDPCPRCESRDTKFCYYNNYNTSQPRHFCKCCRRYWTKGGTLRNVPVGGGTRKKSSSSSSSSSSSSAAAAAPAAKRQKTSKKRRVTTPEPLAATTPVLTEAAADSAAKTTTEATSEKKTTTSTTTTTPPAPDTTSEITTELVVPAVEEDSFTDLLQPDSAAVTLGLDFSDYPSITKSLADPDLHFEWPPPAFDMASYWPAGAGFADPDPTAVFLNLP

SEQ ID NO: 190020 - protein, 121 aa, Oryza sativa
  unsure (1)..(121): unsure at all Xaa locations
  Clone ID: PAT_MRT4530_86473C.1.pep
GLNAIMFRHIKESIVYSEMTRLYMTDMRTYTDTEFGLRGAWFAGLXCAYELCRDPYESDNGIKQSETHGGSTWLGGHVFYDTVVLKPXHVGLNERSCGCDKHDDYVNSKHAVLITXTDMSR

SEQ ID NO: 190021 - protein, 197 aa, Oryza sativa
  Clone ID: PAT_MRT4530_86474C.1.pep
MLSLRPPCTLSPAPWRRRRTLHGAAGTPQRVSAAAPSAIVEAVSPPARLSFPILVNGCTGKMGLSVAEAATSSGLHLVPISFSSRDTLDRTVRVGHTDVRIYGPSAREDVLSSVIDEFPDVVVVDYTAPDSVNANAELYCKLGLPFVMGTTGGDRQLLYKSVQDSNNYALISPQMGKQAIIWRCNSTLNILFRNSRF

SEQ ID NO: 190022 - protein, 223 aa, Oryza sativa
  Clone ID: PAT_MRT4530_86475C.1.pep
MTTAAAATATAMAAGVLPRPRPHFLRRGILPSPASPLPFASRVSSAAPLRHRLPPPRFSLSPIPKTLSSPSHVPVRSLFTGIVEDVGTVRRIGPPPAPPSGGGGEAPGVDLEGHVDGTGEIAAFRAEGDSLWVTVRAPPEILRLLVSKGFVAVDGASLTVVNVDEEGGWFDFMLVRYTQDNIVLPNKKVGDKVNLEADILGKYVEKLLAGRLEAMSKAGKRRE

SEQ ID NO: 190023 - protein, 210 aa, Oryza sativa
  Clone ID: PAT_MRT4530_86476C.1.pep
MAAGVLPRPRPHFLRRGILPSPASPLPFASRVSSAAPLRHRLPPPRFSLSPIPKTLSSPSHVPVRSLFTGIVEDVGTVRRIGPPPAPPSGGGGEAPGVDLEVETSTLLAGTQLGDSVAVDGACLTVAAIDAAASTLTFGVAPETLRQTSLGGRTAGDAGNLERALTPWSRMGGHLVQGHVDGTGEIAAFRTEGDSLRVTARAPSEILRML

SEQ ID NO: 190024 - protein, 105 aa, Oryza sativa
  unsure (1)..(105): unsure at all Xaa locations
  Clone ID: PAT_MRT4530_86477C.1.pep
FFFFFFFFFFFFFLGNWAFHSKTXRVENSQAGGFLVTXYMCLXSLLIYVVVLLVFRHCTAGVLYNMSIHDCXMVVQYLTAAILGLSIHLFFFLSFSYNIQXRLIN

SEQ ID NO: 190025 - protein, 85 aa, Oryza sativa
  Clone ID: PAT_MRT4530_86478C.1.pep
LYSLSLISDRWGYNTFQLFTITSSTNIHHCHIRHSNFGRVFRILPNWRAEPSVVAAIGFPSLRSVGGSSILARACSWGRFRTSHA

SEQ ID NO: 190026 - protein, 168 aa, Oryza sativa
  Clone ID: PAT_MRT4530_86479C.1.pep
VAAIAGAAAVLASELYSRRCRRLATRVRELEASLAAATEKAAAERRGRVRAQQSLRKALSEQELSSDEKKKLSQSPKSFPMASIGVVQSCFSTRNGTPRQPLVVPLARATVMLDPARVPAEALEGLADYSHCWILYVFHLNTDLDKMWNDPARSKLKANVRVPRLQGG

SEQ ID NO: 190027 - protein, 77 aa, Oryza sativa
  Clone ID: PAT_MRT4530_8647C.1.pep
FFSSVAVIDNSVHPSADVGSYNSHSAIGGDVRRLSAHIERGERSGERTYSERGHALPPPHRDWGAPSISQDTGFKQA

SEQ ID NO: 190028 - protein, 274 aa, Oryza sativa
  Clone ID: PAT_MRT4530_86480C.1.pep
MAAGADERCRALVSGLLSSIDRSISIARSCCTEAAAAGRLTQQAGAAPESPPSADGSAGSDLGADSRCRANAAGPCKKRKTLPKWSKQVKVRSVQDVGPLDDGFSWRKYGQKDILGAKYPRAYFRCTHRHTQGCHASKQVQRADGDPLLFDVVYHGDHTCAHGVRSAAAAIDGQAAASAEQKHQPTPPQEQNAVSVAFTSMAVVNASTSSPFVSPAMSDCQISYELGGGSMAGVRNVPDVELASKTNSSMGDDMEFMFSLDSDFLDTYKYSSYF

SEQ ID NO: 190029 - protein, 54 aa, Oryza sativa
  unsure (1)..(54): unsure at all Xaa locations
  Clone ID: PAT_MRT4530_86481C.1.pep
ENRPPPRPPPPPPPPRRHPPPPRAPRSGHPRPPSXTPXPQPQPLPPHPPPPPQR

SEQ ID NO: 190030 - protein, 51 aa, Oryza sativa
  Clone ID: PAT_MRT4530_86482C.1.pep
GNNRRVASFHNYLQARKQVQNPEELLHLHVHEMKLASHSKSYTFLQGGQQT

SEQ ID NO: 190031 - protein, 191 aa, Oryza sativa
  Clone ID: PAT_MRT4530_86483C.1.pep
MGISPNRLQISSTAAASSLACKLQSKKKKRKTKRRMDGGGGNWRPTQGADPAAAGGIDLSAPAPAPAGGDWRSQLQSEGRTRIVNKILETLKKHLPVSGPEGLNELQKLAVRFEEKIYTGATSRSDYLRKLSLKMLSLETKTQQSPGNAQVIQNQNPPGSGVTMLPKKHLSGAQKRNKRKRGDQLIGSQKK

SEQ ID NO: 190032 - protein, 1359 aa, Oryza sativa
  Clone ID: PAT_MRT4530_86484C.1.pep
MDGGGGGNWRPTQGADPAASGGIDPNAPAPALAGGDWRSQLQSEARNRIVNKIMDTLKKHLPVSVPEGLNELQKIAVRFEEKIYTAATSQSDYLRKISLKMLSMETKTQQNPGNAQVIQNQNPPGSESRLKYVFIMLIWGVVMLFTILQVLSTRYLCTFTIFSATVPGLPQGSNPTQSSAIPLMSQQQARQPNSTSVQSSLTNLGQNLPGVNQTSTLQNMSGMPQNTMNNGLAQGASQDIYATQRQMAGRQQQQQQSQNQLIYQQQQIMMKQKLQQNSLMQQQSLLQPTQMQSSQQPMMQIPSSLQPGQSIPQTQPMVQSSSQGGIQQNALNSVPQSVQSLLQQPTQSAMRQQQHSQSSMHPQPSLQQAQPTQQPNIPLQHQLMGQQQNLQQNQLIGQQNGAVDMPQQQRLPVQSNNLLNMQQTQQMLNQQSMPSHQQQQLGSQANISTLQQQQQQNQQQQQLLGTVPNVPNIQRMHMLQTKAVQQPQQQQHAQQSSLGLMQPQSQHNQLQQSQQHLMSQFQAQPNQLQQQLGMPQQPPMQQRLQTSAGMLLQQNNIDQQKQFMQAQRGLQEVSSSTSVDSTAQTGHTGTGTGDWQEEAYQMVKNLKDQYFPELNDLYNKISLKLQHVDNMVPPQKPTEQYEKMKNFKLMLERTMHVLQLNKGNIQPALRDKIPAYERQIISILNSQKRPRVQGQQTQFQQSAGQGPTSNIPQQQQPSQGLQQHDNHTNQMPQASMPSMSTGLQSSGAAGIQHLPASPATNFGVPATQQNVTNAPQATSNLEVTQGSNFNSLQHGSMSGALQQGSTGPMQGTLNAQQQASSSMLSHNSVGTMQANANSMQANANSLQQLKQQQQEHHMMQNQQMKRQMFQQFQQKQMLQQQLPAQQQLQKQQQSQMQVPQHHSGNDANELKVRQGAAMKPGIYQQHLAQRNNFYNQQMKQGSAFPISSPQNLQASSPQISHHSPQVDQHNLLPSQVKTGTPLQSANSPYMPSPSPPVAPSPIPVDSEKPLSNLSSSLTNTGQATHQQTNMAPQSQSIAVNTPGISASPLLAEFTSVDGNQANMPTQVLTKSSAAERPLDRLLKALRTTQRQSLSAAVSDIGSVVSMIDRIAGSAPGNGSRAAVGEDLVAMTKCRLQARNFITHDGTGTSKKMKRDTSAMPLNVSSAGSVNDSLKQTFSIGTPELQSTATSRVKGQKTEINHALMEEIHEINQQLIDTELHVCEDDAESFGATSEGTEGTVIKCTFTAVAVSPSLKSMFASAQMSPILPLRVLVPASYPKCSPVLLDKFPDEQRNSDDLSTKARSKFSILLRGLAEPMSLREIARTWDACARKVIAEYAQQTGGGSFSSSYGCWENCVGA

SEQ ID NO: 190033 - protein, 103 aa, Oryza sativa
  Clone ID: PAT_MRT4530_86485C.1.pep
MEAKVFRFLKLVGVGFKARTEREGRELFLKLGYSHEVQFTAPPAVRVFCFKPNLICCTGIDKNRVHNFAGAVRNCKPPEVYKGKGILYIDEVIKLKPGKKQKK

SEQ ID NO: 190034 - protein, 70 aa, Oryza sativa
  unsure (1)..(70): unsure at all Xaa locations
  Clone ID: PAT_MRT4530_86486C.1.pep
EAKISSVFNDHETAPFLGLLSAGSGLIFSCIAAAYRTAKSGVDVAXIGVMHPQLDINSIVPLVIAGVLGI

SEQ ID NO: 190035 - protein, 361 aa, Oryza sativa
  Clone ID: PAT_MRT4530_86487C.1.pep
MAAARLASTVLAGRRRAASVVIAAGPRYGGGGGGVHVHPWAAFPSPTATTRHAVVAAGGGVPCLLPRAAFPSPTLPPKPRAFSSSGSLGRRDGGAPRGGSFLGWTKTVDLDLSRILTNMEMLVKTTGSHKALLEEYAQTLEKLTIAVEKNERSKGSLATTSLFLMASVVTISFGVYFFGVFTGRVDVNGFLKGFIIDFLDDPTISVKMHDYVDDLAGSAVESINPIKRFVHWLSGQPRPAHYQKLNEEVLNYYTDWSSILAFAVNSIAKSEGGKISEKALWRFLINVGVQETKLNKALLKVLVRERFILRQEYKGVISYKMVENEYKTNFKGKIQERIRPILKSEFVMPAAARGPKSKPSH

SEQ ID NO: 190036 - protein, 90 aa, Oryza sativa
  Clone ID: PAT_MRT4530_86488C.1.pep
MVHQMGWWKKTLLQAEISSRRESPRNRLCAGGVAGEEREEVLTTKFGNIDVRKEDWIKAKSEAEIEFGNRAGIGRSPDWLRLGSARSESG

SEQ ID NO: 190037 - protein, 70 aa, Oryza sativa
  Clone ID: PAT_MRT4530_86489C.1.pep
ASGHGSPAPPSSGPSRSQAAGSYLWFRRLTCSVPGRHLRCPPARTVLVSTSVGMRCGVDSLPSRVVWPVG

SEQ ID NO: 190038 - protein, 215 aa, Oryza sativa
  Clone ID: PAT_MRT4530_8648C.1.pep
ELHFWVWEKLSKTGPREWGPRGSLTVHGGPGAPGLTPAGAVGPTRQPQPRARAADGRAPRGSHSARPRAAKPAQQAGGGARAPMVAGGGHRHGGAAAERGEGKGEKRRRSTAHPRSTATTKKAAGAEEGGGAARVDGVDGVPAVGERNEGVDEVGEDAAKPKEAALRWEVVRGDDGGGPELGGDGGERERRRELDSGEEEGRREAETDGGGTGRV

SEQ ID NO: 190039 - protein, 50 aa, Oryza sativa
  Clone ID: PAT_MRT4530_86490C.1.pep
VKQNPLYFHVPGKPSAVNTFQTVKKTYPRFKLWALITTLPRFFSPYLTGY

SEQ ID NO: 190040 - protein, 187 aa, Oryza sativa
  Clone ID: PAT_MRT4530_86491C.1.pep
VFVRGLEEEVVYSAGEIYKILDKGSAKRRTAETLLNKQSSRSHSIFSITIHIKELTHEGEEMIKIGKLNLVDLAGSENISRSGARDGRAREAGEINKSLLTLGRVINALVEHSGHVPYRDSKLTRLLRDSLGGKTKTCIIATISPSVYSLEETLSTLDYAHRAKNIKNKPEVNQRMMTSAVIKDLYS

SEQ ID NO: 190041 - protein, 71 aa, Oryza sativa
  Clone ID: PAT_MRT4530_86492C.1.pep
RPGSFFPRLRPPALVLLVSMAVHARILLKPSDHRRPPLGATRLPSRCSYQVMTRHFYCGMEADLRTTSSRG

SEQ ID NO: 190042 - protein, 85 aa, Oryza sativa
  unsure (1)..(85): unsure at all Xaa locations
  Clone ID: PAT_MRT4530_86493C.1.pep
MYQAIPYNANRAWPAASXXRXXRRRXXAVXXXXXXXEVRRAVAECPVVVVGRSGCCLSHVVKRLLQGLGVNPAVHEVAGEASSRG

SEQ ID NO: 190043 - protein, 534 aa, Oryza sativa
  Clone ID: PAT_MRT4530_86494C.1.pep
MVVVVAAAMAAASLCCGVAAYLYYVLWLAPERLRAHLRRQGIGGPTPSFPYGNLADMRSHAAAAAGGKATGEGRQEGDIVHDYRQAVFPFYENWRKQYGPVFTYSVGNMVFLHVSRPDIVRELSLCVSLDLGKSSYMKATHQPLFGEGILKSNGNAWAHQRKLIAPEFFPDKVKGMVDLMVDSAQVLVSSWEDRIDRSGGNALDLMIDDDIRAYSADVISRTCFGSSYVKGKQIFDMIRELQKTVSTKKQNLLAEMTGLSFLFPKASGRAAWRLNGRVRALILDLVGENGEEDGGNLLSAMLRSARGGGGGGGEVAAAAEDFVVDNCKNIYFAGYESTAVTAAWCLMLLALHPEWQDRVRDEVQAACCGGGGRSPDFPALQKMKNLTMVIQETLRLYPAGAVVSRQALRELSLGGVRVPRGVNIYVPVSTLHLDAELWGGGAGAAEFDPARFADARPPLHAYLPFGAGARTCLGQTFAMAELKVLLSLVLCRFEVALSPEYVHSPAHKLIVEAEHGVRLVLKKVRSKCDWAGFD

SEQ ID NO: 190044 - protein, 343 aa, Oryza sativa
  Clone ID: PAT_MRT4530_86495C.1.pep
PHRVKFLLRQLGENQKSPSFLVLMSKLTPTALTYGRMDVCTAIPGSNGKQCGVGPTTRRIIAGADLEAGSGSGSGAARRNQDLSTWSKWDYVPYRTVNVTILEEIIKTERTRQLEDPRRDIAYGRVDVCMYMPSPTVHRSGTFWRCVRSEWHGYMTKNHESLKTMEPTSINTIEIQAKKDPRDYSNNHFSPNPFIESVNKGKTPVPSAVESVSHRHCRAVPVLHRYTQKNAKEQQIRSRSTYAKIVGGSWLQLSVLQLLEYQYQYHCHSGQSGSRSLGRPAGSGSSKLAGNGWIHELAGLPSLTRQIRLVTTTPPLAEDADAEAQLFGIDRRMEYNHRKYDKD

SEQ ID NO: 190045 - protein, 598 aa, Oryza sativa
  Clone ID: PAT_MRT4530_86496C.1.pep
MEGYLTGAKRAPSTEVDVKEGDKVVTKINPAYEEWVVANQQMLGFLLASVSKDILTQVVNLETVAETWSAIMTMLSSQSRARALNTRLALSMTHKDNLSVTEYIGKMKTLADKMSSADKPLDDEEMMSYILTGLDNDYEPVVSSLVGKAEAIPVVEIYTQLPSFESRAKLRQQANGSSVNSARHGGKGDGFTDNSPFGNTNSFRARGNSGGYAAAASYGVDANWYMDTGATDHITGELDKLTTHEKYNGKEQIHTASYAAVDNHAFVEVHSHSIAIKDQVTKNLLLRGPCRNGLYLLPTSSFSTSKQVLGAIKPTISRWHNRLGHPSLAIVQKINRNNPKKVLKILDRITKLLQKILKKMQQIQISQKIPETTSLMAQIPRVIPLPHLRTRLRSHSTMTRMSMVRLLNSRGINRRLSRPQFLAIMAMAVKDPLCLLRIRLWLSLHGQLLISIEEVYMKQPPGYENKSKPRYICKLDKALYGLKQAPRAWYSRLSTKLVNLGCQASKADMPLFFYNKGSVTIFVLIYVDDIIVAVTALLADLRQEFALKDLGDLHYFLGIEKRRILKVLGPVHEHIVKANMLKSLKTHGMSHPNIGCER

SEQ ID NO: 190046 - protein, 80 aa, Oryza sativa
  unsure (1)..(80): unsure at all Xaa locations
  Clone ID: PAT_MRT4530_86497C.1.pep
IIGKKXKSXEFGXGPXNPPKRITIGNXXLLDYXPTNYCTLXSGNTXHXXDLXVTCXQXSIKLSFFXPXLEFXLGKXSXAE

SEQ ID NO: 190047 - protein, 52 aa, Oryza sativa
  Clone ID: PAT_MRT4530_86498C.1.pep
VHVRKCCLFQPGHKRKCVFVAPHPTVLCVWNPALSPSRAPCFITKNGLFFLV

SEQ ID NO: 190048 - protein, 164 aa, Oryza sativa
  unsure (1)..(164): unsure at all Xaa locations
  Clone ID: PAT_MRT4530_86499C.1.pep
RETNLLRLIKPSCTRSSPPXNHFSPPQARSRSLSNRRRRSPHPSPRPHHAFANRHSCSPESTPPPSRIPALPVPPAPSPQHFPRQHRLHPSAASRCRPHPRLHPSTADRHRTPPPLKVARSSPPDTPPIGDRTLTLHRRHNSRQRGDVEDLTPTTAARGDTTRH

SEQ ID NO: 190049 - protein, 62 aa, Oryza sativa
  Clone ID: PAT_MRT4530_8649C.1.pep
RVRVEVVRLCCSSPAPPPMASSMAATGARSRRQFYPPRGQLSAAAYSSPLRRRPTALSDSNP

SEQ ID NO: 190050 - protein, 109 aa, Oryza sativa
  unsure (1)..(109): unsure at all Xaa locations
  Clone ID: PAT_MRT4530_864C.1.pep
CHVYGFSDIGLSRSIRLDDVISYVSPRKLRDELQLSARALGLGAVHRKQNAARRGCAYEVGVRGIGTWXYAGGEGERWMRKDVDMPQATPSPPASAMAGEQPPRREEGG

SEQ ID NO: 190051 - protein, 144 aa, Oryza sativa
  Clone ID: PAT_MRT4530_86500C.1.pep
YSRISSPPHRLLSSPVPRAPRPAPPSTADAATRAVSSLPSPRPESRVPRCPRRGAASSPPSRRPAPPSTAATSADRHRTPPPLKVTRSSPPDTPPIGDRTLTSPLAQVGAKGGVRQSASQPPRPLHGRGDTCARLQRSIVLAVE

SEQ ID NO: 190052 - protein, 63 aa, Oryza sativa
  unsure (1)..(63): unsure at all Xaa locations
  Clone ID: PAT_MRT4530_86501C.1.pep
SGTAPDGGXDSGGAPTAADGRRVMAGDLRDXLERGKAGSRGIPAARGSGRGAAQHSDAGGGHG

SEQ ID NO: 190053 - protein, 140 aa, Oryza sativa
  Clone ID: PAT_MRT4530_86502C.1.pep
MSGKPSDDTTGQVRPEVDGSDEKVGIANQNEKEVMPSPQEEEAAIKKKYGGIVPRKPALIAKDHERAYFDSADWALGKQGGHPQKPKGPLEALRPKLQPTQQQARSRRFLHASVDNEEGLNSPTEDASQNQESNEVKDDK

SEQ ID NO: 190054 - protein, 154 aa, Oryza sativa
  Clone ID: PAT_MRT4530_86503C.1.pep
HYQALRERMQCEVRRGCSSLPRSMPPPIPHSPLAQVGAKGGVRQSASQPPRPLHGRGDTCARLQRSMPPDTIRARSLLSFCRRRDACADLQHSTRPVDNWFVLFTLQSIHLSRIIIVSAEAQDEQPHQPQDHQLSLSCFMIVAANSNMLAAGAI

SEQ ID NO: 190055 - protein, 73 aa, Oryza sativa
  unsure (1)..(73): unsure at all Xaa locations
  Clone ID: PAT_MRT4530_86504C.1.pep
MKLSMKRPPYNRTSRMECMRMXSSWSRYCQCEVIKKLCHDASHVLGRGSCVGQLRSAGKVYIHYSVSKPNLFE

SEQ ID NO: 190056 - protein, 606 aa, Oryza sativa
  unsure (1)..(606): unsure at all Xaa locations
  Clone ID: PAT_MRT4530_86505C.1.pep
MAQVVAAAGTAAAVAAVGRPLGGGGSGADALRPAARLSFAPRWCGGSAGAARARRESAVTSVISRAPRLDAEVLPVSADDDADVKEEENFQHLKAIQQLATSANGVWSKPNVRRKTKIVCTIGPSTNTKEMIWKLAEAGMNVARLNMSHGDHASHQKTVIDLVKEYNAQTKDNVIAIMLDTKGPEVRSGDLPQPIMLETGQEFTFTIKRGVGTETCVSVNYDDFVNDVEVDSVKCEVIDGGELKSRRHLNVRGKSATLPGITLKSRRHLNVRGKSATLPSITDKDWDDIKFGVENQVDYYAVSFVKDAQVVHELKDYLRSSNADIHVIVKIESADSIPNLHSIITASDGAMVARGDLGAELPIEEVPLLQEEIIRMCRSMGKAVIVATNMLESMIVHPTPTRAEVSDIAIAVREGSDGIMLSGETAHGKFPLKAVKVMHTXFKNHMSEMFAYHSTMMSNTLGTSIVVFTRTGFMAILLSHYRPSGTIFAFTDQERVRQRLALYQGVCPVQMEFSDDAEKTFGDALSYLLKHGMVKEGEEVALVQSGRQPIWRSQSTHNIQQNLRPDDNTTLALLASFNCELSELCARHERALVVILYSLLNMLPCM

SEQ ID NO: 190057 - protein, 201 aa, Oryza sativa
  Clone ID: PAT_MRT4530_86506C.1.pep
MAICGGWMEAGVRPAARRGGWMEAVLTGEVLGRWGGRDRESRRQRRNGSVVRLAARRGGWMEAVPAGEERDRRSGDVDPRRRRRGFRRAGVAVGEGVVGARRRMRGAASTVGYMSGKPSDDTTGQVRPEVDGSDEKVEIANQNEKEVMPSPQEEEAAIKKKYGGIVPRKPALIAKDHERAYFDSADWALGKVLSSYFQSEN

SEQ ID NO: 190058 - protein, 135 aa, Oryza sativa
  unsure (1)..(135): unsure at all Xaa locations
  Clone ID: PAT_MRT4530_86507C.1.pep
SWAVLSRRDLLLPRCRSRPARDTALGARRRQREDGAGRSVGGRGRRGTRDAXAGHGAAEEAMRRRGEEXDAGRRAKVDDRSDARWRRVGEGGGDRGGGRRAWLVRRRCGGGASFAQGGGRRTRRGRRRSGRGEEV

SEQ ID NO: 190059 - protein, 254 aa, Oryza sativa
  unsure (1)..(254): unsure at all Xaa locations
  Clone ID: PAT_MRT4530_86508C.1.pep
MAGWGLGSGDGDGNLDLATGDSQQRGVACGRQWPVCRSGMVWRAAIAAAAADRSGGTGGDTYLQMTAIVTGGGGGSRGRRGSSRRRRGSGSSAVLTRRRRGTRDSGRGDGSEETARVAASAVEGGAGHGAAEEAMRRRGEEATQGGGRRWMIDPMRGGGALERAAAIAEEAGGRGWXRRRCGGGASVTHGGGRRTRRGRRSGRGEEVDSREERARDGEEIDAVGYGNRMDEITCVCKMRLLCQKSKPVNPLTKL

SEQ ID NO: 190060 - protein, 193 aa, Oryza sativa
  unsure (1)..(193): unsure at all Xaa locations
  Clone ID: PAT_MRT4530_86509C.1.pep
GSHRTHSSPPRITLFSPTGRIALAIQPSTPLPSSFAAPPPRLHRPPLLLARIDAAVVAGRHRRSSYRTPPRRHCLHPSAASRRRSHHRSIPPLPPALPVPPALSPQHSPPRHRLHPSAASRRRPHPRFHPSTADRHRTPPPLKVTRSSPPLVXDTPPIGDRTLTLHRRHNSRQMGDVEDLTPTTAARGDTTRR

SEQ ID NO: 190061 - protein, 382 aa, Oryza sativa
  unsure (1)..(382): unsure at all Xaa locations
  Clone ID: PAT_MRT4530_8650C.1.pep
MSGVSTSWGFVYSRVNKPXGRGVRTGSTGVGPTRQPHGPRWTGCTRLAPAGAVGPTRQPHPRARAADGRAPHGSRGARPKAALPARPTGGGAPAPRWSPAATSGATERRPREGREGGSEKAVLGSPRVDSDDGNGDRSGERRRRGSGRRGRRRSGGRRAKRRGGRGRRGRDEAEGGDAEAGGGPGRRRRRTEARRRRRRERTTARARFRRGEKAARVGNGGGRHGECLNSVGSERGRPEGKETGAAIXGSINDAGEVCGRXFQTNPRERXEREKWGERGRESRGVISPSLLRAGTAGCGGIRGGGGARAQARRRARREVGDDGWAPPVSEGGGRARPSATRARGKAXWAAGERREGRRGXGPSRPKKGRGGKKTSFRVFFFL

SEQ ID NO: 190062 - protein, 216 aa, Oryza sativa
  Clone ID: PAT_MRT4530_86510C.1.pep
IDLLPTPTPPPPTPRPSPSSLGDARPAAASPPHQPRPPASSAIAAALSNAPPPRIGSIIHLRPPPCVASSPPHLHTSPPHRLLSCPVPRAPRPAPPSTADAATRAVSSLPSPRPESRVPRCPLPPMREQEVTPRQHRRGAASSPPSRRPAPPSTAATSADRHRTPPPLKVTRSSPPDTPPIGDRTLTLHRRHNSRQRGDVEDLTPTTAARGDTTRH

SEQ ID NO: 190063 - protein, 74 aa, Oryza sativa
  Clone ID: PAT_MRT4530_86511C.1.pep
MEDGALVERRGGGNVDAPGGVDDKLLLSIRHDDGGMDVATARHGTGRTARCDSAWVAAVQVDRYAGGSSASILK

SEQ ID NO: 190064 - protein, 713 aa, Oryza sativa
  unsure (1)..(713): unsure at all Xaa locations
  Clone ID: PAT_MRT4530_86512C.1.pep
PNKDLRPSKFCATAAARRPGREEGEGCGDSTGDFSRSYARGNRLIQRRLPVHQRLGPIHQDCFQDEDEGKNSQWCPSGIFTKNXKRKVQRMRNMERFXEVQQEINHRLKKVVTKQEWRVKSKVLMADEVEADKAKRMIKGKAVTSSSVNTVFVLPAEYEANQADADVMEETFAKLVLSPEQAIFEKPEGVEYRHLKSLYVKGFVNGKPMSKMMVDGGAAVNLMPYATFRKLGXNAYDLIKTNMVLKDFGGNPSETKGVLNVELTIGSKIIPTMFFVIDGKGSYSLLLGRDWINANCCIPSTMHHILIQWQCDKLEIVPTDRSVNVASADLTVWEMDGIDCLSGKGVVEGSNFYTKDTVDDLDGKLGQGFMSGDELEEVDIGPGDRPRPTFISKNLSSEFXTKLIELLKEYRDCFAWEXMLGLSRSIVEHRLPIKPGYRPYQKPPRRCKAEMYDAIKAKITHLYDAGFIQPCRYAEWVSNIVPFIKKNGKLRVCIDFRNLNKATPKDEYPMTVADQLVDAASGHEIISFMDGNTGYNQIFMAEEDIHQTAFRCPGAIGLYEWVVMTFGLKSAGTTYQRAMNYIFNDLIGLLVEIYIDDVVVKSKEVDDHIANLRKVSDRTRKYGLKMNPTKCAFGVSAGQFLGFLVHERGVEVTQRSINVIKKIQPPENKKQLQSLIGKVNFVVRFISNLFGRLEPFTPLLRMKTCHVLSWGVV

SEQ ID NO: 190065 - protein, 72 aa, Oryza sativa
  Clone ID: PAT_MRT4530_86513C.1.pep
MGRGLAVVENNACAPRLQPWPADRWHDLVIRLNNAPMAEQSPRLSRGGSFTLFFLLFSTSANESTCHLGASV

SEQ ID NO: 190066 - protein, 58 aa, Oryza sativa
  Clone ID: PAT_MRT4530_86514C.1.pep
HRHYIISQQYRSLSQVNPLLTVTQKSEKNKTSGLSMKIYNRCISMPNKAVLLIVDRSV

SEQ ID NO: 190067 - protein, 98 aa, Oryza sativa
  unsure (1)..(98): unsure at all Xaa locations
  Clone ID: PAT_MRT4530_86515C.1.pep
RGLLGTSRXEXLRERTDSPSRGGETSGEXAHSEVPDLGAGRRPTDLRPGRSYGPTCRGGAAWSXXGGEPSCSPWLFLSLVLAAARXLGLQKTAWVDXR

SEQ ID NO: 190068 - protein, 147 aa, Oryza sativa
  Clone ID: PAT_MRT4530_86516C.1.pep
MKYSDFVAAVNAGQIKQVTIDGLNINGEKTNGSQFETVRPQVEDTELMPSLNKQNVVVEGTAPQRQGILMQLLIASFPVLLIILLFMFFMRNMGGGAGGKNGPISFGKSKAKMLSEDQIKVNFSDVAGCDEAKQEVVEIVDFLKDPS

SEQ ID NO: 190069 - protein, 342 aa, Oryza sativa
  Clone ID: PAT_MRT4530_86517C.1.pep
VVFTVFTPSLMFASLARTVTFSDVISWWFMPINIGITFMAGGTLGWIACRILKPPQHFRGMIIAFCSAGNLGNLLLIVVPAVCDEDGNPFGKDSSRCRSLGLSYSSLSMALGGLYIWTHTYSLMKKKRGQMYHQPNSTQCLDDSDEEHHSKKFKANGEAAYADEEATLPVSAKLAQHNEENQMEAPLLSCESKVAKKCSWTTTNLKDTIHHVVEELMAPPTLSAILGFVFGLVPWLKSLVIGDGAPLRVIQDSIQLMGNGTIPCVTLILGGNLIKGLRKSELKRTVIIAIVCIRYVILPLVGIAVVHGAYWVGFLPHDPLYRYVLMMQFALPPAMTIGNLSL

SEQ ID NO: 190070 - protein, 442 aa, Oryza sativa
  Clone ID: PAT_MRT4530_86518C.1.pep
MPEVDPPPSAADLAPRIHIGMEWRSRGQIEMERRWPCRIGKEAKVQAKDVMALTVAVAVPMEEAEVQVEEVAMLAVEVAVPTEEIMAPSRGVCAYDGGGGGHCDGGAAHGATEWRRHRAWAAPAFLRRERRRGKSPINRTIVASWAGPNQTTSGCSPSYSESLVKAQVERKSGPVRVPLLLVPGGDCGGGGGGDANAEMSVFGGDSWARDARQRKRRLDDLMLPASAVSPSSSSPDSFRRLSNGKFACLVCPHRPVLDSPLMLSMHNKGSRHIAAESRLREKELSRQQEINKRLAISPEASVSSSGKQHYGVRSSDMKEKPLIQQTRQAILEAQSSRFIIDSANKKSHDLERTSNSSLCDSQVTPSVPMEKWSGDTVKGKIFAGDRTATKMLAEEQADFQKRQEQELKFTASGWKRDGHGRWYRDENVEFDSDEDDPNICLG

SEQ ID NO: 190071 - protein, 678 aa, Oryza sativa
  unsure (1)..(678): unsure at all Xaa locations
  Clone ID: PAT_MRT4530_86519C.1.pep
MMRDRGISPSIRCCNALLKDLLRADAMALLWKVREFMVGAGISPDVYTYSTLIEAYCKVREFDTAKTRLDSMXNLESGLNTVTYNVLIAGLCRSGAVEEAFGFKNAIEDCGLVPEGLKDSALGYAPLISGYCREGNVSLACEIFDKMTKVNVLPDLYCYNSLIFGLSKVGRVEESTKYFAQMQERGLLPNEFTYSGLIHGYLKNGDLESAEQLVQRMLDTGLKPNDVIYIDLLESYFKSDDIEKVSSTFKSMLDQGVMLDNRIYGILIHNLSSSGNMEAAFRVLSGIEKNGSVPDVHVYSSLISGLCKTADREKAFGILDEMSKKGVDPNIVCYNALIDGLCKSGDISYARNVFNSILAKGLVPNCVTYTSLIDGSCKVGDISNAFYLYNEMLAKAMGLVPNALTIENIISGLSEAGKLSEVHTIFVELQQKTSESAARHFSSLFMDMINQGKIPLDVVDDMIRDHCKEGNLDKALMLRDVIVAKSAPMGCSSYLAIVDNLCRKGKLSEALNLLKEMDKRGNLQPTLVALLGIFWFRRHHHILNKLGGLYIWTHTYSLMKKKRGQMYHQPNSIQGLDDSNEEHHAKKFKANGEAACADEEATLLVSAKLAEHNEENQMEAPLLSGESEIAKKGSRPTSLLKDTVHQVVEELMAPPTLSAVCSWICCWPSPMVEISCHR

SEQ ID NO: 190072 - protein, 559 aa, Oryza sativa
  Clone ID: PAT_MRT4530_8651C.1.pep
MAVDKSGGGGGGGGASSSSSGVAASTMDRFHKIVLSWDYVRLVADSKGGQQQAKGLGRVKNTYASVAEYLAVFEPLLFEEVKAQIVQGRSDEEEEAGQNWQKGIVASCTESEGFHKVSMAVLDDFREMVSENDLLLLSKEKFEEGVTPSAYAFALVEQRGGRETISLRTFVAGEIKNLNVAKPVSCSRLQRIASIFSTTESFLWILKICSLSTIMREFSGMHSVASLPFKDLILSASEKNSGGNDQNRAWNVPEPLMDYLKTNLNDSQLDAVNAGLSRRSFVLIQSSCDRHAHWMKASPWLIGVNPRDLIMPVDGDDGFYPTGNELKPEVVSSNRKYRAHVLVCAPSNSALDEIVLRVLQTGIRDENNNTYNPKIVRIGLKAHHSVKAVSMDYLIQQKLSGVDRSSDGGRRGAGEYDRIRSSILDEAAIVFSTLSFSGSSIFSRMARAFDVVIIDEAAQAVGDPVQLPATVISSTAQKLGYGTSLFKRFQAAGFPVQMLKIQYRMHPEISIFPSKEFYEGVLEDGEGLSKKRPWHSYSCFDPFCFFDVDGTVAQASGRG

SEQ ID NO: 190073 - protein, 61 aa, Oryza sativa
  Clone ID: PAT_MRT4530_86521C.1.pep
RACLGKKMAYVPIKTVPPAIQRRFSVEVAAPAPTMESPPAYNMTAPMNIKGGLWVRLRNRI

SEQ ID NO: 190074 - protein, 121 aa, Oryza sativa
  unsure (1)..(121): unsure at all Xaa locations
  Clone ID: PAT_MRT4530_86522C.1.pep
NGPATPXHLDQHXFHHRVHISHGTHPHTVHLHTQVLAFHIPXVHPYTPSTXAIQWVLGEHXVHAHLGASILAVIWHYHPFGCPXGXPRVVGEEGDIGGHISRDFHLTVGSXVIGGGGVHPR

SEQ ID NO: 190075 - protein, 234 aa, Oryza sativa
  Clone ID: PAT_MRT4530_86523C.1.pep
MWRCINGRIARRFLSTSSASARGWWDHVRPAPKDPIVRVNEAFLADPFPHKINLGIGTYKGDDGKAFIPQSVREAETKIQRCKLEESNASAVRSKFVQECVRLAYGNDSNVVREGLFAGVPTLSGTGACRLFAEFQRHFYPDSQMYLPDPTWSNHHNIWRQAEIPVKTFHYYHPDTKGLDFAALLNDVKNAPDCSFFLLHPCAHNPTGVDPTEEQWREISYQFQVKNHFPFFDM

SEQ ID NO: 190076 - protein, 67 aa, Oryza sativa
  Clone ID: PAT_MRT4530_86524C.1.pep
SSVSCCNPVYRPLRLNKSSLGWGGDGSREHFVVTNSKKLAVEMTISLGITHIFAFHSACTQADPCRS

SEQ ID NO: 190077 - protein, 324 aa, Oryza sativa
  unsure (1)..(324): unsure at all Xaa locations
  Clone ID: PAT_MRT4530_86525C.1.pep
HPPVSVEYFLDCMQGVAQCILQVRVTQTFCCHAAEGXPYKPTPXTRVRGADLVARHVKVQVDMVNADWMNWQLXSRGIFIQWLKDLIIIKVTLRTTLAPAPPRPDSSTKVPSPPLAIEAPFESHGTDFGEMAKLHPPPQNTKAISSPPMVQRRAHHARDRSKGKRKAQEPXLPPKQLDLDXGGQRYSKKQAPGTFQQQVPLVADHELAKMGSACQVLHRYYMEKTNSKSKMRDTSIVGYHDQEPSLGQQNYFAVAFSDLFYLYKLRAVDTGLLKCYTLIRSKEARRNKNQGVGTEKIYPTSITMITTNARNKPAKPVYFMYVIR

SEQ ID NO: 190078 - protein, 133 aa, Oryza sativa
  Clone ID: PAT_MRT4530_86526C.1.pep
MTLESAPVRRAPAARRAGGEVRSSAEAVGGRLRANQNHQVASGGRRDFMQHFADENLAMAAPPPTARGEPAVDGRCRFCHGDPPAAASRRRVATSLAPPRGAELLLHPSAHVHGSELRAGSAPAPRTKTRSSF

SEQ ID NO: 190079 - protein, 305 aa, Oryza sativa
  unsure (1)..(305): unsure at all Xaa locations
  Clone ID: PAT_MRT4530_86527C.1.pep
MLEHEGDAPGSRASLVRSGSSRFLLVSEAMEVGDGGGDAIVTSDGGGDEVTARNCDGDADTTRGDGGRADPVRGGSGGADQFRGGGDDVVAARCDGGGADPVRGGSGGADQVRGGGDDVVAARRDGGGADAARGDGGSTDPVLSGGXLVASSFMVQAISSSTISIISAXKLICSHSSAPSLKVGCSSDSPFLLFPNRRNHAGFVIRVELEPSAQFQLTGLMLELLRFNDEPRGDPSLSPVMHTPKSTAQQQTSVLCRFRGGSXWGLTVCQAECTSFEAQGSSRRGFAADPYRLAPFSAIRLFQED

SEQ ID NO: 190080 - protein, 92 aa, Oryza sativa
  Clone ID: PAT_MRT4530_86528C.1.pep
MLLMVSSLLMSSSCGGSDKPAAVSSLVRELEAVSSGGAERRLGRSAEAELARRQLEWQQRWSSREGGDKPAAISNSLHDSTSPGRRRRRRRR

SEQ ID NO: 190081 - protein, 219 aa, Oryza sativa
  Clone ID: PAT_MRT4530_86529C.1.pep
MEVEDGGGGAIEAGDGGGDKVGDGGGADPVRGGGGGADPVCGDGGGADQLRGNGGGSNAARGDGGADPVRGSAGGSDAARGDGGGADPVRGSAGGSDAARGDGGGADPVRGSAGGSDAARGDGGGADPVRGGAGGSDAACGVCGGADPVRSGGSGSVAARGDGGVADPVCSGGDGADVACGDSGGARAVSHVVASSCVVVSWCRPSLSQPSPSSQQDRS

SEQ ID NO: 190082 - protein, 108 aa, Oryza sativa
  Clone ID: PAT_MRT4530_8652C.1.pep
APPPPPIFWSGAKIYPLLTGPGRTPFRLGGAFKGGGGAFFPGGGLAGGGGGIPPVSFLGLGGKLCSWAGFLGPFLVTAGRAPNKKSGFCFFTFPVSPRTRVCWFLWAQ

SEQ ID NO: 190083 - protein, 548 aa, Oryza sativa
  unsure (1)..(548): unsure at all Xaa locations
  Clone ID: PAT_MRT4530_86530C.1.pep
MAMEVGDGGGGAIEAGDGGGDKVTVRGSGGGADPICGDGGGADPARGDGGGADPVRGGAGGSDAARGDGGGADPVRGGAGGSRGGXADPVRGGAGGSDAACGVCGGADXSAAAAAAVAARGDGGVADPVCSGGDGVDAACGDSGGARAVSHVVASSCFXRCFMVQAISFSAISIISAGQKLICSHSSASSLKVGCSSDSSILLFPNRRNHVGFVIRVELGPPDEPRGDPLLSPVTHTPKSTAQHQTSVLCRFRGGSRWGLTVCQADCTSFEAQGSSRRGFAADPCRLAPFSDVRLFQEGCFRSSVNPPFLRMALLLGYVMGFIPXICSCLIKLMCFLKKKKKKKKKKKKCQLENTPRVANSPPRRKPQQTLYIINNPPDAAPPSPISKRRCAPQKKFRRSRHATRRVQPRARKNTRPLLSIRGEFVTYTARLFTIGTWKLKSMLFILHQTNYQMLTRFTSTAPTYSYLFLAQSMTESVDHSTYRRDLFSLIKSMTAIRFRDITGENLIRPAPLLHSISAFTSSLRSTDAFDLESHQYRRRRNNTLQPS

SEQ ID NO: 190084 - protein, 165 aa, Oryza sativa
  Clone ID: PAT_MRT4530_86531C.1.pep
MAMEVEDGGGGAIEAGDGGGDKVGDGGGADPVRGSGGGADPICGDGGGADQLRGNGGGSNAARGDGGGADPVRGGAGGSDAARGDGGGADPVRGGAGRLRTVPVAKGSCADPVRGGAGGSDAACGVCGGADPVRSGGSGSVAVRGDGGRRPIQSGSGRSMGGGTP

SEQ ID NO: 190085 - protein, 320 aa, Oryza sativa
  Clone ID: PAT_MRT4530_86532C.1.pep
MAAVASASPLPAAAAPSTRCSPPPAFLPLRAHRPRVGTVATRRVFRAEAMRTQREKEQTEVAVEESFPFRETAPPDEPLVTAEESWVVKLEQSVNIFLTESVITILDGLYRDRNYARFFVLETIARVPYFAFISVLHMYETFGWWRRADYIKVHFAESWNEFHHLLIMEELGGNSLWVDRFLARFAAFFYYFMTVAMYMVSPRMAYHFSECVERHAYSTYDKFIKLHEDELKKLPAPEAALNYYLNEDLYLFDNLYDVFVNIRDDEAEHCKTMKACQTHGNLRSPHSMQKCLETDTECVIPEDDCEGIVDCVKKSLVSKE

SEQ ID NO: 190086 - protein, 294 aa, Oryza sativa
  unsure (1)..(294): unsure at all Xaa locations
  Clone ID: PAT_MRT4530_86533C.1.pep
MEVGDGGGDAIVTSDGGGDEVTARNCDGDADTTRGDGGRADPVRGGSGGADQFRGGGDDVVAARCDGGGADPVRGGSGGADQVRGGGDDVVAARRDGGGADAARGDGGSTDPVLSGGCGADAARDDGGGARAVSCVVASSCSSPFLVASSFMVQAISSSTISIISAXKLICSHSSAPSLKVGCSSDSPFLLFPNRRNHAGFVIRVELEPSAQFQLTGLMLELLRFNDEPRGDPSLSPVMHTPKSTAQQQTSVLCRFRGGSXWGLTVCQAECTSFEAQGSSGRXGFAADPYRLAP

SEQ ID NO: 190087 - protein, 244 aa, Oryza sativa
  Clone ID: PAT_MRT4530_86534C.1.pep
MVAVASASPLTAAAAPSMCCSPPAFLPLRAHRRRIFRAEAMKTQQEKKQTEVAVEESFPFRETAPPDEPLVTAEESWVVKLEQSVNIFLTESVITILDGLYRDRNYARFFVLETIARVPYFAFISMLHMYETFGWWRRADYIKVHFAESWNEFHHLLIMEGTTENCHSLTQEISQLQDLGSTLIELWNLMDTPTAEQKCFDHVTSLISVSPNTKMPQGCLARELIEKFTIDRPFYVLLLYLDCH

SEQ ID NO: 190088 - protein, 103 aa, Oryza sativa
  Clone ID: PAT_MRT4530_86535C.1.pep
NGRSIVNFSISSRARHPWGIFVFGETEIKDVTWSKHFCSAVGVSIRFHNSISVLPRSCNCDISWVREWQFSVVPFRFLGKAVYSLIAYCVCSQGRRALQEVIP

SEQ ID NO: 190089 - protein, 43 aa, Oryza sativa
  unsure (1)..(43): unsure at all Xaa locations
  Clone ID: PAT_MRT4530_86536C.1.pep
LEXKTFLAGRCLKXXTLKXNYXXLLLLLXACSXLXIHFXSPTN

SEQ ID NO: 190090 - protein, 336 aa, Oryza sativa
  Clone ID: PAT_MRT4530_86537C.1.pep
MAAVASASPLPAAAAPSTRCSPPPAFLPLRAHRPRVGTVATRRVFRAEAMRTQREKEQTEVAVEESFPFRETAPPDEPLVTAEESWVVKLEQSVNIFLTESVITILDGLYRDRNYARFYEGRILNDLIDSGKADLSDLLTGFGWWRRADYIKVHFAESWNEFHHLLIMEELGGNSLWVDRFLARFAAFFYYFMTVAMYMVSPRMAYHFSECVERHAYSTYDKFIKLHEDELKKLPAPEAALNYYLNEDLYLFDEFQTARVPCSRRPKIDNLYDVFVNIRDDEAEHCKTMKACQTHGNLRSPHSMQKCLETDTECVIPEDDCEGIVDCVKKSLVSKE

SEQ ID NO: 190091 - protein, 127 aa, Oryza sativa
  unsure (1)..(127): unsure at all Xaa locations
  Clone ID: PAT_MRT4530_86538C.1.pep
MALKRLVLPSFVVIIVLXMAVQGESQRCALSSIDVSQTNTGKKVGTLDTVFQVMVINRCQCAVRAIFLRADGFASSVTINPKLFRQAGAVGYLIGDGRRIPSGESIAFQYAWDHYFQMTPASVQADC

SEQ ID NO: 190092 - protein, 320 aa, Oryza sativa
  Clone ID: PAT_MRT4530_86539C.1.pep
MGEPDDEITFEFLPLIRCYRSGRVDRLLPDTRVPPSVDAATGVASRDVTIDPATGLWARLYLPDLDGGERKLLPVVVYLHGGGLVVGSAADALEHGFANRLCARARALVVSVDYRLAPEHPVPACYDDAWSALQWAVAAASADPWLRDHGDRERVFVLGYSSGGNIAHNVTLRAGAEELPGGASVKGMALLHPYFMAAKKADGEVKNAWLRGKLEEMWALACGGGRTTAGLDDPRINPVADGAPSLRRLGCDRVLVCLADDELEVRGKAYYDGLLESGWAEDAAELLVSGEDHEYVHRDPDSAKAVVVMDRLAALFGGKN

SEQ ID NO: 190093 - protein, 87 aa, Oryza sativa
  Clone ID: PAT_MRT4530_8653C.1.pep
MPSLLQTLEEEEGKENKGKEGSGGNQCEDGNEGFDYRCPWRPRIGGIELLIYVAFIGRLSFEAESVFIQVMPLWNATRVHLAIGEGK

SEQ ID NO: 190094 - protein, 198 aa, Oryza sativa
  Clone ID: PAT_MRT4530_86540C.1.pep
MCGGAIIADFVPPAGARRAAASDISDNAVLSAAGAGDESFAAAKAPAPGRKTAYRGIRRRPWGRWAAEIRDPRKGARVWLGTYATAEEAARAYDVVARDIRGAKAKLNFPPTIGAAAAPPPPKKRRKAAAAANHHHHHHQQESSGSSSASSLPPTPPPAAEHQLRECMSGLEAFLGLEEEEDDGGAGEPWDAVDMMLE

SEQ ID NO: 190095 - protein, 162 aa, Oryza sativa
  unsure (1)..(162): unsure at all Xaa locations
  Clone ID: PAT_MRT4530_86541C.1.pep
MRLKLHAVEAALNYGSPGLQEFGTSSCRIRHERSPSSRLLVMKVILNRSKPSALVILLPIWPLAMFPLWDTWQYFHAQIPCTFNKVPIFNIFPLPKAPTPPCYFPLIPFWETSFINHFPLLKGVFYFWGKPQWGGGGPLLQFPPGSPRGFVNPPGEKSPXNS

SEQ ID NO: 190096 - protein, 338 aa, Oryza sativa
  Clone ID: PAT_MRT4530_86542C.1.pep
MAAAIDMYKYNTSTHQIASSDQELMKALEPFIRSASSSSASSPCHHYYSSSPSMSQDSYMPTPSYPTSSITTAAATTTSSFSQLPPLYSSQYHAASPAASATNGPMGLTHLGPAQIQQIQAQFLAQQQQQRALAGAFLRPRGQPMKQSGSPPRAGPFAAVAGAAQSKLYRGVRQRHWGKWVAEIRLPKNRTRLWLGTFDTAEDAALAYDKAAFRLRGDLARLNFPTLRRGGAHLAGPLHASVDAKLTAICQSLATSSSKNTPAESAASAAEPESPKCSASTEGEDSVSAGSPPPPTPLSPPVPEMEKLDFTEAPWDESETFHLRKYPSWEIDWDSILS

SEQ ID NO: 190097 - protein, 115 aa, Oryza sativa
  Clone ID: PAT_MRT4530_86543C.1.pep
MNGEDDQEREEMGEEEEETAAAAGLAGAEAGGGVVATHERHARSLRGEGQQHQLRRAAAIHLRRLAGANSNDVVDLVQGHIDHSNGSQTANAQEINKSKYQTARSGKKNLSLPLS

SEQ ID NO: 190098 - protein, 54 aa, Oryza sativa
  Clone ID: PAT_MRT4530_86544C.1.pep
CIGTLDQTCNQRTAVRTSYDTGSEEHHHSRLRGGLQNINFQGPGGLHHIGESEF

SEQ ID NO: 190099 - protein, 77 aa, Oryza sativa
  unsure (1)..(77): unsure at all Xaa locations
  Clone ID: PAT_MRT4530_86545C.1.pep
IVRCLLSQACLYSGFFYVEDHVICHXLKHDVFXRSKMFFGLPIHDNMXLLRHDKNRGYTPMLYEILDPHYQVECRLP

SEQ ID NO: 190100 - protein, 273 aa, Oryza sativa
  Clone ID: PAT_MRT4530_86546C.1.pep
MALVAGDMAEEAYRKTKARRGPGPDAVLISRREHVSMRDAGHGRGHKTFVNVRGKEREISVDLVSRGHGKDRDKDKDKERDKADVGMSVTVDGERVLHIRRLRWKFRGTEKVDLGGGDGVQVSWDLHHWLFPNRDTAPADASAVTPPPQPAHAVFIFRFELADIAGDDRDSAEVKDEHLLENAGSGGGGGAWAGYLGRWGRGDWSESSSNGENRRKRGQARRLAKASSSSSASVASSSASWASGSTVMDWASPEEAELQRGHGFSLLVYAWKC

SEQ ID NO: 190101 - protein, 634 aa, Oryza sativa
  Clone ID: PAT_MRT4530_86547C.1.pep
MDNKTIILTTLNAAWASSGSVIDLFIDSFRRGVRTSSLLRHLVIITFDWKAYKRCMKIHAYCFALATENVDFSQEKRFLTAGYLDMMWKRLDFLRLVLEKGYSFIFSDADITWFRNPFPHFYPDGDFQIACDHYVGNATDLGNIANGGFNYHDPYITDIGLKIKFLSTTYFGGICEPSRDLNKSKLHDLRVIMEDWRNYMSMPPSLKRFGALSWGVPQNCSLPLPNWSSCPNTSESLGRKWIQPMGFHWIVPKSHSSSYDIDSHGTTTTSLDAAGGLPPSSLPPTPFCVTTRCNRWQEHGGEITTGSSSSSCRRRRRPLPSMWASCSDSLFVLGAAPLLEGCVGMGFNLNLGLPGLGHHVTSGAADEVAAMQICDFKLHKLVEVSSARKALQETQLHDHGKNTWHLNIGEPVVDVLRERRGGVGMEVEHVAVGVDAEQRQVEPGVTEVVELLPQQSPPHQQPSGGEEEGVAVENEMSRSGSDDLDVVSCSDMGGGVGDDEDAEHGERRRLDSFNGLPCISYIEAAEMKYVMYLEEDRTSHCLAIAQRKSVPDYQNSRYRGAMPRQGDERTSPRLITEFIRAAAMDEPADFLWRGHNGPSWRLARELPRGYWLPFIAFSCRRSRCDMVGDCRHSP

SEQ ID NO: 190102 - protein, 99 aa, Oryza sativa
  unsure (1)..(99): unsure at all Xaa locations
  Clone ID: PAT_MRT4530_86548C.1.pep
LIEAGLLLEELFISRIRFIFFSKRLAPGQQLFNGHPGXNFSNGHPGQPLSNAHPGLADPVSRITQPVGISHVGRPPSVPGSPGGSSPTPPRRIHMSLGI

SEQ ID NO: 190103 - protein, 151 aa, Oryza sativa
  unsure (1)..(151): unsure at all Xaa locations
  Clone ID: PAT_MRT4530_86549C.1.pep
FYCLFCSYLRAYSMCSLAQHQQQILPPFSFSRFFHHRPTCAKHATSSVRSHHIGIAVNXAQHSTQHXWGANPGQFHPSNPCPPVTPGQPTWAAPHMACXHTVPWHPSKQAQHAQHAQRTAQHQSTTTAHAXSPQSSSPQQTPIXXGQXRAS

SEQ ID NO: 190104 - protein, 240 aa, Oryza sativa
  unsure (1)..(240): unsure at all Xaa locations
  Clone ID: PAT_MRT4530_8654C.1.pep
MTSAMTSPTAAAARQSGRLGRRTLAGERRHXDANGGHQHVEDDAANTPVTKTAAEEQRTTTATRRKRRKPSGXXRRRSSGGLRRRRRGGRGRRRLGDHDGGLPERRRRPRRRRRTAGATAATAALGHTALERFRRREAKARVAAGRGDTGDPFKGARRRRQRPTAAXTRKERSGRTNPRQTRIXRFPKRFSQRFQRRKGRGDPGDHFPSINSAGEGKGRPDXKRRRRRETRVSARGRRRA

SEQ ID NO: 190105 - protein, 164 aa, Oryza sativa
  Clone ID: PAT_MRT4530_86550C.1.pep
QFDNRSAARRRCRATRGRAPPWKQPGRPCCTPERRSGGAHQDHRPRAGGAGGRRPKGRRREPRSRWPPQQAPQERRPSRSTAAALAAAVPLPGRRRCRGGRRRGWSARRRPRRRRRALMPSTTSSPQHPPSSPPLRPAAAAAPPRRNSGRPPRRRPRLHGHHQP

SEQ ID NO: 190106 - protein, 127 aa, Oryza sativa
  Clone ID: PAT_MRT4530_86551C.1.pep
GDTGAGSEAATGPDVARGGEHLRRSRRLGRRPLCVGSDGRRSCSRLRSCVQCPLLPPSQRQPGQRRPTVRPAPDPAFTLSSTWMRRRPQRVRIKVDEAEAEEESKESDAFAVPDLIDVRRRGVALPP

SEQ ID NO: 190107 - protein, 132 aa, Oryza sativa
  Clone ID: PAT_MRT4530_86552C.1.pep
MANVFQSSKWYVGLHNADFPNVGSRRTLVTKARGHYDYMARSVYEYFTEAFDLLKEDTFSGVHTRKRRHNVVPLPTSRVMRQFSLYQEVPLLLEDPYIPEIADVDTLYPMQSAPVTHLTAFDIGKTLSFHTS

SEQ ID NO: 190108 - protein, 93 aa, Oryza sativa
  Clone ID: PAT_MRT4530_86553C.1.pep
MREWIQKQDSIGNQPNWWSAAPAGKDLAIRNHHGASGGSGVARQKGKDFTVGNHHGVGEGRLRCSVVEAGKDLAVGKHHGAGGDWRRSRIQRG

SEQ ID NO: 190109 - protein, 112 aa, Oryza sativa
  Clone ID: PAT_MRT4530_86554C.1.pep
MSLRFQVSFFFIPCLTFELHLRLSIMVNLPTYSISWNKIQRKNFTPCPLPPRAGVRLLRNCHVTLVALQLQMVDVQKHLRFINLLKYNENLFEDITPIVIQEFKKRIKNLSN

SEQ ID NO: 190110 - protein, 47 aa, Oryza sativa
  Clone ID: PAT_MRT4530_86555C.1.pep
TNARTNLKSQYTLLKGAWKQKTQIGLKNKTIYPVKHYQNLKLSTLFF

SEQ ID NO: 190111 - protein, 284 aa, Oryza sativa
  Clone ID: PAT_MRT4530_86556C.1.pep
MSAAAAAAASSPAPRSLNLIWVLSSGEKVGKQGCAGYRWCFREHGAKVCIADIQDEAGQKLRDSLGGDQDVLFVHCDVSVEEDVARAVDATAEKFGTLDIMVNNAGFTGQKITDIRNIDFSEVRKVIDINLVGVFHGMKHAARIMIPNKKGSIISLGSVSSVIGGLGPHSYTATKHAVVGLTKNVAGELGKHGIRVNCVSPYAVPTALSMPYLPQGERKDDALKDFFAFVGGEANLKGVDLLPKDVAQAVLYLASDEARYISALNLMVDGGFTSVNHNLRAFED

SEQ ID NO: 190112 - protein, 59 aa, Oryza sativa
  Clone ID: PAT_MRT4530_86557C.1.pep
MAVEVAVAWPSIEVGQDLPGFRFHPTEEELLDFYLFRGVLGKKVHFYIIGTLNILRHYS

SEQ ID NO: 190113 - protein, 682 aa, Oryza sativa
  Clone ID: PAT_MRT4530_86558C.1.pep
MPPAAAAEAEISPPPPAADGGAIADTAEAGVAAEKESDGMEVEDRGEVVSQEATAVKPDEAEEPEEDPEEVGEGAEEAPAAGPGDVAAAAAESGPVAMEAGDGEPALEVAITAHEPVEEEPKDVMETGEEAIEPEEDEEPEEAEVEEDEEPEELEMEEEEPEDADSEESMEEEAGSEVSEEEAAADDMKEIADKDSEEAQDEDKHGDNHKGEVADQLSNDEDVGGRENDESPNDELDTSLLVLDSVPDGNDKTLELFVGGLPKDCVEEDIRVVFSQCGEVESIRIVKKRKRIAFVRYADISATKKALTEFKDGIKVNGKSVRVSVAEPHRKSSEQKALTKVKTVYLEHFPRSWDERNIEECCEGYGNIQKVNILRSKKKVVSFVEFSSRKSALACVEGISKAKINDREVKLAASLARPQSKVQLANESSKGGFNVHSGATSKSPDKSKMKKDQTDETIVKKSQLKLLKGDESKLPSKDDVEVPQTSTHSKGKAKVGKRQNTSIDERPSKKSRESGESKLTSQDEGEVGKSKSKSVNERPLKKASKNRNIKHSAGSRYVTSHQAYPTVGATSRSKPHSHDLAPHAGFIPPSSRVQRTPARDHQRTAPYNIRQISGSPYARERVAPRPAYSVHTSNAAGYEAGYAYTYLPPPPPPSPSISYHPPPPASISYHPGSGPYIIRRYY

SEQ ID NO: 190114 - protein, 544 aa, Oryza sativa
  unsure (1)..(544): unsure at all Xaa locations
  Clone ID: PAT_MRT4530_86559C.1.pep
MAPSASFDSVSCGSSPVLTSFSSTAKPTSFSASSASSSSLASLSATIVFTVAELCCRSSVANTPASSSAQLSSAEKLSXMALSACSVSVPISSSTVSDPSTSTAKPASCAASISSSSSSLALPILVGNSASLVASPHVTVTSGTSSAGTASFSSLTVSELSSVAMFLGHSLLHTGASSLAPTIVPVTMPKMGESSWLIVCSASTAACSSSTTASATASTVSAGASTSIPEFTNRTGTLKSDLPTSSSCTGFSSTTASGSGKHSXATASTVSAGTSTSIPCSSCTGSSCALFCSGARGSLVSSSSISGFFAAALLVVRLPLGTFSSADAATVLWALRRVVGAGAASVLVCGLRRVVGAGGASTATSPVSILLVGAALLLVVGATTGSARARLLAPRRPSPCTGAFSPRFSSSLPSSSPSSGLMSFDDLTVPRRPRGRGASLLCPGASSSLSSRLTTSGELTVTRRPRGSGLPFFSRGSSSATALTAGLVAGAGGRATACLTNSSIPSTVASLARASAMAALVMLARTPLRLHSACRSRRGSAWKS

SEQ ID NO: 190115 - protein, 303 aa, Oryza sativa
  Clone ID: PAT_MRT4530_8655C.1.pep
MAVDKSGGGGGEAGASSSSSGVAASTMDRFHKIVLSWDYVRLVADSKGGQQQAKGLGRVKNTYASVAEYLAVFEPLLFEEVKAQIVQGRSDEKKEAGQDWQKGIVASCTESEGFHKVSMAVLDDFREMVSENDLLLLSKEKFEEGVTPSAYAFALVEQRGGRETISLRTFVAGEIKNLNVAKPVSCSRLQRIASIFSTTESFLWILKICSLSTIMREFSGMHSVASLPFKDLILSASEKNSGGNDQNRAWNVPEPLMDYLKTNLNDSQLDAVNAGLSRRSFVLIQVGNIVPPHGKRSGSLARD

SEQ ID NO: 190116 - protein, 74 aa, Oryza sativa
  Clone ID: PAT_MRT4530_86560C.1.pep
INRAPCTRNIKTPGPLYKSPQGPTPTRLPFYYPKISKTPIIYLLTPPHPPPKGIGFSENPTPSGPLGRPLGPPR

SEQ ID NO: 190117 - protein, 728 aa, Oryza sativa
  Clone ID: PAT_MRT4530_86561C.1.pep
MPPAAAAEAEISPPPPAADGGAIADTAEAGVAAEKESDGMEVEDRGEVVSQEATAVKPDEAEEPEEDPEEVGEGAEEAPAAGPGDVAAAAAESGPVAMEAGDGEPALEVAITAHEPVEEEPKDVMETGEEAIEPEEDEEPEEAEVEEDEEPEELEMEEEEPEDADSEESMEEEAGSEVSEEEAAADDMKEIADKDSEEAQDEDKHGDNHKGEVADQLSNDEDVGGRENDESPNDELDTSLLVLDSVPDGNDKTLELFVGGLPKDCVEEDIRVVFSQCGEVESIRIVKKRKRIAFVRYADISATKKALTEFKDGIKVNGKSVRVSVAEPHRKSSEQKALTKVKTVYLEHFPRSWDERNIEECCEGYGNIQKVNILRSKKKVVSFVEFSSRKSALACVEGISKAKINDREVKLAASLARPQSKVQLANESSKGGFNVHSGATSKSPDKSKMKKDQTDETIVKKSQLKLLKGDESKLPSKDDVEVPQTSTHSKGKAKVGKRQNTSIDERPSKKSRESGESKLTSQDEGEVGKSKSKSVNERPLKKASKNRDDVKLPSQSGLEEPQTSNRSKRKRKVRKNRSTTVNERPVEKAWKNRNIKHPAGSRYVTSNQAYPTVGATSRSKPHSHDLAPHAGFIPPSSRVQRTPARDHQRTAPYNIRQISGSPYARERVAPRPAYSVHTSNAAGYEAGYAYTYLPPPPPPPPSISYHPPPPASISYHPGSGPYIIRRYY

SEQ ID NO: 190118 - protein, 319 aa, Oryza sativa
  Clone ID: PAT_MRT4530_86562C.1.pep
MAPVRLGAPTSGALLLLVLLLICGGGGGGGVAAGGGGGGGGGKGSSVYPAPVVYPHHSRQISWKPRVFLYQHFLSDDEANHLVSLARTELKRSAVADNLSGKSELSDARTSSGTFIRKSQDPIVAGIEEKIAAWTFLPKENGEDIQVLRYKHGEKYERHYDYFSDNVNTLRGGHRIATVLMYLTDVAEGGETVFPLAEEFTESGTNNEDSTLSECAKKGVAVKPRKGDALLFFNLSPDASKDSLSLHAGCPVIKGEKWSATKWIRVASFDKVYHTQGNCTDDNESCEKWAALGECIKNPEYMIGTAALPGYCRKSCNIC

SEQ ID NO: 190119 - protein, 121 aa, Oryza sativa
  Clone ID: PAT_MRT4530_86563C.1.pep
RPGPSLPARWPPLRRRRRRRRSLYPSTLPQPTNSVRDRRIAARSGLYRSRQRAPHRPPIPFRHGRRPPSSSSPAASKEDAYWGFQLKLQEQGFELFYVKFMQKFVWNSTVPDGKKKKKKRP

SEQ ID NO: 190120 - protein, 125 aa, Oryza sativa
  Clone ID: PAT_MRT4530_86564C.1.pep
MRNMLLHIVDVRDVAEALILVYEKPESSGRYLCAPYHISPKATVEFLKNIYPNYNYVKCSAEVNGKTEIFTPISSEKLKSLGWKPRKLEETLTDSIEYYEKTGILQDAGGRPCVLPYLFHFLVEN

SEQ ID NO: 190121 - protein, 101 aa, Oryza sativa
  Clone ID: PAT_MRT4530_86565C.1.pep
FGLEKIRINKVSNCTGEHTRGPEQPNTTISWAHIRNALMRCHGLKKLTALADLHWTLPEQIYFQLTNWLNLAHCPMANSRQVLLKPWHACRQSEDHDSISR

SEQ ID NO: 190122 - protein, 109 aa, Oryza sativa
  unsure (1)..(109): unsure at all Xaa locations
  Clone ID: PAT_MRT4530_86566C.1.pep
MQLNPKVRTRRNKTKTKGWRCAEIVLNVTLSICSNHLEAPQSYPISYIKLRCRNRLYRLTXSDSDPADPXIVADLDSSRFLLCFRXDLRLRFCFDLIFFPDADVTKFGC

SEQ ID NO: 190123 - protein, 1099 aa, Oryza sativa
  Clone ID: PAT_MRT4530_86567C.1.pep
TEQNTKIKNFERASHDDEIKTHVSTGIAGTFGYLAPEYAMRRHLTEKVDVYAFGVVALETVAGRSNTNNSIEESKIYLLEWAWDLYEKEQAQRIVDPRLEDFNKDEVLRVIHVALLCTQGSPNQRPPMSRVMAVLTGDAEVVEMVTKPSYITEWQYRDGNSTNSESTTSEFSRQKEIDPLTMSPTITGSSHDGRRFWMSRQAHKRLHFANFNLRILFKLSKQRELIQQKCLAALNTILGRWGLRASPAWNISGEPCSGVAIDETGVDNNPNINPAIKCDCSFNAGTVCHIIRLAVSLNPLSGPLPKEIGNLRNLLSLGISSNNFTGELPAELGNLEKLEQMYIISSGFSGPFPSTFSKLKNLKILWASDNDLTGKIPDYFGSFPNLQDLILRNCKISDNLGTVNFSKLAGLTLLDLSFNNITGHVPQSILNLDKLSFLFLGNNSLSGSLPYDKSPSLNNLDFSYNHLSGSFPPWVTGNNLQLNLVANDFILDSTNNSILPSGLNCLQQDTPCFRGSPEYYSFAVDCGSNKSTRGSDNTLYETDAQNIGAASYYVSDNARWGVSSVGKFNEASNGSYAIYSPQQFQSALNSELFQTARMSPSSLRYYGIGLENGNYTVSLEFAEFVYPNSLTSNSIGRRVFDIYVQGELKEKNFNIRKMAGGKSLIAVNKRYTATVSKNFLEIHLFWAGKDFIPTVQNGVPKKKSKAGTISGVVIGASFFGLAVLVGLFMLLKKRRRTSQRKEELYNMVGRRNVFSNAELKLATENFGSQNILGEGGYGPVYKGILTDGRVVAVKQLSQSSQQGKSQFVTEVATISSVQHRNLVKLYGCCIDSNTPLLVYEYLENGSLDQALFGDGRFNLGWSTRFEIILGIARGLSYLHEEANVRIVHRDIKASNILLDPDLTPKISDFGLAKLYDEKKTHVNTKVAGTFGYLAPEYAMRGHLTEKVDVFSFGVVALETVAGRSNTDYSLVEDKKYLFEWAWGLYEREQALGIVDPRLEEINEEEVLRVIRMSFLCTQGSPHQRPPMSRVVAMLTGDIPVSDVVAKPNYIIELQLRGRNSSHVTTGYSGSTADELSGQRETSPLTPSLEINREIIDDGR

SEQ ID NO: 190124 - protein, 446 aa, Oryza sativa
  unsure (1)..(446): unsure at all Xaa locations
  Clone ID: PAT_MRT4530_86568C.1.pep
MRALLPRLPRRQRRPGPELRVPARGLLEARVPWVRDRALDHVVERERHLVPFLLAKDALLSAAPPPHAVPLHSLPSTIPFPFRPLRFLRXYTSAFALSPHPVAVSPTPRLAGIHSAEAQVLDSTRADAADRLLRLLMLAPARALPLHLVARLRLDLGLAPDFPRSLLPNYPDYFALSRDGALLELVCYRKDLAVSAMQSYAQRTGGYKVGDAVPFPLSFPRGFELDKKVRKWLDDWQRLPYISPYEDGSHLTPRSDITEKRTAAVLHEVLSLTVGKKMEKEVLVKLGEALRLPPGFRKVLARHPGIFYLSHKLRTQTVVLRESFRRHMLVDKHPMMGIRYQYLHLMHMGQEEAGKRKGKGRKTVRGEQMIGEEFGAEGENDDEEDEEYDDDEEEDMEAGVASGDEDSDDDDDDEEGEKEDMEAGVASRDEDSDDEDADDTDHAAKG

SEQ ID NO: 190125 - protein, 91 aa, Oryza sativa
  unsure (1)..(91): unsure at all Xaa locations
  Clone ID: PAT_MRT4530_86569C.1.pep
SRRRPTRPPPAPVILPPPPLNLLPAPAPVSRPSSVESPXPPAPVILXPPPVPSXPPXAPVFSRPPPVKAAPPPAPVVLPPPPVRSPPPPAP

SEQ ID NO: 190126 - protein, 130 aa, Oryza sativa
  Clone ID: PAT_MRT4530_8656C.1.pep
MRKDAKKGDRSSKPGEETRKAEEEVAYQLELPQSLAGVHNVFHVSQLKKCLRVPTEEANLEQIEIQVDLTYVEKPIRILETDERRTRNRVICFCKVQWSNHSEEEATWEREDELKSAHPHLFASSSESRG

SEQ ID NO: 190127 - protein, 83 aa, Oryza sativa
  Clone ID: PAT_MRT4530_86570C.1.pep
MEEGAYQKSDKDDTETEDYIGLKMSRFFLEPRLLWFSSDLVKISSPVVVADIGGNMQACKITTAHSHSSSYCLNLAQPPPLPL

SEQ ID NO: 190128 - protein, 110 aa, Oryza sativa
  Clone ID: PAT_MRT4530_86571C.1.pep
MRPALRTAIGGGRLRRLRASSRPRAVAREACRAYRRRGEAGVSFSASLRATAVNCVADGLERLSSRRFRWRIDKDRSGLIRQPLTKGNTSCGGVRVSLRAGGSSGACRCR

SEQ ID NO: 190129 - protein, 123 aa, Oryza sativa
  Clone ID: PAT_MRT4530_86572C.1.pep
VQCVELAIANPRGPGEFRVFNQFTEQFSVNELAKLVTAAGAKLGLEVQTKSVPNPRVEAEEHYYNAKHTKLMELGLEPHLLSDSLLDSLLNFAVQYKDRVDTAQIMPSVSWKKMGAKPKTVSV

SEQ ID NO: 190130 - protein, 110 aa, Oryza sativa
  unsure (1)..(110): unsure at all Xaa locations
  Clone ID: PAT_MRT4530_86573C.1.pep
WRTAIGGGRSRRLRPLSRPRAVAREACRAYRRRGEAGVSSSASLRAAAVNXRCGWPRKAVESAFQMADRRRKVSGLIRQPLTKGKTSCGGVKVSLRAGGGGGGSGAYRCR

SEQ ID NO: 190131 - protein, 53 aa, Oryza sativa
  Clone ID: PAT_MRT4530_86574C.1.pep
FILESSCSYSQRMTVQLVSSACDAFFYVHPCPRCVRTCGVHGSVRVMCQCILI

SEQ ID NO: 190132 - protein, 74 aa, Oryza sativa
  Clone ID: PAT_MRT4530_86575C.1.pep
FSFSVLMKGISRHIRVMSRAALVKQNQSRIYYCASYLFFIEIFVGHSSVVSHGSYYYAPYLIFVGNFICHWHHI

SEQ ID NO: 190133 - protein, 149 aa, Oryza sativa
  Clone ID: PAT_MRT4530_86576C.1.pep
MRRRLVAEAAAHRCLAPPHTTIASRRRLVPVPTHEEPPRRRTLGSRRPRKRLPRRLGSTATEDLRRFFVGNRRSRRRKLSLELRRTPPSTTPPHTACKDAPPATRDLAAQTTSAFAKIGYESRPLLVLVRFPFVLKLGIHCLSSIVSAP

SEQ ID NO: 190134 - protein, 163 aa, Oryza sativa
  Clone ID: PAT_MRT4530_86577C.1.pep
LFLLWFSVVEGHHYERGMIATSLGTKYFLRNVVTQGSRIAGRALSTESSIFTSHLCNQKRDNESPQREFKAFKSTAAATPAQGKGESRDTYKVAQHLVGTDACAKVGLNSLGITGPTTIYRNMTFQELFEHEQANNERKVAAAANGDTFTVYTGKYTGRSPKD

SEQ ID NO: 190135 - protein, 27 aa, Oryza sativa
  Clone ID: PAT_MRT4530_86578C.1.pep
RFMHVTLDARMPIYLLKLKYTKPNITT

SEQ ID NO: 190136 - protein, 93 aa, Oryza sativa
  Clone ID: PAT_MRT4530_86579C.1.pep
MAADGGRPGATTALRAVTGHDRRPPPRHRRLPPQPSTPSSAATAALCAVAGHNRCLPPRRRQPRPLPSAPSLATIAAVLCAINGRRKERKEEE

SEQ ID NO: 190137 - protein, 52 aa, Oryza sativa
  Clone ID: PAT_MRT4530_8657C.1.pep
EKSGGIFFWGLLKTAFKFFEPSGPYGEIPHAFKLMMGDNFLRVFFLKRVGVK

SEQ ID NO: 190138 - protein, 164 aa, Oryza sativa
  Clone ID: PAT_MRT4530_86580C.1.pep
QQEQETMRFVLVNKAYMAVTLGAAIELKEQVAKPCSSAAKRGASVLAVRPSSSAATAAAAAAEESLRMVMNMHAKPWVNGSYRNNSPLAKNDVANSGPPKKKEESYRYLSGWYKLVFRWTREGDQDRKAFTRTYVYSIEYLLIHFRCLGQKRKGVAKWRINALL

SEQ ID NO: 190139 - protein, 44 aa, Oryza sativa
  Clone ID: PAT_MRT4530_86581C.1.pep
MRPPVVVANGGVISGASQLGSGKAKTPVRELVVNGVYPVFVQVV

SEQ ID NO: 190140 - protein, 109 aa, Oryza sativa
  unsure (1)..(109): unsure at all Xaa locations
  Clone ID: PAT_MRT4530_86582C.1.pep
QXYXAVLIIDXNXXXXXAXIXKXVQTREHXXLXXXXGVKQMICCXNKMXATXPKYSKXRYDEIVKEVSXYLKXXGYNPXTIPXVPISGXEXDSMIXRSNXLDWYMGPXL

SEQ ID NO: 190141 - protein, 49 aa, Oryza sativa
  Clone ID: PAT_MRT4530_86583C.1.pep
ACRPSSTCGKRVSIKQAVRPSAHAEHAPALEDPSFTYACMQRHSSSIVV

SEQ ID NO: 190142 - protein, 389 aa, Oryza sativa
  Clone ID: PAT_MRT4530_86584C.1.pep
MASPLVRLLLLLLLVVAAASRGAASAAKAKAARVTAVIVFGDSTVDTGNNNQIGTPLRSDFPPYGRDMPGGARATGRFGNGRLAPDFMSESLGLPPLVPAYLDPAYGIADFARGVCFASAGTGLDNATAGVLSVIPLWKEVEYYREYQRRLRAHAGAAAARDVVRGALHVVSIGTNDFLENYYMLATGRFARYSVGEYEDYLVAAARAFLAAIHRLGARRVTFAGLSPMGCLPLERTAGALLGGGGGGCVEEYNRVAREYNGKVEAMVRSLRAELPRLKVAFIPVYDNMLDLITHPEKYENMISTVNYERKAHSILIRTRKIIVGLENVEEGCCATGRFEMGFMCNDESPLTCDDASKYLFWDAFHPTEKVNRIMAQHTLDVCYQQGVL

SEQ ID NO: 190143 - protein, 53 aa, Oryza sativa
  Clone ID: PAT_MRT4530_86585C.1.pep
YSSSSPTTVSSLPAIQKRSWLEIGISQALALTAANMARNEPMMIAAAYFWSTA

SEQ ID NO: 190144 - protein, 109 aa, Oryza sativa
  Clone ID: PAT_MRT4530_86586C.1.pep
MPSGFLEIWRVSEHESRPPPPDPLRVLSQLQALMGAAEAIPDLPVAASATATMELWVEILIVRLKSAVSSCHAERSCRRIRTKSPEKPLPGMPAAEGAVPRTAGSGDHS

SEQ ID NO: 190145 - protein, 150 aa, Oryza sativa
  unsure (1)..(150): unsure at all Xaa locations
  Clone ID: PAT_MRT4530_86587C.1.pep
HISPPSRRRRSRRPSTVHLLPPPPHAPEGGPTAWPSASHPPPSPVTAQRGAEAGRRXLEAAWAALGGPARWRTTEGEEATRGGGRLGRARRRRPRSRLGCAWRRRFSDELELGSGVVMTMAWADEDGGDGGFDGGRRQGTDIGEVESGLH

SEQ ID NO: 190146 - protein, 348 aa, Oryza sativa
  unsure (1)..(348): unsure at all Xaa locations
  Clone ID: PAT_MRT4530_86588C.1.pep
CDRAGRRACGRGCSSSSSSSRGRRGGRGAGRISRCRCRSGTSRRSRCRCRXPLPPSSAPSSTSSSGSSSLGGVPTPPNSVGSAPPAPPPLSELERVRRIGNGAGGTVWMVRHRPTGRPYALKVLYGNHDDAVRRQITGEIGILRTXEHPAVVRCXHGRRIASEAFLADVARQVLSGIAYLHRRHIVHRDIKPSNLLIDSGRRVKIADFGVGRILNQTMDPCNSSVGTIAYMSPERINTDLNDGAYDGYAGDIWSFGLSILEFYMGRFPLGENLGKQGDWAALMCAICYSDSPAPPPNASPEFKSFISCCLQKNPARRPSAAQLLQHRFVAGPQQQQQPQPQPLAPPPS

SEQ ID NO: 190147 - protein, 369 aa, Oryza sativa
  unsure (1)..(369): unsure at all Xaa locations
  Clone ID: PAT_MRT4530_86589C.1.pep
CDRAGRRACGRGCSSSSSSSRGRRGGRGAGRISRCRCRSGTSRRSRCRCRXPLPPSSAPSSTSSSGSSSLGGVPTPPNSVGSAPPAPPPLSELERVRRIGSGAGGTVWMVRHRPTGRPYALKVLYGNHDDAVRRQITREIAILRTAEHPAVVRCHGMYEQAGELQILLEYMDGGSLEGRRIASEAFLADVARQVLSGIAYLHRRHIVHRDIKPSNLLIDSGRRVKIADFGVGRILNQTMDPCNSSVGTIAYMSPERINTDLNDGAYDGYAGDIWSFGLSILEFYMGRFPLGENLGKQGDWAALMCAICYSDSPAPPPNASPEFKSFISCCLQKNPARRPSAAQLLQHRFVAGPQQQQQPQPQPLAPPPS

SEQ ID NO: 190148 - protein, 236 aa, Oryza sativa
  unsure (1)..(236): unsure at all Xaa locations
  Clone ID: PAT_MRT4530_8658C.1.pep
IASAEGRGAWTGSTGVGPTRQPHGPRWTGCTRLAPAGAVGPTRQPHPRARAADGRAPHGSRGARPKAASPARPAGGGAPASRWSPPATTGAAERRPREGREGGKEATVHGSPRGDGGDGGGGRSGGRRRRSSGRRGRRRSGGRRAKRRSGRGRRGRGEAEGGGAEVGGGPGXRRRRAGARRRRRRERATSRAQIRRGGRAARGGTGRRRCGEGLNRAGAREGGRGREETGAGGRPP

SEQ ID NO: 190149 - protein, 133 aa, Oryza sativa
  unsure (1)..(133): unsure at all Xaa locations
  Clone ID: PAT_MRT4530_86590C.1.pep
WPARVGDLAGDWMVGCKIGGHVHVENDEMNPTVLTLEPNDDRRWSTTNGRWRXVRLTGGDGXLRRPAARAEVRPGFPTPWXKQWRRRQATVMVEAAARRGWSSAGGGADXAATAARLRGTGWLRRWGKRKRRT

SEQ ID NO: 190150 - protein, 66 aa, Oryza sativa
  unsure (1)..(66): unsure at all Xaa locations
  Clone ID: PAT_MRT4530_86591C.1.pep
LRNPSVLARATDELDRVVXRRRLVAEGELPNLPYLDAXVKESMRLHPXVPLXVPRVSRXDGFSAGA

SEQ ID NO: 190151 - protein, 118 aa, Oryza sativa
  unsure (1)..(118): unsure at all Xaa locations
  Clone ID: PAT_MRT4530_86592C.1.pep
KTENRNRGRRSNQPNQRTPSPPPSSPSPLQLTTPPPPINQRRTQTQTPPSHTRTRHRSRSARARTTAPRERQRRRRRGCEWWAMAVAARLRSAGARLVVGPAAMAVGRGGGGEGKLXG

SEQ ID NO: 190152 - protein, 488 aa, Oryza sativa
  Clone ID: PAT_MRT4530_86593C.1.pep
MGAPPPPARPGRRSRSRAVARGPGPPLPSKNRIIPGRPSRLWLDRCLRALFVAALALSLSLSPPPPSLLLPAAPARAASSPVGERRRNPEAPPYPCEDVGRYYAGLDGLAGDELMAKLRAVVSPHAALRYKDVWEALKILDAADAPKPEASLDVIEIYSQRAVPKNLAGKPDGWNINSSRGNKYYGHCAATSVRCMRPANHEAAPDTETDSERWAPPLKVRGDVSRALMYMAVSYGSDQKDGAPHLELSDSPSIQSRKMGLLSALLKWNELDPPSRSEQLRNNRVCSLYQHNRNPFVDHPEYANLIWGNSLGESSSSVRTFPEAWVNEFHYENKGKDENEFVELAVRTSLDAKDLTLILYNGANGRMYNSLNLDDKDGFSVAESSSSSSYLIYTAFITLQNGPADGIALVYKNGNRKEVLDFLSYEGSMRALDGPAKGMVSVDMMLKETDESSQQDSLGLTGNKIGDFAWRKLEGYATPGKLNVGQMF

SEQ ID NO: 190153 - protein, 961 aa, Oryza sativa
  Clone ID: PAT_MRT4530_86594C.1.pep
MVGATASALIGVMNPLLTKLSGLLEREYGKLKGVGREVALLRDELSSMNTALEAVSDSEEEPSSQVKEWMRQLRELSYDVEDCIDVFVHRLGHHDPGDGLFRRTKRRLKALRSRHCIAGQIAELKDRAVLVNDRRKRYELDAAASSSAAIAIDSRLPALFEEMDRLVGIEGPRDELVEFLTGGINLAPQRRVVSIVGFGGLGKTTLANQVYQHIKSQFDRTAFVSVSRNPNVNKILANILIGILETRKLSSVHQKQHSDTIEDLKHKTFEDCKLISLIRENLQNSRYFIVIDDIWDKAAWRDHLRFAFPENNSASRIITTTRINDVAIACHFSHEDFVYAMKPLSSENSEALFFRRIFSSKEKCPPELEEVADDILKKCDGLPLAIVSIASLLSCKPVTKQEWVWVLNSFGSTVMKDQGSHELAVVKRILFLSYSDLPHHLKSCLLYLSIFPEDHTITRDFLISRWIAEGFITEQRGESLEEVGEKYFNELINRNMVQSFEIDPFSRREAYRMHDIMLDLMISLSTEENFATILDGQHCAPSSNKIHRFSLQCKSVERITWLRTTSFSHARSLSVFGDFNKIPPLVDLEVLRVLDLLNCSSLKDDHIENIGSLFQLRYVRLGNISRIPRQIGKLKLLQTLDLSGTAVKKLPQSIVQLLQLVRLFLPWRVELPNGIGNMEALQVLSVFDGTENTSAIIQELGNLTKLKDLDVYWNCNDTESGHEVYINHLVRSLCKLGGFNLQSLCIRNIYPCSLDILAESWSPPPRHLQTFQTDMGCYFSSLPTWMSSLSELTCLRIHMKKVGEEDLQVLKCLPALLRLDLYPGYPKHTLKVSCSGFSCLKEFTYGPSYVDLALILRHQSTIKNGLGMGVMFEAGAMPKLQQLEFGFNAHDMVSAYGAGLDFGIQHFASLRHVRVFIDCRDASDCEMEAALAATANSVSLRGSYHVEIRRILKNVENDEQS

SEQ ID NO: 190154 - protein, 84 aa, Oryza sativa
  unsure (1)..(84): unsure at all Xaa locations
  Clone ID: PAT_MRT4530_86595C.1.pep
RGGSGGRRAGGRRSVRPTCSAPGTPPPRRTPPGTRGTATAPSPSPPPPPAVAPVAPAAXELDHPGXRPAAPPPAPRPPAPSGSP

SEQ ID NO: 190155 - protein, 55 aa, Oryza sativa
  Clone ID: PAT_MRT4530_86596C.1.pep
PPRYPALVWISPVGFENGPRFGGSPNEKIPKIQEGGLFSFKTGGTRTKICPITDY

SEQ ID NO: 190156 - protein, 47 aa, Oryza sativa
  Clone ID: PAT_MRT4530_86597C.1.pep
DVPVIFFFFAIDRSSVNKERKLNNSLVTVYCLPYIKKTATLLTYNYN

SEQ ID NO: 190157 - protein, 56 aa, Oryza sativa
  Clone ID: PAT_MRT4530_86598C.1.pep
YKHGAQESILLQSVHSRHPLTSSREVAAVNIHLNALVQMYIPNLLVVTFIPIPAAL

SEQ ID NO: 190158 - protein, 391 aa, Oryza sativa
  Clone ID: PAT_MRT4530_86599C.1.pep
MGNAAVATDEDGQASRRQQFGVGAAPRTREAGADETCTQEEAGAGGSRDDLGRAHKRTTQADSVAALEIEPRNPTRAANHTTPYQLDRRWTSRTSQPPHGPREENPATAGAGPTPPEGEEERWRLPLAGCGEGETVGGKFQTWPPACCSWLPGAALRRMGVSGKGGFLAVVAVVGRGAVLLADAARVVDFGEVGSPPAPSPVADAPYLPDVASPPAVQTEGGNHYQKEILVAVILALAAVIVTVAIPQISDRTKLPNIIDPVIRNTMDLRHLYQVAAVAVLCVQPEPSYRPLITDVLHSLVPLVPVELGGTLRGGGGAEGGCSGGSAGSGEGPFFRGGPPLWIWRGVGWWLRRLPAAAPPGGGRAVVAVALPSRFGAASGCGGGVYRRWQR

SEQ ID NO: 190159 - protein, 107 aa, Oryza sativa
  Clone ID: PAT_MRT4530_8659C.1.pep
MHVTKTNATKRFELVSCVCCGHEISVDIGQISSTKLAASTEGVNGQTNGGDQKIGEETLCKKRNATLRPTPTNWMINFKRKQQRNELAIERTKQKDQEAKLNRATYP

SEQ ID NO: 190160 - protein, 95 aa, Oryza sativa
  unsure (1)..(95): unsure at all Xaa locations
  Clone ID: PAT_MRT4530_865C.1.pep
FFFFFFYRWTHVTYISLSHQTVVWSTTPSAVNRSATEMIHXRHQYHRXHTPPPRMHACRSARMATSTTPSVFKYLTPLIYLNIFNRLFYLIFLNM

SEQ ID NO: 190161 - protein, 444 aa, Oryza sativa
  Clone ID: PAT_MRT4530_86600C.1.pep
MGVSGKGGFLAVVAVVGRGAVLLADAARVVDFGEVGSPPAPSPVADAPYLPDVASPPAVQTEGGNHYQKEILVAVILALAAVIVTVVSAIYAWTFWKKTRQALDSKDKKLSSTTKGHMLLPMFGKLNSMKTSKKEVVAMMDFSVLDSATGKFSENNILGKGGFGCVYRACLDRGVVAAVKKLNCCRQEVEKEFENELEFLGKIRHPNVISVLGYCIHEDTRLLVYELMQNGSLETQLHGPSNGSALSWYIRLKIALDAARGLEHLHEHCNPLIIHRDIKSSNILLDSDFNAKISDFGLAIYGGNHNKADLKPSGTVGYVAPEYLLDGQLTEKSDVYAFGVVLLELLLGRKPVEKIGDSHCQSIVSWAIPQISDRTKLPNIIDPVIRNTMDLRHLYQVAAVAVLCVQPEPSYRPLITDVLHSLVPLVPVELGGTLRVVEQPRQTG

SEQ ID NO: 190162 - protein, 127 aa, Oryza sativa
  Clone ID: PAT_MRT4530_86601C.1.pep
IQPLEGEKPDEESLKRACMATLTIAKANLLSLSLSDCIAQVNKHKCTNRSSLVDLGDVGPPHAFAAQVEGKRRVPLCLAWPQAPRSMELTTTMAIAVYTYALILYVHTHIWSCHDQTLLLYLPNDHV

SEQ ID NO: 190163 - protein, 98 aa, Oryza sativa
  Clone ID: PAT_MRT4530_86602C.1.pep
DPSECSKYNELKLERSRAGEKVKALESMMLTVKDVLKKIDAEMEEMESSVRNHDIALRKIATAPWVSDDDDDDDALGNLRVTTTQLSAYLELFSSKPV

SEQ ID NO: 190164 - protein, 591 aa, Oryza sativa
  Clone ID: PAT_MRT4530_86603C.1.pep
MRSGRYDLRSNLKRDEKTDFVMTYSKKHRIKEDIVCNEGEIAESLVSGDLPCESNQGVFWSELSGEVASNLSKSVVSLALHDGNTMLFVCSGIAVHRNGHVIKLLTSASLLKAFNDARKDHDNLKVEVHHEDTVVIGFLREYNLDHNMAAVIVENLPDLRPVPFNNVQKFVPHSKVVALGRDISGKLMTTSGVLIGESYNGYLMSSTCKFSEVYEGGPLFDFDGDFLGMNLSFTTEGTVFVPGDRVLDQLVNCILDHEVRFAARLEALKEVWVGESPSGEMPSSHQVHRDVLNKDRYGDLESLGYPEPPKSKDGMILAYTFEEPFGDIFGKGVWSELSEDVASSICENTVALASFNGDKRTFACTGFFIEWNECATILTSANLLRDSSDENRIAENLRIEVLLPNNLRTVGTVQHYNLHYNVALVSVKDHCVRQPVKIQPYGHNCRKLLAVGRIFESGRLMAARGQQFPTVVTHDCKFLSYSGCTTTKAGIGGPLLCFDGTFVGMNFYDEGVEGTAFLSWCEIREILKYFKTKGAVAEHSHGNPSDVLDWKIAGDDSVHPDRDGKDEAAVAEFDSEHGGADEAMQESDSIS

SEQ ID NO: 190165 - protein, 484 aa, Oryza sativa
  unsure (1)..(484): unsure at all Xaa locations
  Clone ID: PAT_MRT4530_86604C.1.pep
MVVQRDGHVIKLLTSASLLKAFNDESQDHDNLKVEVHHKDAVVIGSLREYHLDHNMAAVVVENLPDLRPVPFNNVQKFVPHSMVVALGRDISGKLMATGGLLIGGSSGSYNPKLMSSTCKFSEVYEGGPLFDFDGDFLGMNLSLTTEGTLFVPGDRVLDQLVNWILHHEVKFAARLAALKALRSSFIYTFLNKDQYGDLESLGYPEPPISNDGMILANTFEEPFGNVCGKGVWSELSEDVASNICENIVALASFNEKRSFACTGFFXIEWNECATILTSANLLRDPRDADKIIENLRIKVLLPNNRRTKGTVQHYNLRYNVALVSVKDYRVLQPVKIQPYRHYASELLAVGCIFKSGRLMASRGRQLPIGVTHDRKFLGYSQCTITKAGIGGPLLGFDGNFVGMNFYDEGVEGTPFLSWCEICEILKYFKTKETVAEHRHGNPSDVLDWKIVGDDSVFPARYYDALLYCITFNVSINLLITENY

SEQ ID NO: 190166 - protein, 65 aa, Oryza sativa
  Clone ID: PAT_MRT4530_86605C.1.pep
DNLPSPIAKVIKKTRTKTRKQEGNQQGDHDTSSLMIPPKRFGTTQRTACQSGGLRALAADAAGEL

SEQ ID NO: 190167 - protein, 183 aa, Oryza sativa
  Clone ID: PAT_MRT4530_86606C.1.pep
MAGAAVPRITEFMAEAALEEGTTTETAVVVERASKLGGGGGKAEAAPPLKERDANKKREKATGSAQVVNAESAVAVAAAGGEGDQKQEPWPTFEYLDSLSLEKRSEELKSAERRSKLDDDLEKLQKDVRDGIDKDGYYLVDESYLAESAACKAQIDELWAKIDWDLYNFGDWDYDDPEYVVYL

SEQ ID NO: 190168 - protein, 130 aa, Oryza sativa
  unsure (1)..(130): unsure at all Xaa locations
  Clone ID: PAT_MRT4530_86607C.1.pep
GSYAFFKVPAGTHXHEVCLLSSLLSPGRVDIRARNTGHIQAXLTENRRALNELVLEPLKEEQFYXKREPLSIMSLLKSPMHVTLVYMVIMDFVMPKAIANIXPVEINNAQEHMRNFPGSSCIGLLARANS

SEQ ID NO: 190169 - protein, 55 aa, Oryza sativa
  Clone ID: PAT_MRT4530_86608C.1.pep
MYSQICALTTVFFFRITQYNTGSHNARTQTLPLRASSKIGPTNPSWRLTKSPQNL

SEQ ID NO: 190170 - protein, 137 aa, Oryza sativa
  unsure (1)..(137): unsure at all Xaa locations
  Clone ID: PAT_MRT4530_86609C.1.pep
SVPQQFESDKKEDYXPKIGSLRWMNEFSQYHXLLVDELENLRKLHLDVTIIYADYYGAAMEVFXFPPERILGNLEGIPLFAFAWLLERKGPLIGLVFLPSWLPLLGIWPNNHKVVVGMNPSQNMPSVMASIPSEPCH

SEQ ID NO: 190171 - protein, 68 aa, Oryza sativa
  Clone ID: PAT_MRT4530_8660C.1.pep
GKRIKSLLQKHYFLLHLLSVHNTNSIITLVALNPFFPNPKTTESCWHTNPFQPPINPLLQLRSPPLSL

SEQ ID NO: 190172 - protein, 230 aa, Oryza sativa
  unsure (1)..(230): unsure at all Xaa locations
  Clone ID: PAT_MRT4530_86610C.1.pep
RPTATPQRRDSEKRRHHGSHDIQNDAITYLKSGFHLEMLVKKERGNFPQRRRXAPGRTRVLTGNKKDDTPPPAPFALPSGRRWHCRSGPAPPXVRPPYFTWPPRWHPGCSATXPSRHRGLAAASAHGLXPRHRCPKHLPPPRTGRPRHYRPKRPPLPLPVAIEPQSSAASALEPGRPSHSRPPPRQIQGGRHEEEMPRRRLPCLPPASSGGGEVRGKERRRRRLGFTEPP

SEQ ID NO: 190173 - protein, 59 aa, Oryza sativa
  Clone ID: PAT_MRT4530_86611C.1.pep
LSPPNYFFVPGSVLQTDIVANYNPYSSHCSCCSTSYISWLDKFLLDTKLKLLAFNYRSS

SEQ ID NO: 190174 - protein, 166 aa, Oryza sativa
  unsure (1)..(166): unsure at all Xaa locations
  Clone ID: PAT_MRT4530_86612C.1.pep
GPRYPRILRGPTSPPAPFALPSGRRWHCRSGPAPPXVRPPYFTWPPRWHPGCSATXPSRHRGLAAEEDGPPSPRAAHAPGNHGRCHLPPPRTGRPRHYRPKRPPLPLPVAIEPQSSAASALEPGRPSHSRPPPRQIQVRDGRIQPWGRRIRRLPTPRCRGRLGPHR

SEQ ID NO: 190175 - protein, 330 aa, Oryza sativa
  Clone ID: PAT_MRT4530_86613C.1.pep
MANGLPNPLLTADAARSLVDSVDAFLFDCDGVIWKGDQLIEGVPETLDLLRKMGKKLVFVTNNSRKSRRQYAKKFRALGLEVTEEEIFTSSFAAAMFLKLNNFSPEKKVYVVGEDGILEELRLAGFECLGGPVGAVIVGLDQYFNYYKMQVMAQQANGVGQGAAGEKREWGHGQFQLLLIPVAASDLLIATVNRLLLYASLCIRENPGCLFIATNRDPTGHMTSVQEWPGAGTMVAAVSCSVQKEPIVVGKPSSFLMDFLLKSFNLETSRMCMVGDRLDTDILFGQNTGCKTLLVLSGVTTLPELQDASNTIHPDLYTNSVYDLVGLLQQ

SEQ ID NO: 190176 - protein, 196 aa, Oryza sativa
  unsure (1)..(196): unsure at all Xaa locations
  Clone ID: PAT_MRT4530_86614C.1.pep
MTARWPPAAAARLPPFTAAQYEELEQQALIYKYLVAGVPVPPDLVLPIRRGLDSLAARFYNHPARTSCSYXCYGPYFGKKLDPEPGRCRRTDGKKWRCSKEAAPDSKYCERHMHRGRNRSRKPVETQLVAQSQPPSSVVGSAAAPLAAASNGSSSTSPPIYPTDHPHPHESPTVSPATGRAKLPPAVPPMQRSIQE

SEQ ID NO: 190177 - protein, 76 aa, Oryza sativa
  Clone ID: PAT_MRT4530_86615C.1.pep
FVVFLILGGPPLSFFFFFFFFFFFFFFFFFKGAPPLFLGGILKCLKLLAPPKKKGGPRPPRRSGFKKNWGGFGAGN

SEQ ID NO: 190178 - protein, 40 aa, Oryza sativa
  Clone ID: PAT_MRT4530_86616C.1.pep
FLIMKVLLCALVCQRLAWKPFIFQLRIANKFFHWFPLFSL

SEQ ID NO: 190179 - protein, 433 aa, Oryza sativa
  Clone ID: PAT_MRT4530_86617C.1.pep
MDGGMKEQGILLVRKAVEEDDAGNHARALPLYVHALDYLAAHLKYERNPRVRDAITAKLAGYIARAEEIRDALLPAAGDDATPPAAAAEEGKAKCGGGEDESDRAKLRAGLHSAIVSEKPNVRWSDVSGLDGAKQALQEAVVLPVEFPQFFTGKRKPWKAFLLYGPPGTGKSYLAKAVATEADSTFFSISSSDLLSKWMGESEKLVTNLFQMARENAPSIIFIDEIDSLCGQRGEGNESEASRRVKTEFLVQMQGVGHNDDKVLVLAATNTPYALDQAVRRRFDKRIYIPLPDLKARQHMFKVHLGDTPHSLTKGDFESLARRTDGFSGSDIAVCVKDVLFEPVRKTQDAMFFFGTAEGDGDGGAWTPCGPTRPGAVQITMQELAAKGLAAQITPPPITRTDLDKVLARQKATVSEKDLEVYTRFTREFGEEG

SEQ ID NO: 190180 - protein, 379 aa, Oryza sativa
  Clone ID: PAT_MRT4530_86618C.1.pep
MAMERAWKPREIADTFGIEMDEEEAAAAAIPPPQTPLEPMEYLSRSWSVSASEISKILFNGSKKSFAAKRLPEMTIPENSVVAASIVPSHLQHIDTRRNSISSHHLPIGRWFQHKEASRVKQSSKEKLRAEKAHVHAMVSVARVAAAVAAVTAATTSSDIQTSKMAAAMVSATELLASHCVEIAQHAGARHEQVACAIQSAVGVRSSGDLMTLTAAAATALRGAATMKQRVQREMRSNASVLPYEKGHSWSPDIWCKEGELLKRTRKGDLHKTRVSIYINKRSQVILKLKSKHIGGALSKKNKSVVFGVYNELPTWVEAGKHFTEERCCFGLSTAQGLVEFECENSTSKQRWVDDVKNLLRQVAAEEQVENKLGSVKLS

SEQ ID NO: 190181 - protein, 51 aa, Oryza sativa
  Clone ID: PAT_MRT4530_86619C.1.pep
MSCNGGNGGTGNKQQINGQPPAIGSSLSKGNNPHAQRSSGQPSGALMESGS

SEQ ID NO: 190182 - protein, 785 aa, Oryza sativa
  Clone ID: PAT_MRT4530_8661C.1.pep
FIKKLKQKVRNKARVEGSIVEAYLVEEISHFTSLFLPDLIASSRNRPHRYAQVGPASESNLSLFQVQGWKTGRGISRTLTFEEQKKAMIYIYTNMSEMDGFVEKFEQEQWMRSRPPNQKELDKLIWNGAGNGKPNLLDWFKKLCSKDASIHNDLRRLSRGFGLKVKSYDIYEVNGYKFRSEKYEKSKGNLTTVNTGVLAVGIDDNTGKELEYYGIIMDIIELKFDGDENFKLVLFDCHWFHPVNGVRRLEKFGLVEVAHASCNPADEPFVLASQVSQVYYVPYACTTDPNLNAWWVAYKVRPLGSLPITSLDDYNSSDPSCVDIFQEDGLEGEFIIDIGQGLDNIVITDVDEITDQQDLSTINNRSTDMSEDNDLVSEDEESEDDNESIPEMNDYYYRQEEADDEVEDEVNFHLQGCSELPPIIPNIEDRPLIEPEGKTQWHEIPTLGKGRRPASVLSCLLKKNYPGIVQYKGKSVIATTWNHYKADKDSNGRSKADVVEEGFWLRFKHQPSQDQARAAKVHVRKCCGVLLGWLKYYARIQAIMDHCRKVEGVQICDKRAGLRYLSKEEYLAQQPEWCDQMAWDAMATVWVDPEWIEKSKTNRANRKTPKFKPHRGGSNSIATVRQKLERYKTKATELNGPNFDWMNSPVDSRALYECSCGRPHGKWETFNGMVDDSEAMAKIKRRSTSSTANKRRRQEEDGHERARLIKDARIAKEYAHRVLEWSSGQDSYTNTIKLILESAIRHIPIIFISILECLYLLQFHIHRRRRHHLHTEFIILQINLR

SEQ ID NO: 190183 - protein, 53 aa, Oryza sativa
  Clone ID: PAT_MRT4530_86620C.1.pep
MWSGVDDIMSCRRSVQLDEADENTNALLNRMCAVANGAKAKTNDKGKHESQMT

SEQ ID NO: 190184 - protein, 1506 aa, Oryza sativa
  Clone ID: PAT_MRT4530_86621C.1.pep
MEELFMQVFERRDWVAAQLRQQVESYDQSLACALLAAGRPPPPWLLPSRPAAPQGLNGKPAPSEFVFTGSHITTPAINRTVYQPSAVPSTSLRNVGLPSGYSHLWTACNSLDTDQHQEVQQEQTKVNEEFVNTRAEANMFSRIQRSRSRQRNIEDRLRERDEAANGGSSDGLQDRMERSKIAGVRLNRTTTSSSSEPCGGDANNSGATHPFRGQENDIYTNKRNSVEFLKCSKEGGLGSGVHLDCSPSLVLENKIVSSDSLFKVPNDCSARDSSRTQVADSVCHPLPETHLFVEPKILQFEGVESVCMNFSSEKMGQPLESAHLDLAEAHPLNEDPSSTGCYHVPCSVGSSLVDGVELGLLSTDSATLKQHLQCGSPDLSPTHSRNKDPCPTISSEVPNYTSEPLVEQDTYCNPEINSLEGPCSKVSQLLEKEETKACPDANPLLKTDALHTIGSTERIRNLASRNSTPLEQRSSDPHVLPCQRSRSVQPADSSSRPPLSTGILPDSLLEAVGLDHLPHSNDTNSQCSPSRSAASPDLLPLRLVNSGDVYQPSFSCCKSQNNKDSNGCAVEGTTVSIEKPPSQEQYLLDRPPMELNGFADEDTPLGHTLGTHNEMLKGKKADDLVNCHSGKLNSSQKKPKGLTEASGFSSGKNESAGQKVESNISTGVMHTTERSRGFCAMNCTEDLQQDGTEQETSPFDNAVQINANRCTADNNKQIKSLRPSVRYSLRSLMSHEKINLLQSEGRSAACGQKRSDADGVQVNGGPSSKRRRIKRQSNAALSSSPNTNSLSVVHQVDIDNHVLPLGNFSGKSQPSGRYFLRDLGSSGSMSLKSEERNAVSHGNISVSSIHNKTSSSPERYNKASLDNENGNSPGQLQNTLDVVKTTAALPSCYGTLIDNEKSCAEEENPCLEGKHANDTCSSVVHQQMTLQIDNIASQSVILNSENYSRENSITISASYVSDQNGDQAHAPSALVRENLSYGSSVELDRRCKSNGSKGSLLSGAAITMQDGDESVDCDATMPEFERFDVPIQFDSPCAETKTSEALCESRKLVTLSSKFSNYDTNTESGVSHLLSAMSGKPINFPDDLQQYRANNDRSITDIFGACGLGLDDSFSIYDVTASCSSNGSSAKENNDNPLTPSVEKYGLGKLSARSGSSSEHMGSIPELECFRIDEHSSIAEENEYQGMLHGSAGLSYSHQLPSGRKALQDITGLCQNTVNSASLSSIFLDTGNELNHQTDLINGHANDKPKNSLAASTKRERKISDSLHPRLRRTELHNRNGRHQSEANIDKQSKPSNIVANVTSFIPLVKPKLQPTTACVKKDVRVKALEAAEAAKRLEEKKQNEREMRKAAAKLERERLKQEKELKQKQEEQKKKRDADVAAKKRQRGEEERKEKQRKRKCTEEARKQQKQPTEKSLAVNDEKDVCRKTSDNIELTKPDGRTTEPAMTNIPNSLEESYQMSPYKDSDEEDDDDFEHEQESRRRRKFIPSWARLYLRKSCVFDVMH

SEQ ID NO: 190185 - protein, 46 aa, Oryza sativa
  Clone ID: PAT_MRT4530_86622C.1.pep
KKIKNSFIKKKKKKIFKKKKKKKKKKKKKKKKKKKKKKKKKKKKNK

SEQ ID NO: 190186 - protein, 389 aa, Oryza sativa
  Clone ID: PAT_MRT4530_86623C.1.pep
MLGVARRRLGSGCALGQLMQALRPAAAAAAARTYSAAAKEMTVREALNSALDEEMSADPSVFLMGEEVGEYQGAYKISKGLLDKYGPDRVLDTPITEAGFTGIGVGAAYQGLRPVVEFMTFNFSMQAIDHIINSAAKSNYMSAGQINVPIVFRGPNGAAAGVGAQHSQCYAAWYAHVPGLKVLTPYSAEDARGLLKAAIRDPDPVVFLENELLYGESFPVSAEVLDSSFCLPIGKAKIEQEGKDVTITAFSKMVGYALQDVREPQMKEKDVKFQAAEILSKEGISAEVINLRSIRPLDRATINASVRKTNRLVTLEESFPQHGIGAEICMSVVEESFEYLDAPVERIAGADVPMPYAANLERMAVPQVDDIVRAAKRACYRAVPMAATA

SEQ ID NO: 190187 - protein, 331 aa, Oryza sativa
  Clone ID: PAT_MRT4530_86624C.1.pep
MYMIDLFPNVVPQTIDSSPPRQSNSGRDIQYALDLIPNGGGPSPPVIGYNAPKTSTLLQGLIREPADVGKKRRTRSSIVDTLALAPKKKAKLKKPKPTDDLPILDPSIEQALDEEDIEDDIDQAAAEPPPPPSPPVQQSSSDRTPSTVGSHHIEEEIQPAAPTIPALADLFSFDIKDYLDGETEEDTTSKSLNQALIPDELADILTLAVYLEQHQFKLEKAKLRLAERRELKDIEATIQANRQLVHEEKSKLDQLSEGQIKSNIDRLEAHKIELLAQLEECNAELDIEHKKLADLPKSIEEQKARLKSAIKNVADLTKSLKIIPGTDAQDA

SEQ ID NO: 190188 - protein, 226 aa, Oryza sativa
  Clone ID: PAT_MRT4530_86625C.1.pep
MDRLLNLQGPPLGSIENIELAGFKSKNFDRWWGEWKLHLFHQSASMYMIDLFPDVIPLRKPADAGKKRRTRSSAADTLALASKKKAKLKKPKPTDDLPVLDPSIEQALDEEDIEDDVDQATAELQKKKTAIKKKSAATTIKPAPPQSSSDRTPSAVGSHHIEEEIQPAAPAIPALADLFSFDIKDYLDEETEEDTTSKSLLPLSDDMKKTLEDISHRLEASSLENL

SEQ ID NO: 190189 - protein, 151 aa, Oryza sativa
  Clone ID: PAT_MRT4530_86626C.1.pep
MGVLDSLSDMCSLTETKEALKLRKKRPLQTVNIKVKMDCEGCERRVKNAVKSMRGVTSVAVNPKQSRCTVTGYVEASKVLERVKSTGKAAEMWPYVPYTMTTYPYVGGAYDKKAPAGFVRGNPAAMADPSAPEVRYMTMFSDENVDSCSIM

SEQ ID NO: 190190 - protein, 776 aa, Oryza sativa
  Clone ID: PAT_MRT4530_86627C.1.pep
MAAATYFWSNTINAFLFNQRPMTPTLIDITMITGLDVTSSANPMSMNTKNQFDFRTKSIGGWSGYVAAYMGKVSVTPREHVAFLLMWLEKFLFCGSSCGPTTNWQFVAEALESKKQFPLGKILLGYLYQMLNNTSAKIAVGSVVGAGGPWWLLQTWLNLMVMKVVNRPSMTEAEFPRLEPIVDDDGEERTHCRCMSYGEYASTPANAGAKLSAELLKDWFCSFYEGFQKDARVWFPYEDSEDLELPSDFRFEDINHERYQKSREVFSAAISPCILPVGIHQGRNIQVSYELYHPMSSARQLGVGQLPIGLFFADKIQCRGEISSTLMMDWLLNLQGPPLGSIENIELAGFKSKNFDRWWGEWKLHLFHQSASMYMTDLFPDVIPQTTESSPPHQSNSGKDIQYALGLIPNGGGPSPPVIGYNAPKTSTLLQGLIREPADAGKKRRTRSSAADTLALAPKKKAKLKKPKPTDDLPVLDPSIEQALDEEDIEDDVDQAAAEVSDTEKTPSALPKQIPPTPSAPTHFSRPHHPPSPPVQQSSSDRTPSAMGSHHIKEEIQPTAPAILVLADLFSFDIRDYVDEAEEDTSSKALAPLSDDVKKTLEDISHRLEASSLDSLVVDCGSIRTRLHEVQALLPEELANVLTPAAYLEQHQFKLEKAKQRLAECRERKEIEAIIQLSEGPIKSNIDRLEARKIELLAQLEECNAELDIEHKKLTDLPKSVEEQKARLRSAIKNVVDMTKSLKVIFGTDAQDAQAIEEVEQIRQRAILAIQRYLSP

SEQ ID NO: 190191 - protein, 205 aa, Oryza sativa
  Clone ID: PAT_MRT4530_86628C.1.pep
GRRTRKRDCGGDDRISKTWLKTKSKENPWRGGSDLTLADPPSPYRKPRHRLPTAPTVPDPPTPMRPVAARTGGGMAPRRRRVPTRAAAARGDASAPRAGASSSPPVFPRWPRSRSGGAVIGRREQDGRSGEVEYSPSPAPPLAVASHSNNIIPLADSLRPLLTTPDLALNSNTSLFANVGPSSAADPMPSIAPPPPPRPTLIRKS

SEQ ID NO: 190192 - protein, 626 aa, Oryza sativa
  Clone ID: PAT_MRT4530_86629C.1.pep
MAFQLLPAMIIAASLLHVAAAVGNETSSNNNTSCAPARCGNLTITYPFSLSGVQPLYCGYPVLDLTCDNRTGHAFLSRTFREHLFRIDNIFYENSSLVAAVQTTFAGDADCPIPDFNTTMGAYISDRWNSTPPSGIPGNCISVSLPVRGGDGMKLLDQHYEQLIADTIGGRTIIHGDGGGSIGGNGNGSIQQYERLISDGFVLEWQRAVTRDPDCDACRRNGGECRFQQLMFQCVSCHGLICSNSTSPCDQDDDCVKAFSLLLRELFSCIHPPVDEGCLRKLAWQPMTLSQEDWSNRKLNVRAILIAGVVFMCLVWIMHRRKQTLGFIIHHKYTGNESNTEEELKRYQSLSPKRYRYSDLKKITKCFKEKLGEGGFGTAFKGNLKDGRMVAVKLLKGAKGNGEEFLNEVTSIGRTSHVNIVNLLGFCLERSKRALVYEYMANGSLGKYIYSESLRLAIGLESLQKIAIGVARGLEYLHQGCSTRIIHFDIKPHNVLLDEDLCPKIADFGLAKLCHLKDSAISMAEARGTIGFIAPEVFSRGFGVVSTKSDVYSYGMMLLEMVEGRKNVKTNTDNSSAYFPNWIYDHLAKDLQSHEVTCENEEIARKITLVGLWCIQTAPRKSSFNE

SEQ ID NO: 190193 - protein, 74 aa, Oryza sativa
  Clone ID: PAT_MRT4530_8662C.1.pep
MAACGIKPQRSWWFRFARGGCDGVDRRRRLQQRQWLTESFKGFQSQLKEFFLKKNHKRGTNMFGGVSSRAPQTV

SEQ ID NO: 190194 - protein, 83 aa, Oryza sativa
  Clone ID: PAT_MRT4530_86630C.1.pep
ACKLDQLSEGQIKSNIDRLEAHKIELLAQLEECNAELDIEHKKLADLPKSIEEQKARLKSAIKNVADLTKSLKIIPGTDAQDA

SEQ ID NO: 190195 - protein, 312 aa, Oryza sativa
  Clone ID: PAT_MRT4530_86631C.1.pep
MDRLLNLQGPPLGSIENIELAGFKSKNFDRWWGEWKLHLFHQSASMYMIDLFPDVIPLRKPADAGKKRRTRSSAADTLALASKKKAKLKKPKPTDDLPVLDPSIEQALDEEDIEDDVDQATAELQKKKTAIKKKSAATTIKPAPPPPPPPSPPVQQSSSDRTPSAVGSHHIEEEIQPAAPAIPALADLFSFDIKDYLDEETEEDTTSKSLLPLSDDMKKTLEDISHRLEASSLENLVVNCGPIRTRLHEIQALIPDELADILTPAVYLEQHQFKLEKAKLRLAERRERKDIEATIQANRQLVHEEKSKLDQL

SEQ ID NO: 190196 - protein, 872 aa, Oryza sativa
  unsure (1)..(872): unsure at all Xaa locations
  Clone ID: PAT_MRT4530_86632C.1.pep
MSSSASPSATPLAEYAEHLSNLVAIPSLSHENYYFLGPVGNPDPTEFIIGETNRIPFRLANPDLGHWKNTFKSWPSLEKTPPEKSWITWFKRMSASKRVHWDEIGIGQALDLTIANSPKDETLMAAASYFWSNTINAFLFNQWPMTPTLVDITMITGLDVTSSANPMSLNTKNQYDFRTKSIGSWSGYVAAYMGQGSVTPREHVAFLLMWLEKFLFCRSSCGPTTNWQFVAEALESKRQFPLGKILLGYLYQMMNNASAKIVVGSVVGAGGPWWLLQSWLNLIVMKFVNRPSITEAEFPRLEPIVDDDGEERTHRRCTSYGEYASTPTDAGAKLSAELLKDWFCSLSDGFLKETRIWFLYEDSALLENPSDFRFEDINHERYQKSREVFSAAISPCILPVGIHQGRNIKVSYEFYHPMSSXRQLGMGQLPISLFFADKIQCRGEISXTPMMDRLLNLQGSPLGRAKXFDRWWGEWKLHLLHQSASMYMTDLFPDVIPQTTESSPPHQSNSGRNIKYAPGLIPNGGGPSPPVIGFHAPKTSTLLQGLIREPADAGKKKRTRSSTVDVSAPAPKKKAKLKKPTPTNDLPALEPSIEQALDEEEIGEDVDQATDEPPPPPSPFVQQSPSAVESHHIEEEVQPTAPAIPVLADLFSFDIRDYLNEAEDDTSSKALAPLSNDVKKTLKDISHRVEASSLDNLVVNCGPIRTRLHEIQALIPDELADILTPAVYLEQHQFKLEKAKLRLAERRERKDIKATIQANRQLVHEDKSKLDQLFEGPIKSNIDRLKARKIELLAQLEECNAELDMEHKKLADLPKSVEEQKARLKSAIKNVADLTKSLKIIPGTDAQDAQAIEEVEQIRQRAISAIQHYLSR

SEQ ID NO: 190197 - protein, 140 aa, Oryza sativa
  Clone ID: PAT_MRT4530_86633C.1.pep
LFYSGATSYFITFLQHSGKISSFWFVYSQSVGPGAVLQGPLVNGSSDDVAPKLNCEDESCPMEIFHPPEDCNLNTSLSFTLQICRVEDIVVSGLVQGTVINFNRARNVTVRSSGTISATGLGCRGGIGRGRMLSSGLSGG

SEQ ID NO: 190198 - protein, 119 aa, Oryza sativa
  unsure (1)..(119): unsure at all Xaa locations
  Clone ID: PAT_MRT4530_86634C.1.pep
YARRALSSPSPRAXPSPSPQAAAXGPPPSPLSSPSPQAXPSPSPREEGSKQHSSKQRTPSSCCGGRAGGTGSAGSSPRRWPPPRRRTAGTPPAPSATPSPSSSSPRTTPSPSSPPPPSP

SEQ ID NO: 190199 - protein, 324 aa, Oryza sativa
  Clone ID: PAT_MRT4530_86635C.1.pep
MHFRKLSNNDWKVIEQRIERKLSSWKGDDHKKKYRLTRWDIICQPKDQGGLGVHNLELQNKCLLSKWLYKLINEKGVWQNLLKRKYLYNKSITQVDKKQGDSLFWSGLMKVKSTFLDIGSWIVNDGEQIRFWEDKWLGNLAFKDKFPSLYAIVRSKSSTIATVMGSVPLNVSFRRALVGQNLVYWHELCASIVHIQLNPSSDCFRWNYHQNDRFSVRSMYLALINNGYIERNKYTWKFKMPLKIKIFMWYLLKGVVLTKDNLARRNWNGSLRCCFCMKNETIQHLFIDCHGVVVVADGRWRRRAEGVLRGVRRRGGAAVRGAHG

SEQ ID NO: 190200 - protein, 148 aa, Oryza sativa
  unsure (1)..(148): unsure at all Xaa locations
  Clone ID: PAT_MRT4530_86636C.1.pep
TKIPLHLSTEKVRITPPPXNYHGRPNYPPEPQNRTFFTPNYTNRTNYPPRPNPRWFWTTWRTRGSPSYLSHTHSLSPLGNGGGSERREARRGERRRRGSGGAPPLPPLSPPLPLRLPPSSEPSACRRRCHRRRTQPPSALAPRPPPAA

SEQ ID NO: 190201 - protein, 181 aa, Oryza sativa
  unsure (1)..(181): unsure at all Xaa locations
  Clone ID: PAT_MRT4530_86637C.1.pep
MSSLPISSSIPLDRSPTNAQNMDASATKKAAASDEAENTPAAATAAAEVVTGVDCADDAAVAATTVDGDGGDEKQQQPSVKLPMPQEYVDYILAWKKRPFPLPDDGEMLSPEHRKMREEMAATCNELGDSFEEFQAEVRREVEEXAEIQAQLKEGWAKIDWGDIVFADWEDFDDPNCYRSL

SEQ ID NO: 190202 - protein, 52 aa, Oryza sativa
  Clone ID: PAT_MRT4530_86638C.1.pep
SREAERYMLPKGTIEAIDKRRHAFLWSGEDSCHGSKCLVAWDLVGFFHKIPH

SEQ ID NO: 190203 - protein, 61 aa, Oryza sativa
  Clone ID: PAT_MRT4530_86639C.1.pep
SLVFGCVAFGGKYVVSLFNVGAGGVFCLGLCFVPSKKKKMKKKKKKKKKKKKPPIFYNPPK

SEQ ID NO: 190204 - protein, 87 aa, Oryza sativa
  Clone ID: PAT_MRT4530_8663C.1.pep
AASKDAIISKEFQGSSGRAYLFDHVVNICLGPNEDRYLITGLHTVNDIYCSCCQQILGWRYEKAYDQSQKYKEGKFILERARMWKDS

SEQ ID NO: 190205 - protein, 204 aa, Oryza sativa
  unsure (1)..(204): unsure at all Xaa locations
  Clone ID: PAT_MRT4530_86640C.1.pep
MRILVGWGWGIEKGTPSFSIGQRQPPPTRQQQQQQRWRQRQLKPPPEWTVHADDAAAAATTVDGDGGDENSKQQQQPSVNKLHMPQEYVDYILAWKKRPFPLPDDGEILSPEHREMRERMAATCNELGDGFEEFQAEVRREVEEKGFYEVDESYFANQAEIQAQLKXWAKIDWGDIVFADWDDFDDPNCCRSLYSHNPQPSVRA

SEQ ID NO: 190206 - protein, 215 aa, Oryza sativa
  Clone ID: PAT_MRT4530_86641C.1.pep
MASMRTAAAAAMLACIAVVLASTAADGALLPWFGGGGARDEAVPELGLLAAADPFRILEHVPFGFDRDDVAMLSMARVDWRETGDAHEVVVDVPGMRKEDLRVEVEDNRVLRISGERRREETTEQKGGGDHWHREERSYGRFWRQLRLPDNADLDSIAASLDNGVLTVRFRKLAPDQIKGPRVVGIASAGGDDGGKKSIGGAGEGQNQQAKKVEL

SEQ ID NO: 190207 - protein, 99 aa, Oryza sativa
  Clone ID: PAT_MRT4530_86642C.1.pep
MNFRLPSDIAAAASACACLSARSPAVASECWLAALRDRPRLPAIAPCIGRCITRAVAANIDGKAKQLLHLLAGSRRKNGVSLEDNPAGGLILESFRSWF

SEQ ID NO: 190208 - protein, 283 aa, Oryza sativa
  Clone ID: PAT_MRT4530_86644C.1.pep
MGTPQDRAPTPDENDQALHFLRHHLYATLKNEYMGLRSPITLWTALKKRFEKLKYTILPQAEQDWARLRFADFKSVAEYNSALHQICTNLSLCGKVVTDEEMIEKTLSTFHPSAMQSARNYRQASYKEYDEMIDIMQVSESHEEVLRKNFVSQPPGKSVGLEVNASSYKVRKPVQRKRGKCGEKKATEKSEGKAPPTQGAQGGKGKKEAKPPRNDKPYGQQDQTCYKCGIWGHWSCICEEPPHVVDAYQASRKAKASTEAHMVDAHTTATPQPLLHLTPLQLQ

SEQ ID NO: 190209 - protein, 66 aa, Oryza sativa
  Clone ID: PAT_MRT4530_86645C.1.pep
LLYVYVCHKSIPIQTHTILSVGMHQVYNVVVSINTTYGWKVHPPHSLSLRLSMSKRSRMPTCFSSS

SEQ ID NO: 190210 - protein, 33 aa, Oryza sativa
  Clone ID: PAT_MRT4530_86646C.1.pep
IQLFSTLNSREVHFPCYSHYPYLHSISIQQVEG

SEQ ID NO: 190211 - protein, 49 aa, Oryza sativa
  Clone ID: PAT_MRT4530_86647C.1.pep
YTITILLPPSHNIRDFEFLLAPFDHSSYLKNLCKYKKRKVVLKVLWIIK

SEQ ID NO: 190212 - protein, 429 aa, Oryza sativa
  Clone ID: PAT_MRT4530_86648C.1.pep
MSTSRQSIDINGHRRQPILLDTNVLITDAMNDDTVATLTSSRGHTIKVSSWISQPPAISYLSFHCHYSSHPRYNNFDELDAKIVGAEGSFILLTALASPRGSERYDYLMYKLHGYGDNGESWSSSLEQVPLPHVYPLPVIEEFGIVPNGGKHFDLAALVVDYRSPMKCSYSMHIYSSKDTNWRVIPMVDPYPEVRKVIATKVITIAEGVLGWVDLDHGVMVCDLREDVPGLRYVPLPAPLPQNWYRLKEFLPGTLAKSFRDLVCVDGVMSFVEMEHRVIVTTEKPSDPSKMQVLYDTDLIVSYNLKDLNKKPQQLQRKDGWRIVSWSRHVSSNCWEKGCEVDAVDISGLSPNLAENLASPTLGVDDGDVVYMRSKASLGKGKMVAIDLRRKKVKAIGPYSFEKHDPFSLKAFSTCLLPPDDWRKRSKYK

SEQ ID NO: 190213 - protein, 161 aa, Oryza sativa
  Clone ID: PAT_MRT4530_86649C.1.pep
MSYYVSHHGSRDSPDRVSDSMDLRSCETGQVLKWRDGWILGFVNRPGRQGKPTRPHASRDGKPATGRSKGQPQPERRGQTTHAATNENRAACRGKLRMTRQSLASRISRAAVRPRLMRSVFIPPGTRQHQQSVTSDQEGRHCREKALASSEPPVLMALVHD

SEQ ID NO: 190214 - protein, 562 aa, Oryza sativa
  Clone ID: PAT_MRT4530_8664C.1.pep
MASAASSLPLLVSSLLLALFALGAHADVKRYQFDIVMSNVSRLCHEKAMVTVNGSYPGPTIYAREGDRVIVNVTNHVKHNMTIHWHGLKQRRNGWADGPAYVTQCPIGSGGSYVYDFNVTRQRGTLWWHAHIAWMRATVHGAIVILPAAGVPYPFPKPDDEAEIVLGEWWHADVETVERQGSMLGMAPNMSDAHTINGKPGPLVPFCSEKHTYALQVQSGKTYLLRIINAAVNDELFFSIAGHNMTVVEIDATYTKPFAASTVQLSPGQTMNVLVSADQSPGRYFMVAKPFNDVPIPADNKTATAILQYAGVPTSVVPALPQTMPATNSTGSVAAFHDKLRSLNSPRYPADVPLAVDRHLLYTIGLNIDPCETCLNRSRLAASLNNITFVMPRTALLQAHYYGQKGVFAADFPDRPPARFNYTGVPLTAGLGTSLGTRLSKIAYNATVELVLQDTNLLSVESHPFHLHGYNFFVVGRGVGNFDPAKDPAKYNLVDPPERNTVGVPAGGWTAIRFRADNPGVWFLHCHLEVHTSWGLKMAFLVEDGSGPDESVLPPPKDLPKC

SEQ ID NO: 190215 - protein, 130 aa, Oryza sativa
  Clone ID: PAT_MRT4530_86650C.1.pep
MMSMPSRSLQDLEDASRTEQQWQQILPHEQQRGEGLAEGCAHTVKHEPEILGGGGGGREEEPALGKKGGGASGREDICTCTGEKRRRRRWIRLKAAAPTDAVRGGGGAGVRGERRRRSLREEDEALAAQP

SEQ ID NO: 190216 - protein, 664 aa, Oryza sativa
  Clone ID: PAT_MRT4530_86651C.1.pep
MESVAAAARSLRAGVEKSRALGQALARAGPRVEEIQLALPALEAAVRPIRAPRAELAAAGPHIDRAVGPAAAVLKVFDAVHGLEPPLLAAGAVAGDLAGYLAVLGRLEEALRFLSDNSGLAAQWLADIVEYLGDHDLADPRFLADLAVTLEGLKKPSGDLDGGLLAAALDMLEAEFRRLLADHSAPLPLAMQQLNTTSASTAAPSLIPAATVHKLSLILDRLIANGRQDRCLSVYADARGGVVSASLRALGLDYLRNPVDVAQALGPGVELWGRHLEFVVRCLLESERQLCNKVFGQRKDDASACFADVAAHAGILDFLSFGRAAADAKKDPIKLLRLLEVFDSLNKLRLDFNRLFGGKKACVEIQNQTRDLVKLLVDGAVEIFEELLVQVELQRHMPPPPDGGVPRLVSFVVEYCNRLLSEKYRPVLAQVLTIHRSWRKETFSDKMLVNAVLNIVKALEANFDVWSKAYDNVTLSYLFMMNTHWHFFKNLKATRLGELLGDAWLQEHEQFKDYYLTVFMRDSWGVVSPLLNREGLILFSKGRATAKDLVKQRLKTFNASFDEMFRKQSAWVIPEKDLREKTCGLVVQAIVPAYRSYMQNYGPLVEQDVSASKYVKYTVDGLEKMLSALFIPRPRRAGSFQIRHTNDKITSAMTGFYRSASTVK

SEQ ID NO: 190217 - protein, 69 aa, Oryza sativa
  Clone ID: PAT_MRT4530_86652C.1.pep
KWLQGGPTKPKQNSPDYVLLLEAQNFGTAGWCPTQGMGNHHKGKYGIFLTNQGKNIFKPHNRGFGKITL

SEQ ID NO: 190218 - protein, 64 aa, Oryza sativa
  Clone ID: PAT_MRT4530_86653C.1.pep
MGARWMMRFGARTAASEEEIGAVDVRKIYARALSFEKGGMPFTVFDFSTRETKAEEVETLGLSF

SEQ ID NO: 190219 - protein, 77 aa, Oryza sativa
  Clone ID: PAT_MRT4530_86654C.1.pep
GKTLAGNSEKRFYNKRNRTRSKSLFHGWPCIIKYRALKKNNHRGPSAPQTEAIIIPQDEKKYNGTQDLLNREMEKPP

SEQ ID NO: 190220 - protein, 78 aa, Oryza sativa
  Clone ID: PAT_MRT4530_86655C.1.pep
LNLAAKKQHIPRANSGTQKIYSKFYPPLHHKQTHLALFKPKTAESSATLTTQTHRHVSLITQAPKFIPNYTQSNTHTT

SEQ ID NO: 190221 - protein, 34 aa, Oryza sativa
  Clone ID: PAT_MRT4530_86656C.1.pep
MASRTPHPWSPGSYLLEARGHESTEAHNDNIDNR

SEQ ID NO: 190222 - protein, 68 aa, Oryza sativa
  Clone ID: PAT_MRT4530_86657C.1.pep
MKVTFDGSYKIPSSVSHPAMTRHRSVTGLNSDPSQVTYVISDHWSVTTRFIRHRVYLTTKMDMDPTQI

SEQ ID NO: 190223 - protein, 186 aa, Oryza sativa
  unsure (1)..(186): unsure at all Xaa locations
  Clone ID: PAT_MRT4530_86658C.1.pep
KSIKHPINAPKTSRGTPTNAPKYIILFAKTTFIDVTIATTDASIAHIMDEQEDIEIKCWNPIRPPAALLISNGRQICIRAPFSARAYFMESYRSPLSNGSSLIAKFHHSEPQLIDQGAAPPVMGLWACSFIWDPGPSGAXWGAPQPGIRLICTGRINNPRRGVSTAKVQHNVSYLQLTERSGQQQP

SEQ ID NO: 190224 - protein, 117 aa, Oryza sativa
  Clone ID: PAT_MRT4530_86659C.1.pep
NPKGLEYYNNLIDELIMHGIQPHVTIYHFDLPQALQDEEDYSAYAEVCFKNFGDRVKHWATFNQPNIEPIGGFDAGDRPPRRCSYPFGTNCTGGDSSTEPYIVAHHLLLAHASAVSI

SEQ ID NO: 190225 - protein, 140 aa, Oryza sativa
  Clone ID: PAT_MRT4530_8665C.1.pep
MGLSHARSGKRCNDFKVGGELSCRGQKATFEPRGGGSGVRTLRSDPGPETSRAKQTTSSGSATEMASHGEPSLALANSTLRSWSDRPALPDPATESGMWPDLSRAHSARNGEVGLKSRRSIRYLRKEETSTHRVPSPSSS

SEQ ID NO: 190226 - protein, 99 aa, Oryza sativa
  Clone ID: PAT_MRT4530_86660C.1.pep
SCAGYERHDAVHELLGLVAPRIAKEEDVPLSLRIVPRRAPAPRAGGHGAVVRAVPRHQPVLLRGYVDRLVGLAVYCRAPDQERVEHDRPSILRLCSRMP

SEQ ID NO: 190227 - protein, 120 aa, Oryza sativa
  Clone ID: PAT_MRT4530_86661C.1.pep
ILTKYKLIIYLEAGGNLPCATGNMPLNFVSPIYGTISKSYAKTCCGHWPCCTEERNDDLCPHPVLDKLNDILCSSLMMVVAHHKFLFVSTYVLPLKEAGVSVLEDLCLKPRYFLLNIREM

SEQ ID NO: 190228 - protein, 510 aa, Oryza sativa
  Clone ID: PAT_MRT4530_86662C.1.pep
DAWAAGARALVPSPFIVVVFLLLAAAARDASALTRHDFPEGFVFGAGTSAFQVEGAAAEDGRKPSIWDTFTHQGYSPGGAIADVSADQYHHYKEDVKLMYDMGLDAYRFSIAWPRLIPDGRGEINPKGLEYYNNLIDELIMHGIQPHVTIYHFDLPQALQDEYGGILSPRFIEDYTAYAEVCFKNFGDRGKHWVTVNEPNIEPIGGYDAGVQPPRRCSYPFGTNCTGGDSSTEPYIVAHHLLLAHASAVSIYRQKYQAIQGGQIGITLLGWWYEPYTDAVADAAAAIRMNEFHIGWFMNPLVHGDYPPVMRSRVGARLPSITASDSEKIRGSFDFIGINHYFVIFVQSSDANHDQKLRDYYVDAGVQENGGGGFDKEHYQLHPWALGKMLHHLKLKYGNPPVMIHENGDADSPETPGKIDYDDDFRSDFLQSYLEVLHLSIRNGSNTRGYFVWSLLDGFEFLSGYGNRFGLCCVDFTAPARTRYVRSSARWYSDFLNGGELRPVKPFVAL

SEQ ID NO: 190229 - protein, 272 aa, Oryza sativa
  unsure (1)..(272): unsure at all Xaa locations
  Clone ID: PAT_MRT4530_86663C.1.pep
QRREAAPRPHDQRIPNPHQPAPPPDPPPPQSPPPPPPPPPSPPSXPPNPTRRPGPPKPRQQRPRRRERGGPRRHRRRPLDPELLAVVEVVRDPPPPTGGLAPAPSLLPPAAVPTAXPPPPPPPSPPPPQSLPPFPPPTRPPPSLARVAGPEAASSLRPCPAGSPPRRRRHCAVAASANRRPASTPSGAPLLPPPPHHRPPPSPRRPPPXIRPPSPCPSPPAGESWSSPPPPPHPHPPPPPLGLTSETTVADGNLGWRWIWRLCWRQRLEAGA

SEQ ID NO: 190230 - protein, 55 aa, Oryza sativa
  Clone ID: PAT_MRT4530_86664C.1.pep
YTTTISLSKEFFILVQAYSKELFILVRRHRGFLKPSVINETFATQQYYCQLRNCF

SEQ ID NO: 190231 - protein, 769 aa, Oryza sativa
  unsure (1)..(769): unsure at all Xaa locations
  Clone ID: PAT_MRT4530_86665C.1.pep
MADNRDPVWEHGESIGNGFHCKYCHQQKSGGRATRLKIHLAGKGKGTTYCNSVPPDVRDLFKRELDRIKAAGARRKSEKSTRVEAARVIYHDLTGDADEEEQMEQAMEASRREQDFRRDVEERGGTYEHGDGSGSAQPEARRGKSNPIANLLRRATSQRESPFLRDYNLAVAKAPVQTRIETGFFTKKGKQAREAIGESRARFFFTSGIAARNADNPYFVSVVRETQKWGENIPSPSSREIDGKYLDSTEKDVKKQFERFKHDWDDYGVTLMCDSWTRPTGMAIINFLIYCNGIMFFHKSIDATGQSQDAQFVLKEIRKVVCKVGHQHVMQIITNNGSNYKKACKLLMQEYRAIMWQPCVAHTINLMLKEVGKMADHDMVIASGRKICRWLYNHSKLHSMMVSAIGGELVKWNATRFGTNCMFLQSFLXRKRYQFMQWMASSTFMQXDKYNAYMDIVDRRMHDLTTKTLINATQWWSMFASDTPNLKKLALHLVGQCCSSNGCERNWSTFAFIHTKLRNKLTHKKLNKLVYVNYNLQLRIQQANAQIRKEDDDPLQRLADLSFYDMNNQIKDWMDNAWSNACPELDEDSTESDAPVPSPLVADLVDLTDICRATGASSVAEWAEKNVGDNHIGKRKTRQRPKAPAAKKTKGKATTTRLRSVDSDADAEGSPEYQESDDSSSRWIQMMEMTVVKEAKEAKAPLMCLLGVTHLSEADFTHATQDQDDGAPTSQRTTINPIGRQQQQQFDTPQDSYSSFSASSIESGYQTYV

SEQ ID NO: 190232 - protein, 118 aa, Oryza sativa
  Clone ID: PAT_MRT4530_86666C.1.pep
FTIIRIVAKMSHWGHRPARAKHHRVPSLIPEDFAVVDFKEETIVSRGENTTGRQPLREEPQKMTVMEESHNIHNQAKHQCSKELSDEEDSEKGESSGQKNGDDKKDSKKHGSNGEKRV

SEQ ID NO: 190233 - protein, 71 aa, Oryza sativa
  Clone ID: PAT_MRT4530_86667C.1.pep
GQPHKLIILGRIKLVDSDRIPFLTCAMAPPVWWVGIRMSKANGWSFSRFWRSRPPKGRPARRKTQFFKKPQ

SEQ ID NO: 190234 - protein, 142 aa, Oryza sativa
  Clone ID: PAT_MRT4530_86668C.1.pep
PYISCVHTYDSCRYVEVNESTGVRLFYYFVQSEKDPDVDPLLLWLSGGPGCSSLSGLTHEIVQFAAKRYYSGGLPKIIYQPETWTKVSNIIFVDSPVGAGFSYAATQEGSKTSDTKTVKQLVIFLRKQFRYHFKFNNTKTYK

SEQ ID NO: 190235 - protein, 190 aa, Oryza sativa
  Clone ID: PAT_MRT4530_86669C.1.pep
LLASEALQAICAAGPTPPSRAARAQAASPRRRSGPAPRRPAPGLLRRRRAPHRLAAPPVQLAPRRAAAVTAYCTVRQAQHTTASLDTCEHSPPLLAPESWPARGAGERIMVAFCSPKSRNMVNAIKGLFISCDVPMAQFIVNLNASMPASDKFILHMLDPTHMFVQPHVAEMIRGKISEFRDQNSYEKPT

SEQ ID NO: 190236 - protein, 69 aa, Oryza sativa
  unsure (1)..(69): unsure at all Xaa locations
  Clone ID: PAT_MRT4530_8666C.1.pep
GRRSTQRPGTARPPPPRPPPSPATTRRGTTRTRRRIXPRRGAAAPPPQGGRLAGSGGGGRPRMRRRGGA

SEQ ID NO: 190237 - protein, 62 aa, Oryza sativa
  Clone ID: PAT_MRT4530_86670C.1.pep
MTERGAPHRETAQAPLCRFGRGLREWPDPPRGDQEVGAHITLGPDVPRGCQATWAIVSASSL

SEQ ID NO: 190238 - protein, 125 aa, Oryza sativa
  Clone ID: PAT_MRT4530_86671C.1.pep
MGYSKLNILLQVLTLVSILLRSLRRRDESWPAISIGRAEQGRGSWWHSVLQRAENMVNAIKGLFISCDVPMAQLIVNLNASMPASDKFILHMLDPTHMFVQPHVAEMIRSKISEFRDQNSYEKPT

SEQ ID NO: 190239 - protein, 516 aa, Oryza sativa
  Clone ID: PAT_MRT4530_86672C.1.pep
PGNRLEPSTRTGVAAPDQPPAPPIADAADAGAAAMAPFRRWADLPPDLLCRVGDRLDLKCYASARGACTAWRSALSPASPALLVLSDARMCPSAASLPTRRCFDLAAILTGGRCVGSSNGWLVLSIALYGGQSAFVLFNPITTTEIVLPPLIYESRWVSKVVFAPSPAKDDYAAAAICDIDRIAYVTAGARRWAVLDPVRLVTGDQLTDVVYHDKGKVYCLTRCGDVHLLRLPERRRRKPADEPGPSEQPPEAPVVPLPECAVAIRARRTQLHHNFRMVCYDHLGPRDQMMPMKLTVCSETLIPFNYRRFAIGPLEPDLNAPATVEPLLPEGNLPFDPATSFAPPYNTVSAFTNAKNIVLCEGNLYQIWRNASCTVTLQLPGGGHRRVSENEILVLRYYPRRQPCWDAVTDLGGYSVFVGRNNAVSMYAEGVHGLKGNCVYWIGGRGRDQGMVFDMETGRSTPCYPLVGGMPGPLQSTICWFFLSDIVNASNNSGGRRVYQTRSRSRAERAQDMEE

SEQ ID NO: 190240 - protein, 56 aa, Oryza sativa
  Clone ID: PAT_MRT4530_86673C.1.pep
RFNTGREGSTLAAYTSMISALTALIALSASAHTANTTMHHQPPPVDRGTMHPPCST

SEQ ID NO: 190241 - protein, 60 aa, Oryza sativa
  Clone ID: PAT_MRT4530_86674C.1.pep
GHRVVELSQGPAVNGKQNFPLSVVKRKTPLAADCLIVYPRGLAGFLIQKAPQVSPLETWQ

SEQ ID NO: 190242 - protein, 158 aa, Oryza sativa
  Clone ID: PAT_MRT4530_86675C.1.pep
LILPPGGSPFFFLLARFFSPPRRGGGRAFPGPKRSKTSVVLPILPLQLGNNEKAPRNLGGRFLLPVKIVKPCNGFCKKVVVPCVLFGQIFSLGFDGTFYSFHPNPQFILGWGFCAPFNPLPLCQMDGHFEDGGINLPAVMLKMETLMAGVGFCLMFFL

SEQ ID NO: 190243 - protein, 52 aa, Oryza sativa
  Clone ID: PAT_MRT4530_86676C.1.pep
SMDAHKAVPILSYNDYGYGQCQAVEIILCCVPLNCRIIVCNNFDILSWSKTS

SEQ ID NO: 190244 - protein, 500 aa, Oryza sativa
  Clone ID: PAT_MRT4530_86678C.1.pep
MSLSSLSRALARSARSSRQRQGSLLGGHGGLRASSPPLPCGELGFLRSYVTSVIGNRAAVASGAGKGGDWRFLLASRQFRRLFSDKSKKNHGKHSEEENKGKGDESDKSDSKMLACSGDQWNFEESIKQFKDMIAPLFLFGLLLLSASASSSEQEISFQEFKNKLLEPGLVDHIVVSNKSIAKVYVRSSPSIDRIQDSDIHITTSHLPGIESPSSYKYYFNIGSVDSFEEKLQEAQKALEIDPHYYVPITYTTEAKWFEEVMKYVPTVLIIGLIYLLGKRIQNGFTVGGGPGKGGRSIFSIGKVQVTKLDKNSKNKVFFKDVAGCDEAKQEIMEFVHFLKNPKKYEELGAKIPKGALLVGPPGTGKTLLAKATAGESGVPFLSISGSDFMEMFVGVGPSRVRNLFQEARQCSPSIVFIDEIDAIGRARGRGGFSGGHDERESTLNQLLVEMDGFGTTSGVVVLAGTNRPDILDKALLRPGRFDRQISIENTQACMPAGRL

SEQ ID NO: 190245 - protein, 84 aa, Oryza sativa
  Clone ID: PAT_MRT4530_86679C.1.pep
TEGRYGVPAACFRRRRNNSRRLHQVLVDPLHVAEQPFPLLMRSVSWRVHRHCIVRINRRNSVVGLGRSPGGHRTHAHSDSQEGR

SEQ ID NO: 190246 - protein, 83 aa, Oryza sativa
  unsure (1)..(83): unsure at all Xaa locations
  Clone ID: PAT_MRT4530_8667C.1.pep
MSFVISLTLLILIKGALIGNNLICSWFGMVHSWFGDRTVQPGWLFRMVGPVQQGMLCSVGLILFXYLTVLLNSQMFVKCCLCK

SEQ ID NO: 190247 - protein, 135 aa, Oryza sativa
  Clone ID: PAT_MRT4530_86680C.1.pep
MGHRDLLAWYAIRGMYSDVLALAVTMVLDHEDFTGVRVKSGTLFDNILITDDPEYAKKFAEETWAKHKDAEKTAFDEAEKRRLEEDDEDEADDDKADVVAEQTKDSDDDKPQDIKVSADEKPNSSKYDSSLCEEG

SEQ ID NO: 190248 - protein, 47 aa, Oryza sativa
  Clone ID: PAT_MRT4530_86681C.1.pep
QKLLVVASHFIALISAGFMKTDSHYTCILIFPTNTNPIFHESLYRSN

SEQ ID NO: 190249 - protein, 67 aa, Oryza sativa
  Clone ID: PAT_MRT4530_86682C.1.pep
PPRQIGWKSFKLPLDSPRFCPPKKGGGGPSNFESPGKNGWASPHTPVGAGPPLFAAPGGMASPKKTG

SEQ ID NO: 190250 - protein, 114 aa, Oryza sativa
  unsure (1)..(114): unsure at all Xaa locations
  Clone ID: PAT_MRT4530_86683C.1.pep
MSFPRKWVKTCGGPFLMEGTLNDALMGRVIPTSTPPVTEAXGARPPVQSDMTGNRPLXALRIDGCSAWAPFLLAPPATWQLGEGLGARQRESPRGTTWHPEAPPAASVTREARE

SEQ ID NO: 190251 - protein, 75 aa, Oryza sativa
  Clone ID: PAT_MRT4530_86684C.1.pep
VSKDLAAYDIVTFLAYTKLSSGDFEVLARFHAIGAEEDEWINVRRLSTCILPLDHQLKLYGRTVLSGRCKMVVHV

SEQ ID NO: 190252 - protein, 32 aa, Oryza sativa
  Clone ID: PAT_MRT4530_86685C.1.pep
MCRLRPLTTRVNTQDDPITMIAPVGILFFFSA

SEQ ID NO: 190253 - protein, 285 aa, Oryza sativa
  Clone ID: PAT_MRT4530_86686C.1.pep
MELTGWHLPEPPSSTVRSVIDGGGAHHPRLISSQVGQPARPTSPSPLPPRHRHRHIPKAEAVQGERQSPRHGSMELSASALGFGLCLDPHPVGGLRRRLRRGGGRHTSRSDCRRRLGYVPRPAHFPVSGVGGGLRGFLHRAPPGSARNDKGCARRHKTASSSATSAEPMDEGEADLLQFLFVTSGVSWGGIVGVVVAVNASVPAARVWMLPGVTTLDRELGGDDCSMCQYDKDAGAVVRTLSCDHVFHKACIDVWLREHGMACRLCRRTASCVLPWKTGGRRRHG

SEQ ID NO: 190254 - protein, 109 aa, Oryza sativa
  Clone ID: PAT_MRT4530_86687C.1.pep
QPCSWSSNPRPTMKMLSSLGVLEEGDATRALASNHQWSSENEMIATARRTSSNSTVAKHCAAAKLSSLLPCIPDDERKKKKKKNHEIEEKEEEEEAYWTWHLCISHLCT

SEQ ID NO: 190255 - protein, 103 aa, Oryza sativa
  unsure (1)..(103): unsure at all Xaa locations
  Clone ID: PAT_MRT4530_86688C.1.pep
QEDSNQCNQSSKRLTGPTGRTYKPTNRTDFCYESRARTDTYELRGNQTPTPKEISELYIEKEDLTKKNIHKXPIKNALRGQKKIKTISPTPIKNSEELTKKKK

SEQ ID NO: 190256 - protein, 98 aa, Oryza sativa
  Clone ID: PAT_MRT4530_86689C.1.pep
CLPCARRKAVIQTVMHSMAQEGRAAQLRGFEHVSAITLVPEPFTVENELLTPTFKLKRPQAKVAYQALIDNMYENISSGSSSAGVGAGGAGSMAGRVQ

SEQ ID NO: 190257 - protein, 91 aa, Oryza sativa
  Clone ID: PAT_MRT4530_8668C.1.pep
AFTALGISVFFELVNLADATTVGISFLLGFLTGYGVIVVWLETVDSAIVGLFVSTCEEPHRLKHKIPKLWNALHERYASKCSNLFSHSEPV

SEQ ID NO: 190258 - protein, 140 aa, Oryza sativa
  Clone ID: PAT_MRT4530_86690C.1.pep
MSYIRKSSNESSCATHSIQQNRDHFDVKPTSTLRVARTSRDSSGDNKGEWKTVGAGEGANGGEAGEPVVGDSKLLGLIVAGTTQIRCRRTLALAAIWIETASSVRLSDCLLEYHGDRLAFLMPSLPTKLLYCLYRQNLAF

SEQ ID NO: 190259 - protein, 257 aa, Oryza sativa
  unsure (1)..(257): unsure at all Xaa locations
  Clone ID: PAT_MRT4530_86691C.1.pep
NNERXQPPRARHEEQRNKNQTPWGAAGKKGKKRRKEERKTKHYTPTPDETDTHARPPGTTARNRTRRQQTSTDPKAAPDPDHSKTQPQTQEKKAGSERPRTTPHNTHTSAPAAHESERETEIPSRDKGRRRGHQKEQEETNQRGREKQAHRARRPPPQKKRTRNHTKEPKATRRQESAKQTRQHSRRTELNERTPEGDATTGGPAEQKGARPHAADDCHSTSRRHQQRRRRARQRQTCRQQTEYTTAPKDTTRSRDT

SEQ ID NO: 190260 - protein, 88 aa, Oryza sativa
  unsure (1)..(88): unsure at all Xaa locations
  Clone ID: PAT_MRT4530_86692C.1.pep
LVLLVAAEVDXVPLDGGQPXATCCDCTSEQGSAYENNLLNLALTLRDGAYYQGMLFYTGSNGAGPNTDYGLLLCRGDXXRAGCYDCST

SEQ ID NO: 190261 - protein, 157 aa, Oryza sativa
  Clone ID: PAT_MRT4530_86693C.1.pep
MVRVSFYRNYGKTFKKPRRPYEKERPDAELKLYGEYGLRSKCELWRVQELLTLDEKNPRRIFEGEALLRHMNRYGLLGEGQNKLDYVLALTVENFLQCRLQTIVFKNGTVKSIHHDHVLIRQHHISPLAVSLEGSKRKNQKEASGGDGDGDGDEEEE

SEQ ID NO: 190262 - protein, 85 aa, Oryza sativa
  Clone ID: PAT_MRT4530_86694C.1.pep
MGVIAWGGHPPISRPPHRWASSHAQLEKLAKALMRRGTHPDCQGRIQHGGGGLLSLHYCREDYESPHEDLPLLTSDGGVGYGSKE

SEQ ID NO: 190263 - protein, 65 aa, Oryza sativa
  Clone ID: PAT_MRT4530_86695C.1.pep
IYSLIIRKVLHQEDRKEGNLYWGMYSRRFYVQFVFVHSSHHLKNVHFGTALGQMNKNKSPHVIHF

SEQ ID NO: 190264 - protein, 195 aa, Oryza sativa
  unsure (1)..(195): unsure at all Xaa locations
  Clone ID: PAT_MRT4530_86696C.1.pep
MVRVSFYRNYGKTFKKPRRPYEKERPDAELKLYGEYGLRSKCELWRVQXALSPIRNAARELLTLDEKNPRRIFEGEALLRHMNRYGLLGEGQNKLDYVLALTVENFLQCRLQTIVFKNGTVKSIHHDHVLIRQHHIRVGRQLVNIPLFMVRLDXEKHIDFSLTSPLAVSLEGSKRKNQKEASGGDGDGDGDEEEE

SEQ ID NO: 190265 - protein, 33 aa, Oryza sativa
  Clone ID: PAT_MRT4530_86697C.1.pep
SYGFTSDPLGACRPGRYTVTRCIIYGPCTGYTN

SEQ ID NO: 190266 - protein, 76 aa, Oryza sativa
  Clone ID: PAT_MRT4530_86698C.1.pep
ATLMLFAGSSGWRRRRTGSRRGAECWRRADSGLQTGEPPRVHARPDPLASAPSATSWASARPRPPGHRRSGPDHRL

SEQ ID NO: 190267 - protein, 91 aa, Oryza sativa
  Clone ID: PAT_MRT4530_86699C.1.pep
VGRGRWCFARRDTGCFSTLLTSRSPTATRLYRLTTTHQRHTRNWRLTAPTHQTARTGPTHARPLLTTPLRGYIGRTHGTDLLLTATRRTHY

SEQ ID NO: 190268 - protein, 254 aa, Oryza sativa
  Clone ID: PAT_MRT4530_8669C.1.pep
MAMATAALARAMRGGSGAGAGLAAGELLSKAPATRTSSLPAMADDDIGCCCCYSCRHYIAPLLPAPSLPLPVATISCLPLVKVTWNQKIRRPSGILSKACGLDVILSKAHGWDGLLSNFSVRGIGRIVSASSVQKVASRGCSNGGGRCAKVADLAEMNGRINMVEFELKREVQLMKFAVEKQRAMARVEMMEAEANRMQFRFRLMCGLVWGGSLVYIASHRGNEGDIIEEMERDRRVLMLLLMPYAFSGFLIDP

SEQ ID NO: 190269 - protein, 68 aa, Oryza sativa
  Clone ID: PAT_MRT4530_866C.1.pep
IHNIAGVDSIMLNKTILRQQPNHTLSFFAAHFFNHLLGKQLLFSIHTTLRKGSKLFIQNIFFGGPIRH

SEQ ID NO: 190270 - protein, 101 aa, Oryza sativa
  unsure (1)..(101): unsure at all Xaa locations
  Clone ID: PAT_MRT4530_86700C.1.pep
GFNRSRQRFHYLSNHLDLMTSDLQAMYALTIRTEHLFYYIIIGRLVSTGLYYCFILLSSADCLYIIIFSSIRXGHIADCLXNPINIGWYQHRLELLHRLIS

SEQ ID NO: 190271 - protein, 392 aa, Oryza sativa
  Clone ID: PAT_MRT4530_86701C.1.pep
MGVSASCLWGGSESRGNQNGSAAVTSPRSGQVISRAGSNVRVFSLKELKLATRNFHMMNCVGRGGFGAVYKGNLKDGTQIAIKKLSAESKQGANEFLTEINVISNVRHPNLVKLIGCCVEGTNRLLVYEYAENNSLAHALLGPRSRCIPLNWQKRAAICIGTASGLAFLHEEAQPRIVHRDIKASNILLDKKLLPKIGDFGLAKLFPDTITHISTRVAGTMGYLAPEYALLGQLTKKADIYSFGVLVLEVISGESSSKSTWGQDMNVLVEWTWKLREQGRLLEIVDPELEEYPEEEMLRFIKVALVCTQATSQQRPSMKQVVDMLSNPTEISLENLVAPGVLKEPRHHSSSSGLTPDTTSNRSTKANPADSYSTQTRDMNSYQLSTIEVSPR

SEQ ID NO: 190272 - protein, 88 aa, Oryza sativa
  Clone ID: PAT_MRT4530_86702C.1.pep
GFHSVALSRPPSRGLHRPSRWHSPILVLSCCLLQSGCSPFVMLGTPGPLYFSCSLVSPFGWPGVLGVPPSACWACPRGIQAAFLTNCR

SEQ ID NO: 190273 - protein, 67 aa, Oryza sativa
  Clone ID: PAT_MRT4530_86703C.1.pep
MSRKRDGISVWLIEYNVGEEAAEKEKQQQMKVTQKSELGKASSVHAIDKHQHRAIEQQGAVLFTDIL

SEQ ID NO: 190274 - protein, 497 aa, Oryza sativa
  Clone ID: PAT_MRT4530_86704C.1.pep
MSNLYVCNMPSSIDTKKLVELFLPFGKITHARVVADPDTFSAKGYGFIKFTDSESATKAIAAMNGALVGGEMIIVRVAGLSPSASISAVQTTQDINKSRLYITNLPRSMTADKMVNLFAPFGQITKVLMNLEYSLVWYADAPSATKAVQHMDGYMVEGKRLVVKRSELCTTNASQAGGKPIKEIDMANLYVGRVPSSLTEDQFIDLFRPFGRVVQARMFRFQRYGMVRFDNPSCAAAAIDHLDGYQIGVSILAVRVAGLPAESNAAKGALTSQMSSNEQGQIDMTTFILIDLFLPCGQITQAKVVVERYTGVSKGFGFVKFADAYSAAVALTHMNGYPLDGHVLEVRIAGVHPDAMSSYMAHFYSHFTMHDPAKAAVGIPTSYWPHYYDESAYNTTAENLGQVTTTSATDASAAQTSQKERLPGSKSVDLVAEKDCSSASNKVANCSESQPTAWAGPPGFEPHAISKKCTGGSNASQACSKDHFAQSGGGHKRRSIV

SEQ ID NO: 190275 - protein, 58 aa, Oryza sativa
  Clone ID: PAT_MRT4530_86705C.1.pep
VKFLVCASDEHTNLQPRFTVSCKYVSPLFFTQTLVMYICNTHLKSVSLHIKQVCATII

SEQ ID NO: 190276 - protein, 924 aa, Oryza sativa
  Clone ID: PAT_MRT4530_86706C.1.pep
MNLFFVNQLQAQLRGGKVTLAAQQEGFSDKMNSGAEYEDGSEEEEPYERVFYDDEDDGNDDSICGDPCDDSVPKEEVHSTCRKLMHEAEPYDDLVAGEEESVENSALQAFKKERNEQELKQAQKMGYSIKQKEIPVDMEMGMKPFKKRLVKFADDVSCYTYSTESFAAAKLEKRKAQFDDQDKHLHKKQEHTPPSFPQDGGKLKEVDNTNLYVGNLPASVGSHKLIELFLPFGQIVRSRVVDDCFTGLSQGYGFVKYSDPRCASEAIKRMNGRLVEGTALKVRVTGFPSSEDNSQQPSKETDMAKLYVCNLSLSMNTDRLIHLFLPFGEVTNAKVAKDHTTGLSKGYGFVQYSSPHHAAEAVIHLNGRLVDGRKIEVRVSGIPSTLPNSAVESPSTTRNSAVESPSTTRTVKEIDMSNLYVCNMPSSIDTKKLVELFLPFGKITHARVVADPDTFSAKGYGFIKFTDSESATKAIAAMNGALVGGEMIIVRVAGLSPSASISAVQTTQDINKSRLYITNLPRSMTADKMVNLFAPFGQITKVLMNLEYSLVWYADAPSATKAVQHMDGYMVEGKRLVVKRSELCTTNASQAGGKPIKEIDMANLYVGRVPSSLTEDQFIDLFRPFGRVVQARMFRFQRYGMVRFDNPSCAAAAIDHLDGYQIGGSILAVRVAGLPAESNAAKGALTSQMSSNEQGQIDMTNLYVSHLPSYVNNERLIDLFLPCGQITQAKVVVERYTGVSKGFGFVKFADAYSAAVALTHMNGYPLDGHVLEVRIAGVHPDAMSSYMAHFYSHFTMHDPAKAAVGIPTSYWPHYYDESAYNTTAENLGQVTTTSATDASAAQTSQKERLPGSKSVDLVAEKDCSSASNKVANCSESQPTAWAGPPGFEPHAISKKCTAGSNASQACSKDHFAQSGGGHKRRSIV

SEQ ID NO: 190277 - protein, 74 aa, Oryza sativa
  Clone ID: PAT_MRT4530_86707C.1.pep
ELDGSHTCNGHITAELLVTCPPSPPKREKEIWAGGRGRERNPILILEYKQIFSGEERKGSVSLLTWDQVCKPHI

SEQ ID NO: 190278 - protein, 147 aa, Oryza sativa
  unsure (1)..(147): unsure at all Xaa locations
  Clone ID: PAT_MRT4530_86708C.1.pep
NPHAGPPRPHPGPAQKAKPGPKGKGRPPPEKPPATKYPKDCETRQGTPRPPPPXPSTHGTGDPPPEDPPATPLRPPVXFPPTPTPPTSPLPRPXPPEPGKQQPFPVHPGPRPNPQGAPKKPPILRRGAPESAEPPKTIETGQKKKKK

SEQ ID NO: 190279 - protein, 145 aa, Oryza sativa
  Clone ID: PAT_MRT4530_86709C.1.pep
MVRGQPGGVRQIAIAALSRFVTDESFPGSVHLRAQVYGMSRCLRNSVRLRTCMGRRAIKFLGNASSATALVLHGYCCCIDAFTKMSTEIGDKMMNDINGGNPASKSSGGMFSGCPFLVQLDRLIGAKQKQKQGTNEMLPYHALGD

SEQ ID NO: 190280 - protein, 312 aa, Oryza sativa
  Clone ID: PAT_MRT4530_8670C.1.pep
MSACGYHSPRFSENCAFIGGPAQEQHSCLNTMVNAASCSGFSLHLSGDEGTPTGTTPSNGNVVPFSLHLSSESTSKLSSTQANGLNSVTCKDVLGGFCIDDQAQEIKTVPQNQSEAKDLREICKMSSEEINKTCDSKGHRRQQLSGRKVDVRKLRSADVNDAVELSIAASEAMVIAEMILLDSQSDKLATASLEAALHVKEARKQCFLEELEHSCGSSESDLDETDRLSELDETEMLDAFQDVGLSLVQTACASQGQNISGLKQEISHASSHPCDAEAHVLESSPEKQNIRWNSHDADTNDHVSDSLASHNK

SEQ ID NO: 190281 - protein, 72 aa, Oryza sativa
  Clone ID: PAT_MRT4530_86710C.1.pep
ARTSAQRDKLASVAGSSKGGWRRVREDPGGRQHESSLSGGLSSDMVKNHVKNVVTNPTSSVDNIPAPLCDLP

SEQ ID NO: 190282 - protein, 76 aa, Oryza sativa
  Clone ID: PAT_MRT4530_86711C.1.pep
MEVSINRILFDDAASPGTVHKYRTHYDTHNANEHNPCRPLKKSEWAWRRFIGAGGGAGHGMEREASSGSTVACGDS

SEQ ID NO: 190283 - protein, 48 aa, Oryza sativa
  Clone ID: PAT_MRT4530_86712C.1.pep
AIDSVSVCLGSLCGLRLTDERSNSRRHPVVEAAARALLDVAVLHVISS

SEQ ID NO: 190284 - protein, 55 aa, Oryza sativa
  Clone ID: PAT_MRT4530_86713C.1.pep
PFLSPEILHSNHFSFLEAAEYFLCSWPRLQTTPKLCYRPTHFTHLNACPILKGRS

SEQ ID NO: 190285 - protein, 69 aa, Oryza sativa
  Clone ID: PAT_MRT4530_86714C.1.pep
GENTFFWDHIFATKTHVRDLGENTLFCVHIFGTETHLGGSTLFIKHFYRGKHIFLGIYTFLELKPTLNH

SEQ ID NO: 190286 - protein, 190 aa, Oryza sativa
  unsure (1)..(190): unsure at all Xaa locations
  Clone ID: PAT_MRT4530_86715C.1.pep
PSEGLQSAVAVADKLYLAEAVLDISCRTLLSLALRLLSSHIAPPARPHRRAALPPTAAPARPHRRCSSARPPPIPAAGSPSVARCAPPPPPAPASXAAAVIHASTPPLRSPTPPRPAPSPXPRVSPPLTQGKPANPNXPPGAISSGPPPPRARLPAPPFGSHPQPLCSTTRSLYPSTPPRPPLTPSASAS

SEQ ID NO: 190287 - protein, 68 aa, Oryza sativa
  Clone ID: PAT_MRT4530_86716C.1.pep
QAHTHPYEHTHAHPTPMSTSGRLGPQAPRSAHSPPTPISTSGRLGRQRTHAHPTPYKHLRKTGPAGIS

SEQ ID NO: 190288 - protein, 407 aa, Oryza sativa
  unsure (1)..(407): unsure at all Xaa locations
  Clone ID: PAT_MRT4530_86717C.1.pep
MDALCDFCRGAXSLVYSRSDAPALCVSCDRNLHSVNPLSRRQTCVLLXDRXVIDPAPDRCLEETTCLCPHTERTGRGGGCSVVFHQRERRRCXSWCSTSTQLSRIWSSSMDIPTESTETNCEEGINMMSINDNDVNNHCGAPEDGRLLDIASTALMSDLPTGDKFKPLIGSSSGDGMNLLPLNSDQPAEPVSTTPKAPCVTDKDMFNDGSVYGDFCVDDADLTFENYEELFGTSHVQTEQLFDDAGIDSYFEMKDVPADESNEQPKPVQPECSNVASVDSGMSNPAARADSSHCIPGRQAISNISLSFSGLTGESSAGYFQDCGVSSMILMGEPPWHPPGPESSSAGGSRDNALTRYKEKKKRRKFDKKIRYASRKARADVRKRVKGRFVKAGEAYDYDPLSQTRSY

SEQ ID NO: 190289 - protein, 171 aa, Oryza sativa
  Clone ID: PAT_MRT4530_86718C.1.pep
MAGAGTVCSMCGDVGFPDKLFQCARCRYRFQHSYCTNYYGDAAPAPAGADMCDWCLSDVAGKARYSSAAGKQQGAGSQESSTTTSSSSAGRGGGGKPGAGEQESGRRGTKAAGRSFGAGELRSNWPSRTLHAAKPSHVDVGVNESYPKTQSGRQRHAPTQTSSSARPPLYE

SEQ ID NO: 190290 - protein, 92 aa, Oryza sativa
  Clone ID: PAT_MRT4530_86719C.1.pep
MGNRCGGRVEKIRGFLRMDWGGLMNPSFVGVALHCSKEWGNGESFGEEDKALLGLWTEQEELKHSDYCYFVDCKGLRGYCGDCGYPISTRQL

SEQ ID NO: 190291 - protein, 925 aa, Oryza sativa
  unsure (1)..(925): unsure at all Xaa locations
  Clone ID: PAT_MRT4530_8671C.1.pep
GAHSLLTSPHQKKKKKEKGRRRKEEAKPCQFQTSISVSRATEGFYWELMPVQNSGMWRWXPSVQMNMDDGEGPSAEVNEIEVDQVNAPEEDGVAPVVAPVGMQPGGVADEGETVGAIVDEMEKEDSDNERVEEDDSSDDDENNINPAEWASDDFSGLVISEGENVRWEYKENEIIEGARYGNGEDMKEAVKHYAVSLHREFWVAKSNRTQYEVRCVNEKDGCPWRVHAYKGKWKDYWTVSVVTKHTCYLPGVQKYHRNITCAFVASEMYAHVVDNLAYEPKSIIRHIEQTFKYTISYAKAWRAKQKIIEMRFGTYEASYDNLPRLLSVIQQRNPGTSCALKTFPSIEHPGKTVLQRAFLALHACKMAFVHCRPVLCIDGTFLTGKYRGQILTAIGVDGNNQVLPLAFAFVESENTDSWYWFLHLVKTEVVGMRPNVCLIHDRHAGMLRAIEELKFGTMERGYPGQWEDVQSRWCMRHMGANFFKQFKNKELMNMFKRLCNQNQEKKFNELWKRLDELTGKCSDQRATRPAAAVPDPPQALGALPTDSVTLVRRTGEQIRKFSQWIENEPKEKWAKTYDTGGARYGIMTTNLAEVYNWVMRGVRGLPLVGILDDYGSDGVRHLCRAARTLPRDAAVRLPYSRKGQHSAGHWPAKLGPFLDDWLLATEEVVDHAGEPHTEEGYEAYLRWYQPRTRTRVTYAPTEQQAHAASARDLYARHRDQDFARAAVECNRVVVDATTAIQRLGAGIEVGADEHLSTYTRIRDSMRSVLRALTCRAADVAQADAAPQVRPRPTAPRPAAHVPTPTPPPFGGXRSAWDDAGRPLLAGCGVIVTGRCVGLAVCAVLAGRRDFVTAARHVLAGSYRDFVRARLGGAPPVHTQEQSPSTPLPDPRATRAVPPDRFTYSQDHVRAQARRTKRGRGASHGQ

SEQ ID NO: 190292 - protein, 526 aa, Oryza sativa
  Clone ID: PAT_MRT4530_86720C.1.pep
MAPAPSHCHATNGNNGAIAASDTPVKTQHCARLLDADEFRRQGRLVVDLIADYYAGMGEYPVHPTVSPGFLRHRLPAEPPSRREPDAFAAAMQDVRDVILPGLTHWQSPRHFAHFPASSSTAGALGEALAAGINVVPFTWAASPAATELEMVVVDWLGKALHLPERLLFAGGGGGSILGTTCEAILCALVAARDRKLAAIGEGRIGDLVVYCSDQTHFAFCKAARIAGIRREHCREIPTYRDDAFALSPAALRAAMRRDADAGLVPLFVCATVGTTQTTAVDPVGELCAAAAPHGAWVHVDAAYAGSAMVCPELRGAVAGGVEAVDSFSMNAHKWLLANNDCCVMWVRTPSALVAALGTDQEYILKDAAAETAAADGGEGVVDYKDWGITLTRRFRALKLWLVLRCYGVEGLREHIRSHVGMAAAFEGMVRADARFEVVTPRRFALVCFRLRSPNKKTANELNRRLLEEVNAASSGPYMSSANVGGVYMLRCAVGSTLTEERHVREAWKVVQDRATSILSKMEIIM

SEQ ID NO: 190293 - protein, 129 aa, Oryza sativa
  Clone ID: PAT_MRT4530_86721C.1.pep
MESSFSVCLEASRCGCGSVTLADGEWRAPQLGGSVCGGRRWEGSMQQRLPTKSGDVVLVNGGHRRVGDRGGENERGGRSRRRRGRVARGPLAPAGESRERTSAANSGEGRRRRVAEGARDGSGLVDSFL

SEQ ID NO: 190294 - protein, 2002 aa, Oryza sativa
  unsure (1)..(2002): unsure at all Xaa locations
  Clone ID: PAT_MRT4530_86722C.1.pep
MAGQAKAHDLSPSVSGDDGEPNPRRRARTPPPPPHQSPKQGEALERVDRSAASPIAGDGGERRDGERRLLVYGDGSTPQGALQAAGALLRHPPVVPDPESPAQRWLDDVANLVMTAQQRLGAGGRSATTKTSGAATTGSVSSRRRARRAAAVARHSAATPSSAPPTREDQRGEPDARLDIERRRNSRRTPRATEGASLSRVSPRHGREDQPSVPPAGGVGCRAFVASLRNVRWPPRFRPTITEKYDGSVNPTEFLQVYTTGIEAAGGDDRVMANFFPMALKGQARGWLMNLPPASVHSWEDLCQQFTMNFQGTYPRPGEEADLHAVQRGDDESLRSYIQRFCQVRNTIPCIPAHAVIYAFRGGVRHNRMLEKIASKEPQTTAELFQLADRVARKEEAWTWNPSGSGVAASAAPGSAAQTGRRDRRRKKWSVHSGDEGHVLAVEGAPRATRKGRPASDKKKEAGTPTRERPVGKWCSVHNTSLHDLADCRTVKNLAERTRKWEEDRRKERREGKSPATPSGKRRSEAKQKAPAVDIDDGDDDLGFQEPGATIATVDGGACAHVSRRSLKAMKRELLAAAPTHEATRRARWSEVALTFDQTDHPPCVARGGQIAMVVSPTICNVKLGRVLIDGGAALNIISPAAFDAIKAPGMVLQPSQPIIGVTPGHTWPLGHIDLPVTFGGSANFRTERVNFDVADLSLPYNAVLGRPALVKFMAAVHYAYLQMKMPGPGGPISVHGDLKVALACMEQRADHLAAASKPEGGDERLGTSAPTAPRQRIVTCAEVPEDALVSFLRANADVFAWRPADMPGVPREVIEHRLAVRPGARPVRQKVRRQAPERQAFIREEVARLLEAGFIREVIHPEWLANPVVVPKANGKLRMCIDYTDLNKACPKDPYPLPRIDQIVDSTAGCDLLCFLDAYSGYHQIRMAREDEEKTAFITPVGTYCYTSMPFGLKNAGPTFQRTTRISLGSQIGHNVEAYVDDLVVKTRNQETLLLDLEETFENLRSARIKLNPDKCVFGVPAGKLLGFLVSARGIEANPEKIRAIERMRPPSKLRDVQCVTGCIAALSRFISRLGEKALPLFKLLKRSGPFTWTEEAERALTQLKTYLSSPPVLVAPGPNEPLLLYLAATPQVVSAALVVERDEDNPHFAHPRPVLTWPGSEQGGEAPESNGGLRPLTTGVGPLPACQTVLGAPDPQEGPEATAGRPHLSPFGPEANPVLTRPGRKQGEEAPEPNGGLRPLTTGVGPLPACPTTPGAPDPQDGPEATVGRPLLSSSDPEVIGTEDECAPRGHLDEERPGDAAPSEEDRPRRKVQRPVYFVSEALRDAKTRYPQAQKMLYAILMASRKLRHYFQAHRVTVVTSYPLGQILHNREGTGRVVKWAIELSEFDLHFEPRHAIKSQALADFVAECTPAPETVSIPEASTDPSQLPHTAHWVMQFDGSLSLQGAGAGVTLTSPNGDVLRYLVRLDFRATNNMAEYEGLLAGLRVAAGLGIRRLLVLGDSQLVVNQVCKEYRCSDPQMDAYVRQVRRMERHFDGIELRHVPRRDNMVADELSRLASSRAQTPPGAFEERLTQPSARPDPLGETDAPDRPPRPVGVQASGPEGSAPSSLRLIAWISEIQAYLTDKTLPEDREGSERVQRISKRYVLVEGTLYRRAANGILLKCIPQEQGVELLADIHEGECGAHSASRTLVGKAFRQGFYWPTALNDAVDLVRRCRACQFHAKQIHQPAQALQIIPLSWPFAVWGLDILGPFKRAPGGFEYLYVAIDKFTKWPEAYPVVKIDKYSALKFIKGITARFGVPNRIITDNGTQFTSELFGDYCEDMGIKLXFASPAHPRSNGQVERANAEILKGLKTKTFNILKKHGDSWIEELPAVLWANRTTPSRATGETPFFLVYGAEXRDDLDYLEERRRRAALRAARYQQSLRRYHQRHVRARSLCVDDLVLRRVQTRAGLSKLSPMWEGPYRVIGVPRPGSIRLATGDGTELPNPWNIEHLRRFYP

SEQ ID NO: 190295 - protein, 89 aa, Oryza sativa
  unsure (1)..(89): unsure at all Xaa locations
  Clone ID: PAT_MRT4530_86723C.1.pep
DALLLVYANSGGSERYICSSTPRKLSDIINTSKSXYPAFNDPQKFWXVDEEQNTRFSSEKLEKLGWTFRPMEETLRDSFESYIGLGILT

SEQ ID NO: 190296 - protein, 156 aa, Oryza sativa
  unsure (1)..(156): unsure at all Xaa locations
  Clone ID: PAT_MRT4530_86724C.1.pep
RVHLSVILDIVMALAVSAVMWSVMHAIVELRALLLVLPLFLILLVRAYDVVXAPGGGAGGGVGGGEDEKPASMELTKVTFTGFLAVSIPAVRTGSLCSSTDWFLIFAASAIVSGFAWRLLTHAXMGTTANFASFCTHFCIAIATVPFTDMAVKALH

SEQ ID NO: 190297 - protein, 1957 aa, Oryza sativa
  Clone ID: PAT_MRT4530_86725C.1.pep
MAEQAKVHDLSPSVSGDDGEPNPRRRARTPPPPPHQNPKQGEALERVEKSAASPVAGDAGERRDGERRLLVYGDGNTPQGALQAVGALLRNPPVVPDPESPAQRWLDDVANLVMTAQQRLGAGGWSATTKTSGAATTGSVSSRRRARRAAAVARHSAATPSSAPPTREDQHGEPDARLDIERRRNSRRTPRATEGASSSRVSPRHGREDQPSVPPAGGVGCRAFVASLRNVRWLPRFRPTITEKYDGSVNPTEFLQVYTTGIEAAGGDDRVMANFFPMALKGQARGWLMNLPPASVHSWEDLCQQFTMNFQGTYPRPGEEADLHAVQRGDDESLRSYIQRFCQVRNTIPCIPAHAVIYAFRGGVRHNRMLEKIASKEPQTTAELFQLADRVARKEEAWTWNPSGSGVAASAAPGSAAQTGRRDRRRKKRSVHSGDEGHVLAVEGAPRATRKGRPASDKKKEAGTPTRERPAGKWCSVHNTSLHDLADCRAVKNLAERTRKWEEDRRKERREGKSPATPSGKRRSEAKQKAPAVDIDDGDDDLGFQEPGATIATVDGGACAHVSRRSLKAMKRELLAAAPTHEATRRARWSEVALTFDQTDHPPCVARGGQIAMVVSPTICNVKLGRVLIDGGAALNIISPAVFDAIKAPGMVLQPSQPIIGVTPGHTWPLGHIDLPVTFGGSANFRTERVNFDVADLSLPYNAVLGRPALVKFMAAVHYAYLQMKMPGPGGPISVHGDLKVALACMEQRADHLAAASKPEGGDERLGTSAPTAPRQRIVTCAEVPKVRRQAPERQAFIREEVARLLEAGFIREVIHPEWLANPVVVPKANGKLRMCIDYTDLNKACPKDPYPLPRIDQIVDSTAGCDLLCFLDAYSGYHQIRMAREDEEKTAFITPVGTYCYTSMPFGLKNAGPTFQRTTRISLGSQIGRNVEAYVDDLVVKTRNQETLLSDLAETFENLRSARIKLNPDKCVFGVPAGKLLGKLRDVQCVTGCIAALSRFISRLGEKALPLFKLLKRSGPFTWTEEAERALTQLKAYLSSPPVLVAPGPNEPLLLYLAATPQVVSAALVVERDEDNPHFAHPRPVLTWPGSEQGGEAPESNGGLRPLTTGVGPLPACQTVLGAPDPQEGPEATAGRPHLSPFGPEANPVLTRPGRKQGEEAPEPNGGLRPLTTGVGPLPACPTTPGAPDPQDGPEATVGRPLLSSSDPEVIGTEDECAPRGHLDEERPGDAAPSEEDRPRRKVQRPVYFVSEALRDAKTRYPQAQKMLYAILMASRKLRHYFHAHRVTVVTSYPLGQILRNREGTGRVVKWAIELSEFDLHFEPRHAIKSQALADFVAEWTPAPETVSIPEASTDPSQLPHTVHWVMQFDGSLSLQGAGAGVTLTSPNGDVLRYLVRLDFRVTNNMAEYEGLIAGLRVAAGLGIRRLLVLGDSQLVVNQVCKEYRCSDPQMDAYVRQVRRMERHFDGIELRHVPRRDNMVADELSRLASSRAQTPPGAFEERLTQPSARPDPLGETDAPDQPPRPVGVQASGPEGSAPSSLRLIAWISEIQAYLTDKTLPEDREGSERVQRISKRYVLVEGTLYRRAANRILLKCIPQEQGVELLADIHEGECGAHSASRTLVGKAFRQGFYWPTALNDAVDLVRRCRACQFHAKQIHQPAQALQIIPLSWPFAVWGLDILGPFKRAPGGFEYLYVAIDKFTKWPEAYPVVKIDKHSALKFIKGITARFGVPNRIITDNGTQFTSELFGDYCEDMGIKLCFASPAHPRSNGQVERANAEILKGLKTKTFNILKKHGDSWIEELPAVLWANRTTPSRATGETPFFLVYGAEAVLPSELTLRSPRATMYCEADQDQLRRDDLDYLEERRRRAALRAARYQQSLRRYHQRHVRARSLCVDDLVLRRVQTRAGLSKLSPMWEGPYRVIGVPRPGSIRLATGDGTELPNPWNIEHLRRFYP

SEQ ID NO: 190298 - protein, 1302 aa, Oryza sativa
  Clone ID: PAT_MRT4530_86726C.1.pep
MRTPLGRVLIDGGAALNILSPAAFDAIKAPGMMLRPSQPIIGVTPGHTWPLGHIDLPVTFGGPANFRTERVNFDVADLSLPYNAVLGRPALVKFMAAVHYAYLQMKMPGPDGPISVHGDLKVALACMEQRADRLAVVSKPEGGDERLDTSAPAAPKQRIVTSDEVPVKEEDALVSFLRANADVFAWRPADMPGVPREVIEHRLAVRPGARPVRQKVRRQAPERQAFIREEVARLLEAGFIREVIHPEWLANPVVVPKANGKLRMCIDYTDLNKACPKDPYPLPRIDQIVDSTAGCDLLCFLDAYSGYHQIRMAREDEEKTAFITPIGTYCYTTMPFGLKNAGPTFQRTTRISLGSQLGRNVEAYVDDLVVKTRNQETLLSDLAETFESLRSARIKLNPDKCVFGVPAGKLLGFLVSARGIEANPEKIRAIERMRPPSKLRDVQCVTGCMAALSRFISKLGEKALPLFKLLKRSGPFTWTEEAERALTQLKAYLSSPPVLVAPEPNEPLLLYLAATPQRAGRRGPEPNGGLRPLATGVGPLPARQMVLGAPDPQEGPEATAGRLHLSPSDPEANPVPIRPGREQGEEAPEPNGGLRPLTTRVGPLPACPTTPGAPDPQDGPEATAGRPPLSSSDPEVIGTEDECAPRGHLDEERPGDMALSEGDRPHRRVQRPVYFVSEALRDAKTRYPQAQKMLYAILMASRKLRHYFQAHRVTVVTSYPLGQILHNREGTGRVVKWAIELSEFDLHFEPRHAIKSQALADFVAEWTPAPETVSIPEASTDPSQLPHTAHWVMQFDGSLSLQGAGAGVMLTSPNGDVLRYLVRLDFRATNNMAEYEGLLAGLRVAAGLGIRRLLVLGDSQLVVNQVCKEYRCSDPQMDAYVRQVRCMERHFDGIELRHVPRRDNMITDELSRLASSRAQTPPGTFEERLTQPSARPDPLGETDVPDRPPRSVGVQASGPEGSAASSLRLIAWISEIQAYLTDKTLPEDREGSERVQRISKRYVLVEGILYRRAANGILLKCIPQEQGVELLADIHEGECGAHSASRTLVGKAFRQGFYWPTALNDAVDLGITARFGVPNRIITDNGTQFTSELFGDYCEDMGIKLCFASPAHPRSNGQVERANAEILKGLKTKTFNILKKHGDSWIEELPAVLWANRTTPSRATGETPFFLVYGAEAVLPSELTLRSPRATMYCEVDQDQLRRDDLDYLEERRRRAALRAARYQQSLRRYHQRHVRARSLCVDDLVLRRVQTRAGLSKLSPMWEGPYRVIGIPRPGSIRLATGDGTELPNPWNIEHLRRFYP

SEQ ID NO: 190299 - protein, 1944 aa, Oryza sativa
  Clone ID: PAT_MRT4530_86727C.1.pep
MAEQAKAHDLSPSVSGDDGEPNPRRRARTPPPPPHQSPKQGEALERVEKSAASPVAGDAGERRDGERRLLVYCDGSTPQGALQAAGALLRHPPVVPDPESPAQRWLDDVANLVMTAQQRLGAGGRRRARRAAAVARHSAATPSSAPPTREDQHGEPDARFDIERRRNSRRTPRATEGASSSRVSPRHGREDQPSVPPVGGVGCRAFVASLRNVRWPPRFRPTITEKYDGSVNPTEFLQVYTTGIEAAGGDDRVMANFFPMALKGQARGWLMNLPPASVHSWEDLCQQFTMNFQGTYPRPGEEADLHAVQRGDDESLRSYIQRFCQVRNTIPCIPAHAVIYAFRGGVRHNRMLEKIASKEPQTTAELFQLADRVARKEEAWTWNPSGSGVAASAAPGSTAQIGRRDRRRKKRSVHSGDEGHVLAVEGASRATRKGRPASDKEKKAGAPSRERPAGKWCSVHNTSLHDLADCRAVKSLAERTRKWEEDRRQERREGKSPAVPSGNRRKEAKQKAPAEDIDDGDDDLGFQEPGATIATVDGGACAHVSRRSFKAMKRELLAAAPTHEATRRARWSEVALTFDQTDHPPCVARGGQIAMVVSPTICNVKLGRVLIDGGAALNILSPAAFDAIKAPGMVLQPSQPIIGVTPGHTWPLGHIDLPVTFGGSANFRTERVNFDVADLSLPYNAVLGRPALVKFMAAVHYAYLQMKMPGPGGPISVHGDLKVALACMEQRADHLAAASKPEGGDERLGTSAPTAPRQRIVTCDEVPEDALVSFLRANADVFAWRPADMPGVPREVIEHRLAVRPGARPVRQKVRRQAPERQAFIREEVARLLEAGFIREVIHPEWLANPVVVPKANGKLRMCIDYTDLNKACPKDPYPLPRIDQIVDSTAGCDLLCFLDAYSGYHQIRMAREDEEKTAFITPVGTYCYTSMPFGLKNAGPTFQRTTRISLGSQIGRNVEAYVDDLVVKTRNQETLLSDLAETFESLRSARIKLNPDKCVFGVPAGKLLGFLVSARGIEANPEKIRAIERMRPPSKLRDVQCVTGCMAALSRFISRLGEKALPLFKLLKRSGPFTWTEEAENALAQLKAYLSSPPVLVAPEPNEPLLLYLAATPQVVSAALVVERDEDNPHSAHPHPVLTWPGSKQGGEVPESNGGLRPPTTGVGPLPACQTVLGAPDPQEGPEATAGRPHLSPFDPEANPVLTRPGRKQGEEAPEPNGGLRPLTTGVGLLPACPTTPGAPDPQDGPEATVGRPPLSSSDPEVIGTEDECAPRGHLDEERPGNTAPSKEDRPRRKVQRPVYFVSEALRDAKTRYPQAQKMLYAILMASKKTRHYFQAHRVTVVTSYPLGQILHNREGTGRVVKWAIELSEFDLHFEPRHAIKSQALADFVAEWTPAPETVSIPETSTDPSQLSHTAHWVMQFDGSLSLQGAGAGVTLTSPSGDVLRYLVRLDFRATNNMAEYEGLLAGLRVAAGLGIRRLLVLGDSQLVVNQVCKEYRCSDPQMDAYVRQVRRMERHFDGIELRHVPRRDNMIADELSRLASSRAQTPPGAFEERLTQPSARPNPLGETDALDRPPRPVGVQASGPEGSAPSSLRLIAWISEIQAYLTDKTLPKDREGSERVQRISKRYVLVEGTLYRRAANGILLKCIPQEQGVELLADIHEGECGAHSASRTLVGKAFRQGFYWPTALNDAVDLVRRCRACQFHAKQIHQPAQALQIIPLSWPFVVWGLDILGPFKRAPGGFEYLYVAIDKFTKWPEAYPVVKIDKHSALKFIKGITARFGVPNRIITDNGTQFTSELFGDYCEDMGIKLCFASPAHPRSNGQVERANAEILKGLKTKTFNILKKHGDSWIEELPAVLWANRTTPSRATGETPFFLVYGAEAVLPSELTLRSPRATMYCEADQDQLRRDDLDYLEERRRRAALRAARYQQSLRRYHQRHVRA

SEQ ID NO: 190300 - protein, 58 aa, Oryza sativa
  unsure (1)..(58): unsure at all Xaa locations
  Clone ID: PAT_MRT4530_86728C.1.pep
HGLPXSPRXPLXXGXPSAPGFVAXLXPSRQVAXFPXXSSSGGXAGXRKGGWLRPGARX

SEQ ID NO: 190301 - protein, 164 aa, Oryza sativa
  Clone ID: PAT_MRT4530_86729C.1.pep
MARKKTKERGGHRRSLHLLPRIQQLELHAHLEFDFIWSIGGGQMLAALPLAPNQVVGHAHEKAHGTQGRRLGLGCDLGGRGGCPHTRACLSVPCAREGEARDKEDIWVRIGRGEVVRSGGRQAMALRRRRLGKVRRSDRGIGRNHDHEAKGSRTWMMDETEYDE

SEQ ID NO: 190302 - protein, 1325 aa, Oryza sativa
  unsure (1)..(1325): unsure at all Xaa locations
  Clone ID: PAT_MRT4530_8672C.1.pep
GAHSLLTSPHQKKKKEKGRRRKEEAKPCQFQTSISVSRATEGFYWELMPVQNSGMWRXMNMDDGEGPSAEVNEIEVDQVNAPEEDGVAPVVAPVGMQPGGVADEGETVGAIVDEMEKEDSDNERVEEDDSSDDDENNINPAEWASDDFSGLVISEGENVRWEYKENEIIEGARYGNGEDMKEAVLPLAFAFVESENTDSWYWFLHLVKTEVVGMRPNVCLIHDRHAGMLRAIEELKFGTMERGYPGQWEDVQSRWCMRHMGANFFKQFKNKELMNMFKRLCNQNQEKKFNELWKRLDELTGKCSDQRATRPAAAVPDPPQALGALPTDSVTLVRRTGEQIRKFSQWIENEPKEKWAKTYDTGGARYGIMTTNLAEVYNWVMRGVRGLPLVGIVEFILHGTCKYFRERFQAVFPSMPNNNILFGTFMEKKLAEWRAKAMKHRALVQGTQQHRFEVLCQDKAGRGIYRKRVKQECVLKDDGTCHCSCRKPTLLHRPCTHVISAASECGIQDAVYVSQYFSKQAIYHTWSGEIFGFGVAGEFTKINDLIIYIPDPTKLRDKAGRRKTRRIRNDMDESEAGRVKRCSKCDERGHTYKYCPKDKEKPSAAEAEMAHPELLDPAIDQRHRSYLTAVEGAQLGTFRPRSSRERLLVHDSFVERLREAGLLPLARLVEAATGDDDVTRRWDPDRSLLAALVDRWRPETHTFHLPCGEVAPTLQDVSYLLGLPLAGDAVGPVDMGVDWKDELTARFAPVQRLPGLPLEPLQQHRNTGPTKRWLLQFTVDQLPEEADEYSFSRCLEAYLLWLFGWVMFCGSHGHSVDRGLVHYARSIADAAVGEVPQWSWGSALLAAQYRGLCEACTRTDPGAIFGGCPLFISLWAAERIAIGRPLVEHHPYDASLYENRPAVDYPTMGTLWCRRQRRWAHVQVRRSYAEFVMEFDRLLPTDVVWEPYSALLTHSRAPLGLSTLCTRDQAYWMTTVPMVFDICVEPHAPYRVMRQFGFRQSFPVPFPAGVTAAVHRYSRKGQHSAGHWPAKLGPFLDDWLLATEEVVDHAGEPHTEEGYEAYLRWYQPRTRTRVTYAPTEQQAHAASARDLYARHRDQDFARAAVECNRVVVDATTAIQRLGAGIEVGADEHLSTYTRIRDSMRSVLRALTCRAADVAHADAAPQVRPRPTAPRPAAHVPTPTPPPFGGFAQPGTTPGAHSWQAAGSSSQAGVSASLSAQFWQDAGTSSQPPGTSWQGPTGTSSEHGWASATHFDISDFDFPDIIGPSQLGGAPPVHTQEQSPSTPLPDPRATRAVPPDRFTYSQDHVRAQARRTKRGRGASHGQ

SEQ ID NO: 190303 - protein, 1471 aa, Oryza sativa
  Clone ID: PAT_MRT4530_86730C.1.pep
GPHPWGALCPSGPGAVQRRDDESLRSYIQRFCQVRNTIPCIPAHAVIYAFRGGVRHNRMLEKIASKEPQTTAELFQLADRVARKEEAWTWNPSGSGVAASAAPGSAAQIGRRDRRRKKRSVYSGDEGHVLAVEGAPRATRKGRPASDKKKEAGTPIRERPAGKWCSVHNTSLHDLADCRAVKNLAERTRKWEEDRRKERREGKSPATPSGKRRSEAKQKAPAVDIDDGDDDLGFQEPGATIATVDGGACAHISRRSLKAMKRELLAAAPTHEATRRAQWSEVALTFDQTDHPPCVARGGQIAMVVSPTICNVKLGRVLIDGGAALNIISPAAFDAIKAPGMVLQPSQPIIGVMPGHTWPLGHIDLPVTFGGSANFRTERVNFDVADLSLPYNAILGRPALVKFMAAVHYAYLQMKMPGPGGPISVHGDLKVALACMEQRADHLAAASKPEGGDERLGTSAPTAPRQRIVTCAEVPEDALVSFLRANADVFAWRPADMPGVPREVIEHRLAVRPGARPVRQKVRRQAPERQAFIREEVARLLEAGFIREVIHPEWLANPVVVPKANGKLRMCIDYTDLNKACPKDPYPLPRIDQIVDSTAGCDLLCFLDAYSGYHQIRMAREDEEKTAFITPVGTYCYTSMPFGLKNAGPTFQRTTRISLGSQIGRNVEAYVDDLVVKTRNQETLLLDLAETFENLRSARIKLNPDKCVFGVPAGKLLGFLVSARGIEANPEKIRAIERMRPPSKLRDVQCVTGCIAALSRFISRLGEKALPLFKLLKRSGPFTWTEEAERALTKLKTYLSSPPVLVAPGPNEPLLLYLAATPQVVSAALVVERDEDNPHFAHPRPVLTWPGSEQGGEAPESNGGLRPLTTGVGPLPACQTVLGAPDPQEGPEATAGRPHLSPFGPEANLVLTRPGRKQGEEAPEPNGGLRPLTTGVGPLPACPTTPGAPDPQDGPEATVGRPLLSSSDPEVIGTEDECAPRGHLDEERPGDAAPSEEDRPRRKVQRPVYFVSEALRDAKTRYPQAQKMLYAILMASRKLRHYFQAHRVTVVTSYPLGQILHNREGTGRVVKWAIELSEFDLHFEPRHAIKSQALADFVAEWTPAPETVSIPEASTDPSQLPHTAHWVMQFDGSLSLQGAGAGVTLTSPNGDVLRYLVRLDFRATNNMAEYEGLLAGLRVAAGLGIRRLLVLGDSQLVVNQRAPGGFEYLYVAIDKFTKWPEAYPVVKIDKHSALKFIKGITARFGVPNRIITDNGTQFTSELFGDYCEDMGIKLCFASPAHPRSNGQVERANAEILKGLKTKTFNILKKHGDSWIEELPAVLWANRTTPSRATGETPFFLVYGAEAVLPSELTLRSPRATMYCEADQDQLRRDDLDYLEERRRRAALRAARYQQSLRRYHQRHVRARSLCVDDLVLRRVQTRAGLSKLSPMWEGPYRVIGVPRPGSIRLATGDGTELPNPWNIEHLRRFYP

SEQ ID NO: 190304 - protein, 118 aa, Oryza sativa
  Clone ID: PAT_MRT4530_86731C.1.pep
MAELQSAIMRVPRMPVNRTDTETHPPALEFRRSCTIEVKCDRIQYIYELLITNQIASLFDGSKFALAFVRGLDLFNLEHAYLCPGIKIYCIGEHLAIEMYILIWSSRLPMMYLGLDHY

SEQ ID NO: 190305 - protein, 965 aa, Oryza sativa
  Clone ID: PAT_MRT4530_86732C.1.pep
PKRRRKNNERRRRRGGNGGNLRVVDGDEAPAISGDGEGADEDGDDLASTTVAFPSDGDGPQVVSAALVVERDEDNPHSAHPHPVPTWPGSKQGGEAPESNGGLRPLTTGVGPLPACQTVLGASDPQEGPEATAGRPHLSPFGPEANPVLTWPGSKQGGEAPESNGGLRPLTTGVGPLPACQTVLGAPDPQEGPEATAGRPHLSPFGPEANPVLTRPGREQGEEAPEPNGGLRPLTTGIGPLPACPTTPGAPDPQDGPEATVGRPLLSSSDPEVISTEDECAPRGHLDEERPGDTAPSEEDRPRRKVQRPVYFVSEALRDAKTRYPQAQKMLYAILMASRKLRHYFQAHRVTVVTSYPLGQILRNREGTGRVVKWAIELSEFDLHFEPRHAIKSQALADFVAEWTPAPETVSIPEASTDSSQLPHTAHWVMQFDGSLSLQGAGAGVTLTSPNGDVLRYLVRLDFRATNNMAEYEGLLAGLRVAAGLGIRRLLVLGDSQLVVNQTPPGAFEERLTQPSARPDPLGETDAPDRPPRPVGVQASGPEGSAPSPLRLIAWISEIQAYLADKTLPEDREGSERVQRISKRYVLIEGTLYRRAANGILLKCIPQEQGVELLADIHEGECGAHSASRTLVGKAYRQGFYWPTALNDAVDLVRRCRACQFHAKQIHQPAQALQIIPLSWPFAVWGLDILGPFKRAPGGFEYLYVAIDKFTKWPEAYPVVKIDKHSALKFIKGITARFGVPNRIITDNGTQFTSELFGDYCEDMGIKLCFASPAHPRSNGQVERANAEILKGLKTKTFNILKKHGDSWIEELPAVLWANRTTPSRATGETPFFLVYGAEAVLPSELTLRSPRATMYCEADQDQLRRDDLDYLEERRRRAALRAARYQQSLRRYHQRHVRARSLCVDDLVLRRVQTRAGLSKLSPMWEGPYRVIGVPRPGSIRLATGDGTELPNPWNIEHLRRFYP

SEQ ID NO: 190306 - protein, 1939 aa, Oryza sativa
  Clone ID: PAT_MRT4530_86733C.1.pep
MAEQAKVHDLSPSASGDDGEPNPRRRARTPPPPPHQDPKQGEALERVEKSAASPVAGGAGERRDGERRLLVYGNGSTPQGALQAVGALLRHPPVVPDPESPAQRWLDDVANLVMTAQQRLGAGGRSATTKTSGAATTGSVSSRRRARRAAAVAHHSAATPSSAPPTREDQHGEPDARLDIERRRNSRRTPRATEGASSSRVSPRHGRGNQPSVPPVGGVGCRAFVASLRNVRWPPRFRPAIAEKYDGSVNPAEFLQVYTTGIEAAGGDDRVMANFFPMALKGQARGWLMNLPPASVHSWEDLCQQFTMNFQGTYPRPVEEADLHAVQRRDDESLRSYIQRFCQVRNTIPCIPAHAVIYAFRGGVRHNRMLEKIASKEPQTTAELFQLADRVARKEEAWTWNPSGSGVAASAAPGSAAQSGRRDRRRKKRSVRSDDEGHVLAVEGTSRATRKGRPASDKKKEASVPSRERPTGKWCTVHNTSLHDLADCRAVKSLAERTRKWEEERRQERREGKSPAVPSGRRRSEAKQKAPAEDIDDGDNDLGFQEPGATIATVDGGACAHVSRRSLKAMKRELLAAAPTHEATRRARWSEVALTFDRTDHPPCVARGGQIAMVVSPTICNVKLGRVLIDGGAALNIISPAAFDAIKAPGMVLQPSQPIIGVTPGHTWPLGHIDLPVTFGGSANFRTERVNFDVADLSLPYNAVLGRPALVKFMAAVHYAYLQMKMPGPGGPISVHGDLKVALACMEQRADHLAAASKPEGGDERPGTSAPTAPRQRIVTCAEVPEDALVSFLRANADVFAWRPADMPGVPREVIEHRLAVRPGARPVRQKVRRQAPERQAFIREEVARLLEAGFIREVIHPEWLANPVVVPKANGKLRMCIDYTDLNKACPKDPYPLPRIDQIVDSTAGCDLLCFLDAYSGYHQIRMAREDEEKTAFITPIGTYCYTTMPFGLKNAGPTFQRTTRISLGSQIGRNVEAYVDDLVVKTRNQETLLLDLAETFGNLRSARIKLNPDKCVFGVPAGKLLGFLVSARGIEANPEKIRAIERMRPPSKLRDVQCVTGCIAALSRFISRLGEKALPLFKLLKRSGPFTWTEEAERALTQLKAYLSSPPVLVAPGPNEPLLLYLAATPQVVSAALVVERDEGNPHSAHPHPVLTWPGSEQGGEAPEPNGGLRPLATGVGPLPARQMVLGAPDPQEGPEATAGRLHLSPSDPEANPVPIRPGKEQGEEAPEPNGGLRPLTTRVGPLPACPTTPGAPDPQDGPEATVGRPPLSSSDPEVIGTEDECAPRGHLDEERPGDMALSEGNRPHRRVQRPVYFVSEALRDAKTRYPQAQKMLYAILMASRKLRHYFQAHRVTVVTSYPLGQILHNREGTGRVVKWAIELSEFDLHFEPRHAIKSQALADFVAEWTPAPETVSIPEASTDPSQLPHTAHWVMQFDGSLSLQGAGAGVMLTSPNGDVLRYLVRLDFRATNNMAEYEGLLAGLRVAAGLGIRRLLVLGDSQLVVNQVCKEYRCSDPQMDAYVRQVRRMERHFDGIELRHVPRRDNMVADELSRLASSRAQTPPGAFEERLTQPSARPDPLGETDAPDRPPRPVGVQASGPEGSAPSSLRLIAWISEIQAYLTDKTLPEDREGSERVQRISKRYVLVEGTLYRRAANGILLKCIPREQGVELLADIHEGECGAHSASRTLVGKAFRQGFYWPTALNDAVDLVRRCRACQFHAKQIHQPAQALQTIPLSWPFAVWGLDILGPFRRAPGGFEYLYVAIDKFTKWPEAYPVIKIDKHSALKFIKGITARFGVPNRIITDNGTQFTSELFGDYCEDMGIKLCFAHLPTPEAMKHGDSWIEELPAVLWANRTTPSRATGETPFFLVYGAEAVLPSELTLRSPRATMYCEADQDQLRRDDLDYLEERRRRAALRAARYQQSLRRYHQRHVRA

SEQ ID NO: 190307 - protein, 78 aa, Oryza sativa
  Clone ID: PAT_MRT4530_86734C.1.pep
HCWQKVNSNEPSINYTMYHGFKTLYIQDINLVKLYIEQNKLLNAYRINWVSRCNSCLELRQCDGPSGNSTHEAEIGSY

SEQ ID NO: 190308 - protein, 2011 aa, Oryza sativa
  Clone ID: PAT_MRT4530_86735C.1.pep
MAERAKAHDLSPSVSGDDGEPNPRRRARTPPPPPHQSPKQGEALERVDKSAASPVAGDAGERRDGERRLLVYGDGSTPQGALQAAGALLRHPPVVPDPESPAQRWLDDVANLVMTAQQRLGAGGRSSTTKTSGAATTGSVSSRRRARRAAAVARHSAATPSSAPPTREDQHGEPDARLDIERRRNSRRTPRATEGASSSRVSPRHGREDQPSVPPAGGVGCRAFVASLRNVRWPPRFRPTITEKYDGSVNPTEFLQVYTTGIEAAGGDDRVMANFFPMALKGQARGWLMNLPPASVHSWEDLCQQFTMNFQGTYPRPGEEADLHAVQRGDDESLRSYIQRFCQVRNTIPCIPAHAVIYAFRGGVRHNRMLEKIASKEPQTTAELFQLADRVARKEEAWTWNPSGSGVAASAAPGSAAQTGRRDRRRKKRSVHSGDEGHVLAVEGAPRATRKGRPASDKKKEAGTPTRERPAGKWCSVHNTSLHDLADCRAVKNLAERTRKWEEDRRKERREGKSPATPSGKRRSEAKQKAPAVDIDDGDDDLGFQEPGATIATVDGGACAHVSRRSLKAMKRELLAAAPTHEATCRARWSEVALTFDQTDHPPCVARGGQIAMVVSPTICNVKLGRVLIDGGAALNILSPAAFDAIKAPGMVLQPSQPIIGVTPGHTWPLGHIDLPVTFGGSANFRTERVNFDVADLSLPYNAVLGRPALVKFMAAVHYAYLQMKMPGPGGPISVHGDLKVALACMEQRADHLAAASKPEGGDERLGTSAPTAPRQRIVTCAEVPEDALVSFLRANADVFAWRPADMPGVPREVIEHRLAVRPGARPVRQKVRRQAPERQAFIREEVARLLEAGFIREVIHPEWLANPVVVPKANGKLRMCIDYTDLNKACPKDPYPLPRIDQIVDSTAGCDLLCFLDAYSGYHQIRMAREDEEKTAFITPVGTYCYTSMPFGLKNAGPTFQRTTRISLGSQIGRNVEAYVDDLVVKTRNQETLLSDLAETFENLRSARIKLNPDKCVFGVPAGKLLGFLVSARGIEANPEKIRAIERMRPPPANLGMLGEKALPLFKLLKRSGPFTWTEEAERALTQLKADLSSPPVLVAPGPNEPLLLYLAATPQVVSAALVVERDEDNPHFAHPRPVLTWPGSEQGGEAPESNGGLRPLTTGVGPLPACQTVLGAPEPQEGPEATAGRPHLSPFGPEANPVLTRPGRKQGEEAPEPNGGLRPLTTGVGPLPACPTTPGAPDPQDGPEATVGRPLLSSSDPEVIGTEDECAPRGHLDEERPGDAAPSEEDRPRRKVQRPVYFVSEALRDAKTRYPQAQKMLYAILMASRKLRHYFQAHRVTVVTSYPLGQILHNREGTGRVVKWAIELSEFDLHFEPRHAIKSQALADFVAEWTPAPETVSIPEASTDPSQLPHTAHWVMQFDGSLSLQGAGAGVTLTSPNGDVLRYLVRLDFRATNNMAEYEGLLAGLRVAAGLGIRRLLVLGDSQLVVNQVCKEYRCSDPQMDAYVRQVRRMERHFDGIELRHVPRRDNMVADELSRLASSRAQTPPGAFEERLTQPSARPDLLGETDAPDRPPSPVGVQASGPEGSAPSSLRLIAWISEIQAYLTDKTLPEDREGSERVQRISKRYVLVEGTLYRRAANGILLKCIPQEQGVELLADIHEGECGAHSASRTLVGKAFRQGFYWPTALNDAVDLVRRCRACQFHAKQIHQPAQALQIIPLSWPFAVWGLDILGPFKRAPGGFEYLYVAIDKFTKWPEAYPVVKIDKHSALKFIKGITARFGVPNRIITDNGTQFTSELFGDYCEDMGIKLCFASPAHPRSNGQVERANAEILKGLKTKTFNILKKHGDSWIEELPAVLWANRTTPSRATGETPFFLVYGAEAVLPSELTLRSPRATMYCEADQDQLRRDDLDYLEERRRRAALRAARYQQSLRRYHQRHVRARSLCVDDLVLRRVQTRAGLSKLSPMWEGPYRVIGVPRPGSIRLATGDGTELPNPWNIEHLRRFYP

SEQ ID NO: 190309 - protein, 586 aa, Oryza sativa
  Clone ID: PAT_MRT4530_86736C.1.pep
MGEEPPEQQTPAPPSPPPASSWPKEVRVDVIDGGGASSASKQPSSSFRLWRVPKHVRDINKEAYGPKFACIGPYHRRRRRRGGGDRDAEEEEEEERRLRVEKLKERYLDELLTDVVGPPHVDDHRAKRDEILLLCTCRLGEMLDSVRRFYAEDQEYLRGMTDEEMVRMLLLDGCFIIKHIYNFAIGYDDPELYATRWSPAQLRIDLGLLENQIPFFVLEEIFYHLTPQTFLGKITRRVAKDDDKTMRRRKRHKLIVMAMWYMLQDWFQLPTRESDDLYKLIAEEEVHHLLHLVHIAHLAKVDSAGPKSPPCEWQLCWQWPWHALQLLLCILPLFLVSLPLHMCRCCAAGGGEKTDPKANIASASQLRGLGVKIRMAKRDRGGILDVRLRKSLEIRLIPPELEVPALSVEEATAVLLQNLVAYEQQGTPARQGQDQQTQGRKGKDYFTTYAFLMYNLVSSTEDIAELQEKGVLLNNFGSHETGKEIGGFSSTKEDANTVLNRKERRWRWQIINYFKNLCRWNQRSKEDTPIGKVLDQLRVCSQYQLYRDWAEAKKYMDTPVKILALVVSTLLAISTILQTTTAFYPK

SEQ ID NO: 190310 - protein, 1668 aa, Oryza sativa
  unsure (1)..(1668): unsure at all Xaa locations
  Clone ID: PAT_MRT4530_86737C.1.pep
MAKQAKAHKLSPSVSGDDGEPNPRRRARTPPPPPRQSPRREEALERVEGSATSTSTGDGEGRRDGERRLLVYGDGSTPQGALQAAGALLRHPPVVPDPESPAQRWLDDVANLVMTARQHLGVGGRSSATKTSGAATTGSVSSKRRARRAAAVARRSAATPSSAPLTREDQRGGPDARIGIERRRNGRRATHATEGASSSGVSPQHGRGDQPSVPPVGGVGCRAFVASLRNVRWPPRFRPTIAEKYDGSVNPAEFLQVYTTGIEAAGGDDRVMANFFPMALKGQARGWLMNLPPASVHSWEDLCQQFTMNFQGTYPRPXFCQVRNTIPCIPAHAVIYAFXGGVRHNRMLEKIASKEPQTTAELFQLADRVARKEEAWTWNPSGSGVATSAAPGSAAQTGRRDRRRKKRSAHSDDEGHVLAVEGASRATRKGRPASDKKKEAGAPSRERPTGKWCIVHNTSLHDLADCRAVKSLAERTRKWEEERRQERREGKSPAVPSGNRRSEAKQKAPVEDIDGGDDDLGFQEPGATIATVDGGACAHVSRRSLKAMKRELLAAAPTHEATRRARWSEVALTFDQTDHPPRGGGGGAALNILSPAAFDAIKAPGMVLWPSQPIIGVTPGHTWPLGHIDLPVTFGGSVNFRTERVNFDVADLSLPYNAVLGRPALVKFMAAVHYAYLQMKMPGPGGPISVHGDLKVALACMEQRADHLAAASKPEGGDERLGTSVPAAPRQRMITCDEVPEDALVSFLRANADVFAWRPADMPGVPREVIEHRLAVRPGARPIRQKVRRQAPERQAFIREEVARLLEAGFIREVIHPEWLANPVVVPKANGKLRMCIDYTDLNKACPKDPYPLPRIDQIVDSTAGCDLLCFLDAYSGYHQIRMAREDEEKTTFITPIGTYCYTTMPFGLKNAGPTFQRTTRISLGSQIGRNVEAYVDDLVVKTRDQETLLSDLAETFESLRSARIKLNPDKCVYGVPAGKLLGKLRDVQCVTGCMAALSRFISRLGEKALPLFKLLKRSGPFTWTEEAERALTQLKAYLSSPPVLIAPEPDEPLLLYLAATPQVVSAALVVERDEDNPHSAHPHPVLAWPGREQGGEAPEPNGGPRPPTTGAGPLPACQTVPGAPDPQDGPGATAGRPHLSPSDLEVNPVPTRPGREQGEEAPEPNGGLRPPTTRVGPLPACPTMPGAPDPQDGPEATVGRPRLSSSDPEVVGTEDECAPRGRLDEERPRDAAPGEEDRPHRKVQRPVYFVSEALRDAKTRYPQAQKMLYAILMASRKLRHYFQAHRVTVVTSYPLGQILHNREGIGRVVKWAIELSEFDLHFEPRHAIKSQALADFVAEWTPAPEPVSLPEASSGPSQLPHTARWVMQFDGSLSLQGAGAGVTLTSPSGEILRYLVCMEYRCSDPQMDAYVRQVRRMERHFDGIELRHVPRRDNTIADELSRLASSRAQTPPSAFEERLAQPSARPDPLGETDAPDRPPRPVGVQASGPEGSAPSSLRLIAWIAEIQAYLTDKTLPEDREGSERVQRISKRYVLVEGTLYRRAANGILLKCIPREQGVELLADIHEGECGAHSASRTLVGKAFRQGFYWPTALNDAVDLVRRCRACQFHAKQIHQPAQALQIIPLSWPFAVWGLDILGPLSRPKTTLKFILKIVPRIIKIHVKASNN

SEQ ID NO: 190311 - protein, 332 aa, Oryza sativa
  unsure (1)..(332): unsure at all Xaa locations
  Clone ID: PAT_MRT4530_86738C.1.pep
MAQLPPKIPVAAPGHHQHWASAGGAGDAAWADEFAEFAASRRGAHRRSLSDSVAFVEVAPAGCGAGGEFDRLDDDQLMSMFPDEGGSSAPGSDNGGSDSDGGGDKHAAAQSDDGQHAAGEPTQEQAAATSPTELIRDPKRVKRILANRQSAQRSRVRKLQYISELERSVTTLQKWRQFETDRWTQPHWLAGNSTQCGEEMSESNEVSVLSPRVAFLDQQRTILTVGNSHLKQRIAALAQDKIFKDAHQEALRKEIERLRQAVLACYRLTAPDLLCMIWFPLLGXETTGGEKPAQHIVIVEHRYCSSFKDKSHSVQYNICIIQNLQYMDLDQR

SEQ ID NO: 190312 - protein, 108 aa, Oryza sativa
  unsure (1)..(108): unsure at all Xaa locations
  Clone ID: PAT_MRT4530_86739C.1.pep
GLQDAXDYGWDTAGLSADXEXFAKNRELXVIHSRWAMLGALGCVFPELLARNXVXFGEAVWFXAGSQIFSEGGXXYLGNXSLIHXHSILXVWAVQVVLIGPLQGXHHR

SEQ ID NO: 190313 - protein, 68 aa, Oryza sativa
  Clone ID: PAT_MRT4530_8673C.1.pep
EVLWPLRLFNVQPLTLDAQASGNCLFCNLDVWVVSILPYGIMSSRVYILFGALHLFAVSVCACLLFFS

SEQ ID NO: 190314 - protein, 439 aa, Oryza sativa
  Clone ID: PAT_MRT4530_86740C.1.pep
MDPQIFVRLSVGQLGLKLPGANARKAARSFHCEIRLRGFPVQIAPVPLINYSEFNLDPHTNAAVFSLDESELKALSAPGCFGAHGSYLEVAVYVGRRGGHCGIVTGMKRLVGVVRMDIGPEWRDGKPVMLHHGWVGIGNGEAKPELHLRVKMEADPRYIFEFDDEVALNPQVVQLHGRNRQPIFSCKFIRDRRGSHSDQLYWSSSGGEEKEAEMMRRRERKGWKVVIHDLSGSAVAAAFMATPFVAASGCDTVARSNPGAWLIARAGATAPGSTSSSAAVESWQPWGRLEAWRDQGGAARQDTVCLRLRLLPDGQDACMLVAETPLRSDRGGEFAIDMDRQAPALAAGAEHCAASLGEACAGGGFVMSCRVEGESRSSRPLVQLAMRHVTCMEDAAMFVALAAAVDLSVKACRPFRRKTTATKKTASASSSPDPLELDT

SEQ ID NO: 190315 - protein, 79 aa, Oryza sativa
  Clone ID: PAT_MRT4530_86741C.1.pep
MEAGAGISGGFTSWGSTRLPGCQALDPSRRSDLYATPRKTYPKNGPFWGARVAGAVVQQDGASLFGAVPLPTWRGDAEE

SEQ ID NO: 190316 - protein, 160 aa, Oryza sativa
  unsure (1)..(160): unsure at all Xaa locations
  Clone ID: PAT_MRT4530_86742C.1.pep
GCTFPIIHCDIKPDNILMDHMENPKITDFGXAKLLNNQQVHYTITKIMGTKGYAAPEWFVEIICCGRLPPDNHRIGTMVPLLNWVESLIEDGRMSEVSTRGGRRERAGAPMVLGSSMADSAERYARVAXIWCIQVDPSMRPTIREVVHMLMDVAPLPALS

SEQ ID NO: 190317 - protein, 115 aa, Oryza sativa
  Clone ID: PAT_MRT4530_86743C.1.pep
MPEVMNKLGSWALDDQNKTPQSLAVSRSAGSPQSLSSLILSKIVVAAQESQPTAPHPLRLLAAGKIDAFSPAYLRPPQAPNPPTSQISKSTAWPPSDALVVMLPHPRACPSFVGS

SEQ ID NO: 190318 - protein, 618 aa, Oryza sativa
  Clone ID: PAT_MRT4530_86744C.1.pep
MADSPNPSSGDHPAGVGGSPEKQPPVDRRVAALAAGAAGAGARYKAMSPARLPISREPCLTIPAGFSPSALLESPVLLTNFKVEPSPTTGTLSMAAIMNKSANPDILPSPRDKTSGSTHEDGGSRDFEFKPHLNSSSQSTASAINDPKKHETSMKNESLNTALSSDDMMIDNIPLCSRESTLAVNISSAPSQLVGMVGLTDSSPAEVGTSELHQMNSSGNAMQESQPESVAEKSAEDGYNWRKYGQKHVKGSENPRSYYKCTHPNCDVKKLLERSLDGQITEVVYKGRHNHPKPQPNRRLSAGAVPPIQGEERYDGVATTDDKSSNVLSILGNAVHTAGMIEPVPGSASDDDNDAGGGRPYPGDDAVEDDDLESKRRKMESAAIDAALMGKPNREPRVVVQTVSEVDILDDGYRWRKYGQKVVKGNPNPRSYYKCTNTGCPVRKHVERASHDPKSVITTYEGKHNHEVPASRNASHEMSTPPMKPVVHPINSNMQGLGGMMRACEPRTFPNQYSQAAESDTISLDLGVGISPNHSDATNQLQSSVSDQMQYQMQPMGSVYSNMGLPAMAMPTMAGNAASNIYGSREEKPSEGFTFKATPMDHSANLCYSTAGNLVMGP

SEQ ID NO: 190319 - protein, 699 aa, Oryza sativa
  Clone ID: PAT_MRT4530_86745C.1.pep
MAAPPPALRRLLLLLLFSLLLLASVAAAAAAPAAEEEEFTEELLLRPLPDRKALAHFHFRSSASPSAAAAGRHHHLFPKAIAQLVQQFHISELELSFTQGQWNYEQWGGYDPMSTNYAKPPGVELWAAFDLPLDEIDATWKNLTHTLSGLFCASINFLESSTAFSAPRWGFKLNEGNLRYGALPREAVCTENLTPWLKLLPCRDKAGIASLLYRPSIYKGYYHSQKLKLTSSQSFGIIIDQTLTVVLQPDTFWGQQLHSTDGQLQPSWSMKDLFNRKLSGKCRVSKSSRVFLEIENDIVDKSGTEASWTNELFVLSTAPDRVLKELNNMDAQSSSLYEYDVSNYNNDKPLDVGITWKLPLIWSCTPAPYHANRFLMGSGNERGSIALSFRSTNLHKQLFGSSNDCSIKAVVFQVVPCKAISEVVEKIHVTPSEDKHLPGTLEMLLRLPCSMESATLSLDFDKGFLHIDEYPPDANQGFDIPSALVTFPEFNSSRSYPEGDTLFVSPLLQTFKEDGVVKSYTEVLLVPLTTPDFSMPYNVITFTCTVLALYFGSLLNALRRRIGEEERELKKAGLCRFTKVLGHLDTTSTSINLHPSTKLLLCSQEQAGLKFSLSRACPLYLYSYLSREAWADSSVDSQAKGEEGRPTTTRIFTYISVVNKAATQGCICGGSSCLTSLLVKQLRIDAIVYNFEQCPKPRL

SEQ ID NO: 190320 - protein, 139 aa, Oryza sativa
  Clone ID: PAT_MRT4530_86746C.1.pep
MKWTSSLHKLLFSPWYQKPSQTVLWLFIDSKTVTMMVKELHRLFFSPSLIDEGGGAWSWRTGRWYAAAVAATDRRGCFDPRDGQRDKRRVVGAERMARDDHATGGGAAGTSAATCSDEEGAVTSGCDERQRAAVSEYWI

SEQ ID NO: 190321 - protein, 252 aa, Oryza sativa
  Clone ID: PAT_MRT4530_86748C.1.pep
MERATAPQLGFSAPKLEEKRQENLGDWKRRTNQIQQDKKEKESKTIIEKYDDWVMLDSDNPACSDSDDEEDDNEVGSDADGAATTGAGASRGRLPHTSVAAASALLMSTSATADFASPARARTDEERSPPVRVGHRGVGTSPPRGGEASGAVDSEARRTAVASPACCRGVGGEEAWRRGRRGGAAVVRERGEGGGRAEERCRNTLASSRHAIIGSASTAASFLDHHHHGALLNELLLPVWMKIGTISVLARK

SEQ ID NO: 190322 - protein, 82 aa, Oryza sativa
  Clone ID: PAT_MRT4530_86749C.1.pep
MGSCVAIQVGSQFVHQARPTGLSLGGHGPMRRPRIPYEAAAVAGEATTLSSVGEKIEHTGLGDLLSSSAGPNLDEMRACQSV

SEQ ID NO: 190323 - protein, 871 aa, Oryza sativa
  unsure (1)..(871): unsure at all Xaa locations
  Clone ID: PAT_MRT4530_8674C.1.pep
GAHSLLTSPHQKKKKKEKGRRRKEEAKPCQFQTSISVSRATEGFYWELMPVQNSGMWRWXPSVQMNMDDGEGPSAEVNEIEVDQVNAPEEDGVAPVVAPVGMQPGGVADEGETVGAIVDEMEKEDSDNERVEEDDSSDDDENNINPAEWASDDFSGLVISEGENVRWEYKENEIIEGARYGNGEDMKEAVKHYAVSLHREFWVAKSNRTQYEVRCVNEKDGCPWRVHAYKGKWKDYWTVSVVTKHTCYLPGVQKYHRNITCAFVASEMYAHVVDNLAYEPKSIIRHIEQTFKYTISYAKAWRAKQKIIEMRFGTYEASYDNLPRLLSVIQQRNPGTSCALKTFPSIEHPGKTVLQRAFLALHACKMAFVHCRPVLCIDGTFLTGKYRGQILTAIGVDGNNQVLPLAFAFVESENTDSWYWFLHLVKTEVVGMRPNVCLIHDRHAGMLRAIEELKFGTMERGYPGQWEDVQSRWCMRHMGANFFKQFKNKELMNMFKRLCNQNQEKKFNELWKRLDELTGKCSDQRATRPAAAVPDPPQALGALPTDSVTLVRRTGEQIRKFSQWIENEPKEKWAKTYDTGGARYGIMTTNLAEVYNWVMRGVRGLPLVGIVEFILHGTCKYFRERFQAVFPSMPNNNILFGTFMEKKLAEWRAKAMKHRALVQGTQQHRFEAVECNRVVVDATTAIQRLGAGIEVGADEHLSTYTRIRDSMRSVLRALTCRAADVAQADAAPQVRPRPTAPRPAAHVPMPTPPPFGGXRSAWDDAGRPLLAGCGVIVTGRCVGLAVCAVLAGRRDFVTAARHVLAGSYRDFVRARLGGAPPVHTQEQSPSTPLPDPRATRAVPPDRFTYSQDHVRAQARRTKRGRGASHGQ

SEQ ID NO: 190324 - protein, 509 aa, Oryza sativa
  Clone ID: PAT_MRT4530_86750C.1.pep
RLNKCLSCPSLLDLDAVHSTVPRIMPWDFPCKLSETIYMEIDKTIVTAEQKKKQMEVSEFEGLELQIMTPLTKGRSAGKTRKPKKSKLKHGRSADCNDASPCKNDLDDFHDSPDIPLPSNHQRMRNRRGVVLFAESDDDLADAHAAKDATFTVQEGRLLPQSSELPCLYGHGISNIVPESVFFQQSSVPHLHREVISNQLCFPSESRAFEPASSFQNQLESNMPGSISQICDTFMSQGISCVPESSFMVGGTSASISSDDLLSSLVSNGLSALRNESTYTASVVALEDTNKVENQMTDKPQKCMEDEVGETCEAYVELADRNDHASCSITGYQLMDECSRAESVWLLSGKKNNDSCKVEHVQDTWNRLRQCHPVLPCDMNHNRSVSGALKRVSRVSDLISESDLMLISCHPFSNDISDPSLTPYTESDGFSYSKQLEMGSIYAQHGLCIFLQDSQATDDGFVDFLQELLFSGTTTTSLGKFVSSGISCGDGSGNISHVKYPTSCISKRR

SEQ ID NO: 190325 - protein, 140 aa, Oryza sativa
  unsure (1)..(140): unsure at all Xaa locations
  Clone ID: PAT_MRT4530_86751C.1.pep
THTKGVPYXAGKDQVAGCAKHLGADGGTHHGIXENNTITXDNMRLLGIHMPSYDDSIIEGVATCIVYYSSXNGANMHASHDLDAGYLEXRSHFKGAAILNXLRIDRITCPPDAXFTYSVQAGINAGIDMVMVPFXYTQYI

SEQ ID NO: 190326 - protein, 94 aa, Oryza sativa
  unsure (1)..(94): unsure at all Xaa locations
  Clone ID: PAT_MRT4530_86752C.1.pep
IEEGDRRHLLQLRPPASIFDSCHFGEPLFDSSRTNHPCNLTTLVHAVLLQLIVPFELSSFTRGRTPSPSGSASRRCCQDLDNPRXTHSEHPGDL

SEQ ID NO: 190327 - protein, 366 aa, Oryza sativa
  Clone ID: PAT_MRT4530_86753C.1.pep
MAVAVAAGEISDDGGDQPSPSPSPSASCARRPVVFAFGDSNTDTGGIAAGMGYYFPLPEGRAFFRRATGRLCDGRLVIDHLCESLNMSYLSPYLEPLGTDFTNGANFAISGAATAPRNAAFSLHIQVQQFIHFKQRSLELASRGEAVPVDADGFRNALYLIDIGQNDLSAAFSAGGLPYDDVVRQRFPAILSEIKDAIQSLYYNGAKNLWIHGTGPLGCLPQKLAVPRADDGDLDPSGCLKTLNAGAYEFNSQLSSICDQLSSQLRGATIVFTDILAIKYDLIANHSSYGFEEPLMACCGHGGPPYNYDFNVSCLGAGYRVCEDGSKFVSWDGVHYTDAANAVVAGKILSADYSRPKLPFSYFCSA

SEQ ID NO: 190328 - protein, 42 aa, Oryza sativa
  Clone ID: PAT_MRT4530_86754C.1.pep
IPQINITSSFNKTSCERPAKTKGSLQLMKLYWSSSQRVRLIF

SEQ ID NO: 190329 - protein, 75 aa, Oryza sativa
  Clone ID: PAT_MRT4530_86755C.1.pep
NSKIKNKNLKRCVHINMGSYKLSLCEKQAYARYNRVCNSLICKTKILNNYKSLSLLLILSTCIKYSANSTIADEV

SEQ ID NO: 190330 - protein, 77 aa, Oryza sativa
  unsure (1)..(77): unsure at all Xaa locations
  Clone ID: PAT_MRT4530_86756C.1.pep
XPXVXCXKKQXXXVXLAHXXWTXXKSLDPXRXXXPXGLKKNGXXLPKXIKXTXXXXKLXXKTTGXXQCXRXXXXDEV

SEQ ID NO: 190331 - protein, 401 aa, Oryza sativa
  Clone ID: PAT_MRT4530_86757C.1.pep
MGAYEATKVVFARLQALEPNLAPNIIGMLLTKDNNEMDMIHLACGPDNLLQSIIAKVRTDLTNKPSPPMASWGFPSDIGEEASFSIDKVGCDGGEEFSSKEYDWKLPIGGNHHRSFLSSTVNTPGWKPCLYYQSGMTTHLGSDDMQEYSSRPPQIDQSDLTNNCSARQIYLTFPPDSIFSKEDVCNYFSMYGMVQDVRIPYQEKRMFGFVTFAYQKTVKLILAKGNPHYICDARVLVKPYKEKDKVPNKKFQQSDSPSYMNHNRLLYSRVPFDLRRHQIDNKLKNEFAMREIASTAISTEAKRTVISTEEGKREYGPKAATPNDACGFLESGMEYNLPHSPFSSPTKASNVAATAHTSNISSSSSPHKVASSLFLPTCTLELPPTTHASFKRQGKALTDHT

SEQ ID NO: 190332 - protein, 480 aa, Oryza sativa
  Clone ID: PAT_MRT4530_86758C.1.pep
MGAYEATKVVFARLQALEPNLAPNIIGMLLTKDNNEMDMIRLACGPDNLLQSIIAKVRTDLTNKPSPPMASWGFPSDIGEEASFSVDKVGCDGGEEFSSKEYDWRLPIGGNHHRSFLSSTVDTLGWKPCLYSQSGVTTHLGSDDMQEYSSRPPQIDQSDLTNNCSARQIYLTFPPDSIFSKEDVCNYFSMYGMVQDVRIPYQEKCMFGFVTFAYQKTVKLILAKGNPHYICDARVLVKPYKEKDKVPNKFRHVNHCLIPLRIFAHILPFECYIVLGPRILYRDIASHEASFRMKQDEQQHATELQRCCLMRLPLLNLQDWGHHLSSPMGSHVLLGQVDNKYNINENDNPTHLEDVTFRDNKLKNEFAMREIASTAISTAAKRTVISTEEGKREYGPKAATPNDACGFLESGMEYNLPHSPFSSPTKASNVAATAHTSNISSSSSPHKVASSLFPPTCTLELPPTTHASFKRQGKALTDHT

SEQ ID NO: 190333 - protein, 60 aa, Oryza sativa
  unsure (1)..(60): unsure at all Xaa locations
  Clone ID: PAT_MRT4530_86759C.1.pep
TGRHTTNSHLEGGKNSYHQLTNRSESQSITCCXLYKWSSRISNHTAFEYGNCVSVSWSCT

SEQ ID NO: 190334 - protein, 200 aa, Oryza sativa
  Clone ID: PAT_MRT4530_8675C.1.pep
MGMKAERSSPAISRGRLLSWEEEEEKNVVSSSSLRSPAFLLRVLLLERRFFSFVYEQKLREGRTGRFSRRAAPGRGRRDASHAELRLVSRPVENEEIILQVKVLPGSRKGTKITLPYEGSHFYGQPPHDLILTLDIAPHETYILYGNDLVVHWVLRLVDALAKCTINLKTLDGRYLKIKVDEVVYPGYELDDNSIQSDRF

SEQ ID NO: 190335 - protein, 106 aa, Oryza sativa
  Clone ID: PAT_MRT4530_86760C.1.pep
MGIGHVLGVLGGALLAHAAYATIQYRAVLKITEEEFSSPPMDVMMQLLLGLALCMWAGLAVPAKFLSVLPHSEENRIVSLPANLDFMIFNHRGRALPSDPDLKLKT

SEQ ID NO: 190336 - protein, 197 aa, Oryza sativa
  unsure (1)..(197): unsure at all Xaa locations
  Clone ID: PAT_MRT4530_86761C.1.pep
MRECISIHMGQAGIQVGNACWELYSLEHGMQPDGQRPGDKTVGGGEDASNTFFSDTGAGKHVPRAALVDLEPTVIDEVRTGDYRQLCHPEQLISGMEDAGNNFGRGHYTIGKDIVGLRLDRMKKLADNXTGLQGLLVANAVGGRTGSALGSLLLERLSVDYGKKSNLGFTVYPSAQGXTSVGEPYNSGLLTHXLLEH

SEQ ID NO: 190337 - protein, 74 aa, Oryza sativa
  Clone ID: PAT_MRT4530_86762C.1.pep
PSLAMTLHLLGCSAGSTFSATRNADFLALSLPYTCNCFHRSCNESLRLAYAYPLVRYSINSHTAVYGFAVIWQY

SEQ ID NO: 190338 - protein, 194 aa, Oryza sativa
  unsure (1)..(194): unsure at all Xaa locations
  Clone ID: PAT_MRT4530_86763C.1.pep
MRSSAQLPPSLSSAAATGDTEQRRVTRRQRRWGMRSSARLPLSLSVSYARGGRGCETRRRRRRRQMRRAAAGARAARGEARRRRRRRRRAAARGGERGGIGGEAVGGGTTSAAGGASATCGTRSMAAAASSSXPPSVRPAMLPPPCPAAPRHPLLPSPRPAPPPPPRPVVPRRCPPSFTLLLIVFLLYGLYMGS

SEQ ID NO: 190339 - protein, 105 aa, Oryza sativa
  unsure (1)..(105): unsure at all Xaa locations
  Clone ID: PAT_MRT4530_86764C.1.pep
MESDEDAKKGYADFEERVKRTIYIDHLSPXLTSSVIEAAISQCARVVNVDFIVNYTIPYDIPSAALVELDDEIQAKAAIDLMNNFPFILGGXPMPVRAIYVLSEM

SEQ ID NO: 190340 - protein, 371 aa, Oryza sativa
  Clone ID: PAT_MRT4530_86765C.1.pep
MANSGEKVHGRVVDEEVKPISPPPRKEEEEEEPISPPQPLKREIWQEKASAFSSVVVVLGDDNGANAPPLLLRRRRLVPPPPPCSPSHLLAGDAGLPRTPERRGAIEEGGGGDTGGGKGDIGEEFASLLLPSYPTEAHALEVVVCVIWELRFGLPMESDEDAKKGYADFEERVKRTIYIDHLSPQVTSSVIEAAISQCARVVNVDFIVNYTIPYDIPSAALVELDDEIQAKAAIDLMNNFPFIIGGKPRPVRAIYAKHEMFLDRPPRPGIKKEFQWVKQEDGIEYEGMNKLRLLARRQETENMALIKIACEKIFSFGCSLPQNLLEEDKDLAKQQQELLDGIYKKYCILDSDVMNDIKNLSRRYGVNLAGD

SEQ ID NO: 190341 - protein, 95 aa, Oryza sativa
  Clone ID: PAT_MRT4530_86766C.1.pep
AWRDILFFFQPSLDSFLIEFRLLTHTIQASHTTPAFINSNTQAAATFKTTHTVALALASSIQHQQAPPWDFPLHVPMWSKVFTQCSFNHPYLWGR

SEQ ID NO: 190342 - protein, 209 aa, Oryza sativa
  unsure (1)..(209): unsure at all Xaa locations
  Clone ID: PAT_MRT4530_86767C.1.pep
MHAHESACSWFAPRLVADDSNVARLGAAPMRMGLSPGANRASRRRAPPFALESLXVVDEEVKPISPPPRKEEEEEEPISPPQPLKREIWQEKASAFSSVGSSSSGKSGGAESRGRRRGGHRRRRWQRPALLILDAMSMPPAGGGGARRRQRRQRPSLAPASSPPCSPAAALLSFPPVGWRRWLFPNSGPKSYTLPVAVCFCGLFCLGQS

SEQ ID NO: 190343 - protein, 38 aa, Oryza sativa
  Clone ID: PAT_MRT4530_86768C.1.pep
DKRTIQHLSPNNQANDATISRLKSCHFYYDELNTCCIR

SEQ ID NO: 190344 - protein, 226 aa, Oryza sativa
  unsure (1)..(226): unsure at all Xaa locations
  Clone ID: PAT_MRT4530_86769C.1.pep
DTKGWEFKNKFKEKGDDDHKKKYRLTRWDMICQPKDQGGLGVHNLEIQNQCLLSEWLFKLINEQGVWQDSLKRKYFNNQSLTQVERKYGDSHFWSDLMKVKYSFLTMGSWIVNNGEQVRFXEDKWVGNHSFKYRYPSLYAIVXGRNSSVANAMHSVPLNVSFRRVLVGQNLTNWHNFCASIVQIHLTENNDFFRWNLHQNGQFSVRSMYLALINNGYIERNKFNWK

SEQ ID NO: 190345 - protein, 69 aa, Oryza sativa
  unsure (1)..(69): unsure at all Xaa locations
  Clone ID: PAT_MRT4530_8676C.1.pep
GTXXXPXXTSGKPXPELRXDVHVGAXHRXSRRCQLLXLSRYRVSSPQIXLPSLLSLSLYGDWRFLXXCG

SEQ ID NO: 190346 - protein, 356 aa, Oryza sativa
  unsure (1)..(356): unsure at all Xaa locations
  Clone ID: PAT_MRT4530_86770C.1.pep
WFGLTAADGPPGCSXKRGPAAAAAPAAPQQKESATTPGGTRKKRMXAXTGXQSXERGPNXRAFGLSPKGGRXRPXXRRRNKTGDDAGSARERRTKQDGPPTSPEGPATTRGNRTRTXAPTPQARQASGHETNTPKGERNKQQQDGRTAPRQHQRKRRHPEGGPRDKQAPPRANQTPPPATTGEEKTREKQGQPRGNPRERRRDRSPRKRGERKEKNPQHGRPQSTNHENANDTRHREPGGTPDNEEGEGRTRKRRGEEAPARGGPTAEKGRPDDERRATDAPTAHAAAQEGGKRRHNRARRERERADGEGGRNTRATSPSAATTAGATAATPERKTKRGTGRTDRTPRRQGKTGRT

SEQ ID NO: 190347 - protein, 59 aa, Oryza sativa
  Clone ID: PAT_MRT4530_86771C.1.pep
NKNCKLGNMIMLSHGLWWLLYEERTSSILSMVYTYRSNSGRFELRIELRLVHLCGVRRQ

SEQ ID NO: 190348 - protein, 82 aa, Oryza sativa
  Clone ID: PAT_MRT4530_86772C.1.pep
RTNCVGMGTNLCKIPCQKFIQNSLGKKVYMFPNFENMSCEIKFGQQPPENDPALKQPCFRTKWVAKKNNGVNCPICFERNYQ

SEQ ID NO: 190349 - protein, 112 aa, Oryza sativa
  Clone ID: PAT_MRT4530_86773C.1.pep
MANDKGALHDLMGPAQQPTSLRDQDHTQFRSPNPRISPAAPGRTLKGGPHSRLLERVTSRQLARQVGGAFVIFEVLSIAGVVIVASPLRGKAQHPQECRATPGRGQGPPRPH

SEQ ID NO: 190350 - protein, 104 aa, Oryza sativa
  Clone ID: PAT_MRT4530_86774C.1.pep
MDPASRSLSIIFFLVAVTFVVEVSGQKNEAVYHLFGGEGSLTKNECPGKCSYRCSATSHTTVCMTYCNYCCERCLCVPSGTYGNKEECPCYNNMKTQEGKPKCP

SEQ ID NO: 190351 - protein, 710 aa, Oryza sativa
  Clone ID: PAT_MRT4530_86775C.1.pep
MAAKSDDHSLPPGFGTRPWLVQGSRGDTLTFVDVSDLSLHETVVPEVRGKTCLGGMHGDWLLMLHESTADCFLLRISTNPRTKIQLPPLHQPLNFLSTIKMLESPDSPKCTILIASSPEVEEESYLLYCRPGEDEWTKLVSPFNDIHLSAFMCNYEGKICSACSNLVVIDMVDGKIQLQRVGTIKDEEKYARGSGCYHVVESCGKLFLLWIEELGCFGNDGLLTAIDVFCLDLELMSWERVESIGSDRTFLISENYTFSCPSIEGVLQGNCVYLVWSSCDSERLYKFCLDDMTISFQQILSQPTKPWCRAFWTVPASIESILPMEISDKPNSLLSTKLSKDILLNDLDEHDGLGNSLCLWEHLPVDLLELIVSNLSLVDRIRFPTVCMAWSKVSNPIEQAKVWPWLMHISKQDGMCRLFDPLRGEVYNMQVSIFDTNEDRHIFRSSKDGWVFTSAGIYGHDIFIINPFTEDIVEPPMFERRYHYNGVSFSSPNPMCPNCYFFGINSSLSGKFLNIHTWRHEETEWIEQRFEYDVPFPVGYNNPVMFCGKFYCLGRKGNLGAFDPTSNTWEILDKPEPIHVEMDLLQNDHRGREFCYLVDLEGELISVLLHNASEAPRVFKLDLTKMSWVEVEDIGGGALFLDHRTSHGVGSPDGGHGNRIYFPRYSVDRKPVFYDMDNKMYYPSFYGHIEPLNCVWVVPNLHKNESTSED

SEQ ID NO: 190352 - protein, 64 aa, Oryza sativa
  Clone ID: PAT_MRT4530_86776C.1.pep
MASIDRASATCQSSPGRRDRVQCLHLGSQRERWPATSNHFGGRGSRRSSREDGGEVHGGCRLDG

SEQ ID NO: 190353 - protein, 442 aa, Oryza sativa
  Clone ID: PAT_MRT4530_86777C.1.pep
MAITVRRSTMVRPAWETPRVRLWNSNLDLVVPRFHTPSVYFYRRGPEGGGAPEGFFDGERMRRALAEALVPFYPMAGRLARDEDGRVEIDCNGEGVLFVEADAPDASVDDYGDFAPTMELKRLIPAVDYTDDISSFSLLVLQVTYFKCGGVSLGVGMQHHVADGMSGLHFINSWSDLCRGTQIAIMPFIDRTLLRARDPPTPSYPHVEYQPAPAMLSSVPQSVTANKTTPPPTAVDIFKLTRSDLGRLRSQLPSGEGAPRFSTYAVLAAHVWRCVSLARGLPSEQPTKLYCATDGRQRLQPPLPEGYFGNVIFTATPLAEAGKVTSGLADGAAVIQEALDRMNDSYCRSALDYLELQPDLSALVRGAHTFRCPNLGLTSWVRLPIHDADFGWGRPVFMGPGGIAYEGLAFVLPSANKDGSLSIAISLQAEHMEKFRKLIFEV

SEQ ID NO: 190354 - protein, 1567 aa, Oryza sativa
  unsure (1)..(1567): unsure at all Xaa locations
  Clone ID: PAT_MRT4530_86778C.1.pep
MAPKKKQQQQAPKQKQKPKHSSTSSSSSSAGGGAASAAPRLQISSENERRLRRLLLNSGATAAPAPAPADAPAARAESREQKARRLRGVYDKLSLEGFSSAQIEQALSALSDSATFESALDWLCFNLPGDELPLKFSSGTASSSGAGPLGTEGSVKVVSTAKDNWVPQSRESEEVQGSNERLEIIISRRREEDVTLDDGQSSQAAWIRQYMEQQEEEDDVNSNDSYTWEDHCPPSLETAEAKPSRRKKKGKQAKSSSGNSKEDLSSSDNVFPNSDIANAEGDLVDSGATGKKCESPVHMDGGSSLEKKMSKDVDETSTKEVEEEEVELDNLFFEDSSAWEAVAPEILKQQKIEKLSHDGYGHLLGNIDDIWKKGDSGKMPKAVLQKFCQKLGWEAPKYSKISEKDRKFIYAVNVLRGSTGRGKSRKAGGLTKVELTEQDKEYASVEEAQNRVAAFALYQFFADLSLRQLLIEPYASLVLRWQEGELSSSSSRVMDTEDSRRAGFVDKLLDMDANTTPHQVEDASDGATSVDSRSIEDSYSVHEKKETYLVNRTGSRSAEQVESTVLKKHLENKMKQSSYLKMLEARASLPISRFKDHFLQLLKENDVIVVCGETGCGKTTQVPQFILDDMIESELGGYCSIVCTQPRRIAAISVAERVSSERCESSPGSKDSLVGYQVRLDSARNERTKLLFCTTGILLRKLSGNNDLSDVTHVVVDEVHERTILGDFLLIVLKSLVEKRSNQPGRKLKVILMSATVDSSLFARYFXACPVINVEGRTHPVSSHFLEDVYEKMEYCLALDSPASGAYFQQHGEKWKNASSTVNNRRGKKNLVLSSWGDESVLTEDYVNPHYTTDCYQSYSERTNQNLKRLNEDVIDFDLLEDLICYIDENCPPGAVLVFLPGVAEIDMLIDRLSASVRFGRESSDWILPLHSLLAPTDQRKVFQSPPENIRKKMSSIVEDWISRANAKQRRGRAGRVKPGLCFCLYTRHRFEKMMRPFQVPEMLRMPLTELCLQIKSLHLGGIKSFLLKAIEPPKEEAISSAIDLLYQVGAFEGHEELSPLGYHLAKLPVDVLIGKMMLYGAIFGCLSPILSVAAFLSYKSPFISPKDEKQNVEKAKASLMNENLDGSASTADNKQSDHLLMVIAYNKWSRILRENGARSAHQFCRSFYLNSTVMYMVRRTAPRPPTPHPPGASHTGALPSGGGQHLTARAPVAITGCEWLGAQPASGSITVGVSALVLTPIQAIRLARPFHRVLADAPAVAVPTDVEGTMNLGLCGGRMRNGPTVLGKRSEGSQLFYTHKGSLTRPPGFCYSLSLFLPYLLKSTHFGAVFHEIFWANRRARDMRLQYGTLLADIGLLDIPKDSLRPVDGTRKNTLESWFANMSLPFNLYARYSSVVKSVICAGLYPNVAATLEGVDPGALGGRKPSDFLSGKDRPRWYDGRREVHIHPSSMNHSLKAGQYPFLVFLEKVETSKVFLRDTSVISPYSLLLFGGTMVIQHQTGVVIIDGWLRLAAAAQTAVLFKQLRVTLDAVLKELIRKPEMATFVDNEVVRSIIHLLLEEEKAQQA

SEQ ID NO: 190355 - protein, 97 aa, Oryza sativa
  unsure (1)..(97): unsure at all Xaa locations
  Clone ID: PAT_MRT4530_86779C.1.pep
FFFFFFLGYGVYQVHQGHGNQVRDTVVFLHXPGFITIPHNTKTHISSPQTNTPLQAHTSVHQSXIQKAPGVWVQWYPHIYHYIYEGSHRHVSHTVGQ

SEQ ID NO: 190356 - protein, 1929 aa, Oryza sativa
  Clone ID: PAT_MRT4530_8677C.1.pep
MDDGEGPSAEVNEIEVDQVNAPEEDGVAPVVAPVGMQPGGVADEGETVGAIVDEMEKEDSDNERVEEDDSSDDDENNINPAEWASDDFSGLVISEGENVRWEYKENEIIEGARYGNGEDMKEAVKHYAVSLHREFWVAKSNRTQYEVRNITCAFVASEMYAHVVDNLAYEPKSIIRHIEQTFKYTISYAKAWRAKQKIIEMRFGTYEASYDNLPRLLSVIQQRNPGTSCALKTFPSIEHPGKTVLQRAFLALHACKMAFVHCRPVLCIDGTFLTGKYRGQILTAIGVDGNNQVLPLAFAFVESENTDSWYWFLHLVKTEVVGMRPNVCLIHDRHAGMLRAIEELKFGTMERGYPGQWEDVQSRWCMRHMGANFFKQFKNKELMNMFKRLCNQNQEKKFNELWKRLDELTGKCSDQRATRPAAAVPDPPQALGALPTDSVTLVRRTGEQIRKFSQWIENEPKEKWAKTYDTGGARYGIMTTNLAEVYNWVMRGVRGLPLVGIVEFILHGTCKYFRERFQAVFPSMPNNNILFGTFMEKKLAEWRAKAMKHRALVQGTQQHRFEVLCQDKAGRGIYRKRVKQECVLKDDGTCHCSCRKPTLLHRPCTHVISAASECGIQDAVYVSQYFSKQAIYHTWSGEIFGFGVAGEFTKINDLIIYIPDPTKLRDKAGRRKTRRIRNDMDESEAGRVKRCSKCDERGHTYKYCPKDKEKPSAAEAEMAHPELLDPAIDQRHRSYLTAVEGAQLGTFRPRSSRERLLVHDSFVERLREAGLLPLARLVEAATGDDDVTRRWDPDRSLLAALVDRWRPETHTFHLPCGEVAPTLQDVSYLLGLPLAGDAVGPVDMGVDWKDELTARFAPVQRLPGLPLEPLQQHRNTGPTKRWLLQFTVDQLPEEADEYSFSRCLEAYLLWLFGWVMFCGSHGHSVDRGLVHYARSIADAAVGEVPQWSWGSALLAAQYRGLCEACTRTDPGAIFGGCPLFISLWAAERIAIGRPLVEHHPYDASLYENRPAVDYPTMGTLWCRRQRRWAHVQVRRSYAEFVMEFDRLLPTDVVWEPYSALLTHSRAPLGLSTLCTRDQAYWMTTVPMVFDICVEPHAPYRVMRQFGFRQSFPVPFPAGVTAAVHRYSRKGQHSAGHWPAKLGPFLDDWLLATEEVVDHAGEPHTEEGYEAYLRWYQPHTRTRVTYAPTEQQAHAASARDLYARHRDQDFARAAVECNRVVVDATTAIQRLGAGIEVGADEHLSTYTRIRDSMRSVLRALTCRAADVAQADAAPQVRPRPTAPRPAAHVPTPTPPPFGGFAQPGTTPGAHSWQAAGSSSQAGVSASLSAQFWQDAGTSSQPPGTSWQGPTGTSSEHGWASATHFDISDFDFPDIIGPSQLGGAPPVHTQEQSPSTPLPDPRATRAVPPDRFTEEAAALAEGGKPSAPRGPCAPSRRTRRRVPRRLAALAKGGRPKQIHEIKDFLLTARRKDARSVRIKRSKDAVKFKVRCSRYLYTLCVHDTDKANKLKQSLPPGLTVQETDLKLQYSDMEDAKTRGTGDVAFSQWLRESCGPGKSWSTVDFSKSTSSCDVALHLAASHWESSSEAYSRATTTLRRRRAADTATAMGRLRRGGVGLLRGAVVLASLLLVVSGEVIFEERFDDDWGSRWVKSDWKKSEGKAGTFKHTAGSYSGDPDDRGIQTTSDAKHFAISAKFPEFSNKNRTLVVQYSIKIEQDIECGGAYIKLMSGYVNQKKFGGDTPYRPDASYSLLVDNREREFGSMYTDWDILPPRKIKESNAKKPKDWDDREYIEDPDEVKPEGYDSIPKEIPDPKDKKPESWDDDDDGVWKPRMIPNPEYKGRWKRKKIKNPNYKGKWKIPWIDNPGGMQVKAGSVFDNILICDDPEYARSVVDEVRAANKEAEKEAFEEAEKRRKAREDEGHHRRYDYHDEL

SEQ ID NO: 190357 - protein, 45 aa, Oryza sativa
  Clone ID: PAT_MRT4530_86780C.1.pep
GGGWLARRASPGERSTRREERERGEAHSVAFFPTLPSLSTSALSA

SEQ ID NO: 190358 - protein, 88 aa, Oryza sativa
  unsure (1)..(88): unsure at all Xaa locations
  Clone ID: PAT_MRT4530_86781C.1.pep
IKFRLPXITSYSFPIPIHCNLRLYPCIQLSILYQTSVDNKTKTVSACSCPPAIAARPVNLSRLATSNPSSFLKGLLRAQTLTSFFPRI

SEQ ID NO: 190359 - protein, 57 aa, Oryza sativa
  Clone ID: PAT_MRT4530_86782C.1.pep
MAHSKAKWRVSRMLVGVARFPVLSVLVIVIAHATAHVVARDDIEVVASGQAHLVLHL

SEQ ID NO: 190360 - protein, 129 aa, Oryza sativa
  Clone ID: PAT_MRT4530_86783C.1.pep
MPHVGGFGLRPANTARLRRFRRGLGAFAFVRRRLIRCRLVFPHGWLVTPLFMGVHVFTDRLDFTAADWCLRHRSWASTSSPTGWISPPSTGVSAPPFIGVHVFTDRLAFAAADCCLCLYGWPIMPLLVG

SEQ ID NO: 190361 - protein, 167 aa, Oryza sativa
  unsure (1)..(167): unsure at all Xaa locations
  Clone ID: PAT_MRT4530_86784C.1.pep
MPHVGGFGLRPANTARLRRFRRGLGAFAFVRRRLIRCRLVFPPAQLAYYAVVYGRPRLHXRLAFVTADWCSRLHGWLVTPLFMGVHVFTDRLDFTAADWCLRLHGWPIMPSLLGVYDFTVGLPSSPPTGVLAYTVGWSHHRSWASTSSPTGWISPPSTGVSAYMAGL

SEQ ID NO: 190362 - protein, 259 aa, Oryza sativa
  Clone ID: PAT_MRT4530_86785C.1.pep
MGSGRWRGVGRGRRRGGWGRPRAREAGELSGFPVPLVGPASFLFTWCQSEHTIFARVLAVGLLAYGRGCGGGPGLMTGDAGASEPSVSAVWARWMDEDGEDCHRWRRSYDSCGGWRRKSWHSTASSTCGRKKERKKREKQERIMTGGRRPDRTEVASVDDDEACELVSSTDLVIGGEGVRSYLLRLPCWPQLRATIFDRTRGTRRPASSRRHRPHHPQAAGRARRRLCESRGERKEGRKEGEKQRKRRGEKRVVADVAS

SEQ ID NO: 190363 - protein, 239 aa, Oryza sativa
  unsure (1)..(239): unsure at all Xaa locations
  Clone ID: PAT_MRT4530_86786C.1.pep
GSLLSGGGSVPRKQATAAEWVSMVSDFQKGSLSTRLGIPMIYGIDAVHGHNNVYGATIFPHNVALGATRDPNLVKRIGAATALEVRATGIQYAFAPCIAVCRDPRWGRCYESYSEDHRIVQAMTELIPGLQGDVPANFTSGMPYVAGKNNVAACAKHFVGDGGTQNGVNEDNTIIDRRGLMTIHMPAYLNALQKGVSTVMISYSSWNGIKMHAHHDLVTRYLXDRLNFKAFTISDWEGI

SEQ ID NO: 190364 - protein, 707 aa, Oryza sativa
  Clone ID: PAT_MRT4530_86787C.1.pep
MAGNGGGGGGRRHCSGVLESLEGCFTGFLIVLLEWHAQVRRRLLPLLRRQRMAVLAAPVVAAVLLLTWAAYGEAQYVLYKDATKPVEARVTDLLARMTLAEKIGQMTQIERQVASPQVLKDYFIGSLLSGGGSVPRKQATAAEWVSMVSDFQKGSLSTRLGIPMIYGIDAVHGHNNVYGATIFPHNVALGATRQAALLSPRFAKLLPFFTNREIRFCLMFLSRDPNLVKRIGAATALEVRATGIQYAFAPCIAVCRDPRWGRCYESYSEDHRIVQAMTELIPGLQGDVPANFTSGMPYVAGKNNVAACAKHFVGDGGTQNGVNEDNTIIDRRGLMTIHMPAYLNALQKGVSTVMISYSSWNGIKMHANHDLVTRYLKDRLNFKGFTISDWEGIDRITTPAGSNYSYSVQAGVLAGIDMIMVPNNYQSFISILTSHVNNGIIPMSRIDDAVTRILRVKFTMGLFENPMPDSSMADQLGKKEHRDLAREAVRKSLVLLKNGKTSDKPMLPLSKKAPKILVAGSHADNLGYQCGGWTIEWQGDTGRITVGMTILDAVKAAVDPSTTVVFAENPDADFVKNGGFSYAIVVVGEHPYTETKGDSLNLTIPDPGPSTVATVCGAAQCATVLISGRPVVVQPFLGAMDALVAAWLPGTEGQGVTDVLFGDYGFTGKLPRTWFKSVDQLPMNYGDAHYDPLFPLGFGLTTQPRTY

SEQ ID NO: 190365 - protein, 111 aa, Oryza sativa
  unsure (1)..(111): unsure at all Xaa locations
  Clone ID: PAT_MRT4530_86788C.1.pep
GSVPXKHXYXWNVXYXXCTXRXAXXIDHRKLXXRSXTQPYWPXALTSNDKKEIXXGSVTXIXPGASWLDQXPXFXGVIWKFLVAXGIXSXVRXSLXXRAEFGXRRXESCXK

SEQ ID NO: 190366 - protein, 266 aa, Oryza sativa
  unsure (1)..(266): unsure at all Xaa locations
  Clone ID: PAT_MRT4530_86789C.1.pep
MCIAAWVWQAHPQHQLLLLLNRDEFHSRPTKAVGWWGEGSKKILGGRDVLGGGTWMGCTKDGRLAFLTNVLEPDAMPGARTRGDLPLRFLQSNKSPLEVATEVAKEADEYNGFNLVLADLTTNVMVYVSNRPKGQPATIQLVSPGLHVLSNARLDSPWQKAIRLGKNFREHLRKHGDDEVEAKDIVERLMTDTTKADKDRLPNTGCDPNWEHGLSSIFIEVQTDQGLYGTRSTAXLSVNYDGEASLYEKYLESGIWKDHTVHYQIE

SEQ ID NO: 190367 - protein, 526 aa, Oryza sativa
  Clone ID: PAT_MRT4530_8678C.1.pep
MAGQRRSGPNVGYTAHGDAFLLRVLLLERRFFSFVYEQKLREGRTGRFSRRAAPGRGRRDASHAELRLVSSMLSQGYDIMKDDIGTSYGDLPDHKYFISVREFTTSAMEYIDSTRCSLLGEYKKLNVWIVKERIKCCVRSMAVELFNQHEEGNYSMDQIPEDWRSLMSLMLHNPHEHGYLICNYAPLIPIENRILFYFKAYEHMRFVLAYTNDAAYRDILKKLPYQNRWFQITEGNYLLEASLKHKNYGVDDNPEKAHDPETFFKYYRHSNCHRLDRCFMIEEVGGYSAEQFELIFIVKYPLFLPLLQQELQRYNQLRCLKPHTLFFYGNIQDAEQSCAMIYHDQLDNPQATVGELMCTLEELYQGTDLTVALHRRITRHTDEPVENEEIILQVKVLPGSRKGTKITLPYEGSHFYGQPPHDLILTLDIAPHETYILYGNDLVVHWVLRLVDALAKCTINLKTLDGRYLKIKVDEVVYPGYELVIKDEGWPIGEGLKGNLRIIFDVSFPKTLSGRQQHSIRQVLDQ

SEQ ID NO: 190368 - protein, 166 aa, Oryza sativa
  unsure (1)..(166): unsure at all Xaa locations
  Clone ID: PAT_MRT4530_86790C.1.pep
WMYTVDRWSKEFIDGMHYFFSVANAHKPKGFIYCPCKKCKNXKEHSTSRPLRVHLLESRFMPSYNYWTSHGELGVAMKEDEEEDNNIPDWAQYDGFAENPTGEVDGAVAENDGADDLDHMLCDVXRNTESEKDVXKLERILADHKTSLYPSYEHGHKRLGTTLKYL

SEQ ID NO: 190369 - protein, 110 aa, Oryza sativa
  Clone ID: PAT_MRT4530_86791C.1.pep
MVLTTTTNDERRRPATRRMAAAARVSGDGGAPVAGGEGGGAAEVPHLRAHLTAATASGGDGGGDGATRPKTAGGGGGLGTRGGGSTMHGRAREREQTKEDDERKLYKASD

SEQ ID NO: 190370 - protein, 123 aa, Oryza sativa
  Clone ID: PAT_MRT4530_86792C.1.pep
KIEIKNHIPILISPSNSMSTYRLGHGGSEIKGTLRARASQPTYGMLLRLSPVTDSTTSSTTTTRKTMLTNHQRHRRGQPDWPPPPPPSQPLPHSIRFVAVNPRLLTPRPSLPPTTNPALSPSP

SEQ ID NO: 190371 - protein, 116 aa, Oryza sativa
  unsure (1)..(116): unsure at all Xaa locations
  Clone ID: PAT_MRT4530_86793C.1.pep
PTRPILYSSNEVAEEGYHVDAAHIPIAISDHGDLPDGVGPCQHMAIMDACAXAVSIIRQDGSIYSRSGDLDLAXQYYAHHAAAMGGRQESWIGRWNADQLRQRYLTFKHLLTAHVT

SEQ ID NO: 190372 - protein, 93 aa, Oryza sativa
  Clone ID: PAT_MRT4530_86794C.1.pep
SALSSLSTPTSSGREVSGLARARVRRLVRRQQHRLPVLEAHPGPFAFVSLSCSFIDDDAQRGVAARWFDLLVAKGIEFLVFVNLHRLMGAPRH

SEQ ID NO: 190373 - protein, 103 aa, Oryza sativa
  unsure (1)..(103): unsure at all Xaa locations
  Clone ID: PAT_MRT4530_86795C.1.pep
ENAILSTFGNINAHSXEYTIXGLTQVHFASNDGKVSINGAILPGQVLIIPQPYVVLKKALLTGFKFIALNTNLNAMGHHIAFKNSQLRTVPVDGIGKAYRIPG

SEQ ID NO: 190374 - protein, 114 aa, Oryza sativa
  Clone ID: PAT_MRT4530_86796C.1.pep
MAVVDGNNDARGLPPVGSALHGVIGLIATSDVDGGMLGAPGRKKKPKGKMVHDGISVMARLSDASLTSVSLTDEVTGASPSCVWAAPHTYGPPAATSFKHKRSESRESGRGGKG

SEQ ID NO: 190375 - protein, 73 aa, Oryza sativa
  Clone ID: PAT_MRT4530_86797C.1.pep
EERRGTSSSPPVGAEGRRERLTAGQSGGVARAKGRREQLTDGQAKWRREWKGGAAEGGRRRERPTKVCLILSP

SEQ ID NO: 190376 - protein, 148 aa, Oryza sativa
  unsure (1)..(148): unsure at all Xaa locations
  Clone ID: PAT_MRT4530_86798C.1.pep
MTARLVVERQRRWRSPGGGGLGLRRLWGCIWLARSNWRRGRRPARRRKAQREEVRPVAVEASLAPEARPVAGGRLGTMRRIRRWRRPMWHXRHCWWWRRRPRYEEELLVGVARSTAHDGWPAGAPVEGSHMSVEVGWWWSIGASAMDS

SEQ ID NO: 190377 - protein, 227 aa, Oryza sativa
  unsure (1)..(227): unsure at all Xaa locations
  Clone ID: PAT_MRT4530_86799C.1.pep
RRGWWWSDNGGGGAQEAEDWGCGGCGCGCCGDRGCGCGGRRHGGLGWLARGVADGCIWLARSXLEEGSKAGSAQKGTTXGGAAGSGGGQXAPEARPVAGGRLGTXGASGGGGDRCGTMRHCWWWRRRPRYEEELLVGVARSTAHDGWPAGXASGGVPHVGRGWVVVEHWCVSHGSHRSRVVAGRKPSLSSFETLMDGGGGFPSLLSLETSFRYPLVEITRAIGASTL

SEQ ID NO: 190378 - protein, 1585 aa, Oryza sativa
  Clone ID: PAT_MRT4530_8679C.1.pep
MSSKLIFQLYHGQGNVRYGPTGVDLSEFIVTARGIDRPAERSVPSIKKWLMRGLGVDPQTSDITIYVVVSRATEGFYWELMPVQNSGMWRWYVENALQRGWPLAMVPYVHPKDPSVQMNMDDGEGPSAEVNEIEVDQVNAPEEDGVAPVVAPVGMQPGGVADEGETVGAIVDEMEKEDRDNERVEEDDSSDDDENNINPAEWASDDFSGLVISEGENVRWEYKENEIIEGARYGNGEDMKEAVKHYAVSLHREFWVAKSNRTQYEVRCVNEKDGCPWRVHAYKGKWKDYWTVSVVTKHTCYLPGVQKYHRNITCAFVASEMYAHVVDNLAYEPKSIIRHIEQTFKYTISYAKAWRAKQKIIEMRFGTYEASYDNLPRLLSVIQQRNPGTSCALKTFPSIEHPGKTVLQRAFLALHACKMAFVHCRPVLCIDGTFLTGKYRGQILTAIGVDGNNQVLPLAFAFVESENTDSWYWFLHLVKTEVVGMRPNVCLIHDRHAGMLRAIEELKFGSMERGYPGQWEDVQSRWCMRHMGANFFKQFKNKELMNMFKRLCNQNQEKKFNELWKRLDELTGKCSDQRATRPAAAVPDPPQALGALPTDSVTLVRRTGEQIRKFSQWIENEPKEKWAKTYDTGGARYGIMTTNLAEVYNWVMRGVRGLPLVGIGEFILHGTCKYSRERFQAVFPSMPNNNILFGTFMEKKLAEWRAKAMKHRALVQGTQQHRFEVLCQDKAGRGIYRKRVKQECVLKDDGTCHCSCRKPTLLHRPCTHVISAASECGIQDAVYVSQYFSKQAIYHTWSGEIFGFGVAGEFTKINDPIIYIPDPTKLRDKAGRRKTRRIRNDMDESEAGRVKRCSKCDERGHTYKYCPKDKEKPSAAEAEMAHPELLDPAIDQRHRSYLTAVEGAQLGTFRPRSSRERLLVHDSFVERLREAGLLPLARLVEAATGDDDVTRRWDPDRSLLAALVDRWRPETHTFHLPCGEVAPTLQDVSYLLGLPLAGDAVGPVDMGVDWKDELTARFAPVQRLPGLPLEPLQQHRNTGPTKRWLLQFTVDQLPEEADEYSFSRCLEAYLLWLFGWVMFCGSHGHSVDRGLVHYARSIADAAVGEVPQWSWGSALLAAQYRGLCEACTRTDPGAIFGGCPLFISLWAPERIAIGRPLVEHHPYDASLYENRPAVDYPTMGTLWCRRQRRWAHVQVRRSYAEFVMEFDRLLPTDVVWEPYSALLTHSRAPLGLSTLCTRDQAYWMTTVPMVFDICVEPHAPYRVMRQFGFRQSFPVPFPAGVTAAVHRYSRKGQHSAGHWPAKLGPFLDDWLLATEEVVDHAGESHTEEGYEAYLRWYQPRTRTRVTYAPTEQQAHAASARDLYARHRDQDFARAAVECNRVVVDATTAIQRLGAGIEVGADEHLSTYTRIRDSMRSVLRALTCRAADVAQADAAPQASLSLGRRRAPTPGRLRGHRHRQDAGSSSQPGGTSVASASLAAQFWQDAGTSSQPPGTSWQGPTGTSSEHGWASATHFDLSDFDFPDIIGPSQLGGAPPVHTQEQSPSTPLPDPRATRAVPPDRFTYSQDHVRAQARRTKRGRGASHGQ

SEQ ID NO: 190379 - protein, 82 aa, Oryza sativa
  Clone ID: PAT_MRT4530_867C.1.pep
SSSEHAFVIIQGHHHASEEASLELWWLGASESPAEGLTIGLGQSGGLLQVVHSCPMNLLRGGRPQSHWLRMRLRLCKIVPNH

SEQ ID NO: 190380 - protein, 130 aa, Oryza sativa
  Clone ID: PAT_MRT4530_86800C.1.pep
AIAKDMAQRKVENMKQIAKKKANEERKRLESELELALMVEKLQELRSMRVQKMKKQGHFLPEEDDKYLERVKAAVEEEERQAASAARTDAAKDAILTAEESRKAVQCSNSREDDSDQAKKAPTLEQNQRD

SEQ ID NO: 190381 - protein, 434 aa, Oryza sativa
  Clone ID: PAT_MRT4530_86801C.1.pep
MFRPPGAFGVAPPPPPPQQQQHQPWQWQPPFQPPAATSFWQRDNVREHVGRLQETIELATAVINELEEIAQARNSVDASTQGPDSSSAKLSSEPDGSSADRPRHFVELARAMKISQDTHESLATDAANYLCSQIQNLLAPIYPAVNQGGPWEERYAMIRLAQKLQKSKRNKRWRKRKRKHVAELFQKEHADYDRIDQEADEWRARQIAKDMAQRKVENMKQIAKKKANEERKRLESEAWIIGFERLKSIMPSAICSVDGIGHFLPEEDDKYLERVKAAVEEEERQAASAARTDAAKDAILTAEESRKAVQCSNSREDDSDQAKSAPTLEQNQRDPGISGRNHHASQKTEHELHKDDSKGHGHYDSVSSLPFEFYHYYHGSSYDMGTLIEVRRMWDSFIRAGGSRIPGHWVQPPPPADEVWASYLVQPNCPSNST

SEQ ID NO: 190382 - protein, 121 aa, Oryza sativa
  unsure (1)..(121): unsure at all Xaa locations
  Clone ID: PAT_MRT4530_86802C.1.pep
AAGMAMALAEGAKAAAVVPTRRRRGARRRRRRXPQICASWPDLEGGRRWWSATAADLRRLATAVGDGSXVVVAAVGGDGVGXRRRWRTWRRRGGRRQRSGRWQWRLFAEAVAGVGGSGDSG

SEQ ID NO: 190383 - protein, 61 aa, Oryza sativa
  Clone ID: PAT_MRT4530_86803C.1.pep
LTISTIFADTIRDIFEYIKAGTFYPAYAIYSYWWVFGRSIRRGIHQSLDYYQPFPRLYFIS

SEQ ID NO: 190384 - protein, 86 aa, Oryza sativa
  unsure (1)..(86): unsure at all Xaa locations
  Clone ID: PAT_MRT4530_86804C.1.pep
FPLPKDTLLFSGPGYKGFPVSPVXKGVGFNARLPKVKGPFQKILGPLTLAFPKMFHVPGPPNFFSGFRVPPPPKVLAVPAEAFHLL

SEQ ID NO: 190385 - protein, 73 aa, Oryza sativa
  Clone ID: PAT_MRT4530_86805C.1.pep
MAVSCDAVTSMFDATGRRVRGSPDVCTGEVSGGRGCVYKRLLRQIRCEAAAEDAVGGAGARRDEKSGTGGTGA

SEQ ID NO: 190386 - protein, 80 aa, Oryza sativa
  Clone ID: PAT_MRT4530_86806C.1.pep
GIDLQRGDIEKTRRRELHARREPNWQMSPDEDFVCADDQEVQRYMRTKRLSHVELKIGRIGLGFHKRDTSRLQKVYKRTG

SEQ ID NO: 190387 - protein, 319 aa, Oryza sativa
  Clone ID: PAT_MRT4530_86807C.1.pep
MAPASVAVSLSFRVVPPRPCRRRARWPRPIRASSDGSGVANGDRKVGALERRVGDLRAVVASVPPAVAAIKKNIGLNFIAGFCLGITLLAAVARQVIIRIHERDNKGSVADLIRRGQLKSGQRGIAKPRVYDDPFNNPLVKIDEDTSTAQVFGKEYRLAPIRLTKEQQAMHQKRRSRTYQWKRPTVFLKEGDSLPPDVDPDTVRWIPVNHPFAAASTEVDEETAKQNVYQKDGVPSRVKAEHEALQTRLEASNNVNKFSSSQRNMQLSDRQLRLSSNESSGSRQNSLSGTVKNQNGQPTLESEKRSPDNNSQSKSLEEQ

SEQ ID NO: 190388 - protein, 129 aa, Oryza sativa
  Clone ID: PAT_MRT4530_86808C.1.pep
MGLLDKLWDDTVAGPRPDTGLGRLRKHAAARPAAVKINDPTGDAAMVAVPPTTPAGAEEAPVKVTRSIMIKRPAGYPASPRSAASTPPASPAGSTPPISPFAGAGEFPGFHTLSLSPNFWVRYGRGVVG

SEQ ID NO: 190389 - protein, 71 aa, Oryza sativa
  Clone ID: PAT_MRT4530_86809C.1.pep
SANYYRTERNKQLLHTKQTGRNEGGSSRRMTYTLSLPYKLDRHYKTKQPARTHTNSVNPNELHANELKGIG

SEQ ID NO: 190390 - protein, 90 aa, Oryza sativa
  Clone ID: PAT_MRT4530_8680C.1.pep
MGSSKEPAGLYRRPGLPPSVRAARGAGGGRRTAVPRRPARRVPRRLAALAKGGRPVWRWRQRGRGGRAGKEGTTMGSGVARSSTWPSRCG

SEQ ID NO: 190391 - protein, 133 aa, Oryza sativa
  Clone ID: PAT_MRT4530_86810C.1.pep
MGLLDKLWDDTVAGPRPDTGLGRLRKHAAARPAAVKINDPTGDAAMVAVPPTTPAGAEEAPVKVTRSIMIKRPAGYPASPRSAASTPPASPAGSTPPISPFAGAGGRFRRKSSSDAYERATPGTTSHPPPFEV

SEQ ID NO: 190392 - protein, 48 aa, Oryza sativa
  unsure (1)..(48): unsure at all Xaa locations
  Clone ID: PAT_MRT4530_86811C.1.pep
XHKVGLRFQGVGDGDGYYLVHCXPVLLSLISHXEQVCKLFVTNAENQT

SEQ ID NO: 190393 - protein, 67 aa, Oryza sativa
  Clone ID: PAT_MRT4530_86812C.1.pep
NSERTQRENKTRSLHDVPGSSPRLCRQGPSISCMWSDVGFLSHCEGMSQAIVGTQVSSTTCNAAVMN

SEQ ID NO: 190394 - protein, 82 aa, Oryza sativa
  unsure (1)..(82): unsure at all Xaa locations
  Clone ID: PAT_MRT4530_86813C.1.pep
YALGNIAYNQVFRADSLLYLLVYAQRPLFTTNTIELVGKXIKPWAGQNATVAVMSYSGYDIEDAIVMNKLSLDRWFGRCIAM

SEQ ID NO: 190395 - protein, 190 aa, Oryza sativa
  Clone ID: PAT_MRT4530_86814C.1.pep
GEARARGVGECEKGLGAPRSNGGKSCGSRKSPGSGPTGQPPGSRAMVPSAATGGHGRRHARRPPAASPPRPPCPRHARRLPRPHHSLPCHPPPPPTALRRVPEREGGRGKTEESCRHRRPPPGGAGRPDCGEHKQRRCRPTPAAYALVAHDVREVRLDHPAAAPPWSKQHLNLFRIFTSVEIKESKRKHH

SEQ ID NO: 190396 - protein, 66 aa, Oryza sativa
  Clone ID: PAT_MRT4530_86815C.1.pep
IFHWHASFINEYCSSRRSITSSSFFFDNGCGSFIYELSHPLDIFDSHLIIITRFLQSLSISSCQYA

SEQ ID NO: 190397 - protein, 51 aa, Oryza sativa
  Clone ID: PAT_MRT4530_86816C.1.pep
AGSTLLTKEREGYSLRGPIALSLGKKEKTTCVRPHSKFFLQFIVFQQAWEA

SEQ ID NO: 190398 - protein, 50 aa, Oryza sativa
  Clone ID: PAT_MRT4530_86817C.1.pep
LFMFHHLVAMVLINSNICRSIICYFTRSHVHVYRIRGALCSVVLRSFSLF

SEQ ID NO: 190399 - protein, 149 aa, Oryza sativa
  unsure (1)..(149): unsure at all Xaa locations
  Clone ID: PAT_MRT4530_86818C.1.pep
FFFFFLRNTRVQKHKGKEKNRNKPGLAGAKNGVXKANSRQKSSSSACPPRXRSGGRPKRPPNPNGRLCPGAVRKWGGSENTSAPTAAIRSGGAGASGDRRARAVRRCGGALGFGDFEVGGGGTGTGRCPLFAVVVFEREQKLAEAVDIA

SEQ ID NO: 190400 - protein, 156 aa, Oryza sativa
  Clone ID: PAT_MRT4530_86819C.1.pep
FFFFFATSKKTHCTSYATSNKTRMKHTNKIECNKTYTIDCNATLNQNKMKHLNTHSATSLTVECNIPKTPTKQTYAPSSSTHGRRPHGAWLPSSAPHGARPRGAPSPSSAPHGARPLSSMPWSLAASACRRCRTELAAAIVDAARSSCGEPHGEDA

SEQ ID NO: 190401 - protein, 101 aa, Oryza sativa
  Clone ID: PAT_MRT4530_8681C.1.pep
INIALDFIFKKRGGKPGKTKLAPEGGPKHRRKNGKKLGPVINITAPSAKQKTPHKHKHQSIRSPKRESPRTLSGELTHINSGGETGRDPVQKKIPPPSRRK

SEQ ID NO: 190402 - protein, 417 aa, Oryza sativa
  unsure (1)..(417): unsure at all Xaa locations
  Clone ID: PAT_MRT4530_86820C.1.pep
MVAALVGEGDVEDADTNGWGWRRRPPYLRGGGRQGGGYRRPPDPVAGGPVVEEKAASRSGYPPDPMGPPDPAVGGRXGGGGGYRRIRIRRLPSGGEGGGGGWRSAERTQRSGDREKREERRKREDREEEERREEKRLVDEVISDEALWSITNRPSQMGRSGVVVLLKTRTSQDRDSSVAQKQDPTEASSDGHRDVDGAGRAPSKHPARTETIWPRTPLHASDARNGARYRQMIEPVHGAHLGRLLLPVAARLLPPAASSRRPPPPPPPPADAALAARIVVVVAAFSSSSRRLPSSSPLSSPTPAAELAFSLAGRRARLLSRRPRRPSSSPPLSSPAPAAELSFSLAGHRARRPRRPSYPPPRSSPAPAVLSAASLASSCNQTLSKKRRPCPIRVYPTNQTHEVRRMSRVAAAAEGRR

SEQ ID NO: 190403 - protein, 93 aa, Oryza sativa
  Clone ID: PAT_MRT4530_86821C.1.pep
RIRCPTERSRTAYLWEVVAQRIALLDIDGCMEVQRLVAQGQCGYGTSCQMIQNMQYAICGGLGQQQMMMKMAMQLPNMCSMAPAYFQLSPYGC

SEQ ID NO: 190404 - protein, 174 aa, Oryza sativa
  unsure (1)..(174): unsure at all Xaa locations
  Clone ID: PAT_MRT4530_86822C.1.pep
WYINKTLKKDKSQWDFAVSFCSFVLLRKIWICFLXTLRIIRCVKLCGVQISYARLIXFGYAEWRSCRHPDISILVEPPPPRIIRXNQFRVCLFLYTAPSLVVYSIPLVGVHWRWGEQVFRTFTFDVLHREKAAIRFLRSALCDCSLLDHNGSSSSLATSVELSTTTEEAPVFIV

SEQ ID NO: 190405 - protein, 493 aa, Oryza sativa
  Clone ID: PAT_MRT4530_86823C.1.pep
FCCPLPSPIHLLLHLLLLPPIRCVITSLPSRASTNHCPSTLTSWFGNLVGRLSPSIHRSTFPLLRGWPSSRPPPTTPRLRRPRGTPGRGRCGIWRTCSPSSTPWPRSSSRLPSPAAFRCVYAYYPNAFALMPPQPSPSPVLKNLSYVFEDNITANFSNQGSVFGGHPSLEQRNKSFDISESMTVHCGFVRGKKPGQGSGFDINDDDLLEMEKCHEETEAYVKNSSSLYRNNKVGLWRLVVVRNLPYEDPRRTGKIPKLLLHRLFPNVRFSVWIDAKLKLVVDPYLLLERFLWRKNATFAISRHYKRFDVFEEAEANKAAGKYDNASIDYQIEFYRNEGLTYYAPAKLPITSDVPEGCVIIREHIPITNLFTCLWFNEVDRFTSRDQISFSTVRDKIRARVGWMPEMFLDCERRNFVIQGYHRELLEQMIASGWKPPPTASEPSRKLRLGSRKAPPSKKSSMKRKRVKKSSSRRRLPKPITRMTDTTTWQKLGA

SEQ ID NO: 190406 - protein, 125 aa, Oryza sativa
  Clone ID: PAT_MRT4530_86824C.1.pep
FFVTISTIEKKRTGKNISGAKQPLVKTHIASSSIDRSIELASYHIFRLQFPKGKGIKGKGRKIFHGHERDLHCPSQQARGDKPNCKHELHRHLASDGDNGGDYLRCGEEACRHRQHHHLHHHSEF

SEQ ID NO: 190407 - protein, 248 aa, Oryza sativa
  unsure (1)..(248): unsure at all Xaa locations
  Clone ID: PAT_MRT4530_86825C.1.pep
KKGRNYLSSVRFNTENRVHNGQKWPLEDSFILPLSDAAYGEFLQLQDELNHLQLQPGRGDVWSFIWGSDVYTAKRFYKLNFSSLHPPRPMIWLWKTKCVMKIKVFAWLLFCDRLNTRDMLDRRHCAKEDDDLTCALCNTHQRETRLHLFFTCPFSVACWQXLGISWNCNLEFFQMLVLARIRFARKGFLEVFFMAAWHLWKQRNGLIFQSVQPSPQSWKAMFVKEVLLHMCRMKDPLKQSLSDWIQTL

SEQ ID NO: 190408 - protein, 50 aa, Oryza sativa
  Clone ID: PAT_MRT4530_86826C.1.pep
FKRRFCLLIEAVPVNGHLVVNVCPFGCFTGGLKAEANVSYISGCHPGLAS

SEQ ID NO: 190409 - protein, 86 aa, Oryza sativa
  unsure (1)..(86): unsure at all Xaa locations
  Clone ID: PAT_MRT4530_86827C.1.pep
PEKKVKLSFLDPAWVGGNMNKVVGGVNALQTGGKNGVGTPVNWKPGEGVVIPPGVSXDKGKKKFPQGFETADLPSGKGYLRFTKVG

SEQ ID NO: 190410 - protein, 418 aa, Oryza sativa
  Clone ID: PAT_MRT4530_86828C.1.pep
MPHAPKVEKHSLIPSVLQPPTFSRQIKLHDYHIDMDRLEWTYHWPRFLSPYMEQVSKFIDIAKVHAKKENKRGIYCPCADCKNEIVWENLMKVNEHLVTRGFMEKHVIWTHHGEHEEGRPVEKEYGPIVEDMDYTNGCAEDNIDLEELLHHAEPDMLVGLARGLENFDALKKAAKDVLYDESKGCDSDFSTLRSHSTWAVLLTMYNLPTWLCQKRKCVLLCILIQGLQQPGIDIDIFLEPLLEDMADLWHEGLKVWDEYLRQHFTVKAIIFITINNYHAMFSVSGQIKGKTGWVICLNGTYYRYLPGSNKLVYLRHRQFLSKGHKFRKMKAEFDGTEENDSPLKLTPGDKVCEAIEKIECVFGKGTKKKLKGTKRKKTSKGTKRKKPDGNLPPLFKKHSIFLKYLSYWKDLNEQVHGV

SEQ ID NO: 190411 - protein, 83 aa, Oryza sativa
  Clone ID: PAT_MRT4530_86829C.1.pep
SLVMFRPASTWLITCFGQMHGNLLPGLDPLALARVFCAPLFFWSSGTFILAPIFFVYLPKKFPFVSKKKNYLIKNQKKKKTTK

SEQ ID NO: 190412 - protein, 1596 aa, Oryza sativa
  Clone ID: PAT_MRT4530_8682C.1.pep
MSSKLIFQLYHGQGNVRYGPTGVDLSEFIVTARGIDRPAERSVPSIKKWLMRGLGVDPQTSDITIYVVVSRATYGFYWELMPVQNSGMWRWYVENALQRGWPLAMVPYVHPKDPSVQMNMDDGEGPSAEVNEIEVDQVNAPEEDGVAPVVAPVGMQPGGVADEGETVGAIVDEMEKEDSDNERVEEDDSSDDDENNINPAEWASDDFSGLVISEGENVRWEYKENEIIEGARYGNGEDMKEAVKHYAVSLHREFWVAKSNRTQYEVRCVNEKDGCPWRVHAYKGKWKDYWTVSVVTKHTCYLPGVQKYHRNITCAFVASEMYAHVVDNLAYEPKSIIRHIEQTFKYTISYAKAWRAKQKIIEMRFGTYEASYDNLPRLLSVIQQRNPGTSCALKTFPSIEHPGKTVLQRAFLALHACKMAFVHCRPVLCIDGTFLTGKYRGQILTAIGVDGNNQVLPLAFAFVESENTDSWYWFLHLVKTEVVGMRPNVCLIHDRHAGMLRAIEELKFGTMERGYPGQWEDVQSRWCMRHMGANFFKQFKNKELMNMFKRLCNQNQEKKFNELWKRLDELTGKCSDQRATRPAAAVPDPPQALGALPTDSVTLVRRTGEQIRKFSQWIENEPKEKWAKTYDTGGARYGIMTTNLAEVYNWVMRGVRGLPLVGIVEFILHGTCKYFRERFQAVFPSMPNNNILFGTFMEKKLAEWRAKAMKHRALVQGTQQHRFEVLCQDKAGRGIYRKRVKQECVLKDDGTCHCSCRKPTLLHRPCTHVISAASECGIQDAVYVSQYFSKQAIYHTWSGEIFGFGVAGEFTKINDLIIYIPDPTKLRDKAGRRKTRRIRNDMDESEAGRVKRCSKCDERGHTYKYCPKDKEKPSAAEAEMAHPELLDPAIDQRHRSYLTAVEGAQLGTFRPRSSRERLLVHDSFVERLREAGLLPLARLVEAATGDDDVTRRWDPDRSLLAALVDRWRPETHTFHLPCGEVAPTLQDVSYLLGLPLAGDAVGPVDMGVDWKDELTARFAPVQRLPGLPLEPLQQHRNTGPTKRWLLQFTVDQLPEEADEYSFSRCLEAYLLWLFGWVMFCGSHGHSVDRGLVHYARSIADAAVGEVPQWSWGSALLAAQYRGLCEACTRTDPGAIFGGCPLFISLWAAERIAIGRPLVEHHPYDASLYENRPAVDYPTMGTLWCRRQRRWAHVQVRRSYAEFVMEFDRLLPTDVVWEPYSALLTHSRAPLGLSTLCTRDQAYWMTTVPMVFDICVEPHAPYRVMRQFGFRQSFPVPFPAGVTAAVHRYSRKGQHSAGHWPAKLGPFLDDWLLATEEVVDHAGEPHTEEGYEAYLRWYQPRTRTRVTYAPTEQQAHAASARDLYARHRDQDFARAAVECNRVVVDATTAIQRLGAGIEVGADEHLSTYTRIRDSMRSVLRALTCRAADVAHADAAPQVRPRPTAPRPAAHVPTPTPPPFGGFAQPGTTPGAHSWQAAGSSSQAGVSASLSAQFWQDAGTSSQPPGTSWQGPTGTSSEHGWASATHFDISDFDFPDIIGPSQLGGAPPVHTQEQSPSTPLPDPRATRAVPPDRFTYSQDHVRAQARRTKRGRGASHGQ

SEQ ID NO: 190413 - protein, 174 aa, Oryza sativa
  Clone ID: PAT_MRT4530_86830C.1.pep
MTTIRRFCCDDLLRFSSVNLDHLTETFNMSFYMTYMARWPDYFHAAVSPGDRVMGYIMGKVEGQGESWHGHVTAVSVATEFRRQKLAKKLMNLLEEISDKMDKAYFVDLFVRASNMPAIRMYEKLGYVVYRRVLRYYSGEEDGLDMRKALSQDVEKKSIIPLKRPITPDELEYD

SEQ ID NO: 190414 - protein, 308 aa, Oryza sativa
  Clone ID: PAT_MRT4530_86831C.1.pep
MASFRLMIAAVSLSLVQLSMGSRRLMELYIPPASDQLTYHHGSVLSGDIPVSILWYGKFTPTQMSIIADFVVSLTGAPNAATPSVGQWWGTIEQLYLSNAATNSQTSTRVLLDEQVSDEQCSLGKSLTLAQIDQLAARVGTKRGGVALVFTDEDVTVEGFCSSRCGKHGSDASAGTTHIWVGNSAKQCPGQCAWPFAQPVYGPQGTPLVAPNNDVGADGMVMILASMVAGTVTNPYGDGFYQGPQDAPLEACSACPGVYGSGAYPGNAGKLLVDATTGASYNANGANRRKYLLPALYNPATSSCDTLV

SEQ ID NO: 190415 - protein, 96 aa, Oryza sativa
  Clone ID: PAT_MRT4530_86832C.1.pep
IVLPTPLIFRSTLFQSPPIQNNRYIKLNKHRIYGLRTQHFQEVDEMNDTKLMGSLNSSPQVLIFSSTLFQSPPIQNNRYIKQALDSRSNDPTNTKK

SEQ ID NO: 190416 - protein, 99 aa, Oryza sativa
  Clone ID: PAT_MRT4530_86833C.1.pep
THLGKGGHDGVGWALRRPLSLPDSPRHERRLPAALRGVGVKPEVWCVWLEGVMRRVLSRPLSDVDLYVNFVVCVPWPVLDRDFNAHSAWNSIREFLGVT

SEQ ID NO: 190417 - protein, 1332 aa, Oryza sativa
  Clone ID: PAT_MRT4530_86834C.1.pep
MATSMLLGPLIALVNRQVSNYLLQQYQELDGMEEQLTILERKLPAILDVIIDAEEQGTHRPGVSAWLKALKAVAYKANDIFDEFKYEALRREAKRRGNHGNLSTSIVLANNPLVFRYRMSKKLRKIVSSIEDLVADMNAFGFRYRPQMPTSKQWRQTDSIIIDSENIVSREKEKQHIVNLLLTDASNRNLMVLPIIGMGGLGKTTFAQIIYNDPEIQKHFQLRKWVCVLDDFDVTSIANKISMSIEKECENALEKLQQEVRGKRYLLILDDVWNCDADKWAKLKYCLQQYGGVGSAILMTTRDQGVAQLMGTTKAHQLVRMEKEDLLAIFEKRAFRFDEQKPDELVQIGWEIMDRCHGSPLAAKALGSMLSTRKAVEEWRAVLTKSSICDDENGILPILKLSYDDLPSYMKQCFAFCAIFPKNYVIDVEMLILLWMANDFIPSEEAIRPETKGKQIFNELASRSFFQDVKEVPLHKDESGHSYRTICSIHDLMHDVAVSVIGKECFTIAEGHNYIEFLPNTVRHLFLCSDRPETLSDVSLKQRCQGMQTLLCIMNTSNSSLHYLSKCHSLRALRLYYHNLGGLQIRVKHLKHLRFLDLSGNCHIKSLPEEICILYNLQTLNLSGCISLGHLPKDIKNMIGLRHLYTDGCMSLKSMPPNLGHLTSLQTLTYFVVGNNSGCSSIGELRHLKLQGQLQLCHLQNVTEADVSMSSHGEGKDLTQLSFGWKDDHNEVIDLHEKVLDAFTPNSRLKILSVDSYRSSNFPTWVTNPTMMQDLIKLQLVSCTMCESLPQLWQLPSLEILHLEGLQSLQYLCSGVDNSTSSTFPKLRELILVDLKSLNGWWEVKGGPGQKLVFPLLEILSIDSCSNLENFPDAVIFGESSQFLDNKGNSPFPALKNLKLHNLKSLKAWGTQERYQPIFPQLENANIMECPELATLPEAPKLRVLVFPEDKSLMWLSIARYMATLSDVRLTIAASSSQVQCAIQQVSGTEEFSHKTSNATMELRGCYFFCMDWECFVNLQDLVINCCNELVYWPLKQLQCLVSLKRLTVYSCNNLTKSGDVLEAPLEKNQLLPCLEYIEIKDCPKLVEVLILPSSLREIYIERCGKLEFIWGQKDTENKSWYAENKDDLRSESYSILVSSADAPLATNTHLPCMESLTVISCQSLVVLLNFPLYLKEIHIWSCPELRSIRGKQDIKVESKYVERNNGMAISESSSDLSASITIEDQGTWRSKYLLPCLEYLRIAYCVSLVEVLALPSSMRTIIISECPKLEVLSGKLDKLGQLDIRFCEKLKLVESYEGSFSSLETVSIVGCENMASLPNKHSNTPCTKGSA

SEQ ID NO: 190418 - protein, 124 aa, Oryza sativa
  unsure (1)..(124): unsure at all Xaa locations
  Clone ID: PAT_MRT4530_86835C.1.pep
IPFRPTXAPTRPPTRPRTSRPSTCCSTPTGTAXSATCGSGXALPLTHRPSHNAPRGHHGLPGALALAHPQCFQSVPNLSRSGPSFSMSPPVPIPFPMTLAHSASFSSTGSFINPAPSRSPTLWT

SEQ ID NO: 190419 - protein, 55 aa, Oryza sativa
  Clone ID: PAT_MRT4530_86836C.1.pep
GMSFPFLTSFPIHDPRAMVLYPFSCRRDWYCNLTMEKMCESSYIRMHGRFFHAWV

SEQ ID NO: 190420 - protein, 100 aa, Oryza sativa
  Clone ID: PAT_MRT4530_86837C.1.pep
GSKPVPWNELSTAADIRDLVAGLKGFLDDKEGKLSHASPALSTFDLPSALMKERAGPHSRRSSWVNNTGSSEPESPCAVCSHQAQFVCHVRQGKGPASSV

SEQ ID NO: 190421 - protein, 106 aa, Oryza sativa
  unsure (1)..(106): unsure at all Xaa locations
  Clone ID: PAT_MRT4530_86838C.1.pep
SLACFLIANKGFIGVXADELSGRCIGLQGLHPIGLYWIILLYCXYHQPIAFISLYTXGHIADSSKSYCYRLDQTDWHARISPTFGPALELSRSPRPVCVFRINNTV

SEQ ID NO: 190422 - protein, 84 aa, Oryza sativa
  Clone ID: PAT_MRT4530_86839C.1.pep
RRMAYTMKRISRLISAICTFKNKLALPCDLGNKLRNFCIRINIPLCRWHVLVYMLHRTYIEICKSQQHKGQCSTWLNKSIHAYI

SEQ ID NO: 190423 - protein, 63 aa, Oryza sativa
  Clone ID: PAT_MRT4530_8683C.1.pep
GLGFTVDRVHSGGLRNGRPRSTRSKTNGRGRLDLPPDWLLATEEVVEHEGEPHTEEAYEAYLR

SEQ ID NO: 190424 - protein, 84 aa, Oryza sativa
  Clone ID: PAT_MRT4530_86840C.1.pep
TQLLLTFFFLFLPLNTALHPGLGSKLNSFPITSICHTHTIFHSHPLQFQPKSKLCAELNTRYFRTSGTSLVTGTTCLLYSQKDI

SEQ ID NO: 190425 - protein, 76 aa, Oryza sativa
  Clone ID: PAT_MRT4530_86841C.1.pep
VVAGVVAGMQHEIALLFLSFAFLHVRCFTLFLGECMIAVSYSFCCFTCFRYVELVNQGECMCYFVLKLRKKKKTQQ

SEQ ID NO: 190426 - protein, 368 aa, Oryza sativa
  Clone ID: PAT_MRT4530_86842C.1.pep
MARPRPPGLIAVAAAAALVAWCLCGPASAAAAAGAAAAGTSASGGGGGAAAKRGGRRDEHGRLVFVQESRKRFEIEDLLRASAEVLGSGNFGSSYKATLQERPAVVVKRFKDMNGVGREDFSEHMRRLGRLSHPNLLPVVAYLYKKDEKLLITDYITNGSLAHFLHGNRGSELDWGKRLRIIRGTARGLGHLYDELPMLTVPHGHLKSSNVLLDGDMEAVLSDYALVPVVTASAAAQVMVAYKAPECVAAAAAGKPSKKSDVWSLGILILEVLTGKFPANYLRQGRQDNADLAGWVSSVVSEERTGEVFDKDMAAAGAGAEDDMLKLLHVGLGCCDADVDQRWELKTAIARIEEIRVPDPTPTPAAAA

SEQ ID NO: 190427 - protein, 40 aa, Oryza sativa
  Clone ID: PAT_MRT4530_86843C.1.pep
HSYSPAKKTSKISGLSSSGCTGTRAFLSVVLLVWKVPSVK

SEQ ID NO: 190428 - protein, 81 aa, Oryza sativa
  Clone ID: PAT_MRT4530_86844C.1.pep
GLNPLLGYRLRENFFGPKKLNGLNSLVQIFLFYAHNKHILGLGSPPALGRKSLQLEPWKNFTTHPSNAWAYVLDSAKGLLI

SEQ ID NO: 190429 - protein, 280 aa, Oryza sativa
  Clone ID: PAT_MRT4530_86845C.1.pep
MRGGVAGPTAGEPPGTEAEAEEVEESSAGDDEELELGLSLGSKKQQQQQHAPCRILTARDLQPAAALSPDSSVSSSSPAAAAAAGGKRAEGPTATTSPGTVASGHPHSFGVVGWPPIRQFRMNSLFNQAKENTSETDTKKTATNESDVQKDKEEGEKKGRVAGWVKVNMDGEVIGRKVDLNAHRSYKTLALALELMFTKPSIGLCASHNTNSLKLLDNSAEYQLTYEDRDGDWMLVGDVPWEMFVSSVKRLRIMRTSDANGLGQRYQGIHRTIASTRGRS

SEQ ID NO: 190430 - protein, 180 aa, Oryza sativa
  unsure (1)..(180): unsure at all Xaa locations
  Clone ID: PAT_MRT4530_86846C.1.pep
MTPIATAPAVVESLSPAAPPRRRPRRAPTSMASPRPRPAAPPPATAAGSQATSSSWRTPAGGGAPPSSPAATTPSTSPSAAPIPWAPSAIGRTTTPAPAAPPPSSPAAATPSMSPSAATPPYPQSAILPRAASSRDRHPPPPATTXSTPPPPPSATQPAPVAVSPRDTPLLPTRRRSSSV

SEQ ID NO: 190431 - protein, 92 aa, Oryza sativa
  Clone ID: PAT_MRT4530_86847C.1.pep
MQNNRTWNARFWVFTLMFFLLPCMELQETPEKYLSLPVLPTSQQGAHANISVPDFQVPNISDMDFPPGTVASNPGPVSRGITGTYRSPELQK

SEQ ID NO: 190432 - protein, 62 aa, Oryza sativa
  Clone ID: PAT_MRT4530_86848C.1.pep
MEVGGIPELSWLLRIPHENLDCGFQGDDPQTYSTGRSLGVESYPSIDVFAVTPLIALSQLDL

SEQ ID NO: 190433 - protein, 204 aa, Oryza sativa
  unsure (1)..(204): unsure at all Xaa locations
  Clone ID: PAT_MRT4530_86849C.1.pep
DPHRRRRSRPPRRPPPAANAPTLHWIWGGKEGEGRGAGSRAGGGWPAAGSVRGQPPPADPTPPLPPRGRGRRAPPSLSPLPASVLPASXPPSRPQLLPFRPHLPPHLATAPAQPRAPPVPRQQATAHHHHRQPPGPSSSAGWMEGGGEGRRRRPPRAGVVAGVPAGLPPPSFGHNPGGRGPGETPSVARPWPSSAHCLCRRRRR

SEQ ID NO: 190434 - protein, 1620 aa, Oryza sativa
  Clone ID: PAT_MRT4530_8684C.1.pep
MSSKLIFQLYHGQGNVRYGPTGVDLSEFIVTARGIDRPAERSVPSIKKWLMRGLRVDPQTSDITIYVVVSRATEGFYWELMPVQNSGMWRWYVENALQRGWPLAMVPYVHPKDPSVQMNMDDGEGPSAEVNEIEVDQVNAPEEDGVAPVVAPVGMQPGGVADEGETVGAIVDEMEKEDSDNERVEEDDSSDDDENNINPAEWASDDFSGLVISEGENVRWEYKENEIIEGARYGNGEDMKEAVKHYAVSLHREFWVAKSNRTQYEVRCVNEKDGCPWRVHAYKGKWKDYWTVSVVTKHTCYLPGVQKYHRNITCAFVASEMYAHVVDNLAYEPKSIIRHIEQTFKYTISYAKAWRAKQKIIEMRFGTYEASYDNLPRLLSVIQQRNPGTSCALKTFPSIEHPGKTVLQRAFLALHACKMAFVHCRPVLCIDGTFLTGKYRGQILTAIGVDGNNQVLPLAFAFVESENTDSWYWFLHLVKTEVVGMRPNVCLIHDRHAGMLRAIEELKFGTMERGYPGQWEDVQSRWCMRHMGANFFKQFKNKELMNMFKRLCNQNQEKKFNELWKRLDELTGKCSDQRATRPAAAVPDPPQALGALPTDSVTLVRRTGEQIRKFSQWIENEPKEKWAKTYDTGGARYGIMTTNLAEVYNWVMRGVRGLPLVGIVEFILHGTCKYFRERFQAVFPSMPNNNILFGTFMEKKLAEWRAKAMKHRALVQGTQQHRFEVLCQDKAGRGIYRKRVKQECVLKDDGTCHCSCRKPTLLHRPCTHVISAASECGIQDAVYVSQYFSKQAIYHTWSGEIFGFGVAGEFTKINDLIIYIPDPTKLRDKAGRRKTRRIRNDMDESEAGRVKRCSKCDERGHTYKYCPKDKEKPSAAEAEMAHPELLDPAIDQRHRSYLTAVEGAQLGTFRPRSSRERLLVHDSFVERLREAGLLPLARLVEAATGDDDVTRRWDPDRSLLAALVDRWRPETHTFHLPCGEVAPTLQDVSYLLGLPLAGDAVGPVDMGVDWKDELTARFAPVQRLPGLPLEPLQQHRNTGPTKRWLLQFTVDQLPEEADEYSFSRCLEAYLLWLFGWVMFCGSHGHSVDRGLVHYARSIADAAVGEVPQWSWGSALLAAQYRGLCEACTRTDPGAIFGGCPLFISLWAAERIAIGRPLVEHHPYDASLYENRPAVDYPTMGTLWCRRQRRWAHVQVRRSYAEFVMEFDRLLPTDVVWEPYSALLTHSRAPLGLSTLCTRDQAYWMTTVPMVFDICVEPHAPYRVMRQFGFRQSFPVPFPAGVTAAVHRYSRKGQHSAGHWPAKLGPFLDDWLLATEEVVDHAGEPHTEEGYEAYLRWYQPRTRTRVTYAPTEQQAHAASARDLYARHRDQDFARAAVECNRVVVDATTAIQRLGAGIEVGADEHLSTYTRIRDSMRSVLRALTCRAADVAQADAAPQVRPRPTAPRPAAHVPRPTPPPFGGFAQPRTTPGAHSWQAAGSSSQAGVSASLSTQFWQDAGSSSQPGGTSVASASLAAQFWQDAGTSSQPPGTSWQGPTGTSSEHGWASATHFDLSDFDFPDIIGPSQLGGAPPVHTQEQSPSTPLPDPRATRAVPPDRFTYSQDHVRAQARRTKRGRGASHGQ

SEQ ID NO: 190435 - protein, 168 aa, Oryza sativa
  Clone ID: PAT_MRT4530_86850C.1.pep
MEDTHDNQHTPTRSHNIQAYIRQDTPPDIDFRDRHGYSPTVSPDTVKRYKSAISDLAGHRFEEKDYPVVDYESDLQTDMEWPWVAAPPVYDLREFGGVGDGRTLNTEAFVAAVASIAERGGGRLVVPAGRWLTAPFNLTSRMTLFLAAGAEILGVQVRHFKLQSPSLC

SEQ ID NO: 190436 - protein, 62 aa, Oryza sativa
  Clone ID: PAT_MRT4530_86851C.1.pep
LGSLVYAILFTCQVARLWLDVNRMLQLTPDICGVVYVMESTYESTVVLIKKKKGRAIQSIGS

SEQ ID NO: 190437 - protein, 188 aa, Oryza sativa
  unsure (1)..(188): unsure at all Xaa locations
  Clone ID: PAT_MRT4530_86852C.1.pep
TRRQRSPPLGRRQGHHPEQTTPSPQRSATRQIWRTRGLIWRTRQGGDGRRKMAVPEEEEAAARRRKMXRRRKMAAAPNLAVGAEGRGGQIRRRAPAHRPPSSSRVSSPATRRRPSSSEGARAAARPPRRPTPSRSTAANSSDTELLCHSXRAGARRFSGGGRGGWCASEXAKPRRPSGRRRRMVPGHH

SEQ ID NO: 190438 - protein, 57 aa, Oryza sativa
  Clone ID: PAT_MRT4530_86853C.1.pep
LNTLVCGDACCCSCVWLFLCWKHLHQGNFDATCQSLSSLSLSHTQTHTINQVVSISG

SEQ ID NO: 190439 - protein, 82 aa, Oryza sativa
  Clone ID: PAT_MRT4530_86854C.1.pep
MAEDFGAFMESFDIAGRVTGFGNPDWARTHAPAGATSPVVLAALAAGATSLGTTIMDEMAYRLVCQRSIYVVSCNQSVVATS

SEQ ID NO: 190440 - protein, 144 aa, Oryza sativa
  unsure (1)..(144): unsure at all Xaa locations
  Clone ID: PAT_MRT4530_86855C.1.pep
MWADDLPAGGTTFESLEAIDGKDKLVAXTSCSLMHTRCXLVHKTKLDSKIKSWXGCVAQKVLEVNALAKAPTAQNDEAYFAPNAAAQASMRSSPRVTNEEVQNAAAALXGSDHRRATNVSARLDAQYMKLNLAVLPTTTIGSFP

SEQ ID NO: 190441 - protein, 153 aa, Oryza sativa
  unsure (1)..(153): unsure at all Xaa locations
  Clone ID: PAT_MRT4530_86856C.1.pep
MARRRVSAGAASTPIHQIGIQGRTTKAVAQRGGEGGAGRARLGLKXPTGRLWRGRRRRAVAGDGNRRRGWQRRXRRRRRTGEAAARPGARGEREEKRAGGXRLTVSWPEWGKTTANTGGKRRTAGCAGWTRRPSDPRGQRRQQSGAAMALSTA

SEQ ID NO: 190442 - protein, 407 aa, Oryza sativa
  unsure (1)..(407): unsure at all Xaa locations
  Clone ID: PAT_MRT4530_86857C.1.pep
TVPGRTGRTPARPELLSPIRPRGASRLALPRRRRRRWRRPRGCSSFAGLISGXAGEAARVVRLLRAVYHPRNRYLLHLDAAAGAEERAELAAAVRGVRAWRERANVDVVGEGYAVDRAGPSALAAALHGAAVLLRVAADWDWFVTLSSSDYPLVTQDDLLYAFSSVPRDLNFIDHTSDLGWKEHERFEKLIVDPSLYMDRNSEILPATEPRQMPDAFKIFTVNYKFLLRTQSVLKHERRTNNDDGSPWVILSRNFTEHCVHGWDNLPRKLLMYFANTAYSMESYFQTVICNSSKFRNTTVNGDLRYFVWDDPPGLEPLVLDESHFDDMVNSSAAFARRFVDDSPVLKKIDKEILNRSSAVCASFSRRRGMDVDSCSKWGDVNVLQPARAGEQLRRFISEISQTRGCS

SEQ ID NO: 190443 - protein, 272 aa, Oryza sativa
  unsure (1)..(272): unsure at all Xaa locations
  Clone ID: PAT_MRT4530_86858C.1.pep
LFVAPVQYMIRKWSENVKCTAPTECTSLITRIAKGLGVLSHDQIAYISAHRTYVDESYLVQGHILKHGVDGSLIFFFPGCTNEIPLPNPGYHLYNCLELTIPLXTLEEFRLGTMHREPCNMAREEHEGSTSSPPVQMYEANWEPTGDAPGWTQVPHYNAGGSAWXSASEHRWQVSQDTSYGNSRSSSTSGMLRISKMWRFNSSRGVLGELTRRMDALELQAGEIXHNLEGHMAQTQEWQRNADVQFANINNLMQRQQVDLQAYFRFQGFNPY

SEQ ID NO: 190444 - protein, 110 aa, Oryza sativa
  unsure (1)..(110): unsure at all Xaa locations
  Clone ID: PAT_MRT4530_86859C.1.pep
SPQQPPSSPPXPPPPPRPPRTPTPHPXAARPASRCSGRTCSRASSSPATPPRCPAPPSPPPHPTPQPPLPLHPTMPLRSPHALHYPPPCLRPLAASPSTSSVAPASSPPP

SEQ ID NO: 190445 - protein, 734 aa, Oryza sativa
  Clone ID: PAT_MRT4530_8685C.1.pep
MGANFFKQFKNKELMNMFKRLCNQNQEKKFNELWKRLDELTGKCSDQRATRPAAAVPDPPQALGALPTDSVTLVRRTGEQIRKFSQWIENEPKEKWAKTYDTGGARYGIMTTNLAEVYNWVMRGVRGLPLVGIVEFILHGTCKYFRERFQAVFPSMPNNNILFGTFMEKKLAEWRAKAMKHRALVQGTQQHRFEVLCQDKAGRGIYRKRVKQECVLKDDGTCHCSCRKPTLLHRPCTHVISAASECGIQDAVYVSQYFSKQAIYHTWSGEIFGFGVAGEFTNINDLIIYIPDPTKLRDKAGRRKTRRIRNDMDESEAGRVKRCSKCDERGHTYKYCPKDKEKPSAAEAGLSGSAADGARPTGEGTTSRRPRPRRSRGTTEMAHPELLDPAIDQRHRSYLTAVEGAQLGTFRPRSSRERLLVHDSFVERLREAGLLPLARLVEAATGDDDVTRRWDPDRSLLAALVDRWRPETHTFHLPCGEVAPTLQDVSYLLGLPLAGDAVGPVDMGVDWKDELTARFAPVQRLPGLPLEPLQQHRNTGPTKRWLLQFTVDQLPEEADEYSFSRCLEAYLLWLFGWVMFCGSHGHSVDRGLVHYARSIADAAVGEVPQWSWGSALLAAQYRGLCEACTRTDPGAIFGGCPLFISLWAAERIAIGRPLVEHHPYDASLYENRPAVDYPTMGTLWCRRQVRRSYAEFVMEFDRLLPTDVVWEPYSALLTHSRAPLGLSTLCTRDQ

SEQ ID NO: 190446 - protein, 101 aa, Oryza sativa
  Clone ID: PAT_MRT4530_86860C.1.pep
MRGVVGVDGGEEELPLATAVGGVDGRGAGPWGAWTVGARPRRAAGGEDGRGAAARDRRGAAAQGREGRGGEDGRGAAARGEEPRTAARSVCRSSSPPPGSL

SEQ ID NO: 190447 - protein, 201 aa, Oryza sativa
  Clone ID: PAT_MRT4530_86861C.1.pep
AHLRAKNVRAPPRRPLHSLLYLPRRLTISDITAHRWSKRTAVASALLSPLLLAAITAPHHSNHPPVLLTAAAAAATTDADSPPMSRSSCLPVLWSYVLTRELVSLLVSIGVAAGVAAGMLGVTVLAWGNSRPTLPPRRLDVPRRRHRRRIPRRSHRCLCIPRCRCAASHPTPTRAVLSERERERVREGKERESIWVGPTIF

SEQ ID NO: 190448 - protein, 38 aa, Oryza sativa
  Clone ID: PAT_MRT4530_86862C.1.pep
YYSVSKMLNASNYQLVPNLSYAIIPSDIDYLFYSKLIL

SEQ ID NO: 190449 - protein, 50 aa, Oryza sativa
  unsure (1)..(50): unsure at all Xaa locations
  Clone ID: PAT_MRT4530_86863C.1.pep
NPXARGAGRERTVRGQDQGEVRQRKYFKKTKQLEETGRRERRIHTEEADS

SEQ ID NO: 190450 - protein, 122 aa, Oryza sativa
  Clone ID: PAT_MRT4530_86864C.1.pep
SVDDGALYGRWNHLSRLRKNAAGAGAPAIDHGARSARMACSAFRCNCGTISSESARPPLPPPAESGRVAIAAQDTILPPRQSYPPPVCCCCYDSPAAWRERAAVSPHASRAPASFGLQTLRL

SEQ ID NO: 190451 - protein, 77 aa, Oryza sativa
  unsure (1)..(77): unsure at all Xaa locations
  Clone ID: PAT_MRT4530_86865C.1.pep
MQCREESRKEPLSKILIAYLPMQLLRWMEEQKVXYRFRSHRRPPPVSSDPSGTRPXTVGSGRDEARRRRIREGRGPR

SEQ ID NO: 190452 - protein, 297 aa, Oryza sativa
  Clone ID: PAT_MRT4530_86866C.1.pep
MGDVGEGAARGLLRRPPPTRPTRQRNSGGRWHRIGLVGGERGGPTLLDRAAREEGPRRGVEVGRGDSEVGGGDGGGSSGEGGDGNGGGWRLARKERGKEEGRCGGGGVTDSAGKRDGAADGEGEAERRRSSEEGRRGRRGMSGGEEEGSGREKAVSAGVRGGGEAAAAAATGERGYGWGAAAPTTPRRLASSSAAASSGGTTPPASCRSSVTGAPRRRLLVSCPLGRGRNGVASVDDDEAYELVSGADLFIGGDIDDEGEGVRAYLLRLPRRPQPRATIADARRQRLDGGVVESISA

SEQ ID NO: 190453 - protein, 117 aa, Oryza sativa
  Clone ID: PAT_MRT4530_86867C.1.pep
CRRVAIGRLNPRVEDGSFDITVDWSNYHITGKRSLSQIHPLIILVLTIRFSIFSAMLMWIFVFSPAIGSTSFVGVAILELIRALVSSVINNLSTSLVITLQTWLLCACHQFKCRHTD

SEQ ID NO: 190454 - protein, 148 aa, Oryza sativa
  unsure (1)..(148): unsure at all Xaa locations
  Clone ID: PAT_MRT4530_86868C.1.pep
LKRHIVKYATNTMPTPILLDNNENQPRINXRKHRRRTLHQGIEMLNKLKEHVRKTYMLDDFALYENHQTLMQENMVXQHQIQKHVYYSRAXHTSVTEEKQQDSATAKTKLPNGVNGELKVTAENVAVPXTVLYALNDDQTAATEKADL

SEQ ID NO: 190455 - protein, 125 aa, Oryza sativa
  Clone ID: PAT_MRT4530_86869C.1.pep
CRRVAIGRLNPRVEDGSFDITVDWSNYHITGKRSLSQIHPLIILVLTIRFSIFSAMLMWIFVFSPAIGSTSFVGVAILELIRALTYRFSTDLELQNQYRFGCSDLSKQVYFWSFCKANPIPIEIF

SEQ ID NO: 190456 - protein, 185 aa, Oryza sativa
  Clone ID: PAT_MRT4530_8686C.1.pep
MAPASDRNGHEGRRRVLLLPLPYHGHINPMLRLAAALHDRGLAVTVVHTETRAPDRRSLPAGCELVTVPDGLPPELAASGDIPSFVFALNRNCAAPFRDLLAGALRQEEEEEDGGGVACVVADVDWFAPLAAARELGVPALALMTSSAARFRVYLAYPRLCEKGYLPVQELPKNTPKPPRGTVQR

SEQ ID NO: 190457 - protein, 70 aa, Oryza sativa
  unsure (1)..(70): unsure at all Xaa locations
  Clone ID: PAT_MRT4530_86870C.1.pep
TWPDYRPPQLPXYDGHSDPKQFLMSYEATISSYGGNAAVMAKSFAMAIWNVAQTWYSSFWPGTITSWEKL

SEQ ID NO: 190458 - protein, 470 aa, Oryza sativa
  Clone ID: PAT_MRT4530_86871C.1.pep
MAAEGEEARSPHVVLFPFLAHGHIPAFLRLAGHLQTLRPGLAVTLVSTPRLLGSLSLPATSPPIRLHALPFAPADHGLPDGAESLADLHVHQFITLFRASESLRPAFDGFVAGIRPPVCVIADSFFAWTADVARARGASHAVFLPGGAFGHAVFFSVWEHLPHTLTAGGDEFPLLPDFPDVVLHRTQIPQYMLAATGRTPGRLLPAGHPELETSGLDMLRASFGVQTWAIGPILAAPDPSKSQDDDDTSIIRWLDAHPRRSVLYISFGSQNSISIRQMAELALGLEASGRPFVWAVRPPVGFDPKDGFDPGWLPAGFEDRMARAGRGLVVRGWAPQARILAHPSTGAFLTHCGWNSILESLRHGVPLLGWPVGAEQFFNAMVVVEWGVCVEVARGNLESSAVESGEVAEAVGAVMGETEKGEAMRRKAGEIARAMAAAWEGPAGSSAASLERFLRCVEASALRDSCLGAS

SEQ ID NO: 190459 - protein, 100 aa, Oryza sativa
  Clone ID: PAT_MRT4530_86872C.1.pep
RLALQNYDRPAVSKRTFIWEEIQLCKFLTSNDELKRKRVVSFTETSHNNYSYLETYSEQEYYFGGKQLKHRKHALKTEWHRYKACLELADRGRFGLQIPS

SEQ ID NO: 190460 - protein, 70 aa, Oryza sativa
  Clone ID: PAT_MRT4530_86873C.1.pep
GLELKLDWTKDHALEKINLLFGFLHVHTSSVQQYLSASSPTIRSIYMACGVANFGTMLGVPSLTSFVSLC

SEQ ID NO: 190461 - protein, 218 aa, Oryza sativa
  Clone ID: PAT_MRT4530_86874C.1.pep
QEFGTRVLPTNVRHLFIEAYDETIITERILEMESLHTLVIHCIGRDMMDHETVYESIFMKLRKLRVLKVQSDARWRLYTGFSVLSLPASIKKLKHLRYFGYQSGYVYKLVLPSTISTLRHFQVLDFGNCMELVFSSEEDLSKLNSLRHVIVSPLFPLSIRHLGRLTSLQTMPPIKVERGEGYELQQLRQLNKLRGRLEIQGLENVESKEAATEANLGA

SEQ ID NO: 190462 - protein, 163 aa, Oryza sativa
  Clone ID: PAT_MRT4530_86875C.1.pep
MGAEAVEEAAQAGGEEEAAGKEAPDQAEPATTEECFFVGNGPLSRRRGCSASITLCLGLPSSRAHACRAVPDGQNPPNPRPALHSISQSSRSFPPRPCLQPPWGRLCLSHAQTTEAGMDQRIGDGGQTGDGNPGRTTISELYPDPICGSPASILIMYWVDISF

SEQ ID NO: 190463 - protein, 90 aa, Oryza sativa
  Clone ID: PAT_MRT4530_86876C.1.pep
MPLSLPPVSYNHFRLTKKERWVARVDGEDGGPVLADLGEGVDEEDLNEARLAAATALRDGTPVRLDALLEEEDDGVFTGHWRGHSSGGLI

SEQ ID NO: 190464 - protein, 187 aa, Oryza sativa
  unsure (1)..(187): unsure at all Xaa locations
  Clone ID: PAT_MRT4530_86877C.1.pep
TYTWVRIIQAVGHDLQVWMCMFKNLTTSTGAMIQDCLRSQXXXXXXXXXXXXXXXXXXXXXXXXXXXXXXXXKKPGGGPAAQIPPIGRFYRALLARCLTTGDWKTLGLHNYMAGRKPLFPSWVKPKKPXPIAFPKLANLKCNGTPSXRPINRGVFVFPXCTLNWPAPNARLLFFPFFFASCRVSRKI

SEQ ID NO: 190465 - protein, 208 aa, Oryza sativa
  Clone ID: PAT_MRT4530_86878C.1.pep
MASLFFWCSPTTTAITPVASQAPKLPSEIVGKNVEQIIRDWNNELQDRTAKFRKHATAISEWDRRILQNRTVLIRLEAEVAKVVETQTSLERQLELIETHQKEVDKALQSMEEEAERVFQDERLLLREDEAASARDTIHQPPPIQGAEFETADSMTPFDVAVRILDNQLRSLMWIDEKANEFSSRIQRLPNNSAAAERDSGMPRFWLS

SEQ ID NO: 190466 - protein, 212 aa, Oryza sativa
  unsure (1)..(212): unsure at all Xaa locations
  Clone ID: PAT_MRT4530_86879C.1.pep
STHANRPNSSSVPGLELSHLMQALDQFSTRKIVYADLYFQLSVDESWSLEDSIIKEGGFYIDRGFGVRAVSGEKTGFAYADQISFNQLLQCAQAARSIDNTHSHLAIQSFKQTVAPQRYAAINPLDSISREQKVELLHLVDRTARAEDSRVMQVNAGISAVYEEILGAATDGTFXADFRPLVPLAVSXLVEEDGKPERGXTGAGGSYGLPCF

SEQ ID NO: 190467 - protein, 51 aa, Oryza sativa
  Clone ID: PAT_MRT4530_8687C.1.pep
VFLKKRGDKLRWSNLHPRTTKRGHEIGYLSKCNQPNLTLIHVTIENLYRSH

SEQ ID NO: 190468 - protein, 39 aa, Oryza sativa
  Clone ID: PAT_MRT4530_86880C.1.pep
MANEARSDDKRTRTQELEPGLVIMKNQRCARGTAAADRR

SEQ ID NO: 190469 - protein, 95 aa, Oryza sativa
  Clone ID: PAT_MRT4530_86881C.1.pep
QHHSMIVLVQKGFYKKVISRTLRKQRSICLTPVLQNLTPYLHLQLFLSPRNSASLIEVRGMVDTNEPFAINLLKHIGRNLPSPAAAPFGLNQLQA

SEQ ID NO: 190470 - protein, 167 aa, Oryza sativa
  Clone ID: PAT_MRT4530_86882C.1.pep
MALALVSPMAALSLHSGRISAAAIGGGLRSRRASPMGAAATPFLRSSFVSSSSTSSASASPAALSAAVSASLTFTSASSFAGSSLGIEFSYNRVTTGRSRILQIRAGKAALCMTKRNRSRKSLARTHGFRRRMRTTAGRKVLKRRRAKGRRVLCTKTNSPTGKKRMF

SEQ ID NO: 190471 - protein, 59 aa, Oryza sativa
  Clone ID: PAT_MRT4530_86883C.1.pep
APVNNLFSFLSTYILTGIKIPQWWAEFLKFLMSKMSTSSYKKIGFLLGQIIMMLLPEGI

SEQ ID NO: 190472 - protein, 64 aa, Oryza sativa
  unsure (1)..(64): unsure at all Xaa locations
  Clone ID: PAT_MRT4530_86884C.1.pep
QXGNNXXTGXGGXXLYHXXSSXNXLFXXDFPXXVFXSPSPXXVIXPLPXPRAEFGTSSCXIXQP

SEQ ID NO: 190473 - protein, 502 aa, Oryza sativa
  Clone ID: PAT_MRT4530_86885C.1.pep
MAVDPKKKNASYAFTCAILASMASIILGYDIGVMSGASLYIKKDLKITDVQVEILMGILNIYSLVGSFAAGRTADWIGRRFTVVFAAAFFFARALLMGFSGDYATLMVGRFVAGVGVGYAIMIAPVYTAEISPASSRGFLTSFPEVSINLGILLGYVSNYAFARLPLSLGWRVMLGVGAAPSVLLALMVLGMPESPRWLVMKGRLADAKAVLEKIADTPEEASERLADIKAAAGIPDDLDGDVVTVSKKRGGEEGQVWRELVVSPTPAMRRIVLAAVGLHFFQQASGVDSVVLYSPRVFQSAGITGDDQLLGTTCAVGFAKTVFILVAAFLLDRAGRRPLLLTSTGGMVFSLVGLATGLTVVGGSPDAQVPSWAVGLCVASILAYVAFFSVGLGPMSGVYTSEIFPLRARALGFAVAVACNRVTSGVISMTFLSLSSAITIGGSFFLYAAISSLAWVFFFTRLPETRGQTLEEIGKVFGMDDTAMEAEDSAAYRERLLATSP

SEQ ID NO: 190474 - protein, 72 aa, Oryza sativa
  Clone ID: PAT_MRT4530_86886C.1.pep
FSLSSQANKQGGGGGGGGGGGGGGGGGGGGYYPPWNGGYYPPGPGYYPYWPNHGCRWGCCHRGYWGDCHRCC

SEQ ID NO: 190475 - protein, 182 aa, Oryza sativa
  Clone ID: PAT_MRT4530_86887C.1.pep
MLSHPLLQSSKPKTTEPATISSAAAADRLRHPPKRTSFWAGLALWRLTQAVPAVGARKRLKDAYAYPNTNRITAAAGRHRFRRPSFACDDADARHRVAINSRLQFDAVGTPSHASKSTPPASPLADCVATPPPTPSRRQGSCAMCSLLSHHRNPLDHAGDKVCYGTSKESSEPLLFAMGLPG

SEQ ID NO: 190476 - protein, 302 aa, Oryza sativa
  Clone ID: PAT_MRT4530_86888C.1.pep
MGLLSHRVERSEMKPGDHIYTWRAAYTYSHHVIGAEFFVLKLRNVISGIYVGGSKVVHFTRKKEAGTAGLDSAIAISSLLSQGSPECPTFPDCGFQLPDSGVVLTCVDCFLRGGSLHGFEYGVPPAVFLAKLRGGTCTTAAADPPDAVVRRAMHLLQNGFGSYDVFENNCEDFALYCKTGLLPADEPGSIGRSGQASSAIGVPLAALLSTPFKLLAAGPLGMAAVTAGMYCAGRYITDIGVRKDVVKVEVENLSAHLGWRRAKAEEEMAMKKQQPSSHDTKVKKSLLPLKRKRDNFCEIITS

SEQ ID NO: 190477 - protein, 90 aa, Oryza sativa
  Clone ID: PAT_MRT4530_86889C.1.pep
DPPLPLAALPRPRPPRSALRRRLNPPSVPSIPPFSLLADPPALSLTDTAAGAALGLWKPSHWTRPPARQGPAGWAGVYRPKGGKPRAARA

SEQ ID NO: 190478 - protein, 173 aa, Oryza sativa
  Clone ID: PAT_MRT4530_8688C.1.pep
MTTMAARRSEAAPAPQQLRGSQLKQLRELFRRFDMNGDGSLTQLELAALLRSLGLRPTGDEVHALLAGMDANGNGSVEFDELAAAIAPVLTTQTHLVDQAQLLEVFRAFDRDGNGFISAAELARSMARLGQPLTFEELTRMMRDADTDGDGVISFKEFAAVMAKSALDFLGVA

SEQ ID NO: 190479 - protein, 123 aa, Oryza sativa
  Clone ID: PAT_MRT4530_86890C.1.pep
SFLTLIRVIHNMTTSKSKWASPHPHWAKIYIKAKKLRSINCCTLGERITEHYGLHLESAFANDENITSSSNPWHLFFAYYQRNKRLLFFFFFFPKNAMISSCRLKKVFLERGPFFWAPPTPPP

SEQ ID NO: 190480 - protein, 168 aa, Oryza sativa
  Clone ID: PAT_MRT4530_86891C.1.pep
MEGGGGERAAGVVRRLMAAKAESRKSFSEIGEEAGLTNVYVAQLLRRQAQLKPETAPALRAAVPGLTDDLVALMMEPPFRSYHPDIVHEPAIYRLNEAVMHFGESIKEIINEEFGDGIMSAIDFYCSVDKVQGADGKDRVVVTFDGKYLPYSEQRSDHMMSRLTRKTS

SEQ ID NO: 190481 - protein, 178 aa, Oryza sativa
  unsure (1)..(178): unsure at all Xaa locations
  Clone ID: PAT_MRT4530_86892C.1.pep
MDGTLAPLMVMLLLXYQTYLLYLRSRPDAXSRINNKHXCPHPNPVLGNALALYLRRRHRXLDWSTDLLADGQNXTNEGHSALTLGSGVATANTETADHFLQARWHNYVKDARFDVLVEDHLTRSSVIVNGRHWALQGKXGYYSVSSSSLRXRFSARXLCAHLRRWLALQLDEPWASAE

SEQ ID NO: 190482 - protein, 130 aa, Oryza sativa
  unsure (1)..(130): unsure at all Xaa locations
  Clone ID: PAT_MRT4530_86893C.1.pep
GNRYTGGPSGLDLGGLLGISYSDRAVALTGVQGADNGGWWAIGKEPQGLSLEDLIARTTSCNGLEPFLTPCSPKIDTXPNGKVNEEVIRXLTELASSDGGGAHICSNGKGPKAGDHKLPSWGTAPQHTIG

SEQ ID NO: 190483 - protein, 63 aa, Oryza sativa
  Clone ID: PAT_MRT4530_86894C.1.pep
MLSLSPYKRILTCHKSVRHRWKDIPCYWIGRINIVKTTIILRAIYSFSPISIKLLMAFFKELE

SEQ ID NO: 190484 - protein, 189 aa, Oryza sativa
  Clone ID: PAT_MRT4530_86895C.1.pep
METLAPDGGGSADPTVAAPAATDPAVAGQTEANPMVAVDRLVVVCGCAPPSCLLVILVGGDAEDGAASSSLLAATALGADGDGSGGARAAREESLLNRKAMMQNYDAVTEIKLSHITNIEQIHELVQLGNMLQQVYLTSSMDDKIEWTQTSSGTYTTKSAYLAQFLGSEFNDNFKMGLCDYKANMAGGG

SEQ ID NO: 190485 - protein, 40 aa, Oryza sativa
  Clone ID: PAT_MRT4530_86896C.1.pep
GQYALMRSISYRSERDLICRGASHTRLRQPYNPALPSPMT

SEQ ID NO: 190486 - protein, 842 aa, Oryza sativa
  Clone ID: PAT_MRT4530_86897C.1.pep
MAHLLMHGTLDATIFEATNLTNPTRLTGNAPEGFRKWWEGLENGLEKTTGLGPGGTRLYATVDLGRARLGRTRVIDDEPVSPRWDERFHFYCAHFAENVVFSVKVALSVDAKLIGRAYLPVRDLLSGEAVERKLDILGDDKKKLPHGPTIHVRLQFKDVAADGGGKWWGGGVGDAAYPGVPCTYFKQHAGCRVTLYQDAHAPDTFAPRIPLAGGAHYQQGRCWEDVFDAISNAKHLIYITGWSVFTDITLIRDPSRQRPGGDATIGELLKRKASEGVRVLMLVWNDVSSIQALHAIGIKLSVAQTHDEDTLAYFEDSDVHCVLCPRQADAAAGSSFIMGTKVSLLATHHQKTVIVDHDMPAGTGGGGSDIRCIVSFVGGLDLCDGRYDTQSHSLFRTLDAAHHKDFHQPSIDDAELAKGGPREPWHDIHSKLEGPIAWDVLYNFEQRWRKQSGHADLLVNLTALEHLITPPSPVKLPGTNNDDHHDDAWNVQLFRSIDGGACDGFPSSPEAAARLDLVSGKNNVIERSIQDAYIHAIRRARDFIYIENQYFIGSSYGWRPGGGVRPEDVEAVNLIPRELSLKIVSKIAAGERFAVYVVVPMWPEGHPGNEAMQAILDWQRRTMEMMYYDIAVALKANHSDADPRDYLTFFCLGNREAKSHGEYVPAHRPDQDTDYAKAQNARRFMIYVHSKMMIVDDEYIIVGSANINQRSMDGGRDSEIAMGAFQPHHLNVNGQAARGQIHGFRMSLWYEHLGMLHDDFVHPGSLECVRRVNAMADRHWQLYAGEELHGDLPGHLLTYPVAVEKDGGAVTALPGAEFFPDTEAKVIGTLASSAYMIPYLTS

SEQ ID NO: 190487 - protein, 832 aa, Oryza sativa
  Clone ID: PAT_MRT4530_86898C.1.pep
MAEQQLMHGTLDATIFEATNLTNPTRLTGSAPEGIRKWWEGVEKTTGVGQGGTRLYATVDLGKARLGRTRVIDDEPVNPRWDERFHLYCAHFADNVVFSVKVSLPIDAALIGRAYLPVGDLLSGEVVERKLDILDEHKNKLPHGPTIHVRLQFKDVAVDGDGKWWGAGVGNAGYAGVPCTYFKQHTGCGVTLYQDAHVPDTFAPTIPLAGGAHYQQGRCWEDVFDAISNAKHLIYITGWSVFTDITLIRDPSRQRPGGDATIGELLKRKASEGVRVLMLVWNDVTSLQILQSLGIKWGFSQTHDAETFQYFEDTDVHCVVCARHPDAGGSIVMGVKVPFASTHHQKTVIVDHDMPAGAGSGLRSIVSFVGGLDLCDGRYDTQSHSLFRTLDAAHHKDFHQPSIDDAELAKGGPREPWHDIHSRLEGPVAWDVLYNFEQRWRKQSGHGDLLVNLTALEHLIAPQSAMKLPVIGNDDHEAWNVQVFRSIDGGACDGFPSSPDAAARLDLVSGKNNVIERSIQDAYIHAIRRARDFIYIENQYFIGSSYGWRPDDGVRPEDVEAVNLIPRELSLKIMSKIAAGERFTVYVVVPMWPEGHPDSQAMQAILDWQRRTMEMMYADIAGALKAKRMDADPRDYLTFFCLGNREVKRSGEYVPGHHPRDGTPYAKAQKTRRFMIYVHSKMMIVDDEYIIVGSANINQRSMDGGRDSEIAMGAFQPHHLNIGGQLARGQIHGFRMSLWYEHLGGEPHDDFLHPGSLECVRRVNEMANKHWELYASEELHEDLPGHLLTYPIAVAKDGTVAALPGAKFFPDTEAPVLGKKAINPLMTPDITS

SEQ ID NO: 190488 - protein, 343 aa, Oryza sativa
  unsure (1)..(343): unsure at all Xaa locations
  Clone ID: PAT_MRT4530_86899C.1.pep
KKVNRSLAAAASSTSSSGPPPRPARRLAWSRPRPAPGSPSRRLARSLSRPARHLACSSSSAHSRPPPCRPPPRRRRHRRPCARCSRPPPPHVRPPPPPPPHRPPPXHSPTVDPPPPPPPPPSCXMPPPRXAHCFYQICPPQCSLPPPRCPLPPSSAARSKPPSPPSSLDSCPPPRRPAARPPWAPPPPGERRRPPPRRPVPAXLPPRAPPPAXGAPPPRWPLARPPASACCLPGRLPPEPPPARPPTAPRPPAPPPPPAXPPADDCSPPPSXPSPQGLPPSPPPPPPLLPPPPPLPSIPSPPCCSRITILFLLLRRQAPPPRLGTTPAAATANISRTHGTISC

SEQ ID NO: 190489 - protein, 290 aa, Oryza sativa
  unsure (1)..(290): unsure at all Xaa locations
  Clone ID: PAT_MRT4530_8689C.1.pep
VTSPTAAAARQRRRLGRRTLAGERRRQDANGGHQDVEDNTANSPVTXTAVEDQRTATATRRKRREPSGQRRRSCSGDLRRRRRGGRGRRRLGEHDGGLPERRRRLKRRRRTAGAAAATAKLGHTALELFRRREVKARVAAKREDSGGPFKGARRRRRRPTATATTKETSAWREXKTDPNRTRSQSFPKRFNRXFQRRKGRGDPGDCFSSFDSTGEGKKRPDWKETAAAARRRRARVSARGRRRXLTGGTHLSATERARARGRLRTGPXWAEEREKRGFGPTFGPKPKEDF

SEQ ID NO: 190490 - protein, 92 aa, Oryza sativa
  Clone ID: PAT_MRT4530_868C.1.pep
SFIGHRLPSQTNTSLFCTLCPHLCAPGKNFPIGPTQPIAPGQARLTLEFFGDRPPEKKLQLVDMSILLILLSPRPGCGRRGWVALATSAGAS

SEQ ID NO: 190491 - protein, 176 aa, Oryza sativa
  Clone ID: PAT_MRT4530_86900C.1.pep
MAMRYLAGKLRAPAPAAAALRRPRSLSANASQSQVGSPLDSSQIVRFDRPRSGKYTNGSTTELASSMKVVKNVDETIRQLHEEVAKMEAASKEIAEIIRYNRFHRRCIMGSVVLGVGLAGVSCVRYTRSYRKALREYYVVGLEMENNFNFSSYFKLQSSFLVPRFCSSIAASSLDK

SEQ ID NO: 190492 - protein, 65 aa, Oryza sativa
  Clone ID: PAT_MRT4530_86901C.1.pep
MSSKVPGLALLNTSISKFWSDEELVRFLAERKEAHSLPENVFVGMNISLIDPRNSGLHPIYTQDN

SEQ ID NO: 190493 - protein, 386 aa, Oryza sativa
  Clone ID: PAT_MRT4530_86902C.1.pep
MQLHILLLLLAVTVLLSSPTWAAAGGEDQAVASQEVNPLHYNCSLSGGKYEPNSTYEANLRALASLLLAEARATAFASDSFGAAPDAVYGIALCRGDYAGDACAGGLRKAFRDAIDHGVFCAGFRDVTVYYDEHMFRFSGEDFRASLTNAPAWVTWNMNGVAGAAAFGDRVMELINTTAEFAAWNSSKRGYATGEAGFGELDVGATRLGLVEQQCRSSPDLVIFALVQCTPDLSPAGCLSCLSGIASQMPRWFTGAADYRLGGRILGVRCNLRYEVDRFFLESNETIKIHMPKQKGGMSKTDIALITISGVVTPVLPLILIGFIVKKIRDCKLRRELGDWEKTVTEEIDERFSLYPFSMIRDATENFSAENRLGHGSFGQVYRVVL

SEQ ID NO: 190494 - protein, 1862 aa, Oryza sativa
  Clone ID: PAT_MRT4530_86903C.1.pep
MAERAVAHNLSPSASGEDGEQNPRRRARTPLSPSRRSLGREEALEEVERSATSPHAGDGEGRRDGERRLLVYGDGSTPQGALQAAGALLRHPPVIPDPETPTRRWLDDVANLVMTAQQRLGAGWWSSATKATGVATAGSVSSRRRARRAAAATRRSSAIPSSTPPTQEDVRRGPDARFNIERRCNDRRAAHASEGASSSGAPLRSGHGGQPPVSPVGGAGCRAFVASLRNVRWPPRFRPTITEKYDGSINPSEFLQIYTTGIEATGGDDRVMANFFPMALKGQARGWLMNLPPASVHSWEDLCQQFTMNFQGTYPRPGEEADLHAVQRGDDESLRSYIQRFCQVRNTIPCIPAHAVIYAFRGGVRHNRMLEKIASKEPQTTAELFQLADRVARKEEAWTWNSSGSGVAASAAPGSAARSGRRDRRRKKRSAHSDDEGHVLAVEGALRATRKGRPASDKKKEAGAPSRERPTSKWCTVHNTSLHDLADCRAVKSLAERTRKWEEERRQERREGNTPAAPAGNRRGEAKQKAPAEDINDGDDDLGFQEPEATVATVDGGACAHASRRSLKAMKRELLAVAPTHEATRRARWSEVALTFDQTDHPPCVARGGQIAMVVSPTVCNVKLGRVLVDGGAALNILSPAAFDAIKAPGMVLRSSQPIIGVTPGHTWPLGHIDLPVTFGGSANFRTERVNFDVADLSLPYNAVLGRPALVKFMVAVHYAYLQMKMPGPGGPITVHGDLKVALACMEQRADHLAVASKPAGGDERLSTSVPAAPRQRMITCDEVPIKQEDALVSFLRANADVFAWRPADMPGVPREVIEHRLTVRPGARPVRQKVRRQAPERQAFIREEVARLLEAGFIREVIHPKWLANPVVVPKANGKLRMCIDYTDLNKACPKDPYPLPRINQIVDSTAGRPYSDLAETFESLRTARIKLNPDKCVFGVPAGKLLGFLISARGIEANPEKIRAIERMRPPSKLRDVQCVTGCMAALSRFISRLGEKALPLFKLLKRSGPFIWTEEAERALTQLKAYLSSPPVLVAPEPDEPLLLYLAATPQVVSAALVMERDEDDPRSAHPHPVSTRPGREQGGEAPEPNGGPRPPTTGAGPLPACPTVPGAPDPQDGPGATAGRPRLSPSDPEVVDTEAECAPRGLSDEKRPIDAAPGEEDRPRQKVQRPVYFVSEAFRDAKTRYPQAQKMLYAILMASRKLRHYFQAHRVTVVTSYPLGQILHNREGTGRVVKWAIELSEFDLHFEPRHAIKSQALADFVAEWTPAPEPVSIPEASSGPSQLPHTAYWVMQFDGSLSLQGAGAGVTLTSPSGDVLKYLVRLDFRATNNMAEYEGLLAGLRVAAGLGIRRLLVSKEYQCSDPQMDAYVRQVRRMERHFDGIELRHVPRRDNAVADELSRLASSRAQTPPGAFEERLAQPSARPDPLGETDEPERPPRPVGVQASGPEGGAPSSLRLIAWIAEIQAYLADKTLPEDREGSERVQRISKRYVLVEGTLYRHAANGVLLKCIPREQGVELLADIHEGECGAHSASRTLVGKAFRQGFYWPTALNDAIDLVWRCRACQFHAKQTHQPAQALQTIPLSWPFAVWGLDILGPFRRAPGGFEYLYVAFDKFTKWPEAYPVIKIDKHSALKFIRGITARFGVPNRIITDNGTQFTSELFGDYCEDMGIKLCFASPAHPRSNGQVERANAEILKGLKTKTFNILKKHGDSWIEELPAVLWANRTTPSRATGETPFFLVYGAEAVLPSELTLRSPRATMYCEADQDQHRRDDLDFLEERRRRAALRAARYQQSLRRYHQRHVRARSLCVDDLVLRRVQTRAGLSKLSPMWEGPYRVIGVPRPGSVRLATGDGTELPNP

SEQ ID NO: 190495 - protein, 89 aa, Oryza sativa
  Clone ID: PAT_MRT4530_86904C.1.pep
MSMDINTRPPRRIEDTIRHDRSTHKPEQTNTPNINIRDKPRQTQSSAYEGQQEGSSAISDLDEFVLEEEDYSVVDYVLVIYAAKSMAVR

SEQ ID NO: 190496 - protein, 43 aa, Oryza sativa
  Clone ID: PAT_MRT4530_86905C.1.pep
MGKTPKDGLLRHGCDNLRLGPGMVVEHMEQCHSKKESASEGKH

SEQ ID NO: 190497 - protein, 66 aa, Oryza sativa
  Clone ID: PAT_MRT4530_86906C.1.pep
WRSMPGRSRTPALTTSPRPPPRPRDRRRRGSSRGRRRREASLPSPVAVMSSPSRIFTGPPTAPPPR

SEQ ID NO: 190498 - protein, 1638 aa, Oryza sativa
  Clone ID: PAT_MRT4530_86907C.1.pep
MAEQAVAHNLSPSASGDDGEQNPRRRARTPLSPSRRGLAREEALEEVERSATSPHAGDGEGRRDGERRLLVYGDGSTPQGALQAAGALLRHPPVIPDPETPTRRWLDDVANLVMTAQQRLGAGWRSSATKATGVATAGSVSSRRRARRAAAVTRRSSAFPSSTPPTQEDVRRGLDARFNIERRRNDRRAAHASEGASSSGAPLRSGHGGQPPVSPVGGAGCRAFVASLRNVRWPQRFRPTITEKYDGSVNPAEFLQIYTTGIEAAGGDDRVMANFFPMALKGLARGWLMNLPPPSVHSWEDLCQQFTMNFQGTYPCPGEEADLHAVQRGDDESLRSYIQRFCQVRNTIPCIPAHAVIYAFRGGVRHNRMLEKIASKEPQTTAELFQLADRVARKEEAWTWNSSGSGHIDLPVTFGGSANFHTERVNFDVADLSLPYNAVLGRPALVKFMVAVHYAYLQMKMPGPGGPITVHGDLKVALACMEQRADHLAAASKPAGGDERLSTSVPAAPRQRMITCDEVPIKQEDALVSFLRANADVFAWRPADMPGVPREVIEHRLAVRPGARPVRQKVRRQAPERQAFIREEVARLLEAGFIREVIHPEWLANPVVVPKANGKLRMCIDYTDLNKACPKDPYPLPRIDQIVDSTAGCDLLCFLDAYSGYHQIRMAREDEEKTAFITPIGTYCYTTMPFGLKNAGPTFQRTTRISLGSQIGRNVEAYVDDLVVKTRNQETLLSDLAETFESLRTARIKLNPDKCVFGVPAGKLLGFLIFARGIEANPEKIRAIERMRPPSKLRDEAERALTQLKAYLSSPPVLVAPEPDEPLLLYLAATPQVVSAALVVERDEDDPRSAHPHPVSTRPGREQGGEAPEPNGGPRPPTTGAGPLPACPTVPGAPDPQDGPGATAGRPRLSPSDPEVVGTEAECALRGLSDEEHPVSTRPGREQGGEAPEPNGGPRPPTTGAGPLPACPTVPGAPDPQDGPGATAGRPRLSPSEPEVVDTEAECAPRGLSDEKRPGDAAPGEEDRPRQKFDLHFEPRHAIKSQALADFVAEWTPAPEPVSIPEASSGPSQLPHTAYWVMQFDGSLSLQGAGAGVTLTSPSGDVLKYLVRLDFRATNNMAEYEGLLAGLRVAAGLGIRRLLVLGDSQLVVNQVSKEYQCSDPQMDAYVRQVRRMERHFDGIELRHVPRRDNAVADELSRLASSRAQTPPGAFEERLAQPSARPDPLGETDAPERPPRPVGVQASGPEGSAPSSLRLIAWIAEIQAYLADKTLPEDREGSERVQHISKRYVLVEGTLYRHAANRVLLKCIPREQGVELLADIHEGECGAHSASRTLVGKAFRQGFYWPTALNDAVDLVRRCRACQFHAKQTHQPAQALQTIPLSWPFAVWGLDILGPFRRAPGGFEYLGITARFGVPNRIITDNGTQFTSELFGDYCEDMGIKLCFASPAHPRSNGQVERANAEILKGLKTKTFNILKKHGDSWIEELPAVLWANRTTPSRATGEMPFFLVYGAEAVLPSELTLRSPRATMYCEADQDQLRRDDLDYLEERRRRAAIRAARYQQSLRRYHQRHVRARSLCVDDLVLRRVQTRAGLSKLSPMWEGPYRVIGVPRPGSVRLATGDGTELPNPWNIEHLHRFYP

SEQ ID NO: 190499 - protein, 81 aa, Oryza sativa
  unsure (1)..(81): unsure at all Xaa locations
  Clone ID: PAT_MRT4530_86908C.1.pep
IPLIVHDHDNXDADVKAAHALSISKLRYKLTKEKTRSILSRKFKALTSMFAAGXLYCRFPVGTDMHTVLETATLGGTLCVN

SEQ ID NO: 190500 - protein, 1800 aa, Oryza sativa
  unsure (1)..(1800): unsure at all Xaa locations
  Clone ID: PAT_MRT4530_86909C.1.pep
MAERAVAHNHSPSASGDDGEQNPRRRARTPPPPSRRSLRREEALEGVERSATSPPTSDGEGRRDGERCLLVYGDGSTPQGALQAAGALLRHPPVVPDPETPARRWLDDVADLVMTAQQRLGAGGRSSATKASGAATAGSVSSRRRARRAAAVTRRSSAIPSSTPPTQEDVRRGPDARLSIERRRNGRRAAHATEGASSSGAPLRFGRGGQPPVPPVGGVGCRAFVASLQNVRWPPRFRPTITEKYDGSVNPAEFLQVYTTGIEAAGGDDRVMANFFPMALKGQARGWLMNLPPASVHSWEDLCQQFTMNFQGTYPRPGEEADLHAVQRRDDESLRSYIQRFCQVHNTIPCIPAHAVIYAFRGGVRHNRMLEKIASKEPQTTAELFQLADRVARKEEAWTWNSTGSGVAASAAPGSAARSGRRDRRRKKRSAHSDDEGHVLAVEGASRATRKGRPASDKKKEAGAPSXSARPASGAPCTTPPSTTSRTAXAVKSLAERTRKWEEERRQERREGKAPAAPSGNRRRFQEPRATIATVDGGACAHACRRSLKAMKRELLAAAPTHEATRRARWSEVALTFDQTDHPPCVARGGQIAMVVSPTVCNVKLGRVLIDGGAALNILSPAAFDAIKAPGMVLRPSQPIIGVTPGHTWPLGHIDLPVTFGGSANFRTERVNFDVADLSLPYNAVLGRPALVKFMAAVHYAYLQMKMPGPGGPISVYGDLKVALACMEQRADHLAAASKPEGGNERLSTFVPAAPRQRMITCDEVPEDALVSFLRANADVFAWRPADMPGVPREVIEHRLAVRPGARLVRQKVRRQAPERQAFIREEVARLLEAGFIREVLHPEWLANPVVVPKANGKLRMCIDYTDLNKACPKDPYPLPRIDQIVDSTAGCDLLCFLDAYSGYHQIRMAREDEEKTAFITPIGTYCYTTMPFGLKNAGPTFQRTTRISLGSQIGRNVEAYVDDLVVKTRNQETLLSDLAETFESLRSARIKLNPDKCVFGVPAGKLLGFLVVSAALVVERDEDNPHPAHPHPVSTRPGREQAGEAPESNGGPRPPTAGVGPPPACPTVPGTPDPQDGPGATAGRPRLSPSDPEVVGTEAECAPRGLSDEERPRDAAPSEEDRPRRKAHRVTVVTSYPLGQILHNREGTGRVVKWAIEFSEFDLHFEPRHAIKSQALADFVAEWTPAPEPISVPEASSGPSQLPHTAYWVMQFDGSLSLQGAGAGVMLTSPNGDVLRYLVRLDFRATNNMAEYEGLLAGLRVAAGLGIRRLLVLGDSQLVVNQVSKEYQCSDPQMDAYVRQVRRMERHFDGIELRHVPRRDNAVADELSRLASSRAQTPPGAFEERLAQPSARPDPLGETDAPERPPRPVGVQASGPEGSVPGSPRLIAWITEIQAYLADKTLPEDREGSERVRRISKRYVLVKGTVYWRAANGVLLKCIPREQGVELLADVHEGECGAHSTSRTLVGKAFRQGFYWPTALNDAVDLVRRCRACQFHARQTHQLAQALQTIPLSWPFAVWGLDILGPFRRAPGRFEYLYVAVDKFTKWPEAYPVIKIDKHSTLKFIRGITARFRVPNRIITDNGTQFTSELFGDYCEDMGIKLCFASPAHPRSNGQLERANAEILKGLKTKTFNILKKHGDSWIEELPAVLWANRTTPSRATGETPFFLVYGAEAVLPSELTLRSPRATMYCEADQDQLRRDDLDYLQERRRRAALRAARYQQSLRRYHQRHVRARSLCVDDLVLRRVQTRAGLSKLSPMWEGPYRVIGVPRPGSVRLATGDGTELPNPWNIEHLRRFYP

SEQ ID NO: 190501 - protein, 250 aa, Oryza sativa
  unsure (1)..(250): unsure at all Xaa locations
  Clone ID: PAT_MRT4530_8690C.1.pep
RGRSGAGVLGRRPTGGEERRFCAVSVPKEKGGTPVFITGIREFCYVKMPCGLITTGNTFQRTVQGALSNQLGNNVEAYVDDIVVKTKTSDSLIDDLRETFDNLGRYRLMLNLEKCTFEVPSGKLLGFLVSGRGIXANPEMIKAIENMKPPTCLKEEAEEAFIALKRYLSNPPVLVAPQLNEQLFLYITATPYSVSTVIVVEAQIIQLPVDYASEALHEAKSRYPQIQYLLYGYRARIRPIVNRITSPNQR

SEQ ID NO: 190502 - protein, 1282 aa, Oryza sativa
  Clone ID: PAT_MRT4530_86910C.1.pep
MAERAVAHNLSPSASGDDSEQNPRRRARTPPPPSHRSLRREEALEGVERSATSPPTSDGEGRRDGERRLLVYGDGSTPQGALQAAGVLLRHPPVVPDPETPTRRWLDDVANLVMTAQQRLGAGGRSSATKATGAATAGSVSSRRRARFRPTITEKYDGSVNPAEFLQIYTTGIEAAGGDDRVMANFFPMALKGQARGWLMNLPPASVHSWEDLCQQFTMNFQGTYPRPGEEADLHAVQRGDDESLRSYIQRFCQVRNTIPCIPAHAVIYAFRGGVRHNRMLEKIASKEPQTTAELFQLADRVARKEEAWTWNSTGSGVAASAAPGSAARSGRRDRRRKKRSAHSDDEGHVLAVEGASRATRKGRPTSDKKKEAGAPSRERPTGKWCTVHNTSLHDLADCRAVKSLAERTRTWEEERRQERLEGKAPAAPSGNRRSEAKQKAPAEDIDDGDDDLGFQEPGATIATVDGGACAHASRRSLKAMKRELLAAAPTHEATRRARWSEVALTFDQTDHPPCVAQGGQIAMVVSPTVCNVKLGRVLIDGGAALNILSPAAFDAIKAPGMVLRPSQPIIGVTPGHTWPLGHIDLPVTFSGSANFRTERVNFDVADLSLPYNAVLGRPALVKFMVAVHYTYLQMKMPGPGGPITVHGDLKVALACIEQRADHLAAACKPAGGDERLSASVPAAPRQRMITCDEVPIKQEDALVSFLRANADVFAWRPADMPGVPREKVRRQAPERQAFIREEVARLLEAGFIREVIHPEWLANPVVVPKANGKLRMCIDYTDLNKACPKDPYPLPRIDQIVDSTAGCDLLCFLDAYSGYHQIRMAREDEEKTAFITPIGTYCYTTMPFGLKNAGPTFQRTTRISLGSQIGRNVEAYVDDLVVKTRNQETLLSDLAETFESLRTARIKLNPDKCVFGVPAGKLIGFLVSARGIEANPEKLRAIERMRPPSKLRDVQCVTGCMAALSRFISRLGEKALPLFKLLKRSGPFIWTEEAERALTQLKAYLSSRPVLVAPEPDEPLLLYLAATPQVVSAALVVERDEDDPRSAHPHPVSTRPGREQGGEAPEPNGGPRPPTAEAGPPPACPKVPGAPDPQDGHGATAGRPRLSPSDPEVIGTEAECAPRGLSERDEDDPRSARPHPVSIRPGREQGGEAPEPNGGQRPPTAGVGPPPACPTVPGAPDPQDGPGATAGRPCLSPSDPEVVGTEAECASRGLSDEKRPGDAAPSEEDRPRRRVQRPVYFVSEALRDAKTRYPQAQKMLYAILMASKKLRHYFHAPRVTV

SEQ ID NO: 190503 - protein, 139 aa, Oryza sativa
  unsure (1)..(139): unsure at all Xaa locations
  Clone ID: PAT_MRT4530_86911C.1.pep
CRPTPVAAAGCLRALASAGCRAAAGSGCXHRRIRSLHHRHPNAVAIPAAVTHNTTRRNSPRPPPSPVPAAXSSPPPAHPARSGRNGADLADTAVAIPGGSPGRPSARRRGAPRCRRPCGRAASPAVARATARRRRGWGT

SEQ ID NO: 190504 - protein, 42 aa, Oryza sativa
  Clone ID: PAT_MRT4530_86912C.1.pep
AQSRSRAALNYRSREERIRDSDNLGFSAPHSTLPPLHSTPPP

SEQ ID NO: 190505 - protein, 100 aa, Oryza sativa
  Clone ID: PAT_MRT4530_86913C.1.pep
MAKWAAAMEMLLLVVVAAAAVAVVVAQAPPPPQCDPGLLSPCAAPIFFGTAPSASCCSSLKAQQGCFCQYAKDPTYASYINSTNARKMIAACGIPLPNCG

SEQ ID NO: 190506 - protein, 210 aa, Oryza sativa
  Clone ID: PAT_MRT4530_86914C.1.pep
MAARTRRRGSRGDESRSPAAMWGPPGSGSRGWGWGVGVEIARRWGGTRTVSGWTARMQRFGMIGRLGYYASVSCLSGWCGASSWVPRSSAYPSVSPSSSSAYDLPTGGLTGNGSSSASVPHSLGLHCVLLIGNAEGHAFRWTVAQQVRRHAGSVQGLSISGSLVMDNTSGSSAAASASAPPRTAYPATRAYAPAPCIGWEKPKAQPFNDG

SEQ ID NO: 190507 - protein, 1317 aa, Oryza sativa
  unsure (1)..(1317): unsure at all Xaa locations
  Clone ID: PAT_MRT4530_86915C.1.pep
MCVGGWMPASISSAGAMVVVLPTQRRALPRPERHFGPGTGATPPLSPVGGVGCRAFVASLRNVRWPPRFQPTITEKYDGSVNPAEFLQVYTTGIEAAGGDDRVMANFFPMALKGQARGWLMNLPPASVHSWEDLCQQFTMNFQGTYPRPXRFCQVRNTIPCIPAHAGAVRHNRMLEKIASKEPQTTAELFQLADRVARKEEAWTWNSSGSGVAAPAAPGSAARSGRRDRRRKKRSAHSDDEGHVLAVEGASRATRKGRPAGDKKKEASAPSRERPTGKWCSMHNTSLHDLADCRVVKSLAERTRKWEEERRQERREGKAPADPAGNRRGEAKQKATAEDVDDGDDDLGFQEPRATVATVDGGACAHASRRSLKAMKRELLAAAPTHEATRRERWSEVALTFDQTDHPPCVARGGQIAMVVSPTVCNVKLGRVLIDRGAALNILSPAAFDAIKAPGMVLRPSQPIIGVTPGHTWPLGHIDLPVTFGGSANFRTERVKFDVADLSLPYNAVLGRPALVKFMAAVHYAYLQMKMPGPGGPITIHRDLKVALACMEQRADHLAAASKPAGGDERLNPSVPATPRQRMITCDEVPEDALVSFLRANADVFAWRPADMPGVPREMIEHRLAVRPGARPVRQKVRRQAPERQAFIREKVARLLEAGFIREVIHPEWLANPVVVPKANGKLRMCIDYTDLNKACPKDPYPLPRIDQIVDSTAGQLGRNVEAYVDDLVVKTYNQETLLSDLAETFESLRSARIKLNPDKCMFGVPAGKLLGFLVSARGIEANPEKIRAIERMRLPHEALRDAKTRYPQAQKMLYAILMASRKLRHYFQAHRVTVVTSYPLGQILHNREGTGRVVKWAIELSEFDLHFEPCHAIKSQALADFVAKWTPAPEPVSVPEASSGPAQLPHTTCWVMQFDGSLSLQGAGAGVTLTSPSGDVLRYLVRLDFRATNNMAEYEGLLAGLRVAAGLGIRHLLVLGDSQLVVKQAYLANKTLPEDREGSERVQRISKRYVLVEGTLYRRAANGVLLKCIPREQGVELLADIHEGERAPGGFEYLYVAIDKFTKWPEAYPVIKIDKHSALKFIRGITARFGVPNRIITDNGTQFTSELFGDYCEDMGIKLCFASPAHPRSNSQVERANAEILKGLKTKTFNILKKHGDSWIEELPAVLWANRTTPSRATGETPFFLVYSAEAVLPSELTLRSPRATMYCETDQDQLRRDDLDYLEERRRRAALRAARYQQSLRRYHQRHVRARSLCVDDLVLHRVQTRAGLSKLSPVWEGPYRVIGVLRPGSVRLATGDGTELPNPWNIEHLRRFYP

SEQ ID NO: 190508 - protein, 165 aa, Oryza sativa
  Clone ID: PAT_MRT4530_86916C.1.pep
MGVRWMIAMVKVMEESVGCLRALGHRRAATPPPDPGCATARIRGLHHRHPNAVAIPAAITHNTTRRNSPRPPPSPVPAATPSPPPAHPARSGRNGTDLAVTAFATPGGSPGRPSARRRGAPHRRRPCGRAASSAATRATVRWRRGVGVGGEGRPGRRLLSRPWGE

SEQ ID NO: 190509 - protein, 1583 aa, Oryza sativa
  Clone ID: PAT_MRT4530_86917C.1.pep
MAERAVAHNLSPSASGDDGEQNPRLRARTPPSPSRRSLGREEALEEVERSATSPPAGNGEGRRDGERRLLVYGDGSTPQGALQAAGALLRHPPVVPDPETPARRWLDDVADLVMTAQQRLGAGGRSSATKASGAATAGSVSSRRRARRAAAVTRRSSAIPSSTPPTQEDVPAHHHRKYDGSVNPAEFLQIYTTGIEAAGSDDRVMTNFFPMALKGQARGWLMNLPPASVHSWEDLCQQFTMNFQGTYPRPGEEADLHAVQRRDDESLRSYIQRFCQVRNTIPCIPAHAVIYAFRGGVRHNRMLEKIASKESQTTAELFQLADRVARKEEAWTWNSSGSGVAAPAAPGSAARSGRRDRRRKKRSAHSDDEGHVLAVEGASRATRKGRPACDKKKEAGAPSRERPTGKWCSVHNTSLHDLADCRAVKSLAERTRKWEEERRQERREGKAPAAPAGNRRGEAKQKATAEDEPGATVATVDGGACAHASRRSLKAMKRELLAAAPTHKATRRARWSEVALTFDQTDHPPCVARGGQIAMVVSPTVCNVKLGRVLIYGGAALNILSPAAFDAIKAPGMVLRPSQPIIGVTPGHTWPLGHIDLPVTFGGSANFRTERVNFDVADLSLPFNAVLGRPALMKMPGPGGPITVHGDLKVALACMEQRADHLAAASKPAGGDERLSTSVPAAPRQRMITCDEVPEDALVSFLRANADVFAWRPADMPGVPREVIEHRLAVRPGARPVRQKVRRQAPERQAFIREEVARLLEAGFIREVIHPEWLANPVVVPKANGKLRMCIDYTDLNKACPKDPYPLPRIDQFVDSTAGLGEKALPLFKLLKRSGPFTWTEEAERAFTQLKAYLSSPPVLVAPEPDEPLLLYLAATPQVVSAALVVERDEDNPHSAHPHPVSTRPGKEQGGEAPEPNGGPRPPTAGAGPTPACPTVPGAPDPQDGPGATAGRPRLSPSDPEVVGTEAECAPRGLSGEERPRDAAPGEEDRPRRKVQRPVYFVSEALRDAKTRYPQAQKMLYAILMALRKLRHYFQAHRVTVVTSYPLGQILHNREGTGRVVKWAIKLSEFDLHLEPRHAIKSQALADFVAEWTPAPEPGAGAGVTLTSPSGDVLRYLVRLDFRATNNMAEYKGLLAGLRVAAGLGIRRLLVLGDSQLVVNQVCKEYRCSDPQMDAYVRQVRRMERHFDGIELRHVPRRDNAVADELSRLASSRAQTPLGAFEERLAQPSARPDPLGETDAPERPPRPVGVQASGPEGSAPSSLRLIAWIAEIQAYLADKTLPEDREGSERVQRISKRYVLVEGTLYRRAANGVLLKCIPREQGVELLADIHEGECGAHSASRTLVGKAFHQGFYWPTALNYAVDLVRRCRACQFHARQTHQPAQALQTIPLSWPFAVWGLDILGPFRRAPGGFEYLYVAVDKFTKWPEAYPVIKIDKHSALKFIRGITARFGVPNRIITDNGTQFTSELFGDYCEDMGIKLCFASPAHPRSNGQVERANAEILKGLKTKTFNILKKHGDSWIEELPAVLWANRTTPSRATGETPFFLVYGAEAVLPSELTLRSPRATMYCEADQDQLRRDDLD

SEQ ID NO: 190510 - protein, 199 aa, Oryza sativa
  unsure (1)..(199): unsure at all Xaa locations
  Clone ID: PAT_MRT4530_86918C.1.pep
MLKVVENNQIFCTEYGFHPEKTLEVKLNEGSSSNAFKKTRFPPEDAPDLGKEPDPAVFLSTNAGRRLEGRRRTPVAATGCLRALATTGRRRIRVHHRRIRGLHHCYPNAVAIPAAITHNTTRRNSPQPPPSPVPAAXHPARSGRNGADLADTAVATPGGSPGHPSARRQGAPHRHRPCGRAASPAAARVTARRRRGWGA

SEQ ID NO: 190511 - protein, 1439 aa, Oryza sativa
  unsure (1)..(1439): unsure at all Xaa locations
  Clone ID: PAT_MRT4530_86919C.1.pep
MGSRTRAVELVLHCPPLAEVLGGRRRSRRSKDPRLRRTRAMEKDGETGSVVSSSTANFFPMALKGXARGWLMNLPPASVHSWEDLCQQFTMNFQGTYPRPVRNTIPCIPAHAVIYAFRGACGTTACSRRSPPRSPRPPRSFFSSRTVWLARRRPGPGTPPVPVXAAPAAPGPTARSGRRDRRRKKRSAHSDDEGHVLAVEGASRATRKGRPASDKKKEAGAPSRERPTGKWCTVHNTSLHDLVDCRAVKSLAERTRKWEEERRQERREGNTPAAPAGNRRGEAKQKAPAEDINDGDDDLGFQEPEATVATVDGGACAHASRRSLKAMKRELLAVAPTHEATRRARWSEVALTFDQTDHPPCVARGGQIAMVVSPTVCNVKLGRVLIDGGAALNILSSAAFDAIKAPGMVLRPSQPIIGVTPGHTWPLGHIDLPVTFGGSANFRTERVNFDVADLSLPYNAVLGRPALVKYMVAVHYAYLQMKMSGPGGPITVHGDLKVALACMEQRADHLAAASKPAGGDERLSTSVPAAPRQRMITCDEVPIKQEDALVSFLRANADVFAWRLADMPGVPREVIEHRLAVRPGARPVRQKVRRQAPERQAFIREEVARLLEAGFIREVIHPEWLANPVVVPKANGKLRMCIDYTDLNKACPKDPYPLPHIDQIVDSTAGCDLLCFLDAYSGYHQIRMAREDEEKTAFITPIGTYCYTTMPFGLKNAGPTFQRTTRISLGSQIGRNVEAYVDDLVVKTRNQETLLSDLAETFESLRTARIKLNPDKCVFGVPVGKLLGFLISARGIEANPEKIRAIERMRPPASLGMCNASLAVVSAALVVERDEDDPRSAHPHPMSTRPGREQGGEAPEPNGGPRPPTTGAGPLPACPTVPGAPDPQDGPGATAGRPRLSPSDPEVVDTEAECAPRGLSDEKRPGDAAPGEEDRPRQKVQRPVYFVSEALRDAKTRYPQAQKMLYAILMASRKLRHYFQTHRVTVVTSYPLGQILHNREGTGRVVKWAIELSEFDLHFEPRHAIKSQALADFVAEWTPAPEPVSIPEASSGPSQLPHTAYWVMQFDGSLSLQGAGAGVTLTSPSGDVLKYLVRLDFRATNNMAEYEGLLAGLRVAAGLGIRRLLVLGDSQLVVNQVSKEYQCSDPQMDAYVRQAYLADKTLPEDREGSERVQRISKRYVLVEGTLYRHAANGVLLECIPREQGVELLAAIHEGECGAHSASRTLVGKAFRQGFYWPTALNDAVDLVRQCRACQFHAKQTHQPAQALQTIPLSWPFADWGLDILRPFIRAPGGFEYLYVAIDKFTKWPEAYPVIKIDKHSALKFIRGITARFGVPNRIITDNGTQFTSELFGDYCEDMGIKLCFASPAHPRSNGQVERANAEILKGLKTKTFNILKKHGDSWIEELPAVLWANRTTPSRATGETPFFLVYGAEAVLPSE

SEQ ID NO: 190512 - protein, 115 aa, Oryza sativa
  unsure (1)..(115): unsure at all Xaa locations
  Clone ID: PAT_MRT4530_8691C.1.pep
RKADPIRTRIHRFPNRFSRSFQSRKGRGDLEDHFPSFDSAGEGKERPNLEGNGGGGELGFGRATAARGRRXLTGGTHLSATARARAAAADWAGWAEEREXRGFGPTFGPKPKEDF

SEQ ID NO: 190513 - protein, 136 aa, Oryza sativa
  unsure (1)..(136): unsure at all Xaa locations
  Clone ID: PAT_MRT4530_86920C.1.pep
KKSFKKKQKALLSPLKNIPKKXPCARRITEFLKALRSTKGHAPKITPLKKEKPAFMGKAKGQKGVFAPPAEQFSKVQKEWHFPGGGFPRVGEARETLRAFNFGKFGRVKPQLGRGVDDKFAXDIPVFLKRFRNPSE

SEQ ID NO: 190514 - protein, 209 aa, Oryza sativa
  Clone ID: PAT_MRT4530_86921C.1.pep
VALLASGQSTTISCTFAGQVIMQGFLDMKMKNWVRNLITRVIAIAPSLIVSIVSGPSGAGKLIILSSMILSFELPFALIPLLKFCNSSKKVGPLKESIYTVVIAWILSFALIVVNTYFLVWTYVDWLVHNNLPKYANGLISVVVFALMAAYLVAVVYLTFRKDTVATYVPVPERAQAQVEAGGTPVVDASAADEDQPAPYRKDLADASM

SEQ ID NO: 190515 - protein, 944 aa, Oryza sativa
  Clone ID: PAT_MRT4530_86922C.1.pep
MEGTGEMREVGRETLHGGVVQSVSETDEYKEKTIDSEKDGQFRVQPRWRKFLAHVGPGALVAIGFLDPSNLETDMQAGADFKYELLWVILVGMVFALLIQTLAANLGVKTGRHLAELCREEYPHYVNIFLWIIAELAVISDDIPEVLGTAFAFNILLKIPVWAGVILTVFSTLLLLGVQRFGARKLEFIIAAFMFTMAACFFGELSYLRPSAGEVVKGMFVPSLQGKGAAANAIALFGAIITPYNLFLHSALVLSRKTPRSDKSIRAACRYFLIECSLAFIVAFLINVSVVVVAGSICNANNLSPADANTCGDLTLQSTPLLLRNVLGRSSSVVYAVALLASGQSTTISCTFAGQVIMQGFLDMKMKNWVRNLITRVIAIAPSLIVSIVSGPSGAGKLIILSSEFALLLQKQQYPEFLIWIQMILSFELPFALIPLLKFCNSSKKVGPLKESIYTVVIAWILSFALIVVNTYFLVWTYVDWLVHNNLPKYANGLISVVVFALMAAYLVAVVYLTFRKDTVATYVPVPERAQAQVEAGGTPVVDASAADEDQPAPYRKDLADASIICISNWEDEDFIAWHPDLHGRFSVRSAYYLALNLKNQEDTGPSNMAGDRRWDLIWKCEVPQKVRSFAWKVATDSLATMANKTKRKLERIATCGVCGSETEDTQHALLRCSQSRFLLMAMQGDGHFPVLTDVRMDNKAWLFDLLDRLSESERAALLLVLWRNWFVRNEIVHEKTPPTIESSKRFLESYIQSLFNIRQKSVVGSEKGKNVLICLGLWERGPSRIKTSLQTKMGETANRMVEEKGGIGIVMRDWEGRVIFASCKTLNSCHSALEAELVACREGIALALQWTLLPVQVETDCLVALQMIQAKEVERSELAFAVREIKDLLAGSRECLLRKVHRSQILVSHMLANKSRSENLSGFWCENDCTFISKLVIDDIIPE

SEQ ID NO: 190516 - protein, 1381 aa, Oryza sativa
  unsure (1)..(1381): unsure at all Xaa locations
  Clone ID: PAT_MRT4530_86923C.1.pep
MKRELLAVAPTHEATWRARWSEVALTFDQTDHPPCVARGGQIAMVVSPTVCNVKLGRVLVDGGAALNVLSPAAFDAIKAPWIVLRPSQPIIGVTPGHTWPLGHIDLPVTFDGSANFRTERVNFDVADLSLPYNAVLGRPALVKFMVAVHYAYLQMKMPGPGGPITVHGDLKVALACMEQRADHLAAASKPAGGDERLSTSVPAAPRQRMITCDEVPEDALVSFLRANADVFAWRPADMPGVPREVIEHRLAVRPGARPVRQKVRRQAPERQAFIREEVARLLEAGFIREVIHPEWLANPVVVPKANGKLRMCIDYTDLNKACPKXTTGCDLLCFLDAYSGYHQIRMAREDEEKTAFITPIGTYCYTTMPFGLKNAGPTFQRTTRISLGSQIGRNVEAYVDDLVVKTRNQETLLSDLAETFESLRTARIKLNPDKCVFGVPTGKLLGFLISARGIEANPEKIRAIERMRPPSKLRDVQCVTGCMAALSRFISRLGEKALPLFKLLKCSGPFIWTEEAERALTQLKAYLSSPPVLVAPEPDEPLLLYLAATLQVVSAALVAECDEDDPRSAHPHPVSTRPGREQGGEAPEPNGGPRPPTTGAGPLPACPTVLGAPDPQDGPGATAGRPRQSPSDPEVVDTEAECAPRGLSDEKRPGDAAPGEEDRPRQKVQRPVYFVSEALRDAKTRYPQAQKMLYAILMASRKLRHYFQAHRVTVVTSYPLGQILHNREGTGRVVKWAIELSEFDLHFEPRHAIKSQALADFVAEWTPAPEPVSIPEASSGPSQLPHTAYWVMQFDGSLSLXGAGAGVTLTSPSGDVLKYLVRLDFRATNNMAEYEGLLAGLRVAAGLGIRRLLVLGDSQLVVNQVSKEYQCSDPQMDAYVRQVRRMERHFDGIELRHVPRRDNAVADELSRLASSRAQTPPGAFEERLAQPSARPDPLGETDVPERPPRPVGVQASGPEGGAPSSLRLIAWIAEIQAYLADKTLPEDREGSERVQRISKRYVLVEGTLYRHAANGVLLKCIPREQGVELLADIHEGECGAHSASRTLVGKAFRXGFYWPTALNDAVDLVRRCRACQFHAKQTHQPAQALQTIPLSWPFAVWGLDILGPFRRAPGGFEYLYVAIDKFTKWPEAYPVIKIDKHSALKFIRGITARFGVPNRIITDNGTXFTSELFSDYCEDMGIKLCFASPAHPRSNGQVERANAEILKGLKTKTFNILKTHGDSWIEELPAVLWANRTTPSRATGETPFFLVYGAEAVLPSELTLRSPRATMYCEADQDXLRRDDLDYLEERRRRAVLRAARYQQSLRRYHQRHVRARSLCVDDLVLRCVQTRAGLSKLSPMWEGPYRVIGVPRPGSVRLATGDGTELPNPWNIEHLRRFYP

SEQ ID NO: 190517 - protein, 1956 aa, Oryza sativa
  unsure (1)..(1956): unsure at all Xaa locations
  Clone ID: PAT_MRT4530_86924C.1.pep
MAERAVAHNLSPSASGEDGEQNPRRRARTPLSLSRRSLGREEALEEVERSATSPHAGDGEGRRDGERRLLVYGDGSTPQGALQAAGALLRHPPVIPDPETPTRRWLDDVANLVMTAQQRLGAGWRSSATKATGVATAGSVSSRRRARRAAAATRRSSAIPSSTPPTQEDVRRGPDACFNIERRRNDRRAAHASEGASSSGAPLRSGHGGQPPMSPVGGAGCRAFVASLRNVRWPPRFRPTITEKYDGSVNPAEFLQIYTTGIEAAGGDDRVMANFFPMALKGQARGWLMNLPPASVHSWEDLCQQFTMNFQGTYPRPSEEADLHAVQRGDDESLRSYIQRFCQVRNTIPCIPAHAVIYAFRGGVRHNRMLEKIASKEPQTTAELFQLADRVARKEEAWTWNSSGSGVAASAAPGSAARSGRRDRRRKKRSAHSDDEGHVLAVEGALRATRKGRPASDKKKEAGAPSRERPTGKWCTVHNTSLHDLADCRAVKSLAERTRKWEEERRQERREGNTPAAPAGNRRGEAKQKAPAEDINDGDDDLGFQEPEATVATVDGGARAHASRRSLKAMKRELLAVAPTHEATRRARWSEVALTFDQTDHPPCVARGGQIAMVVSPTVCNVKLGRVLVDGGAALNILSPAAFDAIKAPGMVLRPSQPIIGVTPGHTWPLGHIDLPVTFGGSANFRTERVNFDVADLSLPYNAVLGRPALVKFMVAVHYAYLQMKMPGPGGPITVHGDLKVALACMEQRADHLAAASKPAGGDERLSTSVPAAPRQRMITCDEVPIKQEDALVSFLRANADVFAWRPADMPGVPREWLANPVVVPKANGKLRMCIDYTDLNKACPKDPYHLPRIDQIVDSTAGCDLLCFLDAYSGYHQIHMAREDEEKTAFITPIGTYCYTIMPVGLKNAGPTFQRTTRISLGSQIGRNVEAYVDDLVVKTHNQETLLSDLAETFESLRTARIKLNPDKCVFGVPAGKLLGFLISARGIEANPEKIRAIERMRPPSKLRDVQCVTGCMAALSRFISRLGEKALPLFKLLKRSGPFIWTEEAEWALTQLKAYLSSPPVLVVPEPDEPLLLYLAATPQVVSAALVVERDEDDPRSAHPHPVSTRPGREQGGEAPEPNGGPXRPPTTGAGPLPACPTVPGAPDPXDGPKATAGRPRLSPSDPEVVGTEAECAPRGLSDKEHPVSTRPGREQGGEAPEPNGGPRPPTTGAGPLPACPTVPGAPDPQDGPGATAGRPRLSPSDPEVVDTEAECAPRGLSDEKRPGDAAPGEEDRPRQKAHRVTVVTSYPLGQILHNREGTGRVVKWAIELSEFDLHFEPRHAIKSQALADFVAEWTPAPEPVSIPEASSGPSQLPHTAYWVMQFDGSLSLQGAGAGVTLTSPSGDVLKYLVRLDFRATNNMAEYEGLLAGLRVVAGLGIRHLLVLGDSQLVVNQVSKEYQCSDPQMDAYVRQVRRMERHFDGIELRHVPRRDNAVADELSRLASSRAQTPPGAFEERLAQPSARPDPLGETDTPERPPRPVGVQASGPEGGAPSSLRLIAWIAEIQAYLADKTLPEDREGSERVQRISKRYVLVEGTLYRHAANGVLLKCIPREQGVELLADIHEGECGAHSASRTLVGKAFRQGFYWPTALNDAVDLVRRCRACQFHAKQTHQPAQALQTIPLSWPFAVWGLDILGPFRRAPGGFEYLYVAIDKFTKWPEAYPVIKIDKHSALKFIRGITARFGVPNRIITDNGTQFTSELFGDYCEDMGIKLCFASPAHPRSNGQVERANAEILKGLKTKTFNILKKHGDSWIEELPAVLWANQTTPSRATGETPFFLVYGAEAVLPSELTLRSPRATMYCEADQDQLRRDDLDYLEERRRRAALRAARYQQSLRRYHQRHVRARSLCVDDLVLRRVQTRAGLSKLSPMWEGPYRVIGVPRPGSVRLATGDGTELPNPWNIEHLRRFYP

SEQ ID NO: 190518 - protein, 62 aa, Oryza sativa
  Clone ID: PAT_MRT4530_86925C.1.pep
FFKEPGAPDFWPPLAKVFPGFPKRNFEGSAANPPGFCNVDIPHWTGGVSHRVGYPRAPRNGP

SEQ ID NO: 190519 - protein, 118 aa, Oryza sativa
  Clone ID: PAT_MRT4530_86926C.1.pep
MCRGGAAADDAQSQAQGHVDGGRRHKPYGASRPRRRTPTPPAPPALSHACAVRPHAPTALAAAARQRRARRTPARHPPTTALAAVRPHHAPHTIQACAAVCSARSMAAVSGSGNDDGK

SEQ ID NO: 190520 - protein, 138 aa, Oryza sativa
  unsure (1)..(138): unsure at all Xaa locations
  Clone ID: PAT_MRT4530_86927C.1.pep
PCAPPLATKLRPPPPRXAEEREAGDGDGEAAGERGVVDEHETKRLCRRGKEAXRRPDVRSVAEAEAEGATVGRVVVVVAQHAMXAGEAEVVGEAGKFPPSLLCFSRXRGGGGERSVVLVVGIVAVQPRPIHTNRAGQA

SEQ ID NO: 190521 - protein, 76 aa, Oryza sativa
  Clone ID: PAT_MRT4530_86928C.1.pep
MPSPSMDYGESDKDRGKDGRIFGPDPANTTLATSQQLSPDSIHRQIWANVAEGKAGEEKERGREGMNDAGPPSTAA

SEQ ID NO: 190522 - protein, 106 aa, Oryza sativa
  Clone ID: PAT_MRT4530_86929C.1.pep
FPNPPLLPTMSRRIMNRESFNPPSLPNLAASRCWPESVILSNRAYIADCKNPTTATAQSRDGHTVQISFCFAEAPVISYFCAHCYNPRVKVEFFTEPIIVAGEGAF

SEQ ID NO: 190523 - protein, 130 aa, Oryza sativa
  Clone ID: PAT_MRT4530_8692C.1.pep
VGGGRPPPEVRPLVCPVPRGPPGGGMGKGRPPSGGGGSQKGGWGRREALLLLLFRGWKGYFFIGFERGKNELGQSLFCPFKGVRDFQKRMMWKKNCWGLPVFSRPFYKSRAKTGLNLFAWFLNSTKVNEI

SEQ ID NO: 190524 - protein, 50 aa, Oryza sativa
  Clone ID: PAT_MRT4530_86930C.1.pep
VCQRGSSYSSMMYPNVEDHWDRIQGCHHLPPTSDKTVGYTTNKAAVTHVA

SEQ ID NO: 190525 - protein, 61 aa, Oryza sativa
  unsure (1)..(61): unsure at all Xaa locations
  Clone ID: PAT_MRT4530_86931C.1.pep
GKTLEGLFFSRKGKELSHFPXSGGKTSXFWLGLEPWPLGLFRGLPLGKMGFKGRPKGNFDK

SEQ ID NO: 190526 - protein, 587 aa, Oryza sativa
  Clone ID: PAT_MRT4530_86932C.1.pep
MDEVGAARRRAVDRGAGAGAGLNTIVMNAVLEACVRCGDVGLALSLFDEMRGPGGCGVDGVSYGILLKGLGIARRIDDAFEILESIEKDTSIGSPRLSPHLICGFLNALIEAGWYKIYLFIFQYIIVIRILGCTGDMRRANALVARFRQVLYEGHSVLLYNLLMKGYIKSNFPLGALTVKDEILRQGLKPDRLTYNTIISACVKSAEIDMAIRFLEDMKEEAKRDNNPELLPDAVTYTTLLKGLGNSQDLYSVLKIVVEMKSAPISIDRTAYTAMVDALLACGSINGALCIFGEIIKQAGNNKDLRPKPHLYLSIMRAFATIGDLDMVKRLNKRMWPDSVGSISRSAKEEADELLMEAALNNNQVHDVSLFDYKYILPIFHIIIDGHTTNTANFLKSIIGFSKLYLKASQVVAVKVETLSGFTNSLLRPHVFPQIVLNDPVEKYMIPFQETQPLHADLILEEVVMRFFKDPVVPIVDDWGSCVGIVHRQDCTKIDAPLLSMSRGPPLCVPTSTSVEHVIDLLLREKSEMVVVVKRGNMYEGSYASSSRPLGVFSLAILWKFTADATDIDGMDAAHQLQQDVEASNCG

SEQ ID NO: 190527 - protein, 41 aa, Oryza sativa
  Clone ID: PAT_MRT4530_86933C.1.pep
DRKKRVYFFVASKQYKTFPFFIFKGKPNAKLAHKLFFFRVI

SEQ ID NO: 190528 - protein, 85 aa, Oryza sativa
  Clone ID: PAT_MRT4530_86934C.1.pep
QQKVTDYGRLVHDRISKLLTPTLNIKIRKLGQRSFVVHRECDISFSLRTDGSAQGNDECTKTLGMCSGSPARTRNRSTYFRQRII

SEQ ID NO: 190529 - protein, 436 aa, Oryza sativa
  Clone ID: PAT_MRT4530_86935C.1.pep
MATEAAATARCLLLPLLSPLQSPHKQQQLIFAALLLLFFFSSLQSLHCYAAAGYNEQQEADRVAFLPGQPSSPKVSQFSGYITVNRQNGRALFYWFFEAQALPSQKPLLLWLNGGPGCSSVGYGAASELGPLRVSRNGAGLEFNKFAWNKEANLLFLESPVGVGFSYTNTSSDLTKLNDGFVAEDAYNFLVNWLDRFPQYKDHEFYISGESYAGHYVPQLADLVYERNKDKKANRYIKLKGFIVGNPLTDDQYDSKGLVEYAWSHAVVSDGIYERVKKVCNFKISNWTNDCNEAMSSIFRQYQEIDIYNIYAPKCNLAQTSRVAAFDHALEASDQEQFSRRIRMFSGYDACYSSYAEKYFNKPDVQKAFHANANGMLPGKWKLYIYEGHIWTLFGPRTTHTCTQPTPTNIHCPTVPLKMGDKYLSCPSRYMTTYTI

SEQ ID NO: 190530 - protein, 38 aa, Oryza sativa
  Clone ID: PAT_MRT4530_86936C.1.pep
ECSGVVSSIGQQSQLYYIIGWWRMRVIDPFWRPVARGE

SEQ ID NO: 190531 - protein, 150 aa, Oryza sativa
  Clone ID: PAT_MRT4530_86937C.1.pep
EPRPCNTTKKQQEQRWEEEEEVPTVRNPLRLFTERLNELPPGLVPRPLVHPGNPRTTAGFRSHAAGAGEHHCPVRKPSASADPARRQTNPTLKPLGRPSPAAGKANPAEKSGQARGWGWGWRRGLGTRRPYTRRGFLAKSRGQVLIFRIS

SEQ ID NO: 190532 - protein, 77 aa, Oryza sativa
  Clone ID: PAT_MRT4530_86938C.1.pep
KRSQIFDLVHFTIRPEKEALYMLNIRAGTSMVSYMAATAGARVTSMAGGGSGQENSKGASMAGNGAGSGIFSGHDSG

SEQ ID NO: 190533 - protein, 641 aa, Oryza sativa
  Clone ID: PAT_MRT4530_86939C.1.pep
MEPETCLVDSTATHTILRETKYFTTLRKRDENILTIAGSNGLIVGSGKATVVLPMGTRIFIEEAFLYPSAERTLLTFKDIRRCGYHLATTREGGEKFLFMTSSEGDETTVVEKMPGSFDGLYYTKIKPPYEYIAMQTIFKNPKAIQIFHGVDRCFYKVEPWGGKYLDSKECREIEWNSSSIHTLDPRSPDAEQEVQRIIHLQNLANDLPDAFTDLRGVSKLHIPAANAPERVEIPMEGDFTPAPKPRKRGRDPDGLIHAKRRRPQELNTVPLASRSHSVVSKEIHPGDGRQNDKTPSRLACAPSPTGASEPSPVLGNQDEEMSEEIATDYAITGELYNRKTTHVDINFVSKIAEIVDHDLEPKSMAECRKRSDWVPDKANRNMYSVKLERSLYGLKQSGLYVDDLNIIDHVEDIEEATAYLKTEFEMKDLGQTKFCLVLQVEHLPNGILVHQSTYTKKVLERFNMSKAHPLKTPMVVRSLDKDKDLFRPRSETEEELGPEIPYLSAIGALMYLANCTRPDIAFVGSSMTDNGLIRRRAHLGPKPPARHYGVRRVGHGVPAPAPPSPPPHPMVLRPPLPLVHRDHRARLCRMGCLFESPETEAAAGTTDAGSSSAAASTSHGRFLSSTSGQGERRVELEEAT

SEQ ID NO: 190534 - protein, 375 aa, Oryza sativa
  unsure (1)..(375): unsure at all Xaa locations
  Clone ID: PAT_MRT4530_8693C.1.pep
MANFFPMALKGQARGWLMNLPPASVHSWEDLCQQFTMNFQGTYPRPGEEADLHAVQRGDDESLRSYIQRFCQVRNTIPCIPAHAVIYAFRGXACGTTACSKRSPPKSPRLPQSFFSSRTEWLARRRPGPGTPPVPEWQLRPPPDPPLRQGGVTGGGRRNXNQPITRRGPEGLGRRKKXAIQDWRGPGGSLRRARVTSLVVAVIRTIVTAFLVGVEGEREPRGRTLEAVDDVVGGVPVLRACAVLGSGRELFQRCPRGEVRVREAPKPNGGPRPPTAGVGPPPACPTVSGAPDPQDSLGATAGRPRLSPSYPEGIGAEAEGAPRCLSDEERPGDAAPSEEDRPRRKVQRPVYFVSEALRDVKTRYPRAQKMLYAIL

SEQ ID NO: 190535 - protein, 455 aa, Oryza sativa
  unsure (1)..(455): unsure at all Xaa locations
  Clone ID: PAT_MRT4530_86940C.1.pep
MPSDDEVREAGEVMILHFPEAAKSDNLFLDKIHKNFRASPAHVFGKRQIEKARSWSKTCGDVKSIFQGDGAQSEIAEKGRRDHDATEKSSKKDVTEAEAKEFLEEVRLIHRTFDKAENLFLLKDMPVHLSIDGPIDVAWTENELRRSREHGLDDPSWGFLTERSPKFPPTNNNEQNQPTLIENAYMTFSECDEYSGSPDHQEEMNEESVGYKVTSARAGVPFFCQTASEFEEMRIIPVFESSKKDVLSSFQLDPELTEPHRLIKHLIAYHESGHAIVALHTQGAHPIHQATVLPHGLSLGMVTQVASPGNTSISKQKILARIDVCFGGAVAEELLFGEHTVTAGAKNDLFTAKELAQKLVLYCXTSDTGDRMHLEKWPSVQMQATINAEVLKLLGESRERVKRLLKKHEMQLQAVANALLEKEILNADEIIKVVQPYKREPQITFQDKELAVNWS

SEQ ID NO: 190536 - protein, 69 aa, Oryza sativa
  Clone ID: PAT_MRT4530_86941C.1.pep
MATYGHPPPSCPSGRGIWTLHFGSHDALIPAQQQAVLAGRGREREMVVVARNVHPERDVSDRKVVTSMA

SEQ ID NO: 190537 - protein, 120 aa, Oryza sativa
  Clone ID: PAT_MRT4530_86942C.1.pep
MADDTNQAAPAPAPIFGSSPFGQPASSPAAPVFGAPAVPSAGVFQFGGQQGSMQQNAAFPPAGGSLEFQGGNFSLGSGGGGGDKSSRRVIKEHDLVGHHATRAFPFYALAFAISFFAITF

SEQ ID NO: 190538 - protein, 97 aa, Oryza sativa
  Clone ID: PAT_MRT4530_86943C.1.pep
YLQCPLCVRSPGRGEDKIYENGEVSIWFGNGLNKALLQCLSAVEGEDVAKEIHQGLCGAHQVARTIASKVFRQGVYWPTVLKVCDEQIKKCESYQRH

SEQ ID NO: 190539 - protein, 104 aa, Oryza sativa
  Clone ID: PAT_MRT4530_86944C.1.pep
SVRLGRRIFVCGALVLFHLAVGVVGGLGGLRRLVCAPRLLCFGCVVLTSVVRGGCCASCGIVFVLLCWLSWGRVPPSLSLLASLLVVRWVCCRLVGCPALFACG

SEQ ID NO: 190540 - protein, 1088 aa, Oryza sativa
  unsure (1)..(1088): unsure at all Xaa locations
  Clone ID: PAT_MRT4530_86945C.1.pep
IPYNYNAIFGRATLNKFEAIAHHNFLEFKMPGPTGVIVVEGIQPSVAEEGEAVAICREVYNGQVQEGERATLVLKQSPYVKVSKVQIDETDPSKMISLRGDLGEAEAKNILAVIKSNIDIFTWGPDEVGGVSPYLIMNHLAVKPDAKLRKQKLRKMSADRXGAVKAEVXKLLKAGVIXEINHPEWLANPVPVRKSNGKWQMCIDFTDLNKACPKDDFSLSRIDQLVDSTAGCEHMSFLYAYSGYHQILMNPDDRARTAFITPNGTFFHLRMPFGLRNEGATFARLICKVLCSQLGXNVEAYVDDIVVKSRKAFDHVSDLQETFSNLRLAGIKLNPEKCVFGVRAGKLFGFLVSERGIETNPKKIGTIQQMQPPKRVRKIQKLPGQIAALSRFLSRAAQRGLPFFKTLQGAGKFSCTPECQATFDELKXYLQCPPALVSPTAGSELLLYLAALPVAVSAALVQETKVGQKPVYFVSEALEGAKTRYMKMEKLAYGLVMASIKLKHYFHAHKIIVPSQYPIGEVLRGKEITGRLSKWAFELSPFDLHFLXKSQVLADFLAEWTLFDTTNNTIEYEAVLMGLRKAKALGVWHLLIRTNSKLVASQVDKSFEVKDDTMKKYLEAVRSMEKYFTGITFEHLPRGHNKEADAXGGPHSPRVFFAPSVPNLIEDIMAIDHAELGEDPKDWRTPFVKYLKTGWLRDDEAEVNCLQLRAAKYMLVSEQLYXSGVLXPLLQCLSAVEGEDVAKEIHQGLCGAHQVARTIASKVFRQGVYWPTVLKVCDEQIKKCESYQRHGRSQSIPQYKLQPIAPVWPFARWGLDIIGLFPTVRNGYRFTIVAVEYFSRWIEAEPLSSISSTAVHKFIWKNIVCRFGVPKEFITDNGKXFDSXKFREMCEGLNLEIKFASVTHPXANLAAERANGKILDALKKRLEGAPXGIWPDKVLSVHXALRITPTRPTKISSFMLLYGDEAMMPSELGANSPRVIFSGGEDGREVSRELLEGVXVKALEHMAKYGNDTLASYNKKVRPXXXXXXXXVLRKKANQMVVGKLKSKWKGAYLVKHRSRTGSFQLATLEGEELSHSWNAASLRRFYV

SEQ ID NO: 190541 - protein, 85 aa, Oryza sativa
  Clone ID: PAT_MRT4530_86946C.1.pep
FFFFFFLTILSELVTLKSHFVNYFKQCPKWPVACKGDYRILLVLQEIQTWHQPSGLHPKGNCALSKAICECPTNEDKGSVFKCGS

SEQ ID NO: 190542 - protein, 188 aa, Oryza sativa
  unsure (1)..(188): unsure at all Xaa locations
  Clone ID: PAT_MRT4530_86947C.1.pep
PEDYPLDALCAVQAERMRVGLEEAQRQHVRALVAAVARATTGRVRAAEAKLDRARCRNAELEEKLRQMSAEGQAWIGVAKSHEAVAAGLRATLDXAPLXPCAVATAAGEGDAEDAQSCCFETPGGAAAATAADAVSRATSCKAYRVTEASVPLLSFRRLCLCGAYEAAVDACPVCAATKIASVHVLLS

SEQ ID NO: 190543 - protein, 401 aa, Oryza sativa
  Clone ID: PAT_MRT4530_86948C.1.pep
MAAARLWVVAVAVAVAVAVMAAAVEGKSYNITKILAAHPEFSKFNEMLSKTRLAYDINRRQTITVLAVDNSAMASLDHFTLPTIRHILSLHILVDYYGSKKLHALSHGATASSSMFQATGSAPGTTGYVNITSHKGGKIDFISEDADESAKPSRYVKSVKEIPYDISVLQVSSVLSSSEAEAPVPPPAPVNLTELLSKKYCKSFAGLLAANADVFRAVNETKDNGLTLFCPVDAAVAAFMPSYKNLTAKAKTAILLYHAVPDYFSLQLLKSNNGMVTTLATASESKKDYSYDVQNKGETVTLDTRVVNSAVTATVGDAEPLAVYAVTKFLKPKELYKVVEAPAPAPEPSKKHKSAADDSSDDSSDDSGDVKAHKGAAAPAPLARWVTAAAAAAVAALMLMA

SEQ ID NO: 190544 - protein, 80 aa, Oryza sativa
  Clone ID: PAT_MRT4530_86949C.1.pep
MAAVAAAKSAMAVAVAAAKSAEAVTGGARSGPNPTEHPTSPSPTTAMPRTCLSDSCTALVVPVCRTASRHAAWARRRPSR

SEQ ID NO: 190545 - protein, 100 aa, Oryza sativa
  unsure (1)..(100): unsure at all Xaa locations
  Clone ID: PAT_MRT4530_8694C.1.pep
IAQLFFITRNIKQIVTTGNNPTGVPYVRALFLVPGGKAQHTQRQTGNSXRLGRRPQALDGRHELDTKAFIFXGLLFWVWEKLSKTEYTHRTXQNTPTSAE

SEQ ID NO: 190546 - protein, 814 aa, Oryza sativa
  unsure (1)..(814): unsure at all Xaa locations
  Clone ID: PAT_MRT4530_86950C.1.pep
MGENQGLEQVMGKLVEMLAKKFNEAPTTSSAVVPHTESVQKIELMQNDIKLEGVKNYLSWSRRALLILKTKGLEGYVTGEIKEPENISSVEWKTWSTTNSLVVAWLLTSLIPAIATTVETISSASEMWKTLTNLYSREGNVMLMVETQEKISVLRQGERSVAEYVAELKHLWSDLDHYNPLGLEHPDCIAKMRKWIERRRVIEFLKGLNSEFEGRRNAMFHQTTLPTLDEAIAAMAQEKLKKKVLPSATPSSPSPTYVVAQSKETRECFNCGKMGHLIRDCRAPRKPSYGRGRFGDRGGARGGRGYAXSHSNWILDSGTSRHVTGEXTGKKLGIGVRRDGLWYLDRKETSEDVCLALMASTSEEEAKKTDLSSLFIDLDDSTNGHDGHQMKDEILGPKGDEQPKKEKLVVGSIPCPMGGPVAQEQEWRKPHEEKNLQVYTRRTRCPVIQQVEEDNQVEEDVSREQGSLESGGEEEEVREESDLPIAIRKSVRSNAASLDSVQIPKDWREAKQDPRWHQAMLDELEALEKNKTWDLVPFPKGKKIVNYKWVYTVKQNPDGKVERYKARLVAKGYSQTYGIDYDETFAPVAKMSTVRTLISCAANFDWPLHQLDVKNAFLHGDLQEEVYMDVPPGFATSQTKGKVLRLKKSLYGLKQSPRAWFDRFRRAMCAMDYKQCNGDHTVFYHHCGDHITILAVYVDDMIITGNDCLEITRLKRNLSKEFEVKDLGQLRYFLGIEIARSPRGIVISQRKYVLDLLSETGRLGCRPVSTPIDQNHKLCAESGDPVNRERYQRLVGRLIYLCHTRPDITYAVSM

SEQ ID NO: 190547 - protein, 148 aa, Oryza sativa
  Clone ID: PAT_MRT4530_86951C.1.pep
VSTNCVRSLNRSKRQHSSGKSFGNLDPVEEEFPFEQELRDFKMRRLSDVGPTPDLLEEIEPTQTPYEKKSNPIDQVTQSIHSYLKLHFDTPGASQSESLSQLAHGMTTAKAARLFYQACVLATHDFIKVNQLEPYGDILISRGPKIKI

SEQ ID NO: 190548 - protein, 1061 aa, Oryza sativa
  unsure (1)..(1061): unsure at all Xaa locations
  Clone ID: PAT_MRT4530_86952C.1.pep
MGKNQGLEQVMGKLVDMLAKKLSEAPTTSNAVVPHTETMQKIELMQNDIKLEGVKNYLSWSKRALLILKTKGLEEYVTREIKEPESTSNVEWKTWSTTNSSVVAWLLTSLIPAIATTVETISSASEMWKTLTNLYSGEGNVMLMVEAQEKISAMRQGERSVAEYVAELKHLWSDLDHYDPLGRVIEFLKGLNSEFEGRRDAMFHQTTLPTLDEAIAAMAQEELKKKVLPSVTPSSPSATYVVAQSKETRECFNCGEMGHLMRDCRAPRKPSYGRGRFGDRGGARGGRSYAGRGNRGRGYEYRGDHRANVVTLEEGSSGPTNVDVANLVHSTSXSHSNWILDSGASRHVTDLPXRENCLIQERQIGKKLGIGVRRDGLWYLDQKETSEDVCLALMASTSEEEAKFIRTDNGGEYMNNEFSSFLSSEGILHQTSCPDTPPQNGVAERKNRHLLETARSLMYTMNVPKFLWSEAVMTATYLINRTPSRILGMKTPCEMIFGKNKFGVPPKVFGCTCFVRDHRPSIGKLDPRAVKCIFVGYSSCQKGYKCWSPLERRTFVSMDVTFREYVPFYGEKTDLSSLFIDLDDSTSGYDGQQMEGEILGPKGDEQSKKEKLVIGSIPCPIGGPVAQEQEWRKPHEEENLQVYTRRARCPVIQQVEEDNQVEEDVSHEQGSLESGGEDEEVREKGSDMPIAVRKGVRSNAGKKVVNCKWVYTIKQNPDGKVERYKARLVVKGYSQTYGIDYDETFAPVAKMSTLDVKNAFLHGDLQEEGCHTTILAVYVDDMIITWDDSIEIARLKENLSKEFEVKDLGMLSCRPASTPIEQNLKLCAESGDPVNKERYQRLVGRLIYLCHTRPDITYAVSVVSRYMHDPRSGHMDAVYRILRYLKGSPGKGLWFKRSGHLSLEGYCDADWASSLDDRRSTSGYCVFVGGNLVSWRSKKQPVVSRSTAEAEYRAMSVGLSEMLWLRNLLCELKLLKNTCMKLWCDNKSAINIANNPVQHDRTKHIEIDRFFIKEKLDEGMLKLDFVISGEQIADCLTKALGVAECLSMCNKMGMIDIYRPS

SEQ ID NO: 190549 - protein, 1680 aa, Oryza sativa
  unsure (1)..(1680): unsure at all Xaa locations
  Clone ID: PAT_MRT4530_86953C.1.pep
MSTSLAEVPQGGHIKEVIAEGSSGGLSSSTQLLATKRKLAASNPPTAKRRRSPIALPIVRSPGVRQIISQNEVIMERSQVAGQMSPSAESPRARSMSPVARFVSSPSAIPIELDVETQPRESTQSTPHVVTHRSGKRTLKSLIWKEFKPFYSSTGKVLYGKCIHCSKDWKFDPDVARAELLRMLVLQELPFSFVEHPGFRRFCASLNPYFRVLSRITIKGDCLAAYQEQKLALFEDWQIESKLFSITVDNASVNDSMVVELKGNLLGKLAMPCKGELFHFRCAAHILNLIVQDGLSTISGAISRIRESVKYIKASEACEQKFEEIIAQVGIVEEKRPSLDVSTRWNSTYLMLSSSLLFRRAFDSLDRFDPNFQDAPLFFDWDNAEVLCKHLKIFYDATVVVSGTSYPTVSRYFHEFWKVKVMLLNESNSEDVLVASMVSKMDTKFQKYWDLQFLQICVPVIFYPRFKLKFLEFRLKAGFGDKATGPNGYLSRIKRIVRSWFVEYSSQIGGPSAINSQEASTSGVNVGGSQFADWRQYLHDQSKSFGDPYSILTDTVEDDDVNMQLLGMRWPSAAANAATTSFVPCSFYFSNLVRLDALAVVIFVHVQSLLKIIQALQKAKQLIVSHESLSKIQPFQVFCLQKCVASVKGLEQVMGKLVEMLTKKFNEAPTTSSAVVPHTESVQKIELMQNDIKLEGVKNYLSWSRRALLILKTKGLEAYVTGEVKEPENISSVEWKTWRTTNSLVVAWLLTSLIPAIATTVETISSASEMWKTLTNLYSGEGNVMLMVEAQEKISVLRQGERSIAEYVAELKHLWSDLDHYDPLGLEHPDCIAKMRKWIERRRVIEFLKGLNSEFEGRRDAMFHQTTLTTLDEAIAAMAQEELKKKVLPSATPSSPSPTYVVAQSKETRECFNCGEMGHLIRDCRAPRKPSYGRGRFGDRGGARGGRGYAGRGNRGRGYEYRSDHRANVVTLEEGCSGSTNVDVANLVHSSSXSHSNWILDSGASRHVTGEXTGKKLGIDVRRDGLWYLDRKATSEDVCLALMASTSEEEAKEQEWRKPHEEKNLQVYTRRTRCPVIQQVEEDNQVEEDVSREQGSLESGGEEEEVKEESDLPIAIRKSVRSNAGKPPLRYGFEAQDEGDDENNISNYVSYDSLSSTYKAFVASLDSVQIPKDWREAKQDPRWHQAMLDELEALEKNKTWDLVPFPEGKKIVNCKWVYTVKQNPDGKVERYKVRLVAKRYSQTYGIDYDETFAPVAKMSMVRTLISCAANFDWPLHQLDVKNAFLHGDLQEEVYMDVPPGFATSQTKGKVLRLKKSLYGVKQSPRAWFDRFRHAMCAMDYKQCNGDHIVFYHHSGDHITILAVYVDDMVITGNDCLEITRLKRNLSKEFEVKDLGQLRYFLGIEIARSPRGIVISQRKYVLDLLSETGMLGCRPVSTPIDQNHKLCAESGDPVNRKRYQRLVGRLIYLCHTRPDIAYAVSMVSRYMHDPRSGHMEAVYRILRYLKGSPGKGLWFKKNGHLKIEGYCDADWASCLDDRRSTSGYCVYVGGNLVSWRSKKQSVVSRSTAEAEYRAMVVSLSELLWLRNLLVELKILENTPMKLLCDNKSAINIANNPVQYDRTKHVEIDRFFIKEKLDEGVLELGFVTSGGQVADCLTKGLGVKECNCSCDKMGMIDIYHPS

SEQ ID NO: 190550 - protein, 159 aa, Oryza sativa
  Clone ID: PAT_MRT4530_86954C.1.pep
SLISSPLPTRRRRRHRDSSHSSPPHPSQRPPARRRYLLLEPAAGTTTFPWSQRPALCPHGARRSAIFSRSHWPAPPLPSSPHRARDVDTIAVCVRFFAQLRQLAATTTPGFGCGWSKCASHCTAVHSHEKVSSIKMNEHPATCALLHLLPYEDEAGSSS

SEQ ID NO: 190551 - protein, 272 aa, Oryza sativa
  unsure (1)..(272): unsure at all Xaa locations
  Clone ID: PAT_MRT4530_86955C.1.pep
MDALVANYASDSDSDGDAPAATAGEAAPVPPEPSALLPPPPLDLLQPPNFVGMIDXFFTGSRVRSFPHVEGNYALHVYIPVVIPSDAKKHLVLVMRRAASFVPDLYAIDADYALSELCKDEQKLEKVLLSREFHVHQIESLVAMLRQKFRSQQRYWMDFNKWEHFVNDDCTRSFLSLEVTSTGLPEISKQITMVDDVYRLHGLPEFYKNPRPHISLAWALGDVSCKLKQAIKEIEKSQSSLGTSQISNLRCKFSHVVCKIGKKVYDICKLAD

SEQ ID NO: 190552 - protein, 137 aa, Oryza sativa
  unsure (1)..(137): unsure at all Xaa locations
  Clone ID: PAT_MRT4530_86956C.1.pep
LLFNFPFALSRIHSSILKKEIGEKPNKQYMSRAEVSDSVPPTLLRGLAVVVVIFEAGHLVVVVGVFVEVVVELPVASHGLKLIVLVLVXRSRSPPSPSAPRRRTLSARAAPRGSRPRGGAGSAPRRRMRRRRCQAGS

SEQ ID NO: 190553 - protein, 296 aa, Oryza sativa
  Clone ID: PAT_MRT4530_86957C.1.pep
MIQLLFTLLAAEAALVLVLLFRTPFRRLALLAIDRAKRGRGPVMVKTVAATMLVVLGSSGYSIAKIRRRVGDLGQLTPTDQVLASRHLLEASLMGYSLFLGLIIDRLHHYIRELRTMKKNMEAVTKQSRTLEEAKHGSVEEIQQYQKEISRLNEQVQEFKRLSETKTEELKTAEANTLALQKQSEGKRKAIIFYIYFIRNPVTKWNQKEFVSVGPSVTWVMKLAFQQVHTRPKQTPDKRETSILVQVNYGQKPPAMRQNTPLNNQDMITWIEGPTYPSKPPKIEPNQSTRYWRPIK

SEQ ID NO: 190554 - protein, 1739 aa, Oryza sativa
  unsure (1)..(1739): unsure at all Xaa locations
  Clone ID: PAT_MRT4530_86958C.1.pep
MSTSLAEVPQGGHIKEVIAEGSSGGLSSSTQLLATKRKLAASNPPTAKRRRSPIALPIVRSPGVRQIISQNEVIMERSQVAGQMSPSAESPRARSMSPVARFVSSPSAIPIELDVETQPRESTQSTPHVVTHRSGKRTLKSLIWKEFKPFYSSTGKVLYGKCIHCSKDWKFDPDVARAELLRMLVLQELPFSFVEHPGFRRFCASLNPYFRVLSRITIKGDCLAAYQEQKLALFEDWQIESKLFSITVDNASVNDSMVVELKGNLLGKLAMSCKGELFHFRCAAHILNLIVQDGLSTVSGAISRIRESVKYIKASEACEQKFEEIIAQVGIVEEKRPSLDVSTRWNSTYLMLSSSLLFRRAFDSLDRFDPNFQDAPLFFDWDNAEVLCKHLKIFYDATVVVSGTSYPTVSRYFHEFWKVKVMLLNESNSEDVLVASMVFKMDTKFQKYWDLQFLQICVPVIFYPRFKLKFLEFRLKAGFGDKATGPNGYLSRIKRIVRSWFVEYSSQIGGPSAINSQEASTSGVNVGGSQFADWRQYLHDQSKSFGDPYSILTDTVEDDDVNMQLLGMRWPSAAANAATTSFVPCSFYFSNLVRLDALAVVIFVHVQSLLKIIQALQKAKQLIVSHESLSKIQPFQVFCLQKCVASVKGLEQVMGKLVEMLTKKFNEAPTTSSAVVPHTESVQKIELMQNDIKLEGVKNYLSWSRRALLILKTKGLEAYVTGEVKEPENISSVEWKTWRTTNSLVVAWLLTSLIPAIATTVETISSASEMWKTLTNLYSGEGNVMLMVEAQEKISVLRQGERSIAEYVAELKHLWSDLDHYDPLGLEHPDCIAKMRKWIERRRVIEFLKGLNSEFEGRRDAMFHQTTLPTLDEAIAAMAQEELKKKVLPSATPSSPSPTYVVAQSKETRECFNCGEMGHLIRDCRAPRKPSYGRGRFGDRGGARGGRGYAGRGNRGRGYEYRSDHRANVVTLEEGCSGSTNVDVANLVHSSSXSHSNWILDSGASRHVTGEXTGKKLGIDVRRDGLWYLDRKATSEDVCLALMASTSEEEAKFIRTDNGGEYINNEFSSFLSSEGILHQTSCPDTPPQNGVAERKNRHLLETARSLMYTMNVPKFLWSEAVMTATYLINRTPSRILGMKTPCEMIFGKNEFVVPPKVFGCTCFVRDHRPSIGKLDPRAVKCIFVGYSSGQKGYKCWSPLERRTFEQEWRKPHEEKNLQVYTRRTRCPVIQQVEEDNQVEEDVSREQGSLESGGEEEEVREESDLPIAIRKSVRSNAASLDSVQIPKDWREAKQDPRWHQAMLDELEAPEKNKTWDLVPFPEGKKIVNSNFDWPLHQLDVKNAFLHGDLQEEVYMDVPPGFATSQTKGKVLRLKKSLYGVKQSPRAWFDRFRHAMCAMDYKQCNGDHIVFYHHSGDHITILAVYVDDMVITGNDCLEITRLKRNLSKEFEVKDLGQLRYFLGIEIARSPRGIVISQRKYVLDLLSETGMLGCRPVSTPIDQNHKLCAESGDPVNRKRYQRLVGRLIYLCHTRPDIAYAVSMVSRYMHDPRSGHMEAVYRILRYLKGSPGKGLWFKKNGHLKIEGYCDADWASCLDDRRSTSGYCVYVGGNLVSWRSKKQSVVSRSTAEAEYRAMVVSLSELLWLRNLLVELKILENTPMKLLCDNKSAINIANNPVQYDRTKHVEIDRFFIKEKLDEGVLELGFVTSGGQVADCLTKGLGVKECNCSCDKMGMIDIYHPS

SEQ ID NO: 190555 - protein, 283 aa, Oryza sativa
  unsure (1)..(283): unsure at all Xaa locations
  Clone ID: PAT_MRT4530_86959C.1.pep
MWKTLTNLYSGEGNVMLMVEAQEKISVLRQGERSIAEYVAELKHLWSDLDHYDPLGLEHPDCIAKMRKWIERRRVIEFLKGLNSEFEGRRDAMFHQTTLTTLDEAIAAMAQEELKKKVLPSATPSSPSPTYVVAQSKETRECFNCGEMGHLIRDCRAPRKPSYGRGRFGDRGGARGGRGYAGRGNRGRGYEYKSDHRANVVTLEKGCSGSTNVDVANLVHSSSXSHSNWILDSGASRHVTGEXTGKKLGIDVRRDGLWYLDRKATSEDVCLALMASTSEEEAK

SEQ ID NO: 190556 - protein, 714 aa, Oryza sativa
  Clone ID: PAT_MRT4530_8695C.1.pep
MDKKLEKQGERLDQVQTKVDLSMESLGQVHQEQIQVSQAVRRGAPSPIATPTRTLEGTSSVTRERPQIPAGFKVSAASLNLVGKAAHWYKAWRQRVGLHGWELFRDAVVREFDFGTHHIKANAMFELKQTGTVDEYKSQFDDLLYNVKLYDRTELGEVWEAKANESVMGEVAEGKKKWGFRTGRSKGGEKPKFSTGELWKAQQLKEYRRIHGLCFKCGEKYSPNHQCAQLPAAQVNVVETIDHKALLSDEMLEAVMDVEDIGQDPDMFLSLNALAGWGNTGTIHLRALVQNQVLPILVDSGSSHSFLNSHLVEKLQLLVHNVPTMTVKIANGQQMSCQQIVHNFEWWIQGKTFSHDMRVLDLGGYDAILGIDWLVKFSPMTCNWVDKWVSFVYKGDQVRLQGVKPTVAQPLPLQAVSAEQLLKWHQVLPPQRSFDHAVTLLPNTAPVNTRPYRYSPAQKDEIEQQVADMIKSGLVYNQYPLYNLFGYRKFSILMQLTFRLNKFCKNWLSLLLMSMALNWWGVAILVFRLHFNECTSCLLGHSCALLFRNLFSSVWFVNSPNMSYADHLAYCNLYPFPKELGKTSLWISLMAYHCQQLKNFVPSHVPVFSELPSTVQLDVASLEPSEILDRRLVKKGNAALTQVLVRWGTLPPACATWEDYTVLQARFPSAPVWGQPGSQGGSNVTPAGMPSAADKVDTGEGAEEEEETAKADSH

SEQ ID NO: 190557 - protein, 1299 aa, Oryza sativa
  Clone ID: PAT_MRT4530_86960C.1.pep
MGENQGLEQVMGKLVEMLAKKFNEAPTTSSAVVPHTESVQKIELMQNDIKLEGVKNYLSWSRRALLILKTKGLEGYVTGEIKEPENISSVEWKTWSTTNSLVVAWLLTSLIPAIATTVETISSASEMWKTLTNLYSGEGNVMLMVEAQEKISVLRQGERSVAEYVAELKHLWSDLDHYDPLGLEHPDCIAKMRKWIERRRVIEFLKGLNSEFEGRRDAMFHQTTLPSLDEAIAAMAQEELKKKVLPSATPSSPSPTYVVAQSKETRECFNCGEMGHLIRDYRAPRKPSYGRGRFGDRGGARGGRGYAGRGNRGRGYEYRSDHRANVVTLEESCSGSTNVDVANLVHSSSGNSNQAFMSINSSHSNWILDSGASRHVTVNLVSISSLVDHMNCRVSLDRENCLIQERETGKKLGIGVRRDGLWYLDRKETSEDVCLALMAPTSEEEAKFIRTDNGGEYINNEFSSFLSSEGILHQTSCPDTPPQNGVAERKNRHLLETARSLMYAMNVPKFLWSEAVMTATYLINRTPSRILGMKTPCEMIFGKNEFVVPPKVFGCTCFVRDHRPSIGKLDPRAVKCIFVGYSSGQKGYKCWSPSERRTFVSMDVTFRESVPFYGEKTDLSSLFIDLDDSTSGHDGHQMKDEILGPKGDEQPKKEKLVVGSIPCPMGGPVAQEQEWRKPHEEKNLQVYTRRTRCPVIQQVEEDNQVEEDVSREQGSLESGGEEEEVREESDLPIAIRKSVRSNAGKPPLRYGFEAQDEGDDENNISNYVSYDSLSSTYKAFIASLDSVQIPKDWREAKQDPRWHQAMLDELEALEKNKTWDLVPFPKGKKIVNCKWVYTVKQNPDGKVERYKARLVAKGYSQTYGIDYDETFAPVAKMSTVRTLISCAANFDWPLHQLDVKNAFLHRDLQEEVYMDVPPGFATSQTKGKVLRLKKSLYGLKQSPRAWFDRFRRAMCAMDYKQCNGDHTVFYHHSGDHITILAVYVDDMIITGNDCLEITRLKRNLSKEFEVKDLGQLRYFLGIEIARSPRGIVISQRKYVLDLLSETGMLGCCPVSTPIDQNHKLCAESGDPVNRERYQRLVGRLIYLCHTRPDITYAVSMVSRYMHDPRSSHMEAVYRILRYLKGSPGKGLWFKKNGHLKIEGYCDADWASCLDDRRSTSGYCVYVGGNLVSWRSKKQSVVSRSTAEAEYRAMAASLSELLWLRNLLVELKILGNTPMKLLCDNKSAINIANNPVQHDRTKHVEIDRFFIKEKLDEGVLELGFVTSGGQVADCLTKGLGVKECNCSCDKMGMIDIYHPS

SEQ ID NO: 190558 - protein, 218 aa, Oryza sativa
  unsure (1)..(218): unsure at all Xaa locations
  Clone ID: PAT_MRT4530_86961C.1.pep
MSASPEFYKPAPVFSPCSSPLRLLQQQHGEDHQEEYAHTHSVRVCVSMMSASPEFYKPAPVFSPCSSPLRLLQQQHGEDHQEEYGYGSSGGCCRXTPTGGESNLKAPGTCPPAPRKPRAPAAPCRKRLFEVEVLSLRLEELERLFWRPPPPPPTTQPQPQPQQPPQKRRRIGVVLESMEILIHLRSNWQERKMDGFSFRAWHPARLQQGSLCWRYEKE

SEQ ID NO: 190559 - protein, 46 aa, Oryza sativa
  Clone ID: PAT_MRT4530_86962C.1.pep
SLLSCWVPFFIIFRSPVKRYHYAPLWPVCRLLFIVIVILKIEYNYR

SEQ ID NO: 190560 - protein, 355 aa, Oryza sativa
  unsure (1)..(355): unsure at all Xaa locations
  Clone ID: PAT_MRT4530_86963C.1.pep
WNIQKRIIRFTQVRXPHDSIALFNEILKCIQDWQIERNLLGKLAMPCKGELFHFRCAAHILNLIVQDGLSTISGAISRIRESVKYIKASEACEQKFEEIIAQVGIVEEKRPSLDVSTRWNSTYLMLSSSLLFRRAFDSLDRFDPNFQDAPLFFDWDNAEVLCKHLKIFYDATVVVSGTSYPTVSRYFHEFWKVKVMLLNESNSEDVLVASMVSKMDTKFQKYWDLQFLQICVPVIFYPRFKLKFLEFRLKAGFGDKATGPNGYLSRIKRIVRSWFVEYSSQIGGPSAINSQEASTSGVNVGGSQFADWRQYLHDQSKSFGDPYSILTDTVEDDDVNMQLLGSNAGACSGGGGKTQ

SEQ ID NO: 190561 - protein, 135 aa, Oryza sativa
  Clone ID: PAT_MRT4530_86964C.1.pep
MSTSLAEVPQGGHIKEVIAEGSSGGLSSSTQLLATKRKLAASNPPTAKRRRSPIALPIVRSPGVRQIISQNEVIMERSQVAGQMSPSAESPRARSMSPVARFVSSPSAIPIELDVETQPRESTQSTPHVVTHRSG

SEQ ID NO: 190562 - protein, 1563 aa, Oryza sativa
  Clone ID: PAT_MRT4530_86965C.1.pep
MEKGIIVSILALARGPSTHVYVNNDSNTEGVKLPEKNSQTTWHQSHAPGGRRRRTLAEGASAEVGVLGGGVGRQGEFALLQQLVECCLIKMGENQGLEQVMGKLVDMLAKKFSEVPTTSNAVIPHTETMQKIELMQNDIKLEGVKNYLSWSRRALLILKTKGLEGYVTGEVKEPESASAEWRTWSTTNSLVVAWLLTSLIPAIATTVETISSASEMWKTLTNLYSGEGNVMLMVEAQEKISVLRQGERSIAEYVAELKHLWSDLDHYDPLGLEHPDCIAKMRKWIERRRVIEFLKGLNPEFEGRKDAMFHQTTLPTLDEAIAAMAQDELKRKVLPKATPPSSSPTYAMLQGKETRECFNCGEMGHLMRDCRAPRKPSYGRGRSGDRGGARGGRGYAGRANRGRGYEYRGDHRANVVTLEEGCSGPTNVDVANLVHSISGNSNQAFMSINSSHSNWILDSGASRHVTGMCGEFASYKPYPFTRKETIETADGTSCPVKGEGTVQCTPSITLSSVLYVPSFPVNLISISSLVDHMDCRVSLDRENCLIQERQTGKKLGTGVRRDGLWYLDRKETSEDVCLALMASTSKEEAKVLLLHCRLGHISFETMSKMFPAELSRVNKHKLVCDACEYGKHTRTSYVSRGLRSMLPFMLIHSDVWTSPMVSMSGMKYFVTFIDCYSRMTWLYLMRHKDEVFKCFQNFYAYIKNHFNARVQFIRTDNGGEYINNEFSSFLSSEGILHQTSCPDTPPQNGVAERKNRHLLETARSLMYAMNVPKFLWSEAVMTATYLINRTPSRILGMQTPCEMIFGKNEFVVPPKVFGCTCFVRDHRPSVGKLDPWAVKCIFIGYPSGQKGYKCWSPSERRTFVSMDVTFRESVPFYGEKTDLSSLFVDLDNSTSGHDGQQMEGEILGPKGDEQSKKEKFVVGSIPCPMGGPVAQEQEWRKPHEEENLQVYTRRTRCPVIQQVEEDNQVEKDVSHEQGSLESRGEEEEVREESDLPIAVRKSVRSNAGKPPLRYGFEDQDEGDEENNISNFVSYDSLSSTYKAFVASLDSMEIPKDWREAKQDPRWHQAMLDELEALEKNKTWDLVPFPEGKKVVNCKWVYTVKQNPNGKVERYKARLVAKGYSQTYGIDYDETFAPVAKMSTVRTLISCAANFDWPLHQLDVKNAFLHGDLQEEVYMDIPPGFATSQTEGKVLRLKKSLYGLKQSPRAWFDRFRRAMCAMDYKQCNGDHTVFYHHSGDHITILAVYVDDMIITGNDCLEITRLKQNLSKEFEVKDLGQLKYFLGIEIARSPRGIVLSQRKYALDLLSDTGMLGCRPASTPIDQNHKLCAQSGNPVNKERYQRLVGRLIYLCHTRPDITYAVSMVSRYMHDPRSGHMDAVYRILRYLKGSPGKGLWFKKNGHLEVEGYCDADWASCPDDRRSTSGYCVFVGGNLVSWRSKKQPVVSRSTAEAEYRAMSVSLSELLWLRNLLSELKLSVDTPMKLWCDNKSAINIANNPVQHDRTKHVELDRFFIKEKLDEGVLELEFVTSSGQVADCLTKGLGVKECNRSCDKMGMIDIYHPS

SEQ ID NO: 190563 - protein, 82 aa, Oryza sativa
  unsure (1)..(82): unsure at all Xaa locations
  Clone ID: PAT_MRT4530_86966C.1.pep
XIDNFWVRIWRGRLTTSNERVIATTHPSHSPNQTKKWITISTFIPTTKQKTGSPYSLHQTKNWTAISHPNLDREPNTPLVLY

SEQ ID NO: 190564 - protein, 89 aa, Oryza sativa
  Clone ID: PAT_MRT4530_86967C.1.pep
KKLFGLSPVYTLPPGPPIVFLVKISPLSPIFGGKVKFPQTPPGFFRSLLGIPGLPGQVKTPQSLFQGFFGANNNTRRGPPSFCMGPFFL

SEQ ID NO: 190565 - protein, 189 aa, Oryza sativa
  Clone ID: PAT_MRT4530_86968C.1.pep
MDRESCQVTVSVLPENEPHLFSFENVVILAYKQLQLGTFYSMPSNSFSLVASTTLHGYEFVKPFRVIHLGEVKRRNSMKKHESFLPNRLQKGKPNEHLIDRSLLTVMSTKLAAIAIASQEKRPTDSELHLLNDDDLTDDSHLLIGHFQVSHFRAILLQKAIPIIDPLYTSAILFSGQWNTTFRGLHISW

SEQ ID NO: 190566 - protein, 77 aa, Oryza sativa
  Clone ID: PAT_MRT4530_86969C.1.pep
SVPPGEMLVTCILFRFLSKYMTTTCTDYNFQPVAASPICSTRPKRWESVTWCTSSSDFPFLNSRNVPDPAHGGVTVG

SEQ ID NO: 190567 - protein, 133 aa, Oryza sativa
  Clone ID: PAT_MRT4530_8696C.1.pep
MVAGGGHRHGGAAAERGKGKGEKRRRSTAHPRSTATTKKAAGAEEGGGAALVDGVDGVPAVGGLGEGVDGVDGGAAKPEEATPGRETVPASGEGRPEVVGDGGERGRQRELDSSGETVRQGRKRAKEARGGFK

SEQ ID NO: 190568 - protein, 115 aa, Oryza sativa
  Clone ID: PAT_MRT4530_86970C.1.pep
MPWKKLRACELPSSVRIGGTIWLDPANHANPPCHSLVVLACEIEGINNLYNLYRAGMRERQSHAPNGGSVSVLHDQLGPASPNNGPHQSRFSNPRDLVGPVQFTKSVVDLAAICF

SEQ ID NO: 190569 - protein, 196 aa, Oryza sativa
  unsure (1)..(196): unsure at all Xaa locations
  Clone ID: PAT_MRT4530_86971C.1.pep
VFAADFCPNISPSLHLLLPKIPIRPSPSQPQPDSFICSMVPGRPAPPRTXTQYSRGGLLFKLSDSNMQYVTSSSFLLLTYAKYLAFSKTTVSCGGAAVTPTRLRAIARRQVDYLAHSYGQLFSGLPAIAYGVLKRANDVVDDLLSQIDAANRDRNRAQEQMEHRASAVGGAASLPRRRRTPTSPTGLLPTRRLCCH

SEQ ID NO: 190570 - protein, 75 aa, Oryza sativa
  Clone ID: PAT_MRT4530_86972C.1.pep
MALEQAVALVVQGPVPRDPMEKYAGLEGVEGRKTLTRGSHIVFHHVATLACHVDKKRPPEDGAIYGPAIQLKKKK

SEQ ID NO: 190571 - protein, 223 aa, Oryza sativa
  Clone ID: PAT_MRT4530_86973C.1.pep
MAARLRPSSPGVRRRWRAAAAGGGGGSPAARRRRRRRDDEDPLAPPTPPSTSSSQKSPSGHPLHNPNPTASYAPCTSPPAPSCCSPTPSTSPSPRRLSPAAAPPSRPRASAPSRVGSAVTTSTPSQPPTSTRRSSERLPTSPTPTASSSPASPPSPTASSSAPTTLSTTSSPRSTPPTATATGRRSRWSTAPAPSAAPRRCLVAAGLPPPPPASSPPAGCAAC

SEQ ID NO: 190572 - protein, 155 aa, Oryza sativa
  unsure (1)..(155): unsure at all Xaa locations
  Clone ID: PAT_MRT4530_86974C.1.pep
MTIMGLFYTVKQDDKSTVQNSEVHIDAFIDQLGSSSYYSRIEQTWELNSTKFKVLLFRCHWVNLRTGVKVDKEGFTTIDLSKVGYMDEPFVLAKXVMKIFYIHYPTNKKLHVVRDGRRIVRVDNVVDEDDXNQNLHVSLHIDLDNGTEEEVVHVC

SEQ ID NO: 190573 - protein, 59 aa, Oryza sativa
  Clone ID: PAT_MRT4530_86975C.1.pep
GSGVGRGGGRRGSSPSLEGWSWEAAAWWWAAERAGGEASVAPELRGWRRAVGRCWWRGH

SEQ ID NO: 190574 - protein, 139 aa, Oryza sativa
  Clone ID: PAT_MRT4530_86976C.1.pep
PLSEPREERGEGKRGVGSPVVERRRRRRQNMFPSDAHPGRVVASQGEEGDGRNGGDKSSAPAIREGGGVGLSQGGGRGGRGGRRLGHGGSGVQGRATAAGFSFLAATFAAAAWLGRFGPAQLSWAGSPRGRRKIEGKRI

SEQ ID NO: 190575 - protein, 69 aa, Oryza sativa
  Clone ID: PAT_MRT4530_86977C.1.pep
VIPILRASVLTHMVPRVDAIRRQHRAMVVQVVRQVARLLCIRRRRHSDASYSVPHGRNPGRRSSRSIPP

SEQ ID NO: 190576 - protein, 63 aa, Oryza sativa
  Clone ID: PAT_MRT4530_86978C.1.pep
FFLSTTSLLPKGGLLYKIRGGLPPNLKMLLPALLNVAGNYFSHLELQLPREPPHVNYQPNDEQ

SEQ ID NO: 190577 - protein, 75 aa, Oryza sativa
  unsure (1)..(75): unsure at all Xaa locations
  Clone ID: PAT_MRT4530_86979C.1.pep
MGGSTTVXDGTLSHGDFVASAKALIEKWKEIDVDDALPDWRWKPCCKMGVPSEEEGYLALEGVYRNHGGSQVQSC

SEQ ID NO: 190578 - protein, 316 aa, Oryza sativa
  unsure (1)..(316): unsure at all Xaa locations
  Clone ID: PAT_MRT4530_8697C.1.pep
NGILILRSIVLAPSRASPWSYHLSPPSPSPSPTXPASSRLSLLTGASSGRVVASLGSATPSPSPASPSPRRXSPERRLLFIAGAPIDAAVSSFDTAASPSSPASPPPRPNFAGTPSSPRRPLLPPRRLVAPLHHHLHQHRSGVFHAVPSSAQPLLPAIIVSSSSPIVLVXRRPIGRPARRLAAPPPSSSSLRRVPRRPRLRAAVAGCPRRLLAGCPRSLLAGPGRRRPRPLVVPDRRGVRPSVKPFSFVVXLRQDRCSPVLVFVLGSASSSLVPAASRLRPRIAAEAVPSPFVSVAPVCLRRARSSLSFPRLVAWW

SEQ ID NO: 190579 - protein, 65 aa, Oryza sativa
  Clone ID: PAT_MRT4530_86980C.1.pep
GRLPAAELASSHRRPRVVRRPAEGFDGGRATDEQPTDMPPSGWSAGDGVRQIAQAAAARPLRPRA

SEQ ID NO: 190580 - protein, 69 aa, Oryza sativa
  Clone ID: PAT_MRT4530_86981C.1.pep
HEAIWSTINVHTKLVEDFLTKMLRHIWHTHNDMIMQIFVQSSKFTHKVQNIDTPGKNREGVFYNIDNIH

SEQ ID NO: 190581 - protein, 77 aa, Oryza sativa
  Clone ID: PAT_MRT4530_86982C.1.pep
GSRWQLCSSNRSSCPRCACCLGSVGSAPLLRGLPLVGREHRVRSRSEGRLQHMVSVAMPRRRVQTPRRPPLLPLLLL

SEQ ID NO: 190582 - protein, 139 aa, Oryza sativa
  Clone ID: PAT_MRT4530_86983C.1.pep
MDAHRRGRLARMRWKQQTPAQVELRSRDGDRRRRGGGGGGGGPTPGVESEGWVIATMVQGVMGQGAGFRGFRGNPFRSGGEVRERFIANFQGIYVSSGQVLIQQRKNESLKDYIRAEKPSTTVEKHFEMKLRNPAFPDS

SEQ ID NO: 190583 - protein, 57 aa, Oryza sativa
  Clone ID: PAT_MRT4530_86984C.1.pep
WRRISPVHHNQYSKLANGELSYLLSLLCLKRRCSYLMLFPSSVVSQIKLGPQNRIHL

SEQ ID NO: 190584 - protein, 1003 aa, Oryza sativa
  unsure (1)..(1003): unsure at all Xaa locations
  Clone ID: PAT_MRT4530_86985C.1.pep
CRRNPSSSSSSSRQAAAISMAPANPRHRLIAPIHAAAAAGGGGGGAGATSPSGLPSVSRQSVKMHAAXVAISHDLPIELTCFLKQAFAAASIKFPSALFGMFCVFSVLVVLDAFAPALAKGFMDFFEPATLFIQRWLPLFYVPSLVVLPLAVRDVPAASGLKIFLIIFGGWFASLMVAGYTALTVRKIVQTQLIPAEPMSKPSPFATLEFWAWGAVFVASFAVAYVNPTALGTTARTCLPFLLASTVLGYMVGSGIPSGVKKVLHPIICCALSADLAAIAYGYLSRSGVDAVLGDYLTKAPSNPGAGDVLMGFLGSVIISFAFSMFKQRKLVKRHAAEIFTSIAIASTFSLYSTAILGRVIGLEPSLTISILPRCITVALALSIVSFFEGVNSSLTAAVVVLTGLIGANFVQAAMDKLGLNDPIARGIGTASSAHGLGTAALSAKEPEALPFCAIAYGLTGIFENMNTPRRENAKAIFTKSKTNYEVQGKSQARTARTSAGTGGRQEAAPRQQEAFGWEEASAAKVDSDEDDAAEECDDGAVVLGGVEREVAGEEVLQVLQPPDAIGAQHLDHAVHQLDEDILYYYPLAKTQKSSANLSVPKNCLSPGNLNLLGLGQPHLGRIVIILVEMRGILEYKEYNTVNRLFQFACKAEREVQGRNKHRSSFAGATSTRQSTPRQFTTAVRPPTSTPSHAQETSKNASVQTPAKSATSVASTGRTRDITCHRCHGIGHIARDYPNQRALFVNDDGEYTSTSDCDDEYALVATDHVGGQDNDDIEEVHLHPESLDQYPSLIVKLALSAKEKCEEQNQRHNLFQSKVLVKGHTVKVIIDSGSCNNLASEEMVKKLGLTTHPHPHPYHIQWFNTCGKMKEYEGAFHDEIPPRMTPGRQSEHDQEDGIESRTTPIQEGEDDEDITSSETHITSHVPMIIPSPSPVRPPETALTSNGPSAFMPTPIWVILDLMERLSRYLSNASGLMSKFISSQRESSKQDSDVAETELGPWAL

SEQ ID NO: 190585 - protein, 76 aa, Oryza sativa
  Clone ID: PAT_MRT4530_86986C.1.pep
MGRLELSVPQIKRRMDTLDMQTEEIQYNLEEHIAQTQEWQQNADAQFTNINNLMQQQHDDLQTYFRFQGFNPYQGP

SEQ ID NO: 190586 - protein, 63 aa, Oryza sativa
  Clone ID: PAT_MRT4530_86987C.1.pep
YPTTSFQVQKVHLDSLEAGPLEHEDSPRPPLRPFPSPCPPPPPPPPPPAAATPPPLGHLGQTP

SEQ ID NO: 190587 - protein, 61 aa, Oryza sativa
  Clone ID: PAT_MRT4530_86988C.1.pep
ASRFSVYDRSCSQGFKIIQLKIPSETIETSQLLLPGNAILDKCFVHLVQDFLKLSTIRIMF

SEQ ID NO: 190588 - protein, 80 aa, Oryza sativa
  Clone ID: PAT_MRT4530_86989C.1.pep
MATLLFPCRWQRIGTNPLKPKFNCPKLKMQFFIRDDGRRLNVSSLWAYEALGKHRWSCAKIKSNPGVKKLRQTLKTLYGN

SEQ ID NO: 190589 - protein, 77 aa, Oryza sativa
  Clone ID: PAT_MRT4530_86990C.1.pep
QEIFLGCRQTIVESNETVSEPFNNITIKGFLTFPAYIFSIGDLLSNRINARPIGAFMAYLSTVIGDEPNCPTLWLDN

SEQ ID NO: 190590 - protein, 39 aa, Oryza sativa
  Clone ID: PAT_MRT4530_86991C.1.pep
LVKMYVLQVYDVGSIPICSKLKFNNYYLNFSAVIRLFQK

SEQ ID NO: 190591 - protein, 75 aa, Oryza sativa
  Clone ID: PAT_MRT4530_86992C.1.pep
LKMAAAQHDMSSHTMIVRARHVSTGRSSTEYLNHESMISRRNMRDSQDTSRMLYLPNHSVLKVHQRSSVRVCIHR

SEQ ID NO: 190592 - protein, 1583 aa, Oryza sativa
  Clone ID: PAT_MRT4530_86993C.1.pep
MFSMHTIVVAHHGQIRSGKIQLPKLRPPPEPLATLINFNGDARSKRFLRQIRSYNSMFAFTSMGASIDKSINTGNAPYVFKINGVVHHWIGCLLPSHGSPPKFAQLYIYYPENETQNRLNIFENDGDNADRADPEIIAALSLMLDSENSLVQNFRYARERLSEHGNQQLTLRLLGCNAKDDVQYNLPTSGEISGIIVGDFLAKEYKFDVLVYDKDHGLHQVSPLHPSYMALQYPLLFPYGERGFHLGIKYNNYDGIGRKYVTMQEFFRYRMHYRLNEPNPFTCYGRLSDQIDVDVFSTIEANRLQFFIDHQPELRAESVDGIVDAIDGIVDAIDRGVTDGDSVGKRMILPASFIGGRRYMGQDRARIYFETTGKTTNASPNHDLAPQDEILEYMDGRFLSTCESLHRLFEFDIHYRMPSVERLVVHLPGKNYVRYEKGSNLRAVLKSPAAKSSMLTEWFEANKKYPKAHSLTYCEFPKEQTWEPSSRVWRPRTPAPKIGRIYYVHPTAGELYYLRMILMIVRGAQSYADVRTYNGIVYSTYREACEAQGLLEGDNEWYLLFDEAILTASSQQLRQLFVTILLYCSVIDVRSLFDKYWIHMTDDIHNRLKKALDNPHCIIPQDHLLNLLLHELATVFAKSGGDIKDFNLPHPTSIAHIAGGNRLIDEELTIDPLMLSMHADSLITQLNTEQKHIFDVISSRVAHNQPGFFFVCGHGGTGKTFLWNAIIAKLRSQNKIVLAVASSRVASLLLPRGRTAHSRFKIPIDIDETSICNIKRGSMLAELLIEASLIIWDEAPMTHRRCFEALDRTLRDILSQTCATNSIIPFGGKPVVLGGDFRQILPVVPKGSRHAIVNASITNSDLWKHVTVLTMNINMRLLNTNLEQKQKDELHDFSKWVLAIGNGTIPMTTKEGESYPSWIEIPHDLLIITDGDKISAIVNEVYCDFFASYMNPEYLASRAIVCPNNATIDEINDYVIGLVPREARIYLSCDTISKCAEQIPDFDLLYPPEFLNSINAANFPTHRLILKEGDRILQCIILIGSNIGDTVYIPRITLSTTKMKWPFTLQRRQFPIRVCYAMTINKSQGQTLQRVGVYLRKPIFTHGQLFQMAHILISQLSCGDSNIRIKARVSRLWDFHDLNDDRKIVHTDLVLLDETGNSIHAQMYQHVIVNLKPLLQEGKVYYIDSFTVRYANRTYRPVAHSLMILFTKWTTLEECVDVPADFPAITFSLTPFGDVPSLVDKNIFYVGLTLTGSSPCKWYINFEIPEVVELKESFSTNFQPIRWNDAPPAGFNQSNPQEKTLKDILDLNPHKHKYKLVLIAGDTTADATFILFGKTAQRIIRRPVESLIEENPPDSEFIPREILALVDNGFLWNVSFTKDINRSEETLQVNSVISSGPANQPPLLMSPSTSQPASAIVSASSSSSLQTAPTPSETSTESQLAIIPAQGTSTPTKYTPAAATDETPTSKSSSLVFTKKSIIVSGYSMPSHTAKTSTDTKAKIGTHHEEKISQSASLTTIVPRDTSDKCFFYKAKVTAESPDESPQADPSLAPKSTPKKRGRPTETTTIAKKLFKDSTQKKPTDSE

SEQ ID NO: 190593 - protein, 249 aa, Oryza sativa
  Clone ID: PAT_MRT4530_86994C.1.pep
MPKRRRGVPPAPSPALATIDYSLTYNEIAASGAPGSVNAIFWCTISMLKTTFPDPFQFLHVIWLKEFQKFDDKSSAINVDTGVNKQLTEMIMKWRRPRQKLVVGKPEYKSIIETTLVYNDIVRAAAIVFRCDAVEKDLYEHLQHLGRHLKNVSGIDYENWGTVKLATAFKIICSRKIDKSDEMFSDDVRSKLLDDADKYKDLVFRTGLNILRNDKVDQLAELVKVARIKAEHVRVKPMLNRSLNLLQAK

SEQ ID NO: 190594 - protein, 90 aa, Oryza sativa
  Clone ID: PAT_MRT4530_86995C.1.pep
AIELILMAASGGVAAGLLSCCLLRPGLGMHELTISNTELDHLFDGMQQKEDTFSQIALAPTLLGGREYYTIHMHLLGATKRCNFIQHTVT

SEQ ID NO: 190595 - protein, 1148 aa, Oryza sativa
  Clone ID: PAT_MRT4530_86996C.1.pep
MAISYPPEDGRYYCSSVAAGDDSPAAHHTNAHDDWDWDWVPPPPADAAAAAAADDDDDDGDPTPAGSPGSRGEDEEEERQRAQMVSAMNGQLNMLASRFLASAGVEEEWLEVVTALSWEAALLIQTHACTAGNDMDPASHVKIKCVASGRRRQSQVVRGLVFRKNAAHKHMPTKCHRPTLLLLHGALGLDSHLGFSSFDSMEQDKLILRASISHIIHTCSPNVVMVEKTVSRDIQELLLHHGVTLLLDMKLHRLQRIARCSGAPLLSFSQLLHDCPNHLKHCDYFHIDKFFEDHNTTTTTSAAALNKPSKTLMFLEGFSNPLGCTILLRGASTQELKKIKQVLHYTIFAAYHLVVETSFFEDQRVFLNDTNVDGTPQITHQTSIVSNRSLPTDYDVTCTSRGSLLEYHDGDHKATVPFTNKPDSYTQDEGTAIHCEAPPSENLLSSVSGSLRRFIDIFRYQNIYLPVTSSQDTTGHQNEQDTETSQETASDTLTKDHSCEYMDQLNDLQEQVFAKTNQKMSQPDPFGTEKHQQNVEQYRAGENINSDTDEADDVMDSQSILILLSSQCVTKQVVCEESHLYRINYYGNFDVSLGRYLQDILQNQNLSCSSCGEPPDAHMYSYTHRNGNLTINVRRLLPQHHLPGESEGKIWMWTRCLRCEHERGISKSSRRVLISTEARNLSFGKFLELSFSSHSAARRLSVCGHLVNRDCLRYFGLGSKVAKFQYSSVEIYTACKPQRTLEFHNPDMREWFEQEGRNVLARGVKLFYEVSSLIQHMKIFSEVAINCGDSLPVKEVSQLEEMLIEEKAQFVDSLVKAVDESGMSSSSVNEILGVNCLYQDLLIRLYVWDRRFHQIVECKSGRMANCVGKKEAAEFAGEPAATGESAVPFENGYIKEMQYSSETLTDENSRREEQHITKVPSFRVLEGTDTQLINPECGDNRETWIWSPLHELRESYRHELQAGYLERFELVNNYSPSHLSPLHKQSSAEFIVGPGGNVLCISEDEISSIISRALAISEERRHLLLDALMVEGEAAYSRGSESSKMEKSYSSLSEASSASSSWSSIGSSDSDASFSSDDLFSSYDSSLLSSLLHPEVSVNGKSSLKGKYSVICVHANQFYTLRKKCCPSELAYITSLSRCMKWDAQGGK

SEQ ID NO: 190596 - protein, 658 aa, Oryza sativa
  Clone ID: PAT_MRT4530_86997C.1.pep
MPPLPLSLLASTPEVDQGEGFLSIDCGLDQDSRTDSLVGGITYVSDGAYVDAGENRRVTTVYKDDWKGPRYQTLYTLRSFPTSVTGERSCYSLPTKKGDKYNVRLEFLYGNYDGLDSASLTFNLTLGVNHWDTVILDTTIHYGYKAYAAVFVAWAMSAPVCLVNTGGGTPFVSTVELRPFESLAYPTDNQSLSLYERKSMRSAFVPVGNSNELVLRSKRRDRLPGDHLVILHFADFQDNKTREFTVSIDSGMQSGPISPPYLKGWSIINWSSDSEDLSIKLVATATSSLPPILNAYEVYSRIIHEYPMTFSQDWMPAAVIGAVRRDGRSARLLGIVPYYLFRERPVKAVQSLTKVNHRNLVSLIGYCWEKDHLALVYEYMSSGNLSDYLREVTSGEPTIIPGNGHIVERVKQKMVTGNISSVADARLGGSYNVNSMWKVLDAAMMCTADIAAQRPMMSAVVMQLKESLELEEAHGDMGDMENIARDNKADSKQFVRVGQSNAEKERLALDRSGSELGDMESSVEDGVRGGGGTLGFGVDDDGSSGSTLELHGGALGCGMQSSAAGFDTEDGGSGGDGIGRQRRCPRLWDLAGVMSSRPTDLAVPILGRGGSATLGHIRGDHDIGWRTADPTAPPVGRADQPPLAPRGSGKEGTRSKRI

SEQ ID NO: 190597 - protein, 164 aa, Oryza sativa
  Clone ID: PAT_MRT4530_86998C.1.pep
ARGQTLTLQDARPPPQLAMPKRRRGVRPPPPDPSPAPATIDYSLTYKEIAASGAPGAVDFVNNHGLYLLLLETPSGFSIFSLCGVYIHLPDAIQNIWAMFGTYRSAHDVIWLKEFQKFDDKSSAINVDTGVNKQLTEMIMKWRRPRQKLVVGKPEEYPACVMKL

SEQ ID NO: 190598 - protein, 155 aa, Oryza sativa
  Clone ID: PAT_MRT4530_86999C.1.pep
MWAIFRYYITGRLTESSDVFSFGVVLLEVTSGKPPIIPENGHIIERVRQKMVTGNINSVADARLGGSYNINSMWKESLELEEAHGDMGDMENVARDNKSLMSMFAGGSAIGGGQERPTSGWSGSELGNVGSSVEDGGSGGGGTLVLGIGALGYGI

SEQ ID NO: 190599 - protein, 277 aa, Oryza sativa
  unsure (1)..(277): unsure at all Xaa locations
  Clone ID: PAT_MRT4530_8699C.1.pep
MTSPPAAAARRLGRLGRRTLAGERRRSGTNEGHQRIADGTANSPATKATAEEERTAMTTKKKRRRSSAXRRRRCSGGLRRWRRGGRGRRRLGDHDGGLPEQRRRLKRWRRTAGAAAATVALGHTVLGRYGRREAKARVAAGRGDTEEPFKGARRQRRRPTAAGDEKESSGKSNPKQTRIHEFPNDFSRCFQRRKGRGDREDHFPSINSAGEGKDRPNLERNGGGAKLGFRAAAAGGRRRPHLSAGGRARARRTWPDWAEERESGFGPTFGPKPKETF

SEQ ID NO: 190600 - protein, 85 aa, Oryza sativa
  unsure (1)..(85): unsure at all Xaa locations
  Clone ID: PAT_MRT4530_869C.1.pep
XXXIINXRXXSXXXXXXDLXRIYFTXIIGXXXXXNPXFNXFXXLTEQGLIGRXRXXXQFXXRXCXXXXKXTXKVAXXXXGXRXPP

SEQ ID NO: 190601 - protein, 108 aa, Oryza sativa
  unsure (1)..(108): unsure at all Xaa locations
  Clone ID: PAT_MRT4530_86C.1.pep
KPTTQKIIHYYALLDIAVCSDYAQTDADTKAHRQXKLQADVMLLEQMLNTCGEFRRHICSTGATXLLQSTVSQLINSQVMHNNLYKHIRMIAQQSHYHANIRAQAIVH

SEQ ID NO: 190602 - protein, 366 aa, Oryza sativa
  Clone ID: PAT_MRT4530_87000C.1.pep
MGFISEVFAVLADMDYSVVEGRAWTHCGCLGCLFFLRDEETDTERMARIEAASDTSSAAAPVAPTAAPWPPSPPPPRTPSAASTSSCRPTVAPAVPLPPGSQTSLHLSCCEDKKEGEKVFSCAVDFVKNHGLYLLLLETPSGSSIFSLCGVYIHLPDAIQNIWAMFGTYRSSHDVIWLKEFQKFDDKSSAINVDTGVNKQLTEMIMKWRRPRQKLVVGKPEYKSIIENTLMVYNDIVRAASIVFRCDAVEDLYEHLQHLGRHLKNVSGIDYENWGTVKLATAFKIICSRKIDKSDEMFSDDVRSKLLDDADKYKDLVFSTGCIANYKKILGLNILRNDKMDQLAELVKVARIKAEHVRVPENVPEN

SEQ ID NO: 190603 - protein, 650 aa, Oryza sativa
  Clone ID: PAT_MRT4530_87001C.1.pep
MPPLPLSLLASTPEVDQGEGFLSIDCGLDQDSRTDSLVGGITYVSDGAYVDAGENRRVTTVYKDDWKGPRYQTLYTLRSFPTSVTGERSCYSLPTKKGDKYNVRLEFLYGNYDGLDSASLTFNLTLGVNHWDTVILDTTIHYGYKAYAAVFVAWAMSAPVCLVNTGGGTPFVSTVELRPFESLAYPTDNQSLSLYERKSMRSAFVPVGNSNELVLRSKRRDRLPGDHLVILHFADFQDNKTREFTVSIDSGMQSGPISPPYLKGWSIINWSSDSEDLSIKLVATATSSLPPILNAYEVYSRIIHEYPMTFSQDFNFRQFHLSAATHASCSLQAAKRLRVRGGSKPLVQSLTKVNHRNLVSLIGYCWEKDHLALVYEYMSSGNLSDYLRAGSMGYIDPEYYITGRLTESSDVYSFGVVLLEVTSGEPTIIPGNGHIVERVKQKMVTGNISSVADARLGGSYNVNSMWKVLDAAMMCTADIAAQRPMMSAVVMQLKESLELEEAHGDMGDMENIARDNKFSMSIADSKQFVRVGQSNAEKERLALDRSGSELGDMESSVEDGVRGGGGTLGFGVDDDGSSGSTLELHGGALGCGMQSSAAGFDTEDGGSGGDGIGRQRRCPRLWDLAGVMSSRPTDLAVPSSAGADLPPLAT

SEQ ID NO: 190604 - protein, 109 aa, Oryza sativa
  unsure (1)..(109): unsure at all Xaa locations
  Clone ID: PAT_MRT4530_87002C.1.pep
FPAALVLLSMGFLGPEARVLGDDIEKDARKNVKTAPGKYATNMEGVFAAGDCRRGQSLIVWGINEGRQXAREIDLYLEKYTSLPVTGGIVKRTAQEIFSAVKPVAPVAA

SEQ ID NO: 190605 - protein, 323 aa, Oryza sativa
  Clone ID: PAT_MRT4530_87003C.1.pep
STDDSPTVPEQISPPGHWTNHWDHLQKPENRRFTYEELAKFTDSFKCLIGHGGFGNVYYGCLEDNTEVAVKMRSESSSHGLDEFLAEVQSLTKVNHRNLVSLIGYCWEKDHLALVYEYMSSGNLSDYLRGLEYLHKGCNLPIIHGDVKTNNILLGGNLKAKIADFGLSKTYHSDSQTHISAIAAGSMGYIDPEYYITGRLTESSDVYSFGVVLLEVTSGEPTIIPGNGHIVERVKQKMVTGNISSVADARLGGSYNVNSMWKVLDAAMMCTADIAAQRPMMSAVVMQLKESLELEEAHGDMGDMENIARDNKFSMSMLGPSAR

SEQ ID NO: 190606 - protein, 58 aa, Oryza sativa
  Clone ID: PAT_MRT4530_87004C.1.pep
INSTNYMFKYELPPSQNKRNWMRHFLVVRIWIAYFLILDSYILGWKSIGLRKFKYVSV

SEQ ID NO: 190607 - protein, 227 aa, Oryza sativa
  unsure (1)..(227): unsure at all Xaa locations
  Clone ID: PAT_MRT4530_87005C.1.pep
CPSTSTVWTSLPKGATVAVEGWEPLTTITLFLCVGLDYLHKGCNLPIIHGDVKTNNILLGRNLKAKIADFGLXKTYHSDSQTHISATAAGSMGYIDPEYYITGRLTESSDVFSFGVVLLEVTSGKPPIIPENGHIIERVRQKMVTGNINSVADARLGGSYNINSMWKVLDAAMMFTADXAQRPMMSVVVMQLKESLELEEAHGDMGDMENVARDNKSLMSMFGPSPR

SEQ ID NO: 190608 - protein, 675 aa, Oryza sativa
  Clone ID: PAT_MRT4530_87006C.1.pep
MSAPVCLVNTGGGTPFVSTVELRPFESLAYPTDNQSLSLYERKSMRSGADVDIIRFPDDQYDRYWYAWELTGNDPYSNISTQSAIELNTTFMVPLRVLQTAFVPDNKTREFTVSIDSGMQSGPISPPYLKGWSIINWSSDSEDLSIKLVATATSSLPPILNAYEVYSRIIHEYPMTFSQDFDAIMAIKHEYGIRKNWMGDPCYPSNSVWDGVECTNPGDDKTMRIISLDLSNSELQGQISYNFTLFSALKYLNLSCNQLTGTIPDYLRKSNGSIVFSYESDGDMCKKPITSSSRNRAATLAVYVAAPVLVVAMLVVAYLIWRAKRKPHFSTDDSPTVPEQISPPGHWTNHWDHLQKPENRRFTYEELAKFTDSFKCLIGHGGFGNVYYGCLEDNTEVAVKMRSESSSHGLDEFLAEVQSLTKVNHRNLVSLIGYCWEKDHLALVYEYMSSGNLSDYLRGKTSMGGTMNWATRVRVMLEAAQGLEYLHKGCNLPIIHGDVKTNNILLGGNLKAKIADFGLSKTYHSDSQTHISAIAAGSMGYIDPEYYITGRLTESSDVYSFGVVLLEVTSGEPTIIPGNGHIVERVKQKMVTGNISSVADARLGGSYNVNSMWKVLDAAMMCTADIAAQRPMMSAVVMQLKESLELEEAHGDMGDMENIARDNKFSMSMLGPSAR

SEQ ID NO: 190609 - protein, 73 aa, Oryza sativa
  unsure (1)..(73): unsure at all Xaa locations
  Clone ID: PAT_MRT4530_87007C.1.pep
LIFNPMWNQLSVRDSXIYSWDPNPTYIHEPSYYQDMTMSSLGPHGVKNAYCLLYLCGQNYLHTIYSPPGSIYI

SEQ ID NO: 190610 - protein, 74 aa, Oryza sativa
  Clone ID: PAT_MRT4530_87008C.1.pep
MARLPPGFEPPIRRAHDGHDPDTPLRACAPRNKSNKIDPFATKLRLVNRTTQYEGARSLGSYTQQIGQFGRLGI

SEQ ID NO: 190611 - protein, 49 aa, Oryza sativa
  Clone ID: PAT_MRT4530_87009C.1.pep
SIKAMSGQNNQGAYINPTHEQTLLTKTNKSSQGRYSKLCSKFTYFTSHI

SEQ ID NO: 190612 - protein, 296 aa, Oryza sativa
  unsure (1)..(296): unsure at all Xaa locations
  Clone ID: PAT_MRT4530_8700C.1.pep
GXDERTRTSTSGTGEKVTRTAGSGCTGTRTTRNTPLRXTXRRRRRETTSRATDGTSTMRTVGDDDXDHGGVWMEGKRCRGGPCRCDAGGGSGAASRRAGEEEGPAXKDAGDEEDGETGAATAFRRXNRGAAGVEGDAATPREETVTSADAQARRPGRLEMVEWWRHHXVVGEDASPVISPRNGGEVGKEEAAARPREKTARPGGARARRGRRLEVAGANERGGRRRERSSGGLLAKRRAGRRGGGGGDAGGGDGAAGRRTSEAAQAAGGRRRRGRERATAGMGLETPGRLGMGLKR

SEQ ID NO: 190613 - protein, 145 aa, Oryza sativa
  Clone ID: PAT_MRT4530_87010C.1.pep
MTPVRSFVQEATIPERWLVEGVTFPAVTEAVLLWEFMCGAVVDFDLTMDTFGYEELPYIIWEGDKDEEEKGVPRLRGSPGMCGPMVGGGNKGRINGERWSAEGSSASSIVGGVLLKQKVWMHGSGSWGVEERWVLEIGICIEWFD

SEQ ID NO: 190614 - protein, 269 aa, Oryza sativa
  Clone ID: PAT_MRT4530_87011C.1.pep
MEDIMDVFMDDFSVYGKTFNYCLQNLDRILQRCQENDLVLNWEKCHFMVCEGIVLGHLITKRGIGVDRPKMEVIRQLPPPVNVKGVCSFFGNAGFYRRFIEDFSKIARPLTALLAKDVLFDFDDEYPKSFKILKESLILAPIIQPPDWSLPFEIMCDATDFAAGAVLGQTKDIKHHSIVYASKTLTGAQLNYATTEKELLAVVFVIDKFRSYLVGAKELPINDYLRDDMLLKVTDSNPWYATIVNFMVAGHVPPGENKKRLTYESRRHL

SEQ ID NO: 190615 - protein, 51 aa, Oryza sativa
  unsure (1)..(51): unsure at all Xaa locations
  Clone ID: PAT_MRT4530_87012C.1.pep
MVQNCMAQDLFWKGPAKKWEEVFFGLGVXGTHPGIEGEELAPLSKENVAPP

SEQ ID NO: 190616 - protein, 84 aa, Oryza sativa
  Clone ID: PAT_MRT4530_87013C.1.pep
APFSESPQKGIAPDGMESLSKKGHVALPAGPPMAQSPKKEPAPPQRAPPQKLPSDQRKARPVEKLNAPPFPPGADVDSQEKDSE

SEQ ID NO: 190617 - protein, 413 aa, Oryza sativa
  Clone ID: PAT_MRT4530_87014C.1.pep
MAFARTPMVHMIANAIGVTKTVVIQKNNPAAQSITLGISFLIVGLLFILMMRQKRRMNEYFRKNGGSVLQKVENIKIFTKDELKKITKNNSEVLGQGGFGKVYKGILEDNTLVAVKASIEVNDARKEDFTNEVIIQSQMIHTNIIKLLGCCLEVDVPMLVYEFAANGNLQDILHGDNNRRVPLPLDLRMDIAVEAAEGLRYMHSSANRTIRHGDVKPANILLNDKFKPKISDFGTSKLLTVDKDFTMFVVGSMGYIDPVFHKTGRLTQKSDVYSFGVVLLELITRKPTIYDANCSLLIDFQKAYEQENSGRAMFDKDFTIEEEIFILEEIGRLAMECLKEKVEERPDMKEVAEQLVILRRSRKSRQGNYNISPQQFEEMSTEGTPLSLETAVSVSSSVLSAPSTPANNDFSNA

SEQ ID NO: 190618 - protein, 60 aa, Oryza sativa
  unsure (1)..(60): unsure at all Xaa locations
  Clone ID: PAT_MRT4530_87015C.1.pep
AFVFTKQWPSGDEAGESQGNKSEAGINSSXTASLTSPSGRSDCGPTAGLTDGIMPVRPDH

SEQ ID NO: 190619 - protein, 349 aa, Oryza sativa
  Clone ID: PAT_MRT4530_87016C.1.pep
MAALDQQPLLHDGGDQKPPPEGAARRFRRCRTAPSSEPPPTDKDNSSAADAPPKTLFTGGGRPSFRLVGLLLVAYLLLGTIAFYLAMDHMSGTRTTRALDALYFCVVTMTTVGYGDLVPASDAAKLLACAFVFAGVAVVGTFLSKAADYLVEKQEALLFRALHSHTMVRAMEMNKVRYKLYTAGLLLVAAVASGTVVLWKVEGMRAVDAFYCVCATVTTLGYGDRSFSSEGGRAFAVAWITVSTVVVALFFLYAAELYTERRQRELARWVLRRRTTNMDLEAADLDGDHRVGAADFVLYKLKELGKISQEDISEFLDEFDNLDADHSGTLSPADLAAAQPTPDPPPSLR

SEQ ID NO: 190620 - protein, 98 aa, Oryza sativa
  unsure (1)..(98): unsure at all Xaa locations
  Clone ID: PAT_MRT4530_87017C.1.pep
AGPDPRDRRAGTGRTRGAAAPHKRGRTRGHAQAPEDPXXGGTGAXNKXPSPXKGKXGXGAHRTEEGKPXGPKGXRRXEQXLXNNPXXXKEXXPXTGXA

SEQ ID NO: 190621 - protein, 180 aa, Oryza sativa
  unsure (1)..(180): unsure at all Xaa locations
  Clone ID: PAT_MRT4530_87018C.1.pep
TKGSCFFQGIFVFSXPQMVGCXFPFGGNXFSPPXMEMGGXXLVWLSKGXGGKKWLXLFPLLEVKFFSGILIPPFFFQNQXPRPKPXFXXLXXRXKFPPTPFPEFXFGEKGLGKFPPLXWEVVXFXPXPGELIXFFPNFPPPPPKPPPXLVLAPRPRPXVXREGFXFKGGRGKAXRGAXXE

SEQ ID NO: 190622 - protein, 76 aa, Oryza sativa
  Clone ID: PAT_MRT4530_87019C.1.pep
MATGAGERCGVGASLRRLLAQQNLGMSSTEVKSTCPNLDEAKTTEVARTALYMAIWPEARWPAQGPINLAQGPSKA

SEQ ID NO: 190623 - protein, 128 aa, Oryza sativa
  Clone ID: PAT_MRT4530_8701C.1.pep
IGMTHFYSRHCGHLTPACVFQLWSTTTAMTCSGHLSICMSLPCVTSPHYVATHIPNHTQKYPRGQGRDSGHQGGRQWCGAALGCSIYRASIGDRRKCSGRQHISVGGVSSFCSLGIGKYAQRQPHTGV

SEQ ID NO: 190624 - protein, 121 aa, Oryza sativa
  Clone ID: PAT_MRT4530_87020C.1.pep
MATGAGERCGVGASLRRLLAQQNLGMSSTEVKSTCPNLDEAKTTEVARSRSNDSQSEVFLAVQHSPIYGHMARGSMARSRPDKFGPGPVQGLVILARPGPCWPGPTAVTCLSFYLDTLGWH

SEQ ID NO: 190625 - protein, 260 aa, Oryza sativa
  Clone ID: PAT_MRT4530_87021C.1.pep
MSSRQPIGSGGGGAPPDWHDVEPQWQPVDDVVTVAAAAAYLAAPAGATLSSESADRRWRPVGPSAAAAAAALQAVEAQGAAAAERHYRGVRRRPWGKWAAEIRDPNKAARVWLGTFDTAEAAAAAYDDAALRFKGAKAKLNFPERVRGRTGQGGFLVSPAVPRPPPHGVPAPAPAVAPAPFPDLIQYARLLRSGEDAAAAAAVAGIAATAAPAAQILDFAAQRLVGVSPAMAPRPPSTLPTTTTAASSPSAWPHGGGHGS

SEQ ID NO: 190626 - protein, 46 aa, Oryza sativa
  Clone ID: PAT_MRT4530_87022C.1.pep
SLPKNFFNRSISSHTWILLYSIHTHVLFIKNHSISSSHLYLYKLLY

SEQ ID NO: 190627 - protein, 147 aa, Oryza sativa
  Clone ID: PAT_MRT4530_87023C.1.pep
MAIGSELPAPLASKLLKFDGARQLPSSLPTTRNMTFCDEFLVTSELFVTSTFHFMTISMRWGGLVTKKSALCHTALGWAREGMSKMEEREIKGERGRRRERMIYGTNVVTDTWTPLLATSSSQLNNLRSNQIQYNLRKIPKGLDEKE

SEQ ID NO: 190628 - protein, 283 aa, Oryza sativa
  Clone ID: PAT_MRT4530_87024C.1.pep
MKQSGSLLHSSLTPLECPMLTVCWKWNAPAAALSSCPEAEPRLFPLLNKLFARPAVPASLLLPADIVHDEDAPNTTSNQSFVSAIQWLDKQPNGSVIYVALGSEAPITTNHVRELALGLELSGVRFLWALRPPSGINSQTGTFLPSGFESRVATRGIVCTEWVPQVRVLAHGAIGAFLTHCGWGSTVESFCFGHPLVMLPFVADQGLIAQAMAARGIGVEVARNYDDGSFYRDDVAAAVRRVMVEEEGKVLARKAKEVHSILGDRAREEQYLDEFVGYLQRYK

SEQ ID NO: 190629 - protein, 39 aa, Oryza sativa
  unsure (1)..(39): unsure at all Xaa locations
  Clone ID: PAT_MRT4530_87025C.1.pep
MAMLTGARGXGGFGRRRGGRGGARGGECNGVDGAARRDG

SEQ ID NO: 190630 - protein, 954 aa, Oryza sativa
  Clone ID: PAT_MRT4530_87026C.1.pep
MADLALSTVHALLGVIRKEAELLGGVRGDVQFIRDEMESINGLLRHLAGTKERASDHQVRAWIKQVMELAYDSNNCVERYARTRSGRRRRRGFLGSLRRAARLPWAMWVRRRVATRIRQLKVRAREVGERQQRYGVAVPAKKDGAAAAEDDGDNKRPLEYSSMPRKVAGGGDASRRRAAAIVSECGTDHMLKEHYKPMLQPPSSGSGTPVTAAATSPFKCRLSVTLRRPTNLMEVLMDMLRQLQSEGCVESMGDDVQTWDLDTLKEKIKNSLRGKRLLLFLTNADYLDIWFPIEEVLASTDCDHGSAVVLSSKDREVANKLMPPLMNTSTISDNMNNGSASAAAAAAVEVELTSSYNTSDAVKQVLTRCDTDDFCAKVFLHALHNNPNRTADELKILTENLAPDRCSNDPLEKRVRLAAFCYYGLPDRYKNCLWYAAAFIRGSYDIRRASLTRRWIAEGLIIRSGQPTEQEEAERCVDTLLSLNLLIPKERERGVIEGKVKTCSVNTPVIDIVNGSRSISASTVDDFLDTNQLPLDLDLHFSIRNGIRIRQLDAMDGSTMEPRPPAPKKQLESVMEFLRKLPSSSRLRLLRVLDLEGCGVIITNRHLNNICQIRKLKYLSLRGTNIVWLPKKLHQLELLETLDIRQTRVCVFESTLPKSLKHLLAGRVDCLGDDAVTVKSKESFSTVRMPSGIPAGDMSKLEILSHVWVSDSAKELDNLGEKLKQLRKLGVVLCGGSKANLKDLFAQINKLHTTLRSLSIRMKPVSSWGSTEAVLMTPPLLLESLRICGVRDWLPRRMKELNNLSKLTLRDTLLNEDNLAVLGALKGLRCLRLRYHSFDSGGLTFSSDTFPNLVGLVIEDDMLVTITFAPGTAPKLAKIIWSFQRMESLTGIKNLQSLRRIELNLLAGNGATDDYPQLKQEIKEHPGKPVLVCQLIDPKKGGQVANRAIGVATT

SEQ ID NO: 190631 - protein, 83 aa, Oryza sativa
  Clone ID: PAT_MRT4530_87027C.1.pep
EMPCTWNWEEQLYNFVAIHNLCHFHITRNTIIYSNKRQHSKAIYLGLFKIAKGTPQNACNHQGKCKINKDQTCILFPFPRLRQ

SEQ ID NO: 190632 - protein, 561 aa, Oryza sativa
  Clone ID: PAT_MRT4530_87028C.1.pep
MAGGFSVSGSGVEFEAKITPIVIISCIMAATGGLMFGYDVGISGGVTSMDDFLREFFPTVLKKKHEDKESNYCKYDNQGLQLFTSSLYLAGLTATFFASYTTRRLGRRLTMLIAGVFFIVGVIFNGAAQNLAMLIVGRILLGCGVGFANQASNFPIILSLQAYSIISFHIISYGVKQKIRTGNLLAELVPLGEYVQAVPLFLSEIAPTRIRGGLNILFQLNVTIGILFANLVNYGTAKIHPWGWRLSLSLAGIPAALLTLGALFVVDTPNSLIERGRLEEGKAVLRKIRGTDNVEPEFNEIVEASRVAQEVKHPFRNLLQRRNRPQLVIAVLLQIFQQFTGINAIMFYAPVLFNTLGFKTDASLYSAVITGAVNVLSTLVSVYSVDRVGRRMLLLEAGVQMFLSQVAIAVVLGIKVTDRSDNLGHGWAIMVVVMVCTFVSSFAWSWGPLGWLIPSETFPLETRSAGQSVTVCVNLLFTFVIAQAFLSMLCHLKYAIFAFFSAWVVVMSLFVLFFLPETKNIPIEEMTERVWKQHWFWKRFMDDADKHHVVPNGGKSNGATV

SEQ ID NO: 190633 - protein, 145 aa, Oryza sativa
  unsure (1)..(145): unsure at all Xaa locations
  Clone ID: PAT_MRT4530_87029C.1.pep
MQPNSKAKTRRNNESRKNGGDAPKCIKLSSLDYMGMGHIYTRTMNGFNXPDDGHRANFPDTGCIGLASSDPVLSRYVAVDTIXPIRVAADAVCNRCVLCFLERTFSNXALFPISNPIHGITKFGRNHHLSFIFKLKLILNPFLFP

SEQ ID NO: 190634 - protein, 214 aa, Oryza sativa
  Clone ID: PAT_MRT4530_8702C.1.pep
MANQHARSNGEKHQGNTNPRQDYSFSLTPVPGQRNQNEKRKCRVRKDICCFSCQEMGHFADKCPKPRNMAASTSVHATPRNQKLAPQRIVIHASRSSPIARVATAPTPTSALPQGVNAPFQSHPPADETEASICVVPLDVPIQQLINQVQDEEPECKKVIVCYNCSEEGHYSRDCPQPRQNRPPHFRQFTGSKHANRQVVTGANAVPVKPSASQ

SEQ ID NO: 190635 - protein, 87 aa, Oryza sativa
  Clone ID: PAT_MRT4530_87030C.1.pep
EERLGVAAGAPASSSSPSSPRCSSSPPLHITSNSSFVCYLYCNHYYALLPTFFYHCHHCSQSSHRDPHIVHSSYHDLVHISDIDSIS

SEQ ID NO: 190636 - protein, 1399 aa, Oryza sativa
  unsure (1)..(1399): unsure at all Xaa locations
  Clone ID: PAT_MRT4530_87031C.1.pep
MEEDEVEDDNIPDFAQYAGFEGNQTGEEERDADGNNVADDLGQMLQDAKEDCESEKGAHKLDKMLEDHRTSLYPGCEQGHKKLDTTLEFLQWKAKNGNILPEGNKLPETTYEAKKIVCPLGLEVQKIHACPNDCILYRGEEYENLEACSVCKALRYKIRRDDPGEVDGQLTKKRIPAKVMWYFPIISRLRRLFRNKVNARMMRWHAEERQQDGMLRHPADGSQWRNIDRKFKDFGKDARNIRFGLSPKQPGNDIDVYLRPLVEDLKLLWKKEGVPVWDEDKQEEFNLRALLFVTINDWPALSNLSGQSNKGYNACTHCMDESESTYLKHCRKVVYMGHRRFLAANHPVRKKGKHFEHKADHRTKPKHRSGKTVFAMVKDLKVVFGKGPGSQPIESEDGHAVMWKKNSIFWELPYWEFLDVRHAIDVMHLTKNLCVNLLGFLGVYGKLKDTLEARNDLKHMEQRGDLHPEPKEKGSHYLSPASYTISKAEKDILPDNVRATITKLRAFMNAISQKVIDPDRLEALQNDVVQCLVSFELIFPPSFFNIMTHLLCHLVKEIGILCPMYLHNMFPFERYMGVLKKYVCNRARPEASIAKGYGKEEMADCDEEQILYDTIIEGSSQYWNEEEGNDDLNQYLNEEGNVERDAEGNEEGNDEEEASGSHPSAGQKRARGQRGAAKKIEGRHIITEVDEDGRPSAPAEAAKNFVRHNGWVVRDNVPVSTVYWRRTWARGDNDSFVPDSEKEMLWTTMLEMFTLPAGTENIVKHWTLKKMAEQFQSFKGDLYKKYILKGLTPNFDVFPKLRDHWDEFVAYKTGQQWQAMMARNKDNAAKKKYHHHLGSGGYSVAMPKWEEMEASLIERGIEPATAKWPDRSKFWYYAHGGTLNPVDGSLVFSDQIREAASRLTDAVVASSQGTFRPDREKDELSLALQTPEHPGRTRGKGMIPWKIGFKEDIHTYRSRMRSKRDTDAKIADLEYRVSSYELSMQEEVARKVDERMAAHQSQDPHPYIHPAMVSPSGNHSSCASTGQVGSQSMDAMQTQDETTCPVDEITQRTPCELHIPFKNLSIKVASGMVIPTDPSRTYHCKPIPAGYSRVVVELVEAAYEDLELDYPGGDGEVKRQLKPWSPEKKIPINPSVKNFFKGMSTTNKEALQISDYDRTLQRAYHKKSKPVPQLGEQPNQEVEPLVTSEDFGITEFISDTGLTVDQLVGGAPIPKAEVAYKFELGKPLIKPEQLQSLSTQMYKFHERYMEMSAKGREMFGARIRNPDFLQGEDVLWIHFKDLFDLYQLDTLDVSLLSAWILMXDSMGPTAEGLRYWVHRPSENQHRNDRQVRERHRGQSRPSPNAAAFQDVHTTAVQHRNSLQLHMWGLGSVPSIGPWDLERKTWMEVSFSMCKAGPGN

SEQ ID NO: 190637 - protein, 243 aa, Oryza sativa
  Clone ID: PAT_MRT4530_87032C.1.pep
MEKTCQAYLEQTLCWTSSLLIDFFQLLTPARREAGVEYEVVPLSLTNGDHRRPEHLARNPFGQIPVLEDGDLTLYQSHAIARYVLGKHKPELLGLGEGGSVEESAMVDMWLEVETHQYEAAVKPIVWHCLVHQHVGLVRDQGVVDESVEKLRAVLEVYEARLSSSSAGRYSYLAGGGSGDRVSLADLSHVPLMHYFTATEYGGVLGEYPRVKAWWEALLARPSVKKVIAGMPTDFGFGSGNLP

SEQ ID NO: 190638 - protein, 105 aa, Oryza sativa
  unsure (1)..(105): unsure at all Xaa locations
  Clone ID: PAT_MRT4530_87033C.1.pep
RERITASLDDGVRAPSNGTLAFSSSGFMMSVRKVVAPSKMIEXTLMVTEETATSVKASPESFDRVALGGQCHQQLDGDGERLCVANKVDEMASRCSIRTAWAATG

SEQ ID NO: 190639 - protein, 1366 aa, Oryza sativa
  unsure (1)..(1366): unsure at all Xaa locations
  Clone ID: PAT_MRT4530_87034C.1.pep
MEEDEVEDDNIPDFAQYAGFEGNQTGEEERDADGNNVADDLGQMLQDAKEDCESEKGAHKLDKMLEDHRTSLYPGCEQGHKKLDTTLEFLQWKAKNGNILPEGNKLPETTYEAKKIVCPLGLEVQKIHACPNDCILYRGEEYENLEACSVCKALRYKIRRDDPGEVDGQLTKKRIPAKVMWYFPIISRLRRLFRNKVNARMMRWHAEERQQDGMLRHPADGSQWRNIDRKFKDFGKDARNIRFGLSPKQPGNDIDVYLRPLVEDLKLLWKKEGVPVWDEDKQEEFNLRALLFVTINDWPALSNLSGQSNKGYNACTHCMDESESTYLKHCRKVVYMGHRRFLAANHPVRKKGKHFEHKADHRTKPKHRSGKTVFAMVKDLKVVFGKGPGSQPIESEDGHAVMWKKNSIFWELPYWEFLDVRHAIDVMHLTKNLCVNLLGFLGVYGKLKDTLEALVIRDILPDNVRATITKLRAFMNAISQKVIDPDRLEALQNDVVQCLVSFELIFPPSFFNIMTHLLCHLVKEIGILCPMYLHNMFPFERYMGVLKKYVCNRARPEASIAKGYGKEEMADCDEEQILYDTIIEGSSQYWNEEEGNDDLNQYLNEEGNVERDAEGNEEGNDEEEASGSHPSAGQKRARGQRGAAKKIEGRHIITEVDEDGRPSAPAEAAKNFVRHNGWVVRDNVPVSTVYWRRTWARGDNDSFVPDSEKEMLWTTMLEMFTLPAGTENIVKHWTLKKMAEQFQSFKGDLYKKYILKGLTPNFDVFPKLRDHWDEFVAYKTGQQWQAMMARNKDNAAKKKYHHHLGSGGYSVAMPKWEEMEASLIERGIEPATAKWPDRSKFWYYAHGGTLNPVDGSLVFSDQIREAASRLTDAVVASSQGTFRPDREKDELSLALQTPEHPGRTRGKGMIPWKIGFKEDIHTYRSRMRSKRDTDAKIADLEYRVSSYELSMQEEVARKVDERMAAHQSQDPHPYIHPAMVSPSGNHSSCASTGQVGSQSMDAMQTQDETTCPVDEITQRTPCELHIPFKNLSIKVASGMVIPTDPSRTYHCKPIPAGYSRVVVELVEAAYEDLELDYPGGDGEVKRQLKPWSPEKKIPINPSVKNFFKGMSTTNKEALQISDYDRTLQRAYHKKSKPVPQLGEQPNQEVEPLVTSEDFGITEFISDTGLTVDQLVGGAPIPKAEVAYKFELGKPLIKPEQLQSLSTQMYKFHERYMEMSAKGREMFGARIRNPDFLQGEDVLWIHFKDLFDLYQLDTLDVSLLSAWILMXDSMGPTAEGLRYWVHRPSENQHRNDRQVRERHRGQSRPSPNAAAFQDVHTTAVQHRNSLQLHMWGLGSVPSIGPWDLERKTWMEVSFSMCKAGPGN

SEQ ID NO: 190640 - protein, 319 aa, Oryza sativa
  unsure (1)..(319): unsure at all Xaa locations
  Clone ID: PAT_MRT4530_87035C.1.pep
ADSPSCXPQHISNSREASSGAAGVHSLTGARPGREAEAKGGESHLRRMTRSGGCAHVGDEPVRDAAGVIVAAMTISEPSPLPSRLIRPPSSTFINISISSQMDSSIHLQIIQEATPKKVLMATTGDAFTLVAVSSVTINVYSIIFDGATTFLTLIMKPLEEIAIRSAAARCLHAVLPERTTDRRSTRGSTLPSCPDPGGLDGAVGDARRAALALKLVTIIMQLRHCHVVFVLADQTLSHCLPEHVGLRQSAIARGPYAVIKTGRDSFSSSSRGRCAVCPRRFHFIMLELFVMSREHHVGAPLLGAYKPSSSRSRRAVRP

SEQ ID NO: 190641 - protein, 1736 aa, Oryza sativa
  unsure (1)..(1736): unsure at all Xaa locations
  Clone ID: PAT_MRT4530_87036C.1.pep
MATSPSDDDDQNDGGARLEQRRRLRHVMDRQWMYADRRSKKFIDGVHYFLRVAEADRQKGFIFSPCNKCKNQKEYSASRTIHFHLFESGFXPSYNCWTSHGEQXYTGFEGNQMGEEERDADGNDVADDLGQMLQDAKEDCESEKGAHKLDKMLEDHRTLLYPGCEQGHKKLDTTLEFLQWKAKNCVSDKAFGDLLKLFKNILPGGNKLPETTYQAKKIVCPLGLDVQKIHACPNDCILYRGEEYENLEACLVRKALRYNIRRDDPGEVDGQLTKKRIPAKVVWYFPIIPRLRRLFRNKGNARMMRWHVEERQQDRMLRHSADGSQWRNIDRKFKDFEKDARNIWFGLSTDGMNPFGEMSSGHSTWPVTMCIYNLPPWLCMKRKYIIMLIIIHAPKQTGNDIDVYLRPLVEDLKLLWKKEANHPVRKKGKHFEHKADHHLKVVFGKGPGSQPIESEGGHTAMWKKNSIFWELLYWEFLDVRHAIDVMHLTKNLCVNLLGFLGVYGKSKDTLEARNDLKHMEQRGDLHPEPTEKGSHYLSPACYTLSNAEKESMFNCLESIKVPSRYSTNLKRIISTKEKKFTNLKSHDCHVLMTQLLPVVIRGILPDNVRATITKLCAFMNAISQKIGILGPVYLHNMFPFERYMGVLKKYVSNRAHPEASITKGYGIEEVIEFCVEFIEDLRPIGVPESRHEGRLRGKGTLGRKAIMTVYNNLLFRKAHFTVLQKSLLVAPYIEEHLALVRARNIGKSDAWITRHHIDTFSAWLRQHLMGNETINQQLAFLVRGPSGSITTFQGYEIIGYTFYMRAQDMKSTNQNSAVRIDAMGHDGTTGTYYGAIEDIWEHDYVPLKDMSSKAKKGKGPNEPKRHVVLPGKRKIVGVEDKTDEDYDQFDGQPPFTVTIDPSILLSNEDTPYSRSDHKEGTIVRRKEDVVVVPQAEVMADRDEKQILYDTIAEGSCQYWNEEEGNEDPNQYLNEEGNVERDAEGNEEGNDEEEASGSHPSTEQKRARGQRGATKKIEGRHIITEVDEDGRPSAPAKAAKNFVRHSGWVVRDNVPVSTVYWRRTRARGDNDSFVPDSEKETLWTTMLETFTLPVEQFQSFKGDLYKKYILKGLTPNFDVFPKLRDHWDEFIAYKTGQQGQVMMDRNKENAAKKKYHHHLGSGGYSVAMPKWEEIEASLIERGIEPATAKWPDRLKFWYYAHDXEAASRLTDAVEASSQGTFRPDREKDKLSLALQTXRASRAKIADLEYRVSSYELSMQEEVARKVDERMAAHRSQDPQPYIPPAMVSPSGNRSSCALTGQVESQSMDAMQTQDETTCPVDEIMQRTPCELHIPLKNLSIKVASGLAIPMDPFGTYHCRPIPAGYSRVEVELVEAAYEDLELDYPGGDGEVKRQLKPRSHKKKIPIDPSMKNFFKGMSATNKEALQISDYDRTLQRAYHKKSKPVLQLGEQPNHEVEPLVTSEDFGITEFISDTGLTVDQLIRGASIPKAEVAYEFKLGKLLVTPEQLQSLLTQMYKFHERYMEMSAKGREMFRARIRNPDFLQGEDVLWIHFKDLFDLYHLDALDVSLLSAWILIEIQRARRRRVYDTRFIDPRKINTEMIDKYEKDTEDNLVHLLTVTVYDSMNKEEKIFEKVFQLIDSLQLHMXAWDRFRQLVRGTWKEKLGWRFHFPTVTAWSLEPARRTQEGRRRIGGVQLPGSWAAARAARRLHLRPRVGIAVSFSSCAIVTFLGGGGGKS

SEQ ID NO: 190642 - protein, 315 aa, Oryza sativa
  Clone ID: PAT_MRT4530_87037C.1.pep
YLNEEGTVERAAEGNEEGNDAEEASGSQPSAGQKRARGQRGAAKKIEGRHIITEVDEDGRTSAPAEAAKNFVRHSGWVVRDNVPVSTVYWRRTRARGDDDSFVPDSEKEMLWTTMLETFTLPAGTDNLVKRWTLKKMAEQFQSFKGDFYKKYILKGLTPNFDVFPKLRDHWDEFVAYKTGQQGQAMMARNKENAAKKKYHHHLGSGGYSIAKPKWEEMEVSLLERGIEPATANWPDRSKFWYYAHGGTLNPVDGSLVFSDQIREAASRLTDVVVASSQGTFRPDREKDELSLAGRLNFRAHSRTNTRERRDSLED

SEQ ID NO: 190643 - protein, 113 aa, Oryza sativa
  unsure (1)..(113): unsure at all Xaa locations
  Clone ID: PAT_MRT4530_87038C.1.pep
PARNPTHKHPYHSIPSVNMQFTTSFIVAAFLGTAFAMPQAAPVDCPETSAIPTCGAPCITSAAAAAGCTDIACQCASSEVIQASALGCVXXNCGIPXALSXQAAAAAGCTGWA

SEQ ID NO: 190644 - protein, 213 aa, Oryza sativa
  Clone ID: PAT_MRT4530_87039C.1.pep
MARTAWRCALVILTGVLLCAAVETAVAAKRVSIPDDLRDVVDDEEDDDWRHWGAAAPPRDDGQPPDLAGMDPAALQAELLRRHAGPSFGFVKLRLGVRRSQEEVMGIATRWTNVLRTGSVAAKFVAVDFGTLMFTMDTGQDILESSDNWVTLFKVKEFILSQPEAYEFKIGNQAFRRPGDPPLDEVVEMLQKQKSTMLSQDPGSQQYKSKVEL

SEQ ID NO: 190645 - protein, 215 aa, Oryza sativa
  Clone ID: PAT_MRT4530_8703C.1.pep
MQDGRVVAYASWQLRPHEGNYPTHDLELAAEVHALNIWRHYLIGNHCEDQTGERQLFGTEVLNEAEEKVRIVRERLRIAQSRQKSYAGNRRRELNFEAGDYLYLRVTPLRGVHRVQTKGKLASRFVGPYKILECRGEVAYQLELPTNMLGIHNVFHVSQLKKCLRIPKGQASSDHIKIQEDLTYVEKPTRILETSERRTRNKVTADKISLNASFE

SEQ ID NO: 190646 - protein, 46 aa, Oryza sativa
  Clone ID: PAT_MRT4530_87040C.1.pep
QAYWKGRHGSSAARQGQLLLQARQAKFILFFIKIQPASIPDGVWSA

SEQ ID NO: 190647 - protein, 448 aa, Oryza sativa
  Clone ID: PAT_MRT4530_87041C.1.pep
MEITSSAMLKPAPTPTPHPLAGEKVPLTAFDRAAFDVFVPMVFAYRAPAPSSEAVKEGLRMAVAAYPLAAGRLAVDVAADGQGRRRRRRVLHVNDEGALVLDATVEADLDAVLAANVATDLYPAPPEHSFGAAVLQVQLTRFRCSGLVVGLIVHHHVFDGHSTSAFCTTWARAVRDGEAFSVPSPCLDRAITSVPRSPPAPVFDHRSIEFKVGNKSSDSSGAAAAAVEKITNIGVRFTAKFVAELKARVGGRCSTFECVLAHAWKKMTAARGLKPEEFTRVRVAVNCRRRANPPAPADLFGNMVLWAFPRLQVRRLLSASYRDVVGAIRAAVARVDGEYIQSFVDYVEVADARGEELAATAAEPGETLCPDLEVDSWLGFRFHEMDLGTGPPAAVLSPDLPIEGLMILVPVGGDGGGVDLFVALADDRAQVFEQICYSLEEHAIPSHL

SEQ ID NO: 190648 - protein, 41 aa, Oryza sativa
  Clone ID: PAT_MRT4530_87042C.1.pep
NKSKHKVGYIYYNRMGRIHEIRLFCDGGSMTLFISTPPEGY

SEQ ID NO: 190649 - protein, 161 aa, Oryza sativa
  Clone ID: PAT_MRT4530_87043C.1.pep
MARIKPQALLQQSKRKKGPSRISAETVIFYFLILALVGFFLFASYRHWSSRSRLQSEDHLSVSEGENTFVDSKKSELPGYAVLNTSKGSIIIELYKESAPEVVDEFIDLCQKGHFKGMLFHKVIKHYVIQAGDNQGSGATEDWNLRGKAHTITSMKHEAFM

SEQ ID NO: 190650 - protein, 182 aa, Oryza sativa
  Clone ID: PAT_MRT4530_87044C.1.pep
ATRVLRNGQAHHRCAPAMPCSHHNIVRAGLSRPLSTFHCRHSRTTVCLQHRTPTTPSPWGTPPSATVPAYHRHQPGSSHLSRRLHRPPCDGASPSCPSTSKRPSPPRHHQLKGWLPALGRPDPGRGGRIWVFPRRLYAAVPCRLATATVGSRREGVGSGRRRHLAVIASPQIWLESWASSAT

SEQ ID NO: 190651 - protein, 204 aa, Oryza sativa
  unsure (1)..(204): unsure at all Xaa locations
  Clone ID: PAT_MRT4530_87045C.1.pep
MRDIDSKESIYCKIKGVFYYYFVMNNWHWRLSVXIFGIYLRSGFGDDWISXGDIQVLCXLGTVTPGTGCRLEXIHVVGEDSIWHTMEVLCVNGMQSRIWKESKFGMIGYVKFVSCTRGFPRVIRTSSMSLVRGFRLPISGINRGGVSNRRRTGGQTSGIAPVRPASTXATGADLGGQTGDTISVRLTATRRSDRHIYFGHIAIR

SEQ ID NO: 190652 - protein, 73 aa, Oryza sativa
  Clone ID: PAT_MRT4530_87046C.1.pep
VSGFTSGFSILFHWSVCLFWYQINNLVKNICTHILVFMDYNEAEICCVLDCICSGRKHRIFDMYSCRVWKHIR

SEQ ID NO: 190653 - protein, 84 aa, Oryza sativa
  Clone ID: PAT_MRT4530_87047C.1.pep
MGGGHILSDFTGDRVPAGVNPCGLLRVRCVGRAVDRRTTRQHQRHLDLEGVFEISEDDDDDDEPELYDDGEEHLPAQCFWWRKN

SEQ ID NO: 190654 - protein, 58 aa, Oryza sativa
  unsure (1)..(58): unsure at all Xaa locations
  Clone ID: PAT_MRT4530_87048C.1.pep
KLSTQIRNFQLKNRDSKTFKFGFENFENFQFEXXKLSTRXSKTSKCRVENFENFQLES

SEQ ID NO: 190655 - protein, 65 aa, Oryza sativa
  unsure (1)..(65): unsure at all Xaa locations
  Clone ID: PAT_MRT4530_87049C.1.pep
RTXXRNAMGXXNPFXPXXXPPANPHLGSSXXXXXPXXXSXMAXXXXPCXLRYXHXXLXLFSYLXK

SEQ ID NO: 190656 - protein, 38 aa, Oryza sativa
  Clone ID: PAT_MRT4530_8704C.1.pep
YRAARSSMAAVPLCHLRPRHDRHGCKRKRRQPIHLNWL

SEQ ID NO: 190657 - protein, 1108 aa, Oryza sativa
  Clone ID: PAT_MRT4530_87050C.1.pep
MAAVRKMAANGLAAKRENTGTKKSPLQIQMLERFYSEVQYPQSEDIAEYATSVGLTYNQVRIWFKERRRKERRETESLGAHMEKQLSARSNGFRCSSSRSSSFSRSTMYRTVNLQPEDDRYVDKGMSFTGEKHTLRSQVLFPKDYILRKVFRKDGPPLGSEFDPLPHSAPGHLRDTTDDHFYQNQRVIKKRKIVEPTTQRSSLPCGDNGPVRKHGAGKGLMTVWHAMYSHSSKIQDGSNFIDETGCLRSLRPLDDCGRIEDCDDGKLIQVPSSRVTDPKKHPPMECHLSVDESQSPVLQANQVTLVDDEELELRELQAGPNPLRCSAHLSSSGRHGCPLCKDLLSRFPPSSVKMKQPFSTRPWGSSPEMVKKLFQVVRFIYNRFGYMDVHPFTLDELAQAFHDKVREQEFDMNFWIKSLNSLTWVEILRQVLVASGFGSKHHMLNRDFFNKEKNQMVKYGLRPRTLKGELFALLSKKGSGGLKVSELAKSPEIVDLSISSTEIEQLIYSTLSSDITLFEKIAPSAYRLRVDPRIKGKEDSGSDTEDSGSVDDHSDASSGADESDGSHEMSFSEHEHRILRRKWKNGHENVNRCSEIDESYSGERWLLGLMEGEYSDLSIDEKLDCLVALMDVVSGADSAPRLEEPSRVVPSIPRAQPHVSGGKIKKSTRNICQSSDECFNASGSMYGLDSSMHEQSRSLRSRDYVAYSGRNDTSTGVAHQPQVVLLGSDRRYNNYWLFLGPCRADDPGHRRVYFESSEDGHWEVIDSPQELLSLLASLDSRGTREAYLLASMKKRQTCLFEAMKKHYENRDAVQPAMPSDTSHSETSSGDGASPKLSSGDGASPTSDIDNASVPTNPAENMINASSAIAIEVGRRGDEKILKWERSQTFDKWIWTSFYSCLTAVKCGKKSFKESLVRCESCHDLYWRDEKHCRICHSTFEVSFDLEERYAIHVATCRDPEDVYDVPNHKVLPSQLQALKAAIHAIEAHMPEAAFAGLWMKSSHKLWVKRLRRTSSLAELLQVLVDFVGAMDEDWLYKSSSSVSFCSYLDDIVIYFQTMPQTTSAVALWVVKLDALITPYLERADSDRALGEESVQTRTRACGEIARNR

SEQ ID NO: 190658 - protein, 119 aa, Oryza sativa
  Clone ID: PAT_MRT4530_87051C.1.pep
KVSKESKPLKDSKEDKKAVKEDKKAAAKDSKEQKKALKDSKELKKALKDSKEQGLQKDSDELKPKSNKRVTFAEVEPEKELKASNSDWHPTSEYHSVYPEHNSWSSSFMIFEDENSYWN

SEQ ID NO: 190659 - protein, 75 aa, Oryza sativa
  unsure (1)..(75): unsure at all Xaa locations
  Clone ID: PAT_MRT4530_87052C.1.pep
YVXKRFXKVTYKLHYSYSVITLRLYCNYICQIFAENFFDKYIAKSNAKLSKVKKKNYYPRQKQHVVTKTRGYKAN

SEQ ID NO: 190660 - protein, 322 aa, Oryza sativa
  Clone ID: PAT_MRT4530_87053C.1.pep
MAPTSTFPVINMELLAGEERPAAMEQLDDACENWGFFEILNHGISTELMDEVEKMTKDHYKRVREQRFLEFASKTLKEGCDDVNKAEKLDWESTFFVRHLPESNIADIPDLDDDYRRLMKRFAAELETLAERLLDLLCENLGLEKGYLTKAFRGPAGAPTFGTKVSSYPPCPRPDLVKGLRAHTDAGGIILLFQDDRVGGLQLLKDGEWVDVPPMRHSIVVNLGDQLEVITNGRYKSVMHRVVAQTDGNRMSIASFYNPGSDAVISPAPALVKEEEAVVAYPKFVFEDYMKLYVRHKFEAKEPRFEAFKSMETETSNRIAIA

SEQ ID NO: 190661 - protein, 53 aa, Oryza sativa
  Clone ID: PAT_MRT4530_87054C.1.pep
AAEAEAAAAAAATKPSIDSSSSPSLLTDNHAHPPRGRRAPLRRVAVKPVYDRS

SEQ ID NO: 190662 - protein, 98 aa, Oryza sativa
  unsure (1)..(98): unsure at all Xaa locations
  Clone ID: PAT_MRT4530_87055C.1.pep
EIGNLSLLKFFLVRCVVHTICFSXQLVALHNICQTKNHSEFRPHDHVRLKEKESDFHACLDNKFSFKLSIGLCSVEEFGTGTRGDSIYNYCTMSLIAG

SEQ ID NO: 190663 - protein, 89 aa, Oryza sativa
  Clone ID: PAT_MRT4530_87056C.1.pep
IITEFVAGQEVRQYSVADQAEVLDATNITVVYALDATDVVADERSVDRTDVECIRSVEMAVHGCSLTMSSSLFNHAHAAWLSYAECDRD

SEQ ID NO: 190664 - protein, 139 aa, Oryza sativa
  Clone ID: PAT_MRT4530_87057C.1.pep
AWGAASGSAAATVGGDRSCGSGGRPLELRTRRPDQPLTSFLLPIDRAMAVAAAPPTIAASPSSSAGAWTPWPTSWTRPTTLPHICRYPHRLPRQHRPTRTHLMGVRGVQEGLRREAYGGGRWRTSPHAMLGARWWQSWR

SEQ ID NO: 190665 - protein, 203 aa, Oryza sativa
  Clone ID: PAT_MRT4530_87058C.1.pep
MDNSVSDRSFLIDSDEEDDAAAAVEDGKRRGHGGDESDDGSDSSSSCGTPRVAAAGGGGGGRGSQPSSYTQQWPQSYRQSIDMYSSVQSPNLSFLGTPTLSRLSNSFLTASFRGKPPEIISGLIKPLLPTTAAADDEGDRRQQQHEDGRKSSQYLLPPRRPSSLQKIPEDQKPLVVGHHEVGPYRQCTYTQGVLNGMFWVHLV

SEQ ID NO: 190666 - protein, 101 aa, Oryza sativa
  Clone ID: PAT_MRT4530_87059C.1.pep
MGSLPPAPATTLREGRRRLWMGLEEASATAAAEDPAPAPRSGVRAARRPEPERLGARWGERRITRYPPAAAAKRGDCPARGATARSGAEIPKAAAAQWRPI

SEQ ID NO: 190667 - protein, 131 aa, Oryza sativa
  Clone ID: PAT_MRT4530_8705C.1.pep
MARGRGSAMRGAVAVAFLAVVVSCIFLSGCGVADAATYYVGDSLGWSLGSGSWPSGKKFHAGDILVFRYLPWMHNVVAVDEDGYADCNPPPFSRYYTSGSDSVRLARGDNFFVCTRYGHCNLGMKMVVTAV

SEQ ID NO: 190668 - protein, 417 aa, Oryza sativa
  Clone ID: PAT_MRT4530_87060C.1.pep
MPFPYFLLAPLLTPLPHSASDPQPKYPITVSQIIQWRQQRKIVHMPHLCSELYFAYGLRYGRNFGTIYLRRLGLSRFIAKINISLCCLSCHSFLYISPFIVSISNKNSNISAKIISINSLKKFSISLGFILIVSSTYMYISPYSPQFPQNNLERKIQIRRMLQVQGSLRVHTFSSAAIVHAVETSDEDSDPSHFCAVPQNGKKASRKEIKRRIKKLLSSLGQKHHISKVFFRSRSEAANSNAVIDNRGGGQSDMETFVSAKSSELCSFRTDDDDSESRSFRLSPLPIFPTGGIEFQPPASPVKIIKKLPFGYIIGRQLDGAPAAAAPSTKLSLSFKKLMHRLVDKSKSKMIKKKVLRALKGRFGGGERRGRDGHVREGKESSDYGDGDGDGDDEDVFWRKDVRGLRCRRVEDNDLPY

SEQ ID NO: 190669 - protein, 60 aa, Oryza sativa
  Clone ID: PAT_MRT4530_87061C.1.pep
CFVFLQPITPSLTIMAVTIDSFTITGEPPHKALNISTAFIYNLQTGPRYENYAPKSLQPT

SEQ ID NO: 190670 - protein, 120 aa, Oryza sativa
  Clone ID: PAT_MRT4530_87062C.1.pep
MTLLLVDGGDWVAAREARDAARPAMRAARRSGGRGDGKRRLEAVEAAVFRVCFRVVVSAAGWGKRGNSRACPCGGAAGGASGVARRWLGRRWLSGGGGGWQWRLALEISIVLPVQVWSRA

SEQ ID NO: 190671 - protein, 60 aa, Oryza sativa
  Clone ID: PAT_MRT4530_87063C.1.pep
SSYCNVRQPPPGCVTTLMLAGCQYVGGGNVVTQDNKFQHKETSMMDHGFNTPQRLLNDRL

SEQ ID NO: 190672 - protein, 164 aa, Oryza sativa
  Clone ID: PAT_MRT4530_87064C.1.pep
WKEENPTLLRLEEEHRAATTPPPPPPPMSPSTRRSRQTLAQTSRSSAGYGLALPPPTASSPPPPPPPTPRRPSPPPREKGATPPLPSLPASVGNTEPRPSPPAKEAPPAAWKKKKRFTATSRTRTTRFPRRGRPYSPTGTRRPSSPAWKTATTTTGTTPSSATP

SEQ ID NO: 190673 - protein, 178 aa, Oryza sativa
  Clone ID: PAT_MRT4530_87065C.1.pep
YGDVTATSWMTCTSPSFLRRRRHRGPRCGRVSSTPTVPVSTKAAVAWTITKYSPSIRHCATPFERTTVMSNFDLRRLLASTRSKSVMVIEDVDFSLRLPSPEVKRLYPSIDGAPVKEELQVQGHCELPGGMGAHHMAAARGCGSAAPIRDHAASQVPDLVGAPAVAALAGIHHLPGLH

SEQ ID NO: 190674 - protein, 858 aa, Oryza sativa
  Clone ID: PAT_MRT4530_87066C.1.pep
MEGGKPHPAATGGGASSSHHAAAAAAADVAVDEAFARDLYVSQLMELGDDDWSSFAPPMDRVGSTSSLAAGAAGSRAQPIVIDDDDDAPAAAAAARTVQLYVPPPLRSGGRRTVATRQQPAPARSATAFLPRPPGGAATADIGTSSTATLPQGLPAAMAPSTELSLRPGGLIAGGAAAPRHGGRRPAARMAARAAPGTGHARGAGNGRWARAENLMAALQANPRPNVAQFGRIWTRIAAADRQLTAAAAAADTPAAVTATTGEGSHAAPAVSAGKCGQHRTPAISAGKGGAAGGMEEEEEVHRNVANENDSVSSKRQALLADRDTPAVFAGMEDGHDNDWYDSVIRDAVIAELQEDPELHGPLPVQYLTKSPVVAQPPPRATAAAIAGEEEEEEGEFSMPNFYKKWGLRPSDLDPDEAGPSTRRPRVLPLADGDLPTFDCGICFDTLPMLDLFRGLPCDHKYCLECMTTYIDGKGCKKAIDFAAFTDWGLRLAEGAVPHDRRAYCPNRRCGILLETSGEAEPAMAACPACQHLLCATCGGEWSTADDADHRDCSKGPEAAMVKKLADERRWKACPKCRMLVERTAGCRVMSCRCRMVFCYLCGLQIGAVLEGKEKCQCLDNLGVVLIKALCRFSKRRTASYPPIKAIQIKGVVVSHLRSSQRHRRHPVADYQAREEESCRQHLYTKVVNPHLPPIAVSATNTASCRHEGVATATAHTHPRTSTQAVSPLPSVAIAMPCEHSSTTRWSRRSSLEATGSSITSARSTTGTVFNTIGHSCRRFNRVAAITVTIMARSILQIYHLVLATSGSSWEKRPHTTNILVTARFPTDGSDGGEEVGGRKVEWHRGMGHCPSHSSVIE

SEQ ID NO: 190675 - protein, 63 aa, Oryza sativa
  Clone ID: PAT_MRT4530_87067C.1.pep
MKLKCTELARSETWYRKKKLPSYMMYVNKKKKGTVHGAQVQHSTGKYERLAEKPYPPVIFVNK

SEQ ID NO: 190676 - protein, 887 aa, Oryza sativa
  Clone ID: PAT_MRT4530_87068C.1.pep
MEGGKPHPAATGGGASSSHHAAAAAAADVAVDEAFARDLYVSQLMELGDDDWSSFAPPMDRVGSTSSLAAGAAGSRAQPIVIDDDDDAPAAAAAARTVQLYVPPPLRSGGRRTVATRQQPAPARSATAFLPRPPGGAATADIGTSSTATLPQGLPAAMAPSTELSLRPGGLIAGGAAAPRHGGRRPAARMAARAAPGTGHARGAGNGRWARAENLMAALQANPRPNVAQFGRIWTRIAAADRQLTAAAAAADTPAAVTATTGEGSHAAPAVSAGKCGQHRTPAISAGKGGAAGGMEEEEEVHRNVANENDSVSSKRQALLADRDTPAVFAGMEDGHDNDWYDSVIRDAVIAELQEDPELHGPLPVQYLTKSPVVAQPPPRATAAAIAGEEEEEEGEFSMPNFYKKWGLRPSDLDPDEAGPSTRRPRVLPLADGDLPTFDCGICFDTLPMLDLFRGLPCDHKYCLECMTTYIDGKVREGAVPVACPDPECADGGDGGAGVLHPEGCKKAIDFAAFTDWGLRLAEGAVPHDRRAYCPNRRCGILLETSGEAEPAMAACPACQHLLCATCGGEWSTADDADHRDCSKGPEAAMVKKLADERRWKACPKCRMLVERTAGCRVMSCRCRMVFCYLCGLQIGAVLEGKEKCQCLDNLGVVLIKALCRFSKRRTASYPPIKAIQIKGVVVSHLRSSQRHRRHPVADYQAREEESCRQHLYTKVVNPHLPPIAVSATNTASCRHEGVATATAHTHPRTSTQAVSPLPSVAIAMPCEHSSTTRWSRRSSLEATGSSITSARSTTGTVFNTIGHSCRRFNRVAAITVTIMARSILQIYHLVLATSGSSWEKRPHTTNILVTARFPTDGSDGGEEVGGRKVEWHRGMGHCPSHSSVIE

SEQ ID NO: 190677 - protein, 57 aa, Oryza sativa
  Clone ID: PAT_MRT4530_87069C.1.pep
QTMPILQPLFTWGTTHSSTFMQFQGHHHHWLSSFHTHPAHPFNSHFTSDTQGTRWPP

SEQ ID NO: 190678 - protein, 142 aa, Oryza sativa
  Clone ID: PAT_MRT4530_8706C.1.pep
MAAEARAESPAAPVVVPAAASPEKRVLSGDAGREEERPEPKRRRACVAALDSVPCAAPPLVDGDGSSFSFQHARGGFVVLETTPKFGSFNPPAAAAVGPKPAPPAGAGQGSPEEEGGPAREEAEAKDGNSQLVGPGVQGQKT

SEQ ID NO: 190679 - protein, 104 aa, Oryza sativa
  Clone ID: PAT_MRT4530_87070C.1.pep
MARERFAKQCCGLGVRDWLGAQTVGVRNWLGHADRECGTESVSRGGCAHACGVRDRTDGCSVAQNGGTGPKWYRSLKARNRASPVGLQFHVSDVRERVKVKANH

SEQ ID NO: 190680 - protein, 176 aa, Oryza sativa
  unsure (1)..(176): unsure at all Xaa locations
  Clone ID: PAT_MRT4530_87071C.1.pep
MATWQWQQGRGLVCSSLNTAIELLAKDGQVGGEENDGGGEAAYGQVGGEENGGGGETVVDRQVGGEERWWTGGCAARRMVEEARWWTVGGVWHGVVASGGGVGGRSSVEEDDQAVSRREVKRGELLALAGEVRRRPXQLAAARRASSMEEDGRAASQREMRRGERLVAAHYAIAEA

SEQ ID NO: 190681 - protein, 53 aa, Oryza sativa
  Clone ID: PAT_MRT4530_87072C.1.pep
FSSFHYIRFALLFFLLTVRLANKSTSSLHCFRRIKSYPQIVTSCNRDSTVPWP

SEQ ID NO: 190682 - protein, 63 aa, Oryza sativa
  Clone ID: PAT_MRT4530_87073C.1.pep
MTKVAEKGIGAERRGDVGERKGKGATWRVIIGGWVLGPRLCRSNQHVLVLHRCMTPEYAFFAL

SEQ ID NO: 190683 - protein, 86 aa, Oryza sativa
  unsure (1)..(86): unsure at all Xaa locations
  Clone ID: PAT_MRT4530_87074C.1.pep
PGRPRAFLTGSETQGKDPRNFRSRLLLAKRLRESIFHDLLKKNMNQMYRYQVHQSQCLFGEDWMNADALFKLFIEGRCSTXLPRAE

SEQ ID NO: 190684 - protein, 83 aa, Oryza sativa
  Clone ID: PAT_MRT4530_87075C.1.pep
TCGLTVEEICVHNKHVVNRSLDLLMNRNCIQVIFILGSADLQGPNGQHDFYTCEDEKYLSLHYASQEKSTSEDIDLFEDYNIM

SEQ ID NO: 190685 - protein, 688 aa, Oryza sativa
  unsure (1)..(688): unsure at all Xaa locations
  Clone ID: PAT_MRT4530_87076C.1.pep
ALRAVAVAGALLLLVVVGSSAAGAGSGSCQTRCGDVDIPYPFGIGPNCSRGVGFEIECNTRNGSGDLVPTLAATSLSIVQNLSVESPPMAKVMLPVAYKCYDDPTKTQDFNGEVELNKTGVYRISDELNMLVVLGCNTMVYTKNGNSEGGLYPYLYYTGCIAYCNDSRSAQDGKCAGAGCCHVDIPGGLTDNTLVFDSWNRTKXVDFSPCDYAFLVAKEEYVFQRSDLNKDLNRNMPVWLDWAIRDDDSACPPLALGKKPPAASYACVSDNSECVFSTNGPGYFCRCLPAYHGNPYDTMHMCADINECLAPERYHCNGVCNNIPGNDTCHCHAGYQSNDAKTQRCTPKFPVASRIALGVCLGFSFLIVAFLITLVMFQKQKMNEYFKKNGGSILQKVDNVXIFSKDELKKITKNNSEVLGQGGFGKVYKGTLGDNTIVAVKTSIEVNEARKDDFTNEVIIQSQMMHNNIIKLLGCCLEVDVPMLVYEFAANGNLQDILHGDGNIPLPLHLRLDIAIESAEGLRYMHSSTNRTIRHGDVKPANILLTDKFIPKISDFGTSKLLTVDKDFTMFVVGSMGYIDPVFHKTGHLTQKSDVYSFGVVLLELISRKPTIYGENCSLIIEFQQSYDKENSGRMMFDKDIEIEEDILILEEIGRLAMECLKEKVEERPDMKEVAERLVMLRRSRKGG

SEQ ID NO: 190686 - protein, 267 aa, Oryza sativa
  Clone ID: PAT_MRT4530_87077C.1.pep
MCHQEVLNYWQTLLMGMMCDIFADHVAADCSSTMSWRFPLFGSNSQQQQPDPNFQDNPTQPWYPQSVVGSSSHPSTPSSSNVGPHQRASDNSQSSSRAQPSPAEAAGIIARLKDKSVDELQRLLKDKEAYNAFFNSLDQVKTQNNLRDELRKETVQLARENLEKEQRILELRNQCTIIRTTELAAAQDRLAELERQKDEIMRSYSPAALLDKLQKSMAKLDEESEELHQKFLEKDIDLPTFVQKYKKLRAAYHKQALLHLAGKTSLR

SEQ ID NO: 190687 - protein, 226 aa, Oryza sativa
  Clone ID: PAT_MRT4530_87078C.1.pep
MDQVRSSIVRLRFIWEKEEKQDDSTVIIKTQHMVIPGIIISISGREEAVMIANATFFNNKKSQLNFWVSFPNSTGYEQERSVPFSEVVLEDEFFCTFTLKPIEGGFIKPIQFEIQPVKRMDEVHSFVFPREEYITPTSYPNGFITRMVKHFLKSQRRQIFGVEGVFHNCKMHEYGYLGSPVFNFRGDLVAITYLDKGQLQAWTVKSLLSGILRRKTRTLVSNGEHC

SEQ ID NO: 190688 - protein, 371 aa, Oryza sativa
  unsure (1)..(371): unsure at all Xaa locations
  Clone ID: PAT_MRT4530_87079C.1.pep
MASAARALGALVHKASSLSSSAAALRSAAVLHGNQSSLARSLVSRLAVSTDPAIDALVCSGRGSAGGSARLFQRHAARRRISTFQPLCMGRRSCKIAGRKLSDTTTNSLKEILLKEILLSIKKGGPSPSSNTTLAAILEKARELDIPKEILERNIKRASEKGQDTYTEKVYEVYGFGGVGMVVEVLTDKITRSIADIRNVVKDCGAKLADPGSVTFRFRQARVVNIKVTDADKDQLLTVALDAGADDVIEPNFDDDDDDDDDYDDDSSEDVSERFYKIVTTSENYPVVLSKLQEEGLKFETDNGYELLPLNPIEVDATEAMXELNKVLVSKLLELDDVDAVYTDQSGLAESWWMELPMEPVYLQPVIFCQN

SEQ ID NO: 190689 - protein, 76 aa, Oryza sativa
  Clone ID: PAT_MRT4530_8707C.1.pep
VARITQSPRANCAVCCGGRGNSEAPTTIRIKAWGARSSTSTLGLVLPGFTTNGPTSGSVDRTNVPIEDVKFQPAAF

SEQ ID NO: 190690 - protein, 102 aa, Oryza sativa
  Clone ID: PAT_MRT4530_87080C.1.pep
KKSFFSALSAITFPYLPSKYQLYHDFRNVEVSPVIIWINMLHKSSLPERQICTNWQLKNASPACGSYCGQRWRARGRSSKPPSMPAGGVRRWARDVVGGTSG

SEQ ID NO: 190691 - protein, 94 aa, Oryza sativa
  unsure (1)..(94): unsure at all Xaa locations
  Clone ID: PAT_MRT4530_87081C.1.pep
MASAARALGALVHKGSSLSSSAAALRSAAVLHGRGSAGGSARLFQRHAARRRISTFQPLCMGRRSCKIAGRKXKKGGPSPSSNTTLAGILEKAR

SEQ ID NO: 190692 - protein, 151 aa, Oryza sativa
  Clone ID: PAT_MRT4530_87082C.1.pep
MASAARALGALVHKASSLSSSAAALRSAAVLHGRGSAGGSARLFQRHAARRRISTFQPLCMGRRSCKIAGRKDAQNLKKMKRNSKIGKEIVAAIKKGGPSPSSNTTLAAILEKARELDIPKEILERNIKRASEKGQDTYTEKVYEVYGFGG

SEQ ID NO: 190693 - protein, 56 aa, Oryza sativa
  Clone ID: PAT_MRT4530_87083C.1.pep
KRRQLGFAVLDDPSKGGGPLKKYILDPSVITLYQFRPLGSLHLWLLCYSPSSKHAR

SEQ ID NO: 190694 - protein, 89 aa, Oryza sativa
  Clone ID: PAT_MRT4530_87084C.1.pep
DNDDADDYDDDSFEDVSERFYKKVTTQENYPVVLSKLQEEGLNFETDNGYELLPLNPIKVDDEAMELNKVLVFKLLELDDVDAVYTDQR

SEQ ID NO: 190695 - protein, 102 aa, Oryza sativa
  unsure (1)..(102): unsure at all Xaa locations
  Clone ID: PAT_MRT4530_87085C.1.pep
RVPRPAPPSXSPSAASSTAEAPPPSRRRCDPRHPRPPTREEDVTPRHHRRGAASSPPXLRPLACPLIXTTXXRNIRPPPAPIPRRRSPPASQPSPPGRRRLW

SEQ ID NO: 190696 - protein, 122 aa, Oryza sativa
  unsure (1)..(122): unsure at all Xaa locations
  Clone ID: PAT_MRT4530_87086C.1.pep
HVPAPEFPRGPTRARTCAATRAARQSLLQSWSQCLKKPGENIGPGAYEEYRNELPVPLQXVHQXAPTLTKETIAVVRNSDQGNDYHMKYYTPEHRLEHQXVHATLLRKPDLXRYMVAKHAEP

SEQ ID NO: 190697 - protein, 46 aa, Oryza sativa
  Clone ID: PAT_MRT4530_87087C.1.pep
CGGHIGYSGGGRADPSPPTAGRPDPSPATVGTTAATMTNTTTTSSL

SEQ ID NO: 190698 - protein, 135 aa, Oryza sativa
  Clone ID: PAT_MRT4530_87088C.1.pep
NPCKKIWGGLLFNFILIFNLTAKFGLGEKRSTKGGVFCFGGLFLEMGTNFCPTEKIFNGGTSLGDFGVWNFPKNTFKGVGPPLLQDEIDATGGLQNCVFLLGKKGLFWSMTLPKHRCEMGQVCSGILGIKHGFLK

SEQ ID NO: 190699 - protein, 45 aa, Oryza sativa
  unsure (1)..(45): unsure at all Xaa locations
  Clone ID: PAT_MRT4530_87089C.1.pep
QECAYPLIAPXXQXAQHKLQLFQVRQRVTSGDSNSAHLHKQHARR

SEQ ID NO: 190700 - protein, 176 aa, Oryza sativa
  Clone ID: PAT_MRT4530_8708C.1.pep
MDLPGPIHEILVLFGGFVLLLGGLGVVLLTNPTFSAFSLGLVLVCISLFYILLNSYFVAVAQLLIYVGAINVLIIFAVMFVNGSEWSKDKNFWTIGDGFTSLVCITIPFSLMTTIPDTSWYGILWTTRSNQIVEQGLINNVQQIGIHLATDFYLPFELISIILLVSLIGAITMARQ

SEQ ID NO: 190701 - protein, 100 aa, Oryza sativa
  Clone ID: PAT_MRT4530_87090C.1.pep
ACQGKNSLNVVSSPHFLTAGDRCRQFCSTTSAPVKNTEDGGYPTKANGAFRGLVFALGVAKSPESNSGGREGPTIIATNLDSLGETICQCVYKNPVRFEV

SEQ ID NO: 190702 - protein, 580 aa, Oryza sativa
  Clone ID: PAT_MRT4530_87091C.1.pep
MALMRRRVGGYICSELCGSVMNQRLYSSRVDWKQLRPMILKRIKNRAKEYPIKRMIPVAEEVVKAREIVTKGVSTLLQVVPIHSCKFCPEVHIGAVGHEMQSCHGFKRMIKNQPHKWGPGCLNDILIPVESFHLENTFQDEIKHDQRFDFPRVPAVLELCHQAGADIPDEVWHRSGTSSAIVRENDEKPAAFLPEELRFIGQRTIEAWERLRLGVTKLLLVYPSKVCERCSEVHVGLSGHKARMCGVFKFEGWRGKHKWKKADVDDLVPPKIVWHQRPHDPPVLVDAGRDYYGHAPAINEWMVKFLFFVFEVEHYLEYLTPYVADVFSVQEAPPDSCNAKNEREEHESSGDLERNDPQSQETRRCRRVAVVEVGEQQQGHQGVAAAAAVVRAVGRRLVVRRGGGGRRRRRRRRPSAAAAAAGEQEGKVRQGPRGVQEQVPCPPPRRGGSGGGGRREQRQQVDVRGAGGVRPAGGDVRRVRGRGGGGRRRGRGAGGDYVHVRVQQRNGRKTLTTVQGIGGEYNYAKVLRDLKRELCCNGNVVEDKELGKIIQLQGDHRNSVSDFLAKAGMVRKDNIKVHGF

SEQ ID NO: 190703 - protein, 86 aa, Oryza sativa
  Clone ID: PAT_MRT4530_87092C.1.pep
MRGLARASLGFPPSHRRRRKSKATAASTNMGHSNVCNSHPKKYGPGSRVYRVFGNPHGLISKYGLMHCSAVLLSATTKDIGFIKFR

SEQ ID NO: 190704 - protein, 150 aa, Oryza sativa
  Clone ID: PAT_MRT4530_87093C.1.pep
MASKSRVGEDAQCHCGGAALWRVADAATAPSPLVGHDAVLLRHRGQRRCPPSPLREAAGHSVVLLRHCRPRRRPPLPPTMPSSSSDANLVDFSLGAVFLHRRETHRRPFSVILLSHRSRRRPLPPPPPVAEPWDGGRVSSCIPRWDEGGR

SEQ ID NO: 190705 - protein, 181 aa, Oryza sativa
  unsure (1)..(181): unsure at all Xaa locations
  Clone ID: PAT_MRT4530_87094C.1.pep
MRIARLLLLLALVAGAAVAQDAGLGDVAAEETTAARAKEEAALAAELGQLRAKISALESSITKQTQELKSKDDGIQKLEKLIEEKSKKIATLQSEITSLETKRSLAAEEQAGKANARAIELEKQIEKLKKDIEAXNSKKSTVEARXGDADKKVQELKCXLEKXPKDSDEQKRRIQKTEHAL

SEQ ID NO: 190706 - protein, 78 aa, Oryza sativa
  Clone ID: PAT_MRT4530_87095C.1.pep
MAMPIAQALLFFIQVVKEIQTQCVSDTEVSETAVIQIPKSRQMFQASQTRGYAPSVVGQTNRQATYSPTVDTPEEFEA

SEQ ID NO: 190707 - protein, 122 aa, Oryza sativa
  Clone ID: PAT_MRT4530_87096C.1.pep
MAPLPPPAAAAASPTCWVSLHAPGPRGRSASFPAAPCSARRFSRFVARSSGGGGGTNPGPKPGDDESKAVLDAFFLGKAFAEALTEKVESVVGEVFSVVGQWQAEQQKQVQEFQLPENAVEY

SEQ ID NO: 190708 - protein, 109 aa, Oryza sativa
  unsure (1)..(109): unsure at all Xaa locations
  Clone ID: PAT_MRT4530_87097C.1.pep
GKLVRTARYQVQEFPGSDTTASRFSLARSRXTGSTGGLEPLGSQQTPGSSLIGRYKTEPNRCKIRFKSDRKDRNFSNXVXNLVAENSICVQLMVRIKXVLDHSDKKKKK

SEQ ID NO: 190709 - protein, 58 aa, Oryza sativa
  unsure (1)..(58): unsure at all Xaa locations
  Clone ID: PAT_MRT4530_87098C.1.pep
HRSRWSVCRYNLYIQGIVWSVTXKYVMASTAVPLIVGPRSPNFFXGGLIPFRHYGPIK

SEQ ID NO: 190710 - protein, 1359 aa, Oryza sativa
  Clone ID: PAT_MRT4530_87099C.1.pep
MPAPAPAPAPSQQGQGPSQNQKLTTNDALLYLKAVKDKFQDKRDKYDEFLEVMRDFKSGRIDTAGVIIRVKTLFNGHHELILGFNAFLPKGFAIKLQDLEKKPVDFMEAINFVNKIKARFQQEDHVYKSFLGILNMYRLHNKSIQDVYGEVAALFRDYPDLLEEFKHFLPDTSTAPEPVTVPRGVSSRHDDRGPLMPSARNAQIIKRERAYPSTVDRDFSIDRPDPEDDPHRRRVDKGRDGKVDRSRKDYETDVKDVEYDSKDLDGGQRKRKLARKMDGALADTQQGGVSTSTSPYDDKDALKSAYTKEFRFCEKVKEKLEPEAYQEFLKCLHIYSQEIITRSELKNLVNDILQHYPDLMNGFNDFLEQCENIDAFLEGVFSKRKTSQIVKIVEKGSALNSKEGATHKATTFSSKDKYNLCKPISELDLSNCQRCTPSYRLLPKNYPMPPASCRTDLGASVLNDLWVSVTSGSEDYSFKHMRKNQYEESLFRCEDDRFELDMLLESVIVAIKRVEELIEKMQDNSIKPDSPIRIDEHLTPLNLRCIERLYGDHGLDVMDVLRKNASVALPVILTRLKQKQEEWSRCRSDFNKVWAEIYAKNYHKSLDHRSFYFKQQDTKNLSTKALLAAIKEVNEKKRKEDDMLLTIASGNRRPIVPNMSFEYVDPEIHEDLYQIIKYSCGEVCSSSDQVDKVMKIWATFLEPILGVHPRGHGVEDEKHNSRSTKAGPANVEINNASTNGTVTVKHAHSDEIVPKEQASCSRAILVGGVAADAQNSLQDAERTVCRDEERPKTMLDRRLQNTTPAVDVVPAVYAQNISTERSVESSHLSRPEQNHSRANMEVKPGINACSATPAGGEVVSEAKGGNEAIMGSGEIRIPGSFNSKDNKHCPINEYCGSHNHSKVEREEGELSPNGDVGENFGPFDGVSVDGVSKAKEDSTRRLLQGRPMDATEFAGENDVDADDEGEESAQMMEDSENASEAGEDASGSESGDGEECSREDHEDEDDMDQDDPDAKAESEGEAAENTEAQDADAGISLPFSERSHNAVKPLAKHVPRALNDHEEKFSCIFYGNDSFYVLFRLHQILYERILSAKTNSSSAEKKWKASKDTNLPDQYSKFMSALYNLLDGSSDNTKFEDDCRSIIGTQSYVLFTLDKLIYKVLQAIASDEMDNKLLQLYIYEKSRSPGRFFDLVYHENARVLLHDESIYRFERRSNPTRLSIQLMEYGHEKPEVTAVSIDPNFSSYLYNEYLSSISNTKLYDDIFLGRNKRKRGGNDDSQASLKAIDAFMVTNGLECKISCKSSKVSYVLDTEDFLFHIRKRRVSSSGTIPEKADFVKAYAVKPLYQIRDADVLRKLPCEP

SEQ ID NO: 190711 - protein, 71 aa, Oryza sativa
  Clone ID: PAT_MRT4530_8709C.1.pep
LITLLEESTCMIRIHIYLSSASARKVNSKRKLVTRCIRTYVNKLFLTTVFVYNLYMPSNSFYNLMQGKFEL

SEQ ID NO: 190712 - protein, 97 aa, Oryza sativa
  Clone ID: PAT_MRT4530_870C.1.pep
FQRETPPPFQHLGTPIFWPLSFPLCSKRSQTWIFPFKPPPPFGGPRGFFFPYLLGGVPFLPKKGWGLGKPVPVTGQRIKILWGKAFFFLGVFTFFPP

SEQ ID NO: 190713 - protein, 58 aa, Oryza sativa
  Clone ID: PAT_MRT4530_87100C.1.pep
MTAKGIMEKLSKERMTSFGRYPYKKEHVPVILDSIFQSELNKMHKAVPSITISIYSIK

SEQ ID NO: 190714 - protein, 128 aa, Oryza sativa
  Clone ID: PAT_MRT4530_87101C.1.pep
MGMKNLEVIAVSIDPNFSSYLNNEYLSSISNTKLYDDIFLGRNKRKRGGNDDSQASLKAIDAFMVTNGLECKISCKSSKVSYVLDTEDFLFHIRKRRVSSSGTIPEKADFVKAYAVKVQRFHRFLSRP

SEQ ID NO: 190715 - protein, 104 aa, Oryza sativa
  Clone ID: PAT_MRT4530_87102C.1.pep
ENSRLPHTSAFTRVSHLLFQRYSCLKFWNIKVHMAVFEARQHLGFDTAAANQKHHKYRFKLTAVMPVETLHSVNVDVDAQIQGSFSFIVGKNQDAWCAVVTDAS

SEQ ID NO: 190716 - protein, 83 aa, Oryza sativa
  unsure (1)..(83): unsure at all Xaa locations
  Clone ID: PAT_MRT4530_87103C.1.pep
KGGATADPNRPKKPASSFLLFSKEARRXLAEERPGXASSXLTALXSVKWKELGEAEKQAXNXNAAEAXAAYKRDXEEYTKAAA

SEQ ID NO: 190717 - protein, 50 aa, Oryza sativa
  Clone ID: PAT_MRT4530_87104C.1.pep
RTVKHSKMYERFHALEKLAWGLYTESVISSVSHMDLISTDAGSKILGALA

SEQ ID NO: 190718 - protein, 67 aa, Oryza sativa
  Clone ID: PAT_MRT4530_87105C.1.pep
WRRLSSKDGEGRRIALLSNKVGGILDEGCMAKADGFAITSSTSRRPKRPSQPIKPGGHWASVRQSAH

SEQ ID NO: 190719 - protein, 91 aa, Oryza sativa
  Clone ID: PAT_MRT4530_87106C.1.pep
MDGASGSGEPTANGEKKPDEQHFDPSRMIGIIKRKALIKELAAAYHAECVACCKELLQLQKKWEEEQYVEFKMSDEAPRTLTVKSSKRRKR

SEQ ID NO: 190720 - protein, 227 aa, Oryza sativa
  unsure (1)..(227): unsure at all Xaa locations
  Clone ID: PAT_MRT4530_87107C.1.pep
XFPXSPXPFLPXXXPXWAWXAQPNPTQKRKGSQKGXGMEKRMFKNXIQKNGESRPSQPQFPFPWEGAIFSTQLFGFNKNFQXFXFQGFNIQNNPSIKALVAKASLGNFXXGVPPAPXGWGGGFXWNGAGPXGRXTPFXLEGSFPGGGRVXLGEPPPREFXVKKXGGXGSVXFXLGRRXPPGNIXLGPPXLSXPFXAGKGKPNLXPXFGAGKISGQRKLPVPRKIPLP

SEQ ID NO: 190721 - protein, 45 aa, Oryza sativa
  Clone ID: PAT_MRT4530_87108C.1.pep
SQSKKRSRGMILQSRNTCYTQSLLRLFYGLVVTILGGGDLEWMEW

SEQ ID NO: 190722 - protein, 143 aa, Oryza sativa
  unsure (1)..(143): unsure at all Xaa locations
  Clone ID: PAT_MRT4530_87109C.1.pep
NLLLLLQKLKANQRAQKLQLLLSKASFWCSTNQKHPXPCFHLLLGEKNYPPLPPPPGAATPSPCQLWMRKTKEVRWPTAALLLAAAPPRCASSSSPNRRRRSSSPSLVPAACPPARRTATFALFAEPPPPPEADGDGHGHLLH

SEQ ID NO: 190723 - protein, 54 aa, Oryza sativa
  Clone ID: PAT_MRT4530_8710C.1.pep
DKIVLLGSSSGHGQGSNLLVRMNYIHQAKSSAQQAPTCEIQSADVPWPLQLVQS

SEQ ID NO: 190724 - protein, 103 aa, Oryza sativa
  unsure (1)..(103): unsure at all Xaa locations
  Clone ID: PAT_MRT4530_87110C.1.pep
VRIVSSPFWQPLSLQXINNQXMQHXCXQQLXLVAQQSHYQAISIVQAIVQQLQLHQFFXVYWGQTQXQSQTLLTFNLPSIXXIYPNYYXXPIIIXTXFFYITI

SEQ ID NO: 190725 - protein, 849 aa, Oryza sativa
  Clone ID: PAT_MRT4530_87111C.1.pep
MGTVLDALAWKFLEKLGQLIEDEVIMTLSVKRGIESLKKNLEFFNAVREDAEALAMEDPGIDSWWKNMRNVMFDVDDIVDLFMVHSQKFLLPPRPVCCNQPLFSSFAKFSFDHMIAKRIDNINEKFEEIKMNKEMFGLERTNGQQIQITIVDRSQTSPVDELEVVGEDIRRAIDDIVKMIVSSNYNESRSTVFGIQGMGGIGKTTLAQKIYNEQRIREKFQVHIWLCISQNYTETSLLKQAIRMAGGICDQLETKTELLPLLVDTIRGKSVFLVLDDVWKSDVWIDLLRSPSERGLNSRILVTSRNLDVLVEMHATYTHRVNKMNDYDGLELLMKMSLGPYEQRREFSGVGYQIVKKCDGLPLAIKVVAGVLSSKKTKAEWESIRDSKWSIHGLPKELGGPLYLSYSNLPPELKQFFLWCALLPSNFGIHRDAVAYWWVAEGFVTKMHGYSIHEAAEEYYHELIRMNLLQPKPEFVDKWMSTMHDLLSFLELEQTGIDHVPKGIAKFQKLYNLKGVFESASGFRLDELQCLPNIQRLRIVKLEKATPGGAFVLRNSLRLRELWFRCTMGANTHDITHYQMNEIERIQQVYEMLSPSSSLIYLFFEGFPGVRFPDWLCSEPEYKMPNLGHMYLNECISCSELPPAGQMPELLILQIRCADAVVNIGSELLGKGVSSATHITIFPKLKLLHIIDMSNLESWSLNTGNLRGRSEQLVLMPCLKRLFLNGCPKLRALPEDLHRIANLRRIHIEGAHTLHEIDNLPSVLWLKVKNNRCLRRISNLCILQDLFAQDCPALDQAENLISLKRLHMVDCQNAKQFRMCLLEDQQLAVDVVTVGADGRDIFPDETLYN

SEQ ID NO: 190726 - protein, 990 aa, Oryza sativa
  Clone ID: PAT_MRT4530_87112C.1.pep
MGTVLDALAWKFLEKLGQLIEDEVIMTLSVKRGIESLKKNLEFFNAVREDAEALAMEDPGIDSWWKNMRNVMFDVDDIVDLFMVHSQKFLLPPRPVCCNQPLFSSFAKFSFDHRIAKRIDNINEKFEEIKMNKEMFGFERTNRQQVQITIVDRSQTSPVDELEVVGEDIRRAVDDMVKMIVSNYNDNRSTVFGIQGMGGIGKTTLAQKIYNEQRIREKFQVHIWLCISQNYTETSLLKQAIRMAGGICDQLETKTELLPLLVDTIRGKSVFLVLDDVWKSDVWIDLLRSPSERGLNSRILVTSRNLDVLVEMHATYTHRVNKMNDYDGLELLMKMSLGPYEQRREFSGVGYQIVKKCDGLPLAIKVVAGVLSSKKTKAEWESIRDSKWSIHGLPKELGGPLYLSYSNLPPELKQFFLWCALLPSNFGIHRDAVAYWWVAEGFVTKMHGYSIHEAAEEYYHELIRMNLLQPKPEFVDKWMSTMHDLLRSLGQFLTKDHSLFMNMENSKTLLNLRHLVISNDVKEIPAIEELKCLRSLLIFNNKNFKTINKDIFRELKHIRVLVLSGTSIQVIPESVGNLLLLRLLDLSYTKIKKLPESIGNLTSLEYLSLHCCRHLDSLPASLMRLSNISFLELEQTGIDHVPKGIAKFQKLYNLKGVFESASGFRLDELQCLPNIQRLRIVKLEKATPGGAFVLRNSLRLRELWFRCTMGANTHDITHYQMNEIERIQQVYEMLSPSSSLIYLFFEGFPGVRFPDWLCSEPEYKMPNLGHMYLNECISCSELPPAGQMPELLILQIRCADAVVNIGSELLGKGVSSATHITIFPKLKLLHIIDMSNLESWSLNTGNLRGRSEQLVLMPCLKRLFLNGCPKLRALPEDLHRIANLRRIHIEGAHTLHEIDNLPSVLWLKVKNNRCLRRISNLCILQDLFAQDCPALDQAENLISLKRLHMVDCQNAKQFRMCLLEDQQLAVDVVTVGADGRDIFPDETLYN

SEQ ID NO: 190727 - protein, 58 aa, Oryza sativa
  unsure (1)..(58): unsure at all Xaa locations
  Clone ID: PAT_MRT4530_87113C.1.pep
DSRVATPFWQPAXTFQLINNQVMQQQCCQQLQVVAQQSXYQAISIVQAIVEQLQLEPI

SEQ ID NO: 190728 - protein, 518 aa, Oryza sativa
  Clone ID: PAT_MRT4530_87114C.1.pep
MAGGICDQLETKTELLPLLVDTIRGKSVFLVLDDVWKSDVWIDLLRSPSERGLNSRILVTSRNLDVLVEMHATYTHRVNKMNDYDGLELLMKMSLGPYEQRREFSGVGYQIVKKCDGLPLAIKVVAGVLSSKKTKAEWESIRDSKWSIHGLPKELGGPLYLSYSNLPPELKQFFLWCALLPSNFGIHRDAVAYWWVAEGFVTKMHGYSIHEAAEEYYHELIRMNLLQPKPEFVDKWMSTMHDLLRSLGQFLTKDHSLFMNMENSKTLLNLRHLVISNDVKEIPAIEELKCLRSLLIFNNKNFKTINKDIFRELKHIRVLVLSGTSIQVIPESVGNLLLLRLLDLSYTKIKKLPESIGNLTSLEYLSLHCCIHLDSLPDSLMRLSNISFLELEQTGIDHVPKGVAKLQQLYNLRGVFESASGFRLDELQCLSNIQRLRIVKLEKAAPGGSFVLKNCLHLRELWLGCTIGGHDKTYYQTNEIERIQQVYELLIPSPSLLYIFLVGFPGVRFPDWLCSEPE

SEQ ID NO: 190729 - protein, 563 aa, Oryza sativa
  Clone ID: PAT_MRT4530_87115C.1.pep
MAAGNVVAAALFLFLATSALLVAGDDPYRFFTWTVTYGDITPLGVKQQGILINGQFPGPTIEAVTNDNLIINVFNKLNDPFLISWNGIQQRRNSFEDGVAGTTCPIPPGGNFTYILQVKDQIGTYFYFPSLAFHKAAGGFGAIRVLSRPMIPVPFPPPAADYPLLIGDWYKANHTDLKYMLDSGKALGFPDGLLINGRSWDGYTFNVQQGKIPCFSKIFVLKTKNAGRTYRFRISNVGLSTSLNIRFQGHTMTLVEVEGSHTMQTTYSSLDVHLGQSYSVLLTADQPAYDYAVVVSTRFTSKIISTTAVLRYSGSGGKSPAALPGGPTIQIDWSLNQARSIRWNLTASGPRPNPQGSYHYGMVTTTRTIRLASSSATVNGKQRYSVNGVSHVNPDTPLKVADYYKIAGVFSVGTISDSPSGGGGGGAYLQTAVMGASYRDYVEIVFENPENEVQSWHIDGYAFWVVGMDGGKWSSASRQGYNLRDAVSRYTVQVYPNSWTAIYMPLDNVGMWNVRSENWARQYLGQQFYLRVWTSSTSWRDEYPIPKNALLCGRAAGRRTRPL

SEQ ID NO: 190730 - protein, 989 aa, Oryza sativa
  Clone ID: PAT_MRT4530_87116C.1.pep
MGTVLDALAWKFLEKLGQLIEDEVIMTLSVKRGIESLKKNLEFFNAVHEDAEALAMEDPGIDSWWKNMRDVMFDVDDIVDLFMVHSQKLLLPPRPVCCNQPLFSSFAKFSFDHMIAKRIDNINEKFEEIKMNKEMFGLERTNGQQIQITIVDRSQTSPVDELEVVGEDIRRAIDDIVKMIVSSNYNESRSTVFGIQGMGGIGKTTLAQKIYNEQRIREKFQVHIWLCISQNYTETSLLKQAIRMAGGICDQLETKTELLPLLVDTIRGKSVFLVLDDVWKSDVWIDLLRLPFLRGLNSHILVTSRNLDVLVEMHATYTHKVNKMNDCDGLELLMKMSLGPYEQSREFSGVGYQIVKKCDGLPLAIKVVAGVLSTKRTRAEWESIRDSKWSIHGLPRELGGPLYLSYSNLPPELKQCFLWCALLPSNFVIRRDAVAYWWVAEGFVTEVHGYSIHEVAEEYYHELIRRNLLQPRPEFVDKGESTMHDLLRSLGQFLTKDHSIFMNMEYSKALPNLRHLCISNDVEEIPAIEKHKCLRSLLVFDNKNFMKINKDIFRELKHIRVLVLSGTSIQIIPESVGNFLLLRLLDLSYTKIQKLPESIGKLTSLEYLSLHGCIHLDSLPDSLMRLSNISFLELEQTAIDHVPKGVAKLQQLYNLRGVFDSGTGFRLDELQCLSNIQRLRIVKLEKAAPGGSFVLKNCLHLRELWLGCTIGGHDKTYYQTNEIERIQQVYELLIPSPSLLYIFLVGFPGVRFPDWLCSEPERKMPNLGHMHLNDCTSCSVLPPAGQMPELLVFKIKGADAIVNMGAELLGKGVNSAKHITIFPKLELLLITNMSNLESWSLNTWNLCGKSEQLVLMPCLKRLFLNDCPKLRALPEDLHRIANLRRIHIEGAHTLQEVDNLPSVLWLKVKNNRCLRRISNLCNLKDLLAQDCPALYQAENLISLKRLYMVDCHNAKQFRMSLLEDQQLAVHVVTVGADGRDIFPDESLYN

SEQ ID NO: 190731 - protein, 107 aa, Oryza sativa
  unsure (1)..(107): unsure at all Xaa locations
  Clone ID: PAT_MRT4530_87117C.1.pep
SKEKRFFYVRATEQPEGGLVEQRHPASHPTGSERFFGGRXSQPTSSRPHPADPPNHTRPSLTHRCTIANRTQRPRASVGGSDRRAALLGALCSAHPRDPRVPVPAHA

SEQ ID NO: 190732 - protein, 131 aa, Oryza sativa
  Clone ID: PAT_MRT4530_87118C.1.pep
HYEGAFISRSTSEEEEEGHPAYPSPITDSFWSIHTPSRAIARGRGRRKAASAMLGHVLELEKVRVVRGVGLVDRDLRSRDPYVILRMAKRKLKTLGIKKTTIAQCDDELTRLVEDASVSGRPDSDDMHTLI

SEQ ID NO: 190733 - protein, 136 aa, Oryza sativa
  Clone ID: PAT_MRT4530_87119C.1.pep
YRCRGSHRRPLPPPSDLGGTRPAAAGSRRKEARRCRIRAGRDPPPLLPSAHRHRAKPPPPCPIASSPATSPSHAPAAAARRPPLSLPRAWVADPTPPTLPIAAAADPATSPSLPRVWVADPAPPTVPTASATPFGP

SEQ ID NO: 190734 - protein, 670 aa, Oryza sativa
  Clone ID: PAT_MRT4530_8711C.1.pep
MAIPTPSPSVVDQPSPPAPASAAAAASQPLAGDPAPEAAAAAEGAGGDQTAPAAAAATGASLYVGDLEASVGEDQLVALFSQVAPVASAYVCRDIAGGRKSLGYGYVNFMSREDATRAMENLNFTVVNGKPIRVMFSNRDPTLRKSGLANVFIKNLEPNIDNKSLYEMFSSFGTILSSKVATDFNGKSKGYGFIQFESESSAKDAINGLNGMLANGQKIFVGLFIRRQEREHTGDANNFTPVYVKNLPKHFSDNDLLNEFSSFGAITSAIVMRDANGLSRCFGFVNFEKSECARNAVKNLNGKSIGDMVLYVARAQKKSERQAELKAKFEHDKNQKFEKLQTVNLYLKNLDDDINDEHLRKLFECFGEVASCKVMLDSHGRSKGCGFVSFATVEDANNAILKMNGKMVGKKPLYVAVAQRKEERKAFLAAHFARVRALATMAPTLGPNIAPHQFNFGHGVPALFPPPPPAGFGFQPNFVPNMMMPYNMQRQPGQRSGPPHGGMPRHLHNPHQMFHQNANQGFRHMPNRRNGVANPAMLHQHHRFSSPMQPMQQAVKHVVPVGELQAPSNNLQTSLASANPEQQREILGDMLFPLVEQLVNEKAYKVTGMLLELDKTEVLNLVESPDTLRDKVAEAMKVLELEATATAAAAAAASGSGDGDAAAPSSSSAA

SEQ ID NO: 190735 - protein, 1064 aa, Oryza sativa
  Clone ID: PAT_MRT4530_87120C.1.pep
MRAGAYTIHQSLTAEAAAVLKLALGIARRRGHAQVTPLHVAFALLSPACSPPQQQPAPPPYGLLKRACLRSHPSAAAAVAAHPLQCRALELCFNVALNRLPTSAPHSPPPSSSAPSGAVAPPFASSLIQPNPTLSNALVAALKRAQANQRRGCVELQQQPPPPPPPPPPPVAATAQQQQPLLAIKVELDQLIISILDDPSVSRVMREAGFSSSTVKSNLEGESALMMSTSSSPPPPAIPPHFFLDPSIGVGGNGGGGGGGFMLWPAPFLSSPGMAVPSCKEDVRAVLEVMVRKQGRRTNPVVVGDSVSMAEAVAGELLRRLEGGDVPDELAGAHLLKLQLSYVHVRLMSRADVDAKAAELRRSVDAVKRGGLVVYVGDLRWALDEDHHHHHHPGADHHNTASSYSPVEHMVAELGRLLGDLRASAPPRGRVWLVATASYQTYMRCRRRRPSLESAWALQAVVVPTGAGTGLALNNLHAVATTTSNGEPVQQAMVATNHQQQQQQLASPFVAMAAEPAARNELDDKLLVLCTECSHNYEREASAVKAEAAADEEGPRAAGNLPGWLVPEPPKENYLIELKRKWSRLCRKLHLCGGGDPCSGQSFGAGAYGNGPSSLLPWWSASCLLPNGGGKPSIAGFLGMEALRWSPPAAAALPSLSSLREPECQDVTTALALGSLPLSDSASSSGGGGGDGAAARELERRLRKNVPWQRAAVAEIADAVAAGARSGNGTKGAGVWLLLKGSDHAAVRRVAAVIAETHCGSADRVVVVSADPNKFGCADDFRSDVVARASMAAAAGGNKLVLVVDDVERAPQHVVECLVAASRSGALKDKFGGQELDLSGSVVVMTTSKLADAAVSGVISLRLYTSEQSPPSGDLKRKTPTSSPPTSDRKRARARRSAGNGHSLDLNLNLFAHDDDDNDAGDVDDDDDGVPSDITHEGGGDDSGEHGHSHHRLLLESIATRVVTLDGDHHGAAAAVRERLSGRLDGGGRELRVDGEAAAALAAASGHFVDEVMERWVAEVFEPAAATVKNGGKAVVLGVGPSGGGAHESVGFMGSVLPSRVHVD

SEQ ID NO: 190736 - protein, 50 aa, Oryza sativa
  Clone ID: PAT_MRT4530_87121C.1.pep
FSFAGPLLSFRLVLFGGSFMYKSNLWGRGSTCGCPLVPGSLADKETNRMH

SEQ ID NO: 190737 - protein, 92 aa, Oryza sativa
  Clone ID: PAT_MRT4530_87122C.1.pep
PPPQGLGRSLPPPAPQWFPLGPPWNPSGVFSETRPPKIVPPPPRIFSPPFPPLFYHGYDKLFPPFPVGVLIPLGFNLDGPFVGKKKPVLPIV

SEQ ID NO: 190738 - protein, 303 aa, Oryza sativa
  Clone ID: PAT_MRT4530_87123C.1.pep
MARLVLLAVLPLLLLFVAGDSYATAAGGGGGGGGRRFDASRAVDVSWRPRAFLYEGFLSDAECDHLISLVKGKMEKSTVVDGESGESVTSKVRTSSGMFLDKKQDEVVARIEERIAAWTMLPTENGESMQMLRYGQGEKYEPHFDYIRGRQASARGGHRIATVLMYLSNVKMGGETVFPDAEARLSQPKDETWSDCAEQGFAVKPTKGSAVLFFSLYPNATFDPGSLHGSCPVIQGEKWSATKWIHVRSYDENGRRSSDKCEDQHALCSSWAAAGECAKNPGYMVGTSESPGFCRKSCNVCTS

SEQ ID NO: 190739 - protein, 354 aa, Oryza sativa
  Clone ID: PAT_MRT4530_87124C.1.pep
MARLVLLVVLLLLLSVTGETSATGGGGEGGRFDASRTVDVSWSPRVFLYEGFLSDVECEHLIALAKQGRMERSTVVNGKSGESVMSKTRTSSGMFLIRKQDEVVARIEERIAAWTMFPAENGESMQMLRYGQGEKYEPHFDYIRGRQASARGGHRIATVLMYLSNVKMGGETVFPDAEARLSQPKDETWSDCAEQGFAVKPTKGSAVLFFSLYPNATFDPGSLHGSCPVIQGEKWSATKWIHVRSYDENGRRSSDKCEDQHALCSSWAAAGECAKNPGYMVGTSESPGFCRKSCNAAGAEAAIRGTARRRPARRRRWAAGAAARGATRLRRGPRGGGGCGGWPLGGDRREPCED

SEQ ID NO: 190740 - protein, 671 aa, Oryza sativa
  Clone ID: PAT_MRT4530_87125C.1.pep
MGLLKSPRGTVIRIEVLVVLAACMLIFLAVFGFLRRRCTNPLFQTAVMGSYVLSSSLVTYTLGSMQSSAAKSGMYPIWALSLFILSGIIASQLASVSWNLNKMVADYMHEEHANHPIREYDAGSMKGYRYLVYWRLDKTSKIEAATSYAARVTTTDDDAQIICIDDIWLRSDKSLSTDLKDACLSFSLFHLLRRRFFGFTCAESAHPKTSDFVFKGLLQLKNGSTGTVDYIRAFKVIEVELAFMYDFFFTKYALIYYSSTSAAVWSLVSAAFTVLTAYSTTKLHWLQGGSTVVVQGGPTVVGDNKADIFITMLLLVSIALLELLQPLLYWTTIWGRVSFVCQYIRQQQPLRHGFSCCMMRVKELLTKIGLRVSSNGSYWQDMLGQYSLLASVSRNKPIKQLGRKRSRFIKCMNLLDYRALNFYPAIASFKKKNPVDKPIKLSPQVKEAVAKSLLQHAAAGHGNLTNGVSSLKSNGAHHLLWACDPDPAARILQNQTPSILIWHIATCCCEKKPPNYQHEEELKNFQVATALSRYCAYHSFFLGTTMTQPCVLHAVGEESVQFLRERGKKEFDAMALQGYEPPPEGEPTKGIFESGLKLGKQLEEMPEKMRWKVLADFWPEMLLYISPSDNVKEHIQRLAKGGEFITHLWALLSHAGILERPKQEHHPGSSV

SEQ ID NO: 190741 - protein, 1003 aa, Oryza sativa
  Clone ID: PAT_MRT4530_87126C.1.pep
MAEGRRYAIAPQLDIEQILKEAQRRWLRPTEICEILKNYRSFRIAPEPPNRPPSGSLFLFDRKVLRYFRKDGHNWRKKRDGKTVKEAHERLKSGSIDVLHCYYAHGEENINFQRRSYWMLEEDYMHIVLVHYLEVKLKFHFLHIYGYDHQAGKLSSRSTGHDDVLQASHADSPLSQLPSQTTEGESSVSGQASEYDETESGSYQGLQATAPNTGFYSHGQDNLPVVLNESDLGTAFNGPNSQFDLSLWIEAMKPDKGTHQIPLYQAPVPSEQSPFTGGPGIESFTFDEVYNNGLSIKDVDGDDTDGETPWQIPNASGTFATADSFQQNDKTLEEAINYPLLKTQSSSLSDIIKDSFKKNDSFTRWMSKELAEVDDSQITSSSGVYWNSEEADNIIEASSSDQYTLGPVLAQDQLFTIVDFSPTWTYAGSKTRVFIKGNFLSSDEVKRLKWSCMFGEFEVPAEIIADDTLVCHSPSHKPGRVPFYVTCSNRLACSEVREFDFRPQYMDAPSPLGSTNKIYLQKRLDKLLSVEQDEIQTTLSNPTKEIIDLSKKISSLMMNNDDWSELLKLADDNEPATDDKQDQFLQNRIKEKLHIWLLHKVGDGGKGPSMLDEEGQGVLHLAAALGYDWAIRPTIAAGVNINFRDAHGWTALHWAAFCGRERTVVALIALGAAPGAVTDPTPSFPSGSTPADLASANGHKGISGFLAESSLTSHLQTLNLKEAMRSSAGEISGLPGIVNVADRSASPLAVEGHQTGSMGDSLGAVRNAAQAAARIYQVFRMQSFQRKQAVQYEDENGAISDERAMSLLSAKPSKPAQLDPLHAAATRIQNKFRGWKGRKEFLLIRQRIVKIQAHVRGHQVRKHYRKIIWSVGIVEKVILRWRRRGAGLRGFRPTENAVTESTSSSSGNVTQNRPAENDYDFLQEGRKQTEERLQKALARVKSMVQYPDARDQYQRILTVVTKMQESQAMQEKMLEESTEMDEGLLMSEFKELWDDDMPTPGYF

SEQ ID NO: 190742 - protein, 205 aa, Oryza sativa
  unsure (1)..(205): unsure at all Xaa locations
  Clone ID: PAT_MRT4530_87127C.1.pep
RRTASPPLPARAPPSGAASPPTPIPLPTSGDPPRTLRDARSTPRPPSPSTVQSALPGPGGPTPPAPRVRRESSSAPSPLTSPAPPHAXRPSPPPPAAPRTPNHHPKTPPPPNTFPAAHPPPXPPRASPAAPTSAPGLPSPSSPPPASPRPTTPPWHRRCSTSSPPPRRRPPPPPPPLPALPRHSGAAAATTRTPRPRRRRRRAAS

SEQ ID NO: 190743 - protein, 41 aa, Oryza sativa
  Clone ID: PAT_MRT4530_87128C.1.pep
MRKTIYNALKGFNETNPPLSLPNDTHSSCNDVPIIAPFLFA

SEQ ID NO: 190744 - protein, 973 aa, Oryza sativa
  Clone ID: PAT_MRT4530_87129C.1.pep
MHRAMRLRGLLRPQLLRTHETGGALVVGLGEPGGSAVARRPPPLPFGDGRRRPSSRFYCSKGGVGSVEAAVGSGGGGSSSSSSEQEHARLGERDQKEWLSGERFVTGCRRRESPFLTKRERFRDQFLRRVVPWEKATLSWRSFPYYVDEDARQLLSDCVAAHLRHKDVALEYGSRLQSSGGRILLQSLSGTELYRERLVKALAHELRVPLLVLDSSVLAPYDFGEDCSESEEEDDHAESEDEGSVSEVEDEGDDDEEKSGESDDDDAIKSVEDLKKLVPCTLEEFAKRVASAQGSSSTSESSDTAESPEDGKRPLQKGDRVKYVGASVLVEADHRINLGQIPTQEGGTNAYTSINGRTLSNGQRGEVYEINGDQAAVIFDPSEDKLSDDKKDEASKEHLAKPAVCWVDTQDIELDHDIQAEDWHIAIEALREVLPSLQPAIVYFPDSSQWLSRAVPRSNRREFVEKVEEVFDQLTGSLVLICGQNITEAAPKEKEPKTLVFHNLARLSPLTSSLKRLVGGLKARKPSKSNDISKLFRNKFFIPLPKDDEQLRVFNNQIEEDRKIIISRHNLVEMHKVLEEHELSCEDLLHVKLEGIILTKQRAEKVIGWARSHYLSSVTCPSIKGDRLIIPRESLDLAIGRLKAQEASSRKSSEKIKILAKDEFERNFISAVVPPNEIGVKFDDIGALEDVKKTLDELVTLPMRRPELFSHGNLLRPCKGILLFGPPGTGKTLLAKALATEAGANFISITGSNLTSKWFGDAEKLTKALFSFASRLAPVIIFVDEVDSLLGARGGAFEHEATRRMRNEFMAAWDGLRSKENQRILILGATNRPFDLDDAVIRRLPRRIYVDLPDSQNRMKILKILLAKENLESDFRFDELANATEGYSGSDLKNLCIAAAYRPVHELLEEEKGGVSGTKISLRPLKLEDFVQAKAKVSPSVAFDATSMNELRKWNEQYGEGGSRSKSPFGFGS

SEQ ID NO: 190745 - protein, 77 aa, Oryza sativa
  Clone ID: PAT_MRT4530_8712C.1.pep
PPIGFPHSNFTRKPFQTKNTSPYRSIWLPSSSLSEYSRFCHPTIHPSCVNIILRSFTNLLSVSFVYLYIPIFNIFQL

SEQ ID NO: 190746 - protein, 93 aa, Oryza sativa
  Clone ID: PAT_MRT4530_87130C.1.pep
PPPFLSNSGPRFFFRTAHVPGKVLFPNGVEMVMPGDKGTPGFGLISPVPPEPGQKFSFRERGGPFGPGVFSKVSPCFVSRFFWGGDFVPNECF

SEQ ID NO: 190747 - protein, 82 aa, Oryza sativa
  Clone ID: PAT_MRT4530_87131C.1.pep
LGPGRQGNPLFLICWTNPPKRFVPHNWGHTISSFVKLSTRCAQISPVQKYTAPHPFLSRYSVLFHLCDTLYPPNCAFPSFCA

SEQ ID NO: 190748 - protein, 413 aa, Oryza sativa
  unsure (1)..(413): unsure at all Xaa locations
  Clone ID: PAT_MRT4530_87132C.1.pep
VSHALYRALHADPHRRRSPAISSRPPPPLPSLPRCAATTYSITPPHRTPASTPSPSSTAGTTFPSRGRATTATHRLQPAAAAALVVAAPRRLRRRQRRAKLYPGLRSVSPFHHRNHPSTVHPEPPPPYAASSPPCSTSVTVVHRRKPTGTWYLSVAGLAGPRPRLRQGRASSERRSRRLPCRPPPSFPPPVASPWLSRRRRPSVRTPSISSPFPXFAPPPARAVAPVVVAGDHRAVRRRSRPADRRPSWPPRVCHVVRPRTSACVDSVHGAPATLDIPRGPAVSFMSVRKSIQASSFVQQEQEVQPRVVVPRRSIVGSTXSAANWLVIKGVSCEPLAESPQSQVDRFNSKVTKIANLNSSVQDNHPRISGRDSCSHALYRAFQPDTHWRRLPGXFNRPAPAVPLLGGLGPPHL

SEQ ID NO: 190749 - protein, 233 aa, Oryza sativa
  unsure (1)..(233): unsure at all Xaa locations
  Clone ID: PAT_MRT4530_87133C.1.pep
MNHAVQKRLGFAVDRAHGSGSRERTAEIDPXSKTDGRDRPVHGRTTRDDDDDVSDDVTTGGGSAARARMLAGERRREDANGGHQNDADIAANSPVTKATTEEQRTTSATRSKRRRRSGRRRRRCSGGXQRRRRGGRGRRRDSDHDGDLPERRRRLERRRHTAGAAATMAALGHTALGRYRRREAKARVATGRGDTGDPFIGARRRRRRPTATGDAKETSVSVTWDREYHDLET

SEQ ID NO: 190750 - protein, 60 aa, Oryza sativa
  Clone ID: PAT_MRT4530_87134C.1.pep
MGLLGILNLVKIHPNHITGFLYRIPTFQQQSNPLEIVVNLTGTTGGSDSGVDKEFTAANG

SEQ ID NO: 190751 - protein, 193 aa, Oryza sativa
  unsure (1)..(193): unsure at all Xaa locations
  Clone ID: PAT_MRT4530_87135C.1.pep
MDSPATPVGLSPPLLSLVLRNEPCYTKGKMGLLRQRLGFAVDRVHGGGSQKRTAEISPSKTDSRDRLVHGRTTRDDDDDVSGDVTTGGGSGLQTRQRTTARXRERRAPTGSGRHGELTGDQSNGERSTDGDGVEEEAAATFGLTTTAVFRRSTATAEGRTRTATRRRPRWRPLRATATTGATVAHSWSGGDDG

SEQ ID NO: 190752 - protein, 482 aa, Oryza sativa
  Clone ID: PAT_MRT4530_87136C.1.pep
TPATRPRSARSSTWVNPGTRVTCGSPPHRTPEIACRCNGGSSACTLISRAPCRHRWSRAPPPRRHSKRVGVFPSPTPQIVGSSPPPPSQARVGEANVTNPSRQQFTASAPHAGDGQLQKRPPWQRLQRVGVANPMNAGDLPPQKPHFTANARNAGEHPFQEQQQPPPVAKPTDAAAGDLLPQQKQLMANAPNAGEHLLPEQQKQQPVTAAKPANAPPLQHAANATNPAVLRRQRQRQWVRLRPPTATNLPQTKQEQHHLFMADDGANARNPLSPPPPCGMAKPPNSGDPLTDQNNQQLMANTHSAPTPVSTPLVASNQSESSAMTTTTTTNSNQNSGGGRTGPQPVAAGAAPNPAGNQQQGQRKGGANRRGGRGQGNKNNNVANTNISNMSKVIGKGNKGQGNGNPQLNKNGNPQFNKNVPGDHHQKNKNAGQLCYRCGCRGHWSRICRTPEHLVKLYQQDRKAKLQAGANTNTVYVGAMTD

SEQ ID NO: 190753 - protein, 670 aa, Oryza sativa
  unsure (1)..(670): unsure at all Xaa locations
  Clone ID: PAT_MRT4530_87137C.1.pep
MAREDGDPAPRWPNPVLSRPDVVARLRAAAEGRRRQRWRGEDCRPLSVGASFRPGGPTILNNHTRLYRSISKPGIYHSKLGAKQIITSYSIFYYGMDSPATPVGLSPPLLSLVLRNEPCYTKAAHGNERPRSILSKTDGQDPTVHDRATGNDDDDVSGRQVGPVDPTCHPQPPASSNRRPRRPLPPPIPHLPSSQPAWTRDPFHLATTSRPTPPLSPRESTPRRAATXPPRCRPTPPRNPPLPGPLLAPLSYKINPRGLLFFFHRFPESPTPSTELSTPIPIAAARRRSPAARHRRSRRCRAAPPPPIASHHPTAPRHPLHLPPPPPEPPSHREAEPLPPHTAFSRPLPLPPCSTSVTVVHRRKPTGTWYLSVAGPAGPRPRLRHGRASSDRRSRRLPCRPPPSFPPPVASPWSSRRRRSSPSVVAATCLPRGAPADQRMRGLGPRVFPRFACQRVVSVVSEVRGREEKSSEDQSEEARQQRRKINGRRRRRGRSGGDLRLDDDGGVPAVDSDGGGADEDGDATATTMATSPSDGDDWSDGGARLERRRRRRRRYRRRETKARVATGSGGLGGPYIGVGRRRRRPMATGDGEGKSRVRRREIDPNRTRIHGFPNDFSRRFQKRKDRGDPEDHFPSSDFTGNGKGWPNLEGDDGSAALGFGRRAAGGRRQA

SEQ ID NO: 190754 - protein, 264 aa, Oryza sativa
  Clone ID: PAT_MRT4530_87138C.1.pep
MRMVAPFRRGLAIFSLSILSGPAALLFPSSLLFGPSARLAPSFAQVRFASLILPPLPEPPTVPPPSTELSTPIPFAAARRRSPAARHRRSRRCRAAPPPPIASQRLAAPRHPLHLPPPPPEPPSHREAEPLPPHTAFSRPLPPPPCRTSVTVVHRRKPTGTWYLSVAVLPALGRGSAMVGRRRNAVPVASRAGRRHPFRRRSPPHGRPVAGAPRRPSWPPRVCHVVRPRTSACVDSVHGAPATPCRIRRFGSPRSRGKEFGRSK

SEQ ID NO: 190755 - protein, 289 aa, Oryza sativa
  Clone ID: PAT_MRT4530_87139C.1.pep
MARHEAAAGVVDFHLPDEILAVIPTDPYEQLDVARKITSMAIASRVSRLEADAARLRRDLADRDRAEADLRARLADSDARLLAALDENAKLAKERDSLASTAKKMARNLAKLEAFKKQLMKSLSEDNLLQLSEIGDDRDFDANNNLTARVPSWKEHQFSVTPYTAPKLTPGSTPKFLSGPTSPTKSLSEVHSTFSSWHGSSSHQYSAPTSPPQHRSFAGRPRIDGKEFFRQARTRLSYEQFGAFLANIKEFNAQKQSREDTLSKAEEIFGTEHKDLYISFQNMLNRNHS

SEQ ID NO: 190756 - protein, 344 aa, Oryza sativa
  Clone ID: PAT_MRT4530_8713C.1.pep
MVAGAVDGDGEAGGGDVCGGARRRRQRREAEQGFEGRSTATATRGDGEAGGGGGGRGRERGEDEGERAAAARVMGGRKRSREHNKVKLSRPAVMAAAADNLPAEVPHQAHPRSGSGCTLLVLHRHGDTATNFVCDGCREPGEGTRYTSGDLVLHTHCALAAPTLRHPPAVTPSSATPATAPCAGAGSTTTAPPAAWTCTRAAPRCRCPSRCRRAAPPPSSSKNTDQRMYLHVKCIKEIMAGLGHGGGGGGNNGEGCSKMHHHEIMAAGSCRGGADADGEGADRVNRVIARLQERAGGGGGGGGSSKSKLVRRVCEVLVMLMRVVIGVLLGDPTVPLIAFNFIMP

SEQ ID NO: 190757 - protein, 456 aa, Oryza sativa
  unsure (1)..(456): unsure at all Xaa locations
  Clone ID: PAT_MRT4530_87140C.1.pep
TSPPASPPARTRPAPWRPPRASACAPRTPTSSARTSRTPSTAPAPAPPATSPACSLPLPPSSSPTPPLPLPLPLPLPPPPPPLRRRLPSSQPAWTRDPFHLATTSRPTPPLSPRESTPRRAATPPRRRPTSPRNPPLPGPLLAPCHPQPPASSNRRPRRPLPPPIPHLPSSQPAWTRDPFHLATTSRPTPPLSPRESTPRRAATPPRRRPTSPRNPXSPALSSPPSSPRRSPSPPLAGDLQPPATAAPVAAALRRHHPGLRSVSPFHHRNHPSTVHPEPPPPYAASSPPCSTSVTVVHRRKPTGTWYLSVAGLAGPRPRLRHGRASSDRRSRRLPCRPPPSFPPPVASPWSSRRRRSSVRTPFISFPFPLFSSPPVRAVAPVVVAGDHRAVRRRSRPADRRPSWPPRVCHVVRPRTSACVDSVHGAPATRESPSGEGYAKGLVTITRHGDVCIMGT

SEQ ID NO: 190758 - protein, 76 aa, Oryza sativa
  Clone ID: PAT_MRT4530_87141C.1.pep
ITYLGPYFTIPSLLAPYFPLPSPFPLRNKFTGRPSTLHQVCLRSPNHNTRNLYPSTIKNYVNLVPWQYAPKFPMVR

SEQ ID NO: 190759 - protein, 112 aa, Oryza sativa
  unsure (1)..(112): unsure at all Xaa locations
  Clone ID: PAT_MRT4530_87142C.1.pep
PFAENNHKVEENRHQLKRXINRTMSRISLMHEWAKNSELTXXIGPKFTSLXKRAKEEATCRFWARSTQPMVWPNPPQRHSIQGSPGWLRXLPNDGWRREDPTRSGGSALSPP

SEQ ID NO: 190760 - protein, 102 aa, Oryza sativa
  unsure (1)..(102): unsure at all Xaa locations
  Clone ID: PAT_MRT4530_87143C.1.pep
MTVVTVGMVGNTLQPSLGANPHSPAXSCIQRRQDGFSRTSGSAFGRTMDWAILAHLRLAASSIALLCKLMNFGLIHRVNSVFLAHSYISLILDIVRLIYRLI

SEQ ID NO: 190761 - protein, 120 aa, Oryza sativa
  unsure (1)..(120): unsure at all Xaa locations
  Clone ID: PAT_MRT4530_87144C.1.pep
ALTIHGRTRECLFNGQAEYESIKAVKQAIFMPIIANGDITSPQKAKDVLXYTGADAVMIGRGSFGRPWLFQELKQFLETGDIMIXSIDEKCQLMLKHIENLYHFYGEGWYLDQLTPRLKF

SEQ ID NO: 190762 - protein, 78 aa, Oryza sativa
  unsure (1)..(78): unsure at all Xaa locations
  Clone ID: PAT_MRT4530_87145C.1.pep
SGSANPTMLTKKQPLAXDNFQYFPPKSPALKWLETLKCDQLHNLHXCAPLPQXESLPGQGCADNKIELHAPKLTTPQY

SEQ ID NO: 190763 - protein, 55 aa, Oryza sativa
  Clone ID: PAT_MRT4530_87146C.1.pep
MADNPLLLRAISYTAVAGSGDLASYDRPVGPNVLSNLRAHPLIHTSIGSATLFSG

SEQ ID NO: 190764 - protein, 641 aa, Oryza sativa
  Clone ID: PAT_MRT4530_87147C.1.pep
MGKNLRIKTGNRAPLLAQGETSRALSDLEEGSNVQPENVGFCRVIKLARHDAGKLVIATMALLVASLSNILVPKYGGKIIDIVSRDVRRPEDKAQALDDVTGTILYIVIIVVTGYLLENLESWLFNSASERVVARLRKDLFSHLVNQEIAFFDVTRTGELLSRLSEDTQIIKNAATTNLSEALRNITTTSIGLGFMFATSWKLTLLALVIVPVISIAVRKFGRFLRELSHQTQAAAAVASSIAEESFGAIRTVRSFAQESHEVLRYGEKVDETLKLGLKQAKVVGMFSGGLNAASTLSVVIVVIYGANLTINGYMTTGSLTSFILYSLTVGSSVSALSGLYTTVMKASGASRRVFQLLDRVSSMANSGDRCPTNENDGEVELDDVWFAYPSRPSHMILKGITLKLTPGSKVALVGPSGGGKTTIANLIERFYDPLKGRILLNGVPLPEISHQFLHRKVSIVSQEPVLFNCSIEENIAYGLEGKASSADVENAAKMANAHNFICSFPDQYKTVVGERGIRLSGGQKQRVAIARALLMNPRVLLLDEATSALDAESEYLVQDAMDSLMKGRTVLVIAHRLSTVKSADTVAVISDGQIVESGTHDELLSRDGIYTALVKRQLQGPRFEGTSNATAEIEPISNGQ

SEQ ID NO: 190765 - protein, 783 aa, Oryza sativa
  Clone ID: PAT_MRT4530_87148C.1.pep
QPSARRCIRAAAPSPVSRHCRRSLPAPAQAQITSLRCRRRRSLRVRTPPTLLPVPPRAGASKDPLHPRSIAAAASSTSRRRYPSLPRRAVAGADPSPSAAGSPPCCRRAQPPLHPSTSLRRPCWTKYGEQEAPNVAAEEVLDQDVENTAAVREGMFVPSPLGGETINLDTQCLSIMLHDIEDTEDNDRDFEKFSKLVEDCQMPLYDGCKSKHIKLSCVLELMELKASNGWPDKSFTELLELLKDLLLEGNNLPQTTYEAKQVLCPLGLERYSRTPGRANRDRGAQLSDGNNQQVWKKEESWKDKREEHVERKTEEHMEKQKTKERSMWKKKSIFWRLPYWKDLEVRYCIDLMHVEKNVCESLMGLLLNPGSTKDGLNARRDLEEMGVRSELHPITTESGKVYLPPACYTLSKEEKIDLLTCLSSIKVPSGYSSRISRLVSLQDLKLANKVLWSSIHGSQMYPYERYLGILKGYVRNRSHPEGSIIESYTTEEVIDFCVNYMSETSSIGLPRSHHEGRLDGVGTVGRKTVRLDQKVYDKAHFTVLQHMTEVVSYIDEHLAVLRQENLGQSESWVRNKHMSSFNEWLKNRIARLQNLSSETLQWLSQGPEWSATTWQGYDINGYTFHTVKQDSKCTVQNSGLRIEAASDSGRRDQYYGRVEQILELDYLKFKVPLFRCRWVDLRNVKVDNEGFTTVNLANNAYKDEPFVLAKQVVQVFYIVDSCNKKLHVVHEGKRRIVGLDNIADEDDYNQHVHSIGQEIPLEEEEEEDDVQYARVDHEEGLFL

SEQ ID NO: 190766 - protein, 81 aa, Oryza sativa
  Clone ID: PAT_MRT4530_87149C.1.pep
MDDLDDELSERGSDEPPSIGTAKESSPRGGDAGSGALSETRDEEWLEPRSARAARRAENHGCFAPKFALFAQKFQQQHLHS

SEQ ID NO: 190767 - protein, 295 aa, Oryza sativa
  Clone ID: PAT_MRT4530_8714C.1.pep
MSLVKSTCSTCCTQSGLISATGDIESQSTVTEERELGTCCKGPNIMAIAGQESSQNYLRAVSLFYFLMHNTECIHASVASHDAVPSSRKLSNPAVSQKYVLYKSLKQMFHRCGLCMAVQAFFPCGAAYVNILSSYEDGSTLLWDVRNPGLPVSSVKYHSESALSIAIDGLCNGGISGGADDKIVMFGLDHQKGAFILRKEIKLERPGIAGTAIRPDNKIAATAGWDHRIRVYSYSKGNALAVLKYHSASCNAVTFSSDSKLLASCSADTTVALWELYPPKTDSQVGLKTRDEISQ

SEQ ID NO: 190768 - protein, 159 aa, Oryza sativa
  Clone ID: PAT_MRT4530_87150C.1.pep
RGGSSLAATMSSASSFSRASSSRVRRDSQVSELPLVKCPFCKGDSTVVERTCKKEENFNRKFYRCLTGQYTSAQCKFFMWQGDYAVWLVKEGFLHGWTDCNAHRIEDDVPESVKASLKGLHDGIEKIRCEMKEAMSRICMFGIAFVTAFVMFVAMNVMK

SEQ ID NO: 190769 - protein, 166 aa, Oryza sativa
  Clone ID: PAT_MRT4530_87151C.1.pep
MSSFNEWLKNRIARLQNLPSETLQWLSQGPEWSATTWQGYDINGYTFHTVKQDSKCTVQNSGLRIEAASDGGRRDQYYGRVEQILELDYLKFKVPLFRCRWVDLRNIKVDNEGFTTVNLANNAYKDEPEDDYNQHVHGIGQEIPLEEEEEEDEVQYARVNHEEALF

SEQ ID NO: 190770 - protein, 111 aa, Oryza sativa
  Clone ID: PAT_MRT4530_87152C.1.pep
CIDHILVGCSESRQLWWWALSAINQLDCLPLQEASFHQWLCLSRKKVVKDRCRGFDTIATLVAWMIWKERNNLVFNLQRQPWAEIARAMAAEAELWRLAKAAIPALVGHGP

SEQ ID NO: 190771 - protein, 576 aa, Oryza sativa
  Clone ID: PAT_MRT4530_87153C.1.pep
MARHRYPLTCDRPEEKAVTGRSIPLTGNSIEARQRDCKNEQMIEDSDEVHAHLIMNGFMKKYTCWTKHGEQEAPDVAAEEVLDQDVENTAAAREGMFVPSPLGGETIDLDTQCLSTMLHDIEDAEDNDRDFEKFSKLVEDYQMPLYDGCKSKHSKLSCVLELMKLKASNGWSDKSFTELLELLKDLLPEGNNLPQTTYEAKQVLCPLGLEEYADLDVCPVYGASRYKRAKSEGEGSKSKRGGPAKVVWYLPIAERMKRMFANKDQAKLKVYYACHAHSRYLEILKGYVRNRSHPEGSIIESYTTEEVIDFCVDYMSEISSIGLPLSHHEGRLDGVGTIGRKTVRLDRKVYDKAHFMENPGQSESWVRNKHMSSFNEWLKNRIARLQNLSSETLQWLSQGPEWSATTWQGYDINGYTFHTVKQDSKYIVQNSGLRIEAASDGGRRDQYYGRVEQILELDYLKFKVPLFRYRWVDLRNVKVDKKGFTTVNLANNAYKDEPFVLSKQVVQVFYIVDSCNKKLHVVREEKRRIVGLDNIIDEDDYNQHVHGIGQEIPLEEEEEEDDVQYARVDHEEGLFL

SEQ ID NO: 190772 - protein, 485 aa, Oryza sativa
  unsure (1)..(485): unsure at all Xaa locations
  Clone ID: PAT_MRT4530_87154C.1.pep
MDRRWMYYAHRSSTEYREGVTEFVTFADNDRKSRMSMHMLCPCRDCKNEQMIEDKDEVHAHLIMNGFMKKYTCWTKHGEQEAPDVAAEEVLDQDVENTAATREGMFVPSPLGGETIDLDTQCLSTMLHDIEDAEDNDRDYEKFSKLVEDCQMPLYDGCKSKHSKLSCVLELMKLKASNGWSDKNFTELLELLKDLLPEGNNLPETTYEAKQVLCPLGPEEYADLDVCPICGASRYKRAKSEGEGXLWNEGTRTWDANAQXNLHAMLFCTINDNPALGNLSGQTVKGKWACSECMEETRSKWLKHSHKTVYMGHRRFLPRYHPYRNMRKNFNGHRGTPGPLTELTGTEVHNLVMGITNEFGKKRKVGKRKEKSTSKEKTEEHVEKQKTKERSMWKKKSIFWRLPYWKDLEVRHCIDLMHVEKNVCESLMGLLLNPGTTKDGLNARRDLEDMGVRSELHPITTESGRVYLPPACYTLSKEEKIDLLT

SEQ ID NO: 190773 - protein, 51 aa, Oryza sativa
  Clone ID: PAT_MRT4530_87155C.1.pep
GPKKHPYPLYTYGRGPMFTYLFGPILIRAKTKILVFKKRSYFCATKQQFSL

SEQ ID NO: 190774 - protein, 553 aa, Oryza sativa
  Clone ID: PAT_MRT4530_87156C.1.pep
MRSMMRLMICCLLVSAGVGGITGEGNSEVVLLLQRVKPVLRREGGNAQLATWTASTPLCLWRGLRQIPGGRCTSPIVVPAAASQSPRLEDVLPLHHVTEPVAGRVEERRWRRRAEAGGDRRPAPPPSPSPTSPVTSSGPCENRKMTVTFDGSLGLLSSMGHPAVARHRWMYYAHRSSTEYREGVTEFVTFADNDRKSRMSMHMLCPCRDYKNEQMIEDSDEVHAYLIMNGFMKKYTYWTKHGEQEAPDVAADEVLDQDVENTAAAREGMFVPSPLGGETIDLDTQCLSTMLHDIKDAEDNDRDFEKIVRCPCMMDVYKLSCVLELMKLKASNGWSGKSFTELLKLLKDLLPEGNNLPDTTYEAKQVLCPLGLEEYADLDICPVCGASRYKRAKSEGEESKSKRGGPAKVVWYLPIAERMKRMFANKEQAKLVRWHAEEWKVDGMLRHPADSVQWRTIDRIYQKFSNDPRNMRFAMCKDVINPFGDLSSRHSTWPVLLVNYNLPPWLCFKRKYIMLAMLIQGLRQPGKDIDVFLEPIIDDFERLWNEGTRTWDA

SEQ ID NO: 190775 - protein, 143 aa, Oryza sativa
  unsure (1)..(143): unsure at all Xaa locations
  Clone ID: PAT_MRT4530_87157C.1.pep
MGKSLXXXXXXXXXXXXXXXXXXXXXXXXXXXXXXXXPKSGSEKAEKVKPISTKGLTAEQKAKVKADKARAALVKRMGIDPYHDWKANYQILPDKDKVVSELKSLAKKADHIYLATDLDREGEAIAWHLREVIGGKEEHFSRV

SEQ ID NO: 190776 - protein, 169 aa, Oryza sativa
  Clone ID: PAT_MRT4530_87158C.1.pep
MKSHDCHVLITQLLPVAIRNILPPKVRNRSHPEGSIIESYTTEEAIEFCVDYMSETSSIGLPRSHHEGRLDGVGTVGRKTIRLDRKVYDKAHFTVLQHMTEVVPYVDEHLAVIRQDNPGRSESWVRNKHMSSFNEWLKNRIARLQNLPSETLQWLSQGPEWSSICTCRP

SEQ ID NO: 190777 - protein, 722 aa, Oryza sativa
  Clone ID: PAT_MRT4530_87159C.1.pep
MGVFGVYEGNKKQMVEAFTQDGLHGSQEISPKRLCSFFHAIGQKIIDPEGLDELQAELVRTLCHLEMYFPPTFFDIMEHLPVHLVRQTKCCGPALMTQMYPCERYLGILKGYVRNRSHPEGSIIESYTTEEVIDFCVDYMSETSSIGLPRSHHEGRLDDVGTVGRKTVRLDRKVYDKAHFTVLQYMTDVVPYVDEHLAVLRQENPGRSESWVKNKHMSSFNEWLKNRIARLQNLSNETLQWLSQGPEWSATTWKGYNINGYTFRMVKQDNKCTVQNSGLRIEAASDGGRRDQYYGRVEQILELDYLKFKVPLFRCRWVYLRNVKVDNEGFTTVNLANNAYKDEPFVLAKQVVQVFYIVDPCNKKLHVIREGKRRIVGLDNIADEDDYNQHVTSPVTGQSIGPVIGGLTCDGSTVGAHHRSGTHSHSFTLSIQIHRPPLHRLDLDLSATIKVEKAIATLLASVAFRSTNDRPDFSNLSKYQNGNGMKLGWISSPDFQKPKADMILYGTAYHPQTDGQTEHLNQILEDMLRACVLDFGKTWDKSLPYTEFSYNNSYQASIQMTPYEALYGPSWGKPNTKGKIAPRFVGPFRIIARRGEVAYQLELPASLGNVHDVFHVSQLKKCLRVPSEQADSEQIEVREDLTYVERPVKILDTMERRTRNRVIRFCKVQWSNHAAEEATWEREDELKAAHPDLFASPPATLADGWGPPVIPFLPPLPRLPRA

SEQ ID NO: 190778 - protein, 461 aa, Oryza sativa
  Clone ID: PAT_MRT4530_8715C.1.pep
MLKGFNVPQGKYYLVDGGYANTPSFLAPYRGVRYHLKEFGRGQQRPRNCKELFNHRHAILRNHIERAIGVLKKRFPILKVGTHHSIENQVKIPVATVVFHNLIRMLNGDEGWLNHQGSNISPEKFIDVPEATIFGRGSPKFNLIQAAAVQRKPSPKISRHQKKKASPKAVLDRSRASWNAGLEKALVDLLHDHNNDCYRSQNGWSTEAWNRIVKSFHEKFPYVNFTKSHPKAKKFRNKSFPLFEALGELYDGHTAEGTMNFTSIAPSQVPITKPFQVTVTQPSHIPLTQPSQTSQATVTQHFMGEDENFPFDSHVHNAESDDDLRIVEQPIASDATTRSRMGKRVASATNKHAGTSDKTEKATQRRRQDGKVVEMMGKFLEFKEKQAETEIMQQERARSNVHEDEFPIPVCIAVVDSMEDMSDDEKVLAYDVFKDPQNRAIFMTAKDSTRLKWLRRKITTA

SEQ ID NO: 190779 - protein, 52 aa, Oryza sativa
  Clone ID: PAT_MRT4530_87160C.1.pep
YQHNPNSQHACHELYIMLRSTDQLVTLQFGLMAPEMSWSTPMETYLTMDASK

SEQ ID NO: 190780 - protein, 857 aa, Oryza sativa
  Clone ID: PAT_MRT4530_87161C.1.pep
MVKKGCKLVKVTVLDFFSISGWNIRDYCSLVSSFFCSLVIWFTTPDPHTSDGIPVTGKQSPSLVTITFDGLYGMPSPAKTLQAVTGDGPPPVPAFISGPSQMDRRWMYYAHRLSTEYREGVTEFVTFADNDRKSRMSMHMLCPCRDCKNEQMIEDKDEVHAHLIMNGFMKKYTCWTKHGEQEAPDVAAEEVLDQDVENTAAAREGMFVPSPLGGETIDLDTQCLSTMLHDIEDAEDNDRDFEKFRPRQLGNDIDVFLEPIIDDFERLWNEGTRTWDAYAQEYFNLHVMLFCTMNDYSALGNLSGQTMKGKWACSECMEETRSKWLKHSHKTVYMGHRRFLPRYHPYRNMRKNFNGHRDTAGPPAELTGTEVHNLVMGITNEFGKKRKVGKRKEKSTSKEKTEEHVEKQKTKERSMWKKKSIFWRLPYWMNLEVRHCIDLMHVEKNVCESLMGLLLNPGTTKDGLNARRDLEDMGVRSELHPITTESGRVYLPLACYTLSKEEKIDLLTCLSGIKVPFGYSSRISRLVSLQDLNLVGMKSHDCHVFITQLLPVAIRNILPPKVRHTIQRLCSFFHAIGQKIILRLHLVRQTKCAGPAFMTQMYPCERYLGILKGYVRNRSHPEGSIIESYTTEEVIDFCVDYMSETSSIGLPRSHHEGRLDGVGTIGRKTIRLDRKVYDKAHFTGPEWSATTWQGYDINGYTFHTVKQDNKCTVQNSGLRIEAASDGGRRDQYYGRVEQILELDYLKFKVPFFRCRWVDLRNVKVDNEGFTTVNLANNAYKDEPFVLAKQVVQVFYIVDPCNKKLHVVREGKRRIVGLENIADEDDYNQHVHGIGQEIPLEEEEEEDEVQYARVDHEE

SEQ ID NO: 190781 - protein, 64 aa, Oryza sativa
  Clone ID: PAT_MRT4530_87162C.1.pep
HYIKHVNHDFRRRKISLRDGKKLPTCFGLLHLLSEYHSLYLHSRCAVHRMSRRIFQGTLYFSYC

SEQ ID NO: 190782 - protein, 81 aa, Oryza sativa
  Clone ID: PAT_MRT4530_87163C.1.pep
AWGRLGRLMMTAKLSVLPKLSGRTEEKGRGHLVSSRAWPLRGGGFYTFYHYTPSSSCILYFKGLPFRFCLFRKYNIKKKKK

SEQ ID NO: 190783 - protein, 932 aa, Oryza sativa
  Clone ID: PAT_MRT4530_87164C.1.pep
MAEIAVSLVGSLIAGISTLVEKEATLLQSVPENTRGRQTSRQMLPFYSSMAHPLSLLFIVIEILKIEHNYRLDSFLLSRSPAKPFVKDELQTIGAFLGVVENMKEDSPKYQMARVWAEQVKDLAYDMEDCLEEQITALTTRNSSWSQYVTNYRALRPFAAKLSDLKSRIVEVSERNMRYHLVIADQVIDNHMNFMVALNKVLSRSVEGTTDNWTQNVVTWAEAPEESASNDKTCAPKVTAVVGMFGSGSTRVSEIYKRHKADKKYDSYVWIELSQDVNVTKVFKDMMKQLFDDSSSQPEYTGEDELAHGIQHELKQKRFLVVFDELWTTHAWHSIKKALPHVSRSGSQVIVTTEIVHVAKGCTESDDHVYWVQLLSKQESFERFKNLILVTENSKMTHEDREDFEDLDLKELDRLKILRKCRGLELAIGTVANNHPMLKDIWKVMIQRYKDLPPYLKPCFLYLSIFPENSDINVETIIDRWLAEGLVRDRTGMSPRTVAKWYLLWLIDRSMIMVSNLRKNRSFKTCWIHPMMRDILVMISQEEKFSITVGPRKSSSLLVKRLPHVTLDGGSGRKLARYVDLSGIRSLTVFNEPSESIAALICSSKLRAVRILDLSNANEFKITRRDIERVGELCHLRYLNLYKTNICELPSSIGMLPFLQLLNVRKTRITKLPNEVTQLGKLQLLRASRRTEDSCHNRRNRCCIDSALTVPKGIENLQDIERLDIMDIKDNSGSEIEALGKLARLEHLGLAGITIGNSKQVSKTLKRISSSLTYLYLGACQSDGTLACLPISEKKRKKPLEFPRLQTIKLDGHIGKMPYWISNSWTLAVIKLYRTNLQQNHIMSLEKLPCLVTLALLDNSYISETLVFYDKAFRELKTLEIIRLTKLKTVIFTEEAVPQLRSLAIRCCELRLKGKNNLKLRKVDLDDGVEEV

SEQ ID NO: 190784 - protein, 61 aa, Oryza sativa
  Clone ID: PAT_MRT4530_87165C.1.pep
EYGYCGNLTWSKDLLRLPRTGHRTEYANESAHMVAVIAGGIKKDPTGNVCIARALISTTFG

SEQ ID NO: 190785 - protein, 105 aa, Oryza sativa
  Clone ID: PAT_MRT4530_87166C.1.pep
MEAPRYDCSLTEDGARDEDMPSLIFRTATIVSKIGQGEQGGALMFLCNGICTWRLPTSIMEMWSQRCLGNETHGEDGTSVRTPGDSGGTANGTLGWRRVAQPLDV

SEQ ID NO: 190786 - protein, 91 aa, Oryza sativa
  Clone ID: PAT_MRT4530_87167C.1.pep
MSNGTEKQQAQSAAGEQRPPAVSAEMQKVFSRFDADGDGRISPSELAAVSRAISPPPSSSHGGREVAAMMDELDTDRDGYVDLGEFAAFHA

SEQ ID NO: 190787 - protein, 117 aa, Oryza sativa
  unsure (1)..(117): unsure at all Xaa locations
  Clone ID: PAT_MRT4530_87168C.1.pep
GGPLHSPVWQTRCDVSSFMVRQHRLFGVIFLNNCSITSSSSSSTRPRXHDHSTVPHAHPAARLSRHHWLPDFDYIDHNYFTHGFIDHGSLMSFALVMSSMAQRVIIRIEHSRLSSLV

SEQ ID NO: 190788 - protein, 104 aa, Oryza sativa
  unsure (1)..(104): unsure at all Xaa locations
  Clone ID: PAT_MRT4530_87169C.1.pep
DGVDTGCNVEQQQNTYYVVAIGRPTNGSXLVAMGKGTPYTHHSYKVRESFAYKWINKKLKEGLHVTCMATAGNHWGVLMSRNARYSHQVAEMDYLYPHVGIHRR

SEQ ID NO: 190789 - protein, 136 aa, Oryza sativa
  unsure (1)..(136): unsure at all Xaa locations
  Clone ID: PAT_MRT4530_8716C.1.pep
MFGRGSPKFNLIQXAAVQRKPSPKISRHQKKKTSPKVLDCSRASWNAXLEKALVDLLHDHNNDCYRSQNGWSTEAWNXIVKSFHEKFPYVNFTKVQIQDKEXRELKREYRVLKEARKQSGVSXDDKLCMIEGDEAV

SEQ ID NO: 190790 - protein, 439 aa, Oryza sativa
  Clone ID: PAT_MRT4530_87170C.1.pep
MADRRRSDGGGGMQQQPFTSPGQERVFDGGGVPGQVAAPYGSDFDQSSYMALLAAGAVGVGVGVQPTAAPWAVEEDVAAAPPGISLAPQFSMANYAPPPSYQHPATLVSPPLAAGLHPYPPYLHGVDAPPPQWPPRPAPPPSFSVLDLAAAAAPHEQRHSMQQLLLRAAAFGGGMHAAAAPAPAAAAAIEQPAKDGYNWRKYGQKQLKDAESPRSYYKCTRDGCPVKKIVERSSDGCIKEITYKGRHSHPRPVEPRRGGAASSSSSAMAAGTDHNAGAAADDAAAADEDDPSDDDDTLLHEDDDDGEEGHDRGVDGEVGQRVVRKPKIILQTRSEVDLLDDGYRWRKYGQKVVKGNPRPRSYYKCTADGCNVRKQIERASADPKCVLTTYTGRHNHDPPGRPPAAANLQMPGPAAMRLAGGGTAHQQPSGGAHQMKEET

SEQ ID NO: 190791 - protein, 131 aa, Oryza sativa
  Clone ID: PAT_MRT4530_87171C.1.pep
LLIVARSDESGHDDGGGSNHNDTEGAAMGEATTTLEEQHGLEVASVALRWAYPALDGRIQRWRRRGWEGRWWRSLIWRSGDGATIMWLHDGGVGLGSTEASATTTDCGLVAGPRQQWQNKKNQEHRNPRRG

SEQ ID NO: 190792 - protein, 203 aa, Oryza sativa
  Clone ID: PAT_MRT4530_87172C.1.pep
MELREIFQRPWKILLRLQSSKSSMVSTLQGDENEMTTWRPSCPADCLVKLVQLGVLVMAWRMQLCLRLYEGPGTSSHRSDESGHDDGGGSNHNDTEGAAMGEATTTLEEQHGLEVASVALRWAYPALDGRIQRWRRRGWEGRWWRSLIWRSGDGATIMWLHDGGVGLGSTEASATTTDCGLVAGPRQQWQTAVTMMMARTDGS

SEQ ID NO: 190793 - protein, 80 aa, Oryza sativa
  unsure (1)..(80): unsure at all Xaa locations
  Clone ID: PAT_MRT4530_87173C.1.pep
HMATVPTLHHMGPWGRXFLAXXVGTTLSPHQGTATPSHFFPVXLSLSITTIGMASPQPTSIGTRMGHTWGXGTXTTYRCL

SEQ ID NO: 190794 - protein, 72 aa, Oryza sativa
  Clone ID: PAT_MRT4530_87174C.1.pep
MRTTQTPSFSVAIATEADDRNRIRTSTATASSSSLVPLVGSAYVHLRRPVVVVWRCAEVATPTIVVGLAILP

SEQ ID NO: 190795 - protein, 34 aa, Oryza sativa
  Clone ID: PAT_MRT4530_87175C.1.pep
GMTECVKTVVFGWMELLSRYGERPPNPASSNRIR

SEQ ID NO: 190796 - protein, 69 aa, Oryza sativa
  Clone ID: PAT_MRT4530_87176C.1.pep
WHQNMLTIQAVQFNGVPKLKPLRLNTNGSMNEPCDVQRSFAVHLINVSESSSGYKATPAMACGTCQYCQ

SEQ ID NO: 190797 - protein, 150 aa, Oryza sativa
  Clone ID: PAT_MRT4530_87177C.1.pep
MSMIVTKFGPWGGPGGDYRDVQVAPYRLVRLTIRSGDTVDGISFTYIGNDGLVYHMGHWGSDGGVPHEIHLGLMDFVMEISGTTGMWVSGMSNVLRSLKITTLKRTYGPYGNPKAGIPFSFSVDGSDRITGFFVRAGFITDAIGVYVRHC

SEQ ID NO: 190798 - protein, 130 aa, Oryza sativa
  Clone ID: PAT_MRT4530_87178C.1.pep
MWAHAVSGSGCPRGISRIHLGRRRLIGRWTTCHVVSAVDGAAAAGEGRPPLSCGEVACRSLRRLRYVLRIDPNSGVSEVQGEAKPPPLPLVAISRRRRRRQLRSGRRSRQGGCEGDEYDSLPGLHTGVEY

SEQ ID NO: 190799 - protein, 67 aa, Oryza sativa
  Clone ID: PAT_MRT4530_87179C.1.pep
CCPCPRVHQRVRLCVNHTYCNSCSSLKLGFCRSQQSQTQKRIYLISVRTLLDQNNHIFISWHNLLIP

SEQ ID NO: 190800 - protein, 221 aa, Oryza sativa
  Clone ID: PAT_MRT4530_8717C.1.pep
MEAQPIRRPRPTVARIKGRRPAGGGAARRVAAATQPDGHRWRQRNAAAGEGGKKRGEGGSSHRWARRRREAAGGARDGWEAAAFLGEATRTALRRRPAKAEKRPRQSSREAEGGDRATPGGVSVRGWGNGAAVGLALTVVELTAAAVWCEVAGNGGNGGGGSGARWGGGSSGEMEERRGCRALEWRDRARERRNRPVSWDADVGSWRRFGTDLRGASGGFG

SEQ ID NO: 190801 - protein, 72 aa, Oryza sativa
  Clone ID: PAT_MRT4530_87180C.1.pep
FTTSRLKYGSIQLLFLFTDHVFLMVRFCPWCHDSLSSSMCSKKKIFFFFFSKNKKKAENTTVVGLALLISDH

SEQ ID NO: 190802 - protein, 518 aa, Oryza sativa
  Clone ID: PAT_MRT4530_87181C.1.pep
MEKERKQGFFAALKEEVVRGLSPARSRGKSPARSASPGRMLIPRRRKEKQQQPPPEKLLQQYFAEPLISRSGSLRPGGEALAPLIEGPDPERLAAGGDFAGGEESARREGFGRWVRGQLARTPSVASSAAAAAAASPGGSGDSFRRSDLRLLLGVMGAPLAPIPSKLADPLPLLSIKGTPIESSSAQYILQQYMAASGGYRLLQSVRNAYAMGKVRMVASEFETATRVVKNRGPSGRGAASVEQGGFVLWQMAPDMWYVELAVGGSKVHAGSNGRLVWRHTPWLGAHAAKGPVRPLRRVLQGLDPLTTAGLFAEARCVGEKKVNGEDCFILKLSADPQTLKQRSEGPAEIIRHVLFGYFSQRTGLIVHIEDSHLTRIQPHSGGDAVYWETTISSALEDYRPVEGIMIAHAGRSAVTLFRFGEAAMSHTKTRMEEAWSIEEVAFNVPGLSVDCFIPPADIRSGPVGESCELPPPAAAPHGERARHPARVAAVDRAPPHHNAGGANVGRRGDKIMWRVEV

SEQ ID NO: 190803 - protein, 72 aa, Oryza sativa
  Clone ID: PAT_MRT4530_87182C.1.pep
KTYYQEPVTHSFPTKSQLILLVFNINLIKSHDLHTSTNHSHPNDSPYDKYVLFHLAKYSLLHITFSLHPSPK

SEQ ID NO: 190804 - protein, 75 aa, Oryza sativa
  Clone ID: PAT_MRT4530_87183C.1.pep
MRSRWRRTKTTPQLLVVTTSSRAGKSAASLTQKGTINLTTRQRERERERGGLGYLYHCCCSWAAQPIPSLGVPTY

SEQ ID NO: 190805 - protein, 174 aa, Oryza sativa
  Clone ID: PAT_MRT4530_87184C.1.pep
MTRRRREAGFEVVSILLCVPAYDAVLMPLARRVTGVRRSPAVLMPPRSCSGSASAEPPAPTEEPRRRSTSHRRQEKERVGRASGGGAEEFRLFLGEGEISRLVVANDDDDAVGSSKNVGADWIFGGRIWDFSERLRRKDTLRQRTDARGLVKAWYRVAMFGDEGPSLVAIPSST

SEQ ID NO: 190806 - protein, 242 aa, Oryza sativa
  Clone ID: PAT_MRT4530_87185C.1.pep
MPQIEVTFDIDANGIVTVSAKDKSTGKEQQITIRSSGGLSEAEIQKMVQEAELHSQKDQERKALIDIRNNADTTIYSVEKSLGEYRDKIPAEMTSRRSRPISKRPTRAVSKIGQHMSGGGGGAGGSETGGSQGGGEQAPEAEYEERLMFVSKYSGWDLPRRKLGTVTGSNTSATTCSSYLRVPGCSCNCKRGKRVRRGNRRLGEKGIEAGKESVNGDDGKKRTQTLAEKRREDSGTRECNRE

SEQ ID NO: 190807 - protein, 97 aa, Oryza sativa
  Clone ID: PAT_MRT4530_87186C.1.pep
SNAHIGLCTHWRTFLPQQTIINSYGYATSMNGTALDVVSSWRKHGAPMFNDVGGRIMANLVGCWSLPAEVVCAWRPRAQHWLAAVGGGVEPLRGSSP

SEQ ID NO: 190808 - protein, 86 aa, Oryza sativa
  Clone ID: PAT_MRT4530_87188C.1.pep
TSVAASAADVAPCAQVWSPWYTTSPPYPCRQRPHVCPFPPPVASRCLASPPPSVRPAPPRPPRPPPSPPSSVHPALPPPPRHGLCP

SEQ ID NO: 190809 - protein, 137 aa, Oryza sativa
  Clone ID: PAT_MRT4530_87189C.1.pep
AASARRKFQAERRTDQIADMSRRFLFQKFSVLSGSMPNRPTSAQGGDVSAIHDALRRFSTVLPNYHGLPVSQAKCLNSIQSPHAATKLNHPTIGVVPFASRTFFSYTKPYHLPSLGETNYPDYVAADIKAFALLSKA

SEQ ID NO: 190810 - protein, 516 aa, Oryza sativa
  Clone ID: PAT_MRT4530_8718C.1.pep
MEPNIFRAIATYLRTEHLLRDTEGSTTDARVLRSAMLKGFNVPQGKYYLVDGGYANTPSFLAPYRGVRYHLKEFGRGQQRPRKYTELFNHRHAILRNHIERAISVLKKRFPILKVGTHHSIENQVKIPVAIVVFHNLIRMLNGDEGWLNHQGSNISPEQFIDVPEATMFGRGSPKFNLIQATAVQRKPSPKISRHQKKKASPKAVLDRSRASWNAGLEKALVDLLHDHNNDCYRSQNGWSTEAWNRIVKSFHEKFPYVNFTKSHPKAKKFRNKSFSLFEALGELYDAKHVLFSSPKHYLTSLSVVGHTAEGTMNFTSIAPSQVPITQPFQVPVTQPSHIPLTQPSQTSQATVTQHYMGEDENFPFDSHIHNAESDDDDLRIVEQPIASDASTRSRMGKRVASATNKHAGTSDKTEKATQRRRQDGKVVEMMGKFLEFKEKQAETEITQQERARSNVHEDEFPIPVCIAVVDSMEDMSDDEKVLAYDVFKDPQNRAIFMTAKDSTRLKWLRRKITTA

SEQ ID NO: 190811 - protein, 169 aa, Oryza sativa
  unsure (1)..(169): unsure at all Xaa locations
  Clone ID: PAT_MRT4530_87190C.1.pep
TTKPDILHXQLCKPDELPPSTQFAVVLVYVAYAWQPSQHYIYXKCGTHMSYSLILPLSLFSLSLSVSLFLSLSLSLSRSWVGGGGGRGGGGGGADGGRGGRSGTGRMDRGHDEEAAATRDGRTKAGTAGDEEAVAARDGRTEAGVGCGRVWTVPRDACWWRSWCRCKAS

SEQ ID NO: 190812 - protein, 285 aa, Oryza sativa
  Clone ID: PAT_MRT4530_87191C.1.pep
MFAPAAAARPHKQAPLARVPTRLVAALCTACFFLGVCVVNRYWAVPELPDCRTKVNSDNPGAVMNQVSQTREVIIALDRTISEIEMRLAAARTMQARSQGLSPSDSGSDQGSTRARLFFVMGIVTTFANRKRRDSIRQTWLPQGEHLQRLEKEKGVVIRFVIGRSANPSPDSEVERAIAAEDKEYNDILRLDHVERNGSLPLKIRMFLSTALSIWDADFYVKVDDDVHVNIGITRSILARHRSKPRVYIGCMKSGPVVDKNESKYYEPDHWKFGTEGNNYFRHAT

SEQ ID NO: 190813 - protein, 82 aa, Oryza sativa
  Clone ID: PAT_MRT4530_87192C.1.pep
YSLVLSLHSANRRSGRGVGASGCHVMPLGPLHCFALRPSPSRHLAGGASEEGAQAELPLMRAAPQLPPVAFNAVGQMCGVLN

SEQ ID NO: 190814 - protein, 88 aa, Oryza sativa
  Clone ID: PAT_MRT4530_87193C.1.pep
MPPTRSQKPPPTVSRHPSVEQPATTNLNDHTTTRRSSHRRTRRLHIAPAVAIAGEDPVAVGLDLPPPSLEASPPPANVCNILPVSIPA

SEQ ID NO: 190815 - protein, 59 aa, Oryza sativa
  unsure (1)..(59): unsure at all Xaa locations
  Clone ID: PAT_MRT4530_87194C.1.pep
NWDCVHKSQWVKKGTTYGVVIVDXKKTLSKWLRRSATRKTXGKCKCPPGCSWPGCNLGK

SEQ ID NO: 190816 - protein, 40 aa, Oryza sativa
  unsure (1)..(40): unsure at all Xaa locations
  Clone ID: PAT_MRT4530_87195C.1.pep
RPRSGNGYPMLDCTPNIASCWLGPXTTIRGLEDPVLTELM

SEQ ID NO: 190817 - protein, 86 aa, Oryza sativa
  unsure (1)..(86): unsure at all Xaa locations
  Clone ID: PAT_MRT4530_87196C.1.pep
AGPENATRGRKXKEKXKKVILITEKAAIVDLLRATRPAVVMNGVTTIPGGGDQLDPDYGGIGRSYTLNLKLRRNLFRPSLQPSTDR

SEQ ID NO: 190818 - protein, 137 aa, Oryza sativa
  unsure (1)..(137): unsure at all Xaa locations
  Clone ID: PAT_MRT4530_87197C.1.pep
MVPEVGEAARRSRHHGPRRAPSPPPQRPPPAWRLAAVAAARHSRRNWTDDGGATLLSSRDGGSAQPAQAAAGLGLRARSPSASAPATPXPSAAIPAAGCPSASAPRPPXASAPARRPPVGVGSSVLARPPPASRSMC

SEQ ID NO: 190819 - protein, 80 aa, Oryza sativa
  Clone ID: PAT_MRT4530_87198C.1.pep
HANIIIDVFSRSIVLNLQQIHELYSFVSQALLKGHTSYKLQNIQGLSYSILRCHLSCFDFPYSGILMTNFLGVSYFLFLR

SEQ ID NO: 190820 - protein, 466 aa, Oryza sativa
  Clone ID: PAT_MRT4530_87199C.1.pep
MGSSGQGNLISFFIINVWSSLYGQPGSGKTHLVKDVYASEKKYFSTSAWISIAQCPNADTDALKRMMMEELGRQVGTSTESTSLRVMTENQDSKFLFVFDDVWVPDMVHKVHRAASDNKMGSRIIIIARMPEVAFVRKGFIENQGSLQVEEIGERYIKELIHWGFLQVVDVDEQEMDTNVRCLFISENPEDIGALVDFPYLRTLMASRNAAANLKSLPASLTAKLKYLTVLKLQESPLEELPRGIGYQLFNLRYLGLRKSQIRCLPSSMANLYNLQTLDLRGSRINELPSWIGKLIRLRHLSADTLDGQGPDIYRAVKAPKTVNYLKELRTLETVQASDTFEKHVEKLTHASRVDEESLDFETLNPTSLEKLVIRGGGISKLVFQAINSFANLRTLLLHEIDGVDELEIPNDIRSIVDCLLEEAGGEEETRRSELLGAGCKRHRASRWSSLGAGRWLGVTVACTGG

SEQ ID NO: 190821 - protein, 953 aa, Oryza sativa
  Clone ID: PAT_MRT4530_8719C.1.pep
MPRYKPEYLFGTEGFVQELRTMSFLIGFGIAPLYAQIPHDRDEEKCRVKVTLNSNREDIPSVMFEAGGGSYIHACQEVARIAIGELRESYNDRLADTEYRYHPRQPQGSDHGSYLEPAGIENDATTRHLVEMLWAMDETRAEIVIAAQDREDQNRGKICKLEDKLDRLEKELAALKGEAPPQKARVRLTARKRALFVPRYQLAPKVRVVEKEATLAPADPPVVNMVLTRSNGNGPNNNNNNNNAENPTLAQVLAQQTQLMNLMMQQLQNQQNQGNNHAPPQNKLAEFLRVRPPVFSSTTNPVEASDWLHAIEKKLDLLQCRDQEKVSFASHQLHGPASEWWDHSCLNRTTAEPISWLEFTAALRKTHIPSGVVSLKKKEFRSLTQGSRTVTEYLHEFNHLARYAPEDVRTDEERQEKFLEGLNDELSYPLMTGDYHDFQKLVDKAIRQEDNYNRMEQKKHRIAHFKAQQGNSQRPRIASGPLSMPQGDPGHYADKCPKPCRAKVVPAQNNSSAPAAKARVNHVAAAEAQGAPDVILGTFPVNSVPATVLFDSGATHSFLSMSFAENHGMEVEELRRPLMVSTPSNQALSSQRSPSVRIEIRGVPFLANLILLESKDLDVILGMDWLARYKGVIDCANRKVTLTSNDGQVVTVHALPSEPRRSSLNQITLEEIPIDREYPDVFPDDLPGMPPKRDIEFRIDLVPGTTPIHKRPYRMAANELAEVKRQVDDLLQKGYIRPSSSPWGAPVIFVEKKDHTQRMCVDYRALNDVTIKNKYPLPSIDDLFDQLKEEHEEHLRLALEKLREHQLYAKFSKCEFWLSEVKFLGHVISAGGVAVDPSNMESVTNSKQPKTVTEIRSFLGLAGYYRRFIENFSKIAKPMTRLLQKDVKYKRLEECEQSFQELKSHLISAPILILPDPKKGFQVYYDASKLGLGCVLMQDGKVVAYASRQLRPH

SEQ ID NO: 190822 - protein, 72 aa, Oryza sativa
  unsure (1)..(72): unsure at all Xaa locations
  Clone ID: PAT_MRT4530_871C.1.pep
GNFSQPKAPQGPXXVXAQPPKLXKGFCLXPESXPPPLXPKTQXPKNPPFSGFGPPRGKKFFPPXXGPXKGPP

SEQ ID NO: 190823 - protein, 60 aa, Oryza sativa
  unsure (1)..(60): unsure at all Xaa locations
  Clone ID: PAT_MRT4530_87200C.1.pep
FSELKVKRFETGPLAMFSMSGFFVQAVVPGKGPLENLAAPLADPGNNKAWGXAPNFVPGN

SEQ ID NO: 190824 - protein, 171 aa, Oryza sativa
  unsure (1)..(171): unsure at all Xaa locations
  Clone ID: PAT_MRT4530_87201C.1.pep
EEGEPTAAGSPTXASLRSVATAGFTKSAASLDPRGWNRHRRDRVGXIRGAVRVVSGWPGREGRRRRXLKAVVAVEHSEAEVGLAAALGSPSSFHGSXGERDRRLARTATTVGANDMSTTLHVQSXRTSSTTVALGSPSSVAASQHAVAAADMVRLREREEQRSAPPPPQPR

SEQ ID NO: 190825 - protein, 149 aa, Oryza sativa
  Clone ID: PAT_MRT4530_87202C.1.pep
SRGRRSPHRRGGSSRHLRGPARRRPRRRPPRWARARRGSPRRGTPRRARARRGARRGHAWTWRGRCSRRRCRAAPRGRARRPGARRRRGNPRSRKPPPRGGHPRWRSAWPPRWLSPPRGGRPRRACPLHRNPPPLHCSPCRRRRSPAPP

SEQ ID NO: 190826 - protein, 145 aa, Oryza sativa
  Clone ID: PAT_MRT4530_87203C.1.pep
MRGLAGEVFVVVVGGGRPLVYISSSPSEEARRRKEEVRLAPLIWTTLKKRFEKSKYTILPQENQQRARLRLADYNSTLHLICTYLSLCGKVVTKLDKIEKMLSTFHPNALGKSIGLDVNASSYKVCKPIQKKRGKQGGRKAAEKA

SEQ ID NO: 190827 - protein, 190 aa, Oryza sativa
  Clone ID: PAT_MRT4530_87204C.1.pep
MPASATGTRASLRLLASRPRARHASPASIPVAPPSASPVSSAISRPSARAPCRPITVDVVPDRATARLGRAALKGRRDRIRPVIAIPAAVSHRCLAQLAPPVAFAIPTIIAVPAASHHPTKSSHSDADLAVTTATTLGGSLGRPSARSEKPRHRRPCGRAALPTATQVAARRRRKVGERGQPGRRLPSRP

SEQ ID NO: 190828 - protein, 95 aa, Oryza sativa
  Clone ID: PAT_MRT4530_87205C.1.pep
PRLGLLALPSFLQLLLAETRIGAMSSERNGLAKVQPPLYGPSAPKEWRVWRSQQAWLGQIGLANHGIATPIPCKMLEIFCGHHRLPRCVESHLFM

SEQ ID NO: 190829 - protein, 213 aa, Oryza sativa
  Clone ID: PAT_MRT4530_87206C.1.pep
MQSEDGDLTRICNNAKQSEDGDWPFTELGNAGGEPRAAACVPSLSLPARISCQILTPEEVRPRAGVPPDMDEFVKRAWDRAPLPRRRSRRFIAGASPRWREGKPELVINFLCGPSPCFEWLIAFRSRLRRRPPPASPWEPRPTMLLFSAGRERLLDHCESCPQPNHRRWPLQPERGGGGEGREVSGEKQARYVYARLVPPYLLLEGELRRQGS

SEQ ID NO: 190830 - protein, 40 aa, Oryza sativa
  unsure (1)..(40): unsure at all Xaa locations
  Clone ID: PAT_MRT4530_87207C.1.pep
MHTAASSVAGLSAASPAAVKGLTLLIXAPRRVALRVHAAD

SEQ ID NO: 190831 - protein, 362 aa, Oryza sativa
  Clone ID: PAT_MRT4530_87208C.1.pep
MGMDYYKILGVDKAASDDDLKKAYRKLAMKWHPDKNPNNKKEAENKFKQISEAYEVLSDPQKRAVYDQYGEEGLKGQVPPPGAGGAGPGGATFFSTGGDGPNVFRFNPRNAEDIFAEFFGSSSPFGGMGGGMGGGMGGGPGMRTGGTRFSSSIFGDDIFGSAFGGGADGHHGMHGGGAGRALKAPAIERKLPCSLEELYKGTTKKMKISREIADASGKTIPVEEILTIDVKPGWKKGTKITFPEKGNEQPNVIPADLVFIIDEKPHPVFTREGNDLVITEKISLVEALTGYTARIITLDARSLSVPINSVIHPDYVEVVPGEGMPNPKGPNKKGDLKIKFNIRFPSRLTSDQKAGFKRLLGS

SEQ ID NO: 190832 - protein, 349 aa, Oryza sativa
  Clone ID: PAT_MRT4530_87209C.1.pep
MGMDYYKILGVDKGAGDDDLKKAYRKLAMRWHPDKNPTNNKKEAEAKFKQISEAYEVLSDPQKRTIYDQVGEEGLKGQPPPGAGGPGASPFYPGGAHSNSFHFNPRSADDIFAEFFGFRGPFSSMGGMPSVSGGMRGDPRFPGFGNEYFSSRFGGEGSTSMHQPSHQLAKPPPIENRLPVSLADLYKGVTKKMKISREIIDFNGRVSQQEEILQIEVKPGWKRGTKITFEEKGNQAPNMKPADIVFIIEEKPHDIFTREGNDLVITEKISLVEALTGYTARIITLDARSLSVPINSVIHPDYVEVVPGEGMPNPKGPNKKGDLKIKFNIRFPSRLTSDQKAGFKRLLGS

SEQ ID NO: 190833 - protein, 72 aa, Oryza sativa
  unsure (1)..(72): unsure at all Xaa locations
  Clone ID: PAT_MRT4530_8720C.1.pep
AVSTHRRXREEIFRRPHTXKLILLLVDGEKIDELPAAGKDDGGSQXSPAXVAAAPPWLWWWLPSLPPPGVSL

SEQ ID NO: 190834 - protein, 77 aa, Oryza sativa
  Clone ID: PAT_MRT4530_87210C.1.pep
RVPLGGKPPKPAGFKCPVTGGVPHFPFQVGQFLERPWCGGLLVFTQPGKRGFFSKRFNLGNPRFFPIPKFLNRGPLI

SEQ ID NO: 190835 - protein, 149 aa, Oryza sativa
  unsure (1)..(149): unsure at all Xaa locations
  Clone ID: PAT_MRT4530_87211C.1.pep
MLSSHAADPDAEGAYHTWTLTNVVIXFGESTIKANADYEKIAGDTRRDIRYVSGDVGLDADHCTVLVNIEEQTPDLGQGVHGHFTKRPEEIAAGDQGHLLAYTTDDTPELEPLQHVLGTKLDARLTEVRRNGICAWLTPDYKTQGTGEY

SEQ ID NO: 190836 - protein, 447 aa, Oryza sativa
  Clone ID: PAT_MRT4530_87212C.1.pep
MTLGPLIHPVTVLEQCHVSPSPAPAAGQPRSLPLTFFDLVFLDFPPVQRLFFYDNADLRDAHDFLLRELPLFRESLAAALHHFYPLVGKLPCGIRERMSPPEVAYSDGYSVCLTVAVSSDDFQDLAGDHPRDTARLRPLLPPLPKHGSSQDVLAVQVTVFPRAGICVGTTLHHAVADGSRYVHYIKTWARIHPLGDERRKAVVVDHTPPLFDRGVVQDGDGLRRPFIRDHRDLVESGDKRLDDWDLSRRPDTVLATFRFTDELLRKLGGHVEQETSARCSPYALASGAWHGIVRARGVAADDVARFGFVTGCKPRAKRRHLTAASASAAIWRVIAGLAEQGRALRDAHGWVPGAREYAPARAVTVAGSPKLGVYATADLGATWGGRPRKVQIASVERTGALALAKSGRRGDRDGGGIEVGVALPRAEMQAFRAFHVELVRLLDATTH

SEQ ID NO: 190837 - protein, 502 aa, Oryza sativa
  Clone ID: PAT_MRT4530_87213C.1.pep
MRPRARHMTLGPLIHPVTVLEQCHVSPSPAPAAGQPRSLPLTFFDLVFLDFPPVQRLFFYDNADLRDAHDFLLRELPLFRESLAAALHHFYPLVGKLPCGIRERMSPPEVAYSDGYSVCLTVAVSSDDFQDLAGDHPRDTARLRPLLPPLPKHGSSQDVLAVQVTVFPRAGICVGTTLHHAVADGSSYVHFLKTWAAIHRLGDERRKAVVVDHTPPLFDRGVVQDGDGLREAFIRDHRDLVESGDKRLDDWDLSRRPDTVLATFRFTDELLRKLGRHVEAETSARCSPYALACGAAWAGIVRARGVGGGDVARFGFVTGCKPRVSPPIPSSYFGNCLGLCFVEAKRRHLTAASASAAIWRVIAGLAEQGRALRDAHGWVRGAREYAAARAVTVAGSPKLGVYAAADLGATWGGRPRKVEIASVERTGALALAESGRRGDRDGGGIEVGVALPRAEMEAFRAFHVELAPAGLLPPVPRGMILSGAPEWLAPYSNMAAPATLAP

SEQ ID NO: 190838 - protein, 58 aa, Oryza sativa
  Clone ID: PAT_MRT4530_87214C.1.pep
QASFGRVLLDLTAYSSETQDTFFHNHHVHNPYKWQSPQHERLSLIPTQILISHGIHTS

SEQ ID NO: 190839 - protein, 591 aa, Oryza sativa
  Clone ID: PAT_MRT4530_87215C.1.pep
MDAAGMIIGGGGRRRLTRVRTLGRGASGAVVSLFAAGDDELLAVKSAAGPAGAAQLRREAGILASLCSPHVLPCFGFGAVAGGEYGLLLEFAPGGSLADEVARNGGRLEEDDVRAYAADVASGLAYLHGVGMVHGDVKGRNVVIGANGRAKLADFGCARRADSAGPIGGTPAFMAPEVARGEEQGPAADVWALGCTVIEMATGRAPWSGVDDVVAAVRLIGFTDAVPEPPEWLSPEANDFLDKCLRRRAGERWTAAQLLEHPFLALAGCRAVAAEETKPKWVSPKSTLDAAFWESDADDEDDDMPESWAERIMALAVPCSAVPDWESDDGWIDVMSSQSELPIAAAETPAEQTRSEVSESPVASPALETTSYASAWDERSEAVMDADVDDDDDELVHNVRTVDTFVDEQLRQDIYLDFTTSDPIVLHVDVSDERKVKLLPPIPDCLCSSPSLSFFDFIHSNLITLQTQTTNLKLQTSKNVKSRAAASALILQNDGTKAGEMKMMQIRGDTWPKSLDYLTPDRVPLKKNKGITASTLLLHLRVVVDSVIRLPAQHLIKTVKSIAMCHCHLYLDAMNNLVVVVLLGMNFLHVS

SEQ ID NO: 190840 - protein, 89 aa, Oryza sativa
  unsure (1)..(89): unsure at all Xaa locations
  Clone ID: PAT_MRT4530_87216C.1.pep
AKGYTYRIGSVLQANPTLLVLIGSIGDKSTTPRNRNQQEKNFVRNXPFLIGIRAGKNGWDNKQPSSLYFGYPYNHQRSLKWLIPLNRRR

SEQ ID NO: 190841 - protein, 112 aa, Oryza sativa
  unsure (1)..(112): unsure at all Xaa locations
  Clone ID: PAT_MRT4530_87217C.1.pep
PGEHRARRPRSPRPRPAVAASQLGGXRRRRDRRSTRHARVRLSGRGPVVPPRQGRRQAALPGPDDALVQAGGLPARARHMEEALGSLVLPCLQPQRGARGRHRQPHEERGRR

SEQ ID NO: 190842 - protein, 192 aa, Oryza sativa
  Clone ID: PAT_MRT4530_87218C.1.pep
LALYRTYGPSAHMTKRAGNSTLLDSCAWSRPKPNQIPILQKFLPLSFYQGLFCKICYHQFVGPGATSTIGCSINGGREPAPLAGGLLASPPPSPACAPPPLLVPKANAASISSPTSSTVQLGRRRRRLLPALPPSRGLVPILASLSGLRGRLLLNPTMERHEEVGWSLDTVPGYLFAAVNCQLVLVDLCTKT

SEQ ID NO: 190843 - protein, 119 aa, Oryza sativa
  Clone ID: PAT_MRT4530_87219C.1.pep
MTLGVFFCRMCSTAVLSLVSQGKPKEKAILPLSLSPNSLYYVRSCRTVHNKISPLFAVELELLLCSNHYFISTCGKGYMFPSPLSYAMCSFFVFGSGATTKDMMHQWGPCAHEEEVWKT

SEQ ID NO: 190844 - protein, 218 aa, Oryza sativa
  unsure (1)..(218): unsure at all Xaa locations
  Clone ID: PAT_MRT4530_8721C.1.pep
MEPESAAPVSFPSGRPLPLPTLYXPPRTSSIRFRLSPPFLLAXFELAPSLSLSAVAAELRSAAVVAPDHLPPRRRLLRVRRILANLVHLSVSVADPPNAVDPVDPSRAXRXLXSGPLLRRRHRPGVSRGPSPPFPLPTPLSAAAPPRRWSPAATIGSRARRLPPTVPAWPPSGAPSGYRVGPGRQPPAPSDVAASEDPLFVEVEADVWESEQGKSHHP

SEQ ID NO: 190845 - protein, 151 aa, Oryza sativa
  Clone ID: PAT_MRT4530_87220C.1.pep
MAAERRQRSGGGLRAERKTGERGDEARQQSTGISALMESVEEQGTTRGEEALRAPPPPAARSARSPSPLRCLHSVTRSARGLPLLRCLRTAAALARCPFHPQPATALLPCWPTAAGSSTVSDSVGRELEEEGYPVVDYESDLQTAMSTTVR

SEQ ID NO: 190846 - protein, 212 aa, Oryza sativa
  Clone ID: PAT_MRT4530_87221C.1.pep
MAEEEDLADMPRVVGVLAALLERVTERNDAAAAELELAVAGAPAASAFRATTKPDITVRAYMARIARFAGCSPACYVVAYIYLDRLLRRRRRACAFSVDSYSVHRLLITAVLAAVKFMDDICYNNAYFAKVGGVSLPEMNYLEVDFLFGVGFDLNVSPETFGHYCAVLQSEMLCLELEPPPSPSPAPAARLHCFLSEDDTSSSGSTQHQLAA

SEQ ID NO: 190847 - protein, 337 aa, Oryza sativa
  Clone ID: PAT_MRT4530_87222C.1.pep
MAASSAAAGAGGEPQKQLLSIIRDFAAEKSHGGFSRDPLAASELLAERRVTDLKRRLDDLRAASDAAVAELEAAKRAREGAEQELRGGQVQVAIAAASIQALEATISHLQEEISKAGSDLDALKGKGDIERDEFISQMDQLNTKIRQFQQTVSVEFKRQKCSELPSGEGQHVRDMSKIEESEGILKDLIDKVNNADAELHVLEEEYKKDLLHHDEVRRELADTQAKRALMEAVMGETKQLQELGEYPFLGFVQKFSNSLHLVLFPVQIHQAFCKRRFFNGKQAGSRNGESARFACGGVAEAVRVPRLWSQQHGWVGGGGGGQLKMALAGWLLYIDKA

SEQ ID NO: 190848 - protein, 265 aa, Oryza sativa
  Clone ID: PAT_MRT4530_87223C.1.pep
MWVPREKKQSISALEKEIRRAAIARSCSAQCPHRCFARRPHRCSAPLHRRSAGSGRPEAAPSSLDPSLRPPDIHARALGGGEQQGTLEVGLGGGKPLERERSSRAARRSRTRASVSGRSDAAGSGASATSRHRVAAPRSRRCSASSRRRPHVVSRRRRSFPAGASLLHSPLAHLGLLSLRPTVGKGGERRGMKSGGTHYNRWKVTCTVEGVACTVPGLGGGFGFSIVASGDEQHCDVASGRIIFMLEADMKYPVPSFHLFGVFGE

SEQ ID NO: 190849 - protein, 60 aa, Oryza sativa
  Clone ID: PAT_MRT4530_87224C.1.pep
MQFHQGRHHRHPNVGVVLFSVFFWEKPTQHTIIGVGEGGQRPATTRWRIGIEMTNEYGLT

SEQ ID NO: 190850 - protein, 1347 aa, Oryza sativa
  unsure (1)..(1347): unsure at all Xaa locations
  Clone ID: PAT_MRT4530_87225C.1.pep
MLANQNQLIAALLHQMQNPXAPAAQAPINALPQSKLSEFFRVXPPTFSSTTNPVEANYWLHVVNKKLDLIQCNDEEKVAFAAHQLHGPASEWWDHFQATQPAGQIITWAXFSTAFRRAHVPAGVVALKKKEFRELKQDGRTVTEFLHEFNRLARYAPKDVRTDEEKQEKFLEGLNDELSVQLISGEYEDFQKLVDKAIRLEDKHRKMESKKRKLANARMFQGPSQKPRYVFPPQVGSSSAAQRASCPQMNNKLQNSGWNNGQRSTPAQGGSTRKDSSGKILVCYNCYEPGHFADKCPKPKRPQAPAPARNANQSNNGNRNNNNLVRGRVNHVSAEEAQAAPEVILGATHSFISRDFVAKHQIRIEDLSNPMIISTPGSQLPTKLFSPSVTIEIQGVTFLANLILLSSKNPDVILGMNWLTKHSGIIDCAIRSISLIGGTGQRVTFHAKLALPCKQVLNQVSMEEIPIVKEYPDVFPEELPGMPPKRDIEFRIDLVPGTAPISKRPYRMAANELAEVKKQLEELKGKGHIRPSTSPXGDPVIFVEKKDKTKRMCVDYRALNKVTIKNKYPLPRIDDLFDQLKGATVFSKIDLRSGYHQLRIREEDIPKTAFTTRYGLYECTVMSFGLTNAPAFFMNLMNKVFMEYLDKFVVVFIDDILIYSKIAEEHEQHLHLALEKLREHQLYAKFSKCEFWLLEVKFLGHVISAQGVAVDPTNVESVTNWNQPKSVTQVRSFLGLAGYYRRFIENFSRIARPMTQLLKKEEKFIWTSQCEDAFQFLKKKLDFQVYCDASKQGLGCVLMQEGQVVAYASRQLRPLESNYPTHDLELAAVVHALKIWRHYLIGNRCEIYTDQKSLKYIFTQPDLNLRQRRWLELIKDYDVGIRYHPGKANVVADALSRKSYCNAIIHEQCPPGLCRELEALNLGIVNYGYVATLEAKPLLLDHIREAQKGDSDIQEIKKNMRRGKAIGFSEHEHGTIWYGERVCVPNDPEIKKLILQEAHXSQYSIHPGSTKMYQDLKMKYWWVSMKHEIAEFVALCDVCXRVKAEHQRPVGLLQPLKILEWKWEEIGMDFITGLPRTXNLDMTLFGLLSTAXPKLHISSXSKPLIPAEEMGTRLNFSTAYHPQTDGQIERVNQILEDMLRACAEFSYNNSYQASLQMAPFEALYGRKCRTPXLLWDQTGERQVFGTDIIKEVEEKVKVIQANLKVAQSRQKSYADTRRRELAFEEGDFVYLRVTPLRGVRRFHTKGKLAPRFVGPYKVLGRRGEVAYQLELPASLGGVHDVFHVSQLKKCLRVPTEQADTEQIEIQEDLTYVEKPIRILETSERHTRSRVIRFCKVQWSNHSEEEAT

SEQ ID NO: 190851 - protein, 709 aa, Oryza sativa
  Clone ID: PAT_MRT4530_87226C.1.pep
MAGGGGGGGGGVGKVKAGSRPPWVGLAAAVWVQVAAGSAYVFPLYSHAIKEALGYNQKALTMLGVANDVGENVGLVPGVLANRLPPWLILLIGSACALLGFGTLWLAVTKTLVMPYWVVAAGSAYVFPLYSHAIKEALGYNQKALTMLGVANDVGENVGLVPGVLANRLPPWLILLIGSACALLGFGTLWLAVTKTLVMPYWVPSDLQRLGMSFIGVCDHWKVIAEVGMNTIFVGTFSITKYIDNLCIALCIGTNSSAWLGTAALVTNMRNFPLSRGTVAGLIKGYVAVSAAVYTETFNGMLQNSPTNLLLLLALGIPTACVLVMYFVRPCTPSLDEDNAAEHSHFMFTQISSVVLGVYLMVATILGDTLKLSDAITYLLFGIMILLLLSPLAIPIKMTIYPNKPKREKTSTLALSYSTDSLSGPDQENSEPLLGGTSTFVTGANDSDEATDVDLLLAEGEGAVNLKKKRGPRRGDDFTFREALVKADFWLLFIVYFCGVGTGVTVLNNLAQVGMAVGADDTTILLCLFGFCNFVGRILGGSVSEYFVRSRMLPRPFWMMCTQIIMVITFLLFATGLHSLIYVSTTFLGICYGVQFAVMIPTVSELFGLKDFGLMYNFMLLVNPLGAFFFSALLAGYIYDKEAAKQQPGVLEPSTCLGPDCFRLTFYVCAIVCCCGTLVSVVFIARIKPVYQMLYASGSFRHPRSQQLH

SEQ ID NO: 190852 - protein, 1367 aa, Oryza sativa
  unsure (1)..(1367): unsure at all Xaa locations
  Clone ID: PAT_MRT4530_87227C.1.pep
DHPNLAQVLANQNQFIAALLHQMQNPQAPAAQAHVHAPPQSKLSEFLRVRPPSFSSTTNPVEANDWLHAVNKKLDLIQCTDEEKVAFAAHQLHGPASEWWDHFQATQPVGQVITWARFSTAFRRAHVPVGVVAQKKKEFRELKQDGRTVTEFLHDFNMLARYAPEDVRTNEEXQEKFLEGLNDELLVQLISGDCEDFQMLVDKAIRQEDKHRKIESKKRKLANARMFQGPSQKPRYAFPPQVGSSSVAQRAPRPQMNNKLQNSGWNNNQRSAPAQVGSTRRDSSGKILVCYNSYEPGHFADKCPKPKRPQAPASACNANXNNNGNCNNNNLVRGRVNHVSAEEAQAAPEVILGATHSFISRDFVAKHQIRVEDLSKPMIVSTPGSQLPAKLFSPLVTIEIQGVTFLANLILLSSKNLDVILGMNWLTKHSGIIDCASXSTSMTRGTGQRVTFHAKPVFPCKQVLNHVSMDEIPIVKEYLDVFPEELPGMPPKRDIEFRXDLVPETAPISKRPYHMAAKELAEVKKQLEELKEKGHIRPSTSPWGAPVIFVEKKDKTKRMCVDYRALNEVTIKNKYPLPRIDDLFDQLKGATVFSKIDLRSGYHQLRIREEDIPKTAFTTRYGLYECKVMSFGLTNAPVFFMNLMNKVFMEYLDRFVMVFIDDILIYSKTAEEHEQHLRLALEKLREHQLYXKFNKCEFWLSEVKFLGHVISAQGVAVDPTNVELVTNWNQPKSVTQVRSFLGLAGYYRRFIENFSRITRPMTQLLKKEVKFIXTSQCEEAFQLLKKKLDFQVYCDASKQGLGCVLMQDGQVVAYASRQLHPHESNYPTHDLELAAVVHALKIWRHYLIGNRCEIYTGHKSLKYIFTQPDLNLRQRRWLELIKDYDVGIHYHPGKVNVVVDALSRKSYCNAIIYEQCPPGLCXELEALNLGIVSYGXIVTLGAKPLLLYQIREAQKGDYGIQEIKKNMMRGKAIGFSEDEHGTIWYGGRVCVPNDPEIKKLILQEAHESQYSIHPGSTKMYQDLKMKYXWVSMKREVAEFVTLCDLCQRVKAQHQRPTGLLQPLKIPKWKWEEIGMDFITGLPRTXNLDMTLFGLLSTAXPKLHISXXSKPLILVEEMGTRLNFSTAYHPQTDGQTERVNQILEDMLRACALDFGKSWDKSLPYAEFSYNNSYQASLQMAPFEALYGRKCRTPLLWDQTGERQVFGTDILKEAEEKVKVIQANLKVAQSRQKSYADTRRRELAFEEGDFVYLRVTPLHGVRRFHTKGKLAPCFVGPYKVLGRRGKVAYQLELLASLGGVHEVFHVSQLKKCLRVPIEQADPEQIEIQEDLTYVEKPIRILETSERHTRSRVIRFCKVQWSNYLEEEAT

SEQ ID NO: 190853 - protein, 59 aa, Oryza sativa
  unsure (1)..(59): unsure at all Xaa locations
  Clone ID: PAT_MRT4530_87228C.1.pep
LPLTNTNNNLISIIMVSFGFDKYVLVXFYLLSVLKSCXQGHPSLLGDDIFXRWNSETVQ

SEQ ID NO: 190854 - protein, 127 aa, Oryza sativa
  Clone ID: PAT_MRT4530_87229C.1.pep
VLASPQCCANPPTLNPAGGEGKVVESFGGIKAYVAGAAESKAAVVLISDVFGFEAPNLRYRSLCYLIVLVFRFHLYRICHCSDIFWGKWIIDSHLYRICHCSYIVWEMNYSLLRLLETSKVFRALWG

SEQ ID NO: 190855 - protein, 66 aa, Oryza sativa
  unsure (1)..(66): unsure at all Xaa locations
  Clone ID: PAT_MRT4530_8722C.1.pep
IMYNATFTFGRPLAGMMLSMLNHVLVHIDFDLHLSATVTKYLCDSKVLAWSAFLQTITXRLQXXGR

SEQ ID NO: 190856 - protein, 512 aa, Oryza sativa
  Clone ID: PAT_MRT4530_87230C.1.pep
MATAAACISFASPSPARVVIRRQTRASASASATDRQEVVSPKRRLPLRKVPGDYGPPVVGAIRDRYEYFYGPGGRDGFFAARVRAHRSTVVRLNMPPGPFVARDPRVVALLDAASFPVLFDTSLVDKTDLFTGTFMPSTDLTGGYRVLSYLDPSEPNHAPLKTLLFYLLSHRRQQVIPKFREVYGDLFGLMENDLARVGKADFGVHNDAAAFGFLCQGLLGRDPAKSALGRDGPKLITKWVLFQLSPLLSLGLPTLVEDTLLHSLRLPPALVKKDYDRLADFFRDAAKAVVDEGERLGIAREEAVHNILFALCFNSFGGMKILFPTLVKWLGRAGARVHGRLATEVRGAVRDNGGEVTMKALAEMPLVKSAVYEALRIEPPVAMQYGRAKRDMVVESHDYGYEVREGEMLFGYQPMATKDPRVFARPEEYVPDRFLGEDGARLLRHVVWSNGPETAAPTLHDKQCAGKDFVVLVARLLLVELFLRYDSFDVEVGTSTLGSSVTVTSLKKATF

SEQ ID NO: 190857 - protein, 358 aa, Oryza sativa
  Clone ID: PAT_MRT4530_87231C.1.pep
MSAYCGKYKDELIKNAAYIGTPGKGILAADESTGTIGKRFASINVENVEENRRSLRELLFTTPGALQHLSGVILFEETLYQKTKDGKPFVDVLKEGGVLPGIKVDKGTVEVAGTNKETTTQGHDDLGKRCAKYYEAGARFAKWRAVLKIGPNEPSQLSIDLNAQGLARYAIICQENGLVPIVEPEILVDGSHDIERCAYVTEKVLAACYKALNEHHVLLEGSLLKPNMVTPGSESKKVSPQLIAEYTVRALQRTVPAAVPAIVFLSGGQSEEEATVNLNAMNKLSTKKPWALSFSFGRALQQSTLKAWGGKTENVVKAQKAFITRCKANSEATLGTYQGDAVLGEGASESLHVKDYKY

SEQ ID NO: 190858 - protein, 206 aa, Oryza sativa
  unsure (1)..(206): unsure at all Xaa locations
  Clone ID: PAT_MRT4530_87232C.1.pep
DGIRGLSKAEREXYAPPVGLGFNSGFLFLLXSFIHKISXAHSSPFGPTSFISXAIVVDDXYTISQTIPKEPNVGDISRMLIVVMGASHVINGSXGISLXTKVSKKXKKDQFVVLLDPKKQGVQEGNVKSVSHFLWXSVSKSYSRNHLDRAEMAXVIEAAGRTLETLPQDLQKGIDLGVVSPXCYRCFFYLEKCPVRACLINRFHIP

SEQ ID NO: 190859 - protein, 68 aa, Oryza sativa
  Clone ID: PAT_MRT4530_87233C.1.pep
GGLEVGQWPRRGIEVLVVMPHPEEEVDGGSMFLPWKIAVGIVRTLWEVVVDPTAEVTMDEARGAGACE

SEQ ID NO: 190860 - protein, 49 aa, Oryza sativa
  Clone ID: PAT_MRT4530_87234C.1.pep
ETARSRGRRARGPSGHASPALRAQRDCPREVGGPRLLAGGAKEVRDGWA

SEQ ID NO: 190861 - protein, 105 aa, Oryza sativa
  Clone ID: PAT_MRT4530_87235C.1.pep
LTDAVPPWLDDLWLLGDLDLSSNVLTGGIPVELSDCSGLLKLSISGFGIRSILPEIAKLASLNILNLQKNGFTGVIPSELQRCNRLYELRLLENSLEGPIPPELG

SEQ ID NO: 190862 - protein, 112 aa, Oryza sativa
  Clone ID: PAT_MRT4530_87236C.1.pep
NICLHFSFLVASKHVYHLKFAYLIRVVMATQKHFLESLRAAGEPKRGGGCAGDREAGAASPWRLDETAMWPRNVWVPKVRVRDRESQKPSRVIRLQRRRPGDGVPDCLCAVA

SEQ ID NO: 190863 - protein, 103 aa, Oryza sativa
  Clone ID: PAT_MRT4530_87237C.1.pep
MGLPSRAWRPTQRVFAPAQPGPKIEFIFRVYDTDCNGKVAFDDILSILRDLTGSFMTEQQRQKVLIHVLEEAGYTKDSNFTLPDFMKILDNSDVKMEVEVPID

SEQ ID NO: 190864 - protein, 359 aa, Oryza sativa
  Clone ID: PAT_MRT4530_87238C.1.pep
MLRPVDNVHTEKRAQKLDCTDETYISLSVWIFPISFERRTRAAHFALRGRKLIVQVMNLLKEKERKPEPLAGAKTIIQTTIAEGSLNKYLGKNKPPLPLKKEGEDLQTVRHKSTVHKVQDFELLMVVNVRKENNKIELTLETNPEQTNRTILEESKKRTCNQTQTDRPLQSEQRFAAAPRSGSTSRRGARPEIALTNELGKGRRERAPHLHPQRQPPRRGGTYTTTAAATFQPVQLSHSSPNPIRTPLPFLLDRGSYSDEGEGEVEAKLWVRTSEDRVFTRIGPRARVKEGSEEESRVGKESAAVQPSATAFASCGRTESVFDTIQVKNKRADCFSNNLWNDFTKNTTYDFIPNNLGLS

SEQ ID NO: 190865 - protein, 83 aa, Oryza sativa
  Clone ID: PAT_MRT4530_87239C.1.pep
KGQLWSTQEKKLNIPIETSDVYTSIDTDIVVVHHIERSLRILGIDRSILWYMWTRSASNRPDKGSVQFFLKKCVILLTSVREA

SEQ ID NO: 190866 - protein, 291 aa, Oryza sativa
  unsure (1)..(291): unsure at all Xaa locations
  Clone ID: PAT_MRT4530_8723C.1.pep
MTSAMTSPTAAAARRSGRLGRCTLAGERRHXDANGGHQHVEDDAANTPVTKTAAEEQRTTTATRRKRRXPSGXRRRRSSGDLRRRRRGGRGRRRDGEHDGGLPERRRRLKRRRRTAGAAAATAKLGHMALGLFRRREAKTRAATGRGDTGEAFKGARRRRRRPTAAATAKESSGLERXKADPIRTRIHRFPNRFSRSFQRRKGRGDPEDHFPSFDSAGEGKERPNLERNGGGGTLGFGRATAARGRRXLTGGPHLSAGGRARGGGLGXDWAEEREKRGFGPTFGPKPKEDF

SEQ ID NO: 190867 - protein, 237 aa, Oryza sativa
  Clone ID: PAT_MRT4530_87240C.1.pep
TAAGCRCPSTADPSAAMEYVGQGGEALEAEHLVVVHHHGVDKHAELVLAHQRVCAAAAVDDVIGVRAAASYPRVCGEKRGLLIGISYVATRHQRQPRHLQHRLRRDDIKTNKTIVTAALAPGGGCSNHTWSLAVRTAVMFEPVLSAAWCVADALLLSRTRPAGCPTQGRERERPEAHARPVAGSGEERRLARSVGPPHPPRPATSSPPAGQPAQEERSERERGGRERGKREGDDVAS

SEQ ID NO: 190868 - protein, 118 aa, Oryza sativa
  Clone ID: PAT_MRT4530_87241C.1.pep
MDMAEKMVECPASGKTKARSCRRMRQQAEMEFGRARSIRVHAIRMRRSELTTSMIARTAMDAETCDDSVVESTIMGEGLAASADHLINSDDVRYVIDSLANDTIVPYSLEQTDDKEDS

SEQ ID NO: 190869 - protein, 94 aa, Oryza sativa
  unsure (1)..(94): unsure at all Xaa locations
  Clone ID: PAT_MRT4530_87242C.1.pep
TRRRRLACPPQTGSADPAAHPVHHPDGLRLPTHRGPGDSVAWANPPRLPASPNPAPPLPLPPPPPXPSPPPPPPPPPMAPSKAQRTMLVVAVDA

SEQ ID NO: 190870 - protein, 166 aa, Oryza sativa
  Clone ID: PAT_MRT4530_87243C.1.pep
FFFFFFFRGNSNLITPTRIIDRISNRELGTRSRSEKKIKSNTNAYAPHLRTRTRGGSAIRSDSSLTPSRYRPRNEGETIKTTKQRSIGGGSAEGGRYAGSDSLGARRDPAPAAAAAGPDLHQASPRRRRHETRRDARCLSREGDEVVEETWLLRRPRLPRGGGGGG

SEQ ID NO: 190871 - protein, 173 aa, Oryza sativa
  unsure (1)..(173): unsure at all Xaa locations
  Clone ID: PAT_MRT4530_87244C.1.pep
MSRRQVGARAAVRSESSARSALTESSAAVEPAMTPSTTPVVPTTFPGTGHSIFDISCATPTHHPLLMAAVSASFSSAATVSGLFSPXSSFPASSAPSTTVMDASCCSCSCPFLFSSALAPLDLEXARARRPRQLAAAERERDREIAGGXRRWRRKRARQRRRRLGRGGRRGRH

SEQ ID NO: 190872 - protein, 228 aa, Oryza sativa
  unsure (1)..(228): unsure at all Xaa locations
  Clone ID: PAT_MRT4530_87245C.1.pep
QKKSWSPRPAKTRSESSARSALTESSAAVEPAMTPSTTPVVPTTFPGAGHSISDISCAAPAHHPPPPAAASASFRARSTSFSSAATASGLFSPPPPPPATTSPASSAPSTAVADASCCSCSCPFLSSAAPAPAPLDLEAARARRPRQPAAERERDREIAGGRXGWRRKRAWRWVAACGGGVRGARRRAADGVVVVVVVGVVAMASRFGWSSGLTFPTHVSRFPCAHAF

SEQ ID NO: 190873 - protein, 44 aa, Oryza sativa
  Clone ID: PAT_MRT4530_87246C.1.pep
ITLPRFNWGWYWQKKLVNCFFLGFWFSFLITGHLKTCKLKNFFV

SEQ ID NO: 190874 - protein, 117 aa, Oryza sativa
  Clone ID: PAT_MRT4530_87247C.1.pep
RSGGYVRPRARANPVAVLSGSPAASAMVDGGSSVGDGGLEQIRQPCERADLAGVVGRSPTAVTASRVDLQRRRRQWRAALRRRPCRCSPSSFTLPWWARCCFSSPMAVTNYFGERQS

SEQ ID NO: 190875 - protein, 49 aa, Oryza sativa
  Clone ID: PAT_MRT4530_87248C.1.pep
KSLVLSWGLGFFLTFFCNFNPFLSIWYKLQSKSGLPFLSSGINYKGSPD

SEQ ID NO: 190876 - protein, 138 aa, Oryza sativa
  Clone ID: PAT_MRT4530_87249C.1.pep
TGRVDEFTNEWAPSFGCRKGGGRLFFFKNKMPCFSARRVKAFLPPWEDLAKTFNLQSPPPFRPPTKKKPEPPKIFSLPKNTSIGGKPPLDSPTPWETDPKKKKEIRGGKKKIQTPLVGCPAPRRATGGFFFQASPQIF

SEQ ID NO: 190877 - protein, 131 aa, Oryza sativa
  Clone ID: PAT_MRT4530_8724C.1.pep
GRRRRPTARRSGTRERGGKGEANGTVFGSPRSTRAAETTDGAEEDGGAVRDDDDDGAPAVDGRSGAADGVGGNTAKRTEVSPSKEEVRSGGGGGTELGGDGGERGARREHETDGESERRAAETEERSSGNV

SEQ ID NO: 190878 - protein, 206 aa, Oryza sativa
  Clone ID: PAT_MRT4530_87250C.1.pep
MPRVPLPLLLLVALLVAGGGGAAAETKPTAYEALATFDFPPGILPKGVVSYTLDDATGDFTATLNTTSTCAFSIQGSYSLRYQRRLSGRIAADRLTNLQGVSVKILFLWVNIVEVTRHGDELGFSVGIASADFGIDNFLESPQCGCGFDCHDHRDLSLPLPLPEPQPAAARCVLESSSSSILGGCCSKANSWINAVGVSCKIQIYL

SEQ ID NO: 190879 - protein, 80 aa, Oryza sativa
  unsure (1)..(80): unsure at all Xaa locations
  Clone ID: PAT_MRT4530_87251C.1.pep
LYIYAGGRIKRDRSYTSIEERERERVINMATSKKEVRHGTAQAKVNGDYYILLTGGINXTPLEAVKVADSQPVDLFYQAR

SEQ ID NO: 190880 - protein, 361 aa, Oryza sativa
  unsure (1)..(361): unsure at all Xaa locations
  Clone ID: PAT_MRT4530_87252C.1.pep
MGIFSGAGAHRPSCPSAANCAKWAQTYLKYCLCSTRDGMALTLGLLSVISWGVAEVPQIITNYKHKSTEGLSLAFLMTWIVGDFFNLIGCFLEPETLPTQFYMALXRYTITTLILTGQXITVYYSHIYHRLKAKKARATSKPQRHQRADASLREKLLGPKLPSFVCLDKNLEYRFVSSIWSARSLSSSPVPMSGTWSANYHQTNSPPEIDDQKESLVSEFSPAQYAASPLIKNSLSVVPWMSLLLGMSVLHFLVGTTHQEVPNGIVIPVGRRLLLLADDHADSSVSNGSGSGIGSFLGWAMAGLNPLMFTFALVGNVTYVGSILVKSMDWSKLKPNLPWLVDAGGCVLLDXFCILLQAFYF

SEQ ID NO: 190881 - protein, 97 aa, Oryza sativa
  unsure (1)..(97): unsure at all Xaa locations
  Clone ID: PAT_MRT4530_87253C.1.pep
MAKNYPAVSAWYQEVRETARHKLRALIAEKSCGPLMLRLAGHLAGTFNLAAKTAGTXSDMKPNRAVHAANRGGHGADAQLIKEEIPTIYYVRYSTRL

SEQ ID NO: 190882 - protein, 106 aa, Oryza sativa
  Clone ID: PAT_MRT4530_87254C.1.pep
FIISSSRSRSSLSYTQCAGLQRDGVVHAVGSGMAPRVRRLAAPVATPERVPGPRAANRRSLRLNIQPKIIQALPPIQPGRTTPRQRKDTLDQWTTTPRRGEERSII

SEQ ID NO: 190883 - protein, 80 aa, Oryza sativa
  Clone ID: PAT_MRT4530_87255C.1.pep
IYFKQLSLKRHKELCSAMHAHYPKILRIASLFGYDLPSEHSIKKSISRTFIGDSKHYTSARTLSHLVGILMNLLATLISI

SEQ ID NO: 190884 - protein, 107 aa, Oryza sativa
  Clone ID: PAT_MRT4530_87256C.1.pep
MNEQRYFSPTSVNVVVTINFITQLPKMILMKHARRESPGPPNSPDCHSNFESPKAEKPSFLDSQKLATNQRILRIFPNLGLRGIEDDCILELFQNFETRVEWNMNLK

SEQ ID NO: 190885 - protein, 429 aa, Oryza sativa
  Clone ID: PAT_MRT4530_87257C.1.pep
MAVIVVQRQYVQGWEGCSEPPICSESAERNGSSRFTTKGTSRVRVMMLRQKNPGGQKKSFDGTGEPLYLGIDFGTSGARYALVDKQGAIHSEGKRTYPPVSVPQILTHSTSLQCKIQSDKRNNGGILAGPYLYNESFADALPAVESIAPANHTVRSGSSTLCKLVSWWNSSSAGLSSRDSAILMHQSDWLLWLLHGEYGVSDYNNTLKVGYDPEIDSYPSWLMSQPYAYMLPSVRAPGAPIGSIKEDVTSLGSTLAIKLLSNARVDDARFGVYSHRLDDMWLVGGASNTGGAVLRQLFTDDQLVALSHEIDPSVPSLLDYYPLPKRGERFPVSDPNMMPRLQPRPESDTAYLHGILESIARIEAKGYNLLKELGASMVEEVLTAGGGARNDKWTAIRGRVLGVPVRKAEQTEAAYGAALLALKGANTTH

SEQ ID NO: 190886 - protein, 107 aa, Oryza sativa
  Clone ID: PAT_MRT4530_87258C.1.pep
AAETPTSTAGGAPAAAGWRRGEGVVSCRGAAAGWWHVTSWRSPGRAPRRRVGLLPPRLRLSWAPTDHWLTVMAVRALRVSTGTWSRSGCSPSSTRRCSCVLALAYGH

SEQ ID NO: 190887 - protein, 378 aa, Oryza sativa
  Clone ID: PAT_MRT4530_87259C.1.pep
MAVLAKIKLHNKVLLVQPGHRQLGRQRRGGSGRAASRLLRGFAVARAALQAWSGSLCCCVAARAEGERETGGIGVVARGGGFGLAAAGCEVSAWARQGIGQGSTSLASALPAGIAGRGCLGNEINFSKLYLHHTPAGPRPNQSGVTSTNKETGLGSLVVNNWQVYDGIGCDAKVVAHAQGLHVYAGNWHNSFTLVFEDERFKGSTLEVMGIVVEQGEWAIVGGTGQFAMANGGLVTKIGPWGGIDGGRAQDITATPKRLESITIHSGWTIDSISFIYFDQAGEKHRAGPWGGPGGDPCTIEFGSSEFLKEVSGTFGPYEGWKVIRSIKFVTNKKTYGPFGRQEGTPFSVPVQNNSTIVGFFGRSGKYLDTVGIYVHPR

SEQ ID NO: 190888 - protein, 507 aa, Oryza sativa
  Clone ID: PAT_MRT4530_8725C.1.pep
SYQRACAHATGSFPPRHAVQLPTLHSLLRLRAAALRRHPAFPWGASTHLLIRSPADPPSTVTISRRKLEARLANAPPPFQDRVVQELLLLLLEPVFEPRFSPKSHAFRPGRGPHTAIRSVRSHFAAYLWFISADLTGVVDALSPYTILSCVQKAVSDRKVLSLLKSALNAPVRPGSVPPREKELDGLAKKRLKRKVLRKSRKKKVLNENEPKPDPYWLRLFFGFAPEQACHAPNYGHCGILALCLPMGPREDAVEIRRQLMEFCESTFGLRPENSMVEIEHITRGIEFLDHVITRRVIYPTLRYTASGGNIAHTNSQMNKFLETMADWYRYADNRKKIVGFCAYVIRSSLAKLYAASRPLRESTRNDAPEYSDLLRMGLVDIIEGVQFARMSSIPSCDYTPFPRNWVPHHELVLREYIKLQDPKFFCELHKTIKRKEINSPQDDVSRMVWYYKVYGVYDAKRSLQKLNDWKNTDEAANKENQILLGSVSMSSLLFVEMLMGSVSMVH

SEQ ID NO: 190889 - protein, 52 aa, Oryza sativa
  Clone ID: PAT_MRT4530_87260C.1.pep
MFYMLSFDIWSTLHALEVLTVIISRTPPPPCLLLYKDIGCCMLVYRTNMVLR

SEQ ID NO: 190890 - protein, 88 aa, Oryza sativa
  Clone ID: PAT_MRT4530_87261C.1.pep
WNRADDNVDTGQEHLIPHLLQYYWKLFFSVTIRSRTVAARRRRLFTPEHLVHGKDGEAGKVRHFQSLPSCRIQRCRQDDSSSFLVFQP

SEQ ID NO: 190891 - protein, 109 aa, Oryza sativa
  unsure (1)..(109): unsure at all Xaa locations
  Clone ID: PAT_MRT4530_87262C.1.pep
TQGGKAHERATSPSREHSKDREGXQGSQKQHQGHTKTTXRQQQKEGGTRTAGEAKRKQGRQTRXGGGAHGXAKPPDRKEQPRNREKAPXTAQAPQSPHRTQRRPRPGRD

SEQ ID NO: 190892 - protein, 90 aa, Oryza sativa
  Clone ID: PAT_MRT4530_87263C.1.pep
TLSPPGGGGAPTYPTTAAYATKVEVHTRYDLRRGRRRRLPPTGPAYLPPRTVGGRYGVQAPEGGDTTAYIGSAARRPTRLPLYVPRGLRN

SEQ ID NO: 190893 - protein, 127 aa, Oryza sativa
  unsure (1)..(127): unsure at all Xaa locations
  Clone ID: PAT_MRT4530_87264C.1.pep
MNWCSSGGWLGLLQRGVALDSVWLILINYYNCLTAFNYCFXMLALCKRTSSFLWLYPASYLLFRYDLLSTVGSTQSCSLFPHTRAEDLPSWSCFVKVGFVAAVKLRNSGLRISGRDKLASEPTLTVG

SEQ ID NO: 190894 - protein, 628 aa, Oryza sativa
  unsure (1)..(628): unsure at all Xaa locations
  Clone ID: PAT_MRT4530_87265C.1.pep
MATLRARKRGRGGAGAGAAAVLGALGLGGFAGLDLXHRAAPAGEAELEQLAAAYDRASGRISVSIRGAGVSASPADLAAALGLPLGPAALGPEVDASVFRSEEAIAAARGFLRDRVLLGGGGGGGRELPGEAAVALRLVEEGKAYAVDWCRLFWELLKMDLVSGKPRRYAPHLLRLIEYQRPELFAEVDGSSPLGKRRKSAAFSRQCQWEDEKETDLIDAECGDSRTQAAEAEVERSSQSIGDLEEMPVFGERKQFNAVDLVGYKSSIVGLGEWIHGVNEGNAELGSQKSLPSEIEVSGCEMGGNAAAGLTAKDQSSNDSSLLSLLRTMDEQDDSSSHQNVISGAKPQPGPNQQSIIEIEDEEDDDDDQVGVGHVPPNIQNGHFGLNNYFVQQRATEGFQNDQTLPSFLACTQQIKACMDDNFLDKMKALMDARAANQRMINMITQKDYMIAATKRDILEDLGARHVMISQFEHDIELMRLTIQQYRKLFENTSAAYLEYRNRMSREEGDGSSLEVIGIADETEQFVRMQQLDIYQRLNKFQKLWLTKYSDLVGHLTRVAECMTYLSLEGEELGKELLSKTKDAEREGEGDHCSSAVVIDELAQPDQRNDKESMIVNGVSGICNEDEV

SEQ ID NO: 190895 - protein, 664 aa, Oryza sativa
  Clone ID: PAT_MRT4530_87266C.1.pep
MSPPMPLPHLTVLLVLFATSAAQAAADRSSSSSSCGGGERCGDLLLPFPFHLNSSCVSSTTNSSSRFRLSCDTTNATLTLPLGSATFRVLGFLPSGSILLDYAPAASPSPSSPCDPAYAAFSRPSSPAAALDAAAAFLAVTPANVLRLYACEDSSLCRAGCEDVATCGRGGAAAGAKSGCCYPLSDGSVWKPGDGLGAFAEFGCRGFSSWVKNRSAAAPGVVRGIEVEWAVPKGSEMAACADGAVAVNATAVRGGVRCACAAGLVGDGFAHGTGCSKGTSCSNSGQASDGRECCQGRFCSKKSVALAGFFVSLFFLAAAVSFWLFLRQPSKDTLWDIDPACIPKILGGVCNARQFTYEQLDEATKRFDDSEKAAVNVQVDGGGTVHAGVLDDGTVVAVQRIGYDTAEKLRLVLDRVELLSEVSHRNIARVVGFCCTAAADSGTGNALLLVHEHFAGGTLEDHLRQVKGRLLSWYHRVNIAIELASALTYLQAHDTAPTFLHDLKSSDVFLDDNLTAKIAGYKLARPVAYYYYAPSYDHDVVRNFGHLLIELLTGMRHQHPFDSVAPKVREGRLHEVIDVTLLAGKQLPAPNEDVRKVFELAVACLLSAENGLCMLGVAKELMQIVRNNIGSSSKIEISLEETFSSSSLLQMISMSPETLHHHLP

SEQ ID NO: 190896 - protein, 516 aa, Oryza sativa
  Clone ID: PAT_MRT4530_87267C.1.pep
MDGDSSYSPALAAVAGAVALVAFCSYYLAVTRATGDGEARRRRRRHPPVVGTVFHQLYHVRRLHDYYTALCREHTTFRLLATPGRRNIYTCDPAVVEHILRTNFPSYGKGPLNSEILNDLFGEGIFAVDGEKWKTQRKIASYDFTTRALRDFSSDVFKRNAAKLAGVVSNHAASNQSMDFKGLLTRATMDSIFTIAFGQDLNTLDGSGEGRHFAKAFDDAGEYLLLRYLNPFWKLARLLNVGAEATLKERIKVVDEFVYKLIRARSDELSNTMAQDHRSRDDLLSRFIQATTSDSGTVDYKYLRDIVLNIVIAAKDSTSGSLAWFLYMACKRPEVQEKIFDEVMETTNAGDCASIDEFLTSLTDQALNKMHYLHAALTETLRLYPSVPLENKQCFSDDVLPNGFSVSKGDGVFYMPYAMGRMEFLWGKDAEAFRPERWLDEHGVFQQESPFKFTAFQAGPRICIGKDFAYRQMKIFAAVLIRSFVFKLRDKKDNVSYRTAITLAIDQDLHLTATAR

SEQ ID NO: 190897 - protein, 144 aa, Oryza sativa
  Clone ID: PAT_MRT4530_87268C.1.pep
ENWGGTKISLPSPRGGVSHQKPKIFKGACCPQGFRSRGFPAPKAGGGPSPGFLPPKRGFTLGGPVFQNPQGVSKLGAPGFFFYRNQCFCPFFKGRTLFCQKGIALGGLLLINLPLGPPCALGNPHRKNFFFSKRFPGKKGYWFP

SEQ ID NO: 190898 - protein, 100 aa, Oryza sativa
  unsure (1)..(100): unsure at all Xaa locations
  Clone ID: PAT_MRT4530_87269C.1.pep
MTVVTVGMVGNTLQLSLGLHLNRPANTWIQWRRGRFGXTPWFGRTWGRPNQPMVWLAASSVVLLHRLVNFXPVCRVNYELLAHSYISLVLDIVRLIYRLS

SEQ ID NO: 190899 - protein, 306 aa, Oryza sativa
  unsure (1)..(306): unsure at all Xaa locations
  Clone ID: PAT_MRT4530_8726C.1.pep
RAVGRSGTGLAPPPPRIAPHPAVPARIKERGITPRVSLSRFPLFSLSLSLGFVRIHPAKFAGVFNGARDLRARFPLSPAALSPSRCYKIVPRASLFRFRRSPLALAVGFVPAPCSSLSAVAAELRFAAVVAPVLLPTRRHLLRLRRVVADPVRRSASPADRRSTVALVIPNRAAAFLRSGRRSRRRRCPGVSRRPPFAFPLLSALSGAAPPHRWSPAATIGARVRXSSRRPCRRGRLRXRPRGCQVGPAVSRPRPXRAPGPPWTVGLTRGPHXPWTRANEGYTSCGPVVEMSKSTGLVPCCEGLSS

SEQ ID NO: 190900 - protein, 116 aa, Oryza sativa
  Clone ID: PAT_MRT4530_87270C.1.pep
MNRNIRYNGWDNGFEGNSGTRPHDHLGGEGCGWEEAGEKIRGEDEEGRGEKHSLGLKTNMVFAYAGAGDKEGHFATANFEPPRVPAREDEDGIDRERNPELGRTYLRIKSWAMIEK

SEQ ID NO: 190901 - protein, 100 aa, Oryza sativa
  unsure (1)..(100): unsure at all Xaa locations
  Clone ID: PAT_MRT4530_87271C.1.pep
MTVVMAGMVGNTLQPSLGLHLNRPAKTWIQRRRGSFGRTXSSAEPGAGPTSPCFXLAASSVVLLRRXVNFGPVCHVNSEFLAHSYISLVLDIVRLIYRLS

SEQ ID NO: 190902 - protein, 137 aa, Oryza sativa
  Clone ID: PAT_MRT4530_87272C.1.pep
MASTWVGKAARLGGAAGDGDGTAAAVLIPSRVAAGVAHHLQWIGGRDRGRDETIQGHFEDVRAQVRQNEGAADRQNGADLAAMRMVEERTQRILRLETMLGEARDDAREKVEATTRRLIGWKLFSLLLAVTLLLLPA

SEQ ID NO: 190903 - protein, 70 aa, Oryza sativa
  Clone ID: PAT_MRT4530_87273C.1.pep
LYHHVPIIGGKLSCTSGLLSVEFKFKMVRPMKHAMKWENQSCGFCTSMLLLPAVLNCKMFLSVVSCHAAK

SEQ ID NO: 190904 - protein, 171 aa, Oryza sativa
  Clone ID: PAT_MRT4530_87274C.1.pep
MDTMRGALERARMLVGMEVDEESAPEEQSFFDDVTRNCALTTTQRLYGFAICLAAGLTCTFLSMLVFFNPVKFGVTFTLGNLMALGSTAFLIGPKRQFDMMLDSVRIYATAVYIASIIIALFCALFVHSKLLTLLAIILEFGALVWYSLSYIPFARSVVSKVMTSCFDTEF

SEQ ID NO: 190905 - protein, 113 aa, Oryza sativa
  Clone ID: PAT_MRT4530_87275C.1.pep
VAATCAPGRRTPSHLCLLLRLIYQLGFRGVVIRVAEENGGAACAWPSSAGWLRTSSRCASSRWAHLPIQRAVYCWPAPCTSHEGHGFATMNSSVQISISGPRRKFFMNWCLSI

SEQ ID NO: 190906 - protein, 184 aa, Oryza sativa
  Clone ID: PAT_MRT4530_87276C.1.pep
MDTMRGALERARMLVGMEVDEESAPEEQSFFDDVTRNCALTTTQASSIPTPPTQPGSIRVPRSDLRLYGFAICLAAGLTCTFLSMLVFFNPVKFGVTFTLGNLMALGRWGFNLLNYVYINVNLYFNFAMVHSKLLTLLAIILEFGALVWLLLDFPASQVLPECNFGIYLVWLSSTRQTLSVGDN

SEQ ID NO: 190907 - protein, 147 aa, Oryza sativa
  Clone ID: PAT_MRT4530_87277C.1.pep
HASRTEFARGGGGGAGQTAQGRGRFFAGKRGACRVLHPCLGIRLDCSLVSSPQRDYGCPSMAPPLHAICLLKCRRGSPSPRRWVSLLQGDVSSFVRMCRCDRSFIRDEVVSQESEICRRSTSGHLLGRGLLSTLRSLCTRCRSCRRS

SEQ ID NO: 190908 - protein, 90 aa, Oryza sativa
  Clone ID: PAT_MRT4530_87278C.1.pep
MPRFEKYLVTSGGDSSRWGYLVALTSGDHFLFDKSTRLVDLYYGNDPMILIDCTSYNLSIRKVWCNYLSMIKPWDITITQLAVQMKEFVG

SEQ ID NO: 190909 - protein, 87 aa, Oryza sativa
  Clone ID: PAT_MRT4530_87279C.1.pep
SAVGDSQPLVGAAAAGGGLQRQAVAVITADTTDSATVAMRSARLAPPRPEQLELDLARAMDQVAQAHSRIRLCLHKPSCRIRHEASC

SEQ ID NO: 190910 - protein, 215 aa, Oryza sativa
  Clone ID: PAT_MRT4530_8727C.1.pep
GEQAEGEGARTGSTGVGPTRQPLGPRWTGSTRLAAVGAPRGAPEGGLAGAAEGRGTRPFPDGHRRRPPARRSGTRERGGKGEARGTVFGSPRSTATTGTAAEAEEDGGAVRDDDDDGAPAVGGRSGAADGVGNHSAKPMEVAPSREEDRSDDGGETELGGDGGERGARREHESDGESERRAAETEERSSGIDFIAPRGGERGRRGRKRPRRSQLH

SEQ ID NO: 190911 - protein, 140 aa, Oryza sativa
  Clone ID: PAT_MRT4530_87280C.1.pep
NSRWHWFTPTSTTTRFSSCRGCEWRPTSGLATTRGGRKRGAGSGAPHRSNAAGDDVLPLLLLLLLLLFAIDTPDRITRPADATAIGATTTTIVPLCDQLVAISPLYFKNAAVNPSSLCFSQLYGPPLSPCMKKHKTLFPA

SEQ ID NO: 190912 - protein, 109 aa, Oryza sativa
  Clone ID: PAT_MRT4530_87281C.1.pep
AAAAARDDKAAVFRREDHPHQPKAVTVAQEQQAAADWGHGKPLKCPDLNLDLCISLPSQEEPMMMKPVKRETGVCFSCSLGLPKSTDCKCSSFLGLRTAMLDFRSLEMK

SEQ ID NO: 190913 - protein, 84 aa, Oryza sativa
  Clone ID: PAT_MRT4530_87282C.1.pep
MAGKWAQVAGNKMAIRNSAGDRDRMCLPRELGRLPRIMGFPCVFMSTHYAPLLRTWLRLHGFSAACDSSGGLVVLQNSEGYASF

SEQ ID NO: 190914 - protein, 184 aa, Oryza sativa
  unsure (1)..(184): unsure at all Xaa locations
  Clone ID: PAT_MRT4530_87283C.1.pep
TRGRFYSLMALSMTVALILCTVLKHEVQLPWWGLLFACGMAFIFTLPISIISATTNQTPGLNVITEYAIGLIIPGHPIANVCFKVYGYMSMSQAIAFLSDFKLGHYMKIPPKSMFLVQFIGTIVAGTVNLGVAWXLLGSIHDICQDSLPADSPWTCPNDRVFFDASVIXWGLIGPIRIFGPHGN

SEQ ID NO: 190915 - protein, 91 aa, Oryza sativa
  Clone ID: PAT_MRT4530_87284C.1.pep
MEGGLHHHLPNEIEVVAYGLDPPPPFQAASSWHAIRSKGSKAVAPCSESKEVTAHQLEVPDSQYIKNVNGIEPGIHERFISLGIITDLSKH

SEQ ID NO: 190916 - protein, 145 aa, Oryza sativa
  unsure (1)..(145): unsure at all Xaa locations
  Clone ID: PAT_MRT4530_87285C.1.pep
NPDWKTNXPXXKNTRTGAAVXXFSXXXXPXAXXSGRGXCVPVXXEVFGSHPXGLLDXXGXAXXPIXPVDXPIXVXYKERXEIKRQDVVGVGGVHXRRPRRXRLQMXXREQEHQQQDSSKKQQXXEQNKPSLARSESXLMRNPAAK

SEQ ID NO: 190917 - protein, 445 aa, Oryza sativa
  Clone ID: PAT_MRT4530_87286C.1.pep
MNRYDNNGHAAAAAAAAVAGGGGGGGGNKAAGEVDGHEDDLVMPGFRFHPTEEELIEFYLRRKVEGKRFNVELITFLDLYRYDPWELPGIEHLINKLDGGAAMAAIGEKEWFFYVPRDRKYRNGDRPNRVTASGYWKATGADRMIRAENNRPIGLKKTLVFYSGKAPKGVRSSWIMNEYRLPPADTDRYHKTEISLCRVYKRTGIDDGHGQVSTARSSAHSRGGGAAPVQDNKQGSSSTSTPTPPPTPSKLHLLSSECTSPPAIVTDHAAMVAHKAPSPRHHQQQQQLHAAKPCGGYLQNSSMASAAGGDQQQQFQQDFAAALYQQYSKNTSGAFASTYSLLNLVNAASMGSSAAAIDELSSLVGHGTPSYINPAAGSHNYSQFLHLPTTPSSHQPTPAPLGTTTAAAAATLPMSLAAFSDRIWDWNNPIPEAGGRDYSTSTGFK

SEQ ID NO: 190918 - protein, 158 aa, Oryza sativa
  unsure (1)..(158): unsure at all Xaa locations
  Clone ID: PAT_MRT4530_87287C.1.pep
MAVEEVLDRAAPMLSSSPAASGEEVGARKPQQRCGGAEGWSKRKRSRRRHRDRAAAPPPHGGGEEHLALSLLMLARGHRDPSPAPQEQHGCSVCGRVFSSYQALGGHKTSHRPRTPPTMAAVVVVDEPAATTASPAVSSSNSGFCXGGGGGNMVHECS

SEQ ID NO: 190919 - protein, 61 aa, Oryza sativa
  Clone ID: PAT_MRT4530_87288C.1.pep
PQELASNALLLTWHRHQNEHLSRVMFAPIHCTCTRQPTQHTFLHSNCLFTNFFTCSTSAPQ

SEQ ID NO: 190920 - protein, 124 aa, Oryza sativa
  Clone ID: PAT_MRT4530_87289C.1.pep
MCKQARVKHGASKTVEKRSASTYESRERSRVDGSTARCTSLLHGENPRRQSNGRLDKQARQASHGPRAQYYAYYALVPYAVKHAINRCKGRGRQYVRNAVHIAAKRRAPEAVEQRAGRAGRDLT

SEQ ID NO: 190921 - protein, 68 aa, Oryza sativa
  Clone ID: PAT_MRT4530_8728C.1.pep
WRTAIDGGCSPRLRPSSRPRAVAREACSAYRQRGEAGVSSSASLRAVTVNCVADGLERPSSRRFRWRI

SEQ ID NO: 190922 - protein, 627 aa, Oryza sativa
  Clone ID: PAT_MRT4530_87290C.1.pep
MRVMKLGNRPDTFFSSGPVRSVSTDLATDMQILVDGCLFRLHKFPLLSKCMWLQALCVESGDGGGAVELPAFPGGAEAFEACAKFCYGVAVTIGPHNVVAVRCAAARLGMSEAADRGNLAAKLDAFLSSCLLRRWKDALAVLHSTRRYAALCEELGVTSRCVDAVAALAVGDASGAVPAGSSSSSPPWWARDISELGVDLYWRVMVAVKATGTVHAKAIGDTLKAYARRWLPIAAKNHHAAERTAGGGGGGAANAERATKNHRLLVEKIVSLLPAERNAVSCGFLLKLLKAANILGASPASKAELTRRVASQLEDANVSDLLIPAPPPCAGGVLYDVDAVVTILEEFALRQAAASGSPKGSPARAGRHRRSMSAESGELEGARRSTSMAAVSHGAMVRVGRLVDGFLAMVATKDARTPLDKMIAVAEAVPDFARPEHDDLYRAIDTYLRAHPEMDKSSRKKLCRVLNCRKLSEKASMHAAQNELLPLRVVVQVLFFENARAAGLSSGHGNRVAARFPGDGGDVSALLGTGRPRTTEENGKDGQSPAAAGSVAADGDWSVEGLRRAASRVATLKMRLEEEDGEDAGDEAFVHRTRAGLARSASSRVTAAAGRSKRMLSRLWPTSRTFT

SEQ ID NO: 190923 - protein, 82 aa, Oryza sativa
  Clone ID: PAT_MRT4530_87291C.1.pep
MRRRGTDLLRKKRGYSQWVLISVYSADGAANGLAEDDISASGSLAGEEIALCAEGIAGEREDEVGLSGENGANGVKFLGDDG

SEQ ID NO: 190924 - protein, 295 aa, Oryza sativa
  unsure (1)..(295): unsure at all Xaa locations
  Clone ID: PAT_MRT4530_87292C.1.pep
SSYPEFLVPLRRASSLLRQGMKEFIAEVVSIGQLRHRNLVQLLGYCWRMGKLLLVYNYMPNDSLDKYLYAENSKIMSLAQRFRIIKGIASSIXLYLHEDWEQVVLHRDIKTSNVLLDAEMNCRLGNFGLARLYDRGTDPHTTXHVVSTIGYLASELGHTGRPSKASDIFAFGVFMLEVTCGRRPVSQDTNTAVTXLLVDMVLEHWRQGTVTDAVDPPLQGDFAVEEASLVLKLCLLCLHPLPSARPGIRQVVQLLDGAMPLPELSQAHLSCNMLALMQNQMGNSCSVGCCVVGSW

SEQ ID NO: 190925 - protein, 674 aa, Oryza sativa
  Clone ID: PAT_MRT4530_87293C.1.pep
MRRPELIMRSLPLILFLSLGSFHLAAAAVDDQFTFDGFAGVNLTLDGTAVVTPGGLLMLTNGTTLLKGHAFYPSPLRFFHEATSGGGSSTVRSFSTAFVFGIVSEYADLSSPGLAFVVAKSRDFSSALQSQYMGLANARNNGNASNHFLAVELDTIVNAEFGDMSDNHVGIDVDGLASAAADDAGYHDDRTGAFVNMSLLSRAAARVWVDFDARTSLVNVTMAPLELPKPTTPLLSAAVNLSAVIEDEAYVGFSSSTGVVASRHYVLAWSFKMDGPAPSLNVSKLPALPVTIARAPSNVLKILLPIASAALVSALAIAVLVIHRRRRRYAELKEEWEVAFGPHRFSYKDLFRATNGFSDERLLGFGGFGRVYKGVLLVSRVEIAVKKVSHESRQGMKEFIAEVVSIGQLRHRNLVQLLGYCRQKGELLLVYDYMPNGSLDKYLYAENSKILSWAQRFRIIKGIASSILYLHEDWEQVVLHRDIKASNVLLDAEMNCRLGDFGLARLYDRGTDPHTTHVVGTIGYLAPELGHTGRPSKASDIFAFGVFMLEVTCGRRPVLQDTNGGQLLLVDMVLEHWRQGTVTDAVDPRLQGDFAVEEASLVLKLCLLCSHPLPSARPGIRQVVQLLDGAMPLPELSQAHLSCNMLALMQNQMGNSCSVASSVAGNISDIPRAR

SEQ ID NO: 190926 - protein, 137 aa, Oryza sativa
  unsure (1)..(137): unsure at all Xaa locations
  Clone ID: PAT_MRT4530_87294C.1.pep
TPPAAPPNPRPPSLRGAPRCCPRRTRRTPHAAPPNPRPPSPRGAPRCXGTRPRSAYPPRRPSPWPSRTRRIPLSPRPRGVVRRRRCRSSGRRGRAPARSPISRTMDEHPAYPRAVAATGYGYGYGCGRGNRRRGRDP

SEQ ID NO: 190927 - protein, 71 aa, Oryza sativa
  Clone ID: PAT_MRT4530_87295C.1.pep
FPFRGRAPPEGTPALLARAKPGTGGVWCRGQPKGPGGPWCKTGGGPPGHYGAGVTRMKIRGPREGPPPQLG

SEQ ID NO: 190928 - protein, 440 aa, Oryza sativa
  Clone ID: PAT_MRT4530_87296C.1.pep
MDGSSSLNVKAFTKILKKFVKVSEQQRATDLFSEKVKRSPFSSSDKVSSGLFTGTFVSLFIIYAILAHVSGIFTSTGNSAYMEIVYHVFSMFALISLHIFLYGCNLFMWKNTRINHNFIFDFSSNTALTHRDAFLMSASIMCTVVAALVINLFLKNAGVAYANALPGALLLLSTGVLFCPFDIFYRSTRYCFMRVMRNIIFSPFYKVLMADFFMADQLTSQIPLLRHMEFTACYFMAGSFRTHPYETCTSGQQYKHLAYVISFLPYFWRALQCLRRYLEEGHDINQLANAGKYVSAMVAAAVRFKYAATPTPFWVWMVIISSSGATIYQLYWDFVKDWGFLNPKSKNRWLRNELILKNKSIYYVSMMLNLALRLAWTESVMKIHIGKVESRLLDFSLASLEIIRRGHWNFYRLENEHLNNVGKFRAVKTVPLPFRELETD

SEQ ID NO: 190929 - protein, 213 aa, Oryza sativa
  Clone ID: PAT_MRT4530_87297C.1.pep
MAAAAALCGVALLMLLLAIEVRGGGYGEEEKVPLSAVIVPDPSPELREPTSPSPSLAPAPTPVSGAGGGDDDMRPRLPTERWRRGGGRGEERHTGGGGGGSHHAHYAHGHGHAHAAAPSPSSSWAPARAPSPDASASAPDSAAPGQSGGTAFIRSSPAVPVPRGVTDTATILPMPTPGDKHQEVGAAAASARAVMAPVVVGLITMMASFWALH

SEQ ID NO: 190930 - protein, 526 aa, Oryza sativa
  unsure (1)..(526): unsure at all Xaa locations
  Clone ID: PAT_MRT4530_87298C.1.pep
MAVRRRRRRSRAAAVLVAALLLAASAATASAASSYPAKVVTGLLSSTASAVVKQLWSLKSTATRTGSAAAGRSMVKYEGGYAVETVFDGSKLGIEPHDVEVTPSGELLVLDSMNSNVYRVQLPLSRYSRPKLVAGSPEGLSGHVDGRLREAKMNHPKGFTVDDRGNIYVADAMNMAIRKISDTGVTTIAGGKSMRGGHLDGPSDDAKFSTDFEIRYISSSCSLLVIDRGNQAIREIALHNDDCEYQYEAGFPLGIALLFAAGFFGYMLALLQRQVLGMVSTADVHCFKDTEKEPQTPPRPSIASIPPYQKPLKPSLRPPLIPTEDQAGKHEAEEGFFXSIGKLIGGAKSSAVEIFSRKKRPTHQYHHHLQQQRANPWPVQESYAIPHDETPPPLDMRAATPRKNYAFMTKEPEKVHHVRHGRPYFNGWDMQHAPQQQPEQQMYHQQHLQQHRQYSAGPQTFYEQSCETTNEIVFGAVQEVDTKRRMVEIKAVNYGDTFYEQYGMRYRNNYIGYNNSSNGNNNSYYY

SEQ ID NO: 190931 - protein, 72 aa, Oryza sativa
  unsure (1)..(72): unsure at all Xaa locations
  Clone ID: PAT_MRT4530_87299C.1.pep
AHASXFAYLGGVRDEKTYQKFGFPTQSLEYEACGRNSFFSLCIVMTSGSFFFCCCCCWWGGGSXSFFDCLCX

SEQ ID NO: 190932 - protein, 270 aa, Oryza sativa
  unsure (1)..(270): unsure at all Xaa locations
  Clone ID: PAT_MRT4530_8729C.1.pep
HAGRLQPPLPPRXHAGRPCRRLLQRRRHLLFAGLPSVSRGDRRRCVPTVALLFPPCRPPPAASPSSPKRCPAVPSPSPASQPPPLRRPALCFPRGPPEVPPRRRQWCCRHCSAFGHLCRVAGTPIDVAISSVDVAALSSPPAAPLFRRNAVARAGLHPRRRRRPFGRPVHPRRLVVSRRRLRRRHRSGVFHASLASVQPLPAALVAFSPAPXPSSSSSSAPRRQASCRPRLAFVQGSPPKPSPRRSSPLCPSVSTAPVRRCRSHASSRGG

SEQ ID NO: 190933 - protein, 121 aa, Oryza sativa
  Clone ID: PAT_MRT4530_872C.1.pep
MLVKNSTCMHLSVLLPSSPLGPLVTVISNPWQATSDPSSCGAAASHRLSTEPPPSPQRVTAVASSSRRAAAPPLLPLTEPPPPSPPPRAEPSPPSPPPRAAAVVSSRGAAVLPPLPSWAAA

SEQ ID NO: 190934 - protein, 194 aa, Oryza sativa
  Clone ID: PAT_MRT4530_87300C.1.pep
MARTPSRLKGGAKMEETRKSKMWRASSSFSSNPSPSSSLSTTAPLRAASFACHRLAGLSTPPTTASLHVVGFERCRSAHRRPSSPTWSAHRRLRAPSSHSAWLLRSPLLRSALPAVTPFHLPSPAHHRLAGFVRHCYASPSPHSARRRRPAPSRRLCDADRYREEGRRAKRSEEETWRGEGKKRLTCGVTWVPC

SEQ ID NO: 190935 - protein, 53 aa, Oryza sativa
  Clone ID: PAT_MRT4530_87301C.1.pep
PQQGRPFFINPGVKPPGPGFFWAPHNLGPRNPGSIGLPFYTKTLKRFWFHNPP

SEQ ID NO: 190936 - protein, 445 aa, Oryza sativa
  Clone ID: PAT_MRT4530_87302C.1.pep
MDKSWRGWKNTLNTKFVKTGRTPFETYANITPTQWNDYVKLKTSPKEIAKSKKFAELAKKNRFPHRLGSGGYAPKVAQWAKEEEEMRKAGLQGRVRGVSSKLSWKEGFKHDPYKKCDAYKDSLRDEGAKEFERQMMDFCIRHLILPDPATKEPEPDYPFDDLKENTPCKLHVPIRCFGRTLEAATAIAIPGRTYNGEFIPDEYAKVQSQVVHQGFESYDIDIPTPDVQDVPMEISVPQLDVQLLAIVGTDIEVIPGLEWDGTDLEIFEVPNPAKDPEVQEPPVNDKATEKSEVPRVLRSHNSKSKDDQKEKFMVSVFRRDAFGGNGYFWLDFEDLHAIYRREKMDVNYVAAGCLMQYMDAKEKKELIGFLDPIRICQTQHTRSLHLFNHLPEARNRDNLGPSRLSSPVIQRISNNLTICHKQPRGTVLYGYYACEFLRVNGSCQE

SEQ ID NO: 190937 - protein, 1090 aa, Oryza sativa
  Clone ID: PAT_MRT4530_87303C.1.pep
MGTEVAPMVDMRALSQSDLVALAAGSPYSADPRRGRDADVLPPPKIDRAVFNESAGSRKQTFSRHRVATNLSHSLTPATASAAAAPAPAPADEDSENRLIAFHLQRLFAGEDPSFASPPQIAPQPQPQTLITPAIAAAVTPAPSLPTPPPSNADMEVMNPNGVAVDLARLAELVDPYEEEMRRRTAGLGAESELLGFMNGLEGQWGSRRRRRKFVDASMFGDHLPRGWKLLLGLKRKERVAWINCRRYVSPSGHQFATCKEVSTYLMSLLGYVEAKPTAIQSSDAEVLELNAVNSVGHCQPNSTEEKQSAPPVTSVPFSSHHGDPQRQLDKNETQVEANGKECQKCNLTFQDQSAYVQHQLSFHQRKAKRRKVNKSGEVGANKNVTIVTQECHITSEDKLGNIDHSLATTKSQGQTPEKMPDETISGELGGRPSMAPEPVGFQETNGLTEQGKESSAGELLSGHCDPLHNMAGVPEKEKGSAGEPVTGNHEDPIDNFSDHKIHDGACHNAEEPHAVEAASEFNIGNSANLQQTDSTKDLVLSNADCTQNDNITKDLAPNPTIPQGESKCIDDPMECTDMKPSKKVSEPCDLLDDKFSSFPEGANFNGQEENSPLSAALNEPDLNSIDMEVDNDNVECKYGNAGDSTSPENGKHIEDQIIDCRMTALKDHEINTDVRIRDVNLNSCLDAMSPPVSGANYETSNAIDDNNRSSIIAQCFGANSADDNACKEENFVNNQSSVSKAESFNQNNDMIYQPNLTMDPISPAQINVDCFTSCSMTSEIKNNSNRREDNAKEQLVNPRNITSNDAGFDVEAYSNIFNGAITESSLAQLNNAINMKADYSSCYSLSDLNTLTGGPATDEIDIHSMRNSFVNSSTSRNEPNEHCTLDFDIKGSMLEALEKSDSDLENQYNGSTRPCGSLPTAGTSGSIDDFMSLQTNFGSLTSLVRSVEDGPMSRIIQDQCDLQLGFGVQKPQMYPTFEEQLRMASAGAPQFGTMNRHNHVPVPEPTLMLGYAPHIGSCPPVQLGWDMSMSKMVGGCVLQSSMCVWCNTQFQHFGTVADQQADSLGFICPACKEKISGHLSMLNNSSSQL

SEQ ID NO: 190938 - protein, 466 aa, Oryza sativa
  unsure (1)..(466): unsure at all Xaa locations
  Clone ID: PAT_MRT4530_87304C.1.pep
MDADGSPPLRVVIFPWLAFGHLLPYMELAERMASRGHHVSFVSTPRNIARLPAPVASAVELVALPLPRVDGLADGAESTNDVPDDEQGLLMEAFDGLAAPFADFLAAACADDGGGGRRRRPDWVIADSFHHWAAPAAARHGVPCVALLPSAAVMAAYEWEKLKASFLAATSHGASSSASGGMSRATRCSLTLERCTLAAMRSCVEWEPEXFRAVAAGLGKPLVPLGLLPPSPAGSRRRRAVAGEEDDDSXTPLLRWLDAQPPSSVLYVALGSEVPLRVDQVHELALGLELAGARFLWALRKPRSSSAASAAAAAAAAILPPGFQERTASRGVVTMGWAPQIAILEHAAVGAFLTHCGRNSLVEGISAGNPLVMLPIAGDQGPNARLMEARKVGLQVARDGADGSFDRHGVAAAVRAAIVDEETRKVFVANALKLREVVADEELHERYIDEFIHQLRLSSPTYLASS

SEQ ID NO: 190939 - protein, 88 aa, Oryza sativa
  Clone ID: PAT_MRT4530_87305C.1.pep
PAGTSRATPNADLALARPRSADASSSSRCAASAPVSPTSAFGRFDDSFSAASLKAYVAEFISTLVFVFAGVGSAIAYTKLTGGAPLDP

SEQ ID NO: 190940 - protein, 372 aa, Oryza sativa
  Clone ID: PAT_MRT4530_87306C.1.pep
MCLATSCDPSRRTLCFRYAYNKIPAPRHHHLGETDAGLPAPRRHRLGDADAGLPAPPPCFPTTATAVAVADPLIPGMEESDETAVEAALGLSASFFVNSVLNAVDDVRYGAFEYCLQEGAPEAVGAAMATQKAEELERGVISIHNLVKDVLDKRMSNWEKYCLRHCFAIPEGFLTREDDIPAKKSLNDGNSDSDLDAELVSLRKKLEDANNESEELQKELSSLERQAECQRNLDSSMAELLKVFESKAFQDNFQDLVNVIPLFQRKLEGMKRKIVENIDDQIDWNWSRKNPSHPAASAADDDMDDDAITALMDIDDSPRSSGAGAVFLDDEEDAEVFPGHRAARANEARGPLPFAGFYNSFDGADFDDTDLA

SEQ ID NO: 190941 - protein, 189 aa, Oryza sativa
  Clone ID: PAT_MRT4530_87307C.1.pep
MAVVRRTEGASSAADGGKENRPMSYLDVALAYKDYIQVGFNIGLQGIHTSFLIANNLLFDFIGVSADELSRCCIGLQGLHTSLLDVALAYKDYILACLLISSVFQPMSYLDVMSYLDAALAYKDYIQVGFNIGALAYKDYILACLLISSVFQPMSYLDVMSYLDVALAYKDYIQVGFNIGLQGLHTSWI

SEQ ID NO: 190942 - protein, 317 aa, Oryza sativa
  unsure (1)..(317): unsure at all Xaa locations
  Clone ID: PAT_MRT4530_87308C.1.pep
TQAPSRVPLLTGQQWMMQTLGNGPQCRSMFRMHXQYNYNLRASQYNYNLRASYEVSTLEAVRFFLXDNVGGEVNKRANNRFERSGLTISKYFSRVLHAIVCMACDVVRPMDPTFNTVTRXGETTPNVLVISDWSDRVIFDVTGWPGSVHDHRVSXSSAMRKYLDRFPRVPPGKYFLVDKGYANRXGFLAPYPEVRYXQPQFEHAAPPQDRDEIFNFYHSSLRRSVERLFGRIKVRWQILDSIPAYTPRAHNMIIHAAMALNNFIVDSTEPNSISTNPLYHTHIHPVPDVSPAHHTYHARDTKAVMDMVRENIANSMY

SEQ ID NO: 190943 - protein, 72 aa, Oryza sativa
  Clone ID: PAT_MRT4530_87309C.1.pep
MPAAWRAAGLTYNRYLAIAARVVRRSLKDDKRIVAERRGEMDLRFSKWENGKQGEMQNLAKANAAIAAENAA

SEQ ID NO: 190944 - protein, 2041 aa, Oryza sativa
  unsure (1)..(2041): unsure at all Xaa locations
  Clone ID: PAT_MRT4530_8730C.1.pep
GIESHSQDNHHSLRNPRTSVPQYPLYPVYGYPPSTVARQVGDLGAQGSTTMTSSLVDNSVNTSLIQGVPTSTMLVWTQVGEIVFPVYTTVPISAGPSMTGIENAVAIIPGDSMSKDPPAVAKNETPTSYEPEKDPSAAKPCPSDKNHEPTRTTSEVTKPWCPIHKTRKHNLHACWVFLNVQAEIRACKEHGIQCASPTRDVYCPIHKMKNHDFSSCKVLLCTMKTPLPKVQQSKISVRDADKEQGATLTSDRFVGVIDIDPHEPSVLHLLEDYGSSSSSTLRDVFAIGGTSTSAHANTEAENQAVTPAQHLGTINAILRETPYDPVLNDDLARWTERLRESVANLSNAFEEAATRAQPEHPTAGGADGKPPEQRTSPRRATPPPRGTGDLRDHLNGRREARRARDNENRSRHHVSSRRYRHHDNRHNRHDRDDHEHWTPDDTGRGHRHDGDDNGSRCQDNNGGRRQDSREPERRPRNRTPELSNPSSSSSSSSSSSSDRHPRRTYDRRQPTAPMAGCRAFNRSLRDVRWPERFRPGAIEKYDGSTDPEEFLXVYSTVLYAAGADDNTLANYLPTALKGFARSWLMHLPPYSISSXADLWQQFIANFEGTYKRHAIEDDLHALTQNPGESLRDYVXRFNECRNTIPEITDASVIRAFKIGVRDRYTTQELATSRITTTRRLFEVIDRCAHADDALRRKNDKPMMGGEKKPAKDAPEPSKKKSGKSGKRKAQAEVLASEYERPPKHPDPQGSDTKRIWCPIHKSDRHSLEDCLIFKKSLEKQQALEKGKXVHVVKKAAKATTQDSDSAYPDSDLHVSHIFXVPRRQYPIVVEPTIRNIKVARVLIDSGSSINLLFASTLYAMGIPRSELTPTDQPFHGITPQSSSKPLGKIMLPVTFGQASNFXIEQIMFDVAEFDTTYNAIIGRTALAKFMAASHYTYQVLKMPRPKGTITIQGNAKLAVQCDKRSLDMVEHTPSPPATAEPPKKVSKTTKTPKPNGAIKIIPLSSANPDKTXLVLITFLRDNADVFAWQPSDMPEVPREVIEHKLMVQPDVKPVKQKLRRFAPERKQAIREELDKLLKAGFIREVLHPEWLANPVMVXKANGKWRMCVDFTDLNKACPKDHFPLPRIDQLVDSTAGCELLSFLDAYFGYHQISMLKEDEEKTAFIMPFGVFCYVKMPFGLITAGNTFQCTVQGALNDQLGNNVEAYVDDIVVKTKTGDSLIDDLRETFDNLRRYRLMLNPEKCTFGVPSSKLLGFLVSGREIKANPEKIKAIENMKSPTRLKKVQKLTGCMAALSRFVARMGEQGHPFFALLKNQDKFVWTQEDEEAFIALKRYLSNPPVLVAPQPNEELFLYIAATPYSVSTVIVVEREKVQRPVYYISEALHDAKTXYPQIQKLLYAVIMTSRKLRHYFQAHRVTVVSSFPLGEVVRSKDVVGRIAKWVVELTKFDVHFVPRTAIKSQVLTDFVADWTMPENWLDSQTDNETWTMAFVGALNSQGAGAGFILTSPLGDQFKHAIYLNFRATNKTAEYEGLLAGIRVAAALGVKRLIVKGDSKLVANQVHKDYKCSSPELSKYLAEVRKLEKRFDGIEVRHVYRKDNIEPDNLAWRASKREPLEPGTFLDILTKPSVREANNEDSPVAPDISSGATEAECAVADIETTDDWRTPLIKFISSDELPEDDAEAEKITRQAKNYCMIGDDLYKKAPNGVLLKCVSSDDGKHLLLDIHERICGSHAAGRTLVGKAFRQGFFWPTALKDACDMQTHKATSASTANHPSHLVVLVLGARHTRTIPTRIGRLQIPXVAIDKFTKWIEATPTVEIKADNAIKFIKGIFCRYGLPHRIITNNGSQFISADFQDYCIGLGVKICFASVSHPQSNGQVERANGIVLQGIKTLLWAVRTTPTTSNKETPFFLVYGSEAMLPTELQHQSTRVQKYSDDDQEEQQNDDVNLLEEHRERVAIRVASYQQALRWYHKKRIRARILSIGDYVLRLVQSQGQNKLSPKWEGSYTITQVLRPGAFKIVDGDGRELANSWNIDQLRKFYV

SEQ ID NO: 190945 - protein, 150 aa, Oryza sativa
  Clone ID: PAT_MRT4530_87310C.1.pep
MGEPKRKAQQGEPFYAWKPPRWTSLLRRHLRLQKHGPRVCSATLLPFASPFERDMAPSRHGRARGRRPGRTTEPAKPKVSDLTWTGVPGRWVLASWQRKRTDFRCRNRNGHVGVGFLMAGGPPAGLDGACWRAVEADRATYSRDPVSLRR

SEQ ID NO: 190946 - protein, 396 aa, Oryza sativa
  unsure (1)..(396): unsure at all Xaa locations
  Clone ID: PAT_MRT4530_87311C.1.pep
MRAIASSCRHTQTAAAMAPGSRCSRRQQLLVAVAVVLLLAAAPTGCSAARSKKSYEAIFSFGDSLSDAGNLIADGIPKSLTTARAPYGMTFFGRPTGRCSNGRLVVDFLAEHFGXLPLPPASKAHGADFSKGANFAITGATALEYSFFKQHGIDQRIWNTGSINTQIGWLQDMKPSLCKSDQECKDYFGKSLFVVGEFGGNDYNAPLFSGVAFSEVKTYVPLVAKAIANGVEKLIELGAKDLLVPGVLPIGCFPLYLTLYNTSSKADYNARTGCLRRYNRLAFHHNRELKQQLDELQKKYPETKIMYGDYFKAAMQFVVSPGNFGFSSTMQACCGAGGQGNYNFNLKKKCGEEGASVCSNPSSYVSWDGIHMTEAAYRYVANGWLNGPYAEPPILK

SEQ ID NO: 190947 - protein, 489 aa, Oryza sativa
  Clone ID: PAT_MRT4530_87312C.1.pep
MAPAAAAACAASVRADPPGILDYGAIHACLLGGDRRASLPALALLLLLHFRVLAAAAGTHFSPAVSRLAARLRLSPSMAAVTLLALGNGAPDAFASAAALGGAGGMRRAGLAAILSAGAFVSAFVVGAVALIAAPFAVPPASFARDVFFYLLAASGLFYIYLSAEIYLWQAIGLVLFYVFFVGLVVYMDLDAEGKAVSTTELEVVNGIGRVVMDLPVTVEDRKQQHPTLCTMFSKVTKVWEWPVAFLLKLTIPSTLPTEWNKFYVCANICLCPLLLLYSFSSFIPFDSRIVFLLPQSRFPIWSVVLFVSISLALSHFIFEKEAPITENIASTTISFVMSVFWISTMAGELLNCLAAIGVIMDFPPAILGMTVLAWGNSVGDLVADVALAKSGQPTIAIAGCFAGPMFNMLVGLGTALVIQTARVYPKAYVLEFHVGIVVAFVFLLLSLMGTLLMVTWTRFRVPRFWGYCLMGLYILFTVVSIAIASSSG

SEQ ID NO: 190948 - protein, 518 aa, Oryza sativa
  Clone ID: PAT_MRT4530_87313C.1.pep
MAIGAFVESGGGGGGGGGGGYGGRVTAYVVLTCVVAGSGGILFGYDLGISGGVTSMDSFLKRFFPDVYQKKQDTRVSHYCAFDSELLTVFTSSLYIAGLVATLFASSVTRRYGRRTSMLIGGTVFIAGSVFGGAAVNVFMLLINRILLGIGLGFTNQSIPLYLSEMAPPRYRGAINNGFELCISLGILFANVLNYCVVKITAGWGWRISLSMAAVPAAFLTIGAVFLPETPSFIIERDGDTDKARILLQRLRGTTSVQKELDDLVAASNLSRTVQYPFRNIFKRKYRPQLVIALLVPFFNQLTGINVMNFYAPVMFRTIGLKESASLLSSVVNRLCATFANIMAMIVVDRFGRRKLFLVGGIQMILSQLAVGAILAAEFKDYGSMDREYAYLVLITMCVFVAGFAWSWGPLTFLVPTEICPLEIRSAGQSIVVAVVFLMTFVIGQTFLAVLCRIKSGTFFFFAGWICLMTVFVYFFLPETKKLPMEQMEQVWRKHWFWKKIVGEEEEKQAEKTALPSM

SEQ ID NO: 190949 - protein, 161 aa, Oryza sativa
  Clone ID: PAT_MRT4530_87314C.1.pep
MFSKSAYIRIFSLPLPVVHGLSEGTESTVNVLSEKVDLLKKVFDSLTMPHYVLHCLSRCQSLGSWTRSEDQILSARSPTESSSTLPMVGDHPSPVNTTHQLLHLVSIVAFFGPHSHRDMCETEVKEMGTRIFIQVRAPELSGLTRNRQQGSLPPRIRARRD

SEQ ID NO: 190950 - protein, 190 aa, Oryza sativa
  Clone ID: PAT_MRT4530_87315C.1.pep
MGDRSIRSNEMCHVPTLNTRFFNCSKALSPAALFFCEAHISGRFLKEAAWRLLQSQAHRDSHSNYCCNVLTTHVVGHYHGKYTRHMPQRRLQIWHPYCQNLRGDKSEMSKSTCSFDFCCVEEHGSGGRKSTAVVEEEHGDDSNGRAQQWWEEHDGGGKSTTEAAGGARQRWTDVPSRIRRRYFSHVKSYI

SEQ ID NO: 190951 - protein, 871 aa, Oryza sativa
  Clone ID: PAT_MRT4530_87316C.1.pep
MAGGSSAGTPWPSPSTALTLGLGLGPPAADGSLKSPGLAPPPRRSLRLASGAVASGVASPTTTPASSAPAAGADGASSGSGSASSGRRKGRAQAIPAPVASPTSAGEFGGGGEVRVWGGGNRSGEAAFISLQSGSRVAKRSMELGVQMGGEMGLGSNGGGGAGGQVHDEMPHRNVDSSGKRRKIGMEIPYVSDSESDNDDDCILPGEDGSRMPVQLCAASDLIELNLFTMSMGRTDEGRMGDSVKTGKKKASGVTIRENDIPIDEHVHGQSSAIGESIELLASPMRSALGENHAGMYSTEEERRQKARYDVKGKGKLYLGNDDSGAGTGIGKFSPDSKGKAKMVVEESSLSVSSGADQMDLNSVISEEVQSFPADHWEPRRRERARQRAIEMAPRFAFFKADEDGHSDDGDDDDDNAEELEPVPDPQDWPGPFSTAMRIITDREAKLRARELNSSNLNKSANKVISWIPSKDRKSPLRSAPSLTSLCLQTLSNNAEAIESLAGIPDELKNRLLSSLCHSRKMNVHLLGELMCDNPVTVQLSECSWLSEDDFETIFGKCRTEILQVLQLDLSGRCMPDYMLPATLAKVPNSMPLLKKISLKGNYRLSDSGLDTIISAAPSLSSLNLCECSLLTSTGIENLANKLSLVLTELYIDDCLNVDAMMILPSLQKIKHLEVLSMSGIQSVSNKFVNELIPVHGSNLKELAFAGCLQLTSSSIKTIAGNCPQLSSLDLRNLNRLRDSAMRHLRNGCRLIKKIKLQRNTFSDEAVYRFLEQSGGYLTELCLNNVEKAGNLTAYAIARNCSTHLEVLDLSFCRELTNEALGLIVDSCSSLRILKLFGCTQITDVFLKGHSNSLVTIVGIEGNILKQTGSL

SEQ ID NO: 190952 - protein, 175 aa, Oryza sativa
  unsure (1)..(175): unsure at all Xaa locations
  Clone ID: PAT_MRT4530_87317C.1.pep
MAWSRIARGSQLTQPXPAAYTLHNPAALGQRASSALALSLLADKYTAAAASRXGVSTTSPALRPVAEAATRVVECSDTADKTATAAVPDLGPTRLGEKPREVVLEMGWATCRFLKATAGGGARPPLLPPPPLPRCPPRGSSPVAGRRRPFPLPSRREGREIEMRKGEKRGKERGG

SEQ ID NO: 190953 - protein, 149 aa, Oryza sativa
  unsure (1)..(149): unsure at all Xaa locations
  Clone ID: PAT_MRT4530_87318C.1.pep
KVIDARIVAGVGQEVXKVLRELDLXHVGLQSLLPPSSGLYKGEMHVHQLDEMRGQRLASPRHNRQPPAEEQAHRTDPQRRRRRRSRHANRRNGAPPPAAAPARRHRHAPLHRHRVRRRRRHRRSHGSTNTLAEEGGGGSTRGEEDEHEK

SEQ ID NO: 190954 - protein, 289 aa, Oryza sativa
  Clone ID: PAT_MRT4530_87319C.1.pep
MGTPAVVDDDLRELIDELMNTGPEDEADDRDFEESMATVLSMVTDYLDDPDPPSPELADWAAAAESGAQKVADGLASRVENLRRGLSVFAGTGRPEEAVLRKHAAWTDARRAEAAGIASAARRLREKDLRSLAARGGLVNPRMAELIASVSDAMESDVRHGHVPSPAQLAEVERLEGRVAVASVRAILLKVKLTRGAAAFAGRPGEEALAQALRGHAAAAEAQLAAARAFAGALRRFRALSADANSNPTATRVHKRPSPETEDDLAAPPPRQRRRTLDSGSVSSSGVPW

SEQ ID NO: 190955 - protein, 156 aa, Oryza sativa
  unsure (1)..(156): unsure at all Xaa locations
  Clone ID: PAT_MRT4530_8731C.1.pep
RASCTSNKIXXPXPXXKXXSXPXPLPFXXXXXXPXPXAXPXXXPEPXPXXXPXXLXXPKPXPXPXXXXHXXPXPXPXPXPXPXPXPEPXXXPXPXPXXNXEXKPEPLSEPKPEXEXXPXXKLXPXPFPEPLPXLXLCLXPSLSXSQXXXXXPQPTF

SEQ ID NO: 190956 - protein, 162 aa, Oryza sativa
  Clone ID: PAT_MRT4530_87320C.1.pep
MAVATLSSRSRRACAEAASVLLVLLVIAPSVAAGGDTNGVYEPCADAAVQRGDGFTFGVAFAARGDFFSGGVQLSPCDGRLSLASKGAKLAVFRPEVDEISLLTVNTSAAGGFDPATSGGYMVAFAGRKYAARSPPVFVSNSSYTVTSFTLCLSSQRHTSEP

SEQ ID NO: 190957 - protein, 46 aa, Oryza sativa
  Clone ID: PAT_MRT4530_87321C.1.pep
LYQKKKKKKKKKKKKKKKKKKKKKKKKKKKKKKKKKKKIKKKNKII

SEQ ID NO: 190958 - protein, 256 aa, Oryza sativa
  Clone ID: PAT_MRT4530_87322C.1.pep
MKIQCDACESAAAAVVCCADEAALCAACDVEVHAANKLAGKHQRLPLEALSARLPRCDVCQEKAAFIFCVEDRALFCRDCDEPIHVPGTLSGNHQRYLATGIRVGFASASPCDGGSDAHDSDHHAPPMGSSEHHHHHQQPAPTVAVDTPSPQFLPQGWALQKESSPPLGFQELEWFADIDLFHNQAPKGGAAAGRTTAEVPELFASQAANDVAYYRPPTRTAAAAFTAATGFRQSKKARVELPDDEEDYLIVPDLG

SEQ ID NO: 190959 - protein, 66 aa, Oryza sativa
  unsure (1)..(66): unsure at all Xaa locations
  Clone ID: PAT_MRT4530_87323C.1.pep
MNLPRQRRQKCLLVFLNDITRNIIPSNGTXILLVYYGYRVHPQAHGYTIIAFHPRVFXGYRIYFIP

SEQ ID NO: 190960 - protein, 271 aa, Oryza sativa
  Clone ID: PAT_MRT4530_87324C.1.pep
MKIQCDACESAAAAVVCCADEAALCAACDVEVHAANKLAGKHQRLPLEALSARLPRCDVCQEKAAFIFCVEDRALFCRDCDEPIHVPGTLSGNHQRYLATGIRVGFASASPCDGGSDAHDSDHHAPPMGSSEHHHHHQQPAPTVAVDTPSPQFLPQGWAVDELLQFSDYETGDKLQKESSPPLGFQELEWFADIDLFHNQAPKGGAAAGRTTAEVPELFASQAANDVAYYRPPTRTAAAAFTAATGFRQSKKARVELPDDEEDYLIVPDLG

SEQ ID NO: 190961 - protein, 93 aa, Oryza sativa
  unsure (1)..(93): unsure at all Xaa locations
  Clone ID: PAT_MRT4530_87325C.1.pep
MIWRLIVDYTIKLALRPFTSAPTVGIQPHPLETEIFVPSVRQIQRGXVPRTRWSQLVGSPWFLLVVSQGGAQHSWAVVVLPAPKPRLASTGRA

SEQ ID NO: 190962 - protein, 65 aa, Oryza sativa
  Clone ID: PAT_MRT4530_87326C.1.pep
IASGRKGSSQAGRPSACKPTTVKIADLRRRGGRPPAKIIFAGRRWLVRSACENRNRPPPVAPPPL

SEQ ID NO: 190963 - protein, 37 aa, Oryza sativa
  Clone ID: PAT_MRT4530_87327C.1.pep
MSAIPQGSVLPILGTPVTSCEHLFLPLKTTRVMKGFS

SEQ ID NO: 190964 - protein, 172 aa, Oryza sativa
  Clone ID: PAT_MRT4530_87328C.1.pep
HSHHRLLPQREERKKARALGSHGGGGVIRAPRPRCHPRVPGAELAAAVSGEPRRRLEGSSSRRATSCGHRTSCQRSVVVAAGGGGGGGPHVGAMAAGASVGPVKQVQLAHQPLPPGCPVAVIRRTSPETMAGQSPSFLDSDKIIKSLHLSKPYRCLCEECFYALLERKIFRF

SEQ ID NO: 190965 - protein, 120 aa, Oryza sativa
  unsure (1)..(120): unsure at all Xaa locations
  Clone ID: PAT_MRT4530_87329C.1.pep
SVAIFPGAKATPPPRCPPRVALPHPDPPRPRCPRSXAGQSGPSDLPLGSEPTVRILPAVSPGTPRCRXKGAPFPSSPPXPRSPDPQRVPEPDKARRDPISDALLFAPEIVRSPPGAFPPG

SEQ ID NO: 190966 - protein, 370 aa, Oryza sativa
  unsure (1)..(370): unsure at all Xaa locations
  Clone ID: PAT_MRT4530_8732C.1.pep
MNRVPTSWGFVYSRVNKPGERARGPGPREWDPRGSLTVHGGPGAPGXTPAGAVGPTRQPHPRARAADSRAPCGSRXARPEAATSTRPAGGSARVPMVATGDHRHGGAVAERGEGXGERRRRSTAHPEXTATTETATGVEEGGGAARVDGVDGAPAVGERNGGVDEVGEDAAKSKEAAPRWEVVRGDDGGGPELGGDGGERERRRELDSGEERGRXVAETEVGSSGRVYIGLGVREGGRRRGKWARETRPPLMAPARLGERFPNESEGEREGKMRGKREGIPGNNSPHFIARGXAGGGGIRGGGGARRGRGXRGRREEGDDGWAPPVSEGGGRARPSATRARGGGRVGRGEEEXRGREMGRIRPIREKEGF

SEQ ID NO: 190967 - protein, 393 aa, Oryza sativa
  Clone ID: PAT_MRT4530_87330C.1.pep
MGVPVAQLGKSSGAGDAATGGGGEVADFLLADSSPRRSSSAAKETGLDGTEGTHDGGAAGDHGEAGEAGAAAARGHGGGGEVGPDGDGADGVQEEALVARCVVCRRRQVADEGEGGVCSVCLRRRMLSSVVCVDDMSAVADATAGVGMLYYCPSCDAFGRGGVHDHEVLVLGMFRGDWCAWLTGAERMAPIFLGIESDRLPSPFLGRPYLLQPSPGTRCRVCSDIASLDGLYSRLATLCTISCWAHADHAAAAAAHPWVLSLLEVGCSAQPEQLLDLFCTTCREAFLYGDCHCDDHHHHLLPLVFHSRMGLCVQISRGHWLWSVWESIADAELAADILHSSATSTRLIPIRGRTAQRCRWCQKRLLDGGGTTCSLRCRLSLPTLLPRALRVPA

SEQ ID NO: 190968 - protein, 637 aa, Oryza sativa
  Clone ID: PAT_MRT4530_87331C.1.pep
MSMLPRFLLLVVLLAVPMTAAQQQYEANAQGDCYTDNGSSVLGYTCGTAASPPPPPCTAYLTFRSAPPSYASPITVSYLLNASVPAVAAANSVPVSPPVARDGLLLVPVPCACTAAGYYQHDAGYVIQFDDETYFVMANDTYQGLTTCQALMAQNPAHDSLDLYPGIRLTVPLRCACPSPAQAAAGVRYLVTYLLGWDDDSSTVADRFGADYQAVLFANNLTDDSTVYPFTTMLVPLKHRPKPDVTVLPEPGPPSPAPAPAVSAPPPPAVPSSESGSGRWKKSFRGRCIGIGVGVGFAVLASGALLALFLLRRRWRWRGNGELHDVPLAPDKEGAKATPPPWMLPTTVADVDVRDAVGSMAVYEYGELERVTAGFAEERRIGDSSVYRAVINGDVAAAVKRVAGDVGAELAENGALSDWIRGDNGGRALSWRQRMQAALDVADGLNYLHNYTRPPYVHKNLKSSNVLLDADFRAKVSNFGLARTVAGAGGQMTSRVVGTQGYMAPEYLEHGLIGPHLDVFAFGVVLLELLSGKEAAPARDGGEGGDGEALALLLWEEAEGQLVVDGDDDDARGKVAAFMDSRLRGDYPSEVALAMAALALRCVAREPRARPSMVEVFLSLSALHGTTLDWAPHATLS

SEQ ID NO: 190969 - protein, 612 aa, Oryza sativa
  unsure (1)..(612): unsure at all Xaa locations
  Clone ID: PAT_MRT4530_87332C.1.pep
MSMLPRFLLLVVLLAVPMTAAQQQYEANAQGDCYTDNGSSVLGYTCGTAAFPPPPACTGYLTFRSAPPSYASPITVSYLLNASVPAVAAANSVPALMAQNPAHDSLDLYPGIRLTVPLRCACPSPAQAAAGVRYLVTYLLGWDDDSSTVADRFGADYQAVLFANNLTDDSTVYPFTTMLVPLKHRPKPDVTVLPEPGPPSPAPAPAVSAPPPPAVPSSESGSGRWKKSFRGRCIGIGVGVGFAVLASGALLALFLLRRRWRWRGNGELHDVPLAPDKEGAKATPPPWMLPTTVADVDVRDAVGSMAVYEYGELERVTAGFAEERRIGDSSVYRAVINGDVXAAVKRVAGDVGAEVSVLGRVSHSCLVRLFGLCVHRGDTYLVFELAENGALSDWIRGDNGGRALSWRQRMQAALDVADGLNYLHNYTRPPYVHKNLKSSNVLLDADFRAKVSNFGLARTVAGAGGQMTSRVVGTQGYMAPEYLEHGLIGPHLDVFAFGVVLLELLSGKEAAPARDGGEGGDGEALALLLWEEAEGQLVVDGDDDDARGKVAAFMDSRLRGDYPSEVALAMAALALRCVAREPRARPSMVEVFLSLSALHGTTLDWAPHATLS

SEQ ID NO: 190970 - protein, 343 aa, Oryza sativa
  Clone ID: PAT_MRT4530_87333C.1.pep
GILNAVKKWAHEAEHRNYARHIYTNWKRHFHEKQFQKKFWRVKLAQVTQAGAQAILNTHPEHWSRAWFRWILESRFHPIITMLETIWRKVMVRINDQKAAGAKWTTVVCPGILKKLNVYITESAFCHAICNGGDSFEVKHHDHRFTVHLDKKECSCRYWQLLGLPCPHAISCIFYRTNKLDDYIAPCYYVDAFRSTYVHCLQPLEGMSAWPQDDREPLNAPGYIKMPGRPKTERRREKHEPPKPTKMPKYGTVIRCTRCKQVGHNKSSCSKHQSSGSGTVGSQQQNPSPSQQMSVIKHTMQFCSQQEEEIWQPDYHKHYKPIQDQTLQRARVKPKNIHSKVIL

SEQ ID NO: 190971 - protein, 681 aa, Oryza sativa
  Clone ID: PAT_MRT4530_87334C.1.pep
MLAAGYGVLAVAAAVVLTLPSAVRAAPSNICDMGVATYAANSTFEANLDRLGAELPANVSAARATGGYAVATVGAAPDLVYALALCRGDVNASACGACVAAAFADGKRSCPGIKGATVSGPGDGCVLRYSGQSFMNFLSTEQWQVSEILWYPDHATDSIKVPDVGWFNAAVAKILAALVEHTWATTTSNATAKKYFSTGEEEFNPKIYGFVQCVPDLSPEQCKECVRTLHDQAKIHYMGNSLPWASTYSVWCSLMYSVRPFFGGRAMLQLSPPLPPAVDTPVGTHEPGAGKKKSVAGLAAGLACSVGVLLILSVLVFVRFRRRTKAAETDHPLKKITRAQCMIFDLPTLQEATENFSENNKLGEGGFGTVYKGVLSDGQEVAVKKLLGTTGHGLDQLHNEVLLLAELQHKNLVRLQGFCLHQEQTLLVYEYIKNGSLDNILFDTTKGNSLNWEQQYNIILGIAKGILYLHEDSSLRIIHRDLKSNNILLGEDMEPKIADFGLARLLGEGHTHSRTTRVVGTFGYMAPEYVADGNVSTKIDIFSFGVLVLEIVMRRRNSDSGDHDNVNLLTDVWNSWTKGTISQFIDQSLDGYSRSQAMRCIHIGLLCVQPDPGERPHISSVIFMLTRENMELQPPAQPAFFFGTESASSSTSCGQRSYVYDRYGFASVSVNDVTLTEPYPR

SEQ ID NO: 190972 - protein, 426 aa, Oryza sativa
  Clone ID: PAT_MRT4530_87335C.1.pep
CYQIWLLTDIKVGTGVGWVFISDQQKGILNTVEKWVPEAEYRNCARYIYANWKRHFHEKQFQKKFWRCAKAPCRMLFNLARAKLAQVTQAGAQAILNTHPEHWSRAWFRLGSNCDSVDNNLCESFNKWILESRFHPIITMLETIRRKVMVRISDQKAAGAKWTTVVCPGILKKLNVYITESAFCHAICNEGDSFEVKHHEHRFTIHLDKKECSCRYWQLSGLPYPHAISCIFYRTNKLDDYIAPCYYVDAFRSTYVHCLQPLEGMSAWPQDDREPLNAPGYIKMPGRPKTERRREKHEPPKPTKMPKYGTVIRCTRCNKKRKSVSLTTTNTTSQSRTKHYKSKAPMESQELVRVAASAKVCTEHGGSAQVDLQAIVPHSESSTTASVRLTSGKATVSVSAEEPTKNLPKKKAGGALILLPWETKKL

SEQ ID NO: 190973 - protein, 83 aa, Oryza sativa
  Clone ID: PAT_MRT4530_87336C.1.pep
GGSAGGGELRPRGVTGDPSALRTPAGDRRRDEDREVARIAYHRRRRRGRRHHRPRGEELGFPGGMGRRRSSCGGVRRASCEFL

SEQ ID NO: 190974 - protein, 109 aa, Oryza sativa
  Clone ID: PAT_MRT4530_87337C.1.pep
MKVVSNRSSGLLQELAQKKNRKVCEQAYNMEQNLDPSSDGQGVYQFKTGLASVIKFQQNDMQVLWNFYQEYNSRHRVADMQREQERLLESRTFSTEYALSLIAVNDQIW

SEQ ID NO: 190975 - protein, 324 aa, Oryza sativa
  unsure (1)..(324): unsure at all Xaa locations
  Clone ID: PAT_MRT4530_87338C.1.pep
MDLRRGAAALRLRWLWNEWVAPEKPWAGTALPCNQLDRDLFVAATTITVGNGKTARFWSSKWPEDQTPQQIAPDIFMASGRKNRTVNDAITENNWIRDIEISRITEASHLQQYVRLWTMIRDMRPLNENQDNIRWNLTTDGQYSAKSAYRLQFLGAARSVFNQSIWXAPPKCKFFSWLVTQNRVWTADRLEKRGWQNQKICPLCCTVDESALHLLAKXRLTKRIWAEIQRWTGTDLQMGNWETCHSVGQWWTLVTESPNTPRKPLRTMIILVSWEIWCEHNARIFRNSASPTSSILSKNKEEGRAWVKTGATILQELEILGDIT

SEQ ID NO: 190976 - protein, 72 aa, Oryza sativa
  Clone ID: PAT_MRT4530_87339C.1.pep
MGIGGARFANGDIRLTTPNSVWAVHLFAIVELVSIVYTVIHWWTLSPPCRDNHLRHTPMACPPGFTIPTKIG

SEQ ID NO: 190977 - protein, 532 aa, Oryza sativa
  Clone ID: PAT_MRT4530_8733C.1.pep
MGMSPEPCNSISDCSQQQSHHLTLTQQQDSTIICTNQELDYYYRFYDVDEAAFDGNEVELVSRFSKVTRMDHMISSPYQPTWSPAQAAVDVVGSSETSRVRKKRFWDVLESCKQKVEAMEAMDTPATATFRVGAGDGGGGGGGGAGGGGGGADGMRLVQLLVACAEAVACRDRAQAAALLRELQAGAPVHGTAFQRVASCFVQGLADRLPLAHPPALGPASMAFCIPPSSCAGRDGARGEALALAYELCPYLRFAHFVANACMLEAFEGESNVHVVDLGMTLGLDRGHQWRGLLDGLAARASGKPARVRVTGVGARMDTMRAIGRELEAYAEGLGMYLEFRGINRGLESLHIDDLGVDADEAVAINSVLELHSVVKESRGALNSVLQTIRKLSPRAFVLVEQDAGHNGPFFLGRFMEALHYYAALFDALDAALPRYDARRARVEQFHFGAEIRNVVGCEGAARVERHERADQWRRRMSRAGFQSVPIKMAAKAREWLDENAGGGGYTVAEEKGCLVLGWKGKPVIAASCWKC

SEQ ID NO: 190978 - protein, 115 aa, Oryza sativa
  unsure (1)..(115): unsure at all Xaa locations
  Clone ID: PAT_MRT4530_87340C.1.pep
QVTRAGPHPPPPEALLTFETEPVTTANVSSRRLWLGLKYWENKPVMSQLQVVSKPSRLVHCELEGLEKIARGFPSGYIKGLYLGETLXVSTRAGXLEVREALDKRLGGVVLCRVS

SEQ ID NO: 190979 - protein, 51 aa, Oryza sativa
  Clone ID: PAT_MRT4530_87341C.1.pep
FQSTPNPRFQICDLVFTYMVQLGCPADRSRPQGNTSCTAPSSTDSIVLLNC

SEQ ID NO: 190980 - protein, 201 aa, Oryza sativa
  unsure (1)..(201): unsure at all Xaa locations
  Clone ID: PAT_MRT4530_87342C.1.pep
PSPVDESGRKAGRIGAPPPPPFLIAKLPPGREREEPARAMXIRKQQRPLQGPSILHHTHPSLGTSARGKLYYISSSXPFPLVVSAVSLPVHPPNRSLIAMGATSKTMHPQPTIQSHFSWIIMTXMKLSRISRXTTHQDTKKSKTVIIPSCELVATTALQRLVATTTGSSVLGRPVASSSALSPAMAGGGGKLELGRPQAAR

SEQ ID NO: 190981 - protein, 51 aa, Oryza sativa
  Clone ID: PAT_MRT4530_87343C.1.pep
MVGLTGGREIPSSGGFPAMNNGDRGAARRCRQERRFEGEERLPGCYAMRRS

SEQ ID NO: 190982 - protein, 88 aa, Oryza sativa
  Clone ID: PAT_MRT4530_87344C.1.pep
EAQKNGLFSINSMYKSIMYRDVIPKNDMIWKLKVPLKIKKNLWYLRSGVILTKDNLVKRKWKGSVKCCFCDSNESIQHLFFDCPLARF

SEQ ID NO: 190983 - protein, 47 aa, Oryza sativa
  unsure (1)..(47): unsure at all Xaa locations
  Clone ID: PAT_MRT4530_87345C.1.pep
SXYFXXRILKWCPXXGRIHPSXAXXYFKGXVKLEQXFLTYXSLDDPS

SEQ ID NO: 190984 - protein, 281 aa, Oryza sativa
  Clone ID: PAT_MRT4530_87346C.1.pep
MAASTAAAVAPDWWNDVNNSPMWQDRSFHALATLYGAVSFVALVQLIRIECRVPEYGWTTQKVFHFMNFIVNGVRSIVFVLRRDVQLVQPEVFQHVLIDFPGLAFFTTYALLVLFWAEIYYQARAMSTDGLRPAFYTINGVVYAIQIILWMALWWKPVRAMVILSKMFFAATSLFAALGFLLYGGRLFLMLQRFPVESKGRRKKLNEVGYVTTICFSGFLIRCVMMCLNAFDKEADLDVLNHPILNFFYYLLVEIVPSALVLFILRKLPPKRGITQYHPIH

SEQ ID NO: 190985 - protein, 1269 aa, Oryza sativa
  Clone ID: PAT_MRT4530_87347C.1.pep
MRLDSFPASISVPYEVRSGFQAQGGLPSPSGHTSLRVSVFDSCFCTEVLPHGMYPVYLTGILTDLHEEHSQSSFLGINFRDGDKRSQLADVLREYNVPVIDYPRHFEGCPVLPLSLIQHFLRVCEHWLSTGNNQNIILLHCERGGWPSLAFMLSCLLIFKKLQSAEHKTLDLIYREAPKGFLQLFSALNPMPSQLRYLQYVARRNISPEWPPMERALSFDCLILRAIPSFDSDNGCRPLVRIFGRNIIGKNASTSNMIFSMPKKKTLRHYRQEDCDVIKIDIQCPVQGDVVLECVHLDLDPEKEVMMFRIMFNTAFIRSNVLMLNSDDIDIVWGSKDQYPRNFRAEMLFCELGGISPARPPTATLNGDMKGGLPIEAFSAVQELFNGVDWMESSDNAAFWLLKEFSANSLQEKFQKLILSDMEELSKFQAKVGLQIPLMSPLDSDEEKYSVASDSVSSSEHEKVQPGGNSSDSENINHDLTTEDTASMGNVLVNTPSVLPPTTPPPCGSLSILSTDENQLPPEVQHESPSDRKLPSPSPTAAAPPPPPPPPPPPSGNKPAFSPPPPPPPPPPPPLPQSNYASSQPPPPPPPPPLPNCLVPSPPPPPPPPPILPNRSVPPPPPPPPPLPNHSVLPPPPPPPPPPSLPNRLVPPPPAPGIGNKFPAPPPPPPPPRSSSRTPTGAATSSKGPPPPPPPPLPPANRTNGPGVPSAPPPPPPPPPANRSNGPSAPAPPLPPPLPAAANKRNPPAPPPPPLMTGKKAPAPPPPPPQAPKPPGTVPPPPPLHGASGRPHPPSSKGLNAPAPPPLLGRGREATGSAKGRGIGLAQQSNPPKKASLKPLHWVKVTRAMQGSLWEDAQKQGNQARAPDIDLSELESLFSTAVATNASEKGGTKRGSAISKPEIVHLVDMRRANNCEIMLTKIKMPLPDMINAILALDTSVLDNDQVENLIKFCPTKEEIEMLKFGFPFVHQNYNGNKEMLGKCEQFFLELMKVPRVESKLRVFAFRITFSTQVEELRTNLTTINDATKEVSVTSCKISSYDFSFWLAYSVIDHFVQVKESLKLRQIMQTILTLGNALNQGTARGSAVGFRLDSLLKLSDTRARNNKMTLMHYLCKLLSEKLPELLDFDKDLIHLEAASKIQLKLLAEEMQAINKGLEKVEQELAASVNDGAISVGFREALKSFLDAAEAEVRSLISLYSEVGRNADSLAQYFGEDPARCPFEQVTSILVIFVNMFKKSRDENARTAELEKKKLEKDKEKATLSAKKVLE

SEQ ID NO: 190986 - protein, 85 aa, Oryza sativa
  unsure (1)..(85): unsure at all Xaa locations
  Clone ID: PAT_MRT4530_87348C.1.pep
WKIDVKVSGPCCSAIAVQLVAVLKRTIVFTKTNFICGLWYTVFSPDSTFVEIILAKIHGIKLVNYPCKKVHTLSYRKQLPYXISV

SEQ ID NO: 190987 - protein, 31 aa, Oryza sativa
  Clone ID: PAT_MRT4530_87349C.1.pep
IEAESLHEENDYNRLNPNSSSFFYDIMNPWC

SEQ ID NO: 190988 - protein, 146 aa, Oryza sativa
  unsure (1)..(146): unsure at all Xaa locations
  Clone ID: PAT_MRT4530_8734C.1.pep
GGGGPGGGGRPRRAGXXXGGRGPQREGVLGPQGRAQPRPHGRASPVARRPRRPGLPVPLSLESSPWMGFFFFFSFFLLSSRCSKPQDSPRAPPLGSRIPIAFGLSWTPLCLFFRSKWKLEFELIGPPKKKKKKKKKKKKKKKKKNT

SEQ ID NO: 190989 - protein, 471 aa, Oryza sativa
  unsure (1)..(471): unsure at all Xaa locations
  Clone ID: PAT_MRT4530_87350C.1.pep
MGEVKMSLKCSVDPKFRMPSLEAVFKMVEDKYLHSYKILPPEFSIGSLMNEICQCVVQLGSDHIAEHNTESDVAGNGRCSQNEPMTGSIPFVKPIACEDGGNRKCKSAGESFIVEDSENSSVAKQQTHLALANLKPIHDVTDISKGEERVRISVANEFASEKCPPSFYYIRGNLVFQNAYVNISVARIGDEDCCADCFGNCLSAPIPCACTRETGGEYVYTPEGLVRTPFLDECVSMNRFPEKCHKFFCKSSCPLERSRNEASPEPCRGHLARKFIKECWSKCGCNMQCGNRVVQRGITCNLQVFFTGEGKGWGLRTLDELPKGAFVCEYVGEVLTSTELHERTLQNMNNGRHTYPVLLDADWGSEGVLKDEEALXLDSTFYGNLGVFINHRCYDANLVEIPVEVETPDHHYYHLAFFTTKKVEAFEELTWDYGIDFGDGKDPVKAFQCLCGSKYCRGIRHPRKRGKAAAK

SEQ ID NO: 190990 - protein, 101 aa, Oryza sativa
  unsure (1)..(101): unsure at all Xaa locations
  Clone ID: PAT_MRT4530_87351C.1.pep
SLARFLIANKDFIEVSADFMTSDIQPMYVLTFGSVLIXYYIIVSRLVSTGCYYCFITLLSINCIYIVIYIGHISDCXNPIDIGWYRHQLNYSIGLTTNWLI

SEQ ID NO: 190991 - protein, 49 aa, Oryza sativa
  unsure (1)..(49): unsure at all Xaa locations
  Clone ID: PAT_MRT4530_87352C.1.pep
FFFFFFFFFFFFLTKRKKIILQKQLFKTSINNPDQHPSXSKSCDFVTNM

SEQ ID NO: 190992 - protein, 1205 aa, Oryza sativa
  Clone ID: PAT_MRT4530_87353C.1.pep
MESTVLSLGKSVLSGALGYAQSAVAEEVALQLGIQRDHAFIRDELHMMQAFLMAADEERDKHKVVKAWVQQVRDVAYDVEDCLQDMAVRVGKPSWWRKCSPRMLLERRRVAQKMKELRAKVEDVSQRNNRYRLIDGSASKATDGMQSRIAGATTMSELEETRRQQDKAKMDLVGLINTNDKELRVIGVWRKNGLLDDKSIIRRAYDDLKMRKFECYAWIRLKSLCNQTWLLQSISRQLYENSLQETREFKMEATDLVDRILQKMGNMEEDDLVSAFEGYLNEKSYLIVLTDLSSLEEWNKIKICFPSNDRGSRIILCTEHVEVARLCVPQDSVPPEHKKLLDDQIIYAFYEKGSQDGTLLVEPSSSSNITTSNGNNNLTANKKLGRTETMVSTLEESQLIGRAKEKSDIIKLIKNQVSQQSQVISIWGMGGLGKTALVQDIYRSQDVSSYFDARACVTVLRPFNSGQLIHSLAKQFGNEEKRDLSELLERKSYLVVLDDLWDTKEWDDMVAQFPNKAGSCIIVTTREENIAKHCSKETTNAHIYKLSGIENDQALQLFTKKVFKEKTNLDEQYPYLVEQANLILKKCNGLPLAIVTIGGFLANQPKTALAWRKINEHISAELEMNPELKTISTVLLKSYDGLPYKLKSCFLYLSIFPEDHKVSRKRLMQRWTAEGYTTEARGKSPIEIAHDNFIELISRSMTLPVAQNASRPEGGIDYCQLHDLMREISITKSMEENLVLRLEKGCSSKTQGTARHLAISSNWEGDKHEFENTVDLSRVRSLTVFGKWKPFFVSEKMRMLRVLDLEDTEGLVDHHLEHIGKLVHLRYLSLRECHNICHLPDLLCDLRQLETLDIRSTFIAMLPKTIVKLRKLKYLHAGKIGIVGQQSIAERSLELCTGACCACYVPRLVGDFNRRDACNYNCCIQPRVLMMDLDNDFPMLPRGSRKLKSLHTLRHVHLAWGNTVIQEIERLTQLRKLGVVGINKKNGPSFYSAISKLSQLESLSVCAGWCQGLHGTSSSSSTSPPPENLQSLKLQGALGKLPQWIGKLQNLVKLRLMWTELEDADAAIKVLGTLPRLAILRLWEHSFNDHVVCLNFRQEQQEATAVVLFPSLRVLEVSRICSHDRLESVQFGGGATPKLELLQFSHFIGSRVGFSSGLEELENLREFMLSGRQRQYRDDFVKDVEEQLANHPNPNKPLLRFSLYN

SEQ ID NO: 190993 - protein, 95 aa, Oryza sativa
  Clone ID: PAT_MRT4530_87354C.1.pep
MSRGDSVRPLSDVNQEDVGEKTEAAEEEAPTELSAEAEQEAEQRGEEDFKLKKHCSSRPVKPNPMYHGPQWAVYVLSTWLHGLARFTISVGFLGS

SEQ ID NO: 190994 - protein, 85 aa, Oryza sativa
  Clone ID: PAT_MRT4530_87355C.1.pep
MPSCAAGRRRSPVSAVAGSAGAGGTTRSERRVPLWNLSNVVGGRARAAKAEKSSLTGRVANVKKGFLAVADVGFYRWGYDKIIYL

SEQ ID NO: 190995 - protein, 47 aa, Oryza sativa
  Clone ID: PAT_MRT4530_87356C.1.pep
MGSSRRWWRLGCGGDGDRELEAANGMEGDQVRVFRLSAGSGYDGKGG

SEQ ID NO: 190996 - protein, 115 aa, Oryza sativa
  Clone ID: PAT_MRT4530_87357C.1.pep
MHTSLNCTNQIQRTYNLRKLQLYITKIAFCYITKVTFVNTFDLACPESVQDDDEKRQESEKSKMKAKQLDNIKPQGMKSQAGTNQICKLHKSMTEEIMKKKEQTGSYQLHDTGKN

SEQ ID NO: 190997 - protein, 236 aa, Oryza sativa
  unsure (1)..(236): unsure at all Xaa locations
  Clone ID: PAT_MRT4530_87358C.1.pep
IWRKNRISSTIAYLRSVTHAASALTRFEIGEPLPMFDHGPPAGIVHRPXVVAPSIEQQQRRAQEEEGAVVDDHLVGDVAGAPSXSVTREERGGGGGEEMRMVVRNSSLAEVAAGLEEYFLKASVGCVAGDAMSSHLESSMDFVHGGPNNILDALCCVSAPSVAHDHVDSINGEQRHTPTMXQQLAWEKKLYWEVKARERLQVQNDKKLAELSDQEYSRKIDVDVLKAMEAFEPDRS

SEQ ID NO: 190998 - protein, 160 aa, Oryza sativa
  unsure (1)..(160): unsure at all Xaa locations
  Clone ID: PAT_MRT4530_87359C.1.pep
MVRQRPQEEKRARKRQCCRPDQNRARFSLAAYDSTPTRHCSTTGGQPPRAATRALSLRAPCWTPTHYTASHASNAMLAYRPPVTPPCHTPAPPPTSTACSPPHPPQRHXPTPPPCEHATASNRSLHVLPLPAAFSPPRVAFALSAPLPAHPPLPSPPLPP

SEQ ID NO: 190999 - protein, 2045 aa, Oryza sativa
  unsure (1)..(2045): unsure at all Xaa locations
  Clone ID: PAT_MRT4530_8735C.1.pep
YKRDPSGGPXGIESQSQHIHHSLXNPRTSVPQYPLYPVYGYPPSIVARQVGGXSSFVDNSVNTNLNQGVPTSITLVWTQVGEIVFPVYTTVPISVGPPMAGNENAMATTRGDSMSKDPPAEAEIGTSMTSEPEKDPSAAKPCISNKNHEPTRITSEVTRSWCPIHKTRKHTLQACWVFLNVHAEIRACKERGIQRTSPTRDVYCPIHKTKNHDLSSCKVFLSAMKTPPPKVQQSRNPIRDEDKEQGATLISDRFVGVIDIDPHEPSVLHLLEDYGSSTTSTPREVLAIDDVGTSVRTNSEAENQVTTPAQHIRAVNAILREXPYYPILNDNLACWTEXLRESVTNLSNAFEEAAATTHLEQPPTGDANGEDPERRESPHRATPPPRGTGDLRNHLNGRREARRTRDNENHSRRHVSSRRHDNGDNRHNRHDHDDRERRVLGDTGQGRRHNDDDDGDRRRDNNRRRXQDSREPGRRPRNRMPEPSDPSSSSSSSSSSSSDRHPRRTYDRRQPTAPSTGCRAFGRSLRDVRWPERFXPGAIEKYDGSTDPEEFLQVYSTVLYDAGADDNALANYLPTALKGSARSWLMHXPPYSISSWADLWQQFVANFQGTYKRHAIEDDLHALTQNQGESLRDYVRRFNECRNTIPEITDASVIRAFKYGVKDHYTAQELATRCVTTTRRLFEIVDRCAHADDALRRKNDKPKTGGEKKPAKDAPESSKKKNRKSGKRKAQLEVLATEYADPPKRPDPQGSDTKKAWCPIHKSDRHSLEDCLVFKKSLAKHMASEKGKRVRVAEKDSEAPTQESDSAYPDSDLHVSHIFXVPRRRYPIVVKPTIRNIKVARVLIDGGSSINLLFASALDAMRIPRSELTPTDQLFHGITPQSSSKPLGKITLPVTFGQANNFRTEQITFDVAEFDTTYNAIIGRIALAKFMAASHYAYQVLKMPGPKGTITIQGNAKLAVQCDKRSLNMVEHTPSPPATADPPKKVSKTNKMLKPDGAIKIVPLSSANPDKTELALITFLRDNADVFAWQPSDMPRVPREVIEYKFMVRPDAKPVKQKLRRFAPDRKQAIREELDKLLKAGLIREVLHPEWLANLVMVGKANGKWGMCVDFTDLNKACPKDHFPLPRIDQLVDSTAGCELLSFLDAYSGYHQISMAKEDKEKTTFITPFGVFCYVKMPFGLITAGNTFQRTVQGALSDXLGNNVDAYVNDIVVKTKTSDSLIDDLRETFDNLRQYRLMLNPEKCTFGVPSGKLLGFLVSGRGIEANPEKIKAIENMKSPTRLKEVQKLTGCMAALSRFVARMGERGQPFFALLKKQDKFVWTQEAEEAFIALKRYLSNPPVLVAPQPNEELFLYIATTPYSISTIIVVEREKVQRPVCYVSEALYDAKTRYPQIQKLLYAVIVTSRKLRHYFQAHRVTVVSSFPVGEVVRNKDVVGRIAKWVVELSQFDIHFVPRIAIKSQVLADFVADWTMPDNRSDNQIYNETWTMAFDGALNSQGAGAGFILTSPSGDQFKHAIHLNFRATNNTAEYEGLLARIRAAAALGVRRLIVKGDSELVANQVHKDYKCSSPELSKYLAEVRKLEKRFDGIEVRHVYRKDNIEPDDLARRVSRREPLEPGTFLDVLMRPSVKEATGEDXPGRPNIGSGATEAERAVADIETTDDWRTPLIKFIGSEELPEDDAEAEKISRKAKVYCMIGNDLYKKAPNGVLLXKCVSSDDGRHLLLDIHEGICGSHAAGRTLVGKAFRQGFFWPIALKDAYDMVQRCEAYQFHSNYPSHLVVLVLGARYTRAIPTRTGRLQVPIXVAIDKFTKWIEATPTGEIKVDNAIKFIKGIFCRFGFPHRIIXDNSSQFISADFQDYCIKLGVKICFASVSHPQSNGXVERANIIVLQGIKTLLWVVRTTPTTSNKETPFFLVYGSEAMLPTELRHQSTRVQKYSDEDQEQQRYDDVNLLEEHRERVAVRAASYQQALRRYHEKRVRARMLSIGDYVLRRVQSQAGRNKLSPKWEGPYTITQVLRPGAFKITDGDGRKLAISWNIDQLRKFYV

SEQ ID NO: 191000 - protein, 152 aa, Oryza sativa
  unsure (1)..(152): unsure at all Xaa locations
  Clone ID: PAT_MRT4530_87360C.1.pep
PPPSPTPTIAYLRSVTHAASALTRFEIGEPLPMFDHGPPAGIVHRPXVVAPSIEQQQRRAQEEEGAVVDDHLVGDVAGAPSXSVTREERGGGGGEEMRMVVRNSSLAEVAAGLEEYFLKASVGCVAGDAMSSHLESSMGCRIEAFMPLITTT

SEQ ID NO: 191001 - protein, 106 aa, Oryza sativa
  Clone ID: PAT_MRT4530_87361C.1.pep
MAQQKVVLRVPTMTDDKIKQKAIEAVADIYGIDSIAADLKDNKMTIIGEMDTVAIAKKLKKIGKIDIVSVGPAKEEKKEEKKEEKKEEKKEEKKEEKKEEKKEEKK

SEQ ID NO: 191002 - protein, 48 aa, Oryza sativa
  Clone ID: PAT_MRT4530_87362C.1.pep
RQEGATAAAAAGERVDDAERYSSTPHCLRDHELHRHSDHYQELQNGLL

SEQ ID NO: 191003 - protein, 86 aa, Oryza sativa
  Clone ID: PAT_MRT4530_87363C.1.pep
MAPAALHHKLYTTETAQETEGSRIHLQKRHCTILLLCSWTSLELKTPNDFKNKNKKKKKSQEHEQCNGCEVRGEGFAFAFASLGDD

SEQ ID NO: 191004 - protein, 125 aa, Oryza sativa
  Clone ID: PAT_MRT4530_87364C.1.pep
MAVFPRIPSSPKNTVQSNPQNFTSHTMADLNPNPQHFLRQGQVVHHGGNLRVLCVDLTVPQCPPRRHEDVCIAIVEPGVPEQDWYHHRALISDHIFEVHMYEENNLATDVRSCRSEKQLGDDSDW

SEQ ID NO: 191005 - protein, 60 aa, Oryza sativa
  Clone ID: PAT_MRT4530_87365C.1.pep
MAGPDMPCPSAMPGLASVPAVPSRLIGPRPIVAVHPVARVASHVVPREKTLSSSSLKSEW

SEQ ID NO: 191006 - protein, 1046 aa, Oryza sativa
  unsure (1)..(1046): unsure at all Xaa locations
  Clone ID: PAT_MRT4530_87366C.1.pep
MAAKNSKLAAQFEADASTSAAEVTGGVFAGVSIFVDGFTVPSSQELKEIMLNNGGRFVNYFSRNTVTHIICTHLPNSKMSNLRAFSKGLPVVKPAWVVDSLAENRLLSCSFSSPSLTNSLLLEGSQDHNSGCEKEGSLLKEEASKDSLSSDDHKASMFEEQDSEDFVDEAGNAYETACSERRDNDMDGKLHVAESPDIRSRCSNLCSTSSTGSHLSLDSLDRNATKSSSRTHSTLTDPNFVENYFKYSRLHFIGTWRNRYRKRFSNLLGDKSSKGNRDHSGKNNTIIHIDMDCFFVSVVIRNKPELHDKPVAVCHSDNPKGTAEISSANYPARNYGIKAGMFVREAKARCPHLMIVPYDFDAYGEVADQFYGILHKYCSKVQALSCDEAFLDMTECLHDNPEEVTQKIRNEIFGTTKCSASAGISGNMLIARLATRSAKPNGQCFISSEKVDGYLNTLSIKALPGIGHTVSDKLKSKEVEYCGQLRNIPKESLHKDFGKKIGDMLWNYCRGIDHSVVEAVQETKSVGAEVNWGVRFNDNKDAENFLVNLSKELKTRRKGAXEPIKFMGCGDCETVSRSMTIAGATDNPVTLQRIAKQLFSSFCVDVKEVRGVGLKISRLEHADLARGAPQGNMLESWLASPSDKLKKHSTEKACLLKNRDDAATSERRGFGSIRPSGIGGTSRSSEVNPPSDRSTRVGVELPPLSELDLEVLKNLPPEIIYEMNDMYKGELHGFLGITSGDKAKESNTKSLVFPAVDQNLVPVLDTKLHGDGKHKDSIHFKKEADIKGPSGEQLSELKQANAPRSIASELVDIPTKSVIQHDFMPNSLSQADVTVLQELPEDVKADLFNALPLHRSGDPTCSTSHVSENKFPQDGRSDDPKQHPQICHLPGNSQKWIEEFRVSHCLILNVIAEQHTDSISSRPLSSVLEPVISYLPLCPNSGTEEWNEAFASLSELLTQYIHQKVESDIEELHKCFRLLKRLQLAKKFVLEVSLCLWNTRWGIGDEFGNCSQSLVILIHSADVDTLKSSIQQKIVTLQIDNIYQLD

SEQ ID NO: 191007 - protein, 82 aa, Oryza sativa
  Clone ID: PAT_MRT4530_87367C.1.pep
MAVPVAGSGEAATPAGGALSALALVFEVGVTACIAPEVVLSDGAGSRCKEYAVSAKIVEVEECQCFPDCHFSSVKIMMPNLS

SEQ ID NO: 191008 - protein, 372 aa, Oryza sativa
  Clone ID: PAT_MRT4530_87368C.1.pep
LDIFYSVVALQVLSMNLFGCWVDGEAAIDSIPFCHSLVQVAVATNNEKLKRFIKDDMLPAIIRRLYDDLPCAVQKTIRKLSPLMNSINCRKATKDLLVLCQEIYKVYIRCQNLEGEDQDTDNIAYWFDDWLTKQKKELCVKASYAIPDEFPATLWNWEFEEEFQRYLPTYLDVLHEVDTMDCQECCCLDSAKIFENLSLEFRSRHGVRSHTDHVVWMISNLLQRKMPGAYSEQRADRISKWTCELIKSKPYIKLSNGWNNAMNRLKENFVINVDTKPDAIDAVNSFYNSILLLWEPQFHPLIREGQMDVLVEIAHQLAFAEERKNYEPLEPDSLDFLDHLQPYAKLYIYRKKTESGYFTAIEQVQLHKEFDR

SEQ ID NO: 191009 - protein, 380 aa, Oryza sativa
  Clone ID: PAT_MRT4530_87369C.1.pep
MVAAEAAAAPAPPHDAVAAVAVGMVGAAGTVDEQKAAGVGILLQISMLVVSFVLGHVLRRRKVYYIPEASASLLIGMIVGGLAKISNTQRSISLAPKPFFSNFGAIITFAILGTFIASIVTGLLVYVGGLIYIVYKLPLVECMMFGALVSATDPVTVLSIFQELGTDVNLYALVFGESVLNDASLILSNLFKYAALGVENLHNLESCLFVLFPYFSYMLAEGFGLSGIVSILFTGIVMKRYTFYNLSEDSQRFTARFFHLLSSLAEAFVSLYYLQGLRGAMAFALALQSIHDLPEGHGETIFTATTSIVVLTVLLIGGSTGTMLESLQHNFDGNNAGYPGQRYGEETSTSSNFTMKLKELQRRYSSSHLILKLYLLIALL

SEQ ID NO: 191010 - protein, 275 aa, Oryza sativa
  Clone ID: PAT_MRT4530_8736C.1.pep
MEMDKFSSSYQPSWPPAQATVDVVGSVETPARRAFQRVASFFVQELLDRRASAGAGPCEHGVLHPAVVVREAYAEGLGMYLEFRGINRGLESLHIDDLGVDADEAVAINSVLELHSVVKESRGALNSVLQTIRKLSPRAFVLVEQDAGHNAPFFLGRFMEALHYYAALFDALDAALPRYDARRARVEQFHFGAEIRNVVGCEGAARVERHERADQWRRRMSRAGFQSVPIKMAAKAREWLDENAGGDGYTVADEKVCLVLGWKGKPVIAASCWKC

SEQ ID NO: 191011 - protein, 147 aa, Oryza sativa
  Clone ID: PAT_MRT4530_87370C.1.pep
MVDIKSTEVDPDNVIPITMDMLTSEQKQGHKVDLPPVDEKPESSSANDDKLKEVKAEGLKREDDGAPEFNNLQDRSVWSNQIDENKYEDTYQFTYWRGRRRFKSDVQDRTSDVHFTDFSPVSGGDGVGVFCFARHTFFVLGMGGGFF

SEQ ID NO: 191012 - protein, 151 aa, Oryza sativa
  Clone ID: PAT_MRT4530_87371C.1.pep
RKAAGVGILLQISMLVVSFVLGHVLRRRKVYYIPEASASLLIGMIVGGLAKISNTQRSIRRWFNFREDSFLLFLLPPIIFQSGFSLAPKPFFSNFGAIITFAILGTFIASIVTGLLVYVGGLIYIVFKSPLAACMMVRRSGVRHLILVQHC

SEQ ID NO: 191013 - protein, 185 aa, Oryza sativa
  Clone ID: PAT_MRT4530_87372C.1.pep
GSQQHPRLFLFSLFTSAEDEADEEEVIVCGDDLGLHGVVIGCRIEGGRVDAHVGDELRLGGGAQGHLDFMALPCFGSSSGGVADVGAGEVGELVEEYPSWPAPRPLVDGPAVERRTQGSVHDAHLRHDLILSWFSTQQPTGSIYTIINRRTDLQSQSESTPTAYRYRRPPAEAEEEGERRAIPAG

SEQ ID NO: 191014 - protein, 473 aa, Oryza sativa
  Clone ID: PAT_MRT4530_87373C.1.pep
MAGCGGGGGGGEACVRRRRGKTRVRYSATPKLVSYVCVHSPTLNPASDDYAMEPQIIAAHDDLLLIRLILGRGNRFTVSLADYFVYQASIADDIPPSLTRITHPGPMITFTNHEVAILHYIPEDTHHHPYALRPHNPLSSSSKQHYIVTAFSVNRYRPPGEYKLHLYHSHTQQWTTTHFNLAATMPDLSPFHHRTTNVINLTHQSPGLMAFVDLWQGLLLINVLDKVQPAAPRYIPLPPPLKQGKVISGRVDPTDVRDIAVDAKGHINFVELEVDAIQHESDRTGYISQGWTVAKWSCSNTESDDCCWHMDCKLNASDISHLMPPELPNYCHPTPTLERLHIGHPLLSLDNNGDVVYFMAKVDHRDYKAWVIPVDMRKRLIHEPAVFEGAPRTLGIGSTFIQTTISNYPQPAPGKKRKQKQPGMLLGSSSKRKSETPYLTNVVLPLPTRHGVQKQPDAEGGSMEAEFSDNMLL

SEQ ID NO: 191015 - protein, 51 aa, Oryza sativa
  unsure (1)..(51): unsure at all Xaa locations
  Clone ID: PAT_MRT4530_87374C.1.pep
KSICPIGQSIRYHSSSQXDTHAHAAPSGSWPSTLSLVDIVSIPLSPTGEYL

SEQ ID NO: 191016 - protein, 1365 aa, Oryza sativa
  unsure (1)..(1365): unsure at all Xaa locations
  Clone ID: PAT_MRT4530_87375C.1.pep
MATSPSALHMQAVALGAAVFLLSCLASAQQPPAPGCLDKCGDINITYPFGVGGAHCFRDKSFQLECNVVVNNSHPRLIMPAYNQQLLSLSPDGEALAALDIQHEAYYYNCNASHPTASASSQPNNMTFATLNKSTVYRFPVSTYRFNATTNSYVVPVALDWAIRDVHNCSAAKLNATNYACRSANSKCSDTTDGAGYRCRCSGGYEGNPYLHAGCQGLTTGSIIGIGVGSGAGLLVMALGAAFLTRNIKNRKARILRQKFFKQNRGHLLEQLVSQNADIAERMIIPLAELEKATNNFDESRELGGGGHGTVYKGILSDLHVVAIKKSKVAVQREIDEFINEVAILSQINHRNVVKLFGCCLETEVPLLVYEFISNGTLYDHLHVEGQPSLPWEYRLRIATETARALAYLHSAVSFPIIHRDIKSHNILLDVSLTTKVSDFGASRCIPAEQNGVTTAIQGTLGYLDPMYYYTGRLTEKSDVFSFGVVLIELLTRKKPYSYRSPQDDSLVAHFTALLTHDNLSDILDPQVKEEGGKEVNEVAVLAVACVKLKADERPTMRQVEMTLETVRSSLLRQELVPSVAAEESKEKHVSWSYPSYRLILALEFMSISAKSPYYIRLAKPASKQASRTTYEVRAKMSEMAVALAILLVGLAPATPLSSAQQPPGCPSTCGNISIPYPFGIGAGCARDEGFQLECNHTSSPPLLIVSNSTGGRHRQQLLSLSLADGEARTFLTAKRRCYNSSTGDMVSENDQNATEMSLSGTPYRFSRSRNRLVALGCPNLAYLVDGRGSYISSCTSICRTPESVAAGSTVGFTGEGCCQSSIPYSVDVYKPDIIGFKQGQAGDSVLLNSTAASSILQSSTVCRYMYLAEDRWIDAAYRDGAVDFNRTDDFAVHVVLDWAVRNAGNCSAARRNLAAANYACRSADSVCVDTGDGDGYRCNCSKGYEGNPYHDGGCKANFIRFGRSAXDINECERAKEYPCFGVCINTLGSYQCSCPPGTSGNATIQTGCVKTNQVGISKGXIAERMIIPLAELEKATNNFDESRKLGGGGHGTVYKGILSDLHVVAIKKSKVAVQREIDEFINEVAILSQINHRNVVKLFGCCLETEVPLLVYEFISNGTLYDHLHVEGPTSLPWEYRLRITTETARALAYLHSAVSFPIIHRDIKSHNILLDGSLTTKVSDFGASRCIPAEQNGVTTAIQGTLGYLDPMYYYTGRLTEKSDVFSFGVVLIELLTRKKPYSYRSPEDDSLVAHFTALLTHGNLGDILDPQMNEEGGKEVKEVAMLAVACVKLKADERPTMRQVEMTLETIRSSSLQQEVVPSVAAEESKEKHVSWSYPVCEGTSIESSRQYSYEEENLLSSRYPR

SEQ ID NO: 191017 - protein, 233 aa, Oryza sativa
  Clone ID: PAT_MRT4530_87376C.1.pep
MAMEQVMVEGLASFLVVFWSCVAALMQEMYGTLTFPMVCLVVAMTVAFVLSWLGPAHFNPAVTITFAAYRRFPVWPKLPLYVAAQLAGSLLACLSVNAVMRPRHDHFYGTAPVVVHGTRLPFLMEFLASAVLMIVIATVATDGTAGKTVGGIAIGAAVGGLGLVIGPVSGGSMNPARTLGPAIVLGRYDGVWIYVVAPVAGMLVGALCNRAVRLSHRIVAFLCGTSVGIAGSP

SEQ ID NO: 191018 - protein, 453 aa, Oryza sativa
  Clone ID: PAT_MRT4530_87377C.1.pep
MESESRLCSYGDRRDGLRRRATDSPTIWHAKGRRAPRASYSTAAANCRALGFRVPRPLAAVVPRAWRSACSTVVAMIIPKKNRNEICKYLFQEGVLYAKKDYNLAKHPQIDVPNLQVIKLMQSFKSKEYVRETFSWQYYYWYLTNDGIEHLRNYLNLPSEIVPATLKKSARPPGRPFGSGPPGDRPRGPPRFEGDRPRFGDRDGYRGGPRGAPGDFGGEKGGAPAEFQPSFRISTPSAPAHSPLADEEGHGRSEAKRRTGERGGRGGPSSLSYGDYNDWWTWADPVPGICCGGDSEVAEDGITCDFLLKLLRAGSMVGADAALLQELESRALHTSPSQLSRPGYGRLTSRRSRPRRACQRPMSLTRRRFQPQPPSLPNIYVASTSILEVEAIDKHYQQQKQDVSSQKQWKKIWIHIGMSRQSSIPALHNCIALCRVEFIDNLESTLIGGALTS

SEQ ID NO: 191019 - protein, 98 aa, Oryza sativa
  Clone ID: PAT_MRT4530_87378C.1.pep
HGSTPDKHMDFVGLLCCNTSLPNIYVASTSILEVEAIDKHYQQQKQDVSSQKQWKKIWIHIGMSRQSSIPALHNCIALCRVEFIDNLESTLIGGALTS

SEQ ID NO: 191020 - protein, 179 aa, Oryza sativa
  unsure (1)..(179): unsure at all Xaa locations
  Clone ID: PAT_MRT4530_87379C.1.pep
LALELHRRGGRSRTSGSPGLQEFGTRILELNQQQHLSPSCLVKSFALPRRRRCLAGGRQLRLRQRVAYCRRRAAGGMPKMFPLIVGRPTAHPPKKPSGSSAWLPFPTKGETPWKGNWEKLGGWKKTGGKKPGRGFRGFANTPWANFFWAPQFWPTGLAPWAWPPWGNWEILFLSFPXPP

SEQ ID NO: 191021 - protein, 124 aa, Oryza sativa
  unsure (1)..(124): unsure at all Xaa locations
  Clone ID: PAT_MRT4530_8737C.1.pep
VSRSSADAEYRAVAHAIAKCXWLRQLLLELHIPLASATVVXCDNVNTVYMTANPVNHRRTKHIEIDINFVXEKVALEQVWVLHIPSSHQFADIMIKGLPXVQLFTKFRSSLCVRDTPASTTGRY

SEQ ID NO: 191022 - protein, 122 aa, Oryza sativa
  Clone ID: PAT_MRT4530_87380C.1.pep
MDVIGVDEIDDVGGGKGPEGGGRGRAQLKPAYRPCVRNCAGVRGQGTRPPSATGRSVLRPAMRLGSGSGSGRGDEDRRAFGLLQAHLRLPTDCRLFALHARRTAQRVLVPATSVVRLRINGC

SEQ ID NO: 191023 - protein, 110 aa, Oryza sativa
  Clone ID: PAT_MRT4530_87381C.1.pep
PPSCCVPVVPLWSLVFTINNVTCELPIPQTRLSLPPLPPCGSFFFFRRLGYSGFPWLSFFLFFFGFVLVWLLLFASAGFILVDVVVENVKGKKKTIKKKIKTPKKKKTTK

SEQ ID NO: 191024 - protein, 438 aa, Oryza sativa
  unsure (1)..(438): unsure at all Xaa locations
  Clone ID: PAT_MRT4530_87382C.1.pep
MGFVESIGRYRVGRTIGAGTFAKVRLAVDADTGATVAVKVIDKRMVIRNNLMYQVKREITAMKLLNHPNIVKIYEVIATKTKICLVMEYVSGGQLSDKLSYLKRLDEKEAKKYFYQLIDAVDYCHRRGVYHRDLKPENLLVDNQGNLKVSDFGLSVLKKPGQFLSTSCGSPCYVAPEVIQHKSYDGAAADVWSCGVILFELLAGYLPFQDCSLTNLYRRISRAQFVFPQWLSVPQKKIIIRILDPSPITRAKISDIFDDKWLQDHCNPSARIENDDDCDVIEEASTDSDSSHNTEVKETEEMTAETDRFINAFQLIARCSDLDLSGLFQEQKTKLASPHPVQETFDKIKVAAKDVSMAVKRMNSSLVEIQDSKLLPRSNLDLTLSAEINLAPPQDSTMHNLLNGNAMHMXVNLQFCRSLSSLLNGGQLSASSSDMECD

SEQ ID NO: 191025 - protein, 114 aa, Oryza sativa
  Clone ID: PAT_MRT4530_87383C.1.pep
MPAASSPLPLPLLLLLLLAVAGAGAAGAGAGVGVSGGGQLWCVAKNNADDAALQAAVDWACGPAGGADCRAIQQGGACYDPPDLLAHASYAFNDYFLRAGGAPAAPAACDFSGA

SEQ ID NO: 191026 - protein, 380 aa, Oryza sativa
  Clone ID: PAT_MRT4530_87384C.1.pep
MSAVHAENYMLKLAGRSRQRHGRLNLVNKNDLNVVSNLADCSSIICLQEVWLGNDELVDMYEKRLGDANYSLFKLARTNNRGDGLLTAVNKNYFHVLNYRELLFNDFGDRVAQLLHVESAMPFWQNRSSSCIQQQSLIVNTHLLFPHDHSLSIVRLKQGFVSSYDTAHQYSDSEEDAHKWVSHRNHRGNICGVDFIWLLNPNKSRKPLKTSWNEAVFGIIKYLLLQVASLSEENAFALLKADSPDDQITYSSFCQALCQLGMVHPDRLNSEEIKDLWSEADHDGDDIVDYKEFQRCIWSPTCCSQEEEDDTEIDISDGSLVTFEANDEAFGFTVKEAVLFPPEVEKGMWPENYSLSDHAPLTVVFSPVRMPCSPRTPRTP

SEQ ID NO: 191027 - protein, 84 aa, Oryza sativa
  unsure (1)..(84): unsure at all Xaa locations
  Clone ID: PAT_MRT4530_87385C.1.pep
MVSMNGKSSTRTILGLYHIVSGLISPSSTXRSTDPRYIRNPRAGPKGSNLTANTPTTAYEAGAHRSQVAGRSSRTNSTTISSVS

SEQ ID NO: 191028 - protein, 98 aa, Oryza sativa
  unsure (1)..(98): unsure at all Xaa locations
  Clone ID: PAT_MRT4530_87386C.1.pep
MAGNGPNNKEDPLNWGAAEADMAXGRHLDEVKRMVAQIREPMVKIQGXATLRVGQVAAVRXAKDAGWVAVELHXQARPHLKAKIEWIQNCIVHSGNIY

SEQ ID NO: 191029 - protein, 55 aa, Oryza sativa
  Clone ID: PAT_MRT4530_87387C.1.pep
ITRTKHQAVLTTIVTYTPTHSEKLNEQIKWHKVNGRSSNEINMGFQLFVTLTNGA

SEQ ID NO: 191030 - protein, 93 aa, Oryza sativa
  unsure (1)..(93): unsure at all Xaa locations
  Clone ID: PAT_MRT4530_87388C.1.pep
YLITLTSISYVDVLKESVXXXLSPFLLRPDGGGGGGGVLLHALVGVLEPQPRRRRLRQAAVGVAAAALALIHRWDWEGNPVIGWRAAKQGKEK

SEQ ID NO: 191031 - protein, 81 aa, Oryza sativa
  Clone ID: PAT_MRT4530_87389C.1.pep
GGVVLGDTRVLVRFGPESRVDPAAAWLCSGALFAARRLFSSQERQSRDTWPPAETAFLEVGLSLGGELLAVRMASTPRQGG

SEQ ID NO: 191032 - protein, 240 aa, Oryza sativa
  Clone ID: PAT_MRT4530_8738C.1.pep
MAATTTNGVPSRRRRRPHVLVLPLPSRGHLLPLLDFAHRLSTRHGVALTVAVTASDLPLLSAFLASTPLAAALPFHLPDASLPENSNHALLAVHLSGIRAPLLSWARSRPDDPPTVVVSDFFLGWAQLLADDLGVPRVVFYASGAFAVAALEQLWNGALPLDPKISVVLDTLPGSPAFPYEHVPSVVRSYVAGDPDWEVALEGFRLNARAWGAVVNSFDEMEREFLEWLKRFFGHGRVWA

SEQ ID NO: 191033 - protein, 62 aa, Oryza sativa
  Clone ID: PAT_MRT4530_87390C.1.pep
HFRMTTQIHTAYPNLFRRYLKSIHIKSKQLIQTRLINFKFTDKCLQNKHAKDILSVAFFSNN

SEQ ID NO: 191034 - protein, 168 aa, Oryza sativa
  Clone ID: PAT_MRT4530_87391C.1.pep
MTRTQQHRKLDKAFQRSHPFQGWRRAVNRDTTSSSLASAAMSSNKKELEALPIVDAGEVRELMSSGHHYLDVRLGKDFDKAHADGARNISYYLSVTPSGKEKNPHFVDEVASLFGKDEHLIVACNTGVRSRLATKDLLDAGFKNVRNLKGGYQSFLRSESQQPAAHQQ

SEQ ID NO: 191035 - protein, 153 aa, Oryza sativa
  unsure (1)..(153): unsure at all Xaa locations
  Clone ID: PAT_MRT4530_87392C.1.pep
LVFFGVLIPGTLFVVCRDADVEDVQXRGQPELPIVVPALELEPYVPLESALADRDHRIQYWKTKFDVAELERTILEVKRDRAVEALRGREVWFNSYLRSCCVTMAVVWGRIVVGERPFLTSSHHLGPPRISGNKTAFLTSISLGPHLSQPDSP

SEQ ID NO: 191036 - protein, 64 aa, Oryza sativa
  Clone ID: PAT_MRT4530_87393C.1.pep
EAHFHLIHCTFPGPSLPPNYQAPWTPPQHKTGLPAQIICKNRLISSTGGATKRGPQLEGPLTPS

SEQ ID NO: 191037 - protein, 380 aa, Oryza sativa
  Clone ID: PAT_MRT4530_87394C.1.pep
MDSTACLRLPFLPARTRPSSSSSSSPRRAARASSIKCCTAASDAGASSASISSASPRRPDVVNGVGPAGVDGLAGPPVPVPDLPAFASHYLHCLPCPLTSADLMGVSGEGLKVAYQGCPGAYSEAAAKKAYPNCQTVPCEHFDTAFKAVENWLADRAVLPLENSLGGSIHRNFDLLLRHRLHIVGEALAQCEHTLTEFGIEHREAVDDTAGAAKTVAEQNLQDTGAIASSLAAELYGLNVLAENIQDDKDNVTRFMMLAREPIIPRTDKPFKTSIVFSLEEGPGQLFKALGVFALREINLTKIESRPHKKRPLRITDDSFSTPSKQFDYLFYMDLEASMADPKTQNALGNLKDYQGWIERGLSISQRVGKSSIISRLMLI

SEQ ID NO: 191038 - protein, 887 aa, Oryza sativa
  Clone ID: PAT_MRT4530_87395C.1.pep
MASHGAGVVAAGSDAAPAEVSIVGQTNPSTYPPLALGHHSWSSSTGAATVPWSYPVNNQSQDTVYYDPQRDVSVSGDNQSVASSAPHNAQPTMGTENATHSHMPYSSSLQHGYTAAEYANYYYSYPQTTNGSSVQQGGTNQHSGAAHQPLTSFQNSESYVGPTSNTYYNAGGHQTAPGYGTSNSYYQNSTWNGGSFENNYAQSYQNYPSSNTNTVQHSISVPTNSFSYQQQYNQWPYYYNHTVPNPAGDPVGNSNSIVNTTSSYSYPSIQPPPPGTTSWKSNSSSSIAPPIQASGGPGPQDQYINQAHAPVLENQYAGQVPRIAPGFSMVIPKSEKKILGADLSKKPAYVSVSMRSLPFSLHNYATRNLNCCKDEAQKAACQSMIEEIKNSAIADGTLLTKNWDTEPLLPLVQNVATIPETSANNSSPSLSTSTNRRRQKSRWEPVVEEKVTDKVEPVKGLVNGTTHNNLEAKNRMSNNWDSRKFFQSHHATANKVSQRPAKKQKISSYSDQMQNGNASSDSDKEQDLTKYYASATALANSPEEKKRREHRSKRFEKNQNSSSKSRNSAASKDVMANIHARRAVSALLARSCEDGTTLAVEDMDWDALTVKGTCQEIEKRYLRLTSAPDPATVRPEHVLEKALSMVETSQKNYLYKCDQLKSIRQDLTVQRIQNELTVKVYETHARLAMQAGDLPEYNQCQSQLKRLYAEGIKGCYFEFSAYNLLCVMLHSNNKRDLLSSLARLSKQAKQDEAVKHALAVHSAVSSGNYVLFFKLYKQAPNLNSCLMDLYVERMRFEAVKCMSKSYRPTIPVGYVAQILGFSRIDSEASEECEMWLKAHGAILSIDNSRDLQLDTKACTTTLYMPEPENAVAHGDASLAANDFLART

SEQ ID NO: 191039 - protein, 564 aa, Oryza sativa
  Clone ID: PAT_MRT4530_87396C.1.pep
STPSHLKKLEDRSKPMIFVGYEPGSKAYRAYDPVARRVHVSRDVMFDEVAQWNWNGELGAPDDTDFVIEYTSVFQPGTMPVTHADAGELASPITGGSSQAAPSPVTPCRTPVVRAAASEVEFVSPPPGGEDDLNADHDDAPLRHRRLDDLLGPATPPGLAVRDVQEELMMVSSEEPTSFAQAAKEEAWRRAMLDEIASIEENRTWRLVDLPAGHRPIGLKWVFKLKKDAQGVVVKHKARLVAKRYVQCARVDFDEVFTPVAQLDSVRLLLALAAQEGWMAHHMDVKSAFLNGELTEEVYVVQPPGFEVEGAEDKVYRLDKAMYGLRQAPRAWNTKLDATLKKIGFEQSPLEHGLYARGTGRGRLLVGVYVDDLVIVGGDEDTITVFKRQMMEEFKMSDLGSLSFYLGIQVHQEGGVITLNQAAYAAQIVEKARLEGCNPCSTPMEPRLKLSKESMASLVDATEYKSLVGSLRYLVNSRPDLAFAVGYVSRFMEKPTVEHMVAVKRIVRYVAGTIQFGCRYMRGGEGKLHGYSDSDMARDLDTRKSTTGVLFFLGNNPVRWQSQK

SEQ ID NO: 191040 - protein, 465 aa, Oryza sativa
  Clone ID: PAT_MRT4530_87397C.1.pep
MVVGRPSSSSVARAVVLLAAAMLLSTLSPCCCASAGGGGGARRREKQQQLHPVILIPGAGGNQLEARLTEEYAPSSLACRVWPVVRGRGGWFRLWFDPSVVVAPLTRCFADRMTLFYDSVADDYRNAPGVETRVSDFGSTSTLRYLDPNLKLLTGYMNVLASTLEKAGYEEGFDLFGAPYDFRYGLAGPGHPSRVGSAYLERLRKLVESACAANGGRPAILVAHSLGGLYALQMVARSPPAWRAANVKRLVTLSAPWGGSVQEMLTFASGNTLGVPFVDASLIRDEQRTAESNLWLLPAPRVFGNTTLVVSRHHNRSYSAKNMTQFLRDIGFAEGVEPYRERIRPLVEVLPEPGVPVTCLVGTGVDTVESLVYGEGGFEAGPEKVVYGDGDGTVNLDSLVGPIKAWSDSPEQVVEVVELPEVSHSGILKDKSALDQILRIIDAINLNATTSSSSINRSSQDVLYN

SEQ ID NO: 191041 - protein, 110 aa, Oryza sativa
  Clone ID: PAT_MRT4530_87398C.1.pep
IFTQHKRPLPLWSSPAEVICSWPFLPPKGPKFSRQFFFCQGALQRPPLGSLKSYFFWVHFRVLYFVEVGWYFVFLSPSMCMGGFQSWFFLLPFVDGCSQVFSFIKQTANN

SEQ ID NO: 191042 - protein, 85 aa, Oryza sativa
  Clone ID: PAT_MRT4530_87399C.1.pep
PKDFKGSVPGFSVNPVTPPGAGDPFVGPPLVKVAKGVSFFPHKEKLRGALKFLKGGGALSPPKKGAFPGVPPFPVGGGFLPKAPP

SEQ ID NO: 191043 - protein, 815 aa, Oryza sativa
  Clone ID: PAT_MRT4530_8739C.1.pep
MGYLLLAPSPAPRPLAFRCRRGGRARRGAAIVASSSASSSSSSGDAGPSHSAAAAGAYVLARRGVLLGVSALPLLRAREAAAAAAVATPNSGDLATVYGMSFPQGFIRRKRVDFPRIDHQAQTCYKTFKIGRNTVICRPNEAIVDETKDIQKPDEPQPGETQAESPLPEALQPESSLPVTQEQTPGNPLSGLLNAIAVAASGVLAGLYGTSQQEKKALESVVSSMESKLAENEAAISLMRENYEKRLLDQQTAQKKQAMKFQEQEASLLDQLSSTKKTVTSLSEEFRREKTLAEELREEIRRLESSLAQAGDDKDVLEAKLKEKLGDVNILQEKVSLLSQEIDNKGIRIRELSSLLSSKEADYRNLCSFSDQTKESLELAEAKIQQLEEEVHRTRNDLSSKISSIDLLNEELQALNSAKNEAEEKLSELTKDYTDLKASSEARESRNSELLLEKDNMIKQLDGKLSDALSDSSKDRENIAALNKELDATKAMLENEVAAVKSLRESLQSTEEALTDSRSEVSKLSVELDEANRMNQDLVLQISKLQDEFNEMQEGLTNKLGEVESVSKALSDELVSVKEMVHKGQEELEATSNELASIVEARDNLKKELLDVFKKLESTSQELVDERKTVTTLNRELEALVKQLQMDSEARKALEADLDEATKSLDEMNRSALSLSKELEETNSRKDTLEAEKKMLSKALAEQQKITTEAHENTEDAQNLISRLQTEKESFEMRARHLEEELALAKGEILRLRRQISTSRSQKAKTLPNTNASPEVSQAPDEQPVNDNQNTSKVAAGSQYTAKRTTRRRKGGAST

SEQ ID NO: 191044 - protein, 119 aa, Oryza sativa
  unsure (1)..(119): unsure at all Xaa locations
  Clone ID: PAT_MRT4530_873C.1.pep
SITSGSPGWGIPILHSSPGDCDCLYRASPCTNGTLCRFVPAEPRSHPLSGGARLQGQRPLRSFAPRHIVPTAPAIRXXXXHXNXXXRLYXYXYYXXVXXXHITXEXXWAXYCXXXPXRN

SEQ ID NO: 191045 - protein, 166 aa, Oryza sativa
  Clone ID: PAT_MRT4530_87400C.1.pep
SWLRRWEVVGWGEEEGEDAAGEEEGDDDCRGGRARSRTRGGRGRGRASRVGTRRSPAPSTASSPPTPGIAAGAAAAAAAPRTPATACRTPASRPATPAATATPPPLPSPPSGSPAGPHPNPLELPSSPTHRRRRRPLEAELQPPLPRRRHRHHPDAERERERLEER

SEQ ID NO: 191046 - protein, 198 aa, Oryza sativa
  Clone ID: PAT_MRT4530_87401C.1.pep
MSNEVDEPKIMLVGKGSRKSLFSFVPLSKWLQEASNQDTVSRHKDGLLQALPWVESGEHEEKDCLFNPCTGYRMIYWNRHKELLQLQLHPMWKAPISCCEQEGNPFAIDNKNVGLAFSQRMLCVCLSDPVADELDIWKWDHATVPWSSSEVHYQMWDVPSKFSSLKLSMAPCDNIASPSSASSRNKELNYVSPKIMPV

SEQ ID NO: 191047 - protein, 532 aa, Oryza sativa
  Clone ID: PAT_MRT4530_87402C.1.pep
MELKAMYLYAAVLAVLLCSSVNFIQSPTDVLGPVALLEPTPSSARDFGAVVSDAPFAVMRPESPDDIALLLGALSSTAPSPRATVAAVGAGHSLHGQAQARDGIVVETRALPRDVHVVSARAHGGDDDATVRAYADVGAGALWVEVLEECLKLGLAPPSWTDYLYLTVGGTLSNGGISGQTFKHGPQISNVLQLEVVTGKGEVVTCSPTEIPELFFAVLGGLGQFGIITRARIPLQLAPPKVRWVRAFYDSFETFTGDQELLVSMPEQVDYVEGFMVLNEQSLHSSSVAFPAQLNFSPDFGSKGRKKVYYCIEFAVHDFQQDSSRADHVVKLVSAKLSYLRPHVYSVEVSYFDFLNRVRMEEESLRSRGLWDVPHPWLNVFVPKHGITQFKGLLMDTVSADDFEGPILVYPLLTDKWDGNTSAVVPAAPDGVMYIFGVLRSTDPARCGRACVDSIMARHRRVADEACRDGGGGGRGIGAKQYLARQPSPARWRDHFGAGWGRFAARKARFDPLHVLGPGQGIFPRTDSAGSM

SEQ ID NO: 191048 - protein, 263 aa, Oryza sativa
  Clone ID: PAT_MRT4530_87403C.1.pep
MSNEVDEPKIMLVGKGSRKSLFSFVPLSKWLQEASNQDTVSRHKDGLLQALPWVESGEHEEKDCLFNPCTGYRMIYWNRHKELLQLQLHPMWKAPISCCEQEGNPFAIDNKNVGLAFSQIFDVIPCPSCIAMWDNESRCHAFVVELQRMLCVVLSDPVADELDIWKWDHGLWTRAYTINLKLWPDFSLATNVVVPLAVDPIDGRVLLNTGRKLGLYNPFNQAIENLYALDQASLMTLKCSDGALEFVRSALPDVGMFLASSLH

SEQ ID NO: 191049 - protein, 88 aa, Oryza sativa
  Clone ID: PAT_MRT4530_87404C.1.pep
SRMFPNRQPGNACSILPNLKQTLAFAWGHIKVAYLGQPCLPKMNSELIPVLVDYHAGAPELSVRQLVNLSCLTISIKKKKNGRAISDP

SEQ ID NO: 191050 - protein, 44 aa, Oryza sativa
  Clone ID: PAT_MRT4530_87405C.1.pep
MSVASAVNFHKIAREKTPNGRELDAFFSEEEIYDMLDRGGRRNT

SEQ ID NO: 191051 - protein, 401 aa, Oryza sativa
  Clone ID: PAT_MRT4530_87406C.1.pep
MDGTIADAVGAPGIEKEVNGKPALPDSMEEHEEAHEVQANGDHSGESDVINPPEEAGGESTSHLDGKKPRPAKATQSHGPKVVKSRSPKSGGEGQARRSTPSSTLSKAPVARVSHADSSTGSKINGDSSVDRNKAEKQEPRSSTKETSLEDSKEKRKTQKPLGQNSSVKKDDESNPESRKAGGTPAYGFSFKCDERAEKRKEFYSKLEEKIHAREMEISNLQAKSKETEEAELKMLRKSLNFKATPMPSFYQEPTPPKVELKKIPPTRARSPKLGRSKNKSAGETEETVTPPGRPVRLSLDSLDEKVSQNGVKKANPSNAVKKPQRKSLPPRGSSPQFHRRKPGPFDSSHLKNTELSTGNIQESGSTTPNQQETESNTSISESIQDRIATGGQELDEQIIA

SEQ ID NO: 191052 - protein, 489 aa, Oryza sativa
  Clone ID: PAT_MRT4530_87407C.1.pep
MKPRSSRDGHNAAAAAALLLAALVLSGDVLPAVVAGGAPSFNYKDALTKSIMFLEAQRSGKLPPTNRIKWRGDSGMEDGKLANVDLTGGYYDAGDNVKYGLPLAFTVTTLAWTAMAFEKELKAARELENVHAAIRWGTDYFLKAATKKGPPCWVRPENMPTPRTLYQINDKTPGSEIAAETAAAMTASSMVFRKDKPYSRRLLNKAKLLFQFAKTHQGTYDGECPFYCSYSGYNDELLWAATWLYLATKRQVYADFIGHEAISSSVAEFSWDLKFPGAQVLLAELNMTSSGGLQSFKSQADNFVCAVLPDTPFHQVSITPGGMIHLRDGANSQYVTSTAFLFVAYSDILRRINQPVMCGAQAVQPARLLQFAKQQIDYLLGANPRGRSYVVGFGVNPPTQPHHRGASTPVLPPGYQVNCGMSFSEWFTPDRPNPNELTGAIMGGPDGGDNFSDKRGNSSCTEPCTYINSLSIGPLAALAIRGPNLIATQ

SEQ ID NO: 191053 - protein, 161 aa, Oryza sativa
  unsure (1)..(161): unsure at all Xaa locations
  Clone ID: PAT_MRT4530_87408C.1.pep
MRALARLAWQGRRRACTTYASNDYSIPLAGVHRRSGEQVSGTSVFDVLHREKAAIRFLGSASRDCSLFVRDGSPSSSLACFVPSXTLTTASSSYRATAPHIRPCIDGGSAWVSAPLTPLATWRSGEGLEARQREDPRGVTWHPEAPWLPLRRSRCGGRARL

SEQ ID NO: 191054 - protein, 72 aa, Oryza sativa
  Clone ID: PAT_MRT4530_87409C.1.pep
IDWPSMYHNMTVKAFDGPNLLNLHDIHLYTDGNISMRTIPIAVSISCTLLVANGTLSGSAHYTSSMLWLRAS

SEQ ID NO: 191055 - protein, 66 aa, Oryza sativa
  Clone ID: PAT_MRT4530_8740C.1.pep
NKKKNKEKKRYKNNTIKHSLSQDKKDREIKILQTEAEAAKTGLKRTAPNWHCIDGTTACAIFTPYR

SEQ ID NO: 191056 - protein, 540 aa, Oryza sativa
  Clone ID: PAT_MRT4530_87410C.1.pep
MQVPVGFLSKLWSFVSFLPFFLLLLLLGSIKAVLIGPIAAAIIFLGNSAVIIGLWPAHFIWTYYCVLKYVLAISGSLLGGIGYGVFIPLMATFEAVGEGVADKLTHCFLDGTVSTTAGACTVVRDATDFCFHSYFSLMDELIRKLGDNETPLDIKLSYLPHSMLAVLIAVPFDVFMISGVALWKSPCMLLKGWQRLCEDLVGREGPFLETVCVPFAGLSIILWPLAVIGAVVASFLSSFFFGMRAGLIAYQICTLAASKLLLTDRPKYRKTDRMNNETGQNNEVRNATSPLGEKKHHHKTMKALQRSKTFMEAIQRLRPIQIWDWLFRSCELNGRILLGEGLISAEDMEECIIKGKCKKLSIKLPAWCILQCLIRSAKHDSHADDVEVTNFNWPKDKVFDWMLGPLLVIKEQMKQLELTEDEELCLRRLIMTNNNDKPSDWDDCGFPSSDNIRRARLQAIIRRLQGIVVNLSWVPSFRRRFIDLVKALYLEAVEAGAIDGSRSVKRKIEADAASAPGSKFDDKDGEGSSKGAAAVGIDAV

SEQ ID NO: 191057 - protein, 95 aa, Oryza sativa
  Clone ID: PAT_MRT4530_87411C.1.pep
MGGGRWRQRGRVSSGSILALCSSLSPKIKLEERRLPAVAASVEGVVAAAPTPLPPSSRSGSSNKDDGFGGDSSLCGFSDLQGHQRACLSLLGSKR

SEQ ID NO: 191058 - protein, 114 aa, Oryza sativa
  unsure (1)..(114): unsure at all Xaa locations
  Clone ID: PAT_MRT4530_87412C.1.pep
MDLAALTVPYRTTAPPLPESDGNEDGSSGGGVHLARCCRIADPPSANAGVGTXGSGLSLQATFHPARPAPRARARFQCHGLVFRPGVPTVTVRVAAASGGGVPAYADSAAEAAA

SEQ ID NO: 191059 - protein, 389 aa, Oryza sativa
  Clone ID: PAT_MRT4530_87413C.1.pep
MAVVETSADHAAPPPPEGDAGEREMRDLEDLLSKLNPMAEEFVPPSLAAASPTAYAYYPTPTPSHVFPAVDGLAGPRPRKKGGGGGGGGGFGGQGHAGKRRMNSRTSMAQRDEVIRRTVYVSDIDHQDDQCSISYTSPFLDLVFSLIDNLRTTCHIIVFHGIVWISKPSVPLVSMFSIVPNVTLNHESDALRFMSMLQIRNCKHVDSFHFLGVQVTEEQLAALFINCGQVVDCRMCGDPNSVLRFAFIEFTDEESARAALNLSGTVLGYYPVRVLPSKTAIAPVNPTFLPRSDDEREMCARTIYCTNIDKKVSQADVKLFFESICGEVYRLRLLGDYHHSTRIAFVEFVMAESATAALNCSGVILGSLPIRVSPSKTPVRPRAPRQLMH

SEQ ID NO: 191060 - protein, 75 aa, Oryza sativa
  Clone ID: PAT_MRT4530_87414C.1.pep
MSATRGVVRYQQREEEQDAGDARRCRHLALRRNREKRTSGLAGWVEPFIRPRPRKCGGSCPQPTHGWKTSPVPSP

SEQ ID NO: 191061 - protein, 52 aa, Oryza sativa
  Clone ID: PAT_MRT4530_87415C.1.pep
ILTNLHSFSPVSYIMCPNKSLCPHMYILRSRPVRTYMRAYAPVFCADICYYT

SEQ ID NO: 191062 - protein, 51 aa, Oryza sativa
  Clone ID: PAT_MRT4530_87416C.1.pep
MPDPAAAPDPTRTNPATPGWIRLGYERTSDCGDLDLRWLALAKEKGEGRRG

SEQ ID NO: 191063 - protein, 82 aa, Oryza sativa
  Clone ID: PAT_MRT4530_87417C.1.pep
HEGVICALIEDGYTLNSYSSLAITNISKVLSTMLAFCACFIPCALGMMNNRIIDYHPGQHTGTGFTSPLLVTCLMECLPWSS

SEQ ID NO: 191064 - protein, 116 aa, Oryza sativa
  unsure (1)..(116): unsure at all Xaa locations
  Clone ID: PAT_MRT4530_87418C.1.pep
DYFYWVAHKEIWKELFKVLQAQTQWQIRQEGIPLTSFGPPNGAHKPGVHLYAYDLPRMAFHSFAGGNSQPYAITTRGSLHXPVGAVPPVPQPVIRHFGPCGHTGGPIGGHLYHQQS

SEQ ID NO: 191065 - protein, 70 aa, Oryza sativa
  Clone ID: PAT_MRT4530_87419C.1.pep
SKANPNSRGSPLAGKGSFFRGLPNDVLANAYRIPREGAQGAQHNRGDGFGAFPPIQTKGSPGVFNGAESF

SEQ ID NO: 191066 - protein, 413 aa, Oryza sativa
  Clone ID: PAT_MRT4530_8741C.1.pep
MERTVVVENVDYNIMTSNYSDFIIDLQSRLAEHPEQANFHGRPVLARQCHPKQPARWLYINLVGENNDRATLAVRDDNVYLIGFRNLNGKWFHLGFSLRSVPILPEPSTFLECDVTYRSLLGGNVKDVLVRVDVRKISVIHAVHRLSGYAQRRCGVDGATKRDLARLIVVICESARMAAHYNTVNDGWLIRNRQIRLDLWHVDYLWNWGLMSWVVQQQGGKMWPIRLINSGINSISEALAVLQLLLNTARRPLPDLPRASPPPPVLYLPRQAAPAVPCPPAPPLWLPSPSVPSSLALHVPLFHASSLERWSPTALAMAPPSLPLRVPFFHASSVEEKTPAASTDGDEGSTVDYCVGRLLVEVLAVWSSFDSCTIAVFDGKRGQIIYENHRGDHDGIHDSQNYLLEIGFKNYGI

SEQ ID NO: 191067 - protein, 44 aa, Oryza sativa
  unsure (1)..(44): unsure at all Xaa locations
  Clone ID: PAT_MRT4530_87420C.1.pep
RXNCLPFEGPPNNSPLAHALLSPKKPPGXCCSNSMRGYGGLAKA

SEQ ID NO: 191068 - protein, 129 aa, Oryza sativa
  Clone ID: PAT_MRT4530_87421C.1.pep
MSSLPLLRTIMHSLSLWLSSGRLIASHTIDVLSLSDSIMGSMYDRVFSGPCAAWLIFVAKYAERIWALYNGNMSSIQSTLENQNDNDDDNEKEEEHPEFDVCKTTLVESSLALFSIPTGTGMDEIGVAA

SEQ ID NO: 191069 - protein, 93 aa, Oryza sativa
  unsure (1)..(93): unsure at all Xaa locations
  Clone ID: PAT_MRT4530_87422C.1.pep
GACWRYGMRPFDQTCRGYRPPGRRAQGEEHMPKGDDFAVASSAPGGPKRLSWPIXLGVNWVDNNPSARXGSMDRNYAMYPCKCPFHKGNYVNS

SEQ ID NO: 191070 - protein, 213 aa, Oryza sativa
  Clone ID: PAT_MRT4530_87423C.1.pep
MASSKMTLLPVLLLLAAASPAALGAFDVNQMLADKSQYGSFLKLLTQTKVAEETNRLKSASLLVLQDKAMKPITSLPADKQRMAMANHVLLKYFDPIQLGEMKDRTAMLPTLLSNTDKKLGVVNYTKASDGQMYLGAPGAACVAKLVKVVAARPYAISIMEVSEAILPPALGGSGGPGRRAKGGKGKVKPKSSDADEAAAKPATEPKATDVPK

SEQ ID NO: 191071 - protein, 115 aa, Oryza sativa
  Clone ID: PAT_MRT4530_87424C.1.pep
LGAPSPRSSSHVLLPPSRSSAAHAGAAVVPSGGRRRSPPLPSPEPTSSVAAGAVVVPDGEVFPPPPHYTAASPRRRCGGYRRQSPSPPPPHSTAPAGTVVVPPPCQSPQRSPSPP

SEQ ID NO: 191072 - protein, 85 aa, Oryza sativa
  Clone ID: PAT_MRT4530_87425C.1.pep
IISNVLHFLSQFPCNASDNPSPVKITDPRSKKKGHCLSQARPASLPPPPALLPGAEPRWAIRSPVDAATSCANSQLRVVCSDRSS

SEQ ID NO: 191073 - protein, 172 aa, Oryza sativa
  Clone ID: PAT_MRT4530_87426C.1.pep
SNFRAVTPFIDEMLERLANHSFFCFLDGYSWYHQISIHPEDQSKATFTCPYSTYAYRRMSFALCNAPASLQRCMMSIFLDMIEDIMEVFMDDFSVYGNTFGHCRCPPPLLYLAATPPSSRVAAIAQLQPPLAGGQDLLGARCRHHPIRSNVIFPGFISVSPRGCRECILVGN

SEQ ID NO: 191074 - protein, 124 aa, Oryza sativa
  Clone ID: PAT_MRT4530_87427C.1.pep
MEGSFAVSAATAAVVAIEEGAAETASASASPSWPRRTPMLRASIPVRQRVAVCIWRRRRLQRGGSEEGRRRGRERAATGWRAAVGVPQIRPPAAPPPRSSHAVGLAGMAVDGGTRGRAQLGRRG

SEQ ID NO: 191075 - protein, 464 aa, Oryza sativa
  Clone ID: PAT_MRT4530_87428C.1.pep
MRGAIAAAVCAVLLLLVGGNGGGWSAMAAATMEEDRIVALPGQPNVSFAQYSGYVTVDAARRRELFYYFAEAELDPATKPLVLWLNGVGVGAFSENGPFRPSGNVLVRNEYSWNKEANMLYLESPAGVGFSYSTDPSFYGGVGDSRTARDNLRFLQGWFAKFPQYKGRDLYITGESYAGHYVPQLAQRMVEFNKKEKLFNLKGIALGNPVLEFATDFNSRAEFFWSHGLISDSTYHSFTTVCNYSRYVSEYYHGSLSSACDTVMTQVARETSRFVDKYDVTLDVCVSSVLMQSKSLAPQRGSRELDVCVEDETMGYLNRKDVQEAMHARLEGGVPKWTVCSSVLEYKQLDLQIPTINIVGGLVKSGVPVLVYSGDQDSVIPLTGSRTVVQRLAGWLRLGTTAAGYRVWFEGRQVGGWTQSFGGGALSFATVRGASHEAPFSQPERSLVLFAAFLAGRPLPDSFQ

SEQ ID NO: 191076 - protein, 64 aa, Oryza sativa
  Clone ID: PAT_MRT4530_87429C.1.pep
PSARSWPDSLMQLALRVFQTWESRGRRRRRKHQQQQQQRNQRFQTLARCQRLSTKPFPSRTMLP

SEQ ID NO: 191077 - protein, 68 aa, Oryza sativa
  Clone ID: PAT_MRT4530_8742C.1.pep
LNVKLNIQLPPNDSYQHFFARSEGCLHNICFSRESVHDATLTRGLQETTEIPKLYSIQLAKSCHFVSI

SEQ ID NO: 191078 - protein, 262 aa, Oryza sativa
  Clone ID: PAT_MRT4530_87430C.1.pep
MDRYQRVEKPREEAAIGANEIRITAQGRTRNYITYALALLQDNATDEIVIKAMGRAINKTVAIVELLKRRIVGLHQNTSIESIDITDTWEPLEEGLNTLETTRHVSLITITLSKKELDTSSPGYQPPIPADQVRPPTDFDQEAEAVPSGRGRGRGRRGRGRGRGFNNEDYDDEHGDAEVPQPQGYRGRGRGRGRRGSFGPGRGYGGDGFAMEEAGGYDDGEPNAPPMQGHEGGRGRGRGRGRGCGRGRGGGRGRGPPPPPQE

SEQ ID NO: 191079 - protein, 152 aa, Oryza sativa
  Clone ID: PAT_MRT4530_87431C.1.pep
MGPEVLGYRDAKKVPCSRQDASTPHQFVDVYNNNRLNASMFSSNEDLCGKPPDAFCDTFAFRAPRRPTWRPGKNGRGQPRQASGETPNSTRSHRRRVRWQRGRRSAAGREGLLGAHAPPLTHPNLLPVVAYLYKKDEKLLVIVIDYITLKSG

SEQ ID NO: 191080 - protein, 53 aa, Oryza sativa
  Clone ID: PAT_MRT4530_87432C.1.pep
ARPLKRWRAGERPPWPAEEGDGDVVAAVIGTPPTLSPHQQQVDPYRAVGEVSS

SEQ ID NO: 191081 - protein, 72 aa, Oryza sativa
  Clone ID: PAT_MRT4530_87433C.1.pep
MGRDYFLAGIEILPQPPVPAAAAAAPGHRRPISPLPHRALLPGTIVTFFHQIGPEDASRDLPSPAFLPGGDS

SEQ ID NO: 191082 - protein, 98 aa, Oryza sativa
  Clone ID: PAT_MRT4530_87434C.1.pep
KDSNSRLSYISPRSKDSISRLTSRLLLKCVLWPVQNVWLLECMALMFSRPMHLGIVWIGHLCAHGRRHSSSNQGTPYPLSPGHGKHGCGVQSSSYGKC

SEQ ID NO: 191083 - protein, 156 aa, Oryza sativa
  Clone ID: PAT_MRT4530_87435C.1.pep
MVGIFSRFSAGAHRRAKSAVEVVETLAPNMNSGEPDSQAVPADSPHGIEVGVEFKPVEHPVEPVNLDQPVKCPLPEPSILHDGRIWKERIATAGVRVMTDLPVVKEGSQLESDSSGARSRSAVPKRAILPSVSAPENNILALLDECDVPESLRPAE

SEQ ID NO: 191084 - protein, 39 aa, Oryza sativa
  Clone ID: PAT_MRT4530_87436C.1.pep
LKLGDVFLQPGTGEGQCQVCSPKEMGKMVSKAGLCHPPP

SEQ ID NO: 191085 - protein, 92 aa, Oryza sativa
  Clone ID: PAT_MRT4530_87437C.1.pep
SGRDLWSDSSFPSSSSPISHRPIGGARSKRPPATMIYRNWSLLSSTVVIWGGVATAGLAGIFLFGGKEKFQNYLCREGERLRQQDRAAMGKN

SEQ ID NO: 191086 - protein, 136 aa, Oryza sativa
  unsure (1)..(136): unsure at all Xaa locations
  Clone ID: PAT_MRT4530_87438C.1.pep
PSSRPTVTGVQKREGRERTYRRAIERSIWLSLCSISVAAAAAAAARALAGRVTTTRGNTRGEASSAMRRAMTAAEGKGAGKVTQAKDRAKDGAAREVAREPYPVTDHYPAYYLACXRRRRPPRRPPRRQLRPRVMR

SEQ ID NO: 191087 - protein, 91 aa, Oryza sativa
  Clone ID: PAT_MRT4530_87439C.1.pep
KGIKGAKFSFCKKRGFFFLFTQNWGKNSPRGFLNFLGNKTKKQILPHNSFLGSVVQIGDLIFLQKKNNRGVGTNDLSPQKNYFFRRPPVGF

SEQ ID NO: 191088 - protein, 1444 aa, Oryza sativa
  Clone ID: PAT_MRT4530_8743C.1.pep
MDIVRMGSVASGGGSVRRTASSWRGTSGRSDAFGRSVREEDDEEALKWAAIEKLPTYDRMRKGILTAGGVEEVDIGGLGLQERRNLIERLVRTAEEDNERFLLKLRDRMERVGIDNPTIEVRFENLSIDAEAYVGNRGIPTFTNFFSNKIMDVLSAMRIVSSGKRPISILHDISGIIRPGRMSLLLGPPGSGKTSLLLALAGKLDSTLKVSGRVTYNGHDMDEFVPQRTSAYIGQHDLHIGEMTVRETLAFSARCQGVGTRYDMLTELSRREKEASIKPDPDIDVYMKAISVEGQESVVTDYILKILGLEICADTMVGDAMIRGISGGQKKRVTTGEMLVGPAKALFMDEISTGLDSSTTYQIVNSLRQSVHILGGTALIALLQPAPETYDLFDDIVLLSEGQIVYQGPRENILEFFEAMGFKCPERKGVADFLQEVTSRKDQHQYWCRRDEPYRYISVNDFSEAFKEFHVGRNLGSELRVPFDRTRNHPAALTTSRYGISKMELTKACFSREWLLMKRNSFVYIFKILQLIILGSIGMTVFLRTKMHRRSVEDGAIFLGAMFLGLVTHLFNGFAELAMSIAKLPIFYKQRDLLFYPSWAYALPTWVLKIPISFLECAVWICMTYYVMGFDPNIERFFRHYVLLVLISQMASGLFRLLAALGREMVVADTFGSFAQLILLVLGGFLISRENIKKWWIWGYWSSPLMYAQNAIAVNEFLGHSWNKVVDPTQSNDTLGVQVLKVRGIFVDANWYWIGVGALLGYIMLFNILFILFLEWLDPLGKGQAVVSEEELREKHVNRTGENVELLTLGTDSQNSPSDANAGRGEITGADTRKRGMVLPFTPLSITFDNIRYSVDMPQEMKDKGVTEDRLLLLKGVSGAFRPGVLTALMGVSGAGKTTLMDVLAGRKTGGYIEGDISISGYPKKQETFARIAGYCEQNDIHSPHVTVYESLLYSAWLRLPSEVDSEARKMFVEEVMELVELTSLRGALVGLPGVNGLSTEQRKRLTIAVELVANPSIIFMDEPTSGLDARAAAIVMRTVRNTVDTGRTVVCTIHQPSIDIFEAFDELFLMKRGGEEIYVGPLGHNSCHLINYFEGIQGVRKIKDGYNPATWMLEVTTLAQEDILGINFAEVYRNSDLYQRNKTLISELSTPPPGSTDLHFPTQFSQPFFTQCMACLWKQHKSYWRNPSYTATRIFFTTVIALIFGTIFLNLGKKINKRLDLFNSLGSMYAAVLFIGIQNGQTVQPIVDVERTVFYREKAAGMYSALPYAFAQVLIEIPHIFLQTVVYGLIVYSLIGFDWTVEKFFWYMFFMFFTFMYFTFYGMMAVAMTPNSDIAAIVSTAFYCIWNIFAGFLIPRPRIPIWWRWYSWACPVAWTLYGLVASQYGDITNSTLEDGEVVQDYIRRYFGFRHDYLGYVATAVVGFAALFAFVFAFSIKVFNFQRR

SEQ ID NO: 191089 - protein, 404 aa, Oryza sativa
  Clone ID: PAT_MRT4530_87440C.1.pep
MELSPPSPAPAPEGRWADLPGDIAISVASRLQEADVCALGGCSRSWRRACDADCVWEALFRRRWPLAAAAGGGGGGEGEGASGVQGWKALYINHHRRTAVAISGVAEFVENNLRNGSLEAEYYLKAIANLASMRDIGFIDAQFFLLSRNYSAIMNLIGLHYSISSLNIPPNEVYKALQARKVEERKVCVSLYKLGRWFYGFRLPDESESHEISLSELTMSEGATILAILKRGAVHEVFRLQKYFIVPYCFLNLSRDIDNPHYNPVCKDGYIRLSLSRCAKVFRQSQCLAFLLSPTTFTLHIFDSSEKQSSFSHQRTHSPADEHQHQGDDRSDEKPHEVECGLLFGLLGAAHLAHVSTGRERSKNKSLGDWCMNDLRSFTFFTVSCATGDFVAVNSMMVADGEMR

SEQ ID NO: 191090 - protein, 188 aa, Oryza sativa
  Clone ID: PAT_MRT4530_87441C.1.pep
APPWRCADEHQHQGDDRSDEKPHEVECGLLFGLLGAAHLAHVSTGRFVENNLRNGSLEAEYYLKAIANLASMRDIGFIDAQFFLLSRNYSAIMNLIGLHYSISSLNIPPNEVYKALQARKVEERKVCVSLYKLGRWFYGFRLPDESESHEISLSELTMSEGATILAILKRGAVHEVFRLQVSLVDINK

SEQ ID NO: 191091 - protein, 43 aa, Oryza sativa
  Clone ID: PAT_MRT4530_87442C.1.pep
IWFSLTSAIAYHLIEMESMSTRDAEDHLLTGYASLLFWIARLI

SEQ ID NO: 191092 - protein, 361 aa, Oryza sativa
  unsure (1)..(361): unsure at all Xaa locations
  Clone ID: PAT_MRT4530_87443C.1.pep
MGRKDSRSRSGNAKRGPHLTLDRLPQDVLHQIIALLPVPHENFYGPGDIILSSNSVPKHYPWMDNTIVYKLLNFLRVRRCNLLQLIMSDAPNLSTFYYEGPLIQLSLGDSLQLKHVNISIYPWFNLFEYARKELPTVAPNVETLFLMSANEVGYFYPLIVQPHGRFLHLKYLELAIVGPRDYGFGYQYAYLVTFLRASPVLETFILHVEESAKEPYPLVFNPKYLKIHLSPEHSHQSIKHVTVTGFCHKQELVELIFYILENATSLQCLTLDNRIRGFGKDLVACITQDTGTRDYQEWWNNFGVKERILHFFRREFYPKSDWEAYCSYVAIRKYIIERVPSSVELKIXLCLQMKLYPVFLR

SEQ ID NO: 191093 - protein, 571 aa, Oryza sativa
  Clone ID: PAT_MRT4530_87444C.1.pep
MGGRPHLGFGEAGVIRSSTALGNLSVSLRITTKMKTGPHGDAGFGEDGSSALDMGRKDSRSRSGSAKRRGPHLTLDRLPRDVLHQIIALLPMQDAARAACASRELLQSWRHYPELKFSAKTLAMDGQHNCIQGQMDSYIKRIDIALQNCTGGWVKRFRFELQFFHELSAHHINHWLDAAIPGIEELTLELPRDDKMKYKFPCKLLFEKGCSIQSLCLYSCAFHPDQGACSFRNLKRVYFSLVHITTEELWIFLYNSLSLEHLELGFCHKIACLKIPCTLQLLNFLRVRRCNMLQIIVSDAPNLSTFHYEGPLIQLSLGDSLQLKHVNISIYPWFNLFEYARKQLPTVAPNVETLFLMSANEAGIFYPLIFQPHGRFLHLKYLELVIVGPRNYGFGYQYTYLVTFLKASPVLETFILHVESAKEPYPLVINPKYLKNHLLPEHCHQSIKHVTVTGFCHTQELVELIFYILENATSLQCLTLDNRIRGFEKDLVACITQDAGTCDYQEWWKNFGAKEIILHFFRRESYPKSYWDAYCSYVAIRKYIIGRVPSSVELKIYQLCLLMKLYPVFQR

SEQ ID NO: 191094 - protein, 109 aa, Oryza sativa
  unsure (1)..(109): unsure at all Xaa locations
  Clone ID: PAT_MRT4530_87445C.1.pep
FCYLSGWPLSNPETLGRPCHLSVVLEDMAGAAQPLAFRQQRTLDVTGISHPLQVAVHESVLRQALSNLIEGALLRTHLGGRVXIYAGEAPAGXFSVAIDDEGPCMQYMT

SEQ ID NO: 191095 - protein, 123 aa, Oryza sativa
  unsure (1)..(123): unsure at all Xaa locations
  Clone ID: PAT_MRT4530_87446C.1.pep
MSSDKIRTIIVIDNLVYRDHPSLKLRAVPKDXWLRNSYDWSSTGSVVVLVPRLQMIEGHLLTGKFYSTLTKTLCLYGSTPRSTMARETKALSLISPDTDSRRKATLLSTTSQTFRPTCRQQLN

SEQ ID NO: 191096 - protein, 96 aa, Oryza sativa
  Clone ID: PAT_MRT4530_87447C.1.pep
WLLEDYSKDEWTLKHSVTNELLYEKINSKYKSSEFCYVVIVHLDCNLIYYITRDYTLMAYDMDHKESRVIQALGSDCILECLPYVPLYAETLSNRS

SEQ ID NO: 191097 - protein, 71 aa, Oryza sativa
  Clone ID: PAT_MRT4530_87448C.1.pep
LASIVLYNCTSRRLFFVLYSSYLYAVCMFSVLLASYSICFHTTVFSKCFFCSYIFDTVNFSHYVLIKKKKK

SEQ ID NO: 191098 - protein, 404 aa, Oryza sativa
  Clone ID: PAT_MRT4530_87449C.1.pep
MAAVFFHHVVGDLTVGKPEVVELHDTDTLDAAARAIAASPEGAVPVWRPRAAPDEPPSGARFLGMISALDIATFVAASGVGDRAMAAVVGEVVQPNPGLLREVDPGTRLIDALDLMKQGVKRFLVRKNGAWRGISKRFSVLYNGKWLKNMEATSPTSASSSRELSSSTSSTYKFCCLSREDILRFLIGCLGALAPIPLSPISSLGAINPHYCHVDASVPAMEAIQKVPPDPSAVAVVETTPDGTRKILGDISAYKLWKCDYVAAAWALINLSAGQFVIGADDNESTPISAIPVPPISSSLVEEIGPGRSPRAKKFSSRSIGFLNSQAHQMAFGRMRSMYRGRSAPLMCKSTSSLAAVMAQMLSHRATHVWVTDAESEEDGVLVGVVGYTDIFNAVTKSVYPAAS

SEQ ID NO: 191099 - protein, 257 aa, Oryza sativa
  unsure (1)..(257): unsure at all Xaa locations
  Clone ID: PAT_MRT4530_8744C.1.pep
MSLCFIHLKANGQYTERPTEVQSIGAIYGQEGACLSTFGLDVVVQTVSSYRGDFTRFDYRTNGRDNGCSDYNETDTDGFGIILGVWNRKIGFFFFFSFCTGTADHSMASVVEMAGSGGEAGDGGQELEAAAAMVAVVPANSGEGNGPGKHQGRKGSAVVAATRPGAVGSGGAPYGWRRPNRXATPGGGTGGIPATDWMGKERGKGRKDEGVTEAGRWRCRGGIHSSFVLVRACAGVWRARGGMSSARARREAAQGWR

SEQ ID NO: 191100 - protein, 389 aa, Oryza sativa
  Clone ID: PAT_MRT4530_87450C.1.pep
MCYFESIQGKTVEVGRAHFETETTRFTILDAPGHKSYVPNMISGASQADIGVLVISARKGEFETGYERGGQTREHVLLAKTLGVSKLVVVINKMDESTVGWSKERYDEIEGKMVPFLKSSGYNVKKDVHFLPISGLLGTNMKTRMDKSNCSWWSGPCLFEVLDCIQVPLRDPKGPVRMPIIDKYKDMGTVVMGKIESGTISEGDNMLVMPNKVTSFIVDVFNCDEDRVRSAAPGENVRVKLSGIEEDDITAGFVLSSIKNPVSAISEFRAQLQILELLDNVAIFTAGYKAVLHIHSVVEECEIVELIEEIDLKRRKEGDIKKKKSKRKPLFVKNGAVVVCRVQVNNLICIENFSEFPQLGRFTLRTEGKTVAVGKVVAVPPAGSSTFNV

SEQ ID NO: 191101 - protein, 361 aa, Oryza sativa
  Clone ID: PAT_MRT4530_87451C.1.pep
MPRLAKKPVRTFPAAPQFGHQNRLFLSPGAVRMALEAVVFPQGHFGYGCGRDSPAYGMPWCDVLAAAGGGGGFGEFYGVDEWDDQLQVASVDEWEVASKDNSDASTEGKAAAAERAEPVAAGRRKRRRTKVVKNKEEIECQRMTHIAVERNRRRQMNEYLAVLRSLMPASYSQRGDQASIVGGAINYVKELEQLLQSLEVQKSLKNRSGAMDAAGDSPFAGFFSFPQYSTSPRTGCSAAASAGSSGSASSVVMDDTAGSAESGRQSAAIADIEVTMVEGHASLKVLARRRPKQLLKLVVGLQQLRIPPLHLNVTTVDAMVLYSFSLKVEDDSKLGSVEDIATAVHQILGSIQQQEAVLSIS

SEQ ID NO: 191102 - protein, 67 aa, Oryza sativa
  Clone ID: PAT_MRT4530_87452C.1.pep
MCLPFSSCFGGKNELDFGETSRDPDYHPLSTTPSGNSYQGGDATETRLVAPFFLYDIIEVDLVYIQS

SEQ ID NO: 191103 - protein, 90 aa, Oryza sativa
  Clone ID: PAT_MRT4530_87453C.1.pep
MGSYQAVAALWRRVAPVRWTTCFHAQDREIFIRRHVLRVPESVTTAAATSENYTVGVARDPKSTAKKMVIMYTRMLLLDHVGASFLVRSN

SEQ ID NO: 191104 - protein, 47 aa, Oryza sativa
  Clone ID: PAT_MRT4530_87454C.1.pep
NFANGEDVLMAWWLPMARCLLLCCFFSINACNRSKFKRFERSYTLSM

SEQ ID NO: 191105 - protein, 64 aa, Oryza sativa
  Clone ID: PAT_MRT4530_87455C.1.pep
CPSVSLNAVSATKILSTIIFHSYNYLHSLINQHYYLRHQILTYNPPIFHLLSELMRNQYISYTH

SEQ ID NO: 191106 - protein, 146 aa, Oryza sativa
  Clone ID: PAT_MRT4530_87456C.1.pep
GRGILLRSLCAIAATDAFLRKPSPSSSAPFLLLLSPSTPRLHIRSTRRLSLAQLAASDSFQSSSSSAAALDFAEPGAADESDEEEAVEASAEVAEEPKDVEEVSEYVEPPAEAKVYVGNLPYNIDSERLAQLFEQEGVVEVSEVNQ

SEQ ID NO: 191107 - protein, 124 aa, Oryza sativa
  Clone ID: PAT_MRT4530_87457C.1.pep
MTEVCRELRVERPAPIESTAGYISLKNGASAQLAGIGNRIDNSLKGERRQASRYTGGHVLACFQDHRTQMNLDFLREGFGRSYLSFIEIDRLAQSLVPLAEKVFESHLTKPYQLCFLGGFVKVV

SEQ ID NO: 191108 - protein, 110 aa, Oryza sativa
  Clone ID: PAT_MRT4530_87458C.1.pep
YPPSDLEVGSIWPSTFLTVLALPHPWDRRISNGRCGFRKPPLGARMGRARAAAWAPKPRRRKAWAMAKYGDDGSKAQTMARYGDDGRALIGGAQPNGWWASVTRSRGHSQ

SEQ ID NO: 191109 - protein, 65 aa, Oryza sativa
  unsure (1)..(65): unsure at all Xaa locations
  Clone ID: PAT_MRT4530_87459C.1.pep
XGLEGXGHELVPNSARAQSNLLGAIHFSAHQHTSKFISELISSHHHSQDAATAIQLNSIPKYQAI

SEQ ID NO: 191110 - protein, 165 aa, Oryza sativa
  unsure (1)..(165): unsure at all Xaa locations
  Clone ID: PAT_MRT4530_8745C.1.pep
MLLGVIQSKKSAGGEAGGGGQXQEAEAAMVAATPANSGSGGXPGEVQXGERSPRVVTAKASGPWSGGAPCGWRRPNREATPRGGAGDVPTIDWMGKERGKGWRDEGNTEAGSWRCRGGIRSSFILVRARAGVWRARGGTSWARARREAAQGWHEAARARLASGWL

SEQ ID NO: 191111 - protein, 192 aa, Oryza sativa
  Clone ID: PAT_MRT4530_87460C.1.pep
MAVKEKAIELAAAAPPPFVPRPMWPLLADGGKRKKQSSCGGRIPALNTLTPLKLHLLLERGGNGGQRLLGVRRGDGAGVVVLVVGARSRALRLLLWPAAGCTLLGLEAASAYDPIKRMIPVAEEVVKAREIVTKGGAAGSRPCPPIPIELPRKRHVNATSDEDRVKLATWQQLFSGVTDPINHGKNDLSMDH

SEQ ID NO: 191112 - protein, 104 aa, Oryza sativa
  Clone ID: PAT_MRT4530_87461C.1.pep
ETESIHPNVLDQFKGKIGSNRGTQIGQAYGENQDRQMLLILLAYTYFPFFSLGGGRGCQKKQLFGEAPAKAKYLAQLTNLAKTPNWKTRARGPPLAKSFRLGDV

SEQ ID NO: 191113 - protein, 227 aa, Oryza sativa
  unsure (1)..(227): unsure at all Xaa locations
  Clone ID: PAT_MRT4530_87462C.1.pep
SAVSSICGFSPCPPPLPEPPPIAELVDPTPLPPPLPLLPITLPEPPPPPTAFPARPTPFPPPNPPPLLPALSPPPAPPPPPVLILTPPXPIWTPTPPPPPPPACTPPPLTAAPPPPPIPTSTPPXPTSMPTPPPAPPPTLAPPPRVVPAPPPKPPPIPIDMSXPPWLILTPKPRPPLAPSPPCPPGALLPVGVFLSERRSRACARGRSEKQHNSITEMASLQGVEVA

SEQ ID NO: 191114 - protein, 431 aa, Oryza sativa
  Clone ID: PAT_MRT4530_87463C.1.pep
MSLPDLFEKLLGDDRRDAGRRRGGDRGHRGAHGFHGMNALHAARSLHVYRYLLEVANMDVTSRTPLQVGRLPSSEPLPVGTCPLSGISLIMVLISIMNVKETSLFFIQLQRKGNILSSCRIPCYIQSAFCHDEQPYVECGEKCRQYWRTEIVKLLLSRGAHVDGKSDHGTPLHFAAIKGYESTVKILLEHQADPNKVMPSSQATPLSAALFTTSLPCVKLLIQAGADVNATNNPLARAAGSGLTEAIKLLLKAGANPNCPDTHGRMPIELAAVYGTREDVEILFPLTNPIPTVADWSVDGVITYANLERKKLEDDDYVNTKMSDLKQKGNEAFDEQDYEKASVWYTQALEVDPCDATTLLKRCLCWLRMGEGKKAVKDATTCAKHHPKLSEAYHRLGEALMLEKDYEKACVALTHGIELDPESDEMDKLFW

SEQ ID NO: 191115 - protein, 444 aa, Oryza sativa
  Clone ID: PAT_MRT4530_87464C.1.pep
MSLPDLFEKLLGDEIAATLDDDGEGIAATVARTAFHGMNALHAARSLHVYRYLLEVANMDVNKPDTTPGRKTPLERAIAGGDLPSVRYLIDHGADIHHEREGNITFLHSAAKKGFPATSNLHSVMMSSLTLNVEKNADNTPLKHVPPRVNCSFCVLFRTGRTEIVKLLLSRGAHVDGKSDHGTPLHFAAIKGYESTVKILLEHQADPNKVMPSSQATPLSAALFTTSLPCVKLLIQAGADVNATNNPLARAAGSGLTEAIKLLLKAGANPNCPDTHGRMPIELAAVYGTREDVEILFPLTNPIPTVADWSVDGVITYANLERKKLEDDDYVNTKMSDLKQKGNEAFDEQDYEKASVWYTQALEVDPCDATTLLKRCLCWLRMGEGKKAVKDATTCAKHHPKLSEAYHRLGEALMLEKDYEKACVALTHGIELDPESDEMDKLFW

SEQ ID NO: 191116 - protein, 80 aa, Oryza sativa
  Clone ID: PAT_MRT4530_87465C.1.pep
VRHQWQHGQHPLQQTIRGIVATTDEIEGPSADRTRRGVRAARSSRIRSRRRPTARPAHGEQASTYVPSHNNIPFGTPALA

SEQ ID NO: 191117 - protein, 207 aa, Oryza sativa
  Clone ID: PAT_MRT4530_87466C.1.pep
HWPWRVAVFDAAVVTPVAAEERLVVGMTLLQAATSTGAVCLDGSPPAYHLHRGSGGGAGGWVLQFEGGGWCNDAPSCAERAGTRRGSTRSMDSLEVFSGLLSNDPDMNPDFYNWNRVKLRYCDGGSFAGDSELRNGSSVLYFRGQRIWDAIISDLLPKGLAKAQKVLLSGCSAGGLATFFHCDDLKGRLGDAVTVKCLSDAGFFLDV

SEQ ID NO: 191118 - protein, 65 aa, Oryza sativa
  unsure (1)..(65): unsure at all Xaa locations
  Clone ID: PAT_MRT4530_87467C.1.pep
LEERICMPYTRRIITRXSSGTNHSDYHPNEMHSLIPVPPGMAIPVTKTTLHAHTATANDTQHCKC

SEQ ID NO: 191119 - protein, 431 aa, Oryza sativa
  Clone ID: PAT_MRT4530_87468C.1.pep
MAQRHWPWRLAVFVAAVVTPVAAEERLVVGMTLLQAATSTGAGEEFFLFFFFLLFFFFFFSVCDFLVFDRLHCTAANRWRVCLDGSPPAYHLHRGSGGGAGGWVLQFEGGGWCNDAPSCAERAGTRRGSTRSMDSLEVFSGLLSNDPDMNPDFYNWNRVKLRYCDGGSFAGDSELRNGSSVLYFRGQRIWDAIISDLLPKGLAKAQKASELALLPLFLTSSEFFRDDITGNNTVEPFFRSLVALQGAEKNLNKDCLSSTDYPYQCFFPQYILPYIRTPYFILNSAYDVYQVQVYCSYEIHTKDYSDLDSIEQAYSELQETWLAPNSPRLHNKADIDDIWFVSDNCRAGWNWGFRSLAGEHPCPTVIKITKISFSLVNKLKDEHCYNNGDSGIHNGGPCMNIPPKFYSISLQMILYLSILHIAEQFIISYDI

SEQ ID NO: 191120 - protein, 205 aa, Oryza sativa
  Clone ID: PAT_MRT4530_87469C.1.pep
MENTIRAIKMPGEDSMGTTQASWCQKTVDQIIDLIWLHLCHVDESRDWIDRNELISDPRIHACLVVLGQAANVAKVKPSLVACGGAAFGFRLRHAGGGHGDQRTSSRGRSRKMAATMTTTPARTIWAGNAGNGQSAITVDLMTINTGSNDDYGRYYSYNSDQDCNTYDEHLRKIGPAYLDIDEVTTGASLSTGRYLSTQTKADNH

SEQ ID NO: 191121 - protein, 119 aa, Oryza sativa
  Clone ID: PAT_MRT4530_8746C.1.pep
MEAAQARRTIPETSTGIRTQENRCASSFILNLCSSCAPYHHWMSLPRSVPWNFHEQEDEERDLRSALVNGENRVYAQGGAEGGVEVQTVKDTETCAGGRETVRPAACERSDRRRQDYVE

SEQ ID NO: 191122 - protein, 204 aa, Oryza sativa
  Clone ID: PAT_MRT4530_87470C.1.pep
MDSEEDPLLRLMNKVSFLFWTTLLPVFLLGIFVGALLSKECEKAKYTMDLAAVEGMDVAAVSTVVSPAFNLKLRAENPRAFRPWCLDRGDVVVSYSGVALAWGRVPGFCVRRRAMAELTVVPWGKDVRLSEDLRDLLVSELQQGTAKVSVEMKLHYYANFGMAAFAPSSGTTSISQELLLDSWEDNMNSSLLKTKAGLPGRQDE

SEQ ID NO: 191123 - protein, 53 aa, Oryza sativa
  unsure (1)..(53): unsure at all Xaa locations
  Clone ID: PAT_MRT4530_87471C.1.pep
FFFFFFFFFFFFNKXCNTTIIKFLXQFXILIKLPXHSSIQKDXPNKPRYHHKS

SEQ ID NO: 191124 - protein, 378 aa, Oryza sativa
  Clone ID: PAT_MRT4530_87472C.1.pep
MDFSCFNPQPAISHGIPFDSFLLQDELHHHADLDHPFEAEGITVHGSELEGGSVLPFATLHDLDHEFFRRGSRKDFIDNASSIFLLNPKTEVSHLVRDVQVGAFGAYEMNGRLISRNKASRKGIKKADAVKGHWTVEEDRKLVKLVEQFGLKKWSLIGGMLPGRVGKQCRERWFNHLRPNIKKDTWSEEEDMVLIQIHKEVGNRWAEIAKCLPGRTENSIKNHWNATKRRQFARRRNRSTSKSGSTVLQNYIKSLAISPQESQMNNERSESNPSDMMITQGTPCCFDGNNCSQSHTSEENIVPSCGDFAAEMWSGLFDTKEDEEDEAQYLLYDMDTHVDMNCIFSNMDYGSNIEPGLASVVKAECSAESWAVNLKETD

SEQ ID NO: 191125 - protein, 75 aa, Oryza sativa
  Clone ID: PAT_MRT4530_87473C.1.pep
SSLCPDMSSSITDSSPPALSIDTGRESTTTTSQSHSRSRAKNQDNPTKRGARPSNLLSSTRRSPRVAAADATNRY

SEQ ID NO: 191126 - protein, 138 aa, Oryza sativa
  Clone ID: PAT_MRT4530_87474C.1.pep
MGSSHGVRGPGRGGLSPASSRGVDGSRRWGGLRREGGEDLSVEKKSKRDTGRYQKLCWTLARKFRAECPPAAVDVAATRCLRVRLLHPVSGSAAKVYADDEDGARGQANKAWKLEQCDCHIVTGAHRLLPYTEILKSI

SEQ ID NO: 191127 - protein, 128 aa, Oryza sativa
  unsure (1)..(128): unsure at all Xaa locations
  Clone ID: PAT_MRT4530_87475C.1.pep
APVVRRKEERVRPVPSAAEGDGEGREPREVAGGSIDHVSRRSTTPPPLGPSRRPPPLPLDXAAPEEEEEGRRLSHPVDQFWRCRSGRSCRHPSTALLHAAXVRRAARRRNWVVRRRRRAGGGRGSAAR

SEQ ID NO: 191128 - protein, 359 aa, Oryza sativa
  Clone ID: PAT_MRT4530_87476C.1.pep
MEGGGGGGGGAIELRRRMAAQCLAFERQIADGRERTKAAASAFSAALLSARSLSNHTISQREKSNQLKDQLRKLEADFAQALSSHGRSETLQTSSAVQGSNKTKYDLTGQSITNAIATNDQLSCLVTDKRASRDEYANVISSQLEAIEALEAKTDAAGKKNLDEAFMWYKKFLGFQVVGGEGVKFVFSKIDIQNPDNEYSFCIKLNKDRYNLLQCTPFLKDSEELVKDLNCSNDLFKFVRIMRERFQAAAINGFLPASSLCPDMSSSITDSSPPALSIDTGRESTTTTSQSHSRSRAKNQDNPTKRGARPSNLLSSTRRSPRVADQMLDALPTHDMTGSGRSWGSSDLMPLCGLLWGLK

SEQ ID NO: 191129 - protein, 132 aa, Oryza sativa
  Clone ID: PAT_MRT4530_87477C.1.pep
LLRRSFSRGERKKVVGGGHPSMEGLTSSEIAGFGVGALLVCATIAAQRVDGFIASSQRTSLGMCKKCGDLRIVACSQCKGVGSVRKGGLFTFGMLDDIYESLGAETKTSNLVPCTNCRSKGRLLCPECSKVR

SEQ ID NO: 191130 - protein, 47 aa, Oryza sativa
  Clone ID: PAT_MRT4530_87478C.1.pep
KPLLGLNTLIGICQFYQVMTGSSPREHSKNRRFKGICLITDHSVGRE

SEQ ID NO: 191131 - protein, 69 aa, Oryza sativa
  unsure (1)..(69): unsure at all Xaa locations
  Clone ID: PAT_MRT4530_87479C.1.pep
PPRVPPRRRPSRSEPPPRGPPPARPPXPPPPSRTPPPPSVRWRGERKEAVWRESACGDEKPRKAAWGLG

SEQ ID NO: 191132 - protein, 147 aa, Oryza sativa
  unsure (1)..(147): unsure at all Xaa locations
  Clone ID: PAT_MRT4530_8747C.1.pep
GSFWLRRTSPPLPPSPLLSSHLPLXSSPPTPAGLSLGRRRTVPSSLSLDRGDTAQAAVVAAAGDHNTPSPPYPSRSGGGEAWGRWIRRRAPPPLADRSGGGGWEVSLAAGVEVEPSAGGAMASVAAGRRCDGVSGRRQEGSTAAGLG

SEQ ID NO: 191133 - protein, 79 aa, Oryza sativa
  Clone ID: PAT_MRT4530_87480C.1.pep
TRIYRLLINRTFRFMAYAFAGDVSDTGLHAYMTPKCDGLLISWCSITFIHVNINQLPLDTPVFGYLHQHIRSIDFVRIT

SEQ ID NO: 191134 - protein, 45 aa, Oryza sativa
  Clone ID: PAT_MRT4530_87481C.1.pep
MKNIVGDDKRNHDDVSDPVNSGVAVDDNDKDTHQRLHSRSTVKAK

SEQ ID NO: 191135 - protein, 33 aa, Oryza sativa
  Clone ID: PAT_MRT4530_87482C.1.pep
VWLGYVLPLAGRYGRPSRWYYPFFLFRIPVPWY

SEQ ID NO: 191136 - protein, 42 aa, Oryza sativa
  unsure (1)..(42): unsure at all Xaa locations
  Clone ID: PAT_MRT4530_87483C.1.pep
NQAKNIALEQGEINSNSLTLQPLCSHQFIXTAKICGLKHLRR

SEQ ID NO: 191137 - protein, 49 aa, Oryza sativa
  Clone ID: PAT_MRT4530_87484C.1.pep
ENGAISGLALQLVEPRRPELLMHDRDYGYRLGGAMQQGAKAHAVTDVLA

SEQ ID NO: 191138 - protein, 101 aa, Oryza sativa
  Clone ID: PAT_MRT4530_87485C.1.pep
MQTRSSFARVLGGQNANQNTPAENAFYAEMFQCTSDDLQFYMAFSIVTIREYKLSLAVAFSLSIECSPIFPKVTIGNKMVKRCYLKVTELGDEEMLAKWQV

SEQ ID NO: 191139 - protein, 162 aa, Oryza sativa
  Clone ID: PAT_MRT4530_87486C.1.pep
MYSKPEDVGGGVTTAFAMQGKVPLAAWSTGLFNCFDDCGNCCVTCLCPCITFGQIAEIIDRGSSSCGTSGALYALVMLLTGCNCVYSCFYRAKMRSQYGLQEKPCADCPVHFFCELCALSQEYRELKKRGFDMNLGWHANMERQGHKPAMTMPPHMFPGMTR

SEQ ID NO: 191140 - protein, 100 aa, Oryza sativa
  unsure (1)..(100): unsure at all Xaa locations
  Clone ID: PAT_MRT4530_87487C.1.pep
MLTTSDNNNTGDXGEPPVNTNGGNTASNSSEGPFSRYNVSQLLFVLRFLQLSVTILLRSLVYVNAYSILSMLMLYTSSTVTRSTQITNIKIYRIMTKFPT

SEQ ID NO: 191141 - protein, 65 aa, Oryza sativa
  Clone ID: PAT_MRT4530_87488C.1.pep
MDTQVKLAVVVKVMGRTGSRGQVTQVRVKFLDDQNRLIMRNVKGPVREGDILTLLESEREARRLR

SEQ ID NO: 191142 - protein, 142 aa, Oryza sativa
  unsure (1)..(142): unsure at all Xaa locations
  Clone ID: PAT_MRT4530_87489C.1.pep
FFFFFFFRRITHRQGMRSLISLALRSPCPELFSLAWAHAAAPACQDNTWLLXHTRHLQTDYYTTRYNLTPFLSCTVHKATLTTLLCATQHQHNYNTHLXADSPSASGALHVAAXTRXLKLAKLLSVGLNTRTQRRAYCIPYI

SEQ ID NO: 191143 - protein, 732 aa, Oryza sativa
  Clone ID: PAT_MRT4530_8748C.1.pep
MAFLGWAVDIARDSGASSSVVLTCDGYGSALYFSPWDSVPLPATASPDDGFLLPRFPDVCVQRSQFTNHLAPANGTGGGGSRTGVKEEASEVLSWPPTSKQSVRRLEVAEHWYRLYKTDNQRLSPDSQQVSVLAESHCDLASGNWKEISIHHKKMPSSTTTKTTTPSRDAWIVSARSDPFHLLLEAQAPLGIKADALSQIAAVHQSHRNTSHIRELSLAMDNAYIIAILSVAILFLLHYYLLGRGNGGAARLPPGPPAVPILGHLHLVKKPMHATMSRLAERYGPVFSLRLGSRRAVVVSSPGCARECFTEHDVTFANRPRFESQLLVSFNGAALATASYGAHWRNLRRIVAVQLLSAHRVGLMSGLIAGEVRAMVRRMYRAAAASPAGAARIQLKRRLFEVSLSVLMETIAHTKATRPETDPDTDMSVEAQEFKQVVDEIIPHIGAANLWDYLPALRWFDVFGVRRKILAAVSRRDAFLRRLIDAERRRLDDGDEGEKKSMIAVLLTLQKTEPEVYTDNMITALTANLFGAGTETTSTTSEWAMSLLLNHPDTLKKAQAEIDASVGNSRLITADDVTRLGYLQCIVRETLRLYPAAPMLLPHESSADCKVGGYNIPRGSMLLINAYAIHRDPAVWEEPEKFMPERFEDGGCDGNLLMPFGMGRRRCPGETLALRTVGLVLGTLIQCFDWERVDGVEVDMTEGGGLTIPKVVPLEAMCRPRDAMGGVLRELV

SEQ ID NO: 191144 - protein, 57 aa, Oryza sativa
  Clone ID: PAT_MRT4530_87490C.1.pep
WRVIVHAATGPMQADPRDWLLCIDHRLLRRYIATLGLIRSDAQARYYTRQVAHGIPT

SEQ ID NO: 191145 - protein, 324 aa, Oryza sativa
  Clone ID: PAT_MRT4530_87491C.1.pep
MEAGDGGGFDADAACDGDGDAETTRDDGDSADPVRGGGGGLEAVHGGGSCSDAVHGGDLVAVHGGGGCAVATRGRGGGCGCAAAARGGGGCTDAARGGGACEVAAPGGESCAVAPRGGDGCAVAVRDGVGGADVSCNGGVDATRMISFSSTFSIELPRQHVLRHHLWIKSLVGWIWGNSSSLSLGSNNHAGFIVRVEPRLDLQLWFAGLQSKLVRFNDEPRGNLLWSPVMFTPKSTASHQTSHMCRFRGGSRRGLPVRQAEYISIEALGCNCRGPATVPYRFAPSLLLSFIIKFASFFQLTSLLLNMVQLLCLSWAMYWGIQFP

SEQ ID NO: 191146 - protein, 139 aa, Oryza sativa
  Clone ID: PAT_MRT4530_87492C.1.pep
MEADSTRMQLVTAMATQNRSETTAATRIWPAVVAAARMRPAAATGARMQSVAAAATRFRSAAAAASRMRLAAAAATRMRPAAAAAMPLLPSAATAARMWPPAAKAAPMHPAAATAAPLQSATASVVRMCPAMAAWMRLG

SEQ ID NO: 191147 - protein, 524 aa, Oryza sativa
  Clone ID: PAT_MRT4530_87493C.1.pep
MELILQLEAKTAAQAVVTVFFFFLLPLALLFYFARAAISSRDSKTRELILSKLPSPPFKLPVIGHMHLIGPLPYVSLRDLAAKHGRDGLMLVRLGSVPTLVVSSPRAAEAVLRTHDLAFASRPRSMVTDIIMYGALDSCFAPYSDHFRSVKKVVTVHLLNSKRVQAYRHVREEEVRLVMARLRGAAAAAAAVDLSQTLQFFANDLICRAVSGKFLCEQGRNKVFRDLMEANSNLLGGFNLEAYFPGLARMPLISKLICARAIRIRRRWDQLLDMLIDDHVASARDRAKNDDDDFIHVLLSLQDEYGFTRDHIKAISIDMFEAGTDTSHLVLEYAMVELTRKPHILTKLQDEVRRITPKGQHMVTEDDIVGMVYLKAVIKETLRLHAPGGFTIPHLAREDCNVDGYMIPAGTRVLINLWALSRDANYWDKPDEFLPERFMDGSNKNTDFKGQDFQFLPFGSGRRMCPGIHSGKVTLEIMLANLVYCFNWKLPSGMKKEDIDMTDVFGLAIHRKEKLFLVPQIANY

SEQ ID NO: 191148 - protein, 86 aa, Oryza sativa
  Clone ID: PAT_MRT4530_87494C.1.pep
LPPSLSMMATPRSCSGRPLMLLVLFTVIVISATKLHLHEAPIIMASARTLEEADLGPPQGTCTNPPGLQCPPTAVPNPPPSPPAQP

SEQ ID NO: 191149 - protein, 56 aa, Oryza sativa
  Clone ID: PAT_MRT4530_87495C.1.pep
TVESYFSINYKNYKGLKRISILLFHLKTLTTLIKPCFDSQALIFCQGANHFQIFYN

SEQ ID NO: 191150 - protein, 280 aa, Oryza sativa
  Clone ID: PAT_MRT4530_87496C.1.pep
MAAGSGSGSNPKDYQDPPPAPLVDTGELGKWSLYRAAIAEFTATLLLVCISVSTVIGEKRQSGEGGAGVLGIAWAFGGLIFVLVYCTAGISGGHMNPAVTFAMVLARRVSLPRAALYTMAQCVGAVCGAGLARAMHGGGQYARHGGGANELAAGYSAGAGVVAEMVGTFVLVYTVFSATDPKRKARDSHVPVLAPLPIGLAVLVVHLATIPITGTGINPARSLGPALVLGLGTTKAWSHLWIFWVGPFAGAAAAMIYHHYILRGAAAKAFASSSYRSPHF

SEQ ID NO: 191151 - protein, 66 aa, Oryza sativa
  Clone ID: PAT_MRT4530_87497C.1.pep
YKCLIVIESVREFYIMQEWLYFATSLTTLHILKLHCGCSYLIELQNGCRPPDDHLKAPSLLGAIGC

SEQ ID NO: 191152 - protein, 863 aa, Oryza sativa
  Clone ID: PAT_MRT4530_87498C.1.pep
MVGDEVAPGPADALEAAHRANGEAAEDLDDEIVGEAASPGSAHRGDSPSGEAAENVSLQCMKKDWSAKAGRTEGRRRRTRTAQGSACIPEGEDDAGAKAPPESRRRGNLALSPPVKPLLYLSSLEDLGGDGAPPPQRRNESPAAAAAANKGKKKKKKGGAAGGRGDNGGRTMKLQRGVVHLKKVADNGDQPSSTSGKMASSIFDKLQVEFIDQDEGVQVVADTIGSSGEVPERYVRHEIEANIVIIDNANGGEALPPGDLVKKKNPDFSEEEIAKLGSACEDWGYFHLVNHGVDAGLLQQIKADITEFFRLPLQEKAVAIPPNGLQGFGHHFFFPKEQKLDWADLLFLVTRPVEERSNGFLAYKAFHIQRLHVSTKLFKFMAINLGVDEEALLGVFKGHTQSVRINHYPHCRQADKVLGFSAHTDGVGLTLLLQVNDVQGLQIRKNGRWFAVKNLPGALVVNVGDILEILTNGKYKSIEHRAVINPDKEMITLAAFHKPPLSCTVGVGPLQELLMKGKAHYKTVDVVEFTKGYFTAKLEGRSYLERLKLGVPLQNSLTTDEACYKPTTASKKNNHPLKKLGKSNGGRTCNGSDEQIPERYIRTEATCEEVISNYHGDMAIPIIDLNKLLSPQSSEEECVKLRSACQYWGFFQLINHGVPEEVIENFRSNIIEFFSLPLDAKKEYSQLPNSLEGYGQTFVFSEDQKLDWGDMLYLQRSLKIRQSLDQYSSETKSLSLCLFEFLAKAVGAEPESLLGIFEEQPRGMRMNYYPPCRQSDKGNWPVNDVQGLQIKRDGKWFSVDALSGAFIVNIGDTLEILSNGKFKSVEHRAMIHPNKERISTALFHYPRDDLLLSPLPEFVKDVF

SEQ ID NO: 191153 - protein, 41 aa, Oryza sativa
  Clone ID: PAT_MRT4530_87499C.1.pep
MAKTMEQGWREAGNRSQARGLLGEGRKAKSICRRGTTSPYQ

SEQ ID NO: 191154 - protein, 56 aa, Oryza sativa
  Clone ID: PAT_MRT4530_8749C.1.pep
QVISSSARKQQARPWTDLGSQTALPRQLQHAADAASFRDHKLTYACMRRHSSSIVS

SEQ ID NO: 191155 - protein, 363 aa, Oryza sativa
  Clone ID: PAT_MRT4530_874C.1.pep
FGVLMFPRELQLSGESAKLVKLGEAVSKGTVNNETLGYFIGRVYLFLTRLGIDKNRLRFRQHLPNEMAHYAADCWDAEIECSYGWIECVGIADRSAYDLRAHSDKSGVPLVAHEKFSKPREVEKLVIVPSKKDLGLAFKGNQKMVVEALEAMSEKEAMDMKAALESKGETNFQVCTLGKDVVITKKMVSISMEKKLEHQRVFTPSVIEPSFGIGRIIYCLFEHSFYTRPSKSEEEQLNVFRFPPIVAPIKCTVFPLVKNQEFDDAAKVIDKALTTAGISHIIDTTAISIGRRYARTDEIGVPFAVTVDSATSVTIRERDSKEQIRVGIDEVASVVKQLTDGQSTWADVSFKYPSHIGPQGDQE

SEQ ID NO: 191156 - protein, 47 aa, Oryza sativa
  Clone ID: PAT_MRT4530_87500C.1.pep
LMIILSVVPGVNAMHIHGKYVNFLECVLLLGAPIYPGLVNSFHSSAV

SEQ ID NO: 191157 - protein, 128 aa, Oryza sativa
  unsure (1)..(128): unsure at all Xaa locations
  Clone ID: PAT_MRT4530_87501C.1.pep
RQSLDQYSSETKSLSLCLFEFLAKAVGAEPESLLGIFEEQPGGMRMNYYPPCRQSDKXVIGLSPHTDVVGLTLLLQVNDVQGLQIKRDGKWFSVDALSGAFIVNIGDTLEVMTEQTMPLLVKAPNKQF

SEQ ID NO: 191158 - protein, 73 aa, Oryza sativa
  Clone ID: PAT_MRT4530_87502C.1.pep
GVILESRGYEVLDLFALRLPVDDSRIFCAVTLFGTHSIHVLNSIYARLYRDGVSFLKRVKKEGTSRSSTTRVA

SEQ ID NO: 191159 - protein, 52 aa, Oryza sativa
  Clone ID: PAT_MRT4530_87503C.1.pep
DLVSDLVRLSPRSHTPSVKRKVLKLRAIFSYLRRRWRRRSRRSRAASDRARP

SEQ ID NO: 191160 - protein, 127 aa, Oryza sativa
  unsure (1)..(127): unsure at all Xaa locations
  Clone ID: PAT_MRT4530_87504C.1.pep
HGGSRLFMATTSSSPYHGVSGTGVARLFLSSAPRCSSASSSPWRHGGDLFLSSVRRPPDPATTSSGVTRSSHHEPLPLSRAAATASFFPLPDAAATRSSQHDSERRLLQRGEWGTSKLSAKNXGVDF

SEQ ID NO: 191161 - protein, 67 aa, Oryza sativa
  Clone ID: PAT_MRT4530_87505C.1.pep
HCPCIVQIRGFAPAFASSSVTIAATATLRTHRSWLPCLPNLKPLIEFAPLYWCTCTTPMINMVLNKY

SEQ ID NO: 191162 - protein, 138 aa, Oryza sativa
  Clone ID: PAT_MRT4530_87506C.1.pep
MDLDGSCVQRRQQRRDRVVMGPMAAPSHLLLVVVGGGGSGADPAIAGLVVPLSAASSSLSSTVVPGGDGDGTAPELPTARSRTLPEVTPSPVEPTPAHCQPLPDVAPPVVGHRLMRQADARPPALGRRAAVCPLLATG

SEQ ID NO: 191163 - protein, 112 aa, Oryza sativa
  Clone ID: PAT_MRT4530_87507C.1.pep
NKKPYRQTPHRAPFLPHQSTAPSRLHPLRSFAPSPCAASRLRLCLHGRAPPPVGAPPPPSPGLQLQPAHLALHGRTPLPASAPPPPWRALPPAGPPPPPSPGAASSRPPPLP

SEQ ID NO: 191164 - protein, 103 aa, Oryza sativa
  Clone ID: PAT_MRT4530_87508C.1.pep
TLKKDPPADCSQALPLKIKHLCLSQSTLKWSLFRSNARKKKITLNVFFQLCKNVTVIFVPPREPKQPVRPNLNTPELPPVENFMYKKLPQGFEFSGLKKIELF

SEQ ID NO: 191165 - protein, 1161 aa, Oryza sativa
  unsure (1)..(1161): unsure at all Xaa locations
  Clone ID: PAT_MRT4530_87509C.1.pep
MSASNEKWIDGLQFSSLFWPPPQDSQQKQAQILAYVEYFGQFTADSEQFPEDIAQLIQSCYPSKEKRLVDEVLATFVLHHPEHGHAVVHPILSRIIDGTLSYDRNGFPFMSFISLFSHTSEKEYSEQWALACGEILRVLTHYNRPIFKVDHQHSEAECSSTSDQASSCESMEKRANGSPRNEPDRKPLRPLSPWITDILLAAPLGIRSDYFRWCGGVMGKYAAGGELKPPTTXAYSRGSGKHPQLMPSTPRWAVANGAGVILSVCDEEVARYETANLTAAAVPALLLPPPTTPLDEHLVAGLPPLEPYARLFHRYYAIATPSATQRLLFGLLEAPPSWAPDALDAAVQLVELLRAAEDYDSGMRLPKNWMHLHFLRAIGTAMSMRAGIAADTSAALLFRILSQPTLLFPPLRHAEGVELHHEPLGGYVSSYKRQLEVPASEATIDATAQGIASMLCAHGPDVEWRICTIWEAAYGLLPLSSSAVDLPEIVVAAPLQPPTLSWSLYLPLLKVFEYLPRGSPSEACLMRIFVATVEAILRRTFPSETSEQSRKPRSQSKNLAVAELRTMIHSLFVESCASMDLASRLLFVVLTVCVSHQALPGGSKRPTGSDNHSSEEVTNDSRLTNGRNRCKKRQGPVATFDSYVLAAVCALSCELQLFPFISKNGNHSNLKDSIKIVIPGKTTGISNELHNSISSAILHTRRILGILEALFSLKPSSVGTSWSYSSNEIVAAAMVAAHVSELFRRSRPCLNALSALKQCKWDAEISTRASSLYHLIDLHGKTVTSIVNKAEPLEAHLTLTPVKKDEPPIEEKNINSSDGGALEKKDASRSHRKNGFARPLLKCAEDVILNGDVASTSGKAIASLQVEASDLANFLTMDRNGGYRGSQTLLRSVLSEKQELCFSVVSLLWQKLIASPEMQMSAESTSAHQGWRKVVDALCDVVSASPTKASAAIVLQAEKDLQPWIARDDEQGQKMWRVNQRIVKLIAELMRNHDSPEALVILASASDLLLRATDGMLVDGEACTLPQLELLEVTARAVHLIVEWGDSGVSVADGLSNLLKCRLSTTIRCLSHPSAHVRALSMSVLRDILNSGQINSSKLIQGEHRNGIQSPTYQCLAASIINWQADVERCIEWEAHSRRATGLTLAFLTAAAKELGCPLTC

SEQ ID NO: 191166 - protein, 78 aa, Oryza sativa
  unsure (1)..(78): unsure at all Xaa locations
  Clone ID: PAT_MRT4530_8750C.1.pep
HAFGKQATGGGGCGRPSRTTERCFWKATGCDRSIRXRGYPNRMIGLNKTLGYYEGRAPTGTKTDWVMNEVCLCECDTI

SEQ ID NO: 191167 - protein, 152 aa, Oryza sativa
  unsure (1)..(152): unsure at all Xaa locations
  Clone ID: PAT_MRT4530_87510C.1.pep
GRMRPSRPIPAATAPPRRHPPRRLAGRRQRRRRGPPTSLLPPPSSSSRRRRDHPSKPSELPLLPLPLPPFPVPTPPHPRTLIRRLFAGVWVIAGAGEEXEFVGVGEXATGARIAKHIQRGCSLRVRARAETDRPTTPRVARPAEQQALSLSP

SEQ ID NO: 191168 - protein, 1173 aa, Oryza sativa
  Clone ID: PAT_MRT4530_87511C.1.pep
MDELTGGFNVVLITEFSQFLGQALELPSMSASNEKWIDGLQFSSLFWPPPQDSQQKQAQILAYVEYFGQFTADSEQFPEDIAQLIQSCYPSKEKRLVDEVLATFVLHHPEHGHAVVHPILSRIIDGTLSYDRNGFPFMSFISLFSHTSEKEYSEQWALACGEILRVLTHYNRPIFKVDHQHSEAECSSTSDQASSCESMEKRANGSPRNEPDRKPLRPLSPWITDILLAAPLGIRSDYFRWCGGVMGKYAAGGELKPPTTAYSRGSGKHPQLMPSTPRWAVANGAGVILSVCDEEVARYETANLTAAAVPALLLPPPTTPLDEHLVAGLPPLEPYARLFHRYYAIATPSATQRLLFGLLEAPPSWAPDALDAAVQLVELLRAAEDYDSGMRLPKNWMHLHFLRAIGTAMSMRAGIAADTSAALLFRILSQPTLLFPPLRHAEGVELHHEPLGGYVSSYKRQLHIDLYFHMCSFNCTKLEVPASEATIDATAQGIASMLCAHGPDVEWRICTIWEAAYGLLPLSSSAVDLPEIVVAAPLQPPTLSWSLYLPLLKVFEYLPRGSPSEACLMRIFVATVEAILRRTFPSETSEQSRKPRSQSKNLAVAELRTMIHSLFVESCASMDLASRLLFVVLTVCVSHQALPGGSKRPTGSDNHSSEEVTNDSRLTNGRNRCKKRQGPVATFDSYVLAAVCALSCELQLFPFISKNGNHSNLKDSIKIVIPGKTTGISNELHNSISSAILHTRRILGILEALFSLKPSSVGTSWSYSSNEIVAAAMVAAHVSELFRRSRPCLNALSALKQCKWDAEISTRASSLYHLIDLHGKTVTSIVNKAEPLEAHLTLTPVKKDEPPIEEKNINSSDGGALEKKDASRSHRKNGFARPLLKCAEDVILNGDVASTSGKAIASLQVEASDLANFLTMDRNGGYRGSQTLLRSVLSEKQELCFSVVSLLWQKLIASPEMQMSAESTSAHQGWRKVVDALCDIVSASPTKASAAIVLQAEKDLQPWIARDDEQGQKMWRVNQRIVKLIAELMRNHDSPEALVILASASDLLLRATDGMLVDGEACTLPQLECRLSTTIRCLSHPSAHVRALSMSVLRDILNSGQINSSKLIQGEHRNGIQSPTYQCLAASIINWQADVERCIEWEAHSRRATGLTLAFLTAAAKELGCPLTC

SEQ ID NO: 191169 - protein, 1160 aa, Oryza sativa
  Clone ID: PAT_MRT4530_87512C.1.pep
MSASNEKWIDGLQFSSLFWPPPQDSQQKQAQILAYVEYFGQFTADSEQFPEDIAQLIQSCYPSKEKRLVDEVLATFVLHHPEHGHAVVHPILSRIIDGTLSYDRNGFPFMSFISLFSHTSEKEYSEQWALACGEILRVLTHYNRPIFKVDHQHSEAECSSTSDQASSCESMEKRANGSPRNEPDRKPLRPLSPWITDILLAAPLGIRSDYFRWCGGVMGKYAAGGELKPPTTAYSRGSGKHPQLMPSTPRWAVANGAGVILSVCDEEVARYETANLTAAAVPALLLPPPTTPLDEHLVAGLPPLEPYARLFHRYYAIATPSATQRLLFGLLEAPPSWAPDALDAAVQLVELLRAAEDYDSGMRLPKNWMHLHFLRAIGTAMSMRAGIAADTSAALLFRILSQPTLLFPPLRHAEGVELHHEPLGGYVSSYKRQLEVPASEATIDATAQGIASMLCAHGPDVEWRICTIWEAAYGLLPLSSSAVDLPEIVVAAPLQPPTLSWSLYLPLLKVFEYLPRGSPSEACLMRIFVATVEAILRRTFPSETSEQSRKPRSQSKNLAVAELRTMIHSLFVESCASMDLASRLLFVVLTVCVSHQALPGGSKRPTGSDNHSSEEVTNDSRLTNGRNRCKKRQGPVATFDSYVLAAVCALSCELQLFPFISKNGNHSNLKDSIKIVIPGKTTGISNELHNSISSAILHTRRILGILEALFSLKPSSVGTSWSYSSNEIVAAAMVAAHVSELFRRSRPCLNALSALKQCKWDAEISTRASSLYHLIDLHGKTVTSIVNKAEPLEAHLTLTPVKKDEPPIEEKNINSSDGGALEKKDASRSHRKNGFARPLLKCAEDVILNGDVASTSGKAIASLQVEASDLANFLTMDRNGGYRGSQTLLRSVLSEKQELCFSVVSLLWQKLIASPEMQMSAESTSAHQGWRKVVDALCDIVSASPTKASAAIVLQAEKDLQPWIARDDEQGQKMWRVNQRIVKLIAELMRNHDSPEALVILASASDLLLRATDGMLVDGEACTLPQLELLEVTARAVHLIVEWGDSGVSVADGLSNLLKCRLSTTIRCLSHPSAHVRALSMSVLRDILNSGQINSSKLIQGEHRNGIQSPTYQCLAASIINWQADVERCIEWEAHSRRATGLTLAFLTAAAKELGCPLTC

SEQ ID NO: 191170 - protein, 132 aa, Oryza sativa
  Clone ID: PAT_MRT4530_87513C.1.pep
MGISSHHDRYGVDRPTDDEKNDGATKDHLGDCKENVRTTTDSEEHDKTIEYPEMATSSDEDASDSEEEAGMSSDSEDDSSYNPPKIANTAFILEDSSHRDGSIYKGNSEWKRTYRIADLEESKDDPIIVEKE

SEQ ID NO: 191171 - protein, 1160 aa, Oryza sativa
  Clone ID: PAT_MRT4530_87514C.1.pep
MSASNEKWIDGLQFSSLFWPPPQDSQQKQAQILAYVEYFGQFTADSEQFPEDIAQLIQSCYPSKEKRLVDEVLATFVLHHPEHGHAVVHPILSRIIDGTLSYDRNGFPFMSFISLFSHTSEKEYSEQWALACGEILRVLTHYNRPIFKVDHQHSEAECSSTSDQASSCESMEKRANGSPRNEPDRKPLRPLSPWITDILLAAPLGIRSDYFRWCGGVMGKYAAGGELKPPTTAYSRGSGKHPQLMPSTPRWAVANGAGVILSVCDEEVARYETANLTAAAVPALLLPPPTTPLDEHLVAGLPPLEPYARLFHRYYAIATPSATQRLLFGLLEAPPSWAPDALDAAVQLVELLRAAEDYDSGMRLPKNWMHLHFLRAIGTAMSMRAGIAADTSAALLFRILSQPTLLFPPLRHAEGVELHHEPLGGYVSSYKRQLEVPASEATIDATAQGIASMLCAHGPDVEWRICTIWEAAYGLLPLSSSAVDLPEIVVAAPLQPPTLSWSLYLPLLKVFEYLPRGSPSEACLMRIFVATVEAILRRTFPSETSEQSRKPRSQSKNLAVAELRTMIHSLFVESCASMDLASRLLFVVLTVCVSHQALPGGSKRPTGSDNHSSEEVTNDSRLTNGRNRCKKRQGPVATFDSYVLAAVCALSCELQLFPFISKNGNHSNLKDSIKIVIPGKTTGISNELHNSISSAILHTRRILGILEALFSLKPSSVGTSWSYSSNEIVAAAMVAAHVSELFRRSRPCLNALSALKQCKWDAEISTRASSLYHLIDLHGKTVTSIVNKAEPLEAHLTLTPVKKDEPPIEEKNINSSDGGALEKKDASRSHRKNGFARPLLKCAEDVILNGDVASTSGKAIASLQVEASDLANFLTMDRNGGYRGSQTLLRSVLSEKQELCFSVVSLLWQKLIASPEMQMSAESTSAHQGWRKVVDALCDVVSASPRKASAAIVLQAEKDLQPWIARDDEQGQKMWRVNQRIVKLIAELMRNHDSPEALVILASASDLLLRATDGMLVDGEACTLPQLELLEVTARAVHLIVEWGDSGVSVADGLSNLLKCRLSTTIRCLSHPSAHVRALSMSVLRDILNSGQINSSKLIQGEHRNGIQSPTYQCLAASIINWQADVERCIEWEAHSRRATGLTLAFLTAAAKELGCPLTC

SEQ ID NO: 191172 - protein, 739 aa, Oryza sativa
  unsure (1)..(739): unsure at all Xaa locations
  Clone ID: PAT_MRT4530_87515C.1.pep
VEAVVMPERYALGGACRVLAGMPAPLGATALDGGVNFAVYSAGASAASLCLFTPDDLEADEVTEEVPLDPLFNRTGNVWHVFIEGELHNMLYGYRFDGMFAPHCGQYFDVSNVVVDPYAKAVISRGEYGVPGPGGDCWPQMAGMIPLPYSTFDWQGDLPLRYPQKDLVIYEMHLRGFTKHSSSNVEHPGTYIGAISKLDYLKELGVNCVELMPCHEFNELEYFSCSSKMNFWGYSTINFFSPMIRYSSGGIRNCGRDAINEFKTFVREAHKRGIEVIMDVVFNHTAEGNEKGPILSFRGIDNSTYYMLAPKGEFYNYSGCGNTFNCNHPVVREFIVDCLRYWVTEMHVDGFRFDLASIMTRGCSLWDPVNVYGSPVEGDMTTTGTPLATPPLIDMISNDPILGDVKLIAEAWDAGGLYQVGQFPHWKIWSEWNGKGMGYGKYRDIVRQFIKGTDGFAGGFAECLCGSPHLYQAGGRKPWHSINFVCAHDGFTLADLVTYNKKYNSSNGEDNRDGENHNLSWNCGEEGEFAGLSVKRLRKRQMRNFFVSLMVSQGVPMFYMGDEYGHTKGGNNNTYCHDHYVNYFRWDKKEESSDLQRFCSLMTKFRKQCESLGLADFPTAQRLHWHGHQPGKPDWSETSRFVAFSTKDETKGEIYVAFNASHLPAVVGLPERPGYRWEPLVDTGKPAPYDFLTDDLPDRXTPSTCSLISSTPISTPCSATPPSSLNCSLMIERTKYSIV

SEQ ID NO: 191173 - protein, 100 aa, Oryza sativa
  unsure (1)..(100): unsure at all Xaa locations
  Clone ID: PAT_MRT4530_87516C.1.pep
MGERALSTTPLLAGIDYESGFXCGPRSWTETPCGDHXGEAVRTTAGGYVFCVLWWVTLLGRAVLVVLGTGMGISXACFLGAVRWIAGGLWGSLGLAAGDV

SEQ ID NO: 191174 - protein, 318 aa, Oryza sativa
  Clone ID: PAT_MRT4530_87517C.1.pep
MNAFFTSLARGLDDLSSGGGLSSLPALLRAAALLRGLHSQLTLLVGQLHLPPGGRWLDEYMDETARLWEACLAVKVGLAAVERYCAAASCAAAAMDDWLQDPSPLSTRQVMRAISASRREAMAAEEENRALSEARIAPLSLQLDERLLLRAADARLSGFNGFRGLLYALHNASSLLLLVLASGAVSCAAAAAGPCSADGAADAGGFVASIAMLQQRMAEEADADGSAGAARGGIRMYEFRCARAAVEAAHEEVERAVAAGPRKQQCEDGDGGVKDKVDELKAWLDVLRTGTDGLVCQLDDFLDDIVEGRKELSDLCSH

SEQ ID NO: 191175 - protein, 56 aa, Oryza sativa
  Clone ID: PAT_MRT4530_87518C.1.pep
MAGRWDPPATRVHVSARPWLARLRRREVTASTGKRVGCGVWAGGELARVERNGRRW

SEQ ID NO: 191176 - protein, 107 aa, Oryza sativa
  Clone ID: PAT_MRT4530_87519C.1.pep
MQDVHHDFFPLQAQLALDSPATPTHWGCRCCRARTTCTAGFIGLNNIDHGGRQVWADTRYGVADAEHERVHAETFALAPQPHQQHRPADHAARFDNSDPFLGTPHGH

SEQ ID NO: 191177 - protein, 56 aa, Oryza sativa
  Clone ID: PAT_MRT4530_8751C.1.pep
MERVRRISRAAFGFRARWGGERGEAAEETIEREKKMEGMVKPFAPLSPATSRCFLV

SEQ ID NO: 191178 - protein, 80 aa, Oryza sativa
  Clone ID: PAT_MRT4530_87520C.1.pep
SDEHYQANTYFTMYARCCCTFWERNTERSPHVRWAFGSRQAMTRRIGWSKVEKLSLTLNSKRILPILQGGTYLCKNISCL

SEQ ID NO: 191179 - protein, 86 aa, Oryza sativa
  Clone ID: PAT_MRT4530_87521C.1.pep
NSKVMRCKKRNQVERERERGIDRYPRSRAIDRRLGFSSPSSSTWSSYVAGDGNRSHERRILEHRDIYPQITPQKPSLRHSPLAQLV

SEQ ID NO: 191180 - protein, 81 aa, Oryza sativa
  Clone ID: PAT_MRT4530_87522C.1.pep
FHSNNGSDFRRHGKIIQRKHIGYCLKYSPSQNFDRDATRSILPPGYILQHNMSTPLRDVKPLSVWWLMLSNNNILHTKQQH

SEQ ID NO: 191181 - protein, 93 aa, Oryza sativa
  Clone ID: PAT_MRT4530_87523C.1.pep
MAFSKPQGQRSGWAHNGHSQASTDNSISRAVAGTTTEESDTDAGDNVVVLLLALGAEAWRCCQYTGALWLLAMVVGFIKLLLGQKWSMEEANR

SEQ ID NO: 191182 - protein, 571 aa, Oryza sativa
  Clone ID: PAT_MRT4530_87524C.1.pep
MGSPWLRIRLLPEVPPRLLRPHLRRTLSVRASASASASPDGAGGPVRVRFAPSPTGNLHVGGARTALFNYLFARSKGGKFVLRIEDTDLERSTKKSEEAVLSDLAWLGLDWDEGPDVGGEFGPYRQSERNSMYKQYAEKLMESGAVYQCFCSSEELEQMKETAKQMQLPPVYMGKWGTASDAEIQQELEKGTPYTYRFRVPKEGSLKINDLIRGEVSWNLDTLGDFVIMRSNGQPVYNFCVTVDDATMRISHVISLQSSCFSPRAEEHLPNTLRQALIYKALGFPMPSFAHVSLILAPDRSKLSKRHGATSVGQYKEMGYLPQAMVNYLALLGWGDGTENEFFTIDDLVEKFTINRVNKSGAVFDAVKLKWMNGQHLRSFPPDVLIKSFEDRWKDTGILQESESGFAKEAAELLKDGIDLITDADAALSNLLSYPLHATLSSDEAKSVVQDKLSEVASGLISAYDSGELCQALAEGRDGWQKWVKIFGKSLKRKGKSLFMPLRVLLTGKLHGPDMGGTVVLIHKAGTCGAVTQQSGFVNLDERFRILKEVEWESLVQEQESPAETAVPASP

SEQ ID NO: 191183 - protein, 76 aa, Oryza sativa
  Clone ID: PAT_MRT4530_87525C.1.pep
FSTNQQPAQLGTTQNHSWFPDHSAQCQCTQSHISPHPPDASNIFFAHINSHQDIIQSSQHRCRASGQQHITHPTDC

SEQ ID NO: 191184 - protein, 215 aa, Oryza sativa
  Clone ID: PAT_MRT4530_87526C.1.pep
MTAALQALLDPTALSLGLPTPVINKEVYLAICLTVLAGTRAGKALVGKAVLGVCGPPCWWEWETSRRCSHVGLQAVVPEVASGGAHRGLEATLRNIVRRPLAFLSASGSCGPANADMRHLIARLLAKDPAARLGSHAAPPTAPCGSNRWFLMPPAPVRMKMWRAPRLVGRALAARATDASPRRAKVGHVSARGGLHGRPCMMRVRRQLSINVVEV

SEQ ID NO: 191185 - protein, 92 aa, Oryza sativa
  Clone ID: PAT_MRT4530_87527C.1.pep
VFSYKNIMKHYNLIVLIMFLYKKIEYIGKGIHYTGPYRELNNFLKRYCDYTYTGSFPYPPCKTKKLRNNIETPWMMKIICHTVKFRHNSSSG

SEQ ID NO: 191186 - protein, 346 aa, Oryza sativa
  Clone ID: PAT_MRT4530_87528C.1.pep
EKVMVPRILIVLLVVLLGLAFQAILRPPPQKLCGSPGGPPVTSPRIKLRDGRYLAYREDGVQKDKAKFKIISVHAFDSTKDFPLQVSKELVHELGIYIVGFDRAGYGESDPNPKRDVKSEALDIEELADQLELGHKFYVLGVSMGGYSIWGCLQYIPNRLAGAAMVVPIINYWWPSFPAELSRQAFKRLIVPEQRTLWIAHNMPSLLYQWMTQKWLPSSAAAMRHPEIFSKHDLEVLQKMMAMPLIENKSRQQGIYESTHRDLLVAFGKWEFDPMNITNPFPQNEGSVHIWQGYEDRLVLVELQRYIAQRLPWIQYHEFPEGGHMFMLVDGWTDKIIRALLVGEQL

SEQ ID NO: 191187 - protein, 200 aa, Oryza sativa
  unsure (1)..(200): unsure at all Xaa locations
  Clone ID: PAT_MRT4530_87529C.1.pep
PSPPPPXSSPPPSTSISPQXPPPPPPPPPPPPPPPAISPTNPSKHAPLPPIALRLALPPSSLCASPPPPSPLPPCPSPHPVPSXPPRRRIPPPPPRCRCRSPPSRRRSPPPPPPPPPXDSSPLPSISISPQXPPRRSPANPPPPPPTEPTDLLRPASRPHPSTTANSSPPLHSIPSIPPSPRRRRGGPRPEPPVPATGFP

SEQ ID NO: 191188 - protein, 435 aa, Oryza sativa
  Clone ID: PAT_MRT4530_8752C.1.pep
MEATAGGSRRSPSIFRILWPKKSIVAPPAASRRRPPLSPLLLPPITVVAAPSSFPGGASSPDLQREAVKVTGLLLRGSDIVWAVHVESADAGVARVLARALRERRYGEMGSHGTVGACEQVGAGKVRFFVYKGDGVEAVEVTEFGRGDDPCIVSEGDGVEAVEVTEVVWEDDPGRLLWEKGCLLRCELLLKTASKLRDPHVSYLIEGPRTTPGESHYSIILHGNDLNSVPHLSRNGSTEEYDANIVSCSKFFPAKRSLSLTRENADAIQITILSNQSFNSSKASTPAVEYFPAPALASLRAINLKLDILCYTSVDFPVAAAVSELVIPGLADQLSIMKKAIVSELTTQQPQVFLEHGLLIPNEQVKDKGCMLSPYHFVPPGLLIPVTTIYDTRYGEIEEKQISGGIISLIDGSYEYYHYLHDGIDDNVMPGFHLC

SEQ ID NO: 191189 - protein, 66 aa, Oryza sativa
  Clone ID: PAT_MRT4530_87530C.1.pep
GSELLVTLITCSNIHKQTGHAQNSKKELFTFLNTKVSKARFSPINLSATFPVAIQHHTYKIPNSLC

SEQ ID NO: 191190 - protein, 156 aa, Oryza sativa
  unsure (1)..(156): unsure at all Xaa locations
  Clone ID: PAT_MRT4530_87531C.1.pep
AAPPRRGTCSRARGRRRRASRSPPPPPPPPTRRPRRRPRQRRAPPPPPRRTGRTATARRTAPARPPRTSACTPPSARSTRTPPIPPPPPPPPXARIXPPAQPPPPPPPTYPKKTSDRSLYPAKEAATRRTHHQMIGSDIPPVLFAGGEEERWLVHG

SEQ ID NO: 191191 - protein, 106 aa, Oryza sativa
  Clone ID: PAT_MRT4530_87532C.1.pep
TDSRSTHAPRVRPRVRFRQARPLSHRARRPRRREGSVVGLTVRWRVLPLGEGCVPEPDPVVPELHRAVARLRRGPHGLPNAVAAGVPGALLPVAHLSCQCIRHLPF

SEQ ID NO: 191192 - protein, 167 aa, Oryza sativa
  Clone ID: PAT_MRT4530_87533C.1.pep
MEKKGRGSNPAPRGRCIYRKRRRRKTGKRGGQKRDFARASLVCHGSTLAGGPRPPPAGVGPTCQRVRRDGREKGEERKCSTRARAALLTCGTRRPRGPRYSGCVCSGGGAWRADPDRAHWTGRRVCGRRNTWTAGERGERVGPVLSGSSSRASGSGRWIASWRDEGR

SEQ ID NO: 191193 - protein, 118 aa, Oryza sativa
  unsure (1)..(118): unsure at all Xaa locations
  Clone ID: PAT_MRT4530_87534C.1.pep
MSLISMMEANLPPGFRFHPRDEELVVDYLYHKLSGGGEFYGGVAMVDVDLNKCEPWELPDAARVGATEWYFFSLHDRKYATGQRTNRXTRSGYWKATGKDRAIVTXLRAVGGEVVGMR

SEQ ID NO: 191194 - protein, 66 aa, Oryza sativa
  unsure (1)..(66): unsure at all Xaa locations
  Clone ID: PAT_MRT4530_87535C.1.pep
RTIILLASRXTNYSSTSTLKGGKVHLLSSSIAKHNIXLDAQTFGHHXTTLSHARRLXPPMRXHIIN

SEQ ID NO: 191195 - protein, 332 aa, Oryza sativa
  Clone ID: PAT_MRT4530_87536C.1.pep
MSLISMMEANLPPGFRFHPRDEELVVDYLYHKLSGGGEFYGGVAMVDVDLNKCEPWELPAYFLHNLIIFPARARARAAGRRRREDAARVGATEWYFFSLHDRKYATGQRTNRATRSGYWKATGKDRAIVTRRRAAAGEAVAGGEVVGMRKTLVFYQGRAPRGSKTEWVMHEFRVDGHAVADHPSSSTSSSSSNLLKEDWVLCRVFYKSRTATPRAVVSGEAAVSLSGELSLPPPLPPPVAPAVVDGYTGGGYYEQDSSAGYHHHHHHRPPPSAALPFKDLTDFRDLLSNMAQGGGGGAAAAKTEGFHLGWSEEESSGYVQQSAMASQAWNPF

SEQ ID NO: 191196 - protein, 242 aa, Oryza sativa
  Clone ID: PAT_MRT4530_87537C.1.pep
MVSAWTIVPGIIVSLIVLVVTKLWDPIAQVYGYPFDAERRVQKLVDEFSKLQDQLGELGILDPKPSSAVLSGWLQRAAGCKDKVEEIKRRHESVKSVGVQGLLPRINVVRHLCAIGRDADLELEEVKDLIAKGEGHLKEAGAAPHPIPIPIPLLPPPAAEFDNGQLAQSILDTAAAGTWGVGIQAMKPHLTSVLDFVREDGGGAPGVLGVWGMGGAGKTTLLKLARDPRVQTLDHIVLAEAG

SEQ ID NO: 191197 - protein, 114 aa, Oryza sativa
  unsure (1)..(114): unsure at all Xaa locations
  Clone ID: PAT_MRT4530_87538C.1.pep
MIFLPSPSRGHLPETAAHHPSSTSLLVGYQGARSPTRSESIHAIGFERERVREKNGSPLPYTSXTNAAILWRARHRRKMASVWIVACHRPAPPTSRCHRRCRLGRTTRGTSGRL

SEQ ID NO: 191198 - protein, 57 aa, Oryza sativa
  Clone ID: PAT_MRT4530_87539C.1.pep
SLSSILPTLVSFCQSKGDTYIYGTTITNGPSHGDSSFKYGHKLNPPKLWRIQLHSHF

SEQ ID NO: 191199 - protein, 193 aa, Oryza sativa
  Clone ID: PAT_MRT4530_8753C.1.pep
MEPRSPRPFPLSPAALSFPRRYKNVARTPLFRFRRLPLALAVGIVLAPCSSLSAVAVDLRLAAAVAPLFFPARRPLLRHRRIAADPVRRSASPADRRSTVVIIFPNRAAVFLRSGRRSRRRRCPGVSQGPPFAFPLSSSLSGATPPRRWSPAATIGARVHAAPVGRAGEAALGRALAAAKWARPSAARARGCG

SEQ ID NO: 191200 - protein, 46 aa, Oryza sativa
  Clone ID: PAT_MRT4530_87540C.1.pep
MGPESSKLPYGSTKFWAAHRVTNNDHEEEDACGEPVDLLEWDSYGF

SEQ ID NO: 191201 - protein, 73 aa, Oryza sativa
  unsure (1)..(73): unsure at all Xaa locations
  Clone ID: PAT_MRT4530_87541C.1.pep
RRGRPRCDGDXPPGPGVSPIAGSAAALRAGECAGSSVEQGEEEXQKKKKRDRHVDGREXQASGADRRQTRTPS

SEQ ID NO: 191202 - protein, 136 aa, Oryza sativa
  Clone ID: PAT_MRT4530_87542C.1.pep
MGEGGAASGGEAPPLSPSQPASFSPTPPGLLSPSPAGRGEKGGHPRVAWTGATCSATVMRNTAVAVKPHAWGPPPLRPPLTDRCRAHLLPASKAHWLYTFARIPRSAITTLRRRREKREKRREGEEKRRKKCAADM

SEQ ID NO: 191203 - protein, 132 aa, Oryza sativa
  Clone ID: PAT_MRT4530_87543C.1.pep
MTSCSRLVSRWQVGPHFQFADRLAKGGGHMLASPEAVARAAVAARRALTDVHGGRPASSSTATAPAINRGRRLGERHVLPWREPKQRMRMQRPQVGAELVPVAKAASGNVAMPICALLVPVEGGSGGRKKFT

SEQ ID NO: 191204 - protein, 77 aa, Oryza sativa
  Clone ID: PAT_MRT4530_87544C.1.pep
MEITRTTRIIRSASARIYRCITSPTEYSKGIESKGTCMSISSSRSSKDTKLMHCQPAVSTSTPTSNVLCDTQQPLKI

SEQ ID NO: 191205 - protein, 516 aa, Oryza sativa
  Clone ID: PAT_MRT4530_87545C.1.pep
MEPDVGAEDAAADASTGGGSRRPPGPRAAAPAASRAAPPASPTSAAAATTLGASPAAAPPTGPASSPAASPALQTSAAAAASLVVVEPPASPTSAAATILGASPAPALPTSPETSIPAPPPPPSLVKVLDMDRAKTLIKEQDWDAVEGYIWSILCDNQEHCVDDFARLHPALYLMFREEKLFQLLAENKIDEAHIFYQHSIVSLEDRDGIFLPVDLGVRIKNLDPSNSSSVPIRRSTQEELSRYVKLYFPKSIGREEYTTCEQFVEKHQLQNISSEKDCMICLACGWEVLGMWKMRPHFVYAHHVKHCSGVTQDLLNRLKNIDGKPILDFTQLVGKFEMTASSMSSKYSSATKKLKRKKTDMVACRSGSKRSRGKRSEEKSEFCDEFVLEKAKLIHGFCVDLANLMKTYVPGEVHVCYKKILDIQLVASSLESNINQMKLKDVFGSSNEDLFGDDFDDVMLKKLSELYKLCIDLGKFTKTSGVREDLAHFEEVLLRIESEVGCTLRVAGLKRAIWL

SEQ ID NO: 191206 - protein, 81 aa, Oryza sativa
  unsure (1)..(81): unsure at all Xaa locations
  Clone ID: PAT_MRT4530_87546C.1.pep
TQTLMSVFVIIISCYTAIDWITDLLLNFLGVGTMHLKRCQTVKLYIAVPLTXFYISQGVVWVFKQSIGYNIIAFCHPVTIE

SEQ ID NO: 191207 - protein, 584 aa, Oryza sativa
  Clone ID: PAT_MRT4530_87547C.1.pep
MAPTAVDSKRISDITEDGSMDRRGNPAVKAKTGNWRSSILLLVNYGLVTCAFFGVGVNLVVFLRRVLHQDNAEAANSISKWTGTVYIFSLIGAFMSDSYWGRYITCAIFQMIYVTGLVILSLASWFLLVKPTGCGAAGEHCDAPSSAGVALFYLSTYMIAFGNGGYQPSIATFGSDQFDETDPREARSKVAFFSYFYLALNVGSLFSNTVLVYYEDEGRWVMGFWVSAAAAGMALVLFLLGTPNYRHFKPTGNPLTRIAQVFVAAFRKWRAEVPRSELLHEVDGDESQIAGIRKILHSDQIRFLDKAATVTEEDYCTPENMQDPWRLCTVTQVEEVKCILKMLPIWLCTIVYSVVFTQMASLFVEQGTTMNTNIGSFHVPAASMSVFDILSVLAFIAIYRRVLVPVMSRLSGNPQGLTELQRMGVGLVVGMAAMVVAGVVEVERLKRVGAPDQPSSLSVLWQVPQYALIGASEVFMYVGQLEFFNGQAPDGVKSFGSSLCMASISLGNYVSIMLVSVVTSLTAGDRRPGWIPGNLNSGHLDRFYFLLAALSLVDLAVYVACAVWYKGIKLDSNEEKANKITVHV

SEQ ID NO: 191208 - protein, 114 aa, Oryza sativa
  Clone ID: PAT_MRT4530_87548C.1.pep
MFSSAAMQQLKDDGSSARQLQLLVAALSTAGAVAAAAVVRRRHGRKAAAAAAAAAAAPPPVVMREMPRLVMAESGRVEHIEKFSHYVARQMGFQDINECPQLCKLANNYLKRTK

SEQ ID NO: 191209 - protein, 61 aa, Oryza sativa
  unsure (1)..(61): unsure at all Xaa locations
  Clone ID: PAT_MRT4530_87549C.1.pep
GEGQGSGHTPPRPRARLTRGTHGADRRQPRAPGPPWTXERLTHGPHFPWTRSARPLPRLTQ

SEQ ID NO: 191210 - protein, 88 aa, Oryza sativa
  Clone ID: PAT_MRT4530_8754C.1.pep
LTHPGKGGRDGAGRALRRPLSLLDSPRHERGLPAALQGVGVKPEVWCAWLEGVMRRVLSRPLSGMSWWHVGARKRVMGLCLVGIVVHL

SEQ ID NO: 191211 - protein, 76 aa, Oryza sativa
  unsure (1)..(76): unsure at all Xaa locations
  Clone ID: PAT_MRT4530_87550C.1.pep
HPLLPKFHHRCEPGAPLCHHASQRSSGRGCSQDPPQARQGGCRCRARAAGVDHNLVGYHPRPELMPPSTNLVRTXI

SEQ ID NO: 191212 - protein, 134 aa, Oryza sativa
  unsure (1)..(134): unsure at all Xaa locations
  Clone ID: PAT_MRT4530_87551C.1.pep
GRKGKKVYMSFFSLNTSRVASQQKVDESKDPLARCSALRMPSRTNKFPGRFHSLDSIALEGWATKNKSGWAGDFEGFTFGRNLPSWQHSCSGTRPQFSLQARGFKPNLRPVQTLQASLILRQNGGWFAACXTKI

SEQ ID NO: 191213 - protein, 77 aa, Oryza sativa
  Clone ID: PAT_MRT4530_87552C.1.pep
LSRTIYNPKLNLSTDCFVKHLLSKRKLLQSSLKQLQPTAINCFITNGVLVFFSRENVELQNLEPHVDTDLRGGLHPG

SEQ ID NO: 191214 - protein, 99 aa, Oryza sativa
  Clone ID: PAT_MRT4530_87553C.1.pep
QCLAYWHLMCKLNCFPGLSFLISCGDLVPWFGQLMYACVSPIVLQDRSAVLVCDLAIMSPVCCCSFSMQLACSCCSCLCPLFLLRIRLKLFGEKKKKSH

SEQ ID NO: 191215 - protein, 1836 aa, Oryza sativa
  unsure (1)..(1836): unsure at all Xaa locations
  Clone ID: PAT_MRT4530_87554C.1.pep
MAERAVAHNLSPKASGDDGEQNPRRRARTPPSPSRRNPGRGEALREVGGSATSPLAGDGGGRRDGARRRLVYGDGGTPQGALQAAGALLCHPPVVPDPETPARRWLDDVADLVMTAQQRLGAGGRSSATEASGAAAASSKSSRRRARRAAAVTRRSSAIPSSTPPTQEDVCGGPDARLDIERRRDARHAAHATEGASSSGAPLRSGHGGRPPVSPVGGAGCRAFVASLRNVRWPPRFRPTITEKYDGNVNPAEFLQIYTTGIEATGGDDRVMANFFPMALKGQARGWLMNLPPASVHSWEDLCQQFTTNFQGTYPRPGEEADLHAVQRRDDESLRSYIQRFCQVRNTIPCIPAHAVIYAFRGGVRHNRMLEKIASKEPQTTAQLFELADHVARKEEAWTWNSSGSGVAAPAAPGSAARSGRRDRRRKKGSARSDDEGHVLAVEGASRAPRRGRPASDKKKEADAPSXSDRPASGVPCTTPPSTTSRTAXAVKSLAERTRKWEEEKRQERRDGKTPAAPADNRRGEAKQKATTEDIDDGDDDLGFQEPEATVATVDGGACAHASRRSLKAMKRELLAAAPTHEATRRARWSEVALTFDQTDHPPCVARGGQIAMVVSPTVCNVKLGRVLIDGGAALNILSPAAFGAIKAPGMVLWPSQPIIGVTPGHTWPLGHIDLPVTFGGSANFRMERVDFDVADLSLPYNAVLGRPALVKFMAAVHYAYLQMKMPGPGGPITVHGDLKVALACMEQRADHLAAASKPAGGDERLSTSVPAAPRQRMVTCDEEDALVSFLRANADVFAWRSADMPGVPREVIEHRLAVRPGARPVRQKVRRQAPERQAFIREEVARLLEAGFIREVIHPEWLANPVVVPKANGKLRMCIDYTDLNKACPKDPYPLPRIDQIVDSXRGIEANPEKISAIERMRPPXKLRDVQCVTGCMAALSRFISRLGEKALPLFKLLKRSGPFTWTEEAERAFTQLKAYLSSPPVLVAPEPDEPLLLYLAATPQVLSAALVVERDEDNPHSVHPHPVSTRPGREQGGEAPEPNGGPRPPTAGAGPPPACPTVPGAPDPQDGPGATAGRPRLSPSDPEVVGTEAECAPRGLSDEERRGNAAPGEEDRPRRKVQRPVYFVSEALRDAKTRYPQAQKMLYAILMASRKLRHYFQAHRVTVVTSYPLGQILHNREGTGRVVRWTIELSEFDLRFESRHAIKSQALADFVAEWTPAPEPVSAPEASSGPSQLPHTAYWVMQFDGSLSLQGAGAGVTMTSPSGDVLRYLVRLDFRATNNMAEYEGLLAGLRVAAGLGIRRLLVLGDSQLVVNQVCKEYQCSDPQMDAYVRQVRRMERHFDGIELRHVPRRDNAVADELSRLASSRAQTPPGVFEERLAQPSARPDPLGETDAPERPPRPVGVQASGPEGSAPSSPRLIAWITEIQAYLVDKTLPEDREGSERVRRISKRYVLVEGTLYRRAANGVLLKCIPREQGVELLADVHEGECGAHSASRTLVGKAFRQGFYWPTALNDAVDLVRRCKACQFHARQTHQLAQALQTIPLSWPFAVWGFDILGPFRRAPGGFEYLYVTVDKFTKWPQAYPVIKIDKHSALKFIRGITARFGVPNRIITDNGTQFTSELFGDYCEDMGIKLCFASPAHPRSNGQVERANAEILKGLKTKTFNILKKHGDSWIEELPAVLWANRTTPSRATGETPFFLVYGAEAVLPSELTLRSPRVTMYCEADQDQLRRDDLDYLEERRRRAALRAARYQQSLRRYHQRHVRARSLCVDDLVLRRVQTRAGLSKLSPMWEGPYRVIGVPRPGSVRLATGDGTELPNPWNIEHLRRFYP

SEQ ID NO: 191216 - protein, 1665 aa, Oryza sativa
  Clone ID: PAT_MRT4530_87555C.1.pep
MTAQQRLGAGGRSSAIEASGAAAAGSKSSRRRARRAAAVTRRSSAIPSSTPPTQENVRGGPNARLDIERRRDARHAAHATEGASSSGAPLRSGHGSRPPVSPVGGAGCRAFVASLRNVRWPPRFRPTITEKYDGSVNPAEFLQIYTTGIEAAGGDDRVMANFFPMALKGQARGWLMNLPPASVHSWEDLCQQFTTNFQGTYPRPGEEADLHAVQRRNDESLRSYIQRFCQVRNTIPCIPAHAVIYAFRGGVRHNRMLEKIAFKEPQTTAQLFELADRVARKEEAWTWNSSVSGVAAPAAPGSAARLGRRDRRRKKGSARSDDEGHVLAVEGASRDPRKGRPASDKKKEAGAPSRERPTGKWCTVHNTSLHDLADCRAVKSLAERTRKWEEEKRQERREGKTPAAPAGNRRGEAKQKATAEDIDDGDDDLGFQEPEDTVATVDGGACAHASRRSLKAMKRELLAAAPTHEATRRARWSEVALTFDQTDHPPCVARGGQIAMVVSPTVCNVKLGRVLIDRGAALNILSPAAFDAIKAPGMVLRPSQPIIGVTPGHTWPLGHIDLPVTFGGSDNFRTERVDFDVADLSLPYNAVLGRPALVKFMAAVHYAYLQMKMPGPGGPITVHGDLKVALACMEQRADHLAAASKPAGGDERLSTSVPAAPRRRMVTCDEVPVKERPADMPGVPREVIEHRLAVRPGARPVRQKVRRQAPKRQAFIREEVARLLEAGFIREVIHPEWLANPVVVPKANGKLRMCIDYTDLNKACPKDPYPLPRINQIVDSTAGCDLLCFLDAYSGYHQIRMAREDEEKTAFITPIGTYCYTTMPFGLKNAGPTFQRTTRISLGSQIGRNVEAYVDDLVVKTRNQETLLSDLAETFESLRSACIKLNPDKCVFGVPAGKLLGFLCVTGCMAALSRFISRLGEKALPLFKLLKRSGPFTWTEEAERAFTQLKAYLSSPPVLVAPEPDEPLLLYLAATPQVVSAALVVERDEDNPRSTHPYPVSTRPGREQGGEAPEPNGGPRPPTAGAGPPPACPTVPGAPDPQDGPGATAGRPRLSPSDPEVVGTEAECTPRGLSDEEHPGDAAPGAEDRPRRKVQRPIYFVSEALRDAKTRYPQAQKMLYAILMASRKLRHYFQAHQVTVVTSYPLGQILHNREGTGRVVRWAIELSEFDLRFEPRHAIKSQALTDFVAEWTPAPEPVSAPEASSGPSHLPHTAYWVMQFDGSLSLQGAGAGVTLTSPSGDVLRYLVRLDFRATNNMAEYEGLLTGLRVAAGLGIRRLLVLGDSQVVVNQVCKEYQCSDPQMDAYVRQVRRMERHFDGIELRHVPRRDNAVADELSRLASSRAQTPPGAFEERLAQPSARPDPLGETDAPERPPRPVGVQASGPEGSAPSSPRLIAWITEIQAYLADKTLPEDREGTERVRRISKRYVLVEGTLYRRAANEVLLKCIPREQGVKLLADVHEGECGAHSASRTLVGKAFRQGFYWPTALNDAVDLVRRRAPGGFEYLYVAVDKFTKWPEAYPVIKIDKHSALKFIRGITARFGVPNRIITDNGTQFTSELFGDYCEDMGIKLCFASPAHPRSNGQVERANAEILKGLKTKTFNILKKHGDSWIEELPAVLWANRTTPSRATGETPFFLVYGAEAVLPSELTLRSPRVTMYCEADQD

SEQ ID NO: 191217 - protein, 722 aa, Oryza sativa
  Clone ID: PAT_MRT4530_87556C.1.pep
IHELNRSAPARSRVAGWAIELSEFDLRFEPRHAIKSQALADFVAEWTPAPEPVSALEASSGPSQLPHTAYWVMQFDGSLSFQGAGAGVTLTSPSGDVLRYLVRLDFRATNNMAEYEGLLAGLRVAAGLGIRRLLVLGDSQLVVNQVCKEYQCSDPQMDAYVRQVRRMERHFDGIELRHVPRRDNAVADELSRLASSRAQTPPGAFEERLAQPSARPDPLGETDAPERPSRPVGVQASGPEGSAPSSPRLIAWITEIQAYLADKTLPEDREGSERVRRISKRYVLVEGTLYRRAANGVLLKCIPREQGVELLADVHEGECGAHSASRTLVGKAFRQGFYWPTALNDAVDLVRRCRACQFHARQTHQPAQALQTIPLSWPFAVWGLDILGPFRRAPGGFEYLYVAVNKFTKWPEAYPVIKIDKHSALKFIRGITARFGVPNRIITDNGTQFTSELFGDYCEDMGIKLCFASPAHPRSNGQVERANAEILKGLKTKTFNILKKHGDSWIEELPAVLRANRTTPSRATGETPFFLVYGAEAVLPSELTLRSPRVTMYCEADQDQLRRDDLDYLEEQRRRAALRAARYQQSLRRYHQRHVRARSLCVDDLVLRHVQTRAGLSKLSPMWEGPYRVIGVPRPGSVRLATGDGTELPNPWNIEHLRRFYPYALSGPGRLKSPNGAQNRAVPRGVVNSGGKSAKAHNRVIHNPRSPRSRPGQSRHADLPRH

SEQ ID NO: 191218 - protein, 562 aa, Oryza sativa
  Clone ID: PAT_MRT4530_87557C.1.pep
MVGRSSLPEGSLFLGFDSSTQSLKATVLNNELIIVASDIVNFDSDLPHYKTEGGVYRDPADDGHIFSPTIMWVEAFELLLEKLKPKINFSKVVAISGSGQQHGSVYWKKGSHAVLSSLDPTKSLLSQLKDAFSTMDSPIWMDSSTTKQCREIESVVGGALELSKLTGSRAYERFTGPQIRKIYRTVPQVYDDTERISLVSSFMASILVGNYASIDETDGAGMNLMDINQRTWSKTVLEATAPGLEEKLGKLAPAYAVAGRIAPYFVERLQFDKNCLVIQWSGDNPNSLAGLTLNTPGDLAISLGTSDTVFGITAEAKPSLEGHVFPNPVEPDGYMVMLCYKNGSLTREDVRNSCAEKSWDVFNSYLEKTPPLNGGKLGFYYKDHEILPPLPVGFHRYIVENLNDVTSNNLVEREVEEFDPPSEVRAIIEGQLLSMRGHAERFGMPNPPKRIIATGGASSNERILHSIAQIFGCPVFTVQRPDSASLGAALRAAHGWLCNEEGSFVPISCMYQGNLEKTSLGAKLAVSTGEGVEDKELLEKYTVLMRKRMEIERRLVEKIGRA

SEQ ID NO: 191219 - protein, 1911 aa, Oryza sativa
  Clone ID: PAT_MRT4530_87558C.1.pep
MAERAVAHNLSPKASGDDGEQNPRRRARTPPSPSRRNPGRGEALREVGGSATSPLAGDGGGRRDGARRRLVYGDGGTPQGALQAAGALLCHPPVVPDPETPARRWLDDVADLVMTAQQRLGAGGRSSATEASGAAAASSKSSRRRARRAAAVTRRSSAIPSSTPPTQEDVCGGPDARLDIERRRDARHAAHATEGASSSGAPLRSGHGGRPPVSPVGGAGCRAFVASLRNVRWPPRFRPTITEKYDGNVNPAEFLQIYTTGIEATGGDDRVMANFFPMALKGQARGWLMNLPPASVHSWEDLCQQFTTNFQGTYPRPGEEADLHAVQRRDDESLRSYIQRFCQVRNTIPCIPAHAVIYAFRGGVRHNRMLEKIASKEPQTTAQLFELADHVARKEEAWTWNSSGSGVAAPAAPGSAARSGRRDRRRKKGSARSDDEGHVLAVEGASRAPRRGRPASDKKKEADAPSRERPTGKWCTMHNTSLHDLADCRAVKSLAERTRKWEEEKRQERRDGKTPAAPADNRRGEAKQKATTEDIDDGDDDLGFQEPEATVATVDGGACAHASRRSLKAMKRELLAAAPTHEATRRARWSEVALTFDQTDHPPCVARGGQIAMVVSPTVCNVKLGRVLIDGGAALNILSPAAFGAIKAPGMVLWPSQPIIGVTPGHTWPLGHIDLPVTFGGSANFRMERVDFDVADLSLPYNAVLGRPALVKFMAAVHYAYLQMKMPGPGGPITVHGDLKVALACMEQRADHLAAASKPAGGDERLSTSVPAAPRQRMVTCDEVPVKEEDALVSFLRANADVFAWRSADMPGVPREVIEHRLAVRPGARPVRQKVRRQAPERQAFIREEVARLLEAGFIREVIHPEWLANPVVVPKANGKLRMCIDYTDLNKACPKDPYPLPRIDQIVDSTAGCDLLCFLDAYSGYHQIRMDREDEEKTAFITPIGTYCYTTMPFGLKNAGPTFQRTTRISLGSQIGRNVEAYVDDLVVKTCNQETLLSDLAETFESLRSARIKLNPDKWVFGVPAGKLLGFLVSARGIEANPEKISAIERMRPPASLGMCILVAPEPDEPLLLYLAATPQVLSAALVVERDEDNPHSVHPHPVSTRPGREQGGEAPEPNGGPRPPTAGAGPPPACPTVPGAPDPQDGPGATAGRPRLSPSDPEVVGTEAECAPRGLSDEERRGNAAPGEEDRPRRKVQRPVYFVSEALRDAKTRYPQAQKMLYAILMASRKLRHYFQAHRVTVVTSYPLGQILHNREGTGRVVRWTIELSEFDLRFESRHAIKSQALADFVAEWTPAPEPVSAPEASSGPSQLPHTAYWVMQFDGSLSLQGAGAGVTMTSPSGDVLRYLVRLDFRATNNMAEYEGLLAGLRVAAGLGIRRLLVLGDSQLVVNQVCKEYQCSDPQMDAYVRQVRRMERHFDGIELRHVPRRDNAVADELSRLASSRAQTPPGVFEERLAQPSARPDPLGETDAPERPPRPVGVQASGPEGSAPSSPRLIAWITEIQAYLVDKTLPEDREGSERVRRISKRYVLVEGTLYRRAANGVLLKCIPREQGVELLADVHEGECGAHSASRTLVGKAFRQGFYWPTALNDAVDLVRRCKACQFHARQTHQLAQALQTIPLSWPFAVWGFDILGPFRRAPGGFEYLYVTVDKFTKWPQAYPVIKIDKHSALKFIRGITARFGVPNRIITDNGTQFTSELFGDYCEDMGIKLCFASPAHPRSNGQVERANAEILKGLKTKTFNILKKHGDSWIEELPAVLWANRTTPSRATGETPFFLVYGAEAVLPSELTLRSPRVTMYCEADQDQLRRDDLDYLEERRRRAALRAARYQQSLRRYHQRHVRARSLCVDDLVLRRVQTRAGLSKLSPMWEGPYRVIGVPRPGSVRLATGDGTELPNPWNIEHLRRFYP

SEQ ID NO: 191220 - protein, 1947 aa, Oryza sativa
  unsure (1)..(1947): unsure at all Xaa locations
  Clone ID: PAT_MRT4530_87559C.1.pep
MVERAVAHSLSPNASGDDGEQNPRRRARTPPFPYRRNPGRGVALGEVERSVTSPPAGDGGGRRDGARRRLVYCDGGTPQGALQAAGALLRHPPVVPDPKTPARXWLDDVADLVMTXQRRLGAGGRSSHTEASGAAAAGSMSSRRRARRAAAVTRRSSAIPSSTPPTQEYVRGGPDARLDIERRRDARRAAHATEGASSSGAPLRSGHGGRPPVSPVGGAGCRAFVASLWNVRXPPRFRPTITEKYNGSVNPAEFLQIYTTGIEAAGADDRVMANFIPMALKGQARGWLMNLPPASVHSWEDLCQQFTTNFQGTYPRPGEEADLHAVQRRDDESLRSYIQRFCQVRNTIPCIPAHAVIYAFRGGVRHNRMLKKIASKEPQTTAQLFELADRVARKEEAWSWNSSGSGVAAPAAPGSAARSGRRDRRRKKGSARSDDEGHVLAVEGASRAPRKGRPASDKKKEAGAPSRERPTSKWCTVHNTSLHDLADCRAVKSLAERTRKWEEEKRQERREGKTPAAPAGNRRGEAKQKATAEDIDDGDDDLGFQEPEATVATVDGGACAHASRRSLKAMKRELLAAAPTHEATRRARWSEVAXLTFDQTDHPPXGRVLIDGGAALNILSLAAFDAIKVPGMVLRPSQPIIGVTPGHTWPLGHIDLPVTFGGSANFRTERVDFDVADLSLPYNAVLGRPALVKFMAAVHYAYLQMKMPGPGGPITVHGDLKVALACMEQRADHLAAASKPAGGDERLSTSIPAAPRQQMVTCDEVPVKEEDALVSFLRANADVFAWRPADMPVVPREVIEHRLTVRPGARPVRQKVRRQAPERQAFIREEVARLLEAGFIREVIHPKWLANPVVVPKANGKLRMCIDYTDLNKACPKDPYPLPRIDQIVDSTAGCDLLCFLDAYSGYHQIRMAREDEEKTAFITPIGTYCYTTMPFGLKNADPTFQRTTRISLGSQIRRNVEAYVDDLVVKTRNQETLLSDLAETFESLRSARIKLNPDKCVFGVPAGKLVGFLVSARGIEANLEKIRAIERMRPPSKLRDTEEAERAFTQLKAYLSSPPVLVAPEPDEPLLLYLAATPQVVSAALVVERDEDNPHSAHPHPVSTRPGREQGGEAPEPNGGPRPPTAGAGPPPACPTVPGAPDPQDGPGAIAGRPRLSPSNPEVVGTEAECAPRGLSDEERPGDAAPGEEDRPRRKVQRPVYFVSEALRDAKTRYPQAQKMLYAILMTSRKLRHYFQAHRVTVVTSYPLGQILHNREGTGRVVRWAIELSEFDLRFEPRHAIKSQALADFVAEWTPAPEPVSAPEASSGPSQLPHTAYWVMQFDGSLSLQGAGAGVTLTSPSGDVLRYLVRLDFRATNNMAEYEGLLAGLRVAAGLGIRRLRVLGDSQLVVNQVCKEYQCSDPQMDAYVRQVRRMERHFDGIELRHVPRRDNAVADELSRLASSRAQTPPGAFEERLAQPSARPDPLWETDAPERPPRPVGVQASGPEGSAPSSPRLIAWITEIQAYLADKTLPEDREGNERVRRISKRYVLVERTLYRRAANGVLLKCIPREQGVELLADVHEGECGAHSASRTLVGKAFRQGFYWPTALNDAVDLVRRCRACQFHARQTHQPAQALQTIPLSWPFAVWGLDILGPFRRAPGGFEYLYVAVDKFTKWPEAYPVIKINKHSALKFIRGITARFGVPNRIITDNGTQFTSELFGDYCEDMGIKLCFASPAHPRSNGQVERTNAEILKGLKTKTFNILKKHGDSWIEELPAVLRANRTMPSRATGETPFFLVYGAEAVLPSELTLRSPRVTMYCEADQDQLRRDDLDYLEERRRRAALRAARYQQSLRRYHQRHVRARSLCVDDLVLRRVQTRSGLSKLSPMWEGPYRVIGVPRPGSVRLATGDGTELPNPWNIEHLRRFYPYTFDFLRTVFVPSFPFEGSWLELARSCPTLPSVARAG

SEQ ID NO: 191221 - protein, 236 aa, Oryza sativa
  Clone ID: PAT_MRT4530_8755C.1.pep
MPRYKPEYLFGVEGFVQELRTMSFVIGFGTAPFYAQIPHDLHEEKCRVKVTLNSNSEDIPSVMFEAGGRNYIHACQEGSDRGSYLETEGIENDATTRHLVEMLWAMDESRAETVLAAQDREDRNRGKICKLEDKVDRLEKELAALKGEAPPQKARIRLTARKRALFVPRYQLAPKVRVVEKEVAPALADPPVIIISDDEGEESKRTHSKIEWVATQDDEDEPNEPSIDLRCSEELE

SEQ ID NO: 191222 - protein, 70 aa, Oryza sativa
  Clone ID: PAT_MRT4530_87560C.1.pep
LHTHDGGTFQSYTHTNTKSDRHAQSVEMHMLAHLLVGNRRIRHTIVRTHHNISASALDQLASAYQAVEHA

SEQ ID NO: 191223 - protein, 64 aa, Oryza sativa
  Clone ID: PAT_MRT4530_87561C.1.pep
GVFEDWRFGPAKAVQGYAGHLFTRWGLYASRATPSQLNGDDALCWRSHRVGCLESPMNLRWHTG

SEQ ID NO: 191224 - protein, 155 aa, Oryza sativa
  Clone ID: PAT_MRT4530_87562C.1.pep
HVIPLGLSGRATPRPSHGHHVARRAGDNPMHRSRVLRSIAARTCIILCLPHSPESDLEATASARRQALLTAAMHRALSHAPDRENKRRGRREERRGRRMGLLVFLNDITRNIIHSNGAEILMVYYGYRVHPRAHGYTILAFHPRVFQGYRIYLIP

SEQ ID NO: 191225 - protein, 67 aa, Oryza sativa
  Clone ID: PAT_MRT4530_87563C.1.pep
METGEEINAKLPRRWCTGVEPQASDAGQEQWAVAHGDCPAAFAVVGHDGNGSGTSYCQCMENDCLWP

SEQ ID NO: 191226 - protein, 546 aa, Oryza sativa
  Clone ID: PAT_MRT4530_87564C.1.pep
MGCVLEVDVDGEEVFLVDKEVLAPFCGRIKNLGGGGAGGEGVVGAAAAARVVLRGFPGGAEAFELVARFCYTGGGGGGVAVTASNACALRCAAEFMDMAAAAAEVSTPPSLVKMTEKALDEMPQWSWQSVVDAVRQCQRLLPTADATGVFDRVVGALVSHVAVSPGDAHPDELLAGELGVPDLAVVLGPGMVERVAGALLARGTDHGVVSRFLFYYLKCRVAGAATADDKRAMLEAAIAAMSGLDRSSVSCRGLFGILRISSPLKLPTSCHDSLVAMIGAKLDHATLDNLLVPAPPGTTSSLYDVTLVLRFLDAFLHHAAATGARGETPRLKKVGKLVDLYLAEVAPDPSLRPAMFVELATALPAAARDCHDALYRAIDVYFQVHTRLTEEEKMRICKGINYEKLSPECCKHLARNAGFPTRAAVQALASQHTVLKSLLRGGGPDEHLRPVSAAKHRAGGEDHDDLVAAGGQVVLYAGRLDLSLESQNLRSLLDGMHWRVMELEKVCSRMKTQMSKMKAARRATGGGGGAAAGRRAASRSLPRMCS

SEQ ID NO: 191227 - protein, 353 aa, Oryza sativa
  unsure (1)..(353): unsure at all Xaa locations
  Clone ID: PAT_MRT4530_87565C.1.pep
MAGTSSSSNASTDGYSLMGYIKDIPTLKGDNYEEWKRELDLAFILGEVDWVLTTPCPIEPAEIFRGEKESDAEWQKRERDNASLIMSYDIEHAKWSSANKNCLAAVKNTIEPTILGSIPEYDTVSKYLESIKSRFTGSSKFYATQLIKQLVTERYHGGGVKDHILRMSNMASKLKQKDLGISDDFLVHLVLSSLPKNFDNLVVNYKISTENWNIEELISNCVQEEERHKETNGDSINLVKDNKEKSHRSPSSKEKQPQHLPQKQQFTVETRSVSTLQEDKTFQERSSXLPDSDHGKEXGFRSMRTTQRSERSIRVANRVEAKVEAVGDLRLELANGFTLLLPDVFMSLLCKET

SEQ ID NO: 191228 - protein, 121 aa, Oryza sativa
  unsure (1)..(121): unsure at all Xaa locations
  Clone ID: PAT_MRT4530_87566C.1.pep
ACCAAFLRGVSPSSSGGEGCFCHLLRDPLLLVFPVNTARLGALLPTCAAANANTSAAAIVEVTTLFADTCRGHYXGGDASGLGQEEGEEQVREWRGPXRRRSRTRCGGATMSPLPMSLLLS

SEQ ID NO: 191229 - protein, 78 aa, Oryza sativa
  Clone ID: PAT_MRT4530_87567C.1.pep
SYPLQALLHVQLGVETKGNPKHAFPSKETSRPDETQSDSDLPVRPATHRRSDWPSTGGLTAQHTAVGPAYLKETGRLL

SEQ ID NO: 191230 - protein, 270 aa, Oryza sativa
  Clone ID: PAT_MRT4530_87568C.1.pep
MDSPATPVGLSPPLLSLVLCNEPCYTKGGYSLMGYIKDIPTLKGDNYEEWKRELDLAFILGEVDWVLTTPCPIEPAEIFRANKNCLAAVKNTIEPTILGSIPEYDTVSKYLESIKSQFTGSSKFYATQLIKQLVTERYHGGGVKDHILRMSNMASKLKQKDLGISDDFLVHLVLSSLPKNFDNLVVNYKISTENWNIEELISNCVQEEERHKETNGDSINLVKDNKEKSHRSPSSKEKQPQHLPQKQQFTVETRSVSTLQEDKTFQERSS

SEQ ID NO: 191231 - protein, 415 aa, Oryza sativa
  unsure (1)..(415): unsure at all Xaa locations
  Clone ID: PAT_MRT4530_87569C.1.pep
MGEKRKEASTTPLGAAEPARERKRREKEGAPRHSRSTVAHSPLSECAHRRGGVRRRCRVAVPPPRGDYSLMGYIKDIPTLKGDNYKEWKRELDLAFILGEVDWVLTTPCPIEPAELFRGEKESDAEWQKRERENASLIMSYDIGHTKWTLANKECLAAVKNTIEPTILGLIPEYDTVSKYLESIKSQFAGSSKFYATQLIKQLVTERYHRGGVKDHILRMSNMASKLKQKDLGISDDFLVHLVMTSLPKHFVNLVVNYKISPEKWNIEELISNCVQEEERIKETIGGSINLVKDNKEKSHRSPSSKAKQPQHLPQQQQFTVETGSVSPLQEDKTFQERSSXLPDSDHGKERSTWWIYSRATIHICNCLKGFCSMRTTQRSERSIRVANGVEAKVEAIGDLLLELANGFTLLLRDV

SEQ ID NO: 191232 - protein, 354 aa, Oryza sativa
  unsure (1)..(354): unsure at all Xaa locations
  Clone ID: PAT_MRT4530_8756C.1.pep
MDLLRQPRGGARGPGPREWGPRGSLKVHGGPGAPGLTPAGAVGPTRQPHPRAPAADSQAPRDTRSVRPKTATPAQRRHGGAAAERGEGKGETNRRSTAHPGSTATTGTATGAEEGGGAARVDGVGGAPAVGERNGGVDEVGEDAAKPKEAAPRREMVRSDDGGGPEFGGDGGERERRRELDSGGERGRRVAETVEGGTGKVYIGLGGGESCRTRGKRAQKIRPPLMAPARLGERFPNESEGEREGKMGGKREGITGNISPLLIARGADGGGGIHGGGGGARARAGRRERREEGDDGWAPPVSEGGRRARPSAARARGXGRMGRGERRGRGRELGRIGPRGSGGGKGNFLGFFFF

SEQ ID NO: 191233 - protein, 410 aa, Oryza sativa
  Clone ID: PAT_MRT4530_87570C.1.pep
MTPATEGGRGKEAPPRSHSTAARAPAAATPLRSAAPPGGALEKKWASGSARSPAMARRRKGGYSLMGYIKDIPTLKGDNYEEWKRELDLAFILGEVDWVLTTPCPIEPAEIFRGEKESDAEWQKRERDNASLIMSYDIEHAKWSSANKNCLAAVKNTIEPTILGSIPEYDTVSKYLESIKSQFTGSSKFYATQLIKQLFTERYHGGGVKDHILRMSNMASKLKQKDLGISDDFLVHLVLSSLPKNFDNLVVNYKISTENWNIEELISNCNSVDDDAIADDDVWDDVSDSPGHGSTLDREWVHRQNQFHKMGYRDGIAEGQKDIAQEGFNVGFGQSVHVGYKWGLVRGITSALASLPDSLKEKLLPNVQCRGQLQELNNSVQEISAEDALQMFHESILQSSHSSEEPDATL

SEQ ID NO: 191234 - protein, 362 aa, Oryza sativa
  unsure (1)..(362): unsure at all Xaa locations
  Clone ID: PAT_MRT4530_87571C.1.pep
MEHDGTAALGWAARDASGHLSPFSFTRRVQEEDDVTIKVLYCGICHTDLHTIKNEWGNAMYPVVPGHEIVGVVAGVGAGVTRFKAGDTVGVGYFVDSCRACDSCGKGYENYCPTMVITSNGTDYGGATTQGGFSDVMVVRQDYVVRVPASLPPDGAAPLLCAGVTVYSPMVEYGLNGPGKHLGVVGLGGLGHLGVKFGKAFGMKVTVISSSPAKRGEALGRLGADAFLSSRDGEGMAAAAATMDGIIDTVSAGHPLVPLLSLLKPKGQMVVVGAPAAPLQLPAIAIIDGGKRVAGSGGGSVAECQAMLDFAGEHGIAADVEVVAMGXRQRRPRPPREERREVPLRHRRRRHPARRRRAVLGS

SEQ ID NO: 191235 - protein, 69 aa, Oryza sativa
  unsure (1)..(69): unsure at all Xaa locations
  Clone ID: PAT_MRT4530_87572C.1.pep
LRSSIRHVTRRRRRRRRRGRRCGGGGSRAAGSSKXMREMXXVSARRLHHHHGATAGXSSXXAXRRXRRR

SEQ ID NO: 191236 - protein, 293 aa, Oryza sativa
  Clone ID: PAT_MRT4530_87573C.1.pep
MSGGARRVLEAWRLGVHPPTYTLGKRRTDHNLLLPEADLRALGADIHRTERGGDVTFHGPRQAVLYPILSLRAIGLGARRYVEGLESAMIEVAALYGVQACPGAAGETGVWVGDRKIGAIGVRISSGFTCHGLAFNIDPDLGFFEHIVPCGIADKEVTSLRREAAVELPPDEVIHDQLVQSLARTFCFSDVEFKDESECADMESYQLKMHPDIRCCKIGAQCRTAFVLQHQPPKNRLPNAVEEADSCSLKVCYAVLRLKKVSWHWSLVLEPQMIQSRWRLPSQMQSAAGTLRG

SEQ ID NO: 191237 - protein, 203 aa, Oryza sativa
  unsure (1)..(203): unsure at all Xaa locations
  Clone ID: PAT_MRT4530_87574C.1.pep
MSSSPILFFLLSPHLPSLHLSLALDAVGEHLEPVQVGSAGGCLAAAAGDGSARQVATPVSRLVESATTSTSGRSVASAAAVGDALVSELCMQSAKIDAVVRMECERMCVGLEQCQALVRSVSVAAARRLREKEVELDAARRRAAELEEQLRQATAESQAWCGLAXQNEAVAAGLRATLDHLLLRAVAPAQPATLGDADVSPIV

SEQ ID NO: 191238 - protein, 546 aa, Oryza sativa
  Clone ID: PAT_MRT4530_87575C.1.pep
MTKPSSRTEVEPSNVMPVTLDDFEGEDRKAVEEYINELTREALMRLTTRTHQVVIIKPGPRPMLAPDVEWKESPRTVPNRSSNSRQDCFPQENRSGGSKVKKMKKVKKVWVRKEAKAPEVVAAKEESQEVHVPTGDAVETTQAKEIEADAVTANIGGLTETAGRSNRQSMAGLTDLTGRSDRRLVADVIDKRLKTLKEMKTLQDGVFKEQLMGNSLKKYFPSIWMAVNELAEVKKQVDEQLQKGYIRPSISPWGAPVIFVEKKDKTKRMCVDYRALNELRIREEDIPKKAFTTRYGLYECTLMSFGLTNAPAFFMNLMNKVFMEFLDKFVVVFIDDILIYSKSEEEHEQHLCRVLEKLKEHQLYAKFSKKSYCNALCTEDMCEELQQELERLNVGIVEHRFVATLEARPTLVDQVRAAQVTDLEIAELKKNMRVGKARDFLEDEHGTVWMGERLHMPDDKELKDLILTEAHQTQYSIHPGGSHLSRSSPSSGRPPQVGNRRRNRRTHLLRSCRAHAAPSPRPPHVAAVSPASPGPRARSQGAGFAF

SEQ ID NO: 191239 - protein, 610 aa, Oryza sativa
  Clone ID: PAT_MRT4530_87576C.1.pep
MTKPSSRTEVEPSNVMPVTLDDFEGEDRKAVEEYINELTREALMRLTTRTHQVVIIKPGPRPMLAPDVEWKESPRTVPNRSSNSRQDCFPQENRSGGSKVKKMKKVKKVWVRKEAKAPEVVAAKEESQEVHVPTGDAVETTQAKEIEADAVTANIGGLTETAGRSNRQSMAGLTDLTGRSDRRLVADVIDKRLKTLKEMKTLQDGVFKEQLMGNSLKKYFPSIWMAVNELAEVKKQVDEQLQKGYIRPSISPWGAPVIFVEKKDKTKRMCVDYRALNEVTIKNKYPLPRIDDLFDQLKRAKVFSKIDLRSGYHQLRIREEDIPKKAFTTRYGLYECTLMSFGLTNAPAFFMNLMNKVFMEFLDKFVVVFIDDILIYSKSEEEHEQHLCRVLEKLKEHQLYAKFSKCDFWLSEVKFLGHVITAQGVAVDPSNVEKSYCNALCTEDMCEELQQELERLNVGIVEHRFVATLEARPTLVDQVRAAQVTDLEIAELKKNMRVGKARDFLEDEHGTVWMGERLHMPDDKELKDLILTEAHQTQYSIHPGGSHLSRSSPSSGRPPQVGNRRRNRRTHLLRSCRAHAAPSPRPPHVAAVSPASPGPRARSQGAGFAF

SEQ ID NO: 191240 - protein, 164 aa, Oryza sativa
  unsure (1)..(164): unsure at all Xaa locations
  Clone ID: PAT_MRT4530_87577C.1.pep
MPSPTTANTLLHIFSIFTGLRHKFANVVTNVPLAQLYVLTTKFGNPRIGGEEEIEMEFEIEIIPETEIKSTSTLAYLKASFGPALELSKSPRPRVFTSTVXQLKQAVAVTILQADWGCRTALVLAVDQHCRHPPPSRPHCRHRVQPPKAVVIRLSRICADERKL

SEQ ID NO: 191241 - protein, 310 aa, Oryza sativa
  Clone ID: PAT_MRT4530_87578C.1.pep
MAATAAVAAIASSVKRATNNRRKQRRAKVQSGRQHRQRKRRLVWTDELQKMFREAFNQLSLTQNLNSYHSVLIIKIQEDYEKNTRCPQKYFKLMKLMIDPMNDLSLTRDNIASYLQKHKKRLQKEYQKHQNLLEQKDQQLPIVDNTNTSSIQQKNMHYESCYNEHSNKQPKLKEPTLLTANYHGLRNMHHHHKNIINMEPSNVLRPPNLNNAKGFNMPFNKEGVDEAIYQSQLMAHQVYANHVDATAQTTWEVTMTQDMRPISQVHQHGCETTPVDSSNNTNGISENNNYHVGRKNSRANMVGILWPLLR

SEQ ID NO: 191242 - protein, 556 aa, Oryza sativa
  Clone ID: PAT_MRT4530_87579C.1.pep
MRRRPFLDQRRPSSFKRRWQQRPWWFRLAVTLLLALACLFLLLALRGSPDPDPVVLPSTDSSRSAATTSPLLHQRSYLDGVTDAFNMTDEMLSAHSFSRQLMDQISLAKTYLVVAKEANNLQFAAELSSQIRRAQSILAHAAAHGGTVTEQDAEKAIRDMSVLFFQAQQFRYDSAVTIMKLKGQIQSLEEKSKAEAEKSTKYGQIAAEELPKGLYCLGVRLTMEWFKTTELQRKFTERSPAVQSNLRDNSLYHYCVFSDNILAVSVVVNSTTLNSMRPEKIVFHLVTDEVNYAPMRAWFALNDYRGATVEIQKVEDFTWLNSSYVPVLKQLQDAATQNYYFSGSGNRGTPVKFRNPKYLSMLNHLRFYIPEIYPELRKVVFLDDDIVVQKDLSELFTINLNGNVMGAVETCMETFHRFHKYLNHSHPLIRAHFDPDACGWAFGMNVLDLVMWRNKNVTGIYHYWQERNADHTLWKLGSLPPGLLAFYGLVEPLDPKWHVLGLGYTTVDPATIKEGAVLHYNGNMKPWLKIGMEKYKGFWDNYVDYSHPLLQRCFTH

SEQ ID NO: 191243 - protein, 110 aa, Oryza sativa
  Clone ID: PAT_MRT4530_8757C.1.pep
IKLLPCWICRAQWPPLLGPPNGCAGVAAPHQRSRQAKGSLMPDSIRREHRQPLTSSICQAWKLKQPDSPPPEPSTTSGYHAWGRHRRPCAKRDRARTTGKTRKRKGPDSH

SEQ ID NO: 191244 - protein, 110 aa, Oryza sativa
  unsure (1)..(110): unsure at all Xaa locations
  Clone ID: PAT_MRT4530_87580C.1.pep
RGFYHQTPVRITSSSSPRLATSLTTYLSTNGXHHHHHHLLLPHNPSGRGLQHRSSSCRCPFRSPSGPRGGGRSAXSGGGGAGXRSSSVLKRPRGCGXELYVGXIPGPLPR

SEQ ID NO: 191245 - protein, 56 aa, Oryza sativa
  Clone ID: PAT_MRT4530_87582C.1.pep
LFWVPWTDEERSGFLKRLGHLDNGDWRGISKNFVTSRTATLEASHPLKTFLRQTNP

SEQ ID NO: 191246 - protein, 56 aa, Oryza sativa
  Clone ID: PAT_MRT4530_87583C.1.pep
MANGILFNRAEHRVLRAIKALRTETSTFFLLMRVEKGYKMMYSESMIEDGLKEAYL

SEQ ID NO: 191247 - protein, 55 aa, Oryza sativa
  Clone ID: PAT_MRT4530_87584C.1.pep
SRIILISLSSLYCLVCPVSCKITATYCHYLVTIITVKQKKKKKKKKKKKKKKKKR

SEQ ID NO: 191248 - protein, 234 aa, Oryza sativa
  unsure (1)..(234): unsure at all Xaa locations
  Clone ID: PAT_MRT4530_87585C.1.pep
XPFXXEVSXRKKXLGXXXXGXNSRKQWXKFFKXLVPKKPXXFXXXIPXGGXLLXXXQRXRTKFPNLLXEXXGGQGQTPIWGNGEGGNFEXWFSREVPFPPGEAGWPRLKKRVXSEIXLECPFQIRAXTTLAMXTFDSLARPICXNVCRXSLGIFPXKRAGGTGQIPGRVETLNPPLGKGXXXGLVGXXRKXPIXXGXGGPIFXXPXFPXPXVFFSPFXXGFXVSGPXKFXSQPP

SEQ ID NO: 191249 - protein, 540 aa, Oryza sativa
  Clone ID: PAT_MRT4530_87586C.1.pep
MKPPHAPFVKGWARWKAGPRGGLPKPRSLVTGLGLVRPPSARSDRIWLHRLCIGHLEQHHPSLQGAGLTAQVSSVRPTLCAGRTARLGPAGRYAVGRRVAEAAQRAASAQPCPAARRPAQRPPEGSLSASRKGAEAGVRGADGRGERRMAAGRRAEAGGCSAASLQSAALPPPLAWERMRARMAASSLSSPLSTITRGGPLLLAGLACSSAASSLCLVHDTSASTDDDYFLSDDVHDSAFLIQSSSSSVARQGSRGRENAEKERGEKTLLAGGEHGVVVVEPRQVEIMFDLATQSWYHELYRPLKAALTDDGAGPELMGHAVVDLLDDDQPPSKQITVRLFASGGGGDEAKLLVAEDDAYVAGFANRTGHWHTFRGGRCHHPVIIPAGGAAPCTELPFGGTYRELIGGVANLRAVPLGRASAESAMRVLSRYDPATTPAADAKMVVAKFMVMVTEPMRLKAVSRAVGGRWEEESYLSSDEAKYVPYWGEISAMLVEWNSTGRWGELGPRSKMDRARCPRPAGCEDDGGDGDDGGGKLFMI

SEQ ID NO: 191250 - protein, 76 aa, Oryza sativa
  Clone ID: PAT_MRT4530_87587C.1.pep
NVFFRKQFDSTDRSRSRKLRTEGKKIKIQRSSMQQCCTICMRHQVQDDLKPCSNYRFLSQRHSQIAPIINQVEMYA

SEQ ID NO: 191251 - protein, 204 aa, Oryza sativa
  Clone ID: PAT_MRT4530_87588C.1.pep
QPWRHRPSWLYWCSLSCSPPLLSSTSPPPKKHMTITTAAITTRRHRRRTTRTRRRRRRTTRTNRRRRRLRGRRTSAKARGAATGPAATASTTATDTTTNPAATTGPATATSAAPSSPARRIYVDIAVRRTMCVYDCIRNTSSIVVLLIALFVVINKLRHACQRVYAVPTCVCTYVYGLLGHECELFPKATCTMRQSMAYNIVIT

SEQ ID NO: 191252 - protein, 49 aa, Oryza sativa
  unsure (1)..(49): unsure at all Xaa locations
  Clone ID: PAT_MRT4530_87589C.1.pep
IVQIPPAKSINLPITTTPHQPSQMAITLISPTDRLGXXGILINRFHTFP

SEQ ID NO: 191253 - protein, 239 aa, Oryza sativa
  Clone ID: PAT_MRT4530_8758C.1.pep
GGSSGRLEAVNGGGFGLHGGNGAAGVEGEDGVDAGVRCDAAKPLEAKARPGEAALAGGERMEAAKGEGGSGWRWKRRCGGGLGKRSGGRGAHGDCGNGEGDGAVRGGRERRRGAAGVRRRAAARGLGAGRAREGAAAWGKWGKRMREGGIEPGRGGNRRRSGAASWRVWRLGVASIPSGREGEWGGMWSRGGRGLESTPVGTRGGAGSAEGVGGVADGWSWPEVGDDRWGPRVPPDPTG

SEQ ID NO: 191254 - protein, 103 aa, Oryza sativa
  Clone ID: PAT_MRT4530_87590C.1.pep
MDSLGLCIINGHCRGFLGPCVGRVTCTSLPLAKMITLFVAKAIRCAQIIAKSLEKLKPQGMKEKPKKTVEIFKLPKLAILPIHFINTIPPNEPIFIRRDTVLV

SEQ ID NO: 191255 - protein, 119 aa, Oryza sativa
  unsure (1)..(119): unsure at all Xaa locations
  Clone ID: PAT_MRT4530_87591C.1.pep
IPSILRYTLYTDTVYPRVYGYFLRTLRKSITXIETEFTDGRSPTRTELGRCHIVRGPISPSYTWRPTDPRYKRDPLGRTXGHQISPPTHLPQPTKPKPTGAKSPGDLVEPTRLRSRRYH

SEQ ID NO: 191256 - protein, 42 aa, Oryza sativa
  unsure (1)..(42): unsure at all Xaa locations
  Clone ID: PAT_MRT4530_87592C.1.pep
MAGWXFNPVFNGSLLALFLDFHXAAYAXAKGKKSKXEVVKKX

SEQ ID NO: 191257 - protein, 97 aa, Oryza sativa
  Clone ID: PAT_MRT4530_87593C.1.pep
MTPLPRQCLLARSCRRYSTCYGSRYASHHLPANRALAAAVRLLSSQITSSHRRSQPPPPASRWSLISTFLCLLKWIAPLEAPHQIQRIEQVDIVDNN

SEQ ID NO: 191258 - protein, 193 aa, Oryza sativa
  Clone ID: PAT_MRT4530_87594C.1.pep
MPLTTKSIISPNFSPVYFTPAGRAFSAARVGATEALRGGAVAAARDRSYEGGARWGLRWRHAERTSAAAAAAGRSCGDRDAEAALGGGCGGGARSGLHRRRRQQELRRRRAEKSSTAMVRRSCGGYTRVQQRRRQHVVGTLAATAHGGSESGMWELQQRVGAATTTRRCGRNGNTNRVKFDLYFLKRGSNKQT

SEQ ID NO: 191259 - protein, 314 aa, Oryza sativa
  Clone ID: PAT_MRT4530_87595C.1.pep
NLAYALGIFLISKAPWYLLPLAWAWTGTAVTGFFVIGHDCAHKSFSRNKLVEDIVGTLAFLPLIYPYEPWRFKHDRHHAKTNMLIEDTAWQPVFSKEFRTNSLLRKAMIFAYGPIRPWMSIAHWLIWHFDLKKFRPNELPRVKISLASVLAFMAIGWPLIILKSGIAGWFKFWFMPWMVYHFWMSTFTMVHHTAPHIPFKTSEEWNAAQAQLNGTVHCDYPRWIEILCHDINVHVPHHISPRIPSYNLRAAYDSIKQNWGKYINEASWNWRLMKTILTKCHVYDKDRYYVPFDEVAPEESQPIKFLKKVMPDYA

SEQ ID NO: 191260 - protein, 61 aa, Oryza sativa
  unsure (1)..(61): unsure at all Xaa locations
  Clone ID: PAT_MRT4530_87596C.1.pep
SIKQNWGKYINEASXNWRLMKQILTKCHVYDKDRYYVPFDEVAPEESQPIKFLKKVMPDYA

SEQ ID NO: 191261 - protein, 105 aa, Oryza sativa
  Clone ID: PAT_MRT4530_87597C.1.pep
AVTGFFVIGHDCAHKSFSRNKLVEDIVGTLAFLPLIYPYEPWRFKHDRHHAKTNMLIEDTAWQPVFSKEFRTNSLLRKAMIFAYGPIRPWMSIAHWYFFFEHLFI

SEQ ID NO: 191262 - protein, 72 aa, Oryza sativa
  Clone ID: PAT_MRT4530_87598C.1.pep
VARVGVISSGMKLGFAGHHGRGGMWNLQGEGRNMRVRIKGRVYVFLIVLPPWVFKKAPPSEMRGMVVEECGL

SEQ ID NO: 191263 - protein, 126 aa, Oryza sativa
  Clone ID: PAT_MRT4530_87599C.1.pep
SPKATLVFFEAYISFPLQRPPCFPVLLDWGHGTLKAMFASNFGHVLKKMGRGLSLPLSQVLQGIFYLDKVCYKQPQGGPSLVPGFVLGFAPPRGILFLPPVVAQAVFFKEVLECIMPIEVQTSPFL

SEQ ID NO: 191264 - protein, 345 aa, Oryza sativa
  unsure (1)..(345): unsure at all Xaa locations
  Clone ID: PAT_MRT4530_8759C.1.pep
PSFAPLDMWKYGSALQQRPEDRSLYGRGGSTVDQVHPGSHRPAPWAPHVSRTRGRGWLTAGPHAAATWHARGRPCWRXGGRRRAHAPMVAAGDHRRGGAAAERGEGXGERRRRSTAHPGATAATEEAAGAEGGGGAARVDGDGGAPAVSDRNGGVDEVGEDAAKPKEAAPRWEAVRGDDGGGPELGCDGGERERWRELDSGEEKARQRVETGEGSAGRVXIGLEGGESGRRGRKPAREXRPPSMAPTRFAXGQIRPFEREREREKWGKRERESRRVFPPTLLHAGTTGGGGIRGGGGARARARRRERREVVDDGWALPVSEGGGCMVVFHISNSSFSLPMYSLRL

SEQ ID NO: 191265 - protein, 157 aa, Oryza sativa
  unsure (1)..(157): unsure at all Xaa locations
  Clone ID: PAT_MRT4530_875C.1.pep
SFDPFAPWKVDNFGTVNXLLKACXRKAGVTRFILVSSILVNGAAMGQLLNPAYTVLNLFGLVLVAKLQAEKHIRSSGINYTIIRPGGLTEQPPTGNIVMEPEDTLYEGSISRQQVAEVAVEALLCREESSYKVVEIVTRAEAHNRPLKDLFASIKQS

SEQ ID NO: 191266 - protein, 157 aa, Oryza sativa
  unsure (1)..(157): unsure at all Xaa locations
  Clone ID: PAT_MRT4530_87600C.1.pep
QLLSFSILSSLSSIPSLSLYVPGAVGGGSARGAVAGGGPASGSALPSAGSGGRGGGXEAGGGAREEAARGGGALPSAGSGERGVGWAAAPKGRPRVVSTTSGGLSFDLSRIPAPPPYPLPLHPPSRSNGGGASTARGSSGGGGSRTASRFHGDDNLH

SEQ ID NO: 191267 - protein, 97 aa, Oryza sativa
  unsure (1)..(97): unsure at all Xaa locations
  Clone ID: PAT_MRT4530_87601C.1.pep
MEHATLLKSSILSKNTECSATEQAAADKPVTVSMVGRAGAYYYELCKTEKTMASPGRGIPALGSINTTCXKGLLYMAYXNTEAHAHAYRTLLVTRPG

SEQ ID NO: 191268 - protein, 455 aa, Oryza sativa
  Clone ID: PAT_MRT4530_87602C.1.pep
MGQQQQQENLTLLPMSSSSAAAAADAAAASSPAASAGRLFTAGLVASWYASNIGVLLLNKFLLSTYGFRYPVFLTACHMSACALLSYAAAAASAAAPRAARPRRSRGQLARVALLGAVFCASVVAGNVSLRYLPVSFNQAVGATTPFFTAVLAYAVAARREACATYAALIPVVAGVVIATGGEPSFHLFGFIMCIGATAARALKTVLQGILLSSEEEKLNPMELLGYMAPVAVVLLIPATFIMERNVLTMLTMFNALLDSYQVLGNAKGAVAVVVSILIFRNPVTFMGMLGYGITVAGVVLYGEAKKRSKAGMFSFAVSAAAAAAAATTGQGWGIRRPDGLEPFPWVSASALVGAWSLLFLREGDNEEDRVLKLSDVWLIFPTVEAVEAPETTELKLSTELLGEMLGDTRLLLPPVGILFLDALAGILPIEAAVAAADDDNDDGKAPDFEVEILK

SEQ ID NO: 191269 - protein, 367 aa, Oryza sativa
  Clone ID: PAT_MRT4530_87603C.1.pep
VRGLPPPSPATGPHAGGGRSRGARRQGETIAKGHKNYELMLNLQLGIRHAVGKQGPITLDLKSSAFDPKEKVWTRFPPEGSKTLRKLFKVDAADYMLSLCGDQALRELSSPGKSGSFFYLTSNDQYMIKTMKKSEVKIFLKMLRAYYNHVRSFENTLVTKFFGLHCVKLAGANQKKVRFVIMGNLFCSDYSIHRRFDLKGSSLGRTTDKPQTEIDEYTTLKDLDLNFIFRLQKHWHQEFLSAWVEGSFDSDSSRASSPHLSRGDTDPNRFSKIKLGSNMPTRAELTVRKSECEPQIIGEPTGEFYDVILYFGIIDILQDYDISKKLEHAYKSFQYDPTSISAVDPKQYSRRFKDFVYKAFQEEKIDI

SEQ ID NO: 191270 - protein, 168 aa, Oryza sativa
  Clone ID: PAT_MRT4530_87604C.1.pep
MEPTKWTIKEINKNHKRVPFRENIVERYENSLTAQKGVHGRRTPEKGKDFHVPKETTDKGSNDDDMRSIDETDISTLNMDQLSQIERLLEDELRWTRARKVVVDRSARLQKKVQGKAAIVEVERGSMEIPIESGQEKEQIGGEAVEEQRSRTTPLDLNMPCWDAGPLQ

SEQ ID NO: 191271 - protein, 95 aa, Oryza sativa
  Clone ID: PAT_MRT4530_87605C.1.pep
LFFFFFFFFFFFCFPPKKFVREKRNRKELKAQMLSLPPSAWSTPTLLRGPARLRGYTYLVPPPTSPCMNGTSDPFGQISHAHGHAWFPPFTPCGG

SEQ ID NO: 191272 - protein, 71 aa, Oryza sativa
  Clone ID: PAT_MRT4530_87606C.1.pep
IACHHRSTLYLLFPWEHENPCPWYGKIIIISTGRKIFTNECLSFPECACHVLPFVLLENSHNVPQCFLYAM

SEQ ID NO: 191273 - protein, 95 aa, Oryza sativa
  Clone ID: PAT_MRT4530_87607C.1.pep
SRCYTFIDLPSILYNSIWIPEVIKSEEMRHSTASNNPPSLAANAHSTGTKPFSALRSRGERHCNWHAWCPAHTRQGGLILCFYSMISIILRLQQC

SEQ ID NO: 191274 - protein, 149 aa, Oryza sativa
  unsure (1)..(149): unsure at all Xaa locations
  Clone ID: PAT_MRT4530_87608C.1.pep
GRRRLPGRRAPSCAPLPRRLAAPGRAARAGGRRSRAAPSLQAPPPDAEPRRAIAERRRRSPPPPLAAGRRAAPSHRGASPPLSQAEREEDEGDRPVVXRPGPTSPSLLKPLTARSRAPFPSISRRQSPSSRKLWTPLSREKTPIQCKSV

SEQ ID NO: 191275 - protein, 41 aa, Oryza sativa
  Clone ID: PAT_MRT4530_87609C.1.pep
PVTESISNRSERRRIHDIDISIEQPTKTDSRDYSLLTNSSP

SEQ ID NO: 191276 - protein, 342 aa, Oryza sativa
  unsure (1)..(342): unsure at all Xaa locations
  Clone ID: PAT_MRT4530_8760C.1.pep
ILIKNPFIASAEGEGARTGSTGVGPTRQPLGPRWTGSTQLAAVGAVGPTRQPHPRARAANGRAHLAAARTRPKAASPARPTGGGTTAPRWSPPATTGAAERRPKEPRGEGSXGTVHSSPRXHEDGGDDERSGGTRRRGSGXRGRRCSGGRRAKRRSGRGSTNDAGEADGGDAESGGSPERRRRXTGARRRRRRERRTARARIRRRERAASGGNGRAKRGGRLYSTGRGKARPEREESAAEIXGSIEDAGDDCGXSNRTNPREGEREKRGKRERESRGARAXRRARREVGDDRWVPPVSEGGGRARLSAALARGRXWAAGERREREGIGPSRPKKGRGGKEDF

SEQ ID NO: 191277 - protein, 693 aa, Oryza sativa
  Clone ID: PAT_MRT4530_87610C.1.pep
MSVWARETDIERSRRELALGGRGQSGDREVTDGYKQDPFSTQLLTELAVNATGRKHFTLNSGLIRFKGRVWIGDNPTLQSKLLTELHSSPIGGHSGFPVTYRKLKQLFAWPKMKKMTKTFVQQCQICLQAKPDRARYPGLLQPLPVPEGAWQVISLDFIEGLPRDKVFTSQLWEHLFEGAVQATPFEVLYGHSPSHFGIGSQDCAIPDLAQWLKERRLMQNLVQQHLHRAQQQMKHFADKKRSFRSFEVGDWVYLKLQPYVQTSVAVRANHKLAFKYFGPYQVTAKIGTVAYQLQLPSSTSIHPVFHVSQLKSAIGFTGPVQHQLPASTAPLQVPLRILDRRLTKRGNSAVAQVLIQWSASVPEDATWEDLDDLRSRFPAALAWGQANSQGEGLVRDSQDHPGDISQGSTAEEPEEEEGSRPEVADEAGSREDKEEVIQTSGDNQAWVATRRPVRERRPNPKQRLLLNPFLLGTDVDQELRMLKSQRRFCAGCQTLARLQGDIQVEGIYPTQFLSTKVEAVSWGLDMLKRSHGGFRLGRKLLSAWRWALCCRRRRRRGYLRLQTTSGGCGGACKEGSEEAKRLAPVLRWGRSLVRRLSLGRKDGGRRRILDEPVSTPKGQVAVYVGGGNPGESLRYVVPVVYFNHPMFGELLREAEEEFGFQHPGGITIPCAASRFERAAAVAAAGKKAFGRW

SEQ ID NO: 191278 - protein, 44 aa, Oryza sativa
  Clone ID: PAT_MRT4530_87611C.1.pep
ASFTSDWDMLLDIDDIIYQEPLALEERISHANTGHAAEKISGCV

SEQ ID NO: 191279 - protein, 186 aa, Oryza sativa
  unsure (1)..(186): unsure at all Xaa locations
  Clone ID: PAT_MRT4530_87612C.1.pep
MVPRIGLLVVLVGLAFQAILHPPPQKLCGSPGGPPVTSPRIKLSDRRHAYKEGGVQKDKAKAGYGENYPNPKRNVRSEALDIEELTDQLKLGQKFCVGNVDGRIPNLGCLQYIPNRLAGAALVLPIINYWWPSSPAELSRQAFMGLIMPEQRTLWIAHNINXLLYLWMTQKWLPSSAAAMHHPAIF

SEQ ID NO: 191280 - protein, 173 aa, Oryza sativa
  Clone ID: PAT_MRT4530_87613C.1.pep
MASSPANVGNGAPASIGGNQTTAEVRAGSVSATAAVARRDDDSSGGGALPEMGGGSGARPPATQAISSPPATSRASSASVASCPSSRVNSTSAAGLLGVLRLRCQPPDPPPPPRERSPPLPSDRLDELCLHCQSPGELLLSRPPSATRSACSSIASRPSVCAQERLRDREGLG

SEQ ID NO: 191281 - protein, 51 aa, Oryza sativa
  Clone ID: PAT_MRT4530_87614C.1.pep
MEVECARCHAPTCWPTVDKAPAQWLRVEGWAAVALSTLYSPWRRHLKLPFP

SEQ ID NO: 191282 - protein, 82 aa, Oryza sativa
  Clone ID: PAT_MRT4530_87615C.1.pep
GAPFIVQNEVPPFPKQAQDPKLGVGIHPMYSNPRRGCNSIAPFGKLVFPPGACGFKVPRRGGPPHFLFPKRKKRSLIFLALP

SEQ ID NO: 191283 - protein, 154 aa, Oryza sativa
  unsure (1)..(154): unsure at all Xaa locations
  Clone ID: PAT_MRT4530_87616C.1.pep
MHRRGGHHLHLLLAAAVVLLLTVAGLPLASASESDHKYKAEETVKLWVNKVGPYNNPQETYNYYSLPFCQPSENPAHKWGGLGEVLGGNELIDSQVDIKFLKNVEKGPICTIELDDNKIQQFTDAIERSYWFELFIDDLXLWGFGGETDKNNEN

SEQ ID NO: 191284 - protein, 154 aa, Oryza sativa
  Clone ID: PAT_MRT4530_87617C.1.pep
MGKTEHKKKQQQHGGDEAAAAAKERLDRFKAWLMHFDGDGDEHISRRELRDAIRSGGARFATVRAWVNLYLADKNRNGVIDDGEIKHLMDLTEKDLDLSKLQPTPAAARPTATGAPPAMVVVSACQFQTTPLVSRTIDLRKLTAKPVLSSTANN

SEQ ID NO: 191285 - protein, 175 aa, Oryza sativa
  unsure (1)..(175): unsure at all Xaa locations
  Clone ID: PAT_MRT4530_87618C.1.pep
HRYQTRPREINLLVLCVVFFXSLNQQQQHQRPPHVPGQSLHIHCSVIKGVDGAXPXSXXPLNPSTPTSSPHXXIFSSLXNHXSXXPIXXTNXPPPSXSXQIFSNTXPXTPXXSSXPLLITTTXPHXNSTXXXXXPXPLLYXLXPXSPXLXXLHXPPQLXXPLLHXHLLSPPNYQT

SEQ ID NO: 191286 - protein, 85 aa, Oryza sativa
  Clone ID: PAT_MRT4530_87619C.1.pep
MENSAEMQRFIEFTADSYLNITLQQEQQKAMVSEMVGKLTSVCWDKCITSTPGSKFSSGETTCLTNCAQRFLDMSVIIAKRFEMQ

SEQ ID NO: 191287 - protein, 284 aa, Oryza sativa
  unsure (1)..(284): unsure at all Xaa locations
  Clone ID: PAT_MRT4530_8761C.1.pep
RVECPLVGGFVYPRVNKADGRGARTGSTGVGPTRQPHGPRWTGCTRLAPAGAVGPTRQPHPRARAADGRAPLGSREGAPEGSLAGTADGRGTRPRPDGHRRRPPARRSGTRERGGKGEANGAVFGSPRSTATTGTAAETEEGGGAVRDDEDDGAPTVGERNGGADGVDDDAAKPKEATPRGEEVRSDGGGEPELVGDGGERGKRRERDSDGESERRTAETEERGTGNNXIASGERESGRRRWKPAXEISAAIDCAGEDRGHKIGRIRGRERGESGGIGRGNRGE

SEQ ID NO: 191288 - protein, 1057 aa, Oryza sativa
  Clone ID: PAT_MRT4530_87620C.1.pep
MGSAAAARTPWALQLGVALAFLLATTCHGLNHEGWLLLTLRKQIVDTFHHLDDWNPEDPSPCGWKGVNCSSGSTPAVVSLNLSNMNLSGTVDPSIGGLAELTNLDLSFNGFSGTIPAEIGNCSKLTGLNLNNNQFQGTIPAELGKLAMMITFNLCNNKLFGAIPDEIGNMASLEDLVGYSNNLSGSIPHTIGRLKNLKTVRLGQNAISGNIPVEIGECLNLVVFGLAQNKLGGPLPKEIGKLTNMTDLILWGNQLSSVIPPEIGNCINLRTIALYDNNLVGPIPATIGNIQNLQRLYLYRNLLNGTIPLEIGNLSLAEEIDFSENVLTGGVPKEFGKIPRLYLLYLFQNQLTGPIPTELCVLRNLSKLDLSINTLSGPIPACFQYMSRLIQLQLFNNMLSGDIPPRFGIYSRLWVVDFSNNNITGQIPRDLCRQSNLILLNLGANKLIGNIPHGITSCKSLVQLRLADNSLTGSFPTDLCNLVNLTTIELGRNKFNGPIPPQIGNCKSLQRLDLTNNYFTSELPQEIGNLSKLVVFNISSNRLGGSIPLEIFNCTMLQRLDLSQNSFEGSLPNEVGSLPQLELLSFADNRLSGEIPPILGKLSHLTALQIGGNQFSGGIPKELGLLSSLQIAMNLSYNNLSGNIPSELGNLALLENLFLNNNKLTGEIPDTFANLSSLLEFNVSYNNLTGALPTIPLFDNMASTSFLGNKGLCGGQLGKCGSESISSSQSSNSGSPPLGKVSTKDAYTFQELVSATNNFDESCVIGRGACGTVYRAILKAGQTIAVKKLASNREGSNTDNSFRAEILTLGKIRHRNIVKLYGFIYHQGSNLLLYEYMPRGSLGELLHGQSSSSLDWETRFMIALGSAEGLSYLHHDCKPRIIHRDIKSNNILLDENFEAHVGDFGLAKVIDMPYSKSMSAIAGSYGYIAPEYAYTMKVTEKSDIYSYGVVLLELLTGRAPVQPLELGGDLVTWVKNYIRDNSLGPGILDKNLNLEDKTSVDHMIEVLKIALLCTSMSPYDRPPMRNVVVMLSESRDRARMSSSSSPASDHSSKKDNL

SEQ ID NO: 191289 - protein, 768 aa, Oryza sativa
  Clone ID: PAT_MRT4530_87621C.1.pep
MRIGRRPGRPQGVRVGRFINAAGTTGFPTGKRAVSATQLIGPIPACFQYMSRLIQLQLFNNMLSGDIPPRFGIYSRLWVVDFSNNNITGQIPRDLCRQSNLILLNLGANKLIGNIPHGITSCKSLVQLRLADNSLTGSFPTDLCNLVNLTTIELGRNKFNGPIPPQIGNCKSLQRLDLTNNYFTSELPQEIGNLSKLVVFNISSNRLGGSIPLEIFNCTMLQRLDLSQNSFEGSLPNEVGSLPQLELLSFADNRLSGEIPPILGKLSHLTALQIGGNQFSGGIPKELGLLSSLQIAMNLSYNNLSGNIPSELGNLALLENLFLNNNKLTGEIPDTFANLSSLLEFNVSYNNLTGALPTIPLFDNMASTSFLGNKGLCGGQLGKCGSESISSSQSSNSGSPPLGKVIAIVAAVIGGISLILIVIIVYHMRKPLETVAPLQDKQIFSAGSNMQVSTKDAYTFQELVSATNNFDESCVIGRGACGTVYRAILKAGQTIAVKKLASNREGSNTDNSFRAEILTLGKIRHRNIVKLYGFIYHQGSNLLLYEYMPRGSLGELLHGQSSSSLDWETRFMIALGSAEGLSYLHHDCKPRIIHRDIKSNNILLDENFEAHVGDFGLAKVIDMPYSKSMSAIAGSYGYIAPEYAYTMKVTEKSDIYSYGVVLLELLTGRAPVQPLELGGDLVTWVKNYIRDNSLGPGILDKNLNLEDKTSVDHMIEVLKIALLCTSMSPYDRPPMRNVVVMLSESRDRARMSSSSSPASDHSSKKDNL

SEQ ID NO: 191290 - protein, 124 aa, Oryza sativa
  Clone ID: PAT_MRT4530_87622C.1.pep
ITDVDTSMQIWREEVFGPVLCVKEFSTEEEAIELANDTHYGLAGAVLSGVRERCQRLTEEIDAGIIWVNCSQPCFCQAPWGGNKRSGFGRELGEGGIDNYLSVKQVTEYASDEPWGWYKSPSKL

SEQ ID NO: 191291 - protein, 132 aa, Oryza sativa
  Clone ID: PAT_MRT4530_87623C.1.pep
LCYLEFLALYTSNDIVIAVIGTQKLQLPRQEWLVMSHSSKCFFVGSLCKLLRIFDVVLPNHYTSASKYVLSLLMVADELMALRILTNAFCMFRHCEFVIPNTIEVVHGAVLGTMASLVMEQNSLNVFFITPQ

SEQ ID NO: 191292 - protein, 80 aa, Oryza sativa
  Clone ID: PAT_MRT4530_87624C.1.pep
NKLNLDRFLRSIPANCLSLTMAEGEFDAEEGLSSDHNLLVERPIVGGYAFGPKKMSTMNVLMAEASKTRIAACMRRYKTE

SEQ ID NO: 191293 - protein, 81 aa, Oryza sativa
  Clone ID: PAT_MRT4530_87625C.1.pep
HNGPDSTNHRDGSPLVERTCQKEEQKRVAMSRSCIGLYPLLKCYGIHIYTPSTNLVHYGHYSSLSKYKIQTRPYTVVSCQI

SEQ ID NO: 191294 - protein, 108 aa, Oryza sativa
  unsure (1)..(108): unsure at all Xaa locations
  Clone ID: PAT_MRT4530_87626C.1.pep
PCTSMMLSTGPWTXVILEXCMSXYSVDDEGDRLTANEARHPLALQGATPGHTRPAEMRADTHLIPILNLSPTEVKREGGSKRGDTQDNEWTMRRGGCKRXTHGRPRHG

SEQ ID NO: 191295 - protein, 132 aa, Oryza sativa
  unsure (1)..(132): unsure at all Xaa locations
  Clone ID: PAT_MRT4530_87627C.1.pep
YPRNGPFWGARVAGAVIXGAVLLPPWRTRTDVAGGGRPSFSYRQFVASLFLPRLARSLVRCPSSCRRGSPYRLLSRRRHFPLLASPAPCSPLVLSRYLFRRVATLDFAFSATLAALSCLFFCPFVVPRARSP

SEQ ID NO: 191296 - protein, 116 aa, Oryza sativa
  Clone ID: PAT_MRT4530_87628C.1.pep
MGSLGERGGNIGVTKGAGGAPLPGGNNVLQNKKKWYAGGERSEKRGGKKMWGPCFPPFLINLMGPTCKFHPEINKKWWGPRGPHVSFPPLFFLSSPLISHLFNSLSHLFSCDGGTG

SEQ ID NO: 191297 - protein, 55 aa, Oryza sativa
  Clone ID: PAT_MRT4530_87629C.1.pep
KMSACDDDDVVYDTDDMGSGSSWHSTQGVHGTIVVVVHVEAIYSDASHVPIEVFK

SEQ ID NO: 191298 - protein, 292 aa, Oryza sativa
  unsure (1)..(292): unsure at all Xaa locations
  Clone ID: PAT_MRT4530_8762C.1.pep
DGSSHRCRSKGRRWRPRSPCRDLQSSTWSLPTPPPGSTRKRDSHTNPVAQRWSPPWEGXAGHVGAHPTLRIGWGRSDGRGQPSGTTRQARPQAAATAEPRPPATTPAASGDGARAGERVEREAVLTERMGRRDEDEEGDGRGATGGTKVAVARVHRGAGGSGVEWRSGVVAGLAGGAAKLVVVAARLEVDGNGGKRLPKAAKRRRCSGKRSCGRCATMRREAGGASGVARGRLRRRRWPAGDGNRRRRREVGGGGVVSGMGKLGKEGETKEGSPGIVFIASRVDGEAGWRRI

SEQ ID NO: 191299 - protein, 113 aa, Oryza sativa
  unsure (1)..(113): unsure at all Xaa locations
  Clone ID: PAT_MRT4530_87630C.1.pep
RXRPMXSEKKKKKKKKKKKGKKKKKKKKKKKKKKKKKKKKKKKKKKKKKKKKKADRKKKTKETAKTKKGGGVKQLQDRKNTAGAKIKNRPEQTALPNRRKTEKAKRTRPKKEY

SEQ ID NO: 191300 - protein, 86 aa, Oryza sativa
  unsure (1)..(86): unsure at all Xaa locations
  Clone ID: PAT_MRT4530_87631C.1.pep
GEVEEEEEEEIGMGRGREELKRIENKNNRLVTFEKRRNGLHKKANEFYVLCDAEVCLIIYSNXGKAIRDFRYGQSMDPVTLERFQK

SEQ ID NO: 191301 - protein, 52 aa, Oryza sativa
  Clone ID: PAT_MRT4530_87632C.1.pep
LTLWLNFAVFYESSITLVVHVSSSVAMKKRLYCKSCMVNIQSCSGGTPRGPE

SEQ ID NO: 191302 - protein, 103 aa, Oryza sativa
  Clone ID: PAT_MRT4530_87633C.1.pep
NHGAPGEGNFYSQGPPPPPFSGLSPPNRGFSGGGGVTKAAHGGKLKNCLLTRPSPFFLGRSRPLKGGGDWEGNLDGAPPPLLIGGPAHEGTHVKNQFVLFFKG

SEQ ID NO: 191303 - protein, 106 aa, Oryza sativa
  Clone ID: PAT_MRT4530_87634C.1.pep
SMVGMPGSSSPILPGSANLSMMNQPLTPQQQMQLQQQFQQNPLQQQQLQQLQQQQQQQQQQQIQQQQQQQQQQQQQQQQIQQQQQQMGSPLQQAAQVGSPAGSQQS

SEQ ID NO: 191304 - protein, 1272 aa, Oryza sativa
  Clone ID: PAT_MRT4530_87635C.1.pep
MGISFKLSKVGVRVHPAARVAAPAPAAVAAEKAAEKEAKREDGVVERASDANGITISPACSRIILPEHEVSFTFSLYDRGYLIAKSAAMDPCQPSIQDGKTLHPYDKASEKLFSAIESGRLPEDILDEIPSKYYNGSVICEIRDYRKHASNQAPAPSAELGLPVVNKVRLQMTFENVVRDIPRLSDDSWSYRDFMEAEARIVKVLQPALCLDPTPKLDRLCQDPVPHKLNLGIGKKRRLRQNPEVVVTSNNMSHGKKVCIDRVSENMKSDEMGISGGNAVHQGLDNTAIQNMSGGSQTFRPANFSMLSQTSIQQTVNYPAIGNDRGAGTPMNYAGINSSISSPQNLMAYNETTNGLLSVKREMADAPLQDPKRVKTTVSVDDMQQQQQTRHQPAGLGGQEMQWKNQQLQQLDVKGMQYAASVGQRYTHPHVQEPASIYSNQLGMRYGAKQEQMDGMDKSKDTLQAMAPENSVLDQQQPQAPHLSQQAGPRNMQQWQNPRFSGEKDLKKEEMLQRRKIAATSRVSSVPMVQSPVSSKSGEISSSSMSAQFGAAVTSAVMGSQKDKFPANSNPAVVGYPPVASSPSDSMHRMQQPSVAPSKRKSNSVPKTQPPVSGVGSPASVSNMHAVLNASSPSIGTAPMGDQAILERFVKIDAISQRCKLHSKKNKVDNIPQRKPIINASQEKVATVLSNCFHAEDFRDEIKPLCNSMLGGTMNSFKTRILNFVVNNRMYQGPTKPFRIIFKEKHDGTVAMQYGDPEDFDNQNSYECTLILPTKYHADLLAKQLIIRMDREGHTKADDQVALSTPPGNLSALSGILPDNTVNDVKQEGGISHQLNAAAHANMTPGTPLQQHPANRMLPSVNNQALMQQGYMQGANMPPRSQQLDQNLIQQQQQQPPQLQQNAQAQLQQPASLPLNQMQRPQLLPTNPLSQMLGNTGSNLPMASSHMGNKVAPNSVQLQMMQQQQQSRKMMMGLGSPANMGNMVNNVVGLNNIGNVMGMGNVRPMSSPMGNMSGLGNNPNQMSLGMVSSLSAPGIRPGMTHAAIAKMRMGLIQQQRAAGIYPQTSMVGMPGSSSPILPGSANLSMMNQLNRSNINPLQRAMMGPPKMPGSNYPLTPQQQMQLQQQFQQNPLQQQQLQQLQQQQQQQQQQQIQQQQQQQQQQQQQQQQIQQQQQQMGSPLQQAAQVGSPAGSQQSLVMSQHQQISPQQMAAMSPQLSSGTMQQVNNNVINHVATPGPPPSPQLSSQTHGSVNSIANSPMEQLQGANKGGPGSM

SEQ ID NO: 191305 - protein, 234 aa, Oryza sativa
  Clone ID: PAT_MRT4530_87636C.1.pep
MAAAPAARFPVFGIVRLLGLAAAAAIVVWAVHFRGGMALSSETDKLLIFNVHPVLMLIGLVVLNGEAILAYKTVPGTKKLKKLVHLALQFLAMLLSLIGLWTVWKFHDERQIDHLYTLHSWLGLSCIIFFSLQWATGFYTFWYPGGSRSGRASLLPWHVFFGLFLYVLAIATSVSGLLEKSIFMQSAKMIGRFSTEAMFMNSLGMLLVLLGALVILAVVTPGVGKIDTYRGSSE

SEQ ID NO: 191306 - protein, 1147 aa, Oryza sativa
  unsure (1)..(1147): unsure at all Xaa locations
  Clone ID: PAT_MRT4530_87637C.1.pep
MESMEPKDIDWSRVVSRYVRDETYEGIEAPHWADLTDPEAGVAAVDDEAWFCRPDCRHPKTVEDFLKMSPSPKGKLLRSVSAMMMPFGERDTNLRDGNNNLKRRGAVAGSGIAATFTPPKPKAAAKKRFQDDSENQDPALATPPPPPPAASRPPFGAARWAKNAKDAIKSSAEKRPGNAEKEALLSKNAAPRQLKSTLSARNLFSGKDILGQISDFYNELKRMAGGNGSRPGSEAMEELSSNPINEGDVAEKKVDCGCGTGDQVPSEEAIKEKSRQETAEKSPSTMKGKKMGLKVEAAKPTRSSVLKEVKATPPTPQRFPSPSTNRVKNVKAGGMSMASSPLKKPLKEKGTPSKDLENSKDAKRQPFGVKDMNNTKALAQFLFAAAAAAGHGRERQRQRRRIEGPARTGLREFVGSAATAPLLGDDGLTMRTMRSTKCPWAFLGVAGALVMLVAAVHVFMVPILPSSLDFFGAGHGIGKPRNVLPGVGVVDSRLSGQFPSDSYGAVTYRGAPWKAEIGRWLAGCDAGLSVVNITEXTKRCEQDCNGQGVCNYELGECRCFHGYAGKRCEEVQKVECNLPXLKNGLWDGTKYPDRPVAEACGFKTILPKKPDDSKLTDWKTPDPDVFTTNKSKPGWCNVNPEDAYSXQGHGHCRGGFCQXPSNYSVAYGMPSWLQPPMNLPDLKNISSSSINVKVVAKKKRPLIYVYDLPAEFDSHLLEGRHYKFQCVNRIYDDKNRTIWTQQLYGAQIALYESILASPHRTLNGDEADYFYVPALDSCLITRSDDAPHLQMPRDLRLRSYHTLEYYRMTYDHIAQRYPYWNRTSGRDHIWFFSWDEGACYAPKEIWNSMMLVHWGNTNTKHKNSTTAYWADNWNYIPIDRRGNHPCFDPRKDLVLPAWKQPNPAAIWLKLWARTRNNRTTLFYFNGNLGPAYKDGRHEDTYSMGIRQKLAAEFGSTPDKQGKLGRQHTANVTVTYLRTEKYYEELASSIFCGVLPGDGWSGRMEDSMLQGCIPVIIQDGILLPYENMLNYNSFAVRIQEDDIPNLIRILRGINETQVEFMLRNVRQIWQRFFYRDSILLEAQRQKRLFSEEAPWSVEVSKLDKVDDVFATFIQEARGLESRESCVHGNMGTCTLSDVDEKHVKWTRS

SEQ ID NO: 191307 - protein, 68 aa, Oryza sativa
  unsure (1)..(68): unsure at all Xaa locations
  Clone ID: PAT_MRT4530_87638C.1.pep
LVWKLILLIGTRDNKFDKWSPNWGGPFXIQKVVSKGAYMLQGLDGEVYGRALNCKYLKKYYSSVWINS

SEQ ID NO: 191308 - protein, 274 aa, Oryza sativa
  Clone ID: PAT_MRT4530_87639C.1.pep
MAAAAAERQLVVAVEGTAALGPYWPVTVADYVEKIVRSFCAHEMAGQKLAGTPPELALVVFHTHGPYSAFCVQRSGWTKDMNVFLSWLSGISFSGGGFSEAAISEGLAEALMILQGSSSNSQNHQSHEVQKHCILVAASNPYPLPTPVYRPLVQSSDHKENNDGAKESCLADAETVAKSFAQCSVSLSVVSPKQLPTLKAIYNAAKRNPRAADPSVDHAKNPHFLVLLSDNFLEARTALSRPLPGNLVTNHPITKMDTAATSVPVPTSNGNPSG

SEQ ID NO: 191309 - protein, 1034 aa, Oryza sativa
  unsure (1)..(1034): unsure at all Xaa locations
  Clone ID: PAT_MRT4530_8763C.1.pep
LAPPPPRIPPLPSTPRAIKRXGINPRVPLPRFPLFPLSLSLGFVRIKPVIIAGAINGGRNLRGRFPSSPAAFSPFRRYKNVARAPLFRFRRSPLTLAVEIVLAPCSSLSAIAAELRSAAAAAPXLPPTRRPLRPLRRDAVDPVRRSASPVDRRSTVVIVIPSRAAVFLRSVRRFHRLRRLGVSRGPXVRFPLPSSLLGAAPPRRWSPAATIGARARSSRRPRRRGRPRARPRGCQVGPAVSRPRPRVRLTRGTHGADRRQPRAPGPPWTERLTRGPHFPWTRANEGYTSCGPMADNEKGNKVRSQDIGTSSSRVNEAPDTSCVAVVQHLINQNKLLIEILQQHRMPILNPSRMQPQVQLEAVQALTPQVSAPPTSQKAPHAMPHVDPKEASIICFMCDEQGHYARNCPQQKRKAPMRTEDEVRKMIITSTEWPPPGMTRRQRRNTFRGAPQLTEHLLANGGRVSDSEDSDQVSSDDEDEMERKACSRCGEIGHVASSCATICVHCEEDHPPDRCPTSRITCFFCEGTDHVPKDCQFSFLLTKKMANQPASSNGEKHQGNTNPRQDYSSSLTPVPGQRNRNEKRKCRVREDICCFNCQGMGHFADKCPKPRNIAAGTTVHATPCNQKLAPQRIVIHASRSSPIARVATAPIPMNALPQGVNAQFQPQPPADKTEASICVVPLEVPIQQLRNQVQDEEPECKKVIVCYNCSEEGHYSENCPQPRQNRPPHYRQFTRSRHSNRIVVTGANAVPVRIYLQTVKKIQEDINILEHNSRWLVISRSGIRKRSKVIWQKNNMDAPHLEEALNPSGIDTDSKQCISLKAASQRTSSSPEASAIHIKEYHLLEISRKMIDKKRLAKMFSSMKEVGRKVIDKQKHALHRSRKTPDCNCPATVTLSLSQQDDLGKSVSMKAKSEIFHSVSDATRSEKCKHRLPGDATSWEMIQRERTHQVDNLSEVDSEDMNHEKFWNGSITELPQPSLSQPKGAPWSKSGEEKIPSATGGQAKQFRVVKFCWKFVKTQRKKSDKKRRPPNLSSC

SEQ ID NO: 191310 - protein, 376 aa, Oryza sativa
  Clone ID: PAT_MRT4530_87640C.1.pep
MEDNDLVDEVLDSVGLHLFNNVDDIKILLDAARADLDENAAHIAEAQARLSHVRRLVGEVATAPMAVEQQQAVRAALEEVLDDFGASSLLLLERGRQLRLLILMLQLLRASVFIVRAARHLPAVLASVTAGSAAALVYAESRRGVPAFRSLARIFAVVMCGFFECYRVGLSKKHPPEQKRPEDEKNTEPRQKRKNPRTAMEVNNLADELLDSLGVYLINNVDDVKILLDAARADLDDNAAHLAKARARLRNVRRLVREVTASPPMIVDGVEQRHAARVTLERIHDDIRASSLLLRERRHQLDQVVCTLLMIRAYVFVTRAARLIPAVLLSVTPGSAAVVAYAESRRGVPVSRSLARILALAMCGFFECYRLRQGDF

SEQ ID NO: 191311 - protein, 53 aa, Oryza sativa
  unsure (1)..(53): unsure at all Xaa locations
  Clone ID: PAT_MRT4530_87641C.1.pep
KSLMQQVPSDYGLXVPVGFPQAPAHAIPAAKDKDKAVDEMDIFSRLVELKAPG

SEQ ID NO: 191312 - protein, 48 aa, Oryza sativa
  unsure (1)..(48): unsure at all Xaa locations
  Clone ID: PAT_MRT4530_87642C.1.pep
NCAIFCRIICLIYTXFMNCLEMSTYIMYQDLYIMFGGRPNWRVCFPXK

SEQ ID NO: 191313 - protein, 614 aa, Oryza sativa
  Clone ID: PAT_MRT4530_87643C.1.pep
MEAARMDAGLDNSESLASPNPSNEHVSVDDECLYIDIGPAPPIPTSQSEPDTLLDDEVEEDEIEEDDIVTYREPSQKPDADYDKNDPPMAVGTMYSDMNAFKLALATHATKYEFQYNIEKSDKSRYRVYCSGKNVGCRWRIHTTLLSDQVIVKITRNPYDHENCQSTRRAGTCVGVTQFWVCEQVLDWLKEDETLGAKELRRRLKESHKVEVTYRKVYLGRQRAMDKLYGPWSCSFDNLYRFKAQIEDTNPGSFVVIDHHTINNKIRGRLCVACAVDGHNWMYPVAIGVIDSETNENWEWFMNRLKEAIGNPVGLTFSTDCGQAVMYGENHRKLWTRSQFSTLSKVDYVTNNFAEAFNKWFEGKILPHIVQKLRGASYNLDIEVITSSPDGIAEVCAKGNSASTFRFVVNIKERTCSCRAWQWSGIPCKHAIAYITSIPGANLEDYVDECYSIEKFKIAYEGSVPSIPDKSMWSKPTHGFFMHPSLLKSTAGGRRKNMMKSALEGGSSRKKLGTKGGMVFPHNEVVASATQKPKRVKNAAKKKGPPTSASTDNSVTSRSVTRSNNPFALQIEHPPVVHDDIASYEVSPRTVETPRKKQAIKKIFPTFSQFFPDF

SEQ ID NO: 191314 - protein, 56 aa, Oryza sativa
  Clone ID: PAT_MRT4530_87644C.1.pep
PGLFKTLTPQRYSGSKTVDFLFVWNERKNIQSLQIFAYVKHFQCCHFFPKFFIVKW

SEQ ID NO: 191315 - protein, 56 aa, Oryza sativa
  Clone ID: PAT_MRT4530_87645C.1.pep
CRRRSIFAGARRLLPAKIDLCRRRLYGLPAKIDLRRRTAPSTPVTVIWWLLKSMRW

SEQ ID NO: 191316 - protein, 495 aa, Oryza sativa
  Clone ID: PAT_MRT4530_87646C.1.pep
MAAAAARCAGHGGGGGGGGFLLRRRLLATAAFLAAFGLCTAAADDAATGRGQGHDHVMLSVEDMFPDSSSSSPSCDAPPRDHRHDATSSTTRMTIVHRHGPCSPLAAAHGEPPSHGEILAADQSRAESIQHRVSTTTTGRVNPKRRRHRQQQPPSAPAPAASLSSSTASLPASPGRALGTGNYVVTVGLGTPASRYTREKLFDPASSSTYANVSCAAPACSDLDVSGCSGGHCLYGVQYGDGSYSIGFFAMDTLTLSSYDAVKGFRFGCGERNDGLFGEAAGLLGLGRGKTSLPVQTYGKYGGVFAHCLPARSTGTGYLDFGAGSPPATTTTPMLTGNGPTFYYVGMTGIRVGGRLLPIAPSVFAAAGTIVDSGTVITRLPPAAYSSLRSAFAAAMAARGYRKAAAVSLLDTCYDFTGMSQVAIPTVSLLFQGGAALDVDASGIMYTVSASQVCLAFAGNEDGGDVGIVGNTQLKTFGVAYDIGKKVVGFSPGAC

SEQ ID NO: 191317 - protein, 596 aa, Oryza sativa
  Clone ID: PAT_MRT4530_87647C.1.pep
MAAAAARCAGHGGGGGGGGFLLRRRLLATAAFLAAFGLCTAAADDAATGRGQGHDHVMLSVEDMFPDSSSSSPSCDAPPRGTGMTQSNKFENLNSRFASLGTGMTQWYKFRDRHDATSSTTRMTIVHRHGPCSPLAAAHGEPPSHGEILAADQSRAESIQHRVSTTTTGRVNPKRRRHRQQQPPSAPAPAASLSSSTASLPASPGRALGTGNYVVTVGLGTPASRYTVVFDTGSDTTWVQCQPCVVACYEQREKLFDPASSSTYANVSCAAPACSDLDVSGCSGGHCLYGVQYGDGSYSIGFFAMDTLTLSSYDAVKGFRFGCGERNDGLFGEAAGLLGLGRGKTSLPVQTYGKYGGVFAHCLPARSTGTGYLDFGAGSPPATTTTPMLTGNGPTFYYVGMTGIRVGGRLLPIAPSVFAAAGTIVDSGTVITRLPPAAYSSLRSAFAAAMAARGYRKAAAVSLLDTCYDFTGMSQVAIPTVSLLFQGGAALDVDASGIMYTVSASQVCLAFAGNEDGGDVGIVGNTQLKTFGVAYDIGKKSFSLLPWRDLTTGLLLHVISLHLGPPLASSCMPACPRSSCLSSLRAPAVDIAGDRI

SEQ ID NO: 191318 - protein, 151 aa, Oryza sativa
  Clone ID: PAT_MRT4530_87648C.1.pep
MGKKPVNRSPKATHLSIILVGKFGPSNPNPICGWASGSFCLELVGPDHGNELLPVSRTRPVLQREVCICDNSINLGDKQGQNTRFFSDYLTGLLEWINCCTLQKIWGDVNHLACDVKVFAVLGACGVKGTSMHYSSAGIFGNINSKMASIF

SEQ ID NO: 191319 - protein, 130 aa, Oryza sativa
  Clone ID: PAT_MRT4530_87649C.1.pep
MVAAALLSVTMGTVAPGGRRRWRRGGQTLAAVLGSWGRRHQDVCDWGDGGVVPGCGSARSSLVETPLGDGAAVAAPWDLDGERLMGGGAFRWGRDESAISDLAGHGFEEEGYPVVDYESDLPTDMSTTVR

SEQ ID NO: 191320 - protein, 380 aa, Oryza sativa
  Clone ID: PAT_MRT4530_8764C.1.pep
MERWADDGGAQGRAADGGECGQRRSRGRRRRVGARGGRQQVGASQVRTATRAADDGGKWGRRKCARRRGAADDSGAWGVRRTAARGGRRGPASSFQIRAASTPVRRLSRANMLAGPAFSLRRPTPARPRYRRRLRVTLIPHRRRLSVTRRLPPPQLRVHRLPPVRERKSSQPPPPPLSGRLSPYPHLSSRPRCRLSHDVPSESRARPSPRTRRRPSISSSSSLDGGEELGDGAQGLGEQHAGSDEIRRRQCLSPLKLGAAWRRGSSSGCGSNPARRRPLLLVAGLGEELDGGKPRGFVSAAQPHHAVSASTSHGAAARPRPRRRPAATPTAGRSVVYCCTTLNDTTGFGLQIHLAITGILPLPAMWILMQGQDTMDLGEI

SEQ ID NO: 191321 - protein, 115 aa, Oryza sativa
  unsure (1)..(115): unsure at all Xaa locations
  Clone ID: PAT_MRT4530_87650C.1.pep
MAAPDVEYRCFVGGLCWDTDHRSLEAAXFSTCGKILDYKIINDRGTAEVTRXGYDTLCYEQXRSANTIEGTETXRSVDGRNITDNEVQTRPSCGRSGGYRTGGGGYXGCRGGGAY

SEQ ID NO: 191322 - protein, 132 aa, Oryza sativa
  unsure (1)..(132): unsure at all Xaa locations
  Clone ID: PAT_MRT4530_87651C.1.pep
GGLPERWRRLEQWRRTAGAAATTVAQXYTALELYGRREAKARVAMGRGELGGPFKGARRRRRRPTAAGDEKERKLTGVSIREKEEEIEEIISPQSIRPEKERRGRIGKRRRRGSAXGFGRRRRLEEDEPDRN

SEQ ID NO: 191323 - protein, 131 aa, Oryza sativa
  Clone ID: PAT_MRT4530_87652C.1.pep
MAAAALRPAILRRIRLSPSPAAAAGAAAASQPHALARWLARPMSSHDAHLTRDEVVDRLLDVLKCHPKVDPSKVSPEAHFEKDLGLDSLDTVEVVMAIEEEFKLEIPDQEADKIDSLPLAIEYVANHPMAA

SEQ ID NO: 191324 - protein, 35 aa, Oryza sativa
  Clone ID: PAT_MRT4530_87653C.1.pep
SWTRELDDHPHGWRHLQGARCHRCWAPHGLGSYPD

SEQ ID NO: 191325 - protein, 65 aa, Oryza sativa
  unsure (1)..(65): unsure at all Xaa locations
  Clone ID: PAT_MRT4530_87654C.1.pep
HACRVXGAGYYFPRSPVHPHSHPRRFASEIPPRLFLPLPQIRSDQIRSGEKEEGGKMGLAFGKLF

SEQ ID NO: 191326 - protein, 329 aa, Oryza sativa
  Clone ID: PAT_MRT4530_87655C.1.pep
MHPKSSLLFFLMIGALLTNAMANHAPAPAAVNCVPREREALLAFKRGITGDPAGRLASWKEDDHDCCRWRGVRCSDNLIGHVLELHLQSNLTGVVYVDYSPLEFNAVALVGRITSSLLSLEHLEHLDLSNNNLTGPDGRFPVFVASLRNLQYLDLSGLGFTGMVPYQLGNLSKLEFLDLSGTVNLSAISDWAHVVNKIPSLTVEIFEHLGFIQQSFERETSSMHWDEKSSEASTKCLKESSRIQRYSSVDENAVPCSMMRIKLLIWNLVNNTTVFADPTSLVVFINLLPPTCPHRWTTRVLYDGNDRDTDGIDHIIYNDNDYINTASPL

SEQ ID NO: 191327 - protein, 62 aa, Oryza sativa
  Clone ID: PAT_MRT4530_87656C.1.pep
DAIGCRRRRWWQGGQGRRDPGARCRLPLTAPLLPYSSPDLHGSQPHHPPEAASHPYFTREPL

SEQ ID NO: 191328 - protein, 102 aa, Oryza sativa
  unsure (1)..(102): unsure at all Xaa locations
  Clone ID: PAT_MRT4530_87657C.1.pep
QSQFPPSPSLSLYQISPSXQTNGQTLQSSTSSVLGPMEPLPRRGLQESVLPLEMHQRAALMRQAYGLIDYIYFFAFLLQLEIHISCSSPDSGSGQVGAASFI

SEQ ID NO: 191329 - protein, 168 aa, Oryza sativa
  unsure (1)..(168): unsure at all Xaa locations
  Clone ID: PAT_MRT4530_87658C.1.pep
GDTHLHRHHSSSRHPQLHQRLRSASGKRSPPTSLQPQRRNGERRPRQLARTVPTPARHHRCARIHHRLLCPLGYDIILGVKGRSNVSALPPTQHGRVCLQPAAVXSHLARGVREVLVEWKDKPAAEASWMCLDEFRALYPDFQLEDELLLEGGKDVMRGCHYASWVHR

SEQ ID NO: 191330 - protein, 138 aa, Oryza sativa
  Clone ID: PAT_MRT4530_87659C.1.pep
MAGEASPPAPPEIPTRCHHCAGPLSKDMETSSWTVPPLVRDSFSMIGSAIGGTAGAFYGFNHTMPFVRRYIKGPMWMHFLVGAPPVIVFSSACAGLAGGTIPALAQLVSSSYHSATASSFAHTTSRDEMHKARSSSTL

SEQ ID NO: 191331 - protein, 70 aa, Oryza sativa
  Clone ID: PAT_MRT4530_8765C.1.pep
QKKSPIRLSSVQAVQSPAMRLDLGATLGPEWLSSWPRMVEADDARHQRLACARWLRMSPSCRQTFGDGHP

SEQ ID NO: 191332 - protein, 78 aa, Oryza sativa
  Clone ID: PAT_MRT4530_87660C.1.pep
MGEVTRTKRSVAVAPGHLRPEQRRSCRPVDAGSFAVPALRQCAGTRSAALVADTNMTTSAFQMRVTAAAREDEIENLN

SEQ ID NO: 191333 - protein, 144 aa, Oryza sativa
  Clone ID: PAT_MRT4530_87661C.1.pep
MWSKLAGGRLLVRDFSSHYVACADGWLPILTTNTQRLTRIYLPTRPLTMTMRCSRKPPSLHYLGLGHPRAPLVLPSTTLCLPLHGSTSGRFPFTSFTATASQKQLIHPELLAAHHSHSRGRGDRNIRRSGPTARGNYDRVPMLE

SEQ ID NO: 191334 - protein, 484 aa, Oryza sativa
  Clone ID: PAT_MRT4530_87662C.1.pep
MEMTTTKRQQDHQVETMTTKKIDEEDEEVDDDGRAKRRGTVWTAASHIITAVIGSGVLSLAWAIAQLGWVVGPTVMLLFAAVIYFTSNLLADCYRTGDPATGRRNYTYMDAVKANLGGAKVKVCGCIQYLNLLGVAIGYTIAASISMMAIQRSNCFHARGEQDPCHASSNVYMIMFGIVQVFFSQIPDFDQVWWLSILAAVMSFTYSAVGLALGAAQVAQNRTFAGSAMGVAVGFVTKTGDVVTPAQKVWRNLQALGDIAFAYSYSIILIEIQDTLRSPPAEARTMRKATGISVVVTSVFYLLCGCMGYAAFGDDAPGNLLTGFGFYKPYWLLDVANMAIVVHLVGAYQVYCQPLFAFVERRAERRWPNGLPGGDYDLGWIKVSVFRLAWRTCFVAVTTVVAMLLPFFNDVVGILGALGFWPLTVYFPVEMYIAHRRIRRWTTTWVGLQALSLACLLVSLAAAVGSIAGVLLDLKSYRPFRSTY

SEQ ID NO: 191335 - protein, 156 aa, Oryza sativa
  Clone ID: PAT_MRT4530_87663C.1.pep
MEPPPPCNFGRRRTNHRRHHHHLVTAAGTTVLVTKSPPWTEAHPKVLSFYVTGQTGNCVLVRPAVRQATSAVRPVDLYRSDWRHPSGQTGGIRADEKNLLRSFNWYQRLASSISLVQGTQYVKARWTVGACEIRIPKELLVYGEQLRDTNVSHLIG

SEQ ID NO: 191336 - protein, 117 aa, Oryza sativa
  Clone ID: PAT_MRT4530_87664C.1.pep
SAQVSRACRPWSRATEQVDVPRPVKLYTLCGEPGAVSERYGFLSSWPHVGDSEAHYCRRVCTRHGVRSRSRRGQAKVRPGSACLHERTDRSRDRAAARPPAGATRQVQRAGRRVNVL

SEQ ID NO: 191337 - protein, 35 aa, Oryza sativa
  Clone ID: PAT_MRT4530_87665C.1.pep
WRTFNNKTARKGREEIFTYGLKAEAFEMVLNQTVK

SEQ ID NO: 191338 - protein, 135 aa, Oryza sativa
  Clone ID: PAT_MRT4530_87666C.1.pep
SELPCLWDVEVRKHHMCLCVCAHTTPASSSSPFCGGGGVSCCAASCELAAVLCCSRLHAAMYSRSRRRSTSVCAELCCAAAAFSFSRGEGIILKIPAFVINLLFFWPTAPPLPFLPPPISGGNAGGLVISSFSFS

SEQ ID NO: 191339 - protein, 84 aa, Oryza sativa
  Clone ID: PAT_MRT4530_87667C.1.pep
EPSLALFAPFSYALAITIITNWSRNTVRSHVPSRCNWPLADLFSWDCPPNQHYTGPPSHPSRRRPRGRLRGTAKGPTQPRAALV

SEQ ID NO: 191340 - protein, 491 aa, Oryza sativa
  Clone ID: PAT_MRT4530_87668C.1.pep
MRQERRLYSLLGLLLLLAVVYLTWFPTTHDGGGGGGGGWVKLPVPWLQPRMPFAARRGTHFVDADTGSPLYVNGWNSYWLLPARSPALAAEMLRRGRRMGLSVCRTWAFSDGGPGALQISPGRFSEAVFQVLDYVIYEARRNHIRLILCLVNNLDNLGGKAQYVQWAQAAGANMTNSTDSFYSHPTIKRYYKDYVKAILTRRNSYSRIRYSDEPAIFAWELMNEPRCVSNSSGPYLQAWIAEMAAYVKSLDTNHLVTVGTEGFYGPGIAERLGVNPGEWAASLCSDFIQNSAVEHIDFASVHAYPDSWLPRASLEEKVRYLSNWVDSHLNDSEQILKKPVLFTEVGYLQHSDANSNSTVDRDIILRIVYDKIYDSARKLQAGSGALIWQLMVEGTHMYGCMEKETLGGNAQYHPKDCCYWYRKFPFYKTQTLFAASFEKQTMDREACIVNMLSSADSLSDRLPVENQLQVFNNGREAVLCRWLLNLNMEML

SEQ ID NO: 191341 - protein, 477 aa, Oryza sativa
  Clone ID: PAT_MRT4530_87669C.1.pep
MAPEEGGPGGIGGEGGPGGDGGPHGIGGSGGDGGCGGVGGLGRKGGRGGHGGRGGNGGFGGGDGGRSGDGGEGRIFEKQEKKISQCCISVSMVEIKQAAQHQANLFLLMMDKSIGGSSARAGESEEIFGTNQWAFGFSAALHSFDVPPNPQFNMHGSSQMSCPPINEQPSQGFSIDNNIGSEDPPSLKSQRAAKKKKVSRRGTAFTKEEDMVVCSAFLNISKDAITGVNQTSGGYYKRMHDYFNEHKPEGSNRSQIAIQHRRFNLYSYLQIDDVVQMYEKTEPFTFMHCWKLLHNEAKWNNKFLELNNSTSPDRMEPPSTQGHTVAGHAESGNENIDTARPEGRDSAKRRRSKSYAETSSSSTAVEVLQRLQEKSEKTELKQDQQMVEILSRKDGKIKIQRDLFNLQKKHMKMSVKQHKKENEIREKQTEAQLMSAESSIMSIDIEKVPPYLKNYYLGMQRQIMERRGFSSPLNNGD

SEQ ID NO: 191342 - protein, 156 aa, Oryza sativa
  Clone ID: PAT_MRT4530_8766C.1.pep
MAAHGGGDLEAAAAAQYHACRRGRRSARTRSAWWSSFGRRCSRDCLLWTLALLGLTVLLLSTRLATTTTLRGRFRNHDLGLGAFSVHLAGYEGTPTAARERGRVSVGKEGWRAAAGSGGRRRRRREHSPSELIDELPPPPSSVAVATTLTTGHPNR

SEQ ID NO: 191343 - protein, 252 aa, Oryza sativa
  Clone ID: PAT_MRT4530_87670C.1.pep
MATNENLPPNVVRQLAKELKSLDESPPEGIKVIVNDDDFTTIFADIEGPAGTPYENGVFRMKLLLSRDFPQSPPKGFFLTKIFHPNIATSGEICVNTLKKDWNPSLGLRHVLLVVRCLLIEPFPESALNEQAGKLLLENYEEYARHARLYTSIHALKPKNKTKSGTISESTTALNVDQSNNAVSKNTPLGPAALSTSTANKAFGSNLQDQNAAPSDPALGASAVPKKDGLHAVKAPVEKKKIDARKKSLKRL

SEQ ID NO: 191344 - protein, 50 aa, Oryza sativa
  Clone ID: PAT_MRT4530_87671C.1.pep
MDAATMGLGFLVMTLAAPSTFYALFGEARITMRKTAVKLMLEETFGSPRN

SEQ ID NO: 191345 - protein, 85 aa, Oryza sativa
  unsure (1)..(85): unsure at all Xaa locations
  Clone ID: PAT_MRT4530_87672C.1.pep
AVVKTAQRXGCVYIAFKLNRNSMVSHVAGNSSFFRAWPNDGIANAYRIATEDAQWFKHNIGDEFGASTPIQCKSXQGVYNAADSS

SEQ ID NO: 191346 - protein, 484 aa, Oryza sativa
  unsure (1)..(484): unsure at all Xaa locations
  Clone ID: PAT_MRT4530_87673C.1.pep
LHPLTKLTLRNCPPGVDDAGRAHHSCPGGPAEVDAGFRLPPPLLLLGLPAPEEAPPQEMPLQGPRPGGGRATAIVGGGGGADHGXSSSSAACSSASSGGPVQGRPAPPASPPQXSPSTPAPSTTPSTLSPGRTSTSSTGTSAASAWPASSSGSPGRRGGSSRGASARGCAASGGSSSPMCRPPGTSXAAPPPAGRAVPGVSGEGVQGATAGGAAPARGGXGTMGCGXGGGEAAGRPIPPLALADPPPPPASPPQIVPNSTHHAASSASPSSRQRRGKTQXSYTSASLPSPAPPPAPQEPPXQGPRPSGGRIAVSVSGGDAAGVEGSGVALALPCSSREHPPPPPARPPSQDATPAPYGGEGGATGDTVDGEGXGGGGGHGLCQHRDSDASPAXPPPAPWSSRSPSLSATTAPASFSPGRGCGGGGGGRGYGGGGSLSPPPXPSLSTARPSPPPPCHWPRPAASSGGDSVGRSGGVSVGRSGGDS

SEQ ID NO: 191347 - protein, 122 aa, Oryza sativa
  Clone ID: PAT_MRT4530_87674C.1.pep
HECACGEIRWRGRGVDAAGRGQWHGGGGEGRAVDSEGGAAEIESHHHHSLCRHRHHHNLFRGRTTPELWSQTKTANERTKAQATTTHNAMDHALRPMDFRQPMPVAPPTARWLAGDASLSRC

SEQ ID NO: 191348 - protein, 100 aa, Oryza sativa
  Clone ID: PAT_MRT4530_87675C.1.pep
RSVCSLSIIWGKDHHILHIKQHQINFHHNMLKESTHALKLEDSMFIVYHLGTGSSYPPVRTYPKLKCRQQHNNNIQESSTMNTANKILQKKQQKDPGGKK

SEQ ID NO: 191349 - protein, 121 aa, Oryza sativa
  Clone ID: PAT_MRT4530_87676C.1.pep
MTDAGGGTDGEEPESEERAAARDRSDDESSAAPRLAAARARRVGQNRHDAGTEQPNRQRSGSKQPAVEAKARRLEATPGGSSGGGPRQAAAQNGHGNEATQLRRAEVAPSDGARCQCWAQP

SEQ ID NO: 191350 - protein, 116 aa, Oryza sativa
  unsure (1)..(116): unsure at all Xaa locations
  Clone ID: PAT_MRT4530_87678C.1.pep
SELGRLHSRPPPASPRRSGGEGRGAAPGVVVAAAATPRRSRRRWPPPSLLRPDLGGRGRGXPPRPRALLSPPPRAVATVVAAADLPPPSSXPDLGGRGEGSPPPRPARRRRRRPAP

SEQ ID NO: 191351 - protein, 266 aa, Oryza sativa
  Clone ID: PAT_MRT4530_87679C.1.pep
MEFIDDDWDYQPRARVIHSRSNANSNGATTASSSQPTRSLPHTAACAAAAVALLAAAYYLLPDYQSSSSNPTPPPPKPSDPIAPPPPRHAAAAAAAAATAVSDGGEAVEDAGEWTDQEMDILRRQMVKHPAGEPQRWEKIAAAFGGRRTPESVIRAAKSGGGAAAAGASFDQFLRKRKPLDPRSEATDAGSGNAGGGGGESGDGSWSAGDDRALLNALKEFPKDTAMRWEKVAVAVPGKTKAACMKRVTELKRDFRSSKAASEAAP

SEQ ID NO: 191352 - protein, 365 aa, Oryza sativa
  Clone ID: PAT_MRT4530_8767C.1.pep
MAATKPPSCSTRLRSPATTAACFLPASLLLFLLLLLLRRPPMGSFPPTIPGGSVSSRRAELYGRMARDLDERGAAFLDGGETSQSLTLSELFDTRDGAVVPMLKAANPPVRANVLYLDPEFASVISKAVKEVFLPYFNQAIWFQNMSIYHFSMFHTSHHLEPIVATEDEIEAEVDAVKRVTDDVCPLKIILDQVVLTSTGVLLGLWQVESGTDPADIRSRLREALPRAPQKQLYDPVMLHTSLARILGHPKLPQEGNAQSLDHVKFFHDLVAQVNSKIRGFQATVKELWFVEEYDVLALALNGKMKKIVCNHMYVISFAVKHSQNLEYVNPCQPGLTMVVKKRTFTIVGSQKQHDAHDLNQVNKT

SEQ ID NO: 191353 - protein, 66 aa, Oryza sativa
  Clone ID: PAT_MRT4530_87680C.1.pep
MPTANLEQAFPTYDANGDGKISAEDPASALKALAAPLGPTEARLMMDEIDSDRNGFVDLSNFTASH

SEQ ID NO: 191354 - protein, 118 aa, Oryza sativa
  Clone ID: PAT_MRT4530_87681C.1.pep
MRQLIRRLSRVGDSSAAAASSSSPGKRRGAGTKKKAAAAGVPPEGHVPVDVGEEGEEATERFLVRAELLGRPALAELLGRAAQEYGYDHRGPLRIPCSPAAFRRALAGAGDGDHDDDG

SEQ ID NO: 191355 - protein, 63 aa, Oryza sativa
  Clone ID: PAT_MRT4530_87682C.1.pep
FHILQIVLALPLVGIASCHILFDNFTSAISGHHYCFYILYNATDILIPDVLLRISIPLYSNLN

SEQ ID NO: 191356 - protein, 57 aa, Oryza sativa
  unsure (1)..(57): unsure at all Xaa locations
  Clone ID: PAT_MRT4530_87683C.1.pep
IQEAYTLHVSWFQLCLLIISHSHKHAVCNRLQIFXQLVMLKQAAHEHTRSDFQKKKK

SEQ ID NO: 191357 - protein, 101 aa, Oryza sativa
  Clone ID: PAT_MRT4530_87684C.1.pep
MDVAVETVVAEETVEMVESEDSQATASTKRACCPFHAGRIWHHYSNNFMRMVGTNKWCRCVVHLESNKSMRGPTAMLDHRTHDEARWRCVGMLQDDPEMWP

SEQ ID NO: 191358 - protein, 116 aa, Oryza sativa
  Clone ID: PAT_MRT4530_87685C.1.pep
MRNVQDVFLNMTRRSAGLSSSVPPQGGSGASKRHTDTHHEVTNLPGSKGFLTPRNNNQQPYNGQGAHSLTYGFKTFATKARAGPNWLYKPRTKMSRDYQHLFIVHSSVKITLYICI

SEQ ID NO: 191359 - protein, 153 aa, Oryza sativa
  Clone ID: PAT_MRT4530_87686C.1.pep
RSEIHTYIHIYEMMELFPRQLDLSLHISTPSCFSPSPASASTTASSWPWTTKQQLPEEEEAAATTSTTTSSRSAPPLLLCNSDVFSTRGSSTTNTNHHADGGLANSQQLKAAARQPIHGIPVYHGHQQQQRRQLHHPYDVVGTRQSDGGRRLF

SEQ ID NO: 191360 - protein, 774 aa, Oryza sativa
  Clone ID: PAT_MRT4530_87687C.1.pep
MASMNDQHGGATAHVLLVPLPAQGHMNPMLQFGRRLAYHGLRPTLVATRYVLSTSPPPGDPFRVAAFSDGFDAGGMASCPDPVEYCRRLEAVGSETLARVIDAEARVGRAATVLVYDPHMAWVPRVARAAGVPTAAFLSQPCAVDAIYGEVWAGRVPLPMDDGGDLRRRGVLSVDLATADLPPFVAAPELYPKYLDVSIRQFEDLLDADDVFVNSFNDLEPMEAEHMESTWRAKTVGPTLPSFFLDDGRLPANKNHGIDIFTGDAPCMEWLDKQAPCSVVLASYGTVYSLDGAELEELGNGLCNSGKPFLWVVRSSEGHKLSEELRGKCKEKGLIVSWCPQLEVLKHKATGCFLTHCGWNSTMEAIATAVPMVAMPQSADQPTIAKYVETAWEIGVRAQLDEKGSVTKEEVEISIKKVMDGKRAVEYKRNAAKWMQKAKEAAQGHTNPMLQFGRRLAYHGLRPTLVTTRYVLSTTPPPGDPFRVAAISDGFDDDAGCMAAPPDYGEYHRSLEAHGARTLAELLVSEARAGRPARVLVYDPHLPWARRVARDDGVGAAAFMPQPCAVDLIYGEVCAGRLALPVTPADVSGLYTRGALGVELGHDDLPPFVATPELTPAFCEQSVAQFAGLEDADDVLVNSFSDLEPKEAAYMEATWRAKTVGPLLPSFYIGDGPLPSNTAYGFNLFTSTVPCMEWLDKQPPRSVVFVSYGTFSSYDAAKLEEVGNGLCNSGKPFLWVVRSNEEHKLSRELREKCGKRGLIVPFCPQLEVLAHKAT

SEQ ID NO: 191361 - protein, 95 aa, Oryza sativa
  Clone ID: PAT_MRT4530_87688C.1.pep
NGFSEIGIILSGEIMALLFLYASKILKKVGSGLFQFFFQANPPFPHKRPRDNHGIVFFPFFIIPLIKGRDSFFFGKKKKKKKKKKKKKKKKKKKT

SEQ ID NO: 191362 - protein, 107 aa, Oryza sativa
  Clone ID: PAT_MRT4530_87689C.1.pep
MSAAAGGGSSAGLVLTADPKPRLRWTADLHDRFVDAVAQLGGPDKATPKTIMRTMGVKGLTLFHLKSHLQKYRLGKQSGQEMAEPSKDASYIFGRSWGRGNTRSRGT

SEQ ID NO: 191363 - protein, 70 aa, Oryza sativa
  Clone ID: PAT_MRT4530_8768C.1.pep
GMDRICANSRTGREKGLTGLVKTKATISAGDLGAPFLTRYGACTDKTTTSQGFPPDSPNPQALGVVGFVL

SEQ ID NO: 191364 - protein, 246 aa, Oryza sativa
  Clone ID: PAT_MRT4530_87690C.1.pep
MFPGLIHHHRLLDADVGGGGGGSSAGLVLTADPKPRLRWTADLHDRFVDAVAQLGGPDKATPKTIMRTMGVKGLTLFHLKSHLQKYRLGKQSGKEMAEQSKDASYILGAQSGTNLSPTVPTPDLKESQELKEALRAQMEVQRKLHEQVEVQRHVQIRMEAYQNYIDTLLEKACNIVSEQLNGFSISDHDLTSAGVMLSSSDTLSPSIFHQLSVSSISLHSPGGKSSPFAADADLFFQKAPEKRKSY

SEQ ID NO: 191365 - protein, 189 aa, Oryza sativa
  Clone ID: PAT_MRT4530_87691C.1.pep
DKIDIITAGMGNALATDGGFCTGSVRVVDHQRLSSSGYVFSASLPPYLASAAVSAVSYLEGNPSVLADLRSNISFLHKELSGTPGLEISSHVLSPIVFLKLKKSTGSSNTDIDLLETIAERVLKEDSVFIVASKRSPLDRCKLPVGIRLFMSAGHTDSDISKVSSSLKRVSASVPMIPVAAHTCKHFEK

SEQ ID NO: 191366 - protein, 485 aa, Oryza sativa
  Clone ID: PAT_MRT4530_87692C.1.pep
MDMALPIVNATAAVLARVSAAFNAPFARAVVFGVHIDGHLVVEGLLIAVIVFQLSRKSYKPPKKPLSEKEIDELCDEWEPEPLCPPIKDGARIDTPMLESAAAPHTTIDGKEVINFASANYLGLIGNEKIIDSCVGSLEKYGVGSCGPRGFYGTIDVHLDCEAKIAKFLGTPDSILYSYGISTIFSVIPAFCKKGDIIVADEGVHWAVQNGLHLSRSTVVYFKHNDMASLANTLEKLTRGNKRAEKIRRYIVVESIYQNSGQIAPLDEIVRLKEKYRFRVILEESHSFGVLGQSGRGLAEHYGVPIDKIDIITAGMGNALATDGGFCTGSVRVVDHQRLSSSGYVFSASLPPYLASAAVSAVSYLEGNPSVLADLRSNISFLHKELSGTPGLEISSHVLSPIVFLKLKKSTGSSNTDIDLLETIAERVLKEDSVFIVASKRSPLDRCKLPVGIRLFMSAGHTDSDISKVSSSLKRVSASVLSDYI

SEQ ID NO: 191367 - protein, 36 aa, Oryza sativa
  Clone ID: PAT_MRT4530_87693C.1.pep
MFLYRRAAAASCLVAAVAIVVVLGLPVVHGPRARAR

SEQ ID NO: 191368 - protein, 156 aa, Oryza sativa
  Clone ID: PAT_MRT4530_87694C.1.pep
MDMALPIVNATAAVLARVSAAFNAPFARAVVFGVHIDGHLVVEGLLIAVIVFQLSRKSYKPPKKPLSEKEIDELCDEWEPEPLCPPIKDGARIDTPMLESAAAPHTTIDGKEVINFASANYLGLIGNEKIIDSCVGSLEKYGVGSCGPRGFYGTID

SEQ ID NO: 191369 - protein, 65 aa, Oryza sativa
  unsure (1)..(65): unsure at all Xaa locations
  Clone ID: PAT_MRT4530_87695C.1.pep
IFLQYPLSNSFKKIYIVASKRSPLDRCKXPVGIRLFMSAGHTDSDISKVSSSLKRVSASVLSDYI

SEQ ID NO: 191370 - protein, 80 aa, Oryza sativa
  Clone ID: PAT_MRT4530_87696C.1.pep
PPGGPFLARVFFFGPPFIFSRRGPPQGSVPYPLKGVPKKRRAGVKKLGAPIGSRVVLQTCVLDFMAPGPAHLPLGCCFLG

SEQ ID NO: 191371 - protein, 124 aa, Oryza sativa
  Clone ID: PAT_MRT4530_87697C.1.pep
AAIEGGGGGVVRDCKTLEAVVVKAATQSSSSGGGAEQVAAGGGWRQDGELASSPPLSYASVLSSSAAACHERVRDLLLTNLQLPQQPLLIRRGTHGSLLAEHLPSPLPSMPATVAAHSFGTWEK

SEQ ID NO: 191372 - protein, 109 aa, Oryza sativa
  Clone ID: PAT_MRT4530_87698C.1.pep
MVKRKRGNEGKASSYPTGKDGDPTAGDNDDRSAGEQDGTHTKGTMTSVGSPTPQGGGGTASRRVAMHSTASGLAMNGERTTSGGGVATDGGGVGRGATKAFVATQRLQL

SEQ ID NO: 191373 - protein, 175 aa, Oryza sativa
  Clone ID: PAT_MRT4530_87699C.1.pep
MAETGPAAIVAALTRAIADDGRGGGATLGGVRGSHARRSKRGISGGAGCGGGGGARGQVTAVGASGAAAEDARGYDAAALSFPEEASRPRAPRGRVTYSRVVLAVDRSRTGMARKISVRRRRREHGVLVGSWTSTSAAVAVRDAPGRARLTPLLRGSHGCNGSTEQRMGGILGWE

SEQ ID NO: 191374 - protein, 79 aa, Oryza sativa
  unsure (1)..(79): unsure at all Xaa locations
  Clone ID: PAT_MRT4530_8769C.1.pep
NSARGKSLRELQDMTHKFKISSXEAQEKYSIINADLTSRLAEMEGQLQHITSENEALVEKLKDIAAIVEEHGGHSSGVH

SEQ ID NO: 191375 - protein, 714 aa, Oryza sativa
  Clone ID: PAT_MRT4530_876C.1.pep
MATATQAPTSPAAASGRGSVLPLLRGRPSTRVRLAVGRRPQTALRAQPPGAAEVVEQSVNTIRFLAVDSVEKAKSGHPGLPMGCAPLGHVLFDEFLRFNPKNPYWFDRDRFILSAGHGCMLQYALLHLAGYDSVTMDDLKAFRQWGSRTPGHPENFETPGVEVTTGPLGQGFANAVGLALAEKHLAARFNKPDLKIVDHHTYVILGDGCQMEGVSNEASSLAGHWGLGKLIAFYDDNHISIDGSTGIAFTEDALARYEALGWHTIWVKNGNTGYDDIRAAIKEAKAVKDKPTLIKVTTTIGYGSPNKANTYSVHGSALGTKEVEATKNNLSWHHEPFHVPDEVKRHWSHHIDEGASLEAEWNKKIVEYEKKYRQEAAELKSIISGELPSGWDNSLPKYTPENPADATRNLSQQCLNALAKAIPGFLGGSADLATSNMTLLKMFGDFQKDTPEERNIRFGVREHAMGAISNGIALHSPGLIPYCATFFVFTDYMRAAIRLSALCGSRVIFVMTHDSIGLGEDGPTHQPVEQLFSLRAMPNILMLRPADGNETSGAYKIAVLNRQRPSVLALSRQKLQQLKGTSAEGVAKGGYIISDNSSGNKPDIILIGTGSELEIVEKAADELRKDGKTVRVVSLVCWELFEEQSEKYKESVFPSEVTSRISVEAGVTFGWEKYIGEKGKAIGVDRFGSSAPAGKIYKELGLTVENVIATAKSL

SEQ ID NO: 191376 - protein, 95 aa, Oryza sativa
  Clone ID: PAT_MRT4530_87700C.1.pep
PGPAEPYVKLTSQACRIFSCWPRVWKILAFWTLQSRQGRNASLVKDRAQYFHSQWYFCCRHHFMADVEHVAVRDDVDLGALLAVRGCYGRHLGGQ

SEQ ID NO: 191377 - protein, 75 aa, Oryza sativa
  Clone ID: PAT_MRT4530_87701C.1.pep
PPPPPPSAYQGNNPGYQGGGPGYQGGNPPPYQGGNPGYAPGYHGQGGNPSYQQGGDNYNAGVPAYERDGQGRNYQ

SEQ ID NO: 191378 - protein, 109 aa, Oryza sativa
  Clone ID: PAT_MRT4530_87702C.1.pep
PHPQNETQKKKKKKLHDFFSQNKLEKKRGQKEQRKLLPFIFFLPGYHQRFSEGWQPMHYSHKHSSSFNLNSFPCPSNSNRRKEDPLGCMITVGQRYVHLRPMQPCCSTA

SEQ ID NO: 191379 - protein, 76 aa, Oryza sativa
  Clone ID: PAT_MRT4530_87703C.1.pep
GRKKRALMINLIFCIKTHRAFCHDGESGHKTLIICHYLPKPFINFKNHLKKTPFCIKKMPGKKIPSLITTKEIASG

SEQ ID NO: 191380 - protein, 208 aa, Oryza sativa
  unsure (1)..(208): unsure at all Xaa locations
  Clone ID: PAT_MRT4530_87704C.1.pep
MGKKRKHSETTQAVAQPKKEEAAPERPARTLLGWKDKNQVEDDSPIFRNKEKLLVTCSRRINYRYRHLMLNLVTLLPHCKKDNKVESKETKGATLNELVELKNCSSCLFFECRKHKDLYLWMAKCPNGPSVKFLVSAVHTMEELKLTGNHLQGSRPILTXSANFEKDAHWKLLKEMLLQIFETPKDHRKXKPFHDHXVFVFSISDDHI

SEQ ID NO: 191381 - protein, 195 aa, Oryza sativa
  Clone ID: PAT_MRT4530_87705C.1.pep
MASPPPSLPPPSLPPLSTPNPRALSLRLPARRLPVASSAAPSGAAAAASARERRRFLERYGLNPDDFEDDAEAEPREERRRDRRNRRSGRGEAEDAPAKAAAEPRETHKMLQVLGGKVRRRKLLSPKDRNVRPMMEVVRGAAFDILQSAGGFPASLRPGRWLDLYSGTGSVGIEAMSRGCSEALPGEMDPWVVSE

SEQ ID NO: 191382 - protein, 140 aa, Oryza sativa
  Clone ID: PAT_MRT4530_87706C.1.pep
MAPDLQSTQHGFPETLITPGNISAKAAVLPAGECLSSLHTMHGAMQVTHHAMSGTVKSAHWVKGKKPGKEKKAAMDGQTACREISESAKLVTGVGDLAVWGRLLHHTTRTSARRRTFYLDKGTPMGINRRPPKRRGDTEQ

SEQ ID NO: 191383 - protein, 71 aa, Oryza sativa
  Clone ID: PAT_MRT4530_87707C.1.pep
KKKKKKKKKKKKKKKKKKKKKKKKKKKKKKKKKKKKKKKKKKKKKGRPPLKRPNLPSRGLPVKPFLKGPPK

SEQ ID NO: 191384 - protein, 139 aa, Oryza sativa
  Clone ID: PAT_MRT4530_87708C.1.pep
MAGGGRMPLLGWWLMLVGSLRLASVWFGFFNIWALRVAVFSQTDMTEIHGRTFGVWTLLTCTLCFLCAFNLENRPLYLATFLSFIYALGHFLTEYLIYHTMAVANLSTVGFFAGTSIVWMLLQWNSHGKSRGSHSVKQS

SEQ ID NO: 191385 - protein, 40 aa, Oryza sativa
  Clone ID: PAT_MRT4530_87709C.1.pep
LPRLEDVWDIPPHEHFVTPRVWRTILLAAIWNIWKRRNNK

SEQ ID NO: 191386 - protein, 48 aa, Oryza sativa
  Clone ID: PAT_MRT4530_8770C.1.pep
YTHYESIHAKSSKHPINTAVHHRPLCRPIDQNPPLVIQKHTKVQISPL

SEQ ID NO: 191387 - protein, 81 aa, Oryza sativa
  Clone ID: PAT_MRT4530_87710C.1.pep
EKQGCRPPPPKRLRRWQRRRHPRRRRARKGRGPPPGAPSGPPLGSSPITLATSSLKTVLTRSIHPPLAVSKHGLQLGPPLQ

SEQ ID NO: 191388 - protein, 162 aa, Oryza sativa
  Clone ID: PAT_MRT4530_87711C.1.pep
GTMGYLAPELARSGKASPLTDVFAFGAFLLEVTCGRRPVEQAMQDNQVMLVDWVLEHWQKGSLTKVIDARLHGNYNIDEAILVLKLGLLCSHPLPGARPSMRQVVQYLEGDMPFPELTPTHLSFSMLALMQNEGFDSFVMSTSLPSETMMTIGTMSGLSGGR

SEQ ID NO: 191389 - protein, 81 aa, Oryza sativa
  Clone ID: PAT_MRT4530_87712C.1.pep
MAACSVAMRGYRNGARGAVASSAAVSAAFHPVRAAHLAGGFASDSGRQAAGIQNTYYVASSDVRRESETAVSSAFLPSFEA

SEQ ID NO: 191390 - protein, 601 aa, Oryza sativa
  Clone ID: PAT_MRT4530_87713C.1.pep
MANEEQRQWMDGEFGCQPVANIFFDFLDLPGEIHHCNFFSFYDLFCSSDEEEGPYTGNGSVDVKGNPASKTHTGKWKACYSILGGEFCGALAYYAVGTNLVSYLTKVQGQSNVTAASNIAAWQGNCYLTTILGAFLADSYWGRHRTIVVSLTTFTFGMVLLTLSAVVPPNMHRSMATFPQEALSSLGLYMTALGLGGIWPCVPTFGADQFDDTDVSEKAQKELFYNWYYFAVNGGFFVASTVIVWVQDNCGWGLGFGIPTLFSVIGVVGFLASMRFYRYQKPGGSALTRICQVVVAAFRKVHVDVPSDSSLLYEMPGKESAIVGSRKLMHTDGLRFFDRAATITASDEASASRPWKLCTVTQVEELKIFARMLPIFLTGVIFNTAEACFPLFVEQGGAMDNHVAAAFALPPASLTTFTCVCILVLAPTYDRVLMPAVSRLTGVKRGLSELHRIGVGMVFAVLALAAAAAVETARLRSVEADAPAVSILWQAPQYVLVGVAKVFGVVGYIEFAYEQSPDAMRSLCQACSLIMVTPGSYLLSAMLTIISSVTGGGGGHGGWIPENLNEGHLDRFFWLMAALQLINLIAFVCCAATYKRKLPTT

SEQ ID NO: 191391 - protein, 699 aa, Oryza sativa
  Clone ID: PAT_MRT4530_87714C.1.pep
MELSSTSASLLLILLLTLVYFLYLHQDPKKKPRTHGLKSYPVVGTLPHFIKNKDRFLEWSTGVMKRSPTHTMSFKELGLTGGVITANPANVEHILKTNFGNYPKGELTVSMLEDFLGHGIFNSDGEQWLWQRKAASYEFNKRSLRNFVVDTVRFEVVERLLPLLEQAGRDGRTLDVQDVLERFAFDNICRVAFGEDPACLTEERMAAPQSAEFMRAFNDAQNAILARFNSPAKSLWRVKKLFNMEPERRMREALATIHGYAERIVRERRERREARLERRDDFLSRFAASGEHSDESLRDVVTNFILAGRDTTSSALTWFFWLLSGRPDVEDKIVREIRAVRQSSAGSEGTRGATFSLDELRDMQYLHAAITESMRLYPPVPFDTHSCKEEEFLPDGTFAGKGWLVTYCAYAMGRVEDIWGADCEEFRPERWLDEAGAFRPESTFKYPVFHAGPRMCLGKEMAYIQMKSIVACVLEQFSLRYAGDAKGHPGLVVALTLRMEGGLPMKEKLFARVDGLPMARPHRANLNTSSQPKSMPWRSGVGTGDKAEQLIQPLVLGVHRFILSPSPLINDEWARIWNVSNSVGRIEMAAGWKIAAADAGDGGGRAAGVGDGGGWAERRRRKRAAAVRWASETTVAGPRGGGGRERWASEMASAVQARGDGDRATDVGDRGGRASTPARLRAVVQWPQELATKAGSASI

SEQ ID NO: 191392 - protein, 40 aa, Oryza sativa
  Clone ID: PAT_MRT4530_87715C.1.pep
MVAAPHGTGLELQPAGRMQGLGQGMQPAVSLVTCCACLPV

SEQ ID NO: 191393 - protein, 515 aa, Oryza sativa
  Clone ID: PAT_MRT4530_87716C.1.pep
MELSPISASLLLILILLAFLPLLYFLYMHQDPKKKPRIHGLKSYPVVGTLPHIIKNKHRFLKWSTSIMKCSPTNTMSYKALGLTGGVITANPANVEHILKTNFDNYPKGKLTVSMLEDFLGHGIFNSDGEQWLWQRKAASYEFNKRSLRNFVVDTVRFEIVKRLLPLLEQAGLDGRTLDLQDVLERFAFDNICLVAFGEDPACLTKERMAAPQSAEFMRAFNDAQNAILARFNSPAKSLWRVKKLFNMEPERRMREALATIHGFAERIVRERRERGEAGLARGDDFLSRFAASGEHSDESLRDVVTNFVLAGRDTTSSALTWFFWIVSGRPDVEDRVVREIRAVRASSGSTDATFSFDELREKHYLHAAITESMRLYPPVAIDTHSCKEDDFLPDGTFVGKGWLVMYSAYAMGRMEGIWGADCEEYRPERWLDEAGAFRPESTFKYPVFNAGPRICIGKEMAYIQMKSIVACVLEKFSLRYASDANERPRPVLSLTLRMKWGLPMKVTQGVIKQA

SEQ ID NO: 191394 - protein, 85 aa, Oryza sativa
  Clone ID: PAT_MRT4530_87717C.1.pep
WAYHSGIVGRCLVYIDTMFFTGTQDKCTACDKTVQWIDSTYGDICVAVPQDLIQVHSLQRDFSRCADTYPWTVVLYCKTHFEAAF

SEQ ID NO: 191395 - protein, 48 aa, Oryza sativa
  Clone ID: PAT_MRT4530_87718C.1.pep
LSKIMGLTLKNNWPSGVTKKGSSSLTNGPLHHKPKDRHEQAYRARSHT

SEQ ID NO: 191396 - protein, 114 aa, Oryza sativa
  Clone ID: PAT_MRT4530_87719C.1.pep
MTQSNKFENLNARGEGRWERRSRGRGAVHVWRKKTVDGSRRSKGGACGGAAIGEGTREGEKREEWMREGRGARGGCAGRGDQRLKRLPSSAMVVRLKGWWCGDVRRGSDLTPAV

SEQ ID NO: 191397 - protein, 135 aa, Oryza sativa
  unsure (1)..(135): unsure at all Xaa locations
  Clone ID: PAT_MRT4530_8771C.1.pep
DGSAPPVATCDMEGLNDKARKQGIKECHGKKPSRFDTCFVHYTTWVQGSSHKFEDTWQEQHXIELVLGKQKKELTGLSLGATNMKRGERALLHGNCELGYGKQGSFLFPNVPPMADLVYEVELIGLDDVTDGKAR

SEQ ID NO: 191398 - protein, 98 aa, Oryza sativa
  Clone ID: PAT_MRT4530_87720C.1.pep
MDSITQCLTRAAERTAIMPAAASSPKVAHWMRETAAAGISIEDANERGDRMDEAKATCSRGRQPAGWAGEEDTQTAYKILTYLAFLKDVTPEHYLAGS

SEQ ID NO: 191399 - protein, 79 aa, Oryza sativa
  Clone ID: PAT_MRT4530_87721C.1.pep
MMRLCGILLRTRSPTTSLHLAAIKSRGKQHVPTGWPAPLQLLLSDVWHLAPDLLTAWVVGRLHTLVGVIGWERGERKKG

SEQ ID NO: 191400 - protein, 74 aa, Oryza sativa
  Clone ID: PAT_MRT4530_87722C.1.pep
SLLTFAVCTHIEKCLSILRSLTDNTYKRRLHFACIASHCYIRGACSDHSFLARKLIAVILPMQTQHTQLQIDCN

SEQ ID NO: 191401 - protein, 89 aa, Oryza sativa
  Clone ID: PAT_MRT4530_87723C.1.pep
LIQAKNWFVLFLFAVRALFVLSNAFFFLILYSKIPPLSEQRCLLSAPMFVWLAVCLGWSFGDYGSEVGASECMLPFLSGMCMAIKLTPP

SEQ ID NO: 191402 - protein, 83 aa, Oryza sativa
  Clone ID: PAT_MRT4530_87724C.1.pep
ITKQSGETNYQTEKDFTREGTYKFNWAQKPLKIHLFFVGGEGGTCGFFKEKPPWLSTPPPSWLDLTQERTFGPKNKRGIQTCP

SEQ ID NO: 191403 - protein, 456 aa, Oryza sativa
  Clone ID: PAT_MRT4530_87725C.1.pep
MPPPPPPSVRTRSVTSVALPTHGDGGGCRRVPLSPFDAYWVALPPVRRVFLFPSPPPFGDVVRALRDSLEAVLPAFYPFAGALVYSPEEESLSIVVEAGGGVAFVEAETDLDLGRLVDEGEEHDEDALRQLVPDIRRDELPAPVMAAQVTEFVGGGGGVAVGVAMHHAAADGRGLWRFLEMWSAAAAAAVATSVREALPPPLHDRTLVRFDGDGELARLFLRQIAPDLPKIVHAPLRQCPLSRRTFTFAAPAVKLLKQRATVGGGKTPSTFAAMAAHGWVSIARASGLADDGGGPVFAVFLADARALMSPPAPGAYAGNCVAVCAASLEGAELAAGADAHAHARAAAAVGGAVDAARRDPLGDRARWHDKFARIPPGRAMIMAGSPWFPAYAVEFGLGRPAARAELASMNHDGEVVLVAGREAGSVQASVAIAADKMPAFREMFVVGCGWGEPDSN

SEQ ID NO: 191404 - protein, 412 aa, Oryza sativa
  Clone ID: PAT_MRT4530_87726C.1.pep
MAEGEGSSSRRWALGDPDVVETVAHEIIDLDANDDPDGVMIICEKASSHKSNHSVSHPSDWPKHPKSGLAEDVPGPSHQPGTSTVLPWGCTTPGRPRKHKEIKTVDNKIDEKYKAFKQFDTVTDHSDHYYSMSGKGNVPEVKKPSKDWVRRIQHEWKVLEKDLPGTIFVRVYEDRMELLRAVIVGPAGTPYHDGLFFFDVYFPSQYPKKPPLVNYRSGGLRLNPNLYDSGKVCLSLLNTWSGHGCEKWNPSNSTMLQVLVSIQALVLNAKPYFNEPGYAASANTPQGEKMSMAYNESTFLLSCRTMLYSLRNPPKHFEDFARVHFCKYRRNILVGCKAYMNGAQVGCLAGNGVQDVDEGDKSCSANFKGSLKTLFDELIKEFTRIGVHCHEFQPQRVNPGSTRAKADTTLRL

SEQ ID NO: 191405 - protein, 130 aa, Oryza sativa
  unsure (1)..(130): unsure at all Xaa locations
  Clone ID: PAT_MRT4530_87727C.1.pep
VRVTDKAYLLSYDLWNILIRYTFTYTGHPHKYRXNPPQIIKTISMSQVISQVLAQIFLGGQDDPRYKRDPEGGVKXSNSIANTPTIVYEAGVRRAKSSGDLIESLDYDLTLVPTYPNTLIIRSASITRLT

SEQ ID NO: 191406 - protein, 876 aa, Oryza sativa
  Clone ID: PAT_MRT4530_87728C.1.pep
MAALDPPSELLVTPKTARKDEAASCNAATPPKPSPVSPEEMRAVARKFAEQPVQNPDDGVWAVLTAISKNARLRPEGMNILLSADEHYIGRAVQESSFKISSLQISGKHCKIYRDTVLGELNRNEPVPVFLKDSRFLVLLVILSYTSFAFVYREVNAVSRAENEVTILKRKSATLQVMIYVPQFVFDLKEDIHSERKRLKGLGIGSSDGPVSLDDVRRLEKSNAELREQLEEHVVTIETLRTQIKISEAQHEKELKELKEITSSTYVDQAKSLQQTLEYKQKQIDSLSTSNTELQNSIKDLDERLSAYKQSRAEADEIIQSQKSNICELEAQLSEERDLRREERDKAAEDLKSALHKVNAEAQEEIKRQAEAHLRQQREQKEVISKLQESEKEIRLLVETLRSKLEDTRENLVTSEKKARELEAQLQDEQLVSANNQKKSDKLEMDLRKVKKELEHEKAAREEAWAKVSALELEIAATIRDLSIEKQRYQGARERIILRETQLRAFYSTTEEISSLFAKQQEQLKAMQRTLEDEENYENSIMGDDLNKVPLATVTADDARTRVNYSKNTMEASGASTENTQASEQSSSDDSKETEQQDDFTRVEGANTQEVECNSPEMATERFRSDSHGDLAATAPELEPTDTEQVPETESQAGNVGCGDHNSALQRFSEMGGDTMQLDDEVQPQENDESILICKDRGQPQGNEEASLTLKDGIGHYSEEKLEVNCSERKHEDTQTRTIGTADLLASEVAGSWAVETGPSVNGENESPRSLGETTDHAGEQDENVRGSSAADALVNSDGQAAGSQSNIDHVISKITDHHRVLNAMIEIVDPDFRKQLPGSGVGKDDLMSDAETEEGSEANDTDSDSEEAMVEDSVG

SEQ ID NO: 191407 - protein, 161 aa, Oryza sativa
  unsure (1)..(161): unsure at all Xaa locations
  Clone ID: PAT_MRT4530_87729C.1.pep
WPPLPSPPLPSPSPSPPARDAVALASRPHACDALARLSLSPQGRSPSPAATRPLPAPPPVSARWPTEGXHAGRASRRRAARGAGVADASSPSASSASRRPPPQSPPPXPLPVGGGKSGALAGGSGPTLPNLGGDGGGRRSSRWXAGSSLPPSPPTPPHCQR

SEQ ID NO: 191408 - protein, 472 aa, Oryza sativa
  Clone ID: PAT_MRT4530_8772C.1.pep
MAAAAGERGQVVVLECVAGSSKAEEWGGGGGVVQEGDVVEAVRVGRGGGPGPGAAVLEAPFKGGRAALHKAMHAAFKRGDTSVEVRVRGGSELQACILPHSGGGGGGGGGGGGGGGGGGGGGNKQYVLRSLHDPNYVLGFVDRLESECLLLQGTRSTRVASALSRAQLQDGYVAYPWEKKMRDSLRMPNSSSYLSMLVLPKALDLNSCRYESFEDTLARANAWIYSSQVSGIPIEFMNVQSEALLTKISGETASATVNSGSLSDLSNVTNATLYGFEDYHGVDIGVVKAARLWYSSIAEEMPLEIPLEEGDTRLGFAISRTEEGFIFISSVVDNDKDNEAPSTRSGLRDLFNQAREASKLLVISRVSNEKVLPWMISSSGAIRCFDTISLSQKLSLHRLAVRPIQLHLLMWEKPSGPVERIIRSPKLPPQSELPQVPWNLIESIEPRVDVDEDYVGDLSFRIDDLSVGTSWV

SEQ ID NO: 191409 - protein, 121 aa, Oryza sativa
  unsure (1)..(121): unsure at all Xaa locations
  Clone ID: PAT_MRT4530_87730C.1.pep
MAKMVIREIRFLMTIHPHLLLIDHYILFLVYPKDHLFVALDPTHYDKETFMEFLTILXFIPSIPYVANRFDDTIIWNMCAEHCRFTHHDAYNALGLFYEKESQIAIKDIFNPLGEWEEEHI

SEQ ID NO: 191410 - protein, 219 aa, Oryza sativa
  unsure (1)..(219): unsure at all Xaa locations
  Clone ID: PAT_MRT4530_87731C.1.pep
TYPIILLLADCIDLVRRTXXXXXARXIGLHRXXXLDIGTYLALAMXLVHADKNVITVPYAFTDHYILFLVYPKDHLFVALDPTHYDKETFMEFLSILILXHMYYRKTGGPVKEPTRNNLHAKTGLSCFKQPPRLPYVNXHMCEMVRVNKRYTTNSDEIPSIPYVANRLYDTIIWNMCAEHCRFTHHDAYNALGLFYEKESQIAIKDIFNPLGEWEEEHI

SEQ ID NO: 191411 - protein, 70 aa, Oryza sativa
  Clone ID: PAT_MRT4530_87732C.1.pep
PPRAAATSAVRYSLAQTLSLGHRTLHLYVLEGVSLAPRACSSSPPRGRVDADGDGGGAAALGLDGERVPP

SEQ ID NO: 191412 - protein, 117 aa, Oryza sativa
  unsure (1)..(117): unsure at all Xaa locations
  Clone ID: PAT_MRT4530_87733C.1.pep
AGVQEEASSVXAFQGLTNPGIFIRGGLXRGGRVSNYTLSFYXHYYIYLYRLLLSGPATDIWFLIFHTLLITYRLTNLKGVDNICSNYFYFSRVTGINLMDMIYLEGGGLFVIFFDLN

SEQ ID NO: 191413 - protein, 108 aa, Oryza sativa
  unsure (1)..(108): unsure at all Xaa locations
  Clone ID: PAT_MRT4530_87734C.1.pep
LVYMAPESCHGGDISTTXDIYSLGILILEIVTGEKNHQSSADLSGQRIIHSVRNKWSRMSKITSRYPLLDTHRLQQVHSCSKIELNCVGIDPKRXRPPHEKXVNMLSW

SEQ ID NO: 191414 - protein, 55 aa, Oryza sativa
  Clone ID: PAT_MRT4530_87735C.1.pep
IHIGQAGIQVGNASWQLYCPKHGIHAEAQIPTNKTGGQEAAAERSLNTQTVSKKH

SEQ ID NO: 191415 - protein, 60 aa, Oryza sativa
  Clone ID: PAT_MRT4530_87736C.1.pep
MLRACVLDFGKTWDKSLPYAEFSMERRTRNRVIRFCKVQWSNHAEEEATWEREDELKAAH

SEQ ID NO: 191416 - protein, 224 aa, Oryza sativa
  Clone ID: PAT_MRT4530_87737C.1.pep
MTPSRTGRGPAAAGAASPRLRRARLLRGTSPPLASSAAAASSAASSAAAARLLCRRSLPHPSPPLPLAASSPTAARRPLPAADCRRDIDLMATCRSRGVERGGAPHVLAVDDSSVDRAVISGILRSSQFRVTAVDSGKRALELLGSEPNVSMIITDYWMPEMTGYELLKKVKESSRLKEIPVVIMSSENVSTRINRCLEEGAEDFLLKPVQPSDVSRLCSRVLR

SEQ ID NO: 191417 - protein, 53 aa, Oryza sativa
  unsure (1)..(53): unsure at all Xaa locations
  Clone ID: PAT_MRT4530_87738C.1.pep
PRPRPSSAATSGSSSSRLPPPCNAMPSASIQLQNLLSLLVSXDQCKLYGSRTC

SEQ ID NO: 191418 - protein, 285 aa, Oryza sativa
  Clone ID: PAT_MRT4530_87739C.1.pep
MAAISRAIRACAAAGSRRSMASSAKEVAAAGARAAAAVARRGREREREEDGRRVQWVFLGCPGVGKGTYASRLSQMLRVPHIATGDLVRDALASPGPFSEQLAEIVNNGKLVSDEIIINLLSKRLEEGAEKGELGFILDGFPRTIRQAEILEGVTDIDLVINLKLREEALLAKCLGRRMCSQCGGNFNVASIDMEGENGGPRMYMPPLLPPPQCESKLITRPDDTEEVVKERLRVYHDLCEPVEDFYRARGKLLEFNLPGGIPESWPKLLQALNLDPGNERSAAA

SEQ ID NO: 191419 - protein, 87 aa, Oryza sativa
  Clone ID: PAT_MRT4530_8773C.1.pep
AQNCQICRTRMFRNPPQSPLCADPHMHALKVKSPPIPLLSGRTPPFFALFGPPAFQSLFICHGYLQDKQVQNCDHPICKPCWGQERL

SEQ ID NO: 191420 - protein, 71 aa, Oryza sativa
  Clone ID: PAT_MRT4530_87740C.1.pep
MLRACVLDFGKTWDKSLPYAEFSYVERPVKILDTMERRTRNRVIRFCKVQWSNHAEEEATWEREDELKAAH

SEQ ID NO: 191421 - protein, 501 aa, Oryza sativa
  Clone ID: PAT_MRT4530_87741C.1.pep
MSHYTMHAHINYTALPPTSPLQLPLPYLPPPPPPPQPPLLQLQPPPPPSSPVSFDTAFQSRISPSILLIILILAVIFFVSGLLHLLVRFILRPAPRDAGDADSGDANVTAFQGQLQQLFHLHDAGVDQSFIDTLPVFLYGAVVGAGRKDPFDCAVCLCEFADDDRLRLLPKCSHAFHVDCIDTWLLSHSTCPLCRRSLLADFSPYGGGCSPLLFVLESGSEGSISDRLDAASSAHLSLVMEQEEEAEPEQKHAEAAEKADEVVVSVKLGKFRSQATEVAAGGGCGGSSSANPEQDVRRCYSMGTYEYVMDERSLLRVAVKPPAKKRPTTQMPGHRVAMSECDCHSKRESFRGLDALPGGKLAQAQPPKPPAKVGKKESFSFSKIWMRGAPRIRKDGASSRRASSFRLSSVLQRAASDVGATAAPKPLRPDVVSPVTESEYNVSAWDKSEKSASGSVADWDLESAAATAAVPGAGAGNGLSSRADEAPSFARRTLLWIRGHL

SEQ ID NO: 191422 - protein, 135 aa, Oryza sativa
  Clone ID: PAT_MRT4530_87742C.1.pep
MDTPALLPLALALVAIPITILLDLQSDPPRQAVPRAPGVAGGNLFDITLVRCRCFMEWAGKYGPIMTVWLGTSPTIVVSTSELAREVFKNVRKLCNLELFAPRRMEALRPISEDEVNAMVESIYRAVTAPVNSVL

SEQ ID NO: 191423 - protein, 225 aa, Oryza sativa
  Clone ID: PAT_MRT4530_87743C.1.pep
MAYETSSDHQLAAAAEFLAALQVHLAGAEASSPTWGGRCAYDEDFMMYEFKVRRCPRSRAHEWTSCPYAHPGEAARRRDPSHVTYTGEPCPDFRVAARAACPRGSGCPFAHGTFETWLHPSRYRTRPCRSGMLCARPVCFFAHNDKELRIVGDDAAAATPSPRSPFTTSEDSPPPSPMDMKQIVLAMQQMDARKATRSVAPKTDMLQQELEEDAPELGWVSDLLM

SEQ ID NO: 191424 - protein, 115 aa, Oryza sativa
  unsure (1)..(115): unsure at all Xaa locations
  Clone ID: PAT_MRT4530_87744C.1.pep
HTREYHQPNPVQPLETILTSNRPSVFMPTPIXMILDLMESLSRXFQTYLVSYPNSTXGSSTTRHGWYDIVCGVAIAWRSGLVLVDIHIXNVALDQSESYRLTRISDHERERHHIR

SEQ ID NO: 191425 - protein, 55 aa, Oryza sativa
  Clone ID: PAT_MRT4530_87745C.1.pep
MEVAVREIATCWFENQRASRVISRTPMEVAVREIATCWFENQRDCYVLVREPASE

SEQ ID NO: 191426 - protein, 158 aa, Oryza sativa
  Clone ID: PAT_MRT4530_87746C.1.pep
MDTPALLPLALALVAIPITILLDLQSDPPRQAVPRAPGVAGGNLFDITLVRCRCFMEWAGKYGPIMTLADRPRNHSAERLSRGGTDLIWADYGPHYVKVRKLCNLELFAPRRMEALRPISEDEVNAMVESIYRAVTAPGRLYSTMNEFNVFCTQHHVS

SEQ ID NO: 191427 - protein, 381 aa, Oryza sativa
  Clone ID: PAT_MRT4530_87747C.1.pep
MGYNELIPGLPEEVARECLIRVGFDQLPAVRRISRQWKAEVESPAYNRLRKAEGLARPALALVQARRELAEAGPAADKQSSAGGVPGNSYRMVLLDPAEGRWTPLPEVGGASGSLPLFCQVAAVDGGVEGRKRLVVVGGWDPETWAPTDSVLVYDFLTGAWRRGAAMPGPRRSFFACAAVGGKVFVAGGHDEEKNALRSALAYDPDADAWAALPDMAEERDEPRGLCVDGKFLVVGGYPTPAQGRFVGSAEWFDPATSTWSAVQEGFVDDGACPRTCSAAPEAGDRMYMLRDGHLVARHGAISSAPAAWRPVAPVPEDARTAAAVSVIPDGRVVVIGSDCHGGDQTVYTLREEAGKPASWARAPAPPEFSGHVQAACLLEI

SEQ ID NO: 191428 - protein, 198 aa, Oryza sativa
  Clone ID: PAT_MRT4530_87748C.1.pep
MDSILLLPLVALLVVAISWLWDYTVVRLIWRPHCIAKEFREKQGIRGPAYKFLGGNNGEISRLKEEADGQVLDNLRDHNYLPRIAPHFLKWRAQYEVFNSGSRYGEAFLFWYGAKPRICIFDYELARQILSSKSGHFLKNDAPPTLVALMGKGLVLLEGTDWVRHRRVINPAFNMDKLKVTVTPPSISSHTNRFRTSP

SEQ ID NO: 191429 - protein, 64 aa, Oryza sativa
  Clone ID: PAT_MRT4530_87749C.1.pep
LVEVGVFSRPPPMEGVVFSSWAHACPSVPGSSPSPSSFFLALWGLLFAFFLVRWMHQFCICLCS

SEQ ID NO: 191430 - protein, 150 aa, Oryza sativa
  Clone ID: PAT_MRT4530_8774C.1.pep
MASTRHSDSCRVTESDSNSTPNTYYNSKSNYNQIGLVYSTPILTELAWSRWGERVRAATSSACLPPRLPELEDKVEARRKKEKREAKKRGLPLLDCFWWRDWQGGLTGVDALDTSGGAMHVMSSRGESGSGRPELRHASVRERDLLGCPA

SEQ ID NO: 191431 - protein, 67 aa, Oryza sativa
  unsure (1)..(67): unsure at all Xaa locations
  Clone ID: PAT_MRT4530_87750C.1.pep
MVNAIKGLFISCDVPMAQFIEXSMPASDKFILHMLDPTHMFVQPHVADMIRSKISEFRDQNSYEKPS

SEQ ID NO: 191432 - protein, 80 aa, Oryza sativa
  Clone ID: PAT_MRT4530_87751C.1.pep
LLTVTSLLIEVSARIEGVVDAVDTLATLAAFRSADDDDDDDDEKPTTEADAKLQTVSDHVTVEPEAAAAAARTTKNIEQV

SEQ ID NO: 191433 - protein, 74 aa, Oryza sativa
  Clone ID: PAT_MRT4530_87752C.1.pep
MADMGGQRRQSHGVEGRWTSSGGVGSVVLRRRDGAGAGAAGGVFDDEGATEDGDKVGRGTSQALGLMDLEQSVA

SEQ ID NO: 191434 - protein, 827 aa, Oryza sativa
  unsure (1)..(827): unsure at all Xaa locations
  Clone ID: PAT_MRT4530_87753C.1.pep
MDQRDIIMLTRDYCENINWVNKPTILLHDALPNLLEDPEYVDLRDRGRTIFMHDEEHTLNSKIQRAFCPPKVVVHNPCLEYIKYIILPWFGNLEVVQNEWNGSTKTFVSMEELSVDYERGYLNSADVKMALEKAINNILEPVRDYFSGNTKAQALIMACQLQNEITGDVLKIQMQNKEMRHHRQRLRDSGATSYLLPVALQDPTSQRAPRVPDTAHSEKSDRLRVHLWRMSESNVDGIEISASNDERRDRGDAEISEDEPRQTRIRSLKKKALHASTRLTHSLKKRGKRKVGCRVPKITIEDVRDAEEEQAVSSFREVLFARDMLPERHDDYHTMLRFLKARKFDVEKAAHMWADMLHWRKDFGTDTILEDSMDMNNCFPHNFFTTTCILIASNSSLLKDFEFHELEEVLQYYPHGYHGVDKEGRPVYIELLGKVEPSKLVQITTVERYIKYHVQEFERAFREKFPACSIAAKKHIDTTTTILDVHGVGWKNFSKIARDLVRCMQKIDGDYYPEVLGTKYQHRLLEAIDSSQLPEFLGGSCTCSSQGGCLRSNKGPWSDPLIMKLVHCMESSALKDIGQVSDIEEAITGSLPERISYTSNAESGSDVDDLGSPIGQEDFEYHSLAPVHEEARESGSTCSGSDDKVVETNTRYNPPGNGSGQYSARQNPSINRVSPEXGHVPNDGEGNADHGILKYISKKVLGVILEVLSFLRIFIRHRQQLENVPQHTTTVHSNQADLQIIKEDRVNPCLERLERLETMFNQLSRKPPEIPQDKDRAIQDSFDRIKCIEFDLEKTKKVLHATVIRQMQMAETLEAVKESDLRYVIRV

SEQ ID NO: 191435 - protein, 112 aa, Oryza sativa
  unsure (1)..(112): unsure at all Xaa locations
  Clone ID: PAT_MRT4530_87754C.1.pep
VHPPRPSAAPGSECRAWWRARAWRDPTPAPLLTIPQRRLLFAHPILAAAVAARRRNQTVSRWQDLGVNRPPHRGASFAATTDACSVVRCLGFSLVALRVRGRXKRMEDYNMQ

SEQ ID NO: 191436 - protein, 113 aa, Oryza sativa
  Clone ID: PAT_MRT4530_87755C.1.pep
MPTIPLGNSFCVDAYWVKGNAGIGIFFHMSNSHNALDLKATTTMADSPVQAELVALQLTIEVANFLNIASTTFLTDNITIVDIIKKRSFLRDPGYWSLRPLLSQMQRVIFRTT

SEQ ID NO: 191437 - protein, 153 aa, Oryza sativa
  unsure (1)..(153): unsure at all Xaa locations
  Clone ID: PAT_MRT4530_87756C.1.pep
IRHEEPPSVGHQRVSTXNSFAGVRLPAAXRNPTVSVAPRTGXAICNSISSSSSTPPYXLNAIRFSPIKXSIVSREMXRRXMTDMITYAXTDXLLLXAXSXGXSCAXELSKEPXVSVAVXQQSVXPAGGRXSXXLFSPMVVRKXGHLFLQXLXV

SEQ ID NO: 191438 - protein, 76 aa, Oryza sativa
  Clone ID: PAT_MRT4530_87757C.1.pep
MVQISLKADLTAAEAAAWLGHGTRPPHRPWHTVARAATGGTAGAGKDDGERRRRAVDGKTSRGWRPEQSRGANKRN

SEQ ID NO: 191439 - protein, 118 aa, Oryza sativa
  unsure (1)..(118): unsure at all Xaa locations
  Clone ID: PAT_MRT4530_87758C.1.pep
MVDVDSRMAGLAHPAAHAAGLRRLSTRAAAGPPSASLSPRHGLHSFDGVAAAVLSHLRKTGXVVLPALSDAEFAPLGAEMGFTFPPDLRAVLAMGLPSGAGFPDWRGRAGLRAAFDLP

SEQ ID NO: 191440 - protein, 60 aa, Oryza sativa
  Clone ID: PAT_MRT4530_87759C.1.pep
SYIWGHLVNWVHALFTFHLVAVMAHLCIYIWQHLKLPVSIFYYSPYFLFFIFVYFFNFLE

SEQ ID NO: 191441 - protein, 86 aa, Oryza sativa
  Clone ID: PAT_MRT4530_8775C.1.pep
GLAKKNLIPKRGEKNPPIRGIIIEVGLAVKPLPRGFIWPVPPHRELITGNLVVENTDMGFWSPHGCLATQAPGKFICQWRKRARAR

SEQ ID NO: 191442 - protein, 75 aa, Oryza sativa
  Clone ID: PAT_MRT4530_87760C.1.pep
REKFFLIKSKRALLDEPLLSLSPPSKFSKPPIEFTSRTLTPEIYLHTKRFFLVNYLNSQLYLWDYMEGWDDGLIM

SEQ ID NO: 191443 - protein, 49 aa, Oryza sativa
  Clone ID: PAT_MRT4530_87761C.1.pep
LFQWCAPILYLYLTFQRITYFRLLQWTTQEALHPFQVHLCSANTYIMQM

SEQ ID NO: 191444 - protein, 150 aa, Oryza sativa
  Clone ID: PAT_MRT4530_87762C.1.pep
MLDDRLSSSLEPKPRIRPFDHLVSQRRHSQPRNRNASPLLVATVDLTPTSLRPTTLREGLHLGTCDQSTRPPGESYYSYSVISSLSLPRRLHLLFCMHEPIDILLRHDHDQAKQCTPAAVRVAILHGASSIINYCCCCCQAAPQHPTPPR

SEQ ID NO: 191445 - protein, 179 aa, Oryza sativa
  Clone ID: PAT_MRT4530_87763C.1.pep
CSEKDTTNGCFHGDLCTYNKLNASLEDPKEAHARRGAPWTFDPSRFLKCLQTLREEGSVYAPSFDHGVGDPVENDIFVKPQHKIVIVEGNYLLLEEDAWRDIRALFDEKCDIIDRAMSQFIDIDIDVSMQRVLQRHVATGKEPDVAAWRISYNDRPNAELIMKSKKSADLVIRSVDLSR

SEQ ID NO: 191446 - protein, 141 aa, Oryza sativa
  unsure (1)..(141): unsure at all Xaa locations
  Clone ID: PAT_MRT4530_87764C.1.pep
GCGTPNCGPINTHHSSIVGAGGTLWGHTHMWPWVSSYLWHTHSRAGTXYIYPQFIAPTHKXTQPQSXTXSKPYGGXXRDNRSHTTTAQVAPHRDNPRNQXSLSTREGXHRHAAATXDHRTLLAKXTLNSKGNLSSSIGLRT

SEQ ID NO: 191447 - protein, 355 aa, Oryza sativa
  Clone ID: PAT_MRT4530_87765C.1.pep
DRHLQFSIDHLSLTIISPELCSGGEEENDDEVWLVVGGVGCGRHGWCDGGAGGGELARVEHPTKEDGSLAVLVVGDWGRKGQYNQTLVATQMGVIGEELAADFILSTGDNFYNDGLTGDNDTASFQESFTNIYTADSLQKPWYIVLGNHDYTGDALAQQSPAIRAVDSRWTSINKSFIVDSDIAEFFLVDTVPFVQKYWNESKFDWRQVAPRDTYLSTLLTDLGDAMSQSNATWKIVVGHHTISSGCEHGNTTDLVAMLLPVLKTYGADMYINGHDHCLQRITSIDSPLEFITSGGGSRAWAGKFKQTSDKLEFIYDGQGFLSMQLTMAEASFAFYDVTGAVLYSWQLAKSTSTN

SEQ ID NO: 191448 - protein, 878 aa, Oryza sativa
  unsure (1)..(878): unsure at all Xaa locations
  Clone ID: PAT_MRT4530_87766C.1.pep
MRRRCSGSHGRQLLLLYWLVIACSWVAAAQAQQAPRTDPVEVAALNAILGRWGTNPPKTWNITGGDPCTGTAVDDTNIDDSPVVNPGIKCDCSFNNRTVCHITKLNLQQNYLTGPVPSFIGKLTFMQYLGIGSNNFTGELPEELGNLTKLEQLYTDSAGLSGPFPSTFSKLKNLKLLRASDNDFTGKIPDYIGSLTNLEDLAFQGNSFEGPIPESLSNLSNLTSLRIGDIVNGSSSLAFISNLTSLNILILRNCKISDNLRTVNFSKLGRLTLLDFSYNQLTGSFPSWVTNNNLQFILPSGLNCLQQDTPCLLGSPEYYSFAVDCGSNKSMKGSDNTIYEVDAANLGVASYYVTRNTRWGVSNVGIFNDASSRNYVINSSQQFQNTLDSELFQTARMSPSSLRYYGLGLENGNYSVKLQFAEFAYPDSKTWESTGRRIFDIYVQGVLKEKNFDIRKAVGGKSFTAVNKIYNTIVSKNFLEIHLFWAGKGTCCIPTQGYYGPMISALSVTPNFTPTVRNGEPKKKSKAELYNLAGRPNVFSNAELKLATENFSSQNMVGEGGYGQVYKGKLPDGRVIAVKQLSQSSHQGKSEFVTEVATISAVQHRNLVKLHGCCIDSNTPLLVYEYLENGSLDRALFGSKSFNLDWPTRFEIVLGVARGLTYLHEESSVRIVHRDIKASNVLLDTDLTPKISDFGLAKLYDEKKTHISTKIAGTLGYLAPEYAMRGHLTEKADVFAFGVVALETVAGRPNTDNSREEDKIYLFEWAWTLYESGQALGIVDPKLKEFNEKEALRVICAALLCTQGSPHQRPSMSRVMAXLAGDIEVVEMVTKPSYITEWQYRDGNSTNSESTTSEFSRQKEIDPLTMSPTITGSSHDGR

SEQ ID NO: 191449 - protein, 36 aa, Oryza sativa
  Clone ID: PAT_MRT4530_87767C.1.pep
MEGRTCAAGSLTGFNYTYAHTTYSRAEERMAKHYYK

SEQ ID NO: 191450 - protein, 295 aa, Oryza sativa
  unsure (1)..(295): unsure at all Xaa locations
  Clone ID: PAT_MRT4530_87768C.1.pep
MASSSSSSSLCDNHLLQDDLIPWPSMPFAPAPNTFGLNHQWSQPPMLSSSTDQLSSYELESLQSVESQLAAAAPPTLSPHLQAHQLSTVLMMQELGFQWSSCAAPADQHSIASSTNNNSNVMMNEEELRPRPDQSLISNPRSCSATTLLPPPHLHLDGAVLPSINVSRLQKLAAGDEPLQICCKRQAAAAAVVGHSSIRDEHVPCPYAGPPAHLIQGPSNTLQLLRVTXRHLFAPKSTDEEEYECSSSRERWPPWEFNGAQIINSAAAIVKEAPARVTLLLNASFIQGKERETRG

SEQ ID NO: 191451 - protein, 149 aa, Oryza sativa
  unsure (1)..(149): unsure at all Xaa locations
  Clone ID: PAT_MRT4530_87769C.1.pep
XXKXGFLGGXGGXXFFXGLXLKKKKXWGGTFGXPXWGGNLXSKKGTQFQRGANFHPQIFFYSGYPTNLSSNNTVCTGGYGNPKGMEYLSVDEQNKTPLFAICFRDFFAGLKGLHSKLGSRPCSKFCLGPLFLFRGCLYPFNSNQIYMFV

SEQ ID NO: 191452 - protein, 308 aa, Oryza sativa
  Clone ID: PAT_MRT4530_8776C.1.pep
MSSQVDNRSQSAGKRARTDGGRREDDWVCPSCQNVNFAFRTTCNMRNCNQSRPTDYTKDMQKPMQTPPPHFPMSGGYMSPGTPPSMYLGGGAPPYGTSLYGGPALPRYGIAQFPGGGMYGMPMDRYSLGLPAGPGPMGARAGSYSEEGSQKKPAGAGRDNDWKCPNCNNINFAFRTVCNMRKCNTPRPENQGSKPDGARGPKPKMPEGSWKCEKCNNINYPFRTKCNRPSCEVGKTLKTNNPRESSADPENEVGTLIHVDVLLSGAAGDMAYNKLAKDVGNGNRPSCEAEKPFQTNNANESSADQDNQ

SEQ ID NO: 191453 - protein, 81 aa, Oryza sativa
  unsure (1)..(81): unsure at all Xaa locations
  Clone ID: PAT_MRT4530_87770C.1.pep
HPRLLLWRLPPPRRLVEVLPGDLSEEIVEEARPXFVSGLEFTTLGVKEELPRVIEAWVVLSVGRLPPCPPLDEGGVRWLRG

SEQ ID NO: 191454 - protein, 404 aa, Oryza sativa
  Clone ID: PAT_MRT4530_87771C.1.pep
MASAAAEVPSYFVCPISLQLMRDPVTLPTGISYDRAAIARWLAAPGARRTCPVTRQPLEHGLELTPNHTLRRLIQSWAASVSPGSAVDEEVAALRPVSSDEVASLLSDAAAAQVGALRRLRELAAECEDSRAMLESQGGVFDVLSRVVTSGSACSTAREEAVGVLASLRIPEQELIGVSTRHGNLAESLTAVLRSSNLQSRAHAVQLVRTLADAVVPAWVIGLNAELLAEVVGVVRDRVSARATKASLHALAALCPYGRHRVKIVGAGAVAALVELLLDEPERRVCELALAVLDRLCTCAEGRAELVAHAAGVAVVGKKVLRVSEAASERAVRVLRSVARHAATPAVLQEMAQCGVVGKLCLALRSEQCGVKTKEKAHEVLKLHSRVWRASPCLSPSFLALYPS

SEQ ID NO: 191455 - protein, 600 aa, Oryza sativa
  Clone ID: PAT_MRT4530_87772C.1.pep
MLQLPFSPGHPCLRAVNSAIGHVRKIRRRAGHFLSRSSKNKAAHSDLHSGSIQDVWATLSAEVASKLSKSVVSLALSDGNIPIYACSGTAISCQEGSGTIFLTSASLVRAFYDTEEIYDNLKIEVRHEGNEVYKGYLAKYDLDKNFAVVYTMESLDVHVVLSEHLKDRYAKKKLVAVSRNKYGGLITKSVMVGSHHNSNRSEVCHDISVMAEDWEGGPLFDFDGKFVGMNKFLAMDTTFILSWMSILIIFKHYLPTLQNRILKRLQNLKRVRDGEGPGELSDCHPEAPVHRGGLDKEHVEYLNSLGYPKPPVNVLDDGLILAYSFEENFGFVYGEVIKKFPCDIHQSVVALASFKGERRFFACTGFFIEWKGCTIILTSASLVAESGDRNKIDENLRIEVLLPNEQRRQGTLQHYSLHYNVALVSVNDMDFHARPANMKLDNECPPQVAALGRCFESGKIMAVCGDLVDWTGTLDCNFLIRSSCKTTKAGIGGPLIGLDGKVIGMNFYDKKIGTPYMPWDVILKILACFENESSAAEVGNGSDPSDAPGWKIPGDGSVKLNRWPVPLPYWRPHDDVEEQEPPEGCEYQCTYRNGERWCYR

SEQ ID NO: 191456 - protein, 74 aa, Oryza sativa
  Clone ID: PAT_MRT4530_87773C.1.pep
MDVVNIGRKTNKQTANQPKKANAMHSQIDTTSSIGNFIDIDKKKDNLNYRSYTIVAHTEYYRSIYANLRLAAIK

SEQ ID NO: 191457 - protein, 546 aa, Oryza sativa
  Clone ID: PAT_MRT4530_87774C.1.pep
MGDEGEPSRERDLGKKPMAMDEGASPWRGQAKEGNNLEAAPVRCCSCSPWVIGDEKKHLPLLFVCPPRPRATVLTAPRRLHPDSGKSSCVPYVIVDDALPSGRFLLRATDGWYGLNGAYYICCDCDARTRVATPPPPSGSLDHLNFPRRRSVEDSRHRGYCLVAQAQLHPTSTTTTQQHETVVDYPARDNKWDVKECPHHQRAMGGCHGGVLCCADLPYGFLTSCVPFADELRRLRYVELPQGCVMVGDDEKHHRWLFATVRVKIHGIPDAPVVSSWTLVDPEDSEWTLEHEVASSSHFSNGPHLWYHLDFMSAQLESLWDKIKQCVLKAVGWPLPVEHSWLNVLGPPIKQIGKPDEGIPAIRVIEVLSKTGGLTTTNGLILPITGRIPHWIEHEGWSMKEVAEFIYEHGPVIAVVWVVRHEFRACIGDVVYYGLPDRSLRDREDKDQYTLEIDPDNVISLQEGLQLLRLDKRFTEFVHAVELGGPLTWKVPDEELAEESVQEPEEESVQEPEVEMVLEHEEETVQEPEEEMAEPEEMVHETPLVA

SEQ ID NO: 191458 - protein, 40 aa, Oryza sativa
  Clone ID: PAT_MRT4530_87775C.1.pep
LASTLIIHSCRSNPLNLFCYLKVSAYGFPPLIIREMLNVG

SEQ ID NO: 191459 - protein, 105 aa, Oryza sativa
  Clone ID: PAT_MRT4530_87776C.1.pep
YGGGEGETTTVVRKLAIRSQLTRSASLNQSAQLLRHHRRRTTKIPTRASFLFCRRHRPAPVPTPSPPPTASSRDYPRRAAAERGRGASPPSSVLNGASGRSGSRT

SEQ ID NO: 191460 - protein, 90 aa, Oryza sativa
  Clone ID: PAT_MRT4530_87777C.1.pep
GGEPPRGGVGLSLGAPRPLETGGVGGDETKKLPPPGVGKPHDPAKGTGGGLLGPPGPLGPRGGKGAPQPGGVPQGPNPAIEKPGGPGVPP

SEQ ID NO: 191461 - protein, 546 aa, Oryza sativa
  Clone ID: PAT_MRT4530_87778C.1.pep
MGDEGEPSRERDLGKKPMAMDEGASPWRGQAKEGNNLEAAPVRCCSCSPWVIGDEKKHLPLLFVCPPRPRATVLTAPRRLHPDSGKSSCVPYVIVDDALPSGRFLLRATDGWYGLNGAYYICCDCDARTRVATPPPPSGSLDHLNFPRRRSVEDSRHRGYCLVAQAQLHPTSTTTTQQHETVVDYPARDNKWDVKECPHHQRAMGGCHGGVLCCADLPYGFLTSCVPFADELRRLRYVELPQGCVMVGDDEKHHRWLFATVRVKIHGIPDAPVFYVLTALMVPSGLYVGAIGEVAERPTAPTLWHKILHWLARPFLNWPSLWDKIKQCVLKAVGWPLPVEHSWLNVLGPPIKQIGNTCSVSAVALCIEAKFHKYGFRCTIERPPHKLLQDCLDSSFLEPDEGIPAIRVIEVLSKTGGLTTTNGLILPITGRIPHWIEHEGWSMKEVAEFIYEHGPVIAVVWVVRHEFRACIGDVVYYGLPDRSLRDREDKDQCMHVVVCFGYRFTQSFDLHLSIMDSSTDDGPTRWLHYTSVDGLYSPEIAKPLLG

SEQ ID NO: 191462 - protein, 149 aa, Oryza sativa
  Clone ID: PAT_MRT4530_87779C.1.pep
FFFFFFYLSKLYHITSIFSTLEMLLGCYTIQPSVFSQSTPAVMSSPPRVELLRMRLPVTGCGVQQHLHPHLEDHRQQHPAARPTTSARSFSFSSSSSASRAPAKTPWSSHSDRHCRRCHVASPPASSSPGSWRRRSGRRRAVVTAWVTM

SEQ ID NO: 191463 - protein, 292 aa, Oryza sativa
  Clone ID: PAT_MRT4530_8777C.1.pep
MSSQVDNRSQSAGKRARTDGGRREDDWVCPSCQNVNFAFRTTCNMRNCNQSRPTDYTKDMQKPMQTPPPHFPMSGGYMSPGTPPSMYLGGGAPPYGTSLYGGPALPRYGIAQFPGGSGYPYGYGGRLPMGSPYGPPMHMAGPPYSAGSMMGPGGMYGMPMDRYSLGLPAGPGPMGARAGSYSEEGSQKKPAGAGRDNDWKCPNCNNINFAFRTVCNMRKCNTPRPENQGSKPDGARGPKPKMPEGSWKCEKCNNINYPFRTKCNRPSCEAEKPFQTNNANESSADQDNQVHN

SEQ ID NO: 191464 - protein, 565 aa, Oryza sativa
  Clone ID: PAT_MRT4530_87780C.1.pep
MDAKNQQSGDGQQRPAQQAAGMDPAKAAAQAATRRKKMTKQLTGKRDDTALHGAARAGQLVAVQQTLSGAPPDELRALLSKQNQAGETPLFVAAEYGYVALVAEMIKYHDVATACIKARSGYDALHIAAKQGDVEVVNELLKALPELSMTVDASNTTALNTAATQGHMEVVRLLLEADASLAVIARSNGKTALHSAARNGHVEVVRALMEAEPSIAARVDKKGQTALHMAAKGTRLDIVDALLAGEPTLLNLADSKGNTALHIAARKARTPIVKRLLELPDTDLKAINRSRETAFDTAEKMGNTESVAVLAEHGVPSARAMSPTGGGGGNPGRELKQQVSDIKHEVHSQLEQTRQTRVRMQGIAKQINKLHDEGLNNAINSTTVVAVLIATVAFAAIFTVPGEYVDDAGSLTPGQALGEANISHQTAFLIFFVFDSVALFISLAVVVVQTSVVVIERKAKKQMMAVINKLMWVACVLVSVAFLALSFVVVGKAERWLAVGVTIMGATILVTTIGTMLYWVIAHRIEAKRMRSIKRSSLSRSRSFSASGMSEAEWVEEEFKRMYAI

SEQ ID NO: 191465 - protein, 659 aa, Oryza sativa
  Clone ID: PAT_MRT4530_87781C.1.pep
MAGGGVMHLLNEWAIEILLLVSFSLQLALLLFAGFRRVGASAGLGSWWNRHVNAGSIVISDELDAIRTTRGQRALRRHGLHGDLAASLGEEFHQGILTWHVATDIYLAVSGGGDRSSAAIANAGDRAAAARRLAEAVRALSNYMMFLVAIRPDMLPGLVLRRLYQVTCEDMARIWRERKDTHESSSSSSSGRFIDVLSMVTKLFQLHVDDPTSASRTPERKKLAAMLRDNAYNGDQNVRSHGVFAGALLADELLLKEKERRMSSDGGGGGLLLPVIFEVWVEMLLYAGNRCSRESHAKQLNSGGELITLVWLLAEHAGLYRINKTKQHFKCAEYATVMMICNQRGDILRVWWWHYHRVLELERQKSQLENQNWQLEQQNSRLSSEKRDLESRVRRLGYENTNLLDEKMRVAHESSRKVSALEYRVRELEHQNTKLSSELVKQRENTRKAGQLFMNAADTYQQVAEKQIRTKKEELANTRKAGLLLINAADTYQEVARKQIKTMVEDLEDARMAVLVVMNAADTYQLEAEKKIKDKMEELRVLGVQKAEMDARAASLESGLKTALAKIQELEADCDKVMIENNKLWLEVERLMMELRVMAHKKEVAANAFGAEKAETMKELENHLMNVEEIPTSMDLMKDENDKIQLEILTAGRNIACLN

SEQ ID NO: 191466 - protein, 119 aa, Oryza sativa
  Clone ID: PAT_MRT4530_87782C.1.pep
MAQPAALALLLPVLLLVGVDDIEPLPELLVNCTSRLCPAGIAVFLMGYAYAYARSRGNTAPLKKTTNSTTVLLKMMPLLLLLLLVAPGLGTAARPQSTNCLLERIIVSKGPISMHYWTF

SEQ ID NO: 191467 - protein, 130 aa, Oryza sativa
  unsure (1)..(130): unsure at all Xaa locations
  Clone ID: PAT_MRT4530_87783C.1.pep
PGPXXXWGVKGVXXLXGFXGXXFXXQRGXFGGKKGGXASKXXXFXGGKXKEIFXPXGAXXLRGXXMFFXFYCXXLGLKKPVPFCLNXRXQIRGRDSNFSFAGKEAGEENPNWMSPHNLLTVVFDVLYLKF

SEQ ID NO: 191468 - protein, 708 aa, Oryza sativa
  Clone ID: PAT_MRT4530_87784C.1.pep
MLPVAIALEPTSIEDEGAGVKRPIILISDPKGVAAGVDNRRPPASPSAITVVVSVAIILVALAASVIATQTTWSESNVPVMSGEAIEPGSVDIDLTVSKGATDGVSYERTTAVSDVIKIVTGAIEQAHTWVWTNIMLETWQRTDTYHFQPAQNWMNDPNGPIYSKGWYEHLPDTAVWGERISWGHAVSKELLHWHHLPIAMVPDNFEYDLNGVWSGSATDNLPDGKLGMYLYTGETVEQNTAQEQQLADPVNITDPLLHQWAKTDVNPVIAPPPEGIGARDFRDPTTAFKEVVDMNEVDNKRLIAIYGSKEKEKVGLSVVDYQTDQWSHFAEARPVPVIMHKVDVTGMWECVDFYPVTSETDVADVATDEGSDSTEYSVPQIGVKEHVLKSRLDDDKDDYKALATYDPVKKKFTADNADLNVGIGLRLDYGKCYAARTFYNQNKQRRILWGCIGETELEAVDLMKGWASLQAIPRTMVFDEKTGTNVLQRPEEEVESWSSGDPITQRRIFEPGSVVPSHVTGALQLDITASLDVDETLLEITSESHDAGCDWSNRGGAGTMGSLGPFGLLVVAEEKLSELMPVYLYVAKGGEGRAKAHLCICQTRSSMASGVDKEVYGSAMPVLDGENYSARILVDHSIVESFAQAGRTCVRSRDKPSKDTYGAARWFFFNNATEASVRASLKACQMKSFIRPYPVIPDQTGFRSNWR

SEQ ID NO: 191469 - protein, 539 aa, Oryza sativa
  Clone ID: PAT_MRT4530_87785C.1.pep
MPPMRAPALVAMLVVVLVALVRRRRHRSKGAGGRLESLPPGPVGLPVIGNMHQMLVNKPVFRWVHRLLADAGGEIVCVRLGPVHVVAVTSPEMAREVLRKNDAVFADRPTTFAAESFSVGYRSASISPHGDQWRKMRRVLTAEILSPATEHRLRGARGEEADHLVRYVLVRCGRDGAAVDVRHVARHFCGNVIRRLTLGRRHFREPRADDEDAAAPGRDEAEHVDALFATLNYLDAFCVSDYFPALVGLDLDGQEKVIKKVMRTLNRLHDPVVEERVEEWRLLRKAGERRDVADFLDVLASLDDAAGRPLLTVEEIKAQTIDIMIATVDNPSNAVEWALAEMMNKPEVMRKAMDELDTVVGRDRLVQESDVRDLNYLKACIREAFRLHPYHPFNPPRVAMADTTIAGYTIPKGSQVILSRVGLGRNPRVWDDPLEFRPERHLSPYPAGGRGDAGVVALTEAELRFVSFSTGRRGCPGVSLGTLITVTLFARLLQGFEWSKPAGVERVELREEAASLVLAQPLVLQATPRLAAHLYGAGK

SEQ ID NO: 191470 - protein, 120 aa, Oryza sativa
  Clone ID: PAT_MRT4530_87786C.1.pep
MALRSVLAGRLMVAANRAFRGRPVSTTTKERLELKMSSYPWTQNAMDNRLREGCAMAVDNHNRRIMRLANPYSGPADGDILYNWAWSNNISFLIILCSCFGLCHAVLHLPHHASNNVSTA

SEQ ID NO: 191471 - protein, 67 aa, Oryza sativa
  unsure (1)..(67): unsure at all Xaa locations
  Clone ID: PAT_MRT4530_87787C.1.pep
DIPAASSRRGGEDEVXDLELKVPPGGXERLDLMSGKTFLTPRLQGVHVGHQDLNLPPPPSSAAAAPL

SEQ ID NO: 191472 - protein, 159 aa, Oryza sativa
  Clone ID: PAT_MRT4530_87788C.1.pep
KHLSTAEIVEQAVFARRLFSDEFGSITNVVFMGMGEPLHNIDNVLKASAIMVDEQGLQFSPRKVTVSTSGLVPQIKRFLQESNCALAVSLNATTDEVRNWIMPINRKYNLSLLLGTLREEIRLKKKYKVFFEYVMLAGVNDSVDDAKRLVDLVRGIPCK

SEQ ID NO: 191473 - protein, 90 aa, Oryza sativa
  Clone ID: PAT_MRT4530_87789C.1.pep
SSYPHACLLLLHVAVPVSPSVRSRRVDGETGGDRLSIPPAAILVLSIGGHRVGLRLVALIMPDLKPDAHAFFFLVSSSSSLAGPSYVGIV

SEQ ID NO: 191474 - protein, 126 aa, Oryza sativa
  unsure (1)..(126): unsure at all Xaa locations
  Clone ID: PAT_MRT4530_8778C.1.pep
LRHYTFSSAAGYGLSCAVVTARLLTAMAKVSWLHSAINTAPWLCHNCGFXGVRNTAPQLLNGLLVAFSEXGPLRXVVMDVKWEAEPRRELLKDCLKVEAKDSEGLLVVAKDLLSGSARTSSRHNEL

SEQ ID NO: 191475 - protein, 473 aa, Oryza sativa
  Clone ID: PAT_MRT4530_87790C.1.pep
MAALPLLRWGASSLRGGHSSAPPSSRLFSALRRPPAAARCEPGSRVMLKGMDYPELENWVRSQGFRPGQAMMLWKCLYGNNVWAHCYDELAVYRLIPLLVTLRAHIYYKSTMVSILKEMNAKLSTAKEIKSTHRISEVLMCQQSCLYMKTAKLEVGLNKDFRKMLTDHADLKALTVKDILNASDGTRKILFSLEDGSVIETVVIPCTSGRTTVCVSSQVGCAMNCQFCFTGRMGLRKHLSTAEIVEQAVFARRLFSDEFGSITNVVFMILLQPFINIKLLQGMGEPLHNIDNVLKASAIMVDEQGLQFSPRKVTVSTSGLVPQIKRFLQESNCALAVRNWIMPINRKYNLSLLLGTLREEIRLKKKYKVFFEYVMLAGVNDSVDDAKRLVDLVRGIPCKINLISFNPHSGSQFKPTPDEKIIEFRNILIQDGLVVFVRLSRGDDQMAACGQLGEPGDYQLPLLRVPEKFQVAL

SEQ ID NO: 191476 - protein, 78 aa, Oryza sativa
  Clone ID: PAT_MRT4530_87791C.1.pep
FHRCNRAQHKGGHTKRHRGRHRRAPSPLPTTQGEGVQRKRKKVDSTDHRPKHPQAGDYGQMAMQRLLVLETDQPASRR

SEQ ID NO: 191477 - protein, 1321 aa, Oryza sativa
  Clone ID: PAT_MRT4530_87792C.1.pep
MAGGLAQLWKEWQIQILIILSFTLQVILHLLSWIRRHKGYKVLRIILWLSYLSADSTDIYTLGQLSMTTSSSSRVGCSVMYLYRYIAGSRTLVEAIILMFAVGVVKYGKRVWAFMCANMDSIRSSLDFLDDSSAHNPYLEQARKERMNRDLKQALLGAHYSVRFLQEPIRRCSFDVRAPKKCCRIVKAGRSRLWLDSIGQYNLLDFCTRDMTDLRGRIAMKVGLENWFNKLHYSNTTSISSDIKEFVLKEIQKRGRGDIRNARRMCILYENKMDEELSWSTVDIDFEKSILVWHVATDVYLCCFKEEVEHTEKPVVKVIKEISNYMLYLLLQHPDMLPGPIRIGLYPKVCASLVELWQEHSTSSSEGGDNNRSKSKKLASLLFQKFGSESTDNEHGQVYLDGTAVAGYLLRNECNVPNMLGLIAGVWFEMLCYAAHHCSEESHARQLSTGGEFLTAVWLLVEHIKFPKSEDDGGPSHVSTEISQQQLDNVNRGQVTAFLFIFLYRSEQEIVSTDPLPSNLPSNATMASSFKSLIVNPIREKYNGTEQIQMASGAGDSMPRESICGDGPGVGLVFFDLCFIGLRRSNRRYMAAQEPPASGGQTGSVKSGQTGGGDSKRQLIRRSDRSSNLGQTDDIQAVQNNIKELHRDLFKKEYIKFEMKPGEALDDYLSRFNKILSDLRSVDSSYDANYPQSEISRHFLNGLDMSIWEMKVTSIQESVNMTTLTLDSLYTKLKTHEMNILSRKGDSKSSALVSSSSSLDVGVFSSKSSVLALFNAISDDQLEQFEEEDLLGRGKKEDDGRVKDDDVNKKKNMKQKEKKKHCMQWLIQELIKVFDGSEDEDEGKGKQVVDLAFIARNAISHVDESDDDNEEKLSYDQLEYTAYKFGKKLQTCSIALDEKDHTIEILNAEISRLKSLIPKDDECKSCEVLFSEINALRDVNSINCKKLEFEIEKSKKLESSFALGFALHARVVDELILTKNVLKKYNVAFCASSLVNASCANKAKQNNDVLISQDCSKCVLNEMKLKDALGHVKHMEEIVKQDEVFSCSTCRKQKGLLDACKNCAILTQEVSYLKSSLQRFSDGKKNLNMILDQSKLFHMLVFENFGDIVENKNMKKNEYRILGNSLDDKDVFDVTRCLGHSICGDGPGSRLGGKAKSVVRSNKVVIYFESSSICVSSGYGSLTGDILAVRLAPGLQQSDDMPSTLVIFTNKSCEESQCEQVIEVNLNQWRGSGLYLGRSRGLARSKRHVTGKKLRYRMIKDVGPRDWIQGDTQWMDIISGDLHNGFHKFTEEKKKGLAQGLCMAACGLAGLGRQGAQLELA

SEQ ID NO: 191478 - protein, 1078 aa, Oryza sativa
  unsure (1)..(1078): unsure at all Xaa locations
  Clone ID: PAT_MRT4530_87793C.1.pep
MQHEIICGCICKRNNDERIMKVIGEVNKFENETVQGDKACRFSKCYGRMWERIRDKSKVESKSIISNYTGVYRCINARSCAWSLGRDDKHRFTISSVCGTPIGLAFSARSTGQCTIGNQRRHGACTMLDLPHVINSIASDHSDVAQFVAGDMMDFNLKADAVLLKSVLHDWSDEDCIKILKCCKEAIIPSKDAGGKIIIIDVVVGSSSEAICQGTQHLVDLNISVLTPGKERDEEEWFKMFTKYKISPVLGFRSIIKITVEVVLEIIDFQVCRDRSDRAVVAGDSMPRESICGDGPGVGLVREVIKLSSTLRVLRCVFHRVRRSDRRLNDGPTGDKRWSDRRYTGGQTGGGDSKRQLILEVKPEIESRSDRRQPGGQTGASTSVRPRSIDFEARNILLSGISRSDYDRVAHLQTAHEIWIALRNFHQGTNNIKELRRDLFKKEYIKFEMKLGEALDDYLSRFNKILSDLRSVDSSYDANYPQSEISRHFLNGFDMSIWEMKVTSIQESVNMSTLTLDSLYTKLKTHEMNILSRKGDSKYSALVSSTTSLDVDASSSKSSVLALFNAMFDDQLEQFEEDLVLLSNKFSRAMNNVRNRKRGGPNRCFKCGALDHLRSHCPKLGRGKKEDDVRVKEDDLNKKKNMKEKEKKKHCMQWLIQELIKVFDEPEDEDESKGKQVVDLAFIARNASSGVDESDDDNEEKLSYDQLEYAAYKFAKKLQTCSIVLDEKDHTIEILNAEIARLKSLIPNANNCQSCEVLFSEINALRDVNSISCKKLEFEIEKSKRLESSFALGFALHARVVDELILTKNVLEKYKVAFCASSLVNVSCANKAKQNNGALISQYCSKCGLNELKLKDALERVNHMEEIVKQDEVLILMIIILDILLLFWVLLGEXNSRSTVRPTLSSRSDRPAVKPQVNGRSDQLPGQVISQSQRRSDQPRGKLSHNSNQTFVKRQENKKYEKNEYRILGNSLDDNDVFDREVIKLSSTLRVLRFVFHRVLRSNRRPNGGPTGDKRRSDWRHTGGQTGGGDSKWQLISEVGPEIESRSDRRQLGGYTGASTSVLILGNVWQIAILLILR

SEQ ID NO: 191479 - protein, 652 aa, Oryza sativa
  Clone ID: PAT_MRT4530_87794C.1.pep
MVRTGTMLREEQRSTVVGIPCEKVTRVRILGGQLRSTVEIGTKLGEELRSRRSRIPGDEVGYEMAHGGWIPCGSDLRNGLYEVCVSVDSSYDANYPQFEISRHFLNDLDMSIWEMKVTSIQEFVNMSTLTLDSLYTKLKTHEMNILARKVDSKSSALVSSSTSLDVGASSSKSSVLALFNAMSDDQLEQFEEEDLVLLSNKFSRAMKNVRNRKRGEPNCCFECGALDHLRSHCPKLRRGKKEDDGRVKEDDVNKKKNTKEKKKHCMQWLIQEIIKAFDESEDEDESKGKQVVDLAFIARNASSDVDESDDDNEEKLSYDQLEYTAYKFGKKLQTCSIVLDEKDHTIEILNAEIARLKSLIPNDDNCQSCEVLFSEINALRDVNSVNCKKLEFEIKKSKKLESSFALGFALHARVVDELILTKNVLKKYKVAFCASSLVNASCANKAKQNNGVLISQDCSKCILNEMKLKDALGRVKHMEEIIKQDEVFICSTCRKQKGLLDVCKDCAILTQEVSYLKSSLQRFSDSKKNLNMILDQSKVSTHNRGLGFDSYAYHARHPPTVGEKKETEISFGKRRWQKSGFCSRSPVRPLGQQRSDRPQGNFAYNSNHAFVKRQVFDDKDVFDVSKNNRCRILRNSLDDKDVPGIIERKKLI

SEQ ID NO: 191480 - protein, 438 aa, Oryza sativa
  unsure (1)..(438): unsure at all Xaa locations
  Clone ID: PAT_MRT4530_87795C.1.pep
MEARHRVMSLLLVLVIGCCAWGCRPGAAQVPVPARTDGFVYGGKAPALGETVVVEAYFDPVCPDSRDAWPELKKAVEHYASRVTVVVHLFPLPYHSNAFISCRSIHAVNKINPSFVYPLLERFFKYQEGYYNQPTYGKTRATVDAEVAKNLVAPVIGEANLAAYKAGFNDSKSDQATRISFKVTRCLGRVFAVMDRESAWWNRKRGEPNRCFECGALDHLRSHCPKLGRGKKEDDGRVKDDELNKKKNMKEKEKKKHCMQWLIQELIKVFDEPEYEDEGKGKQVVDLAFIARNASSDVDESDDDNEEKLSYDQLEYAAYIFARKLQTCSIELDEKDHTTEILNAEIARLNSLIPNDDNCQSCEVLFSEINALRDVNSLNCKKLEFEIEKSKKLESSFALGFALHACVVDELILTKNILXKKYKVAFCASSLVNASCAN

SEQ ID NO: 191481 - protein, 485 aa, Oryza sativa
  Clone ID: PAT_MRT4530_87796C.1.pep
MKPGEALDDYLSRFNKILSDLRSVDSSYDANYPQSKISRHFLNGLDMSIWEMKVTSIQESVNMSTLTLDSLYTKLKTHEMNILSRKGDSKSSASVLSSTSLDVGASSSKSSVLALFNAMSDDQLEQFKEEDLVLLSNKFSRAMKNVRNRKRGEPNRCFECGAIDHLRSYCPKLGRGKKEDDDKVKEDDINKKKNTKEKKKHCMQWLIQEIIAAFDESEGEDESKGKQIVDLAFIARNASCDVDESEDDNEEKLSYNQLEYAAYRFAKKVQTCSIVLDEKDNTIEILNAEIDRLKSSIRDDDNCQSCEVLFSEINALRDVNSVNCKKLEFEIEKSKRLAHKHKKESEIAFAKRRWQKSGFNSRTTVRPTLISRSDRLAVRPQLNRRLDRLPGPVRAQAQRRSDRPRGDFARNSNRTFVKQKEIIVEVVLEIINFQEMNRVCCFVGTGDSMPRESICDGPGVGLVVRRCPWWSDIMRDTKARVDAHG

SEQ ID NO: 191482 - protein, 111 aa, Oryza sativa
  Clone ID: PAT_MRT4530_87797C.1.pep
FNCRRTQFHRCIAPNPRTGQNRPTWKLSNACRSLIGEHVPCMVGGNIEPTTLYINNMTTVMNKTRTTLYYLPPSLSSSTQAPYTLQPWSSVCPGTCSATSYSSAYALPALA

SEQ ID NO: 191483 - protein, 64 aa, Oryza sativa
  Clone ID: PAT_MRT4530_87798C.1.pep
MVFATLFALAVVMALVPAMPVLQPDEATSATSTAAATWKASTRGPPVYMVKLAPTTGKRSTDEI

SEQ ID NO: 191484 - protein, 479 aa, Oryza sativa
  Clone ID: PAT_MRT4530_87799C.1.pep
MAAAAAAAPPFAAGDSPPPTALLLPRTTTTTAGAAPAPRRSSASSRLHLLLTAALAVATSYLLLILPRTPLSAAPAPAAAARAQVKLEKPVVILISSDGFRFGYQHKAATPHIHRLIGNGTSAATGLVPIFPTLTFPNHYSIATGLYPSSHGIINNYFPDPISGDYFTMSSHEPKWWLGEPLWVTAADQGIQAATYFWPGSEVKKGSWDCPDKYCRHYNGSVPFEERVDAILGYFDLPSDEMPQFLTLYFEDPDHQGHQVGPDDPAITEAVVRIDEMIGRLIAGLEERGVFEDVNVILVGDHGMVGTCDKKLVFLDELAPWIKLEEDWVLSMTPLLAIRPPDDMSLPDVVAKMNEGLGSGKVENGEYLRMYLKEDLPSRLHYADSYRIPPIIGLPEEGYKVEMKRSDKNECGGAHGYDNAFFSMRTIFIAHGPRFEGGRVVPSFENVEIYNVIASILNLEPAPNNGSSSFPDTILLPSE

SEQ ID NO: 191485 - protein, 44 aa, Oryza sativa
  Clone ID: PAT_MRT4530_8779C.1.pep
PRVRETTGGGSNVVMPGYTKGDGLGAEIVGTFILLYTDFYCTDY

SEQ ID NO: 191486 - protein, 120 aa, Oryza sativa
  Clone ID: PAT_MRT4530_877C.1.pep
MATSPAPLLLLSSISLRSPFLMRARRLEATAAATRSSRLVPPPATASTGDDGRPSRRIHRRGGLGPSDLAASDLHGDGLTATAGCRIWGIVLGDWGIEESMKRIGLNKMAQFEPVKVFSV

SEQ ID NO: 191487 - protein, 400 aa, Oryza sativa
  unsure (1)..(400): unsure at all Xaa locations
  Clone ID: PAT_MRT4530_87800C.1.pep
MEVLCAYGMRSRIWKESKFAINTAAEKTVFEQNCKARNILLSGISCSDYDRVAHLQTAHEIWIALSNFHQGTNNIKKLRRDLFKKEYIKFEMKPGEALDDYLSRFNKILNDLRSVDSSYDANYPQSEISRHFLNGLDMSIWEMKVTSIQESVNMSTLSLDSLYTKLKTHEMNILACKVDSKSNALVSSLSSLDVGASSSTSSVLALFNAMSDDQLEQFEEEDLVLLSNKFSRAMKNVRNRKRGEPNRCFECGVLDHLRSHCPKLGRGKKEDDGRIKDDDMNKKKNMKEKEKKKHCMQWLIQELIKVFDESEDEDESKVLFSEINALRDVNSVNCKKLEFEIEKSKKLESSFALGFALHARVVDELILTTNVLXKYKVAFCASSLVNASCANKAKQNNGAL

SEQ ID NO: 191488 - protein, 549 aa, Oryza sativa
  Clone ID: PAT_MRT4530_87801C.1.pep
MVRTGTMLREEQRSTVVGIPCEKVTRVRILGGQLRSTVEIGTKLGEELRSRRSRIPGDEVGYEMAHGGWIPCGSDLRNGLYEISRHFLNDLDMSIWEMKVTSIQEFVNMSTLTLDSLYTKLKTHEMNILARKVDSKSSALVSSSTSLDVGASSSKSSVLALFNAMSDDQLEQFEEEDLVLLSNKFSRAMKNVRNRKRGEPNCCFECGALDHLRSHCPKLRRGKKEDDGRVKEDDVNKKKNTKEKKKHCMQWLIQEIIKAFDESEDEDESKGKQVVDLAFIARNASSDVDESDDDNEEKLSYDQLEYTAYKFGKKLQTCSIVLDEKDHTIEILNAEIARLKSLIPNDDNCQSCEVLFSEINALRDVNSVNCKKLEFEIKKSKKLESSFALGFALHARVVDELILTKNVLKKYKVAFCASSLVNASCANKAKQNNGVLISQDCSKCILNEMKLKDALGRVKHMEEIIKQDEVFICSTCRKQKGLLDVCKDCAILTQEVSYLKSSLQRFSDSKKNLNMILDQSKVSTHNRGLGFDSYAYHARHPPTVGEVKF

SEQ ID NO: 191489 - protein, 585 aa, Oryza sativa
  unsure (1)..(585): unsure at all Xaa locations
  Clone ID: PAT_MRT4530_87802C.1.pep
FFPTILKYYILHIDYPLKQMKPREALDDYLSRFNKILSDLRSVDSSYDANYPQSEISRHFLNGLDMSIWEMKVTSIQESVNMSTLTLDSLYTKLKTHEMNILTRKVDSKSSALVFSSTSLDVGASSSKSSVLALFNAMSDDQLKQFEEEDLVLLSNKFSRAMKNVRNRKRGEPNRCFECGALDHLRSHCPKLGRGKKEDDGRVKDDDVNKKKNMKEKEKKKHCIQWLIQEIIKAFDESEDEDESKGKQVDLAFIARNASSDVDESNDDNEEKLSYDQLEYAAYKFAKKLQTCSIVLDEKDHTIEILNAEIARLKSLIPNDDNCQSCEVLFSEINALRDVNSVNSKKLEFEIEKSKKLESSFALGFALHARVVDELILTKNVLKKYKDAFCASSLVNASCANKAKQNNGVLISQDCSKCVLNELKLKDALERVKHMEEIIKQDEVLSLMLIMLDILLLFWVLLGGKKEREIAFAKRCWRKSGFNSRTTVRPTLNRLPGPVRPQVQRRSDWPRGNFARNSNQTFVKQKNKKYEXNEYRILGNSLNDKDVFDVGKNYGCRILGNSLDDKDVPGIIERKKYEQKGSNKR

SEQ ID NO: 191490 - protein, 131 aa, Oryza sativa
  Clone ID: PAT_MRT4530_87803C.1.pep
MAGGRGRGYGQRVRVVQVGSWRCMRPMVELASELELVKESGGQRGVSALHFRVEVAGKVAGEAVGQRSAFGARRWSVVLPLGEAVVGLVTNVVCLFGKPLDTVNNCVGDALVNIKGSLTTGSGLAQFQDKV

SEQ ID NO: 191491 - protein, 543 aa, Oryza sativa
  unsure (1)..(543): unsure at all Xaa locations
  Clone ID: PAT_MRT4530_87804C.1.pep
MVRTGTMFREEQRSSAVGIPCEKVTRVQILGGQLRPTVGIGTKLMEELRFRQSRIPGDEVGEIFATGFTSCSGGREARKVSHAYVIPEAINTAAEKTAFEQNCKARNILLSGISRSDYDRVAHLQTAHEIWIFLSNFHQGTNNIKELRRDLFKTEYIKFEMKPGEALDDYISRFNKILSDLRSVDSSYDANYPQSKIFRHFLNGLDMSIWEMKVTSIQESVNMSTLTLDSLYTKLKTHEMNIRSRKGDSKSSVLVSSSTFLDVGASSSKSSVLALFNAISDDQLEQFEDDLVLLSNRFSRAMKNVRNRKRGEPNRCFECGALNHLRSHCPKLGRGKNEDDGRVKEDDVNKKKNMKEKEKKKHCMQWLVQELIKVLDGSEDEDEGKGKQVVDLDFIARNASSAVDESDDDNEEKLSYDQLELAAYKFAKKLQTCSIVLDEKDHTIEILNAEIDRLKSSIPDDDNCQSCEVLFSEINALRDVNSVNCKKLEFEIEKSKKLESSFALGFALHARVVDELILTKNVLXKKYKVVFYASSLVNASCAN

SEQ ID NO: 191492 - protein, 62 aa, Oryza sativa
  Clone ID: PAT_MRT4530_87805C.1.pep
FGMRVVTHYLEDFDFHDHHPAALIDQFSFWDLRYRSSSAPNRILASHSRIADRCLPKMDHLE

SEQ ID NO: 191493 - protein, 553 aa, Oryza sativa
  unsure (1)..(553): unsure at all Xaa locations
  Clone ID: PAT_MRT4530_87806C.1.pep
MPPKLRRRSTGAALSHAASGEEAPKSSETSPAPAAAAAGSGRWTRSRSARSHLGLDSDSTDHPRVVSGSSDQPPKKRKKTTTAVAAAAGSTRLASRPVPGRYPDYPSLRPGQHALSKKHMSAVQEWMEECSRISKLEKQARPEDIPTLRDNPRDPLTPDAVVSSQDKAMVLRVARSVVSVSSSKPDGELISQCTGIVIGWDGANKCAKILTSCSTLSVRMPNRTITEGRLLFFNVHYGIALLEVKGDFQLQVPSFGLGINYGQDVFALARDENMSLMVRHGTISWLDYPGLLTNPYMFLSCDIPEGGSGGPVVDHDGNIIGIAFDRNPGPVVISITTIRTCIEMWHQFSRVARPMLGMQLKAVELLDVSMREELCLEYNITGGFIVNLVKVDSTAERIGIRRGDVIVFKDNRCSTLPQLEDYLLSLGWGYLQGLSFTVDLKYWKVEVHNLADSYKESITFPVPFSDASKRMTQSAFDLDIARTFIFWDVWLIAQRLMGLDDEDKMWSLIEEVWVEMLFFSAGRCRGYLHAKSLGSGVDXLWLLLAHAGMEAFP

SEQ ID NO: 191494 - protein, 657 aa, Oryza sativa
  unsure (1)..(657): unsure at all Xaa locations
  Clone ID: PAT_MRT4530_87807C.1.pep
MVRTETMFREEQRSSAVRIPCEKVTRVRILGGQLRSTVGIGTKLGEELRSRRSRXPGDEVGYEMAHGGWTPCGRDLHNGLHEVCVQAXVFAKEIGYMYACTVLYMYLFKNEYIKFEMKPGEALDDYLSRFNKILSDLRSVDSFYDANYPXSEISCHFLNGLDMSIWEMKVTSIQESVNMSTLTLDSLYTKLKTHEMNILARKVDSKSSALVSSSTSLDVGASSSESSVLALFNAMSDDQLEQFEEEDLVLLSNKFSRAMKNVRNRKRGEPNRCFEYGALDHLHSHCPKLERGKKEDDGRVKDDDVNKKKNMKEKEKKKHCMQWLIQELIKVFDESEDEDESKGKQVVDLAFIARNASSDVDESDDDNEEKLSYDQLEYAAYKFAKKIQTCSIALDEKDYTIEILNAKIARLKSLIPNDDNCQSCEVLFSEINALRDVNSINCKKLEFEIEKSKKXESSFALGFALHASVVDELILTKNVXEKKYKVAFCASSLVNALCANKAKQNNGALISQDCSKCVLNELKLKDALERVKHMEEIVKQDEVLILMLIILDILLLFXVLVLEKKEREIAFAKQRWQKSGFCSRSTVRPQVNRRSDRLPGPVRPXGQRRSDRPRGSFSHTSNRTFVKPKGKFSEKNKYRILGNSLDDKDVFDVSKIM

SEQ ID NO: 191495 - protein, 41 aa, Oryza sativa
  Clone ID: PAT_MRT4530_87808C.1.pep
MTKKYVVALNRILIHGSAHRDTNAKPWSKKMKSLLEQFARN

SEQ ID NO: 191496 - protein, 180 aa, Oryza sativa
  unsure (1)..(180): unsure at all Xaa locations
  Clone ID: PAT_MRT4530_87809C.1.pep
TYQGQPPPCPPPXPPPPPXPPPPPXPPPYPPPYPPPWPGXPYPPPYPLPYPPPXPSPYPGWPYPPPYPGWPYPPPYPPPYAGRPYPPPYPPPYPYPPPXDIHLPTSDPRPLXPSPPPDLVEGRASPALPPPPPPSPLLGAGEALSPPLVGRRAPPPLGEGQRRRHRHSPWGKAAPPPHPA

SEQ ID NO: 191497 - protein, 397 aa, Oryza sativa
  Clone ID: PAT_MRT4530_8780C.1.pep
MAARPFSACSLPQRCSVLLRLLPRPPRPPLPRPRPTSASTTGRRLVRNRLRDRPPPLVVSSRSLSLGSAAAPPWRPPVPPPPAPTPGAAPSSSACSLHLRDCRRHIRDRCRLVRIRLRDRPSSRPRSTVVARPRSSLRDWLPLVYASHRLVHDRRIDSISHVRECTPFSSTSISIAAMVIPSRRVRAHSLGEYASLILHREEEANQAFGSASCNCLFVLEYDNIDYILFIMSSTYSEKATRRPLRSCGAVLRTPLKSAIVAQPWCSVDGGMQPRDLRHSSEEASGDDGAGEAVSRCRREGVVAEPRRSLRGDQVGMWELQAVASTRSYYFLVAFAASALAPAGAGDDGQHVASRRTRTIAPSGAAMYSRDKYRGESAMAAWQEAYRAGPGWRGTCFC

SEQ ID NO: 191498 - protein, 483 aa, Oryza sativa
  unsure (1)..(483): unsure at all Xaa locations
  Clone ID: PAT_MRT4530_87810C.1.pep
RPNRPPTPKSRKPLNPCPPLYSQPPPCPPPXPPPPPXPPPPPYPPPXPPPXPPPYPPXDQDXPYPQPYPWPYPPPXPPPYPGWPYPPPXPPPYPGXPYPPPPYPPPYPYPPPXHRPTSDPRPRQPPPCPPPXPPPPPXPPPPPXPPPYPPPYPPPWPGXPYPPPYPLPYPPPXPSPYPGWPYPPPYPGWPYPPPYPPPYAGRPYPPPYPPPYPYPPPXDIHLPTSDPRPPPMPPPRRPXAAPPAPPGPPPXTSPPPDLVEGRASPALPPPPPPSPLLGAGEALSPPLVGRRAPPPLGEXATPPPPPXPWGKAAPPPXPPSPRPPPLPPSHPPVAAPSPPTPXPRSHPPLPSHPXPPPPPPSPPXPPLPPDLAEGSARPPCTPPXPAVADPDRPPPAADPCQPPPPPYLPPXPPPLYPPPYPPPYPPPYPPPXPPYPPPYPHPYPPPXTTTVPWXPYPPPYPPPYPGRPYPPPYPPPYPNPPPG

SEQ ID NO: 191499 - protein, 122 aa, Oryza sativa
  unsure (1)..(122): unsure at all Xaa locations
  Clone ID: PAT_MRT4530_87811C.1.pep
MERRRVGLASSYCLPXSLAVRLAPGLLVRGNDRRGEKEDKSNQSWFAAARGAACSRWLAAAAVAHVMKEGEWSGFLLIRRFFRTTNRLDFSRSGSDRITETLGQYVATSPLLCSFAWLLAGS

SEQ ID NO: 191500 - protein, 77 aa, Oryza sativa
  Clone ID: PAT_MRT4530_87812C.1.pep
LPPSADTAPWLQPSSATAPPLAPAGSGGQAAAAPPLPPLPVLAAGPPPPTPPARRRRASPPAPTQRTRGEIEKKWKR

SEQ ID NO: 191501 - protein, 134 aa, Oryza sativa
  unsure (1)..(134): unsure at all Xaa locations
  Clone ID: PAT_MRT4530_87813C.1.pep
TVLVWGLVLSISVTIELLKYATLCSSSSDRCFGEIISYCLKVDNGDCSIFTCCIFQEDICFKMEKAFCPPKLAEGNPCLEYIKYIILPWFGMFEVVQKKGNGGKKTFLSMXELTADYESGALHPADVKLALESH

SEQ ID NO: 191502 - protein, 125 aa, Oryza sativa
  unsure (1)..(125): unsure at all Xaa locations
  Clone ID: PAT_MRT4530_87814C.1.pep
MAFRHWRLVCYCYPCCCLLARDERFKNVKNLVELSTMLVATKKHTAYEFVYKLLKLVLILPVATASVERVFSSMNYVKNKLRNRMGEQYLNXCLVTFLERDLFVQVTDDDIIXRFQAMATRKVKL

SEQ ID NO: 191503 - protein, 119 aa, Oryza sativa
  unsure (1)..(119): unsure at all Xaa locations
  Clone ID: PAT_MRT4530_87815C.1.pep
MENEFHVERRAKSGGRSIERSTEETGYRLLTSTTPTWCARWPGDPAAGQEEEEEEEEEEXXDDEAFVTWSVMTAAWAVCLGLSRGNVVATEVRGGGEKIIVAMSGGSWGLALEFRGGGR

SEQ ID NO: 191504 - protein, 143 aa, Oryza sativa
  Clone ID: PAT_MRT4530_87816C.1.pep
MNSADEQEEHVTWLIDLRGWSISSTPLSTSRESMHIVQNYYPGIIAVAILSNTPRIFESFWKIIKHFLEAKMSEKVKFLYTNNPESHKIVSEMFDMDLLETAFGGRNSITIDIDNYAERMRRSDLARGVLIIQTDINLISRHH

SEQ ID NO: 191505 - protein, 223 aa, Oryza sativa
  Clone ID: PAT_MRT4530_87817C.1.pep
MDFDEYEYLEKAVENPEVNHRANGGDKNVKSEERGRNGSSKHKDDDDDDVVDLHPRHSKSGDNSRDRERQRERGSTLHGSKSRDGDKDRNSGGSRDRRRDRDRDHENKDRKRDKERDHGDKDMKRDRERDRDRNRDQERDRRDRGSEAEQEQRSRSRSDRLRTDLDDKDREASRDREYRDRERSRDKDYKDRERVRESREHDRENSRHKEKKKKKGKAAEQVS

SEQ ID NO: 191506 - protein, 656 aa, Oryza sativa
  unsure (1)..(656): unsure at all Xaa locations
  Clone ID: PAT_MRT4530_87818C.1.pep
VDFRQPVRSAISRVCRGHWKDTFKSWPSLEKSSPEKSXPYDVTYSANLMTLNSKNQFEFKTKTIGGWSGYIAANMGIGSVTPQEHTAFLLMWLEKFLFCGSSCGPTTNWQFLAEALEAKKQIPLGKILLGYLYQMLNNASAKIAAGSVVGAGGPSWLLQTWLNLVAKKAVNRPALLESQFPRLELITSDDGEVLTHRRCMSYGEAASTPADSGAKLSAELLKDWFCRFYEGFQKDARVWFAYEDSMSFELPSDFRFEEINSERYDKSRELPIGFYFADKIQFRGEISSTLMMDRLLNIPGPPLGSIKNVELAKFRSRNFDRWWGEWKQHLFHQSASMYMTDLFPDVIPQTIESSHPRKSNSGKDIEYASGLLPNGGGLTPPSSATMPPGPQPSPPPSPPVQSTPSDRTPSAAGSHNIEEEEQRAAPAIPALADLFLFDIKDYFDEEVEEKITSKTLVPLDDDVKRTLEDISHRLETSLDNLVVDCGTIRARFAEIQSLIPNDLANTISPAVYLEQHQFKVEKAKQRIADRRERRDIEATIQTNRQTVHEEKAKLDQLLVGPIQTKIDRLEARRIDLIAQLEECNAEMALEQKKLTDIPKAVEEQKSRLKLAIRNVADLTKSLKVIPGTDAQDIQAIEEVDQISQRAVSAIQRNLSR

SEQ ID NO: 191507 - protein, 496 aa, Oryza sativa
  unsure (1)..(496): unsure at all Xaa locations
  Clone ID: PAT_MRT4530_87819C.1.pep
MADNGGHEDAPPNGDHHPPAIVANGDDQEPAANGDDQAEAAANGGDQAAAANDQAAAENDQAAAENDQAAAENDQAAAANGGEHEEANRDLPNVAGIRAPRELRRVEVDALHQVLLRMPAAEVARCSGVCRRLRDLIATDSFRRGHQRHRSRHPMPLFFYRLDHWAFPDRVRVHLRAVDVAANETHPVICFSHADADLRSADPRVFTIEGXXDGILLFSYHTRLYASNPSTRRWRRLPPLHDDHVIVGFYGHGAIDEREYRVLYHTARPGCRYWVFSLSFFPDQPPRDIGRPADLETVRAVLAEGISPSYEMPPVAIAHRLHWRAQAASLNVLVFDTVAESFGWIPPPNQQEGNQMIPVEGDQLLEINGRLAMTLVSQTTVDVWVLQEGEAWEHHYQISLPVDLLNVFGGYDDEGFVSAAVFAVSQERNVLAQCPAMMLQCDTEGNVLMFYSLAGHLTVLSRYMLQESLLAHAFLPMRQEDAIDGDPPFFQVGLKY

SEQ ID NO: 191508 - protein, 263 aa, Oryza sativa
  unsure (1)..(263): unsure at all Xaa locations
  Clone ID: PAT_MRT4530_8781C.1.pep
MDSPATPMGLSPPLLSLKKGFIASSKTVHGRPSAQRRSTKPTAEIXXSKTDGRXESIHRGSTADXGADVDDDVIAGGGSAPRARRRTTARRRKRRAPTGRGRRSELTEHLDDDKRRRMTTAARXGGGGLRVGGDGGAPAGNGGNLTIPTVVTTTKGGGCNGGATRLDRRRRRRHTSXRGGGATNDGGLRRRWWRIEEVPGILLXGLGGGNGGPWRPAARWKVXGLEERDRSESSSNTSVXQTKLANVSKREKEEEISTIISPQ

SEQ ID NO: 191509 - protein, 502 aa, Oryza sativa
  Clone ID: PAT_MRT4530_87820C.1.pep
MLRRTETTTHRPSSRTETTRSRRRTETTRRRRRRTEATRLRRRTTRLRRRTTKLAAENDQAAAENDQAAAENDQAAAENDQAAAANGGEHEEANRDLPNVAGIRAPRELRRVEVDALHQVLLRMPAAEVARCSGVCRRLRDLIATDSFRRGHQRHRSRHPMPLFFYRLDHWAFPDRVRVHLRAVDVAARETHPVICFSHADADLRSADPRVFTIEGSCDGILLLSYHTRLYACNPSTRRWRRLPPLHDDHVIVGFYGHGAIDEREYRVLYHTARPGCRYWVFSLSFFPDQPPRDIGRPADLEAVRAVLAEGISPSYEMPPVAIAHRLHWRAQAASLNVLVFDTVAESFGWIPPPNQQEGNQMIPVEGDQLLEINGRLAMTLVSQTTVDVWVLQEGEAWEHHYQISLPVDLLNVFGGYDDEGFVSAAVFAVSQERNVLAQCPAMMLQCDTEGNVLMFYSLAGHLTVLSRYMLQESLLAHAFLPMRQEDAIDGDPPFFQVGLKY

SEQ ID NO: 191510 - protein, 292 aa, Oryza sativa
  Clone ID: PAT_MRT4530_87821C.1.pep
MEEEWCCVAPGFRFHPTEEELVGYYLARKVVGQQDDGIIQEVDLNSIEPWDLLQAQQHDQEYYCYFFSYKDRKYPSARGTGTRTNRATAAGFWKATGRDKPVLSSSRSSSSPAVIGMRKTLVFYRGRAPNGCKTDWIIHEYRLVAHHQQPDGSCWVVCRAFHKPTTTTTLQHQLHLHRPPPLLHHPGYYAEQNLYPPLAAAAGGGGLLCSLALDMELEDEEDESKMMILSNDNIPLVVSPTAVHTQGTGGDIINDATTAPAAAAAAADHRRHPELLAAGPIDTLLHHHHFTC

SEQ ID NO: 191511 - protein, 157 aa, Oryza sativa
  unsure (1)..(157): unsure at all Xaa locations
  Clone ID: PAT_MRT4530_87822C.1.pep
VEVEGVVRLRPLEGRGGAPALRWMKDCDTGGNTCSQATRTQGGXFPVHSVREVTGTAAARACSGXQEEVTVMVGFGRGKEGETRKMSXLVEANPMAQGLGLGCSRDGDRSMVAMAXHGPERERKARFVRXKAVADGGCGGGFRVSGDRWREGEEHGA

SEQ ID NO: 191512 - protein, 206 aa, Oryza sativa
  Clone ID: PAT_MRT4530_87823C.1.pep
MVSGSGLCTRRVVVDARHHMLGRLASLVAKELLNGQRVVVVRCEEMCISGGLVRQKMKYLRFLRKRMNTKPSHGPIHFRAPSRIFWRTVRGMIPHKTPRGEAALANLKAFDGVPPPYDRTKRMVVPDALKVLRLQPGHKYCLLGQLSKEVGWNYHDTIRELEEKRKEKAKVAYERRKQLTRLRVKAEKAAEEKLGSQIDILAPIKY

SEQ ID NO: 191513 - protein, 228 aa, Oryza sativa
  unsure (1)..(228): unsure at all Xaa locations
  Clone ID: PAT_MRT4530_87824C.1.pep
LIFAIAAKFTTKPHVFDGTDFSHWCSRXQSYIMAEDYDIWRKVSHPYVIPEQINTATLXTDFEQNXNCKARNNFLSGFSRSDYDRVSHLQTANEIRIALSNFHQGTNNIKELCRDLFKKEYIKFEMKPGEALDDYLSRFNKILSDLRSIDSSYDVNYTQSEVSRHFLNGLDMFIWEMKVSSIQDSVDMCTLTLDSLYTKLKTHEINIFSRKIDSKSSVLVSSSTSLDV

SEQ ID NO: 191514 - protein, 637 aa, Oryza sativa
  unsure (1)..(637): unsure at all Xaa locations
  Clone ID: PAT_MRT4530_87825C.1.pep
IGRPVQGQVRFRACPSFRAPRRGLLVGRGDHVAPRDRREDELRVPQRAGVRAGQRRRRGARRVRDGVRGVHVAAAGERWGRGVVAHCSSILFYVHHEYLHLQDMKPGEALDDYLSRFNKILSDLRSVDSSYGANYPQSEISRHFLNGLDMSIWEMKVTSIQESVNMSTLTLDSLYTKLKTHEMNIPSRKGDSKSSALVSSSTSLDLGASSSXLFNAMSDDQLEQFEEEDLVLLSNKFSRAMKNVRNRKRGEPNRCFEYGALDHIRSHCPKLGRGKKEDDGRVKDDDVNKKKNMKEKEKKKHCMQWLIQELIKVFDGSEDEDEGKGKQVVDLGFISRNASSDVDKSDDDNEEKLSYDKLELATXKFAKKLQTCSIELDEKDHTVEILNDEIARLKSLIPDDDNCQSCEVLFSEINALRDVNSVNCKKLEFEIEKSKKLESSFALGFALHARVVDELILTKNVLKKYKVAFCASSLVNASCANKAKQNNGVLISQDCSKCVLNEMKLKDALGHVKPMEEIVKQDEVXLAQLVENKKVFWMLAKIKKEREIAVAKXRWQKSGFNSRNTVRPTLNRLPGPVRPQGQWRSDRPQGNFARNSNRTFVKQKGKKYEXKNEYRILRNSLDDKDVFDVSKIMDWHM

SEQ ID NO: 191515 - protein, 1152 aa, Oryza sativa
  Clone ID: PAT_MRT4530_87826C.1.pep
MEPSPEIPPPPPAFAAGGEGDPHAPTTAAARSSSSSSLFPLFPLSAPEESSAPAAGSQWLSNPSFSFDASSLNIPATASSSVPPPLSASSDEEEAPRPAPAKYDLLPYSPSPPASDEERRDRRKDRKRRKRRREKERYNSAEASRKPGVRAWAGSETKLAKDYYFDAKGDQDNLAFGSIYRMDIARYKSQNMPEARGLKRLLFHNLGVSVHMGHESDLDGLNSKARAGGRYYSAKYAVVERNKGFKHLKVLKKDNSAILPEDFIPLGIPSLPENNTTGEQELEESWEDEILRRTREFNKMSREFPHNEKIWLDFARFQDKVASTQPQKAARLQTTERKISILEKAVELNPDNEELLLYLLKAYGERDSTQNLLDKWEQILMKHPDSWEFSRFKVSDLRKSYAYAVQALSAACTKLCRQDTQYDRLEPKYSSLIHLELGLVDIFVNLCRFEWHTGHRELATALFQAQIEFSLFSPPLHLTTSSKQRLFEHFWNNGGARIGEDGALGWSRWLAKDEESRQNIDIQENTQETERGGWSGWFDPSLRTNSETSKVEPSTSDGNDAENPDDEDPSAQEDVESLLKKLGIDGDADYNSEVKDPKTWNRWSFMELSRDNEQWMPLHEKLGSLYSDDAPTGEDNDQLSRVILFEDITEFLFSLSSEEARFSLICQFIDFYGGKISRWTSTNSSSWIDRNLSLEMITDDIQEDLSTVSNLIDKNQTSVHNKMVSLLGTMHEFSQRPGTAKFLKNAILLFLDVFPRNHILEEAVLVTPQIHTAQEKYLATPATASRALAKNLLKKDRQDLLLCGIYGRIEAMNGDFVKARHIFDLALSTSQGASEDLRKKVPILYFWYAEMELAIYASRNNSDSVDRAIHVLSCLGDKAKYASFDGSISRPQVLKARQGFKEQIRSLRSSFASDGMKEESVALICSASLFESMTSGFASGLEVIEETFYMTPSENNHSLEFEELWMHYIKQLQKNLNQLSLSRVWPKISQGIQTYPYNPKSYAAMLTLGCLYSVSNNLRLTLDKFNQRDPSIIGLLFALSFELCKAGSDNRIHNLFERALTDDKLQKSVLLWRCYLAYEAEIACNASAARRVFFRAIHACPWSKRLWLDGFEKLSSILTLKELSDLQEVMRDKELHIRTDIYEILLQDETDT

SEQ ID NO: 191516 - protein, 550 aa, Oryza sativa
  unsure (1)..(550): unsure at all Xaa locations
  Clone ID: PAT_MRT4530_87827C.1.pep
SKGDSIASALVSSSTSLDVGASSSKSSVLALFNAMSDDKLEQFEEEDLVLLSNKFSRAMKNVRNRKRGEPNCCFECGALDHLRSHCPKLGRGKKEDDGRVKEDDVNKKKNTKEKKKHCMQWLIQEIIKAFDESEDEDESKGKQIVDIAFIARNANSDVDESDDDNEEKLSYDQLEYAAYKFAKKLQTCSIVLDEKDHTIEILNAEIARLKSLIPNDDNCQSCEVLFSEINALQDVNSVNCKKLESEIEKSKKLESSFALGFALHAHVVDELILTKNILKKYKVAFCTSSLFNVSCAKRAKXNEGVLISQDCSKCVLNELKLKDALERVKHMEEIVKQDKVLILMLIILDILLLFWVLLGEKKEREIAFAKRRWQKSGFNSRITVRPTLNRLPGPVRPQVQRRSDLFQGNFARNSNRTFVKRKEXKCEKNDYRILGNSLYDKDVFDVTXGQPWSMVRTGTMLRKEQRSSAVGIPCEKVTRVMILGGQLRSTVGIGTKLREELRSKRSWIPGDEVEYEMAHGGWIPCGRDLRNGLHEVCVQASVFTRRNERR

SEQ ID NO: 191517 - protein, 83 aa, Oryza sativa
  Clone ID: PAT_MRT4530_87828C.1.pep
AAHGPRPPDRPPTRTARFAPPIHSGVGPTHTHPTPSGPTQQTTLTKKPQDTRPQWTATPGAPPAIYGGPQPGPTEPPPPAWAP

SEQ ID NO: 191518 - protein, 84 aa, Oryza sativa
  Clone ID: PAT_MRT4530_87829C.1.pep
GMGRGGEGEGGGLIQNGGGFQQHCGYMWRRGALYLSPTILPPHQRGSGTQPECAHHALRLQRLLPERGARTLGSSPTPFHRGSS

SEQ ID NO: 191519 - protein, 272 aa, Oryza sativa
  unsure (1)..(272): unsure at all Xaa locations
  Clone ID: PAT_MRT4530_8782C.1.pep
MVPVQDGELRNDVCTQSTSLRLTTHVTSSIVNEQSSNITYGENRKHGQIXAYLMARLSETVAMFYRHXSLRLTANHTSSXPMNHSINIRYEEYQKHERRKAYDELLYVDLDNICXSKVHSAGRISFSTPTKDCCRLHMTRXKTAIFIHTKKHTHEYQARKTSTINLRPXRIVKSCLTYXESSANTQLLVQHFSKRYPIDHLEQLMTGRTEDIEVQTLVGPSVNMVLHTSTDHRCNLKKGWTDFALSNGIKLNTVCIFHFYKTTHLGVIVDIF

SEQ ID NO: 191520 - protein, 468 aa, Oryza sativa
  unsure (1)..(468): unsure at all Xaa locations
  Clone ID: PAT_MRT4530_87830C.1.pep
MIGFTVILCDQSDRAVYAGDSMPRESICGDGPGVDLVVFGGLTGDSPAVRPATLQRSERLERGGTNNIKELRRDLFKKEYIKFEMKPGEALDDYLSRFNKILSNLRSVDSSYDANYPQSEISHHFLNGLDMSIWEMKVTSIQESVNMSTLTLDSLYTKLKTHEMNILARKVDFKSSALISSSTSLDVGASSSKSSVLALFNAMSDDQLEQFEEEDLVLLSNKFSRAMKNVRNRKRGEPNRCFEYGALDHLRSYCLKLGRGKKEDDGRVKEDDVNKKKNMKEKEKKKHCMQWLIQELIKVFDGSEDEDEGNGKQVVDLAFIARNASSDVDEFDDDNEEKLSYDQLEYAAYKFAKKLQTCSIVLDEKDHTIEILNAEIARLKSLIPNDDNCQSCEVLFFEIIALRDVNSINCKKLEFEIEKSKKLESSFALGFALHARVVDELILTKNVLXKKYKVTFCASSLVNASCAN

SEQ ID NO: 191521 - protein, 518 aa, Oryza sativa
  unsure (1)..(518): unsure at all Xaa locations
  Clone ID: PAT_MRT4530_87831C.1.pep
ALDDYLSRFNKILSDLRSVDSSYDVNYSQSEVSHCFLNGLDMSVWEMKVTSIQESVDMSTLTLDSLYTKLKTHEMNILSRKVDSKSSALVSSSTSLDVGASSSKSSVLALFNAMSDDQLEXFEEEDWVLLSNNFSRAMNNVRNRKRGGPNHCFECGALDHLRSHCPKLGRGKKEDDGRVKEDDVNKKKITKEKKKNCVQWLIQELIKACDESEDEDESKGKQIVDLAFIARNTSSDIDESNSDSEEKXLSYDQLEHAAYKFAKKFQTCSIVLDEKDHTIEILNAEIDRLKSLILNDDECESCEVLFSEXINALRDVNSINCKKLEFEIEKSKKLESSFALGFALHARVVDELILTKNVLKKYKVAFCASSLVNASCANKAKQNKDVLISQDCSKCILNELKLKDALGRVKHMEEIVKQDEVLILMLIMLDILLLFLVLLGEKKEKEIAFAKXRWQKSGFNSRSTVRPTLSSQSDRPAVRPQVNRRSDRLPGLLRPQAQRSRFNRRYKFRKSGREQILS

SEQ ID NO: 191522 - protein, 226 aa, Oryza sativa
  Clone ID: PAT_MRT4530_87832C.1.pep
MEARHRVMSLLLVLVIGCCAWGCRPGAAQVPVPARTDGFVYGGKAPALGETVVVEAYFDPVCPDSRDAWPELKKAVEHYASRVTVVVHLFPLPYHSNAFISCRSIHAVNKINPSFVYPLLERFFKYQEGYYNQPTYGKTRATVDAEVAKNLVAPVIGEANLAAYKAGFNDSKSDQATRISFKYGCARGVTGTPYFFVNGIPLISDSGSPLEYNKWKSILDPLVGKM

SEQ ID NO: 191523 - protein, 89 aa, Oryza sativa
  Clone ID: PAT_MRT4530_87833C.1.pep
TSCGVFFSMACSTERATTGWAGCTPPCSSSGDPSCRWGAPRRACQSKVLVLVLKPWTHHLQTMLVVKTNPFPRLRLQAADEGGLRLTAA

SEQ ID NO: 191524 - protein, 907 aa, Oryza sativa
  unsure (1)..(907): unsure at all Xaa locations
  Clone ID: PAT_MRT4530_87834C.1.pep
MDGAAVSAATGVMGSLLAKLSALLGEEYRLLKGVNSDIRFLRDELTAINNFLINMSNMEENLGEQEKEWRNRVREIEDCIDLFMRKFNHGDVDANFVRRTAKKIGMLWSRHEIASQIHQLKDCVNEESARRLRYRFGESNARIVEIDPGLPALYVEAEKLVGIHGPMEKIIDLLTKQDGSSQQLKVVSIVGFGGLGKTTLANQVLKKIKHQFDCTALVSISRSPDIKKILFVLLKDMINKNNSNDEKHKKVVGIKAEKSDDEKQLINKLREYLTSRSWMQSYIMAENYDIWRKVSHPYVIPEGINTDAAKTEFEQNCKARNILLSGISRSDYDRVAHLQTAHEIWIALSNFHQGTNNIKELRRDLFKKEYIKFQMKPGEALDDYLSRFNKILSDLRSVDSSYDANYSQYEISLHFLNGLDMSIWEMKVTLIQESVDMSTLTLDSLYTKLKTHEMNILARKVDYKSSALISSSTSLDVGASSSKSSVFALFNAISDEQLEQFEDDDLVLLSNKFSRAMKNVRNSKKGEPNRCFECGALDHLRSHFSKLGRGKKVDDERVKDDDVNKKKNMKEKEKKKHCMQWLIQELIATFDESEDKDESKGKQVVDLAFIARNASSDVDESDDDNEEKLSYDRLEYAAYKFAKKLQTCYIVLDEKDHTIEILNVEIARLKSLIPNDDECKSCEVLFSEINALRDVNSVNCKKLEFEIEKSKKLESSFALGFALHARVVDELILTKNVLXKKYKVAFCASSLVNASCANKAKQNNGVVISQDCSKCVLNELKLKDALERVKHMEEVVKQDEVLILMLIILDILLLFWVLLGEKKEREIAFVIQRWQKSGFNSRTTVRPTLNRLPGPVRPQALRRSDRPRGKFVRNSNRTFLKQKGKKYEKNEYRILENSLDDKDVFDV

SEQ ID NO: 191525 - protein, 133 aa, Oryza sativa
  Clone ID: PAT_MRT4530_87835C.1.pep
MGGPSNIACHGVRHTYLPARVHLCPISYLSSSSSPSIKPSLSPPEENEIAELQRLGQLLDMGRRAIVDGTRSARTYGGGPAAHEPYNLGAAAADEIAAEPVGRSDAAAGRRCRGGGSTYGNLGRGGVGVWLGA

SEQ ID NO: 191526 - protein, 471 aa, Oryza sativa
  Clone ID: PAT_MRT4530_87836C.1.pep
MPTGALALGLPPSPPTGVSAYTADLLCRRWWASSLSPSTAFVAADRIQIQICIKGIHGFKLISYALGMDQSEHHHRLAVAAAEWRGRQLWRSDRRFNTGQTGGIQSFEEEDLVLLSNKFSRAMKNVRNRKRGEPNRCFECGALDHLRSHCPKLGRGKKEDDGRVKDDDVNKKKNMKEKEKKKHCMRWLIQELIKVFDEPEDEDESKGKQVVDLAFIARNASSDVDESDDDNEEKLSYDQLEYAAYKFAKKLQTCSIALDEKEHTIEILNAEIARLKSLIPNDDNCQSCEVLFSEINALRDVNSINCKKLEFEIEKSKRKQKGLLDACKNCATLTQEVSYLKSSLHRFSDGKKNLNMILDQSKVSTHSRGLGFDPYAHHTRYPPTVLGVARRGEILIETEPKNTVFKSAGIMSSLNASSSKSNVMNAKPSVDAKPSISKPSNRTEPTICQATILLFSRIHAVFKTIYFTNLS

SEQ ID NO: 191527 - protein, 943 aa, Oryza sativa
  unsure (1)..(943): unsure at all Xaa locations
  Clone ID: PAT_MRT4530_87837C.1.pep
MAISNKFTTKPHVFDGTDFSYWCSKMQSYIMAEDLDIWRKVSNPYVIPEQINTATLKTEFNNNCKAPNILLSGISRSDDDRVSHLQTANEIWIALSNFHQGTTNIKELRRDLFKKEYIKFGMKPGEALDDDLSRFNKILSDLRSVDSSYDVNYTQSEVSRYFLNGLDMPIWEMKVTAIQESVDMSTLTLDSLYTKLKTHEMNILXSRKVDSKFSALVSSSTFLDVGAPSSKSSILVLINAISDEQLEQFEEEDLVLVTNKFSRAMNNVRYRKRGGPNRCFECGSSDHLRSHCPKLGRDKKEENGGGMNKDDKPKSKSMFKGRKTKENLKKAFDXQVYAAFEPLSDVDGESGEDEDKGKNISGVCFMAPGESDSECEDNEVRSFEEAILILSAKNKKCEKMYRKXEFIIESLNAEIARLKSLIPNDDYCKNCEVLMHEISKIRDLKQQHGVLDCSTCTLNKMKLKDALGRVEYMEEIVKSDEVLSCPKCRKSKDIMVDYENCANLQKEVSYLKSSLERFSNGKKXLNMILEQSKALVARKENVWIVDSGCSQHMTVATGLVKESNKFELKNIALVEDLKYNLLSVSQIIDENFEVHFKNTGSKVFDSCGDSVLNISXYGRVFKVDFENPVSPVITCLVAKFNKDVMFWHRRLGHVGFDHLKGLSGLNLVHGLXKLKKHLDLVCTPCRHAKMVASSHAPIISVMMDTPGQLLHMDTVGRARVQSVGEKWYVLVIVDDFSRYSWVFFMATKDVAFQHFCGLYLRLDLELPGSLKIIRSDNGGEFKNTCFKQFCNEKGFEHEFSSPRVPQQNGVVERKNRSLVEMARMMLDEYHTPRKFWAEAVNTACYIXNRVFLRSKLGKTSYELRFGRQPKVSHLRVFGCKCFVLKSGNLNKFEARCADGMFLSCPTHSRGYRVLVLKTNKIVETSEVTRPEIVMQQRGFPIFR

SEQ ID NO: 191528 - protein, 787 aa, Oryza sativa
  Clone ID: PAT_MRT4530_87838C.1.pep
MDLLMKRLDDHEKRPQGTVKALDSHITCDSMPRESICGDGPGVGLVEVSYGIRTLSMSLRSNKVVIYFESSSICVSPGAAVQPARYLRSDRREAAVRPTVASRSDQRRRQAQQATSAVRPVDLYRRMQSYIMAEDYDIWRKVSHPYVIPDQINTDALKLEFEHNCKARNILLSGISRSDYDCVAHLQTAHEIWVALNNFHQGTNNIKELRRDLFKKEYIKFEMKPREALDDYLSRFNKILSDLRSVDSSHDANYPQSEISRHFLNGLDMSIWVMKVTSIQESVNMSTLTLDSLYTKLKTHEMNILSRKSDSKSSALVSSSTSLDVGASSSKSSVLVLFNAMSDDQLEQFEEEALVLLSNKVSRAMNNVSNRKRGGPNRCFECGALDHLRSHCPKLGRGKKEDDGRVKKDDVNKKKNMKENEEKLSYDELEYAAYKFAKKLQTCSIVLDEKDHTIEILNAEIDRLKSSIPDDDNCQSCEVLFSEINALRDVNSVNCKKLEFEIEKSKKLESSFALGFALHARVVDELILTKNVLKKYKVAFCASSSVNASCANKAKQNNGVLISQDCSKCVLNEMKLKDALGRVKHMEEIVKQDEVFSCSTCRKQKGLLDACKNCATLTQEVSYLKSSLQRFSDGKKKLNMILDQSKKKEREIAFAKLRWQKSGFNSRSMVRPTLSSRSDRPAVRPQLNRRSDRLLGPVRPQVQQWSDRSRGSFSHNSNQTFVRCQGIFVAYSPCAFNVEMMIAFQGDSMPRESICGDGPGVSLVVRRCPWWSDIMRDTKARVDARGW

SEQ ID NO: 191529 - protein, 63 aa, Oryza sativa
  unsure (1)..(63): unsure at all Xaa locations
  Clone ID: PAT_MRT4530_87839C.1.pep
NKLNTTRSHLSSRGIRTHLLTWYAKILPLALVHTMGNVFTNMSWXKVAVSFTHTIKAMEPFFS

SEQ ID NO: 191530 - protein, 64 aa, Oryza sativa
  Clone ID: PAT_MRT4530_8783C.1.pep
KKSGGIPSNCFSTNNPTMAPFNLTLASIYPIHSPNSSIHTALRKPHLPTFSALNTAALSTAKPL

SEQ ID NO: 191531 - protein, 219 aa, Oryza sativa
  Clone ID: PAT_MRT4530_87840C.1.pep
MASGRDIAPCVIDNFPLGPKFDLRIILWRSDDSNMEWPWHFNISHTSSLIACGIAMDAPIGIDVEEKKRKTTKSILSLARRYFTPSEVDSLAKIADSDAQQKEFIKLWTLKEAYVKALGRGFSGAPFNRFSIQLKTNSRIQITKAPKVCNDSDSGDYLSENWRFALTELNSSYYMAVCIEDNSRGSENGSVPLGLKVWKTVPFIEDTLVSGTDAVKLIT

SEQ ID NO: 191532 - protein, 97 aa, Oryza sativa
  Clone ID: PAT_MRT4530_87841C.1.pep
MANTKPLIINTGPPPQPSRRGHRATTPNHLGDKLSAQGCGAGQTGHDSVRPPTSRSAGLGSSGSGSPRRDLSSNSGQRSDRYGSCGQTGQHTPVKPP

SEQ ID NO: 191533 - protein, 84 aa, Oryza sativa
  unsure (1)..(84): unsure at all Xaa locations
  Clone ID: PAT_MRT4530_87842C.1.pep
QKSKRKKVKQKSAKRGKKKKKKKKGRRSVXRRENRKSRKPQKKKKHNNKGRKGGGQKEKQEIIRXTREKKKSKKQNPRGLKKIK

SEQ ID NO: 191534 - protein, 198 aa, Oryza sativa
  Clone ID: PAT_MRT4530_87843C.1.pep
MSADEAMAVLVKLMSSLFGSPRSESIIKKLNLRFCLLTDLETSLDYLFNIGELVCNAIDSGKDIALDFQGEVIWITPEGKKLRSALNKITKLFLHGIYVKFDLLWTLVLLESAPSVKVFGVKVWNHACDEGTENRKQLYERNDLWDAAQLDGSIHYLQLERLEFGGFNQIIREHLDFIRAIIERAPNLKSVILEDRSL

SEQ ID NO: 191535 - protein, 119 aa, Oryza sativa
  Clone ID: PAT_MRT4530_87844C.1.pep
PIYLINLSLENFYPTKNLHIILPINNPQTISNPNIPITYFIPSSDAKTTCTQKLNIIKNGSKKQIKCTFIPKTTGEVNIFLKPKNDIHTSHSMFLSNFPFPKVLILFTIFLQRPSGQKS

SEQ ID NO: 191536 - protein, 124 aa, Oryza sativa
  Clone ID: PAT_MRT4530_87845C.1.pep
MAAFAKSAVFGTCVEAAGAEGGSDGAVLWVVTQVNLTEANTQGCFSHCLCQMGPAEGFTKAVNPSLLHWVISRSSGYSWHSSSSEGNLPLPDDIQGSDKLEEHQTSIEKTGRTRKCNPKEYVPE

SEQ ID NO: 191537 - protein, 242 aa, Oryza sativa
  unsure (1)..(242): unsure at all Xaa locations
  Clone ID: PAT_MRT4530_87846C.1.pep
AIVFAQWITLFTKQASTLDRWIGKVQIPAAALQSLISVSIVIYRNRDDDRHTDQAXVPIYDRVLVPLTRRYSKNPRGITTLQRIGIGLIISVILMVVAALVETRRLMVARDFGLVDNPEATIPMSFWWVVPQFILTGLADMFTMVGLQEFFYDQVPDGLRSLGLALYLSIFGIGSFISSFLVYAIDKVTSMTGDSWFSDNLNRGHLDYFYWLLAVXXSVLGLAAYLHFSRVYVHKKKGISVQ

SEQ ID NO: 191538 - protein, 44 aa, Oryza sativa
  Clone ID: PAT_MRT4530_87847C.1.pep
NFISGSFENKLRCHLISRIPIFNIDSKTHPLKKNIPRERNPAKK

SEQ ID NO: 191539 - protein, 70 aa, Oryza sativa
  Clone ID: PAT_MRT4530_87848C.1.pep
NRDKKIGCYIFLGAIFHALFPHFMGWPHATHCLIWVIKYISLCIIWENVSEINKNYSSNYSTHKPLFVPS

SEQ ID NO: 191540 - protein, 40 aa, Oryza sativa
  Clone ID: PAT_MRT4530_87849C.1.pep
MGNTYCSLSCSKLMTCNCGVGCCKKAPLLPSPEKSGPASK

SEQ ID NO: 191541 - protein, 116 aa, Oryza sativa
  Clone ID: PAT_MRT4530_8784C.1.pep
MARGAAVEPTQRRQRRRVARRDARGRGNGCTATGWAMRWCAVARATGGDASARWRWQHDNHGDATFVRRTRMTRWYGGAGLKGDATGDDDGAAAARGSARHGRRRHERRGARGCYS

SEQ ID NO: 191542 - protein, 100 aa, Oryza sativa
  Clone ID: PAT_MRT4530_87850C.1.pep
MGLVFMTRETQVAAWDQDPLQSLHRAFIIDIIQWRPAATEADVHEMQQVVSMDALCVVCYADDRHHRYPPPQCSSPLSSPHSSSRSFSRRRFSIVFDYSV

SEQ ID NO: 191543 - protein, 1292 aa, Oryza sativa
  Clone ID: PAT_MRT4530_87851C.1.pep
ITCAAGRNYNTKANDEVGPNIPESLGELGQHTQKKNIAPKDVWERSSGWRLSKSQWKLQAIARAPGSLTRFMPDDVPGVTSPMVYIGMLFSWFAWHVEDHDLHSLNFLHTGAPKTWYAVPGDRAVELEEVIRVHGYGGNTDRIASLAVLGEKTTLMSPEVLIDNGVPCCRLVQYPGEFVVTFPRAYHVGFSHGFNCGEAANFATPQWLKFAKEAAVRRAVMNYLPMLSHQQLLYLLAVSFISRNPRELLSGIRTSRLRDRKKEDRELLVKQEFLQDMISENELICSFLGKKSVDNVVLWEPDLLPSLTALHPCSSCSKAPEKKGEDGPRIGSTQSSSKDDSSSDGTACMTGTQSKGLSMDSKQAPEGEKLDTDDGDDLPFDLSIDSGSLTCVACGILGYPFMAILQPSRKALEEISLVDKERYKLSCEKEICSNVLPCSPNDGSSGCPLIANRSSSPVENANLSHQDVKPIRSDISLMGKEFNGTLGKHIGTSCSCSSENTIHPYGDTETPEKKIPSDCPGSELSKQSGRGDVNVPDVEGSEETISWNTGCAFARPRIFCLQHALEIEELLASKGGVHALIICHADYVKLKALAISIAEEIEFQFDYKDVALANASKSNLHLINISIDDEGYEEEGTDWTSRMGLNLKHSSKIRKETPESQEQPPLSFWGLFSKPSPISVVSNLKWLCRKARTPYKVIGYASSPDVVATPDKVKPAVTKTQIDTSGNAHENIGSEQTLQQDCVLQESNDVADMCKRPKVNDQDGHSLINIPIAVAEYPMMHQVCERPDSPTTVAVSAGKPTREQCGAESTELSTVKQFLDNGLIAEGGSMNFISNHEHLESDNATSVCKDEQLQVQQDQLAMVLCNNPNTELVAGELHGGAASSTLENEDSCGNTSYCSDTVLKNSEPDTDDQPETCDRSVVLVTPKSSCDQMISSSDRSCSLTLDCPVSTDAAFSSEKLSMAHDLMGSELQAVHNSKAEVVASLTDVKGAKLNSIHTTQLPHESPSSDFIISEGAQSASTTAIPRKNGTSMHTESNSIDILLGVLADESKVSSGKDEVGKASLTLMTLAGNDQSADDVTQDEVAEITDPSHGFCSSDIVSRSIGSSNRTNIICYARRKHKRKSGSEFNINSPQSLGSFVRSPCESLRPRTRPAIVEDMTNETKTAEASTANKRKKAKVEAFQCDIEFCDMTFETKAELRAHQRNICTDESCGKRFSSHKYLKRHQCVHRDERPFKCPWDGCPMTFKWLWAQTEHIRVHTGERPYKCSAPDCGQSFRYVSDYSRHRKKFNHY

SEQ ID NO: 191544 - protein, 151 aa, Oryza sativa
  Clone ID: PAT_MRT4530_87852C.1.pep
ALGQIDTAGNAHENIASEADVCNKYWLLHESNDVADMCKRTKVNDQDGHSLINIPIAVAEYPMMHQVCERPISVSACDDPICSFDSQDSPTTVAVSAGKPTREQCGAESTELSTVKQFLDNGLIAEGGSMNFISNHEHLESDNATSVCKDE

SEQ ID NO: 191545 - protein, 129 aa, Oryza sativa
  Clone ID: PAT_MRT4530_87853C.1.pep
MGNVCVGTTCSLSKNGLLCAIWRNGSTTTSSTPSHPTISRSVPVVQPSSPSSPTSEPPPPQQQLTSTAPPRPIVISEPVKKHISSAGLQVESVLQQKAENLKDRYNLGRKLGHGLFGTTYLCVDKATRK

SEQ ID NO: 191546 - protein, 539 aa, Oryza sativa
  unsure (1)..(539): unsure at all Xaa locations
  Clone ID: PAT_MRT4530_87854C.1.pep
MAFSGDSMPRKSICGDGLRVGLMISRHFLNGLDMSIWEMKITSIQESVNMSTLTLDSLYTKLKTHEMNILSRKGDSNSSALVSSSTSLDVGASSSKSYVLTLFNAMSDDQLEQFEEEDLLGRVKKEDDGRVKEDDVNKKKNMKEKEKKKHCMQWLIQELIKIFDGSEDEDEGKGKQVVDLAFIARNASSDVDESDDDNEEKLSYDQLEYDAYKFAKKLQTCSIVLDEKDRTIEILNAEIARLKSLIPKDDNCQSCEVLFSEINALRYVNSVNCKKMEFEIEKSKKLESSFALGFALHARVVDELILTKNVLXKKYKVAFCASSLVNASCANKAKQNNGVLISQDCSKCILNEMKLKDALGRVKHMEEIIKQDEVFICSTCRKQKGLLDVCKDCAILTQEVSYLKSSLQRFSDSKKNLNMILDQSKVSTHNRGLGFDSYAYHARHPPTVGEKKETEISFGKRRWQKSGFCSRSPVRPLGQQRSDRPQGNFAYNSNHAFVKRQVFDDKDVFDVSKNNRCRILRNSLDDKDVPGIIERKKLI

SEQ ID NO: 191547 - protein, 562 aa, Oryza sativa
  unsure (1)..(562): unsure at all Xaa locations
  Clone ID: PAT_MRT4530_87855C.1.pep
PYTPYKYIGHMKPIEALDDYLFRLNKILSDLRSVDSSYDANYPQSEISRHFLNGLDMSIWGMKVTSIQESVNMSTLTLDSLYTKLKTHEMNILFRKVDSKSRALVSSSTSLDVGASSSKSSVLALFNAMSDDQLEQFEEEDLVLLSNKFSRAMKNIRNRKRGGPNRCFECGALDHLRSHCPKLGRGKKEDDGRVKEDDVNKKKITKDKKKNCVQWLIQKLIRACDESEDEDESKGKQIVDLAFIARNASSDIDESNSDSEEKLSYDQLEHAAYKFAKKLQTCSIVLDEKDHTIEILNAEIDRLKSLIPHDDNCQSCEVLFSEINALRDVNSVNCKKLEFEIEKSKKLETXFALGFALHARVVDELILTKNVLKKYKVAFCASSLVNASCANKAKQNEGVLISQDCSKCVLNEMKLKDALGRVKHMEEIVKQDEILILMLIILDILLLFWVLLGEKXEREIAFAKRRWQKSGFNSRSTVRPTMNRLPGPVRPQVQQRSGRPRGNFARNSNKTFVKRKEXKYEKNEYRILGNSLDDTNVFNVSKQQLISAVRLVNLYRSDRRHR

SEQ ID NO: 191548 - protein, 68 aa, Oryza sativa
  Clone ID: PAT_MRT4530_87856C.1.pep
MASEKKGPPAMDDAARRSTTPIYDAAREPAALFFPNATPICVAAEEFVDHTVDGLQREQWNSMDPARS

SEQ ID NO: 191549 - protein, 711 aa, Oryza sativa
  unsure (1)..(711): unsure at all Xaa locations
  Clone ID: PAT_MRT4530_87857C.1.pep
MRGGGALPSRLSLAARGRRLAGEGGSSGRSLSSTKSRDRRPSGSSGGRRHAAAPCLLSFCDNLCDVLQMKPGEALDDYLSRFNKILSDLRSVDSSYNANYPXSEISRHFLNGLDMSIWEMKVTSIQESVNMSTLTLDSLYTKLKTHEMNILSRKGDSKSSALVSSSTSLDVGASSSKSSVLALFNAISDDQLEQFEEEDLVLLSNRFSRAMKNVRNRKRGEPNRCFECGALDHLRSHCPKLGRGKKEDDSRVKDDDKKKNMKEKEKKKHCMQWLIQELIKVFDESEGEDESKGKQDVDLAFIACNASSDVDESDDDNEEMLSYEQLEYAAYKFAKKLQTCSIELDEKDHTIEILNAEIARLKSSIPDDDNCQSCEVLFSEINALXDVNSVNCKKLEFEIEKSKKLESSFALGFALHVCVVDELILTKNVLKKYKVAFCASSLVNAXCANKAKQNNSVLISQDCSKCVLNELKLKDALGRVNHMEEIVKQDEVLILMLIVLDILLLCXVLVLEKKEREIAFAKRRWQKSGFNSRTTVRPILSNRSDRPAVRPQVNGRSDRLPGPVRPQAQRWSDRSRGSFSHNSNQTFVKRQGILVAYSPCAFNVEMTIAFQAFHVLVFEIVVFVDTNECDLMPRESICSDGPGVGLVRSNKVVIYFEGSSICVSPGFGGLNGDLSVVRLAHQGGQTGGGVDRQRRLRDVQDERSTPVRPAE

SEQ ID NO: 191550 - protein, 765 aa, Oryza sativa
  Clone ID: PAT_MRT4530_87858C.1.pep
MVRTGTMFREEQRSIAVGIPREKVTRVWILEGQLRSTVGIGTRLREELRSRRSRIPGDEVGYEMAYGGWTPCGRDLRNGLHEVCVQASVFAKGIGRGMHACTVLYMYVCDRYMHVKHMKPEEALDDYLSRFNKIFSDLRSVDSSYDANYPQSEISRHFLNGLDMSIWEMKVTSIQESVNMSSLTLDSLYTKLKTHEMNILSRKGDSKSSALVSSSTFLDVGASSSKPSVLALFNAISDDQLEQFEEEDLVLLSNRFSRAMKNVRNRKRGELNRCFECGALDHLRSHCPKLGRGKKEDDGRVKEDDVNKKKNMKEKEKKKHCMQWLVQELIKVIDGSEDEDEGKGKQVVDLAFIARNASSDVDESDDDNEEKLSYDQLEYAAYKFAKKLQTCSIELDEKDHTIDILNAEIARLKSLIHNDDNCQSCEVLFSEINALRDVNSVNCKKLEFEIEKSKKLESSFALGFALHARVVDELILTKNVLKKYKVAFCASSLVNASCVNKATQNNGVLISQDCSKCVLNELKLKDALERVKHMEEIVKQDEVLILMLIILDILLLFWVLLGEKKEREIAFAKQRWQKSGFCSRSTVRPQLNRLPGPVRPQGQRRSDRPRGNFARNSNRTFVKRQENKKYENNEYRILGNSLDDKDVFDVTGGQPWSMVRTETMFREEQRSIAVGIPREKVTRVWILGGQLRSTVGIWTRLREELRSRRSRIPGDEVGYEMAYGGWTPCGRDLRNGLHEMCVQVSVFAKGIGRGLCMVLQYGGVL

SEQ ID NO: 191551 - protein, 123 aa, Oryza sativa
  Clone ID: PAT_MRT4530_87859C.1.pep
MDAVGGGKVKKAAGGRKAGGPRKKAVTRSVKAGLQFPVGRIGRYLKNRRPVDLISAAPSPLAAPTLFPTTSVTPSTLFPIASVTPPPPPHWALLSASVMMAAAACRRRRPHEGDGEAGELTPP

SEQ ID NO: 191552 - protein, 79 aa, Oryza sativa
  unsure (1)..(79): unsure at all Xaa locations
  Clone ID: PAT_MRT4530_8785C.1.pep
GAFEFGIPPENIMAKLLFXGTSGEYAGFDPTEPTTRSGGEALAAHQIIQDYLSSASVQNHGYKTLVMIGDGATDLEVWN

SEQ ID NO: 191553 - protein, 39 aa, Oryza sativa
  Clone ID: PAT_MRT4530_87861C.1.pep
CFLRTWLNADVKVWSPFLESKITLSYSLWFFQLYFQVLP

SEQ ID NO: 191554 - protein, 143 aa, Oryza sativa
  Clone ID: PAT_MRT4530_87862C.1.pep
LGDPVKQPSTNCSTWEPAVFCSKESGSITELALFYLPDDAARVPSVLSELTEPRLPPARSWPPPRWRQHRDNRCPPPRLPPSPALDLMRHCRICPRGAERRLDPRRRKAVEKKVGARRTSLSPAAPPTIARARSAAPPPDPHM

SEQ ID NO: 191555 - protein, 92 aa, Oryza sativa
  Clone ID: PAT_MRT4530_87863C.1.pep
ALESTHAQPGACSLVAADASELWWVEVPGCFCFHLWNAWEDDTTGEIVVIDSCMTPCSTSRRRRQRWRESFALIFFSLLSFFFRLSSRVRPL

SEQ ID NO: 191556 - protein, 108 aa, Oryza sativa
  unsure (1)..(108): unsure at all Xaa locations
  Clone ID: PAT_MRT4530_87864C.1.pep
AARGYDNNIDIHRSIXLDDQDCQDKDAGCAQYTWAXWDLKDDHCVQSYRIPNVLWNKXAKVTHLSLHSRMSEEYAADIHPEAKIGHGISQDDGTDLRIAENGTVVNCA

SEQ ID NO: 191557 - protein, 69 aa, Oryza sativa
  Clone ID: PAT_MRT4530_87865C.1.pep
RGSARLHLQSHRHQASSCQSKSVAIVGKGIGIVHERQVRYAHRVLAYWMYMSVALKGKVDPNRLSQWLL

SEQ ID NO: 191558 - protein, 51 aa, Oryza sativa
  Clone ID: PAT_MRT4530_87866C.1.pep
PAGSACCWRSVDGQADTLFTSYPRRWRPRIYFAGEVTRCPNSFVPRTWVER

SEQ ID NO: 191559 - protein, 402 aa, Oryza sativa
  Clone ID: PAT_MRT4530_87867C.1.pep
MGWRGLARDAAAAYLRRGGAPAHVFSAASRAPGPVVANPGARFRRWFGLVPPTPELSLSSWGEWFVDSIRSCQGLGMGSTLAVTFCSQKVAYAEEVAEQPSEGLIGPSTKHQISKLWTIIRKYQLPVGLIALIALGWQNPLGLFINVLLILYSSRPSPYSIYLFLQEVRHGEMHQNRAFWKEEAVLTRKVDTKDYKLFSIGTVESADREVLHVIGILGNWWIYRASYGKEFPHLTLSKNLFVMGGRKIGVAVDFSSCSKAALRWASTNLTRSGDQLVLIHVNSSYHNEQGAVQLWEQSGSPLIPLAEFSDPHVAKTYAVSPDKETLEILNQMSNQRGVEVLAKILYGDPAKKLYEAVDLVPLNCLVVGNRGLSTLKRALMGSVSSYIVNNATCPVTVVKENI

SEQ ID NO: 191560 - protein, 963 aa, Oryza sativa
  unsure (1)..(963): unsure at all Xaa locations
  Clone ID: PAT_MRT4530_87868C.1.pep
MAAHAVDLMRPEKFAGENFKRWQSKVRHYLVSQNLWYVIPQVRPLTQQQHADFETSNDVALGVMLSLLSDQLYDVYGAYTSAAELWEALDRKYSVSDAGRWIYVVEQYHDFKMIDNQSVVKQAHDXXTIMGEMSQFGAIVIPKFVVGGIIAKLPPFWRDFATALKHKREDMMVDDLIAHLDVEEKARAKDTPTMAQEGTSNANLVQKSNAKNKGKQAVQNHKAKNTTNFKKKITCYVCGLEGHKANKCRDRKGKKNVQQGQKIANMVVSEAGSSGYDSTPVALSAYQSFDWWVDTGANIHAATGSSILMGNGSGAAVLGVGKVDLKLTSGKIISLKNVQHAEAENQLERKIKRLRSDRGGEYVSDEFSQFCADHGIIHEITPPYSPQSNGVAERKNRTLTDLVNAMLDSAGMSKAWWGEAVLTACHILNRVPTKNSEITPYEGWKGRKPSLSYLRTWGCLAKVNVPITKKRKLGPKTIDCVFLGYAHNSVAYRFLVVRSDVPDVPINMVTESRDATFFEDIFPMKANETWEITDRPFGCKPVGCKWIFKKKLRPDGTIEKYKVRLVAKGYTQKEGEDFFDTYSPVARLTTIRVLLSLAALYGFVVHQMDVKTAFLNGELDEEIYMEQPDGFVALGQEGKVVKLLKSLYGLKQAPKQWHEKFDRTLTSAGFIVNEADKCVYYRFGGGEGVILCLYVDDILIFGTNINVVSELKSFLSQKFDMKDLGEADVISNIKLIKGEDGIMLSQAHYVEKVLTRFGLMDCKIAPTPYDPSLKLRKNKGLGKDQLRYSQIIGSLMYLACATRPDISYAVSKLSRFTSNPXDDHWQALERILRYLRGTMSYGIHYTGYPAVLEGYSDSNWISDADEIKATSGYLFTLGGAAVSWRSCKQTVLTRSTMEAELVALDTATVEAEWLRELLMDLPVGEKPIPAILMYCDNQTVLIKVKSTKDNMKSSRHVKRPGIL

SEQ ID NO: 191561 - protein, 53 aa, Oryza sativa
  Clone ID: PAT_MRT4530_87869C.1.pep
SQANSYSGVKLVLYIDANNHSFLLLFYTVKYERNLVALIVNHMIDLWIGIFVF

SEQ ID NO: 191562 - protein, 816 aa, Oryza sativa
  Clone ID: PAT_MRT4530_8786C.1.pep
MADNEKGNKVRSQDIGTSSSRVNEAPDTSCVTLVQHLINQNRLLIEILQQHQTPILNLSQIQPQVQLEAVQALTPRVSMPPASRRTHGDVPHVDSKEASIICFMCDEQGHYARECPQQKKKTPMRTEDEVRKMSITSTEWPPPGMTKRQRRNTFRGAPQLTEHLLANGGRVSDNEDSDQVSSDDEDEKSPQGFNQNKMERKACSRCGEIGHVASSCATTCVHCEEDHPPDRCPTSRITCFFCEGTDHVPKDCQFSFLLTKKMANQPASSNGEKHQGNTNPRQDYSFSLTPVPGQRNQNEKRKCRVREDICCFNCQGMGHFADKCPKPRNIAASTSVHATPCNQKLAPQRTVIHASRSSPIARVATAPTPASALPQGVNAQFQPQPSVDKTEASIGIVPLDVRAQQPRNQNWNNPAGTTNVQVPTVQQQCKLSEFLKTEPPTFAIAVDPMEASDWLRTIEKKLGLIQCTDQERVGFATPQLVGPASEWWDSYEASQPEGHTITWNEFSSVFRRSHVPAGMITLRKREFRYLKQADLTVTKYLHEFYRLAHYAPEDVETDEDKQEKFLQGLKDELAVQLLLEDYEDFEKLVDKAMQLESEHNRMTNCKRRIVNIPVFPCGNQRQRTEPLQITGSSVVHQEFLPQEDGRNADNNTSNTNDDDTTNNHGSCLISDHSNKACNVSSIHQDVNDSINVGIQNDNLSNFDTEKDSNGDSNYGTTDANVSKDFQPPIPTPSQNDRPQMDSSTKKTLICYNCKEPGHFSRDCPQPKRNLRHHSGHYARRRQVTRLVVTGANAIPVSLKGSKPKDLIVPRSVRNPH

SEQ ID NO: 191563 - protein, 407 aa, Oryza sativa
  Clone ID: PAT_MRT4530_87870C.1.pep
MPTASCLRPPLPHSSAAASASAARGLRVPLPPPPPPAQLQQQLFQAALRLPRRRLAGVGVVAASASPFDELYARGRPAHGSSKKSILWNLIQDIEPLDLSVIQKDVPPETVDAMKRTISGMLGLLPSDQFRVVVEALWNPFFKLLVSSIMTGYTLRNAEYRLSFERNLELSEEDSEGQNRDISEDNHHNINLGSPVTIFRLSEEDMLQDTEKNDEELPCETVGEDLGNLTPQAEDYIIQLQSRLDAMKKELHDLRRKNSALQMQQFVGEEKNDLLDYLRSLTPEKVAELSESTSPGVQEAIHSVVHGLLATLSPKIHSKAPPPLGNASGGVLNLGGEDDDCAELVENASLPFQPLISVPRDYLARLLFWCMLLGHYIRGLEYRLELAQLLRISTDVESFPSGDDLVI

SEQ ID NO: 191564 - protein, 119 aa, Oryza sativa
  unsure (1)..(119): unsure at all Xaa locations
  Clone ID: PAT_MRT4530_87871C.1.pep
RALGLHPVAAALNSGSPGLHEFGTTDGVLLKWTADYGTTLRNCVILGGTLLDXKPIRAQHDSSVMXGTSKSFYTNGGLKLLSVTITLDAASHNYLLRQLHDTTRLVYNPMHGLSGMTLN

SEQ ID NO: 191565 - protein, 514 aa, Oryza sativa
  Clone ID: PAT_MRT4530_87872C.1.pep
MAMDLDRDRGRDRDGYGDGAALVASTSNGRGRGRGHLNDLPEDILAVILRRLLDTRAAARTSFAVPPAGAHVWKWVSGLFLHHYQPHDSSIVRAALAAHAVHAVTNINKLYVVCLRSATPDATASWIRVAAPLISGELAFCNRASVPFHMLFDEVFSDPIEERGALELPCFTRATKIALRLGFLGLSLPPSGVFAALRELRLSFVRFHGELTLDDTVMPFLEGLEIYSARVLASLTLRLKHLNWMNLSAVRGLLRLNAVVPRLKFLTVSCCFCSSTWLVAMAGVCIVAEELRVLRWLDWYCPRLIKFSQMPRLYVLSVSPFYPYGRHRQHTKFNPSCDRLLKTFSRIRCLEMLVFIEPHLGGVNPLMEGITRLPDIRFLHLQFSAHGHVYGASVLYMLTMCTGISNLKIGGDRYKDQDVCPPNCSCDRPPNWRDNKDISMRSLREVQMLNFRGKEHELDLLRVLVRVATGIRRIRITCHRSFAAWERLSAVIRSFARPETSVEVSQAPPSLQRQ

SEQ ID NO: 191566 - protein, 112 aa, Oryza sativa
  unsure (1)..(112): unsure at all Xaa locations
  Clone ID: PAT_MRT4530_87873C.1.pep
MTSPTTAAARRIKRLGRWTLAGERRFHGTNXGHQHVXDNAANTPVTKTAVEKERTTTATRRKRRLPSGXRPRRCFGGLRRNDRADQDGGHFAKHDGGLSQRPRQLKLRRRTA

SEQ ID NO: 191567 - protein, 140 aa, Oryza sativa
  Clone ID: PAT_MRT4530_87874C.1.pep
VFARFYAFSPSYRPYPLPLHFLVQQQVVSPSSEFVRPQHSIVATPFWQPGSFLFINPPVMPPQCFPPLRVVGPQFPYQAISRVQAIVQQLQLQQVGVVSFDQTQGQGPALLALNLPSICGIYPNSSIGPGGISPVGGVWA

SEQ ID NO: 191568 - protein, 113 aa, Oryza sativa
  Clone ID: PAT_MRT4530_87875C.1.pep
MATEVAAADGANGGRGRGRRLRWRSRRATARTTAAVTCDHVGAGGYARENSRQREDGRRIINDSVAQWIRRWSTEPEILESKGGFAQQRPTGGMEAHVPSAPNWDLAMETNAD

SEQ ID NO: 191569 - protein, 124 aa, Oryza sativa
  unsure (1)..(124): unsure at all Xaa locations
  Clone ID: PAT_MRT4530_87876C.1.pep
RSXSCRCGAGLGMFLFVSFIFVSIIFRLLFSLYIGWVAFACVPCLCFAGLGWAVSFVVACAAIASGACFLCWVREAAVWPLLMPLVALRCFSTGRHPCLARFALVAHRCHCLVVFLVAAFLGPF

SEQ ID NO: 191570 - protein, 458 aa, Oryza sativa
  Clone ID: PAT_MRT4530_87877C.1.pep
MAVPAAAVAADVVDFGYAAPMPPPYVGFDPAGMGGERQLFQHGGACHGLYDGGLDFSAAAAFQEAATLGVGLPGGNLLQSLAPPAAAAATPSSLQMPMMMSLPGLPATAADVYPFGGGGFVKREDGPVLDVVGGGGGGRIGLNLGRRTYFSPADVLAVDRLLLRSRLGGMGMEMGMGMGVLGLGLAAAAHHHQPPRCQAEGCKADLSAAKHYHRRHKVCDFHAKAAAVLAAGKQQRFCQQCSRFHVLAEFDEAKRSCRKRLTEHNRRRRKPTAGGQSSKDSPPPPPSKKGTDASIASSYTSCDHHKAAASTTTASGVSCLQELADHHDVGGGHQAAMAAAPPPTLSLAALPPQEEDDEDEDGGLGNVLMMQQHHQRRRLQHDGDGDDDVAAAAAHHHLMRSLARQQQQHRHSSGCSNNNDGDDDDHNNNNNILSCSSASDQQNSSNNNNMHFFEVDFI

SEQ ID NO: 191571 - protein, 132 aa, Oryza sativa
  Clone ID: PAT_MRT4530_87878C.1.pep
MGSSSGLVDWRGRPVDTKKHGGVRASIFIHAMVLLTNAPNIANMMNMVSYLRGTMHMGVAQASTTASNYFAALQMFSIPAAFLADSYLKRFYTVLLFAPIEIIGYILLSSSSVHHLRCTGPPWQPGGPRAAS

SEQ ID NO: 191572 - protein, 208 aa, Oryza sativa
  Clone ID: PAT_MRT4530_87879C.1.pep
MLGSGLNLVSAALGFGMTAAFVAFVCARFVCCRARRADASASRPHPSPVDFDADFPSDFDRPIEHSRSGLEPLAVAAIPTMKYNCEAFHSEDDTQMFCCNRCSICLSEYKEKDILRIVPICHHNFHLYCLDAWLLKQTTCPICRISLKELPDGKSTVSSAPTMSQPPTLPESSVNPTSHFLPVHQEHRSHQDGPDMPESVEVVIEIRQ

SEQ ID NO: 191573 - protein, 292 aa, Oryza sativa
  Clone ID: PAT_MRT4530_8787C.1.pep
QKKIKKKMVTWTSRVSGSVLNFQYGRARALFRAMMVAGGRVLPSSATISTILPAFANVADVKHGKEVHGYSVVAGVEQELTVSSALVDMYAKCGLVLEARRLFDKMPQRSTVTWNSMIFGLANSGHCQEAVGLFDRMLRDGAKPDHLTFTAVLTACSYGGMVEVGKILYRAMQVEYGVEPRLEHYACMVHLLGRAGRLDEAYGFIRAMPLEPDRFVWGALLGACRSHGNIELAELAASRLLAVEPDNAASCLLLSSALANAGKQDDVFKIKRLVKRRRLKKLDSYSWVETSL

SEQ ID NO: 191574 - protein, 118 aa, Oryza sativa
  Clone ID: PAT_MRT4530_87880C.1.pep
MADTTGIWMKLNVDGSFQASDGQGGIGAVLRNAEGEVIFAASGFVDRYGSALEAELLSCRDGLSLALQWTLLPIVVETDSLMAKQLVQSDSMVRSDMVFLVREVRDLLMGSREELTKR

SEQ ID NO: 191575 - protein, 73 aa, Oryza sativa
  Clone ID: PAT_MRT4530_87881C.1.pep
SVRARPAAASRRAPPTHVTSRGFSASSSPVPGWPRPPGARPAAASRRAPPPCPAGQGLPAPGRPRPPGELLPC

SEQ ID NO: 191576 - protein, 140 aa, Oryza sativa
  unsure (1)..(140): unsure at all Xaa locations
  Clone ID: PAT_MRT4530_87882C.1.pep
MEDHRGRPSQGGGYGEGGGASGGGYGQGGGGGGGGGQGGGSGXGYGQGGGGGGGGGQGGGNGSGYGSGYGSGYGQGGGVCGGSYGQGGGGGGGGGGQGGGAHARGYGQGGGGGGGGGQGGGSSSGSGYGSGYGGGAGGNP

SEQ ID NO: 191577 - protein, 116 aa, Oryza sativa
  unsure (1)..(116): unsure at all Xaa locations
  Clone ID: PAT_MRT4530_87883C.1.pep
XKXKXXXRVSQHQIGRGRRYXDXXINWXXXHXGIEXTXXXSXKXAVIXKXRTGQAVQCTXAXIXXYSRLTILTRQXPDDGSCXVICHSWGLXCCSXXFGQXXLXVXXNGKXYXXHF

SEQ ID NO: 191578 - protein, 200 aa, Oryza sativa
  unsure (1)..(200): unsure at all Xaa locations
  Clone ID: PAT_MRT4530_87884C.1.pep
PPAPPPYPDPXPEPLLEPPPWPPPPPPPPPSPPPCPPPPPPPPPPCPXLPPQTPPPXPYPEPYPDPXPDPFPPPCPPPPPPPPPCPXPTPDAPPPLPXPEPYPDPLPPPCPPPPPPPPPCPXPPPEAPPPSPXPPPDEGLMSASPPYPDPYPDPPPPPSPPPPXPPPSPPPPPPPSVVVASPPPCRPWFRIRLMAGWGGR

SEQ ID NO: 191579 - protein, 42 aa, Oryza sativa
  Clone ID: PAT_MRT4530_87885C.1.pep
ITLKLSYTHELPTFSLHRSLSIKLSIFGGTKHTPKFSFPSQE

SEQ ID NO: 191580 - protein, 106 aa, Oryza sativa
  Clone ID: PAT_MRT4530_87886C.1.pep
ILDQKVSKTPWGSQKKLKRVKRGGPPKKGKPKKGGFKPKKPFFWVKGGFQGQRGGKKGLRGNWRNPKSWGLWGKTGRKKKTPNFRKAQGGPRKPGKRGSRPPIFGG

SEQ ID NO: 191581 - protein, 156 aa, Oryza sativa
  Clone ID: PAT_MRT4530_87887C.1.pep
MGKEKIHINIVVIGHVDSGKSTSTGHLIYKCGGIDKRTIEKFEKEAAEMGKGSFKYAWVLDKLKAERERGITIDISLWKFETQKYYVTIIDAPGHRDFIKNMITGTSQADCAVLVVAAGTGEFEAGISKNGQTREHALLAFTLGVKQMIIAVNKMD

SEQ ID NO: 191582 - protein, 113 aa, Oryza sativa
  Clone ID: PAT_MRT4530_87888C.1.pep
NYPSWPAFSTCRFWQILGLPKFIRRSPFPPFAHCEWPKGPPLYRLFKRLGCGGCEWYAPCTGQLRRAGWVGSLTLLSRLASPFSPVALKLVHSFAAPMEGFPAHALHGGFFLG

SEQ ID NO: 191583 - protein, 185 aa, Oryza sativa
  Clone ID: PAT_MRT4530_87889C.1.pep
MASIIVLASVLLLDVIAFGLAVAAEQRRSKATVTPDSEKLYDYCVYDSDIATGYGVGALLLLAAAQAVVMLASKCFCCGRGLKPGGSRACALILFLFAWLTFLIAEACLMAGSIRNAYHTRYRGMFVGESVSCETVRKGVFAAGAAFTFFTAILSEFYYVSYSKSRDAAGGAPYGGSNIGMGTYS

SEQ ID NO: 191584 - protein, 94 aa, Oryza sativa
  unsure (1)..(94): unsure at all Xaa locations
  Clone ID: PAT_MRT4530_8788C.1.pep
RADLLATYSYLLTSFAWGFVNGAKAALVLAVSLLVVAVASACTYCPEPPSPNPKPPAPRPPTPGGGAGXXPRDALKLHVCANVLGLVKAKIGAV

SEQ ID NO: 191585 - protein, 183 aa, Oryza sativa
  Clone ID: PAT_MRT4530_87890C.1.pep
MAGGSTSSSSSWGPSPALVTAVVALLGLGLAAYIVGPQLYWHASEALGRSTGACPACDCDCDARPLLALPEDCSKQFKDVKSRASGEETEKSFTELLIEELKQREEEATQAQQQADVKLLEAKKLASQYQKEADKCSSGMDTCEEAREKSSEALVEQRKLTALWEERARELGWKPGNIKPHQT

SEQ ID NO: 191586 - protein, 70 aa, Oryza sativa
  Clone ID: PAT_MRT4530_87891C.1.pep
QRQTAKSYFHGQPCIYICCHEPWYFSPSEIQICQAIMQGDTPISGHQTKNRVIRREHQRWIITLARVDSV

SEQ ID NO: 191587 - protein, 60 aa, Oryza sativa
  Clone ID: PAT_MRT4530_87892C.1.pep
MVETMGGEQGLGLPHNLSRKMKIEFRILVVSLEPMKDPMKRTRDEHRWCLQNGAAINVHN

SEQ ID NO: 191588 - protein, 408 aa, Oryza sativa
  unsure (1)..(408): unsure at all Xaa locations
  Clone ID: PAT_MRT4530_87893C.1.pep
HGVLSDRTGIYPKNLTNPHSVRLLGKGLVLTDGDEWKRHRKVVHPAFNMDKLKMMTMTMSDCSRSMMSEWESELGAKGGLAEIELSRRFEELTANVISHTVFGSSYKEGKQVFLAQRELQFLAFSTFLTVQVPGFSSYLPTMKNFKTWSLDKKVRGMLMDIIKTRHANKDVVGYGNDLLGLLLEACAPEHRESHPQLSMDEIIDECKTFFFAGHDTTSHLLTXTMFLLSTHPDWXEKLREEIAMECGDEMPTGDMLNKLKMVNMFLLETLRLYSPVLLIRRKVGTDIELGGIKMPEGALLMIPIATIHRDKEVWGEDADEFRPERFENGVSRAAKHPNALLSFSSGPRSCIGQNFAMIEAKAVITMILQRFSFTLSPKYVHTPISVITLRPKYGLPMILRSLKVKRDL

SEQ ID NO: 191589 - protein, 59 aa, Oryza sativa
  Clone ID: PAT_MRT4530_87894C.1.pep
MQPMQAYDEACKEQHWGDVDAADVGFSAGAGFTGLLLDGSLNQIQRPAGRDAEADREFQ

SEQ ID NO: 191590 - protein, 926 aa, Oryza sativa
  Clone ID: PAT_MRT4530_87895C.1.pep
GRLLQGVPSRPPLLPSAAASASCGRSNRRRSRGSATRRLAPAAASALGSIAIVWIGLDLEPSFALNLFPDGYSISDPGKRLLVSAKGMLLFLIGDDPQKRPYSKASRALFSDIEHGCLPQVILGDMPCKFRNGTIVCEVRDYRPFLLQNSVKKIDLGLNKGRQKIKATSIDNTSADPPENCKPKEFITCEGAVVCIENEAPEGLPRGILNGLSMDCPLALQIKKAQSAAGSDPDTAIQYSSTLMNSSVSCNIKQSASCTPAPDLLLQSKQAQIAILQVDHENEQPQKETVQLQNRKEHSNLPREIHDCQSCRPSNKHSLLSSESTKCHFQKSIRSSNNKGLNLVSPNQRPVKVNLDQTTGSKDMRVQQQKSLSAFTADCSHPSSETNNSCVEKIPKEVNYSTVRLKDRNLPSTVGPDNYCVEELKDRTTPSVISCSASSRKAPSKPPKVVTEPQPSSKRKVLGVYTYLYQEIDSNEKKQKKADTQSNTPCENVSPGEPDVTDGISSELGISPDIESCIGDPSYTIEPDIEKILSEVILTSKRHGLNERAAKLDGSERSWPLPPSKFFLSENTADIAYTQNEIMSNYPTGRTMNTRKIRRLSFHPVQYLCRGVVDECHYTLRLLESEAPDDHQVAVETIYGDEHVYISTLPTSHHANKLVDQFILLMRRDGYTLCNDIREQYEDAPQLGYLTGGYPQYPIARTMVINGSNNIDCTFHNGPPHVHANTQQQWMQAQQCPTLPSVQTNFWNPYHPGQQHYTGGILNHGGFYANRAFSMDMDQHQHVQQRQGVGWFPNGVFSMDLDQYQPVRQRQGVGQCWHCRHDIPGFFSERSYATHASTGSYNQWRQISTPLGGKVYQWDLPAFDRRVCGCPPVNYAGSSTPLSTLHPVGSPPMSSQSFGSNDGSLTSTPVQLQVPLGYQCMSHGMW

SEQ ID NO: 191591 - protein, 94 aa, Oryza sativa
  Clone ID: PAT_MRT4530_87896C.1.pep
GIRHEEVSRRMAPQRGRFVSWSAGGCCCWQRHSHTHPQRHSSSCSLRGGSCTCVFLFVSKLRCTPVFGKKKEGSLLLPSRRRSHHSLILFPPFF

SEQ ID NO: 191592 - protein, 106 aa, Oryza sativa
  Clone ID: PAT_MRT4530_87897C.1.pep
DMVVSSTNTGDYTVYGRVDFCYSASLLDHRHPTIFKATSFHDLEEGYHKKQSPICYASKSISPLKPSVYLRQQCQLHMHAGTGQKRLLHLLDWPSLLNFGSSRPLL

SEQ ID NO: 191593 - protein, 82 aa, Oryza sativa
  Clone ID: PAT_MRT4530_87898C.1.pep
GRLQILVAFVNIGCYYLVGIPFGVLFGFKLKLGALGIWMGMLTGTLLQMAILFFIIMRTKWEAQAILAEKRISELVETTAND

SEQ ID NO: 191594 - protein, 167 aa, Oryza sativa
  Clone ID: PAT_MRT4530_87899C.1.pep
TQRTGGKGPAKRKGHGGENPKNPPQKGAKKGGNPKNKPEGPRFKKQTSGAPSLKTPPAKNAINATQKKLGQPRGLPNQQVEKAGPPNLFTGPQKKKNRLPPPPQKAGYPQKPPPPIFFLNKFGHFFFIYFFFIFFFFFFLFIFFFIFFFFFFFFSFFFFFFFFFFFT

SEQ ID NO: 191595 - protein, 1636 aa, Oryza sativa
  Clone ID: PAT_MRT4530_8789C.1.pep
MPRYKPEYLFGFEGFVQELRTIGFGTAPLYAQIPHDRHEEKCRVKVTLNSNSEDIPSVMFEAGGGNYIHACQEVARIAIGELRDRYSDQLADTEYRYHPRQPQGSDRGSYLETEGIENDATTRHLVEMLWAMDETRAEVVLAAQDREDRNRGKICRLEDKVDRLKKELAALKGEAPPQKARIHLTARKRALFVPRYQLAPKVRVVEKEVTPALADPPVVNNKLAEFIRVRPPTFSSTTNPVEAGDWLHAIEKKLDLLQCTDQEKVSFASHQLHGPASKWWDHFRLNRTTAEPITWLEFTAAFRKTHIPSGAVSLKKKEFRSLTQGSRTVTEYLHEFNRLARYAPEDVRTDEERQERFLEGLNDELSYPLMTGDYHDFQKLVDKAIRQEDKYNRMEQKKRRIAHFKAQQGNSQRPRLTLGPQSMPQGGSSSVVRPQCQFFNNNAGNNIRNQAPRPVAAPTQQQPAKREQGSKPGVCFNCGDPGHYSDKCSKPRRVKVVPAQSNSTAPASKARVNHVAATEAQGAPDVILGTFLVNSVPTTVLFDSGATHSFLSMSFAGNHGMEVEDLIRPLMVSTPSNQALSLQRSPSVRIEIQEVPFLANLILLESKDLDVILGMDWLARYKGVIDCANRKVTLTSNDGRVVTVHALSSESLRSRLNQMTLEEIPIVREYPDVFPDDLPGMPPKRDIEFRIDLVPGTTPIHKRPYRMAANELAEVKRQVDDLLQKGYIRPSSSPWGAPVIFVEKKDHTQRMCVDYRALNDVTIKNKYPLPRIDDLFDQLKGATVFSKIDLRSGYHQLRIKEEDIPKTAFITRYGLFECTVMSFGLTNAPAFFMNLMNKVFMEYLDKFVVVFIDDILIYSRTKEEHEEHLRLALEKLREHQLYAKFSKCEFWLFEVKFLGHVISAGGVAVDPSNVESVTNWKQPKTVSEIRSFLGLAGYYRRFIENFSKIAKPMTRLLQKDVKYKWSEECEQSFQELKNRLISAPILILPDPKKGFQVYCDASKLGLGCVLMQDGKVVAYASRQLRPHEKNNPTHDLELAAVVHALKIWRHYLFGTRTEVYTDHKSLKYIFTQPDLNMRQRRWLELIKDYDMGIHYHPGKANVVANALSRKGYCNATEGRQLPLELCKEFERLNLGIVSRGFVAALEAKPTLIDQVREAQINDPDIQEIKKNMRRGKAISFLEDEQGTVWLGKRICVPDNKDLKDAILKEAHDTLYSIHPGSTKMYQDLKERFWWASMKREIAEYVAVCDVCQRVKAEHQKPAGLLQPLKIPEWKWEEIGMDFITGLPRTSLGHDSIWVIVDRLTKVAHFIPVKTTYSGSRLAELYMARIVCLHGVPKKIVSDRGSQFTSKFWKKLQEEMGSKLNFSTAYHPQTDGQTERVNQILEDMLRACALDFGGSWDKNLPYAEFSYNNSYQASLQMAPYEALYGRKCRTPLLWDQTGERQVFGTDILREAEEKVKIIQERLRVAQSRHKSYADNRRRDLSFDEGDYVYLRVTPLRGVHRFHTNGKLAPRFVGPYKIVSRRGEVAYQLELPQSLAGIHNVFHVSQLKKCLRVPTEEANLEQIEVQEDLTYVEKPIRILKIDERRTRNRVIHFCKVQWSNHSEEESTWEREDELKSAHPHLFASSSESRGRDSV

SEQ ID NO: 191596 - protein, 422 aa, Oryza sativa
  Clone ID: PAT_MRT4530_878C.1.pep
GTSGGLRAAAAAAEGGMEQQAAPSSSTSTSTNSSRSTSDHHAAAAAAAAAAAAQVAHQHHPFYYAAAQGGANTMPAPASFMGSLAIVPAAAAPGGGGGQVQAAAAPVASSEKKAVVAAGAGAKRPTKDRHTKVEGRGRRIRMPALCAARVFQLTRELGHKTDGETIEWLLQQAEPAIVAATGTGTIPANFSSLAVSLRSAASHSSSPRAAPFHHLQQQQQHDVAAMLGFHHHHHQLLPPPPPHQHPEPTPQDPGAGEFMRKRYREADDLFKDTSRQDPVDGATGEAEQKARAAAAAAAPPPTAPSAMWAVGPNTTGATAAFWMQPAWAFPHGAGAGAAGNTVQAPLQFMSRSSFPTAMNVTMADNNNSSNNNLGMLAALNAGGGGRSGEHQHQHEGQSPAEMDHQRRANGGGGEAGGAASSQ

SEQ ID NO: 191597 - protein, 478 aa, Oryza sativa
  Clone ID: PAT_MRT4530_87900C.1.pep
MEGQGLVSRSWQESKLLWRVAFPAVLVELLQFSIGFVTASFVGHLGVVELAAVTAVESILEGFAYGVLAVGAGRLDVLGLYVQQSWIVCGATAVALTPTYAFAEPILRSLLRQPADVAAVAGPYALWSLPRLFAHAANFPLQKFFQTQSRVWALAAISAAVLAVHAALTYAAVVRLRYGLRGAAVAGNLSYWLIDAAQFVYLVSGRFPDAWKGFTMTAFSNLAAFVKLSLVSAIMICLEFWYYAALLILVGLLKNARLQLDIMSICINYQFWTMMVAMGFSEAISVRVSNELGARRPKEAKFSVAVASLTSAMIGAIFMSIFFIWRTSLPSLFSDDKEVVDGAARLGYLLAVTVFFGNIGPVLSGVAVGAGWQILVAFVNIGCYYLVGIPFGVLFGFKLKLGALGIWMGMLTGTLLQMAILFFIIMRTKWEAQVPYLINESLFVYMEISFIWINEGRLLQAILAEKRISELGETTAND

SEQ ID NO: 191598 - protein, 79 aa, Oryza sativa
  Clone ID: PAT_MRT4530_87901C.1.pep
MATAAEVTDSGGKSDNAGLEKDGSATLGPGKATMTRVSALANLRAADPAALPSALGEVMAMAGGDGRLNVPYAKILFRT

SEQ ID NO: 191599 - protein, 240 aa, Oryza sativa
  unsure (1)..(240): unsure at all Xaa locations
  Clone ID: PAT_MRT4530_87902C.1.pep
MRAPPVQPPGYNDFCNQSSWSTWLCHQASGCYCXSPWAAVPPSMXTSTSCCNAERRSPQHGLTADEFTPLHRHKRCSCVVPSDHSLVPLVVFIAVRVSMPSSSALVIVSHSGYLYMATDVAVQAVGPVTSPLSSSSMSHHQHRRIFLDYTSLFSGNXVLLRQFSLYTVLSCPRVWQTRYDVSSFTVRLYRIFGVIFLNXAMIVSPSSSLARPRAPWSTTPXPCVYDSSLVSHTRLAARLL

SEQ ID NO: 191600 - protein, 86 aa, Oryza sativa
  Clone ID: PAT_MRT4530_87903C.1.pep
YLCCSGLNPQLLLFPFLLETQVKNNPASAISFTQTPPSSCVISNCGHSCSTTNEQCKGFQPFSLVPPVMLIILLMVPNQLILSQTA

SEQ ID NO: 191601 - protein, 80 aa, Oryza sativa
  Clone ID: PAT_MRT4530_87904C.1.pep
YPFHFPNKVRTLIHVDVLLSGAADSIACSDLAKEVGDGKHRVMASLDVRMQISLTPYHICVECAHRKHSHFLNGRLLLPQ

SEQ ID NO: 191602 - protein, 102 aa, Oryza sativa
  Clone ID: PAT_MRT4530_87905C.1.pep
NHPLVTNIFLQNLEQKHKSEPYYSKQICFNFPIKFTGTPAPPLVRFSLNSVVKAWAAFGQKALFFLPPRRFQPGLFRFCRTPHKIFTRVFPFGSKPFFVGPL

SEQ ID NO: 191603 - protein, 155 aa, Oryza sativa
  Clone ID: PAT_MRT4530_87906C.1.pep
MDRAFERRPISRHNLIFLQATLSVRLKLCFCAKNVDPTADLKKYIEDLECLDRSSKFYAVAVNNTFMKQDRVYFTKEFSKDYLKPLMDGKETISIGVQMAGGVSKNMMLQMSTDDRCNLKKVWAKFATRNHIYLQSLCTFHFNKTTRLEATFDVL

SEQ ID NO: 191604 - protein, 63 aa, Oryza sativa
  Clone ID: PAT_MRT4530_87907C.1.pep
FDQGCFIYSFGPTFTNVRWVSMSGLLACNGFSLCFMCAYMYSTAAHMWPVCFSYRLTKQSVCF

SEQ ID NO: 191605 - protein, 50 aa, Oryza sativa
  Clone ID: PAT_MRT4530_87908C.1.pep
ANILIKGYLDLNLTYNVPWHNMFTCLSPNIILIQSNFPLKVPRFYITNLL

SEQ ID NO: 191606 - protein, 104 aa, Oryza sativa
  Clone ID: PAT_MRT4530_87909C.1.pep
MGRIKSSSGRCSTARLEAVAVLVVVFGVASSSLRGCIAQQSGGGLTRGSFPEGFVFGTASAAYQAVLAVVRGKFRGNDRNHLHHQQRFTCRVRLRGEDENAWGD

SEQ ID NO: 191607 - protein, 311 aa, Oryza sativa
  Clone ID: PAT_MRT4530_8790C.1.pep
MISHLATGDNPYLDGVDDPNKNRTFKTSCFNTRKLSPVFVAGPNMDEAPPVWVDRVGFKANITESFTRQSKFTYGLVVEEITTRDETNSICTHGSRAMPSGGLSMDGPPTTLSGTGIDRMAFLQANITRDNTEFVNGAVIGDRCIFQLDQGLGIGSKNPFFNRHQLTLTKFVNLNKQEKGAGKPLPAVLVLHGHYAGCVGDLPSYDAFTLGGPYSVRGYGMGELGASRNVLEVASELRIPVRNTYVYGFVEHGTDLGSSKDVKGNPTEFFRRVGHGSSYGLGVKLGLVRGEYIVDHNAGTGTVFFRFGERF

SEQ ID NO: 191608 - protein, 833 aa, Oryza sativa
  unsure (1)..(833): unsure at all Xaa locations
  Clone ID: PAT_MRT4530_87910C.1.pep
MAKDESMMVAATYFWSTAMNTFLFSQGPMTPTLLDVIMITGLDVTSSANLTILNIQSTQEFKIRSIGGWSGYVAKNMGTRPIFAREHAAFLMMWLEKFFFHGPSCGPTANWQHVDKKQFPLGKYLLGYLYQTLNTAITKMASGVSIGXRGSFGEAASVSIASKLSAEPFREWFNNFYDGFPKNTRIXLHTKDMALTTEYSPPHHSNSGVEIQYAPGLLLNGSGLSPPVIGYNAPKTSTLLHGMPRVPIAPDAGRKKRAKSAAAPSAAKKKPKKQKTTADELPAIDSDVAEFLKGETMAKHVDEAAEHVSETREQTPPADPPAPQRTPSPPPIRPPTPISKSSEPTPSVAGGHHVEEKEEVAAPAHAVLLKGSLETLVASYGSIRDRHNEIHDKIPDELADALTPAANLEQHRLKLEKAQRRIADRRERRDLEATIQANRVSMNEEKAKLDELEAGPDSTQTIIDQLNAQKIELLAELEQCNAQIALEQQKLADLPKAIEDQKSKLKASSKHLADLTKSRKPYSKCLPRHRYIQPPLGCLVESVYVTFPLALDCARGNEMVMLNIYFFTINEIYRLLLSLHISVESNILKNPREKQSMLVPPITDILQGAQNIHHEEKSNMIEMPSPSLTKEEEKTDAPTLSEEGIEGKLNGVDITQEKHVIANHTTSSFSGFDWMKHVILNGLCEEHHMEKPRMVFREEGEDDVTMATMDTSVAHIMDEQQDIKCKSSKYWNPIRPRATLLTSNGRRICIQAPFSAHECLIESSQSPLSNGSSLITKFHPGQPQMKKQAAASPVMGLWACNYFWDPGPCRAHVGNKVDLHRQDQQPTERCIDR

SEQ ID NO: 191609 - protein, 194 aa, Oryza sativa
  Clone ID: PAT_MRT4530_87911C.1.pep
MADKFLEVTVERTLQYGANRHGGVASPDYDQRVVNRERDPTWTTKSQAAKRNDGDTAWRAERCGQRRPRAAGSKCDARDRTIPFPGKICSANHGTRLVTTYGRFKQEPSRRKARARAGPGSRHGKGAMAHRSIPGIVPMKARPDTAPGWHFRRGAGMESAWWHVEAEPKSGALTALLSGWSRGAARQGCGDTTT

SEQ ID NO: 191610 - protein, 177 aa, Oryza sativa
  Clone ID: PAT_MRT4530_87912C.1.pep
RSSPAELRPSRYESQKRRDWQTFTQYLAAHRPPLELRRCSGAHVLEFLRYLDRFGKTRVHEPPCPSYGGRSPSAAGPCPLRQAWGSLDALVGRLRAAYDERHGRAGDNPFAARAVRLYLRDVRDAQAMARGISYHKKKKRRGGNMNGARGGGGGGARAGVNDGDATAPPVAVTPGLP

SEQ ID NO: 191611 - protein, 91 aa, Oryza sativa
  Clone ID: PAT_MRT4530_87913C.1.pep
HRIVQLGGEGSSEQSAPRHRAVGNDMRHSSCRTWSKMNLQLIAIYRWRGVNVAERELTTLRRSQTTVTGELMKSCHMLLPGHTPKDLRLRY

SEQ ID NO: 191612 - protein, 277 aa, Oryza sativa
  unsure (1)..(277): unsure at all Xaa locations
  Clone ID: PAT_MRT4530_87914C.1.pep
MSSSSAAALGSDDGCSPAELRPSRYESQKRRDWQTFTQYLAAHRPPLELRRCSGAHVLEFLRYLDRFGKTRVHEPPCPSYGGRSPSAAGPVAAAAAACQCPLRQAWGSLDALVGRLRAAYDERHGRAGEPDAVAGAGAVATDSTSSSSAAAANPFAARAVRLYLRDVRDAQAMARGISYHKKKKRRGGNMNGARGAAAGGARAGVNDGDATAXAGGGDPGATSAAAATVPQRCAVRVLRLRERPRGSTWRPWRPWRRRRRLLRRRRLLAISVQHLQL

SEQ ID NO: 191613 - protein, 879 aa, Oryza sativa
  Clone ID: PAT_MRT4530_87915C.1.pep
MGKRSQRLARRQENIGCMWGLIGMLYFRRDAKFLLDRKQGSRRHTFGGLSGRRHSRKKSRDFEETDEYGEDNIEECDTRKQTVKRLMEDELGKVKQVKKIPKEEVQRILADLGHDVCLEKSSMQSTKQNRAKSHSTSTAMASPSGLLDPSGSKSMKQAEEDDLELSLADFVGELYGYHDDCKNKSELCPELKSHIHTKLSELKSVPCQRAYEESPDWGQREHFYEKYICNSRSYQSNKLVDAPDMLSPEKELFLKTLQKPSPHTLEKENTQNNQNRQVVTKLEPRKILEKGENTKNSKQHEVAIKTHSKEGRNIFFWRKDKSIMKGTSEGTNSSKMVNKIVILKPNPRGIDTTVATASTCLDQQSCTIQSPKYPATESSKFSIKEVRRRFKIVTGDTRRGRPSVYEDDLQRDSQRINDSVFKVRKDSKQSDKDNLRPLTSGKQKQRNDGLGEINGDIITSKDTSIFYEEAKKHLTDILEYNSHTTKHPTVHTSKSLIGMLSLPQRNASSPRSSPRLKGRIDLSPEEINISAIQQDERTEYAKERDLSDEDSGSVACGNSEVLDGKADQDRHSMKQETAQDGDIMHIEEIDKPACSETICSEGITLKEQCTCTSSLELIEGAEPGREHAGMLLSYPENVVESLEHQEPKTPRSSASLELISQISPEGNHEKQEQPSPVSVLDPFFCEDVDSPDHETMIKCEMHQDMMRPHIPDAISDQWVFWEDEDARLSYIKAMLELSELCTYQNLEVWYLEDELISPCMIEELHQGNQTDDLKLPFDCICEAITIIQETYFRNPPCLSFLMHKIQPPPMGENLIQEINKHIERHLHNQFPRTLNQLVNIDLEDGTWMNLQLESEEIIVDTWEFILDELLEEVANDLLI

SEQ ID NO: 191614 - protein, 87 aa, Oryza sativa
  Clone ID: PAT_MRT4530_87916C.1.pep
MRRNCYFNVVDNDGWWLLEDGDWLRGRLAVDGDALAVPPEPTNTMGLEECVGSMLETEDWRIQASGYSTIDFMASINKLDLKLLWTI

SEQ ID NO: 191615 - protein, 99 aa, Oryza sativa
  unsure (1)..(99): unsure at all Xaa locations
  Clone ID: PAT_MRT4530_87917C.1.pep
MVAYMLHQYQMVGRALPSTCDEHTKIYRMKLCATNXGRSKSKLXYLLRYLKKAKNSNGQMLGIKDIFXRYPTTIKNYSIWLTXHTRTRFHIMFKEYRDT

SEQ ID NO: 191616 - protein, 88 aa, Oryza sativa
  Clone ID: PAT_MRT4530_87918C.1.pep
MTIRVRVEVERRESTVARGGAGGVDVKVFDMALWRHERSGPSAAAKSSSRLRVHQADGCRLDPPAIDIGTAGFADPELWKLNAGVEEL

SEQ ID NO: 191617 - protein, 153 aa, Oryza sativa
  unsure (1)..(153): unsure at all Xaa locations
  Clone ID: PAT_MRT4530_87919C.1.pep
TSPASSHGAAPAASLLLRSPRRRRRLRATKKHKAPPPXSKPAQPGGGKQKKKEWSKGKQKGKEGETVXYDKDTYDCSTLPRCTSTTPSPPPSTPRASGFLSERLRINGSLARXAINDFMTRGLIRMVSVHSSQQIYTREPTPKCEGDMHLCLP

SEQ ID NO: 191618 - protein, 886 aa, Oryza sativa
  unsure (1)..(886): unsure at all Xaa locations
  Clone ID: PAT_MRT4530_8791C.1.pep
MATRARPPLVLLLCLCLASCLSSAIGGVSAAGNGYRTTAFLVDEEGRRLRAELAAVAGAGGGSTAAYGDDVQRLDVYASLETDSRLHVRIADADGPRWEVPQDVIPRPSPEFFLQTSRPGXRVLSTATSDLTFAIHASSPFRFAVSRRSTGDVLFDTSPNLVFKDRYLELTSSLPPPGRASLYGLGEQTKRTFRLQRNDTFTLWNSDIAAGNVDLNLYGSHPFYMDVRSGGGGAAHGVLLLNSNGMDVIYGGSYVTYKVIGGVLDFYFFAGPSPLAVVDQYTQLIGRPAPMPYWSFGFHQCRWGYKNVSDLEGVVAGYAKARIPLDVMWTDIDYMDAFKDFTLDPANFPADLLRPFVDRLHRNGQKYVVIIDPGISVNATYGTFIRAIKEDIFLKWNGSNYLGVVWPGNVSFPDFLNPRAAEFWAREIAAFRRTLPVDGLWIDMNEISNFVDPPPLNALDDPPYRIDNSGVRRPINNKTVPASAVHYGGVAEYDAHNLFGFLEARATHDALLRDTGRRPFVLSRSTFVGSGRYTAHWTGDNFATWDDLRYSINTMLSFGLFGIPMIGADICGFGGNTTEELCSRWIQLGAFYPFSRDHSAIGTVRRELYLWESVARSARKALGLRYRLLPYLYTLMYEAHTTGAPIARPLFFSYPGDVATYGIDRQFLLGRGVLVSPVLEPGATTVTAYFPAGRWFSLYDFSLAVATKTGKRVTLPAPADTVNVHVAGGNILTLQQPALTSSRVRQSVVHLLVALAEDGTATGDLFLDDGESPEMVGARSRWSQIKFSGATESGGSVVRVRSHVVHDSYAPSRTMVIAKVVLMGLRSPVPPKGFAVYANGVQVNASTAVDGGGGGNPEKGALGVAHVGGLSLVVGQEFDLKVVMTY

SEQ ID NO: 191619 - protein, 174 aa, Oryza sativa
  unsure (1)..(174): unsure at all Xaa locations
  Clone ID: PAT_MRT4530_87920C.1.pep
MPHPPPRIETLTRPCSTPIPPPRSVIXPQPRQTIAHTVPRRPHRIVPSSQAPTRNPHQPPPAXPHERPQTPTARDIAAPSLEPRTKRTEQITPPPPSAAATPRWWGPIAGAAADTPPGEVPPPLLSPSPPPPPAPAPAAITAAPASINQIRDAARCAWSGVGGVGKKGREGKGS

SEQ ID NO: 191620 - protein, 63 aa, Oryza sativa
  Clone ID: PAT_MRT4530_87921C.1.pep
IVLHVCASELVYYKIEPDEEIQNIKTIEFAQCGYEENNDDMVMISICMGSMDMRCISDLTSKV

SEQ ID NO: 191621 - protein, 199 aa, Oryza sativa
  Clone ID: PAT_MRT4530_87922C.1.pep
MTEPHGGGDRFGCELVGSRPPFSTSGGGLFPRGQRIWPPASSLSPPLFSRRPRDHQRQGGGVLNAIARWKPELIRISSSYLVPKSVVSIIYYLRFTISTGNYEGSLLSLYSPARDQQGSCDSRVRGSRARRETGAPRPFALAPPLVSGVVGHLECAINAVGVTRPGCHHVVGGLGNGTDFLPLRLTPGAPRGLRKGDLR

SEQ ID NO: 191622 - protein, 81 aa, Oryza sativa
  Clone ID: PAT_MRT4530_87923C.1.pep
PHVGRACVVVEHWCVSRGFAGGERRVKTQSGLGRTDNDGSFPLLRALSCCLTPQGYVYSQFLVEFDFRRLNKWQHPLGYYS

SEQ ID NO: 191623 - protein, 181 aa, Oryza sativa
  unsure (1)..(181): unsure at all Xaa locations
  Clone ID: PAT_MRT4530_87924C.1.pep
MAHSRCPTTPDTSGGARAKGRGAPVSRLALEPRTRESQDPWGHGLWSHGSTSDARTGGSGDRGSAGRFRACRRTARSAAPGFGNGEAMTRGHALVEPKPRASPRPVARSSSTAAPRHRRSRRREEERNRHRCGPRRQIWRAXRPDPASPPPPSSPRRRRARPHHCGGRSTAASSPRPDPLS

SEQ ID NO: 191624 - protein, 97 aa, Oryza sativa
  Clone ID: PAT_MRT4530_87925C.1.pep
VVRLCPTIASFFCSVVAVFLFWLSFPGFFRCPCSFSFRLVFGLVVALPLALAGFFALFCIFFFFFPPPRTVCSLCLYVFKYVVVCYNPKIIYITSIL

SEQ ID NO: 191625 - protein, 664 aa, Oryza sativa
  Clone ID: PAT_MRT4530_87926C.1.pep
MTIPTLPRRTTTPQRTHSQQGSDRCELIFFFFSPMLRLVGIGERLLAVGTNRRAAYFSQPSHRSGYYTAARDNGLSAKRKIPTVFSRMFSHYKVIVRKNKAGDHKCRNRISRGFRTFSGTVANSSATQHAQLAWKRLSHTYMYSGPRFPLISRAACALSFSFTRFHVVPGVMALAFGKFALSRPVLADSPHLPTMEGIVTNARDTRQFLSSIVWSIWEGVTLLIRAVHLAILFFPATALSPFADTFSVGFRRRWLRLVRRTLEIAGPAFIKWGQWAATRPDLFPSDLCVELAKLHSAAPAHGFAYSKATIEKAFGRKLSEIFETFEEEPVASGSIAQVHRATLRDQHTEKHVAVKVRHPGVGESIKKDFLLINLLAKASNVVPGLSWLRLDESVRQFAVFMMSQVDLSREAAHLSRFIYNFRRWRHVSFPKPLYPLVHPSVLVETFENGESVSRFMDEIEGNARMKRDLAHIGTYAFLKMLLEDNFIHADMHPGNILVRLNERKPKRKLFFRPKPHIVFLDVGMTAELTRDDRDNLQQFFKAVATRDGRTAANCTLQLSKQQSCPNPVAFIEIASFLNQELDKTFSFWGTPEGDIFHPVECMHQLLDTVRRHKVNIDGNICTVMVTILVLEGWQRKLDPGFDIMHTLKTLLLDKDIKQPVDFFS

SEQ ID NO: 191626 - protein, 104 aa, Oryza sativa
  Clone ID: PAT_MRT4530_87927C.1.pep
VPGSFPVWLPRWVPFSGPPCSRRVSPSPSSPCGPCLRFAASLRLVLRPSPSALAAALPACARVSSAPWVGGPSPPRASSSPSRGCVAVGGLPKRWRGSCLPFRS

SEQ ID NO: 191627 - protein, 784 aa, Oryza sativa
  Clone ID: PAT_MRT4530_87928C.1.pep
MSALQASLLLRPLPSPLPPRRRLPLPSSSASFPRAGHHRRLPLPLRALASEGPQPAPSPAPDPPPPELPAAPEAEEVVGTAAAEGGGKVEEEELEDLVEKGRAWVLALAAAVVAAARRFFDWVVSGDWMSWWPFWRPDRRLQRLIDDADANPADPAKQSALLHELNKFSPEDVIKRFEQRSHAVDSRGVAEYLRALILTNGIADYLPDEQSGRSASLPALLQELKQRVSGNEDKPFMNPGISEKQPLHVVMVDPKATGRSTRFAQEIFSTVLFTIAVGLMWVMGAAALQKYIGSLGGIGASGVGSSSSYSPKELNKDIMPEKNVKTFKDVKGCDDAKKELEEVVEYLKNPSKFTRLGGKLPKGILLTGSPGTGKTLLAKAIAGEAGVPFFYRAGSEFEEMFVGVGARRVRSLFQAAKKKAPCIVFIDEIDAVGSTRKQWEGHTKKTLHQLLVEMDGFEQNEGIIVMAATNLPDILDPALTRPGRFDRHIVVPNPDVRGRQEILELYLQDKPVSSDVDVNAIARSTPGFNGADLANLVNIAAIKAAVEGADKLAAAQLEFAKDRIIMGTERKSMFISDESKKACLFKLLYFILRELILTAYHESGHAIVALNTQGAHPIHKATILPRGSALGMVTQLPSQDETSISKKQLLARLDVCMGGRVAEELIFGEDNVTTGARNDLHTATELAQYMVSNCGMSDAIGPVHVKERPSVEMQSRIDAEVVKLLREAYGRVKRLLKKHEKQLHALANALLERETLTADEINKVVHPYQEEPQLSFQEEDFALT

SEQ ID NO: 191628 - protein, 134 aa, Oryza sativa
  Clone ID: PAT_MRT4530_87929C.1.pep
CYRPQEKQENRTNGPRQKNHGDKADNTNHKKQNNKNHPKTEKKEPKPPPQHECPENPPHPENPGNGQRDQHPPPGPHNQRGTERTQNLTKRSPKKINKRVPILATVRTSPTTQTRRKKPESPTNKNRPHIKRKN

SEQ ID NO: 191629 - protein, 240 aa, Oryza sativa
  Clone ID: PAT_MRT4530_8792C.1.pep
MMLGRTNYIYNEIASLPIQAKSATFGHLDPLVTLSFLATPPLDLSHSTLRSQRWGALEAHEGSDSSWELWRFSGVPLYILPGAPDIRHIILHISQKFLNKTNGQTCAKKSTVSNILKRREYLIVEELETAEINLKPNHANGGGIWGWWGGATTQYRHEDLNLEPNHNPAAGGRSGMKELATSPLCSKGEGGMRGQVFVGWGASKSWTRTGSVGRMRMQILTQYAHPKSLEDGYLCSNGQE

SEQ ID NO: 191630 - protein, 84 aa, Oryza sativa
  Clone ID: PAT_MRT4530_87930C.1.pep
MSFVISFTPLIIITDAIIDNNLISSWFGMVYSWFGDRTVQPGWLFRMVGPVQQGMLYSVGLILFNYYLTVLLNSQMFAKCCFCK

SEQ ID NO: 191631 - protein, 437 aa, Oryza sativa
  Clone ID: PAT_MRT4530_87931C.1.pep
MLVFAAFFAAGLRLPCDDFLPSVLEMYEVKLPQLSPSAFPKLAVFAWMCRTCGFAPTAELFAVLFTACATTKDVSTPAGPKKTVFGCVSFMLWPECSDAWPVPASMAKWNRNWMQKWFYVDNPYPAEDDKANWLRFRRLPVAVVSKPSVEVDGTLESRLILLLKVACRLSTRDLCEQFFRSLEDAEAEAANMIRGLITAEYARLLQRQSNGRANRVYNGKLASRANPAKVDDDVEPSKKRKRAIAKGGPVQTRRAAKDAAETDADDDDDCEREEVLDDDAGSRGYTPSPIRAKTRAGSSTSPPCPQDVAGANVLLAIAGAGSMAGAAARKKKKEVVQVSGGFSDSVASLGGAPTSPALRRPLRRKRLSLPPPASDADAPTGGSVSATAAASNLALQPAGANVFGTDGVVTLPFVSRQREGKSLAVEMTVFDISLTAC

SEQ ID NO: 191632 - protein, 147 aa, Oryza sativa
  Clone ID: PAT_MRT4530_87932C.1.pep
GRGFGRGFTGNGYSCWNGPVRSHALFVDENKCIGCRECVHHAGETFAMDDVLGSAHVEVQFGDQEQKIQVAVESCPVNCIHWVMSEELAVLEFLARPQQKEAHGVFGGGWERPRDVFAAANNFTKRLQREEQQDMARQQRYNNGKKK

SEQ ID NO: 191633 - protein, 262 aa, Oryza sativa
  Clone ID: PAT_MRT4530_87933C.1.pep
MASASASLSLAFSPLLLPTPRPRPYSRPINPGFPTPLRLSLACSPPSRRAGPVAAVPDGVAVADVVEKDWSFLDAAAAAAAAGGSLPRALAAGALSPASRVLAVTPAPSFVDALLSGHPCELLVAAHESLYVLAGIKEGHDEVRCFHLEGGGGGRGGGVVEGVPERFDAFDAVFVCYFPGMGVSAAALLKSLAKRCSKGGRVVIFLDQGRQSLEQHRREHPEVVTADLPTRPSLEKATAGSKFEILEFVDEPTLYLAVLQFQ

SEQ ID NO: 191634 - protein, 731 aa, Oryza sativa
  Clone ID: PAT_MRT4530_87934C.1.pep
MSLGPKVDYEFDESSHTLKKIMDRGEKHFSSNLSTLLKWSPFTTEDDLLNQFGDMGCHGTKLIVFNLWFNDAWEMELDFASDEEDIMISGAPAMPDGKKTVGRLNHMHVANRFRYSLRLPKHFKVILCGQVVEPHHIVNDLIYCECIKYRPQVGINIEVDVITTIGYLRGAPKLDIHGFNVYHKNRLILPFWCAHPDKSHSKGIAGVLEANFIRPTHDKQDFEKTGLFHRLETRLKEMTLEYWKHHAHLVGYARVTKALPPAHYASTVARDDSLAAQASTVAYDDNSRARESVLFDMSSNGESSKRRNSCSVIHWRAQKRQHINDYANQPPDVNAVQMQDERIRHLICQKKVLKDECSKLEASEQQLLCKADRLRNELLEWHEMYKKLTDEVKFYDGLYALQRCNHSSFPRFSLCTSKDKLIILDEALPAYERTRALGRDRMGYVWDIKELKEKMLGSGMPWPGDEGDQNVGSKHGWQLKRLGYAGAAVYDRLEKVRHNFCSLLKNLFGITTKLTACFSVPMDEEDEVVLDYTTDPLITDQGSKNQSSRALHGLLRNGSVQYELIRPIKYRPRSIIRCCSTTRGKAREDYYQVLGVTGHDYTLLLNEAYKVLMRNSPRNAGASGRGFGRGFTGNGYSCWNGPVRSHALFVDENKCIGCRECVHHAGETFAMDDVLGSAHVEVQFGDQEQKIQVAVESCPVNCIHWVMSEELAVLEFLARPQQKEAHGGTLM

SEQ ID NO: 191635 - protein, 59 aa, Oryza sativa
  Clone ID: PAT_MRT4530_87935C.1.pep
MKTEYVRHDAGASDKFDGKRGSRRTTKYTKEGTSASGAQLISAYAFLAQTPPRPTHGLA

SEQ ID NO: 191636 - protein, 47 aa, Oryza sativa
  Clone ID: PAT_MRT4530_87936C.1.pep
DAASVVMIGEARWWWLCIAINRKDIGRNQKKLLNYMINSPDYICESL

SEQ ID NO: 191637 - protein, 89 aa, Oryza sativa
  Clone ID: PAT_MRT4530_87937C.1.pep
MATAASNGDGDAGGVCDDDDRGKRFRAGMWPMVVGMVMVESTDPVVACPVPTAAWRLATCRRPASRGVHSADIFGVQVIFGGFRCGCYD

SEQ ID NO: 191638 - protein, 181 aa, Oryza sativa
  Clone ID: PAT_MRT4530_87938C.1.pep
MGSMRPKRKTTGRGGGRGGARRRRSAGGAMSGWGLSSTSRQCERQGSAWLGMAGAKEGRLGSVRTCSIAAGDGASVGSVREVTIVSGLPASTSTERLEMLDDYRHIIIFCIGGGHHRLRNYRSVTEFQSPGAAPAYCVVEERKEGERGKIDGELTSMNCDLMPLPSMGALVFIPVIVFFSK

SEQ ID NO: 191639 - protein, 70 aa, Oryza sativa
  Clone ID: PAT_MRT4530_87939C.1.pep
MEWRERGGEGADEGEDRHDGAIASPPWLPIATAFRFGRIGPRPTTPQPIEPDDPAVRPVNQKFDRFDGRS

SEQ ID NO: 191640 - protein, 1488 aa, Oryza sativa
  Clone ID: PAT_MRT4530_8793C.1.pep
MTRATVLRRSASETEARTRSTAMRRCRGRWRRAGRKTGATAAANRRSTATAEREEHGASTIPTARASGFHIEFYLFFCTILRMNFRVDLGRDIEASDWLHAIEKKLDLLPCTDQEKVSFASHQLHGPASEWWDHFRLNRTTAEPITWLEFTAAFRKTHIPSGVVSLKKKEFRSLTQGSRSVTEYLHEFNRLARYAPEDVRNDEERQEKFLGGLNDELSYPLMVGDYPDFQKLVDKAIRQEDKYNRMEQKKRRIAQFKTQQGNNQKSRLTLGPQSMPQGGSSSVVRPQRQFFNNNAGNNIRNQAPRPVAAPAQQQPAKREQGSKPVVCFNCGDPGHYADKCPKPRRVKVVPAQSNSAVPASKARVNHVAAAEAQDAPDVILGTFLVNSVPATVLFDSGATHSFLSMSFAGNHGMEVEDLRRPLMVSTPSNQALSLQRSPSVRIEIQGVPFLANLILLESKDLDVILGMDWLARHKGVIDCANRKVTLNSYDGRVVTVHALSSESLRSRLNQITLEEIPIVREYPDVFPDDLPGMPPKRDIEFRIDLVPGTTPIHKRPYRMAANELAEVKRQVDDLLQKGYIRPSSSPWGAPVIFVEKKDHTQRMCVDYRALNDVTIKNKYPLPRIDDLFDQLKGATVFSKIDLRSGYHQLRIKEEDIPKTAFTTRYGLFECTVMSFGLTNAPAFFMNLMNKVFMEYLDKFVVVFIDDILIYSQTKEEHEEHLRLALEKLREHQLYAKFSKCEFWLSEVKFLGHVISAGGVAVDPSNVESVTNWKQPKTVSEIRSFLGLAGYYRRFIENFSKIAKPMTRLLQKDVKYKWSEECERSFQELKSRLISAPILILPDPKKGFQVYCDASKLGLGCVLMQDGKVVAYASRQLRPHEKNYPTHDIELAAVVHALKIWRHYLFGTRTEVYTDHKSLKYIFTQPDLNMRQRRWLELIKDYDMGIHYHPGKANVVADALSRKGYCNATEGRQLPLELCKEFERLNLGIVGRGFVAALEAKPTLIDQVREAQINDPDIQEIKKNMRRGKAIGFLEDEHGTVWLGERICVPDNKDLKDAILKEAHDTLYSIHPGSTKMYQDLKERFWWASMKREIAEYVAVCDVCQRVKAEHQKPAGLLQPLKIPEWKWEEIGMDFITGLPRTSSGHDSIWVIVDRLTKVAHFIPVKTTYSGSRLAELYMARIVCLHGVPKKIVSDRGSQFTSNFWEKLQEEMGSKLNFSTAYHPQTDGQTERVNQILEDMLRACALDFGGSWDKNLPYAEFSYNNSYQASLQMAPYEALYGRKCRTPLLWDQTGERQVFGTDILREAEEKVKIIQERLRVAQSRHKSYADNRRRDLSFEEGDYVYLRVTPLRGVHRFQTKGKLAPRFVGPYKIVSRRGEVAYQLELPQSLAGVHNVFHVSQLKKCLRVPTEEANIDQIEVQEDLTYVEKPIRILETNERRTRNRVIRFCKVQWSNHSEEESTWEREDELKSAHPLLFASSSESRGRDSV

SEQ ID NO: 191641 - protein, 137 aa, Oryza sativa
  Clone ID: PAT_MRT4530_87940C.1.pep
MATMLCSFTPATRAPLLRTSSSSSSLGFATSQLAGLSLGLSAAATTAPSAAGPKLHPILARRICPFTDKKTNRANKVSFSNHKTKKQQFVNLQYKKLWWEEGKRFVKLRLSTKALKTIEKHGLDAVAKKAGIDLNKK

SEQ ID NO: 191642 - protein, 53 aa, Oryza sativa
  Clone ID: PAT_MRT4530_87941C.1.pep
IPGGGGPPPTNPEIGPGFNQKTEPGAGAKNPPKGPPFPRPGGEGYWALFPGGP

SEQ ID NO: 191643 - protein, 135 aa, Oryza sativa
  Clone ID: PAT_MRT4530_87942C.1.pep
MSWRQLQLGEVQASWKNLMTIPPRRGEVFPNGLDDGVRAPSNGAPAFSSNSLVMSVRKVAGPSKMIEKTSTVTEETATSVKASPAGFDGVALGGQCYRRLDGNSERLGVADTVDEMASWLTMALIHQDGMGGSAT

SEQ ID NO: 191644 - protein, 211 aa, Oryza sativa
  unsure (1)..(211): unsure at all Xaa locations
  Clone ID: PAT_MRT4530_87943C.1.pep
MCELDILHDSLYQFCPELHLKRLNSLTLACHALLDCKTLTLTELGRNLPTKARTKHNIKRIDRLLGNRHLHKERLAVYRWHASFICSGNTMPIVLVDWSDIREQKRLMVLRASVALHGRSVTLYEKAFPLSEQCSKKAHDQFLXDLGSILPGNTKPLIVSDAGFKVXWYKSVEKXGWYWXGRVRGKXYADLGAXNWKLSQLTDMSSSHSKT

SEQ ID NO: 191645 - protein, 437 aa, Oryza sativa
  Clone ID: PAT_MRT4530_87944C.1.pep
LDAGGREAAREGCGGRKGGVQLALTRSRQQVCNTVLFVYAHNKNEIKGSSSGATGKLAAHTHFIEHILSVLDFLNVLYCDQTNKLQLHLPNIQYVTYDEDGNRHLHKERLAVYRWHASFICSGNTMPIVLVDWSDIREQKRLMVLRASVALHGRSVTLYEKAFPLSEQCSKKAHDQFLADLASILPSNTTPLIVSDAGFKVPWYKSVEKLGWYWLSRVRGKVQYADLGAENWKPISNLHDMSSSHSKTLGYKRLTKSNPISCQILLYKSRSKGRKNQRSTRTHCHHPSPKIYSASAKEPWILATNLPVEIRTPKQLVNIYSKRMQIEETFRDLKSPAYGLGLRHSRTSSSERFDIMLLIALMLQLTCWLAGVHAQKQGWDKHFQANTVRNRNVLSTVRLGMEVLRHSGYTITREDLLVAATLLAQNLFTHGYALGKL

SEQ ID NO: 191646 - protein, 43 aa, Oryza sativa
  unsure (1)..(43): unsure at all Xaa locations
  Clone ID: PAT_MRT4530_87945C.1.pep
NPAYYTSPFSYSSCRRTLVSVSSRSTHSDDLNNKHINLFSAAX

SEQ ID NO: 191647 - protein, 590 aa, Oryza sativa
  unsure (1)..(590): unsure at all Xaa locations
  Clone ID: PAT_MRT4530_87946C.1.pep
MFVELDILXDSLYQFCPELHLKRLNSLTLACHALLDCKTLTLTELGRNLPTKARTKHNIKRIDRLLGNRHLHKERLAVYRWHASFICSGNTMPIVLVDWSDIREQKRLMVLRASVALHGRSVTLYEKAFPLSEQCSKKAHDQFLADLASILPSNTTPLIVSDAGFKVPWYKSVEKLGWYWLSRVRGKVQYADLGAENWKPISNLHDMSSSHSKTLGYKRLTKSNPISCQILLYKSRSKGRKNQRSTRTHCHHPSPKIYSASAKEPWVLATNLPVEIRTPKQLVNIYSKRMQIEETFRDLKSPAYGLGLRHSRTSSSERFDIMLLIALMLQLTCWLAGVHAQKQGWDKHFQANTVRNRNVLSTVRLGMEVLRHSGYTITREDLLVAATLLAQNLFTHGYALGKLTWNPRSLVSPPPSFYPSSNSASLKCTVVAALDGGAQRRFQHSLEVGDLAAASEPLAQGFGSGGCCWSHSEHDSHDSQAKATEKGPRSPLNLQGIGLLHDNSCLMLILGEATHYAQLMDLQEWSCQHLIDKQIQGRSIFVNALAILEYEGHLREKYKYSFPVVGRLAEMTRRGAMLLTHALMGCGKDP

SEQ ID NO: 191648 - protein, 58 aa, Oryza sativa
  Clone ID: PAT_MRT4530_87947C.1.pep
MASDGNGNRISGGSTAEELRKGGSASSGLGSGGSTLARHRERRWKGGAAITAMVAAGS

SEQ ID NO: 191649 - protein, 57 aa, Oryza sativa
  Clone ID: PAT_MRT4530_87948C.1.pep
MVEVAASGPGTGTCENSNTNVDNNTNNASSSTGAFSKFSNSSLTHDEVEPYDMENIA

SEQ ID NO: 191650 - protein, 637 aa, Oryza sativa
  Clone ID: PAT_MRT4530_87949C.1.pep
MAAVARSRHPGHCARRPLPVTSLFRLADATPASRRRRLAVPGPPLTGCEQRDSTLTVCTLDEKSRNPSWKAIGYAAPAAAAAAVEQRRPASPSRRPLEDGVVETRRMDDNALLRSLVEKGLAVKTGTAAHHTVQCDAVVVGSGCGGGVAAAVLASKGYKVVVVEKGDYFATEDYTSLEGPSMERLYEKGGVFGTSNVTTILFTGATVGGGSAVNWSACIRTPAEIREEWSREHGLPVFASTAYAQAMDAVCDRIRVTGGCEEEGFQNRVLRRGCDALGMRADAVPRNSSEGHFCGSCNLGCPTGDKKGTDTTWLVDAVERGAVILTGCKAEHFILERNAGGRGGRSKRCVGLMATCTSSGITKKLRIEAKVSISACGALMTPPLLRNSGLKNRHIGRNLHLHPVSMAWGYFPDSTAELPGKCYEGGIITSMHRVTDRTIIETPALGPGAFSAVVPWESGRDMKERMRRYARTAHAFALVRDRGAGAVDGEGRVRFSPSRDDAEELRAGLRRALRILVAAGAAEVGTHRSDGLRLRCKGVRDADVEAFLDEVTIEKGPMYPGSDKWAIFCSAHQMGSCRMGASPRDGAVDGAGESWEAEGLYVCDGSLLPTAVGVNPMITIQSIAYCLSNGIADTLSH

SEQ ID NO: 191651 - protein, 107 aa, Oryza sativa
  Clone ID: PAT_MRT4530_8794C.1.pep
MWQGKIVHEGVTGPIKHEENHACEDVTGPIEAARKGRLTDGRSTRATSTRVTASIPRDQFAGLCIGARLRPGAASPQRRANCSGSRVTVARHRPELQHGLTTRRRQY

SEQ ID NO: 191652 - protein, 91 aa, Oryza sativa
  unsure (1)..(91): unsure at all Xaa locations
  Clone ID: PAT_MRT4530_87950C.1.pep
FRRRPASVSTDWCFHLHGWPMMPSVWGVCRLSAGSSMFTQSGATAYTPGXICSSCWALTTSAQACLRRSXVVPPHTRLSYYAAAVGCLCLH

SEQ ID NO: 191653 - protein, 730 aa, Oryza sativa
  unsure (1)..(730): unsure at all Xaa locations
  Clone ID: PAT_MRT4530_87951C.1.pep
MAAQHDMVSKFGAAAIVVMLMLVVPNSGSGEDAGHDKDQLAPMSSEAEFGFSLPIVHGRPPAPGMDDEKFVTPFRIYEDVVYLAEMEIGERQQKQYLLIDTGSSLVWTQCDECPHCHIGDVPPYGRSQSRTFQEVSCGDDDDNDKEEAIASYCPAKPPGYITLCVNGRCMFKALYNLTGQGETVQGYMSMDTFHFIDDRRFDYQAKFRMVFGCAHQENIVLTAVKECTGILGLGMGDASFLRQTGITKFSYCVPPRMPEPAAPTVGVEQQPFQYVDWDNLEIDETLDDEGRIQVMNDDQLYVLLGLRDEERAKKSAHAAGANGSSNAAGADDSSNAAEAAGVTDGIEGAAIPVDDSVPGELVISYDKNNPCMDRYTKYPSMKEFRLAVRQFAIKKEFELGKVKTDPERYRDDHKEEVLKRSPGSVIEIDIKIVDGRAYFHRFFAAFSPCIKGFVAVAFGFIDSETEDNWVWFMTQLHRAIGDLEPLAICSDACKGLENAVNKVFPAAERRECFWHLTQKFSKKFHGETFGNMYPAARAYREEVFQKHMFPIINGTPEVWKYLTIYHNLKWMRCGFNPAIKCDYITNNIAEVFNAWISDIKDLPIVDLVDKLREKVMVLWDKRRRIGERLNEVHDYVKEFGRHVVSIVANTCTCEEWQHTGQPCGHPLAFLTTQRNVDLEGYVDMVYSVEKFRAAYEXIPAMPDKSHWPKVKMPFDLGAPLEKRSVGRQEI

SEQ ID NO: 191654 - protein, 101 aa, Oryza sativa
  unsure (1)..(101): unsure at all Xaa locations
  Clone ID: PAT_MRT4530_87952C.1.pep
GLISLCDPLPVRYGDXCTLDLLAGDLEYDKEEQGCNYYHHDGLCLWTTPASSAKPAMAEGDTRGPSIEPRHXKDPDFPEGKTASDDLHHVKFTFTSHAFWA

SEQ ID NO: 191655 - protein, 72 aa, Oryza sativa
  Clone ID: PAT_MRT4530_87953C.1.pep
MPSSHASSLRQAATTTYLRQAATIVLLPAKASSRCLSCRHHLPTVITAAVVSQWGFGFERGRVDAESLILEG

SEQ ID NO: 191656 - protein, 60 aa, Oryza sativa
  Clone ID: PAT_MRT4530_87954C.1.pep
KILHCSATSVDVEEHLYKLATSMGITVITSSQRPALIPFHSLELKLIDGEGNWELCEIHQ

SEQ ID NO: 191657 - protein, 42 aa, Oryza sativa
  Clone ID: PAT_MRT4530_87955C.1.pep
LKKNKYISFPIYILSHLTLHYKTKHLSLTHTNSFIHFVFLSK

SEQ ID NO: 191658 - protein, 90 aa, Oryza sativa
  unsure (1)..(90): unsure at all Xaa locations
  Clone ID: PAT_MRT4530_87956C.1.pep
MGQLASADVRRRPGGKRGVAAGRAASGGRGWEEAAAVGTDGRGGGGRRRXDRGRRARGGGGRRRSAGGRKATAAGANGCRWRCSPSRSGW

SEQ ID NO: 191659 - protein, 766 aa, Oryza sativa
  unsure (1)..(766): unsure at all Xaa locations
  Clone ID: PAT_MRT4530_87957C.1.pep
MTWNKAPAADAEAGGGGDTGHARLRELGYKQELKRDLSVLSNFAFSFSIISVLTGITTLYNTGLSFGGPATMTFGWFVAGAFTMTVGLSMAEICSSFPTSGGLYYWSARLSGKRWAPFASWITGWFNIVGQWAVTTSVDFSLAQLIQVIILLSTGGNNGGGYMASKYVVIAFHAAILLSHAAINSLPITWLSFFGQFAAAWNMLGVFVLMIAVPTVATERASAKFVFTHFNTENNAGIHSNFYIFVLGLLMSQYTLTGYDASAHMTEETKNADRNGPIGIISAIGISIIVGWGYILGITFAVKDIPYLLNPENDAGGYAIAEVFYLAFKSRYGSGIGGIICLGIVAVAIYFCGMSSVTSNSRMAYAFSRDGAMPLSSVWHKVNKHEVPINAVWLSALISLCMALPSLGSLVAFQAMVSIATIGLYVAYALPILFRVTLARKHFVPGPFNLGRCGVAVGWAAVLWVATITVLFSLPVSYPVTKDTLNYTPVAVGGLFLLWEMEESSSMIGGVSGGRRSITEEQAAGAEAEADEEELEPLFDYSRVQPTMAFSFDDTDIEKSDIFVHCNKRRKVADGDGDANADEKGDKGEQKAAKAAAVVDLGEEDWLPPPPPPKPKSTVTDESEQSSVLKELRYKPVHGSILLQKQAMAKFAESADDFLEKLAQTARQKVEARIPTEHIDLDKSPERHEAREKLVVELQDKGGHHQFRXGDVEKFGKLFRAYAXKVNLSVADLTLALDGDKVDAESTPEDLGLEDEDMVEVLHKTR

SEQ ID NO: 191660 - protein, 257 aa, Oryza sativa
  unsure (1)..(257): unsure at all Xaa locations
  Clone ID: PAT_MRT4530_87958C.1.pep
ISELSSALQWAVTTSVDFSLAQLIQVIILLSTGGNNGGGYMASKYVVIAFHAAILLSHAAINSLPITWLSFFGQFAAAWNMLGVFVLMIAVPTVATERASAKFVFTHFNTENNAGIHSNFYIFVLGLLMSQYTLTGYDASAHMTEETKNADRNGPIGIISAIGISIIVGWGYILGITFAVKDIPYLLNPENDAGGYAIAEVFYLAFKSRYGSGIGGIICLGIVAVAIYFCGMSXVTKHSGMGVRVSRDXAMPLSSVW

SEQ ID NO: 191661 - protein, 105 aa, Oryza sativa
  unsure (1)..(105): unsure at all Xaa locations
  Clone ID: PAT_MRT4530_87959C.1.pep
IGLYVAYALRSLSRVTLARKHFVPGPFNLGRCGVXVGWAAVLWVATITVLFSLPVSYPVTKDTLXNYTPVAVGGLFLLWEMEESSSMIGGVSGGRRSITEEQVRR

SEQ ID NO: 191662 - protein, 2028 aa, Oryza sativa
  Clone ID: PAT_MRT4530_8795C.1.pep
MAEQGKTHDLSPSVSGDDGEPNPRRRARTPPPPPRQSPKQGEALERVDKSAASPAAGDAGERRDGERRLLVYGDGSTPQGALQAAGALLRHPPVVHDPESPAQRWLEDVANLVMTAQQRLGAGGRSATTTKTSGAATTGSVSSRRRARRAAAAARHSAATPSSTPSTREDQHGEPDARLNIGRRRNSRRTPRATEGASSSRVSPRHGREDQPSVPPAGGVGCRAFVASLRNVRWPPRFRPTITEKYDGSVNPTEFLQVYTTGIEAAGGDDRVMANFFPMALKGQARGWLMNLPPASVHSWEDLCQQFTMNFQGTYPRPGEEADLHAVQRGDDESLRSYIQRFCQVRNTIPCIPAHAVIYAFRGGVRHNRMLEKIASKEPQTTAELFQLADRVARKEEAWTWNSSGSGVAASAAPGSAAQTGRRDRRRKKRPDRSGDEGHVLAVEGAPRATRKGRPASDKKNGAGTPSRERPAGRWCSVHNTSLHDLADCRAVKNLAERTRKWEEDRRQERREGKSPAVPSGKRRSEAKQKAPAVDIDDGDDDLGFQEPGATIATVDGGACAHVSRRSFKAMKRELLAMAPTHEVMRRARWSEVALTFDQTDHPPCIARGGQVAMVVSPTICNVKLGRVLIDGGAALNILSPAAFDAIKAPGMVLQPSQPIIGVTPGHTWPLGHIDLPVTFGGPANFRTERVSFDVADLSLPYNAVLGRPALVKFMAAVHYAYLRMKMPGPGGPISVRGDLKVALACMEQRADRLAAASKPEGGDERLGPSAPTAPRQRMATCDEVPEDALVSFLRANADVFAWRPADMPGVPREVIEHRLAVRPGARPVRQKVRRQAPERQAFIREEVARLLEAGFIREVIHPEWLANPVVVPKANGKLRMCIDYTDLNKACPKDPYPLPRIDQIVDSTAGCDLLCFLDAYSGYHQIRMAREDEEKTAFITPVGTYCYTSMPFGLKNAGPTFQRTTRISLGSQIGRNVEAYVDDLVVKTCNQETLLSDLAETFENLRSARIKLNPDKCVFGVPAGKLLGFLVSARGIEANPEKIRAIERMRPPSKLRDVQCVTGCMAALSRFISRLGEKALPLFKLLKRSGPFTWTEEAEHALTQLKAYLSSPPVLVAPEPNEPLLLYLAATPQVVSAALVVERDEDNPHSAHPHSVPTWPGSRQGGEAPESNGGLRPPTTGVGPPPACQTVSGAPDPQEGPEATAGRPHLSPSDPEANPVPIRPGREQGEEAPEPNGGLRPLTTGVGPLPACPMTPGAPNPQDGPEATVGRPLLSSSDPEVIGTEDGCAPRGHSDEERPGGAAPSEEDRPRRKVQRPVYFVSEALRDAKTRYPQAQKMLYAILMASRKLRHYFQAHRVAVVTSYPLGQILHNREGTGRVVKWAIELSEFDLHFEPRHAIKSQALADFVAEWTPAPETVSIPEASTNPSQLPQTAHWVMQFDGSLSLQGAGAGVTLTSPNGDVLRYLVRLNFRATNNMAEYEGLLAGLRVAAGLGIRRLLVLGDSQLVVNQVCKEYRCSDPQMDAYVRQVRRMERHFDGIELRHVPRRDNMIADELSRLASSRAQTPPGAFEERLTQPSARPDPSGETDAPDRHPRPVGVQASGPEESVPSSLRLIAWISEIQTYLTDKTLPEDREGSERVQRISKRYVLVEGTLYRRAANGILLKCIPQEQGVELLVDIHEGECGAHSASRTLVGKAFRQGFYWPTALNDAVDLVRRCRACQFHAKQIHQPAQALQIIPLSWPFAVWGLDILGPFKRAPGGFEYLYVAIDKFTKWPEAYPVVKIDKHSALKFIKGITARFGVPNRIITDNGTQFTSELFGDYCEDMGIKLCFASPAHPRSNGQVERANAEILKGLKTKTFNILKKHGDSWIEELPAVLWANRTTPSRATGETPFFLVYGAEAVLPSELTLRSPRATMYCEADQDQLRRDDLDYLEERRRRAALRAARYQQSLRRYHQRHVRARSLCVDDLVLRRVQTRAGLSKLSPMWEGPYRVIGVPRPGSVRLATGDGTELPNPWNIEHLRRFYP

SEQ ID NO: 191663 - protein, 318 aa, Oryza sativa
  Clone ID: PAT_MRT4530_87960C.1.pep
MESYGRKRAWKKGPTRGKGGPQNAACEYRGVRQRTWGKWVAEIREPNKRTRLWLGSFATAEEAALAYDEAARRLYGPDAFLNLPHLRAASAAAAHQRLRWLPASAAAAAARGGAAAVPAYGLLNLNAQHNVHVIHQRLQELKNSSSSPTKPPPRTPTRANPPPPPLPTSSPCSTVTNSVGSAALPPPMSCFQALEQAMAATAAMESAPCDDDAAVVGFGADKPQLDLKEFLQQIGVLKADDDGATGKNGAVHGDDGELADAFGFGGSGEFDWDALAADMSDIAGGHGGALGANGGFQMDDLHEVEQFGGCMPIPIWDI

SEQ ID NO: 191664 - protein, 210 aa, Oryza sativa
  Clone ID: PAT_MRT4530_87961C.1.pep
MAGEETASGSKPPAAATTIRLVNFISEDQLDEAKRTRGERADDGTAQRDKPLFQILQENKEKKDAEFNERFKHRPPKALDEDEMEFLDKLASSRKEYEQQVANEEAEQLRSFQEAVAARSNIIHEEAPTVSRPEESKPKAKRSQPALLKNVIISVKPQAKKAKLDGEDKPPAKELPSNGHSADHKPPDATKGVLGSLVQYDDDESSDGDV

SEQ ID NO: 191665 - protein, 132 aa, Oryza sativa
  Clone ID: PAT_MRT4530_87962C.1.pep
EESTGSKSLPAELYVTLAEGAMIGHTPRGMQLAQETIEKMTSRNFFLNARMGTDLLLAASGEKTGGYTIANYVWDLMQNRRITPSLPAVEAYYKGLKEREIPSDDPRLMNVSRVLDNLSIRFGPRRNSNAQA

SEQ ID NO: 191666 - protein, 92 aa, Oryza sativa
  unsure (1)..(92): unsure at all Xaa locations
  Clone ID: PAT_MRT4530_87963C.1.pep
SPFLQSAVFQLRNNQVWQQLALVAQQSHYQDINIVQPIAHQLQLQQFGDLHLDQHRAQGQAWLPYNVPSKNGLSQRXYGAPSAITTLGGVMQ

SEQ ID NO: 191667 - protein, 54 aa, Oryza sativa
  Clone ID: PAT_MRT4530_87964C.1.pep
MKQRFEWEFVFWFNQRMEDNMIYPIKDQETMLAVPMDMNRQQDTVCSKIWRATE

SEQ ID NO: 191668 - protein, 129 aa, Oryza sativa
  Clone ID: PAT_MRT4530_87965C.1.pep
MPFFPRSSTYAAYTIPPPPATPGRPDDDNDHYHEDEDKPLLPPIRHCRRQRTWVRRRRRSGGGSWCRRRTWLVMPVFRRLLEKGRKRSRSSGEFEYSDGELTMSIPCDTDDFKYIVVMDTHQNGPRRRR

SEQ ID NO: 191669 - protein, 108 aa, Oryza sativa
  Clone ID: PAT_MRT4530_87966C.1.pep
DPALWSTSTEKDKSPILTPPNHEDWAGVDWPAASPADAPTSRVGAPPLLLSCHLRRVDRLRLPLQPHSPMPALAATLARRLPSQPLPPTPPLRLPPPVPGEKKRTIEK

SEQ ID NO: 191670 - protein, 450 aa, Oryza sativa
  Clone ID: PAT_MRT4530_87967C.1.pep
MRCWRRLAAAGALLAALCAALALAVAEHRRPDTTASSSSRRPLRFASGGGFKVALFADLHYGENAWTDWGPRQDAGSDRVMAAVLDAEKPDFVVYLGDLVTANNLGIPNASLYWDRAISPTRGRGIPWATVFGNHDDMPFEWPPEWFSPAGVPPLHCPPPSMSDSDCSFRGTPRLELMTSEVIRNGLSYSSNGPKDLWPAVSNYVLQVLSQKRDDPALLMYFLDSGGGSYPEVISSAQVQWFHSQSQFLNPNGRIPEIIFWHIPSTAYAKVAPKAKSEIRKPCVGSINREEVAPQEAEWGMMDALVKRASVKRSGRRPEWATAGRSGGRAEGQRQRGAETRGEAARCGRSGRPTGEKSQRGGGRRAAGPPPLGAEEPPVACGRLRVRAGVHLDVGVAVGDEAIDQGLEVGLRVAGDVSGADRGVALDFDLHELREDANHGRRVVRAGLRL

SEQ ID NO: 191671 - protein, 196 aa, Oryza sativa
  Clone ID: PAT_MRT4530_87968C.1.pep
MAAASSRWQRMAAACFVLAALAMWAAPAACGARAVPRGAGAGVAAQQANASSSSSAAADEFLAPHNQARAAVGVAPLRWSGDLAAAAARTTSQQQGGQGRRCGFADMSGSPYGANQGWASYPARPAEVVASWVAQGRYYAHANNSCAPGQQCGTYTQVVWRRTAEVGCAQATCTTGATLTICLYNPHGNVQGQSPY

SEQ ID NO: 191672 - protein, 440 aa, Oryza sativa
  Clone ID: PAT_MRT4530_87969C.1.pep
MEGKETKNTVAAAASSSPLFSFSNSNASFGFGFGFSASSGPPPPPPPPAVEVLLSEESPVAAGELEPVVIDDSLSIYKGRASTSDVFGVKNSDLVPGKYEGGLKLWEGSLDLVKTLNSDIKEDRLLLEGKRVLELGCGHGLPGIYAILKGAVLVHFQDFNAEVLRCLTIPNVKANLLKESSEEKFTSGSVGFFAGDWSEIDSLLLRGDADLDKSTNSHENDTAYNGYDIILMAETVYAVSSLPNLYRLIKKCLRYPGGIVYMAGKKHYFGVGGGTRHFVRLVTEDGAMQSDLLAEVADGSSMGLQESSIGGRTASFFHYQRLECRDDGGPPRPSRWRWLPALDGKPAHPCLFHVKKLKWSRITSVLLPRRWWRSSPPRSAVPGRRRWRAPPTSARPSSSRRSGGSRCSPGHCWLVTRPGIFTMGRASEEVRSFVSVPLQV

SEQ ID NO: 191673 - protein, 1634 aa, Oryza sativa
  unsure (1)..(1634): unsure at all Xaa locations
  Clone ID: PAT_MRT4530_8796C.1.pep
MHARAAAGGDVTANVIVVVPRGPVPTFLESLSLQEKILKSSKASKASHTDPKQPLSMLIPFKAIVSIQLLHLFSNMPRYKPEYLFGVEGFVQELRTMSFAIGFGTAPLYAQIPHDRHEEKCRDKVTLNSNSEDIPSVMFEAGGGNYIHACQEVARIAIGELRDRYSDQLADTEYRYHPRQPQGSDCGSYLETEGIENDATTRHLVEMLWAMDETRAEVVLAAQDREDRNRGKICRLEDKVDRLEKELAVLKGEAPPQKARVRLTARKRALFIPRYQLVPKVRVVEKEVTPALADPPVVNMVLTHSNGNGPNINNNNNNNGENPTLAQVLAQQAQLMNMMMQQLQNQQNQGNNHAPPQNKLAEFLRVRPPTFSSTTNPVEARDWLHAIEKKLDLLQCTDQEKVSFASHQLHGPASEWWDHFRLNRTTAEPITWLEFTAAFRKTHIPSGVVSLKKKEFRSLTQGSRTVTEYLHEFNRLARYAPEDVRTDEESQERFLEGLNDELSYQLMTGDYHDFQKLVDKAIRHEDKYNRMEQKKRRIAQFKAQQGNSQRPRLTLGPQSMPQGGSSSIVRLQRQFFNNNAGNNIRNQAPRPVAAPTQQQPAKREQGSKPGVCFNCGDPGHYSDKCPKPRRVKVVSAQSNSTAPASKAHVNHVAAAEDQGAPDVILGTFLVNSVPATVLFDSGATHSFLSMSFAGNHGMEVEDLRRPLMVSTPSNQALSLQRSPSVRIEIQEVPFLANLILLESKDLDVILGMDWLARYKSVIVCANRKVKSEPIASEEIPIVQEYPDVFPDDLPGMPPKRDIEFRIDLKDHTQRMCVDYRALNDVTIKNKYPLPRIGDLFDQLKGATVFSKIDLRSGYHQLRIKEEDIPKTTFTTRYGLFECTVMSFGLTNAPAFFMNLMNKFSKCEFWLSEVKFLGHVISAGGVAIDPSNVESVTNWKQPKTVSEIRSFLGLAGYYRRFIENFSKIAKPMTRLLQKDVKYKWSEECEQSFQELKNRLISAPILILPDPKKGFQVYCDASKLGLGCVLMQDGKVVAYASRQLRPHEKNYPTHDLELAAVVHALKIWRHYLFGTRTEVYTDHKSLKYIFTQPDLNMRQQRWLELIKDYDMGIHYHPGKANVVADALSRKGYCNATEGRQLPLELCKEFERLNLGIISRGFVAALEAKPTLIDQVREAQINDPDIQEIKKNMRRGKAIGFVEDGQGTVWLGERICVPDNKDLKDAILKEAHDTLYSIHPGSTKMYQDLKERFWWASMKREIAEYVAVCDVCQRVKAEHQKPAGLLQPLKIPEWKWEEIGMDFITGLPRTSSGHDSIWVIVDRLTKVAHFILVKTTYSGSRLAELYMARIVCLHGVPKKIVSDRGSQFTSKFWKKLQEEMGSKLNFSTAYHPQTDGQAERVNQILEDMLRACALDFGGSWDKNLPYAEFSYNSSYQASLQMAPYEALYNRKCRTPLLWDQTGERQVFRMDILREAEEKVKIIQERLRVAQSRHKSYADNRRRDLSFDEGDYVYLRVTPLRGVHRFHTRGKLAPRFVGPYKIVSRRGEVAYQLELPQSLAGVHNVFHVSQLKKCLRVPTEEANLEQIEVQEDLTYVEKPIRILEIDERRTRNRVIRFCKVXWSNHSEEESTWEREDEL

SEQ ID NO: 191674 - protein, 95 aa, Oryza sativa
  Clone ID: PAT_MRT4530_87970C.1.pep
NNKVINVVTGEHHVDRAVISLVQKDVTQVLTAKVCVCLVQHPSLLLVPDHLFKKRVKHIVHVARTVHSALQVPETAQLDVVVGVEGDHKIVHHVH

SEQ ID NO: 191675 - protein, 544 aa, Oryza sativa
  unsure (1)..(544): unsure at all Xaa locations
  Clone ID: PAT_MRT4530_87971C.1.pep
MEIGQHPASGYSKEHQKTYQEWFAFADSDGDGRITGPDAIKFFAMSKLPRADLKQVWAIADSKRQGYLGFSEFVTAMQLVSLAQAGDEITQDSLKRDDLGSLNPPTMDGLDALLVKSKHHAKRVDPDIDGFPQAQSPATSQWFSSKSSKKIPLNAVTSVIDGLKKLYIEKLKPLEVTYKFNDFVSPLLTNSDFDAKPMVMLLGQYSTGKTTFIKHLLRTSYPGAHIXIEPTTDRFVVVMSGPDERTIPGNTIAVQADMPFSGLTTFGTAFLSKFECSQMPHPLLEHITFVDTPGVLSGEKQRTQRSYDFTGVTSWFAAKCDLILLLFDPHKLDISDEFKRVIGSLRGHDDKIRVVLNKADQVDTQQLMRVYGALMWSLGKVLNTPEVARVYIGSFNDKPVNESAVGPIGKELFEREQDDLLSDLKDIPKKACDRRINEFVKRARAAKIHAHIIGHLKKEMPAMMGKAKAQQRLIDNLENEFAKVQREQHLPAGDFPYVEHFRDVLGGYSIDKFEKIKPKMVQAVDDMLGYDIPELLKNFRNPYE

SEQ ID NO: 191676 - protein, 152 aa, Oryza sativa
  unsure (1)..(152): unsure at all Xaa locations
  Clone ID: PAT_MRT4530_87972C.1.pep
FFFFFFFLAVXLTSPMAANTKSISPDFKRNNNSVKYIIYAFSCVHICSTNNVIFANISCQIQLQRPVIRETMKMAPHSAWRSRVVMPFSGLAASSLCLLLFLLPMAVSTIACLEQEKSSLLRFLAGLSHDNGIXMSWRNGMDCCEWEGITVA

SEQ ID NO: 191677 - protein, 47 aa, Oryza sativa
  Clone ID: PAT_MRT4530_87973C.1.pep
FIVTGASSSAPGGMNYGIEDSIHFKTFRAPIDHFFFGFPKAQQEWTC

SEQ ID NO: 191678 - protein, 43 aa, Oryza sativa
  Clone ID: PAT_MRT4530_87974C.1.pep
ATTAIRMSVATVRRQLWLDRDRLRSAKPKVRRPCQLPWPWVVS

SEQ ID NO: 191679 - protein, 470 aa, Oryza sativa
  Clone ID: PAT_MRT4530_87975C.1.pep
MAVAAATRIAVVVVVLALAVLAPAARGLRRDDFPPGFLFGAATSAYQIEGAYLDDNKGLNNWDVFTHTQAGRISDGRNGDVADDHYHRYTEDVDILHNLGVNSYRFSISWARILPRGRLGGVNSAGIAFYNRLINALLQKGIQPFVTLNHFDIPHELETREEFEYYSDVCFNAFGDRVRFWTTFNEPNLSTRHQYILGEFPPNHCSPPFGNCSSGDSRREPYAAAHNILLSHAAAVHNYKTNYQPCRFLDPIFFGDYPREMREILSSNLPKFTPEEKKLLQNNKVDFIGINHYTAIYAKDCIYSPCTLDTYEGNALVYAIGRRNGKIIGKPTALHGYFVVPEAMEKVVMYVNDRYRNTTIYITENGYSQHSDTSMEDLINDVERVNYMHDYLKYLSSAIRKGANVGGYFAWSIVDNFEWVYGYTVKFGLYQVDFDTQERIPRMSAKWYRDFLTSSSLTDGLQVRSRRADS

SEQ ID NO: 191680 - protein, 77 aa, Oryza sativa
  unsure (1)..(77): unsure at all Xaa locations
  Clone ID: PAT_MRT4530_87976C.1.pep
LSSAIRKGANVGGYFAWSIVDNFEWVYGYTVKFGLYHXVDFDTQERIPRMSAKWYRDFLTSSSLTDGLQVRSRRADS

SEQ ID NO: 191681 - protein, 90 aa, Oryza sativa
  unsure (1)..(90): unsure at all Xaa locations
  Clone ID: PAT_MRT4530_87977C.1.pep
SSRLSEELRSRRSRIPGDEVGYEMAYGGWIPCGXNLCNGLHEHAAARLGDASRASXWPGHVARQAESDSVNFLWPAVAAGFGEFVRITIF

SEQ ID NO: 191682 - protein, 184 aa, Oryza sativa
  Clone ID: PAT_MRT4530_87978C.1.pep
MAVAAATRIAVVVVVLALAVLAPAARGLRRDDFPPGFLFGAATSAYQIEGAYLDDNKGLNNWDVFTHTQAGRISDGRNGDVADDHYHRYTEDVDILHNLGVNSYRFSISWARILPRGRLGGVNSAGIAFYNRLINALLQKGIQPFVTLNHFDIPHELETRYGGWLGAAIREEFEYYSDVCFNAF

SEQ ID NO: 191683 - protein, 111 aa, Oryza sativa
  Clone ID: PAT_MRT4530_87979C.1.pep
MASMLAIYRRRRSVRRGEGEGKHGAGGVERKKAVPVSFAADVDGDSLAATVRRLRRRKAVGGCAQSYGSDGGSACACATRAHQEKEERRLPIGPAGSREEERKGWAGSEKK

SEQ ID NO: 191684 - protein, 1040 aa, Oryza sativa
  Clone ID: PAT_MRT4530_8797C.1.pep
MSNEKVPSNAPIAPQEGNAPQNSGSNKQPDASSEETWRTPSDPFPMEITQVAPRDDDPDYIPIEQAMVVRRRSKRKAERNRTEQEVEMDTATSAPERTETSTSAGGSGKKRCGERSKNKLPKETYNVIALDQDGKPVEPPIVRSKFSNACGTLVRTRCPINVKLWETVDDNIKTLLWNELQKYFVFPPGSEVRGRDYALKKMGDRWRQWKSDLNRDYVQKNLPPFTDYGHISQADWDTFVADHTTAEALALRKKMSYAGHVDQWREIEQRFAAAAENPTAFPRLFPDSQQPTQSAQQTTNVPSSVGSVQTTTFPVDSITGPPPCSLIVPIGRAGKTKEVAMGFAIPGRQFHNTAIPEDYARIQVAKTEPQTKPYPLDMWKYGSALQQRPEDRSLYGRAPGLEWYIPGLEIELCSRGGCSEWLGLYNRMPRYKPEYLFGVEGFVQELRTMSFVIGFGTAPFYTQIPHDRHEEKCRVKVTLNSNSEDIPSVMFEAGGRNYIHACQEVARIAIGELRDRYSDQLADTEYRYHPRQPQGSDRGSYLETEGIENYVTTRHLVEMLWAMDESRAETVLAAQDREDRNHGKICKLEDKVDRLEKELAALKGEAPPQKARIRLTARKRALFVPRYQLAPKMVNTRSNGNGPNNPNNNNNGENPTLAQVLAQQTQLMNMMMQQFQNQQNQGNNHAPPQNKLAEFLRVRPPVFSSTTNPVEASDWIHAIEKKLDLLQCTDQEKVSFASHQLHGPASEWWDHFRLNRTTAEPITWLEFTAAFRKTHIPSGVVSLKKKEFRSLTQGSRSVTEYLHEFNRLARYAPEDVRNDEERQEKFLGGLNDELSYPLMVGDYPDFQKLVDKAIRQEDKYNRMEQKKRRIAQFKTQQGNNQKPRLTLGPQSMPQGGSSSVVRPQRQFFNNNAGNNIRNKAPRPVAAPVQQQPAKREQGSKPVVCFNCGDPGHYADKCPKPRRVKVVPAQSNSAVPVSKARVNHVAAAEAQDAPDVILGTFLVNSVPATVLFDSGATHSFLSMSFAGNHGMEVEDLRRPLM

SEQ ID NO: 191685 - protein, 199 aa, Oryza sativa
  Clone ID: PAT_MRT4530_87980C.1.pep
TTFNEPNLSTRHQYILGEFPPNHCSPPFGNCSSGDSRREPYAAAHNILLSHAAAVHNYKTNYQAKQGGSIGIVIAVKWYEPLTNSTEDVRAGRRALAFEVDWFLDPIFFGDYPREMREILSSNLPKFTPEEKKLLQNNKGDFIGINHYTAIYAKDCIYSPCTLDTYEGNALVYAIGRRNGKIIGKPTALHGYFVVPEAM

SEQ ID NO: 191686 - protein, 66 aa, Oryza sativa
  Clone ID: PAT_MRT4530_87981C.1.pep
MAIALASRQLVEISWGFHGERRKQDKEARGRATTNEQPDVSDYTLGAPICMPQLSPNLTLCRGHSI

SEQ ID NO: 191687 - protein, 78 aa, Oryza sativa
  unsure (1)..(78): unsure at all Xaa locations
  Clone ID: PAT_MRT4530_87982C.1.pep
DRRYQQTYERPTIMRPIDNSRRXLLNKLKEYNGHDCEVIHEADYFAGEKTEHEDGDTIPTHSNHVTNTLALDDLFPPS

SEQ ID NO: 191688 - protein, 247 aa, Oryza sativa
  Clone ID: PAT_MRT4530_87983C.1.pep
TCCSLGDTVATLAAASSPRGEPSPAPPPPPNPRARRSSRSERTVRPRRWWIPPRARRRSWTRTARTRRAPARPAPTAPGGTARRRGGNPRARAAPRTPRRGAGAPPRVGGAPWRPTRAPAPAPRGSHPRWRRCRAGAASRPPRSTAPTTSPRRPRLRCHRAGAASRPPRTTASTSSPRRPCRRCHRAGAASRPPRTTASTSSPRCPCRRCHRAGAAPRPLRTTASTSSPRRPCRRCHRHRHRHRRNP

SEQ ID NO: 191689 - protein, 89 aa, Oryza sativa
  Clone ID: PAT_MRT4530_87984C.1.pep
WGFFFFFFFFFCFFFFFFFFLGRKALFLDFYGGNFRGKPQKNTRQHLTGGGGYPYRLTGYFYIHNQRGSHFQVYQTLQNGNPLPETRSN

SEQ ID NO: 191690 - protein, 147 aa, Oryza sativa
  unsure (1)..(147): unsure at all Xaa locations
  Clone ID: PAT_MRT4530_87985C.1.pep
TLRLPASAAARGARGRRRAPPPASPPPPPATPAPSSRRRPPPXESCGRRPRPSACSPRPPTPIFLQRSRDGDDERRHPCGRGTPRRSGPRACRAWRPAATASAPRRRGGARAPPRAGAPPAPGRRRRRRPPVPRAGAAAPPPRRRPP

SEQ ID NO: 191691 - protein, 241 aa, Oryza sativa
  unsure (1)..(241): unsure at all Xaa locations
  Clone ID: PAT_MRT4530_87986C.1.pep
MGIPAASIAARTAAGAELAGVIAARAVRRRSLDGSGGAAGCRRMAIHLAXHYRNGALEQALLFTSPKATKIGAHRKRRIEDHFKEGGQRXWIQALSTXLTATILGIILATLTGGHDQCLDYHESKAITEIIXGGMIDHYCCWNGYTXSCELGVLSDEQTRIITTVNPVRRYKGGXLKGLLAATASGLIIHLTFGLVALLTDXSSLDEALPQLIIXPISGTAALLDSLIDSXKSATLHVSGY

SEQ ID NO: 191692 - protein, 453 aa, Oryza sativa
  Clone ID: PAT_MRT4530_87987C.1.pep
MAQRLAPKLEALIPCSQTAFIKGRCIHENFVFVKGLVQQFHRQKKATMMLKLDISKAFDTVSWGFLLSMMEFRGFGPNWRRWISAALLTEETSILINGVLSDPIKPARGLRQGDPLSPLLFILPTTTEANTIKRLLTLFVTPGQSAEEMPSIDVPNKENKDKDMFILHVIIQKVKPGESISVAGWKRIASEVVATILQALHMSETPLHFDFNSEIEEREIESFAELPVLYDEQLCFGDNCKHCGSPKNVDVSPSNTPHIFTIGLYWFGDCENQVQLSEVLVGIAHPIDIKLLCKGVHSSAKYSLASMISYANGRYFCFARDQDKWLISDAETIEVDNLLMASAWDRWAPSVIRVVASEEGGGWRRMSEGRPVPRRESPWGLPEGDKREPKAHRCNDRAEDVVQACFEGNPFKTVPGPFKLFWQCMRSKPGEEPTEPYTYLQLDPPKRAEVKLE

SEQ ID NO: 191693 - protein, 95 aa, Oryza sativa
  Clone ID: PAT_MRT4530_87988C.1.pep
HEGNRAGWGGDNLNRLFYSAHAKWNVVSLAAVMFLRGRWVSTASVVKTFFPFALVITIGTLLGGATFLIGLLAFAAVMTGWFLVGTYCIKSLVEL

SEQ ID NO: 191694 - protein, 177 aa, Oryza sativa
  unsure (1)..(177): unsure at all Xaa locations
  Clone ID: PAT_MRT4530_87989C.1.pep
ECNDPPLPGRAHLHLAAFIGHRLPSQTNTCLFYTLCPHSCEPGXKNFPVSHPSQIAPGQARLTLEFFGDRLLEKKLQLVNMSILLILLSARPGCYTSLPTRGVPDRQQVRSQTILCQEXEGSTRHHPVESTCLLAXKASLVCYLLSQGRPIAPVWSHLFSLSLLSLRSAPPARCAHE

SEQ ID NO: 191695 - protein, 46 aa, Oryza sativa
  Clone ID: PAT_MRT4530_8798C.1.pep
LKLIYNSIERFYMPSVNSPLHPFSLYSLIFFTKLPKKLNSNGTFPI

SEQ ID NO: 191696 - protein, 74 aa, Oryza sativa
  Clone ID: PAT_MRT4530_87990C.1.pep
KPTQIPYKPPPHTKIPPSLLLPILFQQMPIPSQEKSLKGSTIKKKIISGHSLQSNPRAPKPFPTRHNPFRGASG

SEQ ID NO: 191697 - protein, 138 aa, Oryza sativa
  unsure (1)..(138): unsure at all Xaa locations
  Clone ID: PAT_MRT4530_87991C.1.pep
TKKTGPPKNKGRGXXXXRXPPXXRGPGAXKPGQXNGGGGXEXQPNTGGQPRXGSQQXPXRXQSTGXHXPGXPTRGGXXAQXQXPXAXXAXXXGRGXPPXXXRGSXRXPNGGXTXXGPRGGSQGPPPRXGPRQQEPKTP

SEQ ID NO: 191698 - protein, 45 aa, Oryza sativa
  Clone ID: PAT_MRT4530_87992C.1.pep
WTSDYSMNTIALGLDLIYYIRISIICNDLDHKLYNAALIPLFGYA

SEQ ID NO: 191699 - protein, 80 aa, Oryza sativa
  unsure (1)..(80): unsure at all Xaa locations
  Clone ID: PAT_MRT4530_87993C.1.pep
GVGRVAMAEEATLSHPPRYVKLSRPHDALTPAEDILAWKDNQPVHVPQLVDRRCSQCGQLLTXWYKPPCHKPWTTGILTW

SEQ ID NO: 191700 - protein, 172 aa, Oryza sativa
  Clone ID: PAT_MRT4530_87994C.1.pep
MARPQQRYRGVRQRHWGSWVSEIRHPLLKTRIWLGTFETAEDAARAYDEAARIMCGPRARTNFPLADATAAAAAAAASSSFLSAALVAKLHRFNLASVQATQRQREAAATAAAASSASATTPPLGNAAAADDDARTTTTYGAEWSGRFLEEQHVEQMIDELLDSNFSMEICY

SEQ ID NO: 191701 - protein, 129 aa, Oryza sativa
  unsure (1)..(129): unsure at all Xaa locations
  Clone ID: PAT_MRT4530_87995C.1.pep
MVHVPEELALKARKLIKRFHEIQYYSDNFTLSENDGERRFAPNIGTLPKTSSVIYAPKIIGREQDKDNIVEKLLSMTSDSVATPVSILXIVGMGWIXGKTTLAQLVYNDSXXYRGFFDMHAWGCVSSHL

SEQ ID NO: 191702 - protein, 254 aa, Oryza sativa
  unsure (1)..(254): unsure at all Xaa locations
  Clone ID: PAT_MRT4530_87996C.1.pep
PPPRCGAAGTAPPRSGRDKRRNQRQGHAKNHXAGQPENRXRNEKRREKEEKKSQHTDRGXKTGERTQKEQAQPNQKRARKERKXGHENRTTPPPPPHPXPXXDQTQARGHGKPHQRPRGPKTKAXPGEGEKRGXPRTSRKKGGXXPXGRETGAXGGGARPRAPPRDXDDPAGAAXHRPPRGRERRQREREKEAAKRERIRRRRGGRXRTEEKDRQGRAEETERLGRGRRKNRRRGEGQRKRRKAEKGQRKRRVR

SEQ ID NO: 191703 - protein, 215 aa, Oryza sativa
  Clone ID: PAT_MRT4530_87997C.1.pep
MVAARSGDDAELRLDVECLAAAPRWTRARRSHSEAERKRRERINAHLDTLRGLVPSASRMDKAALLGEVVRYVRKLRSEAAGSAAVVPGEGDEVVVEEEEVEVEGCSCDAGERQAARRVKASVCCADRPGLMSELGDAERSVSARAVRAEIATVGGRTRSDLELDVARTAAAGGGSNGASQLPALQAALRAVIMSQEELLAVESYKQRRFSADFA

SEQ ID NO: 191704 - protein, 396 aa, Oryza sativa
  Clone ID: PAT_MRT4530_87998C.1.pep
RRFFVAFHASLHGFTNGCRPLIFLDKVPLKATNEYKLLVAAGVDADDGVFPVAFNVVEDENYESWVWFLMQLRYALQNHNYPYNAMTFLSSGQKGLDAAVPQVFEESHHAFCLHHIMEEFKGELRKGPWSQQIRDGMVEDFTRAAQACSIEDFNASIESIRNISTEAADWIIASKPEHWSDAIFRGCRYDHFSSNIVDAFNNWIPTKKEGSIVLMIDSLRMKIMEVIEARRESCKSWSGPLTPSMEFKVQDEMSKAGKLTVLCSSETVFEVRGSAIYVVNLANWECTCRRWQLSGLPCMHAVAVFNRVGRSFYDYFTKFFRIESYHLAYSGAIFPIPDMDTVDFSAGANLIPPPKPRTSDKPRRKRFNPYKIPTVVRLCSRCKQAGHNKATCEAIL

SEQ ID NO: 191705 - protein, 35 aa, Oryza sativa
  Clone ID: PAT_MRT4530_87999C.1.pep
RRDVWCPSSSASVVVRIGRRRLLRLPWRRVTGACP

SEQ ID NO: 191706 - protein, 1603 aa, Oryza sativa
  Clone ID: PAT_MRT4530_8799C.1.pep
MMMDRGGVWMEGKRCRGRPCRCDAGGDGGGVADRCTARRDGRPNNSGEADGEVRGDVPAKPRAGRGGGRCGVAEGGDGDVGRRSGAATGAAGGDVDEEEGEAGAGDGVPAMFGRGGGDTGDEGGVVEPRKVVNTRSNGNGPNNPNNNNNEENPTLAQVLAQQTQLMNMMMQQLQNQQNQGNNHAPPQNKLAEFLRVRPPIFSSTTNPVEAGDWLHAIEKKLDLLQCTDQEKVSFASHQLHGPAFEWWDHFRLNRTTTEPITWLEFTAAFRKTHIPSGVVSLKKKEFRSLTQGSRSVTEYLHEFNRLARYAPEDVRNDEERQEKFLEGLNDELSYPLMTGDYSDFQKLVDKAIRQEDKYNRMEQKKRRIAQLKTQQGNIQKPRLTLGPQSMPQGGSSSIVRPQRQFFNNNAGNNIRNQAPRPVAAPAQQQPVKREQGSKPVVCFNCGDPGHYADKCPKPRRVKVVPAQSNSAVPASKARVNHVAAAEAQDAPDVILGTFLVNSVPATVLFDSGATHSFLSMSFAGNHGMEVEDLRRPLMVSTPSNQALSLQRSPSVRIEIQGVPFRANLILLESKDLDVILGMDWLARYKGVIDCANRKVTLTSNDGRVVTVHALSSESLRSRLNQITLEEIPIVREYPDVFPDDLPGMPPKRDIEFRIDLVLGTTPIHKRPYRMAANELAEVKRQVDDLLQKGYIRPSSSLWGAPVIFVEKKDHTQRMCVDYRALNDVTIKNKYPLPRIDDLFDQLKGATVFSKIDLRSGYHQLRIKEEDIPKTAFTTRYGLFECTVMSFGLTNAPVFFMNLMNKVFMEYLDKFVVVFIDDILIYSRTKEEHEEHFRLALEKLREHQLYAKFSKCEFWLSEVKFLGHVISAGGVAVDPSNVESVTNWKQPKTVSEIRSFLGLAGYYRRFIENFSKITKPMTRLLQKDVKYKWSEECEQSFQELKNRLISAPILILPDPKKGFQVYCDASKLGLGCVLMQDGKVVAYASRQLRPHEKNYPTHDLELAAVVHALKIWRHYLFGTRTEVYTDHKSLKYIFTQPDLNMRQRRWLELIKDYDMGIHYHPGKANVVADALSRKGYCNATEGRQLPLELCKEFERLNLGIVSRGFVAALEAKPTLIDQVRETQINDPDIQEIKKNMRRGKSIGFLEDEQGTVWLGERICFPDNKDLKNAILKEAHDTLYSIHPGSTKMYQDLKERFWWASMKREIAEYVAVCDICQRVKAEHQKPAGLLQPLKIPEWKWEEIGMDFITGLPRTSSGHDSIWVIVDRLTKVAHFIPVKTTYFGSRLAELYMARIVCLHGVPKKIVSDRGSQFTSNFWKKLQEEMGSKLNFSTAYHPQTDGQTERVNQILEDMLRACALDFGGSWDKNLPYAEFSYNNSYQASLQMAPYEALYGRKCRTPLLWDQTGERQVFGTDILREAEEKVKIIQERLRVAQSRHKSYADNRRRDLSFEEGDYVYLRVTPLRGVHRFHTKGKLAPRFVGPYKIVSRRGEVAYQLELPQSLAGVHNVFHVSQLKKCLRVPTEEANLEQIEVQEDLTYVEKPIRILEIDERRTRNRVIRFCKVQWSNHSEEESTWEREDELKLAHPHLFASSSESRGRDSV

SEQ ID NO: 191707 - protein, 204 aa, Oryza sativa
  Clone ID: PAT_MRT4530_879C.1.pep
MDPPAKPPRESRGEEGHLSHLQPAVAVSPSPWRSDAAKSDGPRPPRRWIRRLGRPNGERREMEERSSRGAGDVAMPAAGSRRGGARLLQPARHRTASEQEEESPGSGATKHGPSGIGRRMPEPGGTGAGVEGGGSATVGEDAIVAVDACLRDGRRRGSADAAVGRAPSPRGREGGMAVEADRERKRKRGRDGHLRRLRRRRATP

SEQ ID NO: 191708 - protein, 78 aa, Oryza sativa
  Clone ID: PAT_MRT4530_87C.1.pep
MTLLRKAKGPTAGVRTPKQYDASIHVKTPIGGAAKTGQELELDGSGSGGQRRGIARALKEHKARLYIIRRCVVMLLRC

SEQ ID NO: 191709 - protein, 56 aa, Oryza sativa
  Clone ID: PAT_MRT4530_88000C.1.pep
LFTLPIQLAVGFFLRERPVVALASVAAAVGMWTVFPYAAAACTALFFYLSRRNSSN

SEQ ID NO: 191710 - protein, 479 aa, Oryza sativa
  Clone ID: PAT_MRT4530_88001C.1.pep
MEKQDDATQLLPDDLLAEILGRLAPRWLAASRCVCKAWQAIIDSRRLLRADLLPLSLSGIYFNFHDERHSVFFSHPSTRPIISGMFTDYTPNADRVEDHCNGLVLLWGGVANPTTRQWAPFPEPPPPCTEIKGVCQLSNYLMYDPTISSHYEIFQIPRALDRYHDELDPMDDTSQWPPSPSVLNVFSSRTGEWEKRSYVREGEAAGTVADMALSFPYDHFNGVYWQGALYVHCEADFVMRISLSDKTYQVIMLPITTEVSEYKSHFFGRSKNGVHYALMDRDQRLRIWFLNESCGQKMWELKHDKNISFLLKRHDKYGQNDGPWTLHYFDYCENYDQNDIDAHYEGYINEDYNEEYIAAQDCKHFEAASYEDRNGNSIRNVIVPINKFEWDSDNDSILDIENMNDEHRDTFFSILGFHPYKEVIFLNRQMERGLAYHFNSSKIQYLGKTFPECYHSEVHEMYASFVYTPCWIGELSEST

SEQ ID NO: 191711 - protein, 67 aa, Oryza sativa
  Clone ID: PAT_MRT4530_88002C.1.pep
RRTAPPPARSGCRTAALDRDRSPPISIDRSIECFRQVFASPGRPPASFFQVKSYSSSMRNLFGVWII

SEQ ID NO: 191712 - protein, 85 aa, Oryza sativa
  unsure (1)..(85): unsure at all Xaa locations
  Clone ID: PAT_MRT4530_88003C.1.pep
RRGMFMVXGGYDRDAGNMAVASGYADMVVFGRLFLANPDLPRRFQLDAPLNKYDRATFYTHDPVVGYTDYPFLDDDREAMSDHTG

SEQ ID NO: 191713 - protein, 276 aa, Oryza sativa
  Clone ID: PAT_MRT4530_88004C.1.pep
MESINVARGASVTPRMALPCISNLQTLHYNLLLHRNRKTNGRKLRSVSCRASAGRGGGRGLDRRDVLLGIGAAAAMVATQGGGGALAAPIQAPDLGHCHEPVDLPDPDTAPEISCCPTYSAGTVAVDFTPPPASSPLRVRPAAHLVDIAYLTKYERAVSLMKKLPADDPRSFKQQWRVHCAYCDGAYDQVRMYLYFHERILGKLIGDETFALPFWNWDAPAGMSFPAIYANCRLSSLYDPRRNQAHQPPFPLDLNYNGTDLSKLDFGNNKRGWLSS

SEQ ID NO: 191714 - protein, 180 aa, Oryza sativa
  Clone ID: PAT_MRT4530_88005C.1.pep
MGDAASSASAAEMVGRAVGEVREALNEHADVVAELFGRVSSDLRSGFRPALDSFLGFFHAVDWKEPWLISMLIFHAILLLVTIISRRNVNFQLILSALTFSGVFLAERINTFLGQHWKSFSSQNYFDPQGLFISVVWSGPLLLITILILVNTLVTLCLLMVRWKRAELRHRAREVRNKQD

SEQ ID NO: 191715 - protein, 92 aa, Oryza sativa
  Clone ID: PAT_MRT4530_88006C.1.pep
GWAPLCPLFAFKCAVFYLQGGAPSSALFVLLRRFFFLNPPFFSHFTPLFFSKYLFPPLGDPLFFFFGFFRCFFFFCPYIIIISIKYNIFYNL

SEQ ID NO: 191716 - protein, 141 aa, Oryza sativa
  Clone ID: PAT_MRT4530_88007C.1.pep
MISARRLAQLAKKWQRMAALERKRLTMKAKENEECCTSVAGKGHCVMYTADGSRFEVPLAYLGTAVFSELLRMSQEEFGFTSDGRIMLPCDAVVMEYAMCLLKRNASAEVEKALLSSMVAPCHYTGCMVPTVGVNQHISCL

SEQ ID NO: 191717 - protein, 410 aa, Oryza sativa
  Clone ID: PAT_MRT4530_88008C.1.pep
RGGRAEASTQTRRRTPPELMEDMVTEILVRLPVKSLLRFKPACRAWQAIIDDPVFIRAHLRRSASRWEQSHSFIINPHSMVRVPWDRWPVPSNRYRFHQWQLQRGTTTTSPRNNNVATFLHAKDLSDDQQFYTTEFTHRDGLVFSTTTTSLHVFNPATRDAITLPTSSRSNLMGGGRFNYHCSGLGLDPRTGMYKVVQAFFRFQSMEPAETKMGMEVFTIGGGGGGAGWREITSDPPYPAKRFQIGVSVCGYMFWRFSERHTKLERGILHLSLEEEEFGITGLPDELDTDNSFLLDELLGRDLCVSASNTSCTMLNIWTLPVADESLCTLWQWRYCIDYPWSLCSVMALPPFSDEIILLRGNNICRYDLATSKLKILCRLDRTRYQGEGARKSELFSAMPFIESLVRITY

SEQ ID NO: 191718 - protein, 251 aa, Oryza sativa
  Clone ID: PAT_MRT4530_88009C.1.pep
RPGGDGGGLAWQRPGGGGGSLARWIQEGRRPDHPRQLQAAAGTEARGGKRWRPARLHGFFSFFLLKMGELKKLVEEGKIKYIGLSEASASTIRRAHAVHPITAVQLEWSLWSRDAEEDIIPTCRELGIGIVGFLSSGPKIVGTMAQVGSGGGRPRAVRSGAGGRPNRKIGPDRRKDLPRFQPENMEKNTVIFERVSVMATRKGCTASQLALAWNVAALGVRLAAEEMAELESLAAADVLRGDRYHASFLTT

SEQ ID NO: 191719 - protein, 464 aa, Oryza sativa
  Clone ID: PAT_MRT4530_8800C.1.pep
MVVLAVGLSLTPRFYSRSSIVVAASLLLSAAPSSSSPRARAAAPASGYSPWRGSISRISSHPTAMATTQASEAATEKGLPLGMDVSMVDEYASQSKLLQEFVKIPTIGNAWIFNSKTENTSRAIVSVGQTDLLANKKRSFLLNSHISKNSSNSVDFQWSPFPIEMSGVSAVIPSPSGRKLLLIRNSEDDSPTKLEVWGPCQLENEIHIAQSVHGSLYVDEWFEGISWNQEETLVAYVAEEPPQPKPEFNDSGYKKAGSSEKDSKSWKGKGDWEETWGETYSKKRIPALFVVNISSGEVRAVKGIPRTLSVGQVIWAPSSSHSLVFVAWSSDNGYQKTPRKLGIKYCFNRPCALYAVPDPFMEEADKPSLNVSKGETAPTTKLTSELSSAFFPRFSPDGKYLVFISAKSAIDSGTHNATNSMHKIDWPADGKLEGLSVADVVMVVFLVCTALAYLGIHGLLMDKL

SEQ ID NO: 191720 - protein, 922 aa, Oryza sativa
  unsure (1)..(922): unsure at all Xaa locations
  Clone ID: PAT_MRT4530_88010C.1.pep
MEEAIFAMVQEEMRLKLMRGTNPIRSTYTVADNRECYNCGQVGHXDRGSFGXHRSGRRGDRGGRGGGRGGGRGAPXPMQPLRRWEEWQNNKTNKSSNTTTHFGNFANYAQVGEVNLLSVSSAIDQLKCIVVFDDNSCLFQEKGTERRIGTAVRHDELWYINHEELGLAAVVGDVEKEISLLHCQLGHPSFGVLSKLYPDLFSRVDMHRLVCDDCELDEGIIHQTTCPGTPPQSGVAERKNRHLLEVARFLMFQMNVPKYLWSEAVMTTAYLINQMLSRILGMKSPVELFLGKREYKVPLKVFGYVCFVRDHRPFVGKLDPHAVKCVFVGYASSQKGYKCWDSIGRRLFEFSTVMEDDSREGETEGGDTHEKNVGYKNGEAVVVGSIPCSIDGVSKEVEKFVEATQDKDGELVLHERDGEVVLHEGDGEVVVGTIPCPMEQTEKVKQKDMLVYQRRRFDNHGEKRKKSVQDQVEXLPHPEYPVPESSQSLSPPASLAPLETIXTVSIPNDWKCAKQDPRWKDAMKDELNALVKNKTWELVRLPPVKQIPEGKVDRYKSRLVAKGYNQTYGIDYDETFAPVAKMGIVKTLVSCAVNFGWPLHQLDVKNAFLHVITSDDVKEIRCLEEKLGKVFEVKDLGPLRYFLGIEIARSSKGIVLSQRKYVLDLLIDTGMLGCRPSTTPINRNHQLCAQSGDLVDKEAYQRLMGRLIYLCHTRPDISYAVSVMSRYMYDPRTGHLDVVHRILRYLKGTPGKGLWFRKNGHLNVEGYCDADWASSMDDRRSASGYCVFVGGNLISWRSKKQAVVARSTAKVEYRAMALGLSEMVWMRGLLSELRVLRSDTVMLHCDNKSAINIANNLVQHDRTKHVEIDRFFIKEKIDSGVLGLEYIKSCEQLVDCLTKGLGPSEVQSICNKMGMIDIFCPS

SEQ ID NO: 191721 - protein, 78 aa, Oryza sativa
  Clone ID: PAT_MRT4530_88011C.1.pep
GGGVTQKKRGDQKGTWSSFKKMGTGTKPWNKGGKLKKKKIFIPWYVQKMYIRVVTKGLFFFGQGGSFVHLKPGQTSKS

SEQ ID NO: 191722 - protein, 369 aa, Oryza sativa
  Clone ID: PAT_MRT4530_88012C.1.pep
MRKQLVVVLALLVAAAAAMAMADEEDVTLTDKDLETEESMWSLYERWRAVYAPSRDLSDMESRFEVFKANARYIHEFNQKSKGMSYVLGLNKFSDLTYEEFAAKYTGVKVDASAFATATTSSPDEELPVGVPPATWDWRLNGAVTDVKDQGQCGSCWVFSAVGAVEGINAIMTGNLLTLSEQQVLDCSNTGDCLKGGDPRAALQYIVKNGVTLDQCGKLPYYPGYEAKKLACRTVAGKPPIVKVDAVKPVANTEAALLLKVFQQPISVGIDASADLQHYKKGVFTGRCKTAPLNHGVVVVGYGVNTTPDKTKYWIVKNSWGKGWGEGGYIRMKRDVGTPGGLCGITTYATYVTKKCPCPANPPTIIASY

SEQ ID NO: 191723 - protein, 97 aa, Oryza sativa
  Clone ID: PAT_MRT4530_88013C.1.pep
GRGPALPSFITTALQQQQHALISSEIDASPEREREKRKLKEQLDNGESVAVAACMLQGELTEREVSTQRQLYHHHHFISLSLSLPWPPTASLSFYLA

SEQ ID NO: 191724 - protein, 221 aa, Oryza sativa
  Clone ID: PAT_MRT4530_88014C.1.pep
MARRPARCYRYCKNKPYPKSRFNRGVPDPKIRIFDLGRKRANVDDFPLCIHLVSNEYEQLSSEALEAARICANKYLVKNTGKEGFHLRVRAHPFHVVRINKMLSCAGADRLQTGMRGAWGKPNGTVARVNIGQILMSVRTRDANRAIALEALRRSQYKFPGRQKIIVSKNWGFTPLRREEYLDKKAAGRVKVDGAYVQFLSNHGSLERNIRRFPDAFKSEA

SEQ ID NO: 191725 - protein, 74 aa, Oryza sativa
  unsure (1)..(74): unsure at all Xaa locations
  Clone ID: PAT_MRT4530_88015C.1.pep
FFFFLIKSRIPLVRSSSESVXRRPGKGPEGXVPGPSPXRDAGPVSPLRAARCSPLAADGFGAGTPEPXPQSQSF

SEQ ID NO: 191726 - protein, 42 aa, Oryza sativa
  Clone ID: PAT_MRT4530_88016C.1.pep
MAPVVVLRALSSSPRSLNIDGNVMPLDVTAVAFPASPSDARR

SEQ ID NO: 191727 - protein, 160 aa, Oryza sativa
  unsure (1)..(160): unsure at all Xaa locations
  Clone ID: PAT_MRT4530_88017C.1.pep
RFISLLIKAVTPFHAVESCALLLKEAGFQELRENDPWDIAPLGKYYVTKNRSAIFAFAIGGQVQEKSGFSIVVAHTDSPCLRVKPISKLTSEKFLQVGVSTYGGGIWRTWFDRDLSVAGQVVIRKNSSLVHKLIDVRKPILTIPXLAIHLETDRTQFELD

SEQ ID NO: 191728 - protein, 71 aa, Oryza sativa
  Clone ID: PAT_MRT4530_88018C.1.pep
MASNEEAGFPSLLWDELNDDAGQDELDDDAGQDELDDDASAGERRNEVTTSTMRASARSSRRSPWIWPRNT

SEQ ID NO: 191729 - protein, 106 aa, Oryza sativa
  unsure (1)..(106): unsure at all Xaa locations
  Clone ID: PAT_MRT4530_88019C.1.pep
QPYVRHEASRAKAFLMISENKFMAVIINASPEDTTITVYRCGPLXPILRGANIPNTTFDKAPAGLKASSAYSRRKAYPESXGTLYGIGVXDSKHLKVSKHSVIRGF

SEQ ID NO: 191730 - protein, 757 aa, Oryza sativa
  unsure (1)..(757): unsure at all Xaa locations
  Clone ID: PAT_MRT4530_8801C.1.pep
MAEQAKAHDLSPSVSGDDGEPNPRRRARTPPPPHQSPKQGEALERVDKSAASPVAGDAGERRDGERRLLVYGDGSTPQGALQAAGALLRHPPVVHDPESPAQRWLDNVANLVMTAQQRLGAGGRSATTKTSGAATTGSVSSRRRARRAAAAARHSAATPSSTPSTREDQHGEPDARLNIERRRNSRRTPRATEGASSSRVSPRHGREDQPSVPPAGGIGCRAFVASLRNVRWPPRFRPTITEKYDGSVNPTEFLQVYTTGIEAAGGDDRVMANFFPMALKGQARGWLMNLPPASVHSWEDLCQQFTMNFQGTYPRPGEEADLHAVQRRDDESLRSYIQRFCQVRNTIPCIPAHAVIYAFRGXCGTTACSKRLPPKSPRLPRSFFSLRIEWLVRRRHGPGTPPVPEWQLRPPPDPLLRQGGGTGGGRRGRPIPTTRVMSSPSRAFRWPPERGXLYKKGARRPRKKKEKAIQDWRGPGGSLRRARVTSLVVVIVRTTVAALLVGVEGEREPRGRTLEAVNDVVGGVPDLRACAVLGSERELFQRCPRGEVRVREAPKPNGGPRPPTARVGPPPACPTVSGAPDPQDSLGATAGRPRLSPSYPEDIGAEAEGAPRCLSDEERPGDAAPSEEDRPRRKVQRPVYFVSEALRDAKTRYPRAQKMLYAILMAPRKAPSPYLQAKQIGSPRFVRCSGNVAVLKRPPIMDSQVTITNVHGLRPLGILPNYGDRSHLSPGFRGGVTPDRFPWEGKLLWHNAGGYCR

SEQ ID NO: 191731 - protein, 80 aa, Oryza sativa
  Clone ID: PAT_MRT4530_88020C.1.pep
MEKERREKKIPQGNGGGGGSDRAMRRRDYRREEEEFLMALFLDGKKQEQSSWEEQKMAEASTFSLLQFPLQQKVTSVAKL

SEQ ID NO: 191732 - protein, 121 aa, Oryza sativa
  unsure (1)..(121): unsure at all Xaa locations
  Clone ID: PAT_MRT4530_88021C.1.pep
MGEGRGAAIGVAAGGSAVEGAQPPPPPDDDLDLPDEVSPNALAFLPTGWSPTPVTHTDTSPSSAMTMSCSASSPHLPPSICSTXGTLLHFAGRRRRRLLRRARCLRRRRPPVPTLSSLICP

SEQ ID NO: 191733 - protein, 56 aa, Oryza sativa
  Clone ID: PAT_MRT4530_88022C.1.pep
MKDCGRKNFSAAKNRAEQGRRGSARGGVGQGERMSSDAIIAMDELGNWMGQRWQRL

SEQ ID NO: 191734 - protein, 329 aa, Oryza sativa
  Clone ID: PAT_MRT4530_88023C.1.pep
MGEGRGAAIGVAAGGSAVEGAQPPPPPDDDLDLPDEVSPNALAFLPTGWSPTPVTHTDTSPSSAMTMSCSASSPHLPPSICSTLLAAARSPTCSSRSPPPAPLRLPRACPLPLTAGTLLHFAGRRRRRLLRRARCLRRRRPPVPTLSSLCAQREPREKKEREREEEEKSIAVLTRMRADSGRRQGGRGGAWGRSGRWGEEVDGATARDGGSSGRRPPLPIRSRGGVFGPFQLSSMKPNLRTTTGVFCGDGGRTWPIEASEGEAAPGVELVGAHGSVHEPRRQIEKEEDEDEHLAAASLALTPPSKEEREEDRRKKEENRKKEKGYGWKT

SEQ ID NO: 191735 - protein, 189 aa, Oryza sativa
  Clone ID: PAT_MRT4530_88024C.1.pep
MEKNFYNSETAKNLGPDNVVSNVDWECSFMYRHQPESNIHDIPELVRTTLPEYAEEVIKLAERLAEVMSENLGLDKDYLKKAFSNPSVGIKAAKYPRCSHPEFVMGLRGHTDAGGIILLLQDDLVPGLEFLKDEKLGKSNYLLWKAQVLPTMRGAQMFGYLDGTIVTPLKEIGVKEGEMITQAPNPAYT

SEQ ID NO: 191736 - protein, 609 aa, Oryza sativa
  Clone ID: PAT_MRT4530_88025C.1.pep
MASAGDRRGGGGPPGSGDDSGGGWETVEKRVKKPAQQVGKGQWGQWNSPNAAPAPTAPRSGSGAFHHSGNTLVRHSDRRPARGTPRPPPQNRSIEAELQAPHGVVTAPLANGWQWGARSCPPGTESKEGGLPLSGCDPETDNAEGYDTSDDDNDDDMSDDLSDDYDSDASEKSFETRKNHKLFKGFFEVLEALSVEQLNEPTRQWHCPACKNGPGAIDWYKGLQPLMTHAKTKGSIKVKRHRELASLLEEELSRRGTSVVPSGEQFRKWKGLRESTDREIVWPPMVVVMNTVLEQDEDDKWKGMGNQELIDYFSEYAASKARHAYGPNGHRGMSVLIFDSSAVGYMEAERLHDHFVRQRTDRNTWNSAHKVTFLPGGKRQLYGFLATKDDMETFNRHCHGKSRLKYEMRSYNEMVVTQMKQMSEDNQQLNYLKNKMVKKEQHSKLVEDTLSVVTQKLRETMEENTIVRNKAKEKHLEYEKEMKYQEEFFHDQIEKIHKATEEKEIKFEKLLQEERAKARQSDVDSGSTEDRRQRKEKIQNFIDCQVKDVEEFEAERDKLIKLHEEKKVKLKKEYLAKEFELEKELDTALTSLMDKHKPDIFKSSTSPST

SEQ ID NO: 191737 - protein, 79 aa, Oryza sativa
  Clone ID: PAT_MRT4530_88026C.1.pep
GKKTGNPFLAPLFGNKPNGGPANSLGHPRGQFLRGGGGNKKNPGPPPQMGPRALFFPPPFPGVKKGGPQIFPTKAGALN

SEQ ID NO: 191738 - protein, 58 aa, Oryza sativa
  Clone ID: PAT_MRT4530_88027C.1.pep
WGCAPSSSSPTARGSPPPRSSSPRSPPGGGTSAATWPSAPRRSPSSSPPPSPGRSSPG

SEQ ID NO: 191739 - protein, 40 aa, Oryza sativa
  Clone ID: PAT_MRT4530_88028C.1.pep
KKKKKKKKKRKILKKKKGKKKKKKKKKKKKKKKTKNKNKK

SEQ ID NO: 191740 - protein, 116 aa, Oryza sativa
  unsure (1)..(116): unsure at all Xaa locations
  Clone ID: PAT_MRT4530_88029C.1.pep
SSSLAPPPIRGEIAGDASPPAXQWHCRYYTISNHPCHLAXVQADVAATSVGAAAPSSSPARLRRRPKFAETPPPRQPPVPPCRLVAPLHHHLLQHRNGVFHAVPYSGIAAVMSSSA

SEQ ID NO: 191741 - protein, 478 aa, Oryza sativa
  unsure (1)..(478): unsure at all Xaa locations
  Clone ID: PAT_MRT4530_8802C.1.pep
LLNVSKGETAPTTKLTSEVSSAFFPRFSPDGKYLVFISAKSAIDSGTHNATNSMHKIDWPADGKLEGLSVADVVPIVMCPQDGCFPGLYCSGILRNPWLTDGQTMILSSIWGSKEVILSVNVVSREVSRVSPQDSDYSWNVLALDKDNILAVSSSLITVPQIYYGSEVVXTGKPNQWEWQEIATPFSSPSDKISAILADHKFSILKIPISNSSNKLADGAKLPFEAIFVSWKDSATRPTIVVLHGGPHTVYPSSYSKSLAFLYSQGYNLLVVNYRGSLGFGEEALQSLPGNIGSQDVNDVLTALDFVIKKGLIDASKVAVVGGSHGGFLTTHLIGQAPGTFVAAAARNPVCNLSLMVGTTDIPEWCFVEIYGKEGKNCFSEYPSFDDLCQFHQKSPISHISKFKKIXQVSTPTLFLLGAQDLRVPVSNGLQYARTLKEMGVETKIIVFPEDMHGLDKPQSDFESFLNIXCWFKKHMSK

SEQ ID NO: 191742 - protein, 205 aa, Oryza sativa
  unsure (1)..(205): unsure at all Xaa locations
  Clone ID: PAT_MRT4530_88030C.1.pep
MRDDLVMAQQTVRRAWQENFKLSSGGVSVLEYEESLRSVASRALKLILGVGMKTVGNGRKNPLPFPFSFYFLENGIGMAYSETVTISVMSVYRKRNRWNGNLPMSARSRKFMSETANRGIIPHLTMHEDGLIISPLHHHAATXHCYMMINELTIRSTNNINKVQRYFNINVATAYNRMMMQSHPHDDFHLHFQMQQIEILKKKRK

SEQ ID NO: 191743 - protein, 178 aa, Oryza sativa
  Clone ID: PAT_MRT4530_88031C.1.pep
ASTQAPSGTSLQKAVSFKAPIRCGQGVSSSCPSSIMLHTGPPQVHMCPASSQLAPTTLQALSGPGRWQQPQSSTLHHTPLHPSMSATTGLCGMSPRCLGRQGTCQTKLVQGISQLAFQGHSGKASVFWCWQYTKQLQPSRRLHPSVFSHSVLKARHLAINKQGSPNHYGGHTHKDCSP

SEQ ID NO: 191744 - protein, 135 aa, Oryza sativa
  unsure (1)..(135): unsure at all Xaa locations
  Clone ID: PAT_MRT4530_88032C.1.pep
MKTVGNGRKNPLPFPFSFYFLENGIGTVYSETVTISVISVSRKRNRRNGNIPISDGSRKFMSETANCGIIPHLTMYEDDLIISPLHHYAATQHRYMMINKLTIRLINNINKVQXYFNINVAKAYNVAYMIGLQHN

SEQ ID NO: 191745 - protein, 90 aa, Oryza sativa
  Clone ID: PAT_MRT4530_88033C.1.pep
SSRPKTPASDGTLLTHRGLQTTSVVAVCTTTTVKSQAARTDPPEEEEEVLVCPTKTDSQHMPINIILYQYLYNKELHVPKSLSKVESTPQ

SEQ ID NO: 191746 - protein, 86 aa, Oryza sativa
  Clone ID: PAT_MRT4530_88034C.1.pep
MVSERQLGWRAAPVDVWPANAGNVLLLGTRMPGFGEAAPQCHVALPQGESGPRWGPRWGGGHSFPKTSRRRLPPNAMWPSPKGSQA

SEQ ID NO: 191747 - protein, 64 aa, Oryza sativa
  Clone ID: PAT_MRT4530_88035C.1.pep
KKLKQQRQQQGRISEEVPAGDAAAASRAGEWGSWAAAAVRTRVAALKEPAAAQGLAAVDGFFSA

SEQ ID NO: 191748 - protein, 167 aa, Oryza sativa
  Clone ID: PAT_MRT4530_88036C.1.pep
MSSSPSLSPLSCRRTSFSLLWSPSPPFPSSSDDGTRKHVDIELSGGSTSHLELPAEWIKEGLSGEHGSRLSEVPTAAQAYATAELRPPPCLQSGGSSGGLLVLTRDEAPAVKASSVDELPGGGTERGAAAAIELLSGGRCGPHPSDASSRSPPRRLSSGPLSPFPVA

SEQ ID NO: 191749 - protein, 329 aa, Oryza sativa
  unsure (1)..(329): unsure at all Xaa locations
  Clone ID: PAT_MRT4530_88037C.1.pep
MAGTIHPFHQQWPPAAGAPAPAAAVPPPPPARPTPPPQPPPPPPRPAAAARPDEVRTIFITGLPTDVKERELHNLLRWLPGFEASQINFKGDQPMGFALFSSAHHAIAAKAALQDLIFDAETKTALHTEMAKKNLFVKRGVGNDANAMDQSKRLRTGGDYTHSPYAAPPYHPPPPAVSMWGTPGYIAAPPPYNHYAAYSVPPVAMTSPSPVPGPTAYAPVXNTEDNPPCNTLCHGHLGETVIEAELRSLFSVQPGYKQMKVLRQDRNTVCFIEFEDVNAASAVHHNLQGAVIPSSGRGGMRIQFSKNPYGRRKDSVGGIGGSLNGAPSN

SEQ ID NO: 191750 - protein, 36 aa, Oryza sativa
  Clone ID: PAT_MRT4530_88038C.1.pep
LHLLHNKEAFSYMSHTLHKPTRTHTLTIHIITYTSK

SEQ ID NO: 191751 - protein, 54 aa, Oryza sativa
  Clone ID: PAT_MRT4530_88039C.1.pep
FIFIFLTQHPSRVNSNKNSLTLITLSNYKIINPYINFQYLKKKIFFQLLSNFTS

SEQ ID NO: 191752 - protein, 238 aa, Oryza sativa
  unsure (1)..(238): unsure at all Xaa locations
  Clone ID: PAT_MRT4530_8803C.1.pep
WSRDLRAXFPLSPAALSPSRCYIIAPRAPLFRFRRSPLALAVEIVLAPCSSLSAIAAELRSAAAAAPDFLLTRRPLRPLRRVAADPVRRSASPADRRSTVALVIPSRAAVFLRSVRRFRRLRCLGVSRGPXPLRFPLPSSLSGATPPRRWSPAATIGARXARRSRRPRRRGRPRARPRGCQVGPAVSRPRPWVRLTRGTHGADRRQPRAPGPPWTERLTRGPHFPWTRSARPPPRLTQ

SEQ ID NO: 191753 - protein, 155 aa, Oryza sativa
  unsure (1)..(155): unsure at all Xaa locations
  Clone ID: PAT_MRT4530_88040C.1.pep
GGGPGKGGRGGKRGKGGKKGKRRKKGEKKGKRGGGGKRGNGGKREKKREKKKKKKKGGKEKKGKKKKKKEKKKKTGEKREKRGGKKKKKKGKKKEKGKGGKGGKEGSAFNEGAGQNEKARKRRKGKKRXEAGQREWPQKGKNPSGVKLGLIIGGF

SEQ ID NO: 191754 - protein, 103 aa, Oryza sativa
  unsure (1)..(103): unsure at all Xaa locations
  Clone ID: PAT_MRT4530_88041C.1.pep
MHWSVILDIMMNPAMMYDQMDDHMHHRCHSVMNTDMILYEHLYELDRYLHRFVQSGIKARIGTEMLRNTLRKMIVQMNWPRNCMRXCISYWLSDCRGDFLLCS

SEQ ID NO: 191755 - protein, 60 aa, Oryza sativa
  Clone ID: PAT_MRT4530_88042C.1.pep
RIALRFPDLLRVKPRVSGCLVFKWCSGDLCPHRVPSPAMAFGVSGCVVSVINGHLNRIVN

SEQ ID NO: 191756 - protein, 630 aa, Oryza sativa
  Clone ID: PAT_MRT4530_88043C.1.pep
SNTDDATPSMDQNDNDVIFPPPEIPSENDILEILKQMRRDASPGPDGLNVAFYRAAWNWIKDDVTAMVGSFYETAHRGIRQGCPLSPYLFVLAINELSDQLADAIQRNHISVIKLGQNGPSIHSLMFADDLIIVGQAQQEEVRKTSEIINSFCLRSGQTPNWGKSSILFSKSTPEEVRQNILTIFPVSLMNSSTKHLGHPLLVSAKDRNAAYSFIVDKFKSKLTTYKANSLSHAGIQADGGKKGMALRSWKDICKPVSEGGLGIRDLMAVNKSILVQSAWRILTNPNDLLSSVLKSKYFPNTSFWKARTDMPKSAFWSSILQVSDLWDENKNWDAQKITQIFDSAAQHSIMQVQIMQGEEEDRLCWKYTPSGVCSAKSAYKTIYNEMYPNQNQIWKARNDINFKTKIWEPQQVCNAAQAMAKTYESVHQMEEDSCQDFNRAEENNIRNSIVKIPTGTRVYVDASWKEEKIGVGIFIHNPSNHNAIVIKAQSLNAGTPLLAEAEGLFLAMQIARHLQLQDPIFLSDNSEIVNVVQNEDYIQNPGHWSLRPILSRIKNFLQDQQVRIIWISRELNKVADGLAKSARQAQTNSCLAFDCSNISHICSRDVCPTKRALSFTPNGAVNVTHALCF

SEQ ID NO: 191757 - protein, 125 aa, Oryza sativa
  unsure (1)..(125): unsure at all Xaa locations
  Clone ID: PAT_MRT4530_88044C.1.pep
MVYKKNKSLPHAYPSAGEKNSNEKKRIKKLEKESKKPADGKNPKKPKIKKRTKKKPKIKKRTGKNSEKEWTXRKKRKQRKKQGKKQKEKRRKNRTFFLPFSGVFLFFDRLFTGLLFLRIKLNRIY

SEQ ID NO: 191758 - protein, 60 aa, Oryza sativa
  Clone ID: PAT_MRT4530_88045C.1.pep
ICVVLKNKFYPPNKNKVHRLLSWNLVVRYLSYQLTRISRVINHPSCIKQRQERLQSFSQN

SEQ ID NO: 191759 - protein, 134 aa, Oryza sativa
  unsure (1)..(134): unsure at all Xaa locations
  Clone ID: PAT_MRT4530_88046C.1.pep
HASEKRKKNIYTSRERRIDIKGYQGHLLNSGSSWARTQAICGAQVSESHIKYSDRQGHREVQDSPVDAGRQVLDRQLTGRERLQPMFRXRPDALGLRMQCCQQLQDVNRKYRCADNRRMERSYKESMPMPLEQG

SEQ ID NO: 191760 - protein, 70 aa, Oryza sativa
  unsure (1)..(70): unsure at all Xaa locations
  Clone ID: PAT_MRT4530_88047C.1.pep
RNNQTNGNDPYAGSPTNTLLRLLLPLNDPVEHLSRXKPNDPRAARKTKPKISLKHSIGSSDGRCVQRTGT

SEQ ID NO: 191761 - protein, 678 aa, Oryza sativa
  Clone ID: PAT_MRT4530_88048C.1.pep
METTTTERRRLFATDKVGGRAVYRLQAATVAAGILLVLYYRATRVPAAGEGRAAWLGMRAAELWFAVYWVITQSVRWCPVRRRTFKNRLAERYKENLPGVDVFVCTADPHAEPPSLVISTILSVMAYNYPSEKISVYLSDDGGSILTFYALWEASMFAKKWLPFCRRYNIEPRSPAAYFSESEGHHNLCSPKEWSFIKNLYEEMRERIDSAVMSGKIPEEIKLKHKGFDEWNSEMTSKNHQPIVQVLIDGKSQNAVDDDGNVLPTLVYMAREKSPQYHHNFKAGALNALIRVSALISDSPVILNVDCDMYSNNSDSIRDALCFFLDEEMSHKIGFVQYPQNYNNMTKNNIYGNSLNVINHVEMRGLDSAGGCLYIGTGCFHRREILCGKKFSKDYKEDWGRGIKERGHENIDEIEEKAKSLATCTYELRTQWGNEIGVKYGCPVEDVITGLAIHCRGWESVYMEPQRAAFVGVAPATLAQTILQHKRWTLGFVKAIPLFQKIMSPWATPFIYVFCVKTLYSLYEALLSGDTLKGWWNGQRMWMVKRITSYLYGFIDTIRKLLGLSKMSFEITAKVSDGDEAKRYEQEILEFGSSSPEFVIIATVALLNFVCLVAGLSKIMAGVWNVFLPQVILCGLIVITNIPIYEAMFVRKDKGRIPLPVTLASIGFVMLAFLLPIV

SEQ ID NO: 191762 - protein, 291 aa, Oryza sativa
  Clone ID: PAT_MRT4530_88049C.1.pep
MAMVFLQFGFAGLFLISVASLRQGMSHYVLVVYRNAVAAVVMAPFALWFERMERISIKERRSQAKIAGTLITVGGAMLMILFKGPVINFPWTKNANHNISDSSDHNNGHWLMGIFMILLSCFCWSAFFILQSYTLRGYPAELSLTTLICAMGVAQSGAVALVMERDIKAWLIGFDMRLFTAVYSGIMCSGVAYYVQGMVIKERGPVFVTAFSPLCMIIVTILGSFILCEVVTLGRVIGAIIIVVGLYALIWGKNKDHGNQVDQDDNFEKQKTFELPLSTTNVNEARSPNHI

SEQ ID NO: 191763 - protein, 86 aa, Oryza sativa
  Clone ID: PAT_MRT4530_8804C.1.pep
MGLQHKLTNLGKAEARSSNHGMDDGSRRIHFTMPYIKKPPKTQALKNTTHRREQPAAKRVGAHHLIVEISRQSEAQSLQKGDLSPA

SEQ ID NO: 191764 - protein, 701 aa, Oryza sativa
  Clone ID: PAT_MRT4530_88050C.1.pep
METTAAATAAERRRPLFTTEELGGRAVYRVQAATVAAGILLVLYYRATRVPAAGEGRAAWLGMAAAELWFAVYWVIAQSVRWRPFRRRTFRDRLAESCIGHGPIINDPYQAGSILTFYALWEASIFAKKWLPFCKRYNIEPRSPAAYFSESKVHHNLCIPKEWALIKNLYEEMRERIDTATMSGKIPEEMKLKHKGFDEWNSDFTLKNHQPIVQILIDGKNRNAIDDDRNVLPTMVYVAREKRPQYHHNFKAGALNALIRVSSVISDSPVILNVDCDMYSNNSDSIRDALCFFLDEEMGQKIGFVQYPQIFNNMTQNDIYGNSFNVSYHVEMCGLDSVGGCLYIGTGCFHRREILCGRIFSKDYKENWNRGIKERGKENINEIEEKATSLVTCTYEHRTQWGNDIGVKYGFPAEDIITGLAIHCRGWESAFINPKRAAFLGLAPSTLAQNILQHKRWSEGNLTIFLSKYCSFLFGHGKIKLQLQMGYCICGLWAANSLPTLYYVVIPSLGLVKGTPLFPQIMSPWATPFIYVFCVKTLYGLYEALLSGDTLKGWWNGQRMWMVKSITSYLYGFIDTIRKCVGMSKMSFEVTAKVSGHDEAKRYEQEILEFGSSSPEYVIIATVALLNFVCLVGGLSQIMAGVWNMPWNVFLPQAILCGMIVIINMPIYEAMFLRKDNGRIPTAVTLASIGFVMLAFLVPIV

SEQ ID NO: 191765 - protein, 732 aa, Oryza sativa
  Clone ID: PAT_MRT4530_88051C.1.pep
METTTTERRRLFATEKVGGRAVYRLQAATVAAGILLVLYYRATRVPAAGEGRAAWLGMAAAELWFAVYWVITQSVRWCPVRRRTFKNRLAERYKENLPGVDVFVCTADPHAEPPSLVISTILSVMAYNYPSEKISVYLSDDGGSILTFYALWQARIFAKKWLPFCRRYNIEPRSPAAYFSESEGHHNLCSPKEWSFIKNLYEEMRERIDSADMSGKIPEEIKLKHKGFDEWNSEMTSKNHQPIVQVLIDGKSQNAVDDDGNVLPTLVYMAREKSPQYHHNFKAGALNALIRVSALISDSPVILNVDCDMYSNNSDSIRDALCFFLDEEMSHKIGFVQYPQNYNNMTKNNIYGNSLNVINHVEMRGLDSAGGCLYIGTGCFHRREILCGKKFSKDYKEDWGRGIKERGHENIDEIEEKATSLVTCTYEHRTQWGNDIGVKYGFPAEDIITGLAIHCRGWESAFINPKRAAFLGLAPSTLAQNILQHKRWSEGNLTIFLSKYCSFLFGHGKIKLQLQMGYCICGLWAANSLPTLYYVVIPSLGLVKGTPLFPQIMSPWATPFIYVFCVKTLYGLYEALLSGDTLKGWWNGQRMWMVKSITSYLYGFIDTIRKCVGMSKMSFEVTAKVSGHDEAKRYEQEILEFGSSSPEYVIIATVALLNFVCLVGGLSQIMAGVWNMPWNVFLPQAILCGMIVIINMPIYEAMFLRKDNGRIPTAVTLASIGFVMLAFLVPIV

SEQ ID NO: 191766 - protein, 79 aa, Oryza sativa
  unsure (1)..(79): unsure at all Xaa locations
  Clone ID: PAT_MRT4530_88052C.1.pep
SSGVVRRHHPHMVQQSXLGHXXHAGMHAALXGRAQSXRVXEGQHGQRXGXSWPXAGLQPLLRSWQNAYFFNKSCFSVMS

SEQ ID NO: 191767 - protein, 49 aa, Oryza sativa
  unsure (1)..(49): unsure at all Xaa locations
  Clone ID: PAT_MRT4530_88053C.1.pep
DLELILTVLFVGYFPSICFYIAKDTDFIYKLFSVCKYAVGLFGGSSXTW

SEQ ID NO: 191768 - protein, 88 aa, Oryza sativa
  Clone ID: PAT_MRT4530_88054C.1.pep
QEKVLQLPALDQRAKHVEDPPVQLVPDQVELLDEPQAPQGHRHGSGDVVPPGLPCAQPPRLSDPDKQAARNAVAARKHQLKRARSTVE

SEQ ID NO: 191769 - protein, 275 aa, Oryza sativa
  Clone ID: PAT_MRT4530_88055C.1.pep
MVKCRARTTRKKIEIKRGDKKVRDACFSKRHTTIFNKANELAILCGVMVAVVFVSPNANGGIFSFGYPSVSSVANRFLANAPNNTSVSSSTQSGRDVEIRELEREERELKEHLQASTDQNKLLREAIAARDGGQLMLLLQSDCSELGPKGLVSALIITALHIEGSSHPSGTALQPLPVLGEEKPWLEISLPAPRRRWPSHGYTLPPAPGLAWRVAASALPRGPSAVAPALRHAKHKDSPVRARLVAGGVADGKRRDPFSASRFHMPDRTGLWPIS

SEQ ID NO: 191770 - protein, 123 aa, Oryza sativa
  Clone ID: PAT_MRT4530_88056C.1.pep
MPFSPPCLDAAAAAAASLSFLPAAAARPPAPCAVAPRSRRALRVAASVATAPESAAAQGRLESLSQVAGVLGTQWGDEGKGKLVDILAQRFDIVARCQVGPSRAVARASFAGVELMLGILYII

SEQ ID NO: 191771 - protein, 108 aa, Oryza sativa
  Clone ID: PAT_MRT4530_88057C.1.pep
MEAAVFAPPPDRHPGTTSGGGGGGRRCCTGEDGREWRELDIQGRGCNEVHPWTMTDRCVQRMRARRELCSWRTRNLWGSLRRGSTSLKPHDSLHQFIPSVEALSGWGF

SEQ ID NO: 191772 - protein, 73 aa, Oryza sativa
  Clone ID: PAT_MRT4530_88058C.1.pep
MAKAAGGGGRGFRRGHPRRRWRLRLYSPPCLAHAAYGRPRRKPGWSPVILRLAAEGVEVGTRPQRETATATAS

SEQ ID NO: 191773 - protein, 72 aa, Oryza sativa
  Clone ID: PAT_MRT4530_88059C.1.pep
SVSRERPRGLPASTTRCGLFDLGSSLTPILINFDLRALPLISSVFFFQSVSHIAMQVDLDGLGPMAHASSFA

SEQ ID NO: 191774 - protein, 173 aa, Oryza sativa
  Clone ID: PAT_MRT4530_8805C.1.pep
MASATREKGTGGGVGPTMERKLEARVSFTLRHGHHEVHMHVGAFGGLVWPSVMSSVKSQTKREVAVITIGGLTGHPMSVRPAGNINWGFRFQQPKVLKPPIHPPLLGHGGRRRQAPVAAEDLFLDFPKEETGGNERDSGGGREAAAAAGSGCGGKGEEAEATASKWEQAVAGR

SEQ ID NO: 191775 - protein, 397 aa, Oryza sativa
  Clone ID: PAT_MRT4530_88060C.1.pep
MAVEVVQFLVRKYVDSLAEEEAAAELPFRAHFYDVKAELEKAAISSTNADELRQCLYELNDLLAECRMLASRTNTRPGCFSPSEAWRSNRVKTRVIAVKRRVLRCVESDSSGNAAALEEEDSAAAGFSRWTTSWLEEGTVHGFDQQLAELESMAFGAECGAGGLTGVGIVGMGGVGKTALAQLVFNSPRARRRFFPRIWVCLSRTACAGVDVRKEVLQSMLMALGLEEEVILSMDGGNGLGEMVFAVHEQLKGKRYLVVFDDVWNVDGWYADVVGRRNASPTGEEWGERLAFGLPKERGGVVVVTSRLEQAAETMVGKSSLHRVQPLADGESCWAIFMDAFSKERRPADVTTVNNMKDEIIDTCGGLPSAAKTLGDIFARSLSSPASTSSQELSKNR

SEQ ID NO: 191776 - protein, 337 aa, Oryza sativa
  unsure (1)..(337): unsure at all Xaa locations
  Clone ID: PAT_MRT4530_88061C.1.pep
MVDSKQTSKPPSSKPPPTAEVIPENIIPITLDKLTPEQVAEYEQMINNLKTQYLHSFKQMHSGTVIQRYKVKVVSADDPESSTSKDGXGDKGDKDDEPKDDETGGEEPLEFNNFXTKSRVLVNTLKNMIKFVVDGTIAEHQAKGPVFLPEGVFPQYRNLVTGNQQPATNVPPGQPMASASASRPGVSSSAQRPPVNPYLLTREQPQHARQNINRLTQEQIAAMFKPPQPVGAQFIPEQQMHNVQQPPQNYLGDKQFHSYFYSGNHEMKLSDLAAVRQRHDETIQNYIQRIRDMRNRCYSLALTDSQFADLAFQGLIAPIKEKFSAQHFESLSHLAQK

SEQ ID NO: 191777 - protein, 270 aa, Oryza sativa
  Clone ID: PAT_MRT4530_88062C.1.pep
MAMESASSELERPESLMAVEVVQFLVRKFVDSLAEEEEAAAELPFRAHFYDVKAELEKAAISSTNDDELRQCLYELNDLLAECRLLANRTNMRPGCFSPSEAWRSNSLKKRVIAVKRRVLRSVESDSSGVGGNAAALEEEDSAATGFSRWTSSWIEEGTVQGFDQQLAELESVAECGAGGLTGVGIVGMGGVGKTGLAQLVFNSLRAMRRGAAAAGVRPRGQEWRRPRLSTVLISAGERREQRREMKRGGRGGDCNDRRWEWAVADGERS

SEQ ID NO: 191778 - protein, 81 aa, Oryza sativa
  unsure (1)..(81): unsure at all Xaa locations
  Clone ID: PAT_MRT4530_88063C.1.pep
TPCENKRHLDLCYQIALHXHVAGLLIYRGGQPAAHXLRDIVRLINIRAVLSLALVHYXAVCGVLTQVERQKLLIECSLYGV

SEQ ID NO: 191779 - protein, 930 aa, Oryza sativa
  Clone ID: PAT_MRT4530_88064C.1.pep
MVKRRLFLLLFLCLLAGSRIASADTNPQDAAALRSLMKKWTKNVPASWRKSNDPCARWDGITCDRNSRVTSLNLFGMNLEGTLSDDIGNLTELTVLDLSSNRGVGGTLTPAIGKLANLRILALIGCSFSGNVPSELGNLSQLDFLGLNSNQFTGKIPPSLGKLSKVTWLDLADNQLTGPIPNSRDHGSGFDQLLKAQHFHLNKNKLQGSVPDFLFNSSMDLKHILFDRNNFNGSIPASIGVLPKLEVLRLNDNAFTGPVPAMNNLTKLHVLMLSNNKLSGLMPNLTGMDMLENVDLSNNSFIPSEVPSWFTSLIKLMTLKMQSVGLSGQLPQKLFSNPNLQYVVLSDNQLNGVLDMGNISDELHVDICYFSVARLAGNPVCGDSLLSSMKPCTDLTTEPLHKPPSIDVQCANPFVETIVFRAPSFGDVVKFLPSLQANLSSKLNSCTPNNLGLVYSNDDAYLNVDIRACPVNQKRFNYSQVLNCFNLTLQTYKPPEIFGPYYVKAHPYPFHDKTSRAVLIGVVTGSLLLVIGLTLVGVYAVRQKKRAQKLVSINDPFASWGSMGQDIGEAPKIKSARCFTLEDLKLSTNDFREINAIGAGGYGTVYRGKLPDGQLIAIKRSKQGSMQGGLEFKTEIELLSRVHHKNLVGLVGFCFEKGERMLVYEFIPNGTLSEALYGIKGVQLDWSRRLKIALDSARGLAYLHDHADPPIIHRDVKSTNILLDERMTAKVADFGLSLLVSDSEEGQFCTNVKGTLGYLDPEYYMTQQLTAKSDVYSFGVVLLELIVAQPPIHKQKYIVREVKTALDMGDQTYCGLKDVMDPVLQKTGDLRGFARFLKLALQCVEDLGTDRPSMNTIVREIEVIMQDNGIRTGMSSTSSSFSIDSRTMMAAPKYPYSNASTSSTAFDMDSRAFEYSGKFPSEGSLKNRGT

SEQ ID NO: 191780 - protein, 90 aa, Oryza sativa
  unsure (1)..(90): unsure at all Xaa locations
  Clone ID: PAT_MRT4530_88065C.1.pep
RGQTGGXLFTTYKRNFDRKNFFLLLPPKKKWEKPPRVLXSCGDLIINKGGKGGLWERPNKPFLFFTLFEHKDGGESPDAAIGGDFWEDPP

SEQ ID NO: 191781 - protein, 96 aa, Oryza sativa
  unsure (1)..(96): unsure at all Xaa locations
  Clone ID: PAT_MRT4530_88066C.1.pep
GLLGFNGPTSXEIQGCHPEILKIGTRVPNSNTKREFXWVLPDEPGLYITLTALPGRTRDLKKVRINRKRIIETQAAHWLLENRAPVYERGYVLVVI

SEQ ID NO: 191782 - protein, 55 aa, Oryza sativa
  Clone ID: PAT_MRT4530_88067C.1.pep
APGIMTATSVSEDAVGVSVEDLLYPGTIEPQLVKQNQHPAVHRLFLFFREDILPC

SEQ ID NO: 191783 - protein, 176 aa, Oryza sativa [sequence omitted]

SEQ ID NO: 191784 - protein, 44 aa, Oryza sativa
  Clone ID: PAT_MRT4530_88069C.1.pep
SSTYLVLFFNDKELVYIYVLYICSYHVNDKRICHKSKVLIIVGA

SEQ ID NO: 191785 - protein, 435 aa, Oryza sativa
  Clone ID: PAT_MRT4530_8806C.1.pep
MDQEASLLPAASSHTVVRRKRALQLNETVYEEPEYVATKGGTYNVAEMPERLLMAADYRTSPSTAGSNAAILTVRGHSSAAASAAAAHTICALSSAAGNTIATSTATAHSICSWSSAAGKTIATSTATAMTDSSAARSTRSIPPYLIGRMQMDGEEIAVVSSPLVEPDTIAEVPVISMDDDDHPTSPTSTKIAVEGRPQPKLRICSVDVDLSGSPNGHVPEAPQRTAWEATGERSHGFKEGNPERRTVGVGDADAEYRSPDLQARSPSIASELAAVRLVLLVTGASGLDAARARPDDRRRFPIPSAASWLGVPVARARMTALRWVRSSTALRGNSSDAAAAAAAAAAPSPSSASSTPTSSTFLEEMALPLAAPIMAASVVTAASKARVSSWCLPGMAAAPHCCGRGGDGGVRGGGCGGGGGGGGDVDLIGGRRDL

SEQ ID NO: 191786 - protein, 123 aa, Oryza sativa
  Clone ID: PAT_MRT4530_88070C.1.pep
RPGSLLDSPSCAVRSPSPHAAPLPTHGRNSLQTLTLTSSLSTNTRCTLLRAPLPTRRFLRVSPDLHLEIRRRSSVRSSPSVAHVALSPTFAPPPVSSARLEQDNLLLKKTPMLEMITIVLHCS

SEQ ID NO: 191787 - protein, 162 aa, Oryza sativa
  Clone ID: PAT_MRT4530_88071C.1.pep
MAFENIVVANPVVDMDGDQTTRVIWKWIRDQLIFHFLDLDIKHYDLGLPNQAADGDKVTIESAEATLKYNVAIKCATITPDEGRVKEFNLSAMWKSPNGTIRNILNGTVFREPIICKNIPRLVPGWIKPICIGRHAFGDQYRATDTVIKGPGKLKLVFGMSQ

SEQ ID NO: 191788 - protein, 475 aa, Oryza sativa
  Clone ID: PAT_MRT4530_88072C.1.pep
MAFEKIVVANPVVEMDEFNTFDVLKAALLGLSEILGVTRNSGDEMTRVIWKWIKDKLIFPFLDLDIKYYDLGLPNRDATGDKVTIESAEATLKYNVAIKCATITPVLDTQFKFDFGRTIHEPTDEGRVKEFNLSAMWKSPNGTIRNILNGTVFREPIICKNIPRLVPGWIKPICIGRHAFGDQYRATDTVIKGPGKLKLVFDGREEQIELDVFNFTGAGGVALSMYNTDESIWAFAEASMNMAYQKRWPLYLSTKNTILKKYDGRFKDIFQENYETKWRAKFDDAGIWNMEPYFPPLCPNHFCCGRYEHRLIDDMVAYALKSEGGYVWACKNYDGDVQSDLIAQGFGSLGLMTSVLVCPDGRTIEAEAAHGTVTRHYRVHQKGGETSTNSIASIFAWTTGLGHRAKLDDNKRLLDFVQKLEAACVGTVESGKMTKDLALLVHGPNVSRDKYLNTVEFIDAVAEDLRTRLSVTSKL

SEQ ID NO: 191789 - protein, 283 aa, Oryza sativa
  Clone ID: PAT_MRT4530_88074C.1.pep
MNARVLGGGGGGGGDGETTVVLAHGYGGSSHIWDDVAPALAKTFRVVVFDWSFSGDVVVDDDDDAAAVSEDISCSYFGFADELVAMMDELALTAVVFVGHSMAGMIGCIASVARPELFRHLVLVGASPRYINDDGDGYVGGFERGEVDAMLAAIEADFAAWAPLFAEAVVGPAPSPGAGAVAKFAKQLGRMRPAAALRVMRAVLTCDVRAVLRDVAAPCTIVHCARDAVAPLAVARYMQRAMARGVDGAPAPAVVVMDSSGHFPQLTAPMEFVRVMEAILLDH

SEQ ID NO: 191790 - protein, 78 aa, Oryza sativa
  Clone ID: PAT_MRT4530_88075C.1.pep
IELSFFWLAIGIPGRGLLVRTPDGRSRSCDDCDNVAFEKKVCSMWDSICVIWNSDWDFRGGRGCRTKNHRKDMYVLRY

SEQ ID NO: 191791 - protein, 138 aa, Oryza sativa
  Clone ID: PAT_MRT4530_88076C.1.pep
DTHSTVSIEDKSWCHMDVQLAQDVVQATVLLGCLRLHGRSSAVSIEPPLETTTTSSLFSSADGGSGLSSVTTTVYADAYAGSSDGTGSGHAALARRHPRDNHHQQQNRQNDNQSITKRESGGRRECRPATCMCDMMNE

SEQ ID NO: 191792 - protein, 100 aa, Oryza sativa
  Clone ID: PAT_MRT4530_88077C.1.pep
RHPLNYLLGQLCLKCFFLGIPSAFTQDIHEFFSQLAKELVSSSETAGPLIYFNRTPGHRWAAKQGRITCFPPQLDLVEEIWGSQDIREIKISPLWQWRKF

SEQ ID NO: 191793 - protein, 89 aa, Oryza sativa
  Clone ID: PAT_MRT4530_88078C.1.pep
GIKTPSWSSGNRKTILKTTSRRISPPGRLTEVQDTKPNETRDQRQNKGATGSVGNHRVAPRPGPSTGGYSTPPGGLDQEPTPGGEGPVG

SEQ ID NO: 191794 - protein, 144 aa, Oryza sativa
  Clone ID: PAT_MRT4530_88079C.1.pep
AAATSDRSRLIAPFPFSACGRRRTERRGSTPLPPPSTTACSPSASGSWRPTRSRAPDADALLHGAACALWPRAPPTPSLTPPLVALAPKIVTPVPAPKAAATPTLTPVAATTTPNAAVSPSPGCPACMTGTSPMGIDHRRNAAA

SEQ ID NO: 191795 - protein, 222 aa, Oryza sativa
  Clone ID: PAT_MRT4530_8807C.1.pep
MDPLSTACVPEAEVIDLESAECRSGATMAKSMGHSSGFHPKQQGHRKISLSPQSKGNFLESARRGFSIVVYILDLVTKKYILHFYIERCQPKCVVNIIKEFDDRKKELIGEVGFDGLLDIKLTKVNRQFGAWLLSKVDPKSCAIVKDVNQELPFGPNDVNAVFGLPCSGQPIIPCSQYELDGKKQILCEIFEIPNFSHLKISLLERILKKQYGYPMTIDEKR

SEQ ID NO: 191796 - protein, 108 aa, Oryza sativa
  Clone ID: PAT_MRT4530_88080C.1.pep
MWAAADLDSIAASLDNGVLTVRFWKLAPDADALLHGAACALWPRAPPTPSLTPPPVALAPKIVTPVPAPKAAATPTLTPVAATTTPNAAVSPSPGSPMGIDHRRNAAA

SEQ ID NO: 191797 - protein, 111 aa, Oryza sativa
  unsure (1)..(111): unsure at all Xaa locations
  Clone ID: PAT_MRT4530_88081C.1.pep
MLYVDTVYLRVYGCFLYTLRKSITXIETESTDGRSPTRTELGRYYIVWGPISASSTWRSTNPRYKRDPRGGPKTSNLITNTTTTAYEVEAGRSQVAGXSSRTNSTTVSSVS

SEQ ID NO: 191798 - protein, 39 aa, Oryza sativa
  Clone ID: PAT_MRT4530_88082C.1.pep
MAHPDQDMCGQILQIDPDVKYAASACPFSAHLKWKKQAQ

SEQ ID NO: 191799 - protein, 72 aa, Oryza sativa
  Clone ID: PAT_MRT4530_88083C.1.pep
IDTELHTYKLIYITYIQTSQIREAVPAVVVLEVPCTITLPLRAPSASTASAFDDAARESPVAPRHVVSVASA

SEQ ID NO: 191800 - protein, 50 aa, Oryza sativa
  Clone ID: PAT_MRT4530_88084C.1.pep
KKVILPPIGQPGEHVTFPRLETLFPPYPFLEEDRPGPRLHFPSFPRGLLG

SEQ ID NO: 191801 - protein, 62 aa, Oryza sativa
  unsure (1)..(62): unsure at all Xaa locations
  Clone ID: PAT_MRT4530_88085C.1.pep
NGRGTVXQTGGRTIAAEKWVTSPIAVGAIRYRDGMSGARIRQVRRRDRHAGAETSPGQPDSP

SEQ ID NO: 191802 - protein, 54 aa, Oryza sativa
  Clone ID: PAT_MRT4530_88086C.1.pep
TLQFTAYKHFNLQHLNSSNHQLNKRNFKHLIGISIIIDSKLSTIYHLSLSMLLW

SEQ ID NO: 191803 - protein, 74 aa, Oryza sativa
  Clone ID: PAT_MRT4530_88087C.1.pep
MGKMKGKQRQDKFYHLAKKFYRVRCRAPLHDGSPNVGGAWAQEATAQSSLVHNRLPPRRLVLPPPCRCSPPPQR

SEQ ID NO: 191804 - protein, 97 aa, Oryza sativa
  Clone ID: PAT_MRT4530_88088C.1.pep
MKNMNKVTCLLHQSAISMKNMNKVTCPLHQSAISMKNMNKASEVGSRTRAAEAGSGETRQWRKPRSHKTFRCQCASADASPTSPLLHRRLIPSAPLR

SEQ ID NO: 191805 - protein, 251 aa, Oryza sativa
  Clone ID: PAT_MRT4530_88089C.1.pep
MGVAVTMASYAAVLRPHASSTRTPRGPRRPAGAVPPTPRRAALRATTRSPPAVAATPPPRERVQQQQQPGDGQTTTRLYSLAPCPLLLAALLPGAEPVRAVFEPFVELVKTWGLPGWLVHWGHPGNMAVVLFAMGGYGTYLGFRIKLSDDPEEKAKAKDLHPKLLAGMFFFFAAGATGGVTALLTSDKPIFESPHAVTGIIGLALLTIQSILPTLFEGNPSLRNAHGLLGSGIMTLFLIHAAFGLQLGLSF

SEQ ID NO: 191806 - protein, 513 aa, Oryza sativa
  Clone ID: PAT_MRT4530_8808C.1.pep
MAPLSTACVPEAEVIDLESAECRSGATMAKSTGHSSGFHPKQQGHRKISLSPQSKALKVSGTRGSLNKTVARVVSRCQPKCVVNIIKEFDDRKKELIGEIGFDGLLDIKLTKVNRQFGAWLLSKVDPKSCATVKDVNQELPFGSNDVNAVFGLPCSGQPIIPCSQDELDGKKQILCEIFKIPNFSHLKISLLKRILKKQYGYPMTIDEKRVFMAAFVLYVTTKLLAPQSCANFISPRSIMAVSDVDNIKQYNWSQFVVDEVKKAAESMPTCFPNKAQLSINGCIIFLMVKYLRNLLFRKVGITCVKTCHISQFEDDQIARMIQQDVVSKHNPGFPFPRYGKLQLMKDPRENNPHVPELSPLNLCSCSKIPSRAIDGGKNLIKFLVSHFSSLDVHRSVGSQAYEELKSSVQDGFDRIDKILPTISDFVDISTMQTAIHASNLFKRAFKTNITVAVKIVIRAAITKVIDTIEDIQGPLHPWGDTTAMGYHTPTNYSTHATKDASQLDQPTNTVKR

SEQ ID NO: 191807 - protein, 191 aa, Oryza sativa
  unsure (1)..(191): unsure at all Xaa locations
  Clone ID: PAT_MRT4530_88090C.1.pep
VRXLMRRMPPGRAETALNALLSLIPDHSLDLLSQVDLPLQVCMDKESVKEYILCEYNRDADSYRSPWSNKYDPPLEDGTVPSEEMRNLEVEANDVFSVYRDQYYEGGISSVYIWEDEDESFIACFLIKKDGEGKRGHMQIGSWDAIHVIQVGPEEEGAAHYCLNSTGDAIIGQQITSQSGNFSTCAGITSG

SEQ ID NO: 191808 - protein, 301 aa, Oryza sativa
  Clone ID: PAT_MRT4530_88091C.1.pep
MEAAMDLMRRMPPGRAETALNALLSLIPDHSLDLLSQVDLPLQVPISSSYRIASQLPTSSFLVMGCSSCYSKRFTDREMEVGVLIIARENGPVCMDKESVKEYILCEYNRDADSYRSPWSNKYDPPLEDGTVPSEEMRNLEVEANDVFSVYRDQYYEGGISSVYIWEDEDESFIACFLIKKDGEGKRGHMQIGSWDAIHVIQVGPEEEGAAHYCLNSTVMLSLTTDNKQSGTFHLSGSIRRQMSMTLAVADGHLVNMGKMIEEMEGKLRNSLDQVYFGKTREMVCTLRPPPEVLNRRLPDS

SEQ ID NO: 191809 - protein, 102 aa, Oryza sativa
  Clone ID: PAT_MRT4530_88092C.1.pep
MGTMRRMRVWDCILMEMIIIAVLNNLSAKVQLLWIRSSFSGSRDSKDCLQWEMCCDKIFNSHNFRRMSSNSNKVILEWMLIIRRWKLMSRVLVTENDEAIIY

SEQ ID NO: 191810 - protein, 350 aa, Oryza sativa
  Clone ID: PAT_MRT4530_88093C.1.pep
MASTMVRQFVHMVTYSCNRGIYGLHRINPSRFFHPKDAAVGRPATAVEDVRLPRPAMSFSRPYETHIIPTEFMPLGRNNDKIVSVDETGRSILYDVASHAISTLPGLKAEPKFGCCVSLNIGDNLYVMQENPCRAQCFEALVYCKSPKSDEEQENRWSWRPQPPPPYLHSVGYHCSGGDITAYAVVGDSHILVSTESYGTYSFDTVSSEWSKAGDWALPFNGRAEYVPEHGLWFGFSASDDGLLGAWDLSTVVTQQQPPVAHVLQDGFSVPEGFSSFVVHLGAGNLCVAKLFEKARRETSDQDCYLFETTRRFAMLTGVEVQRRGEELNIIKHRSSRYSFGLDKIPSSVF

SEQ ID NO: 191811 - protein, 515 aa, Oryza sativa
  Clone ID: PAT_MRT4530_88094C.1.pep
MGEDGGVNSSSNSPAAAGALALVVAICSYLAVVATRKQKRRRRRRPPVVGTAFHQLYHVRRVHDYHTALSREHTTFRLLVPAGRDQIYTCDPAVVEHILRTNFANYGKGPFNHGNASDLFGDGIFAVDGDKWKQQRKIASYDFSTRALRDFSGAVFKRNAAKLAGVVSSHAASNQSMDFQGFLLRATMDSIFTIAFGPDLNTLDGSGEGRRFAAAFDDASEFTMLRYLSPLWKLARLLNVGAEAMLKERIKVVDGFVYRLIRARSDELSNTKAHDSGSRQDILSRFLQATTSDSGTVDYKYLRDIILNIVIAGKDTTAGALAWFLYMVCKHPEVQEKICHEAMVATSAGDAASVDEFSQSLTDQALNNMHYLHAALTETLRLYPAVPLDNKQCFSDDVLPNGFNVSKGDIVFFIPYAMGRMESLWGKDAESFRPERWLDENGVFQQESPFKFTAFQAGPRICLGKEFAYRQMKIFAAVLLRFFVLKLRDEKEIVSYRTTLTLAVDQGLHLTATAR

SEQ ID NO: 191812 - protein, 118 aa, Oryza sativa
  unsure (1)..(118): unsure at all Xaa locations
  Clone ID: PAT_MRT4530_88095C.1.pep
QIITYALTITPLAMSLEELLPPNXRKYANIIMLRSSLVVSTLLIALSVPFFGLVMALVGSLLTMLVTYILPCACFLAILKRKVTWHQIAACSFIIVVGVCCACVGTYSSLSKIIHNYT

SEQ ID NO: 191813 - protein, 349 aa, Oryza sativa
  Clone ID: PAT_MRT4530_88096C.1.pep
MKDLVSCFSEHAVRISDVACSGSANAATVSAAGVAAAGVGDGGGAGRAAVSAVTSVYRSRLSASGKDLVIDVTWSRAPDGPALSVAVHDAAAASRLRGGGGGAAGAAPRHLHRRKGSGTFTAGSCVVGVFWDFAAARYAAGPEPVSGYYVAVVADAEFVLLLGDMSRGYVERLHGGIPIAGSRMARRRERFVGCGCWSTRARFLESGAEHDIVVALDGDAEAWVTVDGRKVVQLRRLRWNFRGSHTLFLDGGAPVDMTWDLHGWLFHAADPSPASSCAAVFTFQTRGASETKFWIEDDGDGDDDLEQSQPPAAPRGPKQKLGGGGGGGAPSGQGFCLLIQGFRGASKIA

SEQ ID NO: 191814 - protein, 91 aa, Oryza sativa
  Clone ID: PAT_MRT4530_88097C.1.pep
MVVWWRRTREEWPALMEEAAAAAAVAVAAMFLKAELRHFFLMALLASNSSSADSSSLEAPNFANLKSFLKQGGPPARSQERVPTGGRDEDP

SEQ ID NO: 191815 - protein, 46 aa, Oryza sativa
  Clone ID: PAT_MRT4530_88098C.1.pep
MAGSPACGGKRASAAESDGEGVDSVALGAANATASMAQLGAATSGG

SEQ ID NO: 191816 - protein, 68 aa, Oryza sativa
  Clone ID: PAT_MRT4530_88099C.1.pep
VKMLNRIAEAGGTFIPGPYLLVDMLEMKELGGRPDAQGKAANQASPQQAELTPRQQLLKDQVHACVAN

SEQ ID NO: 191817 - protein, 736 aa, Oryza sativa
  Clone ID: PAT_MRT4530_8809C.1.pep
MDPLSTACVPEAEVIDLESAECRSGATMAKSMGHSSGFHPKQQGHRKISLSPQSKRLFHSGLHTGPCYEEVYTALLHREALKVSGTRGSLNKTAARVVSRCQPKCVVNIIKEFDDRKKELIGEVGFDGLLDIKLTKYNWSQFVVDEVKKAAESMPTCFPNKAQLSINGCIIFLMVKYLRNLQFRKVGITCVKTCHISQFEDDQIARMIQQDVVSKHNPGFPFPRYGKLQLMKEPRENNPHVPELSPLNLCSGSKIPSRAIDGGKNLIKFLESHFSSLDVRGTVGSQAYEELKSYIQDGFDRIDEILPTISDFVDISTMQTAIHTSNLFKRAFKTNITAAVKIAIRAAVTKVIDTIEDIQGPLHPWGDTTAMGYHTPTNYSTHATKDASQLDQPTDTQQYDHKIGGLQCTPPKSNGAPEFGSDGQKKRKYTVENPPSHLLKHKSKRVVKPNRKLMSPFMSKQCSTERLESRIADDLYSYIMSISDDASLEKTWLQSSHPFRISLTLRNIQETIKIGSQMDSDSLNLAIRIMFQQEVERFHNTNYLGWRHFINQDFGMYALAGEEFWEASHQLAHFSGPEVVYDVSESHLILIPVHLFNHYVLYVFNMESKKLSVLDSLNTEDPLGESRFTRHDKIKIMVSQCVMECMRLASPGWNMDILNWDFETVENIPEQQNRDDCGFYVFNFMVNYDGRRLLNPITEDPYYLRRQFLIHLLTLRDNEAILPEYVVDRLRQIKDN

SEQ ID NO: 191818 - protein, 52 aa, Oryza sativa
  Clone ID: PAT_MRT4530_880C.1.pep
NYMKCICSTVYFLTIGSNRCNCSPILNVQSSRHSIGDCRALPFSLGQSTRNT

SEQ ID NO: 191819 - protein, 434 aa, Oryza sativa
  Clone ID: PAT_MRT4530_88100C.1.pep
MAGSLAASAFFPGPGSSPAASARSSKNAAVTGELPENLSVCGIVAKPNPPPAAMQVKAQAQTLPKVNGTKVNLKTVKPDMEETVPHSAPKTFYNQLPDWSMLLAAITTIFLAAEKQWTLLDWKPKKPDMLVDTFGFGRIIQDGMVFRQNFMIRSYEIGADRTASIETLMNHLQETALNHVRTAGLLGDGFGATPEMSKRNLIWVVSKIQLLVEQYPAWGDMVQVDTWVAAAGKNGMRRDWHVRDYNSGRTILRATSVWVMMHKKTRRLSKMPDEVRAEIGPYFNDRSAITEEQKQFIRKGLTPRWGDLDVNQHVNNVKYIGWILEVVILVPYIHCLEKNNLALSFYMVLPLFHNSAPISVLEKHELASMTLDYRKECGRDSVLQSLTTVSGECTSIGADKQASAIQCDHLVKADIVKAHTEWRPKRSHAAAENA

SEQ ID NO: 191820 - protein, 132 aa, Oryza sativa
  Clone ID: PAT_MRT4530_88101C.1.pep
QALQEAPVPRQPEDNCRAGGEGRVQKHPPEGSKEEGGGCAPMKQVPVLCCTSMKKQPLLLPMKQQPVLILFCFPSCLSLPPQCLQASYYQRCITLFCLCFSQQCWVCFGKGCMMLSSNHCSSCSNLCAHVTR

SEQ ID NO: 191821 - protein, 426 aa, Oryza sativa
  unsure (1)..(426): unsure at all Xaa locations
  Clone ID: PAT_MRT4530_88102C.1.pep
MAGSLAASAFFPGPGSSPAASARSSKNAAVTGELPENLSVRGIVAKPNPPPAAMQVKAQAQTLPKVNGTKVNLKTVKPDMEETVPYSAPKTFYNQLPDWSMLLAAITTIFLAAEKQWTLLDWKPKKPDMLVDTFGFGRIIQDGMVFRQNFMIRSYEIGAXDRTASIETLMNHLQETALNHVRTAGLLGDGFGATPEMSKRNLIWVVSKIQLLVEQYPAWGDTVQVDTWVAAAGKNGMRRDWHVRDYNSGRTILRATSVWVMMHKKTRRLSKMPDEVRAEIGPYFNDRSAITEEQSEKLAKTGNKVGDDATEQFIRKGLTPRWGDLDVNQHVNNVKYIGWILESAPISVLEKHELASMTLDYRKECGRDSVLQSLTTVSGECTSIGADKQASAIQCDHLLQLESGADIVKAHTEWRPKRSHAAAENA

SEQ ID NO: 191822 - protein, 70 aa, Oryza sativa
  Clone ID: PAT_MRT4530_88103C.1.pep
NWILPKTVRCIGAGLEFFFWKTKAITKLPKTKTHCDAPLKKPVANYCGRGNLLAETFGAKRPRLRSLEPP

SEQ ID NO: 191823 - protein, 155 aa, Oryza sativa
  unsure (1)..(155): unsure at all Xaa locations
  Clone ID: PAT_MRT4530_88104C.1.pep
WLXDSAREHILAPXAXQPAAXXXGFLCRRLINSPVRXXQKNXVGGHXRTAGAXFGARETFPEEXXKQLPPKGCWGNXXTLPQNPHPHALRXSPSRASPXXLTXRPXXLAXXRRLLXKVVGWGXXXXPKGXXXPLLSGRSGKKPGAKXSPXLLTPV

SEQ ID NO: 191824 - protein, 138 aa, Oryza sativa
  Clone ID: PAT_MRT4530_88105C.1.pep
MRIVRSSVRFIVAAAVVCEVRHRRCRSSAKFTAAIEGATLPRAVRAAVVLPRASSSRSGQWRRLSVSSEAGIYPDNSDEPSISDFDINVIELDVGFVIAIEEDEFEIDKDLLKKELRLQKNRPKMKRYFERGNGFTEV

SEQ ID NO: 191825 - protein, 150 aa, Oryza sativa
  Clone ID: PAT_MRT4530_88106C.1.pep
MTVFVKSGGKPLMRRIRRSSQGASKAEATGPRVERLDSGIWCLESSVQADGGGTGRKVVSAVRGRISSGEAFHRCLPSTMRSRNEEWQLVACSPSPSVPSTAPAVSTVENVLLLVGAPLDAEGLVSSSRGHPPHCAPLARAAAAGGGRGH

SEQ ID NO: 191826 - protein, 118 aa, Oryza sativa
  Clone ID: PAT_MRT4530_88107C.1.pep
RPERYFDNHHRGGGGGRGGGSSSPPPYRSGRRHSPSRRSPSPPFKRSRRDDGYDRRGGRGSPPPRYGYGDRRYGYDHERGGGRGGYDDDRYHGRYQNRAADWADSGFGASNDGPGITQ

SEQ ID NO: 191827 - protein, 469 aa, Oryza sativa
  Clone ID: PAT_MRT4530_88108C.1.pep
MAMACAALVPLLLLLLVVLSRSTSLADHSAVSRHPTLHNSVPTSRPYGPCSTSPAKGRAAPSTVDGMLWSDQHRADYIQWRLSGSVAGVLQPADDVPVSTNYEQQSIEGDLNYGTYYPAPAPMSSKAMNPAATGGGGGGPGVTQTMVLDTASDVTWVQCSPCPTPPCYPQKDVLYDPTKSSSSGVFSCNSPTCTQLGPYANGCTNNNQCQYRVRYPDGTSTAGTYISDLLTITPATAVRSFQFGCSHGVQGSFSFGSSAAGIMALGGGPESLVSQTAATYGRVFSHCFPPPTRRGFFTLGVPRVAAWRYVLTPMLKNPAIPPTFYMVRLEAIAVAGQRIAVPPTVFAAGAALDSRTAITRLPPTAYQALRQAFRDRMAMYQPAPPKGPLDTCYDMAGVRSFALPRITLVFDKNAAVELDPSGVLFQGCLAFTAGPNDQVPGIIGNIQLQTLEVLYNIPAALVGFRHAAC

SEQ ID NO: 191828 - protein, 245 aa, Oryza sativa
  unsure (1)..(245): unsure at all Xaa locations
  Clone ID: PAT_MRT4530_88109C.1.pep
RSASCSPSPAGAPSSTSASSSSSSPRSPRRRSAPSSSSALASRSAASTRTTSSPPSPXRTQSSTRPPASPPPPSSAPRFSPSSSARRKMRRPRPRPLPHYRPRSAPPRLSRTVPIPAAAAREGSRAASPSPSSSAPSAPSPPPCSAPCSWCASSASRATLLTGPRSAXAGDPDGXPSLPSSSSPAASSPPPPPTSSPAPPVPSPTSPFASSSSAPPPRQSSAPCFSRATSAPRAKRTALEAPPRP

SEQ ID NO: 191829 - protein, 135 aa, Oryza sativa
  Clone ID: PAT_MRT4530_8810C.1.pep
MASAIRWAAAAPPTPPEGSPEASGSAGFGSAEAGDDDDNDEEEEAAAAGSGRATGGLTLVVVCGPPTRRRKSDSTAWKNHSPTSDPKFGEGVTGPLPGSPCLPSCQIFAKGNAPPLGMCYARLRIRCLAICENHF

SEQ ID NO: 191830 - protein, 73 aa, Oryza sativa
  Clone ID: PAT_MRT4530_88110C.1.pep
MVPEGVGSRRSWKERRRERNNSSSSSTFAPSFASAVKIRGLDVATCRSSHGDASGRRAKEGAAMREVARGVGQ

SEQ ID NO: 191831 - protein, 155 aa, Oryza sativa
  Clone ID: PAT_MRT4530_88111C.1.pep
MASIIILAVVFVLDVLAFVLAIGAEKRRNTAAYVNVDQNARPYCVYGSDAATGYGIGALVLLAAGQAMIMVATRCFCCGRALSPGRWRAFAGFCFITCCSTSGLFCDRSSPSSAPILNEVKIVWLSDEAEAAPNIPRDRCHWKEDGSALWMQPIF

SEQ ID NO: 191832 - protein, 62 aa, Oryza sativa
  unsure (1)..(62): unsure at all Xaa locations
  Clone ID: PAT_MRT4530_88112C.1.pep
MIERINWMADQSEKGTXNTSGGIMVNYMYRLENIEEYALSYLGTGLAHTSSNLLHYIEPKDT

SEQ ID NO: 191833 - protein, 223 aa, Oryza sativa
  Clone ID: PAT_MRT4530_88113C.1.pep
MASIIILAVVFVLDVLAFVLAIGAEKRRNTAAYVNVDQNARPYCVYGSDAATGYGIGALVLLAAGQAVIMVATRCFCCGRALSPGRWRAFAGFCFITCCLFGTKYTRIVELSLDSSRTPLQIQLLELNLGVGAVPNRHLVKLLLLNLALEVGSEVELWNCINPAPPLVYFVIDLHPAPLQFILNKVKIVWLSDEAEAAPYIPVRRDRCHWKEDGSALWMQPIF

SEQ ID NO: 191834 - protein, 319 aa, Oryza sativa
  Clone ID: PAT_MRT4530_88114C.1.pep
MPEYDPAHGPMGVRFVFVFVVVVFLSCKKEKAEQEQQREKAEAAAQPTRKSKARAGKPRRRRHHHHQQAGMARYDRAITVFSPDGHLFQVEYALEAVRKGNAAVGVRGTDTVVLGVEKKSTPKLQDSRSMRKIASLDTHIALACAGLKADARVLINRARVECQSHRLTVEDPVTVEYITRYIAGLQQKYTQSGGVRPFGLSTLIVGFDPYTEKPALYQTDPSGTFSAWKANATGRNSNSMREFLEKNYKDTSGKETIKLAIRALLEVVESGGKNIEIAVMTHKDGLRELEEAEIDEYVAEIEAEKAAAEAAKKGAPKET

SEQ ID NO: 191835 - protein, 150 aa, Oryza sativa
  Clone ID: PAT_MRT4530_88115C.1.pep
TLAGRYTFHAFIMANTFALIFAAIATIGLMYSGSPLFNSRSRKTYLVTALYCMETSVACLIATFAVGLYMVLAPVAHKTAIAICVLSPVVLLSKNMEFWVKWALLAAPLYNRMGLLWAMRNFASVLLKNTLYECWPFILIFSWAAYARNS

SEQ ID NO: 191836 - protein, 48 aa, Oryza sativa
  Clone ID: PAT_MRT4530_88116C.1.pep
AYLKSSPLPYRRCRRCKWIVSLPRARSPAPHGVRSGKRKRRTGQHKPR

SEQ ID NO: 191837 - protein, 161 aa, Oryza sativa
  Clone ID: PAT_MRT4530_88117C.1.pep
MSNNRGPKFYAQNAVYIAMDGGYDLVRLRLPDKDQGGVDDGSAGPCGGGGGAPPAVADEGAAVPWRSCVVRRWRGPALAQRGTTVRRRSVAVRRPFPTPTLPDPTGGRVAVEEAGGGGGRSSSATAALWACGGAPTSQIRSYGWRSSRHGAIARVAAHHSP

SEQ ID NO: 191838 - protein, 79 aa, Oryza sativa
  Clone ID: PAT_MRT4530_88118C.1.pep
TQCITPGFGRTLQTLLIHSQFLPTYYTYNISHMKAVISYCNFMIHSFCTHCVIIRDPFLGIVGAPYTETVMYTCIGETV

SEQ ID NO: 191839 - protein, 138 aa, Oryza sativa
  Clone ID: PAT_MRT4530_88119C.1.pep
MAVGTGFPCGNHHGAGGGRPWAGREQLARGPTGTGSQIGRSAAVAALHACTATPPAASHWARRRSRRPSCGCTAPAIVIAPPGAAVVTPPGTCSRRRGRGTCRRRPAVHPPSAASALRRHSLEHHLQPTASVVEEINY

SEQ ID NO: 191840 - protein, 849 aa, Oryza sativa
  Clone ID: PAT_MRT4530_8811C.1.pep
MAWPKGGGRWWWCGSPPSPSQIRRRGGSAAVAQPERAVALHGHRKISLSPQSKRLFHSGLHTGPCYEEVYTALLHREALKVSGTRGSLNKTAARVVSRCQPKCVVNIIKEFDDRKKELIGEVGFDGLLDIKLTKVNRQFGAWLLSKVDPKSCAIVKDVNQELPFGPNDVNAVFGLPCSGQPIIPCSQDELDGKKQILCEIFEIPNFSHMKISLLERILKKQYGYPMTIDEKRVFMAAFVLYVTTKLLAPQSCANFISPRYIMVVSDVDNIKQYNWSQFVVDEVKKAAESMPTYFPNKAQLSINGCIIFLMVKYLRNLQFRKVGITCVKTCHISQFEDDQIARMIQQDVVSKHNPGFPFPRYGKLQLMKEPRENNPHVPELSPLNLCSGSKIPSRAIDGGKNLIKFLESHFSSLDVRGTVGSQAYEELKSYVQDGFDRIDEILPTISDFVDISTMQTAIHASDLFKRAFKTNITAAVKIAIRAAVMKVIDTIEDIQGPLHPWGDTTAMGYHTPTNYSTHATKDASQLDQPTEFGSDGQKKRKYTVENPPSHLLKHMSKRVVKPNRKLMSPFMSKQCSTERLESRIADDLYSYIMSISDDASLEKTWLQSSHPFRISLTLRNIQETIKIGSQMDSDSLNLAIRIMFQQEVERFHNTNYLGWRHFINQDFGMYALAGEEFWEASHQLAHFSGPEVVYDVSESHLILIPVHLFNHYVLYVFNMESKKLSVLDSLNTEDPLGESRFTRHDKIKIMVSQCVMECMRLASPGWNMDILNWDFETVENIPEQQNGDDCGFYVFNFMVNYDGRRLLNPITEDPYYLRRQFLIHLLTLRDNEAILPEYVVDRLRQIKDN

SEQ ID NO: 191841 - protein, 141 aa, Oryza sativa
  Clone ID: PAT_MRT4530_88120C.1.pep
MAEPPPLTAPAPAPATPPRLAGFEQLDARIKELTSSQGELLDRIQKLKLNWIIGEFLCLDGKMMENEQQKCFCRRCRTGAPTSRHRSRQARMSYCSWFWHMILGNEGNQSNEDTNQAPQPREPAQEFDTDAHMEKQTAMEA

SEQ ID NO: 191842 - protein, 144 aa, Oryza sativa
  Clone ID: PAT_MRT4530_88121C.1.pep
MEGALARSLATAAAAVMLPPPPAASSLRRRSSSRVAASGLRASVSASTATSSTSMAQLVAAGGGIDELRLVDERAAVAALQQQQLPVGGCEVEKLRAVAEAAADRAEMHDIIGRQRDNWNHLLLHSNNSLLLAASLMAALAPAA

SEQ ID NO: 191843 - protein, 112 aa, Oryza sativa
  Clone ID: PAT_MRT4530_88122C.1.pep
ESDLRFFCHLGETKLRCWRLSFSIFTIFSWAALLFLFMQVSGFGPSLLLFFIKKRPQVCLLQDYRDSDAKVQTQTLKSYTDGMLSTSRFHFWKHIYNPAHQFYFWLLRANRI

SEQ ID NO: 191844 - protein, 215 aa, Oryza sativa
  unsure (1)..(215): unsure at all Xaa locations
  Clone ID: PAT_MRT4530_88124C.1.pep
MASDGVLLGMGNPLLDISAVVDDAFLTKYDVKLNNAILAEEKHLPMYDELASKGNVEYIAGGATQNSIRVGFVSFLNLLVPCRSTRVSWVFIIYLFFTHMYVVXYTCIYTPSVTAPTDTCAVCVVGGERSLVANLSAANCYKSEHLKKPENCALVEKAKYIYIAGFILTVCPDSIQLVAEHAAANNKVFLMNLSAPFICESFRDAQEKGLXFVDY

SEQ ID NO: 191845 - protein, 82 aa, Oryza sativa
  Clone ID: PAT_MRT4530_88125C.1.pep
GSQLAHAVGASHSLMSDELNTLKKISKSIDPQTSRLVAESEIKYAPLLIYAASSHSTRSISSCCFAWEKTTRRRSEVERENK

SEQ ID NO: 191846 - protein, 197 aa, Oryza sativa
  Clone ID: PAT_MRT4530_88126C.1.pep
MSTCLISWSCSQVVAIVYAIMTTRNEHITWEMRAIRVLPMFVLPAVSSVIYSTVVKFTRMLERKDQKTLEKLRAERKAKIDELKERTNYYLTQQLIQKYDLDPAAKAAAASVLASKLGEETGLKVHVGEEPKLDSAVARSNDVEISPSEGLRNRKQSNARGSRTGGTTAAQNPAQGAESSLTSSSGLEQPPMVVEHF

SEQ ID NO: 191847 - protein, 126 aa, Oryza sativa
  Clone ID: PAT_MRT4530_88127C.1.pep
FDLGGTYSYARVPAGFWVQDLFELSRNPYDKLGHFIQGVTPALLAREILLRLRYVAPGENRSVSPLHCCDGTRRCSAFYELIEWWVALLAGLGADDFLGTQGDPWDTQSDMFMGVARRIAVGQLAI

SEQ ID NO: 191848 - protein, 175 aa, Oryza sativa
  Clone ID: PAT_MRT4530_88128C.1.pep
MAFYLGSMGGSPSSWGVAEVPVPSSRPWSKAEDKVFESALVAFPEHTHNRWALVASRLPGRSAHEVWEHYQVLVDDVDLIERGMVASPGCWDDDNNSAGHGRGSGGDERRRGVPWTEEEHRLFLEGLEKYGRGDWRNISRWSVKTRTPTQVASHAQKFFIRQANASSRGDSKRKS

SEQ ID NO: 191849 - protein, 102 aa, Oryza sativa
  Clone ID: PAT_MRT4530_88129C.1.pep
LRKVGMQAGAGEWFLDLDLRVFFINNSRLRSMIDLFHRSVWIVVNNTWRVVVRCVLYWWWLVLEKECLCWLPPVKKVGKLLSCWKISFFSFLFGCVCLHLIV

SEQ ID NO: 191850 - protein, 874 aa, Oryza sativa
  Clone ID: PAT_MRT4530_8812C.1.pep
MDPLSTTCVPEAEVIDLESAECRSGATMAKSMGHSSGFHPKQQGHRKISLSPQSKRLFHSGLHTGPCYEEVYTALLHREALKVSGTRGSLNKTAARVVSRCQPKCVVNIIKEFDDRKKELIGEVGFDGLLDIKLTKVNRQFGAWLLSKVDPKSCAIVKDVNQELPFGPNDVNAVFGLPCSGQPIIPCSQDELDGKKQILCEIFEIPNFSHLKISLLERILKKQYGYPMTIDEKRVFMAAFVLYVTTKLLAPQSCANFISPRYIMAVSDVDNIKQYNWSQFVVDEVKKAAESMPTCFPNKAQLSINGCIIFLMVKYLRNLQFRKVGITCVKTCHISQFEDDQIARMIQQDVVSKHNPGFPFPRYGKLQLMKEPRENNPHVPELSPLNLCSGSKIPSRAIDGGKNLIKFLESHFSSLDVRGTVGSQAYEELKSYVQDGFDRIDEILPTISDFVDISTMQTAIHASNLFKRAFKTNITTAVKIAIRAAVTKVIDTIEDIQGPLHPWGDTTAMGYHTPTNYSTHATKDASQLDQPTDTQQYDHKIGGLQCTPPKSNGAPEFGSDGQKKRKYTVENPPSHLLKHKSKRVVKPNRKLMSPFMSKQCSTERLESRIADDLYSYIMSISDDASLEKTWLQSSHPFRISLTLRNIQETIKIGSQMDSDSLNLAIRIMFQQEVERFHNTNYLGWRHFINQDFGMYALAGEEFWEASHQLAHFSGPEVVYDVSESHLILIPVHLFNHYVLYVFNMESKKLSVLDSLNTEDPLGESRFTRHDKIKIMVSQCVMECMRLASPGWNMDILNWDFETVENIPEQQNGDDCGFYVFNFMVNYDGRRLLNPITEDPYYLRRQFLIHLLTLRDNEAILPEYVVDRLRQIKDN

SEQ ID NO: 191851 - protein, 70 aa, Oryza sativa
  Clone ID: PAT_MRT4530_88130C.1.pep
KKRIRKKVKRRLKMKRIKLVPLKKMKAKWRMESKGLQDQLSPPKGRGPVKMMLTEGTFSCLVLKMVRLVL

SEQ ID NO: 191852 - protein, 90 aa, Oryza sativa
  unsure (1)..(90): unsure at all Xaa locations
  Clone ID: PAT_MRT4530_88131C.1.pep
FFFFFFXNXNXELQIWFQLFSFTNHFSNSSTHGMHHTAHTPVNHTAITSTWHLASRLISLPDSTSSARAYXSIGQFLALSRTELGAGAHT

SEQ ID NO: 191853 - protein, 439 aa, Oryza sativa
  Clone ID: PAT_MRT4530_88132C.1.pep
MGSKGRAPPPYHHRGAHKMMHRDPYGGAPGMPGPFPYDMLAAAAPPPEILEQKLMAQRGELQKLAVENDRLAMSHDSLRKELAAAQQEAQRLQAQGQAAMAAEEQEARGILDKVAKMEADLKARDPVKAELQQAHAEAQGLVVARQQLAADTQKLSKDLQRNLGEAQQLPALVAERDAARQEYQHLRATYEYERKLRMDHSESLQDDGAPSLPVGQIAYDSGYGAAQGRTPPAGLGDSLSGNPAGTAPRTGFDPSRGNMYDASRIASFSSSKAGGHDASRGAAGYNSLKGAGYDPSKAPALGGQATAAAAHGSSADYYGSNQATPPSYAWGQAASAYGSAQVPQSHASGPPVQSTSYSATTARNFGSAQALPSYAHAQEQPSYGHAQLPSSYGLAQASFPFAPAQGVSPYGSGAQPPQYGAGQAATNPGSAYQAPHGRK

SEQ ID NO: 191854 - protein, 61 aa, Oryza sativa
  Clone ID: PAT_MRT4530_88133C.1.pep
FDRLRHLELHCFTIWVSDLASRGKTIAKGKGQYFFFQCVARAGVRGLALHVMAYYIVWLKV

SEQ ID NO: 191855 - protein, 57 aa, Oryza sativa
  unsure (1)..(57): unsure at all Xaa locations
  Clone ID: PAT_MRT4530_88134C.1.pep
MGDHPSPXVIIGIEKAIKIEPLELNPPWSLNYPSHMYSSASFXLSDILVSNFIVREY

SEQ ID NO: 191856 - protein, 110 aa, Oryza sativa
  unsure (1)..(110): unsure at all Xaa locations
  Clone ID: PAT_MRT4530_88135C.1.pep
MWTAGCICEVDARGNKGIGTACRNMDAYSGIELPIVWLLFGTMAARILLERADMVKYXGSLICWKXSRSRTDQILRGCMACSIASALSTNDTWCVVLTAIVLKDDRQDNL

SEQ ID NO: 191857 - protein, 151 aa, Oryza sativa
  Clone ID: PAT_MRT4530_88137C.1.pep
MGMARTRFLAPRAGASAASAVSAKPAAVAPLYADRTVVRIGLPSKGRMSEQTLSLLKVSHIVSGPACIYRILYLRGDFVDFGLLLCCSCLGVQSCQLSVRHLNPRQYTADIPQVPNLEVWFQKPKDIVRKLQSGDLDLGIVGFDIVSEYGQ

SEQ ID NO: 191858 - protein, 263 aa, Oryza sativa
  Clone ID: PAT_MRT4530_88138C.1.pep
MAGASAWYTVVSGSNGGGDCHMRICFKHVVDDDDPAARGTGGGSPRQPRRKHGGGGGGKINPYAERGLDKFSTVLSELEARRDKILRRVGSGGGLVMVRFVQSNGALEPIIVKLPDEQRRPKDDAAAKKPRPSSPSTAAAQQQGASAARATRAPPPAPAASRVSSFSWGRMRRPACYWPAVMVLMLVCLAVFGRVFAICCTSIWWYLAPTLLSNGGAGGEDAARRPLGSPRKSPPPASGKKLAGRRGTREVGSSPRGHTKKGT

SEQ ID NO: 191859 - protein, 316 aa, Oryza sativa
  Clone ID: PAT_MRT4530_88139C.1.pep
MQHPRNAMKSTAAAAAAQQQHLLDELAAAAKATEVGNSIGAREILARLNQQLPPIGKPFLRSASYLKDALLLALADGHHAATRLTSPLDVALKLTAYKSFSDLSPVLQFANFTVTQALLDEIASTTASCIRVIDFDLGVGGQWASFLQELAHRCGSGGVSLPMLKLTAFVSAASHHPLELHLTQDNLSQFAADLGIPFEFNAINLDAFDPMELIAPTADEVVAVSLPVGCSARTPLPAMLQLVKQLAPKIVVAIDYGSDRSDLPFSQHFLNCLQSCLCLLESLDAAGTDADAVRFAPQPLSNLAEAQADCLLKRVQ

SEQ ID NO: 191860 - protein, 139 aa, Oryza sativa
  Clone ID: PAT_MRT4530_8813C.1.pep
MGSQLVCRRGLPKGDYGLGLSILSSREFGREHGIDPWRERGALVADMKKRATYLPGVLLFTYTIKIQEPTNENDNYSYYSIKKRLRRMTSFPYSAAECELWFINVLLRFLDAVVSISTSIAAALPHLAVHKVLLLRWAL

SEQ ID NO: 191861 - protein, 113 aa, Oryza sativa
  unsure (1)..(113): unsure at all Xaa locations
  Clone ID: PAT_MRT4530_88140C.1.pep
NWAARHGTTQARPCLGRGXSGPHGSTDTSSRAVPAQGVHTRPRHGPIXSGYARXGPKAPDRPTIPRVXPRHGPAVGPGQHGHDPSRAVPCLGRAKIACLGPDHGHRTIWPSIG

SEQ ID NO: 191862 - protein, 711 aa, Oryza sativa
  Clone ID: PAT_MRT4530_88141C.1.pep
MRAAPFSADGNGAAELAGSIAALLWPEDKGGGGGGGGGSLLVEPRSVLDCRGSPSPPNSTSTLSSSHGSGAADSISTGVAAVSESSAAAAEATRWAAPGEHGGGGGGELPPIPGALDVGFVAEESWDAMLGDAAAAAGQEQTFLNWIMAAPGDMEPQAPGLSQQQLLANAAGFGFPLQHHPGGVSSPAALASDLSSSGGRSLTSSSGSNSKATSAFGLLSPEAALQPPPATTAPFHNGADMKPPLLGLPSPTLLLNQHQPTPASTLFMPFPSFSDHQQQPLLQPPPKRHHSVPDNLFLLHNQPQPPPPAPAQCLPFPTLHSAVPFQLQPSMQHPRNAMKSTAAAAAAQQQHLLDELAAAAKATEVGNSIGAREILARLNQQLPPIGKPFLRSASYLKDALLLALADGHHAATRLTSPLDVALKLTAYKSFSDLSPVLQFANFTVTQALLDEIASTTASCIRVIDFDLGVGGQWASFLQELAHRCGSGGVSLPMLKLTAFVSAASHHPLELHLTQDNLSQFAADLGIPFEFNAINLDAFDPMELIAPTADEVVAVSLPVGCSARTPLPAMLQLVKQLAPKIVVAIDYGSDRSDLPFSQHFLNCLQSCLCLLESLDAAGTDADAVSKIERFLIQPRVEDAVLGRRRADKAIAWRTVLTSAGFAPQPLSNLAEAQADCLLKRVQVRGFHVEKRGAGLALYWQRGELVSVSAWRC

SEQ ID NO: 191863 - protein, 55 aa, Oryza sativa
  Clone ID: PAT_MRT4530_88142C.1.pep
IYENTPKHKKASTYIFEDWEPTIAKVDPYSYCGKDPINFKCNVPLNPNKSNFQHG

SEQ ID NO: 191864 - protein, 109 aa, Oryza sativa
  unsure (1)..(109): unsure at all Xaa locations
  Clone ID: PAT_MRT4530_88143C.1.pep
DPAASAVGGAGKGGIGGVGDREAGGGVDEGEGIGGGRLARAEAEARLEASPAEAAEVETATAVGPXPPPLPPSAATALXPDPSSATAPHLDPAGSGGRASAAHASADAW

SEQ ID NO: 191865 - protein, 108 aa, Oryza sativa
  Clone ID: PAT_MRT4530_88144C.1.pep
SSLPLVDSPAPSPTARITATTLLLLLLLFLTLPLLITTYLPLLSPPCRRCHMLCICPGWMLLLDTIFIIATPALPATLKQEYMLRGSEQNIAGSYLRPAVIYSFEYER

SEQ ID NO: 191866 - protein, 94 aa, Oryza sativa
  Clone ID: PAT_MRT4530_88145C.1.pep
ADRENHTDLESYDRGSYAMRQHAIFVRTAATQGLKERVEAETHYHAPVGRIIEFHSVRQPQVMSCMGYIPPACEECAGNLPDHHVYRLVLIGHL

SEQ ID NO: 191867 - protein, 40 aa, Oryza sativa
  Clone ID: PAT_MRT4530_88146C.1.pep
CHPALSCYSHFNLAFFTLRSPCPVKTNYNPVLHRSAMPTP

SEQ ID NO: 191868 - protein, 99 aa, Oryza sativa
  Clone ID: PAT_MRT4530_88147C.1.pep
RAIGLKEKEAKDVENKTCNNLEPRTSPRQVWRLKEVKVKRSVISQSSDKSNLMREESPVIRDKSPSHDAMGVSAVFILPSKSRNQESRFCLGGKTSICL

SEQ ID NO: 191869 - protein, 230 aa, Oryza sativa
  Clone ID: PAT_MRT4530_88148C.1.pep
MQEAGRRPAPQFAGVDLRRPKGYPAAAQLTPAAEEAAAGVGDPCPRCESRDTKFCYYNNYNTSQPRHFCKSCRRYWTKGGSLRNVPVGGGSRKSSTSSSSAAAAAASSSSSPSSPAKSPKRSKNSKRRRVSPPPPQPVPAPPPPTTADAADVAAPTAPEATTKKAPEDLTAAAATQPAVALGLGVADGGGGGKEHLDTSPFEWPSGCDLGPYWPTGVFADTDPSLFLNLP

SEQ ID NO: 191870 - protein, 1368 aa, Oryza sativa
  unsure (1)..(1368): unsure at all Xaa locations
  Clone ID: PAT_MRT4530_88149C.1.pep
MNFQGTYPRPGEEADLHAVQRRDDESLRSYIQRFCQVRNTIPCIPAHAVIYAFRGGVRHNRMLEKIASKEPQTTAELFQLADRVARKKEAWTWNSTGSGVAASAAPGSAARSGRRDRRRKKRERPTGKWCTVHNTSLHDLADCRAVKSLAEWTRKWEEERRQERREGKAPAAPSGNRQSEAKQKAPAEDIDDGDDDLGFQEPGATIATVDGGACAHASRRSLKAMKRELLAAAPTHEATRRARWSEVALTFDQTNHPPCVARGGQIAMVVSPTVSNVKLGRVLIDGGAALNILSPAAFDAIKAPGMVLRPSQPIVGVTQGHTWPLGHIDLPVTFGGSANFRTERVNFDVADLSLPYNAVLGRPALVKFMVAVHYAYLQMKMPGPGGPISVHGDLKVTLACMEQRADHLAAASKPEGGNERLSTSVPAAPRQRMITCDEVPEDALVSFLRANADVFAWRPADMPGVPREVIEHRLAVRPGARPVRQKVRRQAPKRQAFIREEVARLLEAGFIREVIHPEWLANPVVVPKANGKLRMCIDYTDLNKACPKDPYPLPRIDQIVDSTAGCDLLCFLDAYSGYHQIRMAREDEEKTAFITPIGTYCYTTMPFGLKNTGPTFQRTTRISLGSQIGRNVEAYVDDLVVKTRNQETLLSDLAETFESLRSARIKLNPDKCVFGVPAGKLLGFLVSARGIEANPKKIRAIERMRPPSKLRDVQCFTGCMAALSRFISRLGEKALPLFKLLKHSGPFIWTEEAERAFTQLKAYLSSPPVLVAPEPDEPLLLYLAATPQVVSAALVVERDEDNPHPAHPHPVSTRPGREQGGEAPEPNGGPRPPTAGAGPPPACPTVPGAPDPQDGPGATAGRPRLSPSDPEVVGTEAECAPRGLSDEERPGDAAPSEEDRPRRKAHRVTVVTSYPLGQILHNREGTGRVVKWAIELSEFDLHFEPRHAIKSQALADFVAEWTPAPEXPISVPEASSGPSQLPHTAYWVMQFDGSLSLQGAGAGVTLTSPNGDVLRYLVRLDFRATNNMAEYEGLLAGLRVAAGLGIRRLLVLGDSQLVVNQAYLTDKTLPEDCEGSERIQRISKRYVLVEGTLYRRAANGVLLKCIPREQGVELLADIHEGECGAHSASRTLVGKAFRQGFYWPTALNDAVDLVRRCRACQFHAKQTHQPAQALQTIPLSWPFAVWGLDILGPFRRAPGGFEYLYVAVDKFTKWPEAYPVIKIDKHSALKFIRGITARFGMPNRIITDNGTQFTSELFGDYCEDMGIKLCFASPAHPRSNGQVERANAEILKGLKTKTFNILKKHGDSWIEELPAVLWANRTTPSRATGETPFFVVYGAEAVLPSELTLRSPRATTCISLYFFSSVFQ

SEQ ID NO: 191871 - protein, 37 aa, Oryza sativa
  Clone ID: PAT_MRT4530_8814C.1.pep
IFLSSTEKLPASKTQSCKRNLEVLISPNPAKQGRIRC

SEQ ID NO: 191872 - protein, 1770 aa, Oryza sativa
  Clone ID: PAT_MRT4530_88150C.1.pep
MAERAVAHSLSPNASGDDGEQNPRRRARTPPSPSRRNLGRGEVLGEVGGSATSLPTDDGGGRRDGARRRLVYGNGGTPQGALQAAGALLRHPPVVPDPETPARRWLDDVADLVMMAQQRLGAGGRSSATGTSGAAAAGSTSSRRRARRAAAVAHRSSAIPSSTPPTQDVRGGSDAWLDIERRRDDRRAAHATEGASSSGAPLRSGHGGRPPVSPVGGAGCRAFVASLRNVRWPPRFRPTITEKYDGSFNPAEFLQIYTTGIEAAGGDDRVMANFFPMALKGQARGWLMNLPPASVHSWEDLCQQFTTNFQGTYPRPGEDADLHAVQRRDDESLRSYVQRFCQVRNTIPCIPAHAVIYAFRGGVRHNRMLEKIASKEPQTTAQLFELADCVARKEEAWTWNSSGSGVAAPAVPESAARSGRRDRRRKNRSACSDDEGHVLAVEGASRAPRKGRPASDKKKEAGAPSRERPTGKWCTVHNTSLHDLADCRAVKSLAERTRKWEEEKRQERREGKAPATPAGNRRGEAKQKAPAEDIDDGDDDLGFQEPEATVATVDGGACAHASRRSLKAMKRELLAAAPTHEATRRAWWSEVALTFDQTDHPPCVARGGQIAMVVSPTVCNVKLGRVLVDGGAALNILSPAAFDAIKAPGMVLRPSQPIIGVMPGHTWPLGHIDLPVTFGGPANFRTERVDFDVADLSLPYNAVLGRPALVKFMAAVHYAYLQMKMPGPGGPITVHGDLKVTLACMEQRADHLAAVSKPAGGDERLSTSVPAAPRQRMITCDEVPEDALVSFLRANADVFAWRPADMPGVPREVIEHRLAVRPGARPVRQKVRRQAPERQAFIREEVIHPEWLANPVVVPKANGKLRMCIDYTDLNKACPKDPYPLPRIDQIVDSTAGCDLLCFLDAYSGYHQIRMAREDEEKTAFITPIGTYCYTTMPFGLKNAGPTFQRTTRISLGSQLGRNVEAYVDDLVVKTRNQETLLSDLAETFESLRSARIKLNPDKCVFGVPAGKLLGFLVSARGIEANPEKIRAIERMRPPSKLRDVQCVTGCMAALSRFISRLGEKALPLFKLLKRWPRGHCGKAAPVTSDPEVVGTEAECAPRGLSDEERPGDAAPGEEDRPRRKVQRPVYFVSEALRDAKTRYPQAQKMLYAILMASRKLRHYFQAHRVTVVTSYPLGQILHNREGTGRVVKWAIELSEFDLHFEPRHAIKSQALADFVAEWTPAPEPGAGAGVTLTSPSGDVLRYLVRLDFRATNNMAEYEGLLAGLRVAAGLGIRRLLVLGDSQLVVNQVSKEYQCSDPQMDAYVRQVQRMEHHFDGIELRHVPRRDNAVADELSRLASSRAQTPPGAFEERLAQPSVRPDPLGETDAPEWPPRPVGVQASGPEGSASSSPRLIAWITEIQAYLADKTLPEDREGSERVRRISKRYVLVKGTLYRRTANGVLLKCIPREQGVELLADVHEGECGAHSASRTLVGKAFRQGFYWPTALNDAVDLVRRRAPGGFEYLYVAVDKFTKWPEAYPVIKIDRHSALKFIRGITVRFGVPNRIITDNGTQFTSELFGDYCEDMGIKLYFASPAHPRSNGQVERANAEILKGLKTKTFNILKKHGDSWIEELPAVLWANRTTPSRATGETPFFLVYGAKAVLPSELTLRSPRVTMYCEADQGQLRRDDLDYLEERRRRVALRAARYQQSLRRYHQRHVRARSLCVDDLVLRRVQTRAGLSKLSPMWEGPYRVIGVPRPGSVRLATGDGTELPNPWNIEHLHRFYP

SEQ ID NO: 191873 - protein, 42 aa, Oryza sativa
  Clone ID: PAT_MRT4530_88151C.1.pep
MMKAPPPLSVKVSKRTETGFSPGSLTKGHGMARQCPKEGVML

SEQ ID NO: 191874 - protein, 1663 aa, Oryza sativa
  Clone ID: PAT_MRT4530_88152C.1.pep
MAERAVAHNLSPSASGDDSEQNPRRRARTPPPPSRRSLRREEALEGVERSATSPPTSDGEGRRDGERRLLVYGDGSTPQGALQAAGALLRHPPVVPDPETPARCWLDDVADLVMTAQQRLGAGGRSSATKASGAATAGSVSSRRRARRAAAVTRQSPPRALSSPPPPAVFSHAAPSLASSPPLAAAAVRCAVVRRTSAARPPSPPTTGAPPSPSSRAAAAVLFVAGHHRSSFVVVVYMTGIEAAGGDDRVMANFFPMALKGQARGEEADLHAVQRRDDESLRSYIQRFCQVRNTIPCIPAHAVIYAFRGGVRHNRMLEKIASKEPQTTAELFQLADRVARKEEAWTWNSTGSGVAASAAPGSAARSGRRDRRRKKRERPTGKWCTVHNTSLHDLADCRAVKSLAEWTRKWEEERRQERREGKAPAAPSGNRQSEAKQKAPAEDIDDGDDDLGFQEPGATIATVDGGACAHASRRSLKAMKRELLAAAPTHEATRRARWSEVALTFDQTNHPPCVARGGQIAMVVSPTVSNVKLGRVLIDGGAALNILSPAAFDAIKAPGMVLRPSQPIVGVTQGHTWPLGHIDLPVTFGGSANFRTERVNFDVADLSLPYNAVLGRPALVKFMVAVHYAYLQMKMPGPGGPISVHGDLKVTLACMEQRADHLAAASKPEGGNERLSTSVPAAPRQRMITCDEVPEDALVSFLRANADVFAWRPADMPGVPREVIEHRLAVRPGARPVRQKVRRQAPKRQAFIREEVARLLEAGFIREVIHPEWLANPVVVPKANGKLRMCIDYTDLNKACPKDPYPLPRIDQIVDSTAGQIGRNVEAYVDDLVVKTRNQETLLSDLAETFESLRSARIKLNPDKCVFGVPAGKLLGFLVSARGIEANPKKIRAIERMRPPSKLRDVQCFTGCMAALSRFISRLGEKALPLFKLLKHSGPFIWTEEAERAFTQLKAYLSSPPVLVAPEPDEPLLLYLAATPQVVSAALVVERDEDNPHPAHPHPVSTRPGREQGGEAPEPNGGPRPPTAGAGPPPACPTVPGAPDPQDGPGATAGRPRLSPSDPEVVGTEAECAPRGLSDEERPGDAAPSEEDRPRRKAHRVTVVTSYPLGQILHNREGTGRVVKWAIELSEFDLHFEPRHAIKSQALADFVAEWTPAPEPISVPEASSGPSQLPHTAYWVMQFDGSLSLQGAGAGVTLTSPNGDVLRYLVRLDFRATNNMAEYEGLLAGLRVAAGLGIRRLLVLGDSQLVVNQVCKEYQCSDPQMDAYVRQVRRMERHFDGIELRHVPRRDNALSARPDPLGETDAPERPPRPVGVQASGPEGSAPSSLRLIAWITEIQAYLTDKTLPEDCEGSERIQRISKRYVLVEGTLYRRAANGVLLKCIPREQGVELLADIHEGECGAHSASRTLVGKAFRQGFYWPTALNDAVDLVRRCRACQFHAKQTHQPAQALQTIPLSWPFAVWGLDILGPFRRAPGGFEYLYVAVDKFTKWPEAYPVIKIDKHSALKFIRGITARFGMPNRIITDNGTQFTSELFGDYCEDMGIKLCFASPAHPRSNGQVERANAEILKGLKTKTFNILKKHGDSWIEELPAVLWANRTTPSRATGETPFFVVYGAEAVLPSELTLSLDTRISPGTSPDPRHLRLGPGHEPSFKPRHRRTAA

SEQ ID NO: 191875 - protein, 93 aa, Oryza sativa
  Clone ID: PAT_MRT4530_88153C.1.pep
MNMMIAYLISEPALGSGKNLRQSASSALYGASASPPHAGPPPIPAAFSPSQLCLFAIDRPTQHEYLPQLPECLRVSIYMYYRAAVLQPYCPLN

SEQ ID NO: 191876 - protein, 1792 aa, Oryza sativa
  unsure (1)..(1792): unsure at all Xaa locations
  Clone ID: PAT_MRT4530_88154C.1.pep
MAERAVAHNLSPSASGDDGEXNLRRRARTPPPPSHRSLGREEALEGVERSATLPPTGDGEGRRDGERRLLVYGDGSTPQGALQXVMTAQQRLGAGGRSSATKASGTATAGSVSSRRRARRAAAVARRSSAIPSSMPPTQEDVRGGPDARLDIERRRNGRRAAHATEGASSSGAPLRSGHGGQPPVSPVGGAGCRAFVASLRNVRWPPRFRPTITEKYDGSVNPAEFLQIYTTGIEAAGGDDRVMANFFPMALKGQARGWLMNLPPASVHSWEDLWQQFTTNFQGTYPRPGEEADLHAVQRRDDESLRSYIQRFCQVRNTIPCIPAHAVIYAFRGGVRHNRMLEKIASKEPQTTAELFQLADCVARKEEAWTWNSSGSGVAAPAAPGSAARSGRRDRRRKKRSAHSDDEGHVLAVEGASQATRNGRPASDKKKEAGAPSRERPTGKWCSVHNTSLHNLADCRAVKSLAERTRKWEEERRQERREGKAPAAPAGNRRSEAKQKAPAEDIDDGDDDLGFQEPGATIATVDGGACAHASRRSLKAMKRELLAAAPTHEATRRARWSEVALTFDQTDHPPYVARGGQIAMVVSPTVCNVKLGRVLIDGGAALNILSPTAFDAIKAPGMVLRPSQPIIGVTPGHTWPLGHIDLPVTFGGSANFRTERVNFDVADLSLPYNAVLGRPALVKFMAAVHYAYLQMKMPGPDGPISVHGDLKVALACMEQRADHLAVASKPEGGDERLSTSVPAAPRQRMITCDEVPEDALVSFLRANADVFAWRPADMPGVPREVIKHRLAVRPGARPVRQKVRRQAPERQAFIREEVARLLEAGFIREVIHPEWLANPVVVPKANGKLRMCIDYTDLNKACPKDPYPLPRIDQIVDSTAGCDLLCFLDAYSGYHQIRMAREDEEKTAFITPIGTYCYTTMPFGLNNAGPTFQRTTQISLGSQIGRNVEAYVDDLVVKTRNQETLLSDLAETFESLRSARIKLNPEKCVFGVPAGKLLGFLVCARGIEANPEKIRAIERMRPPSKLRDVQCVTGCMAALSRFISRLGEKALPLFRLLKRPGPFIWTEEAERAFTQLKAYLSSPPVLVAPEPDEPLLLYLAATPQVASAALVVERDEDNPHSAHPHPMSTRPGREQGREAPEPNGGPRPPTAGAGPLPACPTVPGAPDPQDGLGATAGRPRLSPSDPEVVGTEAECAPRGLSDEERPGDAAPSEEDRPRRKVQRPVYFVSEALRDAKTRYPQAQKMLYAILMASRKLRHYFQAHRVTVVTSYPLGQILHNREGTGWVVKWAIELSEFDLHFEPCHAIKSQALADFVAEWTPAPEPGAGAGVTLTSPSGDVLRYLVRLDFRATNNMAEYEGLLAGLRVAAGLGIRRLLVLGDSQLVVNQVCKEYRCSDPQMDAYVRQVRRMERHFDGIELRHVPRRDNAVADELSRLASSRAQTPPGAFEERLAQPSARPDPLGETDAPERPPRSVGVQASGPEGSAPSSLRLIAWIAEIQAYLADKTLPEDREGSERVQRISKRYVLVEGTLYRRAANGVLLKCILREQGVELLADIHEGERAPGGFEYLYVAVDKFTKWPEAYPVIKIDKHSALKFIRGITARFGVPNRIITDNGTQFTSELFGDYCEDMGIKLCFASPAHPRSNGQVERANAEILKGLKTKTFNILKKHGDSWIEELPAVLWANRTTPSRATGETPFFLVYGAEAILPSELTLRSPRATMYCEADQDQLRRDDLDYLEERRRRAALRAARYQQSLRRYHQRHVRARSLCVDDLVLRRVQTRAGLSKLSPM

SEQ ID NO: 191877 - protein, 70 aa, Oryza sativa
  Clone ID: PAT_MRT4530_88155C.1.pep
PFDPIILKMDVPSLEPPLGNARDMNLFPERGAPVQFGLDRNELSAQPLLGAFFQAPRGAANTTPAAGKPP

SEQ ID NO: 191878 - protein, 1887 aa, Oryza sativa
  Clone ID: PAT_MRT4530_88156C.1.pep
MAVKDRGGYAKGPVTASFRRRDGARRRLVYGDGGTPQGALQAAGALLRHPPVVPDPETPARRWLDDVADLVMTAQQRLSAGGRSSATETSGAAAAGSRSSRRRARRAAAVTRRSSAIPSSMPPTQEDVRGGPDARLDIERRRDSRHAAHATEGASSSEAPLRSGHGGRPPVSPVGGAGCRAFVASLRNVRWPPRFRPTITEKYDGSVNPAEFLQIYTTGIEAAGGDDRVMANFFPMALKGQARGWLMNLPPASVHSWEDLCQQFTTNFQGTYPRPGEEADLHAVQRGDDESLRSYIQRFCQVRNTIPCIPAHAVIYAFRGGVRHNRMLEKIASKEPQTTAQLFELADRVARKEEAWTWNSSGSGVAAPVAPGSAAWSERRDRRRKKRSARPDDEGHVLAVEGASRAPRKGRPASDKKKEAGAPSRERPTGKWCTVHNTSLHDLADCRAVKSLAERTRKWEKEKRQERREGKAPAAPAGNRRGEAKQKAPAEDIDDGDDDLGFQEPEATVATVDGGACAHASRRSLKAMKRELLAAAPTHEATRRARWSEVALTFDQTDHPPCVARGGQIAMVVSPTVCNVKLGRVLIDGGAALNILSPAAFDAIKAPGMVLRPSQPIIGVTPGHTWPLGHIDLPVTFGGSANFRTERVDFDVADLSLPYNAVLGRPALVKFMAAVHYAYLQMKMPGPGGPITVHGDLKVALACMEQRADHLAAASKPAGGDERLSTSVPAAPRRRMVTCDKVPEDALVSFLRANADVFAWRPADMPGVPREVIEHRLAVRPGARPVQQKVRRQAPERQAFIREEVARLLEAGFIREVIHPEWLANPVVVPKANGKLRMCIDYTDLNKACPKDPYPLPRIDQIVDSTVGCDLLCFLDAYSGYHQIRMAREDEEKTAFITPIGTYCYTTMPFGLKNAGPTFQRTTRISLGSKLGRNVEAYVDDLVVKTRNQETLLSNLAETFESLRSARIKLNPDKCVFGVPAGKLLGFLVSARGIEANPEKIRAIERMRPPSKLKDVQCVTGCMAALGRFISRLGEKALPLFKLLKRSGPFTWMEEAERAFTQLKAYLSSPPVLVAPEPDEPLLLYLAATPQVVSAALVVERDEENPHSAHPHPVSTRPGREQGGEAPEPNGGPRPPTAGVGPPPACPTVPGAPDPQDGPGATAGRPRLSPLTPRSSAQKPSAPRAASRTKSALEMRPQAKRIGPAERKLRHYFQAYRVTVVMSYPLGRILHNREGTGRVVRWAIELSEFDLRFEPRHAIKSQALADFVAEWTPAPEPVPAPEASSGPSQLPHTAYWVMQFDGSLSLQGAGAGVTLTSPSGDVLRYLVRLDFRATNNMAEYEGLLAGLRVAAGLGIRRLLVLGDSQLVVNQVSKEYRCSDPQMDAYVRQVRRMERHFDLIELRHVPRRDNAVADELSRLASSRAQTPPGAFEERLAQPSARPDPLGETDAPERPPRPVGVQASGPEGSAPSSPRLIAWITEIQAYLADMTLPEDREGSERVRRISKRYVLVEGTLYRCAANGVLLKCIPREQGVELLADIHEGECGAHSASRTLVGKAFRQGFYWPTALNDAVDLVRRCRACQFHARQTHQPAQALQTIPLSWPFAVWGLDILGPFRRAPGGFEYLYVAVDKFTKWPEAYPVIKIDKHSALKFIRGITARFGVPNRIITDNGTQFTSELFGDYCEDMSIKLCFASPAHPRSNGQVERANAEILKGLKTKTLNILKKHGDSWIEELPAVLWANRTTPSRATGETPFFLVYGAEAVLPSELTLRSPRVTMYCEADQDHLHRDDLDYLEERRRRAALRAARYQQSLRRYHQRHVRALSLCVDDLVLRRVQTRAGLSKLSPMWEGPYRVIGVPRPGSVRLATGDGTELLNPWNIEHLRRFYP

SEQ ID NO: 191879 - protein, 1828 aa, Oryza sativa
  Clone ID: PAT_MRT4530_88157C.1.pep
MAERAVAHNLSPSASGDDGEQNPRRRARTPPSPSRRSLGREEALERVERSATSPPAGDGEGRRDGERRLLVYGDGSTPQSALQAAGALLRHPPVVPDPETPARRWLDDMADLVMTAPQRLGAGGRSSATKASGAATVGSVSSRRRARRAAAVTRRSSAIPSSTPPTQEDVRGGPDARLNIERRRNGRHAAHATEGASSSGAPLRSGHGGQPPVSPVGGAGCRAFVASLRNVRWPPRFRPTITEKYDGSVNPAEFLQIYTTGIEAAGGDDRVMANFFPMALKGQARGWLMNLPPASVHSWEDLCQQFTMNFQGTYPRPGEEADLHAVQRRDDESLRSYIQRFCQVRNTIPCIPAHAVIYAFRGGVRHNRMLEKIASKEPQTTAELFQLADCVARKEEAWTWNSSGSDVAAPAAPGSAARSGRRDRRRKKRSAHSDDEGHVLAVEGASRATRKGRPASDKKKEVGAPSSERPTGKWCSVHNTSLHDLADCRAVKSLAERTRKWEEERRQERCEGKAPAAPTGNRRGEAKQKATAEDVDDGDDDLGFQEPEATVATVDGGACAHASRRSLKAMKRELLATAPTHEATRRARWSEVALTFDQTDHPPCVARGGQIAMVVSPTVCNVKLGRVLIDGGAALNILSPAAFDAIKAPGMVLRPSQPIIGVTPGHTWPLGHIDLPVTFGGSANFRMERVNFDVADLSLPYNAVLGRPALVKFMAAVHYAYLQMKMPGPGGPITVHGDLKVTLACMEQRADHLAAASKPAGGDERLSTSVPAAPKQRMITCDEVPEDALVSFLRANADVFDWRPADMPGVLREVIEHRLAVRPGARPVRQKVRRQAPKRQAFICEEVARLLEAGFIREVIHPEWLANPVVVPKANGKLRMCIDYTDLNKACPKDPYPLPRIDQIVDSTAGCDLLCFLDAYSGYHQIRMAREDEEKTAFITPIGTYCYTTMPFGLKNAGPTFQRTTRISLGSQIGRNVEAYVDDLVVKTRNQETLLSDLAETFESLRSARIKLNPDKCVFGVPAGKLLGFLVSARGIEANPEKIRAIERMRPPNKLRDVQCVTGCMAALSRFISRLGEKALPLFKLLKRSGPFTWTEEAERVLTQLKAYLSSPPVLVAPEPDEPLLLYLAATPQVVSAALVVERDEDNPHSTHPHPVSTRPEKEQGGEAPEPNGGLRPPTAGAGPPPACPTVPGAPDPQDGLGATARGPRLSPFDPEVVGTEAECYPRALSDEERPGDTAPSEEDRPRRKAHRVTVVTSYPLGQILHNREGTGRVVKWAIELSEFDLRFEPRHAIKSQALADFVAEWTPAPEPVSAPEATSGPSQLPHTAYWVMQFDGSLSLQGAGAGVTLTSPSGDVLRYLVRLDFRATNNMAEYEGLLAGLRVAAGLGIRRLLVLGDSQLVVNQICKEYRCSDPQMDAYVRQAYLADKTLPEDREESERVQRISKRYVLVEGTLYRRAANGVLLKCIPREQGVELLADIHEGECGAHSASRTLVGKAFRQGFYWPTALNDAVDLVRWCRACQFHARQTHQPAQALQTIPLSWPFAVWGLDILGPFRRAPGGFEYLYVAVDKFTKWPEAYPVIKIDKHSALKFIRGITARFGVPNRIITDNGTQFTSELFGDYCEDMGIKLCFASPAHLRSNDQVERANAEILKGLKTKTFNILKKHGDSWIEELPAVLWANRTTPSRATGETPFFLVYGAEAVLPSELTLRSHRATMCCEADQDQLRRDDLDYLEERRRRAALRAARYQQSLRRYHQRHIRARSLCVDDLVLRRVQTRAELSKLSPMWEGPYRVIGVPRPGSVRLATGDGTELPNPWNIEHLRRFYP

SEQ ID NO: 191880 - protein, 1534 aa, Oryza sativa
  Clone ID: PAT_MRT4530_88158C.1.pep
MTAQQRLDAGGRSSATKASGAATAGSVSSRRRARRAAAVNCRLSAIPSSTPPTQEDVRGGLDARLNIERRRNGRRAAHATEGASSSGAPLRPGHGGHPPVSPVGGVGCRAFVASLRNIRWPPRFRPTITEKYDGSVNPAMFLQVYTTGIEAAGGDDRVMANFFPMALKGQARGWLMNLPPASVHSWEDLCQQFTMNFQGTYPRPGEEADLHAVQRRDDESLRSYIQRFCQVRNTIPCILAHTVIYAFRGGVRHNRMLEKIASKEPQTTAELFQLADRVARKEEAWTWNSSGSGVAAPAAPGSAARSGRRDRRRKKRSAHSDDEGHVLAVEGASRATRKGRPASDKKKEAGAPSRERPTGKWCSVHNTSLHDLADCRAVKSLAERTRKWEEERRQERREGKAPAAPAGNRRGEAKQKATAEDVDDGDDDLGFQEPRATVATVDGGACAHASRRSLKALKRELLAAAPTHEATWRARWSEVALTFDQTDHPPCVARGGQIAMVVSPTVSNVKLGRVLIDGGAALNILSPAAFDAIKAPGMVLRPSQPIIGVTPGHTWPLGHIDLPVTFGGSANFCTERVNFDVADLSLPYNVVLGRPALVKFMAAVHYAYLQMKMPGPGGPITVHGDLKVALACMEQRADHLAAASKPAGGDERLSPSVPATPRQRMITCDEVPVKEVALGDGPSKTTRISDVFAWRPADMPGVPREVIEHRLAVRPGARPVRQKVRRQAPERQAFIREEVARLLEAGFIREVIHPEWLANPVVVPKANGKLRMCIDYTDLNKSCPKDPYPLPRIDQIVDSTAGCDLLCFLDAYSGYHQIRMAREDEEKTAFITPIGTYCYTTMPFGLKNAGPTFQRTTRISLGSQLGRNVEAYVDDLVVKTHNQETLLSDLAETFESLRSARIKLNPDKCVFGVPAGKLLGFLVSARGIEANPEKIRAIERMRPPSKLRDVQCITGCMAALSRFISRLGEKALPLFKLLKCSGPFTWTEEAERALTQLKAYLSSPPVLVAPKPDEPLLLYLAATPQVVSAALVVERDEDNPHSAHPHPVSTRPGREQGGEAPEPNGGPRPPTAGAGPPPACPTVPGAPDPQEGPGATAGRPRLSPSDPEVIGTEAECAPRGLSGEERPRDAAPSDEDRPRRKVQRPVYFVSEALQDAKTRYPQAQKMLYAILMASRKLRHYFQAHRVTVVTSYPSAKSCITEKSQALADFVAEWTPAPEPVSVPEASSGPAQLPHTTYWVMQFDGSLSLQGAGAGVTLTSPSGDVLRYLVRLDFRATNNMAEYEGLLAGLRVAAGLGIRRLLVLGDSQLVVNQVCKEYRCSDPQMDAYVRQVRRMERHFDGIELRHVPRRDNAVADELSRLASSRAQTPPGAFEERLAQPSARPDPLGETDAPERPPRPVGVQASGPEGSAPSSLRLIAWIAEIQAYLADKTLPEDREGSERVQRISKRYVLVEGTLYRRAANGVLLKCFPRKQGVELLADIHEGECGAHSASRTLVGKAFRQGFYWSTALNDAVDLVRRCRACQFHARQTHQPA

SEQ ID NO: 191881 - protein, 203 aa, Oryza sativa
  unsure (1)..(203): unsure at all Xaa locations
  Clone ID: PAT_MRT4530_88159C.1.pep
MPCRAADANHVKKMFSKIIFPRFGTPRMVVSDGGSHFIDKTFRDLLHKMGAKQDVPTPYHPQTSEQAETSNKQIKNILLKTVNKMGIGWKDKLSDALWAYRTAYKTPIAMSPYQIVYRKTYRLLLELEHRAYWAIRNWNMDFEGXGEWRQMQLAELEEWRDKAYHSSKIYKKRTKRCKWEGSFDVINTSSHRAITLRDNSASL

SEQ ID NO: 191882 - protein, 258 aa, Oryza sativa
  Clone ID: PAT_MRT4530_8815C.1.pep
MWRLENFSGSIKELLRLCTMTRFRRRSSLLESWQSVKIEGQEKATQRRRAARMRQRQQAARGREDGEKASGEDEEALASSERMRPLPARIVETWGAGAAAAASGEDVCGEVTEVAEGSGRRRERSRRRVRAQPSAARTLAGRSWRSPRGAGSGRGCYRRGGSREGRRGARGASAAAAVDGCCGGHGRSRRRRGQSRRARGGRKSSSSRRSFPSAAVLPSSGTVLPSSSCPCIRHRDEDNKMKTETAKNATERTEIVMK

SEQ ID NO: 191883 - protein, 1953 aa, Oryza sativa
  unsure (1)..(1953): unsure at all Xaa locations
  Clone ID: PAT_MRT4530_88160C.1.pep
MAEREVAHNLSPSASGDDGEQNPRRRARTPPPPSRRSLRWEEALEGVKRSTTSPPTSDEEGRRDGERRLLVYGDGSTPQGALQAAGALLRHPPVVPDPETPARRWLDDVADLVMTAQQRLGAGGRSSATKASGAATVGSVSSRRRARRAAAVTRRSSAIPSSTPPTQEDVRRGPDARLSIERRRNGRRAAHATEGASSSGAPFRFGCGDQPPVPPVGGVGCRAFXNVHWPPRFRPTITEKYDGSVNPAEFLQVYTTGIEAAGGDDRVMANFFPMALKGQARGWLMNLPPASVHSWEDLCQQFTMNFQGTYPRPVEEADLHAVQRRDDESLRSYIQRFCQVRNTQPCIPAHAVIYAFRGGVRHNRMLENIASKEPQTTAELFQLADRVARKEEAWTWNSTGSGVAASAAPGSAARSGRRDRRRKKRSAHSNDEGHVLAVEGASRATQKGRPASDKKKEAGAPSRERPTGKWCTVHNTSLHDLADCRAVKSLAERTRKWEEERRQERREGKAPAAPSGNRRSEAKQKAPAEDIDDGDDDLGFQEPGATIATVDGGACAHASRRSLKAMKRELLAAAPTHEATRRARWSEVALTFDQTDHPPCVARGGQIAMVVSPTVCNVKLGRVLIDGGAALNILSPAAFDAIKAPGMVLRPSQLIIGVTPGHTWPLGHIDLPVTFGGSANFRTERVNFDVADLSLPYNAVLGRPALVKFMAAVHYAYLQMKMPGPGGPISVHGDLKVALACIEQRADHLAAASKPEGGNERLSTSVPATPRQRMITCDEVPEDALVSFLRANADVFAWRPADMPGVPREVIEHRLAVRPGARPVRQKVRRQAPERQAFIREEVARLLEAGFIREVLHPEWLANPVVVPKANGKLRMCIDYTDLNKACPKDPYPLPRIDQIVDSIAGCDHLCFLDAYSGYHQIRMAREDKEKTAFITPIGTYCYTTMPFGLKNAGPTFQRTTRISLGSQIGRNVEAYVDDLVVKTRNQETLLSDLAETFESLRSARIKLNLDKCVFGVPAGKLLGFLVSARGIEANPEKIRAIERMRPPXSKLRDVQCVTGCMAALSRFISRLGEKALPLFKLLKRSGPFIWTEEAERAFTQLKAYLSSPPVLVAPEPDEPLLLYLAATPQVVSAALVVERDEDNPHPAHPHLVSTRPGREQAGEAPEPNGGPRPPTAGAGPPPACPTVPGSPDPQDGPGATAGRPRLSPXPPTPRSSAQKPSAPRAASRTKSALEMRPLAKGIGPAESEALRDAKTRYPQAQKMLYAILMASRKLRHYFQAHRVTVVTSYPLGQILHNRDGTGRVVKWAIELSEFDLHFEPRHAIKSQALADFVAEWTPAPEPISVPETSSGPSQLPHTAYWVMQFDGSLSLQGAGAGVTLTSPSRDVLRYMVRLDFRATNNMAEYEGLLAGLRVAAGLGIRRLLVLGDSQLVVNQVSKEYQCSDPQMDAYVRQVRRMERHFDGIELRHVPRRDNAVADELSRLASSRAQTPPGAFEERLAQPSARPDPLGETDAPERPPRPVGVQASGPEGSVPGSPRLIAWITEIQAYLADKTLPEDREGSERVRRISKRYVLVKGTVYWRAANGVLLKCIPREQGVELLADVHEGECGAHSTSRTLVGKAFRQGFYWPTALNDAVDLVRRCRACQFHARQTHQLAQALQTIPLSWPFAVWGLDILGPFRRAPGRFEYLYVAVDKFTKWPEAYPVIKIDKHSTLKFIRGITARFRVPNRIITDNGTQFTSELFGDYCEDMGIKLCFASPAHPRSNGQLERANAEILKGLKTKTFNILKKHGDSWIEELPAVLWANRTTPSRATGETPFFLVYGAEAVLPSELTLRSPRATMYCEADQDQLRRDDLDYLEERRRRAALRAARYQQSLRRYHQRHVRARSLCVDDLVLRRVQTRAGLSKLSPMWEGPYRVIGVPRPGSVRLATGDGTELPNPWNIEHLRRFYP

SEQ ID NO: 191884 - protein, 237 aa, Oryza sativa
  Clone ID: PAT_MRT4530_88161C.1.pep
MASEEFISLGEPCEADAKDEEETNLQTIPPNLNEVNPLASEGESGPVDNTKASDGIIDLEGQDQVDGEPTTMDSTKVPDVIIDLEEGQVEDMDLSDDDVVVKHQYLDASIQSSTSVADVQTLHGVSVGGRTRGGLENGSHASKSILIDESTIRGVKRARVESTEPSVRVIYSNLTRESKRKLVELMQQWSEWQTRKQNTLTKAGEEVLECGEETYYPALHVGSEKSCAVSFWVDCQA

SEQ ID NO: 191885 - protein, 1767 aa, Oryza sativa
  unsure (1)..(1767): unsure at all Xaa locations
  Clone ID: PAT_MRT4530_88162C.1.pep
MAERAVAHNLSPSASGDDGEQNPRRRARTPPSPSRRSLGREEALERVERSATSPPAGDGEGRRDGERRLLVYGDGSTPQSALQAAGALLRHPPVVPDPETPARRWLDDMADLVMTAPQRLGAGGRSSATKASGAATVGSVSSRRRARRAAAVTRRSSAIPSSTPPTQEDVRGGPDARLNIERRRNGRHAAHATEGASSSGAPLRSGHGGQPPVSPVGGAGCRAFVASLRNVRWPPRFRPTITEKYDGSVNPAEFLQIYTTGIEAAGGDDRVMANFFPMALKGQARGWLMNLPPASVHSWEDLCQQFTMNFQGTYPRPGEEADLHAVQRRDDESLRSYIQRFCQVRNTIPCIPAHAVIYAFRGGVRHNRMLEKIASKEPQTTAELFQLADCVARKEEAWTWNSSGSDVAAPAAPGSAARSGRRDRRRKKRSAHSDDEGHVLAVEGASRATRKGRPASDKKKEVGAPSXSARPASGVPCTTPPSTTSRTAXAVKSLAERTRKWEEERRQERCEGKAPAAPTGNRRGEAKQKATAEDVDDGDDDLGFQEPEATVATVDGGACAHASRRSLKAMKRELLATAPTHEATRRARWSEVALTFDQTDHPPCVARGGQIAMVVSPTVCNVKLGRVLIDGGAALNILSPAAFDAIKAPGMVLRPSQPIIGVTPGHTWPLGHIDLPVTFGGSANFRMERVNFDVADLSLPYNAVLGRPALVKFMAAVHYAYLQMKMPGPGGPITVHGDLKVTLACMEQRADHLAAASKPAGGDERLSTSVPAAPKQRMITCDEVPEDALVSFLRANADVFDWRPADMPGVLREVIEHRLAVRPGARPVRQKVRRQAPKRQAFICEEVARLLEAGFIREVIHPEWLANPVVVPKANGKLRMCIDYTDLNKACPKDPYPLPRIDQIVDSTAGQIGRNVEAYVDDLVVKTRNQETLLSDLAETFESLRSARIKLNPDKCVFGVPAGKLLGFLVSARGIEANPEKIRAIERMRPPNKLRDVQCVTGCMAALSRFISRLGEKALPLFKLLKRSGPFTWTEEAERVLTQLKAYLSSPPVLVAPEPDEPLLLYLAATPQVVSAALVVERDEDNPHSTHPHPVSTRPEKEQGGEAPEPNGGLRPPTAGAGPPPACPTVPGAPDPQDGLGATARGPRLSPFDPEVVGTEAECYPRALSDEERPGDTAPSEEDRPRRKAHRVTVVTSYPLGQILHNREGTGRVVKWAIELSEFDLRFEPRHAIKSQALADFVAEWTPAPEPVSAPEATSGPSQLPHTAYWVMQFDGSLSLQGAGAGVTLTSPSGDVLRYLVRLDFRATNNMAEYEGLLAGLRVAAGLGIRRLLVLGDSQLVVNQICKEYRCSDPQMDAYVRQAYLADKTLPEDREESERVQRISKRYVLVEGTLYRRAANGVLLKCIPREQGVELLADIHEGECGAHSASRTLVGKAFRQGFYWPTALNDAVDLVRWCRACQFHARQTHQPAQALQTIPLSWPFAVWGLDILGPFRRAPGGFEYLYVAVDKFTKWPEAYPVIKIDKHSALKFIRGITARFGVPNRIITDNGTQFTSELFGDYCEDMGIKLCFASPAHLRSNDQVERANAEILKGLKTKTFNILKKHGDSWIEELPAVLWANRTTPSRATGETPFFLVYGAEAVLPSELTLRSHRATMCCEADQDQLRRDDLDYLEERRRRAALRAARYQQSLRRYHQRHIRARSLCVDDLVLRRVQTRAELSKLSPMWEGPYRVIGVPRPGSVRLATGDGTELPNPWNIEHLRRFYP

SEQ ID NO: 191886 - protein, 256 aa, Oryza sativa
  unsure (1)..(256): unsure at all Xaa locations
  Clone ID: PAT_MRT4530_88163C.1.pep
IDSRKSIDSYPLKKVVAMKQKKQMKLKSSQTDSDDMLELLTSKKDETKLKNKKKSKKNXKKAVILLRSIIIDLLTVEKTKKSGKSSKKDKHESSRENKLDRHGEVDTANVDEIQSVDEDCSRGMKKWVLEYKQKRPGLKVLQQRIDEFITAHEEQEEQERKEREARAAEDGWTVVVHHKGRKKTTDTETGTAVGSVSLAAMQEKMANKKPKEVDMNFYRFQKREAHISELAMLQSKFEQDKKRIQQLRAQRKFKPY

SEQ ID NO: 191887 - protein, 85 aa, Oryza sativa
  Clone ID: PAT_MRT4530_88164C.1.pep
SQSRRSPRWRLTTPAGRGPRKTPRGRRRGNPSRRRRRKKLATWRSNRSILPHARRRQRRATVRQSRATAAAAAGSVAIATRSQAG

SEQ ID NO: 191888 - protein, 531 aa, Oryza sativa
  Clone ID: PAT_MRT4530_88165C.1.pep
MAVSVFNTRRRTSLVSAFIDRTRMFISTPLPQVRDKVSRTKPPKPHGGGGERRRKKQPQEAAARAGGGMGGSSASPCDLDREFAPQIAQLLATPPLQPAQEYYNGLIQSRKHDGIRVNFSSKHGKGVCANKEFAEGDLILKDQILVGAQHSLNKIDCAVCSYCFRFIGSIEFQIGRRLYWQSVGSSSDCTNRRHCHESDLGSSASSSGATKENSSTLPEEVLGSLITGDMSLPFTDHFSLPQVVPCRGCEEERYCSQSCADSDWETYHSLLCTGSKTEPSQRSALQKFIEHANGSNDIFLVAAKAITFTLLRYKKLKTQPEFQNNTDESNFSLLMEAWKPLSMGYKKRWWDSVALPEDVDSCDEDTFRQQIRDLALTIIIFCVSQSLQLLKDAIFDSDGLVVPSPVEDYFIHIDDLPDDEKCNISQEEAEKVTRPFLDALGEDYAAPCEGTAFFPLQSCMNHSCCPNAKAYKRDEDTDGNAVIIALEPIKKDDEITISYIDEDVSYEERQAELADYGFICTCPRCQEEKPN

SEQ ID NO: 191889 - protein, 43 aa, Oryza sativa
  Clone ID: PAT_MRT4530_88166C.1.pep
KILWKTPHGLVINRVLLRDDWVYSISCRFIVSKFSLETKAIHG

SEQ ID NO: 191890 - protein, 173 aa, Oryza sativa
  unsure (1)..(173): unsure at all Xaa locations
  Clone ID: PAT_MRT4530_88167C.1.pep
RPPASMAAGLATVVSFLLVVLVSVAXGWNKDCPPPGSGSSGGGHHGKPPGSGSGGGGHHGDAXEHHHHHKPPPPTPAYVPSPPPYVPPYIPPPTPPYVPPYIPPPTPPYVPPPTPPSPPAYVPPXTPSSPXPYVPXXSPPATNTCPIVASLRNAGXERLGGLXHLXXGQKARA

SEQ ID NO: 191891 - protein, 333 aa, Oryza sativa
  Clone ID: PAT_MRT4530_88168C.1.pep
MARPMATTTSVSPPPRSGVSTSSSVPVRAVLPSASALEASARVRPRARAVLALFSDQRRRGRPWPLYKRRANPSHATVQRRAAPPASMAAALATVVSFLLVVLVSVAHGWNKDCPPPGSGSSGGGHHGKPPGSGSGGGGHHGKPPEHHHHHKPPPSPRCPSCHPPYTPPTPRPPPTPPYVPSPPPYVPPYIPPPTPPYVPPYIPPPTPPYVPPPTPPSPPPYVPPPTPPSPPPYVPPPSPPATKTCPIDALKLNACVDVLGGLIHLVIGQKARAKCCPLVQGVADLDAALCLCTTIRARLLNINIYLPVALELLITCGKHPPPGFKCPPLYGA

SEQ ID NO: 191892 - protein, 126 aa, Oryza sativa
  Clone ID: PAT_MRT4530_88169C.1.pep
TDNQPAVQPIPPNAQSAQPTAPVSAPAPIQHTPPRQQVVQPIQQTPQRQQVVQSIQQMPLRQQVVQPIQQQGQHAANQVVPEHLVHHVQPDQTVVPQVVPKHLVRNIQPNFQNYQAGNLNYQYQPP

SEQ ID NO: 191893 - protein, 65 aa, Oryza sativa
  Clone ID: PAT_MRT4530_8816C.1.pep
MLTESSAVEESKAPYSSPVAAHRLVRVVSSASLSTGTSPTTESTTPLNPGKFIPMGSRTQDLGCY

SEQ ID NO: 191894 - protein, 117 aa, Oryza sativa
  Clone ID: PAT_MRT4530_88170C.1.pep
YGARTARGEGSCEYLVKPEASPAKGARRRVSSASTSAPSLPPSAPATSVQVPNAADVAKAAAVARALQTSAEILSTSQLLVPQATPSQSAAAPTALPAVQAQVSPDPETQTEADMEA

SEQ ID NO: 191895 - protein, 493 aa, Oryza sativa
  unsure (1)..(493): unsure at all Xaa locations
  Clone ID: PAT_MRT4530_88171C.1.pep
MMQQERNQFLNSFMQTRKGTVVQNYKXSSKDREVQQAPDGAAQPSDKSVADGSQGVQGDGSQGVQGVGSHGIQGDXLRDFKDQVDYAVQHALINQSGILVNTLSNIVKSMVDGSIAEYQATGPVYLPRGVFLNYRPLITDNQPAVQPIPPNAQSAQPTAPVSAPAPAAPSLAPGQLVNPRLXATADSTNTTKAASFATDSAYATKAAGGAADSTDATKAAGRAVDSANAXRQQVVQPIQQQGQHAANQVVPEHLVHHVQPDQTVVPQVVPKHLGMIALIREKFSSQDFDSLSYLAQKVTLHEQRFAEARKNFKKVNYVCPYIYGSDDDDDSEIAAAEWVRSKKVIPCQWVKSSGKEERYDFDITKADKIFDLLLREKHIQLLAVHTIPSAEELGKRRYCKWHNFVSHSTNDCKIFRQQIQATIEGGKIKFDDSKRPMKVDGNPFPVNMKKYDKQQEGCYEEDDGGLILIGDVNSLDFVGMKEVQADRIIEAIG

SEQ ID NO: 191896 - protein, 121 aa, Oryza sativa
  Clone ID: PAT_MRT4530_88172C.1.pep
LTTRVSMFDQSMHMLDHDQGACEIDRSVARIIESGTVGACSRTAGDDDVLRSRRRLGLWLCDAAVARHADAVDVAVVAVVLVDVPAAVLPGRRLVVVVEQEVSSPRLLHHVHFALDRVVGS

SEQ ID NO: 191897 - protein, 189 aa, Oryza sativa
  unsure (1)..(189): unsure at all Xaa locations
  Clone ID: PAT_MRT4530_88173C.1.pep
MSAASKDMSSLAAVLRLPPVKTSLCWWAFLSRPLAKMHFGSLPATMEVAATTVSHRIRPLSPSSSPPRGWRELTSPRPNPPHAPLPRLDSPHTALRRPYMPRPRPSPSWLRTRGPRSSSLPXAGPPWLRPPRVAVAARPPPIARPPWLRPPRIAALRPAQASPSSPPPCSIAALPATSENRFIFARGRH

SEQ ID NO: 191898 - protein, 112 aa, Oryza sativa
  Clone ID: PAT_MRT4530_88174C.1.pep
MSRFVCYSSNVAVLKRPLIIDSRVTIADMRDLWPLGFCPSVETGGVRPEGDVFALLFTGRVGPLPSRPRGPKRPDPLWALRHVYGVDRSDRGLGGDRRFEARLAPSRQDEGF

SEQ ID NO: 191899 - protein, 137 aa, Oryza sativa
  Clone ID: PAT_MRT4530_88175C.1.pep
MGVCADVLNFEKVRDVRAGRASGVCEVSKNQSYISTIIKIEDVFADIGLSPSDAAVVMLSGQLADGFATIFVGELALLAFYVINDLEMPQSSKALRFGQGHRPQLFPASTGLPHPDSSFPAARPLPRLHIPAAPPTH

SEQ ID NO: 191900 - protein, 48 aa, Oryza sativa
  Clone ID: PAT_MRT4530_88176C.1.pep
VPFKLCKRANLKQFPKSDIKFPLVYRKVRPPPRKLKPPFKASRPTLFM

SEQ ID NO: 191901 - protein, 83 aa, Oryza sativa
  unsure (1)..(83): unsure at all Xaa locations
  Clone ID: PAT_MRT4530_88177C.1.pep
CAPRXCRXXXHAPRAXXRRVARPVAALEPEGVADPSEGQDPQDFEQGKSSLFFEHVDPNCEIVLFTNKIACNYEHPTCDYTMP

SEQ ID NO: 191902 - protein, 80 aa, Oryza sativa
  Clone ID: PAT_MRT4530_88178C.1.pep
FFFFFYKRNQRVKYRAKIYSTKQKEPMFTFLKKKGGRPFFFFFFLKQTLSYSSFIVCTMTMPPADENIHLPERLRAQRWT

SEQ ID NO: 191903 - protein, 55 aa, Oryza sativa
  unsure (1)..(55): unsure at all Xaa locations
  Clone ID: PAT_MRT4530_88179C.1.pep
TSIRLAPDRLTTXSRACAHSIKPPTHLNRPTIHFHHPNSTTSSKRAERSVVSQSV

SEQ ID NO: 191904 - protein, 83 aa, Oryza sativa
  Clone ID: PAT_MRT4530_8817C.1.pep
LTSAYHFYSDFASGDRERDGLLLGLRFLGLDASPFAGEAFGDLDLAGDLQKRSREATIFNIQNAGLTAYSKNLDALSSIAPTK

SEQ ID NO: 191905 - protein, 100 aa, Oryza sativa
  unsure (1)..(100): unsure at all Xaa locations
  Clone ID: PAT_MRT4530_88180C.1.pep
NRGNGKNLGITKLIRLEENPFFAGWVKRKKPVPVPFSKNLHTLNGNWNPPCXGTIKGGGCVVXTQRVTFKFASAXAPVLWVFSLSFPATFAVFPLKVLNG

SEQ ID NO: 191906 - protein, 182 aa, Oryza sativa
  Clone ID: PAT_MRT4530_88181C.1.pep
KAVLERSEYLRDNRFTIRCDITVMKNPEAKDTGGRRVTLPPSDLARHLGGLLATGVGADVTFEVDGKTFLAHRNVLAARSPVFHQELFSLTEKGNAATGGAGVIIRVDDMEAQDFEALLHFIYTDSLPEMKGGDAVAMLPTWSRRLTAMLAFAGEHQCPELEKKCLQLLEDPANLRNIVETE

SEQ ID NO: 191907 - protein, 371 aa, Oryza sativa
  Clone ID: PAT_MRT4530_88182C.1.pep
MATAPTVAGGKLLRSASAIVGGTESGQHLLEINGYSSIKDAVSIGNCVQSRHFRVGGHDWYIRYYPNGFNSNVSDCISIYLVLDGHEAHDYYYGRSIVRAELTLSLLDQEREPVTSYIYSHGLQIFDGYGRYRGSLRFIQKAVLERSEYLRDNRFTIRCDITVMKNPEAKDTGGRRVTLPPSDLARHLGGLLATGVGADVTFEVDGKTFLAHRNVLAARSPVFHQELFSLTEKGNAATGGAGVIIRVDDMEAQDFEALLHFIYTDSLPEMKGGDAVAMLPDLVAAANRYKMERLRLVCEDKLCEYVTVRTVAAMLAFAGEHQCPELEKKCLQLLEDPANLRNIVETEGLEHLTKSYPFVLKDLIAMFATKP

SEQ ID NO: 191908 - protein, 69 aa, Oryza sativa
  unsure (1)..(69): unsure at all Xaa locations
  Clone ID: PAT_MRT4530_88183C.1.pep
DYHLLEKVDDLAQEHIHEYVVHAQGVSATVYFXCTHDRTXISCRDFVRTADYKTLVIGHFSIMMHKRGN

SEQ ID NO: 191909 - protein, 49 aa, Oryza sativa
  Clone ID: PAT_MRT4530_88184C.1.pep
LSDSDGFWPRRHSANLGASDSGNRGYDHVSVTHGARKAPPRDSPTPSLQ

SEQ ID NO: 191910 - protein, 110 aa, Oryza sativa
  unsure (1)..(110): unsure at all Xaa locations
  Clone ID: PAT_MRT4530_88185C.1.pep
TKAKNSKLSKELPTVRGQLFFEQSKCFQLXVDVSELRPKLQSMDALEREVXLLLKQKAAFXQTALGAKQRQSSPGMWGWLVGTPPDKSEFCSPIFFFPPISFGLGRFIYV

SEQ ID NO: 191911 - protein, 75 aa, Oryza sativa
  unsure (1)..(75): unsure at all Xaa locations
  Clone ID: PAT_MRT4530_88186C.1.pep
CHVGFSHTGPVVCVKASVXHPDTLXDCPFSQRVLLTLQENNVPYEMIMIDLHNKPYWLLKITPRTNEPGFNGGDG

SEQ ID NO: 191912 - protein, 61 aa, Oryza sativa
  Clone ID: PAT_MRT4530_88187C.1.pep
MDGRTPHEDQKLLGLSAAATFPDSNGYRSWHGQGAAARNTRHVLHVKNLSGTREREGNPDG

SEQ ID NO: 191913 - protein, 166 aa, Oryza sativa
  Clone ID: PAT_MRT4530_88188C.1.pep
MKEGGGGGGERRNILAKTIDRCRSSLGHRTTRRPASAAGGGGYGGAAVPAGFFAVLVGPEKERFAVRARCANHPLFRALLDQAETEYGFAGCEGPLELPCDVDAFMDVMWEMEQADPAASPRCGARFGGPAAAGSGRGYGGHGHHHQHQGYQMMSTPARLLVAGRS

SEQ ID NO: 191914 - protein, 175 aa, Oryza sativa
  unsure (1)..(175): unsure at all Xaa locations
  Clone ID: PAT_MRT4530_88189C.1.pep
FFFFFFQQASQFIHQSFIHHSAGVIHHHQSSSQHHWQRGNQGACQSFHXXHFLSSHPSLSLASAAXQAANPVLQLAPRHFXRGVQGQLTVCAHTSGGXHTQVQGGPEQWHTLSSAHLSLWHSLQQGIPHMATLFRQHHPVAGNSGFYGGSPAQPPWXHTAHFRSGLATSLAALWQ

SEQ ID NO: 191915 - protein, 1099 aa, Oryza sativa
  Clone ID: PAT_MRT4530_8818C.1.pep
MARCGGERMVDELRDVLDDFAFRAKRLAAPLLQPFGRASEAVALDGAEIDGLRRIRAALRAAEERVVTDDFVRLWLRELEDLERMAEDVLEELEFEALRASRLERFKLQLLRSSAGKRKRELSSLFSSSPDRLNRKIGKIMERYNDLARDRDALRLRSSDEERRREPSPLTPTSCLTKCSLHGRERDKKQVIKLLLSDEYNCQGVYSVVPIVGAAGVGKTSLVQHIYNDEALRSKFDMKMWVWVCQEFDVLKLTRKLAEEATESPCGFAEMNQLHRIIAKRLEGKRFLLVLDDVWDESLLRWTSLLVPLKSAAPGSRIVVTTRSAKVARMMAFKIHQLGYLTDTTCWSVCRNAALQDRDPSIIDDGLISIGKSVAAKCKGLPLAANAAGSVLSIAIDRKHWETVEQSDLWANNEVIDHTLPALLVSYNSLQKPLKHCFSYCSLFPKEYVFRKDKLVRLWLAQGFAAADGESDAEDIACRYFHNLVERFFLQQSPSYDHNEQRSFRNFHNTDYTNRYVMHDLYHELAEYVAADEYSRIERFTLSNVNGEARHLSLTPSETHSHEIGEFHASNNKYMNESQYPGLRTLLVVQRTKHDDGRKTSSIQKPSVLFKAFVCLRALDLSNTDMEGLPNSIGELIHLRYLSLENTKIKCLPESISSLFKLHTMNLKCCNYLSELPQGIKFLANLRHLELPRIDNWNVYMPCGISELTNLQTMHTIKFTSDSGSCGIADLVNLDNLRGELCISGIENVSKEQIATEAIMKNKGELRKLVLQWSHNDSMFANDASSVLDSLQPHPALEELIIMGFFGVKFPVWMGSQCSFKLSFLELKDCRNCKELPSLGLLPCLKHLFINSLTSIKHVRRMLSSGDHTSSGDFQSRIAFPTLETLKFTDMESWEHWDETEATDFPCLRHLTILNCSKLTGLPKLLALVDLRIKNCECLLDLPSFPSLQCIKMEGFCRVNHLLQLPLFSQLEMLELRCHKKLVSLRKLQHISPFHSLRLRKELVQKVSGCEVLPFQNPSVQDSQKTWTFLRCAGQILECNVVACTDLTFGQTNVHSSEEEIGNGVIFHIGQDEAVELVSCKPVWVQIGQPEEVEIICID

SEQ ID NO: 191916 - protein, 138 aa, Oryza sativa
  Clone ID: PAT_MRT4530_88190C.1.pep
MGKHEFLTPKAIANRIKAKGLQKLRWYCQMCQKQCRDENGFKCHCMSESHQRQMQVFGQAPDRVVEGFSEEFLDAFLTLLRRAHRHSRIAATVVYNEFIADRHHVHMNSTRWATLTEFVKFLGREGHCKVEDTPKGWF

SEQ ID NO: 191917 - protein, 129 aa, Oryza sativa
  Clone ID: PAT_MRT4530_88191C.1.pep
TRARCRRSPSSTSSCAWRRHHRPDPSPPDSGTAPPPPPLFPRRWQQVPSPGGGGRGGPGDDPREAFFVEKLPPPFLRPFLRTASSAEHISPSRRPPPDRRAPTPPPPLTSSCSLRFASPPLRAPAPLRF

SEQ ID NO: 191918 - protein, 788 aa, Oryza sativa
  unsure (1)..(788): unsure at all Xaa locations
  Clone ID: PAT_MRT4530_88192C.1.pep
AFDRGFCLLVKAIQELSERKYRIVVTVGFGGPSGSXNSETPGKSSLDSWIQRDCLLRCLLYFSXAETGSDVCSIVFRFKVRKTLGSLFEDHVAECNVNVKDLIKDKYKLMQLVDFQEKKRTGWRQLKISPSGVVIVDGAYALHSTLRSLLDIRVAVVGGVHFSLLSKVQHDIGDSCSLDYLIDSIFPLFRKHIEPDLHHAQIRIDNSFVCSFREPYYKLKCKNELPDGHNLYFFNQNEGETENFIEMYLRPPFASEEIKIDDWIKVRQCGIRYYLSLGDQRIVDKYFIIRPKAEFEVGRTTLGGLLALGYSVVVSFKRTCTSVSRDQLLIAAETIDTLNETFLVLKGPSRKIVAAEARKLGIKGPWITKSYLEMILESKGVPRLNTPPPISRKLLTESQEKKIVAPKPIRVSTENVANFDDFAQPWTRSPPKKFDQEPVMGKWQFNQDSSSGSNIQLAPLPDSYDLDRGLLLSVQAIQALLENKGFPVIVGIGGPSGSGKTSLAQKMANIIGCEVISLESYYKPEQVRDYKYDEYSSLDIGLLTKNIMEIRKNHKAEVPCFDFEKCKRKKFEELQVSEECGVPSSITFDLTRDHHDSMRMYTIKVIFEGVYALHPAIRKSLDLWIAVLKIQNDFDPVLSPESSLFVLKSKKQVSYQDILKVLDASKACSCVQNFTVVYLRLPGIPLSGQLTEGECIRVRICEGRFALLIREPIREGNFIIQPKVDFDISASTVAGLLKLGCIIRRTSCYTGCNLCAIWVVVIVVDCWAYVGLAHLLFDTNINEYNMMG

SEQ ID NO: 191919 - protein, 112 aa, Oryza sativa
  Clone ID: PAT_MRT4530_88193C.1.pep
MGSRAAEVVDNKERATGREGGCRAPATASPWGARRPWPTASPPAGSGGWEDTAAPTTHGRACRLPSRPWCSHMERRGGRMKGEEESGGGEEIRCKQARDGWRRAEHSQPKLA

SEQ ID NO: 191920 - protein, 475 aa, Oryza sativa
  Clone ID: PAT_MRT4530_88194C.1.pep
MGSHGHGHGDGGAENREHYIVVETSSLLKPKAICSGLKGNVLTNAIQQWHVGGVAPPLRPVFPVAEDNLAAVVGRHVTLDKLHPDAIRRKAPAGGDVVLEPDKPIVDVQQSDYKMQASFGIGTGGRSGSSSSSSSRISRPSAIDDPILAQPMSIDTSIDLPWIQCAPCPMPECYPQQNALFDPRRSRTSAAVPCGSAACGELGRYGAGCSNNQCQYFVDYGDGRATSGTYMVDALTLNPSTVVMNFRFGCSHAVRGNFSASTSGTMSLGGGRQSLLSQTAATFGNAFSYCVPDPSSSGFLSLGGPADGGGAGRFARTPLVRNPSIIPTLYLVRLRGIEVGGRRLNVPPVVFAGGAVMDSSVIITQLPPTAYRALRLAFRSAMAAYPRVAGGRAGLDTCYDFVRFTSVTVPAVSLVFDGGAVVRLDAMGVMVEGCLAFVPTPGDFALGFIGNVQQQTHEVLYDVGGGSVGFRRGAC

SEQ ID NO: 191921 - protein, 95 aa, Oryza sativa
  Clone ID: PAT_MRT4530_88195C.1.pep
PTRVLSSPGWAALSPLYGTWLHDWWPSSRACLPDHLRASFDSLVLLVSWQLWRERNSRVLDSVLSSVAVVLEVILLEGRLWSLAAVTYFGELLGA

SEQ ID NO: 191922 - protein, 440 aa, Oryza sativa
  Clone ID: PAT_MRT4530_88196C.1.pep
MGSHGHGHGDGGAENREHYIVVETSSLLKPKAICSGLKGLLNVRLIRVHEYMRAAMPSSNGTWVALHRPYGPCSPSPTTTSPPLLVDMLRWDKLHTDAIRRKATAGGDVVLEPDKPIVDVQQSDYKMQASFGIGTGGRSGSSSSSSSRISRPSAIDDPILAQPMSIDTSIDLPWIQCAPCPMPECYPQQNALFDPRRSRTSAAVPCGSAACGELGRYGAGCSNNQCQYFVDYGDGRATSGTYMVDALTLNPSTVVMNFRFGCSHAVRGNFSASTSGTMFARTPLVRNPSIIPTLYLVRLRGIEVGGRRLNVPPVVFAGGAVMDSSVIITQLPPTAYRALRLAFRSAMAAYPRVAGGRAGLDTCYDFVRFTSVTVPAVSLVFDGGAVVRLDAMGVMVEGCLAFVPTPGDFALGFIGNVQQQTHEVLYDVVGGSVGFRRGAC

SEQ ID NO: 191923 - protein, 236 aa, Oryza sativa
  Clone ID: PAT_MRT4530_88197C.1.pep
MWRGVGGEIGKIPHLYVADGVDGVELAALELHAPALPPVLPLRARLVERHLRLPSPSPSPSSAAHLLLAPLPERAVPASEEVVVVAAATSSSCLAAAGFKGGGLMPKRGTELPDGLRGGAAGQRGHIRKAEPAYHDIDEITMGALLLTDTSPITKRLIRSACVVATISNISSSAHAGPIHKALKEKSKANIDACRTVTEKNNPKYKLKQVWRRVAGRRRRRRTRRLRSTLKEVVEK

SEQ ID NO: 191924 - protein, 92 aa, Oryza sativa
  Clone ID: PAT_MRT4530_88199C.1.pep
SIDSGVQRLVIKTKSVEFMPFLLSLSVFLCGTSWFIYGLLGRDPFIAIPNGCGSFLGLMQLILYAIYRNHKGATPAAAAGKGDAADEVEDAK

SEQ ID NO: 191925 - protein, 134 aa, Oryza sativa
  unsure (1)..(134): unsure at all Xaa locations
  Clone ID: PAT_MRT4530_8819C.1.pep
WREFRRGRRSVAWISDFLLRVSESSSSLLVSTPTVLTFVSNDDRRRPATRXRGGGGSDLVGGGATAHGDDGEVAAGLPHHRAHLMASTASGGDGGCGGAARLAVGRRRQRLERRGGGATKHGRARERGQTKEDN

SEQ ID NO: 191926 - protein, 467 aa, Oryza sativa
  Clone ID: PAT_MRT4530_881C.1.pep
MSQGNIPEYGGSGIENEGIDFDLEDMLRHVEPEVLTGTRRGLDSWEALKKTAKELLYDEAKGCDKDYSVLRSVLELLRLKARHGCWEMAGYMSRGPPNGSVYVCNLPPGTDETMLADYFGTIGLLKKDKRTGRPKIWIYRDKVTNEPKGDATVTYEDPHAASAAVEWFNNKDFHGSTIQVHIAESKNKDTYDNSASLNNSAGLGGQDELDNGAGRGRGHGDGPGKAWQQDGDWLCPNTSCGNVNFAFRGVCNRCGAARPAGVSGSGAGGGGRGRGRGSDDAKGGSRAAAVGGPPGLFGPNDWSCPMCGNINWAKRMKCNICNTTKPGHNEGGVRGGRGGGYKELDEEELEEVKRRRKEAEEDDGEMYDEFGNLKKKFRAKTQQTENAPTLPGSGRAGWEVEQRGSTRRESRERSRDRGRDHDYNERDSRNRDRGSHGRERRRSRSRSRDREKERGRDRGRDHIYDRS

SEQ ID NO: 191927 - protein, 74 aa, Oryza sativa
  Clone ID: PAT_MRT4530_88200C.1.pep
TRSPQCPGAQSPVLLHFLHGAPPAPAPPPAASRPPRPSSSISGSQSLPDGRPPSVVLILTHPCIMFNFSLSIAS

SEQ ID NO: 191928 - protein, 170 aa, Oryza sativa
  Clone ID: PAT_MRT4530_88201C.1.pep
MKGGASRKVRSAMPEEEPKHEDRAAETTESSMFLTRTEAEASPPRIVGLRGKPPFTTTTTTSNFTTNKDKSWGKQSSRKHLGGRKGGREVATAMGVGGGGGRRRRAPCRKPPHRTDEETNPRRFASTSLLPTRASHRRARRPRPPMCAAEETSAAGHSPHRRAAILYDWI

SEQ ID NO: 191929 - protein, 424 aa, Oryza sativa
  Clone ID: PAT_MRT4530_88202C.1.pep
MADSKGSGGAAGDKPGADASPATNPAPPAAAVAVAAAAADAGGDDDVAAAAEARRPFTALSQVDADLALARVLQEQERAYMMLRMGGGVGEGSDYGSSDAGSYEYDDEAEEDYEEELEHHLRVHHHEHAVGEGRGEGERDGEGAEGSEFEEEGFDEEYDEEEVEPELDPAEYEDDEAYARALQDAEEREVAARLMALAGISDWRPVEPVEEHANDPQELVALGEAVGTGHRGLSAATLASLPSVTYKAEGVQDGNTEQLEAHANTRSSPTRDRERPSASLAAMAASTVSGLAGATLARRPAFSTGFTTGARVSARNPLLTRNLERNGRITCMTFPQDWLRRDLNVIGFGLIGWIAPSSVPAINGNSLTGLFFSSIGQELSHFPSPPALDSPFWLWLVTWHLGLFLALTFGQIGFKGRTEGYFDK

SEQ ID NO: 191930 - protein, 65 aa, Oryza sativa
  Clone ID: PAT_MRT4530_88203C.1.pep
MSTGGNLRVFVVLLVVQVCLLVVMASSSSWTVQGRPLALESVPACCFYHPDCCQAAGADPAIADP

SEQ ID NO: 191931 - protein, 274 aa, Oryza sativa
  unsure (1)..(274): unsure at all Xaa locations
  Clone ID: PAT_MRT4530_88204C.1.pep
EARRPFTALSQVDADLALARVLQEQERAYMMLRMGGGVGEGSDYGSSDAGSYEXEDEAEEDYEEELEHHLRVHHHEHAVGEGRGEGERDGEGAEGSEFEEEGFDEEYDEEEVEPELDPAEYEDDEAYARALQDAEEREVAARLMALAGISDWRPVEPVEEHANDPQDAWQEVDPDEYSYEELVALGEAVGTGHRGLSAATLASLPSVTYKAEGVQDGNTEQCVICRVEFEDGESLIALPCKHSYHPECINQWLQINKVCPMCSAEVSTSDSNQA

SEQ ID NO: 191932 - protein, 118 aa, Oryza sativa
  unsure (1)..(118): unsure at all Xaa locations
  Clone ID: PAT_MRT4530_88205C.1.pep
MASAVVAKPPAAAPASRRRCFVFVERAAAAAVGVNAAIAAVDDHRPVPAAAAAAMDDVVGRVARPARPSARAIMEGTHKQISSGGASGGYCTXPWXSICTGNNPXAIAEXLLCLHLCG

SEQ ID NO: 191933 - protein, 290 aa, Oryza sativa
  unsure (1)..(290): unsure at all Xaa locations
  Clone ID: PAT_MRT4530_88206C.1.pep
KPDLVIFVMDGSIGQAAFDQAQAFKQSASVGAVIVTKLDGHAKGGGALSAVAATKSPVVFIGTGEHMQDFEVFDVKPFVSRLLGMGDLSGLVNKIKDAMPADQQPELMQRLIEGTFTLRVFYELFQNLLNMGPIGQVLSMIPGFRSELMPKGHDKESQAKIKRYMTIMDSMTNAELDSTNPKLMSESRIKRVARGSGRTMKDVTDMLEEYKRIAKVCSKLKKKLPKNMDRNVMNNKDTLNTINNLIPKQLLNQIGGVNPLQSVMKQMGXKDMNEMFWEHVLMLIDICKYI

SEQ ID NO: 191934 - protein, 142 aa, Oryza sativa
  Clone ID: PAT_MRT4530_88207C.1.pep
MAASTVSGLAGATLARRPAFSTGFTTGARVSARNPLLTRNLERNGRITCMTFPRDWLMRDLNVIGFGLIGWIAPSSVPAINGNSLTGLFFFSIGQELSHFPWPRALDSPFWLWLVTWHLGLFLALTFGQIGFKGRTEGYFDK

SEQ ID NO: 191935 - protein, 431 aa, Oryza sativa
  unsure (1)..(431): unsure at all Xaa locations
  Clone ID: PAT_MRT4530_88208C.1.pep
MGVISGGGGGDDDGYGGGDGMLRSLHSSSSSDTDNNSGGCKNNGGGGGEAAAAVEGGGDQRAVAAAAPSTRDLLLACADLLQRGDLPAARRAAEIVLAAAASPRGDAADRLAYHFARALALPVAPFLRFAHLTANQAILEAVDGARRVHILDLDAVHGVQWPPLLQAIAERADPALGPPEVRVTGAGADRDTLLRTGNRLRAFARSIHLPFHFTPLLLSCATTAPHHVAGTSTGAAAAASTAAAATGLEFHPDETLAVNCVMFLHNLAGHDELAAFLKWVKAMSPAVVTIAEREAGGGGGGGDHIDDLPRRVGVAMDHYSAVFEALEATVPPGSRERLAVEQEVLGREIEAAVGALRRPVVARHRXWGGAARAAGFAARPLSAFAVSQARLLLRLHYPSEGYLVQEARGACFLGWQTRPLLSVSAWQPSSS

SEQ ID NO: 191936 - protein, 60 aa, Oryza sativa
  Clone ID: PAT_MRT4530_88209C.1.pep
LLDFTWCCRLCPVSTVRTPRTTTASTSEVAIDVKRPTQTRLGCQRTVCGSTSPSPAWRLL

SEQ ID NO: 191937 - protein, 607 aa, Oryza sativa
  unsure (1)..(607): unsure at all Xaa locations
  Clone ID: PAT_MRT4530_8820C.1.pep
LVLDGQLCEEEDVASGLPKFXKAAGSTSEAKEAVKPDVKQEEKIRSVKVLSLVSDLXFPPIFSFPLSKPCXQMADNEKGSXVRNQNKGAPSXRVNEAPDTSCVTVVXHLINXNELLIELPQQHQMPILDPSQMQPQVQVEAVQSLTPQVSAPPASQQAHRAMPHVDSKEARIICFIYVEQGHYARNCPXQKKKAPMRTEDEVRKMTITGTEWPPPGMTKRQRRNFFRGAPXLTEHLLANGGRVSDSEDSDQVSSRVEDEKSLQGFNQNKKEHMACSRCGEIGHFASSCVTTCVHCEEDHPPDECPTSRITYFLCEXADHVRKDCQFSFLLMKKMANQPASYNRQKHQGNPNPRQDYSFSLTPMPGQRNQNGKRKCRDNSQEIKYKMKNLRVRKPKDCIAPEAPTTPGVKSTWLRKVKSRSLPLPTLFKPSPHLLRPFPPSPPFLLAGFELATSLSLSAIAAELRSAAVVAPDRLPPRRRLLRLRRILADLVHPSVSVADRRSAAVPVDPSHATASLRSGRLLRHRRRLGVSRGPSPPFPLPSPLSAAAPPRRWLPAATIGARGCRLPPTAPAWPPSGAPSGCRVGPGRQPPAPSGAADVWGPRRRPV

SEQ ID NO: 191938 - protein, 290 aa, Oryza sativa
  Clone ID: PAT_MRT4530_88210C.1.pep
MASAVQLLLLRLPLAAVFPPKPATTKTLAVAGMSKAEAAAAGDAAKPDPEMGVAGEKEVVAEKAPARRKVAAEEEDPRLRWAFVRKVYCILALQFAVTAAIAVVAWAVRPIPRFFAAGSLASWLVYLAILLCPFIGLCGLLLLLLPSLAWFLDLSFFLPWWYLIGAGNHAVTDGKVVLQAAILTAVAVIGLTIFTFWAAHRGHDFTFMYPFLAASLLVLLAYLIIQICFPLGRAGMTIYGCLATVLFSAFIVFDTNQLIKRHTYNEYVIAAISLYLDVINLFMAQLSFSI

SEQ ID NO: 191939 - protein, 224 aa, Oryza sativa
  unsure (1)..(224): unsure at all Xaa locations
  Clone ID: PAT_MRT4530_88211C.1.pep
IIKVLMRFPPASYDLEQPRATNSIRPPSDSSSFHAYRASMVPSTGYGAXPALLWTGIAGSRVFRLSHSCESSHMCRRKKXLKEATERKEXTKCVAWGSRLEISSQPKVRAGESPSGWGKKGAXALVPVKKGEETGPKCHXTRRVVSTLATWERFWSGLTPGATVHDXGPGGIIALDRSVTGRMTDGTRVVRLHAAXCVSRCIPCHIPSQNKCRHKFPCSILIVC

SEQ ID NO: 191940 - protein, 133 aa, Oryza sativa
  Clone ID: PAT_MRT4530_88212C.1.pep
MASSGSKSKTNNGFFVPSPATAMAPCFLLLLIFFFLHVDASAAAASSSSHPQLVQQMQVKRARSLLQAPKIDCQGTCSGRCANNWKKEMCNKMCNVCCNRCNCVPPGSGQDTRHLCPCYDTMVNPHNGKLKCP

SEQ ID NO: 191941 - protein, 55 aa, Oryza sativa
  Clone ID: PAT_MRT4530_88213C.1.pep
MTDDDHEGPLKGSLEAAVLVEPLSDAPRCGLWRRRWTWWACRISPITPKWFGLSG

SEQ ID NO: 191942 - protein, 274 aa, Oryza sativa
  Clone ID: PAT_MRT4530_88214C.1.pep
MGRGKIVIRRIDNSTSRQVTFSKRRNGLLKKAKELSILCDAEVGLVVFSSTGRLYEFSSTNWAWCTAHAEEYIPTPITGELQQTPLKGAEYAHNICAQSDSTESSELEVGKSCKPRMGQRGQIAADANSIWQREAASLRQQLHNLQESHKQLMGEELSGLGVRDLQGLENRLEISLRNIRMRKGSLIHQENIELSRSLNVMSQQKLELYNKVRCKILLETCDYMLTHYPKQLKEQLDFSFRPVNREVPQMQMKVPALHTAFVSYKMLICLLVLN

SEQ ID NO: 191943 - protein, 1039 aa, Oryza sativa
  Clone ID: PAT_MRT4530_88215C.1.pep
MGSSDEAGSSKHHRRDKEKDRERSSSRHHRDRDRERSSSRHHHREDRDDDRDRDRDRERRHREKERDREERKAREREEREKEKERERARRREERDREERSRRREAAAEEEEEDVDRDRKRRRRSSHHHHHHRDAEPEGPASGAREEEVVDVEEAERRRQKKKEEEQKQLDEEMETRRRRIKEWQEMKRREEETKRREQEEAGVGTSAAAAAAPAEAEDGGNAGKKWTLDGEESDEEGNQEDGKKSDDNGGSGAGAMDVDVPNGGDNANGANAMDEDEIDPLDAFMNSMVLPEVAKLESMPAANVDDKNDKSAKDAVTNGDKKGPKKVMGRIIQGEDSDSDYADDEDDEGGSEDEDDEEFMKRVKKTKAEKLAIVDHSKIDYQPFRKNFYIEVKDITKMAAEEVAAYRKQLELKVHGKDVPKPIKTWVQSGLTSKLLDTIKKLGFEKPMSIQAQALPIIMSGRDCIGIAKTGSGKTLAFVLPMLRHVKDQPAVVPGDGPIGLIMAPTRELVVQIHSDIKKFSKALGINCVAIYGGSGVAQQISELKRGAEIVVCTPGRMIDILCTSSGKITNLRRVTFLVMDEADRMFDMGFEPQITRIVQNTRPDRQTVLFSATFPRQVEILARKVLTKPVEIQVGGRSVVNKDITQLVEVRPENERFFRLLELLGEWFDKDKCDSLLKDLFQHGYPCLSLHGGKDQTDRESTLADFKSNVCSLLIATSVAARGLDVKELELVVNYDVPNHYEDYVHRVGRTGRAGRKGFAVTFISEEEERYAPDLVKALELSEQAVPEDLKGLADRFMAKVKQGTEQAHGTGYGGSGFKFNEEEDEARKSAKKAQAREYGYEEDKSDSDSDEEGGVRKAGGDLAAQAIAAAQAAAAMVAAKAASNANQQTQGTSVGPLLPLAIASNTQNNEATARALQAAFNIQQNLARIQAHAVPEHYEAELEINDFPQNARWKITHKETLGPIQEWTGAAITTRGTFFPQGKIVGANERKLYLFIEGPTELSVKKAKAELKRVLEDCANHALNLPGSAQTGKYSVI

SEQ ID NO: 191944 - protein, 128 aa, Oryza sativa
  Clone ID: PAT_MRT4530_88216C.1.pep
SWMDDGSYVYSAFFGCDFVKCSQLVLFGRLSLFCFVQDRGAISVGTSCSERIFSIFHLHGYPCFVLYRIEERCRWELPALNAYFLSSIFMCLYCCLSLLQFPVVLPAVNEPVLVFKKKKKKKKKKKRG

SEQ ID NO: 191945 - protein, 145 aa, Oryza sativa
  Clone ID: PAT_MRT4530_88217C.1.pep
RYAKHASTYLVVEYPYNKGIPQSNKDCLYTGYDIRKEPTLPEGKKRARVFRGSLIPAYPTRNGPKPKRSQLSEGNGKKRPIRQTRLSRAGWPDYLSQRAHKVSRLKTGHESYYNSLAVVLQRRDWENPGVTQLNRLAAHPPFASW

SEQ ID NO: 191946 - protein, 152 aa, Oryza sativa
  Clone ID: PAT_MRT4530_88218C.1.pep
MAAAAAAAAVAAAASSQPASQPLAGRVAIVTGASRGIGRGIAAHLSALGASLVLGYASSSAEADALAAELPRAVAVKADVSDETGVRALFDAAESAFGAGAHILVANAGLLDDRYPHLSNTPTADFDRTIAVNLRGAFLCLREAANRLPRGG

SEQ ID NO: 191947 - protein, 70 aa, Oryza sativa
  Clone ID: PAT_MRT4530_88219C.1.pep
SRQHQQIAATERDHSGGPGGGVVRGLDADAEVMRRKVARTRPRVWRHGGVRRNAEAAESRGASGGCRLPL

SEQ ID NO: 191948 - protein, 710 aa, Oryza sativa
  Clone ID: PAT_MRT4530_8821C.1.pep
MAKRDGEKKGIKEEEGGLGKCTFALLRRFWIPYRPHVTAAGRRSTVAALDRLVFVIRHLEANASNLKSELSVSASDHAIEKPKKLLVTEEISEPPNVGKIDCADSPTPHQSSNCSSGLAKSSGFYDHVKGPPMTDSIGVLSNTSVRFGDFDEVPETPTEDESKVLDICEITDNRLDVSGSPSLDDTVSLSCANNDLEVPVKSSSVASTESQTVLHAPTSADFGGETAGSKERFRQRLWCFLFENLNRAVDELYLLCELECDMEQINESILVLEEAISDFQELKSRAEHFDNTKKSTALPKEGMPMAVKADHRRPHALSWERHFREFNWNWLANKLKLHGSEMRRAEKLLVIKTKQKEDIAREEAVLERRKILEAEKMQRLAEIQRKKEEAIIRREEERKASSAAREARAAEQQRRKEIRAKAQQEEAELLAQKLAEKLRESEQRRKPQVEGSPLPSSILFGLNLLAVLTSKPGNFSTIDWESCKCRTLAGNLVQEYEYLCSQDIGMGNQLMISDQSGDVKLPSTKSDLLKCDECDPSELIKENKSLDHHKFNIPGDNMSVYEASKDSGSMPEMQSSDTLEASAILPSNFEEVATGVLKVLNNMACLDITLLQCMLVGLLLLESLLLLGYFSLFHAGNQAVLRDPELMPILATALIALYAYEYSASILVGLNIFLHFFTDYNSIEEQRWAVAAASAAPGKGGLRASGGGGG

SEQ ID NO: 191949 - protein, 427 aa, Oryza sativa
  Clone ID: PAT_MRT4530_88220C.1.pep
CIRLLVHVRHEILQLLQPLANPRSPLPLSDAPRVRRAAALCPGPAGDGVWLELQEVIHAGHLQRRLLRQAKLGVDVAEAGDHVVAVVAGGGGGDAGLLAAARGREHDGVGVVPGAHGEVPGGEEGGGLRAVAGAIAGAVAAAAGDDALPDVGDEAAHLRYLRQVLPREAPLRAQPPVRHRAGVAAAAGVAAHPSRRGHAIAVRVSHEAGEEAGGGAAVAEERDGGGGGVDVDLAGAAVRALERVPPDIGRRRCGRRRRRPAAGLAGGEPRRLRGEVPPHHLLLLRRRRRRKLMLMLMMMQLIDNPNPAAPDHRVGDRRQQRPRRRAVPRQPPRRRHRRRRHPPVRRRHPVHLRRRGGGGGGAGSGRPGKGRVTWTGRLPRCVCTCVGVAMCLHNPRRILTARMVSTRRDTDTPGGDLCRVTETTYYY

SEQ ID NO: 191950 - protein, 74 aa, Oryza sativa
  Clone ID: PAT_MRT4530_88221C.1.pep
LCFFFFFFFFFFFFFFFFFFFFFFIRPTKIFKKGFFTSAGGLPRGGKIINPSYKWGRGRGKHLSQTKKLSASNI

SEQ ID NO: 191951 - protein, 52 aa, Oryza sativa
  Clone ID: PAT_MRT4530_88222C.1.pep
PRTWFIPPPTAPSRSSPACSSRSAPSTSSSPTVSSVPCPRPSVLHLLLVNPY

SEQ ID NO: 191952 - protein, 61 aa, Oryza sativa
  Clone ID: PAT_MRT4530_88223C.1.pep
PCRSPACKPSQMRFTFKFCLAFNIQTPWLHKFQNFVIILDIWGHPPTVYHPPKKKKKGVSH

SEQ ID NO: 191953 - protein, 71 aa, Oryza sativa
  Clone ID: PAT_MRT4530_88224C.1.pep
PDLYLPMANNNHSVIGSIHTAHSVITRTGNRHRSASLAHRATSWPMSCSYVTRKRSLHQGSHHYSPTFSII

SEQ ID NO: 191954 - protein, 47 aa, Oryza sativa
  Clone ID: PAT_MRT4530_88225C.1.pep
ASLGTYAIPDVQLVASFLAALLFFFFFLLFHSTFNYSDMNTKGVFQH

SEQ ID NO: 191955 - protein, 75 aa, Oryza sativa
  Clone ID: PAT_MRT4530_88226C.1.pep
ILDEHIFSSKSTFMASTVHIYVFVNYIICISQQTAVLIGHYNLLHLFYSPSTISVCLVPYSSSYFLVPKFCTRNV

SEQ ID NO: 191956 - protein, 145 aa, Oryza sativa
  unsure (1)..(145): unsure at all Xaa locations
  Clone ID: PAT_MRT4530_88227C.1.pep
PIKIXRTDIYLISSKPGPSQQVSRSAGQQQFRXAGGCTGFHLAGKVSRQQASKQGKPHAGRLPLDAASAFWSAGAGQLPPQAATGWFCAEPWQISTLLXSRRRTCAAPQRRAPPVVGELVEREPGGPGYDGSPGDLGQTGTATNG

SEQ ID NO: 191957 - protein, 53 aa, Oryza sativa
  Clone ID: PAT_MRT4530_88228C.1.pep
PRSKRFPVHVHGHTCRWKPESFLARFCRQSWLSQLKSIISASCMEYLSGSFCS

SEQ ID NO: 191958 - protein, 379 aa, Oryza sativa
  Clone ID: PAT_MRT4530_88229C.1.pep
MGVLRSTQSMEAEVEEMRAALALAPLGRHGAWRSGAAAKREAGAEEGAAPEARTVCVTGGISFVGLAVVDRLLRHGYAVRLALETQEDLDKLREMEMFGENGRDGVWTVMANVMDPESLNQAFNGCVGVFHTSSLIDPGGISGYTKHMAILEARAAEQVVEACVRTESVRKCVFTSSLLACVWRQSYPHHRRRFPAIIDESCWSDESFCRDNKLWFALGKTMAEKAAWRAARGRDLKLVTICPALVTGPGFRRRNSTPSIAYLKGAHAMLAEGLLATADVERVAEAHVRVYEAMSGGGAAGGRYICYDHVVRRGEEFAELQRQLGLPITGVAAASRPGYSDDGDVGGDGRFALCNGKLARLVSSRRRCTYDVYYPASYD

SEQ ID NO: 191959 - protein, 290 aa, Oryza sativa
  unsure (1)..(290): unsure at all Xaa locations
  Clone ID: PAT_MRT4530_8822C.1.pep
IRKPHRPSQDPSKLHHAHPCLDASARGKLHYKPSRCPRWLMVGPTRQRVKGGGSWWTRSTAAQAXGTPRGRPRGGHDGTAGRGGKGMAXGGATWDTGAGRRQSHVDGPDHPKGDRAATASGSGXNSPADRPGSDGEQPRGRRRRPPARRHAREAAEGGXEGDGELTERTRHGGGAGXDRRRGEATTLPRGGTERREAAAGGGTGGGGSASRWDGVSGVEEGREMDAGVKRGAAMPMVVTAQCGDGESGGXRRPELAGEWRRLGFAWGERGRVRGVRKNWGNGRGSHGVFI

SEQ ID NO: 191960 - protein, 96 aa, Oryza sativa
  Clone ID: PAT_MRT4530_88230C.1.pep
LLESRLGLLPVAKFDVGSVKRALRGIAVIWRLTSTIPSLGCLPSWSRLYSAESYLALRWTIGLSLRTPAAGSAGFASKLLAEQVLSQAVLAICNLC

SEQ ID NO: 191961 - protein, 94 aa, Oryza sativa
  Clone ID: PAT_MRT4530_88231C.1.pep
TLWILLSGLSFFFCLHWFLRTFVLYKLQGTRLITGLNYRNQDPSAQDDVIVWIFEWPGNNNLKVPPLEPYNSRYPRGPYVGILKFGLMAQLFKF

SEQ ID NO: 191962 - protein, 107 aa, Oryza sativa
  unsure (1)..(107): unsure at all Xaa locations
  Clone ID: PAT_MRT4530_88232C.1.pep
TPPHRSQARPSSAHIPSGRPGPIGXSXRXVPAHGLRLPXQARPTSCRAGPIVPCRPNVPAERPKHGPVVGPGQHGPDSXRAVLCLGRAKTPCRGPGRRASGLLAIYT

SEQ ID NO: 191963 - protein, 100 aa, Oryza sativa
  Clone ID: PAT_MRT4530_88233C.1.pep
GWWEIKPQLNMKPGRTNLLSATASSSGTEGIGGGSLHYPLSPNEATFLRHHALDITGVDGQMREDTAVVGGGAEELQADLGLAAGRVGGRVGGRVGGRVG

SEQ ID NO: 191964 - protein, 59 aa, Oryza sativa
  Clone ID: PAT_MRT4530_88234C.1.pep
HKQKLIPFRRKKDLEHDVSLKVYRSRDGLIWDNCLLLYWAIRNNKNALEDCLPLVGIKA

SEQ ID NO: 191965 - protein, 355 aa, Oryza sativa
  Clone ID: PAT_MRT4530_88235C.1.pep
MPPHHGGLMAPRPDMVAAAVAASGGGGGGGGPTGGTAVRPGSMTERARLAKIPQPEPGLKCPRCESTNTKFCYFNNYSLSQPRHFCKTCRRYWTRGGALRNVPVGGGCRRNKRTKSSKSSSSTSAAGSASATGGTSSSTSSTATGGSSSAAAAAAMMPPQAQLPFLASLHHPLGGGDHYSSGASRLGFPGLSSLDPVDYQLGGGAAAAAAIGLEQWRLPQIQQFPFLSRNDAMPPPMSGIYPFDAEAAADAAGFAGQLLAGTKVPGSSGLITQLASVKMEDSNAQSAAMNSSPREFLGLPGNLQFWGGGNGAGPGGNGDGATGGSGAGVAPGGGGSGGGWADLSGFNSSSSGNIL

SEQ ID NO: 191966 - protein, 333 aa, Oryza sativa
  Clone ID: PAT_MRT4530_88236C.1.pep
MGAVAAVRAAVLVVAVALAAAAAGASAQLCDKYYDGTCPDVHRIVRRVLKRARQDDPRIFASLTRLHFHDCFVQGCDASILLDNSTSIVSEKFATPNNNSARGYPVVDDIKAALEEACPGVVSCADILAIAAKISVELSGGPRWRVPLGRRDGTTANLTGADNNLPSPRDNLTTLQQKFAAVGLDVTDLVALSGAHTFGRVQCQFVTDRLYNFSGTGKPDPTLDAGYRRALAKSCPRRGGNSSALNDLDPTTPDAFDKNYFANIEVNRGFLQSDQELLSTPGAPTAAIVNSFAISQKAFFKSFARSMVNMGNIQPLTGSQGEVRKSCRFVNGS

SEQ ID NO: 191967 - protein, 64 aa, Oryza sativa
  Clone ID: PAT_MRT4530_88237C.1.pep
MEELKRRNKKSRREGGTKYGPSIQADRMANKNRVPGSTSAPPYTTAPRMRTSVITDSRGRQCGS

SEQ ID NO: 191968 - protein, 108 aa, Oryza sativa
  Clone ID: PAT_MRT4530_88238C.1.pep
MSTAEAAVWRGHGSSNITRQILKCTRWQLEETTDFITCPYHYYCDSAYPGDYSPAVGALVAAFAAYCLVSAAAFAVLDIGRAGGGGGRNRRKYMVPSGPFLLPVVLLA

SEQ ID NO: 191969 - protein, 153 aa, Oryza sativa
  Clone ID: PAT_MRT4530_88239C.1.pep
MSRKEMVVAAAAAGVVTMKSIHLPSDGAKSPKMPTKKRPWECCNDVEEASSPSGLLICSDVYWGADPGPFCTPRPWEDCCDNAICNRSLPPICQCGDEVDRAPPRARIASRWSRRRRRRRSLLDTSALSLDLLGQVLDRVAPCRRGGWSCMVG

SEQ ID NO: 191970 - protein, 38 aa, Oryza sativa
  Clone ID: PAT_MRT4530_8823C.1.pep
VIVVQFYVLHANYKAFYFLKKKKRKWPAHDILTQWQYA

SEQ ID NO: 191971 - protein, 107 aa, Oryza sativa
  unsure (1)..(107): unsure at all Xaa locations
  Clone ID: PAT_MRT4530_88240C.1.pep
RREKKEEKMRRREREKGERKSRGKREKGGKDXERKKKERKEEIEGKCKEENKEIRAENRRRDKKKKEEENKSKYRRKDERKRMKIRHKEEEEVGEREPDIMNREPQD

SEQ ID NO: 191972 - protein, 153 aa, Oryza sativa
  Clone ID: PAT_MRT4530_88241C.1.pep
MNKEQQGKSIFTMGGWDLTSYNTLSDPASKKPSVAQVNCKCKFSQCVVQFMETPRVDVEYSLLQQLPLIDTAFLCRKGIDLKKTSRDEHDLRKVTPVYTTIRCTGHEAVLLLLVLRFGSSLSESLARFARTKVCSDSSECDDDDDDSGDEYVL

SEQ ID NO: 191973 - protein, 1075 aa, Oryza sativa
  Clone ID: PAT_MRT4530_88242C.1.pep
MPDGHGGHDPLRPRPSRQFSHQPTKPHRDRDSDVSATGQSRKIEGTFPSPSRGGRTVAQEGARGYCCFRSKLQVPVRFCFPTTSRWSRCPLRSAGSSITIIGTPGGLLGSFKIELTGATVPGEPDPPIVLHYNVRLLGDKLTEDPVIVQNTWTIADDWGSEDRCPSPGSDAKDIAKVDELEKCGSMVGNDQKQAWATKLKSNVSSIQPAWKKNTEPKKYFPFRQGYLAIAILRVGAHGIHMTVDGKHVTSFAFREDLEPGFVGEAPPVPMDKPLDLFIGIFSTANNFKRRMAVRRTWMQYDAVRSGKAAVRFFVGLEWPEESYPPWAHGPGYIVSQDIAKEVYRKHKRGELKMFKLEDVAMGIWINEMKKDGLDKYGDNAGIDGVSSPMTLRRYYKEQGNVMPGEDFLELDLRAARGGGGGGRTAAEAAEDERDNGGCARRRLTAAHAHLSRLYLGYNPFLKAFIQDFPKLIKTDLSVPTEEKVFPEAASFLNGSKQIDASDLPSDDSADNDYDPTLAQGHKVDEEKSSGEDGGEGLDSDDSSSEDSESSEKEKSKTSQNGRTVDDLGLPSEDSEDGDFDPAGPDSDKEQNDESNSDQSDESDFTSDSDDFCAEIAKSCGQDEISGPSSSQIRTVDRTDGSGFDASSSSLPTGGGARRRRLRPMRAGREGAAPCDLRRGVVVVVVADPAAVRARRKTEAGTQTEGGRRWSSPACGGRAAASRARRKEEAGARGVPPDPPLAHHHGLSSTTVAPLPRHRAHRRRHDSSAPPPPQLGVAAPTDRRRPAPHQTAAALHLHSGRRRGCTSRRCRRLLSSPPPPPQIVAAAPSDRRRLGPPQSAAAAALHHNEWAPAGQRLMVKHHLIQVTMKSGMEIVHPKKKLKAHFKEDPYPSRATKENLAQELGLTFNQVTKWFSSTRHYARVAATKKENNIENHTAENNNNTNTVDSIQLRGSNDIVSVDRNDMVSEERTGQSNLNEGTPLRSDTSCGQSVAVTPMVHPENQGNDSSSNVRTPNAKSAEKLIPGLENSDEARRKAVQRELRKMKTGRISDKMTLGSTSCSTPVTGMGSVDCNSLA

SEQ ID NO: 191974 - protein, 273 aa, Oryza sativa
  Clone ID: PAT_MRT4530_88243C.1.pep
MFLLKEWKNSSMRHAAKAPPAPAVEVEGGGGSGGLMGRGAAPICGGGDAELWGRWRRAVVAATVSSMTRKRSNGGGAQAVAVCKRWIRRLLSVRAADPAAAAPLSHELVSFGAAPSPLHARQPPPFSARVMPPPALRTPASSSAFLPPSACWLLSSSARAPPPGQQQRRRRRHGEDHREPLPPSPRASASIFYCARRHQSATTTTPLWRRAQGAALSPQRAPASVFLCGHVGDGYRRRIHVRERSVNFDGDFSPIRRRCRRDVDTPVFLAATA

SEQ ID NO: 191975 - protein, 87 aa, Oryza sativa
  Clone ID: PAT_MRT4530_88244C.1.pep
SVYTMRILTLTSIQRMMVNKHNETNQEPTHLKIKEIFQKKKLYIKIRGSDFWLDYLLRENNRTVCSLSIIWGKDHHILRMDISKAKM

SEQ ID NO: 191976 - protein, 140 aa, Oryza sativa
  Clone ID: PAT_MRT4530_88245C.1.pep
MGKEEVDNIIDVLKKNIDIFAWGPDEVGAGCELMSFLDANSGYHQIHMDPADISKTTFITPFGTFCHLRMPFGLRNAGATFASRKWFALLQDPPRRGKIHLDTRMPSSVRRAKAISAKPARSDQPNTRKRTATISGSFAS

SEQ ID NO: 191977 - protein, 133 aa, Oryza sativa
  unsure (1)..(133): unsure at all Xaa locations
  Clone ID: PAT_MRT4530_88246C.1.pep
LVRLFSNSSIFAATLPPRGWGGRELTGRVAQSEEQXAEGRRSRRSGMGGGAGGAKGGGAAQEASGWRWLAGAEVEAVAAGGRGGGRQWPADMDASGDTVLPSLRGVDSDGARPGRGIDLDEGGNLVWVLAVAG

SEQ ID NO: 191978 - protein, 237 aa, Oryza sativa
  Clone ID: PAT_MRT4530_88247C.1.pep
MLFATASSSPSLPTGGGARGRRLRPTRAGREGAAPCDLRRGVVIVVTDPVAARARRKTEAGTQTEEGRRWSSPACGGRAAASLARRKEEAGARGVVTAQRRSSPARGRGAAAAGSAAPPPPLLLLLIIELTVTATTAQRHRPHSSASLPPQIGAASRPIRPPPPPSTSTAGAGGAIYHAAAAASSARRRRPLKSAPTRTPSKHRRRRPPPQRVDAGGAVLDAAAAAPSARRHRRPIS

SEQ ID NO: 191979 - protein, 171 aa, Oryza sativa
  Clone ID: PAT_MRT4530_88248C.1.pep
MGGGAGGAKGGGAAQEAGASGRRREWPAKVATGASSLLSLPSPSMARSGWRWLAGAEVEAVAAGGRGGGRQWPADMDASGDTVLPICLSFSTLLLASPSPSSSRRWPTATTTQSLRGVDSDGARPGRGIDLDEGGNLVWVLAVAGWHEERGTPNLALFSLFSRWMFGWHIC

SEQ ID NO: 191980 - protein, 767 aa, Oryza sativa
  unsure (1)..(767): unsure at all Xaa locations
  Clone ID: PAT_MRT4530_88249C.1.pep
ALSTNVKSSAVRNSYKQIVKRGRKGSEISPSKTYPLRSTHSNVMMLRGASKRNXSXPNVPTNENTGIQRVAXKGVQANXLTPSPCRALRXTWKSKNXTHNKLRNDGAGVQPAEKKRKVGRPPKGGTPKDDYLMIRKRVRYVLNRMNYEQSLIQAYASEGWKGQSLEKIRPEKELERAKVEILRCKSRIREAFRNLDSLLSEGKLDESMFDSAGEISSEDIFCAACGSKDVTLKNDIILCDGICDRGFHQYCLNPPLLAEDIPQGDEGWLCPACDCKIDCIDVLNELQGVKLSIHDSWEKVFPEAASFLNGSKQIDASDLPSDDSADNDYDPTLAQGHKVDEEKSSGEDGGEGLDSDDSSSEDSESSEKEKSKTSQNGRTVDDLGLPSEDSEDGDFDPAGPDSDKEQNDESNSDQSDESDFTSDSDDFCAEIAKSCGQDEISGPSSSQIRTVDRTDGSGFDGEPNAENSNLAFMETELEQDMVLPISSKRQVERLDYKKLYNEAYGKASSDSSDDEEWYGNSTPEKGNLEDSETDSLAESPQGGKGFSRRAPVRYHNNEHTPQNVRPGGSVSDQQTEVLCSNSNGSTAKNRHFGPAINQKLKAHFKEDPYPSRATKENLAQELGLTFNQVTKWFSSTRHYARVAATKKENNIENHTAENNNNTNTVDSIQLRGSNDIVSVDRNDMVSEERTGQSNLNEGTPLRSDTSCGQSVAVTPMVHPENQGNDSSSNVRTPNAKSAEKLIPGLENSDEARRKAVQRELRKMKTGR

SEQ ID NO: 191981 - protein, 57 aa, Oryza sativa
  Clone ID: PAT_MRT4530_8824C.1.pep
SRHLTIQNTGQFRTQTAIQDLTEHDENINNEINSTHVPSFLQLSHMCLVQNKKAGVN

SEQ ID NO: 191982 - protein, 64 aa, Oryza sativa
  Clone ID: PAT_MRT4530_88250C.1.pep
GGSPGSASSMMLATFEQTVNTQSATTSPASSSSGAPTKPGPTQLPRYLSRTRGTNRVRWRTRER

SEQ ID NO: 191983 - protein, 272 aa, Oryza sativa
  unsure (1)..(272): unsure at all Xaa locations
  Clone ID: PAT_MRT4530_88251C.1.pep
GGSGGGVKHCPAGAHSLWWRAVATALXGGPSRRRFEGAAAXCTAPPAPAVEVEGSGGGGGLMGRGAAPICGGSDAELWGRWRRAVMAATVSSMTRRRSNGGGAQAVAVCKRWIRRLLGVRAADPAAAASLSRELVSFGAAPSPLHARQPPPFSACVMPPPALRTPVSSSAFLPLSAGRLLSSSXRAPPPGRQRRRRRHGEDHRGHXPPLPPSPCTSASIFFPARHRRSATTTTTTLWRRAQGTALSPQRAPASVFLRGHKRNRVRPELRTRK

SEQ ID NO: 191984 - protein, 110 aa, Oryza sativa
  Clone ID: PAT_MRT4530_88252C.1.pep
QRRSLTRSSPSQSRVAASSSIETERQWRARLRLGLEVVGSEVTTLGGQVRLAFLVSCGSRDAAAAIASVRHALQSVLGKVSSGFDFAPSASLLGSKRRKVSTFESSSCSS

SEQ ID NO: 191985 - protein, 303 aa, Oryza sativa
  unsure (1)..(303): unsure at all Xaa locations
  Clone ID: PAT_MRT4530_88253C.1.pep
YKKKSLSPAAAAAAHPRRKTEAGARWGXRERRPVLFATASSSSLPTGGGARRRRLRPTRAGREGAAPCDLRRGVVVVVVADPAAVRARRKTEAGTQTEGGRRWSSPACGGRAAASRARRKEEAGARGVVTXXPQXSPLAGERRPPPPDLRLVHSAAAGSPACTPPRPELHHRCSSSSSSSSPSPPRQLGATAPTARRRRPHRSAPPRAPSDRRRRPPPPQRAPAGLYITPLPXLLSSPPPPPQIVAAAPSDRRRLGPPQSAAAAALHHNEWAPAGQCLTPPPPPPQLAATAAPLASRRRCTHE

SEQ ID NO: 191986 - protein, 383 aa, Oryza sativa
  Clone ID: PAT_MRT4530_88254C.1.pep
MSSPSSAASPPPPPPAEQRRPDPVRFGIMGCASIARKLARAMLLAPGAAVAAVGSRSEAKARAFAEETGLLLRHAPRLHGSYEALLADPGVDAVYLPLPTSLHVRWATAAAAAGKHVLLEKPTALCAADLDAILAACDAAGVQFMDATMWMHHPRTAKMRELVADEATTGDVRVARKINSLFSFRANEEFLQNDIRVKPDLDALGTLGDAGWYSIRAILWAVDYELPKTVIALRNPVRNQAGVLLACGATLYWADGKIATFNCSFLTNLTMDMTIVGTNGTLHVTDFVIPYEEKYAAFNMASKSKFAELHIGWDPLPSKHVVSTDLPQEALMVQEFSRLVQNIRDAGGKPEGKWPAITRKTQVVMDAVKTSIDNRFGPVDISS

SEQ ID NO: 191987 - protein, 1403 aa, Oryza sativa
  Clone ID: PAT_MRT4530_88255C.1.pep
MAPPIAGNGRANRLSLLAGASSGRAVASSSIAAASPSPACPPFPAETPGAAFPPSPFPFIRVGRLQPPLSPCLSAGRRRHHLPRLRDAALIPGISSSSPEFRRNTVARAGFSFLLGGISSGCPFRHAHASAGAAVPSLGTPRHHHLRHRSGKVALGLASPPSKPLRGPSSSSPIVLVVDVPSVTRLVVSRRRLRRRHRSGVVHAVVGCPHRLLAGPAPVIVFVLASASSSLVPAASRRRPRIAAEVVPSPSVSAAPLSSFRRFPKRGSWSSPKTVEPVEADDWLKDVDRKLNLVQCTPVEKTLYASHQLRGPAADWWENYCNAHPEPTNIAWDEFATAFRAAHVPESTIDMKKEEFNRLKQGNSSVNEYLSQFNKLARYAPEEVDTDKKKIRKFLKRIAVGMRLQLLAHDFPTFQHMINKALLLEDARKEATEEYKKRKSNHQGNSSRGTPRPRYGQPMQYHQSVTQANRQPGYAPRPQMNRPTPPPQQCAPSGNTAPNSVTSFNSPQGPSVVQCFRCNQMGHYARQCPQNPTNTNLGHANGSIAKTPTPAAAQSRPSSQASGQGSRASNHFGRGRVNHIQAETAQDAPDVVMEELTSMPPDREIEFAIELAPGTAPIAKRPYRMAANELAEVKRQIEELESKGYVRPSSSPWGAPVLLVKKKDGSERMVIDYRALNEVTIKNKYPLPRIDDLFDQLKGARVFSKIDLRSGYHQLKIRSEDIPKTAFSTRYGLYEFTVMSFGLTNAPAFFMNLMNKIFMEYLDQFVVVFIDDILIYSKNEEEHAEHLRLIMEKLRDHQLFAKFSKWEFWLDRVAFLGHVISSNGVEVDPSKVEAVLAWNPPKNVSEIRSFLGLAGYYRRFIEGFSKLARPMTELLKKEKKFHWSTACEDSFQEMKKRLTTAPVLTLPDIRKDFEIFCDASRQGLGCVLMQERKVVAYASRQLRPHEVNYPTHDLELATVEKKDTNFSIDDQGTVWCGPRICVPAKKELRDLILKEAHESAYSIHPGSTKMYQDIKAYFWWVGMKRDVTEYVALCDICQRVKAEHQRPAGDVGPEGDVFALLLVPPRGSSRTRLGPEGRGAPTPRGFSLRVYGLDSHDSASRLLPAKVEIGSLESHLGSPAEPAKGGLRGLPVRSPTLRHLPIPEWKWEEIGMDFITGLPRTPNGFWKQLHEALGTDLNFSTAYHPQTDGQTERASIQMSPNEAMFGRKCRTPLCWNEVGEALVFGPDILKSAEEQVKLIRERLKTAQNRHKNYTDNRRRDLEFEKGDHVYLRVSPLRGMRRFGMSGKLAPRYIGPYLITARRGEVAYQLELPEGLADVHNVFHVSQLKKCLRVPEEQVPLGNIELEKNLTYKERPIKVLEEAERQTRRKTIKFYKVQWSNHSEDEATWEREDLLRAEFPDLLP

SEQ ID NO: 191988 - protein, 168 aa, Oryza sativa
  Clone ID: PAT_MRT4530_88256C.1.pep
MEEAAPRCHVALPRGSQINRGTVGESIRHIRRCGSDLRPSQRFKPSPPTHQPSIAEVRRAIGLDNDDPSVSSRRGERQFVFRQPKDDGFYLFRCRLILLHYVNNQRVGEGGGRGLSYYGCQAMGPVEWPKFDMFPIERPQLDMFQSNTPRLIAWPIDPLSFDRPYFGG

SEQ ID NO: 191989 - protein, 1081 aa, Oryza sativa
  Clone ID: PAT_MRT4530_88257C.1.pep
MQRWNSLTALTALPVTILEKNASLPHLIPSSPSRLKDVDRKLNLVQCTPVEKTLYASHQLRGPATDWWENYCNAHPEPTNIAWDEFATAFRAAHVPESTIDMKKEEFNRLKQGNNSVNEYLSQFNKLARYAPEEVDTDKKKIKKFLKGIAVGMRLQLLAHDFPTFQHMINKALLLEDARKEATEEYKKRKSNHQGNSSRGAPRPRYGQPMQYHQSVTQANRQPGYAPRPQMNRPAPQPQQCAPSGNTAPNSVTSFKSPQGPSAVQCFRCNQMGHYARQCPQNPTNTNSGHANGSTARTPTPAAAQSRPSSQASGQGSRASNNFGRGRVNHIQAETAQDAPDVVMEELTSMPPDREIEFAIELAPSTAPIAKRPYRMAANELAEVKRQIEELESKGYVRPSSSPWGAPVLLVKKKDGSERMVIDYRALNEVTIKNKYPLPRIDDLFDQLKGARVFSKIDLRSGYHQLKIRTEDIPKTAFSTRYGLYEFTVMSFGLTNAPAFFMNLMNKIFMEYLDQFVVVFIDDILIYSKNEEEHVEHLRLIMEKLRDHQLFAKFSKCEFWLDRVAFLGLVISFNGVEVDPSKVEAVLAWNPPKNVSEIRSFLGLTGYYRRFIEGFSKLARPMTELLKKEKKFHWSAACEDSFQEMKKRLTTAPVLTLPDIRKDFEIFCDASRQGLGCVLMQERKVVAYASRQLRPHEVNYPTHDLELAAVVHALKIWRHYLIGNRCEVYTDHKSFKYIFTQTELNMRQRRWLELIKDYDLGIHTTPSGVPASLTVQPTLESQIREAQKDDEGIKELTKRIQEKKDTDLSIDDQGTVWCGPRICVPAKKELRDLILKEAHESAYSIHPGSTKMYQDIKAYFWWAGMKRDVAEYVALCDICQRVKAEHQRPAGLLQPLPIPEWKWEEIGMDFITGLPRTPSGYDSIWNRQKNYADNRRRDLEFEKGDHVYLRVSPLRGMRRFGMSGKLAPRYIGPYLITARRGEVAYQLELPEGLADVHNVFHVSQLKKCLRVPEEQVLLGNIELEKNLTYKERPIKVLEEAERQTRRKTTKFYKVQWSNHSEDEATWEREDLLRAEFPELLP

SEQ ID NO: 191990 - protein, 119 aa, Oryza sativa
  Clone ID: PAT_MRT4530_88258C.1.pep
KDPTAGAQGAANKGQYLAEWFNRMAQGKEHPEGPLRMTGTGSGRHNFRPFRYKHLGQFAPLGGEQAAAELPGDWVSMGHSTQWLWYSVYASKQVSWRTRMLVVSDWTRRFIFGRDSSRI

SEQ ID NO: 191991 - protein, 1510 aa, Oryza sativa
  unsure (1)..(1510): unsure at all Xaa locations
  Clone ID: PAT_MRT4530_88259C.1.pep
MAVNASFSSHGFGEGHHVAQLRDLARFLGFSCPEYTGYSVDRVPPRCELCVPLPSWRPTLQIAYQDLSWTALRRLAHDYSHRLGGSAFWQLPRLPSGHADARWCAYSQARRSSVTCPHPLYQMASRPRRAAHASACFGFEEGRVEPEANHESANEQSHHSNRSHRTASRNAEVEQPRRSNRSHHTASRIAEMEQSHQSHRAASHNSGEERIPSPPHVENNMQHLMAVQTQILQGLAAAIAGFQHNAHGNGHPHMSNNRSKLTDFLRSRPPEFSQTVEPVEADDWLKDVDRKLNLVQCTPVEKTLYASHQLRGPAADWWENYCNAHPELTNIAWDEFAMAFRAAHVPESTIDMKKEEFNRLKQGNNSINEYLSQFNKLARYAPKEVDTDNKKIRKFLKGIAVGMRLQLLAHDFPTFQHMINKALLLEDARKESAEEYKKRKSNHQGNSSRGAPRPRYGHANGSTARTPTPAAALSRPNSQARGQGSRASNNFGRGRMNHIQAETAQDVPDVVMGMFSVNSVPAIVLFDSGASHSFISQAFVKRNGWKTQNLHVPMIVHSPGRNIRATQICPEVNLRIEEVDFLAKPIVLDSQSLDIILGMDWLAKHKGQIDCAERSITLQGPGGKQVRFTSNTPTTSRSILTCLQVTSLESVPIVCEYPDVFPEELTSMPPDQEIEFAIELAPSTAPIAKRPYRMAANELAEVKRQIEELESKGYVRPSSSPWGAPLLLVKKKDGSERMVIDYRALNEVTIKNKYPLPRIDDLFDQLKGARVFSKVDLRSGYHQLKIRSEDIPKTAFSTRYGLYEFTVMSFGLTNALAFFMNLMNKIFMEYLDQFVVVFIDDILIYSKNEEEHAEHLRLIMGKLRDHQLFAKFSKCEFWLDRVAFLGHVISSNGVKVDPSKVEAVLAWNPPKNVSEIRSFLGLAGYYQRFIEGFSKLARPMTELLKKEKKFEWSAACEDGFQEMKKRLTTAPVLTLPDIRKDFEIFCDASRQGLGCVLMQERKVVAYASRQLRPHEVNYPTHDLELAAVVHALKIRRHYLIGNRCEVYTITKVLTQIWPDQDRLCRELEKLRLTVVQSGVPTSLTVQPTLESQIREAQKDDEGIKELIKRIQEKKDTDFSIDDQGTIWCGPRICVPAKKELRDLILKEAHESAYSIHPGSMKMYQDIKAYFWWAGMKRDIAEYVALCDICQRVKAEHQRPAGLLQPLSIPECKWEEIXMDFITGLPRTPSXAHFVPVKTTFDGKKLAELYMTHVVCRFGCPKKIVLDRGTQFTSRFWKQLHEALGTDLNFSTAYHPQTDGQTERVNQILEDMLRACAMDFEGTWDHCLPYAEFSYNNSYQASIQMSPNEAMFGRKCRTPLCWNEVGEALVFGPDILKAAEEQVKLIRERLKTAQNRQKNYADNRRRDLEFEKGDHVYLRVSPLRDVHNVFHVSQLKKCLRVPEEQVPLGNIELERNLTYKERPIKVLEEAGRQTRRKTIKFYKVQWSNHSEDEATWEREDLLRAEFPELLP

SEQ ID NO: 191992 - protein, 850 aa, Oryza sativa
  unsure (1)..(850): unsure at all Xaa locations
  Clone ID: PAT_MRT4530_8825C.1.pep
MKPVERAKLVRSLRQESRRLRLLVLVIGFFLVTLTFVVISKPDALLFNRTPCRRRFFIIFFFFFFLDPWIDGNTKRLTRFFEFAVNGRLSVDHAPRSLLIRQRIHADSRRSADTFPAAEDPKVVDEDEGAEDATAKGTSEEEKRLLSSEPEQGKNEEAATASEVLGGGGEEDNKNGEEEGHTQHSKVTLPTVSNYTIRDAEDTDNGKQEDGKPNEKYEFEMDADKGDNVEPETDNEEWNKKPLCDFSNFRANVCEMRGNIRIHPNASSVMYMEPASSKREEIWKVKPYPRKGDELCLGHITEITVKSSKVAPECSKYHNVPAVVFALTGYTGNLFHDFTDVLVPLFTTASEFNGEVQFLITDMAIWWTRKYKVVFDKLSKYPLIDFNNDDQVHCFKHAIVGLHAYMEFTIDSSKAPHNYSMVDFNRFMRRTYSLPRDFVTALGEIPKAKPRLLIISRQRTRMFLNLNEIVAMAEEIGYEVVVEEANVSSDLSHFGKVVNSVDVMMGVHGAGLTNCVFLPQNATLIQIVPWGGLDWISKXDFGNPAEQMGLRYKQYSIGVHESSLTDQYPLDHEIFTNPLSFHKHGFEFIRQTFMDKQNVKLDCNRFKPVLLENEMYGQAHVEGVLVLGVMKGSISRMFRASSQGLVYHAAANLCPTLRAQRSAGCSGRWSEPHLIAFRYLKILGRVNKGLLRQPRGRGARTGSTGVGPTRQPHGPRWTGRTRLAPVGAVGPTRQPHPRARAADGRAPRGSHSARTRAATPARSAGGGAPVPRWSPPATTGAAERRPREGREGGKEATLVFTLPSSFFLSVVAPLDFAKTDYPVPGPALHGVQDFHRSLHVGQVFANFNLL

SEQ ID NO: 191993 - protein, 1763 aa, Oryza sativa
  Clone ID: PAT_MRT4530_88260C.1.pep
MAVNASFSSHGFGEGHHVAQLRDLARFLGFSCPEYTGYSVDRVPPRCELSVYLYPRGGIHGAGLRPHHFTVARPTLQIAYQDLSCRDREKYIFPKASVLIPVPGKAGTEPQTKPYPLDMWKYGSALQQRPELNPYIGRGATSHNWHAPKPHRKTGFRGFERGREGGTMNRVPTSWDFVYPRVNKVDGDDEKAAGAEEGGGAARVDGDGGAPTIDERNGGVDEVGEDAAKPKEAAPRWEVVQGDDVGGPELGGDGGERERRRELDSAEEEGRREAETDGGGRDISWTTLRRLAHDYSHRLGGSAFRQLPRLPSGQADARYPCPYSESQPVLTRMVELSEAQATQHDLLLEAYHSLARRYAALEARLAEEGVTSVDTVSWDSGRLCHASHLSSHSSRGSARTPSGPRSPSSRAPYSPVYSPYPHPVSPSYTPGHTPVASSRRGPRFIRTARKRVVGSSTVFRFDYPAPPPPAARAAAGPRQMASRPRRAAHAPARFGFEEGRVVTEANHESANEQSHHSNSSHRTASRNAEVEQPRRSNRSHHTASHNAEVEQSHRSHRTASHNSGEERLPSPPHVENNMQYLMAVQTQILQGLAAAIAGFQHSAHGNGHPHMGNNRSKLTDFLRSRPPEFSQTVEPVEADDWLKDIDRKLNLVQCTPVEKTLYASHQLRGPAADWWENYCNAHPEPTNIAWDEFATAFRAAHVPESTIDMKKEEFNKLKQGNNSVNEYLSLFNKLARYAPEEVDTDKKKIRKFLKGIAVGMRLQLLAHDFLTFQHMINKALLLEDARKEATEEYKKRKSPLGPSAVQCFRCNQMGHYARQCPQNPTNTNSGHANGSTARTPTPAAAQSRPSSQASGQGSRPSNNFGRGRVNHIQAETAQDAPDVVMEELTSMPPDREIEFAIELAPGTAPIAKRPYRMAANELAEVKRQIEELESKGYVRPSSSPWGAPVLLVKKKDGSERMVIDYRALNEVTIKNKYPLPRIDDLFDQLKGARVFSKIDLRSGYHQLKIRSEDIPKTAFSTRMFVVVFIDDILIYSKNEEEHAEHLRLIMEKLRDHQLFAKFSKCEFWLNRVAFLGHVISSNGVEVYPSKVEAVLAWNPPKNVSEIRSFLGLAGYYRRFIEGFSKLARPMTELLKKEKKFQWSAACEDSFQEMKKRLTTAPVLTLPDIRKDFKIFCDASRQSLGCVLMQKRRVVAYASRQLRPHEVNYPTHDLELAAVVHALKIWRHYLIGNRCEVYTDHKSLKYIFTQTELNMRQRRWLELIKDYDLGIHYHPGKANVVADALSRKTYCNVAQIRPNQDRLCKELEKLRLTVVQSGVPASLTVQPTLESQIREAQKDDEGIKELIKKIREKKDTDFSIDDQGTVWCGPRICVPAKKDLRDLILKEAHESAYSIHPGSTKMYQDIKAYFWWAGMKRDVAEYVALCDICQRVKAEHQRPAGLLQPLPIPEWKWEEIGMDFITGLPRTPSGYDSIWVIVDRLTKSAHFVPVKTTFDGKKLAELYMTHVVCRFGCPKKIVSDRGTQFTSRFWKQLHEALGTDLNFSTAYHPQTDGQTERVNQILEDMLRACALDFEGTWDRCLPYAEFSYNNSYQASIQMSPNEAMFGRKCRTPLCWNEVGEALVFGPDILKAAEEQVKLIRERLKTAQNSQKNYADNRRRDLEFEKGDHVYLRVSPLRDVHNVFHVSQLKKCLRVPEEQVPLGNIELEKNLTYKERPIKVLEEAERQTRRKTVKFYKVKWSNHSEDEATWEREDLLRAEFPELLP

SEQ ID NO: 191994 - protein, 1681 aa, Oryza sativa
  Clone ID: PAT_MRT4530_88261C.1.pep
MGGMGDMWIHRGGVWEDPWASWHSMVWDLTCCWSGTPLVGIWPTLQIAYQDLSWTALRRLAHDYSHRLGGSAFRQLPRLPSGHSDARYPCPYSESQPVLTRMVELSEAQATQHDLLLEAYRSLARRYAALEARLAEEGVTSVDTISWDSGRPCHASHLSSHSSRGSARTPSGPRSPSSRAPYSPVYSPYPHPVSPSYTPGHTPVASSRRGPRFIRTARKRVVGSSTVFHFHYPAPLPPAARAAAGPRQMASRPRRAARAPARFGFEDGRAEPEVNHEQSPHSNRSHRTASRNAEVEQPRRSNRSHRTASCDAEMEQSHRSHHTASHNSGEERLPSPPHVENNMQHLMAVQTQILQGLAAAVAGFQHNAHGNGHPHMSNNRSKLTDFLRSRPPEFSQTVEPVEADDWLKDVDRKFNLVQCTPVEKTLYASHQLRGPAADWWENYCNAHPEPTNIAWDEFATAFRAAHVPESTIDMKKEEFNRLKQGNSNVNEYLSQFNKLARYAPEEVDTDKKKIRKFLKGIAVGMRLQLLAHDFPTFQHMINKALLLEDARKEATEEYKKRKSNHQGNSSRGAPRPRYGQPMQYHQSVTQANRQPGYAPRPQMNRPAPQPQQRAPSGNTAPNSVTSFKSPQGPSAVQCFRCNQMGHYARQCPQNPTNTSSGHANGSTARTPTPAAAQSRPSSQASGQGSHASNNFGRGRVNHIQAETAQDAPDVVMGMFSVNSIPAIVLFDSGASHSFISQAFVKRNGWKTQNLRVPMIVHSPGRDIRATQICPEVNLRIEEVDFLAKPIVLDSQSLDIILGMDWLAKHKGQIDCAEKSITLQGPGGKQVRFTSNSPTASRSILTCLQVTSLESVPIVCEYPDVFPEELTSMPPDREIEFAIELAPGTAPIAKRPYRMAANELAEVKRQIEELESKGYVRPSSSPWGAPVLLVKKKDGSERMFVVVFIDDILIYSKNEEEHAEHLRLIMEKLRDHQLFAKFLKCEFWLDRVAFLGHVISSNGVEVDPSKVEAVLAWNPPKNVSEIRSFLGLAGYYRRFIEGFSKLARPMTELLKKEKKFQWSAACEDSFQEMKKRLTTAPVLTLPDIRKDFEIFCDASRQGLECVLMQERKVVAYASRQLRPHEVNYPTHDLELAAVVHALKIWRHYLIGNRCEVYTDHKSLKYIFTQTELNMRQRRWLELIKDYDLGIHYHPCKANVVADALSRKAYCNVARIRPDQDRLCRELEKLRLTVVQSGVPASLTVQPTLESQIREAQKNDEGIKELIKRIQEKKDTNFSIDDQGTVWCGPRICVPAKKELRDLILKEAHESAYSIHPGSTKMYQDIKAYFWWAGMKRDVAEYVALCDICQRVKAEHQRPAGLLQPLPIPEWKWEEIGMDFITGLPRTPSGYDSIWVIVDQLTKPAHFVPVKTTYDGKKLAELYMTHVVCRFGCPKKIVSDRGTQFTSRFWKQLHEALGTDLNFSTAYHPQTDGQTERMSPNEAMFGRKCRTPLCWNEVGEALVFGPDILKAAEEQVKLIREHLKTAQNRQKNYADNRRRDLKFEKGDHVYLRVSPLRGMRRFGMSGKLAPRYIGPYLITARRGEVAYQLELPEGLADVHNVFHVSQLKKCLRVPEEQVPLGNIELEKNLTYKERPIKVLEEAERQTRRKTIKFYKVQWSNHSEDEATWEREDLLHAEFPELLP

SEQ ID NO: 191995 - protein, 112 aa, Oryza sativa
  Clone ID: PAT_MRT4530_88262C.1.pep
HALLCTQFVGARNLTNEKLTNCEGSITRTCFNTYMELKVGKERIAPVLQSIPIVCIPVCTICHLDVLVSDLFLSYKKNQLAIPEGFKNTWETSPINQKKKKKKKKKKKKLAS

SEQ ID NO: 191996 - protein, 1347 aa, Oryza sativa
  Clone ID: PAT_MRT4530_88263C.1.pep
MASRPCRAARAPAHFGFEEGRVEPEANHESANEQSHRSNNSHRTVSRNAEVEQPRRSNRSHRTASRDSEMEQSHRSHRTASHNSGEERLPSPPHVENNMQHLMAVQTQILQGIAAAVAGYQHNVHGNGHPHMGNNRSKLTDFLRSRPPEFSQTVEPVEADDWLKDVERKFNLVQCTPVEKTLYASHQLRGPAADWWENYCNGHPEPTNIAWDEFATAFRAAHVPESTIDMKKEEFNRLKQGNTSVNEYLSQFNKLARYAPEEVDTDKKKIRKFLKGIAVGMRLQLLAHDFPTFQHMINKALLLEDARKEATEEYKKHKSNHQGNSSRGAPRPRYGQPVQYHQSVTQANRQPGYAPRPQINRPAPQPQQRAPSGNTAPNSVTSFKSPQGPSAVQCFRCNQMGHYARQCPQNPTNTNSGHANGSTARTPTPAAAKSRPSTQASGQGSRASNHFGRGRVNHIQAETAQDAPDVVMGMFSVNSVPAIVLFDSGASHSFISQAFVKRNGWKTQNLRVPMIVHSPGRNIKATQICPEVNLRIEEVDFLAKPIVLDSQSLDIILGMDWLAKHKGQIDCAEKSITLQGPGGKQVRFTPNTPTASRSILTCLQVTSLESVPIVCEYPDVFPEELTRMPLDREIEFAIELAPGTAPIAKRPYRMAANELAEVKRQIEELESKGYVRPSSSPWGAPVLLVKKKEGSERMVIDYRALNEVTIKNKYPLPRIDDLFDQLKGARVFSKIDLRSGYHQLKIRSEDIPKTAFSTRYGLYEFTVMSFGLTNAPAFFMNLMNKIFMEYLDQFVVVFIDDILIYSKNEEEHAEHLRLIMENLRDHQLFAKFSKCEFWLDRVAFLGHVISSNGVEVDPSKVEAVLAWNPPKNVSEIRSFLGLAGYYRRFIEGFSKLARPMTELLKKEKKFQWSAACEDSFQEMKKRLTTAPVLTLPDIRKDFEIFCDASRQGLGCVLMQERKVVAYASRQLRPHEVNYPTHDLELAAVVHALKIWRHYLIGNRCEVYTDHKSLKYIFTQTELNMRQRRWLELIKDYDLGIHYHPGKANVVADALSRKAYCNVAQIRPDQDHLCRELQKLMLTVVQSGVPASLTVQPTLESQIREAQKDDEGIKELIKRIQEKKDTNFSIDNQGTVWCGPRICVPAKKELRDLILKEAHESAYSIHPGSTKMYQDIKAYFWWAGMKRDVAEYVALCDICQRVKAEHQRPAGLLQPLPIPEWKPVRRFGMSGKLAPRYIGPYLITARRGEVAYQLELPEGLADVHNVFHVSQLKKCLRVPEEQVPLGNIVLEKNLTYKERPIKVLEEAERQTRRKTIKFYKVQWSNHSEDEATWEREDLLRAEFPELLP

SEQ ID NO: 191997 - protein, 70 aa, Oryza sativa
  Clone ID: PAT_MRT4530_88264C.1.pep
KRKKDLPKLILQIKNIPHCDKCFPNKEDQWFRFLQGSQASNHHRQPGFGKSVDVLGTVLNVLKMGFMPRG

SEQ ID NO: 191998 - protein, 137 aa, Oryza sativa
  unsure (1)..(137): unsure at all Xaa locations
  Clone ID: PAT_MRT4530_88265C.1.pep
SRPRRAARAPARFGFEDGRAEPEANHEQSHHSNRSHRTASRNAEVEQPRRSNRSHRTASCDVEMEQSHRSHRTASHNSGEERLPSPPHVENNMQHLMAVXTQILQGLAAAVAGFQHXLRSRPPEFSQTVEPVEADDW

SEQ ID NO: 191999 - protein, 1164 aa, Oryza sativa
  Clone ID: PAT_MRT4530_88266C.1.pep
MAVNASFSSHGFGEGHHVAQLRDLSRFLGFSCPEYTGYSVDRVPPHCKLSVYLYPRGGIHGAGLRPHHFTVARPTLQIAYQDLSWTALRRLAHDYSHRLGGSAFRQLPRLPSGHSDARYPCPYSESQPVLTRMVELSEAQATQHDLLLEAYRSLARRYAALEARLAEEGVTSVDTISWDSGRLCHASHLSSHSSRGSARTPSGPRSPSSRAPYSPVYSPYPHPVSPSYTPGHTPVASSRRGPRFIRTARKRVVGSSTVFRFRHPAPPPPAARAAAGPRQMASRPRRTARAPARFGFEDGRVEAEANHEPANEHSHHSNRSHRTVPRNAEVEQPRRSSRSHRTVSRDAELEQSHRSHRTASHNSGEERLPSPPHVENNMQHIMAVQTQILQGLTTAIASFQHNAHGNGHPHVGNNRSKLTDFLRSRPPEFSQTVEPVEADDWLKDVDRKLNLVQCTPVEKTLYASHQLRGPAADWWENYRNAHPEPTNIAWDEFATAFRAAHVPESTIDMKKEEFNRLKQGNNSVNEYLSQFNKLARYAPEEVDFLAKPIVLDSQSLDIILGMDWLAKHKGQIDCAEKSITLQGPGGKQVRFTPNTPTASRSILTCLQVTSLESVPIVCEYPDVFPEELTRMPPDREIEFTIELAPSTAPIAKRPYRMAANELAEVKRQIEELGSKGYVRPSSSLWGAPVLLVKKKDGSERMVIDYRALNEVTIKNKYPLPRIDDLFDQLKGARVFSKIDLRSGYHQLKIRSEDIPKTAFSTRYGLYEFTVMSFGLTNAPAFFMNLMNKIFMEYLDQFVVVFIDDILIYSKNEEEHAEHLRLIMEKLRDHQLFAKFSKCEFWLDRVAFLGHVISSNGVEVDPSKVEAVLAWNPPKNVSEIRSFLGLAGYYRRFIEGFSKLARPMTELLKKEKKFQWSVACEDSFQEMKKRLTTAPVLTLPDIRKDFEIFCDASRQGLGCVLMQERKVVAYASRQLRPHEVNYPTHDLELAAVVHALKIWRHYLIGNRCEVYTDHKSLKYIFTQTELNMRQRRWLELIKDYDLGIHYHPGKANVVADALSRKAYCNVAQIRPDQDHLCRELEKLRLTVVQSGVPASLTVQPTLESQIREAQKDDEGVKELIKRIQLLLEKSSNKINCKNNSLSLKPALNTYFPWLAEYSRTHPCSI

SEQ ID NO: 192000 - protein, 231 aa, Oryza sativa
  Clone ID: PAT_MRT4530_88267C.1.pep
MWIRRGGVGEDPWASWHTWRSPDVADPHGLGDPVAEEDEVDPADEEFFQEQMAVNASFSSHGFGEGHHVAQLRDLSRFLGFSCPEYTGYSVDRVPLTIAYQDLFWTALRRLAHDYSHRLGGSAFRQLPRLPSGHSDARYPCPYSESQPVLTRMVELSEAQATQHDLLLEAYRSLARSYAALEARLAEEGVTSVDTISWDSGRFCHASHLSSHSSRGSARTPSGPRSPSSRA

SEQ ID NO: 192001 - protein, 949 aa, Oryza sativa
  Clone ID: PAT_MRT4530_88268C.1.pep
MGNNRSKLTDFLRSRPPEFSQTVELVEADDWLKDVDRKLNLVQCTPVEKTLYASHQLRGPAADWWENYCNAHPEPTNIAWDEFATAFRVAHVPESTIDMKKEEFNRLKQGNSSVNEYLSMFNKLARYAPEEVDSDKKKIRKFLKGIAVGMRLQLLAHDFPTFQHMINKALLLEDAKKEATEEYKKRKSNHQGNSSRGAPRPRYGQPMQYHQSVTQANRQPGYAPRPQMNRPAPQPQQRAPSGNTAPNSVTSFKSPQGPSAVQCFRCNQMGHYARQCPQNPTNTNSGHANGSTARTPTPAAAQSRPSTQASGQGSRASNHFGRGRVNHIQAETAQDAPDVVMGARVFSKIDLRSGYHQLKIRSEDIPKTAFSTRYGLYEFTVMSFGLTNAPAFFMNLMNKIFMEYLDQFVVVFIDDILIYSKNEEEHAEHLRLIMEKLRDHQLFAKFSKCEFWLDRVAFLGHVISSNGVEVNPSKVEAVLAWNPPKNVSEIRSFLGLAGYYRRFIEGFSKLARPMTELLKKEKKFQWSAACEDSFQEMKKRLTTAPVLTLPDIRKDFEIFCDASRQGLGCVLMQERKVVAYASRQLRPHEANYPTHDLELAAVVHALKIWRHYLIGNRCEVYTDHKSLKYIFTQTELNMRQRRWLELIKDYDLGIHYHPGKANVVADALSRKAYRNVAQIRPDQDHLCRELEKLRLTVEKKDTNFSIDNQGTVWCGPRICVPAKKELRDLILKEAHESAYSIHPGSTKMYQDIKAYFWWAGMKRDVAEYVALCDVCQRVKAEHQRPAGLLQPLPIPEWKWEEIGMDFITGLPRTPNGYDSIWDRQKSYADNRRRDLEFEKGDHVYLRVSPLHGMRRFGMSGKLAPRYIGPYLITARRGEVAYQLELPEGLAYVHNVFHVSQLKKCLRVPEEQVPLGNIVLEKNLTYKERPIKVLEEAERQTRRKTIKFYK

SEQ ID NO: 192002 - protein, 149 aa, Oryza sativa
  Clone ID: PAT_MRT4530_88269C.1.pep
ARGRERTSLEFGFFFFFFQLNEKSCIDDQSIELTRAIMMHNTQIKRRIFPQTRSPRTSKGSESLTIESRTDGQDRWSEAAADAHEQNNQMQPESERAYVPGAARTRREGTNNQAKSAVGRAVDRRGGAQRQYPASTASDAPAGGETLGV

SEQ ID NO: 192003 - protein, 106 aa, Oryza sativa
  unsure (1)..(106): unsure at all Xaa locations
  Clone ID: PAT_MRT4530_8826C.1.pep
TWRGERVGRRLRLSCHQCAAPQPSLTASNATRASIRRDQTVTGLSPVTSDWTGGDTPTFHPVPGGVGVEGMTRVSPVSAGGXRWAPLEDGRLLSFQAKARIVIRSK

SEQ ID NO: 192004 - protein, 43 aa, Oryza sativa
  unsure (1)..(43): unsure at all Xaa locations
  Clone ID: PAT_MRT4530_88270C.1.pep
RFRLPETPKVAQVKAGLENGVLPVPGPKAEVKKPXVKALEISG

SEQ ID NO: 192005 - protein, 214 aa, Oryza sativa
  unsure (1)..(214): unsure at all Xaa locations
  Clone ID: PAT_MRT4530_88271C.1.pep
PLVPGTAPIHKRSYXMGANXLAEVNKPVDEQLQKGYIRPSTXPWGASDIFAGKKDKTNRMCVDYRALNGGTIMNKFPLPRIDYPVDQVKRATVFSKIDLRSGYHPLKFRDEDISKTAFITRYGLFECTVMFFGLTNAPASFMNLMNNVFMEFLDKFVGDFIDDILIYSKFXEEHXQHLSLVLXKLKEHQLYAKLSXCDFWLKENQFFGHIVNAY

SEQ ID NO: 192006 - protein, 777 aa, Oryza sativa
  Clone ID: PAT_MRT4530_88272C.1.pep
MAMVTARQFLASAAELGSGRRRCGGGGACDMREDGGVEALMQCQRVSDLLIAASFLSIPLELFYFATCADLSEVKCAVLHFCAFIVLCGATHLLAAFTHAHPHSAPLLRALTAAKVLAAVASSAAAVSLLTFIPKLLRIKVRESLLRDKASRLHRDLGLVRRREEATSRAVRELTGRIRASPPDAHAILRTTALQLADALGLHACAVWMPAAGRPHDLVLVHHLTSRPDDAADLLLEVGDACTVAADDPDVVDVMASKVAKVLGPDSALAMASSVGAAPAGAVAAIRIPILRVSIYDGGGTPEVTEASYAILVLLLPPHDAAGGWSSHDLEIVQVVADQAAVALSHAAVLEESRSMRDRFAEQHRALMQAKHRAAMATRAFSSIQSAMCHAMRRPVHSVVGLVSMLQHPEADTMRPEQRLAVDAIARTSNLLSALMDEVTVNRQHLSVQRKPFSLHALIKEAISVAGCLSHCGGAGFLHQPECALPEWVVGDERRVFHLLLDMVGTLLNRCNTGSGACRLSFSVRICNVGEERYSLDWIPMRPTFSGCNVCVKFKVGIGRSRSCAIERSLPCELPRRSAATTSSQMGHIFSGYFNKIVQMMNGNMWSASDSEGVGESVTLILQFKLQQGHVEASPPYIPHLNGLRVLLADDDAMNRGVTKKILERLGCQVMSAPSGAHCLSLLASAEASFQLVVLDLDDRAVPSAAMDRFEVALRIRELRNSCWLLIVIAVAAGVVATDDGGAVQELCQRAGINGLVQKPVTLPALGAQLCRVLQDN

SEQ ID NO: 192007 - protein, 80 aa, Oryza sativa
  Clone ID: PAT_MRT4530_88273C.1.pep
MAEEKKHHDLFHHKKDGEEESFREIIYDQEKKHHMHLELLCSLDPISFSTDALHEKQQAKKDTENSHGHTVKEEVAAAAH

SEQ ID NO: 192008 - protein, 120 aa, Oryza sativa
  unsure (1)..(120): unsure at all Xaa locations
  Clone ID: PAT_MRT4530_88274C.1.pep
PPRPRPPQTXPTPRPTPPQPPGGPPTKAQGPPSPTTPPRPKEAGRPRPRRQPRRRIRQGRRPGGXQQRRRQRGYRTPRPPALPPAALQPKGTRANIPSTGPPRPGSRPGARPKARKKTPP

SEQ ID NO: 192009 - protein, 124 aa, Oryza sativa
  Clone ID: PAT_MRT4530_88275C.1.pep
LQVPSLPREWFCGRIRRDGRGPQYTPPGASVAGVVVVVAPLFRRLGVVVAPGVLRLGAVGVSFCVVSSSSSRSPPAFVFPGRGSSWFCFRRCPGFFSSSSVFFFWVWPRLIVVFLVGSRKKKLM

SEQ ID NO: 192010 - protein, 147 aa, Oryza sativa
  Clone ID: PAT_MRT4530_88276C.1.pep
LHDIDRSHINVACSRYIAASIHAALFFTHIYIQYTRNSHRHAYTSHTALHILYRYLYIYSGTYVGHSMVVQIDHIDRSIVAVIVGLSDGENRESDSGAAIPVGCIQVSVFPLQLCEFFLKIRVLLLLLFLVPGQVLNLPLQRLDRVV

SEQ ID NO: 192011 - protein, 76 aa, Oryza sativa
  unsure (1)..(76): unsure at all Xaa locations
  Clone ID: PAT_MRT4530_88277C.1.pep
MSCCGGNCGCGSSCQCXGTGCGGCKYSEVEPTTTTTFLADATNMGSGAASGGSEMAAEIRSXGCFTLKCGTSCLLL

SEQ ID NO: 192012 - protein, 76 aa, Oryza sativa
  Clone ID: PAT_MRT4530_88278C.1.pep
RAWLLWRVGRSSERVGVDGGYGGGRGLVTLGVPRLHTVAPRPPPAPFVLGAVAAPADQVVALLLCRRTTVRAPVCL

SEQ ID NO: 192013 - protein, 586 aa, Oryza sativa
  Clone ID: PAT_MRT4530_88279C.1.pep
MAAATPANSGEGGGLDVLRTVQRSCIPSKNLNKVLQRYQEKDLVLNWEKCHFMVYEGIVLGHRVFIKDFSTITRPLTNLLAKDAPFEFDDACLKSFEILKKALVSAPIIQPPDWTLPFEIMCDASDFDVGVVLGQIKDKKLQITDTQEQLINDFLRNDMLMTICDSNPCHPSPAVRTSSEPGVATIRSAVTSSSPASSPFRPEDAGSASSSATSGATAIVHRQIERHRNVPLPPLASQPPPLPRPNLYFSWRQPEIRPHWCAMVTSTSSLSSGSPPSSPERRRLHLIVFIVGRASSLPEDPRNVAPSPRLPPVVVLVKMKSRPSSSSSSPQRQTRRVRLFIKPEDRQSRPLFVDPFVSVALLRSSSPRQVDYVSKWVEAMPSSAADAKHAKKMFTEIIFPRFGTPRMVISDRGSHFIDKTFRDLLQDMGAKHNVATPYHPQTSGQAETSNKQIKNILQKTVNKMGTGWKDKLLDALWAYRTAYKTPIGLSSYQIVCGKSCRLPVELEHRAYWAIRNWNMDFEGAREWRKMQIAELEEWSEKAYHNTKIYKERTKCCYDKRIKIKKFKPGDKVLMFNSRFVVMRFRR

SEQ ID NO: 192014 - protein, 510 aa, Oryza sativa
  unsure (1)..(510): unsure at all Xaa locations
  Clone ID: PAT_MRT4530_8827C.1.pep
MGWKATMGGVKVAGGGGGVEKVRCPSVAAVARSRMRPWVLRATTTVLLWTCVMQLTAVGERWGPRVLKGWPSCRTAQEAASAALAATRLPMPVPVVEKAPLPPKRIYRNNGYLMVSCNGGLIQMRAAVCDMVVIARYXNVTLIVPELDKTSFWNDPSEFQDIFDVEHFITSLRDEVRILRELPPRVKRRVELGMFHSMPPISWSDISYYRNKILPLIRKHKVLHLNRTDARLANNGLPLDVQKLRCRVNFGSLKFTSDIEELGRRVIRLLRQNGPFLVLHLRYEMDMLAFSGCTEGCTREEADELTRMRYAYPWWKEKVINSYAKRKDGLCPLTPEEIALVLRALDIDRSMQIYIAAGEIYGGKRRMAALTSAYPNVVRKETLLQPSDLMFFQNHSSQMAALDYLVSLESDIFVPTYDGNMAKVVEGHRRFMGFKKTILLDRKLIVELVDQYNSGSMLWDEFSSLIKSVHANRMGAASKRTVIHDKPKEEDYFYANPQECLRDPNLLRTS

SEQ ID NO: 192015 - protein, 56 aa, Oryza sativa
  Clone ID: PAT_MRT4530_88280C.1.pep
MRSRTGCALWRGRQQPTQLSCLHLRQLEQDVLQHPWVHMRHGSEPYHHFLRGIPRP

SEQ ID NO: 192016 - protein, 560 aa, Oryza sativa
  Clone ID: PAT_MRT4530_88281C.1.pep
MTQTLGTERLNPKRTENLIGKQRRAEGGRRFVMESSHASSSSASVCNAGIVALRASQPTLANVGDPTTNVVAAARVEVDLTQETTEDANVPPAKKAKKCSSEVWSHFDKYEKKVVGDDGTEIVELWAKCKKCSYTTRRESNRGTTIFWSHLDKKHQIKSGQQLLNLKKSESGTAVETYKYDEAVSLKKFYLAIIMHEYPFSIVEHEYFVDFIKSLHPTFPIKSRITVRKHILDMFLDEKKKMYEYFKTLACRFSTTMDMWTSNQNKGYMCITVHWIDDTWCMQKRIIKFMHVEGHHSGKNLCKEFYDSVLDWNLDRKLLALTLDNASANDWSEFMKCASECDGLDTTCGLSLDVPTRKFCQIKMAVEEWCRSSNTIIATMGKSMKPKYDKYWEKSNMALSEACLLDPRFKRTLLEYYADKVYGVVAPKHMADFMVVINKLFDTYASSQASSKSPAATNVQNNLLVSKDYDGESDDELDADVQQYLRASTAPGIGTKSELEVYLEQPLLEWWKCGWVYLTEKDMENLEQNFCAMLSLANGTEQETETVECSNEDGIAPMDV

SEQ ID NO: 192017 - protein, 737 aa, Oryza sativa
  Clone ID: PAT_MRT4530_88282C.1.pep
MDSSNASSSSASICNAGIVALRASQPTLANEGDPAANVAAVARVQVDLTQEATEDANVPPTKKAKKCSSEVWSHFDKYEKKVVGDDGTEIVELWAKCKKCSYTSRRESNRGTTIFWSHLDKKHQIKSGQQLLNLKKSESGTSVETYRYDEAVSLKKFYLAIIMHEYPFNIVEHEYFVDFIKSLRPTFPIKSRITVRKDILNMFLEEKKKMYEYFKTLSCRFCTTMDMWTSNQNKCYMCITVHWIDDNWCMQKRIIKFMHVEGHHSGNNLCKVFYDSVLDWNLDRKLLALTLDNASANDVCARGLVQKLNKIQPLICDGAFFHVRCFNHIFNLVAQDGLKQISSSISNIRNTVWIVKNSPLQWEEFMKCASECDGLDITCGLSLDVPTRWNSTFLMLKQAIHYRLAFNRLFLRHRHKYLKCAPTDDDWTMAKSLCTCLKRFYDATLIFSGSSYPTANLFFTKFCQIKMAVEDWCHSSNTVIATMGKSMKPKYDKYWEKSNMALSVACFLDPRFKRTLLEYYADKVYGESAPKHMADFMAIINKLFDTYASSQPTSKIPAATDVQNNPLVTKEYDGESDDELDADVLQYLRASTAPGIGTKSELEVYMDQPLLEWDIKDKSPFNILHWWSLKQHELPILSRLARDVLAIQVSTVASESAFSAGGRVIDPFRSCLDPEIVQALICTKDWTAASRKGGNVVGSILTEMDMENLERNFCALLSLTNETDHEAVEMLCCSGTT

SEQ ID NO: 192018 - protein, 84 aa, Oryza sativa
  Clone ID: PAT_MRT4530_88283C.1.pep
PLKRAPNKALVKKKNSWGPLGETSPHQGLGVKKSMSVVKKTFKFLEAPVEKIAGVEGPRPYGANLEGRAAPQVENIARAKKGGG

SEQ ID NO: 192019 - protein, 62 aa, Oryza sativa
  Clone ID: PAT_MRT4530_88284C.1.pep
IRRFRSPLLSSNYNAGGRLSHTAKAYLGCSTDRLLLTPLSSSLAGVWLIIPEFPLTKSPDQE

SEQ ID NO: 192020 - protein, 128 aa, Oryza sativa
  unsure (1)..(128): unsure at all Xaa locations
  Clone ID: PAT_MRT4530_88285C.1.pep
PNLNRLPRPTHNTAASAAGRGAPDRCETPRPPVAHRSASRSARWWRRSVRPRGLQPSVGLGEGLGRRHGPPPPRNHRRALGPNYHTRRAELQTTTLQPQLKSGRPRTCQHSPHSGADTPASAREFAXA

SEQ ID NO: 192021 - protein, 74 aa, Oryza sativa
  Clone ID: PAT_MRT4530_88286C.1.pep
TFPAEAVNLLPPPSSFPGGSPWKPSPPRPPGRGSPGPPGACGGSGPGSPTPPVPPGGGSSGRRSRPRGRPRRRR

SEQ ID NO: 192022 - protein, 1530 aa, Oryza sativa
  unsure (1)..(1530): unsure at all Xaa locations
  Clone ID: PAT_MRT4530_88287C.1.pep
APRRRHLGRDRVKQTPVRRFPPPPRARGPPRAVRLRVGLPHRVLREPRASVAVIFCLPVIPALFPGTGIDXQMAVNASFSSHGFGEGHHVAQLRDLARFLGFSCPEYTGYSVDRVPPHCELSVYLYPRGGIHGAGLRPHHFTVARPTLQIAHHLGGFAFRQLPRLPSGHSDARYPCPYSESQPVLTRMVELSEAQATQHDLLLEAYRSLARRYAXRLCHGSHLSSHSSRGSARTPSGPRSPSSRAPYSPVYSPYPHPVSPSYTPGHTPVASSRRGPRFIRTARKRVVGSSTVFRFHYPAPPPPAARAAVGPRQVPPVPSRQPIDISSTEEPTTGARFGFEDGRAEPEANHEQSHHSNRSHRTASRNAEVEQPRRSNRSHRTASCDVEMEQSHRSHRTASHNSGEERLPSPPHVENNMQHLMAVXTQILQGLAAAVAGFQHTAHGNGHRHMSNNRSKLTDFLRSRPPEFSQTVEPVEADDWLKDVDRKLNLVQCTPVEKTLYASHQLRGPAADWWENYCNAHPEPTNIAWDEFATSFRAAHVPESTIDMKKVEFNRLKQGNSSVNEYLSMFNNLARYAPEEVDTDKKKIRKFVKGIAALLLEDARKEATEEYKKRNSNHQGNSSRGAPRPHYGQPMQYHQSVTQANRQPGYAPRPQMNCPAPQPQQRAPSGNTAPNSVTSFKSPQGPSAVQCFRCNQMGHYARQCPQNPTNTSSGHANGSTARTPTPAAAQSRPSSQASGQGSRVSNNLGRGRVNHIQAETAQDAPDVVMGMFSVNSIPAIVLFDSGASHSFISQAFVKRNGWKTQNLRVPMIVHSPGRDIRATQICLEVNLRIEEVDFLAKPIVLDSQSLDIILGMDWLAKHKGQIDCAEKSITLQGPGGKQVRFTPNTPTASRSILTCLQVTSLESVPIVCEYPDVFPEELTSMPPDREIEFAIELAPGTAPIAKRPYRMAANELVEVKRQIEELESKGYVRPSSSPWGAPVLLVKKKDGSERMLKIRSEDIPKTAFSTRYGLYEFTEMSFGLTNAPAFFMNLMNKIFMEYLDQFVVVFIDDILIYSKNEEEHAEHLRLIMEKLRDHQLFAKFSKCEFWLDRVAFLGHVISSNGVEVDPSKVEAVLAWNPPKNVSEIRSFLGLVGYYRRFIEEFSKLARPMTELLKKEKKFQWSAACEDSFQEMKKRLTTAPVLTLPDIRKDFEIFCDASRQGLGCVLMQERKVVAYASRQLRPHEVNYPTHDLELAAVVHALKIWRHYLIGNRCEVYTDHKSLKYIFTQTELNMRQRRWLELIKDYDLGIHYHPGKANVVADALSRKAYCNVAQIRPDQDRLCRELEKLRLTVVQSGVPASLTVQPTLESQIREAQKDDEGIKELIKRIQEKKDTNFSIDDQGTVWCGPRICVPAKKELRDLILKEAHESAYSIHPGSTKMYQDIKAYFWWAGMKRDVAEYVALCDICQRVKAEHQRPAGLLQPLPIPEWKWEEIGMDFITGLPRTPSGYDSIWVIVDRLTKLAHFVPVKTTWEREDLLRAEFPELLP

SEQ ID NO: 192023 - protein, 1685 aa, Oryza sativa
  Clone ID: PAT_MRT4530_88288C.1.pep
MAVSASFSSHGFGEGHHVAQLRDLACFLGFSCPEYTGYSVDRVPPHCELSVYLYPRGGIHGAGLRPHHFTVARPTLQIAYQDLSWTALHRLAHDYNHRLGGSAFRQLPRLPSGHSDARYPCPYSESQLVLTRMVELSEAQATQHDLLLEAYRSLARRYAALEARLAEEGVTSVDTISWDSGRLCHASHLSSHSSRGSARTPSGPRSPSSRAPYSPVYSPYPHPVSPSYTPGHTPVASSRRGPRFIRTARKRVVGSSTMFRFRHPAPPPPAARAAAGPRQLTDFLRSRPPEFSQTVEPVEADDWLKDVDRKLNLVQCTPVEKTLYASHKLRGPAADWWENYCNAHPEPTNIAWDEFATAFRAAHVPESTIDMKKEEFNRLKQGNSSVNEYLSQFNKLAQHAPEEVDTDKKKIRKFLKGIAVGMRLQLLAHVFPTFQHMINKALLLEDARKEATEEYKKRKSNHQGNSSRGTPRPRYGQSMQYHQSVTQANRQPGYAPRPQMNRPAPQPQQRAPSGNTAPNSVTSFKSPQGPSAVQCFRCNQMGHYARQCPQNPTNTNSGHANGSTARTPTPAAALSRPSSQASGQSSRASNHFGRGRVNHIQAETAQDAPDVVMGMFSVNSVPAIVLFDSGASHSFISQAFVKRNGWKTQNLRVPMIVHSPGRNIRATQICPEVNLRIEEVDFLAKPIVLDSQSMDIILGMDWLAKHKGQIDCAEKSITLQGPGGKQVRFTPNTPTANRSILTSLQVTSLESVPVVCEYPDVFPEELTRMPPDREIEFAIELAPGTAPIAKRPYRMAANELAEVKRQIEELESKGYVRPSSSTWGAPVLLVKKKDGSERMVIDYRALNEVTIKNKYPLPRIDDLFDQLKGARVFSKIDLRSGYHQLKIRSADIPKTAFSTCYGLYEFTVMSFGLTNAPAFFMNLMNKIFMEYLDQFVVVFIDDILIYSKNGEEHAEHLRLIMEKLRDHQLFAKFSKCEFWLDRVAFLGHVISSNGVKVDPSKVEAVLAWNPPKNVSEIRSFLGLAGYYRRFIEGFSKLARPMTELLKKEKKFQWSAACEDSFQEMKKRLTTAPVLTLPDIRKDFEIFCDASRQGLGCVLMQERKVVAYASRQLRPHEVNYPTHDLELAAVVHALKIWRHYLIGNRCEVYTDHKSLKYIFTQTELNMRQRRWLELIKDYDLGIHYHPGKANVVADALSRKAYCNVAQIRPDQDHLCRELEKLRLTVVQSGVPASLTVHPTLESQIREAQKDDEGIKELIKRIQEKKDTNFSIDDQGTVWCGPRICVPAKKELRDLILKEAHESAYSIHPGSTKMYQDIKAYFWWAGMKRDVAEYWKWEEIGMDFITGLPRTPSGYDSIWVIVDRLTKSAHFVPVKTTYDGKKLAELYMTHVVCRFGCPKKIVSDRGTQFTSRFWKQLHEALGTDLNFSTAYHPQTDGQTERVNQILEDMLRACALDFEGTWDRCLPYAEFSYNNSYQASIQMSPNEAMFGRKCRTPLCWNEVGEALVFGPDILKSAEEQVKLIRERLKTAQNRQKNYADNRTRDLEFEKGDHVYLRVSPLRGMRRFGMSGKLAPRYIGPYLITARRGEVAYQLELPEGLADVHNVFHVSQLKKCLRVPEEQVPLGNIELEKNLTYKERPIKVLEEAERHTRRKTIKFYKVQWSNHSEDEATWEREDLLRAEFPELLP

SEQ ID NO: 192024 - protein, 427 aa, Oryza sativa
  Clone ID: PAT_MRT4530_88289C.1.pep
MGNICGGSGKAHVSGDCRPPSSGTMTPKTSSSVTTSNSTTGKLSSVGSSFMASSGSGGTSSGFDDGVYPEGQILEAPNLRTFTFIELRTATKNFRPDSVLGEGGFGRVYKGWVDEKTMNPVKGGTGMVVAVKKLNSESMQGYEEWQSEINFLGRLSHPNLVKLLGYCFEDKELLLVYEFMAKGSLENHLFKKGCPPLSWELRLKIAIGAARGLAFLHASEKQVIYRDFKASNILLDANYNAKLSDFGLAKLGPTGSNSHITTRVMGTYGYAAPEYVATGHLYVKSDVYGFGVVMLEMMSGQRALDPNRPNGQLSLVDWAKPYLADRRKLARLMDPRFEGQYNSKQAVQAAQLTLNCLAGEPRSRPSMKEVLETLERIESMKSRARDARGSGSSRDHSHGRTTAHQRSSPRPDGRRGSRTNGHATKAR

SEQ ID NO: 192025 - protein, 125 aa, Oryza sativa
  unsure (1)..(125): unsure at all Xaa locations
  Clone ID: PAT_MRT4530_8828C.1.pep
IWSTAHNRGHGYSNSFTLIRGVQLYPQHTAPRHVSVRXICHHDIPERGRDRTLHITPSNRSHHTLGFALVPNRQRAAPLSCRDESGSRSTGHPGRPNSIMPTLAWVRRLEESYTTSLAVAHAGLW

SEQ ID NO: 192026 - protein, 72 aa, Oryza sativa
  Clone ID: PAT_MRT4530_88290C.1.pep
YPPIWVKNCVLLLTNCNQLRQFLWCLLLVRVCQWLFLCHLAMAPPQRQHPPVMTWSRHLLPLMVCEPLAFQG

SEQ ID NO: 192027 - protein, 52 aa, Oryza sativa
  Clone ID: PAT_MRT4530_88291C.1.pep
LDQFVVVFIDDILIYSKNKEEHAEHLRRVAFLGHVISSNGVQVDPSKVEAVL

SEQ ID NO: 192028 - protein, 1145 aa, Oryza sativa
  unsure (1)..(1145): unsure at all Xaa locations
  Clone ID: PAT_MRT4530_88292C.1.pep
MVWDLTCCWSGTPLVGICCELGVCLQPIMTVILLYNKETSVAVMAVNASFSSHGFGEGHHVAQLRDLARFLGFSCPEYTGYSVDRVPPRCELSVYLYPCGGIHGAGLRPHHFTMARPTLQIAYQDLSWTALRRLAHDYSHRLGGSAFRQLPRLPSGRTDTRYPCPYNESQPVLTRMVELSKAQATQHDLLLEAYHSLARRYAALETRLAEDGVTSVDTTSWDFGRLCHASHLSSHSSRGSARTPSGPHSPGSRAPYSPVYSPYPHPVSPFYTPGHTLVASSCRGPRFIRTARKRVVGSSTVFRFDYPTPPPPAARAVAGPRQPQILQGLATAIAGFQHNAHGNGHPHMGNNRSKLTDFLRSRPLEFSQTVVPVEADDWLKDVERKLNLVQCTPFEKTLYASHQLRGPAADWWENYCNAHPDPTNIAWDEFATAFRATHXARKEATEEYKKRKSNHQGNSSRGAPRPRFGQPMQYHQSVTHANRQPSYAPRPQTNRLAPQPQQRAPSSNTAPNNXHYARQCPQDPANSNSGRSNGSTARTPTPAPAPSRPSSQASGQGSHVSNNFGRGRVNHIQAETAQDAPDVVMEELTGMPPDREIEFAIELALGTAPIAKRPYRMAVNELAEVKKQIEELESKGYVRPSSSPWGAPVLLVKKKDGSERXDIRKDFEIFCDASRQGLGXLMQDRKVVAYASRQLRPHEVNYPTHDLELAAVIHALKIWRHYLIGYKCEVYTDHKSLKYIFTQTELNMRQRRWLELIKDYDLGIHYHPGKANVVADALSRKTYCNAVKVWPDQDRLCRELEKLRLIVVQSAIPASLTVQPTLESQIREAQKDDKGIKELIERIHEKKYTGFSIDDQGTVWCGSRICVPAKKELKDIILKEAHESAYSIHLGSTKMYQDIKGYFWWAGMKRDVAEYVALYDICQRVKAEHQRPAGLLQPLPISECKWEEIGMDFITGLPRTPSGAGVRSCILKAAEEQVKLIRERLKTAQNRQKNYADNRRRDLEFEKGDHVYLRVSPLHGMKRFGMSGKLAPRYIGPYHITARRGEVAYQLELPEGLADVHNVFHVSQLKKCLRVPEEQVPLGNIELENNLTYKERPIKVLQEAKRQTRRKTIKFYKVQWSNHSKDKATWEREDHLRAEFPELLP

SEQ ID NO: 192029 - protein, 245 aa, Oryza sativa
  Clone ID: PAT_MRT4530_88293C.1.pep
MELNVAAVTADLFRHGHACGACYQLRCRDRRLCGEDGVKVVVADMAKQPEQEGEMNRTAGGSLQFRITEDAFAAMAKQGVSAHELTRQRTLEVDFRRIPCEYRESRRLAVRVEEASRNPTHLAIRFLYQGGQTDIAAVEIAQANATPPSSSYYSSWRYMTRRDGAPGVWTTSRAPVGPLRLRVVVTAGSGGKWLRSDGEVLPADWRPGEVYDTGLRVTDVAVRSCSLSCAIQDMDSDDGEEEELR

SEQ ID NO: 192030 - protein, 189 aa, Oryza sativa
  Clone ID: PAT_MRT4530_88294C.1.pep
MEVYTELAFAHTTSLWLGPPSRSHTRTSPGLRFVAWPTTTATVSEAPPSGSFHAFLLATQTPGRLCHASHLSSHSSRGSARTPSGPRSPSSRAPYSPVYSPYPHPVSPSYTPGHTPVASSRRGPRFIRTARKRVVGSSTVFRFHYPAPLPPAARAAVGPRQVPPVPSRQPIDVSSTEEPTTGGSLADEE

SEQ ID NO: 192031 - protein, 53 aa, Oryza sativa
  Clone ID: PAT_MRT4530_88295C.1.pep
MAINRRSAKYILQLEHDYPWDDDPKSISRLIFQQMILFTAAMEFEEFRGDVDF

SEQ ID NO: 192032 - protein, 926 aa, Oryza sativa
  Clone ID: PAT_MRT4530_88296C.1.pep
MGNNRSKLTDFLRSQPPEFSQTVEPVEADDWLKDVDRKLNIVQCTPVEKTLYASHQLRGPAADWWENYCNAHPEPTNIAWDEFATAFLAAHVPESTIDMKKEEFNRLKQGNNSVNEYLSQFNKLARYAPEEVDTDKKKIRKFLKGIAVGMRLQLLAHDFPTFQHMINKALLLEDARKEATEEYKKRKSNHQGNSSRGAPRPRYEHVEYLRLIMEKLRNHQLFAKFSKCEFWLDRVAFLRHVISSNGVEVDPSKVEAVLAWNPPKNVSEIRSFLGLAGYYRRFIEGFSKLARPMTELLKKEKKFQWCTAYEDSFQEMKKRLTTTPVLTLPDIRKDFEIFCDASRQGLGCVLMQERKVVAYASRQLRPHEVNYPTHDLELAAVSRCEVYTDHKSLKYIFTQTELNMRQRRWLELIKDYDLGIHYHPGKANVVADALSRKTYCNVAQIWPDQDRLCRELEKLRLTMPTLESQIREAQKDDEGIKELIKRIQEKKGTDFSIDDQGTVWCGPRICVPAKKELRDLILKEAHESAYSIHPGSTKMYQDIKAYFWWAGMKRDVAEYVALCDICQRVKAEHQRPAEIGMDFITGLPRTPSGYDSIWVIVDRLTKSTHFVPVKTTFDGKKLAELYMTHVVCRFGCPKKIVSDRGTQFTSRFWKQLHEALRTDLNFSTAYHQQTDGQTERVNQILEDMLRACALDFEGTWDRCLPYAEFSYNNSYQASIQMSPNEAMFGRKCCTPLCWNEVGEALVFGPDMLKAAEEQVKLIRERLKTAQNRQKIYADNRRRDLEFEKGDHVYLRVSSLHGMRRFGMSGKLAPRYIGPYLITARRGEVAYQLELPEGLADVHNVFHVSQLKKCLRIPEEQVPLGNIKLEKNLTYQERPIKVLEEAERQTRRKTIKFYKVQWSNHSEDEATWEREDLLRAEFPELLP

SEQ ID NO: 192033 - protein, 610 aa, Oryza sativa
  unsure (1)..(610): unsure at all Xaa locations
  Clone ID: PAT_MRT4530_88297C.1.pep
MAVNASFSSHGFGEGHHVAQLRDLARFLGFSCPEYTGYSVDRVPPRCELSVYLYPHGGIHGAGLRPHHFTVARPTLQITYQDLSWTALRRLAHDYSHRLGGSAFRQLPRLPSGHPDARYPCPYSESQPVLTRMVELSEAQATQHDLLLEAYRSLARRYATLEARLPEEGVTSVDTVSWDSGRLCHASHLSSHSSRGSARTPSGPRSPSSRAPYSPVYSPYPHPVSPSYTPGHTPVASSRRGPRFIRTARKRVVGSSTVFRFDYPAPPPLAAPRFGFEEGRVEPEANHESANEQRHHSNRSHRTASRNTEVEQPRRSNRLHHTASRNTEMEQSHRSHRTASHNSGEERLPSPPHVENNIQHLMAVQTQILQGLTAAIAGFQHNAHGNGHPHMGNNRSKLTDFLSSRPPEFSQTVEPVEADDWLKDVDRKLNLVQCTPVEKTLYASHQLRGPAADWWENYCNAHPEPTNIAWDEFATAFRAAHVPESTIDMKKEEFNRLKQGNNSVNEYLSLFNKLARXLLLEDARKEATKEYKKRKSNHQGNSSRGAPRPRYGRPMQYHQSVTQANRQPGYAHREERHRFLHRRSRHSLVRSTHLCTGQEGVKRSHPKGSS

SEQ ID NO: 192034 - protein, 345 aa, Oryza sativa
  Clone ID: PAT_MRT4530_88298C.1.pep
MGLGNVAILVGSGILGSVLVGGDAKLPSAGEVLSGAAKFVKKHGNEGKDTSSNTDAHTAQLLSQVNHLRQEIQSLGSRPVTVVTNAARSGPGTFTITVVAVAGAVGYAYIKWKGWKLSDLMFVTKRGLSDACNVVGSQLDKVSDDVTSARKHLAGRIDRVDISLDETQEIIEGTRDEVTVIHGDLSAFQEDLQSVNLVVRSLESKLVSLEYTQVPAASVPPAIGSSELVVRRVSSLPQSTALPVLPTTTPAAEPSPRAEAPQEEQWGFVSRTSSCREGSGRFQEQRSVVTRTSSIREGSPESSNGASSSTGASTGTNTSTGTNTSTGRFGGLRLPGLGFLASSTR

SEQ ID NO: 192035 - protein, 373 aa, Oryza sativa
  Clone ID: PAT_MRT4530_88299C.1.pep
MAVNASFSSHGFGEGHHVAQLRDLARFVGFSCPEYTGYSVDRVPPRCELSVYLYPRGGIHGAGLRPHHFTVARPTLQIAYQDLSWTALRRLAHDYSHRLGGSAFRQLPRLPSGHADARYPCPYSESQPVLTRMVELSEAQATQHDLLLEAYRSLARRYAALEARRLCHASHLSSHSSRGSARTPSGPRSPSSRAPYSPVYSPYPHPVSPSYTPGHTPVASSRRGPRFIRTARKRVVGSSTVFRFDYPAPPPPAARAAAGPRQMVSRPRRAARAPARFGFEDGRVEPEANHESANEQSHHSNRSHRTASRNAEVEQPRRSNRSHHTASQFSQTVEPVEADDWLKDVDRKLNLVQCTPVEKTLYASHQLRGPAAD

SEQ ID NO: 192036 - protein, 1721 aa, Oryza sativa
  unsure (1)..(1721): unsure at all Xaa locations
  Clone ID: PAT_MRT4530_8829C.1.pep
VISLTLLTIIEELCSRDGCSEWLGLCNRMPRYKPEYLFGVEGFVQELRTMSFVVGFGTAPFYAQIPHDRHEEKCRVKVTLNSNSEDIPSVMFEAGGRNYIHSCQEVARIAIGELRDRYSDQLADTEYRYHPRQPQGSDRGSYLETEGIENDATTTHLVEMLWAMDESRAETVLAAQDREDWNRGKICKLEDKVDRLEKELAALKGEAPPQKVRIRLTARKRALFVPRYQLAPKFPPVSLLVPCPCQMVNTRSNGNGPNPNNPNNNNNGENPTLAQVLAQQTQLMHMMMQQLQNQQNQGNNHAPPQNKLAEFLRVRPPIFSSTTNPVEASDWLHALEKKLDLLQCTDQEKVSFASHQLHGPASEWWDHFRLNRTTAEPITWLEFTAAFRKTHIPSGVVSLKKKEFRSLTQGSRSVTEYLHEFNRLARYAPEDVRNDEERQEKFLEGLNDELSYPLMTGDYSDFQKLVDKAIRQEDKYNRMEQKKRRIAQFKIQQGNNQKPRLILGHQSMPHGGSSSVVRPQRQFFNNNAGNNNRNQAPRLIAASTQQQPAKREQGSKLVVCFNCGDPGHYADKCPKPRRVKVVPAQSNSTAPVSKARVNHVAAAEAQDALDVILGTFPVNSVPATVLFDSGATHSFLSMSFAGNHGMEVEDLRRPLMVSTPSNQALSLQRSPSVRIEIKGVPFLANLILLESKDLDVILGMDWLARHKGVIDCANRKVTLTSNDGRVVTVHALSSESLRSRLNQITLEEIPIVREYPDVFPDDLPGMPPKRDIEFRIDLVPGTTPIHKRPYRMAANELAEVKRQVDDLLQKGYIRPSSSPWGAPVIFVEKKDHTQRMCVDYRALNDVTIKNKYPLPRIDDLFDQLKGATIFSKIDLRSGYHQLRIKEEDIPKTAFTTKYGLFECTVMSFGLTNAPAFFMNLMNKVFMEYLDKFVVVFIDDILIYSRTKEEHEEHLRLALEKLREHQLYAKFSKCEFWLFEVKFLGHVISAGGVAVDSSNVESVTNWKQPKTVSEIRSFLGLAGYYRRFIENFSKIAKPMTRLLQKDVKYKWSEECEQSFQELKNRLISAPILILPDPKKGFQVYCDASKLGLGCVLMQDGKVVTYASRQLRLHEKNYPTHDLELAAVVHALKIWRHYLFGTRPEVYTDHKSLKYIFTQPDLNMRQRRWLELIKDYDMGIHYHPGKANVVADALSRKGYCNATEGRXLPLELCKEFERLNLGIVSRGFVAALEAKPTLIDQVREAQINDPDIQEIKKNMRRGKAIGFLEDEHGTVWLGERICVPDNKDLKDAILKEAHDTLYSIHPGSTKMYQDLKERFWWASMKREIAEYVAVCDVCQRVKAEHQKPAGLLQPLKIPEWKWEEIGMDFITGLPRTSSGHDSIWVIVDRLTKVAHFIPVKTTYSGSRLAELYMARIVCLHGVPKKIVSDRGSQFTSNFWKKLQEEMGSKLNFSTAYHPQTDRQTERVNQILEDMLRACALDFGGSWDKNLPYAEFSYNNSYQASLQMAPYEALYGRKCRTPLLWDQTGERQVFGTDILREAEEKVKIIQERLRVAXSRHKSYADNRRRDLSFEEGDYVYIRVTPLRGVHRFHTKGKLAPRFVGPYKIVSRRGEVAYQLELPQSLAGVHDVFHVSQLKKCLRVPTEEAXLEQIEVQXDLTYVEKPIRILETNERRTRNRVIRFCKVQWSNHSEEESTWEREDELKSAHPYLFASSSESRGRDSV

SEQ ID NO: 192037 - protein, 250 aa, Oryza sativa
  Clone ID: PAT_MRT4530_882C.1.pep
TTQILKIRKKSMNKHQQSTRVIHYHHCSFFWCGRKNGTGWRHHRISQIRLSPTSTPMDPPAKPPRESRGEEGHLSHLQPAVAVSPSPWRSDAAKSDGPRPPRRWIRRLGRPSSPVEAVAGGGTSLEDRVAAAVASSRRALIRNGERREMEERSSRGAGDVAMPAAGSRRGGARLLQPARHRTASEQEEESPGSGATKHGPSGIGRRMPEPGGTGAGVEGGGSATVGEGWSRWWICAGDMKRDEESQGQRE

SEQ ID NO: 192038 - protein, 244 aa, Oryza sativa
  Clone ID: PAT_MRT4530_88300C.1.pep
MPPPPPPSLARLHQRLSLSLLRGRSPPAAADAFLRRGLASSASSSSSAAAAAAVAAAAAGREKSSRRTLAYLLGVAAAMVGASYAAVPLYRRFCQATGYGGTVQRRESVEEKISRHARDGTTTSREIIVQFNADVADGMPWKFIPTQREVKVKPGESALAFYTAENRSSAPITGVSTYNVAPMKAAIYFNKIQCFCFEEQTLLPGEQIDMPVFFYIDPEFETDPKMEGVNNIVLSYTFFKVNDS

SEQ ID NO: 192039 - protein, 99 aa, Oryza sativa
  unsure (1)..(99): unsure at all Xaa locations
  Clone ID: PAT_MRT4530_88301C.1.pep
NPIRPPAILLTSNCHQMCXIRAPFLAREYLSSHLFNRSSLISKXHFCRLQSQKQCVASPIMGLWACNFIWTXPRWGSHVGCAATWWSMTLWTPWSSSHL

SEQ ID NO: 192040 - protein, 325 aa, Oryza sativa
  Clone ID: PAT_MRT4530_88302C.1.pep
MAMEGPILCRAVMQAKLPVTMISNSLTKSGQLGTAFLGSVCKYRNITRLISPIYQPAQKNFAPVCGSFSSSSDGNGYMAGNFSESDEDYVNSTVLEAVEVRSGAEGYVIKMRDGKNLRCVHNNSQGRNIPESAPQPAIVLRIEDGSETLLPIIVLEMPSVLLMAAIRNVHIARPTIYQVVKEMIDKMGYEVKLVRINKRIQEAYCAELFLTKVGDHTESITFDLRPSDAINIAVRCKVPIQVHRSLAYSDGIRSVEPARMAIAAGMSDGLLFTELDRPDGQPCVEAQEFGLIRNMLIAAVEERYKDAATWRDKLMLLRSKRKNWA

SEQ ID NO: 192041 - protein, 1363 aa, Oryza sativa
  Clone ID: PAT_MRT4530_88303C.1.pep
MSNNRSKLTDFLRSRPPEFSQTVEPVEADDWLKDVDRKLNLVQCTPVEKTLYASHQLRGPAADWWENYCNAHPEPTNIAWDEFATAFRVAHVPESTIDMKKEEFNRLKQGNSSVNEYLSMFNKLARYAPEEVDTDKKKIRKFLKGIAVGMRLQLLAHDFPTFQHMINMALLLEDARKEATEEYKKRKSNHQGNSSRGAPRPRYGQPMQYHQSVTQANRQPGYAPRPQMNRPAPQPQQRAPSGNTAPNSVTSFKSPQGPSAVQCFRCNQMGHYARQCPQNPTNTNSGHANGSTARTPTPAAAQPRPSSQASGQGSRASNNFGRGRVNHIQAETAQDAPDVVMGMFSVNSVPAIVLFDSGAFHSFISQAFVKRNGWKTQNLRVPMIVHSPGRNIRATQICPEVNLRIEEVDFLAKPIVLDSQSLDIILGMDWLAKHKGQIDCAEKSITLQGPGGKQVRFTSNTPTASRSILTCLQVTSLESVPIVYEYPDVFPEELTSMPPDREIEFTIELAPGTAPIAKRPYRMAANELAEVKRQIEELESKSYVRPSSSPWGALVLLVKKKDGSERMVIDYRALNEVTIKNKYPLPQIDDLFDQLKGARVFSKIDLRSGYHQLKIRSEDIPKTAFSTRYGLYEFTVMSFGLTNAPAFFMNLMNKIFMEYLDQFVVVFIDDILIYSKNKEEHAEHLRLIMEKLRDHQLFAKFSKCEFWLDRVAFLGHVISSNGVEVDPSKVEAVLAWNPPKNVSEIRSFLDLAGYYRRFIEGFSKLARPMTELLKKENKFQWSAACEDSFQKMKKRLTTAPVLTLLDIRKDFEIFCDASRQGLGCVLMQERKRHYLIGNRCEVYTDHKSLKYIFTQTELNMRQRRWLELIKDYDLGIHDHPGKANVVGDALSRKAYSNVAQIRPDQDRLCRELEKLRLTVVQSGVPASLTVQPTLESQIREAQKDDEGIKELIKRIQEKKDTDFSIDDQGTVWCGPRICVPAKKELRDLILKEAHESAYSIHPGSTKIVKAEHQRPAGLLQPLPIPEWKWEEIGMDFITGLPRTPSGYDSIWVIVDRLTKSAHFVPVKTTFDGKKLAELYMTHVVCRFGCPKKIVSDRGTQFTSRFWKQLHEALGTDLNFSTAYHPQTDGQTERVNQILEDMLRACALDFEGTWDCCLPYAEFSYNNSYQASIQMSPNEAMFGRKCRTPLCWNEVGEALVFGPDILKAAEEQVKLIRERLKTAQNRQKNYADNRRRDLEFEKGDHVYLRVSPLRGMRRFGMSGKLAPRYIGPYLITARRGEVAYQLELPEGLVDVHNVFHVSQLKKCLRVPEEQVPLGNIVLEKNLTYKERPIKVLEEAERQTRRKTIKFYKVQWSNHSEDEAT

SEQ ID NO: 192042 - protein, 74 aa, Oryza sativa
  Clone ID: PAT_MRT4530_88304C.1.pep
KVCLWLGLWYWGFLRAGWWVFFSGNWWGTWRLTPLLILGLSFLWIFWFFWGFSWGHGQCPCFIFVLGLRIFPFP

SEQ ID NO: 192043 - protein, 352 aa, Oryza sativa
  Clone ID: PAT_MRT4530_88305C.1.pep
GSEACPPRWVREERETRGWAAGRASDPGAPAPVDRELAFSEADSSRSNKQQPLPGGRGSWKPEMVAAAGDRLDLPVVDLASSDLRSSAESIRKACVECGFFYVVNHGIEEGLLEKVFAENRRFFEQPLEEKMALLRNSSHLGYTPPYTEKLDASSKFRGDLSETFKIGPIGDEGFQNDANQWPSEERLPCWKETMKLYRGTALGTGKRILSLVALSLNLDAEFFDCPLAFLRLLHYPGEINESDDGNYGASAHSDYGILTLLATDGIPGLQICREKDRHPQLWEDVHHIDGSTLHRVVAVGKERYSVAFFLDPDPDLVVQCLESCCSEACPPRFPPIKSGDYLEDRLRATYK

SEQ ID NO: 192044 - protein, 1657 aa, Oryza sativa
  unsure (1)..(1657): unsure at all Xaa locations
  Clone ID: PAT_MRT4530_88306C.1.pep
MAVNASFSSHGFGEGHHVAQLRDLAHFLGFSCPEYTGYSVDRVPPHCELSVYLYPRGGIHGAGLRPHHFTVARPTLQIAYQDLSWTALRRLAHDYSHRLGGSAFRQLPRLPSGHSDARYPCPYSEPQPVLTRMVELSEAQATQHDLLLEAYRSLARRYAALEARLAEEGVTSVDTISWDSGRLCHASHLSSHSSRGSTRTPSGPRSPSSRAPYSPVYSPYPHPVSPSYTPGHTPVASSRRGPRFIRTARKRVVGSATVFRFHYPAPLPPAARAAAGPRQMASRPRRAARAPAHFGFEDGRVEPEENHESANEQSHRSNRSHRTASRNAEMEQSHRSHHTVSHNSGEERLPSPPHVENNMQHLMAVQTQILQGLAAAVAGFQHNAHGNGHPHMSNNRSKLTNFLRSRPPEFSQTVEPVEADDWLKDVDRKLNLVQCTPVEKTLYASHQLRGPAADWWENYCNAHPEPTNIAWDEFATAFRAAHVPESTIDMKKEEFNRLKQGNSSVNEYLSMFNKLARYAPEEVDTDKKKIRKFLKGIAVGMRLQLLAHDFPTFQHMINKALLLEDARKEATEEYKKRKSNHQGNSFRGAPRPRYGQPMQYHQSVTQANRQPGYAPRPQMNHPAPQPQQRAPSGNTAPNSVTSFKSPQGPSAVQCFRCNQMGHYARQCPQNPTNNNSGHANGSTARTPTPAAAQSRPSSQASGQGSRASNNFGRGRVNHIQAETAQDALDVVMGPGGKQVRFTPNTPTASRSILTCLQVTSLESVPIVCEYPDVFPEELTRMPPDREIEFAIELAPGTAPIAKRPYRMAANELAEVKXQIEELESKGYVRPSSSPWGAPVLLVKKKDGSERMVRLPXLKIRSEDIPKTAFSTRYGLYEFTVMSFGLTNAPAFFMNLMNKIFMEYLDQFVVVFIDDILIYSKNKEEHAEHLRLIMEKLRDHQLFAKFSKCEFWLDRVAFLGHVISSNGVEVDPSKVEAVLAWNPPKNVSEIRSFLGLAGYYRRFIEGFSKLARPMTELLKKEKKFQWSAACEDSFQEMKKRLTTAPVLTLPDIRKDFEIFCNASRQGLGCVLMQERKVVAYASRQLRPHEVNYPTHDLELAAVVHALKIWRHYLIGNRCEVYTDHKSLKYIFTQTELNMRQRRWLELIKDYDLGIHYHPGKANVVADALSRKAYCNVAQIRPDQDHLYRELDKLRLTVVQSGVPASLTVQPTLESQIREAQKDDEGIKELIKRIQEKKDANFSIDDQGTVWCGPRICVPAKKELRDLILKEAHESAYSIHPGSTKMYQDIKAYFWWAGMKRDVAEYIALCDICQRVKAEHQRPAGLLQPLPIPGWKWEEIGMDFITGLPRTPSGYDSIWVIVDRLTKSAHFVPVKTTYDGRKLAELYITHVVCRFGCPKKIVSDRGTQFTSRFWKQLHEALGTDLNFSTAYHPQTDGQTERVNQILEDMLRACALDFEGTWDRCLPYAEFSYNNSYQASIQMSPNEAMFGRKCRTPLCWNEVGEALVFGPDILKRDLEFEKGDHVYLRVSPLRGMKRFGMSGKLAPRYIGPYLITARRGEVAYQLELPEGLADVHNVFHVSQLKKCLRVPEEQVPLGNIELEKNLTYKERPIKVLEEAERQTRRKTIKFYKVQWSNHSEDEATWEREDLLRAEFPELLP

SEQ ID NO: 192045 - protein, 67 aa, Oryza sativa
  Clone ID: PAT_MRT4530_88307C.1.pep
HNDVARRRDATATRRDARGSRATRRRGDTTARRRGATRGGRAAHGDGARRDSGDGTGARRLGARGRR

SEQ ID NO: 192046 - protein, 272 aa, Oryza sativa
  unsure (1)..(272): unsure at all Xaa locations
  Clone ID: PAT_MRT4530_88308C.1.pep
SLASLKTFDATLKLRICYATLASPSQWCSWLSLVQFWXLYGTDPVCHFLPSELVTGGAGDDEASTLLQDHQLFSDMLQQQLSKAKNRMKHYAGVSSGRSSVFEVLTYDQKSVASALPKLAFKYFGPFPSCFALGKWHTNCRLPGDSFIHPVFHVSQLKQFVPAHVPIFSQLPSPFQQHIRELEPSAILNCCLVKKGNTVHTQVLVQWGEMPSACATWKITMICKLVFCHRLKGVAMSHHRVCYRWKNQGLELEVGDDGKVGNGNAYPEEGIV

SEQ ID NO: 192047 - protein, 653 aa, Oryza sativa
  Clone ID: PAT_MRT4530_88309C.1.pep
MASTETIKEFFNVNGQIIGAAVLAVLAMVVVALGTYGRHCSHPALRLFVWGASTVFLLLSTSIISNLLKGVQDWVGTTRRNIFVAFCMLGLAKLLLNLFASWRASSSFAVGKNARLVSGYMEQLEEEGDEVGGHDQVPRYIVTGGKEEHVATGARGYRIRRDALDDESSSLVTLDRVWRMAEHGDVNGLLAKRPELRDLCLSFSLFKSLRRQLSGYPLDDAGSTKALEFVLRGMNAAGSACAVNADRVFHVLVDELSFASDFYFAGLPLCTYSGWCAALNYIFSVLIVVGATAVGTIYKVEKILPFKEGKPNFVVTFALLVAVALVEVWDIVAGVCSNWSKMALLGHYIRHEPQWRRCRRAHAALDAMLRFRPARRWRNKIGQNSVLEPRRFCRRSGLLSEKLYGRAGLMRSVEVSPAVKDTVLRSLMSSYGRSSRGRAAERRVGSKVDWLWYGSRKSWASDDGDGCVSTTDIILAWHVATRLYEMRCSLHASSPTPSASSSDMAAACHLSNYCAYLASAAPELLPDIATWTEKRYREDSAAGETTTAQQRYERLVATLSAGARDKALRRGAEIARRLAEEYTTAAEDDDEASAWLFLADFWSEMMLYVAPSENVKGHVEAMARGGEFVTLLWALLLHAGITARPEAPSRIIP

SEQ ID NO: 192048 - protein, 214 aa, Oryza sativa
  Clone ID: PAT_MRT4530_8830C.1.pep
CRRRRRRRQTASRRGWTVTADVGHRRKPTSRGGGRGGRKDAGDEEDGEAGAATAFRRNRGAAGVEGDAATPREGTAAPADARARRKGLPEETSTRRKERPARATVFRRNSGEEEVMPGMRAASRSRGRWWRRQPALRQGDRGAWRRPARRKGNGDGGNAAPGVSAGNGGQAGEGEAAAMLEEATARPAGALARRQGRLEAAGGTGERGRRRGGG

SEQ ID NO: 192049 - protein, 254 aa, Oryza sativa
  Clone ID: PAT_MRT4530_88310C.1.pep
MQGDHGYYGGRDSPPQGYGYGGGYGYGGGYGYDAGGYYSGGGGGYPSAGAAAAAYEDPMVGRRTHDFPAPMNELEFQPSATCPKNYVIFDQTCTKSRVMFHPSLAHKFGGGSSAYDNNVYGGGGAHDAAKGAYRDSVGYDDDDSCSVRQKEDTDEIDALLSSEDGDEDDVVSTGRTPGYRDGSSPDSTCSSSYGGGQARPGRKKERMKKMVRTLKGIIPGGNQMDTPAVLDEAVRYLKSLKVEVKKLGVRGSDN

SEQ ID NO: 192050 - protein, 473 aa, Oryza sativa
  Clone ID: PAT_MRT4530_88311C.1.pep
MATENSSPAFTDFLPRALSPIPFVDKGDIMMNIDQAEDSCSNISGASRSSQSHTDQTEDSKGNELCTRVKAVTDVSCGSELQDTCEEEGIILWPGLKMSFPQAPLVRIQDNELDYAYVDVSETSIGNSFFITQFNLPLSLPVYVVLCLSFPVPSRNACKQLAANPEAPLFRLPPLGSYEKEMCGPVLLICNVHSPGMSCFSPYTKSTFYRENMEIDIDDVLYSNGSWFLLREANIISLWNVNTEKRWFVGEAEEIIHQGYFIGNPPFDVTIALARQHPPKLGEEAITAIWLRSVKIGGWSKGSVRCDYEHSGLNSLTIHQGMLFWLTDSGSLCCARQTSEGLELMIWNGSVRIYGMNFSLVKHFDDLYIVNGGGFFPNEVAKSYQIVVGDELLVDEKRLKGKDVFTVSRQGGFVLPSSEADNGKLFTGNMIPDVDCSMYSWKNNQNEIIKPCHFLRHATCSSVWAMLRTKRRT

SEQ ID NO: 192051 - protein, 78 aa, Oryza sativa
  Clone ID: PAT_MRT4530_88312C.1.pep
PATACAICKDDLPLAAPARRLPCGHLYHSECIVQWLEMRNSCPVCRSRLPSDEPQDAAAPSDPGPAPMRITIRLSTNR

SEQ ID NO: 192052 - protein, 248 aa, Oryza sativa
  Clone ID: PAT_MRT4530_88313C.1.pep
NSEQQSRPLLTKKTKAMAPSLATSSTLALFLLVAVSIADAATFAITNRCQYTVWPAAVPSGGGTKLDPGQTWTINVPAGTTGGRVWARTGCGFDGSGNGQCQTGDCGGKLRCTAYGAAPNTLAEFALNQWNNLDFFDISLIDGFNVPMAFLPAGSGAGCPKGGPRCATAITPQCPSELRAPGGCNNACTVFRQDRYCCTGSAANSCGPTNYSEFFKRLCPDAYSYPKDDASSTYTCPAGTNYQVVFCP

SEQ ID NO: 192053 - protein, 518 aa, Oryza sativa
  Clone ID: PAT_MRT4530_88314C.1.pep
MAAAAAAASTSRLLLLRHHHHAAADGSKQQQQLRYSSKPSSLALPRLRLLPAAGALLPDRVTPFSYEEDDESDDHPREECGLVGVVGDPDASSLCYLGLQKLQHRGEEGAGIVAVGGDGKLKSVTGLGLVADVFGDPARLASLPGPAAIGHVRAGRRRAQRNLVNYQALRNKLEARGSIFNTSSDTEVILHLIATSLSRPLLSRICDACERLAGAYSLLFLTADKMFAVRDPHGFRPLVLGRRRNGTVAFASETCALDLIEATYEREVEPGEVVVVDRRDMSVSSACLVPHRPRRSCVFEHIYFALPNSVVFSHAVHERRTAFGRALAEESPAAGADVVIPVPDSGFYAALGFARASGLEFQQGLIRWHYSGRSFIQPTQAIRDLAVKLKLAPVHGVIRGKSVVVVDDSLVRGTTSSKIVRLLRDAGAREVHMRIASPPVVGSCLYGIDTPSEGELISNRMDLEGVRREIGSDSLAFLSLGKLHSIYGAEAEGYCDACFSRNYPVLPTLPEPVVELEE

SEQ ID NO: 192054 - protein, 541 aa, Oryza sativa
  Clone ID: PAT_MRT4530_88315C.1.pep
MAAAAAAASTSRLLLLRHHHHAAADGSKQQQQLRYSSKPSSLALPRLRLLPAAGALLPDRVTPFSYEEDDESDDHPREECGLVGVVGDPDASSLCYLGLQKLQHRGEEGAGIVAVGGDGKLKSVTGLGLVADVFGDPARLASLPGPAAIGHVRYSTAGAAASLRNVQPFLAGYRFGQVAVAHNGNLVNYQALRNKLEARGSIFNTSSDTEVILHLIATSLSRPLLSRICDACERLAGAYSLLFLTADKMFAVRDPHGFRPLVLGRRRNGTVAFASETCALDLIEATYEREVEPGEVVVVDRRDMSVSSACLVPHRPRRSCVFEHIYFALPNSVVFSHAVHERRTAFGRALAEESPAAGADVVIPVPDSGFYAALGFARASGLEFQQGLIRWHYSGRSFIQPTQAIRDLAVKLKLAPVHGVIRGKSVVVVDDSLVRGTTSSKIVRLLRDAGAREVHMRIASPPVVGSCLYGIDTPSEGELISNRMDLEGVRREIGSDSLAFLSLGKLHSIYGAEAEGYCDACFSRNYPVLPTLPEPVVELEE

SEQ ID NO: 192055 - protein, 246 aa, Oryza sativa
  Clone ID: PAT_MRT4530_88316C.1.pep
MFLSRIVLRDLDSIDSPAASMASSKKLVTRDEWERKLRDVKIRKEDMNRLVMNFLVTEGFVDAADKFRVESGTQPDIDLATITDRMEVKRAVQSGNVQEAIEKINDLNPTILDTNPQLYFHLQQQKLIELIRAGKINEALEFAQEELAPRGEENQVFLEEIEKTVALLVFEDIKNCPYGELLDVSQRLKTASEVNAAILTSQSHEKDPKLPSLLKMLIWTQNQLDEKAAYPRINNFSTAALEDPAI

SEQ ID NO: 192056 - protein, 143 aa, Oryza sativa
  unsure (1)..(143): unsure at all Xaa locations
  Clone ID: PAT_MRT4530_88317C.1.pep
RTCIVFFALITSLAFLVPRSRNPAIRPSVPAIAARVVRRPSAVAVAVVVAVAVNADESPRRRIRRCCHLPIRRWXRSSSKSNLRELDNSPAARSAPSKRPLDGDGDSDGDSHDDGGRAANYTRGDSRNGRANSWITAPRNEER

SEQ ID NO: 192057 - protein, 1694 aa, Oryza sativa
  Clone ID: PAT_MRT4530_88318C.1.pep
MAVNASFSSHGFGEGHHVVQLRDLARFLGFSCSEYTGYSVDRVPPHCELSVYLYPRGGIHGAGLRPHHFTVARPTLQIAYQDLSWTVLRRLAHDYSHRLGGSAFRQLPRLPSGHSDARYPCPYSESQPVLTRMVELSEAQATQHDLLLEAYRSLARRYAALEARLAEEGVTSVDTISWDSGRLCHASHLSSHSSRGSARTPSGPRSPSSRAPYSPVYSPYPHPVSPSYTPGHTPVASSRHGPRFIRTARKRVVGSSTVFRFRHPAPPPMASRPRRAARAPARFGFEDGRVEAEANHESANEQSHHSNRSHRTVFRNAEVEQPHRSNRSHRTVFRNAEMEQSHRSHRTASHNSGEERLPSPPHVENNMQHIMAVQTQILQGLTTAIASFQHNAHGNGHPHVGNNRSKLTDFLRSHPPEFSQTVEPVEADDWLKDVDRKLNLVQCTPVEKTLYASHQLRGPAADWWENYCNAHPEPTNIAWDEFATAFRAAHVPESTIDMKKEEFNRLKQGNSSVNEYLSMFNKLARYAPEEVDTDKKKIRKFLKGIAVGMRLQLLAHDFPTFQHMINKALLLEDARKEATEEYKKRKSNHQGNSSRGAPRPRYGQPMQYHQSVTQANRQPGYAPRPQMNRPAPPPQQRAPSGNTAPNSVTSFKSPQGPSAVQCFRCNQMGHYARQCPQNPTNTNSGHANGSTARTPTPVAAQSRPSSQASGQGPRASNHFGRGRVNHIQAETAQDAPDVVMVCEYPDVFLEELTRMPPDREIEFAIELAPGTAPIAKRPYRMAANELAEVKRQIEELESKGYVRPSSSPWGAPMLLVKKKDGSERMVIDYRALNEVTIKNKYPLLRIDDLFDQLKGARVFSKIDLRSGYHQLKIRSEDIPKTAFSTRYGLYEFTVMSFGLTNALAFFMNLMNKIFMEYLDQFVVVFIDDILIYSKNEEEHAEHLRLIMEKLRDHQLFAKFSKCEFWLDRVAFLGHVISSNGVEVDPSKVEAVLSWNPPKNVSEIRSFLGLAGYYRRSIEGFSKLARPMTELLKKEKKFQWSAACEDSFQEMKKRLTTAPVLTLPDIRKDFEIFCDASRQGLGCVLMQERKVVAYASRQLRPHEVNYPTHDLELAAVVHTLKIWRHYLIGNRCEVYTDHKSLKYIFTQTELNMRQRRWLELIKDYDLGIHYHPGKANVVADALSRKAYCNVAQIRPDQDHMCRELEKLRLTVVQSGVPASLTVQPTLESQIQEAQKDDEGIKELIKRIQEKKDTNFSIDDQGTVWCGPHICVPAKKELRDLILKEAHESAYSIHPGSTKMYQDIKAYFWWAGMKRDVAEYVALCDICQRVKAEHQRPAGLLQPLPIPEWKWEEIGMDFITGLPRTPSGYDSIWVIVDRLTKSAHFVPVKTTYDGKKLAELYMTHVVCRFGCPKKIVSDRGTQFTSRFWKQLHEALGTDLNFSTAYHPQTDGQTERVNQILEDMLRACALDFEGTWDRCLPYAEFSYNNSYQASIQMSPNEAMFGRKCRTPLCWNEVGEALVFGPDILKSEEEQVKLIRERLKTTQNRQKNYADNRRRDLEFEKGDHVYLRVSPLRGMRRFGMSGKLAPRLITARRGEVAYQLELPEGLADVHNVFHVSQLKKCLRVPEEQVPLGNIELEKNLTYKERPIKVLEEAERQTRRKTIKFYKVQWSNHSDDEATWEREDLLRAEFPELLS

SEQ ID NO: 192058 - protein, 1629 aa, Oryza sativa
  unsure (1)..(1629): unsure at all Xaa locations
  Clone ID: PAT_MRT4530_88319C.1.pep
MVELSEAQATQHDLLLEAYRSLARRYAALEACLAEEGVTSVDTISWDSGRLCHASHLSSHSSRGSALTPSGPRSPSSRAPYSPVYSPYPHPVSPSYTPGHTPVASSRRGPRFIRTARKRVVGSSNVFRFHYPAPPPPAARAAAGPRQMASRPRRAARAPARFGFEDGRVEPEENHESANEQSHHSNRSHRTVSRNAEVEQPRHSSRSHRTVSRDAEMEQSHRSHRTASHNSGEERLPSPPHVETNMQHLMAVQTQILQGLTTAIASFQHNAHGNGHPHMGNNRSKLTDFLRSRPPEFSQTVEPVEADDWLKDVDRKLNLVQCTPVEKTLYASHQLRGPAADWWENYCNAHPEPTNIAWDEFATAFRAAHVPESTIDMKKEEFNRLKQGNSSVNEYLSQFNKLARYAPEEVDTDKKKIRKFLKGIAVGMRLQLLAHDFPTFQHMINKALLLEDARKEATEEYKKRKSNHQGNSSRGAPRPRYGQPMQYHQSVTQANRQPGYAPRPQINRPAPQPQQRAPSSDTAPNSVTSFKSPQGPSAVQCFRCNQMGHYARQCPQNPTNTNSGHANGSTARTPTLAAAQSRPSSQASGQGSRASNNFGRGRVNHIQAETTQDAPDVVMGMFSVNSVPAIVLFDSGASHSFISQAFVKRNGWKTQNLRVPMIVHSPGRNIRATQICPEVNLRIEEVDFLAKPIVLDSQSLDIILGMDWLAKHKGQIDCAEKSITLQGPGGKQVRFTPNTPTASRSILTCLQVTSLESVPIVYEYPDKKDGSERMVIDYRALNEVTIKNKYPLPRIDDLFDQLKGARVFSKIDLRSGYHQLKIRSEDIPKTAFSTRYGLYEFTVMSFGLTNAPAFFMNLMNKIFMEYLDQFVMVFIDDILIYSKNKEEHAEHLRLIMEKLRDHQLFAKFSKCEFWLDRVAFLGHVISSNGVEVDPNKVEAVLAWNPPKNVSEIRSFLGLAGYYRRFIEGFSKLARPMTELLKKEKKFQWSAACEDSFQELKKRLTTAPVLTLPDIRKDFEIFCDASRQGLGCVLMQEQKVVAYASRQLRPHEANYPTHDLELAAVVHALKIWRHYLIGNRCEVYTDHKSLKYIFTQTELNMRQRRWLELIKDYDLGIHYHPGKANVVADALSRKAYCNVAQIRPDQDHLCRELEKLRLTVVQSGVPASLTIQPTLESQIREAQKDDEGIKELIKRIQEKKDTNFSIDDQGTVWCGPRICVPAKKELRDLILKEAHESAYSIHPGSTKMYQDIKAYFWWAGMKRDVAEYVALCDICQRVKAEHQRPAGLLQPLPIPEWKWEEIGMDFITGLPRTPNGYDSIWVIVDRLTKSAHFVPVKTSYDGKKLAELYMTHVVCRFGCPKKIVSDRGTQFTSRFWKQLHEALGTDLNFSTAYHPQTDGQTERVNQILEDMLRACALDFEGTWDRCLPYAEFSYNNSYQASIQMSPNEAMFGRKCRTPLCWNEVGKALXQNRQKNYADNRRRDLEFEKGDXCGDHVYLRVSPLRGMRRFGMSGKLAPRYIGPYLITARRGEVAYQLELPEGLADVHNVFHVSQLKKCLRVPEEQVPLGNIELEKNLTYKERPIKVLEEAERQTRRKTIKFYKVQWSNHSEDEATWEREDLLRAEFPDLLP

SEQ ID NO: 192059 - protein, 91 aa, Oryza sativa
  Clone ID: PAT_MRT4530_8831C.1.pep
AIEMFWEYNLPSPRCVAVDACAEPDLVKALNVSGFPEVLFTNAGKIVHRDKVVRSAEEWTRMMAFFYYKAARPPCLSEADGQGQEKVPLMS

SEQ ID NO: 192060 - protein, 1539 aa, Oryza sativa
  unsure (1)..(1539): unsure at all Xaa locations
  Clone ID: PAT_MRT4530_88320C.1.pep
VPLVPSRQPIDVSSTEEPTTGARFGFEEGRVEPEANHESANQQSHHSNRSHRTASRNAEVEQPHRSNRSHHTASRNAEVEQSHCSHRAASHNSGEERIPSLPHVENNMQHLMAVQTQILQGLAAAIAGFQHNAHGNDHPHMGNNRSKLTDFLRSRPPEFSXTVEPVEADDWLKDVDRKLNLVQCTPVEKTLYASHQLRGPAADWWENYCNAHPKPTNIAWDEFATAFRAAHVPESTIDMKKEEFNRLKQGNNSVNEYLSQFNKLARYAPEEVDTDKKKIRKFLKGIAALLLEDARKETTEEYKKRRSNHQGNSSRGAPRPRFGQPMQYHQSVTQANCQPGYAPRPQMNRPAPRPQQRAPSGTTAPNSVTSFKSPQGPSAVQCFRCNQMGHYARECPQNPTNTNSGHANGSTARTPTPAAAQSRPSSQASGQGSRASNSFGRGRVNHIQAETAQDAPDIVMGMFSVNSIPAIVLFDSGASHSFISQAFVKRNGWKTQNLRVPMIVHSPGRNIRATQICPEVNLRTEEVDFLAKPIVLDSQNLDIILRMDWLAKHKGQIDCAEKSITLQGPGGKQVRFTSNTPTASRSILTCLQVTSLESVPVVCEYPDVFPEELTSMPPDREIEFAIELAPGTAPIAKRPYQMAANELAEVKRQIEELESKGYVRPSSSPWGAPVLLVKKKDGSERMVIDCRALNEVTINNKYPLPRIDDLFDQLKGARVFSKIDLRLGYHQLEIRSEDIPKTTFSTRYGLYEFTVMSFGLTNAPAFFMNLMNKIFMEYLDQFVVVFIDDILIYSKNEEEHAEHLRLIMEKLRDHQLLAKFSKCEFWLDRVAFLGHMISSNGVEVDPSKVKAVLAWNPPKNVSEIRSFLGLAGYYRRFIEGFSKLARPMTELLKKEKKFQWSAACEGSFQEMKKRLTTAPVLTLPDIRKDFEIFCDASRQGLGCVLMQERKVVAYASRQLRPHEVNYPTHDLELAAVVHALKIWRHYLIGNRCEVYTDHKSLKYIFTQTELNMRQRRWLELIKDYDLGIHYHPGKANVVADALSRKAYCNVAQIRPDQDRLCRELEKLRLTVVQSGVPASLTVQPTLESQIREAQKDDEGIKELIKRIQEKKDTNFSIDDQGTVWCGPRICVPAKKELRDLILKEAHESAYSIHPGSTKMYQDIKAYFWWAGMKRDVTEYVALCDICQRVKAEHQRPAGLLQPLPIPEWKWEEIGMDLITGLPRTPSGYDSIWVIVDRLTKSAHFVAVKTTFDGKKLAELYMTHVVCRFGCPKKIVSDRGTQFTSRFWKQLHEALGTDLNFSTAYHPQTDGQTERVNQILEDMLRACALDFEGTWDRCLPYAEFSYNNSYQASIQMSPNEAMFGRKCHTPLCWNEVGEALVFGPDILKAAKEQVKLIRERLKTAQNRQKNYADNRRRDLEFGKGDHVYLRVSPLRGMRRFGMSGKLAPRYIGPYLITARRGEVAYQLELPEEEQVSLGNIELEKNLTYKERLIKVLEEAERQTRRKTIKFYKVQWSNHSEDEATWEREDLLRAEFPELLP

SEQ ID NO: 192061 - protein, 107 aa, Oryza sativa
  Clone ID: PAT_MRT4530_88321C.1.pep
AKHTHSLGTNIVCVCVYIYIYIYIYIHIHIHIYIYTYIYIYIYIYIYIYIYIYIYTYIHIYIHIYIYIYIHIYIYTYIYIHIHIYIYIYIYIYIYIYIHIHIHIYIY

SEQ ID NO: 192062 - protein, 1620 aa, Oryza sativa
  Clone ID: PAT_MRT4530_88322C.1.pep
MGYSVDVFPLAVSSLCTFTLAEVYTELAFAHTTSLWLGPPSRSRTRTSPGLRFVAWPTTTATVSGALPSGSSHVFLLATQMPARFSFEEGRVEPEANHESANEQSHHSIRSHHTASRNAEVEQPHRSNRSHHTASRNAEVEQSHRSHRTASHNSGEERIPSPPHVENNMQHLMTVQTQILQGLAAAIAGFQHNAHGNGHPHMGNNRSKLTDFLRSRPPEFSQTVEPVEADDWLKDVDRKLNLVQCTPVEKMLYASHQLRGHAADWWENYCNAHPEPTNIAWDEFATAFRGAHVPESTIDTKKEEFNRLKQGNNSVNEYLSQFNKLARYAPKEVDTDKKKIRKFLKGIAVGMRLQLLAHDFPTFQHMINKALLLEDARKEATEEYKKRKFNHQGNSSRGAPRPRYGQPMQYHQSVTQANRQPGYAPRPQMNRPAPQPQQHAPSGNTAPNSVTSFKSPLGLSAVQCFRCNQMGHYARQCPQNPTNTNSGHANGSTARTPTPAAAQSRPSSQASGQGSRASNNFGRGRVNHIQAETAQDAPDVVMVHSPGRNIRATQICPEVNLRIEEVDFLAKPIVLDSQSLDIILGMDWLAKHKGQIDYAERSITLQGPRGKQVCFTTNTPTASRSILTYLQVTSLESVPIVCEYPDVFPEELTSMPPDREIEFAIELAPGTAPIAKRPYQMAANELAEVKRQIEELESKGYVRPSSSPWGAPVLLVKKKDGSERMVIDYRALNEVTIKNKYALPRIDDLFDQLKGARVFSKIDLRSGYHQLKIRSEDIPKTAFSTRYGLYEFTVMSFGITNAPAFFMNLMNKIFMEYLDQFVVVFIDDILIYSKNEEEHAEHLRLIMGKLRDHQLFAKFSKCEFWLDRVAFLGHVISFNGVEVDPSKVGAVLAWNPPKNVSEIHSFLGLAGYYRRFIEGFSKLARPMTELLKNEKKFQWSTACEDSFQEMKKRLTTAPVLTLPDIRKDFEIFCDASRQGVGCVLMQERKVVAYASRQLRPHEVNYPTHDLELAAVVHALKIWRHYLIGNRCEVYTDHKSLKYIFTQTELNMRQRRWLELIKDYDLGIHYHPGKANVVADALSRKTYYNVAQIWPDQDRLCGELEKLRLTVVQSGVPASLTVQPTLESQIREAQKDDEGIKELIKRIQEKKDTDFSNRRSRHSLKELRDPILKEAHESAYSIHPGSTKMYQDIKAYFWWAGMKRDVAEYVALCNICQRVKAENQRPAGLLQPLPIPEWKWEEIGMDFITGLPRTPSGYDSIWVIVDRLTKSAHFVPVKTTFDGKKLAELYMTHVVCRFGCPKKIVSDRGTQFTSRFWKQLHEALGTDLNFSTAYHPQTDGQTERVNQILEDMLPLVTSLTSRQSDLVTGLGLVAASAHAPASVSNSVGPSKLQNGSLRSEVTTSFADPSLYPLPLQIHRCHLSVPPDLAYLRSEAAVGTTKSLAILMKALILLVPARVAQGLGDTGVASLPSRPIISSHLYLIAAQASHQKTVPFFSSLKVLRLEPVARSTMGQPPRHRVESRWRSFREGTGDQRHARRSLRVASMQAERRASSQRSRNYYVACGKLGNDNTCGGDGILTGIWGEARVTKKSPHLSGNEWKNTNIYISYRNVGNNLTIEKK

SEQ ID NO: 192063 - protein, 215 aa, Oryza sativa
  Clone ID: PAT_MRT4530_88323C.1.pep
MPVTAIQLPHLRLRSLRLRILDYGQPWFEQSVRSVYVPLHLHLVEFLQWTAALSCFSNAWRRRLAGGWWRRLAVVAVAGRSCRVTIDELEVEQYTFTRETSDIAVLKYSSVCTPAISSQACALQETPPGAQATHGCRVQTPETGPPAQAMRRTPRVLARPYCRQLSSGQHFVEDHDCRSPAGVVLTGVVGSSPLPRRGFATPQFPTSQLFILRRH

SEQ ID NO: 192064 - protein, 1547 aa, Oryza sativa
  unsure (1)..(1547): unsure at all Xaa locations
  Clone ID: PAT_MRT4530_88324C.1.pep
PPHRAARAPARFGFEEGRVEPEADHESANEQSHHSNRSHRTASRNAEVEQSHRSNRSHRIVSRNAEVEXSHRSHRSVGHNSGEERIPSPPHVENNMQHLMAVQTQILQGLATAIAGIQHNAHGNGHPHMGNNRSKLTDFLRSRPPEFSQTVKPVEAGDWLKDVERKLNLVQCIPIEKTVYASHQLRGPAADWWENYCNAHPEPTNIPWNEFAAAFRVAHVPKSTIDMKKEEFIRLKQGNSSVNEYLSQFNKLARYAPEEVDTDKKKIRKFLKGVTVGMRLQLLAHDFPTFQHMINKALPLEDARKEATEEYKKRKSTHQGNSSRGAPHPRFGQPKQYHQSVTQANRQPGYAPRPQMNRPAPPPQQRAPSGNIAPNSVTSFKSPPGLSTVQCFRWDKMGHSARQCPQNPTNTNSGHANGSTARTPTLAAAQSRPSSXASGQGSHASNNFGRGRVNHIQAETAQDAPDVVMGMFSVNSIPAIILFDSGASYSFISQAFVKRNGWKTXNLRVPMIVHSTGRDIRATKICPEVNLRIEEVDFLAKLIVLDSQSLDIILGMDWLAKHKGQIDCAERSITLQGPGGKQVHFTPNTLTASRSILTNLQATPLESVPIVCEYPDVFPEELSSMPPDREIEFAIELAPGTAPITKRPYRMAANELAEVKRQIEELESKGYVRPSSSPWGAPVLLVKKKDGYERMVIDYRALNEVTIKNKYPLPRIDDLFDQLKGARVFSKIDLRSGYHQLKIRSEDIPKTAFSTRYGLYEFTVMSFGLTNAPAFFMNLMNKIFMEFLDQFVVVFIDDILIYSKNKEEHVEHLRLIMEKLRDHQLFAKFSKCEFWLDRVAFLGHVISSNGVEVDPSKVEAVLAWNPPKNVSEIRSFLGLAGYYRRFIEGFSKLARPMTELLKKEKKFQWSVACEDSFQEMKKRLTTAPVLTLPDIRKDFEIFCDASRQGLGCVLMQERKVVAYASRQLRPHEVNYPTHDLELAAVVHALKIWRHYLIGNRCEVYTDHKSLKYIFTQIELNMRQRRWLELIKDYDLGIHYHPGKANVVADALSRKAYCNVAQIRPGQDRLCRELEKLRLTVVQSGVPASLTVQPTLESQIREAQKDDEGIKELIKRIQEKKDTNFSIDDQGTVWCGPRICVPAKKELRDLMLKEAHESAYSIHPGSTKMYQDIKAYFWWAGMKRDVAEYVALCDICQRVKAEHQRPAGLLQPLPIPEWKWEEIGMDFITGSPRTPSGYDSIWVIVDRLTKSAHFVPVKTTFDRKKLAELYMTHVVCRFGCPKKIVSDRGTQFTSRFWKQLHEALGTDLNFSTAYHPQTDGTWDRCLPYAEFSYNNSYQASIQMLPNEAMFGRKCRTPLCWNEVGEALVFGPDILKAAEEQVKLIRERLKTAQNRQKNYADNRRHDLEFEKGDHVYLRVSPLRGMRRFGMSGKLAPRYIGPYLITARRGEVAYQLELPEGLADVHNVFHVSQLKKCLRVPEEQVPLGNIELEKNLTYKERPIKVLEEAERQTRRKTIKFYKVQWSNHSEDEATWEREDLLRAEFPELLP

SEQ ID NO: 192065 - protein, 167 aa, Oryza sativa
  Clone ID: PAT_MRT4530_88325C.1.pep
VALASQTYDLVDAHIQQLDQFMRKLEELRQEKEAATTAAAAAAAAAASVATGTPVAATVTASAGTSTADNTPKGGRSSERGRGGRKKTAKVPTEQPAPAIDLELPVDPNEPTYCLCNQVSYGEMVACDNNDCKIEWYHFGCVGVKEHPKGKWYCPSCIGFQKKRKGK

SEQ ID NO: 192066 - protein, 1522 aa, Oryza sativa
  Clone ID: PAT_MRT4530_88326C.1.pep
MASRPRRAARAPARFGFEEGRVEPEENHESANERSHHSNRSHRTASRNAEVEQPRRSNRSHHTASRNAEMEQSHRSHRTASHNSGEERLPSPPHVENNMQHLMAVQTQILQGLAAAIAGFQHSAHGNGHPHMGNNRSKLTDFLRSRPPEFSQTVEPVEADDWLKDVDRKLNLVQCTPVEKTLYASHQLRGPAADWWENYCNAHPEPTNIAWAEFATAFRAAHVPESAIDMKKEEFNKLKQGNNSVNEYLSLFNKLARKEATEEYKKRKSNHQGNSSRGAPRPRYGQPMQYHQSVTQANRQPGYAPRPQMNRQAPQPQQRAPSGNTAPNNVTSFKSSLGPSAVQCFRCNQMGHYARQCPQNPTNTNSGHANGSTARTPTPAAAQSRPSSQASGQGSRVSNNFGRGRVNHIQAETAQDAPDVVMGMFSVNSVPAIVLFDSGASHSFISQAFVKRNGWKTQNLRVPMIVHFPGRNIRATQICPEVNLRIEEVDFLAKPIVLDSQSLDIILGMDWLAKHKGQIDCAEKSITLQGPGGKQVRFTSNTPTASRSILTCLQVTSLESVPIVCEYPNVFPEELTSMPPDREIEFAIELAPGTAPIAKRPYRMAANELAEVKRQIEELESKGYVRPSSSPWGAPVLLVKKKDGSERMVIDYRALNEVTIKNKYPLPRIDDLFDQLKGARVFSKIDLRSGYHQLKIRSEDIPKTAFSTRYGLYEFTVMSFGLTNAPAFFMNLMNKIFMEYLDQFVVVFINDILIYSKNEEEHAEHLRLIMEKLRDHQLFAKFSKYEFWLDRVAFLGHVISPNGVEVDPSKVEAVLAWNPPKNVSEIRSFLGLAGYYRRFIEGFSKLARPMTELLKKEKKFQWSTACEDSFQEMKKRLTTAPVLTLPDIRKDFEIFCDASRQGLGCVLMQERKVVAYASRQLRPHEVNYPTHDLELAAVVHALKIWRHYLIGNRCEVYTDHKSLKYIFTQTELNMRQRRWLELIKDYDLGIHYHPGKANVVADALSRKTYCNVDQIRPDQDRLCRDLEKLRLTVVQSGVAASLTVQPTLESQIRKAQKDDEGIKELIKRIQEKKDTDFSIDDQGTVWYGPRICVPAKKELRDLILKEAHESAYSIHPGSTKMYQDIKAYFWWAGMKRDVAEYVALCDICQRVKAEHQRPAGLLQPLPIPEWKWEEIGMDFITGLPRTPSGYDSIWVIVDRLTKSAHFVPMKTTFDGKKLAELYMTHVVCRFGCPKKIVSDRGTQFTSRFWKQLHEALGTDLNFSTAYHPQTDGQTERVNQILEDMLRACALDFEGTWDRCLPYAEFSYNNSYQASIQMSSNEEMFGRKCRTPLCWNEVGEALVFGPDILKAAEEQVKLIRERLKAAQNRQKNYVDNRRRDLEFEKGDHVYLRVSPLRGIRRFGMSGKLAPRYIGPYLITARRGEVAYHLELPEGLADVHNVFHVSQLKKCLRVPEEQVPLGNIELEKNLTYKERPIKVLEEAERQTRRKTIKFYKVQWSNHSEDEATWEQEDLLRAEFPELLP

SEQ ID NO: 192067 - protein, 1851 aa, Oryza sativa
  Clone ID: PAT_MRT4530_88327C.1.pep
MAVNASFSSHGFGEGHHVAQLRDLARFLGFSCPEYTGYSVDRVPPHCELSVYLYPRGGIHGAGLRPHHFTVARPTLQIAYQDLSWTALRRLAHDYSHRLGGSAFRQLPRLPSGHSDARYPCPYSESQPVLTRMVELSEAQATQHDLLLEAYRSLARRYAALEARLAEEGVTSVDTISWDSGRLCHASHLSSHSSRGSARTPSGPRSPSSRAPYSPVYSPYPHPVSPSYTPGHTPVASSCRGPRFIRTARKRVVGSATVFRFHYPAPLPPAARAAAGPRQMASRPRRAARAPARFGFEDGRVEPEENHESANEQSHHSNRSHRTVSRNAEVEQPRRSSRSHRTVSRDAEMGQSHRSHRTASHNSGEERLPFPPHVETNMQHLMAVQTQILQGLTTAIASFQHNAHGNGHPHMGNNRSKLTDFLRSRPPEFSQTVEPVEADDWLKDVDRKLNLVQCTPVEKMLYASHQLRGPAADWWENYCNAHPEPTNIAWDEFATAFRAAHVPESTIDMKKEEFNRLKQGNSSINEYLSQFNKLARYAPEEVDTDKKKIRKFLKGIAVGMRLQLLAHDFPTFQHMINKALLLEDARKEATEEYKKRKSNHQGNSFRGAPRPRYGQPMQYHQSVTQANRQPGYAPRPQINRPAPQPQQRAPSGNTAPNSVISFKSPQGPSAVQCFRCNQMGHYARQCPQNPTNTNSGHANGSTARTPTPAAAQSRPSSQASGQGSRASNNFGRGRVNHIQAETAQDAPDVVMGMFSVNSVPAIVLFDSGASHSFISQAFVKRNGWKTQNLRVPMIVHSPGRNIRATQICPEVNLRIEEVDFLAKPIVLDSQSLDIILGMDWLAKHKGQIDCAEKSITLQGPGGKQVRFTPNTPTASRSILTCLQVTSLESVPIVCEYPDVFPEELKRMPPDREIEFAIELAPGTAPIAKRPYRMAANELAEVKRQIEELESKGYVRPSSSPWGAPVLLVKKKDGSERMVIDYRALNEVTIKNKYPLPRIDDLFDQLKGARVFSKIDLRSGYHQLKIRSEDIPKTAFSTRYGLYEFTVMSFGLTNAPAFFMNLMNKIFMEYLDQFVVVFIDNILIYSKNEEEHAEHLRRIMEKLRDHQLFAKFSKCEFWLDRVAFLGHVISSNGVEVDPSKVEAVLAWNPPKNVSEIRSFLGLAGYYRRFIEGFSKLARPMTELLKKEKKFQWSAACEDSFQELKKRLTTAPVLTLPDIRKDFEIFCDASRQGLGCVLMQEQKVVAYASRQLRPHEANYPTHDLELAAVVHALKIWRHYLIGNRCEVYTDHKSLKYIFTQTELNMRQRKWLELIKDYDLGIHYHPGKANVVADALSHKAYCNVAQIRPDQDHLCRELEKLRLTVVQSGVPASLTVQPTLESQIREAQKDDEGIKELIKRIQEKKDTNFSIDDKGTVWCGPRICVPAKKELRDLILKEAHESAYSIHPGSTKMYQDIKAYFWWAGMKRDVAEYVALCDICQRVKAEHQRPAGLLQPLPIPEWKWEEIGMDFITGLPRTPSGYDSIWVIVDRLTKSAHFVPVKTTYDGKKLAELYMTHVVCRFGCPKKIVSDRGTQFTSRFWKQLHEALGTDLNFSTAYHPQTDGQTERVNQILEDMLRACALDFEGTWDRCLPYAEFSYNNSYQASIQMSPNEAMFGRKCRTPLCWNEVGEALVFGPDILKSAEEQVKLIRERLKTAQNRQKNYADNRRRDLEFEKGDHVYLRVSPLRGMRRFGMSGKLAPRYIGPYLITARHGEVAYQLELPEGLADVHNVFHVSQLKKCLRVPEEQVPLGNIELEKNLTYKERPIKVLEEVERQTRRKTIKFYKVQWSNHSEDEATWEREDLLRAEFPDLLP

SEQ ID NO: 192068 - protein, 62 aa, Oryza sativa
  Clone ID: PAT_MRT4530_88328C.1.pep
EQSVSDAYTVQLKSPMLNYTNNLFMESGLLSSFMTELEKYLLMERISAVYIRAAIMYTLLSC

SEQ ID NO: 192069 - protein, 175 aa, Oryza sativa
  Clone ID: PAT_MRT4530_88329C.1.pep
SATRSTTPRRRLGVPPVVPIPAAARPGPAAARTAAVLSRSPCRRSWAETGRQQQSSPHSPAATALACHRHCHHELAQARLTAGRPSRRRPPPLPLRLVDARAFPPPATPAPPRRRPRTAAARPRRGAPPGCRCRRRRPPSRRRPPLPPRPAQRPPRPCTSRAAAAACAGHGAAPA

SEQ ID NO: 192070 - protein, 1087 aa, Oryza sativa
  unsure (1)..(1087): unsure at all Xaa locations
  Clone ID: PAT_MRT4530_8832C.1.pep
MVYSWFGDRSVQPMPRFKPEYLFGVEGFVQELRTMSFVIRFGTAPLYAQIPHDRHEEKCRVKVTLNSNSEDIPSVMFEDGGGNYIHACQEVARIAIGELRDRYSDQLADTEYRYHPRQPQGSDRGSYLETEGIENDATTRHLVEMLWAMDETRAEIVLAAQDREDRNRGKICKLEDKVDRLEKELAALKGEAPPQKARIRLTARKRALFVPRYQLAPKVRVVEKEVTPALADPPVVNVSDDEGEESKRTHSKVEWGATQDDGDEPNEPSIXLQCPEDLDNGNGPNINNNNTNGENPTLAQVLAQQAQLLNMMMQQLQNQQNXGNNHAPPQNKLAEFLRVRPPTFSSTTNPVEAGDWLHTIEKKLDLLQCTDQEKVSFASHQLHAPAFEWWDLFRLNRTTAEPITWLEFTAAFRKTHIPSGVMSLKKKEFRSLTQGSRSVTEYLHKFNRLARYAPENVRNDEERQEKFLEGLNDELSYPLMTGEYHDFQKLVDKAIRQEDKYNRMEQKKRRIAQFKAQQGNSQRPRLTLGPQSMPQGGSSSVVRPQRQIFNNNTGNNIRNQAPRPVAVLTQQQPAKREQGSKPVVCFNCGDLGHYADKCPKPRRVKVVPTQSNSTVPASKARVNHVAAAEAQDAPDVILGTFLVNLVPATVLFDSGATHSFLSMSFAGNHGMEVEDLRRPLMVSTPSNQALSLQRSPSVRIEIQGVPFLANLILLESKDLDVILGMDWLARHKGVIDCANRKVTLTSNDGRVVTVHALFFESLRSRLNQIXTLEKIPIVREYPNVFPDDLPGYPPXKDIEFRIDLVPXTTPIHKRPYRMAANELAEVKRQVDDLLQKGYIRPSSSPWGAPVIFVEKKDHTQRMCVDYRALNDVTIKNKYPLPRIDDLFDQLKGATVFSKIDLRSGYHQLRIKEEDIPKPAFTTSKVFMEYLDKFVVVFIDDILIYSRTKEEHEEHLRLALEKLQEHQLYAKFSKCEFWLSEVKFLGHVFSAESAVDPSNVESVTNWKQPKIVSEIRSFLGLAGYYRRFIENFSKIDKPMTRLLQKEVEYKWSEECVTTGNNPTGFPDVRALILVPGGKVHQKLIQFRV

SEQ ID NO: 192071 - protein, 1516 aa, Oryza sativa
  Clone ID: PAT_MRT4530_88330C.1.pep
MVNDGEQALTIAPAAAADSSAEPARHVGGGGGGGGGLAEESSDEDKGSQRFSDAEDHSWRSHSRQGSVALEDFISTCASVRSGAGDADADGGGRRKSCVSECSLGDVDLEAGLAEISKASPDTAERNCRICHLGLESAAAESGSGMFLGCSCKDDLSCAHKQCAETWFKIRGNRICEICGSTACNVVGIGDAEFIEQWNESSNTAASQMPASEPRRFWQGHRFLNFLLACMIYGAKNSSFEEILDLELFQTGDCCAIPTIIQGVCRDIAIASDSRDISLLRASLMMVVNASFSSHGFGEGHHVAQLRDLARFLGFSCPEYTGYSVDHVPPRCELSVYLYPRGGIHGAGLRPHHFTVARPTLQIAYQDLSWTALRRFAHDYSHRLGGSAFRQLPRLPSSHADARYPCPYNESRLVLTRMVELSEAQATQHDLLLEAYRSLARRYAALEARLAEEGVTSVDTVSWDSGRLCHASHLSSHSSRGSARTPSGPRSPSLRAPYSPVYSPYPHPVSPSYTPGHTPVASSRRGPRFIRTARKRVVGSSTVFRFDYPAPPPPAARAADGSRQMASRPRRAARAPARFGFEEGRVEPGANHESANEQSHHSNRSHRTASRNAEVEQPRRSNRSHHTASRNAEMEQSHRSHHAAGHNSGEERIPSPPHVENNMQHLMAVQTQILQGLAAAIAGFQHNAYGNGHPHMGNNRSKLTDFLRSRPPEFSQTVEPVEADDWLKDVDRKLNLVQCTPVEKTLYASHQLRGPAADWWENYYNAHPEPTNIACDEFATAFRAAHVPESTIDMKKEEFNRLKQGNNSVNEYLSQFNKLARYAPEEVDTDKKKIRKFLKGIAVGMRLQLLAHDFPTFQHMINKALLLEDARKEATEEYKKRKSNHQGNSSRGAPRPRYGQPMQYHQLMGHYARQCPQNPTNTNSGHANGSTARTPTLAAAQSRPSSQASGQGSRASNNFGRGRVNHIQAETAQDAPDVVMGMFSVNSVPAIVLFDSGAFHSFISQAFVKRNGWKTQNLRVPMIVHSPGRNIRATQICPEVNLRIEEVDFLAKPIVLDSQSLDIILGMDWLAKHKGQIDCAERSITLQGPGGKQVRFTSNTPTASRSILTCLQVTSLESVPIVCDYPDVFPEELASMPPDREIEFAIELAPGTAPIAKRPYRMAANELAEVKRQIEELESKGYVRPSSSPWGAPVLLVKKKDGSERMVIDYRALNEVTIKNKYPLPRIDDLFDQLKGARVFSKIDLRSGYHKLKIRYEDIPKTAFSTRYGLYEFTVMSFGLTNAPAFFMNLMNKIFMEYLDQFVVVFIDDILIYSKNEEEHAEHLRLIMGKLKDHQLFAKFSKCEFWLDRVAFLGHVISSNGVEVDPSKVEAVLAWNPPKNVSEIRSFLGLAGYYRRFIEGFSKLARHMTELLMKEKKFEWSAACEDGFQEMKNRLTTAPVLTLPDIRKDFEIFCDASRQGLGCVLMQERKVVAYASRQLRPHEVNYLTHDLELAAVVHALKIWRHYLIGNRCEVYT

SEQ ID NO: 192072 - protein, 1382 aa, Oryza sativa
  Clone ID: PAT_MRT4530_88331C.1.pep
MASRPRRAARAPARFGFEDGRVEPEENHESANEQSHHSNRSHRTASRNAEVEQPRRSSRSHRTVSRNAEMEQSHRSHRTASHNSGEERLPFPPHVENNMQHLMAVQTQILQGLAAAVAGFQHNAHGNGHPHMSNNRSKLTDFLRSRPPEFSQTIEPVEADDWLKDVDRKLNLVQCTPVEKTLYASHQLRGPAADWWENYCNAHPEPTNIAWDEFATAFRAAHVPESTIDMKKEEFNRLKQGNSSVNEYLSMFNKLARYAPEEVDTDKKKIRKFLKGIAVGMRLQLLAHDFPTFQHMINKALLLEDARKEATEEYKKRKSNHQGNSSRGVPRPRYGQPMQYHQSVTQANHQPGYAPRPQMNRPAPQPQQRAPSGNTAPNSVTSFKSPQGPSAVQCFRCNQMGHYARQCPQNPTNTSLGHANGSTARTPTPAAAQSRPSSQASGQVHSPGRNIRATQVCPGVNLRIEEVDFLAKPIVLDSQSLDIILGMDWLAKHKGQIDCAEKSITLQGPGGKQVRFTSNTPTASRSILTCLQVTSLESVPIVCEYPDVFPEELTSMPPDREIVFAIELAPGTAPIAKRPYRMAANELAEVKRQIEELEGKGYVRPSSSPWGAPVLLVKKKDGSERMLDQFVVVFIDDILIYSKNEEEHAEHLRLIMEKLRDHQLFAKFSKCEFWLDRVAFLGHVISSNGVEVDPSKVEAVLAWNPPKNVSEIRSFLGLAGYYRRFIEGFSKLARPMTELLKKERKFQWSAACEDSFQEMKKRLTTAPVLTLPDIQKDFEIFCDASRQGLGCVLMQERKVVAYASRQLRPHEVNYPTHDLELAAVIHALKIWRHYLIGKRCEVYTDHKSLKYIFTQTELNMRQRRWLELIKDYDLGIHYHPGKANVVADALSRKAYCNVAQIRPDQDRLCRELEKLRLTVVQSGVPASLTVQPTLESQIREAQKDDEGIKELIKRIQEKKDTNFSIDDQGTVWCGPHICVPAKKELRDLILKEAHESAYSIHPRSTKMYQDIKAYFWWARMKRDVAEYVALCDICQRVKAEHQRPAGLLQPLPIPEWKWEEIGMDFITGLPRTPSGYDSIWVIVDRLTKSAHFVPVKTTFDGKKLAELYMTHVVCRFGCPKKIVSDRGTQFTSRFWKQLHEALGTDLNLSTGYHPQTDGQTERVNQILEDMLRACALDFEGTWDRCLPYAEFSYNNSYQASIQMSPNEAMFGRKCRTPLCWNEVGEALVFGLDILKAAEEQVKLIRERLKTAQNRQKNYADNRRRDLEFEKGDHVYLRVSPLRGMRRFGMSGKLAPRYIGPYLITARRGEVAYQLELPEGLADVHNVFHVSQLKKCLRVPEEQVPLGNIELEKNLTYKERPTKVLEEAERQTRKKTIKFYKVQ

SEQ ID NO: 192073 - protein, 68 aa, Oryza sativa
  unsure (1)..(68): unsure at all Xaa locations
  Clone ID: PAT_MRT4530_88332C.1.pep
MATACACTRLPLQNGPLGGNEVKDLXKWELPMRDWMEGEHLVGSQRRAPSRGGTTTSIIGVHPTTTDD

SEQ ID NO: 192074 - protein, 338 aa, Oryza sativa
  Clone ID: PAT_MRT4530_88333C.1.pep
MLPATATASAAPPPPPPLPASPGGEPHAALLLSLAYLPLRELLSCAGACRRLRDAVAGDPLLWRRVAVAAPPLARRLTDEALLALTGRAGGTLRSLRLLGCTRVSDAGLLRVVERNPGITEILSMESSTLLKDTMISTRAKIYKLYMPRCTGLTAEGVVKIVQVLYECKGNLNRIRLHGICRMTKHHLDAISSAMCKGNQQEDDQSLFYSHRVHEVLNTNDERRIDVDVCPMCTNVRLVFDCTRDGCRRKDSWAQCRGCFFCVARCETCGGCIDLEELSETELACSDFLCMECWLPLPKCSTCNRPYCKRHENLKDSELFIDHVKFSGCRLHGLVQLV

SEQ ID NO: 192075 - protein, 49 aa, Oryza sativa
  Clone ID: PAT_MRT4530_88334C.1.pep
MAARRGEAEFTDARGPPSGVAERRMSRRYIGYDRRSDLTETVPAKPMHL

SEQ ID NO: 192076 - protein, 1852 aa, Oryza sativa
  Clone ID: PAT_MRT4530_88335C.1.pep
MAVNASFSSHGFGEGHHVAQLRDLARFLGFSCPEYTGYSVDRVPPHCELSVYLYPRGGIHGVGLRPHHFTVARPTLQIAYQDLSWTALRRLAHDYGHRLGGSAFRQLPRLPSGHSDARYPCPYSESQPVLTRMVELSEAQATQHDLLLEAYRSLARRYAALEARLAEEGVTSVDTISWDSGRLCHASHLSSHSSRGSARTPSGPRSPSSRAPYSPVYSPYPHPVSPSYTPGHTPVASSRRGPRFIRTARKRVVGSSTVFRFRHPAPPPPAARAAAGPRQSGSPRRCAHSQARRSSVTSPHPLYQMASRPRRTARAPVRFGFDDGRVEAEANHEPANEHSHHSNRSHRTVSRDAEVEQPRRSNRSHRTVSREAELEQSHRSHHTASHNSGGERLPSPPHVENNMQHIMAVQTQILQGLTTAIASFQHNAHGNGHPHVGNNRSKLTDFLRSRPPEFSQTVEPVEADDWLKDVDRKLNLVQCTPVEKTLYASHQLRGPAADWWENYCNAHPEPTNIAWDEFAAAFRAAHVPESTIDMKKEEFNRLKQGHSSVNEYLSQFNKLARYAPEEVDTDKKKIRKFLKGIAVGMRLQLLAHDFPTFQHMINKALLLEDARKEATEEYKKRKSNHQGNSSRGAPRPRYDKPSGTSATEACPSGNTAPNSVTSFKSPQGPSAVQCFRCNQMGHYARQCPQNPTNTNSGHANGSTARTPTPAAAQSRPSSQASGQGSRASNHFGRGRVNHIQAETAQDAPDVVMGMFSVNSVPAIVLFDSGASHSFISQAFVKRNGWKTQNLRVPMIVHSPGRNIRATQICPEVNLRIEEVDFLAKPIVLDSQSLDIILGMDWLAKHKGQIDCAEKSITLQGPGGKQVRFTPNTPTASRSILTCLQVTSLESVPIVCEYPDVFPEELTRMPPDREIEFAIELAPGTAPIAKRPYRMAANELAEVKRQIEELESKGYVRPSSSPWGAPVLLVKKKDGSERMVIDYRALNEVTIKNKYPLPRIDDLFDQLKGARVFSKIDLRSGYHQLKIRSEDIPKTAFSTRYGLYEFTVMSFGLTNAPAFFMNLMNKIFMEYLDQFVVVFIDDILIYSKNEEEHAEHLRLIMEKLRDHQLFAKFSKCEFWLDRVAFLGHVISSNGVEVDPSKVEAVLAWNPPKNVSEIRSFLGLAGYYRRFIEGFSKLARPMTELLKKEKKFQWSTACEDSFQEMKKRLTTAPVLTLPDIRKDFEIFCDASRQGLGCVLMQERKVVAYASRQLRPHEVNYPTHDLELAAVIHALKIWRHYLIGNRCEVYTDHKSLKYIFTQTELNMRQRRWLELIKDYDLGIHYHPGKANVVADALSRKAYCNIAQIRPDQGQLCRELEKLRLTVVQSGVPASLTVQPTLESQIREAQKEDEGIKELIERIQEKKDTNFSIDDQGTVWYGPRICVPAKKELRDLILKEAHESAYSIHPGSTKMYQDIKAYFWWAGMKRDVAEYVALCDICQRVKAEHQRPAGLLQPLPIPEWKWEEIGMDFITGLPRTPSGYDSIWVIVDRLTKSAHFVPVKTTYDGKKLAELYMTHVVCRFGCPKKIVSDRGTQFTSRFWKQLHEALGTDLNFSTAYHPQTDGQTERVNQILEDMLRACALDFEGTWDRCLPYAEFSYNNSYQASIQMSPNEAMFGRRCRTPLCWNEVGEALVFGPDILKSAEEQVKLIRERLKTAQNRQKNYADNRRRDLEFEKGDHVYLRVSPLRGMRRFGMSGKLAPRYIGPYLITARRGEVAYQLELPEGLADVHNVFHVSQLKKCLRVPEEQVPLGNIELEKNLTYKERPIKVLEEAERQTRRKTIKFYKVQWSNHSEDEATWEREDLLRAEFPELLP

SEQ ID NO: 192077 - protein, 572 aa, Oryza sativa
  unsure (1)..(572): unsure at all Xaa locations
  Clone ID: PAT_MRT4530_88336C.1.pep
MSKRTLFNYYSSGSSSTPTASEDDENTRQQKLARVEFTCLDIVSDPGTCKPIDEYPFEIRDQVKRAFVLRGPTQPVGYTFPCKWQSASKIDPKVRVQIIFQTCLGLYWDSMAHVKCSGSLAIFCSSIVLIGSHMDGFSYAQPSSQSTSKDQHGSNINSALKVLNLVPRKADYDKVGGPCHHQLIHDCMNDILGVQSNHTIHKGNGVTFNSCSNPAQAKFDSFVSNNGSALRSRTRFIKEDMFMLIMELHRKGETSTDQSILAAAMSSCADRQMFTQGTQLHGLLVKVGCDSTVFIGSSLITLYSRCSQLESSYLVFQTMPTKNTVSWTAMISGFALHNRVEPCLHLFASMRLSSCKPNDITFATLFSVCTNHALLALGKSVHALQMRMGFHSYVHVSNALLSMYAKCGCIDEAQSIFGFIACKDLVSWNAMIFGCSQYGLAKHCLDLLKEMERQHIVPDALAFLRVGFSGRHGRLVEEGRRCSKTIFXHRRKPGLDPYSGLLDLPGRAALLEEAWDSIQTMPIPAKPVIWGSLPGTRRVYRKNAIAIDTAENVCNHEPGYFSNQIQVSNLYT

SEQ ID NO: 192078 - protein, 268 aa, Oryza sativa
  unsure (1)..(268): unsure at all Xaa locations
  Clone ID: PAT_MRT4530_88337C.1.pep
TATERGGGRRLTDGGGGDDGVRRNVARRGAAAPRAAARRREGGCAAARRQRRGGGEGENGERGGGVVWGGMATGGXIYRARGGVAGPNGDGMARCAGRVATVTRGDAGLGVATRRAGGAARGSARGSARQDGRDGDRRAAXRRQRRVMXRARRGAARVTATGDSDARGAARGAGREASRHGARRGGAAWGSGLEGAAARRRRLAARGDGDATATXARRGSGDGMXRRRRAARQRRRDVTAMAARGARRRDGAWRGSDTGRDAMRRAQS

SEQ ID NO: 192079 - protein, 43 aa, Oryza sativa
  Clone ID: PAT_MRT4530_88338C.1.pep
KKKKKKKKKKKKKKKKKKKKKKKKKKKYHKKKENKRTPNGKYD

SEQ ID NO: 192080 - protein, 515 aa, Oryza sativa
  unsure (1)..(515): unsure at all Xaa locations
  Clone ID: PAT_MRT4530_88339C.1.pep
MDKNCGCKRVHIDMESIKNVPLWDRTTFQDLANVMGVKKTTLYKRYKEDLEFVFARDIGGQTNDIGPVKQATSWWSREAYSKSSTLVSPLTSLDIGASSSTYTALSTINVMFDDQLEQFEEEDLALAINKLSRARIVSGSGKEELRRAKTQDPRPKKEDNGDKFKDDKPKSRFKGRRDKFKDNKPKILRVMKTKTRERTSQAYASWLMVNQIQSMKTMKDANVPHDSRLKSFLALGVVMLLTPKFDQSTTLGASPPSLPRLLLIIRRNLAPNVGLHRFSISGQGALVVRKENMWIVDSWCSRHMTGDKSWFSSLKEASRMDSIIFGGTTSVVLATTPVKILHMDTIGPARVQYVGGRWYVLVIVDDFSRNYCVFFMIYMDDIIFGCSSYALVVEFSEIMRREFKLSMMGDLSYFLDCKLSEYLKVVHQMKYIKNLLRRFKMQNCKPISTPIGSTTVLDPEENDEVVYQKEYKSXSLLYHTASMPDIQFVVCFYTRFXASPRVSHRQAVKQIMRVF

SEQ ID NO: 192081 - protein, 111 aa, Oryza sativa
  unsure (1)..(111): unsure at all Xaa locations
  Clone ID: PAT_MRT4530_8833C.1.pep
PTHPGKGGRDXEFGWALRRPMRLPDSPRHERGLPAALRGVGVKPEVWCAWLEGVMRRVLSRPLSDVDLNVNIVVCVPRLVLDGDFNTHSAWNSIREFLGVTQPHCAVNLAF

SEQ ID NO: 192082 - protein, 116 aa, Oryza sativa
  Clone ID: PAT_MRT4530_88340C.1.pep
RPLARACAPPCASTGRAAAHLPVSRACRRPPGHLHSTHSIPPSPPPPPPHFSTRLLRRRPLPGLARHAPHVPTAPRPPPFTPTGCAAAPVDAPPPTARLTTRERERGEEGKRKRKR

SEQ ID NO: 192083 - protein, 60 aa, Oryza sativa
  Clone ID: PAT_MRT4530_88341C.1.pep
GQSLFIAVRCHKEGLIRRSLSYSLDGYHQVPSTFRKHELMMRDPICEHPATLAPGVHTEL

SEQ ID NO: 192084 - protein, 127 aa, Oryza sativa
  unsure (1)..(127): unsure at all Xaa locations
  Clone ID: PAT_MRT4530_88342C.1.pep
DHKWHKKKKEDHWDWPPVPWASKKSHTKXGLEKALGLQVPEAVQTDRLSRTRSWTCNKEXCAARGPTQGEPYNGWYAPAPPVARSLXAALAAMEKKNKLGGLQELKPPHLXGVIVGREKKTPPPPRK

SEQ ID NO: 192085 - protein, 167 aa, Oryza sativa
  Clone ID: PAT_MRT4530_88343C.1.pep
HRVIKLTIRINLMVHHNHISVAQKGITSYQYKTLEIRRGGGGGEYRPESTLMEIGRGRRSCAVLGTGHLHGSHGNWRGRATGRVRVGMREKKREDKGKRRRKEGERRRRRHPAGQPGRGGGDAPYNWGAAPQPLCATAPWREESEKEKGKNEMKRRTRIREKRRKVG

SEQ ID NO: 192086 - protein, 49 aa, Oryza sativa
  Clone ID: PAT_MRT4530_88344C.1.pep
LIHHGIRPGGGSPEKVRNRAGRTIWRSVECPTSLDGYVDLLSSGAECRG

SEQ ID NO: 192087 - protein, 111 aa, Oryza sativa
  Clone ID: PAT_MRT4530_88345C.1.pep
MRMRGLTRSSVVCHRAAAAPYCHTGVMSSPPSCQSGSGRVIDDLLAVCRPNSLQSRQTTASDAAAVLEGPVHRAVDTVADNEWERGNPNSPLLLLGHLGLPVGPVYLRLTE

SEQ ID NO: 192088 - protein, 81 aa, Oryza sativa
  Clone ID: PAT_MRT4530_88346C.1.pep
LLCPPPSQYPPGLPNAALEPTIDHHHGLRRLRPLVPCCTLSAHLIVFGLRAPPLRGLRVLATLLTLFGLRTSSAQAPIRYN

SEQ ID NO: 192089 - protein, 84 aa, Oryza sativa
  Clone ID: PAT_MRT4530_88347C.1.pep
MGRRHHPDELGAVGLRLRVPGRSMTVANVAAQIRVGVSRLNAMAMHCEWPKRSSGDSGLSMRDWWLDASIPFRISYQKSFDALC
